United States Patent Application Publication US 2007/0009899 A1 - sequence listing, part 6

SEQ ID NO: 88804 - DNA, 25 bp, Canis familiaris
ccatgcggtgaagccctgggcttgg

SEQ ID NO: 88805 - DNA, 25 bp, Canis familiaris
ccatacagtgacttctcctgggagg

SEQ ID NO: 88806 - DNA, 25 bp, Canis familiaris
ccaggctggacaattcctggaagga

SEQ ID NO: 88807 - DNA, 25 bp, Canis familiaris
ccatggcttatcactcgggctatgg

SEQ ID NO: 88808 - DNA, 25 bp, Canis familiaris
ccaggctgttcagttgctggcactg

SEQ ID NO: 88809 - DNA, 25 bp, Canis familiaris
ccaggcatgttcctgggaagcccct

SEQ ID NO: 88810 - DNA, 25 bp, Canis familiaris
ccaggagcaacactcggaaggccgc

SEQ ID NO: 88811 - DNA, 25 bp, Canis familiaris
ccagtggaaatatgtaagcccaggg

SEQ ID NO: 88812 - DNA, 25 bp, Canis familiaris
gccagggacttatcttggccggtgg

SEQ ID NO: 88813 - DNA, 25 bp, Canis familiaris
ccatgtgcagacttgaccttggccc

SEQ ID NO: 88814 - DNA, 25 bp, Canis familiaris
ccatgcgcaagcagacgtggtgccc

SEQ ID NO: 88815 - DNA, 25 bp, Canis familiaris
ccatggataccagcgggtcctggct

SEQ ID NO: 88816 - DNA, 25 bp, Canis familiaris
ccagtttctcagtctggagtcctgc

SEQ ID NO: 88817 - DNA, 25 bp, Canis familiaris
ccagtttaagttcgagtgctatttc

SEQ ID NO: 88818 - DNA, 25 bp, Canis familiaris
gccatatttaactggaacctttgta

SEQ ID NO: 88819 - DNA, 25 bp, Canis familiaris
ccatgttatccctgttacttttgta

SEQ ID NO: 88820 - DNA, 25 bp, Canis familiaris
ccaggtgccaccagttactttggaa

SEQ ID NO: 88821 - DNA, 25 bp, Canis familiaris
ccaggtgccccttgataaccttaga

SEQ ID NO: 88822 - DNA, 25 bp, Canis familiaris
ccaggtgcccccaaaagtgttagag

SEQ ID NO: 88823 - DNA, 25 bp, Canis familiaris
ccaggtgacctccggagatggttcg

SEQ ID NO: 88824 - DNA, 25 bp, Canis familiaris
ccaggtcaccctggaggtgtgcacc

SEQ ID NO: 88825 - DNA, 25 bp, Canis familiaris
ccacctgggcctcgaggtgaaccag

SEQ ID NO: 88826 - DNA, 25 bp, Canis familiaris
ccatgtttgtgatgggcgtgaacca

SEQ ID NO: 88827 - DNA, 25 bp, Canis familiaris
ccagttctcagttggaggtacagcc

SEQ ID NO: 88828 - DNA, 25 bp, Canis familiaris
ccatgtctaagcacagggaagaggc

SEQ ID NO: 88829 - DNA, 25 bp, Canis familiaris
ccagttcaaaacagatatcagggat

SEQ ID NO: 88830 - DNA, 25 bp, Canis familiaris
ccagtccagtaattcctgtatggga

SEQ ID NO: 88831 - DNA, 25 bp, Canis familiaris
ccagtccttgtatgcacttcaggga

SEQ ID NO: 88832 - DNA, 25 bp, Canis familiaris
ccagtactcatttgcaactatcatg

SEQ ID NO: 88833 - DNA, 25 bp, Canis familiaris
ccagtactttgctgttattgccgcc

SEQ ID NO: 88834 - DNA, 25 bp, Canis familiaris
ccaccgctgttcttttattgccggg

SEQ ID NO: 88835 - DNA, 25 bp, Canis familiaris
ccactggtctggcttttttaggctg

SEQ ID NO: 88836 - DNA, 25 bp, Canis familiaris
ccacggtacgtgtttatttcacttg

SEQ ID NO: 88837 - DNA, 25 bp, Canis familiaris
ccacgttcctggttcagtttcagta

SEQ ID NO: 88838 - DNA, 25 bp, Canis familiaris
ccatgtttccagaattcgttgttgt

SEQ ID NO: 88839 - DNA, 25 bp, Canis familiaris
ccatcttccatactttctgtgggtg

SEQ ID NO: 88840 - DNA, 25 bp, Canis familiaris
ccatcttccatccactatcattgtg

SEQ ID NO: 88841 - DNA, 25 bp, Canis familiaris
ccatcatgaccagatattcacattc

SEQ ID NO: 88842 - DNA, 25 bp, Canis familiaris
ccatggaccacaagactctgctcca

SEQ ID NO: 88843 - DNA, 25 bp, Canis familiaris
ccagtaccaccactgttcttgatga

SEQ ID NO: 88844 - DNA, 25 bp, Canis familiaris
ccatctacaaccctgtcatctatat

SEQ ID NO: 88845 - DNA, 25 bp, Canis familiaris
ccagtacaatcctctcctaagtttg

SEQ ID NO: 88846 - DNA, 25 bp, Canis familiaris
ccacttacactgtgtcccaggtatt

SEQ ID NO: 88847 - DNA, 25 bp, Canis familiaris
ccatcttgtaagttccccaggaatt

SEQ ID NO: 88848 - DNA, 25 bp, Canis familiaris
ccacttggggatccacccagagttc

SEQ ID NO: 88849 - DNA, 25 bp, Canis familiaris
gcagtctaggaggtacggtactttc

SEQ ID NO: 88850 - DNA, 25 bp, Canis familiaris
gacttccggaggtcgtggactttat

SEQ ID NO: 88851 - DNA, 25 bp, Canis familiaris
gcctccctcgggagtgggtgtttgg

SEQ ID NO: 88852 - DNA, 25 bp, Canis familiaris
gccacgttcgggaatggccgttttg

SEQ ID NO: 88853 - DNA, 25 bp, Canis familiaris
ccaggatgggggcaggacggcctta

SEQ ID NO: 88854 - DNA, 25 bp, Canis familiaris
ccagaagtgggactgggcacccctt

SEQ ID NO: 88855 - DNA, 25 bp, Canis familiaris
ccagagcgggtgccgggaacaactg

SEQ ID NO: 88856 - DNA, 25 bp, Canis familiaris
ccaggcgtgggctggcgagacaggg

SEQ ID NO: 88857 - DNA, 25 bp, Canis familiaris
ccaggactggctcaccggaaaggag

SEQ ID NO: 88858 - DNA, 25 bp, Canis familiaris
ccatggaagaccccacggaaaagat

SEQ ID NO: 88859 - DNA, 25 bp, Canis familiaris
ccagaggcgacgccccaggagaaaa

SEQ ID NO: 88860 - DNA, 25 bp, Canis familiaris
ccagggggcaccacaggatcaaatg

SEQ ID NO: 88861 - DNA, 25 bp, Canis familiaris
gccagaggggctgattcggacttgg

SEQ ID NO: 88862 - DNA, 25 bp, Canis familiaris
ccagagggtgctgttggtggctgtc

SEQ ID NO: 88863 - DNA, 25 bp, Canis familiaris
ccagtgggatgccaagggtccttct

SEQ ID NO: 88864 - DNA, 25 bp, Canis familiaris
ccatgtggctatgaattgtgttcgc

SEQ ID NO: 88865 - DNA, 25 bp, Canis familiaris
ccaggaactgcttcctgatgtatcg

SEQ ID NO: 88866 - DNA, 25 bp, Canis familiaris
ccaggacagctgacaccgtcactgg

SEQ ID NO: 88867 - DNA, 25 bp, Canis familiaris
ccagtattcattgccgtcgctggat

SEQ ID NO: 88868 - DNA, 25 bp, Canis familiaris
ccagtttcatttgcacctctagatg

SEQ ID NO: 88869 - DNA, 25 bp, Canis familiaris
ccaggtgtccttgaactctggctac

SEQ ID NO: 88870 - DNA, 25 bp, Canis familiaris
ccaggtgatggtgattacttgttga

SEQ ID NO: 88871 - DNA, 25 bp, Canis familiaris
ccagcaggtggtggtgtactccttg

SEQ ID NO: 88872 - DNA, 25 bp, Canis familiaris
ccaggaggcgagtgatcacccttga

SEQ ID NO: 88873 - DNA, 25 bp, Canis familiaris
ccaggagggatgggcctttcttgaa

SEQ ID NO: 88874 - DNA, 25 bp, Canis familiaris
ccaggggcaatgaagctctgtctcg

SEQ ID NO: 88875 - DNA, 25 bp, Canis familiaris
ccagctgtgatgctgattcttggcc

SEQ ID NO: 88876 - DNA, 25 bp, Canis familiaris
ccatgtgtattgacttctggctgcc

SEQ ID NO: 88877 - DNA, 25 bp, Canis familiaris
ccatcatgctaagtccctactgcag

SEQ ID NO: 88878 - DNA, 25 bp, Canis familiaris
ccatcctccatcatcaatgatccag

SEQ ID NO: 88879 - DNA, 25 bp, Canis familiaris
ccatcttccagcatccagtggagct

SEQ ID NO: 88880 - DNA, 25 bp, Canis familiaris
ccatctctccatccatacagtaggc

SEQ ID NO: 88881 - DNA, 25 bp, Canis familiaris
ccatctccagatccaacatatttgt

SEQ ID NO: 88882 - DNA, 25 bp, Canis familiaris
ccatcctgcagagcacactcaattt

SEQ ID NO: 88883 - DNA, 25 bp, Canis familiaris
ccatcccacgctaactacatatata

SEQ ID NO: 88884 - DNA, 25 bp, Canis familiaris
ccatccacacgctgcacagtgaaat

SEQ ID NO: 88885 - DNA, 25 bp, Canis familiaris
ccatccagacccttcagtgaagctt

SEQ ID NO: 88886 - DNA, 25 bp, Canis familiaris
ccatcctggcccagagctatagctg

SEQ ID NO: 88887 - DNA, 25 bp, Canis familiaris
ccatcctgcgtctggacttggctgg

SEQ ID NO: 88888 - DNA, 25 bp, Canis familiaris
ccatcctgcgtctggacttggctgg

SEQ ID NO: 88889 - DNA, 25 bp, Canis familiaris
ccatccggatcacggcaatgcggct

SEQ ID NO: 88890 - DNA, 25 bp, Canis familiaris
ccagcaaggacactgagcaagagag

SEQ ID NO: 88891 - DNA, 25 bp, Canis familiaris
ccagaagtaccttgtcagtcaatgt

SEQ ID NO: 88892 - DNA, 25 bp, Canis familiaris
ccatccgtaccaagctgcagtaaca

SEQ ID NO: 88893 - DNA, 25 bp, Canis familiaris
ccatccgtaccaagctgcagaacaa

SEQ ID NO: 88894 - DNA, 25 bp, Canis familiaris
ccaggacgacgcaggcatgtacatc

SEQ ID NO: 88895 - DNA, 25 bp, Canis familiaris
ccagagtatacgagagctttctagg

SEQ ID NO: 88896 - DNA, 25 bp, Canis familiaris
ccagacttgaggccggcctttgagc

SEQ ID NO: 88897 - DNA, 25 bp, Canis familiaris
ccatgaggtgaaggcaccctcttcc

SEQ ID NO: 88898 - DNA, 25 bp, Canis familiaris
ccatggtatgaagccagacctccct

SEQ ID NO: 88899 - DNA, 25 bp, Canis familiaris
ccaggtagagttgctcaacacccct

SEQ ID NO: 88900 - DNA, 25 bp, Canis familiaris
ccagtgggtttggccatgtcccacc

SEQ ID NO: 88901 - DNA, 25 bp, Canis familiaris
ccaggcctgtttggtcaccataaca

SEQ ID NO: 88902 - DNA, 25 bp, Canis familiaris
ccatgctcctatatgcgtatactta

SEQ ID NO: 88903 - DNA, 25 bp, Canis familiaris
ccatctcccagcagctataatcctg

SEQ ID NO: 88904 - DNA, 25 bp, Canis familiaris
ccatctccagcagctataaatcctg

SEQ ID NO: 88905 - DNA, 25 bp, Canis familiaris
ccatctccagcaagcttataatctg

SEQ ID NO: 88906 - DNA, 25 bp, Canis familiaris
ccatctgcccgaggacacagagctg

SEQ ID NO: 88907 - DNA, 25 bp, Canis familiaris
ccatggcccgggcccagattgaggt

SEQ ID NO: 88908 - DNA, 25 bp, Canis familiaris
ccatgccagctctgtggccagagtt

SEQ ID NO: 88909 - DNA, 25 bp, Canis familiaris
ccatccatgctcatgtgtgccgtga

SEQ ID NO: 88910 - DNA, 25 bp, Canis familiaris
ccatccttcttgcctggatatgaca

SEQ ID NO: 88911 - DNA, 25 bp, Canis familiaris
ccaccacatctacctggaaggcact

SEQ ID NO: 88912 - DNA, 25 bp, Canis familiaris
ccatgccctctacttggctgagaac

SEQ ID NO: 88913 - DNA, 25 bp, Canis familiaris
ccatgccctaccttgagtatgacat

SEQ ID NO: 88914 - DNA, 25 bp, Canis familiaris
ccatgccccatgcatcgaggatgat

SEQ ID NO: 88915 - DNA, 25 bp, Canis familiaris
ccatgcctgcctgggcacaggatga

SEQ ID NO: 88916 - DNA, 25 bp, Canis familiaris
ccatgtctcctgctacaagtgaaga

SEQ ID NO: 88917 - DNA, 25 bp, Canis familiaris
ccatgacaccataccacgaggacta

SEQ ID NO: 88918 - DNA, 25 bp, Canis familiaris
ccatgagccccacgaggaaacgagc

SEQ ID NO: 88919 - DNA, 25 bp, Canis familiaris
ccatgaccccaccgtgaaggacaga

SEQ ID NO: 88920 - DNA, 25 bp, Canis familiaris
ccagcccccatagaacggaagcata

SEQ ID NO: 88921 - DNA, 25 bp, Canis familiaris
ccagtccccgagtgatcgtcggaac

SEQ ID NO: 88922 - DNA, 25 bp, Canis familiaris
ccagtaccttggtgaaatctgtggc

SEQ ID NO: 88923 - DNA, 25 bp, Canis familiaris
ccagtacctggtgaaagctgtggcc

SEQ ID NO: 88924 - DNA, 25 bp, Canis familiaris
ccatgttctcgcctgaagcaagggg

SEQ ID NO: 88925 - DNA, 25 bp, Canis familiaris
ccatgctctcctcagagacgagcgc

SEQ ID NO: 88926 - DNA, 25 bp, Canis familiaris
ccatctgccagtgatcgacacagct

SEQ ID NO: 88927 - DNA, 25 bp, Canis familiaris
ccatgtgctcagtgctgtgaccagc

SEQ ID NO: 88928 - DNA, 25 bp, Canis familiaris
ccatgtcagctgctcattgaccacg

SEQ ID NO: 88929 - DNA, 25 bp, Canis familiaris
ccatgtactcgagtgatgtgcccct

SEQ ID NO: 88930 - DNA, 25 bp, Canis familiaris
ccagtatcatgggatcggctgccgc

SEQ ID NO: 88931 - DNA, 25 bp, Canis familiaris
ccagtaagtgcgggtcataagcttg

SEQ ID NO: 88932 - DNA, 25 bp, Canis familiaris
ccagtcagagtcctgcgttacaact

SEQ ID NO: 88933 - DNA, 25 bp, Canis familiaris
ccagatctgcagacggctgttgtct

SEQ ID NO: 88934 - DNA, 25 bp, Canis familiaris
gccaattgcagttaggtcattctta

SEQ ID NO: 88935 - DNA, 25 bp, Canis familiaris
ccagcaggcggagggtctgtttcag

SEQ ID NO: 88936 - DNA, 25 bp, Canis familiaris
ccagcaggaggagctctggctgttc

SEQ ID NO: 88937 - DNA, 25 bp, Canis familiaris
ccaggctgagtggccgtgacttacc

SEQ ID NO: 88938 - DNA, 25 bp, Canis familiaris
ccatggctgggaacctgactgtgaa

SEQ ID NO: 88939 - DNA, 25 bp, Canis familiaris
ccatcgcgacggtccggagatggca

SEQ ID NO: 88940 - DNA, 25 bp, Canis familiaris
ccatctgtgcaacgtcctggtgatg

SEQ ID NO: 88941 - DNA, 25 bp, Canis familiaris
ccatctgctgcagaggttcgatgag

SEQ ID NO: 88942 - DNA, 25 bp, Canis familiaris
ccatgtgctgctcagacagggtgtg

SEQ ID NO: 88943 - DNA, 25 bp, Canis familiaris
ccagttgctctaacatgtgggtaag

SEQ ID NO: 88944 - DNA, 25 bp, Canis familiaris
ccaggtgcatcttgaccaccgtaga

SEQ ID NO: 88945 - DNA, 25 bp, Canis familiaris
ccagggcaccgacagcgtgaaggag

SEQ ID NO: 88946 - DNA, 25 bp, Canis familiaris
ccatggagcccctgacagtgtggga

SEQ ID NO: 88947 - DNA, 25 bp, Canis familiaris
ccatgctcgcactcttgatggtgag

SEQ ID NO: 88948 - DNA, 25 bp, Canis familiaris
ccatgcccactcactgttgcatgag

SEQ ID NO: 88949 - DNA, 25 bp, Canis familiaris
ccatcccccaatgtgtgctgaggag

SEQ ID NO: 88950 - DNA, 25 bp, Canis familiaris
ccatggcggcccagtgacataggag

SEQ ID NO: 88951 - DNA, 25 bp, Canis familiaris
ccagttggccctggctacttggact

SEQ ID NO: 88952 - DNA, 25 bp, Canis familiaris
ccagattggctttcttaaatggacc

SEQ ID NO: 88953 - DNA, 25 bp, Canis familiaris
ccagcactggtcatgtctaaaggtc

SEQ ID NO: 88954 - DNA, 25 bp, Canis familiaris
ccatgactggtattgcctaacatga

SEQ ID NO: 88955 - DNA, 25 bp, Canis familiaris
ccatgatcgcctttcacataagcag

SEQ ID NO: 88956 - DNA, 25 bp, Canis familiaris
ccatgtcgcccatcacaagggagtg

SEQ ID NO: 88957 - DNA, 25 bp, Canis familiaris
ccatcccccaccctgaagtggtggt

SEQ ID NO: 88958 - DNA, 25 bp, Canis familiaris
ccatcccccagcacaggatctgggt

SEQ ID NO: 88959 - DNA, 25 bp, Canis familiaris
ccatcccggcagaaaccttgttggg

SEQ ID NO: 88960 - DNA, 25 bp, Canis familiaris
ccacaccggctattacgttccgtgg

SEQ ID NO: 88961 - DNA, 25 bp, Canis familiaris
ccacatcaaggccaaagccctacgt

SEQ ID NO: 88962 - DNA, 25 bp, Canis familiaris
ccatgccatctgtaaaaccctccag

SEQ ID NO: 88963 - DNA, 25 bp, Canis familiaris
ccatgcactcgttagaaccttcacg

SEQ ID NO: 88964 - DNA, 25 bp, Canis familiaris
ccatgcctcgtaatacactgctaga

SEQ ID NO: 88965 - DNA, 25 bp, Canis familiaris
ccatgcctctgtttagcatgcccac

SEQ ID NO: 88966 - DNA, 25 bp, Canis familiaris
ccagctctttgtggagcatctgccc

SEQ ID NO: 88967 - DNA, 25 bp, Canis familiaris
ccagtgttcacatgagattccccga

SEQ ID NO: 88968 - DNA, 25 bp, Canis familiaris
ccagtgcctacatggtggccggtac

SEQ ID NO: 88969 - DNA, 25 bp, Canis familiaris
ccagtgccaagtgacgtggcgggcc

SEQ ID NO: 88970 - DNA, 25 bp, Canis familiaris
ccaggacacgcagttctgggcgggc

SEQ ID NO: 88971 - DNA, 25 bp, Canis familiaris
ccaggagaaccttctggctcgtggg

SEQ ID NO: 88972 - DNA, 25 bp, Canis familiaris
ccaggagaacagcctatgagccact

SEQ ID NO: 88973 - DNA, 25 bp, Canis familiaris
ccagcaaatacagaagggccggtga

SEQ ID NO: 88974 - DNA, 25 bp, Canis familiaris
ccatgattaagagggacggccgggg

SEQ ID NO: 88975 - DNA, 25 bp, Canis familiaris
ccagatgaacaagggcacagatgcc

SEQ ID NO: 88976 - DNA, 25 bp, Canis familiaris
ccagggcagccaggaagcggctctg

SEQ ID NO: 88977 - DNA, 25 bp, Canis familiaris
ccagggcaactgcgaaggcctgcac

SEQ ID NO: 88978 - DNA, 25 bp, Canis familiaris
ccatggtcacctcaggtggccacat

SEQ ID NO: 88979 - DNA, 25 bp, Canis familiaris
ccatgagccacagggagaggggcct

SEQ ID NO: 88980 - DNA, 25 bp, Canis familiaris
ccaggtgcagcccgataaagagcct

SEQ ID NO: 88981 - DNA, 25 bp, Canis familiaris
ccagtgtgcccgaagaccaagtgca

SEQ ID NO: 88982 - DNA, 25 bp, Canis familiaris
ccagagatgcttcgaaaggcaagga

SEQ ID NO: 88983 - DNA, 25 bp, Canis familiaris
ccatggagccttcctgtggcaagag

SEQ ID NO: 88984 - DNA, 25 bp, Canis familiaris
ccagtatgcaccacagttggagcag

SEQ ID NO: 88985 - DNA, 25 bp, Canis familiaris
ccatgtacccaggcattgctgacag

SEQ ID NO: 88986 - DNA, 25 bp, Canis familiaris
ccatgcccacctggcagagcagaag

SEQ ID NO: 88987 - DNA, 25 bp, Canis familiaris
ccatgcccaggctgggcgccaaggc

SEQ ID NO: 88988 - DNA, 25 bp, Canis familiaris
ccaggccgagctgcgagagctaagg

SEQ ID NO: 88989 - DNA, 25 bp, Canis familiaris
ccaggccacaggacgagctgtaggg

SEQ ID NO: 88990 - DNA, 25 bp, Canis familiaris
ccagtgccggagcacctggaggagt

SEQ ID NO: 88991 - DNA, 25 bp, Canis familiaris
ccagctacgggtcacatcgtggact

SEQ ID NO: 88992 - DNA, 25 bp, Canis familiaris
ccatccgggtgccccaggatgggct

SEQ ID NO: 88993 - DNA, 25 bp, Canis familiaris
ccatgccttggtgcctgaggatggc

SEQ ID NO: 88994 - DNA, 25 bp, Canis familiaris
ccagcacctggtgtcacgaagggaa

SEQ ID NO: 88995 - DNA, 25 bp, Canis familiaris
ccagccgctggtgtagactttgaaa

SEQ ID NO: 88996 - DNA, 25 bp, Canis familiaris
ccagtcctgggatgaagcttgtgca

SEQ ID NO: 88997 - DNA, 25 bp, Canis familiaris
ccatgttctgggtgaggcaggagct

SEQ ID NO: 88998 - DNA, 25 bp, Canis familiaris
ccatggtgtgggccgcgacatggcc

SEQ ID NO: 88999 - DNA, 25 bp, Canis familiaris
ccatgagcaggaggccaggacagag

SEQ ID NO: 89000 - DNA, 25 bp, Canis familiaris
ccatgccaatgcagctctggacgac

SEQ ID NO: 89001 - DNA, 25 bp, Canis familiaris
ccatcgcatcagctctgctggaggc

SEQ ID NO: 89002 - DNA, 25 bp, Canis familiaris
ccatcgctagcgagagaagctcccc

SEQ ID NO: 89003 - DNA, 25 bp, Canis familiaris
ccaggctactgcacagacttcctgc

SEQ ID NO: 89004 - DNA, 25 bp, Canis familiaris
ccatgtctattctcaagatccacgc

SEQ ID NO: 89005 - DNA, 25 bp, Canis familiaris
ccagtcacgtatcgcgtgatctccg

SEQ ID NO: 89006 - DNA, 25 bp, Canis familiaris
ccagtacgtacgcttcgacagcgac

SEQ ID NO: 89007 - DNA, 25 bp, Canis familiaris
ccagtacctgagagtaggaaggcca

SEQ ID NO: 89008 - DNA, 25 bp, Canis familiaris
ccagtacatgcgcacgggggagggc

SEQ ID NO: 89009 - DNA, 25 bp, Canis familiaris
ccaggatcacggcctgggccggagg

SEQ ID NO: 89010 - DNA, 25 bp, Canis familiaris
ccaggctcactatcgggtctagagc

SEQ ID NO: 89011 - DNA, 25 bp, Canis familiaris
ccaggccatagatcaggtaccagag

SEQ ID NO: 89012 - DNA, 25 bp, Canis familiaris
ccagggcccaattggctatccaggt

SEQ ID NO: 89013 - DNA, 25 bp, Canis familiaris
ccaggggcaccaagagctgatccaa

SEQ ID NO: 89014 - DNA, 25 bp, Canis familiaris
ccaggggcgtcatcacattgaacaa

SEQ ID NO: 89015 - DNA, 25 bp, Canis familiaris
ccagaggacctatcacctgtacagc

SEQ ID NO: 89016 - DNA, 25 bp, Canis familiaris
ccatggcccaaatacctgtgtcagt

SEQ ID NO: 89017 - DNA, 25 bp, Canis familiaris
ccaggcccacaatacactgtatttg

SEQ ID NO: 89018 - DNA, 25 bp, Canis familiaris
ccaggcacaacttgaacacctaaaa

SEQ ID NO: 89019 - DNA, 25 bp, Canis familiaris
ccagtccagaccaagcaacctagac

SEQ ID NO: 89020 - DNA, 25 bp, Canis familiaris
ccagtccagacaaagcaaccaagac

SEQ ID NO: 89021 - DNA, 25 bp, Canis familiaris
ccagtgctaagccagaaatccagta

SEQ ID NO: 89022 - DNA, 25 bp, Canis familiaris
ccagtgtaaggccgagtgctatttc

SEQ ID NO: 89023 - DNA, 25 bp, Canis familiaris
ccagattgaagtgggaccttcttgc

SEQ ID NO: 89024 - DNA, 25 bp, Canis familiaris
ccaggatgaagagggccccctgtgc

SEQ ID NO: 89025 - DNA, 25 bp, Canis familiaris
ccaggtgaagcagctctacggcgtg

SEQ ID NO: 89026 - DNA, 25 bp, Canis familiaris
ccaggtacaggcctcacctgggggc

SEQ ID NO: 89027 - DNA, 25 bp, Canis familiaris
ccaggtacgtgcccacagtttgggc

SEQ ID NO: 89028 - DNA, 25 bp, Canis familiaris
ccaggcttcttgataagcttgtcgg

SEQ ID NO: 89029 - DNA, 25 bp, Canis familiaris
ccaggctacttttgaagcgattctt

SEQ ID NO: 89030 - DNA, 25 bp, Canis familiaris
ccagagctacgcttgtcatgcgcgt

SEQ ID NO: 89031 - DNA, 25 bp, Canis familiaris
ccagagtatctctggctcctttttt

SEQ ID NO: 89032 - DNA, 25 bp, Canis familiaris
ccatgaggttcaggtttcttatctt

SEQ ID NO: 89033 - DNA, 25 bp, Canis familiaris
gccatgagggaggttctattttttc

SEQ ID NO: 89034 - DNA, 25 bp, Canis familiaris
ccacgggagtagacttcttttctat

SEQ ID NO: 89035 - DNA, 25 bp, Canis familiaris
ccacgtgtgggaacttgtttctgcc

SEQ ID NO: 89036 - DNA, 25 bp, Canis familiaris
ccagggccggaagttcgagcgtgcc

SEQ ID NO: 89037 - DNA, 25 bp, Canis familiaris
ccatgaagtctggcaactccgacgt

SEQ ID NO: 89038 - DNA, 25 bp, Canis familiaris
ccaggagtctgcgtttccaagagat

SEQ ID NO: 89039 - DNA, 25 bp, Canis familiaris
ccagaggcactggcattgtctcggc

SEQ ID NO: 89040 - DNA, 25 bp, Canis familiaris
ccagaggcactggcattgtctcggc

SEQ ID NO: 89041 - DNA, 25 bp, Canis familiaris
ccagaggaaccatcatctgggccca

SEQ ID NO: 89042 - DNA, 25 bp, Canis familiaris
ccatggggatacgaatctgaggacc

SEQ ID NO: 89043 - DNA, 25 bp, Canis familiaris
ccaggctgacatcccacatggatgg

SEQ ID NO: 89044 - DNA, 25 bp, Canis familiaris
ccatgttcttccgatcagagaccat

SEQ ID NO: 89045 - DNA, 25 bp, Canis familiaris
ccatgccatcctgcgtctggacctg

SEQ ID NO: 89046 - DNA, 25 bp, Canis familiaris
ccagaccatgtacggctgtgacctg

SEQ ID NO: 89047 - DNA, 25 bp, Canis familiaris
ccagatcacagctgggctggaccca

SEQ ID NO: 89048 - DNA, 25 bp, Canis familiaris
ccagatatcacgggactttccagaa

SEQ ID NO: 89049 - DNA, 25 bp, Canis familiaris
ccaggctcgggggttggccgagaag

SEQ ID NO: 89050 - DNA, 25 bp, Canis familiaris
ccatgcccggctttttggcatcagg

SEQ ID NO: 89051 - DNA, 25 bp, Canis familiaris
ccatcctcgaggtgtttgcattctg

SEQ ID NO: 89052 - DNA, 25 bp, Canis familiaris
ccatgctcacgggtatttttcctca

SEQ ID NO: 89053 - DNA, 25 bp, Canis familiaris
ccagcctgaagcttaatggttatta

SEQ ID NO: 89054 - DNA, 25 bp, Canis familiaris
ccatgctctagctttaataatcatt

SEQ ID NO: 89055 - DNA, 25 bp, Canis familiaris
ccatgctcatagctgggccaacatt

SEQ ID NO: 89056 - DNA, 25 bp, Canis familiaris
ccatgtcaaaggtgcagcccttccg

SEQ ID NO: 89057 - DNA, 25 bp, Canis familiaris
ccatgtgagtgctgggactcctggc

SEQ ID NO: 89058 - DNA, 25 bp, Canis familiaris
ccatgtagtgtgacgtactcctctg

SEQ ID NO: 89059 - DNA, 25 bp, Canis familiaris
ccatgttgtgtgactggtgccctgg

SEQ ID NO: 89060 - DNA, 25 bp, Canis familiaris
ccatggtgtagttctgtcccagggc

SEQ ID NO: 89061 - DNA, 25 bp, Canis familiaris
ccagtgatgagagttcttccggaga

SEQ ID NO: 89062 - DNA, 25 bp, Canis familiaris
ccagtgtagaggcttctgcctgcca

SEQ ID NO: 89063 - DNA, 25 bp, Canis familiaris
ccagtgtagaggcttctgcctgcca

SEQ ID NO: 89064 - DNA, 25 bp, Canis familiaris
ccagtgacagggcttctcgtaattt

SEQ ID NO: 89065 - DNA, 25 bp, Canis familiaris
ccagtaactcccatctgcagataat

SEQ ID NO: 89066 - DNA, 25 bp, Canis familiaris
ccagtttccctttcacaggcaatag

SEQ ID NO: 89067 - DNA, 25 bp, Canis familiaris
ccagtcttccagttccaaaaatcag

SEQ ID NO: 89068 - DNA, 25 bp, Canis familiaris
ccagtcctgtattctccaagtaagc

SEQ ID NO: 89069 - DNA, 25 bp, Canis familiaris
ccagttctctgttcccaatgataac

SEQ ID NO: 89070 - DNA, 25 bp, Canis familiaris
ccagctttcctaacctaacagagac

SEQ ID NO: 89071 - DNA, 25 bp, Canis familiaris
ccagtgttactgctctttccaacac

SEQ ID NO: 89072 - DNA, 25 bp, Canis familiaris
ccagctgtaagctttctttctgcat

SEQ ID NO: 89073 - DNA, 25 bp, Canis familiaris
ccagctttgagtttgcgcttgcaat

SEQ ID NO: 89074 - DNA, 25 bp, Canis familiaris
ccatgttcagttcgagcgccaagat

SEQ ID NO: 89075 - DNA, 25 bp, Canis familiaris
ccatggctacttcggtgccaactgc

SEQ ID NO: 89076 - DNA, 25 bp, Canis familiaris
ccatgtgccagcatggttcacgtcc

SEQ ID NO: 89077 - DNA, 25 bp, Canis familiaris
ccagtgcgagaaagtctccctcact

SEQ ID NO: 89078 - DNA, 25 bp, Canis familiaris
ccagcggacaagcatctatcactac

SEQ ID NO: 89079 - DNA, 25 bp, Canis familiaris
ccagctgggctaccttatcccaggg

SEQ ID NO: 89080 - DNA, 25 bp, Canis familiaris
ccatgctgaggtggactgatcatca

SEQ ID NO: 89081 - DNA, 25 bp, Canis familiaris
ccatggtctctgcagctgacagcag

SEQ ID NO: 89082 - DNA, 25 bp, Canis familiaris
ccatggtcctggaatcccaggatcg

SEQ ID NO: 89083 - DNA, 25 bp, Canis familiaris
ccagggcagcagatacccaggggga

SEQ ID NO: 89084 - DNA, 25 bp, Canis familiaris
tccactggtaggaacccggggaatg

SEQ ID NO: 89085 - DNA, 25 bp, Canis familiaris
ccacggttccccacaggggagagag

SEQ ID NO: 89086 - DNA, 25 bp, Canis familiaris
ccactggtcatcttcaaaatgggga

SEQ ID NO: 89087 - DNA, 25 bp, Canis familiaris
ccactctttcgttgaaaggtgataa

SEQ ID NO: 89088 - DNA, 25 bp, Canis familiaris
ccagctttccgttgcacaaacagtg

SEQ ID NO: 89089 - DNA, 25 bp, Canis familiaris
ccagttcaacgttaccaaagtgcct

SEQ ID NO: 89090 - DNA, 25 bp, Canis familiaris
ccagctgataaaggcataccaaagg

SEQ ID NO: 89091 - DNA, 25 bp, Canis familiaris
ccagagcaaacaccatgacacacct

SEQ ID NO: 89092 - DNA, 25 bp, Canis familiaris
ccagaaatctcacttaccatccaag

SEQ ID NO: 89093 - DNA, 25 bp, Canis familiaris
ccagaagttcgtggtgctgcccacg

SEQ ID NO: 89094 - DNA, 25 bp, Canis familiaris
ccagaaagtcatctgttccctcttc

SEQ ID NO: 89095 - DNA, 25 bp, Canis familiaris
ccagagagaaccatttcctgtccct

SEQ ID NO: 89096 - DNA, 25 bp, Canis familiaris
ccaggcggtaactttatgctgttcc

SEQ ID NO: 89097 - DNA, 25 bp, Canis familiaris
ccaggggatcaattactagcatgtc

SEQ ID NO: 89098 - DNA, 25 bp, Canis familiaris
ccagtgaggatgcaagcccctggcc

SEQ ID NO: 89099 - DNA, 25 bp, Canis familiaris
ccaggaggagtacagcgccatgcgg

SEQ ID NO: 89100 - DNA, 25 bp, Canis familiaris
ccaggaggagctctcaggcctgggg

SEQ ID NO: 89101 - DNA, 25 bp, Canis familiaris
ccaggatggagcctcctggccatgt

SEQ ID NO: 89102 - DNA, 25 bp, Canis familiaris
ccagcagaagagcctccttcagcag

SEQ ID NO: 89103 - DNA, 25 bp, Canis familiaris
ccagcaagaacgtcactgtgctcag

SEQ ID NO: 89104 - DNA, 25 bp, Canis familiaris
ccatgattacatgacacatcctcaa

SEQ ID NO: 89105 - DNA, 25 bp, Canis familiaris
ccagatctaataagcccactgatac

SEQ ID NO: 89106 - DNA, 25 bp, Canis familiaris
ccaattagcatttttcacagaactt

SEQ ID NO: 89107 - DNA, 25 bp, Canis familiaris
ccacatccagtttttaagtccatta

SEQ ID NO: 89108 - DNA, 25 bp, Canis familiaris
ccactccctggacagggtccttatc

SEQ ID NO: 89109 - DNA, 25 bp, Canis familiaris
ccagttccttagaaggtgaccttat

SEQ ID NO: 89110 - DNA, 25 bp, Canis familiaris
ccagttactcattgggtggacactc

SEQ ID NO: 89111 - DNA, 25 bp, Canis familiaris
ccaggtggccctggtgaggacaacc

SEQ ID NO: 89112 - DNA, 25 bp, Canis familiaris
ccaggtgccctcacatgtgggctaa

SEQ ID NO: 89113 - DNA, 25 bp, Canis familiaris
ccatggctcccatcgtgggagcgaa

SEQ ID NO: 89114 - DNA, 25 bp, Canis familiaris
ccaggccatccaagggtagagcata

SEQ ID NO: 89115 - DNA, 25 bp, Canis familiaris
ccaggccagccagtacctgagagta

SEQ ID NO: 89116 - DNA, 25 bp, Canis familiaris
ccagcgcctgacgaaacttcgttca

SEQ ID NO: 89117 - DNA, 25 bp, Canis familiaris
ccagaccagacagacctgtccttcc

SEQ ID NO: 89118 - DNA, 25 bp, Canis familiaris
ccagactgaaccaactctacctgta

SEQ ID NO: 89119 - DNA, 25 bp, Canis familiaris
ccagagctgaactagaccaccattg

SEQ ID NO: 89120 - DNA, 25 bp, Canis familiaris
ccatgggctacatgacccacacggt

SEQ ID NO: 89121 - DNA, 25 bp, Canis familiaris
ccatgaatctcctatacacacacac

SEQ ID NO: 89122 - DNA, 25 bp, Canis familiaris
ccatgaagaccaagaagccaccacc

SEQ ID NO: 89123 - DNA, 25 bp, Canis familiaris
ccagagagaccctaagctctcgcct

SEQ ID NO: 89124 - DNA, 25 bp, Canis familiaris
ccatgagaagcaacgagagcttatg

SEQ ID NO: 89125 - DNA, 25 bp, Canis familiaris
ccagacatcatcaaggtggccaagg

SEQ ID NO: 89126 - DNA, 25 bp, Canis familiaris
ccatgagatgcaggggctggccgag

SEQ ID NO: 89127 - DNA, 25 bp, Canis familiaris
ccaggatgaccggaggccgatgtcg

SEQ ID NO: 89128 - DNA, 25 bp, Canis familiaris
ccaggacagcctggagctcctgagc

SEQ ID NO: 89129 - DNA, 25 bp, Canis familiaris
ccaggatcccactcatcctggcaag

SEQ ID NO: 89130 - DNA, 25 bp, Canis familiaris
ccaggatccggaaaccagtgccaga

SEQ ID NO: 89131 - DNA, 25 bp, Canis familiaris
ccaggtcgcatcgaagtcctgtcta

SEQ ID NO: 89132 - DNA, 25 bp, Canis familiaris
ccaggcctgacctgtcgagatgtca

SEQ ID NO: 89133 - DNA, 25 bp, Canis familiaris
ccagtgggactgagctgccaggctc

SEQ ID NO: 89134 - DNA, 25 bp, Canis familiaris
ccagtatggcctgggcatcctggcc

SEQ ID NO: 89135 - DNA, 25 bp, Canis familiaris
ccagtatggagtggaaccggccctc

SEQ ID NO: 89136 - DNA, 25 bp, Canis familiaris
ccagaaggagctgaccattggcccg

SEQ ID NO: 89137 - DNA, 25 bp, Canis familiaris
ccagaaggtctctgcctctggagta

SEQ ID NO: 89138 - DNA, 25 bp, Canis familiaris
ccaggacctgcctggcgtgaagctc

SEQ ID NO: 89139 - DNA, 25 bp, Canis familiaris
ccaggatcgtggggaggttagtctt

SEQ ID NO: 89140 - DNA, 25 bp, Canis familiaris
gccaggacgtggggcgttatcaggt

SEQ ID NO: 89141 - DNA, 25 bp, Canis familiaris
ccaggacgtgagaacctggctcctt

SEQ ID NO: 89142 - DNA, 25 bp, Canis familiaris
ccaggagagcgacgactcggctcct

SEQ ID NO: 89143 - DNA, 25 bp, Canis familiaris
ccaggccatcgatgaccttgtgcct

SEQ ID NO: 89144 - DNA, 25 bp, Canis familiaris
ccagtccttacgattactccatgat

SEQ ID NO: 89145 - DNA, 25 bp, Canis familiaris
ccatgtctcttgcgtcttattaaat

SEQ ID NO: 89146 - DNA, 25 bp, Canis familiaris
ccatgtcctgtgtgtggatgtaaag

SEQ ID NO: 89147 - DNA, 25 bp, Canis familiaris
ccagatcctgccttgttattaaaaa

SEQ ID NO: 89148 - DNA, 25 bp, Canis familiaris
ccagccgctggactttcttaaaaat

SEQ ID NO: 89149 - DNA, 25 bp, Canis familiaris
ccagacctagaagacattctcaaat

SEQ ID NO: 89150 - DNA, 25 bp, Canis familiaris
ccatgacctggaaggctcattccca

SEQ ID NO: 89151 - DNA, 25 bp, Canis familiaris
ccatggcactggaggcaagtccatc

SEQ ID NO: 89152 - DNA, 25 bp, Canis familiaris
ccaggcctggtgacaccagctctca

SEQ ID NO: 89153 - DNA, 25 bp, Canis familiaris
ccaggcctcctgaaagcagcgcctg

SEQ ID NO: 89154 - DNA, 25 bp, Canis familiaris
ccaggcctggtgccatgagcagggc

SEQ ID NO: 89155 - DNA, 25 bp, Canis familiaris
ccaggctctgggcagacaggcaggc

SEQ ID NO: 89156 - DNA, 25 bp, Canis familiaris
ccaggcactgtgtcgagagagctct

SEQ ID NO: 89157 - DNA, 25 bp, Canis familiaris
ccaggcagttcaagagcaagccccc

SEQ ID NO: 89158 - DNA, 25 bp, Canis familiaris
ccaggaggctgcagccaagcacgag

SEQ ID NO: 89159 - DNA, 25 bp, Canis familiaris
ccagggagctgccccagatgtgggc

SEQ ID NO: 89160 - DNA, 25 bp, Canis familiaris
ccaggtgagtgtggccactgggcgc

SEQ ID NO: 89161 - DNA, 25 bp, Canis familiaris
ccagggaatgtgactctcaggcccc

SEQ ID NO: 89162 - DNA, 25 bp, Canis familiaris
ccagagggctggagccagagccacc

SEQ ID NO: 89163 - DNA, 25 bp, Canis familiaris
ccatgtgccgggagaagcagcccac

SEQ ID NO: 89164 - DNA, 25 bp, Canis familiaris
ccagattcggagaagttcacccaag

SEQ ID NO: 89165 - DNA, 25 bp, Canis familiaris
ccatgtctgggatgacttcacagcc

SEQ ID NO: 89166 - DNA, 25 bp, Canis familiaris
ccatgtctgggatgacctcacagcc

SEQ ID NO: 89167 - DNA, 25 bp, Canis familiaris
ccagtctagagtacacacttcgccg

SEQ ID NO: 89168 - DNA, 25 bp, Canis familiaris
ccagtaaatcaacagctctgctgcc

SEQ ID NO: 89169 - DNA, 25 bp, Canis familiaris
ccagacacatttggctactcggcac

SEQ ID NO: 89170 - DNA, 25 bp, Canis familiaris
ccagaagatttcttggtcttgcccc

SEQ ID NO: 89171 - DNA, 25 bp, Canis familiaris
ccagggtatcctgtgactatcgcca

SEQ ID NO: 89172 - DNA, 25 bp, Canis familiaris
ccagcgggatcacagtgagctccca

SEQ ID NO: 89173 - DNA, 25 bp, Canis familiaris
ccagcgggcaagccatgtggggccc

SEQ ID NO: 89174 - DNA, 25 bp, Canis familiaris
ccaggaggcaaaaggcggaccagga

SEQ ID NO: 89175 - DNA, 25 bp, Canis familiaris
ccaggcaggacctggtgccacgagg

SEQ ID NO: 89176 - DNA, 25 bp, Canis familiaris
ccagtgaatacccgattggcaccag

SEQ ID NO: 89177 - DNA, 25 bp, Canis familiaris
ccagctctacgcctggtatggacgg

SEQ ID NO: 89178 - DNA, 25 bp, Canis familiaris
ccatgtccacaggcggatcactgac

SEQ ID NO: 89179 - DNA, 25 bp, Canis familiaris
ccagtctaggtcgagctgcactgca

SEQ ID NO: 89180 - DNA, 25 bp, Canis familiaris
ccagtcatcatggtccatccgttac

SEQ ID NO: 89181 - DNA, 25 bp, Canis familiaris
gccgtgtatttgccatcctggtaat

SEQ ID NO: 89182 - DNA, 25 bp, Canis familiaris
ccagtgtatattcctgcccagtgaa

SEQ ID NO: 89183 - DNA, 25 bp, Canis familiaris
ccagttcagtgtccgtcacgtgaag

SEQ ID NO: 89184 - DNA, 25 bp, Canis familiaris
ccagtgaagatgcctcagtcaccat

SEQ ID NO: 89185 - DNA, 25 bp, Canis familiaris
ccaggagctggcctagtccctggaa

SEQ ID NO: 89186 - DNA, 25 bp, Canis familiaris
ccagggcaggcccaggccagccagt

SEQ ID NO: 89187 - DNA, 25 bp, Canis familiaris
ccagaggcaggctcactgcaacaga

SEQ ID NO: 89188 - DNA, 25 bp, Canis familiaris
ccaggagctggcgcaaggagcgcat

SEQ ID NO: 89189 - DNA, 25 bp, Canis familiaris
ccaggacgatgcccggaagctgatg

SEQ ID NO: 89190 - DNA, 25 bp, Canis familiaris
ccaggctgtgaccgggcagagctgg

SEQ ID NO: 89191 - DNA, 25 bp, Canis familiaris
ccaggcccatccgagagcagagggg

SEQ ID NO: 89192 - DNA, 25 bp, Canis familiaris
ccaggccctgcagcgcagagaaggg

SEQ ID NO: 89193 - DNA, 25 bp, Canis familiaris
ccaggcctcagagcagagctgaacg

SEQ ID NO: 89194 - DNA, 25 bp, Canis familiaris
ccatggagtgagacacagagccacc

SEQ ID NO: 89195 - DNA, 25 bp, Canis familiaris
ccaggagctgctacaggcagagccc

SEQ ID NO: 89196 - DNA, 25 bp, Canis familiaris
ccaggagctgcacattcaactccca

SEQ ID NO: 89197 - DNA, 25 bp, Canis familiaris
ccagagaagcagattctactcccca

SEQ ID NO: 89198 - DNA, 25 bp, Canis familiaris
ccagaacggagtcctactctgcatc

SEQ ID NO: 89199 - DNA, 25 bp, Canis familiaris
ccaggccagtagaccacacctgatg

SEQ ID NO: 89200 - DNA, 25 bp, Canis familiaris
ccagagatcagttataatacactta

SEQ ID NO: 89201 - DNA, 25 bp, Canis familiaris
ccagctggcaatctcgaacacttgc

SEQ ID NO: 89202 - DNA, 25 bp, Canis familiaris
ccagcccaacttggacaactgtccc

SEQ ID NO: 89203 - DNA, 25 bp, Canis familiaris
ccagactccacttggactacattgg

SEQ ID NO: 89204 - DNA, 25 bp, Canis familiaris
ccagactccgtcacagggcatattg

SEQ ID NO: 89205 - DNA, 25 bp, Canis familiaris
ccaggccttgccaatcggtaatagt

SEQ ID NO: 89206 - DNA, 25 bp, Canis familiaris
ccaggccctgccataggcaacataa

SEQ ID NO: 89207 - DNA, 25 bp, Canis familiaris
ccagggcgtggagaccaccaagccc

SEQ ID NO: 89208 - DNA, 25 bp, Canis familiaris
ccagtgggttgaacatcctgccata

SEQ ID NO: 89209 - DNA, 25 bp, Canis familiaris
ccagtagtagtagcagcgctgccca

SEQ ID NO: 89210 - DNA, 25 bp, Canis familiaris
ccagatagatagtaacggtgccaag

SEQ ID NO: 89211 - DNA, 25 bp, Canis familiaris
ccagatcatgtttgagaccttcaac

SEQ ID NO: 89212 - DNA, 25 bp, Canis familiaris
ccagatcatgtttgagaccttcaac

SEQ ID NO: 89213 - DNA, 25 bp, Canis familiaris
ccagatcatgtttgagaccttcaac

SEQ ID NO: 89214 - DNA, 25 bp, Canis familiaris
ccagtatgactggtgtccttataag

SEQ ID NO: 89215 - DNA, 25 bp, Canis familiaris
ccagtgaattggagcattttaagaa

SEQ ID NO: 89216 - DNA, 25 bp, Canis familiaris
ccagtgtttggagtcatgtcgtaaa

SEQ ID NO: 89217 - DNA, 25 bp, Canis familiaris
ccagtccttcacttagtagtagcta

SEQ ID NO: 89218 - DNA, 25 bp, Canis familiaris
ccaggcgctccctggtactattagc

SEQ ID NO: 89219 - DNA, 25 bp, Canis familiaris
ccaggcgtcccaggaatcattgttc

SEQ ID NO: 89220 - DNA, 25 bp, Canis familiaris
ccagaaggcccagggtctttgccag

SEQ ID NO: 89221 - DNA, 25 bp, Canis familiaris
ccaggaggcccagagcgcctggaag

SEQ ID NO: 89222 - DNA, 25 bp, Canis familiaris
ccaggaaccaagggagccatgtgat

SEQ ID NO: 89223 - DNA, 25 bp, Canis familiaris
ccaaaaccaaccctggctgtcattg

SEQ ID NO: 89224 - DNA, 25 bp, Canis familiaris
ccagaggtccaaccagtggtatcaa

SEQ ID NO: 89225 - DNA, 25 bp, Canis familiaris
ccagggctgccatttgcagtggcaa

SEQ ID NO: 89226 - DNA, 25 bp, Canis familiaris
ccaggtctccattttgtcagcaatg

SEQ ID NO: 89227 - DNA, 25 bp, Canis familiaris
ccaggtcccaagttctcaggaggaa

SEQ ID NO: 89228 - DNA, 25 bp, Canis familiaris
ccaggagccagccaggtaaggagga

SEQ ID NO: 89229 - DNA, 25 bp, Canis familiaris
ccaggaccagccaagtggggaggat

SEQ ID NO: 89230 - DNA, 25 bp, Canis familiaris
ccaggctcatcggcgagtgggtgga

SEQ ID NO: 89231 - DNA, 25 bp, Canis familiaris
ccaggtactggcaacggggtgcgcc

SEQ ID NO: 89232 - DNA, 25 bp, Canis familiaris
ccaggtcttggatctggggatgctg

SEQ ID NO: 89233 - DNA, 25 bp, Canis familiaris
ccaggttggaagacggcggagcgct

SEQ ID NO: 89234 - DNA, 25 bp, Canis familiaris
ccagccatggtgcagacggaggacc

SEQ ID NO: 89235 - DNA, 25 bp, Canis familiaris
ccacattggtggaaacagaaggctc

SEQ ID NO: 89236 - DNA, 25 bp, Canis familiaris
ccacctgtggagaagcccaaggcct

SEQ ID NO: 89237 - DNA, 25 bp, Canis familiaris
ccaacctgaagtggcccagacgttt

SEQ ID NO: 89238 - DNA, 25 bp, Canis familiaris
ccaatcccagagggacccaagtact

SEQ ID NO: 89239 - DNA, 25 bp, Canis familiaris
ccaggccacaggtggactcgagtcc

SEQ ID NO: 89240 - DNA, 25 bp, Canis familiaris
ccaggctacgtcgggatcaaggccc

SEQ ID NO: 89241 - DNA, 25 bp, Canis familiaris
ccaggagacccgagtaatggccctc

SEQ ID NO: 89242 - DNA, 25 bp, Canis familiaris
ccaggagcacctggcggtacaagcc

SEQ ID NO: 89243 - DNA, 25 bp, Canis familiaris
ccagagaccctgacgagatcatgca

SEQ ID NO: 89244 - DNA, 25 bp, Canis familiaris
ccagagaccctcagcaacaagaaga

SEQ ID NO: 89245 - DNA, 25 bp, Canis familiaris
ccagaaccaccactgcaaacatggc

SEQ ID NO: 89246 - DNA, 25 bp, Canis familiaris
ccagaattcactctgccttggacat

SEQ ID NO: 89247 - DNA, 25 bp, Canis familiaris
ccaacattttttcattggccaaggc

SEQ ID NO: 89248 - DNA, 25 bp, Canis familiaris
ccaacatttttgttaatggccaagg

SEQ ID NO: 89249 - DNA, 25 bp, Canis familiaris
ccaacttactgtgtaactacatagg

SEQ ID NO: 89250 - DNA, 25 bp, Canis familiaris
ccacctaggcgtcccaatttatttg

SEQ ID NO: 89251 - DNA, 25 bp, Canis familiaris
ccacctaccaccatctagttatttc

SEQ ID NO: 89252 - DNA, 25 bp, Canis familiaris
ccactttccactcttattttatttg

SEQ ID NO: 89253 - DNA, 25 bp, Canis familiaris
ccaggttcacttctgatgttttagc

SEQ ID NO: 89254 - DNA, 25 bp, Canis familiaris
ccatggccaccttcttgattgtgat

SEQ ID NO: 89255 - DNA, 25 bp, Canis familiaris
ccagtagacctgttgtgctttgtta

SEQ ID NO: 89256 - DNA, 25 bp, Canis familiaris
ccaggagacctgtctgcgtgtgtgt

SEQ ID NO: 89257 - DNA, 25 bp, Canis familiaris
ccaggcaacgcgtctttgggctggt

SEQ ID NO: 89258 - DNA, 25 bp, Canis familiaris
ccaggcttcaggttctcaggtctgg

SEQ ID NO: 89259 - DNA, 25 bp, Canis familiaris
ccaggttgttgcatccaggatatag

SEQ ID NO: 89260 - DNA, 25 bp, Canis familiaris
ccaggctcttgcaaatccagtgatt

SEQ ID NO: 89261 - DNA, 25 bp, Canis familiaris
ccatggcctgtgagtcttgtgtttt

SEQ ID NO: 89262 - DNA, 25 bp, Canis familiaris
ccagggagcatgtgttgtgtttttg

SEQ ID NO: 89263 - DNA, 25 bp, Canis familiaris
ccagttcagcatccagtagttgttg

SEQ ID NO: 89264 - DNA, 25 bp, Canis familiaris
ccagattaggcccttggccgtgggt

SEQ ID NO: 89265 - DNA, 25 bp, Canis familiaris
ccagttgggccggatgggtgggcga

SEQ ID NO: 89266 - DNA, 25 bp, Canis familiaris
ccaggtgggcacagggaggcagggc

SEQ ID NO: 89267 - DNA, 25 bp, Canis familiaris
ccaggtgggcatctgaccagtgtgc

SEQ ID NO: 89268 - DNA, 25 bp, Canis familiaris
ccaggtccagatttcctcagtgtga

SEQ ID NO: 89269 - DNA, 25 bp, Canis familiaris
ccaggccacaatgctcctggtgtga

SEQ ID NO: 89270 - DNA, 25 bp, Canis familiaris
ccatggcccaatctgtggctgttgg

SEQ ID NO: 89271 - DNA, 25 bp, Canis familiaris
ccaggcccacagcatggggcttggc

SEQ ID NO: 89272 - DNA, 25 bp, Canis familiaris
ccaggcctccagatttgtctgtgag

SEQ ID NO: 89273 - DNA, 25 bp, Canis familiaris
ccaggctctcacgcctggtggggga

SEQ ID NO: 89274 - DNA, 25 bp, Canis familiaris
ccagacttacaccgatcgtcgggga

SEQ ID NO: 89275 - DNA, 25 bp, Canis familiaris
ccagttctacagccaacctggggcc

SEQ ID NO: 89276 - DNA, 25 bp, Canis familiaris
ccagggatggcccaatcctggtccc

SEQ ID NO: 89277 - DNA, 25 bp, Canis familiaris
ccagtgttagccattttgtgtcccg

SEQ ID NO: 89278 - DNA, 25 bp, Canis familiaris
ccagaatccagcgtttctttggcct

SEQ ID NO: 89279 - DNA, 25 bp, Canis familiaris
ccagtctaaggtctctctgtggctc

SEQ ID NO: 89280 - DNA, 25 bp, Canis familiaris
ccaggtcagggttggttgtggccga

SEQ ID NO: 89281 - DNA, 25 bp, Canis familiaris
ccagacttgggtttcttgtgtccga

SEQ ID NO: 89282 - DNA, 25 bp, Canis familiaris
ccagttctggaagcacctggtcctg

SEQ ID NO: 89283 - DNA, 25 bp, Canis familiaris
ccagaaccgtagtctcgtggtcact

SEQ ID NO: 89284 - DNA, 25 bp, Canis familiaris
ccaggacctgggttatgctggctcc

SEQ ID NO: 89285 - DNA, 25 bp, Canis familiaris
ccaggacgctgggggagctgcagct

SEQ ID NO: 89286 - DNA, 25 bp, Canis familiaris
ccaggcctgtgggggagagcactgc

SEQ ID NO: 89287 - DNA, 25 bp, Canis familiaris
ccaggggtgggggtcagcacctggt

SEQ ID NO: 89288 - DNA, 25 bp, Canis familiaris
ccagggttttgggatcagagttgag

SEQ ID NO: 89289 - DNA, 25 bp, Canis familiaris
gccaggcgttttctgagcatacctg

SEQ ID NO: 89290 - DNA, 25 bp, Canis familiaris
ccaggcgttttctgagcatacctgg

SEQ ID NO: 89291 - DNA, 25 bp, Canis familiaris
ccaccgtttgctaagacatgtcctg

SEQ ID NO: 89292 - DNA, 25 bp, Canis familiaris
ccaccaggtcgcatcgaagtcctgt

SEQ ID NO: 89293 - DNA, 25 bp, Canis familiaris
ccagaaggccacactcgtgtgcctg

SEQ ID NO: 89294 - DNA, 25 bp, Canis familiaris
ccagcaagtacaacatcaaggtcct

SEQ ID NO: 89295 - DNA, 25 bp, Canis familiaris
ccagcagatgtggatcagcaagcag

SEQ ID NO: 89296 - DNA, 25 bp, Canis familiaris
ccagctgaggctacgcataggggtc

SEQ ID NO: 89297 - DNA, 25 bp, Canis familiaris
ccagccaggttgtcaaggcacaggc

SEQ ID NO: 89298 - DNA, 25 bp, Canis familiaris
ccagaccatccaagaaggacagcgc

SEQ ID NO: 89299 - DNA, 25 bp, Canis familiaris
ccagcacgacctggtggctagcagc

SEQ ID NO: 89300 - DNA, 25 bp, Canis familiaris
ccagatcaacctggagctctacgcg

SEQ ID NO: 89301 - DNA, 25 bp, Canis familiaris
ccagacagacctggagcctggcagt

SEQ ID NO: 89302 - DNA, 25 bp, Canis familiaris
ccagagtcgcctgagccaggcacag

SEQ ID NO: 89303 - DNA, 25 bp, Canis familiaris
ccaggcttcttccagaaagcatctg

SEQ ID NO: 89304 - DNA, 25 bp, Canis familiaris
ccagggccatcccagcaagagatcg

SEQ ID NO: 89305 - DNA, 25 bp, Canis familiaris
ccagatgcaccggcagaaagcagat

SEQ ID NO: 89306 - DNA, 25 bp, Canis familiaris
ccaggcaccccaaaaagcaggcata

SEQ ID NO: 89307 - DNA, 25 bp, Canis familiaris
ccagaaccgccaaagaaaaataatg

SEQ ID NO: 89308 - DNA, 25 bp, Canis familiaris
ccaggtccccacagaaacagacaat

SEQ ID NO: 89309 - DNA, 25 bp, Canis familiaris
ccagttcccccaggtaaatgcaaat

SEQ ID NO: 89310 - DNA, 25 bp, Canis familiaris
ccagtgacccccttgtatttataag

SEQ ID NO: 89311 - DNA, 25 bp, Canis familiaris
ccaggaccccagaatgtgaccttat

SEQ ID NO: 89312 - DNA, 25 bp, Canis familiaris
ccacccccaaagagatgccttgata

SEQ ID NO: 89313 - DNA, 25 bp, Canis familiaris
ccaccgatccagaggcctatgttgt

SEQ ID NO: 89314 - DNA, 25 bp, Canis familiaris
ccaccggccaatttgtcatttgtta

SEQ ID NO: 89315 - DNA, 25 bp, Canis familiaris
ccagcgcggaaatttgtgtttggac

SEQ ID NO: 89316 - DNA, 25 bp, Canis familiaris
ccaggctgatggttttgttgttgtt

SEQ ID NO: 89317 - DNA, 25 bp, Canis familiaris
ccaggatttatcgattgtttgtcta

SEQ ID NO: 89318 - DNA, 25 bp, Canis familiaris
ccagtgctttcaaatttttttcacg

SEQ ID NO: 89319 - DNA, 25 bp, Canis familiaris
ccagtgacttcagtattttctttga

SEQ ID NO: 89320 - DNA, 25 bp, Canis familiaris
ccaggacccatgatttctctcctgc

SEQ ID NO: 89321 - DNA, 25 bp, Canis familiaris
ccaggggagcaacttccatcaactc

SEQ ID NO: 89322 - DNA, 25 bp, Canis familiaris
ccaggagcgagaccccactaacatc

SEQ ID NO: 89323 - DNA, 25 bp, Canis familiaris
ccaggagcgagatccctccaaaatc

SEQ ID NO: 89324 - DNA, 25 bp, Canis familiaris
ccaggagcaagaggagcggagcaaa

SEQ ID NO: 89325 - DNA, 25 bp, Canis familiaris
ccagtgccaggggaggaacaacatg

SEQ ID NO: 89326 - DNA, 25 bp, Canis familiaris
ccagctcctggggacagtgtctagg

SEQ ID NO: 89327 - DNA, 25 bp, Canis familiaris
ccagctacgggcacgttctggagcg

SEQ ID NO: 89328 - DNA, 25 bp, Canis familiaris
ccaaaggggccgctgcgaggacggc

SEQ ID NO: 89329 - DNA, 25 bp, Canis familiaris
ccaggagtgtggtctggcgtgggcc

SEQ ID NO: 89330 - DNA, 25 bp, Canis familiaris
ccaggagtggagcctgcggcttaat

SEQ ID NO: 89331 - DNA, 25 bp, Canis familiaris
ccaggcagtaggtctgggctctttc

SEQ ID NO: 89332 - DNA, 25 bp, Canis familiaris
ccagtcgtgatttctgaggctcctt

SEQ ID NO: 89333 - DNA, 25 bp, Canis familiaris
ccagtcagtgtggccatgggatccc

SEQ ID NO: 89334 - DNA, 25 bp, Canis familiaris
ccaggcagctgtgagtgtggacccc

SEQ ID NO: 89335 - DNA, 25 bp, Canis familiaris
ccagcactgctggggatttacccca

SEQ ID NO: 89336 - DNA, 25 bp, Canis familiaris
ccagcagcttcagggggaaaccaac

SEQ ID NO: 89337 - DNA, 25 bp, Canis familiaris
ccagatgccggtgggctaaaccaac

SEQ ID NO: 89338 - DNA, 25 bp, Canis familiaris
ccagagccggtggctaaaccacgcc

SEQ ID NO: 89339 - DNA, 25 bp, Canis familiaris
ccagaatgggctcctaagaccctcc

SEQ ID NO: 89340 - DNA, 25 bp, Canis familiaris
ccagttaagctgctcacaacccatg

SEQ ID NO: 89341 - DNA, 25 bp, Canis familiaris
ccaggtgaatgtcgttcttaccatg

SEQ ID NO: 89342 - DNA, 25 bp, Canis familiaris
ccagactgctatcgtttttactcac

SEQ ID NO: 89343 - DNA, 25 bp, Canis familiaris
ccagaactttgtcagcttcatctcc

SEQ ID NO: 89344 - DNA, 25 bp, Canis familiaris
ccagaccttttgtacatttttacag

SEQ ID NO: 89345 - DNA, 25 bp, Canis familiaris
ccaggacctttgtgcatgctattct

SEQ ID NO: 89346 - DNA, 25 bp, Canis familiaris
ccaggacacttctctacttgtctgt

SEQ ID NO: 89347 - DNA, 25 bp, Canis familiaris
ccaggacactttttgacttattctg

SEQ ID NO: 89348 - DNA, 25 bp, Canis familiaris
ccagtccccttgatgagtaattctt

SEQ ID NO: 89349 - DNA, 25 bp, Canis familiaris
ccagatccccttatatatcattgct

SEQ ID NO: 89350 - DNA, 25 bp, Canis familiaris
ccagtcctcctttctgattacagtg

SEQ ID NO: 89351 - DNA, 25 bp, Canis familiaris
ccagccgccctggggaatgaaggga

SEQ ID NO: 89352 - DNA, 25 bp, Canis familiaris
ccagtcccacagaggtagaggttga

SEQ ID NO: 89353 - DNA, 25 bp, Canis familiaris
ccaggtccatacagagtgatgggtg

SEQ ID NO: 89354 - DNA, 25 bp, Canis familiaris
ccaggtgcttcagccaggtgggaaa

SEQ ID NO: 89355 - DNA, 25 bp, Canis familiaris
ccaggtcttcggacacggaggagaa

SEQ ID NO: 89356 - DNA, 25 bp, Canis familiaris
ccacgacttttgtcacgtttcgaag

SEQ ID NO: 89357 - DNA, 25 bp, Canis familiaris
ccactagttgtggaacgttgacgtg

SEQ ID NO: 89358 - DNA, 25 bp, Canis familiaris
ccacctgcctgagaaccctaaggcg

SEQ ID NO: 89359 - DNA, 25 bp, Canis familiaris
ccacctccggcgattcagaacggga

SEQ ID NO: 89360 - DNA, 25 bp, Canis familiaris
ccaccccaggggaataagatcgaag

SEQ ID NO: 89361 - DNA, 25 bp, Canis familiaris
ccaccccgaaagcctaatgccaggg

SEQ ID NO: 89362 - DNA, 25 bp, Canis familiaris
ccacttccacaagggctggcaacgg

SEQ ID NO: 89363 - DNA, 25 bp, Canis familiaris
gcctctgcctacaacggggaaagac

SEQ ID NO: 89364 - DNA, 25 bp, Canis familiaris
gccatagcgtccactgggaaaaacc

SEQ ID NO: 89365 - DNA, 25 bp, Canis familiaris
tccaaggctccctgttgaaaagtcg

SEQ ID NO: 89366 - DNA, 25 bp, Canis familiaris
gccttggcccctggttaacaagtgc

SEQ ID NO: 89367 - DNA, 25 bp, Canis familiaris
gccgaggaccacggcttaacacggg

SEQ ID NO: 89368 - DNA, 25 bp, Canis familiaris
ccagggcccaatcctggagactcgg

SEQ ID NO: 89369 - DNA, 25 bp, Canis familiaris
ccaggggcgcaacctgatggcgcat

SEQ ID NO: 89370 - DNA, 25 bp, Canis familiaris
ccagtgttcgagacctggcacagca

SEQ ID NO: 89371 - DNA, 25 bp, Canis familiaris
ccaggttgatggggaagacagataa

SEQ ID NO: 89372 - DNA, 25 bp, Canis familiaris
ccagcactggggggccagacgaagt

SEQ ID NO: 89373 - DNA, 25 bp, Canis familiaris
ccagctggggcggcgtcagtaaagt

SEQ ID NO: 89374 - DNA, 25 bp, Canis familiaris
ccagtaaagtgcggcttgtcagaag

SEQ ID NO: 89375 - DNA, 25 bp, Canis familiaris
ccagtttgactggtcttccagaccc

SEQ ID NO: 89376 - DNA, 25 bp, Canis familiaris
ccagcctgttctgtttacatggtac

SEQ ID NO: 89377 - DNA, 25 bp, Canis familiaris
ccagggagtctgctgttcgaggtac

SEQ ID NO: 89378 - DNA, 25 bp, Canis familiaris
ccagggcaagtgcgtgagcggggtc

SEQ ID NO: 89379 - DNA, 25 bp, Canis familiaris
ccagggaaggggcctctggtggagt

SEQ ID NO: 89380 - DNA, 25 bp, Canis familiaris
ccagggcgggattccagctgtggaa

SEQ ID NO: 89381 - DNA, 25 bp, Canis familiaris
ccaggagcatggcgtcccaagagaa

SEQ ID NO: 89382 - DNA, 25 bp, Canis familiaris
ccaggagctggcgctcatacacagg

SEQ ID NO: 89383 - DNA, 25 bp, Canis familiaris
ccagtcgctggggtgtcacataaga

SEQ ID NO: 89384 - DNA, 25 bp, Canis familiaris
ccagctggagtgtctggtcaatcca

SEQ ID NO: 89385 - DNA, 25 bp, Canis familiaris
ccaggaggtggcagctctcatcctg

SEQ ID NO: 89386 - DNA, 25 bp, Canis familiaris
ccagaggcagagcctggccttgttg

SEQ ID NO: 89387 - DNA, 25 bp, Canis familiaris
ccaggtcagcatcctgggctctgtg

SEQ ID NO: 89388 - DNA, 25 bp, Canis familiaris
ccagagtccagaatggctgccgggt

SEQ ID NO: 89389 - DNA, 25 bp, Canis familiaris
ccagttctgagaaacagtcagggtc

SEQ ID NO: 89390 - DNA, 25 bp, Canis familiaris
gccagaaattgtgaagccaggttga

SEQ ID NO: 89391 - DNA, 25 bp, Canis familiaris
ccagtgcaatttaagaggcagtctt

SEQ ID NO: 89392 - DNA, 25 bp, Canis familiaris
ccagtgccatttaagaggcacagtt

SEQ ID NO: 89393 - DNA, 25 bp, Canis familiaris
ccagttctttgctaagcagccaatc

SEQ ID NO: 89394 - DNA, 25 bp, Canis familiaris
ccactacaaatctatggcccacagc

SEQ ID NO: 89395 - DNA, 25 bp, Canis familiaris
ccagtaccactctgtgcacggagtg

SEQ ID NO: 89396 - DNA, 25 bp, Canis familiaris
ccagtccacagtttgtgctcgtttg

SEQ ID NO: 89397 - DNA, 25 bp, Canis familiaris
ccagcaacatcaccagctgcgctgg

SEQ ID NO: 89398 - DNA, 25 bp, Canis familiaris
ccagcacacacaccacatttggtca

SEQ ID NO: 89399 - DNA, 25 bp, Canis familiaris
ccagcacacacaggaaggggagatt

SEQ ID NO: 89400 - DNA, 25 bp, Canis familiaris
ccagcacctcatgggaggggcttga

SEQ ID NO: 89401 - DNA, 25 bp, Canis familiaris
ccagctgcccggcagctgggcctca

SEQ ID NO: 89402 - DNA, 25 bp, Canis familiaris
ccagcagcccagggaggctgaccac

SEQ ID NO: 89403 - DNA, 25 bp, Canis familiaris
ccagctactcgggaggctgaggcag

SEQ ID NO: 89404 - DNA, 25 bp, Canis familiaris
ccagtccgcctggaggtcacggaca

SEQ ID NO: 89405 - DNA, 25 bp, Canis familiaris
ccagtccctctgtgggttggatcac

SEQ ID NO: 89406 - DNA, 25 bp, Canis familiaris
ccagtccccagctggggctggaaag

SEQ ID NO: 89407 - DNA, 25 bp, Canis familiaris
ccagttctcccaatggtggcgtgat

SEQ ID NO: 89408 - DNA, 25 bp, Canis familiaris
ccagttccctccaactgagagctgg

SEQ ID NO: 89409 - DNA, 25 bp, Canis familiaris
ccagtgtccttcctaggggagggag

SEQ ID NO: 89410 - DNA, 25 bp, Canis familiaris
ccacgttgcccactaggaagacgcg

SEQ ID NO: 89411 - DNA, 25 bp, Canis familiaris
ccagatgttcccatgcagtctaagg

SEQ ID NO: 89412 - DNA, 25 bp, Canis familiaris
ccagtattctccaagcatgacgatg

SEQ ID NO: 89413 - DNA, 25 bp, Canis familiaris
ccagtcgtcctggaatgaccttttt

SEQ ID NO: 89414 - DNA, 25 bp, Canis familiaris
ccagactttcggtcagttctttttg

SEQ ID NO: 89415 - DNA, 25 bp, Canis familiaris
ccaacttcccagggttttctcattg

SEQ ID NO: 89416 - DNA, 25 bp, Canis familiaris
ccaggtgtcctgtgtgttttgtttg

SEQ ID NO: 89417 - DNA, 25 bp, Canis familiaris
ccagggtcttatttttgtggtagat

SEQ ID NO: 89418 - DNA, 25 bp, Canis familiaris
ccagcactactttatttttgggtgt

SEQ ID NO: 89419 - DNA, 25 bp, Canis familiaris
ccagcacccgctttatatttggggt

SEQ ID NO: 89420 - DNA, 25 bp, Canis familiaris
ccagaaccctccattttcaggctgg

SEQ ID NO: 89421 - DNA, 25 bp, Canis familiaris
ccagagaccccacctttaaggctgg

SEQ ID NO: 89422 - DNA, 25 bp, Canis familiaris
ccagcaagctgtggcacactctgta

SEQ ID NO: 89423 - DNA, 25 bp, Canis familiaris
ccagcagcagtgagccgctcagtct

SEQ ID NO: 89424 - DNA, 25 bp, Canis familiaris
ccagcagcactgagtcctgcactaa

SEQ ID NO: 89425 - DNA, 25 bp, Canis familiaris
ccagtgcctgcaggtgcctgaagat

SEQ ID NO: 89426 - DNA, 25 bp, Canis familiaris
ccagtggacacgtttcaagcagttc

SEQ ID NO: 89427 - DNA, 25 bp, Canis familiaris
ccagttgtgcacttttacaagccgc

SEQ ID NO: 89428 - DNA, 25 bp, Canis familiaris
ccagctttgcaaattttccagtcca

SEQ ID NO: 89429 - DNA, 25 bp, Canis familiaris
ccagatcctcaacctttcggatcca

SEQ ID NO: 89430 - DNA, 25 bp, Canis familiaris
ccagacgtggacgttttagctcctt

SEQ ID NO: 89431 - DNA, 25 bp, Canis familiaris
ccaagagtggacgcttaactgactg

SEQ ID NO: 89432 - DNA, 25 bp, Canis familiaris
ccagtgggtgacgctggcactgctg

SEQ ID NO: 89433 - DNA, 25 bp, Canis familiaris
ccaggtgtggaagctcagctcctgc

SEQ ID NO: 89434 - DNA, 25 bp, Canis familiaris
ccaggtgagggcacgaccctgggtc

SEQ ID NO: 89435 - DNA, 25 bp, Canis familiaris
ccagtcgagaaggacgctccacggg

SEQ ID NO: 89436 - DNA, 25 bp, Canis familiaris
ccagatggtgtacgacagtcccctg

SEQ ID NO: 89437 - DNA, 25 bp, Canis familiaris
ccagtgtgtgtctggagaccctcgc

SEQ ID NO: 89438 - DNA, 25 bp, Canis familiaris
ccagtgatttcctgtgacctcacgg

SEQ ID NO: 89439 - DNA, 25 bp, Canis familiaris
ccagctgtttagcgtcaccttcagc

SEQ ID NO: 89440 - DNA, 25 bp, Canis familiaris
ccagctggtttctgaactcgaggca

SEQ ID NO: 89441 - DNA, 25 bp, Canis familiaris
ccagctggttcctaaaccgcagaga

SEQ ID NO: 89442 - DNA, 25 bp, Canis familiaris
ccagctggttaccctgagagccaga

SEQ ID NO: 89443 - DNA, 25 bp, Canis familiaris
ccaggtttcagcatcgcagacaaga

SEQ ID NO: 89444 - DNA, 25 bp, Canis familiaris
ccaggtttcagcatcgcagacaaga

SEQ ID NO: 89445 - DNA, 25 bp, Canis familiaris
ccaggtttcagcatcgcagacaaga

SEQ ID NO: 89446 - DNA, 25 bp, Canis familiaris
ccaggtttcagcatcgcagacaaga

SEQ ID NO: 89447 - DNA, 25 bp, Canis familiaris
ccacgtattgcacttggaattatga

SEQ ID NO: 89448 - DNA, 25 bp, Canis familiaris
ccagcccttgacaggacttgtgcac

SEQ ID NO: 89449 - DNA, 25 bp, Canis familiaris
ccagcgccctggagaagattcacct

SEQ ID NO: 89450 - DNA, 25 bp, Canis familiaris
ccaccacagctgagagggaaatcgt

SEQ ID NO: 89451 - DNA, 25 bp, Canis familiaris
ccagcccctatgtcaaggaattcag

SEQ ID NO: 89452 - DNA, 25 bp, Canis familiaris
ccagctcacctcttcaaaagattcc

SEQ ID NO: 89453 - DNA, 25 bp, Canis familiaris
ccaggtctctgccgacaaaattccc

SEQ ID NO: 89454 - DNA, 25 bp, Canis familiaris
ccagtgatcctcctggaaactcctc

SEQ ID NO: 89455 - DNA, 25 bp, Canis familiaris
ccagcttctgctggtggagaacttc

SEQ ID NO: 89456 - DNA, 25 bp, Canis familiaris
ccagcttctgccaaggattcatcta

SEQ ID NO: 89457 - DNA, 25 bp, Canis familiaris
ccagcttcagctcaaactcaacagc

SEQ ID NO: 89458 - DNA, 25 bp, Canis familiaris
ccagcttgccatccagtactgagaa

SEQ ID NO: 89459 - DNA, 25 bp, Canis familiaris
ccagatggccatcatatcatagcgt

SEQ ID NO: 89460 - DNA, 25 bp, Canis familiaris
ccagatatccagcctacatgacttt

SEQ ID NO: 89461 - DNA, 25 bp, Canis familiaris
ccagaatccccttgagatcagtgct

SEQ ID NO: 89462 - DNA, 25 bp, Canis familiaris
ccaggtctacctgggcatcatgtgg

SEQ ID NO: 89463 - DNA, 25 bp, Canis familiaris
ccagcagtgccaggctgggctctgg

SEQ ID NO: 89464 - DNA, 25 bp, Canis familiaris
ccagtctcgcaggctggtgtgcagg

SEQ ID NO: 89465 - DNA, 25 bp, Canis familiaris
ccagtccagcaggaggtctgcaccc

SEQ ID NO: 89466 - DNA, 25 bp, Canis familiaris
ccagttcagagggctggctggcccc

SEQ ID NO: 89467 - DNA, 25 bp, Canis familiaris
ccagtctacagaaccagctggccct

SEQ ID NO: 89468 - DNA, 25 bp, Canis familiaris
ccagctctaagcaacggccagtggt

SEQ ID NO: 89469 - DNA, 25 bp, Canis familiaris
ccagtcccagcaacacggaggctgt

SEQ ID NO: 89470 - DNA, 25 bp, Canis familiaris
ccagtctgcatctttccaggagtgg

SEQ ID NO: 89471 - DNA, 25 bp, Canis familiaris
ccacgctacttcgcgctgagtgaaa

SEQ ID NO: 89472 - DNA, 25 bp, Canis familiaris
ccacgggcttcagtggccatggact

SEQ ID NO: 89473 - DNA, 25 bp, Canis familiaris
ccacggtttcaatgcgtcacagtcc

SEQ ID NO: 89474 - DNA, 25 bp, Canis familiaris
ccaaggggtcacaggctctaccctt

SEQ ID NO: 89475 - DNA, 25 bp, Canis familiaris
ccaccccgtgccaggattactggtt

SEQ ID NO: 89476 - DNA, 25 bp, Canis familiaris
ccagcacccctcaaatggatttctg

SEQ ID NO: 89477 - DNA, 25 bp, Canis familiaris
ccagtccccttttcagatctgatag

SEQ ID NO: 89478 - DNA, 25 bp, Canis familiaris
ccagttccctgagaatgctgcttcc

SEQ ID NO: 89479 - DNA, 25 bp, Canis familiaris
ccagttcagctcaattcacagcttc

SEQ ID NO: 89480 - DNA, 25 bp, Canis familiaris
ccagaatcatgcagagtccagctcc

SEQ ID NO: 89481 - DNA, 25 bp, Canis familiaris
ccagcaatatgaagcgtgtctgcca

SEQ ID NO: 89482 - DNA, 25 bp, Canis familiaris
ccagtcaagagtcatgtctgcaaat

SEQ ID NO: 89483 - DNA, 25 bp, Canis familiaris
ccagtcaaagtcatgcctgcactag

SEQ ID NO: 89484 - DNA, 25 bp, Canis familiaris
ccagtaatactttgcccacttggtt

SEQ ID NO: 89485 - DNA, 25 bp, Canis familiaris
ccactttacattctcccattggact

SEQ ID NO: 89486 - DNA, 25 bp, Canis familiaris
ccactttcagaaaactccaatgtcc

SEQ ID NO: 89487 - DNA, 25 bp, Canis familiaris
gcgctattacctcaagttcaacttc

SEQ ID NO: 89488 - DNA, 25 bp, Canis familiaris
gcctagtccttgcaagttactttca

SEQ ID NO: 89489 - DNA, 25 bp, Canis familiaris
ccaatgtgccattggtattttttta

SEQ ID NO: 89490 - DNA, 25 bp, Canis familiaris
ccacttcccatggaatggtttttgg

SEQ ID NO: 89491 - DNA, 25 bp, Canis familiaris
ccagcttccgcagagacgtttattg

SEQ ID NO: 89492 - DNA, 25 bp, Canis familiaris
ccagtcctggtgggatcggaacttg

SEQ ID NO: 89493 - DNA, 25 bp, Canis familiaris
ccagagcacatgggggtcggtcaca

SEQ ID NO: 89494 - DNA, 25 bp, Canis familiaris
ccagcagcctggacggctgggtgag

SEQ ID NO: 89495 - DNA, 25 bp, Canis familiaris
ccagcagcctggacggctgggtgag

SEQ ID NO: 89496 - DNA, 25 bp, Canis familiaris
ccagggctgcagccgggaggaggag

SEQ ID NO: 89497 - DNA, 25 bp, Canis familiaris
ccagggtgagggcctcaggaggggc

SEQ ID NO: 89498 - DNA, 25 bp, Canis familiaris
ccaggtgggggtacacgggagctgc

SEQ ID NO: 89499 - DNA, 25 bp, Canis familiaris
ccagccggcgggattgcggggctgg

SEQ ID NO: 89500 - DNA, 25 bp, Canis familiaris
gccgatcgggggattgtcaggggct

SEQ ID NO: 89501 - DNA, 25 bp, Canis familiaris
ccagatcggggacattgtcacagtg

SEQ ID NO: 89502 - DNA, 25 bp, Canis familiaris
ccagatgctgcgaaaatattgtaag

SEQ ID NO: 89503 - DNA, 25 bp, Canis familiaris
ccagttgcgacaggcactagtaagt

SEQ ID NO: 89504 - DNA, 25 bp, Canis familiaris
ccagcttcagaggccctttgagagc

SEQ ID NO: 89505 - DNA, 25 bp, Canis familiaris
ccaccatctcagggtcttggacagc

SEQ ID NO: 89506 - DNA, 25 bp, Canis familiaris
ccagctcttcgatctgattgaaagc

SEQ ID NO: 89507 - DNA, 25 bp, Canis familiaris
ccagggtcagatactacatacaggg

SEQ ID NO: 89508 - DNA, 25 bp, Canis familiaris
ccagggctcgatcctggagacccgg

SEQ ID NO: 89509 - DNA, 25 bp, Canis familiaris
ccagggcgcgatcctggagatccgg

SEQ ID NO: 89510 - DNA, 25 bp, Canis familiaris
ccagggcgcgatcctggagatcccg

SEQ ID NO: 89511 - DNA, 25 bp, Canis familiaris
ccagggcgtgatggtgcgcatgggc

SEQ ID NO: 89512 - DNA, 25 bp, Canis familiaris
ccagggtgtgaggagctatgctagc

SEQ ID NO: 89513 - DNA, 25 bp, Canis familiaris
ccagcaggtgtgtgataatgtcagc

SEQ ID NO: 89514 - DNA, 25 bp, Canis familiaris
ccagcagtggtgatcagcagttctc

SEQ ID NO: 89515 - DNA, 25 bp, Canis familiaris
ccagagtgtgagtctccgagtcgcg

SEQ ID NO: 89516 - DNA, 25 bp, Canis familiaris
ccagcatcgatatctccgatctcag

SEQ ID NO: 89517 - DNA, 25 bp, Canis familiaris
ccactcctcaacccagaggcagtta

SEQ ID NO: 89518 - DNA, 25 bp, Canis familiaris
ccacggctcaacatgcgtgacctta

SEQ ID NO: 89519 - DNA, 25 bp, Canis familiaris
ccacggggacttttatcattaatag

SEQ ID NO: 89520 - DNA, 25 bp, Canis familiaris
gcccggggcactctaacatttagag

SEQ ID NO: 89521 - DNA, 25 bp, Canis familiaris
ccacggaaccatcctaaatttagtg

SEQ ID NO: 89522 - DNA, 25 bp, Canis familiaris
ccacgataacctgcaaccaaccagt

SEQ ID NO: 89523 - DNA, 25 bp, Canis familiaris
ccagacaaacctggcaggcgaatcc

SEQ ID NO: 89524 - DNA, 25 bp, Canis familiaris
ccagaggaacctagcagtgcagccc

SEQ ID NO: 89525 - DNA, 25 bp, Canis familiaris
ccagatagccacgggagtgcgccgg

SEQ ID NO: 89526 - DNA, 25 bp, Canis familiaris
ccagaacaacgtcgaggtggcccgg

SEQ ID NO: 89527 - DNA, 25 bp, Canis familiaris
ccagccccaagtcaagtggtcactg

SEQ ID NO: 89528 - DNA, 25 bp, Canis familiaris
ccagcctcccagaaaaagtgcgcaa

SEQ ID NO: 89529 - DNA, 25 bp, Canis familiaris
ccagttcccacaaaaacatcttaag

SEQ ID NO: 89530 - DNA, 25 bp, Canis familiaris
ccagtctccaaataaacacaacaga

SEQ ID NO: 89531 - DNA, 25 bp, Canis familiaris
ccagcccaacaatacatacacaaac

SEQ ID NO: 89532 - DNA, 25 bp, Canis familiaris
ccagcccccaactcagtaataaact

SEQ ID NO: 89533 - DNA, 25 bp, Canis familiaris
ccagtcccgcagaacacatggcaaa

SEQ ID NO: 89534 - DNA, 25 bp, Canis familiaris
ccagtctccagtgacacctgtaagc

SEQ ID NO: 89535 - DNA, 25 bp, Canis familiaris
ccagggccagtggacactcttggct

SEQ ID NO: 89536 - DNA, 25 bp, Canis familiaris
ccacagtgaagtccgactcctcagt

SEQ ID NO: 89537 - DNA, 25 bp, Canis familiaris
ccagagtggagtcccacatccagct

SEQ ID NO: 89538 - DNA, 25 bp, Canis familiaris
ccagcaggggtcccctacatcagag

SEQ ID NO: 89539 - DNA, 25 bp, Canis familiaris
ccagacctggcctctagacaaaggg

SEQ ID NO: 89540 - DNA, 25 bp, Canis familiaris
ccacccttcccctgagaatagatgg

SEQ ID NO: 89541 - DNA, 25 bp, Canis familiaris
ccagaccattccgcttcaaggcaga

SEQ ID NO: 89542 - DNA, 25 bp, Canis familiaris
ccagaatacatacactcctcgtgag

SEQ ID NO: 89543 - DNA, 25 bp, Canis familiaris
ccagtccacaagcactttttcatga

SEQ ID NO: 89544 - DNA, 25 bp, Canis familiaris
ccaattccatggccacctggttaga

SEQ ID NO: 89545 - DNA, 25 bp, Canis familiaris
ccagtcccgggcactgagtgttgag

SEQ ID NO: 89546 - DNA, 25 bp, Canis familiaris
ccactcccgaggtgtcagtgttctg

SEQ ID NO: 89547 - DNA, 25 bp, Canis familiaris
ccaccagctcgaggagttcctgaac

SEQ ID NO: 89548 - DNA, 25 bp, Canis familiaris
ccagacttctggggttctgctgggc

SEQ ID NO: 89549 - DNA, 25 bp, Canis familiaris
ccagatctttggtatctgcctggcc

SEQ ID NO: 89550 - DNA, 25 bp, Canis familiaris
ccagtgttccagatgcttctgaccc

SEQ ID NO: 89551 - DNA, 25 bp, Canis familiaris
ccagccgacaagatcttctactcgc

SEQ ID NO: 89552 - DNA, 25 bp, Canis familiaris
ccagcctggcagcttttctatgggc

SEQ ID NO: 89553 - DNA, 25 bp, Canis familiaris
ccacctgactggtgccttatggacc

SEQ ID NO: 89554 - DNA, 25 bp, Canis familiaris
ccagctctgccggaagcttttggaa

SEQ ID NO: 89555 - DNA, 25 bp, Canis familiaris
ccagacccgtgaccgattgggagaa

SEQ ID NO: 89556 - DNA, 25 bp, Canis familiaris
ccagaccccgtggtgttggtaacag

SEQ ID NO: 89557 - DNA, 25 bp, Canis familiaris
ccagccccgcttgtttggatgaaga

SEQ ID NO: 89558 - DNA, 25 bp, Canis familiaris
ccaccaccgtcgttatctgtgagga

SEQ ID NO: 89559 - DNA, 25 bp, Canis familiaris
ccactcccgttatgacgggctgacc

SEQ ID NO: 89560 - DNA, 25 bp, Canis familiaris
ccagtacacggatgagcacggggaa

SEQ ID NO: 89561 - DNA, 25 bp, Canis familiaris
ccagctaccgaggggacctgtgtga

SEQ ID NO: 89562 - DNA, 25 bp, Canis familiaris
ccagttctgctagaagccctggcgt

SEQ ID NO: 89563 - DNA, 25 bp, Canis familiaris
ccagttcatcgacgagaacccagag

SEQ ID NO: 89564 - DNA, 25 bp, Canis familiaris
ccagttcccagcatggactcagaag

SEQ ID NO: 89565 - DNA, 25 bp, Canis familiaris
ccagcttcccgatcggtggagacgt

SEQ ID NO: 89566 - DNA, 25 bp, Canis familiaris
ccagttctgggatccctagagattt

SEQ ID NO: 89567 - DNA, 25 bp, Canis familiaris
ccagctttagcataccactaagatt

SEQ ID NO: 89568 - DNA, 25 bp, Canis familiaris
ccagccatcatgacaaacccttgag

SEQ ID NO: 89569 - DNA, 25 bp, Canis familiaris
ccagcctcagccagaacacagtgag

SEQ ID NO: 89570 - DNA, 25 bp, Canis familiaris
ccagctggtggcgtgacccaggaag

SEQ ID NO: 89571 - DNA, 25 bp, Canis familiaris
ccagagcggtcagtgacgcagcgga

SEQ ID NO: 89572 - DNA, 25 bp, Canis familiaris
ccagtgctgcgtcagatgccagtgg

SEQ ID NO: 89573 - DNA, 25 bp, Canis familiaris
ccagtctgtgggctgccatgttgat

SEQ ID NO: 89574 - DNA, 25 bp, Canis familiaris
ccagctcgtgggcatcatggtggtg

SEQ ID NO: 89575 - DNA, 25 bp, Canis familiaris
ccagcacatgtgccccaagtctggt

SEQ ID NO: 89576 - DNA, 25 bp, Canis familiaris
ccagcgtgggccctgagactggaac

SEQ ID NO: 89577 - DNA, 25 bp, Canis familiaris
ccacgtgcagtgtcagctggtctga

SEQ ID NO: 89578 - DNA, 25 bp, Canis familiaris
ccagctgtgcttgagtttctgaccg

SEQ ID NO: 89579 - DNA, 25 bp, Canis familiaris
ccactgctgttaggcttccatgagc

SEQ ID NO: 89580 - DNA, 25 bp, Canis familiaris
ccacctgccaagacttcactgaggc

SEQ ID NO: 89581 - DNA, 25 bp, Canis familiaris
ccagccgccaagctcaaggaacggt

SEQ ID NO: 89582 - DNA, 25 bp, Canis familiaris
ccagccccaatgcctgaatggttag

SEQ ID NO: 89583 - DNA, 25 bp, Canis familiaris
ccagcgtccgctctggattgttgag

SEQ ID NO: 89584 - DNA, 25 bp, Canis familiaris
ccagcagtgccctcgaatttggaga

SEQ ID NO: 89585 - DNA, 25 bp, Canis familiaris
ccaccatccctttgggttggagaat

SEQ ID NO: 89586 - DNA, 25 bp, Canis familiaris
gccaatattggtacgggcttgggcc

SEQ ID NO: 89587 - DNA, 25 bp, Canis familiaris
gccatttttttcaggttggaggcat

SEQ ID NO: 89588 - DNA, 25 bp, Canis familiaris
gcgtttggtgttgattcgagcggga

SEQ ID NO: 89589 - DNA, 25 bp, Canis familiaris
gcgaggggtaatggttcggggcgct

SEQ ID NO: 89590 - DNA, 25 bp, Canis familiaris
gctaggttaagtctgggggtggctg

SEQ ID NO: 89591 - DNA, 25 bp, Canis familiaris
ccagagttggggcagagggcggggc

SEQ ID NO: 89592 - DNA, 25 bp, Canis familiaris
ccagtttcggcccagggctgttgga

SEQ ID NO: 89593 - DNA, 25 bp, Canis familiaris
ccagtcttcccccagagactgttta

SEQ ID NO: 89594 - DNA, 25 bp, Canis familiaris
ccagcttttctcccaagttgtatgt

SEQ ID NO: 89595 - DNA, 25 bp, Canis familiaris
ccagctttcccacagatgttaacct

SEQ ID NO: 89596 - DNA, 25 bp, Canis familiaris
ccaccttccacgagagtctagagtc

SEQ ID NO: 89597 - DNA, 25 bp, Canis familiaris
ccacctaccggaagctgtctggaag

SEQ ID NO: 89598 - DNA, 25 bp, Canis familiaris
gccctaaccaggagcgcctgggagg

SEQ ID NO: 89599 - DNA, 25 bp, Canis familiaris
ccaccaacgaggagccctggtagac

SEQ ID NO: 89600 - DNA, 25 bp, Canis familiaris
gaccactaaaccagccctataagaa

SEQ ID NO: 89601 - DNA, 25 bp, Canis familiaris
gcccctaaacacagccgaagagaag

SEQ ID NO: 89602 - DNA, 25 bp, Canis familiaris
gccacctgggaacggccgaagaaag

SEQ ID NO: 89603 - DNA, 25 bp, Canis familiaris
ccagcctcgagattcgtccgagagc

SEQ ID NO: 89604 - DNA, 25 bp, Canis familiaris
ccagcagcttagatgcgttcgacgc

SEQ ID NO: 89605 - DNA, 25 bp, Canis familiaris
ccagcaggaacagcgtgtccagcgg

SEQ ID NO: 89606 - DNA, 25 bp, Canis familiaris
ccagaggcccagaggatctcagcgt

SEQ ID NO: 89607 - DNA, 25 bp, Canis familiaris
ccagagccccacaggagacaggatc

SEQ ID NO: 89608 - DNA, 25 bp, Canis familiaris
ccagatacacccaaagtatcaggac

SEQ ID NO: 89609 - DNA, 25 bp, Canis familiaris
ccagatacgcccaaaggccgaggcc

SEQ ID NO: 89610 - DNA, 25 bp, Canis familiaris
tccaggacgtgcagaaaccgtccca

SEQ ID NO: 89611 - DNA, 25 bp, Canis familiaris
ccagagagcgctgcgagagcaccgg

SEQ ID NO: 89612 - DNA, 25 bp, Canis familiaris
ccagagtgagcccggaagggcgccc

SEQ ID NO: 89613 - DNA, 25 bp, Canis familiaris
ccagactgagccgggacagcaggcc

SEQ ID NO: 89614 - DNA, 25 bp, Canis familiaris
ccagactgagccgggacagcaggcc

SEQ ID NO: 89615 - DNA, 25 bp, Canis familiaris
ccagactgagccgggacagcaggcc

SEQ ID NO: 89616 - DNA, 25 bp, Canis familiaris
ccagactgagccgggacagcaggcc

SEQ ID NO: 89617 - DNA, 25 bp, Canis familiaris
ccagactgagccgggacagcaggcc

SEQ ID NO: 89618 - DNA, 25 bp, Canis familiaris
ccagagctagctctgggcaccagct

SEQ ID NO: 89619 - DNA, 25 bp, Canis familiaris
ccagcaccacatcctggagactgcg

SEQ ID NO: 89620 - DNA, 25 bp, Canis familiaris
ccagcagcaccacggaaagccggga

SEQ ID NO: 89621 - DNA, 25 bp, Canis familiaris
ccagaagccgggaagcccatgggag

SEQ ID NO: 89622 - DNA, 25 bp, Canis familiaris
ccaaagcccgacccttgagagtggg

SEQ ID NO: 89623 - DNA, 25 bp, Canis familiaris
ccagagagcctctctcctgaagagg

SEQ ID NO: 89624 - DNA, 25 bp, Canis familiaris
ccagaagctcctgctgactgaagag

SEQ ID NO: 89625 - DNA, 25 bp, Canis familiaris
ccagaccatgctggagctgacggag

SEQ ID NO: 89626 - DNA, 25 bp, Canis familiaris
ccagacgatcacccatgagaggagg

SEQ ID NO: 89627 - DNA, 25 bp, Canis familiaris
ccagaagccagccctgagagcatac

SEQ ID NO: 89628 - DNA, 25 bp, Canis familiaris
ccagcgagcgcgccgagatgatgga

SEQ ID NO: 89629 - DNA, 25 bp, Canis familiaris
ccactgagtggttggagggatacct

SEQ ID NO: 89630 - DNA, 25 bp, Canis familiaris
ccactggggtcacagcgtttcagga

SEQ ID NO: 89631 - DNA, 25 bp, Canis familiaris
ccacctgacgtcctattgcatagtc

SEQ ID NO: 89632 - DNA, 25 bp, Canis familiaris
ccaccatggcactggaggcaagtcc

SEQ ID NO: 89633 - DNA, 25 bp, Canis familiaris
ccaccagccctactgagactagttc

SEQ ID NO: 89634 - DNA, 25 bp, Canis familiaris
ccagaccgttcagagattaggcatc

SEQ ID NO: 89635 - DNA, 25 bp, Canis familiaris
ccagacccgtcaggagatagggcat

SEQ ID NO: 89636 - DNA, 25 bp, Canis familiaris
ccagacttgcctacggagacgagct

SEQ ID NO: 89637 - DNA, 25 bp, Canis familiaris
ccagactctgtcccaggaggaagag

SEQ ID NO: 89638 - DNA, 25 bp, Canis familiaris
ccagatcatggggctcagggggagg

SEQ ID NO: 89639 - DNA, 25 bp, Canis familiaris
ccagacacggctggcaggcaggcta

SEQ ID NO: 89640 - DNA, 25 bp, Canis familiaris
ccagcagttcctggcaggcacagtg

SEQ ID NO: 89641 - DNA, 25 bp, Canis familiaris
ccagaggtgtcggagagccagggcc

SEQ ID NO: 89642 - DNA, 25 bp, Canis familiaris
ccagactggacggaagccaagggtc

SEQ ID NO: 89643 - DNA, 25 bp, Canis familiaris
ccagacggatcggaatgccaacggg

SEQ ID NO: 89644 - DNA, 25 bp, Canis familiaris
ccagccggtcaggatgatcacagac

SEQ ID NO: 89645 - DNA, 25 bp, Canis familiaris
ccagaccgtcaggagatagagcatc

SEQ ID NO: 89646 - DNA, 25 bp, Canis familiaris
ccagccagctgccagatcagtaact

SEQ ID NO: 89647 - DNA, 25 bp, Canis familiaris
ccaccattgcggacatgcgtacatg

SEQ ID NO: 89648 - DNA, 25 bp, Canis familiaris
ccaccttgcactgtgggcagcactg

SEQ ID NO: 89649 - DNA, 25 bp, Canis familiaris
ccagagctttccctggtcagctctg

SEQ ID NO: 89650 - DNA, 25 bp, Canis familiaris
ccagatgttcccctgatgttgctgg

SEQ ID NO: 89651 - DNA, 25 bp, Canis familiaris
ccagagcttctccttgcaggagcgg

SEQ ID NO: 89652 - DNA, 25 bp, Canis familiaris
ccagattgtctccattgccgatgag

SEQ ID NO: 89653 - DNA, 25 bp, Canis familiaris
ccagtatgactccactcacggcaaa

SEQ ID NO: 89654 - DNA, 25 bp, Canis familiaris
ccagatatactctccacagcgtata

SEQ ID NO: 89655 - DNA, 25 bp, Canis familiaris
ccagagaaactgtccacacatgttg

SEQ ID NO: 89656 - DNA, 25 bp, Canis familiaris
ccagatgaccctgaccaatcctggt

SEQ ID NO: 89657 - DNA, 25 bp, Canis familiaris
ccagtacccatggccacactaatgg

SEQ ID NO: 89658 - DNA, 25 bp, Canis familiaris
ccagtcaccttgttcacactaatgt

SEQ ID NO: 89659 - DNA, 25 bp, Canis familiaris
ccagctccatatgcgtatattaagt

SEQ ID NO: 89660 - DNA, 25 bp, Canis familiaris
ccagctcgtagccggggtagcaatg

SEQ ID NO: 89661 - DNA, 25 bp, Canis familiaris
ccagccttagccaggacgaggtgaa

SEQ ID NO: 89662 - DNA, 25 bp, Canis familiaris
ccacctcaacctgggtcgacgtgga

SEQ ID NO: 89663 - DNA, 25 bp, Canis familiaris
ccacctacaccaggctgcctgtttg

SEQ ID NO: 89664 - DNA, 25 bp, Canis familiaris
ccagcgcaagcgccggaagtttctg

SEQ ID NO: 89665 - DNA, 25 bp, Canis familiaris
ccagagcacccacacaagttcagtg

SEQ ID NO: 89666 - DNA, 25 bp, Canis familiaris
ccagagcctttgcacaggtgccaag

SEQ ID NO: 89667 - DNA, 25 bp, Canis familiaris
ccagcagcctttcacagaggcatct

SEQ ID NO: 89668 - DNA, 25 bp, Canis familiaris
ccagcacacccttgtcagggacaaa

SEQ ID NO: 89669 - DNA, 25 bp, Canis familiaris
ccagcaaccacatggtagcttcaac

SEQ ID NO: 89670 - DNA, 25 bp, Canis familiaris
ccagcaaccacggtgttcttggtcc

SEQ ID NO: 89671 - DNA, 25 bp, Canis familiaris
ccagccgccaactgattttcattct

SEQ ID NO: 89672 - DNA, 25 bp, Canis familiaris
ccagcccagagatcttttctttcat

SEQ ID NO: 89673 - DNA, 25 bp, Canis familiaris
ccacctgctgcatatgtatttttta

SEQ ID NO: 89674 - DNA, 25 bp, Canis familiaris
ccacccatttgatatttatatctcg

SEQ ID NO: 89675 - DNA, 25 bp, Canis familiaris
ccactcctcatttaccttagtatct

SEQ ID NO: 89676 - DNA, 25 bp, Canis familiaris
ccactggcgtcttcaccaccatgga

SEQ ID NO: 89677 - DNA, 25 bp, Canis familiaris
ccagcatgggctacaacacaatatg

SEQ ID NO: 89678 - DNA, 25 bp, Canis familiaris
ccagcaggacattcagagccagcgg

SEQ ID NO: 89679 - DNA, 25 bp, Canis familiaris
ccagcaggaccagcccagagggtcc

SEQ ID NO: 89680 - DNA, 25 bp, Canis familiaris
ccagaggggaccgtgtggggacagc

SEQ ID NO: 89681 - DNA, 25 bp, Canis familiaris
gccgggaagcccatgggagaacgtg

SEQ ID NO: 89682 - DNA, 25 bp, Canis familiaris
gctaccgaacccaggaggaactgga

SEQ ID NO: 89683 - DNA, 25 bp, Canis familiaris
ccaccataacccaggtgtctcctgg

SEQ ID NO: 89684 - DNA, 25 bp, Canis familiaris
ccaccaacaccgattgcatgtgccc

SEQ ID NO: 89685 - DNA, 25 bp, Canis familiaris
ccagctcgccacggaatggatcatg

SEQ ID NO: 89686 - DNA, 25 bp, Canis familiaris
ccagcttccagcctgcaaagatcta

SEQ ID NO: 89687 - DNA, 25 bp, Canis familiaris
ccagcctccatgggctttactttaa

SEQ ID NO: 89688 - DNA, 25 bp, Canis familiaris
ccaccaccaaacttcttctatgtta

SEQ ID NO: 89689 - DNA, 25 bp, Canis familiaris
ccaccagcagaatcgtcttcctgcg

SEQ ID NO: 89690 - DNA, 25 bp, Canis familiaris
ccagctcagggcacagactttcctg

SEQ ID NO: 89691 - DNA, 25 bp, Canis familiaris
gccagccagggttcgagctggtcgt

SEQ ID NO: 89692 - DNA, 25 bp, Canis familiaris
ccagctcatggactctgtctgtggt

SEQ ID NO: 89693 - DNA, 25 bp, Canis familiaris
ccagcttgaggggtctgcacagtgt

SEQ ID NO: 89694 - DNA, 25 bp, Canis familiaris
ccacttggaggatcgccagttgcca

SEQ ID NO: 89695 - DNA, 25 bp, Canis familiaris
ccactttgttgttggccgttccaat

SEQ ID NO: 89696 - DNA, 25 bp, Canis familiaris
ccacttggtgtttggtcgggacaag

SEQ ID NO: 89697 - DNA, 25 bp, Canis familiaris
gccttcttgtttatcttcctgaaaa

SEQ ID NO: 89698 - DNA, 25 bp, Canis familiaris
gcccttgtctttctttagtggaaca

SEQ ID NO: 89699 - DNA, 25 bp, Canis familiaris
ccacttgcctttcattctgagttga

SEQ ID NO: 89700 - DNA, 25 bp, Canis familiaris
ccactcttctaacatgtcgtcgtgt

SEQ ID NO: 89701 - DNA, 25 bp, Canis familiaris
ccagctaaacatgcttcatcgtcgg

SEQ ID NO: 89702 - DNA, 25 bp, Canis familiaris
ccagctacaaactttccgtgcagtt

SEQ ID NO: 89703 - DNA, 25 bp, Canis familiaris
ccactaaccacagccttgatcagct

SEQ ID NO: 89704 - DNA, 25 bp, Canis familiaris
ccaccaccgacaatgccttgaaatg

SEQ ID NO: 89705 - DNA, 25 bp, Canis familiaris
ccagctgacacgctccgtagaaata

SEQ ID NO: 89706 - DNA, 25 bp, Canis familiaris
gccagctgattagttccggagacaa

SEQ ID NO: 89707 - DNA, 25 bp, Canis familiaris
ccagctgattagttccggagacaaa

SEQ ID NO: 89708 - DNA, 25 bp, Canis familiaris
ccagctttagcaacatcgggagaaa

SEQ ID NO: 89709 - DNA, 25 bp, Canis familiaris
ccagcttctagcacctttggaaatg

SEQ ID NO: 89710 - DNA, 25 bp, Canis familiaris
ccagcttctagtacttgttccaaat

SEQ ID NO: 89711 - DNA, 25 bp, Canis familiaris
ccactttcaattcctgttccataag

SEQ ID NO: 89712 - DNA, 25 bp, Canis familiaris
gccactatattatcgctaatccaac

SEQ ID NO: 89713 - DNA, 25 bp, Canis familiaris
gcccttttgatacctaatactccag

SEQ ID NO: 89714 - DNA, 25 bp, Canis familiaris
ccagctattctaccactgaaatctt

SEQ ID NO: 89715 - DNA, 25 bp, Canis familiaris
ccagccaatgcccttctggaaatcc

SEQ ID NO: 89716 - DNA, 25 bp, Canis familiaris
ccagccgatcgggtcaggcaagtcc

SEQ ID NO: 89717 - DNA, 25 bp, Canis familiaris
ccagctggacctgtcgacaacttaa

SEQ ID NO: 89718 - DNA, 25 bp, Canis familiaris
ccagctgagaccagctctgcagcac

SEQ ID NO: 89719 - DNA, 25 bp, Canis familiaris
ccagctagagcttagctaccagcta

SEQ ID NO: 89720 - DNA, 25 bp, Canis familiaris
ccagctgagccatgactgccaagga

SEQ ID NO: 89721 - DNA, 25 bp, Canis familiaris
ccagctatgctatgaccttaggtat

SEQ ID NO: 89722 - DNA, 25 bp, Canis familiaris
ccactgcatgcagagacctgggtgt

SEQ ID NO: 89723 - DNA, 25 bp, Canis familiaris
ccacctcacgagcttgggttggaaa

SEQ ID NO: 89724 - DNA, 25 bp, Canis familiaris
ccaccccaggagcggctgagggaga

SEQ ID NO: 89725 - DNA, 25 bp, Canis familiaris
ccacctccaggctctaggggatgga

SEQ ID NO: 89726 - DNA, 25 bp, Canis familiaris
ccacgtccagtctacttggggggat

SEQ ID NO: 89727 - DNA, 25 bp, Canis familiaris
gcgcacgtaaccggttcggaggtat

SEQ ID NO: 89728 - DNA, 25 bp, Canis familiaris
ccactgtacaaggagcctccgaggt

SEQ ID NO: 89729 - DNA, 25 bp, Canis familiaris
ccagcggagagaaatgccccctggt

SEQ ID NO: 89730 - DNA, 25 bp, Canis familiaris
ccagcagaggaagagaccccacgcg

SEQ ID NO: 89731 - DNA, 25 bp, Canis familiaris
ccagaagaagagaggccccaggggg

SEQ ID NO: 89732 - DNA, 25 bp, Canis familiaris
ccagaaagccagaaaccccagttgg

SEQ ID NO: 89733 - DNA, 25 bp, Canis familiaris
ccagaagaccaggatcatcccgcgc

SEQ ID NO: 89734 - DNA, 25 bp, Canis familiaris
ccagaataccaccactgaagtgccc

SEQ ID NO: 89735 - DNA, 25 bp, Canis familiaris
ccagaaagtcaccatgtctattctc

SEQ ID NO: 89736 - DNA, 25 bp, Canis familiaris
ccagaaggatgccgcagaccattat

SEQ ID NO: 89737 - DNA, 25 bp, Canis familiaris
ccagctactggcccaggccaagttc

SEQ ID NO: 89738 - DNA, 25 bp, Canis familiaris
ccagctacgtgcctcttcagaggct

SEQ ID NO: 89739 - DNA, 25 bp, Canis familiaris
ccagctgaggtgctcatcctgaact

SEQ ID NO: 89740 - DNA, 25 bp, Canis familiaris
ccagcagagggcgacacagctgccc

SEQ ID NO: 89741 - DNA, 25 bp, Canis familiaris
ccagctgaggccccacagagttggg

SEQ ID NO: 89742 - DNA, 25 bp, Canis familiaris
ccacattgccagtccacagtttgtg

SEQ ID NO: 89743 - DNA, 25 bp, Canis familiaris
ccaccagccagatcctgttgtattt

SEQ ID NO: 89744 - DNA, 25 bp, Canis familiaris
ccaccaccactcaggtggctatttt

SEQ ID NO: 89745 - DNA, 25 bp, Canis familiaris
ccacccgctcacagtgtggactttt

SEQ ID NO: 89746 - DNA, 25 bp, Canis familiaris
ccacccgctcacagtgtggactttt

SEQ ID NO: 89747 - DNA, 25 bp, Canis familiaris
ccacccgctcacagtgtggactttt

SEQ ID NO: 89748 - DNA, 25 bp, Canis familiaris
ccacccgctcacagtgtggactttt

SEQ ID NO: 89749 - DNA, 25 bp, Canis familiaris
ccacccgctcacagtgtggactttt

SEQ ID NO: 89750 - DNA, 25 bp, Canis familiaris
ccacccgctcacagtgtggactttt

SEQ ID NO: 89751 - DNA, 25 bp, Canis familiaris
ccacccgctcacagtgtggactttt

SEQ ID NO: 89752 - DNA, 25 bp, Canis familiaris
ccacccgctcacagtgtggactttt

SEQ ID NO: 89753 - DNA, 25 bp, Canis familiaris
ccacccgctcacagtgtggactttt

SEQ ID NO: 89754 - DNA, 25 bp, Canis familiaris
ccacccgctcacagtgtggactttt

SEQ ID NO: 89755 - DNA, 25 bp, Canis familiaris
ccacccgctcacagtgtggactttt

SEQ ID NO: 89756 - DNA, 25 bp, Canis familiaris
ccagccgggcaaggctggccactgt

SEQ ID NO: 89757 - DNA, 25 bp, Canis familiaris
ccagccgggcgaggctgtgctggag

SEQ ID NO: 89758 - DNA, 25 bp, Canis familiaris
ccagaggggcattggtgtggccgcc

SEQ ID NO: 89759 - DNA, 25 bp, Canis familiaris
ccagaggtggcttggtaccacccgc

SEQ ID NO: 89760 - DNA, 25 bp, Canis familiaris
ccagaggtgcctggaaacctccacc

SEQ ID NO: 89761 - DNA, 25 bp, Canis familiaris
ccagaagatcctgtatctcctttct

SEQ ID NO: 89762 - DNA, 25 bp, Canis familiaris
ccagaaatcatatgctacttgtttc

SEQ ID NO: 89763 - DNA, 25 bp, Canis familiaris
ccagaaccaagggaccatgtgattg

SEQ ID NO: 89764 - DNA, 25 bp, Canis familiaris
ccagaccaacggcacagctggtgtg

SEQ ID NO: 89765 - DNA, 25 bp, Canis familiaris
ccagcaccacagtggcccggtgctg

SEQ ID NO: 89766 - DNA, 25 bp, Canis familiaris
ccagctccagagggaacctgtgcgt

SEQ ID NO: 89767 - DNA, 25 bp, Canis familiaris
ccaccattgagcgcaatgccttcga

SEQ ID NO: 89768 - DNA, 25 bp, Canis familiaris
ccaccatcgaggagacctactcaaa

SEQ ID NO: 89769 - DNA, 25 bp, Canis familiaris
ccacctcgatggtttaatatccaaa

SEQ ID NO: 89770 - DNA, 25 bp, Canis familiaris
ccacgcgctgggtttagatcattca

SEQ ID NO: 89771 - DNA, 25 bp, Canis familiaris
ccagctggtaggtgtaactgctcta

SEQ ID NO: 89772 - DNA, 25 bp, Canis familiaris
ccagagagtacggtgggccctggca

SEQ ID NO: 89773 - DNA, 25 bp, Canis familiaris
ccagcaagctagctggtggccctgg

SEQ ID NO: 89774 - DNA, 25 bp, Canis familiaris
ccagaacatgagactaggccccggc

SEQ ID NO: 89775 - DNA, 25 bp, Canis familiaris
ccagaaagagtcaaccctgcacctg

SEQ ID NO: 89776 - DNA, 25 bp, Canis familiaris
ccacgaaggtactcgtgcctgctgc

SEQ ID NO: 89777 - DNA, 25 bp, Canis familiaris
ccacgaagctggaggttgtctgccc

SEQ ID NO: 89778 - DNA, 25 bp, Canis familiaris
ccacgtcctggtcagtttcagtacg

SEQ ID NO: 89779 - DNA, 25 bp, Canis familiaris
ccacccgggttcgagtgtcagtaag

SEQ ID NO: 89780 - DNA, 25 bp, Canis familiaris
ccacccctgggtacaggctagtcag

SEQ ID NO: 89781 - DNA, 25 bp, Canis familiaris
ccacagccacgggctttgtgggctc

SEQ ID NO: 89782 - DNA, 25 bp, Canis familiaris
ccactgccaatgctcttttgttatt

SEQ ID NO: 89783 - DNA, 25 bp, Canis familiaris
ccactgtgactacccttttgaattt

SEQ ID NO: 89784 - DNA, 25 bp, Canis familiaris
ccacttcctaccctgaattgatata

SEQ ID NO: 89785 - DNA, 25 bp, Canis familiaris
ccaccccattcactttattacaagt

SEQ ID NO: 89786 - DNA, 25 bp, Canis familiaris
ccagccagccttttactttagcaga

SEQ ID NO: 89787 - DNA, 25 bp, Canis familiaris
ccacccatcttgtgacttcttgaac

SEQ ID NO: 89788 - DNA, 25 bp, Canis familiaris
ccacctttatgtagcagttctcagc

SEQ ID NO: 89789 - DNA, 25 bp, Canis familiaris
ccaccagtattctgcagatgtcccc

SEQ ID NO: 89790 - DNA, 25 bp, Canis familiaris
ccaccatgttcctcaagttcaaaaa

SEQ ID NO: 89791 - DNA, 25 bp, Canis familiaris
ccaccagtgccctgaatgcgggaag

SEQ ID NO: 89792 - DNA, 25 bp, Canis familiaris
ccagccattccttgacaagccagag

SEQ ID NO: 89793 - DNA, 25 bp, Canis familiaris
ccagctcattccagaactgtagcag

SEQ ID NO: 89794 - DNA, 25 bp, Canis familiaris
ccaccagctctcagacacttaaagg

SEQ ID NO: 89795 - DNA, 25 bp, Canis familiaris
ccaccctcatcaagagcttccaaag

SEQ ID NO: 89796 - DNA, 25 bp, Canis familiaris
ccaccaccttgactctacaaatgga

SEQ ID NO: 89797 - DNA, 25 bp, Canis familiaris
ccaccgtggatgcatctcagaatca

SEQ ID NO: 89798 - DNA, 25 bp, Canis familiaris
ccaccagtgtatcagcattaacatg

SEQ ID NO: 89799 - DNA, 25 bp, Canis familiaris
ccacgccgacattatcttcgacatc

SEQ ID NO: 89800 - DNA, 25 bp, Canis familiaris
ccagcagccgcggtaattccagctc

SEQ ID NO: 89801 - DNA, 25 bp, Canis familiaris
ccacgcacgctgatcagaaacctgc

SEQ ID NO: 89802 - DNA, 25 bp, Canis familiaris
ccacctcagggtcgtgagacctgca

SEQ ID NO: 89803 - DNA, 25 bp, Canis familiaris
ccacctcgaagccttggcattcatg

SEQ ID NO: 89804 - DNA, 25 bp, Canis familiaris
ccagcctctgaaggttattgccagc

SEQ ID NO: 89805 - DNA, 25 bp, Canis familiaris
ccagctctcagattggtcttgtcag

SEQ ID NO: 89806 - DNA, 25 bp, Canis familiaris
ccagaccaacatgtttgccgtgacc

SEQ ID NO: 89807 - DNA, 25 bp, Canis familiaris
ccaaccaataccaccgtggaactag

SEQ ID NO: 89808 - DNA, 25 bp, Canis familiaris
ccaacaattaactcttatcggacga

SEQ ID NO: 89809 - DNA, 25 bp, Canis familiaris
ccaactattaccttgcttttgcata

SEQ ID NO: 89810 - DNA, 25 bp, Canis familiaris
ccaacggtatagtgctgccttcagc

SEQ ID NO: 89811 - DNA, 25 bp, Canis familiaris
ccaacggcaaagatgtcgcccgccg

SEQ ID NO: 89812 - DNA, 25 bp, Canis familiaris
ccagaccaaaggagggcagccggct

SEQ ID NO: 89813 - DNA, 25 bp, Canis familiaris
ccagaccaggaacggggctggcggg

SEQ ID NO: 89814 - DNA, 25 bp, Canis familiaris
ccagcaggaagccgggggctgtcgg

SEQ ID NO: 89815 - DNA, 25 bp, Canis familiaris
ccagcagcgatccgacgtggagctg

SEQ ID NO: 89816 - DNA, 25 bp, Canis familiaris
ccagccgacaaagctgcgcagctgc

SEQ ID NO: 89817 - DNA, 25 bp, Canis familiaris
ccagcctccaacggatgctgcagag

SEQ ID NO: 89818 - DNA, 25 bp, Canis familiaris
ccagcctcagcagccagaggatcac

SEQ ID NO: 89819 - DNA, 25 bp, Canis familiaris
ccagcctatgccctaggctgcacac

SEQ ID NO: 89820 - DNA, 25 bp, Canis familiaris
ccagcttcaccgaaggcatcttcaa

SEQ ID NO: 89821 - DNA, 25 bp, Canis familiaris
ccagcttcacttagtagcctactag

SEQ ID NO: 89822 - DNA, 25 bp, Canis familiaris
ccagcttcatctgtgatacccattg

SEQ ID NO: 89823 - DNA, 25 bp, Canis familiaris
ccagctactgctggtttctccaagg

SEQ ID NO: 89824 - DNA, 25 bp, Canis familiaris
ccagaactgcttcatgttgaaagat

SEQ ID NO: 89825 - DNA, 25 bp, Canis familiaris
ccagaccgcgcacattctgagagag

SEQ ID NO: 89826 - DNA, 25 bp, Canis familiaris
ccagctccccatcatctggaggaat

SEQ ID NO: 89827 - DNA, 25 bp, Canis familiaris
ccagctccatccactctgaatggaa

SEQ ID NO: 89828 - DNA, 25 bp, Canis familiaris
ccacctatgccaagtctacgagaac

SEQ ID NO: 89829 - DNA, 25 bp, Canis familiaris
ccagccccaaagttcacagaattct

SEQ ID NO: 89830 - DNA, 25 bp, Canis familiaris
ccactcctacttcatacaagtcctg

SEQ ID NO: 89831 - DNA, 25 bp, Canis familiaris
ccagccctcactcttaaaagcgtgg

SEQ ID NO: 89832 - DNA, 25 bp, Canis familiaris
ccactgtcgagtcttcaaccgaggg

SEQ ID NO: 89833 - DNA, 25 bp, Canis familiaris
ccaccatgaagtctggcaactcgga

SEQ ID NO: 89834 - DNA, 25 bp, Canis familiaris
ccaccagcaatgtgtggcccatcca

SEQ ID NO: 89835 - DNA, 25 bp, Canis familiaris
ccagccagaagtttggccgcagccc

SEQ ID NO: 89836 - DNA, 25 bp, Canis familiaris
ccagaaaggtggccaaccagccctg

SEQ ID NO: 89837 - DNA, 25 bp, Canis familiaris
gccagtaagtagttagaaagcccgc

SEQ ID NO: 89838 - DNA, 25 bp, Canis familiaris
tcctagagagttataaaagccagcc

SEQ ID NO: 89839 - DNA, 25 bp, Canis familiaris
ccacgcgcagcctttaaaaccagct

SEQ ID NO: 89840 - DNA, 25 bp, Canis familiaris
ccacttggacgttatacacacacac

SEQ ID NO: 89841 - DNA, 25 bp, Canis familiaris
ccagcttgtcccagataccacaggg

SEQ ID NO: 89842 - DNA, 25 bp, Canis familiaris
ccagactgtgcccaaggaacaagga

SEQ ID NO: 89843 - DNA, 25 bp, Canis familiaris
ccaccttgctgccatgttggaacgg

SEQ ID NO: 89844 - DNA, 25 bp, Canis familiaris
ccaattcgccacttcatggaactgg

SEQ ID NO: 89845 - DNA, 25 bp, Canis familiaris
ccaccccgacccagaaagggatcag

SEQ ID NO: 89846 - DNA, 25 bp, Canis familiaris
ccaccccggcccagagagatgagaa

SEQ ID NO: 89847 - DNA, 25 bp, Canis familiaris
ccacccttggccagtcaagcataat

SEQ ID NO: 89848 - DNA, 25 bp, Canis familiaris
ccaaacggtcacaagtatgccaaag

SEQ ID NO: 89849 - DNA, 25 bp, Canis familiaris
ccactacgtcccaagacatccaaaa

SEQ ID NO: 89850 - DNA, 25 bp, Canis familiaris
ccactagcagtcaacaatgaacacc

SEQ ID NO: 89851 - DNA, 25 bp, Canis familiaris
ccaccatctgtcaccatataacact

SEQ ID NO: 89852 - DNA, 25 bp, Canis familiaris
ccacctcatgtgacagccattgtga

SEQ ID NO: 89853 - DNA, 25 bp, Canis familiaris
ccacctcatgtgacagccattgtga

SEQ ID NO: 89854 - DNA, 25 bp, Canis familiaris
ccactgctctgtttccatgtgtgaa

SEQ ID NO: 89855 - DNA, 25 bp, Canis familiaris
ccacctcctggcacatagtaagtac

SEQ ID NO: 89856 - DNA, 25 bp, Canis familiaris
ccaccgccccatggaagattcgatg

SEQ ID NO: 89857 - DNA, 25 bp, Canis familiaris
ccacccaaaatggaaattaagccag

SEQ ID NO: 89858 - DNA, 25 bp, Canis familiaris
ccagcccgtaaggatggtttaccat

SEQ ID NO: 89859 - DNA, 25 bp, Canis familiaris
ccacgtgggacagacctttgaccgt

SEQ ID NO: 89860 - DNA, 25 bp, Canis familiaris
ccagccgggacagtaccagttttct

SEQ ID NO: 89861 - DNA, 25 bp, Canis familiaris
ccacccggaaggacagcagcttctc

SEQ ID NO: 89862 - DNA, 25 bp, Canis familiaris
ccagccccgaagctggagcatcctt

SEQ ID NO: 89863 - DNA, 25 bp, Canis familiaris
ccagcgatgccctagctgtggaacc

SEQ ID NO: 89864 - DNA, 25 bp, Canis familiaris
ccagcctggccaacatggtgaaacc

SEQ ID NO: 89865 - DNA, 25 bp, Canis familiaris
ccagccagcccatctgttaaaacat

SEQ ID NO: 89866 - DNA, 25 bp, Canis familiaris
ccagcctgcttttttgtacaaactt

SEQ ID NO: 89867 - DNA, 25 bp, Canis familiaris
ccagccactattttgttgactatga

SEQ ID NO: 89868 - DNA, 25 bp, Canis familiaris
ccagccctcttctgtatttgtaatt

SEQ ID NO: 89869 - DNA, 25 bp, Canis familiaris
ccagctcccattcagtaattctatg

SEQ ID NO: 89870 - DNA, 25 bp, Canis familiaris
ccacctcctccgagaagtcttggaa

SEQ ID NO: 89871 - DNA, 25 bp, Canis familiaris
ccaccaccccagagggtctgagggc

SEQ ID NO: 89872 - DNA, 25 bp, Canis familiaris
ccacccccaagcaggagggcaagga

SEQ ID NO: 89873 - DNA, 25 bp, Canis familiaris
ccacccttggacacggagccaagtg

SEQ ID NO: 89874 - DNA, 25 bp, Canis familiaris
ccaccctaggactacggcaggacga

SEQ ID NO: 89875 - DNA, 25 bp, Canis familiaris
ccaccacctggaggcccagggatcg

SEQ ID NO: 89876 - DNA, 25 bp, Canis familiaris
ccactccctagggaccagcaggtgg

SEQ ID NO: 89877 - DNA, 25 bp, Canis familiaris
ccagcgcctcgtaagcaaacggtgg

SEQ ID NO: 89878 - DNA, 25 bp, Canis familiaris
ccagcgtctcttaggcgacatctgg

SEQ ID NO: 89879 - DNA, 25 bp, Canis familiaris
ccagcgtcatctccagactggactt

SEQ ID NO: 89880 - DNA, 25 bp, Canis familiaris
ccagcagccattccagagttgactg

SEQ ID NO: 89881 - DNA, 25 bp, Canis familiaris
ccagcgccagtgggaggatactgta

SEQ ID NO: 89882 - DNA, 25 bp, Canis familiaris
ccagcccttgagctgcacaactgta

SEQ ID NO: 89883 - DNA, 25 bp, Canis familiaris
ccagcctccaggctgcaagactctg

SEQ ID NO: 89884 - DNA, 25 bp, Canis familiaris
ccagctcccatgggtccagagtgat

SEQ ID NO: 89885 - DNA, 25 bp, Canis familiaris
ccagccaccatagcccaaggagtgg

SEQ ID NO: 89886 - DNA, 25 bp, Canis familiaris
ccagacatctctatcccaaaggtga

SEQ ID NO: 89887 - DNA, 25 bp, Canis familiaris
ccaatttgatcatcctcaactgggg

SEQ ID NO: 89888 - DNA, 25 bp, Canis familiaris
ccactttgtcaagctcatttcctgg

SEQ ID NO: 89889 - DNA, 25 bp, Canis familiaris
ccactttgtcaagctcatttcctgg

SEQ ID NO: 89890 - DNA, 25 bp, Canis familiaris
ccactttgtcaagctcatttcctgg

SEQ ID NO: 89891 - DNA, 25 bp, Canis familiaris
ccagctttgtccactttgtattagc

SEQ ID NO: 89892 - DNA, 25 bp, Canis familiaris
ccagcacttttccttgttgacaatc

SEQ ID NO: 89893 - DNA, 25 bp, Canis familiaris
ccacctgttcctatgtgtgatccat

SEQ ID NO: 89894 - DNA, 25 bp, Canis familiaris
ccaccgaggcctattgatcatgtca

SEQ ID NO: 89895 - DNA, 25 bp, Canis familiaris
ccaccgagcagcgttcggtttcgtg

SEQ ID NO: 89896 - DNA, 25 bp, Canis familiaris
ccaccgacaggaacgacttccggag

SEQ ID NO: 89897 - DNA, 25 bp, Canis familiaris
ccagcgctgatcttgcaaagcacta

SEQ ID NO: 89898 - DNA, 25 bp, Canis familiaris
ccagcgctaggtccaatgactcagg

SEQ ID NO: 89899 - DNA, 25 bp, Canis familiaris
ccagcgcatcatcgatggctctggc

SEQ ID NO: 89900 - DNA, 25 bp, Canis familiaris
ccagcagccatgcaggccttagttt

SEQ ID NO: 89901 - DNA, 25 bp, Canis familiaris
ccagccttgagccagttgtagttgt

SEQ ID NO: 89902 - DNA, 25 bp, Canis familiaris
ccacgtctacggttgatcggtcaac

SEQ ID NO: 89903 - DNA, 25 bp, Canis familiaris
ccacgtctcactcgtagtggcggac

SEQ ID NO: 89904 - DNA, 25 bp, Canis familiaris
ccacgctgctttcttggggtgggtc

SEQ ID NO: 89905 - DNA, 25 bp, Canis familiaris
ccagcaggccctgttgctggtggtg

SEQ ID NO: 89906 - DNA, 25 bp, Canis familiaris
ccagcttcccatctgtcatgggggc

SEQ ID NO: 89907 - DNA, 25 bp, Canis familiaris
ccaccacaaatgcttctagatggac

SEQ ID NO: 89908 - DNA, 25 bp, Canis familiaris
ccaccgcaaatgcttctaggcggac

SEQ ID NO: 89909 - DNA, 25 bp, Canis familiaris
ccacccaactgctgaggggcggcag

SEQ ID NO: 89910 - DNA, 25 bp, Canis familiaris
ccaccagcgccgtgtgtgtggctgg

SEQ ID NO: 89911 - DNA, 25 bp, Canis familiaris
ccacccctcctaatgtttgctggag

SEQ ID NO: 89912 - DNA, 25 bp, Canis familiaris
ccacctatgtccacgctgttggtgg

SEQ ID NO: 89913 - DNA, 25 bp, Canis familiaris
ccacccttgcaggtcacatttttgg

SEQ ID NO: 89914 - DNA, 25 bp, Canis familiaris
ccagccgtctgcggtacttggttac

SEQ ID NO: 89915 - DNA, 25 bp, Canis familiaris
ccagcctggtggctcacttgatggt

SEQ ID NO: 89916 - DNA, 25 bp, Canis familiaris
ccagcactgcagggttcctgttggc

SEQ ID NO: 89917 - DNA, 25 bp, Canis familiaris
ccagcacgagggttgatctttgctg

SEQ ID NO: 89918 - DNA, 25 bp, Canis familiaris
ccacacaggcggtagtcttgatagt

SEQ ID NO: 89919 - DNA, 25 bp, Canis familiaris
ccacatccaaggaagtgcttgcatg

SEQ ID NO: 89920 - DNA, 25 bp, Canis familiaris
ccagctgcttgacgaagtcctgcat

SEQ ID NO: 89921 - DNA, 25 bp, Canis familiaris
ccagcctctgcacagacatggctca

SEQ ID NO: 89922 - DNA, 25 bp, Canis familiaris
ccagcactgctgagggctggctgcg

SEQ ID NO: 89923 - DNA, 25 bp, Canis familiaris
ccagcctcagtccaggaggccggag

SEQ ID NO: 89924 - DNA, 25 bp, Canis familiaris
ccagcgtctatgcaggcgcaggggg

SEQ ID NO: 89925 - DNA, 25 bp, Canis familiaris
ccagcagggtcggcagagcaagggg

SEQ ID NO: 89926 - DNA, 25 bp, Canis familiaris
ccagcgggaccaggccaagctggga

SEQ ID NO: 89927 - DNA, 25 bp, Canis familiaris
ccagccggacaccggccgcattgag

SEQ ID NO: 89928 - DNA, 25 bp, Canis familiaris
ccaccaggtaccaggccaagaggaa

SEQ ID NO: 89929 - DNA, 25 bp, Canis familiaris
ccaacaggaaccagcagactttgga

SEQ ID NO: 89930 - DNA, 25 bp, Canis familiaris
ccaccagagaccttccagaatttgg

SEQ ID NO: 89931 - DNA, 25 bp, Canis familiaris
ccaagcgtaccatccagtttgtgga

SEQ ID NO: 89932 - DNA, 25 bp, Canis familiaris
ccacgggactctctatgtttgatat

SEQ ID NO: 89933 - DNA, 25 bp, Canis familiaris
ccaacaggcctaccctgttatctat

SEQ ID NO: 89934 - DNA, 25 bp, Canis familiaris
ccaccaggcatttgtcaaggcttct

SEQ ID NO: 89935 - DNA, 25 bp, Canis familiaris
ccaccacgctttgaagcctgtgctg

SEQ ID NO: 89936 - DNA, 25 bp, Canis familiaris
ccaaaacctttcaacctctctggat

SEQ ID NO: 89937 - DNA, 25 bp, Canis familiaris
ccaaaacctcttcagtcagcatgtg

SEQ ID NO: 89938 - DNA, 25 bp, Canis familiaris
ccagcaacttcctcgagatcgatgt

SEQ ID NO: 89939 - DNA, 25 bp, Canis familiaris
ccagcacctccacttactgggatgt

SEQ ID NO: 89940 - DNA, 25 bp, Canis familiaris
ccagcacacgtctttcaaggagatg

SEQ ID NO: 89941 - DNA, 25 bp, Canis familiaris
ccaccatagtccatcacagcagacg

SEQ ID NO: 89942 - DNA, 25 bp, Canis familiaris
ccaccaagtgcccacatgggtcagc

SEQ ID NO: 89943 - DNA, 25 bp, Canis familiaris
ccagctgcagcaccgaagtgggtag

SEQ ID NO: 89944 - DNA, 25 bp, Canis familiaris
ccagctgcaaccagcagtggcggga

SEQ ID NO: 89945 - DNA, 25 bp, Canis familiaris
ccagctataccagaggtcaggagac

SEQ ID NO: 89946 - DNA, 25 bp, Canis familiaris
ccagcttagccctgttgcagaggca

SEQ ID NO: 89947 - DNA, 25 bp, Canis familiaris
ccagcttatgctatgagctttaggg

SEQ ID NO: 89948 - DNA, 25 bp, Canis familiaris
ccactgttgtatacgcttattgaga

SEQ ID NO: 89949 - DNA, 25 bp, Canis familiaris
ccactttgtccattttactgtttat

SEQ ID NO: 89950 - DNA, 25 bp, Canis familiaris
ccaccctgaccacaaactgttgtac

SEQ ID NO: 89951 - DNA, 25 bp, Canis familiaris
ccacccagaccataggcgtgtgtgt

SEQ ID NO: 89952 - DNA, 25 bp, Canis familiaris
gccacccaacatcaagttctttgtc

SEQ ID NO: 89953 - DNA, 25 bp, Canis familiaris
ccactcctaagcagtggtttgtgtc

SEQ ID NO: 89954 - DNA, 25 bp, Canis familiaris
ccactttccagctctgttttgctgt

SEQ ID NO: 89955 - DNA, 25 bp, Canis familiaris
ccaccctgccaacatgttttcttgg

SEQ ID NO: 89956 - DNA, 25 bp, Canis familiaris
ccaccctgcacatgcttttgatggt

SEQ ID NO: 89957 - DNA, 25 bp, Canis familiaris
ccaccccatctgttttggatgctgg

SEQ ID NO: 89958 - DNA, 25 bp, Canis familiaris
gccacaaccgtgttttggtatcgcc

SEQ ID NO: 89959 - DNA, 25 bp, Canis familiaris
ccacaacgtgaattttgcaaacagg

SEQ ID NO: 89960 - DNA, 25 bp, Canis familiaris
ccacctcggaatgccccaaggtgag

SEQ ID NO: 89961 - DNA, 25 bp, Canis familiaris
gccacgggagaaaccccaacgtgcg

SEQ ID NO: 89962 - DNA, 25 bp, Canis familiaris
ccaccggagaggagaccaaccctgg

SEQ ID NO: 89963 - DNA, 25 bp, Canis familiaris
ccacctggagaggggcaaccagccc

SEQ ID NO: 89964 - DNA, 25 bp, Canis familiaris
ccacccagagacaggaagaagccag

SEQ ID NO: 89965 - DNA, 25 bp, Canis familiaris
ccacccaggactacggcaaggacga

SEQ ID NO: 89966 - DNA, 25 bp, Canis familiaris
ccaaaggccctgagtagaggaccag

SEQ ID NO: 89967 - DNA, 25 bp, Canis familiaris
ccactaggggtcaggaggtggccgc

SEQ ID NO: 89968 - DNA, 25 bp, Canis familiaris
gcccccgggtgctggtattggggca

SEQ ID NO: 89969 - DNA, 25 bp, Canis familiaris
gccgacccagggtgctaattgtggt

SEQ ID NO: 89970 - DNA, 25 bp, Canis familiaris
gcagacccaagtttactaattgggg

SEQ ID NO: 89971 - DNA, 25 bp, Canis familiaris
ccacgcctgagttctaccaagtgtg

SEQ ID NO: 89972 - DNA, 25 bp, Canis familiaris
ccagccattggttcttcgatattct

SEQ ID NO: 89973 - DNA, 25 bp, Canis familiaris
ccagctcctggtgtgttgaagtctt

SEQ ID NO: 89974 - DNA, 25 bp, Canis familiaris
ccagccctggggcagtgaagtgcta

SEQ ID NO: 89975 - DNA, 25 bp, Canis familiaris
ccagccatgctttcggaataatctt

SEQ ID NO: 89976 - DNA, 25 bp, Canis familiaris
ccagcctctttctttatagcttttg

SEQ ID NO: 89977 - DNA, 25 bp, Canis familiaris
ccagcctgacctttaatacctttgt

SEQ ID NO: 89978 - DNA, 25 bp, Canis familiaris
ccagctcttcctttagatttcatat

SEQ ID NO: 89979 - DNA, 25 bp, Canis familiaris
ccacgttcacattctaattccacat

SEQ ID NO: 89980 - DNA, 25 bp, Canis familiaris
ccacgtcgcttgttcagtgtgacca

SEQ ID NO: 89981 - DNA, 25 bp, Canis familiaris
ccagcagtacctttcaggctcattt

SEQ ID NO: 89982 - DNA, 25 bp, Canis familiaris
ccagcagtacatttgaagcactttt

SEQ ID NO: 89983 - DNA, 25 bp, Canis familiaris
ccacaagcactatatcctcttctgc

SEQ ID NO: 89984 - DNA, 25 bp, Canis familiaris
ccagcagagagctcgcttctttctg

SEQ ID NO: 89985 - DNA, 25 bp, Canis familiaris
ccacaggcacacacttgcttttttg

SEQ ID NO: 89986 - DNA, 25 bp, Canis familiaris
ccacccagtcatctctgaatttttt

SEQ ID NO: 89987 - DNA, 25 bp, Canis familiaris
ccacccgtctcattgtttatttgat

SEQ ID NO: 89988 - DNA, 25 bp, Canis familiaris
ccaccagcctctattgattgtacta

SEQ ID NO: 89989 - DNA, 25 bp, Canis familiaris
ccaccacatcctgactactacagta

SEQ ID NO: 89990 - DNA, 25 bp, Canis familiaris
ccagctcacccagagtgattccatg

SEQ ID NO: 89991 - DNA, 25 bp, Canis familiaris
ccagctctccaagaggtgataaggc

SEQ ID NO: 89992 - DNA, 25 bp, Canis familiaris
ccagccccgagcagggagaaggcaa

SEQ ID NO: 89993 - DNA, 25 bp, Canis familiaris
ccagcgcgcctggaacagggaggga

SEQ ID NO: 89994 - DNA, 25 bp, Canis familiaris
ccagctggcattttgtcacggagga

SEQ ID NO: 89995 - DNA, 25 bp, Canis familiaris
ccactgccttcgactacgtggagtt

SEQ ID NO: 89996 - DNA, 25 bp, Canis familiaris
ccacatcctgaactaacgtacagta

SEQ ID NO: 89997 - DNA, 25 bp, Canis familiaris
ccaccccaattacggtcacagtgct

SEQ ID NO: 89998 - DNA, 25 bp, Canis familiaris
ccacgcagccaaccaggagtcagtg

SEQ ID NO: 89999 - DNA, 25 bp, Canis familiaris
gccacctccagacctgtagtagtgg

SEQ ID NO: 90000 - DNA, 25 bp, Canis familiaris
ccacctctaggcgagccaggagtcc

SEQ ID NO: 90001 - DNA, 25 bp, Canis familiaris
gtaccttaccaacgagggtatccag

SEQ ID NO: 90002 - DNA, 25 bp, Canis familiaris
tgtaagttccccaggaattaccagt

SEQ ID NO: 90003 - DNA, 25 bp, Canis familiaris
ccaagatcccctgtggttgataccg

SEQ ID NO: 90004 - DNA, 25 bp, Canis familiaris
ccaaagccccccagattcatggctt

SEQ ID NO: 90005 - DNA, 25 bp, Canis familiaris
gccaagggcccctgaatccagggtt

SEQ ID NO: 90006 - DNA, 25 bp, Canis familiaris
ccacgaggcctagttgaaccagcgg

SEQ ID NO: 90007 - DNA, 25 bp, Canis familiaris
ccagcagtgggcaagtctattcgac

SEQ ID NO: 90008 - DNA, 25 bp, Canis familiaris
ccagcgtgggagtcctgactcagac

SEQ ID NO: 90009 - DNA, 25 bp, Canis familiaris
ccacctggagagccacaagctaaca

SEQ ID NO: 90010 - DNA, 25 bp, Canis familiaris
ccaccttggggcgcagtgcagaagt

SEQ ID NO: 90011 - DNA, 25 bp, Canis familiaris
ccagcccgtggacgattgggaagat

SEQ ID NO: 90012 - DNA, 25 bp, Canis familiaris
ccagctcacaggccacggagtggaa

SEQ ID NO: 90013 - DNA, 25 bp, Canis familiaris
ccacttctggcacacatggggacac

SEQ ID NO: 90014 - DNA, 25 bp, Canis familiaris
ccagcttcctgcgcaaggagctgcc

SEQ ID NO: 90015 - DNA, 25 bp, Canis familiaris
ccagcttattcggcgtgacgcatcg

SEQ ID NO: 90016 - DNA, 25 bp, Canis familiaris
ccagctgctgttcggggacgatggg

SEQ ID NO: 90017 - DNA, 25 bp, Canis familiaris
ccagctgtgatgtggggcctggggg

SEQ ID NO: 90018 - DNA, 25 bp, Canis familiaris
ccagctggctgctgagaacctgggc

SEQ ID NO: 90019 - DNA, 25 bp, Canis familiaris
ccagctacattccggaccgagtgcg

SEQ ID NO: 90020 - DNA, 25 bp, Canis familiaris
ccaccaatggcccagtcatcaaggc

SEQ ID NO: 90021 - DNA, 25 bp, Canis familiaris
ccacctgtaccctagcatcaatgtg

SEQ ID NO: 90022 - DNA, 25 bp, Canis familiaris
ccagctgctggtgccaggcaacttg

SEQ ID NO: 90023 - DNA, 25 bp, Canis familiaris
ccactgtgggccaactggcatcttg

SEQ ID NO: 90024 - DNA, 25 bp, Canis familiaris
ccacgtgatgacgaggatgtgatct

SEQ ID NO: 90025 - DNA, 25 bp, Canis familiaris
ccaccagtgacggggctggcatggc

SEQ ID NO: 90026 - DNA, 25 bp, Canis familiaris
ccaaggtcaagtgcctgcgcaatga

SEQ ID NO: 90027 - DNA, 25 bp, Canis familiaris
ccagccttcacactactgtcgaaga

SEQ ID NO: 90028 - DNA, 25 bp, Canis familiaris
ccaccaaatattgcgcacgaagagt

SEQ ID NO: 90029 - DNA, 25 bp, Canis familiaris
ccaccacaagggccgacgaggtgta

SEQ ID NO: 90030 - DNA, 25 bp, Canis familiaris
ccaccaacagcgtggcacacggtgt

SEQ ID NO: 90031 - DNA, 25 bp, Canis familiaris
ccagctgcccaggaaggcagcacgg

SEQ ID NO: 90032 - DNA, 25 bp, Canis familiaris
ccagccacaccaaaggcgagcaggg

SEQ ID NO: 90033 - DNA, 25 bp, Canis familiaris
ccagctatcaactcgcgccctggaa

SEQ ID NO: 90034 - DNA, 25 bp, Canis familiaris
ccagctcgcaagtttggcgcgtgag

SEQ ID NO: 90035 - DNA, 25 bp, Canis familiaris
ccagctcacaaggtgtgtcctggtg

SEQ ID NO: 90036 - DNA, 25 bp, Canis familiaris
ccagctccaaggttgtcctggtgcc

SEQ ID NO: 90037 - DNA, 25 bp, Canis familiaris
ccagctcccaggattctggggccgg

SEQ ID NO: 90038 - DNA, 25 bp, Canis familiaris
ccagccccagccacacaggggctgc

SEQ ID NO: 90039 - DNA, 25 bp, Canis familiaris
ccaccccgaatgttcaggaggctgt

SEQ ID NO: 90040 - DNA, 25 bp, Canis familiaris
ccacccacaggggctggggactgtc

SEQ ID NO: 90041 - DNA, 25 bp, Canis familiaris
ccagcctagcggccactgggagaaa

SEQ ID NO: 90042 - DNA, 25 bp, Canis familiaris
ccagccttgggccctggctggaagc

SEQ ID NO: 90043 - DNA, 25 bp, Canis familiaris
ccacctctaagcctgtggcggaacc

SEQ ID NO: 90044 - DNA, 25 bp, Canis familiaris
ccactccaacccaatgcgtggaacc

SEQ ID NO: 90045 - DNA, 25 bp, Canis familiaris
ccactcccaccctggggaaggagag

SEQ ID NO: 90046 - DNA, 25 bp, Canis familiaris
ccacttcctccgtggggaggggcag

SEQ ID NO: 90047 - DNA, 25 bp, Canis familiaris
ccaactccttcgtgggcacaaggtc

SEQ ID NO: 90048 - DNA, 25 bp, Canis familiaris
ccaccccccagatgaggaactgagt

SEQ ID NO: 90049 - DNA, 25 bp, Canis familiaris
ccaaactcctcaacgggaagtcgtg

SEQ ID NO: 90050 - DNA, 25 bp, Canis familiaris
ccaccattcttctcgggagaagggc

SEQ ID NO: 90051 - DNA, 25 bp, Canis familiaris
ccaccaatcgtcatgaggagatgga

SEQ ID NO: 90052 - DNA, 25 bp, Canis familiaris
ccacctcttggcctgagggtagcag

SEQ ID NO: 90053 - DNA, 25 bp, Canis familiaris
ccaccctatccactgggggagcaat

SEQ ID NO: 90054 - DNA, 25 bp, Canis familiaris
ccaacttcccagggctggtggcaag

SEQ ID NO: 90055 - DNA, 25 bp, Canis familiaris
ccaacttcaagctctaggagagcaa

SEQ ID NO: 90056 - DNA, 25 bp, Canis familiaris
ccaagccctgcctgtaaaggccaag

SEQ ID NO: 90057 - DNA, 25 bp, Canis familiaris
ccacccgcctctttaaagcgtgcgg

SEQ ID NO: 90058 - DNA, 25 bp, Canis familiaris
ccaaccccgcttcaacaagtggtgg

SEQ ID NO: 90059 - DNA, 25 bp, Canis familiaris
ccaacaccccatttaaaagcggctg

SEQ ID NO: 90060 - DNA, 25 bp, Canis familiaris
ccaacactggcttcaaaaaggcgga

SEQ ID NO: 90061 - DNA, 25 bp, Canis familiaris
ccaccacagagggaaacacatgccg

SEQ ID NO: 90062 - DNA, 25 bp, Canis familiaris
ccagcccgcaggtccaaagcagcgg

SEQ ID NO: 90063 - DNA, 25 bp, Canis familiaris
ccacgctcagcaagatccagaagtc

SEQ ID NO: 90064 - DNA, 25 bp, Canis familiaris
ccagcccagcaccattggatgagtg

SEQ ID NO: 90065 - DNA, 25 bp, Canis familiaris
ccagccaggcatacctgtgtgtgtg

SEQ ID NO: 90066 - DNA, 25 bp, Canis familiaris
ccaccaggctgttcagttgctggca

SEQ ID NO: 90067 - DNA, 25 bp, Canis familiaris
ccaccacctacaggatctgcaggac

SEQ ID NO: 90068 - DNA, 25 bp, Canis familiaris
ccaccacatctgacatctttattga

SEQ ID NO: 90069 - DNA, 25 bp, Canis familiaris
ccaccacctgccacttaagaggctt

SEQ ID NO: 90070 - DNA, 25 bp, Canis familiaris
ccagctcacgttccctattagtggg

SEQ ID NO: 90071 - DNA, 25 bp, Canis familiaris
ccaccactgatcacccatatattga

SEQ ID NO: 90072 - DNA, 25 bp, Canis familiaris
ccaccttgtagcaccatctactggc

SEQ ID NO: 90073 - DNA, 25 bp, Canis familiaris
ccacctggaacaagccatccactgg

SEQ ID NO: 90074 - DNA, 25 bp, Canis familiaris
ccaaccgcagacactaccagatggt

SEQ ID NO: 90075 - DNA, 25 bp, Canis familiaris
ccaccattgcgagaccaccaaggtc

SEQ ID NO: 90076 - DNA, 25 bp, Canis familiaris
ccaccattagcagagccaacaaagg

SEQ ID NO: 90077 - DNA, 25 bp, Canis familiaris
ccagccttccaggagtgaagaaagc

SEQ ID NO: 90078 - DNA, 25 bp, Canis familiaris
ccacctgtccagggcaataggaaga

SEQ ID NO: 90079 - DNA, 25 bp, Canis familiaris
ccagccaaccagcgcaagggagaga

SEQ ID NO: 90080 - DNA, 25 bp, Canis familiaris
ccagccgcaccatggctaggaagag

SEQ ID NO: 90081 - DNA, 25 bp, Canis familiaris
ccagctctcacctgagtggtgaaag

SEQ ID NO: 90082 - DNA, 25 bp, Canis familiaris
ccagctccccctgatggtgagagct

SEQ ID NO: 90083 - DNA, 25 bp, Canis familiaris
ccacttcccctctggtgaagtttgt

SEQ ID NO: 90084 - DNA, 25 bp, Canis familiaris
ccaccatacccctgtgtagatgtgt

SEQ ID NO: 90085 - DNA, 25 bp, Canis familiaris
ccaccattcccctgcaacagaatgt

SEQ ID NO: 90086 - DNA, 25 bp, Canis familiaris
ccacccttcaccggcaaagagtgta

SEQ ID NO: 90087 - DNA, 25 bp, Canis familiaris
ccacgccttggtgcgagtatcggtg

SEQ ID NO: 90088 - DNA, 25 bp, Canis familiaris
ccacgctgttggtggaaacacagtg

SEQ ID NO: 90089 - DNA, 25 bp, Canis familiaris
ccagctgctattgaaggaacaccat

SEQ ID NO: 90090 - DNA, 25 bp, Canis familiaris
ccagcctcattcctcatggaaagcc

SEQ ID NO: 90091 - DNA, 25 bp, Canis familiaris
ccagcgctctactacatggactact

SEQ ID NO: 90092 - DNA, 25 bp, Canis familiaris
ccagctgtcttcccagtattatttt

SEQ ID NO: 90093 - DNA, 25 bp, Canis familiaris
ccacgttccgtatatctgatttttc

SEQ ID NO: 90094 - DNA, 25 bp, Canis familiaris
ccacgcgtccgaattttgctatgta

SEQ ID NO: 90095 - DNA, 25 bp, Canis familiaris
ccacctgtcgccaagtgtttcagaa

SEQ ID NO: 90096 - DNA, 25 bp, Canis familiaris
ccacctttgtcaagatgctaccaga

SEQ ID NO: 90097 - DNA, 25 bp, Canis familiaris
ccagcctccatgacaattccaaagg

SEQ ID NO: 90098 - DNA, 25 bp, Canis familiaris
ccactctcacgttcaaccaaaggag

SEQ ID NO: 90099 - DNA, 25 bp, Canis familiaris
ccacttcgtcttcaccaacgagagc

SEQ ID NO: 90100 - DNA, 25 bp, Canis familiaris
ccagcccttcttcaactactgaagc

SEQ ID NO: 90101 - DNA, 25 bp, Canis familiaris
ccagcccgtctgtctgaactagaaa

SEQ ID NO: 90102 - DNA, 25 bp, Canis familiaris
ccagcctctgtcgctgttatgagga

SEQ ID NO: 90103 - DNA, 25 bp, Canis familiaris
ccagctccaccagttgttaatgcga

SEQ ID NO: 90104 - DNA, 25 bp, Canis familiaris
ccagcctgcactggctggctctggt

SEQ ID NO: 90105 - DNA, 25 bp, Canis familiaris
ccagcctggtctcacatgctggtct

SEQ ID NO: 90106 - DNA, 25 bp, Canis familiaris
ccagcctgggcgacagagcgagact

SEQ ID NO: 90107 - DNA, 25 bp, Canis familiaris
ccagccatggggacacggaacatta

SEQ ID NO: 90108 - DNA, 25 bp, Canis familiaris
ccacctgctgggacctgcaaagtgt

SEQ ID NO: 90109 - DNA, 25 bp, Canis familiaris
ccacctggctgtgccttaattgtgg

SEQ ID NO: 90110 - DNA, 25 bp, Canis familiaris
ccacgggctttctcttgtatgagga

SEQ ID NO: 90111 - DNA, 25 bp, Canis familiaris
ccacgggatttcagcttccaggaaa

SEQ ID NO: 90112 - DNA, 25 bp, Canis familiaris
ccacagggtcccagcgtggggacta

SEQ ID NO: 90113 - DNA, 25 bp, Canis familiaris
ccacggagctcggaccgtgtcgggt

SEQ ID NO: 90114 - DNA, 25 bp, Canis familiaris
ccacggcactccgcgagctgtatcg

SEQ ID NO: 90115 - DNA, 25 bp, Canis familiaris
ccaccacacttctgcaagttcatgg

SEQ ID NO: 90116 - DNA, 25 bp, Canis familiaris
ccaccttgcttgcctgaagctttgg

SEQ ID NO: 90117 - DNA, 25 bp, Canis familiaris
ccaccttttgtggaggctctgttct

SEQ ID NO: 90118 - DNA, 25 bp, Canis familiaris
ccagccttgttatctaccagttgta

SEQ ID NO: 90119 - DNA, 25 bp, Canis familiaris
tccagccttttagctccctaaatga

SEQ ID NO: 90120 - DNA, 25 bp, Canis familiaris
ccaccatatattctccctttgaagt

SEQ ID NO: 90121 - DNA, 25 bp, Canis familiaris
ccaccaaactggcccacttgattag

SEQ ID NO: 90122 - DNA, 25 bp, Canis familiaris
ccaccaataactcgctcatgctttt

SEQ ID NO: 90123 - DNA, 25 bp, Canis familiaris
ccaccttaactggcctgccatattg

SEQ ID NO: 90124 - DNA, 25 bp, Canis familiaris
ccactcttaaatccctcttaacgag

SEQ ID NO: 90125 - DNA, 25 bp, Canis familiaris
gctggttttggaatcccttaaccag

SEQ ID NO: 90126 - DNA, 25 bp, Canis familiaris
gcccatggttcgagactttcaacca

SEQ ID NO: 90127 - DNA, 25 bp, Canis familiaris
ccactgtggtcgtttctcattcgac

SEQ ID NO: 90128 - DNA, 25 bp, Canis familiaris
ccacgtttcgtgttatcaatgtatc

SEQ ID NO: 90129 - DNA, 25 bp, Canis familiaris
ccacgttccactactaccattatgg

SEQ ID NO: 90130 - DNA, 25 bp, Canis familiaris
ccaccttcgctggttacgtgattgg

SEQ ID NO: 90131 - DNA, 25 bp, Canis familiaris
ccacatttcttcgttccgtaatggc

SEQ ID NO: 90132 - DNA, 25 bp, Canis familiaris
ccacatctttgtctccgagtactgg

SEQ ID NO: 90133 - DNA, 25 bp, Canis familiaris
ccacagcttttccccagataagcct

SEQ ID NO: 90134 - DNA, 25 bp, Canis familiaris
ccacgctttgtcccatgtagagagc

SEQ ID NO: 90135 - DNA, 25 bp, Canis familiaris
ccacgtctctgtgctcaacatggag

SEQ ID NO: 90136 - DNA, 25 bp, Canis familiaris
ccacgtatcagtggctcgtctgctg

SEQ ID NO: 90137 - DNA, 25 bp, Canis familiaris
ccaccagtgctgtgggtctgctgtt

SEQ ID NO: 90138 - DNA, 25 bp, Canis familiaris
ccaccagtgctgtgggtctgctgtt

SEQ ID NO: 90139 - DNA, 25 bp, Canis familiaris
ccaccatggtgggagactctgcttg

SEQ ID NO: 90140 - DNA, 25 bp, Canis familiaris
ccagcctgtgtggtgtggtcttggc

SEQ ID NO: 90141 - DNA, 25 bp, Canis familiaris
ccagcctgtgtggcgacgacgtggt

SEQ ID NO: 90142 - DNA, 25 bp, Canis familiaris
ccagcccgtgacctgtgaggatggt

SEQ ID NO: 90143 - DNA, 25 bp, Canis familiaris
ccacctctctgagctctgcaggtgg

SEQ ID NO: 90144 - DNA, 25 bp, Canis familiaris
ccacctcctcaggcttcagaatgag

SEQ ID NO: 90145 - DNA, 25 bp, Canis familiaris
ccacctgccatctcataaacaagac

SEQ ID NO: 90146 - DNA, 25 bp, Canis familiaris
ccaccctgcatctcatctaagaaga

SEQ ID NO: 90147 - DNA, 25 bp, Canis familiaris
ccacctctgctctaagcatgcaaag

SEQ ID NO: 90148 - DNA, 25 bp, Canis familiaris
ccaccctctagagtgtgcacattac

SEQ ID NO: 90149 - DNA, 25 bp, Canis familiaris
ccaccattgtcatttgagcacatgt

SEQ ID NO: 90150 - DNA, 25 bp, Canis familiaris
ccaccttatctcctgacatcatgga

SEQ ID NO: 90151 - DNA, 25 bp, Canis familiaris
ccaccctgtcatgctgacattgcac

SEQ ID NO: 90152 - DNA, 25 bp, Canis familiaris
ccacagatcgccaactgcagcattt

SEQ ID NO: 90153 - DNA, 25 bp, Canis familiaris
ccacagcactgagctctatgagcct

SEQ ID NO: 90154 - DNA, 25 bp, Canis familiaris
ccacagaacacaccaaagcagcaac

SEQ ID NO: 90155 - DNA, 25 bp, Canis familiaris
ccacatacccagtcggaacaggcaa

SEQ ID NO: 90156 - DNA, 25 bp, Canis familiaris
ccactctcctactggatgacaggat

SEQ ID NO: 90157 - DNA, 25 bp, Canis familiaris
ccagccctaatctctgtacaggatg

SEQ ID NO: 90158 - DNA, 25 bp, Canis familiaris
ccacccaacactggctgagtagagt

SEQ ID NO: 90159 - DNA, 25 bp, Canis familiaris
ccaccctaccacctgcaggaggtgg

SEQ ID NO: 90160 - DNA, 25 bp, Canis familiaris
ccacctctacctctcagagatacag

SEQ ID NO: 90161 - DNA, 25 bp, Canis familiaris
ccactttaccactagcagtcaacaa

SEQ ID NO: 90162 - DNA, 25 bp, Canis familiaris
ccactggtacacacagcagccagcc

SEQ ID NO: 90163 - DNA, 25 bp, Canis familiaris
ccactgagccaggctcaaggccgcc

SEQ ID NO: 90164 - DNA, 25 bp, Canis familiaris
ccacgaccatgaggttctgctggcc

SEQ ID NO: 90165 - DNA, 25 bp, Canis familiaris
ccactactgcgagggtgggtgcccg

SEQ ID NO: 90166 - DNA, 25 bp, Canis familiaris
ccactacccagcgcttggtggacag

SEQ ID NO: 90167 - DNA, 25 bp, Canis familiaris
ccaccatcccctgcatggatgcagg

SEQ ID NO: 90168 - DNA, 25 bp, Canis familiaris
ccaccattccacaactgcagcatgg

SEQ ID NO: 90169 - DNA, 25 bp, Canis familiaris
ccaccacatccacagtcatgctgat

SEQ ID NO: 90170 - DNA, 25 bp, Canis familiaris
ccagccctccagaagacagtgactg

SEQ ID NO: 90171 - DNA, 25 bp, Canis familiaris
ccaccacccagagcaagagacgatt

SEQ ID NO: 90172 - DNA, 25 bp, Canis familiaris
ccacgaccacatcagcacaggagga

SEQ ID NO: 90173 - DNA, 25 bp, Canis familiaris
ccaccaccagcaaacacctgaggtg

SEQ ID NO: 90174 - DNA, 25 bp, Canis familiaris
ccaccctcagaggatcccggaggtg

SEQ ID NO: 90175 - DNA, 25 bp, Canis familiaris
ccagcccagagggtccttggctagg

SEQ ID NO: 90176 - DNA, 25 bp, Canis familiaris
ccaccaaagtgcgcctgattcgggg

SEQ ID NO: 90177 - DNA, 25 bp, Canis familiaris
ccaccagactgaccccgaagagggg

SEQ ID NO: 90178 - DNA, 25 bp, Canis familiaris
ccaccgacttcaccgagacggagag

SEQ ID NO: 90179 - DNA, 25 bp, Canis familiaris
ccacctagtctaccttcacgtagaa

SEQ ID NO: 90180 - DNA, 25 bp, Canis familiaris
ccaccaagaactcctctcacgtgga

SEQ ID NO: 90181 - DNA, 25 bp, Canis familiaris
ccaccatcgaggactcctatcggaa

SEQ ID NO: 90182 - DNA, 25 bp, Canis familiaris
ccacctggcactgcatcgtggggag

SEQ ID NO: 90183 - DNA, 25 bp, Canis familiaris
ccaccgtcatgcagaccgggggatc

SEQ ID NO: 90184 - DNA, 25 bp, Canis familiaris
ccaccgtctgggtcgctggtggtgt

SEQ ID NO: 90185 - DNA, 25 bp, Canis familiaris
ccaccagtgctggcgtcagatgttg

SEQ ID NO: 90186 - DNA, 25 bp, Canis familiaris
ccactcactctggcgtgtgtgtgtg

SEQ ID NO: 90187 - DNA, 25 bp, Canis familiaris
ccagccactgctgagtgctcttggc

SEQ ID NO: 90188 - DNA, 25 bp, Canis familiaris
ccagccactgagccaggctcaaggc

SEQ ID NO: 90189 - DNA, 25 bp, Canis familiaris
ccagccagcatactggtcaccatgc

SEQ ID NO: 90190 - DNA, 25 bp, Canis familiaris
ccagccagagcattggaggccagca

SEQ ID NO: 90191 - DNA, 25 bp, Canis familiaris
ccaccatgtgcacgatgggctcagc

SEQ ID NO: 90192 - DNA, 25 bp, Canis familiaris
ccaccatgctcacgggtatttttcc

SEQ ID NO: 90193 - DNA, 25 bp, Canis familiaris
tccccctagggtctttaatgccagt

SEQ ID NO: 90194 - DNA, 25 bp, Canis familiaris
ccaccaagccacgtttttaatgaag

SEQ ID NO: 90195 - DNA, 25 bp, Canis familiaris
ccaccaagcctggccattcttaagt

SEQ ID NO: 90196 - DNA, 25 bp, Canis familiaris
ccacgctaactacatatatatatat

SEQ ID NO: 90197 - DNA, 25 bp, Canis familiaris
ccactctagagttccaagatatccg

SEQ ID NO: 90198 - DNA, 25 bp, Canis familiaris
ccaacaagaacaaaggcatcacctg

SEQ ID NO: 90199 - DNA, 25 bp, Canis familiaris
ccaccaagatgagcagggcccttgc

SEQ ID NO: 90200 - DNA, 25 bp, Canis familiaris
ccaccaagatgagcagagccctggc

SEQ ID NO: 90201 - DNA, 25 bp, Canis familiaris
ccacccagcatggcagagacactct

SEQ ID NO: 90202 - DNA, 25 bp, Canis familiaris
ccacccagccagcaacactaaagta

SEQ ID NO: 90203 - DNA, 25 bp, Canis familiaris
ccacctacccaatgcagcatataaa

SEQ ID NO: 90204 - DNA, 25 bp, Canis familiaris
ccaccttcttgttccacataaagca

SEQ ID NO: 90205 - DNA, 25 bp, Canis familiaris
ccacctcattgattcactgaccaaa

SEQ ID NO: 90206 - DNA, 25 bp, Canis familiaris
ccacctctatatcacagtcatcaat

SEQ ID NO: 90207 - DNA, 25 bp, Canis familiaris
ccacctgcgacttagagcttcatga

SEQ ID NO: 90208 - DNA, 25 bp, Canis familiaris
ccaccatgtacccaggcattgctga

SEQ ID NO: 90209 - DNA, 25 bp, Canis familiaris
ccaccacattcactgggcattctgg

SEQ ID NO: 90210 - DNA, 25 bp, Canis familiaris
ccacctcattcgcttcatgtggtga

SEQ ID NO: 90211 - DNA, 25 bp, Canis familiaris
ccaccatgttcgcattctgtaggaa

SEQ ID NO: 90212 - DNA, 25 bp, Canis familiaris
ccagcctttcttcctctggagagaa

SEQ ID NO: 90213 - DNA, 25 bp, Canis familiaris
ccaccttgatctaatcctgggctaa

SEQ ID NO: 90214 - DNA, 25 bp, Canis familiaris
ccagcctcaggctattcgtgggcat

SEQ ID NO: 90215 - DNA, 25 bp, Canis familiaris
ccacctcagaggagctgctcagcca

SEQ ID NO: 90216 - DNA, 25 bp, Canis familiaris
ccacccatggcaaattccatggcac

SEQ ID NO: 90217 - DNA, 25 bp, Canis familiaris
ccaccctgagcagctcatcacaggc

SEQ ID NO: 90218 - DNA, 25 bp, Canis familiaris
ccaccctgagcagctcatcacaggc

SEQ ID NO: 90219 - DNA, 25 bp, Canis familiaris
ccaccctgagcagctcatcacaggc

SEQ ID NO: 90220 - DNA, 25 bp, Canis familiaris
ccaccctgagcagctcatcacaggc

SEQ ID NO: 90221 - DNA, 25 bp, Canis familiaris
ccacccagagcagctcatcactggg

SEQ ID NO: 90222 - DNA, 25 bp, Canis familiaris
ccaccagccagagccatcatttgga

SEQ ID NO: 90223 - DNA, 25 bp, Canis familiaris
ccaccatgcccttctatatttggaa

SEQ ID NO: 90224 - DNA, 25 bp, Canis familiaris
ccactgcagcacgtgactgttttta

SEQ ID NO: 90225 - DNA, 25 bp, Canis familiaris
ccactcctcttgtcatttttagatg

SEQ ID NO: 90226 - DNA, 25 bp, Canis familiaris
ccacattgtccttgccattttgagg

SEQ ID NO: 90227 - DNA, 25 bp, Canis familiaris
ccacagctgttatgcttttttggcc

SEQ ID NO: 90228 - DNA, 25 bp, Canis familiaris
gctgacgttcttgcttttggcgccc

SEQ ID NO: 90229 - DNA, 25 bp, Canis familiaris
gcaacgttttgagaatcgtccgcct

SEQ ID NO: 90230 - DNA, 25 bp, Canis familiaris
ccacgcttttatgttggtgctccgc

SEQ ID NO: 90231 - DNA, 25 bp, Canis familiaris
ccaccttgcttttttgatcgcatcc

SEQ ID NO: 90232 - DNA, 25 bp, Canis familiaris
ccaccttgtttctgtatcttcattt

SEQ ID NO: 90233 - DNA, 25 bp, Canis familiaris
ccacggttccactgttttgattccg

SEQ ID NO: 90234 - DNA, 25 bp, Canis familiaris
ccacgttcccagttgaattctttgc

SEQ ID NO: 90235 - DNA, 25 bp, Canis familiaris
ccacattcgaccctggaattccagg

SEQ ID NO: 90236 - DNA, 25 bp, Canis familiaris
gccataactacccgggttcagatcc

SEQ ID NO: 90237 - DNA, 25 bp, Canis familiaris
ccaaatattgggaggcctgagttcc

SEQ ID NO: 90238 - DNA, 25 bp, Canis familiaris
ccaacatcatggaggcccctggatt

SEQ ID NO: 90239 - DNA, 25 bp, Canis familiaris
ccaccttggggtcctcactgagtgg

SEQ ID NO: 90240 - DNA, 25 bp, Canis familiaris
ccaacttgtcggaagccaggaggca

SEQ ID NO: 90241 - DNA, 25 bp, Canis familiaris
ccaccttccctgaagccgatgtgga

SEQ ID NO: 90242 - DNA, 25 bp, Canis familiaris
ccaccttcaagggagtcgatcccaa

SEQ ID NO: 90243 - DNA, 25 bp, Canis familiaris
ccacctgtaagcggtgttgaactcc

SEQ ID NO: 90244 - DNA, 25 bp, Canis familiaris
ccaccatctacctgtgtcaacatct

SEQ ID NO: 90245 - DNA, 25 bp, Canis familiaris
ccactggaagccttgtccaaattaa

SEQ ID NO: 90246 - DNA, 25 bp, Canis familiaris
ccactggagacctcgccaagaagaa

SEQ ID NO: 90247 - DNA, 25 bp, Canis familiaris
ccacggcggccgaagccaaggagaa

SEQ ID NO: 90248 - DNA, 25 bp, Canis familiaris
ccacagggctgtggaacccgggaca

SEQ ID NO: 90249 - DNA, 25 bp, Canis familiaris
ccacggctgctgtgtacagcgctgc

SEQ ID NO: 90250 - DNA, 25 bp, Canis familiaris
ccacgagttcttcgagcacgagtga

SEQ ID NO: 90251 - DNA, 25 bp, Canis familiaris
ccactgttttgtcagcacggaagaa

SEQ ID NO: 90252 - DNA, 25 bp, Canis familiaris
ccacgtgtttgcccagatggccaag

SEQ ID NO: 90253 - DNA, 25 bp, Canis familiaris
ccacgggtccacaatgtggccaagt

SEQ ID NO: 90254 - DNA, 25 bp, Canis familiaris
ccaccgaggcccaagtctcaaaggc

SEQ ID NO: 90255 - DNA, 25 bp, Canis familiaris
ccacctgagctgcccagaactaagt

SEQ ID NO: 90256 - DNA, 25 bp, Canis familiaris
ccacgcaggctgcccggaagaaaat

SEQ ID NO: 90257 - DNA, 25 bp, Canis familiaris
ccaccagcagcgactcggaggaaga

SEQ ID NO: 90258 - DNA, 25 bp, Canis familiaris
ccacaagcactgttccagagggaag

SEQ ID NO: 90259 - DNA, 25 bp, Canis familiaris
ccaaagctagggaacacggtagatc

SEQ ID NO: 90260 - DNA, 25 bp, Canis familiaris
ccaacagacgggcaccgttacgcac

SEQ ID NO: 90261 - DNA, 25 bp, Canis familiaris
gccaaaacgtaccaccaaagaccat

SEQ ID NO: 90262 - DNA, 25 bp, Canis familiaris
ccactcaggcgtccctaaaagtctt

SEQ ID NO: 90263 - DNA, 25 bp, Canis familiaris
ccacccaatgctccttaaagacttt

SEQ ID NO: 90264 - DNA, 25 bp, Canis familiaris
ccacctcacctgacattcaaatttt

SEQ ID NO: 90265 - DNA, 25 bp, Canis familiaris
ccaccaccagcgacatgaagatctt

SEQ ID NO: 90266 - DNA, 25 bp, Canis familiaris
ccacggccttgccagatgacatcat

SEQ ID NO: 90267 - DNA, 25 bp, Canis familiaris
ccacggggccagcatgagcaaagtg

SEQ ID NO: 90268 - DNA, 25 bp, Canis familiaris
ccacgggggcagcacacttaggaga

SEQ ID NO: 90269 - DNA, 25 bp, Canis familiaris
ccacctggggcacacctttatggtg

SEQ ID NO: 90270 - DNA, 25 bp, Canis familiaris
ccaccaggggaccagttctgtatag

SEQ ID NO: 90271 - DNA, 25 bp, Canis familiaris
ccaccagtggtagtagtgtccttgg

SEQ ID NO: 90272 - DNA, 25 bp, Canis familiaris
ccacccggttgtatgagcctttgtg

SEQ ID NO: 90273 - DNA, 25 bp, Canis familiaris
ccacccggttgcaggggagttgcct

SEQ ID NO: 90274 - DNA, 25 bp, Canis familiaris
ccacccggttgcaggggagttgcct

SEQ ID NO: 90275 - DNA, 25 bp, Canis familiaris
ccacccggttgcaggggagttgcct

SEQ ID NO: 90276 - DNA, 25 bp, Canis familiaris
gccaaccaagttatggggggccaat

SEQ ID NO: 90277 - DNA, 25 bp, Canis familiaris
ccaagccagatttttgggccaggtg

SEQ ID NO: 90278 - DNA, 25 bp, Canis familiaris
ccacccccatacatgcaggtaactg

SEQ ID NO: 90279 - DNA, 25 bp, Canis familiaris
ccacccctcaacaggattcaacggg

SEQ ID NO: 90280 - DNA, 25 bp, Canis familiaris
ccaaaccacaagaaggaactacgag

SEQ ID NO: 90281 - DNA, 25 bp, Canis familiaris
ccaaggcccttgaatggaacccttg

SEQ ID NO: 90282 - DNA, 25 bp, Canis familiaris
tctaaggggtggcagggacccctcg

SEQ ID NO: 90283 - DNA, 25 bp, Canis familiaris
ccaagccgtgtccgaaggaccaggc

SEQ ID NO: 90284 - DNA, 25 bp, Canis familiaris
ccacgcggtgtgccgtaggcaccgc

SEQ ID NO: 90285 - DNA, 25 bp, Canis familiaris
ccaccatggcaggccatgctaggca

SEQ ID NO: 90286 - DNA, 25 bp, Canis familiaris
ccacctgccagactcatgtgaggca

SEQ ID NO: 90287 - DNA, 25 bp, Canis familiaris
ccaccagcagctgctctgtggagca

SEQ ID NO: 90288 - DNA, 25 bp, Canis familiaris
ccactggcatgcagctggcgtggca

SEQ ID NO: 90289 - DNA, 25 bp, Canis familiaris
ccacggtgctggctgagctggagaa

SEQ ID NO: 90290 - DNA, 25 bp, Canis familiaris
ccaccgtctgcctaggctgtagata

SEQ ID NO: 90291 - DNA, 25 bp, Canis familiaris
ccaccttctgactaagacaccatac

SEQ ID NO: 90292 - DNA, 25 bp, Canis familiaris
ccacgtatcttcttcacaaactgac

SEQ ID NO: 90293 - DNA, 25 bp, Canis familiaris
ccactggtcttacacacatacttaa

SEQ ID NO: 90294 - DNA, 25 bp, Canis familiaris
ccactggcctgtgggacatgccaca

SEQ ID NO: 90295 - DNA, 25 bp, Canis familiaris
ccaaattctgtggagccatgctcta

SEQ ID NO: 90296 - DNA, 25 bp, Canis familiaris
ccaactttggcttccagcctgatgt

SEQ ID NO: 90297 - DNA, 25 bp, Canis familiaris
ccaacgattccttgccatcaaatgt

SEQ ID NO: 90298 - DNA, 25 bp, Canis familiaris
ccacacagattcgggttcacagggg

SEQ ID NO: 90299 - DNA, 25 bp, Canis familiaris
ccaccgttccaggagtgaccaggtc

SEQ ID NO: 90300 - DNA, 25 bp, Canis familiaris
ccacctgctcatacagggaagcctg

SEQ ID NO: 90301 - DNA, 25 bp, Canis familiaris
ccacctgacatcaaggccaagtttc

SEQ ID NO: 90302 - DNA, 25 bp, Canis familiaris
ccacctgacccgcagaggttgatct

SEQ ID NO: 90303 - DNA, 25 bp, Canis familiaris
ccacctgcaccacaacagagttgtt

SEQ ID NO: 90304 - DNA, 25 bp, Canis familiaris
ccactatgatggaaaacagtgtcat

SEQ ID NO: 90305 - DNA, 25 bp, Canis familiaris
ccacaaatgcttctagatggactgt

SEQ ID NO: 90306 - DNA, 25 bp, Canis familiaris
ccaccaggctctcctagatgtgaag

SEQ ID NO: 90307 - DNA, 25 bp, Canis familiaris
ccacaaagcacttgtcagaggaaga

SEQ ID NO: 90308 - DNA, 25 bp, Canis familiaris
ccacaacagcctgccaatcgtagtc

SEQ ID NO: 90309 - DNA, 25 bp, Canis familiaris
ccactcccttcatatattctagtca

SEQ ID NO: 90310 - DNA, 25 bp, Canis familiaris
ccacccaaatctctactctagtaga

SEQ ID NO: 90311 - DNA, 25 bp, Canis familiaris
ccaactccaattcccagttatttat

SEQ ID NO: 90312 - DNA, 25 bp, Canis familiaris
ccaccctgccaaactagtttttgca

SEQ ID NO: 90313 - DNA, 25 bp, Canis familiaris
ccacctctctaaccacagtttattg

SEQ ID NO: 90314 - DNA, 25 bp, Canis familiaris
ccactctttcaatctcagtctttta

SEQ ID NO: 90315 - DNA, 25 bp, Canis familiaris
ccacagttgtaaatgctagtttttt

SEQ ID NO: 90316 - DNA, 25 bp, Canis familiaris
ccacagatactgcctttagcttttt

SEQ ID NO: 90317 - DNA, 25 bp, Canis familiaris
ccacactgacccattcaaattctga

SEQ ID NO: 90318 - DNA, 25 bp, Canis familiaris
ccacctgggcctttataccatggac

SEQ ID NO: 90319 - DNA, 25 bp, Canis familiaris
ccacctgggcctcaagagcgaggag

SEQ ID NO: 90320 - DNA, 25 bp, Canis familiaris
ccaccgggctcgctgaagtgaaggc

SEQ ID NO: 90321 - DNA, 25 bp, Canis familiaris
ccacctgattccctgtaagtctcag

SEQ ID NO: 90322 - DNA, 25 bp, Canis familiaris
ccactccaatccctgtcaatgtgag

SEQ ID NO: 90323 - DNA, 25 bp, Canis familiaris
ccactctactcgctccaaagagcgg

SEQ ID NO: 90324 - DNA, 25 bp, Canis familiaris
ccactgcccactggctcaagaaagg

SEQ ID NO: 90325 - DNA, 25 bp, Canis familiaris
ccactgcccatcgtgtactacgtgg

SEQ ID NO: 90326 - DNA, 25 bp, Canis familiaris
ccacatgctgcaatctgctgcaact

SEQ ID NO: 90327 - DNA, 25 bp, Canis familiaris
ccacctccactggcagacatttagg

SEQ ID NO: 90328 - DNA, 25 bp, Canis familiaris
ccaccccgctcctaagttatgtggg

SEQ ID NO: 90329 - DNA, 25 bp, Canis familiaris
ccaccccagttccagtgatttattt

SEQ ID NO: 90330 - DNA, 25 bp, Canis familiaris
ccacccgagctctgagtgtttactc

SEQ ID NO: 90331 - DNA, 25 bp, Canis familiaris
ccactctggtcccgagttttgacca

SEQ ID NO: 90332 - DNA, 25 bp, Canis familiaris
ccacctggacggtgtcttcatgcac

SEQ ID NO: 90333 - DNA, 25 bp, Canis familiaris
ccacgctggccgagtactgtgtgaa

SEQ ID NO: 90334 - DNA, 25 bp, Canis familiaris
ccacggcgtctcaggacgtggccaa

SEQ ID NO: 90335 - DNA, 25 bp, Canis familiaris
gcggggctgtaggggaaagcgccaa

SEQ ID NO: 90336 - DNA, 25 bp, Canis familiaris
ccaaggcttaggccgaatcacccat

SEQ ID NO: 90337 - DNA, 25 bp, Canis familiaris
ccaaggctctattccagttgtcctg

SEQ ID NO: 90338 - DNA, 25 bp, Canis familiaris
ccacacctctttgtgtctacactat

SEQ ID NO: 90339 - DNA, 25 bp, Canis familiaris
ccaaatctatttgttctttctggaa

SEQ ID NO: 90340 - DNA, 25 bp, Canis familiaris
ccacaatttttcttccttcgattgc

SEQ ID NO: 90341 - DNA, 25 bp, Canis familiaris
gccagaagttttgccctttgtctgt

SEQ ID NO: 90342 - DNA, 25 bp, Canis familiaris
ccaaagcaaccttgccctgttgagc

SEQ ID NO: 90343 - DNA, 25 bp, Canis familiaris
ccactgtgcaagctccaactgttgg

SEQ ID NO: 90344 - DNA, 25 bp, Canis familiaris
ccacttcagatggctccactttaaa

SEQ ID NO: 90345 - DNA, 25 bp, Canis familiaris
ccacattatgggctcagattctgac

SEQ ID NO: 90346 - DNA, 25 bp, Canis familiaris
ccacattttggtcacatatcatttt

SEQ ID NO: 90347 - DNA, 25 bp, Canis familiaris
ccacttttggtccaagcagcctggt

SEQ ID NO: 90348 - DNA, 25 bp, Canis familiaris
ccacttttttcattaccagccagat

SEQ ID NO: 90349 - DNA, 25 bp, Canis familiaris
ccacctctctttggggcacagggtg

SEQ ID NO: 90350 - DNA, 25 bp, Canis familiaris
ccacctcttcttggtacaagctttg

SEQ ID NO: 90351 - DNA, 25 bp, Canis familiaris
ccacaatgttcggttacaactccgc

SEQ ID NO: 90352 - DNA, 25 bp, Canis familiaris
ccacaggttctggaataactcttac

SEQ ID NO: 90353 - DNA, 25 bp, Canis familiaris
ccacgcctcacggtgaaactcttag

SEQ ID NO: 90354 - DNA, 25 bp, Canis familiaris
ccacccttgctggatgcaacacttg

SEQ ID NO: 90355 - DNA, 25 bp, Canis familiaris
ccaccatcctctatgagatcctgct

SEQ ID NO: 90356 - DNA, 25 bp, Canis familiaris
ccacgagagccaatgctgttcctgc

SEQ ID NO: 90357 - DNA, 25 bp, Canis familiaris
ccacgagagccaatgctgttcctgc

SEQ ID NO: 90358 - DNA, 25 bp, Canis familiaris
ccaccgatccattgatgttcgagat

SEQ ID NO: 90359 - DNA, 25 bp, Canis familiaris
gccaccgtccaactggatcatgaaa

SEQ ID NO: 90360 - DNA, 25 bp, Canis familiaris
ccaccccaggagcctgagcagaaac

SEQ ID NO: 90361 - DNA, 25 bp, Canis familiaris
ccacctctccaagatgcagcagaat

SEQ ID NO: 90362 - DNA, 25 bp, Canis familiaris
ccacctcccagatgaagcgaaccgg

SEQ ID NO: 90363 - DNA, 25 bp, Canis familiaris
ccacgctcccatcaaacgaaaggat

SEQ ID NO: 90364 - DNA, 25 bp, Canis familiaris
ccacgtggccatcaagacggtgcgg

SEQ ID NO: 90365 - DNA, 25 bp, Canis familiaris
ccacctggcctaccaatgtggggcc

SEQ ID NO: 90366 - DNA, 25 bp, Canis familiaris
ccacactgtgcccatctacgagggg

SEQ ID NO: 90367 - DNA, 25 bp, Canis familiaris
ccacgggcggcagtgccagaatggg

SEQ ID NO: 90368 - DNA, 25 bp, Canis familiaris
ccacgcggaagcgcggaagcgcgga

SEQ ID NO: 90369 - DNA, 25 bp, Canis familiaris
ccaccgggagacggaccacgaggag

SEQ ID NO: 90370 - DNA, 25 bp, Canis familiaris
ccaccttggactgggcaccatagag

SEQ ID NO: 90371 - DNA, 25 bp, Canis familiaris
ccaagaaggacgagcccaagtgcgg

SEQ ID NO: 90372 - DNA, 25 bp, Canis familiaris
ccaagaagggcgacagctcagctga

SEQ ID NO: 90373 - DNA, 25 bp, Canis familiaris
ccaagaagggcgacagctcagctga

SEQ ID NO: 90374 - DNA, 25 bp, Canis familiaris
ccacacagtgtgaggcagcctgcta

SEQ ID NO: 90375 - DNA, 25 bp, Canis familiaris
ccacatgggtgctaggacctgcatt

SEQ ID NO: 90376 - DNA, 25 bp, Canis familiaris
ccacgggtgccagcagtgatactgc

SEQ ID NO: 90377 - DNA, 25 bp, Canis familiaris
ccacgggtggcaacgtggtcatctt

SEQ ID NO: 90378 - DNA, 25 bp, Canis familiaris
gccacaaggtccaacgatgcctttc

SEQ ID NO: 90379 - DNA, 25 bp, Canis familiaris
ccacgaggactccacagtactttgc

SEQ ID NO: 90380 - DNA, 25 bp, Canis familiaris
ccacctggcgtcccaggatctgtgg

SEQ ID NO: 90381 - DNA, 25 bp, Canis familiaris
ccacccgcagctgccaggggtggca

SEQ ID NO: 90382 - DNA, 25 bp, Canis familiaris
ccacccgcacgggcagtgcgaggac

SEQ ID NO: 90383 - DNA, 25 bp, Canis familiaris
ccacacgctcgttggcgacagggat

SEQ ID NO: 90384 - DNA, 25 bp, Canis familiaris
ccacctgctcgggcgagaagcggag

SEQ ID NO: 90385 - DNA, 25 bp, Canis familiaris
ccacctgctctgcaccagaggcagg

SEQ ID NO: 90386 - DNA, 25 bp, Canis familiaris
ccaccgcctggagagagagaggagg

SEQ ID NO: 90387 - DNA, 25 bp, Canis familiaris
ccacctgccagccacgggagggtgg

SEQ ID NO: 90388 - DNA, 25 bp, Canis familiaris
ccacctgccccaggactgggttgga

SEQ ID NO: 90389 - DNA, 25 bp, Canis familiaris
ccactctcccttaacgtggttgcgt

SEQ ID NO: 90390 - DNA, 25 bp, Canis familiaris
ccaccttcctataagctctgttttg

SEQ ID NO: 90391 - DNA, 25 bp, Canis familiaris
ccaccttccttttttgctggatgtt

SEQ ID NO: 90392 - DNA, 25 bp, Canis familiaris
ccaccttccacttgttgacagggta

SEQ ID NO: 90393 - DNA, 25 bp, Canis familiaris
ccaccttatcaatatctgaatgggt

SEQ ID NO: 90394 - DNA, 25 bp, Canis familiaris
ccaccctcaacatattaaggatgat

SEQ ID NO: 90395 - DNA, 25 bp, Canis familiaris
ccaccctcaagatctgctcttggaa

SEQ ID NO: 90396 - DNA, 25 bp, Canis familiaris
ccaccctacaaaggccctgtaagtg

SEQ ID NO: 90397 - DNA, 25 bp, Canis familiaris
ccaccctatgacaagggctcttaag

SEQ ID NO: 90398 - DNA, 25 bp, Canis familiaris
ccaccctgctgcttaaagtcttagg

SEQ ID NO: 90399 - DNA, 25 bp, Canis familiaris
ccaacagcctcgtacaaccttaggc

SEQ ID NO: 90400 - DNA, 25 bp, Canis familiaris
ccactagcacaatcatctaccttat

SEQ ID NO: 90401 - DNA, 25 bp, Canis familiaris
ccactcccaagacttcacttttagg

SEQ ID NO: 90402 - DNA, 25 bp, Canis familiaris
ccaccccagagcttatactgttctc

SEQ ID NO: 90403 - DNA, 25 bp, Canis familiaris
ccactcccagactcattctgattgt

SEQ ID NO: 90404 - DNA, 25 bp, Canis familiaris
ccacccaagacacacatgtctgcgt

SEQ ID NO: 90405 - DNA, 25 bp, Canis familiaris
ccacaccttctacaatgagctgcgt

SEQ ID NO: 90406 - DNA, 25 bp, Canis familiaris
ccacccctgctgcagaggatgcggc

SEQ ID NO: 90407 - DNA, 25 bp, Canis familiaris
ccacgtccagcatgaggggctgccg

SEQ ID NO: 90408 - DNA, 25 bp, Canis familiaris
ccacatgctgctggtaaggggtgca

SEQ ID NO: 90409 - DNA, 25 bp, Canis familiaris
ccacgtgcatcggaactatagtgcc

SEQ ID NO: 90410 - DNA, 25 bp, Canis familiaris
ccacgtgcaagcgcagctgcaaagg

SEQ ID NO: 90411 - DNA, 25 bp, Canis familiaris
ccacgagcaagcacgcgaaggtggc

SEQ ID NO: 90412 - DNA, 25 bp, Canis familiaris
ccacgagaaccttgaggaggtggac

SEQ ID NO: 90413 - DNA, 25 bp, Canis familiaris
ccactgaaccctggggctgacttgg

SEQ ID NO: 90414 - DNA, 25 bp, Canis familiaris
ccacgaccgtctggatttgtctgtg

SEQ ID NO: 90415 - DNA, 25 bp, Canis familiaris
ccacgcctcggtagacgctttgtgg

SEQ ID NO: 90416 - DNA, 25 bp, Canis familiaris
ccacgcctcggtagacgctttgtgg

SEQ ID NO: 90417 - DNA, 25 bp, Canis familiaris
ccacctccaggtagtcgtctaagag

SEQ ID NO: 90418 - DNA, 25 bp, Canis familiaris
ccaccccggtagtcagaggacagag

SEQ ID NO: 90419 - DNA, 25 bp, Canis familiaris
ccacacccaatttcttgctggacaa

SEQ ID NO: 90420 - DNA, 25 bp, Canis familiaris
ccacctccaattatccttgcaaatc

SEQ ID NO: 90421 - DNA, 25 bp, Canis familiaris
ccacctccagattcttcactctgga

SEQ ID NO: 90422 - DNA, 25 bp, Canis familiaris
ccacctcctgacttgacatttgaaa

SEQ ID NO: 90423 - DNA, 25 bp, Canis familiaris
ccacacaacccattgcctttagaaa

SEQ ID NO: 90424 - DNA, 25 bp, Canis familiaris
ccacacacactttttctttaactat

SEQ ID NO: 90425 - DNA, 25 bp, Canis familiaris
ccacctcttctgttcactttaagtt

SEQ ID NO: 90426 - DNA, 25 bp, Canis familiaris
ccaccgtcattaacacctgtaactt

SEQ ID NO: 90427 - DNA, 25 bp, Canis familiaris
ccacgcgtctaactacgagtagact

SEQ ID NO: 90428 - DNA, 25 bp, Canis familiaris
ccactcgtccatttcagctggtaac

SEQ ID NO: 90429 - DNA, 25 bp, Canis familiaris
ccactcgtccacatacttggtgaca

SEQ ID NO: 90430 - DNA, 25 bp, Canis familiaris
ccactggacccattacctttgaatg

SEQ ID NO: 90431 - DNA, 25 bp, Canis familiaris
ccactttcagccttacacttattgt

SEQ ID NO: 90432 - DNA, 25 bp, Canis familiaris
ccactctacactctacacctagagt

SEQ ID NO: 90433 - DNA, 25 bp, Canis familiaris
ccacacccatctgtgacaccaaggt

SEQ ID NO: 90434 - DNA, 25 bp, Canis familiaris
ccacacccatctgcccaaaatggta

SEQ ID NO: 90435 - DNA, 25 bp, Canis familiaris
ccaccccgcttctcaataaagctgg

SEQ ID NO: 90436 - DNA, 25 bp, Canis familiaris
ccaacggtgttcccaaagtagtgtg

SEQ ID NO: 90437 - DNA, 25 bp, Canis familiaris
ccaacccttaatcccaagtgacttg

SEQ ID NO: 90438 - DNA, 25 bp, Canis familiaris
ccaagccctttttccgcagggcatt

SEQ ID NO: 90439 - DNA, 25 bp, Canis familiaris
ccaacccgctttcttctgggtatga

SEQ ID NO: 90440 - DNA, 25 bp, Canis familiaris
ccaaccagttttaattctggccttg

SEQ ID NO: 90441 - DNA, 25 bp, Canis familiaris
ccaacacgtatttctacactgtccc

SEQ ID NO: 90442 - DNA, 25 bp, Canis familiaris
ccaacacggtggttgaccgtgccta

SEQ ID NO: 90443 - DNA, 25 bp, Canis familiaris
ccaacatctggctgtttacatggga

SEQ ID NO: 90444 - DNA, 25 bp, Canis familiaris
ccacctgcatgaaggccgtgacgga

SEQ ID NO: 90445 - DNA, 25 bp, Canis familiaris
ccacgctcaacatccagtacggaga

SEQ ID NO: 90446 - DNA, 25 bp, Canis familiaris
ccacccaatcaacagtttccagaca

SEQ ID NO: 90447 - DNA, 25 bp, Canis familiaris
ccaacctacaggaagcttgtctgga

SEQ ID NO: 90448 - DNA, 25 bp, Canis familiaris
ccaacacaggaccacagttccggac

SEQ ID NO: 90449 - DNA, 25 bp, Canis familiaris
ccaaagcaggggtgtggcctagaaa

SEQ ID NO: 90450 - DNA, 25 bp, Canis familiaris
ccaacacaaggtggttcccctgaag

SEQ ID NO: 90451 - DNA, 25 bp, Canis familiaris
ccaacaagaagtgggtccggctcgc

SEQ ID NO: 90452 - DNA, 25 bp, Canis familiaris
ccacgaggacagcgtggacggctcc

SEQ ID NO: 90453 - DNA, 25 bp, Canis familiaris
ccacccagaagactgtggatggccc

SEQ ID NO: 90454 - DNA, 25 bp, Canis familiaris
ccactccacagacctcatggaagcc

SEQ ID NO: 90455 - DNA, 25 bp, Canis familiaris
ccacccaagcattccagaaagcaat

SEQ ID NO: 90456 - DNA, 25 bp, Canis familiaris
ccacccagatactccaatagcaata

SEQ ID NO: 90457 - DNA, 25 bp, Canis familiaris
ccacccaggtgccttctgataaata

SEQ ID NO: 90458 - DNA, 25 bp, Canis familiaris
ccacccaccatgttcttgaacaatc

SEQ ID NO: 90459 - DNA, 25 bp, Canis familiaris
ccacgtcagccacttttcagaataa

SEQ ID NO: 90460 - DNA, 25 bp, Canis familiaris
ccacgtcagccacttttcagaataa

SEQ ID NO: 90461 - DNA, 25 bp, Canis familiaris
ccacgtcagccacttttcagaataa

SEQ ID NO: 90462 - DNA, 25 bp, Canis familiaris
ccacgtcagccacttttcagaataa

SEQ ID NO: 90463 - DNA, 25 bp, Canis familiaris
ccacgtcagccacttttcagaataa

SEQ ID NO: 90464 - DNA, 25 bp, Canis familiaris
ccacgtcagccacttttcagaataa

SEQ ID NO: 90465 - DNA, 25 bp, Canis familiaris
ccacgtcagccacttttcagaataa

SEQ ID NO: 90466 - DNA, 25 bp, Canis familiaris
ccacgtcagccacttttcagaataa

SEQ ID NO: 90467 - DNA, 25 bp, Canis familiaris
ccacgcacaaccattcacgaaaatg

SEQ ID NO: 90468 - DNA, 25 bp, Canis familiaris
ccacgagcagacttttccaacaatt

SEQ ID NO: 90469 - DNA, 25 bp, Canis familiaris
ccacccgatctttagccagagaact

SEQ ID NO: 90470 - DNA, 25 bp, Canis familiaris
ccactccaggttccccaggaagtgg

SEQ ID NO: 90471 - DNA, 25 bp, Canis familiaris
ccacattgggcttcccgcaggaagc

SEQ ID NO: 90472 - DNA, 25 bp, Canis familiaris
ccaccggagtaggatcagagtgaac

SEQ ID NO: 90473 - DNA, 25 bp, Canis familiaris
ccaccggtgtaggaacgcatcacgc

SEQ ID NO: 90474 - DNA, 25 bp, Canis familiaris
ccaactgtttaggctacatcatccc

SEQ ID NO: 90475 - DNA, 25 bp, Canis familiaris
ccaactcttaatacaacacctccga

SEQ ID NO: 90476 - DNA, 25 bp, Canis familiaris
ccaagcatcatttattatcgcagcc

SEQ ID NO: 90477 - DNA, 25 bp, Canis familiaris
ccaacctcataattactggcgctga

SEQ ID NO: 90478 - DNA, 25 bp, Canis familiaris
ccaatgtggaacttgatcccaggac

SEQ ID NO: 90479 - DNA, 25 bp, Canis familiaris
ccacgagtctacttaccacagagag

SEQ ID NO: 90480 - DNA, 25 bp, Canis familiaris
ccaaagttcacaatgtggccgagga

SEQ ID NO: 90481 - DNA, 25 bp, Canis familiaris
ccaaagttcacaatgtggccgagga

SEQ ID NO: 90482 - DNA, 25 bp, Canis familiaris
ccaaagcagtctacttgctccacgg

SEQ ID NO: 90483 - DNA, 25 bp, Canis familiaris
ccactagagatgcctgctttccagg

SEQ ID NO: 90484 - DNA, 25 bp, Canis familiaris
ccacgagggcgtctgatgtcgggat

SEQ ID NO: 90485 - DNA, 25 bp, Canis familiaris
gcccgggtcagtccgaaagggatga

SEQ ID NO: 90486 - DNA, 25 bp, Canis familiaris
ccacggggcagtcggcagaagggga

SEQ ID NO: 90487 - DNA, 25 bp, Canis familiaris
ccacccccatctcggaacagaaggg

SEQ ID NO: 90488 - DNA, 25 bp, Canis familiaris
ccacccccatctcggaacagaaggg

SEQ ID NO: 90489 - DNA, 25 bp, Canis familiaris
ccaccctggctgctgagaacgaagc

SEQ ID NO: 90490 - DNA, 25 bp, Canis familiaris
ccactagctggccactggaacaaag

SEQ ID NO: 90491 - DNA, 25 bp, Canis familiaris
ccacatggcctccaaggagtaagac

SEQ ID NO: 90492 - DNA, 25 bp, Canis familiaris
ccactgccagtcaggaggtgacaac

SEQ ID NO: 90493 - DNA, 25 bp, Canis familiaris
ccactctctctgcgtgcaggtgaag

SEQ ID NO: 90494 - DNA, 25 bp, Canis familiaris
ccactctctctcactatatgtacag

SEQ ID NO: 90495 - DNA, 25 bp, Canis familiaris
ccacactcattcacgttgtgttaaa

SEQ ID NO: 90496 - DNA, 25 bp, Canis familiaris
ccacccattcttgcggtttgaactt

SEQ ID NO: 90497 - DNA, 25 bp, Canis familiaris
ccacccttcaatgagcctttgaggg

SEQ ID NO: 90498 - DNA, 25 bp, Canis familiaris
ccacccttcacactacactagtgaa

SEQ ID NO: 90499 - DNA, 25 bp, Canis familiaris
ccaccctggagcacatcagtcggaa

SEQ ID NO: 90500 - DNA, 25 bp, Canis familiaris
ccaccctgggaccagaggccagagt

SEQ ID NO: 90501 - DNA, 25 bp, Canis familiaris
ccaccctgccaggttgggcagcagg

SEQ ID NO: 90502 - DNA, 25 bp, Canis familiaris
ccaccccatcatctgtggacactgg

SEQ ID NO: 90503 - DNA, 25 bp, Canis familiaris
ccacccaccatctagtacaatcagg

SEQ ID NO: 90504 - DNA, 25 bp, Canis familiaris
ccacccattcactctatacacatgg

SEQ ID NO: 90505 - DNA, 25 bp, Canis familiaris
ccacccttttcttgaagcactggtt

SEQ ID NO: 90506 - DNA, 25 bp, Canis familiaris
ccaacctttctttcaatcgtcagtt

SEQ ID NO: 90507 - DNA, 25 bp, Canis familiaris
ccaactcatttacccatatcttatg

SEQ ID NO: 90508 - DNA, 25 bp, Canis familiaris
ccaacagctttgacccattgggggt

SEQ ID NO: 90509 - DNA, 25 bp, Canis familiaris
ccacacccttgagccatgttggggc

SEQ ID NO: 90510 - DNA, 25 bp, Canis familiaris
ccaccgccaacagccaggtgatggg

SEQ ID NO: 90511 - DNA, 25 bp, Canis familiaris
ccacgtctcagagcccagtagttgg

SEQ ID NO: 90512 - DNA, 25 bp, Canis familiaris
ccacagtgctcgtacgtcagatcac

SEQ ID NO: 90513 - DNA, 25 bp, Canis familiaris
ccacactggctaacctcaatcaaag

SEQ ID NO: 90514 - DNA, 25 bp, Canis familiaris
ccacactctttacacgcagcaaagc

SEQ ID NO: 90515 - DNA, 25 bp, Canis familiaris
ccaagctcttcttccttaggagagt

SEQ ID NO: 90516 - DNA, 25 bp, Canis familiaris
ccaagctcttcttccttaggagagt

SEQ ID NO: 90517 - DNA, 25 bp, Canis familiaris
ccaagctcttcttccttaggagagt

SEQ ID NO: 90518 - DNA, 25 bp, Canis familiaris
ccaagtcatcctccccaaaggaatg

SEQ ID NO: 90519 - DNA, 25 bp, Canis familiaris
gccactgctttgagcccaaatggaa

SEQ ID NO: 90520 - DNA, 25 bp, Canis familiaris
ccactcattggatcccaggcaggaa

SEQ ID NO: 90521 - DNA, 25 bp, Canis familiaris
ccacttgtgagcttgagccaggcac

SEQ ID NO: 90522 - DNA, 25 bp, Canis familiaris
ccacttacatgccatggcctgagcc

SEQ ID NO: 90523 - DNA, 25 bp, Canis familiaris
ccactccacatgcttccaaagttga

SEQ ID NO: 90524 - DNA, 25 bp, Canis familiaris
ccaccccatgctttcaaagatatta

SEQ ID NO: 90525 - DNA, 25 bp, Canis familiaris
ccaccccatgatatctgaagctatg

SEQ ID NO: 90526 - DNA, 25 bp, Canis familiaris
ccacccacagtcagcagcaagttag

SEQ ID NO: 90527 - DNA, 25 bp, Canis familiaris
ccacccacctgctgagagtgtttga

SEQ ID NO: 90528 - DNA, 25 bp, Canis familiaris
ccactcaacttttgagttgtcctaa

SEQ ID NO: 90529 - DNA, 25 bp, Canis familiaris
ccacttaccactttgttgtcttaca

SEQ ID NO: 90530 - DNA, 25 bp, Canis familiaris
ccactctatgccttggttttctcaa

SEQ ID NO: 90531 - DNA, 25 bp, Canis familiaris
ccacgctgaccctgtttatcatagg

SEQ ID NO: 90532 - DNA, 25 bp, Canis familiaris
ccacccagccgaagcttactaaggc

SEQ ID NO: 90533 - DNA, 25 bp, Canis familiaris
ccaccctgcaccaggtgaccaggga

SEQ ID NO: 90534 - DNA, 25 bp, Canis familiaris
ccaccccaggaacgagactcggaga

SEQ ID NO: 90535 - DNA, 25 bp, Canis familiaris
ccacacctagtgccacgaaacggag

SEQ ID NO: 90536 - DNA, 25 bp, Canis familiaris
ccacccaggtgtccagaaatggtgt

SEQ ID NO: 90537 - DNA, 25 bp, Canis familiaris
ccacccaggtgccctggctaattgt

SEQ ID NO: 90538 - DNA, 25 bp, Canis familiaris
gccacaccaggtgaatgtcgttctt

SEQ ID NO: 90539 - DNA, 25 bp, Canis familiaris
ccactcccttaattgctatgttgtt

SEQ ID NO: 90540 - DNA, 25 bp, Canis familiaris
ccacttcatttctaatcctttgtct

SEQ ID NO: 90541 - DNA, 25 bp, Canis familiaris
ccacttctttcataattgcctacat

SEQ ID NO: 90542 - DNA, 25 bp, Canis familiaris
ccacgtgctttatgtaggactgaca

SEQ ID NO: 90543 - DNA, 25 bp, Canis familiaris
ccacgtgtactacttcagggctgaa

SEQ ID NO: 90544 - DNA, 25 bp, Canis familiaris
ccactgccaacgtgtcagtggtgga

SEQ ID NO: 90545 - DNA, 25 bp, Canis familiaris
ccactggtcctggtgctcaaggtgg

SEQ ID NO: 90546 - DNA, 25 bp, Canis familiaris
ccactggctcctgggtcatagggaa

SEQ ID NO: 90547 - DNA, 25 bp, Canis familiaris
ccacggccctggcggagcgctgaga

SEQ ID NO: 90548 - DNA, 25 bp, Canis familiaris
ccacgtgcccgaggctgggacggga

SEQ ID NO: 90549 - DNA, 25 bp, Canis familiaris
ccactggcccactgagggcaggggt

SEQ ID NO: 90550 - DNA, 25 bp, Canis familiaris
ccacgcccttcatcgagtgcagtgg

SEQ ID NO: 90551 - DNA, 25 bp, Canis familiaris
ccaagtgtcgtctgcggtcttgtga

SEQ ID NO: 90552 - DNA, 25 bp, Canis familiaris
ccaaggtccaatgggatggtcggat

SEQ ID NO: 90553 - DNA, 25 bp, Canis familiaris
ccaacgtgtcagtggtggacctgac

SEQ ID NO: 90554 - DNA, 25 bp, Canis familiaris
ccaactgtgtcacctgtttactctg

SEQ ID NO: 90555 - DNA, 25 bp, Canis familiaris
ccaaatcagccacgtttttctggag

SEQ ID NO: 90556 - DNA, 25 bp, Canis familiaris
ccacccgcaagcgtggtttcttggt

SEQ ID NO: 90557 - DNA, 25 bp, Canis familiaris
ccactcggaagcctgtttctctggc

SEQ ID NO: 90558 - DNA, 25 bp, Canis familiaris
gccactccggaggtgacctccgtct

SEQ ID NO: 90559 - DNA, 25 bp, Canis familiaris
ccactccaggagggtgcccaatttc

SEQ ID NO: 90560 - DNA, 25 bp, Canis familiaris
ccactccggggggcgcagagtgttt

SEQ ID NO: 90561 - DNA, 25 bp, Canis familiaris
ccactgctgcggggagggagggagg

SEQ ID NO: 90562 - DNA, 25 bp, Canis familiaris
ccacgtggtgggggcgcggagtggg

SEQ ID NO: 90563 - DNA, 25 bp, Canis familiaris
ccactggtgttcggagaggggcggg

SEQ ID NO: 90564 - DNA, 25 bp, Canis familiaris
ccacggagcccacgtggtgggggcg

SEQ ID NO: 90565 - DNA, 25 bp, Canis familiaris
ccacacggccagcggggagggtgga

SEQ ID NO: 90566 - DNA, 25 bp, Canis familiaris
ccaacggaaccagggtgcaaggcat

SEQ ID NO: 90567 - DNA, 25 bp, Canis familiaris
ccaagggcaaccccggaaacatcag

SEQ ID NO: 90568 - DNA, 25 bp, Canis familiaris
ccaactctaccctaaggaaactctg

SEQ ID NO: 90569 - DNA, 25 bp, Canis familiaris
ttaactgctcctctccagtaagttc

SEQ ID NO: 90570 - DNA, 25 bp, Canis familiaris
ccaagtgtccatctccatgttagat

SEQ ID NO: 90571 - DNA, 25 bp, Canis familiaris
ccaaagtcctggtaagtattcatca

SEQ ID NO: 90572 - DNA, 25 bp, Canis familiaris
ccacactctgggcgcaagtagtcta

SEQ ID NO: 90573 - DNA, 25 bp, Canis familiaris
ccaccctgtgcctagagtgtagctg

SEQ ID NO: 90574 - DNA, 25 bp, Canis familiaris
ccaaccttctcactggtgttgctgg

SEQ ID NO: 90575 - DNA, 25 bp, Canis familiaris
ccaactctggctgcggtccagttgg

SEQ ID NO: 90576 - DNA, 25 bp, Canis familiaris
ccaagttgatccagtgtgtcctttc

SEQ ID NO: 90577 - DNA, 25 bp, Canis familiaris
ccaacttgatccctaatacctaatc

SEQ ID NO: 90578 - DNA, 25 bp, Canis familiaris
ccaagacaatccctaatcccaggtc

SEQ ID NO: 90579 - DNA, 25 bp, Canis familiaris
gcccaacaacctgaaagctcgcaac

SEQ ID NO: 90580 - DNA, 25 bp, Canis familiaris
ccactacagacccataaggctcgca

SEQ ID NO: 90581 - DNA, 25 bp, Canis familiaris
ccactatagatcctttaggggcacc

SEQ ID NO: 90582 - DNA, 25 bp, Canis familiaris
ccactttgtcatttctaccgtgcac

SEQ ID NO: 90583 - DNA, 25 bp, Canis familiaris
ccactttgtgctcatgtatcctagg

SEQ ID NO: 90584 - DNA, 25 bp, Canis familiaris
ccactctgtggtctggaccaggcag

SEQ ID NO: 90585 - DNA, 25 bp, Canis familiaris
gccacttgatttctgcctttggagc

SEQ ID NO: 90586 - DNA, 25 bp, Canis familiaris
ccaatggttattcccgctgtggagc

SEQ ID NO: 90587 - DNA, 25 bp, Canis familiaris
ccacaggtagactgtccagttgagt

SEQ ID NO: 90588 - DNA, 25 bp, Canis familiaris
ccacgagggactcatccagtgtgat

SEQ ID NO: 90589 - DNA, 25 bp, Canis familiaris
ccactggaggattgatacctgggtc

SEQ ID NO: 90590 - DNA, 25 bp, Canis familiaris
ccacttagacattgaaggtgcttgt

SEQ ID NO: 90591 - DNA, 25 bp, Canis familiaris
ccacttggacattggggtgcctggg

SEQ ID NO: 90592 - DNA, 25 bp, Canis familiaris
ccactggtgaagaggttgccatgcg

SEQ ID NO: 90593 - DNA, 25 bp, Canis familiaris
ccacgcctggggagttcccagtgtg

SEQ ID NO: 90594 - DNA, 25 bp, Canis familiaris
ccaacttggtttcttctccattgtg

SEQ ID NO: 90595 - DNA, 25 bp, Canis familiaris
ccaagtcgttttatcactgcctttc

SEQ ID NO: 90596 - DNA, 25 bp, Canis familiaris
ccaaatgcccatttttaggatattt

SEQ ID NO: 90597 - DNA, 25 bp, Canis familiaris
ccaagtggccaaatttagctacagt

SEQ ID NO: 90598 - DNA, 25 bp, Canis familiaris
ccaagggacacatgctggcggacgt

SEQ ID NO: 90599 - DNA, 25 bp, Canis familiaris
ccacagtgtatgtcaactgcccaga

SEQ ID NO: 90600 - DNA, 25 bp, Canis familiaris
ccacgtggatgtcagagccacctcc

SEQ ID NO: 90601 - DNA, 25 bp, Canis familiaris
ccactttcaggtggtggaccccagc

SEQ ID NO: 90602 - DNA, 25 bp, Canis familiaris
ccacttccagcctggagcaaaccca

SEQ ID NO: 90603 - DNA, 25 bp, Canis familiaris
ccactaccgcctacaagaagacaca

SEQ ID NO: 90604 - DNA, 25 bp, Canis familiaris
ccactacggcctgaccaaagacaag

SEQ ID NO: 90605 - DNA, 25 bp, Canis familiaris
ccaaactggcctgacggtggacacg

SEQ ID NO: 90606 - DNA, 25 bp, Canis familiaris
ccaaagggacgcgctttgcgagcgg

SEQ ID NO: 90607 - DNA, 25 bp, Canis familiaris
ccaaaaaggtggtctgtctcggcgg

SEQ ID NO: 90608 - DNA, 25 bp, Canis familiaris
gcaaaaaagattcacccacggcggt

SEQ ID NO: 90609 - DNA, 25 bp, Canis familiaris
gaaggactcgttcaacagtgggggt

SEQ ID NO: 90610 - DNA, 25 bp, Canis familiaris
gcaaggaatttacatagggaggggg

SEQ ID NO: 90611 - DNA, 25 bp, Canis familiaris
gccgtgttccttcaggaggaggggt

SEQ ID NO: 90612 - DNA, 25 bp, Canis familiaris
gccagatcttccaggggaaggctgg

SEQ ID NO: 90613 - DNA, 25 bp, Canis familiaris
ccacccatgctcatgaggaagaggg

SEQ ID NO: 90614 - DNA, 25 bp, Canis familiaris
ccactgccactcgggtcatgaaggc

SEQ ID NO: 90615 - DNA, 25 bp, Canis familiaris
ccacgctcagcttcgtgggcaagcg

SEQ ID NO: 90616 - DNA, 25 bp, Canis familiaris
ccacgctacacagcgacgacagcga

SEQ ID NO: 90617 - DNA, 25 bp, Canis familiaris
ccacgaaagcagaccacacaccgtg

SEQ ID NO: 90618 - DNA, 25 bp, Canis familiaris
ccacgtcgtgaatcacagccactgt

SEQ ID NO: 90619 - DNA, 25 bp, Canis familiaris
ccacgtccacatagcacaacgtctt

SEQ ID NO: 90620 - DNA, 25 bp, Canis familiaris
tccaagttctgcaaaaacggtttat

SEQ ID NO: 90621 - DNA, 25 bp, Canis familiaris
tccaagaagcccacaactttttaat

SEQ ID NO: 90622 - DNA, 25 bp, Canis familiaris
ccaagaagcccacaactttttaatg

SEQ ID NO: 90623 - DNA, 25 bp, Canis familiaris
ccaataaccatacctgacttttctg

SEQ ID NO: 90624 - DNA, 25 bp, Canis familiaris
ccaaaccacaacgtgaattttgcaa

SEQ ID NO: 90625 - DNA, 25 bp, Canis familiaris
ccaaccaactccttcaattcttgaa

SEQ ID NO: 90626 - DNA, 25 bp, Canis familiaris
ccaagccaacttttttatgccatta

SEQ ID NO: 90627 - DNA, 25 bp, Canis familiaris
gccaacccacttatttacttcaaag

SEQ ID NO: 90628 - DNA, 25 bp, Canis familiaris
ccaagtcccgtatattatgtgtcat

SEQ ID NO: 90629 - DNA, 25 bp, Canis familiaris
ccacgtgcccagatagtctcaagtt

SEQ ID NO: 90630 - DNA, 25 bp, Canis familiaris
ccacggccgcagacaagtacaaaca

SEQ ID NO: 90631 - DNA, 25 bp, Canis familiaris
ccacgcgtccgaacaaataatacct

SEQ ID NO: 90632 - DNA, 25 bp, Canis familiaris
ccacggctcctttccagagaaagcc

SEQ ID NO: 90633 - DNA, 25 bp, Canis familiaris
ccacggctccttctcagagatagct

SEQ ID NO: 90634 - DNA, 25 bp, Canis familiaris
ccacggctccttctcagagaagcta

SEQ ID NO: 90635 - DNA, 25 bp, Canis familiaris
ccactaaccttgcctggtacagtat

SEQ ID NO: 90636 - DNA, 25 bp, Canis familiaris
ccactatgactctctgctcgtcaag

SEQ ID NO: 90637 - DNA, 25 bp, Canis familiaris
ccacttgcctgtgtctggtagcaac

SEQ ID NO: 90638 - DNA, 25 bp, Canis familiaris
ccactcttcagagatcggataccaa

SEQ ID NO: 90639 - DNA, 25 bp, Canis familiaris
ccactttcaatccagggcatgatcc

SEQ ID NO: 90640 - DNA, 25 bp, Canis familiaris
ccaatgttaatccggtaatccacca

SEQ ID NO: 90641 - DNA, 25 bp, Canis familiaris
ccaagtctttctcagactcatcctc

SEQ ID NO: 90642 - DNA, 25 bp, Canis familiaris
ccaagtggttcgcatcacttcaaca

SEQ ID NO: 90643 - DNA, 25 bp, Canis familiaris
ccaaatggaccacaactatcaacaa

SEQ ID NO: 90644 - DNA, 25 bp, Canis familiaris
ccaaagtagccacaaatatcatgag

SEQ ID NO: 90645 - DNA, 25 bp, Canis familiaris
ccaatactagccattcataaccgca

SEQ ID NO: 90646 - DNA, 25 bp, Canis familiaris
ccacagaaacggctcattacatcac

SEQ ID NO: 90647 - DNA, 25 bp, Canis familiaris
ccacaagtacagacctgaggaccaa

SEQ ID NO: 90648 - DNA, 25 bp, Canis familiaris
ccaaggaagcaggcctcaggccctg

SEQ ID NO: 90649 - DNA, 25 bp, Canis familiaris
ccaaccaaaaccagggatctgtaca

SEQ ID NO: 90650 - DNA, 25 bp, Canis familiaris
ccaacacattgaccgggtggacgta

SEQ ID NO: 90651 - DNA, 25 bp, Canis familiaris
ccaaatcttggaaggggcgtcacaa

SEQ ID NO: 90652 - DNA, 25 bp, Canis familiaris
ccaactcttaccaggagctgctaca

SEQ ID NO: 90653 - DNA, 25 bp, Canis familiaris
ccacaccttactcagaatcactaca

SEQ ID NO: 90654 - DNA, 25 bp, Canis familiaris
ccacactcctgactgcaacaaacag

SEQ ID NO: 90655 - DNA, 25 bp, Canis familiaris
ccacagacgatggctgccacggaga

SEQ ID NO: 90656 - DNA, 25 bp, Canis familiaris
ccacgcacagcggcagaacttgaag

SEQ ID NO: 90657 - DNA, 25 bp, Canis familiaris
ccacgagatcctggagaccgcagag

SEQ ID NO: 90658 - DNA, 25 bp, Canis familiaris
ccacgagactcttggacacgctgtg

SEQ ID NO: 90659 - DNA, 25 bp, Canis familiaris
ccacaagatccctgtctcgatgtga

SEQ ID NO: 90660 - DNA, 25 bp, Canis familiaris
ccacaatgtggccaagtccaatcaa

SEQ ID NO: 90661 - DNA, 25 bp, Canis familiaris
gccactattgggtagtctgcatatt

SEQ ID NO: 90662 - DNA, 25 bp, Canis familiaris
ccactttgtgtccagttcatctgat

SEQ ID NO: 90663 - DNA, 25 bp, Canis familiaris
ccactctggagtgtgacatgtttgc

SEQ ID NO: 90664 - DNA, 25 bp, Canis familiaris
ccacgggagtgagtgcctgtgtaga

SEQ ID NO: 90665 - DNA, 25 bp, Canis familiaris
ccacgaggagcaggccgctctgaag

SEQ ID NO: 90666 - DNA, 25 bp, Canis familiaris
gccaaatgaagcacccgaaattcca

SEQ ID NO: 90667 - DNA, 25 bp, Canis familiaris
ccaaagaagccagccgggtatccgg

SEQ ID NO: 90668 - DNA, 25 bp, Canis familiaris
gccaggaacccaacgagggtggtcg

SEQ ID NO: 90669 - DNA, 25 bp, Canis familiaris
ccaaaccctcaaggatggcctggtc

SEQ ID NO: 90670 - DNA, 25 bp, Canis familiaris
ccaaaccctcaaggatggcctggtc

SEQ ID NO: 90671 - DNA, 25 bp, Canis familiaris
ccacaacccagtcgggtgcctgagt

SEQ ID NO: 90672 - DNA, 25 bp, Canis familiaris
ccacaacaagtgtcagggccctggt

SEQ ID NO: 90673 - DNA, 25 bp, Canis familiaris
ccacaccaattggacaggccacggt

SEQ ID NO: 90674 - DNA, 25 bp, Canis familiaris
ccaacaacaatttaagcaacgcagc

SEQ ID NO: 90675 - DNA, 25 bp, Canis familiaris
ccaagagtcgttttgtgctatagcc

SEQ ID NO: 90676 - DNA, 25 bp, Canis familiaris
ccaacgtcgacatacgctggaccaa

SEQ ID NO: 90677 - DNA, 25 bp, Canis familiaris
ccaacccagcaacacctagatgtgc

SEQ ID NO: 90678 - DNA, 25 bp, Canis familiaris
ccacacctcaggacagagtcgggtg

SEQ ID NO: 90679 - DNA, 25 bp, Canis familiaris
ccaaccacgcgcaagagtagggggg

SEQ ID NO: 90680 - DNA, 25 bp, Canis familiaris
ccacaccctgcgccgaagagagtgg

SEQ ID NO: 90681 - DNA, 25 bp, Canis familiaris
gccaagtcgctcctggaaggtgtgg

SEQ ID NO: 90682 - DNA, 25 bp, Canis familiaris
ccaattcagggtgaggcgggcgtcg

SEQ ID NO: 90683 - DNA, 25 bp, Canis familiaris
ccaactaaggtctgtggcaggctgg

SEQ ID NO: 90684 - DNA, 25 bp, Canis familiaris
ccaactacgcagtccaggaggaggg

SEQ ID NO: 90685 - DNA, 25 bp, Canis familiaris
ccaacatcaccagcctgggctagag

SEQ ID NO: 90686 - DNA, 25 bp, Canis familiaris
ccaaaccacaggactgcagcctaaa

SEQ ID NO: 90687 - DNA, 25 bp, Canis familiaris
ccaaacgcaccagccacaaaatatg

SEQ ID NO: 90688 - DNA, 25 bp, Canis familiaris
ccaacagccccagcggcaaaagtga

SEQ ID NO: 90689 - DNA, 25 bp, Canis familiaris
ccaagcccctcttcaggagtaagga

SEQ ID NO: 90690 - DNA, 25 bp, Canis familiaris
ccacacgggccttcagagaggcctg

SEQ ID NO: 90691 - DNA, 25 bp, Canis familiaris
ccaacggtggctggcaggagcggta

SEQ ID NO: 90692 - DNA, 25 bp, Canis familiaris
gccaacggatcccaagtgacggtac

SEQ ID NO: 90693 - DNA, 25 bp, Canis familiaris
ccaagtaacccctggcagagtcaca

SEQ ID NO: 90694 - DNA, 25 bp, Canis familiaris
gccaagccacccggtggaggttcca

SEQ ID NO: 90695 - DNA, 25 bp, Canis familiaris
ccaaccaccctggattttggtcctg

SEQ ID NO: 90696 - DNA, 25 bp, Canis familiaris
ccaagccacccggtttgagatgggc

SEQ ID NO: 90697 - DNA, 25 bp, Canis familiaris
ccaacccccgaatgtagatctgaca

SEQ ID NO: 90698 - DNA, 25 bp, Canis familiaris
ccaaaccctaaatgaagcaaaagat

SEQ ID NO: 90699 - DNA, 25 bp, Canis familiaris
ccacaactacgaacaggcccggaag

SEQ ID NO: 90700 - DNA, 25 bp, Canis familiaris
ccactaccctgatgaccacttggaa

SEQ ID NO: 90701 - DNA, 25 bp, Canis familiaris
ccactgcccaggtgtggagctctgg

SEQ ID NO: 90702 - DNA, 25 bp, Canis familiaris
ccacaccacggctgggaatcggact

SEQ ID NO: 90703 - DNA, 25 bp, Canis familiaris
tccacacaattttagggactcgtga

SEQ ID NO: 90704 - DNA, 25 bp, Canis familiaris
ccacacaagtgtttctggtccctag

SEQ ID NO: 90705 - DNA, 25 bp, Canis familiaris
ccacacagaggacactcgggaccag

SEQ ID NO: 90706 - DNA, 25 bp, Canis familiaris
ccacaagctggacatctctgacgag

SEQ ID NO: 90707 - DNA, 25 bp, Canis familiaris
ccaacaggctgtctcctaggaggtt

SEQ ID NO: 90708 - DNA, 25 bp, Canis familiaris
ccaaatggtttgttcttggtgtttg

SEQ ID NO: 90709 - DNA, 25 bp, Canis familiaris
ccacaagggttgtccttcttactct

SEQ ID NO: 90710 - DNA, 25 bp, Canis familiaris
ccaaatggctttcacttccagacta

SEQ ID NO: 90711 - DNA, 25 bp, Canis familiaris
ccaagtgactttccagtcccaagtc

SEQ ID NO: 90712 - DNA, 25 bp, Canis familiaris
ccaaggagcatcatacccctgttgt

SEQ ID NO: 90713 - DNA, 25 bp, Canis familiaris
ccaagaggacctaaccgctttgtca

SEQ ID NO: 90714 - DNA, 25 bp, Canis familiaris
ccaaggtgggccaccatccttgcat

SEQ ID NO: 90715 - DNA, 25 bp, Canis familiaris
ccaagctcgggaaacgtgctcgtgc

SEQ ID NO: 90716 - DNA, 25 bp, Canis familiaris
ccacagtcctgagaagcggctacac

SEQ ID NO: 90717 - DNA, 25 bp, Canis familiaris
ccacatctccaaataaggggcaact

SEQ ID NO: 90718 - DNA, 25 bp, Canis familiaris
ccaatatcccaaagggcggcagccg

SEQ ID NO: 90719 - DNA, 25 bp, Canis familiaris
ccaattttgaaaggcctggcccgtg

SEQ ID NO: 90720 - DNA, 25 bp, Canis familiaris
gcctttcttgaatggccttaccagc

SEQ ID NO: 90721 - DNA, 25 bp, Canis familiaris
gccttttccaagaggtaagacatct

SEQ ID NO: 90722 - DNA, 25 bp, Canis familiaris
gccttttccagaaccctaagcagat

SEQ ID NO: 90723 - DNA, 25 bp, Canis familiaris
gcctatgagcctcaaaccggggaag

SEQ ID NO: 90724 - DNA, 25 bp, Canis familiaris
ccaagtcttcccaacaaggggacag

SEQ ID NO: 90725 - DNA, 25 bp, Canis familiaris
ccaatcctccccagaggcagggggt

SEQ ID NO: 90726 - DNA, 25 bp, Canis familiaris
ccactgcccccgagaagatggctgg

SEQ ID NO: 90727 - DNA, 25 bp, Canis familiaris
ccacatgccccggacaaatatcgca

SEQ ID NO: 90728 - DNA, 25 bp, Canis familiaris
ccactgctcccaggagagtctgacc

SEQ ID NO: 90729 - DNA, 25 bp, Canis familiaris
ccactcagtcgcttgagcgtctgac

SEQ ID NO: 90730 - DNA, 25 bp, Canis familiaris
ccacttgtcccgaatgactgcagct

SEQ ID NO: 90731 - DNA, 25 bp, Canis familiaris
ccaagttcactccatataccatcag

SEQ ID NO: 90732 - DNA, 25 bp, Canis familiaris
ccaaattccatcaattacacacatg

SEQ ID NO: 90733 - DNA, 25 bp, Canis familiaris
ccacaatctctctcataaatacata

SEQ ID NO: 90734 - DNA, 25 bp, Canis familiaris
ccacgtcattgttaaccatcacaga

SEQ ID NO: 90735 - DNA, 25 bp, Canis familiaris
ccaaacttgatttgacactccagaa

SEQ ID NO: 90736 - DNA, 25 bp, Canis familiaris
ccaagccttggtgtggccacgaagg

SEQ ID NO: 90737 - DNA, 25 bp, Canis familiaris
ccaagcccttgggtggttccaagtg

SEQ ID NO: 90738 - DNA, 25 bp, Canis familiaris
ccaagcccacgggtcttcacaaagg

SEQ ID NO: 90739 - DNA, 25 bp, Canis familiaris
ccacaacccggagaccacagaagac

SEQ ID NO: 90740 - DNA, 25 bp, Canis familiaris
ccaaacccctgagaccaggaagcca

SEQ ID NO: 90741 - DNA, 25 bp, Canis familiaris
ccaaccccacttgatgtcaggaaca

SEQ ID NO: 90742 - DNA, 25 bp, Canis familiaris
ccaaccccacgtgaggaggagacca

SEQ ID NO: 90743 - DNA, 25 bp, Canis familiaris
ccaaacccagggcagcgtgtacaaa

SEQ ID NO: 90744 - DNA, 25 bp, Canis familiaris
ccacaagggccgacgaggtgtacag

SEQ ID NO: 90745 - DNA, 25 bp, Canis familiaris
ccacaatggcgctgacgagaaggaa

SEQ ID NO: 90746 - DNA, 25 bp, Canis familiaris
ccaaggggctctactgcagaaccca

SEQ ID NO: 90747 - DNA, 25 bp, Canis familiaris
ccaactggtccaacaggagcacctc

SEQ ID NO: 90748 - DNA, 25 bp, Canis familiaris
ccaacggcaccaatcctagaactgg

SEQ ID NO: 90749 - DNA, 25 bp, Canis familiaris
ccacacaggcatgtacactgagaac

SEQ ID NO: 90750 - DNA, 25 bp, Canis familiaris
ccacagcggatgccatcgacgataa

SEQ ID NO: 90751 - DNA, 25 bp, Canis familiaris
ccacgggtgactggggaatcaaggg

SEQ ID NO: 90752 - DNA, 25 bp, Canis familiaris
ccacgggaacggccactgacaaggc

SEQ ID NO: 90753 - DNA, 25 bp, Canis familiaris
gccacggagtagaggactcgaaggc

SEQ ID NO: 90754 - DNA, 25 bp, Canis familiaris
ccactgggaggatggagccgcgggc

SEQ ID NO: 90755 - DNA, 25 bp, Canis familiaris
ccactggtattgtcatggactctgg

SEQ ID NO: 90756 - DNA, 25 bp, Canis familiaris
ccacaggttgtgtgcacaccgttgt

SEQ ID NO: 90757 - DNA, 25 bp, Canis familiaris
ccacaggtgcttctcacccaaatat

SEQ ID NO: 90758 - DNA, 25 bp, Canis familiaris
ccacacgatcttgacacccaatatg

SEQ ID NO: 90759 - DNA, 25 bp, Canis familiaris
ccacacagttagcccacacggatag

SEQ ID NO: 90760 - DNA, 25 bp, Canis familiaris
gccaccatctaagcccatgtggtag

SEQ ID NO: 90761 - DNA, 25 bp, Canis familiaris
gcctccctaagtgtcattcacattg

SEQ ID NO: 90762 - DNA, 25 bp, Canis familiaris
gccccccaatgtgggcaacaatcca

SEQ ID NO: 90763 - DNA, 25 bp, Canis familiaris
gggacaaaattctcaaaaccaacag

SEQ ID NO: 90764 - DNA, 25 bp, Canis familiaris
gcggagaaaatatcctgaccaaaaa

SEQ ID NO: 90765 - DNA, 25 bp, Canis familiaris
gcgcggtggaaatttgtcccaaagg

SEQ ID NO: 90766 - DNA, 25 bp, Canis familiaris
gccggtgttatcttctgaccgtttg

SEQ ID NO: 90767 - DNA, 25 bp, Canis familiaris
ccactgtggtctttcgttcaatatt

SEQ ID NO: 90768 - DNA, 25 bp, Canis familiaris
ccacatggtggttttgcttaattat

SEQ ID NO: 90769 - DNA, 25 bp, Canis familiaris
ccacatgggcttcttgtttgattat

SEQ ID NO: 90770 - DNA, 25 bp, Canis familiaris
ccaagggggctcacttgtgatcgat

SEQ ID NO: 90771 - DNA, 25 bp, Canis familiaris
ccaaggttggctaactctttcctga

SEQ ID NO: 90772 - DNA, 25 bp, Canis familiaris
ccaaggttgtggctgtttggccgag

SEQ ID NO: 90773 - DNA, 25 bp, Canis familiaris
ccacagtcttgagagcttcctggcc

SEQ ID NO: 90774 - DNA, 25 bp, Canis familiaris
ccaagttcatggccagcatatccgg

SEQ ID NO: 90775 - DNA, 25 bp, Canis familiaris
gccaatcatggcgagtcagacatcc

SEQ ID NO: 90776 - DNA, 25 bp, Canis familiaris
ccaagatggctgctgcattcctgcc

SEQ ID NO: 90777 - DNA, 25 bp, Canis familiaris
ccacagatcgtggccactcctgtgg

SEQ ID NO: 90778 - DNA, 25 bp, Canis familiaris
ccactgtgagtggagcagcccttgg

SEQ ID NO: 90779 - DNA, 25 bp, Canis familiaris
ccacagcggatgggagcgtcttttc

SEQ ID NO: 90780 - DNA, 25 bp, Canis familiaris
ccacagcagcagtggtggcttctct

SEQ ID NO: 90781 - DNA, 25 bp, Canis familiaris
ccacatcaggctttttgctcactga

SEQ ID NO: 90782 - DNA, 25 bp, Canis familiaris
ccacatcagtctctgcactggttga

SEQ ID NO: 90783 - DNA, 25 bp, Canis familiaris
ccacaattgcacgtgcactttcgag

SEQ ID NO: 90784 - DNA, 25 bp, Canis familiaris
ccaactatgccaggcaccttgcagc

SEQ ID NO: 90785 - DNA, 25 bp, Canis familiaris
ccaaatatgctgagcagctgctcca

SEQ ID NO: 90786 - DNA, 25 bp, Canis familiaris
ccaacacatgttgcagtcatccatt

SEQ ID NO: 90787 - DNA, 25 bp, Canis familiaris
ccaacacagctcaggcattctatgt

SEQ ID NO: 90788 - DNA, 25 bp, Canis familiaris
ccacagcctcactgtgcacttggtc

SEQ ID NO: 90789 - DNA, 25 bp, Canis familiaris
ccacatccatcctgtgctattgacc

SEQ ID NO: 90790 - DNA, 25 bp, Canis familiaris
ccacatccatcctttgagttacaag

SEQ ID NO: 90791 - DNA, 25 bp, Canis familiaris
ccactgcaccactattgatgtcatc

SEQ ID NO: 90792 - DNA, 25 bp, Canis familiaris
ccacaggcaagctttcttgcatgca

SEQ ID NO: 90793 - DNA, 25 bp, Canis familiaris
gccacggtacttattacagcaaccc

SEQ ID NO: 90794 - DNA, 25 bp, Canis familiaris
ccacttccctatacatctacgaata

SEQ ID NO: 90795 - DNA, 25 bp, Canis familiaris
ccacttctccatcatcttcagagga

SEQ ID NO: 90796 - DNA, 25 bp, Canis familiaris
ccacatccccatcactgagcaggga

SEQ ID NO: 90797 - DNA, 25 bp, Canis familiaris
gccaaccgcccttctaagggctttg

SEQ ID NO: 90798 - DNA, 25 bp, Canis familiaris
ccaattcccctatatgagggcgatt

SEQ ID NO: 90799 - DNA, 25 bp, Canis familiaris
ccaatgtcccccaagatcagactta

SEQ ID NO: 90800 - DNA, 25 bp, Canis familiaris
ccaagtcaaagtcatgccgcactag

SEQ ID NO: 90801 - DNA, 25 bp, Canis familiaris
ccacaggtaagtcaatgccccagag

SEQ ID NO: 90802 - DNA, 25 bp, Canis familiaris
ccacaggtaagctgttgtcgcccag

SEQ ID NO: 90803 - DNA, 25 bp, Canis familiaris
ccaacgtgagcgtgattggcggccg

SEQ ID NO: 90804 - DNA, 25 bp, Canis familiaris
ccaatggaggccacttgagggcacc

SEQ ID NO: 90805 - DNA, 25 bp, Canis familiaris
ccaacgggtcttctgggacactaga

SEQ ID NO: 90806 - DNA, 25 bp, Canis familiaris
ccaaccgagccttgccgggaaatgg

SEQ ID NO: 90807 - DNA, 25 bp, Canis familiaris
ccacacccgtcgtccggaaatatgt

SEQ ID NO: 90808 - DNA, 25 bp, Canis familiaris
ccacaagccctgctacggaatactg

SEQ ID NO: 90809 - DNA, 25 bp, Canis familiaris
ccaaacccgctttctggagacatta

SEQ ID NO: 90810 - DNA, 25 bp, Canis familiaris
gcccaaccctggagaagacacttag

SEQ ID NO: 90811 - DNA, 25 bp, Canis familiaris
gccagggcccggaggctaaattagg

SEQ ID NO: 90812 - DNA, 25 bp, Canis familiaris
ccaaccccgtgcaggtggaagtagg

SEQ ID NO: 90813 - DNA, 25 bp, Canis familiaris
ccaaggaggccgcggggaagagcag

SEQ ID NO: 90814 - DNA, 25 bp, Canis familiaris
ccaaggagtccgattaggcccaggt

SEQ ID NO: 90815 - DNA, 25 bp, Canis familiaris
ccaaggaggcgccgaacacggtcgg

SEQ ID NO: 90816 - DNA, 25 bp, Canis familiaris
gccaagaactggagccactgggtcg

SEQ ID NO: 90817 - DNA, 25 bp, Canis familiaris
ccaatgaaatggatccaccgtgaag

SEQ ID NO: 90818 - DNA, 25 bp, Canis familiaris
ccaagaagatgataccccgtggctg

SEQ ID NO: 90819 - DNA, 25 bp, Canis familiaris
ccaagatcgtgaagcccaacggcga

SEQ ID NO: 90820 - DNA, 25 bp, Canis familiaris
ccaagatgggatccccataattcag

SEQ ID NO: 90821 - DNA, 25 bp, Canis familiaris
ccactcagggatcccgatgctagca

SEQ ID NO: 90822 - DNA, 25 bp, Canis familiaris
ccacacggtgcagcacgcttagcat

SEQ ID NO: 90823 - DNA, 25 bp, Canis familiaris
ccaattttgcattccgttgcagctg

SEQ ID NO: 90824 - DNA, 25 bp, Canis familiaris
ccaaatgcttgctggtgggctctgg

SEQ ID NO: 90825 - DNA, 25 bp, Canis familiaris
ccaaattttgcgctcggtgcgatac

SEQ ID NO: 90826 - DNA, 25 bp, Canis familiaris
ccaaattttgcgctcggtgcgatac

SEQ ID NO: 90827 - DNA, 25 bp, Canis familiaris
gccagatttttgggccaggtgaata

SEQ ID NO: 90828 - DNA, 25 bp, Canis familiaris
ccactctttggtgctgcacgacaat

SEQ ID NO: 90829 - DNA, 25 bp, Canis familiaris
ccactttgaggtcctgctcagacaa

SEQ ID NO: 90830 - DNA, 25 bp, Canis familiaris
gccatattcgatggggcctcgacac

SEQ ID NO: 90831 - DNA, 25 bp, Canis familiaris
gcctgcacttatggggttcctaagt

SEQ ID NO: 90832 - DNA, 25 bp, Canis familiaris
gcccccttcgacttaactgaaggag

SEQ ID NO: 90833 - DNA, 25 bp, Canis familiaris
gcccccacctggcttcaaaagtggg

SEQ ID NO: 90834 - DNA, 25 bp, Canis familiaris
gcccttgaactactttaattagagt

SEQ ID NO: 90835 - DNA, 25 bp, Canis familiaris
tccagtctaagtcctaaaatctaag

SEQ ID NO: 90836 - DNA, 25 bp, Canis familiaris
ccacttaatccccaacaactgagag

SEQ ID NO: 90837 - DNA, 25 bp, Canis familiaris
ccacttaactggcccgccattattg

SEQ ID NO: 90838 - DNA, 25 bp, Canis familiaris
ccacaataagacctcacctcattta

SEQ ID NO: 90839 - DNA, 25 bp, Canis familiaris
ccaacagccaaggctacctgctatt

SEQ ID NO: 90840 - DNA, 25 bp, Canis familiaris
ccaaccggagctcattcttatataa

SEQ ID NO: 90841 - DNA, 25 bp, Canis familiaris
ccacttcagcttggaaacttataaa

SEQ ID NO: 90842 - DNA, 25 bp, Canis familiaris
ccacttcggtgcaccacttatgaga

SEQ ID NO: 90843 - DNA, 25 bp, Canis familiaris
ccactctcgttgatccactaagatg

SEQ ID NO: 90844 - DNA, 25 bp, Canis familiaris
ccacatactacagacgctctacagt

SEQ ID NO: 90845 - DNA, 25 bp, Canis familiaris
ccacatctgctacataccactaggt

SEQ ID NO: 90846 - DNA, 25 bp, Canis familiaris
ccactctcatatctatccaatcgga

SEQ ID NO: 90847 - DNA, 25 bp, Canis familiaris
ccacttaatgtgggccaacatgggt

SEQ ID NO: 90848 - DNA, 25 bp, Canis familiaris
ccacttgtactgcgcctgaatagtt

SEQ ID NO: 90849 - DNA, 25 bp, Canis familiaris
ccacttgtacagctgcacttctggt

SEQ ID NO: 90850 - DNA, 25 bp, Canis familiaris
ccacttttgatctatcctcatctgg

SEQ ID NO: 90851 - DNA, 25 bp, Canis familiaris
ccacattttgaattcttcagtgtaa

SEQ ID NO: 90852 - DNA, 25 bp, Canis familiaris
ccactcttgaaattcttgagtgatg

SEQ ID NO: 90853 - DNA, 25 bp, Canis familiaris
ccacacttaggatcacagatgctga

SEQ ID NO: 90854 - DNA, 25 bp, Canis familiaris
ccacttccgtgaaccacagcgatgt

SEQ ID NO: 90855 - DNA, 25 bp, Canis familiaris
ccactcccagaagccactggatctg

SEQ ID NO: 90856 - DNA, 25 bp, Canis familiaris
ccactccaccaatatgcactgaatt

SEQ ID NO: 90857 - DNA, 25 bp, Canis familiaris
ccacatccacaaagcacatcattaa

SEQ ID NO: 90858 - DNA, 25 bp, Canis familiaris
ccactccatcaacactctctgagat

SEQ ID NO: 90859 - DNA, 25 bp, Canis familiaris
ccactccctcagcagtgtcagagaa

SEQ ID NO: 90860 - DNA, 25 bp, Canis familiaris
ccactcctccagcctggaatgtgaa

SEQ ID NO: 90861 - DNA, 25 bp, Canis familiaris
ccaactctccagctgctgttgaaga

SEQ ID NO: 90862 - DNA, 25 bp, Canis familiaris
ccacagctcccacaggtttaaattc

SEQ ID NO: 90863 - DNA, 25 bp, Canis familiaris
gccaagccctggtaactattagtta

SEQ ID NO: 90864 - DNA, 25 bp, Canis familiaris
ccaacctctgcatgtactttagtgt

SEQ ID NO: 90865 - DNA, 25 bp, Canis familiaris
ccaacacattattgccctttagaac

SEQ ID NO: 90866 - DNA, 25 bp, Canis familiaris
ccacaccttatacattttacaccct

SEQ ID NO: 90867 - DNA, 25 bp, Canis familiaris
gctaaaattaatctacttaccactt

SEQ ID NO: 90868 - DNA, 25 bp, Canis familiaris
ccaacagttagtcaacttgcaccag

SEQ ID NO: 90869 - DNA, 25 bp, Canis familiaris
ccaactgttgttgaagcccagccgg

SEQ ID NO: 90870 - DNA, 25 bp, Canis familiaris
ccaagtgttttcagtcgtgcaccgg

SEQ ID NO: 90871 - DNA, 25 bp, Canis familiaris
ccaaggctttccagaagtgccccat

SEQ ID NO: 90872 - DNA, 25 bp, Canis familiaris
gccaaggccctcaaataagtccctc

SEQ ID NO: 90873 - DNA, 25 bp, Canis familiaris
ccaagtgcggcaaaggccagtcccg

SEQ ID NO: 90874 - DNA, 25 bp, Canis familiaris
gccaggacgacgcgggcatgtacat

SEQ ID NO: 90875 - DNA, 25 bp, Canis familiaris
ccaaacagtttgagtcattgacatt

SEQ ID NO: 90876 - DNA, 25 bp, Canis familiaris
ccaaaatcttttgcctctgactgtc

SEQ ID NO: 90877 - DNA, 25 bp, Canis familiaris
ccaatttctcctagaccctgaggtt

SEQ ID NO: 90878 - DNA, 25 bp, Canis familiaris
gccaaatttcctgaactgctacgtg

SEQ ID NO: 90879 - DNA, 25 bp, Canis familiaris
ccaacgtcaccagacactgaacagg

SEQ ID NO: 90880 - DNA, 25 bp, Canis familiaris
ccaacgtcaccagacctgtacaagg

SEQ ID NO: 90881 - DNA, 25 bp, Canis familiaris
ccaacgtcatgcgatgaagttgtac

SEQ ID NO: 90882 - DNA, 25 bp, Canis familiaris
ccaagcctcatggatgagtggtgaa

SEQ ID NO: 90883 - DNA, 25 bp, Canis familiaris
ccacagcatctgccttgcagtggaa

SEQ ID NO: 90884 - DNA, 25 bp, Canis familiaris
ccacagccgacttcagggagcagat

SEQ ID NO: 90885 - DNA, 25 bp, Canis familiaris
ccaatggcgtcttcaatccagcgaa

SEQ ID NO: 90886 - DNA, 25 bp, Canis familiaris
ccaaggacatatggaatccacagga

SEQ ID NO: 90887 - DNA, 25 bp, Canis familiaris
gccaggggcataagttcacggccga

SEQ ID NO: 90888 - DNA, 25 bp, Canis familiaris
ccaagggatacagtgcacccctcta

SEQ ID NO: 90889 - DNA, 25 bp, Canis familiaris
ccaaggtgaacaggagccccatggc

SEQ ID NO: 90890 - DNA, 25 bp, Canis familiaris
ccaagggtacagcctgttcctggtg

SEQ ID NO: 90891 - DNA, 25 bp, Canis familiaris
ccacacgtgtacactctatgcctgt

SEQ ID NO: 90892 - DNA, 25 bp, Canis familiaris
ccaacgatgtgtccggttgccatga

SEQ ID NO: 90893 - DNA, 25 bp, Canis familiaris
ccacactcaggttcgatgttccata

SEQ ID NO: 90894 - DNA, 25 bp, Canis familiaris
ccacttgacaggtcctgatcccagc

SEQ ID NO: 90895 - DNA, 25 bp, Canis familiaris
ccactagacaggtccttgacccagc

SEQ ID NO: 90896 - DNA, 25 bp, Canis familiaris
ccacatggcaagaccctaggaaggc

SEQ ID NO: 90897 - DNA, 25 bp, Canis familiaris
ccaaggaagtgccactttggaggtc

SEQ ID NO: 90898 - DNA, 25 bp, Canis familiaris
ccaaggcaaccaaccctggatttct

SEQ ID NO: 90899 - DNA, 25 bp, Canis familiaris
gccaaggaaataagccctgtaacct

SEQ ID NO: 90900 - DNA, 25 bp, Canis familiaris
gccaatgggtaatctcaaaaatctc

SEQ ID NO: 90901 - DNA, 25 bp, Canis familiaris
ccaaccagccaaccaaaaacatctc

SEQ ID NO: 90902 - DNA, 25 bp, Canis familiaris
ccaaccccgagacataatattcccg

SEQ ID NO: 90903 - DNA, 25 bp, Canis familiaris
ccaaccccgtagtaacatcattccg

SEQ ID NO: 90904 - DNA, 25 bp, Canis familiaris
ccaaggccctggctaatttcatccg

SEQ ID NO: 90905 - DNA, 25 bp, Canis familiaris
ccaaggctcctgttgaaagtcaata

SEQ ID NO: 90906 - DNA, 25 bp, Canis familiaris
ccaaggctcagaaggaagtacattt

SEQ ID NO: 90907 - DNA, 25 bp, Canis familiaris
ccaagtgctggcacaacccatctgt

SEQ ID NO: 90908 - DNA, 25 bp, Canis familiaris
ccaatggtggcggcaagtgatcagt

SEQ ID NO: 90909 - DNA, 25 bp, Canis familiaris
ccacatgatgagccgccttgggcat

SEQ ID NO: 90910 - DNA, 25 bp, Canis familiaris
ccacagaggcctacttgtggctccc

SEQ ID NO: 90911 - DNA, 25 bp, Canis familiaris
ccacaactgcttaaggctgggccca

SEQ ID NO: 90912 - DNA, 25 bp, Canis familiaris
ccacacctggctcatggggagctac

SEQ ID NO: 90913 - DNA, 25 bp, Canis familiaris
ccacttcggcatcgtggagggcctc

SEQ ID NO: 90914 - DNA, 25 bp, Canis familiaris
gccactgtcaggtgtggggtgcgcc

SEQ ID NO: 90915 - DNA, 25 bp, Canis familiaris
gccagggatgagtgggggccggcag

SEQ ID NO: 90916 - DNA, 25 bp, Canis familiaris
gccaatttggaccgggccaaggctg

SEQ ID NO: 90917 - DNA, 25 bp, Canis familiaris
ccaagcttctaccgtgggtaatgtg

SEQ ID NO: 90918 - DNA, 25 bp, Canis familiaris
ccaaggccaagcctgtggtgtcctt

SEQ ID NO: 90919 - DNA, 25 bp, Canis familiaris
ccaaggcacagggtggccagggcct

SEQ ID NO: 90920 - DNA, 25 bp, Canis familiaris
ccacaggaggttggactgccaggcc

SEQ ID NO: 90921 - DNA, 25 bp, Canis familiaris
ccacagggatccagaggccatgccc

SEQ ID NO: 90922 - DNA, 25 bp, Canis familiaris
ccacatgggatgcgtggacctcctc

SEQ ID NO: 90923 - DNA, 25 bp, Canis familiaris
ccacatgggcatgggtgtcccacga

SEQ ID NO: 90924 - DNA, 25 bp, Canis familiaris
ccacatggcacaacagctttgccac

SEQ ID NO: 90925 - DNA, 25 bp, Canis familiaris
ccacatctggcttcctgtatggagc

SEQ ID NO: 90926 - DNA, 25 bp, Canis familiaris
ccacatgctatcttcttgctttgag

SEQ ID NO: 90927 - DNA, 25 bp, Canis familiaris
gccaatggatcatcttcgtggaccc

SEQ ID NO: 90928 - DNA, 25 bp, Canis familiaris
ccaaggtctccttagtgtacttcac

SEQ ID NO: 90929 - DNA, 25 bp, Canis familiaris
ccaagattgcccaacactaactaca

SEQ ID NO: 90930 - DNA, 25 bp, Canis familiaris
ccaaagactcaaacatacaacaaca

SEQ ID NO: 90931 - DNA, 25 bp, Canis familiaris
ccaagagactctaacacctacacgt

SEQ ID NO: 90932 - DNA, 25 bp, Canis familiaris
ccaacacacctaacaggcagccaag

SEQ ID NO: 90933 - DNA, 25 bp, Canis familiaris
gccaaaagccttcaggcctacaagt

SEQ ID NO: 90934 - DNA, 25 bp, Canis familiaris
ccaaaaccgcctgcagccaaaaatt

SEQ ID NO: 90935 - DNA, 25 bp, Canis familiaris
ccaaaaccccaggacaaggctcact

SEQ ID NO: 90936 - DNA, 25 bp, Canis familiaris
ccaaggttccaggcccataggacct

SEQ ID NO: 90937 - DNA, 25 bp, Canis familiaris
gccagggttccagagactagggcct

SEQ ID NO: 90938 - DNA, 25 bp, Canis familiaris
gccgggtcaacagcgactacgagac

SEQ ID NO: 90939 - DNA, 25 bp, Canis familiaris
ccaagttcaaaggccagcatatccg

SEQ ID NO: 90940 - DNA, 25 bp, Canis familiaris
ccaagtcccagagacagctcattcc

SEQ ID NO: 90941 - DNA, 25 bp, Canis familiaris
ccaatggccctggaacagccttgga

SEQ ID NO: 90942 - DNA, 25 bp, Canis familiaris
ccacaagccgctgcaagcagtgtct

SEQ ID NO: 90943 - DNA, 25 bp, Canis familiaris
ccacatccacgcacacagaggagct

SEQ ID NO: 90944 - DNA, 25 bp, Canis familiaris
ccacactatctcatccagagctaac

SEQ ID NO: 90945 - DNA, 25 bp, Canis familiaris
ccacaccatgccatccaaatagatt

SEQ ID NO: 90946 - DNA, 25 bp, Canis familiaris
ccacaatcaccatacaacaccattt

SEQ ID NO: 90947 - DNA, 25 bp, Canis familiaris
ccacaatccacacaaacccaaattt

SEQ ID NO: 90948 - DNA, 25 bp, Canis familiaris
ccacaccgacagttcaatccaaaaa

SEQ ID NO: 90949 - DNA, 25 bp, Canis familiaris
gccatacccaagtccaagaaaacaa

SEQ ID NO: 90950 - DNA, 25 bp, Canis familiaris
ccacacgacgaggccaagtttgacg

SEQ ID NO: 90951 - DNA, 25 bp, Canis familiaris
ccacacgaccacaccaggagtgaga

SEQ ID NO: 90952 - DNA, 25 bp, Canis familiaris
ccaaggattatcactgggcctgcgc

SEQ ID NO: 90953 - DNA, 25 bp, Canis familiaris
ccaagtgatttctctggttctctgt

SEQ ID NO: 90954 - DNA, 25 bp, Canis familiaris
ccaagttctggctttggttgctgcc

SEQ ID NO: 90955 - DNA, 25 bp, Canis familiaris
ccaagtatctgccatgttaccttcc

SEQ ID NO: 90956 - DNA, 25 bp, Canis familiaris
ccaactactggcttgttcctgtagc

SEQ ID NO: 90957 - DNA, 25 bp, Canis familiaris
ccaaccaggatggggtgcgggagca

SEQ ID NO: 90958 - DNA, 25 bp, Canis familiaris
ccaacgaggtgctgggcctcgagcg

SEQ ID NO: 90959 - DNA, 25 bp, Canis familiaris
gccaactgaagggggaacctgccgg

SEQ ID NO: 90960 - DNA, 25 bp, Canis familiaris
gccaataaatgggggacaatttcca

SEQ ID NO: 90961 - DNA, 25 bp, Canis familiaris
ccaatctcaatgccggtgacacaac

SEQ ID NO: 90962 - DNA, 25 bp, Canis familiaris
ccacagctgccaccaagatgagcag

SEQ ID NO: 90963 - DNA, 25 bp, Canis familiaris
ccacagagctcacctgcaagatctg

SEQ ID NO: 90964 - DNA, 25 bp, Canis familiaris
ccacaggctgtgtctgcaagtcgga

SEQ ID NO: 90965 - DNA, 25 bp, Canis familiaris
ccacaacctgtcggagtcggaagat

SEQ ID NO: 90966 - DNA, 25 bp, Canis familiaris
ccaacactccctcatttttgaggga

SEQ ID NO: 90967 - DNA, 25 bp, Canis familiaris
ccaacacccctatcatcttggtggg

SEQ ID NO: 90968 - DNA, 25 bp, Canis familiaris
ccaacagcaccacaactgcttaagg

SEQ ID NO: 90969 - DNA, 25 bp, Canis familiaris
ccaagctggcctcaggttttcagag

SEQ ID NO: 90970 - DNA, 25 bp, Canis familiaris
ccaagctggagggggctctttggca

SEQ ID NO: 90971 - DNA, 25 bp, Canis familiaris
ccaagtggggagcacctgctatgcc

SEQ ID NO: 90972 - DNA, 25 bp, Canis familiaris
ccaaggcgtggcggacacaggtacc

SEQ ID NO: 90973 - DNA, 25 bp, Canis familiaris
gccagggaaggcgccctggtacact

SEQ ID NO: 90974 - DNA, 25 bp, Canis familiaris
gccagagagagaagggccccgaccc

SEQ ID NO: 90975 - DNA, 25 bp, Canis familiaris
gccagaaacaatacctctccattgc

SEQ ID NO: 90976 - DNA, 25 bp, Canis familiaris
gccaaaaaatatgtttccacctccg

SEQ ID NO: 90977 - DNA, 25 bp, Canis familiaris
ccaacatctaagatttgtccccctc

SEQ ID NO: 90978 - DNA, 25 bp, Canis familiaris
gccaacatctaagatttgtccccct

SEQ ID NO: 90979 - DNA, 25 bp, Canis familiaris
gccaaattattgttagttcctgtca

SEQ ID NO: 90980 - DNA, 25 bp, Canis familiaris
ccaaatgaatatttggcctatattc

SEQ ID NO: 90981 - DNA, 25 bp, Canis familiaris
ccaagtgcaagttgtcccaataggc

SEQ ID NO: 90982 - DNA, 25 bp, Canis familiaris
ccacatctcagtgttctccatttgg

SEQ ID NO: 90983 - DNA, 25 bp, Canis familiaris
ccacatgctcgtgttgtgccagtga

SEQ ID NO: 90984 - DNA, 25 bp, Canis familiaris
ccacatgcttgggatttaatgctct

SEQ ID NO: 90985 - DNA, 25 bp, Canis familiaris
ccaattagggaatactgctctctga

SEQ ID NO: 90986 - DNA, 25 bp, Canis familiaris
ccaagtgattcaataaaccctctga

SEQ ID NO: 90987 - DNA, 25 bp, Canis familiaris
ccaagtattttatactccatttcag

SEQ ID NO: 90988 - DNA, 25 bp, Canis familiaris
ccaacgtttccttattgactttcag

SEQ ID NO: 90989 - DNA, 25 bp, Canis familiaris
ccaacttctgttaaaaactgctctc

SEQ ID NO: 90990 - DNA, 25 bp, Canis familiaris
ccaacacgtgtaacacagaccctcc

SEQ ID NO: 90991 - DNA, 25 bp, Canis familiaris
ccacacacctggagaacaaccttat

SEQ ID NO: 90992 - DNA, 25 bp, Canis familiaris
ccacaccacttgaaaccaccgtgta

SEQ ID NO: 90993 - DNA, 25 bp, Canis familiaris
ccaatagacttgctcaacacgggct

SEQ ID NO: 90994 - DNA, 25 bp, Canis familiaris
ccacaagaattgcgacctctctggc

SEQ ID NO: 90995 - DNA, 25 bp, Canis familiaris
ccacaaggcatccatggtgctcttc

SEQ ID NO: 90996 - DNA, 25 bp, Canis familiaris
ccacaagctgcagctgtggcacgac

SEQ ID NO: 90997 - DNA, 25 bp, Canis familiaris
ccacaggatcaaatgcggacgcaca

SEQ ID NO: 90998 - DNA, 25 bp, Canis familiaris
ccacagtcacaaaggggagaaaatg

SEQ ID NO: 90999 - DNA, 25 bp, Canis familiaris
ccaagtccagcaagcaggccaaaga

SEQ ID NO: 91000 - DNA, 25 bp, Canis familiaris
ccaagtccaatcaaggccaatccgg

SEQ ID NO: 91001 - DNA, 25 bp, Canis familiaris
ccaatgtctcaagaggagcccctgc

SEQ ID NO: 91002 - DNA, 25 bp, Canis familiaris
gccaaaccaatgggaaccgccttgt

SEQ ID NO: 91003 - DNA, 25 bp, Canis familiaris
gcgagaacgacatcgacatcctgcg

SEQ ID NO: 91004 - DNA, 25 bp, Canis familiaris
gctacaatcgaattccagccagtcc

SEQ ID NO: 91005 - DNA, 25 bp, Canis familiaris
ccacaacagcaagatcaccagtcct

SEQ ID NO: 91006 - DNA, 25 bp, Canis familiaris
ccacaactgagacacagcacaggcc

SEQ ID NO: 91007 - DNA, 25 bp, Canis familiaris
ccacacaggaagcccgacatgggac

SEQ ID NO: 91008 - DNA, 25 bp, Canis familiaris
ccaagcggaagccacgcctgatgga

SEQ ID NO: 91009 - DNA, 25 bp, Canis familiaris
ccaagaggtagctgccctagagggg

SEQ ID NO: 91010 - DNA, 25 bp, Canis familiaris
ccaaaggttgctgagcagctcaacg

SEQ ID NO: 91011 - DNA, 25 bp, Canis familiaris
ccaaaggtatgcgaagcctgcaaaa

SEQ ID NO: 91012 - DNA, 25 bp, Canis familiaris
gccaaaggtctgcggcttgagacta

SEQ ID NO: 91013 - DNA, 25 bp, Canis familiaris
ccaaaggatgcaggcgacggagtct

SEQ ID NO: 91014 - DNA, 25 bp, Canis familiaris
ccaagagcaatggggccctgacctg

SEQ ID NO: 91015 - DNA, 25 bp, Canis familiaris
ccaacacagtgctgtctggcggcac

SEQ ID NO: 91016 - DNA, 25 bp, Canis familiaris
ccacacagagtctggcatgacccca

SEQ ID NO: 91017 - DNA, 25 bp, Canis familiaris
ccacagagagactgatgtcccctcc

SEQ ID NO: 91018 - DNA, 25 bp, Canis familiaris
ccacagggctcaggtgacactcctg

SEQ ID NO: 91019 - DNA, 25 bp, Canis familiaris
ccacaagaggagctgaccgcctggg

SEQ ID NO: 91020 - DNA, 25 bp, Canis familiaris
ccaaagggcaggccatggccacggc

SEQ ID NO: 91021 - DNA, 25 bp, Canis familiaris
ccacagggtctggccatggctaagg

SEQ ID NO: 91022 - DNA, 25 bp, Canis familiaris
ccacaagagtcagtccggagcaggg

SEQ ID NO: 91023 - DNA, 25 bp, Canis familiaris
ccacacacgggcacgggcagatgtg

SEQ ID NO: 91024 - DNA, 25 bp, Canis familiaris
ccacaagggatgggctgggcagtga

SEQ ID NO: 91025 - DNA, 25 bp, Canis familiaris
ccacaagaggcgcgcgggagagaga

SEQ ID NO: 91026 - DNA, 25 bp, Canis familiaris
ccacaaccgcgggcggtgcgtggag

SEQ ID NO: 91027 - DNA, 25 bp, Canis familiaris
ccacacccagtcccggatggatggg

SEQ ID NO: 91028 - DNA, 25 bp, Canis familiaris
ccacacccccattcagttgtgatgt

SEQ ID NO: 91029 - DNA, 25 bp, Canis familiaris
ccacactgcatcgtcttagtttatt

SEQ ID NO: 91030 - DNA, 25 bp, Canis familiaris
ccacactctcctctggtagatttaa

SEQ ID NO: 91031 - DNA, 25 bp, Canis familiaris
ccacacgtggtgatgttacattcct

SEQ ID NO: 91032 - DNA, 25 bp, Canis familiaris
ccacacgtagcggtgcttacttctg

SEQ ID NO: 91033 - DNA, 25 bp, Canis familiaris
ccacacctcgcggggaactgtgggc

SEQ ID NO: 91034 - DNA, 25 bp, Canis familiaris
ccaacctcaccatggacactgaaat

SEQ ID NO: 91035 - DNA, 25 bp, Canis familiaris
ccacacccacctggagcgaaagaca

SEQ ID NO: 91036 - DNA, 25 bp, Canis familiaris
ccacaggacccggagagaccatgaa

SEQ ID NO: 91037 - DNA, 25 bp, Canis familiaris
ccaaacgcgcacgaaagccacatat

SEQ ID NO: 91038 - DNA, 25 bp, Canis familiaris
gccaagactggagataccgcctatg

SEQ ID NO: 91039 - DNA, 25 bp, Canis familiaris
ccaagcatctgttaaaccctccaga

SEQ ID NO: 91040 - DNA, 25 bp, Canis familiaris
ccaagcatttatatagcatgtcccc

SEQ ID NO: 91041 - DNA, 25 bp, Canis familiaris
ccacagcttcttatcatcttcaggt

SEQ ID NO: 91042 - DNA, 25 bp, Canis familiaris
ccacacatttgtatgcttctcagcc

SEQ ID NO: 91043 - DNA, 25 bp, Canis familiaris
ccacactgagttatggtgctggcct

SEQ ID NO: 91044 - DNA, 25 bp, Canis familiaris
ccacactcagtgtggagctctgagc

SEQ ID NO: 91045 - DNA, 25 bp, Canis familiaris
ccacacatcagctgggagggtgcgc

SEQ ID NO: 91046 - DNA, 25 bp, Canis familiaris
ccacactccagcgaagcacgtggcc

SEQ ID NO: 91047 - DNA, 25 bp, Canis familiaris
ccacagccaccgacatcaagggcaa

SEQ ID NO: 91048 - DNA, 25 bp, Canis familiaris
ccacacgcaccgagcatgagggaga

SEQ ID NO: 91049 - DNA, 25 bp, Canis familiaris
ccacagcagccacctggagaggagg

SEQ ID NO: 91050 - DNA, 25 bp, Canis familiaris
ccacagagcccctggggtgggaggg

SEQ ID NO: 91051 - DNA, 25 bp, Canis familiaris
gccactgaggctgctggggtggggg

SEQ ID NO: 91052 - DNA, 25 bp, Canis familiaris
gccatcgagaagctcgccgtggaag

SEQ ID NO: 91053 - DNA, 25 bp, Canis familiaris
gcctaaaaggtccctagtgtagtgt

SEQ ID NO: 91054 - DNA, 25 bp, Canis familiaris
ccaagccaacccactcagtgtagtg

SEQ ID NO: 91055 - DNA, 25 bp, Canis familiaris
ccacagccaactacgaccaggataa

SEQ ID NO: 91056 - DNA, 25 bp, Canis familiaris
ccacacgctccttagtcaagaaaga

SEQ ID NO: 91057 - DNA, 25 bp, Canis familiaris
ccacaactcctccaacataaacaga

SEQ ID NO: 91058 - DNA, 25 bp, Canis familiaris
ccaaaaccaaagactcaaacataca

SEQ ID NO: 91059 - DNA, 25 bp, Canis familiaris
ccacaacaagcgaaccacacgacaa

SEQ ID NO: 91060 - DNA, 25 bp, Canis familiaris
ccacaccagaacgccaacgaaacgg

SEQ ID NO: 91061 - DNA, 25 bp, Canis familiaris
ccaaccaaactcatcaccaaaacga

SEQ ID NO: 91062 - DNA, 25 bp, Canis familiaris
ccaactgcaaactttctccaataca

SEQ ID NO: 91063 - DNA, 25 bp, Canis familiaris
ccaatctcaagtgttctccactggg

SEQ ID NO: 91064 - DNA, 25 bp, Canis familiaris
ccacagctaaccttttcttcatggt

SEQ ID NO: 91065 - DNA, 25 bp, Canis familiaris
gccacacgaaccaggtgtccaggat

SEQ ID NO: 91066 - DNA, 25 bp, Canis familiaris
ccaatcgggcacaggtgctcgcttt

SEQ ID NO: 91067 - DNA, 25 bp, Canis familiaris
ccaacgtggcctaggactgcagagt

SEQ ID NO: 91068 - DNA, 25 bp, Canis familiaris
ccaacgtggctaaacctcactcaaa

SEQ ID NO: 91069 - DNA, 25 bp, Canis familiaris
ccacacggcaggaaaccaagctcta

SEQ ID NO: 91070 - DNA, 25 bp, Canis familiaris
ccacacaggactcaccacaggatta

SEQ ID NO: 91071 - DNA, 25 bp, Canis familiaris
ccacaaacctgcagctgaagccatt

SEQ ID NO: 91072 - DNA, 25 bp, Canis familiaris
gccaacaaccatgggctaacaaggt

SEQ ID NO: 91073 - DNA, 25 bp, Canis familiaris
ccaacaaccatggggctgccaaagc

SEQ ID NO: 91074 - DNA, 25 bp, Canis familiaris
ccaaatgatccgcgtcccgaatgct

SEQ ID NO: 91075 - DNA, 25 bp, Canis familiaris
ccaaatggcggatgacgccggtgct

SEQ ID NO: 91076 - DNA, 25 bp, Canis familiaris
ccaaatcctggatgagaccacacct

SEQ ID NO: 91077 - DNA, 25 bp, Canis familiaris
ccaaccctgtcaagaggacactcgt

SEQ ID NO: 91078 - DNA, 25 bp, Canis familiaris
ccacacgcacttatcaggaacgcct

SEQ ID NO: 91079 - DNA, 25 bp, Canis familiaris
ccaacagcttgaactaggccaggcc

SEQ ID NO: 91080 - DNA, 25 bp, Canis familiaris
ccaaagcggttttgatggcggccac

SEQ ID NO: 91081 - DNA, 25 bp, Canis familiaris
ccaaaaggctacctttcaggccacg

SEQ ID NO: 91082 - DNA, 25 bp, Canis familiaris
ccacactagcgttgctgctggagag

SEQ ID NO: 91083 - DNA, 25 bp, Canis familiaris
ccacactgcccagcggggagaacag

SEQ ID NO: 91084 - DNA, 25 bp, Canis familiaris
ccacacccacacaggaagtaccagt

SEQ ID NO: 91085 - DNA, 25 bp, Canis familiaris
ccaacctacagcagcgatatctccc

SEQ ID NO: 91086 - DNA, 25 bp, Canis familiaris
ccaaccagacagagaatgatgccct

SEQ ID NO: 91087 - DNA, 25 bp, Canis familiaris
gccaatccgaagtatgtgagagcct

SEQ ID NO: 91088 - DNA, 25 bp, Canis familiaris
gccaaaatcaagtgtcagacgctca

SEQ ID NO: 91089 - DNA, 25 bp, Canis familiaris
gctaagaccaagtgtgccaagcccg

SEQ ID NO: 91090 - DNA, 25 bp, Canis familiaris
ccaagcaagcaagcggtcaagcacc

SEQ ID NO: 91091 - DNA, 25 bp, Canis familiaris
gccaaggcaaaaggagttagcccta

SEQ ID NO: 91092 - DNA, 25 bp, Canis familiaris
gccaaggtactggagtgcgtgagcc

SEQ ID NO: 91093 - DNA, 25 bp, Canis familiaris
ccaaggtcaagaagtcagggcccca

SEQ ID NO: 91094 - DNA, 25 bp, Canis familiaris
ccaagcttccagaaccaagggacca

SEQ ID NO: 91095 - DNA, 25 bp, Canis familiaris
ccacacccgagcgccaagggaaagg

SEQ ID NO: 91096 - DNA, 25 bp, Canis familiaris
ccacaccggagagcctaaggacaca

SEQ ID NO: 91097 - DNA, 25 bp, Canis familiaris
ccaatccgtcgaagcctacgaacac

SEQ ID NO: 91098 - DNA, 25 bp, Canis familiaris
ccaagacctcaagtccttcagaacc

SEQ ID NO: 91099 - DNA, 25 bp, Canis familiaris
ccaagagcctcaagtccttcaggac

SEQ ID NO: 91100 - DNA, 25 bp, Canis familiaris
ccaaggcccaaggcctgtgtggccc

SEQ ID NO: 91101 - DNA, 25 bp, Canis familiaris
ccaagggcccatgctgttatgcccc

SEQ ID NO: 91102 - DNA, 25 bp, Canis familiaris
ccaaggagtctgaccctttgatccc

SEQ ID NO: 91103 - DNA, 25 bp, Canis familiaris
ccaaaagggtcatcatctctgcccc

SEQ ID NO: 91104 - DNA, 25 bp, Canis familiaris
ccaaaaaagacatccgcacacacac

SEQ ID NO: 91105 - DNA, 25 bp, Canis familiaris
ccaaacataaacacgcatacacaca

SEQ ID NO: 91106 - DNA, 25 bp, Canis familiaris
ccaaacaaagagaagcccaacagca

SEQ ID NO: 91107 - DNA, 25 bp, Canis familiaris
ccaaaaacagataattacacacaca

SEQ ID NO: 91108 - DNA, 25 bp, Canis familiaris
ccaaaacagtgaaatctccgcaaca

SEQ ID NO: 91109 - DNA, 25 bp, Canis familiaris
ccaaacatttagatctccgcaacag

SEQ ID NO: 91110 - DNA, 25 bp, Canis familiaris
ccacaagatcacagaactgctggaa

SEQ ID NO: 91111 - DNA, 25 bp, Canis familiaris
ccacacgagatcacaagtcgtgtac

SEQ ID NO: 91112 - DNA, 25 bp, Canis familiaris
ccaacatgtatcactagccctgtac

SEQ ID NO: 91113 - DNA, 25 bp, Canis familiaris
ccaaagttgctgtctagtacattca

SEQ ID NO: 91114 - DNA, 25 bp, Canis familiaris
ccaaaattgcgtctgatggtctcaa

SEQ ID NO: 91115 - DNA, 25 bp, Canis familiaris
ccaaacacgttaagaggctctgcaa

SEQ ID NO: 91116 - DNA, 25 bp, Canis familiaris
ccaacagctcggaagtaccctgatg

SEQ ID NO: 91117 - DNA, 25 bp, Canis familiaris
ccaatactcggcatgaacctgatga

SEQ ID NO: 91118 - DNA, 25 bp, Canis familiaris
ccaatcactttggtatagcctctga

SEQ ID NO: 91119 - DNA, 25 bp, Canis familiaris
ccaaacttgtgttcttgcctggacc

SEQ ID NO: 91120 - DNA, 25 bp, Canis familiaris
ccaaacattcatcttatccgggccc

SEQ ID NO: 91121 - DNA, 25 bp, Canis familiaris
ccaagaatctagtctttcccgactc

SEQ ID NO: 91122 - DNA, 25 bp, Canis familiaris
ccaaaatgtaacttctcctgggcgc

SEQ ID NO: 91123 - DNA, 25 bp, Canis familiaris
ccaattagtccaggtctcctgcggt

SEQ ID NO: 91124 - DNA, 25 bp, Canis familiaris
ccaagtagtggagggcacggctggg

SEQ ID NO: 91125 - DNA, 25 bp, Canis familiaris
ccaacatagggaggctcactcagtt

SEQ ID NO: 91126 - DNA, 25 bp, Canis familiaris
ccaaccaggggcgcaacctgatggc

SEQ ID NO: 91127 - DNA, 25 bp, Canis familiaris
ccaaagagaaggcccaccgctatgg

SEQ ID NO: 91128 - DNA, 25 bp, Canis familiaris
ccaaatggggacccaggccatcacg

SEQ ID NO: 91129 - DNA, 25 bp, Canis familiaris
ccaagggggacacaagcaatcacaa

SEQ ID NO: 91130 - DNA, 25 bp, Canis familiaris
gccaactgggttggaaggaacaaga

SEQ ID NO: 91131 - DNA, 25 bp, Canis familiaris
ccaacccggtcctggacagcataag

SEQ ID NO: 91132 - DNA, 25 bp, Canis familiaris
ccaagcccgtgagcaggtgatcagc

SEQ ID NO: 91133 - DNA, 25 bp, Canis familiaris
gccaagtccagttctatgggctcgg

SEQ ID NO: 91134 - DNA, 25 bp, Canis familiaris
ccaactacaatctcgggctctggac

SEQ ID NO: 91135 - DNA, 25 bp, Canis familiaris
ccaactattttgaggatgttgagat

SEQ ID NO: 91136 - DNA, 25 bp, Canis familiaris
ccaagtattctcagatatgatttca

SEQ ID NO: 91137 - DNA, 25 bp, Canis familiaris
ccaaccatcccaacacagatttcat

SEQ ID NO: 91138 - DNA, 25 bp, Canis familiaris
ccaacctgcctgtcaacagtctaga

SEQ ID NO: 91139 - DNA, 25 bp, Canis familiaris
ccaacgtgccgctacaaatctctgg

SEQ ID NO: 91140 - DNA, 25 bp, Canis familiaris
ccaaactcgcactttgcaatctctg

SEQ ID NO: 91141 - DNA, 25 bp, Canis familiaris
ccaaactcgcactttgcaatctctg

SEQ ID NO: 91142 - DNA, 25 bp, Canis familiaris
ccaaatctggtccatctgttcctgt

SEQ ID NO: 91143 - DNA, 25 bp, Canis familiaris
ccaacctgttcactcgataccgtga

SEQ ID NO: 91144 - DNA, 25 bp, Canis familiaris
ccaacggtgtttctcactctgaaat

SEQ ID NO: 91145 - DNA, 25 bp, Canis familiaris
ccaactggcgtaacgctcactcgaa

SEQ ID NO: 91146 - DNA, 25 bp, Canis familiaris
ccaacacctgtgaactgtctttgaa

SEQ ID NO: 91147 - DNA, 25 bp, Canis familiaris
ccacacacctgtctcgtttgtgatg

SEQ ID NO: 91148 - DNA, 25 bp, Canis familiaris
ccacaacctccagctgtgtgttggc

SEQ ID NO: 91149 - DNA, 25 bp, Canis familiaris
ccacaacccctctaggagcagtggc

SEQ ID NO: 91150 - DNA, 25 bp, Canis familiaris
ccaaatccccatggactgatgaatg

SEQ ID NO: 91151 - DNA, 25 bp, Canis familiaris
ccacaacctgaggccctgatgaagg

SEQ ID NO: 91152 - DNA, 25 bp, Canis familiaris
ccacaactcttgaacaccagaagac

SEQ ID NO: 91153 - DNA, 25 bp, Canis familiaris
ccaaacatcctgactaccagacacc

SEQ ID NO: 91154 - DNA, 25 bp, Canis familiaris
ccaacctcttccattaggaccttgt

SEQ ID NO: 91155 - DNA, 25 bp, Canis familiaris
ccaaccttacgcgttagagagacag

SEQ ID NO: 91156 - DNA, 25 bp, Canis familiaris
ccaaccacgactcccaagaggatag

SEQ ID NO: 91157 - DNA, 25 bp, Canis familiaris
ccaactctccacccaaaatggaaat

SEQ ID NO: 91158 - DNA, 25 bp, Canis familiaris
ccaacacccagacaatacactcaaa

SEQ ID NO: 91159 - DNA, 25 bp, Canis familiaris
ccacaagacctacgaagtgcccaac

SEQ ID NO: 91160 - DNA, 25 bp, Canis familiaris
ccaagatgagcagagccctggccga

SEQ ID NO: 91161 - DNA, 25 bp, Canis familiaris
ccaataagcacttggccatccggct

SEQ ID NO: 91162 - DNA, 25 bp, Canis familiaris
ccaaccagatgtttgtccctgtgct

SEQ ID NO: 91163 - DNA, 25 bp, Canis familiaris
ccaatcgcaagtccgtcaatgtgtg

SEQ ID NO: 91164 - DNA, 25 bp, Canis familiaris
ccaacgcacgtgttcataatttgca

SEQ ID NO: 91165 - DNA, 25 bp, Canis familiaris
ccaaccacgtatccataggtggcta

SEQ ID NO: 91166 - DNA, 25 bp, Canis familiaris
ccaacccagtcatagcattttgcta

SEQ ID NO: 91167 - DNA, 25 bp, Canis familiaris
ccaacctgcagactccatgttttgt

SEQ ID NO: 91168 - DNA, 25 bp, Canis familiaris
ccaaccatccagacgttcattctgt

SEQ ID NO: 91169 - DNA, 25 bp, Canis familiaris
ccaatccccgaggttcatgttgtgg

SEQ ID NO: 91170 - DNA, 25 bp, Canis familiaris
gccaacccccaggtatttctggact

SEQ ID NO: 91171 - DNA, 25 bp, Canis familiaris
ccaaccccactcgttggtctgagac

SEQ ID NO: 91172 - DNA, 25 bp, Canis familiaris
ccaactgccaatcatgttggactga

SEQ ID NO: 91173 - DNA, 25 bp, Canis familiaris
gccaactgccaatcatgttggactg

SEQ ID NO: 91174 - DNA, 25 bp, Canis familiaris
ccaactgacagatgatcataaacgg

SEQ ID NO: 91175 - DNA, 25 bp, Canis familiaris
ccaactgggacgacatggagaagat

SEQ ID NO: 91176 - DNA, 25 bp, Canis familiaris
ccaactgggacgacaccgagacgag

SEQ ID NO: 91177 - DNA, 25 bp, Canis familiaris
ccaactcaatacccaccaggacggg

SEQ ID NO: 91178 - DNA, 25 bp, Canis familiaris
ccaacttaatgcccacacaggtcta

SEQ ID NO: 91179 - DNA, 25 bp, Canis familiaris
ccaaaatgtggctcccatggtcaaa

SEQ ID NO: 91180 - DNA, 25 bp, Canis familiaris
ccaaattgtcaatctctgctagtaa

SEQ ID NO: 91181 - DNA, 25 bp, Canis familiaris
ccaaatctgctcaaattgcgggtca

SEQ ID NO: 91182 - DNA, 25 bp, Canis familiaris
gccaatcctccaacagtcagggtag

SEQ ID NO: 91183 - DNA, 25 bp, Canis familiaris
ccaatcgccggccctagggatatgg

SEQ ID NO: 91184 - DNA, 25 bp, Canis familiaris
ccaacctcaggcagctgatggccta

SEQ ID NO: 91185 - DNA, 25 bp, Canis familiaris
gccaacccaggttgttcatggtcaa

SEQ ID NO: 91186 - DNA, 25 bp, Canis familiaris
gccaacccgccatctggcggtaagg

SEQ ID NO: 91187 - DNA, 25 bp, Canis familiaris
ccaacccgccattgggcggagctgg

SEQ ID NO: 91188 - DNA, 25 bp, Canis familiaris
ccaacccagtcaaggtcggctgtga

SEQ ID NO: 91189 - DNA, 25 bp, Canis familiaris
ccaaccgcagcctgcgggagctgga

SEQ ID NO: 91190 - DNA, 25 bp, Canis familiaris
gccaaccagcgcaagggagagagta

SEQ ID NO: 91191 - DNA, 25 bp, Canis familiaris
ccaaccagatgctgggcgatctcat

SEQ ID NO: 91192 - DNA, 25 bp, Canis familiaris
ccaacatggtgttcaggcgtttcgt

SEQ ID NO: 91193 - DNA, 25 bp, Canis familiaris
ccaaatagcttgtgccttgccttgg

SEQ ID NO: 91194 - DNA, 25 bp, Canis familiaris
gccaaaggcttgtgagttcctggtt

SEQ ID NO: 91195 - DNA, 25 bp, Canis familiaris
gccagacggtactgttagccagggt

SEQ ID NO: 91196 - DNA, 25 bp, Canis familiaris
gccccaaggactttggagccggtgt

SEQ ID NO: 91197 - DNA, 25 bp, Canis familiaris
gccacggagggttctacacaaggtt

SEQ ID NO: 91198 - DNA, 25 bp, Canis familiaris
gccaccgaggaagctccaaaggtat

SEQ ID NO: 91199 - DNA, 25 bp, Canis familiaris
gccagccgggtatccggaaggcttt

SEQ ID NO: 91200 - DNA, 25 bp, Canis familiaris
gcgcaaaggttgatccagaaaagcc

SEQ ID NO: 91201 - DNA, 25 bp, Canis familiaris
gccaaagtttgcacaagggatagcc

SEQ ID NO: 91202 - DNA, 25 bp, Canis familiaris
ccaaagatggtgcacgagggcccct

SEQ ID NO: 91203 - DNA, 25 bp, Canis familiaris
ccaagagcgggacgctggggacgcg

SEQ ID NO: 91204 - DNA, 25 bp, Canis familiaris
ccaagacggagaccagccaggtggc

SEQ ID NO: 91205 - DNA, 25 bp, Canis familiaris
ccaacaccgaaggtccaggacctgg

SEQ ID NO: 91206 - DNA, 25 bp, Canis familiaris
ccaacctcgaatatacagaaatccg

SEQ ID NO: 91207 - DNA, 25 bp, Canis familiaris
ccaacccttatttcattacaatcct

SEQ ID NO: 91208 - DNA, 25 bp, Canis familiaris
ccaactctaccattacatctcaaat

SEQ ID NO: 91209 - DNA, 25 bp, Canis familiaris
ccaacttccatcgtgaatctttata

SEQ ID NO: 91210 - DNA, 25 bp, Canis familiaris
ccaactctccaggatgctcacattt

SEQ ID NO: 91211 - DNA, 25 bp, Canis familiaris
ccaacatctccggggacaagctggt

SEQ ID NO: 91212 - DNA, 25 bp, Canis familiaris
ccaacaccacgggagatgcgagggc

SEQ ID NO: 91213 - DNA, 25 bp, Canis familiaris
ccaacctgggccgagtgcagggagg

SEQ ID NO: 91214 - DNA, 25 bp, Canis familiaris
ccaacgtggcctcgcacatgaggca

SEQ ID NO: 91215 - DNA, 25 bp, Canis familiaris
ccaacgtgtcagggcagcacagctg

SEQ ID NO: 91216 - DNA, 25 bp, Canis familiaris
ccaacgattctcgtcatgaccgaaa

SEQ ID NO: 91217 - DNA, 25 bp, Canis familiaris
ccaagccataccgctgacaggataa

SEQ ID NO: 91218 - DNA, 25 bp, Canis familiaris
ccaactccacctggatacatgggcc

SEQ ID NO: 91219 - DNA, 25 bp, Canis familiaris
ccaaatacttcgtgagcagtggctc

SEQ ID NO: 91220 - DNA, 25 bp, Canis familiaris
ccaaatggttcgtacagcagcggaa

SEQ ID NO: 91221 - DNA, 25 bp, Canis familiaris
gccaaatggcctgattcacacggcg

SEQ ID NO: 91222 - DNA, 25 bp, Canis familiaris
ccaaggctggctgacacaccaggca

SEQ ID NO: 91223 - DNA, 25 bp, Canis familiaris
gccaaggtcgtgtgccacaaggatg

SEQ ID NO: 91224 - DNA, 25 bp, Canis familiaris
gccaaggttgaagcgaaggaagagt

SEQ ID NO: 91225 - DNA, 25 bp, Canis familiaris
ccaaggaagcaaaaaaggctaagca

SEQ ID NO: 91226 - DNA, 25 bp, Canis familiaris
ccaaggacatgactctggaaggcga

SEQ ID NO: 91227 - DNA, 25 bp, Canis familiaris
ccaagcttctggcctacaagaggaa

SEQ ID NO: 91228 - DNA, 25 bp, Canis familiaris
ccaagttcttggaatctggggattc

SEQ ID NO: 91229 - DNA, 25 bp, Canis familiaris
gccaggggttgggattgtgactttc

SEQ ID NO: 91230 - DNA, 25 bp, Canis familiaris
gccaaggggaggcgttgaagcttcc

SEQ ID NO: 91231 - DNA, 25 bp, Canis familiaris
ccaagagtggggccgtctgtgactc

SEQ ID NO: 91232 - DNA, 25 bp, Canis familiaris
ccaagcatttgggaggctcttactt

SEQ ID NO: 91233 - DNA, 25 bp, Canis familiaris
ccaagctttttattctcttcactaa

SEQ ID NO: 91234 - DNA, 25 bp, Canis familiaris
ccaagttaatggtctatttcttatt

SEQ ID NO: 91235 - DNA, 25 bp, Canis familiaris
ccaagttccagggctgtcagccttt

SEQ ID NO: 91236 - DNA, 25 bp, Canis familiaris
gccacagggtcaagctttcccctgt

SEQ ID NO: 91237 - DNA, 25 bp, Canis familiaris
ccaagggatgaaatttccacattta

SEQ ID NO: 91238 - DNA, 25 bp, Canis familiaris
ccaagtggtgttacatgtccatttc

SEQ ID NO: 91239 - DNA, 25 bp, Canis familiaris
ccaattattttcttgtccttcttct

SEQ ID NO: 91240 - DNA, 25 bp, Canis familiaris
ccaacttgtttcttatagctctccc

SEQ ID NO: 91241 - DNA, 25 bp, Canis familiaris
ccaacttgggccgtcaaatcccagg

SEQ ID NO: 91242 - DNA, 25 bp, Canis familiaris
ccaactggggccgatgcagagtccc

SEQ ID NO: 91243 - DNA, 25 bp, Canis familiaris
ccaaagtgggctcacatggtcccct

SEQ ID NO: 91244 - DNA, 25 bp, Canis familiaris
ccaagagttggagttcttcccagcc

SEQ ID NO: 91245 - DNA, 25 bp, Canis familiaris
ccaagaagattcttctcttcctccg

SEQ ID NO: 91246 - DNA, 25 bp, Canis familiaris
gccaaaaatggctcttcacggtcgc

SEQ ID NO: 91247 - DNA, 25 bp, Canis familiaris
gccaaaagtccaccaaaggttctgc

SEQ ID NO: 91248 - DNA, 25 bp, Canis familiaris
gcttaaagctcccctagggactcac

SEQ ID NO: 91249 - DNA, 25 bp, Canis familiaris
gcttttacatccccaagggacgttg

SEQ ID NO: 91250 - DNA, 25 bp, Canis familiaris
gccagttcaccagggaagggacggg

SEQ ID NO: 91251 - DNA, 25 bp, Canis familiaris
gccacccagcagcgggaggaagggg

SEQ ID NO: 91252 - DNA, 25 bp, Canis familiaris
gctcaacaaggccggtgggaaccgg

SEQ ID NO: 91253 - DNA, 25 bp, Canis familiaris
ccaaagagccagcggggacggcggg

SEQ ID NO: 91254 - DNA, 25 bp, Canis familiaris
gccaaaacccggagggctggaggca

SEQ ID NO: 91255 - DNA, 25 bp, Canis familiaris
gccaagaagacccaaaggacggaga

SEQ ID NO: 91256 - DNA, 25 bp, Canis familiaris
gccaactggtcaacaacggccggaa

SEQ ID NO: 91257 - DNA, 25 bp, Canis familiaris
ccaactcctcaccagaaggacgcta

SEQ ID NO: 91258 - DNA, 25 bp, Canis familiaris
ccaagtattctccagacaggcagcc

SEQ ID NO: 91259 - DNA, 25 bp, Canis familiaris
gccaagtacctctgagatgcagctg

SEQ ID NO: 91260 - DNA, 25 bp, Canis familiaris
gccaaggacccaagatatgcgagat

SEQ ID NO: 91261 - DNA, 25 bp, Canis familiaris
gccaacagcattgccaacctgagac

SEQ ID NO: 91262 - DNA, 25 bp, Canis familiaris
gccaatcacatcttcccaagtatgg

SEQ ID NO: 91263 - DNA, 25 bp, Canis familiaris
gccaatcctggacccaaggtcaggg

SEQ ID NO: 91264 - DNA, 25 bp, Canis familiaris
gccaatccgaataaacgtctcaagg

SEQ ID NO: 91265 - DNA, 25 bp, Canis familiaris
gccaacggagtcatgacgtccattc

SEQ ID NO: 91266 - DNA, 25 bp, Canis familiaris
ccaagcctgggccatagcttacatt

SEQ ID NO: 91267 - DNA, 25 bp, Canis familiaris
ccaactgctgctgctattgcttatg

SEQ ID NO: 91268 - DNA, 25 bp, Canis familiaris
ccaatgtctgctcttcatctaaaat

SEQ ID NO: 91269 - DNA, 25 bp, Canis familiaris
ccaagctgctgtcatttccaaattt

SEQ ID NO: 91270 - DNA, 25 bp, Canis familiaris
ccaaggttctgtgtccaaagccatc

SEQ ID NO: 91271 - DNA, 25 bp, Canis familiaris
tccgggtccttgctcggagagtacg

SEQ ID NO: 91272 - DNA, 25 bp, Canis familiaris
gcctgcaggtaccggtccggaattc

SEQ ID NO: 91273 - DNA, 25 bp, Canis familiaris
gcctcaaatacggtgctcctgaaga

SEQ ID NO: 91274 - DNA, 25 bp, Canis familiaris
gcccataggaccttttctagaggaa

SEQ ID NO: 91275 - DNA, 25 bp, Canis familiaris
gcctctgggcttcattcccagatct

SEQ ID NO: 91276 - DNA, 25 bp, Canis familiaris
gccttggagtgattcttccgaaccc

SEQ ID NO: 91277 - DNA, 25 bp, Canis familiaris
gcctttttgttctatttggatcctc

SEQ ID NO: 91278 - DNA, 25 bp, Canis familiaris
gccttgttttcttttggatagccct

SEQ ID NO: 91279 - DNA, 25 bp, Canis familiaris
gccatttttttaattggatctcggg

SEQ ID NO: 91280 - DNA, 25 bp, Canis familiaris
gccaattttattttcgtcacttctt

SEQ ID NO: 91281 - DNA, 25 bp, Canis familiaris
ccaaggaaggtgttgcgcaacttct

SEQ ID NO: 91282 - DNA, 25 bp, Canis familiaris
ccaaggtcagggattgaactcagta

SEQ ID NO: 91283 - DNA, 25 bp, Canis familiaris
ccaagactgcaacttttaacttgcc

SEQ ID NO: 91284 - DNA, 25 bp, Canis familiaris
gccacggacaagggtaaacttgccg

SEQ ID NO: 91285 - DNA, 25 bp, Canis familiaris
gccaaggcccagtttaaatgccgcc

SEQ ID NO: 91286 - DNA, 25 bp, Canis familiaris
ccaaggccaaggctcgactcaggcc

SEQ ID NO: 91287 - DNA, 25 bp, Canis familiaris
ccaacccacaggctgctactgaggg

SEQ ID NO: 91288 - DNA, 25 bp, Canis familiaris
gccaccaccaccagttactgggtgc

SEQ ID NO: 91289 - DNA, 25 bp, Canis familiaris
gccaccaacaccgggaagcttggca

SEQ ID NO: 91290 - DNA, 25 bp, Canis familiaris
gccaatcaacatgctggtgaaggtg

SEQ ID NO: 91291 - DNA, 25 bp, Canis familiaris
gccaacgctgcaacggagaacgctt

SEQ ID NO: 91292 - DNA, 25 bp, Canis familiaris
ccaactgctacaagtacaaccctcc

SEQ ID NO: 91293 - DNA, 25 bp, Canis familiaris
ccaatactgacaactgcaagaccca

SEQ ID NO: 91294 - DNA, 25 bp, Canis familiaris
ccaatcacgccaagtgcatcgtcgc

SEQ ID NO: 91295 - DNA, 25 bp, Canis familiaris
ccaagcaagccaatgagcagccctg

SEQ ID NO: 91296 - DNA, 25 bp, Canis familiaris
ccaactcagccatctgcactaagtc

SEQ ID NO: 91297 - DNA, 25 bp, Canis familiaris
gccaactaggcatcaactcaggtct

SEQ ID NO: 91298 - DNA, 25 bp, Canis familiaris
ccaatgtgggcaacaatccagagtc

SEQ ID NO: 91299 - DNA, 25 bp, Canis familiaris
gccaagtctgatcagcagatccaga

SEQ ID NO: 91300 - DNA, 25 bp, Canis familiaris
gccaattctgtgacgctgttcattg

SEQ ID NO: 91301 - DNA, 25 bp, Canis familiaris
gccatttggatgagctgtcgttaga

SEQ ID NO: 91302 - DNA, 25 bp, Canis familiaris
gccaggtgggcactgagcttattaa

SEQ ID NO: 91303 - DNA, 25 bp, Canis familiaris
gccatggaggagagacttctgaaat

SEQ ID NO: 91304 - DNA, 25 bp, Canis familiaris
gccataaagagcagacccttccaaa

SEQ ID NO: 91305 - DNA, 25 bp, Canis familiaris
ccaaaagcagccaaccatctttcaa

SEQ ID NO: 91306 - DNA, 25 bp, Canis familiaris
ccaaaagagctcatctctggtgatt

SEQ ID NO: 91307 - DNA, 25 bp, Canis familiaris
ccaacagatgagtcctttgcctgcc

SEQ ID NO: 91308 - DNA, 25 bp, Canis familiaris
ccaacagcagcatcgtcattggccc

SEQ ID NO: 91309 - DNA, 25 bp, Canis familiaris
ccaacaggcaacagagctgcgccgc

SEQ ID NO: 91310 - DNA, 25 bp, Canis familiaris
gccacgtgtaacgaacatgcctcgc

SEQ ID NO: 91311 - DNA, 25 bp, Canis familiaris
gccagcctcatatttaattgccagg

SEQ ID NO: 91312 - DNA, 25 bp, Canis familiaris
gccagccctgaataagaccaagacc

SEQ ID NO: 91313 - DNA, 25 bp, Canis familiaris
gccaagttgaagtaagtccatcaga

SEQ ID NO: 91314 - DNA, 25 bp, Canis familiaris
gccaattgtgaatcaaactatccca

SEQ ID NO: 91315 - DNA, 25 bp, Canis familiaris
gccaacgccaacaaaaatgactcca

SEQ ID NO: 91316 - DNA, 25 bp, Canis familiaris
ccaagctcccaataaagactgtccc

SEQ ID NO: 91317 - DNA, 25 bp, Canis familiaris
gccagaccccattaaaagtttcgtg

SEQ ID NO: 91318 - DNA, 25 bp, Canis familiaris
gccaggactcccagaaagtttcaat

SEQ ID NO: 91319 - DNA, 25 bp, Canis familiaris
gccaggcttcccataaaattcattt

SEQ ID NO: 91320 - DNA, 25 bp, Canis familiaris
gccatcttgtggcttaaagttcttt

SEQ ID NO: 91321 - DNA, 25 bp, Canis familiaris
gccattgtggggtccgaacgatctt

SEQ ID NO: 91322 - DNA, 25 bp, Canis familiaris
gccacttgggagaccaacactctag

SEQ ID NO: 91323 - DNA, 25 bp, Canis familiaris
gccaagtacaagctcaacgtcgacc

SEQ ID NO: 91324 - DNA, 25 bp, Canis familiaris
ccaatggacgagctcgatcccagga

SEQ ID NO: 91325 - DNA, 25 bp, Canis familiaris
ccaagcccagaggtggtccgcaaga

SEQ ID NO: 91326 - DNA, 25 bp, Canis familiaris
ccaagcgcgggccagagagatcgga

SEQ ID NO: 91327 - DNA, 25 bp, Canis familiaris
ccaaggcggctccagcagaggaaga

SEQ ID NO: 91328 - DNA, 25 bp, Canis familiaris
ccaaggactctgcagcgaggatgaa

SEQ ID NO: 91329 - DNA, 25 bp, Canis familiaris
gccaggagcactagaaagggagggg

SEQ ID NO: 91330 - DNA, 25 bp, Canis familiaris
gccacaagttcataagaatatggga

SEQ ID NO: 91331 - DNA, 25 bp, Canis familiaris
gctataccaacatcagaaaaagtag

SEQ ID NO: 91332 - DNA, 25 bp, Canis familiaris
gctggccaaccctgagaaccagttc

SEQ ID NO: 91333 - DNA, 25 bp, Canis familiaris
gccgtcacaaccggatttgccagtt

SEQ ID NO: 91334 - DNA, 25 bp, Canis familiaris
gcccatatcgacccaattttgactt

SEQ ID NO: 91335 - DNA, 25 bp, Canis familiaris
gcaaaacgtcgccaatttttcaaca

SEQ ID NO: 91336 - DNA, 25 bp, Canis familiaris
gccaaacggtcacaagtatgccaaa

SEQ ID NO: 91337 - DNA, 25 bp, Canis familiaris
gccaaattttgaccaagatatcact

SEQ ID NO: 91338 - DNA, 25 bp, Canis familiaris
gccaaattttgcatgactactacca

SEQ ID NO: 91339 - DNA, 25 bp, Canis familiaris
gccaaagacctgagactaccacaga

SEQ ID NO: 91340 - DNA, 25 bp, Canis familiaris
gccaacaaggccatatctcagtaag

SEQ ID NO: 91341 - DNA, 25 bp, Canis familiaris
gccaagaaggctgctgtcgttttac

SEQ ID NO: 91342 - DNA, 25 bp, Canis familiaris
gccacagaagttgctgccgatgctc

SEQ ID NO: 91343 - DNA, 25 bp, Canis familiaris
ccaagtgtggctacatctagagtgc

SEQ ID NO: 91344 - DNA, 25 bp, Canis familiaris
ccaatttggctggcacgctgagtgg

SEQ ID NO: 91345 - DNA, 25 bp, Canis familiaris
ccaatgccggtggacgtggtgttgt

SEQ ID NO: 91346 - DNA, 25 bp, Canis familiaris
ccaaggcggggaggggtgctgttgg

SEQ ID NO: 91347 - DNA, 25 bp, Canis familiaris
ccaaggagggagtcgtggctgctgc

SEQ ID NO: 91348 - DNA, 25 bp, Canis familiaris
ccaagtgacggggcttgtcatgccc

SEQ ID NO: 91349 - DNA, 25 bp, Canis familiaris
ccaactgactgaggagcagattgca

SEQ ID NO: 91350 - DNA, 25 bp, Canis familiaris
ccaaggcactgatgagcagcttctc

SEQ ID NO: 91351 - DNA, 25 bp, Canis familiaris
ccaaggagctggctgacttcatccg

SEQ ID NO: 91352 - DNA, 25 bp, Canis familiaris
ccaagggttttgccttcatcagctt

SEQ ID NO: 91353 - DNA, 25 bp, Canis familiaris
tccacagacagaggttcctaaccgt

SEQ ID NO: 91354 - DNA, 25 bp, Canis familiaris
ccaagctagggttcactccaacagc

SEQ ID NO: 91355 - DNA, 25 bp, Canis familiaris
ccaaccacaggatcagccacaaact

SEQ ID NO: 91356 - DNA, 25 bp, Canis familiaris
ccaaccctgtattcgtcacaaatcc

SEQ ID NO: 91357 - DNA, 25 bp, Canis familiaris
ccaactgccaattacgagacgaatc

SEQ ID NO: 91358 - DNA, 25 bp, Canis familiaris
gccgactcctactacgacaggaagc

SEQ ID NO: 91359 - DNA, 25 bp, Canis familiaris
gcctttcaccattccagaagtaagc

SEQ ID NO: 91360 - DNA, 25 bp, Canis familiaris
gccttttccaattccaattaaacag

SEQ ID NO: 91361 - DNA, 25 bp, Canis familiaris
gccttgtccaaattaattggaaaag

SEQ ID NO: 91362 - DNA, 25 bp, Canis familiaris
ccaagtgccaattctcactctggag

SEQ ID NO: 91363 - DNA, 25 bp, Canis familiaris
gccaagtcctgttcacgcttggatg

SEQ ID NO: 91364 - DNA, 25 bp, Canis familiaris
gccaagcatcctcaactgggtgttc

SEQ ID NO: 91365 - DNA, 25 bp, Canis familiaris
gccactcaccgggcacggaagtatc

SEQ ID NO: 91366 - DNA, 25 bp, Canis familiaris
gcgagcaaaccagtacggctggtat

SEQ ID NO: 91367 - DNA, 25 bp, Canis familiaris
gccaggaactgagtcctgtcggcct

SEQ ID NO: 91368 - DNA, 25 bp, Canis familiaris
gccacgtgactaacctggtggcttt

SEQ ID NO: 91369 - DNA, 25 bp, Canis familiaris
gccactggccaaaaccgttcagtca

SEQ ID NO: 91370 - DNA, 25 bp, Canis familiaris
ccaatacagcaagacctctccagat

SEQ ID NO: 91371 - DNA, 25 bp, Canis familiaris
ccaattccaacgtgttctctatgtt

SEQ ID NO: 91372 - DNA, 25 bp, Canis familiaris
gccatttaagaggcacagttttaac

SEQ ID NO: 91373 - DNA, 25 bp, Canis familiaris
gccaatttagaagcaactgtatata

SEQ ID NO: 91374 - DNA, 25 bp, Canis familiaris
gccaatttgaaaaccatttatgatg

SEQ ID NO: 91375 - DNA, 25 bp, Canis familiaris
gccaatttcatctaccgttttattt

SEQ ID NO: 91376 - DNA, 25 bp, Canis familiaris
gccaacttctcagttacttttttga

SEQ ID NO: 91377 - DNA, 25 bp, Canis familiaris
gccaagattcacgttaccaattaag

SEQ ID NO: 91378 - DNA, 25 bp, Canis familiaris
ccaatgatctccaatttcaaatgtt

SEQ ID NO: 91379 - DNA, 25 bp, Canis familiaris
ccaactctccaatttccgacggaat

SEQ ID NO: 91380 - DNA, 25 bp, Canis familiaris
ccaactccaccattgtagcgacgga

SEQ ID NO: 91381 - DNA, 25 bp, Canis familiaris
gcctagctccatggaagtcacgggg

SEQ ID NO: 91382 - DNA, 25 bp, Canis familiaris
gccattggccatgatttcagggagc

SEQ ID NO: 91383 - DNA, 25 bp, Canis familiaris
gccacaagcactgttccagagggaa

SEQ ID NO: 91384 - DNA, 25 bp, Canis familiaris
ccaagagactcccctcagaagatga

SEQ ID NO: 91385 - DNA, 25 bp, Canis familiaris
ccaatatgattccacccatggcaaa

SEQ ID NO: 91386 - DNA, 25 bp, Canis familiaris
ccaatatgattccacccatggcaaa

SEQ ID NO: 91387 - DNA, 25 bp, Canis familiaris
ccaatctgttccaacccagtcatag

SEQ ID NO: 91388 - DNA, 25 bp, Canis familiaris
ccaatgtactaccacgcaagaataa

SEQ ID NO: 91389 - DNA, 25 bp, Canis familiaris
ccaaggaatgatgcatgctacaaat

SEQ ID NO: 91390 - DNA, 25 bp, Canis familiaris
ccaagagtgtcagctgtacccaagg

SEQ ID NO: 91391 - DNA, 25 bp, Canis familiaris
ccaagaggaaggtcggcccaagctg

SEQ ID NO: 91392 - DNA, 25 bp, Canis familiaris
ccaagcagtcagagtcgatgcccaa

SEQ ID NO: 91393 - DNA, 25 bp, Canis familiaris
gccaagagtattgccagatcctaac

SEQ ID NO: 91394 - DNA, 25 bp, Canis familiaris
gccaagaggtagccctacactgaga

SEQ ID NO: 91395 - DNA, 25 bp, Canis familiaris
gccaagaaaatgaggaccagagata

SEQ ID NO: 91396 - DNA, 25 bp, Canis familiaris
gccaccaacctgaagtggcccagac

SEQ ID NO: 91397 - DNA, 25 bp, Canis familiaris
gccaaaacgtgtggaggcccaagga

SEQ ID NO: 91398 - DNA, 25 bp, Canis familiaris
gccaaagaggttcagatcggcccct

SEQ ID NO: 91399 - DNA, 25 bp, Canis familiaris
gccaagaagggtctgactccctcgc

SEQ ID NO: 91400 - DNA, 25 bp, Canis familiaris
gccaagacaaaggcggtttcccgct

SEQ ID NO: 91401 - DNA, 25 bp, Canis familiaris
gccaaataaaccgtgtgaacagccc

SEQ ID NO: 91402 - DNA, 25 bp, Canis familiaris
gccagaaaaaccattaagccccagt

SEQ ID NO: 91403 - DNA, 25 bp, Canis familiaris
gccttgaaaaagatttggccctggt

SEQ ID NO: 91404 - DNA, 25 bp, Canis familiaris
gccgggtaacagctatttgtcctag

SEQ ID NO: 91405 - DNA, 25 bp, Canis familiaris
ccaacgcgtacacttattttctctc

SEQ ID NO: 91406 - DNA, 25 bp, Canis familiaris
gccaccctgaacgtgtgcatttttc

SEQ ID NO: 91407 - DNA, 25 bp, Canis familiaris
gccagccccagtgggttttactgct

SEQ ID NO: 91408 - DNA, 25 bp, Canis familiaris
gccacttgccacgtggttagcgact

SEQ ID NO: 91409 - DNA, 25 bp, Canis familiaris
ccaaggatcacgcggggcgatcgga

SEQ ID NO: 91410 - DNA, 25 bp, Canis familiaris
ccaaggtgcctgagatggccgtgcc

SEQ ID NO: 91411 - DNA, 25 bp, Canis familiaris
ccaagagtgccgtgatgtgcagccc

SEQ ID NO: 91412 - DNA, 25 bp, Canis familiaris
ccaatggtggcgtgatggcccagca

SEQ ID NO: 91413 - DNA, 25 bp, Canis familiaris
ccaatgtgtccgtcgtggatctgac

SEQ ID NO: 91414 - DNA, 25 bp, Canis familiaris
ccaagtgaccaggcttgcactcgag

SEQ ID NO: 91415 - DNA, 25 bp, Canis familiaris
gcgcaagtactctgtgtggatcggt

SEQ ID NO: 91416 - DNA, 25 bp, Canis familiaris
gccacggagtcgatgggctctggct

SEQ ID NO: 91417 - DNA, 25 bp, Canis familiaris
gccaaggagtggacgcttctcttgt

SEQ ID NO: 91418 - DNA, 25 bp, Canis familiaris
ccaagaagaagctgctgctcttctc

SEQ ID NO: 91419 - DNA, 25 bp, Canis familiaris
ccaatggagattctggtcgccctgg

SEQ ID NO: 91420 - DNA, 25 bp, Canis familiaris
ccaagagacatcatctgggcccatc

SEQ ID NO: 91421 - DNA, 25 bp, Canis familiaris
ccaagagacatcatctgggcccatt

SEQ ID NO: 91422 - DNA, 25 bp, Canis familiaris
ccaagtgacactactggctaccttc

SEQ ID NO: 91423 - DNA, 25 bp, Canis familiaris
ccaagtgacagcaatgctgtttcac

SEQ ID NO: 91424 - DNA, 25 bp, Canis familiaris
ccaagtgacaagccagtagctcatg

SEQ ID NO: 91425 - DNA, 25 bp, Canis familiaris
gccacacagatcaagacctactcat

SEQ ID NO: 91426 - DNA, 25 bp, Canis familiaris
gccacatgagaaactcctaagatct

SEQ ID NO: 91427 - DNA, 25 bp, Canis familiaris
gccactaactatctctgatagctct

SEQ ID NO: 91428 - DNA, 25 bp, Canis familiaris
gccagaaaacatcatgctgctagac

SEQ ID NO: 91429 - DNA, 25 bp, Canis familiaris
gccacctgaacgttgcattgttctc

SEQ ID NO: 91430 - DNA, 25 bp, Canis familiaris
ccaagtgaaatgtgtctgctcctcc

SEQ ID NO: 91431 - DNA, 25 bp, Canis familiaris
gccacaggaagtttattctcagctc

SEQ ID NO: 91432 - DNA, 25 bp, Canis familiaris
gccaagttcccagtgacttcagtat

SEQ ID NO: 91433 - DNA, 25 bp, Canis familiaris
gccaatttccaaggcacgatggctt

SEQ ID NO: 91434 - DNA, 25 bp, Canis familiaris
gccaattgtcctggtccaaggtgta

SEQ ID NO: 91435 - DNA, 25 bp, Canis familiaris
ccaatctccacctccaagaagtagt

SEQ ID NO: 91436 - DNA, 25 bp, Canis familiaris
ccaatctccacctccaagaagtagt

SEQ ID NO: 91437 - DNA, 25 bp, Canis familiaris
ccaatctccacctccaagaagtagt

SEQ ID NO: 91438 - DNA, 25 bp, Canis familiaris
ccaatctcaccggacacaagcgaag

SEQ ID NO: 91439 - DNA, 25 bp, Canis familiaris
ccaatgtgccctctacaatggccac

SEQ ID NO: 91440 - DNA, 25 bp, Canis familiaris
ccaatgtgccctctacaatggccac

SEQ ID NO: 91441 - DNA, 25 bp, Canis familiaris
ccaaggtgcctgccaatttgtacac

SEQ ID NO: 91442 - DNA, 25 bp, Canis familiaris
gccacagggtcttaattattacagc

SEQ ID NO: 91443 - DNA, 25 bp, Canis familiaris
gccactagcgtttattcttaaccac

SEQ ID NO: 91444 - DNA, 25 bp, Canis familiaris
gccgcggctgtgatttttaaacaat

SEQ ID NO: 91445 - DNA, 25 bp, Canis familiaris
gccgttttgtctgttcgtgtacaat

SEQ ID NO: 91446 - DNA, 25 bp, Canis familiaris
gccgtaccaattgctctgggtaaca

SEQ ID NO: 91447 - DNA, 25 bp, Canis familiaris
gccggactattttccatgcatggat

SEQ ID NO: 91448 - DNA, 25 bp, Canis familiaris
gcacggaccaggtactacaagtcca

SEQ ID NO: 91449 - DNA, 25 bp, Canis familiaris
gccggaaagcgtgccaatcaacatg

SEQ ID NO: 91450 - DNA, 25 bp, Canis familiaris
gccaaaaccgttcagtcagcaatgt

SEQ ID NO: 91451 - DNA, 25 bp, Canis familiaris
gccaaatcaccccttgaggaaagta

SEQ ID NO: 91452 - DNA, 25 bp, Canis familiaris
ccaagtcagatccgcttatggataa

SEQ ID NO: 91453 - DNA, 25 bp, Canis familiaris
ccaaccagcatgggctacaacacaa

SEQ ID NO: 91454 - DNA, 25 bp, Canis familiaris
gccaaccaggcggcgccaaataacc

SEQ ID NO: 91455 - DNA, 25 bp, Canis familiaris
gccaagcaaggcggcgccaaattac

SEQ ID NO: 91456 - DNA, 25 bp, Canis familiaris
gccaagaagggggcccaagcgacgc

SEQ ID NO: 91457 - DNA, 25 bp, Canis familiaris
gccaaggagggagtccaaagccagg

SEQ ID NO: 91458 - DNA, 25 bp, Canis familiaris
ccaagagggctgggtccaaccaggg

SEQ ID NO: 91459 - DNA, 25 bp, Canis familiaris
gccaaaggcggaagttcaaccactg

SEQ ID NO: 91460 - DNA, 25 bp, Canis familiaris
gccaaaggcagtcacttaaccaact

SEQ ID NO: 91461 - DNA, 25 bp, Canis familiaris
gccaatactcagcaacctagcacaa

SEQ ID NO: 91462 - DNA, 25 bp, Canis familiaris
ccaagccataggggatctagccagg

SEQ ID NO: 91463 - DNA, 25 bp, Canis familiaris
gccagaaatgggcagctctcccagg

SEQ ID NO: 91464 - DNA, 25 bp, Canis familiaris
gccagaaaggtccgtttctccgaga

SEQ ID NO: 91465 - DNA, 25 bp, Canis familiaris
gccatggatagggcttgttttccaa

SEQ ID NO: 91466 - DNA, 25 bp, Canis familiaris
gcgagtaacggattctacgtccaca

SEQ ID NO: 91467 - DNA, 25 bp, Canis familiaris
gccagaacacggagctggcgtccac

SEQ ID NO: 91468 - DNA, 25 bp, Canis familiaris
gccagtaacggcaagcttcggacct

SEQ ID NO: 91469 - DNA, 25 bp, Canis familiaris
gccagtttccgcagattctcagaaa

SEQ ID NO: 91470 - DNA, 25 bp, Canis familiaris
gccactttcctgagtctgtcggaaa

SEQ ID NO: 91471 - DNA, 25 bp, Canis familiaris
gcgctttgtccgggggttcaaagag

SEQ ID NO: 91472 - DNA, 25 bp, Canis familiaris
tgtcctaaccggcgttggcaaagat

SEQ ID NO: 91473 - DNA, 25 bp, Canis familiaris
tgtccaaaacccccggtaaatgatg

SEQ ID NO: 91474 - DNA, 25 bp, Canis familiaris
gcccagtaaccctggaccacaagat

SEQ ID NO: 91475 - DNA, 25 bp, Canis familiaris
gccacctacaccggggacaagaagg

SEQ ID NO: 91476 - DNA, 25 bp, Canis familiaris
gccacccaagtctctggtcagaaag

SEQ ID NO: 91477 - DNA, 25 bp, Canis familiaris
gccaacctagttggtcctctatgaa

SEQ ID NO: 91478 - DNA, 25 bp, Canis familiaris
gccaaccacgttgaatcttgtacga

SEQ ID NO: 91479 - DNA, 25 bp, Canis familiaris
ccaaccacgttgacaggctggaccc

SEQ ID NO: 91480 - DNA, 25 bp, Canis familiaris
gccaaacggtctaccctggagtggc

SEQ ID NO: 91481 - DNA, 25 bp, Canis familiaris
gccttccgtgtcttcgacaaggatg

SEQ ID NO: 91482 - DNA, 25 bp, Canis familiaris
gccttccttcatcttggcaggagga

SEQ ID NO: 91483 - DNA, 25 bp, Canis familiaris
gttatgcctaatctggggccgaaac

SEQ ID NO: 91484 - DNA, 25 bp, Canis familiaris
gttgtcctataaaggcaatcccaaa

SEQ ID NO: 91485 - DNA, 25 bp, Canis familiaris
gccttgcccttgtggaaaccaacat

SEQ ID NO: 91486 - DNA, 25 bp, Canis familiaris
gcccccctgctaaaggaactgtaat

SEQ ID NO: 91487 - DNA, 25 bp, Canis familiaris
gccaccaccaaagaggtcctgttac

SEQ ID NO: 91488 - DNA, 25 bp, Canis familiaris
gccaccccaagtacaggatcggcgt

SEQ ID NO: 91489 - DNA, 25 bp, Canis familiaris
gccaacccatcctcaggatgtcggt

SEQ ID NO: 91490 - DNA, 25 bp, Canis familiaris
gccacacccaagtacattatgttag

SEQ ID NO: 91491 - DNA, 25 bp, Canis familiaris
ccaagcaaaagcaatcagtgattct

SEQ ID NO: 91492 - DNA, 25 bp, Canis familiaris
gccaatgaaaggaacagtgaccact

SEQ ID NO: 91493 - DNA, 25 bp, Canis familiaris
gccacatgagaggagaaaggggact

SEQ ID NO: 91494 - DNA, 25 bp, Canis familiaris
gccacacaggctggaaccgtgtcat

SEQ ID NO: 91495 - DNA, 25 bp, Canis familiaris
gccaacgtgcttgcaagctggccat

SEQ ID NO: 91496 - DNA, 25 bp, Canis familiaris
gccaagctgatggttgaactgtcca

SEQ ID NO: 91497 - DNA, 25 bp, Canis familiaris
gccaagcccctggaagtgtacagcg

SEQ ID NO: 91498 - DNA, 25 bp, Canis familiaris
gccacctcccaggtaaaatccaggg

SEQ ID NO: 91499 - DNA, 25 bp, Canis familiaris
gccacgttccagctaataatagaaa

SEQ ID NO: 91500 - DNA, 25 bp, Canis familiaris
gccacagtaccagccaggggaaaac

SEQ ID NO: 91501 - DNA, 25 bp, Canis familiaris
gccacagaccgagaagagaataaac

SEQ ID NO: 91502 - DNA, 25 bp, Canis familiaris
gccccccaaagctcaatgctaaatc

SEQ ID NO: 91503 - DNA, 25 bp, Canis familiaris
gccccactttcagaatcactaattt

SEQ ID NO: 91504 - DNA, 25 bp, Canis familiaris
gcccaacctccaaatatttaccgtg

SEQ ID NO: 91505 - DNA, 25 bp, Canis familiaris
gccaaacctcaaaatatttacagtg

SEQ ID NO: 91506 - DNA, 25 bp, Canis familiaris
gccaaaccataattaccttccaagc

SEQ ID NO: 91507 - DNA, 25 bp, Canis familiaris
gccaacggattataactcgctgaag

SEQ ID NO: 91508 - DNA, 25 bp, Canis familiaris
gccaacctattgtaagccctggact

SEQ ID NO: 91509 - DNA, 25 bp, Canis familiaris
gccaagcgtttcaacaggcgtgccc

SEQ ID NO: 91510 - DNA, 25 bp, Canis familiaris
gccaaggttcattataccgtcccta

SEQ ID NO: 91511 - DNA, 25 bp, Canis familiaris
ccaagtggtgcatgaggcgctgtcc

SEQ ID NO: 91512 - DNA, 25 bp, Canis familiaris
gccaagacttcactgaggcggtcat

SEQ ID NO: 91513 - DNA, 25 bp, Canis familiaris
gccaaagcgtatcaggagttactct

SEQ ID NO: 91514 - DNA, 25 bp, Canis familiaris
gcctaaggctcacaaaatcttttgc

SEQ ID NO: 91515 - DNA, 25 bp, Canis familiaris
ccaatccccggaaagacttgttgca

SEQ ID NO: 91516 - DNA, 25 bp, Canis familiaris
gccaccgtccggaaattcatggttg

SEQ ID NO: 91517 - DNA, 25 bp, Canis familiaris
gccacagccccggaaatgtctgtac

SEQ ID NO: 91518 - DNA, 25 bp, Canis familiaris
gccaaggcccaggtcaggttgaacc

SEQ ID NO: 91519 - DNA, 25 bp, Canis familiaris
ccaagtgccagctctgcatgtttgt

SEQ ID NO: 91520 - DNA, 25 bp, Canis familiaris
ccaagtctgcaccaatgggtctgct

SEQ ID NO: 91521 - DNA, 25 bp, Canis familiaris
ccaagctctacggacgaggctgctg

SEQ ID NO: 91522 - DNA, 25 bp, Canis familiaris
ccaagctgctactgacgaggctgct

SEQ ID NO: 91523 - DNA, 25 bp, Canis familiaris
ccaagccttcaacagaagctgtgct

SEQ ID NO: 91524 - DNA, 25 bp, Canis familiaris
gccaagcccatccaagaaacgttag

SEQ ID NO: 91525 - DNA, 25 bp, Canis familiaris
gccaaggccatgtgagaacacggta

SEQ ID NO: 91526 - DNA, 25 bp, Canis familiaris
gccaaggtgcagcaagaaccaggct

SEQ ID NO: 91527 - DNA, 25 bp, Canis familiaris
gccaagttgtgttaagaccgggata

SEQ ID NO: 91528 - DNA, 25 bp, Canis familiaris
gctaaccgtaatcaaccatgggatc

SEQ ID NO: 91529 - DNA, 25 bp, Canis familiaris
gccacccgtactcatacgacgtggc

SEQ ID NO: 91530 - DNA, 25 bp, Canis familiaris
ggcacccggtatcatttaccggagg

SEQ ID NO: 91531 - DNA, 25 bp, Canis familiaris
gccacaaaggtacatatttcccggg

SEQ ID NO: 91532 - DNA, 25 bp, Canis familiaris
gccacaaaagtacaacctgcagccg

SEQ ID NO: 91533 - DNA, 25 bp, Canis familiaris
gccactaagggacgagggcccacgt

SEQ ID NO: 91534 - DNA, 25 bp, Canis familiaris
gcaccgaaagggcaggtactagcct

SEQ ID NO: 91535 - DNA, 25 bp, Canis familiaris
gccacgggagggtggtagtgcctct

SEQ ID NO: 91536 - DNA, 25 bp, Canis familiaris
ccaaggagggcgtgcgcgaggtctt

SEQ ID NO: 91537 - DNA, 25 bp, Canis familiaris
gccaagaagaggaggccgaaggctt

SEQ ID NO: 91538 - DNA, 25 bp, Canis familiaris
gccaagatagggaagcagcccaagt

SEQ ID NO: 91539 - DNA, 25 bp, Canis familiaris
gccaaatatggggccagccatcggc

SEQ ID NO: 91540 - DNA, 25 bp, Canis familiaris
gccacaattcgggaacaagatgatg

SEQ ID NO: 91541 - DNA, 25 bp, Canis familiaris
gccaacctcctgaaacaactgctgg

SEQ ID NO: 91542 - DNA, 25 bp, Canis familiaris
gccagacgtccgggaacactggccc

SEQ ID NO: 91543 - DNA, 25 bp, Canis familiaris
gccagggtccagttcaagacttacc

SEQ ID NO: 91544 - DNA, 25 bp, Canis familiaris
gccagggtccagggggaattttcag

SEQ ID NO: 91545 - DNA, 25 bp, Canis familiaris
gccagaggtccagcaagtggttatt

SEQ ID NO: 91546 - DNA, 25 bp, Canis familiaris
gccagcagggaagcacgtagaggta

SEQ ID NO: 91547 - DNA, 25 bp, Canis familiaris
gccacagggaagctcctggatccaa

SEQ ID NO: 91548 - DNA, 25 bp, Canis familiaris
ccaagaggacaatcatctgggccaa

SEQ ID NO: 91549 - DNA, 25 bp, Canis familiaris
ccaagagggtcatcatctctgctcc

SEQ ID NO: 91550 - DNA, 25 bp, Canis familiaris
ccaagaggagctcctccatctgttc

SEQ ID NO: 91551 - DNA, 25 bp, Canis familiaris
gccagaaggactcctacgtgggcga

SEQ ID NO: 91552 - DNA, 25 bp, Canis familiaris
ccaagactaggcctgacgtgtggaa

SEQ ID NO: 91553 - DNA, 25 bp, Canis familiaris
gccacgctgaaggggacggaggaca

SEQ ID NO: 91554 - DNA, 25 bp, Canis familiaris
gccaagtggaggggggccaggaggg

SEQ ID NO: 91555 - DNA, 25 bp, Canis familiaris
ccaagtgggggtcgtgagctggggc

SEQ ID NO: 91556 - DNA, 25 bp, Canis familiaris
ccaatgtgggtgctggggtggtggt

SEQ ID NO: 91557 - DNA, 25 bp, Canis familiaris
ccaagggatgtgctggagtgtggcc

SEQ ID NO: 91558 - DNA, 25 bp, Canis familiaris
gccaagtggcggtcgaggagcggcc

SEQ ID NO: 91559 - DNA, 25 bp, Canis familiaris
ccaaggctgtgggcaaggtcatccc

SEQ ID NO: 91560 - DNA, 25 bp, Canis familiaris
ccaaggctgtgggcaaggtcatccc

SEQ ID NO: 91561 - DNA, 25 bp, Canis familiaris
gccaaggctgtgggcaaggtcatcc

SEQ ID NO: 91562 - DNA, 25 bp, Canis familiaris
gccacagatccttccaatggcaacc

SEQ ID NO: 91563 - DNA, 25 bp, Canis familiaris
gccacgatcgcttcgaggtgatcat

SEQ ID NO: 91564 - DNA, 25 bp, Canis familiaris
gccacatgaccttatgactgatgag

SEQ ID NO: 91565 - DNA, 25 bp, Canis familiaris
gccacagagtctacagagcacagag

SEQ ID NO: 91566 - DNA, 25 bp, Canis familiaris
gccacaggttcccaacagtggtatc

SEQ ID NO: 91567 - DNA, 25 bp, Canis familiaris
gccaagggctggcaatctgtagctt

SEQ ID NO: 91568 - DNA, 25 bp, Canis familiaris
gccaagggttgatgcatctaagcct

SEQ ID NO: 91569 - DNA, 25 bp, Canis familiaris
ccaagggtgtgatcccagagtcctg

SEQ ID NO: 91570 - DNA, 25 bp, Canis familiaris
ccaagggctgttccagacaactgcc

SEQ ID NO: 91571 - DNA, 25 bp, Canis familiaris
ccaagaggctgttgccaagctccac

SEQ ID NO: 91572 - DNA, 25 bp, Canis familiaris
gccaaaggttgctgagcagctcaac

SEQ ID NO: 91573 - DNA, 25 bp, Canis familiaris
gccaaaagtagccagaagcacccca

SEQ ID NO: 91574 - DNA, 25 bp, Canis familiaris
gccaaagaaatccctagagctccta

SEQ ID NO: 91575 - DNA, 25 bp, Canis familiaris
gccaaagatacctatctgacccgcc

SEQ ID NO: 91576 - DNA, 25 bp, Canis familiaris
gccagaagtcagacctaacccgtgc

SEQ ID NO: 91577 - DNA, 25 bp, Canis familiaris
gccaatgggagaaccaactctgccc

SEQ ID NO: 91578 - DNA, 25 bp, Canis familiaris
gccaatggcaaaggcctccttggac

SEQ ID NO: 91579 - DNA, 25 bp, Canis familiaris
ccaatgcaaaactcccgtctagcag

SEQ ID NO: 91580 - DNA, 25 bp, Canis familiaris
gccaacaaaatctcatgactgtctc

SEQ ID NO: 91581 - DNA, 25 bp, Canis familiaris
gccaacaggaaccagcagactttgg

SEQ ID NO: 91582 - DNA, 25 bp, Canis familiaris
gccaagcacgaggctcagagacttg

SEQ ID NO: 91583 - DNA, 25 bp, Canis familiaris
gccacacacagagctacagactagt

SEQ ID NO: 91584 - DNA, 25 bp, Canis familiaris
tccatcaccaacctaaactgtcgtg

SEQ ID NO: 91585 - DNA, 25 bp, Canis familiaris
gcctcaacaacgtaaacttcctaat

SEQ ID NO: 91586 - DNA, 25 bp, Canis familiaris
gccaaaaacagataattacacacac

SEQ ID NO: 91587 - DNA, 25 bp, Canis familiaris
gccaaacataaacacgcatacacac

SEQ ID NO: 91588 - DNA, 25 bp, Canis familiaris
gccaagaagaagcccacgtgttgcc

SEQ ID NO: 91589 - DNA, 25 bp, Canis familiaris
gccaccagaatcaccacaggttgaa

SEQ ID NO: 91590 - DNA, 25 bp, Canis familiaris
gccaaggagatcgccagggctgtgg

SEQ ID NO: 91591 - DNA, 25 bp, Canis familiaris
gccaattcacatacaccagtcctgg

SEQ ID NO: 91592 - DNA, 25 bp, Canis familiaris
ccaattacccattctgttcagacga

SEQ ID NO: 91593 - DNA, 25 bp, Canis familiaris
ccaattaatcacatccttctgcagc

SEQ ID NO: 91594 - DNA, 25 bp, Canis familiaris
gccacttactagatgtgctgtcccg

SEQ ID NO: 91595 - DNA, 25 bp, Canis familiaris
gccaagagacggaggctgtcctctc

SEQ ID NO: 91596 - DNA, 25 bp, Canis familiaris
gccaagagacggaggctgtcctctc

SEQ ID NO: 91597 - DNA, 25 bp, Canis familiaris
gccaagagacggaggctgtcctctc

SEQ ID NO: 91598 - DNA, 25 bp, Canis familiaris
gccaaaactgaagttgcctccattc

SEQ ID NO: 91599 - DNA, 25 bp, Canis familiaris
gccaaacaataagcccatccatctc

SEQ ID NO: 91600 - DNA, 25 bp, Canis familiaris
gccaaatccaagaacccattattac

SEQ ID NO: 91601 - DNA, 25 bp, Canis familiaris
gccacaacatctattcccatatatt

SEQ ID NO: 91602 - DNA, 25 bp, Canis familiaris
gccaaatctctaaagactcaaatta

SEQ ID NO: 91603 - DNA, 25 bp, Canis familiaris
gccacaacctgtcggagtcggaaga

SEQ ID NO: 91604 - DNA, 25 bp, Canis familiaris
gccaacccatagctactctgggagt

SEQ ID NO: 91605 - DNA, 25 bp, Canis familiaris
gccaatccctgtcaatcctgggagg

SEQ ID NO: 91606 - DNA, 25 bp, Canis familiaris
gccaatactgttcacacctgttagg

SEQ ID NO: 91607 - DNA, 25 bp, Canis familiaris
gccaaattattcagtcctttcaggc

SEQ ID NO: 91608 - DNA, 25 bp, Canis familiaris
gccaactgaattgagtccacttctg

SEQ ID NO: 91609 - DNA, 25 bp, Canis familiaris
gccagcttatttggattcccattcc

SEQ ID NO: 91610 - DNA, 25 bp, Canis familiaris
gccagctgtttggtgtaccgtgggc

SEQ ID NO: 91611 - DNA, 25 bp, Canis familiaris
gccagagctggtgttcaccttgggc

SEQ ID NO: 91612 - DNA, 25 bp, Canis familiaris
gccacagggtcaggtcaccctgacg

SEQ ID NO: 91613 - DNA, 25 bp, Canis familiaris
gccaaggcctaactatgctgccaac

SEQ ID NO: 91614 - DNA, 25 bp, Canis familiaris
ccaagtcaaatacttgtgccattca

SEQ ID NO: 91615 - DNA, 25 bp, Canis familiaris
gccaagtgttgatatttgccttagg

SEQ ID NO: 91616 - DNA, 25 bp, Canis familiaris
gccaccacttgacatttccaatgac

SEQ ID NO: 91617 - DNA, 25 bp, Canis familiaris
gccaatacttgtttttatgctatga

SEQ ID NO: 91618 - DNA, 25 bp, Canis familiaris
gccaagcttactttgttttgtgtct

SEQ ID NO: 91619 - DNA, 25 bp, Canis familiaris
gccaagctgctagtaggcatcaatt

SEQ ID NO: 91620 - DNA, 25 bp, Canis familiaris
gccaagtcagcagtagtctgcagtc

SEQ ID NO: 91621 - DNA, 25 bp, Canis familiaris
gccaagtcatcactattggcaacga

SEQ ID NO: 91622 - DNA, 25 bp, Canis familiaris
gccaagtcatcactattggcaacga

SEQ ID NO: 91623 - DNA, 25 bp, Canis familiaris
gccaatataaccaatgtgcatatta

SEQ ID NO: 91624 - DNA, 25 bp, Canis familiaris
gccaatgatatggcagcttctacat

SEQ ID NO: 91625 - DNA, 25 bp, Canis familiaris
gccacattcatgactgtatcagtat

SEQ ID NO: 91626 - DNA, 25 bp, Canis familiaris
gccaaccatgcctactgagtatgca

SEQ ID NO: 91627 - DNA, 25 bp, Canis familiaris
gccaacctccatgctaaggactgtc

SEQ ID NO: 91628 - DNA, 25 bp, Canis familiaris
gccaacctactttcaaggctccatc

SEQ ID NO: 91629 - DNA, 25 bp, Canis familiaris
gccaacaactttttatggcccctca

SEQ ID NO: 91630 - DNA, 25 bp, Canis familiaris
gccacaccctttttgaaatcggcca

SEQ ID NO: 91631 - DNA, 25 bp, Canis familiaris
gccatctaccttgggatcaaacgga

SEQ ID NO: 91632 - DNA, 25 bp, Canis familiaris
gccatccgggctgggcaaaccggac

SEQ ID NO: 91633 - DNA, 25 bp, Canis familiaris
gccacactgggcggtgaaattgccc

SEQ ID NO: 91634 - DNA, 25 bp, Canis familiaris
gccaattggccagggcagtgaatca

SEQ ID NO: 91635 - DNA, 25 bp, Canis familiaris
gccaagtacatctgcctggctaaca

SEQ ID NO: 91636 - DNA, 25 bp, Canis familiaris
gccacaaagcacttgtcagaggaag

SEQ ID NO: 91637 - DNA, 25 bp, Canis familiaris
gccaaaacctattgatgtacaagtc

SEQ ID NO: 91638 - DNA, 25 bp, Canis familiaris
gccaaaagctctttttaactctctt

SEQ ID NO: 91639 - DNA, 25 bp, Canis familiaris
gccaagactgcaacttttaacttgc

SEQ ID NO: 91640 - DNA, 25 bp, Canis familiaris
gccaagggaggcttttgaagcttcc

SEQ ID NO: 91641 - DNA, 25 bp, Canis familiaris
ccaaggggccctcatcaatgtgccc

SEQ ID NO: 91642 - DNA, 25 bp, Canis familiaris
gccaaggggccccataaacacgaca

SEQ ID NO: 91643 - DNA, 25 bp, Canis familiaris
gccagtcaggccccagataaaatct

SEQ ID NO: 91644 - DNA, 25 bp, Canis familiaris
gccacaaagcgcccaatacgctggc

SEQ ID NO: 91645 - DNA, 25 bp, Canis familiaris
gccaatcaggcgggatagcacctgg

SEQ ID NO: 91646 - DNA, 25 bp, Canis familiaris
gccacacacagttcgtcacacgtgg

SEQ ID NO: 91647 - DNA, 25 bp, Canis familiaris
gccaagcgatgacagtccgcgtgtg

SEQ ID NO: 91648 - DNA, 25 bp, Canis familiaris
gccaagcagatgcctgcttccggac

SEQ ID NO: 91649 - DNA, 25 bp, Canis familiaris
gccacaagatgccgcagtggcccac

SEQ ID NO: 91650 - DNA, 25 bp, Canis familiaris
gccagaggatcccagggccattgtc

SEQ ID NO: 91651 - DNA, 25 bp, Canis familiaris
gccaagagatggaagcagcccaagt

SEQ ID NO: 91652 - DNA, 25 bp, Canis familiaris
gccaagaaggacgagcccaagtgcg

SEQ ID NO: 91653 - DNA, 25 bp, Canis familiaris
gccaacaagtgaggaggcgccgcgt

SEQ ID NO: 91654 - DNA, 25 bp, Canis familiaris
gccacacaagtggtgatgaccccca

SEQ ID NO: 91655 - DNA, 25 bp, Canis familiaris
gccacagagggatgaactgccccac

SEQ ID NO: 91656 - DNA, 25 bp, Canis familiaris
gccaatgcggtgaagatctctgcct

SEQ ID NO: 91657 - DNA, 25 bp, Canis familiaris
gccaagagggtcatcatctctgctc

SEQ ID NO: 91658 - DNA, 25 bp, Canis familiaris
gccaaggagggcgtaccattcgggc

SEQ ID NO: 91659 - DNA, 25 bp, Canis familiaris
gccactgagggggccactttatggg

SEQ ID NO: 91660 - DNA, 25 bp, Canis familiaris
gccactgtggtccaccagttggtgc

SEQ ID NO: 91661 - DNA, 25 bp, Canis familiaris
gccaagcttgtccaatcgtctggaa

SEQ ID NO: 91662 - DNA, 25 bp, Canis familiaris
ccaatgtctgtaaagtgctctgagg

SEQ ID NO: 91663 - DNA, 25 bp, Canis familiaris
gccacgcttgcagaagtgcctaggc

SEQ ID NO: 91664 - DNA, 25 bp, Canis familiaris
gccactgcttatgtgaggagctggg

SEQ ID NO: 91665 - DNA, 25 bp, Canis familiaris
gccatctgttcgtcgtcgacgggtt

SEQ ID NO: 91666 - DNA, 25 bp, Canis familiaris
gccaattctccctatagggcggata

SEQ ID NO: 91667 - DNA, 25 bp, Canis familiaris
gccagttcccactttggactgagag

SEQ ID NO: 91668 - DNA, 25 bp, Canis familiaris
gccagctccccctggaaatgaggat

SEQ ID NO: 91669 - DNA, 25 bp, Canis familiaris
gccactcttcccaggagtatgagcg

SEQ ID NO: 91670 - DNA, 25 bp, Canis familiaris
gccacttttgccatatcgattctgc

SEQ ID NO: 91671 - DNA, 25 bp, Canis familiaris
gccaccttctctgtaggttctggct

SEQ ID NO: 91672 - DNA, 25 bp, Canis familiaris
gccaagttctccacaggcattttct

SEQ ID NO: 91673 - DNA, 25 bp, Canis familiaris
gccaacctgaccacagtgctttaga

SEQ ID NO: 91674 - DNA, 25 bp, Canis familiaris
gcctacgatatccccaggttaagca

SEQ ID NO: 91675 - DNA, 25 bp, Canis familiaris
gccaccgtgtcccacaagtaaatgc

SEQ ID NO: 91676 - DNA, 25 bp, Canis familiaris
gccactggtgccacaaactcagaat

SEQ ID NO: 91677 - DNA, 25 bp, Canis familiaris
gccacaatccaaacaaaccaaaatt

SEQ ID NO: 91678 - DNA, 25 bp, Canis familiaris
gccaccattaaataacaccatccta

SEQ ID NO: 91679 - DNA, 25 bp, Canis familiaris
gcctccatttaaaagtacgaagtca

SEQ ID NO: 91680 - DNA, 25 bp, Canis familiaris
gccaacttctaaaatgtatgccaca

SEQ ID NO: 91681 - DNA, 25 bp, Canis familiaris
gccacacttctacaagttcagcaca

SEQ ID NO: 91682 - DNA, 25 bp, Canis familiaris
gccacccactaggcaagctttgagc

SEQ ID NO: 91683 - DNA, 25 bp, Canis familiaris
gccacaccaaaggcgagcagggcct

SEQ ID NO: 91684 - DNA, 25 bp, Canis familiaris
gccacccatgagaggatcaagcccc

SEQ ID NO: 91685 - DNA, 25 bp, Canis familiaris
gcccaaacaatgcgtctaggccctc

SEQ ID NO: 91686 - DNA, 25 bp, Canis familiaris
gccaccaaaagctgtcaaggattct

SEQ ID NO: 91687 - DNA, 25 bp, Canis familiaris
gccacgaccaagtttccaggagttc

SEQ ID NO: 91688 - DNA, 25 bp, Canis familiaris
gccactacaccttttccatgtggta

SEQ ID NO: 91689 - DNA, 25 bp, Canis familiaris
gccactgagcggccagttctagtgg

SEQ ID NO: 91690 - DNA, 25 bp, Canis familiaris
gccacaacgctgtgttctcggagac

SEQ ID NO: 91691 - DNA, 25 bp, Canis familiaris
gccaaacagtgcttctggccggaag

SEQ ID NO: 91692 - DNA, 25 bp, Canis familiaris
gccaaaaatgtcagtgccaagaaga

SEQ ID NO: 91693 - DNA, 25 bp, Canis familiaris
gccaaccaagttctccaggacagaa

SEQ ID NO: 91694 - DNA, 25 bp, Canis familiaris
gccacccagtttctccaataaacat

SEQ ID NO: 91695 - DNA, 25 bp, Canis familiaris
gcgtcaacgtctcttctaataaatt

SEQ ID NO: 91696 - DNA, 25 bp, Canis familiaris
gcgtgctaacttctttaacacttaa

SEQ ID NO: 91697 - DNA, 25 bp, Canis familiaris
gccttatacctgtagttaccctgga

SEQ ID NO: 91698 - DNA, 25 bp, Canis familiaris
gctctttagtctcgtggtacacggg

SEQ ID NO: 91699 - DNA, 25 bp, Canis familiaris
gccacttagtccttggtcaactcaa

SEQ ID NO: 91700 - DNA, 25 bp, Canis familiaris
gccagttagtccaagtcagaaaaag

SEQ ID NO: 91701 - DNA, 25 bp, Canis familiaris
gcatagttcaggcaagtcctccaaa

SEQ ID NO: 91702 - DNA, 25 bp, Canis familiaris
gccatgtctgaacaagatgcctccc

SEQ ID NO: 91703 - DNA, 25 bp, Canis familiaris
gccacatcagaacatggatatctca

SEQ ID NO: 91704 - DNA, 25 bp, Canis familiaris
gccaccagaagatcgatgacctctt

SEQ ID NO: 91705 - DNA, 25 bp, Canis familiaris
gccaccaagaagctgaacgcgcagt

SEQ ID NO: 91706 - DNA, 25 bp, Canis familiaris
gccaccaatggccactgaacaaatg

SEQ ID NO: 91707 - DNA, 25 bp, Canis familiaris
gccatccaaggccttactaagactt

SEQ ID NO: 91708 - DNA, 25 bp, Canis familiaris
gcccgagggtgtaattaggacttct

SEQ ID NO: 91709 - DNA, 25 bp, Canis familiaris
gccactgggttctgttagtactgtc

SEQ ID NO: 91710 - DNA, 25 bp, Canis familiaris
gccaccggcttctttgaagtgacgg

SEQ ID NO: 91711 - DNA, 25 bp, Canis familiaris
gccaacaggccccaggataggaggg

SEQ ID NO: 91712 - DNA, 25 bp, Canis familiaris
gccaagaggcccaggacctgagtgg

SEQ ID NO: 91713 - DNA, 25 bp, Canis familiaris
gccaaaggcccagggatgcctactt

SEQ ID NO: 91714 - DNA, 25 bp, Canis familiaris
gccacaatgcccaggaaacttctct

SEQ ID NO: 91715 - DNA, 25 bp, Canis familiaris
gccacaaggcttagggaaactctgc

SEQ ID NO: 91716 - DNA, 25 bp, Canis familiaris
ccaaggcgtgatcctggaaacccag

SEQ ID NO: 91717 - DNA, 25 bp, Canis familiaris
gccaaggaggagcctaaacaagccg

SEQ ID NO: 91718 - DNA, 25 bp, Canis familiaris
gccaaagagtggtgagaacaagagg

SEQ ID NO: 91719 - DNA, 25 bp, Canis familiaris
gccaacaggtgttagcgtgacgagg

SEQ ID NO: 91720 - DNA, 25 bp, Canis familiaris
gccaccaaagtccttggcactgtca

SEQ ID NO: 91721 - DNA, 25 bp, Canis familiaris
gccaccaaaaccctggggatcatcc

SEQ ID NO: 91722 - DNA, 25 bp, Canis familiaris
gccatacactaataaggggattctt

SEQ ID NO: 91723 - DNA, 25 bp, Canis familiaris
gccaagccctatcatgacgaggttt

SEQ ID NO: 91724 - DNA, 25 bp, Canis familiaris
ccaatgccctagcagcacgggactt

SEQ ID NO: 91725 - DNA, 25 bp, Canis familiaris
gccaagcccaagcagcaaaggcagc

SEQ ID NO: 91726 - DNA, 25 bp, Canis familiaris
gccaagccaaggacaaggcggcgca

SEQ ID NO: 91727 - DNA, 25 bp, Canis familiaris
gccactgagccaggctcaaggccgc

SEQ ID NO: 91728 - DNA, 25 bp, Canis familiaris
gccaggcagctggcacagaagtccc

SEQ ID NO: 91729 - DNA, 25 bp, Canis familiaris
gccaggcacagaatcacggttcact

SEQ ID NO: 91730 - DNA, 25 bp, Canis familiaris
gccaggcacatgttaagcagtctac

SEQ ID NO: 91731 - DNA, 25 bp, Canis familiaris
gccacttatgtaaagctttcagtcc

SEQ ID NO: 91732 - DNA, 25 bp, Canis familiaris
gccaagctttacatctttgtgtccg

SEQ ID NO: 91733 - DNA, 25 bp, Canis familiaris
gccaaggactcactgtctttggggg

SEQ ID NO: 91734 - DNA, 25 bp, Canis familiaris
gccacggcccaaaggtctggaggga

SEQ ID NO: 91735 - DNA, 25 bp, Canis familiaris
gccagcgtcaaggaagcggccgagg

SEQ ID NO: 91736 - DNA, 25 bp, Canis familiaris
gccaggtacagcggagggctgggcg

SEQ ID NO: 91737 - DNA, 25 bp, Canis familiaris
gccaggggcaccaaggtgctgggca

SEQ ID NO: 91738 - DNA, 25 bp, Canis familiaris
gccaaggccaacatgggtgtgtcca

SEQ ID NO: 91739 - DNA, 25 bp, Canis familiaris
gcacgaggaaacagtggttttcaaa

SEQ ID NO: 91740 - DNA, 25 bp, Canis familiaris
gcggaggacttcagggttttctgtc

SEQ ID NO: 91741 - DNA, 25 bp, Canis familiaris
gccagggacttcacagtttctgccc

SEQ ID NO: 91742 - DNA, 25 bp, Canis familiaris
gccgggacagtaccagttttctggg

SEQ ID NO: 91743 - DNA, 25 bp, Canis familiaris
gccagtgtccctatcctttaagggg

SEQ ID NO: 91744 - DNA, 25 bp, Canis familiaris
ccaatcctactaattctcgcaaatg

SEQ ID NO: 91745 - DNA, 25 bp, Canis familiaris
gccaatacatttatatctccgcaac

SEQ ID NO: 91746 - DNA, 25 bp, Canis familiaris
gccaatacatttatatctccgcaac

SEQ ID NO: 91747 - DNA, 25 bp, Canis familiaris
gccaatacatttatatctccgcaac

SEQ ID NO: 91748 - DNA, 25 bp, Canis familiaris
gccaaacagccaaattctgccatca

SEQ ID NO: 91749 - DNA, 25 bp, Canis familiaris
gccaagcaagccactgctgttaaac

SEQ ID NO: 91750 - DNA, 25 bp, Canis familiaris
gccaatcaagactacttttaaaaag

SEQ ID NO: 91751 - DNA, 25 bp, Canis familiaris
gccaacattgttattttatagcaca

SEQ ID NO: 91752 - DNA, 25 bp, Canis familiaris
gccaaatttgttagtttcccatctc

SEQ ID NO: 91753 - DNA, 25 bp, Canis familiaris
gccaaattctttttgtagtcctatc

SEQ ID NO: 91754 - DNA, 25 bp, Canis familiaris
gccaacacattctcttaatgtccta

SEQ ID NO: 91755 - DNA, 25 bp, Canis familiaris
gccaactttcttctagcatgtgata

SEQ ID NO: 91756 - DNA, 25 bp, Canis familiaris
gccacattttctttgtcagttgaca

SEQ ID NO: 91757 - DNA, 25 bp, Canis familiaris
gccactttgatatatgccagcggac

SEQ ID NO: 91758 - DNA, 25 bp, Canis familiaris
gccactttgccgcatttgaggagcc

SEQ ID NO: 91759 - DNA, 25 bp, Canis familiaris
gccagtaggctaccattttcggctc

SEQ ID NO: 91760 - DNA, 25 bp, Canis familiaris
gccagtcagcacacacagattacgg

SEQ ID NO: 91761 - DNA, 25 bp, Canis familiaris
gccaggcgaatcccgttaagggccg

SEQ ID NO: 91762 - DNA, 25 bp, Canis familiaris
gccaccgagatgggggaaggggccg

SEQ ID NO: 91763 - DNA, 25 bp, Canis familiaris
gccacaacaaggaccgaaaggttcg

SEQ ID NO: 91764 - DNA, 25 bp, Canis familiaris
gccacccaggtgtccagaaatggtg

SEQ ID NO: 91765 - DNA, 25 bp, Canis familiaris
gccaccaaagttgataagatgctat

SEQ ID NO: 91766 - DNA, 25 bp, Canis familiaris
tccaccgaaggttgtaagtccatta

SEQ ID NO: 91767 - DNA, 25 bp, Canis familiaris
tccaccgaaggtagtaagtacatta

SEQ ID NO: 91768 - DNA, 25 bp, Canis familiaris
gccacctggggtgataagacagatt

SEQ ID NO: 91769 - DNA, 25 bp, Canis familiaris
gccacactggggaatatactacaaa

SEQ ID NO: 91770 - DNA, 25 bp, Canis familiaris
gccaacgggtgcatgacatcagaca

SEQ ID NO: 91771 - DNA, 25 bp, Canis familiaris
gccaaggaggtgcccattgagatca

SEQ ID NO: 91772 - DNA, 25 bp, Canis familiaris
gccaactaggtcgctggatgtcaga

SEQ ID NO: 91773 - DNA, 25 bp, Canis familiaris
gccaactattttgaggatgttgaga

SEQ ID NO: 91774 - DNA, 25 bp, Canis familiaris
gccacctatgtttaagggcagtatt

SEQ ID NO: 91775 - DNA, 25 bp, Canis familiaris
gccagcctcagtttcgagggagtct

SEQ ID NO: 91776 - DNA, 25 bp, Canis familiaris
gccacactttacccagaggcaggct

SEQ ID NO: 91777 - DNA, 25 bp, Canis familiaris
gccccaatcttacaagtgcggtgaa

SEQ ID NO: 91778 - DNA, 25 bp, Canis familiaris
gccacccacccacatagtgggacct

SEQ ID NO: 91779 - DNA, 25 bp, Canis familiaris
gccacctatccccttggaggtggag

SEQ ID NO: 91780 - DNA, 25 bp, Canis familiaris
gccaaactcctcctctggagggtag

SEQ ID NO: 91781 - DNA, 25 bp, Canis familiaris
gccaaacatggtcttggacgggaag

SEQ ID NO: 91782 - DNA, 25 bp, Canis familiaris
ccaattccactagtaggcacgggag

SEQ ID NO: 91783 - DNA, 25 bp, Canis familiaris
gccaattccactagtaggcacggga

SEQ ID NO: 91784 - DNA, 25 bp, Canis familiaris
gccacattccatgagtcaacgcgat

SEQ ID NO: 91785 - DNA, 25 bp, Canis familiaris
gccaccatccttgcatgaacatggt

SEQ ID NO: 91786 - DNA, 25 bp, Canis familiaris
gccactattcttaattgaatgcttt

SEQ ID NO: 91787 - DNA, 25 bp, Canis familiaris
gccactcatgtcatgctctacaagt

SEQ ID NO: 91788 - DNA, 25 bp, Canis familiaris
gccaagcatatcattctagcatcaa

SEQ ID NO: 91789 - DNA, 25 bp, Canis familiaris
gccatcgtcatcggagccagtaatt

SEQ ID NO: 91790 - DNA, 25 bp, Canis familiaris
gccacggcatcggaggacgaagtca

SEQ ID NO: 91791 - DNA, 25 bp, Canis familiaris
gccacattcacggtgtacgaatacc

SEQ ID NO: 91792 - DNA, 25 bp, Canis familiaris
gccacattttggttatcgatgtacc

SEQ ID NO: 91793 - DNA, 25 bp, Canis familiaris
gcctcaatttccttactcagtaaaa

SEQ ID NO: 91794 - DNA, 25 bp, Canis familiaris
gccaacttcccatagccagataaga

SEQ ID NO: 91795 - DNA, 25 bp, Canis familiaris
gccaattccccagagtacataaagc

SEQ ID NO: 91796 - DNA, 25 bp, Canis familiaris
gccaaagcccctgaatgacagtaac

SEQ ID NO: 91797 - DNA, 25 bp, Canis familiaris
gccaacatcaccttaaagtcctcag

SEQ ID NO: 91798 - DNA, 25 bp, Canis familiaris
tccaatctgatatctaaaggccatg

SEQ ID NO: 91799 - DNA, 25 bp, Canis familiaris
gccaattgatacaaagaggcctcag

SEQ ID NO: 91800 - DNA, 25 bp, Canis familiaris
gccaatataagctgagaggcctatg

SEQ ID NO: 91801 - DNA, 25 bp, Canis familiaris
gccaattctagcacagtgtgtcttc

SEQ ID NO: 91802 - DNA, 25 bp, Canis familiaris
gccagatgcctatgcactgttttac

SEQ ID NO: 91803 - DNA, 25 bp, Canis familiaris
gccaatgcccggctttttggcatca

SEQ ID NO: 91804 - DNA, 25 bp, Canis familiaris
gccaatggccgtagaggtttgtaga

SEQ ID NO: 91805 - DNA, 25 bp, Canis familiaris
gccagtcccgtatgaactttctgat

SEQ ID NO: 91806 - DNA, 25 bp, Canis familiaris
gcgcaggcacacgtgaactacgttg

SEQ ID NO: 91807 - DNA, 25 bp, Canis familiaris
gccagcagaatccgatagctttgtt

SEQ ID NO: 91808 - DNA, 25 bp, Canis familiaris
gccaaaaccgcatctgatttttccc

SEQ ID NO: 91809 - DNA, 25 bp, Canis familiaris
gccaaagactacagtgtttcttagc

SEQ ID NO: 91810 - DNA, 25 bp, Canis familiaris
gcctcaaacaacagttattttccca

SEQ ID NO: 91811 - DNA, 25 bp, Canis familiaris
gcctcattaaacgagttatttgggg

SEQ ID NO: 91812 - DNA, 25 bp, Canis familiaris
gcctaccaggtagtttccttgggtg

SEQ ID NO: 91813 - DNA, 25 bp, Canis familiaris
gcctttcatggtgtatttttggtgt

SEQ ID NO: 91814 - DNA, 25 bp, Canis familiaris
gccattttggtgcttcttttactaa

SEQ ID NO: 91815 - DNA, 25 bp, Canis familiaris
gccacatttagtcctgtactgtatc

SEQ ID NO: 91816 - DNA, 25 bp, Canis familiaris
gcctatcagtcctgcgctaatgttc

SEQ ID NO: 91817 - DNA, 25 bp, Canis familiaris
gccttggatcttccgtttgttaata

SEQ ID NO: 91818 - DNA, 25 bp, Canis familiaris
gccactggtgttccaactgtttaaa

SEQ ID NO: 91819 - DNA, 25 bp, Canis familiaris
gccagagagtactcatcctttgcca

SEQ ID NO: 91820 - DNA, 25 bp, Canis familiaris
gccagaagatccacatctccaagaa

SEQ ID NO: 91821 - DNA, 25 bp, Canis familiaris
gccacacgcatcgggttcgaaataa

SEQ ID NO: 91822 - DNA, 25 bp, Canis familiaris
gccaatcctcctcttgagatagatc

SEQ ID NO: 91823 - DNA, 25 bp, Canis familiaris
gccaatcctgcattttgctaaacgc

SEQ ID NO: 91824 - DNA, 25 bp, Canis familiaris
gccaatcctcaaattcatacagaat

SEQ ID NO: 91825 - DNA, 25 bp, Canis familiaris
gccaatcattccaaggcccaactgc

SEQ ID NO: 91826 - DNA, 25 bp, Canis familiaris
gccagatcaacctggagctctacgc

SEQ ID NO: 91827 - DNA, 25 bp, Canis familiaris
gccactcatcactgggggtgacagc

SEQ ID NO: 91828 - DNA, 25 bp, Canis familiaris
gccactctacagctgggaatgacca

SEQ ID NO: 91829 - DNA, 25 bp, Canis familiaris
gccaatccgcagcctgcgggatgct

SEQ ID NO: 91830 - DNA, 25 bp, Canis familiaris
gccacatctggcctatagaggtctt

SEQ ID NO: 91831 - DNA, 25 bp, Canis familiaris
gccaacatgtgaaaagcctgtgcat

SEQ ID NO: 91832 - DNA, 25 bp, Canis familiaris
gcctacagtgatgaaagcgtctacg

SEQ ID NO: 91833 - DNA, 25 bp, Canis familiaris
gccatcacgtgggaaggtctcttat

SEQ ID NO: 91834 - DNA, 25 bp, Canis familiaris
gccaacgtgggccagggtggtgaat

SEQ ID NO: 91835 - DNA, 25 bp, Canis familiaris
gcctcttggggcaagggtgccgaga

SEQ ID NO: 91836 - DNA, 25 bp, Canis familiaris
gccatcttgggtgtgggcggaagtc

SEQ ID NO: 91837 - DNA, 25 bp, Canis familiaris
gccagcccggggaggggaagattct

SEQ ID NO: 91838 - DNA, 25 bp, Canis familiaris
gccacccggtccaggaggagaggtt

SEQ ID NO: 91839 - DNA, 25 bp, Canis familiaris
gccacaaggtgtccaaggagccaag

SEQ ID NO: 91840 - DNA, 25 bp, Canis familiaris
gccaaacggcggacaggagccaacc

SEQ ID NO: 91841 - DNA, 25 bp, Canis familiaris
gcctaaaatcgtccagggcggtcct

SEQ ID NO: 91842 - DNA, 25 bp, Canis familiaris
gccaaacgtggtcaggagagtgttc

SEQ ID NO: 91843 - DNA, 25 bp, Canis familiaris
gccaaacggtaccagctggagtgtc

SEQ ID NO: 91844 - DNA, 25 bp, Canis familiaris
gccaaaatggttttctggggtcgcg

SEQ ID NO: 91845 - DNA, 25 bp, Canis familiaris
gccacaaaattttactcctaatcct

SEQ ID NO: 91846 - DNA, 25 bp, Canis familiaris
gccaaacgactttaacctcagagac

SEQ ID NO: 91847 - DNA, 25 bp, Canis familiaris
gccaagggcctttcaacctatgagg

SEQ ID NO: 91848 - DNA, 25 bp, Canis familiaris
gccaaggctcacattcgaacttgcc

SEQ ID NO: 91849 - DNA, 25 bp, Canis familiaris
gccaaagccacgaggagagccctcc

SEQ ID NO: 91850 - DNA, 25 bp, Canis familiaris
gccacaaccactaccagaagcagtt

SEQ ID NO: 91851 - DNA, 25 bp, Canis familiaris
gccacagggacttccaacagaggag

SEQ ID NO: 91852 - DNA, 25 bp, Canis familiaris
gccaagttgccttcccaagaaagaa

SEQ ID NO: 91853 - DNA, 25 bp, Canis familiaris
gccagatgtttctgctccaagtacg

SEQ ID NO: 91854 - DNA, 25 bp, Canis familiaris
gccaagcaactcttccgcaagttga

SEQ ID NO: 91855 - DNA, 25 bp, Canis familiaris
gccaatgtactaccacgcaagaata

SEQ ID NO: 91856 - DNA, 25 bp, Canis familiaris
gccaagttccatccaatctatgtga

SEQ ID NO: 91857 - DNA, 25 bp, Canis familiaris
gccaaatatgacgagcagtcaagga

SEQ ID NO: 91858 - DNA, 25 bp, Canis familiaris
gccagagagccagagcagtaaggaa

SEQ ID NO: 91859 - DNA, 25 bp, Canis familiaris
gccaacgtgcagcggctcaaggaat

SEQ ID NO: 91860 - DNA, 25 bp, Canis familiaris
gccaacgtgcagcggctcaaggaat

SEQ ID NO: 91861 - DNA, 25 bp, Canis familiaris
gccaacgtgcagcggctcaaggaat

SEQ ID NO: 91862 - DNA, 25 bp, Canis familiaris
gccaaggtggcaggagctaagcgca

SEQ ID NO: 91863 - DNA, 25 bp, Canis familiaris
gccaaggaagcaaaaaaggctaagc

SEQ ID NO: 91864 - DNA, 25 bp, Canis familiaris
gccacaggaacaaatacacagctct

SEQ ID NO: 91865 - DNA, 25 bp, Canis familiaris
gccaaatgtatatgctaccagccat

SEQ ID NO: 91866 - DNA, 25 bp, Canis familiaris
gccagagtttattgtacgagccccc

SEQ ID NO: 91867 - DNA, 25 bp, Canis familiaris
gccggtagtatatttatgttcccca

SEQ ID NO: 91868 - DNA, 25 bp, Canis familiaris
gccatggttgtttaaattgacccta

SEQ ID NO: 91869 - DNA, 25 bp, Canis familiaris
gccaagttcttaaggatttcacgct

SEQ ID NO: 91870 - DNA, 25 bp, Canis familiaris
gccaagtgtgttcaagtttacccaa

SEQ ID NO: 91871 - DNA, 25 bp, Canis familiaris
gccacacttgttgaatctttgacct

SEQ ID NO: 91872 - DNA, 25 bp, Canis familiaris
gccacagtgtttccatatatttttt

SEQ ID NO: 91873 - DNA, 25 bp, Canis familiaris
gccacgttccgtatatctgattttt

SEQ ID NO: 91874 - DNA, 25 bp, Canis familiaris
gccacagtgtacaacctatcgagat

SEQ ID NO: 91875 - DNA, 25 bp, Canis familiaris
gccaagtgtcagaatgctcttcagc

SEQ ID NO: 91876 - DNA, 25 bp, Canis familiaris
gccaaatctggttgatcgtcgctta

SEQ ID NO: 91877 - DNA, 25 bp, Canis familiaris
gcctaattgtgttaggtcctttgta

SEQ ID NO: 91878 - DNA, 25 bp, Canis familiaris
gccaagatttgttaattcactgtta

SEQ ID NO: 91879 - DNA, 25 bp, Canis familiaris
gccgatgttcggacaacccgttaga

SEQ ID NO: 91880 - DNA, 25 bp, Canis familiaris
gccagtttgtggactcgtttttaga

SEQ ID NO: 91881 - DNA, 25 bp, Canis familiaris
gccgtattgggcgcctggtcaccag

SEQ ID NO: 91882 - DNA, 25 bp, Canis familiaris
gccagtgggaggatactgtacaacg

SEQ ID NO: 91883 - DNA, 25 bp, Canis familiaris
gccaagtggaagaccattgtacaca

SEQ ID NO: 91884 - DNA, 25 bp, Canis familiaris
gccaagaagaatgccatctcccatc

SEQ ID NO: 91885 - DNA, 25 bp, Canis familiaris
gccaacataaacatatctccaccac

SEQ ID NO: 91886 - DNA, 25 bp, Canis familiaris
gccacaaaacaaacctcaataaatt

SEQ ID NO: 91887 - DNA, 25 bp, Canis familiaris
gccaaaacaccaccatttgcataag

SEQ ID NO: 91888 - DNA, 25 bp, Canis familiaris
gccaaaactccacatagtacacggt

SEQ ID NO: 91889 - DNA, 25 bp, Canis familiaris
gccaacgtccctgatgagtacagca

SEQ ID NO: 91890 - DNA, 25 bp, Canis familiaris
gccaagctgacgcctgaggaggaag

SEQ ID NO: 91891 - DNA, 25 bp, Canis familiaris
gccaagctgacgcctgaggaggaag

SEQ ID NO: 91892 - DNA, 25 bp, Canis familiaris
gccaagatcacgccacagtgagggg

SEQ ID NO: 91893 - DNA, 25 bp, Canis familiaris
gccaagcagcaaccatgcgtgagtg

SEQ ID NO: 91894 - DNA, 25 bp, Canis familiaris
gccaagcagcagtcaccagtggtgc

SEQ ID NO: 91895 - DNA, 25 bp, Canis familiaris
gccaacacgtaccagctggagtgca

SEQ ID NO: 91896 - DNA, 25 bp, Canis familiaris
gccaagtcaaacaagcaggtctgca

SEQ ID NO: 91897 - DNA, 25 bp, Canis familiaris
gccaagtatcaaccagatcctcaga

SEQ ID NO: 91898 - DNA, 25 bp, Canis familiaris
gccaagaacacacagtatctgcaga

SEQ ID NO: 91899 - DNA, 25 bp, Canis familiaris
gccaagaacacactatatcttcaga

SEQ ID NO: 91900 - DNA, 25 bp, Canis familiaris
gccaacatcatctactattctctaa

SEQ ID NO: 91901 - DNA, 25 bp, Canis familiaris
gccaagcgtcaactatcgatgacta

SEQ ID NO: 91902 - DNA, 25 bp, Canis familiaris
gccaacgtcaagttccagttatgtt

SEQ ID NO: 91903 - DNA, 25 bp, Canis familiaris
gccagtcgaaacctcctttatttcg

SEQ ID NO: 91904 - DNA, 25 bp, Canis familiaris
gccagtcaaggacgttctgtttttg

SEQ ID NO: 91905 - DNA, 25 bp, Canis familiaris
gccagacacttgattatctttgcta

SEQ ID NO: 91906 - DNA, 25 bp, Canis familiaris
gccagaagcttttcgttggtgcatg

SEQ ID NO: 91907 - DNA, 25 bp, Canis familiaris
gccagcaagtggttcttcggtattt

SEQ ID NO: 91908 - DNA, 25 bp, Canis familiaris
gccagagtgtggtttctcacgtact

SEQ ID NO: 91909 - DNA, 25 bp, Canis familiaris
gccaggtgggtttgttctgtggctc

SEQ ID NO: 91910 - DNA, 25 bp, Canis familiaris
gccagcccagacacagttctgggcc

SEQ ID NO: 91911 - DNA, 25 bp, Canis familiaris
gccagctacgaggaggttctacgcc

SEQ ID NO: 91912 - DNA, 25 bp, Canis familiaris
gccagctgaggaggcagttattcaa

SEQ ID NO: 91913 - DNA, 25 bp, Canis familiaris
gccactggttgtcatcacatatcaa

SEQ ID NO: 91914 - DNA, 25 bp, Canis familiaris
gccagctgtggttttgcatgcttca

SEQ ID NO: 91915 - DNA, 25 bp, Canis familiaris
gccagccatacttttcgaatcaggg

SEQ ID NO: 91916 - DNA, 25 bp, Canis familiaris
gccacattggctttcctggaagggc

SEQ ID NO: 91917 - DNA, 25 bp, Canis familiaris
gccactttttcccatctgaagggga

SEQ ID NO: 91918 - DNA, 25 bp, Canis familiaris
gccacttttatcctgtctgaagcag

SEQ ID NO: 91919 - DNA, 25 bp, Canis familiaris
gccactgctgttaggcttccatgag

SEQ ID NO: 91920 - DNA, 25 bp, Canis familiaris
gccaagcgtctgcgatttcatatcg

SEQ ID NO: 91921 - DNA, 25 bp, Canis familiaris
gccaagaattcgcatcttgattctg

SEQ ID NO: 91922 - DNA, 25 bp, Canis familiaris
gccacaaacatcccatgggttgttg

SEQ ID NO: 91923 - DNA, 25 bp, Canis familiaris
gccacagacctcgactgggtgaggt

SEQ ID NO: 91924 - DNA, 25 bp, Canis familiaris
gccaaacatgccgggagtcctgagt

SEQ ID NO: 91925 - DNA, 25 bp, Canis familiaris
gccagacacgtcgtgggtcgtgggt

SEQ ID NO: 91926 - DNA, 25 bp, Canis familiaris
gccaaacctcttagaatcgctgtgc

SEQ ID NO: 91927 - DNA, 25 bp, Canis familiaris
gccaagaacctcaagaaagctgtgg

SEQ ID NO: 91928 - DNA, 25 bp, Canis familiaris
gccacaaacatccttgaagagctgg

SEQ ID NO: 91929 - DNA, 25 bp, Canis familiaris
gccaacctcaacctgaacatgctgg

SEQ ID NO: 91930 - DNA, 25 bp, Canis familiaris
gccatgtcagctacacgctcaaatg

SEQ ID NO: 91931 - DNA, 25 bp, Canis familiaris
gcctgatcgccgaagatagcactgc

SEQ ID NO: 91932 - DNA, 25 bp, Canis familiaris
gccactcccatgatgatgcaagcgc

SEQ ID NO: 91933 - DNA, 25 bp, Canis familiaris
gccagcagcagctgttgacgcagcc

SEQ ID NO: 91934 - DNA, 25 bp, Canis familiaris
gccaagaagagcaagactgcagcca

SEQ ID NO: 91935 - DNA, 25 bp, Canis familiaris
gccaagcggtgcgatgacagcgaag

SEQ ID NO: 91936 - DNA, 25 bp, Canis familiaris
gccaacgtggggacacgacagcacg

SEQ ID NO: 91937 - DNA, 25 bp, Canis familiaris
gccaacctgagaacaccattagcac

SEQ ID NO: 91938 - DNA, 25 bp, Canis familiaris
gccaaagctgggtgacatgtatgaa

SEQ ID NO: 91939 - DNA, 25 bp, Canis familiaris
gccacagagcgctgggtcatgttga

SEQ ID NO: 91940 - DNA, 25 bp, Canis familiaris
gccacagagctaccgggcttatgag

SEQ ID NO: 91941 - DNA, 25 bp, Canis familiaris
gccagctatcaactcgcgccctgga

SEQ ID NO: 91942 - DNA, 25 bp, Canis familiaris
gccacttagaatcgcgctcaggcgt

SEQ ID NO: 91943 - DNA, 25 bp, Canis familiaris
gccacttaaccttctcatggctgtt

SEQ ID NO: 91944 - DNA, 25 bp, Canis familiaris
gccaccttcctctatgcagaggttt

SEQ ID NO: 91945 - DNA, 25 bp, Canis familiaris
gccagccttgggccagcaaggtttc

SEQ ID NO: 91946 - DNA, 25 bp, Canis familiaris
gccagtcctaagcacagagattctc

SEQ ID NO: 91947 - DNA, 25 bp, Canis familiaris
gccaaccagcaacagcaggctctac

SEQ ID NO: 91948 - DNA, 25 bp, Canis familiaris
gccaactgagctacccagatgctcc

SEQ ID NO: 91949 - DNA, 25 bp, Canis familiaris
gccagacggtcagccagtggctgca

SEQ ID NO: 91950 - DNA, 25 bp, Canis familiaris
gccagaccgaccacaagagcagaaa

SEQ ID NO: 91951 - DNA, 25 bp, Canis familiaris
gccagtcctgctgcgacagtaaaaa

SEQ ID NO: 91952 - DNA, 25 bp, Canis familiaris
gccagtgtgctagccaaaaagacaa

SEQ ID NO: 91953 - DNA, 25 bp, Canis familiaris
gccgggtccactcaaatgaagcagt

SEQ ID NO: 91954 - DNA, 25 bp, Canis familiaris
gccagtgttttctcaaaaagagctt

SEQ ID NO: 91955 - DNA, 25 bp, Canis familiaris
gccagggtttcccaacattgaactg

SEQ ID NO: 91956 - DNA, 25 bp, Canis familiaris
gccagggcttacctgtacactgact

SEQ ID NO: 91957 - DNA, 25 bp, Canis familiaris
gccagtggtaccagtaaggcagctg

SEQ ID NO: 91958 - DNA, 25 bp, Canis familiaris
gccagattggagggggacttcagga

SEQ ID NO: 91959 - DNA, 25 bp, Canis familiaris
gccagttggagtgctggagactttg

SEQ ID NO: 91960 - DNA, 25 bp, Canis familiaris
gccacttggactagctcgatatttc

SEQ ID NO: 91961 - DNA, 25 bp, Canis familiaris
gccagcttggacagattgaggtctc

SEQ ID NO: 91962 - DNA, 25 bp, Canis familiaris
gccacttgcgtgagttgtacctgca

SEQ ID NO: 91963 - DNA, 25 bp, Canis familiaris
gccaagcccagaagtggtccgcaag

SEQ ID NO: 91964 - DNA, 25 bp, Canis familiaris
gccaaatctcgtggtgtttcgcaga

SEQ ID NO: 91965 - DNA, 25 bp, Canis familiaris
gccaaaccgcttggctatcacagca

SEQ ID NO: 91966 - DNA, 25 bp, Canis familiaris
gccaaagccattgcctagcaagaag

SEQ ID NO: 91967 - DNA, 25 bp, Canis familiaris
gccaacatgccttgaaaagccagag

SEQ ID NO: 91968 - DNA, 25 bp, Canis familiaris
gccagagatgcttcgaaaggcaagg

SEQ ID NO: 91969 - DNA, 25 bp, Canis familiaris
gccatagacttctcacaccaaggtc

SEQ ID NO: 91970 - DNA, 25 bp, Canis familiaris
gccatgtgcacctaaatacacaagg

SEQ ID NO: 91971 - DNA, 25 bp, Canis familiaris
gccaggacgatgacaaacaagatct

SEQ ID NO: 91972 - DNA, 25 bp, Canis familiaris
gccatcgacgaggccaccaagaagc

SEQ ID NO: 91973 - DNA, 25 bp, Canis familiaris
gccaaccagatcccattcataattc

SEQ ID NO: 91974 - DNA, 25 bp, Canis familiaris
gccacaccagaccattaacagtacc

SEQ ID NO: 91975 - DNA, 25 bp, Canis familiaris
gccacaccaagctatctacaatata

SEQ ID NO: 91976 - DNA, 25 bp, Canis familiaris
gccaaccatctttcaaaataagaag

SEQ ID NO: 91977 - DNA, 25 bp, Canis familiaris
gccaaccacttgtcctgtaataaaa

SEQ ID NO: 91978 - DNA, 25 bp, Canis familiaris
gccacaccactacttcttaagaaga

SEQ ID NO: 91979 - DNA, 25 bp, Canis familiaris
gccacaccagtgaatgtcttttaca

SEQ ID NO: 91980 - DNA, 25 bp, Canis familiaris
gccacagccaatgatgtgccttctc

SEQ ID NO: 91981 - DNA, 25 bp, Canis familiaris
gccaacagcaaccactgctcagtgg

SEQ ID NO: 91982 - DNA, 25 bp, Canis familiaris
gccacacggacatctgcttgggaac

SEQ ID NO: 91983 - DNA, 25 bp, Canis familiaris
gccacaccgagatctgctgggtgac

SEQ ID NO: 91984 - DNA, 25 bp, Canis familiaris
gccacacaggacttcagagggccac

SEQ ID NO: 91985 - DNA, 25 bp, Canis familiaris
gccacagaggcaggcaggaggtccc

SEQ ID NO: 91986 - DNA, 25 bp, Canis familiaris
gccagagatgaagcagccaggtccc

SEQ ID NO: 91987 - DNA, 25 bp, Canis familiaris
gccagattggcggagaagtttcacc

SEQ ID NO: 91988 - DNA, 25 bp, Canis familiaris
gccacatgggtgtcagaatgagtta

SEQ ID NO: 91989 - DNA, 25 bp, Canis familiaris
gccttgggtgtattgggcttccttt

SEQ ID NO: 91990 - DNA, 25 bp, Canis familiaris
gccagctgggttttggtttccatat

SEQ ID NO: 91991 - DNA, 25 bp, Canis familiaris
gccaggagcagaacttcctttcctt

SEQ ID NO: 91992 - DNA, 25 bp, Canis familiaris
gccagaggatgaagctgcccacttc

SEQ ID NO: 91993 - DNA, 25 bp, Canis familiaris
gccaaagtcatccatgaccacttcg

SEQ ID NO: 91994 - DNA, 25 bp, Canis familiaris
gccaaagtcatgaaacactcccgtc

SEQ ID NO: 91995 - DNA, 25 bp, Canis familiaris
gccaaaacagtgaaatctccgcaac

SEQ ID NO: 91996 - DNA, 25 bp, Canis familiaris
gccaactccctgaaatcctggaatg

SEQ ID NO: 91997 - DNA, 25 bp, Canis familiaris
gccagccccctgtgtataggaatgc

SEQ ID NO: 91998 - DNA, 25 bp, Canis familiaris
gccagcctctgccttaaaggaaatc

SEQ ID NO: 91999 - DNA, 25 bp, Canis familiaris
gccacctgctggagagaagggaaca

SEQ ID NO: 92000 - DNA, 25 bp, Canis familiaris
gccacccaggcaggagccagagaga

SEQ ID NO: 92001 - DNA, 25 bp, Canis familiaris
gccacttcctgaggagccgatggaa

SEQ ID NO: 92002 - DNA, 25 bp, Canis familiaris
gccacagtccaagcaggcagtgtaa

SEQ ID NO: 92003 - DNA, 25 bp, Canis familiaris
gccactacgccagacgcaatgataa

SEQ ID NO: 92004 - DNA, 25 bp, Canis familiaris
gccacaatagccaaactatagaaaa

SEQ ID NO: 92005 - DNA, 25 bp, Canis familiaris
gccagactagtctactctatcaaag

SEQ ID NO: 92006 - DNA, 25 bp, Canis familiaris
gccaggcatacctcctgtttgagta

SEQ ID NO: 92007 - DNA, 25 bp, Canis familiaris
gccatcaattaacccttttggtact

SEQ ID NO: 92008 - DNA, 25 bp, Canis familiaris
gccactaatacaccttattctggaa

SEQ ID NO: 92009 - DNA, 25 bp, Canis familiaris
gccacaattcaaccattttcctaga

SEQ ID NO: 92010 - DNA, 25 bp, Canis familiaris
gccacaatcacatccattttggtac

SEQ ID NO: 92011 - DNA, 25 bp, Canis familiaris
gctccttaccccagttgtgaactgg

SEQ ID NO: 92012 - DNA, 25 bp, Canis familiaris
gccctttgcaccaggttgccaaggg

SEQ ID NO: 92013 - DNA, 25 bp, Canis familiaris
gcccattcccacaaggttctttggg

SEQ ID NO: 92014 - DNA, 25 bp, Canis familiaris
gccacatctccaaaggggaccattg

SEQ ID NO: 92015 - DNA, 25 bp, Canis familiaris
gccacttccctataggactattgag

SEQ ID NO: 92016 - DNA, 25 bp, Canis familiaris
gccacttccctatagaactaattga

SEQ ID NO: 92017 - DNA, 25 bp, Canis familiaris
gccagccccctgtaagctaaaaata

SEQ ID NO: 92018 - DNA, 25 bp, Canis familiaris
gccacccaactgagcactgaagagc

SEQ ID NO: 92019 - DNA, 25 bp, Canis familiaris
gccacctaagtgggctctggggtac

SEQ ID NO: 92020 - DNA, 25 bp, Canis familiaris
gcccttagtggctcatctggagagg

SEQ ID NO: 92021 - DNA, 25 bp, Canis familiaris
gccactttctggtttagttgaggtt

SEQ ID NO: 92022 - DNA, 25 bp, Canis familiaris
gccacttgtcggttctatgaacata

SEQ ID NO: 92023 - DNA, 25 bp, Canis familiaris
gccacttgtcggagaatgagagcaa

SEQ ID NO: 92024 - DNA, 25 bp, Canis familiaris
gccactattttgttgactatgagaa

SEQ ID NO: 92025 - DNA, 25 bp, Canis familiaris
gccagtttttgctgatacaggtagg

SEQ ID NO: 92026 - DNA, 25 bp, Canis familiaris
gccagttttatccgtaagcaatatt

SEQ ID NO: 92027 - DNA, 25 bp, Canis familiaris
gccgaataatgcacgtttgaataat

SEQ ID NO: 92028 - DNA, 25 bp, Canis familiaris
gccagttgccatctcgtttgaaagc

SEQ ID NO: 92029 - DNA, 25 bp, Canis familiaris
gccagagggccatcctgtataaacg

SEQ ID NO: 92030 - DNA, 25 bp, Canis familiaris
gccagaggccaatccgaataaacgt

SEQ ID NO: 92031 - DNA, 25 bp, Canis familiaris
gccagaggctgacaccagaatggaa

SEQ ID NO: 92032 - DNA, 25 bp, Canis familiaris
gccagagaggaaaccgaaccgagta

SEQ ID NO: 92033 - DNA, 25 bp, Canis familiaris
gccagatgggaagagggtcaaagga

SEQ ID NO: 92034 - DNA, 25 bp, Canis familiaris
gccaggggcacgaagagggccaagg

SEQ ID NO: 92035 - DNA, 25 bp, Canis familiaris
gccagggtcaggaaggacccaaggc

SEQ ID NO: 92036 - DNA, 25 bp, Canis familiaris
gccaggtgagggcacgaccctgggt

SEQ ID NO: 92037 - DNA, 25 bp, Canis familiaris
gccaggagggaggacttccctactg

SEQ ID NO: 92038 - DNA, 25 bp, Canis familiaris
gccaggagggagggtttctctccca

SEQ ID NO: 92039 - DNA, 25 bp, Canis familiaris
gccacataggaaggcgtttgtctct

SEQ ID NO: 92040 - DNA, 25 bp, Canis familiaris
gccaaagcaaaatgttcagttctca

SEQ ID NO: 92041 - DNA, 25 bp, Canis familiaris
gccttcccaagatttttgttctaca

SEQ ID NO: 92042 - DNA, 25 bp, Canis familiaris
gccttggttacagtctttttcttat

SEQ ID NO: 92043 - DNA, 25 bp, Canis familiaris
gccagtcgttgggttattttgcctt

SEQ ID NO: 92044 - DNA, 25 bp, Canis familiaris
gccagtctgccgtggtgcagtttac

SEQ ID NO: 92045 - DNA, 25 bp, Canis familiaris
gccacatctgccatctggatgtttg

SEQ ID NO: 92046 - DNA, 25 bp, Canis familiaris
gccactctacagactgagatttcta

SEQ ID NO: 92047 - DNA, 25 bp, Canis familiaris
gccacgcagatccagcaggaggtta

SEQ ID NO: 92048 - DNA, 25 bp, Canis familiaris
gccacatgcagtcgcagctatggag

SEQ ID NO: 92049 - DNA, 25 bp, Canis familiaris
gccagctatgtgcagctcatgtgtc

SEQ ID NO: 92050 - DNA, 25 bp, Canis familiaris
gccagattgtgctgatcatttccaa

SEQ ID NO: 92051 - DNA, 25 bp, Canis familiaris
gccactttcaagattttaacttctc

SEQ ID NO: 92052 - DNA, 25 bp, Canis familiaris
gccacattacacttctattatacac

SEQ ID NO: 92053 - DNA, 25 bp, Canis familiaris
gccacgtacatgttgtattttctct

SEQ ID NO: 92054 - DNA, 25 bp, Canis familiaris
gccacgccagacttggtttgatctc

SEQ ID NO: 92055 - DNA, 25 bp, Canis familiaris
gccacacggagcttgcagattcgtt

SEQ ID NO: 92056 - DNA, 25 bp, Canis familiaris
gccacacaagacgaggtgtctgctt

SEQ ID NO: 92057 - DNA, 25 bp, Canis familiaris
gccactgaagatctggtgtcgccat

SEQ ID NO: 92058 - DNA, 25 bp, Canis familiaris
gccactcaagtcatcgttgcaggtg

SEQ ID NO: 92059 - DNA, 25 bp, Canis familiaris
gccactaagtttgtctgagcatgta

SEQ ID NO: 92060 - DNA, 25 bp, Canis familiaris
gccagctaaagttgatttgtgccta

SEQ ID NO: 92061 - DNA, 25 bp, Canis familiaris
gccagtgcaaagttctgactgagca

SEQ ID NO: 92062 - DNA, 25 bp, Canis familiaris
gccagactagcactgtcatgggagc

SEQ ID NO: 92063 - DNA, 25 bp, Canis familiaris
gccatgactcccgacataggctttt

SEQ ID NO: 92064 - DNA, 25 bp, Canis familiaris
gccagaatccccttgagatcagtgc

SEQ ID NO: 92065 - DNA, 25 bp, Canis familiaris
gccagatccccttatatatcattgc

SEQ ID NO: 92066 - DNA, 25 bp, Canis familiaris
gccagcccctctgtgtgctcagcgc

SEQ ID NO: 92067 - DNA, 25 bp, Canis familiaris
gccaccgtcactgtgctgtgatggc

SEQ ID NO: 92068 - DNA, 25 bp, Canis familiaris
gccacgcgtaatgtcttgcacgatt

SEQ ID NO: 92069 - DNA, 25 bp, Canis familiaris
gccacggagaagatcactgccagtt

SEQ ID NO: 92070 - DNA, 25 bp, Canis familiaris
gccagggtaagaatcccagatgtat

SEQ ID NO: 92071 - DNA, 25 bp, Canis familiaris
gccaggtaaacatttgctcattatt

SEQ ID NO: 92072 - DNA, 25 bp, Canis familiaris
gccagttgaactttttatcatgatt

SEQ ID NO: 92073 - DNA, 25 bp, Canis familiaris
gccagaggtacttcctcaatcacat

SEQ ID NO: 92074 - DNA, 25 bp, Canis familiaris
gccagcatttcgatcctcgtcaggt

SEQ ID NO: 92075 - DNA, 25 bp, Canis familiaris
gccagtatctcagaccccaatggct

SEQ ID NO: 92076 - DNA, 25 bp, Canis familiaris
gccatttccaggtatcccattgggc

SEQ ID NO: 92077 - DNA, 25 bp, Canis familiaris
gccagttctagggattctcagttga

SEQ ID NO: 92078 - DNA, 25 bp, Canis familiaris
gccactcctagctcttagaggctac

SEQ ID NO: 92079 - DNA, 25 bp, Canis familiaris
gccacatcctagcattctaaggcca

SEQ ID NO: 92080 - DNA, 25 bp, Canis familiaris
gccacatccagtttttaagtccatt

SEQ ID NO: 92081 - DNA, 25 bp, Canis familiaris
gccacatctcatgttttgggcacca

SEQ ID NO: 92082 - DNA, 25 bp, Canis familiaris
gcccttccttattctgggaaaagag

SEQ ID NO: 92083 - DNA, 25 bp, Canis familiaris
gcctttcctttcctttagcaataag

SEQ ID NO: 92084 - DNA, 25 bp, Canis familiaris
gcctttccttttcccaagaaggctg

SEQ ID NO: 92085 - DNA, 25 bp, Canis familiaris
gccttcctattagtccttagtaagc

SEQ ID NO: 92086 - DNA, 25 bp, Canis familiaris
gccttcctcattatcagaaattaaa

SEQ ID NO: 92087 - DNA, 25 bp, Canis familiaris
tgccggacacggagccaacttaaaa

SEQ ID NO: 92088 - DNA, 25 bp, Canis familiaris
gccttgaaaagggctccctgctcag

SEQ ID NO: 92089 - DNA, 25 bp, Canis familiaris
gccatatgactaaggctcggccagt

SEQ ID NO: 92090 - DNA, 25 bp, Canis familiaris
gccatgataccatcagtttgcctga

SEQ ID NO: 92091 - DNA, 25 bp, Canis familiaris
gccagcagcaaattatgtttcctga

SEQ ID NO: 92092 - DNA, 25 bp, Canis familiaris
gccaggccaagttgtgttaagaccg

SEQ ID NO: 92093 - DNA, 25 bp, Canis familiaris
gcctagccacgtttgccaaaagtat

SEQ ID NO: 92094 - DNA, 25 bp, Canis familiaris
gcctcccactggctccaataaaatt

SEQ ID NO: 92095 - DNA, 25 bp, Canis familiaris
gccattccctggcctagaattagtt

SEQ ID NO: 92096 - DNA, 25 bp, Canis familiaris
gccagccaggtgccctgagatattc

SEQ ID NO: 92097 - DNA, 25 bp, Canis familiaris
gccatccaagggtagagcatattcg

SEQ ID NO: 92098 - DNA, 25 bp, Canis familiaris
gccacccgagattgagcaataacag

SEQ ID NO: 92099 - DNA, 25 bp, Canis familiaris
gccaccatctgagcaggcctgagac

SEQ ID NO: 92100 - DNA, 25 bp, Canis familiaris
gccaccatatatgcacagactacac

SEQ ID NO: 92101 - DNA, 25 bp, Canis familiaris
gccgcaaaggcagcaggctaccgga

SEQ ID NO: 92102 - DNA, 25 bp, Canis familiaris
gccggatatggagggcctacttgtg

SEQ ID NO: 92103 - DNA, 25 bp, Canis familiaris
gccatggaaggaggtggggccttaa

SEQ ID NO: 92104 - DNA, 25 bp, Canis familiaris
gccagtgaggggtcattgcaggcct

SEQ ID NO: 92105 - DNA, 25 bp, Canis familiaris
gccagtagtgaggacttggcgcctc

SEQ ID NO: 92106 - DNA, 25 bp, Canis familiaris
gccagaatggaggccagtggaggcc

SEQ ID NO: 92107 - DNA, 25 bp, Canis familiaris
gccagagatccagtgcgtgtcggcc

SEQ ID NO: 92108 - DNA, 25 bp, Canis familiaris
gccactgaccaccaggtagacagcg

SEQ ID NO: 92109 - DNA, 25 bp, Canis familiaris
gccagctgttcccggaagtcctggc

SEQ ID NO: 92110 - DNA, 25 bp, Canis familiaris
gccagctgttcccttgaaggctaaa

SEQ ID NO: 92111 - DNA, 25 bp, Canis familiaris
gcgccgaaagaccagaagcctaaga

SEQ ID NO: 92112 - DNA, 25 bp, Canis familiaris
gccacgaaagagtaaagcccctgtt

SEQ ID NO: 92113 - DNA, 25 bp, Canis familiaris
gccacgagaaaggagaagcccacag

SEQ ID NO: 92114 - DNA, 25 bp, Canis familiaris
gccaccgaagacgaacctcagaatg

SEQ ID NO: 92115 - DNA, 25 bp, Canis familiaris
gccagccgcataggaaaccctgaag

SEQ ID NO: 92116 - DNA, 25 bp, Canis familiaris
gccagccagcacgtgtaacctggat

SEQ ID NO: 92117 - DNA, 25 bp, Canis familiaris
gccagctcgcaagtttggcgcgtga

SEQ ID NO: 92118 - DNA, 25 bp, Canis familiaris
gccagctcacaaggtgtgtcctggt

SEQ ID NO: 92119 - DNA, 25 bp, Canis familiaris
gccactcaggaagtgctgtccgggt

SEQ ID NO: 92120 - DNA, 25 bp, Canis familiaris
gccagcatcaaatgtgtgcccgggc

SEQ ID NO: 92121 - DNA, 25 bp, Canis familiaris
gccatgatgccaagacaggcacggg

SEQ ID NO: 92122 - DNA, 25 bp, Canis familiaris
gccatgtgccaaaagcaggacggtc

SEQ ID NO: 92123 - DNA, 25 bp, Canis familiaris
gccagcgtcaactacgatgactact

SEQ ID NO: 92124 - DNA, 25 bp, Canis familiaris
gccacgtggtcctgagagctgacca

SEQ ID NO: 92125 - DNA, 25 bp, Canis familiaris
gccacagctcttcaagaattgatgc

SEQ ID NO: 92126 - DNA, 25 bp, Canis familiaris
gccacagctctccagagtgcaagga

SEQ ID NO: 92127 - DNA, 25 bp, Canis familiaris
gccacaggctcaaaccaaggccagg

SEQ ID NO: 92128 - DNA, 25 bp, Canis familiaris
gccacaggctcaagacgcaaggtgt

SEQ ID NO: 92129 - DNA, 25 bp, Canis familiaris
gccacaggtctaagagcacaggtgt

SEQ ID NO: 92130 - DNA, 25 bp, Canis familiaris
gccacatgtggcaatggagcacctg

SEQ ID NO: 92131 - DNA, 25 bp, Canis familiaris
gccagctggtcgtggacctgaactt

SEQ ID NO: 92132 - DNA, 25 bp, Canis familiaris
gccacatggctttgaaacccacact

SEQ ID NO: 92133 - DNA, 25 bp, Canis familiaris
gccacaagtctaaaaccaccacagt

SEQ ID NO: 92134 - DNA, 25 bp, Canis familiaris
gccagaagatctgtgaacccctggg

SEQ ID NO: 92135 - DNA, 25 bp, Canis familiaris
gccacaagccctcaagaccaatggg

SEQ ID NO: 92136 - DNA, 25 bp, Canis familiaris
gccacctcctgtcatggacaagagg

SEQ ID NO: 92137 - DNA, 25 bp, Canis familiaris
gccaccttctacggagagcaagtgg

SEQ ID NO: 92138 - DNA, 25 bp, Canis familiaris
gccacatctacaacctggtcagggc

SEQ ID NO: 92139 - DNA, 25 bp, Canis familiaris
gccacactctcagccagaggaggaa

SEQ ID NO: 92140 - DNA, 25 bp, Canis familiaris
gccacctgccagactcatgtgaggc

SEQ ID NO: 92141 - DNA, 25 bp, Canis familiaris
gccaccagccatgcctaggagctgg

SEQ ID NO: 92142 - DNA, 25 bp, Canis familiaris
gccaccccatcacgctaaagatgaa

SEQ ID NO: 92143 - DNA, 25 bp, Canis familiaris
gccacacacaccagttcacatgtga

SEQ ID NO: 92144 - DNA, 25 bp, Canis familiaris
gccacacctccaaaacatttgagca

SEQ ID NO: 92145 - DNA, 25 bp, Canis familiaris
gccacatcgcctacaagaactggga

SEQ ID NO: 92146 - DNA, 25 bp, Canis familiaris
gccaccctacagggaactgctggaa

SEQ ID NO: 92147 - DNA, 25 bp, Canis familiaris
gccttcggtcctggaacttggctaa

SEQ ID NO: 92148 - DNA, 25 bp, Canis familiaris
tgcctttttccagaacttcctgtag

SEQ ID NO: 92149 - DNA, 25 bp, Canis familiaris
gccttcttaatagagatttcctgga

SEQ ID NO: 92150 - DNA, 25 bp, Canis familiaris
gccttgcttctctcagaggttttgg

SEQ ID NO: 92151 - DNA, 25 bp, Canis familiaris
gccaggttccaggggagttttcagc

SEQ ID NO: 92152 - DNA, 25 bp, Canis familiaris
gccagggtccaggggagttttcagc

SEQ ID NO: 92153 - DNA, 25 bp, Canis familiaris
gccagggtccaggggagttttcagc

SEQ ID NO: 92154 - DNA, 25 bp, Canis familiaris
gccagggtccaggggagttttcagc

SEQ ID NO: 92155 - DNA, 25 bp, Canis familiaris
gccagggtccaggggagttttcagc

SEQ ID NO: 92156 - DNA, 25 bp, Canis familiaris
gccagggtccaggggagttttcagc

SEQ ID NO: 92157 - DNA, 25 bp, Canis familiaris
gccagggcgcgaagaggtttttgct

SEQ ID NO: 92158 - DNA, 25 bp, Canis familiaris
gccagggctggatgggctttgtgga

SEQ ID NO: 92159 - DNA, 25 bp, Canis familiaris
gccaggccacaatgctcctggtgtg

SEQ ID NO: 92160 - DNA, 25 bp, Canis familiaris
gccagagccatcaaggcttgccgct

SEQ ID NO: 92161 - DNA, 25 bp, Canis familiaris
gccagaccattgaattggaggcttc

SEQ ID NO: 92162 - DNA, 25 bp, Canis familiaris
gccagacgactatcaggagctcagt

SEQ ID NO: 92163 - DNA, 25 bp, Canis familiaris
gccagcatctaaaaagacagccatg

SEQ ID NO: 92164 - DNA, 25 bp, Canis familiaris
gccacatgcaaggcacaagacacct

SEQ ID NO: 92165 - DNA, 25 bp, Canis familiaris
gccacatgaagggatcaagccactg

SEQ ID NO: 92166 - DNA, 25 bp, Canis familiaris
gcctaggacttgtcagagccctgac

SEQ ID NO: 92167 - DNA, 25 bp, Canis familiaris
gccattggcaccatcaagaccaagc

SEQ ID NO: 92168 - DNA, 25 bp, Canis familiaris
gccacccagctaaaaaccatcagtt

SEQ ID NO: 92169 - DNA, 25 bp, Canis familiaris
gccacttcagcttggaaacttataa

SEQ ID NO: 92170 - DNA, 25 bp, Canis familiaris
gccagcaatcaataaaacgtacaag

SEQ ID NO: 92171 - DNA, 25 bp, Canis familiaris
gccagataacaagaacacccacaca

SEQ ID NO: 92172 - DNA, 25 bp, Canis familiaris
gccttcatatagtgaacttcccaac

SEQ ID NO: 92173 - DNA, 25 bp, Canis familiaris
gccaccaattagcaatgtgtccccc

SEQ ID NO: 92174 - DNA, 25 bp, Canis familiaris
gccaccaatgatactgaagctatga

SEQ ID NO: 92175 - DNA, 25 bp, Canis familiaris
gccacgcaagatataacacagcacc

SEQ ID NO: 92176 - DNA, 25 bp, Canis familiaris
gccagcaattgtaacacaccagccc

SEQ ID NO: 92177 - DNA, 25 bp, Canis familiaris
gccagaattgttcccatgaatgcat

SEQ ID NO: 92178 - DNA, 25 bp, Canis familiaris
gccagcaacttgctcaagaagcctg

SEQ ID NO: 92179 - DNA, 25 bp, Canis familiaris
gccacccattgttcagatgaagctt

SEQ ID NO: 92180 - DNA, 25 bp, Canis familiaris
gccatcctctgactcaagaaactgt

SEQ ID NO: 92181 - DNA, 25 bp, Canis familiaris
gccaccttgttgggcaagttgttag

SEQ ID NO: 92182 - DNA, 25 bp, Canis familiaris
gccacgcttgtgtctggtagttgtc

SEQ ID NO: 92183 - DNA, 25 bp, Canis familiaris
gccacgttgtatccggatagtctcc

SEQ ID NO: 92184 - DNA, 25 bp, Canis familiaris
gccacagttttgccaagctagtcct

SEQ ID NO: 92185 - DNA, 25 bp, Canis familiaris
gccacaggtggtccacagggtcagc

SEQ ID NO: 92186 - DNA, 25 bp, Canis familiaris
gccacctggagtccacgggaggaaa

SEQ ID NO: 92187 - DNA, 25 bp, Canis familiaris
gccacggagagtcatcgagcgaggt

SEQ ID NO: 92188 - DNA, 25 bp, Canis familiaris
gccactgaggagttcatcaagcggg

SEQ ID NO: 92189 - DNA, 25 bp, Canis familiaris
gccactgattaattgcatcattgtt

SEQ ID NO: 92190 - DNA, 25 bp, Canis familiaris
gccagcgaccaccattatgatgtat

SEQ ID NO: 92191 - DNA, 25 bp, Canis familiaris
gccacgcagccccagaaatggaaac

SEQ ID NO: 92192 - DNA, 25 bp, Canis familiaris
gccagcgacggccaggacaaaaaat

SEQ ID NO: 92193 - DNA, 25 bp, Canis familiaris
gccagtgcctggtggtcagaagagg

SEQ ID NO: 92194 - DNA, 25 bp, Canis familiaris
gccagccgggtgccttagaaggaag

SEQ ID NO: 92195 - DNA, 25 bp, Canis familiaris
gccagccggggggagaggaggcacc

SEQ ID NO: 92196 - DNA, 25 bp, Canis familiaris
gccacggcgcggatgaggaaggcca

SEQ ID NO: 92197 - DNA, 25 bp, Canis familiaris
gccacagggttgagaggccaggctc

SEQ ID NO: 92198 - DNA, 25 bp, Canis familiaris
gccacaggtggactcgagtccctgt

SEQ ID NO: 92199 - DNA, 25 bp, Canis familiaris
gccactggggaggcaatgtcctggg

SEQ ID NO: 92200 - DNA, 25 bp, Canis familiaris
gccactggggaggcaatgtcctggg

SEQ ID NO: 92201 - DNA, 25 bp, Canis familiaris
gccactggggaggcaatgtcctggg

SEQ ID NO: 92202 - DNA, 25 bp, Canis familiaris
gccacgtttcacgagattctctttt

SEQ ID NO: 92203 - DNA, 25 bp, Canis familiaris
gccagctttgcttctagaattgctt

SEQ ID NO: 92204 - DNA, 25 bp, Canis familiaris
gccaccttctcagtgagacctgtgt

SEQ ID NO: 92205 - DNA, 25 bp, Canis familiaris
gccactgccagctctgtacagtgtg

SEQ ID NO: 92206 - DNA, 25 bp, Canis familiaris
gccacgagcctattattcagtgtga

SEQ ID NO: 92207 - DNA, 25 bp, Canis familiaris
gccatctacctgaaaacagtgagat

SEQ ID NO: 92208 - DNA, 25 bp, Canis familiaris
gccactaccagatcagcgaggagtc

SEQ ID NO: 92209 - DNA, 25 bp, Canis familiaris
gccactgaccatcatcctggtcatg

SEQ ID NO: 92210 - DNA, 25 bp, Canis familiaris
gccatctgcctgtgaggtggtcatc

SEQ ID NO: 92211 - DNA, 25 bp, Canis familiaris
gccactcactgatcagaggcagacc

SEQ ID NO: 92212 - DNA, 25 bp, Canis familiaris
gccagtcagccttcgagatggtctc

SEQ ID NO: 92213 - DNA, 25 bp, Canis familiaris
gccaggatggcattctgtctggccc

SEQ ID NO: 92214 - DNA, 25 bp, Canis familiaris
gccagcaaggcattcctggcatccc

SEQ ID NO: 92215 - DNA, 25 bp, Canis familiaris
gccaggagcagagtgcctgacaccc

SEQ ID NO: 92216 - DNA, 25 bp, Canis familiaris
gccaggaaaatcgtgtcctgccgca

SEQ ID NO: 92217 - DNA, 25 bp, Canis familiaris
gccaggaaggcctggccgggactgc

SEQ ID NO: 92218 - DNA, 25 bp, Canis familiaris
gccaggagaccggggctcagtggtc

SEQ ID NO: 92219 - DNA, 25 bp, Canis familiaris
gccagaagtgaccgttgtcagtgca

SEQ ID NO: 92220 - DNA, 25 bp, Canis familiaris
gccagaacatcacggtggtcctgca

SEQ ID NO: 92221 - DNA, 25 bp, Canis familiaris
gccagacagccatggtggcagcctg

SEQ ID NO: 92222 - DNA, 25 bp, Canis familiaris
gccatgaccaacgggcgatctatgt

SEQ ID NO: 92223 - DNA, 25 bp, Canis familiaris
gcctgacaaacgggcgactactcca

SEQ ID NO: 92224 - DNA, 25 bp, Canis familiaris
gcctgaaggaatccgggtacccaca

SEQ ID NO: 92225 - DNA, 25 bp, Canis familiaris
gcctaaagcaaagagcgtccccagc

SEQ ID NO: 92226 - DNA, 25 bp, Canis familiaris
gccataaagcaggaaacccccgagg

SEQ ID NO: 92227 - DNA, 25 bp, Canis familiaris
gccataagaagtacccgatccttga

SEQ ID NO: 92228 - DNA, 25 bp, Canis familiaris
gccataagaatgtacccgaccttga

SEQ ID NO: 92229 - DNA, 25 bp, Canis familiaris
gccatagtgaatttccatcccggga

SEQ ID NO: 92230 - DNA, 25 bp, Canis familiaris
gcctgaggaaaccctgtctcaagga

SEQ ID NO: 92231 - DNA, 25 bp, Canis familiaris
gccagactttaaccagattcgcagg

SEQ ID NO: 92232 - DNA, 25 bp, Canis familiaris
gccaccttttgccggattcaatggg

SEQ ID NO: 92233 - DNA, 25 bp, Canis familiaris
gccatcctgtataaacgtctcaagg

SEQ ID NO: 92234 - DNA, 25 bp, Canis familiaris
gccttcgtgtacgggatccaagctt

SEQ ID NO: 92235 - DNA, 25 bp, Canis familiaris
gccagggagttcaggatccaagctc

SEQ ID NO: 92236 - DNA, 25 bp, Canis familiaris
gccataggaattgagagaccaagac

SEQ ID NO: 92237 - DNA, 25 bp, Canis familiaris
gactaagacatcagagaagaaaggt

SEQ ID NO: 92238 - DNA, 25 bp, Canis familiaris
gccttagcccggcaaaaaggctact

SEQ ID NO: 92239 - DNA, 25 bp, Canis familiaris
gcctatactcccgtgtgaaattgtt

SEQ ID NO: 92240 - DNA, 25 bp, Canis familiaris
gccagaatctcctgggctagatttt

SEQ ID NO: 92241 - DNA, 25 bp, Canis familiaris
gccagcaaccctcgggtaatgtcca

SEQ ID NO: 92242 - DNA, 25 bp, Canis familiaris
gccgtaccctttgttatgtgcaatg

SEQ ID NO: 92243 - DNA, 25 bp, Canis familiaris
gcggatcacccttttttgttggtgg

SEQ ID NO: 92244 - DNA, 25 bp, Canis familiaris
gccagtcccttgtttatggttggac

SEQ ID NO: 92245 - DNA, 25 bp, Canis familiaris
gccagaaccttttttgaatttgcct

SEQ ID NO: 92246 - DNA, 25 bp, Canis familiaris
gccactctccattttcttgaaattc

SEQ ID NO: 92247 - DNA, 25 bp, Canis familiaris
gccactggcatatattccgtactcc

SEQ ID NO: 92248 - DNA, 25 bp, Canis familiaris
gccattcctagtaaccaggttcctg

SEQ ID NO: 92249 - DNA, 25 bp, Canis familiaris
gctcggtctagttgatccggttccg

SEQ ID NO: 92250 - DNA, 25 bp, Canis familiaris
gcctggataatgcttccgccttcca

SEQ ID NO: 92251 - DNA, 25 bp, Canis familiaris
gccagtgattatgattcgatgctct

SEQ ID NO: 92252 - DNA, 25 bp, Canis familiaris
gccagtgaaatgcgggacttgccaa

SEQ ID NO: 92253 - DNA, 25 bp, Canis familiaris
gccatggaaatgagttcatctcgta

SEQ ID NO: 92254 - DNA, 25 bp, Canis familiaris
gccatgtaacagaaattactgcttg

SEQ ID NO: 92255 - DNA, 25 bp, Canis familiaris
gccttacacgtaagtttgcttacct

SEQ ID NO: 92256 - DNA, 25 bp, Canis familiaris
gcctaacagctttttgtttgttcat

SEQ ID NO: 92257 - DNA, 25 bp, Canis familiaris
gccagacctctgaatttgtattttt

SEQ ID NO: 92258 - DNA, 25 bp, Canis familiaris
gccacgctgctggcaagttgcatga

SEQ ID NO: 92259 - DNA, 25 bp, Canis familiaris
gccacgtgtcatcagcattaacatg

SEQ ID NO: 92260 - DNA, 25 bp, Canis familiaris
gccactgtatatctaatgagcactg

SEQ ID NO: 92261 - DNA, 25 bp, Canis familiaris
gccatggtaatcctgctcagtacga

SEQ ID NO: 92262 - DNA, 25 bp, Canis familiaris
gccagagtgcaaacctagctcaaca

SEQ ID NO: 92263 - DNA, 25 bp, Canis familiaris
gccactgtcagaattctgagccaat

SEQ ID NO: 92264 - DNA, 25 bp, Canis familiaris
gccaggtcatcaccattggcaatga

SEQ ID NO: 92265 - DNA, 25 bp, Canis familiaris
gcctaatatacctgtgcaaacaatc

SEQ ID NO: 92266 - DNA, 25 bp, Canis familiaris
gcctcacttacttgccaaaatagcc

SEQ ID NO: 92267 - DNA, 25 bp, Canis familiaris
gccagcctactttgccaaaagtgcc

SEQ ID NO: 92268 - DNA, 25 bp, Canis familiaris
gccagactgcttttccataaactag

SEQ ID NO: 92269 - DNA, 25 bp, Canis familiaris
gccaggacttttttaaatctcagag

SEQ ID NO: 92270 - DNA, 25 bp, Canis familiaris
gccaggatggttaggtacacccagg

SEQ ID NO: 92271 - DNA, 25 bp, Canis familiaris
gccagacaggcttatggttcacccc

SEQ ID NO: 92272 - DNA, 25 bp, Canis familiaris
gccagtcatggccaaggttaacaaa

SEQ ID NO: 92273 - DNA, 25 bp, Canis familiaris
gccagatttgtgaggcttgctaata

SEQ ID NO: 92274 - DNA, 25 bp, Canis familiaris
gccagcaattagcgccagtgtagaa

SEQ ID NO: 92275 - DNA, 25 bp, Canis familiaris
gccagcagctatttggggctgatta

SEQ ID NO: 92276 - DNA, 25 bp, Canis familiaris
gccacctgtttgtgtcggattttgc

SEQ ID NO: 92277 - DNA, 25 bp, Canis familiaris
gccaccttttcaagtggaatccact

SEQ ID NO: 92278 - DNA, 25 bp, Canis familiaris
gccacctgctcatacagggaagcct

SEQ ID NO: 92279 - DNA, 25 bp, Canis familiaris
gccagggctcatgaagtgtcaagct

SEQ ID NO: 92280 - DNA, 25 bp, Canis familiaris
gccagggtctgctttgtggaacaga

SEQ ID NO: 92281 - DNA, 25 bp, Canis familiaris
gccagccaggctctactgggaagct

SEQ ID NO: 92282 - DNA, 25 bp, Canis familiaris
gccacgcagacgtacagcttggaac

SEQ ID NO: 92283 - DNA, 25 bp, Canis familiaris
gccaccatgccgtaagatgaatgtg

SEQ ID NO: 92284 - DNA, 25 bp, Canis familiaris
gccaccaccgtgtctgagatcgtgg

SEQ ID NO: 92285 - DNA, 25 bp, Canis familiaris
gccaccagggagttgctgatcaggg

SEQ ID NO: 92286 - DNA, 25 bp, Canis familiaris
gccactgcagtggtggtggtgaagg

SEQ ID NO: 92287 - DNA, 25 bp, Canis familiaris
gccagcacagtgcccagggtgaaag

SEQ ID NO: 92288 - DNA, 25 bp, Canis familiaris
gccagccagtgcccgaggccaggaa

SEQ ID NO: 92289 - DNA, 25 bp, Canis familiaris
gccagccagagcgagctgggcctgc

SEQ ID NO: 92290 - DNA, 25 bp, Canis familiaris
gccaccaaggagagcgcctctgtgg

SEQ ID NO: 92291 - DNA, 25 bp, Canis familiaris
gccacctgaggaagacccatcggcg

SEQ ID NO: 92292 - DNA, 25 bp, Canis familiaris
gccagaatggagatgaccccttgct

SEQ ID NO: 92293 - DNA, 25 bp, Canis familiaris
gccaggatggagacgagccaccagc

SEQ ID NO: 92294 - DNA, 25 bp, Canis familiaris
gccagagtgtggacgagctcttcca

SEQ ID NO: 92295 - DNA, 25 bp, Canis familiaris
gccagagggtgaacagctgcttgcc

SEQ ID NO: 92296 - DNA, 25 bp, Canis familiaris
gccagatgtggcaagatcaccatta

SEQ ID NO: 92297 - DNA, 25 bp, Canis familiaris
gccagagaggctgatgctgcactgt

SEQ ID NO: 92298 - DNA, 25 bp, Canis familiaris
gccagaagttacctgcctctgagtc

SEQ ID NO: 92299 - DNA, 25 bp, Canis familiaris
gccatctttgcatattccttgagtc

SEQ ID NO: 92300 - DNA, 25 bp, Canis familiaris
gccattgagcatcattcccttggcc

SEQ ID NO: 92301 - DNA, 25 bp, Canis familiaris
gccttactaattaccttgtagcctt

SEQ ID NO: 92302 - DNA, 25 bp, Canis familiaris
gccattactcaaatgaccctcttgc

SEQ ID NO: 92303 - DNA, 25 bp, Canis familiaris
gccattgaccgagtgaccacttctg

SEQ ID NO: 92304 - DNA, 25 bp, Canis familiaris
gccttggcatatgaacacctgttgt

SEQ ID NO: 92305 - DNA, 25 bp, Canis familiaris
gccacgtctgcaggagcacacgtgc

SEQ ID NO: 92306 - DNA, 25 bp, Canis familiaris
gccagagccgcagatgacaaggcgg

SEQ ID NO: 92307 - DNA, 25 bp, Canis familiaris
gccagcctcgccggacagggctggc

SEQ ID NO: 92308 - DNA, 25 bp, Canis familiaris
gccagctacgcctgaatgttgttcc

SEQ ID NO: 92309 - DNA, 25 bp, Canis familiaris
gccacctagcctgaagttgatccgc

SEQ ID NO: 92310 - DNA, 25 bp, Canis familiaris
gccacctggatttcacggattacac

SEQ ID NO: 92311 - DNA, 25 bp, Canis familiaris
gccacctggatttcacggattacac

SEQ ID NO: 92312 - DNA, 25 bp, Canis familiaris
gccacctggatttcacggattacac

SEQ ID NO: 92313 - DNA, 25 bp, Canis familiaris
gccatcgtggatacctaattgtaca

SEQ ID NO: 92314 - DNA, 25 bp, Canis familiaris
gccacgcggttctataacgtcagct

SEQ ID NO: 92315 - DNA, 25 bp, Canis familiaris
gccaccgaggtccaaaccatgaaat

SEQ ID NO: 92316 - DNA, 25 bp, Canis familiaris
gccaccgaggagatctacctgacac

SEQ ID NO: 92317 - DNA, 25 bp, Canis familiaris
gcctccggtagtgcagaccagaagc

SEQ ID NO: 92318 - DNA, 25 bp, Canis familiaris
gccacgctgtcaagtgaagactagc

SEQ ID NO: 92319 - DNA, 25 bp, Canis familiaris
gccaggtgctcaagataagttccat

SEQ ID NO: 92320 - DNA, 25 bp, Canis familiaris
gccatggtgctataaagtcctcgcc

SEQ ID NO: 92321 - DNA, 25 bp, Canis familiaris
gccagccctaaaataagcgtgcgcc

SEQ ID NO: 92322 - DNA, 25 bp, Canis familiaris
gccaccggagtagagatgctgtccc

SEQ ID NO: 92323 - DNA, 25 bp, Canis familiaris
gccaccaaggaagtgactccagccc

SEQ ID NO: 92324 - DNA, 25 bp, Canis familiaris
gccacggggtcaggaccaacacatc

SEQ ID NO: 92325 - DNA, 25 bp, Canis familiaris
gccatggaggtggcggagcccaaca

SEQ ID NO: 92326 - DNA, 25 bp, Canis familiaris
gccaggaactctgtacgtgtacatc

SEQ ID NO: 92327 - DNA, 25 bp, Canis familiaris
gccagtgcatgacctgactatcggt

SEQ ID NO: 92328 - DNA, 25 bp, Canis familiaris
gccacctggacatcatctgggtgaa

SEQ ID NO: 92329 - DNA, 25 bp, Canis familiaris
gccagctctaacgcctgggatgacg

SEQ ID NO: 92330 - DNA, 25 bp, Canis familiaris
gccacgcaaagcacgctgaatgatg

SEQ ID NO: 92331 - DNA, 25 bp, Canis familiaris
gccagcgccaagctctgggatgtgc

SEQ ID NO: 92332 - DNA, 25 bp, Canis familiaris
gccacccagaagactgtggatggcc

SEQ ID NO: 92333 - DNA, 25 bp, Canis familiaris
gccacccgacaggctggtataagga

SEQ ID NO: 92334 - DNA, 25 bp, Canis familiaris
gccaccactgggcttctaaagtggg

SEQ ID NO: 92335 - DNA, 25 bp, Canis familiaris
gccatcctagcttcgtcttaaagtg

SEQ ID NO: 92336 - DNA, 25 bp, Canis familiaris
gccgagctggtttgtcgtaagactt

SEQ ID NO: 92337 - DNA, 25 bp, Canis familiaris
gccagcatttgtaaggctaaacctt

SEQ ID NO: 92338 - DNA, 25 bp, Canis familiaris
gccatgaccattatgactaaatcct

SEQ ID NO: 92339 - DNA, 25 bp, Canis familiaris
gccagatgcaatagaaattagacca

SEQ ID NO: 92340 - DNA, 25 bp, Canis familiaris
gccaccgtgcagtatatctgcgacc

SEQ ID NO: 92341 - DNA, 25 bp, Canis familiaris
gccacctggcagtcttatgatgatc

SEQ ID NO: 92342 - DNA, 25 bp, Canis familiaris
gccacctggggttgcagagacactc

SEQ ID NO: 92343 - DNA, 25 bp, Canis familiaris
gccagccataggaattgagagacca

SEQ ID NO: 92344 - DNA, 25 bp, Canis familiaris
gccagccaggagaatatgacagcgc

SEQ ID NO: 92345 - DNA, 25 bp, Canis familiaris
gccagcctgcggaatgcaactctgg

SEQ ID NO: 92346 - DNA, 25 bp, Canis familiaris
gccagttctgagaaacagtcagggt

SEQ ID NO: 92347 - DNA, 25 bp, Canis familiaris
gccagcggtgcaaatccatgtgggg

SEQ ID NO: 92348 - DNA, 25 bp, Canis familiaris
gccagccaggcatacctgtgtgtgt

SEQ ID NO: 92349 - DNA, 25 bp, Canis familiaris
gccagccagatcaacctgagtgtgg

SEQ ID NO: 92350 - DNA, 25 bp, Canis familiaris
gccaggtgatggtctctgtgtgtgg

SEQ ID NO: 92351 - DNA, 25 bp, Canis familiaris
gccagagaactctttgctgcatgta

SEQ ID NO: 92352 - DNA, 25 bp, Canis familiaris
gccagagaactcttctggaaccctt

SEQ ID NO: 92353 - DNA, 25 bp, Canis familiaris
gcctataaccttagtgacagcccta

SEQ ID NO: 92354 - DNA, 25 bp, Canis familiaris
gcctatacacagtttggaggaaaac

SEQ ID NO: 92355 - DNA, 25 bp, Canis familiaris
gccttccacgagattgagagaatta

SEQ ID NO: 92356 - DNA, 25 bp, Canis familiaris
gccttatcctgtgtctagaaaatat

SEQ ID NO: 92357 - DNA, 25 bp, Canis familiaris
gccttaccgctggctcaggaagagc

SEQ ID NO: 92358 - DNA, 25 bp, Canis familiaris
gccagtgatcgacacagctctttgt

SEQ ID NO: 92359 - DNA, 25 bp, Canis familiaris
gccaggtctgaccaggtggtggact

SEQ ID NO: 92360 - DNA, 25 bp, Canis familiaris
gccaggtgcataaagcgacgcggac

SEQ ID NO: 92361 - DNA, 25 bp, Canis familiaris
gccagtctcataacaaatccgaaca

SEQ ID NO: 92362 - DNA, 25 bp, Canis familiaris
gccagctctaccataaccagagtca

SEQ ID NO: 92363 - DNA, 25 bp, Canis familiaris
gccagctataccagaggtcaggaga

SEQ ID NO: 92364 - DNA, 25 bp, Canis familiaris
gccagctatacaggggcgcacaggc

SEQ ID NO: 92365 - DNA, 25 bp, Canis familiaris
gccacctccagggagcagcaggagc

SEQ ID NO: 92366 - DNA, 25 bp, Canis familiaris
gccagccacacatagagagagacac

SEQ ID NO: 92367 - DNA, 25 bp, Canis familiaris
gccatgcacacatcataaggatacc

SEQ ID NO: 92368 - DNA, 25 bp, Canis familiaris
gccatgccagcatctgaagaactac

SEQ ID NO: 92369 - DNA, 25 bp, Canis familiaris
gccagcaacaaattcaaatctcatt

SEQ ID NO: 92370 - DNA, 25 bp, Canis familiaris
gccagctaaaagtttttctactcag

SEQ ID NO: 92371 - DNA, 25 bp, Canis familiaris
gcccataaatatgttttcgtgtaaa

SEQ ID NO: 92372 - DNA, 25 bp, Canis familiaris
gcccaggaaattggtttcctttgca

SEQ ID NO: 92373 - DNA, 25 bp, Canis familiaris
gccagggcgattttttacctcctgc

SEQ ID NO: 92374 - DNA, 25 bp, Canis familiaris
gccagtaggattttgtttctgcccc

SEQ ID NO: 92375 - DNA, 25 bp, Canis familiaris
gccatgctgggaacacgttcccctt

SEQ ID NO: 92376 - DNA, 25 bp, Canis familiaris
gccaggagggactgtggccctatag

SEQ ID NO: 92377 - DNA, 25 bp, Canis familiaris
gccgaaatggactctgtggctttag

SEQ ID NO: 92378 - DNA, 25 bp, Canis familiaris
gccagatcaaagtccggtggtttcg

SEQ ID NO: 92379 - DNA, 25 bp, Canis familiaris
gccatggctccagccgtattttttg

SEQ ID NO: 92380 - DNA, 25 bp, Canis familiaris
gccaggtcaccatggtttcatttgt

SEQ ID NO: 92381 - DNA, 25 bp, Canis familiaris
gccatctgtccctttgttttggatg

SEQ ID NO: 92382 - DNA, 25 bp, Canis familiaris
gccttttccttttcatgtgacgtga

SEQ ID NO: 92383 - DNA, 25 bp, Canis familiaris
gcctttttgtttcaatgaggtgtcc

SEQ ID NO: 92384 - DNA, 25 bp, Canis familiaris
gccatttcttttctaggagcttacc

SEQ ID NO: 92385 - DNA, 25 bp, Canis familiaris
gccagctattgcatctttcaggagc

SEQ ID NO: 92386 - DNA, 25 bp, Canis familiaris
gccagtgaccttattctgtgcatcg

SEQ ID NO: 92387 - DNA, 25 bp, Canis familiaris
gccaggtcactcagctattgttctg

SEQ ID NO: 92388 - DNA, 25 bp, Canis familiaris
gccagttcacatatcttgttttgaa

SEQ ID NO: 92389 - DNA, 25 bp, Canis familiaris
gccagtccattcatttgctctgtag

SEQ ID NO: 92390 - DNA, 25 bp, Canis familiaris
gccagtcctctgattctttggactc

SEQ ID NO: 92391 - DNA, 25 bp, Canis familiaris
gccagagtctttatattcctgactt

SEQ ID NO: 92392 - DNA, 25 bp, Canis familiaris
gccagcctcttcaaagattttgcct

SEQ ID NO: 92393 - DNA, 25 bp, Canis familiaris
gccagtcttctgaggtatttgctct

SEQ ID NO: 92394 - DNA, 25 bp, Canis familiaris
gccattttcgattttcagagtctgt

SEQ ID NO: 92395 - DNA, 25 bp, Canis familiaris
gccatccttggaacttgcacaggtt

SEQ ID NO: 92396 - DNA, 25 bp, Canis familiaris
gccaccattggtgtatccagggctg

SEQ ID NO: 92397 - DNA, 25 bp, Canis familiaris
gccaccatggaggagtaccacaggc

SEQ ID NO: 92398 - DNA, 25 bp, Canis familiaris
gccagaaggaggctgatcccaggtg

SEQ ID NO: 92399 - DNA, 25 bp, Canis familiaris
gccagatcggacgtaagtctcaggg

SEQ ID NO: 92400 - DNA, 25 bp, Canis familiaris
gccagacggacggaagccaggttcc

SEQ ID NO: 92401 - DNA, 25 bp, Canis familiaris
gccagacggacggaagccagggtcc

SEQ ID NO: 92402 - DNA, 25 bp, Canis familiaris
gccagacgcatcttggaaccgaggg

SEQ ID NO: 92403 - DNA, 25 bp, Canis familiaris
gccagccagctgtgaaccgctggcc

SEQ ID NO: 92404 - DNA, 25 bp, Canis familiaris
gccagtagcacatgaacctagccac

SEQ ID NO: 92405 - DNA, 25 bp, Canis familiaris
gccagtagcatatgcttgtctcaaa

SEQ ID NO: 92406 - DNA, 25 bp, Canis familiaris
gccagtagcatatgcttgtctcaaa

SEQ ID NO: 92407 - DNA, 25 bp, Canis familiaris
gccagtagctcatgttgtagcaaac

SEQ ID NO: 92408 - DNA, 25 bp, Canis familiaris
gccagttgtgcacttttacaagccg

SEQ ID NO: 92409 - DNA, 25 bp, Canis familiaris
gccagtggctgcctgaattccaggc

SEQ ID NO: 92410 - DNA, 25 bp, Canis familiaris
gccagacagctggatagtccgaggg

SEQ ID NO: 92411 - DNA, 25 bp, Canis familiaris
gccagagcattggaggccagcaagc

SEQ ID NO: 92412 - DNA, 25 bp, Canis familiaris
gccagcagctgcgcgggcagctgga

SEQ ID NO: 92413 - DNA, 25 bp, Canis familiaris
gccagcagctgcgcgggcagctgga

SEQ ID NO: 92414 - DNA, 25 bp, Canis familiaris
gccagcagctgcgcgggcagctgga

SEQ ID NO: 92415 - DNA, 25 bp, Canis familiaris
gccagactcatgtgaggcatctgtg

SEQ ID NO: 92416 - DNA, 25 bp, Canis familiaris
gccataccagtgcagccaatgtggg

SEQ ID NO: 92417 - DNA, 25 bp, Canis familiaris
gccattcaaggatgcgctcacggcg

SEQ ID NO: 92418 - DNA, 25 bp, Canis familiaris
gccagtacaggaactctgcacgtcc

SEQ ID NO: 92419 - DNA, 25 bp, Canis familiaris
gccgaacatgttgcttaccgcacca

SEQ ID NO: 92420 - DNA, 25 bp, Canis familiaris
gcctgttcagttctgtaccagcaaa

SEQ ID NO: 92421 - DNA, 25 bp, Canis familiaris
gccttatccattgttgaccacgggt

SEQ ID NO: 92422 - DNA, 25 bp, Canis familiaris
gccatcttccatcagatctgacttc

SEQ ID NO: 92423 - DNA, 25 bp, Canis familiaris
gccaggtctcatctgcattgacttg

SEQ ID NO: 92424 - DNA, 25 bp, Canis familiaris
gccaggtttggtaaggctctgattc

SEQ ID NO: 92425 - DNA, 25 bp, Canis familiaris
gccaggcatttactttagtccttca

SEQ ID NO: 92426 - DNA, 25 bp, Canis familiaris
gccaggcttctatttcataaccctc

SEQ ID NO: 92427 - DNA, 25 bp, Canis familiaris
gccagtgccctgacatatcatggaa

SEQ ID NO: 92428 - DNA, 25 bp, Canis familiaris
gccagtcacctgaagatgtcgagcg

SEQ ID NO: 92429 - DNA, 25 bp, Canis familiaris
gccagcaccctgaggtggagctgag

SEQ ID NO: 92430 - DNA, 25 bp, Canis familiaris
gccagcagccctgagggcggtatcc

SEQ ID NO: 92431 - DNA, 25 bp, Canis familiaris
gccagcaccgtggacggcatggact

SEQ ID NO: 92432 - DNA, 25 bp, Canis familiaris
gccagcacccatgacaggcaggaca

SEQ ID NO: 92433 - DNA, 25 bp, Canis familiaris
gccagcattccagacttcaaaaatt

SEQ ID NO: 92434 - DNA, 25 bp, Canis familiaris
gccaggaccacccttcaaaagaatg

SEQ ID NO: 92435 - DNA, 25 bp, Canis familiaris
gccatgtaaccaacttcaacaaatg

SEQ ID NO: 92436 - DNA, 25 bp, Canis familiaris
gccattagtgacactatagacagtt

SEQ ID NO: 92437 - DNA, 25 bp, Canis familiaris
gccatttctacggtaaacattttga

SEQ ID NO: 92438 - DNA, 25 bp, Canis familiaris
gcctttgttcgggaagacttgccaa

SEQ ID NO: 92439 - DNA, 25 bp, Canis familiaris
gccttctgcttcctaatggactaga

SEQ ID NO: 92440 - DNA, 25 bp, Canis familiaris
gccttgctttggacagtggtccaaa

SEQ ID NO: 92441 - DNA, 25 bp, Canis familiaris
gccttgcaccgtattgagtctcaag

SEQ ID NO: 92442 - DNA, 25 bp, Canis familiaris
gccttgccctttgagagtattgcgg

SEQ ID NO: 92443 - DNA, 25 bp, Canis familiaris
gccttcggctttcaactttggagaa

SEQ ID NO: 92444 - DNA, 25 bp, Canis familiaris
gccttctttattcaactttgccaat

SEQ ID NO: 92445 - DNA, 25 bp, Canis familiaris
gccattttcaaaagaaacttgcctt

SEQ ID NO: 92446 - DNA, 25 bp, Canis familiaris
gccatttctcctagaaaccctgttt

SEQ ID NO: 92447 - DNA, 25 bp, Canis familiaris
gccattagtctataaattccagctt

SEQ ID NO: 92448 - DNA, 25 bp, Canis familiaris
gccatatcaatcttcccaagtctgg

SEQ ID NO: 92449 - DNA, 25 bp, Canis familiaris
gccttaaaccccaatgtcaatagcc

SEQ ID NO: 92450 - DNA, 25 bp, Canis familiaris
gcctttgacactgccttgcttaagg

SEQ ID NO: 92451 - DNA, 25 bp, Canis familiaris
gcctttggagcccgttgttactggc

SEQ ID NO: 92452 - DNA, 25 bp, Canis familiaris
gcctttggaaggcttttcttctcca

SEQ ID NO: 92453 - DNA, 25 bp, Canis familiaris
gccttttaggattcttcttgctccc

SEQ ID NO: 92454 - DNA, 25 bp, Canis familiaris
gccttgctaagacagctatgctttc

SEQ ID NO: 92455 - DNA, 25 bp, Canis familiaris
gccttgattaagccagaatattatg

SEQ ID NO: 92456 - DNA, 25 bp, Canis familiaris
gccattcgagcttggaaatgatata

SEQ ID NO: 92457 - DNA, 25 bp, Canis familiaris
gccagtgcagatcagttaatgctac

SEQ ID NO: 92458 - DNA, 25 bp, Canis familiaris
gccaggagaggacttccctgcagca

SEQ ID NO: 92459 - DNA, 25 bp, Canis familiaris
gccagaagattgggccggctcagca

SEQ ID NO: 92460 - DNA, 25 bp, Canis familiaris
gccagaagcacggtcatcggatgaa

SEQ ID NO: 92461 - DNA, 25 bp, Canis familiaris
gccagtaggctgatccagagcatgg

SEQ ID NO: 92462 - DNA, 25 bp, Canis familiaris
gccagcattccaattccaacatggt

SEQ ID NO: 92463 - DNA, 25 bp, Canis familiaris
gccagcttccaaaccaatagattcc

SEQ ID NO: 92464 - DNA, 25 bp, Canis familiaris
gccagttgcccaacactaaatctgc

SEQ ID NO: 92465 - DNA, 25 bp, Canis familiaris
gccattgtctcccacagtaagattc

SEQ ID NO: 92466 - DNA, 25 bp, Canis familiaris
gccgtttgcatcgctgtcaatagtc

SEQ ID NO: 92467 - DNA, 25 bp, Canis familiaris
gccagtttgcatcctctgatgtaag

SEQ ID NO: 92468 - DNA, 25 bp, Canis familiaris
gccagatctgtgagctagaagtatg

SEQ ID NO: 92469 - DNA, 25 bp, Canis familiaris
gccttcagtgagctgagccacttgc

SEQ ID NO: 92470 - DNA, 25 bp, Canis familiaris
gccattcagtgtcgggtcaccaccg

SEQ ID NO: 92471 - DNA, 25 bp, Canis familiaris
gccattctctggaggaggtcaccag

SEQ ID NO: 92472 - DNA, 25 bp, Canis familiaris
gccatcccgggaggagttgagcaag

SEQ ID NO: 92473 - DNA, 25 bp, Canis familiaris
gccatcccgtggcgaacaacaaggg

SEQ ID NO: 92474 - DNA, 25 bp, Canis familiaris
gcctaccgtgtatgaagcgtctacg

SEQ ID NO: 92475 - DNA, 25 bp, Canis familiaris
gcctgtccgtttcagaggtcataga

SEQ ID NO: 92476 - DNA, 25 bp, Canis familiaris
gccttccggcgcataaagtcagcaa

SEQ ID NO: 92477 - DNA, 25 bp, Canis familiaris
gccttccggcgcataaagtcagcaa

SEQ ID NO: 92478 - DNA, 25 bp, Canis familiaris
gccttccggcatgtcaaggtggaca

SEQ ID NO: 92479 - DNA, 25 bp, Canis familiaris
gccttgcgggtctctgaggggaccc

SEQ ID NO: 92480 - DNA, 25 bp, Canis familiaris
gccttgcttagagccagaagggacg

SEQ ID NO: 92481 - DNA, 25 bp, Canis familiaris
gcccgttttgactactggggccagg

SEQ ID NO: 92482 - DNA, 25 bp, Canis familiaris
gcctcatgttttggacctggggggc

SEQ ID NO: 92483 - DNA, 25 bp, Canis familiaris
gcccgtattttgggccgcgaggtgc

SEQ ID NO: 92484 - DNA, 25 bp, Canis familiaris
gcctctttctttgtgacaccaagtg

SEQ ID NO: 92485 - DNA, 25 bp, Canis familiaris
gccttttccctcataactcaggagc

SEQ ID NO: 92486 - DNA, 25 bp, Canis familiaris
gcctagttttcctgcagacgatgaa

SEQ ID NO: 92487 - DNA, 25 bp, Canis familiaris
gcctcagcgtctaagtggagaccca

SEQ ID NO: 92488 - DNA, 25 bp, Canis familiaris
gcctcgagattcgtccgagagcacc

SEQ ID NO: 92489 - DNA, 25 bp, Canis familiaris
gcctccggacacacggatacacgta

SEQ ID NO: 92490 - DNA, 25 bp, Canis familiaris
gcccttggaaacctggaacctgaat

SEQ ID NO: 92491 - DNA, 25 bp, Canis familiaris
gccgtgttggcatccatggacaacg

SEQ ID NO: 92492 - DNA, 25 bp, Canis familiaris
gcctgttaggcagctgcaggtcctc

SEQ ID NO: 92493 - DNA, 25 bp, Canis familiaris
gccgtaaccatggccagaagctcat

SEQ ID NO: 92494 - DNA, 25 bp, Canis familiaris
gccagtctcccattctaggagtcac

SEQ ID NO: 92495 - DNA, 25 bp, Canis familiaris
gccatgtccccactgagatgaagat

SEQ ID NO: 92496 - DNA, 25 bp, Canis familiaris
gccattaccagtcagaggcagtaca

SEQ ID NO: 92497 - DNA, 25 bp, Canis familiaris
gccattgaggacccggagctggaag

SEQ ID NO: 92498 - DNA, 25 bp, Canis familiaris
gccatgtcgagccggggcggaaaga

SEQ ID NO: 92499 - DNA, 25 bp, Canis familiaris
gccagctgcgagcagcagggggcag

SEQ ID NO: 92500 - DNA, 25 bp, Canis familiaris
gccagctgtgggacaaggagcgcag

SEQ ID NO: 92501 - DNA, 25 bp, Canis familiaris
gccagcggggtccaagaccaggaaa

SEQ ID NO: 92502 - DNA, 25 bp, Canis familiaris
gccagcaggaggtggagcccatgtg

SEQ ID NO: 92503 - DNA, 25 bp, Canis familiaris
gccagcaggagggagagagccgcct

SEQ ID NO: 92504 - DNA, 25 bp, Canis familiaris
gccagaggaggtggacaggggcccc

SEQ ID NO: 92505 - DNA, 25 bp, Canis familiaris
gccggggagctcgaaggcggacggc

SEQ ID NO: 92506 - DNA, 25 bp, Canis familiaris
gccgggtgtccggactagagccgga

SEQ ID NO: 92507 - DNA, 25 bp, Canis familiaris
gccttgttgcccggagtattgccgg

SEQ ID NO: 92508 - DNA, 25 bp, Canis familiaris
gccatttggcacggggtgtacccag

SEQ ID NO: 92509 - DNA, 25 bp, Canis familiaris
gccattttatcatgtatttaccact

SEQ ID NO: 92510 - DNA, 25 bp, Canis familiaris
gccttttataatttcttagctctta

SEQ ID NO: 92511 - DNA, 25 bp, Canis familiaris
gcctttggaattttgctttttgttg

SEQ ID NO: 92512 - DNA, 25 bp, Canis familiaris
gccattttgcagaattcgttttttg

SEQ ID NO: 92513 - DNA, 25 bp, Canis familiaris
gcctttccagtctttgtaactcatc

SEQ ID NO: 92514 - DNA, 25 bp, Canis familiaris
gccttctcggctcttgacacttagc

SEQ ID NO: 92515 - DNA, 25 bp, Canis familiaris
gccatctccgttctttactttgatg

SEQ ID NO: 92516 - DNA, 25 bp, Canis familiaris
gccccctttttggatgactttagtg

SEQ ID NO: 92517 - DNA, 25 bp, Canis familiaris
gccgcccttttaagtacagtggatg

SEQ ID NO: 92518 - DNA, 25 bp, Canis familiaris
gccagtctcttttactgtttgggat

SEQ ID NO: 92519 - DNA, 25 bp, Canis familiaris
gccagatattggtgacgtgtgtgca

SEQ ID NO: 92520 - DNA, 25 bp, Canis familiaris
gccagcttgaggtgcagacggtcat

SEQ ID NO: 92521 - DNA, 25 bp, Canis familiaris
gccagtgggcgagagcacaggccac

SEQ ID NO: 92522 - DNA, 25 bp, Canis familiaris
gccatggacagctactggcacagcc

SEQ ID NO: 92523 - DNA, 25 bp, Canis familiaris
gccattgcataaacttgccagccca

SEQ ID NO: 92524 - DNA, 25 bp, Canis familiaris
gccatctgtaaaaccctccagaagg

SEQ ID NO: 92525 - DNA, 25 bp, Canis familiaris
gccagtgaaggaagcccccagaaag

SEQ ID NO: 92526 - DNA, 25 bp, Canis familiaris
gccagtgaattgtgtgctttaaaag

SEQ ID NO: 92527 - DNA, 25 bp, Canis familiaris
gccagcaagatttcctctttgcaaa

SEQ ID NO: 92528 - DNA, 25 bp, Canis familiaris
gccatccaagtatcgtgttatgaac

SEQ ID NO: 92529 - DNA, 25 bp, Canis familiaris
gccatctaggtttgggatttgaggg

SEQ ID NO: 92530 - DNA, 25 bp, Canis familiaris
gccatcaagttaagcttgtactggg

SEQ ID NO: 92531 - DNA, 25 bp, Canis familiaris
gcccacgtattcctgtccaaggggc

SEQ ID NO: 92532 - DNA, 25 bp, Canis familiaris
gccatcctgtatagacgtctgcaag

SEQ ID NO: 92533 - DNA, 25 bp, Canis familiaris
gccatgttggaacggctgcaagaga

SEQ ID NO: 92534 - DNA, 25 bp, Canis familiaris
gccagatctgcagacggctgttgtc

SEQ ID NO: 92535 - DNA, 25 bp, Canis familiaris
gccagattcctgtttgtgcattgtc

SEQ ID NO: 92536 - DNA, 25 bp, Canis familiaris
gccagcagccacgagttgtgatacc

SEQ ID NO: 92537 - DNA, 25 bp, Canis familiaris
gccaggccacgactagatatcatcc

SEQ ID NO: 92538 - DNA, 25 bp, Canis familiaris
gccagaccagcaaccagatcatctg

SEQ ID NO: 92539 - DNA, 25 bp, Canis familiaris
gccagacacacagccacataggaag

SEQ ID NO: 92540 - DNA, 25 bp, Canis familiaris
gccagacaggcattcccaagagaaa

SEQ ID NO: 92541 - DNA, 25 bp, Canis familiaris
gccaggcaggtgtcccaggaatgtg

SEQ ID NO: 92542 - DNA, 25 bp, Canis familiaris
gccagtgcaaggtgcgcagtgacgt

SEQ ID NO: 92543 - DNA, 25 bp, Canis familiaris
gccagatactggttagaggacttta

SEQ ID NO: 92544 - DNA, 25 bp, Canis familiaris
gccagaactctgtacgggacatcat

SEQ ID NO: 92545 - DNA, 25 bp, Canis familiaris
gccagaagtatgtccggcaagcctg

SEQ ID NO: 92546 - DNA, 25 bp, Canis familiaris
gccagggctagaacgtctacctgct

SEQ ID NO: 92547 - DNA, 25 bp, Canis familiaris
gccagggcctatgcaatctaacctc

SEQ ID NO: 92548 - DNA, 25 bp, Canis familiaris
gccagggcctcagattggataccca

SEQ ID NO: 92549 - DNA, 25 bp, Canis familiaris
gccaggccttccaggtgataatgcc

SEQ ID NO: 92550 - DNA, 25 bp, Canis familiaris
gccagggattccagttataacacat

SEQ ID NO: 92551 - DNA, 25 bp, Canis familiaris
gcctttgttccatgtctcaaaatat

SEQ ID NO: 92552 - DNA, 25 bp, Canis familiaris
gccatatgtttactcagacttaaga

SEQ ID NO: 92553 - DNA, 25 bp, Canis familiaris
gccatttttaccacgatagcagaat

SEQ ID NO: 92554 - DNA, 25 bp, Canis familiaris
gcctttgttttcagctgaagaccaa

SEQ ID NO: 92555 - DNA, 25 bp, Canis familiaris
gccatattctattttttaccaccaa

SEQ ID NO: 92556 - DNA, 25 bp, Canis familiaris
gccatattctattttttaccaccaa

SEQ ID NO: 92557 - DNA, 25 bp, Canis familiaris
gcctcttaaggtgttatcaacgcaa

SEQ ID NO: 92558 - DNA, 25 bp, Canis familiaris
gccatcgaagatggtccttgcatca

SEQ ID NO: 92559 - DNA, 25 bp, Canis familiaris
gccatcaaatttgcctgtgtacttt

SEQ ID NO: 92560 - DNA, 25 bp, Canis familiaris
gcctcaagtgttacctttaagtgca

SEQ ID NO: 92561 - DNA, 25 bp, Canis familiaris
gcctcggcctgtacggttaggatgg

SEQ ID NO: 92562 - DNA, 25 bp, Canis familiaris
gcctcccttgccatgaattcaggat

SEQ ID NO: 92563 - DNA, 25 bp, Canis familiaris
gccagaccgttcagagattaggcat

SEQ ID NO: 92564 - DNA, 25 bp, Canis familiaris
gccagaccgtccgaaataggcatct

SEQ ID NO: 92565 - DNA, 25 bp, Canis familiaris
gccaggccaactacaaagggcatcc

SEQ ID NO: 92566 - DNA, 25 bp, Canis familiaris
gccagggctatctcatcaaggatgg

SEQ ID NO: 92567 - DNA, 25 bp, Canis familiaris
gccagagcctcttccaggaggaggg

SEQ ID NO: 92568 - DNA, 25 bp, Canis familiaris
gccattgcagacctccaggaagatg

SEQ ID NO: 92569 - DNA, 25 bp, Canis familiaris
gccatgtgcagctgctccaaagagt

SEQ ID NO: 92570 - DNA, 25 bp, Canis familiaris
gccagtgccagggtcagcataagtt

SEQ ID NO: 92571 - DNA, 25 bp, Canis familiaris
gccagtcggagcttacactcaattg

SEQ ID NO: 92572 - DNA, 25 bp, Canis familiaris
gccataccggatagacactccataa

SEQ ID NO: 92573 - DNA, 25 bp, Canis familiaris
gccatcctgtggaaacactacatct

SEQ ID NO: 92574 - DNA, 25 bp, Canis familiaris
gcagatcctgaagcagacctacgac

SEQ ID NO: 92575 - DNA, 25 bp, Canis familiaris
gccatccgaaaccacctaggcattg

SEQ ID NO: 92576 - DNA, 25 bp, Canis familiaris
gcctccggagccccaaagagattag

SEQ ID NO: 92577 - DNA, 25 bp, Canis familiaris
gcctccaggaacccagagtatggta

SEQ ID NO: 92578 - DNA, 25 bp, Canis familiaris
gccatgcacgtaggcggggttgtgt

SEQ ID NO: 92579 - DNA, 25 bp, Canis familiaris
gccatctcaggagtcggacctgggt

SEQ ID NO: 92580 - DNA, 25 bp, Canis familiaris
gccttgaagaatggccaccgggttt

SEQ ID NO: 92581 - DNA, 25 bp, Canis familiaris
gcctctgaaaagctgctcgggggtg

SEQ ID NO: 92582 - DNA, 25 bp, Canis familiaris
gcctgtggaaacctacggctggggt

SEQ ID NO: 92583 - DNA, 25 bp, Canis familiaris
gccatgttcgaggcctgagggctgg

SEQ ID NO: 92584 - DNA, 25 bp, Canis familiaris
gccattccatgagggatgcacgtgc

SEQ ID NO: 92585 - DNA, 25 bp, Canis familiaris
gccatgagccaaaggcagccgctca

SEQ ID NO: 92586 - DNA, 25 bp, Canis familiaris
gccagagtaaaggcacttgtcacca

SEQ ID NO: 92587 - DNA, 25 bp, Canis familiaris
gccagagtagtcacacttgtcacaa

SEQ ID NO: 92588 - DNA, 25 bp, Canis familiaris
gccagagaaatcctcagggtcagaa

SEQ ID NO: 92589 - DNA, 25 bp, Canis familiaris
gccaggacgacgcaggcatgtacat

SEQ ID NO: 92590 - DNA, 25 bp, Canis familiaris
gccagtgtcaacgtggagctgatca

SEQ ID NO: 92591 - DNA, 25 bp, Canis familiaris
gccagttcagccatggacacatctg

SEQ ID NO: 92592 - DNA, 25 bp, Canis familiaris
gccagttgcctgattatacatctcc

SEQ ID NO: 92593 - DNA, 25 bp, Canis familiaris
gccagtatgttgttagaaagcccct

SEQ ID NO: 92594 - DNA, 25 bp, Canis familiaris
gccagtatgttgttagaaagcccct

SEQ ID NO: 92595 - DNA, 25 bp, Canis familiaris
gccagtgcagttttggccaaggcca

SEQ ID NO: 92596 - DNA, 25 bp, Canis familiaris
gccaggcaggagctgctggcggggc

SEQ ID NO: 92597 - DNA, 25 bp, Canis familiaris
gccagacgtgagcagtggctgcggc

SEQ ID NO: 92598 - DNA, 25 bp, Canis familiaris
gccaggcgagagcagagattagagc

SEQ ID NO: 92599 - DNA, 25 bp, Canis familiaris
gccagggagcagcaccttgaggcag

SEQ ID NO: 92600 - DNA, 25 bp, Canis familiaris
gccagttgagtgctctttgggctgc

SEQ ID NO: 92601 - DNA, 25 bp, Canis familiaris
gccagttacacgaattgggcgcctg

SEQ ID NO: 92602 - DNA, 25 bp, Canis familiaris
gccatttgacaactttgatcaccca

SEQ ID NO: 92603 - DNA, 25 bp, Canis familiaris
gccatgttgaagtctcctacatcca

SEQ ID NO: 92604 - DNA, 25 bp, Canis familiaris
gccatgttggaatcccaattcttcc

SEQ ID NO: 92605 - DNA, 25 bp, Canis familiaris
gccttgtggcaaactgactaagccc

SEQ ID NO: 92606 - DNA, 25 bp, Canis familiaris
gccttatgaccaactagctatacgg

SEQ ID NO: 92607 - DNA, 25 bp, Canis familiaris
gcctcaagagccatccaggaagcgg

SEQ ID NO: 92608 - DNA, 25 bp, Canis familiaris
ggtcagggccaacaaggaggtcgag

SEQ ID NO: 92609 - DNA, 25 bp, Canis familiaris
gcctcgggccaaaaagagtgtccgg

SEQ ID NO: 92610 - DNA, 25 bp, Canis familiaris
gccatcgacgctgtccaagaatgtc

SEQ ID NO: 92611 - DNA, 25 bp, Canis familiaris
gccatccacgtccaaaagatcttca

SEQ ID NO: 92612 - DNA, 25 bp, Canis familiaris
gccatctccagcagctataaatcct

SEQ ID NO: 92613 - DNA, 25 bp, Canis familiaris
gccatcccagagccattaataatca

SEQ ID NO: 92614 - DNA, 25 bp, Canis familiaris
gccataccagtgccaatactgcgaa

SEQ ID NO: 92615 - DNA, 25 bp, Canis familiaris
gcctaccactgagatactgtaacca

SEQ ID NO: 92616 - DNA, 25 bp, Canis familiaris
gccatatccctagacacttgaattc

SEQ ID NO: 92617 - DNA, 25 bp, Canis familiaris
gccataccagcttaggccttgtaat

SEQ ID NO: 92618 - DNA, 25 bp, Canis familiaris
gccatagcaactgatggtgcttgct

SEQ ID NO: 92619 - DNA, 25 bp, Canis familiaris
gccatcaaaataatgatatcttgcc

SEQ ID NO: 92620 - DNA, 25 bp, Canis familiaris
gccatcatcgcgccaaattttgcgc

SEQ ID NO: 92621 - DNA, 25 bp, Canis familiaris
gccatcttcgccaacatgctgggcg

SEQ ID NO: 92622 - DNA, 25 bp, Canis familiaris
gccatcactgcttcaacatgctgca

SEQ ID NO: 92623 - DNA, 25 bp, Canis familiaris
gccatggatgactacacatctgcca

SEQ ID NO: 92624 - DNA, 25 bp, Canis familiaris
gccatgctgagaccaagcacgctga

SEQ ID NO: 92625 - DNA, 25 bp, Canis familiaris
gccgatgagtgtgagcacccaactt

SEQ ID NO: 92626 - DNA, 25 bp, Canis familiaris
gccagatcggatgagacagacacaa

SEQ ID NO: 92627 - DNA, 25 bp, Canis familiaris
gccagatggctatgcaagcgtccaa

SEQ ID NO: 92628 - DNA, 25 bp, Canis familiaris
gccattggctattagggaccaaagg

SEQ ID NO: 92629 - DNA, 25 bp, Canis familiaris
gccattggttcttcgatattctaag

SEQ ID NO: 92630 - DNA, 25 bp, Canis familiaris
gcctctagtgtttcaccattgtaca

SEQ ID NO: 92631 - DNA, 25 bp, Canis familiaris
gccattacagttgcccatctgtgtc

SEQ ID NO: 92632 - DNA, 25 bp, Canis familiaris
gccatttggttgactccacttggat

SEQ ID NO: 92633 - DNA, 25 bp, Canis familiaris
gcctttgagattgtgacctctggac

SEQ ID NO: 92634 - DNA, 25 bp, Canis familiaris
gcctatgtttctgatgacacccgat

SEQ ID NO: 92635 - DNA, 25 bp, Canis familiaris
gccttccttctgttgaaggcccaga

SEQ ID NO: 92636 - DNA, 25 bp, Canis familiaris
gccttccttctgtccaaggcaaaaa

SEQ ID NO: 92637 - DNA, 25 bp, Canis familiaris
gcctacatggcctccaaggagtaag

SEQ ID NO: 92638 - DNA, 25 bp, Canis familiaris
gcctagctggccattctgggaaata

SEQ ID NO: 92639 - DNA, 25 bp, Canis familiaris
gccgactggcttagcatctgggaaa

SEQ ID NO: 92640 - DNA, 25 bp, Canis familiaris
gccaggagtgatacatcagtgggaa

SEQ ID NO: 92641 - DNA, 25 bp, Canis familiaris
gccagtggcgcatctatggcagcga

SEQ ID NO: 92642 - DNA, 25 bp, Canis familiaris
gccagtccacctagaggcagcagag

SEQ ID NO: 92643 - DNA, 25 bp, Canis familiaris
gccagtataactaagcttcagagac

SEQ ID NO: 92644 - DNA, 25 bp, Canis familiaris
gccttgcttgtttgagcttcagcag

SEQ ID NO: 92645 - DNA, 25 bp, Canis familiaris
gccttgtttagagcttgcacggccc

SEQ ID NO: 92646 - DNA, 25 bp, Canis familiaris
gccatctttgggatgcttgcctggc

SEQ ID NO: 92647 - DNA, 25 bp, Canis familiaris
gcgaccttgcaacatttggctacgc

SEQ ID NO: 92648 - DNA, 25 bp, Canis familiaris
gcgacactcttccatattttgtttt

SEQ ID NO: 92649 - DNA, 25 bp, Canis familiaris
gccttcgttctatttttgttgttgg

SEQ ID NO: 92650 - DNA, 25 bp, Canis familiaris
gccttcccttagttttgcaatttgc

SEQ ID NO: 92651 - DNA, 25 bp, Canis familiaris
gccttacttacttttgctcttttgc

SEQ ID NO: 92652 - DNA, 25 bp, Canis familiaris
gcctacctaaactttcattaattca

SEQ ID NO: 92653 - DNA, 25 bp, Canis familiaris
gcctaccccaaagaaaatgtgtcac

SEQ ID NO: 92654 - DNA, 25 bp, Canis familiaris
gcttaccccaagagatacaacctaa

SEQ ID NO: 92655 - DNA, 25 bp, Canis familiaris
gccgaaacccacagtaaacctgcaa

SEQ ID NO: 92656 - DNA, 25 bp, Canis familiaris
gccgatgaacctttcggacggccac

SEQ ID NO: 92657 - DNA, 25 bp, Canis familiaris
gccctagacagttgacgggggcctc

SEQ ID NO: 92658 - DNA, 25 bp, Canis familiaris
gccccaaagaagccagccgggtatc

SEQ ID NO: 92659 - DNA, 25 bp, Canis familiaris
gcctagtacaaacaagcgtagctat

SEQ ID NO: 92660 - DNA, 25 bp, Canis familiaris
gcctagtataggtggacgtttatta

SEQ ID NO: 92661 - DNA, 25 bp, Canis familiaris
gccttgttctcgtggactgtaattc

SEQ ID NO: 92662 - DNA, 25 bp, Canis familiaris
gcctttctcgagtggcacagatata

SEQ ID NO: 92663 - DNA, 25 bp, Canis familiaris
gccttgtcatcctctaagcagagca

SEQ ID NO: 92664 - DNA, 25 bp, Canis familiaris
gccatgttcttctgctgaatcaagt

SEQ ID NO: 92665 - DNA, 25 bp, Canis familiaris
gccagttctacatctacattaattc

SEQ ID NO: 92666 - DNA, 25 bp, Canis familiaris
gccagttctatatcattgcattgca

SEQ ID NO: 92667 - DNA, 25 bp, Canis familiaris
gccagtgactgcattcattgattca

SEQ ID NO: 92668 - DNA, 25 bp, Canis familiaris
gccatggacagcatcttcgtatcaa

SEQ ID NO: 92669 - DNA, 25 bp, Canis familiaris
gccatcgacctgttttgtcatcgat

SEQ ID NO: 92670 - DNA, 25 bp, Canis familiaris
gccctaccagttgttaccgattatc

SEQ ID NO: 92671 - DNA, 25 bp, Canis familiaris
gccttaccagatttttcccataata

SEQ ID NO: 92672 - DNA, 25 bp, Canis familiaris
gcctatgagtcattgggttcccatg

SEQ ID NO: 92673 - DNA, 25 bp, Canis familiaris
gccctggacaacgggtcccaggtct

SEQ ID NO: 92674 - DNA, 25 bp, Canis familiaris
gccttgtatagcctgggaccatggg

SEQ ID NO: 92675 - DNA, 25 bp, Canis familiaris
gccttcttacctgttcagtgtggct

SEQ ID NO: 92676 - DNA, 25 bp, Canis familiaris
gccttttccagttgtgttcgtggtc

SEQ ID NO: 92677 - DNA, 25 bp, Canis familiaris
gcctttgtgggccaggaacgtgccc

SEQ ID NO: 92678 - DNA, 25 bp, Canis familiaris
gcctttgagggcagagacaatgtcc

SEQ ID NO: 92679 - DNA, 25 bp, Canis familiaris
gcctgtccctggaggactgtgactg

SEQ ID NO: 92680 - DNA, 25 bp, Canis familiaris
gccattccctgagttgtgattcttt

SEQ ID NO: 92681 - DNA, 25 bp, Canis familiaris
gccatggctttagttttctcttaga

SEQ ID NO: 92682 - DNA, 25 bp, Canis familiaris
gccaggcttctagttttttttccat

SEQ ID NO: 92683 - DNA, 25 bp, Canis familiaris
gccaggcttgaagtttgctctaacc

SEQ ID NO: 92684 - DNA, 25 bp, Canis familiaris
gccatgccttcagtgtgttctgtaa

SEQ ID NO: 92685 - DNA, 25 bp, Canis familiaris
gcctcatcactcgggtttgttaacc

SEQ ID NO: 92686 - DNA, 25 bp, Canis familiaris
gccatccctgcaagtgtcgtggaaa

SEQ ID NO: 92687 - DNA, 25 bp, Canis familiaris
gccatccagcctcttgctgggaagg

SEQ ID NO: 92688 - DNA, 25 bp, Canis familiaris
gccttcagtcatcatgtcctcgaag

SEQ ID NO: 92689 - DNA, 25 bp, Canis familiaris
gccttgtgtcaccttcaattaacta

SEQ ID NO: 92690 - DNA, 25 bp, Canis familiaris
gccagttaacagctctattggatcc

SEQ ID NO: 92691 - DNA, 25 bp, Canis familiaris
gccatgcttaagttttagtgaacct

SEQ ID NO: 92692 - DNA, 25 bp, Canis familiaris
gccatgcgctgaagggttgggtccc

SEQ ID NO: 92693 - DNA, 25 bp, Canis familiaris
gccatgacggagatgtttgcctgcc

SEQ ID NO: 92694 - DNA, 25 bp, Canis familiaris
gccatgcttggaatagtgtacctct

SEQ ID NO: 92695 - DNA, 25 bp, Canis familiaris
gccatcattggactcatggtgggcg

SEQ ID NO: 92696 - DNA, 25 bp, Canis familiaris
gccatcattggactcctggtggcgg

SEQ ID NO: 92697 - DNA, 25 bp, Canis familiaris
gccatgctaaggccctggggcaggg

SEQ ID NO: 92698 - DNA, 25 bp, Canis familiaris
gcctgctataagcctggtgaggccg

SEQ ID NO: 92699 - DNA, 25 bp, Canis familiaris
gccagtcatcaacagcatgggcagc

SEQ ID NO: 92700 - DNA, 25 bp, Canis familiaris
gccaggctgcaagctgcatgtagca

SEQ ID NO: 92701 - DNA, 25 bp, Canis familiaris
gccatgagtatgctcagcttcagaa

SEQ ID NO: 92702 - DNA, 25 bp, Canis familiaris
gccatgcagtccacctgatagtatg

SEQ ID NO: 92703 - DNA, 25 bp, Canis familiaris
gccatcagtgctaggaatttatcag

SEQ ID NO: 92704 - DNA, 25 bp, Canis familiaris
gccatacttgttttgatgtctatga

SEQ ID NO: 92705 - DNA, 25 bp, Canis familiaris
gccatgactggcataggaggcatac

SEQ ID NO: 92706 - DNA, 25 bp, Canis familiaris
gccaggcagcgcacagctgaggaag

SEQ ID NO: 92707 - DNA, 25 bp, Canis familiaris
gccaggggaacagcacatgcaaagg

SEQ ID NO: 92708 - DNA, 25 bp, Canis familiaris
gccaggtggaaatcctgcagcgcgt

SEQ ID NO: 92709 - DNA, 25 bp, Canis familiaris
gccaggggactttctggagcacgct

SEQ ID NO: 92710 - DNA, 25 bp, Canis familiaris
gccagggtgactttttataacgtgt

SEQ ID NO: 92711 - DNA, 25 bp, Canis familiaris
gccagggtgtcttatctctaaattc

SEQ ID NO: 92712 - DNA, 25 bp, Canis familiaris
gccagtgtgtttctacttacatgtc

SEQ ID NO: 92713 - DNA, 25 bp, Canis familiaris
gccattgttcattcctaattttgta

SEQ ID NO: 92714 - DNA, 25 bp, Canis familiaris
gccatttcccactatatttatgttt

SEQ ID NO: 92715 - DNA, 25 bp, Canis familiaris
gccatgtttccagaattcgttgttg

SEQ ID NO: 92716 - DNA, 25 bp, Canis familiaris
gccatgtttcaccgaagctggttga

SEQ ID NO: 92717 - DNA, 25 bp, Canis familiaris
gccatgtatgtggccatccaggctg

SEQ ID NO: 92718 - DNA, 25 bp, Canis familiaris
gccattggtgctactcactgagtgg

SEQ ID NO: 92719 - DNA, 25 bp, Canis familiaris
gccatcgtcatcctgtactgcagga

SEQ ID NO: 92720 - DNA, 25 bp, Canis familiaris
gcctattccttgctctgcatggagc

SEQ ID NO: 92721 - DNA, 25 bp, Canis familiaris
gcctattcctaaaggatggacaagc

SEQ ID NO: 92722 - DNA, 25 bp, Canis familiaris
gcctattcctaaagggcctgatgat

SEQ ID NO: 92723 - DNA, 25 bp, Canis familiaris
gcctattcaaatttgtgcccattgt

SEQ ID NO: 92724 - DNA, 25 bp, Canis familiaris
gccatttcattaattctggtcttaa

SEQ ID NO: 92725 - DNA, 25 bp, Canis familiaris
gcctttcactggtactagacttaag

SEQ ID NO: 92726 - DNA, 25 bp, Canis familiaris
gcctttcacttgttacaaccacacg

SEQ ID NO: 92727 - DNA, 25 bp, Canis familiaris
gccttacagatttctaccactcaac

SEQ ID NO: 92728 - DNA, 25 bp, Canis familiaris
gccgaaagatcatcttctcctacgt

SEQ ID NO: 92729 - DNA, 25 bp, Canis familiaris
gccatcaaaacaacgacctctactg

SEQ ID NO: 92730 - DNA, 25 bp, Canis familiaris
gccatggcagaagacctccagtaca

SEQ ID NO: 92731 - DNA, 25 bp, Canis familiaris
gcctctggattcaccttcagtagtt

SEQ ID NO: 92732 - DNA, 25 bp, Canis familiaris
gccttcgattgcacggctaccatga

SEQ ID NO: 92733 - DNA, 25 bp, Canis familiaris
gccttcctccgagagtaccaagggc

SEQ ID NO: 92734 - DNA, 25 bp, Canis familiaris
gccatcaccgctgagaagtagccgg

SEQ ID NO: 92735 - DNA, 25 bp, Canis familiaris
gccatccactgtggaacagacccgc

SEQ ID NO: 92736 - DNA, 25 bp, Canis familiaris
gccatgcctggaggagaagatccaa

SEQ ID NO: 92737 - DNA, 25 bp, Canis familiaris
gccatttggcagcagaagatgcagc

SEQ ID NO: 92738 - DNA, 25 bp, Canis familiaris
gccattttcagccaatagtcacatc

SEQ ID NO: 92739 - DNA, 25 bp, Canis familiaris
gcctatgtggaggccaaccagatgc

SEQ ID NO: 92740 - DNA, 25 bp, Canis familiaris
gccatgcgtagggccagacagaatg

SEQ ID NO: 92741 - DNA, 25 bp, Canis familiaris
gccaggccagaggcaagaagaccgt

SEQ ID NO: 92742 - DNA, 25 bp, Canis familiaris
gccaggcgggtaaagacacagcagt

SEQ ID NO: 92743 - DNA, 25 bp, Canis familiaris
gccatgtggggcaacaagtaggggg

SEQ ID NO: 92744 - DNA, 25 bp, Canis familiaris
gccagtggggatagcgatgctgagg

SEQ ID NO: 92745 - DNA, 25 bp, Canis familiaris
gccatggcagcagattgcgtcgagc

SEQ ID NO: 92746 - DNA, 25 bp, Canis familiaris
gccagtggcaattgtggctgggccc

SEQ ID NO: 92747 - DNA, 25 bp, Canis familiaris
gccagggctgtggtggagaagcggc

SEQ ID NO: 92748 - DNA, 25 bp, Canis familiaris
gccaggtggtcttcatgcagattca

SEQ ID NO: 92749 - DNA, 25 bp, Canis familiaris
gccaggtagatttagcacagcgctc

SEQ ID NO: 92750 - DNA, 25 bp, Canis familiaris
gccaggttgtcaaggcacaggcact

SEQ ID NO: 92751 - DNA, 25 bp, Canis familiaris
gccatggctggcaaagcgcacaggc

SEQ ID NO: 92752 - DNA, 25 bp, Canis familiaris
gccaggctgtggtgccagacctgga

SEQ ID NO: 92753 - DNA, 25 bp, Canis familiaris
gccaggcgggcaagacagccttgtg

SEQ ID NO: 92754 - DNA, 25 bp, Canis familiaris
gccaggtggctgacaagtgcctctt

SEQ ID NO: 92755 - DNA, 25 bp, Canis familiaris
gccagggggccaggctggcatggtt

SEQ ID NO: 92756 - DNA, 25 bp, Canis familiaris
gccttgggcccatttggcaggatct

SEQ ID NO: 92757 - DNA, 25 bp, Canis familiaris
gccattgggcccatgtgtggggtgt

SEQ ID NO: 92758 - DNA, 25 bp, Canis familiaris
gccatttggtcagttgcctggggga

SEQ ID NO: 92759 - DNA, 25 bp, Canis familiaris
gcctttctctaatctctggggcgga

SEQ ID NO: 92760 - DNA, 25 bp, Canis familiaris
gccatgacccaaaagtatgaggagc

SEQ ID NO: 92761 - DNA, 25 bp, Canis familiaris
gccatgccccaaaaagcaggccaaa

SEQ ID NO: 92762 - DNA, 25 bp, Canis familiaris
gccatgggcccaaaggcaggcaaag

SEQ ID NO: 92763 - DNA, 25 bp, Canis familiaris
gccaggctctactgggaagctaagg

SEQ ID NO: 92764 - DNA, 25 bp, Canis familiaris
gccaggcctcaagggggagcaaggg

SEQ ID NO: 92765 - DNA, 25 bp, Canis familiaris
gccaggctgctctgggaggtggagg

SEQ ID NO: 92766 - DNA, 25 bp, Canis familiaris
gccaggcctcgggagattggtggtg

SEQ ID NO: 92767 - DNA, 25 bp, Canis familiaris
gccagggcttgggagaggagggagc

SEQ ID NO: 92768 - DNA, 25 bp, Canis familiaris
gccaggggctggggagtgagaggga

SEQ ID NO: 92769 - DNA, 25 bp, Canis familiaris
gccagggactaggtagctcagaagc

SEQ ID NO: 92770 - DNA, 25 bp, Canis familiaris
gccaggtgtgtctgaatgccacggc

SEQ ID NO: 92771 - DNA, 25 bp, Canis familiaris
gccattgttgtctaaacccaacttt

SEQ ID NO: 92772 - DNA, 25 bp, Canis familiaris
gcctttattcgaaaacccatgctat

SEQ ID NO: 92773 - DNA, 25 bp, Canis familiaris
gccttttacctgaagacccatgacc

SEQ ID NO: 92774 - DNA, 25 bp, Canis familiaris
gccttatttctcgggctccgagggc

SEQ ID NO: 92775 - DNA, 25 bp, Canis familiaris
gccttttttctcgagtcatcagtgg

SEQ ID NO: 92776 - DNA, 25 bp, Canis familiaris
gccattctgttggcggagtctgggg

SEQ ID NO: 92777 - DNA, 25 bp, Canis familiaris
gccattttcggccagagcttgagga

SEQ ID NO: 92778 - DNA, 25 bp, Canis familiaris
gccatcttagcagctcagagacgag

SEQ ID NO: 92779 - DNA, 25 bp, Canis familiaris
gccatcctggctgtgcagacagagg

SEQ ID NO: 92780 - DNA, 25 bp, Canis familiaris
gccatcgccctggagcgatacagcg

SEQ ID NO: 92781 - DNA, 25 bp, Canis familiaris
gccattccctgctgttacagtgggt

SEQ ID NO: 92782 - DNA, 25 bp, Canis familiaris
gccatgaccccaggtgacacctggc

SEQ ID NO: 92783 - DNA, 25 bp, Canis familiaris
gccatgaccctggggacgtggagca

SEQ ID NO: 92784 - DNA, 25 bp, Canis familiaris
gcctcactccacgggaaggtcaaga

SEQ ID NO: 92785 - DNA, 25 bp, Canis familiaris
gccttcctgacctcacaggtcaagc

SEQ ID NO: 92786 - DNA, 25 bp, Canis familiaris
gccttcctgagcctcagtttgtcaa

SEQ ID NO: 92787 - DNA, 25 bp, Canis familiaris
gccccctgaaaagtctttcaaagtg

SEQ ID NO: 92788 - DNA, 25 bp, Canis familiaris
gcctccttctcaaatttttcgatag

SEQ ID NO: 92789 - DNA, 25 bp, Canis familiaris
gcctcctttctaaatctttccagag

SEQ ID NO: 92790 - DNA, 25 bp, Canis familiaris
gcctttttctctgcactatttagat

SEQ ID NO: 92791 - DNA, 25 bp, Canis familiaris
gcctttattctcacttatttctaag

SEQ ID NO: 92792 - DNA, 25 bp, Canis familiaris
gccttgttatctaccagttgtatgt

SEQ ID NO: 92793 - DNA, 25 bp, Canis familiaris
gcctagcaagcacacctgtggttgt

SEQ ID NO: 92794 - DNA, 25 bp, Canis familiaris
gcctggcaatcgcactgggatttta

SEQ ID NO: 92795 - DNA, 25 bp, Canis familiaris
gccatggcaacagcaataggatttg

SEQ ID NO: 92796 - DNA, 25 bp, Canis familiaris
gccaggcactatgttaggtgttgga

SEQ ID NO: 92797 - DNA, 25 bp, Canis familiaris
gccaggaccacggttcgtgtgtgtg

SEQ ID NO: 92798 - DNA, 25 bp, Canis familiaris
gccaggcactctccgttatgggaga

SEQ ID NO: 92799 - DNA, 25 bp, Canis familiaris
gccaggcactgttttaagagctgca

SEQ ID NO: 92800 - DNA, 25 bp, Canis familiaris
gccaggccagtcactggagcagctg

SEQ ID NO: 92801 - DNA, 25 bp, Canis familiaris
gccaggacactctagcaggacactg

SEQ ID NO: 92802 - DNA, 25 bp, Canis familiaris
gccaggacactctagcaggacactg

SEQ ID NO: 92803 - DNA, 25 bp, Canis familiaris
gccaggacactctagcaggacactg

SEQ ID NO: 92804 - DNA, 25 bp, Canis familiaris
gccaggacactctagcaggacactg

SEQ ID NO: 92805 - DNA, 25 bp, Canis familiaris
gccaggacactctagcaggacactg

SEQ ID NO: 92806 - DNA, 25 bp, Canis familiaris
gccaggtccatctcaaaaccaggat

SEQ ID NO: 92807 - DNA, 25 bp, Canis familiaris
gcgagttcactacacaggaaaatat

SEQ ID NO: 92808 - DNA, 25 bp, Canis familiaris
gctggattactacaaccacaacctg

SEQ ID NO: 92809 - DNA, 25 bp, Canis familiaris
gcggtcatacgattaaccccaacta

SEQ ID NO: 92810 - DNA, 25 bp, Canis familiaris
ggggcataagttcacggccgaggac

SEQ ID NO: 92811 - DNA, 25 bp, Canis familiaris
gcggagaagtttgggggcccgcgtg

SEQ ID NO: 92812 - DNA, 25 bp, Canis familiaris
tcggtcaaatgttcggcaacccggt

SEQ ID NO: 92813 - DNA, 25 bp, Canis familiaris
gccttcgaagttggagcataccacg

SEQ ID NO: 92814 - DNA, 25 bp, Canis familiaris
gcctactcagttagcaggtgcaccc

SEQ ID NO: 92815 - DNA, 25 bp, Canis familiaris
gccatgactatgattcgtgtaccgg

SEQ ID NO: 92816 - DNA, 25 bp, Canis familiaris
gccatcatctatctccacagaggcc

SEQ ID NO: 92817 - DNA, 25 bp, Canis familiaris
gccattctatcaaccagcatgaacc

SEQ ID NO: 92818 - DNA, 25 bp, Canis familiaris
gccattgaatgaactctgtaaccac

SEQ ID NO: 92819 - DNA, 25 bp, Canis familiaris
gccttcatctgatcctggaatgtcc

SEQ ID NO: 92820 - DNA, 25 bp, Canis familiaris
gcgcctgcctagagggaatgtccga

SEQ ID NO: 92821 - DNA, 25 bp, Canis familiaris
gccgtgctctacagtgtgatgaccc

SEQ ID NO: 92822 - DNA, 25 bp, Canis familiaris
gccaggcctctctgatggtgaagca

SEQ ID NO: 92823 - DNA, 25 bp, Canis familiaris
gccaggcccttggaggaggagcagc

SEQ ID NO: 92824 - DNA, 25 bp, Canis familiaris
gccatggcttctcgcgggaggaagc

SEQ ID NO: 92825 - DNA, 25 bp, Canis familiaris
gccatggcccaggagggctggttcc

SEQ ID NO: 92826 - DNA, 25 bp, Canis familiaris
gccaggagacagtaagacatgcagt

SEQ ID NO: 92827 - DNA, 25 bp, Canis familiaris
gccaggaaagattcacacagatttt

SEQ ID NO: 92828 - DNA, 25 bp, Canis familiaris
gccaggaacgtgcccaagtttgggc

SEQ ID NO: 92829 - DNA, 25 bp, Canis familiaris
gccaggagcaaaccaaagtgaagga

SEQ ID NO: 92830 - DNA, 25 bp, Canis familiaris
gccaggagcgaagagaaccaagttc

SEQ ID NO: 92831 - DNA, 25 bp, Canis familiaris
gccaggactggaggaatagccacgg

SEQ ID NO: 92832 - DNA, 25 bp, Canis familiaris
gcctgttctggattaaagaccgggt

SEQ ID NO: 92833 - DNA, 25 bp, Canis familiaris
gcctttctggagttaaagaccggct

SEQ ID NO: 92834 - DNA, 25 bp, Canis familiaris
gccttcagtggcattaaaacccctt

SEQ ID NO: 92835 - DNA, 25 bp, Canis familiaris
gcttcgagggttttgaaacgtcctg

SEQ ID NO: 92836 - DNA, 25 bp, Canis familiaris
gcctcgaggagaaagtgaagacgct

SEQ ID NO: 92837 - DNA, 25 bp, Canis familiaris
gcctcggcgcagatgcagcgatagt

SEQ ID NO: 92838 - DNA, 25 bp, Canis familiaris
gcctctggatggactgggtcacgga

SEQ ID NO: 92839 - DNA, 25 bp, Canis familiaris
gccatctggggaggcaatgtcctgg

SEQ ID NO: 92840 - DNA, 25 bp, Canis familiaris
gccatcttttgagtagatgcctctt

SEQ ID NO: 92841 - DNA, 25 bp, Canis familiaris
gccattttgctcattggccttgcta

SEQ ID NO: 92842 - DNA, 25 bp, Canis familiaris
gcctgttgtcagactataccttgcc

SEQ ID NO: 92843 - DNA, 25 bp, Canis familiaris
gctgctgctgttggactgtaaggct

SEQ ID NO: 92844 - DNA, 25 bp, Canis familiaris
gccttgttggggcatctgtgctggt

SEQ ID NO: 92845 - DNA, 25 bp, Canis familiaris
gcctttgcggcagtgaacgtgtgga

SEQ ID NO: 92846 - DNA, 25 bp, Canis familiaris
gccatttctggaagcacgagtggga

SEQ ID NO: 92847 - DNA, 25 bp, Canis familiaris
gccttccgtgagaaagagtggtgac

SEQ ID NO: 92848 - DNA, 25 bp, Canis familiaris
gccttcctgtgaactggagggacca

SEQ ID NO: 92849 - DNA, 25 bp, Canis familiaris
gccttcctgcatatgatggggcgcc

SEQ ID NO: 92850 - DNA, 25 bp, Canis familiaris
gccatttccatgatgatgggactca

SEQ ID NO: 92851 - DNA, 25 bp, Canis familiaris
gccattgtccctggatggcatgccc

SEQ ID NO: 92852 - DNA, 25 bp, Canis familiaris
gccttgacaacgtcaggcatctctc

SEQ ID NO: 92853 - DNA, 25 bp, Canis familiaris
gccattgacaaccacagatcatttc

SEQ ID NO: 92854 - DNA, 25 bp, Canis familiaris
gccttgacgatacagctaattcaga

SEQ ID NO: 92855 - DNA, 25 bp, Canis familiaris
gcctggagaaacctgccaagtatga

SEQ ID NO: 92856 - DNA, 25 bp, Canis familiaris
gccgaagcacgagttctccgtggac

SEQ ID NO: 92857 - DNA, 25 bp, Canis familiaris
gccgcaagacgagcctcgatgtgtc

SEQ ID NO: 92858 - DNA, 25 bp, Canis familiaris
gccataaaggaggtctcatatgctc

SEQ ID NO: 92859 - DNA, 25 bp, Canis familiaris
gccatcaggggggatcatgcaagat

SEQ ID NO: 92860 - DNA, 25 bp, Canis familiaris
gcctgcgcagtggtgttcgactgca

SEQ ID NO: 92861 - DNA, 25 bp, Canis familiaris
gcctgcggcttaatttgactcaaca

SEQ ID NO: 92862 - DNA, 25 bp, Canis familiaris
gcctaccttatatgtgctcagaaca

SEQ ID NO: 92863 - DNA, 25 bp, Canis familiaris
gctgaaccatctgattatcctgaac

SEQ ID NO: 92864 - DNA, 25 bp, Canis familiaris
gcctacaatcgctatttccggcatc

SEQ ID NO: 92865 - DNA, 25 bp, Canis familiaris
gcctacaatcgctatttccggcatc

SEQ ID NO: 92866 - DNA, 25 bp, Canis familiaris
gccataaaagccactccgtgctttg

SEQ ID NO: 92867 - DNA, 25 bp, Canis familiaris
gccttagaacctgctcggatgtact

SEQ ID NO: 92868 - DNA, 25 bp, Canis familiaris
gcctgggaaccagctcttgagtttg

SEQ ID NO: 92869 - DNA, 25 bp, Canis familiaris
gccatggctgacacgttcttggaac

SEQ ID NO: 92870 - DNA, 25 bp, Canis familiaris
gccggcggcttggtgactctagata

SEQ ID NO: 92871 - DNA, 25 bp, Canis familiaris
gcctgccagctgatcgattttagat

SEQ ID NO: 92872 - DNA, 25 bp, Canis familiaris
gcctgaagactgagtttaagatctg

SEQ ID NO: 92873 - DNA, 25 bp, Canis familiaris
gccttgatattgatactgctaagtc

SEQ ID NO: 92874 - DNA, 25 bp, Canis familiaris
gccttgtcaatgtctggagtaacct

SEQ ID NO: 92875 - DNA, 25 bp, Canis familiaris
gcctcatgaaactggaataagcgct

SEQ ID NO: 92876 - DNA, 25 bp, Canis familiaris
gcctcgatacgctggaaaaagtgcg

SEQ ID NO: 92877 - DNA, 25 bp, Canis familiaris
gcctgtacccagcgaattacgtcga

SEQ ID NO: 92878 - DNA, 25 bp, Canis familiaris
gccttacccaggaatatagacccac

SEQ ID NO: 92879 - DNA, 25 bp, Canis familiaris
gcctggcaccttattaagacccagc

SEQ ID NO: 92880 - DNA, 25 bp, Canis familiaris
gcctctgaccttttataagaccgtg

SEQ ID NO: 92881 - DNA, 25 bp, Canis familiaris
gcctatgtacgttgtttggattcgt

SEQ ID NO: 92882 - DNA, 25 bp, Canis familiaris
gccttgtctcaatgtttggagtcat

SEQ ID NO: 92883 - DNA, 25 bp, Canis familiaris
gccatttctcttttgctgtgggttc

SEQ ID NO: 92884 - DNA, 25 bp, Canis familiaris
gccatgtttattttttctgagcctc

SEQ ID NO: 92885 - DNA, 25 bp, Canis familiaris
gcgcatgggaaaatcttccttccgc

SEQ ID NO: 92886 - DNA, 25 bp, Canis familiaris
gccattgagacatgcttttcttccc

SEQ ID NO: 92887 - DNA, 25 bp, Canis familiaris
gccggacatattggtcgtcgatccc

SEQ ID NO: 92888 - DNA, 25 bp, Canis familiaris
gctgcagggttttgtgaaccattcc

SEQ ID NO: 92889 - DNA, 25 bp, Canis familiaris
gccatgtggttcattagatgccgcc

SEQ ID NO: 92890 - DNA, 25 bp, Canis familiaris
gccattgtttttaagactccaccat

SEQ ID NO: 92891 - DNA, 25 bp, Canis familiaris
gccattattttttaccaggctgaat

SEQ ID NO: 92892 - DNA, 25 bp, Canis familiaris
gccataatttttttacgaccttctg

SEQ ID NO: 92893 - DNA, 25 bp, Canis familiaris
gcctaaccattttgtttgttctttg

SEQ ID NO: 92894 - DNA, 25 bp, Canis familiaris
gcctcaccctagaagttggttattc

SEQ ID NO: 92895 - DNA, 25 bp, Canis familiaris
gcctattcccttattcatgttattc

SEQ ID NO: 92896 - DNA, 25 bp, Canis familiaris
gcctcttccagcaaggtcatttttt

SEQ ID NO: 92897 - DNA, 25 bp, Canis familiaris
gcctatgtccatgtggtcactcatt

SEQ ID NO: 92898 - DNA, 25 bp, Canis familiaris
gccatagttcatgaatagcaccaat

SEQ ID NO: 92899 - DNA, 25 bp, Canis familiaris
gccatggtcttggaaagtacacatt

SEQ ID NO: 92900 - DNA, 25 bp, Canis familiaris
gccatggtcctggaatcccaggatc

SEQ ID NO: 92901 - DNA, 25 bp, Canis familiaris
gccatgagtcgttttcaccagtatc

SEQ ID NO: 92902 - DNA, 25 bp, Canis familiaris
gccattggcagtactacccagactc

SEQ ID NO: 92903 - DNA, 25 bp, Canis familiaris
gcctggaattccacttagacattga

SEQ ID NO: 92904 - DNA, 25 bp, Canis familiaris
gcacgagaattccgataacgaacga

SEQ ID NO: 92905 - DNA, 25 bp, Canis familiaris
gccggaacccagtacacagagagca

SEQ ID NO: 92906 - DNA, 25 bp, Canis familiaris
gccatcaacaccgagttcaagaaca

SEQ ID NO: 92907 - DNA, 25 bp, Canis familiaris
gccataagcatcaagtgtaaaatat

SEQ ID NO: 92908 - DNA, 25 bp, Canis familiaris
gcctcacagccactgtgctgaagca

SEQ ID NO: 92909 - DNA, 25 bp, Canis familiaris
gcctgcatcttcttgcatctaatga

SEQ ID NO: 92910 - DNA, 25 bp, Canis familiaris
gccatgacatgtgatcagtgcaata

SEQ ID NO: 92911 - DNA, 25 bp, Canis familiaris
gccataagcatgtaagtcattccct

SEQ ID NO: 92912 - DNA, 25 bp, Canis familiaris
gcctaagctgacaatgctcagatgt

SEQ ID NO: 92913 - DNA, 25 bp, Canis familiaris
gcctaggcatcactgtatcctgtct

SEQ ID NO: 92914 - DNA, 25 bp, Canis familiaris
gccatatatgattgtgtttgctgtt

SEQ ID NO: 92915 - DNA, 25 bp, Canis familiaris
gccatttgcatgtttgttgctttct

SEQ ID NO: 92916 - DNA, 25 bp, Canis familiaris
gcctttgctggatgtatgtgtacgt

SEQ ID NO: 92917 - DNA, 25 bp, Canis familiaris
gcctgttctgaaggatgtctgcccg

SEQ ID NO: 92918 - DNA, 25 bp, Canis familiaris
gccatgtggctgaaaggtctacaag

SEQ ID NO: 92919 - DNA, 25 bp, Canis familiaris
gccatgggactaggtatgctcagaa

SEQ ID NO: 92920 - DNA, 25 bp, Canis familiaris
gccttggaaaggactctgcagatac

SEQ ID NO: 92921 - DNA, 25 bp, Canis familiaris
gccatctgctgcagaggttcgatga

SEQ ID NO: 92922 - DNA, 25 bp, Canis familiaris
gccatcgctgcaggcgttccagtgg

SEQ ID NO: 92923 - DNA, 25 bp, Canis familiaris
gccatggtgggctcatgccatgatg

SEQ ID NO: 92924 - DNA, 25 bp, Canis familiaris
gccatggtgggctcaggcaatagat

SEQ ID NO: 92925 - DNA, 25 bp, Canis familiaris
gccattgagggcacgactagatatt

SEQ ID NO: 92926 - DNA, 25 bp, Canis familiaris
gccattggccgtagagactgagtct

SEQ ID NO: 92927 - DNA, 25 bp, Canis familiaris
gccatcatggccaagggggagctgc

SEQ ID NO: 92928 - DNA, 25 bp, Canis familiaris
gccatcatggacacgagccgtgtgc

SEQ ID NO: 92929 - DNA, 25 bp, Canis familiaris
gccatctgtaattccagccattcgc

SEQ ID NO: 92930 - DNA, 25 bp, Canis familiaris
gcctttgaattagccatttctccta

SEQ ID NO: 92931 - DNA, 25 bp, Canis familiaris
gccttgatacattagcccttaaact

SEQ ID NO: 92932 - DNA, 25 bp, Canis familiaris
gcctattacattagcaccttcaact

SEQ ID NO: 92933 - DNA, 25 bp, Canis familiaris
gcctatgaactgaagcatgctctta

SEQ ID NO: 92934 - DNA, 25 bp, Canis familiaris
gccatagtcatgctcaggctctgtg

SEQ ID NO: 92935 - DNA, 25 bp, Canis familiaris
gccatgaagctgatcgtgcctgtgc

SEQ ID NO: 92936 - DNA, 25 bp, Canis familiaris
gccgatcagatggtcagtgccttgt

SEQ ID NO: 92937 - DNA, 25 bp, Canis familiaris
gccatgctaggcacattgcactaat

SEQ ID NO: 92938 - DNA, 25 bp, Canis familiaris
gccatctatggctcttcagcattta

SEQ ID NO: 92939 - DNA, 25 bp, Canis familiaris
gccatcttgcgaactacacttgtaa

SEQ ID NO: 92940 - DNA, 25 bp, Canis familiaris
gccatgtatccttctaaattttatc

SEQ ID NO: 92941 - DNA, 25 bp, Canis familiaris
gcctacacgcgactgaacatttttc

SEQ ID NO: 92942 - DNA, 25 bp, Canis familiaris
gcctacggtgctaaacactttggtg

SEQ ID NO: 92943 - DNA, 25 bp, Canis familiaris
gcctaggtgctgttaccatctgggt

SEQ ID NO: 92944 - DNA, 25 bp, Canis familiaris
gccattcttctgttcaaatctggtt

SEQ ID NO: 92945 - DNA, 25 bp, Canis familiaris
gccatccttcctgaaattgggcact

SEQ ID NO: 92946 - DNA, 25 bp, Canis familiaris
gccatcttcccccaaaatggactag

SEQ ID NO: 92947 - DNA, 25 bp, Canis familiaris
gcctctaccgctggaagttgtacga

SEQ ID NO: 92948 - DNA, 25 bp, Canis familiaris
gcctcaaggctctggagctgtggat

SEQ ID NO: 92949 - DNA, 25 bp, Canis familiaris
gcgccgaggcacgagatcacggaat

SEQ ID NO: 92950 - DNA, 25 bp, Canis familiaris
gccccaggactagcctggaagcccc

SEQ ID NO: 92951 - DNA, 25 bp, Canis familiaris
gcctcagggatctccctgcagggac

SEQ ID NO: 92952 - DNA, 25 bp, Canis familiaris
gccattgggttttctcacaggcaga

SEQ ID NO: 92953 - DNA, 25 bp, Canis familiaris
gccatcggagatttacacacggaca

SEQ ID NO: 92954 - DNA, 25 bp, Canis familiaris
gccatccgagtgtttcgtgcgtgca

SEQ ID NO: 92955 - DNA, 25 bp, Canis familiaris
gccatccaggcgttcctgaggtgag

SEQ ID NO: 92956 - DNA, 25 bp, Canis familiaris
gccttgcagtgacttccgaaggatg

SEQ ID NO: 92957 - DNA, 25 bp, Canis familiaris
gccttggagtttggcagactcagct

SEQ ID NO: 92958 - DNA, 25 bp, Canis familiaris
gcctcgggtaatgacactccgggtc

SEQ ID NO: 92959 - DNA, 25 bp, Canis familiaris
tcgaggacctaaaccagcaggcagc

SEQ ID NO: 92960 - DNA, 25 bp, Canis familiaris
tcacgggtaaacaagagtacccttg

SEQ ID NO: 92961 - DNA, 25 bp, Canis familiaris
gcccgttcaaacaaagtatgcccag

SEQ ID NO: 92962 - DNA, 25 bp, Canis familiaris
gcccgtgtggaagaagcctccaccc

SEQ ID NO: 92963 - DNA, 25 bp, Canis familiaris
gcctcagaggaggagtattccacca

SEQ ID NO: 92964 - DNA, 25 bp, Canis familiaris
gcctgagagtctgcatttctaacca

SEQ ID NO: 92965 - DNA, 25 bp, Canis familiaris
gcctgatgcattgctcattattccc

SEQ ID NO: 92966 - DNA, 25 bp, Canis familiaris
gccttttgtccattaatcagcaaat

SEQ ID NO: 92967 - DNA, 25 bp, Canis familiaris
gccatttctaccacgatagcagaat

SEQ ID NO: 92968 - DNA, 25 bp, Canis familiaris
gccttctaaccacctgataagcaat

SEQ ID NO: 92969 - DNA, 25 bp, Canis familiaris
gcctttatcatctctcttatggtat

SEQ ID NO: 92970 - DNA, 25 bp, Canis familiaris
gccatctcctacatctatgttggta

SEQ ID NO: 92971 - DNA, 25 bp, Canis familiaris
gccatccgctacatggagttctgcg

SEQ ID NO: 92972 - DNA, 25 bp, Canis familiaris
gccatccgtgcatcgggtacaatag

SEQ ID NO: 92973 - DNA, 25 bp, Canis familiaris
gccatacgaccagggctgtaactat

SEQ ID NO: 92974 - DNA, 25 bp, Canis familiaris
gcctactgacccatgcagatagagc

SEQ ID NO: 92975 - DNA, 25 bp, Canis familiaris
gcctcaggcacccaatgcattgaag

SEQ ID NO: 92976 - DNA, 25 bp, Canis familiaris
gccatcaccaattaactagaagcct

SEQ ID NO: 92977 - DNA, 25 bp, Canis familiaris
gccatgcccattggaacatagccag

SEQ ID NO: 92978 - DNA, 25 bp, Canis familiaris
gccatcccttgcaaccaacataggg

SEQ ID NO: 92979 - DNA, 25 bp, Canis familiaris
gccatcctgctggttccagagcagg

SEQ ID NO: 92980 - DNA, 25 bp, Canis familiaris
gccatcctctgatgcccatagaagc

SEQ ID NO: 92981 - DNA, 25 bp, Canis familiaris
gccatcttgtaactgctcaacactc

SEQ ID NO: 92982 - DNA, 25 bp, Canis familiaris
gccatcttgtaggctctgacgtcac

SEQ ID NO: 92983 - DNA, 25 bp, Canis familiaris
gccattgccatcgctgcaggcgttc

SEQ ID NO: 92984 - DNA, 25 bp, Canis familiaris
gccatcatccatggccaagcgtttc

SEQ ID NO: 92985 - DNA, 25 bp, Canis familiaris
gccatcaacttctaacagcatcatt

SEQ ID NO: 92986 - DNA, 25 bp, Canis familiaris
gccttgacagattcacacagttgat

SEQ ID NO: 92987 - DNA, 25 bp, Canis familiaris
gccttgtgaatctgcgcagcttggc

SEQ ID NO: 92988 - DNA, 25 bp, Canis familiaris
gccattggaaagcctgtgttgggca

SEQ ID NO: 92989 - DNA, 25 bp, Canis familiaris
gccattagagagcctttgttgttca

SEQ ID NO: 92990 - DNA, 25 bp, Canis familiaris
gccattaatatgcttgtgtctgctc

SEQ ID NO: 92991 - DNA, 25 bp, Canis familiaris
gccatctcacattcctgtgtggctc

SEQ ID NO: 92992 - DNA, 25 bp, Canis familiaris
gcctctgcattccagggcgctgtca

SEQ ID NO: 92993 - DNA, 25 bp, Canis familiaris
gccttcaacagaagctgtgctgcca

SEQ ID NO: 92994 - DNA, 25 bp, Canis familiaris
gcctatcaagcaggccttctacaac

SEQ ID NO: 92995 - DNA, 25 bp, Canis familiaris
gcctattcagcagttccctactgaa

SEQ ID NO: 92996 - DNA, 25 bp, Canis familiaris
gcctattcagcagttccctactgaa

SEQ ID NO: 92997 - DNA, 25 bp, Canis familiaris
gcctttcccgatcgacagaatcaag

SEQ ID NO: 92998 - DNA, 25 bp, Canis familiaris
gccttcttcggtcactgtaacagaa

SEQ ID NO: 92999 - DNA, 25 bp, Canis familiaris
gccttctgtgacgtcacactgtaac

SEQ ID NO: 93000 - DNA, 25 bp, Canis familiaris
gccgtattcatcgacacctgaaatc

SEQ ID NO: 93001 - DNA, 25 bp, Canis familiaris
gcctgtaactgtgtcctggaattcc

SEQ ID NO: 93002 - DNA, 25 bp, Canis familiaris
gcctgaaacaggatgcccggagtcc

SEQ ID NO: 93003 - DNA, 25 bp, Canis familiaris
gcctaccatggtgaccacgggtgac

SEQ ID NO: 93004 - DNA, 25 bp, Canis familiaris
gccatcccggcgtaaacgcgggacg

SEQ ID NO: 93005 - DNA, 25 bp, Canis familiaris
gcctccctcgttagaatccgggact

SEQ ID NO: 93006 - DNA, 25 bp, Canis familiaris
gcctccacccttaaactagtgggag

SEQ ID NO: 93007 - DNA, 25 bp, Canis familiaris
gccccaacgacaagagatctcctgg

SEQ ID NO: 93008 - DNA, 25 bp, Canis familiaris
gccctcgatcaaaagaatccgtccc

SEQ ID NO: 93009 - DNA, 25 bp, Canis familiaris
gccctggaaatataacccttaagag

SEQ ID NO: 93010 - DNA, 25 bp, Canis familiaris
gcctatggaaaaatattgtcctata

SEQ ID NO: 93011 - DNA, 25 bp, Canis familiaris
gccttggacaaacttgttggctttt

SEQ ID NO: 93012 - DNA, 25 bp, Canis familiaris
gccttcgagatttctctgtatggca

SEQ ID NO: 93013 - DNA, 25 bp, Canis familiaris
gcctctgcggatgtcttgtacaggg

SEQ ID NO: 93014 - DNA, 25 bp, Canis familiaris
gcctcagcggtgcacagtgtgacaa

SEQ ID NO: 93015 - DNA, 25 bp, Canis familiaris
gcctcatgcatggacagacctggac

SEQ ID NO: 93016 - DNA, 25 bp, Canis familiaris
gccatatgcagacagcctggagagc

SEQ ID NO: 93017 - DNA, 25 bp, Canis familiaris
gccatagcatcaactcttgtacata

SEQ ID NO: 93018 - DNA, 25 bp, Canis familiaris
gccatatatatccctgcttatcata

SEQ ID NO: 93019 - DNA, 25 bp, Canis familiaris
gccatcaatgaccccttcattgatc

SEQ ID NO: 93020 - DNA, 25 bp, Canis familiaris
gccatcaatgaccccttcattgacc

SEQ ID NO: 93021 - DNA, 25 bp, Canis familiaris
gccatcaagtggtcgcttatatgag

SEQ ID NO: 93022 - DNA, 25 bp, Canis familiaris
gcctcatgttgagcgttaagagctg

SEQ ID NO: 93023 - DNA, 25 bp, Canis familiaris
gcctctactggcgctgccaaggctg

SEQ ID NO: 93024 - DNA, 25 bp, Canis familiaris
gccttactggcaatgcttccacagc

SEQ ID NO: 93025 - DNA, 25 bp, Canis familiaris
gccttgactgtggtgttatcacacc

SEQ ID NO: 93026 - DNA, 25 bp, Canis familiaris
gccttgtctgtggtctttcattaaa

SEQ ID NO: 93027 - DNA, 25 bp, Canis familiaris
gcctatctaggcacttcatattgaa

SEQ ID NO: 93028 - DNA, 25 bp, Canis familiaris
gccttctcttgttttcatttgactt

SEQ ID NO: 93029 - DNA, 25 bp, Canis familiaris
gcctatttatgtgcattagtcttct

SEQ ID NO: 93030 - DNA, 25 bp, Canis familiaris
gccatagttctttcatttcacttct

SEQ ID NO: 93031 - DNA, 25 bp, Canis familiaris
gccatcacttttacagctttcattt

SEQ ID NO: 93032 - DNA, 25 bp, Canis familiaris
gcctacttgccgacgataactttgt

SEQ ID NO: 93033 - DNA, 25 bp, Canis familiaris
gcctacttccgctgtaagaatcttg

SEQ ID NO: 93034 - DNA, 25 bp, Canis familiaris
gccccttccggagacagggcttgca

SEQ ID NO: 93035 - DNA, 25 bp, Canis familiaris
gcctcccggggagatcaaggttgat

SEQ ID NO: 93036 - DNA, 25 bp, Canis familiaris
gcctgcacgggggagaacccctaga

SEQ ID NO: 93037 - DNA, 25 bp, Canis familiaris
gcctatctggggtgagcccgagaag

SEQ ID NO: 93038 - DNA, 25 bp, Canis familiaris
gcctaagtgggaggctcctggcagg

SEQ ID NO: 93039 - DNA, 25 bp, Canis familiaris
gccatactggggccaggccaggggc

SEQ ID NO: 93040 - DNA, 25 bp, Canis familiaris
gccataggggggttcacgcgtggcg

SEQ ID NO: 93041 - DNA, 25 bp, Canis familiaris
gccttcagggggaatgcggggccgg

SEQ ID NO: 93042 - DNA, 25 bp, Canis familiaris
gccttaggaggtacacctgcgtgcc

SEQ ID NO: 93043 - DNA, 25 bp, Canis familiaris
gccttggaagtgatgctgcctggtg

SEQ ID NO: 93044 - DNA, 25 bp, Canis familiaris
gccttcaactatgacatgcctgagg

SEQ ID NO: 93045 - DNA, 25 bp, Canis familiaris
gccattcacagcaaggtagtccgga

SEQ ID NO: 93046 - DNA, 25 bp, Canis familiaris
gccttgccaggatttgagtcggagc

SEQ ID NO: 93047 - DNA, 25 bp, Canis familiaris
gcctttctgcagtttttcaggagcg

SEQ ID NO: 93048 - DNA, 25 bp, Canis familiaris
gcctttctgcagtttttcaggagcg

SEQ ID NO: 93049 - DNA, 25 bp, Canis familiaris
gccttatcccagtctcttaggaggt

SEQ ID NO: 93050 - DNA, 25 bp, Canis familiaris
gccattttcctgtatcttaagatgc

SEQ ID NO: 93051 - DNA, 25 bp, Canis familiaris
gccattccatcactgatatttaagt

SEQ ID NO: 93052 - DNA, 25 bp, Canis familiaris
gcctctgcacctcgttttgggtgca

SEQ ID NO: 93053 - DNA, 25 bp, Canis familiaris
gccttcatcttgggtttgatggtcg

SEQ ID NO: 93054 - DNA, 25 bp, Canis familiaris
gccattctcattttgtctgtgctga

SEQ ID NO: 93055 - DNA, 25 bp, Canis familiaris
gcctttgagctctgcatctgagctt

SEQ ID NO: 93056 - DNA, 25 bp, Canis familiaris
gccttacgtgcaggatctggttact

SEQ ID NO: 93057 - DNA, 25 bp, Canis familiaris
gccttaatgacaaactgtctcaact

SEQ ID NO: 93058 - DNA, 25 bp, Canis familiaris
gccttaataaacttcacctgcagct

SEQ ID NO: 93059 - DNA, 25 bp, Canis familiaris
gccttatctaaatatacaccgcttc

SEQ ID NO: 93060 - DNA, 25 bp, Canis familiaris
gccttatctagaatataacaccgct

SEQ ID NO: 93061 - DNA, 25 bp, Canis familiaris
gcctttgcatggctattaccactgc

SEQ ID NO: 93062 - DNA, 25 bp, Canis familiaris
gcctttttggctgataccatctgca

SEQ ID NO: 93063 - DNA, 25 bp, Canis familiaris
gccttctttggggatgaaatgtcag

SEQ ID NO: 93064 - DNA, 25 bp, Canis familiaris
gccttgctttggagagaacacttgg

SEQ ID NO: 93065 - DNA, 25 bp, Canis familiaris
gcctttctctgggtatgaaccattc

SEQ ID NO: 93066 - DNA, 25 bp, Canis familiaris
gcctttgctgctgctgtagatacct

SEQ ID NO: 93067 - DNA, 25 bp, Canis familiaris
gccttcatgctcgcacaacagaagc

SEQ ID NO: 93068 - DNA, 25 bp, Canis familiaris
gcctctactcacagcagatcaggtg

SEQ ID NO: 93069 - DNA, 25 bp, Canis familiaris
gcctacctaatgtcagtggagtctt

SEQ ID NO: 93070 - DNA, 25 bp, Canis familiaris
gcctatcttatatagcccatgccat

SEQ ID NO: 93071 - DNA, 25 bp, Canis familiaris
gccttcgtgaaatcctactcagtag

SEQ ID NO: 93072 - DNA, 25 bp, Canis familiaris
gccttggtgtaagctcaagccggag

SEQ ID NO: 93073 - DNA, 25 bp, Canis familiaris
gccttatttgaaactcacacctcag

SEQ ID NO: 93074 - DNA, 25 bp, Canis familiaris
gccatattttgatcactatacagcc

SEQ ID NO: 93075 - DNA, 25 bp, Canis familiaris
gccatatgctttgccactatagatg

SEQ ID NO: 93076 - DNA, 25 bp, Canis familiaris
gccatagtttctggtttatatttcc

SEQ ID NO: 93077 - DNA, 25 bp, Canis familiaris
gcctagtttctggccatatttctac

SEQ ID NO: 93078 - DNA, 25 bp, Canis familiaris
gcctagttgactgtgctttctaacc

SEQ ID NO: 93079 - DNA, 25 bp, Canis familiaris
gcctggccgactgtgtatggctaca

SEQ ID NO: 93080 - DNA, 25 bp, Canis familiaris
gcctacacgaaagtttgcttacctg

SEQ ID NO: 93081 - DNA, 25 bp, Canis familiaris
gcctacaacagaatattaactacct

SEQ ID NO: 93082 - DNA, 25 bp, Canis familiaris
gcctatgcaattttgtaacctactc

SEQ ID NO: 93083 - DNA, 25 bp, Canis familiaris
gcctatgattatatactacccaccc

SEQ ID NO: 93084 - DNA, 25 bp, Canis familiaris
gccatagattatttgacttttcagt

SEQ ID NO: 93085 - DNA, 25 bp, Canis familiaris
gccttggtattgccagtttctcgtg

SEQ ID NO: 93086 - DNA, 25 bp, Canis familiaris
gcctcgactattcacatattctgct

SEQ ID NO: 93087 - DNA, 25 bp, Canis familiaris
gcctctattgcattacacattctcc

SEQ ID NO: 93088 - DNA, 25 bp, Canis familiaris
gccttaatgaaaaatatccttggtt

SEQ ID NO: 93089 - DNA, 25 bp, Canis familiaris
gccttgacagactggaagcccttgt

SEQ ID NO: 93090 - DNA, 25 bp, Canis familiaris
gccattccagagtgggttccttggt

SEQ ID NO: 93091 - DNA, 25 bp, Canis familiaris
gccttctctgagactggagttccat

SEQ ID NO: 93092 - DNA, 25 bp, Canis familiaris
gccttttggattggattgcttgcat

SEQ ID NO: 93093 - DNA, 25 bp, Canis familiaris
gcctctttcagttggatctcctgaa

SEQ ID NO: 93094 - DNA, 25 bp, Canis familiaris
gccttgctacaggaagttcactcaa

SEQ ID NO: 93095 - DNA, 25 bp, Canis familiaris
gccttgcgccagaaaattgtcatca

SEQ ID NO: 93096 - DNA, 25 bp, Canis familiaris
gcctctggcctgataggctggcaga

SEQ ID NO: 93097 - DNA, 25 bp, Canis familiaris
gccatttgcaggctcaggtggagaa

SEQ ID NO: 93098 - DNA, 25 bp, Canis familiaris
gccatttgcaacgacatggttggaa

SEQ ID NO: 93099 - DNA, 25 bp, Canis familiaris
gccattgtgccaaacagtgcttctg

SEQ ID NO: 93100 - DNA, 25 bp, Canis familiaris
gcctcttgctcagactgtggttgtg

SEQ ID NO: 93101 - DNA, 25 bp, Canis familiaris
gcctcatcgctgtaattgcgtggtt

SEQ ID NO: 93102 - DNA, 25 bp, Canis familiaris
gcctgtcctggtaactgtgtgtttg

SEQ ID NO: 93103 - DNA, 25 bp, Canis familiaris
gccttgcctgggacactgatgtaag

SEQ ID NO: 93104 - DNA, 25 bp, Canis familiaris
gccttcctgagccgcgatgaggaag

SEQ ID NO: 93105 - DNA, 25 bp, Canis familiaris
gcctaccattgcctctgtggtaaca

SEQ ID NO: 93106 - DNA, 25 bp, Canis familiaris
gcctgtctgcttcttgtaaataccc

SEQ ID NO: 93107 - DNA, 25 bp, Canis familiaris
gccttcagtgtgttctgtaaagggt

SEQ ID NO: 93108 - DNA, 25 bp, Canis familiaris
gccatatcagggtccgaaagcaggt

SEQ ID NO: 93109 - DNA, 25 bp, Canis familiaris
gccatatcagggtccgaaaccaggt

SEQ ID NO: 93110 - DNA, 25 bp, Canis familiaris
gccttcgaggacctaaaccagcagg

SEQ ID NO: 93111 - DNA, 25 bp, Canis familiaris
gcgttccggaactagaaggacatgg

SEQ ID NO: 93112 - DNA, 25 bp, Canis familiaris
gccttccggtagtagtggtcctggc

SEQ ID NO: 93113 - DNA, 25 bp, Canis familiaris
gcctttcaaattgagtggtctgtcc

SEQ ID NO: 93114 - DNA, 25 bp, Canis familiaris
gccttccaaatagacgtggggcctg

SEQ ID NO: 93115 - DNA, 25 bp, Canis familiaris
gcctttgcacactggggtgggggct

SEQ ID NO: 93116 - DNA, 25 bp, Canis familiaris
gcctttgcacaggtgccaaggggag

SEQ ID NO: 93117 - DNA, 25 bp, Canis familiaris
gccttgcccaggacgctgggggagc

SEQ ID NO: 93118 - DNA, 25 bp, Canis familiaris
gccttgcccgagagtgggggacagc

SEQ ID NO: 93119 - DNA, 25 bp, Canis familiaris
gccattccaccaggaagggtgggcc

SEQ ID NO: 93120 - DNA, 25 bp, Canis familiaris
gccttgtctcaccgaggaagtgggc

SEQ ID NO: 93121 - DNA, 25 bp, Canis familiaris
gcctttttccagtgtcgctgggatg

SEQ ID NO: 93122 - DNA, 25 bp, Canis familiaris
gccttgttttacttgttctgtggac

SEQ ID NO: 93123 - DNA, 25 bp, Canis familiaris
gcctttttgtctttaatgctgtgga

SEQ ID NO: 93124 - DNA, 25 bp, Canis familiaris
gcctttcatgttcactagtcttaga

SEQ ID NO: 93125 - DNA, 25 bp, Canis familiaris
gcctttcttaaagtgaatgcctcag

SEQ ID NO: 93126 - DNA, 25 bp, Canis familiaris
gcctattgttaatggaagccttatc

SEQ ID NO: 93127 - DNA, 25 bp, Canis familiaris
gccttcgctgtacgggaagcgcttc

SEQ ID NO: 93128 - DNA, 25 bp, Canis familiaris
gccttcggctcacggtgaagtccga

SEQ ID NO: 93129 - DNA, 25 bp, Canis familiaris
gccttgctggccaggccacaatgct

SEQ ID NO: 93130 - DNA, 25 bp, Canis familiaris
gccattgttgacacaggcacctctc

SEQ ID NO: 93131 - DNA, 25 bp, Canis familiaris
gccttgatattctcaatgcagccct

SEQ ID NO: 93132 - DNA, 25 bp, Canis familiaris
gccttgctcccattatagagcctcc

SEQ ID NO: 93133 - DNA, 25 bp, Canis familiaris
gccttcacctcagtgagagcacgtc

SEQ ID NO: 93134 - DNA, 25 bp, Canis familiaris
gcctgtcaacattcaatatgaagtc

SEQ ID NO: 93135 - DNA, 25 bp, Canis familiaris
gcctgctggacatcctggacacagc

SEQ ID NO: 93136 - DNA, 25 bp, Canis familiaris
gccttggacggaagcgcagagccga

SEQ ID NO: 93137 - DNA, 25 bp, Canis familiaris
gcctctggaggtcacgtgacccaga

SEQ ID NO: 93138 - DNA, 25 bp, Canis familiaris
gcctctggaggtcacgtgacccaga

SEQ ID NO: 93139 - DNA, 25 bp, Canis familiaris
gcctctggaggtcacgtgacccaga

SEQ ID NO: 93140 - DNA, 25 bp, Canis familiaris
gcctctggaggtcacgtgacccaga

SEQ ID NO: 93141 - DNA, 25 bp, Canis familiaris
gcctctggaggtcacgtgacccaga

SEQ ID NO: 93142 - DNA, 25 bp, Canis familiaris
gcctcttagttgcatctgtactaca

SEQ ID NO: 93143 - DNA, 25 bp, Canis familiaris
gcctttcagcgtgatcgtgcagctg

SEQ ID NO: 93144 - DNA, 25 bp, Canis familiaris
gccttcatgcagggcgaaatcgcga

SEQ ID NO: 93145 - DNA, 25 bp, Canis familiaris
gccttcatggtagacaatgaggcca

SEQ ID NO: 93146 - DNA, 25 bp, Canis familiaris
gccttctggaagccgaatggccctc

SEQ ID NO: 93147 - DNA, 25 bp, Canis familiaris
gcctttgtacaacgattgtcaccct

SEQ ID NO: 93148 - DNA, 25 bp, Canis familiaris
gccttttctagatattacaccgctt

SEQ ID NO: 93149 - DNA, 25 bp, Canis familiaris
gccttcttccagcaattttctggtt

SEQ ID NO: 93150 - DNA, 25 bp, Canis familiaris
gccttttgccattaaactatttcat

SEQ ID NO: 93151 - DNA, 25 bp, Canis familiaris
gcctttcctcaattcaattcaattc

SEQ ID NO: 93152 - DNA, 25 bp, Canis familiaris
gccattgctctgacaactgcactat

SEQ ID NO: 93153 - DNA, 25 bp, Canis familiaris
gccttccgtagaatcactcatacct

SEQ ID NO: 93154 - DNA, 25 bp, Canis familiaris
gccttcctgtttacttatagcatca

SEQ ID NO: 93155 - DNA, 25 bp, Canis familiaris
gccttcacttgaaatcttagcagtc

SEQ ID NO: 93156 - DNA, 25 bp, Canis familiaris
gccgtcctatgtaatgctgtactct

SEQ ID NO: 93157 - DNA, 25 bp, Canis familiaris
gccgtcctatgtgagtccatgatca

SEQ ID NO: 93158 - DNA, 25 bp, Canis familiaris
gccttagctctgggaagtcttgcat

SEQ ID NO: 93159 - DNA, 25 bp, Canis familiaris
gccttggcctggctcagatagctga

SEQ ID NO: 93160 - DNA, 25 bp, Canis familiaris
gcctgccgacttcggaagtgctatg

SEQ ID NO: 93161 - DNA, 25 bp, Canis familiaris
gcctcacaagctaatgtccgtgtca

SEQ ID NO: 93162 - DNA, 25 bp, Canis familiaris
gccttgacagtcaagctcttagtca

SEQ ID NO: 93163 - DNA, 25 bp, Canis familiaris
gccttggagtaaccgtgaatcacct

SEQ ID NO: 93164 - DNA, 25 bp, Canis familiaris
gccttgatgctgtaacctgtaaact

SEQ ID NO: 93165 - DNA, 25 bp, Canis familiaris
gcctcagagctgtagccacttaagc

SEQ ID NO: 93166 - DNA, 25 bp, Canis familiaris
gcctgggcttcaggccattttcagc

SEQ ID NO: 93167 - DNA, 25 bp, Canis familiaris
gccttagttcaggtcctgattctgg

SEQ ID NO: 93168 - DNA, 25 bp, Canis familiaris
gccttatttagcacagctatcatga

SEQ ID NO: 93169 - DNA, 25 bp, Canis familiaris
gcctctatgtattggctactacagt

SEQ ID NO: 93170 - DNA, 25 bp, Canis familiaris
gcctcttctattcctttgacagatg

SEQ ID NO: 93171 - DNA, 25 bp, Canis familiaris
gcctttcacatcagcctctgaagag

SEQ ID NO: 93172 - DNA, 25 bp, Canis familiaris
gcctttcctccgacatcataggaag

SEQ ID NO: 93173 - DNA, 25 bp, Canis familiaris
gcctatcttcttctctatctggaag

SEQ ID NO: 93174 - DNA, 25 bp, Canis familiaris
gcctatctctaatttcttccaaaaa

SEQ ID NO: 93175 - DNA, 25 bp, Canis familiaris
gccttccgcaaaactgtgagcaaaa

SEQ ID NO: 93176 - DNA, 25 bp, Canis familiaris
gccttccgctcacaggctgtgagtc

SEQ ID NO: 93177 - DNA, 25 bp, Canis familiaris
gccttgagcccaccagtgggagcct

SEQ ID NO: 93178 - DNA, 25 bp, Canis familiaris
gcctatgagctcaaccgggaagcct

SEQ ID NO: 93179 - DNA, 25 bp, Canis familiaris
gcctatgagctcaaccgggaagcct

SEQ ID NO: 93180 - DNA, 25 bp, Canis familiaris
gcctatgagctcaaccgggaagcct

SEQ ID NO: 93181 - DNA, 25 bp, Canis familiaris
gcctatgagctcaaccgggaagcct

SEQ ID NO: 93182 - DNA, 25 bp, Canis familiaris
gcctatgagctcaaccgggaagcct

SEQ ID NO: 93183 - DNA, 25 bp, Canis familiaris
gcctatgagctcaaccgggaagcct

SEQ ID NO: 93184 - DNA, 25 bp, Canis familiaris
gcctatgagctcaaccgggaagcct

SEQ ID NO: 93185 - DNA, 25 bp, Canis familiaris
gcctatgagctcaaccgggaagcct

SEQ ID NO: 93186 - DNA, 25 bp, Canis familiaris
gcctatgagctcaaccgggaagcct

SEQ ID NO: 93187 - DNA, 25 bp, Canis familiaris
gccttgagcttctcaggtgagtcct

SEQ ID NO: 93188 - DNA, 25 bp, Canis familiaris
gccttgagcattctgaggtggtcac

SEQ ID NO: 93189 - DNA, 25 bp, Canis familiaris
gcctttgcttccaggctgggagcag

SEQ ID NO: 93190 - DNA, 25 bp, Canis familiaris
gccttatgtcacgtagcgtgcgtaa

SEQ ID NO: 93191 - DNA, 25 bp, Canis familiaris
gccttttcctcttctgtgaacagaa

SEQ ID NO: 93192 - DNA, 25 bp, Canis familiaris
gcctctctccttggacatgtgaaca

SEQ ID NO: 93193 - DNA, 25 bp, Canis familiaris
gcctgctctgacactcaagttaatg

SEQ ID NO: 93194 - DNA, 25 bp, Canis familiaris
gcctctatacatactaaccaataac

SEQ ID NO: 93195 - DNA, 25 bp, Canis familiaris
gcctctctcagagcttaccatatga

SEQ ID NO: 93196 - DNA, 25 bp, Canis familiaris
gcctctccgcagatatcatcattag

SEQ ID NO: 93197 - DNA, 25 bp, Canis familiaris
gcctagcacatggtatcatccagta

SEQ ID NO: 93198 - DNA, 25 bp, Canis familiaris
gcctacacatgcatcagactggtta

SEQ ID NO: 93199 - DNA, 25 bp, Canis familiaris
gcctagcatgtcggaagcgggtgag

SEQ ID NO: 93200 - DNA, 25 bp, Canis familiaris
gcctcactctctggagacgcgaggt

SEQ ID NO: 93201 - DNA, 25 bp, Canis familiaris
gcctacccttagggggagtctactg

SEQ ID NO: 93202 - DNA, 25 bp, Canis familiaris
gcccacctttttgtgggccatccac

SEQ ID NO: 93203 - DNA, 25 bp, Canis familiaris
gcctactttgtgaccaaggagctca

SEQ ID NO: 93204 - DNA, 25 bp, Canis familiaris
gcctagtgtttgtccagcggagtca

SEQ ID NO: 93205 - DNA, 25 bp, Canis familiaris
gcctggcctttctacagggagctag

SEQ ID NO: 93206 - DNA, 25 bp, Canis familiaris
gcctcgagcccctcagaggcaaaac

SEQ ID NO: 93207 - DNA, 25 bp, Canis familiaris
gcctgttgcccactacaaggtaaca

SEQ ID NO: 93208 - DNA, 25 bp, Canis familiaris
gccttgtaccaaagctcaggtgaaa

SEQ ID NO: 93209 - DNA, 25 bp, Canis familiaris
gcgtcttacaactcttcgttatcaa

SEQ ID NO: 93210 - DNA, 25 bp, Canis familiaris
gcctcaaataacttgcttcgacttc

SEQ ID NO: 93211 - DNA, 25 bp, Canis familiaris
gcctcactatcgacaagctctagac

SEQ ID NO: 93212 - DNA, 25 bp, Canis familiaris
gcctcctgtgctacaagtgctgcac

SEQ ID NO: 93213 - DNA, 25 bp, Canis familiaris
gcctctctggctgagtgttgggtga

SEQ ID NO: 93214 - DNA, 25 bp, Canis familiaris
gcctccgaggggctgatggtggatc

SEQ ID NO: 93215 - DNA, 25 bp, Canis familiaris
gcctcacgagctaccgattgtgggg

SEQ ID NO: 93216 - DNA, 25 bp, Canis familiaris
gcctgacctttccatttggggtgag

SEQ ID NO: 93217 - DNA, 25 bp, Canis familiaris
gcctaccaacccagagtgggggaca

SEQ ID NO: 93218 - DNA, 25 bp, Canis familiaris
gccttcacaagccccgtagaggggt

SEQ ID NO: 93219 - DNA, 25 bp, Canis familiaris
gcgcttcgacagcgacgtgggggag

SEQ ID NO: 93220 - DNA, 25 bp, Canis familiaris
gcgcttcgacagcgacgtgggggag

SEQ ID NO: 93221 - DNA, 25 bp, Canis familiaris
gcctctctaacccacggagtgggag

SEQ ID NO: 93222 - DNA, 25 bp, Canis familiaris
gccttctagagagacctgggggcct

SEQ ID NO: 93223 - DNA, 25 bp, Canis familiaris
gccttccagacagacctggagcctg

SEQ ID NO: 93224 - DNA, 25 bp, Canis familiaris
gcctcctcatggatacactgggcct

SEQ ID NO: 93225 - DNA, 25 bp, Canis familiaris
gcgcaagttgccgtaattggagcct

SEQ ID NO: 93226 - DNA, 25 bp, Canis familiaris
gcgcggaacatcatcaacgcggccc

SEQ ID NO: 93227 - DNA, 25 bp, Canis familiaris
gccggactacatgaacctgctcggc

SEQ ID NO: 93228 - DNA, 25 bp, Canis familiaris
gcctgatgactattagcaagcctca

SEQ ID NO: 93229 - DNA, 25 bp, Canis familiaris
gcctgtgcatctagtaagcacctct

SEQ ID NO: 93230 - DNA, 25 bp, Canis familiaris
gcctatctgttgaaggctcctctct

SEQ ID NO: 93231 - DNA, 25 bp, Canis familiaris
gcctatctgtatggggtgcacagcc

SEQ ID NO: 93232 - DNA, 25 bp, Canis familiaris
gcctcatctccaggagggaacctct

SEQ ID NO: 93233 - DNA, 25 bp, Canis familiaris
gcctcttgcctcagggaaacgtttc

SEQ ID NO: 93234 - DNA, 25 bp, Canis familiaris
gcctcagacctcaggggacagtgga

SEQ ID NO: 93235 - DNA, 25 bp, Canis familiaris
gcctaaggctctgagggcttgggat

SEQ ID NO: 93236 - DNA, 25 bp, Canis familiaris
gcctagaggtgtgcctgggtggctg

SEQ ID NO: 93237 - DNA, 25 bp, Canis familiaris
gcctaaggtgtaatcctggagacca

SEQ ID NO: 93238 - DNA, 25 bp, Canis familiaris
gcctaagaggcctttctggagcaac

SEQ ID NO: 93239 - DNA, 25 bp, Canis familiaris
gcctgggaagcgttactggagtagt

SEQ ID NO: 93240 - DNA, 25 bp, Canis familiaris
gcctggtgcaacggtaacgacggag

SEQ ID NO: 93241 - DNA, 25 bp, Canis familiaris
gccggtgaacgtgcaaaacaggctc

SEQ ID NO: 93242 - DNA, 25 bp, Canis familiaris
gcgctttgaaaagaaatttgtcctt

SEQ ID NO: 93243 - DNA, 25 bp, Canis familiaris
gccttctgagaatctctactttccc

SEQ ID NO: 93244 - DNA, 25 bp, Canis familiaris
gcctaatagaacctctacgggccaa

SEQ ID NO: 93245 - DNA, 25 bp, Canis familiaris
gcctagtgagactttgctaccatga

SEQ ID NO: 93246 - DNA, 25 bp, Canis familiaris
gcctcagggaacaagcactgccatc

SEQ ID NO: 93247 - DNA, 25 bp, Canis familiaris
gccttgctggactataaccttctaa

SEQ ID NO: 93248 - DNA, 25 bp, Canis familiaris
gcctcgcatgcgtgataacgattct

SEQ ID NO: 93249 - DNA, 25 bp, Canis familiaris
gcctctatcgtctttatcaagcttg

SEQ ID NO: 93250 - DNA, 25 bp, Canis familiaris
gcctctgtaacaattcaactgtgct

SEQ ID NO: 93251 - DNA, 25 bp, Canis familiaris
gcctctgaaacacctaactgttctg

SEQ ID NO: 93252 - DNA, 25 bp, Canis familiaris
gccttaacacagaaaccattctcgt

SEQ ID NO: 93253 - DNA, 25 bp, Canis familiaris
gccttaacacagatagcattcattc

SEQ ID NO: 93254 - DNA, 25 bp, Canis familiaris
gccttcggcgcacaatgcttatggc

SEQ ID NO: 93255 - DNA, 25 bp, Canis familiaris
gccttctggggattcatgttctgga

SEQ ID NO: 93256 - DNA, 25 bp, Canis familiaris
gcgcttcatgggcgctacgtcatta

SEQ ID NO: 93257 - DNA, 25 bp, Canis familiaris
gcctgcaaggagaactactgtctta

SEQ ID NO: 93258 - DNA, 25 bp, Canis familiaris
gcctccattaaacgactttatttgg

SEQ ID NO: 93259 - DNA, 25 bp, Canis familiaris
gcctctgcgtgaaagcgggattatt

SEQ ID NO: 93260 - DNA, 25 bp, Canis familiaris
gcctctgctggtacacgaagatgtg

SEQ ID NO: 93261 - DNA, 25 bp, Canis familiaris
gcctgcagctggaccaagacagatg

SEQ ID NO: 93262 - DNA, 25 bp, Canis familiaris
gcctatgaggccaaagcctgctggc

SEQ ID NO: 93263 - DNA, 25 bp, Canis familiaris
gcctacatggaccagcagaccggca

SEQ ID NO: 93264 - DNA, 25 bp, Canis familiaris
gcctgaaagactaggaccctcagaa

SEQ ID NO: 93265 - DNA, 25 bp, Canis familiaris
gcctcttcagacaaaggctcccaaa

SEQ ID NO: 93266 - DNA, 25 bp, Canis familiaris
gcctaatgcaggaaagagtgcccaa

SEQ ID NO: 93267 - DNA, 25 bp, Canis familiaris
gcctatattccttagagctataata

SEQ ID NO: 93268 - DNA, 25 bp, Canis familiaris
gcctagtttctctagtgtgatttga

SEQ ID NO: 93269 - DNA, 25 bp, Canis familiaris
gcctagattattcagaggtgattca

SEQ ID NO: 93270 - DNA, 25 bp, Canis familiaris
gcccactatattcatatttttaccc

SEQ ID NO: 93271 - DNA, 25 bp, Canis familiaris
gcctactacatatatcatctcattt

SEQ ID NO: 93272 - DNA, 25 bp, Canis familiaris
gcctttatcatatgtaatcactctg

SEQ ID NO: 93273 - DNA, 25 bp, Canis familiaris
gccttagaattcatcaatccctgag

SEQ ID NO: 93274 - DNA, 25 bp, Canis familiaris
gcctttgatatttcatgcaagtgcc

SEQ ID NO: 93275 - DNA, 25 bp, Canis familiaris
gcctgattgaacttcagcctggcct

SEQ ID NO: 93276 - DNA, 25 bp, Canis familiaris
gcctgaggccattgagcctgtgctg

SEQ ID NO: 93277 - DNA, 25 bp, Canis familiaris
gcctgagatgtttactcgtgccgaa

SEQ ID NO: 93278 - DNA, 25 bp, Canis familiaris
gcctggagctttgatagttctaaaa

SEQ ID NO: 93279 - DNA, 25 bp, Canis familiaris
gcctggatgcttaccatagatctac

SEQ ID NO: 93280 - DNA, 25 bp, Canis familiaris
gccgatatgcagtttaagataattg

SEQ ID NO: 93281 - DNA, 25 bp, Canis familiaris
gcctctatcagcttatacttcagtt

SEQ ID NO: 93282 - DNA, 25 bp, Canis familiaris
gcctttagttattgttcagctctta

SEQ ID NO: 93283 - DNA, 25 bp, Canis familiaris
gcctatatctttatgatctgagttt

SEQ ID NO: 93284 - DNA, 25 bp, Canis familiaris
gccttcatcatcatttgtgcttgct

SEQ ID NO: 93285 - DNA, 25 bp, Canis familiaris
gccttcttctggctgtgatggcata

SEQ ID NO: 93286 - DNA, 25 bp, Canis familiaris
gccttctcttggtggatatgcttgc

SEQ ID NO: 93287 - DNA, 25 bp, Canis familiaris
gcctttccggctgggatagtttctg

SEQ ID NO: 93288 - DNA, 25 bp, Canis familiaris
gccttttatggtgagtagtttgatc

SEQ ID NO: 93289 - DNA, 25 bp, Canis familiaris
gcctttttcaaagccttttgtccat

SEQ ID NO: 93290 - DNA, 25 bp, Canis familiaris
gcctgcattaatgaaaccttttctc

SEQ ID NO: 93291 - DNA, 25 bp, Canis familiaris
gcctcaaaagaaaccaaccttctca

SEQ ID NO: 93292 - DNA, 25 bp, Canis familiaris
gcgctacatgtaaccccaaagttcc

SEQ ID NO: 93293 - DNA, 25 bp, Canis familiaris
gcagaaagaaccacctaacttccca

SEQ ID NO: 93294 - DNA, 25 bp, Canis familiaris
gcgaaaacgtgctcccagattcgcc

SEQ ID NO: 93295 - DNA, 25 bp, Canis familiaris
gcgaaccgcgtgtacctgaatatgc

SEQ ID NO: 93296 - DNA, 25 bp, Canis familiaris
gcgaacctagtgtggtggttgtaga

SEQ ID NO: 93297 - DNA, 25 bp, Canis familiaris
gcgacagcgggacttagggtaagga

SEQ ID NO: 93298 - DNA, 25 bp, Canis familiaris
gcgccagatagattttgggaataag

SEQ ID NO: 93299 - DNA, 25 bp, Canis familiaris
gcctctttgcttttaggaataacct

SEQ ID NO: 93300 - DNA, 25 bp, Canis familiaris
gcctcttttggctatgaatgcttaa

SEQ ID NO: 93301 - DNA, 25 bp, Canis familiaris
gcctgttagtggttcacacttaaga

SEQ ID NO: 93302 - DNA, 25 bp, Canis familiaris
gcctttgaatggcctgggctgtaaa

SEQ ID NO: 93303 - DNA, 25 bp, Canis familiaris
gcctttgggaggtgatatggagaat

SEQ ID NO: 93304 - DNA, 25 bp, Canis familiaris
gccttctggggtgttgatgccataa

SEQ ID NO: 93305 - DNA, 25 bp, Canis familiaris
gcctcgtggagattaattggttaaa

SEQ ID NO: 93306 - DNA, 25 bp, Canis familiaris
gcctatggccagtttctttgttgaa

SEQ ID NO: 93307 - DNA, 25 bp, Canis familiaris
gcctcagacctgagtttctgttgat

SEQ ID NO: 93308 - DNA, 25 bp, Canis familiaris
gcgctacagcctttttttcaagatt

SEQ ID NO: 93309 - DNA, 25 bp, Canis familiaris
gcactaaccaaaagtcttgccgatt

SEQ ID NO: 93310 - DNA, 25 bp, Canis familiaris
gcaatggaacacacgtttcctggcc

SEQ ID NO: 93311 - DNA, 25 bp, Canis familiaris
gcccagcagacaaccagtttccggc

SEQ ID NO: 93312 - DNA, 25 bp, Canis familiaris
gcctatgaaacttcgctgttctggg

SEQ ID NO: 93313 - DNA, 25 bp, Canis familiaris
gcctatattcacacacgtatgcggg

SEQ ID NO: 93314 - DNA, 25 bp, Canis familiaris
gccttttccagtggcaggtggctgg

SEQ ID NO: 93315 - DNA, 25 bp, Canis familiaris
gccttcttggcgcagcaggagagcg

SEQ ID NO: 93316 - DNA, 25 bp, Canis familiaris
gccttttggtgttggggatgccggt

SEQ ID NO: 93317 - DNA, 25 bp, Canis familiaris
gcctaagctgagcatggggcgtccg

SEQ ID NO: 93318 - DNA, 25 bp, Canis familiaris
gcctaacacatgctggggtcttcag

SEQ ID NO: 93319 - DNA, 25 bp, Canis familiaris
gcctgatgacatttttagagttgac

SEQ ID NO: 93320 - DNA, 25 bp, Canis familiaris
gccgatggctgctagtgttagagtg

SEQ ID NO: 93321 - DNA, 25 bp, Canis familiaris
gcctgtgtgcactgattttgattaa

SEQ ID NO: 93322 - DNA, 25 bp, Canis familiaris
gcctgtggcagctggttttatacgc

SEQ ID NO: 93323 - DNA, 25 bp, Canis familiaris
gcctatgatgacgggggtctcttcc

SEQ ID NO: 93324 - DNA, 25 bp, Canis familiaris
gccttcagctcgggatgtgattctg

SEQ ID NO: 93325 - DNA, 25 bp, Canis familiaris
gccgatcagcctgcagagttgtcat

SEQ ID NO: 93326 - DNA, 25 bp, Canis familiaris
gccttcagctatgacagttgctccc

SEQ ID NO: 93327 - DNA, 25 bp, Canis familiaris
gccgggctacgatgacatgtacctg

SEQ ID NO: 93328 - DNA, 25 bp, Canis familiaris
gccgtggacctgtacgagtatgcgt

SEQ ID NO: 93329 - DNA, 25 bp, Canis familiaris
gcctgctgagaagtgctgaggagct

SEQ ID NO: 93330 - DNA, 25 bp, Canis familiaris
gcctgctgcagggtgagatgaagtt

SEQ ID NO: 93331 - DNA, 25 bp, Canis familiaris
gcctctgctgaggctgtgtttgcct

SEQ ID NO: 93332 - DNA, 25 bp, Canis familiaris
gcctggcatggtaggtactgcccga

SEQ ID NO: 93333 - DNA, 25 bp, Canis familiaris
gcctagcagaggatgaaaacacgca

SEQ ID NO: 93334 - DNA, 25 bp, Canis familiaris
gcctcatcaaggtggagagcgccgc

SEQ ID NO: 93335 - DNA, 25 bp, Canis familiaris
gcctgatcaataccccagagcgggg

SEQ ID NO: 93336 - DNA, 25 bp, Canis familiaris
gcgtaaacaggtgaagggcagcggt

SEQ ID NO: 93337 - DNA, 25 bp, Canis familiaris
gcctgaagcaaggggttcggccggt

SEQ ID NO: 93338 - DNA, 25 bp, Canis familiaris
gcctgagagaagctggttccagacc

SEQ ID NO: 93339 - DNA, 25 bp, Canis familiaris
gccggacagagggctttacaggacg

SEQ ID NO: 93340 - DNA, 25 bp, Canis familiaris
gcctagtcagatcgcgttatgaata

SEQ ID NO: 93341 - DNA, 25 bp, Canis familiaris
gcctcagtgctggggtatatgtgta

SEQ ID NO: 93342 - DNA, 25 bp, Canis familiaris
gcctacgtgttgctgatgcatggga

SEQ ID NO: 93343 - DNA, 25 bp, Canis familiaris
gcctaaccatctttgtgcagtacat

SEQ ID NO: 93344 - DNA, 25 bp, Canis familiaris
gcctggaccgtgctgatggatacta

SEQ ID NO: 93345 - DNA, 25 bp, Canis familiaris
gccgggggtcggagaacgagtctga

SEQ ID NO: 93346 - DNA, 25 bp, Canis familiaris
gccggtcggagcaggtggagcggtc

SEQ ID NO: 93347 - DNA, 25 bp, Canis familiaris
gcctgcggggcagagaggagggacc

SEQ ID NO: 93348 - DNA, 25 bp, Canis familiaris
gcctctggaaggtgctgaaggaagc

SEQ ID NO: 93349 - DNA, 25 bp, Canis familiaris
gcctgggatttctgtgaacgaatgc

SEQ ID NO: 93350 - DNA, 25 bp, Canis familiaris
gccgggaatgtctggctagatttgc

SEQ ID NO: 93351 - DNA, 25 bp, Canis familiaris
gccgggaagtgctgcaagatttgcc

SEQ ID NO: 93352 - DNA, 25 bp, Canis familiaris
gcctgggggtcagaatcactggcta

SEQ ID NO: 93353 - DNA, 25 bp, Canis familiaris
gcctttgttaaaacatgagtggctc

SEQ ID NO: 93354 - DNA, 25 bp, Canis familiaris
gcctgtctttctgaagcatgagtcc

SEQ ID NO: 93355 - DNA, 25 bp, Canis familiaris
gcctatcattcttatcatactgaat

SEQ ID NO: 93356 - DNA, 25 bp, Canis familiaris
gcctatttgctgtatacatgtaatg

SEQ ID NO: 93357 - DNA, 25 bp, Canis familiaris
gcctcagttctattgcacttgtaga

SEQ ID NO: 93358 - DNA, 25 bp, Canis familiaris
gcctgcagctttgaggcttctgaac

SEQ ID NO: 93359 - DNA, 25 bp, Canis familiaris
gcctgcaatctgtcaaggcctctgt

SEQ ID NO: 93360 - DNA, 25 bp, Canis familiaris
gcctatgccatgcagatgtccctgc

SEQ ID NO: 93361 - DNA, 25 bp, Canis familiaris
gcctatgccataaatgtgtctcaga

SEQ ID NO: 93362 - DNA, 25 bp, Canis familiaris
gcctgcagccaaaaatttcctttaa

SEQ ID NO: 93363 - DNA, 25 bp, Canis familiaris
gcctatgaaatatattgtcctataa

SEQ ID NO: 93364 - DNA, 25 bp, Canis familiaris
gcctcagccaaattttgatcctaac

SEQ ID NO: 93365 - DNA, 25 bp, Canis familiaris
gcctaacagacattgatcgccctaa

SEQ ID NO: 93366 - DNA, 25 bp, Canis familiaris
gcctacatatacttcaacccttatt

SEQ ID NO: 93367 - DNA, 25 bp, Canis familiaris
gcctaaaatttaacccaactgcaga

SEQ ID NO: 93368 - DNA, 25 bp, Canis familiaris
gcctcacagaaaaaatccacacacc

SEQ ID NO: 93369 - DNA, 25 bp, Canis familiaris
gcctctcagaactgcagtcctaagc

SEQ ID NO: 93370 - DNA, 25 bp, Canis familiaris
gccttagatctctcgccgccaatgc

SEQ ID NO: 93371 - DNA, 25 bp, Canis familiaris
gcctgtagctccttcaggtcaaaga

SEQ ID NO: 93372 - DNA, 25 bp, Canis familiaris
gcctacagccctgaggatctggaga

SEQ ID NO: 93373 - DNA, 25 bp, Canis familiaris
gcctctacagcttcaaggaatgggc

SEQ ID NO: 93374 - DNA, 25 bp, Canis familiaris
gcctctcactgggcaaggatcagct

SEQ ID NO: 93375 - DNA, 25 bp, Canis familiaris
gcctctgcctggctgagtatagtgc

SEQ ID NO: 93376 - DNA, 25 bp, Canis familiaris
gccttactcatgctgttaagctgct

SEQ ID NO: 93377 - DNA, 25 bp, Canis familiaris
gcctgtattcatgtaccgagtgctc

SEQ ID NO: 93378 - DNA, 25 bp, Canis familiaris
gcctatattcacctattctgacatt

SEQ ID NO: 93379 - DNA, 25 bp, Canis familiaris
gcctacctgcacattccagacatca

SEQ ID NO: 93380 - DNA, 25 bp, Canis familiaris
gccgcatcccacattaaaagcatta

SEQ ID NO: 93381 - DNA, 25 bp, Canis familiaris
gcctcagtcttctttaaaacagtct

SEQ ID NO: 93382 - DNA, 25 bp, Canis familiaris
gcctagtgccagttctgagaaacag

SEQ ID NO: 93383 - DNA, 25 bp, Canis familiaris
gcctgtgtgatccttcggagaagca

SEQ ID NO: 93384 - DNA, 25 bp, Canis familiaris
gcctctgagcaccctggcaggaggc

SEQ ID NO: 93385 - DNA, 25 bp, Canis familiaris
gcctgcagggtgcctggcaacaggc

SEQ ID NO: 93386 - DNA, 25 bp, Canis familiaris
gcctagtggtgagttgcactctgca

SEQ ID NO: 93387 - DNA, 25 bp, Canis familiaris
gcctgcaggctatcttgcagtcgca

SEQ ID NO: 93388 - DNA, 25 bp, Canis familiaris
gcctggtctggacacagtgcccgtg

SEQ ID NO: 93389 - DNA, 25 bp, Canis familiaris
gcctgtggcggaaccatgagcgccc

SEQ ID NO: 93390 - DNA, 25 bp, Canis familiaris
gcctgcgaaggtgtcatggctgctg

SEQ ID NO: 93391 - DNA, 25 bp, Canis familiaris
gcctggaagatgcctacatcctgcg

SEQ ID NO: 93392 - DNA, 25 bp, Canis familiaris
gcctggcagcagctgcatgactctc

SEQ ID NO: 93393 - DNA, 25 bp, Canis familiaris
gcctgcagagagccctgctgcagct

SEQ ID NO: 93394 - DNA, 25 bp, Canis familiaris
gcctggatggcacagtcagttgaac

SEQ ID NO: 93395 - DNA, 25 bp, Canis familiaris
gccgttggcaccgcagagtgaacac

SEQ ID NO: 93396 - DNA, 25 bp, Canis familiaris
gcggttggtccctgaggcagtaaag

SEQ ID NO: 93397 - DNA, 25 bp, Canis familiaris
gccgcttttactctgggagtgaagg

SEQ ID NO: 93398 - DNA, 25 bp, Canis familiaris
gccgtatattactgtgcgaaggact

SEQ ID NO: 93399 - DNA, 25 bp, Canis familiaris
gccgaacttctcagaggacaccaca

SEQ ID NO: 93400 - DNA, 25 bp, Canis familiaris
gccgaattcctccgcgaagaagaaa

SEQ ID NO: 93401 - DNA, 25 bp, Canis familiaris
gcctggataccgcagctaggaataa

SEQ ID NO: 93402 - DNA, 25 bp, Canis familiaris
gcctaaaccgggtggcagtgggtgt

SEQ ID NO: 93403 - DNA, 25 bp, Canis familiaris
gcctaaggcccgcagggaggtggag

SEQ ID NO: 93404 - DNA, 25 bp, Canis familiaris
gcaggaacccccacaggggatgtga

SEQ ID NO: 93405 - DNA, 25 bp, Canis familiaris
gccgagagccggagacgagggattg

SEQ ID NO: 93406 - DNA, 25 bp, Canis familiaris
gcctggggcaggagactgaggaagc

SEQ ID NO: 93407 - DNA, 25 bp, Canis familiaris
gcctgggactacagcctgtggaggc

SEQ ID NO: 93408 - DNA, 25 bp, Canis familiaris
gcctgagggctagacgtgggggaac

SEQ ID NO: 93409 - DNA, 25 bp, Canis familiaris
gccggtggtacccaggcaaagtaat

SEQ ID NO: 93410 - DNA, 25 bp, Canis familiaris
gcactttcgttcccagaaaactaat

SEQ ID NO: 93411 - DNA, 25 bp, Canis familiaris
gcctttcgtctcctcaagaaatacc

SEQ ID NO: 93412 - DNA, 25 bp, Canis familiaris
gcctttcctctccaagaggacaatc

SEQ ID NO: 93413 - DNA, 25 bp, Canis familiaris
gcctttctttggcatcactgaacac

SEQ ID NO: 93414 - DNA, 25 bp, Canis familiaris
gcctttcttggtgacctcagccaag

SEQ ID NO: 93415 - DNA, 25 bp, Canis familiaris
gcccttcacaggactactacggaag

SEQ ID NO: 93416 - DNA, 25 bp, Canis familiaris
gccccccggtatggatagggacgag

SEQ ID NO: 93417 - DNA, 25 bp, Canis familiaris
gccccagtccggggatggacgacgg

SEQ ID NO: 93418 - DNA, 25 bp, Canis familiaris
gccccgtccggagaagcagggcgtt

SEQ ID NO: 93419 - DNA, 25 bp, Canis familiaris
gcaactgttccgcaaactggggcta

SEQ ID NO: 93420 - DNA, 25 bp, Canis familiaris
gcgacagtcccgtagaaccggaacg

SEQ ID NO: 93421 - DNA, 25 bp, Canis familiaris
gctaaccggcagtagacgccaggca

SEQ ID NO: 93422 - DNA, 25 bp, Canis familiaris
gcctaccgcgcacagaaggagcgcg

SEQ ID NO: 93423 - DNA, 25 bp, Canis familiaris
gcctacccaagcagacagctatcgg

SEQ ID NO: 93424 - DNA, 25 bp, Canis familiaris
gcctatccaaactgagtcatgttga

SEQ ID NO: 93425 - DNA, 25 bp, Canis familiaris
gcctgtccgaaaggcagccagtgcc

SEQ ID NO: 93426 - DNA, 25 bp, Canis familiaris
gcctgttcgaaaggtaattgccctt

SEQ ID NO: 93427 - DNA, 25 bp, Canis familiaris
gcctgttgcagattaagtggtttcc

SEQ ID NO: 93428 - DNA, 25 bp, Canis familiaris
gcctttggattcttgtgctgtgtgc

SEQ ID NO: 93429 - DNA, 25 bp, Canis familiaris
gcctttgctgattttctgtttgcca

SEQ ID NO: 93430 - DNA, 25 bp, Canis familiaris
gcctttcttactcttgttgaatgaa

SEQ ID NO: 93431 - DNA, 25 bp, Canis familiaris
gcctctgcactttcttttttgagat

SEQ ID NO: 93432 - DNA, 25 bp, Canis familiaris
gcctcgatttacttttgtcttctac

SEQ ID NO: 93433 - DNA, 25 bp, Canis familiaris
gcctctatattctgtttttgccttc

SEQ ID NO: 93434 - DNA, 25 bp, Canis familiaris
gcctctagcttctaattggtatctc

SEQ ID NO: 93435 - DNA, 25 bp, Canis familiaris
gcctctagttccattcatgttgttg

SEQ ID NO: 93436 - DNA, 25 bp, Canis familiaris
gcctcttttccagtttgttatgcgc

SEQ ID NO: 93437 - DNA, 25 bp, Canis familiaris
gcctttctatctttgttttcatgtc

SEQ ID NO: 93438 - DNA, 25 bp, Canis familiaris
gcctctttcctgttgttgttaatga

SEQ ID NO: 93439 - DNA, 25 bp, Canis familiaris
gcctgtaccctggtcttatcataaa

SEQ ID NO: 93440 - DNA, 25 bp, Canis familiaris
gccggatgccgggcttcttgaaaag

SEQ ID NO: 93441 - DNA, 25 bp, Canis familiaris
gccggcctctggattgggctaaagc

SEQ ID NO: 93442 - DNA, 25 bp, Canis familiaris
gcgcgagttcgggtaggccgagatg

SEQ ID NO: 93443 - DNA, 25 bp, Canis familiaris
gccgagttccgacatgactcaggat

SEQ ID NO: 93444 - DNA, 25 bp, Canis familiaris
gcctgagttgcagaaagaaccgttg

SEQ ID NO: 93445 - DNA, 25 bp, Canis familiaris
gccgaagtcgcaaaagaggcccttg

SEQ ID NO: 93446 - DNA, 25 bp, Canis familiaris
gcccaagcctaaaaaggcccctgca

SEQ ID NO: 93447 - DNA, 25 bp, Canis familiaris
gccggacacatatcgaaggccaccc

SEQ ID NO: 93448 - DNA, 25 bp, Canis familiaris
gccggccaaaggccaaggccaaggc

SEQ ID NO: 93449 - DNA, 25 bp, Canis familiaris
gccgggaacaactgggccaaggcca

SEQ ID NO: 93450 - DNA, 25 bp, Canis familiaris
gccggaaaccactgacagccaagga

SEQ ID NO: 93451 - DNA, 25 bp, Canis familiaris
gccgcggaaacttcagcacggaagg

SEQ ID NO: 93452 - DNA, 25 bp, Canis familiaris
gccgcttttacttgggagagaaggt

SEQ ID NO: 93453 - DNA, 25 bp, Canis familiaris
gcctgtttttctttgtcaacgacgt

SEQ ID NO: 93454 - DNA, 25 bp, Canis familiaris
gcctatttatttttgcatccgtact

SEQ ID NO: 93455 - DNA, 25 bp, Canis familiaris
gcctcactttttctgaaagctcact

SEQ ID NO: 93456 - DNA, 25 bp, Canis familiaris
gccccacttggcagtaacatccagt

SEQ ID NO: 93457 - DNA, 25 bp, Canis familiaris
gcctccacaggtccggaaactagac

SEQ ID NO: 93458 - DNA, 25 bp, Canis familiaris
gcctcctaggctccggaggatctat

SEQ ID NO: 93459 - DNA, 25 bp, Canis familiaris
gcctccttggcagcaggagctgtcc

SEQ ID NO: 93460 - DNA, 25 bp, Canis familiaris
gcctgccttcagatgggcgtgatcc

SEQ ID NO: 93461 - DNA, 25 bp, Canis familiaris
gccggcttcgcgggcgacgatgccc

SEQ ID NO: 93462 - DNA, 25 bp, Canis familiaris
gcctgtgctttgggggagggtgtgc

SEQ ID NO: 93463 - DNA, 25 bp, Canis familiaris
gcctggcttagcgcggtggagaggc

SEQ ID NO: 93464 - DNA, 25 bp, Canis familiaris
gcctggtgggcagcctatagtgggg

SEQ ID NO: 93465 - DNA, 25 bp, Canis familiaris
gccggtgcggctgatattgatatac

SEQ ID NO: 93466 - DNA, 25 bp, Canis familiaris
gcctggggcagggctaatgttagcg

SEQ ID NO: 93467 - DNA, 25 bp, Canis familiaris
gcctggaggcggccagcaagttgac

SEQ ID NO: 93468 - DNA, 25 bp, Canis familiaris
gccggagggagggaagtctggaaga

SEQ ID NO: 93469 - DNA, 25 bp, Canis familiaris
gcctgaacggggccaagggggcgat

SEQ ID NO: 93470 - DNA, 25 bp, Canis familiaris
gcctaactatgctgccaacgtgagc

SEQ ID NO: 93471 - DNA, 25 bp, Canis familiaris
gcctctactatgcaccaagtgtgtc

SEQ ID NO: 93472 - DNA, 25 bp, Canis familiaris
gcctcttgcagacacagcacatggt

SEQ ID NO: 93473 - DNA, 25 bp, Canis familiaris
gcctttgagaggcatcatgaggatc

SEQ ID NO: 93474 - DNA, 25 bp, Canis familiaris
gcctgtggagaggcttctgggtctt

SEQ ID NO: 93475 - DNA, 25 bp, Canis familiaris
gcctgaccagcagaagctgcaggcc

SEQ ID NO: 93476 - DNA, 25 bp, Canis familiaris
gccgcaacagcaggggcgatatcct

SEQ ID NO: 93477 - DNA, 25 bp, Canis familiaris
gccgcagacagcagaggagatccag

SEQ ID NO: 93478 - DNA, 25 bp, Canis familiaris
gcctggtgcataaggaggtgcctgg

SEQ ID NO: 93479 - DNA, 25 bp, Canis familiaris
gcctatgtgtcctatggtggcctgc

SEQ ID NO: 93480 - DNA, 25 bp, Canis familiaris
gcctgtgtgtccttgttggatcatc

SEQ ID NO: 93481 - DNA, 25 bp, Canis familiaris
gcctgcttctccttgttcaggcaaa

SEQ ID NO: 93482 - DNA, 25 bp, Canis familiaris
gcctctggctccgaggacagcaaaa

SEQ ID NO: 93483 - DNA, 25 bp, Canis familiaris
gcctcctctagcgggagcagtgaag

SEQ ID NO: 93484 - DNA, 25 bp, Canis familiaris
gcctctgctctctggtggaggctag

SEQ ID NO: 93485 - DNA, 25 bp, Canis familiaris
gcctctccactgacagggtggtggt

SEQ ID NO: 93486 - DNA, 25 bp, Canis familiaris
gcctctgctcctacgagtagggtgt

SEQ ID NO: 93487 - DNA, 25 bp, Canis familiaris
gcctggcttctaatgaagactgtgg

SEQ ID NO: 93488 - DNA, 25 bp, Canis familiaris
gcctctgtatctgatttttgtgcag

SEQ ID NO: 93489 - DNA, 25 bp, Canis familiaris
gcctcttgcattctgtttctagcac

SEQ ID NO: 93490 - DNA, 25 bp, Canis familiaris
gcctcatggttcagcttttacacaa

SEQ ID NO: 93491 - DNA, 25 bp, Canis familiaris
gcctctgagaataacctactaccac

SEQ ID NO: 93492 - DNA, 25 bp, Canis familiaris
gcctctctggttgccaaatactgat

SEQ ID NO: 93493 - DNA, 25 bp, Canis familiaris
gcctgctgaattgctctaaaaagat

SEQ ID NO: 93494 - DNA, 25 bp, Canis familiaris
gcctctgccagcgctttagaaagtg

SEQ ID NO: 93495 - DNA, 25 bp, Canis familiaris
gcctgtgtgatcgcaactcgaaaac

SEQ ID NO: 93496 - DNA, 25 bp, Canis familiaris
gcctgatgtgatccatccactcaat

SEQ ID NO: 93497 - DNA, 25 bp, Canis familiaris
gcgctgagaggctgccattgcacag

SEQ ID NO: 93498 - DNA, 25 bp, Canis familiaris
gcctgatgtggatggcttcctcgtg

SEQ ID NO: 93499 - DNA, 25 bp, Canis familiaris
gcctagctgaggagttcctgcaaga

SEQ ID NO: 93500 - DNA, 25 bp, Canis familiaris
gcctgactaaatttttcatgccact

SEQ ID NO: 93501 - DNA, 25 bp, Canis familiaris
gcctgactaaattttcactggcaat

SEQ ID NO: 93502 - DNA, 25 bp, Canis familiaris
gcctgaccgaaatctgcactaagct

SEQ ID NO: 93503 - DNA, 25 bp, Canis familiaris
gcctactagtagtacatcaaagagt

SEQ ID NO: 93504 - DNA, 25 bp, Canis familiaris
gcctacatagaagtacatcaagatt

SEQ ID NO: 93505 - DNA, 25 bp, Canis familiaris
gcctacagggcatttcagaagatgg

SEQ ID NO: 93506 - DNA, 25 bp, Canis familiaris
gcctgagcagtgacatgactccggg

SEQ ID NO: 93507 - DNA, 25 bp, Canis familiaris
gcctgccagttatctctagtgtgaa

SEQ ID NO: 93508 - DNA, 25 bp, Canis familiaris
gcctgacgcccaactatttgataat

SEQ ID NO: 93509 - DNA, 25 bp, Canis familiaris
gcctatcagacccagctattttatt

SEQ ID NO: 93510 - DNA, 25 bp, Canis familiaris
gcctgtgaacttggcagactttata

SEQ ID NO: 93511 - DNA, 25 bp, Canis familiaris
gcctggaatatcagcagccattttt

SEQ ID NO: 93512 - DNA, 25 bp, Canis familiaris
gcctctgatttcttagcacatttct

SEQ ID NO: 93513 - DNA, 25 bp, Canis familiaris
gcctggcttccagagagatctcttt

SEQ ID NO: 93514 - DNA, 25 bp, Canis familiaris
gcctgagatagccagagaaacctgt

SEQ ID NO: 93515 - DNA, 25 bp, Canis familiaris
gctcgataccaaaggagacactgct

SEQ ID NO: 93516 - DNA, 25 bp, Canis familiaris
gcctgttcctcaagtgagcgcagac

SEQ ID NO: 93517 - DNA, 25 bp, Canis familiaris
gcctcctcaccaaatatgctgagca

SEQ ID NO: 93518 - DNA, 25 bp, Canis familiaris
gcctgtccctgcaatcaatggagca

SEQ ID NO: 93519 - DNA, 25 bp, Canis familiaris
gcctatccccttgtggatctgatgt

SEQ ID NO: 93520 - DNA, 25 bp, Canis familiaris
gcctactcatccaggtggactggca

SEQ ID NO: 93521 - DNA, 25 bp, Canis familiaris
gcctatgtctctgtggatggggtgc

SEQ ID NO: 93522 - DNA, 25 bp, Canis familiaris
gcctgactctcatacgcatttggtc

SEQ ID NO: 93523 - DNA, 25 bp, Canis familiaris
gcctagtgctactcgttatgtgatc

SEQ ID NO: 93524 - DNA, 25 bp, Canis familiaris
gcctagatctaaccatttttcatac

SEQ ID NO: 93525 - DNA, 25 bp, Canis familiaris
gccggaaggatcgatttattttctc

SEQ ID NO: 93526 - DNA, 25 bp, Canis familiaris
gccgtactcttggaagacctttctc

SEQ ID NO: 93527 - DNA, 25 bp, Canis familiaris
gccggcagcttcctggaaagttact

SEQ ID NO: 93528 - DNA, 25 bp, Canis familiaris
gccggcagtttgtgaaggactccat

SEQ ID NO: 93529 - DNA, 25 bp, Canis familiaris
gcgaaagttttacaatggtgccatt

SEQ ID NO: 93530 - DNA, 25 bp, Canis familiaris
gcggggtatttactaagggtatctg

SEQ ID NO: 93531 - DNA, 25 bp, Canis familiaris
gcggggtctatttgctaattagctt

SEQ ID NO: 93532 - DNA, 25 bp, Canis familiaris
gcctggcctctgatagccaattcag

SEQ ID NO: 93533 - DNA, 25 bp, Canis familiaris
gcctaccctgttatctattgtcatc

SEQ ID NO: 93534 - DNA, 25 bp, Canis familiaris
gcctgagcctagtataacttgttcc

SEQ ID NO: 93535 - DNA, 25 bp, Canis familiaris
gcctcacctatctataaacatatat

SEQ ID NO: 93536 - DNA, 25 bp, Canis familiaris
gcctgaccaggctagaagagtaaag

SEQ ID NO: 93537 - DNA, 25 bp, Canis familiaris
gcctgccgcgcggaagacaaacatc

SEQ ID NO: 93538 - DNA, 25 bp, Canis familiaris
gcctgccacagctcaagagctacct

SEQ ID NO: 93539 - DNA, 25 bp, Canis familiaris
gcctgagccatgtaccatgtctcac

SEQ ID NO: 93540 - DNA, 25 bp, Canis familiaris
gcctgggcatgttcgacatccagca

SEQ ID NO: 93541 - DNA, 25 bp, Canis familiaris
gcctgggcatgttcgacatccagca

SEQ ID NO: 93542 - DNA, 25 bp, Canis familiaris
gcctctggcatgttggaacaatgta

SEQ ID NO: 93543 - DNA, 25 bp, Canis familiaris
gcctgctgtgaaattaacattgcca

SEQ ID NO: 93544 - DNA, 25 bp, Canis familiaris
gcctcaatgacttttacataccaaa

SEQ ID NO: 93545 - DNA, 25 bp, Canis familiaris
gccgaagtgctattttatatgccat

SEQ ID NO: 93546 - DNA, 25 bp, Canis familiaris
gcctccgtgtgttgtaatgtccata

SEQ ID NO: 93547 - DNA, 25 bp, Canis familiaris
gcctctctggaggcattacttccaa

SEQ ID NO: 93548 - DNA, 25 bp, Canis familiaris
gcctgcctgatggcacattcagctc

SEQ ID NO: 93549 - DNA, 25 bp, Canis familiaris
gcccatatgatggcattgtctctgc

SEQ ID NO: 93550 - DNA, 25 bp, Canis familiaris
gcctcaaatggctgtgtgtcctgtt

SEQ ID NO: 93551 - DNA, 25 bp, Canis familiaris
gcctactgtacaattattccgtctg

SEQ ID NO: 93552 - DNA, 25 bp, Canis familiaris
gcctcctgtagaattcatctccggc

SEQ ID NO: 93553 - DNA, 25 bp, Canis familiaris
gcctctatatagagtctcctcgtag

SEQ ID NO: 93554 - DNA, 25 bp, Canis familiaris
gcctctacaggagtttcctccaact

SEQ ID NO: 93555 - DNA, 25 bp, Canis familiaris
gcctgtctcaggttttttaatcact

SEQ ID NO: 93556 - DNA, 25 bp, Canis familiaris
gcctgttctgcttctttgtaataaa

SEQ ID NO: 93557 - DNA, 25 bp, Canis familiaris
gcctgtggctgcacttcatgataaa

SEQ ID NO: 93558 - DNA, 25 bp, Canis familiaris
gccgtatgctcaactctcggagaac

SEQ ID NO: 93559 - DNA, 25 bp, Canis familiaris
gcctctctgtaaccacggcagaagt

SEQ ID NO: 93560 - DNA, 25 bp, Canis familiaris
gcctcacgtcatgtacgggcaactg

SEQ ID NO: 93561 - DNA, 25 bp, Canis familiaris
gcctcctgtgatgtccatggaaact

SEQ ID NO: 93562 - DNA, 25 bp, Canis familiaris
gcctccgtgtcacctgtgataatac

SEQ ID NO: 93563 - DNA, 25 bp, Canis familiaris
gcctgtcgtacaacatgtgctcaat

SEQ ID NO: 93564 - DNA, 25 bp, Canis familiaris
gccgtgcatgtacccatgtttgtgt

SEQ ID NO: 93565 - DNA, 25 bp, Canis familiaris
gcctgtgatgacttcaagctttgcg

SEQ ID NO: 93566 - DNA, 25 bp, Canis familiaris
gcctgtgatgacttcaagctttgcg

SEQ ID NO: 93567 - DNA, 25 bp, Canis familiaris
gcctgtgatgacttcaagctttgcg

SEQ ID NO: 93568 - DNA, 25 bp, Canis familiaris
gcctgtgatgacttcaagctttgcg

SEQ ID NO: 93569 - DNA, 25 bp, Canis familiaris
gcctgtgatgacttcaagctttgcg

SEQ ID NO: 93570 - DNA, 25 bp, Canis familiaris
gcctgtgatgacttcaagctttgcg

SEQ ID NO: 93571 - DNA, 25 bp, Canis familiaris
gcctgtgatgacttcaagctttgcg

SEQ ID NO: 93572 - DNA, 25 bp, Canis familiaris
gcctgtgatgacttcaagctttgcg

SEQ ID NO: 93573 - DNA, 25 bp, Canis familiaris
gcctgtgatgacttcaagctttgcg

SEQ ID NO: 93574 - DNA, 25 bp, Canis familiaris
gcctgtaatcccagctactcgggag

SEQ ID NO: 93575 - DNA, 25 bp, Canis familiaris
gcctgtaatcccagcactttgggag

SEQ ID NO: 93576 - DNA, 25 bp, Canis familiaris
gcctggactgcacaacctttaggtc

SEQ ID NO: 93577 - DNA, 25 bp, Canis familiaris
gcctgaagcagaagtccctttagag

SEQ ID NO: 93578 - DNA, 25 bp, Canis familiaris
gcctgcagagagaagcctcctttgt

SEQ ID NO: 93579 - DNA, 25 bp, Canis familiaris
gcctcacacgaagtacctcattgta

SEQ ID NO: 93580 - DNA, 25 bp, Canis familiaris
gcctcccgagtttacttctggagct

SEQ ID NO: 93581 - DNA, 25 bp, Canis familiaris
gccccacctgaagacttatggccat

SEQ ID NO: 93582 - DNA, 25 bp, Canis familiaris
gcctcctcctgataaaatatccctt

SEQ ID NO: 93583 - DNA, 25 bp, Canis familiaris
gcctcctagccatcaaaatgaccca

SEQ ID NO: 93584 - DNA, 25 bp, Canis familiaris
gcctcagtacctcaaaagcatcttc

SEQ ID NO: 93585 - DNA, 25 bp, Canis familiaris
gcccagttcctttacttgtacataa

SEQ ID NO: 93586 - DNA, 25 bp, Canis familiaris
gcctcagttctctctactgttgaat

SEQ ID NO: 93587 - DNA, 25 bp, Canis familiaris
gcctcgtgactctctttgtcaaaat

SEQ ID NO: 93588 - DNA, 25 bp, Canis familiaris
gcctcacagggctctttggaaacat

SEQ ID NO: 93589 - DNA, 25 bp, Canis familiaris
gcctcaacgacatcttttcaagtca

SEQ ID NO: 93590 - DNA, 25 bp, Canis familiaris
gcctaacctcaacttcaaaagtgaa

SEQ ID NO: 93591 - DNA, 25 bp, Canis familiaris
gcctaacgcatcaccatcagaaagt

SEQ ID NO: 93592 - DNA, 25 bp, Canis familiaris
gcctgatgatgcgcataccttaaat

SEQ ID NO: 93593 - DNA, 25 bp, Canis familiaris
gcctggcatggcaaacactgctaat

SEQ ID NO: 93594 - DNA, 25 bp, Canis familiaris
gcctggcagtgataccatcaagcct

SEQ ID NO: 93595 - DNA, 25 bp, Canis familiaris
gcctgcagcgatttaccacaatgcc

SEQ ID NO: 93596 - DNA, 25 bp, Canis familiaris
gcctcagttagctagatcaaatgca

SEQ ID NO: 93597 - DNA, 25 bp, Canis familiaris
gcctggtggagctgacatcactgaa

SEQ ID NO: 93598 - DNA, 25 bp, Canis familiaris
gcctggagaactccacctgtgacac

SEQ ID NO: 93599 - DNA, 25 bp, Canis familiaris
gcctggagaactaccaagttgcccg

SEQ ID NO: 93600 - DNA, 25 bp, Canis familiaris
gccgggaatcgacaagctggccatc

SEQ ID NO: 93601 - DNA, 25 bp, Canis familiaris
gccgagctgagtgtaaagtcccagg

SEQ ID NO: 93602 - DNA, 25 bp, Canis familiaris
gccggggcttgaaaaacctgagtct

SEQ ID NO: 93603 - DNA, 25 bp, Canis familiaris
gccgacagggtgacttaccctggtc

SEQ ID NO: 93604 - DNA, 25 bp, Canis familiaris
gctcgtcaccgtatgaaccgtgttc

SEQ ID NO: 93605 - DNA, 25 bp, Canis familiaris
gccgtcatccggctcaaagggaatc

SEQ ID NO: 93606 - DNA, 25 bp, Canis familiaris
gcctgtccaccggcgagaaggagaa

SEQ ID NO: 93607 - DNA, 25 bp, Canis familiaris
gcctcaacaagggccacaaggtgac

SEQ ID NO: 93608 - DNA, 25 bp, Canis familiaris
gcctcaccagagggccagcttgagg

SEQ ID NO: 93609 - DNA, 25 bp, Canis familiaris
gcctcccacacaatcgcagtttggg

SEQ ID NO: 93610 - DNA, 25 bp, Canis familiaris
gcctgccgcacggtgcgagtttttt

SEQ ID NO: 93611 - DNA, 25 bp, Canis familiaris
gcctcacagaccctggagttctgtc

SEQ ID NO: 93612 - DNA, 25 bp, Canis familiaris
gcctcaagaacatgggcctgctgct

SEQ ID NO: 93613 - DNA, 25 bp, Canis familiaris
gcctcagccaactaggtcgctggat

SEQ ID NO: 93614 - DNA, 25 bp, Canis familiaris
gcctgcccagtacagatcagctgga

SEQ ID NO: 93615 - DNA, 25 bp, Canis familiaris
gcctccctgttactatagcatcaga

SEQ ID NO: 93616 - DNA, 25 bp, Canis familiaris
gcctccctgttactatagcatcaga

SEQ ID NO: 93617 - DNA, 25 bp, Canis familiaris
gcctccctgttactatagcatcaga

SEQ ID NO: 93618 - DNA, 25 bp, Canis familiaris
gcctccctgttactatagcatcaga

SEQ ID NO: 93619 - DNA, 25 bp, Canis familiaris
gcctccctgtgtacaatagcaatca

SEQ ID NO: 93620 - DNA, 25 bp, Canis familiaris
gcctcatgcgtgacttcgaaggcac

SEQ ID NO: 93621 - DNA, 25 bp, Canis familiaris
gcctgctgcactagctgtgccaggc

SEQ ID NO: 93622 - DNA, 25 bp, Canis familiaris
gcctgtccttctacagaggcttgct

SEQ ID NO: 93623 - DNA, 25 bp, Canis familiaris
gccgaccttcagaacggcttgccag

SEQ ID NO: 93624 - DNA, 25 bp, Canis familiaris
gccgtgcctacaaactggtatgtgg

SEQ ID NO: 93625 - DNA, 25 bp, Canis familiaris
gccggacagccaaacgttacatagc

SEQ ID NO: 93626 - DNA, 25 bp, Canis familiaris
gcctctaatgtcaccgtctacagag

SEQ ID NO: 93627 - DNA, 25 bp, Canis familiaris
gcctctcaagtccttgtttgaatgg

SEQ ID NO: 93628 - DNA, 25 bp, Canis familiaris
gcctctaagttgatgattctgctgg

SEQ ID NO: 93629 - DNA, 25 bp, Canis familiaris
gcctgccaagatgctggagtccggt

SEQ ID NO: 93630 - DNA, 25 bp, Canis familiaris
gccgctcagaccatagagtccaggt

SEQ ID NO: 93631 - DNA, 25 bp, Canis familiaris
gccgctcagaccatagagtccaggt

SEQ ID NO: 93632 - DNA, 25 bp, Canis familiaris
gcctgctaacacaataatatcaaca

SEQ ID NO: 93633 - DNA, 25 bp, Canis familiaris
gccgatatagacacatcaatcaagc

SEQ ID NO: 93634 - DNA, 25 bp, Canis familiaris
gcctcaaagctgccaacattccaga

SEQ ID NO: 93635 - DNA, 25 bp, Canis familiaris
gcctctctgactccgaaaggaaggt

SEQ ID NO: 93636 - DNA, 25 bp, Canis familiaris
gcctctctactcagaatatccaggg

SEQ ID NO: 93637 - DNA, 25 bp, Canis familiaris
gcctgctcttggagaactacgagga

SEQ ID NO: 93638 - DNA, 25 bp, Canis familiaris
gcctgcgtcgacatcaacgagtgtg

SEQ ID NO: 93639 - DNA, 25 bp, Canis familiaris
gcctggacgactactacgacgagga

SEQ ID NO: 93640 - DNA, 25 bp, Canis familiaris
gcgtcaactacgatgactactgacc

SEQ ID NO: 93641 - DNA, 25 bp, Canis familiaris
gcctcaactcgacttggaattggcc

SEQ ID NO: 93642 - DNA, 25 bp, Canis familiaris
gcctcagtcagccaagtggagtcgg

SEQ ID NO: 93643 - DNA, 25 bp, Canis familiaris
gcctcgcgcagccatggtaaggagg

SEQ ID NO: 93644 - DNA, 25 bp, Canis familiaris
gcctcccacctgctgaggtgaggcc

SEQ ID NO: 93645 - DNA, 25 bp, Canis familiaris
gcctcccacctgcagatgaggttcc

SEQ ID NO: 93646 - DNA, 25 bp, Canis familiaris
gcctgccgaagtgtcgaagtgtcgc

SEQ ID NO: 93647 - DNA, 25 bp, Canis familiaris
gcccccaagtttaacaggtgccgag

SEQ ID NO: 93648 - DNA, 25 bp, Canis familiaris
gccccccagatagaactactcgaga

SEQ ID NO: 93649 - DNA, 25 bp, Canis familiaris
gcctccccacaagcagggactttga

SEQ ID NO: 93650 - DNA, 25 bp, Canis familiaris
gcctctttaaagcgtgcggcgggaa

SEQ ID NO: 93651 - DNA, 25 bp, Canis familiaris
gcctgcttggagatgggtatgggtg

SEQ ID NO: 93652 - DNA, 25 bp, Canis familiaris
gcctcctggatgtgtgggtgtactg

SEQ ID NO: 93653 - DNA, 25 bp, Canis familiaris
gcctcctggagagctgctggatgga

SEQ ID NO: 93654 - DNA, 25 bp, Canis familiaris
gcctcacgtggacctggtgagtgag

SEQ ID NO: 93655 - DNA, 25 bp, Canis familiaris
gcctccttgatacagtttgtagact

SEQ ID NO: 93656 - DNA, 25 bp, Canis familiaris
gcctctgcttatacgggatattaac

SEQ ID NO: 93657 - DNA, 25 bp, Canis familiaris
gcctctggtctacgtggttgtacca

SEQ ID NO: 93658 - DNA, 25 bp, Canis familiaris
gcctctgggacccagtgtatattcc

SEQ ID NO: 93659 - DNA, 25 bp, Canis familiaris
gcctcgggaagcagtggacagacca

SEQ ID NO: 93660 - DNA, 25 bp, Canis familiaris
gcctcatggatgagtggtgaaagcc

SEQ ID NO: 93661 - DNA, 25 bp, Canis familiaris
gcctcttatggggcagtaaacactt

SEQ ID NO: 93662 - DNA, 25 bp, Canis familiaris
gcctgtgtttagtaatttacacttg

SEQ ID NO: 93663 - DNA, 25 bp, Canis familiaris
gcctctgtcttaagcaattctaaac

SEQ ID NO: 93664 - DNA, 25 bp, Canis familiaris
gcctctgtttatacctcttaaaaat

SEQ ID NO: 93665 - DNA, 25 bp, Canis familiaris
gcctgttttgaccctccatagaagg

SEQ ID NO: 93666 - DNA, 25 bp, Canis familiaris
gccgagttggatgcctacatggcac

SEQ ID NO: 93667 - DNA, 25 bp, Canis familiaris
gctcgagttaatgcccacaaggtgt

SEQ ID NO: 93668 - DNA, 25 bp, Canis familiaris
gccgagtgctatttcaccaacggga

SEQ ID NO: 93669 - DNA, 25 bp, Canis familiaris
gcctgcagctggattacgcaacagt

SEQ ID NO: 93670 - DNA, 25 bp, Canis familiaris
gcctccgtatatagcatcagaacgt

SEQ ID NO: 93671 - DNA, 25 bp, Canis familiaris
gcctccgtgctatatgtgaactgtt

SEQ ID NO: 93672 - DNA, 25 bp, Canis familiaris
gcctgcctgctgatcagttaactgg

SEQ ID NO: 93673 - DNA, 25 bp, Canis familiaris
gcctgcgtaagtttggaacggggct

SEQ ID NO: 93674 - DNA, 25 bp, Canis familiaris
gcctccaaagttagtacctgcgggg

SEQ ID NO: 93675 - DNA, 25 bp, Canis familiaris
gcctccagggtgagggcctcaggag

SEQ ID NO: 93676 - DNA, 25 bp, Canis familiaris
gcctcaggggtgacgggagacgggt

SEQ ID NO: 93677 - DNA, 25 bp, Canis familiaris
gcctcaggggtggcttagaccaggg

SEQ ID NO: 93678 - DNA, 25 bp, Canis familiaris
gcctcgggcaggcttcagaagagtg

SEQ ID NO: 93679 - DNA, 25 bp, Canis familiaris
gcctcggggtgtgtgcatgtatggt

SEQ ID NO: 93680 - DNA, 25 bp, Canis familiaris
gcctccagggttggtggcttgaaca

SEQ ID NO: 93681 - DNA, 25 bp, Canis familiaris
gcctcgcgaacgccgggctggatta

SEQ ID NO: 93682 - DNA, 25 bp, Canis familiaris
gcctcgtaagcaaacggtggagtac

SEQ ID NO: 93683 - DNA, 25 bp, Canis familiaris
gcctctgtcaaagatcggcatcgag

SEQ ID NO: 93684 - DNA, 25 bp, Canis familiaris
gcctgctccaacaagatcggacgct

SEQ ID NO: 93685 - DNA, 25 bp, Canis familiaris
gccgtacaccaagtcgctgacaagc

SEQ ID NO: 93686 - DNA, 25 bp, Canis familiaris
gcctgctgaagagactccatgaagg

SEQ ID NO: 93687 - DNA, 25 bp, Canis familiaris
gcctcaggtgagcagctcttggagg

SEQ ID NO: 93688 - DNA, 25 bp, Canis familiaris
gcctgcctgtgactactttgtatag

SEQ ID NO: 93689 - DNA, 25 bp, Canis familiaris
gcctgccttgcgttatattacttgt

SEQ ID NO: 93690 - DNA, 25 bp, Canis familiaris
gcctccttgatatttgtattactgc

SEQ ID NO: 93691 - DNA, 25 bp, Canis familiaris
gcctccatttgcatgtgtagaactg

SEQ ID NO: 93692 - DNA, 25 bp, Canis familiaris
gcctctcagcttgtgatgtgaccag

SEQ ID NO: 93693 - DNA, 25 bp, Canis familiaris
gcacatttcttaggattaaaggtca

SEQ ID NO: 93694 - DNA, 25 bp, Canis familiaris
gcctgttcaggagattagtaagtca

SEQ ID NO: 93695 - DNA, 25 bp, Canis familiaris
gcctgttttgcagactgagtacttc

SEQ ID NO: 93696 - DNA, 25 bp, Canis familiaris
gccgttgatcgtgactgagctagct

SEQ ID NO: 93697 - DNA, 25 bp, Canis familiaris
gccgtacatcgtgctcagtggcagc

SEQ ID NO: 93698 - DNA, 25 bp, Canis familiaris
gcctggaaacttaagtggcgcctta

SEQ ID NO: 93699 - DNA, 25 bp, Canis familiaris
gcctggaaggggagaagggcttggg

SEQ ID NO: 93700 - DNA, 25 bp, Canis familiaris
gccgggaagggcagccagttggggg

SEQ ID NO: 93701 - DNA, 25 bp, Canis familiaris
gcccgggaggcgaagccagccggga

SEQ ID NO: 93702 - DNA, 25 bp, Canis familiaris
gccggtggagggtctgagctgccgg

SEQ ID NO: 93703 - DNA, 25 bp, Canis familiaris
gcctggtgggagctgtaggcacagg

SEQ ID NO: 93704 - DNA, 25 bp, Canis familiaris
gcctggtgctgaggtgtgtgacaca

SEQ ID NO: 93705 - DNA, 25 bp, Canis familiaris
gcctgtgtgatgcccatggatggca

SEQ ID NO: 93706 - DNA, 25 bp, Canis familiaris
gcctctgagctgcctgcagcattgg

SEQ ID NO: 93707 - DNA, 25 bp, Canis familiaris
gctctagacttcgagcaggagatgg

SEQ ID NO: 93708 - DNA, 25 bp, Canis familiaris
gcctgacctgtcgagatgtcacatg

SEQ ID NO: 93709 - DNA, 25 bp, Canis familiaris
gcctgtctgctgactgcagtgtcat

SEQ ID NO: 93710 - DNA, 25 bp, Canis familiaris
gcctgctggctactgagtgctcagg

SEQ ID NO: 93711 - DNA, 25 bp, Canis familiaris
gcctgcgagcagccaaggtcaagaa

SEQ ID NO: 93712 - DNA, 25 bp, Canis familiaris
gcctgccagtggagctgagcaagga

SEQ ID NO: 93713 - DNA, 25 bp, Canis familiaris
gcctccagcgagctcaagcaaagag

SEQ ID NO: 93714 - DNA, 25 bp, Canis familiaris
gcctccgggagttctgcaataaccc

SEQ ID NO: 93715 - DNA, 25 bp, Canis familiaris
gcgtcgaggtggagcgcgacaacct

SEQ ID NO: 93716 - DNA, 25 bp, Canis familiaris
gcgtagggggtgggcagaggacaac

SEQ ID NO: 93717 - DNA, 25 bp, Canis familiaris
gcctcgctggagctggggaggacac

SEQ ID NO: 93718 - DNA, 25 bp, Canis familiaris
gcctctctggggcagaaggtcacca

SEQ ID NO: 93719 - DNA, 25 bp, Canis familiaris
gcctcctgtggacaatagagcataa

SEQ ID NO: 93720 - DNA, 25 bp, Canis familiaris
gcctcctgtggacaagatcctacat

SEQ ID NO: 93721 - DNA, 25 bp, Canis familiaris
gcctcctggtttaatattctcctgt

SEQ ID NO: 93722 - DNA, 25 bp, Canis familiaris
gcctccaggctttgaattttccttc

SEQ ID NO: 93723 - DNA, 25 bp, Canis familiaris
gcctcctgttgattgaatgcttctc

SEQ ID NO: 93724 - DNA, 25 bp, Canis familiaris
gcctcctgactgggcaatgtttgcc

SEQ ID NO: 93725 - DNA, 25 bp, Canis familiaris
gcctgcacccatttcaatggttcca

SEQ ID NO: 93726 - DNA, 25 bp, Canis familiaris
gcctgccacacataaagcgctttgg

SEQ ID NO: 93727 - DNA, 25 bp, Canis familiaris
gccggacaaacctggctttgtggca

SEQ ID NO: 93728 - DNA, 25 bp, Canis familiaris
gcctcccaaaccttgtgttttgcaa

SEQ ID NO: 93729 - DNA, 25 bp, Canis familiaris
gcctgcctaagactgtttgttttac

SEQ ID NO: 93730 - DNA, 25 bp, Canis familiaris
gcctctcaggaacttctttttgtct

SEQ ID NO: 93731 - DNA, 25 bp, Canis familiaris
gcctctcggaggatattcttagtgt

SEQ ID NO: 93732 - DNA, 25 bp, Canis familiaris
gcctctgcttcaggttattttcttt

SEQ ID NO: 93733 - DNA, 25 bp, Canis familiaris
gcctctttaggatgtttgtcttgtc

SEQ ID NO: 93734 - DNA, 25 bp, Canis familiaris
gcctctgtaggccaggcatgttcct

SEQ ID NO: 93735 - DNA, 25 bp, Canis familiaris
gcctctttggctatgatgcttatat

SEQ ID NO: 93736 - DNA, 25 bp, Canis familiaris
gcctgtttactcctgtggttattag

SEQ ID NO: 93737 - DNA, 25 bp, Canis familiaris
gcctgtgtgtacggtctgtgttacc

SEQ ID NO: 93738 - DNA, 25 bp, Canis familiaris
gcctctctgtgtgggtttgtgtatc

SEQ ID NO: 93739 - DNA, 25 bp, Canis familiaris
gcctctgtgtgtgtggctgagtgta

SEQ ID NO: 93740 - DNA, 25 bp, Canis familiaris
gcctgccttggctatggctatgtgg

SEQ ID NO: 93741 - DNA, 25 bp, Canis familiaris
gcctgcactcaggcatcatgcgaag

SEQ ID NO: 93742 - DNA, 25 bp, Canis familiaris
gcctgaacagagccacagaaggacc

SEQ ID NO: 93743 - DNA, 25 bp, Canis familiaris
gcctgaaattgccaaatctgccaca

SEQ ID NO: 93744 - DNA, 25 bp, Canis familiaris
gcctgacacattccttacagaataa

SEQ ID NO: 93745 - DNA, 25 bp, Canis familiaris
gcctgaacatgcaaattacaaagct

SEQ ID NO: 93746 - DNA, 25 bp, Canis familiaris
gcctgaacacgaatgaccactcact

SEQ ID NO: 93747 - DNA, 25 bp, Canis familiaris
gcctgaacactttgacgaacactcc

SEQ ID NO: 93748 - DNA, 25 bp, Canis familiaris
gcctgagcgacgctaagaagccccc

SEQ ID NO: 93749 - DNA, 25 bp, Canis familiaris
gcattggccccggaaagggcccagc

SEQ ID NO: 93750 - DNA, 25 bp, Canis familiaris
gcattggccccggaaagggcccagc

SEQ ID NO: 93751 - DNA, 25 bp, Canis familiaris
gcattggccccggaaagggcccagc

SEQ ID NO: 93752 - DNA, 25 bp, Canis familiaris
gcattggccccggaaagggcccagc

SEQ ID NO: 93753 - DNA, 25 bp, Canis familiaris
gcattggccccggaaagggcccagc

SEQ ID NO: 93754 - DNA, 25 bp, Canis familiaris
gcattggccccggaaagggcccagc

SEQ ID NO: 93755 - DNA, 25 bp, Canis familiaris
gcattggccccggaaagggcccagc

SEQ ID NO: 93756 - DNA, 25 bp, Canis familiaris
gcattggccccggaaagggcccagc

SEQ ID NO: 93757 - DNA, 25 bp, Canis familiaris
gcattggccccggaaagggcccagc

SEQ ID NO: 93758 - DNA, 25 bp, Canis familiaris
gcattggccccggaaagggcccagc

SEQ ID NO: 93759 - DNA, 25 bp, Canis familiaris
gcctggacacctgaaagctggggag

SEQ ID NO: 93760 - DNA, 25 bp, Canis familiaris
gcctgtggacctgaagcttgtggag

SEQ ID NO: 93761 - DNA, 25 bp, Canis familiaris
gcctctgtttctgaggatatgggag

SEQ ID NO: 93762 - DNA, 25 bp, Canis familiaris
gcctctggtcctgcaggagggtaga

SEQ ID NO: 93763 - DNA, 25 bp, Canis familiaris
gcctcggtcaagtcggagagcgccg

SEQ ID NO: 93764 - DNA, 25 bp, Canis familiaris
gcctcggccaaaaagagtgctccgg

SEQ ID NO: 93765 - DNA, 25 bp, Canis familiaris
gcctcggggcaaagaagatccctgg

SEQ ID NO: 93766 - DNA, 25 bp, Canis familiaris
gcctgtgggttatgacaagtccggg

SEQ ID NO: 93767 - DNA, 25 bp, Canis familiaris
gcctgtgggccatgggcaaaccagg

SEQ ID NO: 93768 - DNA, 25 bp, Canis familiaris
gcctggtggctttgttgcaagactg

SEQ ID NO: 93769 - DNA, 25 bp, Canis familiaris
gcctccttgttgtctagagcagtct

SEQ ID NO: 93770 - DNA, 25 bp, Canis familiaris
gcctgccttccttgtaggagtttag

SEQ ID NO: 93771 - DNA, 25 bp, Canis familiaris
gcctctcgaacttgctagcagtttg

SEQ ID NO: 93772 - DNA, 25 bp, Canis familiaris
gcctcctaaaagcagagctgtctgg

SEQ ID NO: 93773 - DNA, 25 bp, Canis familiaris
gccgggaaaactaaatcagctgtgg

SEQ ID NO: 93774 - DNA, 25 bp, Canis familiaris
gcctggtgcaacaagctctacagcg

SEQ ID NO: 93775 - DNA, 25 bp, Canis familiaris
gcctgtgggctcagctgatgacggc

SEQ ID NO: 93776 - DNA, 25 bp, Canis familiaris
gcctgggtgctcactgagaggggct

SEQ ID NO: 93777 - DNA, 25 bp, Canis familiaris
gcctgaggcccttctgactatgggc

SEQ ID NO: 93778 - DNA, 25 bp, Canis familiaris
gccgaagcactttctggtctgtgtg

SEQ ID NO: 93779 - DNA, 25 bp, Canis familiaris
gcctgaagcagccgtttgtgcgggc

SEQ ID NO: 93780 - DNA, 25 bp, Canis familiaris
gcctgagatagggtctgtggccggg

SEQ ID NO: 93781 - DNA, 25 bp, Canis familiaris
gcctggttggcaacgatggcacgcg

SEQ ID NO: 93782 - DNA, 25 bp, Canis familiaris
gcctgttggacgacatgaaccactg

SEQ ID NO: 93783 - DNA, 25 bp, Canis familiaris
gcctgtctctaccactaagaactgc

SEQ ID NO: 93784 - DNA, 25 bp, Canis familiaris
gccgtctagctgcacaaagaccgcg

SEQ ID NO: 93785 - DNA, 25 bp, Canis familiaris
gcctgttgcgtggggaaaccagcct

SEQ ID NO: 93786 - DNA, 25 bp, Canis familiaris
gcctgattttcagggaagtcccctg

SEQ ID NO: 93787 - DNA, 25 bp, Canis familiaris
gcctgatttccaggaaagtcccctg

SEQ ID NO: 93788 - DNA, 25 bp, Canis familiaris
gcctgaattccaatgacaagtccct

SEQ ID NO: 93789 - DNA, 25 bp, Canis familiaris
gcctgattactgcatacatagctcc

SEQ ID NO: 93790 - DNA, 25 bp, Canis familiaris
gcctgttagtgcaacccagtgcatg

SEQ ID NO: 93791 - DNA, 25 bp, Canis familiaris
gcctgatctggggaacccatcatgg

SEQ ID NO: 93792 - DNA, 25 bp, Canis familiaris
gcctgtccgggaaaaccatacacgc

SEQ ID NO: 93793 - DNA, 25 bp, Canis familiaris
gcctgccccaggcagaaccagaacc

SEQ ID NO: 93794 - DNA, 25 bp, Canis familiaris
gccgcaccttgtcatgtaccatcaa

SEQ ID NO: 93795 - DNA, 25 bp, Canis familiaris
gccgcaccttgtcatgtaccatcaa

SEQ ID NO: 93796 - DNA, 25 bp, Canis familiaris
gcctctggttgaaataacactgcac

SEQ ID NO: 93797 - DNA, 25 bp, Canis familiaris
gcctgtggttgtggtgcagaacgcc

SEQ ID NO: 93798 - DNA, 25 bp, Canis familiaris
gccgtcatttctgggagaagcctgg

SEQ ID NO: 93799 - DNA, 25 bp, Canis familiaris
gcctgtcaacttggaggcactgcct

SEQ ID NO: 93800 - DNA, 25 bp, Canis familiaris
gcctgctgcaactgagaggcctgcc

SEQ ID NO: 93801 - DNA, 25 bp, Canis familiaris
gcctgatgagaccaagggcttccat

SEQ ID NO: 93802 - DNA, 25 bp, Canis familiaris
gccgaggtgcaggagcaccttcgca

SEQ ID NO: 93803 - DNA, 25 bp, Canis familiaris
gccgaaggcaggcacctggtgtttt

SEQ ID NO: 93804 - DNA, 25 bp, Canis familiaris
gcctgaagtgtggctgacctggtcc

SEQ ID NO: 93805 - DNA, 25 bp, Canis familiaris
gcctgcaaagatctatcctcagtct

SEQ ID NO: 93806 - DNA, 25 bp, Canis familiaris
gcctccaaggctttagcaggctccg

SEQ ID NO: 93807 - DNA, 25 bp, Canis familiaris
gcctcgtggcctgtacatggccagg

SEQ ID NO: 93808 - DNA, 25 bp, Canis familiaris
gcctcggaccatgattgaccacagg

SEQ ID NO: 93809 - DNA, 25 bp, Canis familiaris
gccccgaccttgcctgaacaaggta

SEQ ID NO: 93810 - DNA, 25 bp, Canis familiaris
gcctgcctgtccctgttaaagaggc

SEQ ID NO: 93811 - DNA, 25 bp, Canis familiaris
gcctgccttctcgtgtaacgatagg

SEQ ID NO: 93812 - DNA, 25 bp, Canis familiaris
gcctccttcaagggcaagcccaggt

SEQ ID NO: 93813 - DNA, 25 bp, Canis familiaris
gcccctccagaagcggaaagcagtc

SEQ ID NO: 93814 - DNA, 25 bp, Canis familiaris
gccccccaacttgggagtgggcact

SEQ ID NO: 93815 - DNA, 25 bp, Canis familiaris
gccccccttcttgttggatgggctt

SEQ ID NO: 93816 - DNA, 25 bp, Canis familiaris
gcctcccctctgagattcagggggt

SEQ ID NO: 93817 - DNA, 25 bp, Canis familiaris
gcctgctccctgcttagtggggagt

SEQ ID NO: 93818 - DNA, 25 bp, Canis familiaris
gcctgtgccctaatgtgggggagag

SEQ ID NO: 93819 - DNA, 25 bp, Canis familiaris
gcctgcctcctagtgctggaggggc

SEQ ID NO: 93820 - DNA, 25 bp, Canis familiaris
gcctgcgctccatgtgcagataagg

SEQ ID NO: 93821 - DNA, 25 bp, Canis familiaris
gcctccacctgtccagatgatgagg

SEQ ID NO: 93822 - DNA, 25 bp, Canis familiaris
gcctccaacggatgctgcagagagc

SEQ ID NO: 93823 - DNA, 25 bp, Canis familiaris
gcctccaccggaggccatggaagga

SEQ ID NO: 93824 - DNA, 25 bp, Canis familiaris
gcctgccagtgtgaggacggaagga

SEQ ID NO: 93825 - DNA, 25 bp, Canis familiaris
gcctgcacaggtgacatggccgaca

SEQ ID NO: 93826 - DNA, 25 bp, Canis familiaris
gcctgcccatgggcacatgggagtc

SEQ ID NO: 93827 - DNA, 25 bp, Canis familiaris
gcctgcctggggccaggtgagtgtg

SEQ ID NO: 93828 - DNA, 25 bp, Canis familiaris
gcctgacccactcaagtgagtgatg

SEQ ID NO: 93829 - DNA, 25 bp, Canis familiaris
gcctgccccactacaatgtaataga

SEQ ID NO: 93830 - DNA, 25 bp, Canis familiaris
gcctgaccctcttcttgaaacagtg

SEQ ID NO: 93831 - DNA, 25 bp, Canis familiaris
gcctcccatctccaaagaaaagtgc

SEQ ID NO: 93832 - DNA, 25 bp, Canis familiaris
gcctcccagcacgacaaaaactggc

SEQ ID NO: 93833 - DNA, 25 bp, Canis familiaris
gcctcccacatggccatatatcaca

SEQ ID NO: 93834 - DNA, 25 bp, Canis familiaris
gccgcatccagctgctgtatcaaca

SEQ ID NO: 93835 - DNA, 25 bp, Canis familiaris
gcctgtcacagagtgctctctgaag

SEQ ID NO: 93836 - DNA, 25 bp, Canis familiaris
gcctgccagcaggttctctggaaca

SEQ ID NO: 93837 - DNA, 25 bp, Canis familiaris
gcctcctgtttggcatgcggaacag

SEQ ID NO: 93838 - DNA, 25 bp, Canis familiaris
gcctccttttggtctgtgcagagac

SEQ ID NO: 93839 - DNA, 25 bp, Canis familiaris
gcccctcgttggtgtctgagtatac

SEQ ID NO: 93840 - DNA, 25 bp, Canis familiaris
gccccggttattctgcaagtgtccg

SEQ ID NO: 93841 - DNA, 25 bp, Canis familiaris
gcctgggtatcttgtcctaaggtcc

SEQ ID NO: 93842 - DNA, 25 bp, Canis familiaris
gccggtccttgggcttagagcggcc

SEQ ID NO: 93843 - DNA, 25 bp, Canis familiaris
gccgcaactcttcacttggagaggc

SEQ ID NO: 93844 - DNA, 25 bp, Canis familiaris
gcctgcagcaccagaaccaggacaa

SEQ ID NO: 93845 - DNA, 25 bp, Canis familiaris
gcctgcctgccaagagagccaggga

SEQ ID NO: 93846 - DNA, 25 bp, Canis familiaris
gcctcctccaagtgctcatggagaa

SEQ ID NO: 93847 - DNA, 25 bp, Canis familiaris
gcccctccaagtgttaagacagcaa

SEQ ID NO: 93848 - DNA, 25 bp, Canis familiaris
gccccttaccaggcttcaagggcca

SEQ ID NO: 93849 - DNA, 25 bp, Canis familiaris
gccccttaccaggtcaacaagacaa

SEQ ID NO: 93850 - DNA, 25 bp, Canis familiaris
gcccctttcaggatcatgccataat

SEQ ID NO: 93851 - DNA, 25 bp, Canis familiaris
gccccatcttccgtgttgtaaagga

SEQ ID NO: 93852 - DNA, 25 bp, Canis familiaris
gcctcccaggtggtgttgtggttgg

SEQ ID NO: 93853 - DNA, 25 bp, Canis familiaris
gcctcccggagctgactgtggggag

SEQ ID NO: 93854 - DNA, 25 bp, Canis familiaris
gcctgccctgtgtcgtaagatgggg

SEQ ID NO: 93855 - DNA, 25 bp, Canis familiaris
gcctgccctgtgtcgtaagatgggg

SEQ ID NO: 93856 - DNA, 25 bp, Canis familiaris
gcctgcccggaccttgacagcaggc

SEQ ID NO: 93857 - DNA, 25 bp, Canis familiaris
gcctcctaggaccctaggcaggccc

SEQ ID NO: 93858 - DNA, 25 bp, Canis familiaris
gccccaaggtctttaggtgggcaca

SEQ ID NO: 93859 - DNA, 25 bp, Canis familiaris
gccccagttcctttgggtgggatag

SEQ ID NO: 93860 - DNA, 25 bp, Canis familiaris
gccccgacccagggtggtagagtag

SEQ ID NO: 93861 - DNA, 25 bp, Canis familiaris
gccgtgtacgccatttgggaataag

SEQ ID NO: 93862 - DNA, 25 bp, Canis familiaris
gtcggccggaacattgggctcagta

SEQ ID NO: 93863 - DNA, 25 bp, Canis familiaris
gcctgagcctggaaatttggggaaa

SEQ ID NO: 93864 - DNA, 25 bp, Canis familiaris
gccgggagtttctttggtgcagaaa

SEQ ID NO: 93865 - DNA, 25 bp, Canis familiaris
gccggtttgctttcttggggaggct

SEQ ID NO: 93866 - DNA, 25 bp, Canis familiaris
gcctgtgggtgggacgtggggaggt

SEQ ID NO: 93867 - DNA, 25 bp, Canis familiaris
gccgttggtgggtttgtgtgggtgc

SEQ ID NO: 93868 - DNA, 25 bp, Canis familiaris
gccgtgggaggttttgttgtgtatt

SEQ ID NO: 93869 - DNA, 25 bp, Canis familiaris
gccctggtggggattacttgaacat

SEQ ID NO: 93870 - DNA, 25 bp, Canis familiaris
gcctggggggagagttcctgaactc

SEQ ID NO: 93871 - DNA, 25 bp, Canis familiaris
gcctgatggcgtcggactattccga

SEQ ID NO: 93872 - DNA, 25 bp, Canis familiaris
gcctgagtcgctctgttagttgtga

SEQ ID NO: 93873 - DNA, 25 bp, Canis familiaris
gcctgagtggctcagttagttaagc

SEQ ID NO: 93874 - DNA, 25 bp, Canis familiaris
gcctgaatggctccgtcggttgagc

SEQ ID NO: 93875 - DNA, 25 bp, Canis familiaris
gcctgaaggtggcccgggagatgca

SEQ ID NO: 93876 - DNA, 25 bp, Canis familiaris
gcctgaggaggactctcgggagagc

SEQ ID NO: 93877 - DNA, 25 bp, Canis familiaris
gccgagagaggcattccagaaggac

SEQ ID NO: 93878 - DNA, 25 bp, Canis familiaris
gcctgggcttcatatccagccagga

SEQ ID NO: 93879 - DNA, 25 bp, Canis familiaris
gcctgggccttgtacccaagagact

SEQ ID NO: 93880 - DNA, 25 bp, Canis familiaris
gcctggggcaaatgacctaacctct

SEQ ID NO: 93881 - DNA, 25 bp, Canis familiaris
gccggcgaataatacccggccgcgg

SEQ ID NO: 93882 - DNA, 25 bp, Canis familiaris
gccgacggaactgactgagggccgg

SEQ ID NO: 93883 - DNA, 25 bp, Canis familiaris
gccggctggaacttccaaggaggca

SEQ ID NO: 93884 - DNA, 25 bp, Canis familiaris
gccgcagggaagttctctagtgacc

SEQ ID NO: 93885 - DNA, 25 bp, Canis familiaris
gcctgaggccagatttctttgattc

SEQ ID NO: 93886 - DNA, 25 bp, Canis familiaris
gcctgacagggaatgattgctattt

SEQ ID NO: 93887 - DNA, 25 bp, Canis familiaris
gcctgcacaggtggagttctagctc

SEQ ID NO: 93888 - DNA, 25 bp, Canis familiaris
gcctgaaggccaatgttccagcacg

SEQ ID NO: 93889 - DNA, 25 bp, Canis familiaris
gcctgacggccaggtcatcaccatt

SEQ ID NO: 93890 - DNA, 25 bp, Canis familiaris
gcctgatgttgcggttaccacatcc

SEQ ID NO: 93891 - DNA, 25 bp, Canis familiaris
gcctgagaaacggctaccacatcca

SEQ ID NO: 93892 - DNA, 25 bp, Canis familiaris
gcctgagccaagggctttcacatcc

SEQ ID NO: 93893 - DNA, 25 bp, Canis familiaris
gcctggcccaggactaggcacatag

SEQ ID NO: 93894 - DNA, 25 bp, Canis familiaris
gcctggcccagacctgagaccaggt

SEQ ID NO: 93895 - DNA, 25 bp, Canis familiaris
gcctggagccattgactgaagccga

SEQ ID NO: 93896 - DNA, 25 bp, Canis familiaris
gcctgccatgtttccagaattcgtt

SEQ ID NO: 93897 - DNA, 25 bp, Canis familiaris
gcctgcaaatgatgccagttttctt

SEQ ID NO: 93898 - DNA, 25 bp, Canis familiaris
gcctgcacctacgtcagaacatttt

SEQ ID NO: 93899 - DNA, 25 bp, Canis familiaris
gcctgcatcagctcccaggagctgt

SEQ ID NO: 93900 - DNA, 25 bp, Canis familiaris
gcctgccaaccagaggatgctgtgc

SEQ ID NO: 93901 - DNA, 25 bp, Canis familiaris
gcctggatcctagcaagtctggcct

SEQ ID NO: 93902 - DNA, 25 bp, Canis familiaris
gcctggagaccatcaaactggctcc

SEQ ID NO: 93903 - DNA, 25 bp, Canis familiaris
gcctgacgacactagccaaagtcat

SEQ ID NO: 93904 - DNA, 25 bp, Canis familiaris
gcctgacgagagcacagcagtccta

SEQ ID NO: 93905 - DNA, 25 bp, Canis familiaris
gcctgcccagagcatgcagaggtcc

SEQ ID NO: 93906 - DNA, 25 bp, Canis familiaris
gcctgtcatctgtcagctgcaaggt

SEQ ID NO: 93907 - DNA, 25 bp, Canis familiaris
gcctgtctgctgacattctgcaggg

SEQ ID NO: 93908 - DNA, 25 bp, Canis familiaris
gcctgtctggtctttgatgtttgga

SEQ ID NO: 93909 - DNA, 25 bp, Canis familiaris
gccgactggctctgatgtttttata

SEQ ID NO: 93910 - DNA, 25 bp, Canis familiaris
gcctggtcaccagggctgcttttaa

SEQ ID NO: 93911 - DNA, 25 bp, Canis familiaris
gccggagacctgttgcatttttgca

SEQ ID NO: 93912 - DNA, 25 bp, Canis familiaris
gcctgtggacaccttgagattatta

SEQ ID NO: 93913 - DNA, 25 bp, Canis familiaris
gcctgttgacacttagagctttcta

SEQ ID NO: 93914 - DNA, 25 bp, Canis familiaris
gcctggggcagattcagaggctcct

SEQ ID NO: 93915 - DNA, 25 bp, Canis familiaris
gcctgcgtggtggtcaggagccagg

SEQ ID NO: 93916 - DNA, 25 bp, Canis familiaris
gcctggtctgtggctgctaaggcag

SEQ ID NO: 93917 - DNA, 25 bp, Canis familiaris
gcctggggttgcctaattgagttga

SEQ ID NO: 93918 - DNA, 25 bp, Canis familiaris
gccggtgatactggtagttggtgtg

SEQ ID NO: 93919 - DNA, 25 bp, Canis familiaris
gcctgtttgtcttttgttgttgttg

SEQ ID NO: 93920 - DNA, 25 bp, Canis familiaris
gccgttgtgttgtgtgtggtataat

SEQ ID NO: 93921 - DNA, 25 bp, Canis familiaris
gccgtatctgtttggcgggacagtt

SEQ ID NO: 93922 - DNA, 25 bp, Canis familiaris
gccgtcacgttgtggttgatactcc

SEQ ID NO: 93923 - DNA, 25 bp, Canis familiaris
gccgatggttggtggggaagctcct

SEQ ID NO: 93924 - DNA, 25 bp, Canis familiaris
gccgatctttggctggggcaggtac

SEQ ID NO: 93925 - DNA, 25 bp, Canis familiaris
gccgtttggggcagctgctgaggtc

SEQ ID NO: 93926 - DNA, 25 bp, Canis familiaris
gttttggtggtcagtcaggttgcct

SEQ ID NO: 93927 - DNA, 25 bp, Canis familiaris
tcttttttggtcatacgtatcggta

SEQ ID NO: 93928 - DNA, 25 bp, Canis familiaris
tccaatttgggtctacctttctgcc

SEQ ID NO: 93929 - DNA, 25 bp, Canis familiaris
tccaaaacagggataattttgtgcc

SEQ ID NO: 93930 - DNA, 25 bp, Canis familiaris
gaataagggggcatactttttgcat

SEQ ID NO: 93931 - DNA, 25 bp, Canis familiaris
gaaaggggcgtataattcttggaat

SEQ ID NO: 93932 - DNA, 25 bp, Canis familiaris
gaaagggtggtcaccaaccttcctg

SEQ ID NO: 93933 - DNA, 25 bp, Canis familiaris
gtaagtttgggctctgaacctgtcc

SEQ ID NO: 93934 - DNA, 25 bp, Canis familiaris
gctaagtaatgggcgcctgcagtct

SEQ ID NO: 93935 - DNA, 25 bp, Canis familiaris
gaatagtccgagggttggtcttgaa

SEQ ID NO: 93936 - DNA, 25 bp, Canis familiaris
gacacagtccggttggggttaaatg

SEQ ID NO: 93937 - DNA, 25 bp, Canis familiaris
gtccgtcgggaccggatttacaatg

SEQ ID NO: 93938 - DNA, 25 bp, Canis familiaris
gccctggaatggcgggtttcaaatg

SEQ ID NO: 93939 - DNA, 25 bp, Canis familiaris
gccgtgtgagggcggccctacaata

SEQ ID NO: 93940 - DNA, 25 bp, Canis familiaris
gcctggtgagttggggtctctacaa

SEQ ID NO: 93941 - DNA, 25 bp, Canis familiaris
gctctgggggggtgtcttaaatgtg

SEQ ID NO: 93942 - DNA, 25 bp, Canis familiaris
ttttgggtggactgttctaaatagt

SEQ ID NO: 93943 - DNA, 25 bp, Canis familiaris
gttcaaggtaagtcgttctaaagag

SEQ ID NO: 93944 - DNA, 25 bp, Canis familiaris
gcttaacctaagtttctgcgaatac

SEQ ID NO: 93945 - DNA, 25 bp, Canis familiaris
gcttgaaccctagtttccttgataa

SEQ ID NO: 93946 - DNA, 25 bp, Canis familiaris
gcctggaccacaagtttgacctgat

SEQ ID NO: 93947 - DNA, 25 bp, Canis familiaris
gcctggaccacaagtttgacctgat

SEQ ID NO: 93948 - DNA, 25 bp, Canis familiaris
gccggaccacggttaactcatgaca

SEQ ID NO: 93949 - DNA, 25 bp, Canis familiaris
gccggagccaaggcaatcgagccag

SEQ ID NO: 93950 - DNA, 25 bp, Canis familiaris
gcctggagccaaggatatcaatgct

SEQ ID NO: 93951 - DNA, 25 bp, Canis familiaris
gcctggaccaacctcaatgatgatg

SEQ ID NO: 93952 - DNA, 25 bp, Canis familiaris
gccggcctcagagcactatgatgat

SEQ ID NO: 93953 - DNA, 25 bp, Canis familiaris
gcctgccctcgaggagctgataaac

SEQ ID NO: 93954 - DNA, 25 bp, Canis familiaris
gcctgcgttctagtagcttgaagcc

SEQ ID NO: 93955 - DNA, 25 bp, Canis familiaris
gcccgacgctgagtactggaaccgg

SEQ ID NO: 93956 - DNA, 25 bp, Canis familiaris
gcctggaacagggagggatacctgg

SEQ ID NO: 93957 - DNA, 25 bp, Canis familiaris
gcctgcgaggggttgggatgacact

SEQ ID NO: 93958 - DNA, 25 bp, Canis familiaris
gcctgcagatggctgggggtgccac

SEQ ID NO: 93959 - DNA, 25 bp, Canis familiaris
gcctgctggagcagggggctaccca

SEQ ID NO: 93960 - DNA, 25 bp, Canis familiaris
gcctgctggagcagggggctaccca

SEQ ID NO: 93961 - DNA, 25 bp, Canis familiaris
gcctgctggagcagggggctaccca

SEQ ID NO: 93962 - DNA, 25 bp, Canis familiaris
gcctgtggagcccgtgggctgatgc

SEQ ID NO: 93963 - DNA, 25 bp, Canis familiaris
gcctggcaggaatgtgtggctgtgc

SEQ ID NO: 93964 - DNA, 25 bp, Canis familiaris
gcctgcgcaggatgaatttgctgcc

SEQ ID NO: 93965 - DNA, 25 bp, Canis familiaris
gcctggcatggataaagtgctcagt

SEQ ID NO: 93966 - DNA, 25 bp, Canis familiaris
gcctgggacatctaacgctgtcgtg

SEQ ID NO: 93967 - DNA, 25 bp, Canis familiaris
gcctggagacattattcggctcacc

SEQ ID NO: 93968 - DNA, 25 bp, Canis familiaris
gcctggcagacttttgggtgacaac

SEQ ID NO: 93969 - DNA, 25 bp, Canis familiaris
gcctggatgcacgtgttggtggctc

SEQ ID NO: 93970 - DNA, 25 bp, Canis familiaris
gcctggctgggagttggtggcttta

SEQ ID NO: 93971 - DNA, 25 bp, Canis familiaris
gcctgatgcgggattagatcctcta

SEQ ID NO: 93972 - DNA, 25 bp, Canis familiaris
gcctgacatgggattcgatcccgag

SEQ ID NO: 93973 - DNA, 25 bp, Canis familiaris
gccgagagagagaaactgtcccgcg

SEQ ID NO: 93974 - DNA, 25 bp, Canis familiaris
gcctgaagaagcacaagtccggcgg

SEQ ID NO: 93975 - DNA, 25 bp, Canis familiaris
gcctgaaaagggtactctcttcgtg

SEQ ID NO: 93976 - DNA, 25 bp, Canis familiaris
gcctgaataagaccagaccactatc

SEQ ID NO: 93977 - DNA, 25 bp, Canis familiaris
gccgagtaagagcgcactcacggcc

SEQ ID NO: 93978 - DNA, 25 bp, Canis familiaris
gccgagctaagggatcgccagggtc

SEQ ID NO: 93979 - DNA, 25 bp, Canis familiaris
gccggtcagaagggatcctgggtca

SEQ ID NO: 93980 - DNA, 25 bp, Canis familiaris
gcctgaggatgttgggatcactggg

SEQ ID NO: 93981 - DNA, 25 bp, Canis familiaris
gcctgaagctgaggggtcagcgggc

SEQ ID NO: 93982 - DNA, 25 bp, Canis familiaris
gcctgagcacggagggcatcgagtg

SEQ ID NO: 93983 - DNA, 25 bp, Canis familiaris
gccgagccaggcagctggaggagga

SEQ ID NO: 93984 - DNA, 25 bp, Canis familiaris
gccggagctgcgacgcggaagcagc

SEQ ID NO: 93985 - DNA, 25 bp, Canis familiaris
gccgtagctggacaggatgggcaaa

SEQ ID NO: 93986 - DNA, 25 bp, Canis familiaris
gcctgtcactgggagggagggcatc

SEQ ID NO: 93987 - DNA, 25 bp, Canis familiaris
gcacattaagggaggaggtcccaaa

SEQ ID NO: 93988 - DNA, 25 bp, Canis familiaris
gccgtaaggaaaggagcagccgcca

SEQ ID NO: 93989 - DNA, 25 bp, Canis familiaris
gccgtaaggtaaaggatcatccgcc

SEQ ID NO: 93990 - DNA, 25 bp, Canis familiaris
gccgagggcgtacaaatcatccgac

SEQ ID NO: 93991 - DNA, 25 bp, Canis familiaris
gcctggtgggtacaggaatctgcca

SEQ ID NO: 93992 - DNA, 25 bp, Canis familiaris
gcctgtgctggtgagaagaggtctg

SEQ ID NO: 93993 - DNA, 25 bp, Canis familiaris
gcctgtttgatggcgatggggtcag

SEQ ID NO: 93994 - DNA, 25 bp, Canis familiaris
gccgtgttctgactgagcagggtct

SEQ ID NO: 93995 - DNA, 25 bp, Canis familiaris
gcctgcttctggtggcagtgtggct

SEQ ID NO: 93996 - DNA, 25 bp, Canis familiaris
gcctgttgaggagtcgctctctggc

SEQ ID NO: 93997 - DNA, 25 bp, Canis familiaris
gcctgatcatagacactttctctga

SEQ ID NO: 93998 - DNA, 25 bp, Canis familiaris
gccgtcacaggctttgattctgaga

SEQ ID NO: 93999 - DNA, 25 bp, Canis familiaris
gccgcctgcaggatgagattcagaa

SEQ ID NO: 94000 - DNA, 25 bp, Canis familiaris
gcctgtctcaagtgcgcttaggagg

SEQ ID NO: 94001 - DNA, 25 bp, Canis familiaris
gcctgttaacgtggttcatgtggga

SEQ ID NO: 94002 - DNA, 25 bp, Canis familiaris
gccgtccagacgtgtgactctgggc

SEQ ID NO: 94003 - DNA, 25 bp, Canis familiaris
tccccaagaccatggagccgggtta

SEQ ID NO: 94004 - DNA, 25 bp, Canis familiaris
gccccaaaccacacagccagtttgg

SEQ ID NO: 94005 - DNA, 25 bp, Canis familiaris
gcccgaaaccttccaagcaggtggt

SEQ ID NO: 94006 - DNA, 25 bp, Canis familiaris
gccggatgaaaccaccagaaggggg

SEQ ID NO: 94007 - DNA, 25 bp, Canis familiaris
gccgggaggagcccatcgaatggga

SEQ ID NO: 94008 - DNA, 25 bp, Canis familiaris
gcctgggcagggcgaagccagagga

SEQ ID NO: 94009 - DNA, 25 bp, Canis familiaris
gcctgtagaggccctgaatgcacaa

SEQ ID NO: 94010 - DNA, 25 bp, Canis familiaris
gcctgaagcgcccaagaatcgacag

SEQ ID NO: 94011 - DNA, 25 bp, Canis familiaris
gcctgtcaccggcagaactgataga

SEQ ID NO: 94012 - DNA, 25 bp, Canis familiaris
gccgtcactggacagcaactgtgtg

SEQ ID NO: 94013 - DNA, 25 bp, Canis familiaris
gccgtccagtggtatctggcgtgtg

SEQ ID NO: 94014 - DNA, 25 bp, Canis familiaris
gcctgttctaggtttgggttgccat

SEQ ID NO: 94015 - DNA, 25 bp, Canis familiaris
gcctgtcttcacgtaatgggggtct

SEQ ID NO: 94016 - DNA, 25 bp, Canis familiaris
gccgccttccaccagatggaagctg

SEQ ID NO: 94017 - DNA, 25 bp, Canis familiaris
gccgacagctgcttcggggatgacg

SEQ ID NO: 94018 - DNA, 25 bp, Canis familiaris
gccggcgtgatttctggagatgaat

SEQ ID NO: 94019 - DNA, 25 bp, Canis familiaris
gcctgtgtctgttcctggagaggat

SEQ ID NO: 94020 - DNA, 25 bp, Canis familiaris
gccggttgctgagctgagcatgagt

SEQ ID NO: 94021 - DNA, 25 bp, Canis familiaris
gcctggtctcgaagcgatgcatgca

SEQ ID NO: 94022 - DNA, 25 bp, Canis familiaris
gcctgtgtccctaggagcataatgt

SEQ ID NO: 94023 - DNA, 25 bp, Canis familiaris
gcctggttcctgcgagcatcaggcc

SEQ ID NO: 94024 - DNA, 25 bp, Canis familiaris
gccgagttccaggaggctcagagct

SEQ ID NO: 94025 - DNA, 25 bp, Canis familiaris
gccgcaggatgccttatgcgtcatc

SEQ ID NO: 94026 - DNA, 25 bp, Canis familiaris
gcctgggtcacaacaggtgctcgca

SEQ ID NO: 94027 - DNA, 25 bp, Canis familiaris
gcctgagggctcaaaatgtgaccat

SEQ ID NO: 94028 - DNA, 25 bp, Canis familiaris
gcctgagggctcaagtgtggagccc

SEQ ID NO: 94029 - DNA, 25 bp, Canis familiaris
gcctggggattggagtggggctctc

SEQ ID NO: 94030 - DNA, 25 bp, Canis familiaris
gcctggagggtggttgcgcaggtgc

SEQ ID NO: 94031 - DNA, 25 bp, Canis familiaris
gcctgtggaggactgtcccaggcct

SEQ ID NO: 94032 - DNA, 25 bp, Canis familiaris
gcctggcggagacgctgttgatcgc

SEQ ID NO: 94033 - DNA, 25 bp, Canis familiaris
gcctgactggagcctgcgagaatag

SEQ ID NO: 94034 - DNA, 25 bp, Canis familiaris
gccgaatgggcaacgaggaggaaga

SEQ ID NO: 94035 - DNA, 25 bp, Canis familiaris
gccggcatgtggctgtgggaggaac

SEQ ID NO: 94036 - DNA, 25 bp, Canis familiaris
gccggatcagctgcggcggagggat

SEQ ID NO: 94037 - DNA, 25 bp, Canis familiaris
gcctggacagtcctggaggaggtca

SEQ ID NO: 94038 - DNA, 25 bp, Canis familiaris
gccggcgagcaccggaagaagaagt

SEQ ID NO: 94039 - DNA, 25 bp, Canis familiaris
gcctgggagccagggttgggcaaga

SEQ ID NO: 94040 - DNA, 25 bp, Canis familiaris
gcctgaggaccgggtggaggcggtg

SEQ ID NO: 94041 - DNA, 25 bp, Canis familiaris
gcctgggcccaggattggagggctt

SEQ ID NO: 94042 - DNA, 25 bp, Canis familiaris
gccgtctccgcggagtaggggattt

SEQ ID NO: 94043 - DNA, 25 bp, Canis familiaris
gccgatatccgagggaagggctttg

SEQ ID NO: 94044 - DNA, 25 bp, Canis familiaris
gccctgtcctgagggcaacggcttt

SEQ ID NO: 94045 - DNA, 25 bp, Canis familiaris
gcctgggcctgctgagcaggcgcgt

SEQ ID NO: 94046 - DNA, 25 bp, Canis familiaris
gcctgagccctcagagaacagcatg

SEQ ID NO: 94047 - DNA, 25 bp, Canis familiaris
gcctgtggccctggtgaaatgcaga

SEQ ID NO: 94048 - DNA, 25 bp, Canis familiaris
gccgtgtgccgtggtgaaacgggac

SEQ ID NO: 94049 - DNA, 25 bp, Canis familiaris
gccgttctcctgctaggagaggcag

SEQ ID NO: 94050 - DNA, 25 bp, Canis familiaris
gccgttctctcgtgggagacgcagg

SEQ ID NO: 94051 - DNA, 25 bp, Canis familiaris
gccgatgatcttcaagctccgggca

SEQ ID NO: 94052 - DNA, 25 bp, Canis familiaris
gcctgtagattggactcacctggac

SEQ ID NO: 94053 - DNA, 25 bp, Canis familiaris
gccgtcagaagctattcctattaca

SEQ ID NO: 94054 - DNA, 25 bp, Canis familiaris
gccgtcagaagctccgtatagtaca

SEQ ID NO: 94055 - DNA, 25 bp, Canis familiaris
gccggagcacgctcacggaagaagc

SEQ ID NO: 94056 - DNA, 25 bp, Canis familiaris
gccggagccggaagccaagaagagc

SEQ ID NO: 94057 - DNA, 25 bp, Canis familiaris
gccggagctcgggaggcactaaaca

SEQ ID NO: 94058 - DNA, 25 bp, Canis familiaris
gcgaagaccgtctaggaattcaaaa

SEQ ID NO: 94059 - DNA, 25 bp, Canis familiaris
gcgacgacacggggaaataccacac

SEQ ID NO: 94060 - DNA, 25 bp, Canis familiaris
gcgcatacccggggccaatgaacac

SEQ ID NO: 94061 - DNA, 25 bp, Canis familiaris
gcctgagcccggtgcaggagagacg

SEQ ID NO: 94062 - DNA, 25 bp, Canis familiaris
gcctgagcccagcgagggagcaaga

SEQ ID NO: 94063 - DNA, 25 bp, Canis familiaris
gcctggccgacagggggaaggtact

SEQ ID NO: 94064 - DNA, 25 bp, Canis familiaris
gcctgagccgagaggtggtcgctcc

SEQ ID NO: 94065 - DNA, 25 bp, Canis familiaris
gcctggcgcagcgccaggtgtcccc

SEQ ID NO: 94066 - DNA, 25 bp, Canis familiaris
gcctggggaacccagttgtcagcct

SEQ ID NO: 94067 - DNA, 25 bp, Canis familiaris
gcctggggagcagagctgtctccag

SEQ ID NO: 94068 - DNA, 25 bp, Canis familiaris
gcctggaggagaaagcccttgggca

SEQ ID NO: 94069 - DNA, 25 bp, Canis familiaris
gcctggggaagaacctattgtgtgc

SEQ ID NO: 94070 - DNA, 25 bp, Canis familiaris
gccggtggtaaagctagggtccatc

SEQ ID NO: 94071 - DNA, 25 bp, Canis familiaris
gccgccatgttaaacccaggaatcc

SEQ ID NO: 94072 - DNA, 25 bp, Canis familiaris
gccgcttgctaaacctggcgtgaaa

SEQ ID NO: 94073 - DNA, 25 bp, Canis familiaris
gccgtcgtaaacggcactctaaggt

SEQ ID NO: 94074 - DNA, 25 bp, Canis familiaris
gccgtctttcaacgcgtttgacgcg

SEQ ID NO: 94075 - DNA, 25 bp, Canis familiaris
gccggcttcatccaaggttggtggg

SEQ ID NO: 94076 - DNA, 25 bp, Canis familiaris
gccggctgtttaagtttgttgtgac

SEQ ID NO: 94077 - DNA, 25 bp, Canis familiaris
gcctgggccttgaattttctgtggg

SEQ ID NO: 94078 - DNA, 25 bp, Canis familiaris
gcccgactcttgatttctgctcggg

SEQ ID NO: 94079 - DNA, 25 bp, Canis familiaris
gcccacctctagtttacaacacggt

SEQ ID NO: 94080 - DNA, 25 bp, Canis familiaris
gcccgttcttttgagcaactgggtc

SEQ ID NO: 94081 - DNA, 25 bp, Canis familiaris
gccgggatcttcatgtatcaactgc

SEQ ID NO: 94082 - DNA, 25 bp, Canis familiaris
gcctgtgttttacttatctctctgc

SEQ ID NO: 94083 - DNA, 25 bp, Canis familiaris
gcctgttcattaaaatatatctgtg

SEQ ID NO: 94084 - DNA, 25 bp, Canis familiaris
gccgtcttgtgaacaagaattttta

SEQ ID NO: 94085 - DNA, 25 bp, Canis familiaris
gcccttcgtcaagaaggtcttcgag

SEQ ID NO: 94086 - DNA, 25 bp, Canis familiaris
gcccgagccccagagggtttgagtg

SEQ ID NO: 94087 - DNA, 25 bp, Canis familiaris
gccgggtaccaggagggcttctgga

SEQ ID NO: 94088 - DNA, 25 bp, Canis familiaris
gcccggaaccatggacagcgtccgg

SEQ ID NO: 94089 - DNA, 25 bp, Canis familiaris
gcccaaaggccttacacagtgcctg

SEQ ID NO: 94090 - DNA, 25 bp, Canis familiaris
gccccacaggactgtcagggctcgc

SEQ ID NO: 94091 - DNA, 25 bp, Canis familiaris
gccccaagtctgccagtgaagaccc

SEQ ID NO: 94092 - DNA, 25 bp, Canis familiaris
gccccaacattgagtgaaattacca

SEQ ID NO: 94093 - DNA, 25 bp, Canis familiaris
gcccagtttttgcctgaattaacca

SEQ ID NO: 94094 - DNA, 25 bp, Canis familiaris
gcccaactatttgataataaagcgc

SEQ ID NO: 94095 - DNA, 25 bp, Canis familiaris
gccgcccgtattgctgagaagaagg

SEQ ID NO: 94096 - DNA, 25 bp, Canis familiaris
gccgtccgctatttggaaagaagca

SEQ ID NO: 94097 - DNA, 25 bp, Canis familiaris
gccgtcccgcatctggggagaagtc

SEQ ID NO: 94098 - DNA, 25 bp, Canis familiaris
gccgcagcccgttagggagacaagt

SEQ ID NO: 94099 - DNA, 25 bp, Canis familiaris
gccgcagcttcgagaggtctcaaag

SEQ ID NO: 94100 - DNA, 25 bp, Canis familiaris
gccctgattatcaaagccctcaagg

SEQ ID NO: 94101 - DNA, 25 bp, Canis familiaris
gcccctttgccaacccatagaggga

SEQ ID NO: 94102 - DNA, 25 bp, Canis familiaris
gcccctctgtgcagcaccaaggggg

SEQ ID NO: 94103 - DNA, 25 bp, Canis familiaris
tcccctgggcttcactaaggtggtt

SEQ ID NO: 94104 - DNA, 25 bp, Canis familiaris
gccccgtcgtgtcttaggagggtct

SEQ ID NO: 94105 - DNA, 25 bp, Canis familiaris
gcccggacggtgattgggtagccgt

SEQ ID NO: 94106 - DNA, 25 bp, Canis familiaris
gcccgagggacggctatgttttccg

SEQ ID NO: 94107 - DNA, 25 bp, Canis familiaris
gcgcaaaggggggcttggcttggcc

SEQ ID NO: 94108 - DNA, 25 bp, Canis familiaris
gcgaataaaggggcggcgcctcggc

SEQ ID NO: 94109 - DNA, 25 bp, Canis familiaris
gccggaataggagcgggcccagagc

SEQ ID NO: 94110 - DNA, 25 bp, Canis familiaris
gccgagagaagtctgccggcaaagg

SEQ ID NO: 94111 - DNA, 25 bp, Canis familiaris
gccggagagactgtggggtctgacg

SEQ ID NO: 94112 - DNA, 25 bp, Canis familiaris
gccgggagatccggtgctggtctaa

SEQ ID NO: 94113 - DNA, 25 bp, Canis familiaris
gccggggcagtaagtgaggttgaga

SEQ ID NO: 94114 - DNA, 25 bp, Canis familiaris
gcctggggcagctagtgggagtgag

SEQ ID NO: 94115 - DNA, 25 bp, Canis familiaris
gccgggcagcaggagggacagggcc

SEQ ID NO: 94116 - DNA, 25 bp, Canis familiaris
gccggagatcgggaggtgcagagga

SEQ ID NO: 94117 - DNA, 25 bp, Canis familiaris
gccgagagtccctgcagggaggtgt

SEQ ID NO: 94118 - DNA, 25 bp, Canis familiaris
gccggagtcccatgagtgtgtgaaa

SEQ ID NO: 94119 - DNA, 25 bp, Canis familiaris
gccgtattgccctggtgtcagaagc

SEQ ID NO: 94120 - DNA, 25 bp, Canis familiaris
gcgcttttgcccagaatgcacaaca

SEQ ID NO: 94121 - DNA, 25 bp, Canis familiaris
gctctttgtaccataaaaaatactt

SEQ ID NO: 94122 - DNA, 25 bp, Canis familiaris
gctcattttaccagaagaccagggt

SEQ ID NO: 94123 - DNA, 25 bp, Canis familiaris
gcccatttctacagaaaccagttga

SEQ ID NO: 94124 - DNA, 25 bp, Canis familiaris
gccggtcctacgaaacacttgtgga

SEQ ID NO: 94125 - DNA, 25 bp, Canis familiaris
gcctggccctgaggaaatcctctgg

SEQ ID NO: 94126 - DNA, 25 bp, Canis familiaris
gcccggtctggggagacttctgggc

SEQ ID NO: 94127 - DNA, 25 bp, Canis familiaris
gccgcggttcgtgtgcatataaggg

SEQ ID NO: 94128 - DNA, 25 bp, Canis familiaris
gcccttggttgtgtgcattactgaa

SEQ ID NO: 94129 - DNA, 25 bp, Canis familiaris
gccctatgcatatgacctgttgcct

SEQ ID NO: 94130 - DNA, 25 bp, Canis familiaris
gcccttcagttacctgaacctggtc

SEQ ID NO: 94131 - DNA, 25 bp, Canis familiaris
gccctgtcacagatcgtgaacctag

SEQ ID NO: 94132 - DNA, 25 bp, Canis familiaris
gccctccaaactctaaactatgagg

SEQ ID NO: 94133 - DNA, 25 bp, Canis familiaris
gccgcccagacttcaataaaacgtg

SEQ ID NO: 94134 - DNA, 25 bp, Canis familiaris
gccgcccagacttcaataaaacgtg

SEQ ID NO: 94135 - DNA, 25 bp, Canis familiaris
gccgcaagcgggtcaacacgaagcg

SEQ ID NO: 94136 - DNA, 25 bp, Canis familiaris
gccgagagcgatgggcatctctcgg

SEQ ID NO: 94137 - DNA, 25 bp, Canis familiaris
gccgatgaggggatcctctggcaga

SEQ ID NO: 94138 - DNA, 25 bp, Canis familiaris
gcctggagagagtttccattcagca

SEQ ID NO: 94139 - DNA, 25 bp, Canis familiaris
gcctggatggcctattacatcaacc

SEQ ID NO: 94140 - DNA, 25 bp, Canis familiaris
gcgctggtggcctattaccagaaat

SEQ ID NO: 94141 - DNA, 25 bp, Canis familiaris
gcctggggctgctttacaataaacc

SEQ ID NO: 94142 - DNA, 25 bp, Canis familiaris
gcctggcaggtgcttcaccaatatt

SEQ ID NO: 94143 - DNA, 25 bp, Canis familiaris
gccgacaggcatcactgcaaagatc

SEQ ID NO: 94144 - DNA, 25 bp, Canis familiaris
gccgagaagaccccagaagatgctt

SEQ ID NO: 94145 - DNA, 25 bp, Canis familiaris
gccccattagccctagaggatgcct

SEQ ID NO: 94146 - DNA, 25 bp, Canis familiaris
gccgcttaaccgttggaatgccttt

SEQ ID NO: 94147 - DNA, 25 bp, Canis familiaris
gcccaaaccgcatctgagtttttcc

SEQ ID NO: 94148 - DNA, 25 bp, Canis familiaris
gcccagatagccaaacgaatttatt

SEQ ID NO: 94149 - DNA, 25 bp, Canis familiaris
gcccgaggatctcacgttttattaa

SEQ ID NO: 94150 - DNA, 25 bp, Canis familiaris
gcgcccatggacatatctttttttt

SEQ ID NO: 94151 - DNA, 25 bp, Canis familiaris
gccgctattatatttactcatttta

SEQ ID NO: 94152 - DNA, 25 bp, Canis familiaris
gccgctgcatgatattgacactttg

SEQ ID NO: 94153 - DNA, 25 bp, Canis familiaris
gccgcttgacaatgcagatcttcgt

SEQ ID NO: 94154 - DNA, 25 bp, Canis familiaris
gccgcttgagaatagcacgccagct

SEQ ID NO: 94155 - DNA, 25 bp, Canis familiaris
gccggtgcaaattcaaccagcagca

SEQ ID NO: 94156 - DNA, 25 bp, Canis familiaris
gcctggtgcccttgcaagaggcagc

SEQ ID NO: 94157 - DNA, 25 bp, Canis familiaris
gccggcataccttcagaggctgagc

SEQ ID NO: 94158 - DNA, 25 bp, Canis familiaris
gccggtgacctatgaggaggcgcac

SEQ ID NO: 94159 - DNA, 25 bp, Canis familiaris
gcctggtgcctgcattggcgaagga

SEQ ID NO: 94160 - DNA, 25 bp, Canis familiaris
gccggtgttgtttgtccaagcagaa

SEQ ID NO: 94161 - DNA, 25 bp, Canis familiaris
gcctgtgtggtgctttccagaataa

SEQ ID NO: 94162 - DNA, 25 bp, Canis familiaris
gcctggatggaagattgcctaatac

SEQ ID NO: 94163 - DNA, 25 bp, Canis familiaris
gcctgggagaaacttgttcaattcc

SEQ ID NO: 94164 - DNA, 25 bp, Canis familiaris
gccggagacctgtttgttcagtttc

SEQ ID NO: 94165 - DNA, 25 bp, Canis familiaris
gctcggagggctattataagtctgt

SEQ ID NO: 94166 - DNA, 25 bp, Canis familiaris
gccgagagccccatgtaaagtactt

SEQ ID NO: 94167 - DNA, 25 bp, Canis familiaris
gccggacgcgagcagatgaacgaac

SEQ ID NO: 94168 - DNA, 25 bp, Canis familiaris
gccggtgcgctgctgaaaacgattc

SEQ ID NO: 94169 - DNA, 25 bp, Canis familiaris
gacggttctggtttataacattcca

SEQ ID NO: 94170 - DNA, 25 bp, Canis familiaris
gccggtctctggtgtcaaacaccac

SEQ ID NO: 94171 - DNA, 25 bp, Canis familiaris
gcccgagcttgttttaaagaccctg

SEQ ID NO: 94172 - DNA, 25 bp, Canis familiaris
gcccaaaggcttattatagtccaat

SEQ ID NO: 94173 - DNA, 25 bp, Canis familiaris
gccccaaccttcaaatcatttaata

SEQ ID NO: 94174 - DNA, 25 bp, Canis familiaris
gccccatcagccatgaaacttaaat

SEQ ID NO: 94175 - DNA, 25 bp, Canis familiaris
gccgacacaggcaagaacctagtca

SEQ ID NO: 94176 - DNA, 25 bp, Canis familiaris
gccccacaaccaagactgtgcaaca

SEQ ID NO: 94177 - DNA, 25 bp, Canis familiaris
gccccgctatacaagggatatacct

SEQ ID NO: 94178 - DNA, 25 bp, Canis familiaris
gcccctgttacaactggtcagacca

SEQ ID NO: 94179 - DNA, 25 bp, Canis familiaris
gcccctgcttagaagctgcaacagt

SEQ ID NO: 94180 - DNA, 25 bp, Canis familiaris
gccgtcgcatgtagagccagcaaag

SEQ ID NO: 94181 - DNA, 25 bp, Canis familiaris
gccggccgtggagacaaagcactga

SEQ ID NO: 94182 - DNA, 25 bp, Canis familiaris
gccgaccaaggtgacaccagcacga

SEQ ID NO: 94183 - DNA, 25 bp, Canis familiaris
gccgaaacaggtaatgagcccattg

SEQ ID NO: 94184 - DNA, 25 bp, Canis familiaris
gcccaaatatagaaagagcccagat

SEQ ID NO: 94185 - DNA, 25 bp, Canis familiaris
gccgccacaagagaagactcacaac

SEQ ID NO: 94186 - DNA, 25 bp, Canis familiaris
gcccacagaggaaaaaccacccgca

SEQ ID NO: 94187 - DNA, 25 bp, Canis familiaris
gcccatgattggtgaccaaacccca

SEQ ID NO: 94188 - DNA, 25 bp, Canis familiaris
gcgccaacatggtgagcgccggacg

SEQ ID NO: 94189 - DNA, 25 bp, Canis familiaris
gcccaaagtttgtcagcctaacgca

SEQ ID NO: 94190 - DNA, 25 bp, Canis familiaris
gccgagtatttttagcaccgttgaa

SEQ ID NO: 94191 - DNA, 25 bp, Canis familiaris
gcctggttttgtattcctttacagt

SEQ ID NO: 94192 - DNA, 25 bp, Canis familiaris
gcacttttgtttatttcctagtcct

SEQ ID NO: 94193 - DNA, 25 bp, Canis familiaris
gccctttggcttgtttcaatttcac

SEQ ID NO: 94194 - DNA, 25 bp, Canis familiaris
gccctgttgtgctgttttataaacc

SEQ ID NO: 94195 - DNA, 25 bp, Canis familiaris
gccctgctttcctttgtttaaatat

SEQ ID NO: 94196 - DNA, 25 bp, Canis familiaris
gcccgatttacgtgcgattcaaaat

SEQ ID NO: 94197 - DNA, 25 bp, Canis familiaris
gcccgttataccagccaatgcaaat

SEQ ID NO: 94198 - DNA, 25 bp, Canis familiaris
gccgacttgcttctcacaaatgcaa

SEQ ID NO: 94199 - DNA, 25 bp, Canis familiaris
gcccctggcttactcagccagtaga

SEQ ID NO: 94200 - DNA, 25 bp, Canis familiaris
gcccctgtggatttctacatgtaga

SEQ ID NO: 94201 - DNA, 25 bp, Canis familiaris
gcccctggaatgttgtgcctgataa

SEQ ID NO: 94202 - DNA, 25 bp, Canis familiaris
gccccaggcagcttcagtcctggga

SEQ ID NO: 94203 - DNA, 25 bp, Canis familiaris
gccgaggtcagctcaggctcggcca

SEQ ID NO: 94204 - DNA, 25 bp, Canis familiaris
gcccggctgtcatcatggttagcca

SEQ ID NO: 94205 - DNA, 25 bp, Canis familiaris
gcccccatgatatgattttccaatc

SEQ ID NO: 94206 - DNA, 25 bp, Canis familiaris
gccccaaggaaggtgttgcgcaact

SEQ ID NO: 94207 - DNA, 25 bp, Canis familiaris
gctcaccggaaaggagttcaagtgc

SEQ ID NO: 94208 - DNA, 25 bp, Canis familiaris
gccgccggaaagcgtgccaatcaac

SEQ ID NO: 94209 - DNA, 25 bp, Canis familiaris
gccggcggcaaaggagtcacatgta

SEQ ID NO: 94210 - DNA, 25 bp, Canis familiaris
gccctgggccaaagagtcctgatgg

SEQ ID NO: 94211 - DNA, 25 bp, Canis familiaris
gcccggtgagaaagggactatcagt

SEQ ID NO: 94212 - DNA, 25 bp, Canis familiaris
gcaccagttgacccggtcgattagt

SEQ ID NO: 94213 - DNA, 25 bp, Canis familiaris
gctctttctctcccggtgggaaata

SEQ ID NO: 94214 - DNA, 25 bp, Canis familiaris
gccggtcctgctacgggaagaagta

SEQ ID NO: 94215 - DNA, 25 bp, Canis familiaris
tgagtcgtcgtggaccggtcaaagt

SEQ ID NO: 94216 - DNA, 25 bp, Canis familiaris
gcttcgggttcatctggttggagct

SEQ ID NO: 94217 - DNA, 25 bp, Canis familiaris
gcccgtcgctactaccgattggatg

SEQ ID NO: 94218 - DNA, 25 bp, Canis familiaris
gcccgatgcagtactcaatcccggg

SEQ ID NO: 94219 - DNA, 25 bp, Canis familiaris
gccggtgcaggagaacttcgacgtg

SEQ ID NO: 94220 - DNA, 25 bp, Canis familiaris
gcccagtacagtaaactttccagtg

SEQ ID NO: 94221 - DNA, 25 bp, Canis familiaris
gcccgtagcagagaactaatcgagc

SEQ ID NO: 94222 - DNA, 25 bp, Canis familiaris
gctccagtccaagaaagacgggccc

SEQ ID NO: 94223 - DNA, 25 bp, Canis familiaris
gcccattgaccagataaatagaact

SEQ ID NO: 94224 - DNA, 25 bp, Canis familiaris
gccgcttgtccagatgggtgagacc

SEQ ID NO: 94225 - DNA, 25 bp, Canis familiaris
gccgcaggtccagacctgctggaaa

SEQ ID NO: 94226 - DNA, 25 bp, Canis familiaris
gccgaagtgcgagcacctggagagc

SEQ ID NO: 94227 - DNA, 25 bp, Canis familiaris
gccgaaggacaggcaccttgcagag

SEQ ID NO: 94228 - DNA, 25 bp, Canis familiaris
gccgcaacgacaagtcctactggct

SEQ ID NO: 94229 - DNA, 25 bp, Canis familiaris
gccggacgcataagtacaatcacag

SEQ ID NO: 94230 - DNA, 25 bp, Canis familiaris
gccctgaccttatttgacaaagttc

SEQ ID NO: 94231 - DNA, 25 bp, Canis familiaris
gccctgccaattaatgttaaagaat

SEQ ID NO: 94232 - DNA, 25 bp, Canis familiaris
gcctggccatagttagaaagaaaga

SEQ ID NO: 94233 - DNA, 25 bp, Canis familiaris
gcctggccacggaacaagtgcaagc

SEQ ID NO: 94234 - DNA, 25 bp, Canis familiaris
gccgtcctggcaaacagcagtgacc

SEQ ID NO: 94235 - DNA, 25 bp, Canis familiaris
gccggcgcggaaatccgcagacgca

SEQ ID NO: 94236 - DNA, 25 bp, Canis familiaris
gccggtggggagagcgagaccatgg

SEQ ID NO: 94237 - DNA, 25 bp, Canis familiaris
gccggcggggacaagaaggtcatcg

SEQ ID NO: 94238 - DNA, 25 bp, Canis familiaris
gccggcgataggcagagagtgttct

SEQ ID NO: 94239 - DNA, 25 bp, Canis familiaris
gccgcgctatgcggccaagcagttc

SEQ ID NO: 94240 - DNA, 25 bp, Canis familiaris
gccgagcatgctgccaaacagaagc

SEQ ID NO: 94241 - DNA, 25 bp, Canis familiaris
gccgatgctgctagtgttaagtggg

SEQ ID NO: 94242 - DNA, 25 bp, Canis familiaris
gccgacatgctcatggtgaagccgg

SEQ ID NO: 94243 - DNA, 25 bp, Canis familiaris
gccgcagcctcggtgaacagtcggc

SEQ ID NO: 94244 - DNA, 25 bp, Canis familiaris
gccgacccggctgtgagatggcagc

SEQ ID NO: 94245 - DNA, 25 bp, Canis familiaris
gccgaccagcagacacttggaactc

SEQ ID NO: 94246 - DNA, 25 bp, Canis familiaris
gccgaccagcatcagcaggagtacc

SEQ ID NO: 94247 - DNA, 25 bp, Canis familiaris
gcctggccaacatggtgaaaccccg

SEQ ID NO: 94248 - DNA, 25 bp, Canis familiaris
gcctggccgccatggagaagaagac

SEQ ID NO: 94249 - DNA, 25 bp, Canis familiaris
gccgtctgccctgggaaaggaacca

SEQ ID NO: 94250 - DNA, 25 bp, Canis familiaris
gccgacgccgccggaaagcgtgcca

SEQ ID NO: 94251 - DNA, 25 bp, Canis familiaris
gccgggcccagaggaagtggtcaac

SEQ ID NO: 94252 - DNA, 25 bp, Canis familiaris
gccgcgacccaaagtagatggtgag

SEQ ID NO: 94253 - DNA, 25 bp, Canis familiaris
gcctggcctccagtggggagttgag

SEQ ID NO: 94254 - DNA, 25 bp, Canis familiaris
gcctggccccctggggagaaggtga

SEQ ID NO: 94255 - DNA, 25 bp, Canis familiaris
gccggctccggaggatggggaggtg

SEQ ID NO: 94256 - DNA, 25 bp, Canis familiaris
gccggccctaagcaggagtgggtcg

SEQ ID NO: 94257 - DNA, 25 bp, Canis familiaris
gcccccttcaggacaggattcaggc

SEQ ID NO: 94258 - DNA, 25 bp, Canis familiaris
gcccaccttttgaagggccaggtca

SEQ ID NO: 94259 - DNA, 25 bp, Canis familiaris
gccgcatcacttacatgatagaccc

SEQ ID NO: 94260 - DNA, 25 bp, Canis familiaris
gccgctcacacaacagtgaatcctc

SEQ ID NO: 94261 - DNA, 25 bp, Canis familiaris
gccgccagcatgaagctggttcccg

SEQ ID NO: 94262 - DNA, 25 bp, Canis familiaris
gcccgcggtagttttccgcatgggc

SEQ ID NO: 94263 - DNA, 25 bp, Canis familiaris
gccccagaccaggaattcggcatgg

SEQ ID NO: 94264 - DNA, 25 bp, Canis familiaris
gcccgcagactctaagaccaacgga

SEQ ID NO: 94265 - DNA, 25 bp, Canis familiaris
gccgccgagttgtaacgaactacgt

SEQ ID NO: 94266 - DNA, 25 bp, Canis familiaris
gcccctagttgtcaccagatctggc

SEQ ID NO: 94267 - DNA, 25 bp, Canis familiaris
gcccctctgccgatggaagtcgggc

SEQ ID NO: 94268 - DNA, 25 bp, Canis familiaris
gccgccctgccaagggtttagtggc

SEQ ID NO: 94269 - DNA, 25 bp, Canis familiaris
gccgcctctgcctggcagattggaa

SEQ ID NO: 94270 - DNA, 25 bp, Canis familiaris
gccgctttgcagatcacagtgctgg

SEQ ID NO: 94271 - DNA, 25 bp, Canis familiaris
gccgtaccactggcatcgtgatgga

SEQ ID NO: 94272 - DNA, 25 bp, Canis familiaris
gccgaaagacaatcaatcaagcagt

SEQ ID NO: 94273 - DNA, 25 bp, Canis familiaris
gccgacgaactcaacaagaacatgg

SEQ ID NO: 94274 - DNA, 25 bp, Canis familiaris
gccgtcaacaatcccaagaagcagg

SEQ ID NO: 94275 - DNA, 25 bp, Canis familiaris
gccctgcttaatctatgtacagagg

SEQ ID NO: 94276 - DNA, 25 bp, Canis familiaris
gccctgctctttgtaatcctgagcc

SEQ ID NO: 94277 - DNA, 25 bp, Canis familiaris
gccgcttagactttgttactgatcc

SEQ ID NO: 94278 - DNA, 25 bp, Canis familiaris
gctacagtaactgtcctaccttgcc

SEQ ID NO: 94279 - DNA, 25 bp, Canis familiaris
gcccgttacttataattctcgcacg

SEQ ID NO: 94280 - DNA, 25 bp, Canis familiaris
tcccgttggcttttgaagttcgaca

SEQ ID NO: 94281 - DNA, 25 bp, Canis familiaris
gcccgtgttgctgcttaagttcaac

SEQ ID NO: 94282 - DNA, 25 bp, Canis familiaris
gccccttctgatagcttagagctcc

SEQ ID NO: 94283 - DNA, 25 bp, Canis familiaris
gccccactctctagctgtgtgggtc

SEQ ID NO: 94284 - DNA, 25 bp, Canis familiaris
gccccacaagctggctttggtttgc

SEQ ID NO: 94285 - DNA, 25 bp, Canis familiaris
gccgtgctcacagttgtttattttc

SEQ ID NO: 94286 - DNA, 25 bp, Canis familiaris
gccgaccgaatgctttattcttcat

SEQ ID NO: 94287 - DNA, 25 bp, Canis familiaris
gcccaccgaagacattgtactgttg

SEQ ID NO: 94288 - DNA, 25 bp, Canis familiaris
gcccctcgagaacagtctgacggag

SEQ ID NO: 94289 - DNA, 25 bp, Canis familiaris
gccctccgagaaaatcttgccgtga

SEQ ID NO: 94290 - DNA, 25 bp, Canis familiaris
gccccgctggaaaatcttgacgtaa

SEQ ID NO: 94291 - DNA, 25 bp, Canis familiaris
gccgggtggaaggcctggaagtgca

SEQ ID NO: 94292 - DNA, 25 bp, Canis familiaris
gccgggatggaaagcctgtgtgggc

SEQ ID NO: 94293 - DNA, 25 bp, Canis familiaris
gccggcgtggaatctgactgggggc

SEQ ID NO: 94294 - DNA, 25 bp, Canis familiaris
gccctggttaaacacatgtcggaca

SEQ ID NO: 94295 - DNA, 25 bp, Canis familiaris
gccctgggtaattgttcttggccaa

SEQ ID NO: 94296 - DNA, 25 bp, Canis familiaris
tcaccagggacgtgtcctttgccat

SEQ ID NO: 94297 - DNA, 25 bp, Canis familiaris
tcctcgacgacgtgtccattaatca

SEQ ID NO: 94298 - DNA, 25 bp, Canis familiaris
gccctcaactcgtagtcaactaata

SEQ ID NO: 94299 - DNA, 25 bp, Canis familiaris
gccccaatcgcgtgttaatatttcc

SEQ ID NO: 94300 - DNA, 25 bp, Canis familiaris
gccgtttctcgttgtatttattctc

SEQ ID NO: 94301 - DNA, 25 bp, Canis familiaris
gccgtttctttcaatatttatttct

SEQ ID NO: 94302 - DNA, 25 bp, Canis familiaris
gccgttttgttcttgctttaagtca

SEQ ID NO: 94303 - DNA, 25 bp, Canis familiaris
gccgtttattcttccttgtaagaat

SEQ ID NO: 94304 - DNA, 25 bp, Canis familiaris
gccgtttttgcccactatgggagga

SEQ ID NO: 94305 - DNA, 25 bp, Canis familiaris
gccgggttgagtgcacaagggggat

SEQ ID NO: 94306 - DNA, 25 bp, Canis familiaris
gccggcgtggaagacagcagccagg

SEQ ID NO: 94307 - DNA, 25 bp, Canis familiaris
gccggttgtgttaacagagcaagtt

SEQ ID NO: 94308 - DNA, 25 bp, Canis familiaris
gccgctttctgtcatataaggaatt

SEQ ID NO: 94309 - DNA, 25 bp, Canis familiaris
gccccttctttaaaaatgtatctca

SEQ ID NO: 94310 - DNA, 25 bp, Canis familiaris
gcccctgttcttggtaaatgcgtaa

SEQ ID NO: 94311 - DNA, 25 bp, Canis familiaris
gcccctttccaagaactgcagatag

SEQ ID NO: 94312 - DNA, 25 bp, Canis familiaris
gccccatgtccatggtacctggaag

SEQ ID NO: 94313 - DNA, 25 bp, Canis familiaris
gccccagtcctgtggatcctgctgt

SEQ ID NO: 94314 - DNA, 25 bp, Canis familiaris
gcccgcgatgcagcactggaacgcg

SEQ ID NO: 94315 - DNA, 25 bp, Canis familiaris
gcccgctgtggggcttaatcctggg

SEQ ID NO: 94316 - DNA, 25 bp, Canis familiaris
gccctgctggggcttctaactaggg

SEQ ID NO: 94317 - DNA, 25 bp, Canis familiaris
gctcctgtggggcttctaaagataa

SEQ ID NO: 94318 - DNA, 25 bp, Canis familiaris
gccctaggggctctaaaaactcact

SEQ ID NO: 94319 - DNA, 25 bp, Canis familiaris
gccctagaggggctcagaaaggaca

SEQ ID NO: 94320 - DNA, 25 bp, Canis familiaris
gccctgaaggtccagctggtaacga

SEQ ID NO: 94321 - DNA, 25 bp, Canis familiaris
gccccataggtccaggatgtggtgg

SEQ ID NO: 94322 - DNA, 25 bp, Canis familiaris
gccgccacagatgcagattttcgtg

SEQ ID NO: 94323 - DNA, 25 bp, Canis familiaris
gccgcctagaacaatctcttcaagg

SEQ ID NO: 94324 - DNA, 25 bp, Canis familiaris
gccgcctggagaaacctgccaagta

SEQ ID NO: 94325 - DNA, 25 bp, Canis familiaris
gccgagctggagaagctccgcagca

SEQ ID NO: 94326 - DNA, 25 bp, Canis familiaris
gccgtgctggagacccattggacgg

SEQ ID NO: 94327 - DNA, 25 bp, Canis familiaris
gccgctgctgggagagatcccctgg

SEQ ID NO: 94328 - DNA, 25 bp, Canis familiaris
gccgcgcgggaggagtccgcgatgg

SEQ ID NO: 94329 - DNA, 25 bp, Canis familiaris
gccccatgggcacatgtagccaggg

SEQ ID NO: 94330 - DNA, 25 bp, Canis familiaris
gccgtcgtcatgatcatctaccggg

SEQ ID NO: 94331 - DNA, 25 bp, Canis familiaris
gccgtactataattctcgcacgagg

SEQ ID NO: 94332 - DNA, 25 bp, Canis familiaris
gccgtacatgaaaattgcccttgca

SEQ ID NO: 94333 - DNA, 25 bp, Canis familiaris
gccgttcatgaaagactccacactg

SEQ ID NO: 94334 - DNA, 25 bp, Canis familiaris
gccgattccaaaggctcatgccagc

SEQ ID NO: 94335 - DNA, 25 bp, Canis familiaris
gccgatctgcacaacaggggcgagc

SEQ ID NO: 94336 - DNA, 25 bp, Canis familiaris
gccgagccaagaggtgagggtgcac

SEQ ID NO: 94337 - DNA, 25 bp, Canis familiaris
gccggtcaggaggaagctggtgccc

SEQ ID NO: 94338 - DNA, 25 bp, Canis familiaris
gccggggaggacaagtggtccctga

SEQ ID NO: 94339 - DNA, 25 bp, Canis familiaris
gccggggaagaggagagggcgccgg

SEQ ID NO: 94340 - DNA, 25 bp, Canis familiaris
gccggtgaaaatggagaacagccca

SEQ ID NO: 94341 - DNA, 25 bp, Canis familiaris
gccgaggagaaagtgatcaacagca

SEQ ID NO: 94342 - DNA, 25 bp, Canis familiaris
gccggggaggtggagcatgagcgca

SEQ ID NO: 94343 - DNA, 25 bp, Canis familiaris
gccgtggtgaagaagcatgaggcca

SEQ ID NO: 94344 - DNA, 25 bp, Canis familiaris
gccgggaggcataatctgggccaca

SEQ ID NO: 94345 - DNA, 25 bp, Canis familiaris
gccgagacagtgctgagctgggccc

SEQ ID NO: 94346 - DNA, 25 bp, Canis familiaris
gccggattgcggaagtggatgccac

SEQ ID NO: 94347 - DNA, 25 bp, Canis familiaris
gccggaagctggcatatcggccacc

SEQ ID NO: 94348 - DNA, 25 bp, Canis familiaris
gccgctatgactgggtgagggccct

SEQ ID NO: 94349 - DNA, 25 bp, Canis familiaris
gccgctcagtatggggtcggtcatc

SEQ ID NO: 94350 - DNA, 25 bp, Canis familiaris
gccccagatcggggatcgctgaagc

SEQ ID NO: 94351 - DNA, 25 bp, Canis familiaris
gccgccacatcggggatttctggct

SEQ ID NO: 94352 - DNA, 25 bp, Canis familiaris
gccctctgcctggagaatttctcct

SEQ ID NO: 94353 - DNA, 25 bp, Canis familiaris
gcgagtcgccttgtgaaatgcctct

SEQ ID NO: 94354 - DNA, 25 bp, Canis familiaris
gcgtcatctgctcttggaaacgcct

SEQ ID NO: 94355 - DNA, 25 bp, Canis familiaris
gcccttgcgatcatggaaaatgcca

SEQ ID NO: 94356 - DNA, 25 bp, Canis familiaris
gccgcattgctgcccagaagaagat

SEQ ID NO: 94357 - DNA, 25 bp, Canis familiaris
gcgcctcggggcaaagaagatccct

SEQ ID NO: 94358 - DNA, 25 bp, Canis familiaris
gccccaaggagcaaaggaacaaaag

SEQ ID NO: 94359 - DNA, 25 bp, Canis familiaris
gcccggagggcaaggacgacaagaa

SEQ ID NO: 94360 - DNA, 25 bp, Canis familiaris
gccccaggggaagtgggacaggaca

SEQ ID NO: 94361 - DNA, 25 bp, Canis familiaris
gccgccggggaagaggagagggcgc

SEQ ID NO: 94362 - DNA, 25 bp, Canis familiaris
gccccggggagcactgcgggaatgc

SEQ ID NO: 94363 - DNA, 25 bp, Canis familiaris
gccgcccggaagccaaggcggcacc

SEQ ID NO: 94364 - DNA, 25 bp, Canis familiaris
gccgctcccgagcgcagacgggagc

SEQ ID NO: 94365 - DNA, 25 bp, Canis familiaris
gccgtccctgagcaaaaatgggcat

SEQ ID NO: 94366 - DNA, 25 bp, Canis familiaris
gccgtctcctaccagacaaaggtca

SEQ ID NO: 94367 - DNA, 25 bp, Canis familiaris
gctcttgtcctgaggaataacctaa

SEQ ID NO: 94368 - DNA, 25 bp, Canis familiaris
gcccttccagggaaaagacccagag

SEQ ID NO: 94369 - DNA, 25 bp, Canis familiaris
gcccttgtcgggaaactaacgcgag

SEQ ID NO: 94370 - DNA, 25 bp, Canis familiaris
gcccttttgtggaagaatttagaag

SEQ ID NO: 94371 - DNA, 25 bp, Canis familiaris
gctccttaagttaagtattttgtca

SEQ ID NO: 94372 - DNA, 25 bp, Canis familiaris
gctccttcaggtcaaagacgtcttc

SEQ ID NO: 94373 - DNA, 25 bp, Canis familiaris
gcccttcgagtttgttatggtttct

SEQ ID NO: 94374 - DNA, 25 bp, Canis familiaris
gccgtttgtgtttgtaagctgtcat

SEQ ID NO: 94375 - DNA, 25 bp, Canis familiaris
gccgtgcttggcatatgtggtcttc

SEQ ID NO: 94376 - DNA, 25 bp, Canis familiaris
gcccatcgtggttgtgtggattgtc

SEQ ID NO: 94377 - DNA, 25 bp, Canis familiaris
gccccatgtgtgtcatggcggtcgc

SEQ ID NO: 94378 - DNA, 25 bp, Canis familiaris
gccccagcatggtacgagtgctgcc

SEQ ID NO: 94379 - DNA, 25 bp, Canis familiaris
gccgccagcatggatgtgcggggcg

SEQ ID NO: 94380 - DNA, 25 bp, Canis familiaris
gccgcacatcatcagcgcgcaagag

SEQ ID NO: 94381 - DNA, 25 bp, Canis familiaris
gccgcacactatgagcaacatgcag

SEQ ID NO: 94382 - DNA, 25 bp, Canis familiaris
gccgacacttgcccaagatctgatc

SEQ ID NO: 94383 - DNA, 25 bp, Canis familiaris
gccgatactgctcacaattcatctc

SEQ ID NO: 94384 - DNA, 25 bp, Canis familiaris
gcgctaacgcgtgcacatgagcacc

SEQ ID NO: 94385 - DNA, 25 bp, Canis familiaris
gccctacagcgtgacggacttggtg

SEQ ID NO: 94386 - DNA, 25 bp, Canis familiaris
gccctggagctgggcactggacatt

SEQ ID NO: 94387 - DNA, 25 bp, Canis familiaris
gccgctgggctgggctgagtaaagg

SEQ ID NO: 94388 - DNA, 25 bp, Canis familiaris
gccgtgatgtctgtgtctgtgactg

SEQ ID NO: 94389 - DNA, 25 bp, Canis familiaris
gccgttttgctgttcgtgacatgag

SEQ ID NO: 94390 - DNA, 25 bp, Canis familiaris
gccgcagtttgtctgagctgaagga

SEQ ID NO: 94391 - DNA, 25 bp, Canis familiaris
gccgcgttggtgggaggaggccagc

SEQ ID NO: 94392 - DNA, 25 bp, Canis familiaris
gccgggctgctgaggagcggaggag

SEQ ID NO: 94393 - DNA, 25 bp, Canis familiaris
gccgggcgctggttcagcgagagac

SEQ ID NO: 94394 - DNA, 25 bp, Canis familiaris
gccgagacctggctgcagagaaccc

SEQ ID NO: 94395 - DNA, 25 bp, Canis familiaris
gccgaccctagccatgatatgattc

SEQ ID NO: 94396 - DNA, 25 bp, Canis familiaris
gccgggcgcttcatagtgtgtgccc

SEQ ID NO: 94397 - DNA, 25 bp, Canis familiaris
gccgaggccaacgaggtgctgggcc

SEQ ID NO: 94398 - DNA, 25 bp, Canis familiaris
gccgaggcgtcacaggtgatggcgg

SEQ ID NO: 94399 - DNA, 25 bp, Canis familiaris
gcccgtgcgatctgaagagggccgg

SEQ ID NO: 94400 - DNA, 25 bp, Canis familiaris
gccgttgcgatctgaagaggccgga

SEQ ID NO: 94401 - DNA, 25 bp, Canis familiaris
gccgttcacatgtagacgtggccgc

SEQ ID NO: 94402 - DNA, 25 bp, Canis familiaris
gccgttgcagcataactagttcctt

SEQ ID NO: 94403 - DNA, 25 bp, Canis familiaris
gccgggcgctcaagagcgagttcct

SEQ ID NO: 94404 - DNA, 25 bp, Canis familiaris
gccgcgcgcctcaagaggatggtgc

SEQ ID NO: 94405 - DNA, 25 bp, Canis familiaris
gccgcgaggctcgaggaggagctgc

SEQ ID NO: 94406 - DNA, 25 bp, Canis familiaris
gccgcagggctgggtggtgagcagc

SEQ ID NO: 94407 - DNA, 25 bp, Canis familiaris
gccgcgactgtctggggagacagga

SEQ ID NO: 94408 - DNA, 25 bp, Canis familiaris
gccgtgtgtgcctggggagggcaag

SEQ ID NO: 94409 - DNA, 25 bp, Canis familiaris
gccctcatgtcctggaaagggcaac

SEQ ID NO: 94410 - DNA, 25 bp, Canis familiaris
gcccctaaaagaagaagctctgcaa

SEQ ID NO: 94411 - DNA, 25 bp, Canis familiaris
gccccaaacaatctcaagtgctgct

SEQ ID NO: 94412 - DNA, 25 bp, Canis familiaris
gccccagcaattcaccaatgtggtg

SEQ ID NO: 94413 - DNA, 25 bp, Canis familiaris
gccccaggaccagccaagtggggag

SEQ ID NO: 94414 - DNA, 25 bp, Canis familiaris
gccccaagagtcccacaagggcggc

SEQ ID NO: 94415 - DNA, 25 bp, Canis familiaris
gccccgaggacccagatctggggtg

SEQ ID NO: 94416 - DNA, 25 bp, Canis familiaris
gccccatgagtcccaggggtggttg

SEQ ID NO: 94417 - DNA, 25 bp, Canis familiaris
gccccacggtccagggagagttgct

SEQ ID NO: 94418 - DNA, 25 bp, Canis familiaris
gcccccgcgtaattggtgggtgctc

SEQ ID NO: 94419 - DNA, 25 bp, Canis familiaris
gcccgttgctctaagtggtttggat

SEQ ID NO: 94420 - DNA, 25 bp, Canis familiaris
gccgacaagccaacgtggttctgga

SEQ ID NO: 94421 - DNA, 25 bp, Canis familiaris
gccccacaggcaacataggttgatg

SEQ ID NO: 94422 - DNA, 25 bp, Canis familiaris
gccccaagttctcagagtctgatta

SEQ ID NO: 94423 - DNA, 25 bp, Canis familiaris
gccgccagaatgagggaggatagtc

SEQ ID NO: 94424 - DNA, 25 bp, Canis familiaris
gcccggaaatttcgcagtatcggca

SEQ ID NO: 94425 - DNA, 25 bp, Canis familiaris
gccctggcaaccactggtgccagga

SEQ ID NO: 94426 - DNA, 25 bp, Canis familiaris
gcccgaacacctgaggtcacatgtg

SEQ ID NO: 94427 - DNA, 25 bp, Canis familiaris
gccgcttacatgtctgaagttactt

SEQ ID NO: 94428 - DNA, 25 bp, Canis familiaris
gcccgtcaatgcccaggcattacgt

SEQ ID NO: 94429 - DNA, 25 bp, Canis familiaris
gcccctcaggcgagcctcgaggggt

SEQ ID NO: 94430 - DNA, 25 bp, Canis familiaris
gccccttgggtgtccttagatgggt

SEQ ID NO: 94431 - DNA, 25 bp, Canis familiaris
gctaccaagcgggaccccaatttgt

SEQ ID NO: 94432 - DNA, 25 bp, Canis familiaris
gcaaaaatgggcatccacccaaggt

SEQ ID NO: 94433 - DNA, 25 bp, Canis familiaris
gccgaaaaggtggcccaccagaggt

SEQ ID NO: 94434 - DNA, 25 bp, Canis familiaris
gctgaattgtcagcttcccacgaga

SEQ ID NO: 94435 - DNA, 25 bp, Canis familiaris
gcgaatactctggcaatgcctacgg

SEQ ID NO: 94436 - DNA, 25 bp, Canis familiaris
gcgaataaattcatactgccgggac

SEQ ID NO: 94437 - DNA, 25 bp, Canis familiaris
gccgacaatactctggtggcggtga

SEQ ID NO: 94438 - DNA, 25 bp, Canis familiaris
gccgacagcaacagtggtcctggac

SEQ ID NO: 94439 - DNA, 25 bp, Canis familiaris
gccgacagcaaacgtggttcctgga

SEQ ID NO: 94440 - DNA, 25 bp, Canis familiaris
gccgaggacatcatgcggcttcggg

SEQ ID NO: 94441 - DNA, 25 bp, Canis familiaris
gccgacagaacttggacctggtggt

SEQ ID NO: 94442 - DNA, 25 bp, Canis familiaris
gccctagggcttggactatggttcg

SEQ ID NO: 94443 - DNA, 25 bp, Canis familiaris
gcccatcgagatctagcctagtttt

SEQ ID NO: 94444 - DNA, 25 bp, Canis familiaris
gccccaatgaccaatacaagtttct

SEQ ID NO: 94445 - DNA, 25 bp, Canis familiaris
gccccctccaccaaggagaattgct

SEQ ID NO: 94446 - DNA, 25 bp, Canis familiaris
gccccacttcccaatagctattgga

SEQ ID NO: 94447 - DNA, 25 bp, Canis familiaris
gccccaatcccattcaacacattgg

SEQ ID NO: 94448 - DNA, 25 bp, Canis familiaris
gcccctactccctgaacattggggg

SEQ ID NO: 94449 - DNA, 25 bp, Canis familiaris
gcccctggccttgaaaattgctggg

SEQ ID NO: 94450 - DNA, 25 bp, Canis familiaris
gccccgatgcctgggaaggtcatag

SEQ ID NO: 94451 - DNA, 25 bp, Canis familiaris
gcccctaggcaaaacagcagagtag

SEQ ID NO: 94452 - DNA, 25 bp, Canis familiaris
gcccctggggatgtcacagttgggt

SEQ ID NO: 94453 - DNA, 25 bp, Canis familiaris
gccccggtggtgttacaggagtggg

SEQ ID NO: 94454 - DNA, 25 bp, Canis familiaris
gccccacgacgtctacggaatgtgg

SEQ ID NO: 94455 - DNA, 25 bp, Canis familiaris
gcccgaagacggctgtcagggggac

SEQ ID NO: 94456 - DNA, 25 bp, Canis familiaris
gcccgaagccctctggcagaggact

SEQ ID NO: 94457 - DNA, 25 bp, Canis familiaris
gccccagaggaacctgcgaaggact

SEQ ID NO: 94458 - DNA, 25 bp, Canis familiaris
gccctagaaagtcctccttggcagc

SEQ ID NO: 94459 - DNA, 25 bp, Canis familiaris
gcccgaaagtggcctttaagcacca

SEQ ID NO: 94460 - DNA, 25 bp, Canis familiaris
gccccaacgtgtaccacgagaacga

SEQ ID NO: 94461 - DNA, 25 bp, Canis familiaris
gccccacacttctcaaaggagactc

SEQ ID NO: 94462 - DNA, 25 bp, Canis familiaris
gccccaactttctacacgaaggctc

SEQ ID NO: 94463 - DNA, 25 bp, Canis familiaris
gccgcagaactttcttcacgaagcg

SEQ ID NO: 94464 - DNA, 25 bp, Canis familiaris
gcccgaatctacgtgtccaatgacg

SEQ ID NO: 94465 - DNA, 25 bp, Canis familiaris
gccccaggtagagtgtgccagaagc

SEQ ID NO: 94466 - DNA, 25 bp, Canis familiaris
gccccttgttggctgctcagaatgc

SEQ ID NO: 94467 - DNA, 25 bp, Canis familiaris
gcccccatggtgtctagatgagtat

SEQ ID NO: 94468 - DNA, 25 bp, Canis familiaris
gccctcctggtactaatagcaatcc

SEQ ID NO: 94469 - DNA, 25 bp, Canis familiaris
gccccaccctagaagaactatcatc

SEQ ID NO: 94470 - DNA, 25 bp, Canis familiaris
gcccccgacaaactaatgattctca

SEQ ID NO: 94471 - DNA, 25 bp, Canis familiaris
gccgcctcacaaacagttaatcctc

SEQ ID NO: 94472 - DNA, 25 bp, Canis familiaris
gcccctccaaaggtctgataactcc

SEQ ID NO: 94473 - DNA, 25 bp, Canis familiaris
gcccccaaggagctcagaaactacc

SEQ ID NO: 94474 - DNA, 25 bp, Canis familiaris
gcccccaccgaataacaactaggca

SEQ ID NO: 94475 - DNA, 25 bp, Canis familiaris
gcccccagccggagaaagatgcgag

SEQ ID NO: 94476 - DNA, 25 bp, Canis familiaris
gcccctcacgggagagacaggtggg

SEQ ID NO: 94477 - DNA, 25 bp, Canis familiaris
gccgccctggggaatgaagggatcg

SEQ ID NO: 94478 - DNA, 25 bp, Canis familiaris
gcggcggtgggtaattagaggtcga

SEQ ID NO: 94479 - DNA, 25 bp, Canis familiaris
gctggcggtttgaaataaaggtctg

SEQ ID NO: 94480 - DNA, 25 bp, Canis familiaris
gctccagacttcgatacttaaggtt

SEQ ID NO: 94481 - DNA, 25 bp, Canis familiaris
gcccagattgattctaaattaggtc

SEQ ID NO: 94482 - DNA, 25 bp, Canis familiaris
gccccactgtataacaactaggcac

SEQ ID NO: 94483 - DNA, 25 bp, Canis familiaris
gccccagctggtgaaagatagccgg

SEQ ID NO: 94484 - DNA, 25 bp, Canis familiaris
gccccacgggtacattagccagggt

SEQ ID NO: 94485 - DNA, 25 bp, Canis familiaris
gccccaaggtgtgtgtggaccatgg

SEQ ID NO: 94486 - DNA, 25 bp, Canis familiaris
gccccacaatgttcctgagtgacct

SEQ ID NO: 94487 - DNA, 25 bp, Canis familiaris
gcgcccagtacttcctggacaagat

SEQ ID NO: 94488 - DNA, 25 bp, Canis familiaris
gccccagtctcttggtcgagaaatg

SEQ ID NO: 94489 - DNA, 25 bp, Canis familiaris
gccccgatctcaactgttgtcaaat

SEQ ID NO: 94490 - DNA, 25 bp, Canis familiaris
gccccaattcacttctcttaagatt

SEQ ID NO: 94491 - DNA, 25 bp, Canis familiaris
gccccaatcaacttccttggtgaag

SEQ ID NO: 94492 - DNA, 25 bp, Canis familiaris
gccccaagggtgaccgtggtgagac

SEQ ID NO: 94493 - DNA, 25 bp, Canis familiaris
gcccccagggtagctctgatgggac

SEQ ID NO: 94494 - DNA, 25 bp, Canis familiaris
gccccgaaggatggcctctgatggg

SEQ ID NO: 94495 - DNA, 25 bp, Canis familiaris
gccgcctgaaggtgccggagagcaa

SEQ ID NO: 94496 - DNA, 25 bp, Canis familiaris
gcccttggaggttcactgggaccaa

SEQ ID NO: 94497 - DNA, 25 bp, Canis familiaris
gcccgaggacacagagctgggacct

SEQ ID NO: 94498 - DNA, 25 bp, Canis familiaris
gccccagggccaggactggaggaat

SEQ ID NO: 94499 - DNA, 25 bp, Canis familiaris
gccccatgacccgtcagagggaaag

SEQ ID NO: 94500 - DNA, 25 bp, Canis familiaris
gccccagagcctgtcggggaagtca

SEQ ID NO: 94501 - DNA, 25 bp, Canis familiaris
gcccctggcagtgtcgggggagtga

SEQ ID NO: 94502 - DNA, 25 bp, Canis familiaris
gccccgggctccaggggatgaggag

SEQ ID NO: 94503 - DNA, 25 bp, Canis familiaris
gccctggcttttaggggcactatgg

SEQ ID NO: 94504 - DNA, 25 bp, Canis familiaris
gaccgtgctttctggtaggtttggc

SEQ ID NO: 94505 - DNA, 25 bp, Canis familiaris
gcccgtttgtgctggggttgttggc

SEQ ID NO: 94506 - DNA, 25 bp, Canis familiaris
gccctttgtctgtgtgggtgttgct

SEQ ID NO: 94507 - DNA, 25 bp, Canis familiaris
gccgccttccaaggaggctggtttc

SEQ ID NO: 94508 - DNA, 25 bp, Canis familiaris
gccccattggaacatgtttgctttc

SEQ ID NO: 94509 - DNA, 25 bp, Canis familiaris
gcccgttgtgggtcatgttatgcct

SEQ ID NO: 94510 - DNA, 25 bp, Canis familiaris
gccgagggtgcaagacactttgctc

SEQ ID NO: 94511 - DNA, 25 bp, Canis familiaris
gctcgggggaaaacattttgtggat

SEQ ID NO: 94512 - DNA, 25 bp, Canis familiaris
gatcgggggggataaatggtcgttg

SEQ ID NO: 94513 - DNA, 25 bp, Canis familiaris
gctcgttgggggtgaacttgtcgtt

SEQ ID NO: 94514 - DNA, 25 bp, Canis familiaris
gctcgttgggggtgaacttgtcgtt

SEQ ID NO: 94515 - DNA, 25 bp, Canis familiaris
gctcgttgggggtgaacttgtcgtt

SEQ ID NO: 94516 - DNA, 25 bp, Canis familiaris
gccgtattgggccacaagacatggt

SEQ ID NO: 94517 - DNA, 25 bp, Canis familiaris
gccgcttcggtgacaaacacagaga

SEQ ID NO: 94518 - DNA, 25 bp, Canis familiaris
gccctggtgaggacaaccctaagtg

SEQ ID NO: 94519 - DNA, 25 bp, Canis familiaris
gcccggtgagtggagaccctttggg

SEQ ID NO: 94520 - DNA, 25 bp, Canis familiaris
gccccaggaggggactgccttgggg

SEQ ID NO: 94521 - DNA, 25 bp, Canis familiaris
gccccgaagggtacatgactcctgg

SEQ ID NO: 94522 - DNA, 25 bp, Canis familiaris
gccccgtaggtgggatgaggccgcg

SEQ ID NO: 94523 - DNA, 25 bp, Canis familiaris
gccccagaaggtcgtttggcacggc

SEQ ID NO: 94524 - DNA, 25 bp, Canis familiaris
gcccctgaagcttggcttttacagg

SEQ ID NO: 94525 - DNA, 25 bp, Canis familiaris
gcccctggagcctgtaaatcaagta

SEQ ID NO: 94526 - DNA, 25 bp, Canis familiaris
gccccaggaccttgtgatgttcctg

SEQ ID NO: 94527 - DNA, 25 bp, Canis familiaris
gccccaggacacagagactttatca

SEQ ID NO: 94528 - DNA, 25 bp, Canis familiaris
gccgaaggaagacagagctatttaa

SEQ ID NO: 94529 - DNA, 25 bp, Canis familiaris
gccgcacacgaagacatgactgatg

SEQ ID NO: 94530 - DNA, 25 bp, Canis familiaris
gccccctaaacattgactaccttag

SEQ ID NO: 94531 - DNA, 25 bp, Canis familiaris
gccccagctagagcttagctaccag

SEQ ID NO: 94532 - DNA, 25 bp, Canis familiaris
gcccgagccagagttgtagccaagg

SEQ ID NO: 94533 - DNA, 25 bp, Canis familiaris
gccctagccagagatgaagcagcca

SEQ ID NO: 94534 - DNA, 25 bp, Canis familiaris
gccgcaaccaactagagggctgctt

SEQ ID NO: 94535 - DNA, 25 bp, Canis familiaris
gcccaaatagtctggggcagctgtt

SEQ ID NO: 94536 - DNA, 25 bp, Canis familiaris
gccgcacactgaccaagggcgaggt

SEQ ID NO: 94537 - DNA, 25 bp, Canis familiaris
gcccacacgacgaggccaagtttga

SEQ ID NO: 94538 - DNA, 25 bp, Canis familiaris
gccccacaacttgggctttgttgga

SEQ ID NO: 94539 - DNA, 25 bp, Canis familiaris
gccctgtcactcaggtctttgttgg

SEQ ID NO: 94540 - DNA, 25 bp, Canis familiaris
gccctggcacaaaaactgtttccgg

SEQ ID NO: 94541 - DNA, 25 bp, Canis familiaris
gcccatggcaaaaaacctgttcagt

SEQ ID NO: 94542 - DNA, 25 bp, Canis familiaris
gctggccaaacagcataccttccgt

SEQ ID NO: 94543 - DNA, 25 bp, Canis familiaris
gaccccaaagtctgttgtccagtta

SEQ ID NO: 94544 - DNA, 25 bp, Canis familiaris
gccccgcaaagttgggctgttcctt

SEQ ID NO: 94545 - DNA, 25 bp, Canis familiaris
gcccggcacacaattggtgccctca

SEQ ID NO: 94546 - DNA, 25 bp, Canis familiaris
gccccgtaatttggtgccatcaagt

SEQ ID NO: 94547 - DNA, 25 bp, Canis familiaris
gcccctttaattgtgtctcatcagc

SEQ ID NO: 94548 - DNA, 25 bp, Canis familiaris
gccgcctgtaaagtggctttcacaa

SEQ ID NO: 94549 - DNA, 25 bp, Canis familiaris
gccgcctgagaaactgtcttcaaca

SEQ ID NO: 94550 - DNA, 25 bp, Canis familiaris
gccctgtgaaaagcctgtcaaacct

SEQ ID NO: 94551 - DNA, 25 bp, Canis familiaris
gccgcttacccatgccatgtataac

SEQ ID NO: 94552 - DNA, 25 bp, Canis familiaris
gccgctgctggtgaaggacttcaac

SEQ ID NO: 94553 - DNA, 25 bp, Canis familiaris
gccgctgtcgctgtcagagaatgcc

SEQ ID NO: 94554 - DNA, 25 bp, Canis familiaris
gccgctgacgatgtcgcagctggag

SEQ ID NO: 94555 - DNA, 25 bp, Canis familiaris
gccgcgggaagtggctctggatgag

SEQ ID NO: 94556 - DNA, 25 bp, Canis familiaris
gcccggaagcttgccatgagtgtgt

SEQ ID NO: 94557 - DNA, 25 bp, Canis familiaris
gccccggacaaatatcgcatgatga

SEQ ID NO: 94558 - DNA, 25 bp, Canis familiaris
gcccctgctacttagttggtagagc

SEQ ID NO: 94559 - DNA, 25 bp, Canis familiaris
gccgccctgttgtagcgggatctgc

SEQ ID NO: 94560 - DNA, 25 bp, Canis familiaris
gctccatgcctgttaacgtggttca

SEQ ID NO: 94561 - DNA, 25 bp, Canis familiaris
gccctgtcagaaagagtgtggtctc

SEQ ID NO: 94562 - DNA, 25 bp, Canis familiaris
gccccatctagatgcagtctgcttc

SEQ ID NO: 94563 - DNA, 25 bp, Canis familiaris
gccccatctagatgcagtctgcttc

SEQ ID NO: 94564 - DNA, 25 bp, Canis familiaris
gccccatctagatgcagtctgcttc

SEQ ID NO: 94565 - DNA, 25 bp, Canis familiaris
gccccatctagatgcagtctgcttc

SEQ ID NO: 94566 - DNA, 25 bp, Canis familiaris
gccccatctagatgcagtctgcttc

SEQ ID NO: 94567 - DNA, 25 bp, Canis familiaris
gcccctgccagatcatgtgagcatt

SEQ ID NO: 94568 - DNA, 25 bp, Canis familiaris
gcccctgccagatcatgtgagcatt

SEQ ID NO: 94569 - DNA, 25 bp, Canis familiaris
gcccctgccagatcatgtgagcatt

SEQ ID NO: 94570 - DNA, 25 bp, Canis familiaris
gccccatccagtcctgggatgaagc

SEQ ID NO: 94571 - DNA, 25 bp, Canis familiaris
gcccctgccgtggtgaagaagcatg

SEQ ID NO: 94572 - DNA, 25 bp, Canis familiaris
gcccgctgggtctgattgaagtggt

SEQ ID NO: 94573 - DNA, 25 bp, Canis familiaris
gcccgtggttcacagcagacagtgg

SEQ ID NO: 94574 - DNA, 25 bp, Canis familiaris
gccctggttgtacaagacttgaggg

SEQ ID NO: 94575 - DNA, 25 bp, Canis familiaris
gcccggacatgctaccaagaacaga

SEQ ID NO: 94576 - DNA, 25 bp, Canis familiaris
gcccggggctgaagaagaaagctgc

SEQ ID NO: 94577 - DNA, 25 bp, Canis familiaris
gccccctaggaagaaactgctctcc

SEQ ID NO: 94578 - DNA, 25 bp, Canis familiaris
gcccccagggaagaaacatattctg

SEQ ID NO: 94579 - DNA, 25 bp, Canis familiaris
gccctctccaggaagggaaatttct

SEQ ID NO: 94580 - DNA, 25 bp, Canis familiaris
gcccctgccaccaaaggagaatgct

SEQ ID NO: 94581 - DNA, 25 bp, Canis familiaris
gcccctgttccaagggcacacatgc

SEQ ID NO: 94582 - DNA, 25 bp, Canis familiaris
gcacgccgggccagggcaaggcgtg

SEQ ID NO: 94583 - DNA, 25 bp, Canis familiaris
gccgccgcaggacggagggaagcgg

SEQ ID NO: 94584 - DNA, 25 bp, Canis familiaris
gccgcggggaggaggggatctggat

SEQ ID NO: 94585 - DNA, 25 bp, Canis familiaris
gccctttggggagctgatgtttgag

SEQ ID NO: 94586 - DNA, 25 bp, Canis familiaris
gccgcttcttgatgagtctggttaa

SEQ ID NO: 94587 - DNA, 25 bp, Canis familiaris
gccgctgacattttgttcatgggca

SEQ ID NO: 94588 - DNA, 25 bp, Canis familiaris
gccgcatgaaccggatgtctcggca

SEQ ID NO: 94589 - DNA, 25 bp, Canis familiaris
gccgcagtacgagcagttcatgagc

SEQ ID NO: 94590 - DNA, 25 bp, Canis familiaris
gccgcaccactggtattgtcatgga

SEQ ID NO: 94591 - DNA, 25 bp, Canis familiaris
gccgcaggactacgagatggtggag

SEQ ID NO: 94592 - DNA, 25 bp, Canis familiaris
gccgcaggcgtccgaagaggaggaa

SEQ ID NO: 94593 - DNA, 25 bp, Canis familiaris
gccgcggcggctagaagagcagcgg

SEQ ID NO: 94594 - DNA, 25 bp, Canis familiaris
gccgcgaggtggcagcaacactggt

SEQ ID NO: 94595 - DNA, 25 bp, Canis familiaris
gccctgaaggtgcctcaaaggttct

SEQ ID NO: 94596 - DNA, 25 bp, Canis familiaris
gccctaagtgatttccacaggttct

SEQ ID NO: 94597 - DNA, 25 bp, Canis familiaris
gccgcctgcaggacactctagcagg

SEQ ID NO: 94598 - DNA, 25 bp, Canis familiaris
gccgcctgcgcaaggccaagaagga

SEQ ID NO: 94599 - DNA, 25 bp, Canis familiaris
gccgcctggataccgcagctaggaa

SEQ ID NO: 94600 - DNA, 25 bp, Canis familiaris
gcccctgtgactccagggacgaagt

SEQ ID NO: 94601 - DNA, 25 bp, Canis familiaris
gcccctgacctcaaggagagcgggg

SEQ ID NO: 94602 - DNA, 25 bp, Canis familiaris
gccgcctcactcgggggaggaagga

SEQ ID NO: 94603 - DNA, 25 bp, Canis familiaris
gccccacccctggaggagaagagga

SEQ ID NO: 94604 - DNA, 25 bp, Canis familiaris
gccgctgaccctgtgggagataaag

SEQ ID NO: 94605 - DNA, 25 bp, Canis familiaris
gccctgggcaccagcggcaaaaagc

SEQ ID NO: 94606 - DNA, 25 bp, Canis familiaris
gcccggcagcaacagtccaagaaag

SEQ ID NO: 94607 - DNA, 25 bp, Canis familiaris
gcccgctaccagacaatcgaggaaa

SEQ ID NO: 94608 - DNA, 25 bp, Canis familiaris
gcccggtccgtcaaatgcaagttaa

SEQ ID NO: 94609 - DNA, 25 bp, Canis familiaris
gccctgtaccctgaaaagtgaaagg

SEQ ID NO: 94610 - DNA, 25 bp, Canis familiaris
gccctgggcctggagaaacggaaag

SEQ ID NO: 94611 - DNA, 25 bp, Canis familiaris
gccctgcggcttcaagaccagaagc

SEQ ID NO: 94612 - DNA, 25 bp, Canis familiaris
gccctggacttcgagcaagagatgg

SEQ ID NO: 94613 - DNA, 25 bp, Canis familiaris
gccctggccaacgtgaacattggga

SEQ ID NO: 94614 - DNA, 25 bp, Canis familiaris
gccctgagccccaggtatgtgggac

SEQ ID NO: 94615 - DNA, 25 bp, Canis familiaris
gccgctggtctgcagggtgaggggc

SEQ ID NO: 94616 - DNA, 25 bp, Canis familiaris
gccgctggtgtgcaagcattcaggg

SEQ ID NO: 94617 - DNA, 25 bp, Canis familiaris
gccgcaggttggaatcctctgagga

SEQ ID NO: 94618 - DNA, 25 bp, Canis familiaris
gccgcaggctgtctatctggagaaa

SEQ ID NO: 94619 - DNA, 25 bp, Canis familiaris
gcccctgctgtcactcagagaaaat

SEQ ID NO: 94620 - DNA, 25 bp, Canis familiaris
gcccctcttgcaggcacaaggaaag

SEQ ID NO: 94621 - DNA, 25 bp, Canis familiaris
gcccagcttaaccacgcaggaagtg

SEQ ID NO: 94622 - DNA, 25 bp, Canis familiaris
gcgaagcgtagacgatccagtggtt

SEQ ID NO: 94623 - DNA, 25 bp, Canis familiaris
gcgaaattaagccctgagtcagact

SEQ ID NO: 94624 - DNA, 25 bp, Canis familiaris
gcgaagattcccacataccaaattc

SEQ ID NO: 94625 - DNA, 25 bp, Canis familiaris
gcccagttcccacaaaaacatctta

SEQ ID NO: 94626 - DNA, 25 bp, Canis familiaris
gcccctcctgtacatcaaaacaagt

SEQ ID NO: 94627 - DNA, 25 bp, Canis familiaris
gcccaatccttgcagagaaaacaga

SEQ ID NO: 94628 - DNA, 25 bp, Canis familiaris
gccccctgccagcagggaaaacctg

SEQ ID NO: 94629 - DNA, 25 bp, Canis familiaris
gcccccgaatctttgtataaactgt

SEQ ID NO: 94630 - DNA, 25 bp, Canis familiaris
gccgcccagaacttgagttcagaac

SEQ ID NO: 94631 - DNA, 25 bp, Canis familiaris
gccccgagaagcctgaaagccaagc

SEQ ID NO: 94632 - DNA, 25 bp, Canis familiaris
gccccaaagagccagcagaatccga

SEQ ID NO: 94633 - DNA, 25 bp, Canis familiaris
gccccaaagagccagcagaatccga

SEQ ID NO: 94634 - DNA, 25 bp, Canis familiaris
gccccacagagctgggcagattctg

SEQ ID NO: 94635 - DNA, 25 bp, Canis familiaris
gccccaaaaggaccaattcttacat

SEQ ID NO: 94636 - DNA, 25 bp, Canis familiaris
gccccataagggacacctttgtgaa

SEQ ID NO: 94637 - DNA, 25 bp, Canis familiaris
gcccgataaaggccctcttgatcta

SEQ ID NO: 94638 - DNA, 25 bp, Canis familiaris
gcccttagtagtcacctgtattgag

SEQ ID NO: 94639 - DNA, 25 bp, Canis familiaris
gcccctactatgagattatgttgga

SEQ ID NO: 94640 - DNA, 25 bp, Canis familiaris
gccccttcttgggctgtagtctggg

SEQ ID NO: 94641 - DNA, 25 bp, Canis familiaris
gcccccatttagattgcagtctgct

SEQ ID NO: 94642 - DNA, 25 bp, Canis familiaris
gccccggctttgattcagtcggaat

SEQ ID NO: 94643 - DNA, 25 bp, Canis familiaris
gccccccactgtattagtctgaggc

SEQ ID NO: 94644 - DNA, 25 bp, Canis familiaris
gcccacctgcattgttttaacgtac

SEQ ID NO: 94645 - DNA, 25 bp, Canis familiaris
gccccacgctaaattaccctgtagc

SEQ ID NO: 94646 - DNA, 25 bp, Canis familiaris
gccccagtgggaatataacctctac

SEQ ID NO: 94647 - DNA, 25 bp, Canis familiaris
gccctactgtgtatagacaccaaag

SEQ ID NO: 94648 - DNA, 25 bp, Canis familiaris
gccgctgacatgatattgacactct

SEQ ID NO: 94649 - DNA, 25 bp, Canis familiaris
gccctaatgtgttgcatagccttta

SEQ ID NO: 94650 - DNA, 25 bp, Canis familiaris
gcccactatgtgaccaaggcttccc

SEQ ID NO: 94651 - DNA, 25 bp, Canis familiaris
gcccactttcttcagggaatcctgt

SEQ ID NO: 94652 - DNA, 25 bp, Canis familiaris
gcccctattttggggggagtagatg

SEQ ID NO: 94653 - DNA, 25 bp, Canis familiaris
gcccctttccatgggcagggaggga

SEQ ID NO: 94654 - DNA, 25 bp, Canis familiaris
gccctgttccctggagccagggtgt

SEQ ID NO: 94655 - DNA, 25 bp, Canis familiaris
gcccgaagccactgcatctcgggcg

SEQ ID NO: 94656 - DNA, 25 bp, Canis familiaris
gcccgaagactctgagtcctcggct

SEQ ID NO: 94657 - DNA, 25 bp, Canis familiaris
gccctgaaagccaggcacctctggc

SEQ ID NO: 94658 - DNA, 25 bp, Canis familiaris
gccctgcagacgtttggactttagc

SEQ ID NO: 94659 - DNA, 25 bp, Canis familiaris
gctcctatggctcttgtacattttc

SEQ ID NO: 94660 - DNA, 25 bp, Canis familiaris
gcccgggcatttagtactttatcct

SEQ ID NO: 94661 - DNA, 25 bp, Canis familiaris
gcccaagagtgtattttttaccaag

SEQ ID NO: 94662 - DNA, 25 bp, Canis familiaris
gcccagatcctggtttcttaatacc

SEQ ID NO: 94663 - DNA, 25 bp, Canis familiaris
gcccgtacattgattttaagacacc

SEQ ID NO: 94664 - DNA, 25 bp, Canis familiaris
gcccgttcagtgggccttcaaggag

SEQ ID NO: 94665 - DNA, 25 bp, Canis familiaris
gctcccttcagtgaatggtccagaa

SEQ ID NO: 94666 - DNA, 25 bp, Canis familiaris
gccccctatggcgggagtcgagatc

SEQ ID NO: 94667 - DNA, 25 bp, Canis familiaris
gcccgcctgcttggaggcgacaagt

SEQ ID NO: 94668 - DNA, 25 bp, Canis familiaris
gccccgagtgctggcgggaacgtga

SEQ ID NO: 94669 - DNA, 25 bp, Canis familiaris
gccccaggtctgggccaggagggag

SEQ ID NO: 94670 - DNA, 25 bp, Canis familiaris
gccccagccctggtgctgggagggg

SEQ ID NO: 94671 - DNA, 25 bp, Canis familiaris
gccccagagcccatcatgggagctg

SEQ ID NO: 94672 - DNA, 25 bp, Canis familiaris
gcccctagctctgtgatgggtgtcc

SEQ ID NO: 94673 - DNA, 25 bp, Canis familiaris
gcccaaggcctaggaggggccgcat

SEQ ID NO: 94674 - DNA, 25 bp, Canis familiaris
gcccaagagacgggtgggctaaagc

SEQ ID NO: 94675 - DNA, 25 bp, Canis familiaris
gccccaaaggggccggagtcaagcg

SEQ ID NO: 94676 - DNA, 25 bp, Canis familiaris
gccgcgctggagcaggagatggact

SEQ ID NO: 94677 - DNA, 25 bp, Canis familiaris
gcccggtgctgccaggaaggattaa

SEQ ID NO: 94678 - DNA, 25 bp, Canis familiaris
gcccggtgcggaagagcgtcattaa

SEQ ID NO: 94679 - DNA, 25 bp, Canis familiaris
gcccggtgcaggagagacgattgtc

SEQ ID NO: 94680 - DNA, 25 bp, Canis familiaris
gccccagtcaggagagggctggccc

SEQ ID NO: 94681 - DNA, 25 bp, Canis familiaris
gccccagctccggatgagtggctgg

SEQ ID NO: 94682 - DNA, 25 bp, Canis familiaris
gcccgcatgcctggagcagcagggc

SEQ ID NO: 94683 - DNA, 25 bp, Canis familiaris
gccctgcatccttacagaggtagga

SEQ ID NO: 94684 - DNA, 25 bp, Canis familiaris
gcccctcagccaaggaactgacgtc

SEQ ID NO: 94685 - DNA, 25 bp, Canis familiaris
gcccctatgtcaaggaattcagaga

SEQ ID NO: 94686 - DNA, 25 bp, Canis familiaris
gcccctctatcacatatgatatcag

SEQ ID NO: 94687 - DNA, 25 bp, Canis familiaris
gccgcctcttgctcataatgaagac

SEQ ID NO: 94688 - DNA, 25 bp, Canis familiaris
gccctcagattcttcatactagcaa

SEQ ID NO: 94689 - DNA, 25 bp, Canis familiaris
gccctggaagctgtatctgaaatca

SEQ ID NO: 94690 - DNA, 25 bp, Canis familiaris
gcccagagcacagtagaactaatca

SEQ ID NO: 94691 - DNA, 25 bp, Canis familiaris
gcgacggctattaaagctttctaga

SEQ ID NO: 94692 - DNA, 25 bp, Canis familiaris
gctgccggttttcagtttcatggtt

SEQ ID NO: 94693 - DNA, 25 bp, Canis familiaris
gcccctgtgtttcagtgttgtagtt

SEQ ID NO: 94694 - DNA, 25 bp, Canis familiaris
gcccctgatttccacttgggtgaat

SEQ ID NO: 94695 - DNA, 25 bp, Canis familiaris
gccccttgctttactcatggggccc

SEQ ID NO: 94696 - DNA, 25 bp, Canis familiaris
gcccctttttaaactctgcgctggc

SEQ ID NO: 94697 - DNA, 25 bp, Canis familiaris
gcccctgaaactaaaaggcgttgca

SEQ ID NO: 94698 - DNA, 25 bp, Canis familiaris
gccccggagaactcagagcacttta

SEQ ID NO: 94699 - DNA, 25 bp, Canis familiaris
gcccctgggcaagagaggactgttg

SEQ ID NO: 94700 - DNA, 25 bp, Canis familiaris
gccctcgggccacagggaaggagcc

SEQ ID NO: 94701 - DNA, 25 bp, Canis familiaris
gccccgaagggccagggagggactg

SEQ ID NO: 94702 - DNA, 25 bp, Canis familiaris
gcccgggaggactagtggggacctg

SEQ ID NO: 94703 - DNA, 25 bp, Canis familiaris
gccctgggggtaggtgtgcgcgggc

SEQ ID NO: 94704 - DNA, 25 bp, Canis familiaris
gccccgaaggaaatggtcaggccgg

SEQ ID NO: 94705 - DNA, 25 bp, Canis familiaris
gccccgtaggattctgtacaggttc

SEQ ID NO: 94706 - DNA, 25 bp, Canis familiaris
gccccgcttggttcttataagattc

SEQ ID NO: 94707 - DNA, 25 bp, Canis familiaris
gccccctgggatgcattaaaatttg

SEQ ID NO: 94708 - DNA, 25 bp, Canis familiaris
gcccctctggaagcatcatagaaaa

SEQ ID NO: 94709 - DNA, 25 bp, Canis familiaris
gcccctcagggcccataataagaag

SEQ ID NO: 94710 - DNA, 25 bp, Canis familiaris
gcccttacggcccagaaggagcacg

SEQ ID NO: 94711 - DNA, 25 bp, Canis familiaris
gcccttaaactataagtgaccttat

SEQ ID NO: 94712 - DNA, 25 bp, Canis familiaris
gcccttaaaacatagcagtcctccc

SEQ ID NO: 94713 - DNA, 25 bp, Canis familiaris
gccctacaagaacccagagtttccg

SEQ ID NO: 94714 - DNA, 25 bp, Canis familiaris
gccccacagagacacaatattttcc

SEQ ID NO: 94715 - DNA, 25 bp, Canis familiaris
gccccagatagatgtaatttttttt

SEQ ID NO: 94716 - DNA, 25 bp, Canis familiaris
gcccagagtaaatgccttttttgtt

SEQ ID NO: 94717 - DNA, 25 bp, Canis familiaris
gcccagaccattcagcctttaagtc

SEQ ID NO: 94718 - DNA, 25 bp, Canis familiaris
gccctaccataatgcctttgatcag

SEQ ID NO: 94719 - DNA, 25 bp, Canis familiaris
gcccggccatgaaggaccttataac

SEQ ID NO: 94720 - DNA, 25 bp, Canis familiaris
gcccagtccaataaagtctttgaac

SEQ ID NO: 94721 - DNA, 25 bp, Canis familiaris
gcccagtccaataaagtctttgaac

SEQ ID NO: 94722 - DNA, 25 bp, Canis familiaris
gcccagtccaataaagtctttgaac

SEQ ID NO: 94723 - DNA, 25 bp, Canis familiaris
gcccagtccaataaagtctttgaac

SEQ ID NO: 94724 - DNA, 25 bp, Canis familiaris
gccccccagattcatggcttgtggg

SEQ ID NO: 94725 - DNA, 25 bp, Canis familiaris
gccccttatgttgtcgttcgaggaa

SEQ ID NO: 94726 - DNA, 25 bp, Canis familiaris
gcccactttattctctggtctaaag

SEQ ID NO: 94727 - DNA, 25 bp, Canis familiaris
gcccctataattatcgctattccaa

SEQ ID NO: 94728 - DNA, 25 bp, Canis familiaris
gccccttagagcattaatcttccct

SEQ ID NO: 94729 - DNA, 25 bp, Canis familiaris
gccccataatgcttgtttttcttac

SEQ ID NO: 94730 - DNA, 25 bp, Canis familiaris
gccccaactgctttataattttatc

SEQ ID NO: 94731 - DNA, 25 bp, Canis familiaris
gccccagacctctattgtcaagtat

SEQ ID NO: 94732 - DNA, 25 bp, Canis familiaris
gccccagactctgtaacatcactac

SEQ ID NO: 94733 - DNA, 25 bp, Canis familiaris
gccccacattgggcttgaagcctac

SEQ ID NO: 94734 - DNA, 25 bp, Canis familiaris
gccccatgttgggaatgaagcctac

SEQ ID NO: 94735 - DNA, 25 bp, Canis familiaris
gccccatgttgggtgtggagtctac

SEQ ID NO: 94736 - DNA, 25 bp, Canis familiaris
gccccatcttgggtgtagagatcaa

SEQ ID NO: 94737 - DNA, 25 bp, Canis familiaris
gccccagctgtgctgttggagtgaa

SEQ ID NO: 94738 - DNA, 25 bp, Canis familiaris
gccccactgtctttagggagaacag

SEQ ID NO: 94739 - DNA, 25 bp, Canis familiaris
gccccaagttgcttgaccggagaag

SEQ ID NO: 94740 - DNA, 25 bp, Canis familiaris
gccccaagtgtggctacatctagag

SEQ ID NO: 94741 - DNA, 25 bp, Canis familiaris
gccccagcagctaagtccagctggc

SEQ ID NO: 94742 - DNA, 25 bp, Canis familiaris
gccccagcaccatgatggaggcggc

SEQ ID NO: 94743 - DNA, 25 bp, Canis familiaris
gccccacaacacctgggggagaaat

SEQ ID NO: 94744 - DNA, 25 bp, Canis familiaris
gccccaacatcccggggcaggagtt

SEQ ID NO: 94745 - DNA, 25 bp, Canis familiaris
gccctacactccgggaggcagtagt

SEQ ID NO: 94746 - DNA, 25 bp, Canis familiaris
gcccgctacttcggtgacacagata

SEQ ID NO: 94747 - DNA, 25 bp, Canis familiaris
gcccgcaaagctcgcgctacaaaac

SEQ ID NO: 94748 - DNA, 25 bp, Canis familiaris
gccccaaacgaggcacacgagacta

SEQ ID NO: 94749 - DNA, 25 bp, Canis familiaris
gcccgagaaagcgcagggacagctc

SEQ ID NO: 94750 - DNA, 25 bp, Canis familiaris
gcccggagaggcgaaggtaaccgcg

SEQ ID NO: 94751 - DNA, 25 bp, Canis familiaris
gccccgaggcactgagaaaatccca

SEQ ID NO: 94752 - DNA, 25 bp, Canis familiaris
gcccgctttgccggacataatttcc

SEQ ID NO: 94753 - DNA, 25 bp, Canis familiaris
gccccatttcaccagacatgaattt

SEQ ID NO: 94754 - DNA, 25 bp, Canis familiaris
gccccaagcatccgcagaggaatga

SEQ ID NO: 94755 - DNA, 25 bp, Canis familiaris
gccgccaagcaagtgaagccagcag

SEQ ID NO: 94756 - DNA, 25 bp, Canis familiaris
gccgccaatgcttgttcaggcacgc

SEQ ID NO: 94757 - DNA, 25 bp, Canis familiaris
gcccctgtgtgtgctcagtgccatg

SEQ ID NO: 94758 - DNA, 25 bp, Canis familiaris
gcccgcattgccaaaagtctcatgc

SEQ ID NO: 94759 - DNA, 25 bp, Canis familiaris
gcccgtgtgccaagaaagctcactt

SEQ ID NO: 94760 - DNA, 25 bp, Canis familiaris
gcccgtgtgcacagagatcactggc

SEQ ID NO: 94761 - DNA, 25 bp, Canis familiaris
gccctgtatgctgagctggccaagc

SEQ ID NO: 94762 - DNA, 25 bp, Canis familiaris
gcccgtacgaggggccatatgcaga

SEQ ID NO: 94763 - DNA, 25 bp, Canis familiaris
gcccgcaaaggggcgctgaggcaga

SEQ ID NO: 94764 - DNA, 25 bp, Canis familiaris
gccccaagatgcgcacggaggcaag

SEQ ID NO: 94765 - DNA, 25 bp, Canis familiaris
gccccagcaagagcacaagaggaag

SEQ ID NO: 94766 - DNA, 25 bp, Canis familiaris
gccccagcaagagcacaagaggaag

SEQ ID NO: 94767 - DNA, 25 bp, Canis familiaris
gccccagcagaacaagagggaagag

SEQ ID NO: 94768 - DNA, 25 bp, Canis familiaris
gccccaggccatccaagggtagagc

SEQ ID NO: 94769 - DNA, 25 bp, Canis familiaris
gccccaggacagccgtgggggcagc

SEQ ID NO: 94770 - DNA, 25 bp, Canis familiaris
gcccctgaggcacggggtctgaggc

SEQ ID NO: 94771 - DNA, 25 bp, Canis familiaris
gcccctgaggacgatgtggcggagg

SEQ ID NO: 94772 - DNA, 25 bp, Canis familiaris
gccccggcgacacttggagagaggc

SEQ ID NO: 94773 - DNA, 25 bp, Canis familiaris
gccctggtacaagttggaaacagcc

SEQ ID NO: 94774 - DNA, 25 bp, Canis familiaris
gccctggtcagctacagtgaaaccc

SEQ ID NO: 94775 - DNA, 25 bp, Canis familiaris
gcgcctggtgactcaataagcttct

SEQ ID NO: 94776 - DNA, 25 bp, Canis familiaris
gcagtcaaggaaagcgtaacgtttg

SEQ ID NO: 94777 - DNA, 25 bp, Canis familiaris
gcaacaaggacagcttccaagtttt

SEQ ID NO: 94778 - DNA, 25 bp, Canis familiaris
gcaaccattgacgccatgtcgggtt

SEQ ID NO: 94779 - DNA, 25 bp, Canis familiaris
gcaagaataagcgccggaggggttg

SEQ ID NO: 94780 - DNA, 25 bp, Canis familiaris
gaacatttggaaccggttgggctgt

SEQ ID NO: 94781 - DNA, 25 bp, Canis familiaris
gcagactttggttacacgtttactt

SEQ ID NO: 94782 - DNA, 25 bp, Canis familiaris
gccctctgggttactcgatgttacc

SEQ ID NO: 94783 - DNA, 25 bp, Canis familiaris
gccccatgcggataaccagtggtcc

SEQ ID NO: 94784 - DNA, 25 bp, Canis familiaris
gccccatgcggataaaccaggtggt

SEQ ID NO: 94785 - DNA, 25 bp, Canis familiaris
gccccactgcagtaaacaggcaacc

SEQ ID NO: 94786 - DNA, 25 bp, Canis familiaris
gccctctagtgataaggacacacac

SEQ ID NO: 94787 - DNA, 25 bp, Canis familiaris
gcccgccgtcagacagaagacgccc

SEQ ID NO: 94788 - DNA, 25 bp, Canis familiaris
gccccactccagaatgacatgactg

SEQ ID NO: 94789 - DNA, 25 bp, Canis familiaris
gccccctcgagaagaggacagcgtc

SEQ ID NO: 94790 - DNA, 25 bp, Canis familiaris
gccctgcttcggtaagactgccgat

SEQ ID NO: 94791 - DNA, 25 bp, Canis familiaris
gccctttctcgacagacgacatagc

SEQ ID NO: 94792 - DNA, 25 bp, Canis familiaris
gcccttagaccgcaggctgattgag

SEQ ID NO: 94793 - DNA, 25 bp, Canis familiaris
gccctcttgatctaggagttttgca

SEQ ID NO: 94794 - DNA, 25 bp, Canis familiaris
gccctgttgcatcatgtacattact

SEQ ID NO: 94795 - DNA, 25 bp, Canis familiaris
gccctcatctcatcagtactaaagt

SEQ ID NO: 94796 - DNA, 25 bp, Canis familiaris
gccctccatcatttggttcaaattg

SEQ ID NO: 94797 - DNA, 25 bp, Canis familiaris
gcccgacatcacgtggatgaaggaa

SEQ ID NO: 94798 - DNA, 25 bp, Canis familiaris
gcccgccacatggtgatgcagaagc

SEQ ID NO: 94799 - DNA, 25 bp, Canis familiaris
gcccctctcatggttcacagagatt

SEQ ID NO: 94800 - DNA, 25 bp, Canis familiaris
gcccctctgtcctatgacagcagac

SEQ ID NO: 94801 - DNA, 25 bp, Canis familiaris
gcccgctggtgtgatacacgagcca

SEQ ID NO: 94802 - DNA, 25 bp, Canis familiaris
gcccatgcaggtacctacgaggtca

SEQ ID NO: 94803 - DNA, 25 bp, Canis familiaris
gccctggcaggggcattcaggactc

SEQ ID NO: 94804 - DNA, 25 bp, Canis familiaris
gcccctgatggggctctcaggatgc

SEQ ID NO: 94805 - DNA, 25 bp, Canis familiaris
gccccatgtcaggcaactgctgggc

SEQ ID NO: 94806 - DNA, 25 bp, Canis familiaris
gcccgatcacgtagacacgggctgg

SEQ ID NO: 94807 - DNA, 25 bp, Canis familiaris
gctcgcaaatctttgatacggccgg

SEQ ID NO: 94808 - DNA, 25 bp, Canis familiaris
gcccatgaagctgggatacgccccg

SEQ ID NO: 94809 - DNA, 25 bp, Canis familiaris
gccctacagcttcaagcgggcagct

SEQ ID NO: 94810 - DNA, 25 bp, Canis familiaris
gccccagcctgacaagggacagcag

SEQ ID NO: 94811 - DNA, 25 bp, Canis familiaris
gccccagcctgacaagggacagcag

SEQ ID NO: 94812 - DNA, 25 bp, Canis familiaris
gcgccccaagagcaagaataccagc

SEQ ID NO: 94813 - DNA, 25 bp, Canis familiaris
gcccccaactggaagaagaagccca

SEQ ID NO: 94814 - DNA, 25 bp, Canis familiaris
gccctcccagctgaaaggggccact

SEQ ID NO: 94815 - DNA, 25 bp, Canis familiaris
gcccccgcagctgcgaacgggggta

SEQ ID NO: 94816 - DNA, 25 bp, Canis familiaris
gcccccgcagtacacagaggaagag

SEQ ID NO: 94817 - DNA, 25 bp, Canis familiaris
gcccgccaagttcaaaggccagcat

SEQ ID NO: 94818 - DNA, 25 bp, Canis familiaris
gcccgcccgatctgagaagggagca

SEQ ID NO: 94819 - DNA, 25 bp, Canis familiaris
gccctctccttctaggacaggagga

SEQ ID NO: 94820 - DNA, 25 bp, Canis familiaris
gccctctccttagggaaggtgctgc

SEQ ID NO: 94821 - DNA, 25 bp, Canis familiaris
gccctgccactgcagtggtggtggt

SEQ ID NO: 94822 - DNA, 25 bp, Canis familiaris
gccctgccaaagggcagtggggccc

SEQ ID NO: 94823 - DNA, 25 bp, Canis familiaris
gcccgcctgaggggagggggcatct

SEQ ID NO: 94824 - DNA, 25 bp, Canis familiaris
gcccccatcagggtgagtgggccac

SEQ ID NO: 94825 - DNA, 25 bp, Canis familiaris
gccctctgacaggagtttggcccac

SEQ ID NO: 94826 - DNA, 25 bp, Canis familiaris
gcccctgaatgtttctatggcagca

SEQ ID NO: 94827 - DNA, 25 bp, Canis familiaris
gcccctgagagcattttcaactgtg

SEQ ID NO: 94828 - DNA, 25 bp, Canis familiaris
gccccggacgctgatctaatcagtc

SEQ ID NO: 94829 - DNA, 25 bp, Canis familiaris
gccccaggccgtggactaggaggcc

SEQ ID NO: 94830 - DNA, 25 bp, Canis familiaris
gccccgagtttctacgaggtgggca

SEQ ID NO: 94831 - DNA, 25 bp, Canis familiaris
gccccgcagtttgaggagctgctgc

SEQ ID NO: 94832 - DNA, 25 bp, Canis familiaris
gccccggcaagtgggcgagctgtgc

SEQ ID NO: 94833 - DNA, 25 bp, Canis familiaris
gcccctgtgccagggggtgctgtgc

SEQ ID NO: 94834 - DNA, 25 bp, Canis familiaris
gcccctgggcactagagtgcttcac

SEQ ID NO: 94835 - DNA, 25 bp, Canis familiaris
gcccgcatggacattaggctggcca

SEQ ID NO: 94836 - DNA, 25 bp, Canis familiaris
gccctccagacatttcgtgtggaac

SEQ ID NO: 94837 - DNA, 25 bp, Canis familiaris
gccccatatgctattctgagttgat

SEQ ID NO: 94838 - DNA, 25 bp, Canis familiaris
gcccccattgtttcagggtgactgg

SEQ ID NO: 94839 - DNA, 25 bp, Canis familiaris
gccccttcatgtcccaggggcagtg

SEQ ID NO: 94840 - DNA, 25 bp, Canis familiaris
gcccatttattctctggcaggcagg

SEQ ID NO: 94841 - DNA, 25 bp, Canis familiaris
gccctgattgcttttctagcacgag

SEQ ID NO: 94842 - DNA, 25 bp, Canis familiaris
gccctgcatggaatttatagactag

SEQ ID NO: 94843 - DNA, 25 bp, Canis familiaris
gccctgatgaaccttactactatgg

SEQ ID NO: 94844 - DNA, 25 bp, Canis familiaris
gctccaagccaccattaatactaac

SEQ ID NO: 94845 - DNA, 25 bp, Canis familiaris
gcccaggccatgcctttattttatg

SEQ ID NO: 94846 - DNA, 25 bp, Canis familiaris
gcccatggacatatctttttttttt

SEQ ID NO: 94847 - DNA, 25 bp, Canis familiaris
gcccgagtcttggctgttgtgtttt

SEQ ID NO: 94848 - DNA, 25 bp, Canis familiaris
gcccctgtaatgagcttggttcctc

SEQ ID NO: 94849 - DNA, 25 bp, Canis familiaris
gccccatgtaatgtgcatctgctgt

SEQ ID NO: 94850 - DNA, 25 bp, Canis familiaris
gccccattaatttcaccatgttcct

SEQ ID NO: 94851 - DNA, 25 bp, Canis familiaris
gctcgcgcttcatttccctcattgt

SEQ ID NO: 94852 - DNA, 25 bp, Canis familiaris
gcccagaacatcatccctgcatcca

SEQ ID NO: 94853 - DNA, 25 bp, Canis familiaris
gcccagcaggacaccctgatggaag

SEQ ID NO: 94854 - DNA, 25 bp, Canis familiaris
gcccaaggacaagcgctacgtcggc

SEQ ID NO: 94855 - DNA, 25 bp, Canis familiaris
gccccgggcaagtgctattggtgag

SEQ ID NO: 94856 - DNA, 25 bp, Canis familiaris
gcccccatgtgtttgctttctgggg

SEQ ID NO: 94857 - DNA, 25 bp, Canis familiaris
gccctctatatgaggttggggagcg

SEQ ID NO: 94858 - DNA, 25 bp, Canis familiaris
gccccatctcgagggcttgggaggg

SEQ ID NO: 94859 - DNA, 25 bp, Canis familiaris
gccctccactgagaccgggaaggag

SEQ ID NO: 94860 - DNA, 25 bp, Canis familiaris
gcccatgtggtagcccaggggaaag

SEQ ID NO: 94861 - DNA, 25 bp, Canis familiaris
gcccagggtaaccccaatagaggag

SEQ ID NO: 94862 - DNA, 25 bp, Canis familiaris
gccctaggtgcgtgtccatatagag

SEQ ID NO: 94863 - DNA, 25 bp, Canis familiaris
gccccgagtcgaagtctagcaaagc

SEQ ID NO: 94864 - DNA, 25 bp, Canis familiaris
gcccctgaagagccgtgtagcaaga

SEQ ID NO: 94865 - DNA, 25 bp, Canis familiaris
gcccacgtagtcggagttgtagaag

SEQ ID NO: 94866 - DNA, 25 bp, Canis familiaris
gcccccctgatacagttgtagactc

SEQ ID NO: 94867 - DNA, 25 bp, Canis familiaris
gccctcacctttaactgcgtagaga

SEQ ID NO: 94868 - DNA, 25 bp, Canis familiaris
gccctcacctttaactgcgtagaga

SEQ ID NO: 94869 - DNA, 25 bp, Canis familiaris
gccctacttctgtgatcttgggggg

SEQ ID NO: 94870 - DNA, 25 bp, Canis familiaris
gcccatccttggttaactcaggggg

SEQ ID NO: 94871 - DNA, 25 bp, Canis familiaris
gcccgttctggaaacagtcagggtc

SEQ ID NO: 94872 - DNA, 25 bp, Canis familiaris
gccccgtccagtaacagacagtggt

SEQ ID NO: 94873 - DNA, 25 bp, Canis familiaris
gcccattcccagtaactgaggtttt

SEQ ID NO: 94874 - DNA, 25 bp, Canis familiaris
gcccagtcccaataaagtctttgaa

SEQ ID NO: 94875 - DNA, 25 bp, Canis familiaris
gcccagagctccttgcaagaagttt

SEQ ID NO: 94876 - DNA, 25 bp, Canis familiaris
gcccagacttcaataaaacgtgctt

SEQ ID NO: 94877 - DNA, 25 bp, Canis familiaris
gcccagacttcaataaaacgtgctt

SEQ ID NO: 94878 - DNA, 25 bp, Canis familiaris
gcccgactccgtcgaattctgggct

SEQ ID NO: 94879 - DNA, 25 bp, Canis familiaris
gcccaacatgccgtggttcaagggc

SEQ ID NO: 94880 - DNA, 25 bp, Canis familiaris
gcccggagccatggcattttcggac

SEQ ID NO: 94881 - DNA, 25 bp, Canis familiaris
gcccctgacctggttttcaatgagt

SEQ ID NO: 94882 - DNA, 25 bp, Canis familiaris
gcccgatgggctcttgttgaatatg

SEQ ID NO: 94883 - DNA, 25 bp, Canis familiaris
gcccatggggctccctgaaaatgtg

SEQ ID NO: 94884 - DNA, 25 bp, Canis familiaris
gcccatcttggctcttagtaatgtg

SEQ ID NO: 94885 - DNA, 25 bp, Canis familiaris
gcccttgtgtgttcctttaatgtac

SEQ ID NO: 94886 - DNA, 25 bp, Canis familiaris
gcccttgtggttcttgtgattgcaa

SEQ ID NO: 94887 - DNA, 25 bp, Canis familiaris
gcccttgaggttgtgttctgtggac

SEQ ID NO: 94888 - DNA, 25 bp, Canis familiaris
gccctaggaatatctgtatgttgga

SEQ ID NO: 94889 - DNA, 25 bp, Canis familiaris
gcccaaggagtacctttgtgttgga

SEQ ID NO: 94890 - DNA, 25 bp, Canis familiaris
gcccacatccagaagttcacgtttg

SEQ ID NO: 94891 - DNA, 25 bp, Canis familiaris
gcccgctgccagaagcttctggacg

SEQ ID NO: 94892 - DNA, 25 bp, Canis familiaris
gcccggtcgggaatgtggacaggtg

SEQ ID NO: 94893 - DNA, 25 bp, Canis familiaris
gccccgacgaggatgtggcgcaggg

SEQ ID NO: 94894 - DNA, 25 bp, Canis familiaris
gccccgagcagggagaaggcaaggg

SEQ ID NO: 94895 - DNA, 25 bp, Canis familiaris
gcccccaagaggcacaccaagggag

SEQ ID NO: 94896 - DNA, 25 bp, Canis familiaris
gcccccaagaactcgtcaacaggga

SEQ ID NO: 94897 - DNA, 25 bp, Canis familiaris
gcccccaagtgagcccagaactggg

SEQ ID NO: 94898 - DNA, 25 bp, Canis familiaris
gcccctcaagtggcccaagaagcag

SEQ ID NO: 94899 - DNA, 25 bp, Canis familiaris
gcccattcaaaggcacgaacaccta

SEQ ID NO: 94900 - DNA, 25 bp, Canis familiaris
gcccttgcaaatggcatcaccatca

SEQ ID NO: 94901 - DNA, 25 bp, Canis familiaris
gcccatcgagaacggactcacaggt

SEQ ID NO: 94902 - DNA, 25 bp, Canis familiaris
gccctggaggagcagcatgcatcca

SEQ ID NO: 94903 - DNA, 25 bp, Canis familiaris
gccctggaggaggccaataccgagc

SEQ ID NO: 94904 - DNA, 25 bp, Canis familiaris
gcccgggaggctcattagttgcagc

SEQ ID NO: 94905 - DNA, 25 bp, Canis familiaris
gcccggagcggtcatagtgtacagc

SEQ ID NO: 94906 - DNA, 25 bp, Canis familiaris
gcccggataggatttacatctaact

SEQ ID NO: 94907 - DNA, 25 bp, Canis familiaris
gccctggtgggattgtcccaacacc

SEQ ID NO: 94908 - DNA, 25 bp, Canis familiaris
gcccagggaagttgtgtcctactcc

SEQ ID NO: 94909 - DNA, 25 bp, Canis familiaris
gcccattggagggcttgaactcacg

SEQ ID NO: 94910 - DNA, 25 bp, Canis familiaris
gcccagggtgtgtcttggagtcctg

SEQ ID NO: 94911 - DNA, 25 bp, Canis familiaris
gcccgacggttctggcagtagtgtg

SEQ ID NO: 94912 - DNA, 25 bp, Canis familiaris
gcccggcggctttgatgggatcagg

SEQ ID NO: 94913 - DNA, 25 bp, Canis familiaris
gccctggagttttggtggtcagtca

SEQ ID NO: 94914 - DNA, 25 bp, Canis familiaris
gccctggatttttgagtgtgtgtct

SEQ ID NO: 94915 - DNA, 25 bp, Canis familiaris
gcccgcagacgagttgattttgttt

SEQ ID NO: 94916 - DNA, 25 bp, Canis familiaris
gcccgagccaggaagtttggttgtg

SEQ ID NO: 94917 - DNA, 25 bp, Canis familiaris
gcccgagtcacggaatttgtgtgtg

SEQ ID NO: 94918 - DNA, 25 bp, Canis familiaris
gccctggtcaggcagcagttgagtg

SEQ ID NO: 94919 - DNA, 25 bp, Canis familiaris
gccccggagcagcagagactgcgag

SEQ ID NO: 94920 - DNA, 25 bp, Canis familiaris
gccctctggacctgagactgagttt

SEQ ID NO: 94921 - DNA, 25 bp, Canis familiaris
gcccttggcactgatagaaaatatt

SEQ ID NO: 94922 - DNA, 25 bp, Canis familiaris
gccctgggcgcggctagttaaatct

SEQ ID NO: 94923 - DNA, 25 bp, Canis familiaris
gccccgggcagaccagttagataat

SEQ ID NO: 94924 - DNA, 25 bp, Canis familiaris
gcccctgttgtgagcagtgaaaaat

SEQ ID NO: 94925 - DNA, 25 bp, Canis familiaris
gcccgggagtgtcgcaggaagaaga

SEQ ID NO: 94926 - DNA, 25 bp, Canis familiaris
gcccgggggtgtctgaggagaattg

SEQ ID NO: 94927 - DNA, 25 bp, Canis familiaris
gccccggggtgggctgcatggagag

SEQ ID NO: 94928 - DNA, 25 bp, Canis familiaris
gcgcccggtagtcactgactgaagg

SEQ ID NO: 94929 - DNA, 25 bp, Canis familiaris
gccccgcgtactcgagtatgtgggg

SEQ ID NO: 94930 - DNA, 25 bp, Canis familiaris
gcccaccagttacgactatgatgcc

SEQ ID NO: 94931 - DNA, 25 bp, Canis familiaris
gcccaaccttcacgtcatgaaggcc

SEQ ID NO: 94932 - DNA, 25 bp, Canis familiaris
gcccggcttgtgcggcaaatggacc

SEQ ID NO: 94933 - DNA, 25 bp, Canis familiaris
gcccgagccctggaggaagaggacc

SEQ ID NO: 94934 - DNA, 25 bp, Canis familiaris
gcccgagcccgaagtggggggcgtg

SEQ ID NO: 94935 - DNA, 25 bp, Canis familiaris
gcccgggcaggacgggttgtgggtg

SEQ ID NO: 94936 - DNA, 25 bp, Canis familiaris
gccctagccggaccaagtttgtgag

SEQ ID NO: 94937 - DNA, 25 bp, Canis familiaris
gccccccatgagaacaagtttgctg

SEQ ID NO: 94938 - DNA, 25 bp, Canis familiaris
gcccccagatgacagcacaggtgtc

SEQ ID NO: 94939 - DNA, 25 bp, Canis familiaris
gccccctggagcagtatgtggtgcc

SEQ ID NO: 94940 - DNA, 25 bp, Canis familiaris
gccccctggacatatcgatgggccc

SEQ ID NO: 94941 - DNA, 25 bp, Canis familiaris
gcccagccggaattggggttgtcct

SEQ ID NO: 94942 - DNA, 25 bp, Canis familiaris
gcccaggcagtatttggcggtggtc

SEQ ID NO: 94943 - DNA, 25 bp, Canis familiaris
gcccccagttttctgtgtgtgtttt

SEQ ID NO: 94944 - DNA, 25 bp, Canis familiaris
gcccccagctatggaaattattgtt

SEQ ID NO: 94945 - DNA, 25 bp, Canis familiaris
gccccgaggccggaattttgtgtgg

SEQ ID NO: 94946 - DNA, 25 bp, Canis familiaris
gccccggagccaaaattaagagtcg

SEQ ID NO: 94947 - DNA, 25 bp, Canis familiaris
gcccccataccccaagtatagagac

SEQ ID NO: 94948 - DNA, 25 bp, Canis familiaris
gcccaacatgggaagaagtactgaa

SEQ ID NO: 94949 - DNA, 25 bp, Canis familiaris
gcccaacctatcaagaaccactatt

SEQ ID NO: 94950 - DNA, 25 bp, Canis familiaris
gcccaacatttcattgatcccttgt

SEQ ID NO: 94951 - DNA, 25 bp, Canis familiaris
gcccaagagattctgcaagcacgct

SEQ ID NO: 94952 - DNA, 25 bp, Canis familiaris
gcccgagctgtgcggaatcaccagg

SEQ ID NO: 94953 - DNA, 25 bp, Canis familiaris
gcccaagcagcctggggacacgggc

SEQ ID NO: 94954 - DNA, 25 bp, Canis familiaris
gcccagaactgctccgagacgtggg

SEQ ID NO: 94955 - DNA, 25 bp, Canis familiaris
gcccgaaatgcactccgagtaggta

SEQ ID NO: 94956 - DNA, 25 bp, Canis familiaris
gccctgttgagcctagggacagctt

SEQ ID NO: 94957 - DNA, 25 bp, Canis familiaris
gccctttgagagtattgcggagtga

SEQ ID NO: 94958 - DNA, 25 bp, Canis familiaris
gcccccagagcgttcagaggaggaa

SEQ ID NO: 94959 - DNA, 25 bp, Canis familiaris
gcccgccgcggcggctagaagagca

SEQ ID NO: 94960 - DNA, 25 bp, Canis familiaris
gccctccgctacgatgtatgaaatg

SEQ ID NO: 94961 - DNA, 25 bp, Canis familiaris
gccctgccgtttactatagcatcag

SEQ ID NO: 94962 - DNA, 25 bp, Canis familiaris
gcccgggccattgccatcgctgcag

SEQ ID NO: 94963 - DNA, 25 bp, Canis familiaris
gcccgggccatcgccattgctgcgg

SEQ ID NO: 94964 - DNA, 25 bp, Canis familiaris
gcccgggttgagactctttggtgca

SEQ ID NO: 94965 - DNA, 25 bp, Canis familiaris
gcccgagctgtagactcggtgctgg

SEQ ID NO: 94966 - DNA, 25 bp, Canis familiaris
gccctggctgagccagacctggagc

SEQ ID NO: 94967 - DNA, 25 bp, Canis familiaris
gccctggcagatgacacgtgatgtc

SEQ ID NO: 94968 - DNA, 25 bp, Canis familiaris
gccctgatggcagacatcttgtcgc

SEQ ID NO: 94969 - DNA, 25 bp, Canis familiaris
gcccgatacatgttatatctccgca

SEQ ID NO: 94970 - DNA, 25 bp, Canis familiaris
gccctgaacatgtatttcttccaga

SEQ ID NO: 94971 - DNA, 25 bp, Canis familiaris
gccctggactgagtttagagacatt

SEQ ID NO: 94972 - DNA, 25 bp, Canis familiaris
gccctgggctgagtgcagtgctaaa

SEQ ID NO: 94973 - DNA, 25 bp, Canis familiaris
gcccgcgtctaggaggctacaagcc

SEQ ID NO: 94974 - DNA, 25 bp, Canis familiaris
gcccgcatattaggcgcagataaaa

SEQ ID NO: 94975 - DNA, 25 bp, Canis familiaris
gcccccactatgctgcagtagatta

SEQ ID NO: 94976 - DNA, 25 bp, Canis familiaris
gcccaccaacatggccgtgaattat

SEQ ID NO: 94977 - DNA, 25 bp, Canis familiaris
gcccccatcatctccgatgagatgc

SEQ ID NO: 94978 - DNA, 25 bp, Canis familiaris
gcccccatgacccctatgaagggaa

SEQ ID NO: 94979 - DNA, 25 bp, Canis familiaris
gcccccaggctcctcaagaaggggt

SEQ ID NO: 94980 - DNA, 25 bp, Canis familiaris
gcccccgtcatcttagatgccgggg

SEQ ID NO: 94981 - DNA, 25 bp, Canis familiaris
gcccccctctgcttggaggagggag

SEQ ID NO: 94982 - DNA, 25 bp, Canis familiaris
gcccccttcatcctgtggtggggct

SEQ ID NO: 94983 - DNA, 25 bp, Canis familiaris
gcccccaccccagtatgtgggagct

SEQ ID NO: 94984 - DNA, 25 bp, Canis familiaris
gcccccatctgtcaggagtgtgtgg

SEQ ID NO: 94985 - DNA, 25 bp, Canis familiaris
gcccccctagaagggtctgcataga

SEQ ID NO: 94986 - DNA, 25 bp, Canis familiaris
gcccaccgtaatttggttctgagaa

SEQ ID NO: 94987 - DNA, 25 bp, Canis familiaris
gcccaccctttccaggtaatggaga

SEQ ID NO: 94988 - DNA, 25 bp, Canis familiaris
gcccccaggtttggcagtgaaggag

SEQ ID NO: 94989 - DNA, 25 bp, Canis familiaris
gcccccaggtttgggtagctgctga

SEQ ID NO: 94990 - DNA, 25 bp, Canis familiaris
gcgcacgaagagtgggtgtccctag

SEQ ID NO: 94991 - DNA, 25 bp, Canis familiaris
gcccagacacagttctgggccccga

SEQ ID NO: 94992 - DNA, 25 bp, Canis familiaris
gcccaaatagttggacctcctcaac

SEQ ID NO: 94993 - DNA, 25 bp, Canis familiaris
gctccagaaattgcggttcctgaac

SEQ ID NO: 94994 - DNA, 25 bp, Canis familiaris
gcccgaagagagactggtcctctgt

SEQ ID NO: 94995 - DNA, 25 bp, Canis familiaris
gcccagctttaaatggctccttgct

SEQ ID NO: 94996 - DNA, 25 bp, Canis familiaris
gcccagtttaagctaccagatttta

SEQ ID NO: 94997 - DNA, 25 bp, Canis familiaris
gcccaatttgggccaaccaagttat

SEQ ID NO: 94998 - DNA, 25 bp, Canis familiaris
gcccactaagggcactctaagagtt

SEQ ID NO: 94999 - DNA, 25 bp, Canis familiaris
gtcgtaaacggcactctaaggttgg

SEQ ID NO: 95000 - DNA, 25 bp, Canis familiaris
gcgagataaacgatcctatatagga

SEQ ID NO: 95001 - DNA, 25 bp, Canis familiaris
gcgaataaacgacacatttgaaacc

SEQ ID NO: 95002 - DNA, 25 bp, Canis familiaris
gcgaacaacagggtcacgttacaac

SEQ ID NO: 95003 - DNA, 25 bp, Canis familiaris
gcgcaaatgccgcttcggtgacaaa

SEQ ID NO: 95004 - DNA, 25 bp, Canis familiaris
gcgaaacaccgaacaggacctaagt

SEQ ID NO: 95005 - DNA, 25 bp, Canis familiaris
gcgcaaaacagttacaggtcccgac

SEQ ID NO: 95006 - DNA, 25 bp, Canis familiaris
gcgctaaatccatcgcaagtttcgt

SEQ ID NO: 95007 - DNA, 25 bp, Canis familiaris
gcccaaatcagccacgtttttctgg

SEQ ID NO: 95008 - DNA, 25 bp, Canis familiaris
gcccatccatcagcagtaatttctt

SEQ ID NO: 95009 - DNA, 25 bp, Canis familiaris
gccctcacatacctgtactagttgg

SEQ ID NO: 95010 - DNA, 25 bp, Canis familiaris
gccctccaacatctactagacttga

SEQ ID NO: 95011 - DNA, 25 bp, Canis familiaris
gcccactcaaatgctactactttga

SEQ ID NO: 95012 - DNA, 25 bp, Canis familiaris
gcgtcaccaagatctacaactacta

SEQ ID NO: 95013 - DNA, 25 bp, Canis familiaris
gcccaaaagtacaaatacttgctta

SEQ ID NO: 95014 - DNA, 25 bp, Canis familiaris
gcccatttggtcttaactattctta

SEQ ID NO: 95015 - DNA, 25 bp, Canis familiaris
gcccttgtccatttaagcttcatgc

SEQ ID NO: 95016 - DNA, 25 bp, Canis familiaris
gccctttataatcacagctttcaga

SEQ ID NO: 95017 - DNA, 25 bp, Canis familiaris
gcccttttgcaagccatgtgtaatc

SEQ ID NO: 95018 - DNA, 25 bp, Canis familiaris
gcgctcctttcagggttgtggtatc

SEQ ID NO: 95019 - DNA, 25 bp, Canis familiaris
gccctgctctgtagtggtttttatc

SEQ ID NO: 95020 - DNA, 25 bp, Canis familiaris
gccctgcctgtcaaggattcatgcc

SEQ ID NO: 95021 - DNA, 25 bp, Canis familiaris
gccctgactggcaaggctagcactc

SEQ ID NO: 95022 - DNA, 25 bp, Canis familiaris
gccctcaatgaggaggcaggccgcc

SEQ ID NO: 95023 - DNA, 25 bp, Canis familiaris
gcccaataaggggcagcgcctggcc

SEQ ID NO: 95024 - DNA, 25 bp, Canis familiaris
gcccagaacggggcatccaagaccc

SEQ ID NO: 95025 - DNA, 25 bp, Canis familiaris
gccctgaaggcagagcccagtgacc

SEQ ID NO: 95026 - DNA, 25 bp, Canis familiaris
gccctgagtagaggaccaggtgtcc

SEQ ID NO: 95027 - DNA, 25 bp, Canis familiaris
gcccagaaagcagcctagtggcccc

SEQ ID NO: 95028 - DNA, 25 bp, Canis familiaris
gcccagagagacgctttgggtgctg

SEQ ID NO: 95029 - DNA, 25 bp, Canis familiaris
gcccacagaccttctcttagggcag

SEQ ID NO: 95030 - DNA, 25 bp, Canis familiaris
gcccacgacctggtttcagaatgct

SEQ ID NO: 95031 - DNA, 25 bp, Canis familiaris
gcccatccttcatgtttcaatagct

SEQ ID NO: 95032 - DNA, 25 bp, Canis familiaris
gccccctcgatgctcttagctgagt

SEQ ID NO: 95033 - DNA, 25 bp, Canis familiaris
gcccacctcgttttgctagtgaaga

SEQ ID NO: 95034 - DNA, 25 bp, Canis familiaris
gccccccctgattattatgatgata

SEQ ID NO: 95035 - DNA, 25 bp, Canis familiaris
gccccctcagctgagattacagtgt

SEQ ID NO: 95036 - DNA, 25 bp, Canis familiaris
gccctccaagagacagtctccaggc

SEQ ID NO: 95037 - DNA, 25 bp, Canis familiaris
gccctgtcagaaagatgtgtctcag

SEQ ID NO: 95038 - DNA, 25 bp, Canis familiaris
gcccgctaatgaaatgatctgatag

SEQ ID NO: 95039 - DNA, 25 bp, Canis familiaris
gcccccagtggtagtctgatagctc

SEQ ID NO: 95040 - DNA, 25 bp, Canis familiaris
gcccccagagagtgtcagatgaatc

SEQ ID NO: 95041 - DNA, 25 bp, Canis familiaris
gcccttcaagctggtgtcagagcat

SEQ ID NO: 95042 - DNA, 25 bp, Canis familiaris
gcccatgtctaggcgtcacgagatt

SEQ ID NO: 95043 - DNA, 25 bp, Canis familiaris
gcccaggctgactttgccaaggtgc

SEQ ID NO: 95044 - DNA, 25 bp, Canis familiaris
gcccaggctacttttgaagcgattc

SEQ ID NO: 95045 - DNA, 25 bp, Canis familiaris
gcccaggctacgtgttgagcgtggc

SEQ ID NO: 95046 - DNA, 25 bp, Canis familiaris
gctcggactacgtggtctagcaggc

SEQ ID NO: 95047 - DNA, 25 bp, Canis familiaris
gcccgccatgacacagggtagaggc

SEQ ID NO: 95048 - DNA, 25 bp, Canis familiaris
gcccatgcctgggaaggtgatagac

SEQ ID NO: 95049 - DNA, 25 bp, Canis familiaris
gccctcctgcagctgatgggggcac

SEQ ID NO: 95050 - DNA, 25 bp, Canis familiaris
gccctccacagaattgggttccaag

SEQ ID NO: 95051 - DNA, 25 bp, Canis familiaris
gcccccaaactgaagcagcttctgc

SEQ ID NO: 95052 - DNA, 25 bp, Canis familiaris
gcccccaactagtgcacaatgcatg

SEQ ID NO: 95053 - DNA, 25 bp, Canis familiaris
gcccccaccaagaggcatgtgatga

SEQ ID NO: 95054 - DNA, 25 bp, Canis familiaris
gcgccccagccataaggatttgaga

SEQ ID NO: 95055 - DNA, 25 bp, Canis familiaris
gccctccacaaaccatgttttgcag

SEQ ID NO: 95056 - DNA, 25 bp, Canis familiaris
gccctccacaacatatactgctgtg

SEQ ID NO: 95057 - DNA, 25 bp, Canis familiaris
gccctggacttacatacattgctta

SEQ ID NO: 95058 - DNA, 25 bp, Canis familiaris
gccctggcacatcggaaacttgtac

SEQ ID NO: 95059 - DNA, 25 bp, Canis familiaris
gccctgcagaagcgaggcatcgtgg

SEQ ID NO: 95060 - DNA, 25 bp, Canis familiaris
gccctgcgtagccaacgcaagtctt

SEQ ID NO: 95061 - DNA, 25 bp, Canis familiaris
gccctcgtgggtgctaaggttgcgt

SEQ ID NO: 95062 - DNA, 25 bp, Canis familiaris
gccctggggaatgaagggatcgctg

SEQ ID NO: 95063 - DNA, 25 bp, Canis familiaris
gcccggtgggcagactggggcgggc

SEQ ID NO: 95064 - DNA, 25 bp, Canis familiaris
gcccaggtgggcacagggaggcagg

SEQ ID NO: 95065 - DNA, 25 bp, Canis familiaris
gccctggggaccctgatggcagggg

SEQ ID NO: 95066 - DNA, 25 bp, Canis familiaris
gcccgtgggaggctgagctgtgggg

SEQ ID NO: 95067 - DNA, 25 bp, Canis familiaris
gcccgggggagctgagcggagagga

SEQ ID NO: 95068 - DNA, 25 bp, Canis familiaris
gccctggcagggcggagggggtagg

SEQ ID NO: 95069 - DNA, 25 bp, Canis familiaris
gcccggcaagtggtgacagggcttg

SEQ ID NO: 95070 - DNA, 25 bp, Canis familiaris
gcccgggcagtggtgacagggctgc

SEQ ID NO: 95071 - DNA, 25 bp, Canis familiaris
gccctgggcttggagaatgggtctc

SEQ ID NO: 95072 - DNA, 25 bp, Canis familiaris
gcgccgggcgctcaagagcgagttc

SEQ ID NO: 95073 - DNA, 25 bp, Canis familiaris
gcccgagggtagttcattcagttca

SEQ ID NO: 95074 - DNA, 25 bp, Canis familiaris
gccctgggttcggtcctcagctctg

SEQ ID NO: 95075 - DNA, 25 bp, Canis familiaris
gccctgagtgtgtcatgaccctcag

SEQ ID NO: 95076 - DNA, 25 bp, Canis familiaris
gcccgagggacgtccattcagaggc

SEQ ID NO: 95077 - DNA, 25 bp, Canis familiaris
gcccaagcggacaagtattccacca

SEQ ID NO: 95078 - DNA, 25 bp, Canis familiaris
gcccccaggagcaagattagccctc

SEQ ID NO: 95079 - DNA, 25 bp, Canis familiaris
gcccatctacgaggggtatgccctc

SEQ ID NO: 95080 - DNA, 25 bp, Canis familiaris
gccctctgggaggagtgcaagccct

SEQ ID NO: 95081 - DNA, 25 bp, Canis familiaris
gccctcatgggcaagattggtgcct

SEQ ID NO: 95082 - DNA, 25 bp, Canis familiaris
gcccttggagctccaatagctcaca

SEQ ID NO: 95083 - DNA, 25 bp, Canis familiaris
gccctcgatacctaatattcatgcc

SEQ ID NO: 95084 - DNA, 25 bp, Canis familiaris
gcccggtgaatatcattgctcagaa

SEQ ID NO: 95085 - DNA, 25 bp, Canis familiaris
gcccgctggaaatctgatgtaggag

SEQ ID NO: 95086 - DNA, 25 bp, Canis familiaris
gcccgtgtagaaggcgtgtttgcag

SEQ ID NO: 95087 - DNA, 25 bp, Canis familiaris
gcgccaggtcaagatctggtttcag

SEQ ID NO: 95088 - DNA, 25 bp, Canis familiaris
gcccggacacggacaggattgacag

SEQ ID NO: 95089 - DNA, 25 bp, Canis familiaris
gccctgcttcaccgacaggatgtac

SEQ ID NO: 95090 - DNA, 25 bp, Canis familiaris
gccctctggcccagcagatgagtca

SEQ ID NO: 95091 - DNA, 25 bp, Canis familiaris
gccctctgaccagcagcagattgtg

SEQ ID NO: 95092 - DNA, 25 bp, Canis familiaris
gcccactaccagtgaacttgcttga

SEQ ID NO: 95093 - DNA, 25 bp, Canis familiaris
gcccaacctacaggaagcttgtctg

SEQ ID NO: 95094 - DNA, 25 bp, Canis familiaris
gcccagtcccacgagatgacttgtc

SEQ ID NO: 95095 - DNA, 25 bp, Canis familiaris
gcgaacattcacacagacagctagt

SEQ ID NO: 95096 - DNA, 25 bp, Canis familiaris
gcactaattaaaaagcgtgagcatt

SEQ ID NO: 95097 - DNA, 25 bp, Canis familiaris
gctcttaaccagctacgtggtgtcc

SEQ ID NO: 95098 - DNA, 25 bp, Canis familiaris
gccctacaccaaatacgtggggaca

SEQ ID NO: 95099 - DNA, 25 bp, Canis familiaris
gcgaatttccaagaggtggtggcac

SEQ ID NO: 95100 - DNA, 25 bp, Canis familiaris
gcgtataataataccaggggtggct

SEQ ID NO: 95101 - DNA, 25 bp, Canis familiaris
gccctcattaaagcagcgggtgtga

SEQ ID NO: 95102 - DNA, 25 bp, Canis familiaris
gccctgctctggaaacggcgggctg

SEQ ID NO: 95103 - DNA, 25 bp, Canis familiaris
gcccgtgatgtgcacactgtgctgg

SEQ ID NO: 95104 - DNA, 25 bp, Canis familiaris
gccctgtggttggcagctgttgggt

SEQ ID NO: 95105 - DNA, 25 bp, Canis familiaris
gccctaatgtactgcgattgcggta

SEQ ID NO: 95106 - DNA, 25 bp, Canis familiaris
gccctggcatgatcaaagactgcgg

SEQ ID NO: 95107 - DNA, 25 bp, Canis familiaris
gcggggaacctatgagcctgggttc

SEQ ID NO: 95108 - DNA, 25 bp, Canis familiaris
gcgggtaagactttggttctcgtat

SEQ ID NO: 95109 - DNA, 25 bp, Canis familiaris
gcgaaataaacatgtgggtctccca

SEQ ID NO: 95110 - DNA, 25 bp, Canis familiaris
gcgaccagaaagactcggaggctcc

SEQ ID NO: 95111 - DNA, 25 bp, Canis familiaris
gcgcagccgcatgaaccggatgtct

SEQ ID NO: 95112 - DNA, 25 bp, Canis familiaris
gccctcacttgcaccagtgatgtgt

SEQ ID NO: 95113 - DNA, 25 bp, Canis familiaris
gccctagtgaatcccactgtgtgcc

SEQ ID NO: 95114 - DNA, 25 bp, Canis familiaris
gccctgggcattcccagcattggga

SEQ ID NO: 95115 - DNA, 25 bp, Canis familiaris
gcccttccagttcagctctgaaaag

SEQ ID NO: 95116 - DNA, 25 bp, Canis familiaris
gcccttcggaaacctcacaagaagt

SEQ ID NO: 95117 - DNA, 25 bp, Canis familiaris
gcccgtgggaaagcagcagcagcag

SEQ ID NO: 95118 - DNA, 25 bp, Canis familiaris
gcccattgagctaaagtgcaggagc

SEQ ID NO: 95119 - DNA, 25 bp, Canis familiaris
gcccgtgagctgcacggctgagagc

SEQ ID NO: 95120 - DNA, 25 bp, Canis familiaris
gcccgtcagcgaccagatgctggag

SEQ ID NO: 95121 - DNA, 25 bp, Canis familiaris
gcccagccagagttcgacatgaaga

SEQ ID NO: 95122 - DNA, 25 bp, Canis familiaris
gcccaggtgataaatactgagctgc

SEQ ID NO: 95123 - DNA, 25 bp, Canis familiaris
gcccattgtgataaagactttcagg

SEQ ID NO: 95124 - DNA, 25 bp, Canis familiaris
gccctttgtatagtcattttctctg

SEQ ID NO: 95125 - DNA, 25 bp, Canis familiaris
gccctggtttgtgcatttgttcata

SEQ ID NO: 95126 - DNA, 25 bp, Canis familiaris
gccctgtgttttgctgtgtgagaaa

SEQ ID NO: 95127 - DNA, 25 bp, Canis familiaris
gccctctgtttcttggttgacaata

SEQ ID NO: 95128 - DNA, 25 bp, Canis familiaris
gccctctgctttttccttgaaagaa

SEQ ID NO: 95129 - DNA, 25 bp, Canis familiaris
gcccagccatttttccaaagaaaca

SEQ ID NO: 95130 - DNA, 25 bp, Canis familiaris
gctcctgccttcacactaaaaaaaa

SEQ ID NO: 95131 - DNA, 25 bp, Canis familiaris
gccctgttgatagtagccaaaaagg

SEQ ID NO: 95132 - DNA, 25 bp, Canis familiaris
gctccagtgttacaggaaaacaggg

SEQ ID NO: 95133 - DNA, 25 bp, Canis familiaris
gcccggtttgcagtgagaagtgaag

SEQ ID NO: 95134 - DNA, 25 bp, Canis familiaris
gccctgctgcagatactgtatcgtg

SEQ ID NO: 95135 - DNA, 25 bp, Canis familiaris
gcccatgctcgaatgcctgagaagg

SEQ ID NO: 95136 - DNA, 25 bp, Canis familiaris
gcccatgtcgtagtcgagaaacgga

SEQ ID NO: 95137 - DNA, 25 bp, Canis familiaris
gcccgtcgacatgctgcaaaactgc

SEQ ID NO: 95138 - DNA, 25 bp, Canis familiaris
gccctgtctgactctggcagaattc

SEQ ID NO: 95139 - DNA, 25 bp, Canis familiaris
gccctggctgtgaactcagcagaat

SEQ ID NO: 95140 - DNA, 25 bp, Canis familiaris
gccctgggatggtctcagaacactg

SEQ ID NO: 95141 - DNA, 25 bp, Canis familiaris
gcccgaggcgtctggacaagctggg

SEQ ID NO: 95142 - DNA, 25 bp, Canis familiaris
gcccgagcggagaggcaaggctgag

SEQ ID NO: 95143 - DNA, 25 bp, Canis familiaris
gccctgagccggaggcagatactga

SEQ ID NO: 95144 - DNA, 25 bp, Canis familiaris
gccctgacctggaacagcgagacta

SEQ ID NO: 95145 - DNA, 25 bp, Canis familiaris
gccctgtgcctgctatcaggatcaa

SEQ ID NO: 95146 - DNA, 25 bp, Canis familiaris
gccctggtctggagcagagctcaca

SEQ ID NO: 95147 - DNA, 25 bp, Canis familiaris
gccctggttagctggagcatggatt

SEQ ID NO: 95148 - DNA, 25 bp, Canis familiaris
gcccggataaagcggcgcagactgg

SEQ ID NO: 95149 - DNA, 25 bp, Canis familiaris
gcgcgagggaaagcagggtacgggt

SEQ ID NO: 95150 - DNA, 25 bp, Canis familiaris
gcgcaggtgttagacatgtagtagc

SEQ ID NO: 95151 - DNA, 25 bp, Canis familiaris
gccctgtttatccagctgtagtagc

SEQ ID NO: 95152 - DNA, 25 bp, Canis familiaris
gccctttgttgcagcatgttgctac

SEQ ID NO: 95153 - DNA, 25 bp, Canis familiaris
gcccagcttcttacgcatttgctga

SEQ ID NO: 95154 - DNA, 25 bp, Canis familiaris
gcccagcccttcagtgtataatttg

SEQ ID NO: 95155 - DNA, 25 bp, Canis familiaris
gcccacccttgttagtattcatttt

SEQ ID NO: 95156 - DNA, 25 bp, Canis familiaris
gcccaggccgtttgaacttggattt

SEQ ID NO: 95157 - DNA, 25 bp, Canis familiaris
gcccatggggatacgaatctgagga

SEQ ID NO: 95158 - DNA, 25 bp, Canis familiaris
gcccagcggggagaacagaggtatc

SEQ ID NO: 95159 - DNA, 25 bp, Canis familiaris
gcccgaggaggccacaagaaggttg

SEQ ID NO: 95160 - DNA, 25 bp, Canis familiaris
gccctacgtgtccgcaaatagagtt

SEQ ID NO: 95161 - DNA, 25 bp, Canis familiaris
gccctacggacgtcgcaatgaggtc

SEQ ID NO: 95162 - DNA, 25 bp, Canis familiaris
gccctacaggtgactccaggaggtg

SEQ ID NO: 95163 - DNA, 25 bp, Canis familiaris
gcccatcaccatcttccaggagcga

SEQ ID NO: 95164 - DNA, 25 bp, Canis familiaris
gccctcaccatgctccagaaggagg

SEQ ID NO: 95165 - DNA, 25 bp, Canis familiaris
gccctcgcgactgcaatgacgaagg

SEQ ID NO: 95166 - DNA, 25 bp, Canis familiaris
gcgctccgcaatttcaacctggaga

SEQ ID NO: 95167 - DNA, 25 bp, Canis familiaris
gcccaccgtagagacactgggaccc

SEQ ID NO: 95168 - DNA, 25 bp, Canis familiaris
gccctcctccaggtgatcctggaga

SEQ ID NO: 95169 - DNA, 25 bp, Canis familiaris
gccctggcccaggtgcaaatgagga

SEQ ID NO: 95170 - DNA, 25 bp, Canis familiaris
gcccagggccaggtgagggcacgac

SEQ ID NO: 95171 - DNA, 25 bp, Canis familiaris
gcccgtgccagggtgtctgaggaac

SEQ ID NO: 95172 - DNA, 25 bp, Canis familiaris
gccctgtgccgggcagtcaagtacc

SEQ ID NO: 95173 - DNA, 25 bp, Canis familiaris
gcccggcgcacgggctcagagagag

SEQ ID NO: 95174 - DNA, 25 bp, Canis familiaris
gcccggtcacttgtaggagaggtca

SEQ ID NO: 95175 - DNA, 25 bp, Canis familiaris
gcccggtgctttactaggcgacgat

SEQ ID NO: 95176 - DNA, 25 bp, Canis familiaris
gcccaggcttttgcaacagcaacgc

SEQ ID NO: 95177 - DNA, 25 bp, Canis familiaris
gcccgtgccttagacaagcaactcc

SEQ ID NO: 95178 - DNA, 25 bp, Canis familiaris
gccctttctaaccaataaatgcctc

SEQ ID NO: 95179 - DNA, 25 bp, Canis familiaris
gcgcctttctagtgttttggacttt

SEQ ID NO: 95180 - DNA, 25 bp, Canis familiaris
gccctttgtgagtgttctcaagtct

SEQ ID NO: 95181 - DNA, 25 bp, Canis familiaris
gcccgtgctggagagcttcaaggtc

SEQ ID NO: 95182 - DNA, 25 bp, Canis familiaris
gccctggtacatcagctcacaagga

SEQ ID NO: 95183 - DNA, 25 bp, Canis familiaris
gcgaaggtaacaatccacaaaacta

SEQ ID NO: 95184 - DNA, 25 bp, Canis familiaris
gcgaaagggacttcgatcacatcga

SEQ ID NO: 95185 - DNA, 25 bp, Canis familiaris
gcgatatgatggttcgacgacctaa

SEQ ID NO: 95186 - DNA, 25 bp, Canis familiaris
gcgaagatggcggccaagaccaaca

SEQ ID NO: 95187 - DNA, 25 bp, Canis familiaris
gcgaagagcaaggcccaaaagaatt

SEQ ID NO: 95188 - DNA, 25 bp, Canis familiaris
gcgaggaaccctgaagacgactttt

SEQ ID NO: 95189 - DNA, 25 bp, Canis familiaris
gcgggaaccttgtacaccgatcatg

SEQ ID NO: 95190 - DNA, 25 bp, Canis familiaris
gcgctgatgaccccggacaccgacg

SEQ ID NO: 95191 - DNA, 25 bp, Canis familiaris
gcccagacggatcggaatgccaacg

SEQ ID NO: 95192 - DNA, 25 bp, Canis familiaris
gcccagacccatggaatatacaacc

SEQ ID NO: 95193 - DNA, 25 bp, Canis familiaris
gcccaaccagcatgggctacaacac

SEQ ID NO: 95194 - DNA, 25 bp, Canis familiaris
gcccagagcggtggggtaaaagcca

SEQ ID NO: 95195 - DNA, 25 bp, Canis familiaris
gcccggcgctacggtgtagaagacc

SEQ ID NO: 95196 - DNA, 25 bp, Canis familiaris
gcccggctgatggtggtggaggaac

SEQ ID NO: 95197 - DNA, 25 bp, Canis familiaris
gcccggctggaggtcgagagaaaca

SEQ ID NO: 95198 - DNA, 25 bp, Canis familiaris
gcccggctggagcacagacagagga

SEQ ID NO: 95199 - DNA, 25 bp, Canis familiaris
gccctgtcgccacgaagcagagtgg

SEQ ID NO: 95200 - DNA, 25 bp, Canis familiaris
gccctgacccagcaaaggcatctgg

SEQ ID NO: 95201 - DNA, 25 bp, Canis familiaris
gccctgagccgggaactcatgtggg

SEQ ID NO: 95202 - DNA, 25 bp, Canis familiaris
gcccagaccaggggaccagtataat

SEQ ID NO: 95203 - DNA, 25 bp, Canis familiaris
gccctgtcggagatgatccagtttt

SEQ ID NO: 95204 - DNA, 25 bp, Canis familiaris
gcccttggtagagtttatttttgtg

SEQ ID NO: 95205 - DNA, 25 bp, Canis familiaris
gccctcacctagatctgttttttga

SEQ ID NO: 95206 - DNA, 25 bp, Canis familiaris
gctctctcccctattttttgaagaa

SEQ ID NO: 95207 - DNA, 25 bp, Canis familiaris
gccctcacgtctacttttgtgggaa

SEQ ID NO: 95208 - DNA, 25 bp, Canis familiaris
gcccaccctcatcttttgtgaaata

SEQ ID NO: 95209 - DNA, 25 bp, Canis familiaris
gcccaagtctctgtttagttcaatc

SEQ ID NO: 95210 - DNA, 25 bp, Canis familiaris
gcccaactattattttagcaccaac

SEQ ID NO: 95211 - DNA, 25 bp, Canis familiaris
gcgtcaagtttctcttagactctga

SEQ ID NO: 95212 - DNA, 25 bp, Canis familiaris
gcccaacgattctcgtcatgaccga

SEQ ID NO: 95213 - DNA, 25 bp, Canis familiaris
gcccaaccatatctcgacatgtaca

SEQ ID NO: 95214 - DNA, 25 bp, Canis familiaris
gccctaccttgagtatgacatctcc

SEQ ID NO: 95215 - DNA, 25 bp, Canis familiaris
gcccatattttaaaactgcatcccc

SEQ ID NO: 95216 - DNA, 25 bp, Canis familiaris
gccctttcttttaaagcatctacct

SEQ ID NO: 95217 - DNA, 25 bp, Canis familiaris
gccctattctttctagcagagtacg

SEQ ID NO: 95218 - DNA, 25 bp, Canis familiaris
gcccaattttctcgaagcaatgttc

SEQ ID NO: 95219 - DNA, 25 bp, Canis familiaris
tcccagtttcctcaccaattaaatg

SEQ ID NO: 95220 - DNA, 25 bp, Canis familiaris
gcccaatataacacaccagaaaaaa

SEQ ID NO: 95221 - DNA, 25 bp, Canis familiaris
gcccaacaatacatacacaaacaca

SEQ ID NO: 95222 - DNA, 25 bp, Canis familiaris
gcccataagaactttgagagaccaa

SEQ ID NO: 95223 - DNA, 25 bp, Canis familiaris
gccctatgttactttgacacacaca

SEQ ID NO: 95224 - DNA, 25 bp, Canis familiaris
gcccttgtgtactctgaccacaatc

SEQ ID NO: 95225 - DNA, 25 bp, Canis familiaris
gcccaatggctttgtttccattatc

SEQ ID NO: 95226 - DNA, 25 bp, Canis familiaris
gcgctccagacgtgtttagtttcaa

SEQ ID NO: 95227 - DNA, 25 bp, Canis familiaris
gcgctcggagcggtgtttacttaag

SEQ ID NO: 95228 - DNA, 25 bp, Canis familiaris
gccctggagctcccttaggaaaagt

SEQ ID NO: 95229 - DNA, 25 bp, Canis familiaris
gcccatgggcaggcctggggtagaa

SEQ ID NO: 95230 - DNA, 25 bp, Canis familiaris
gccctgtgtgcgttcatggggctag

SEQ ID NO: 95231 - DNA, 25 bp, Canis familiaris
gccctggtggtgacatatgagttag

SEQ ID NO: 95232 - DNA, 25 bp, Canis familiaris
gccctcgcgagtcatggagatgaag

SEQ ID NO: 95233 - DNA, 25 bp, Canis familiaris
gcgccctgcaacccagggaaagggt

SEQ ID NO: 95234 - DNA, 25 bp, Canis familiaris
gcgccacttgagccacgagtaaaat

SEQ ID NO: 95235 - DNA, 25 bp, Canis familiaris
gcgcaacagcagcctgcagctggat

SEQ ID NO: 95236 - DNA, 25 bp, Canis familiaris
gcccacaagggcctatattggtccg

SEQ ID NO: 95237 - DNA, 25 bp, Canis familiaris
gcccaaagcccactgtaatttccag

SEQ ID NO: 95238 - DNA, 25 bp, Canis familiaris
gcccagaggccaaagaagtttccag

SEQ ID NO: 95239 - DNA, 25 bp, Canis familiaris
gcccaaggacccgggtattcacaag

SEQ ID NO: 95240 - DNA, 25 bp, Canis familiaris
gcccaaagatgggccgggagtaaag

SEQ ID NO: 95241 - DNA, 25 bp, Canis familiaris
gcccagcaaggaggactttttcaaa

SEQ ID NO: 95242 - DNA, 25 bp, Canis familiaris
gccctgcaagggatcattgtgtaca

SEQ ID NO: 95243 - DNA, 25 bp, Canis familiaris
gcccagcagaagcattatctttgcc

SEQ ID NO: 95244 - DNA, 25 bp, Canis familiaris
gcccagccacaggatatttcatgag

SEQ ID NO: 95245 - DNA, 25 bp, Canis familiaris
gccctccatagcacagactcagagc

SEQ ID NO: 95246 - DNA, 25 bp, Canis familiaris
gcgcctcaatgagcggcactatggg

SEQ ID NO: 95247 - DNA, 25 bp, Canis familiaris
gcccatcgtcaggctgcagacggga

SEQ ID NO: 95248 - DNA, 25 bp, Canis familiaris
gcccatcatcctgtcaggcgaggag

SEQ ID NO: 95249 - DNA, 25 bp, Canis familiaris
gccctctactgcctcagtgaagagg

SEQ ID NO: 95250 - DNA, 25 bp, Canis familiaris
gccctcagagtcctgggattaagcc

SEQ ID NO: 95251 - DNA, 25 bp, Canis familiaris
gccctcaatgaccactttgtcaagc

SEQ ID NO: 95252 - DNA, 25 bp, Canis familiaris
gcccatcacaggctctgtatacgca

SEQ ID NO: 95253 - DNA, 25 bp, Canis familiaris
gcccatcaaggaatctgagatcatt

SEQ ID NO: 95254 - DNA, 25 bp, Canis familiaris
gcgccatgcaaggagcctgacatga

SEQ ID NO: 95255 - DNA, 25 bp, Canis familiaris
gcgctcagatggtatcaggcctgca

SEQ ID NO: 95256 - DNA, 25 bp, Canis familiaris
gcgccagtgtagaatgtcacgatta

SEQ ID NO: 95257 - DNA, 25 bp, Canis familiaris
gcgctagcgtggacatttgccattc

SEQ ID NO: 95258 - DNA, 25 bp, Canis familiaris
gctccagggtgaggtccctgtctag

SEQ ID NO: 95259 - DNA, 25 bp, Canis familiaris
gctgtcggggacacctgatgtggaa

SEQ ID NO: 95260 - DNA, 25 bp, Canis familiaris
gcttcggtgcttattcaggcggtag

SEQ ID NO: 95261 - DNA, 25 bp, Canis familiaris
gcgtcggtcttatttttgtgttggt

SEQ ID NO: 95262 - DNA, 25 bp, Canis familiaris
gcgctttgatttttttagggcttga

SEQ ID NO: 95263 - DNA, 25 bp, Canis familiaris
gcgtacatttgtcaggaaggcctta

SEQ ID NO: 95264 - DNA, 25 bp, Canis familiaris
gcgctgacttggcagtaaagggctt

SEQ ID NO: 95265 - DNA, 25 bp, Canis familiaris
gcgtcctgaggccaataaatggggg

SEQ ID NO: 95266 - DNA, 25 bp, Canis familiaris
tgcgtccagggacaaaagggtagaa

SEQ ID NO: 95267 - DNA, 25 bp, Canis familiaris
gcgtctaaggcactaagggggaaag

SEQ ID NO: 95268 - DNA, 25 bp, Canis familiaris
gcgcgttaggcgtaggttcggaaga

SEQ ID NO: 95269 - DNA, 25 bp, Canis familiaris
gcggggagagcgagttccggaggag

SEQ ID NO: 95270 - DNA, 25 bp, Canis familiaris
gcgggggggaggagttagagggcag

SEQ ID NO: 95271 - DNA, 25 bp, Canis familiaris
gcgtttgctgggtgaacttcgaggc

SEQ ID NO: 95272 - DNA, 25 bp, Canis familiaris
gcgagtttaggttgtgttcaaagcc

SEQ ID NO: 95273 - DNA, 25 bp, Canis familiaris
gcgaccctcgttcgttgtgaagggc

SEQ ID NO: 95274 - DNA, 25 bp, Canis familiaris
ggaccttcggccagaagaaggaccg

SEQ ID NO: 95275 - DNA, 25 bp, Canis familiaris
gaatctttcgggagaaggaggagtt

SEQ ID NO: 95276 - DNA, 25 bp, Canis familiaris
gactttctagggtgacgaacgattt

SEQ ID NO: 95277 - DNA, 25 bp, Canis familiaris
ggttaccacggatgactaccgtcat

SEQ ID NO: 95278 - DNA, 25 bp, Canis familiaris
gttgtaccgaaacatctacttcttt

SEQ ID NO: 95279 - DNA, 25 bp, Canis familiaris
gttgtaccgaaacatctacttcttt

SEQ ID NO: 95280 - DNA, 25 bp, Canis familiaris
gttgtaccgaaacatctacttcttt

SEQ ID NO: 95281 - DNA, 25 bp, Canis familiaris
gttgtaccgaaacatctacttcttt

SEQ ID NO: 95282 - DNA, 25 bp, Canis familiaris
gtactaccaaaacatcggttctggg

SEQ ID NO: 95283 - DNA, 25 bp, Canis familiaris
gtcccccaagaacatgccgaacggg

SEQ ID NO: 95284 - DNA, 25 bp, Canis familiaris
gttctccccaagtggccaaatttag

SEQ ID NO: 95285 - DNA, 25 bp, Canis familiaris
gctgttccaaaacagggataatttt

SEQ ID NO: 95286 - DNA, 25 bp, Canis familiaris
gcgttcctaaagcacctctaaatcg

SEQ ID NO: 95287 - DNA, 25 bp, Canis familiaris
gcgcctttactgagaccatttaata

SEQ ID NO: 95288 - DNA, 25 bp, Canis familiaris
gcccatttattagacgatctataca

SEQ ID NO: 95289 - DNA, 25 bp, Canis familiaris
gcccattccaaagagggctctccct

SEQ ID NO: 95290 - DNA, 25 bp, Canis familiaris
gctgtttccatataagccctttgcg

SEQ ID NO: 95291 - DNA, 25 bp, Canis familiaris
gcattttaacaagatcccctgggga

SEQ ID NO: 95292 - DNA, 25 bp, Canis familiaris
tcattttaaaccaattccacgccta

SEQ ID NO: 95293 - DNA, 25 bp, Canis familiaris
gcgcattttagagttaacctcccta

SEQ ID NO: 95294 - DNA, 25 bp, Canis familiaris
gcgatttgtctggttaattccgata

SEQ ID NO: 95295 - DNA, 25 bp, Canis familiaris
gacttaactgaaggagaatccgaac

SEQ ID NO: 95296 - DNA, 25 bp, Canis familiaris
gactacaggctaccaaggacctacc

SEQ ID NO: 95297 - DNA, 25 bp, Canis familiaris
gcagtggtggtcacaaagcccatac

SEQ ID NO: 95298 - DNA, 25 bp, Canis familiaris
gcgattgcggtacggtacccatgac

SEQ ID NO: 95299 - DNA, 25 bp, Canis familiaris
gccctcggaaggagaccgctgagct

SEQ ID NO: 95300 - DNA, 25 bp, Canis familiaris
gccctctagaaggtcaggccgtggc

SEQ ID NO: 95301 - DNA, 25 bp, Canis familiaris
gccctcaaggtggtacgcctgaagc

SEQ ID NO: 95302 - DNA, 25 bp, Canis familiaris
gccctcaaggtggtacgcctgaagc

SEQ ID NO: 95303 - DNA, 25 bp, Canis familiaris
gccctcaaggtggtacgcctgaagc

SEQ ID NO: 95304 - DNA, 25 bp, Canis familiaris
gccctcaaggtggtacgcctgaagc

SEQ ID NO: 95305 - DNA, 25 bp, Canis familiaris
gccctcaaggtggtacgcctgaagc

SEQ ID NO: 95306 - DNA, 25 bp, Canis familiaris
gcccagaagtattgtcccggcaagc

SEQ ID NO: 95307 - DNA, 25 bp, Canis familiaris
gccctgcgatggagattcctggtga

SEQ ID NO: 95308 - DNA, 25 bp, Canis familiaris
gctctcgctgatggaagttccgggg

SEQ ID NO: 95309 - DNA, 25 bp, Canis familiaris
gccctctgatggcactttcagtaca

SEQ ID NO: 95310 - DNA, 25 bp, Canis familiaris
gccctctgcttgcgattatggtgta

SEQ ID NO: 95311 - DNA, 25 bp, Canis familiaris
gcaggacgcttacatctaaggaacg

SEQ ID NO: 95312 - DNA, 25 bp, Canis familiaris
gcgcgcactgctacaggactaagaa

SEQ ID NO: 95313 - DNA, 25 bp, Canis familiaris
gcgcatcctgattcaggcccaagaa

SEQ ID NO: 95314 - DNA, 25 bp, Canis familiaris
gcgcttcgacaagcctatcaagcag

SEQ ID NO: 95315 - DNA, 25 bp, Canis familiaris
gcgccgagaagaccccagaagatgc

SEQ ID NO: 95316 - DNA, 25 bp, Canis familiaris
gcgatccaggcccggctatgaaatg

SEQ ID NO: 95317 - DNA, 25 bp, Canis familiaris
gcgcatcagcaacctggacttggag

SEQ ID NO: 95318 - DNA, 25 bp, Canis familiaris
gcgccaatctactgagccatggaga

SEQ ID NO: 95319 - DNA, 25 bp, Canis familiaris
gcccaagtatcacgtcgatgctgtg

SEQ ID NO: 95320 - DNA, 25 bp, Canis familiaris
gcccactacattgctcagtgctggg

SEQ ID NO: 95321 - DNA, 25 bp, Canis familiaris
gcccagcataacgtacagtgctgcc

SEQ ID NO: 95322 - DNA, 25 bp, Canis familiaris
gcccagcagacagcggcgctgatcg

SEQ ID NO: 95323 - DNA, 25 bp, Canis familiaris
gcgtggcagccatgctggcctgtgc

SEQ ID NO: 95324 - DNA, 25 bp, Canis familiaris
gcgagataccaagtgatgcattgtg

SEQ ID NO: 95325 - DNA, 25 bp, Canis familiaris
gccctcaccacagtagatcatgtgt

SEQ ID NO: 95326 - DNA, 25 bp, Canis familiaris
gccctccgccaggagaatgctggcc

SEQ ID NO: 95327 - DNA, 25 bp, Canis familiaris
gcccaacaccagtagagctgcaggc

SEQ ID NO: 95328 - DNA, 25 bp, Canis familiaris
gccctacggagactgagcggtgcat

SEQ ID NO: 95329 - DNA, 25 bp, Canis familiaris
gccctacggagactgagcggtgcat

SEQ ID NO: 95330 - DNA, 25 bp, Canis familiaris
gccctacggcgacgagaagctgagc

SEQ ID NO: 95331 - DNA, 25 bp, Canis familiaris
gccctacgggagactgagcggtgca

SEQ ID NO: 95332 - DNA, 25 bp, Canis familiaris
gcgaatccgggagcagagcagtgcc

SEQ ID NO: 95333 - DNA, 25 bp, Canis familiaris
gccctcagaggggctctggagtgcc

SEQ ID NO: 95334 - DNA, 25 bp, Canis familiaris
gcccatcaagaaagtcatggtggcc

SEQ ID NO: 95335 - DNA, 25 bp, Canis familiaris
gcccatcaagttggccaggggcacc

SEQ ID NO: 95336 - DNA, 25 bp, Canis familiaris
gccctcctgtatccacgggatagag

SEQ ID NO: 95337 - DNA, 25 bp, Canis familiaris
gccctcggctgagtactggaacggg

SEQ ID NO: 95338 - DNA, 25 bp, Canis familiaris
gccctcggctgagtactggaacggg

SEQ ID NO: 95339 - DNA, 25 bp, Canis familiaris
gcgccggaagtttctggagacggtg

SEQ ID NO: 95340 - DNA, 25 bp, Canis familiaris
gcgccggagatcatccttagaaccg

SEQ ID NO: 95341 - DNA, 25 bp, Canis familiaris
gcgcgagggcatgcacctcaagaac

SEQ ID NO: 95342 - DNA, 25 bp, Canis familiaris
gcggagggacccagcaagaagtcgg

SEQ ID NO: 95343 - DNA, 25 bp, Canis familiaris
gcggagggtcccaaataattccaat

SEQ ID NO: 95344 - DNA, 25 bp, Canis familiaris
gggacatggatctgtaataacggca

SEQ ID NO: 95345 - DNA, 25 bp, Canis familiaris
gggctcaggccgataaaacaggggt

SEQ ID NO: 95346 - DNA, 25 bp, Canis familiaris
ggacaattgggatacaaacaacgtt

SEQ ID NO: 95347 - DNA, 25 bp, Canis familiaris
gttaattgggaatggagtccacctt

SEQ ID NO: 95348 - DNA, 25 bp, Canis familiaris
tcttccattgggaaagggttggttg

SEQ ID NO: 95349 - DNA, 25 bp, Canis familiaris
gctgacctgggacaatggacgggtt

SEQ ID NO: 95350 - DNA, 25 bp, Canis familiaris
gcgaccctgagagcaaagacgcggg

SEQ ID NO: 95351 - DNA, 25 bp, Canis familiaris
gcccacctgaggaaataagactacg

SEQ ID NO: 95352 - DNA, 25 bp, Canis familiaris
gccctgcctgctctaagaaactggc

SEQ ID NO: 95353 - DNA, 25 bp, Canis familiaris
gccctcactgctctgtggaaatggg

SEQ ID NO: 95354 - DNA, 25 bp, Canis familiaris
gcgctgtccttcttggagtacaggt

SEQ ID NO: 95355 - DNA, 25 bp, Canis familiaris
gcgcttctctcgtcggcggacttgt

SEQ ID NO: 95356 - DNA, 25 bp, Canis familiaris
gcgctttctcagtgggacaaagcaa

SEQ ID NO: 95357 - DNA, 25 bp, Canis familiaris
gcagtcttcaatcagggtaactcaa

SEQ ID NO: 95358 - DNA, 25 bp, Canis familiaris
gcgccttcgatcaaggactgaactg

SEQ ID NO: 95359 - DNA, 25 bp, Canis familiaris
gcgcatttatgcttttgactgtttt

SEQ ID NO: 95360 - DNA, 25 bp, Canis familiaris
gcgccttgactactctgagtttttc

SEQ ID NO: 95361 - DNA, 25 bp, Canis familiaris
gcgcctccacatgtttttgatattc

SEQ ID NO: 95362 - DNA, 25 bp, Canis familiaris
gccctcccatgagtcttgattcaaa

SEQ ID NO: 95363 - DNA, 25 bp, Canis familiaris
gcccttgccatagttcatgaatagc

SEQ ID NO: 95364 - DNA, 25 bp, Canis familiaris
gcccttgatcatgttctgaacgtga

SEQ ID NO: 95365 - DNA, 25 bp, Canis familiaris
gccctacagcatgttctgcaagctc

SEQ ID NO: 95366 - DNA, 25 bp, Canis familiaris
gcgcaaatcactgttcagcaggctg

SEQ ID NO: 95367 - DNA, 25 bp, Canis familiaris
gccctcgactatatcacggctgtat

SEQ ID NO: 95368 - DNA, 25 bp, Canis familiaris
gccctcgcaggatatccaggagtat

SEQ ID NO: 95369 - DNA, 25 bp, Canis familiaris
gccctcgcaaggagccaggatggac

SEQ ID NO: 95370 - DNA, 25 bp, Canis familiaris
gccctcgtacgcagcgtggagtact

SEQ ID NO: 95371 - DNA, 25 bp, Canis familiaris
gcccttattgccagcttgctggcta

SEQ ID NO: 95372 - DNA, 25 bp, Canis familiaris
gcccatgaatttaatttctggtgca

SEQ ID NO: 95373 - DNA, 25 bp, Canis familiaris
gcccatgaactaaattgtttgccaa

SEQ ID NO: 95374 - DNA, 25 bp, Canis familiaris
gctgccgaacttcattgaagtggat

SEQ ID NO: 95375 - DNA, 25 bp, Canis familiaris
gctcggaacttgctcaaatctatag

SEQ ID NO: 95376 - DNA, 25 bp, Canis familiaris
gcgcaggacctgagtctggtgttag

SEQ ID NO: 95377 - DNA, 25 bp, Canis familiaris
gcgcaacactagacgtctgtataat

SEQ ID NO: 95378 - DNA, 25 bp, Canis familiaris
gcgccaacgagtgtgtgcttatgct

SEQ ID NO: 95379 - DNA, 25 bp, Canis familiaris
gcccaagccaggctgttttcttcac

SEQ ID NO: 95380 - DNA, 25 bp, Canis familiaris
gccctagctagcctgggacttattt

SEQ ID NO: 95381 - DNA, 25 bp, Canis familiaris
gcccacaatgggggtgcagcttata

SEQ ID NO: 95382 - DNA, 25 bp, Canis familiaris
gcccaggacgtggtggcaggggagg

SEQ ID NO: 95383 - DNA, 25 bp, Canis familiaris
gcgcaaggacggctgaggcggctaa

SEQ ID NO: 95384 - DNA, 25 bp, Canis familiaris
gcccaggacacgctgaccagcgttc

SEQ ID NO: 95385 - DNA, 25 bp, Canis familiaris
gcccttgaccgacggacaggtgtcc

SEQ ID NO: 95386 - DNA, 25 bp, Canis familiaris
gcccttcagcctggggacagagctg

SEQ ID NO: 95387 - DNA, 25 bp, Canis familiaris
gccctctccatcaggctgaggagat

SEQ ID NO: 95388 - DNA, 25 bp, Canis familiaris
gcccttgcgaaccgtgatgttgatt

SEQ ID NO: 95389 - DNA, 25 bp, Canis familiaris
actgccacccagaagactgtggatg

SEQ ID NO: 95390 - DNA, 25 bp, Canis familiaris
gcgctctggaagaagcccggaaact

SEQ ID NO: 95391 - DNA, 25 bp, Canis familiaris
gcgcatttagtaagctccaggagaa

SEQ ID NO: 95392 - DNA, 25 bp, Canis familiaris
gcgctctctggacttgtccatggac

SEQ ID NO: 95393 - DNA, 25 bp, Canis familiaris
gcgcctgctggaagatgccgattag

SEQ ID NO: 95394 - DNA, 25 bp, Canis familiaris
gcgccagaggccaatccgaataaac

SEQ ID NO: 95395 - DNA, 25 bp, Canis familiaris
gcccaaggctgcattccagtatggc

SEQ ID NO: 95396 - DNA, 25 bp, Canis familiaris
gcgctcaagagcgagttcctggtgc

SEQ ID NO: 95397 - DNA, 25 bp, Canis familiaris
gcgtaccatccagtttgtggactgg

SEQ ID NO: 95398 - DNA, 25 bp, Canis familiaris
gcgaacgtccagctgtggtgattgc

SEQ ID NO: 95399 - DNA, 25 bp, Canis familiaris
gcccactaccgctgtggtcataggt

SEQ ID NO: 95400 - DNA, 25 bp, Canis familiaris
gcccagtactccttgtgagcataac

SEQ ID NO: 95401 - DNA, 25 bp, Canis familiaris
gccctaacacaactgctgtcataac

SEQ ID NO: 95402 - DNA, 25 bp, Canis familiaris
gcccaatattctttctgcaatcgaa

SEQ ID NO: 95403 - DNA, 25 bp, Canis familiaris
gcccaatttatttgctgcgggtagc

SEQ ID NO: 95404 - DNA, 25 bp, Canis familiaris
gcgccagttagtctgcagcgggaag

SEQ ID NO: 95405 - DNA, 25 bp, Canis familiaris
gcccttccagtctgcatggtggaga

SEQ ID NO: 95406 - DNA, 25 bp, Canis familiaris
gcccttcatcatcttcatcgatgag

SEQ ID NO: 95407 - DNA, 25 bp, Canis familiaris
gcccttgatgctgtccacaggggct

SEQ ID NO: 95408 - DNA, 25 bp, Canis familiaris
gccctatgtatctccaagagagtct

SEQ ID NO: 95409 - DNA, 25 bp, Canis familiaris
gcccaagattcaaccatagaagcga

SEQ ID NO: 95410 - DNA, 25 bp, Canis familiaris
gcccaagcacctatcatgaaagcct

SEQ ID NO: 95411 - DNA, 25 bp, Canis familiaris
gcccagagacttttcaggagagcct

SEQ ID NO: 95412 - DNA, 25 bp, Canis familiaris
gcccaggagtgtgccgtgtgtggct

SEQ ID NO: 95413 - DNA, 25 bp, Canis familiaris
gcccatgagcaacttccgttttggg

SEQ ID NO: 95414 - DNA, 25 bp, Canis familiaris
gcccatgactacctttgtcttatgc

SEQ ID NO: 95415 - DNA, 25 bp, Canis familiaris
gcccatttacgttattagtagcctc

SEQ ID NO: 95416 - DNA, 25 bp, Canis familiaris
gcccatgctttcgtaataatcttct

SEQ ID NO: 95417 - DNA, 25 bp, Canis familiaris
gcccagctggtcatcagtatcatcc

SEQ ID NO: 95418 - DNA, 25 bp, Canis familiaris
gcccagctgcgtgacagtgcaacgc

SEQ ID NO: 95419 - DNA, 25 bp, Canis familiaris
gcccagcagggctacagtgcataca

SEQ ID NO: 95420 - DNA, 25 bp, Canis familiaris
gcccaagggctacggctacgggcag

SEQ ID NO: 95421 - DNA, 25 bp, Canis familiaris
gctccaagtggctggggtcggggag

SEQ ID NO: 95422 - DNA, 25 bp, Canis familiaris
gcccaaggggaggggcatcctggga

SEQ ID NO: 95423 - DNA, 25 bp, Canis familiaris
gcccaacaggagggggccagggaga

SEQ ID NO: 95424 - DNA, 25 bp, Canis familiaris
gcccattcagggcagggggtggtgt

SEQ ID NO: 95425 - DNA, 25 bp, Canis familiaris
gcccacggggacactggggtggagt

SEQ ID NO: 95426 - DNA, 25 bp, Canis familiaris
gcccagggcggaccctggagttccg

SEQ ID NO: 95427 - DNA, 25 bp, Canis familiaris
gcccaggtaggggtgcgtactggcc

SEQ ID NO: 95428 - DNA, 25 bp, Canis familiaris
gcccacggatggaagtgtgtacccc

SEQ ID NO: 95429 - DNA, 25 bp, Canis familiaris
gcccacggtgggcttgataggacct

SEQ ID NO: 95430 - DNA, 25 bp, Canis familiaris
gcccaagagtacctttgtgtggacg

SEQ ID NO: 95431 - DNA, 25 bp, Canis familiaris
gcccacaggtaagctgttgtcgccc

SEQ ID NO: 95432 - DNA, 25 bp, Canis familiaris
gcgcccaggtaggggtgcgtactgg

SEQ ID NO: 95433 - DNA, 25 bp, Canis familiaris
gcagccaacgtcgtcgactggtagg

SEQ ID NO: 95434 - DNA, 25 bp, Canis familiaris
gcccaccgtggctgagctggtggag

SEQ ID NO: 95435 - DNA, 25 bp, Canis familiaris
gcccaatcctggagactcgggatcg

SEQ ID NO: 95436 - DNA, 25 bp, Canis familiaris
gcccacatttgtctgagccttggaa

SEQ ID NO: 95437 - DNA, 25 bp, Canis familiaris
gcccacaactcatttgacctttgac

SEQ ID NO: 95438 - DNA, 25 bp, Canis familiaris
gcccaccccaattcactttgggcac

SEQ ID NO: 95439 - DNA, 25 bp, Canis familiaris
gcaccccccaatgcacaatactggg

SEQ ID NO: 95440 - DNA, 25 bp, Canis familiaris
gcccacaccaaagtcagcaatcatt

SEQ ID NO: 95441 - DNA, 25 bp, Canis familiaris
gcccaacactaaatctgcagacact

SEQ ID NO: 95442 - DNA, 25 bp, Canis familiaris
gcccaacctacagcagcgatatctc

SEQ ID NO: 95443 - DNA, 25 bp, Canis familiaris
gcccaacccatcttagcatgtatca

SEQ ID NO: 95444 - DNA, 25 bp, Canis familiaris
gcccaactccacctggatacatggg

SEQ ID NO: 95445 - DNA, 25 bp, Canis familiaris
gcccaagctgaaggtgtgtgcactg

SEQ ID NO: 95446 - DNA, 25 bp, Canis familiaris
gcccaagctcacagtcattcctgtg

SEQ ID NO: 95447 - DNA, 25 bp, Canis familiaris
gcccaatctcaatctcatgtacttt

SEQ ID NO: 95448 - DNA, 25 bp, Canis familiaris
gcccacagctgttatgcttttttgg

SEQ ID NO: 95449 - DNA, 25 bp, Canis familiaris
gcccaatgtggaacttgatcccagg

SEQ ID NO: 95450 - DNA, 25 bp, Canis familiaris
gcccaattggggtttcacacagccc

SEQ ID NO: 95451 - DNA, 25 bp, Canis familiaris
gcccaactgggataccaaacaccca

SEQ ID NO: 95452 - DNA, 25 bp, Canis familiaris
gctttgttggaataccttatacccg

SEQ ID NO: 95453 - DNA, 25 bp, Canis familiaris
gcgggttgtcaaaatcctttagcct

SEQ ID NO: 95454 - DNA, 25 bp, Canis familiaris
gcccaattgtcaaaatctctgtttg

SEQ ID NO: 95455 - DNA, 25 bp, Canis familiaris
gcccaccctgcaaattctgaatttg

SEQ ID NO: 95456 - DNA, 25 bp, Canis familiaris
gcccagcactccgaattctggtttg

SEQ ID NO: 95457 - DNA, 25 bp, Canis familiaris
gcccagaggggcttattgtgttata

SEQ ID NO: 95458 - DNA, 25 bp, Canis familiaris
gcccaagagtcgttttgtgctatag

SEQ ID NO: 95459 - DNA, 25 bp, Canis familiaris
gcccatagaggccgctcttttgaag

SEQ ID NO: 95460 - DNA, 25 bp, Canis familiaris
gccctacatggggtcatcattggaa

SEQ ID NO: 95461 - DNA, 25 bp, Canis familiaris
gccctacagaggaacacgatgtgaa

SEQ ID NO: 95462 - DNA, 25 bp, Canis familiaris
gcgactacagggaattatgcaggaa

SEQ ID NO: 95463 - DNA, 25 bp, Canis familiaris
gcgcttctcgggacaatctcagaga

SEQ ID NO: 95464 - DNA, 25 bp, Canis familiaris
gcgcgtcatcgcatcgaatctacgc

SEQ ID NO: 95465 - DNA, 25 bp, Canis familiaris
gcgcggatcatgatgccaacctctt

SEQ ID NO: 95466 - DNA, 25 bp, Canis familiaris
gcgcttctgcagactgaagacagct

SEQ ID NO: 95467 - DNA, 25 bp, Canis familiaris
gcgctgtgctcagtctatgcacgag

SEQ ID NO: 95468 - DNA, 25 bp, Canis familiaris
gcccagcagcaggctgtgacagcag

SEQ ID NO: 95469 - DNA, 25 bp, Canis familiaris
gcccagcagagggcgacacagctgc

SEQ ID NO: 95470 - DNA, 25 bp, Canis familiaris
gcccagcgacattcggcatcgctgc

SEQ ID NO: 95471 - DNA, 25 bp, Canis familiaris
gcgccagtgacattccagatgtcct

SEQ ID NO: 95472 - DNA, 25 bp, Canis familiaris
gcccatgattaatgcagatgccagc

SEQ ID NO: 95473 - DNA, 25 bp, Canis familiaris
gcccagaaagattgagagcccgagg

SEQ ID NO: 95474 - DNA, 25 bp, Canis familiaris
gcccaagagaatagagagaccccag

SEQ ID NO: 95475 - DNA, 25 bp, Canis familiaris
gcccagaaaatgccagagagaccct

SEQ ID NO: 95476 - DNA, 25 bp, Canis familiaris
gcccagaaaatgccggcggctgcgg

SEQ ID NO: 95477 - DNA, 25 bp, Canis familiaris
gcccttagatgtccggggctgcacg

SEQ ID NO: 95478 - DNA, 25 bp, Canis familiaris
gcccttagatgtccggggctgcacg

SEQ ID NO: 95479 - DNA, 25 bp, Canis familiaris
gcccttagatgtccggggctgcacg

SEQ ID NO: 95480 - DNA, 25 bp, Canis familiaris
gcccagtgaagcccgagggcgacgg

SEQ ID NO: 95481 - DNA, 25 bp, Canis familiaris
gcccagggacactgaggatctgcct

SEQ ID NO: 95482 - DNA, 25 bp, Canis familiaris
gcccaggccaacagagtgatgggtg

SEQ ID NO: 95483 - DNA, 25 bp, Canis familiaris
gcccaggtccatacagagtgatggg

SEQ ID NO: 95484 - DNA, 25 bp, Canis familiaris
gcgcctgagggctcaagtgtggagc

SEQ ID NO: 95485 - DNA, 25 bp, Canis familiaris
gcgcctgggaggcccagttggtgaa

SEQ ID NO: 95486 - DNA, 25 bp, Canis familiaris
gcccttggcacccgagatgtgggac

SEQ ID NO: 95487 - DNA, 25 bp, Canis familiaris
gcgccaaggacctggtggagaacaa

SEQ ID NO: 95488 - DNA, 25 bp, Canis familiaris
gcgccaaaacgtgtggaggcccaag

SEQ ID NO: 95489 - DNA, 25 bp, Canis familiaris
gcgccaattccgagaggagacccaa

SEQ ID NO: 95490 - DNA, 25 bp, Canis familiaris
gcccagatgccggtgggctaaacca

SEQ ID NO: 95491 - DNA, 25 bp, Canis familiaris
gcccttgctctgggaggtaacttct

SEQ ID NO: 95492 - DNA, 25 bp, Canis familiaris
gcgcaattcttgggggggacagttg

SEQ ID NO: 95493 - DNA, 25 bp, Canis familiaris
gcgccttgcttcttgaagaggtagg

SEQ ID NO: 95494 - DNA, 25 bp, Canis familiaris
gcccttcactgccatgatagctggg

SEQ ID NO: 95495 - DNA, 25 bp, Canis familiaris
gcgccatctgcagggagctggcggg

SEQ ID NO: 95496 - DNA, 25 bp, Canis familiaris
gcgaatgacagcttgcagtagcggt

SEQ ID NO: 95497 - DNA, 25 bp, Canis familiaris
gcgacgtcgctatgaacgcttggcc

SEQ ID NO: 95498 - DNA, 25 bp, Canis familiaris
gcgacgacccattcgaacgtctgcc

SEQ ID NO: 95499 - DNA, 25 bp, Canis familiaris
gcgtcaccccagtgaagaggctgcc

SEQ ID NO: 95500 - DNA, 25 bp, Canis familiaris
gcgagggccaggtgcataaagcgac

SEQ ID NO: 95501 - DNA, 25 bp, Canis familiaris
gcgcgtgtgcggcaaccgcaagaag

SEQ ID NO: 95502 - DNA, 25 bp, Canis familiaris
gcgcgggcagaagacctcaacagcc

SEQ ID NO: 95503 - DNA, 25 bp, Canis familiaris
gcgctgaggcagaaaaacgtgcacg

SEQ ID NO: 95504 - DNA, 25 bp, Canis familiaris
gcgtgcccagtacaaggtgtctggc

SEQ ID NO: 95505 - DNA, 25 bp, Canis familiaris
gcccttcattcacaacaggcttgac

SEQ ID NO: 95506 - DNA, 25 bp, Canis familiaris
gcccaggcattacgtacagtgctgc

SEQ ID NO: 95507 - DNA, 25 bp, Canis familiaris
gcccaccagtcactggagctgtcat

SEQ ID NO: 95508 - DNA, 25 bp, Canis familiaris
gcccatctatgttatgtgtctgtct

SEQ ID NO: 95509 - DNA, 25 bp, Canis familiaris
gcgcaatgccataaatttcttcatc

SEQ ID NO: 95510 - DNA, 25 bp, Canis familiaris
gcgacatcgctggagctcaatttac

SEQ ID NO: 95511 - DNA, 25 bp, Canis familiaris
gcccatcgcagatccacatttaaaa

SEQ ID NO: 95512 - DNA, 25 bp, Canis familiaris
gcccatccatggtccacaatttgag

SEQ ID NO: 95513 - DNA, 25 bp, Canis familiaris
gcccaagctggtcaccattatcaga

SEQ ID NO: 95514 - DNA, 25 bp, Canis familiaris
gcgccagagtgctgacgccttactg

SEQ ID NO: 95515 - DNA, 25 bp, Canis familiaris
gcccaacagctctactggttactgg

SEQ ID NO: 95516 - DNA, 25 bp, Canis familiaris
gcccagctgacttttgaattgcact

SEQ ID NO: 95517 - DNA, 25 bp, Canis familiaris
gcccacctctgggtgaagctgcaat

SEQ ID NO: 95518 - DNA, 25 bp, Canis familiaris
gcccaagtgcgggctggaggcttcc

SEQ ID NO: 95519 - DNA, 25 bp, Canis familiaris
gcccaagactgggccggagcttgga

SEQ ID NO: 95520 - DNA, 25 bp, Canis familiaris
gcccagaagtggtccgcaagatggg

SEQ ID NO: 95521 - DNA, 25 bp, Canis familiaris
gcccagagaagccacatagaagatg

SEQ ID NO: 95522 - DNA, 25 bp, Canis familiaris
gcgccaacagaggcaaagagggtag

SEQ ID NO: 95523 - DNA, 25 bp, Canis familiaris
gcgccccgaggaacgaggagtagcc

SEQ ID NO: 95524 - DNA, 25 bp, Canis familiaris
gcccaccggagtaggatcagagtga

SEQ ID NO: 95525 - DNA, 25 bp, Canis familiaris
gcgccagcatcgtggaggacaagct

SEQ ID NO: 95526 - DNA, 25 bp, Canis familiaris
gcgccgcatcgatgcgcagcataaa

SEQ ID NO: 95527 - DNA, 25 bp, Canis familiaris
gcgaagctaattccagaaaactttt

SEQ ID NO: 95528 - DNA, 25 bp, Canis familiaris
gcgaacatagttcccacagagcaaa

SEQ ID NO: 95529 - DNA, 25 bp, Canis familiaris
gcgacgaggttggcttcaatgctga

SEQ ID NO: 95530 - DNA, 25 bp, Canis familiaris
gcgccgtggtcacctttatggaggc

SEQ ID NO: 95531 - DNA, 25 bp, Canis familiaris
gcgctcagtgtggtcaaatttgaag

SEQ ID NO: 95532 - DNA, 25 bp, Canis familiaris
gcgctgtgtgctgaaaattggggaa

SEQ ID NO: 95533 - DNA, 25 bp, Canis familiaris
gcgcatgtctcagcaggacttggtc

SEQ ID NO: 95534 - DNA, 25 bp, Canis familiaris
gcgcttctcgtaagttgttccgcat

SEQ ID NO: 95535 - DNA, 25 bp, Canis familiaris
gcgtattattaaagtttgctgcagt

SEQ ID NO: 95536 - DNA, 25 bp, Canis familiaris
gcgtattcatctataaattgccttt

SEQ ID NO: 95537 - DNA, 25 bp, Canis familiaris
gcgacaggcactagtaagtccctcc

SEQ ID NO: 95538 - DNA, 25 bp, Canis familiaris
gcgacgtcatcaacgatggctaccc

SEQ ID NO: 95539 - DNA, 25 bp, Canis familiaris
gcgacgaacgtccaggaacagccaa

SEQ ID NO: 95540 - DNA, 25 bp, Canis familiaris
aaatgtatctattgagaatattcta

SEQ ID NO: 95541 - DNA, 25 bp, Canis familiaris
gcgccctcaagttcatcaagaagcg

SEQ ID NO: 95542 - DNA, 25 bp, Canis familiaris
gcgccccaaatctattcacagagat

SEQ ID NO: 95543 - DNA, 25 bp, Canis familiaris
gcccatctgcgagtcggtcaaggag

SEQ ID NO: 95544 - DNA, 25 bp, Canis familiaris
gcccactgacctctgtagggcagtg

SEQ ID NO: 95545 - DNA, 25 bp, Canis familiaris
gcccaggaggccgtgtgagggcggc

SEQ ID NO: 95546 - DNA, 25 bp, Canis familiaris
gcccagcagggctgtgggcgggggc

SEQ ID NO: 95547 - DNA, 25 bp, Canis familiaris
gcccaagcgcaaggcggcagcgggc

SEQ ID NO: 95548 - DNA, 25 bp, Canis familiaris
gcccacagccactggctatctgggc

SEQ ID NO: 95549 - DNA, 25 bp, Canis familiaris
gcccacacagcctggtatgcagtgg

SEQ ID NO: 95550 - DNA, 25 bp, Canis familiaris
gcccatcatcagcaaggagaactgg

SEQ ID NO: 95551 - DNA, 25 bp, Canis familiaris
gcccactgggaaatagaactgactc

SEQ ID NO: 95552 - DNA, 25 bp, Canis familiaris
gcgccactggtgaatagggattgat

SEQ ID NO: 95553 - DNA, 25 bp, Canis familiaris
gcgccaagggaaagggttgcgtgcc

SEQ ID NO: 95554 - DNA, 25 bp, Canis familiaris
gcgctccagggtatgggtctgcgcc

SEQ ID NO: 95555 - DNA, 25 bp, Canis familiaris
gcccagctgggggagggatcagccc

SEQ ID NO: 95556 - DNA, 25 bp, Canis familiaris
gcccaggtgggacgctggatggcac

SEQ ID NO: 95557 - DNA, 25 bp, Canis familiaris
gcccatgagctgggactgctggtca

SEQ ID NO: 95558 - DNA, 25 bp, Canis familiaris
gcccatgcagaggtcactgcgttac

SEQ ID NO: 95559 - DNA, 25 bp, Canis familiaris
gcccatgggagaacgtgtgtcaccg

SEQ ID NO: 95560 - DNA, 25 bp, Canis familiaris
gcccaggatgaaagctgtcctcctc

SEQ ID NO: 95561 - DNA, 25 bp, Canis familiaris
gcccaaatagatacatctccctcac

SEQ ID NO: 95562 - DNA, 25 bp, Canis familiaris
gcccagagatggttgacattcctca

SEQ ID NO: 95563 - DNA, 25 bp, Canis familiaris
gcccaaagaaggtcttcccggaatg

SEQ ID NO: 95564 - DNA, 25 bp, Canis familiaris
taattataccaggcccttccggaat

SEQ ID NO: 95565 - DNA, 25 bp, Canis familiaris
gcgtattacgaggccctttcacgca

SEQ ID NO: 95566 - DNA, 25 bp, Canis familiaris
gcgtgtgtagcgtgccactttaaac

SEQ ID NO: 95567 - DNA, 25 bp, Canis familiaris
gcgtgacttcgaaggcacgttccaa

SEQ ID NO: 95568 - DNA, 25 bp, Canis familiaris
gctgaacccaataggacgtccgaaa

SEQ ID NO: 95569 - DNA, 25 bp, Canis familiaris
gcgaagctccactagtaggacacga

SEQ ID NO: 95570 - DNA, 25 bp, Canis familiaris
gcagttatcgacggtagagtccaag

SEQ ID NO: 95571 - DNA, 25 bp, Canis familiaris
gcgcattacgacgggctaacctgcg

SEQ ID NO: 95572 - DNA, 25 bp, Canis familiaris
gcgatacctacagagcttacttgca

SEQ ID NO: 95573 - DNA, 25 bp, Canis familiaris
gcgatatcctctgacgtatcatctt

SEQ ID NO: 95574 - DNA, 25 bp, Canis familiaris
gcgaataacattccattgtatgctt

SEQ ID NO: 95575 - DNA, 25 bp, Canis familiaris
gcgaataaatctgtgtttccttagt

SEQ ID NO: 95576 - DNA, 25 bp, Canis familiaris
gctgagaaattcgggccccttttat

SEQ ID NO: 95577 - DNA, 25 bp, Canis familiaris
gctgcatgaaaccggtctaactact

SEQ ID NO: 95578 - DNA, 25 bp, Canis familiaris
gcgcgaacagaacgttagacttttc

SEQ ID NO: 95579 - DNA, 25 bp, Canis familiaris
gcgcaaaaggagctgacaatcatgt

SEQ ID NO: 95580 - DNA, 25 bp, Canis familiaris
gcgaaattggccttgacagattcac

SEQ ID NO: 95581 - DNA, 25 bp, Canis familiaris
gcgaagtttcattttagcatgtcca

SEQ ID NO: 95582 - DNA, 25 bp, Canis familiaris
gcgaattttactcttgcttatgcac

SEQ ID NO: 95583 - DNA, 25 bp, Canis familiaris
gcgacttttagtcctggcttgtttt

SEQ ID NO: 95584 - DNA, 25 bp, Canis familiaris
gcgactgtttcaggggttttctctt

SEQ ID NO: 95585 - DNA, 25 bp, Canis familiaris
gcgacttctcctgaggaggttcctg

SEQ ID NO: 95586 - DNA, 25 bp, Canis familiaris
gcgcattttcctggagagagagggt

SEQ ID NO: 95587 - DNA, 25 bp, Canis familiaris
gcgccgtgggtggagcaggaggggc

SEQ ID NO: 95588 - DNA, 25 bp, Canis familiaris
gcccagtggggcaggcaacgaggcc

SEQ ID NO: 95589 - DNA, 25 bp, Canis familiaris
gcccaggtgcagcccgataaagagc

SEQ ID NO: 95590 - DNA, 25 bp, Canis familiaris
gcccagggaccccatgatgcagggc

SEQ ID NO: 95591 - DNA, 25 bp, Canis familiaris
gcccagtgagaccgcgggcaggtac

SEQ ID NO: 95592 - DNA, 25 bp, Canis familiaris
gcccagctaaaggccaggtggtcac

SEQ ID NO: 95593 - DNA, 25 bp, Canis familiaris
gcccagctcaaacagaaggtcatga

SEQ ID NO: 95594 - DNA, 25 bp, Canis familiaris
gcccactccaattcagcgatgtgtg

SEQ ID NO: 95595 - DNA, 25 bp, Canis familiaris
gcccactccacagcagcagtggtgg

SEQ ID NO: 95596 - DNA, 25 bp, Canis familiaris
gcgccctcctcaacagaagagtggt

SEQ ID NO: 95597 - DNA, 25 bp, Canis familiaris
gcgaacaccatcaccaaatgaagct

SEQ ID NO: 95598 - DNA, 25 bp, Canis familiaris
gcgaagcctgcaaaaataaaaatga

SEQ ID NO: 95599 - DNA, 25 bp, Canis familiaris
gcgagatccctccaaaatcaagtgg

SEQ ID NO: 95600 - DNA, 25 bp, Canis familiaris
gcgagatccctccaaaatcaagtgg

SEQ ID NO: 95601 - DNA, 25 bp, Canis familiaris
gcgagaccccactaacatcaaatgg

SEQ ID NO: 95602 - DNA, 25 bp, Canis familiaris
gcgcacagctcagtactacagcatc

SEQ ID NO: 95603 - DNA, 25 bp, Canis familiaris
gcgccgctatctttgagacagaaag

SEQ ID NO: 95604 - DNA, 25 bp, Canis familiaris
gcgccgcagtctggaagaagagcac

SEQ ID NO: 95605 - DNA, 25 bp, Canis familiaris
gcgcactgcccaagacgaaagagcc

SEQ ID NO: 95606 - DNA, 25 bp, Canis familiaris
gcgcctgtgccgagagatccggcgc

SEQ ID NO: 95607 - DNA, 25 bp, Canis familiaris
gcgcctttctgccggacgcgagcag

SEQ ID NO: 95608 - DNA, 25 bp, Canis familiaris
gcgccagttccccaacaaggaggcg

SEQ ID NO: 95609 - DNA, 25 bp, Canis familiaris
gcgccagtgtctaccagacaacgag

SEQ ID NO: 95610 - DNA, 25 bp, Canis familiaris
gcccaggtactccaggcaacagagc

SEQ ID NO: 95611 - DNA, 25 bp, Canis familiaris
gcccagttacgccagtatcatcggc

SEQ ID NO: 95612 - DNA, 25 bp, Canis familiaris
gcgcctgtaatcccagctactcggg

SEQ ID NO: 95613 - DNA, 25 bp, Canis familiaris
gcgcatgcttttcacagtgactagc

SEQ ID NO: 95614 - DNA, 25 bp, Canis familiaris
gcgctttctcaggatctggtttgcc

SEQ ID NO: 95615 - DNA, 25 bp, Canis familiaris
gcgctttctcaggatctggtttgcc

SEQ ID NO: 95616 - DNA, 25 bp, Canis familiaris
gcgcgtgccaaggacggtcttggcc

SEQ ID NO: 95617 - DNA, 25 bp, Canis familiaris
gcgccgctagaggtgaaattcttgg

SEQ ID NO: 95618 - DNA, 25 bp, Canis familiaris
gcgcggcgtcaattcaaaacttggt

SEQ ID NO: 95619 - DNA, 25 bp, Canis familiaris
gcgactcggacatccagaactttgt

SEQ ID NO: 95620 - DNA, 25 bp, Canis familiaris
gcgtatcgaggcacctgtacttggc

SEQ ID NO: 95621 - DNA, 25 bp, Canis familiaris
gcgaaccatcagacccatggacatt

SEQ ID NO: 95622 - DNA, 25 bp, Canis familiaris
gcgagtcgaagtggccatcacattt

SEQ ID NO: 95623 - DNA, 25 bp, Canis familiaris
gcgattgcgcaatgccataaatttc

SEQ ID NO: 95624 - DNA, 25 bp, Canis familiaris
gcgatcgctgccaggatatacgtaa

SEQ ID NO: 95625 - DNA, 25 bp, Canis familiaris
gcgctctgtgccacagatgtgaagt

SEQ ID NO: 95626 - DNA, 25 bp, Canis familiaris
gcgcctgcgctgcagagacgatagt

SEQ ID NO: 95627 - DNA, 25 bp, Canis familiaris
gcgccggcaggatgggcaagtgtcg

SEQ ID NO: 95628 - DNA, 25 bp, Canis familiaris
gcccagcgaggatcccaggtgggac

SEQ ID NO: 95629 - DNA, 25 bp, Canis familiaris
gcccagcagggagcccaatgcaggc

SEQ ID NO: 95630 - DNA, 25 bp, Canis familiaris
gcccagcagggagccagagataagt

SEQ ID NO: 95631 - DNA, 25 bp, Canis familiaris
gcccacgggaacagagtgtcagatc

SEQ ID NO: 95632 - DNA, 25 bp, Canis familiaris
gcccaaggagaacagcacgctcaac

SEQ ID NO: 95633 - DNA, 25 bp, Canis familiaris
gcccagcggcaggagggacgcgggc

SEQ ID NO: 95634 - DNA, 25 bp, Canis familiaris
gcgccaggacagaagcgggcactag

SEQ ID NO: 95635 - DNA, 25 bp, Canis familiaris
gcccagagcaagcggggcatcctga

SEQ ID NO: 95636 - DNA, 25 bp, Canis familiaris
gcccagaaggagcggtgctgtctca

SEQ ID NO: 95637 - DNA, 25 bp, Canis familiaris
gcgccaaatccgctgagatggctct

SEQ ID NO: 95638 - DNA, 25 bp, Canis familiaris
gcgcacagagattgagcgtcttgac

SEQ ID NO: 95639 - DNA, 25 bp, Canis familiaris
gcgcacagagcgtatcatctttgta

SEQ ID NO: 95640 - DNA, 25 bp, Canis familiaris
gcccagagtgtgacatggctgttga

SEQ ID NO: 95641 - DNA, 25 bp, Canis familiaris
gcgccagaagtgtcatgctgcagca

SEQ ID NO: 95642 - DNA, 25 bp, Canis familiaris
gcgcatcagagaaaatgtggcacag

SEQ ID NO: 95643 - DNA, 25 bp, Canis familiaris
gcgataacagtcatgtggagatgaa

SEQ ID NO: 95644 - DNA, 25 bp, Canis familiaris
gcgaaatcattggtggcaatgacaa

SEQ ID NO: 95645 - DNA, 25 bp, Canis familiaris
gcccagcaagtggtggatcaggcca

SEQ ID NO: 95646 - DNA, 25 bp, Canis familiaris
gcccagcaggtggcatgcggggcgc

SEQ ID NO: 95647 - DNA, 25 bp, Canis familiaris
gcccagtgcaaggcagcaaaggccc

SEQ ID NO: 95648 - DNA, 25 bp, Canis familiaris
gctccattaacctaaatgtagctct

SEQ ID NO: 95649 - DNA, 25 bp, Canis familiaris
gcgcctttatcacacattctggctc

SEQ ID NO: 95650 - DNA, 25 bp, Canis familiaris
gcgcgcctgtaatcccagctactcg

SEQ ID NO: 95651 - DNA, 25 bp, Canis familiaris
gcgcgcgcctgtaatcccagctact

SEQ ID NO: 95652 - DNA, 25 bp, Canis familiaris
gcgccgagctattcatcagtgcagc

SEQ ID NO: 95653 - DNA, 25 bp, Canis familiaris
gcgcctggtcaccagggctgctttt

SEQ ID NO: 95654 - DNA, 25 bp, Canis familiaris
gcgcctggtcaccagggctgctttt

SEQ ID NO: 95655 - DNA, 25 bp, Canis familiaris
gcgcctggtcaccagggctgccatt

SEQ ID NO: 95656 - DNA, 25 bp, Canis familiaris
gcgccatgttcagcacagtgggctt

SEQ ID NO: 95657 - DNA, 25 bp, Canis familiaris
gcccactgatctgcgatggtgtgct

SEQ ID NO: 95658 - DNA, 25 bp, Canis familiaris
gcccaccatctcagaggttctatca

SEQ ID NO: 95659 - DNA, 25 bp, Canis familiaris
gctccacctcatcaaggacttaaat

SEQ ID NO: 95660 - DNA, 25 bp, Canis familiaris
gcccacactcagcccaaatataaaa

SEQ ID NO: 95661 - DNA, 25 bp, Canis familiaris
gcccagcgctaagcgacgctataaa

SEQ ID NO: 95662 - DNA, 25 bp, Canis familiaris
gcgccatggtgaaggtgacgttcaa

SEQ ID NO: 95663 - DNA, 25 bp, Canis familiaris
gcgcactgtgtgatttgattgggga

SEQ ID NO: 95664 - DNA, 25 bp, Canis familiaris
gcgcgactatgttggtgttgggggg

SEQ ID NO: 95665 - DNA, 25 bp, Canis familiaris
gctggactcaggttagtttggggtg

SEQ ID NO: 95666 - DNA, 25 bp, Canis familiaris
gctggatcatgctgaattttggggt

SEQ ID NO: 95667 - DNA, 25 bp, Canis familiaris
gcgtatcttggtttgtggggaatga

SEQ ID NO: 95668 - DNA, 25 bp, Canis familiaris
gctgcaatctggtttttggggggtt

SEQ ID NO: 95669 - DNA, 25 bp, Canis familiaris
gcgcagtctgggttttgagtgggca

SEQ ID NO: 95670 - DNA, 25 bp, Canis familiaris
gcgcagtcgaggtcgttgtgggagt

SEQ ID NO: 95671 - DNA, 25 bp, Canis familiaris
gcccacgctggacattgtcgcaagt

SEQ ID NO: 95672 - DNA, 25 bp, Canis familiaris
gcgaacgtgggcaagttgctcaagg

SEQ ID NO: 95673 - DNA, 25 bp, Canis familiaris
gcggtcgttaaagttgtataggagg

SEQ ID NO: 95674 - DNA, 25 bp, Canis familiaris
gcgagtttcgaattgttgttcgggg

SEQ ID NO: 95675 - DNA, 25 bp, Canis familiaris
gcgcaaaacgtttttgttgccctgg

SEQ ID NO: 95676 - DNA, 25 bp, Canis familiaris
gcgagaaccgttttaggtgtcctgg

SEQ ID NO: 95677 - DNA, 25 bp, Canis familiaris
gcgtgaaccttgttcggttgcgacg

SEQ ID NO: 95678 - DNA, 25 bp, Canis familiaris
gcgtgcaaggttttcgcggcacaac

SEQ ID NO: 95679 - DNA, 25 bp, Canis familiaris
gcccaaggtggagcagctgtcgaac

SEQ ID NO: 95680 - DNA, 25 bp, Canis familiaris
gcccaatcggaagagctgtgcgcaa

SEQ ID NO: 95681 - DNA, 25 bp, Canis familiaris
gcccacataaaaaacgctctaaatc

SEQ ID NO: 95682 - DNA, 25 bp, Canis familiaris
gcccacatgaaacaacagcaaaata

SEQ ID NO: 95683 - DNA, 25 bp, Canis familiaris
gcgctgaagaaactcaacaagaata

SEQ ID NO: 95684 - DNA, 25 bp, Canis familiaris
gcgctggaccagctcaagcaggtca

SEQ ID NO: 95685 - DNA, 25 bp, Canis familiaris
gcgcaagacggaccagagcgaaagc

SEQ ID NO: 95686 - DNA, 25 bp, Canis familiaris
gcgcaagacggaccagagcgaaagc

SEQ ID NO: 95687 - DNA, 25 bp, Canis familiaris
gcccagctccggactaacaggaatg

SEQ ID NO: 95688 - DNA, 25 bp, Canis familiaris
gcccagcccaggaaacttgtgcaag

SEQ ID NO: 95689 - DNA, 25 bp, Canis familiaris
gcagccccgggaaactaacatagta

SEQ ID NO: 95690 - DNA, 25 bp, Canis familiaris
gcgcccacttgttctaggaaacagt

SEQ ID NO: 95691 - DNA, 25 bp, Canis familiaris
gcccaagtctcttctggaaggtctt

SEQ ID NO: 95692 - DNA, 25 bp, Canis familiaris
gcgaaatcctgtttgggatggtttt

SEQ ID NO: 95693 - DNA, 25 bp, Canis familiaris
gcgataattttatagtgatgcagcg

SEQ ID NO: 95694 - DNA, 25 bp, Canis familiaris
gcgcagtatttgacttcagcggcac

SEQ ID NO: 95695 - DNA, 25 bp, Canis familiaris
gctcagtggctttctaaaaccaaat

SEQ ID NO: 95696 - DNA, 25 bp, Canis familiaris
gtaggtcgtatttcgaaccgtcatt

SEQ ID NO: 95697 - DNA, 25 bp, Canis familiaris
gtgggtcgtcaaatcgaattaaacg

SEQ ID NO: 95698 - DNA, 25 bp, Canis familiaris
gcgctggtttggactcgaacataat

SEQ ID NO: 95699 - DNA, 25 bp, Canis familiaris
gcgtggtggaggatcgaccagtgtg

SEQ ID NO: 95700 - DNA, 25 bp, Canis familiaris
gcgcgtgaggaagttcgacctgtgc

SEQ ID NO: 95701 - DNA, 25 bp, Canis familiaris
gctcgttggctagctaaatagctgc

SEQ ID NO: 95702 - DNA, 25 bp, Canis familiaris
gctcgtacgtcagatcactgatcac

SEQ ID NO: 95703 - DNA, 25 bp, Canis familiaris
gcgactatttcagcacaagaaccct

SEQ ID NO: 95704 - DNA, 25 bp, Canis familiaris
gcgctgttttagcaccagagagccc

SEQ ID NO: 95705 - DNA, 25 bp, Canis familiaris
gcgctgatacttggaacccagactc

SEQ ID NO: 95706 - DNA, 25 bp, Canis familiaris
gcgccatgaggtgagcgcccagagc

SEQ ID NO: 95707 - DNA, 25 bp, Canis familiaris
gcccagcagggcttcaacaagatct

SEQ ID NO: 95708 - DNA, 25 bp, Canis familiaris
gcgaagccagtgctacaaagatgct

SEQ ID NO: 95709 - DNA, 25 bp, Canis familiaris
gcgcttactgtgctccacagagtgt

SEQ ID NO: 95710 - DNA, 25 bp, Canis familiaris
gcgttcagtcataatcccacagatg

SEQ ID NO: 95711 - DNA, 25 bp, Canis familiaris
gcgttatgtctgaatgtgcaagtgc

SEQ ID NO: 95712 - DNA, 25 bp, Canis familiaris
gcgccggattattgctgcaactggc

SEQ ID NO: 95713 - DNA, 25 bp, Canis familiaris
gcgccgagcttgaagtcgagcgtgc

SEQ ID NO: 95714 - DNA, 25 bp, Canis familiaris
gcgcctaggcgaagtcaggagtcaa

SEQ ID NO: 95715 - DNA, 25 bp, Canis familiaris
gcgccaaggcgaagcaggacgtcaa

SEQ ID NO: 95716 - DNA, 25 bp, Canis familiaris
gcgccgagagcgatgggcatctctc

SEQ ID NO: 95717 - DNA, 25 bp, Canis familiaris
gcgccgaggatgtgagtcctgctcg

SEQ ID NO: 95718 - DNA, 25 bp, Canis familiaris
gcgctgagggtgtatgcagatcttc

SEQ ID NO: 95719 - DNA, 25 bp, Canis familiaris
gcgagaggggtgagatccctgtgcc

SEQ ID NO: 95720 - DNA, 25 bp, Canis familiaris
gcgaagccggtggagggtctgagct

SEQ ID NO: 95721 - DNA, 25 bp, Canis familiaris
gcgctaccggtgcatgacaccatac

SEQ ID NO: 95722 - DNA, 25 bp, Canis familiaris
gcccacacgtgatgctgacactaga

SEQ ID NO: 95723 - DNA, 25 bp, Canis familiaris
gcccagccgctgacgtgaagatgag

SEQ ID NO: 95724 - DNA, 25 bp, Canis familiaris
gcccaccgcagcaggaggcatagga

SEQ ID NO: 95725 - DNA, 25 bp, Canis familiaris
gcgcttcccacaggctgtggcaagg

SEQ ID NO: 95726 - DNA, 25 bp, Canis familiaris
gcgctgccaaggctgtgggcaaggt

SEQ ID NO: 95727 - DNA, 25 bp, Canis familiaris
gcccagcgagtgcggtgaccagggc

SEQ ID NO: 95728 - DNA, 25 bp, Canis familiaris
gcgccccctggacatatcgatgggc

SEQ ID NO: 95729 - DNA, 25 bp, Canis familiaris
gcccacaactggccaattcggggcc

SEQ ID NO: 95730 - DNA, 25 bp, Canis familiaris
gcgccacacgggcattggcgaggcc

SEQ ID NO: 95731 - DNA, 25 bp, Canis familiaris
gcgaccacactacggagggaagcca

SEQ ID NO: 95732 - DNA, 25 bp, Canis familiaris
gcgacccggagccgggccaaagatg

SEQ ID NO: 95733 - DNA, 25 bp, Canis familiaris
gcgcactcggggaggctggagaagg

SEQ ID NO: 95734 - DNA, 25 bp, Canis familiaris
gcgcccgagccgaggaggatgaaga

SEQ ID NO: 95735 - DNA, 25 bp, Canis familiaris
gcccactggccatggagaggatcaa

SEQ ID NO: 95736 - DNA, 25 bp, Canis familiaris
gcgcgagctggagccgaaggtccag

SEQ ID NO: 95737 - DNA, 25 bp, Canis familiaris
gcgctatcggcggccagaaagtcac

SEQ ID NO: 95738 - DNA, 25 bp, Canis familiaris
gcgcgatggtctccggaaagtagcc

SEQ ID NO: 95739 - DNA, 25 bp, Canis familiaris
gcgcctggccgccatggagaagaag

SEQ ID NO: 95740 - DNA, 25 bp, Canis familiaris
gcgccaggcactcgttgaaggcagg

SEQ ID NO: 95741 - DNA, 25 bp, Canis familiaris
gcgacgcgatcggagtaagacgagc

SEQ ID NO: 95742 - DNA, 25 bp, Canis familiaris
gcgcagcttgaacgactaaagcaga

SEQ ID NO: 95743 - DNA, 25 bp, Canis familiaris
gcgccttactggaccaacacagaaa

SEQ ID NO: 95744 - DNA, 25 bp, Canis familiaris
gcgcctttttgattctttcgagaga

SEQ ID NO: 95745 - DNA, 25 bp, Canis familiaris
gcgcgtttttacttttcttacattg

SEQ ID NO: 95746 - DNA, 25 bp, Canis familiaris
gcggttttatcatgtatcccttctt

SEQ ID NO: 95747 - DNA, 25 bp, Canis familiaris
gcgttatgtacatgatgtcacaact

SEQ ID NO: 95748 - DNA, 25 bp, Canis familiaris
gcgcttcaaaaatttaacattcctt

SEQ ID NO: 95749 - DNA, 25 bp, Canis familiaris
gcgattcaaaattcaaaactctccg

SEQ ID NO: 95750 - DNA, 25 bp, Canis familiaris
gcgctgtaagaagcaacaacctctc

SEQ ID NO: 95751 - DNA, 25 bp, Canis familiaris
gcgcgaaaggatggcgacacccgtc

SEQ ID NO: 95752 - DNA, 25 bp, Canis familiaris
gcgaaaagggctggaaccgaacact

SEQ ID NO: 95753 - DNA, 25 bp, Canis familiaris
gcgaaaagccctggaaccaaacact

SEQ ID NO: 95754 - DNA, 25 bp, Canis familiaris
gcggaaattccgcagacgcaagccc

SEQ ID NO: 95755 - DNA, 25 bp, Canis familiaris
gcgctgatattaaggggcccaaggc

SEQ ID NO: 95756 - DNA, 25 bp, Canis familiaris
gcgtctcattagagtttccaagtga

SEQ ID NO: 95757 - DNA, 25 bp, Canis familiaris
gcgagatatctcaaaatggttcaag

SEQ ID NO: 95758 - DNA, 25 bp, Canis familiaris
gcgtatgtctgcagataggttaccc

SEQ ID NO: 95759 - DNA, 25 bp, Canis familiaris
gcagaagtcgggaaaattgaaccct

SEQ ID NO: 95760 - DNA, 25 bp, Canis familiaris
gcgggtcgggtattcttgaaactct

SEQ ID NO: 95761 - DNA, 25 bp, Canis familiaris
gcgggatggtggtttttctgaccct

SEQ ID NO: 95762 - DNA, 25 bp, Canis familiaris
gcgaggagggctcttttatgcccct

SEQ ID NO: 95763 - DNA, 25 bp, Canis familiaris
gcgatgcggcggcgttattcccatg

SEQ ID NO: 95764 - DNA, 25 bp, Canis familiaris
gcgatgcggcggcgttattcccatg

SEQ ID NO: 95765 - DNA, 25 bp, Canis familiaris
gctaggggccggatatggcacaagc

SEQ ID NO: 95766 - DNA, 25 bp, Canis familiaris
gcttcgggcgggatgtggacgatga

SEQ ID NO: 95767 - DNA, 25 bp, Canis familiaris
gcgtcgccgcagcggtgggaaggaa

SEQ ID NO: 95768 - DNA, 25 bp, Canis familiaris
gcgctttgcgagcgggctcgcaggc

SEQ ID NO: 95769 - DNA, 25 bp, Canis familiaris
gcgttctttggttggccatggtcgc

SEQ ID NO: 95770 - DNA, 25 bp, Canis familiaris
gcgtctttcttttcagatcgtgtac

SEQ ID NO: 95771 - DNA, 25 bp, Canis familiaris
gcgtttctcagcataaacttatccc

SEQ ID NO: 95772 - DNA, 25 bp, Canis familiaris
gcgcctatctcattcagaatatttt

SEQ ID NO: 95773 - DNA, 25 bp, Canis familiaris
gcgcctacactagtgaatattatca

SEQ ID NO: 95774 - DNA, 25 bp, Canis familiaris
gcgtctagagtccgacagttctgct

SEQ ID NO: 95775 - DNA, 25 bp, Canis familiaris
gcgacaacaatcagcatctcttctg

SEQ ID NO: 95776 - DNA, 25 bp, Canis familiaris
gcagacaaagcccaattttccggaa

SEQ ID NO: 95777 - DNA, 25 bp, Canis familiaris
gcgaacaacagtctccatatccgag

SEQ ID NO: 95778 - DNA, 25 bp, Canis familiaris
gcgcacgaacttggtgcctacacag

SEQ ID NO: 95779 - DNA, 25 bp, Canis familiaris
gcgatggacatcctcttgattgacc

SEQ ID NO: 95780 - DNA, 25 bp, Canis familiaris
gcgcagcacttcatcttcatgtgcc

SEQ ID NO: 95781 - DNA, 25 bp, Canis familiaris
gcgcagctttcaatattagtctcca

SEQ ID NO: 95782 - DNA, 25 bp, Canis familiaris
gctcagtcggttaaatgtccgattc

SEQ ID NO: 95783 - DNA, 25 bp, Canis familiaris
gcaaggggtttatgtcccttctcta

SEQ ID NO: 95784 - DNA, 25 bp, Canis familiaris
gcaaggttgtttgaggacctaattc

SEQ ID NO: 95785 - DNA, 25 bp, Canis familiaris
gcaaggtttttatcgacactatccc

SEQ ID NO: 95786 - DNA, 25 bp, Canis familiaris
gcggttcttattcacaacaccactg

SEQ ID NO: 95787 - DNA, 25 bp, Canis familiaris
gcgcggggaaatcaactcaagcagt

SEQ ID NO: 95788 - DNA, 25 bp, Canis familiaris
gcgcggtgcaaggaccaagtcaaag

SEQ ID NO: 95789 - DNA, 25 bp, Canis familiaris
gcgccagatgaaaaacatagtccac

SEQ ID NO: 95790 - DNA, 25 bp, Canis familiaris
gcgccaacatctaagatttgtcccc

SEQ ID NO: 95791 - DNA, 25 bp, Canis familiaris
gcgcatcctcggaatgattttaccc

SEQ ID NO: 95792 - DNA, 25 bp, Canis familiaris
gcgctcctcaggctgatttttgaga

SEQ ID NO: 95793 - DNA, 25 bp, Canis familiaris
gcgcttgtcccaggtttttgagaga

SEQ ID NO: 95794 - DNA, 25 bp, Canis familiaris
gcgctcgtacacggttgatccgtat

SEQ ID NO: 95795 - DNA, 25 bp, Canis familiaris
gcgtggaaccgactcaattcgtgtt

SEQ ID NO: 95796 - DNA, 25 bp, Canis familiaris
gcgctgcgagatgctggctatgagt

SEQ ID NO: 95797 - DNA, 25 bp, Canis familiaris
gcgctgcaggacgatgacgggcggc

SEQ ID NO: 95798 - DNA, 25 bp, Canis familiaris
gcgctcctgcaagtgcagctgaggc

SEQ ID NO: 95799 - DNA, 25 bp, Canis familiaris
gctgatgcagtaagctgcagcaagg

SEQ ID NO: 95800 - DNA, 25 bp, Canis familiaris
gcgcatgaagcggcgcagcagcgcg

SEQ ID NO: 95801 - DNA, 25 bp, Canis familiaris
gcgcatcacgggctgagctgcgcag

SEQ ID NO: 95802 - DNA, 25 bp, Canis familiaris
gcgatcaatcggttgactgcaagtt

SEQ ID NO: 95803 - DNA, 25 bp, Canis familiaris
gcgacgatcggtacactgagtgatg

SEQ ID NO: 95804 - DNA, 25 bp, Canis familiaris
gcgatcctggagatccgggatcgaa

SEQ ID NO: 95805 - DNA, 25 bp, Canis familiaris
gcgatcctggagacccgggatcgaa

SEQ ID NO: 95806 - DNA, 25 bp, Canis familiaris
gcgatcctggagacccgggatcgaa

SEQ ID NO: 95807 - DNA, 25 bp, Canis familiaris
gcgagtcagagagcccggtgaaaat

SEQ ID NO: 95808 - DNA, 25 bp, Canis familiaris
gcgctgtgcagaaggacccttggat

SEQ ID NO: 95809 - DNA, 25 bp, Canis familiaris
gcgctgcagaacccaaagttggcat

SEQ ID NO: 95810 - DNA, 25 bp, Canis familiaris
gcgcagacaacctcaagtgctgcca

SEQ ID NO: 95811 - DNA, 25 bp, Canis familiaris
gcgcgagcagatacacggaggtgtc

SEQ ID NO: 95812 - DNA, 25 bp, Canis familiaris
gcgcctggaacagggagggatacct

SEQ ID NO: 95813 - DNA, 25 bp, Canis familiaris
gcgcgctgctgaacaaggcggtgag

SEQ ID NO: 95814 - DNA, 25 bp, Canis familiaris
gcgcggtgaccgtgaggctgagcgc

SEQ ID NO: 95815 - DNA, 25 bp, Canis familiaris
gcgtccgacgagtacgtgctaagct

SEQ ID NO: 95816 - DNA, 25 bp, Canis familiaris
gcgcctcgatagcaatccttaagat

SEQ ID NO: 95817 - DNA, 25 bp, Canis familiaris
gcgcctggaaggatgacttcgcact

SEQ ID NO: 95818 - DNA, 25 bp, Canis familiaris
gcgccactgaagatctggtgtcgcc

SEQ ID NO: 95819 - DNA, 25 bp, Canis familiaris
gcgccaggacgacgcaggcatgtac

SEQ ID NO: 95820 - DNA, 25 bp, Canis familiaris
gcgccaggacactgcgtgtgtccta

SEQ ID NO: 95821 - DNA, 25 bp, Canis familiaris
gcgccaggcagagcggatgtctcag

SEQ ID NO: 95822 - DNA, 25 bp, Canis familiaris
gcgccggcggcttggtgactctaga

SEQ ID NO: 95823 - DNA, 25 bp, Canis familiaris
gcgccaatggcgaggatgactctta

SEQ ID NO: 95824 - DNA, 25 bp, Canis familiaris
gcgctcaatggcgtctggaggtggt

SEQ ID NO: 95825 - DNA, 25 bp, Canis familiaris
tcgtcagaccacctcggttgggacg

SEQ ID NO: 95826 - DNA, 25 bp, Canis familiaris
gcgtctggcaaccacgggtgggagg

SEQ ID NO: 95827 - DNA, 25 bp, Canis familiaris
gcgattgtgatatgacctggttctg

SEQ ID NO: 95828 - DNA, 25 bp, Canis familiaris
gcgattagatgttaactggacctca

SEQ ID NO: 95829 - DNA, 25 bp, Canis familiaris
gcgagagtatattaatgggaccaca

SEQ ID NO: 95830 - DNA, 25 bp, Canis familiaris
gcgagcattatgcgtaggaaggcac

SEQ ID NO: 95831 - DNA, 25 bp, Canis familiaris
gcgacatctggctgtgggtgaaggc

SEQ ID NO: 95832 - DNA, 25 bp, Canis familiaris
gcgtcccgtgaaaggtgcaaggccc

SEQ ID NO: 95833 - DNA, 25 bp, Canis familiaris
gcgccgacaggctaagtgtgcatat

SEQ ID NO: 95834 - DNA, 25 bp, Canis familiaris
gcgctggtgaggtggattgatgatg

SEQ ID NO: 95835 - DNA, 25 bp, Canis familiaris
gcgctggggcaggagtgacactgta

SEQ ID NO: 95836 - DNA, 25 bp, Canis familiaris
gcgctgtacgaggagctgaacctgc

SEQ ID NO: 95837 - DNA, 25 bp, Canis familiaris
gcgctggttgctggatcgtacacgc

SEQ ID NO: 95838 - DNA, 25 bp, Canis familiaris
gcgctagactcatatttcatgcacc

SEQ ID NO: 95839 - DNA, 25 bp, Canis familiaris
gcgcaaagacattgtttcatcctcc

SEQ ID NO: 95840 - DNA, 25 bp, Canis familiaris
gcgtctacacagttctgtatccttc

SEQ ID NO: 95841 - DNA, 25 bp, Canis familiaris
gcgtctacaacggcaagaccttcaa

SEQ ID NO: 95842 - DNA, 25 bp, Canis familiaris
gcggtcatcaagctgaagacgccca

SEQ ID NO: 95843 - DNA, 25 bp, Canis familiaris
gcgttgccaaagaaacagcccgcag

SEQ ID NO: 95844 - DNA, 25 bp, Canis familiaris
gcgcttccagagtgagacatgggcc

SEQ ID NO: 95845 - DNA, 25 bp, Canis familiaris
gcgctacatcagcacggagctgggc

SEQ ID NO: 95846 - DNA, 25 bp, Canis familiaris
gcgtaatcgtcaggcagagcatcgt

SEQ ID NO: 95847 - DNA, 25 bp, Canis familiaris
gcgttacgtcagggtatcgggacaa

SEQ ID NO: 95848 - DNA, 25 bp, Canis familiaris
gcgttcacgtcttagcttccgaacg

SEQ ID NO: 95849 - DNA, 25 bp, Canis familiaris
gcgcgtcaccaccagagttaggaac

SEQ ID NO: 95850 - DNA, 25 bp, Canis familiaris
gcgcttcaccatcaagataacacaa

SEQ ID NO: 95851 - DNA, 25 bp, Canis familiaris
gcgcttcaccatcaagataacacaa

SEQ ID NO: 95852 - DNA, 25 bp, Canis familiaris
gctgcatatcgcgccaagggcaaaa

SEQ ID NO: 95853 - DNA, 25 bp, Canis familiaris
gcgctcatcgtgttcactggagcac

SEQ ID NO: 95854 - DNA, 25 bp, Canis familiaris
gcgcacactgtaacacggagaccac

SEQ ID NO: 95855 - DNA, 25 bp, Canis familiaris
gcgtacgcaatgaagcgggacctca

SEQ ID NO: 95856 - DNA, 25 bp, Canis familiaris
gcgtagtcaggaagcgagtccactc

SEQ ID NO: 95857 - DNA, 25 bp, Canis familiaris
gcgtttcaggaacattgccacacca

SEQ ID NO: 95858 - DNA, 25 bp, Canis familiaris
gcgtaatcgacatttattcttccta

SEQ ID NO: 95859 - DNA, 25 bp, Canis familiaris
gcgtagtagcagttttgttccttca

SEQ ID NO: 95860 - DNA, 25 bp, Canis familiaris
gcgggaagctgtatggttcccctgc

SEQ ID NO: 95861 - DNA, 25 bp, Canis familiaris
gtggggcactctacagatgccagag

SEQ ID NO: 95862 - DNA, 25 bp, Canis familiaris
gcgaagggaaactaccctctctcaa

SEQ ID NO: 95863 - DNA, 25 bp, Canis familiaris
gctgaaagggaaaccgcctatttca

SEQ ID NO: 95864 - DNA, 25 bp, Canis familiaris
gcgccaaatgaagcacccgaaattc

SEQ ID NO: 95865 - DNA, 25 bp, Canis familiaris
gctgccaaggaagcaaaaaaggcta

SEQ ID NO: 95866 - DNA, 25 bp, Canis familiaris
gcgctccaacaagatgaaagaaact

SEQ ID NO: 95867 - DNA, 25 bp, Canis familiaris
gcgtcgcgcaaaaatgtctataaac

SEQ ID NO: 95868 - DNA, 25 bp, Canis familiaris
gcgagccaaagtcgttgcaaacaac

SEQ ID NO: 95869 - DNA, 25 bp, Canis familiaris
gcgacgcgctggcgttacagcgcaa

SEQ ID NO: 95870 - DNA, 25 bp, Canis familiaris
gcgcaggacttggtttctgccgaag

SEQ ID NO: 95871 - DNA, 25 bp, Canis familiaris
gcgggactgtacaccatcaggaatc

SEQ ID NO: 95872 - DNA, 25 bp, Canis familiaris
gctgtggtttccatcaacggagtgt

SEQ ID NO: 95873 - DNA, 25 bp, Canis familiaris
gcagtagttcccaaaccggaagcat

SEQ ID NO: 95874 - DNA, 25 bp, Canis familiaris
gcatcagccgtgggaaaccgttaca

SEQ ID NO: 95875 - DNA, 25 bp, Canis familiaris
gcgcagccttgtggagagatcatca

SEQ ID NO: 95876 - DNA, 25 bp, Canis familiaris
gcgccgctgctgggagagatcccct

SEQ ID NO: 95877 - DNA, 25 bp, Canis familiaris
gcgcggcgctgaaggatggcgacac

SEQ ID NO: 95878 - DNA, 25 bp, Canis familiaris
gcgcaccccagttcaggtaatggaa

SEQ ID NO: 95879 - DNA, 25 bp, Canis familiaris
gcgcgcatcgtgcaacagcaaaagc

SEQ ID NO: 95880 - DNA, 25 bp, Canis familiaris
gcgcgcaagagggcagaccgataga

SEQ ID NO: 95881 - DNA, 25 bp, Canis familiaris
gcgctcacaggatcagactctatga

SEQ ID NO: 95882 - DNA, 25 bp, Canis familiaris
gcgcaaaggagccgacatcatgtac

SEQ ID NO: 95883 - DNA, 25 bp, Canis familiaris
gcgcgccaagacgggcagcatgtac

SEQ ID NO: 95884 - DNA, 25 bp, Canis familiaris
gcgcccagctgggggatgatgtacc

SEQ ID NO: 95885 - DNA, 25 bp, Canis familiaris
gcgctcacgccagggaagattacaa

SEQ ID NO: 95886 - DNA, 25 bp, Canis familiaris
gcgcaccgccacataggagtgcatc

SEQ ID NO: 95887 - DNA, 25 bp, Canis familiaris
gcgcccagactccagaggagctggg

SEQ ID NO: 95888 - DNA, 25 bp, Canis familiaris
gcgcgcgcaagcagagagagatgtg

SEQ ID NO: 95889 - DNA, 25 bp, Canis familiaris
gcgcaggccagacagcgatgcaggc

SEQ ID NO: 95890 - DNA, 25 bp, Canis familiaris
gcgcggcagcgacatggaggaattc

SEQ ID NO: 95891 - DNA, 25 bp, Canis familiaris
gcgcgtcaccgtcatggagaagtgc

SEQ ID NO: 95892 - DNA, 25 bp, Canis familiaris
gcgactgcaacgaccagggcaagtg

SEQ ID NO: 95893 - DNA, 25 bp, Canis familiaris
gcgccccaggcaccagggcgtgatg

SEQ ID NO: 95894 - DNA, 25 bp, Canis familiaris
gcgttacagcgcaacagcagcctgc

SEQ ID NO: 95895 - DNA, 25 bp, Canis familiaris
gcgcgctacactgactggctcagcg

SEQ ID NO: 95896 - DNA, 25 bp, Canis familiaris
gcgcgctacactgactggctcagcg

SEQ ID NO: 95897 - DNA, 25 bp, Canis familiaris
gcgcagatcagcctgaaagactagg

SEQ ID NO: 95898 - DNA, 25 bp, Canis familiaris
gcgcaactgcgtacctgttatgaga

SEQ ID NO: 95899 - DNA, 25 bp, Canis familiaris
gcgctaaggatgactctggtcagag

SEQ ID NO: 95900 - DNA, 25 bp, Canis familiaris
gcgcgcaaagagccctgagggagcc

SEQ ID NO: 95901 - DNA, 25 bp, Canis familiaris
gcgctacactgactggctcagcgtg

SEQ ID NO: 95902 - DNA, 25 bp, Canis familiaris
gcgtacatccagcagtagcgctgtt

SEQ ID NO: 95903 - DNA, 25 bp, Canis familiaris
gctgttcccactttaaggttgttgt

SEQ ID NO: 95904 - DNA, 25 bp, Canis familiaris
gcgtccccagcttttcaaaagtttg

SEQ ID NO: 95905 - DNA, 25 bp, Canis familiaris
gcgtcgtcttctcttaaaatgtagg

SEQ ID NO: 95906 - DNA, 25 bp, Canis familiaris
gcgctcttgcccagtgtaaaattaa

SEQ ID NO: 95907 - DNA, 25 bp, Canis familiaris
gcaggcctggccagtacaaaggacc

SEQ ID NO: 95908 - DNA, 25 bp, Canis familiaris
gcgagcaggtccaggaccaggtgca

SEQ ID NO: 95909 - DNA, 25 bp, Canis familiaris
gcgcggttgccacttatgaaggtgc

SEQ ID NO: 95910 - DNA, 25 bp, Canis familiaris
gcgcgggtccagttctgaaagggga

SEQ ID NO: 95911 - DNA, 25 bp, Canis familiaris
gcggcaggccctattcaacaggggc

SEQ ID NO: 95912 - DNA, 25 bp, Canis familiaris
gcggcaccacggagtagaggtcgtc

SEQ ID NO: 95913 - DNA, 25 bp, Canis familiaris
gcgtccgtagtgaggaggttggctc

SEQ ID NO: 95914 - DNA, 25 bp, Canis familiaris
gctgtccctggtgaaggggtcgcgc

SEQ ID NO: 95915 - DNA, 25 bp, Canis familiaris
gctggcccttgaaaatccgggggag

SEQ ID NO: 95916 - DNA, 25 bp, Canis familiaris
gcgcgatcctggagacccgggatcg

SEQ ID NO: 95917 - DNA, 25 bp, Canis familiaris
gcgcgatcctggagacccgggatcg

SEQ ID NO: 95918 - DNA, 25 bp, Canis familiaris
gcgcgatcctggagatccgggatcg

SEQ ID NO: 95919 - DNA, 25 bp, Canis familiaris
gcggacatgcttgaatccgaggttt

SEQ ID NO: 95920 - DNA, 25 bp, Canis familiaris
gctgtaatccctaactctagggtcc

SEQ ID NO: 95921 - DNA, 25 bp, Canis familiaris
gcgttatcactctcattaatggcgg

SEQ ID NO: 95922 - DNA, 25 bp, Canis familiaris
gcgtctatcaccacctatgagacct

SEQ ID NO: 95923 - DNA, 25 bp, Canis familiaris
gcgcctgaccactcttatgatgagg

SEQ ID NO: 95924 - DNA, 25 bp, Canis familiaris
gcgcttgattcaacctttagtggtc

SEQ ID NO: 95925 - DNA, 25 bp, Canis familiaris
gcgtgtgttcaccttggaaatgttc

SEQ ID NO: 95926 - DNA, 25 bp, Canis familiaris
gcgtgtgtggcagttttaagttatt

SEQ ID NO: 95927 - DNA, 25 bp, Canis familiaris
gcgtcctgtcaactcttggatttat

SEQ ID NO: 95928 - DNA, 25 bp, Canis familiaris
gcgtccgcatgctaatcgcttttta

SEQ ID NO: 95929 - DNA, 25 bp, Canis familiaris
gcgacgcgagatatgcagtgtgttt

SEQ ID NO: 95930 - DNA, 25 bp, Canis familiaris
gcgcatcggacaagtgcagctgctg

SEQ ID NO: 95931 - DNA, 25 bp, Canis familiaris
gcgcagcgagtcaagtgtgcgagga

SEQ ID NO: 95932 - DNA, 25 bp, Canis familiaris
gcgcacgagctctgggagctggcag

SEQ ID NO: 95933 - DNA, 25 bp, Canis familiaris
gcgcaatgagctggaggagatgcag

SEQ ID NO: 95934 - DNA, 25 bp, Canis familiaris
gcgcacacgcagcagttgagcagaa

SEQ ID NO: 95935 - DNA, 25 bp, Canis familiaris
gcgctgccgcgcagcttgaacgact

SEQ ID NO: 95936 - DNA, 25 bp, Canis familiaris
gcgcgccttgcttcttgaagaggta

SEQ ID NO: 95937 - DNA, 25 bp, Canis familiaris
gcgcctgcttcttttaagtgtatgc

SEQ ID NO: 95938 - DNA, 25 bp, Canis familiaris
gcgcgcccatttatatgtgtgtgtc

SEQ ID NO: 95939 - DNA, 25 bp, Canis familiaris
gcgcccaggtgtactttgatgctgt

SEQ ID NO: 95940 - DNA, 25 bp, Canis familiaris
gcgcacgacggtagctactactgtc

SEQ ID NO: 95941 - DNA, 25 bp, Canis familiaris
gcgacgacgagtacgactatctctt

SEQ ID NO: 95942 - DNA, 25 bp, Canis familiaris
gcgagaacggtaacacttttctgtt

SEQ ID NO: 95943 - DNA, 25 bp, Canis familiaris
gcgtcaacaggtaacacttccgctg

SEQ ID NO: 95944 - DNA, 25 bp, Canis familiaris
gcgtaccagggagatcttttgccta

SEQ ID NO: 95945 - DNA, 25 bp, Canis familiaris
gcgttcctgaggtgagagcttttta

SEQ ID NO: 95946 - DNA, 25 bp, Canis familiaris
gcgggctatggtgaggattttttgg

SEQ ID NO: 95947 - DNA, 25 bp, Canis familiaris
gcgcttgtagccgttggttttgttg

SEQ ID NO: 95948 - DNA, 25 bp, Canis familiaris
gcgcttgatcacgcttagtggtctc

SEQ ID NO: 95949 - DNA, 25 bp, Canis familiaris
gcgctggcaagcccgaatcggttta

SEQ ID NO: 95950 - DNA, 25 bp, Canis familiaris
gcggctcggaccgagcagggttttc

SEQ ID NO: 95951 - DNA, 25 bp, Canis familiaris
gcgccggtgtccgggaaggtgttca

SEQ ID NO: 95952 - DNA, 25 bp, Canis familiaris
gctccgtggcttgttggggatttaa

SEQ ID NO: 95953 - DNA, 25 bp, Canis familiaris
gctccttggaactttggtggtttgc

SEQ ID NO: 95954 - DNA, 25 bp, Canis familiaris
gcgcgcctggaacagggagggatac

SEQ ID NO: 95955 - DNA, 25 bp, Canis familiaris
gcgcgcgggagagagaggagaggaa

SEQ ID NO: 95956 - DNA, 25 bp, Canis familiaris
gcgcacgtgggatcgaagaagttac

SEQ ID NO: 95957 - DNA, 25 bp, Canis familiaris
gcgatgccgggatcaaagtctgttc

SEQ ID NO: 95958 - DNA, 25 bp, Canis familiaris
gcgcgatgccgggatcaaagtctgt

SEQ ID NO: 95959 - DNA, 25 bp, Canis familiaris
gcgcgtgctgaggctatcaaggctc

SEQ ID NO: 95960 - DNA, 25 bp, Canis familiaris
gcgataggagctgatgaagcgtagg

SEQ ID NO: 95961 - DNA, 25 bp, Canis familiaris
gcgtcaggatcacgatggtcttgag

SEQ ID NO: 95962 - DNA, 25 bp, Canis familiaris
gcgactgcgacgttcgatcttgcat

SEQ ID NO: 95963 - DNA, 25 bp, Canis familiaris
gcgaccgactacatgcacttgaatt

SEQ ID NO: 95964 - DNA, 25 bp, Canis familiaris
gcgacctacaatggtgacgtgatcc

SEQ ID NO: 95965 - DNA, 25 bp, Canis familiaris
gcgggtcaacacgaagcgtagcagc

SEQ ID NO: 95966 - DNA, 25 bp, Canis familiaris
gcggaatgacagacaacgtttgcac

SEQ ID NO: 95967 - DNA, 25 bp, Canis familiaris
gcgcgaatactctactcgtgttttt

SEQ ID NO: 95968 - DNA, 25 bp, Canis familiaris
gcgtccttcaatccgggtgtgattg

SEQ ID NO: 95969 - DNA, 25 bp, Canis familiaris
gcgttttgagaccagacgggaaggt

SEQ ID NO: 95970 - DNA, 25 bp, Canis familiaris
gcgctttcagagaccgaggggagac

SEQ ID NO: 95971 - DNA, 25 bp, Canis familiaris
gcgctgcttaagaactacgggctgc

SEQ ID NO: 95972 - DNA, 25 bp, Canis familiaris
gcgagttaaatatactggtgctcgt

SEQ ID NO: 95973 - DNA, 25 bp, Canis familiaris
gagttgtagggtgacgggtcgtcct

SEQ ID NO: 95974 - DNA, 25 bp, Canis familiaris
gcagtttggggaaccagtgcctgga

SEQ ID NO: 95975 - DNA, 25 bp, Canis familiaris
gctaggagggtaaaagggctggacg

SEQ ID NO: 95976 - DNA, 25 bp, Canis familiaris
gtcaggaacgtacaagggtcccgat

SEQ ID NO: 95977 - DNA, 25 bp, Canis familiaris
gaaggaacgtcgtgttgggtccgat

SEQ ID NO: 95978 - DNA, 25 bp, Canis familiaris
tttggcaaccttcggttggttcctg

SEQ ID NO: 95979 - DNA, 25 bp, Canis familiaris
gctgttaccatctgggttggttcct

SEQ ID NO: 95980 - DNA, 25 bp, Canis familiaris
gctgtttcttcgagactcgtgggcc

SEQ ID NO: 95981 - DNA, 25 bp, Canis familiaris
gcgttctcttcggtgattagtagac

SEQ ID NO: 95982 - DNA, 25 bp, Canis familiaris
gcgtcttatctcctctttgagggaa

SEQ ID NO: 95983 - DNA, 25 bp, Canis familiaris
gcgtctgtccgcgtttaaggggaga

SEQ ID NO: 95984 - DNA, 25 bp, Canis familiaris
gcgaggcctcccaggaaggaggagt

SEQ ID NO: 95985 - DNA, 25 bp, Canis familiaris
gcgaggacttacaggcagagggagg

SEQ ID NO: 95986 - DNA, 25 bp, Canis familiaris
gcgacgatcttagctggagatgtta

SEQ ID NO: 95987 - DNA, 25 bp, Canis familiaris
gcgacgttcgtcatggcgatgtttg

SEQ ID NO: 95988 - DNA, 25 bp, Canis familiaris
gcgagttcggagagggtgatttggt

SEQ ID NO: 95989 - DNA, 25 bp, Canis familiaris
gcgagttcgggtaggccgagatggg

SEQ ID NO: 95990 - DNA, 25 bp, Canis familiaris
gctaactgggggtaccaagatcggc

SEQ ID NO: 95991 - DNA, 25 bp, Canis familiaris
gctacggggggaccaaggtcgacag

SEQ ID NO: 95992 - DNA, 25 bp, Canis familiaris
gctagggggggccccaaacgagcag

SEQ ID NO: 95993 - DNA, 25 bp, Canis familiaris
gcggggagggacaagccaaaggact

SEQ ID NO: 95994 - DNA, 25 bp, Canis familiaris
gcgctggctggtgagctgggagaag

SEQ ID NO: 95995 - DNA, 25 bp, Canis familiaris
gcgatcgaggtctactgtggggaac

SEQ ID NO: 95996 - DNA, 25 bp, Canis familiaris
gcgtacagagcctaccgtggaggca

SEQ ID NO: 95997 - DNA, 25 bp, Canis familiaris
gcgacagcggtatcaagctctggac

SEQ ID NO: 95998 - DNA, 25 bp, Canis familiaris
gcggacgtataagtagctctgatga

SEQ ID NO: 95999 - DNA, 25 bp, Canis familiaris
gcgtgacgcgctgtctagtttcagc

SEQ ID NO: 96000 - DNA, 25 bp, Canis familiaris
gcgagaagccggacgagttcgagtc

SEQ ID NO: 96001 - DNA, 25 bp, Canis familiaris
gcgaagctgttgcacatagtccgtg

SEQ ID NO: 96002 - DNA, 25 bp, Canis familiaris
gcgaatgggcataatcaggcatcac

SEQ ID NO: 96003 - DNA, 25 bp, Canis familiaris
gcgtcggctgcaaatgcagagccca

SEQ ID NO: 96004 - DNA, 25 bp, Canis familiaris
gcgacaactgcaagatccgcatcca

SEQ ID NO: 96005 - DNA, 25 bp, Canis familiaris
gcgacagtgccaagcattcgccaac

SEQ ID NO: 96006 - DNA, 25 bp, Canis familiaris
gcgacagtgctctcttctgagcaca

SEQ ID NO: 96007 - DNA, 25 bp, Canis familiaris
gcgctcaggtccgtctgatgagcca

SEQ ID NO: 96008 - DNA, 25 bp, Canis familiaris
gcgtagggccagacagaatgccatc

SEQ ID NO: 96009 - DNA, 25 bp, Canis familiaris
gcgaaagcaccagcatgtcaggcag

SEQ ID NO: 96010 - DNA, 25 bp, Canis familiaris
gcgaaagaacatgcagctcacagct

SEQ ID NO: 96011 - DNA, 25 bp, Canis familiaris
gcgacagaagactcactaccttgaa

SEQ ID NO: 96012 - DNA, 25 bp, Canis familiaris
gctgaaatataaaccttccttgggg

SEQ ID NO: 96013 - DNA, 25 bp, Canis familiaris
gcggaagctggaagcctttttcgga

SEQ ID NO: 96014 - DNA, 25 bp, Canis familiaris
gcggaactgagtggcctatttacgt

SEQ ID NO: 96015 - DNA, 25 bp, Canis familiaris
gcggtgcaaggaccaagtcaaagtc

SEQ ID NO: 96016 - DNA, 25 bp, Canis familiaris
gcgatgtggggactgaagccagagg

SEQ ID NO: 96017 - DNA, 25 bp, Canis familiaris
gcgcactcggtactcaaacggtgga

SEQ ID NO: 96018 - DNA, 25 bp, Canis familiaris
gcgagctcctgtgtcacaaggttaa

SEQ ID NO: 96019 - DNA, 25 bp, Canis familiaris
gcgcgtcgctgtaatcactcgcgct

SEQ ID NO: 96020 - DNA, 25 bp, Canis familiaris
gcgcagtatgttcacatctgtggta

SEQ ID NO: 96021 - DNA, 25 bp, Canis familiaris
gcgctgtactggcagctgtgtggtc

SEQ ID NO: 96022 - DNA, 25 bp, Canis familiaris
gcgcaggacaggctgcattggggcc

SEQ ID NO: 96023 - DNA, 25 bp, Canis familiaris
gcgcggccagctttgtgctggagga

SEQ ID NO: 96024 - DNA, 25 bp, Canis familiaris
gcgctgtgcgagtttgacgcggtgc

SEQ ID NO: 96025 - DNA, 25 bp, Canis familiaris
gcgcttgcagcatggctgaccaact

SEQ ID NO: 96026 - DNA, 25 bp, Canis familiaris
gcgatctcatcaaggtgacgccctc

SEQ ID NO: 96027 - DNA, 25 bp, Canis familiaris
gcgctgcatatcagggcgcagctcc

SEQ ID NO: 96028 - DNA, 25 bp, Canis familiaris
gcgctgagtcgggggcagagcagct

SEQ ID NO: 96029 - DNA, 25 bp, Canis familiaris
gcgcaggatccggcaggaggagcgg

SEQ ID NO: 96030 - DNA, 25 bp, Canis familiaris
gcgcagtgtcaccaagaatgatgag

SEQ ID NO: 96031 - DNA, 25 bp, Canis familiaris
gcgagcagagcccataaatcacagt

SEQ ID NO: 96032 - DNA, 25 bp, Canis familiaris
gcgagatatgaggaacccaggtacc

SEQ ID NO: 96033 - DNA, 25 bp, Canis familiaris
gcgatgtgtgatttcaccgaggacc

SEQ ID NO: 96034 - DNA, 25 bp, Canis familiaris
gcgcgtgatatatccacgacgtctc

SEQ ID NO: 96035 - DNA, 25 bp, Canis familiaris
gcgcatgagttctccaacaccttcg

SEQ ID NO: 96036 - DNA, 25 bp, Canis familiaris
gcgcatagtgtcgcgggactttgtg

SEQ ID NO: 96037 - DNA, 25 bp, Canis familiaris
gcgcggagtccggggactcggagat

SEQ ID NO: 96038 - DNA, 25 bp, Canis familiaris
gctcggaggcaatcggacgaggata

SEQ ID NO: 96039 - DNA, 25 bp, Canis familiaris
gcgcggtggagaggcaggagggcca

SEQ ID NO: 96040 - DNA, 25 bp, Canis familiaris
gcgcggtgatgatcgccgagagagc

SEQ ID NO: 96041 - DNA, 25 bp, Canis familiaris
gcgctcaggcgtggtcacgatggag

SEQ ID NO: 96042 - DNA, 25 bp, Canis familiaris
gcgctactgcgtggtcagcgagcgc

SEQ ID NO: 96043 - DNA, 25 bp, Canis familiaris
gcgtagactggcctcggaggctgac

SEQ ID NO: 96044 - DNA, 25 bp, Canis familiaris
gcgcttgcaattgtcgaggcgctga

SEQ ID NO: 96045 - DNA, 25 bp, Canis familiaris
gcgatgtgctttatggcaggcgcaa

SEQ ID NO: 96046 - DNA, 25 bp, Canis familiaris
gctggttttaatggcggcgcaataa

SEQ ID NO: 96047 - DNA, 25 bp, Canis familiaris
gcggtgtttctcgaggggatgtgat

SEQ ID NO: 96048 - DNA, 25 bp, Canis familiaris
gcgatttgttcggagcagtctggta

SEQ ID NO: 96049 - DNA, 25 bp, Canis familiaris
gcgctttgtctgcgagaggggaaca

SEQ ID NO: 96050 - DNA, 25 bp, Canis familiaris
gcgtattggccttggaaggaaccag

SEQ ID NO: 96051 - DNA, 25 bp, Canis familiaris
gcgtgtggcccctgaggagcaccct

SEQ ID NO: 96052 - DNA, 25 bp, Canis familiaris
gcgaaggcttccttggggagcctat

SEQ ID NO: 96053 - DNA, 25 bp, Canis familiaris
gcgaatgggtcctggagcaacagct

SEQ ID NO: 96054 - DNA, 25 bp, Canis familiaris
gcgaagttctcacaggcagcaaact

SEQ ID NO: 96055 - DNA, 25 bp, Canis familiaris
gcgagttcttcacaggcagcaactg

SEQ ID NO: 96056 - DNA, 25 bp, Canis familiaris
gcgctggtttgctgggagaacatgg

SEQ ID NO: 96057 - DNA, 25 bp, Canis familiaris
gcgctgtttctgctgggagcagcca

SEQ ID NO: 96058 - DNA, 25 bp, Canis familiaris
gcgctgtctgttgagagatgccgcc

SEQ ID NO: 96059 - DNA, 25 bp, Canis familiaris
gcgcagtaggcagagagagcaggca

SEQ ID NO: 96060 - DNA, 25 bp, Canis familiaris
gcgcagggccatgcaagggtaatgc

SEQ ID NO: 96061 - DNA, 25 bp, Canis familiaris
gcgcaaggcccgaagtgggagcagc

SEQ ID NO: 96062 - DNA, 25 bp, Canis familiaris
gcgacaccactcaaaggaggaggcg

SEQ ID NO: 96063 - DNA, 25 bp, Canis familiaris
gcgagccagccagagggagggagag

SEQ ID NO: 96064 - DNA, 25 bp, Canis familiaris
gcgtgcgagccgtggacgggaaggc

SEQ ID NO: 96065 - DNA, 25 bp, Canis familiaris
gcgtggccagggcacaggggaagga

SEQ ID NO: 96066 - DNA, 25 bp, Canis familiaris
gcgtggccagttcaacattccagag

SEQ ID NO: 96067 - DNA, 25 bp, Canis familiaris
gcggaagagttggaacccaccagca

SEQ ID NO: 96068 - DNA, 25 bp, Canis familiaris
gcggatatcattagggaaccccagc

SEQ ID NO: 96069 - DNA, 25 bp, Canis familiaris
gcgatgagaatgagggccaaccaac

SEQ ID NO: 96070 - DNA, 25 bp, Canis familiaris
gcgcagctggagagcagggtgcacc

SEQ ID NO: 96071 - DNA, 25 bp, Canis familiaris
gcgcagggcatgctggagcgagact

SEQ ID NO: 96072 - DNA, 25 bp, Canis familiaris
gcgcagggtgctggatgagctgacc

SEQ ID NO: 96073 - DNA, 25 bp, Canis familiaris
gcgctgaggattccaactgacctcc

SEQ ID NO: 96074 - DNA, 25 bp, Canis familiaris
gcgagtgtgttgacaactccttcct

SEQ ID NO: 96075 - DNA, 25 bp, Canis familiaris
gcgtcagtgttgatacgatttcctg

SEQ ID NO: 96076 - DNA, 25 bp, Canis familiaris
gcgtaatgtcttgcacgattaggtt

SEQ ID NO: 96077 - DNA, 25 bp, Canis familiaris
ggtaagtttccacgatataaggagt

SEQ ID NO: 96078 - DNA, 25 bp, Canis familiaris
gcgtactcttccaatggtaaagtga

SEQ ID NO: 96079 - DNA, 25 bp, Canis familiaris
gcgatactgctctcatcatggtaga

SEQ ID NO: 96080 - DNA, 25 bp, Canis familiaris
gcgcaacatgtctgccatgggagcg

SEQ ID NO: 96081 - DNA, 25 bp, Canis familiaris
gctggcaagtcaaccattggaggac

SEQ ID NO: 96082 - DNA, 25 bp, Canis familiaris
gcggaagtatgagctgggacgcccc

SEQ ID NO: 96083 - DNA, 25 bp, Canis familiaris
gcgtgataacgattctgggcacagt

SEQ ID NO: 96084 - DNA, 25 bp, Canis familiaris
gcgaggacaagatctggaccagcta

SEQ ID NO: 96085 - DNA, 25 bp, Canis familiaris
gcgcaggacgggctgatgacacagc

SEQ ID NO: 96086 - DNA, 25 bp, Canis familiaris
gcgcaagcaccaggaggcgcacggc

SEQ ID NO: 96087 - DNA, 25 bp, Canis familiaris
gcgcaccatctttggggcacgatgg

SEQ ID NO: 96088 - DNA, 25 bp, Canis familiaris
gcgcaccttgcactgggagaagatg

SEQ ID NO: 96089 - DNA, 25 bp, Canis familiaris
gcgcagcctcatgtgggtgaacaag

SEQ ID NO: 96090 - DNA, 25 bp, Canis familiaris
gcggcgctagttgtagataacggct

SEQ ID NO: 96091 - DNA, 25 bp, Canis familiaris
gcgtggctttatgtacagtgaccgg

SEQ ID NO: 96092 - DNA, 25 bp, Canis familiaris
gcgtgagtcttagtccacagttcgg

SEQ ID NO: 96093 - DNA, 25 bp, Canis familiaris
gcgtgggtgtagaccattctgtggg

SEQ ID NO: 96094 - DNA, 25 bp, Canis familiaris
gcgatgttggcttatactccgctgg

SEQ ID NO: 96095 - DNA, 25 bp, Canis familiaris
gcgtgttcacggagatcgagctgga

SEQ ID NO: 96096 - DNA, 25 bp, Canis familiaris
gcgttatgaccggaagcagagtggc

SEQ ID NO: 96097 - DNA, 25 bp, Canis familiaris
gcgctttgtctacagcgaggctcgc

SEQ ID NO: 96098 - DNA, 25 bp, Canis familiaris
gcgcttgtgtaaggaggtctgctca

SEQ ID NO: 96099 - DNA, 25 bp, Canis familiaris
gcgttgtggcattgtgtggttcgcc

SEQ ID NO: 96100 - DNA, 25 bp, Canis familiaris
gcgaggatgaggtcgtggcaccctc

SEQ ID NO: 96101 - DNA, 25 bp, Canis familiaris
gcgacctgattgagcaggcagccga

SEQ ID NO: 96102 - DNA, 25 bp, Canis familiaris
gcgaacagatctatgtgaccatgcc

SEQ ID NO: 96103 - DNA, 25 bp, Canis familiaris
gcgaggcatgcctggcttgccaggc

SEQ ID NO: 96104 - DNA, 25 bp, Canis familiaris
gcgaggctgccagagatccagcaga

SEQ ID NO: 96105 - DNA, 25 bp, Canis familiaris
gcgatacccaaattgctgcagacaa

SEQ ID NO: 96106 - DNA, 25 bp, Canis familiaris
gcgaagccaacacgtgctcaaacat

SEQ ID NO: 96107 - DNA, 25 bp, Canis familiaris
gcggcacgagtacggtcgaacagtt

SEQ ID NO: 96108 - DNA, 25 bp, Canis familiaris
gcgtccgaggccaggggacaggttc

SEQ ID NO: 96109 - DNA, 25 bp, Canis familiaris
gcgaccaaggccagtgggccagggc

SEQ ID NO: 96110 - DNA, 25 bp, Canis familiaris
gcgaagaagacggagtgcggggggc

SEQ ID NO: 96111 - DNA, 25 bp, Canis familiaris
gcgaaggagagggcactcgggagtg

SEQ ID NO: 96112 - DNA, 25 bp, Canis familiaris
gcgacgtggatgaaatgctaagggg

SEQ ID NO: 96113 - DNA, 25 bp, Canis familiaris
gcgacctgcaagactgacacgaggg

SEQ ID NO: 96114 - DNA, 25 bp, Canis familiaris
gcgcaccatgggacataaggagggc

SEQ ID NO: 96115 - DNA, 25 bp, Canis familiaris
gcgagtcatggagatgaaggccgtg

SEQ ID NO: 96116 - DNA, 25 bp, Canis familiaris
gcgcacattctgagagagaggccac

SEQ ID NO: 96117 - DNA, 25 bp, Canis familiaris
gcgagctgactggttgtgtggccgc

SEQ ID NO: 96118 - DNA, 25 bp, Canis familiaris
gcgactcatagtcgtggtcgccgcc

SEQ ID NO: 96119 - DNA, 25 bp, Canis familiaris
gcgactcatagtcgtggtcgccgcc

SEQ ID NO: 96120 - DNA, 25 bp, Canis familiaris
gcgcagtagagtggggcttggcagc

SEQ ID NO: 96121 - DNA, 25 bp, Canis familiaris
gcgcagcatgcaagagctcagcacc

SEQ ID NO: 96122 - DNA, 25 bp, Canis familiaris
gctgaggctaggggactcccctacc

SEQ ID NO: 96123 - DNA, 25 bp, Canis familiaris
gcgaggatacaggatgccttgccct

SEQ ID NO: 96124 - DNA, 25 bp, Canis familiaris
gcgagcgacaggggacgatgctgcg

SEQ ID NO: 96125 - DNA, 25 bp, Canis familiaris
gcgatgcgatgacacaccagtatca

SEQ ID NO: 96126 - DNA, 25 bp, Canis familiaris
gcatgagcgtggctacatcacttac

SEQ ID NO: 96127 - DNA, 25 bp, Canis familiaris
gcggctgtgggatctcactaagtgg

SEQ ID NO: 96128 - DNA, 25 bp, Canis familiaris
gcggttgttgagctattgacacggc

SEQ ID NO: 96129 - DNA, 25 bp, Canis familiaris
gcgtttccaagagatgtggccaggg

SEQ ID NO: 96130 - DNA, 25 bp, Canis familiaris
gcgcttcccaagagatgtgccaggg

SEQ ID NO: 96131 - DNA, 25 bp, Canis familiaris
gcgcttccgtaacatggacaagagg

SEQ ID NO: 96132 - DNA, 25 bp, Canis familiaris
gcagttcacttaccttgactcaaaa

SEQ ID NO: 96133 - DNA, 25 bp, Canis familiaris
gcgatattttagtcttgtccaatgc

SEQ ID NO: 96134 - DNA, 25 bp, Canis familiaris
gcgtaatcttctcccatgaacaatg

SEQ ID NO: 96135 - DNA, 25 bp, Canis familiaris
gctgtaacttctggcccaaactgta

SEQ ID NO: 96136 - DNA, 25 bp, Canis familiaris
gcgtaacttttcttacatacttggt

SEQ ID NO: 96137 - DNA, 25 bp, Canis familiaris
gcggaaattcttgtgcgcacacttg

SEQ ID NO: 96138 - DNA, 25 bp, Canis familiaris
gcgtgaaaccggggagcaacgttct

SEQ ID NO: 96139 - DNA, 25 bp, Canis familiaris
gcggaaaagggcccaaatctgtttg

SEQ ID NO: 96140 - DNA, 25 bp, Canis familiaris
gcggagacaggttggacaagatctg

SEQ ID NO: 96141 - DNA, 25 bp, Canis familiaris
gcgaagaaatgttgctacagcagag

SEQ ID NO: 96142 - DNA, 25 bp, Canis familiaris
gcgaaggatgagttcttgcagcaac

SEQ ID NO: 96143 - DNA, 25 bp, Canis familiaris
gcgatcagcgaggttcttcaggacc

SEQ ID NO: 96144 - DNA, 25 bp, Canis familiaris
gcgacatggagcttttgtgcaggca

SEQ ID NO: 96145 - DNA, 25 bp, Canis familiaris
gcgacatgtggcttcagtgtggtgc

SEQ ID NO: 96146 - DNA, 25 bp, Canis familiaris
gcgacgtgagcggcatgggatggtg

SEQ ID NO: 96147 - DNA, 25 bp, Canis familiaris
gcgagctgctgatacggaagagatg

SEQ ID NO: 96148 - DNA, 25 bp, Canis familiaris
gcggctggtttgcgaagaagacgga

SEQ ID NO: 96149 - DNA, 25 bp, Canis familiaris
gcggcgagtggggggaacagaggga

SEQ ID NO: 96150 - DNA, 25 bp, Canis familiaris
gcgggcgtgcgagggtaaaccgagt

SEQ ID NO: 96151 - DNA, 25 bp, Canis familiaris
gcggggtcaactctaagactaactt

SEQ ID NO: 96152 - DNA, 25 bp, Canis familiaris
gcgttggccaacgttcaaggtaagt

SEQ ID NO: 96153 - DNA, 25 bp, Canis familiaris
gctttttcaaggcctaagggaattg

SEQ ID NO: 96154 - DNA, 25 bp, Canis familiaris
gctacaaaaagtatccagtctgaac

SEQ ID NO: 96155 - DNA, 25 bp, Canis familiaris
gcgtatattaagtttctgcagttaa

SEQ ID NO: 96156 - DNA, 25 bp, Canis familiaris
gcgtatattaaagttgctgcagtta

SEQ ID NO: 96157 - DNA, 25 bp, Canis familiaris
gcgttactcatgaagcagtgaagtt

SEQ ID NO: 96158 - DNA, 25 bp, Canis familiaris
gcgtgtgcacgtccgtgtagagttt

SEQ ID NO: 96159 - DNA, 25 bp, Canis familiaris
gcgtggcaggcgacgaaaagtccta

SEQ ID NO: 96160 - DNA, 25 bp, Canis familiaris
gcgtggccacgagaaatcagaccgg

SEQ ID NO: 96161 - DNA, 25 bp, Canis familiaris
gcgtctccatcgcggaaaaccgcag

SEQ ID NO: 96162 - DNA, 25 bp, Canis familiaris
gcgttcgcatcgcctaggaaatagg

SEQ ID NO: 96163 - DNA, 25 bp, Canis familiaris
gcgattctcatcgcaaggtcgtcac

SEQ ID NO: 96164 - DNA, 25 bp, Canis familiaris
gcgatgttgactgcacaggtaatac

SEQ ID NO: 96165 - DNA, 25 bp, Canis familiaris
gcgagctgtacttatcggtgaatca

SEQ ID NO: 96166 - DNA, 25 bp, Canis familiaris
gcgagctgtacttatcggtgaatca

SEQ ID NO: 96167 - DNA, 25 bp, Canis familiaris
gcgagcagatacacggaggtgtcgg

SEQ ID NO: 96168 - DNA, 25 bp, Canis familiaris
gcgacaacgcgcgggtgtggcgcgg

SEQ ID NO: 96169 - DNA, 25 bp, Canis familiaris
gcgcagaaggccgaggtgcggcggg

SEQ ID NO: 96170 - DNA, 25 bp, Canis familiaris
gcgagttggcccaggagagcgaggg

SEQ ID NO: 96171 - DNA, 25 bp, Canis familiaris
gcggcactaccctgtaggcagaggg

SEQ ID NO: 96172 - DNA, 25 bp, Canis familiaris
gcggccttccttgcagaggaagccg

SEQ ID NO: 96173 - DNA, 25 bp, Canis familiaris
gcgcaggtaatcccagaagcgggcc

SEQ ID NO: 96174 - DNA, 25 bp, Canis familiaris
gcgagaggaagctgcgaacggggct

SEQ ID NO: 96175 - DNA, 25 bp, Canis familiaris
gcgcaggtgaaggtgtgcacgcggg

SEQ ID NO: 96176 - DNA, 25 bp, Canis familiaris
gcgagtgaataggctggcaggcgtg

SEQ ID NO: 96177 - DNA, 25 bp, Canis familiaris
gcgaggccaagggctgggagtgtgc

SEQ ID NO: 96178 - DNA, 25 bp, Canis familiaris
gcgagcgcaacgccaaggtgggcgc

SEQ ID NO: 96179 - DNA, 25 bp, Canis familiaris
gcgggaaggtaacgtggagaggcca

SEQ ID NO: 96180 - DNA, 25 bp, Canis familiaris
gcggtcagggcatcagggagtgggc

SEQ ID NO: 96181 - DNA, 25 bp, Canis familiaris
gcgtgtcggagatccggcagacggc

SEQ ID NO: 96182 - DNA, 25 bp, Canis familiaris
gcgtgccgaaggttccgagcacagg

SEQ ID NO: 96183 - DNA, 25 bp, Canis familiaris
gcgtctctatcactaccacgaagag

SEQ ID NO: 96184 - DNA, 25 bp, Canis familiaris
gcgtttagcctcctcaagaagcagc

SEQ ID NO: 96185 - DNA, 25 bp, Canis familiaris
gcgtttggccaaaaagatgcagcat

SEQ ID NO: 96186 - DNA, 25 bp, Canis familiaris
gcgtttggcctaatgcagagacact

SEQ ID NO: 96187 - DNA, 25 bp, Canis familiaris
gcgttcaggctcagtgcacgagctt

SEQ ID NO: 96188 - DNA, 25 bp, Canis familiaris
gcgatatcgtggacagtgcacagag

SEQ ID NO: 96189 - DNA, 25 bp, Canis familiaris
gcgacatgccatgtactgcaatggg

SEQ ID NO: 96190 - DNA, 25 bp, Canis familiaris
gcgtcatcctcactttcaaggagcc

SEQ ID NO: 96191 - DNA, 25 bp, Canis familiaris
gcgattcctcttaccaaatagaacc

SEQ ID NO: 96192 - DNA, 25 bp, Canis familiaris
gcgagtcctcttctaagggacccag

SEQ ID NO: 96193 - DNA, 25 bp, Canis familiaris
gcgagtcttcttatagagcctatca

SEQ ID NO: 96194 - DNA, 25 bp, Canis familiaris
gcgagtcgtctctgtagaagctctg

SEQ ID NO: 96195 - DNA, 25 bp, Canis familiaris
gcgatgactactttggaaagctttc

SEQ ID NO: 96196 - DNA, 25 bp, Canis familiaris
gcgaggtcactcctgagtagagccc

SEQ ID NO: 96197 - DNA, 25 bp, Canis familiaris
gcgaggacatcaagtgggtgtgcca

SEQ ID NO: 96198 - DNA, 25 bp, Canis familiaris
gcgatgaggatctgtgtgcgaggcc

SEQ ID NO: 96199 - DNA, 25 bp, Canis familiaris
gcgagggctcatgtgggagatggct

SEQ ID NO: 96200 - DNA, 25 bp, Canis familiaris
gcgagggcctgctataggtgtgtct

SEQ ID NO: 96201 - DNA, 25 bp, Canis familiaris
gcgaggtgttgtaagggggcaggca

SEQ ID NO: 96202 - DNA, 25 bp, Canis familiaris
gcgaggatttgggcaggcctgacgc

SEQ ID NO: 96203 - DNA, 25 bp, Canis familiaris
gcgagagctaaggctgcggctagac

SEQ ID NO: 96204 - DNA, 25 bp, Canis familiaris
gcgaagtggagtggatggatgagca

SEQ ID NO: 96205 - DNA, 25 bp, Canis familiaris
gcgagtacgatgtcggagatgaacg

SEQ ID NO: 96206 - DNA, 25 bp, Canis familiaris
gcgagtcaagtgtgcgaggaacgcg

SEQ ID NO: 96207 - DNA, 25 bp, Canis familiaris
gcgagtcggtcaaggagaacatggc

SEQ ID NO: 96208 - DNA, 25 bp, Canis familiaris
gcgaatcgcgaccaggaggatgctc

SEQ ID NO: 96209 - DNA, 25 bp, Canis familiaris
gcgtagacgatccagtggttcctgt

SEQ ID NO: 96210 - DNA, 25 bp, Canis familiaris
gcgtgcatttatcatgtctttccat

SEQ ID NO: 96211 - DNA, 25 bp, Canis familiaris
gcgtcttgtatagtaattctctcac

SEQ ID NO: 96212 - DNA, 25 bp, Canis familiaris
gcgtctggctaagtacaaccagctc

SEQ ID NO: 96213 - DNA, 25 bp, Canis familiaris
gcgttggcataattacatcagcgac

SEQ ID NO: 96214 - DNA, 25 bp, Canis familiaris
gcgaatggctcattaaatcagttat

SEQ ID NO: 96215 - DNA, 25 bp, Canis familiaris
gcgagcaaggcattaacgagtttct

SEQ ID NO: 96216 - DNA, 25 bp, Canis familiaris
gcgcagccatggtaaggaggtttct

SEQ ID NO: 96217 - DNA, 25 bp, Canis familiaris
gcgcacacttgatgaaggtgttttc

SEQ ID NO: 96218 - DNA, 25 bp, Canis familiaris
gcgcacacttgatgaaggtgttttc

SEQ ID NO: 96219 - DNA, 25 bp, Canis familiaris
gcgagctctacttagggcttcgctt

SEQ ID NO: 96220 - DNA, 25 bp, Canis familiaris
gcgacaaatcagtagaggtctcgta

SEQ ID NO: 96221 - DNA, 25 bp, Canis familiaris
gcgaccagtcaatgcaggacatacg

SEQ ID NO: 96222 - DNA, 25 bp, Canis familiaris
gcgaccagatcaatgccagcaagaa

SEQ ID NO: 96223 - DNA, 25 bp, Canis familiaris
gcgcacacgatgagaatgcaaaagc

SEQ ID NO: 96224 - DNA, 25 bp, Canis familiaris
gcgacaaggtatgatcagaaagctg

SEQ ID NO: 96225 - DNA, 25 bp, Canis familiaris
gcgtacggtctggatgcactgtact

SEQ ID NO: 96226 - DNA, 25 bp, Canis familiaris
gcgttcgcagttgcagcgattgcaa

SEQ ID NO: 96227 - DNA, 25 bp, Canis familiaris
gcggaatcggcggcggagaatggag

SEQ ID NO: 96228 - DNA, 25 bp, Canis familiaris
gcggtcatggggggagtgaggtatt

SEQ ID NO: 96229 - DNA, 25 bp, Canis familiaris
gctggttggggctaagagagaagtt

SEQ ID NO: 96230 - DNA, 25 bp, Canis familiaris
gcggcattgtgggcttaggcgaaac

SEQ ID NO: 96231 - DNA, 25 bp, Canis familiaris
gcgagcttgtggagtaggagcccag

SEQ ID NO: 96232 - DNA, 25 bp, Canis familiaris
gcggctttgatgggatcagggggtc

SEQ ID NO: 96233 - DNA, 25 bp, Canis familiaris
gctggtttgcgaagaagacggagtg

SEQ ID NO: 96234 - DNA, 25 bp, Canis familiaris
gctggaacgcacagaagaacgggct

SEQ ID NO: 96235 - DNA, 25 bp, Canis familiaris
gcggaactgcgcttaaaacagcgga

SEQ ID NO: 96236 - DNA, 25 bp, Canis familiaris
gcgtgcgtcttgtgaaaacccaggc

SEQ ID NO: 96237 - DNA, 25 bp, Canis familiaris
gcgtgcactttttataatagcccgt

SEQ ID NO: 96238 - DNA, 25 bp, Canis familiaris
gcgtacctgttatgagaagcgtatg

SEQ ID NO: 96239 - DNA, 25 bp, Canis familiaris
gcgtcaccgtagaccggggaatgtc

SEQ ID NO: 96240 - DNA, 25 bp, Canis familiaris
gcgacccagggaaccggagagagct

SEQ ID NO: 96241 - DNA, 25 bp, Canis familiaris
gcgttccgggagactaggaggacat

SEQ ID NO: 96242 - DNA, 25 bp, Canis familiaris
gcggcccggagggcaaggacgacaa

SEQ ID NO: 96243 - DNA, 25 bp, Canis familiaris
gcggtgaccgtgtccaagggagaaa

SEQ ID NO: 96244 - DNA, 25 bp, Canis familiaris
gcggaggccgtcctgaagcaggacc

SEQ ID NO: 96245 - DNA, 25 bp, Canis familiaris
gcgggtgcggcttctgacgagaagc

SEQ ID NO: 96246 - DNA, 25 bp, Canis familiaris
gcaggttctgccattgaaaaaaaaa

SEQ ID NO: 96247 - DNA, 25 bp, Canis familiaris
gcggctcttcgaataaccaaaaaca

SEQ ID NO: 96248 - DNA, 25 bp, Canis familiaris
gcaggccgaccagatacgccaaaag

SEQ ID NO: 96249 - DNA, 25 bp, Canis familiaris
gctgaccaaccagaactgcttcaca

SEQ ID NO: 96250 - DNA, 25 bp, Canis familiaris
gctgggacccagaaacctacgaaat

SEQ ID NO: 96251 - DNA, 25 bp, Canis familiaris
gctggacagcaagtgaaccctacga

SEQ ID NO: 96252 - DNA, 25 bp, Canis familiaris
gcgaaggactcttactccaacaagc

SEQ ID NO: 96253 - DNA, 25 bp, Canis familiaris
gcgacagggtatttcttccatgcag

SEQ ID NO: 96254 - DNA, 25 bp, Canis familiaris
gcgagttgagactgttgattcatca

SEQ ID NO: 96255 - DNA, 25 bp, Canis familiaris
gcgagctcagagttggtgcttcttc

SEQ ID NO: 96256 - DNA, 25 bp, Canis familiaris
gcgagtaggaattgagctagctctt

SEQ ID NO: 96257 - DNA, 25 bp, Canis familiaris
gcgtctagatgaaaatccaccttcg

SEQ ID NO: 96258 - DNA, 25 bp, Canis familiaris
gcgatcatggaaaatgccaacgttc

SEQ ID NO: 96259 - DNA, 25 bp, Canis familiaris
gcgacaggacagcatgcggacgtat

SEQ ID NO: 96260 - DNA, 25 bp, Canis familiaris
gcgacaggagcgcttggagcaggat

SEQ ID NO: 96261 - DNA, 25 bp, Canis familiaris
gcgacatggaggaattcgactctga

SEQ ID NO: 96262 - DNA, 25 bp, Canis familiaris
gcgataccaggcatacatacatcta

SEQ ID NO: 96263 - DNA, 25 bp, Canis familiaris
gcgttccagctcaacaaacaatata

SEQ ID NO: 96264 - DNA, 25 bp, Canis familiaris
gcgttcactgccttcatgtagaaat

SEQ ID NO: 96265 - DNA, 25 bp, Canis familiaris
gcgtacagctcttgctaataaaatc

SEQ ID NO: 96266 - DNA, 25 bp, Canis familiaris
gcgtacagtattctcttcaaacaag

SEQ ID NO: 96267 - DNA, 25 bp, Canis familiaris
gcgtctcagtcttttcattctaaaa

SEQ ID NO: 96268 - DNA, 25 bp, Canis familiaris
gcggtcagcatcccattattttaaa

SEQ ID NO: 96269 - DNA, 25 bp, Canis familiaris
gcgtgtcgtccggttttggacaagg

SEQ ID NO: 96270 - DNA, 25 bp, Canis familiaris
gcggccccaaggactttggagccgg

SEQ ID NO: 96271 - DNA, 25 bp, Canis familiaris
gcggctcaacaaggccggtgggaac

SEQ ID NO: 96272 - DNA, 25 bp, Canis familiaris
gcgacatcagaaccgcctgagtgag

SEQ ID NO: 96273 - DNA, 25 bp, Canis familiaris
gcgacatcagagagcgtgtggcgga

SEQ ID NO: 96274 - DNA, 25 bp, Canis familiaris
gcgatatgaagcggggctgccaaga

SEQ ID NO: 96275 - DNA, 25 bp, Canis familiaris
gcgtgaagagtcctgtcagccaaga

SEQ ID NO: 96276 - DNA, 25 bp, Canis familiaris
gctggaaaatcttgacgtaagagag

SEQ ID NO: 96277 - DNA, 25 bp, Canis familiaris
gcggaaagtcaaccatcctggatgg

SEQ ID NO: 96278 - DNA, 25 bp, Canis familiaris
gcgacatgtcagctttacctggagt

SEQ ID NO: 96279 - DNA, 25 bp, Canis familiaris
gcgtcgtggactactacctgaagta

SEQ ID NO: 96280 - DNA, 25 bp, Canis familiaris
gcgtctgaagatactctaccatgaa

SEQ ID NO: 96281 - DNA, 25 bp, Canis familiaris
gcgatctctaagacctacagctatc

SEQ ID NO: 96282 - DNA, 25 bp, Canis familiaris
gcgtcctatggacaacaatatcaat

SEQ ID NO: 96283 - DNA, 25 bp, Canis familiaris
gctgtccggggatataaatctttga

SEQ ID NO: 96284 - DNA, 25 bp, Canis familiaris
gctgtccttggagaattaaagttaa

SEQ ID NO: 96285 - DNA, 25 bp, Canis familiaris
gctaaatcaagagacttacttttta

SEQ ID NO: 96286 - DNA, 25 bp, Canis familiaris
gctaaatattttgttacttgtacta

SEQ ID NO: 96287 - DNA, 25 bp, Canis familiaris
gctaacttttggatttcatgggtca

SEQ ID NO: 96288 - DNA, 25 bp, Canis familiaris
gcgtacttctttctgttctcagaat

SEQ ID NO: 96289 - DNA, 25 bp, Canis familiaris
gcgtggctttttctaacttcatatg

SEQ ID NO: 96290 - DNA, 25 bp, Canis familiaris
gcgtccttttctcatcatcaaggat

SEQ ID NO: 96291 - DNA, 25 bp, Canis familiaris
gcgtctcttggtaatccaagggtcc

SEQ ID NO: 96292 - DNA, 25 bp, Canis familiaris
gcgtgctctgggtaacccgagtgtc

SEQ ID NO: 96293 - DNA, 25 bp, Canis familiaris
gcgatgtctcgatgaatcctttgct

SEQ ID NO: 96294 - DNA, 25 bp, Canis familiaris
gcgtgtatagaccgtttagtgcccc

SEQ ID NO: 96295 - DNA, 25 bp, Canis familiaris
gcgtgtgaagaacaccttttcccgg

SEQ ID NO: 96296 - DNA, 25 bp, Canis familiaris
gcagttgggtatatccgatttcatc

SEQ ID NO: 96297 - DNA, 25 bp, Canis familiaris
gcgtaggggtatacgggtacatcca

SEQ ID NO: 96298 - DNA, 25 bp, Canis familiaris
gcggaggagggtgggttgtgaccga

SEQ ID NO: 96299 - DNA, 25 bp, Canis familiaris
gcggagggaggagtagttgggggag

SEQ ID NO: 96300 - DNA, 25 bp, Canis familiaris
gcggctgggaggtaggttccgggag

SEQ ID NO: 96301 - DNA, 25 bp, Canis familiaris
gctacgaggacgggaagttccagga

SEQ ID NO: 96302 - DNA, 25 bp, Canis familiaris
gcgaggtggaggggcaggtcccctg

SEQ ID NO: 96303 - DNA, 25 bp, Canis familiaris
gcagtgggaacgtgaagtcccccag

SEQ ID NO: 96304 - DNA, 25 bp, Canis familiaris
gcggcggagcaaaaacagttccccg

SEQ ID NO: 96305 - DNA, 25 bp, Canis familiaris
gcggctgcagcagctcaaacagtcc

SEQ ID NO: 96306 - DNA, 25 bp, Canis familiaris
gcgactgagactaaaagagcacgtg

SEQ ID NO: 96307 - DNA, 25 bp, Canis familiaris
gcgtccgagttcaacgagcaccgga

SEQ ID NO: 96308 - DNA, 25 bp, Canis familiaris
gcgtccggtttatctgcagaataga

SEQ ID NO: 96309 - DNA, 25 bp, Canis familiaris
gcgtcttttgttgactctagataac

SEQ ID NO: 96310 - DNA, 25 bp, Canis familiaris
gcagttgtttttctttaaatcatcc

SEQ ID NO: 96311 - DNA, 25 bp, Canis familiaris
gcgttgtttctaatgtttacagagc

SEQ ID NO: 96312 - DNA, 25 bp, Canis familiaris
gcagttttggccacttataggagga

SEQ ID NO: 96313 - DNA, 25 bp, Canis familiaris
gcgtttaccctaattatactaagca

SEQ ID NO: 96314 - DNA, 25 bp, Canis familiaris
gcagtcttagcctggatgcttacca

SEQ ID NO: 96315 - DNA, 25 bp, Canis familiaris
gcgtttgatctcaaggctgctgttc

SEQ ID NO: 96316 - DNA, 25 bp, Canis familiaris
gcgttgaacctaactgcaggtccaa

SEQ ID NO: 96317 - DNA, 25 bp, Canis familiaris
gcgtctaccttaagctcaggtcatg

SEQ ID NO: 96318 - DNA, 25 bp, Canis familiaris
gcgttatcctttggctaccaaggac

SEQ ID NO: 96319 - DNA, 25 bp, Canis familiaris
gctaactccttttgctacgaaaacg

SEQ ID NO: 96320 - DNA, 25 bp, Canis familiaris
gctaaaccttttggccagagaatga

SEQ ID NO: 96321 - DNA, 25 bp, Canis familiaris
gctggcacccgtgtacaagacaagc

SEQ ID NO: 96322 - DNA, 25 bp, Canis familiaris
gcgtgccactttaaacaccacaaca

SEQ ID NO: 96323 - DNA, 25 bp, Canis familiaris
gcggtcacttatacataccaagtta

SEQ ID NO: 96324 - DNA, 25 bp, Canis familiaris
gcgattacaattactggcccgcgtt

SEQ ID NO: 96325 - DNA, 25 bp, Canis familiaris
gcgatctatgtgttccatgagcctc

SEQ ID NO: 96326 - DNA, 25 bp, Canis familiaris
gcgatgctattattgcttcagtgtt

SEQ ID NO: 96327 - DNA, 25 bp, Canis familiaris
gcgagctcttgttcttcagcagagg

SEQ ID NO: 96328 - DNA, 25 bp, Canis familiaris
gcgactgatggttttccaaggtgaa

SEQ ID NO: 96329 - DNA, 25 bp, Canis familiaris
gcgagtctcgctttttcaaatatga

SEQ ID NO: 96330 - DNA, 25 bp, Canis familiaris
gcgactgtcctttatgtcagactct

SEQ ID NO: 96331 - DNA, 25 bp, Canis familiaris
gcggtgtgcgtttgatgatcgtttg

SEQ ID NO: 96332 - DNA, 25 bp, Canis familiaris
gcggtgcacgatctgattttctggc

SEQ ID NO: 96333 - DNA, 25 bp, Canis familiaris
gcgtcatcatgaccagacctgaacg

SEQ ID NO: 96334 - DNA, 25 bp, Canis familiaris
gcgtggctgttccagcatctaacac

SEQ ID NO: 96335 - DNA, 25 bp, Canis familiaris
gcgtgtgtgtgtgaactacaagccc

SEQ ID NO: 96336 - DNA, 25 bp, Canis familiaris
gcggcggcgttattcccatgacccg

SEQ ID NO: 96337 - DNA, 25 bp, Canis familiaris
gcggccctacaataaagatctccag

SEQ ID NO: 96338 - DNA, 25 bp, Canis familiaris
gcgggctcagaataagaacattaag

SEQ ID NO: 96339 - DNA, 25 bp, Canis familiaris
gcggcgccagatgaaaaacatagtc

SEQ ID NO: 96340 - DNA, 25 bp, Canis familiaris
gcgtgccagctatagacctaatagt

SEQ ID NO: 96341 - DNA, 25 bp, Canis familiaris
gcgtgccagtcatcaacagcatggg

SEQ ID NO: 96342 - DNA, 25 bp, Canis familiaris
gcgtccatctgataagcaaggtgct

SEQ ID NO: 96343 - DNA, 25 bp, Canis familiaris
gcgttcgctgaaaggcatcggtgcc

SEQ ID NO: 96344 - DNA, 25 bp, Canis familiaris
gcgttgggagattggcagcgatggc

SEQ ID NO: 96345 - DNA, 25 bp, Canis familiaris
gcgtccgaagcattcaggcagatgg

SEQ ID NO: 96346 - DNA, 25 bp, Canis familiaris
gcggccagaagcttttcgttggtgc

SEQ ID NO: 96347 - DNA, 25 bp, Canis familiaris
gcgttggaagcagtttcgtgttcaa

SEQ ID NO: 96348 - DNA, 25 bp, Canis familiaris
gcggggggaattgcgtgcattaatc

SEQ ID NO: 96349 - DNA, 25 bp, Canis familiaris
gctagggggatatagggcttgacta

SEQ ID NO: 96350 - DNA, 25 bp, Canis familiaris
gctgggggtgtaaagggcctgaggt

SEQ ID NO: 96351 - DNA, 25 bp, Canis familiaris
gcgggctgaggtgaatgggcttgcg

SEQ ID NO: 96352 - DNA, 25 bp, Canis familiaris
gcgggcactagaaaactgcgctggg

SEQ ID NO: 96353 - DNA, 25 bp, Canis familiaris
gcgaggactgcggaagtcgtcggtg

SEQ ID NO: 96354 - DNA, 25 bp, Canis familiaris
gcgactgtctgcggaagatcttcaa

SEQ ID NO: 96355 - DNA, 25 bp, Canis familiaris
gcgtctgtcacgaatagatccataa

SEQ ID NO: 96356 - DNA, 25 bp, Canis familiaris
gcgtggacatcgatgagtgccgaga

SEQ ID NO: 96357 - DNA, 25 bp, Canis familiaris
gcgatgaggaagacgaggccgatgg

SEQ ID NO: 96358 - DNA, 25 bp, Canis familiaris
gcgggaaagaagggccctggcaggc

SEQ ID NO: 96359 - DNA, 25 bp, Canis familiaris
gcgtggaaagaggatttctgggggc

SEQ ID NO: 96360 - DNA, 25 bp, Canis familiaris
gcgtcaacaagcaagatctatcggg

SEQ ID NO: 96361 - DNA, 25 bp, Canis familiaris
gcgtacagcctcaagcatattcagg

SEQ ID NO: 96362 - DNA, 25 bp, Canis familiaris
gggaccccaaactcaggaaatctga

SEQ ID NO: 96363 - DNA, 25 bp, Canis familiaris
gcggtccaccaaacgtcggaaatat

SEQ ID NO: 96364 - DNA, 25 bp, Canis familiaris
gctggttcccaagcccgggaacagc

SEQ ID NO: 96365 - DNA, 25 bp, Canis familiaris
gcgtttcccaaagacagctaggagg

SEQ ID NO: 96366 - DNA, 25 bp, Canis familiaris
gcgggtcctacagagacagctacga

SEQ ID NO: 96367 - DNA, 25 bp, Canis familiaris
gcggggcgccgagatcgagtacggc

SEQ ID NO: 96368 - DNA, 25 bp, Canis familiaris
gcgggagctgcggaaaagggtcggc

SEQ ID NO: 96369 - DNA, 25 bp, Canis familiaris
gcgagcgccctgggaaaggggccgc

SEQ ID NO: 96370 - DNA, 25 bp, Canis familiaris
gcgtcgccctgagagcataggcggc

SEQ ID NO: 96371 - DNA, 25 bp, Canis familiaris
gcagtccctgtgggtgaagtcctgc

SEQ ID NO: 96372 - DNA, 25 bp, Canis familiaris
gcgtgcactttgtgtatatgccagt

SEQ ID NO: 96373 - DNA, 25 bp, Canis familiaris
gcgatgccctggttaaacacatgtc

SEQ ID NO: 96374 - DNA, 25 bp, Canis familiaris
gcgtcctgggatggaacacagcacc

SEQ ID NO: 96375 - DNA, 25 bp, Canis familiaris
gcgttctttgtgtaaacaccgcaca

SEQ ID NO: 96376 - DNA, 25 bp, Canis familiaris
gcggtttctggctaaatacatctat

SEQ ID NO: 96377 - DNA, 25 bp, Canis familiaris
gcgtctttctcccagagagacactt

SEQ ID NO: 96378 - DNA, 25 bp, Canis familiaris
gcggcctacatccagaatgagcaca

SEQ ID NO: 96379 - DNA, 25 bp, Canis familiaris
gcgagcctgcaaagccaatggtgtc

SEQ ID NO: 96380 - DNA, 25 bp, Canis familiaris
gcgtgaagacatagccaatgcagtg

SEQ ID NO: 96381 - DNA, 25 bp, Canis familiaris
gcgtacaaataccaagagtcccatc

SEQ ID NO: 96382 - DNA, 25 bp, Canis familiaris
gctgacacaagtgaaaggcccccgc

SEQ ID NO: 96383 - DNA, 25 bp, Canis familiaris
gctaagggcatttactacaccctcc

SEQ ID NO: 96384 - DNA, 25 bp, Canis familiaris
gctggaaggattgtcatgacccccc

SEQ ID NO: 96385 - DNA, 25 bp, Canis familiaris
gcggcgttattcccatgacccgccg

SEQ ID NO: 96386 - DNA, 25 bp, Canis familiaris
gcggcgattattttattccactgta

SEQ ID NO: 96387 - DNA, 25 bp, Canis familiaris
gcgggagggatttatttacagtgtg

SEQ ID NO: 96388 - DNA, 25 bp, Canis familiaris
gcggcagggatgatattttccatat

SEQ ID NO: 96389 - DNA, 25 bp, Canis familiaris
gcgaggagtgagaccattctacaca

SEQ ID NO: 96390 - DNA, 25 bp, Canis familiaris
gcgagagagagagcacatatctttt

SEQ ID NO: 96391 - DNA, 25 bp, Canis familiaris
gcgagagagagagaacttgagaact

SEQ ID NO: 96392 - DNA, 25 bp, Canis familiaris
gcgagtggatgttgggctcgggact

SEQ ID NO: 96393 - DNA, 25 bp, Canis familiaris
gcgggtatgctgacaggctgggcgc

SEQ ID NO: 96394 - DNA, 25 bp, Canis familiaris
gcgggctatggcctcagtgagacgt

SEQ ID NO: 96395 - DNA, 25 bp, Canis familiaris
gcgtcctggtggacactggacgtcc

SEQ ID NO: 96396 - DNA, 25 bp, Canis familiaris
gcgtccaagggtttggggacgacat

SEQ ID NO: 96397 - DNA, 25 bp, Canis familiaris
gcgtccgggtggtgggaactataat

SEQ ID NO: 96398 - DNA, 25 bp, Canis familiaris
gcgtccgcggggaggtgaggcggga

SEQ ID NO: 96399 - DNA, 25 bp, Canis familiaris
gcgtcctcccggagtgggagcagtc

SEQ ID NO: 96400 - DNA, 25 bp, Canis familiaris
gcgtcctccaggtttgattaatggc

SEQ ID NO: 96401 - DNA, 25 bp, Canis familiaris
gcgtttccagcctgtgagtaggtcc

SEQ ID NO: 96402 - DNA, 25 bp, Canis familiaris
gcgttctccacacagtcataaagtg

SEQ ID NO: 96403 - DNA, 25 bp, Canis familiaris
gatgtccggctactacttaataatg

SEQ ID NO: 96404 - DNA, 25 bp, Canis familiaris
gctggccgtgtactaggtctagttg

SEQ ID NO: 96405 - DNA, 25 bp, Canis familiaris
gctggccaatatgcattctgctcca

SEQ ID NO: 96406 - DNA, 25 bp, Canis familiaris
gctgatggacttggatttctcccgg

SEQ ID NO: 96407 - DNA, 25 bp, Canis familiaris
gctgggcacatggttttatcccggg

SEQ ID NO: 96408 - DNA, 25 bp, Canis familiaris
gctcggaatttttttcaacgtccat

SEQ ID NO: 96409 - DNA, 25 bp, Canis familiaris
gctcggaatattttgttcaacgtcg

SEQ ID NO: 96410 - DNA, 25 bp, Canis familiaris
gcgtgtgtatttttgccatcagtca

SEQ ID NO: 96411 - DNA, 25 bp, Canis familiaris
gcgtgctttttattccatttataga

SEQ ID NO: 96412 - DNA, 25 bp, Canis familiaris
gcgagctgttttgacttttattaaa

SEQ ID NO: 96413 - DNA, 25 bp, Canis familiaris
gcgagtgtgttcttagctgtcatta

SEQ ID NO: 96414 - DNA, 25 bp, Canis familiaris
gcgaggttgtccaactgtgttcacc

SEQ ID NO: 96415 - DNA, 25 bp, Canis familiaris
gctggagtttttatggctagccacc

SEQ ID NO: 96416 - DNA, 25 bp, Canis familiaris
gctggagtttttatggctagccact

SEQ ID NO: 96417 - DNA, 25 bp, Canis familiaris
gctggagtttttatggctagccact

SEQ ID NO: 96418 - DNA, 25 bp, Canis familiaris
gcgggtacttcgatgtgcgagacaa

SEQ ID NO: 96419 - DNA, 25 bp, Canis familiaris
gctcggtgaatacatgttgcgtaaa

SEQ ID NO: 96420 - DNA, 25 bp, Canis familiaris
gctggagactttctttggtaaacgg

SEQ ID NO: 96421 - DNA, 25 bp, Canis familiaris
gctggaacttccaaggaggcaacaa

SEQ ID NO: 96422 - DNA, 25 bp, Canis familiaris
gcggaccctgctaaggactaacacg

SEQ ID NO: 96423 - DNA, 25 bp, Canis familiaris
gcggtcgccgaaacggtctgaacgc

SEQ ID NO: 96424 - DNA, 25 bp, Canis familiaris
gcggtgtcacagcacaagttctgta

SEQ ID NO: 96425 - DNA, 25 bp, Canis familiaris
gcgtctgtagtggaaatttgtatat

SEQ ID NO: 96426 - DNA, 25 bp, Canis familiaris
gcgtgcgacagggacctagtaattc

SEQ ID NO: 96427 - DNA, 25 bp, Canis familiaris
gcgtgcgtaataaccggaagcatac

SEQ ID NO: 96428 - DNA, 25 bp, Canis familiaris
gcgatggttcaaacaggtgacagtg

SEQ ID NO: 96429 - DNA, 25 bp, Canis familiaris
gctgtgagcttcagccgggaacggc

SEQ ID NO: 96430 - DNA, 25 bp, Canis familiaris
gcgtgagttccacaagtggatcgag

SEQ ID NO: 96431 - DNA, 25 bp, Canis familiaris
gcgtctgttcagagaagctacatcg

SEQ ID NO: 96432 - DNA, 25 bp, Canis familiaris
gcgtctgaaagaaactctacaagaa

SEQ ID NO: 96433 - DNA, 25 bp, Canis familiaris
gcggagataaaaactattcaagcta

SEQ ID NO: 96434 - DNA, 25 bp, Canis familiaris
gcgggacggataacaatttcacaca

SEQ ID NO: 96435 - DNA, 25 bp, Canis familiaris
gcgggagcggatcacatagtctcac

SEQ ID NO: 96436 - DNA, 25 bp, Canis familiaris
gctggaagatggtcccaagttcttg

SEQ ID NO: 96437 - DNA, 25 bp, Canis familiaris
gctggtaatgcaaccctggtgtcta

SEQ ID NO: 96438 - DNA, 25 bp, Canis familiaris
gcgtgtacgatgaactcgtttcatc

SEQ ID NO: 96439 - DNA, 25 bp, Canis familiaris
gctggaaacatcactgcgtactgga

SEQ ID NO: 96440 - DNA, 25 bp, Canis familiaris
gctggcggtaaggctgggaaggact

SEQ ID NO: 96441 - DNA, 25 bp, Canis familiaris
gcggcttgtagccctgaaaaccacc

SEQ ID NO: 96442 - DNA, 25 bp, Canis familiaris
gcggtctgtctgtggaaggaccccc

SEQ ID NO: 96443 - DNA, 25 bp, Canis familiaris
gcgagggtctggagaagagcccccg

SEQ ID NO: 96444 - DNA, 25 bp, Canis familiaris
gggctggtcggaggttggaacccag

SEQ ID NO: 96445 - DNA, 25 bp, Canis familiaris
gcacgtcgaaagtcgttgtcaaccc

SEQ ID NO: 96446 - DNA, 25 bp, Canis familiaris
gctccctaaagtcttagcatgaccc

SEQ ID NO: 96447 - DNA, 25 bp, Canis familiaris
gctgcacactcctgtgtttggaacc

SEQ ID NO: 96448 - DNA, 25 bp, Canis familiaris
gcggcaggccgagtgatgttgggca

SEQ ID NO: 96449 - DNA, 25 bp, Canis familiaris
gcggcaggcatcatggatcaggtaa

SEQ ID NO: 96450 - DNA, 25 bp, Canis familiaris
gcgaggcacaactgagctggatcaa

SEQ ID NO: 96451 - DNA, 25 bp, Canis familiaris
gcgttctcgccaagaggagcatgca

SEQ ID NO: 96452 - DNA, 25 bp, Canis familiaris
gcgtcctgagcgaagatgggcatca

SEQ ID NO: 96453 - DNA, 25 bp, Canis familiaris
gctgtcctggacattgggctaggcc

SEQ ID NO: 96454 - DNA, 25 bp, Canis familiaris
gcgtgtctggtcacgggatgaagac

SEQ ID NO: 96455 - DNA, 25 bp, Canis familiaris
gcggatctgctgagccggtacataa

SEQ ID NO: 96456 - DNA, 25 bp, Canis familiaris
gcgttcgttagcaggtcaaaatgca

SEQ ID NO: 96457 - DNA, 25 bp, Canis familiaris
gcgtcttttcaggtggatacaacag

SEQ ID NO: 96458 - DNA, 25 bp, Canis familiaris
gctggcttagtcggtggagcgtacg

SEQ ID NO: 96459 - DNA, 25 bp, Canis familiaris
gcggctgctggaggaggtggatgtc

SEQ ID NO: 96460 - DNA, 25 bp, Canis familiaris
gcgattcggcaggagagggagcagc

SEQ ID NO: 96461 - DNA, 25 bp, Canis familiaris
gcgtccgaggagcagctggagcagc

SEQ ID NO: 96462 - DNA, 25 bp, Canis familiaris
gcgtagccgagagagcatggagagc

SEQ ID NO: 96463 - DNA, 25 bp, Canis familiaris
gcgtcagccgagtccatggacgaga

SEQ ID NO: 96464 - DNA, 25 bp, Canis familiaris
gcgtcccagagaaaaaccaccttgg

SEQ ID NO: 96465 - DNA, 25 bp, Canis familiaris
gctcttaggtagaaaacctcctggg

SEQ ID NO: 96466 - DNA, 25 bp, Canis familiaris
gctctttggcctcaaaagtccggtg

SEQ ID NO: 96467 - DNA, 25 bp, Canis familiaris
gctctttgacctgtactactacgac

SEQ ID NO: 96468 - DNA, 25 bp, Canis familiaris
gctggtaacgatggtactccgggac

SEQ ID NO: 96469 - DNA, 25 bp, Canis familiaris
gcggtaccagtgcacaactgcagtg

SEQ ID NO: 96470 - DNA, 25 bp, Canis familiaris
gcggcttcaagaccagaagctgccg

SEQ ID NO: 96471 - DNA, 25 bp, Canis familiaris
gcgagggagcagaggacgctgccgg

SEQ ID NO: 96472 - DNA, 25 bp, Canis familiaris
gcgagtgatggctggagacctggag

SEQ ID NO: 96473 - DNA, 25 bp, Canis familiaris
gcggagtccggggactcggagatcg

SEQ ID NO: 96474 - DNA, 25 bp, Canis familiaris
gcgtgatcctggagacccgggatcg

SEQ ID NO: 96475 - DNA, 25 bp, Canis familiaris
gcgtgatcctggagacccgggatcg

SEQ ID NO: 96476 - DNA, 25 bp, Canis familiaris
gcgtgacgaggaagacctggcggaa

SEQ ID NO: 96477 - DNA, 25 bp, Canis familiaris
gcgatgagggaccgagctctgacgg

SEQ ID NO: 96478 - DNA, 25 bp, Canis familiaris
gcgtgaggagctggaacctgaccgc

SEQ ID NO: 96479 - DNA, 25 bp, Canis familiaris
gcgtgaggacaggaagtccacaaca

SEQ ID NO: 96480 - DNA, 25 bp, Canis familiaris
gcaggactgactgaacttccaagtg

SEQ ID NO: 96481 - DNA, 25 bp, Canis familiaris
gcgttcaggctcaaacttcacaagc

SEQ ID NO: 96482 - DNA, 25 bp, Canis familiaris
gcggtcgacatttcagaaatcaagc

SEQ ID NO: 96483 - DNA, 25 bp, Canis familiaris
gcggtcgacatttcagaaatcaagc

SEQ ID NO: 96484 - DNA, 25 bp, Canis familiaris
gcggtctgaacctggagattactgg

SEQ ID NO: 96485 - DNA, 25 bp, Canis familiaris
gctgtttgggcgtgtggttactagt

SEQ ID NO: 96486 - DNA, 25 bp, Canis familiaris
gctgatttggggtttttttgccttg

SEQ ID NO: 96487 - DNA, 25 bp, Canis familiaris
gcgttcggatgtttcttttttgtat

SEQ ID NO: 96488 - DNA, 25 bp, Canis familiaris
gcgatgtaagtgtctatgtgttttt

SEQ ID NO: 96489 - DNA, 25 bp, Canis familiaris
gctagtaattactcgttttatccca

SEQ ID NO: 96490 - DNA, 25 bp, Canis familiaris
gctaattttaacaggattttcatcc

SEQ ID NO: 96491 - DNA, 25 bp, Canis familiaris
gctgaaggttatttgtggtttttgc

SEQ ID NO: 96492 - DNA, 25 bp, Canis familiaris
gctggcaggtgaatcttacgctttt

SEQ ID NO: 96493 - DNA, 25 bp, Canis familiaris
gctggcctgagaaacacccatttgt

SEQ ID NO: 96494 - DNA, 25 bp, Canis familiaris
gcggcacgagaattcatactagcat

SEQ ID NO: 96495 - DNA, 25 bp, Canis familiaris
gcgggcaagacatctgaccaagtac

SEQ ID NO: 96496 - DNA, 25 bp, Canis familiaris
gcggtcaagaatatagcctagccac

SEQ ID NO: 96497 - DNA, 25 bp, Canis familiaris
gcgtgctgggagagtccccgaaatc

SEQ ID NO: 96498 - DNA, 25 bp, Canis familiaris
gcggtgagatggcttcgccggtaag

SEQ ID NO: 96499 - DNA, 25 bp, Canis familiaris
gcggtgagctggatatcaagagggg

SEQ ID NO: 96500 - DNA, 25 bp, Canis familiaris
gcgttatctcagcttcttcaggcgg

SEQ ID NO: 96501 - DNA, 25 bp, Canis familiaris
gcgtgtattctcatatacctgggga

SEQ ID NO: 96502 - DNA, 25 bp, Canis familiaris
gctggtcgtctgtgaaccttgagga

SEQ ID NO: 96503 - DNA, 25 bp, Canis familiaris
gctggtctccatgtaattcttaggc

SEQ ID NO: 96504 - DNA, 25 bp, Canis familiaris
gcgggtccaaaagttcttcagggct

SEQ ID NO: 96505 - DNA, 25 bp, Canis familiaris
gcgggtccagaaatcattcccaacc

SEQ ID NO: 96506 - DNA, 25 bp, Canis familiaris
gcgggttcgagaccattacatcttc

SEQ ID NO: 96507 - DNA, 25 bp, Canis familiaris
gctggattacgcaacagtaaatcct

SEQ ID NO: 96508 - DNA, 25 bp, Canis familiaris
gcgtgcattaatcagattcaaaacc

SEQ ID NO: 96509 - DNA, 25 bp, Canis familiaris
gcgtgcatttatcagatcaaaacca

SEQ ID NO: 96510 - DNA, 25 bp, Canis familiaris
gcgtcattctcagggtacattcacc

SEQ ID NO: 96511 - DNA, 25 bp, Canis familiaris
gcgtcatgtccgcggatgtaatcct

SEQ ID NO: 96512 - DNA, 25 bp, Canis familiaris
gcgtgcacacctcgcaagagtatat

SEQ ID NO: 96513 - DNA, 25 bp, Canis familiaris
gcgtcaatcctacgggatcatttaa

SEQ ID NO: 96514 - DNA, 25 bp, Canis familiaris
gcgtcaagccacctgagggctacga

SEQ ID NO: 96515 - DNA, 25 bp, Canis familiaris
gcgtcacagccagagatggtggaca

SEQ ID NO: 96516 - DNA, 25 bp, Canis familiaris
gcgtcagcagccaagagatggtgga

SEQ ID NO: 96517 - DNA, 25 bp, Canis familiaris
gcgattgcatcctcagcaggtggat

SEQ ID NO: 96518 - DNA, 25 bp, Canis familiaris
gctgggatgcctccagcagggttct

SEQ ID NO: 96519 - DNA, 25 bp, Canis familiaris
gcggtgcatcctggctatgggttcc

SEQ ID NO: 96520 - DNA, 25 bp, Canis familiaris
gcggacacaatgtccagcggagtcc

SEQ ID NO: 96521 - DNA, 25 bp, Canis familiaris
gcggctagaagagcagcgggagcag

SEQ ID NO: 96522 - DNA, 25 bp, Canis familiaris
gcgtgaagtcagtgcactactggag

SEQ ID NO: 96523 - DNA, 25 bp, Canis familiaris
gcggtgagcacactacattacgtag

SEQ ID NO: 96524 - DNA, 25 bp, Canis familiaris
gcgggcacacgctcttacagtcgat

SEQ ID NO: 96525 - DNA, 25 bp, Canis familiaris
gctgaaccaccacagccaagtggat

SEQ ID NO: 96526 - DNA, 25 bp, Canis familiaris
gctgagtccccgctggcagcgggaa

SEQ ID NO: 96527 - DNA, 25 bp, Canis familiaris
gcgtgtgcctaccctgcgccggcag

SEQ ID NO: 96528 - DNA, 25 bp, Canis familiaris
gcgatctgaagaggccggacatggc

SEQ ID NO: 96529 - DNA, 25 bp, Canis familiaris
gcgtctgcacagggcgggagaactg

SEQ ID NO: 96530 - DNA, 25 bp, Canis familiaris
gcgtctgcacctgcgaaggcaggct

SEQ ID NO: 96531 - DNA, 25 bp, Canis familiaris
gcgtcatcctctgcggaagagtagc

SEQ ID NO: 96532 - DNA, 25 bp, Canis familiaris
gcggctctgcttgttagaactgacg

SEQ ID NO: 96533 - DNA, 25 bp, Canis familiaris
gcgtctgtccctttaggattacgtt

SEQ ID NO: 96534 - DNA, 25 bp, Canis familiaris
gcgtctttctcttttgaaataagct

SEQ ID NO: 96535 - DNA, 25 bp, Canis familiaris
gctggcccctcttttgaagaaagga

SEQ ID NO: 96536 - DNA, 25 bp, Canis familiaris
gcggccgtttctgtacaacagcagc

SEQ ID NO: 96537 - DNA, 25 bp, Canis familiaris
gcggcaaacttccttcacaaagtgc

SEQ ID NO: 96538 - DNA, 25 bp, Canis familiaris
gcggcgagcagcacctgctcgcaaa

SEQ ID NO: 96539 - DNA, 25 bp, Canis familiaris
gcggctgagagcattcttcaatccc

SEQ ID NO: 96540 - DNA, 25 bp, Canis familiaris
gctggctggactaggatggcacatc

SEQ ID NO: 96541 - DNA, 25 bp, Canis familiaris
gcgtcggatttatgatgcacagaat

SEQ ID NO: 96542 - DNA, 25 bp, Canis familiaris
gcgtctgttatctaaggcaggctat

SEQ ID NO: 96543 - DNA, 25 bp, Canis familiaris
gcggcagctgtattatcaagtccta

SEQ ID NO: 96544 - DNA, 25 bp, Canis familiaris
gcggacagctgcttacatgttcatc

SEQ ID NO: 96545 - DNA, 25 bp, Canis familiaris
gctggaactatctttcctgaccata

SEQ ID NO: 96546 - DNA, 25 bp, Canis familiaris
gctgatacacctgttcctacaagca

SEQ ID NO: 96547 - DNA, 25 bp, Canis familiaris
gcgtttccatcaataccacacaaga

SEQ ID NO: 96548 - DNA, 25 bp, Canis familiaris
gcgttgtctaccatctcataatcaa

SEQ ID NO: 96549 - DNA, 25 bp, Canis familiaris
gcgtggtcgacatgttccagaccgt

SEQ ID NO: 96550 - DNA, 25 bp, Canis familiaris
gcgtttcttatagtttaggcctgct

SEQ ID NO: 96551 - DNA, 25 bp, Canis familiaris
gcgttcttgtaattttacacgcttt

SEQ ID NO: 96552 - DNA, 25 bp, Canis familiaris
gcgttgctgggactgttttgcactg

SEQ ID NO: 96553 - DNA, 25 bp, Canis familiaris
gcgtgtgtgcggcgttattttgcag

SEQ ID NO: 96554 - DNA, 25 bp, Canis familiaris
gcgtttgctggctcacatagttata

SEQ ID NO: 96555 - DNA, 25 bp, Canis familiaris
gcgtatgtgtacttgccaggatggt

SEQ ID NO: 96556 - DNA, 25 bp, Canis familiaris
gcgtgtgtcatcatcgcacggaggg

SEQ ID NO: 96557 - DNA, 25 bp, Canis familiaris
gcggtgcctcttggggagaggtcca

SEQ ID NO: 96558 - DNA, 25 bp, Canis familiaris
gcgggcagctccgggagcaagttcc

SEQ ID NO: 96559 - DNA, 25 bp, Canis familiaris
gcggagcccgagggcgaagtaccga

SEQ ID NO: 96560 - DNA, 25 bp, Canis familiaris
gcggacgcgagggaggaaggaaaag

SEQ ID NO: 96561 - DNA, 25 bp, Canis familiaris
gcgtgacggtggcctggaaggcaag

SEQ ID NO: 96562 - DNA, 25 bp, Canis familiaris
gctgtacaggtttctggccagacga

SEQ ID NO: 96563 - DNA, 25 bp, Canis familiaris
gcgtacatgttttatgagcttgagg

SEQ ID NO: 96564 - DNA, 25 bp, Canis familiaris
gctgaatatatttaggagttggctg

SEQ ID NO: 96565 - DNA, 25 bp, Canis familiaris
gcggctttttcaggatttggtttgg

SEQ ID NO: 96566 - DNA, 25 bp, Canis familiaris
gcgtgcttctataaaagggtttttg

SEQ ID NO: 96567 - DNA, 25 bp, Canis familiaris
gctgtcccgctaagtatcggtttct

SEQ ID NO: 96568 - DNA, 25 bp, Canis familiaris
gctgtccctgtatgcctctggtcgt

SEQ ID NO: 96569 - DNA, 25 bp, Canis familiaris
gctgtccctgtatgcctctggtcgt

SEQ ID NO: 96570 - DNA, 25 bp, Canis familiaris
gcgtcccaggaatcattgttcttaa

SEQ ID NO: 96571 - DNA, 25 bp, Canis familiaris
gcgtcaccagggagcatgtgttgtg

SEQ ID NO: 96572 - DNA, 25 bp, Canis familiaris
gcgtgccgatcggcaagggtgtggt

SEQ ID NO: 96573 - DNA, 25 bp, Canis familiaris
gctgtggcgaaagatgggttttcac

SEQ ID NO: 96574 - DNA, 25 bp, Canis familiaris
gctgttgtaaatgttgggttcccct

SEQ ID NO: 96575 - DNA, 25 bp, Canis familiaris
gctggttaagactttcggttctact

SEQ ID NO: 96576 - DNA, 25 bp, Canis familiaris
gcagggtaacccacagatgttccct

SEQ ID NO: 96577 - DNA, 25 bp, Canis familiaris
gctggggcaaacctacaaatacctc

SEQ ID NO: 96578 - DNA, 25 bp, Canis familiaris
gctggactataaccttctaaacctg

SEQ ID NO: 96579 - DNA, 25 bp, Canis familiaris
gctggatttgaagcttaaactcctg

SEQ ID NO: 96580 - DNA, 25 bp, Canis familiaris
gctggattggaacttttaatatgct

SEQ ID NO: 96581 - DNA, 25 bp, Canis familiaris
gctgttgaggaaccatttcacacga

SEQ ID NO: 96582 - DNA, 25 bp, Canis familiaris
gcgtagacggatcctttaaccaaag

SEQ ID NO: 96583 - DNA, 25 bp, Canis familiaris
gctgaaagggcggcttttaaaaatg

SEQ ID NO: 96584 - DNA, 25 bp, Canis familiaris
gctggagcgggggttgttaataaat

SEQ ID NO: 96585 - DNA, 25 bp, Canis familiaris
gcggtgcgagcctttttgtaaaaat

SEQ ID NO: 96586 - DNA, 25 bp, Canis familiaris
gctgggggacctcaggataagaaaa

SEQ ID NO: 96587 - DNA, 25 bp, Canis familiaris
gcggcagtgaacgtgtggagaaaga

SEQ ID NO: 96588 - DNA, 25 bp, Canis familiaris
gcggcggcaatcgtgcgcaatgaag

SEQ ID NO: 96589 - DNA, 25 bp, Canis familiaris
gcgtatgctgaaactggcctgagag

SEQ ID NO: 96590 - DNA, 25 bp, Canis familiaris
gctgtatctgaaatcaggcacggat

SEQ ID NO: 96591 - DNA, 25 bp, Canis familiaris
gctgggagaacatggacgggagcct

SEQ ID NO: 96592 - DNA, 25 bp, Canis familiaris
gctggaaaagtacggcttcgagccc

SEQ ID NO: 96593 - DNA, 25 bp, Canis familiaris
gcgtaatagctctgcactgatttgg

SEQ ID NO: 96594 - DNA, 25 bp, Canis familiaris
gcgtggttctgctcatggagtactt

SEQ ID NO: 96595 - DNA, 25 bp, Canis familiaris
gcgtgtttgactacagtgagtactg

SEQ ID NO: 96596 - DNA, 25 bp, Canis familiaris
gcgtttgtgacaactggtgtattga

SEQ ID NO: 96597 - DNA, 25 bp, Canis familiaris
gcgtttgcataggttggctgtcctt

SEQ ID NO: 96598 - DNA, 25 bp, Canis familiaris
gaagtttaagtccctatccatttgc

SEQ ID NO: 96599 - DNA, 25 bp, Canis familiaris
gaattcttaagtcacaaggtttgca

SEQ ID NO: 96600 - DNA, 25 bp, Canis familiaris
gagtccctaggtcaaacctttgatt

SEQ ID NO: 96601 - DNA, 25 bp, Canis familiaris
gaatcccttcgggaatgccgttctc

SEQ ID NO: 96602 - DNA, 25 bp, Canis familiaris
gaacgacttccggaggaacttgatc

SEQ ID NO: 96603 - DNA, 25 bp, Canis familiaris
gagggaattccaggggaagttcact

SEQ ID NO: 96604 - DNA, 25 bp, Canis familiaris
gctgggaacccgttggaagttcaca

SEQ ID NO: 96605 - DNA, 25 bp, Canis familiaris
gctgtggactccagggggtttgaaa

SEQ ID NO: 96606 - DNA, 25 bp, Canis familiaris
gctggaaaggaggggggatttgaga

SEQ ID NO: 96607 - DNA, 25 bp, Canis familiaris
gctggaaaggagggttactactgca

SEQ ID NO: 96608 - DNA, 25 bp, Canis familiaris
gctgtaattgcgtggttgacgtccc

SEQ ID NO: 96609 - DNA, 25 bp, Canis familiaris
gctgtaactcgtggtgcggcagcgt

SEQ ID NO: 96610 - DNA, 25 bp, Canis familiaris
gctgtaactactttgtgtcacccaa

SEQ ID NO: 96611 - DNA, 25 bp, Canis familiaris
gctggtactgtctctggaactttaa

SEQ ID NO: 96612 - DNA, 25 bp, Canis familiaris
gcgggcagtctttctggaactgtta

SEQ ID NO: 96613 - DNA, 25 bp, Canis familiaris
gcgtgaattgcttttgaagtctgtc

SEQ ID NO: 96614 - DNA, 25 bp, Canis familiaris
gcggtttgttttgggttgttgatca

SEQ ID NO: 96615 - DNA, 25 bp, Canis familiaris
gcggaatatgtgcttttttgtttga

SEQ ID NO: 96616 - DNA, 25 bp, Canis familiaris
gcgtggtcttctggtatgttttagg

SEQ ID NO: 96617 - DNA, 25 bp, Canis familiaris
gcgtgctgttttattgccatttata

SEQ ID NO: 96618 - DNA, 25 bp, Canis familiaris
gcgggggggatgcgtgcatttatca

SEQ ID NO: 96619 - DNA, 25 bp, Canis familiaris
gcggggagggaccgatctaggtcac

SEQ ID NO: 96620 - DNA, 25 bp, Canis familiaris
gcggagctgacctccgacaaggaca

SEQ ID NO: 96621 - DNA, 25 bp, Canis familiaris
gcgggaggcgccgcgatcaagaagc

SEQ ID NO: 96622 - DNA, 25 bp, Canis familiaris
gcggaggagcccaggatggagacag

SEQ ID NO: 96623 - DNA, 25 bp, Canis familiaris
gcggaggtacctggagatggggaag

SEQ ID NO: 96624 - DNA, 25 bp, Canis familiaris
gcggagccatgaacgtcagaggagg

SEQ ID NO: 96625 - DNA, 25 bp, Canis familiaris
gcggaacagtgcagccagtgatgag

SEQ ID NO: 96626 - DNA, 25 bp, Canis familiaris
gctggaagagtgcctcgagttcatt

SEQ ID NO: 96627 - DNA, 25 bp, Canis familiaris
gctggaggttgggctggatcctcat

SEQ ID NO: 96628 - DNA, 25 bp, Canis familiaris
gcggcaggtgtagcagagcacgata

SEQ ID NO: 96629 - DNA, 25 bp, Canis familiaris
gcgtggtttatggcaagatctacaa

SEQ ID NO: 96630 - DNA, 25 bp, Canis familiaris
gcgtggtccatagcacagtacaagc

SEQ ID NO: 96631 - DNA, 25 bp, Canis familiaris
gcgtgggtatgaagccagaagccag

SEQ ID NO: 96632 - DNA, 25 bp, Canis familiaris
gcggaggaagcagctctgtgagcca

SEQ ID NO: 96633 - DNA, 25 bp, Canis familiaris
gcggcagcagtgaaggatttgaccc

SEQ ID NO: 96634 - DNA, 25 bp, Canis familiaris
gcgtgcaggtgaaggaccgctgcgc

SEQ ID NO: 96635 - DNA, 25 bp, Canis familiaris
gcgtgcgaggggacactgcagtgtc

SEQ ID NO: 96636 - DNA, 25 bp, Canis familiaris
gcgtggaagacagcagccaggctgc

SEQ ID NO: 96637 - DNA, 25 bp, Canis familiaris
gcgtggaagtggacacacagtcctc

SEQ ID NO: 96638 - DNA, 25 bp, Canis familiaris
gcgggtatatggacactttcttcga

SEQ ID NO: 96639 - DNA, 25 bp, Canis familiaris
gctgaagaattgtgcccttctacca

SEQ ID NO: 96640 - DNA, 25 bp, Canis familiaris
gctggaacgtgtggcccagtctaac

SEQ ID NO: 96641 - DNA, 25 bp, Canis familiaris
gctggaacgtgtggcccagtctaac

SEQ ID NO: 96642 - DNA, 25 bp, Canis familiaris
gctggtttgggtctggctcaagaag

SEQ ID NO: 96643 - DNA, 25 bp, Canis familiaris
gctggctttgtctgttggccaagcc

SEQ ID NO: 96644 - DNA, 25 bp, Canis familiaris
gcggcttgtggatgttgacacgagg

SEQ ID NO: 96645 - DNA, 25 bp, Canis familiaris
gcggtcctaaggctacacggaggtc

SEQ ID NO: 96646 - DNA, 25 bp, Canis familiaris
gggcctcaatcatggtaactggaat

SEQ ID NO: 96647 - DNA, 25 bp, Canis familiaris
gcggctgccacttaggtctagcaga

SEQ ID NO: 96648 - DNA, 25 bp, Canis familiaris
gcgtggtcctaaagtgttgctatgc

SEQ ID NO: 96649 - DNA, 25 bp, Canis familiaris
gcgtggggggatgggattgcaacgt

SEQ ID NO: 96650 - DNA, 25 bp, Canis familiaris
gcggcggagggattaatgtggacgt

SEQ ID NO: 96651 - DNA, 25 bp, Canis familiaris
gcgtgggagccgatgagtgtgagca

SEQ ID NO: 96652 - DNA, 25 bp, Canis familiaris
gcgtgtgagagcattgtggaggaat

SEQ ID NO: 96653 - DNA, 25 bp, Canis familiaris
gcgtgccaatcaacatgctggtgaa

SEQ ID NO: 96654 - DNA, 25 bp, Canis familiaris
gcgtgcattatcaacatcatattca

SEQ ID NO: 96655 - DNA, 25 bp, Canis familiaris
gctggcaacatccttgcaactcagc

SEQ ID NO: 96656 - DNA, 25 bp, Canis familiaris
gcggcagcaccgctgagaaagctgt

SEQ ID NO: 96657 - DNA, 25 bp, Canis familiaris
gcgggcacctgcatggaaacagatt

SEQ ID NO: 96658 - DNA, 25 bp, Canis familiaris
gctggagtccatgtgaacaacaata

SEQ ID NO: 96659 - DNA, 25 bp, Canis familiaris
gcggcgtgccaggggatacagagaa

SEQ ID NO: 96660 - DNA, 25 bp, Canis familiaris
gcggcagggcagatttccagtgaac

SEQ ID NO: 96661 - DNA, 25 bp, Canis familiaris
gcggcaggacattttgcctcaaata

SEQ ID NO: 96662 - DNA, 25 bp, Canis familiaris
gcgtgatctaaatttgcagccgtta

SEQ ID NO: 96663 - DNA, 25 bp, Canis familiaris
gcgtgaagaaaattgagcagctgtt

SEQ ID NO: 96664 - DNA, 25 bp, Canis familiaris
gcgtggggaaaaagatcatttctct

SEQ ID NO: 96665 - DNA, 25 bp, Canis familiaris
gcggggggcaaatacatggtccatg

SEQ ID NO: 96666 - DNA, 25 bp, Canis familiaris
gcgggaggaccaagagacggccgtg

SEQ ID NO: 96667 - DNA, 25 bp, Canis familiaris
gcgggtggacatccagaacaagcgc

SEQ ID NO: 96668 - DNA, 25 bp, Canis familiaris
gcgtgtgcggcaaccgcaagaagcc

SEQ ID NO: 96669 - DNA, 25 bp, Canis familiaris
gcgtgtgcgtgctcagcaggaaggc

SEQ ID NO: 96670 - DNA, 25 bp, Canis familiaris
gcggacgtgctgtccaagatcagcc

SEQ ID NO: 96671 - DNA, 25 bp, Canis familiaris
gcggccctcagacaagatcagagcc

SEQ ID NO: 96672 - DNA, 25 bp, Canis familiaris
gcggctcccgggaagagcaggacgg

SEQ ID NO: 96673 - DNA, 25 bp, Canis familiaris
gcggatcccaagcggcagaagacag

SEQ ID NO: 96674 - DNA, 25 bp, Canis familiaris
gctggtctcaaacgggcacttaaat

SEQ ID NO: 96675 - DNA, 25 bp, Canis familiaris
gcgggtcataagcttgcgttgatta

SEQ ID NO: 96676 - DNA, 25 bp, Canis familiaris
gcgggtgataaggagatggtggttt

SEQ ID NO: 96677 - DNA, 25 bp, Canis familiaris
gcggcgttggagggccaggagttga

SEQ ID NO: 96678 - DNA, 25 bp, Canis familiaris
gcggtattgggttataggacactgc

SEQ ID NO: 96679 - DNA, 25 bp, Canis familiaris
gcggtccagggaagtgaaatcatca

SEQ ID NO: 96680 - DNA, 25 bp, Canis familiaris
gcggcgccgggaactggagagcgca

SEQ ID NO: 96681 - DNA, 25 bp, Canis familiaris
gcgtggctcgggagcatggaatccg

SEQ ID NO: 96682 - DNA, 25 bp, Canis familiaris
gcgtgaacggagacgatgctcaccc

SEQ ID NO: 96683 - DNA, 25 bp, Canis familiaris
gcgtgatactggccagagttgcctc

SEQ ID NO: 96684 - DNA, 25 bp, Canis familiaris
gcggtatctggcaagagaaatctat

SEQ ID NO: 96685 - DNA, 25 bp, Canis familiaris
gcggtttctggcgagaagcatctat

SEQ ID NO: 96686 - DNA, 25 bp, Canis familiaris
gcggctttgcatcggagatcagctc

SEQ ID NO: 96687 - DNA, 25 bp, Canis familiaris
gcggccttgcagaagcagcatcaaa

SEQ ID NO: 96688 - DNA, 25 bp, Canis familiaris
gcgggctgtgacagagatcgaaatg

SEQ ID NO: 96689 - DNA, 25 bp, Canis familiaris
gcgggcttggctggagatcgatagc

SEQ ID NO: 96690 - DNA, 25 bp, Canis familiaris
gcgtgactattcagattctgtagca

SEQ ID NO: 96691 - DNA, 25 bp, Canis familiaris
gcgtgcgctttcagacacatgggat

SEQ ID NO: 96692 - DNA, 25 bp, Canis familiaris
gcgtggcttccaagaaatgttgcaa

SEQ ID NO: 96693 - DNA, 25 bp, Canis familiaris
gcgtgatgtttgagaagatggcgaa

SEQ ID NO: 96694 - DNA, 25 bp, Canis familiaris
gcgggcttggtatacatggcataat

SEQ ID NO: 96695 - DNA, 25 bp, Canis familiaris
gcaggagcttagtttccttcagaaa

SEQ ID NO: 96696 - DNA, 25 bp, Canis familiaris
gcaggagtttggtgccactacaaat

SEQ ID NO: 96697 - DNA, 25 bp, Canis familiaris
gcgtgagaaaggttcctctatcaaa

SEQ ID NO: 96698 - DNA, 25 bp, Canis familiaris
gcggcgtacagtattctcttcaaac

SEQ ID NO: 96699 - DNA, 25 bp, Canis familiaris
gcgtgcgtgaaggtgttttcttgac

SEQ ID NO: 96700 - DNA, 25 bp, Canis familiaris
gcggtggatccaatttttcattagg

SEQ ID NO: 96701 - DNA, 25 bp, Canis familiaris
gcggtggttcattcctttcagccat

SEQ ID NO: 96702 - DNA, 25 bp, Canis familiaris
gcggtggaacagctgtttgacgcat

SEQ ID NO: 96703 - DNA, 25 bp, Canis familiaris
gcgggacaggcaacagtttgatcct

SEQ ID NO: 96704 - DNA, 25 bp, Canis familiaris
gcgtgccaaggacggtcttggcctg

SEQ ID NO: 96705 - DNA, 25 bp, Canis familiaris
gcgtgcacagagctgggtatccgca

SEQ ID NO: 96706 - DNA, 25 bp, Canis familiaris
gcggccgggctgtaggcatagagca

SEQ ID NO: 96707 - DNA, 25 bp, Canis familiaris
gcggccgggctgtaggcatagagca

SEQ ID NO: 96708 - DNA, 25 bp, Canis familiaris
gcggcactgggactaacatgagcac

SEQ ID NO: 96709 - DNA, 25 bp, Canis familiaris
gctggacagggaatcacacaacacg

SEQ ID NO: 96710 - DNA, 25 bp, Canis familiaris
gctggaggaggaactccgaaccatg

SEQ ID NO: 96711 - DNA, 25 bp, Canis familiaris
gctggagacacggtctgcatcgacc

SEQ ID NO: 96712 - DNA, 25 bp, Canis familiaris
gctggagcagcaggcaggctaggct

SEQ ID NO: 96713 - DNA, 25 bp, Canis familiaris
gcgggcacactgtgctattgtcaca

SEQ ID NO: 96714 - DNA, 25 bp, Canis familiaris
gcgggccgcatgtgctgatgaagcc

SEQ ID NO: 96715 - DNA, 25 bp, Canis familiaris
gcgggtctgctgttatggcagctgc

SEQ ID NO: 96716 - DNA, 25 bp, Canis familiaris
gcgtggttcttgaggccgagaattc

SEQ ID NO: 96717 - DNA, 25 bp, Canis familiaris
gcgtgtttcgtgagttacaacagtc

SEQ ID NO: 96718 - DNA, 25 bp, Canis familiaris
gcgggtacagtgagagctacgagcg

SEQ ID NO: 96719 - DNA, 25 bp, Canis familiaris
gcgggatgaaagatgcagtccgggc

SEQ ID NO: 96720 - DNA, 25 bp, Canis familiaris
gcgggacagaagcacggcctggtgc

SEQ ID NO: 96721 - DNA, 25 bp, Canis familiaris
gcgggacagaagcacggcctggtgc

SEQ ID NO: 96722 - DNA, 25 bp, Canis familiaris
gcgggaagacagaaccgcctacctc

SEQ ID NO: 96723 - DNA, 25 bp, Canis familiaris
gctgggaaatggtcctccctagttc

SEQ ID NO: 96724 - DNA, 25 bp, Canis familiaris
gcgggagaaggtttcaccaagctct

SEQ ID NO: 96725 - DNA, 25 bp, Canis familiaris
gcgtgtagtatttttagctttctct

SEQ ID NO: 96726 - DNA, 25 bp, Canis familiaris
gcgtgtaggaattggctggccttct

SEQ ID NO: 96727 - DNA, 25 bp, Canis familiaris
gcgtgatgtggatgggctttcctcg

SEQ ID NO: 96728 - DNA, 25 bp, Canis familiaris
gcgtgtgtgtgagtggttcaccctc

SEQ ID NO: 96729 - DNA, 25 bp, Canis familiaris
gcggcatttggtcgggcagccgcac

SEQ ID NO: 96730 - DNA, 25 bp, Canis familiaris
gcgtgattgttgtctgaacgccgcc

SEQ ID NO: 96731 - DNA, 25 bp, Canis familiaris
gctggtgggtgaggacggacatgct

SEQ ID NO: 96732 - DNA, 25 bp, Canis familiaris
gcggtggagcaggtgaagagcgcat

SEQ ID NO: 96733 - DNA, 25 bp, Canis familiaris
gcggcggacacaatgtccagcggag

SEQ ID NO: 96734 - DNA, 25 bp, Canis familiaris
gctgccgtacaaagctaccgagaac

SEQ ID NO: 96735 - DNA, 25 bp, Canis familiaris
gctgggaaatgaagtgcacctcgaa

SEQ ID NO: 96736 - DNA, 25 bp, Canis familiaris
gcgggaatgtgatgttcctgccagc

SEQ ID NO: 96737 - DNA, 25 bp, Canis familiaris
gcgggagttgctgggtagctggcgc

SEQ ID NO: 96738 - DNA, 25 bp, Canis familiaris
gcggggcaggatggttctgtggtgc

SEQ ID NO: 96739 - DNA, 25 bp, Canis familiaris
gcggcacgacattgcctttgtggag

SEQ ID NO: 96740 - DNA, 25 bp, Canis familiaris
gcgtgcccagattactgttgtgtgg

SEQ ID NO: 96741 - DNA, 25 bp, Canis familiaris
gcgtccgctctggattgttgagttt

SEQ ID NO: 96742 - DNA, 25 bp, Canis familiaris
gcgtccactgctgtcagaggacgat

SEQ ID NO: 96743 - DNA, 25 bp, Canis familiaris
gcggccatggtggtgaaggtcgtgg

SEQ ID NO: 96744 - DNA, 25 bp, Canis familiaris
gcggccttgctctgagaggtaggcg

SEQ ID NO: 96745 - DNA, 25 bp, Canis familiaris
gcggtttctgcttagatggtcagag

SEQ ID NO: 96746 - DNA, 25 bp, Canis familiaris
gcggcttgcttttacattgagaatc

SEQ ID NO: 96747 - DNA, 25 bp, Canis familiaris
gcggtggctatggtgaccggagctc

SEQ ID NO: 96748 - DNA, 25 bp, Canis familiaris
gcggcatgggatggtgcctgggagt

SEQ ID NO: 96749 - DNA, 25 bp, Canis familiaris
gcggatgatgatgcagtccgggcgc

SEQ ID NO: 96750 - DNA, 25 bp, Canis familiaris
gcggcagcaggatgttcagagcgct

SEQ ID NO: 96751 - DNA, 25 bp, Canis familiaris
gcggcaggagaaggtatccctattt

SEQ ID NO: 96752 - DNA, 25 bp, Canis familiaris
gctggtggaggaggccatcacctac

SEQ ID NO: 96753 - DNA, 25 bp, Canis familiaris
gcggggcaatgcaatgcccatctcc

SEQ ID NO: 96754 - DNA, 25 bp, Canis familiaris
gcgggagcagatgagccagcatccg

SEQ ID NO: 96755 - DNA, 25 bp, Canis familiaris
gcgggagcagcagcagcaagatgga

SEQ ID NO: 96756 - DNA, 25 bp, Canis familiaris
gcggctgctccagcagctttggaac

SEQ ID NO: 96757 - DNA, 25 bp, Canis familiaris
gcggctcattacaacttataggata

SEQ ID NO: 96758 - DNA, 25 bp, Canis familiaris
gcggtcattgcgggttggagagaag

SEQ ID NO: 96759 - DNA, 25 bp, Canis familiaris
gcggaattgaggactctgaaggaag

SEQ ID NO: 96760 - DNA, 25 bp, Canis familiaris
gcggccaagaggattgttgcggacc

SEQ ID NO: 96761 - DNA, 25 bp, Canis familiaris
gctccccttgagattggctcaggac

SEQ ID NO: 96762 - DNA, 25 bp, Canis familiaris
gcataatccttgctttaccacaatt

SEQ ID NO: 96763 - DNA, 25 bp, Canis familiaris
gctaatcatcaaaacttaccacctg

SEQ ID NO: 96764 - DNA, 25 bp, Canis familiaris
gctgaatatatgaccacgctcaccc

SEQ ID NO: 96765 - DNA, 25 bp, Canis familiaris
gctgaccattgagctagccatcgtg

SEQ ID NO: 96766 - DNA, 25 bp, Canis familiaris
gctgagtgaagagccccatttgggg

SEQ ID NO: 96767 - DNA, 25 bp, Canis familiaris
gctgaattaatgccaaccctaatgg

SEQ ID NO: 96768 - DNA, 25 bp, Canis familiaris
gcggtaattccagctccaatagcgt

SEQ ID NO: 96769 - DNA, 25 bp, Canis familiaris
gcggtaattccagctccaatagcgt

SEQ ID NO: 96770 - DNA, 25 bp, Canis familiaris
gcggtaattccagctccaatagcgt

SEQ ID NO: 96771 - DNA, 25 bp, Canis familiaris
gcggtaattccagctccaatagcgt

SEQ ID NO: 96772 - DNA, 25 bp, Canis familiaris
gctgttaaagccacccacagtggcc

SEQ ID NO: 96773 - DNA, 25 bp, Canis familiaris
gctgttaataaagccaacttctttc

SEQ ID NO: 96774 - DNA, 25 bp, Canis familiaris
gctgttcctagcacagtactgcttc

SEQ ID NO: 96775 - DNA, 25 bp, Canis familiaris
gctggatggtcacacagctcacgtt

SEQ ID NO: 96776 - DNA, 25 bp, Canis familiaris
gctgtgcagagaggcctcagctcag

SEQ ID NO: 96777 - DNA, 25 bp, Canis familiaris
gcgtgaggggccgagatgcggtgac

SEQ ID NO: 96778 - DNA, 25 bp, Canis familiaris
gcggatggtggacacagtggagaag

SEQ ID NO: 96779 - DNA, 25 bp, Canis familiaris
gcggaggggggaagccaggaaggtg

SEQ ID NO: 96780 - DNA, 25 bp, Canis familiaris
gcggcctggaggcagagccggaatc

SEQ ID NO: 96781 - DNA, 25 bp, Canis familiaris
gcgggcggcaacaagagccgcctca

SEQ ID NO: 96782 - DNA, 25 bp, Canis familiaris
gctgggggctagagatcggagctca

SEQ ID NO: 96783 - DNA, 25 bp, Canis familiaris
gctggggtcggggccaggaggaatt

SEQ ID NO: 96784 - DNA, 25 bp, Canis familiaris
gctggcaggatccggaccgggtgaa

SEQ ID NO: 96785 - DNA, 25 bp, Canis familiaris
gctggagtgtcgaggggtggtcaag

SEQ ID NO: 96786 - DNA, 25 bp, Canis familiaris
gcggaattcggaaagtgggctgacg

SEQ ID NO: 96787 - DNA, 25 bp, Canis familiaris
gctgttactacctaattgggtcacg

SEQ ID NO: 96788 - DNA, 25 bp, Canis familiaris
gctggtactactggaagggcttcga

SEQ ID NO: 96789 - DNA, 25 bp, Canis familiaris
gctggtactactggaagggcttcga

SEQ ID NO: 96790 - DNA, 25 bp, Canis familiaris
gctgggccaacggaaccagggtgca

SEQ ID NO: 96791 - DNA, 25 bp, Canis familiaris
gcgggccacagggcaaaatcgcgat

SEQ ID NO: 96792 - DNA, 25 bp, Canis familiaris
gcggtcccgtcggagcatatgagga

SEQ ID NO: 96793 - DNA, 25 bp, Canis familiaris
gctgctgctacctcttagacaagga

SEQ ID NO: 96794 - DNA, 25 bp, Canis familiaris
gcgtgtagcagctccaaagcactgg

SEQ ID NO: 96795 - DNA, 25 bp, Canis familiaris
gcgtgattcagcataaagagaaatg

SEQ ID NO: 96796 - DNA, 25 bp, Canis familiaris
gcgtgcactacttactcaggacaag

SEQ ID NO: 96797 - DNA, 25 bp, Canis familiaris
gcggagaacattgtgaggacaactg

SEQ ID NO: 96798 - DNA, 25 bp, Canis familiaris
gcgggaaggtgcctgtggtccaggc

SEQ ID NO: 96799 - DNA, 25 bp, Canis familiaris
gcggaatgggtttgtgtccttgact

SEQ ID NO: 96800 - DNA, 25 bp, Canis familiaris
gcgtgacggacttggtgttctaggc

SEQ ID NO: 96801 - DNA, 25 bp, Canis familiaris
gcggccttccttctgttgaaggccc

SEQ ID NO: 96802 - DNA, 25 bp, Canis familiaris
gctggctcatactttccttagaagc

SEQ ID NO: 96803 - DNA, 25 bp, Canis familiaris
gctgtggaagcttgtctcataagga

SEQ ID NO: 96804 - DNA, 25 bp, Canis familiaris
gctgagatgcagatagatcctaagg

SEQ ID NO: 96805 - DNA, 25 bp, Canis familiaris
gctggagagctttgtcactgtaatg

SEQ ID NO: 96806 - DNA, 25 bp, Canis familiaris
gcggagactgatcgttgcatcgagt

SEQ ID NO: 96807 - DNA, 25 bp, Canis familiaris
gcgggcagcgagggtggctgcagcc

SEQ ID NO: 96808 - DNA, 25 bp, Canis familiaris
gcgggcaagcagcagtgggaccgtg

SEQ ID NO: 96809 - DNA, 25 bp, Canis familiaris
gcggccaaggctagagggagcgcgt

SEQ ID NO: 96810 - DNA, 25 bp, Canis familiaris
gcggcccagccaatggcggagccgc

SEQ ID NO: 96811 - DNA, 25 bp, Canis familiaris
gcggccgacacaaagccggatgccc

SEQ ID NO: 96812 - DNA, 25 bp, Canis familiaris
gcggcccaacagtatctcgggctac

SEQ ID NO: 96813 - DNA, 25 bp, Canis familiaris
gctgggcaaaagaagtctggttgac

SEQ ID NO: 96814 - DNA, 25 bp, Canis familiaris
gctgtggcaagaacccactgggtga

SEQ ID NO: 96815 - DNA, 25 bp, Canis familiaris
gctggctaaatcctcccaggttgag

SEQ ID NO: 96816 - DNA, 25 bp, Canis familiaris
gctgtgttagatagttcctaattgg

SEQ ID NO: 96817 - DNA, 25 bp, Canis familiaris
gcgtgtccgaagaatatgcatgtat

SEQ ID NO: 96818 - DNA, 25 bp, Canis familiaris
gcggtcgcgcggatcatgatgccaa

SEQ ID NO: 96819 - DNA, 25 bp, Canis familiaris
gcggtcccgatcttgcagatggacg

SEQ ID NO: 96820 - DNA, 25 bp, Canis familiaris
gcggcccatctacatcgatggacgg

SEQ ID NO: 96821 - DNA, 25 bp, Canis familiaris
gctggcccttagaaccttgaagcct

SEQ ID NO: 96822 - DNA, 25 bp, Canis familiaris
gcggacctggaggacctggagacgc

SEQ ID NO: 96823 - DNA, 25 bp, Canis familiaris
gcggacatctcggtgcacgaggaga

SEQ ID NO: 96824 - DNA, 25 bp, Canis familiaris
gcggaattcatgcgtggcagagagg

SEQ ID NO: 96825 - DNA, 25 bp, Canis familiaris
gctggacaattcctggaaggaggtc

SEQ ID NO: 96826 - DNA, 25 bp, Canis familiaris
gctggtcaaccgtcaaagggcattc

SEQ ID NO: 96827 - DNA, 25 bp, Canis familiaris
gctggacatcctggacacagcgggc

SEQ ID NO: 96828 - DNA, 25 bp, Canis familiaris
gcggatctgattcaatcaaggcatc

SEQ ID NO: 96829 - DNA, 25 bp, Canis familiaris
gcggatgctgcgctacatcaagaag

SEQ ID NO: 96830 - DNA, 25 bp, Canis familiaris
gctggtggcatgcatcatcacagga

SEQ ID NO: 96831 - DNA, 25 bp, Canis familiaris
gcggcgttggtgacagcaggaagag

SEQ ID NO: 96832 - DNA, 25 bp, Canis familiaris
gcgggatgctcggaggaggcaaagg

SEQ ID NO: 96833 - DNA, 25 bp, Canis familiaris
gctggaatgtaccatggcagtcaca

SEQ ID NO: 96834 - DNA, 25 bp, Canis familiaris
gctggccgagcaggctgagcgatac

SEQ ID NO: 96835 - DNA, 25 bp, Canis familiaris
gctggccctgtgtcaggctgataaa

SEQ ID NO: 96836 - DNA, 25 bp, Canis familiaris
gcggccagcgggccgtgtgacaagc

SEQ ID NO: 96837 - DNA, 25 bp, Canis familiaris
gcgggagttctgggtggacaacacc

SEQ ID NO: 96838 - DNA, 25 bp, Canis familiaris
gctggggggagaggaggactacaac

SEQ ID NO: 96839 - DNA, 25 bp, Canis familiaris
gcgtggcggggagggagatctagac

SEQ ID NO: 96840 - DNA, 25 bp, Canis familiaris
gcgtgggggtgagtgtggtgtgaac

SEQ ID NO: 96841 - DNA, 25 bp, Canis familiaris
gcggttgtcggagcatgttggaatc

SEQ ID NO: 96842 - DNA, 25 bp, Canis familiaris
gcgggtatcaatatatcttggaatg

SEQ ID NO: 96843 - DNA, 25 bp, Canis familiaris
gcggtgtcatatacgtgatcttgcg

SEQ ID NO: 96844 - DNA, 25 bp, Canis familiaris
gcggtggcatcataatgtgttcatg

SEQ ID NO: 96845 - DNA, 25 bp, Canis familiaris
gctgtgtggcattggcaagttactt

SEQ ID NO: 96846 - DNA, 25 bp, Canis familiaris
gctgtgtgctgcttcactgcagaat

SEQ ID NO: 96847 - DNA, 25 bp, Canis familiaris
gctgtgtgcgttcttcacatttttg

SEQ ID NO: 96848 - DNA, 25 bp, Canis familiaris
gctgtagcctgacaagacatttttg

SEQ ID NO: 96849 - DNA, 25 bp, Canis familiaris
gctgacaccagatcggaatgccttc

SEQ ID NO: 96850 - DNA, 25 bp, Canis familiaris
gctacaccaatttgcgtttccatca

SEQ ID NO: 96851 - DNA, 25 bp, Canis familiaris
gctaaccagttaggtcaattccacc

SEQ ID NO: 96852 - DNA, 25 bp, Canis familiaris
gctggcccagttgggaaaatccccg

SEQ ID NO: 96853 - DNA, 25 bp, Canis familiaris
gctggcaccagtttttagcatatgc

SEQ ID NO: 96854 - DNA, 25 bp, Canis familiaris
gcggcggcacttctaagcaagtagc

SEQ ID NO: 96855 - DNA, 25 bp, Canis familiaris
gctggaggccttcctgaagaagctg

SEQ ID NO: 96856 - DNA, 25 bp, Canis familiaris
gctgtgatggcgatgccgaaggact

SEQ ID NO: 96857 - DNA, 25 bp, Canis familiaris
gcgtggcgctggtgctgaaggagat

SEQ ID NO: 96858 - DNA, 25 bp, Canis familiaris
gcggtgctggcagcgctgaaggagc

SEQ ID NO: 96859 - DNA, 25 bp, Canis familiaris
gctggtatgccagcctgcagaagcc

SEQ ID NO: 96860 - DNA, 25 bp, Canis familiaris
gctgtttgacgcattcagaagaaag

SEQ ID NO: 96861 - DNA, 25 bp, Canis familiaris
gctgtttgactcagaccacaactaa

SEQ ID NO: 96862 - DNA, 25 bp, Canis familiaris
gctgtggggtccaatacatccctaa

SEQ ID NO: 96863 - DNA, 25 bp, Canis familiaris
gctgatctggggatgtcacccccat

SEQ ID NO: 96864 - DNA, 25 bp, Canis familiaris
gctgatcagggtgtacctgcctacc

SEQ ID NO: 96865 - DNA, 25 bp, Canis familiaris
gctggagcaggtgtacatccgtggc

SEQ ID NO: 96866 - DNA, 25 bp, Canis familiaris
gcggccatgtgtgaagttcgtggcg

SEQ ID NO: 96867 - DNA, 25 bp, Canis familiaris
gcggacactgctgagaggacatggg

SEQ ID NO: 96868 - DNA, 25 bp, Canis familiaris
gcggccatctgctgcagaggttcga

SEQ ID NO: 96869 - DNA, 25 bp, Canis familiaris
gctggccatcatccataacctatgg

SEQ ID NO: 96870 - DNA, 25 bp, Canis familiaris
gctggctcagtgcctcaaggaatat

SEQ ID NO: 96871 - DNA, 25 bp, Canis familiaris
gcggtcagtgtgatagcgatttcct

SEQ ID NO: 96872 - DNA, 25 bp, Canis familiaris
gcgggcagtgtgtacgcaggtgtcc

SEQ ID NO: 96873 - DNA, 25 bp, Canis familiaris
gcggattgtggatggcgtttagcct

SEQ ID NO: 96874 - DNA, 25 bp, Canis familiaris
gcggtggcggaatggctgtgccaga

SEQ ID NO: 96875 - DNA, 25 bp, Canis familiaris
gcgggtgcggtatctggtgagagac

SEQ ID NO: 96876 - DNA, 25 bp, Canis familiaris
gcgggtgcggttggtggaaagagac

SEQ ID NO: 96877 - DNA, 25 bp, Canis familiaris
gcgggtgcggttggtggaaagagac

SEQ ID NO: 96878 - DNA, 25 bp, Canis familiaris
gcgggtgcggttcgtggaaagatac

SEQ ID NO: 96879 - DNA, 25 bp, Canis familiaris
gcgggtgcggttcgtggaaagatac

SEQ ID NO: 96880 - DNA, 25 bp, Canis familiaris
gcgggagggcgtcgtggacaagaac

SEQ ID NO: 96881 - DNA, 25 bp, Canis familiaris
gctgggagggaaagctggccccaac

SEQ ID NO: 96882 - DNA, 25 bp, Canis familiaris
gctgggaggtaaactctcctctgaa

SEQ ID NO: 96883 - DNA, 25 bp, Canis familiaris
gctggaggactatacgcctacgatc

SEQ ID NO: 96884 - DNA, 25 bp, Canis familiaris
gctggaggactatacgcctacgatc

SEQ ID NO: 96885 - DNA, 25 bp, Canis familiaris
gctggggactcatacccctgagaac

SEQ ID NO: 96886 - DNA, 25 bp, Canis familiaris
gcggggattgatgagttcctagatc

SEQ ID NO: 96887 - DNA, 25 bp, Canis familiaris
gctgggaggtgaggagttcctggtg

SEQ ID NO: 96888 - DNA, 25 bp, Canis familiaris
gcgggaggaggctgttgccatggac

SEQ ID NO: 96889 - DNA, 25 bp, Canis familiaris
gcgggaggaggcagctgaggtggcc

SEQ ID NO: 96890 - DNA, 25 bp, Canis familiaris
gctggggctaagaggaggtgctgct

SEQ ID NO: 96891 - DNA, 25 bp, Canis familiaris
gcgggtgctttgatggtagcttgca

SEQ ID NO: 96892 - DNA, 25 bp, Canis familiaris
gctgtgttcctttctggagactaga

SEQ ID NO: 96893 - DNA, 25 bp, Canis familiaris
gctggaacatttttgctaatctgat

SEQ ID NO: 96894 - DNA, 25 bp, Canis familiaris
gcggaggctgttttgttcatgctga

SEQ ID NO: 96895 - DNA, 25 bp, Canis familiaris
gcggtgcctgtgatcatattcttaa

SEQ ID NO: 96896 - DNA, 25 bp, Canis familiaris
gcggagccagtgagatgttgcgttc

SEQ ID NO: 96897 - DNA, 25 bp, Canis familiaris
gcggagcctgctgggtaatggtgtc

SEQ ID NO: 96898 - DNA, 25 bp, Canis familiaris
gcggagatgtgcatggtcaatttca

SEQ ID NO: 96899 - DNA, 25 bp, Canis familiaris
gcggcagtccctaggacattacagc

SEQ ID NO: 96900 - DNA, 25 bp, Canis familiaris
gctggagacccattggacggagaaa

SEQ ID NO: 96901 - DNA, 25 bp, Canis familiaris
gctggagagccaaatttcttgagat

SEQ ID NO: 96902 - DNA, 25 bp, Canis familiaris
gctggggccagttggtttgacactg

SEQ ID NO: 96903 - DNA, 25 bp, Canis familiaris
gctgggtggcgcaggtttggcgcct

SEQ ID NO: 96904 - DNA, 25 bp, Canis familiaris
gctggagcccgcaaggtcattggga

SEQ ID NO: 96905 - DNA, 25 bp, Canis familiaris
gctgggcaaccgtgtgtgcatggaa

SEQ ID NO: 96906 - DNA, 25 bp, Canis familiaris
gctgggaaacagggtatcaaggacg

SEQ ID NO: 96907 - DNA, 25 bp, Canis familiaris
gcggcaaaccaggcagttcaagagc

SEQ ID NO: 96908 - DNA, 25 bp, Canis familiaris
gctggacaactcagagcttattcat

SEQ ID NO: 96909 - DNA, 25 bp, Canis familiaris
gctggtataatcagactttttttta

SEQ ID NO: 96910 - DNA, 25 bp, Canis familiaris
gctggcctaagctgacattttgttg

SEQ ID NO: 96911 - DNA, 25 bp, Canis familiaris
gctggccataaggtcctttgtgccg

SEQ ID NO: 96912 - DNA, 25 bp, Canis familiaris
gctgtcacaagaggtctttccctca

SEQ ID NO: 96913 - DNA, 25 bp, Canis familiaris
gctgattccaaaatctttgccctta

SEQ ID NO: 96914 - DNA, 25 bp, Canis familiaris
gctgattgttatatccctgacttta

SEQ ID NO: 96915 - DNA, 25 bp, Canis familiaris
gcttctttttccctcagaacttaga

SEQ ID NO: 96916 - DNA, 25 bp, Canis familiaris
gctttcttttccccataacaatata

SEQ ID NO: 96917 - DNA, 25 bp, Canis familiaris
gctggatttttctccatagtactta

SEQ ID NO: 96918 - DNA, 25 bp, Canis familiaris
gctggacttttgactttttttatat

SEQ ID NO: 96919 - DNA, 25 bp, Canis familiaris
gctggaattttgatgacctattgga

SEQ ID NO: 96920 - DNA, 25 bp, Canis familiaris
gctgtggtttaggggcctgttgttt

SEQ ID NO: 96921 - DNA, 25 bp, Canis familiaris
gctgggcatttaggaatcgcttttt

SEQ ID NO: 96922 - DNA, 25 bp, Canis familiaris
gctgggctttactccagcagatctt

SEQ ID NO: 96923 - DNA, 25 bp, Canis familiaris
gctgatgacttccgtaccaagtttg

SEQ ID NO: 96924 - DNA, 25 bp, Canis familiaris
gctgtccttcggaaaaggctcattc

SEQ ID NO: 96925 - DNA, 25 bp, Canis familiaris
gctggccttggaaagagctgtgctt

SEQ ID NO: 96926 - DNA, 25 bp, Canis familiaris
gctggcaattacataaatatctccc

SEQ ID NO: 96927 - DNA, 25 bp, Canis familiaris
gctggagaaaattcccaagttccaa

SEQ ID NO: 96928 - DNA, 25 bp, Canis familiaris
gctggggaaaatcccactttctcac

SEQ ID NO: 96929 - DNA, 25 bp, Canis familiaris
gcggaggaggaagtcccgttgccgc

SEQ ID NO: 96930 - DNA, 25 bp, Canis familiaris
gcggagggagaagcgggctccctgc

SEQ ID NO: 96931 - DNA, 25 bp, Canis familiaris
gcggtgaggagatgggggccgccgc

SEQ ID NO: 96932 - DNA, 25 bp, Canis familiaris
gcgggggcaagaaggcgaccgcggc

SEQ ID NO: 96933 - DNA, 25 bp, Canis familiaris
gcgggaggaagcggaaggccgaggc

SEQ ID NO: 96934 - DNA, 25 bp, Canis familiaris
gcggcgggtcaagaagtccgcacgc

SEQ ID NO: 96935 - DNA, 25 bp, Canis familiaris
gcgggaggttgagaagagcccactc

SEQ ID NO: 96936 - DNA, 25 bp, Canis familiaris
gcgggaggtcaaggacaagcaccct

SEQ ID NO: 96937 - DNA, 25 bp, Canis familiaris
gcggggctctccagaacatcatccc

SEQ ID NO: 96938 - DNA, 25 bp, Canis familiaris
gcggagggcaacaaggacagcttcc

SEQ ID NO: 96939 - DNA, 25 bp, Canis familiaris
gctgagcggagatcgactacgttcc

SEQ ID NO: 96940 - DNA, 25 bp, Canis familiaris
gctgtccggtcggattccggatcgc

SEQ ID NO: 96941 - DNA, 25 bp, Canis familiaris
gctaccgggtgagttacggcaccgc

SEQ ID NO: 96942 - DNA, 25 bp, Canis familiaris
gctaccttcttagttcaggaccgct

SEQ ID NO: 96943 - DNA, 25 bp, Canis familiaris
gtctcgttttaagagtcacccaagg

SEQ ID NO: 96944 - DNA, 25 bp, Canis familiaris
gttttttctaggcttcagacaccgg

SEQ ID NO: 96945 - DNA, 25 bp, Canis familiaris
gtttttactttctctcagaaagcga

SEQ ID NO: 96946 - DNA, 25 bp, Canis familiaris
gctgttttgacctccactagaagac

SEQ ID NO: 96947 - DNA, 25 bp, Canis familiaris
gctttttggacatctattcaaagtc

SEQ ID NO: 96948 - DNA, 25 bp, Canis familiaris
gctggtttggactcgaacataatga

SEQ ID NO: 96949 - DNA, 25 bp, Canis familiaris
gctggtttgccctgcaaatgctcaa

SEQ ID NO: 96950 - DNA, 25 bp, Canis familiaris
gctgtgtttcccttttaccagaggg

SEQ ID NO: 96951 - DNA, 25 bp, Canis familiaris
gctggatttgctttccttacaggag

SEQ ID NO: 96952 - DNA, 25 bp, Canis familiaris
gctgagatttctttccgtaactaga

SEQ ID NO: 96953 - DNA, 25 bp, Canis familiaris
gctggatctccaactttatagaaaa

SEQ ID NO: 96954 - DNA, 25 bp, Canis familiaris
gctgacctctttcttcaaggacaac

SEQ ID NO: 96955 - DNA, 25 bp, Canis familiaris
gctgttactttgcttcaagattccc

SEQ ID NO: 96956 - DNA, 25 bp, Canis familiaris
gctggtacttttctctttgtactgc

SEQ ID NO: 96957 - DNA, 25 bp, Canis familiaris
gcggtactaccctagtcttgtaaag

SEQ ID NO: 96958 - DNA, 25 bp, Canis familiaris
gcggttgtaactggtcttagtaaag

SEQ ID NO: 96959 - DNA, 25 bp, Canis familiaris
gctggcttgaatttggttaacccaa

SEQ ID NO: 96960 - DNA, 25 bp, Canis familiaris
gctggcttttattttcttgaccaaa

SEQ ID NO: 96961 - DNA, 25 bp, Canis familiaris
gctgagcctttgtttttcaagctga

SEQ ID NO: 96962 - DNA, 25 bp, Canis familiaris
gctggccattctttgtacttgccta

SEQ ID NO: 96963 - DNA, 25 bp, Canis familiaris
gctggagtctagttgtaccctctcc

SEQ ID NO: 96964 - DNA, 25 bp, Canis familiaris
gctggaccacagttgtacatcttca

SEQ ID NO: 96965 - DNA, 25 bp, Canis familiaris
gctgtacgtagactccatcctagag

SEQ ID NO: 96966 - DNA, 25 bp, Canis familiaris
gctgtacgtgaagctccattactgc

SEQ ID NO: 96967 - DNA, 25 bp, Canis familiaris
gctgtacgaggcagttttagctggg

SEQ ID NO: 96968 - DNA, 25 bp, Canis familiaris
gcttgagggacccttgttagccgtt

SEQ ID NO: 96969 - DNA, 25 bp, Canis familiaris
gctggagggtcccctgtaagccagc

SEQ ID NO: 96970 - DNA, 25 bp, Canis familiaris
gctggatgggatcaccaacaaccgc

SEQ ID NO: 96971 - DNA, 25 bp, Canis familiaris
gctggagcgagactgagccagcacg

SEQ ID NO: 96972 - DNA, 25 bp, Canis familiaris
gctgagcccagagtggccaacagag

SEQ ID NO: 96973 - DNA, 25 bp, Canis familiaris
gcggccacagctgggcaacaaggtt

SEQ ID NO: 96974 - DNA, 25 bp, Canis familiaris
gctggccattctgggaaataacctc

SEQ ID NO: 96975 - DNA, 25 bp, Canis familiaris
gctggctcttctgggcccagaaggc

SEQ ID NO: 96976 - DNA, 25 bp, Canis familiaris
gctggctgctcgcggctgagcagcc

SEQ ID NO: 96977 - DNA, 25 bp, Canis familiaris
gcggtgctggtggaggagcaggccg

SEQ ID NO: 96978 - DNA, 25 bp, Canis familiaris
gcggcgggatgaaagatgcagtccg

SEQ ID NO: 96979 - DNA, 25 bp, Canis familiaris
gcggcggaatcacaggctgattacc

SEQ ID NO: 96980 - DNA, 25 bp, Canis familiaris
gcggcgcgaaaggatggcgacaccc

SEQ ID NO: 96981 - DNA, 25 bp, Canis familiaris
gctggggacactgatgggacttcct

SEQ ID NO: 96982 - DNA, 25 bp, Canis familiaris
gctgggagaacgtttgttcccactc

SEQ ID NO: 96983 - DNA, 25 bp, Canis familiaris
gcggggaaactgatgtctgccgccc

SEQ ID NO: 96984 - DNA, 25 bp, Canis familiaris
gcggggaagagcacgcagagccgcc

SEQ ID NO: 96985 - DNA, 25 bp, Canis familiaris
gcggactgaagactacatggacccc

SEQ ID NO: 96986 - DNA, 25 bp, Canis familiaris
gcggtctgaatgtggctagcagccc

SEQ ID NO: 96987 - DNA, 25 bp, Canis familiaris
gctgtgtatttctgtgccagcagcc

SEQ ID NO: 96988 - DNA, 25 bp, Canis familiaris
gctgggactgtgagctgtctagagc

SEQ ID NO: 96989 - DNA, 25 bp, Canis familiaris
gctgggaccagttatgtggcatgat

SEQ ID NO: 96990 - DNA, 25 bp, Canis familiaris
gctgggcacaagaatctatgccgct

SEQ ID NO: 96991 - DNA, 25 bp, Canis familiaris
gctgggtaattggcttgcctgcttc

SEQ ID NO: 96992 - DNA, 25 bp, Canis familiaris
gctggtttcagggacatccttctgc

SEQ ID NO: 96993 - DNA, 25 bp, Canis familiaris
gctggaacctgaggttctcttctca

SEQ ID NO: 96994 - DNA, 25 bp, Canis familiaris
gctgatgaagcctaccttattggcc

SEQ ID NO: 96995 - DNA, 25 bp, Canis familiaris
gctggagagccatatcaatcttccc

SEQ ID NO: 96996 - DNA, 25 bp, Canis familiaris
gctggagtcctaccgagcttccagc

SEQ ID NO: 96997 - DNA, 25 bp, Canis familiaris
gctgggcatccgcaccgtagccatc

SEQ ID NO: 96998 - DNA, 25 bp, Canis familiaris
gctgggatgcaagaccttcagtgcc

SEQ ID NO: 96999 - DNA, 25 bp, Canis familiaris
gctgtagatttaacacttcgtacgc

SEQ ID NO: 97000 - DNA, 25 bp, Canis familiaris
gctgtttttaatctgttgtacacct

SEQ ID NO: 97001 - DNA, 25 bp, Canis familiaris
gctgttgtttaaaattactggacca

SEQ ID NO: 97002 - DNA, 25 bp, Canis familiaris
gctgtgggctatgagttgtagggac

SEQ ID NO: 97003 - DNA, 25 bp, Canis familiaris
gctggaggctgttttcctgagggac

SEQ ID NO: 97004 - DNA, 25 bp, Canis familiaris
gcttgccctggcttttaggggcact

SEQ ID NO: 97005 - DNA, 25 bp, Canis familiaris
gctggccgggcagggtgatggggcc

SEQ ID NO: 97006 - DNA, 25 bp, Canis familiaris
gctgtcactgggcgggtagagtacc

SEQ ID NO: 97007 - DNA, 25 bp, Canis familiaris
gctgtcctctccaggggacatgttc

SEQ ID NO: 97008 - DNA, 25 bp, Canis familiaris
gctgtcgccaacagcaggccaagtt

SEQ ID NO: 97009 - DNA, 25 bp, Canis familiaris
gctgtctactcggagcaggacacag

SEQ ID NO: 97010 - DNA, 25 bp, Canis familiaris
gctgtctactcggagcaggacacag

SEQ ID NO: 97011 - DNA, 25 bp, Canis familiaris
gctggcattgccctcaacgaccact

SEQ ID NO: 97012 - DNA, 25 bp, Canis familiaris
gcggattctcatggaacacatccac

SEQ ID NO: 97013 - DNA, 25 bp, Canis familiaris
gctggttctgctggaactcaacttc

SEQ ID NO: 97014 - DNA, 25 bp, Canis familiaris
gctgtgttatgtacaaccagtccct

SEQ ID NO: 97015 - DNA, 25 bp, Canis familiaris
gctggcttcattagcgaggctgacc

SEQ ID NO: 97016 - DNA, 25 bp, Canis familiaris
gctggccaactgacagcaggccacc

SEQ ID NO: 97017 - DNA, 25 bp, Canis familiaris
gctgcgagaacgacatcgacatcct

SEQ ID NO: 97018 - DNA, 25 bp, Canis familiaris
gctggatgacaactttgcctccatc

SEQ ID NO: 97019 - DNA, 25 bp, Canis familiaris
gctggagaaagtctgcaatcccatc

SEQ ID NO: 97020 - DNA, 25 bp, Canis familiaris
gctggatgagaacaatactcccatg

SEQ ID NO: 97021 - DNA, 25 bp, Canis familiaris
gctggtggacggacagactcccagt

SEQ ID NO: 97022 - DNA, 25 bp, Canis familiaris
gctggtggacgtcttgtcggagtac

SEQ ID NO: 97023 - DNA, 25 bp, Canis familiaris
gctggtggaaggtcttgcctggata

SEQ ID NO: 97024 - DNA, 25 bp, Canis familiaris
gctggggagggaggtcacttgatga

SEQ ID NO: 97025 - DNA, 25 bp, Canis familiaris
gcggaggagaaatgtttgttgcttt

SEQ ID NO: 97026 - DNA, 25 bp, Canis familiaris
gctgaagggaagtgtctattcacac

SEQ ID NO: 97027 - DNA, 25 bp, Canis familiaris
gctggaggggagctgtttcctccca

SEQ ID NO: 97028 - DNA, 25 bp, Canis familiaris
gctggggttgagttttgcatcctta

SEQ ID NO: 97029 - DNA, 25 bp, Canis familiaris
gcggcagagtctgtcattgtgctca

SEQ ID NO: 97030 - DNA, 25 bp, Canis familiaris
gcggctagatcggctgatgggccag

SEQ ID NO: 97031 - DNA, 25 bp, Canis familiaris
gctggccagtcgggattgggcagtc

SEQ ID NO: 97032 - DNA, 25 bp, Canis familiaris
gcggccactgcgtagatgaggaagc

SEQ ID NO: 97033 - DNA, 25 bp, Canis familiaris
gctgtccatccaccagctggtggag

SEQ ID NO: 97034 - DNA, 25 bp, Canis familiaris
gcggccatcaaggcggagtgcacgg

SEQ ID NO: 97035 - DNA, 25 bp, Canis familiaris
gctggcccgcaggcaggagaggcgg

SEQ ID NO: 97036 - DNA, 25 bp, Canis familiaris
gctggactccagggtacaggggttg

SEQ ID NO: 97037 - DNA, 25 bp, Canis familiaris
gctggacccaagtttacctgatgtt

SEQ ID NO: 97038 - DNA, 25 bp, Canis familiaris
gctgtcccagtacatgggcctgagt

SEQ ID NO: 97039 - DNA, 25 bp, Canis familiaris
gctgacccagaacagttgcgtcgct

SEQ ID NO: 97040 - DNA, 25 bp, Canis familiaris
gctgaccccagaacagtgggctact

SEQ ID NO: 97041 - DNA, 25 bp, Canis familiaris
gctgaccactcagtttttgactcct

SEQ ID NO: 97042 - DNA, 25 bp, Canis familiaris
gctggccctgagttatttattcgtg

SEQ ID NO: 97043 - DNA, 25 bp, Canis familiaris
gctaggttagtttgttgattcgtga

SEQ ID NO: 97044 - DNA, 25 bp, Canis familiaris
gctgaggattggtttttgtgtttgt

SEQ ID NO: 97045 - DNA, 25 bp, Canis familiaris
gctggtatcaggactttggttatgt

SEQ ID NO: 97046 - DNA, 25 bp, Canis familiaris
gctggtatcaggactttggttatgt

SEQ ID NO: 97047 - DNA, 25 bp, Canis familiaris
gctggttgcagggttctgcttgttt

SEQ ID NO: 97048 - DNA, 25 bp, Canis familiaris
gctggaggagcggatcactgctttt

SEQ ID NO: 97049 - DNA, 25 bp, Canis familiaris
gctggaggagcggatcactgctttt

SEQ ID NO: 97050 - DNA, 25 bp, Canis familiaris
gctggaggagcggatcactgctttt

SEQ ID NO: 97051 - DNA, 25 bp, Canis familiaris
gctggcacggggacaacatgctgga

SEQ ID NO: 97052 - DNA, 25 bp, Canis familiaris
gctggacgtgggctgcaaggtgaag

SEQ ID NO: 97053 - DNA, 25 bp, Canis familiaris
gctgggattgggcttcagtgtgaga

SEQ ID NO: 97054 - DNA, 25 bp, Canis familiaris
gctgggttagtgatttgtgctggaa

SEQ ID NO: 97055 - DNA, 25 bp, Canis familiaris
gctggttttgtgtatgttgtgtgtg

SEQ ID NO: 97056 - DNA, 25 bp, Canis familiaris
gctggtcgtcgtttggaggatgcac

SEQ ID NO: 97057 - DNA, 25 bp, Canis familiaris
gctggtggtccaagtggggtgacgg

SEQ ID NO: 97058 - DNA, 25 bp, Canis familiaris
gctggttgggcccggggctgaagaa

SEQ ID NO: 97059 - DNA, 25 bp, Canis familiaris
gctgtttggactatgcagggtaacc

SEQ ID NO: 97060 - DNA, 25 bp, Canis familiaris
gttcgaccagtacagggtatactcg

SEQ ID NO: 97061 - DNA, 25 bp, Canis familiaris
gttgggcccaagcagtgggtcttcc

SEQ ID NO: 97062 - DNA, 25 bp, Canis familiaris
gctcggtgcccaatgggtgcgaaga

SEQ ID NO: 97063 - DNA, 25 bp, Canis familiaris
gctacagaccctaaggtcccgagct

SEQ ID NO: 97064 - DNA, 25 bp, Canis familiaris
gctacgtcgccctggacttcgagca

SEQ ID NO: 97065 - DNA, 25 bp, Canis familiaris
gcaggcgttccagtggtccccggca

SEQ ID NO: 97066 - DNA, 25 bp, Canis familiaris
gctggtggtggctggccaccacgga

SEQ ID NO: 97067 - DNA, 25 bp, Canis familiaris
gctggggtacaagcagaccctgaaa

SEQ ID NO: 97068 - DNA, 25 bp, Canis familiaris
gctggggtaacaacatagacctgct

SEQ ID NO: 97069 - DNA, 25 bp, Canis familiaris
gctggcaaacttgccaagacctcct

SEQ ID NO: 97070 - DNA, 25 bp, Canis familiaris
gctgatcagaccgcccaaaagatcc

SEQ ID NO: 97071 - DNA, 25 bp, Canis familiaris
gctgatgctaactgccactaaagat

SEQ ID NO: 97072 - DNA, 25 bp, Canis familiaris
gctgtcatcatcaatggccactaat

SEQ ID NO: 97073 - DNA, 25 bp, Canis familiaris
gctgtctgaagaagccacaagtccg

SEQ ID NO: 97074 - DNA, 25 bp, Canis familiaris
gctgtcgagagttctagagcgtcgg

SEQ ID NO: 97075 - DNA, 25 bp, Canis familiaris
gctgtggagacttccggcgaaagca

SEQ ID NO: 97076 - DNA, 25 bp, Canis familiaris
gctggcactgcttcccaggaaaagc

SEQ ID NO: 97077 - DNA, 25 bp, Canis familiaris
gctggcctggtgtcgataaaaacta

SEQ ID NO: 97078 - DNA, 25 bp, Canis familiaris
gcggcttggtgactctagataacct

SEQ ID NO: 97079 - DNA, 25 bp, Canis familiaris
gcaggcggtggactttggagaaccc

SEQ ID NO: 97080 - DNA, 25 bp, Canis familiaris
gcggcggctggagctggagagagac

SEQ ID NO: 97081 - DNA, 25 bp, Canis familiaris
gctgggcgggattcggaggaggccg

SEQ ID NO: 97082 - DNA, 25 bp, Canis familiaris
gctggcccgaagtagcgggcagccc

SEQ ID NO: 97083 - DNA, 25 bp, Canis familiaris
gctggcccgggatgtaggacatctc

SEQ ID NO: 97084 - DNA, 25 bp, Canis familiaris
gcggcggcgggatgaaagatgcagt

SEQ ID NO: 97085 - DNA, 25 bp, Canis familiaris
gctggctggcagggaaggaaaagaa

SEQ ID NO: 97086 - DNA, 25 bp, Canis familiaris
gctgagggcaaaggaggttaggaaa

SEQ ID NO: 97087 - DNA, 25 bp, Canis familiaris
gctggaggcagcaaggggacgagtg

SEQ ID NO: 97088 - DNA, 25 bp, Canis familiaris
gcggagaggccaagtggaccctggc

SEQ ID NO: 97089 - DNA, 25 bp, Canis familiaris
gctgggggacatgtgggcccagagc

SEQ ID NO: 97090 - DNA, 25 bp, Canis familiaris
gctgagtggggtgggggctggaacc

SEQ ID NO: 97091 - DNA, 25 bp, Canis familiaris
gctggtggagaacacggacgagacc

SEQ ID NO: 97092 - DNA, 25 bp, Canis familiaris
gctggggaagagcagggaggccgcc

SEQ ID NO: 97093 - DNA, 25 bp, Canis familiaris
gctggcccaacaggggaaggctcca

SEQ ID NO: 97094 - DNA, 25 bp, Canis familiaris
gctggccgacctggagtacggcctg

SEQ ID NO: 97095 - DNA, 25 bp, Canis familiaris
gcggcaaggccgagaactgcgccgc

SEQ ID NO: 97096 - DNA, 25 bp, Canis familiaris
gcggcaagtggctggagaaggctcg

SEQ ID NO: 97097 - DNA, 25 bp, Canis familiaris
gcggctcagggcaagtatgaaggca

SEQ ID NO: 97098 - DNA, 25 bp, Canis familiaris
gctggctcacgtaacttgagctgga

SEQ ID NO: 97099 - DNA, 25 bp, Canis familiaris
gctgacaccgtcactggacggattc

SEQ ID NO: 97100 - DNA, 25 bp, Canis familiaris
gcggcccgagctatgagaggctgat

SEQ ID NO: 97101 - DNA, 25 bp, Canis familiaris
gctggccacgggagcaaggttcaag

SEQ ID NO: 97102 - DNA, 25 bp, Canis familiaris
gctgaggatcgaggagacaaggtac

SEQ ID NO: 97103 - DNA, 25 bp, Canis familiaris
gctgatttcagagggatattcacta

SEQ ID NO: 97104 - DNA, 25 bp, Canis familiaris
gctggattcagaaggctcactccga

SEQ ID NO: 97105 - DNA, 25 bp, Canis familiaris
gctggctgggcaaggtattcctgca

SEQ ID NO: 97106 - DNA, 25 bp, Canis familiaris
gctggctggctcagcctattgtgtg

SEQ ID NO: 97107 - DNA, 25 bp, Canis familiaris
gctgtgctggtcacagccacactgt

SEQ ID NO: 97108 - DNA, 25 bp, Canis familiaris
gcggctgaatttcggcacctgcaat

SEQ ID NO: 97109 - DNA, 25 bp, Canis familiaris
gcggcggctttggtgactctagata

SEQ ID NO: 97110 - DNA, 25 bp, Canis familiaris
gctggaggcattcttgactgctcaa

SEQ ID NO: 97111 - DNA, 25 bp, Canis familiaris
gcggcagtttcaagctgatctccag

SEQ ID NO: 97112 - DNA, 25 bp, Canis familiaris
gcggcatctggtccagtgatccgcc

SEQ ID NO: 97113 - DNA, 25 bp, Canis familiaris
gcggctgcaggacagcagtgaccct

SEQ ID NO: 97114 - DNA, 25 bp, Canis familiaris
gctggtgctgatgaacattgacccc

SEQ ID NO: 97115 - DNA, 25 bp, Canis familiaris
gctggttgaactaattgcccggttg

SEQ ID NO: 97116 - DNA, 25 bp, Canis familiaris
gctgtgtatagtccatttcccaggt

SEQ ID NO: 97117 - DNA, 25 bp, Canis familiaris
gctggtaggtgtaactgctctagtt

SEQ ID NO: 97118 - DNA, 25 bp, Canis familiaris
gctggttagtgtcaggttagccctg

SEQ ID NO: 97119 - DNA, 25 bp, Canis familiaris
gctgggtcaatacagatgttcacca

SEQ ID NO: 97120 - DNA, 25 bp, Canis familiaris
gctgtggttatgcccaagattcaac

SEQ ID NO: 97121 - DNA, 25 bp, Canis familiaris
gctgtgttgttgcccaagttggagt

SEQ ID NO: 97122 - DNA, 25 bp, Canis familiaris
gctgggggtgggtagtaatggtgtc

SEQ ID NO: 97123 - DNA, 25 bp, Canis familiaris
gcttagggtggcttcagtttggtta

SEQ ID NO: 97124 - DNA, 25 bp, Canis familiaris
gctgtagtcgttttcagtacattgt

SEQ ID NO: 97125 - DNA, 25 bp, Canis familiaris
gctgggtagttgttcaatgtcaatg

SEQ ID NO: 97126 - DNA, 25 bp, Canis familiaris
gctgggctctggcactaactaatgt

SEQ ID NO: 97127 - DNA, 25 bp, Canis familiaris
gctgtggttcagaagtaggctttgt

SEQ ID NO: 97128 - DNA, 25 bp, Canis familiaris
gctggatttgctccaggggcttttg

SEQ ID NO: 97129 - DNA, 25 bp, Canis familiaris
gctggcttggtgccagggtcttgct

SEQ ID NO: 97130 - DNA, 25 bp, Canis familiaris
gctggcactgggctagtgcttcagc

SEQ ID NO: 97131 - DNA, 25 bp, Canis familiaris
gctggcccagagctgttgctaaggc

SEQ ID NO: 97132 - DNA, 25 bp, Canis familiaris
gcggctccaggtttgagcgctagac

SEQ ID NO: 97133 - DNA, 25 bp, Canis familiaris
gcggctggcaggtgtcaggtggaaa

SEQ ID NO: 97134 - DNA, 25 bp, Canis familiaris
gctggcgagaggtttctgggtcata

SEQ ID NO: 97135 - DNA, 25 bp, Canis familiaris
gctgggtgggagttctagtccatca

SEQ ID NO: 97136 - DNA, 25 bp, Canis familiaris
gctggagtccggttcattggtccaa

SEQ ID NO: 97137 - DNA, 25 bp, Canis familiaris
gctgggctcccttaattggatctaa

SEQ ID NO: 97138 - DNA, 25 bp, Canis familiaris
gctgggctttcttgtactttataaa

SEQ ID NO: 97139 - DNA, 25 bp, Canis familiaris
gctggttgttctttcctatgtgaag

SEQ ID NO: 97140 - DNA, 25 bp, Canis familiaris
gctggatggttttgatcctcgaggt

SEQ ID NO: 97141 - DNA, 25 bp, Canis familiaris
gctggacagctgaaagtgcctcggt

SEQ ID NO: 97142 - DNA, 25 bp, Canis familiaris
gctgaggcattgagggccggttcct

SEQ ID NO: 97143 - DNA, 25 bp, Canis familiaris
gctgagacatctggcgggttgaata

SEQ ID NO: 97144 - DNA, 25 bp, Canis familiaris
gctgtactgctggcagggccaagtg

SEQ ID NO: 97145 - DNA, 25 bp, Canis familiaris
gctgaaggtgctggagatgccaagt

SEQ ID NO: 97146 - DNA, 25 bp, Canis familiaris
gcagacatacctgagtccagttccc

SEQ ID NO: 97147 - DNA, 25 bp, Canis familiaris
gctggaagccagggccagagttccc

SEQ ID NO: 97148 - DNA, 25 bp, Canis familiaris
gctgaaacctctactaggttccgcg

SEQ ID NO: 97149 - DNA, 25 bp, Canis familiaris
gcagatcaacccaacgacgtttaga

SEQ ID NO: 97150 - DNA, 25 bp, Canis familiaris
gctgtcaacctcaagggcatctttc

SEQ ID NO: 97151 - DNA, 25 bp, Canis familiaris
gctgtcatgacccattagagatttc

SEQ ID NO: 97152 - DNA, 25 bp, Canis familiaris
gctgtaacccatatcatcttgctaa

SEQ ID NO: 97153 - DNA, 25 bp, Canis familiaris
gctgtgatacacaaagtcttgctct

SEQ ID NO: 97154 - DNA, 25 bp, Canis familiaris
gctgatggccagactctgtttgctg

SEQ ID NO: 97155 - DNA, 25 bp, Canis familiaris
gctggcgcatcagttgctgtccagc

SEQ ID NO: 97156 - DNA, 25 bp, Canis familiaris
gctggcacatcattttgctggagag

SEQ ID NO: 97157 - DNA, 25 bp, Canis familiaris
gctggcctgaagatcgtgagtgctg

SEQ ID NO: 97158 - DNA, 25 bp, Canis familiaris
gctggctaaaatcgcgctgaggggc

SEQ ID NO: 97159 - DNA, 25 bp, Canis familiaris
gcggctgatcagcatggcctatgga

SEQ ID NO: 97160 - DNA, 25 bp, Canis familiaris
gcggctcatcaccaagccgcagaac

SEQ ID NO: 97161 - DNA, 25 bp, Canis familiaris
gctggctacccagggaggaactgag

SEQ ID NO: 97162 - DNA, 25 bp, Canis familiaris
gctgtattccgctcgtggagactac

SEQ ID NO: 97163 - DNA, 25 bp, Canis familiaris
gctgtgttctccatcctggaggatg

SEQ ID NO: 97164 - DNA, 25 bp, Canis familiaris
gctgtgcaacatgtaccaggatgga

SEQ ID NO: 97165 - DNA, 25 bp, Canis familiaris
gctgtgacacctgccggtgatggag

SEQ ID NO: 97166 - DNA, 25 bp, Canis familiaris
gctggacacatttctagagttggca

SEQ ID NO: 97167 - DNA, 25 bp, Canis familiaris
gctggaccactcggagatggcactg

SEQ ID NO: 97168 - DNA, 25 bp, Canis familiaris
gctgagcctactcagggggctgtat

SEQ ID NO: 97169 - DNA, 25 bp, Canis familiaris
gctggcctgtgcccaggctggagct

SEQ ID NO: 97170 - DNA, 25 bp, Canis familiaris
gctgtcctgtggtcacatggggttg

SEQ ID NO: 97171 - DNA, 25 bp, Canis familiaris
gctggccctatgtactgtgtgggtg

SEQ ID NO: 97172 - DNA, 25 bp, Canis familiaris
gctggccatctttaagtctgggggc

SEQ ID NO: 97173 - DNA, 25 bp, Canis familiaris
gcggcgacttgtaagcatcggggtg

SEQ ID NO: 97174 - DNA, 25 bp, Canis familiaris
gcggcggctagaagagcagcgggag

SEQ ID NO: 97175 - DNA, 25 bp, Canis familiaris
gctggctgacaagtctaagcaggga

SEQ ID NO: 97176 - DNA, 25 bp, Canis familiaris
gctggctgagaagcgggagcacgag

SEQ ID NO: 97177 - DNA, 25 bp, Canis familiaris
gctgtgctgagattgtcaagcgacg

SEQ ID NO: 97178 - DNA, 25 bp, Canis familiaris
gctgtctgcattttcttggagaaat

SEQ ID NO: 97179 - DNA, 25 bp, Canis familiaris
gctggcagctattgtattaaaaaaa

SEQ ID NO: 97180 - DNA, 25 bp, Canis familiaris
gctggcagcctgttattgactacat

SEQ ID NO: 97181 - DNA, 25 bp, Canis familiaris
gctggctgtctgtttatcaatggca

SEQ ID NO: 97182 - DNA, 25 bp, Canis familiaris
gctggtgctttctcaaatggatgtc

SEQ ID NO: 97183 - DNA, 25 bp, Canis familiaris
gctgagacctccactaatggcaatc

SEQ ID NO: 97184 - DNA, 25 bp, Canis familiaris
gctgaacctgaaactcctggacaac

SEQ ID NO: 97185 - DNA, 25 bp, Canis familiaris
gctgtcccgaaatctgcgaaataca

SEQ ID NO: 97186 - DNA, 25 bp, Canis familiaris
gctacccatgaaccctgtaaaagga

SEQ ID NO: 97187 - DNA, 25 bp, Canis familiaris
gctgacccagacatcctgaaaacct

SEQ ID NO: 97188 - DNA, 25 bp, Canis familiaris
gctgtctccaacacttcacagagaa

SEQ ID NO: 97189 - DNA, 25 bp, Canis familiaris
gctgtcctttgcaatttaacgatga

SEQ ID NO: 97190 - DNA, 25 bp, Canis familiaris
gctgtgcctgtgtacatttacttca

SEQ ID NO: 97191 - DNA, 25 bp, Canis familiaris
gctggatttacagttgcttttgaat

SEQ ID NO: 97192 - DNA, 25 bp, Canis familiaris
gctggtttacgccgctttctgacac

SEQ ID NO: 97193 - DNA, 25 bp, Canis familiaris
gctggttctcaagtggactaggccc

SEQ ID NO: 97194 - DNA, 25 bp, Canis familiaris
gctggtttccctggatgctgagggc

SEQ ID NO: 97195 - DNA, 25 bp, Canis familiaris
gctggctcagtcggtagagcatgca

SEQ ID NO: 97196 - DNA, 25 bp, Canis familiaris
gctgtgcctccagaaggcatgcagc

SEQ ID NO: 97197 - DNA, 25 bp, Canis familiaris
gctgatgatcccgtatcaccatcac

SEQ ID NO: 97198 - DNA, 25 bp, Canis familiaris
gctgatgactggagccatcccagca

SEQ ID NO: 97199 - DNA, 25 bp, Canis familiaris
gctggagctgacaggctgctagaca

SEQ ID NO: 97200 - DNA, 25 bp, Canis familiaris
gctgtgagctgacttgactcctaac

SEQ ID NO: 97201 - DNA, 25 bp, Canis familiaris
gctgtgcacgaaatgagttccgact

SEQ ID NO: 97202 - DNA, 25 bp, Canis familiaris
gctgtcacagtaaagtctgccatca

SEQ ID NO: 97203 - DNA, 25 bp, Canis familiaris
gctggacacttatctcttgctcagc

SEQ ID NO: 97204 - DNA, 25 bp, Canis familiaris
gctggcgctctatgagcgcgtgccc

SEQ ID NO: 97205 - DNA, 25 bp, Canis familiaris
gctggccatctggaaggctctgacc

SEQ ID NO: 97206 - DNA, 25 bp, Canis familiaris
gctggctcactctaaggaatattcc

SEQ ID NO: 97207 - DNA, 25 bp, Canis familiaris
gctgacgccttactggcaatgcttc

SEQ ID NO: 97208 - DNA, 25 bp, Canis familiaris
gctggtctgctcagtgacagatttc

SEQ ID NO: 97209 - DNA, 25 bp, Canis familiaris
gctgttcggtggtcacattttggag

SEQ ID NO: 97210 - DNA, 25 bp, Canis familiaris
gctgtataactgtaaaatctgtgaa

SEQ ID NO: 97211 - DNA, 25 bp, Canis familiaris
gctgtcagacaaacataaacgggaa

SEQ ID NO: 97212 - DNA, 25 bp, Canis familiaris
gctgtcgtcattttaaaggtggtat

SEQ ID NO: 97213 - DNA, 25 bp, Canis familiaris
gctggcgtcagatgttgagggtgtt

SEQ ID NO: 97214 - DNA, 25 bp, Canis familiaris
gctgtcgtgggacttaaggtttcca

SEQ ID NO: 97215 - DNA, 25 bp, Canis familiaris
gctgggtggagatttacctggattc

SEQ ID NO: 97216 - DNA, 25 bp, Canis familiaris
gctggggcgagaccaatcgcaggct

SEQ ID NO: 97217 - DNA, 25 bp, Canis familiaris
gctggtggaggctcacaccaacttt

SEQ ID NO: 97218 - DNA, 25 bp, Canis familiaris
gctggtgtaacatctcaccaactct

SEQ ID NO: 97219 - DNA, 25 bp, Canis familiaris
gctggatgttctgactgcagcccac

SEQ ID NO: 97220 - DNA, 25 bp, Canis familiaris
gctggatgctctggaatctggaaga

SEQ ID NO: 97221 - DNA, 25 bp, Canis familiaris
gctggactcatggatatctagccga

SEQ ID NO: 97222 - DNA, 25 bp, Canis familiaris
gctgcagcagctggccatatgaagc

SEQ ID NO: 97223 - DNA, 25 bp, Canis familiaris
gctgatggcatggccagcttggctt

SEQ ID NO: 97224 - DNA, 25 bp, Canis familiaris
gctgaagcaggtggcttacatatac

SEQ ID NO: 97225 - DNA, 25 bp, Canis familiaris
gctggaaggtggccgcaattgacaa

SEQ ID NO: 97226 - DNA, 25 bp, Canis familiaris
gctggattgggccccattgagcagc

SEQ ID NO: 97227 - DNA, 25 bp, Canis familiaris
gctgtggtgtgggacctctggaaat

SEQ ID NO: 97228 - DNA, 25 bp, Canis familiaris
gctgtgatatgtctagctctcggac

SEQ ID NO: 97229 - DNA, 25 bp, Canis familiaris
gctggtagatgatagctcaccgacg

SEQ ID NO: 97230 - DNA, 25 bp, Canis familiaris
gctggatactgagagcaccgaccgc

SEQ ID NO: 97231 - DNA, 25 bp, Canis familiaris
gctggcccagtccaatgtgtttggg

SEQ ID NO: 97232 - DNA, 25 bp, Canis familiaris
gctggcttttgctagatgggtttgg

SEQ ID NO: 97233 - DNA, 25 bp, Canis familiaris
gctggctttgtcagagcaggctggt

SEQ ID NO: 97234 - DNA, 25 bp, Canis familiaris
gctggctactactgagcaggtgatg

SEQ ID NO: 97235 - DNA, 25 bp, Canis familiaris
gctggtacaaatggtggtggatggt

SEQ ID NO: 97236 - DNA, 25 bp, Canis familiaris
gctgtaataaagccggtgcgctgct

SEQ ID NO: 97237 - DNA, 25 bp, Canis familiaris
gctgtttacaactgtgtgctttaga

SEQ ID NO: 97238 - DNA, 25 bp, Canis familiaris
gctgtttcctggtgtacttttgtga

SEQ ID NO: 97239 - DNA, 25 bp, Canis familiaris
gctgttttgggtttcacttgctttg

SEQ ID NO: 97240 - DNA, 25 bp, Canis familiaris
gctgatttcagacatttctcttttt

SEQ ID NO: 97241 - DNA, 25 bp, Canis familiaris
gctcttatagcacaaatcggttttt

SEQ ID NO: 97242 - DNA, 25 bp, Canis familiaris
gctgtgttggcaccaactcggtgat

SEQ ID NO: 97243 - DNA, 25 bp, Canis familiaris
gctgatcctggagacccgggatcga

SEQ ID NO: 97244 - DNA, 25 bp, Canis familiaris
gctgtcttagagggctttgggaggc

SEQ ID NO: 97245 - DNA, 25 bp, Canis familiaris
gctggccagaggggcctgtcaggag

SEQ ID NO: 97246 - DNA, 25 bp, Canis familiaris
gctggccagaggctggcgggcgagc

SEQ ID NO: 97247 - DNA, 25 bp, Canis familiaris
gctgggcaggagttggggctcgagc

SEQ ID NO: 97248 - DNA, 25 bp, Canis familiaris
gctggaattgactggggcatctccc

SEQ ID NO: 97249 - DNA, 25 bp, Canis familiaris
gctgtaactgtaagaggcctgcatc

SEQ ID NO: 97250 - DNA, 25 bp, Canis familiaris
gctgtgagcatgctaaccggtgctt

SEQ ID NO: 97251 - DNA, 25 bp, Canis familiaris
gctgtgaaggtcttcctgactggct

SEQ ID NO: 97252 - DNA, 25 bp, Canis familiaris
gctgtgatcggtttcagtactttgt

SEQ ID NO: 97253 - DNA, 25 bp, Canis familiaris
gctggacagtgtccctgtttttttg

SEQ ID NO: 97254 - DNA, 25 bp, Canis familiaris
gctggatatcttgctgtgttttcta

SEQ ID NO: 97255 - DNA, 25 bp, Canis familiaris
gctgagatttcttttgtctttctct

SEQ ID NO: 97256 - DNA, 25 bp, Canis familiaris
gctgaagcttcgtatatttaattta

SEQ ID NO: 97257 - DNA, 25 bp, Canis familiaris
gctgaacggcgtgcattatcaacat

SEQ ID NO: 97258 - DNA, 25 bp, Canis familiaris
gctgaaaggcgtgcacagtcacaaa

SEQ ID NO: 97259 - DNA, 25 bp, Canis familiaris
gctttggggccctggccgaagtagc

SEQ ID NO: 97260 - DNA, 25 bp, Canis familiaris
gtttgggacccctgtgcagggtcac

SEQ ID NO: 97261 - DNA, 25 bp, Canis familiaris
gctgacagggaccccagggagggga

SEQ ID NO: 97262 - DNA, 25 bp, Canis familiaris
gctggggagactcccatgggggacc

SEQ ID NO: 97263 - DNA, 25 bp, Canis familiaris
gctggggcaactgccaggtggtgca

SEQ ID NO: 97264 - DNA, 25 bp, Canis familiaris
gctggagagcaagttccggcagggc

SEQ ID NO: 97265 - DNA, 25 bp, Canis familiaris
gctggagtggaggctccaggcccgc

SEQ ID NO: 97266 - DNA, 25 bp, Canis familiaris
gctgagcaaggagatccagcccgcc

SEQ ID NO: 97267 - DNA, 25 bp, Canis familiaris
gctgatgtgaggggtcaagtctgcc

SEQ ID NO: 97268 - DNA, 25 bp, Canis familiaris
gctgagtacgtcgtggagtccactg

SEQ ID NO: 97269 - DNA, 25 bp, Canis familiaris
gctgtgtgaccttaggcatgtaact

SEQ ID NO: 97270 - DNA, 25 bp, Canis familiaris
gctggctgaaaaaggctgtgacact

SEQ ID NO: 97271 - DNA, 25 bp, Canis familiaris
gctgggagacagagctgcttcaact

SEQ ID NO: 97272 - DNA, 25 bp, Canis familiaris
gctggcgaacagttcatccccagct

SEQ ID NO: 97273 - DNA, 25 bp, Canis familiaris
gctgggcaatggttactactcagat

SEQ ID NO: 97274 - DNA, 25 bp, Canis familiaris
gctgggctttatcagccagtcatta

SEQ ID NO: 97275 - DNA, 25 bp, Canis familiaris
gctgtgtgatttatatgtggctcat

SEQ ID NO: 97276 - DNA, 25 bp, Canis familiaris
gctggatggttgtataatggctctc

SEQ ID NO: 97277 - DNA, 25 bp, Canis familiaris
gctggcaggatttatcagtcagtcc

SEQ ID NO: 97278 - DNA, 25 bp, Canis familiaris
gctggaggatctgtaccatgtgcca

SEQ ID NO: 97279 - DNA, 25 bp, Canis familiaris
gctggcaggcttgctgagcagatct

SEQ ID NO: 97280 - DNA, 25 bp, Canis familiaris
gctggcggcttaggatgtgagctcc

SEQ ID NO: 97281 - DNA, 25 bp, Canis familiaris
gctggggattcaggagtgcacccgc

SEQ ID NO: 97282 - DNA, 25 bp, Canis familiaris
gctggagtgatgctcgtggacaccg

SEQ ID NO: 97283 - DNA, 25 bp, Canis familiaris
gctggaccatggtgggaacctggcc

SEQ ID NO: 97284 - DNA, 25 bp, Canis familiaris
gctgggtagagaaagtaacctgact

SEQ ID NO: 97285 - DNA, 25 bp, Canis familiaris
gctggtccaagaaagtatgatgcct

SEQ ID NO: 97286 - DNA, 25 bp, Canis familiaris
gctggtctcctgtagagtttgtctt

SEQ ID NO: 97287 - DNA, 25 bp, Canis familiaris
gctggttacagatgcttgttgatca

SEQ ID NO: 97288 - DNA, 25 bp, Canis familiaris
gctgtgctctataagacctttgtcc

SEQ ID NO: 97289 - DNA, 25 bp, Canis familiaris
gctggcttaatccatctaattgctg

SEQ ID NO: 97290 - DNA, 25 bp, Canis familiaris
gctggcttgtgctgtgtacagtgac

SEQ ID NO: 97291 - DNA, 25 bp, Canis familiaris
gctgggtctgcatgactactgtgac

SEQ ID NO: 97292 - DNA, 25 bp, Canis familiaris
gctgcagttctctgacttatcgaag

SEQ ID NO: 97293 - DNA, 25 bp, Canis familiaris
gctgatttgtcaggacgtcatctgg

SEQ ID NO: 97294 - DNA, 25 bp, Canis familiaris
gctgtcttgtctcagcaaccaggcc

SEQ ID NO: 97295 - DNA, 25 bp, Canis familiaris
gctgtgcctgatgtgtgagaacacc

SEQ ID NO: 97296 - DNA, 25 bp, Canis familiaris
gctggtctgacaggtgagactccac

SEQ ID NO: 97297 - DNA, 25 bp, Canis familiaris
gctgggctgccaggaaggccaagca

SEQ ID NO: 97298 - DNA, 25 bp, Canis familiaris
gctggaggctcagtgtggaccagac

SEQ ID NO: 97299 - DNA, 25 bp, Canis familiaris
gctggaggtgtcgtagctcccagct

SEQ ID NO: 97300 - DNA, 25 bp, Canis familiaris
gctggagtggtgtttgtgacccttg

SEQ ID NO: 97301 - DNA, 25 bp, Canis familiaris
gctgtagggctatatggaccccagg

SEQ ID NO: 97302 - DNA, 25 bp, Canis familiaris
gctggacaggtagaggcatctgccc

SEQ ID NO: 97303 - DNA, 25 bp, Canis familiaris
gctgttaggtggtggcacagccccc

SEQ ID NO: 97304 - DNA, 25 bp, Canis familiaris
gctgctatagggctgggacccataa

SEQ ID NO: 97305 - DNA, 25 bp, Canis familiaris
gctgttatggcagctgcaggacccc

SEQ ID NO: 97306 - DNA, 25 bp, Canis familiaris
gctgttatggcagctgcaggacccc

SEQ ID NO: 97307 - DNA, 25 bp, Canis familiaris
gctgttatggcagctgcaggacccc

SEQ ID NO: 97308 - DNA, 25 bp, Canis familiaris
gctgttttagcaccagagagcccaa

SEQ ID NO: 97309 - DNA, 25 bp, Canis familiaris
gctgtttcccagaatgcaactaaga

SEQ ID NO: 97310 - DNA, 25 bp, Canis familiaris
gctgtcttccactagtcacaaaagg

SEQ ID NO: 97311 - DNA, 25 bp, Canis familiaris
gctgtgttctcggagacaccacaac

SEQ ID NO: 97312 - DNA, 25 bp, Canis familiaris
gctgtgtatcaaaatgactcccccc

SEQ ID NO: 97313 - DNA, 25 bp, Canis familiaris
gctgtgttcagatgaaccccacacc

SEQ ID NO: 97314 - DNA, 25 bp, Canis familiaris
gctgttgggaagaaacgctggcctt

SEQ ID NO: 97315 - DNA, 25 bp, Canis familiaris
gctgtcgattaagaccggagcttgt

SEQ ID NO: 97316 - DNA, 25 bp, Canis familiaris
gctgggattccagtaattggagaag

SEQ ID NO: 97317 - DNA, 25 bp, Canis familiaris
gctggtgttggtgaatttgaagcag

SEQ ID NO: 97318 - DNA, 25 bp, Canis familiaris
gctggtgttggtgaaaggacccatg

SEQ ID NO: 97319 - DNA, 25 bp, Canis familiaris
gctgggccggtcgtagaggagcggt

SEQ ID NO: 97320 - DNA, 25 bp, Canis familiaris
gctggacaatgggctctgtggcaag

SEQ ID NO: 97321 - DNA, 25 bp, Canis familiaris
gctggaagctgaccgtggatgcaag

SEQ ID NO: 97322 - DNA, 25 bp, Canis familiaris
gctggcataggatagcatgtgagca

SEQ ID NO: 97323 - DNA, 25 bp, Canis familiaris
gctggatgtgtgtacgcgtgcatgc

SEQ ID NO: 97324 - DNA, 25 bp, Canis familiaris
gctggagcttggacgagtgtgcggc

SEQ ID NO: 97325 - DNA, 25 bp, Canis familiaris
gctggcacgaagaagcagttccaga

SEQ ID NO: 97326 - DNA, 25 bp, Canis familiaris
gctggggagagtggcagtttgcatg

SEQ ID NO: 97327 - DNA, 25 bp, Canis familiaris
gctgggctaagtggacgctgttgaa

SEQ ID NO: 97328 - DNA, 25 bp, Canis familiaris
gctgggctaagtggacgctgttgaa

SEQ ID NO: 97329 - DNA, 25 bp, Canis familiaris
gctgggctaagtggacgctgttgaa

SEQ ID NO: 97330 - DNA, 25 bp, Canis familiaris
gctgaagcgaaggtgactggtccca

SEQ ID NO: 97331 - DNA, 25 bp, Canis familiaris
gctggacgtcagacgtcgaggccca

SEQ ID NO: 97332 - DNA, 25 bp, Canis familiaris
gctgggggagctgctcaaggaccac

SEQ ID NO: 97333 - DNA, 25 bp, Canis familiaris
gctggtgctggggttcagggatgga

SEQ ID NO: 97334 - DNA, 25 bp, Canis familiaris
gctggttcgggagcgaggtgcagac

SEQ ID NO: 97335 - DNA, 25 bp, Canis familiaris
gctggtgacagtggtcctgggtcag

SEQ ID NO: 97336 - DNA, 25 bp, Canis familiaris
gctgatagaagagtgccctcggtca

SEQ ID NO: 97337 - DNA, 25 bp, Canis familiaris
gctgatagaagagtggcctcgtcat

SEQ ID NO: 97338 - DNA, 25 bp, Canis familiaris
gctggtgccatagtggccatcttgc

SEQ ID NO: 97339 - DNA, 25 bp, Canis familiaris
gctgtgtgagcatgcatgtccacgg

SEQ ID NO: 97340 - DNA, 25 bp, Canis familiaris
gctcattgcgcttgcatgagtcctg

SEQ ID NO: 97341 - DNA, 25 bp, Canis familiaris
gctgctgggctctatcaacagctta

SEQ ID NO: 97342 - DNA, 25 bp, Canis familiaris
gctgtgcccatcttgaagtcactga

SEQ ID NO: 97343 - DNA, 25 bp, Canis familiaris
gctgtccagcagtttcagcatcacc

SEQ ID NO: 97344 - DNA, 25 bp, Canis familiaris
gctgatccagcatgccaatgtgcag

SEQ ID NO: 97345 - DNA, 25 bp, Canis familiaris
gctgtcaacggccatcaggcggaac

SEQ ID NO: 97346 - DNA, 25 bp, Canis familiaris
gctgtagtccagctgcatgagcagg

SEQ ID NO: 97347 - DNA, 25 bp, Canis familiaris
gctgggccacgagggacaggaaggg

SEQ ID NO: 97348 - DNA, 25 bp, Canis familiaris
gctgggaaggactccggaaaggcca

SEQ ID NO: 97349 - DNA, 25 bp, Canis familiaris
gctggtgaagcgccttggggataag

SEQ ID NO: 97350 - DNA, 25 bp, Canis familiaris
gctggaccaggcctgggggatggag

SEQ ID NO: 97351 - DNA, 25 bp, Canis familiaris
gctggaccctcagtgtggggagtgg

SEQ ID NO: 97352 - DNA, 25 bp, Canis familiaris
gctggtccacaagttcagtccagtg

SEQ ID NO: 97353 - DNA, 25 bp, Canis familiaris
gctgggtccatattacatggctctt

SEQ ID NO: 97354 - DNA, 25 bp, Canis familiaris
gctagtgctcgaagctacggtgcga

SEQ ID NO: 97355 - DNA, 25 bp, Canis familiaris
gcatcaatatctctgtctgggacga

SEQ ID NO: 97356 - DNA, 25 bp, Canis familiaris
gctggatatgcacctgtgctgggat

SEQ ID NO: 97357 - DNA, 25 bp, Canis familiaris
gctggatgccagcgtgtgggaatct

SEQ ID NO: 97358 - DNA, 25 bp, Canis familiaris
gctggaccaaatctggagaatccca

SEQ ID NO: 97359 - DNA, 25 bp, Canis familiaris
gctcgccacaaatatgggtactgcg

SEQ ID NO: 97360 - DNA, 25 bp, Canis familiaris
gctgtgacagcaaaaatgacccacc

SEQ ID NO: 97361 - DNA, 25 bp, Canis familiaris
gctgttgaaaactatgccacacacc

SEQ ID NO: 97362 - DNA, 25 bp, Canis familiaris
gctggtaaagggaccagcccccatg

SEQ ID NO: 97363 - DNA, 25 bp, Canis familiaris
gctcgggagacttaaagcccccatg

SEQ ID NO: 97364 - DNA, 25 bp, Canis familiaris
gctgcggaggacttaactgccgctc

SEQ ID NO: 97365 - DNA, 25 bp, Canis familiaris
gctggagggacttagaggccatctg

SEQ ID NO: 97366 - DNA, 25 bp, Canis familiaris
gctgtacttgacacaaagcctcttc

SEQ ID NO: 97367 - DNA, 25 bp, Canis familiaris
gctggtctcaggagcaaagccgcta

SEQ ID NO: 97368 - DNA, 25 bp, Canis familiaris
gctggactcctgagaaaccccagct

SEQ ID NO: 97369 - DNA, 25 bp, Canis familiaris
gctggagtcctgtagaccagacccc

SEQ ID NO: 97370 - DNA, 25 bp, Canis familiaris
gctggtgttcgacatcacagccacc

SEQ ID NO: 97371 - DNA, 25 bp, Canis familiaris
gctgtgtttcattttcacaacaaaa

SEQ ID NO: 97372 - DNA, 25 bp, Canis familiaris
gctgaatattccaattaccacaaaa

SEQ ID NO: 97373 - DNA, 25 bp, Canis familiaris
gctgaagattcttgcaaaccatgaa

SEQ ID NO: 97374 - DNA, 25 bp, Canis familiaris
gctgaagaacttgaagctagtgaaa

SEQ ID NO: 97375 - DNA, 25 bp, Canis familiaris
gctgggagtccataagtcatgtgta

SEQ ID NO: 97376 - DNA, 25 bp, Canis familiaris
gctgaggggtctgttgtctttgcag

SEQ ID NO: 97377 - DNA, 25 bp, Canis familiaris
gctggggcgtgagctagtcatgtac

SEQ ID NO: 97378 - DNA, 25 bp, Canis familiaris
gctggtgggagcactgtgtgcgctg

SEQ ID NO: 97379 - DNA, 25 bp, Canis familiaris
gctggggccacatcttgtggtttgg

SEQ ID NO: 97380 - DNA, 25 bp, Canis familiaris
gctgagacctcacgtcgtgtggttt

SEQ ID NO: 97381 - DNA, 25 bp, Canis familiaris
gctgaaagtcacatagcctgttagt

SEQ ID NO: 97382 - DNA, 25 bp, Canis familiaris
gctgattatccggaagcctgttgac

SEQ ID NO: 97383 - DNA, 25 bp, Canis familiaris
gctgtgtctactgagagcctttagc

SEQ ID NO: 97384 - DNA, 25 bp, Canis familiaris
gctgtgcccctagactataggagcc

SEQ ID NO: 97385 - DNA, 25 bp, Canis familiaris
gctgtgaacttgcacacttggggca

SEQ ID NO: 97386 - DNA, 25 bp, Canis familiaris
gctggatatccataccatatggggc

SEQ ID NO: 97387 - DNA, 25 bp, Canis familiaris
gctggatgacatcgaacgcttggcg

SEQ ID NO: 97388 - DNA, 25 bp, Canis familiaris
gctggagagagggattgctggtgcc

SEQ ID NO: 97389 - DNA, 25 bp, Canis familiaris
gctggagaggagggctggcttgcac

SEQ ID NO: 97390 - DNA, 25 bp, Canis familiaris
gctggtagagggacgcgctacatca

SEQ ID NO: 97391 - DNA, 25 bp, Canis familiaris
gctggtaaggccagcagcacacctt

SEQ ID NO: 97392 - DNA, 25 bp, Canis familiaris
gctggtaagaccaacaatacacctt

SEQ ID NO: 97393 - DNA, 25 bp, Canis familiaris
gctggatgaagggcaaaatgaagtt

SEQ ID NO: 97394 - DNA, 25 bp, Canis familiaris
gctgggacaacctctatgacatgat

SEQ ID NO: 97395 - DNA, 25 bp, Canis familiaris
gctgggagacctatcattggtgatg

SEQ ID NO: 97396 - DNA, 25 bp, Canis familiaris
gctggggtctgtgtgattagtttgg

SEQ ID NO: 97397 - DNA, 25 bp, Canis familiaris
gctggtggtggggctggaagggggc

SEQ ID NO: 97398 - DNA, 25 bp, Canis familiaris
gctgtccttgggcgttagggagggc

SEQ ID NO: 97399 - DNA, 25 bp, Canis familiaris
gctgccctttcgcgtggaaagagga

SEQ ID NO: 97400 - DNA, 25 bp, Canis familiaris
gctgtctcttctcggagctcgagaa

SEQ ID NO: 97401 - DNA, 25 bp, Canis familiaris
gctgtccttcttggagtacaggtcg

SEQ ID NO: 97402 - DNA, 25 bp, Canis familiaris
gctgttgctattctgaggatccgct

SEQ ID NO: 97403 - DNA, 25 bp, Canis familiaris
gctgccgtgattgtcatggatcgct

SEQ ID NO: 97404 - DNA, 25 bp, Canis familiaris
gctgcatctgggacctcaaattctg

SEQ ID NO: 97405 - DNA, 25 bp, Canis familiaris
gctgatcaggtaaccaaagccgtgg

SEQ ID NO: 97406 - DNA, 25 bp, Canis familiaris
gctgaagatgaaactccacaacggg

SEQ ID NO: 97407 - DNA, 25 bp, Canis familiaris
gcagaaaaattctcccacagggtgg

SEQ ID NO: 97408 - DNA, 25 bp, Canis familiaris
gaatttatgaactcctaagggtgtg

SEQ ID NO: 97409 - DNA, 25 bp, Canis familiaris
gaattaatgccaaccctaatggggg

SEQ ID NO: 97410 - DNA, 25 bp, Canis familiaris
gctcttagtccttggcctcaaggct

SEQ ID NO: 97411 - DNA, 25 bp, Canis familiaris
gctgttggaccatggccaacttctt

SEQ ID NO: 97412 - DNA, 25 bp, Canis familiaris
gctgtatggagttgggacccttctt

SEQ ID NO: 97413 - DNA, 25 bp, Canis familiaris
gctgtcagggtgtaggatctcggtc

SEQ ID NO: 97414 - DNA, 25 bp, Canis familiaris
gctgtcagggagtgagctcaccgtc

SEQ ID NO: 97415 - DNA, 25 bp, Canis familiaris
gctggaggggcagagccaggctgtc

SEQ ID NO: 97416 - DNA, 25 bp, Canis familiaris
gctgaggagggcgaagccggtggag

SEQ ID NO: 97417 - DNA, 25 bp, Canis familiaris
gctggaggaggaaggcccgatggag

SEQ ID NO: 97418 - DNA, 25 bp, Canis familiaris
gctgaagtgaggaggcccatgggca

SEQ ID NO: 97419 - DNA, 25 bp, Canis familiaris
gctgaatggggtcatgcccatcgcc

SEQ ID NO: 97420 - DNA, 25 bp, Canis familiaris
gctgaagggaatatgcaccgcctcc

SEQ ID NO: 97421 - DNA, 25 bp, Canis familiaris
gctgaggcggctaaaccacagcgtt

SEQ ID NO: 97422 - DNA, 25 bp, Canis familiaris
gctgagggacccggacacggtataa

SEQ ID NO: 97423 - DNA, 25 bp, Canis familiaris
gctgagggaagccttgggggtaaga

SEQ ID NO: 97424 - DNA, 25 bp, Canis familiaris
gctaaaacagccttcacggggatag

SEQ ID NO: 97425 - DNA, 25 bp, Canis familiaris
gcataaggaacctacaccggtaagt

SEQ ID NO: 97426 - DNA, 25 bp, Canis familiaris
gctaacgaatcctcagcattgctta

SEQ ID NO: 97427 - DNA, 25 bp, Canis familiaris
gctccaaaacttcagcagtgcttct

SEQ ID NO: 97428 - DNA, 25 bp, Canis familiaris
gctcctaacactcccaaagtttagc

SEQ ID NO: 97429 - DNA, 25 bp, Canis familiaris
gctgtctaactacccaagacactat

SEQ ID NO: 97430 - DNA, 25 bp, Canis familiaris
gctgttacactaccagactgtcagt

SEQ ID NO: 97431 - DNA, 25 bp, Canis familiaris
gctgattagaccggagaccatatgt

SEQ ID NO: 97432 - DNA, 25 bp, Canis familiaris
gctgacaaagtccgaaccatgctgg

SEQ ID NO: 97433 - DNA, 25 bp, Canis familiaris
gctgtaaatgccaagaaagatgctg

SEQ ID NO: 97434 - DNA, 25 bp, Canis familiaris
gctggattaccaagaaggatcccca

SEQ ID NO: 97435 - DNA, 25 bp, Canis familiaris
gctggatacacctgggagaacctgc

SEQ ID NO: 97436 - DNA, 25 bp, Canis familiaris
gctggtgaaggctgggcaggccgtc

SEQ ID NO: 97437 - DNA, 25 bp, Canis familiaris
gctgggagaggctcagtggttcgcc

SEQ ID NO: 97438 - DNA, 25 bp, Canis familiaris
gctgggaagacctgtgttcctgagg

SEQ ID NO: 97439 - DNA, 25 bp, Canis familiaris
gctgggtatgctgaggtgggggagg

SEQ ID NO: 97440 - DNA, 25 bp, Canis familiaris
gctggtcaacataatcctggggggg

SEQ ID NO: 97441 - DNA, 25 bp, Canis familiaris
gctggtcaacataatccttgagaaa

SEQ ID NO: 97442 - DNA, 25 bp, Canis familiaris
gctcctgaatctatcctttcaaaag

SEQ ID NO: 97443 - DNA, 25 bp, Canis familiaris
gctgggattgttaccttgtagataa

SEQ ID NO: 97444 - DNA, 25 bp, Canis familiaris
gctgggattgttaccatctagataa

SEQ ID NO: 97445 - DNA, 25 bp, Canis familiaris
gctgtgttttttcttcagtgataaa

SEQ ID NO: 97446 - DNA, 25 bp, Canis familiaris
gctgtgtattatttgcatttagttg

SEQ ID NO: 97447 - DNA, 25 bp, Canis familiaris
gctggtctctattctagggatgtct

SEQ ID NO: 97448 - DNA, 25 bp, Canis familiaris
gctgttcacctgtctagtggaggcc

SEQ ID NO: 97449 - DNA, 25 bp, Canis familiaris
gctgattccctgacaagatgcaatg

SEQ ID NO: 97450 - DNA, 25 bp, Canis familiaris
gctgttcgcagcatgcagaagccgc

SEQ ID NO: 97451 - DNA, 25 bp, Canis familiaris
gctgtcgctgtcagagaatgccgct

SEQ ID NO: 97452 - DNA, 25 bp, Canis familiaris
gctgtgccattctgcagatgcagcc

SEQ ID NO: 97453 - DNA, 25 bp, Canis familiaris
gctgagctgcattcatcacagccgc

SEQ ID NO: 97454 - DNA, 25 bp, Canis familiaris
gctggtgctgcagtatgctcccagc

SEQ ID NO: 97455 - DNA, 25 bp, Canis familiaris
gctggatctgctgtttgaagcgcag

SEQ ID NO: 97456 - DNA, 25 bp, Canis familiaris
gctggatctgctgtttgaagcgcag

SEQ ID NO: 97457 - DNA, 25 bp, Canis familiaris
gctggtgctctggtttggagctcca

SEQ ID NO: 97458 - DNA, 25 bp, Canis familiaris
gctgggctctgtaggaagaccccgc

SEQ ID NO: 97459 - DNA, 25 bp, Canis familiaris
gctgggcactggtacaggattcccc

SEQ ID NO: 97460 - DNA, 25 bp, Canis familiaris
gctgttgcctgggacatggcttcac

SEQ ID NO: 97461 - DNA, 25 bp, Canis familiaris
gctggtgcctgagagcagtggccgc

SEQ ID NO: 97462 - DNA, 25 bp, Canis familiaris
gctggtctctgagaggctggagggg

SEQ ID NO: 97463 - DNA, 25 bp, Canis familiaris
gctggtctaacatgtgggtgggtcc

SEQ ID NO: 97464 - DNA, 25 bp, Canis familiaris
gctgttccagactctgtggtggtgt

SEQ ID NO: 97465 - DNA, 25 bp, Canis familiaris
gctgcccccatctctaggggcaagg

SEQ ID NO: 97466 - DNA, 25 bp, Canis familiaris
gctgtcgccttagcattcggcaaag

SEQ ID NO: 97467 - DNA, 25 bp, Canis familiaris
gctgggcctttgatgggacagaatg

SEQ ID NO: 97468 - DNA, 25 bp, Canis familiaris
gctggtggcttttcagcgtcagcag

SEQ ID NO: 97469 - DNA, 25 bp, Canis familiaris
gctggggctggatgagcgtgagaag

SEQ ID NO: 97470 - DNA, 25 bp, Canis familiaris
gctggggttgttggcctgaagatgc

SEQ ID NO: 97471 - DNA, 25 bp, Canis familiaris
gctgggtggatgctggcttccagaa

SEQ ID NO: 97472 - DNA, 25 bp, Canis familiaris
gctgggtgcagacgctgtctgacca

SEQ ID NO: 97473 - DNA, 25 bp, Canis familiaris
gctgtcctctggcctggtgacagca

SEQ ID NO: 97474 - DNA, 25 bp, Canis familiaris
gctgtcttcgggcgatgtcagaata

SEQ ID NO: 97475 - DNA, 25 bp, Canis familiaris
gctgttttcctgaggacagaacttc

SEQ ID NO: 97476 - DNA, 25 bp, Canis familiaris
gctgttttacttctgaaacacttcc

SEQ ID NO: 97477 - DNA, 25 bp, Canis familiaris
gctgattctgtactggtgctaaacc

SEQ ID NO: 97478 - DNA, 25 bp, Canis familiaris
gctgtttgggcttcctaatgactcc

SEQ ID NO: 97479 - DNA, 25 bp, Canis familiaris
gctgattctgtggtatctgtgttga

SEQ ID NO: 97480 - DNA, 25 bp, Canis familiaris
gctgtctttgagttttgttgactgt

SEQ ID NO: 97481 - DNA, 25 bp, Canis familiaris
gctgtgtttagccttatcatacctt

SEQ ID NO: 97482 - DNA, 25 bp, Canis familiaris
gctgatctgtgaaccttgtatacca

SEQ ID NO: 97483 - DNA, 25 bp, Canis familiaris
gctgtttgaaccactatagcataaa

SEQ ID NO: 97484 - DNA, 25 bp, Canis familiaris
gctgttgtaacccatctgatatcta

SEQ ID NO: 97485 - DNA, 25 bp, Canis familiaris
gctgttgtacattctgcatctggac

SEQ ID NO: 97486 - DNA, 25 bp, Canis familiaris
gctgtgagttctgagatgcctgtcc

SEQ ID NO: 97487 - DNA, 25 bp, Canis familiaris
gctgagagtccagatgtgccagcca

SEQ ID NO: 97488 - DNA, 25 bp, Canis familiaris
gctgagggccaggagacgcccagac

SEQ ID NO: 97489 - DNA, 25 bp, Canis familiaris
gctgcaggccctgaaggacacggcc

SEQ ID NO: 97490 - DNA, 25 bp, Canis familiaris
gctgcagtccctgttgtaactggtc

SEQ ID NO: 97491 - DNA, 25 bp, Canis familiaris
gctgtgccaccaaatatgtagactg

SEQ ID NO: 97492 - DNA, 25 bp, Canis familiaris
gctgtccacctgcaaaggagcttac

SEQ ID NO: 97493 - DNA, 25 bp, Canis familiaris
gctgaccacctgcaaacatgtctgt

SEQ ID NO: 97494 - DNA, 25 bp, Canis familiaris
gctgatctcctgcgcaaatatgaat

SEQ ID NO: 97495 - DNA, 25 bp, Canis familiaris
gctgtggcctcttccaataaagtga

SEQ ID NO: 97496 - DNA, 25 bp, Canis familiaris
gctgtcagcttccacgcaaataagt

SEQ ID NO: 97497 - DNA, 25 bp, Canis familiaris
gctgaccattcgacgcagaataggg

SEQ ID NO: 97498 - DNA, 25 bp, Canis familiaris
gctgcctgccaagccgaaaatgtgc

SEQ ID NO: 97499 - DNA, 25 bp, Canis familiaris
gctgtcccacttttacaaatgtcct

SEQ ID NO: 97500 - DNA, 25 bp, Canis familiaris
gctgtccgagctgtatgaagagagc

SEQ ID NO: 97501 - DNA, 25 bp, Canis familiaris
gctgttcgggacatgaggcagagcg

SEQ ID NO: 97502 - DNA, 25 bp, Canis familiaris
gctgtcgggcagctcgaaggtcagc

SEQ ID NO: 97503 - DNA, 25 bp, Canis familiaris
gctgtctggcggcaccaccatgtac

SEQ ID NO: 97504 - DNA, 25 bp, Canis familiaris
gctggggctgggagacttggacagg

SEQ ID NO: 97505 - DNA, 25 bp, Canis familiaris
gctggtctctgctgaaggttgtaag

SEQ ID NO: 97506 - DNA, 25 bp, Canis familiaris
gctgggctcagctagaaggttctgc

SEQ ID NO: 97507 - DNA, 25 bp, Canis familiaris
gctggtgccagacaaagcttggaaa

SEQ ID NO: 97508 - DNA, 25 bp, Canis familiaris
gctggtccagatcagcacagctgtg

SEQ ID NO: 97509 - DNA, 25 bp, Canis familiaris
gctggtcctgaccatgacagctgat

SEQ ID NO: 97510 - DNA, 25 bp, Canis familiaris
gctggtggctgaagaggagcgcatg

SEQ ID NO: 97511 - DNA, 25 bp, Canis familiaris
gctggtgatgctcaaggttgttccc

SEQ ID NO: 97512 - DNA, 25 bp, Canis familiaris
gctgttatttaatgatttgtcgctg

SEQ ID NO: 97513 - DNA, 25 bp, Canis familiaris
gctgttcatttaccaagttgatcca

SEQ ID NO: 97514 - DNA, 25 bp, Canis familiaris
gctgttcccatcactagatctgatc

SEQ ID NO: 97515 - DNA, 25 bp, Canis familiaris
gctgttggccagagcaagtcatgag

SEQ ID NO: 97516 - DNA, 25 bp, Canis familiaris
gctgatgtggcctgtggcacgagag

SEQ ID NO: 97517 - DNA, 25 bp, Canis familiaris
gctgtggaccagctggactcaaggc

SEQ ID NO: 97518 - DNA, 25 bp, Canis familiaris
gctgggaaagcactgggccaaagga

SEQ ID NO: 97519 - DNA, 25 bp, Canis familiaris
gcatcggagggacccctcaaaggca

SEQ ID NO: 97520 - DNA, 25 bp, Canis familiaris
gctgggaaggaagcctcaccttaat

SEQ ID NO: 97521 - DNA, 25 bp, Canis familiaris
gctgggagaaaagccgactcttctc

SEQ ID NO: 97522 - DNA, 25 bp, Canis familiaris
gctgctggagaaaattcccaagttc

SEQ ID NO: 97523 - DNA, 25 bp, Canis familiaris
gctgtggatcaacacacaccaagaa

SEQ ID NO: 97524 - DNA, 25 bp, Canis familiaris
gctgcaaatgcatcaaatatctaaa

SEQ ID NO: 97525 - DNA, 25 bp, Canis familiaris
gctgggatgctaccaagctctagaa

SEQ ID NO: 97526 - DNA, 25 bp, Canis familiaris
gctgagccgccagaatgcttggaga

SEQ ID NO: 97527 - DNA, 25 bp, Canis familiaris
gctgtgccagtattatctgttggtg

SEQ ID NO: 97528 - DNA, 25 bp, Canis familiaris
gctgtactgttcttttatggctgtc

SEQ ID NO: 97529 - DNA, 25 bp, Canis familiaris
gctgtagtcattgtatgtctggttc

SEQ ID NO: 97530 - DNA, 25 bp, Canis familiaris
gctgtcttttggttggcattttgca

SEQ ID NO: 97531 - DNA, 25 bp, Canis familiaris
gctgattttggctgggttgttcaca

SEQ ID NO: 97532 - DNA, 25 bp, Canis familiaris
gctgaaaattctctggtgatgttaa

SEQ ID NO: 97533 - DNA, 25 bp, Canis familiaris
gctgaggttcttctggatttctaca

SEQ ID NO: 97534 - DNA, 25 bp, Canis familiaris
gctggtgcccagattacatttctaa

SEQ ID NO: 97535 - DNA, 25 bp, Canis familiaris
gctgggcactccattgatgtttgtt

SEQ ID NO: 97536 - DNA, 25 bp, Canis familiaris
gctgagccactcaggtgttcttagt

SEQ ID NO: 97537 - DNA, 25 bp, Canis familiaris
gctgtggccccttgagtatttatgc

SEQ ID NO: 97538 - DNA, 25 bp, Canis familiaris
gctgtggactccttggtattttgta

SEQ ID NO: 97539 - DNA, 25 bp, Canis familiaris
gctgtgttcggctgttattaattga

SEQ ID NO: 97540 - DNA, 25 bp, Canis familiaris
gctgtggcctggccgttttacacaa

SEQ ID NO: 97541 - DNA, 25 bp, Canis familiaris
gcaggccctgactgaatttaacaca

SEQ ID NO: 97542 - DNA, 25 bp, Canis familiaris
gctgagccctacctgaaattagaag

SEQ ID NO: 97543 - DNA, 25 bp, Canis familiaris
gctgatgcactttcgtacactatag

SEQ ID NO: 97544 - DNA, 25 bp, Canis familiaris
gctgatcctaaccgccattaaggca

SEQ ID NO: 97545 - DNA, 25 bp, Canis familiaris
gctgtcctagccacatttcaagtgc

SEQ ID NO: 97546 - DNA, 25 bp, Canis familiaris
gctgtactacttcatctatagcacg

SEQ ID NO: 97547 - DNA, 25 bp, Canis familiaris
gctgtaccacaacatctgggacctt

SEQ ID NO: 97548 - DNA, 25 bp, Canis familiaris
gctgagaaaggacccgggagcctgg

SEQ ID NO: 97549 - DNA, 25 bp, Canis familiaris
gctgggcaaggagtacgtgggcaag

SEQ ID NO: 97550 - DNA, 25 bp, Canis familiaris
gctggggatggagtacctgtcccac

SEQ ID NO: 97551 - DNA, 25 bp, Canis familiaris
gctggtggaagaggcctgcttcccc

SEQ ID NO: 97552 - DNA, 25 bp, Canis familiaris
gctgagggaattcgacattgtccac

SEQ ID NO: 97553 - DNA, 25 bp, Canis familiaris
gctgagctggatattgtcctgtgct

SEQ ID NO: 97554 - DNA, 25 bp, Canis familiaris
gctgagtttttactgcacatgctta

SEQ ID NO: 97555 - DNA, 25 bp, Canis familiaris
gctgagtttttactgcacatgctta

SEQ ID NO: 97556 - DNA, 25 bp, Canis familiaris
gctgagtttttactgcacatgctta

SEQ ID NO: 97557 - DNA, 25 bp, Canis familiaris
gctgagtttttactgcacatgctta

SEQ ID NO: 97558 - DNA, 25 bp, Canis familiaris
gctgtattaatcacgcgatgttgac

SEQ ID NO: 97559 - DNA, 25 bp, Canis familiaris
gctgtgatatcaaagccctgagttg

SEQ ID NO: 97560 - DNA, 25 bp, Canis familiaris
gctgctgttataacccagccactga

SEQ ID NO: 97561 - DNA, 25 bp, Canis familiaris
gctgtttcttcagcacagccacagg

SEQ ID NO: 97562 - DNA, 25 bp, Canis familiaris
gctgtattcttaggccacaggtaca

SEQ ID NO: 97563 - DNA, 25 bp, Canis familiaris
gctgtccttgaatgccatagttgaa

SEQ ID NO: 97564 - DNA, 25 bp, Canis familiaris
gctgcccttgaactcaaaatctgca

SEQ ID NO: 97565 - DNA, 25 bp, Canis familiaris
gctgggttggaattgcagaattgcg

SEQ ID NO: 97566 - DNA, 25 bp, Canis familiaris
gctgggtgggaattccatctgtgcc

SEQ ID NO: 97567 - DNA, 25 bp, Canis familiaris
gctgggtggtgctcaccacagggct

SEQ ID NO: 97568 - DNA, 25 bp, Canis familiaris
gctgcgtgtcggtgtcaccgaggtc

SEQ ID NO: 97569 - DNA, 25 bp, Canis familiaris
gctcgcgatgggttgcgacggagga

SEQ ID NO: 97570 - DNA, 25 bp, Canis familiaris
gctccaggggactcacagaagggta

SEQ ID NO: 97571 - DNA, 25 bp, Canis familiaris
gctcccgtccacttacagaagggaa

SEQ ID NO: 97572 - DNA, 25 bp, Canis familiaris
gctcgccgtcaagttatcacaagag

SEQ ID NO: 97573 - DNA, 25 bp, Canis familiaris
gctgtgccttcggattcagacaaga

SEQ ID NO: 97574 - DNA, 25 bp, Canis familiaris
gctgggcttcatcattggccaagca

SEQ ID NO: 97575 - DNA, 25 bp, Canis familiaris
gctgggtgctatgatgggcactccc

SEQ ID NO: 97576 - DNA, 25 bp, Canis familiaris
gctgtgagagcttgggggacacacc

SEQ ID NO: 97577 - DNA, 25 bp, Canis familiaris
gctgagaagtagccgggaatgtctg

SEQ ID NO: 97578 - DNA, 25 bp, Canis familiaris
gctgaccagtgaggcaggggttgca

SEQ ID NO: 97579 - DNA, 25 bp, Canis familiaris
gctgagccgtaggcactgggtgtca

SEQ ID NO: 97580 - DNA, 25 bp, Canis familiaris
gctgagcctgttggacgacatgaac

SEQ ID NO: 97581 - DNA, 25 bp, Canis familiaris
gctgaggtgtgtgacacacagacag

SEQ ID NO: 97582 - DNA, 25 bp, Canis familiaris
gctgggccgttccaacagagaggct

SEQ ID NO: 97583 - DNA, 25 bp, Canis familiaris
gctccggtatgtgcaaggcgggctt

SEQ ID NO: 97584 - DNA, 25 bp, Canis familiaris
gctccgagttgaccaatggttggga

SEQ ID NO: 97585 - DNA, 25 bp, Canis familiaris
gctccggggcatcctggatttagaa

SEQ ID NO: 97586 - DNA, 25 bp, Canis familiaris
gctgttgtgggacatcgtattcaaa

SEQ ID NO: 97587 - DNA, 25 bp, Canis familiaris
gctgtttcgcctcatttattaaata

SEQ ID NO: 97588 - DNA, 25 bp, Canis familiaris
gctgttttattgccatttatagaaa

SEQ ID NO: 97589 - DNA, 25 bp, Canis familiaris
gctgaattattcccatttacttaac

SEQ ID NO: 97590 - DNA, 25 bp, Canis familiaris
gctgaattgttttcttaactctaga

SEQ ID NO: 97591 - DNA, 25 bp, Canis familiaris
gctgtatactatttattcaacttat

SEQ ID NO: 97592 - DNA, 25 bp, Canis familiaris
gctgttcttatcggctatcaacttt

SEQ ID NO: 97593 - DNA, 25 bp, Canis familiaris
gctgactttcttggtcattccttac

SEQ ID NO: 97594 - DNA, 25 bp, Canis familiaris
gctgtgctttttttatttttacata

SEQ ID NO: 97595 - DNA, 25 bp, Canis familiaris
gctgggatcttttaagcctttcact

SEQ ID NO: 97596 - DNA, 25 bp, Canis familiaris
gctgggatcttatttgcccttgtgg

SEQ ID NO: 97597 - DNA, 25 bp, Canis familiaris
gctgaggctatcaaaggctccttgt

SEQ ID NO: 97598 - DNA, 25 bp, Canis familiaris
gctgagtcatatttacctcctttcc

SEQ ID NO: 97599 - DNA, 25 bp, Canis familiaris
gctgatctcagagtttcctggcttt

SEQ ID NO: 97600 - DNA, 25 bp, Canis familiaris
gctgagctcagagaccttgctctgc

SEQ ID NO: 97601 - DNA, 25 bp, Canis familiaris
gctgagaaaagattgtgtcctgcca

SEQ ID NO: 97602 - DNA, 25 bp, Canis familiaris
gctgtacaaagcatgtggtcttact

SEQ ID NO: 97603 - DNA, 25 bp, Canis familiaris
gctgtaacattgcctggctcctaac

SEQ ID NO: 97604 - DNA, 25 bp, Canis familiaris
gctgataccattatactaccatccc

SEQ ID NO: 97605 - DNA, 25 bp, Canis familiaris
gctgatgcccatataactaccgatc

SEQ ID NO: 97606 - DNA, 25 bp, Canis familiaris
gctgatgatccgaataactacctgt

SEQ ID NO: 97607 - DNA, 25 bp, Canis familiaris
gctgtgaccgaaaactgtgtccagg

SEQ ID NO: 97608 - DNA, 25 bp, Canis familiaris
gctgacccgagatccggaagcaggc

SEQ ID NO: 97609 - DNA, 25 bp, Canis familiaris
gctgaccgcgcagccgcatgaaccg

SEQ ID NO: 97610 - DNA, 25 bp, Canis familiaris
gctgatccagcgtcgggagcaaagg

SEQ ID NO: 97611 - DNA, 25 bp, Canis familiaris
gctgtccaaggggctgcacaaggcc

SEQ ID NO: 97612 - DNA, 25 bp, Canis familiaris
gctgtccaaggggctgcacaaggcc

SEQ ID NO: 97613 - DNA, 25 bp, Canis familiaris
gctgttcctgtggtgcccataggcc

SEQ ID NO: 97614 - DNA, 25 bp, Canis familiaris
gctgatgaccgtgtgaagaagtgca

SEQ ID NO: 97615 - DNA, 25 bp, Canis familiaris
gctgatgacctctgccaggaatgtc

SEQ ID NO: 97616 - DNA, 25 bp, Canis familiaris
gctgggcacgttgagtgaatctcag

SEQ ID NO: 97617 - DNA, 25 bp, Canis familiaris
gctgggcacgttgagtgaatctcag

SEQ ID NO: 97618 - DNA, 25 bp, Canis familiaris
gctcggcaagtagatggagataaca

SEQ ID NO: 97619 - DNA, 25 bp, Canis familiaris
gctgggcagctgaaggatagagaag

SEQ ID NO: 97620 - DNA, 25 bp, Canis familiaris
gctgagacagctatgttaatgtagt

SEQ ID NO: 97621 - DNA, 25 bp, Canis familiaris
gctgatacgatcagtttatctgggg

SEQ ID NO: 97622 - DNA, 25 bp, Canis familiaris
gctgtacgagcacgtttactgtgtg

SEQ ID NO: 97623 - DNA, 25 bp, Canis familiaris
gctgtagtgatccaggtgaccacct

SEQ ID NO: 97624 - DNA, 25 bp, Canis familiaris
gctgtgtgtcagcaagatgctcccc

SEQ ID NO: 97625 - DNA, 25 bp, Canis familiaris
gctgtgttagtatgcagccacccca

SEQ ID NO: 97626 - DNA, 25 bp, Canis familiaris
gctgagtgaagtgggctccacaccc

SEQ ID NO: 97627 - DNA, 25 bp, Canis familiaris
gctgtggaaggtgtctgccatctgc

SEQ ID NO: 97628 - DNA, 25 bp, Canis familiaris
gctgtgagataactgtgcctgcaac

SEQ ID NO: 97629 - DNA, 25 bp, Canis familiaris
gctgaggcttgaatgcgttgaacct

SEQ ID NO: 97630 - DNA, 25 bp, Canis familiaris
gctgaatgttgaagcagtgcatcca

SEQ ID NO: 97631 - DNA, 25 bp, Canis familiaris
gctgaatgttaagaatggctctcga

SEQ ID NO: 97632 - DNA, 25 bp, Canis familiaris
gctgaatggtaagatgggctcctcg

SEQ ID NO: 97633 - DNA, 25 bp, Canis familiaris
gctgaagattgatgagtagagcccc

SEQ ID NO: 97634 - DNA, 25 bp, Canis familiaris
gctgaggcattcgaagctattcccc

SEQ ID NO: 97635 - DNA, 25 bp, Canis familiaris
gctgaggattccaactgacctccac

SEQ ID NO: 97636 - DNA, 25 bp, Canis familiaris
gctgatggatatgaaccaccagtcc

SEQ ID NO: 97637 - DNA, 25 bp, Canis familiaris
gctgttgctgtgtaaccagtcactc

SEQ ID NO: 97638 - DNA, 25 bp, Canis familiaris
gctgtcatctgtttttcagaccttt

SEQ ID NO: 97639 - DNA, 25 bp, Canis familiaris
gctgtcttttttgggactgctgtgt

SEQ ID NO: 97640 - DNA, 25 bp, Canis familiaris
gctgatgtccatgtgtgggattttg

SEQ ID NO: 97641 - DNA, 25 bp, Canis familiaris
gctgtgatgcctgtgtgtgctgagc

SEQ ID NO: 97642 - DNA, 25 bp, Canis familiaris
gctgtgtccagcgagcgctgcagag

SEQ ID NO: 97643 - DNA, 25 bp, Canis familiaris
gctgagatcgtgcagcagcaggcgc

SEQ ID NO: 97644 - DNA, 25 bp, Canis familiaris
gctgatgctcagaagaggctgtgcg

SEQ ID NO: 97645 - DNA, 25 bp, Canis familiaris
gctgtgcggcaaaggcagtctgctt

SEQ ID NO: 97646 - DNA, 25 bp, Canis familiaris
gctgtgcctccaaatgcagatgtct

SEQ ID NO: 97647 - DNA, 25 bp, Canis familiaris
gctgtcctctctgagagcttctacc

SEQ ID NO: 97648 - DNA, 25 bp, Canis familiaris
gctgtcctctctgagagcttctacc

SEQ ID NO: 97649 - DNA, 25 bp, Canis familiaris
gctgtcctctctgagagcttctacc

SEQ ID NO: 97650 - DNA, 25 bp, Canis familiaris
gctgtcctctctgagagcttctacc

SEQ ID NO: 97651 - DNA, 25 bp, Canis familiaris
gctgtcctctctgagagcttctacc

SEQ ID NO: 97652 - DNA, 25 bp, Canis familiaris
gctgtcctctctgagagcttctacc

SEQ ID NO: 97653 - DNA, 25 bp, Canis familiaris
gctgatgccatcgtcaagatgctgg

SEQ ID NO: 97654 - DNA, 25 bp, Canis familiaris
gctgtgcctttctgaggaggctaag

SEQ ID NO: 97655 - DNA, 25 bp, Canis familiaris
gctgtacagactttgcggtgttaag

SEQ ID NO: 97656 - DNA, 25 bp, Canis familiaris
gctgtagacattgtggggtctcaga

SEQ ID NO: 97657 - DNA, 25 bp, Canis familiaris
gctgctaggcagggggactattagg

SEQ ID NO: 97658 - DNA, 25 bp, Canis familiaris
gctgtcggatgcggggtctacgacg

SEQ ID NO: 97659 - DNA, 25 bp, Canis familiaris
gctgttgtgaagctgattccctgac

SEQ ID NO: 97660 - DNA, 25 bp, Canis familiaris
gctgtgtgtgatcgggaacccggac

SEQ ID NO: 97661 - DNA, 25 bp, Canis familiaris
gctgtatgggcggggacccagacgc

SEQ ID NO: 97662 - DNA, 25 bp, Canis familiaris
gctgtgtgagggggtgtcacccagc

SEQ ID NO: 97663 - DNA, 25 bp, Canis familiaris
gctctgggaggtaacttctccagct

SEQ ID NO: 97664 - DNA, 25 bp, Canis familiaris
gctccagtgggtacactacccaccc

SEQ ID NO: 97665 - DNA, 25 bp, Canis familiaris
gctgaaggcaaacgcttaaccaccc

SEQ ID NO: 97666 - DNA, 25 bp, Canis familiaris
gctgtgggaagacgcttactccagg

SEQ ID NO: 97667 - DNA, 25 bp, Canis familiaris
gctgagggataggagttgtctgcaa

SEQ ID NO: 97668 - DNA, 25 bp, Canis familiaris
gctgagcctggaccgaggtctgaac

SEQ ID NO: 97669 - DNA, 25 bp, Canis familiaris
gctgacctgtgggtgtggggcagcc

SEQ ID NO: 97670 - DNA, 25 bp, Canis familiaris
gctgtgcgtgtgcgtgagggaggca

SEQ ID NO: 97671 - DNA, 25 bp, Canis familiaris
gctgtggatccgcaggaggagggac

SEQ ID NO: 97672 - DNA, 25 bp, Canis familiaris
gctgtttcactggttatgcggcgga

SEQ ID NO: 97673 - DNA, 25 bp, Canis familiaris
gctgtttcactggttatgcggcgga

SEQ ID NO: 97674 - DNA, 25 bp, Canis familiaris
gctgtgattccatgtttgcggaggg

SEQ ID NO: 97675 - DNA, 25 bp, Canis familiaris
gctgtgaccgcaggacttgggagtc

SEQ ID NO: 97676 - DNA, 25 bp, Canis familiaris
gctgtacacaggggcctgggagcca

SEQ ID NO: 97677 - DNA, 25 bp, Canis familiaris
gctgatccatagaggcctggggcac

SEQ ID NO: 97678 - DNA, 25 bp, Canis familiaris
gctgtgccattcagtgtcgggtcac

SEQ ID NO: 97679 - DNA, 25 bp, Canis familiaris
gctgtgtctccttgattcaggtgtt

SEQ ID NO: 97680 - DNA, 25 bp, Canis familiaris
gctgtgtgtgccagaaagtttgctg

SEQ ID NO: 97681 - DNA, 25 bp, Canis familiaris
gctgttgtccattctaatatttctg

SEQ ID NO: 97682 - DNA, 25 bp, Canis familiaris
gctgtggtcgcgctaatattgataa

SEQ ID NO: 97683 - DNA, 25 bp, Canis familiaris
gctagatctgggcacaaactatcaa

SEQ ID NO: 97684 - DNA, 25 bp, Canis familiaris
gctgactctgggcaaagcactttgt

SEQ ID NO: 97685 - DNA, 25 bp, Canis familiaris
gctgacatttgaaaactgctcctgg

SEQ ID NO: 97686 - DNA, 25 bp, Canis familiaris
gctgtacagtgagaacaccctgcag

SEQ ID NO: 97687 - DNA, 25 bp, Canis familiaris
gctgtaagaagcaacaacctctcct

SEQ ID NO: 97688 - DNA, 25 bp, Canis familiaris
gctgtagaacgtcaccttgttctag

SEQ ID NO: 97689 - DNA, 25 bp, Canis familiaris
gctgtaacctgtaaacttggtctta

SEQ ID NO: 97690 - DNA, 25 bp, Canis familiaris
gctgtaccgctgagaactctggcgc

SEQ ID NO: 97691 - DNA, 25 bp, Canis familiaris
gctgttcatcggatacacctgagga

SEQ ID NO: 97692 - DNA, 25 bp, Canis familiaris
gctgcttcggatactacaccggtaa

SEQ ID NO: 97693 - DNA, 25 bp, Canis familiaris
gctgttggaatactgtgctttggga

SEQ ID NO: 97694 - DNA, 25 bp, Canis familiaris
gctgtgtggatatggtgctatggga

SEQ ID NO: 97695 - DNA, 25 bp, Canis familiaris
gctgtgtggcaccttggtagggagg

SEQ ID NO: 97696 - DNA, 25 bp, Canis familiaris
gctagtcgaggcctggctaggggcc

SEQ ID NO: 97697 - DNA, 25 bp, Canis familiaris
gctgagttgagtctgtgcggggtgt

SEQ ID NO: 97698 - DNA, 25 bp, Canis familiaris
gctgcatttggtggagccagggttg

SEQ ID NO: 97699 - DNA, 25 bp, Canis familiaris
gctgtgtggcctgggaagtgggtgt

SEQ ID NO: 97700 - DNA, 25 bp, Canis familiaris
gctctgtacctggtgtgcggggagc

SEQ ID NO: 97701 - DNA, 25 bp, Canis familiaris
gctcccccgaggacggggtgcgagc

SEQ ID NO: 97702 - DNA, 25 bp, Canis familiaris
gcttccccgataaggtcgaaggatg

SEQ ID NO: 97703 - DNA, 25 bp, Canis familiaris
gcaacccccaaatatccaagtggct

SEQ ID NO: 97704 - DNA, 25 bp, Canis familiaris
gcaccgttatcatgaagtccaatgg

SEQ ID NO: 97705 - DNA, 25 bp, Canis familiaris
gctcggttaaaggttcccagagtct

SEQ ID NO: 97706 - DNA, 25 bp, Canis familiaris
gcttcgttagaataatgccctgggc

SEQ ID NO: 97707 - DNA, 25 bp, Canis familiaris
gctgtcgtttaatttgatgcacctc

SEQ ID NO: 97708 - DNA, 25 bp, Canis familiaris
gctgtcgttttacttgtgaacttct

SEQ ID NO: 97709 - DNA, 25 bp, Canis familiaris
gctgtccttttgcttatggtatttc

SEQ ID NO: 97710 - DNA, 25 bp, Canis familiaris
gctgtagctgctgtgttttttatat

SEQ ID NO: 97711 - DNA, 25 bp, Canis familiaris
gctgctagtctatcttttttgcttt

SEQ ID NO: 97712 - DNA, 25 bp, Canis familiaris
gctgtcaggactgtttaatctgcct

SEQ ID NO: 97713 - DNA, 25 bp, Canis familiaris
gctgtcgaacatgatcgtgcgctcc

SEQ ID NO: 97714 - DNA, 25 bp, Canis familiaris
gctgctgggcaagacaggccatcga

SEQ ID NO: 97715 - DNA, 25 bp, Canis familiaris
gctgtcagtgaattagcaggtcatc

SEQ ID NO: 97716 - DNA, 25 bp, Canis familiaris
gctgttgtgcaaaatgcatgagcta

SEQ ID NO: 97717 - DNA, 25 bp, Canis familiaris
gctgtgtccaacatgctgctggaga

SEQ ID NO: 97718 - DNA, 25 bp, Canis familiaris
gctgagtactggaacgggcagaagg

SEQ ID NO: 97719 - DNA, 25 bp, Canis familiaris
gctgagtcctggaacgggcagaagg

SEQ ID NO: 97720 - DNA, 25 bp, Canis familiaris
gctgagtcctggaacgggcagaagg

SEQ ID NO: 97721 - DNA, 25 bp, Canis familiaris
gctgagtcctggagacattcgatac

SEQ ID NO: 97722 - DNA, 25 bp, Canis familiaris
gctgttccgacaagagcttctggag

SEQ ID NO: 97723 - DNA, 25 bp, Canis familiaris
gctgtccccacaagaggttcatatg

SEQ ID NO: 97724 - DNA, 25 bp, Canis familiaris
gctgacacctcaacgaggcttcagt

SEQ ID NO: 97725 - DNA, 25 bp, Canis familiaris
gctgagacagccagagggcttcctc

SEQ ID NO: 97726 - DNA, 25 bp, Canis familiaris
gctgcgacggggaaggtgtccttaa

SEQ ID NO: 97727 - DNA, 25 bp, Canis familiaris
gctgtactggcagctgtgtggtcct

SEQ ID NO: 97728 - DNA, 25 bp, Canis familiaris
gctgcggatggagctggaactcgat

SEQ ID NO: 97729 - DNA, 25 bp, Canis familiaris
gctgctgaaaaggctgtaactaagg

SEQ ID NO: 97730 - DNA, 25 bp, Canis familiaris
gctgctggaaagggcgaagggagag

SEQ ID NO: 97731 - DNA, 25 bp, Canis familiaris
gctccgcaaaggccgcataagtagg

SEQ ID NO: 97732 - DNA, 25 bp, Canis familiaris
gctcctgaaagatcgtcaaagacgg

SEQ ID NO: 97733 - DNA, 25 bp, Canis familiaris
gctccataaagctaggaaccagatc

SEQ ID NO: 97734 - DNA, 25 bp, Canis familiaris
gctccaacaagatgaaagaaactat

SEQ ID NO: 97735 - DNA, 25 bp, Canis familiaris
gctgccaacccgcaaaagtgacgca

SEQ ID NO: 97736 - DNA, 25 bp, Canis familiaris
gctgcacagaactgctacaaagtga

SEQ ID NO: 97737 - DNA, 25 bp, Canis familiaris
gctgacagcaaggcttcctgactta

SEQ ID NO: 97738 - DNA, 25 bp, Canis familiaris
gctgaagcaatgacattctcccgcg

SEQ ID NO: 97739 - DNA, 25 bp, Canis familiaris
gctgttgcagcaggctttccggcag

SEQ ID NO: 97740 - DNA, 25 bp, Canis familiaris
gctgcagtggcaggcttaccaagcc

SEQ ID NO: 97741 - DNA, 25 bp, Canis familiaris
gctgctgaagccctggaacagagcc

SEQ ID NO: 97742 - DNA, 25 bp, Canis familiaris
gctgcataatcgggcgtcaaggcgc

SEQ ID NO: 97743 - DNA, 25 bp, Canis familiaris
gctgcataatcgggcgtcaaggcgc

SEQ ID NO: 97744 - DNA, 25 bp, Canis familiaris
gctgtagaggctccagctcaagtgc

SEQ ID NO: 97745 - DNA, 25 bp, Canis familiaris
gctgtttgagctgcaaaagctgcca

SEQ ID NO: 97746 - DNA, 25 bp, Canis familiaris
gctgtttggtaatcacacctcatta

SEQ ID NO: 97747 - DNA, 25 bp, Canis familiaris
gctgctttggttttcctcttatagc

SEQ ID NO: 97748 - DNA, 25 bp, Canis familiaris
gctctggtgagctgtaggcctaagg

SEQ ID NO: 97749 - DNA, 25 bp, Canis familiaris
gctcgagtggctcagaactccaatc

SEQ ID NO: 97750 - DNA, 25 bp, Canis familiaris
gctgcagctgtgggtgcaaaccctt

SEQ ID NO: 97751 - DNA, 25 bp, Canis familiaris
gctgagatgggaaaaggctccttca

SEQ ID NO: 97752 - DNA, 25 bp, Canis familiaris
gctgttgggcaagatagcaccttca

SEQ ID NO: 97753 - DNA, 25 bp, Canis familiaris
gctgttggaaaaatagcaccaatag

SEQ ID NO: 97754 - DNA, 25 bp, Canis familiaris
gctgttgtagataatgctgccctaa

SEQ ID NO: 97755 - DNA, 25 bp, Canis familiaris
gctgtgctgaaatttgctgccgcta

SEQ ID NO: 97756 - DNA, 25 bp, Canis familiaris
gctgcttagagctttactgcatgta

SEQ ID NO: 97757 - DNA, 25 bp, Canis familiaris
gctgtttgaatctttctgctgtgct

SEQ ID NO: 97758 - DNA, 25 bp, Canis familiaris
gctgtttgaagcgcagcaggtgcat

SEQ ID NO: 97759 - DNA, 25 bp, Canis familiaris
gctgtttgttctcctgaggtcaacc

SEQ ID NO: 97760 - DNA, 25 bp, Canis familiaris
gctgtctatgtgctgggagggaaca

SEQ ID NO: 97761 - DNA, 25 bp, Canis familiaris
gctgtctatgtgctgaggagtctct

SEQ ID NO: 97762 - DNA, 25 bp, Canis familiaris
gctgctgctttgaaacgtaccttag

SEQ ID NO: 97763 - DNA, 25 bp, Canis familiaris
gctgctgttcgatgaggtccaattg

SEQ ID NO: 97764 - DNA, 25 bp, Canis familiaris
gctgatgtccgattgatgttctcca

SEQ ID NO: 97765 - DNA, 25 bp, Canis familiaris
gctgatgtctggttagtatgtcatt

SEQ ID NO: 97766 - DNA, 25 bp, Canis familiaris
gctgaggtggtctagatgtgtgctt

SEQ ID NO: 97767 - DNA, 25 bp, Canis familiaris
gctgcaggtagttcatgaggctcgt

SEQ ID NO: 97768 - DNA, 25 bp, Canis familiaris
gctgatggtagaacacacgcctgac

SEQ ID NO: 97769 - DNA, 25 bp, Canis familiaris
gctgttgctcagaggactgccagac

SEQ ID NO: 97770 - DNA, 25 bp, Canis familiaris
gctgttccagtatgatcctcagact

SEQ ID NO: 97771 - DNA, 25 bp, Canis familiaris
gctgaaccagtagatctctgagcaa

SEQ ID NO: 97772 - DNA, 25 bp, Canis familiaris
gctgccacggagagtcatcgagcga

SEQ ID NO: 97773 - DNA, 25 bp, Canis familiaris
gctgcacagctgctggacgtcaggc

SEQ ID NO: 97774 - DNA, 25 bp, Canis familiaris
gctgcaagctgcatgtagcattaaa

SEQ ID NO: 97775 - DNA, 25 bp, Canis familiaris
gctgcacccagttggcaaatgcaac

SEQ ID NO: 97776 - DNA, 25 bp, Canis familiaris
gctgaccgagtctcagaatgctcaa

SEQ ID NO: 97777 - DNA, 25 bp, Canis familiaris
gctgacacagacctacaacattgaa

SEQ ID NO: 97778 - DNA, 25 bp, Canis familiaris
gctgagtgcagtgctaaactgctga

SEQ ID NO: 97779 - DNA, 25 bp, Canis familiaris
gctgagaagtgctgaggagctctga

SEQ ID NO: 97780 - DNA, 25 bp, Canis familiaris
gctgaatgatggtgctgcggctgtg

SEQ ID NO: 97781 - DNA, 25 bp, Canis familiaris
gctgaggacaatgctggtgcgtact

SEQ ID NO: 97782 - DNA, 25 bp, Canis familiaris
gctgaatgacaaggcatggtacata

SEQ ID NO: 97783 - DNA, 25 bp, Canis familiaris
gctgaatgtacagctgattaagacc

SEQ ID NO: 97784 - DNA, 25 bp, Canis familiaris
gctgacaaacagctattcacgcttg

SEQ ID NO: 97785 - DNA, 25 bp, Canis familiaris
gctgagcaaccaactctatgtgcct

SEQ ID NO: 97786 - DNA, 25 bp, Canis familiaris
gctgtaactatggcccagtgctttg

SEQ ID NO: 97787 - DNA, 25 bp, Canis familiaris
gctgcatcaactgctgcaaggtgct

SEQ ID NO: 97788 - DNA, 25 bp, Canis familiaris
gctgtcagagctgtgacctgttggg

SEQ ID NO: 97789 - DNA, 25 bp, Canis familiaris
gctgtcgagctggttttgatggccc

SEQ ID NO: 97790 - DNA, 25 bp, Canis familiaris
gctgtctagcatttgtttgatatca

SEQ ID NO: 97791 - DNA, 25 bp, Canis familiaris
gctgctcatggctgtggtttcaatg

SEQ ID NO: 97792 - DNA, 25 bp, Canis familiaris
gctgcatctgcttatattgtttcag

SEQ ID NO: 97793 - DNA, 25 bp, Canis familiaris
gctgatgtgtgcttttgtctaagta

SEQ ID NO: 97794 - DNA, 25 bp, Canis familiaris
gctgagttgctttctcttgtggaga

SEQ ID NO: 97795 - DNA, 25 bp, Canis familiaris
gctgatgactttttcaatggctgga

SEQ ID NO: 97796 - DNA, 25 bp, Canis familiaris
gctctggaattctcaaggctgggaa

SEQ ID NO: 97797 - DNA, 25 bp, Canis familiaris
gctgcaggaattcggcacgagctgg

SEQ ID NO: 97798 - DNA, 25 bp, Canis familiaris
gctgcaggaattcggcacgagctga

SEQ ID NO: 97799 - DNA, 25 bp, Canis familiaris
gctgagctgacatgaagagcggctg

SEQ ID NO: 97800 - DNA, 25 bp, Canis familiaris
gctgtctggggaagagcggggcggg

SEQ ID NO: 97801 - DNA, 25 bp, Canis familiaris
gctgtctggtccaagaaggggctgg

SEQ ID NO: 97802 - DNA, 25 bp, Canis familiaris
gctgtcaggtcccaggcactgggag

SEQ ID NO: 97803 - DNA, 25 bp, Canis familiaris
gctgcaaagtctgcgtcctggaaga

SEQ ID NO: 97804 - DNA, 25 bp, Canis familiaris
gctgaaatcatatctgtccttgcaa

SEQ ID NO: 97805 - DNA, 25 bp, Canis familiaris
gctgaagatattcctttatcatcat

SEQ ID NO: 97806 - DNA, 25 bp, Canis familiaris
gctgaagctagccacacttaatctg

SEQ ID NO: 97807 - DNA, 25 bp, Canis familiaris
gctgaaggcaggcactaaactgctg

SEQ ID NO: 97808 - DNA, 25 bp, Canis familiaris
gctgaaggcaggtactcaaccactg

SEQ ID NO: 97809 - DNA, 25 bp, Canis familiaris
gctgatatggcttctcattaaccct

SEQ ID NO: 97810 - DNA, 25 bp, Canis familiaris
gctgttgccttaattcaagcctatg

SEQ ID NO: 97811 - DNA, 25 bp, Canis familiaris
gctgcttgatcttgagatcccacgc

SEQ ID NO: 97812 - DNA, 25 bp, Canis familiaris
gctcttagctgagtgtcccgcgggg

SEQ ID NO: 97813 - DNA, 25 bp, Canis familiaris
gcatgttagaatctcccggggagtg

SEQ ID NO: 97814 - DNA, 25 bp, Canis familiaris
gctgttcagaatcatgcgcgtggga

SEQ ID NO: 97815 - DNA, 25 bp, Canis familiaris
gctctgctaaatgcaccgaggaagg

SEQ ID NO: 97816 - DNA, 25 bp, Canis familiaris
gctgccaaatatgacgagcagtcaa

SEQ ID NO: 97817 - DNA, 25 bp, Canis familiaris
gctgtcaaaaaatatgcatgtatag

SEQ ID NO: 97818 - DNA, 25 bp, Canis familiaris
gctgaataaatatttgttgaatgaa

SEQ ID NO: 97819 - DNA, 25 bp, Canis familiaris
gctgtctaatcttatatgcatctaa

SEQ ID NO: 97820 - DNA, 25 bp, Canis familiaris
gctgcctggtctgaccatctggcag

SEQ ID NO: 97821 - DNA, 25 bp, Canis familiaris
gctgcacgagtttgactttgcgctg

SEQ ID NO: 97822 - DNA, 25 bp, Canis familiaris
gctgacgctgtgctgactttggtca

SEQ ID NO: 97823 - DNA, 25 bp, Canis familiaris
gctgcatccgtcactttgtgattga

SEQ ID NO: 97824 - DNA, 25 bp, Canis familiaris
gctgtcattctgagcttctgtgaag

SEQ ID NO: 97825 - DNA, 25 bp, Canis familiaris
gctgttcgtgaacactgagacagac

SEQ ID NO: 97826 - DNA, 25 bp, Canis familiaris
gctgttcgtgactctgatgaccgac

SEQ ID NO: 97827 - DNA, 25 bp, Canis familiaris
gctgtctttggctttgagactccag

SEQ ID NO: 97828 - DNA, 25 bp, Canis familiaris
gctgtcactgtgtctttgaacttct

SEQ ID NO: 97829 - DNA, 25 bp, Canis familiaris
gctgtcttgtttttgatatgttctt

SEQ ID NO: 97830 - DNA, 25 bp, Canis familiaris
gctgttagtgtcaagtgtttccaat

SEQ ID NO: 97831 - DNA, 25 bp, Canis familiaris
gctgttaattctggtttttgcctga

SEQ ID NO: 97832 - DNA, 25 bp, Canis familiaris
gctgctgtaattgcctgtctatacc

SEQ ID NO: 97833 - DNA, 25 bp, Canis familiaris
gctctgtactaggttggccatcacc

SEQ ID NO: 97834 - DNA, 25 bp, Canis familiaris
gctcatgaactaatactgtccacct

SEQ ID NO: 97835 - DNA, 25 bp, Canis familiaris
gctgcagatactgtatcgtgctcac

SEQ ID NO: 97836 - DNA, 25 bp, Canis familiaris
gctgaagatgctgtatgcggccaca

SEQ ID NO: 97837 - DNA, 25 bp, Canis familiaris
gctgtatgatgcacagccgggccat

SEQ ID NO: 97838 - DNA, 25 bp, Canis familiaris
gctgttggcatgagcacggtgccca

SEQ ID NO: 97839 - DNA, 25 bp, Canis familiaris
gctgttggctgctgactgatggtgc

SEQ ID NO: 97840 - DNA, 25 bp, Canis familiaris
gctgtaggtcattgtgctgtgggca

SEQ ID NO: 97841 - DNA, 25 bp, Canis familiaris
gctgatggactttgatgcgctggta

SEQ ID NO: 97842 - DNA, 25 bp, Canis familiaris
gctgatcgacatagatatggggttg

SEQ ID NO: 97843 - DNA, 25 bp, Canis familiaris
gctgagcgatataaatgggcaattc

SEQ ID NO: 97844 - DNA, 25 bp, Canis familiaris
gctgtcagcatttttgagtcaactc

SEQ ID NO: 97845 - DNA, 25 bp, Canis familiaris
gctgtcagtttaatgagctcttact

SEQ ID NO: 97846 - DNA, 25 bp, Canis familiaris
gctcggctttcaatgactttcatgc

SEQ ID NO: 97847 - DNA, 25 bp, Canis familiaris
gctgctgtcatttccaaattttgga

SEQ ID NO: 97848 - DNA, 25 bp, Canis familiaris
gctgcttctgttcctatattgttgg

SEQ ID NO: 97849 - DNA, 25 bp, Canis familiaris
gctgttgatggttgctaagggggta

SEQ ID NO: 97850 - DNA, 25 bp, Canis familiaris
gctgctttgcatttggaaggcgggc

SEQ ID NO: 97851 - DNA, 25 bp, Canis familiaris
gctcgtcatcagtggaggagagggc

SEQ ID NO: 97852 - DNA, 25 bp, Canis familiaris
gctgcaggtgggagatggaggtggc

SEQ ID NO: 97853 - DNA, 25 bp, Canis familiaris
gctgagtgtggagcctgaggcaggg

SEQ ID NO: 97854 - DNA, 25 bp, Canis familiaris
gctagctatgtgactttaggcaggt

SEQ ID NO: 97855 - DNA, 25 bp, Canis familiaris
gctgacttgctgactttagctgatg

SEQ ID NO: 97856 - DNA, 25 bp, Canis familiaris
gctgttttactgtctagcttttcag

SEQ ID NO: 97857 - DNA, 25 bp, Canis familiaris
gctgttttcacaaccacacttatgg

SEQ ID NO: 97858 - DNA, 25 bp, Canis familiaris
gctgttttcacgaccaacacttatg

SEQ ID NO: 97859 - DNA, 25 bp, Canis familiaris
gctgactttgctagatccataactt

SEQ ID NO: 97860 - DNA, 25 bp, Canis familiaris
gctgacatcttcctgattacatcat

SEQ ID NO: 97861 - DNA, 25 bp, Canis familiaris
gctgacctcacaggcagtacacatc

SEQ ID NO: 97862 - DNA, 25 bp, Canis familiaris
gctgagcgcaaggcggtaccatgca

SEQ ID NO: 97863 - DNA, 25 bp, Canis familiaris
gctgagcagctagggaggacttgaa

SEQ ID NO: 97864 - DNA, 25 bp, Canis familiaris
gctgcgcctctggatgggtttcagc

SEQ ID NO: 97865 - DNA, 25 bp, Canis familiaris
gctgctgcctgtgagtttttggaca

SEQ ID NO: 97866 - DNA, 25 bp, Canis familiaris
gctgcttcaagcctgttatttcgaa

SEQ ID NO: 97867 - DNA, 25 bp, Canis familiaris
gctgcttgcaaatatgcatttccca

SEQ ID NO: 97868 - DNA, 25 bp, Canis familiaris
gctgcttaagtctgcacttagccct

SEQ ID NO: 97869 - DNA, 25 bp, Canis familiaris
gctgcgcgagcagaaggcgctcaag

SEQ ID NO: 97870 - DNA, 25 bp, Canis familiaris
gctgccttttatggtgagtagtttg

SEQ ID NO: 97871 - DNA, 25 bp, Canis familiaris
gctgttttgacaggtgtgaggtgat

SEQ ID NO: 97872 - DNA, 25 bp, Canis familiaris
gctgttatgctgtacgttgccgaga

SEQ ID NO: 97873 - DNA, 25 bp, Canis familiaris
gctgtataatattcgtgtgtctgtg

SEQ ID NO: 97874 - DNA, 25 bp, Canis familiaris
gctgtactaatgtgttaagtggggg

SEQ ID NO: 97875 - DNA, 25 bp, Canis familiaris
gctgttctaatgtgttcagtgggga

SEQ ID NO: 97876 - DNA, 25 bp, Canis familiaris
gagttcataggctggtcaaccgtca

SEQ ID NO: 97877 - DNA, 25 bp, Canis familiaris
gacttcaaggggttcaagacttcag

SEQ ID NO: 97878 - DNA, 25 bp, Canis familiaris
gcacttccggttcgtctagagataa

SEQ ID NO: 97879 - DNA, 25 bp, Canis familiaris
gctcttcccgtttggttgagattga

SEQ ID NO: 97880 - DNA, 25 bp, Canis familiaris
gctgttcttcagttttgtttgtgga

SEQ ID NO: 97881 - DNA, 25 bp, Canis familiaris
gctgtttggaggcttggtgttggac

SEQ ID NO: 97882 - DNA, 25 bp, Canis familiaris
gctgtttggaggtgctggagttggc

SEQ ID NO: 97883 - DNA, 25 bp, Canis familiaris
gctgctcttaagcaagctgcggttg

SEQ ID NO: 97884 - DNA, 25 bp, Canis familiaris
gctgcctgctgatcgtagtggggct

SEQ ID NO: 97885 - DNA, 25 bp, Canis familiaris
gctgctggctgagaaaatggctgtt

SEQ ID NO: 97886 - DNA, 25 bp, Canis familiaris
gctgttaataactaatggcttctct

SEQ ID NO: 97887 - DNA, 25 bp, Canis familiaris
gctcttattggataaactgtcctat

SEQ ID NO: 97888 - DNA, 25 bp, Canis familiaris
gctctggttaattcaagtcttcagt

SEQ ID NO: 97889 - DNA, 25 bp, Canis familiaris
gctctggggtattacagtcttctct

SEQ ID NO: 97890 - DNA, 25 bp, Canis familiaris
gctctgggggcagcagccaagttta

SEQ ID NO: 97891 - DNA, 25 bp, Canis familiaris
gctgcgaccagggacctaggtattt

SEQ ID NO: 97892 - DNA, 25 bp, Canis familiaris
gctgcgaagggctcgttgagatttc

SEQ ID NO: 97893 - DNA, 25 bp, Canis familiaris
gctccaaagtcatcgtccgatttct

SEQ ID NO: 97894 - DNA, 25 bp, Canis familiaris
gctccaaatctctctcttaaattgc

SEQ ID NO: 97895 - DNA, 25 bp, Canis familiaris
gctgaaagatattcccttatcatca

SEQ ID NO: 97896 - DNA, 25 bp, Canis familiaris
gctgatgacaaattgcccaccacaa

SEQ ID NO: 97897 - DNA, 25 bp, Canis familiaris
gctgatgagaggttcccattccaag

SEQ ID NO: 97898 - DNA, 25 bp, Canis familiaris
gctagtgaagacttccattccactg

SEQ ID NO: 97899 - DNA, 25 bp, Canis familiaris
gctcagtaaacttaatttcagggga

SEQ ID NO: 97900 - DNA, 25 bp, Canis familiaris
gctcaggaaactcacttctgggact

SEQ ID NO: 97901 - DNA, 25 bp, Canis familiaris
gctctgaagaacagaccctgggccc

SEQ ID NO: 97902 - DNA, 25 bp, Canis familiaris
gctcgaacaccaagacggaggctcc

SEQ ID NO: 97903 - DNA, 25 bp, Canis familiaris
gctgaagaacgtgcctgagggtcca

SEQ ID NO: 97904 - DNA, 25 bp, Canis familiaris
gctgagaatacggaccaggggtcac

SEQ ID NO: 97905 - DNA, 25 bp, Canis familiaris
gctgaaggacgcacacaggtcccac

SEQ ID NO: 97906 - DNA, 25 bp, Canis familiaris
gcataaaggacacttagtacccaat

SEQ ID NO: 97907 - DNA, 25 bp, Canis familiaris
gctaagggattgttggaaccgctat

SEQ ID NO: 97908 - DNA, 25 bp, Canis familiaris
gctccgagagccggggaaacctgat

SEQ ID NO: 97909 - DNA, 25 bp, Canis familiaris
gcttcggagccggggcattgccggc

SEQ ID NO: 97910 - DNA, 25 bp, Canis familiaris
gctccgaagggcaggcccggagccc

SEQ ID NO: 97911 - DNA, 25 bp, Canis familiaris
gctcggaaggcggaggctccggggt

SEQ ID NO: 97912 - DNA, 25 bp, Canis familiaris
gctgctggaagtctactcttttgga

SEQ ID NO: 97913 - DNA, 25 bp, Canis familiaris
gctgctgtggaacctattgattttc

SEQ ID NO: 97914 - DNA, 25 bp, Canis familiaris
gctcgggcaagttttgcttgttcca

SEQ ID NO: 97915 - DNA, 25 bp, Canis familiaris
gctcggggcttaaccagtgtgatca

SEQ ID NO: 97916 - DNA, 25 bp, Canis familiaris
gctgcgttgagtccaaccggcagac

SEQ ID NO: 97917 - DNA, 25 bp, Canis familiaris
gctgctttgattccatgccaagcaa

SEQ ID NO: 97918 - DNA, 25 bp, Canis familiaris
gctgctttgtctcagtgcaaacggc

SEQ ID NO: 97919 - DNA, 25 bp, Canis familiaris
gctgttttctcttagctatactcag

SEQ ID NO: 97920 - DNA, 25 bp, Canis familiaris
gctgtttgtgtttcagactgagaca

SEQ ID NO: 97921 - DNA, 25 bp, Canis familiaris
gctgctccgtgttagagggacctta

SEQ ID NO: 97922 - DNA, 25 bp, Canis familiaris
gctgcccctggtagggcaaccagta

SEQ ID NO: 97923 - DNA, 25 bp, Canis familiaris
gctgcgtcctggagtccaacaagat

SEQ ID NO: 97924 - DNA, 25 bp, Canis familiaris
gctgcttcttggagctttggaatat

SEQ ID NO: 97925 - DNA, 25 bp, Canis familiaris
gctgctttaggccctgtatggtttt

SEQ ID NO: 97926 - DNA, 25 bp, Canis familiaris
gctgcagcttagggactttgcttta

SEQ ID NO: 97927 - DNA, 25 bp, Canis familiaris
gctccttcaaggtcttacttgtgcc

SEQ ID NO: 97928 - DNA, 25 bp, Canis familiaris
gctgcttaaaggaatttcttgctta

SEQ ID NO: 97929 - DNA, 25 bp, Canis familiaris
gctgttactacatacttaatcttac

SEQ ID NO: 97930 - DNA, 25 bp, Canis familiaris
gctgtttcccagaatctctgacact

SEQ ID NO: 97931 - DNA, 25 bp, Canis familiaris
gctgatttggctggcaattctgaag

SEQ ID NO: 97932 - DNA, 25 bp, Canis familiaris
gctgttcctgctgagagtccagatg

SEQ ID NO: 97933 - DNA, 25 bp, Canis familiaris
gctgtttctgctgggagcagccaaa

SEQ ID NO: 97934 - DNA, 25 bp, Canis familiaris
gctgcttgttgcagggagctggtgc

SEQ ID NO: 97935 - DNA, 25 bp, Canis familiaris
gctgcttgttcctgggggtgaaggt

SEQ ID NO: 97936 - DNA, 25 bp, Canis familiaris
gctcctgtctcctggatccaggaag

SEQ ID NO: 97937 - DNA, 25 bp, Canis familiaris
gctcccactgtcatggaccaaattg

SEQ ID NO: 97938 - DNA, 25 bp, Canis familiaris
gctcccgctggacaaagttttgcaa

SEQ ID NO: 97939 - DNA, 25 bp, Canis familiaris
gctcccgtgaagaaccagttccaga

SEQ ID NO: 97940 - DNA, 25 bp, Canis familiaris
tggcccgtgggacctatttcgggag

SEQ ID NO: 97941 - DNA, 25 bp, Canis familiaris
tacccggggactgaactctaaagca

SEQ ID NO: 97942 - DNA, 25 bp, Canis familiaris
tgcccgggggactgcaaccaaaggg

SEQ ID NO: 97943 - DNA, 25 bp, Canis familiaris
gctccggcagctggagacgaaccag

SEQ ID NO: 97944 - DNA, 25 bp, Canis familiaris
gctccggcctggtgaaagccggctt

SEQ ID NO: 97945 - DNA, 25 bp, Canis familiaris
gctccgggctacagagacccaagat

SEQ ID NO: 97946 - DNA, 25 bp, Canis familiaris
gctcctctgatcaactaatgacccc

SEQ ID NO: 97947 - DNA, 25 bp, Canis familiaris
gctgcttcactcgaaaatacaccct

SEQ ID NO: 97948 - DNA, 25 bp, Canis familiaris
gcattacttccaaaatacccagggt

SEQ ID NO: 97949 - DNA, 25 bp, Canis familiaris
gctccactttaaaaccaacaggcca

SEQ ID NO: 97950 - DNA, 25 bp, Canis familiaris
tctctcgttaaaaaccataccttat

SEQ ID NO: 97951 - DNA, 25 bp, Canis familiaris
gcagtttaaataattgcctaccaat

SEQ ID NO: 97952 - DNA, 25 bp, Canis familiaris
gctgctattggattatttcccaccc

SEQ ID NO: 97953 - DNA, 25 bp, Canis familiaris
gctctcatgtgtaattttctccagt

SEQ ID NO: 97954 - DNA, 25 bp, Canis familiaris
gctgttatgcttttttggccaggtg

SEQ ID NO: 97955 - DNA, 25 bp, Canis familiaris
gctgcttttttccttactcaagcta

SEQ ID NO: 97956 - DNA, 25 bp, Canis familiaris
gctgctttggggcatatactgacct

SEQ ID NO: 97957 - DNA, 25 bp, Canis familiaris
gctgttcctggtcatagagtacgtc

SEQ ID NO: 97958 - DNA, 25 bp, Canis familiaris
gctgacgcctggacgataaggaccc

SEQ ID NO: 97959 - DNA, 25 bp, Canis familiaris
gctgaagcctgtaggaaccgattcc

SEQ ID NO: 97960 - DNA, 25 bp, Canis familiaris
gctgagagccagaatgagacctttt

SEQ ID NO: 97961 - DNA, 25 bp, Canis familiaris
gctgattgcttggcacagcaccttc

SEQ ID NO: 97962 - DNA, 25 bp, Canis familiaris
gctgaatgcatctgatcgagcctgt

SEQ ID NO: 97963 - DNA, 25 bp, Canis familiaris
gctgagcagagcagagctgccgctg

SEQ ID NO: 97964 - DNA, 25 bp, Canis familiaris
gctgcagaggcagatcgcctgggtc

SEQ ID NO: 97965 - DNA, 25 bp, Canis familiaris
gctgcagagtcagctcagtctgtgc

SEQ ID NO: 97966 - DNA, 25 bp, Canis familiaris
gctgctgagcaaactgttctctgac

SEQ ID NO: 97967 - DNA, 25 bp, Canis familiaris
gctgcaggtgaagttgttgctgaca

SEQ ID NO: 97968 - DNA, 25 bp, Canis familiaris
gctgaggtgaatgggcttgcggctc

SEQ ID NO: 97969 - DNA, 25 bp, Canis familiaris
gctgatccagaaggcgaagctggcc

SEQ ID NO: 97970 - DNA, 25 bp, Canis familiaris
gctccgcgagagtgaacaggcccgg

SEQ ID NO: 97971 - DNA, 25 bp, Canis familiaris
gctcccagggagtgagggcctgtgt

SEQ ID NO: 97972 - DNA, 25 bp, Canis familiaris
gctcccgggagctcgggggatgagc

SEQ ID NO: 97973 - DNA, 25 bp, Canis familiaris
gctcccaggggtcatgggtgggcgg

SEQ ID NO: 97974 - DNA, 25 bp, Canis familiaris
gctcgccaagctgctaatgggggga

SEQ ID NO: 97975 - DNA, 25 bp, Canis familiaris
gctgccaaaaccacatgggctgggg

SEQ ID NO: 97976 - DNA, 25 bp, Canis familiaris
gctcacccaaccaaaaccagggatc

SEQ ID NO: 97977 - DNA, 25 bp, Canis familiaris
gctcccgagaagcacaattcagggg

SEQ ID NO: 97978 - DNA, 25 bp, Canis familiaris
gctcctcgaaaacccttcagtggtt

SEQ ID NO: 97979 - DNA, 25 bp, Canis familiaris
gctgcctgcgacaacaacgttagct

SEQ ID NO: 97980 - DNA, 25 bp, Canis familiaris
gctgcttccaagacaaggttgtgct

SEQ ID NO: 97981 - DNA, 25 bp, Canis familiaris
gctgcacccagagcagacacttgcc

SEQ ID NO: 97982 - DNA, 25 bp, Canis familiaris
gctgaactcgatgcagagcacaccc

SEQ ID NO: 97983 - DNA, 25 bp, Canis familiaris
gctgagagccgggctgaggcagccc

SEQ ID NO: 97984 - DNA, 25 bp, Canis familiaris
gctgctgcagctgaggctgaggccc

SEQ ID NO: 97985 - DNA, 25 bp, Canis familiaris
gctgcagatgctgcggcacaggcac

SEQ ID NO: 97986 - DNA, 25 bp, Canis familiaris
gctgcagagcagggagcacggcctg

SEQ ID NO: 97987 - DNA, 25 bp, Canis familiaris
gctcagatcaggagctcaggccctt

SEQ ID NO: 97988 - DNA, 25 bp, Canis familiaris
gctgaacaggcatctatcctttctc

SEQ ID NO: 97989 - DNA, 25 bp, Canis familiaris
gctgaccagactcttccagaagtgc

SEQ ID NO: 97990 - DNA, 25 bp, Canis familiaris
gctgcactccccattgtcaaagtgc

SEQ ID NO: 97991 - DNA, 25 bp, Canis familiaris
gctgacccacacatgagaacactgg

SEQ ID NO: 97992 - DNA, 25 bp, Canis familiaris
gctgagtccaacatgaatgattctg

SEQ ID NO: 97993 - DNA, 25 bp, Canis familiaris
gctgagttccaaatgacgttccacc

SEQ ID NO: 97994 - DNA, 25 bp, Canis familiaris
gctgcgtacctgtatgaagtgtccc

SEQ ID NO: 97995 - DNA, 25 bp, Canis familiaris
gctgcagtccctgtgggtgaagtcc

SEQ ID NO: 97996 - DNA, 25 bp, Canis familiaris
gctgacctccgacaaggacatgtac

SEQ ID NO: 97997 - DNA, 25 bp, Canis familiaris
gctgcccccagaaaaagccagttgc

SEQ ID NO: 97998 - DNA, 25 bp, Canis familiaris
gctctacccaaaaaagaatctatta

SEQ ID NO: 97999 - DNA, 25 bp, Canis familiaris
gctgctaactaccaaagacaactat

SEQ ID NO: 98000 - DNA, 25 bp, Canis familiaris
gctgctagacaagaacgtgcccaac

SEQ ID NO: 98001 - DNA, 25 bp, Canis familiaris
gctctcagaagaaaaccgcctaata

SEQ ID NO: 98002 - DNA, 25 bp, Canis familiaris
gctctaacaaaagcactcctaccct

SEQ ID NO: 98003 - DNA, 25 bp, Canis familiaris
gctcgacaaaatttactcacattca

SEQ ID NO: 98004 - DNA, 25 bp, Canis familiaris
gctccaagtaattaactccctctga

SEQ ID NO: 98005 - DNA, 25 bp, Canis familiaris
gctgacctttattcaaagccctgtg

SEQ ID NO: 98006 - DNA, 25 bp, Canis familiaris
gctgacgtttgaactggaaccggtc

SEQ ID NO: 98007 - DNA, 25 bp, Canis familiaris
gctacagtttgaagtaaagcccctg

SEQ ID NO: 98008 - DNA, 25 bp, Canis familiaris
gctgccgttatggaaagacacccct

SEQ ID NO: 98009 - DNA, 25 bp, Canis familiaris
gctgcctcctagggaaaatccaact

SEQ ID NO: 98010 - DNA, 25 bp, Canis familiaris
gctgcctgacttgtgctaaatctca

SEQ ID NO: 98011 - DNA, 25 bp, Canis familiaris
gcttggagcttggccaaaagtccac

SEQ ID NO: 98012 - DNA, 25 bp, Canis familiaris
gctgctagagttgtcaagagaggga

SEQ ID NO: 98013 - DNA, 25 bp, Canis familiaris
gctgctgcaggtcctacaaaggagt

SEQ ID NO: 98014 - DNA, 25 bp, Canis familiaris
gctgatcgggtcaaatgaaaggtga

SEQ ID NO: 98015 - DNA, 25 bp, Canis familiaris
gtcacgggtacttcaaaggtgccct

SEQ ID NO: 98016 - DNA, 25 bp, Canis familiaris
tgcccgggacacatctgacggtccc

SEQ ID NO: 98017 - DNA, 25 bp, Canis familiaris
gctccagagtacgagttggggcccc

SEQ ID NO: 98018 - DNA, 25 bp, Canis familiaris
gctgccagtgtctgggtgggtgtcc

SEQ ID NO: 98019 - DNA, 25 bp, Canis familiaris
gctccaggattcggactgggtttcg

SEQ ID NO: 98020 - DNA, 25 bp, Canis familiaris
gctccttgttcagacagctggtcag

SEQ ID NO: 98021 - DNA, 25 bp, Canis familiaris
gctgcatttacagatacacttgtca

SEQ ID NO: 98022 - DNA, 25 bp, Canis familiaris
gctgctgcgtacagagactcttgga

SEQ ID NO: 98023 - DNA, 25 bp, Canis familiaris
gctgacgtcacacaacatggaggaa

SEQ ID NO: 98024 - DNA, 25 bp, Canis familiaris
gctgaaggccactatggatgctggg

SEQ ID NO: 98025 - DNA, 25 bp, Canis familiaris
gctgacatcactgaagggcagggag

SEQ ID NO: 98026 - DNA, 25 bp, Canis familiaris
gctgctcatcgagaatgtggcgtcg

SEQ ID NO: 98027 - DNA, 25 bp, Canis familiaris
gctgcaatctgctgcaactggtgtg

SEQ ID NO: 98028 - DNA, 25 bp, Canis familiaris
gctgcagactgcgtgtttgtgatgg

SEQ ID NO: 98029 - DNA, 25 bp, Canis familiaris
gctgcaactgctgagacactgtgac

SEQ ID NO: 98030 - DNA, 25 bp, Canis familiaris
gctgcttcactgcagaatagtgaca

SEQ ID NO: 98031 - DNA, 25 bp, Canis familiaris
gctgctcccagacagtggtgacagt

SEQ ID NO: 98032 - DNA, 25 bp, Canis familiaris
gctgctcaaggggcttgggacatgt

SEQ ID NO: 98033 - DNA, 25 bp, Canis familiaris
gctgctctaagcaacttcgggtgtg

SEQ ID NO: 98034 - DNA, 25 bp, Canis familiaris
gctttaacgtttgtagtctggactg

SEQ ID NO: 98035 - DNA, 25 bp, Canis familiaris
gctcctcaacggctggaagggggct

SEQ ID NO: 98036 - DNA, 25 bp, Canis familiaris
gctcctcactcctggggagtggggc

SEQ ID NO: 98037 - DNA, 25 bp, Canis familiaris
gctcctcctactgcagggtgggagc

SEQ ID NO: 98038 - DNA, 25 bp, Canis familiaris
gctccgtctatcacgttgtgactac

SEQ ID NO: 98039 - DNA, 25 bp, Canis familiaris
gctcctctctatcaagtcagggtcc

SEQ ID NO: 98040 - DNA, 25 bp, Canis familiaris
gctccctttttagtcgtgcgtggga

SEQ ID NO: 98041 - DNA, 25 bp, Canis familiaris
gctccgtattttatcttggtcttag

SEQ ID NO: 98042 - DNA, 25 bp, Canis familiaris
gctcccaatctatattatttgactt

SEQ ID NO: 98043 - DNA, 25 bp, Canis familiaris
gctgcccatttctttaattttctta

SEQ ID NO: 98044 - DNA, 25 bp, Canis familiaris
gctccatatgcgtatattaagtttc

SEQ ID NO: 98045 - DNA, 25 bp, Canis familiaris
gctccatcaccaataccaactttgg

SEQ ID NO: 98046 - DNA, 25 bp, Canis familiaris
gcaccataatgcagacaccctattg

SEQ ID NO: 98047 - DNA, 25 bp, Canis familiaris
gcaccaaatccaacccgaatggaaa

SEQ ID NO: 98048 - DNA, 25 bp, Canis familiaris
gctccaagacctccagtcagaaggg

SEQ ID NO: 98049 - DNA, 25 bp, Canis familiaris
gctccactgggtccaaaaatggcca

SEQ ID NO: 98050 - DNA, 25 bp, Canis familiaris
gctccattgggaactcagcaccatg

SEQ ID NO: 98051 - DNA, 25 bp, Canis familiaris
gctcctgtgggcatccgagtgatga

SEQ ID NO: 98052 - DNA, 25 bp, Canis familiaris
gctgctctctgggagtcccaggaca

SEQ ID NO: 98053 - DNA, 25 bp, Canis familiaris
gctgatctggagacacagcgccagg

SEQ ID NO: 98054 - DNA, 25 bp, Canis familiaris
gctgactgatgctcacagtgcaccg

SEQ ID NO: 98055 - DNA, 25 bp, Canis familiaris
gctgcactgatcatgaagccaccgg

SEQ ID NO: 98056 - DNA, 25 bp, Canis familiaris
gctgcaagcatactgaacactccgc

SEQ ID NO: 98057 - DNA, 25 bp, Canis familiaris
gctgcaacatgcttatgatctccac

SEQ ID NO: 98058 - DNA, 25 bp, Canis familiaris
gctgcaagcgcaagtattacctggc

SEQ ID NO: 98059 - DNA, 25 bp, Canis familiaris
gctccgcgtgcagatcaacctgagc

SEQ ID NO: 98060 - DNA, 25 bp, Canis familiaris
gctccagcctgactcacgaattggc

SEQ ID NO: 98061 - DNA, 25 bp, Canis familiaris
gctgccaggtgacagctggcttgtg

SEQ ID NO: 98062 - DNA, 25 bp, Canis familiaris
gctgaaggcagacaaggctcgcaag

SEQ ID NO: 98063 - DNA, 25 bp, Canis familiaris
gctgaaggcagacaaggctcgcaag

SEQ ID NO: 98064 - DNA, 25 bp, Canis familiaris
gctgaaggcagacaaggctcgcaag

SEQ ID NO: 98065 - DNA, 25 bp, Canis familiaris
gctccctgcaacttgggcaagcaag

SEQ ID NO: 98066 - DNA, 25 bp, Canis familiaris
gctccccaactttgacaacaacaac

SEQ ID NO: 98067 - DNA, 25 bp, Canis familiaris
gctcctgacccttggaaggactaac

SEQ ID NO: 98068 - DNA, 25 bp, Canis familiaris
gctgcttgcagccctgggaagattt

SEQ ID NO: 98069 - DNA, 25 bp, Canis familiaris
gctgcccagcactggggaatttttg

SEQ ID NO: 98070 - DNA, 25 bp, Canis familiaris
gctgctccgtgcaggtagcgttttg

SEQ ID NO: 98071 - DNA, 25 bp, Canis familiaris
gctgctcacagtggtaggacttttc

SEQ ID NO: 98072 - DNA, 25 bp, Canis familiaris
gctgacacatacccggattttccag

SEQ ID NO: 98073 - DNA, 25 bp, Canis familiaris
gctgcccaatcaccaggtttttaca

SEQ ID NO: 98074 - DNA, 25 bp, Canis familiaris
gctgcacaacgaccgggtgtactac

SEQ ID NO: 98075 - DNA, 25 bp, Canis familiaris
gctgacgaggcgggcagtgtgtacg

SEQ ID NO: 98076 - DNA, 25 bp, Canis familiaris
gctgaaggggcccgatttacgtgcg

SEQ ID NO: 98077 - DNA, 25 bp, Canis familiaris
gctgaacggtgctgaagtcgacgac

SEQ ID NO: 98078 - DNA, 25 bp, Canis familiaris
gctgaaaggctgtgtggtgggcacc

SEQ ID NO: 98079 - DNA, 25 bp, Canis familiaris
gctgccaaggctgtgggcaaggtca

SEQ ID NO: 98080 - DNA, 25 bp, Canis familiaris
gctcgcaagtttggcgcgtgaggaa

SEQ ID NO: 98081 - DNA, 25 bp, Canis familiaris
gctccacgctgtaccacggagaagt

SEQ ID NO: 98082 - DNA, 25 bp, Canis familiaris
gctgcccggtttgcagtgagaagtg

SEQ ID NO: 98083 - DNA, 25 bp, Canis familiaris
gctgccctggtggtgacatatgagt

SEQ ID NO: 98084 - DNA, 25 bp, Canis familiaris
gctgaccactggatgctctatgagt

SEQ ID NO: 98085 - DNA, 25 bp, Canis familiaris
gctgaccatgctcattattttgtgg

SEQ ID NO: 98086 - DNA, 25 bp, Canis familiaris
gctgctctcatctgttagtttggtt

SEQ ID NO: 98087 - DNA, 25 bp, Canis familiaris
gctgcttcatgatgtatatgcctat

SEQ ID NO: 98088 - DNA, 25 bp, Canis familiaris
gctgcgtgctgaatattggtgcttg

SEQ ID NO: 98089 - DNA, 25 bp, Canis familiaris
gctgcgctgtacaaagcatgtggtc

SEQ ID NO: 98090 - DNA, 25 bp, Canis familiaris
gctgcagctataatcaattgtgcgc

SEQ ID NO: 98091 - DNA, 25 bp, Canis familiaris
gctgcagctctaccgcatactgcag

SEQ ID NO: 98092 - DNA, 25 bp, Canis familiaris
gctgacattgcacttgaactctgaa

SEQ ID NO: 98093 - DNA, 25 bp, Canis familiaris
gctgagatccctggaagttggccgc

SEQ ID NO: 98094 - DNA, 25 bp, Canis familiaris
gctgaactcctttagtgatggcctg

SEQ ID NO: 98095 - DNA, 25 bp, Canis familiaris
gctgaaaccattgtgctagtatctg

SEQ ID NO: 98096 - DNA, 25 bp, Canis familiaris
gctccaccgatgtcggctaaacggg

SEQ ID NO: 98097 - DNA, 25 bp, Canis familiaris
gctccatcctgaagagactaaacac

SEQ ID NO: 98098 - DNA, 25 bp, Canis familiaris
gctacagcacttggaattgcaccat

SEQ ID NO: 98099 - DNA, 25 bp, Canis familiaris
gctgacgagctgcgaaggcatctgg

SEQ ID NO: 98100 - DNA, 25 bp, Canis familiaris
gctgcacgcgcgctacactgactgg

SEQ ID NO: 98101 - DNA, 25 bp, Canis familiaris
gctgcactgcccatgacttgaagtg

SEQ ID NO: 98102 - DNA, 25 bp, Canis familiaris
gctgactcctaaactgatgaaggtt

SEQ ID NO: 98103 - DNA, 25 bp, Canis familiaris
gctgacctctccaacatggagattg

SEQ ID NO: 98104 - DNA, 25 bp, Canis familiaris
gctgcaccacaggagccatggcagt

SEQ ID NO: 98105 - DNA, 25 bp, Canis familiaris
gctgcccacgtagtcggagttgtag

SEQ ID NO: 98106 - DNA, 25 bp, Canis familiaris
gctcctccgtagaagcgagcggtat

SEQ ID NO: 98107 - DNA, 25 bp, Canis familiaris
gctccccgatgacccgggaggagtt

SEQ ID NO: 98108 - DNA, 25 bp, Canis familiaris
gctgcccgcattggaccgggcaggc

SEQ ID NO: 98109 - DNA, 25 bp, Canis familiaris
gctcggcgtcatggacgcggagcgc

SEQ ID NO: 98110 - DNA, 25 bp, Canis familiaris
gctgcaggctggagacacggtctgc

SEQ ID NO: 98111 - DNA, 25 bp, Canis familiaris
gctgcatacacgaatacggtgatct

SEQ ID NO: 98112 - DNA, 25 bp, Canis familiaris
gctgctaccaatgggtatgtgtcta

SEQ ID NO: 98113 - DNA, 25 bp, Canis familiaris
gctgctctcccatagttggttattt

SEQ ID NO: 98114 - DNA, 25 bp, Canis familiaris
gctgcttcttactagctatagtcct

SEQ ID NO: 98115 - DNA, 25 bp, Canis familiaris
gctgctattgcttatggcttagaca

SEQ ID NO: 98116 - DNA, 25 bp, Canis familiaris
gctgcttctaggagcttaaacccaa

SEQ ID NO: 98117 - DNA, 25 bp, Canis familiaris
gctgcttaagttccctgaaacaaat

SEQ ID NO: 98118 - DNA, 25 bp, Canis familiaris
gacttagggatctctgtagacttta

SEQ ID NO: 98119 - DNA, 25 bp, Canis familiaris
gctctttaaacttcttcaactctta

SEQ ID NO: 98120 - DNA, 25 bp, Canis familiaris
gctttagaaagtgttgcgcgtcctc

SEQ ID NO: 98121 - DNA, 25 bp, Canis familiaris
gcttaataatttaaggccaggcctt

SEQ ID NO: 98122 - DNA, 25 bp, Canis familiaris
gctgctaaacatcctacgtgcacag

SEQ ID NO: 98123 - DNA, 25 bp, Canis familiaris
gctgaaatacatttgcatcgtcaca

SEQ ID NO: 98124 - DNA, 25 bp, Canis familiaris
gctgaaaatcagtgagcgcacaccc

SEQ ID NO: 98125 - DNA, 25 bp, Canis familiaris
gctgaaagacagctgcagtgcacct

SEQ ID NO: 98126 - DNA, 25 bp, Canis familiaris
gctgaaaggcagctggtacgagcaa

SEQ ID NO: 98127 - DNA, 25 bp, Canis familiaris
gctgaacgagcacgttaactgggtg

SEQ ID NO: 98128 - DNA, 25 bp, Canis familiaris
gctgagacgagccagtttagctgtg

SEQ ID NO: 98129 - DNA, 25 bp, Canis familiaris
gctgaagcagcccgcatattaggcg

SEQ ID NO: 98130 - DNA, 25 bp, Canis familiaris
gctgaagcagcccgcatattaggcg

SEQ ID NO: 98131 - DNA, 25 bp, Canis familiaris
gctgaagcagcccgcatattaggcg

SEQ ID NO: 98132 - DNA, 25 bp, Canis familiaris
gctgaagcacgtggcggtgaggctg

SEQ ID NO: 98133 - DNA, 25 bp, Canis familiaris
gctgaagccaggcgagagcagagat

SEQ ID NO: 98134 - DNA, 25 bp, Canis familiaris
gctaactcacttcgaagacagctta

SEQ ID NO: 98135 - DNA, 25 bp, Canis familiaris
gctacctcacttcgaaaggggagac

SEQ ID NO: 98136 - DNA, 25 bp, Canis familiaris
gctccccactgtcaaaagggctggc

SEQ ID NO: 98137 - DNA, 25 bp, Canis familiaris
gctgccccggttgaaacaggtgtcg

SEQ ID NO: 98138 - DNA, 25 bp, Canis familiaris
gctcaacgggttgaagcaaaggtaa

SEQ ID NO: 98139 - DNA, 25 bp, Canis familiaris
gctctatcgggaatggaccagcagg

SEQ ID NO: 98140 - DNA, 25 bp, Canis familiaris
gctccatgcagggagtcggactagg

SEQ ID NO: 98141 - DNA, 25 bp, Canis familiaris
gctccgaggtggacgagccgtagct

SEQ ID NO: 98142 - DNA, 25 bp, Canis familiaris
gctcccgcgtggtggatagtgactc

SEQ ID NO: 98143 - DNA, 25 bp, Canis familiaris
gctgccacctggtaagtgtagtgca

SEQ ID NO: 98144 - DNA, 25 bp, Canis familiaris
gctgcgcgtcgccaaagtgacaggc

SEQ ID NO: 98145 - DNA, 25 bp, Canis familiaris
gctgctgcttctcagtgttgagggc

SEQ ID NO: 98146 - DNA, 25 bp, Canis familiaris
gctgcactgttgatgtcatgtgagg

SEQ ID NO: 98147 - DNA, 25 bp, Canis familiaris
gctgactgactgatgtcctgtgcgc

SEQ ID NO: 98148 - DNA, 25 bp, Canis familiaris
gctgactgtgtgagtggatctccaa

SEQ ID NO: 98149 - DNA, 25 bp, Canis familiaris
gctcctgtctgcagatgagctcgcc

SEQ ID NO: 98150 - DNA, 25 bp, Canis familiaris
gctgcactggtggaagaagcgatct

SEQ ID NO: 98151 - DNA, 25 bp, Canis familiaris
gctgaccatggacggcaagcaggct

SEQ ID NO: 98152 - DNA, 25 bp, Canis familiaris
gctgcctaggacagcatctgagcct

SEQ ID NO: 98153 - DNA, 25 bp, Canis familiaris
gctcctggtcactgcatcagatgat

SEQ ID NO: 98154 - DNA, 25 bp, Canis familiaris
gctcctggatcttcatgctgaaaat

SEQ ID NO: 98155 - DNA, 25 bp, Canis familiaris
gctccagctactttgctacaattgt

SEQ ID NO: 98156 - DNA, 25 bp, Canis familiaris
gctccagtcaatgttacaactgaag

SEQ ID NO: 98157 - DNA, 25 bp, Canis familiaris
gctccaggagatgccccaaagaaga

SEQ ID NO: 98158 - DNA, 25 bp, Canis familiaris
gctccagactgtgcccaaggaacaa

SEQ ID NO: 98159 - DNA, 25 bp, Canis familiaris
gctcctgagctttgtcaccaggcaa

SEQ ID NO: 98160 - DNA, 25 bp, Canis familiaris
gctcgcgatgagtagacaccaagat

SEQ ID NO: 98161 - DNA, 25 bp, Canis familiaris
gctccgggaggaaccaagaacactg

SEQ ID NO: 98162 - DNA, 25 bp, Canis familiaris
gctcctaggggaaatatacacacac

SEQ ID NO: 98163 - DNA, 25 bp, Canis familiaris
gctcctgaggaggaaatggatgaat

SEQ ID NO: 98164 - DNA, 25 bp, Canis familiaris
gctgccctggcactatggtggaaat

SEQ ID NO: 98165 - DNA, 25 bp, Canis familiaris
gctgcagccaggccagaggcaagaa

SEQ ID NO: 98166 - DNA, 25 bp, Canis familiaris
gctgccacgaccaagtgacagcaat

SEQ ID NO: 98167 - DNA, 25 bp, Canis familiaris
gctccgtgtccaagagcacgcagtt

SEQ ID NO: 98168 - DNA, 25 bp, Canis familiaris
gctgccgtattgggccacaagacat

SEQ ID NO: 98169 - DNA, 25 bp, Canis familiaris
gctgacctgtgtcgggacaagttct

SEQ ID NO: 98170 - DNA, 25 bp, Canis familiaris
gctgcacctggcaggggacagcttc

SEQ ID NO: 98171 - DNA, 25 bp, Canis familiaris
gctgacctttttgggatcactgtag

SEQ ID NO: 98172 - DNA, 25 bp, Canis familiaris
gctgacccatttttaatcttgcaag

SEQ ID NO: 98173 - DNA, 25 bp, Canis familiaris
gctgacccatctcattattttgtgg

SEQ ID NO: 98174 - DNA, 25 bp, Canis familiaris
gctgaccatcctggttgtttgttgg

SEQ ID NO: 98175 - DNA, 25 bp, Canis familiaris
gctgccacacctggtggtggctggg

SEQ ID NO: 98176 - DNA, 25 bp, Canis familiaris
gctgcagaccccgtgtgggttgagg

SEQ ID NO: 98177 - DNA, 25 bp, Canis familiaris
gctcctcccacagttgggtgttgtg

SEQ ID NO: 98178 - DNA, 25 bp, Canis familiaris
gctccccgaagttagggttctctct

SEQ ID NO: 98179 - DNA, 25 bp, Canis familiaris
gctcccatccaagaggtttacacct

SEQ ID NO: 98180 - DNA, 25 bp, Canis familiaris
gctccaatccaagcaggtttgaatt

SEQ ID NO: 98181 - DNA, 25 bp, Canis familiaris
gctgccaaccataaacctattaagt

SEQ ID NO: 98182 - DNA, 25 bp, Canis familiaris
gctgcagccccagaactttatggag

SEQ ID NO: 98183 - DNA, 25 bp, Canis familiaris
gctgactccgacttattttgattag

SEQ ID NO: 98184 - DNA, 25 bp, Canis familiaris
gctgcagcatcccagtttgttagac

SEQ ID NO: 98185 - DNA, 25 bp, Canis familiaris
gctccacctttaatttctactgtac

SEQ ID NO: 98186 - DNA, 25 bp, Canis familiaris
gctgaaacatttattgtcttgcttg

SEQ ID NO: 98187 - DNA, 25 bp, Canis familiaris
gctgaaaacttctgtgtctgccatt

SEQ ID NO: 98188 - DNA, 25 bp, Canis familiaris
gctgcaaaagctgccaggattggcc

SEQ ID NO: 98189 - DNA, 25 bp, Canis familiaris
gctgcaggaagtgcactctgccggc

SEQ ID NO: 98190 - DNA, 25 bp, Canis familiaris
gctgcatgggagtgcattgccttcc

SEQ ID NO: 98191 - DNA, 25 bp, Canis familiaris
gctgcgggaggacttcagtctcagc

SEQ ID NO: 98192 - DNA, 25 bp, Canis familiaris
gctgccccagaaattcattctcaga

SEQ ID NO: 98193 - DNA, 25 bp, Canis familiaris
gctgccctgagaattacttgtatat

SEQ ID NO: 98194 - DNA, 25 bp, Canis familiaris
gctgccttgtgtatttgatttagtg

SEQ ID NO: 98195 - DNA, 25 bp, Canis familiaris
gctgcgtttttttatagtagatttt

SEQ ID NO: 98196 - DNA, 25 bp, Canis familiaris
gctgctttttctcagatcagttcat

SEQ ID NO: 98197 - DNA, 25 bp, Canis familiaris
gctgctattgatctggcaatgcttt

SEQ ID NO: 98198 - DNA, 25 bp, Canis familiaris
gctgcttctactttcaatggattcc

SEQ ID NO: 98199 - DNA, 25 bp, Canis familiaris
gctgctttctctttccattgaagct

SEQ ID NO: 98200 - DNA, 25 bp, Canis familiaris
gctgcagcttctgattccagtgaag

SEQ ID NO: 98201 - DNA, 25 bp, Canis familiaris
gctgcatcttcaatatttcactggt

SEQ ID NO: 98202 - DNA, 25 bp, Canis familiaris
gctgacttagaactgcatatcctgc

SEQ ID NO: 98203 - DNA, 25 bp, Canis familiaris
gctgctcctagaatcacagatcctc

SEQ ID NO: 98204 - DNA, 25 bp, Canis familiaris
gctgctcccaggaagagaagctctt

SEQ ID NO: 98205 - DNA, 25 bp, Canis familiaris
gctccggcgtgcagaaacacatttt

SEQ ID NO: 98206 - DNA, 25 bp, Canis familiaris
gctcctcggtgatcacacataactt

SEQ ID NO: 98207 - DNA, 25 bp, Canis familiaris
gctccctgttgaagtccatatagta

SEQ ID NO: 98208 - DNA, 25 bp, Canis familiaris
gctgcccagtttttgcctgaattaa

SEQ ID NO: 98209 - DNA, 25 bp, Canis familiaris
gctccgcgtttcttgcaagtggaaa

SEQ ID NO: 98210 - DNA, 25 bp, Canis familiaris
gctcccgtcgtagcaagaagaccac

SEQ ID NO: 98211 - DNA, 25 bp, Canis familiaris
gcatctccgctgttttggaaaaccc

SEQ ID NO: 98212 - DNA, 25 bp, Canis familiaris
gctgcggattttatggaaaccctcg

SEQ ID NO: 98213 - DNA, 25 bp, Canis familiaris
gctccattttaagggtatcctcccg

SEQ ID NO: 98214 - DNA, 25 bp, Canis familiaris
gctgccagctcagacattggtgacc

SEQ ID NO: 98215 - DNA, 25 bp, Canis familiaris
gctgcacagtccaacctgatgattc

SEQ ID NO: 98216 - DNA, 25 bp, Canis familiaris
gctgcaggtgctgcacctgagccac

SEQ ID NO: 98217 - DNA, 25 bp, Canis familiaris
gctgcagctcctgcaactaggacgc

SEQ ID NO: 98218 - DNA, 25 bp, Canis familiaris
gctgcagctctgacacaacataatg

SEQ ID NO: 98219 - DNA, 25 bp, Canis familiaris
gctgcagcctgagccagaaatgcca

SEQ ID NO: 98220 - DNA, 25 bp, Canis familiaris
gctgcagccacagccaagatcacag

SEQ ID NO: 98221 - DNA, 25 bp, Canis familiaris
gctgcataactggatcgacaacagg

SEQ ID NO: 98222 - DNA, 25 bp, Canis familiaris
gctgctggcagttatcgccaagctc

SEQ ID NO: 98223 - DNA, 25 bp, Canis familiaris
gctgctgtgatggcgatgccgaagg

SEQ ID NO: 98224 - DNA, 25 bp, Canis familiaris
gctgcattgtgcgcatcggaggtga

SEQ ID NO: 98225 - DNA, 25 bp, Canis familiaris
gctccatgtcccaggaagcacagag

SEQ ID NO: 98226 - DNA, 25 bp, Canis familiaris
gctccttcccttcagaacatgaaat

SEQ ID NO: 98227 - DNA, 25 bp, Canis familiaris
gctccccggcttataaatgtcaagt

SEQ ID NO: 98228 - DNA, 25 bp, Canis familiaris
gctcccttctttctagtatgatcaa

SEQ ID NO: 98229 - DNA, 25 bp, Canis familiaris
gctcccctttttctatatatacaca

SEQ ID NO: 98230 - DNA, 25 bp, Canis familiaris
gctccctctattctttactttgggc

SEQ ID NO: 98231 - DNA, 25 bp, Canis familiaris
gctctaactattctgttggtttcct

SEQ ID NO: 98232 - DNA, 25 bp, Canis familiaris
gctctgaaatactcatttttttgga

SEQ ID NO: 98233 - DNA, 25 bp, Canis familiaris
gctctgcaggcttaactttttatgc

SEQ ID NO: 98234 - DNA, 25 bp, Canis familiaris
gctccaggtggcaaccaccttggcc

SEQ ID NO: 98235 - DNA, 25 bp, Canis familiaris
gctgaagtatggctgccacctgtcc

SEQ ID NO: 98236 - DNA, 25 bp, Canis familiaris
gctgcagattgtagcgtggcacctc

SEQ ID NO: 98237 - DNA, 25 bp, Canis familiaris
gctgcacattgcagagcccagtgct

SEQ ID NO: 98238 - DNA, 25 bp, Canis familiaris
gctgcaaatgcagagcccagctcgc

SEQ ID NO: 98239 - DNA, 25 bp, Canis familiaris
gctgcacaagaggcctgcgcagttc

SEQ ID NO: 98240 - DNA, 25 bp, Canis familiaris
gctgcacagcacaacctggagatgt

SEQ ID NO: 98241 - DNA, 25 bp, Canis familiaris
gctgcatacacttcctgggatatag

SEQ ID NO: 98242 - DNA, 25 bp, Canis familiaris
gctgcaatcacgtcctgtgtttggt

SEQ ID NO: 98243 - DNA, 25 bp, Canis familiaris
gctgctttgcagtacttggtgctgg

SEQ ID NO: 98244 - DNA, 25 bp, Canis familiaris
gctgcttggagttcactgtgatgcc

SEQ ID NO: 98245 - DNA, 25 bp, Canis familiaris
gctgcagatggggaccagtggctcc

SEQ ID NO: 98246 - DNA, 25 bp, Canis familiaris
gctcagtggtagagcgcttgcctag

SEQ ID NO: 98247 - DNA, 25 bp, Canis familiaris
gctgcctgggaagcgttactggagt

SEQ ID NO: 98248 - DNA, 25 bp, Canis familiaris
gctgcacatgggaggtgtctactgg

SEQ ID NO: 98249 - DNA, 25 bp, Canis familiaris
gctgcagccggctgggtgcaaatgg

SEQ ID NO: 98250 - DNA, 25 bp, Canis familiaris
gctgcagccttgttactagaaatga

SEQ ID NO: 98251 - DNA, 25 bp, Canis familiaris
gctgctctcctgcttcaagaaagac

SEQ ID NO: 98252 - DNA, 25 bp, Canis familiaris
gctcccagcacgtctgcaagaagga

SEQ ID NO: 98253 - DNA, 25 bp, Canis familiaris
gctccatcgcatcccatgggaagga

SEQ ID NO: 98254 - DNA, 25 bp, Canis familiaris
gctctgtcagcaccacatgcagaat

SEQ ID NO: 98255 - DNA, 25 bp, Canis familiaris
gctctgtgcagacctcaacatgtct

SEQ ID NO: 98256 - DNA, 25 bp, Canis familiaris
gctctgaagatttaatgtgtctgtt

SEQ ID NO: 98257 - DNA, 25 bp, Canis familiaris
gctcagtatttgtaatgagaatgat

SEQ ID NO: 98258 - DNA, 25 bp, Canis familiaris
gctgcttacttctgggaagattgct

SEQ ID NO: 98259 - DNA, 25 bp, Canis familiaris
gctgcttcctgtttgttgaaggtct

SEQ ID NO: 98260 - DNA, 25 bp, Canis familiaris
gctgcattccagggcttctactgga

SEQ ID NO: 98261 - DNA, 25 bp, Canis familiaris
gctgctatgtgggcatgttaacagg

SEQ ID NO: 98262 - DNA, 25 bp, Canis familiaris
gctctggggacacttccataggaag

SEQ ID NO: 98263 - DNA, 25 bp, Canis familiaris
gctgctgggaactatcctgcaatgc

SEQ ID NO: 98264 - DNA, 25 bp, Canis familiaris
gctgctggtgaaggacttcaacctg

SEQ ID NO: 98265 - DNA, 25 bp, Canis familiaris
gctgctggggggctctcagcagtgc

SEQ ID NO: 98266 - DNA, 25 bp, Canis familiaris
gctgctgggaagagccctagcatgc

SEQ ID NO: 98267 - DNA, 25 bp, Canis familiaris
gctgcggggacgccgtgtatgcagc

SEQ ID NO: 98268 - DNA, 25 bp, Canis familiaris
gctccatgtcggggtggctatatcg

SEQ ID NO: 98269 - DNA, 25 bp, Canis familiaris
gctccagctcgagagggttgcaggt

SEQ ID NO: 98270 - DNA, 25 bp, Canis familiaris
gctgaagcgctatcgggttgcaggc

SEQ ID NO: 98271 - DNA, 25 bp, Canis familiaris
gctgaaggctcttcagggggcacct

SEQ ID NO: 98272 - DNA, 25 bp, Canis familiaris
gctgcaggcgttccagtggtccccg

SEQ ID NO: 98273 - DNA, 25 bp, Canis familiaris
gctcggagattttgggctcccagct

SEQ ID NO: 98274 - DNA, 25 bp, Canis familiaris
gctcgagcgcatgctgatggaccgc

SEQ ID NO: 98275 - DNA, 25 bp, Canis familiaris
gctgcaaggtgctatgagggccgcg

SEQ ID NO: 98276 - DNA, 25 bp, Canis familiaris
gctgcgagcggcaagatggcggcgc

SEQ ID NO: 98277 - DNA, 25 bp, Canis familiaris
gctgcgggactttggggcatgcagg

SEQ ID NO: 98278 - DNA, 25 bp, Canis familiaris
gctgcggtcatggggggagtgaggt

SEQ ID NO: 98279 - DNA, 25 bp, Canis familiaris
gctgctgggcaacaggtcaggagac

SEQ ID NO: 98280 - DNA, 25 bp, Canis familiaris
gctgctgaggcagaagcgaaggaga

SEQ ID NO: 98281 - DNA, 25 bp, Canis familiaris
gctgctgtggtcgcagtcacaggaa

SEQ ID NO: 98282 - DNA, 25 bp, Canis familiaris
gctgcatgatggtcagtagctgatc

SEQ ID NO: 98283 - DNA, 25 bp, Canis familiaris
gctgcagcaggcgggcatgctgtca

SEQ ID NO: 98284 - DNA, 25 bp, Canis familiaris
gctgcgcgtgcttgaggctatcaag

SEQ ID NO: 98285 - DNA, 25 bp, Canis familiaris
gctgcagttctccagatgcattcta

SEQ ID NO: 98286 - DNA, 25 bp, Canis familiaris
gctgcagtctctgacatttcttcat

SEQ ID NO: 98287 - DNA, 25 bp, Canis familiaris
gctgcactcctactatttttataaa

SEQ ID NO: 98288 - DNA, 25 bp, Canis familiaris
gctgcctctctaacttttgtaacta

SEQ ID NO: 98289 - DNA, 25 bp, Canis familiaris
gctcctctctcgttatttgtaatta

SEQ ID NO: 98290 - DNA, 25 bp, Canis familiaris
gctccttcatgcttatgttctataa

SEQ ID NO: 98291 - DNA, 25 bp, Canis familiaris
gctctgcattcagtaggaatctgct

SEQ ID NO: 98292 - DNA, 25 bp, Canis familiaris
gcttgcaattgctatggaaaccggg

SEQ ID NO: 98293 - DNA, 25 bp, Canis familiaris
gctccaagtgcctgtggacctatga

SEQ ID NO: 98294 - DNA, 25 bp, Canis familiaris
gctccaagttcaaggaggtcaagaa

SEQ ID NO: 98295 - DNA, 25 bp, Canis familiaris
gctccaagttcaaggaggtcaagaa

SEQ ID NO: 98296 - DNA, 25 bp, Canis familiaris
gctccaagtacgagtgctgtaacac

SEQ ID NO: 98297 - DNA, 25 bp, Canis familiaris
gctccagattggctttcttaaatgg

SEQ ID NO: 98298 - DNA, 25 bp, Canis familiaris
gcaacagttgggattcctaagacgc

SEQ ID NO: 98299 - DNA, 25 bp, Canis familiaris
gcaaaggggatggttattaaaggag

SEQ ID NO: 98300 - DNA, 25 bp, Canis familiaris
gcttgtggggatcttcaatgaaggc

SEQ ID NO: 98301 - DNA, 25 bp, Canis familiaris
gctcgggggttggccgagaagccgg

SEQ ID NO: 98302 - DNA, 25 bp, Canis familiaris
gctcgggggttgccgagaagccggg

SEQ ID NO: 98303 - DNA, 25 bp, Canis familiaris
gctgccggggagggaggaagccgac

SEQ ID NO: 98304 - DNA, 25 bp, Canis familiaris
gctgctcggggaggcgatgtaacat

SEQ ID NO: 98305 - DNA, 25 bp, Canis familiaris
gctgctgcagagaaggctggcatgt

SEQ ID NO: 98306 - DNA, 25 bp, Canis familiaris
gctgctgcagctacatggagaggat

SEQ ID NO: 98307 - DNA, 25 bp, Canis familiaris
gctgctgctgttgggagggtagctc

SEQ ID NO: 98308 - DNA, 25 bp, Canis familiaris
gctgctcggtgggcaggtgtgactg

SEQ ID NO: 98309 - DNA, 25 bp, Canis familiaris
gctgcaggggtggaggtggggaggg

SEQ ID NO: 98310 - DNA, 25 bp, Canis familiaris
gctgcaggtgctcccaggggaggga

SEQ ID NO: 98311 - DNA, 25 bp, Canis familiaris
gctgcaggtcctacaaaggagtatg

SEQ ID NO: 98312 - DNA, 25 bp, Canis familiaris
gctcatggtccttcaacccatggtc

SEQ ID NO: 98313 - DNA, 25 bp, Canis familiaris
gctgctggtcataaaacccttgttc

SEQ ID NO: 98314 - DNA, 25 bp, Canis familiaris
gctgctggtcagaaagcagctgcca

SEQ ID NO: 98315 - DNA, 25 bp, Canis familiaris
gctctgtgtgcacaggatgcgccgg

SEQ ID NO: 98316 - DNA, 25 bp, Canis familiaris
gctctggcatcactaggatcctagc

SEQ ID NO: 98317 - DNA, 25 bp, Canis familiaris
gctcgaaggctaggtcctggccttg

SEQ ID NO: 98318 - DNA, 25 bp, Canis familiaris
gctccaaggtggatagtggtgcctg

SEQ ID NO: 98319 - DNA, 25 bp, Canis familiaris
gctccaagcaatgtggtctagtccg

SEQ ID NO: 98320 - DNA, 25 bp, Canis familiaris
gctccaaagcactggatgctggata

SEQ ID NO: 98321 - DNA, 25 bp, Canis familiaris
gctccagggctccaggtatgatgta

SEQ ID NO: 98322 - DNA, 25 bp, Canis familiaris
gctcctgtgcctgatggaattcttg

SEQ ID NO: 98323 - DNA, 25 bp, Canis familiaris
gctccatcctctggacagaattctg

SEQ ID NO: 98324 - DNA, 25 bp, Canis familiaris
gctgcctacttgggaacatgtctgc

SEQ ID NO: 98325 - DNA, 25 bp, Canis familiaris
gctctaacaccaagattcctcatgc

SEQ ID NO: 98326 - DNA, 25 bp, Canis familiaris
gctgctacacagattgatcctggac

SEQ ID NO: 98327 - DNA, 25 bp, Canis familiaris
gctgcatacccgtatacctggatgc

SEQ ID NO: 98328 - DNA, 25 bp, Canis familiaris
gctgcgacgatcggtacactgagtg

SEQ ID NO: 98329 - DNA, 25 bp, Canis familiaris
gctctattcatcgtgtacatccagt

SEQ ID NO: 98330 - DNA, 25 bp, Canis familiaris
gctgctcacttcatcatcaacacag

SEQ ID NO: 98331 - DNA, 25 bp, Canis familiaris
gctgctgaatgtgctcggtcacatg

SEQ ID NO: 98332 - DNA, 25 bp, Canis familiaris
gctgcaggattggcacgagctagag

SEQ ID NO: 98333 - DNA, 25 bp, Canis familiaris
gctgcaggacagctcgagtgaggca

SEQ ID NO: 98334 - DNA, 25 bp, Canis familiaris
gctgcagtgccgcggagatcatggc

SEQ ID NO: 98335 - DNA, 25 bp, Canis familiaris
gctgcaggtcgtcagtgatgctggc

SEQ ID NO: 98336 - DNA, 25 bp, Canis familiaris
gctgcagctgaggtgctaggagggc

SEQ ID NO: 98337 - DNA, 25 bp, Canis familiaris
gctcctggcgctcaggaatgggctt

SEQ ID NO: 98338 - DNA, 25 bp, Canis familiaris
gctcgtgacccgtgggaggtcttta

SEQ ID NO: 98339 - DNA, 25 bp, Canis familiaris
gctctgggcccgaggagaggttgag

SEQ ID NO: 98340 - DNA, 25 bp, Canis familiaris
gctcgggagcccagtgtgggcggat

SEQ ID NO: 98341 - DNA, 25 bp, Canis familiaris
gctctggcgtccaaaatagaccggt

SEQ ID NO: 98342 - DNA, 25 bp, Canis familiaris
gctctgtggtaagaactagccctgt

SEQ ID NO: 98343 - DNA, 25 bp, Canis familiaris
gctgcgtttgaagcaatttggggtt

SEQ ID NO: 98344 - DNA, 25 bp, Canis familiaris
gctgcttttgaaggctatgttttgg

SEQ ID NO: 98345 - DNA, 25 bp, Canis familiaris
gctcttttccagccttccttcttgg

SEQ ID NO: 98346 - DNA, 25 bp, Canis familiaris
gctccagctttacgttggttattgg

SEQ ID NO: 98347 - DNA, 25 bp, Canis familiaris
gcttactttcatctagtggtttttg

SEQ ID NO: 98348 - DNA, 25 bp, Canis familiaris
gctcaccttttcccgtgagtgtttt

SEQ ID NO: 98349 - DNA, 25 bp, Canis familiaris
gctcaaattcccactgtttttttgt

SEQ ID NO: 98350 - DNA, 25 bp, Canis familiaris
gctccagaaccttttttgttgttgt

SEQ ID NO: 98351 - DNA, 25 bp, Canis familiaris
gctgccaaaactttttatatcagag

SEQ ID NO: 98352 - DNA, 25 bp, Canis familiaris
gctgccagaaaagatgcctaccacc

SEQ ID NO: 98353 - DNA, 25 bp, Canis familiaris
gctgctataaaagctccttatccct

SEQ ID NO: 98354 - DNA, 25 bp, Canis familiaris
gctgcttagcaatgagtctcttcac

SEQ ID NO: 98355 - DNA, 25 bp, Canis familiaris
gctgcctggaattggtgctctggcc

SEQ ID NO: 98356 - DNA, 25 bp, Canis familiaris
gctgctcagacagggtgtgctgggc

SEQ ID NO: 98357 - DNA, 25 bp, Canis familiaris
gctcttcaagcgcgtggtgcgcagc

SEQ ID NO: 98358 - DNA, 25 bp, Canis familiaris
gctgcagtgaacttggggtgccagg

SEQ ID NO: 98359 - DNA, 25 bp, Canis familiaris
gctgcagtgaacctggggatgccta

SEQ ID NO: 98360 - DNA, 25 bp, Canis familiaris
gctgcggatccacttagagattcga

SEQ ID NO: 98361 - DNA, 25 bp, Canis familiaris
gctgctggtgagctccaagagtctg

SEQ ID NO: 98362 - DNA, 25 bp, Canis familiaris
gctgccggcagcatcaagtagcatc

SEQ ID NO: 98363 - DNA, 25 bp, Canis familiaris
gctgcgcccatttcacagatgagac

SEQ ID NO: 98364 - DNA, 25 bp, Canis familiaris
gctgccaccctggcaagtgcagatc

SEQ ID NO: 98365 - DNA, 25 bp, Canis familiaris
gctgcccctcatggagtgtgtgcag

SEQ ID NO: 98366 - DNA, 25 bp, Canis familiaris
gctcgtcatctctgagtgtgtgcct

SEQ ID NO: 98367 - DNA, 25 bp, Canis familiaris
gctcgacaatcagggtggtgctcca

SEQ ID NO: 98368 - DNA, 25 bp, Canis familiaris
gctcatgccatgatggggggcatcc

SEQ ID NO: 98369 - DNA, 25 bp, Canis familiaris
gctgcgccagcttgctgggggaaga

SEQ ID NO: 98370 - DNA, 25 bp, Canis familiaris
gctgctgccccagctgaggagaaaa

SEQ ID NO: 98371 - DNA, 25 bp, Canis familiaris
gctgccccagctgaggagaaaaaag

SEQ ID NO: 98372 - DNA, 25 bp, Canis familiaris
gctacccggaggcggatcaacaagc

SEQ ID NO: 98373 - DNA, 25 bp, Canis familiaris
gctacttctgtggggcaagaaatct

SEQ ID NO: 98374 - DNA, 25 bp, Canis familiaris
gctcgagatcttcgcggcaagaaga

SEQ ID NO: 98375 - DNA, 25 bp, Canis familiaris
gctgccatggccctgggccatagga

SEQ ID NO: 98376 - DNA, 25 bp, Canis familiaris
gctcccactggtgggctcaaggcac

SEQ ID NO: 98377 - DNA, 25 bp, Canis familiaris
gctctccaaagtctgccaaggcagc

SEQ ID NO: 98378 - DNA, 25 bp, Canis familiaris
gctccaaaggtatgcgaagcctgca

SEQ ID NO: 98379 - DNA, 25 bp, Canis familiaris
gctgcgccaaggttactacgcggag

SEQ ID NO: 98380 - DNA, 25 bp, Canis familiaris
gctgcgcaaagggaactacgcggag

SEQ ID NO: 98381 - DNA, 25 bp, Canis familiaris
gctccaaagagcggctcaacgccta

SEQ ID NO: 98382 - DNA, 25 bp, Canis familiaris
gctccacagagattcctgaattccc

SEQ ID NO: 98383 - DNA, 25 bp, Canis familiaris
gctcctatgtgttctatctttccac

SEQ ID NO: 98384 - DNA, 25 bp, Canis familiaris
gctgctttgttatctctaatctcaa

SEQ ID NO: 98385 - DNA, 25 bp, Canis familiaris
gctgcgattttttttacattcatat

SEQ ID NO: 98386 - DNA, 25 bp, Canis familiaris
gctcgattccttttgtccaaagtga

SEQ ID NO: 98387 - DNA, 25 bp, Canis familiaris
gctctactcttttggacccaagcaa

SEQ ID NO: 98388 - DNA, 25 bp, Canis familiaris
gctctactgcgagtgaggacgcctc

SEQ ID NO: 98389 - DNA, 25 bp, Canis familiaris
gctgccactggaggaaatgccccaa

SEQ ID NO: 98390 - DNA, 25 bp, Canis familiaris
gctgctccagaataaactccagaag

SEQ ID NO: 98391 - DNA, 25 bp, Canis familiaris
gctgcccacaagccataaaccaata

SEQ ID NO: 98392 - DNA, 25 bp, Canis familiaris
gctctgcccaagcctatgaactagt

SEQ ID NO: 98393 - DNA, 25 bp, Canis familiaris
gctcagcaaaagccattgtcctaca

SEQ ID NO: 98394 - DNA, 25 bp, Canis familiaris
gcatccaagccaactattcgctaat

SEQ ID NO: 98395 - DNA, 25 bp, Canis familiaris
gcatcgaaacatactatactggaac

SEQ ID NO: 98396 - DNA, 25 bp, Canis familiaris
gctcctgaacaggtgaactggaagc

SEQ ID NO: 98397 - DNA, 25 bp, Canis familiaris
gctcctaactcatcacactgtagac

SEQ ID NO: 98398 - DNA, 25 bp, Canis familiaris
gctcctaagcctgaccttgaaagag

SEQ ID NO: 98399 - DNA, 25 bp, Canis familiaris
gctcactagagggaggccttttcca

SEQ ID NO: 98400 - DNA, 25 bp, Canis familiaris
gctccttatatggagcctccttctc

SEQ ID NO: 98401 - DNA, 25 bp, Canis familiaris
gctgctgttcttacagattccttcc

SEQ ID NO: 98402 - DNA, 25 bp, Canis familiaris
gctgctgctgttactgcagcttcca

SEQ ID NO: 98403 - DNA, 25 bp, Canis familiaris
gctgctgtttactatgatgcgcacc

SEQ ID NO: 98404 - DNA, 25 bp, Canis familiaris
gctgctgctattgcttatggcttag

SEQ ID NO: 98405 - DNA, 25 bp, Canis familiaris
gctgctgcattagctgctatgaatg

SEQ ID NO: 98406 - DNA, 25 bp, Canis familiaris
gctctttacttccatgcaatattgt

SEQ ID NO: 98407 - DNA, 25 bp, Canis familiaris
gctcccatccttctgcttatatggg

SEQ ID NO: 98408 - DNA, 25 bp, Canis familiaris
gctccccgctatacatttatactgg

SEQ ID NO: 98409 - DNA, 25 bp, Canis familiaris
gctgccgcgatggattctgtttgac

SEQ ID NO: 98410 - DNA, 25 bp, Canis familiaris
gctgccaggctggatactgatgcgg

SEQ ID NO: 98411 - DNA, 25 bp, Canis familiaris
gctccatggtgttttatggcagttt

SEQ ID NO: 98412 - DNA, 25 bp, Canis familiaris
gctccggtcgatattgggttcccga

SEQ ID NO: 98413 - DNA, 25 bp, Canis familiaris
gctcgggatgtgattctggagttcc

SEQ ID NO: 98414 - DNA, 25 bp, Canis familiaris
gctctgggatggggcctgagaatgt

SEQ ID NO: 98415 - DNA, 25 bp, Canis familiaris
gctcagggaagggcacccagtgtga

SEQ ID NO: 98416 - DNA, 25 bp, Canis familiaris
gctcaggcccaagaatctcattgga

SEQ ID NO: 98417 - DNA, 25 bp, Canis familiaris
gctcagagcaccaacgcagttgtat

SEQ ID NO: 98418 - DNA, 25 bp, Canis familiaris
gctcagctgagctgactgtgcctgt

SEQ ID NO: 98419 - DNA, 25 bp, Canis familiaris
gctcactggcatggccttccgtgtc

SEQ ID NO: 98420 - DNA, 25 bp, Canis familiaris
gctcctggctgacattgtgcagaac

SEQ ID NO: 98421 - DNA, 25 bp, Canis familiaris
gctgcctgtggacctgatggaccac

SEQ ID NO: 98422 - DNA, 25 bp, Canis familiaris
gctccgtcgagtaattactgcagcg

SEQ ID NO: 98423 - DNA, 25 bp, Canis familiaris
gctagcggcaatgtactctctgcgc

SEQ ID NO: 98424 - DNA, 25 bp, Canis familiaris
gctcggactatggcaccatgtcctg

SEQ ID NO: 98425 - DNA, 25 bp, Canis familiaris
gctgccatgatcaattcccatatta

SEQ ID NO: 98426 - DNA, 25 bp, Canis familiaris
gctgctcaactgtctgatctcagtt

SEQ ID NO: 98427 - DNA, 25 bp, Canis familiaris
gctgccaatgcactcgatcttgtca

SEQ ID NO: 98428 - DNA, 25 bp, Canis familiaris
gctgccaatgcactcgatcttgtca

SEQ ID NO: 98429 - DNA, 25 bp, Canis familiaris
gctccaatgactggcactcactgac

SEQ ID NO: 98430 - DNA, 25 bp, Canis familiaris
gctccctgcagtggcattcagcagg

SEQ ID NO: 98431 - DNA, 25 bp, Canis familiaris
gctccctatgtgcatgtcacagcag

SEQ ID NO: 98432 - DNA, 25 bp, Canis familiaris
gctcgtgttgtgccagtgagccagc

SEQ ID NO: 98433 - DNA, 25 bp, Canis familiaris
gctctgtgctcaggagggagcctgc

SEQ ID NO: 98434 - DNA, 25 bp, Canis familiaris
gctctgggcagacaggcaggcttag

SEQ ID NO: 98435 - DNA, 25 bp, Canis familiaris
gctgctggtagagggacgcgctaca

SEQ ID NO: 98436 - DNA, 25 bp, Canis familiaris
gctatggtgatcggaacggtagatt

SEQ ID NO: 98437 - DNA, 25 bp, Canis familiaris
gcttggtatcaagtccaggtataac

SEQ ID NO: 98438 - DNA, 25 bp, Canis familiaris
gctcgggccacggcgatggtgaaac

SEQ ID NO: 98439 - DNA, 25 bp, Canis familiaris
gctccagaccatccaagaaggacag

SEQ ID NO: 98440 - DNA, 25 bp, Canis familiaris
gctcgcagtaccaaaacaggcacag

SEQ ID NO: 98441 - DNA, 25 bp, Canis familiaris
gctagagttgtcaagagagggaatg

SEQ ID NO: 98442 - DNA, 25 bp, Canis familiaris
gctcaggcaatagatggggggcatc

SEQ ID NO: 98443 - DNA, 25 bp, Canis familiaris
gctaataaacaatggatgggtcaac

SEQ ID NO: 98444 - DNA, 25 bp, Canis familiaris
gctattcaaaataaggatcgggcaa

SEQ ID NO: 98445 - DNA, 25 bp, Canis familiaris
gctcacattagcagaaggacgggga

SEQ ID NO: 98446 - DNA, 25 bp, Canis familiaris
gctcagagccagaaaacccgggcgc

SEQ ID NO: 98447 - DNA, 25 bp, Canis familiaris
gctcaggcacaagcaacctgggctt

SEQ ID NO: 98448 - DNA, 25 bp, Canis familiaris
gctcgtgccaattcggcacgccagt

SEQ ID NO: 98449 - DNA, 25 bp, Canis familiaris
gctgcgtgcaaatcagaggcgccgg

SEQ ID NO: 98450 - DNA, 25 bp, Canis familiaris
gctgctctgcagggcaaagggcccc

SEQ ID NO: 98451 - DNA, 25 bp, Canis familiaris
gctcctgcaggtgaagggcaccggc

SEQ ID NO: 98452 - DNA, 25 bp, Canis familiaris
gcttctcggaaattaggcgacggca

SEQ ID NO: 98453 - DNA, 25 bp, Canis familiaris
gctgccgcggaaccgcgggacggac

SEQ ID NO: 98454 - DNA, 25 bp, Canis familiaris
gctgcccaggacccggagaagaggg

SEQ ID NO: 98455 - DNA, 25 bp, Canis familiaris
gctcccgcaaccagagatggaagag

SEQ ID NO: 98456 - DNA, 25 bp, Canis familiaris
gctcccaaacctttaggatgcagca

SEQ ID NO: 98457 - DNA, 25 bp, Canis familiaris
gctgccatcaactccatgttggacc

SEQ ID NO: 98458 - DNA, 25 bp, Canis familiaris
gctccatactgctgtgcttagtgac

SEQ ID NO: 98459 - DNA, 25 bp, Canis familiaris
gctccagactgctgcttttggacac

SEQ ID NO: 98460 - DNA, 25 bp, Canis familiaris
gctccgcctttgactttgagaacat

SEQ ID NO: 98461 - DNA, 25 bp, Canis familiaris
gctcccacttgtcacattcaggata

SEQ ID NO: 98462 - DNA, 25 bp, Canis familiaris
gctcgcctgtgttcaagttgcagcg

SEQ ID NO: 98463 - DNA, 25 bp, Canis familiaris
gctcgcctctgtcaaagatcggcat

SEQ ID NO: 98464 - DNA, 25 bp, Canis familiaris
gctcccctggcaataataatggcac

SEQ ID NO: 98465 - DNA, 25 bp, Canis familiaris
gctccaggctgggtagtgaataagc

SEQ ID NO: 98466 - DNA, 25 bp, Canis familiaris
gctccagcagctgttcttcaatata

SEQ ID NO: 98467 - DNA, 25 bp, Canis familiaris
gctgctcacagccattatttttcat

SEQ ID NO: 98468 - DNA, 25 bp, Canis familiaris
gctctagaccttatgtgactcttcc

SEQ ID NO: 98469 - DNA, 25 bp, Canis familiaris
gctcaagaccgtcattatcgtcctg

SEQ ID NO: 98470 - DNA, 25 bp, Canis familiaris
gctaattgggttttcacccttggag

SEQ ID NO: 98471 - DNA, 25 bp, Canis familiaris
gctaatggggtttggcgaccatgcg

SEQ ID NO: 98472 - DNA, 25 bp, Canis familiaris
gctcaatgtctgctttcggaactac

SEQ ID NO: 98473 - DNA, 25 bp, Canis familiaris
gctctattccagttgtcctgaacca

SEQ ID NO: 98474 - DNA, 25 bp, Canis familiaris
gctgctgatactgttggtgctgaac

SEQ ID NO: 98475 - DNA, 25 bp, Canis familiaris
gctgctgaagctgcgcatggcgcag

SEQ ID NO: 98476 - DNA, 25 bp, Canis familiaris
gctgctcaggctgctgtggtgcagc

SEQ ID NO: 98477 - DNA, 25 bp, Canis familiaris
gctgctgatggcgaggaggtgctgc

SEQ ID NO: 98478 - DNA, 25 bp, Canis familiaris
gctctgtgggcactgtcatgtggcc

SEQ ID NO: 98479 - DNA, 25 bp, Canis familiaris
gctcgtatgagcttgtttcagtccc

SEQ ID NO: 98480 - DNA, 25 bp, Canis familiaris
gctcctcaagtaagctgtcaggccc

SEQ ID NO: 98481 - DNA, 25 bp, Canis familiaris
gctccgataaattgaccaggctcac

SEQ ID NO: 98482 - DNA, 25 bp, Canis familiaris
gctccgagcaccagaggcagagcct

SEQ ID NO: 98483 - DNA, 25 bp, Canis familiaris
gctccaaagcctagagggctcctgg

SEQ ID NO: 98484 - DNA, 25 bp, Canis familiaris
gctccaggacaatgggtgctctctg

SEQ ID NO: 98485 - DNA, 25 bp, Canis familiaris
gctcctgtgtcttacaggtctcttc

SEQ ID NO: 98486 - DNA, 25 bp, Canis familiaris
gctcattattcccaaggttcttgct

SEQ ID NO: 98487 - DNA, 25 bp, Canis familiaris
gcatctttaccacaggatttgggca

SEQ ID NO: 98488 - DNA, 25 bp, Canis familiaris
gctatttcaccaacgggacggagcg

SEQ ID NO: 98489 - DNA, 25 bp, Canis familiaris
gctcttactctcttcaggaacagga

SEQ ID NO: 98490 - DNA, 25 bp, Canis familiaris
gctgctgtgactttggaggaacctg

SEQ ID NO: 98491 - DNA, 25 bp, Canis familiaris
gctgctgtggatcctgagaaggccc

SEQ ID NO: 98492 - DNA, 25 bp, Canis familiaris
gctgcctttgcacggaatgagcgtc

SEQ ID NO: 98493 - DNA, 25 bp, Canis familiaris
gctgccttatccctcatattgagaa

SEQ ID NO: 98494 - DNA, 25 bp, Canis familiaris
gctgcctctagtctctactgaggcc

SEQ ID NO: 98495 - DNA, 25 bp, Canis familiaris
gctccccaggcgacaactgaaggac

SEQ ID NO: 98496 - DNA, 25 bp, Canis familiaris
gctccccatgcctaaaaacgtgcag

SEQ ID NO: 98497 - DNA, 25 bp, Canis familiaris
gctcccttgtgtttataacagtggt

SEQ ID NO: 98498 - DNA, 25 bp, Canis familiaris
gctccctactttccatgaatgcagc

SEQ ID NO: 98499 - DNA, 25 bp, Canis familiaris
gctgccctacgtgtgcaagaagaag

SEQ ID NO: 98500 - DNA, 25 bp, Canis familiaris
gctgccctagaggggctcagaaagg

SEQ ID NO: 98501 - DNA, 25 bp, Canis familiaris
gctgccctagatggggtctcagaaa

SEQ ID NO: 98502 - DNA, 25 bp, Canis familiaris
gctgcgcctatgattggttatccaa

SEQ ID NO: 98503 - DNA, 25 bp, Canis familiaris
gctgcctttgtgtttgtgtcaataa

SEQ ID NO: 98504 - DNA, 25 bp, Canis familiaris
gctcctaaggttagcctactgaaac

SEQ ID NO: 98505 - DNA, 25 bp, Canis familiaris
gctcgctgatgaccttggttttgag

SEQ ID NO: 98506 - DNA, 25 bp, Canis familiaris
gctcctaaggcttgctttattgcct

SEQ ID NO: 98507 - DNA, 25 bp, Canis familiaris
gctgccgagcagtacagggcgacga

SEQ ID NO: 98508 - DNA, 25 bp, Canis familiaris
gctgcctggcgttgcggagaagagc

SEQ ID NO: 98509 - DNA, 25 bp, Canis familiaris
gctgccgagctggaggtggagatga

SEQ ID NO: 98510 - DNA, 25 bp, Canis familiaris
gctgctgcaagcggaagatggaaac

SEQ ID NO: 98511 - DNA, 25 bp, Canis familiaris
gctgctgatacggaagagatggaca

SEQ ID NO: 98512 - DNA, 25 bp, Canis familiaris
gctgctgacctgggacaatggacgg

SEQ ID NO: 98513 - DNA, 25 bp, Canis familiaris
gctgccactcagggaaatggggacc

SEQ ID NO: 98514 - DNA, 25 bp, Canis familiaris
gctgcctccagggtcagcatggagg

SEQ ID NO: 98515 - DNA, 25 bp, Canis familiaris
gctccttcagcacgtaataagcagc

SEQ ID NO: 98516 - DNA, 25 bp, Canis familiaris
gctgccccagctgtaacagagcatc

SEQ ID NO: 98517 - DNA, 25 bp, Canis familiaris
gctcatcccgatgatcggcttcatc

SEQ ID NO: 98518 - DNA, 25 bp, Canis familiaris
gctacgccgtggtggctttagtgta

SEQ ID NO: 98519 - DNA, 25 bp, Canis familiaris
gctacgccgtggtggctttagtgta

SEQ ID NO: 98520 - DNA, 25 bp, Canis familiaris
gctcccgtgtggttagtgttagagt

SEQ ID NO: 98521 - DNA, 25 bp, Canis familiaris
gctccacgtgggcgatgtggctgga

SEQ ID NO: 98522 - DNA, 25 bp, Canis familiaris
gctcccaggcagggcgaggggaacc

SEQ ID NO: 98523 - DNA, 25 bp, Canis familiaris
gctgcccgacaggaaagaggacccc

SEQ ID NO: 98524 - DNA, 25 bp, Canis familiaris
gctgccgccatcagcaagagcagga

SEQ ID NO: 98525 - DNA, 25 bp, Canis familiaris
gctcctgcatcgggcaagcaagttt

SEQ ID NO: 98526 - DNA, 25 bp, Canis familiaris
gctgctgtccaggctgagaaagtgt

SEQ ID NO: 98527 - DNA, 25 bp, Canis familiaris
gctcggccaggggcaagatgctgtc

SEQ ID NO: 98528 - DNA, 25 bp, Canis familiaris
gctcgcggcaggccgagtgatgttg

SEQ ID NO: 98529 - DNA, 25 bp, Canis familiaris
gctcgatggcagggacactatattg

SEQ ID NO: 98530 - DNA, 25 bp, Canis familiaris
gctccaggcacaagacacgtgagtg

SEQ ID NO: 98531 - DNA, 25 bp, Canis familiaris
gctccagctgcagtcagactcagaa

SEQ ID NO: 98532 - DNA, 25 bp, Canis familiaris
gctccctaccaatttgataaactcc

SEQ ID NO: 98533 - DNA, 25 bp, Canis familiaris
gctccatcttcctatttagatatac

SEQ ID NO: 98534 - DNA, 25 bp, Canis familiaris
gctcagcctgtttccttggaattgc

SEQ ID NO: 98535 - DNA, 25 bp, Canis familiaris
gctctggctattttcttgtccaagg

SEQ ID NO: 98536 - DNA, 25 bp, Canis familiaris
gctcgaccaatatgtttcccaagat

SEQ ID NO: 98537 - DNA, 25 bp, Canis familiaris
gctcaacaaagctgtctgggccaaa

SEQ ID NO: 98538 - DNA, 25 bp, Canis familiaris
gctaacaaagttcattgggcaagac

SEQ ID NO: 98539 - DNA, 25 bp, Canis familiaris
gctaaggaccttaagtgggcaatgg

SEQ ID NO: 98540 - DNA, 25 bp, Canis familiaris
gctcaagatgactattaaggtggct

SEQ ID NO: 98541 - DNA, 25 bp, Canis familiaris
gctgccagagcaagagtaaaagttc

SEQ ID NO: 98542 - DNA, 25 bp, Canis familiaris
gctgccgacacctacaaagagtttg

SEQ ID NO: 98543 - DNA, 25 bp, Canis familiaris
gctgccaggacctcaaggaatctgc

SEQ ID NO: 98544 - DNA, 25 bp, Canis familiaris
gctccagggagatcaaggacttcaa

SEQ ID NO: 98545 - DNA, 25 bp, Canis familiaris
gctccagggagatctgggactcgct

SEQ ID NO: 98546 - DNA, 25 bp, Canis familiaris
gctccatggaagtcacggggtcagc

SEQ ID NO: 98547 - DNA, 25 bp, Canis familiaris
gctccatgtcactgactaaggtcac

SEQ ID NO: 98548 - DNA, 25 bp, Canis familiaris
gctgccgtagctggacaggatgggc

SEQ ID NO: 98549 - DNA, 25 bp, Canis familiaris
gctgcctgaagaagcacaagtccgg

SEQ ID NO: 98550 - DNA, 25 bp, Canis familiaris
gctcgctgaagatggctactctggg

SEQ ID NO: 98551 - DNA, 25 bp, Canis familiaris
gctgctggtagagggtagctaggag

SEQ ID NO: 98552 - DNA, 25 bp, Canis familiaris
gctctggtaagctttatgtatggtc

SEQ ID NO: 98553 - DNA, 25 bp, Canis familiaris
gctctggtgggtagttggtggatct

SEQ ID NO: 98554 - DNA, 25 bp, Canis familiaris
gctcgcggaggcaaggcggaggaca

SEQ ID NO: 98555 - DNA, 25 bp, Canis familiaris
gctcctgctgaccacggggagaagc

SEQ ID NO: 98556 - DNA, 25 bp, Canis familiaris
gctctctttctaggcctgtaatacc

SEQ ID NO: 98557 - DNA, 25 bp, Canis familiaris
gctcttcctctgaacactgtagtac

SEQ ID NO: 98558 - DNA, 25 bp, Canis familiaris
gctcctggcctaacagtctgagaca

SEQ ID NO: 98559 - DNA, 25 bp, Canis familiaris
gctcctcactataacagttgctgcc

SEQ ID NO: 98560 - DNA, 25 bp, Canis familiaris
gctccttcagaaacagactatcctt

SEQ ID NO: 98561 - DNA, 25 bp, Canis familiaris
gctgcgtttaagacatgccattcca

SEQ ID NO: 98562 - DNA, 25 bp, Canis familiaris
gctctgtttcaggatattctcgcca

SEQ ID NO: 98563 - DNA, 25 bp, Canis familiaris
gctcttgttgaggttctgggtacag

SEQ ID NO: 98564 - DNA, 25 bp, Canis familiaris
gctctggcttgaaggtctcgtgaaa

SEQ ID NO: 98565 - DNA, 25 bp, Canis familiaris
gctccacttaaccatctacatgtag

SEQ ID NO: 98566 - DNA, 25 bp, Canis familiaris
gctccacggagagagaactggttcc

SEQ ID NO: 98567 - DNA, 25 bp, Canis familiaris
gcttcacaaaggtaccaaagtttca

SEQ ID NO: 98568 - DNA, 25 bp, Canis familiaris
gctcccaccagggagcccaatgctg

SEQ ID NO: 98569 - DNA, 25 bp, Canis familiaris
gctccagaccacgaaactgctagca

SEQ ID NO: 98570 - DNA, 25 bp, Canis familiaris
gctctccactcatgagaaccttgca

SEQ ID NO: 98571 - DNA, 25 bp, Canis familiaris
gctctccactcatgagaaccttgca

SEQ ID NO: 98572 - DNA, 25 bp, Canis familiaris
gctctccactcatgagaaccttgca

SEQ ID NO: 98573 - DNA, 25 bp, Canis familiaris
gctctccactcatgagaaccttgca

SEQ ID NO: 98574 - DNA, 25 bp, Canis familiaris
gctctccactcatgagaaccttgca

SEQ ID NO: 98575 - DNA, 25 bp, Canis familiaris
gctcgccactgttgtgaacactaac

SEQ ID NO: 98576 - DNA, 25 bp, Canis familiaris
gctcccagctggactcagacaatga

SEQ ID NO: 98577 - DNA, 25 bp, Canis familiaris
gctcctagtggacagccaagatgat

SEQ ID NO: 98578 - DNA, 25 bp, Canis familiaris
gctcctttgggcacccaatggaatg

SEQ ID NO: 98579 - DNA, 25 bp, Canis familiaris
gctcccttgggcaaccaatgggaaa

SEQ ID NO: 98580 - DNA, 25 bp, Canis familiaris
gctcccttaggaaaagttctggaag

SEQ ID NO: 98581 - DNA, 25 bp, Canis familiaris
gctcacctctacctgaagattttac

SEQ ID NO: 98582 - DNA, 25 bp, Canis familiaris
gctcaaggccaggaaaatcgtgtcc

SEQ ID NO: 98583 - DNA, 25 bp, Canis familiaris
gctcggtgccggtaaacactctggc

SEQ ID NO: 98584 - DNA, 25 bp, Canis familiaris
gctctgttgccagcatcaaaaccgg

SEQ ID NO: 98585 - DNA, 25 bp, Canis familiaris
gctctgtccccattcatgacagcat

SEQ ID NO: 98586 - DNA, 25 bp, Canis familiaris
gctctgactccctacataagatgtc

SEQ ID NO: 98587 - DNA, 25 bp, Canis familiaris
gctcgacctctctgaacaaatcgct

SEQ ID NO: 98588 - DNA, 25 bp, Canis familiaris
gctcacagcttttaaacaaatgcct

SEQ ID NO: 98589 - DNA, 25 bp, Canis familiaris
gctcctttagaataccaatgccata

SEQ ID NO: 98590 - DNA, 25 bp, Canis familiaris
gctccatttaaaacaaacaggcaaa

SEQ ID NO: 98591 - DNA, 25 bp, Canis familiaris
gctaattattaaaccccaggacaat

SEQ ID NO: 98592 - DNA, 25 bp, Canis familiaris
gctctgattattttttacgctggac

SEQ ID NO: 98593 - DNA, 25 bp, Canis familiaris
gctacattttctgtttctggacacc

SEQ ID NO: 98594 - DNA, 25 bp, Canis familiaris
gctaatttggcagctttgaaacttg

SEQ ID NO: 98595 - DNA, 25 bp, Canis familiaris
gcagaattcggggcactcaaacctt

SEQ ID NO: 98596 - DNA, 25 bp, Canis familiaris
gcagaaactccggacacaaacttgt

SEQ ID NO: 98597 - DNA, 25 bp, Canis familiaris
gcataaacttgccaacccaattgtg

SEQ ID NO: 98598 - DNA, 25 bp, Canis familiaris
gctaaccatttgcaccgttgattga

SEQ ID NO: 98599 - DNA, 25 bp, Canis familiaris
gctaacattctgaacagccggctgt

SEQ ID NO: 98600 - DNA, 25 bp, Canis familiaris
gctccaatttgtcgactatgtgctt

SEQ ID NO: 98601 - DNA, 25 bp, Canis familiaris
gctcatcatagtggctgtgacgatt

SEQ ID NO: 98602 - DNA, 25 bp, Canis familiaris
gctctgagagtgattggcagcatat

SEQ ID NO: 98603 - DNA, 25 bp, Canis familiaris
gctcgcagctgatcttgcatcaggt

SEQ ID NO: 98604 - DNA, 25 bp, Canis familiaris
gctcccgaatctggcatggcagagt

SEQ ID NO: 98605 - DNA, 25 bp, Canis familiaris
gctcccgaatctggcatggcagagt

SEQ ID NO: 98606 - DNA, 25 bp, Canis familiaris
gctcccgaatctggcatggcagagt

SEQ ID NO: 98607 - DNA, 25 bp, Canis familiaris
gctcccgaatctggcatggcagagt

SEQ ID NO: 98608 - DNA, 25 bp, Canis familiaris
gctcccgaatctggcatggcagagt

SEQ ID NO: 98609 - DNA, 25 bp, Canis familiaris
gctcagcctgagacccaggatgggg

SEQ ID NO: 98610 - DNA, 25 bp, Canis familiaris
gctccttgaatctacttgtggggta

SEQ ID NO: 98611 - DNA, 25 bp, Canis familiaris
gctcctaccatttcttggggtgact

SEQ ID NO: 98612 - DNA, 25 bp, Canis familiaris
gctcaataccctccttgcagggata

SEQ ID NO: 98613 - DNA, 25 bp, Canis familiaris
gctccagaaacgcttcatcctgaac

SEQ ID NO: 98614 - DNA, 25 bp, Canis familiaris
gctccagaaacgcttcatcctgaac

SEQ ID NO: 98615 - DNA, 25 bp, Canis familiaris
gctccagggaatcgtctcctggggc

SEQ ID NO: 98616 - DNA, 25 bp, Canis familiaris
gctacggaaaccaagcctcgtggag

SEQ ID NO: 98617 - DNA, 25 bp, Canis familiaris
gctttggaaatcataggctagtagc

SEQ ID NO: 98618 - DNA, 25 bp, Canis familiaris
gctcttctaaaagggtctttcagcg

SEQ ID NO: 98619 - DNA, 25 bp, Canis familiaris
gctccttggaaagcattcattttgc

SEQ ID NO: 98620 - DNA, 25 bp, Canis familiaris
gctcctcgagaaaccacttgtctca

SEQ ID NO: 98621 - DNA, 25 bp, Canis familiaris
gctccccagatgtgtgcaagttgta

SEQ ID NO: 98622 - DNA, 25 bp, Canis familiaris
gctcctgcaaagtgcacaagagtgc

SEQ ID NO: 98623 - DNA, 25 bp, Canis familiaris
gctccagcagctgaagccaaggctg

SEQ ID NO: 98624 - DNA, 25 bp, Canis familiaris
gctccatgcagggaacctgacgtgg

SEQ ID NO: 98625 - DNA, 25 bp, Canis familiaris
gctcgaatgggcacttgggcttggc

SEQ ID NO: 98626 - DNA, 25 bp, Canis familiaris
gctcgaaggctgagctctgttctct

SEQ ID NO: 98627 - DNA, 25 bp, Canis familiaris
gctcgaggtctgagttcttgatgct

SEQ ID NO: 98628 - DNA, 25 bp, Canis familiaris
gctccaggtcgtgtgtgtttgtggc

SEQ ID NO: 98629 - DNA, 25 bp, Canis familiaris
gctccacgtgctgtaggtcattgtg

SEQ ID NO: 98630 - DNA, 25 bp, Canis familiaris
gctccagcgacagctaggatgtgtg

SEQ ID NO: 98631 - DNA, 25 bp, Canis familiaris
gctcctcggcacaggtgtgtatggc

SEQ ID NO: 98632 - DNA, 25 bp, Canis familiaris
gctgcctccctcaaggagttaacta

SEQ ID NO: 98633 - DNA, 25 bp, Canis familiaris
tcccatcctctttggggtaccttag

SEQ ID NO: 98634 - DNA, 25 bp, Canis familiaris
gctgccatttttggagggtactttt

SEQ ID NO: 98635 - DNA, 25 bp, Canis familiaris
gctccctgtcttcggaaaagctctt

SEQ ID NO: 98636 - DNA, 25 bp, Canis familiaris
gctccactctcctgattaaatgttt

SEQ ID NO: 98637 - DNA, 25 bp, Canis familiaris
gctctagctttcttttgactttttc

SEQ ID NO: 98638 - DNA, 25 bp, Canis familiaris
gctctgttgtactattaacttcttc

SEQ ID NO: 98639 - DNA, 25 bp, Canis familiaris
gctcttcactcttaaaacgtttcca

SEQ ID NO: 98640 - DNA, 25 bp, Canis familiaris
gctcttcatgtattaaaagcctgtc

SEQ ID NO: 98641 - DNA, 25 bp, Canis familiaris
gctctatgagctgtaaaaacttgca

SEQ ID NO: 98642 - DNA, 25 bp, Canis familiaris
gctccagactctaaaatccactaaa

SEQ ID NO: 98643 - DNA, 25 bp, Canis familiaris
gctccaggctcttcagaaagcatct

SEQ ID NO: 98644 - DNA, 25 bp, Canis familiaris
gctccagttctttgctaagcagcca

SEQ ID NO: 98645 - DNA, 25 bp, Canis familiaris
gctcgctgtccttagttacaaattc

SEQ ID NO: 98646 - DNA, 25 bp, Canis familiaris
gctcctatccattttataaaatact

SEQ ID NO: 98647 - DNA, 25 bp, Canis familiaris
gcatccttccctttgcaaaaacgga

SEQ ID NO: 98648 - DNA, 25 bp, Canis familiaris
gctctctaccctttaataacctgaa

SEQ ID NO: 98649 - DNA, 25 bp, Canis familiaris
gctaccacctctttaataaccatgc

SEQ ID NO: 98650 - DNA, 25 bp, Canis familiaris
gctcaaagccccttataaaacacct

SEQ ID NO: 98651 - DNA, 25 bp, Canis familiaris
gctcaatagagcccttcaagaaact

SEQ ID NO: 98652 - DNA, 25 bp, Canis familiaris
gctcccaggagcctctgagtaaact

SEQ ID NO: 98653 - DNA, 25 bp, Canis familiaris
gctctctggtagccttggtcaaaga

SEQ ID NO: 98654 - DNA, 25 bp, Canis familiaris
gctcttggcatgcacttcgatgcaa

SEQ ID NO: 98655 - DNA, 25 bp, Canis familiaris
gctctgggctttttctgtgaaactg

SEQ ID NO: 98656 - DNA, 25 bp, Canis familiaris
gctccttcattttgtttgaggtgtg

SEQ ID NO: 98657 - DNA, 25 bp, Canis familiaris
gctccttcattctgttagtagatgt

SEQ ID NO: 98658 - DNA, 25 bp, Canis familiaris
gctccttgttacctatagcatcaga

SEQ ID NO: 98659 - DNA, 25 bp, Canis familiaris
gctgccagggtcttctatagtatca

SEQ ID NO: 98660 - DNA, 25 bp, Canis familiaris
gctcctgggcattacttgcgtgtag

SEQ ID NO: 98661 - DNA, 25 bp, Canis familiaris
gctcctggagattgacctggatggg

SEQ ID NO: 98662 - DNA, 25 bp, Canis familiaris
gctcgcagggaactcctggagctgg

SEQ ID NO: 98663 - DNA, 25 bp, Canis familiaris
gctcgatgcttatcatctctgaagg

SEQ ID NO: 98664 - DNA, 25 bp, Canis familiaris
gctccatctacatcctggaacagga

SEQ ID NO: 98665 - DNA, 25 bp, Canis familiaris
gctcctctcctacttggataactgt

SEQ ID NO: 98666 - DNA, 25 bp, Canis familiaris
gctccccctagtatgatgagtcttc

SEQ ID NO: 98667 - DNA, 25 bp, Canis familiaris
gctccctcctcatcagggagtctac

SEQ ID NO: 98668 - DNA, 25 bp, Canis familiaris
gctccgcccatcactatggagttca

SEQ ID NO: 98669 - DNA, 25 bp, Canis familiaris
gctgccaactattttgaggatgttg

SEQ ID NO: 98670 - DNA, 25 bp, Canis familiaris
gctccaggctttctgtagatgtgct

SEQ ID NO: 98671 - DNA, 25 bp, Canis familiaris
gctcctgagcttattctagtgtggt

SEQ ID NO: 98672 - DNA, 25 bp, Canis familiaris
gctcttgacttgtttctttgttgtg

SEQ ID NO: 98673 - DNA, 25 bp, Canis familiaris
gctctccatttgtattttggtcccc

SEQ ID NO: 98674 - DNA, 25 bp, Canis familiaris
gctccttttagttgttgagtccctt

SEQ ID NO: 98675 - DNA, 25 bp, Canis familiaris
gctccttttggggaaatggagcact

SEQ ID NO: 98676 - DNA, 25 bp, Canis familiaris
gctcctttttttaaatactgcacca

SEQ ID NO: 98677 - DNA, 25 bp, Canis familiaris
gctcacttcttttccaaatgattgg

SEQ ID NO: 98678 - DNA, 25 bp, Canis familiaris
gctcattcttttacccgtggagtag

SEQ ID NO: 98679 - DNA, 25 bp, Canis familiaris
gctcagtcttttccacagggagtta

SEQ ID NO: 98680 - DNA, 25 bp, Canis familiaris
gctactcagtagtcccaagtgagtt

SEQ ID NO: 98681 - DNA, 25 bp, Canis familiaris
gcatactcagtatccgacttgaaaa

SEQ ID NO: 98682 - DNA, 25 bp, Canis familiaris
gctcccatgtcagcctgacttggat

SEQ ID NO: 98683 - DNA, 25 bp, Canis familiaris
gctctcctacaggactcttcaggga

SEQ ID NO: 98684 - DNA, 25 bp, Canis familiaris
gctccagctaaggaccttaagtggg

SEQ ID NO: 98685 - DNA, 25 bp, Canis familiaris
gctgccaataactatgcccgagggc

SEQ ID NO: 98686 - DNA, 25 bp, Canis familiaris
gcatgaactacctcgcctgaggagg

SEQ ID NO: 98687 - DNA, 25 bp, Canis familiaris
gctaaatgagcctccactggtacac

SEQ ID NO: 98688 - DNA, 25 bp, Canis familiaris
gctacgtggagaccccaggtcaagc

SEQ ID NO: 98689 - DNA, 25 bp, Canis familiaris
gctccagaggaggtcccaggtagcc

SEQ ID NO: 98690 - DNA, 25 bp, Canis familiaris
gctcacaagcgggttcacgtagctg

SEQ ID NO: 98691 - DNA, 25 bp, Canis familiaris
gctccaagaggtagctgccctagag

SEQ ID NO: 98692 - DNA, 25 bp, Canis familiaris
gctccaagaggtagctgccctagag

SEQ ID NO: 98693 - DNA, 25 bp, Canis familiaris
gctccaagaggtagctgccctagag

SEQ ID NO: 98694 - DNA, 25 bp, Canis familiaris
gctccaagaggtagctgccctagag

SEQ ID NO: 98695 - DNA, 25 bp, Canis familiaris
gctccaagaggtagctgccctagag

SEQ ID NO: 98696 - DNA, 25 bp, Canis familiaris
gctccaagaggtagctgccctagag

SEQ ID NO: 98697 - DNA, 25 bp, Canis familiaris
gctccaagaggtagctgccctagag

SEQ ID NO: 98698 - DNA, 25 bp, Canis familiaris
gctccaagaggtagctgccctagag

SEQ ID NO: 98699 - DNA, 25 bp, Canis familiaris
gctccaagaggtagctgccctagag

SEQ ID NO: 98700 - DNA, 25 bp, Canis familiaris
gctcgaaattctactgcagccggac

SEQ ID NO: 98701 - DNA, 25 bp, Canis familiaris
gctctgataaacatccagctcaaga

SEQ ID NO: 98702 - DNA, 25 bp, Canis familiaris
gctcagtgaaggaacggcatgccag

SEQ ID NO: 98703 - DNA, 25 bp, Canis familiaris
gctcgttcaggaagcgcacgtagcc

SEQ ID NO: 98704 - DNA, 25 bp, Canis familiaris
gctccttgcaaaaagcctgatgcag

SEQ ID NO: 98705 - DNA, 25 bp, Canis familiaris
gctccctctcaaaagactgtgcaca

SEQ ID NO: 98706 - DNA, 25 bp, Canis familiaris
gctccttaaagcagatcagtgcatc

SEQ ID NO: 98707 - DNA, 25 bp, Canis familiaris
gctcctcataatagggaagcatgct

SEQ ID NO: 98708 - DNA, 25 bp, Canis familiaris
gctccactctgatgtgtgagagcat

SEQ ID NO: 98709 - DNA, 25 bp, Canis familiaris
gctcaaccagtggtggactttttct

SEQ ID NO: 98710 - DNA, 25 bp, Canis familiaris
gctaaatctggtctactatgtttct

SEQ ID NO: 98711 - DNA, 25 bp, Canis familiaris
gctaactttgactttctttaacatt

SEQ ID NO: 98712 - DNA, 25 bp, Canis familiaris
gctaactttacagagcttccccaac

SEQ ID NO: 98713 - DNA, 25 bp, Canis familiaris
gctaaggtggaagtagtacccgaag

SEQ ID NO: 98714 - DNA, 25 bp, Canis familiaris
gctaagggtgaagctggtccccaag

SEQ ID NO: 98715 - DNA, 25 bp, Canis familiaris
gctaagggtgaagttggacccgcgg

SEQ ID NO: 98716 - DNA, 25 bp, Canis familiaris
gctaaaggtggcctgagggccccgg

SEQ ID NO: 98717 - DNA, 25 bp, Canis familiaris
gctaaaggtcttcagcagagccctc

SEQ ID NO: 98718 - DNA, 25 bp, Canis familiaris
gctaaagtgttgctcaggaaccatt

SEQ ID NO: 98719 - DNA, 25 bp, Canis familiaris
gcatcaagagtcaggtccacaggcc

SEQ ID NO: 98720 - DNA, 25 bp, Canis familiaris
gctcacaagtccggtagacaaggga

SEQ ID NO: 98721 - DNA, 25 bp, Canis familiaris
gctccacgctggcgtctgaaaggag

SEQ ID NO: 98722 - DNA, 25 bp, Canis familiaris
gctctccgtgcctggctataaggag

SEQ ID NO: 98723 - DNA, 25 bp, Canis familiaris
gctcccattccatgtctttgagtga

SEQ ID NO: 98724 - DNA, 25 bp, Canis familiaris
gctcaccagttctggctctgtagct

SEQ ID NO: 98725 - DNA, 25 bp, Canis familiaris
gctctacagactgctagctttacat

SEQ ID NO: 98726 - DNA, 25 bp, Canis familiaris
gctcgatctgacttcatggcatttg

SEQ ID NO: 98727 - DNA, 25 bp, Canis familiaris
gctcagctgtgacagaagcttctgg

SEQ ID NO: 98728 - DNA, 25 bp, Canis familiaris
gctcactgtgagcaatgtgctgaaa

SEQ ID NO: 98729 - DNA, 25 bp, Canis familiaris
gctacttggcctacctgatcaaggc

SEQ ID NO: 98730 - DNA, 25 bp, Canis familiaris
gctccttcgaattgactccaagtgt

SEQ ID NO: 98731 - DNA, 25 bp, Canis familiaris
gctcgatcctggagacccgggatcg

SEQ ID NO: 98732 - DNA, 25 bp, Canis familiaris
gcattacccgttttcctgggatggg

SEQ ID NO: 98733 - DNA, 25 bp, Canis familiaris
gctaaagcctttatagctgggcagg

SEQ ID NO: 98734 - DNA, 25 bp, Canis familiaris
gctcacaagcctgccattaggcggc

SEQ ID NO: 98735 - DNA, 25 bp, Canis familiaris
gctccatacctacagtcagaccagc

SEQ ID NO: 98736 - DNA, 25 bp, Canis familiaris
gctccttttcaaatgtcaccaagca

SEQ ID NO: 98737 - DNA, 25 bp, Canis familiaris
gctcctttaagattgtcctgtgaca

SEQ ID NO: 98738 - DNA, 25 bp, Canis familiaris
gctcctctcaaaaacaccttgtatg

SEQ ID NO: 98739 - DNA, 25 bp, Canis familiaris
gctccggcagaagcagaccctggag

SEQ ID NO: 98740 - DNA, 25 bp, Canis familiaris
gctcaccgtgaagatggacctggaa

SEQ ID NO: 98741 - DNA, 25 bp, Canis familiaris
gctcaagcccaatctgggactggga

SEQ ID NO: 98742 - DNA, 25 bp, Canis familiaris
gctctcccggacgtgagctacggga

SEQ ID NO: 98743 - DNA, 25 bp, Canis familiaris
gcttcccgatcggtggagacgttga

SEQ ID NO: 98744 - DNA, 25 bp, Canis familiaris
gctctgacccacgctggaaatgtat

SEQ ID NO: 98745 - DNA, 25 bp, Canis familiaris
gctctgcccgcagtgggcgaagtag

SEQ ID NO: 98746 - DNA, 25 bp, Canis familiaris
gctcttggctcggggctgaatgatg

SEQ ID NO: 98747 - DNA, 25 bp, Canis familiaris
gctcaatggcaccaaggaggatgtg

SEQ ID NO: 98748 - DNA, 25 bp, Canis familiaris
gctcaggtactgcagcaaggtgcgc

SEQ ID NO: 98749 - DNA, 25 bp, Canis familiaris
gctcttgacacttagccgctgtctc

SEQ ID NO: 98750 - DNA, 25 bp, Canis familiaris
gctctaacacatccagtcaagtctt

SEQ ID NO: 98751 - DNA, 25 bp, Canis familiaris
gctcttccacatttctgaagtctct

SEQ ID NO: 98752 - DNA, 25 bp, Canis familiaris
gcatttcccactgtaagtttcctaa

SEQ ID NO: 98753 - DNA, 25 bp, Canis familiaris
gctctaccaaatgtcaagtttctgt

SEQ ID NO: 98754 - DNA, 25 bp, Canis familiaris
gctcttccaaatgcttagtactcga

SEQ ID NO: 98755 - DNA, 25 bp, Canis familiaris
gctctgaaagagtccctgaaaccta

SEQ ID NO: 98756 - DNA, 25 bp, Canis familiaris
gctctacagagtacccgtacgtcta

SEQ ID NO: 98757 - DNA, 25 bp, Canis familiaris
gctctacaggaacagcttcagcttc

SEQ ID NO: 98758 - DNA, 25 bp, Canis familiaris
gctcgtgaggaagggcttacgcccc

SEQ ID NO: 98759 - DNA, 25 bp, Canis familiaris
gctcggtggcaagggagcgacggcc

SEQ ID NO: 98760 - DNA, 25 bp, Canis familiaris
gctcgagagggttgcaggtagggcc

SEQ ID NO: 98761 - DNA, 25 bp, Canis familiaris
gctctgggtcagttctgttcagggc

SEQ ID NO: 98762 - DNA, 25 bp, Canis familiaris
gctcaaggtcagttgcggctgcaga

SEQ ID NO: 98763 - DNA, 25 bp, Canis familiaris
gctaagtgatatcctgcagtgcaca

SEQ ID NO: 98764 - DNA, 25 bp, Canis familiaris
gctccgtgagagagagtgcacacac

SEQ ID NO: 98765 - DNA, 25 bp, Canis familiaris
gctcacgatgagtattggcacgcac

SEQ ID NO: 98766 - DNA, 25 bp, Canis familiaris
gctcagcgatggcagttcctgacag

SEQ ID NO: 98767 - DNA, 25 bp, Canis familiaris
gctcaggatgcgccagggacatcac

SEQ ID NO: 98768 - DNA, 25 bp, Canis familiaris
gctctggagccggagcagtaccact

SEQ ID NO: 98769 - DNA, 25 bp, Canis familiaris
gctctagacacggtggatagggata

SEQ ID NO: 98770 - DNA, 25 bp, Canis familiaris
gctccatgacaccgtggtgggcaag

SEQ ID NO: 98771 - DNA, 25 bp, Canis familiaris
gctcttgcagcactgcagccaggag

SEQ ID NO: 98772 - DNA, 25 bp, Canis familiaris
gctctgcagcacctggatcaggagg

SEQ ID NO: 98773 - DNA, 25 bp, Canis familiaris
gctccatgctcactgcttaggattg

SEQ ID NO: 98774 - DNA, 25 bp, Canis familiaris
gctccctcgctgcgatctattgaaa

SEQ ID NO: 98775 - DNA, 25 bp, Canis familiaris
gctccccaggcccagattaaaaaca

SEQ ID NO: 98776 - DNA, 25 bp, Canis familiaris
gctcagcccaggtccagatgaaaag

SEQ ID NO: 98777 - DNA, 25 bp, Canis familiaris
gctcgctcaccgtctgaggaaagag

SEQ ID NO: 98778 - DNA, 25 bp, Canis familiaris
gctcctcagcctctgagcaactaag

SEQ ID NO: 98779 - DNA, 25 bp, Canis familiaris
gctcctcagcctctgagcaactaag

SEQ ID NO: 98780 - DNA, 25 bp, Canis familiaris
gctcctgcacctctggatagtgata

SEQ ID NO: 98781 - DNA, 25 bp, Canis familiaris
gctcccactggccaggaatgtggac

SEQ ID NO: 98782 - DNA, 25 bp, Canis familiaris
gctcctgcctggaagagttccgagc

SEQ ID NO: 98783 - DNA, 25 bp, Canis familiaris
gctccggctgtgaggtctggaggcc

SEQ ID NO: 98784 - DNA, 25 bp, Canis familiaris
gctcctggggtctgcttggagcagc

SEQ ID NO: 98785 - DNA, 25 bp, Canis familiaris
gctccgaggtgttgagccgagctct

SEQ ID NO: 98786 - DNA, 25 bp, Canis familiaris
gctcctgcaggaagctgaccgagtc

SEQ ID NO: 98787 - DNA, 25 bp, Canis familiaris
gctcctggtgcatggagcctgcttc

SEQ ID NO: 98788 - DNA, 25 bp, Canis familiaris
gctcctggtctgagaggtcttccag

SEQ ID NO: 98789 - DNA, 25 bp, Canis familiaris
gctcctggtgagcgaggacggccag

SEQ ID NO: 98790 - DNA, 25 bp, Canis familiaris
gctcgctggagaaggcggacggcag

SEQ ID NO: 98791 - DNA, 25 bp, Canis familiaris
gctctgcagggcaaagggcccctgg

SEQ ID NO: 98792 - DNA, 25 bp, Canis familiaris
gctctcaggaaaggggacgccgtgc

SEQ ID NO: 98793 - DNA, 25 bp, Canis familiaris
gctctcgagaagtgttcacccttca

SEQ ID NO: 98794 - DNA, 25 bp, Canis familiaris
gcattcggaaatctaacccactaac

SEQ ID NO: 98795 - DNA, 25 bp, Canis familiaris
gctaagcagaaacagacacccaatc

SEQ ID NO: 98796 - DNA, 25 bp, Canis familiaris
gctctagccgtagcagaatactaat

SEQ ID NO: 98797 - DNA, 25 bp, Canis familiaris
gctctacctgttccacgaacaaagc

SEQ ID NO: 98798 - DNA, 25 bp, Canis familiaris
gctcttgaccttgacatgagaaaag

SEQ ID NO: 98799 - DNA, 25 bp, Canis familiaris
gctcttagagcttcgccaaaaatgg

SEQ ID NO: 98800 - DNA, 25 bp, Canis familiaris
gctcgtagagctgcactttgaagta

SEQ ID NO: 98801 - DNA, 25 bp, Canis familiaris
gctcctcaggctgatttttgagaag

SEQ ID NO: 98802 - DNA, 25 bp, Canis familiaris
gctcctcagtggtatctttgctgga

SEQ ID NO: 98803 - DNA, 25 bp, Canis familiaris
gctcgccgtggaagctctgtcgagc

SEQ ID NO: 98804 - DNA, 25 bp, Canis familiaris
gctcctcgtccttgtggacgacact

SEQ ID NO: 98805 - DNA, 25 bp, Canis familiaris
gctcctgtgtcctgtgtcaggaagc

SEQ ID NO: 98806 - DNA, 25 bp, Canis familiaris
gctcctggtctgggctgtagagaat

SEQ ID NO: 98807 - DNA, 25 bp, Canis familiaris
gctcgctcgccgagctggagagcaa

SEQ ID NO: 98808 - DNA, 25 bp, Canis familiaris
gctcactgcctggaggcggaagctc

SEQ ID NO: 98809 - DNA, 25 bp, Canis familiaris
gctccgttggcggcggaggctaggc

SEQ ID NO: 98810 - DNA, 25 bp, Canis familiaris
gctcccttgactttgaggactgggc

SEQ ID NO: 98811 - DNA, 25 bp, Canis familiaris
gctcctttgtgtttgagatgatgtc

SEQ ID NO: 98812 - DNA, 25 bp, Canis familiaris
gctcatcttgttctcgagtgttctc

SEQ ID NO: 98813 - DNA, 25 bp, Canis familiaris
gctctgcacggtctagatgggcttt

SEQ ID NO: 98814 - DNA, 25 bp, Canis familiaris
gctcagcaaagccctgagtcagcgc

SEQ ID NO: 98815 - DNA, 25 bp, Canis familiaris
gctcatcaaagcgctgggctgggtg

SEQ ID NO: 98816 - DNA, 25 bp, Canis familiaris
gctacaaatctctggggggtttctt

SEQ ID NO: 98817 - DNA, 25 bp, Canis familiaris
gctcaacaagttgggaggaggtggg

SEQ ID NO: 98818 - DNA, 25 bp, Canis familiaris
gctcgcgaagcgaggcggacgggac

SEQ ID NO: 98819 - DNA, 25 bp, Canis familiaris
gctcctgaggcaggggcggttggtg

SEQ ID NO: 98820 - DNA, 25 bp, Canis familiaris
gctcctttacgagcttctctggtgc

SEQ ID NO: 98821 - DNA, 25 bp, Canis familiaris
tgcttgtcccagttctaaaaggtcc

SEQ ID NO: 98822 - DNA, 25 bp, Canis familiaris
gctcagttctgagcttttggcctgg

SEQ ID NO: 98823 - DNA, 25 bp, Canis familiaris
gctagcaccgatacttttaactgga

SEQ ID NO: 98824 - DNA, 25 bp, Canis familiaris
gctacccagttcatttccagctgga

SEQ ID NO: 98825 - DNA, 25 bp, Canis familiaris
gctaccagttacattgaatcgctta

SEQ ID NO: 98826 - DNA, 25 bp, Canis familiaris
gctacgaattctcatggaaagtatg

SEQ ID NO: 98827 - DNA, 25 bp, Canis familiaris
gctacgaattctcattgaaagtttg

SEQ ID NO: 98828 - DNA, 25 bp, Canis familiaris
gctacggatctttataacccttcag

SEQ ID NO: 98829 - DNA, 25 bp, Canis familiaris
gctacaggagctgagtaccgcctac

SEQ ID NO: 98830 - DNA, 25 bp, Canis familiaris
gctacagggctgtttttttccagtc

SEQ ID NO: 98831 - DNA, 25 bp, Canis familiaris
gctacaatggtttaatttgcaaaat

SEQ ID NO: 98832 - DNA, 25 bp, Canis familiaris
gtctcagtggttgtagttggggttt

SEQ ID NO: 98833 - DNA, 25 bp, Canis familiaris
gctctcatttttgctggaaggggtt

SEQ ID NO: 98834 - DNA, 25 bp, Canis familiaris
gctctgatttttgttgtttgtgggg

SEQ ID NO: 98835 - DNA, 25 bp, Canis familiaris
gctctaatatttgtctttctcgtgg

SEQ ID NO: 98836 - DNA, 25 bp, Canis familiaris
gctaaatccatcgcaagtttcgtgg

SEQ ID NO: 98837 - DNA, 25 bp, Canis familiaris
gctaattgagcttgtcggtttcgtt

SEQ ID NO: 98838 - DNA, 25 bp, Canis familiaris
gctaatgtactgttcacggtaggaa

SEQ ID NO: 98839 - DNA, 25 bp, Canis familiaris
gctactgtcctgattcctgataggg

SEQ ID NO: 98840 - DNA, 25 bp, Canis familiaris
gctacattttggggcacctaggtgg

SEQ ID NO: 98841 - DNA, 25 bp, Canis familiaris
gctctccttctgagagcccttggag

SEQ ID NO: 98842 - DNA, 25 bp, Canis familiaris
gctctccttgtcagaattcttgtgc

SEQ ID NO: 98843 - DNA, 25 bp, Canis familiaris
gctccctagagcagaacctgagttc

SEQ ID NO: 98844 - DNA, 25 bp, Canis familiaris
gctccctaggactcacttgagtctt

SEQ ID NO: 98845 - DNA, 25 bp, Canis familiaris
gctcccaacacatacactgatagtc

SEQ ID NO: 98846 - DNA, 25 bp, Canis familiaris
gctctgccaacattgaccactggcc

SEQ ID NO: 98847 - DNA, 25 bp, Canis familiaris
gctttgcatcaattgccatcaggga

SEQ ID NO: 98848 - DNA, 25 bp, Canis familiaris
gctctctgtccagtccaaaggaccc

SEQ ID NO: 98849 - DNA, 25 bp, Canis familiaris
gcttctgcggagaccgaaaacctgc

SEQ ID NO: 98850 - DNA, 25 bp, Canis familiaris
gcttgtcccaggctgaaaacctcat

SEQ ID NO: 98851 - DNA, 25 bp, Canis familiaris
gctcgttctttgggagaaacccacg

SEQ ID NO: 98852 - DNA, 25 bp, Canis familiaris
gctcggtccttccgaggaagctaag

SEQ ID NO: 98853 - DNA, 25 bp, Canis familiaris
gctcaggtcctgatactggggtact

SEQ ID NO: 98854 - DNA, 25 bp, Canis familiaris
gcatcaggacctacgaggtggcttc

SEQ ID NO: 98855 - DNA, 25 bp, Canis familiaris
gctcaggcccttgggattgagccct

SEQ ID NO: 98856 - DNA, 25 bp, Canis familiaris
gctcgtgctccgtgatgttgatgag

SEQ ID NO: 98857 - DNA, 25 bp, Canis familiaris
gctcagcctgtcctacagttgatta

SEQ ID NO: 98858 - DNA, 25 bp, Canis familiaris
gctcgccagttaacagctctattgg

SEQ ID NO: 98859 - DNA, 25 bp, Canis familiaris
gctcatccagtttcacacataagtg

SEQ ID NO: 98860 - DNA, 25 bp, Canis familiaris
gctctcaagagcatcaacaacgctg

SEQ ID NO: 98861 - DNA, 25 bp, Canis familiaris
gctcctgcagctgtccaaactggag

SEQ ID NO: 98862 - DNA, 25 bp, Canis familiaris
gctcattggctccatccgaattgac

SEQ ID NO: 98863 - DNA, 25 bp, Canis familiaris
gctctatctgtctccgtcaaacaga

SEQ ID NO: 98864 - DNA, 25 bp, Canis familiaris
gctctgttgccacccgtgaaaaaaa

SEQ ID NO: 98865 - DNA, 25 bp, Canis familiaris
gctcgtctgtatctttgtaaacaca

SEQ ID NO: 98866 - DNA, 25 bp, Canis familiaris
gctcgtctccattttattaggaaca

SEQ ID NO: 98867 - DNA, 25 bp, Canis familiaris
gctccctccatcttttataaaaaca

SEQ ID NO: 98868 - DNA, 25 bp, Canis familiaris
gctccccaattttttgtaattgcca

SEQ ID NO: 98869 - DNA, 25 bp, Canis familiaris
gctttacgttggttattggaaccag

SEQ ID NO: 98870 - DNA, 25 bp, Canis familiaris
gctcttaagttgcttttaaaaattg

SEQ ID NO: 98871 - DNA, 25 bp, Canis familiaris
gctctgtactttctattgtatcaca

SEQ ID NO: 98872 - DNA, 25 bp, Canis familiaris
gctcgtactttgactcatatttcag

SEQ ID NO: 98873 - DNA, 25 bp, Canis familiaris
gctaggaacgtacatgctttcaggt

SEQ ID NO: 98874 - DNA, 25 bp, Canis familiaris
gctaggggttgagagccctgcaggc

SEQ ID NO: 98875 - DNA, 25 bp, Canis familiaris
gctaaggttgtgctgagcccagggc

SEQ ID NO: 98876 - DNA, 25 bp, Canis familiaris
gctaacgcttccagaccgcggccta

SEQ ID NO: 98877 - DNA, 25 bp, Canis familiaris
gctaagcgattccttaccatgaggc

SEQ ID NO: 98878 - DNA, 25 bp, Canis familiaris
gctcagacacctattaccagagccc

SEQ ID NO: 98879 - DNA, 25 bp, Canis familiaris
gctctgaccctgcttgagaagatga

SEQ ID NO: 98880 - DNA, 25 bp, Canis familiaris
gctcgacacgctcgcgtatgaaatg

SEQ ID NO: 98881 - DNA, 25 bp, Canis familiaris
gctctgaccgggcaaggatgtggct

SEQ ID NO: 98882 - DNA, 25 bp, Canis familiaris
gctcttcctggaccgagtgtatggc

SEQ ID NO: 98883 - DNA, 25 bp, Canis familiaris
gctcgtggggaagatgtgctattgc

SEQ ID NO: 98884 - DNA, 25 bp, Canis familiaris
gctactggggaaactggccatggcc

SEQ ID NO: 98885 - DNA, 25 bp, Canis familiaris
gctcttggagggagtgggcagccca

SEQ ID NO: 98886 - DNA, 25 bp, Canis familiaris
gctcctggagggcagctgggatgca

SEQ ID NO: 98887 - DNA, 25 bp, Canis familiaris
gctcccctgaggctgtgatggatgc

SEQ ID NO: 98888 - DNA, 25 bp, Canis familiaris
gctcagtcctgattggtgctatggg

SEQ ID NO: 98889 - DNA, 25 bp, Canis familiaris
gctagcacctgcatgtgctgtgcat

SEQ ID NO: 98890 - DNA, 25 bp, Canis familiaris
gctctgccactgatctgtgtggccg

SEQ ID NO: 98891 - DNA, 25 bp, Canis familiaris
gctctggagcagactgctttgcccc

SEQ ID NO: 98892 - DNA, 25 bp, Canis familiaris
gctcttgcagcagtgatgtttgttc

SEQ ID NO: 98893 - DNA, 25 bp, Canis familiaris
gctctctgcgcagtatgatgacttt

SEQ ID NO: 98894 - DNA, 25 bp, Canis familiaris
gctctgtgctcagtggatgatctac

SEQ ID NO: 98895 - DNA, 25 bp, Canis familiaris
gctcactgctcagggcacattaggt

SEQ ID NO: 98896 - DNA, 25 bp, Canis familiaris
gctagtcccctacttaggatcttac

SEQ ID NO: 98897 - DNA, 25 bp, Canis familiaris
gaattgccccagttctaagtttgct

SEQ ID NO: 98898 - DNA, 25 bp, Canis familiaris
gaattgccccagttctaagtttgct

SEQ ID NO: 98899 - DNA, 25 bp, Canis familiaris
gctactgttgcctttctaaggtgtt

SEQ ID NO: 98900 - DNA, 25 bp, Canis familiaris
gctcggtggcactttaaaaatggtt

SEQ ID NO: 98901 - DNA, 25 bp, Canis familiaris
gcatcggggcgtacaaacatcaatg

SEQ ID NO: 98902 - DNA, 25 bp, Canis familiaris
gctctgggagcacatttacacatat

SEQ ID NO: 98903 - DNA, 25 bp, Canis familiaris
gctctgtggaaactgatctacacct

SEQ ID NO: 98904 - DNA, 25 bp, Canis familiaris
gctctgcaggagtttgacttggcct

SEQ ID NO: 98905 - DNA, 25 bp, Canis familiaris
gctctgggacacagcacttgagact

SEQ ID NO: 98906 - DNA, 25 bp, Canis familiaris
gctctgtggacatcgctttgtatgt

SEQ ID NO: 98907 - DNA, 25 bp, Canis familiaris
gctctggtgaatgcatgttctgtaa

SEQ ID NO: 98908 - DNA, 25 bp, Canis familiaris
gctcagggtcttagtctcttcaagc

SEQ ID NO: 98909 - DNA, 25 bp, Canis familiaris
gctaaggctctgttgaacttccagc

SEQ ID NO: 98910 - DNA, 25 bp, Canis familiaris
gctcaaggcttgtgaagtcctccac

SEQ ID NO: 98911 - DNA, 25 bp, Canis familiaris
gctcataggctgtgaaggtcctcgc

SEQ ID NO: 98912 - DNA, 25 bp, Canis familiaris
gctctgtgagtgtgagggtccatgc

SEQ ID NO: 98913 - DNA, 25 bp, Canis familiaris
gctctggagctgtggatgcagttgc

SEQ ID NO: 98914 - DNA, 25 bp, Canis familiaris
gctctggagtggatacagcctgctg

SEQ ID NO: 98915 - DNA, 25 bp, Canis familiaris
gctcgatgtgtgtttgacatggctg

SEQ ID NO: 98916 - DNA, 25 bp, Canis familiaris
gctctgcagtgctttctggagactg

SEQ ID NO: 98917 - DNA, 25 bp, Canis familiaris
gctcgcactcttgatggtgagagtc

SEQ ID NO: 98918 - DNA, 25 bp, Canis familiaris
gctctgcacccacatgaggaagtcc

SEQ ID NO: 98919 - DNA, 25 bp, Canis familiaris
gctctgctccctcaggagagcagcc

SEQ ID NO: 98920 - DNA, 25 bp, Canis familiaris
gctctgctccaggtcctgagaggac

SEQ ID NO: 98921 - DNA, 25 bp, Canis familiaris
gctcaatcaatgggtctgaagtggt

SEQ ID NO: 98922 - DNA, 25 bp, Canis familiaris
gctcgcgcgattgtctaattgaatt

SEQ ID NO: 98923 - DNA, 25 bp, Canis familiaris
gctcgtgccattgttgccattgaaa

SEQ ID NO: 98924 - DNA, 25 bp, Canis familiaris
gctcagtgccatgcgttcgctgaaa

SEQ ID NO: 98925 - DNA, 25 bp, Canis familiaris
gctcatgagccttcatcttcagaaa

SEQ ID NO: 98926 - DNA, 25 bp, Canis familiaris
gctctaccttcagttgttcataagt

SEQ ID NO: 98927 - DNA, 25 bp, Canis familiaris
gctctcagcacagggttgttcaaag

SEQ ID NO: 98928 - DNA, 25 bp, Canis familiaris
gctcactcagtgggttttaatagtg

SEQ ID NO: 98929 - DNA, 25 bp, Canis familiaris
gctctcttgtgccgtgtttatagga

SEQ ID NO: 98930 - DNA, 25 bp, Canis familiaris
gctctgcagttgatggatttaaggc

SEQ ID NO: 98931 - DNA, 25 bp, Canis familiaris
gctctcagcttttggttttctgtga

SEQ ID NO: 98932 - DNA, 25 bp, Canis familiaris
gctcacagttgtttattttcaatga

SEQ ID NO: 98933 - DNA, 25 bp, Canis familiaris
gctcagagttcttccagttacatag

SEQ ID NO: 98934 - DNA, 25 bp, Canis familiaris
gctcaaggtacatcctgtcagctca

SEQ ID NO: 98935 - DNA, 25 bp, Canis familiaris
gctcaaggccatacctactagcata

SEQ ID NO: 98936 - DNA, 25 bp, Canis familiaris
gctcaagcccatttttccagtagga

SEQ ID NO: 98937 - DNA, 25 bp, Canis familiaris
gcagaaggaatatttttcataaggg

SEQ ID NO: 98938 - DNA, 25 bp, Canis familiaris
gctaaggttgattctttaacgtggt

SEQ ID NO: 98939 - DNA, 25 bp, Canis familiaris
tccaaggttggcccttgaatcccct

SEQ ID NO: 98940 - DNA, 25 bp, Canis familiaris
gctaaggcttggggcttacatgcca

SEQ ID NO: 98941 - DNA, 25 bp, Canis familiaris
gctagggcttgacacttaacatcag

SEQ ID NO: 98942 - DNA, 25 bp, Canis familiaris
gctcagaggcagcacccttaaatta

SEQ ID NO: 98943 - DNA, 25 bp, Canis familiaris
gctcaggtggaacggcttgaaagga

SEQ ID NO: 98944 - DNA, 25 bp, Canis familiaris
gctcgcgcggcattgggttgaaaaa

SEQ ID NO: 98945 - DNA, 25 bp, Canis familiaris
gctctgctgcccagcgagggaaaaa

SEQ ID NO: 98946 - DNA, 25 bp, Canis familiaris
gcttcttccaccagggcaaaaatcc

SEQ ID NO: 98947 - DNA, 25 bp, Canis familiaris
gctactttgtccagggcaccaaatg

SEQ ID NO: 98948 - DNA, 25 bp, Canis familiaris
tccctttcttgggaggaggcagaag

SEQ ID NO: 98949 - DNA, 25 bp, Canis familiaris
gctcttttctctatcaggggcgata

SEQ ID NO: 98950 - DNA, 25 bp, Canis familiaris
gctctttttccagtcttgtgacttg

SEQ ID NO: 98951 - DNA, 25 bp, Canis familiaris
gctctttttctttctgttgcatatt

SEQ ID NO: 98952 - DNA, 25 bp, Canis familiaris
gctcattaatatctgttgcctgaaa

SEQ ID NO: 98953 - DNA, 25 bp, Canis familiaris
gctcttatcaatcacttgcaccaaa

SEQ ID NO: 98954 - DNA, 25 bp, Canis familiaris
gctctttcatatggtattcaacaca

SEQ ID NO: 98955 - DNA, 25 bp, Canis familiaris
gctcttttgatacatttaccttttg

SEQ ID NO: 98956 - DNA, 25 bp, Canis familiaris
gctaattttggttttacctcagctt

SEQ ID NO: 98957 - DNA, 25 bp, Canis familiaris
gctaatatctcatgttttcctccaa

SEQ ID NO: 98958 - DNA, 25 bp, Canis familiaris
gctaaaccacagcgttgccaaagaa

SEQ ID NO: 98959 - DNA, 25 bp, Canis familiaris
gctaagacctagagttgccatatga

SEQ ID NO: 98960 - DNA, 25 bp, Canis familiaris
gctcagcaacctggaggaagccaag

SEQ ID NO: 98961 - DNA, 25 bp, Canis familiaris
gctcagtacctgcaagcacacagca

SEQ ID NO: 98962 - DNA, 25 bp, Canis familiaris
gctcactacactcaacaagctgctc

SEQ ID NO: 98963 - DNA, 25 bp, Canis familiaris
gctaataacccaagcataacatgct

SEQ ID NO: 98964 - DNA, 25 bp, Canis familiaris
gctaaaaccaacattctagctttaa

SEQ ID NO: 98965 - DNA, 25 bp, Canis familiaris
gctaacatttactatcgcttagtct

SEQ ID NO: 98966 - DNA, 25 bp, Canis familiaris
gctagaatttagcatccccttatgc

SEQ ID NO: 98967 - DNA, 25 bp, Canis familiaris
gcatcagagtatttctacccctcta

SEQ ID NO: 98968 - DNA, 25 bp, Canis familiaris
gctaagtattttacccattccttat

SEQ ID NO: 98969 - DNA, 25 bp, Canis familiaris
gcatgcaaaattgttccactgcttt

SEQ ID NO: 98970 - DNA, 25 bp, Canis familiaris
gctaactagctgattaacctttttc

SEQ ID NO: 98971 - DNA, 25 bp, Canis familiaris
tgttaaaggacttaccgatggttat

SEQ ID NO: 98972 - DNA, 25 bp, Canis familiaris
gctacaaagtgactaacggggcctt

SEQ ID NO: 98973 - DNA, 25 bp, Canis familiaris
gctacatgaagggtaacgtgccgtc

SEQ ID NO: 98974 - DNA, 25 bp, Canis familiaris
gctacagagggcattggggcctgtc

SEQ ID NO: 98975 - DNA, 25 bp, Canis familiaris
gctcaaggctggtagggtggatctg

SEQ ID NO: 98976 - DNA, 25 bp, Canis familiaris
gctaagtctgtcagggggtgttaaa

SEQ ID NO: 98977 - DNA, 25 bp, Canis familiaris
gcttgacctacatcggggtgttgaa

SEQ ID NO: 98978 - DNA, 25 bp, Canis familiaris
gctctaagcaacttcgggtgtggaa

SEQ ID NO: 98979 - DNA, 25 bp, Canis familiaris
gctctacacccagtgaggggctcga

SEQ ID NO: 98980 - DNA, 25 bp, Canis familiaris
gctctaccgcatactgcagagggcc

SEQ ID NO: 98981 - DNA, 25 bp, Canis familiaris
gctcgggcgagaagcggaggcccgt

SEQ ID NO: 98982 - DNA, 25 bp, Canis familiaris
gttgggtagatggggagtgtcgcgt

SEQ ID NO: 98983 - DNA, 25 bp, Canis familiaris
gcagtggaaaatgccgagttcgtgg

SEQ ID NO: 98984 - DNA, 25 bp, Canis familiaris
gctaggtacaatcccgagtctttta

SEQ ID NO: 98985 - DNA, 25 bp, Canis familiaris
gctagaagacgaaacaagtatggtt

SEQ ID NO: 98986 - DNA, 25 bp, Canis familiaris
gctaaaggctgtaccactgaagttt

SEQ ID NO: 98987 - DNA, 25 bp, Canis familiaris
gctaaggactgtcccattctttttt

SEQ ID NO: 98988 - DNA, 25 bp, Canis familiaris
gctacatcgacactacatcatattt

SEQ ID NO: 98989 - DNA, 25 bp, Canis familiaris
gctcacatacacctactttttaata

SEQ ID NO: 98990 - DNA, 25 bp, Canis familiaris
gctcactacgaaccgatccttatag

SEQ ID NO: 98991 - DNA, 25 bp, Canis familiaris
gctcattgatcgttccacattttta

SEQ ID NO: 98992 - DNA, 25 bp, Canis familiaris
gctctttaaatggcagttacttcaa

SEQ ID NO: 98993 - DNA, 25 bp, Canis familiaris
gctacttaaataccttattctactt

SEQ ID NO: 98994 - DNA, 25 bp, Canis familiaris
gctagcataacatggcctggttcaa

SEQ ID NO: 98995 - DNA, 25 bp, Canis familiaris
gctcagctcagagtcggcttgggac

SEQ ID NO: 98996 - DNA, 25 bp, Canis familiaris
gctcactcatgcatgtgtctgtgtg

SEQ ID NO: 98997 - DNA, 25 bp, Canis familiaris
gctcactcagaccttcatgagtcgt

SEQ ID NO: 98998 - DNA, 25 bp, Canis familiaris
gctcagacataaacttagcatctta

SEQ ID NO: 98999 - DNA, 25 bp, Canis familiaris
gctagagctaagtttaggttgttag

SEQ ID NO: 99000 - DNA, 25 bp, Canis familiaris
gctaacctggatcaaggctttcggg

SEQ ID NO: 99001 - DNA, 25 bp, Canis familiaris
gctcagtttggacaagctgctccta

SEQ ID NO: 99002 - DNA, 25 bp, Canis familiaris
gctcgtttgtgtcgagtcagatcct

SEQ ID NO: 99003 - DNA, 25 bp, Canis familiaris
gctcagagtatgatcctgggatcct

SEQ ID NO: 99004 - DNA, 25 bp, Canis familiaris
gctcaggacatgatcttgggttcct

SEQ ID NO: 99005 - DNA, 25 bp, Canis familiaris
gctcagatcgtgatcctggggttct

SEQ ID NO: 99006 - DNA, 25 bp, Canis familiaris
gctcaggttgtggtctagggttgtg

SEQ ID NO: 99007 - DNA, 25 bp, Canis familiaris
gctcaggagaagccctctgggttgt

SEQ ID NO: 99008 - DNA, 25 bp, Canis familiaris
gctcatccagaaccacttcgtggat

SEQ ID NO: 99009 - DNA, 25 bp, Canis familiaris
gctctccacatcccaggggtatgat

SEQ ID NO: 99010 - DNA, 25 bp, Canis familiaris
gctatccccgacagtggggagcccg

SEQ ID NO: 99011 - DNA, 25 bp, Canis familiaris
gctaccccaagcacatcaaggagct

SEQ ID NO: 99012 - DNA, 25 bp, Canis familiaris
gctaagattagggaccaaggacata

SEQ ID NO: 99013 - DNA, 25 bp, Canis familiaris
gctcaaagtcgggaccggatgaacc

SEQ ID NO: 99014 - DNA, 25 bp, Canis familiaris
gctcaaccgggaagcctgtgatgac

SEQ ID NO: 99015 - DNA, 25 bp, Canis familiaris
gctcaaccgggaagcctgtgatgac

SEQ ID NO: 99016 - DNA, 25 bp, Canis familiaris
gctaacgtggtaggcctctgaacga

SEQ ID NO: 99017 - DNA, 25 bp, Canis familiaris
gctctacaatggcaattttggtgga

SEQ ID NO: 99018 - DNA, 25 bp, Canis familiaris
gctctggaatggcttttggcatggg

SEQ ID NO: 99019 - DNA, 25 bp, Canis familiaris
gctctgaagagtcagcttcgcgtcc

SEQ ID NO: 99020 - DNA, 25 bp, Canis familiaris
gctctgaaaggatgctgctgcactt

SEQ ID NO: 99021 - DNA, 25 bp, Canis familiaris
gctctggaccaacttgctgattgtc

SEQ ID NO: 99022 - DNA, 25 bp, Canis familiaris
gctctgtactctccttgagattttc

SEQ ID NO: 99023 - DNA, 25 bp, Canis familiaris
gctcgttcatgtctcttgagtgtga

SEQ ID NO: 99024 - DNA, 25 bp, Canis familiaris
gctcgtctcttggtctagacatgga

SEQ ID NO: 99025 - DNA, 25 bp, Canis familiaris
gctcattcttgccctctaaaataaa

SEQ ID NO: 99026 - DNA, 25 bp, Canis familiaris
gctctatctctgtctcaaataaaac

SEQ ID NO: 99027 - DNA, 25 bp, Canis familiaris
gctctgtccgccccaaacagagaat

SEQ ID NO: 99028 - DNA, 25 bp, Canis familiaris
gctctgatctgtgccccagatcgaa

SEQ ID NO: 99029 - DNA, 25 bp, Canis familiaris
gctcagattgtctctgcacacatgc

SEQ ID NO: 99030 - DNA, 25 bp, Canis familiaris
gctctgcttctgtactgcatatgct

SEQ ID NO: 99031 - DNA, 25 bp, Canis familiaris
gcttattgatgattgcatgatgcct

SEQ ID NO: 99032 - DNA, 25 bp, Canis familiaris
gctctcaggaagaatgatgccttag

SEQ ID NO: 99033 - DNA, 25 bp, Canis familiaris
gctctagtcaagcattccttcggag

SEQ ID NO: 99034 - DNA, 25 bp, Canis familiaris
gctctttcagagtgtcttgtggcgc

SEQ ID NO: 99035 - DNA, 25 bp, Canis familiaris
gctcttgtcagagaactgtgaggca

SEQ ID NO: 99036 - DNA, 25 bp, Canis familiaris
gctctgttgacctaacttgcagaaa

SEQ ID NO: 99037 - DNA, 25 bp, Canis familiaris
gctttgagaccagcacttgctttaa

SEQ ID NO: 99038 - DNA, 25 bp, Canis familiaris
gctctgttaaccactatcctataca

SEQ ID NO: 99039 - DNA, 25 bp, Canis familiaris
gctctgcttgatttttttcctaaaa

SEQ ID NO: 99040 - DNA, 25 bp, Canis familiaris
gctctgctttcctagattttctaat

SEQ ID NO: 99041 - DNA, 25 bp, Canis familiaris
gctctttggcccaatatgctcttat

SEQ ID NO: 99042 - DNA, 25 bp, Canis familiaris
gctctcttgggccttgagcacatgt

SEQ ID NO: 99043 - DNA, 25 bp, Canis familiaris
gctctgctctgcacttgatgaacag

SEQ ID NO: 99044 - DNA, 25 bp, Canis familiaris
gctctgctctgtgctactgaaaatc

SEQ ID NO: 99045 - DNA, 25 bp, Canis familiaris
gctcttcttggcactgtagagtgtg

SEQ ID NO: 99046 - DNA, 25 bp, Canis familiaris
gctttgtggccttctttgagattgg

SEQ ID NO: 99047 - DNA, 25 bp, Canis familiaris
gctcttgctttttgctttgcagact

SEQ ID NO: 99048 - DNA, 25 bp, Canis familiaris
gctctgttgtctaagtgtgcggtca

SEQ ID NO: 99049 - DNA, 25 bp, Canis familiaris
gctcttggactgatttcgtgccaga

SEQ ID NO: 99050 - DNA, 25 bp, Canis familiaris
gctttagaatcttcttggggagaac

SEQ ID NO: 99051 - DNA, 25 bp, Canis familiaris
gctcttcggatcatgtctggtggct

SEQ ID NO: 99052 - DNA, 25 bp, Canis familiaris
gctcttaggccgctctgaatatgtg

SEQ ID NO: 99053 - DNA, 25 bp, Canis familiaris
gctcttaagcaagctgcggttgtgg

SEQ ID NO: 99054 - DNA, 25 bp, Canis familiaris
gctcaaccaccagccagtggggtgt

SEQ ID NO: 99055 - DNA, 25 bp, Canis familiaris
gctacccactagtcacaggtggacc

SEQ ID NO: 99056 - DNA, 25 bp, Canis familiaris
gctacctcctgaactaggtcaggcc

SEQ ID NO: 99057 - DNA, 25 bp, Canis familiaris
gctaggccttgttctaggtactgtg

SEQ ID NO: 99058 - DNA, 25 bp, Canis familiaris
gctagagcctggttgtagactactg

SEQ ID NO: 99059 - DNA, 25 bp, Canis familiaris
gctcggtgcaactgtcagactcagc

SEQ ID NO: 99060 - DNA, 25 bp, Canis familiaris
gctcggtgcaattatttgaatctca

SEQ ID NO: 99061 - DNA, 25 bp, Canis familiaris
gctcaggtgcaataacatttgctat

SEQ ID NO: 99062 - DNA, 25 bp, Canis familiaris
gctcggagcaatgcaagtttccaga

SEQ ID NO: 99063 - DNA, 25 bp, Canis familiaris
gctaggacgatgggcactttccaca

SEQ ID NO: 99064 - DNA, 25 bp, Canis familiaris
gctctgaacaagggtttccacgagc

SEQ ID NO: 99065 - DNA, 25 bp, Canis familiaris
gctctggtagtaactttctcccagc

SEQ ID NO: 99066 - DNA, 25 bp, Canis familiaris
gctctggattgttgagtttgctcca

SEQ ID NO: 99067 - DNA, 25 bp, Canis familiaris
gctcggtgtttgtacattgcacaga

SEQ ID NO: 99068 - DNA, 25 bp, Canis familiaris
gctctggaatctggaagactgtgaa

SEQ ID NO: 99069 - DNA, 25 bp, Canis familiaris
gctcagcagtttagcaaacatgtgc

SEQ ID NO: 99070 - DNA, 25 bp, Canis familiaris
gctagcagtttgaactacctgcgga

SEQ ID NO: 99071 - DNA, 25 bp, Canis familiaris
gctagtttggatatgaccatggaat

SEQ ID NO: 99072 - DNA, 25 bp, Canis familiaris
gcttggttggaagaaaggagcaagg

SEQ ID NO: 99073 - DNA, 25 bp, Canis familiaris
gcttggcggggaggtggcccgaagc

SEQ ID NO: 99074 - DNA, 25 bp, Canis familiaris
gcttcggagggacccctccaaggca

SEQ ID NO: 99075 - DNA, 25 bp, Canis familiaris
gcattcgtaaaacctctcacgaagg

SEQ ID NO: 99076 - DNA, 25 bp, Canis familiaris
gctttggaaaccgtctaataacatg

SEQ ID NO: 99077 - DNA, 25 bp, Canis familiaris
gctttagtaggttttgaaaatcagc

SEQ ID NO: 99078 - DNA, 25 bp, Canis familiaris
gctagtcattagctattaggacact

SEQ ID NO: 99079 - DNA, 25 bp, Canis familiaris
gctcagctgcttctcataaaggaag

SEQ ID NO: 99080 - DNA, 25 bp, Canis familiaris
gctcagctgcccatcaaggatgtaa

SEQ ID NO: 99081 - DNA, 25 bp, Canis familiaris
gctaccccttcctggagtcaggggg

SEQ ID NO: 99082 - DNA, 25 bp, Canis familiaris
gctttcagccttctcggggctgaag

SEQ ID NO: 99083 - DNA, 25 bp, Canis familiaris
gctttcccttgtccgaaatgtggac

SEQ ID NO: 99084 - DNA, 25 bp, Canis familiaris
gctctatctcgcttaacctgaatgg

SEQ ID NO: 99085 - DNA, 25 bp, Canis familiaris
gctctagggcatcgaatccatgttt

SEQ ID NO: 99086 - DNA, 25 bp, Canis familiaris
gctcaccggctgggaccagttatgt

SEQ ID NO: 99087 - DNA, 25 bp, Canis familiaris
gctctacagggacacgcaccgtgtc

SEQ ID NO: 99088 - DNA, 25 bp, Canis familiaris
gctctccgttatcaccacagagttc

SEQ ID NO: 99089 - DNA, 25 bp, Canis familiaris
gctctcttttgaaacaggctggccc

SEQ ID NO: 99090 - DNA, 25 bp, Canis familiaris
gctcttgctaataaaatcgtggcca

SEQ ID NO: 99091 - DNA, 25 bp, Canis familiaris
gctcttcgagatgccaagctggaca

SEQ ID NO: 99092 - DNA, 25 bp, Canis familiaris
gctctccgtgactcaatatgggcat

SEQ ID NO: 99093 - DNA, 25 bp, Canis familiaris
gctctccagaggtgaaaggctattg

SEQ ID NO: 99094 - DNA, 25 bp, Canis familiaris
gctctccaagaggtgataaggctat

SEQ ID NO: 99095 - DNA, 25 bp, Canis familiaris
gctctcagcacaacactacaatggt

SEQ ID NO: 99096 - DNA, 25 bp, Canis familiaris
gctctctgcctaactagttgtgtaa

SEQ ID NO: 99097 - DNA, 25 bp, Canis familiaris
gctctctcctatgtgtttggttggc

SEQ ID NO: 99098 - DNA, 25 bp, Canis familiaris
gctctgactcctgttttggtcatac

SEQ ID NO: 99099 - DNA, 25 bp, Canis familiaris
gctaccccttgttctgtagttactc

SEQ ID NO: 99100 - DNA, 25 bp, Canis familiaris
gctagcccctagagattgcagttcc

SEQ ID NO: 99101 - DNA, 25 bp, Canis familiaris
gctagttctttcaagttcgttcctg

SEQ ID NO: 99102 - DNA, 25 bp, Canis familiaris
gctatggttgtttaccaagttcctt

SEQ ID NO: 99103 - DNA, 25 bp, Canis familiaris
gcttcagttttgtgccaacattcca

SEQ ID NO: 99104 - DNA, 25 bp, Canis familiaris
gcttcgcctttttgtcaataaacca

SEQ ID NO: 99105 - DNA, 25 bp, Canis familiaris
gctcataccctttatttaacaatcc

SEQ ID NO: 99106 - DNA, 25 bp, Canis familiaris
gctctgaccctcattcattataaca

SEQ ID NO: 99107 - DNA, 25 bp, Canis familiaris
gctcagagcacccgtatcatttacg

SEQ ID NO: 99108 - DNA, 25 bp, Canis familiaris
gctcagcaatttctacatttctcgg

SEQ ID NO: 99109 - DNA, 25 bp, Canis familiaris
gctcttttctgattaatgttctcgg

SEQ ID NO: 99110 - DNA, 25 bp, Canis familiaris
gctctttgcctgttacaactctagg

SEQ ID NO: 99111 - DNA, 25 bp, Canis familiaris
gctctattactgactcgctattcta

SEQ ID NO: 99112 - DNA, 25 bp, Canis familiaris
gctctattactgttctttttaagat

SEQ ID NO: 99113 - DNA, 25 bp, Canis familiaris
gctctatggttgctgtttttaagtg

SEQ ID NO: 99114 - DNA, 25 bp, Canis familiaris
gctctgaggtgtctgctttattggg

SEQ ID NO: 99115 - DNA, 25 bp, Canis familiaris
gctctgggagctctgtgttaggtga

SEQ ID NO: 99116 - DNA, 25 bp, Canis familiaris
gctcagggagcaagagtgttctctt

SEQ ID NO: 99117 - DNA, 25 bp, Canis familiaris
gctcattacagaagcggtccattcc

SEQ ID NO: 99118 - DNA, 25 bp, Canis familiaris
gctcattaacttcatgtcgactcct

SEQ ID NO: 99119 - DNA, 25 bp, Canis familiaris
gctttgcaaattgataccctgccat

SEQ ID NO: 99120 - DNA, 25 bp, Canis familiaris
gctaggaaattccagccaggcagcc

SEQ ID NO: 99121 - DNA, 25 bp, Canis familiaris
gcttgggacttgggtaacatctcgt

SEQ ID NO: 99122 - DNA, 25 bp, Canis familiaris
gctctgggacttgggggtttcagcc

SEQ ID NO: 99123 - DNA, 25 bp, Canis familiaris
gctcagggaaagcggcgttatgacc

SEQ ID NO: 99124 - DNA, 25 bp, Canis familiaris
gctcaggaatccttggtcagctttg

SEQ ID NO: 99125 - DNA, 25 bp, Canis familiaris
gctcagggacctggggtgtttgtag

SEQ ID NO: 99126 - DNA, 25 bp, Canis familiaris
gcttatgaacctgagggtccttgag

SEQ ID NO: 99127 - DNA, 25 bp, Canis familiaris
gctttgacccattgggggttggagc

SEQ ID NO: 99128 - DNA, 25 bp, Canis familiaris
gcaattggctaatgggggtttaggg

SEQ ID NO: 99129 - DNA, 25 bp, Canis familiaris
gctcttggcttctggagccttgtta

SEQ ID NO: 99130 - DNA, 25 bp, Canis familiaris
gctcttctgcttggaaggacatggc

SEQ ID NO: 99131 - DNA, 25 bp, Canis familiaris
gctcattctgctctgaaggtgctac

SEQ ID NO: 99132 - DNA, 25 bp, Canis familiaris
gctcatcctatgtaacagttgcgcc

SEQ ID NO: 99133 - DNA, 25 bp, Canis familiaris
gctcatcctcagcagatagcctaca

SEQ ID NO: 99134 - DNA, 25 bp, Canis familiaris
gctctccagaggcaactcaacaggc

SEQ ID NO: 99135 - DNA, 25 bp, Canis familiaris
gctctctgatgatccaattctacgg

SEQ ID NO: 99136 - DNA, 25 bp, Canis familiaris
gctctctgattcttcatgttgatag

SEQ ID NO: 99137 - DNA, 25 bp, Canis familiaris
gctctcctcatcttctgttataagg

SEQ ID NO: 99138 - DNA, 25 bp, Canis familiaris
gctcatccttcttcttgatagcata

SEQ ID NO: 99139 - DNA, 25 bp, Canis familiaris
gctaccattttcgtcattgcaaaga

SEQ ID NO: 99140 - DNA, 25 bp, Canis familiaris
gctcaccttttctacattaaaaata

SEQ ID NO: 99141 - DNA, 25 bp, Canis familiaris
gctctctttgtttctctcaaataaa

SEQ ID NO: 99142 - DNA, 25 bp, Canis familiaris
gctcttgacttattttggactgaaa

SEQ ID NO: 99143 - DNA, 25 bp, Canis familiaris
gctctgtagcttattctgtatcggt

SEQ ID NO: 99144 - DNA, 25 bp, Canis familiaris
gctcttactgtctactctgtatcaa

SEQ ID NO: 99145 - DNA, 25 bp, Canis familiaris
gctcttcagaagtcaggcgggcaga

SEQ ID NO: 99146 - DNA, 25 bp, Canis familiaris
gctctgctcagtcactggaggtcaa

SEQ ID NO: 99147 - DNA, 25 bp, Canis familiaris
gctcatccagaccactcgaggatac

SEQ ID NO: 99148 - DNA, 25 bp, Canis familiaris
gctctcagcgtccagtctggagaac

SEQ ID NO: 99149 - DNA, 25 bp, Canis familiaris
gctctcaagtcccctggaggaggac

SEQ ID NO: 99150 - DNA, 25 bp, Canis familiaris
gctcaggtgctccccgggggagcag

SEQ ID NO: 99151 - DNA, 25 bp, Canis familiaris
gctcagttcggggcagagggtgcac

SEQ ID NO: 99152 - DNA, 25 bp, Canis familiaris
gctcagatgcggggctggaggagga

SEQ ID NO: 99153 - DNA, 25 bp, Canis familiaris
gctacactcgcatctggactagaag

SEQ ID NO: 99154 - DNA, 25 bp, Canis familiaris
gctcataccccattcagactagaat

SEQ ID NO: 99155 - DNA, 25 bp, Canis familiaris
gctctcaccttattcgacatcagag

SEQ ID NO: 99156 - DNA, 25 bp, Canis familiaris
gctcacgcctgtaatcccagcactt

SEQ ID NO: 99157 - DNA, 25 bp, Canis familiaris
gctcagcttcagaagagccttgcct

SEQ ID NO: 99158 - DNA, 25 bp, Canis familiaris
gctcagctctcactggaggttattt

SEQ ID NO: 99159 - DNA, 25 bp, Canis familiaris
gctacattcagagtgctgggtttct

SEQ ID NO: 99160 - DNA, 25 bp, Canis familiaris
gctacaatcagagtgccggttctta

SEQ ID NO: 99161 - DNA, 25 bp, Canis familiaris
gctacactgaggaccaggttgtctc

SEQ ID NO: 99162 - DNA, 25 bp, Canis familiaris
gctacagggtgaccagcgcaagaac

SEQ ID NO: 99163 - DNA, 25 bp, Canis familiaris
gctacagcggatggcacagctgcag

SEQ ID NO: 99164 - DNA, 25 bp, Canis familiaris
gctaccgagtcagagctgcggcttc

SEQ ID NO: 99165 - DNA, 25 bp, Canis familiaris
gctaactacacagactggcagaccg

SEQ ID NO: 99166 - DNA, 25 bp, Canis familiaris
gctagaccaactcactggcaacagc

SEQ ID NO: 99167 - DNA, 25 bp, Canis familiaris
gctaatagcaatcaacacgatgaag

SEQ ID NO: 99168 - DNA, 25 bp, Canis familiaris
gctcaagagccagaacacggagctg

SEQ ID NO: 99169 - DNA, 25 bp, Canis familiaris
gctcaatggcaccaaagccaggagt

SEQ ID NO: 99170 - DNA, 25 bp, Canis familiaris
gctctatggccgaaaggtgggccac

SEQ ID NO: 99171 - DNA, 25 bp, Canis familiaris
gctctattgccgaataaggtgtcca

SEQ ID NO: 99172 - DNA, 25 bp, Canis familiaris
gctctgctctgcagaagggggtccc

SEQ ID NO: 99173 - DNA, 25 bp, Canis familiaris
gctctgctgctgatactgttggtgc

SEQ ID NO: 99174 - DNA, 25 bp, Canis familiaris
gctcaggtgagttcttcatgtctcc

SEQ ID NO: 99175 - DNA, 25 bp, Canis familiaris
gctcattatggtagccactggccac

SEQ ID NO: 99176 - DNA, 25 bp, Canis familiaris
gctcatacagggaagcctgagaagc

SEQ ID NO: 99177 - DNA, 25 bp, Canis familiaris
gctcaagagcgagttcctggtgcgc

SEQ ID NO: 99178 - DNA, 25 bp, Canis familiaris
gctcaaagtacttcttgtgtgcaga

SEQ ID NO: 99179 - DNA, 25 bp, Canis familiaris
gctctacatcatgcttcttttgaga

SEQ ID NO: 99180 - DNA, 25 bp, Canis familiaris
gctctatccaggaatcatttgggaa

SEQ ID NO: 99181 - DNA, 25 bp, Canis familiaris
gctctatctgcagcatagcttgtca

SEQ ID NO: 99182 - DNA, 25 bp, Canis familiaris
gcactattactttttgacaaaccag

SEQ ID NO: 99183 - DNA, 25 bp, Canis familiaris
gacttaactgaagggagaaatccgg

SEQ ID NO: 99184 - DNA, 25 bp, Canis familiaris
gctttacaggacgatgggaaaccgc

SEQ ID NO: 99185 - DNA, 25 bp, Canis familiaris
gctcatctacaaaggtggggaactc

SEQ ID NO: 99186 - DNA, 25 bp, Canis familiaris
gctctcatcctgtggctggaggaat

SEQ ID NO: 99187 - DNA, 25 bp, Canis familiaris
gctcatcccagatggctgtggggtc

SEQ ID NO: 99188 - DNA, 25 bp, Canis familiaris
gctcatcccagatggctgtggggtc

SEQ ID NO: 99189 - DNA, 25 bp, Canis familiaris
gctcatcccagatggctgtggggtc

SEQ ID NO: 99190 - DNA, 25 bp, Canis familiaris
gctcatcccagatggctgtggggtc

SEQ ID NO: 99191 - DNA, 25 bp, Canis familiaris
gctcttgacacagggtctggggtcc

SEQ ID NO: 99192 - DNA, 25 bp, Canis familiaris
gctcttgcaggggggcatgggggac

SEQ ID NO: 99193 - DNA, 25 bp, Canis familiaris
gctacatctggggggggggagtggt

SEQ ID NO: 99194 - DNA, 25 bp, Canis familiaris
gctaactcttgttggaggcgcggtc

SEQ ID NO: 99195 - DNA, 25 bp, Canis familiaris
gctcaactttgctgtagctagccgc

SEQ ID NO: 99196 - DNA, 25 bp, Canis familiaris
gctaatttctagatactaccagttc

SEQ ID NO: 99197 - DNA, 25 bp, Canis familiaris
gctaaatgattctcttgctccaagt

SEQ ID NO: 99198 - DNA, 25 bp, Canis familiaris
gctaatgtgaaatctcttcccgtgg

SEQ ID NO: 99199 - DNA, 25 bp, Canis familiaris
gctttgaatgaatcttttgcccgag

SEQ ID NO: 99200 - DNA, 25 bp, Canis familiaris
gcttaagcatagcacttttactacg

SEQ ID NO: 99201 - DNA, 25 bp, Canis familiaris
gctctagttagccaagtttatatac

SEQ ID NO: 99202 - DNA, 25 bp, Canis familiaris
gctaagttgatggaagtcgtataga

SEQ ID NO: 99203 - DNA, 25 bp, Canis familiaris
gctctagttaacgttcagctataag

SEQ ID NO: 99204 - DNA, 25 bp, Canis familiaris
gcttaattaaccaagactttagact

SEQ ID NO: 99205 - DNA, 25 bp, Canis familiaris
tttatattatggaccgaaattaata

SEQ ID NO: 99206 - DNA, 25 bp, Canis familiaris
gcttttataggtacccacttaacat

SEQ ID NO: 99207 - DNA, 25 bp, Canis familiaris
gctcatctgaaagatacagctcacc

SEQ ID NO: 99208 - DNA, 25 bp, Canis familiaris
gctcatcgagaatgtggcgtcgctc

SEQ ID NO: 99209 - DNA, 25 bp, Canis familiaris
gctcagcggtatagtgccgtcttca

SEQ ID NO: 99210 - DNA, 25 bp, Canis familiaris
gctcatcgattaactggctctgtgt

SEQ ID NO: 99211 - DNA, 25 bp, Canis familiaris
gctcagccattgagcgtctgctttc

SEQ ID NO: 99212 - DNA, 25 bp, Canis familiaris
gctcagcacttttacactgcatttc

SEQ ID NO: 99213 - DNA, 25 bp, Canis familiaris
gctagccacttcgacagacattatt

SEQ ID NO: 99214 - DNA, 25 bp, Canis familiaris
gctagccacttcgacagacattatt

SEQ ID NO: 99215 - DNA, 25 bp, Canis familiaris
gctacatcgctcgcaagcacaaata

SEQ ID NO: 99216 - DNA, 25 bp, Canis familiaris
gctacatcctactgctcacagaaac

SEQ ID NO: 99217 - DNA, 25 bp, Canis familiaris
gcagcaagctcttggcccaaggggc

SEQ ID NO: 99218 - DNA, 25 bp, Canis familiaris
gctcacctctagccttaaggggggc

SEQ ID NO: 99219 - DNA, 25 bp, Canis familiaris
gctacacattagctctcagatttgg

SEQ ID NO: 99220 - DNA, 25 bp, Canis familiaris
gctacagataagaatgaagcactgg

SEQ ID NO: 99221 - DNA, 25 bp, Canis familiaris
gctagcaatcattcttacatactgt

SEQ ID NO: 99222 - DNA, 25 bp, Canis familiaris
gctagactctcactgtccaaatgca

SEQ ID NO: 99223 - DNA, 25 bp, Canis familiaris
gctaacctgcactcgaagtgagacc

SEQ ID NO: 99224 - DNA, 25 bp, Canis familiaris
gcatgaagcccccggtagggaagaa

SEQ ID NO: 99225 - DNA, 25 bp, Canis familiaris
gctacagcaaccgggtggtgggacc

SEQ ID NO: 99226 - DNA, 25 bp, Canis familiaris
gctaacagactgccacttgagtgag

SEQ ID NO: 99227 - DNA, 25 bp, Canis familiaris
gctagcacgccgcatacgtggagaa

SEQ ID NO: 99228 - DNA, 25 bp, Canis familiaris
gctaactggatgatacctgggaaga

SEQ ID NO: 99229 - DNA, 25 bp, Canis familiaris
gctaattatatgaaaactcccaaga

SEQ ID NO: 99230 - DNA, 25 bp, Canis familiaris
gctcatgttgtagcaaaccccgaag

SEQ ID NO: 99231 - DNA, 25 bp, Canis familiaris
gctatgatttttgtttcccgaaccg

SEQ ID NO: 99232 - DNA, 25 bp, Canis familiaris
gtaatttaatcctcccagtgaacct

SEQ ID NO: 99233 - DNA, 25 bp, Canis familiaris
gttagtacaaactccaatggtccca

SEQ ID NO: 99234 - DNA, 25 bp, Canis familiaris
gctacagtgaaaccacccaaggtca

SEQ ID NO: 99235 - DNA, 25 bp, Canis familiaris
gctacatgtagttgatgcacgccca

SEQ ID NO: 99236 - DNA, 25 bp, Canis familiaris
gctcagagcttttgtgacagccctg

SEQ ID NO: 99237 - DNA, 25 bp, Canis familiaris
gctagagatgtactgtgcacccctc

SEQ ID NO: 99238 - DNA, 25 bp, Canis familiaris
gctagaataaggtcagtctgccgcc

SEQ ID NO: 99239 - DNA, 25 bp, Canis familiaris
gctcaagaaatgctcagctgcttct

SEQ ID NO: 99240 - DNA, 25 bp, Canis familiaris
gctcatgaactgagtggtgtctgat

SEQ ID NO: 99241 - DNA, 25 bp, Canis familiaris
gctcagaccatgatcttctttgttc

SEQ ID NO: 99242 - DNA, 25 bp, Canis familiaris
gctctcatacttatatcactaattc

SEQ ID NO: 99243 - DNA, 25 bp, Canis familiaris
gctcttcagttcatagcacgcatgt

SEQ ID NO: 99244 - DNA, 25 bp, Canis familiaris
gctttcagcttcagcacccgaaaga

SEQ ID NO: 99245 - DNA, 25 bp, Canis familiaris
gcatattactctacccgtggaaaaa

SEQ ID NO: 99246 - DNA, 25 bp, Canis familiaris
gctaaactatgtacacgaggaaaat

SEQ ID NO: 99247 - DNA, 25 bp, Canis familiaris
gctcagcgacttctcctgaggaggt

SEQ ID NO: 99248 - DNA, 25 bp, Canis familiaris
gctcacgccattcattctgggagcc

SEQ ID NO: 99249 - DNA, 25 bp, Canis familiaris
gctcacccacgggttggagctgtgc

SEQ ID NO: 99250 - DNA, 25 bp, Canis familiaris
gctcttcaacttggcttgtgtgtgt

SEQ ID NO: 99251 - DNA, 25 bp, Canis familiaris
gctctcaaaatcctgctatgtttat

SEQ ID NO: 99252 - DNA, 25 bp, Canis familiaris
gctctacaagatgggctttcctgaa

SEQ ID NO: 99253 - DNA, 25 bp, Canis familiaris
gctctagggagctgtttattgaaaa

SEQ ID NO: 99254 - DNA, 25 bp, Canis familiaris
gctcagagtgggttccccttgagaa

SEQ ID NO: 99255 - DNA, 25 bp, Canis familiaris
gctctatgtggagctccaccgtgga

SEQ ID NO: 99256 - DNA, 25 bp, Canis familiaris
gctctatggagagaccctcaggctc

SEQ ID NO: 99257 - DNA, 25 bp, Canis familiaris
gctctagggagaatccttcctgctt

SEQ ID NO: 99258 - DNA, 25 bp, Canis familiaris
gctttggggttcttttgactcatgc

SEQ ID NO: 99259 - DNA, 25 bp, Canis familiaris
gctaacgcggatttgtttccttctt

SEQ ID NO: 99260 - DNA, 25 bp, Canis familiaris
gctaggccggattctttaggcttgt

SEQ ID NO: 99261 - DNA, 25 bp, Canis familiaris
gctacaccgcagaagtcttaggctc

SEQ ID NO: 99262 - DNA, 25 bp, Canis familiaris
gctatgacccaaactctatgctggt

SEQ ID NO: 99263 - DNA, 25 bp, Canis familiaris
gctagactggcacccatctagggtg

SEQ ID NO: 99264 - DNA, 25 bp, Canis familiaris
gctaggaggcatcttcatgggagac

SEQ ID NO: 99265 - DNA, 25 bp, Canis familiaris
gctcagaaggagcctttgcgggcac

SEQ ID NO: 99266 - DNA, 25 bp, Canis familiaris
gctcaaaggaaccttggcgggtgcc

SEQ ID NO: 99267 - DNA, 25 bp, Canis familiaris
gctacaaggactggggccaggggac

SEQ ID NO: 99268 - DNA, 25 bp, Canis familiaris
gctacacgtcccgaggaatggggtc

SEQ ID NO: 99269 - DNA, 25 bp, Canis familiaris
gctcaccgtcctagaggatctgcag

SEQ ID NO: 99270 - DNA, 25 bp, Canis familiaris
gctcacccccttaggaggaggcaag

SEQ ID NO: 99271 - DNA, 25 bp, Canis familiaris
gctcttgccacctgctggagagaag

SEQ ID NO: 99272 - DNA, 25 bp, Canis familiaris
gctcttcttcctcaggggagtgatt

SEQ ID NO: 99273 - DNA, 25 bp, Canis familiaris
gctcttcttcctcaggggagtgatt

SEQ ID NO: 99274 - DNA, 25 bp, Canis familiaris
gctcttcttccttaggagagtgatt

SEQ ID NO: 99275 - DNA, 25 bp, Canis familiaris
gctcttttcttatgtctcttattat

SEQ ID NO: 99276 - DNA, 25 bp, Canis familiaris
gctcttctttattatacttattccc

SEQ ID NO: 99277 - DNA, 25 bp, Canis familiaris
gctaacttccatttaatccattacc

SEQ ID NO: 99278 - DNA, 25 bp, Canis familiaris
gctaactttattaagcacccttcct

SEQ ID NO: 99279 - DNA, 25 bp, Canis familiaris
gcttacctgttatatacaccttccc

SEQ ID NO: 99280 - DNA, 25 bp, Canis familiaris
gcttaccaattaataactctttcca

SEQ ID NO: 99281 - DNA, 25 bp, Canis familiaris
gctaaacacttctgagacttacttc

SEQ ID NO: 99282 - DNA, 25 bp, Canis familiaris
gctaaacacttacagagtccccttc

SEQ ID NO: 99283 - DNA, 25 bp, Canis familiaris
gttgaactcttacaactactcccta

SEQ ID NO: 99284 - DNA, 25 bp, Canis familiaris
gcttgaagccaaagaaaatacccct

SEQ ID NO: 99285 - DNA, 25 bp, Canis familiaris
gcataaactaacccaacaagtccct

SEQ ID NO: 99286 - DNA, 25 bp, Canis familiaris
gaaacctatccagaggaaaccctat

SEQ ID NO: 99287 - DNA, 25 bp, Canis familiaris
gaatacacaaaaaaggcaaccctat

SEQ ID NO: 99288 - DNA, 25 bp, Canis familiaris
gaattgacctaatggaaaacctatt

SEQ ID NO: 99289 - DNA, 25 bp, Canis familiaris
gaattgggctttgaggaagagtttt

SEQ ID NO: 99290 - DNA, 25 bp, Canis familiaris
gaattgggtgttcaggttagccttt

SEQ ID NO: 99291 - DNA, 25 bp, Canis familiaris
gctcttgggtcctggagttgatcct

SEQ ID NO: 99292 - DNA, 25 bp, Canis familiaris
gctttgggctccttcaaggaacctc

SEQ ID NO: 99293 - DNA, 25 bp, Canis familiaris
gcttgggctcttctgaatgtggact

SEQ ID NO: 99294 - DNA, 25 bp, Canis familiaris
gcttgaggtttttatggggtctgtt

SEQ ID NO: 99295 - DNA, 25 bp, Canis familiaris
gcttggtttttatagcattgccatc

SEQ ID NO: 99296 - DNA, 25 bp, Canis familiaris
gctcatttgttttgttaatcgcctc

SEQ ID NO: 99297 - DNA, 25 bp, Canis familiaris
gctcaactggtaatgattagctcac

SEQ ID NO: 99298 - DNA, 25 bp, Canis familiaris
gctcttctggaaatcaatgacacac

SEQ ID NO: 99299 - DNA, 25 bp, Canis familiaris
gctcttctggaaatccatgaccacc

SEQ ID NO: 99300 - DNA, 25 bp, Canis familiaris
gctcttggcaaaatccacaggaccc

SEQ ID NO: 99301 - DNA, 25 bp, Canis familiaris
gctcttgtaaaacaccagccactct

SEQ ID NO: 99302 - DNA, 25 bp, Canis familiaris
gctcaattacagaaaaccaggtcca

SEQ ID NO: 99303 - DNA, 25 bp, Canis familiaris
gcttttcaggtatcaaaggttacca

SEQ ID NO: 99304 - DNA, 25 bp, Canis familiaris
gctacttaggtattctggggtgaga

SEQ ID NO: 99305 - DNA, 25 bp, Canis familiaris
gctactccaggtcctgggagggaga

SEQ ID NO: 99306 - DNA, 25 bp, Canis familiaris
gctactccgattccctggagtgtga

SEQ ID NO: 99307 - DNA, 25 bp, Canis familiaris
gctacaccgacaacctggtgcgtgt

SEQ ID NO: 99308 - DNA, 25 bp, Canis familiaris
gctacctggttgaccagtggcgctg

SEQ ID NO: 99309 - DNA, 25 bp, Canis familiaris
gctcactttgggcccagtaggatgg

SEQ ID NO: 99310 - DNA, 25 bp, Canis familiaris
gcttgttattgcgccggtggggaaa

SEQ ID NO: 99311 - DNA, 25 bp, Canis familiaris
gcttttttggccaggtgtggggcct

SEQ ID NO: 99312 - DNA, 25 bp, Canis familiaris
gcttttgttgcacagaaggtccccc

SEQ ID NO: 99313 - DNA, 25 bp, Canis familiaris
gctactttgccttgaagggggccct

SEQ ID NO: 99314 - DNA, 25 bp, Canis familiaris
gctactttgcctaaatacttcaccc

SEQ ID NO: 99315 - DNA, 25 bp, Canis familiaris
gctagctgattaatgcctacactaa

SEQ ID NO: 99316 - DNA, 25 bp, Canis familiaris
gctcaaatctatagcaaaccttaga

SEQ ID NO: 99317 - DNA, 25 bp, Canis familiaris
gctcaaatctatagccaaacaaaga

SEQ ID NO: 99318 - DNA, 25 bp, Canis familiaris
gctcagccagcctccaaataaaatt

SEQ ID NO: 99319 - DNA, 25 bp, Canis familiaris
gctcagacagtcaccacaatctaaa

SEQ ID NO: 99320 - DNA, 25 bp, Canis familiaris
gctcagtcatgtcacctgacttcag

SEQ ID NO: 99321 - DNA, 25 bp, Canis familiaris
gctcagtctatgcacgagttctcgg

SEQ ID NO: 99322 - DNA, 25 bp, Canis familiaris
gctcttctaaactagttccagtggg

SEQ ID NO: 99323 - DNA, 25 bp, Canis familiaris
gtccccaacctagcttggtgagggc

SEQ ID NO: 99324 - DNA, 25 bp, Canis familiaris
gcaagccctatagaccttgggggac

SEQ ID NO: 99325 - DNA, 25 bp, Canis familiaris
gctacccaggcagatccttggaaag

SEQ ID NO: 99326 - DNA, 25 bp, Canis familiaris
gctaccgaggggacctgtgtgagat

SEQ ID NO: 99327 - DNA, 25 bp, Canis familiaris
gctcaagacaggggccctctggagc

SEQ ID NO: 99328 - DNA, 25 bp, Canis familiaris
gctaaactgcagagccaccgcaggc

SEQ ID NO: 99329 - DNA, 25 bp, Canis familiaris
gctacatcctggatgccatcctgtt

SEQ ID NO: 99330 - DNA, 25 bp, Canis familiaris
gctaccggtgcaatgacaccatacc

SEQ ID NO: 99331 - DNA, 25 bp, Canis familiaris
gcatcaccaaggagaactacaacca

SEQ ID NO: 99332 - DNA, 25 bp, Canis familiaris
gctacacagggaaacctagacacca

SEQ ID NO: 99333 - DNA, 25 bp, Canis familiaris
gctactcggcgagcagacttcaatc

SEQ ID NO: 99334 - DNA, 25 bp, Canis familiaris
gctatggggcacagaggcctaaccc

SEQ ID NO: 99335 - DNA, 25 bp, Canis familiaris
gctcagggtcaggcacattgcacta

SEQ ID NO: 99336 - DNA, 25 bp, Canis familiaris
gctcagcctgtcatgcaggctacca

SEQ ID NO: 99337 - DNA, 25 bp, Canis familiaris
gctcatctcgatttgactgcaactc

SEQ ID NO: 99338 - DNA, 25 bp, Canis familiaris
gctcatgtcatattatactccacct

SEQ ID NO: 99339 - DNA, 25 bp, Canis familiaris
gctatgagcaatactccttcaccat

SEQ ID NO: 99340 - DNA, 25 bp, Canis familiaris
gctcagaggaatgcttgtgccacag

SEQ ID NO: 99341 - DNA, 25 bp, Canis familiaris
gctcatggtgaagccgggaatgccc

SEQ ID NO: 99342 - DNA, 25 bp, Canis familiaris
gctaccgaagacaatggggtgcccg

SEQ ID NO: 99343 - DNA, 25 bp, Canis familiaris
gcatacctaaaaaatggcccccagg

SEQ ID NO: 99344 - DNA, 25 bp, Canis familiaris
gctcacctcaaagtggaggacccca

SEQ ID NO: 99345 - DNA, 25 bp, Canis familiaris
gctacagctaaagtgggtgcctccc

SEQ ID NO: 99346 - DNA, 25 bp, Canis familiaris
gctacctgtgaagtggatggcccct

SEQ ID NO: 99347 - DNA, 25 bp, Canis familiaris
gctacactccaagtctgtggctttt

SEQ ID NO: 99348 - DNA, 25 bp, Canis familiaris
gctcatgtcctcaggcttgtgattt

SEQ ID NO: 99349 - DNA, 25 bp, Canis familiaris
gctcattctcggtagcttgtctaaa

SEQ ID NO: 99350 - DNA, 25 bp, Canis familiaris
gctcattctcgtagctttttaaaaa

SEQ ID NO: 99351 - DNA, 25 bp, Canis familiaris
gctcatcttcttgttttgctataat

SEQ ID NO: 99352 - DNA, 25 bp, Canis familiaris
gctcatttcctggtatgacaatgaa

SEQ ID NO: 99353 - DNA, 25 bp, Canis familiaris
gctcatttcctggtatgacaacgaa

SEQ ID NO: 99354 - DNA, 25 bp, Canis familiaris
gctaatgatcacggatatgacaact

SEQ ID NO: 99355 - DNA, 25 bp, Canis familiaris
gctaagaaggcgggcacatgactaa

SEQ ID NO: 99356 - DNA, 25 bp, Canis familiaris
gctatgaatatggcgcccaataccc

SEQ ID NO: 99357 - DNA, 25 bp, Canis familiaris
gctcaaattgcgggtcaacataatc

SEQ ID NO: 99358 - DNA, 25 bp, Canis familiaris
gctcatcattgtgggtgtaacaatt

SEQ ID NO: 99359 - DNA, 25 bp, Canis familiaris
gctcatttttcagggcaagcagctt

SEQ ID NO: 99360 - DNA, 25 bp, Canis familiaris
gctcatctttgtcaggcaagcagtc

SEQ ID NO: 99361 - DNA, 25 bp, Canis familiaris
gctcactttgtctatgggatcgctt

SEQ ID NO: 99362 - DNA, 25 bp, Canis familiaris
gctcatctaggaactggtgatccat

SEQ ID NO: 99363 - DNA, 25 bp, Canis familiaris
gctacatcagagtgcggttctaccg

SEQ ID NO: 99364 - DNA, 25 bp, Canis familiaris
gctcagcaatactatctcgtttacc

SEQ ID NO: 99365 - DNA, 25 bp, Canis familiaris
gctacaataaatgtttctacccctt

SEQ ID NO: 99366 - DNA, 25 bp, Canis familiaris
gctcacatttaagttttacacgccc

SEQ ID NO: 99367 - DNA, 25 bp, Canis familiaris
gctattttcagttcgtatacggccc

SEQ ID NO: 99368 - DNA, 25 bp, Canis familiaris
gcttttctaacccaaactgtgtgtc

SEQ ID NO: 99369 - DNA, 25 bp, Canis familiaris
gctttctctggagaaccctagcgct

SEQ ID NO: 99370 - DNA, 25 bp, Canis familiaris
gttactcgggaatcatccgattcgt

SEQ ID NO: 99371 - DNA, 25 bp, Canis familiaris
gctaattagggcttcaaccagttgc

SEQ ID NO: 99372 - DNA, 25 bp, Canis familiaris
gctagaacagccgtgtaactcctgg

SEQ ID NO: 99373 - DNA, 25 bp, Canis familiaris
gctacaaaacggcaagcccggggtg

SEQ ID NO: 99374 - DNA, 25 bp, Canis familiaris
gctacaaaaggggtcaccaagccgc

SEQ ID NO: 99375 - DNA, 25 bp, Canis familiaris
gctacatatcaacaggtcacctaca

SEQ ID NO: 99376 - DNA, 25 bp, Canis familiaris
gctacattcaactatgagccccacc

SEQ ID NO: 99377 - DNA, 25 bp, Canis familiaris
gctacacctgaatatcctccagaac

SEQ ID NO: 99378 - DNA, 25 bp, Canis familiaris
gctcaacctctaaattgcccaagac

SEQ ID NO: 99379 - DNA, 25 bp, Canis familiaris
gctcaacgccggcttcaaggagaca

SEQ ID NO: 99380 - DNA, 25 bp, Canis familiaris
gctagttccaagcttcgaagagaat

SEQ ID NO: 99381 - DNA, 25 bp, Canis familiaris
gctagtcccacgagtcacacgtgaa

SEQ ID NO: 99382 - DNA, 25 bp, Canis familiaris
gctcaggcccacgggaacagagtgt

SEQ ID NO: 99383 - DNA, 25 bp, Canis familiaris
gctacctcagccgggaaatggtgtt

SEQ ID NO: 99384 - DNA, 25 bp, Canis familiaris
gcatcaccgtgctgggcagcaatag

SEQ ID NO: 99385 - DNA, 25 bp, Canis familiaris
gctcaccgtgctaaatcatgcgata

SEQ ID NO: 99386 - DNA, 25 bp, Canis familiaris
gctatgccaggcctagagcaggtgc

SEQ ID NO: 99387 - DNA, 25 bp, Canis familiaris
gctagtcattgcccatggtgttaac

SEQ ID NO: 99388 - DNA, 25 bp, Canis familiaris
gctaatattccattgtatgtgtgta

SEQ ID NO: 99389 - DNA, 25 bp, Canis familiaris
gctacatttacacatctagcagtca

SEQ ID NO: 99390 - DNA, 25 bp, Canis familiaris
gctacatttacacatctagcagtca

SEQ ID NO: 99391 - DNA, 25 bp, Canis familiaris
gctaataaagctgatagaggtcaaa

SEQ ID NO: 99392 - DNA, 25 bp, Canis familiaris
gctaaccaattttaagtgccaccag

SEQ ID NO: 99393 - DNA, 25 bp, Canis familiaris
gctaaaacttcttgctggatgccca

SEQ ID NO: 99394 - DNA, 25 bp, Canis familiaris
gctagaaaacctccttgaccagcga

SEQ ID NO: 99395 - DNA, 25 bp, Canis familiaris
gctagaaccaagcacattaccacta

SEQ ID NO: 99396 - DNA, 25 bp, Canis familiaris
gctagagtccagggtcagatactac

SEQ ID NO: 99397 - DNA, 25 bp, Canis familiaris
gctcaggtctgggggagctgaccca

SEQ ID NO: 99398 - DNA, 25 bp, Canis familiaris
gctaggactgaggagcgagctgcag

SEQ ID NO: 99399 - DNA, 25 bp, Canis familiaris
gctacgagctgcctgacggccaggt

SEQ ID NO: 99400 - DNA, 25 bp, Canis familiaris
gctcactggcaatactggctcggag

SEQ ID NO: 99401 - DNA, 25 bp, Canis familiaris
gctacatggctctccaagtcaggaa

SEQ ID NO: 99402 - DNA, 25 bp, Canis familiaris
gcttaggccgtcaacagtaccaact

SEQ ID NO: 99403 - DNA, 25 bp, Canis familiaris
gctatagtccttatcctgactcatg

SEQ ID NO: 99404 - DNA, 25 bp, Canis familiaris
gctaagcaaaatgtcctatctggca

SEQ ID NO: 99405 - DNA, 25 bp, Canis familiaris
gctagagtaagtggcccatcgctgg

SEQ ID NO: 99406 - DNA, 25 bp, Canis familiaris
gctagagctagggagcctacctgca

SEQ ID NO: 99407 - DNA, 25 bp, Canis familiaris
gctacgtgacgttggtgagtctgca

SEQ ID NO: 99408 - DNA, 25 bp, Canis familiaris
gctacatgtctcgttggtgggagca

SEQ ID NO: 99409 - DNA, 25 bp, Canis familiaris
gctagcatctcgtcaggtgtgggag

SEQ ID NO: 99410 - DNA, 25 bp, Canis familiaris
gctcagacatcaacctgtgtgtggg

SEQ ID NO: 99411 - DNA, 25 bp, Canis familiaris
gctcacagtcattcctgtggtccgc

SEQ ID NO: 99412 - DNA, 25 bp, Canis familiaris
gctcacagctcactaagatggatcc

SEQ ID NO: 99413 - DNA, 25 bp, Canis familiaris
gctcacccagatgcaggaatcactc

SEQ ID NO: 99414 - DNA, 25 bp, Canis familiaris
gctcacttcggcagcacatatacca

SEQ ID NO: 99415 - DNA, 25 bp, Canis familiaris
gctcacctggaccagcacagtagcc

SEQ ID NO: 99416 - DNA, 25 bp, Canis familiaris
gctcacctgagctcagctggatggc

SEQ ID NO: 99417 - DNA, 25 bp, Canis familiaris
gctcacagaccatctgcttgcattg

SEQ ID NO: 99418 - DNA, 25 bp, Canis familiaris
gctagagaatcatgtgcttcttgta

SEQ ID NO: 99419 - DNA, 25 bp, Canis familiaris
gctcaataatctggtgttgtttgac

SEQ ID NO: 99420 - DNA, 25 bp, Canis familiaris
gctcaccagtctggatttcttccgc

SEQ ID NO: 99421 - DNA, 25 bp, Canis familiaris
gctacacgagtgcatgttcttgggc

SEQ ID NO: 99422 - DNA, 25 bp, Canis familiaris
gctcactgcggtgtgcgtttgatga

SEQ ID NO: 99423 - DNA, 25 bp, Canis familiaris
gctcactctggtctggtgtggtaag

SEQ ID NO: 99424 - DNA, 25 bp, Canis familiaris
gctcactcggattatatgctgtatg

SEQ ID NO: 99425 - DNA, 25 bp, Canis familiaris
gctatccatggattgatgtctcagg

SEQ ID NO: 99426 - DNA, 25 bp, Canis familiaris
gctacctgctatttgtccaggctga

SEQ ID NO: 99427 - DNA, 25 bp, Canis familiaris
gctacctgatgggtgtgcgagagct

SEQ ID NO: 99428 - DNA, 25 bp, Canis familiaris
gctactttgagtgctggaagctata

SEQ ID NO: 99429 - DNA, 25 bp, Canis familiaris
gctcactttagcactctggcaatta

SEQ ID NO: 99430 - DNA, 25 bp, Canis familiaris
gctcaataggaaagctcgacatttt

SEQ ID NO: 99431 - DNA, 25 bp, Canis familiaris
gctcaatacaaaaggagacactgct

SEQ ID NO: 99432 - DNA, 25 bp, Canis familiaris
gctcaaacagaaggtcatgacccac

SEQ ID NO: 99433 - DNA, 25 bp, Canis familiaris
gctcaaacaggggtcagtccgaaca

SEQ ID NO: 99434 - DNA, 25 bp, Canis familiaris
gctcaaagcagagcttcctactgca

SEQ ID NO: 99435 - DNA, 25 bp, Canis familiaris
gctcaaatcttagtctccaaatgaa

SEQ ID NO: 99436 - DNA, 25 bp, Canis familiaris
gcatctaacttcttcccaaataaca

SEQ ID NO: 99437 - DNA, 25 bp, Canis familiaris
gcattgtaagttgcccaataaaaaa

SEQ ID NO: 99438 - DNA, 25 bp, Canis familiaris
gcagttaagtcaaccacaatggcaa

SEQ ID NO: 99439 - DNA, 25 bp, Canis familiaris
gctcacgagatcgaacccatatgga

SEQ ID NO: 99440 - DNA, 25 bp, Canis familiaris
gctaatggtgcccaccacatgggcc

SEQ ID NO: 99441 - DNA, 25 bp, Canis familiaris
gctaatggtgggcctcatgtggcgc

SEQ ID NO: 99442 - DNA, 25 bp, Canis familiaris
gctaatcagtcacctttgtctctgc

SEQ ID NO: 99443 - DNA, 25 bp, Canis familiaris
gctcagtattcaattcttccattcc

SEQ ID NO: 99444 - DNA, 25 bp, Canis familiaris
gctcacatattcatctcttgccaaa

SEQ ID NO: 99445 - DNA, 25 bp, Canis familiaris
gctacacccgtctttgacaacatgt

SEQ ID NO: 99446 - DNA, 25 bp, Canis familiaris
gctaagacctcctctgaaagctgct

SEQ ID NO: 99447 - DNA, 25 bp, Canis familiaris
gctaaggtccctgggcaaacagcgt

SEQ ID NO: 99448 - DNA, 25 bp, Canis familiaris
gctacgggcaccgggctaggtgcca

SEQ ID NO: 99449 - DNA, 25 bp, Canis familiaris
gctacgaggagctggaggagaatta

SEQ ID NO: 99450 - DNA, 25 bp, Canis familiaris
gctactagtagtccaagtgagttgc

SEQ ID NO: 99451 - DNA, 25 bp, Canis familiaris
gctagaaggttcgacatgtgtgttg

SEQ ID NO: 99452 - DNA, 25 bp, Canis familiaris
gctaagagccttgggctggctgcat

SEQ ID NO: 99453 - DNA, 25 bp, Canis familiaris
gctataggcctttgagggctctcaa

SEQ ID NO: 99454 - DNA, 25 bp, Canis familiaris
gctaagcccttaggggctgtctttc

SEQ ID NO: 99455 - DNA, 25 bp, Canis familiaris
gctaaacactttggtgcggtgcttg

SEQ ID NO: 99456 - DNA, 25 bp, Canis familiaris
gctatgagaccgtggccgagtgttc

SEQ ID NO: 99457 - DNA, 25 bp, Canis familiaris
gctagctactcgagagcttggtgtt

SEQ ID NO: 99458 - DNA, 25 bp, Canis familiaris
gctaatgtttggccagtggctgttt

SEQ ID NO: 99459 - DNA, 25 bp, Canis familiaris
gctattgtcgggcggtgcatgtgat

SEQ ID NO: 99460 - DNA, 25 bp, Canis familiaris
gctagtgggtggcttggctgattgg

SEQ ID NO: 99461 - DNA, 25 bp, Canis familiaris
gctaatggactcacttggtatttct

SEQ ID NO: 99462 - DNA, 25 bp, Canis familiaris
gctaaaactgctttctggacgtact

SEQ ID NO: 99463 - DNA, 25 bp, Canis familiaris
gctaataaagccttctggaatctga

SEQ ID NO: 99464 - DNA, 25 bp, Canis familiaris
gctacatttgattcttctggacttg

SEQ ID NO: 99465 - DNA, 25 bp, Canis familiaris
gctaagattattgatcaaatcattg

SEQ ID NO: 99466 - DNA, 25 bp, Canis familiaris
gctacggtttcattcaagtcaggga

SEQ ID NO: 99467 - DNA, 25 bp, Canis familiaris
gctacagggtactcaccatcttggc

SEQ ID NO: 99468 - DNA, 25 bp, Canis familiaris
gctacaggaaaatacctttcacata

SEQ ID NO: 99469 - DNA, 25 bp, Canis familiaris
gctactagaataaaatctcttaact

SEQ ID NO: 99470 - DNA, 25 bp, Canis familiaris
gctcagtataaatccagttgaacct

SEQ ID NO: 99471 - DNA, 25 bp, Canis familiaris
gctcagataatacaccagaaaccca

SEQ ID NO: 99472 - DNA, 25 bp, Canis familiaris
gctaattgattacgccagagtaaca

SEQ ID NO: 99473 - DNA, 25 bp, Canis familiaris
gctaagtattacccacagacatata

SEQ ID NO: 99474 - DNA, 25 bp, Canis familiaris
gctaattgataagccccctattttt

SEQ ID NO: 99475 - DNA, 25 bp, Canis familiaris
gctcaattgatgaagtgcctgcctt

SEQ ID NO: 99476 - DNA, 25 bp, Canis familiaris
gctaatctgatgaaagctcggtctt

SEQ ID NO: 99477 - DNA, 25 bp, Canis familiaris
gctaagttttagtggatcagatttt

SEQ ID NO: 99478 - DNA, 25 bp, Canis familiaris
gctagatttttacttccaacattat

SEQ ID NO: 99479 - DNA, 25 bp, Canis familiaris
gctaatgttctgtcaagatcagcaa

SEQ ID NO: 99480 - DNA, 25 bp, Canis familiaris
gctaatgttttccagaagcatactc

SEQ ID NO: 99481 - DNA, 25 bp, Canis familiaris
gctaattataccctaagcctcctgc

SEQ ID NO: 99482 - DNA, 25 bp, Canis familiaris
gctacctaaccctaatcttttgatt

SEQ ID NO: 99483 - DNA, 25 bp, Canis familiaris
gctacactacccaacacactattgg

SEQ ID NO: 99484 - DNA, 25 bp, Canis familiaris
gctacagccaacttaactggactag

SEQ ID NO: 99485 - DNA, 25 bp, Canis familiaris
gctcaagtcaaataatgctatccta

SEQ ID NO: 99486 - DNA, 25 bp, Canis familiaris
gctacagtgcaataaagataccccc

SEQ ID NO: 99487 - DNA, 25 bp, Canis familiaris
gctagggaacacctgcatgtacccc

SEQ ID NO: 99488 - DNA, 25 bp, Canis familiaris
gctagggaacacggtagatcctttg

SEQ ID NO: 99489 - DNA, 25 bp, Canis familiaris
gctaggacaccacgggaataccttc

SEQ ID NO: 99490 - DNA, 25 bp, Canis familiaris
gctaggactccccggggagtcggct

SEQ ID NO: 99491 - DNA, 25 bp, Canis familiaris
gctaggaagccttttgggagccctg

SEQ ID NO: 99492 - DNA, 25 bp, Canis familiaris
gctatgttggttttatggtcccgtg

SEQ ID NO: 99493 - DNA, 25 bp, Canis familiaris
gctagttctttcattagatccgcgc

SEQ ID NO: 99494 - DNA, 25 bp, Canis familiaris
gctactgtccccatttatgcaacag

SEQ ID NO: 99495 - DNA, 25 bp, Canis familiaris
gctagtgtggcatcttcttagaagc

SEQ ID NO: 99496 - DNA, 25 bp, Canis familiaris
gctttatggtccccttgtaagtagt

SEQ ID NO: 99497 - DNA, 25 bp, Canis familiaris
gcatacctgttcctttttggggagt

SEQ ID NO: 99498 - DNA, 25 bp, Canis familiaris
gcttgaaggcttcttttgtggaact

SEQ ID NO: 99499 - DNA, 25 bp, Canis familiaris
gctaagcagccaatcactttgggga

SEQ ID NO: 99500 - DNA, 25 bp, Canis familiaris
gctaaggctcagacaccatttggga

SEQ ID NO: 99501 - DNA, 25 bp, Canis familiaris
gctaacggagagccacatcttggcc

SEQ ID NO: 99502 - DNA, 25 bp, Canis familiaris
gctaattcagaatcactttgtggat

SEQ ID NO: 99503 - DNA, 25 bp, Canis familiaris
gctaaccacacagactttcatcgac

SEQ ID NO: 99504 - DNA, 25 bp, Canis familiaris
gctacataaacagttttgtacaatg

SEQ ID NO: 99505 - DNA, 25 bp, Canis familiaris
gctcacctgaacatttctataatta

SEQ ID NO: 99506 - DNA, 25 bp, Canis familiaris
gctacccaacttacactatattcta

SEQ ID NO: 99507 - DNA, 25 bp, Canis familiaris
gctatggaccattaaggcctattta

SEQ ID NO: 99508 - DNA, 25 bp, Canis familiaris
gctatgtaccagtagattcttactt

SEQ ID NO: 99509 - DNA, 25 bp, Canis familiaris
gctaagacgaatttgctcattaaac

SEQ ID NO: 99510 - DNA, 25 bp, Canis familiaris
gctagtactgtattggctctgtgaa

SEQ ID NO: 99511 - DNA, 25 bp, Canis familiaris
gctactgaattgtgtgatcttttgg

SEQ ID NO: 99512 - DNA, 25 bp, Canis familiaris
gctactagattaactgtattctcag

SEQ ID NO: 99513 - DNA, 25 bp, Canis familiaris
gctagtgtgtttttgctcacttcat

SEQ ID NO: 99514 - DNA, 25 bp, Canis familiaris
gctaattgttgattgtgcacacatg

SEQ ID NO: 99515 - DNA, 25 bp, Canis familiaris
gctaatcctccattgtacacatggg

SEQ ID NO: 99516 - DNA, 25 bp, Canis familiaris
gctagaacctgcttctcacaaaggc

SEQ ID NO: 99517 - DNA, 25 bp, Canis familiaris
gctcaaacaatcctcataatgaagt

SEQ ID NO: 99518 - DNA, 25 bp, Canis familiaris
gctcaagacgctgggcatcatcatg

SEQ ID NO: 99519 - DNA, 25 bp, Canis familiaris
gctcaaattctgcgattgctgcata

SEQ ID NO: 99520 - DNA, 25 bp, Canis familiaris
gctaacttctagacagtgatctcac

SEQ ID NO: 99521 - DNA, 25 bp, Canis familiaris
gctatccgtgagcatcagatggccc

SEQ ID NO: 99522 - DNA, 25 bp, Canis familiaris
gctatccggagcacggtgcacgagg

SEQ ID NO: 99523 - DNA, 25 bp, Canis familiaris
gctagttgggcagagggcaaggggc

SEQ ID NO: 99524 - DNA, 25 bp, Canis familiaris
gctaggctgggctggcgaaatggtt

SEQ ID NO: 99525 - DNA, 25 bp, Canis familiaris
gctaggctgtggtctaggtcctgag

SEQ ID NO: 99526 - DNA, 25 bp, Canis familiaris
gctatgtctggttccatcagtcatc

SEQ ID NO: 99527 - DNA, 25 bp, Canis familiaris
gctatggggatttcttcatccggca

SEQ ID NO: 99528 - DNA, 25 bp, Canis familiaris
gctagagctagtatttcttcagtgg

SEQ ID NO: 99529 - DNA, 25 bp, Canis familiaris
gctactgctggcaacatttcttctt

SEQ ID NO: 99530 - DNA, 25 bp, Canis familiaris
gctactttccagacttttcttacta

SEQ ID NO: 99531 - DNA, 25 bp, Canis familiaris
gcttcgctacacacttaactgtagt

SEQ ID NO: 99532 - DNA, 25 bp, Canis familiaris
gctacgccaagcgctttacagacgt

SEQ ID NO: 99533 - DNA, 25 bp, Canis familiaris
gctagcagtcaagcactactcaaaa

SEQ ID NO: 99534 - DNA, 25 bp, Canis familiaris
gctagggcacacaattatactataa

SEQ ID NO: 99535 - DNA, 25 bp, Canis familiaris
gaagggcaaaatgaagttggattac

SEQ ID NO: 99536 - DNA, 25 bp, Canis familiaris
gaatgggcaaaatccttggttaact

SEQ ID NO: 99537 - DNA, 25 bp, Canis familiaris
gatttgataaactccgggtttacag

SEQ ID NO: 99538 - DNA, 25 bp, Canis familiaris
gctttagaaagctgtaagttgttaa

SEQ ID NO: 99539 - DNA, 25 bp, Canis familiaris
gctttggggacatgaacgttttaat

SEQ ID NO: 99540 - DNA, 25 bp, Canis familiaris
gttgggaaaaatcaacctttgaatg

SEQ ID NO: 99541 - DNA, 25 bp, Canis familiaris
gctttggaaaaatcataggcttagt

SEQ ID NO: 99542 - DNA, 25 bp, Canis familiaris
gcttatggggtatggctgggcatta

SEQ ID NO: 99543 - DNA, 25 bp, Canis familiaris
gcttagggcctatgactgtttccag

SEQ ID NO: 99544 - DNA, 25 bp, Canis familiaris
gcttagggacaatttcttttggcat

SEQ ID NO: 99545 - DNA, 25 bp, Canis familiaris
gctttgggatacttgccttgacggt

SEQ ID NO: 99546 - DNA, 25 bp, Canis familiaris
gctattggaattctggatctatcgg

SEQ ID NO: 99547 - DNA, 25 bp, Canis familiaris
gctttgagactttataactttggat

SEQ ID NO: 99548 - DNA, 25 bp, Canis familiaris
gctatttgaccttaaacctaggcca

SEQ ID NO: 99549 - DNA, 25 bp, Canis familiaris
gctatttccgggagaactagatcct

SEQ ID NO: 99550 - DNA, 25 bp, Canis familiaris
gcttgcttcggggtgaaccaaacca

SEQ ID NO: 99551 - DNA, 25 bp, Canis familiaris
gcttatattgggcagacctcaaaac

SEQ ID NO: 99552 - DNA, 25 bp, Canis familiaris
gcttactttgagtgatcctccaact

SEQ ID NO: 99553 - DNA, 25 bp, Canis familiaris
gctatttggaggtgaccccagactc

SEQ ID NO: 99554 - DNA, 25 bp, Canis familiaris
gctatgtggagctcaagaccgcgaa

SEQ ID NO: 99555 - DNA, 25 bp, Canis familiaris
gctagatcggctgatgggccagctg

SEQ ID NO: 99556 - DNA, 25 bp, Canis familiaris
gcttgtctccatatggtccaggtta

SEQ ID NO: 99557 - DNA, 25 bp, Canis familiaris
gctagtctacatcagagctccagta

SEQ ID NO: 99558 - DNA, 25 bp, Canis familiaris
gctatgccctctcagtggcaagaaa

SEQ ID NO: 99559 - DNA, 25 bp, Canis familiaris
gctcaacctgctgcagctggaggag

SEQ ID NO: 99560 - DNA, 25 bp, Canis familiaris
gctacatttgcttcctggtgagagg

SEQ ID NO: 99561 - DNA, 25 bp, Canis familiaris
gctagctgtcgatcctggtagcagt

SEQ ID NO: 99562 - DNA, 25 bp, Canis familiaris
gctaaggatgactctggtcagagat

SEQ ID NO: 99563 - DNA, 25 bp, Canis familiaris
gcatcaaaagccttcatagtaggaa

SEQ ID NO: 99564 - DNA, 25 bp, Canis familiaris
gcatcagaagatgccctttgacgtg

SEQ ID NO: 99565 - DNA, 25 bp, Canis familiaris
gcagaatgacccgctttacgtgaac

SEQ ID NO: 99566 - DNA, 25 bp, Canis familiaris
gctacgatcccgtcattaacaggga

SEQ ID NO: 99567 - DNA, 25 bp, Canis familiaris
gctaatttctctccattccaaggag

SEQ ID NO: 99568 - DNA, 25 bp, Canis familiaris
gctacattttctacccaagaacatt

SEQ ID NO: 99569 - DNA, 25 bp, Canis familiaris
gctacctttcatgtccaaaatgttg

SEQ ID NO: 99570 - DNA, 25 bp, Canis familiaris
gctacgatttcagatccaaaccgtg

SEQ ID NO: 99571 - DNA, 25 bp, Canis familiaris
gctacctttcagcattaaccacagg

SEQ ID NO: 99572 - DNA, 25 bp, Canis familiaris
gctaccgtcctgtatgtaatgccac

SEQ ID NO: 99573 - DNA, 25 bp, Canis familiaris
gctactggcatcttgctggtaagcc

SEQ ID NO: 99574 - DNA, 25 bp, Canis familiaris
gctactgtgacagctcttaatgcca

SEQ ID NO: 99575 - DNA, 25 bp, Canis familiaris
gctagcgatgccattcctaataaat

SEQ ID NO: 99576 - DNA, 25 bp, Canis familiaris
gctacagttttcccatacaaacatg

SEQ ID NO: 99577 - DNA, 25 bp, Canis familiaris
gctacaggtttctctaacacatcac

SEQ ID NO: 99578 - DNA, 25 bp, Canis familiaris
gctagcatgttttcaagttcaccca

SEQ ID NO: 99579 - DNA, 25 bp, Canis familiaris
gctagcaggttataattgccatcat

SEQ ID NO: 99580 - DNA, 25 bp, Canis familiaris
gctagaagtgctgccaagacctcat

SEQ ID NO: 99581 - DNA, 25 bp, Canis familiaris
gctaacgcgtgcacatgagcaccca

SEQ ID NO: 99582 - DNA, 25 bp, Canis familiaris
gctacaatgggcaggagccccacag

SEQ ID NO: 99583 - DNA, 25 bp, Canis familiaris
gctatgactgggtgagggccctagg

SEQ ID NO: 99584 - DNA, 25 bp, Canis familiaris
gcttatcaatggtggcagtcaacaa

SEQ ID NO: 99585 - DNA, 25 bp, Canis familiaris
gctttaagccaatcaggcagccaac

SEQ ID NO: 99586 - DNA, 25 bp, Canis familiaris
gcttttaccctgtaggagaccgcgt

SEQ ID NO: 99587 - DNA, 25 bp, Canis familiaris
gcttttacctattgaatgaaaccct

SEQ ID NO: 99588 - DNA, 25 bp, Canis familiaris
gcttttactctgggagtgaaggtcc

SEQ ID NO: 99589 - DNA, 25 bp, Canis familiaris
gctttcttctttgctttaggggctt

SEQ ID NO: 99590 - DNA, 25 bp, Canis familiaris
gcttcacttagtagcctactagtag

SEQ ID NO: 99591 - DNA, 25 bp, Canis familiaris
gcttccattcagcaccataaagttc

SEQ ID NO: 99592 - DNA, 25 bp, Canis familiaris
gcttctcatgtacgaatcagaacag

SEQ ID NO: 99593 - DNA, 25 bp, Canis familiaris
gcttctctccatcacaaaacgggta

SEQ ID NO: 99594 - DNA, 25 bp, Canis familiaris
gcttcctaaggtttcttctgggtag

SEQ ID NO: 99595 - DNA, 25 bp, Canis familiaris
gctttcatagctgtttcctagggaa

SEQ ID NO: 99596 - DNA, 25 bp, Canis familiaris
tctacgaccgttatggccgggaaag

SEQ ID NO: 99597 - DNA, 25 bp, Canis familiaris
gctaggacactgatggtggccggtg

SEQ ID NO: 99598 - DNA, 25 bp, Canis familiaris
gctacaagcatgaacgggaccaggg

SEQ ID NO: 99599 - DNA, 25 bp, Canis familiaris
gctatcataataactcagggaaagg

SEQ ID NO: 99600 - DNA, 25 bp, Canis familiaris
gctacaaatctcctcaggacatcat

SEQ ID NO: 99601 - DNA, 25 bp, Canis familiaris
gctaaatggctcatcagcggcacac

SEQ ID NO: 99602 - DNA, 25 bp, Canis familiaris
gctagaaacctatgctgcctgactt

SEQ ID NO: 99603 - DNA, 25 bp, Canis familiaris
gctagaaagcataagactgcctgca

SEQ ID NO: 99604 - DNA, 25 bp, Canis familiaris
gctaagaacatgatggctgcctgtg

SEQ ID NO: 99605 - DNA, 25 bp, Canis familiaris
gctaagcagaaggtgcctcctgtgc

SEQ ID NO: 99606 - DNA, 25 bp, Canis familiaris
gctaagtatcggtttctgctgatgc

SEQ ID NO: 99607 - DNA, 25 bp, Canis familiaris
gctaaaatcaggcttcgctcctggc

SEQ ID NO: 99608 - DNA, 25 bp, Canis familiaris
gctaaaatggccctgatacctgcta

SEQ ID NO: 99609 - DNA, 25 bp, Canis familiaris
gctaaaatgaacctggcccactgat

SEQ ID NO: 99610 - DNA, 25 bp, Canis familiaris
gctaataaataactgctttgcccat

SEQ ID NO: 99611 - DNA, 25 bp, Canis familiaris
gctaacaaaatgagctctgtgccat

SEQ ID NO: 99612 - DNA, 25 bp, Canis familiaris
gctacacagtagcttcacttgcctg

SEQ ID NO: 99613 - DNA, 25 bp, Canis familiaris
gctaacctagaattttctgcattgt

SEQ ID NO: 99614 - DNA, 25 bp, Canis familiaris
gctaccttcagttatgttttttcaa

SEQ ID NO: 99615 - DNA, 25 bp, Canis familiaris
gctagcctacaataaatgggttaat

SEQ ID NO: 99616 - DNA, 25 bp, Canis familiaris
gcttatcataccccaaatggtttag

SEQ ID NO: 99617 - DNA, 25 bp, Canis familiaris
gctttccccctgaaatcgaggtaga

SEQ ID NO: 99618 - DNA, 25 bp, Canis familiaris
gctttccgaaccaaagagggtaatg

SEQ ID NO: 99619 - DNA, 25 bp, Canis familiaris
gctactccggacgcaaagcggtcat

SEQ ID NO: 99620 - DNA, 25 bp, Canis familiaris
gcttctccgtgagacagtacgtggc

SEQ ID NO: 99621 - DNA, 25 bp, Canis familiaris
gcaggctacaaagccactaggtggc

SEQ ID NO: 99622 - DNA, 25 bp, Canis familiaris
gctattgaaaaggcgcagttgtgta

SEQ ID NO: 99623 - DNA, 25 bp, Canis familiaris
gctacagaaaaagcatggctggtac

SEQ ID NO: 99624 - DNA, 25 bp, Canis familiaris
gctacagaacagctccaggttctac

SEQ ID NO: 99625 - DNA, 25 bp, Canis familiaris
gctacagaaagggcacgctcttatc

SEQ ID NO: 99626 - DNA, 25 bp, Canis familiaris
gctaaatcagatgccacgagttcct

SEQ ID NO: 99627 - DNA, 25 bp, Canis familiaris
gctactatccatgtcaggatttctt

SEQ ID NO: 99628 - DNA, 25 bp, Canis familiaris
gctactatccatggccttataatta

SEQ ID NO: 99629 - DNA, 25 bp, Canis familiaris
gctactatccatggccttataatta

SEQ ID NO: 99630 - DNA, 25 bp, Canis familiaris
gcttctttcatccctaagacttacc

SEQ ID NO: 99631 - DNA, 25 bp, Canis familiaris
gctactattgctcataactacttac

SEQ ID NO: 99632 - DNA, 25 bp, Canis familiaris
gctactcttgtcagacaatggctaa

SEQ ID NO: 99633 - DNA, 25 bp, Canis familiaris
gctacctggtgcaagtggtggccac

SEQ ID NO: 99634 - DNA, 25 bp, Canis familiaris
gctactggactctttggtggtactc

SEQ ID NO: 99635 - DNA, 25 bp, Canis familiaris
gctactcccagttctgagtggtact

SEQ ID NO: 99636 - DNA, 25 bp, Canis familiaris
gctacagcctcaatattactaataa

SEQ ID NO: 99637 - DNA, 25 bp, Canis familiaris
gctaagcccatatttggatcttgag

SEQ ID NO: 99638 - DNA, 25 bp, Canis familiaris
gctaagactaattgtggcacttggg

SEQ ID NO: 99639 - DNA, 25 bp, Canis familiaris
gcttagcctagtgggaagtctggga

SEQ ID NO: 99640 - DNA, 25 bp, Canis familiaris
gctattcgtggtgggttttggcttc

SEQ ID NO: 99641 - DNA, 25 bp, Canis familiaris
gctacggttttgtatatgtttttgc

SEQ ID NO: 99642 - DNA, 25 bp, Canis familiaris
gctacgggtttgtatatgttttgca

SEQ ID NO: 99643 - DNA, 25 bp, Canis familiaris
gctaaggtatctctgaagctcttta

SEQ ID NO: 99644 - DNA, 25 bp, Canis familiaris
gcataagggaccatagtgtctgtgt

SEQ ID NO: 99645 - DNA, 25 bp, Canis familiaris
gctactaggactatatggcctcagt

SEQ ID NO: 99646 - DNA, 25 bp, Canis familiaris
gctaccaacctatttggccgaggca

SEQ ID NO: 99647 - DNA, 25 bp, Canis familiaris
gctaccacatccaaggaaggcagca

SEQ ID NO: 99648 - DNA, 25 bp, Canis familiaris
gctaccactctatgagctcgatggc

SEQ ID NO: 99649 - DNA, 25 bp, Canis familiaris
gctaccagctaatagtgggtgcctc

SEQ ID NO: 99650 - DNA, 25 bp, Canis familiaris
gcttcttctacatcctgaggagcgg

SEQ ID NO: 99651 - DNA, 25 bp, Canis familiaris
gctagtctgtaagctccgtgagggc

SEQ ID NO: 99652 - DNA, 25 bp, Canis familiaris
gctagttgtagataacggctccggt

SEQ ID NO: 99653 - DNA, 25 bp, Canis familiaris
gctaggctggggccaaaggcctcgc

SEQ ID NO: 99654 - DNA, 25 bp, Canis familiaris
gcatagggggtacccaagacctgga

SEQ ID NO: 99655 - DNA, 25 bp, Canis familiaris
gctaggccggtagacagcgaggctg

SEQ ID NO: 99656 - DNA, 25 bp, Canis familiaris
gctatgacctgggaccaatggatgg

SEQ ID NO: 99657 - DNA, 25 bp, Canis familiaris
gctataccagggacaccacgataga

SEQ ID NO: 99658 - DNA, 25 bp, Canis familiaris
gctaatccagagtaatatcctataa

SEQ ID NO: 99659 - DNA, 25 bp, Canis familiaris
gctaggcactcagcaatagtcttga

SEQ ID NO: 99660 - DNA, 25 bp, Canis familiaris
gctattgcactagtcattttcttct

SEQ ID NO: 99661 - DNA, 25 bp, Canis familiaris
gctagtgtatagccatctattgatt

SEQ ID NO: 99662 - DNA, 25 bp, Canis familiaris
gctagtctttcttcatgattatgtc

SEQ ID NO: 99663 - DNA, 25 bp, Canis familiaris
gctagttcttccttgtagagttata

SEQ ID NO: 99664 - DNA, 25 bp, Canis familiaris
gctacctcttcctagttgaaatttc

SEQ ID NO: 99665 - DNA, 25 bp, Canis familiaris
gctacccatcctgcaaggcaatatt

SEQ ID NO: 99666 - DNA, 25 bp, Canis familiaris
gctagcctcagcgtctaagtggaga

SEQ ID NO: 99667 - DNA, 25 bp, Canis familiaris
gctatcctatgccttcaaatagtac

SEQ ID NO: 99668 - DNA, 25 bp, Canis familiaris
gctatccttgcgtgcagactttgaa

SEQ ID NO: 99669 - DNA, 25 bp, Canis familiaris
gctaaagtgcaggagccccgtgaag

SEQ ID NO: 99670 - DNA, 25 bp, Canis familiaris
gctacaatggaggaactacctggag

SEQ ID NO: 99671 - DNA, 25 bp, Canis familiaris
gctacataaattaaccccggagaag

SEQ ID NO: 99672 - DNA, 25 bp, Canis familiaris
gcttcatgtaataaactcaccgggt

SEQ ID NO: 99673 - DNA, 25 bp, Canis familiaris
gcttatctaaaggcactggctccac

SEQ ID NO: 99674 - DNA, 25 bp, Canis familiaris
gctatttataaaactggctgcccag

SEQ ID NO: 99675 - DNA, 25 bp, Canis familiaris
gctttcaaaaatatgtgcttccaaa

SEQ ID NO: 99676 - DNA, 25 bp, Canis familiaris
gcttttcaaactgtactttcaattc

SEQ ID NO: 99677 - DNA, 25 bp, Canis familiaris
gttgtccaaaatgcctgtttagttt

SEQ ID NO: 99678 - DNA, 25 bp, Canis familiaris
gcttggtctccaaaccttttatgag

SEQ ID NO: 99679 - DNA, 25 bp, Canis familiaris
gctagttcatcctgagcctatttaa

SEQ ID NO: 99680 - DNA, 25 bp, Canis familiaris
gctactattccatgggccttataag

SEQ ID NO: 99681 - DNA, 25 bp, Canis familiaris
gcttttcccattgcccaatatatca

SEQ ID NO: 99682 - DNA, 25 bp, Canis familiaris
gcattattcctcttaacccattaga

SEQ ID NO: 99683 - DNA, 25 bp, Canis familiaris
gcattattcctcttaacccattaga

SEQ ID NO: 99684 - DNA, 25 bp, Canis familiaris
gcttagttcttagtatctgccttag

SEQ ID NO: 99685 - DNA, 25 bp, Canis familiaris
gctttgctgtttcatccggattagc

SEQ ID NO: 99686 - DNA, 25 bp, Canis familiaris
gcttctcgttctgattcggaaaacc

SEQ ID NO: 99687 - DNA, 25 bp, Canis familiaris
gcttttgtgcttgtttagcaaaacc

SEQ ID NO: 99688 - DNA, 25 bp, Canis familiaris
gctttatttttcttgggagataact

SEQ ID NO: 99689 - DNA, 25 bp, Canis familiaris
gcttaaaacttcttaggacatttgt

SEQ ID NO: 99690 - DNA, 25 bp, Canis familiaris
gctttaaattgtgtggtgctctgta

SEQ ID NO: 99691 - DNA, 25 bp, Canis familiaris
gctattaaatgtcttggtctgtgtt

SEQ ID NO: 99692 - DNA, 25 bp, Canis familiaris
gctttccagaataaaggttgtgtat

SEQ ID NO: 99693 - DNA, 25 bp, Canis familiaris
gctatcctccaagaaggttgccttc

SEQ ID NO: 99694 - DNA, 25 bp, Canis familiaris
gctacagccccagcgaggattggct

SEQ ID NO: 99695 - DNA, 25 bp, Canis familiaris
gctaggcccctagagagagctctgc

SEQ ID NO: 99696 - DNA, 25 bp, Canis familiaris
gctaggcccctagagagagctctgc

SEQ ID NO: 99697 - DNA, 25 bp, Canis familiaris
gctaggcccctagagagagctctgc

SEQ ID NO: 99698 - DNA, 25 bp, Canis familiaris
gctaggcccctagagagagctctgc

SEQ ID NO: 99699 - DNA, 25 bp, Canis familiaris
gctacagccctgcatgaaggacttg

SEQ ID NO: 99700 - DNA, 25 bp, Canis familiaris
gctatctgcactctaaactgcacaa

SEQ ID NO: 99701 - DNA, 25 bp, Canis familiaris
gctactgaagatgagacctgccacg

SEQ ID NO: 99702 - DNA, 25 bp, Canis familiaris
gctacgaagaggctttgctcaccac

SEQ ID NO: 99703 - DNA, 25 bp, Canis familiaris
gctagtttgaagctttctctctctc

SEQ ID NO: 99704 - DNA, 25 bp, Canis familiaris
gctactgtgtagaaatttcccccta

SEQ ID NO: 99705 - DNA, 25 bp, Canis familiaris
gcttatggtattaaattccccctca

SEQ ID NO: 99706 - DNA, 25 bp, Canis familiaris
gctttactattaaattatccgccac

SEQ ID NO: 99707 - DNA, 25 bp, Canis familiaris
gcttctgacttttggttttggctca

SEQ ID NO: 99708 - DNA, 25 bp, Canis familiaris
gcatcctgtttttacacttgggttt

SEQ ID NO: 99709 - DNA, 25 bp, Canis familiaris
gacttctcttaataggtgggtttct

SEQ ID NO: 99710 - DNA, 25 bp, Canis familiaris
gcacagttttaacacaggggctttc

SEQ ID NO: 99711 - DNA, 25 bp, Canis familiaris
gcttcctgtttacaatggggggtct

SEQ ID NO: 99712 - DNA, 25 bp, Canis familiaris
gcttttggggaggaatggggatggg

SEQ ID NO: 99713 - DNA, 25 bp, Canis familiaris
gcttttaggggcactatggacagag

SEQ ID NO: 99714 - DNA, 25 bp, Canis familiaris
gctttctgggggctttttcagcaac

SEQ ID NO: 99715 - DNA, 25 bp, Canis familiaris
gctttatctgggggttgttgcccaa

SEQ ID NO: 99716 - DNA, 25 bp, Canis familiaris
gcttgttggggtgtaatcatcctaa

SEQ ID NO: 99717 - DNA, 25 bp, Canis familiaris
gctatttgggtgtagggtatcctgg

SEQ ID NO: 99718 - DNA, 25 bp, Canis familiaris
gctatctgctggttggaggtgtctc

SEQ ID NO: 99719 - DNA, 25 bp, Canis familiaris
gctatcctcaattcgggggctaggg

SEQ ID NO: 99720 - DNA, 25 bp, Canis familiaris
gctttctctttccgggaagtgggag

SEQ ID NO: 99721 - DNA, 25 bp, Canis familiaris
gctttgatccttgcaagaaactggg

SEQ ID NO: 99722 - DNA, 25 bp, Canis familiaris
gcttcagtcctataccgatatctgg

SEQ ID NO: 99723 - DNA, 25 bp, Canis familiaris
gcttcaagcccacatctggtttgtg

SEQ ID NO: 99724 - DNA, 25 bp, Canis familiaris
gcattgccctcaacgaccactttgt

SEQ ID NO: 99725 - DNA, 25 bp, Canis familiaris
gctatggctaaaagtcccattttcc

SEQ ID NO: 99726 - DNA, 25 bp, Canis familiaris
tgtatgcccgaaaccccagtttcga

SEQ ID NO: 99727 - DNA, 25 bp, Canis familiaris
gactccgcgaaacaccgaacaggac

SEQ ID NO: 99728 - DNA, 25 bp, Canis familiaris
gtcccgacaaagaatcccgacggca

SEQ ID NO: 99729 - DNA, 25 bp, Canis familiaris
gcatcaaagacagaaacaccaacgg

SEQ ID NO: 99730 - DNA, 25 bp, Canis familiaris
gctaaaaacacatatatccacacaa

SEQ ID NO: 99731 - DNA, 25 bp, Canis familiaris
gctttaagattcagtaccacacatg

SEQ ID NO: 99732 - DNA, 25 bp, Canis familiaris
gctttaacagccttaaccgagcagc

SEQ ID NO: 99733 - DNA, 25 bp, Canis familiaris
gcttgtaacctgcatgcaactggga

SEQ ID NO: 99734 - DNA, 25 bp, Canis familiaris
gctttcgacccgatatgctggcaag

SEQ ID NO: 99735 - DNA, 25 bp, Canis familiaris
gctttcctcccggtgtataacaagc

SEQ ID NO: 99736 - DNA, 25 bp, Canis familiaris
gcttacctccaaggttggctaactc

SEQ ID NO: 99737 - DNA, 25 bp, Canis familiaris
gctttccccaatgtgtgtgttttac

SEQ ID NO: 99738 - DNA, 25 bp, Canis familiaris
gctttctagggtgctctgaggttta

SEQ ID NO: 99739 - DNA, 25 bp, Canis familiaris
gcttgttttggctgcgtcaggtatt

SEQ ID NO: 99740 - DNA, 25 bp, Canis familiaris
gcttattactatccggacagagtca

SEQ ID NO: 99741 - DNA, 25 bp, Canis familiaris
gctatgatgtatttggggcccagtc

SEQ ID NO: 99742 - DNA, 25 bp, Canis familiaris
gcttgggcatcaatggctgccctca

SEQ ID NO: 99743 - DNA, 25 bp, Canis familiaris
gctatgttgctctagacttcgagca

SEQ ID NO: 99744 - DNA, 25 bp, Canis familiaris
gcttttgccaagacctcacagaaac

SEQ ID NO: 99745 - DNA, 25 bp, Canis familiaris
gcttttccggtctatctgagtaaat

SEQ ID NO: 99746 - DNA, 25 bp, Canis familiaris
gctatttcgggtactctgatttcag

SEQ ID NO: 99747 - DNA, 25 bp, Canis familiaris
gcttttcgttgtataaatatcccgt

SEQ ID NO: 99748 - DNA, 25 bp, Canis familiaris
gctatggtcgtgatcgtgactattc

SEQ ID NO: 99749 - DNA, 25 bp, Canis familiaris
gctatactatggactctgtactact

SEQ ID NO: 99750 - DNA, 25 bp, Canis familiaris
gcttagggtgcctgtactatgccca

SEQ ID NO: 99751 - DNA, 25 bp, Canis familiaris
gctaaagttgcctattgctgtatgc

SEQ ID NO: 99752 - DNA, 25 bp, Canis familiaris
gctaggtgtctggctgctactaagc

SEQ ID NO: 99753 - DNA, 25 bp, Canis familiaris
gctatggtcactgctgattctaagt

SEQ ID NO: 99754 - DNA, 25 bp, Canis familiaris
gctatggccatcagtgaaatgacag

SEQ ID NO: 99755 - DNA, 25 bp, Canis familiaris
gctataccagaggtcaggagacatg

SEQ ID NO: 99756 - DNA, 25 bp, Canis familiaris
gctatgccccatgcatattaagcat

SEQ ID NO: 99757 - DNA, 25 bp, Canis familiaris
gctatgttacatacatgctgaacct

SEQ ID NO: 99758 - DNA, 25 bp, Canis familiaris
gctttaaatccagtgccaggctcag

SEQ ID NO: 99759 - DNA, 25 bp, Canis familiaris
gctttaaagtgcgggctgggccggg

SEQ ID NO: 99760 - DNA, 25 bp, Canis familiaris
gctttcagagaccgaggggagacag

SEQ ID NO: 99761 - DNA, 25 bp, Canis familiaris
gcttttggacgtgggctggaaacta

SEQ ID NO: 99762 - DNA, 25 bp, Canis familiaris
gcttctaacaccgagtccgaaactt

SEQ ID NO: 99763 - DNA, 25 bp, Canis familiaris
gcttgctaaacctggcgtgaaaccg

SEQ ID NO: 99764 - DNA, 25 bp, Canis familiaris
gctagtaaacccccactgaaacaag

SEQ ID NO: 99765 - DNA, 25 bp, Canis familiaris
gctttgaaacccacactttacagga

SEQ ID NO: 99766 - DNA, 25 bp, Canis familiaris
gctttggaacctgcctttttggagg

SEQ ID NO: 99767 - DNA, 25 bp, Canis familiaris
gcttttttatctgcccttgttaata

SEQ ID NO: 99768 - DNA, 25 bp, Canis familiaris
gcttgtattttcagtattttctaca

SEQ ID NO: 99769 - DNA, 25 bp, Canis familiaris
gctattcattttgttattcttttac

SEQ ID NO: 99770 - DNA, 25 bp, Canis familiaris
gctattttctgtgcattttccattg

SEQ ID NO: 99771 - DNA, 25 bp, Canis familiaris
gctactctttgtcagattgctacgt

SEQ ID NO: 99772 - DNA, 25 bp, Canis familiaris
gctactcagtatgggaatctctaga

SEQ ID NO: 99773 - DNA, 25 bp, Canis familiaris
gctaccagtatcctggatatcgcgg

SEQ ID NO: 99774 - DNA, 25 bp, Canis familiaris
gctaccagctgaactgcgctgtggc

SEQ ID NO: 99775 - DNA, 25 bp, Canis familiaris
gctatccagttgtctgatcttcgac

SEQ ID NO: 99776 - DNA, 25 bp, Canis familiaris
gctactcagatctgttctgtctctc

SEQ ID NO: 99777 - DNA, 25 bp, Canis familiaris
gctaccagaattggttccttcttgt

SEQ ID NO: 99778 - DNA, 25 bp, Canis familiaris
gctaccagaattgtctaataagcct

SEQ ID NO: 99779 - DNA, 25 bp, Canis familiaris
gctactactttgattacaaggagca

SEQ ID NO: 99780 - DNA, 25 bp, Canis familiaris
gctactgactgtgacttacacagga

SEQ ID NO: 99781 - DNA, 25 bp, Canis familiaris
gctagctgaacagatgtttcaggga

SEQ ID NO: 99782 - DNA, 25 bp, Canis familiaris
gctagctataattactcgtcgcgag

SEQ ID NO: 99783 - DNA, 25 bp, Canis familiaris
gcttgttggggatttaagtgagaaa

SEQ ID NO: 99784 - DNA, 25 bp, Canis familiaris
gctttggggagcttgttggtggtga

SEQ ID NO: 99785 - DNA, 25 bp, Canis familiaris
gctatgtgggtagtttctggtactt

SEQ ID NO: 99786 - DNA, 25 bp, Canis familiaris
gcttcgtgctaatttctagggactt

SEQ ID NO: 99787 - DNA, 25 bp, Canis familiaris
gcttccagttttggctacggcaatc

SEQ ID NO: 99788 - DNA, 25 bp, Canis familiaris
gcttgcgggttttgtgaaggcaatg

SEQ ID NO: 99789 - DNA, 25 bp, Canis familiaris
gctatccaggtcctcgaggagtcaa

SEQ ID NO: 99790 - DNA, 25 bp, Canis familiaris
gctagcagtgggcctcgagtgagcc

SEQ ID NO: 99791 - DNA, 25 bp, Canis familiaris
gctactgtgggttggaatggaccag

SEQ ID NO: 99792 - DNA, 25 bp, Canis familiaris
gcttccatgcggaggacagggccag

SEQ ID NO: 99793 - DNA, 25 bp, Canis familiaris
gctacacacgggtgacactggacgc

SEQ ID NO: 99794 - DNA, 25 bp, Canis familiaris
gctaccacgtggacccaaggagtgc

SEQ ID NO: 99795 - DNA, 25 bp, Canis familiaris
gctactccttagacccagatggtgt

SEQ ID NO: 99796 - DNA, 25 bp, Canis familiaris
gctagcccaaggaggatgctgtgtt

SEQ ID NO: 99797 - DNA, 25 bp, Canis familiaris
gctaccctaggtcagtgtggagtgg

SEQ ID NO: 99798 - DNA, 25 bp, Canis familiaris
gctactccttctaccagtgtaagag

SEQ ID NO: 99799 - DNA, 25 bp, Canis familiaris
gctacatcgcttgggcagcgtgatt

SEQ ID NO: 99800 - DNA, 25 bp, Canis familiaris
gctacatcagcacggagctgggcat

SEQ ID NO: 99801 - DNA, 25 bp, Canis familiaris
gctagctcatgatgcttcgtgcaga

SEQ ID NO: 99802 - DNA, 25 bp, Canis familiaris
gctagcactgcatgtgctgctgcat

SEQ ID NO: 99803 - DNA, 25 bp, Canis familiaris
gctacagcctagatgcctggagggt

SEQ ID NO: 99804 - DNA, 25 bp, Canis familiaris
gctacagccaagatcccaggaatgc

SEQ ID NO: 99805 - DNA, 25 bp, Canis familiaris
gctatcatgtcagtgaactccagga

SEQ ID NO: 99806 - DNA, 25 bp, Canis familiaris
gcttaatcaccatgcctcgagaaac

SEQ ID NO: 99807 - DNA, 25 bp, Canis familiaris
gcttcccaccaaactcggaatacaa

SEQ ID NO: 99808 - DNA, 25 bp, Canis familiaris
gcttactacccaagtgggagctact

SEQ ID NO: 99809 - DNA, 25 bp, Canis familiaris
gcatcttctcccattgatagggccc

SEQ ID NO: 99810 - DNA, 25 bp, Canis familiaris
gctttctgccaagtggtaattcacc

SEQ ID NO: 99811 - DNA, 25 bp, Canis familiaris
gctttgctgttcatcggattacacc

SEQ ID NO: 99812 - DNA, 25 bp, Canis familiaris
gcttggtgtttgttcagttccccaa

SEQ ID NO: 99813 - DNA, 25 bp, Canis familiaris
gctatgagatgcactgcccagtttc

SEQ ID NO: 99814 - DNA, 25 bp, Canis familiaris
gctagtggggtgactcagatttgcc

SEQ ID NO: 99815 - DNA, 25 bp, Canis familiaris
gctattctggagaatgccaacgtgc

SEQ ID NO: 99816 - DNA, 25 bp, Canis familiaris
gctatctcaggaccagcttgaggct

SEQ ID NO: 99817 - DNA, 25 bp, Canis familiaris
gctatgaagagacatcttctggtct

SEQ ID NO: 99818 - DNA, 25 bp, Canis familiaris
gctacatcacagatatcttccagac

SEQ ID NO: 99819 - DNA, 25 bp, Canis familiaris
gctatctcaagtatgctgtgctcag

SEQ ID NO: 99820 - DNA, 25 bp, Canis familiaris
gctatcccagtctctggtagttctg

SEQ ID NO: 99821 - DNA, 25 bp, Canis familiaris
gttgcgacaggcactagtaagtccc

SEQ ID NO: 99822 - DNA, 25 bp, Canis familiaris
gttggcactgccagggtagttactg

SEQ ID NO: 99823 - DNA, 25 bp, Canis familiaris
gcattggattggctgtggggcccac

SEQ ID NO: 99824 - DNA, 25 bp, Canis familiaris
gctttgctcgagctgtgcggaacca

SEQ ID NO: 99825 - DNA, 25 bp, Canis familiaris
gcttggccaaggaagcccaacaaga

SEQ ID NO: 99826 - DNA, 25 bp, Canis familiaris
gctagttctgggaccctggacaaga

SEQ ID NO: 99827 - DNA, 25 bp, Canis familiaris
gctacccctggagcaaggcacaggg

SEQ ID NO: 99828 - DNA, 25 bp, Canis familiaris
gctacctcctggaactagggtcagg

SEQ ID NO: 99829 - DNA, 25 bp, Canis familiaris
gctatttcctcgagctctgggatga

SEQ ID NO: 99830 - DNA, 25 bp, Canis familiaris
gctattccctgcacctgatggtgaa

SEQ ID NO: 99831 - DNA, 25 bp, Canis familiaris
gctttcctgtccagcagagggaggg

SEQ ID NO: 99832 - DNA, 25 bp, Canis familiaris
gctttcctgtccagcagagggaggg

SEQ ID NO: 99833 - DNA, 25 bp, Canis familiaris
gctttcctgtccagcagagggaggg

SEQ ID NO: 99834 - DNA, 25 bp, Canis familiaris
gctatattttcacttatcagggggt

SEQ ID NO: 99835 - DNA, 25 bp, Canis familiaris
gctataatttcactctgtccatcag

SEQ ID NO: 99836 - DNA, 25 bp, Canis familiaris
gctatagcttataactgcttccacc

SEQ ID NO: 99837 - DNA, 25 bp, Canis familiaris
gctatagaatataccacctcgcatt

SEQ ID NO: 99838 - DNA, 25 bp, Canis familiaris
gcttagtcatgaaacatccgtgcat

SEQ ID NO: 99839 - DNA, 25 bp, Canis familiaris
gcttttctgcaaaacctcagggaac

SEQ ID NO: 99840 - DNA, 25 bp, Canis familiaris
gcagaattgttagactgtttggcaa

SEQ ID NO: 99841 - DNA, 25 bp, Canis familiaris
gcttactttacccagttcagctgaa

SEQ ID NO: 99842 - DNA, 25 bp, Canis familiaris
gcttatatttagcgcaggctctcta

SEQ ID NO: 99843 - DNA, 25 bp, Canis familiaris
gctttatcttggtccaggctttcac

SEQ ID NO: 99844 - DNA, 25 bp, Canis familiaris
gcttttttgctgtggcctttcagaa

SEQ ID NO: 99845 - DNA, 25 bp, Canis familiaris
gcttttttgtacaaacttgtctata

SEQ ID NO: 99846 - DNA, 25 bp, Canis familiaris
gctacttttgaagcgattctttaag

SEQ ID NO: 99847 - DNA, 25 bp, Canis familiaris
gctagttattattgccagttccatt

SEQ ID NO: 99848 - DNA, 25 bp, Canis familiaris
gctagcttttcttccattgagcatt

SEQ ID NO: 99849 - DNA, 25 bp, Canis familiaris
gctagttattattgcagtcatggtt

SEQ ID NO: 99850 - DNA, 25 bp, Canis familiaris
gctatgcgatattttagtcttgtcc

SEQ ID NO: 99851 - DNA, 25 bp, Canis familiaris
gctaggtattttttcatgtcatttt

SEQ ID NO: 99852 - DNA, 25 bp, Canis familiaris
gctatgagctttagggtttattttg

SEQ ID NO: 99853 - DNA, 25 bp, Canis familiaris
gctagagcctccatttttatacttt

SEQ ID NO: 99854 - DNA, 25 bp, Canis familiaris
gctagacctacagtttatgtataca

SEQ ID NO: 99855 - DNA, 25 bp, Canis familiaris
gctagaccataggctattagggaca

SEQ ID NO: 99856 - DNA, 25 bp, Canis familiaris
gctagccctaggccaatgagggaca

SEQ ID NO: 99857 - DNA, 25 bp, Canis familiaris
gctactcatccagtgcacactatgg

SEQ ID NO: 99858 - DNA, 25 bp, Canis familiaris
gctagtatccactagcccagtggta

SEQ ID NO: 99859 - DNA, 25 bp, Canis familiaris
gcatagttcccataatgcctggtcc

SEQ ID NO: 99860 - DNA, 25 bp, Canis familiaris
gctagaccgagctcatagcactggt

SEQ ID NO: 99861 - DNA, 25 bp, Canis familiaris
gcttacctgatctctacactggagg

SEQ ID NO: 99862 - DNA, 25 bp, Canis familiaris
gctatacctcacgtcgaagtgggag

SEQ ID NO: 99863 - DNA, 25 bp, Canis familiaris
gcttacccaccgggaggagtgaacg

SEQ ID NO: 99864 - DNA, 25 bp, Canis familiaris
gcttaagcccaccggagtaggatca

SEQ ID NO: 99865 - DNA, 25 bp, Canis familiaris
gctatgctagacttcctggaggagg

SEQ ID NO: 99866 - DNA, 25 bp, Canis familiaris
gctagaggagctcccatgaagaagc

SEQ ID NO: 99867 - DNA, 25 bp, Canis familiaris
gctagcagagcaggctccaaggccc

SEQ ID NO: 99868 - DNA, 25 bp, Canis familiaris
gctagtggcatcctacagggccagg

SEQ ID NO: 99869 - DNA, 25 bp, Canis familiaris
gcatcagttgctgtccagcttctag

SEQ ID NO: 99870 - DNA, 25 bp, Canis familiaris
gcacgtatccgagcactttagcaaa

SEQ ID NO: 99871 - DNA, 25 bp, Canis familiaris
gcagtcagactcagaacttgggcga

SEQ ID NO: 99872 - DNA, 25 bp, Canis familiaris
gcattggacccggactctcgggtcg

SEQ ID NO: 99873 - DNA, 25 bp, Canis familiaris
gcttggagaccagagcatccgtggc

SEQ ID NO: 99874 - DNA, 25 bp, Canis familiaris
gctataaaccaaagctccttggccc

SEQ ID NO: 99875 - DNA, 25 bp, Canis familiaris
gctatgacaaaaccactccttggcc

SEQ ID NO: 99876 - DNA, 25 bp, Canis familiaris
gctatacacaaagccttttcctgca

SEQ ID NO: 99877 - DNA, 25 bp, Canis familiaris
gctatacaaatagtcctgatatctg

SEQ ID NO: 99878 - DNA, 25 bp, Canis familiaris
gcttacctgtacactgacttgagac

SEQ ID NO: 99879 - DNA, 25 bp, Canis familiaris
gttgaccaggacactttttgactta

SEQ ID NO: 99880 - DNA, 25 bp, Canis familiaris
gcttcccagggaaactttctaattg

SEQ ID NO: 99881 - DNA, 25 bp, Canis familiaris
gcttccagggaagctccttaaatgc

SEQ ID NO: 99882 - DNA, 25 bp, Canis familiaris
gcttagagtggagcctactgaaaga

SEQ ID NO: 99883 - DNA, 25 bp, Canis familiaris
gcttaaggctgggcccacaagtaca

SEQ ID NO: 99884 - DNA, 25 bp, Canis familiaris
gcttgacaactgggccaccaaagaa

SEQ ID NO: 99885 - DNA, 25 bp, Canis familiaris
gctatgagaggtgttaccaaagccc

SEQ ID NO: 99886 - DNA, 25 bp, Canis familiaris
gctatgaattgtgttcgccagaaca

SEQ ID NO: 99887 - DNA, 25 bp, Canis familiaris
gctagctcttctgcttggaaggaca

SEQ ID NO: 99888 - DNA, 25 bp, Canis familiaris
gctactctgccttttggattggtgc

SEQ ID NO: 99889 - DNA, 25 bp, Canis familiaris
gctactcgttatgtgatcattggac

SEQ ID NO: 99890 - DNA, 25 bp, Canis familiaris
gctatacgcctgagtactcgcgatc

SEQ ID NO: 99891 - DNA, 25 bp, Canis familiaris
gcttaagctagttgtgtgtctggtc

SEQ ID NO: 99892 - DNA, 25 bp, Canis familiaris
gcttcagggaggacatggctattta

SEQ ID NO: 99893 - DNA, 25 bp, Canis familiaris
gcttaagggttcactcatttgtaga

SEQ ID NO: 99894 - DNA, 25 bp, Canis familiaris
gctatgaagtgttaccctgatcgtg

SEQ ID NO: 99895 - DNA, 25 bp, Canis familiaris
gcttagcagtgtgtccttactctac

SEQ ID NO: 99896 - DNA, 25 bp, Canis familiaris
gctttggtgtttggtttctgtacgt

SEQ ID NO: 99897 - DNA, 25 bp, Canis familiaris
gctttgggctataggctaatctgat

SEQ ID NO: 99898 - DNA, 25 bp, Canis familiaris
gctttgggcaagtcagtaatctctg

SEQ ID NO: 99899 - DNA, 25 bp, Canis familiaris
gcttctgggaaagtttatgcttttc

SEQ ID NO: 99900 - DNA, 25 bp, Canis familiaris
gctatccaggattttgtttttgttt

SEQ ID NO: 99901 - DNA, 25 bp, Canis familiaris
gctacctgtagattctgtattttga

SEQ ID NO: 99902 - DNA, 25 bp, Canis familiaris
gctagcctactgtatttctgtgtat

SEQ ID NO: 99903 - DNA, 25 bp, Canis familiaris
gctatactgactgttttgctgtgct

SEQ ID NO: 99904 - DNA, 25 bp, Canis familiaris
gcttagctgaagaactggtgcgagc

SEQ ID NO: 99905 - DNA, 25 bp, Canis familiaris
gcttcagtgaaggagtggccagctg

SEQ ID NO: 99906 - DNA, 25 bp, Canis familiaris
gctataggagcaccgtgcacctgtg

SEQ ID NO: 99907 - DNA, 25 bp, Canis familiaris
gctagaggacactgctgttcctgtg

SEQ ID NO: 99908 - DNA, 25 bp, Canis familiaris
gctacgtgaagctctgaactgggcc

SEQ ID NO: 99909 - DNA, 25 bp, Canis familiaris
gcttgcggaagcccgagacgacagc

SEQ ID NO: 99910 - DNA, 25 bp, Canis familiaris
gcttcggaacgtgcacggtgcagaa

SEQ ID NO: 99911 - DNA, 25 bp, Canis familiaris
gcttccgtaactgcatgggtgcgag

SEQ ID NO: 99912 - DNA, 25 bp, Canis familiaris
gctttcgtaccatggagcttgctgc

SEQ ID NO: 99913 - DNA, 25 bp, Canis familiaris
gcatcgccgtcaaaagggcttatta

SEQ ID NO: 99914 - DNA, 25 bp, Canis familiaris
gcttgctagtaacagtggctctttg

SEQ ID NO: 99915 - DNA, 25 bp, Canis familiaris
gcttccaatgttgaggtgcctttgc

SEQ ID NO: 99916 - DNA, 25 bp, Canis familiaris
gctttgtatttatgttgcccttgcc

SEQ ID NO: 99917 - DNA, 25 bp, Canis familiaris
gcttttattttttctcgaggtgtcg

SEQ ID NO: 99918 - DNA, 25 bp, Canis familiaris
gcagttccttttataatgggtttcg

SEQ ID NO: 99919 - DNA, 25 bp, Canis familiaris
gcttccccctgtataaaggattcca

SEQ ID NO: 99920 - DNA, 25 bp, Canis familiaris
gcttcacccctggggaaacgctggc

SEQ ID NO: 99921 - DNA, 25 bp, Canis familiaris
gcttcccgttctctgagaacctggc

SEQ ID NO: 99922 - DNA, 25 bp, Canis familiaris
gcttcaccttttgtatagacccaga

SEQ ID NO: 99923 - DNA, 25 bp, Canis familiaris
gcttccctattatcttcaaggccgc

SEQ ID NO: 99924 - DNA, 25 bp, Canis familiaris
gcttccctagtatagtctaatccca

SEQ ID NO: 99925 - DNA, 25 bp, Canis familiaris
gcttctcataaaaacctctacaacc

SEQ ID NO: 99926 - DNA, 25 bp, Canis familiaris
gcttctaattagcagcttttaatca

SEQ ID NO: 99927 - DNA, 25 bp, Canis familiaris
gcttctatcatttttgcctttaacc

SEQ ID NO: 99928 - DNA, 25 bp, Canis familiaris
gatttactttttgtcgtagcgtgtg

SEQ ID NO: 99929 - DNA, 25 bp, Canis familiaris
gattaagtttttatgggtcctgaat

SEQ ID NO: 99930 - DNA, 25 bp, Canis familiaris
gcttaagtcttgatcttggagtcct

SEQ ID NO: 99931 - DNA, 25 bp, Canis familiaris
gctttagccttttcttgtggtcttt

SEQ ID NO: 99932 - DNA, 25 bp, Canis familiaris
gcttttgcctttcttgttgtattta

SEQ ID NO: 99933 - DNA, 25 bp, Canis familiaris
gctttggctatttggggtcttttgt

SEQ ID NO: 99934 - DNA, 25 bp, Canis familiaris
gctattgagctttagggttatttct

SEQ ID NO: 99935 - DNA, 25 bp, Canis familiaris
gcataaggattccggggacttctcc

SEQ ID NO: 99936 - DNA, 25 bp, Canis familiaris
gcatacggtttgacggagtcccatc

SEQ ID NO: 99937 - DNA, 25 bp, Canis familiaris
gctaccagtattggggcagccccaa

SEQ ID NO: 99938 - DNA, 25 bp, Canis familiaris
gcttccgtaaggcacagtgccccat

SEQ ID NO: 99939 - DNA, 25 bp, Canis familiaris
gcttcccaaagagcaagtgcccgag

SEQ ID NO: 99940 - DNA, 25 bp, Canis familiaris
gcatacccaagtccaaaggtcctaa

SEQ ID NO: 99941 - DNA, 25 bp, Canis familiaris
tgcttgaaaagacaaaggacctaaa

SEQ ID NO: 99942 - DNA, 25 bp, Canis familiaris
gctagcaaaaagctgaagggtcccc

SEQ ID NO: 99943 - DNA, 25 bp, Canis familiaris
gcagatcccaagaggaagggggcac

SEQ ID NO: 99944 - DNA, 25 bp, Canis familiaris
gctattccaggaaggcaaggggtac

SEQ ID NO: 99945 - DNA, 25 bp, Canis familiaris
gcttcaccaccaaggacgaggggac

SEQ ID NO: 99946 - DNA, 25 bp, Canis familiaris
gctatcgtcggcggcaacgaggagg

SEQ ID NO: 99947 - DNA, 25 bp, Canis familiaris
gctatctgaggagggcgaggggggc

SEQ ID NO: 99948 - DNA, 25 bp, Canis familiaris
gcttcgtggaagagggctcagtgcc

SEQ ID NO: 99949 - DNA, 25 bp, Canis familiaris
gctttgggaagatgggccgtggtcc

SEQ ID NO: 99950 - DNA, 25 bp, Canis familiaris
gcttgtgttaaatgtacctgccccc

SEQ ID NO: 99951 - DNA, 25 bp, Canis familiaris
gcttgcgttgattaagtccctgccc

SEQ ID NO: 99952 - DNA, 25 bp, Canis familiaris
gcttctttgctttgattcttaccgc

SEQ ID NO: 99953 - DNA, 25 bp, Canis familiaris
gcattgtgattgaaggcccttaccg

SEQ ID NO: 99954 - DNA, 25 bp, Canis familiaris
gctttttgaagacgagcgcaccctt

SEQ ID NO: 99955 - DNA, 25 bp, Canis familiaris
gctttttatgtgttagagatccctt

SEQ ID NO: 99956 - DNA, 25 bp, Canis familiaris
gctttcttaatatagttccgtgctt

SEQ ID NO: 99957 - DNA, 25 bp, Canis familiaris
gctttccacttcgaattcaccagtg

SEQ ID NO: 99958 - DNA, 25 bp, Canis familiaris
gctttacttttgcatatacagactg

SEQ ID NO: 99959 - DNA, 25 bp, Canis familiaris
gctttttgtctccgttgacacggtt

SEQ ID NO: 99960 - DNA, 25 bp, Canis familiaris
gcttactctgtcttggttaatgggt

SEQ ID NO: 99961 - DNA, 25 bp, Canis familiaris
gatttcctgaaatgttagggggacg

SEQ ID NO: 99962 - DNA, 25 bp, Canis familiaris
gctttcttgaactagtgttggcccg

SEQ ID NO: 99963 - DNA, 25 bp, Canis familiaris
gctttcatgatgtcactggatgttg

SEQ ID NO: 99964 - DNA, 25 bp, Canis familiaris
gctatgtcatgatcatttacttgga

SEQ ID NO: 99965 - DNA, 25 bp, Canis familiaris
gctagaatgttggtgccctgtggac

SEQ ID NO: 99966 - DNA, 25 bp, Canis familiaris
gctagaattgagtctcctctctgga

SEQ ID NO: 99967 - DNA, 25 bp, Canis familiaris
gctagagcaggagcttcatcatctg

SEQ ID NO: 99968 - DNA, 25 bp, Canis familiaris
gcataagcgggaaatctacgaccgt

SEQ ID NO: 99969 - DNA, 25 bp, Canis familiaris
gctagcctggtaaattctcacacac

SEQ ID NO: 99970 - DNA, 25 bp, Canis familiaris
gctagaggggaaatctccccaccac

SEQ ID NO: 99971 - DNA, 25 bp, Canis familiaris
gctagaggcggacatatctgcccac

SEQ ID NO: 99972 - DNA, 25 bp, Canis familiaris
gaatgagggaggatagtccaaccct

SEQ ID NO: 99973 - DNA, 25 bp, Canis familiaris
gcaggggtaggaaagcccagacctt

SEQ ID NO: 99974 - DNA, 25 bp, Canis familiaris
gcatcgggtacaatagtcccaacct

SEQ ID NO: 99975 - DNA, 25 bp, Canis familiaris
gctttggtccaagacccacaagccg

SEQ ID NO: 99976 - DNA, 25 bp, Canis familiaris
gctttgattccatgccaagcaagcc

SEQ ID NO: 99977 - DNA, 25 bp, Canis familiaris
gcttggctcctctagccaaagtcat

SEQ ID NO: 99978 - DNA, 25 bp, Canis familiaris
gctatgagctgcctgacggccaagt

SEQ ID NO: 99979 - DNA, 25 bp, Canis familiaris
gctatgagctgaatcctgccaacac

SEQ ID NO: 99980 - DNA, 25 bp, Canis familiaris
gctaggccattccagtcaaagccac

SEQ ID NO: 99981 - DNA, 25 bp, Canis familiaris
gctagcccagtgtgtcagaacatca

SEQ ID NO: 99982 - DNA, 25 bp, Canis familiaris
gaaccaacgtcgacaagaccatctt

SEQ ID NO: 99983 - DNA, 25 bp, Canis familiaris
gatacaaaggaagaatccctgtttt

SEQ ID NO: 99984 - DNA, 25 bp, Canis familiaris
gctatttgcaggaagaaatcccagt

SEQ ID NO: 99985 - DNA, 25 bp, Canis familiaris
gctatttccaactatatgaaccagt

SEQ ID NO: 99986 - DNA, 25 bp, Canis familiaris
gctatactcctactgtgatggaaaa

SEQ ID NO: 99987 - DNA, 25 bp, Canis familiaris
gcttgtcttaatctagtcgatacag

SEQ ID NO: 99988 - DNA, 25 bp, Canis familiaris
gctttgttatctctaatctcaaaga

SEQ ID NO: 99989 - DNA, 25 bp, Canis familiaris
gcttttctgttgctatagcctaatg

SEQ ID NO: 99990 - DNA, 25 bp, Canis familiaris
gctttggcgtgggtatgaagccaga

SEQ ID NO: 99991 - DNA, 25 bp, Canis familiaris
gctatcgatgcctcttggagaccaa

SEQ ID NO: 99992 - DNA, 25 bp, Canis familiaris
gctattgacacggctctatgtgaca

SEQ ID NO: 99993 - DNA, 25 bp, Canis familiaris
gctattgtaagcgtgtagaacaaaa

SEQ ID NO: 99994 - DNA, 25 bp, Canis familiaris
gcttggtaacttcattagcaaaata

SEQ ID NO: 99995 - DNA, 25 bp, Canis familiaris
gcttggtgaagcctacattcagaat

SEQ ID NO: 99996 - DNA, 25 bp, Canis familiaris
gctttgtgtacggatcctcatgaaa

SEQ ID NO: 99997 - DNA, 25 bp, Canis familiaris
gctttattcagcccattccaaagag

SEQ ID NO: 99998 - DNA, 25 bp, Canis familiaris
gcttttatgagctcatgtagcaatc

SEQ ID NO: 99999 - DNA, 25 bp, Canis familiaris
gcttttgtcagctcttactgtctac

SEQ ID NO: 100000 - DNA, 25 bp, Canis familiaris
gctttgtgtagtgctattccttttg

SEQ ID NO: 100001 - DNA, 25 bp, Canis familiaris
gctttgtgtcagagcctttcatctc

SEQ ID NO: 100002 - DNA, 25 bp, Canis familiaris
gctatgtggtgtatgcttattctcc

SEQ ID NO: 100003 - DNA, 25 bp, Canis familiaris
gctatgctgttaattctgtttcatc

SEQ ID NO: 100004 - DNA, 25 bp, Canis familiaris
gctatctatcaatcacttttcacta

SEQ ID NO: 100005 - DNA, 25 bp, Canis familiaris
gctattgcaaattggtgtatctaca

SEQ ID NO: 100006 - DNA, 25 bp, Canis familiaris
gctttgccattcttctgtttatagt

SEQ ID NO: 100007 - DNA, 25 bp, Canis familiaris
gctttcccctttactataagactat

SEQ ID NO: 100008 - DNA, 25 bp, Canis familiaris
gctttcgccctgaaccattgggagc

SEQ ID NO: 100009 - DNA, 25 bp, Canis familiaris
gcttttacgcagatccttcgagtca

SEQ ID NO: 100010 - DNA, 25 bp, Canis familiaris
gcttttgaagccgtcgttctgtggc

SEQ ID NO: 100011 - DNA, 25 bp, Canis familiaris
gcttaataactggctcaatctctag

SEQ ID NO: 100012 - DNA, 25 bp, Canis familiaris
gcttaagaataaatacacatgtatg

SEQ ID NO: 100013 - DNA, 25 bp, Canis familiaris
gcttaagctgcatagtcatcctgtt

SEQ ID NO: 100014 - DNA, 25 bp, Canis familiaris
gcttatggcaaaagtcacctgcatc

SEQ ID NO: 100015 - DNA, 25 bp, Canis familiaris
gcttgttcaaattggctcctacgtc

SEQ ID NO: 100016 - DNA, 25 bp, Canis familiaris
gcttttcataatctctcctaattcc

SEQ ID NO: 100017 - DNA, 25 bp, Canis familiaris
gctttgcctaaccttcagcagaatg

SEQ ID NO: 100018 - DNA, 25 bp, Canis familiaris
gctatcttccaaccttacagagctg

SEQ ID NO: 100019 - DNA, 25 bp, Canis familiaris
gctatctctggatgttcttatactc

SEQ ID NO: 100020 - DNA, 25 bp, Canis familiaris
gctttcggcatcagtgcatcttcac

SEQ ID NO: 100021 - DNA, 25 bp, Canis familiaris
gctttgctagccatgaactgacctt

SEQ ID NO: 100022 - DNA, 25 bp, Canis familiaris
gcttcactgactcagccagctgagc

SEQ ID NO: 100023 - DNA, 25 bp, Canis familiaris
gcttgactgccttagccaggcaagc

SEQ ID NO: 100024 - DNA, 25 bp, Canis familiaris
gctatggtgtcttgatgcacaggac

SEQ ID NO: 100025 - DNA, 25 bp, Canis familiaris
gctatgtgcctcaagatgcaagcca

SEQ ID NO: 100026 - DNA, 25 bp, Canis familiaris
gctatagctctcttgcatggattag

SEQ ID NO: 100027 - DNA, 25 bp, Canis familiaris
gctatgtgcctcctgagaaattcgt

SEQ ID NO: 100028 - DNA, 25 bp, Canis familiaris
gctatgattctaagcaaaatactga

SEQ ID NO: 100029 - DNA, 25 bp, Canis familiaris
gctatgttccagccattaatttgaa

SEQ ID NO: 100030 - DNA, 25 bp, Canis familiaris
gctatgttcctctattcaattgcaa

SEQ ID NO: 100031 - DNA, 25 bp, Canis familiaris
gctatcctcctgttatgcatgattg

SEQ ID NO: 100032 - DNA, 25 bp, Canis familiaris
gctatgcttctttgtggctaattct

SEQ ID NO: 100033 - DNA, 25 bp, Canis familiaris
gctatgaccattaggcctatttagg

SEQ ID NO: 100034 - DNA, 25 bp, Canis familiaris
gcttcactgtgcagagccttttaca

SEQ ID NO: 100035 - DNA, 25 bp, Canis familiaris
gcttcagcatctcctggtttttgat

SEQ ID NO: 100036 - DNA, 25 bp, Canis familiaris
gcttcgattccggtagagggatgcc

SEQ ID NO: 100037 - DNA, 25 bp, Canis familiaris
gcttagggcgccatgaggggtgacc

SEQ ID NO: 100038 - DNA, 25 bp, Canis familiaris
gcttatgtgaggagctgggagggac

SEQ ID NO: 100039 - DNA, 25 bp, Canis familiaris
gcttagttggagccagagtcgtaga

SEQ ID NO: 100040 - DNA, 25 bp, Canis familiaris
gcttgggtgcggcccagttgaaggt

SEQ ID NO: 100041 - DNA, 25 bp, Canis familiaris
gcttgagccctgtttcacttatagg

SEQ ID NO: 100042 - DNA, 25 bp, Canis familiaris
gcttagcaccaatgtactacagagg

SEQ ID NO: 100043 - DNA, 25 bp, Canis familiaris
gcttatcccatacgtaatacaggtg

SEQ ID NO: 100044 - DNA, 25 bp, Canis familiaris
gctttcccacagcacaatagcagaa

SEQ ID NO: 100045 - DNA, 25 bp, Canis familiaris
gctttgatcgcgcatgacaagaaaa

SEQ ID NO: 100046 - DNA, 25 bp, Canis familiaris
gcttatagatccctgagaagtaaaa

SEQ ID NO: 100047 - DNA, 25 bp, Canis familiaris
gcattgtacagttatatgaagtaaa

SEQ ID NO: 100048 - DNA, 25 bp, Canis familiaris
gctatgaacatgggtatacaaatac

SEQ ID NO: 100049 - DNA, 25 bp, Canis familiaris
gcttaacttccttacacaggacagg

SEQ ID NO: 100050 - DNA, 25 bp, Canis familiaris
gctatcacaagtcctaaacacagac

SEQ ID NO: 100051 - DNA, 25 bp, Canis familiaris
gctatccgagcgcaaggacacactc

SEQ ID NO: 100052 - DNA, 25 bp, Canis familiaris
gctatctttgtggaatggatccccc

SEQ ID NO: 100053 - DNA, 25 bp, Canis familiaris
gcttcagtgtgagaactgtgacccc

SEQ ID NO: 100054 - DNA, 25 bp, Canis familiaris
gcttcgtggaggatgctggacctgg

SEQ ID NO: 100055 - DNA, 25 bp, Canis familiaris
gctaggaggagtggtgtgcctgccg

SEQ ID NO: 100056 - DNA, 25 bp, Canis familiaris
gctatccagggcggagtcctgactc

SEQ ID NO: 100057 - DNA, 25 bp, Canis familiaris
gctatgaccaccgggtgcagtgtcc

SEQ ID NO: 100058 - DNA, 25 bp, Canis familiaris
gcataacccacgtgtgtttcttctc

SEQ ID NO: 100059 - DNA, 25 bp, Canis familiaris
gctttcaaacgatttttgttccatc

SEQ ID NO: 100060 - DNA, 25 bp, Canis familiaris
gctttccaactggcttttgttcaga

SEQ ID NO: 100061 - DNA, 25 bp, Canis familiaris
gctttcgaatgctgatgtctggtta

SEQ ID NO: 100062 - DNA, 25 bp, Canis familiaris
gctttcgcgtgactcacagtggtta

SEQ ID NO: 100063 - DNA, 25 bp, Canis familiaris
gctttggagagaacacttggctcga

SEQ ID NO: 100064 - DNA, 25 bp, Canis familiaris
gcttctgggaaaggcctgacggcca

SEQ ID NO: 100065 - DNA, 25 bp, Canis familiaris
gcttctggttataagcacgccgggc

SEQ ID NO: 100066 - DNA, 25 bp, Canis familiaris
gctttggttatcctgagggcacgtg

SEQ ID NO: 100067 - DNA, 25 bp, Canis familiaris
gcttttcaactcctgggagctgctt

SEQ ID NO: 100068 - DNA, 25 bp, Canis familiaris
gctttccaacattttgagccttttc

SEQ ID NO: 100069 - DNA, 25 bp, Canis familiaris
gctattctaaacttgcatgaccttt

SEQ ID NO: 100070 - DNA, 25 bp, Canis familiaris
gctttcgaagacgggatactgctca

SEQ ID NO: 100071 - DNA, 25 bp, Canis familiaris
gtttaagacccacaacgaacacctg

SEQ ID NO: 100072 - DNA, 25 bp, Canis familiaris
gttaaaagccgatcaacgcaacgtc

SEQ ID NO: 100073 - DNA, 25 bp, Canis familiaris
gcttaaatacaggaccctcagcaga

SEQ ID NO: 100074 - DNA, 25 bp, Canis familiaris
gcttaataacaggtcgccgcgagtc

SEQ ID NO: 100075 - DNA, 25 bp, Canis familiaris
gcttatataattgactgtaatacac

SEQ ID NO: 100076 - DNA, 25 bp, Canis familiaris
gcattataaattgcctggcaacata

SEQ ID NO: 100077 - DNA, 25 bp, Canis familiaris
gctttaatcaaggcctgtgaggttt

SEQ ID NO: 100078 - DNA, 25 bp, Canis familiaris
gctattgagaataactgctgctatg

SEQ ID NO: 100079 - DNA, 25 bp, Canis familiaris
gctattgtggatgatgatgctgtgc

SEQ ID NO: 100080 - DNA, 25 bp, Canis familiaris
gctatgactggtacattctggccca

SEQ ID NO: 100081 - DNA, 25 bp, Canis familiaris
gctatgcctgttaatcctggctcag

SEQ ID NO: 100082 - DNA, 25 bp, Canis familiaris
gctttctgctctatgccatggacag

SEQ ID NO: 100083 - DNA, 25 bp, Canis familiaris
gctattctctccacttggattgacc

SEQ ID NO: 100084 - DNA, 25 bp, Canis familiaris
gcttacctccaaatatgaaatcctc

SEQ ID NO: 100085 - DNA, 25 bp, Canis familiaris
gctatactgtccataagaaactcgc

SEQ ID NO: 100086 - DNA, 25 bp, Canis familiaris
gctatccccacaagggaacactggc

SEQ ID NO: 100087 - DNA, 25 bp, Canis familiaris
gcttcagggcaagggggatactcag

SEQ ID NO: 100088 - DNA, 25 bp, Canis familiaris
gcttcacgctgcaggtgggcaattc

SEQ ID NO: 100089 - DNA, 25 bp, Canis familiaris
gcttacggacatcgagaggcagttc

SEQ ID NO: 100090 - DNA, 25 bp, Canis familiaris
gcttatccagccagacaagcatgtc

SEQ ID NO: 100091 - DNA, 25 bp, Canis familiaris
gctataccagcagcagcactagacc

SEQ ID NO: 100092 - DNA, 25 bp, Canis familiaris
gcttatccagctgtcttcagatctt

SEQ ID NO: 100093 - DNA, 25 bp, Canis familiaris
gctattccatcaggtcgctggattt

SEQ ID NO: 100094 - DNA, 25 bp, Canis familiaris
gcttccctcaagcctgagtttgtgg

SEQ ID NO: 100095 - DNA, 25 bp, Canis familiaris
gcttctaacgtgggttatgtgggaa

SEQ ID NO: 100096 - DNA, 25 bp, Canis familiaris
gcttctaccgtgggtaatgtggaaa

SEQ ID NO: 100097 - DNA, 25 bp, Canis familiaris
gcttctaccgggaatcgttgcagag

SEQ ID NO: 100098 - DNA, 25 bp, Canis familiaris
gcttcttcaggcggtagctgattct

SEQ ID NO: 100099 - DNA, 25 bp, Canis familiaris
gcttttaatgcgggagctgcgattt

SEQ ID NO: 100100 - DNA, 25 bp, Canis familiaris
gctttgtacctgttgacgtgtttct

SEQ ID NO: 100101 - DNA, 25 bp, Canis familiaris
gcagtattgacctgtgaggttggtt

SEQ ID NO: 100102 - DNA, 25 bp, Canis familiaris
gctttctatgccttgggagtattgt

SEQ ID NO: 100103 - DNA, 25 bp, Canis familiaris
gctttgattcagtcggaatggcgct

SEQ ID NO: 100104 - DNA, 25 bp, Canis familiaris
gctattgagtagtattaagttgctt

SEQ ID NO: 100105 - DNA, 25 bp, Canis familiaris
gctattattgtattgtacgttctta

SEQ ID NO: 100106 - DNA, 25 bp, Canis familiaris
gcttttggattttacattcatttta

SEQ ID NO: 100107 - DNA, 25 bp, Canis familiaris
gcttttgtgtttgatatttaccttg

SEQ ID NO: 100108 - DNA, 25 bp, Canis familiaris
gctttgtttgtagatttttccaggg

SEQ ID NO: 100109 - DNA, 25 bp, Canis familiaris
gcttttttggacctctaatcccaga

SEQ ID NO: 100110 - DNA, 25 bp, Canis familiaris
gcttcattttctacttgtaacccaa

SEQ ID NO: 100111 - DNA, 25 bp, Canis familiaris
gcttttgtgttcacggaagtctcca

SEQ ID NO: 100112 - DNA, 25 bp, Canis familiaris
gctatttgtggaccttagacagttt

SEQ ID NO: 100113 - DNA, 25 bp, Canis familiaris
gctattagtgggtcttttcttcttt

SEQ ID NO: 100114 - DNA, 25 bp, Canis familiaris
gctattcagtgtaatgctttttgtt

SEQ ID NO: 100115 - DNA, 25 bp, Canis familiaris
gctattggattttgttttcactttc

SEQ ID NO: 100116 - DNA, 25 bp, Canis familiaris
gctttgtatttaattctctcacttt

SEQ ID NO: 100117 - DNA, 25 bp, Canis familiaris
gctatagatgtattatttctcccat

SEQ ID NO: 100118 - DNA, 25 bp, Canis familiaris
gctatagtgttttagtcgcccatat

SEQ ID NO: 100119 - DNA, 25 bp, Canis familiaris
gctatagtttcttttctgtcactga

SEQ ID NO: 100120 - DNA, 25 bp, Canis familiaris
gctttctttccatactgtcttgaat

SEQ ID NO: 100121 - DNA, 25 bp, Canis familiaris
gcttctcattctcaaacgttacaat

SEQ ID NO: 100122 - DNA, 25 bp, Canis familiaris
gctttcagaaaatacggtcacacat

SEQ ID NO: 100123 - DNA, 25 bp, Canis familiaris
gcttctgcaaaacaacaagatccct

SEQ ID NO: 100124 - DNA, 25 bp, Canis familiaris
gctattgcagaagaaaaatcccagt

SEQ ID NO: 100125 - DNA, 25 bp, Canis familiaris
gctttagaacattaccaactcatca

SEQ ID NO: 100126 - DNA, 25 bp, Canis familiaris
gctttagaacagctccaagccacca

SEQ ID NO: 100127 - DNA, 25 bp, Canis familiaris
gctattaacacggttaaccccagct

SEQ ID NO: 100128 - DNA, 25 bp, Canis familiaris
gcttttccccagataagcctggagg

SEQ ID NO: 100129 - DNA, 25 bp, Canis familiaris
gcttttcctcgaggtgtagaccgtg

SEQ ID NO: 100130 - DNA, 25 bp, Canis familiaris
gcttttcctccagtgctgcaaggaa

SEQ ID NO: 100131 - DNA, 25 bp, Canis familiaris
gctttgtctccttttgaatccataa

SEQ ID NO: 100132 - DNA, 25 bp, Canis familiaris
gcttttctcttcttttcatacaagg

SEQ ID NO: 100133 - DNA, 25 bp, Canis familiaris
gctttgggaacttttcattcacatg

SEQ ID NO: 100134 - DNA, 25 bp, Canis familiaris
gctttcggatctctttcattatttg

SEQ ID NO: 100135 - DNA, 25 bp, Canis familiaris
gcttcctgatttttttattacttgt

SEQ ID NO: 100136 - DNA, 25 bp, Canis familiaris
gcttccattttgtttttaacacact

SEQ ID NO: 100137 - DNA, 25 bp, Canis familiaris
gctatcccttagctagttaaaatat

SEQ ID NO: 100138 - DNA, 25 bp, Canis familiaris
gcttccctctggctcagttagaagt

SEQ ID NO: 100139 - DNA, 25 bp, Canis familiaris
gcttaccgggagaagattgagaagg

SEQ ID NO: 100140 - DNA, 25 bp, Canis familiaris
gctatacgggaaaatgctttcagca

SEQ ID NO: 100141 - DNA, 25 bp, Canis familiaris
gcttacgccccttatttatgagaac

SEQ ID NO: 100142 - DNA, 25 bp, Canis familiaris
gcattttccccttattcttgaagca

SEQ ID NO: 100143 - DNA, 25 bp, Canis familiaris
gcttttcagccttctaatttaatac

SEQ ID NO: 100144 - DNA, 25 bp, Canis familiaris
gctatttcaactttacttcggctac

SEQ ID NO: 100145 - DNA, 25 bp, Canis familiaris
gctattaaatgctcaccttttctac

SEQ ID NO: 100146 - DNA, 25 bp, Canis familiaris
gctatgtcaaatgaactcagttttt

SEQ ID NO: 100147 - DNA, 25 bp, Canis familiaris
gctattcgcatattaacatcatttt

SEQ ID NO: 100148 - DNA, 25 bp, Canis familiaris
gctttcggaatatctcagtgctgat

SEQ ID NO: 100149 - DNA, 25 bp, Canis familiaris
gctttcaccaataccatgcgtgtgg

SEQ ID NO: 100150 - DNA, 25 bp, Canis familiaris
gcttccccatagacctggattagtc

SEQ ID NO: 100151 - DNA, 25 bp, Canis familiaris
gcttcctccataatttggtttcctc

SEQ ID NO: 100152 - DNA, 25 bp, Canis familiaris
gcttcactcctggactatgactttc

SEQ ID NO: 100153 - DNA, 25 bp, Canis familiaris
gctattcctctgtagtgtatctatt

SEQ ID NO: 100154 - DNA, 25 bp, Canis familiaris
gctatgaccttgctgagatcctgag

SEQ ID NO: 100155 - DNA, 25 bp, Canis familiaris
gcttgaacatatcagagattccaat

SEQ ID NO: 100156 - DNA, 25 bp, Canis familiaris
gcttagactcatccagacagtgtgc

SEQ ID NO: 100157 - DNA, 25 bp, Canis familiaris
gcttaactctgacatctgctattgt

SEQ ID NO: 100158 - DNA, 25 bp, Canis familiaris
gcttatcatctctgtactcttagag

SEQ ID NO: 100159 - DNA, 25 bp, Canis familiaris
gctttcatgctgtataactgtaaaa

SEQ ID NO: 100160 - DNA, 25 bp, Canis familiaris
gctttgctgctagagttgtcaagag

SEQ ID NO: 100161 - DNA, 25 bp, Canis familiaris
gctattgcttatggcttagacaaga

SEQ ID NO: 100162 - DNA, 25 bp, Canis familiaris
gcattgagtttgtattaacactaat

SEQ ID NO: 100163 - DNA, 25 bp, Canis familiaris
gcttctggcttgtttgacacctaaa

SEQ ID NO: 100164 - DNA, 25 bp, Canis familiaris
gctttgtgtgtgacctgcagagcct

SEQ ID NO: 100165 - DNA, 25 bp, Canis familiaris
gctttgaggttcccagatctgtgac

SEQ ID NO: 100166 - DNA, 25 bp, Canis familiaris
gctttggtttgtcccttggacactt

SEQ ID NO: 100167 - DNA, 25 bp, Canis familiaris
gcttttttagtgtccttgctggttc

SEQ ID NO: 100168 - DNA, 25 bp, Canis familiaris
gctttttttgtgttttctctatgtt

SEQ ID NO: 100169 - DNA, 25 bp, Canis familiaris
gcttttctacatgttcttttgagtg

SEQ ID NO: 100170 - DNA, 25 bp, Canis familiaris
gctttcacaaacttttatacgcaat

SEQ ID NO: 100171 - DNA, 25 bp, Canis familiaris
gcttggtcaagtctattaatccact

SEQ ID NO: 100172 - DNA, 25 bp, Canis familiaris
gcattggtaaattttaagtcccatt

SEQ ID NO: 100173 - DNA, 25 bp, Canis familiaris
gattaaagattttaaatggccgtct

SEQ ID NO: 100174 - DNA, 25 bp, Canis familiaris
gttagaagtagtcatttggccttac

SEQ ID NO: 100175 - DNA, 25 bp, Canis familiaris
gctttgaaaagaaatttgtccttga

SEQ ID NO: 100176 - DNA, 25 bp, Canis familiaris
gctttatcaaaaactactgcttctt

SEQ ID NO: 100177 - DNA, 25 bp, Canis familiaris
gctttgctagcaataactgaccttc

SEQ ID NO: 100178 - DNA, 25 bp, Canis familiaris
gcttctggaacaaatggcaccgatc

SEQ ID NO: 100179 - DNA, 25 bp, Canis familiaris
gcttgtggagaaacagaatccagag

SEQ ID NO: 100180 - DNA, 25 bp, Canis familiaris
gcttttacattgagaatcccaggcg

SEQ ID NO: 100181 - DNA, 25 bp, Canis familiaris
gctttgtcccgaagacaccataggc

SEQ ID NO: 100182 - DNA, 25 bp, Canis familiaris
gcttttccctcatgacacttaatgc

SEQ ID NO: 100183 - DNA, 25 bp, Canis familiaris
gctttttgcccattgaccagataaa

SEQ ID NO: 100184 - DNA, 25 bp, Canis familiaris
gctttctggtagttccccataacat

SEQ ID NO: 100185 - DNA, 25 bp, Canis familiaris
gcttttgacttctccaccaaagtac

SEQ ID NO: 100186 - DNA, 25 bp, Canis familiaris
gcttaagttctctccaaaagagctc

SEQ ID NO: 100187 - DNA, 25 bp, Canis familiaris
gcttctttctcgttcaaaagcaggc

SEQ ID NO: 100188 - DNA, 25 bp, Canis familiaris
gcttcattgtcccactcaggaaagt

SEQ ID NO: 100189 - DNA, 25 bp, Canis familiaris
gcttagtggccgacagccgaaggtc

SEQ ID NO: 100190 - DNA, 25 bp, Canis familiaris
gcttaaggccgggagcctagcgtct

SEQ ID NO: 100191 - DNA, 25 bp, Canis familiaris
gcttcaaggcaaaggcaccaaactt

SEQ ID NO: 100192 - DNA, 25 bp, Canis familiaris
gcttctggcgagagacatctataac

SEQ ID NO: 100193 - DNA, 25 bp, Canis familiaris
gctttgtgtgtacgaatgctcatga

SEQ ID NO: 100194 - DNA, 25 bp, Canis familiaris
gctattgtactgttgtttcatgcat

SEQ ID NO: 100195 - DNA, 25 bp, Canis familiaris
gctattgtcacactctgatttaatc

SEQ ID NO: 100196 - DNA, 25 bp, Canis familiaris
gctttgctccagtcaatgttacaac

SEQ ID NO: 100197 - DNA, 25 bp, Canis familiaris
gctttgccatcttcagagtcataca

SEQ ID NO: 100198 - DNA, 25 bp, Canis familiaris
gctattgacagctttaggcatatgt

SEQ ID NO: 100199 - DNA, 25 bp, Canis familiaris
gcttatgcacaattttgtctatgag

SEQ ID NO: 100200 - DNA, 25 bp, Canis familiaris
gcttgacttagcatttctagagggc

SEQ ID NO: 100201 - DNA, 25 bp, Canis familiaris
gcatctactaccactaccaatgggc

SEQ ID NO: 100202 - DNA, 25 bp, Canis familiaris
gcttactacgacatggccaatggtg

SEQ ID NO: 100203 - DNA, 25 bp, Canis familiaris
gcagtaacatggtctttaccggggt

SEQ ID NO: 100204 - DNA, 25 bp, Canis familiaris
gcttcaacgtggatgaacctggagg

SEQ ID NO: 100205 - DNA, 25 bp, Canis familiaris
gcttccacgttgaattcaccagtgg

SEQ ID NO: 100206 - DNA, 25 bp, Canis familiaris
gctatcatactgtttcttcatctct

SEQ ID NO: 100207 - DNA, 25 bp, Canis familiaris
gcttcaccgaatacttcagcatgca

SEQ ID NO: 100208 - DNA, 25 bp, Canis familiaris
gcttcaggcagatttgcaacagcaa

SEQ ID NO: 100209 - DNA, 25 bp, Canis familiaris
gcttcctgcagctgcataactggat

SEQ ID NO: 100210 - DNA, 25 bp, Canis familiaris
gcttgtcatgcgcgtaatcgtcagg

SEQ ID NO: 100211 - DNA, 25 bp, Canis familiaris
gctatttccatcctgcaacagttgg

SEQ ID NO: 100212 - DNA, 25 bp, Canis familiaris
gcttctgtaatcctcaatctattca

SEQ ID NO: 100213 - DNA, 25 bp, Canis familiaris
gcttgaggcactgtaattattccta

SEQ ID NO: 100214 - DNA, 25 bp, Canis familiaris
gcttagagtctgtttttcttactag

SEQ ID NO: 100215 - DNA, 25 bp, Canis familiaris
gcttagggttatatttatactcgtt

SEQ ID NO: 100216 - DNA, 25 bp, Canis familiaris
gctttggtgtaaattcttatccccg

SEQ ID NO: 100217 - DNA, 25 bp, Canis familiaris
gcttttgtttttgctgtactgcctc

SEQ ID NO: 100218 - DNA, 25 bp, Canis familiaris
gcttcgaggtttcgtcaggatctgc

SEQ ID NO: 100219 - DNA, 25 bp, Canis familiaris
gcttcagaggtaacgactgatatct

SEQ ID NO: 100220 - DNA, 25 bp, Canis familiaris
gcttgaagagtatcggcttcctcga

SEQ ID NO: 100221 - DNA, 25 bp, Canis familiaris
gcttgatggacaaagggctccccag

SEQ ID NO: 100222 - DNA, 25 bp, Canis familiaris
gcttctggacatcaggagctacctg

SEQ ID NO: 100223 - DNA, 25 bp, Canis familiaris
gcatcttggagtctgaggttccgac

SEQ ID NO: 100224 - DNA, 25 bp, Canis familiaris
gcacattgaaggaaggggttaactc

SEQ ID NO: 100225 - DNA, 25 bp, Canis familiaris
gcatttctcttaaggggtttagcca

SEQ ID NO: 100226 - DNA, 25 bp, Canis familiaris
gcttctttcaagggaggtaattccg

SEQ ID NO: 100227 - DNA, 25 bp, Canis familiaris
gcttcttactggtgagttaattcca

SEQ ID NO: 100228 - DNA, 25 bp, Canis familiaris
gctttgtactgtggaatgtgcttaa

SEQ ID NO: 100229 - DNA, 25 bp, Canis familiaris
gcttctgattcattggcaagtcaaa

SEQ ID NO: 100230 - DNA, 25 bp, Canis familiaris
gctttgcagctattgcactagtcat

SEQ ID NO: 100231 - DNA, 25 bp, Canis familiaris
gcttctagctatagcacaactgtca

SEQ ID NO: 100232 - DNA, 25 bp, Canis familiaris
gctttgagctcagcagcagtcttca

SEQ ID NO: 100233 - DNA, 25 bp, Canis familiaris
gctttactgcatgtattctctcaag

SEQ ID NO: 100234 - DNA, 25 bp, Canis familiaris
gcttggcagccagctttgcccaagc

SEQ ID NO: 100235 - DNA, 25 bp, Canis familiaris
gcttggactatggttcgtgccgaat

SEQ ID NO: 100236 - DNA, 25 bp, Canis familiaris
gcttccgtatgaattgcgagcatca

SEQ ID NO: 100237 - DNA, 25 bp, Canis familiaris
gcttccaatggaattcggagcatca

SEQ ID NO: 100238 - DNA, 25 bp, Canis familiaris
gcttctagtgttttggccatacatc

SEQ ID NO: 100239 - DNA, 25 bp, Canis familiaris
gcttttggctattatggaccactcc

SEQ ID NO: 100240 - DNA, 25 bp, Canis familiaris
gcttttggtctaatggcttcttcag

SEQ ID NO: 100241 - DNA, 25 bp, Canis familiaris
gcttgttggacaaggtttgatgaca

SEQ ID NO: 100242 - DNA, 25 bp, Canis familiaris
gcttatagagcacagacctttgtat

SEQ ID NO: 100243 - DNA, 25 bp, Canis familiaris
gcttatagagagtcaccttcttgct

SEQ ID NO: 100244 - DNA, 25 bp, Canis familiaris
gctatttgaatggccactcacttct

SEQ ID NO: 100245 - DNA, 25 bp, Canis familiaris
gctttatagtgggttcagctagctt

SEQ ID NO: 100246 - DNA, 25 bp, Canis familiaris
gctttcaagtgcctttctgcagttt

SEQ ID NO: 100247 - DNA, 25 bp, Canis familiaris
gcttaccatgtagtgtgaccgtttc

SEQ ID NO: 100248 - DNA, 25 bp, Canis familiaris
gcttaatattacatggctaggctct

SEQ ID NO: 100249 - DNA, 25 bp, Canis familiaris
gcttacaatttcattcgagccctaa

SEQ ID NO: 100250 - DNA, 25 bp, Canis familiaris
gcttacaaatgcaattctccacgcc

SEQ ID NO: 100251 - DNA, 25 bp, Canis familiaris
gcttcactttgaatgatttccccgg

SEQ ID NO: 100252 - DNA, 25 bp, Canis familiaris
gcttcactgctttagacttagactc

SEQ ID NO: 100253 - DNA, 25 bp, Canis familiaris
gcttcaccgcagtaacattgggcag

SEQ ID NO: 100254 - DNA, 25 bp, Canis familiaris
gcttcacggcgggcatcgtggaggc

SEQ ID NO: 100255 - DNA, 25 bp, Canis familiaris
gctttcagggccaacctgaaggccc

SEQ ID NO: 100256 - DNA, 25 bp, Canis familiaris
gcttgatagcagcacacacctaagt

SEQ ID NO: 100257 - DNA, 25 bp, Canis familiaris
gcttgcattaagacccacaaatcgg

SEQ ID NO: 100258 - DNA, 25 bp, Canis familiaris
gcttctgatcgtactccaaaatatg

SEQ ID NO: 100259 - DNA, 25 bp, Canis familiaris
gcattgctcattattcccaaggttc

SEQ ID NO: 100260 - DNA, 25 bp, Canis familiaris
gcagggcaatttcacccagttttag

SEQ ID NO: 100261 - DNA, 25 bp, Canis familiaris
gcactcgaagtgagacccacttcta

SEQ ID NO: 100262 - DNA, 25 bp, Canis familiaris
gcactagaactaaaccttaccacac

SEQ ID NO: 100263 - DNA, 25 bp, Canis familiaris
gcttagcaaaaagccttctccctct

SEQ ID NO: 100264 - DNA, 25 bp, Canis familiaris
gcattaaaatactcggttcctctct

SEQ ID NO: 100265 - DNA, 25 bp, Canis familiaris
gcatttgaacttctttttcctgttt

SEQ ID NO: 100266 - DNA, 25 bp, Canis familiaris
gcttaatcccaatattttgcctttt

SEQ ID NO: 100267 - DNA, 25 bp, Canis familiaris
gcttaagcctcaatgacttttacat

SEQ ID NO: 100268 - DNA, 25 bp, Canis familiaris
gcttctacctctaagtctgagtcca

SEQ ID NO: 100269 - DNA, 25 bp, Canis familiaris
gcttctacctctaagtctgagtcca

SEQ ID NO: 100270 - DNA, 25 bp, Canis familiaris
gcttctacctctaagtctgagtcca

SEQ ID NO: 100271 - DNA, 25 bp, Canis familiaris
actcccccagatccagtagtaaaga

SEQ ID NO: 100272 - DNA, 25 bp, Canis familiaris
gcttctacctctaagtctgagtcca

SEQ ID NO: 100273 - DNA, 25 bp, Canis familiaris
gctttacccatgactgctgggtcct

SEQ ID NO: 100274 - DNA, 25 bp, Canis familiaris
gctttgaccactatgcacggatgct

SEQ ID NO: 100275 - DNA, 25 bp, Canis familiaris
gctttgaccaccttgcagcaaatgt

SEQ ID NO: 100276 - DNA, 25 bp, Canis familiaris
gcttctgacccattgtgacagtttt

SEQ ID NO: 100277 - DNA, 25 bp, Canis familiaris
gctttgcactcagcgggagtctgtt

SEQ ID NO: 100278 - DNA, 25 bp, Canis familiaris
gcttctcctactccagtaattgtca

SEQ ID NO: 100279 - DNA, 25 bp, Canis familiaris
gctttagcataccactaagatttct

SEQ ID NO: 100280 - DNA, 25 bp, Canis familiaris
gcttcggacaccttaatgattctca

SEQ ID NO: 100281 - DNA, 25 bp, Canis familiaris
gcttcaggtaccatagagtcccgtc

SEQ ID NO: 100282 - DNA, 25 bp, Canis familiaris
gcttccaaaccaatagattccttac

SEQ ID NO: 100283 - DNA, 25 bp, Canis familiaris
gcttccaggaccaaaccacctgggt

SEQ ID NO: 100284 - DNA, 25 bp, Canis familiaris
gcttccagaaccaagggaccatgtg

SEQ ID NO: 100285 - DNA, 25 bp, Canis familiaris
gcttcaaagaccagtgagcgcctcc

SEQ ID NO: 100286 - DNA, 25 bp, Canis familiaris
gcatctctaagactgggttagccta

SEQ ID NO: 100287 - DNA, 25 bp, Canis familiaris
gcattctaggagtggctgggtcttc

SEQ ID NO: 100288 - DNA, 25 bp, Canis familiaris
gctttttctaagccggtagcattcg

SEQ ID NO: 100289 - DNA, 25 bp, Canis familiaris
gctttttagaagccacggaattgct

SEQ ID NO: 100290 - DNA, 25 bp, Canis familiaris
gctttttagaagccaaggcattcta

SEQ ID NO: 100291 - DNA, 25 bp, Canis familiaris
gcttttacctggcacaggccatgct

SEQ ID NO: 100292 - DNA, 25 bp, Canis familiaris
gcttttacaagagggcaggacctgc

SEQ ID NO: 100293 - DNA, 25 bp, Canis familiaris
gctttgttagggtgacagagcctgg

SEQ ID NO: 100294 - DNA, 25 bp, Canis familiaris
gctttgttagggtggcagagcccgg

SEQ ID NO: 100295 - DNA, 25 bp, Canis familiaris
gctttttgggtctggtgaagcctgg

SEQ ID NO: 100296 - DNA, 25 bp, Canis familiaris
gcatttttggagaaacgtaaatctg

SEQ ID NO: 100297 - DNA, 25 bp, Canis familiaris
gcatttgtctggttagcacgtgaag

SEQ ID NO: 100298 - DNA, 25 bp, Canis familiaris
gctttcactgtgtttgacgtcatta

SEQ ID NO: 100299 - DNA, 25 bp, Canis familiaris
gctttcctgtggtttcaatcatgta

SEQ ID NO: 100300 - DNA, 25 bp, Canis familiaris
gcttattgcttggatttctagttag

SEQ ID NO: 100301 - DNA, 25 bp, Canis familiaris
gcttatttccaaatttgcagtattg

SEQ ID NO: 100302 - DNA, 25 bp, Canis familiaris
gcttatttcctgtgttagtcttatc

SEQ ID NO: 100303 - DNA, 25 bp, Canis familiaris
gcttttctactcaagttaatcctca

SEQ ID NO: 100304 - DNA, 25 bp, Canis familiaris
gcttaattggcttagtgtggacttc

SEQ ID NO: 100305 - DNA, 25 bp, Canis familiaris
gctttgcatttggaaggcgggcctc

SEQ ID NO: 100306 - DNA, 25 bp, Canis familiaris
gctttcttctaaagtgctttccact

SEQ ID NO: 100307 - DNA, 25 bp, Canis familiaris
gctttttaaatgccagtattcaatt

SEQ ID NO: 100308 - DNA, 25 bp, Canis familiaris
gcttaagttcaacgctgtattatga

SEQ ID NO: 100309 - DNA, 25 bp, Canis familiaris
gcttgtgagttcctggtttcttgga

SEQ ID NO: 100310 - DNA, 25 bp, Canis familiaris
gctttattttgaggtactgtgtgtg

SEQ ID NO: 100311 - DNA, 25 bp, Canis familiaris
gctttatttatttctactttcatgc

SEQ ID NO: 100312 - DNA, 25 bp, Canis familiaris
gctttattggtttcatggttttgga

SEQ ID NO: 100313 - DNA, 25 bp, Canis familiaris
gctttcataactttcatggctttgc

SEQ ID NO: 100314 - DNA, 25 bp, Canis familiaris
gctttctgacactttcacttttgca

SEQ ID NO: 100315 - DNA, 25 bp, Canis familiaris
gctttcacataggaccacttttgcc

SEQ ID NO: 100316 - DNA, 25 bp, Canis familiaris
gctttccataggaccacgtttttgc

SEQ ID NO: 100317 - DNA, 25 bp, Canis familiaris
gctttcctggccaaccaattttagg

SEQ ID NO: 100318 - DNA, 25 bp, Canis familiaris
gctttcttggcaagggcccttaagg

SEQ ID NO: 100319 - DNA, 25 bp, Canis familiaris
gcttggtaagatagggcctttccat

SEQ ID NO: 100320 - DNA, 25 bp, Canis familiaris
gctttgtaacattgagtcctttctc

SEQ ID NO: 100321 - DNA, 25 bp, Canis familiaris
gcttttcagatatcgtctctattca

SEQ ID NO: 100322 - DNA, 25 bp, Canis familiaris
gctttcttatgatcagtgccttcta

SEQ ID NO: 100323 - DNA, 25 bp, Canis familiaris
gctttgcatgtagtaagtgctcgtt

SEQ ID NO: 100324 - DNA, 25 bp, Canis familiaris
gctttgttctcttaatgttgttctt

SEQ ID NO: 100325 - DNA, 25 bp, Canis familiaris
gcttttgctctttactttatttcac

SEQ ID NO: 100326 - DNA, 25 bp, Canis familiaris
gcttttgtacttcttgttcattaaa

SEQ ID NO: 100327 - DNA, 25 bp, Canis familiaris
gctttgttacctctctggatatttg

SEQ ID NO: 100328 - DNA, 25 bp, Canis familiaris
gctttgaaagcagttctctgggttt

SEQ ID NO: 100329 - DNA, 25 bp, Canis familiaris
gcttccagagaagttcggtggttgt

SEQ ID NO: 100330 - DNA, 25 bp, Canis familiaris
gcttctcaggatgatccgcgtgggg

SEQ ID NO: 100331 - DNA, 25 bp, Canis familiaris
gctttcaggatgaccgagtgggaga

SEQ ID NO: 100332 - DNA, 25 bp, Canis familiaris
gcattcacaggaagggaggccggaa

SEQ ID NO: 100333 - DNA, 25 bp, Canis familiaris
gcttccggaggacctcggcaggaac

SEQ ID NO: 100334 - DNA, 25 bp, Canis familiaris
gcttccgggtggacatcgagagcct

SEQ ID NO: 100335 - DNA, 25 bp, Canis familiaris
gcttacggtgatgacacctggctcc

SEQ ID NO: 100336 - DNA, 25 bp, Canis familiaris
gcattcaccgaagcacaaacctgcc

SEQ ID NO: 100337 - DNA, 25 bp, Canis familiaris
gcttcaccctgggaaaacgctggcc

SEQ ID NO: 100338 - DNA, 25 bp, Canis familiaris
gcttccctctggtaaatacactggt

SEQ ID NO: 100339 - DNA, 25 bp, Canis familiaris
gctttcctttgaacgttacgctttg

SEQ ID NO: 100340 - DNA, 25 bp, Canis familiaris
gctttcattttggtttgtgacactt

SEQ ID NO: 100341 - DNA, 25 bp, Canis familiaris
gcttgtatcgagtgttctgtgaacc

SEQ ID NO: 100342 - DNA, 25 bp, Canis familiaris
gcttgaacgatgttgttctcgcctc

SEQ ID NO: 100343 - DNA, 25 bp, Canis familiaris
gcatctaaccaatcttctactctag

SEQ ID NO: 100344 - DNA, 25 bp, Canis familiaris
gcttaagatcaagctcttccactgg

SEQ ID NO: 100345 - DNA, 25 bp, Canis familiaris
gcttataatctacttgcttgcctgt

SEQ ID NO: 100346 - DNA, 25 bp, Canis familiaris
gcttcaatattacggttggcttttt

SEQ ID NO: 100347 - DNA, 25 bp, Canis familiaris
gcttaatcttaatgtctggtgtttg

SEQ ID NO: 100348 - DNA, 25 bp, Canis familiaris
gcttaataattaggccagggctttt

SEQ ID NO: 100349 - DNA, 25 bp, Canis familiaris
gcttataatttagccagggtttcta

SEQ ID NO: 100350 - DNA, 25 bp, Canis familiaris
gcttataagttagcgcaggcttcta

SEQ ID NO: 100351 - DNA, 25 bp, Canis familiaris
gctttacatttagtcctgcttttga

SEQ ID NO: 100352 - DNA, 25 bp, Canis familiaris
gctttcttgctttattgctgctttt

SEQ ID NO: 100353 - DNA, 25 bp, Canis familiaris
gctttctttgtgtatttgccataaa

SEQ ID NO: 100354 - DNA, 25 bp, Canis familiaris
gctttcttcaattcttttcatacca

SEQ ID NO: 100355 - DNA, 25 bp, Canis familiaris
gctttgctgtgcagtgctgtttcag

SEQ ID NO: 100356 - DNA, 25 bp, Canis familiaris
gctttgctggcaggggcatgggtgc

SEQ ID NO: 100357 - DNA, 25 bp, Canis familiaris
gcttcttggatcaatggggcagtca

SEQ ID NO: 100358 - DNA, 25 bp, Canis familiaris
gcttcatgcttcactgggggacatg

SEQ ID NO: 100359 - DNA, 25 bp, Canis familiaris
gcttctttattccaggtgtgacgcc

SEQ ID NO: 100360 - DNA, 25 bp, Canis familiaris
gcttgcatcctattccagggtagcg

SEQ ID NO: 100361 - DNA, 25 bp, Canis familiaris
gcattcccttcttaaggattgatgt

SEQ ID NO: 100362 - DNA, 25 bp, Canis familiaris
gcttctccatttcacgtatatgctt

SEQ ID NO: 100363 - DNA, 25 bp, Canis familiaris
gctttgccactatagatgatatttt

SEQ ID NO: 100364 - DNA, 25 bp, Canis familiaris
gcttgcccactaggaaatctgtttc

SEQ ID NO: 100365 - DNA, 25 bp, Canis familiaris
gcttccccaacagagacattttcat

SEQ ID NO: 100366 - DNA, 25 bp, Canis familiaris
gcattcccacaaagggttttaatgt

SEQ ID NO: 100367 - DNA, 25 bp, Canis familiaris
gcatccccgcagataaattattagt

SEQ ID NO: 100368 - DNA, 25 bp, Canis familiaris
gcttccacaagcacaaattttacac

SEQ ID NO: 100369 - DNA, 25 bp, Canis familiaris
gcttctaaagtgggcatttattacc

SEQ ID NO: 100370 - DNA, 25 bp, Canis familiaris
gcttctgaaaactccctttagctcc

SEQ ID NO: 100371 - DNA, 25 bp, Canis familiaris
gcttcacaacaatggccctggtacc

SEQ ID NO: 100372 - DNA, 25 bp, Canis familiaris
gcttcaaaactacagcatctggcca

SEQ ID NO: 100373 - DNA, 25 bp, Canis familiaris
gcttctaagagtcccagctctaagc

SEQ ID NO: 100374 - DNA, 25 bp, Canis familiaris
gctttacagtgcagccatgtctaag

SEQ ID NO: 100375 - DNA, 25 bp, Canis familiaris
gctttagctatcactctgttatcca

SEQ ID NO: 100376 - DNA, 25 bp, Canis familiaris
gctttttgtgctaccatttagccat

SEQ ID NO: 100377 - DNA, 25 bp, Canis familiaris
gctttatctttcataattgagccag

SEQ ID NO: 100378 - DNA, 25 bp, Canis familiaris
gctttctcttaaatagctagacagg

SEQ ID NO: 100379 - DNA, 25 bp, Canis familiaris
gctttctcttgaaaccatacacccc

SEQ ID NO: 100380 - DNA, 25 bp, Canis familiaris
gcttcctatcttagacacagccacc

SEQ ID NO: 100381 - DNA, 25 bp, Canis familiaris
gcttgaatacatttatccagtcccg

SEQ ID NO: 100382 - DNA, 25 bp, Canis familiaris
gcttaaatcaggcatcacattccaa

SEQ ID NO: 100383 - DNA, 25 bp, Canis familiaris
gcttataccagggtacatccatcga

SEQ ID NO: 100384 - DNA, 25 bp, Canis familiaris
gcttttccaggaatgctgtcctcat

SEQ ID NO: 100385 - DNA, 25 bp, Canis familiaris
gcttttctgaagtctctgtgacaca

SEQ ID NO: 100386 - DNA, 25 bp, Canis familiaris
gcttttgcccattttggatcacatg

SEQ ID NO: 100387 - DNA, 25 bp, Canis familiaris
gcttcttacccttgggcatacatcc

SEQ ID NO: 100388 - DNA, 25 bp, Canis familiaris
gcttcttagcccacaggcttgcaag

SEQ ID NO: 100389 - DNA, 25 bp, Canis familiaris
gcttttggcgcccacagtgatgatg

SEQ ID NO: 100390 - DNA, 25 bp, Canis familiaris
gcttttggcgcccacagtgatgatg

SEQ ID NO: 100391 - DNA, 25 bp, Canis familiaris
gctttctgcaccctgaagtgactga

SEQ ID NO: 100392 - DNA, 25 bp, Canis familiaris
gctttctctgcctgaattatctcac

SEQ ID NO: 100393 - DNA, 25 bp, Canis familiaris
gcttactcacactcagttgttactc

SEQ ID NO: 100394 - DNA, 25 bp, Canis familiaris
gcttcaccacatcctagtgtttgac

SEQ ID NO: 100395 - DNA, 25 bp, Canis familiaris
gcttcttcaatggtggatgcattta

SEQ ID NO: 100396 - DNA, 25 bp, Canis familiaris
gcttttcaatggagacaggctgccc

SEQ ID NO: 100397 - DNA, 25 bp, Canis familiaris
gctttctttgttggcatcatggtcc

SEQ ID NO: 100398 - DNA, 25 bp, Canis familiaris
gcatttcgatcctcgtcaggtgcag

SEQ ID NO: 100399 - DNA, 25 bp, Canis familiaris
gcttgtcgatgttgtcgtgcaggat

SEQ ID NO: 100400 - DNA, 25 bp, Canis familiaris
gcttgatggttacaatgcaagactt

SEQ ID NO: 100401 - DNA, 25 bp, Canis familiaris
gcttcatgtgttttcaagaagagaa

SEQ ID NO: 100402 - DNA, 25 bp, Canis familiaris
gcttatgatggcactatgaactaga

SEQ ID NO: 100403 - DNA, 25 bp, Canis familiaris
taattggggccaagacctaattgat

SEQ ID NO: 100404 - DNA, 25 bp, Canis familiaris
taattgcggaggttgcccttttggg

SEQ ID NO: 100405 - DNA, 25 bp, Canis familiaris
gcagatttggggatccctgatttgg

SEQ ID NO: 100406 - DNA, 25 bp, Canis familiaris
gcttttgtgcggcgcgactatgttg

SEQ ID NO: 100407 - DNA, 25 bp, Canis familiaris
gcttttagcttgcttgaatatgttt

SEQ ID NO: 100408 - DNA, 25 bp, Canis familiaris
gcttttagctcttgttatttcttta

SEQ ID NO: 100409 - DNA, 25 bp, Canis familiaris
gctttttgcttagtttttctgttct

SEQ ID NO: 100410 - DNA, 25 bp, Canis familiaris
gcttaattcattttatttttctctt

SEQ ID NO: 100411 - DNA, 25 bp, Canis familiaris
gctttatgtgattacttttggtctt

SEQ ID NO: 100412 - DNA, 25 bp, Canis familiaris
gcttcctgatgtatcgttgtggcct

SEQ ID NO: 100413 - DNA, 25 bp, Canis familiaris
gcattcctgaccatgacttttgcct

SEQ ID NO: 100414 - DNA, 25 bp, Canis familiaris
gcttcgcagaaaggatcgtcggccc

SEQ ID NO: 100415 - DNA, 25 bp, Canis familiaris
gcttccagaaagggtcttgagccca

SEQ ID NO: 100416 - DNA, 25 bp, Canis familiaris
gcttcacagaatagccagctcctgt

SEQ ID NO: 100417 - DNA, 25 bp, Canis familiaris
gctttcagttatgcagcccatagac

SEQ ID NO: 100418 - DNA, 25 bp, Canis familiaris
gctttagtggagagcctgctgagag

SEQ ID NO: 100419 - DNA, 25 bp, Canis familiaris
gcttcatgaggaggttctcaacaga

SEQ ID NO: 100420 - DNA, 25 bp, Canis familiaris
gcttctaggcggactgttactgagc

SEQ ID NO: 100421 - DNA, 25 bp, Canis familiaris
gctttttgtggctagttactggctg

SEQ ID NO: 100422 - DNA, 25 bp, Canis familiaris
gcttatttgtggttttcgcttgttt

SEQ ID NO: 100423 - DNA, 25 bp, Canis familiaris
gcttgttctgcttttttgcctaatt

SEQ ID NO: 100424 - DNA, 25 bp, Canis familiaris
gcttctgtcctggttattggtagtt

SEQ ID NO: 100425 - DNA, 25 bp, Canis familiaris
gcttcagtcctcgctgagagactgg

SEQ ID NO: 100426 - DNA, 25 bp, Canis familiaris
gcttgcagtccttggtggaccaggc

SEQ ID NO: 100427 - DNA, 25 bp, Canis familiaris
gcttccatgtgcctggtgtacaagg

SEQ ID NO: 100428 - DNA, 25 bp, Canis familiaris
gcttcgatgatgggcttgctgacca

SEQ ID NO: 100429 - DNA, 25 bp, Canis familiaris
gcatacgcatgactacattacaacg

SEQ ID NO: 100430 - DNA, 25 bp, Canis familiaris
gcatcactgattgtcactagcgggc

SEQ ID NO: 100431 - DNA, 25 bp, Canis familiaris
gcatcactgaagataataccctgga

SEQ ID NO: 100432 - DNA, 25 bp, Canis familiaris
gcttctggacctcaaccgaggaggc

SEQ ID NO: 100433 - DNA, 25 bp, Canis familiaris
gcttctccaagcatcaacctgggag

SEQ ID NO: 100434 - DNA, 25 bp, Canis familiaris
gcttacccagctgaactctaggtta

SEQ ID NO: 100435 - DNA, 25 bp, Canis familiaris
gcttaccgcaccattccggagtgta

SEQ ID NO: 100436 - DNA, 25 bp, Canis familiaris
gcttatcctctccattttgcggagc

SEQ ID NO: 100437 - DNA, 25 bp, Canis familiaris
gcttagatcctcctggtatcagcga

SEQ ID NO: 100438 - DNA, 25 bp, Canis familiaris
gcttgagcaccgcatcggctgcatt

SEQ ID NO: 100439 - DNA, 25 bp, Canis familiaris
gcttgctaatagtcatcaggctgct

SEQ ID NO: 100440 - DNA, 25 bp, Canis familiaris
gcttgcatctgaagacatcagccac

SEQ ID NO: 100441 - DNA, 25 bp, Canis familiaris
gcttgcacatgggtatgcttgcaca

SEQ ID NO: 100442 - DNA, 25 bp, Canis familiaris
gcttgcacgcggccttggcagcagc

SEQ ID NO: 100443 - DNA, 25 bp, Canis familiaris
gcttgagacaggccctacagagcag

SEQ ID NO: 100444 - DNA, 25 bp, Canis familiaris
gcttgcaagctgtacctgagcgagg

SEQ ID NO: 100445 - DNA, 25 bp, Canis familiaris
gcttcatgccagtacctgctggagc

SEQ ID NO: 100446 - DNA, 25 bp, Canis familiaris
gcttactgagtacttgctgtatgcc

SEQ ID NO: 100447 - DNA, 25 bp, Canis familiaris
gcttactcagtattttggaatccat

SEQ ID NO: 100448 - DNA, 25 bp, Canis familiaris
gcttattcatgatctgtttgaacca

SEQ ID NO: 100449 - DNA, 25 bp, Canis familiaris
gcttttctttctgtgtgtatctatc

SEQ ID NO: 100450 - DNA, 25 bp, Canis familiaris
gcttttgcatttagaagagtttcag

SEQ ID NO: 100451 - DNA, 25 bp, Canis familiaris
gcttgatgttacatgcaagactgtt

SEQ ID NO: 100452 - DNA, 25 bp, Canis familiaris
gcttgtttgagcttcagcagaattc

SEQ ID NO: 100453 - DNA, 25 bp, Canis familiaris
gcattgtttgagttcaaggggcctt

SEQ ID NO: 100454 - DNA, 25 bp, Canis familiaris
gcttgttgtggtggtagtggctcct

SEQ ID NO: 100455 - DNA, 25 bp, Canis familiaris
gcttgtgtaggcaggtggcgatcct

SEQ ID NO: 100456 - DNA, 25 bp, Canis familiaris
gcttgtgcaaaggtcctgggagcgc

SEQ ID NO: 100457 - DNA, 25 bp, Canis familiaris
gcttctcagttgctcaggacgaggc

SEQ ID NO: 100458 - DNA, 25 bp, Canis familiaris
gcattctcgcttcttggagggtgtc

SEQ ID NO: 100459 - DNA, 25 bp, Canis familiaris
gttggccttgccctgggaaagtcac

SEQ ID NO: 100460 - DNA, 25 bp, Canis familiaris
gcttgtgcccagtcggggactaagt

SEQ ID NO: 100461 - DNA, 25 bp, Canis familiaris
gcttggtgccagaccgtctgactag

SEQ ID NO: 100462 - DNA, 25 bp, Canis familiaris
gcttggtcctggtcgctggacaagt

SEQ ID NO: 100463 - DNA, 25 bp, Canis familiaris
gcttgttattgttaccgtacagctg

SEQ ID NO: 100464 - DNA, 25 bp, Canis familiaris
gcttgtttgttgagctcgaccaata

SEQ ID NO: 100465 - DNA, 25 bp, Canis familiaris
gcttgtttctatactcacaggctag

SEQ ID NO: 100466 - DNA, 25 bp, Canis familiaris
gcttctgtgtctatcttagtggggc

SEQ ID NO: 100467 - DNA, 25 bp, Canis familiaris
gcttttggcttttgtcttgctgagg

SEQ ID NO: 100468 - DNA, 25 bp, Canis familiaris
gcttgatctgttattgctattgtaa

SEQ ID NO: 100469 - DNA, 25 bp, Canis familiaris
gcttatcagtcatgtattgttgtcc

SEQ ID NO: 100470 - DNA, 25 bp, Canis familiaris
gcttcatcgtcggtccgggctgcca

SEQ ID NO: 100471 - DNA, 25 bp, Canis familiaris
gcttcatggtgtctctcagaggcag

SEQ ID NO: 100472 - DNA, 25 bp, Canis familiaris
gcttcagatcttctactcagagcag

SEQ ID NO: 100473 - DNA, 25 bp, Canis familiaris
gcttttctctgtgactcatgagcag

SEQ ID NO: 100474 - DNA, 25 bp, Canis familiaris
gcttattctgattatagctgtgtca

SEQ ID NO: 100475 - DNA, 25 bp, Canis familiaris
gcttatgtatgattcaacatggttg

SEQ ID NO: 100476 - DNA, 25 bp, Canis familiaris
gcttactgagattcaaacgtgatgc

SEQ ID NO: 100477 - DNA, 25 bp, Canis familiaris
gcttacccagatacacacgtgagga

SEQ ID NO: 100478 - DNA, 25 bp, Canis familiaris
gcttcatggcctaacactttgaaga

SEQ ID NO: 100479 - DNA, 25 bp, Canis familiaris
gcattctggtttccacctgttaaag

SEQ ID NO: 100480 - DNA, 25 bp, Canis familiaris
gcttgcttctttacccatttataga

SEQ ID NO: 100481 - DNA, 25 bp, Canis familiaris
gcttttttgtatacacttcccagag

SEQ ID NO: 100482 - DNA, 25 bp, Canis familiaris
gcttcttgtttgattatgccccaat

SEQ ID NO: 100483 - DNA, 25 bp, Canis familiaris
gcttcttgtattaattagccattac

SEQ ID NO: 100484 - DNA, 25 bp, Canis familiaris
gcttgcttttacaacgagaccacac

SEQ ID NO: 100485 - DNA, 25 bp, Canis familiaris
gcttcttattaatcgtgcaaactct

SEQ ID NO: 100486 - DNA, 25 bp, Canis familiaris
gcttcttattaatcgtgcaaactct

SEQ ID NO: 100487 - DNA, 25 bp, Canis familiaris
gcttcttattaatcgtgcaaactct

SEQ ID NO: 100488 - DNA, 25 bp, Canis familiaris
gcttcccaatgagaggccaagacct

SEQ ID NO: 100489 - DNA, 25 bp, Canis familiaris
gcttccgcaaattaatgtatcccct

SEQ ID NO: 100490 - DNA, 25 bp, Canis familiaris
gcttaccaagatagcttttcccttt

SEQ ID NO: 100491 - DNA, 25 bp, Canis familiaris
gcttcctatcagagttttaccctta

SEQ ID NO: 100492 - DNA, 25 bp, Canis familiaris
gcttcccacacatgtgtatgtacac

SEQ ID NO: 100493 - DNA, 25 bp, Canis familiaris
gcttccaatgccgcagtggctgaac

SEQ ID NO: 100494 - DNA, 25 bp, Canis familiaris
gcttccctcggactgtgaggcaggc

SEQ ID NO: 100495 - DNA, 25 bp, Canis familiaris
gcttctgagccatgcacgtaggcgg

SEQ ID NO: 100496 - DNA, 25 bp, Canis familiaris
gcttcagcgccaggcgcgaattcgg

SEQ ID NO: 100497 - DNA, 25 bp, Canis familiaris
gcttctccccagagacatcatctgg

SEQ ID NO: 100498 - DNA, 25 bp, Canis familiaris
gcttctccccagagacatcatctgg

SEQ ID NO: 100499 - DNA, 25 bp, Canis familiaris
gcttctccccagagacatcatctgg

SEQ ID NO: 100500 - DNA, 25 bp, Canis familiaris
gcttctcagccaagtgggactacga

SEQ ID NO: 100501 - DNA, 25 bp, Canis familiaris
gcttatactctgagggaccaccacc

SEQ ID NO: 100502 - DNA, 25 bp, Canis familiaris
gcttatgaggctacggaaacaggcc

SEQ ID NO: 100503 - DNA, 25 bp, Canis familiaris
gcttatgatgtcatcgttacagccg

SEQ ID NO: 100504 - DNA, 25 bp, Canis familiaris
gcatatattgaagtctattaggggc

SEQ ID NO: 100505 - DNA, 25 bp, Canis familiaris
gcataaggggctgacggggagcgtc

SEQ ID NO: 100506 - DNA, 25 bp, Canis familiaris
gaagggggcttctggaggggataat

SEQ ID NO: 100507 - DNA, 25 bp, Canis familiaris
gaaggtaccaacaggagggagaaag

SEQ ID NO: 100508 - DNA, 25 bp, Canis familiaris
gaacttacccacatgttagaacaac

SEQ ID NO: 100509 - DNA, 25 bp, Canis familiaris
gaaccaccaaagatttccaacaagg

SEQ ID NO: 100510 - DNA, 25 bp, Canis familiaris
taaagccccaagagtcccacaaggg

SEQ ID NO: 100511 - DNA, 25 bp, Canis familiaris
gaagggacacaagtcgacctactac

SEQ ID NO: 100512 - DNA, 25 bp, Canis familiaris
gcatcagagcgatggcagcctgacc

SEQ ID NO: 100513 - DNA, 25 bp, Canis familiaris
gcattgagctaaatgagcctccact

SEQ ID NO: 100514 - DNA, 25 bp, Canis familiaris
gcttgagccaggagcccaaccaagc

SEQ ID NO: 100515 - DNA, 25 bp, Canis familiaris
gcttcaccaataagccctacctaac

SEQ ID NO: 100516 - DNA, 25 bp, Canis familiaris
gcttccggctcaagccgtacgtgaa

SEQ ID NO: 100517 - DNA, 25 bp, Canis familiaris
gcttcccctgaaccttgatgggaaa

SEQ ID NO: 100518 - DNA, 25 bp, Canis familiaris
gcttccctgggaccctagtggtaag

SEQ ID NO: 100519 - DNA, 25 bp, Canis familiaris
gcttcagctcgagactcctagtagt

SEQ ID NO: 100520 - DNA, 25 bp, Canis familiaris
gcttgagtaaaattcctctgtgtgt

SEQ ID NO: 100521 - DNA, 25 bp, Canis familiaris
gcttagtagttctacctctgctgtt

SEQ ID NO: 100522 - DNA, 25 bp, Canis familiaris
gtatagaacttcacctccgaatttt

SEQ ID NO: 100523 - DNA, 25 bp, Canis familiaris
gaataaatttcccacctggaattct

SEQ ID NO: 100524 - DNA, 25 bp, Canis familiaris
gcttcaaagttcttcatcgctggaa

SEQ ID NO: 100525 - DNA, 25 bp, Canis familiaris
gcttatcggtcattgtatctgctgg

SEQ ID NO: 100526 - DNA, 25 bp, Canis familiaris
gcttcttttcactaattgctgggct

SEQ ID NO: 100527 - DNA, 25 bp, Canis familiaris
gcttcttattcagttttcgtgtgga

SEQ ID NO: 100528 - DNA, 25 bp, Canis familiaris
gcttctctttctggtttcagtgaca

SEQ ID NO: 100529 - DNA, 25 bp, Canis familiaris
gcttctgaattggatgtttctggac

SEQ ID NO: 100530 - DNA, 25 bp, Canis familiaris
gcttcaaggtgtagatctcctagcc

SEQ ID NO: 100531 - DNA, 25 bp, Canis familiaris
gcttcatgagggtagttcctcgtgt

SEQ ID NO: 100532 - DNA, 25 bp, Canis familiaris
gcttcaagtggcaggccctgtgtgg

SEQ ID NO: 100533 - DNA, 25 bp, Canis familiaris
gcattacagggcccctagtggggaa

SEQ ID NO: 100534 - DNA, 25 bp, Canis familiaris
gcttccagatgttccactcagagga

SEQ ID NO: 100535 - DNA, 25 bp, Canis familiaris
gcatttccttctccagccagaagga

SEQ ID NO: 100536 - DNA, 25 bp, Canis familiaris
gcttctgctttgccctgaaatagcg

SEQ ID NO: 100537 - DNA, 25 bp, Canis familiaris
gcattcgttatacggaagatgatga

SEQ ID NO: 100538 - DNA, 25 bp, Canis familiaris
gcttcgtgtgaacatgggagtgtag

SEQ ID NO: 100539 - DNA, 25 bp, Canis familiaris
gcttcgtggcaatctgagtgttgtg

SEQ ID NO: 100540 - DNA, 25 bp, Canis familiaris
gcttctcggaatgcatgttgttcag

SEQ ID NO: 100541 - DNA, 25 bp, Canis familiaris
gcttgctcagagtgtctatttgcta

SEQ ID NO: 100542 - DNA, 25 bp, Canis familiaris
gcttctctggaatctcattctcgac

SEQ ID NO: 100543 - DNA, 25 bp, Canis familiaris
gcttcttggacacctggacatggac

SEQ ID NO: 100544 - DNA, 25 bp, Canis familiaris
gcttcggtgaacttgtgcacgtgac

SEQ ID NO: 100545 - DNA, 25 bp, Canis familiaris
gcttgagttcaagttgtctcttaca

SEQ ID NO: 100546 - DNA, 25 bp, Canis familiaris
gcttggtctgtggccttcattaaaa

SEQ ID NO: 100547 - DNA, 25 bp, Canis familiaris
gcttcgtggaagcttattcaagcaa

SEQ ID NO: 100548 - DNA, 25 bp, Canis familiaris
gcttcttgaagacctatgtaaagaa

SEQ ID NO: 100549 - DNA, 25 bp, Canis familiaris
gcttctgtgaaacctttcctggaac

SEQ ID NO: 100550 - DNA, 25 bp, Canis familiaris
gcttctgtgaaaccagtacagatgg

SEQ ID NO: 100551 - DNA, 25 bp, Canis familiaris
gcttcctagaggcagtacagactat

SEQ ID NO: 100552 - DNA, 25 bp, Canis familiaris
gcttgccatctaggtttgggatttg

SEQ ID NO: 100553 - DNA, 25 bp, Canis familiaris
gcttgccatcttggttggcagaatc

SEQ ID NO: 100554 - DNA, 25 bp, Canis familiaris
gcatcttttttttgggcaatcctgg

SEQ ID NO: 100555 - DNA, 25 bp, Canis familiaris
gcatatttatttttggcccttggag

SEQ ID NO: 100556 - DNA, 25 bp, Canis familiaris
gcaaagttttttgcctttggtgtca

SEQ ID NO: 100557 - DNA, 25 bp, Canis familiaris
gcaaagttaatgcttttttggtgac

SEQ ID NO: 100558 - DNA, 25 bp, Canis familiaris
gcaagactctcgggtacgttttggt

SEQ ID NO: 100559 - DNA, 25 bp, Canis familiaris
gcaggactccgataataggactcag

SEQ ID NO: 100560 - DNA, 25 bp, Canis familiaris
gcatgtttgcaccaaccaaaacctg

SEQ ID NO: 100561 - DNA, 25 bp, Canis familiaris
gcttcctgcacaaattctaaacctg

SEQ ID NO: 100562 - DNA, 25 bp, Canis familiaris
gcttcctcaaaaatggaaaagggca

SEQ ID NO: 100563 - DNA, 25 bp, Canis familiaris
gcattaccaacaaataaataagaaa

SEQ ID NO: 100564 - DNA, 25 bp, Canis familiaris
gcttatgctttctgtcaaataaata

SEQ ID NO: 100565 - DNA, 25 bp, Canis familiaris
gcttgtgctctgtcaagtaaataaa

SEQ ID NO: 100566 - DNA, 25 bp, Canis familiaris
gcttgctcctttttgaatctacaga

SEQ ID NO: 100567 - DNA, 25 bp, Canis familiaris
gcttgctgacttcttaactgtcttc

SEQ ID NO: 100568 - DNA, 25 bp, Canis familiaris
gcttctgatttcggtataggttctt

SEQ ID NO: 100569 - DNA, 25 bp, Canis familiaris
gcttatatttcctttcaagttctgt

SEQ ID NO: 100570 - DNA, 25 bp, Canis familiaris
gcttacatttccattccattattat

SEQ ID NO: 100571 - DNA, 25 bp, Canis familiaris
gcttcaattaccagtgaatcatatt

SEQ ID NO: 100572 - DNA, 25 bp, Canis familiaris
gcttacatgttctgggttcattctt

SEQ ID NO: 100573 - DNA, 25 bp, Canis familiaris
gcttatcgtgtccgtgttaattctc

SEQ ID NO: 100574 - DNA, 25 bp, Canis familiaris
gcttcttggtctgagcttcatttcc

SEQ ID NO: 100575 - DNA, 25 bp, Canis familiaris
gcttctatggacttagtcttcttca

SEQ ID NO: 100576 - DNA, 25 bp, Canis familiaris
gcttcaaggaagacccttgctcgcc

SEQ ID NO: 100577 - DNA, 25 bp, Canis familiaris
gcttacagctataggcccagagcct

SEQ ID NO: 100578 - DNA, 25 bp, Canis familiaris
gcttatgagcaagtggccaaggccc

SEQ ID NO: 100579 - DNA, 25 bp, Canis familiaris
gcttcagaaagctccaaggacctgg

SEQ ID NO: 100580 - DNA, 25 bp, Canis familiaris
gcttcagaaacaggccgaggagtca

SEQ ID NO: 100581 - DNA, 25 bp, Canis familiaris
gcattggtccaagcatcgagtagtc

SEQ ID NO: 100582 - DNA, 25 bp, Canis familiaris
gcttgtttgcaagaccagaagagct

SEQ ID NO: 100583 - DNA, 25 bp, Canis familiaris
gcttgctcccaatacctgaggagtc

SEQ ID NO: 100584 - DNA, 25 bp, Canis familiaris
gcttcccccagcgaggctgggagtg

SEQ ID NO: 100585 - DNA, 25 bp, Canis familiaris
gcttcgacagcgacgtgggggagta

SEQ ID NO: 100586 - DNA, 25 bp, Canis familiaris
gcttcgacagcgacgtgggggagta

SEQ ID NO: 100587 - DNA, 25 bp, Canis familiaris
gcttcgacagcgacgtgggggagta

SEQ ID NO: 100588 - DNA, 25 bp, Canis familiaris
gcatgtctaagtacgcacggccggt

SEQ ID NO: 100589 - DNA, 25 bp, Canis familiaris
gcttgcctagcaagcgcaaggccct

SEQ ID NO: 100590 - DNA, 25 bp, Canis familiaris
gcttgcatgtggtggaacagtcctt

SEQ ID NO: 100591 - DNA, 25 bp, Canis familiaris
gcttgtgttgtgggcaacattcctc

SEQ ID NO: 100592 - DNA, 25 bp, Canis familiaris
gcttggattgttggaattttcactt

SEQ ID NO: 100593 - DNA, 25 bp, Canis familiaris
gcatcttcattgttaaaccttcact

SEQ ID NO: 100594 - DNA, 25 bp, Canis familiaris
gcagctctttaataacctgtcccta

SEQ ID NO: 100595 - DNA, 25 bp, Canis familiaris
gcacttcttcaagcaactcggtact

SEQ ID NO: 100596 - DNA, 25 bp, Canis familiaris
gcatttactcgggcagactcaggaa

SEQ ID NO: 100597 - DNA, 25 bp, Canis familiaris
gcttaatctatgtacagaggaaaat

SEQ ID NO: 100598 - DNA, 25 bp, Canis familiaris
gcttgaacttgaccagtgtgaaaaa

SEQ ID NO: 100599 - DNA, 25 bp, Canis familiaris
gcattacctgtatgaagctgaaaaa

SEQ ID NO: 100600 - DNA, 25 bp, Canis familiaris
gcatctctcactcagaagggtgaaa

SEQ ID NO: 100601 - DNA, 25 bp, Canis familiaris
gcttctctcaggcgcaggagtacag

SEQ ID NO: 100602 - DNA, 25 bp, Canis familiaris
gcttccatcatactctcaggaggga

SEQ ID NO: 100603 - DNA, 25 bp, Canis familiaris
gcttcatatccagccaggagggagg

SEQ ID NO: 100604 - DNA, 25 bp, Canis familiaris
gcttgtctcagagcgggactggagg

SEQ ID NO: 100605 - DNA, 25 bp, Canis familiaris
gcttgagccagagcttgagaccggc

SEQ ID NO: 100606 - DNA, 25 bp, Canis familiaris
gcttccgggagttgaaccaggttgc

SEQ ID NO: 100607 - DNA, 25 bp, Canis familiaris
gcttccggtgcagatggaccaagtg

SEQ ID NO: 100608 - DNA, 25 bp, Canis familiaris
gcatacacggtgtcgaggaccgggc

SEQ ID NO: 100609 - DNA, 25 bp, Canis familiaris
gcatagacctgaccaaggtgccagc

SEQ ID NO: 100610 - DNA, 25 bp, Canis familiaris
gcatctgggtagtcatagtatccac

SEQ ID NO: 100611 - DNA, 25 bp, Canis familiaris
gcattggcgatttcattggtctcat

SEQ ID NO: 100612 - DNA, 25 bp, Canis familiaris
gcttggagttcattcatgtgccgct

SEQ ID NO: 100613 - DNA, 25 bp, Canis familiaris
gcttgtagtctctaccattctcata

SEQ ID NO: 100614 - DNA, 25 bp, Canis familiaris
gcatttagcaccatgcctagcacat

SEQ ID NO: 100615 - DNA, 25 bp, Canis familiaris
gcattctggcccaatgccaagagat

SEQ ID NO: 100616 - DNA, 25 bp, Canis familiaris
gcattccgctgtggctacaaagggt

SEQ ID NO: 100617 - DNA, 25 bp, Canis familiaris
gcttcaatgtgtggcttcaaaacta

SEQ ID NO: 100618 - DNA, 25 bp, Canis familiaris
gcatctcaatgctttcatctgcaaa

SEQ ID NO: 100619 - DNA, 25 bp, Canis familiaris
gcatcaatatcagactccaaacact

SEQ ID NO: 100620 - DNA, 25 bp, Canis familiaris
gcatcaaaattgtcaccaagaccca

SEQ ID NO: 100621 - DNA, 25 bp, Canis familiaris
gcatggaaaagttcccaccctgact

SEQ ID NO: 100622 - DNA, 25 bp, Canis familiaris
gcatgaaacacagacttcacccgtc

SEQ ID NO: 100623 - DNA, 25 bp, Canis familiaris
gcataaatcacctttgtagcccagt

SEQ ID NO: 100624 - DNA, 25 bp, Canis familiaris
gcataagtcctcattgctaccagag

SEQ ID NO: 100625 - DNA, 25 bp, Canis familiaris
gcatttgcccctattgacacatgaa

SEQ ID NO: 100626 - DNA, 25 bp, Canis familiaris
gcattctcttccatcttaccaagag

SEQ ID NO: 100627 - DNA, 25 bp, Canis familiaris
gcttctttctcgattggccaatgag

SEQ ID NO: 100628 - DNA, 25 bp, Canis familiaris
gcttctgttgtgactttgagccacg

SEQ ID NO: 100629 - DNA, 25 bp, Canis familiaris
gcttcaattatgcttctgcagccct

SEQ ID NO: 100630 - DNA, 25 bp, Canis familiaris
gcttgtcacatctctgatgctgcac

SEQ ID NO: 100631 - DNA, 25 bp, Canis familiaris
gcttgatgaactctcatgcacacac

SEQ ID NO: 100632 - DNA, 25 bp, Canis familiaris
gcttgtgaatccgctcaataaaagt

SEQ ID NO: 100633 - DNA, 25 bp, Canis familiaris
gcattgtatcaccctctttaaaatt

SEQ ID NO: 100634 - DNA, 25 bp, Canis familiaris
gcttgtataccacttagctactata

SEQ ID NO: 100635 - DNA, 25 bp, Canis familiaris
gcattgttttgacaactattaggaa

SEQ ID NO: 100636 - DNA, 25 bp, Canis familiaris
gcttctttaggcccccaataggcaa

SEQ ID NO: 100637 - DNA, 25 bp, Canis familiaris
gcttctttagttgacagcagtacgc

SEQ ID NO: 100638 - DNA, 25 bp, Canis familiaris
gcttgctttcgtatacatcaggcct

SEQ ID NO: 100639 - DNA, 25 bp, Canis familiaris
gcttctttcatgtcatataataatg

SEQ ID NO: 100640 - DNA, 25 bp, Canis familiaris
gcttcttctatgtttctactatgta

SEQ ID NO: 100641 - DNA, 25 bp, Canis familiaris
gcttcagctttgtttttgctcagta

SEQ ID NO: 100642 - DNA, 25 bp, Canis familiaris
gcttccttatacattcttactacat

SEQ ID NO: 100643 - DNA, 25 bp, Canis familiaris
gcttcacaaaaggtctatatactaa

SEQ ID NO: 100644 - DNA, 25 bp, Canis familiaris
gcttccaaacaggttacttctctga

SEQ ID NO: 100645 - DNA, 25 bp, Canis familiaris
gcttaacaacttgtgctcttctgcc

SEQ ID NO: 100646 - DNA, 25 bp, Canis familiaris
gcttaaacatcttgactgctttcca

SEQ ID NO: 100647 - DNA, 25 bp, Canis familiaris
gcttcattaccttgctctttgatac

SEQ ID NO: 100648 - DNA, 25 bp, Canis familiaris
gcttcttatacttctcctatgagag

SEQ ID NO: 100649 - DNA, 25 bp, Canis familiaris
gcttctataactctctccatgtaac

SEQ ID NO: 100650 - DNA, 25 bp, Canis familiaris
gcttcaacaacatctcttcttaatc

SEQ ID NO: 100651 - DNA, 25 bp, Canis familiaris
gcttctacagacactgctttgtaca

SEQ ID NO: 100652 - DNA, 25 bp, Canis familiaris
gcttcagaatacagctgtttgtcct

SEQ ID NO: 100653 - DNA, 25 bp, Canis familiaris
gcttgaccatacacatttcatccac

SEQ ID NO: 100654 - DNA, 25 bp, Canis familiaris
gcttctacatttctgttcatgcaac

SEQ ID NO: 100655 - DNA, 25 bp, Canis familiaris
gcatcctccctaagtactagcaatc

SEQ ID NO: 100656 - DNA, 25 bp, Canis familiaris
gcttctcacccaaatatctcagagt

SEQ ID NO: 100657 - DNA, 25 bp, Canis familiaris
gcttccaaccactattctgcaagtg

SEQ ID NO: 100658 - DNA, 25 bp, Canis familiaris
gcttcagcaacctattattatcagt

SEQ ID NO: 100659 - DNA, 25 bp, Canis familiaris
gcttctaatcactatatcactactt

SEQ ID NO: 100660 - DNA, 25 bp, Canis familiaris
gcttcaagattcccaagcatcctca

SEQ ID NO: 100661 - DNA, 25 bp, Canis familiaris
gcattcaagttgagctacctagcaa

SEQ ID NO: 100662 - DNA, 25 bp, Canis familiaris
gcattccgttgcagctgagcgatat

SEQ ID NO: 100663 - DNA, 25 bp, Canis familiaris
gcttcgctgcattgctgagcgagcc

SEQ ID NO: 100664 - DNA, 25 bp, Canis familiaris
gcttcatctccactgacagtgtctg

SEQ ID NO: 100665 - DNA, 25 bp, Canis familiaris
gcttcatcttcatgaccgttgtgta

SEQ ID NO: 100666 - DNA, 25 bp, Canis familiaris
gcttgtttcccagtcaatgctgagt

SEQ ID NO: 100667 - DNA, 25 bp, Canis familiaris
gcattgtctttgccagctggagtgc

SEQ ID NO: 100668 - DNA, 25 bp, Canis familiaris
gcttcgctcctggcacaggatggag

SEQ ID NO: 100669 - DNA, 25 bp, Canis familiaris
gcttcagtcctgctgagagattggg

SEQ ID NO: 100670 - DNA, 25 bp, Canis familiaris
gcttgcgtgtctctgggatgaggtg

SEQ ID NO: 100671 - DNA, 25 bp, Canis familiaris
gcttgccgatgtctggcgagtaatg

SEQ ID NO: 100672 - DNA, 25 bp, Canis familiaris
gcatttctggctttgacgagtacac

SEQ ID NO: 100673 - DNA, 25 bp, Canis familiaris
gcataccttgcctgactagtgaatt

SEQ ID NO: 100674 - DNA, 25 bp, Canis familiaris
gcataccttgttcgattggagaatt

SEQ ID NO: 100675 - DNA, 25 bp, Canis familiaris
gcattccggcttctagtgagggagc

SEQ ID NO: 100676 - DNA, 25 bp, Canis familiaris
gcttccgccttccaaggagccgtca

SEQ ID NO: 100677 - DNA, 25 bp, Canis familiaris
gcttgactccctgggaggaccagcc

SEQ ID NO: 100678 - DNA, 25 bp, Canis familiaris
gcttgaaggccgaggagaccaggat

SEQ ID NO: 100679 - DNA, 25 bp, Canis familiaris
gcattgtgggcttaggcgaaacggt

SEQ ID NO: 100680 - DNA, 25 bp, Canis familiaris
gcttggaggcccatcaacaatcggc

SEQ ID NO: 100681 - DNA, 25 bp, Canis familiaris
gcttgccaacctttcagcaaaatgt

SEQ ID NO: 100682 - DNA, 25 bp, Canis familiaris
gcttctccacacattcataaagtga

SEQ ID NO: 100683 - DNA, 25 bp, Canis familiaris
gcttcagccatcttttaaaaagaag

SEQ ID NO: 100684 - DNA, 25 bp, Canis familiaris
gcttcatgccactgaatacgttgaa

SEQ ID NO: 100685 - DNA, 25 bp, Canis familiaris
gcatagcataactcaacaggcttga

SEQ ID NO: 100686 - DNA, 25 bp, Canis familiaris
gcatatataagcttcacaaaggtac

SEQ ID NO: 100687 - DNA, 25 bp, Canis familiaris
gcatttatcagatcaaaaccaaccc

SEQ ID NO: 100688 - DNA, 25 bp, Canis familiaris
gcatttatcagatcaaaaccaaccc

SEQ ID NO: 100689 - DNA, 25 bp, Canis familiaris
gcttccacagcgtaaatacacccac

SEQ ID NO: 100690 - DNA, 25 bp, Canis familiaris
gcttgcttcagcttaaacatcaccc

SEQ ID NO: 100691 - DNA, 25 bp, Canis familiaris
gcttctctgcattaaacacacacac

SEQ ID NO: 100692 - DNA, 25 bp, Canis familiaris
gcttctctggaaaactatgctcctg

SEQ ID NO: 100693 - DNA, 25 bp, Canis familiaris
gcttcctggaatcattgcagtgcct

SEQ ID NO: 100694 - DNA, 25 bp, Canis familiaris
gcttcacagccaaggactgggcgct

SEQ ID NO: 100695 - DNA, 25 bp, Canis familiaris
gcatcagcaagcaagcagggtacga

SEQ ID NO: 100696 - DNA, 25 bp, Canis familiaris
gcatatgcacacaagctaggtaatg

SEQ ID NO: 100697 - DNA, 25 bp, Canis familiaris
gcttgcagaacctacgatggtgtcg

SEQ ID NO: 100698 - DNA, 25 bp, Canis familiaris
gcttcgccaactacatcatgcggtt

SEQ ID NO: 100699 - DNA, 25 bp, Canis familiaris
gcttcgctgaatatatacaggtatg

SEQ ID NO: 100700 - DNA, 25 bp, Canis familiaris
gcttctggagcttgtaacgagtaga

SEQ ID NO: 100701 - DNA, 25 bp, Canis familiaris
gcttcagggatgtccagatcgggga

SEQ ID NO: 100702 - DNA, 25 bp, Canis familiaris
gcttcagggatgtccagatcggcga

SEQ ID NO: 100703 - DNA, 25 bp, Canis familiaris
gcttgaggggtctgcacagtgtccc

SEQ ID NO: 100704 - DNA, 25 bp, Canis familiaris
gcttgtggagttctggaggactccc

SEQ ID NO: 100705 - DNA, 25 bp, Canis familiaris
gcttggctcgggctggaggattgac

SEQ ID NO: 100706 - DNA, 25 bp, Canis familiaris
gcaatcccgggacctgtcgattgcc

SEQ ID NO: 100707 - DNA, 25 bp, Canis familiaris
gcaacccaaggcactggccttgatg

SEQ ID NO: 100708 - DNA, 25 bp, Canis familiaris
gcatcatcccaaactttgaactctg

SEQ ID NO: 100709 - DNA, 25 bp, Canis familiaris
gcttgtccaatcgtctggaacctac

SEQ ID NO: 100710 - DNA, 25 bp, Canis familiaris
gcttgagaacccgaggcaactcatt

SEQ ID NO: 100711 - DNA, 25 bp, Canis familiaris
gcttgagtcccagcaggaagctctg

SEQ ID NO: 100712 - DNA, 25 bp, Canis familiaris
gcttgaccccagctgagcaagcgag

SEQ ID NO: 100713 - DNA, 25 bp, Canis familiaris
gcttcaccaccacagctgagaggga

SEQ ID NO: 100714 - DNA, 25 bp, Canis familiaris
gcataaacccaccctgaaagcagca

SEQ ID NO: 100715 - DNA, 25 bp, Canis familiaris
gcattttacaaccctgaaggtgctt

SEQ ID NO: 100716 - DNA, 25 bp, Canis familiaris
gcattttccaccatcgtatgttact

SEQ ID NO: 100717 - DNA, 25 bp, Canis familiaris
gcttcttccactagcttttgtgtag

SEQ ID NO: 100718 - DNA, 25 bp, Canis familiaris
gcttcttatcctctggttggttggc

SEQ ID NO: 100719 - DNA, 25 bp, Canis familiaris
gcattttctactctttgatctttcc

SEQ ID NO: 100720 - DNA, 25 bp, Canis familiaris
gcttcttcttttaattgatattctc

SEQ ID NO: 100721 - DNA, 25 bp, Canis familiaris
gcattgctttgctttttttttcttc

SEQ ID NO: 100722 - DNA, 25 bp, Canis familiaris
gcttctcttgcctaagtattctttt

SEQ ID NO: 100723 - DNA, 25 bp, Canis familiaris
gcttccatgttgttaattttcttta

SEQ ID NO: 100724 - DNA, 25 bp, Canis familiaris
gcattcccttgctgggttgtcattc

SEQ ID NO: 100725 - DNA, 25 bp, Canis familiaris
gcttccacctgatggtgtagagctc

SEQ ID NO: 100726 - DNA, 25 bp, Canis familiaris
gcttctgaccatttgaggtacactg

SEQ ID NO: 100727 - DNA, 25 bp, Canis familiaris
gcttctgagcagttggaggccgttg

SEQ ID NO: 100728 - DNA, 25 bp, Canis familiaris
gcttctggctgcttgcagagctgga

SEQ ID NO: 100729 - DNA, 25 bp, Canis familiaris
gcatcctactgcctgcagtcttaac

SEQ ID NO: 100730 - DNA, 25 bp, Canis familiaris
gcatccatacatgttttgctaacta

SEQ ID NO: 100731 - DNA, 25 bp, Canis familiaris
gcattctcatacatcttggctaaat

SEQ ID NO: 100732 - DNA, 25 bp, Canis familiaris
gcattcagcttcaaggctggtgaag

SEQ ID NO: 100733 - DNA, 25 bp, Canis familiaris
gcttgctgctcttggggttgaagtc

SEQ ID NO: 100734 - DNA, 25 bp, Canis familiaris
gcttgtttcaggtgtgatgtaggca

SEQ ID NO: 100735 - DNA, 25 bp, Canis familiaris
gcttgttacgtggattatgttggag

SEQ ID NO: 100736 - DNA, 25 bp, Canis familiaris
gcttggtagcggttttgctctgaga

SEQ ID NO: 100737 - DNA, 25 bp, Canis familiaris
gcttggcttgggctgcatatgcatt

SEQ ID NO: 100738 - DNA, 25 bp, Canis familiaris
gcatagtgttggtcatgaattctta

SEQ ID NO: 100739 - DNA, 25 bp, Canis familiaris
gcattatctatgcagcatggggttt

SEQ ID NO: 100740 - DNA, 25 bp, Canis familiaris
gcttccaatctgatgggcatgtttg

SEQ ID NO: 100741 - DNA, 25 bp, Canis familiaris
gcttctcaggtgagtcctgtccagc

SEQ ID NO: 100742 - DNA, 25 bp, Canis familiaris
gcttctcgcgtgatgatccacatgg

SEQ ID NO: 100743 - DNA, 25 bp, Canis familiaris
gcttgctctggtatgaacatgtagt

SEQ ID NO: 100744 - DNA, 25 bp, Canis familiaris
gcttctctggtatgacatttagttt

SEQ ID NO: 100745 - DNA, 25 bp, Canis familiaris
gcttgttcatggtgcctttatttta

SEQ ID NO: 100746 - DNA, 25 bp, Canis familiaris
gcttggttgtttccttgctttggaa

SEQ ID NO: 100747 - DNA, 25 bp, Canis familiaris
gcttggtcttgaaatattgtactgt

SEQ ID NO: 100748 - DNA, 25 bp, Canis familiaris
gcttgagtttattatgcctaaccat

SEQ ID NO: 100749 - DNA, 25 bp, Canis familiaris
gcttgtgtggtttgacctggacctc

SEQ ID NO: 100750 - DNA, 25 bp, Canis familiaris
gttggctgtggggagctcggaaaca

SEQ ID NO: 100751 - DNA, 25 bp, Canis familiaris
gcttggtggggggcaggggaaactg

SEQ ID NO: 100752 - DNA, 25 bp, Canis familiaris
gcttgtcggtgtcccatgtgggaaa

SEQ ID NO: 100753 - DNA, 25 bp, Canis familiaris
gcttgggaggtatctctgtgcagca

SEQ ID NO: 100754 - DNA, 25 bp, Canis familiaris
gcttcgaggttagccttgcaagcac

SEQ ID NO: 100755 - DNA, 25 bp, Canis familiaris
gcttcaggggaacccttggcacagc

SEQ ID NO: 100756 - DNA, 25 bp, Canis familiaris
gcttcagggtagccctggtggctca

SEQ ID NO: 100757 - DNA, 25 bp, Canis familiaris
gcttgcagtggttctcctgctaaca

SEQ ID NO: 100758 - DNA, 25 bp, Canis familiaris
gcttggctgggatatgctgctcaac

SEQ ID NO: 100759 - DNA, 25 bp, Canis familiaris
gcttggatgcgggagcagcatgctg

SEQ ID NO: 100760 - DNA, 25 bp, Canis familiaris
gcttggatgggcggagattcttgag

SEQ ID NO: 100761 - DNA, 25 bp, Canis familiaris
gcatcgtggggaggaacttcggtag

SEQ ID NO: 100762 - DNA, 25 bp, Canis familiaris
gcatgttggggtaaccttcaccttt

SEQ ID NO: 100763 - DNA, 25 bp, Canis familiaris
gcatttggggaatttctctaccttc

SEQ ID NO: 100764 - DNA, 25 bp, Canis familiaris
gcattttttgactttctaacacaac

SEQ ID NO: 100765 - DNA, 25 bp, Canis familiaris
gcataataactggtttctcacccat

SEQ ID NO: 100766 - DNA, 25 bp, Canis familiaris
gcatatatatcatcctgttaaccct

SEQ ID NO: 100767 - DNA, 25 bp, Canis familiaris
gcttgcttgcaaggtttgtaggccg

SEQ ID NO: 100768 - DNA, 25 bp, Canis familiaris
gcttctgtgcaattttgtgtagatg

SEQ ID NO: 100769 - DNA, 25 bp, Canis familiaris
gcttctgatgtgcattttgctacca

SEQ ID NO: 100770 - DNA, 25 bp, Canis familiaris
gcttctgtcctaatgtttaccatac

SEQ ID NO: 100771 - DNA, 25 bp, Canis familiaris
gcattttcagcatttttttcccaga

SEQ ID NO: 100772 - DNA, 25 bp, Canis familiaris
gcatttgtcaattgtgtaacccgag

SEQ ID NO: 100773 - DNA, 25 bp, Canis familiaris
gcttggtgactctagataacctcgg

SEQ ID NO: 100774 - DNA, 25 bp, Canis familiaris
gcttcctcctctataaaacgtgtgg

SEQ ID NO: 100775 - DNA, 25 bp, Canis familiaris
gcttctcccgaaaccaaggtgttgg

SEQ ID NO: 100776 - DNA, 25 bp, Canis familiaris
gcttccccgaaaggcgaaggatggg

SEQ ID NO: 100777 - DNA, 25 bp, Canis familiaris
gcttcctcagctggaaaggaggggg

SEQ ID NO: 100778 - DNA, 25 bp, Canis familiaris
gcttcctggggatagtggtctgtcc

SEQ ID NO: 100779 - DNA, 25 bp, Canis familiaris
gcttcctagaggttttgccttgtgc

SEQ ID NO: 100780 - DNA, 25 bp, Canis familiaris
gcatctttaacgttaacctgcgtga

SEQ ID NO: 100781 - DNA, 25 bp, Canis familiaris
gcatttgaagccactgtacctgttg

SEQ ID NO: 100782 - DNA, 25 bp, Canis familiaris
gcagcttaatcctgtttacaatgtg

SEQ ID NO: 100783 - DNA, 25 bp, Canis familiaris
gcagccatataaacgattttctatt

SEQ ID NO: 100784 - DNA, 25 bp, Canis familiaris
gcaccttagaatctcttttctcttt

SEQ ID NO: 100785 - DNA, 25 bp, Canis familiaris
gcatccccaaataattctttatctt

SEQ ID NO: 100786 - DNA, 25 bp, Canis familiaris
gcttctggcacttaattcttttcat

SEQ ID NO: 100787 - DNA, 25 bp, Canis familiaris
gcattatggctgcatttttgtcttg

SEQ ID NO: 100788 - DNA, 25 bp, Canis familiaris
gcatttgcgtttttctcactttgct

SEQ ID NO: 100789 - DNA, 25 bp, Canis familiaris
gcattcctcttgagtctacattctc

SEQ ID NO: 100790 - DNA, 25 bp, Canis familiaris
gcattcatccttgtctcataaggcc

SEQ ID NO: 100791 - DNA, 25 bp, Canis familiaris
gcatcttccgctgtttgacaatggc

SEQ ID NO: 100792 - DNA, 25 bp, Canis familiaris
gcatctacgccttcattattcaagc

SEQ ID NO: 100793 - DNA, 25 bp, Canis familiaris
gcatcaattcttgcaataccacacc

SEQ ID NO: 100794 - DNA, 25 bp, Canis familiaris
gcatattcttatccaaagcattcac

SEQ ID NO: 100795 - DNA, 25 bp, Canis familiaris
gcataccttgtagatatctctcatc

SEQ ID NO: 100796 - DNA, 25 bp, Canis familiaris
gcatccgcctggataatgcttccgc

SEQ ID NO: 100797 - DNA, 25 bp, Canis familiaris
gcttgcctctgtatatagtgtgagc

SEQ ID NO: 100798 - DNA, 25 bp, Canis familiaris
gcttcccatgctctgtatgtcagac

SEQ ID NO: 100799 - DNA, 25 bp, Canis familiaris
gcttctccgatactatatgctcaac

SEQ ID NO: 100800 - DNA, 25 bp, Canis familiaris
gcttcctcgaaaatacatccaggcc

SEQ ID NO: 100801 - DNA, 25 bp, Canis familiaris
gcttcctgcggcaggagaccggcac

SEQ ID NO: 100802 - DNA, 25 bp, Canis familiaris
gcttcgtgggcaagcgcagaggcgg

SEQ ID NO: 100803 - DNA, 25 bp, Canis familiaris
gcttctggtggtagagaggacaggc

SEQ ID NO: 100804 - DNA, 25 bp, Canis familiaris
gcttctggctgacgacggtgaggcc

SEQ ID NO: 100805 - DNA, 25 bp, Canis familiaris
gcttgctccgaaatatgggagggct

SEQ ID NO: 100806 - DNA, 25 bp, Canis familiaris
gcttgtttgcatgtatgtgtgagtg

SEQ ID NO: 100807 - DNA, 25 bp, Canis familiaris
gcttgtttagcttttgttgttgttg

SEQ ID NO: 100808 - DNA, 25 bp, Canis familiaris
gcttgtaaaggatttgctattctgt

SEQ ID NO: 100809 - DNA, 25 bp, Canis familiaris
gcttgtaacatgtatacttggtctt

SEQ ID NO: 100810 - DNA, 25 bp, Canis familiaris
gcatttgcacagtataacttggacc

SEQ ID NO: 100811 - DNA, 25 bp, Canis familiaris
gcatcctgaaattcaacctgacctc

SEQ ID NO: 100812 - DNA, 25 bp, Canis familiaris
gcattctaatgttgaacgcttccct

SEQ ID NO: 100813 - DNA, 25 bp, Canis familiaris
gcattcattaattcaagtttccctc

SEQ ID NO: 100814 - DNA, 25 bp, Canis familiaris
gcattgctctcaatgacaactttgt

SEQ ID NO: 100815 - DNA, 25 bp, Canis familiaris
gcattgctctcaatgacaactttgt

SEQ ID NO: 100816 - DNA, 25 bp, Canis familiaris
gcattctgtaggtaatctctttgag

SEQ ID NO: 100817 - DNA, 25 bp, Canis familiaris
gcttggtgtagaccattcttgcgag

SEQ ID NO: 100818 - DNA, 25 bp, Canis familiaris
gcattgtggtgtacctggttccagt

SEQ ID NO: 100819 - DNA, 25 bp, Canis familiaris
gcttctgggttgggcaaagccagtc

SEQ ID NO: 100820 - DNA, 25 bp, Canis familiaris
gcatccgggttctgaaacacatgtc

SEQ ID NO: 100821 - DNA, 25 bp, Canis familiaris
gcatactgggaccattgcaagcaaa

SEQ ID NO: 100822 - DNA, 25 bp, Canis familiaris
gcttgcgggatggctacacaggcaa

SEQ ID NO: 100823 - DNA, 25 bp, Canis familiaris
gcattttggatgccaagccaccaaa

SEQ ID NO: 100824 - DNA, 25 bp, Canis familiaris
gaatcagggtactccaaccatactg

SEQ ID NO: 100825 - DNA, 25 bp, Canis familiaris
gtacgggctcccggaacaatacgtg

SEQ ID NO: 100826 - DNA, 25 bp, Canis familiaris
gcatcgggaccaccggaagcaaacg

SEQ ID NO: 100827 - DNA, 25 bp, Canis familiaris
gcatcgggcagcagcagcaaacaga

SEQ ID NO: 100828 - DNA, 25 bp, Canis familiaris
gcatctggagctgaaggaccaaggc

SEQ ID NO: 100829 - DNA, 25 bp, Canis familiaris
gcatctggccagaaagcctccaata

SEQ ID NO: 100830 - DNA, 25 bp, Canis familiaris
gcttgggctgaaggacatggcacca

SEQ ID NO: 100831 - DNA, 25 bp, Canis familiaris
gcttggggtcatggtgagcacacca

SEQ ID NO: 100832 - DNA, 25 bp, Canis familiaris
gcttgtgggacagtgggagatgcag

SEQ ID NO: 100833 - DNA, 25 bp, Canis familiaris
gcttgtgtgtgagtgtgcagggtac

SEQ ID NO: 100834 - DNA, 25 bp, Canis familiaris
gcttgctggccaggagcaggagcca

SEQ ID NO: 100835 - DNA, 25 bp, Canis familiaris
gcttctgcccctagagggccaatgc

SEQ ID NO: 100836 - DNA, 25 bp, Canis familiaris
gcttgccaccactatagcaggcgga

SEQ ID NO: 100837 - DNA, 25 bp, Canis familiaris
gcttcgacaagcctatcaagcaggc

SEQ ID NO: 100838 - DNA, 25 bp, Canis familiaris
gcttccaaagcaccatgacatagac

SEQ ID NO: 100839 - DNA, 25 bp, Canis familiaris
gcttccatacagctctgcagagcaa

SEQ ID NO: 100840 - DNA, 25 bp, Canis familiaris
gcttcccacaggctgtggcaaggtc

SEQ ID NO: 100841 - DNA, 25 bp, Canis familiaris
gcttcccaagagatgtgccaggggc

SEQ ID NO: 100842 - DNA, 25 bp, Canis familiaris
gcattcccaggtaggccaaggtgtc

SEQ ID NO: 100843 - DNA, 25 bp, Canis familiaris
gcattaccggtcgatgcaacgagtg

SEQ ID NO: 100844 - DNA, 25 bp, Canis familiaris
gcataagcattggtttctaaggtga

SEQ ID NO: 100845 - DNA, 25 bp, Canis familiaris
gcattccgtgtgtttgataaggatg

SEQ ID NO: 100846 - DNA, 25 bp, Canis familiaris
gcattcctgagaaattgaaagtggc

SEQ ID NO: 100847 - DNA, 25 bp, Canis familiaris
gcttcctgcaaccatttagttatcc

SEQ ID NO: 100848 - DNA, 25 bp, Canis familiaris
gcttgcctgaagctttggccgagca

SEQ ID NO: 100849 - DNA, 25 bp, Canis familiaris
gcttcctaatggactagattccagc

SEQ ID NO: 100850 - DNA, 25 bp, Canis familiaris
gcttgcagtactagatcttgattta

SEQ ID NO: 100851 - DNA, 25 bp, Canis familiaris
gcttgcagctggtatagaggattct

SEQ ID NO: 100852 - DNA, 25 bp, Canis familiaris
gcttgaggggaaggctgattttcag

SEQ ID NO: 100853 - DNA, 25 bp, Canis familiaris
gcttgaggtgggacggtttgatcaa

SEQ ID NO: 100854 - DNA, 25 bp, Canis familiaris
gcttgtggcgaagatggttttcaca

SEQ ID NO: 100855 - DNA, 25 bp, Canis familiaris
gcttgtatggaattatctgctttta

SEQ ID NO: 100856 - DNA, 25 bp, Canis familiaris
gcttgtcaggtcttaatgttatcca

SEQ ID NO: 100857 - DNA, 25 bp, Canis familiaris
gcttgtagggactgagttaccggcc

SEQ ID NO: 100858 - DNA, 25 bp, Canis familiaris
gcaggtagcgggtgaggtcgccgcc

SEQ ID NO: 100859 - DNA, 25 bp, Canis familiaris
gcagtgtaagcaagggaggaccccc

SEQ ID NO: 100860 - DNA, 25 bp, Canis familiaris
gcagttttcccgaagtgactcagac

SEQ ID NO: 100861 - DNA, 25 bp, Canis familiaris
gcatttgataccaagtcagctgtca

SEQ ID NO: 100862 - DNA, 25 bp, Canis familiaris
gcatcttgaatgctagggtgcctta

SEQ ID NO: 100863 - DNA, 25 bp, Canis familiaris
gcatcttctttctaggaatttttta

SEQ ID NO: 100864 - DNA, 25 bp, Canis familiaris
gcattgccttttttgacattttctt

SEQ ID NO: 100865 - DNA, 25 bp, Canis familiaris
gcttcctacttgtctgagctttttc

SEQ ID NO: 100866 - DNA, 25 bp, Canis familiaris
gcatatcactactggcaaatttttt

SEQ ID NO: 100867 - DNA, 25 bp, Canis familiaris
gcatctacccttgcaagtctttttc

SEQ ID NO: 100868 - DNA, 25 bp, Canis familiaris
gcatctatttttgcgggtccatgtt

SEQ ID NO: 100869 - DNA, 25 bp, Canis familiaris
gcatttggaaggcgggcctcgtgtt

SEQ ID NO: 100870 - DNA, 25 bp, Canis familiaris
gcataggagaacctgggtggctcag

SEQ ID NO: 100871 - DNA, 25 bp, Canis familiaris
gcttgtagtaccgtcagtgctggag

SEQ ID NO: 100872 - DNA, 25 bp, Canis familiaris
gcttggaggacctggctgcagagga

SEQ ID NO: 100873 - DNA, 25 bp, Canis familiaris
gcttggaaatcttgggtgcacagaa

SEQ ID NO: 100874 - DNA, 25 bp, Canis familiaris
gcttccaagtctttgtgtcacactg

SEQ ID NO: 100875 - DNA, 25 bp, Canis familiaris
gcttgccatagctatttgtggacct

SEQ ID NO: 100876 - DNA, 25 bp, Canis familiaris
gcttgttagctctttgttagcctgt

SEQ ID NO: 100877 - DNA, 25 bp, Canis familiaris
gcttgtgtagactttggacccaatc

SEQ ID NO: 100878 - DNA, 25 bp, Canis familiaris
gcttgttagacttgggcaccattcc

SEQ ID NO: 100879 - DNA, 25 bp, Canis familiaris
gcttgttggtcttggagcactgtgc

SEQ ID NO: 100880 - DNA, 25 bp, Canis familiaris
gcttgatatcgaattcggcacgagc

SEQ ID NO: 100881 - DNA, 25 bp, Canis familiaris
gcttggatgccaagtcccacaggca

SEQ ID NO: 100882 - DNA, 25 bp, Canis familiaris
gcttggacatcaggtaccaactgca

SEQ ID NO: 100883 - DNA, 25 bp, Canis familiaris
gcttgtgcaaagcttgccactcagc

SEQ ID NO: 100884 - DNA, 25 bp, Canis familiaris
gcattgccaaatttgtccatggacg

SEQ ID NO: 100885 - DNA, 25 bp, Canis familiaris
gcatcgccagcatttcgatcctcgt

SEQ ID NO: 100886 - DNA, 25 bp, Canis familiaris
gcattgcagccatctcttaacagct

SEQ ID NO: 100887 - DNA, 25 bp, Canis familiaris
gcatatgacatgttgccttacccat

SEQ ID NO: 100888 - DNA, 25 bp, Canis familiaris
gcatatgacatgttgccttacccat

SEQ ID NO: 100889 - DNA, 25 bp, Canis familiaris
gcatttcatttgctttgctcactgt

SEQ ID NO: 100890 - DNA, 25 bp, Canis familiaris
gcttgcctatttgctgtatacatgt

SEQ ID NO: 100891 - DNA, 25 bp, Canis familiaris
gcttgcccatagatgctgttcagtg

SEQ ID NO: 100892 - DNA, 25 bp, Canis familiaris
gcttgcacctggttgtttgaggatt

SEQ ID NO: 100893 - DNA, 25 bp, Canis familiaris
gcttgcccaggcttacctgaagtct

SEQ ID NO: 100894 - DNA, 25 bp, Canis familiaris
gcattgaacggcctgtccaaagatc

SEQ ID NO: 100895 - DNA, 25 bp, Canis familiaris
gcattgaagcacatctcccaaaagc

SEQ ID NO: 100896 - DNA, 25 bp, Canis familiaris
gcttgcgtgcactttttataatagc

SEQ ID NO: 100897 - DNA, 25 bp, Canis familiaris
gcttgcgtgcactttgtgtatatgc

SEQ ID NO: 100898 - DNA, 25 bp, Canis familiaris
gcttgggatttaatgctctatggtt

SEQ ID NO: 100899 - DNA, 25 bp, Canis familiaris
gcactgggacggatggtatgtttac

SEQ ID NO: 100900 - DNA, 25 bp, Canis familiaris
gcacgggcacgttgttgttgttaca

SEQ ID NO: 100901 - DNA, 25 bp, Canis familiaris
gcagaaggaccctaagttcctcagc

SEQ ID NO: 100902 - DNA, 25 bp, Canis familiaris
gcaaaagaagtctggttgaccccat

SEQ ID NO: 100903 - DNA, 25 bp, Canis familiaris
gcataagttagtcctggttaccatc

SEQ ID NO: 100904 - DNA, 25 bp, Canis familiaris
gcataaattaggggtttctcccttg

SEQ ID NO: 100905 - DNA, 25 bp, Canis familiaris
gcataaattcgggctcattctccct

SEQ ID NO: 100906 - DNA, 25 bp, Canis familiaris
gcattaagtagacctttctcctgtt

SEQ ID NO: 100907 - DNA, 25 bp, Canis familiaris
gcattagacaagattcagttcacct

SEQ ID NO: 100908 - DNA, 25 bp, Canis familiaris
gcattaagccaaattgttttcccaa

SEQ ID NO: 100909 - DNA, 25 bp, Canis familiaris
gcatcaaaaccaatagcttctctcc

SEQ ID NO: 100910 - DNA, 25 bp, Canis familiaris
gcatacagaaccaaacttaacccat

SEQ ID NO: 100911 - DNA, 25 bp, Canis familiaris
gcatcagcggcactcagaactgtga

SEQ ID NO: 100912 - DNA, 25 bp, Canis familiaris
gcattgctgacaggatgcagaagga

SEQ ID NO: 100913 - DNA, 25 bp, Canis familiaris
gcattagcacaccagcaacagcaac

SEQ ID NO: 100914 - DNA, 25 bp, Canis familiaris
gcttccagaccatgagcacagatca

SEQ ID NO: 100915 - DNA, 25 bp, Canis familiaris
gcttccaccagctgatggcagatca

SEQ ID NO: 100916 - DNA, 25 bp, Canis familiaris
gcttccactgcctcgagcagataga

SEQ ID NO: 100917 - DNA, 25 bp, Canis familiaris
gcttccagaacattcaagctgttgg

SEQ ID NO: 100918 - DNA, 25 bp, Canis familiaris
gcttcctggagttcatcagtagtgc

SEQ ID NO: 100919 - DNA, 25 bp, Canis familiaris
gcttgtcggagatcatagagataca

SEQ ID NO: 100920 - DNA, 25 bp, Canis familiaris
gcattgctctagattcaagattgac

SEQ ID NO: 100921 - DNA, 25 bp, Canis familiaris
gcattgcccgtttcggatgcatgga

SEQ ID NO: 100922 - DNA, 25 bp, Canis familiaris
gcatatccggacacaggatgccgtt

SEQ ID NO: 100923 - DNA, 25 bp, Canis familiaris
gcatacacggacagagaagccccag

SEQ ID NO: 100924 - DNA, 25 bp, Canis familiaris
gcataatcaggagtcggagaccctc

SEQ ID NO: 100925 - DNA, 25 bp, Canis familiaris
gcattaaggacatggcgggcctgct

SEQ ID NO: 100926 - DNA, 25 bp, Canis familiaris
gcagtaatcaaaaggctagtgcctg

SEQ ID NO: 100927 - DNA, 25 bp, Canis familiaris
gcttgcaacaaaggccctggcttga

SEQ ID NO: 100928 - DNA, 25 bp, Canis familiaris
gcttgaactagagccaggtcactgt

SEQ ID NO: 100929 - DNA, 25 bp, Canis familiaris
gcattttccagagcacatgggcctt

SEQ ID NO: 100930 - DNA, 25 bp, Canis familiaris
gcttgcttcctgactcagtaggttt

SEQ ID NO: 100931 - DNA, 25 bp, Canis familiaris
gcatctgtgtcctgcagttaggttc

SEQ ID NO: 100932 - DNA, 25 bp, Canis familiaris
gcttgctctctctgttgtagatggt

SEQ ID NO: 100933 - DNA, 25 bp, Canis familiaris
gcatccattggcggtggtggtggta

SEQ ID NO: 100934 - DNA, 25 bp, Canis familiaris
gcatcatttatgcagcttttgggat

SEQ ID NO: 100935 - DNA, 25 bp, Canis familiaris
gcatcatcttgtggattacctcgtt

SEQ ID NO: 100936 - DNA, 25 bp, Canis familiaris
gcattttggtgtactcctagataat

SEQ ID NO: 100937 - DNA, 25 bp, Canis familiaris
gcatttctggggattgcttataaca

SEQ ID NO: 100938 - DNA, 25 bp, Canis familiaris
gcatgactttggccctttataggaa

SEQ ID NO: 100939 - DNA, 25 bp, Canis familiaris
gcagactttcccgtctgtcaggaaa

SEQ ID NO: 100940 - DNA, 25 bp, Canis familiaris
gcagattttccgccctgggtaattg

SEQ ID NO: 100941 - DNA, 25 bp, Canis familiaris
gcatttttccttcctcagaatacac

SEQ ID NO: 100942 - DNA, 25 bp, Canis familiaris
gcattttcttgctcctgcaagaatc

SEQ ID NO: 100943 - DNA, 25 bp, Canis familiaris
gcattcgtattgcgccgctagaggt

SEQ ID NO: 100944 - DNA, 25 bp, Canis familiaris
gcattagtgttgctggacttttgac

SEQ ID NO: 100945 - DNA, 25 bp, Canis familiaris
gcatatttgtagctcgcactttaaa

SEQ ID NO: 100946 - DNA, 25 bp, Canis familiaris
gcatttcagtacaagccctgtaatt

SEQ ID NO: 100947 - DNA, 25 bp, Canis familiaris
gcatttcgtatcagcacatctgtat

SEQ ID NO: 100948 - DNA, 25 bp, Canis familiaris
gcatttagtactagctgcagtcttt

SEQ ID NO: 100949 - DNA, 25 bp, Canis familiaris
gcacttttactacgatgttttgtcc

SEQ ID NO: 100950 - DNA, 25 bp, Canis familiaris
gcatttttaaatcctatttcttcga

SEQ ID NO: 100951 - DNA, 25 bp, Canis familiaris
gcttcctgtcagtaaccatgttttc

SEQ ID NO: 100952 - DNA, 25 bp, Canis familiaris
gcattcctgtgattataccatattt

SEQ ID NO: 100953 - DNA, 25 bp, Canis familiaris
gcatttgagtatgaatctgcaaatt

SEQ ID NO: 100954 - DNA, 25 bp, Canis familiaris
gcatttgagtaagaatctgcaattc

SEQ ID NO: 100955 - DNA, 25 bp, Canis familiaris
gcatttgactggttgcctccaattg

SEQ ID NO: 100956 - DNA, 25 bp, Canis familiaris
gcattgtcctggttggggatctctg

SEQ ID NO: 100957 - DNA, 25 bp, Canis familiaris
gcattgtctcggcaggcagagcttt

SEQ ID NO: 100958 - DNA, 25 bp, Canis familiaris
gcttgtcatcaacgggaagcccatc

SEQ ID NO: 100959 - DNA, 25 bp, Canis familiaris
gcttgtcatcaacgggaagcccatc

SEQ ID NO: 100960 - DNA, 25 bp, Canis familiaris
gcttgtcagaagccaagaccacttc

SEQ ID NO: 100961 - DNA, 25 bp, Canis familiaris
gcttgctcaggcccaagaatctcat

SEQ ID NO: 100962 - DNA, 25 bp, Canis familiaris
gcatttctgctcctgcaaaatctaa

SEQ ID NO: 100963 - DNA, 25 bp, Canis familiaris
gcatttctgctcctgcaaaatctaa

SEQ ID NO: 100964 - DNA, 25 bp, Canis familiaris
gcatttctgctcctgcaaaatctaa

SEQ ID NO: 100965 - DNA, 25 bp, Canis familiaris
gcattatctgcgacctgaacttgaa

SEQ ID NO: 100966 - DNA, 25 bp, Canis familiaris
gcattgttgagcgctgcgacttgcc

SEQ ID NO: 100967 - DNA, 25 bp, Canis familiaris
gcattctcagtgacctcgatgttgc

SEQ ID NO: 100968 - DNA, 25 bp, Canis familiaris
gcttccagtgtcatgtttctgagag

SEQ ID NO: 100969 - DNA, 25 bp, Canis familiaris
gcactgtccttcagggtcgatggac

SEQ ID NO: 100970 - DNA, 25 bp, Canis familiaris
gcatcctattccagggtagcggaca

SEQ ID NO: 100971 - DNA, 25 bp, Canis familiaris
gcatcggattacagaccttgctggg

SEQ ID NO: 100972 - DNA, 25 bp, Canis familiaris
gcatcgagtctctggatttgctgtg

SEQ ID NO: 100973 - DNA, 25 bp, Canis familiaris
gcatcgagctgtgtgaatacctctg

SEQ ID NO: 100974 - DNA, 25 bp, Canis familiaris
gcattacttgaccatcatgaacctg

SEQ ID NO: 100975 - DNA, 25 bp, Canis familiaris
gcttgtagagacctcagaacagctg

SEQ ID NO: 100976 - DNA, 25 bp, Canis familiaris
gcttgctccatgtaccagaacaggt

SEQ ID NO: 100977 - DNA, 25 bp, Canis familiaris
gcatttccatgatgcctcagtaggg

SEQ ID NO: 100978 - DNA, 25 bp, Canis familiaris
gcatttcatatctgcgtcagtactg

SEQ ID NO: 100979 - DNA, 25 bp, Canis familiaris
gcattgcgttgcagcttctagactg

SEQ ID NO: 100980 - DNA, 25 bp, Canis familiaris
gcttgtgattgatgcttattactct

SEQ ID NO: 100981 - DNA, 25 bp, Canis familiaris
gcatattaagcatgtacatatactt

SEQ ID NO: 100982 - DNA, 25 bp, Canis familiaris
gcatataaatgcaaggtgctattca

SEQ ID NO: 100983 - DNA, 25 bp, Canis familiaris
gcatttcgtgaaagagcttctcccg

SEQ ID NO: 100984 - DNA, 25 bp, Canis familiaris
gcttgctattaaagagccttcccaa

SEQ ID NO: 100985 - DNA, 25 bp, Canis familiaris
gcttgttctattaagatatgtctcc

SEQ ID NO: 100986 - DNA, 25 bp, Canis familiaris
gcttgttgctcattggagtggctgc

SEQ ID NO: 100987 - DNA, 25 bp, Canis familiaris
gcattgttgtcatagctgggctggt

SEQ ID NO: 100988 - DNA, 25 bp, Canis familiaris
gcatagctctgaagaagcccgggtt

SEQ ID NO: 100989 - DNA, 25 bp, Canis familiaris
gcatcactgtgcagatagctccaga

SEQ ID NO: 100990 - DNA, 25 bp, Canis familiaris
gcatcactgtatctgactatgacat

SEQ ID NO: 100991 - DNA, 25 bp, Canis familiaris
gcatcacttatcagcacattgatcg

SEQ ID NO: 100992 - DNA, 25 bp, Canis familiaris
gcatatccttcaatgacttatctgc

SEQ ID NO: 100993 - DNA, 25 bp, Canis familiaris
gcatccatgctccatagagtctttc

SEQ ID NO: 100994 - DNA, 25 bp, Canis familiaris
gcatcacctcagagcggagtgtgcc

SEQ ID NO: 100995 - DNA, 25 bp, Canis familiaris
gcatcacagtagttgcggcaggaga

SEQ ID NO: 100996 - DNA, 25 bp, Canis familiaris
gcatatgcgcattttcctggagaga

SEQ ID NO: 100997 - DNA, 25 bp, Canis familiaris
gcattgactggctcctggatgacat

SEQ ID NO: 100998 - DNA, 25 bp, Canis familiaris
gcatagactgggacctgttggagaa

SEQ ID NO: 100999 - DNA, 25 bp, Canis familiaris
gcataccttgtgactccttggtaga

SEQ ID NO: 101000 - DNA, 25 bp, Canis familiaris
gcatacccgtatacctggatgctct

SEQ ID NO: 101001 - DNA, 25 bp, Canis familiaris
gcatgacccaggtattcttactgta

SEQ ID NO: 101002 - DNA, 25 bp, Canis familiaris
gcatccccagaactacttcaagtac

SEQ ID NO: 101003 - DNA, 25 bp, Canis familiaris
gcatcccccaattaattccatgata

SEQ ID NO: 101004 - DNA, 25 bp, Canis familiaris
gcatcttcccactatagatccttta

SEQ ID NO: 101005 - DNA, 25 bp, Canis familiaris
gcatcattccaggttaaactcttgt

SEQ ID NO: 101006 - DNA, 25 bp, Canis familiaris
gcatttccatttcaacagtctgtca

SEQ ID NO: 101007 - DNA, 25 bp, Canis familiaris
gcattcctctttgtaatatcattca

SEQ ID NO: 101008 - DNA, 25 bp, Canis familiaris
gcatgccctaaaggtccaacttcac

SEQ ID NO: 101009 - DNA, 25 bp, Canis familiaris
gcatcctctaaatggtagctgtcca

SEQ ID NO: 101010 - DNA, 25 bp, Canis familiaris
gcatcctctcctcagggatgccagc

SEQ ID NO: 101011 - DNA, 25 bp, Canis familiaris
gcatcctcagcagcggtgggaagcg

SEQ ID NO: 101012 - DNA, 25 bp, Canis familiaris
gcacctagcaggggtcgttgtggtc

SEQ ID NO: 101013 - DNA, 25 bp, Canis familiaris
gcatatccgtggggccagttgtgtg

SEQ ID NO: 101014 - DNA, 25 bp, Canis familiaris
gcatttttggacgtcagcggtgtct

SEQ ID NO: 101015 - DNA, 25 bp, Canis familiaris
gcattggttttcttcatgagggtct

SEQ ID NO: 101016 - DNA, 25 bp, Canis familiaris
gcttgaatgtttttatggcagtgat

SEQ ID NO: 101017 - DNA, 25 bp, Canis familiaris
gcttgaattggatcacatcacagtt

SEQ ID NO: 101018 - DNA, 25 bp, Canis familiaris
gcattgcaattgcaccatctctgcc

SEQ ID NO: 101019 - DNA, 25 bp, Canis familiaris
gcattgccatcttagagattcttgc

SEQ ID NO: 101020 - DNA, 25 bp, Canis familiaris
gcttgccacgcgtaatgtcttgcac

SEQ ID NO: 101021 - DNA, 25 bp, Canis familiaris
gcttgatcacgcttagtggtctcac

SEQ ID NO: 101022 - DNA, 25 bp, Canis familiaris
gcttgtgcacgtgagcttggcagtc

SEQ ID NO: 101023 - DNA, 25 bp, Canis familiaris
gcttgtccctcaactgcatgagaga

SEQ ID NO: 101024 - DNA, 25 bp, Canis familiaris
gcatttctcccttctgtggatgatt

SEQ ID NO: 101025 - DNA, 25 bp, Canis familiaris
gcattcttcgctgatttggctgttc

SEQ ID NO: 101026 - DNA, 25 bp, Canis familiaris
gcattcttgacagactgctggctgt

SEQ ID NO: 101027 - DNA, 25 bp, Canis familiaris
gcatttctgacctgtgttctgtgca

SEQ ID NO: 101028 - DNA, 25 bp, Canis familiaris
gcattagctacctcatggtggctca

SEQ ID NO: 101029 - DNA, 25 bp, Canis familiaris
gcattggcgccaaaatggtggccat

SEQ ID NO: 101030 - DNA, 25 bp, Canis familiaris
gcaggacgtcaagatgagtagccgg

SEQ ID NO: 101031 - DNA, 25 bp, Canis familiaris
gcaggacttaaattttaggccttct

SEQ ID NO: 101032 - DNA, 25 bp, Canis familiaris
gcaggaactaacaactgtaaggttt

SEQ ID NO: 101033 - DNA, 25 bp, Canis familiaris
gcattagactactaacagttttttt

SEQ ID NO: 101034 - DNA, 25 bp, Canis familiaris
gcatctggtcgggaacgtcgttatg

SEQ ID NO: 101035 - DNA, 25 bp, Canis familiaris
gcatctgcctgctggatcacagggt

SEQ ID NO: 101036 - DNA, 25 bp, Canis familiaris
gcatgcatgcacacgcaatcgaggg

SEQ ID NO: 101037 - DNA, 25 bp, Canis familiaris
gcatagagctttctgctcagcagag

SEQ ID NO: 101038 - DNA, 25 bp, Canis familiaris
gcatgagacacctgctgctagcaag

SEQ ID NO: 101039 - DNA, 25 bp, Canis familiaris
gcatatgttggctgcctaaagcaaa

SEQ ID NO: 101040 - DNA, 25 bp, Canis familiaris
gcttgtgctcactctctagaaagaa

SEQ ID NO: 101041 - DNA, 25 bp, Canis familiaris
gcttgtgatgactctgtaacagact

SEQ ID NO: 101042 - DNA, 25 bp, Canis familiaris
gtttgcaagtgtgtaaagtcttttc

SEQ ID NO: 101043 - DNA, 25 bp, Canis familiaris
gcatttggaggtgtcaatcttcttt

SEQ ID NO: 101044 - DNA, 25 bp, Canis familiaris
gcattgggaaatgggcaacttgttg

SEQ ID NO: 101045 - DNA, 25 bp, Canis familiaris
gcttggtgtgattgcagccttttgt

SEQ ID NO: 101046 - DNA, 25 bp, Canis familiaris
gcattcacaggttgcggctttctgt

SEQ ID NO: 101047 - DNA, 25 bp, Canis familiaris
gcattagccagtacgtgctttttaa

SEQ ID NO: 101048 - DNA, 25 bp, Canis familiaris
gcttgagaagtttttttttgactgg

SEQ ID NO: 101049 - DNA, 25 bp, Canis familiaris
gcattgaatttttttgttgttttag

SEQ ID NO: 101050 - DNA, 25 bp, Canis familiaris
gcttgtaatgttctgtgtcttgttc

SEQ ID NO: 101051 - DNA, 25 bp, Canis familiaris
gcatcagtcgatttgaaattttttc

SEQ ID NO: 101052 - DNA, 25 bp, Canis familiaris
gcatcagccagatctgcatttatta

SEQ ID NO: 101053 - DNA, 25 bp, Canis familiaris
gcatcaagcagagcatgtcctagtg

SEQ ID NO: 101054 - DNA, 25 bp, Canis familiaris
gcatcaagacagacagcaccttctc

SEQ ID NO: 101055 - DNA, 25 bp, Canis familiaris
gcatgcaacaggtgtcggtcttgct

SEQ ID NO: 101056 - DNA, 25 bp, Canis familiaris
gcatcaaaggggaccctctctgcag

SEQ ID NO: 101057 - DNA, 25 bp, Canis familiaris
gcttgaggaggggctgctttctgag

SEQ ID NO: 101058 - DNA, 25 bp, Canis familiaris
gcttgaggaggggctgctttctgag

SEQ ID NO: 101059 - DNA, 25 bp, Canis familiaris
gcttgtgaagcgccacgttgatgcc

SEQ ID NO: 101060 - DNA, 25 bp, Canis familiaris
gcttgctattgtgcttttatactgc

SEQ ID NO: 101061 - DNA, 25 bp, Canis familiaris
gcttgcaaggctgttttaatgtgag

SEQ ID NO: 101062 - DNA, 25 bp, Canis familiaris
gcttgtgggctgttgtcatttgatg

SEQ ID NO: 101063 - DNA, 25 bp, Canis familiaris
gcattggagtctcctcactgttgac

SEQ ID NO: 101064 - DNA, 25 bp, Canis familiaris
gcatcggaactatagtgcctgcagc

SEQ ID NO: 101065 - DNA, 25 bp, Canis familiaris
gcatccgcaagtttgcggccgacgc

SEQ ID NO: 101066 - DNA, 25 bp, Canis familiaris
gcatctgctgtagtacacggccaac

SEQ ID NO: 101067 - DNA, 25 bp, Canis familiaris
gcatactgatgagaaaacacacaca

SEQ ID NO: 101068 - DNA, 25 bp, Canis familiaris
gcatcacttaataaagacccctcga

SEQ ID NO: 101069 - DNA, 25 bp, Canis familiaris
gcaccttagattaaatcaccacggc

SEQ ID NO: 101070 - DNA, 25 bp, Canis familiaris
gcattctttgtgaaaatcacgaggt

SEQ ID NO: 101071 - DNA, 25 bp, Canis familiaris
gcattcttggtttaactgcaagtgg

SEQ ID NO: 101072 - DNA, 25 bp, Canis familiaris
gcatctcctgagcttatagtcaagt

SEQ ID NO: 101073 - DNA, 25 bp, Canis familiaris
gcatcattcaacacttatgtccagg

SEQ ID NO: 101074 - DNA, 25 bp, Canis familiaris
gcatgctaaccggtgcttgtgacgg

SEQ ID NO: 101075 - DNA, 25 bp, Canis familiaris
gcattaagccctggctgtgaactca

SEQ ID NO: 101076 - DNA, 25 bp, Canis familiaris
gcatctacagtaggacattgaacta

SEQ ID NO: 101077 - DNA, 25 bp, Canis familiaris
gcatcgaaaaagtcctgattctgag

SEQ ID NO: 101078 - DNA, 25 bp, Canis familiaris
gcattcagagaaacccagtttgtgg

SEQ ID NO: 101079 - DNA, 25 bp, Canis familiaris
gcatattagaattctccccttttga

SEQ ID NO: 101080 - DNA, 25 bp, Canis familiaris
gcatctgtgaaatgtctccagtgtt

SEQ ID NO: 101081 - DNA, 25 bp, Canis familiaris
gcttgagaagaagtcccagctgtta

SEQ ID NO: 101082 - DNA, 25 bp, Canis familiaris
gcttgaaggaaggcatccctgccct

SEQ ID NO: 101083 - DNA, 25 bp, Canis familiaris
gcattaaaattggccctcagcacgc

SEQ ID NO: 101084 - DNA, 25 bp, Canis familiaris
gcattcataaatagccttctggacg

SEQ ID NO: 101085 - DNA, 25 bp, Canis familiaris
gcatctcactaagcctgttgtacag

SEQ ID NO: 101086 - DNA, 25 bp, Canis familiaris
gcatcgacaatgaggctttgtacga

SEQ ID NO: 101087 - DNA, 25 bp, Canis familiaris
gcatctgaaattttgtttgtacgtg

SEQ ID NO: 101088 - DNA, 25 bp, Canis familiaris
gcattggaatgtttttctgtgtgtg

SEQ ID NO: 101089 - DNA, 25 bp, Canis familiaris
gcttggggtctatttatgtgtgtgt

SEQ ID NO: 101090 - DNA, 25 bp, Canis familiaris
gcattggggacttctagataggtta

SEQ ID NO: 101091 - DNA, 25 bp, Canis familiaris
gcattggaggccagcaagctagctg

SEQ ID NO: 101092 - DNA, 25 bp, Canis familiaris
gcttggagctccagagactgagaca

SEQ ID NO: 101093 - DNA, 25 bp, Canis familiaris
gcttggatccgcatatgaagagact

SEQ ID NO: 101094 - DNA, 25 bp, Canis familiaris
gcttgatgcccgctgcaaagtgagc

SEQ ID NO: 101095 - DNA, 25 bp, Canis familiaris
gcattggcctggctcagaagctgat

SEQ ID NO: 101096 - DNA, 25 bp, Canis familiaris
gcatctgccgcctctcagagaggcg

SEQ ID NO: 101097 - DNA, 25 bp, Canis familiaris
gcatctcgcgcctcgaggagaaagt

SEQ ID NO: 101098 - DNA, 25 bp, Canis familiaris
gcatttctgccttcatgaggaaagg

SEQ ID NO: 101099 - DNA, 25 bp, Canis familiaris
gcagggtccctgtaggaaagggtgc

SEQ ID NO: 101100 - DNA, 25 bp, Canis familiaris
gcagggaccctgagggagcaaaccc

SEQ ID NO: 101101 - DNA, 25 bp, Canis familiaris
tcggtttcttggacggtgaactccg

SEQ ID NO: 101102 - DNA, 25 bp, Canis familiaris
gcaggtttgatttgcctggtaacca

SEQ ID NO: 101103 - DNA, 25 bp, Canis familiaris
gcatagtttctgttgcctgagcata

SEQ ID NO: 101104 - DNA, 25 bp, Canis familiaris
gcatttttcatgccatttagataat

SEQ ID NO: 101105 - DNA, 25 bp, Canis familiaris
gcatttctattttttcacataagga

SEQ ID NO: 101106 - DNA, 25 bp, Canis familiaris
gcatctgttactctttactgaactg

SEQ ID NO: 101107 - DNA, 25 bp, Canis familiaris
gcattgcataacactttggctcttt

SEQ ID NO: 101108 - DNA, 25 bp, Canis familiaris
gcatttcaatcagctagggtcttct

SEQ ID NO: 101109 - DNA, 25 bp, Canis familiaris
gcatttcagcgctgtgacggtttta

SEQ ID NO: 101110 - DNA, 25 bp, Canis familiaris
gcttgttgcctattacagaaatatt

SEQ ID NO: 101111 - DNA, 25 bp, Canis familiaris
gcattgtcctctttcacaacagatt

SEQ ID NO: 101112 - DNA, 25 bp, Canis familiaris
gcatttccctgatgacaagtgatat

SEQ ID NO: 101113 - DNA, 25 bp, Canis familiaris
gcataacctctgtacacaggctgag

SEQ ID NO: 101114 - DNA, 25 bp, Canis familiaris
gcataactggatcgacaacaggagc

SEQ ID NO: 101115 - DNA, 25 bp, Canis familiaris
gcataagctgaaatgtacgcatgtg

SEQ ID NO: 101116 - DNA, 25 bp, Canis familiaris
gcattagggcactgatcctgggatc

SEQ ID NO: 101117 - DNA, 25 bp, Canis familiaris
gcatttactctctgattttgggcca

SEQ ID NO: 101118 - DNA, 25 bp, Canis familiaris
gcattgtatattttttcatttggta

SEQ ID NO: 101119 - DNA, 25 bp, Canis familiaris
gcattttacttttaaatgtgctgaa

SEQ ID NO: 101120 - DNA, 25 bp, Canis familiaris
gcattttggctttgataacagttga

SEQ ID NO: 101121 - DNA, 25 bp, Canis familiaris
gcatctattgtcgtgtttaagctta

SEQ ID NO: 101122 - DNA, 25 bp, Canis familiaris
gcattgcctgtggcttttatcctgc

SEQ ID NO: 101123 - DNA, 25 bp, Canis familiaris
gcatcccatttgctgtaattggcag

SEQ ID NO: 101124 - DNA, 25 bp, Canis familiaris
gcatccacattgaatcttaaaaggt

SEQ ID NO: 101125 - DNA, 25 bp, Canis familiaris
gcatgcctgtatgactttaggggtt

SEQ ID NO: 101126 - DNA, 25 bp, Canis familiaris
gcatccctcaagacttctaaaggtt

SEQ ID NO: 101127 - DNA, 25 bp, Canis familiaris
gcatccccatagccattgggtcatg

SEQ ID NO: 101128 - DNA, 25 bp, Canis familiaris
gcatcagggaacttctggagtcagc

SEQ ID NO: 101129 - DNA, 25 bp, Canis familiaris
gcattggttgtatttgtatgtcaca

SEQ ID NO: 101130 - DNA, 25 bp, Canis familiaris
gcattccttccattctgttgataaa

SEQ ID NO: 101131 - DNA, 25 bp, Canis familiaris
gcattcttatccttcagtgctgaga

SEQ ID NO: 101132 - DNA, 25 bp, Canis familiaris
gcattgctcactgcactggggcaga

SEQ ID NO: 101133 - DNA, 25 bp, Canis familiaris
gcttgtgacgccggtggggagagcg

SEQ ID NO: 101134 - DNA, 25 bp, Canis familiaris
gcattgtcccatctgaggtggagcc

SEQ ID NO: 101135 - DNA, 25 bp, Canis familiaris
gcatcgtcctcgctaggatggatcc

SEQ ID NO: 101136 - DNA, 25 bp, Canis familiaris
gcatcagttcctggctgagccattt

SEQ ID NO: 101137 - DNA, 25 bp, Canis familiaris
gcatcatttccttgaggtcatttga

SEQ ID NO: 101138 - DNA, 25 bp, Canis familiaris
gcatcatggacgagaaggtgttcac

SEQ ID NO: 101139 - DNA, 25 bp, Canis familiaris
gcatctggacagagaggaggcccca

SEQ ID NO: 101140 - DNA, 25 bp, Canis familiaris
gcatcggcaagatcggaggcgccgc

SEQ ID NO: 101141 - DNA, 25 bp, Canis familiaris
gcatccaggatataggggcaacagc

SEQ ID NO: 101142 - DNA, 25 bp, Canis familiaris
gcatctagtgaacagaggccagggg

SEQ ID NO: 101143 - DNA, 25 bp, Canis familiaris
gcaaggaaaggggcgccagggtggc

SEQ ID NO: 101144 - DNA, 25 bp, Canis familiaris
gcaggtgaacaaggacccagaggtg

SEQ ID NO: 101145 - DNA, 25 bp, Canis familiaris
gcagtggtgacaggagtccggaacg

SEQ ID NO: 101146 - DNA, 25 bp, Canis familiaris
gcaggctgtaccggtccggaattcc

SEQ ID NO: 101147 - DNA, 25 bp, Canis familiaris
gcaggaaaccagatttcggattaga

SEQ ID NO: 101148 - DNA, 25 bp, Canis familiaris
tcagggacaaccatttccgaagcaa

SEQ ID NO: 101149 - DNA, 25 bp, Canis familiaris
tgggggtacccaaacctgaagtcag

SEQ ID NO: 101150 - DNA, 25 bp, Canis familiaris
taggggtaccctatttacattcctg

SEQ ID NO: 101151 - DNA, 25 bp, Canis familiaris
gcatggaggaacgcctgatttccag

SEQ ID NO: 101152 - DNA, 25 bp, Canis familiaris
gcatcagggtgagccctaatccagc

SEQ ID NO: 101153 - DNA, 25 bp, Canis familiaris
gcacgggtgaccggtttccaaatgt

SEQ ID NO: 101154 - DNA, 25 bp, Canis familiaris
gcacccagtaagagctttccatata

SEQ ID NO: 101155 - DNA, 25 bp, Canis familiaris
gcatccggctgatacttttgtcatt

SEQ ID NO: 101156 - DNA, 25 bp, Canis familiaris
gcatctgggctgtggccttagtaga

SEQ ID NO: 101157 - DNA, 25 bp, Canis familiaris
gcttggggagctgcttccagtagaa

SEQ ID NO: 101158 - DNA, 25 bp, Canis familiaris
gcttgtcggagcttgatgtcggaag

SEQ ID NO: 101159 - DNA, 25 bp, Canis familiaris
gcatcgctccggggagaccgaagat

SEQ ID NO: 101160 - DNA, 25 bp, Canis familiaris
gcatcctacatcatcggaccagagg

SEQ ID NO: 101161 - DNA, 25 bp, Canis familiaris
gcatacagacaggtcgtggcctaga

SEQ ID NO: 101162 - DNA, 25 bp, Canis familiaris
gcatcatcaacggccgggccgtgga

SEQ ID NO: 101163 - DNA, 25 bp, Canis familiaris
gcatacacacagtacgagtccgggg

SEQ ID NO: 101164 - DNA, 25 bp, Canis familiaris
gcatacacacagtacgagtccgggg

SEQ ID NO: 101165 - DNA, 25 bp, Canis familiaris
gcatgaccaagatcatcgtacggag

SEQ ID NO: 101166 - DNA, 25 bp, Canis familiaris
gaacggaataccctactggatcgtg

SEQ ID NO: 101167 - DNA, 25 bp, Canis familiaris
gaatcgagattcgggttcggtcgtc

SEQ ID NO: 101168 - DNA, 25 bp, Canis familiaris
gcattcaggagtctggcctctgagt

SEQ ID NO: 101169 - DNA, 25 bp, Canis familiaris
gcttgggaggggtccttggatggga

SEQ ID NO: 101170 - DNA, 25 bp, Canis familiaris
gcaccgaggggggcacttggtggga

SEQ ID NO: 101171 - DNA, 25 bp, Canis familiaris
gcacctgtggggcccaaggggagga

SEQ ID NO: 101172 - DNA, 25 bp, Canis familiaris
gcaccgggtacctcagggtgagcaa

SEQ ID NO: 101173 - DNA, 25 bp, Canis familiaris
gcacccgttacaggctaggctgtga

SEQ ID NO: 101174 - DNA, 25 bp, Canis familiaris
tcagactcctatacgcctaatcgga

SEQ ID NO: 101175 - DNA, 25 bp, Canis familiaris
gcatacggtatattggtacatcgga

SEQ ID NO: 101176 - DNA, 25 bp, Canis familiaris
gcatatggtgtgtgtggtacatgtg

SEQ ID NO: 101177 - DNA, 25 bp, Canis familiaris
gcatattgttatcaggtcctagctt

SEQ ID NO: 101178 - DNA, 25 bp, Canis familiaris
gcattttgaatgtctgtgtccccat

SEQ ID NO: 101179 - DNA, 25 bp, Canis familiaris
gcatatctggaaactgttcccatgc

SEQ ID NO: 101180 - DNA, 25 bp, Canis familiaris
gcattctgggaaagtctctggctaa

SEQ ID NO: 101181 - DNA, 25 bp, Canis familiaris
gcatttggattaggcctttctgaag

SEQ ID NO: 101182 - DNA, 25 bp, Canis familiaris
gcatagggaggagacccctgcacag

SEQ ID NO: 101183 - DNA, 25 bp, Canis familiaris
gcatggggagggttctctccccacc

SEQ ID NO: 101184 - DNA, 25 bp, Canis familiaris
gcatagggagtgggtctcctgccac

SEQ ID NO: 101185 - DNA, 25 bp, Canis familiaris
gcattgaggaaattgtgccctgtca

SEQ ID NO: 101186 - DNA, 25 bp, Canis familiaris
gcatctgaggaatctaggcctgtca

SEQ ID NO: 101187 - DNA, 25 bp, Canis familiaris
gcatctagtaagcacctctgtgtac

SEQ ID NO: 101188 - DNA, 25 bp, Canis familiaris
gcattgtggaagccacatctcagtg

SEQ ID NO: 101189 - DNA, 25 bp, Canis familiaris
gcatgttgtaggccgttcacagact

SEQ ID NO: 101190 - DNA, 25 bp, Canis familiaris
gcaggtgcatcgccagcatttcgat

SEQ ID NO: 101191 - DNA, 25 bp, Canis familiaris
gcatcatgccctgcagttatcagaa

SEQ ID NO: 101192 - DNA, 25 bp, Canis familiaris
gcatcaccctcattgttgacagata

SEQ ID NO: 101193 - DNA, 25 bp, Canis familiaris
gcattaactgattgtatgcagtgat

SEQ ID NO: 101194 - DNA, 25 bp, Canis familiaris
gcatgctaactagttacgcgacccc

SEQ ID NO: 101195 - DNA, 25 bp, Canis familiaris
gagcggttaattttggacttgctaa

SEQ ID NO: 101196 - DNA, 25 bp, Canis familiaris
gcagcggttactggtatacctttag

SEQ ID NO: 101197 - DNA, 25 bp, Canis familiaris
gcaggaccaacaggtaacacttaat

SEQ ID NO: 101198 - DNA, 25 bp, Canis familiaris
gcatgataccaatcgtactactagt

SEQ ID NO: 101199 - DNA, 25 bp, Canis familiaris
gcatctgaccaatctcaattacctg

SEQ ID NO: 101200 - DNA, 25 bp, Canis familiaris
gcattgccgctattatatttactca

SEQ ID NO: 101201 - DNA, 25 bp, Canis familiaris
gcattgacacgatagatcttattcc

SEQ ID NO: 101202 - DNA, 25 bp, Canis familiaris
gcattaacagacttccttttgccca

SEQ ID NO: 101203 - DNA, 25 bp, Canis familiaris
gcataaactgactccactattgaaa

SEQ ID NO: 101204 - DNA, 25 bp, Canis familiaris
gcataatcctgatcctcattttcgc

SEQ ID NO: 101205 - DNA, 25 bp, Canis familiaris
gcataccctgactttgcatattatt

SEQ ID NO: 101206 - DNA, 25 bp, Canis familiaris
gcatcattcactcgtttagattatt

SEQ ID NO: 101207 - DNA, 25 bp, Canis familiaris
gcatcattatcacttgtccatagtt

SEQ ID NO: 101208 - DNA, 25 bp, Canis familiaris
gcattaatctctctgacatcagcca

SEQ ID NO: 101209 - DNA, 25 bp, Canis familiaris
gcattatatcctctagatccatcca

SEQ ID NO: 101210 - DNA, 25 bp, Canis familiaris
gcattatattctctagctccatcag

SEQ ID NO: 101211 - DNA, 25 bp, Canis familiaris
gcatttggtctcgtagtctatctat

SEQ ID NO: 101212 - DNA, 25 bp, Canis familiaris
gcatttggtctcgtagtctatctat

SEQ ID NO: 101213 - DNA, 25 bp, Canis familiaris
gcatttggtctcgtagtctatctat

SEQ ID NO: 101214 - DNA, 25 bp, Canis familiaris
gcattctgggcaggtttcattttgc

SEQ ID NO: 101215 - DNA, 25 bp, Canis familiaris
gcatcaaaggaggtttgcatgtctc

SEQ ID NO: 101216 - DNA, 25 bp, Canis familiaris
gcagcacgggacttatttggtccgg

SEQ ID NO: 101217 - DNA, 25 bp, Canis familiaris
gacactggataagcacttggccgtg

SEQ ID NO: 101218 - DNA, 25 bp, Canis familiaris
gcatcagcaggaaacaccttggcac

SEQ ID NO: 101219 - DNA, 25 bp, Canis familiaris
gcatcagaaataaaccaggtactcc

SEQ ID NO: 101220 - DNA, 25 bp, Canis familiaris
gcatatgagtttacccactacctcc

SEQ ID NO: 101221 - DNA, 25 bp, Canis familiaris
gcagggctttaagcccctatcacgc

SEQ ID NO: 101222 - DNA, 25 bp, Canis familiaris
gcagccgttatactaacccattatc

SEQ ID NO: 101223 - DNA, 25 bp, Canis familiaris
gcatccggttactgggcaatttcta

SEQ ID NO: 101224 - DNA, 25 bp, Canis familiaris
gcatcgggtattgggggtgtttgtg

SEQ ID NO: 101225 - DNA, 25 bp, Canis familiaris
gcatcaggacatagctgcagggttt

SEQ ID NO: 101226 - DNA, 25 bp, Canis familiaris
gcatcagctgatggtgtcaggccct

SEQ ID NO: 101227 - DNA, 25 bp, Canis familiaris
gcatccgagcgtcctgatgcagtct

SEQ ID NO: 101228 - DNA, 25 bp, Canis familiaris
gcatctggaggaggcgcagcaggtc

SEQ ID NO: 101229 - DNA, 25 bp, Canis familiaris
gcattctgggatccgctgagaatcc

SEQ ID NO: 101230 - DNA, 25 bp, Canis familiaris
gcattgtggaagggctcatgaccac

SEQ ID NO: 101231 - DNA, 25 bp, Canis familiaris
gcatcttcatgaagggcgcgacccg

SEQ ID NO: 101232 - DNA, 25 bp, Canis familiaris
gcatctgaagatagaggcagttctc

SEQ ID NO: 101233 - DNA, 25 bp, Canis familiaris
gcatttgctgcatgagtgaattccg

SEQ ID NO: 101234 - DNA, 25 bp, Canis familiaris
gcatattggccagcatcaattcgga

SEQ ID NO: 101235 - DNA, 25 bp, Canis familiaris
gcatcttgcccagccataaagcaat

SEQ ID NO: 101236 - DNA, 25 bp, Canis familiaris
gcatcctcccggcaataaacattgc

SEQ ID NO: 101237 - DNA, 25 bp, Canis familiaris
gcatccaccgcacagagaaaacaca

SEQ ID NO: 101238 - DNA, 25 bp, Canis familiaris
gcatcaccgctgtaagcgagataaa

SEQ ID NO: 101239 - DNA, 25 bp, Canis familiaris
gcatcattccttggctgaaataaaa

SEQ ID NO: 101240 - DNA, 25 bp, Canis familiaris
gcattatcctcatgcgaccatacat

SEQ ID NO: 101241 - DNA, 25 bp, Canis familiaris
gcattatcctcatcaaccaatacat

SEQ ID NO: 101242 - DNA, 25 bp, Canis familiaris
gcattgtccaagcatcagtagtcct

SEQ ID NO: 101243 - DNA, 25 bp, Canis familiaris
gcatggattcagacccggatgtcct

SEQ ID NO: 101244 - DNA, 25 bp, Canis familiaris
gcatgtcagtaaggctcgggcctcc

SEQ ID NO: 101245 - DNA, 25 bp, Canis familiaris
gcagatacttaactcctgagccacc

SEQ ID NO: 101246 - DNA, 25 bp, Canis familiaris
gcatgagaatgtgagggggcgccct

SEQ ID NO: 101247 - DNA, 25 bp, Canis familiaris
gcagcagattctgaacagcggcgcc

SEQ ID NO: 101248 - DNA, 25 bp, Canis familiaris
gcatgcagcaatatcaaccatcacc

SEQ ID NO: 101249 - DNA, 25 bp, Canis familiaris
gcatgcacatgagttgaaattccac

SEQ ID NO: 101250 - DNA, 25 bp, Canis familiaris
gcattgcatggtaaacacacacaca

SEQ ID NO: 101251 - DNA, 25 bp, Canis familiaris
gcattgctgatgcccatataactac

SEQ ID NO: 101252 - DNA, 25 bp, Canis familiaris
gcattgctgataccattatactacc

SEQ ID NO: 101253 - DNA, 25 bp, Canis familiaris
gcatcatctgtaccattggaccagc

SEQ ID NO: 101254 - DNA, 25 bp, Canis familiaris
gcatacttaataatgagcactgagt

SEQ ID NO: 101255 - DNA, 25 bp, Canis familiaris
gcattgattattctggcctgcagtt

SEQ ID NO: 101256 - DNA, 25 bp, Canis familiaris
gcattattatgacctgtgctgcttg

SEQ ID NO: 101257 - DNA, 25 bp, Canis familiaris
gcattgatgagactactgggctggg

SEQ ID NO: 101258 - DNA, 25 bp, Canis familiaris
gcattcatgcagactatgttgcaag

SEQ ID NO: 101259 - DNA, 25 bp, Canis familiaris
gcattcatcagaccatctaggacac

SEQ ID NO: 101260 - DNA, 25 bp, Canis familiaris
gcattatcaacatcatattcagccc

SEQ ID NO: 101261 - DNA, 25 bp, Canis familiaris
gcatttcacacatgcattgtcatgg

SEQ ID NO: 101262 - DNA, 25 bp, Canis familiaris
gcatattccatattcaagtctcaag

SEQ ID NO: 101263 - DNA, 25 bp, Canis familiaris
gcatcttctcattcccatgtggaac

SEQ ID NO: 101264 - DNA, 25 bp, Canis familiaris
gcattcattcctgatcattggatcc

SEQ ID NO: 101265 - DNA, 25 bp, Canis familiaris
gcattgatttgtgagtttgacctat

SEQ ID NO: 101266 - DNA, 25 bp, Canis familiaris
gcattgctttgttggcttgttgcct

SEQ ID NO: 101267 - DNA, 25 bp, Canis familiaris
gcattcttatttgcttctgcagcct

SEQ ID NO: 101268 - DNA, 25 bp, Canis familiaris
gcattttcattttagactacatccc

SEQ ID NO: 101269 - DNA, 25 bp, Canis familiaris
gcattaacatgcttggcagacaaac

SEQ ID NO: 101270 - DNA, 25 bp, Canis familiaris
gcattgcagaccttacatgtctaac

SEQ ID NO: 101271 - DNA, 25 bp, Canis familiaris
gcattgttccacacatttgaaggac

SEQ ID NO: 101272 - DNA, 25 bp, Canis familiaris
gcattgttaccaactgggacgacat

SEQ ID NO: 101273 - DNA, 25 bp, Canis familiaris
gcacgtttacacaggtgtcagaata

SEQ ID NO: 101274 - DNA, 25 bp, Canis familiaris
gcatcagttatacaagggacaagag

SEQ ID NO: 101275 - DNA, 25 bp, Canis familiaris
gcatccttcaaggctttggacaaag

SEQ ID NO: 101276 - DNA, 25 bp, Canis familiaris
gcatcatctccaggctgtttgggac

SEQ ID NO: 101277 - DNA, 25 bp, Canis familiaris
gcattcttcatctatttagttagca

SEQ ID NO: 101278 - DNA, 25 bp, Canis familiaris
gcattcttgtatttcattttagatt

SEQ ID NO: 101279 - DNA, 25 bp, Canis familiaris
gcattcttgtggttcatttgcatgg

SEQ ID NO: 101280 - DNA, 25 bp, Canis familiaris
gcattattggctagacattcctttt

SEQ ID NO: 101281 - DNA, 25 bp, Canis familiaris
gcattatggaacagatttctttttt

SEQ ID NO: 101282 - DNA, 25 bp, Canis familiaris
gcatccaagaacattaaatttttta

SEQ ID NO: 101283 - DNA, 25 bp, Canis familiaris
gcatcatagtacctattaacttgtt

SEQ ID NO: 101284 - DNA, 25 bp, Canis familiaris
gcatcagaagacctacgccttcagt

SEQ ID NO: 101285 - DNA, 25 bp, Canis familiaris
gcatctgaagacatcagccacatta

SEQ ID NO: 101286 - DNA, 25 bp, Canis familiaris
gcatgctcaagactatgtccttaca

SEQ ID NO: 101287 - DNA, 25 bp, Canis familiaris
gcaggcagagcagttggccctggaa

SEQ ID NO: 101288 - DNA, 25 bp, Canis familiaris
gcatgaaagctagggctcctggtct

SEQ ID NO: 101289 - DNA, 25 bp, Canis familiaris
gcatcaagagaagggctcctcagcc

SEQ ID NO: 101290 - DNA, 25 bp, Canis familiaris
gcatagcaggaggccgggctgagcc

SEQ ID NO: 101291 - DNA, 25 bp, Canis familiaris
gcatgagaggattgcccggtaccaa

SEQ ID NO: 101292 - DNA, 25 bp, Canis familiaris
gcataaatcttagctgtgtcacaca

SEQ ID NO: 101293 - DNA, 25 bp, Canis familiaris
gcatagaacccaggtgtgctcacac

SEQ ID NO: 101294 - DNA, 25 bp, Canis familiaris
gcattcaccttcatgtgtcttcagc

SEQ ID NO: 101295 - DNA, 25 bp, Canis familiaris
gcatcaactgctgcaaggtgctatg

SEQ ID NO: 101296 - DNA, 25 bp, Canis familiaris
gcatacatctatccaagttccattc

SEQ ID NO: 101297 - DNA, 25 bp, Canis familiaris
gcatcattatatcaactaccactct

SEQ ID NO: 101298 - DNA, 25 bp, Canis familiaris
gcataattatgctaactagtcctca

SEQ ID NO: 101299 - DNA, 25 bp, Canis familiaris
gcatcaacattctgtcaaggcctca

SEQ ID NO: 101300 - DNA, 25 bp, Canis familiaris
gcatcaacattctggcgagttcgac

SEQ ID NO: 101301 - DNA, 25 bp, Canis familiaris
gcatcaacttcacaggcagcgtgcc

SEQ ID NO: 101302 - DNA, 25 bp, Canis familiaris
gcatcaactcttgagcacagcatgg

SEQ ID NO: 101303 - DNA, 25 bp, Canis familiaris
gcattacttttacctgctatgtata

SEQ ID NO: 101304 - DNA, 25 bp, Canis familiaris
gcattacttttacctatgttttagt

SEQ ID NO: 101305 - DNA, 25 bp, Canis familiaris
gcattgactttgtaccaagtggttc

SEQ ID NO: 101306 - DNA, 25 bp, Canis familiaris
gcatgggtggctcaaccagttgtct

SEQ ID NO: 101307 - DNA, 25 bp, Canis familiaris
gcattaatcctatagctctgtattt

SEQ ID NO: 101308 - DNA, 25 bp, Canis familiaris
gcattcaagctccaaggctgtgaaa

SEQ ID NO: 101309 - DNA, 25 bp, Canis familiaris
gcatcccagcttcatagagtgataa

SEQ ID NO: 101310 - DNA, 25 bp, Canis familiaris
gcatcctggtggccaaaggccagac

SEQ ID NO: 101311 - DNA, 25 bp, Canis familiaris
gcatctggtcttgctaaggcacgca

SEQ ID NO: 101312 - DNA, 25 bp, Canis familiaris
gcatcttctctttcgacggcagaga

SEQ ID NO: 101313 - DNA, 25 bp, Canis familiaris
gcattcaagtattctgccaggggaa

SEQ ID NO: 101314 - DNA, 25 bp, Canis familiaris
gcaggaggttttgcgggcgaaccgc

SEQ ID NO: 101315 - DNA, 25 bp, Canis familiaris
gcaggaaactttgtgcggtgtcccc

SEQ ID NO: 101316 - DNA, 25 bp, Canis familiaris
gcaggaaggcccggaggggcatcct

SEQ ID NO: 101317 - DNA, 25 bp, Canis familiaris
gcagccgaacccggtaggtcttgac

SEQ ID NO: 101318 - DNA, 25 bp, Canis familiaris
gcagggagggtctgtaaactctgac

SEQ ID NO: 101319 - DNA, 25 bp, Canis familiaris
gcagtacagggctcttcaaacttgt

SEQ ID NO: 101320 - DNA, 25 bp, Canis familiaris
gcatggaaggcgtttgtaaaatgtt

SEQ ID NO: 101321 - DNA, 25 bp, Canis familiaris
gcatgttggtcctttataaaattgg

SEQ ID NO: 101322 - DNA, 25 bp, Canis familiaris
gcagtctgcactttttacgtacttt

SEQ ID NO: 101323 - DNA, 25 bp, Canis familiaris
gcatttactttgaccaatgttcttt

SEQ ID NO: 101324 - DNA, 25 bp, Canis familiaris
gcattattctttccacagtggtagt

SEQ ID NO: 101325 - DNA, 25 bp, Canis familiaris
gcatttgttattaaactgctggagt

SEQ ID NO: 101326 - DNA, 25 bp, Canis familiaris
gcatttgtttgtacaagatccgcag

SEQ ID NO: 101327 - DNA, 25 bp, Canis familiaris
gcatccctgttgtaatggacccaga

SEQ ID NO: 101328 - DNA, 25 bp, Canis familiaris
gcatcagcctcacaaagtgacccag

SEQ ID NO: 101329 - DNA, 25 bp, Canis familiaris
gcatacctcagagataggccctgct

SEQ ID NO: 101330 - DNA, 25 bp, Canis familiaris
gcatacaccatagaacaggcccttt

SEQ ID NO: 101331 - DNA, 25 bp, Canis familiaris
gcattcacctaataaagccactgtt

SEQ ID NO: 101332 - DNA, 25 bp, Canis familiaris
gcattcactgcttttacaaggcctt

SEQ ID NO: 101333 - DNA, 25 bp, Canis familiaris
gcatccttgtctttaaagtcactta

SEQ ID NO: 101334 - DNA, 25 bp, Canis familiaris
gcatcagctttcctgggaagagcct

SEQ ID NO: 101335 - DNA, 25 bp, Canis familiaris
gcatgactatgacctaggctgggcc

SEQ ID NO: 101336 - DNA, 25 bp, Canis familiaris
gcatgactcagatcctactggcttc

SEQ ID NO: 101337 - DNA, 25 bp, Canis familiaris
gcatgcctaggacacacgattttgt

SEQ ID NO: 101338 - DNA, 25 bp, Canis familiaris
gcatggggggcgtcacaattgctgg

SEQ ID NO: 101339 - DNA, 25 bp, Canis familiaris
gcatagtgcagggctgccacaactc

SEQ ID NO: 101340 - DNA, 25 bp, Canis familiaris
gcattatgcgagtcacgacagcacc

SEQ ID NO: 101341 - DNA, 25 bp, Canis familiaris
gcatctggggattcttcagcacagg

SEQ ID NO: 101342 - DNA, 25 bp, Canis familiaris
gcatcttggccttgcttggaataga

SEQ ID NO: 101343 - DNA, 25 bp, Canis familiaris
gcatatgggctttttcagaatcatt

SEQ ID NO: 101344 - DNA, 25 bp, Canis familiaris
gcattctggcattttgtaagctgct

SEQ ID NO: 101345 - DNA, 25 bp, Canis familiaris
gcatctcgcacttggttcaagcatc

SEQ ID NO: 101346 - DNA, 25 bp, Canis familiaris
gcatttgcacttggccctgagatat

SEQ ID NO: 101347 - DNA, 25 bp, Canis familiaris
gcagttccacgcccgtgatatttat

SEQ ID NO: 101348 - DNA, 25 bp, Canis familiaris
gcagtcggctagatacttcaattat

SEQ ID NO: 101349 - DNA, 25 bp, Canis familiaris
gcaggcgtccagatctttaattttg

SEQ ID NO: 101350 - DNA, 25 bp, Canis familiaris
gcaggcacaactctttatacggttg

SEQ ID NO: 101351 - DNA, 25 bp, Canis familiaris
gcagacacgcccgtagtgtagggtc

SEQ ID NO: 101352 - DNA, 25 bp, Canis familiaris
gcagatacacggaggtgtcgggtga

SEQ ID NO: 101353 - DNA, 25 bp, Canis familiaris
gcagaacttcagaggtgggcaggta

SEQ ID NO: 101354 - DNA, 25 bp, Canis familiaris
gcagtactctactgaggtggtcgaa

SEQ ID NO: 101355 - DNA, 25 bp, Canis familiaris
gcattacttaattcagggtggcaga

SEQ ID NO: 101356 - DNA, 25 bp, Canis familiaris
gcattctttacatagggctggggcg

SEQ ID NO: 101357 - DNA, 25 bp, Canis familiaris
gcaactgttatctgtaggctgggac

SEQ ID NO: 101358 - DNA, 25 bp, Canis familiaris
gcatatcttctttactcagtctggt

SEQ ID NO: 101359 - DNA, 25 bp, Canis familiaris
gcatacttctatgaaattctgtgat

SEQ ID NO: 101360 - DNA, 25 bp, Canis familiaris
gcatctcttctagaatttttttaaa

SEQ ID NO: 101361 - DNA, 25 bp, Canis familiaris
gcattattttgcccagttttcttat

SEQ ID NO: 101362 - DNA, 25 bp, Canis familiaris
gcatttactttgccattctttcttt

SEQ ID NO: 101363 - DNA, 25 bp, Canis familiaris
gcatattcccttttattttgttctt

SEQ ID NO: 101364 - DNA, 25 bp, Canis familiaris
gcatttcccttttgtttacatggtc

SEQ ID NO: 101365 - DNA, 25 bp, Canis familiaris
gcatctttcttgtttggcttacatg

SEQ ID NO: 101366 - DNA, 25 bp, Canis familiaris
gcatttggctcttcattggtttcat

SEQ ID NO: 101367 - DNA, 25 bp, Canis familiaris
gcattagccctattgtgagtattca

SEQ ID NO: 101368 - DNA, 25 bp, Canis familiaris
gcattagcacctttgacatctttcc

SEQ ID NO: 101369 - DNA, 25 bp, Canis familiaris
gcatctgtcacctttgatgacttcc

SEQ ID NO: 101370 - DNA, 25 bp, Canis familiaris
gcatctgtcttcatctgatacatat

SEQ ID NO: 101371 - DNA, 25 bp, Canis familiaris
gcatttctgcacataatccatactt

SEQ ID NO: 101372 - DNA, 25 bp, Canis familiaris
gcattatctataaatacactcacct

SEQ ID NO: 101373 - DNA, 25 bp, Canis familiaris
gcatccatctgagttgtaggtcacc

SEQ ID NO: 101374 - DNA, 25 bp, Canis familiaris
gcatgcacgtggggatttgctcact

SEQ ID NO: 101375 - DNA, 25 bp, Canis familiaris
gcatcacgctggggagtgttttgag

SEQ ID NO: 101376 - DNA, 25 bp, Canis familiaris
gcatgcaggaggccagggttttagt

SEQ ID NO: 101377 - DNA, 25 bp, Canis familiaris
gcatgtgtgcaagaggtttttttac

SEQ ID NO: 101378 - DNA, 25 bp, Canis familiaris
gcatggtaatgcttagttttctttt

SEQ ID NO: 101379 - DNA, 25 bp, Canis familiaris
gcatcagtaggcttcagttccgtag

SEQ ID NO: 101380 - DNA, 25 bp, Canis familiaris
gcatcgggggtagtgtccggagcat

SEQ ID NO: 101381 - DNA, 25 bp, Canis familiaris
gcatagaggggtacctgccctcgaa

SEQ ID NO: 101382 - DNA, 25 bp, Canis familiaris
gcaaggcaggcgaaacttccttcga

SEQ ID NO: 101383 - DNA, 25 bp, Canis familiaris
gcagaggccggaaacttactggtgt

SEQ ID NO: 101384 - DNA, 25 bp, Canis familiaris
gcagggggttggggtgactgggtga

SEQ ID NO: 101385 - DNA, 25 bp, Canis familiaris
gcagggagtctgtgggtaaggggga

SEQ ID NO: 101386 - DNA, 25 bp, Canis familiaris
gcagctgcggtccatcttggtcaag

SEQ ID NO: 101387 - DNA, 25 bp, Canis familiaris
gcaggggtccttagtatgggccttg

SEQ ID NO: 101388 - DNA, 25 bp, Canis familiaris
gcagattcgttttcgttgggctcat

SEQ ID NO: 101389 - DNA, 25 bp, Canis familiaris
gcacttcaggccaccattgggaatt

SEQ ID NO: 101390 - DNA, 25 bp, Canis familiaris
gcacgtagtgtactccatggggttt

SEQ ID NO: 101391 - DNA, 25 bp, Canis familiaris
gcacagaaaggccacaaggggttcc

SEQ ID NO: 101392 - DNA, 25 bp, Canis familiaris
gcactggaagagtacccggggacca

SEQ ID NO: 101393 - DNA, 25 bp, Canis familiaris
gcatcaggggagtgcccgtgttgtc

SEQ ID NO: 101394 - DNA, 25 bp, Canis familiaris
gcatcaaggacatggccgggctgct

SEQ ID NO: 101395 - DNA, 25 bp, Canis familiaris
gcatccagttcatctctatggtctt

SEQ ID NO: 101396 - DNA, 25 bp, Canis familiaris
gcatctcagtgtggatctctgctgc

SEQ ID NO: 101397 - DNA, 25 bp, Canis familiaris
gcatctctgctagtgctcacgatga

SEQ ID NO: 101398 - DNA, 25 bp, Canis familiaris
gcatctatgatacgctcctggagct

SEQ ID NO: 101399 - DNA, 25 bp, Canis familiaris
gcatcgagaacgacgaggccttcgc

SEQ ID NO: 101400 - DNA, 25 bp, Canis familiaris
gcatcacggacagtccgtgtctctg

SEQ ID NO: 101401 - DNA, 25 bp, Canis familiaris
gcatacgctggagctcggtttgtct

SEQ ID NO: 101402 - DNA, 25 bp, Canis familiaris
gcagtcgctggagcaggttttctca

SEQ ID NO: 101403 - DNA, 25 bp, Canis familiaris
gcaggctctggagcagtttgccact

SEQ ID NO: 101404 - DNA, 25 bp, Canis familiaris
gcatatcacatggtcctgtttgccc

SEQ ID NO: 101405 - DNA, 25 bp, Canis familiaris
gcatacatctgctctgtgtattccc

SEQ ID NO: 101406 - DNA, 25 bp, Canis familiaris
gcataatttcacttgtattcagctg

SEQ ID NO: 101407 - DNA, 25 bp, Canis familiaris
gcatcagtttactgtctgtaagaga

SEQ ID NO: 101408 - DNA, 25 bp, Canis familiaris
gcatcttgattctgggcggaagaaa

SEQ ID NO: 101409 - DNA, 25 bp, Canis familiaris
gcatcggcaaacaccggaagcaccc

SEQ ID NO: 101410 - DNA, 25 bp, Canis familiaris
gcacagtggaacactaggggaccgg

SEQ ID NO: 101411 - DNA, 25 bp, Canis familiaris
tacgtggactacgtagggccggtgc

SEQ ID NO: 101412 - DNA, 25 bp, Canis familiaris
gcacgggacttatttggtccggtgg

SEQ ID NO: 101413 - DNA, 25 bp, Canis familiaris
gcagagccaacaaaggggtccgggg

SEQ ID NO: 101414 - DNA, 25 bp, Canis familiaris
gcatggccatcataagggggggctt

SEQ ID NO: 101415 - DNA, 25 bp, Canis familiaris
gcatcgcccagtctgagcaggaggg

SEQ ID NO: 101416 - DNA, 25 bp, Canis familiaris
gcatctcctcaggcaaaagtggagg

SEQ ID NO: 101417 - DNA, 25 bp, Canis familiaris
gcatctgcctaggaaattggtttct

SEQ ID NO: 101418 - DNA, 25 bp, Canis familiaris
gcatctactcgggaatgggcctatt

SEQ ID NO: 101419 - DNA, 25 bp, Canis familiaris
gcatttacagggcatgtgacatcta

SEQ ID NO: 101420 - DNA, 25 bp, Canis familiaris
gcatttaaagctctgtaataattct

SEQ ID NO: 101421 - DNA, 25 bp, Canis familiaris
gcatttcagaagagatttaatcagt

SEQ ID NO: 101422 - DNA, 25 bp, Canis familiaris
gcatcttcaaagagttgtcccagct

SEQ ID NO: 101423 - DNA, 25 bp, Canis familiaris
gcatttcaaagcacttgtcacttat

SEQ ID NO: 101424 - DNA, 25 bp, Canis familiaris
gcatttgaactcactatttttatag

SEQ ID NO: 101425 - DNA, 25 bp, Canis familiaris
gcattaggtcttgttgagtatctta

SEQ ID NO: 101426 - DNA, 25 bp, Canis familiaris
gcattagtttctttagaatgttcat

SEQ ID NO: 101427 - DNA, 25 bp, Canis familiaris
gcatttttctgcagctaaagttcgc

SEQ ID NO: 101428 - DNA, 25 bp, Canis familiaris
gcatttctttgcacatattatgggc

SEQ ID NO: 101429 - DNA, 25 bp, Canis familiaris
gcatcccttggaatattttggtctt

SEQ ID NO: 101430 - DNA, 25 bp, Canis familiaris
gcatcaccattgccactgattttat

SEQ ID NO: 101431 - DNA, 25 bp, Canis familiaris
gcatgcgtctgcacacagttttagg

SEQ ID NO: 101432 - DNA, 25 bp, Canis familiaris
gcatctactcagggcagttatatag

SEQ ID NO: 101433 - DNA, 25 bp, Canis familiaris
gcatatactctgctgcatgtcttag

SEQ ID NO: 101434 - DNA, 25 bp, Canis familiaris
gcataggcgctgggttcatctaccc

SEQ ID NO: 101435 - DNA, 25 bp, Canis familiaris
gcataggcgctttgtgatagccccc

SEQ ID NO: 101436 - DNA, 25 bp, Canis familiaris
gcatgaggccttgtgtagctgatcc

SEQ ID NO: 101437 - DNA, 25 bp, Canis familiaris
gcatcggccttaacaagctggtttg

SEQ ID NO: 101438 - DNA, 25 bp, Canis familiaris
gcatctggcttgacaatctacatgg

SEQ ID NO: 101439 - DNA, 25 bp, Canis familiaris
gcatcgtcattggccctaaggtgac

SEQ ID NO: 101440 - DNA, 25 bp, Canis familiaris
gcatccactggtgctgccaaggctg

SEQ ID NO: 101441 - DNA, 25 bp, Canis familiaris
gcatcaccgtgtgcggcaagacgtc

SEQ ID NO: 101442 - DNA, 25 bp, Canis familiaris
gcatcacctggggagaggagaccct

SEQ ID NO: 101443 - DNA, 25 bp, Canis familiaris
gcatatccacgcggagaggagcacc

SEQ ID NO: 101444 - DNA, 25 bp, Canis familiaris
gcataccattggccagacacgaggc

SEQ ID NO: 101445 - DNA, 25 bp, Canis familiaris
gcatgactttgacagactccaggct

SEQ ID NO: 101446 - DNA, 25 bp, Canis familiaris
gcatgtgcctttcaactctagaatt

SEQ ID NO: 101447 - DNA, 25 bp, Canis familiaris
gcatctgtctttctcaatctgactt

SEQ ID NO: 101448 - DNA, 25 bp, Canis familiaris
gcatcttctagagacacattgacca

SEQ ID NO: 101449 - DNA, 25 bp, Canis familiaris
gcatttgcatcatgacccttacata

SEQ ID NO: 101450 - DNA, 25 bp, Canis familiaris
gcatttatgagacccgctgctagct

SEQ ID NO: 101451 - DNA, 25 bp, Canis familiaris
gcatttcatgaaaaagctgcttctt

SEQ ID NO: 101452 - DNA, 25 bp, Canis familiaris
gcattttacacatagcttttgataa

SEQ ID NO: 101453 - DNA, 25 bp, Canis familiaris
gcatttttgctaaactttctggtac

SEQ ID NO: 101454 - DNA, 25 bp, Canis familiaris
gcatttctaataaactccctggtgg

SEQ ID NO: 101455 - DNA, 25 bp, Canis familiaris
gcatctgttaaaccctccagaaggg

SEQ ID NO: 101456 - DNA, 25 bp, Canis familiaris
gcatcttggtgatctcgggaaaggg

SEQ ID NO: 101457 - DNA, 25 bp, Canis familiaris
gcatcttgggctacactgaggacca

SEQ ID NO: 101458 - DNA, 25 bp, Canis familiaris
gcatcctgggctacactgagcacca

SEQ ID NO: 101459 - DNA, 25 bp, Canis familiaris
gcatcctcagtgatgtctgagccca

SEQ ID NO: 101460 - DNA, 25 bp, Canis familiaris
gcatctgaagcgtgtagcagctcca

SEQ ID NO: 101461 - DNA, 25 bp, Canis familiaris
gcatcatgtgatctgggacctgcca

SEQ ID NO: 101462 - DNA, 25 bp, Canis familiaris
gcatttggtcgggcagccgcacact

SEQ ID NO: 101463 - DNA, 25 bp, Canis familiaris
gcatgacagcgtcaccagggagcat

SEQ ID NO: 101464 - DNA, 25 bp, Canis familiaris
gcataagcgtccactgtggtgcctc

SEQ ID NO: 101465 - DNA, 25 bp, Canis familiaris
gcatcggccccaagtgggctacatc

SEQ ID NO: 101466 - DNA, 25 bp, Canis familiaris
gcatcggccccaagtgggctacatc

SEQ ID NO: 101467 - DNA, 25 bp, Canis familiaris
gcatcggccccaagtgggctacatc

SEQ ID NO: 101468 - DNA, 25 bp, Canis familiaris
gcatcggccccaagtgggctacatc

SEQ ID NO: 101469 - DNA, 25 bp, Canis familiaris
gcatcggccccaagtgggctacatc

SEQ ID NO: 101470 - DNA, 25 bp, Canis familiaris
gcatcggccccaagtgggctacatc

SEQ ID NO: 101471 - DNA, 25 bp, Canis familiaris
gcatcggccccaagtgggctacatc

SEQ ID NO: 101472 - DNA, 25 bp, Canis familiaris
gcatcggccccaagtgggctacatc

SEQ ID NO: 101473 - DNA, 25 bp, Canis familiaris
gcatcggccccaagtgggctacatc

SEQ ID NO: 101474 - DNA, 25 bp, Canis familiaris
gcatcggccccaatgtgggctacat

SEQ ID NO: 101475 - DNA, 25 bp, Canis familiaris
gcatcggcctcgagatgcaggcggc

SEQ ID NO: 101476 - DNA, 25 bp, Canis familiaris
gcatcgagcccgagccatgaagatc

SEQ ID NO: 101477 - DNA, 25 bp, Canis familiaris
gcatcggcagacctactagctggat

SEQ ID NO: 101478 - DNA, 25 bp, Canis familiaris
gcatcgtggaggtcctcactgaggt

SEQ ID NO: 101479 - DNA, 25 bp, Canis familiaris
gcatgcagggcaaagccttctgagg

SEQ ID NO: 101480 - DNA, 25 bp, Canis familiaris
gcatgagggcagctgccctccaatg

SEQ ID NO: 101481 - DNA, 25 bp, Canis familiaris
gcatggacgtgtacacacccaagtc

SEQ ID NO: 101482 - DNA, 25 bp, Canis familiaris
gcagggatcgttacccgaactgcat

SEQ ID NO: 101483 - DNA, 25 bp, Canis familiaris
gcaggactcggcacatccgaaactc

SEQ ID NO: 101484 - DNA, 25 bp, Canis familiaris
gcaggactggaccaaccagcagctg

SEQ ID NO: 101485 - DNA, 25 bp, Canis familiaris
gcatacctggacattgacgctgatg

SEQ ID NO: 101486 - DNA, 25 bp, Canis familiaris
gcatattcgaagatagccacgcaga

SEQ ID NO: 101487 - DNA, 25 bp, Canis familiaris
gcatttctaagaatctccaccacat

SEQ ID NO: 101488 - DNA, 25 bp, Canis familiaris
gcatatttactgtttccaaccatat

SEQ ID NO: 101489 - DNA, 25 bp, Canis familiaris
gcatattgacctttgttaccttctc

SEQ ID NO: 101490 - DNA, 25 bp, Canis familiaris
gcataaacactgtctgctttcctgt

SEQ ID NO: 101491 - DNA, 25 bp, Canis familiaris
gcaaaacgtctcttgaatccagtca

SEQ ID NO: 101492 - DNA, 25 bp, Canis familiaris
gcaacaggcgttctgcaacgcggac

SEQ ID NO: 101493 - DNA, 25 bp, Canis familiaris
gcaaaactgagtcctaacctgtgag

SEQ ID NO: 101494 - DNA, 25 bp, Canis familiaris
gcaggaactgactgttacctggtga

SEQ ID NO: 101495 - DNA, 25 bp, Canis familiaris
gcaggaacgtacgtttctaagtggc

SEQ ID NO: 101496 - DNA, 25 bp, Canis familiaris
gcaggaacagccgagtaaccacagc

SEQ ID NO: 101497 - DNA, 25 bp, Canis familiaris
gcaggagaagccgaggggacaccgc

SEQ ID NO: 101498 - DNA, 25 bp, Canis familiaris
gcaggagttccaaggggagccagcc

SEQ ID NO: 101499 - DNA, 25 bp, Canis familiaris
gcaggcagtacctcctggacaagaa

SEQ ID NO: 101500 - DNA, 25 bp, Canis familiaris
gcatgccagaacagactggtgaaaa

SEQ ID NO: 101501 - DNA, 25 bp, Canis familiaris
gcatctgggaaccactggctgtaaa

SEQ ID NO: 101502 - DNA, 25 bp, Canis familiaris
gcatctgggatgtgaagagcttgga

SEQ ID NO: 101503 - DNA, 25 bp, Canis familiaris
gcatctaggagacacattcttgact

SEQ ID NO: 101504 - DNA, 25 bp, Canis familiaris
gcatcttatagtcagccttcaatct

SEQ ID NO: 101505 - DNA, 25 bp, Canis familiaris
gcatctttatctgcgcaaactatct

SEQ ID NO: 101506 - DNA, 25 bp, Canis familiaris
gcatgcttgtattatccaatggtat

SEQ ID NO: 101507 - DNA, 25 bp, Canis familiaris
gcatgtggtaagaccctgtggcggg

SEQ ID NO: 101508 - DNA, 25 bp, Canis familiaris
gcatgtcggaagcgggtgaggagca

SEQ ID NO: 101509 - DNA, 25 bp, Canis familiaris
gcagttaaagctcgtagttggatct

SEQ ID NO: 101510 - DNA, 25 bp, Canis familiaris
gcaggtgaagttccttgatgccctc

SEQ ID NO: 101511 - DNA, 25 bp, Canis familiaris
gcatgggggaacagtgagcacttag

SEQ ID NO: 101512 - DNA, 25 bp, Canis familiaris
gcataggctggttggtggtcctttg

SEQ ID NO: 101513 - DNA, 25 bp, Canis familiaris
gcatagcagctagtaggtgttcact

SEQ ID NO: 101514 - DNA, 25 bp, Canis familiaris
gcatatatgcatttaacgttcagtt

SEQ ID NO: 101515 - DNA, 25 bp, Canis familiaris
gcatgatcttagcactctgttaatt

SEQ ID NO: 101516 - DNA, 25 bp, Canis familiaris
gcagtttacaaggtgtcagaatatg

SEQ ID NO: 101517 - DNA, 25 bp, Canis familiaris
gcatgtgattgacagcttccaaaca

SEQ ID NO: 101518 - DNA, 25 bp, Canis familiaris
gcatgtgtatgagatcgcccaagtt

SEQ ID NO: 101519 - DNA, 25 bp, Canis familiaris
gcatgttgattggaggccctacgca

SEQ ID NO: 101520 - DNA, 25 bp, Canis familiaris
gcagtttgccaaatgcccaatctac

SEQ ID NO: 101521 - DNA, 25 bp, Canis familiaris
gcatttgacaaaatccaacatccat

SEQ ID NO: 101522 - DNA, 25 bp, Canis familiaris
gcatagctgctaaattcatcactca

SEQ ID NO: 101523 - DNA, 25 bp, Canis familiaris
gcatgcctctgaattgtatacttta

SEQ ID NO: 101524 - DNA, 25 bp, Canis familiaris
gcatgatttgcacttttacctgtac

SEQ ID NO: 101525 - DNA, 25 bp, Canis familiaris
gcatattcatttatccatccattcc

SEQ ID NO: 101526 - DNA, 25 bp, Canis familiaris
gcatattctttgatatcttctctga

SEQ ID NO: 101527 - DNA, 25 bp, Canis familiaris
gcatatacaccttttttgcatctaa

SEQ ID NO: 101528 - DNA, 25 bp, Canis familiaris
gcatagccatacttgttttgatgtc

SEQ ID NO: 101529 - DNA, 25 bp, Canis familiaris
gcatggccatcctgatgttgctgac

SEQ ID NO: 101530 - DNA, 25 bp, Canis familiaris
gcatgtttcaagaatctgggagcac

SEQ ID NO: 101531 - DNA, 25 bp, Canis familiaris
gcatgtgccatcagcattctgggaa

SEQ ID NO: 101532 - DNA, 25 bp, Canis familiaris
gcaggagctgatggaggcggagaag

SEQ ID NO: 101533 - DNA, 25 bp, Canis familiaris
gcatcataattgggctccgcaaagg

SEQ ID NO: 101534 - DNA, 25 bp, Canis familiaris
gcatcataactggttctgtgcacaa

SEQ ID NO: 101535 - DNA, 25 bp, Canis familiaris
gcatatttccaatctgatgagcaat

SEQ ID NO: 101536 - DNA, 25 bp, Canis familiaris
gcatagttctgatcaagcataggag

SEQ ID NO: 101537 - DNA, 25 bp, Canis familiaris
gcataggtgtcgtcgagctcaggga

SEQ ID NO: 101538 - DNA, 25 bp, Canis familiaris
gcatcagggacgtgacttggtgaga

SEQ ID NO: 101539 - DNA, 25 bp, Canis familiaris
gcatggggacggaacttgtgggcag

SEQ ID NO: 101540 - DNA, 25 bp, Canis familiaris
gcatggaggacgcctgattttcagg

SEQ ID NO: 101541 - DNA, 25 bp, Canis familiaris
gcagggaacgcatttttgtcttgac

SEQ ID NO: 101542 - DNA, 25 bp, Canis familiaris
gcagggccaattttttgttcaggtg

SEQ ID NO: 101543 - DNA, 25 bp, Canis familiaris
gcatggcaccaatctctttttttgc

SEQ ID NO: 101544 - DNA, 25 bp, Canis familiaris
gcaggccaaaacctgttcccattgc

SEQ ID NO: 101545 - DNA, 25 bp, Canis familiaris
gcagaagaaaacatatttcccttat

SEQ ID NO: 101546 - DNA, 25 bp, Canis familiaris
gcaggagaaactatgtttttttgag

SEQ ID NO: 101547 - DNA, 25 bp, Canis familiaris
gcatgcatgcagactactatgtgtt

SEQ ID NO: 101548 - DNA, 25 bp, Canis familiaris
gcatcatgcatcttactgaaggtaa

SEQ ID NO: 101549 - DNA, 25 bp, Canis familiaris
gcatcatcatgcttacgaatgttct

SEQ ID NO: 101550 - DNA, 25 bp, Canis familiaris
gcatctatgcattttgaaggtctca

SEQ ID NO: 101551 - DNA, 25 bp, Canis familiaris
gcatgatcatactttgaagacatcc

SEQ ID NO: 101552 - DNA, 25 bp, Canis familiaris
gcatatgcagcctccaaacatgcaa

SEQ ID NO: 101553 - DNA, 25 bp, Canis familiaris
gcatatgcagcccgtgctaacatga

SEQ ID NO: 101554 - DNA, 25 bp, Canis familiaris
gcatacatagctcctctcaaaaaca

SEQ ID NO: 101555 - DNA, 25 bp, Canis familiaris
gcatgtctcaggccaccaagaggaa

SEQ ID NO: 101556 - DNA, 25 bp, Canis familiaris
gcagatattgggtagaaggcggaaa

SEQ ID NO: 101557 - DNA, 25 bp, Canis familiaris
gcatgttgtgagaataaatgaggta

SEQ ID NO: 101558 - DNA, 25 bp, Canis familiaris
gcatctgtgtggatcaactgctatg

SEQ ID NO: 101559 - DNA, 25 bp, Canis familiaris
gcatctgtgtgccttacagtcaagg

SEQ ID NO: 101560 - DNA, 25 bp, Canis familiaris
gcatcggaggcttaaggagggcagg

SEQ ID NO: 101561 - DNA, 25 bp, Canis familiaris
gcatctgaagacatttgaccggagg

SEQ ID NO: 101562 - DNA, 25 bp, Canis familiaris
gcatccaatgctcctttgagccagc

SEQ ID NO: 101563 - DNA, 25 bp, Canis familiaris
gcatccatattgctttggaggcttt

SEQ ID NO: 101564 - DNA, 25 bp, Canis familiaris
gcatgagttcatttctttgggcttt

SEQ ID NO: 101565 - DNA, 25 bp, Canis familiaris
gcatcagttcactcggttagattat

SEQ ID NO: 101566 - DNA, 25 bp, Canis familiaris
gcatcaaccaatcactgttagagct

SEQ ID NO: 101567 - DNA, 25 bp, Canis familiaris
gcatcaccccagaagtgttagcctg

SEQ ID NO: 101568 - DNA, 25 bp, Canis familiaris
gcatctctgcccttattgtgggttt

SEQ ID NO: 101569 - DNA, 25 bp, Canis familiaris
gcactcagtcacagaaggggtttct

SEQ ID NO: 101570 - DNA, 25 bp, Canis familiaris
gcatccatgtcccgaatggactgtg

SEQ ID NO: 101571 - DNA, 25 bp, Canis familiaris
gcatcctgtagccacttgcgaaggc

SEQ ID NO: 101572 - DNA, 25 bp, Canis familiaris
gcatagctatgaggagttggaagag

SEQ ID NO: 101573 - DNA, 25 bp, Canis familiaris
gcatcatcatattcatgtgttgcca

SEQ ID NO: 101574 - DNA, 25 bp, Canis familiaris
gcatcatcatgggcgtgttcacgct

SEQ ID NO: 101575 - DNA, 25 bp, Canis familiaris
gcatgcatgttggggttacctttac

SEQ ID NO: 101576 - DNA, 25 bp, Canis familiaris
gcatgcatgttggggttacctttac

SEQ ID NO: 101577 - DNA, 25 bp, Canis familiaris
gcaggccatgttcgttactagttac

SEQ ID NO: 101578 - DNA, 25 bp, Canis familiaris
gcaggtttgtagtcttgtagttagg

SEQ ID NO: 101579 - DNA, 25 bp, Canis familiaris
gcaggtctttttcttctggaaggat

SEQ ID NO: 101580 - DNA, 25 bp, Canis familiaris
gcagttttcgttccttgaaagggat

SEQ ID NO: 101581 - DNA, 25 bp, Canis familiaris
gagtcagtttgttccttagtaggta

SEQ ID NO: 101582 - DNA, 25 bp, Canis familiaris
gcagtattttggtccactctgtttt

SEQ ID NO: 101583 - DNA, 25 bp, Canis familiaris
gcagatattgtaatttccctttacg

SEQ ID NO: 101584 - DNA, 25 bp, Canis familiaris
gcatgaactgttttaccttatttac

SEQ ID NO: 101585 - DNA, 25 bp, Canis familiaris
gcatacatggttttttctttcttct

SEQ ID NO: 101586 - DNA, 25 bp, Canis familiaris
gcatcaaggattttttgtctttcag

SEQ ID NO: 101587 - DNA, 25 bp, Canis familiaris
gcatcaatttctttcctttgttcag

SEQ ID NO: 101588 - DNA, 25 bp, Canis familiaris
gcatgaatttggttccttttcctca

SEQ ID NO: 101589 - DNA, 25 bp, Canis familiaris
gcatgaacgcatggaatttttgtcc

SEQ ID NO: 101590 - DNA, 25 bp, Canis familiaris
gcatacctggaaaatgcttctgtcc

SEQ ID NO: 101591 - DNA, 25 bp, Canis familiaris
gcataccattaagagttcattatca

SEQ ID NO: 101592 - DNA, 25 bp, Canis familiaris
gcatgaacatttaaatatccatttc

SEQ ID NO: 101593 - DNA, 25 bp, Canis familiaris
gcatgcacacacttatacagtcaca

SEQ ID NO: 101594 - DNA, 25 bp, Canis familiaris
gcatctccctggaatcagactcaat

SEQ ID NO: 101595 - DNA, 25 bp, Canis familiaris
gcatccctctgacacagatgacact

SEQ ID NO: 101596 - DNA, 25 bp, Canis familiaris
gcatcgcccagaaacagagcaacct

SEQ ID NO: 101597 - DNA, 25 bp, Canis familiaris
gcatcgccgaaggagggcaacatag

SEQ ID NO: 101598 - DNA, 25 bp, Canis familiaris
gcatctgctaaagagaggacctatg

SEQ ID NO: 101599 - DNA, 25 bp, Canis familiaris
gcatgcagtaacaatatcaaagcct

SEQ ID NO: 101600 - DNA, 25 bp, Canis familiaris
gcatcatcgaactacataaacacat

SEQ ID NO: 101601 - DNA, 25 bp, Canis familiaris
gcatcatcgaactacataaacacat

SEQ ID NO: 101602 - DNA, 25 bp, Canis familiaris
gcatcatcgaactacataaacacat

SEQ ID NO: 101603 - DNA, 25 bp, Canis familiaris
gcatcatcggactacattgacacat

SEQ ID NO: 101604 - DNA, 25 bp, Canis familiaris
gcatgctgcaaacccaggacatcat

SEQ ID NO: 101605 - DNA, 25 bp, Canis familiaris
gcagacacagagacctggatcagat

SEQ ID NO: 101606 - DNA, 25 bp, Canis familiaris
gcatgaacatggtcctgttgggcac

SEQ ID NO: 101607 - DNA, 25 bp, Canis familiaris
gcatgaacagattcgcgtcggggtg

SEQ ID NO: 101608 - DNA, 25 bp, Canis familiaris
gcatgactcacatcgtgcgggaggt

SEQ ID NO: 101609 - DNA, 25 bp, Canis familiaris
gcatcatggccatcttgggctgtgg

SEQ ID NO: 101610 - DNA, 25 bp, Canis familiaris
gcatcagtgagtccgtgtgtgtgtg

SEQ ID NO: 101611 - DNA, 25 bp, Canis familiaris
gcatcagtggatcgtgtttcctgcc

SEQ ID NO: 101612 - DNA, 25 bp, Canis familiaris
gcatagctgtgtccatttttcttct

SEQ ID NO: 101613 - DNA, 25 bp, Canis familiaris
gcaggttgtgcctctatgacatgac

SEQ ID NO: 101614 - DNA, 25 bp, Canis familiaris
gcatcgctcgtgaaccttgagcata

SEQ ID NO: 101615 - DNA, 25 bp, Canis familiaris
gcatcctcctgcatgcttagagtaa

SEQ ID NO: 101616 - DNA, 25 bp, Canis familiaris
gcagccttcagctctgtagttaaat

SEQ ID NO: 101617 - DNA, 25 bp, Canis familiaris
gcagtgcctctgtacttagttacac

SEQ ID NO: 101618 - DNA, 25 bp, Canis familiaris
gcaggcacttgaaattttcttaatt

SEQ ID NO: 101619 - DNA, 25 bp, Canis familiaris
gcatgatgccttacagttttcaata

SEQ ID NO: 101620 - DNA, 25 bp, Canis familiaris
gcatgatacttctggctttcagctc

SEQ ID NO: 101621 - DNA, 25 bp, Canis familiaris
gcatgatgtcctcaaggttcattca

SEQ ID NO: 101622 - DNA, 25 bp, Canis familiaris
gcaggctggtgcaaaagttattaaa

SEQ ID NO: 101623 - DNA, 25 bp, Canis familiaris
gcaggggccctataatttcatacag

SEQ ID NO: 101624 - DNA, 25 bp, Canis familiaris
gcaggaagccacgggaattctggac

SEQ ID NO: 101625 - DNA, 25 bp, Canis familiaris
gcaggaacaccaggctttgtcggtc

SEQ ID NO: 101626 - DNA, 25 bp, Canis familiaris
gcaggagcaaggggcactgctgggg

SEQ ID NO: 101627 - DNA, 25 bp, Canis familiaris
gcatgttgccccagcactggagaag

SEQ ID NO: 101628 - DNA, 25 bp, Canis familiaris
gcatgttggccacacatcatctggc

SEQ ID NO: 101629 - DNA, 25 bp, Canis familiaris
gcatctttctagtcactcagcttgc

SEQ ID NO: 101630 - DNA, 25 bp, Canis familiaris
gcatctactttgaatctgctttgca

SEQ ID NO: 101631 - DNA, 25 bp, Canis familiaris
gcatgctagtgcttaattgtttctg

SEQ ID NO: 101632 - DNA, 25 bp, Canis familiaris
gcatcacagtggtatatttgttata

SEQ ID NO: 101633 - DNA, 25 bp, Canis familiaris
gcatcaagggcagcaatgtgttcaa

SEQ ID NO: 101634 - DNA, 25 bp, Canis familiaris
gcatcagggtgcgccataggatgga

SEQ ID NO: 101635 - DNA, 25 bp, Canis familiaris
gcatctggttcgcctatagacgagg

SEQ ID NO: 101636 - DNA, 25 bp, Canis familiaris
gcatcttgctttgtcattaggaggg

SEQ ID NO: 101637 - DNA, 25 bp, Canis familiaris
gcatctacatttttatccaggaagc

SEQ ID NO: 101638 - DNA, 25 bp, Canis familiaris
gcatctaagcgttcatagtaggaag

SEQ ID NO: 101639 - DNA, 25 bp, Canis familiaris
gcatcgaacagataactgggtagca

SEQ ID NO: 101640 - DNA, 25 bp, Canis familiaris
gcatctcaacaatcacagcttgcgc

SEQ ID NO: 101641 - DNA, 25 bp, Canis familiaris
gcatcctgacatctatgcagttcca

SEQ ID NO: 101642 - DNA, 25 bp, Canis familiaris
gcatcactgacaccattcatgtttt

SEQ ID NO: 101643 - DNA, 25 bp, Canis familiaris
gcatgactgaaggctttcactgtgt

SEQ ID NO: 101644 - DNA, 25 bp, Canis familiaris
gcatgagattcagcgcttcatcagt

SEQ ID NO: 101645 - DNA, 25 bp, Canis familiaris
gcatcagtttccatctgagagttta

SEQ ID NO: 101646 - DNA, 25 bp, Canis familiaris
gcagagtttaaccattgaatattac

SEQ ID NO: 101647 - DNA, 25 bp, Canis familiaris
gcatggcttaaaccacgtcttaacc

SEQ ID NO: 101648 - DNA, 25 bp, Canis familiaris
gcagtcttaatagacctcttgaaga

SEQ ID NO: 101649 - DNA, 25 bp, Canis familiaris
gcagtcttacaggggcttctgggaa

SEQ ID NO: 101650 - DNA, 25 bp, Canis familiaris
gcagaactacacggtcgtcattcgt

SEQ ID NO: 101651 - DNA, 25 bp, Canis familiaris
gcagaaaagtccacctatgttgtct

SEQ ID NO: 101652 - DNA, 25 bp, Canis familiaris
gcagtacaagtccggcggctgtttg

SEQ ID NO: 101653 - DNA, 25 bp, Canis familiaris
gcagatactaacccttggtggacgg

SEQ ID NO: 101654 - DNA, 25 bp, Canis familiaris
gcagtacattccacttggtttccga

SEQ ID NO: 101655 - DNA, 25 bp, Canis familiaris
gcatgtcaacggtgtcggtttccgc

SEQ ID NO: 101656 - DNA, 25 bp, Canis familiaris
gcaggaactgggctgatcctttctc

SEQ ID NO: 101657 - DNA, 25 bp, Canis familiaris
gcaggaaagtcagattcagtttata

SEQ ID NO: 101658 - DNA, 25 bp, Canis familiaris
gcatgagaatcactaggatatttgt

SEQ ID NO: 101659 - DNA, 25 bp, Canis familiaris
gcatgatgagaagatggtatgattc

SEQ ID NO: 101660 - DNA, 25 bp, Canis familiaris
gcatgctgaagcgacattgttggtc

SEQ ID NO: 101661 - DNA, 25 bp, Canis familiaris
gcatcgaagccattgtcttctgcct

SEQ ID NO: 101662 - DNA, 25 bp, Canis familiaris
gcaccactgccaatgtcatatatgc

SEQ ID NO: 101663 - DNA, 25 bp, Canis familiaris
gcatccagtcaactgtcacatctct

SEQ ID NO: 101664 - DNA, 25 bp, Canis familiaris
gcatcacgtcaattgccgcatttgg

SEQ ID NO: 101665 - DNA, 25 bp, Canis familiaris
gcatcagctggtttctggctttgtc

SEQ ID NO: 101666 - DNA, 25 bp, Canis familiaris
gcatgggagtcaacttccttgcatc

SEQ ID NO: 101667 - DNA, 25 bp, Canis familiaris
gcatgaggagtgaccactgccttcc

SEQ ID NO: 101668 - DNA, 25 bp, Canis familiaris
gcatgagagagtacaagcaggggga

SEQ ID NO: 101669 - DNA, 25 bp, Canis familiaris
gcaggggctaacaggactggagtcc

SEQ ID NO: 101670 - DNA, 25 bp, Canis familiaris
gcaggtagcttaaagagtggggtac

SEQ ID NO: 101671 - DNA, 25 bp, Canis familiaris
gcaggtgggaaaacagtgggcttac

SEQ ID NO: 101672 - DNA, 25 bp, Canis familiaris
gcagggagggtctcaggggtgttct

SEQ ID NO: 101673 - DNA, 25 bp, Canis familiaris
gcaggggggcacccagggtggagtc

SEQ ID NO: 101674 - DNA, 25 bp, Canis familiaris
gcatgaacctggctggagggctggg

SEQ ID NO: 101675 - DNA, 25 bp, Canis familiaris
gcatcgacctggtcatggggcagct

SEQ ID NO: 101676 - DNA, 25 bp, Canis familiaris
gcatcagaccccgagagatcagagt

SEQ ID NO: 101677 - DNA, 25 bp, Canis familiaris
gcatcgtcgcacatcgaacaggata

SEQ ID NO: 101678 - DNA, 25 bp, Canis familiaris
gcatcagcctcaagttggacagcga

SEQ ID NO: 101679 - DNA, 25 bp, Canis familiaris
gcatcagagaaaatgtggcacagca

SEQ ID NO: 101680 - DNA, 25 bp, Canis familiaris
gcatgcatggcacattgttcaccaa

SEQ ID NO: 101681 - DNA, 25 bp, Canis familiaris
gcatgatgggcttcttgaaatcggc

SEQ ID NO: 101682 - DNA, 25 bp, Canis familiaris
gcatcagggaactgtcacatcttgc

SEQ ID NO: 101683 - DNA, 25 bp, Canis familiaris
gcatggtgtggagcgtcaacctgac

SEQ ID NO: 101684 - DNA, 25 bp, Canis familiaris
gcatgttagtggccagctcaaggct

SEQ ID NO: 101685 - DNA, 25 bp, Canis familiaris
gcatgtacacttcagtcactgcagt

SEQ ID NO: 101686 - DNA, 25 bp, Canis familiaris
gcatgtaacctgtaatattatttaa

SEQ ID NO: 101687 - DNA, 25 bp, Canis familiaris
gcatggtacctgtgatctgttctaa

SEQ ID NO: 101688 - DNA, 25 bp, Canis familiaris
gcatgaaactcttgctttgttatag

SEQ ID NO: 101689 - DNA, 25 bp, Canis familiaris
gcatcaggactttgtattgagatat

SEQ ID NO: 101690 - DNA, 25 bp, Canis familiaris
gcatcaggcttgattctctcagaat

SEQ ID NO: 101691 - DNA, 25 bp, Canis familiaris
gcatgagatgcactgtcttctgcca

SEQ ID NO: 101692 - DNA, 25 bp, Canis familiaris
gcatcagaactgtcacatctgctcc

SEQ ID NO: 101693 - DNA, 25 bp, Canis familiaris
gcatgaatagattacctgctcccca

SEQ ID NO: 101694 - DNA, 25 bp, Canis familiaris
gcatgcaaaatatctgacccccaac

SEQ ID NO: 101695 - DNA, 25 bp, Canis familiaris
gcagaaaaggtggcctcccagaatc

SEQ ID NO: 101696 - DNA, 25 bp, Canis familiaris
gcaggacaggaggccctttagagac

SEQ ID NO: 101697 - DNA, 25 bp, Canis familiaris
gcatcgtacgatggactgtcttctg

SEQ ID NO: 101698 - DNA, 25 bp, Canis familiaris
gagactacgacttatgctttagttg

SEQ ID NO: 101699 - DNA, 25 bp, Canis familiaris
gcacctaggacttttttaggctgtc

SEQ ID NO: 101700 - DNA, 25 bp, Canis familiaris
gcatcacgggagctgtcttagaggg

SEQ ID NO: 101701 - DNA, 25 bp, Canis familiaris
gcatccggcagaggctgcttgtggc

SEQ ID NO: 101702 - DNA, 25 bp, Canis familiaris
gcatcgtggatgagtgctgcttccg

SEQ ID NO: 101703 - DNA, 25 bp, Canis familiaris
gcatcggagatgttgtccgcatcca

SEQ ID NO: 101704 - DNA, 25 bp, Canis familiaris
gcatgctggacttttcaggactact

SEQ ID NO: 101705 - DNA, 25 bp, Canis familiaris
gcatgccgtggtaataggagctatc

SEQ ID NO: 101706 - DNA, 25 bp, Canis familiaris
gcaccctgagggaagggcccaaggt

SEQ ID NO: 101707 - DNA, 25 bp, Canis familiaris
gaccctggacggagtcccaggttgg

SEQ ID NO: 101708 - DNA, 25 bp, Canis familiaris
gggccaggaacgtgcccaagtttgg

SEQ ID NO: 101709 - DNA, 25 bp, Canis familiaris
gcaggccaggaacaatgcccgggtc

SEQ ID NO: 101710 - DNA, 25 bp, Canis familiaris
gcatccacgggttagtgtctggggt

SEQ ID NO: 101711 - DNA, 25 bp, Canis familiaris
gcatcccaggctggggagtctgcgg

SEQ ID NO: 101712 - DNA, 25 bp, Canis familiaris
gcatgcttcggggagggcaagcggg

SEQ ID NO: 101713 - DNA, 25 bp, Canis familiaris
gcagctatagggtgggggctaggga

SEQ ID NO: 101714 - DNA, 25 bp, Canis familiaris
gcatgctagaggccggggaggtggg

SEQ ID NO: 101715 - DNA, 25 bp, Canis familiaris
gcagcttagatgcgttcgacgcggg

SEQ ID NO: 101716 - DNA, 25 bp, Canis familiaris
gcagatagaatgttaccgtcgggtg

SEQ ID NO: 101717 - DNA, 25 bp, Canis familiaris
gatttggcgttaccgcctgaggggc

SEQ ID NO: 101718 - DNA, 25 bp, Canis familiaris
gaatagggttacacctaatggccaa

SEQ ID NO: 101719 - DNA, 25 bp, Canis familiaris
gcaggggtttcattacctttggctc

SEQ ID NO: 101720 - DNA, 25 bp, Canis familiaris
gcagtgggcaaatctagcctcgtcc

SEQ ID NO: 101721 - DNA, 25 bp, Canis familiaris
gcatgtgggcaagcaatgtcttttt

SEQ ID NO: 101722 - DNA, 25 bp, Canis familiaris
gcatgccaggaacaatgtctccctc

SEQ ID NO: 101723 - DNA, 25 bp, Canis familiaris
gcatgtcagtgaaaaattgccaact

SEQ ID NO: 101724 - DNA, 25 bp, Canis familiaris
gcatgtacagaagcatatttccaat

SEQ ID NO: 101725 - DNA, 25 bp, Canis familiaris
gcagtgacgacacctacttgtaaat

SEQ ID NO: 101726 - DNA, 25 bp, Canis familiaris
gcaggccagacactgtatctcaaat

SEQ ID NO: 101727 - DNA, 25 bp, Canis familiaris
gcaggtgaaatcctatctaaagaat

SEQ ID NO: 101728 - DNA, 25 bp, Canis familiaris
gcatggtggactcattctacaccaa

SEQ ID NO: 101729 - DNA, 25 bp, Canis familiaris
gcaggtggaatattacccacccaac

SEQ ID NO: 101730 - DNA, 25 bp, Canis familiaris
gcagggaaacaggcacgacaccatc

SEQ ID NO: 101731 - DNA, 25 bp, Canis familiaris
gcagggacctagagcagccactgct

SEQ ID NO: 101732 - DNA, 25 bp, Canis familiaris
gcagaggactctgaaatgccaccca

SEQ ID NO: 101733 - DNA, 25 bp, Canis familiaris
gcagggcctggtcatatcacagatg

SEQ ID NO: 101734 - DNA, 25 bp, Canis familiaris
gcagtgcccgagtctttaaggtgct

SEQ ID NO: 101735 - DNA, 25 bp, Canis familiaris
gcaggctgaaagtattaatgaaggc

SEQ ID NO: 101736 - DNA, 25 bp, Canis familiaris
gcatggtgaaatccatcaaagaact

SEQ ID NO: 101737 - DNA, 25 bp, Canis familiaris
gcatggtcaccacatgccggatact

SEQ ID NO: 101738 - DNA, 25 bp, Canis familiaris
gcatgcatggaaccaatccaggaca

SEQ ID NO: 101739 - DNA, 25 bp, Canis familiaris
gcatgcgtgataacgattctgggca

SEQ ID NO: 101740 - DNA, 25 bp, Canis familiaris
gcatgcggttgaaactgcgcgtcat

SEQ ID NO: 101741 - DNA, 25 bp, Canis familiaris
gcagggcattgaaccagccaatcag

SEQ ID NO: 101742 - DNA, 25 bp, Canis familiaris
gcaggcaattatgacagttacagta

SEQ ID NO: 101743 - DNA, 25 bp, Canis familiaris
gcaggaatttggttgtgacaatcgg

SEQ ID NO: 101744 - DNA, 25 bp, Canis familiaris
gcagtgaactgggtttactacctga

SEQ ID NO: 101745 - DNA, 25 bp, Canis familiaris
gcaggaactggccaagtacttcttg

SEQ ID NO: 101746 - DNA, 25 bp, Canis familiaris
gcatgtaactgccgaaaccattttc

SEQ ID NO: 101747 - DNA, 25 bp, Canis familiaris
gcaggtaccacgtcaagcgtttttg

SEQ ID NO: 101748 - DNA, 25 bp, Canis familiaris
gcaggctaccggacggcaggttata

SEQ ID NO: 101749 - DNA, 25 bp, Canis familiaris
gcaggatttcggcacgagatttatt

SEQ ID NO: 101750 - DNA, 25 bp, Canis familiaris
gcaggaattcggcacgaggtttggc

SEQ ID NO: 101751 - DNA, 25 bp, Canis familiaris
gcaggaattcggcacgagctgattt

SEQ ID NO: 101752 - DNA, 25 bp, Canis familiaris
gcaggggctatgggaggcaggattt

SEQ ID NO: 101753 - DNA, 25 bp, Canis familiaris
gcaaggtgattagtgagccgtatcg

SEQ ID NO: 101754 - DNA, 25 bp, Canis familiaris
gcagaaggtccagagcctgtaccat

SEQ ID NO: 101755 - DNA, 25 bp, Canis familiaris
gcatgacattgtccggagtttccgc

SEQ ID NO: 101756 - DNA, 25 bp, Canis familiaris
gcatgacctttactatgtttcctct

SEQ ID NO: 101757 - DNA, 25 bp, Canis familiaris
gcagcacctccttgaatgtaatact

SEQ ID NO: 101758 - DNA, 25 bp, Canis familiaris
gcatgcatcattccttggctgaaat

SEQ ID NO: 101759 - DNA, 25 bp, Canis familiaris
gcatgaattgtcttgtggcatatac

SEQ ID NO: 101760 - DNA, 25 bp, Canis familiaris
gcatcatctattcttgtgcattccc

SEQ ID NO: 101761 - DNA, 25 bp, Canis familiaris
gcatcttttatttgtattcacccag

SEQ ID NO: 101762 - DNA, 25 bp, Canis familiaris
gcatctcttctgctgggaaatccca

SEQ ID NO: 101763 - DNA, 25 bp, Canis familiaris
gcatcctttcgcacagaattgtcta

SEQ ID NO: 101764 - DNA, 25 bp, Canis familiaris
gcatcccttcacatgtcatattttt

SEQ ID NO: 101765 - DNA, 25 bp, Canis familiaris
gcaggcccatcagcctaatgtgtat

SEQ ID NO: 101766 - DNA, 25 bp, Canis familiaris
gcaggggacccttgaagatcagatc

SEQ ID NO: 101767 - DNA, 25 bp, Canis familiaris
gcagggttgcccagaatgcaagcta

SEQ ID NO: 101768 - DNA, 25 bp, Canis familiaris
gcaggtttcctacactccaaacctg

SEQ ID NO: 101769 - DNA, 25 bp, Canis familiaris
gcatgtttatcctatgtgacccaac

SEQ ID NO: 101770 - DNA, 25 bp, Canis familiaris
gcagttttccttgagcggagacaca

SEQ ID NO: 101771 - DNA, 25 bp, Canis familiaris
gcagttacctctccggggagaatgc

SEQ ID NO: 101772 - DNA, 25 bp, Canis familiaris
gcagcttatccttacgggaaatcag

SEQ ID NO: 101773 - DNA, 25 bp, Canis familiaris
gcatgtcctgccagggggacactag

SEQ ID NO: 101774 - DNA, 25 bp, Canis familiaris
gcatgtcgtccatggaggtcaacat

SEQ ID NO: 101775 - DNA, 25 bp, Canis familiaris
gcatgtttccatagcagccagtcaa

SEQ ID NO: 101776 - DNA, 25 bp, Canis familiaris
gcatgagttacaagcaaactgctac

SEQ ID NO: 101777 - DNA, 25 bp, Canis familiaris
gcatcgcgtacatggatcacgccag

SEQ ID NO: 101778 - DNA, 25 bp, Canis familiaris
gcagggctacagtgcatacaccgcc

SEQ ID NO: 101779 - DNA, 25 bp, Canis familiaris
gcagttgtaaaattgaaccccatcc

SEQ ID NO: 101780 - DNA, 25 bp, Canis familiaris
gcagtcaggtaaagttctccccaac

SEQ ID NO: 101781 - DNA, 25 bp, Canis familiaris
gcaggctggtaccggtccggtattc

SEQ ID NO: 101782 - DNA, 25 bp, Canis familiaris
gcaggctggtaccggtccggaattc

SEQ ID NO: 101783 - DNA, 25 bp, Canis familiaris
gcaggctggtaccggtccggaattc

SEQ ID NO: 101784 - DNA, 25 bp, Canis familiaris
gcaggctggtaccggtccggaattc

SEQ ID NO: 101785 - DNA, 25 bp, Canis familiaris
gcaggctggtaccggtccggaattc

SEQ ID NO: 101786 - DNA, 25 bp, Canis familiaris
gcaggctggtaccggtccggaattc

SEQ ID NO: 101787 - DNA, 25 bp, Canis familiaris
gcaggctggtaccggtccggaattc

SEQ ID NO: 101788 - DNA, 25 bp, Canis familiaris
gcaggctggtaccggtccggaattc

SEQ ID NO: 101789 - DNA, 25 bp, Canis familiaris
gcaggctggtaccggtccggaattc

SEQ ID NO: 101790 - DNA, 25 bp, Canis familiaris
gcaggctggtaccggtccggaattc

SEQ ID NO: 101791 - DNA, 25 bp, Canis familiaris
gcaggctggtaccggtccggaattc

SEQ ID NO: 101792 - DNA, 25 bp, Canis familiaris
gcaggctggtaccggtccggaattc

SEQ ID NO: 101793 - DNA, 25 bp, Canis familiaris
gcaggctggtaccggtccggaattc

SEQ ID NO: 101794 - DNA, 25 bp, Canis familiaris
gcaggctggtaccggtccggaattc

SEQ ID NO: 101795 - DNA, 25 bp, Canis familiaris
gcaggctggtaccggtccggaattc

SEQ ID NO: 101796 - DNA, 25 bp, Canis familiaris
gcaggctggtaccggtccggaattc

SEQ ID NO: 101797 - DNA, 25 bp, Canis familiaris
gcaggctggtaccggtccggaattc

SEQ ID NO: 101798 - DNA, 25 bp, Canis familiaris
gcaggctggtaccggtccggaattc

SEQ ID NO: 101799 - DNA, 25 bp, Canis familiaris
gcaggctggtaccggtccggaattc

SEQ ID NO: 101800 - DNA, 25 bp, Canis familiaris
gcaggctggtaccggtccggaattc

SEQ ID NO: 101801 - DNA, 25 bp, Canis familiaris
gcaggctggtaccggtccggaattc

SEQ ID NO: 101802 - DNA, 25 bp, Canis familiaris
gcaggctggtaccggtccggaattc

SEQ ID NO: 101803 - DNA, 25 bp, Canis familiaris
gcaggctggtaccggtccggaattc

SEQ ID NO: 101804 - DNA, 25 bp, Canis familiaris
gcaggctggtaccggtccggaattc

SEQ ID NO: 101805 - DNA, 25 bp, Canis familiaris
gcaggctggtaccggtccggaattc

SEQ ID NO: 101806 - DNA, 25 bp, Canis familiaris
gcaggctggtaccggtccggaattc

SEQ ID NO: 101807 - DNA, 25 bp, Canis familiaris
gcaggctggtaccggtccggaattc

SEQ ID NO: 101808 - DNA, 25 bp, Canis familiaris
gcaggctggtaccggtccggaattc

SEQ ID NO: 101809 - DNA, 25 bp, Canis familiaris
gcaggctggtaccggtccggaattc

SEQ ID NO: 101810 - DNA, 25 bp, Canis familiaris
gcaggctggtaccggtccggaattc

SEQ ID NO: 101811 - DNA, 25 bp, Canis familiaris
gcaggctggtaccggtccggaattc

SEQ ID NO: 101812 - DNA, 25 bp, Canis familiaris
gcaggctggtaccggtccggaattc

SEQ ID NO: 101813 - DNA, 25 bp, Canis familiaris
gcaggctggtaccggtccggaattc

SEQ ID NO: 101814 - DNA, 25 bp, Canis familiaris
gcaggctggtaccggtccggaattc

SEQ ID NO: 101815 - DNA, 25 bp, Canis familiaris
gcaggctggtaccggtccggaattc

SEQ ID NO: 101816 - DNA, 25 bp, Canis familiaris
gcaggctggtaccggtccggaattc

SEQ ID NO: 101817 - DNA, 25 bp, Canis familiaris
gcaggctggtaccggtccggaattc

SEQ ID NO: 101818 - DNA, 25 bp, Canis familiaris
gcaggctggtaccggtccggaattc

SEQ ID NO: 101819 - DNA, 25 bp, Canis familiaris
gcaggctggtaccggtccggaattc

SEQ ID NO: 101820 - DNA, 25 bp, Canis familiaris
gcaggctggtaccggtccggaattc

SEQ ID NO: 101821 - DNA, 25 bp, Canis familiaris
gcaggctggtaccggtccggaattc

SEQ ID NO: 101822 - DNA, 25 bp, Canis familiaris
gcatgaggtgtttgggcatccccaa

SEQ ID NO: 101823 - DNA, 25 bp, Canis familiaris
gcaggaagatctttacagcgcgcca

SEQ ID NO: 101824 - DNA, 25 bp, Canis familiaris
gcaggagttcgtcagagctctggca

SEQ ID NO: 101825 - DNA, 25 bp, Canis familiaris
gcatggaggacgtcacaattgctgg

SEQ ID NO: 101826 - DNA, 25 bp, Canis familiaris
gcatcgtggaggacaagctggtgga

SEQ ID NO: 101827 - DNA, 25 bp, Canis familiaris
gcatcgtggagggcctcatgaccac

SEQ ID NO: 101828 - DNA, 25 bp, Canis familiaris
gcatcgtgaagggacatcatccacg

SEQ ID NO: 101829 - DNA, 25 bp, Canis familiaris
gcatgcatgtggacacagactccca

SEQ ID NO: 101830 - DNA, 25 bp, Canis familiaris
gcatgcatgtgttcaaactcatcac

SEQ ID NO: 101831 - DNA, 25 bp, Canis familiaris
gcatgctcttgctcaactgcagaat

SEQ ID NO: 101832 - DNA, 25 bp, Canis familiaris
gcagtcttctaccattgcatgaacc

SEQ ID NO: 101833 - DNA, 25 bp, Canis familiaris
gcagttacaatggtagcatgtgatt

SEQ ID NO: 101834 - DNA, 25 bp, Canis familiaris
gcagttacctttcatgttgttaaag

SEQ ID NO: 101835 - DNA, 25 bp, Canis familiaris
gaggatagcaacacggtctgggaag

SEQ ID NO: 101836 - DNA, 25 bp, Canis familiaris
gcagaatggaacagccactttggaa

SEQ ID NO: 101837 - DNA, 25 bp, Canis familiaris
gcagaataaaacccatttctggacg

SEQ ID NO: 101838 - DNA, 25 bp, Canis familiaris
gcagaacagaaaacgaagtccagac

SEQ ID NO: 101839 - DNA, 25 bp, Canis familiaris
gcaggatcagactaacccagattca

SEQ ID NO: 101840 - DNA, 25 bp, Canis familiaris
gcaggacagagaaccaccatttaca

SEQ ID NO: 101841 - DNA, 25 bp, Canis familiaris
gcatgtaaagacccaaagctcaaaa

SEQ ID NO: 101842 - DNA, 25 bp, Canis familiaris
gcagttaggctcccaaatctaagca

SEQ ID NO: 101843 - DNA, 25 bp, Canis familiaris
gcagttcggatccggcgtctaaagc

SEQ ID NO: 101844 - DNA, 25 bp, Canis familiaris
gcagggccagatgtgggtttccagc

SEQ ID NO: 101845 - DNA, 25 bp, Canis familiaris
gcagacgtagaggatggaggttcca

SEQ ID NO: 101846 - DNA, 25 bp, Canis familiaris
gcatgacagctccagcagggagcat

SEQ ID NO: 101847 - DNA, 25 bp, Canis familiaris
gcatgctctgcagtccatggagcgc

SEQ ID NO: 101848 - DNA, 25 bp, Canis familiaris
gcatgactgcatgttgagagctgcc

SEQ ID NO: 101849 - DNA, 25 bp, Canis familiaris
gcatgaatattttaggcgcctgtgt

SEQ ID NO: 101850 - DNA, 25 bp, Canis familiaris
gcatgaaagctcagtggctgccgtt

SEQ ID NO: 101851 - DNA, 25 bp, Canis familiaris
gcagttagctgtttcagcctcgtct

SEQ ID NO: 101852 - DNA, 25 bp, Canis familiaris
gcagtgctagttttcttgttttcgt

SEQ ID NO: 101853 - DNA, 25 bp, Canis familiaris
gcagcggaggttttctggtttcgga

SEQ ID NO: 101854 - DNA, 25 bp, Canis familiaris
gcagggggtggtgtttatctctaga

SEQ ID NO: 101855 - DNA, 25 bp, Canis familiaris
gcaggcggagggtctgtttcagcct

SEQ ID NO: 101856 - DNA, 25 bp, Canis familiaris
gcatgagggagaggacagctttagg

SEQ ID NO: 101857 - DNA, 25 bp, Canis familiaris
gcatggaggagaggacacgggcccc

SEQ ID NO: 101858 - DNA, 25 bp, Canis familiaris
gcatgggaaacattccacgtgcccc

SEQ ID NO: 101859 - DNA, 25 bp, Canis familiaris
gcaggcgcaaactcgattttctacg

SEQ ID NO: 101860 - DNA, 25 bp, Canis familiaris
gcagggcaaacatctatctaattac

SEQ ID NO: 101861 - DNA, 25 bp, Canis familiaris
gcagggaccagcattgcctaaaact

SEQ ID NO: 101862 - DNA, 25 bp, Canis familiaris
gagggtctactttgccgagaaggtg

SEQ ID NO: 101863 - DNA, 25 bp, Canis familiaris
gcagggtctggcagggaaggagagg

SEQ ID NO: 101864 - DNA, 25 bp, Canis familiaris
gcagggagtggacgggaccgtgggc

SEQ ID NO: 101865 - DNA, 25 bp, Canis familiaris
gcatgcggagggtcaggagactcgt

SEQ ID NO: 101866 - DNA, 25 bp, Canis familiaris
gcatgatgtgcgcggagagcaaccg

SEQ ID NO: 101867 - DNA, 25 bp, Canis familiaris
gcatggtggcaggaagcgaatactc

SEQ ID NO: 101868 - DNA, 25 bp, Canis familiaris
gcatgtgtcgcagttggcagagtac

SEQ ID NO: 101869 - DNA, 25 bp, Canis familiaris
gcatcggctgcattgtggtggataa

SEQ ID NO: 101870 - DNA, 25 bp, Canis familiaris
gcatcggctgcattgtggtggataa

SEQ ID NO: 101871 - DNA, 25 bp, Canis familiaris
gcatgtgtctgctatggttttgaaa

SEQ ID NO: 101872 - DNA, 25 bp, Canis familiaris
gcatgtgcatgcgagtctatatttg

SEQ ID NO: 101873 - DNA, 25 bp, Canis familiaris
gcatgtgcatgctctctaaaataaa

SEQ ID NO: 101874 - DNA, 25 bp, Canis familiaris
gcacgactggcacaaatataaattc

SEQ ID NO: 101875 - DNA, 25 bp, Canis familiaris
gcaggcctgggttcaaatcccagct

SEQ ID NO: 101876 - DNA, 25 bp, Canis familiaris
gcagaccgagaataaaccaccctct

SEQ ID NO: 101877 - DNA, 25 bp, Canis familiaris
gcagtcccgaagaaaactatccaga

SEQ ID NO: 101878 - DNA, 25 bp, Canis familiaris
gcagtacccagacttcagaaaccaa

SEQ ID NO: 101879 - DNA, 25 bp, Canis familiaris
gcagttcctcaaaagctaagaccta

SEQ ID NO: 101880 - DNA, 25 bp, Canis familiaris
gcatgcttcctcgcaaggacatgtc

SEQ ID NO: 101881 - DNA, 25 bp, Canis familiaris
gcatgtgcaacctcaaggacatccc

SEQ ID NO: 101882 - DNA, 25 bp, Canis familiaris
gcagtgccacacagacaggacaacc

SEQ ID NO: 101883 - DNA, 25 bp, Canis familiaris
gcagagcacaaaaaccaaccaacca

SEQ ID NO: 101884 - DNA, 25 bp, Canis familiaris
gcaggccaacaatgccaaggccatg

SEQ ID NO: 101885 - DNA, 25 bp, Canis familiaris
gcaggcatacacaggcacaaggctt

SEQ ID NO: 101886 - DNA, 25 bp, Canis familiaris
gcaggcatgtacatctgcctgggcg

SEQ ID NO: 101887 - DNA, 25 bp, Canis familiaris
gcatccatgtcagtgacagcctggg

SEQ ID NO: 101888 - DNA, 25 bp, Canis familiaris
gcatgctcagtattgagacactgtc

SEQ ID NO: 101889 - DNA, 25 bp, Canis familiaris
gcatcctgtgtccagagagtgtgcg

SEQ ID NO: 101890 - DNA, 25 bp, Canis familiaris
gcatcctgcagttcagcgcagaggc

SEQ ID NO: 101891 - DNA, 25 bp, Canis familiaris
gcatgcacatacacagctatgaagc

SEQ ID NO: 101892 - DNA, 25 bp, Canis familiaris
gcatgcagcaaccaagtggccagca

SEQ ID NO: 101893 - DNA, 25 bp, Canis familiaris
gcatgctggagcgagactgagccag

SEQ ID NO: 101894 - DNA, 25 bp, Canis familiaris
gcatggtgatctggagctggcagca

SEQ ID NO: 101895 - DNA, 25 bp, Canis familiaris
gcatgctgctgcgggcagctggagg

SEQ ID NO: 101896 - DNA, 25 bp, Canis familiaris
gcaggatgctggtcagcctgcaggc

SEQ ID NO: 101897 - DNA, 25 bp, Canis familiaris
gcatgctgagggccacgtgagtgcc

SEQ ID NO: 101898 - DNA, 25 bp, Canis familiaris
gcatgtcagacgccacttgaatgtg

SEQ ID NO: 101899 - DNA, 25 bp, Canis familiaris
gcatgtaaaccagttgcacatcaga

SEQ ID NO: 101900 - DNA, 25 bp, Canis familiaris
gcatgttggaagactgtgcatctca

SEQ ID NO: 101901 - DNA, 25 bp, Canis familiaris
gcatgttgctgaagattgatgagta

SEQ ID NO: 101902 - DNA, 25 bp, Canis familiaris
gcatgttcatacatatgcatgtaat

SEQ ID NO: 101903 - DNA, 25 bp, Canis familiaris
gcagtatatattttggtataaccag

SEQ ID NO: 101904 - DNA, 25 bp, Canis familiaris
gcatggcttttattgacttaccgtg

SEQ ID NO: 101905 - DNA, 25 bp, Canis familiaris
gcatgttttctgtttcttagctgtg

SEQ ID NO: 101906 - DNA, 25 bp, Canis familiaris
gcatgtggtcttttatatatgactt

SEQ ID NO: 101907 - DNA, 25 bp, Canis familiaris
gcatgtatgggtttgcttaagtcat

SEQ ID NO: 101908 - DNA, 25 bp, Canis familiaris
gcatgtgcgggttgttgtgatggac

SEQ ID NO: 101909 - DNA, 25 bp, Canis familiaris
gcatgtgtagcagctgtttgttgtc

SEQ ID NO: 101910 - DNA, 25 bp, Canis familiaris
gcatgatatgtgacactttggttga

SEQ ID NO: 101911 - DNA, 25 bp, Canis familiaris
gcatgcacgtgtgctcgtgtgtgtg

SEQ ID NO: 101912 - DNA, 25 bp, Canis familiaris
gcatccgtgcttatggtgggaacag

SEQ ID NO: 101913 - DNA, 25 bp, Canis familiaris
gcatcccctggctgagtgggaaagc

SEQ ID NO: 101914 - DNA, 25 bp, Canis familiaris
gcatgctcttaagggagctgggaca

SEQ ID NO: 101915 - DNA, 25 bp, Canis familiaris
gcatgatcttggagtcctgggatcg

SEQ ID NO: 101916 - DNA, 25 bp, Canis familiaris
gcatgatcaggggggcatcgggtat

SEQ ID NO: 101917 - DNA, 25 bp, Canis familiaris
gcatgtctggggagctatcgtggat

SEQ ID NO: 101918 - DNA, 25 bp, Canis familiaris
gcatgtcttgagtttggtcggtggc

SEQ ID NO: 101919 - DNA, 25 bp, Canis familiaris
gcatgctttaacttctaagactgtc

SEQ ID NO: 101920 - DNA, 25 bp, Canis familiaris
gcatcgtctaatcttgaaaattctt

SEQ ID NO: 101921 - DNA, 25 bp, Canis familiaris
gcagctactaattttgacacctttt

SEQ ID NO: 101922 - DNA, 25 bp, Canis familiaris
gcatgctacaaattaaactttactt

SEQ ID NO: 101923 - DNA, 25 bp, Canis familiaris
gcatgctgaaagtcacatagcctgt

SEQ ID NO: 101924 - DNA, 25 bp, Canis familiaris
gcatgtcaaatatgtcgcctgccac

SEQ ID NO: 101925 - DNA, 25 bp, Canis familiaris
gcatgagctaattataccctaagcc

SEQ ID NO: 101926 - DNA, 25 bp, Canis familiaris
gcatgagtggtggctaacctgaccc

SEQ ID NO: 101927 - DNA, 25 bp, Canis familiaris
gcatgaatgggggtacccagctgct

SEQ ID NO: 101928 - DNA, 25 bp, Canis familiaris
gcatggggtggctgatgctgccagg

SEQ ID NO: 101929 - DNA, 25 bp, Canis familiaris
gcatggggaagtgtgcccagctggc

SEQ ID NO: 101930 - DNA, 25 bp, Canis familiaris
gcatggaggcaagtgttgccctgtc

SEQ ID NO: 101931 - DNA, 25 bp, Canis familiaris
gcatggaacagacattgccaccgcc

SEQ ID NO: 101932 - DNA, 25 bp, Canis familiaris
gcatggtacaatttcgtcttcggtt

SEQ ID NO: 101933 - DNA, 25 bp, Canis familiaris
gcaggatgccttatgcgtcatctag

SEQ ID NO: 101934 - DNA, 25 bp, Canis familiaris
gcatgaatgttttttgtcattactc

SEQ ID NO: 101935 - DNA, 25 bp, Canis familiaris
gcatccatgattatttgtacttcca

SEQ ID NO: 101936 - DNA, 25 bp, Canis familiaris
gcatccattcatgattcttgactcc

SEQ ID NO: 101937 - DNA, 25 bp, Canis familiaris
gcatgctcttcttagtttgactcac

SEQ ID NO: 101938 - DNA, 25 bp, Canis familiaris
gcatgctattctaaggcttgttcat

SEQ ID NO: 101939 - DNA, 25 bp, Canis familiaris
gcatgctatttcaggagaagctgca

SEQ ID NO: 101940 - DNA, 25 bp, Canis familiaris
gcatgttctcttggagagagagtgg

SEQ ID NO: 101941 - DNA, 25 bp, Canis familiaris
gcatggactctgggggaaatggttc

SEQ ID NO: 101942 - DNA, 25 bp, Canis familiaris
gcaggcacctggtgttttgagttcc

SEQ ID NO: 101943 - DNA, 25 bp, Canis familiaris
gcaggacaggttaccttgggttcac

SEQ ID NO: 101944 - DNA, 25 bp, Canis familiaris
gcagatgaaggagcagcccgggtcc

SEQ ID NO: 101945 - DNA, 25 bp, Canis familiaris
gcagtgaagccagcttgcctgggtc

SEQ ID NO: 101946 - DNA, 25 bp, Canis familiaris
gcatgtgaagacgctcgaggagtat

SEQ ID NO: 101947 - DNA, 25 bp, Canis familiaris
gcatgtcagatgtggcccaggagaa

SEQ ID NO: 101948 - DNA, 25 bp, Canis familiaris
gcatgaccatgctggcaacagtggc

SEQ ID NO: 101949 - DNA, 25 bp, Canis familiaris
gcatgaccatcgtctacaagagcag

SEQ ID NO: 101950 - DNA, 25 bp, Canis familiaris
gcatggcccgtaacacatggcaaag

SEQ ID NO: 101951 - DNA, 25 bp, Canis familiaris
gcatgccccagaagtcctgagagaa

SEQ ID NO: 101952 - DNA, 25 bp, Canis familiaris
gcaggccccaagtttggggacctgt

SEQ ID NO: 101953 - DNA, 25 bp, Canis familiaris
gcaggaaacaaaataagggctcctt

SEQ ID NO: 101954 - DNA, 25 bp, Canis familiaris
gcaggcaaactacaaagggcatacc

SEQ ID NO: 101955 - DNA, 25 bp, Canis familiaris
gcacggctactacagcgtggggacc

SEQ ID NO: 101956 - DNA, 25 bp, Canis familiaris
gcaggagtacgacgagtcgggcccc

SEQ ID NO: 101957 - DNA, 25 bp, Canis familiaris
gcaggagacctgtgtgggtgtgaac

SEQ ID NO: 101958 - DNA, 25 bp, Canis familiaris
gcaggagaccggagtctggaagctg

SEQ ID NO: 101959 - DNA, 25 bp, Canis familiaris
gcatggagggctcattttggaagct

SEQ ID NO: 101960 - DNA, 25 bp, Canis familiaris
gcatggtggttttattagtgactgt

SEQ ID NO: 101961 - DNA, 25 bp, Canis familiaris
gcaggtgagtttgtagaggacggga

SEQ ID NO: 101962 - DNA, 25 bp, Canis familiaris
gcagtgtatctgtatcctaaggggg

SEQ ID NO: 101963 - DNA, 25 bp, Canis familiaris
gcagctgtttttgaataagggagaa

SEQ ID NO: 101964 - DNA, 25 bp, Canis familiaris
gcaggtgtttttcaacggtgcgaac

SEQ ID NO: 101965 - DNA, 25 bp, Canis familiaris
gcaggggtgtttgaaccaaccatag

SEQ ID NO: 101966 - DNA, 25 bp, Canis familiaris
gcaggggttaaaaaccagaccacag

SEQ ID NO: 101967 - DNA, 25 bp, Canis familiaris
gcaggggactgtttaacctgaaccg

SEQ ID NO: 101968 - DNA, 25 bp, Canis familiaris
gcaggcaagtttttagaactgcccc

SEQ ID NO: 101969 - DNA, 25 bp, Canis familiaris
gcaggcctttttaacacctggactc

SEQ ID NO: 101970 - DNA, 25 bp, Canis familiaris
gcatgaacttgtattaatcctctat

SEQ ID NO: 101971 - DNA, 25 bp, Canis familiaris
gcatgatttttaaataacctgtctt

SEQ ID NO: 101972 - DNA, 25 bp, Canis familiaris
gcatgatgttttccttgataccctg

SEQ ID NO: 101973 - DNA, 25 bp, Canis familiaris
gcaggctatttctattgtaccatgt

SEQ ID NO: 101974 - DNA, 25 bp, Canis familiaris
gcatggcttgataccagatatgacg

SEQ ID NO: 101975 - DNA, 25 bp, Canis familiaris
gcaggttgaagaagccgcatcggag

SEQ ID NO: 101976 - DNA, 25 bp, Canis familiaris
gcatggggaagaaggcctgccagcc

SEQ ID NO: 101977 - DNA, 25 bp, Canis familiaris
gcagggggcttcagcacatgccccc

SEQ ID NO: 101978 - DNA, 25 bp, Canis familiaris
gcatgtggggattcaacactgaccc

SEQ ID NO: 101979 - DNA, 25 bp, Canis familiaris
gcatgtggggagtcccaagcaccag

SEQ ID NO: 101980 - DNA, 25 bp, Canis familiaris
gcatggggcttggctccaagttcaa

SEQ ID NO: 101981 - DNA, 25 bp, Canis familiaris
gcatggggcttggctccaagttcaa

SEQ ID NO: 101982 - DNA, 25 bp, Canis familiaris
gcagggacttgctttaaatctagtt

SEQ ID NO: 101983 - DNA, 25 bp, Canis familiaris
gcaggtgacggccttagatctctcg

SEQ ID NO: 101984 - DNA, 25 bp, Canis familiaris
gcatggagccaagcgtcaactatcg

SEQ ID NO: 101985 - DNA, 25 bp, Canis familiaris
gcatggatccaagggagtagttact

SEQ ID NO: 101986 - DNA, 25 bp, Canis familiaris
gcaggacccacaggggtttctcttg

SEQ ID NO: 101987 - DNA, 25 bp, Canis familiaris
gcagggccctggagccttatattag

SEQ ID NO: 101988 - DNA, 25 bp, Canis familiaris
gcagggcccgttctgatcaataaag

SEQ ID NO: 101989 - DNA, 25 bp, Canis familiaris
gcagggcccctatctggaaagaagt

SEQ ID NO: 101990 - DNA, 25 bp, Canis familiaris
gagggcctacttgtgggacattaga

SEQ ID NO: 101991 - DNA, 25 bp, Canis familiaris
gagggggactctgcttggaattaaa

SEQ ID NO: 101992 - DNA, 25 bp, Canis familiaris
gcagggtgtgcaaaccttgtgtttt

SEQ ID NO: 101993 - DNA, 25 bp, Canis familiaris
gcaggccatcttgatccattggttt

SEQ ID NO: 101994 - DNA, 25 bp, Canis familiaris
gcaggcgtttatttctgcagggctg

SEQ ID NO: 101995 - DNA, 25 bp, Canis familiaris
gcaggcgtttatttctgcagggctg

SEQ ID NO: 101996 - DNA, 25 bp, Canis familiaris
gcaggcgtttatttctgcagggctg

SEQ ID NO: 101997 - DNA, 25 bp, Canis familiaris
gcatgcactcttgtactgtggtgtg

SEQ ID NO: 101998 - DNA, 25 bp, Canis familiaris
gacagcctgggtgtgttggggggca

SEQ ID NO: 101999 - DNA, 25 bp, Canis familiaris
gtcacctttgggatttgggttcact

SEQ ID NO: 102000 - DNA, 25 bp, Canis familiaris
gtaccttggggcacgggggatatgc

SEQ ID NO: 102001 - DNA, 25 bp, Canis familiaris
gttccttgcggagacccgtgaatcg

SEQ ID NO: 102002 - DNA, 25 bp, Canis familiaris
gcatggtcccggggacccgggatcg

SEQ ID NO: 102003 - DNA, 25 bp, Canis familiaris
gcatggtagtggtcgataccggtgc

SEQ ID NO: 102004 - DNA, 25 bp, Canis familiaris
gcatgggagtggttaagccccccat

SEQ ID NO: 102005 - DNA, 25 bp, Canis familiaris
gcatgtgggaggcgaagcgcgcccg

SEQ ID NO: 102006 - DNA, 25 bp, Canis familiaris
gcaggtggctggtgacagtggtcct

SEQ ID NO: 102007 - DNA, 25 bp, Canis familiaris
gcaggggtggaattcctgaccctgg

SEQ ID NO: 102008 - DNA, 25 bp, Canis familiaris
gcagtgtgctgtcggatctacaacc

SEQ ID NO: 102009 - DNA, 25 bp, Canis familiaris
gcagtttgactgcatgtactaggga

SEQ ID NO: 102010 - DNA, 25 bp, Canis familiaris
gcagtattgtacatgacgctaacga

SEQ ID NO: 102011 - DNA, 25 bp, Canis familiaris
gcatgtcactgtctttagtccacag

SEQ ID NO: 102012 - DNA, 25 bp, Canis familiaris
gcagtccttgttatgttggacaatc

SEQ ID NO: 102013 - DNA, 25 bp, Canis familiaris
gcagaacctacgatggtgtcgaatc

SEQ ID NO: 102014 - DNA, 25 bp, Canis familiaris
gcagagggtccgaggctctgccaat

SEQ ID NO: 102015 - DNA, 25 bp, Canis familiaris
gcaggaggttcgggttctgcttcat

SEQ ID NO: 102016 - DNA, 25 bp, Canis familiaris
gcagagttttccggtttttatatat

SEQ ID NO: 102017 - DNA, 25 bp, Canis familiaris
gcatgagaattctgccgattttgat

SEQ ID NO: 102018 - DNA, 25 bp, Canis familiaris
gcatgtgtgttcatccgtttgtgac

SEQ ID NO: 102019 - DNA, 25 bp, Canis familiaris
gcatggtggtagtcatggtcctcgc

SEQ ID NO: 102020 - DNA, 25 bp, Canis familiaris
gcaggtggactgtcacttcctgcag

SEQ ID NO: 102021 - DNA, 25 bp, Canis familiaris
gcatgacggtcgacacttctgatcg

SEQ ID NO: 102022 - DNA, 25 bp, Canis familiaris
gcatggcggtctgtgcgtgtcatgc

SEQ ID NO: 102023 - DNA, 25 bp, Canis familiaris
gcatggggtctcgggaacagcttgc

SEQ ID NO: 102024 - DNA, 25 bp, Canis familiaris
gcatggggtggggtgaactgagtca

SEQ ID NO: 102025 - DNA, 25 bp, Canis familiaris
gcaggcggtggggaggggagctgct

SEQ ID NO: 102026 - DNA, 25 bp, Canis familiaris
gcaggtgatttggaagatggtagtg

SEQ ID NO: 102027 - DNA, 25 bp, Canis familiaris
gcaggaagatcacggaaggtcaggg

SEQ ID NO: 102028 - DNA, 25 bp, Canis familiaris
gcaggcacacatttgggaggacggg

SEQ ID NO: 102029 - DNA, 25 bp, Canis familiaris
gcaggacctgctaggtacggtgggc

SEQ ID NO: 102030 - DNA, 25 bp, Canis familiaris
gcaggacggcagagaccacgtcgtc

SEQ ID NO: 102031 - DNA, 25 bp, Canis familiaris
gcaggagcgggcagaccggttgatc

SEQ ID NO: 102032 - DNA, 25 bp, Canis familiaris
gcaggagtggagaggcggtgggcct

SEQ ID NO: 102033 - DNA, 25 bp, Canis familiaris
gcaggctggggcagcctggtggtct

SEQ ID NO: 102034 - DNA, 25 bp, Canis familiaris
gcaggaagccctcactggtgagtgt

SEQ ID NO: 102035 - DNA, 25 bp, Canis familiaris
gcagaaaccgtcccaagatgagtgg

SEQ ID NO: 102036 - DNA, 25 bp, Canis familiaris
gcatgaacacatggtcacctgcagt

SEQ ID NO: 102037 - DNA, 25 bp, Canis familiaris
gcatggagcaatctcgcagtgcagt

SEQ ID NO: 102038 - DNA, 25 bp, Canis familiaris
gcatggagcaatctcgcagtgcagt

SEQ ID NO: 102039 - DNA, 25 bp, Canis familiaris
gcatgaggaatgcctccagctgcct

SEQ ID NO: 102040 - DNA, 25 bp, Canis familiaris
gcatgatgaagactctcctgctgct

SEQ ID NO: 102041 - DNA, 25 bp, Canis familiaris
gcaggatggcattccacagctgctg

SEQ ID NO: 102042 - DNA, 25 bp, Canis familiaris
gcatggtctgctcggagcactcagc

SEQ ID NO: 102043 - DNA, 25 bp, Canis familiaris
gcatggctctgctcagagctcctga

SEQ ID NO: 102044 - DNA, 25 bp, Canis familiaris
gcaggatctgcatcagcagtttaca

SEQ ID NO: 102045 - DNA, 25 bp, Canis familiaris
gcatgaggcccacgagttctccaac

SEQ ID NO: 102046 - DNA, 25 bp, Canis familiaris
gcatgttgtccacagtgtgtccaga

SEQ ID NO: 102047 - DNA, 25 bp, Canis familiaris
gcagtttccctcttgtgatcaatag

SEQ ID NO: 102048 - DNA, 25 bp, Canis familiaris
gcaggcttaactttttatgctgggg

SEQ ID NO: 102049 - DNA, 25 bp, Canis familiaris
gcaggcttaactttggggctggggt

SEQ ID NO: 102050 - DNA, 25 bp, Canis familiaris
gcaggcctagggatgggggtgggga

SEQ ID NO: 102051 - DNA, 25 bp, Canis familiaris
gcaggcctagggatgggggtgggga

SEQ ID NO: 102052 - DNA, 25 bp, Canis familiaris
gcaggcctagggatgggggtgggga

SEQ ID NO: 102053 - DNA, 25 bp, Canis familiaris
gcaggcctagggatgggggtgggga

SEQ ID NO: 102054 - DNA, 25 bp, Canis familiaris
gcaggcctagggatgggggtgggga

SEQ ID NO: 102055 - DNA, 25 bp, Canis familiaris
gcaggcctagggatgggggtgggga

SEQ ID NO: 102056 - DNA, 25 bp, Canis familiaris
gcaggcctagggatgggggtgggga

SEQ ID NO: 102057 - DNA, 25 bp, Canis familiaris
gcaggccaaggtactggagtgcgtg

SEQ ID NO: 102058 - DNA, 25 bp, Canis familiaris
gcaggccaccgttcatgtgattgat

SEQ ID NO: 102059 - DNA, 25 bp, Canis familiaris
gcaggcgcagcaaattcaatttgtt

SEQ ID NO: 102060 - DNA, 25 bp, Canis familiaris
gcaccctgcaatttaactttctaac

SEQ ID NO: 102061 - DNA, 25 bp, Canis familiaris
gcaggtctcatatttaagtctttaa

SEQ ID NO: 102062 - DNA, 25 bp, Canis familiaris
gcaggttacctttcattgtttaaag

SEQ ID NO: 102063 - DNA, 25 bp, Canis familiaris
gcaggagatgaccttttggttttga

SEQ ID NO: 102064 - DNA, 25 bp, Canis familiaris
gcagggtatattaattagttctctt

SEQ ID NO: 102065 - DNA, 25 bp, Canis familiaris
gcaggttttgatgatgagggttcgg

SEQ ID NO: 102066 - DNA, 25 bp, Canis familiaris
gcatggtcttcctcaagtggtgagg

SEQ ID NO: 102067 - DNA, 25 bp, Canis familiaris
gcatggccgttcttagttggtggag

SEQ ID NO: 102068 - DNA, 25 bp, Canis familiaris
gcatggccactaactagttgtgtgc

SEQ ID NO: 102069 - DNA, 25 bp, Canis familiaris
gcatgtgccatttcctacagagttg

SEQ ID NO: 102070 - DNA, 25 bp, Canis familiaris
gcatgatcctgcagacccaggatag

SEQ ID NO: 102071 - DNA, 25 bp, Canis familiaris
gcatgatgactctgacgggtgcacg

SEQ ID NO: 102072 - DNA, 25 bp, Canis familiaris
gcatgatgactgctgagcgggttgc

SEQ ID NO: 102073 - DNA, 25 bp, Canis familiaris
gaataccgtgggtgtatgcaaggta

SEQ ID NO: 102074 - DNA, 25 bp, Canis familiaris
gaagtcggtcagctagctacacagc

SEQ ID NO: 102075 - DNA, 25 bp, Canis familiaris
gcacgacggtagctactactgtcgc

SEQ ID NO: 102076 - DNA, 25 bp, Canis familiaris
gcaggacgtgtacaagattggtggc

SEQ ID NO: 102077 - DNA, 25 bp, Canis familiaris
gcaggacttggtcttggtggtggct

SEQ ID NO: 102078 - DNA, 25 bp, Canis familiaris
gcaggattgggggttgggggtgtca

SEQ ID NO: 102079 - DNA, 25 bp, Canis familiaris
gcaagtttggcgcgtgaggaagttc

SEQ ID NO: 102080 - DNA, 25 bp, Canis familiaris
gcaggctttgagctggtgaacgagc

SEQ ID NO: 102081 - DNA, 25 bp, Canis familiaris
gcatgatgtatctggtgagggacga

SEQ ID NO: 102082 - DNA, 25 bp, Canis familiaris
gcatgagccacggtgagggtcacag

SEQ ID NO: 102083 - DNA, 25 bp, Canis familiaris
gcaggccagaaggcagtgccacagc

SEQ ID NO: 102084 - DNA, 25 bp, Canis familiaris
gcatgtgcgcagatggcagagacgg

SEQ ID NO: 102085 - DNA, 25 bp, Canis familiaris
gcatggctcagtgcttgagcatctg

SEQ ID NO: 102086 - DNA, 25 bp, Canis familiaris
gcatggctctattcatccagactgg

SEQ ID NO: 102087 - DNA, 25 bp, Canis familiaris
gcatggctctgttagccactgtgct

SEQ ID NO: 102088 - DNA, 25 bp, Canis familiaris
gcatgtcacatgcaaacactggtat

SEQ ID NO: 102089 - DNA, 25 bp, Canis familiaris
gcatgtattgtgcataactcttcta

SEQ ID NO: 102090 - DNA, 25 bp, Canis familiaris
gcatgtattgtgcataactcttcta

SEQ ID NO: 102091 - DNA, 25 bp, Canis familiaris
gcagttggttgtacattcttccagg

SEQ ID NO: 102092 - DNA, 25 bp, Canis familiaris
gcagttccttttagtcttgacagtg

SEQ ID NO: 102093 - DNA, 25 bp, Canis familiaris
gcaagactttattttcccagagatg

SEQ ID NO: 102094 - DNA, 25 bp, Canis familiaris
gcagaacctgcgaatttccaagagg

SEQ ID NO: 102095 - DNA, 25 bp, Canis familiaris
gcagaaatctaccattgtcgaaggc

SEQ ID NO: 102096 - DNA, 25 bp, Canis familiaris
gcatgtaattaccatccccaatgtc

SEQ ID NO: 102097 - DNA, 25 bp, Canis familiaris
gcatggctttgaaatcctccgttgc

SEQ ID NO: 102098 - DNA, 25 bp, Canis familiaris
gcatggacattgattctctccgacc

SEQ ID NO: 102099 - DNA, 25 bp, Canis familiaris
gcatgtgtcatggatagtcccctgc

SEQ ID NO: 102100 - DNA, 25 bp, Canis familiaris
gcatgtttgctattgtcagccagct

SEQ ID NO: 102101 - DNA, 25 bp, Canis familiaris
gcatgtttgtatatctggctgtgtg

SEQ ID NO: 102102 - DNA, 25 bp, Canis familiaris
gcagttcggtcgtctggatttttct

SEQ ID NO: 102103 - DNA, 25 bp, Canis familiaris
gcagtccgtttgctcagacattttc

SEQ ID NO: 102104 - DNA, 25 bp, Canis familiaris
gcagtcttttgtttcatggctttct

SEQ ID NO: 102105 - DNA, 25 bp, Canis familiaris
gcagaaatttcttttgtacttttgt

SEQ ID NO: 102106 - DNA, 25 bp, Canis familiaris
gcaggactttcttttaatctttgtg

SEQ ID NO: 102107 - DNA, 25 bp, Canis familiaris
gcaggacatttttcttaggttgtta

SEQ ID NO: 102108 - DNA, 25 bp, Canis familiaris
gcaaaccgttcctttgtgggattag

SEQ ID NO: 102109 - DNA, 25 bp, Canis familiaris
gcaggagcccttgtttgtggagttt

SEQ ID NO: 102110 - DNA, 25 bp, Canis familiaris
gcaggtagagttggctttgtgggat

SEQ ID NO: 102111 - DNA, 25 bp, Canis familiaris
gcaggccgagtgatgttgggcaggt

SEQ ID NO: 102112 - DNA, 25 bp, Canis familiaris
gcatgtgtggtgcttttggacggtt

SEQ ID NO: 102113 - DNA, 25 bp, Canis familiaris
gcatgtgagactggttctgtggcct

SEQ ID NO: 102114 - DNA, 25 bp, Canis familiaris
gcatgtgcagcctgttgctgtgcat

SEQ ID NO: 102115 - DNA, 25 bp, Canis familiaris
gcatgtggcaccgggtgtcatctct

SEQ ID NO: 102116 - DNA, 25 bp, Canis familiaris
gcatgggcatccgcctggataatgc

SEQ ID NO: 102117 - DNA, 25 bp, Canis familiaris
gcatgggatggtgcctgggagtgcc

SEQ ID NO: 102118 - DNA, 25 bp, Canis familiaris
gcatgggtgcgagcagcaggggagc

SEQ ID NO: 102119 - DNA, 25 bp, Canis familiaris
gcatggccgtggacacatggcgaga

SEQ ID NO: 102120 - DNA, 25 bp, Canis familiaris
gcaggctggggttcacccagaacag

SEQ ID NO: 102121 - DNA, 25 bp, Canis familiaris
gcaggctacggttaccatagctacc

SEQ ID NO: 102122 - DNA, 25 bp, Canis familiaris
gcaggaagggctttccagagcggac

SEQ ID NO: 102123 - DNA, 25 bp, Canis familiaris
gcaggaaggacttgatcccgggacc

SEQ ID NO: 102124 - DNA, 25 bp, Canis familiaris
gcaggaagcttatgtcctcaatgga

SEQ ID NO: 102125 - DNA, 25 bp, Canis familiaris
gcatgtaagttattgcatttcaaag

SEQ ID NO: 102126 - DNA, 25 bp, Canis familiaris
gcatgtattttattcattctaataa

SEQ ID NO: 102127 - DNA, 25 bp, Canis familiaris
gcatgtgttgcttatactttttttc

SEQ ID NO: 102128 - DNA, 25 bp, Canis familiaris
gcaggttgttattgtttggctccac

SEQ ID NO: 102129 - DNA, 25 bp, Canis familiaris
gcatggttgttttgtaatcctgtac

SEQ ID NO: 102130 - DNA, 25 bp, Canis familiaris
gcaggctcgttgttgctgaacctgt

SEQ ID NO: 102131 - DNA, 25 bp, Canis familiaris
gcaggtaatctggcccagaccgtgg

SEQ ID NO: 102132 - DNA, 25 bp, Canis familiaris
gcagtgaacttggaccaacctggcc

SEQ ID NO: 102133 - DNA, 25 bp, Canis familiaris
gcagtgaacttgtcagccaattaag

SEQ ID NO: 102134 - DNA, 25 bp, Canis familiaris
gcaggcagccttccaggcaatatga

SEQ ID NO: 102135 - DNA, 25 bp, Canis familiaris
gcatgtgatgtttccagtgaataat

SEQ ID NO: 102136 - DNA, 25 bp, Canis familiaris
gcatggttcctctagatataaatta

SEQ ID NO: 102137 - DNA, 25 bp, Canis familiaris
gcatggattctaaaatacaactata

SEQ ID NO: 102138 - DNA, 25 bp, Canis familiaris
gcaggatactgtaaaactgatcaaa

SEQ ID NO: 102139 - DNA, 25 bp, Canis familiaris
gcaggctcctgaaaaatgctatagc

SEQ ID NO: 102140 - DNA, 25 bp, Canis familiaris
gcaggctggctgtggaggtataggc

SEQ ID NO: 102141 - DNA, 25 bp, Canis familiaris
gcaggctggtaaaatccttactggc

SEQ ID NO: 102142 - DNA, 25 bp, Canis familiaris
gcagcagctttagaatgcccaatcg

SEQ ID NO: 102143 - DNA, 25 bp, Canis familiaris
gcatggccatattctaacacctaag

SEQ ID NO: 102144 - DNA, 25 bp, Canis familiaris
gcatgtgatgcttcaaagccaccta

SEQ ID NO: 102145 - DNA, 25 bp, Canis familiaris
gcaggtgtagagcaatgcatttgag

SEQ ID NO: 102146 - DNA, 25 bp, Canis familiaris
gcagggcatggtgaggtgttgagac

SEQ ID NO: 102147 - DNA, 25 bp, Canis familiaris
gcagtaatggattggcttttgtgac

SEQ ID NO: 102148 - DNA, 25 bp, Canis familiaris
gcaggcatgaggttaatatttgctg

SEQ ID NO: 102149 - DNA, 25 bp, Canis familiaris
gcaggctgcaaaacaaataggtgac

SEQ ID NO: 102150 - DNA, 25 bp, Canis familiaris
gcagtccataaagaagatcgctgac

SEQ ID NO: 102151 - DNA, 25 bp, Canis familiaris
gcaggccgagcaggaagaccgggct

SEQ ID NO: 102152 - DNA, 25 bp, Canis familiaris
gcaggcctagctcacagagctggtt

SEQ ID NO: 102153 - DNA, 25 bp, Canis familiaris
gcaggaaagagtccagaggacttag

SEQ ID NO: 102154 - DNA, 25 bp, Canis familiaris
gcagagaaaagcccggagaatgagg

SEQ ID NO: 102155 - DNA, 25 bp, Canis familiaris
gcagagatttcagcaggcaggagat

SEQ ID NO: 102156 - DNA, 25 bp, Canis familiaris
gcaggcattagcagcagggccagct

SEQ ID NO: 102157 - DNA, 25 bp, Canis familiaris
gcaggcttcatgcagagaacccgac

SEQ ID NO: 102158 - DNA, 25 bp, Canis familiaris
gcaggctccatgcagggaacctgac

SEQ ID NO: 102159 - DNA, 25 bp, Canis familiaris
gcaggtgcaaacagccaacacgcag

SEQ ID NO: 102160 - DNA, 25 bp, Canis familiaris
gcaggggaagaaccagacccaggtc

SEQ ID NO: 102161 - DNA, 25 bp, Canis familiaris
gcaggggtatgaaggcagcccaagg

SEQ ID NO: 102162 - DNA, 25 bp, Canis familiaris
gcaggggatctgtctggaccttaag

SEQ ID NO: 102163 - DNA, 25 bp, Canis familiaris
gcagggggttctcaccagtgagcag

SEQ ID NO: 102164 - DNA, 25 bp, Canis familiaris
gcaggtgggctttatattgggacag

SEQ ID NO: 102165 - DNA, 25 bp, Canis familiaris
gcagtgttgctgctttttgcgaaca

SEQ ID NO: 102166 - DNA, 25 bp, Canis familiaris
gcatgtgttctcaattctatctgta

SEQ ID NO: 102167 - DNA, 25 bp, Canis familiaris
gcaggctagctcatgatgcttcgtg

SEQ ID NO: 102168 - DNA, 25 bp, Canis familiaris
gcatggatatcgatgtgtgtcagag

SEQ ID NO: 102169 - DNA, 25 bp, Canis familiaris
gcaggacatctgccaagtggaggaa

SEQ ID NO: 102170 - DNA, 25 bp, Canis familiaris
gcaggaccatatggagcatgtggga

SEQ ID NO: 102171 - DNA, 25 bp, Canis familiaris
gcaggaaccaggtcgtggctgcagc

SEQ ID NO: 102172 - DNA, 25 bp, Canis familiaris
gcatggaccagctaacttgacacag

SEQ ID NO: 102173 - DNA, 25 bp, Canis familiaris
gcatggcatcaccaactttgacaat

SEQ ID NO: 102174 - DNA, 25 bp, Canis familiaris
gcatggctcacacgtctaagaagtt

SEQ ID NO: 102175 - DNA, 25 bp, Canis familiaris
gcaggccaacagcccagtgaagctc

SEQ ID NO: 102176 - DNA, 25 bp, Canis familiaris
gcatggtcaagccccaggagagtgg

SEQ ID NO: 102177 - DNA, 25 bp, Canis familiaris
gcagagtaacagtccccatgggaga

SEQ ID NO: 102178 - DNA, 25 bp, Canis familiaris
gcaggaacctgagtatccaggtgga

SEQ ID NO: 102179 - DNA, 25 bp, Canis familiaris
gcaggaaccatgttatccctgttac

SEQ ID NO: 102180 - DNA, 25 bp, Canis familiaris
gcagagaacttctttatccttcgaa

SEQ ID NO: 102181 - DNA, 25 bp, Canis familiaris
gcaggaagccaaattactccactgg

SEQ ID NO: 102182 - DNA, 25 bp, Canis familiaris
gcaggcggagcaaattacccaactc

SEQ ID NO: 102183 - DNA, 25 bp, Canis familiaris
gcacgagtcaatatttctcaccctc

SEQ ID NO: 102184 - DNA, 25 bp, Canis familiaris
gcagtggtaactttttgcccaccgc

SEQ ID NO: 102185 - DNA, 25 bp, Canis familiaris
gcagacctcaacatgtctagaccag

SEQ ID NO: 102186 - DNA, 25 bp, Canis familiaris
gcagaccccatctgtcagtgaggag

SEQ ID NO: 102187 - DNA, 25 bp, Canis familiaris
gcagacccagttactcattgggtgg

SEQ ID NO: 102188 - DNA, 25 bp, Canis familiaris
gcagttacagtttccatttatttgt

SEQ ID NO: 102189 - DNA, 25 bp, Canis familiaris
gcaggtactgtttcgctttgttata

SEQ ID NO: 102190 - DNA, 25 bp, Canis familiaris
gcaggtcaaggtcagctgttgttaa

SEQ ID NO: 102191 - DNA, 25 bp, Canis familiaris
gcagtgtacggtgagcacttgacag

SEQ ID NO: 102192 - DNA, 25 bp, Canis familiaris
gcaggtacggttgacagcatgacta

SEQ ID NO: 102193 - DNA, 25 bp, Canis familiaris
gcaggctccggcaggaagctttaga

SEQ ID NO: 102194 - DNA, 25 bp, Canis familiaris
gcaggagcctggaggacctttagca

SEQ ID NO: 102195 - DNA, 25 bp, Canis familiaris
gcagtcagggtgaaaatacttgtga

SEQ ID NO: 102196 - DNA, 25 bp, Canis familiaris
gcagttgggatttagacagtgtcac

SEQ ID NO: 102197 - DNA, 25 bp, Canis familiaris
gcagtgctgggagacagtagctgtc

SEQ ID NO: 102198 - DNA, 25 bp, Canis familiaris
gcagggaatgaagcgctcagtgtgg

SEQ ID NO: 102199 - DNA, 25 bp, Canis familiaris
gcagggaacctggcgtcaggtggcg

SEQ ID NO: 102200 - DNA, 25 bp, Canis familiaris
gcaggaaggccgtggaggaggcgac

SEQ ID NO: 102201 - DNA, 25 bp, Canis familiaris
gcaggaaggcttcctgggggcggag

SEQ ID NO: 102202 - DNA, 25 bp, Canis familiaris
gcaggctacccattctggggagcag

SEQ ID NO: 102203 - DNA, 25 bp, Canis familiaris
gcaggctaccactcgtgtagactac

SEQ ID NO: 102204 - DNA, 25 bp, Canis familiaris
gcaggccccagagcaggtaggcaac

SEQ ID NO: 102205 - DNA, 25 bp, Canis familiaris
gcaggcccggaagtatgatagccaa

SEQ ID NO: 102206 - DNA, 25 bp, Canis familiaris
gcaggcccgcgtagttgaagaagtc

SEQ ID NO: 102207 - DNA, 25 bp, Canis familiaris
gaaggcccgaggaggagatttcgca

SEQ ID NO: 102208 - DNA, 25 bp, Canis familiaris
tcaaggaccgggggacctgccttga

SEQ ID NO: 102209 - DNA, 25 bp, Canis familiaris
gcaagaccacggtgggggccttgta

SEQ ID NO: 102210 - DNA, 25 bp, Canis familiaris
gcagggtactggtggggaggtggtc

SEQ ID NO: 102211 - DNA, 25 bp, Canis familiaris
gcaggccacacttggggggaggtgg

SEQ ID NO: 102212 - DNA, 25 bp, Canis familiaris
gcaggcagaccatggctttgggagg

SEQ ID NO: 102213 - DNA, 25 bp, Canis familiaris
gcacgagaccatttttatttggggc

SEQ ID NO: 102214 - DNA, 25 bp, Canis familiaris
gcaggtccctttttactgtggtgtc

SEQ ID NO: 102215 - DNA, 25 bp, Canis familiaris
gcaggtccatttgtagatcttgatc

SEQ ID NO: 102216 - DNA, 25 bp, Canis familiaris
gcaggctccattaagtaatacttct

SEQ ID NO: 102217 - DNA, 25 bp, Canis familiaris
gcacgtgcctataaaaatttttctc

SEQ ID NO: 102218 - DNA, 25 bp, Canis familiaris
gcaggtgcttaatatattttgtgat

SEQ ID NO: 102219 - DNA, 25 bp, Canis familiaris
gcagtcagcttcataccatttttaa

SEQ ID NO: 102220 - DNA, 25 bp, Canis familiaris
gcagttgcttttatacttctttttt

SEQ ID NO: 102221 - DNA, 25 bp, Canis familiaris
gcagttttctgtttgccttttagta

SEQ ID NO: 102222 - DNA, 25 bp, Canis familiaris
gcagatatctgggctttggttttaa

SEQ ID NO: 102223 - DNA, 25 bp, Canis familiaris
gcagtatggtcaggtttggccctag

SEQ ID NO: 102224 - DNA, 25 bp, Canis familiaris
gcagtagagacggcagttctcctgc

SEQ ID NO: 102225 - DNA, 25 bp, Canis familiaris
gcagtggtgatcagcagttctctgt

SEQ ID NO: 102226 - DNA, 25 bp, Canis familiaris
gcatgggattgcagattgttcttct

SEQ ID NO: 102227 - DNA, 25 bp, Canis familiaris
gcatggtggatgaagatctgtgtat

SEQ ID NO: 102228 - DNA, 25 bp, Canis familiaris
gcatggtagcataattgtggtctgt

SEQ ID NO: 102229 - DNA, 25 bp, Canis familiaris
gcaggaagtaatctggctgttcgca

SEQ ID NO: 102230 - DNA, 25 bp, Canis familiaris
gcaggacagtattaccggttcgcta

SEQ ID NO: 102231 - DNA, 25 bp, Canis familiaris
gcaggacaaatttccccactgacaa

SEQ ID NO: 102232 - DNA, 25 bp, Canis familiaris
gcaggacattttgcctcaaataaag

SEQ ID NO: 102233 - DNA, 25 bp, Canis familiaris
gcagactcttctaacttaaaaacac

SEQ ID NO: 102234 - DNA, 25 bp, Canis familiaris
gcaggcctgcctgacaaaaaaacag

SEQ ID NO: 102235 - DNA, 25 bp, Canis familiaris
gcagtctacctggaaaatgaacatt

SEQ ID NO: 102236 - DNA, 25 bp, Canis familiaris
gcaggctccctgcaaggagactgat

SEQ ID NO: 102237 - DNA, 25 bp, Canis familiaris
gcagttccctactgaagactggagc

SEQ ID NO: 102238 - DNA, 25 bp, Canis familiaris
gcaggcttctgggcacaaaacggac

SEQ ID NO: 102239 - DNA, 25 bp, Canis familiaris
gcaggttccacttcaaaatggtgac

SEQ ID NO: 102240 - DNA, 25 bp, Canis familiaris
gcaggtgttaattcaatccagggtg

SEQ ID NO: 102241 - DNA, 25 bp, Canis familiaris
gcaggcttatagtctaaccatggtg

SEQ ID NO: 102242 - DNA, 25 bp, Canis familiaris
gcatggcctactctaaagctgcgtt

SEQ ID NO: 102243 - DNA, 25 bp, Canis familiaris
gcaggcccagtcagcagagagctgg

SEQ ID NO: 102244 - DNA, 25 bp, Canis familiaris
gcaggtccaggcggaagggagcgga

SEQ ID NO: 102245 - DNA, 25 bp, Canis familiaris
gcatggtcgcgagggatcagggcag

SEQ ID NO: 102246 - DNA, 25 bp, Canis familiaris
gcaggtggcccggagagggggccgc

SEQ ID NO: 102247 - DNA, 25 bp, Canis familiaris
gcagtggccccggaaagggcccagc

SEQ ID NO: 102248 - DNA, 25 bp, Canis familiaris
gcagtggctctgggtgccaaggtgc

SEQ ID NO: 102249 - DNA, 25 bp, Canis familiaris
gcagggctgctattggcattttggc

SEQ ID NO: 102250 - DNA, 25 bp, Canis familiaris
gcatggagctgtttgaggtttgctg

SEQ ID NO: 102251 - DNA, 25 bp, Canis familiaris
gcaggatgctgatcttttcttgcct

SEQ ID NO: 102252 - DNA, 25 bp, Canis familiaris
gcaggcatgctggatgccttcgttc

SEQ ID NO: 102253 - DNA, 25 bp, Canis familiaris
gcaggcactgcttgcgtgtgagtgc

SEQ ID NO: 102254 - DNA, 25 bp, Canis familiaris
gcaggccgctgcgcatatgagatga

SEQ ID NO: 102255 - DNA, 25 bp, Canis familiaris
gcaggccaggaagtatgatagcaaa

SEQ ID NO: 102256 - DNA, 25 bp, Canis familiaris
gcaggggagcattctcttagcaaac

SEQ ID NO: 102257 - DNA, 25 bp, Canis familiaris
gcatggagcagagccgctttcaaac

SEQ ID NO: 102258 - DNA, 25 bp, Canis familiaris
gcaggagcacacgtgcgttctacac

SEQ ID NO: 102259 - DNA, 25 bp, Canis familiaris
gcagaacacctgtatttctacgcac

SEQ ID NO: 102260 - DNA, 25 bp, Canis familiaris
gcagaccagccttacagatttctac

SEQ ID NO: 102261 - DNA, 25 bp, Canis familiaris
gcaggccaggcatcaagttgctgta

SEQ ID NO: 102262 - DNA, 25 bp, Canis familiaris
gcaggccggaagggattggcatgat

SEQ ID NO: 102263 - DNA, 25 bp, Canis familiaris
gcaggccaggaacggttccagtccc

SEQ ID NO: 102264 - DNA, 25 bp, Canis familiaris
gcagggcactaagccttgtagtctg

SEQ ID NO: 102265 - DNA, 25 bp, Canis familiaris
gcaggtccaacagcagcttctagta

SEQ ID NO: 102266 - DNA, 25 bp, Canis familiaris
gcaggtccaagaggatgctggccat

SEQ ID NO: 102267 - DNA, 25 bp, Canis familiaris
gcagtgtcataaagagccgcaggct

SEQ ID NO: 102268 - DNA, 25 bp, Canis familiaris
gcaggcctgaggaacactgcagccc

SEQ ID NO: 102269 - DNA, 25 bp, Canis familiaris
gcagtgaatgcctataacatgataa

SEQ ID NO: 102270 - DNA, 25 bp, Canis familiaris
gcagggatgctgctgaacattctac

SEQ ID NO: 102271 - DNA, 25 bp, Canis familiaris
gcaggaagtccaaagttctagaagt

SEQ ID NO: 102272 - DNA, 25 bp, Canis familiaris
gcaggagagtccaaagtcagtgaaa

SEQ ID NO: 102273 - DNA, 25 bp, Canis familiaris
gcagggagtccagagtattgattca

SEQ ID NO: 102274 - DNA, 25 bp, Canis familiaris
gcaggcgttccagacgattgcaagg

SEQ ID NO: 102275 - DNA, 25 bp, Canis familiaris
gcaggaattccagaagcaagaacta

SEQ ID NO: 102276 - DNA, 25 bp, Canis familiaris
gcatggaaccaaatggaccacaact

SEQ ID NO: 102277 - DNA, 25 bp, Canis familiaris
gcatggaaccaatccaggacacatc

SEQ ID NO: 102278 - DNA, 25 bp, Canis familiaris
gcatggcaaacaagacctgttctat

SEQ ID NO: 102279 - DNA, 25 bp, Canis familiaris
gcaggcaatccatacattttctttt

SEQ ID NO: 102280 - DNA, 25 bp, Canis familiaris
gcatggcaatcgctctgtctcttct

SEQ ID NO: 102281 - DNA, 25 bp, Canis familiaris
gcatggcatcaactctttgcctgtc

SEQ ID NO: 102282 - DNA, 25 bp, Canis familiaris
gcatggcatatatttgtacactgtc

SEQ ID NO: 102283 - DNA, 25 bp, Canis familiaris
gcaggctattctttatacagaccta

SEQ ID NO: 102284 - DNA, 25 bp, Canis familiaris
gcaggctttttattaagcagctgct

SEQ ID NO: 102285 - DNA, 25 bp, Canis familiaris
gcaggtctccaaggtgaacagcctc

SEQ ID NO: 102286 - DNA, 25 bp, Canis familiaris
gcagtgtcaccacctgacagactgc

SEQ ID NO: 102287 - DNA, 25 bp, Canis familiaris
gcaggcctccatgagggagctgggc

SEQ ID NO: 102288 - DNA, 25 bp, Canis familiaris
gcaggagccagagggggagctgtcc

SEQ ID NO: 102289 - DNA, 25 bp, Canis familiaris
gcaggagaagggcgtgcactgtacc

SEQ ID NO: 102290 - DNA, 25 bp, Canis familiaris
gcaggaacagatcgtcgtgcaagtt

SEQ ID NO: 102291 - DNA, 25 bp, Canis familiaris
gcaggagtgcaacctctgggagttc

SEQ ID NO: 102292 - DNA, 25 bp, Canis familiaris
gcaggaatggagcctcatggggccc

SEQ ID NO: 102293 - DNA, 25 bp, Canis familiaris
gcaggaagcaggtgtcttgctgccc

SEQ ID NO: 102294 - DNA, 25 bp, Canis familiaris
gcaggagaaggatgatgatggcttc

SEQ ID NO: 102295 - DNA, 25 bp, Canis familiaris
gcagtaaatgaacagccgcttcaga

SEQ ID NO: 102296 - DNA, 25 bp, Canis familiaris
gcaggagaagaacaccctgccgacc

SEQ ID NO: 102297 - DNA, 25 bp, Canis familiaris
gcaggagaaaatggtctccccggcc

SEQ ID NO: 102298 - DNA, 25 bp, Canis familiaris
gcaggaagatcatgtcttccccgct

SEQ ID NO: 102299 - DNA, 25 bp, Canis familiaris
gcaggagacgatgtcgtcctgccct

SEQ ID NO: 102300 - DNA, 25 bp, Canis familiaris
gcagggtcagatgatgcagagcctc

SEQ ID NO: 102301 - DNA, 25 bp, Canis familiaris
gcagagggagaaacaagcttccttg

SEQ ID NO: 102302 - DNA, 25 bp, Canis familiaris
gcagaaggaaagccgtgttttatta

SEQ ID NO: 102303 - DNA, 25 bp, Canis familiaris
gcagatcggaaaacgtgttattttt

SEQ ID NO: 102304 - DNA, 25 bp, Canis familiaris
gcagtctggaaatagcctctcattt

SEQ ID NO: 102305 - DNA, 25 bp, Canis familiaris
gcagttgcagctttaatcctcatga

SEQ ID NO: 102306 - DNA, 25 bp, Canis familiaris
gcagtgagcagcagctactacagta

SEQ ID NO: 102307 - DNA, 25 bp, Canis familiaris
gcaggaggagagtactgacgcccga

SEQ ID NO: 102308 - DNA, 25 bp, Canis familiaris
gcaggggcaggttcagttggccttc

SEQ ID NO: 102309 - DNA, 25 bp, Canis familiaris
gcagttggcagagtacgggcgtgtg

SEQ ID NO: 102310 - DNA, 25 bp, Canis familiaris
gcagttggaagcgctcggaggtgga

SEQ ID NO: 102311 - DNA, 25 bp, Canis familiaris
gcaggtgggagagcgggagctgcgg

SEQ ID NO: 102312 - DNA, 25 bp, Canis familiaris
gcagcaaggtaatcggggtgaggtc

SEQ ID NO: 102313 - DNA, 25 bp, Canis familiaris
gacgaggctaactgggggtaccaag

SEQ ID NO: 102314 - DNA, 25 bp, Canis familiaris
gcaaaggctacaaaaggggtcacca

SEQ ID NO: 102315 - DNA, 25 bp, Canis familiaris
gcagaaggctagtcagaacttgcag

SEQ ID NO: 102316 - DNA, 25 bp, Canis familiaris
gcaggcattggattatggcacccag

SEQ ID NO: 102317 - DNA, 25 bp, Canis familiaris
gcagtgaaggatttgacccccctgc

SEQ ID NO: 102318 - DNA, 25 bp, Canis familiaris
gcagggagaatgtgcatccccactt

SEQ ID NO: 102319 - DNA, 25 bp, Canis familiaris
gcaggggctaattgctccaagatct

SEQ ID NO: 102320 - DNA, 25 bp, Canis familiaris
gcaggggcacaactacaactgctct

SEQ ID NO: 102321 - DNA, 25 bp, Canis familiaris
gcaggggcaagcattcaagtattct

SEQ ID NO: 102322 - DNA, 25 bp, Canis familiaris
gcaggggcttggccataagctttct

SEQ ID NO: 102323 - DNA, 25 bp, Canis familiaris
gcagggatgctttggctcaagagta

SEQ ID NO: 102324 - DNA, 25 bp, Canis familiaris
gcagtggaccaagctcagggacata

SEQ ID NO: 102325 - DNA, 25 bp, Canis familiaris
gcagggagacggatgctgggctcaa

SEQ ID NO: 102326 - DNA, 25 bp, Canis familiaris
gcaggagagcgagattgcgggcatc

SEQ ID NO: 102327 - DNA, 25 bp, Canis familiaris
gcagtagagctggtcttctggtctc

SEQ ID NO: 102328 - DNA, 25 bp, Canis familiaris
gcaggactgcagtttgtctggcttc

SEQ ID NO: 102329 - DNA, 25 bp, Canis familiaris
gcaggacgcagttctgtgcggaatc

SEQ ID NO: 102330 - DNA, 25 bp, Canis familiaris
gcaggaacatgtgctggcttcgtga

SEQ ID NO: 102331 - DNA, 25 bp, Canis familiaris
gcaggaaatcgatggctgtcgcagg

SEQ ID NO: 102332 - DNA, 25 bp, Canis familiaris
gcagtgaaaagattgattgtccaga

SEQ ID NO: 102333 - DNA, 25 bp, Canis familiaris
gcaggaagtgacttcttctgccaaa

SEQ ID NO: 102334 - DNA, 25 bp, Canis familiaris
gcagagaaggtcttccttgctcaga

SEQ ID NO: 102335 - DNA, 25 bp, Canis familiaris
gcaggatgcctactacatctttcag

SEQ ID NO: 102336 - DNA, 25 bp, Canis familiaris
gcagtgatgtttgttcttgggcttt

SEQ ID NO: 102337 - DNA, 25 bp, Canis familiaris
gcagtgttttatattttcagcttta

SEQ ID NO: 102338 - DNA, 25 bp, Canis familiaris
gcagtctgtgtttgtttttcgtggt

SEQ ID NO: 102339 - DNA, 25 bp, Canis familiaris
gcagtctgtgccttggtttgagctg

SEQ ID NO: 102340 - DNA, 25 bp, Canis familiaris
gcagattgtctgtagccgattggag

SEQ ID NO: 102341 - DNA, 25 bp, Canis familiaris
gcagatggatgtgatgcccggcgag

SEQ ID NO: 102342 - DNA, 25 bp, Canis familiaris
gcagtgcagaaggtggacggcgagc

SEQ ID NO: 102343 - DNA, 25 bp, Canis familiaris
gcaggcgaagttgcagctgcgctac

SEQ ID NO: 102344 - DNA, 25 bp, Canis familiaris
gcagagctgctactgtactgcggca

SEQ ID NO: 102345 - DNA, 25 bp, Canis familiaris
gcaggctgctgagtgaggcctactt

SEQ ID NO: 102346 - DNA, 25 bp, Canis familiaris
gcaggcagctgtgtgctgcttcact

SEQ ID NO: 102347 - DNA, 25 bp, Canis familiaris
gcaggcagcaggcagtgtagcacgg

SEQ ID NO: 102348 - DNA, 25 bp, Canis familiaris
gcagtgagcagggtggggtctggga

SEQ ID NO: 102349 - DNA, 25 bp, Canis familiaris
gcaggaaggcagcctgcgtgtcggg

SEQ ID NO: 102350 - DNA, 25 bp, Canis familiaris
gcaggcaagggccaggtggccgctg

SEQ ID NO: 102351 - DNA, 25 bp, Canis familiaris
gcaggaagggcgagggcctgcctcc

SEQ ID NO: 102352 - DNA, 25 bp, Canis familiaris
gcaggaaggggttggggcgttcaga

SEQ ID NO: 102353 - DNA, 25 bp, Canis familiaris
gcaggtcggctggttgaagaggttc

SEQ ID NO: 102354 - DNA, 25 bp, Canis familiaris
gcagggcgagtgtttggacggtgtg

SEQ ID NO: 102355 - DNA, 25 bp, Canis familiaris
gcagtagcgctgtttacgacgagtg

SEQ ID NO: 102356 - DNA, 25 bp, Canis familiaris
gcagtaggctgaaatattttaatga

SEQ ID NO: 102357 - DNA, 25 bp, Canis familiaris
gcaggtggcttacatatacaaatgt

SEQ ID NO: 102358 - DNA, 25 bp, Canis familiaris
gcaggtggctacagtaatacagtct

SEQ ID NO: 102359 - DNA, 25 bp, Canis familiaris
gcagtggtacacaaggagaacatta

SEQ ID NO: 102360 - DNA, 25 bp, Canis familiaris
gcagtcagtacaacatgtaactctt

SEQ ID NO: 102361 - DNA, 25 bp, Canis familiaris
gcagtattgaaactattccatcctc

SEQ ID NO: 102362 - DNA, 25 bp, Canis familiaris
gcagtaaaaactatccagcaacatt

SEQ ID NO: 102363 - DNA, 25 bp, Canis familiaris
gcaggatagcaaactagttagaaaa

SEQ ID NO: 102364 - DNA, 25 bp, Canis familiaris
gcaggtcatcaaaccagtgctgaat

SEQ ID NO: 102365 - DNA, 25 bp, Canis familiaris
gcaggctcactttcactgaggacaa

SEQ ID NO: 102366 - DNA, 25 bp, Canis familiaris
gcaggctccctactgggagtccaat

SEQ ID NO: 102367 - DNA, 25 bp, Canis familiaris
gcaactcctcgagaaggtccaaaaa

SEQ ID NO: 102368 - DNA, 25 bp, Canis familiaris
gcagattttcgtgaagacccttacg

SEQ ID NO: 102369 - DNA, 25 bp, Canis familiaris
gcaggagcttttgaagaccacccag

SEQ ID NO: 102370 - DNA, 25 bp, Canis familiaris
gcagaagattttcaagtcccgcctg

SEQ ID NO: 102371 - DNA, 25 bp, Canis familiaris
gcagaaacttcattaaccagccctt

SEQ ID NO: 102372 - DNA, 25 bp, Canis familiaris
gcagacggctctatgaacacgggtt

SEQ ID NO: 102373 - DNA, 25 bp, Canis familiaris
gcagagggcctttgcggaagggctt

SEQ ID NO: 102374 - DNA, 25 bp, Canis familiaris
gcaggttgcctttccagaagggcga

SEQ ID NO: 102375 - DNA, 25 bp, Canis familiaris
gcaggtcatgacattccgtacctct

SEQ ID NO: 102376 - DNA, 25 bp, Canis familiaris
gcagctttaattgccatgattcccc

SEQ ID NO: 102377 - DNA, 25 bp, Canis familiaris
gcaggattactggccctgatgctgc

SEQ ID NO: 102378 - DNA, 25 bp, Canis familiaris
gcaggagttgtggtcagcatgtctc

SEQ ID NO: 102379 - DNA, 25 bp, Canis familiaris
gcaggtgatggggtcatgcctgccc

SEQ ID NO: 102380 - DNA, 25 bp, Canis familiaris
gcaggaatgggcttcacttactccc

SEQ ID NO: 102381 - DNA, 25 bp, Canis familiaris
gcaggtagttgctcacatattcatc

SEQ ID NO: 102382 - DNA, 25 bp, Canis familiaris
gcacggagtccgtccagttgtcgga

SEQ ID NO: 102383 - DNA, 25 bp, Canis familiaris
gagcggagatcgactacgttccggg

SEQ ID NO: 102384 - DNA, 25 bp, Canis familiaris
gcagggagttgtgaccatctcaggg

SEQ ID NO: 102385 - DNA, 25 bp, Canis familiaris
gcaggagtggctgaatcgagacagg

SEQ ID NO: 102386 - DNA, 25 bp, Canis familiaris
gcaggaatggctgtgtgctcggact

SEQ ID NO: 102387 - DNA, 25 bp, Canis familiaris
gcaggagatgtgattggcccagagt

SEQ ID NO: 102388 - DNA, 25 bp, Canis familiaris
gcaggaaatgttatgccatctggct

SEQ ID NO: 102389 - DNA, 25 bp, Canis familiaris
gcaggacactgatcttctcctgcct

SEQ ID NO: 102390 - DNA, 25 bp, Canis familiaris
gcaggacctgtattctggcctgaat

SEQ ID NO: 102391 - DNA, 25 bp, Canis familiaris
gcaggaagctcgacatcagccctga

SEQ ID NO: 102392 - DNA, 25 bp, Canis familiaris
gcaggaggcgctaaaccactgagcc

SEQ ID NO: 102393 - DNA, 25 bp, Canis familiaris
gcagtggggctcaagatcgtccacc

SEQ ID NO: 102394 - DNA, 25 bp, Canis familiaris
gcaggtggggtgcagagctacactc

SEQ ID NO: 102395 - DNA, 25 bp, Canis familiaris
gcaggtccaggaccaggtgcacaac

SEQ ID NO: 102396 - DNA, 25 bp, Canis familiaris
gcaggatctcacctgcctgagtacg

SEQ ID NO: 102397 - DNA, 25 bp, Canis familiaris
gcaggattcacaccaggatgttctg

SEQ ID NO: 102398 - DNA, 25 bp, Canis familiaris
gcaggttcacagtatagctgttgct

SEQ ID NO: 102399 - DNA, 25 bp, Canis familiaris
gcagtgttatagtaacttgcctacc

SEQ ID NO: 102400 - DNA, 25 bp, Canis familiaris
gcagtctttagctttttgactcccc

SEQ ID NO: 102401 - DNA, 25 bp, Canis familiaris
gcagtttgtagcacgtatgtcttca

SEQ ID NO: 102402 - DNA, 25 bp, Canis familiaris
gcagttctgtagtgtcatttcttat

SEQ ID NO: 102403 - DNA, 25 bp, Canis familiaris
gcagttcttcattgttagattttca

SEQ ID NO: 102404 - DNA, 25 bp, Canis familiaris
gcagggcttcatcttatgaccttga

SEQ ID NO: 102405 - DNA, 25 bp, Canis familiaris
gcagcagttccgctttatctattac

SEQ ID NO: 102406 - DNA, 25 bp, Canis familiaris
gcagcagttccgctttatctattac

SEQ ID NO: 102407 - DNA, 25 bp, Canis familiaris
gcagatgttctggagatttcttgat

SEQ ID NO: 102408 - DNA, 25 bp, Canis familiaris
gcagttgcctgccacaactttgtaa

SEQ ID NO: 102409 - DNA, 25 bp, Canis familiaris
gcagttctctcgtccaagtattagt

SEQ ID NO: 102410 - DNA, 25 bp, Canis familiaris
gcagtgatactgccagccaagaaaa

SEQ ID NO: 102411 - DNA, 25 bp, Canis familiaris
gcagcttgatgccccagaagaaacc

SEQ ID NO: 102412 - DNA, 25 bp, Canis familiaris
gcagttatgccctgaagtacattca

SEQ ID NO: 102413 - DNA, 25 bp, Canis familiaris
gcagtattcccgggactgcacatgt

SEQ ID NO: 102414 - DNA, 25 bp, Canis familiaris
gcagtgattggggctaaccagcatc

SEQ ID NO: 102415 - DNA, 25 bp, Canis familiaris
gcaggcattgaggcgtaaccagcac

SEQ ID NO: 102416 - DNA, 25 bp, Canis familiaris
gcaggctttccggcagaacgcatcc

SEQ ID NO: 102417 - DNA, 25 bp, Canis familiaris
gcaggttgtcaatgaaaccatctct

SEQ ID NO: 102418 - DNA, 25 bp, Canis familiaris
gcaggaagacagaaggacaccctca

SEQ ID NO: 102419 - DNA, 25 bp, Canis familiaris
gcagcaggagaacatgaagccccaa

SEQ ID NO: 102420 - DNA, 25 bp, Canis familiaris
gcaggtaacaatttcaccccaagtt

SEQ ID NO: 102421 - DNA, 25 bp, Canis familiaris
gcaggataaaccttaagcacccgtg

SEQ ID NO: 102422 - DNA, 25 bp, Canis familiaris
gcagaaaaacacttaagcaccacgt

SEQ ID NO: 102423 - DNA, 25 bp, Canis familiaris
gcagcaaaagactctgattccccgt

SEQ ID NO: 102424 - DNA, 25 bp, Canis familiaris
gcagatcagaaggtcctgtctaccc

SEQ ID NO: 102425 - DNA, 25 bp, Canis familiaris
gcagtgcagttggttttgtatgtac

SEQ ID NO: 102426 - DNA, 25 bp, Canis familiaris
gcagtcttctggagggacagttccc

SEQ ID NO: 102427 - DNA, 25 bp, Canis familiaris
gcaggcttcaggcgggaggatatcc

SEQ ID NO: 102428 - DNA, 25 bp, Canis familiaris
gcagtccggtgcaaggtgggtaccc

SEQ ID NO: 102429 - DNA, 25 bp, Canis familiaris
gcaggtgtggtgccggggttaaacg

SEQ ID NO: 102430 - DNA, 25 bp, Canis familiaris
gcaggttgagtgcctggtgtcctgc

SEQ ID NO: 102431 - DNA, 25 bp, Canis familiaris
gcaggtcgatgacctgcgctttgcg

SEQ ID NO: 102432 - DNA, 25 bp, Canis familiaris
gcaggtgaatgcacatgccttctca

SEQ ID NO: 102433 - DNA, 25 bp, Canis familiaris
gcaggagcacacggtgcctgaatat

SEQ ID NO: 102434 - DNA, 25 bp, Canis familiaris
gcaggagccagctggctcagtcttc

SEQ ID NO: 102435 - DNA, 25 bp, Canis familiaris
gcaggaggcgtgagtcagacaccct

SEQ ID NO: 102436 - DNA, 25 bp, Canis familiaris
gcagtcgtgcggtagtgcataacac

SEQ ID NO: 102437 - DNA, 25 bp, Canis familiaris
gcagggagctggtgcaacaactgca

SEQ ID NO: 102438 - DNA, 25 bp, Canis familiaris
gcaggtggcaggtaccatgaagctg

SEQ ID NO: 102439 - DNA, 25 bp, Canis familiaris
gcagatgtgccgaactcacgaactc

SEQ ID NO: 102440 - DNA, 25 bp, Canis familiaris
gcagtcccagtattattatgaccct

SEQ ID NO: 102441 - DNA, 25 bp, Canis familiaris
gcagtcctagttttctatagcttgc

SEQ ID NO: 102442 - DNA, 25 bp, Canis familiaris
gcaggcattcagtgacttctagttg

SEQ ID NO: 102443 - DNA, 25 bp, Canis familiaris
gcaggtctgcactgacattgatgag

SEQ ID NO: 102444 - DNA, 25 bp, Canis familiaris
gcaggacagatgggaaggaggccag

SEQ ID NO: 102445 - DNA, 25 bp, Canis familiaris
gcaggaagctcctggtgtggcatcg

SEQ ID NO: 102446 - DNA, 25 bp, Canis familiaris
gcaggagagctcactgaggatgagg

SEQ ID NO: 102447 - DNA, 25 bp, Canis familiaris
gcaggagccgcaagcggtgctgggt

SEQ ID NO: 102448 - DNA, 25 bp, Canis familiaris
gcaggatgggcaagtgtcgcggcct

SEQ ID NO: 102449 - DNA, 25 bp, Canis familiaris
gcagttgcgcgaggtgatcggcgcc

SEQ ID NO: 102450 - DNA, 25 bp, Canis familiaris
gcaggtgctcagagctgacccagac

SEQ ID NO: 102451 - DNA, 25 bp, Canis familiaris
gcagtatctatgttaggcccagctc

SEQ ID NO: 102452 - DNA, 25 bp, Canis familiaris
gcagtacaattgtcacgcaagccgc

SEQ ID NO: 102453 - DNA, 25 bp, Canis familiaris
gcaggacctgcttaatgaagccgaa

SEQ ID NO: 102454 - DNA, 25 bp, Canis familiaris
gcagtgacctgcgtgaaaacacaga

SEQ ID NO: 102455 - DNA, 25 bp, Canis familiaris
gcaggacctgctggaagaggacgac

SEQ ID NO: 102456 - DNA, 25 bp, Canis familiaris
gcaggaggtgctgggagtgcggcaa

SEQ ID NO: 102457 - DNA, 25 bp, Canis familiaris
gcagggggcgcaagatgactgtcaa

SEQ ID NO: 102458 - DNA, 25 bp, Canis familiaris
gcagggcatgctggagcgagactga

SEQ ID NO: 102459 - DNA, 25 bp, Canis familiaris
gcagagctgctggagcgggtgctgc

SEQ ID NO: 102460 - DNA, 25 bp, Canis familiaris
gcaggatctgtgtcggagtcatctt

SEQ ID NO: 102461 - DNA, 25 bp, Canis familiaris
gcaggacagcctggatgaggacctc

SEQ ID NO: 102462 - DNA, 25 bp, Canis familiaris
gcagggcatgtgccctggagtcccc

SEQ ID NO: 102463 - DNA, 25 bp, Canis familiaris
gcaggtgcggctgcaggaagctctg

SEQ ID NO: 102464 - DNA, 25 bp, Canis familiaris
gcaggaggcagagagaggagtagga

SEQ ID NO: 102465 - DNA, 25 bp, Canis familiaris
gcaggaacgggatggaccggatacc

SEQ ID NO: 102466 - DNA, 25 bp, Canis familiaris
gcaggacacgggccagatgcaccgg

SEQ ID NO: 102467 - DNA, 25 bp, Canis familiaris
gcaggatataggatcatcagcccag

SEQ ID NO: 102468 - DNA, 25 bp, Canis familiaris
gcagatggatagatcctcagcccag

SEQ ID NO: 102469 - DNA, 25 bp, Canis familiaris
gcagaggatatactgactcccggag

SEQ ID NO: 102470 - DNA, 25 bp, Canis familiaris
gcagatgctagaatgtgcaatgcaa

SEQ ID NO: 102471 - DNA, 25 bp, Canis familiaris
gcagattgcaatagactatgaggct

SEQ ID NO: 102472 - DNA, 25 bp, Canis familiaris
gcagttcaatctttgttggatgtct

SEQ ID NO: 102473 - DNA, 25 bp, Canis familiaris
aagtgtgcgcagtgccatactgtgg

SEQ ID NO: 102474 - DNA, 25 bp, Canis familiaris
gcaggatcgacgcgcttctgtatgg

SEQ ID NO: 102475 - DNA, 25 bp, Canis familiaris
gcacgagcgaaggcggccgaatgga

SEQ ID NO: 102476 - DNA, 25 bp, Canis familiaris
gcaggacgaagcaaggcacaggaca

SEQ ID NO: 102477 - DNA, 25 bp, Canis familiaris
gcaggacgaggcagctacaggaacc

SEQ ID NO: 102478 - DNA, 25 bp, Canis familiaris
gcaggacggagggctgatcggtgcc

SEQ ID NO: 102479 - DNA, 25 bp, Canis familiaris
gcaggacggacggtcagcctgcgac

SEQ ID NO: 102480 - DNA, 25 bp, Canis familiaris
gcaggatgcaggagtacagttgcga

SEQ ID NO: 102481 - DNA, 25 bp, Canis familiaris
gcaggtcagctgatcttctgtagga

SEQ ID NO: 102482 - DNA, 25 bp, Canis familiaris
gcaggtggcgatcctacatgtgagg

SEQ ID NO: 102483 - DNA, 25 bp, Canis familiaris
gcagaggaggacgtccagtgttgga

SEQ ID NO: 102484 - DNA, 25 bp, Canis familiaris
gcagcaacacaagcccgctgttgcg

SEQ ID NO: 102485 - DNA, 25 bp, Canis familiaris
gcagctacttagactcgttggtcag

SEQ ID NO: 102486 - DNA, 25 bp, Canis familiaris
gcagaactcttactggtgtggctag

SEQ ID NO: 102487 - DNA, 25 bp, Canis familiaris
gcagtttctgtatgcagtaggctga

SEQ ID NO: 102488 - DNA, 25 bp, Canis familiaris
gcagtaatctcttggatgtcagcct

SEQ ID NO: 102489 - DNA, 25 bp, Canis familiaris
gcagaaacttgatttgctacccttc

SEQ ID NO: 102490 - DNA, 25 bp, Canis familiaris
gcagacgagttgattttgttttcat

SEQ ID NO: 102491 - DNA, 25 bp, Canis familiaris
gcagagcgcggtttatttttgtact

SEQ ID NO: 102492 - DNA, 25 bp, Canis familiaris
gcagagcagggacttattatatatg

SEQ ID NO: 102493 - DNA, 25 bp, Canis familiaris
gcaggaggtgatctttgctcttgtc

SEQ ID NO: 102494 - DNA, 25 bp, Canis familiaris
gcaggagggcattgtgcatgtgctc

SEQ ID NO: 102495 - DNA, 25 bp, Canis familiaris
gcagagcagctccctcgctgcgatc

SEQ ID NO: 102496 - DNA, 25 bp, Canis familiaris
gcaggactgcagacatgtccacacc

SEQ ID NO: 102497 - DNA, 25 bp, Canis familiaris
gcaggagtgcattgagctcttcacc

SEQ ID NO: 102498 - DNA, 25 bp, Canis familiaris
gcaggagcacatgagcatctccggc

SEQ ID NO: 102499 - DNA, 25 bp, Canis familiaris
gcaggaactgagtatccagctggag

SEQ ID NO: 102500 - DNA, 25 bp, Canis familiaris
gcaggacctgaagcagcacgtgcag

SEQ ID NO: 102501 - DNA, 25 bp, Canis familiaris
gcaggatcctggggctgaggctgca

SEQ ID NO: 102502 - DNA, 25 bp, Canis familiaris
gcagtgtctgcataggtgcaggatc

SEQ ID NO: 102503 - DNA, 25 bp, Canis familiaris
gcaggtggctaaggctggagtccaa

SEQ ID NO: 102504 - DNA, 25 bp, Canis familiaris
gcaggtggctgacaggcaggtcaaa

SEQ ID NO: 102505 - DNA, 25 bp, Canis familiaris
gcaggggcatgggtgccaggtacag

SEQ ID NO: 102506 - DNA, 25 bp, Canis familiaris
gcagtgatggcctttgatcggtaca

SEQ ID NO: 102507 - DNA, 25 bp, Canis familiaris
gcagtgggccagcctacagtgaact

SEQ ID NO: 102508 - DNA, 25 bp, Canis familiaris
gcaggggccgagcatagagatagta

SEQ ID NO: 102509 - DNA, 25 bp, Canis familiaris
gcagatcgtcctgctcaaggatcag

SEQ ID NO: 102510 - DNA, 25 bp, Canis familiaris
gcagtcggaccagcaaggacagtct

SEQ ID NO: 102511 - DNA, 25 bp, Canis familiaris
gcagccgaaacccacagtaaacctg

SEQ ID NO: 102512 - DNA, 25 bp, Canis familiaris
gcacccaggagaagccaataaacct

SEQ ID NO: 102513 - DNA, 25 bp, Canis familiaris
gaagcttggaaacgtaagaactttg

SEQ ID NO: 102514 - DNA, 25 bp, Canis familiaris
taatttggctaacaactacactttt

SEQ ID NO: 102515 - DNA, 25 bp, Canis familiaris
taattccctatacaaaacccacttg

SEQ ID NO: 102516 - DNA, 25 bp, Canis familiaris
taattccctatacaaaacccacttg

SEQ ID NO: 102517 - DNA, 25 bp, Canis familiaris
gaattccttctataaaactcttcca

SEQ ID NO: 102518 - DNA, 25 bp, Canis familiaris
gacctgcccttataccaaattattc

SEQ ID NO: 102519 - DNA, 25 bp, Canis familiaris
gcacttcctttcaaagccaacttct

SEQ ID NO: 102520 - DNA, 25 bp, Canis familiaris
gcagctccctttttaacaactgtgt

SEQ ID NO: 102521 - DNA, 25 bp, Canis familiaris
gcaggtgtgcttaactaacaaccct

SEQ ID NO: 102522 - DNA, 25 bp, Canis familiaris
gcagttgttcgttctagatagcccc

SEQ ID NO: 102523 - DNA, 25 bp, Canis familiaris
gcactaaatttagaaatgtctccat

SEQ ID NO: 102524 - DNA, 25 bp, Canis familiaris
gcagataggttacccgactgttgca

SEQ ID NO: 102525 - DNA, 25 bp, Canis familiaris
gcagataggttacccgactgttgca

SEQ ID NO: 102526 - DNA, 25 bp, Canis familiaris
gcagataggttacccgactgttgca

SEQ ID NO: 102527 - DNA, 25 bp, Canis familiaris
gcagggtttgaagcagagctctctg

SEQ ID NO: 102528 - DNA, 25 bp, Canis familiaris
gcagtgctgagtaacaccaggctcc

SEQ ID NO: 102529 - DNA, 25 bp, Canis familiaris
gcagtgtcattaagccataggccct

SEQ ID NO: 102530 - DNA, 25 bp, Canis familiaris
gcaggatttgatccctggactccag

SEQ ID NO: 102531 - DNA, 25 bp, Canis familiaris
gcagtagtgtgtctaggccctgcag

SEQ ID NO: 102532 - DNA, 25 bp, Canis familiaris
gcaggtgttcaggtactccctgcag

SEQ ID NO: 102533 - DNA, 25 bp, Canis familiaris
gcagtggtcccagatgctgggctgc

SEQ ID NO: 102534 - DNA, 25 bp, Canis familiaris
gcaggggatctcagccaggatgtgc

SEQ ID NO: 102535 - DNA, 25 bp, Canis familiaris
gcaggaggactccctcaatgtggct

SEQ ID NO: 102536 - DNA, 25 bp, Canis familiaris
gcaaaggacactatacatggtcagt

SEQ ID NO: 102537 - DNA, 25 bp, Canis familiaris
gcaggagtgcaccttgtgacagggc

SEQ ID NO: 102538 - DNA, 25 bp, Canis familiaris
gcaggagcagcagcttgtggagcgg

SEQ ID NO: 102539 - DNA, 25 bp, Canis familiaris
gcaggagcactggttgcagctgcac

SEQ ID NO: 102540 - DNA, 25 bp, Canis familiaris
gcaggtcacatggtctctgtgcaac

SEQ ID NO: 102541 - DNA, 25 bp, Canis familiaris
gcagagtatctgtttgcttgcagag

SEQ ID NO: 102542 - DNA, 25 bp, Canis familiaris
gcaggttcttgttggtgcacagcac

SEQ ID NO: 102543 - DNA, 25 bp, Canis familiaris
gcaggttttctctttcagatcatct

SEQ ID NO: 102544 - DNA, 25 bp, Canis familiaris
gcagttgccttgttttagagcatcg

SEQ ID NO: 102545 - DNA, 25 bp, Canis familiaris
gcagttgcagttgctgtattagata

SEQ ID NO: 102546 - DNA, 25 bp, Canis familiaris
gcaggaggcttggctctttgaatca

SEQ ID NO: 102547 - DNA, 25 bp, Canis familiaris
gcaggagatcttggtcttggacatc

SEQ ID NO: 102548 - DNA, 25 bp, Canis familiaris
gcaaagcattctcatcagtcgcaat

SEQ ID NO: 102549 - DNA, 25 bp, Canis familiaris
gcaaagcttctcatacttgaaataa

SEQ ID NO: 102550 - DNA, 25 bp, Canis familiaris
gcacgagtcttacactgctaaaata

SEQ ID NO: 102551 - DNA, 25 bp, Canis familiaris
gcacccttggacgctgtgcaaggtc

SEQ ID NO: 102552 - DNA, 25 bp, Canis familiaris
gcagtccttgttaactgggaggtcg

SEQ ID NO: 102553 - DNA, 25 bp, Canis familiaris
gcagtcaccgtctccggtgacgacc

SEQ ID NO: 102554 - DNA, 25 bp, Canis familiaris
gcagtcccgaatgtagcgtgtgggc

SEQ ID NO: 102555 - DNA, 25 bp, Canis familiaris
gcagtgcccagagtctggacgtctg

SEQ ID NO: 102556 - DNA, 25 bp, Canis familiaris
gcaggattcagaggtggacggggat

SEQ ID NO: 102557 - DNA, 25 bp, Canis familiaris
gcaggtgccagatttggagcggggg

SEQ ID NO: 102558 - DNA, 25 bp, Canis familiaris
gcagagtcggaaattgacccttgta

SEQ ID NO: 102559 - DNA, 25 bp, Canis familiaris
gcagaatctggaaaagccccaggag

SEQ ID NO: 102560 - DNA, 25 bp, Canis familiaris
gcagtactgaaaaacctccaggttg

SEQ ID NO: 102561 - DNA, 25 bp, Canis familiaris
gcagtgacacaatcaagcctaacgt

SEQ ID NO: 102562 - DNA, 25 bp, Canis familiaris
gcagtaagcaaggctctgctccaac

SEQ ID NO: 102563 - DNA, 25 bp, Canis familiaris
gcagaaagcaacaactcccaagcca

SEQ ID NO: 102564 - DNA, 25 bp, Canis familiaris
gcagaaggatactattcccacaccg

SEQ ID NO: 102565 - DNA, 25 bp, Canis familiaris
gcaggtggagacgatgcacccctgc

SEQ ID NO: 102566 - DNA, 25 bp, Canis familiaris
gcaggaggaacagtggccttgcttc

SEQ ID NO: 102567 - DNA, 25 bp, Canis familiaris
gcaggggctacagttgcagcctgct

SEQ ID NO: 102568 - DNA, 25 bp, Canis familiaris
gcaggtgtctgacaatcgcttgcct

SEQ ID NO: 102569 - DNA, 25 bp, Canis familiaris
gcaggtacagatcacatcacacccg

SEQ ID NO: 102570 - DNA, 25 bp, Canis familiaris
gcaggtaacatggactgcctctggc

SEQ ID NO: 102571 - DNA, 25 bp, Canis familiaris
gcaggatcctaggactgccttagcc

SEQ ID NO: 102572 - DNA, 25 bp, Canis familiaris
gcaggtcttgtcactgcattttcct

SEQ ID NO: 102573 - DNA, 25 bp, Canis familiaris
gcaggatctttcaggttcttcattc

SEQ ID NO: 102574 - DNA, 25 bp, Canis familiaris
gcaggatccttcagagtgactacat

SEQ ID NO: 102575 - DNA, 25 bp, Canis familiaris
gcaggtcacttttgagaatctgact

SEQ ID NO: 102576 - DNA, 25 bp, Canis familiaris
gcaggtgcacttggaggcttcacca

SEQ ID NO: 102577 - DNA, 25 bp, Canis familiaris
gcagggatcatgaggctgcctgccc

SEQ ID NO: 102578 - DNA, 25 bp, Canis familiaris
gcaggtgtatatagatgcttctgtc

SEQ ID NO: 102579 - DNA, 25 bp, Canis familiaris
gcaggtgtgtgataatgtcagcatc

SEQ ID NO: 102580 - DNA, 25 bp, Canis familiaris
gcagtgcatttgtcattagtattca

SEQ ID NO: 102581 - DNA, 25 bp, Canis familiaris
gcagtgctttcatttcagatctgtc

SEQ ID NO: 102582 - DNA, 25 bp, Canis familiaris
gcaggatttcctcgaatctgctccg

SEQ ID NO: 102583 - DNA, 25 bp, Canis familiaris
gcagtgacattgcctgttttgctcc

SEQ ID NO: 102584 - DNA, 25 bp, Canis familiaris
gcaggatcaacctattttgtgacct

SEQ ID NO: 102585 - DNA, 25 bp, Canis familiaris
gcagatgtacatgctcttttgtgat

SEQ ID NO: 102586 - DNA, 25 bp, Canis familiaris
gcagatgcagagagccattttgtga

SEQ ID NO: 102587 - DNA, 25 bp, Canis familiaris
gcagacctgggcaatgtctggctag

SEQ ID NO: 102588 - DNA, 25 bp, Canis familiaris
gcagaccttgcactctttggacatg

SEQ ID NO: 102589 - DNA, 25 bp, Canis familiaris
gcagccccgctttggggacatgaac

SEQ ID NO: 102590 - DNA, 25 bp, Canis familiaris
gcagggcctcttttgtggcatgtac

SEQ ID NO: 102591 - DNA, 25 bp, Canis familiaris
gcagggactctgaatagggcaaatt

SEQ ID NO: 102592 - DNA, 25 bp, Canis familiaris
gcagggagcctgagacgagcaggtg

SEQ ID NO: 102593 - DNA, 25 bp, Canis familiaris
gcaggtctcctgagaggcagggagc

SEQ ID NO: 102594 - DNA, 25 bp, Canis familiaris
gcaggaggacgacgaggaggcgagc

SEQ ID NO: 102595 - DNA, 25 bp, Canis familiaris
gcaggtgagtcgaggaggggaggct

SEQ ID NO: 102596 - DNA, 25 bp, Canis familiaris
gcaggtgagtccagggctgagtggt

SEQ ID NO: 102597 - DNA, 25 bp, Canis familiaris
gcaggaggcgccaatcatggcgagt

SEQ ID NO: 102598 - DNA, 25 bp, Canis familiaris
gcagagaaggccattgaatgcgacg

SEQ ID NO: 102599 - DNA, 25 bp, Canis familiaris
gcagattcggtatctgaatccaaga

SEQ ID NO: 102600 - DNA, 25 bp, Canis familiaris
gcagagctcgtttagtgaaccgtca

SEQ ID NO: 102601 - DNA, 25 bp, Canis familiaris
gcagagctcgtttagtgaaccgtca

SEQ ID NO: 102602 - DNA, 25 bp, Canis familiaris
gcagagctcgtttagtgaaccgtca

SEQ ID NO: 102603 - DNA, 25 bp, Canis familiaris
gcagagctcgtttagtgaaccgtca

SEQ ID NO: 102604 - DNA, 25 bp, Canis familiaris
gcagagctcgtttagtgaaccgtca

SEQ ID NO: 102605 - DNA, 25 bp, Canis familiaris
gcagagctcgtttagtgaaccgtca

SEQ ID NO: 102606 - DNA, 25 bp, Canis familiaris
gcagagctcgtttagtgaaccgtca

SEQ ID NO: 102607 - DNA, 25 bp, Canis familiaris
gcagagctcgtttagtgaaccgtca

SEQ ID NO: 102608 - DNA, 25 bp, Canis familiaris
gcagagctcgtttagtgaaccgtca

SEQ ID NO: 102609 - DNA, 25 bp, Canis familiaris
gcagagctcgtttagtgaaccgtca

SEQ ID NO: 102610 - DNA, 25 bp, Canis familiaris
gcagagctcgtttagtgaaccgtca

SEQ ID NO: 102611 - DNA, 25 bp, Canis familiaris
gcagagctcgtttagtgaaccgtca

SEQ ID NO: 102612 - DNA, 25 bp, Canis familiaris
gcagagctcgtttagtgaaccgtca

SEQ ID NO: 102613 - DNA, 25 bp, Canis familiaris
gcagatctccataatacggtgccgg

SEQ ID NO: 102614 - DNA, 25 bp, Canis familiaris
gcagacagccaagaaggcccgtgtg

SEQ ID NO: 102615 - DNA, 25 bp, Canis familiaris
gcagtgccgaaggacaggcaccttg

SEQ ID NO: 102616 - DNA, 25 bp, Canis familiaris
gcagagcacgataggaactacctgg

SEQ ID NO: 102617 - DNA, 25 bp, Canis familiaris
gcagagcctttatagctgaacaggg

SEQ ID NO: 102618 - DNA, 25 bp, Canis familiaris
gcagatcctgtgagaatgtgaagct

SEQ ID NO: 102619 - DNA, 25 bp, Canis familiaris
gcagaccgttgctactcagaagtat

SEQ ID NO: 102620 - DNA, 25 bp, Canis familiaris
gcagtctttgatgaacagaactaaa

SEQ ID NO: 102621 - DNA, 25 bp, Canis familiaris
gcagatcttcgtgaaaaccctaacc

SEQ ID NO: 102622 - DNA, 25 bp, Canis familiaris
gcagtttcagacgagtaatccctta

SEQ ID NO: 102623 - DNA, 25 bp, Canis familiaris
gcagttccaacagggcaagcttctt

SEQ ID NO: 102624 - DNA, 25 bp, Canis familiaris
gcagttccaacagggcaagcttctt

SEQ ID NO: 102625 - DNA, 25 bp, Canis familiaris
gcagtgtctcaatgaggtctgcttc

SEQ ID NO: 102626 - DNA, 25 bp, Canis familiaris
gcaggtgcatctttggagacttatc

SEQ ID NO: 102627 - DNA, 25 bp, Canis familiaris
gcaggtgtcctcatacaatgaatca

SEQ ID NO: 102628 - DNA, 25 bp, Canis familiaris
gcaggattttcccctagaataccac

SEQ ID NO: 102629 - DNA, 25 bp, Canis familiaris
gactttaacccctggtgaccagact

SEQ ID NO: 102630 - DNA, 25 bp, Canis familiaris
gactttgaccctgcacggtattaat

SEQ ID NO: 102631 - DNA, 25 bp, Canis familiaris
gcacttttactgtccactagtttaa

SEQ ID NO: 102632 - DNA, 25 bp, Canis familiaris
gcacgtttagagttttgcgtattaa

SEQ ID NO: 102633 - DNA, 25 bp, Canis familiaris
gcacgtaataggtattcaggatttg

SEQ ID NO: 102634 - DNA, 25 bp, Canis familiaris
gcaggttaatgaatatctcagggct

SEQ ID NO: 102635 - DNA, 25 bp, Canis familiaris
gcagcattatacaataaccggactt

SEQ ID NO: 102636 - DNA, 25 bp, Canis familiaris
gcagaccatggtgaatccgggcagc

SEQ ID NO: 102637 - DNA, 25 bp, Canis familiaris
gcagacctgggtgaacgaaggctac

SEQ ID NO: 102638 - DNA, 25 bp, Canis familiaris
gcacctctgggagaaaacagggact

SEQ ID NO: 102639 - DNA, 25 bp, Canis familiaris
gcacctctccaggttcttaagggat

SEQ ID NO: 102640 - DNA, 25 bp, Canis familiaris
gcacgtcccggcagttactgggagg

SEQ ID NO: 102641 - DNA, 25 bp, Canis familiaris
gcacgtaggcggggttgtgttggtc

SEQ ID NO: 102642 - DNA, 25 bp, Canis familiaris
gcagatgtgaggtgctggtcttttg

SEQ ID NO: 102643 - DNA, 25 bp, Canis familiaris
gcagatggaggtaggcggcgggagc

SEQ ID NO: 102644 - DNA, 25 bp, Canis familiaris
gcagggggaggggtgagggcacagg

SEQ ID NO: 102645 - DNA, 25 bp, Canis familiaris
gcagggaggggggagggcctgctgg

SEQ ID NO: 102646 - DNA, 25 bp, Canis familiaris
gcagggaggggaagagctggccggg

SEQ ID NO: 102647 - DNA, 25 bp, Canis familiaris
gcagtgggcaggcaggacatggggc

SEQ ID NO: 102648 - DNA, 25 bp, Canis familiaris
gcagtcagtaggctgggcggggagc

SEQ ID NO: 102649 - DNA, 25 bp, Canis familiaris
gcagtacttggtgctgggtagagag

SEQ ID NO: 102650 - DNA, 25 bp, Canis familiaris
gcagtccttggtgctgtaggtatgt

SEQ ID NO: 102651 - DNA, 25 bp, Canis familiaris
gcagatggcttggttctggggcttt

SEQ ID NO: 102652 - DNA, 25 bp, Canis familiaris
gcagaggtttttgctgtgctgcttc

SEQ ID NO: 102653 - DNA, 25 bp, Canis familiaris
gcagagatttttagccttgtgtcca

SEQ ID NO: 102654 - DNA, 25 bp, Canis familiaris
gcagtattttttcctgttgcctttt

SEQ ID NO: 102655 - DNA, 25 bp, Canis familiaris
gcagttatttccccagtttattatt

SEQ ID NO: 102656 - DNA, 25 bp, Canis familiaris
gcagttatgtttcctctgtttaatc

SEQ ID NO: 102657 - DNA, 25 bp, Canis familiaris
gcagtttgtgtaagattccttcaac

SEQ ID NO: 102658 - DNA, 25 bp, Canis familiaris
gcagtctgtttagcatccctgatac

SEQ ID NO: 102659 - DNA, 25 bp, Canis familiaris
gcagatcgatgtcacctaccatgtg

SEQ ID NO: 102660 - DNA, 25 bp, Canis familiaris
gcaggtgttcagcctgctgagcctg

SEQ ID NO: 102661 - DNA, 25 bp, Canis familiaris
gcagggcttcagcctggaggagctc

SEQ ID NO: 102662 - DNA, 25 bp, Canis familiaris
gcagggttgggcagtggagtggaag

SEQ ID NO: 102663 - DNA, 25 bp, Canis familiaris
gcaggtgtgatgggcagtgtaaggg

SEQ ID NO: 102664 - DNA, 25 bp, Canis familiaris
gcagcaggtggtgactgtcggggtg

SEQ ID NO: 102665 - DNA, 25 bp, Canis familiaris
gcagaggctgtagacattgtggggt

SEQ ID NO: 102666 - DNA, 25 bp, Canis familiaris
gcaggtgctaagggttgtgggcgcc

SEQ ID NO: 102667 - DNA, 25 bp, Canis familiaris
gcagggactgtgggttggtgtgcgc

SEQ ID NO: 102668 - DNA, 25 bp, Canis familiaris
gcaggtgcgcggtgtgtgaggcgcc

SEQ ID NO: 102669 - DNA, 25 bp, Canis familiaris
gcactgccagggtagttactgccta

SEQ ID NO: 102670 - DNA, 25 bp, Canis familiaris
gcaccagtgggctaaggcctgttcg

SEQ ID NO: 102671 - DNA, 25 bp, Canis familiaris
gcactgggggcatgtggcgattcta

SEQ ID NO: 102672 - DNA, 25 bp, Canis familiaris
gcagtccaaggttgtggctgtttgg

SEQ ID NO: 102673 - DNA, 25 bp, Canis familiaris
gcagaaaaggtttgcttctcttggg

SEQ ID NO: 102674 - DNA, 25 bp, Canis familiaris
gcagaaaaattcaagcgctctcccg

SEQ ID NO: 102675 - DNA, 25 bp, Canis familiaris
gcagaaactaatcggagcccctgtc

SEQ ID NO: 102676 - DNA, 25 bp, Canis familiaris
gcagaagcactgtgctttccacctt

SEQ ID NO: 102677 - DNA, 25 bp, Canis familiaris
gcagagacatttacagttcacaacc

SEQ ID NO: 102678 - DNA, 25 bp, Canis familiaris
gcagatactgtatcgtgctcactag

SEQ ID NO: 102679 - DNA, 25 bp, Canis familiaris
gcagaatatatatcatcttctctga

SEQ ID NO: 102680 - DNA, 25 bp, Canis familiaris
gcagaatatgctaaacttttggcca

SEQ ID NO: 102681 - DNA, 25 bp, Canis familiaris
gcagattcatgtcattgtttggagg

SEQ ID NO: 102682 - DNA, 25 bp, Canis familiaris
gcagttctgtgtacgtttagggctc

SEQ ID NO: 102683 - DNA, 25 bp, Canis familiaris
gcagttctgtgtacgtttagggctc

SEQ ID NO: 102684 - DNA, 25 bp, Canis familiaris
gcagatttggtcagggtgggagtca

SEQ ID NO: 102685 - DNA, 25 bp, Canis familiaris
gcagtttgccactgtggtggaggcc

SEQ ID NO: 102686 - DNA, 25 bp, Canis familiaris
gcagttctccagctatgagggcaac

SEQ ID NO: 102687 - DNA, 25 bp, Canis familiaris
gcagtattccacttacatgttcacc

SEQ ID NO: 102688 - DNA, 25 bp, Canis familiaris
gcagaatcccattcccatgatggac

SEQ ID NO: 102689 - DNA, 25 bp, Canis familiaris
gcagaatcccagcgccatgtaatgc

SEQ ID NO: 102690 - DNA, 25 bp, Canis familiaris
gcagttccacagtagcatcttaatt

SEQ ID NO: 102691 - DNA, 25 bp, Canis familiaris
gcagtcgccaggtcacattttattg

SEQ ID NO: 102692 - DNA, 25 bp, Canis familiaris
gcagtcagcctgcgagttgattttt

SEQ ID NO: 102693 - DNA, 25 bp, Canis familiaris
gcagtcgactctagaggtgatgata

SEQ ID NO: 102694 - DNA, 25 bp, Canis familiaris
gcagtgactctctgggtagttggaa

SEQ ID NO: 102695 - DNA, 25 bp, Canis familiaris
gcagaggccactgggggagctgtgg

SEQ ID NO: 102696 - DNA, 25 bp, Canis familiaris
gcagtggcccggaggaggtgctgca

SEQ ID NO: 102697 - DNA, 25 bp, Canis familiaris
gcagattccatgggtagctggggcc

SEQ ID NO: 102698 - DNA, 25 bp, Canis familiaris
gcagattccacgaatcctgggtcca

SEQ ID NO: 102699 - DNA, 25 bp, Canis familiaris
gcagttgctacaattcacggctttc

SEQ ID NO: 102700 - DNA, 25 bp, Canis familiaris
gcagtgttagctctagaatcttgtc

SEQ ID NO: 102701 - DNA, 25 bp, Canis familiaris
gcagtttactgctctgtactttcta

SEQ ID NO: 102702 - DNA, 25 bp, Canis familiaris
gcagtcttacttttgtagttttata

SEQ ID NO: 102703 - DNA, 25 bp, Canis familiaris
gcagttcattattttgtggttttat

SEQ ID NO: 102704 - DNA, 25 bp, Canis familiaris
gcagttgttgcatacggagtatttt

SEQ ID NO: 102705 - DNA, 25 bp, Canis familiaris
gcagtatgttcacatctgtggtatg

SEQ ID NO: 102706 - DNA, 25 bp, Canis familiaris
gcagtttctagttcaaggcagatgc

SEQ ID NO: 102707 - DNA, 25 bp, Canis familiaris
gcagaatattatcatcaacaggctc

SEQ ID NO: 102708 - DNA, 25 bp, Canis familiaris
gcagactttatctcacaagttctca

SEQ ID NO: 102709 - DNA, 25 bp, Canis familiaris
gcagacttttccaacaattgcactg

SEQ ID NO: 102710 - DNA, 25 bp, Canis familiaris
gcagtgttttctgctgcaaagtctg

SEQ ID NO: 102711 - DNA, 25 bp, Canis familiaris
gcagtttttcaggagcgcaagatag

SEQ ID NO: 102712 - DNA, 25 bp, Canis familiaris
gcagattctagccagtaccaagtca

SEQ ID NO: 102713 - DNA, 25 bp, Canis familiaris
gcagtctgtgagaaggctcctggac

SEQ ID NO: 102714 - DNA, 25 bp, Canis familiaris
gcagtgctggtggaggtcaagtaca

SEQ ID NO: 102715 - DNA, 25 bp, Canis familiaris
gcagtggtgctggtggttgcagtga

SEQ ID NO: 102716 - DNA, 25 bp, Canis familiaris
gcagtgtgctgttggtttcagtgac

SEQ ID NO: 102717 - DNA, 25 bp, Canis familiaris
gcagtgtgtggggatgaggagtgaa

SEQ ID NO: 102718 - DNA, 25 bp, Canis familiaris
gcaggtggtgcggtactcagcaaaa

SEQ ID NO: 102719 - DNA, 25 bp, Canis familiaris
gcagagtcttgggtacaggaaatgt

SEQ ID NO: 102720 - DNA, 25 bp, Canis familiaris
gcagagtcattgctacaggtatact

SEQ ID NO: 102721 - DNA, 25 bp, Canis familiaris
gcagaggcatgtttacggacacaag

SEQ ID NO: 102722 - DNA, 25 bp, Canis familiaris
gcagtggcatgtttgaagagctatc

SEQ ID NO: 102723 - DNA, 25 bp, Canis familiaris
gcagtggcatctatgagcatcagca

SEQ ID NO: 102724 - DNA, 25 bp, Canis familiaris
gcagtgtctatgactccatcagcat

SEQ ID NO: 102725 - DNA, 25 bp, Canis familiaris
gcagtgctcaggactctcagatgtc

SEQ ID NO: 102726 - DNA, 25 bp, Canis familiaris
gcagtgcacatgctattgagctgtc

SEQ ID NO: 102727 - DNA, 25 bp, Canis familiaris
gcagtacatctaatctggcttcatg

SEQ ID NO: 102728 - DNA, 25 bp, Canis familiaris
gcactatccgaaaggttcatgttac

SEQ ID NO: 102729 - DNA, 25 bp, Canis familiaris
gcagattccgagttcctgttttacc

SEQ ID NO: 102730 - DNA, 25 bp, Canis familiaris
gcagatccctcgtttgtaatgtata

SEQ ID NO: 102731 - DNA, 25 bp, Canis familiaris
gcagtcctggtgattgatatttaca

SEQ ID NO: 102732 - DNA, 25 bp, Canis familiaris
gcagtactagatcttgatttacatt

SEQ ID NO: 102733 - DNA, 25 bp, Canis familiaris
gcagtgttagctctgtttaaacttt

SEQ ID NO: 102734 - DNA, 25 bp, Canis familiaris
gcagtccttcatcgtgtttcaaatc

SEQ ID NO: 102735 - DNA, 25 bp, Canis familiaris
gcagaccttcaccttttatgcaagt

SEQ ID NO: 102736 - DNA, 25 bp, Canis familiaris
gcagagagttaggcttctccagcaa

SEQ ID NO: 102737 - DNA, 25 bp, Canis familiaris
gcagggtcctggttacctgagttct

SEQ ID NO: 102738 - DNA, 25 bp, Canis familiaris
gcagggtgtgatcgtctacctggct

SEQ ID NO: 102739 - DNA, 25 bp, Canis familiaris
gcagggtgatgaggtctggcttcag

SEQ ID NO: 102740 - DNA, 25 bp, Canis familiaris
gcagtaatggggccaggcttccact

SEQ ID NO: 102741 - DNA, 25 bp, Canis familiaris
gcagtacagggcgacgaggatcccc

SEQ ID NO: 102742 - DNA, 25 bp, Canis familiaris
gcagtcggttggagcgagcatcccc

SEQ ID NO: 102743 - DNA, 25 bp, Canis familiaris
gcagtgggttggagcgagcatcccc

SEQ ID NO: 102744 - DNA, 25 bp, Canis familiaris
gcagtggttttggcaggaagacacc

SEQ ID NO: 102745 - DNA, 25 bp, Canis familiaris
gaggggttgtccagggaacattcag

SEQ ID NO: 102746 - DNA, 25 bp, Canis familiaris
gaccggttatccacgagaacttctc

SEQ ID NO: 102747 - DNA, 25 bp, Canis familiaris
gtccgatttgatctccgtaggattt

SEQ ID NO: 102748 - DNA, 25 bp, Canis familiaris
gcacgtggttatctccctagagaat

SEQ ID NO: 102749 - DNA, 25 bp, Canis familiaris
gcagcgcggttatttctttctggat

SEQ ID NO: 102750 - DNA, 25 bp, Canis familiaris
gcagacggtatatctcctgtcaggt

SEQ ID NO: 102751 - DNA, 25 bp, Canis familiaris
gcagtcagactatatcctggcacag

SEQ ID NO: 102752 - DNA, 25 bp, Canis familiaris
gcagtgcagaagtcaccctggaggt

SEQ ID NO: 102753 - DNA, 25 bp, Canis familiaris
gcagtggctcagtcacggtgaacgc

SEQ ID NO: 102754 - DNA, 25 bp, Canis familiaris
gcagatggctgcgcacgattgagct

SEQ ID NO: 102755 - DNA, 25 bp, Canis familiaris
gcagtggtctgtgctgcattcactg

SEQ ID NO: 102756 - DNA, 25 bp, Canis familiaris
gcagggcctgataagcattcagttc

SEQ ID NO: 102757 - DNA, 25 bp, Canis familiaris
gcagggccgctgtacagtgagaaca

SEQ ID NO: 102758 - DNA, 25 bp, Canis familiaris
gcacgtggttggtcagtaaatagtt

SEQ ID NO: 102759 - DNA, 25 bp, Canis familiaris
gcacgttcggaatctaattgacatt

SEQ ID NO: 102760 - DNA, 25 bp, Canis familiaris
gcaccctaggactctacatggaagc

SEQ ID NO: 102761 - DNA, 25 bp, Canis familiaris
gcacggcatcgtcaccaactgggac

SEQ ID NO: 102762 - DNA, 25 bp, Canis familiaris
gcacgagctcgtgttaaccaaaccc

SEQ ID NO: 102763 - DNA, 25 bp, Canis familiaris
gcacgactagatattgacacagaaa

SEQ ID NO: 102764 - DNA, 25 bp, Canis familiaris
gcaccttagtaaccagccagaaatc

SEQ ID NO: 102765 - DNA, 25 bp, Canis familiaris
gcagtttattaacatgtatacctca

SEQ ID NO: 102766 - DNA, 25 bp, Canis familiaris
gcagctttttaatgcgctgaccctg

SEQ ID NO: 102767 - DNA, 25 bp, Canis familiaris
gcagtggtattacccactgcctcct

SEQ ID NO: 102768 - DNA, 25 bp, Canis familiaris
gcagtaccttatctgcattctctcc

SEQ ID NO: 102769 - DNA, 25 bp, Canis familiaris
gcagtaccttatctgcattctctcc

SEQ ID NO: 102770 - DNA, 25 bp, Canis familiaris
gcagtaccttatctgcattctctcc

SEQ ID NO: 102771 - DNA, 25 bp, Canis familiaris
gcagataccaataactgttcttcta

SEQ ID NO: 102772 - DNA, 25 bp, Canis familiaris
gcagctacacaagatatgcctttta

SEQ ID NO: 102773 - DNA, 25 bp, Canis familiaris
gcagaatcgtcagcatagccactta

SEQ ID NO: 102774 - DNA, 25 bp, Canis familiaris
gcagtatctccagaaccatcttgct

SEQ ID NO: 102775 - DNA, 25 bp, Canis familiaris
gcagttgccacatgcagaccagtag

SEQ ID NO: 102776 - DNA, 25 bp, Canis familiaris
gcagtgcttcacagacaacagattg

SEQ ID NO: 102777 - DNA, 25 bp, Canis familiaris
gcagctttgcacagaagacgttggg

SEQ ID NO: 102778 - DNA, 25 bp, Canis familiaris
gcagtcttgctcagcgatggcagtt

SEQ ID NO: 102779 - DNA, 25 bp, Canis familiaris
gcagtctgtttccgagggtacagtg

SEQ ID NO: 102780 - DNA, 25 bp, Canis familiaris
gcagtgctatttcttgtgcctaagg

SEQ ID NO: 102781 - DNA, 25 bp, Canis familiaris
gcagactcatttctgagacctaaaa

SEQ ID NO: 102782 - DNA, 25 bp, Canis familiaris
gcagtgctctccaagatggacctca

SEQ ID NO: 102783 - DNA, 25 bp, Canis familiaris
gcagcgtgcgacagggacctagtaa

SEQ ID NO: 102784 - DNA, 25 bp, Canis familiaris
gcagcccgttagggagacaagtaga

SEQ ID NO: 102785 - DNA, 25 bp, Canis familiaris
gagctaggttagggaggaaggtggt

SEQ ID NO: 102786 - DNA, 25 bp, Canis familiaris
gcacttgggtcggtaggtatgtggg

SEQ ID NO: 102787 - DNA, 25 bp, Canis familiaris
gcagcttgggttctttgcgatcagt

SEQ ID NO: 102788 - DNA, 25 bp, Canis familiaris
gcagtataactacacagatcgtcag

SEQ ID NO: 102789 - DNA, 25 bp, Canis familiaris
gcagtcaacaatgaacaccagtgag

SEQ ID NO: 102790 - DNA, 25 bp, Canis familiaris
gcagtgagaagtgaagcaccgactc

SEQ ID NO: 102791 - DNA, 25 bp, Canis familiaris
gcagatggaactgtagtgcttacac

SEQ ID NO: 102792 - DNA, 25 bp, Canis familiaris
gcagagaacaacatagggtcaagca

SEQ ID NO: 102793 - DNA, 25 bp, Canis familiaris
gcagagatccaatggtggggccaca

SEQ ID NO: 102794 - DNA, 25 bp, Canis familiaris
gcagagcagacgtgggaggcctgac

SEQ ID NO: 102795 - DNA, 25 bp, Canis familiaris
gcagaaacagcaagtggcacacccc

SEQ ID NO: 102796 - DNA, 25 bp, Canis familiaris
gcagacatctcagatgggacaccgg

SEQ ID NO: 102797 - DNA, 25 bp, Canis familiaris
gcagattcaatggtggggcccacag

SEQ ID NO: 102798 - DNA, 25 bp, Canis familiaris
gcagggccatgcgtagggccagaca

SEQ ID NO: 102799 - DNA, 25 bp, Canis familiaris
gcagggcatctccaaggaacaggaa

SEQ ID NO: 102800 - DNA, 25 bp, Canis familiaris
gcagggcatctgcaagaggtcaggg

SEQ ID NO: 102801 - DNA, 25 bp, Canis familiaris
gcagggcctggagacaacatggtgt

SEQ ID NO: 102802 - DNA, 25 bp, Canis familiaris
gcagggcctttcaacaatgggagtt

SEQ ID NO: 102803 - DNA, 25 bp, Canis familiaris
gcagggccctgtggaaaggagcagc

SEQ ID NO: 102804 - DNA, 25 bp, Canis familiaris
gcagggcccacttagtcagagagtg

SEQ ID NO: 102805 - DNA, 25 bp, Canis familiaris
gcagtgggccagtatctgtcgatgg

SEQ ID NO: 102806 - DNA, 25 bp, Canis familiaris
gcagtggagcttgatgtgtcagatg

SEQ ID NO: 102807 - DNA, 25 bp, Canis familiaris
gcagggcagcagggatgatgtgagt

SEQ ID NO: 102808 - DNA, 25 bp, Canis familiaris
gcagggcgagcagagctgctggagc

SEQ ID NO: 102809 - DNA, 25 bp, Canis familiaris
gcagagacgatagtacgcggcgcgc

SEQ ID NO: 102810 - DNA, 25 bp, Canis familiaris
gcagacatcgatcatgaccaggcgc

SEQ ID NO: 102811 - DNA, 25 bp, Canis familiaris
gcagaactgcatggagagctcgatg

SEQ ID NO: 102812 - DNA, 25 bp, Canis familiaris
gcagagctccaggacatgatcaatg

SEQ ID NO: 102813 - DNA, 25 bp, Canis familiaris
gcagagctaccggcagcagattggg

SEQ ID NO: 102814 - DNA, 25 bp, Canis familiaris
gcagatgctcagagcccagtggggg

SEQ ID NO: 102815 - DNA, 25 bp, Canis familiaris
gcagatgcggatcatccatggcgcg

SEQ ID NO: 102816 - DNA, 25 bp, Canis familiaris
gcagtctgagctactatctagctgg

SEQ ID NO: 102817 - DNA, 25 bp, Canis familiaris
gcagctttgctaatttgcagccgct

SEQ ID NO: 102818 - DNA, 25 bp, Canis familiaris
tgccaagtgctttttaccgaattaa

SEQ ID NO: 102819 - DNA, 25 bp, Canis familiaris
tccaagcgcttatttaccaccttaa

SEQ ID NO: 102820 - DNA, 25 bp, Canis familiaris
gcacagggcgttataccacagggaa

SEQ ID NO: 102821 - DNA, 25 bp, Canis familiaris
gcaaggtagtttatctcctaggagc

SEQ ID NO: 102822 - DNA, 25 bp, Canis familiaris
gcagtttagcttaatttgcctaagt

SEQ ID NO: 102823 - DNA, 25 bp, Canis familiaris
gcagttgctcagctacttttctaca

SEQ ID NO: 102824 - DNA, 25 bp, Canis familiaris
gcagttgctaagattattgatcaaa

SEQ ID NO: 102825 - DNA, 25 bp, Canis familiaris
gcagttccagaagttttgaggcaag

SEQ ID NO: 102826 - DNA, 25 bp, Canis familiaris
gcagttccagaagttttgaggcaag

SEQ ID NO: 102827 - DNA, 25 bp, Canis familiaris
gcagttacagaatgtgttacacaca

SEQ ID NO: 102828 - DNA, 25 bp, Canis familiaris
gcagtggaaaagctcttatctctca

SEQ ID NO: 102829 - DNA, 25 bp, Canis familiaris
gcagtgggggagtcagcttagccta

SEQ ID NO: 102830 - DNA, 25 bp, Canis familiaris
gcacgaggggaatggtgaaaattta

SEQ ID NO: 102831 - DNA, 25 bp, Canis familiaris
gcacgaggggaagggtccatacggc

SEQ ID NO: 102832 - DNA, 25 bp, Canis familiaris
gcacagagtgggtgggccttgggga

SEQ ID NO: 102833 - DNA, 25 bp, Canis familiaris
gcagaaggggaagggcactcttagg

SEQ ID NO: 102834 - DNA, 25 bp, Canis familiaris
gcagttgagagaacctggcacctcc

SEQ ID NO: 102835 - DNA, 25 bp, Canis familiaris
gcagttgaggatctgctgttggctc

SEQ ID NO: 102836 - DNA, 25 bp, Canis familiaris
gcagatcgaagccctgctggagtcc

SEQ ID NO: 102837 - DNA, 25 bp, Canis familiaris
gcagtcagcaaccacctgatggtgc

SEQ ID NO: 102838 - DNA, 25 bp, Canis familiaris
gcagacacaactaccgggtgggcga

SEQ ID NO: 102839 - DNA, 25 bp, Canis familiaris
gcagacacaactaccgggtgggcga

SEQ ID NO: 102840 - DNA, 25 bp, Canis familiaris
gcagacacaactacggggtgggcga

SEQ ID NO: 102841 - DNA, 25 bp, Canis familiaris
gcagacacaactacgggagggaaga

SEQ ID NO: 102842 - DNA, 25 bp, Canis familiaris
gcaccgaagtcctggaggaccaggg

SEQ ID NO: 102843 - DNA, 25 bp, Canis familiaris
gcacggactttccgagtggacctgg

SEQ ID NO: 102844 - DNA, 25 bp, Canis familiaris
gcacggccggtacagtgaaactgcg

SEQ ID NO: 102845 - DNA, 25 bp, Canis familiaris
gcacggccggtacagtgaaactgcg

SEQ ID NO: 102846 - DNA, 25 bp, Canis familiaris
gcaaggggggagagatagccggggg

SEQ ID NO: 102847 - DNA, 25 bp, Canis familiaris
gaagggattgggagttggccagggg

SEQ ID NO: 102848 - DNA, 25 bp, Canis familiaris
taatagggtcggaggtggtcgggag

SEQ ID NO: 102849 - DNA, 25 bp, Canis familiaris
gaagtgggtaggtgggtgggtggat

SEQ ID NO: 102850 - DNA, 25 bp, Canis familiaris
gcaccatgtttacaggggggaggga

SEQ ID NO: 102851 - DNA, 25 bp, Canis familiaris
gcaccgtcccagggtggttggaggc

SEQ ID NO: 102852 - DNA, 25 bp, Canis familiaris
gcacttgccctgtggttgtggggac

SEQ ID NO: 102853 - DNA, 25 bp, Canis familiaris
gcacgtccgtgtagagtttggggta

SEQ ID NO: 102854 - DNA, 25 bp, Canis familiaris
gcacccgctttatatttggggtata

SEQ ID NO: 102855 - DNA, 25 bp, Canis familiaris
gcaccgtctttaatttcttgggtca

SEQ ID NO: 102856 - DNA, 25 bp, Canis familiaris
gcacctatttatatttttgaaaact

SEQ ID NO: 102857 - DNA, 25 bp, Canis familiaris
gcaccatttcctcattttctgaaag

SEQ ID NO: 102858 - DNA, 25 bp, Canis familiaris
gcagcctttccctatttttcagggt

SEQ ID NO: 102859 - DNA, 25 bp, Canis familiaris
gcagttcttgcagtactttttcggt

SEQ ID NO: 102860 - DNA, 25 bp, Canis familiaris
gcagtatcttcctaatttttggtgt

SEQ ID NO: 102861 - DNA, 25 bp, Canis familiaris
gcagctattacctatttatgttctt

SEQ ID NO: 102862 - DNA, 25 bp, Canis familiaris
gcagtgctaaatctgcttagttctt

SEQ ID NO: 102863 - DNA, 25 bp, Canis familiaris
gcagctgccaagtggaacgttctgt

SEQ ID NO: 102864 - DNA, 25 bp, Canis familiaris
gcagctcagaagtggacgttttgtg

SEQ ID NO: 102865 - DNA, 25 bp, Canis familiaris
gcagtgaggctggaggcacgtgctt

SEQ ID NO: 102866 - DNA, 25 bp, Canis familiaris
gcagtgaggctggagcctggctctg

SEQ ID NO: 102867 - DNA, 25 bp, Canis familiaris
gcagtagactgtgcagggcctggag

SEQ ID NO: 102868 - DNA, 25 bp, Canis familiaris
gcagacaggtgtacaggggcttggc

SEQ ID NO: 102869 - DNA, 25 bp, Canis familiaris
gcagatccgtgttctacatggagtg

SEQ ID NO: 102870 - DNA, 25 bp, Canis familiaris
gcagaggcgttactccaagagctga

SEQ ID NO: 102871 - DNA, 25 bp, Canis familiaris
gcagaggttctatccaagaagactt

SEQ ID NO: 102872 - DNA, 25 bp, Canis familiaris
gcagacctaccatccaaataaatca

SEQ ID NO: 102873 - DNA, 25 bp, Canis familiaris
gcagtcccctgatccaagataaaca

SEQ ID NO: 102874 - DNA, 25 bp, Canis familiaris
gcagttcccacattaaagaagacct

SEQ ID NO: 102875 - DNA, 25 bp, Canis familiaris
gcagttcctaccagggaggaagatg

SEQ ID NO: 102876 - DNA, 25 bp, Canis familiaris
gcagttccaggccccgaaggaaatg

SEQ ID NO: 102877 - DNA, 25 bp, Canis familiaris
gcagtttcatgtgaccaaatggaca

SEQ ID NO: 102878 - DNA, 25 bp, Canis familiaris
gcagtctccttctttgaagggacag

SEQ ID NO: 102879 - DNA, 25 bp, Canis familiaris
gcagactctcttacttgaacacaag

SEQ ID NO: 102880 - DNA, 25 bp, Canis familiaris
gcagagtatctctttgacaagcaca

SEQ ID NO: 102881 - DNA, 25 bp, Canis familiaris
gcagatatcatcattagtagagcac

SEQ ID NO: 102882 - DNA, 25 bp, Canis familiaris
gcagcaacactgtggtagaggccag

SEQ ID NO: 102883 - DNA, 25 bp, Canis familiaris
gcagcagcaatggaagtgaagggca

SEQ ID NO: 102884 - DNA, 25 bp, Canis familiaris
gcagcaggagcgcctggaacgacaa

SEQ ID NO: 102885 - DNA, 25 bp, Canis familiaris
gcagatggacagcctgagatccgag

SEQ ID NO: 102886 - DNA, 25 bp, Canis familiaris
gcagcaggctaccggacggcaggtt

SEQ ID NO: 102887 - DNA, 25 bp, Canis familiaris
gcagcaggctaccggacggcaggtt

SEQ ID NO: 102888 - DNA, 25 bp, Canis familiaris
gcagaacttctgccaactttggtat

SEQ ID NO: 102889 - DNA, 25 bp, Canis familiaris
gcagacctgttaacatcttcggctt

SEQ ID NO: 102890 - DNA, 25 bp, Canis familiaris
gcagcctctgttatacttcacgctg

SEQ ID NO: 102891 - DNA, 25 bp, Canis familiaris
gcagcctttgagattgtgacctctg

SEQ ID NO: 102892 - DNA, 25 bp, Canis familiaris
gcaccttgttgtaatgaacttcgtt

SEQ ID NO: 102893 - DNA, 25 bp, Canis familiaris
gcacccagttggcaaatgcaacagt

SEQ ID NO: 102894 - DNA, 25 bp, Canis familiaris
gcagctctcagtgacacaaaaccag

SEQ ID NO: 102895 - DNA, 25 bp, Canis familiaris
gcagcctcagactcgatgaaacgac

SEQ ID NO: 102896 - DNA, 25 bp, Canis familiaris
gcagaatcgacatgctgtaaacaca

SEQ ID NO: 102897 - DNA, 25 bp, Canis familiaris
gcagtcatccattaagtaatccaca

SEQ ID NO: 102898 - DNA, 25 bp, Canis familiaris
gcagtccacagtcaagatgtctcca

SEQ ID NO: 102899 - DNA, 25 bp, Canis familiaris
gcagattcaagccaacagagcccat

SEQ ID NO: 102900 - DNA, 25 bp, Canis familiaris
gcagatctccagggtatggccagct

SEQ ID NO: 102901 - DNA, 25 bp, Canis familiaris
gcagatcctggatggtgtccactac

SEQ ID NO: 102902 - DNA, 25 bp, Canis familiaris
gcagtctgggaccagttcccaactg

SEQ ID NO: 102903 - DNA, 25 bp, Canis familiaris
gcagtcttgaaaagcttcccagagg

SEQ ID NO: 102904 - DNA, 25 bp, Canis familiaris
gcagaattgaacacattggccaaat

SEQ ID NO: 102905 - DNA, 25 bp, Canis familiaris
gcagattggaaagctcaggcctaca

SEQ ID NO: 102906 - DNA, 25 bp, Canis familiaris
gcagtttgaggagctgctgcgcctc

SEQ ID NO: 102907 - DNA, 25 bp, Canis familiaris
gcagtactgggagatccagccatcc

SEQ ID NO: 102908 - DNA, 25 bp, Canis familiaris
gactacgaggagaacgacgaccccg

SEQ ID NO: 102909 - DNA, 25 bp, Canis familiaris
gacgagtgaggacaaaaagccccca

SEQ ID NO: 102910 - DNA, 25 bp, Canis familiaris
gactggtaggaccaacaaacaacct

SEQ ID NO: 102911 - DNA, 25 bp, Canis familiaris
gcagatgattatgacgaaaagaaac

SEQ ID NO: 102912 - DNA, 25 bp, Canis familiaris
gcagatgattatgaccaagaagaaa

SEQ ID NO: 102913 - DNA, 25 bp, Canis familiaris
gcagtattatttgcatagccaaact

SEQ ID NO: 102914 - DNA, 25 bp, Canis familiaris
gcagttcttaatgaagctgctcaaa

SEQ ID NO: 102915 - DNA, 25 bp, Canis familiaris
gcagtaattcaaagacccagcagat

SEQ ID NO: 102916 - DNA, 25 bp, Canis familiaris
gcagaaactacaagccaccatatat

SEQ ID NO: 102917 - DNA, 25 bp, Canis familiaris
gcagaaaccacaaactagctagcat

SEQ ID NO: 102918 - DNA, 25 bp, Canis familiaris
gcagaaatccaactgacttgtgttt

SEQ ID NO: 102919 - DNA, 25 bp, Canis familiaris
gcagacagaccagtggcatctcggt

SEQ ID NO: 102920 - DNA, 25 bp, Canis familiaris
gcagcagctacaacatggtcattcg

SEQ ID NO: 102921 - DNA, 25 bp, Canis familiaris
gcagcatctcactctgtatatgact

SEQ ID NO: 102922 - DNA, 25 bp, Canis familiaris
gcagagctcagctgctaaaccgctc

SEQ ID NO: 102923 - DNA, 25 bp, Canis familiaris
gcagttcatggagaatcaccagcct

SEQ ID NO: 102924 - DNA, 25 bp, Canis familiaris
gcagttagcgcagcaagctcacagc

SEQ ID NO: 102925 - DNA, 25 bp, Canis familiaris
gcagatcttggcacaggccagctgc

SEQ ID NO: 102926 - DNA, 25 bp, Canis familiaris
gcagcattgggagcggcggctgctc

SEQ ID NO: 102927 - DNA, 25 bp, Canis familiaris
gcagatggacgacagcagctggcct

SEQ ID NO: 102928 - DNA, 25 bp, Canis familiaris
gcagagcaactgtcaaggctggccc

SEQ ID NO: 102929 - DNA, 25 bp, Canis familiaris
gcagagaaggaggttgctggccccg

SEQ ID NO: 102930 - DNA, 25 bp, Canis familiaris
gcagagacaggggtgatgccccccc

SEQ ID NO: 102931 - DNA, 25 bp, Canis familiaris
gcagcagtgaaggatttgacccccc

SEQ ID NO: 102932 - DNA, 25 bp, Canis familiaris
gcagcaagaaggatcagacccccgg

SEQ ID NO: 102933 - DNA, 25 bp, Canis familiaris
gaaggcagagaagagcccccagggt

SEQ ID NO: 102934 - DNA, 25 bp, Canis familiaris
gcagagggagaagcatgctccccgc

SEQ ID NO: 102935 - DNA, 25 bp, Canis familiaris
gcagaggcagatgcagggctccaat

SEQ ID NO: 102936 - DNA, 25 bp, Canis familiaris
gcagatgtcattaaggcagctcacc

SEQ ID NO: 102937 - DNA, 25 bp, Canis familiaris
gcagaggctgctcagatgcctcctc

SEQ ID NO: 102938 - DNA, 25 bp, Canis familiaris
gcagaggattgaagggcccatcccg

SEQ ID NO: 102939 - DNA, 25 bp, Canis familiaris
gcagaggacatgtgagaccgctccc

SEQ ID NO: 102940 - DNA, 25 bp, Canis familiaris
gcagctgagaaggggaccccagccc

SEQ ID NO: 102941 - DNA, 25 bp, Canis familiaris
gcagatgaagaggggcattccagtc

SEQ ID NO: 102942 - DNA, 25 bp, Canis familiaris
gcagatcaagacgggtgcaccatgc

SEQ ID NO: 102943 - DNA, 25 bp, Canis familiaris
gcagcatcatgtgatctgggacctg

SEQ ID NO: 102944 - DNA, 25 bp, Canis familiaris
gcagcagctgcagcttggtacagtg

SEQ ID NO: 102945 - DNA, 25 bp, Canis familiaris
gcagcagagtctggggtactgcccg

SEQ ID NO: 102946 - DNA, 25 bp, Canis familiaris
gacgttcaggcgaaactggccctgc

SEQ ID NO: 102947 - DNA, 25 bp, Canis familiaris
gactttagaggagtgttgggtctgc

SEQ ID NO: 102948 - DNA, 25 bp, Canis familiaris
gcacttatcaaccctgtggggcgtg

SEQ ID NO: 102949 - DNA, 25 bp, Canis familiaris
gcagctttcagcaacgttgggacgg

SEQ ID NO: 102950 - DNA, 25 bp, Canis familiaris
gcagcacgtcgttcgactgggtagg

SEQ ID NO: 102951 - DNA, 25 bp, Canis familiaris
gcaacccgtgtggacggcgtacaac

SEQ ID NO: 102952 - DNA, 25 bp, Canis familiaris
gcaacccgatagcagaagggtcaac

SEQ ID NO: 102953 - DNA, 25 bp, Canis familiaris
gcagacgcttaacagactaggccac

SEQ ID NO: 102954 - DNA, 25 bp, Canis familiaris
gcacatccttaaccgaccggaagac

SEQ ID NO: 102955 - DNA, 25 bp, Canis familiaris
gcagctccggaaccagatccgggat

SEQ ID NO: 102956 - DNA, 25 bp, Canis familiaris
gagccaacacaacaacgggcgtcgg

SEQ ID NO: 102957 - DNA, 25 bp, Canis familiaris
gcaccccaacatctacgagacgggg

SEQ ID NO: 102958 - DNA, 25 bp, Canis familiaris
gcacccgaaattccagacaacgtgg

SEQ ID NO: 102959 - DNA, 25 bp, Canis familiaris
gcacgaggattttgccaactactat

SEQ ID NO: 102960 - DNA, 25 bp, Canis familiaris
gcacgaggattggggcgactttgga

SEQ ID NO: 102961 - DNA, 25 bp, Canis familiaris
gcagagaagcttggaggccagtcgt

SEQ ID NO: 102962 - DNA, 25 bp, Canis familiaris
gcagatggaccaagcagtcagagtc

SEQ ID NO: 102963 - DNA, 25 bp, Canis familiaris
gcagacgcagacacagctataatca

SEQ ID NO: 102964 - DNA, 25 bp, Canis familiaris
gcaccgagcatggctgggtaacagc

SEQ ID NO: 102965 - DNA, 25 bp, Canis familiaris
gcagcaagcactctgggtgaaatga

SEQ ID NO: 102966 - DNA, 25 bp, Canis familiaris
gcagaggaactgttgtggaaaggaa

SEQ ID NO: 102967 - DNA, 25 bp, Canis familiaris
gcagaccacactttgtgaaaactga

SEQ ID NO: 102968 - DNA, 25 bp, Canis familiaris
gcagcatggcacagctatggcaaca

SEQ ID NO: 102969 - DNA, 25 bp, Canis familiaris
gcagaggtgcatcagcaagcaagca

SEQ ID NO: 102970 - DNA, 25 bp, Canis familiaris
gcagagagatcacgtgacagcttca

SEQ ID NO: 102971 - DNA, 25 bp, Canis familiaris
gcagaaacgcagcaagctggaccaa

SEQ ID NO: 102972 - DNA, 25 bp, Canis familiaris
gcagcaaactgtcacactttccaga

SEQ ID NO: 102973 - DNA, 25 bp, Canis familiaris
gcacttgggatgtggctgttggcaa

SEQ ID NO: 102974 - DNA, 25 bp, Canis familiaris
gcagttttctggggatggggctttt

SEQ ID NO: 102975 - DNA, 25 bp, Canis familiaris
gcagagctttgtagtggttggcctt

SEQ ID NO: 102976 - DNA, 25 bp, Canis familiaris
gcagagtctgttgttgtttgcctgt

SEQ ID NO: 102977 - DNA, 25 bp, Canis familiaris
gcagatatgtgcatgttttttctct

SEQ ID NO: 102978 - DNA, 25 bp, Canis familiaris
gcagagatgtcaagtcctactcatt

SEQ ID NO: 102979 - DNA, 25 bp, Canis familiaris
gcagaggactgaatctcttctctta

SEQ ID NO: 102980 - DNA, 25 bp, Canis familiaris
gcagcagggctgtttgcagctactt

SEQ ID NO: 102981 - DNA, 25 bp, Canis familiaris
gcagcaggggctttactagtgtatg

SEQ ID NO: 102982 - DNA, 25 bp, Canis familiaris
gcagcagcgggtttagcagccggtg

SEQ ID NO: 102983 - DNA, 25 bp, Canis familiaris
gcagaggtggcgtgacaggcagatg

SEQ ID NO: 102984 - DNA, 25 bp, Canis familiaris
gcagagactgtgggctacaccatat

SEQ ID NO: 102985 - DNA, 25 bp, Canis familiaris
gcagcaccgtggacaacacatctgt

SEQ ID NO: 102986 - DNA, 25 bp, Canis familiaris
gcagaggctggtgcagctcatctct

SEQ ID NO: 102987 - DNA, 25 bp, Canis familiaris
gcaatgtagaatgcagcctccggca

SEQ ID NO: 102988 - DNA, 25 bp, Canis familiaris
gcagaaggagatcactgccctggca

SEQ ID NO: 102989 - DNA, 25 bp, Canis familiaris
gcagacatggagaggccactgggcc

SEQ ID NO: 102990 - DNA, 25 bp, Canis familiaris
gcagacagcgagaggagccggtgcc

SEQ ID NO: 102991 - DNA, 25 bp, Canis familiaris
gcagttggatgttcgtgccggaact

SEQ ID NO: 102992 - DNA, 25 bp, Canis familiaris
gagtcttggtgtctggggaactccg

SEQ ID NO: 102993 - DNA, 25 bp, Canis familiaris
gcagtagggagtcctggggcaacca

SEQ ID NO: 102994 - DNA, 25 bp, Canis familiaris
gcagctaggggtcctttacgacaga

SEQ ID NO: 102995 - DNA, 25 bp, Canis familiaris
gcagtagggaggatttcacagtgac

SEQ ID NO: 102996 - DNA, 25 bp, Canis familiaris
gcagtaggtgcaaggtcattagggc

SEQ ID NO: 102997 - DNA, 25 bp, Canis familiaris
gcagtagtctgcagtccataaagaa

SEQ ID NO: 102998 - DNA, 25 bp, Canis familiaris
gcagtagtctcaaaagaaatctcat

SEQ ID NO: 102999 - DNA, 25 bp, Canis familiaris
gcagaagttcatcgaaagcacatca

SEQ ID NO: 103000 - DNA, 25 bp, Canis familiaris
gcagaggttaagagagcagcacaca

SEQ ID NO: 103001 - DNA, 25 bp, Canis familiaris
gcagagacctattttggagaaatct

SEQ ID NO: 103002 - DNA, 25 bp, Canis familiaris
gcagtaccagatccatcggatgaaa

SEQ ID NO: 103003 - DNA, 25 bp, Canis familiaris
gcagaactcactactctagagagca

SEQ ID NO: 103004 - DNA, 25 bp, Canis familiaris
gcagatcccactacctgagggtatc

SEQ ID NO: 103005 - DNA, 25 bp, Canis familiaris
gcagatccacccaagggtctttgac

SEQ ID NO: 103006 - DNA, 25 bp, Canis familiaris
gcagtacccgaagggatcctctgac

SEQ ID NO: 103007 - DNA, 25 bp, Canis familiaris
gcactactaccaggggtaccatgac

SEQ ID NO: 103008 - DNA, 25 bp, Canis familiaris
gcagtttatctgggtggtcccaact

SEQ ID NO: 103009 - DNA, 25 bp, Canis familiaris
gcagacatactcagtgtttcccaac

SEQ ID NO: 103010 - DNA, 25 bp, Canis familiaris
gcagactactatgtgtttgagcgcg

SEQ ID NO: 103011 - DNA, 25 bp, Canis familiaris
gcagatccactgttttttaggcagg

SEQ ID NO: 103012 - DNA, 25 bp, Canis familiaris
gcagcccaggaaacctgctaggagg

SEQ ID NO: 103013 - DNA, 25 bp, Canis familiaris
gcagccagggcttacctgtacactg

SEQ ID NO: 103014 - DNA, 25 bp, Canis familiaris
gcagctatagaatacactatgtgca

SEQ ID NO: 103015 - DNA, 25 bp, Canis familiaris
gcagcagctcagaaggagcctttgc

SEQ ID NO: 103016 - DNA, 25 bp, Canis familiaris
gcagagcatcatgtgggagcatttc

SEQ ID NO: 103017 - DNA, 25 bp, Canis familiaris
gcagacttcctgctgagcatggagc

SEQ ID NO: 103018 - DNA, 25 bp, Canis familiaris
gcagacttcaggctcacatgtattt

SEQ ID NO: 103019 - DNA, 25 bp, Canis familiaris
gcagcacatataccagatgcacgat

SEQ ID NO: 103020 - DNA, 25 bp, Canis familiaris
gcagctatgatcaccagctcagctc

SEQ ID NO: 103021 - DNA, 25 bp, Canis familiaris
gcagcgtgacacgctgtcacctagc

SEQ ID NO: 103022 - DNA, 25 bp, Canis familiaris
gcagaggagtctgacacacctagag

SEQ ID NO: 103023 - DNA, 25 bp, Canis familiaris
gcagagccacctgaacagcacaaag

SEQ ID NO: 103024 - DNA, 25 bp, Canis familiaris
gcagagcagagcgtgccaaagcagg

SEQ ID NO: 103025 - DNA, 25 bp, Canis familiaris
gcagagcagacagaggcacaagcag

SEQ ID NO: 103026 - DNA, 25 bp, Canis familiaris
gcagacacacaggagcccaaaatct

SEQ ID NO: 103027 - DNA, 25 bp, Canis familiaris
gcagaccaagagaccagtaacaccc

SEQ ID NO: 103028 - DNA, 25 bp, Canis familiaris
gcagatccgggagatggcttcaccc

SEQ ID NO: 103029 - DNA, 25 bp, Canis familiaris
gcagaccaggagctcatgacttact

SEQ ID NO: 103030 - DNA, 25 bp, Canis familiaris
gcagagctcggacaagtctctatct

SEQ ID NO: 103031 - DNA, 25 bp, Canis familiaris
gcagatggggcacaagacccagccg

SEQ ID NO: 103032 - DNA, 25 bp, Canis familiaris
gcagagggaggaaagcaaaagcaga

SEQ ID NO: 103033 - DNA, 25 bp, Canis familiaris
gcagagggagtaacaaagccatcaa

SEQ ID NO: 103034 - DNA, 25 bp, Canis familiaris
gcagaggggggataacacacacaca

SEQ ID NO: 103035 - DNA, 25 bp, Canis familiaris
gcagccggacagcactaacaaacaa

SEQ ID NO: 103036 - DNA, 25 bp, Canis familiaris
gcagcctgtcaacattcaatatgaa

SEQ ID NO: 103037 - DNA, 25 bp, Canis familiaris
gcagctcttcttgcagaactagaaa

SEQ ID NO: 103038 - DNA, 25 bp, Canis familiaris
gcagttttctgctgctattgaagaa

SEQ ID NO: 103039 - DNA, 25 bp, Canis familiaris
gcagtttgtctgagctgaaggaaag

SEQ ID NO: 103040 - DNA, 25 bp, Canis familiaris
gcagatgttttgaactgaccgtgtg

SEQ ID NO: 103041 - DNA, 25 bp, Canis familiaris
gcagattgctttaaatgaccactta

SEQ ID NO: 103042 - DNA, 25 bp, Canis familiaris
gcagaactttgagaagcgccttgac

SEQ ID NO: 103043 - DNA, 25 bp, Canis familiaris
gcagaattcaaagaagccttttcac

SEQ ID NO: 103044 - DNA, 25 bp, Canis familiaris
gcagtttcaaacaagacacatttat

SEQ ID NO: 103045 - DNA, 25 bp, Canis familiaris
gcagttctcatctcatattctattt

SEQ ID NO: 103046 - DNA, 25 bp, Canis familiaris
gcagttcctccactgatgatctttc

SEQ ID NO: 103047 - DNA, 25 bp, Canis familiaris
gcagatttcacttggattgctcttc

SEQ ID NO: 103048 - DNA, 25 bp, Canis familiaris
gcagcgtctcacgaggagtacgtca

SEQ ID NO: 103049 - DNA, 25 bp, Canis familiaris
gcagcttccacgcagaataatacaa

SEQ ID NO: 103050 - DNA, 25 bp, Canis familiaris
gcagatacaccggggagttaaaggc

SEQ ID NO: 103051 - DNA, 25 bp, Canis familiaris
gcacccaccaggcgggcaaagaggg

SEQ ID NO: 103052 - DNA, 25 bp, Canis familiaris
gcacccttccgggaggcagggggtg

SEQ ID NO: 103053 - DNA, 25 bp, Canis familiaris
gcactcccctcgttgacggggaggg

SEQ ID NO: 103054 - DNA, 25 bp, Canis familiaris
gcagctcctgcctgaggaaggtgaa

SEQ ID NO: 103055 - DNA, 25 bp, Canis familiaris
gcagttgctgctccaaacgatggga

SEQ ID NO: 103056 - DNA, 25 bp, Canis familiaris
gcagttctgtgcggaatcgagtcct

SEQ ID NO: 103057 - DNA, 25 bp, Canis familiaris
gcagctttgtgggaaaggtctcctg

SEQ ID NO: 103058 - DNA, 25 bp, Canis familiaris
gcagcttttggaacaacgccttcaa

SEQ ID NO: 103059 - DNA, 25 bp, Canis familiaris
gcacttagtaagcaaatcctacgat

SEQ ID NO: 103060 - DNA, 25 bp, Canis familiaris
gcactcagagttataaacccacttt

SEQ ID NO: 103061 - DNA, 25 bp, Canis familiaris
gcactcagttttacagaattcccag

SEQ ID NO: 103062 - DNA, 25 bp, Canis familiaris
gcaccagtaaatgctgctttcccaa

SEQ ID NO: 103063 - DNA, 25 bp, Canis familiaris
gcaacagtagactcttttaacacca

SEQ ID NO: 103064 - DNA, 25 bp, Canis familiaris
gcaccaaagactgcttgtagacccc

SEQ ID NO: 103065 - DNA, 25 bp, Canis familiaris
gcacctgaaattgcactggaactgc

SEQ ID NO: 103066 - DNA, 25 bp, Canis familiaris
gcacgcactgtattccagggaatac

SEQ ID NO: 103067 - DNA, 25 bp, Canis familiaris
gcagcacttggcaccagggaaacaa

SEQ ID NO: 103068 - DNA, 25 bp, Canis familiaris
gcagctttgagttccaggtgttgga

SEQ ID NO: 103069 - DNA, 25 bp, Canis familiaris
gcagctgaggaatccagggttctga

SEQ ID NO: 103070 - DNA, 25 bp, Canis familiaris
gcagcatgggaatcagccttattta

SEQ ID NO: 103071 - DNA, 25 bp, Canis familiaris
gcagcacagacatgacgcctggttg

SEQ ID NO: 103072 - DNA, 25 bp, Canis familiaris
gcagcacagtaaacgctctgccact

SEQ ID NO: 103073 - DNA, 25 bp, Canis familiaris
gcagacaggaggtgtgctaactaaa

SEQ ID NO: 103074 - DNA, 25 bp, Canis familiaris
gcagagcagcgacaaggtatgatca

SEQ ID NO: 103075 - DNA, 25 bp, Canis familiaris
gcagcagatggaccaagcagtcaga

SEQ ID NO: 103076 - DNA, 25 bp, Canis familiaris
gcagagatggcattatagcatcata

SEQ ID NO: 103077 - DNA, 25 bp, Canis familiaris
gcagatgtcgcattggcctctgcag

SEQ ID NO: 103078 - DNA, 25 bp, Canis familiaris
gcagttccagcttcatcactgagtg

SEQ ID NO: 103079 - DNA, 25 bp, Canis familiaris
gcagcttccacttcatattacgggc

SEQ ID NO: 103080 - DNA, 25 bp, Canis familiaris
gcagacatcccagaattacagcccc

SEQ ID NO: 103081 - DNA, 25 bp, Canis familiaris
gcagagtccacagaaatatcacctt

SEQ ID NO: 103082 - DNA, 25 bp, Canis familiaris
gcagagctccacatacagaaaccat

SEQ ID NO: 103083 - DNA, 25 bp, Canis familiaris
gcagacacccacaagaagatgactc

SEQ ID NO: 103084 - DNA, 25 bp, Canis familiaris
gcagcaccctctggaggagatccgc

SEQ ID NO: 103085 - DNA, 25 bp, Canis familiaris
gcagcaccatccaagggagatgttg

SEQ ID NO: 103086 - DNA, 25 bp, Canis familiaris
gcagcacctgctgcaggtcacggtg

SEQ ID NO: 103087 - DNA, 25 bp, Canis familiaris
gcagactccatgcaggagccgatgt

SEQ ID NO: 103088 - DNA, 25 bp, Canis familiaris
gcagattccatgcaggaagcctgat

SEQ ID NO: 103089 - DNA, 25 bp, Canis familiaris
gcagcttccagatcaacagccatta

SEQ ID NO: 103090 - DNA, 25 bp, Canis familiaris
gcagcttcgaggtgacgctgctgcg

SEQ ID NO: 103091 - DNA, 25 bp, Canis familiaris
gcagaacaaggctctggctgctgag

SEQ ID NO: 103092 - DNA, 25 bp, Canis familiaris
gcagcgatcaatcggttgactgcaa

SEQ ID NO: 103093 - DNA, 25 bp, Canis familiaris
gcagcgatcttgtgaccacagcaag

SEQ ID NO: 103094 - DNA, 25 bp, Canis familiaris
gcaccactgatgctgaaagacaagt

SEQ ID NO: 103095 - DNA, 25 bp, Canis familiaris
gcacccgaggcaacaagcttagagc

SEQ ID NO: 103096 - DNA, 25 bp, Canis familiaris
gcagcacctgctgcaaaggttccag

SEQ ID NO: 103097 - DNA, 25 bp, Canis familiaris
gcagacctgctgggcagggtttcaa

SEQ ID NO: 103098 - DNA, 25 bp, Canis familiaris
gcagaggtgtgttcagggcatctta

SEQ ID NO: 103099 - DNA, 25 bp, Canis familiaris
gcagaggcagttcgatgtggacatt

SEQ ID NO: 103100 - DNA, 25 bp, Canis familiaris
gcagagcagagctgccgctgagaca

SEQ ID NO: 103101 - DNA, 25 bp, Canis familiaris
gcagcagctggtggccaggaacacg

SEQ ID NO: 103102 - DNA, 25 bp, Canis familiaris
gcagcagcaggagcgcagggagaag

SEQ ID NO: 103103 - DNA, 25 bp, Canis familiaris
gcagcagcccggcagatgctgaaca

SEQ ID NO: 103104 - DNA, 25 bp, Canis familiaris
gcagcagctctctgaaggtcaagcg

SEQ ID NO: 103105 - DNA, 25 bp, Canis familiaris
gcagctactgatggtccgtcaagcg

SEQ ID NO: 103106 - DNA, 25 bp, Canis familiaris
gcagcaactgatggactatgcccgg

SEQ ID NO: 103107 - DNA, 25 bp, Canis familiaris
gcagaagatgatccttacccttgtg

SEQ ID NO: 103108 - DNA, 25 bp, Canis familiaris
gcagattatatgccgagtcccttgt

SEQ ID NO: 103109 - DNA, 25 bp, Canis familiaris
gcagatacatattgctcgtactttg

SEQ ID NO: 103110 - DNA, 25 bp, Canis familiaris
gcagccgatatctttatactttggt

SEQ ID NO: 103111 - DNA, 25 bp, Canis familiaris
gcacctgtcaccgtatcattttgga

SEQ ID NO: 103112 - DNA, 25 bp, Canis familiaris
gcacctagaccagttgttttggccc

SEQ ID NO: 103113 - DNA, 25 bp, Canis familiaris
gcagcacaaaccctactcaaaggcc

SEQ ID NO: 103114 - DNA, 25 bp, Canis familiaris
gcagctgcccccctaatatggggcc

SEQ ID NO: 103115 - DNA, 25 bp, Canis familiaris
gcagcaccgccagcgaaagaggtcc

SEQ ID NO: 103116 - DNA, 25 bp, Canis familiaris
gcagcacccaaaccaaagtggcatg

SEQ ID NO: 103117 - DNA, 25 bp, Canis familiaris
gcagcacctggatcaggaggtcctg

SEQ ID NO: 103118 - DNA, 25 bp, Canis familiaris
gcacctctggcctcaaggtgcgcta

SEQ ID NO: 103119 - DNA, 25 bp, Canis familiaris
gcacatttgtactttgaaacgctaa

SEQ ID NO: 103120 - DNA, 25 bp, Canis familiaris
gcagagtatgcttctttgtaagtgt

SEQ ID NO: 103121 - DNA, 25 bp, Canis familiaris
gcagagaatctgttattgtggttgt

SEQ ID NO: 103122 - DNA, 25 bp, Canis familiaris
gcagcacaacctctgttggttctgt

SEQ ID NO: 103123 - DNA, 25 bp, Canis familiaris
gcagcacacacagcctttggaatca

SEQ ID NO: 103124 - DNA, 25 bp, Canis familiaris
gcagacatcaattccagtcttcctc

SEQ ID NO: 103125 - DNA, 25 bp, Canis familiaris
gcagaatccatcttagcacgtacac

SEQ ID NO: 103126 - DNA, 25 bp, Canis familiaris
gcagacattatcttggcagcgaatc

SEQ ID NO: 103127 - DNA, 25 bp, Canis familiaris
gcagacatatctggccaggcgaatc

SEQ ID NO: 103128 - DNA, 25 bp, Canis familiaris
gcagaatgtctggacttggcaatgc

SEQ ID NO: 103129 - DNA, 25 bp, Canis familiaris
gcagatcgtcattactctgccattc

SEQ ID NO: 103130 - DNA, 25 bp, Canis familiaris
gcagatgaggtaatcactgtgttca

SEQ ID NO: 103131 - DNA, 25 bp, Canis familiaris
gcagaagagtatgccgctctgctct

SEQ ID NO: 103132 - DNA, 25 bp, Canis familiaris
gcagaacggcatgctgcagctgctc

SEQ ID NO: 103133 - DNA, 25 bp, Canis familiaris
gcagcagaccacacagcagctgatc

SEQ ID NO: 103134 - DNA, 25 bp, Canis familiaris
gcagacacacatacatacgcacatc

SEQ ID NO: 103135 - DNA, 25 bp, Canis familiaris
gcagcaacagcatcatgggagctct

SEQ ID NO: 103136 - DNA, 25 bp, Canis familiaris
gcagcaccagaccatgctggagctg

SEQ ID NO: 103137 - DNA, 25 bp, Canis familiaris
gcagcaccagtgggcatggcaggag

SEQ ID NO: 103138 - DNA, 25 bp, Canis familiaris
gcagaccactgattgaagcctcatg

SEQ ID NO: 103139 - DNA, 25 bp, Canis familiaris
gcagacagtctgttaatgcactgtg

SEQ ID NO: 103140 - DNA, 25 bp, Canis familiaris
gcagatgggtgctatcagagcctct

SEQ ID NO: 103141 - DNA, 25 bp, Canis familiaris
gcagcaggaggcttcatgagcggct

SEQ ID NO: 103142 - DNA, 25 bp, Canis familiaris
gcagcagtggctgttggggcaggag

SEQ ID NO: 103143 - DNA, 25 bp, Canis familiaris
gcagctgggcttttgcaggtgggag

SEQ ID NO: 103144 - DNA, 25 bp, Canis familiaris
gcagctcaggcctgtggggtgaggc

SEQ ID NO: 103145 - DNA, 25 bp, Canis familiaris
gcagctatgtcctgatgctggatga

SEQ ID NO: 103146 - DNA, 25 bp, Canis familiaris
gcaaatgtgccgagcttgaagaaga

SEQ ID NO: 103147 - DNA, 25 bp, Canis familiaris
gcagaggtgcacgccgatggagaaa

SEQ ID NO: 103148 - DNA, 25 bp, Canis familiaris
gcagagagtaccgctattgaaggcc

SEQ ID NO: 103149 - DNA, 25 bp, Canis familiaris
gcagagggcacgatcctctgacagg

SEQ ID NO: 103150 - DNA, 25 bp, Canis familiaris
gcagaggccaggagccttacagctc

SEQ ID NO: 103151 - DNA, 25 bp, Canis familiaris
gcagagaaacagcagccctgacttc

SEQ ID NO: 103152 - DNA, 25 bp, Canis familiaris
gcagagggagagcaggcctcctgtg

SEQ ID NO: 103153 - DNA, 25 bp, Canis familiaris
gcaaacagagggtgtcccggaaccg

SEQ ID NO: 103154 - DNA, 25 bp, Canis familiaris
gcacgacggcggagaccaaggaacc

SEQ ID NO: 103155 - DNA, 25 bp, Canis familiaris
gcaagtccccaaggattaacaaatc

SEQ ID NO: 103156 - DNA, 25 bp, Canis familiaris
gcaaatctcccagttcctaaaagca

SEQ ID NO: 103157 - DNA, 25 bp, Canis familiaris
gcaaactctgactttttaacaactt

SEQ ID NO: 103158 - DNA, 25 bp, Canis familiaris
gcaaccctgtctgttttacttatct

SEQ ID NO: 103159 - DNA, 25 bp, Canis familiaris
gcagaatgtctttttttaacctact

SEQ ID NO: 103160 - DNA, 25 bp, Canis familiaris
gcactttctctgtttaaagtcctac

SEQ ID NO: 103161 - DNA, 25 bp, Canis familiaris
gcacgtatccttaaaaagcctctat

SEQ ID NO: 103162 - DNA, 25 bp, Canis familiaris
gcaagtgctggtttaaaaccctatc

SEQ ID NO: 103163 - DNA, 25 bp, Canis familiaris
gcaaagctgtggtcccaaagggttc

SEQ ID NO: 103164 - DNA, 25 bp, Canis familiaris
gcaatacagttggagaaaatgggtt

SEQ ID NO: 103165 - DNA, 25 bp, Canis familiaris
gcagatgccgttcaaaaggtcgatt

SEQ ID NO: 103166 - DNA, 25 bp, Canis familiaris
gcagatgttttttgaagcagcccgt

SEQ ID NO: 103167 - DNA, 25 bp, Canis familiaris
gcagccattttttgaagaccctacg

SEQ ID NO: 103168 - DNA, 25 bp, Canis familiaris
gcacgtctaatgtattaacccccag

SEQ ID NO: 103169 - DNA, 25 bp, Canis familiaris
gcacgattaggttaacccgacctgt

SEQ ID NO: 103170 - DNA, 25 bp, Canis familiaris
gcagcgtgtaaatacccgctggccc

SEQ ID NO: 103171 - DNA, 25 bp, Canis familiaris
gcagctgtataaactacttgggccc

SEQ ID NO: 103172 - DNA, 25 bp, Canis familiaris
gcagctactaatttgcctggggata

SEQ ID NO: 103173 - DNA, 25 bp, Canis familiaris
gcagctaaacttcctctgctgggtc

SEQ ID NO: 103174 - DNA, 25 bp, Canis familiaris
gcactaagtcgtttgcactggtttg

SEQ ID NO: 103175 - DNA, 25 bp, Canis familiaris
gcactccaggttttccagggtttgg

SEQ ID NO: 103176 - DNA, 25 bp, Canis familiaris
gcagccgaatttattaggtgtacgt

SEQ ID NO: 103177 - DNA, 25 bp, Canis familiaris
gcagccgtatctgtttggcgggaca

SEQ ID NO: 103178 - DNA, 25 bp, Canis familiaris
gcagcggtactactttgagggcatc

SEQ ID NO: 103179 - DNA, 25 bp, Canis familiaris
gcagcaatttcatcatttcaagtac

SEQ ID NO: 103180 - DNA, 25 bp, Canis familiaris
gcagagatttcttcaaacacttcgc

SEQ ID NO: 103181 - DNA, 25 bp, Canis familiaris
gcagcagtcttcataaacacattta

SEQ ID NO: 103182 - DNA, 25 bp, Canis familiaris
gcagcagtgttcatagggcaaccca

SEQ ID NO: 103183 - DNA, 25 bp, Canis familiaris
gcagcacgtttaagggcaagttcac

SEQ ID NO: 103184 - DNA, 25 bp, Canis familiaris
gcagcactgtttatgcgatggagtc

SEQ ID NO: 103185 - DNA, 25 bp, Canis familiaris
gcacgatttatgggctttagttaga

SEQ ID NO: 103186 - DNA, 25 bp, Canis familiaris
gcaccagttctgagctttagtttga

SEQ ID NO: 103187 - DNA, 25 bp, Canis familiaris
gcaccagttgcccagtttgaaatgt

SEQ ID NO: 103188 - DNA, 25 bp, Canis familiaris
gcaccgttggcatattagtataata

SEQ ID NO: 103189 - DNA, 25 bp, Canis familiaris
gcaccgacgacagactagcttgagc

SEQ ID NO: 103190 - DNA, 25 bp, Canis familiaris
gcacctcattaaaacttggcaagcc

SEQ ID NO: 103191 - DNA, 25 bp, Canis familiaris
gcaccttccagaaccgtgtgatttc

SEQ ID NO: 103192 - DNA, 25 bp, Canis familiaris
gcactgttccagagggaagagtgtc

SEQ ID NO: 103193 - DNA, 25 bp, Canis familiaris
gcagctgccccagtggggacaaggc

SEQ ID NO: 103194 - DNA, 25 bp, Canis familiaris
gcacctcctacttgggcaaagagca

SEQ ID NO: 103195 - DNA, 25 bp, Canis familiaris
gcagcccatcaagttggccaggggc

SEQ ID NO: 103196 - DNA, 25 bp, Canis familiaris
gcagcagcctggacatatggcctcc

SEQ ID NO: 103197 - DNA, 25 bp, Canis familiaris
gcagacagctgaaagatgggcccac

SEQ ID NO: 103198 - DNA, 25 bp, Canis familiaris
gcagacacttaactgactcagccac

SEQ ID NO: 103199 - DNA, 25 bp, Canis familiaris
gcagctaatcaaactaccatacact

SEQ ID NO: 103200 - DNA, 25 bp, Canis familiaris
gcagcaacagcaaattcaccaatca

SEQ ID NO: 103201 - DNA, 25 bp, Canis familiaris
gcagcaacgcaaatttcaacatcag

SEQ ID NO: 103202 - DNA, 25 bp, Canis familiaris
gcagcaacgcaaatttcaacatcag

SEQ ID NO: 103203 - DNA, 25 bp, Canis familiaris
gcagcagcttgagttattcccactg

SEQ ID NO: 103204 - DNA, 25 bp, Canis familiaris
gcagcaggcagactttctcctgagt

SEQ ID NO: 103205 - DNA, 25 bp, Canis familiaris
gcagagggcatcagtgatcactcgt

SEQ ID NO: 103206 - DNA, 25 bp, Canis familiaris
gcagagttgcacagtatccttttga

SEQ ID NO: 103207 - DNA, 25 bp, Canis familiaris
gcagagtaactggtgaacctttgtt

SEQ ID NO: 103208 - DNA, 25 bp, Canis familiaris
gcagcgtaaagctgtccctttgctg

SEQ ID NO: 103209 - DNA, 25 bp, Canis familiaris
gcagagagccaagtttctccttctc

SEQ ID NO: 103210 - DNA, 25 bp, Canis familiaris
gcagaatccacaattttgataactg

SEQ ID NO: 103211 - DNA, 25 bp, Canis familiaris
gcagaggtctgcattacatgtaact

SEQ ID NO: 103212 - DNA, 25 bp, Canis familiaris
gcagctactctgatcaacattcgca

SEQ ID NO: 103213 - DNA, 25 bp, Canis familiaris
gcagctagcctttgcggcagtgaac

SEQ ID NO: 103214 - DNA, 25 bp, Canis familiaris
gcagctcatctctcggggtagctgt

SEQ ID NO: 103215 - DNA, 25 bp, Canis familiaris
gcagcgattgcaactggcctggccg

SEQ ID NO: 103216 - DNA, 25 bp, Canis familiaris
gcagctgagtgttctgagtcggcct

SEQ ID NO: 103217 - DNA, 25 bp, Canis familiaris
gcagcatggctgaccaactgactga

SEQ ID NO: 103218 - DNA, 25 bp, Canis familiaris
gcagcatggctgaccaactgactga

SEQ ID NO: 103219 - DNA, 25 bp, Canis familiaris
gcagctgctctaagcaacttcgggt

SEQ ID NO: 103220 - DNA, 25 bp, Canis familiaris
gcaccctaggaagatctggggaaac

SEQ ID NO: 103221 - DNA, 25 bp, Canis familiaris
gcacagtcaaggctgagaacgggaa

SEQ ID NO: 103222 - DNA, 25 bp, Canis familiaris
gcacagtcaaggccgagaatgggaa

SEQ ID NO: 103223 - DNA, 25 bp, Canis familiaris
gcacactagtgcccagaaaggagga

SEQ ID NO: 103224 - DNA, 25 bp, Canis familiaris
gcagactactcttctctgaaggagc

SEQ ID NO: 103225 - DNA, 25 bp, Canis familiaris
gcagaccaggtacttggatggcacc

SEQ ID NO: 103226 - DNA, 25 bp, Canis familiaris
gcagacacagagagcctggagtcag

SEQ ID NO: 103227 - DNA, 25 bp, Canis familiaris
gcagaccacacaccgtgggtcagat

SEQ ID NO: 103228 - DNA, 25 bp, Canis familiaris
gcaacccacccacgggtggcaacgt

SEQ ID NO: 103229 - DNA, 25 bp, Canis familiaris
gcaccacccagctgggggtcaataa

SEQ ID NO: 103230 - DNA, 25 bp, Canis familiaris
gcaccaagggggggggagcagaaag

SEQ ID NO: 103231 - DNA, 25 bp, Canis familiaris
gcagcaccaagggggggggagcaga

SEQ ID NO: 103232 - DNA, 25 bp, Canis familiaris
gcagacgaggcaaggaggaggcgga

SEQ ID NO: 103233 - DNA, 25 bp, Canis familiaris
gcagacagtggcaggggaaggtgga

SEQ ID NO: 103234 - DNA, 25 bp, Canis familiaris
gcagcttgttgcaggagagggggga

SEQ ID NO: 103235 - DNA, 25 bp, Canis familiaris
gcagctatgttgctggctggtggtc

SEQ ID NO: 103236 - DNA, 25 bp, Canis familiaris
gcagcaaactgccgtgctggcaggg

SEQ ID NO: 103237 - DNA, 25 bp, Canis familiaris
gcagcacgactgggactactgcgag

SEQ ID NO: 103238 - DNA, 25 bp, Canis familiaris
gcagcagggtgaggccatgcactgc

SEQ ID NO: 103239 - DNA, 25 bp, Canis familiaris
gcagaagcgcttggagcgcctgcag

SEQ ID NO: 103240 - DNA, 25 bp, Canis familiaris
gcagagacacaagcaggctccatgc

SEQ ID NO: 103241 - DNA, 25 bp, Canis familiaris
gcagagagagaagcaggctccatgc

SEQ ID NO: 103242 - DNA, 25 bp, Canis familiaris
gcagctgtgatgtgcagggcctatg

SEQ ID NO: 103243 - DNA, 25 bp, Canis familiaris
gcagctctgatagcagcagtgccaa

SEQ ID NO: 103244 - DNA, 25 bp, Canis familiaris
gcagcttgacaggagcgatggccaa

SEQ ID NO: 103245 - DNA, 25 bp, Canis familiaris
gcagctagtagccaccaggacagac

SEQ ID NO: 103246 - DNA, 25 bp, Canis familiaris
gcaccagctatgaaccaggaagagg

SEQ ID NO: 103247 - DNA, 25 bp, Canis familiaris
gcaccacttgctaccggagaggatg

SEQ ID NO: 103248 - DNA, 25 bp, Canis familiaris
gcacgcccgttagggagaccagtag

SEQ ID NO: 103249 - DNA, 25 bp, Canis familiaris
gcagagctcgtttagggaaccgtca

SEQ ID NO: 103250 - DNA, 25 bp, Canis familiaris
gcagagctcgtttagtgaaaccgtc

SEQ ID NO: 103251 - DNA, 25 bp, Canis familiaris
gcaccggtctcaaggaatcaccgtc

SEQ ID NO: 103252 - DNA, 25 bp, Canis familiaris
gcagccagcgttcaagaaactcctc

SEQ ID NO: 103253 - DNA, 25 bp, Canis familiaris
gcagctgcataactggatcgacaac

SEQ ID NO: 103254 - DNA, 25 bp, Canis familiaris
gcagagatcacactgcctcgttgac

SEQ ID NO: 103255 - DNA, 25 bp, Canis familiaris
gcagcacatgcatttgcccagtata

SEQ ID NO: 103256 - DNA, 25 bp, Canis familiaris
gcagacacatttgacatgtcctttg

SEQ ID NO: 103257 - DNA, 25 bp, Canis familiaris
gcagacaaaatcaacatggtcattt

SEQ ID NO: 103258 - DNA, 25 bp, Canis familiaris
gcagcaaaaatccacacaataacac

SEQ ID NO: 103259 - DNA, 25 bp, Canis familiaris
gcagaagacagaccaaaaaccccaa

SEQ ID NO: 103260 - DNA, 25 bp, Canis familiaris
gcacaaaacagaaaaaccgccctag

SEQ ID NO: 103261 - DNA, 25 bp, Canis familiaris
gcacaacaccaaaacaaacatcctc

SEQ ID NO: 103262 - DNA, 25 bp, Canis familiaris
gaatccaataaaaccagtatccatc

SEQ ID NO: 103263 - DNA, 25 bp, Canis familiaris
gcacccttacagtgccactgtactc

SEQ ID NO: 103264 - DNA, 25 bp, Canis familiaris
gacgtttgacggacaccgatccatc

SEQ ID NO: 103265 - DNA, 25 bp, Canis familiaris
gcacggggtcgtccaacagatcgac

SEQ ID NO: 103266 - DNA, 25 bp, Canis familiaris
gcacggtttcgtcctcagagaaggt

SEQ ID NO: 103267 - DNA, 25 bp, Canis familiaris
gcaccgtttacacccaggtagaggc

SEQ ID NO: 103268 - DNA, 25 bp, Canis familiaris
gcaccagggtcctcacaagtagaag

SEQ ID NO: 103269 - DNA, 25 bp, Canis familiaris
gcacaaaagcccagagcacagtaga

SEQ ID NO: 103270 - DNA, 25 bp, Canis familiaris
gcagcaattagccacaatagccaaa

SEQ ID NO: 103271 - DNA, 25 bp, Canis familiaris
gcagcatttcaacagcattccaata

SEQ ID NO: 103272 - DNA, 25 bp, Canis familiaris
gcagcttatccagtacactgccttt

SEQ ID NO: 103273 - DNA, 25 bp, Canis familiaris
gcagcagtatccatgatcacacgga

SEQ ID NO: 103274 - DNA, 25 bp, Canis familiaris
gcagcagcgaccctgagagcaaaga

SEQ ID NO: 103275 - DNA, 25 bp, Canis familiaris
gcagcagctgaggacggagaacgac

SEQ ID NO: 103276 - DNA, 25 bp, Canis familiaris
gcaccctggaccctgtagagaaagc

SEQ ID NO: 103277 - DNA, 25 bp, Canis familiaris
gcaccagcttgaggcactgtaatta

SEQ ID NO: 103278 - DNA, 25 bp, Canis familiaris
gcagctgttcgagccgttttagctg

SEQ ID NO: 103279 - DNA, 25 bp, Canis familiaris
gcagctgtacgagcacgtttactgt

SEQ ID NO: 103280 - DNA, 25 bp, Canis familiaris
gcagcaggagctgtccttttgttgt

SEQ ID NO: 103281 - DNA, 25 bp, Canis familiaris
gcagcaggactggtacttggctcta

SEQ ID NO: 103282 - DNA, 25 bp, Canis familiaris
gcagcaagcctggcagatttcctta

SEQ ID NO: 103283 - DNA, 25 bp, Canis familiaris
gcagaaggtgccaatgctatcccca

SEQ ID NO: 103284 - DNA, 25 bp, Canis familiaris
gcagacagagggctgtgtcacgcca

SEQ ID NO: 103285 - DNA, 25 bp, Canis familiaris
gcagacagaggaggccgtacagcgc

SEQ ID NO: 103286 - DNA, 25 bp, Canis familiaris
gcagaaggaggagctacagcagcag

SEQ ID NO: 103287 - DNA, 25 bp, Canis familiaris
gcagcaaaggtggccataagaggga

SEQ ID NO: 103288 - DNA, 25 bp, Canis familiaris
gcagaccatagagctcaaggaggga

SEQ ID NO: 103289 - DNA, 25 bp, Canis familiaris
gcagacaccaggtctccaggtgtgg

SEQ ID NO: 103290 - DNA, 25 bp, Canis familiaris
gcagaccaggtattgcgaggttgcc

SEQ ID NO: 103291 - DNA, 25 bp, Canis familiaris
gcagccaagttattgcgatctttga

SEQ ID NO: 103292 - DNA, 25 bp, Canis familiaris
gcagaaatgttctatgcactctttg

SEQ ID NO: 103293 - DNA, 25 bp, Canis familiaris
gcagcaagatttcatctctgttggt

SEQ ID NO: 103294 - DNA, 25 bp, Canis familiaris
gcagcaaatgggagctcttctggaa

SEQ ID NO: 103295 - DNA, 25 bp, Canis familiaris
gcagcaattgtggctgtgctgtcct

SEQ ID NO: 103296 - DNA, 25 bp, Canis familiaris
gcagacattgtcggacttcgcttgt

SEQ ID NO: 103297 - DNA, 25 bp, Canis familiaris
gcagcatctgttgtactatcgttgt

SEQ ID NO: 103298 - DNA, 25 bp, Canis familiaris
gcagctatgttggatactgtcgtat

SEQ ID NO: 103299 - DNA, 25 bp, Canis familiaris
gcagcttctcggaatgcatgttgtt

SEQ ID NO: 103300 - DNA, 25 bp, Canis familiaris
gcagccttctgggtcagttttttgt

SEQ ID NO: 103301 - DNA, 25 bp, Canis familiaris
gcaccttctcgggatttctggtgta

SEQ ID NO: 103302 - DNA, 25 bp, Canis familiaris
gcacttttctagattctcaggttat

SEQ ID NO: 103303 - DNA, 25 bp, Canis familiaris
gcagcttattcttgatttttggttc

SEQ ID NO: 103304 - DNA, 25 bp, Canis familiaris
gcagctggaacggaatttggcggtc

SEQ ID NO: 103305 - DNA, 25 bp, Canis familiaris
gcagcgacagtcgacagattctggg

SEQ ID NO: 103306 - DNA, 25 bp, Canis familiaris
gcagctgccgaggaagatccagcgg

SEQ ID NO: 103307 - DNA, 25 bp, Canis familiaris
gcagctgtcagggaagcccagggtt

SEQ ID NO: 103308 - DNA, 25 bp, Canis familiaris
gcacgggggagaactcagggtcttg

SEQ ID NO: 103309 - DNA, 25 bp, Canis familiaris
gcacgggggaaggccgtgttgccgg

SEQ ID NO: 103310 - DNA, 25 bp, Canis familiaris
gcactggaagggcgaggggctgccg

SEQ ID NO: 103311 - DNA, 25 bp, Canis familiaris
gcagctggcacaggttggcgtaggt

SEQ ID NO: 103312 - DNA, 25 bp, Canis familiaris
gcagctaaaatgtctgggtttgctt

SEQ ID NO: 103313 - DNA, 25 bp, Canis familiaris
gcagctgtccaaactggagcttcct

SEQ ID NO: 103314 - DNA, 25 bp, Canis familiaris
gcacgtacatatactgtggcctcct

SEQ ID NO: 103315 - DNA, 25 bp, Canis familiaris
gcacggcacttacgtacgttcaagc

SEQ ID NO: 103316 - DNA, 25 bp, Canis familiaris
gcacccgttactagcacaattcaag

SEQ ID NO: 103317 - DNA, 25 bp, Canis familiaris
gcagccgcggtaattccagctccaa

SEQ ID NO: 103318 - DNA, 25 bp, Canis familiaris
gcagacgcagtaaaactcttcacaa

SEQ ID NO: 103319 - DNA, 25 bp, Canis familiaris
gcagactatggcttaaccttgcagc

SEQ ID NO: 103320 - DNA, 25 bp, Canis familiaris
gcagcacttagcacaatgccttgca

SEQ ID NO: 103321 - DNA, 25 bp, Canis familiaris
gcagcatctaaatcattgtttcctc

SEQ ID NO: 103322 - DNA, 25 bp, Canis familiaris
gcagcagctaattctagtggttcat

SEQ ID NO: 103323 - DNA, 25 bp, Canis familiaris
gcagcaggttggaagggtctgattc

SEQ ID NO: 103324 - DNA, 25 bp, Canis familiaris
gcagaagtccacgtgggatcgatga

SEQ ID NO: 103325 - DNA, 25 bp, Canis familiaris
gcagaaggcacccggtgtcatcatg

SEQ ID NO: 103326 - DNA, 25 bp, Canis familiaris
gcagacttatcccacgtgttctgca

SEQ ID NO: 103327 - DNA, 25 bp, Canis familiaris
gcagactgctgaactttttattgca

SEQ ID NO: 103328 - DNA, 25 bp, Canis familiaris
gcagagcctgagattttgcctactg

SEQ ID NO: 103329 - DNA, 25 bp, Canis familiaris
gcagagcctgcaaattcatacctag

SEQ ID NO: 103330 - DNA, 25 bp, Canis familiaris
gcagacccacacttgataatctaga

SEQ ID NO: 103331 - DNA, 25 bp, Canis familiaris
gcagacgcccttcgggattagaaac

SEQ ID NO: 103332 - DNA, 25 bp, Canis familiaris
gcagcacatccactgggggttaaaa

SEQ ID NO: 103333 - DNA, 25 bp, Canis familiaris
gcagccatccagtgttgtcttagat

SEQ ID NO: 103334 - DNA, 25 bp, Canis familiaris
gcagcagctcgactggttggttggt

SEQ ID NO: 103335 - DNA, 25 bp, Canis familiaris
gcagcaccccaggttagtgtgatct

SEQ ID NO: 103336 - DNA, 25 bp, Canis familiaris
gcacactcccagttcatgaggttca

SEQ ID NO: 103337 - DNA, 25 bp, Canis familiaris
gcagcactgcataagtccggtgtgt

SEQ ID NO: 103338 - DNA, 25 bp, Canis familiaris
gcagcagctagagttccagggtgtc

SEQ ID NO: 103339 - DNA, 25 bp, Canis familiaris
gcagcaccacaggtgccttggctgt

SEQ ID NO: 103340 - DNA, 25 bp, Canis familiaris
gcagccccgaggatttggctactgc

SEQ ID NO: 103341 - DNA, 25 bp, Canis familiaris
gcaccaatggaattttgggctacca

SEQ ID NO: 103342 - DNA, 25 bp, Canis familiaris
gcactttgtaattctatgggcacac

SEQ ID NO: 103343 - DNA, 25 bp, Canis familiaris
gcagcattggtcaaaacatggtgac

SEQ ID NO: 103344 - DNA, 25 bp, Canis familiaris
gcagctctgagccagattacaggaa

SEQ ID NO: 103345 - DNA, 25 bp, Canis familiaris
gcagcatcccagcttcatagagtga

SEQ ID NO: 103346 - DNA, 25 bp, Canis familiaris
gcagctttcagtgtcatcagtgtgg

SEQ ID NO: 103347 - DNA, 25 bp, Canis familiaris
gcagctttgtgtgtacgaatgctca

SEQ ID NO: 103348 - DNA, 25 bp, Canis familiaris
gcagcttggttcttgaaagatctct

SEQ ID NO: 103349 - DNA, 25 bp, Canis familiaris
gcagcattgtgttacttgaagaatc

SEQ ID NO: 103350 - DNA, 25 bp, Canis familiaris
gcagcatctctgtaagtaccaggtc

SEQ ID NO: 103351 - DNA, 25 bp, Canis familiaris
gcagcactgtgagagttaaggacac

SEQ ID NO: 103352 - DNA, 25 bp, Canis familiaris
gcagcagtggagttgagtccaggca

SEQ ID NO: 103353 - DNA, 25 bp, Canis familiaris
gcagaagctgagttagtccaaggac

SEQ ID NO: 103354 - DNA, 25 bp, Canis familiaris
gcaccatgctggtgcttccggagac

SEQ ID NO: 103355 - DNA, 25 bp, Canis familiaris
gcacttgtggaaccccaggatgaga

SEQ ID NO: 103356 - DNA, 25 bp, Canis familiaris
gcacctggtgcttaagcctggatag

SEQ ID NO: 103357 - DNA, 25 bp, Canis familiaris
gcagactttgcccaggcctgccaag

SEQ ID NO: 103358 - DNA, 25 bp, Canis familiaris
gcagactttcagcagagactgtcca

SEQ ID NO: 103359 - DNA, 25 bp, Canis familiaris
gcagaagttcaaagagcggatcgcc

SEQ ID NO: 103360 - DNA, 25 bp, Canis familiaris
gcagcatatttctaaagagatgtcg

SEQ ID NO: 103361 - DNA, 25 bp, Canis familiaris
gcagcatttctccaatggtcattac

SEQ ID NO: 103362 - DNA, 25 bp, Canis familiaris
gcagccatatcagaatccatatccc

SEQ ID NO: 103363 - DNA, 25 bp, Canis familiaris
gcagctgctggagaaaattcccaag

SEQ ID NO: 103364 - DNA, 25 bp, Canis familiaris
gcagctgcaggaagaaaccccgcat

SEQ ID NO: 103365 - DNA, 25 bp, Canis familiaris
gcagacatggatttcaaccagctgg

SEQ ID NO: 103366 - DNA, 25 bp, Canis familiaris
gcagaattcataattggcctgtgag

SEQ ID NO: 103367 - DNA, 25 bp, Canis familiaris
gcagaattcgaaatggctggcggta

SEQ ID NO: 103368 - DNA, 25 bp, Canis familiaris
gcagaagctcccatccaagaggttt

SEQ ID NO: 103369 - DNA, 25 bp, Canis familiaris
gcagaagcttcttgaccaaaggtca

SEQ ID NO: 103370 - DNA, 25 bp, Canis familiaris
gcagaaatatcataccatcaatggt

SEQ ID NO: 103371 - DNA, 25 bp, Canis familiaris
gcagcacattacttaccagcaaagt

SEQ ID NO: 103372 - DNA, 25 bp, Canis familiaris
gcaccttcttggaccagcacaagga

SEQ ID NO: 103373 - DNA, 25 bp, Canis familiaris
gcacctcttgtgcattctgcaagga

SEQ ID NO: 103374 - DNA, 25 bp, Canis familiaris
gcaccaggttgcaattgctgccaaa

SEQ ID NO: 103375 - DNA, 25 bp, Canis familiaris
gcagctcagtgccatgacattgtcc

SEQ ID NO: 103376 - DNA, 25 bp, Canis familiaris
gcagctgagggctcatctcatatct

SEQ ID NO: 103377 - DNA, 25 bp, Canis familiaris
gcagctgcgggacttcaagattcag

SEQ ID NO: 103378 - DNA, 25 bp, Canis familiaris
gcagcctctggagttcagcgactgc

SEQ ID NO: 103379 - DNA, 25 bp, Canis familiaris
gcaccaagcgatgaagcgaccgtct

SEQ ID NO: 103380 - DNA, 25 bp, Canis familiaris
gcagccaagcttgtcattggccctc

SEQ ID NO: 103381 - DNA, 25 bp, Canis familiaris
gcagcagcacagctgtttgggaccc

SEQ ID NO: 103382 - DNA, 25 bp, Canis familiaris
gcagcaccgaagtcctggaggacca

SEQ ID NO: 103383 - DNA, 25 bp, Canis familiaris
gcacgaaaaaccagcagagcaccaa

SEQ ID NO: 103384 - DNA, 25 bp, Canis familiaris
gaataaaaaggcctcagtgacccat

SEQ ID NO: 103385 - DNA, 25 bp, Canis familiaris
gaataaaaaggcctcagtgacccat

SEQ ID NO: 103386 - DNA, 25 bp, Canis familiaris
gcaaaggtaagagctcggaggcaat

SEQ ID NO: 103387 - DNA, 25 bp, Canis familiaris
gaatcaggcatttgaccttcaagag

SEQ ID NO: 103388 - DNA, 25 bp, Canis familiaris
gaacggctatcgacactttaggatt

SEQ ID NO: 103389 - DNA, 25 bp, Canis familiaris
gactcaggcttcaccttttggaaag

SEQ ID NO: 103390 - DNA, 25 bp, Canis familiaris
gcagctgcaggctttaccatttgtg

SEQ ID NO: 103391 - DNA, 25 bp, Canis familiaris
gcagctgaagcagcccgcatattag

SEQ ID NO: 103392 - DNA, 25 bp, Canis familiaris
gcagcacggcaagcccatattcatc

SEQ ID NO: 103393 - DNA, 25 bp, Canis familiaris
gcacgccagcaagcaaatcactgca

SEQ ID NO: 103394 - DNA, 25 bp, Canis familiaris
gcacgagccgagaagaatccagcca

SEQ ID NO: 103395 - DNA, 25 bp, Canis familiaris
gcagcaggcgcgcaaattacccact

SEQ ID NO: 103396 - DNA, 25 bp, Canis familiaris
gcacggccacgaattaaacaactta

SEQ ID NO: 103397 - DNA, 25 bp, Canis familiaris
gcacggacaccactttaatttcttt

SEQ ID NO: 103398 - DNA, 25 bp, Canis familiaris
gcagcggcaaccatttacatggcct

SEQ ID NO: 103399 - DNA, 25 bp, Canis familiaris
gcagcccagaacatctctaagacga

SEQ ID NO: 103400 - DNA, 25 bp, Canis familiaris
gcagccctgatgtctactacaaggc

SEQ ID NO: 103401 - DNA, 25 bp, Canis familiaris
gcacgactatgattactacccagcg

SEQ ID NO: 103402 - DNA, 25 bp, Canis familiaris
gcaccttattaagacccagcagtaa

SEQ ID NO: 103403 - DNA, 25 bp, Canis familiaris
gcaccttgattaattcacccacagt

SEQ ID NO: 103404 - DNA, 25 bp, Canis familiaris
gcaccttgattaattcacccacagt

SEQ ID NO: 103405 - DNA, 25 bp, Canis familiaris
gcaccttgaatatatcctgccactc

SEQ ID NO: 103406 - DNA, 25 bp, Canis familiaris
gcactgcctgaaactatatcccaac

SEQ ID NO: 103407 - DNA, 25 bp, Canis familiaris
gcagcttctacttttgagctccaac

SEQ ID NO: 103408 - DNA, 25 bp, Canis familiaris
gcagcttggagttgtgggcaccata

SEQ ID NO: 103409 - DNA, 25 bp, Canis familiaris
gcagcttgccagtttgaggagcgca

SEQ ID NO: 103410 - DNA, 25 bp, Canis familiaris
gcagcctgccatttctagacattgg

SEQ ID NO: 103411 - DNA, 25 bp, Canis familiaris
gcagccagcctatgcgaccatagga

SEQ ID NO: 103412 - DNA, 25 bp, Canis familiaris
gcagccagcctaggaagcagcaatc

SEQ ID NO: 103413 - DNA, 25 bp, Canis familiaris
gcagcccgcatattaggcgcagata

SEQ ID NO: 103414 - DNA, 25 bp, Canis familiaris
gcagcccgcatattaggcgcagata

SEQ ID NO: 103415 - DNA, 25 bp, Canis familiaris
gcactggccattcaggtggatgctg

SEQ ID NO: 103416 - DNA, 25 bp, Canis familiaris
gcactggaatctgagggctgttggc

SEQ ID NO: 103417 - DNA, 25 bp, Canis familiaris
gcagctggtacgagcaagtttagct

SEQ ID NO: 103418 - DNA, 25 bp, Canis familiaris
gcagctggtgactttaagccaaagc

SEQ ID NO: 103419 - DNA, 25 bp, Canis familiaris
gcagcagcacaagattaacccaatg

SEQ ID NO: 103420 - DNA, 25 bp, Canis familiaris
gcaccaatcagggtagaccgagatg

SEQ ID NO: 103421 - DNA, 25 bp, Canis familiaris
gcagccaaagcattctaagggggga

SEQ ID NO: 103422 - DNA, 25 bp, Canis familiaris
gcagccaactactttggggaggtgg

SEQ ID NO: 103423 - DNA, 25 bp, Canis familiaris
gcactatacaacactgggaatgggg

SEQ ID NO: 103424 - DNA, 25 bp, Canis familiaris
gcacttcagcaacaatgggaacggg

SEQ ID NO: 103425 - DNA, 25 bp, Canis familiaris
gcacggcgagagcgcttggaacctg

SEQ ID NO: 103426 - DNA, 25 bp, Canis familiaris
gcacccgagagggaatgaagaagtg

SEQ ID NO: 103427 - DNA, 25 bp, Canis familiaris
gcaccttggacgcagagaagagggc

SEQ ID NO: 103428 - DNA, 25 bp, Canis familiaris
gcacctggaggcccaagaaggccca

SEQ ID NO: 103429 - DNA, 25 bp, Canis familiaris
gcaccggatgtgccagagatgcaat

SEQ ID NO: 103430 - DNA, 25 bp, Canis familiaris
gcacgaggcgaccaggactatattc

SEQ ID NO: 103431 - DNA, 25 bp, Canis familiaris
gcagctgcagcccaagcaggactaa

SEQ ID NO: 103432 - DNA, 25 bp, Canis familiaris
gcaccagaccatgctggagctgacg

SEQ ID NO: 103433 - DNA, 25 bp, Canis familiaris
gcagcagataccactggagtcacta

SEQ ID NO: 103434 - DNA, 25 bp, Canis familiaris
gcagcagcatgcacttcttggtagc

SEQ ID NO: 103435 - DNA, 25 bp, Canis familiaris
gcagcactgcttcttgatgtgctcc

SEQ ID NO: 103436 - DNA, 25 bp, Canis familiaris
gcagcaatgcggccttggtgtctgc

SEQ ID NO: 103437 - DNA, 25 bp, Canis familiaris
gcagaatgcctgcaaggatgccctg

SEQ ID NO: 103438 - DNA, 25 bp, Canis familiaris
gcagaacccaaaatgcagtcctgct

SEQ ID NO: 103439 - DNA, 25 bp, Canis familiaris
gcagaacccaaagttggcatttgtc

SEQ ID NO: 103440 - DNA, 25 bp, Canis familiaris
gcagcaacgcggtgaacgtctttct

SEQ ID NO: 103441 - DNA, 25 bp, Canis familiaris
gcagcaacacggtgagacgcgacgc

SEQ ID NO: 103442 - DNA, 25 bp, Canis familiaris
gcagaaggcgctcaagacgctgggc

SEQ ID NO: 103443 - DNA, 25 bp, Canis familiaris
gcaacggatctgcaggacgaggctg

SEQ ID NO: 103444 - DNA, 25 bp, Canis familiaris
gcagcacgtgatctatggcactggg

SEQ ID NO: 103445 - DNA, 25 bp, Canis familiaris
gcagccaagagcctggagacggtgt

SEQ ID NO: 103446 - DNA, 25 bp, Canis familiaris
gcagccagaggcagcaacacggtga

SEQ ID NO: 103447 - DNA, 25 bp, Canis familiaris
gcagcacatgcagaactacacggtc

SEQ ID NO: 103448 - DNA, 25 bp, Canis familiaris
gcagcctgcatggaagaacatcgcc

SEQ ID NO: 103449 - DNA, 25 bp, Canis familiaris
gcagcacctggagagcaagctgacc

SEQ ID NO: 103450 - DNA, 25 bp, Canis familiaris
gcagcacccgcagatgaaggggccg

SEQ ID NO: 103451 - DNA, 25 bp, Canis familiaris
gcagcagcccaggacagggtggacc

SEQ ID NO: 103452 - DNA, 25 bp, Canis familiaris
gcagccccacgggcagtggggtcag

SEQ ID NO: 103453 - DNA, 25 bp, Canis familiaris
gcagcatcggcccacacagtgggct

SEQ ID NO: 103454 - DNA, 25 bp, Canis familiaris
gcagcacggtgaccaagctgcgcga

SEQ ID NO: 103455 - DNA, 25 bp, Canis familiaris
gcagcatgctggtggatccatagcg

SEQ ID NO: 103456 - DNA, 25 bp, Canis familiaris
gcagcgctgagatggatccgctcag

SEQ ID NO: 103457 - DNA, 25 bp, Canis familiaris
gcagcctgcagctggattacgcaac

SEQ ID NO: 103458 - DNA, 25 bp, Canis familiaris
gcacccagcggtataccgatcgggg

SEQ ID NO: 103459 - DNA, 25 bp, Canis familiaris
gcacccggtatcatttaccggaggg

SEQ ID NO: 103460 - DNA, 25 bp, Canis familiaris
gcagcccggaactcttccgggttgg

SEQ ID NO: 103461 - DNA, 25 bp, Canis familiaris
gcaccgcagggagagtccgcgggtt

SEQ ID NO: 103462 - DNA, 25 bp, Canis familiaris
gcaccaggggtcctgtgtatgctgg

SEQ ID NO: 103463 - DNA, 25 bp, Canis familiaris
gcacgagggaacagtttgcagtgtt

SEQ ID NO: 103464 - DNA, 25 bp, Canis familiaris
gcagcaggggagcattctcttagca

SEQ ID NO: 103465 - DNA, 25 bp, Canis familiaris
gcagcgagggagctgctctgctacg

SEQ ID NO: 103466 - DNA, 25 bp, Canis familiaris
gcacgagctgaggagtcctgtgcgc

SEQ ID NO: 103467 - DNA, 25 bp, Canis familiaris
gcaatgggaggagccttccgagtgg

SEQ ID NO: 103468 - DNA, 25 bp, Canis familiaris
gcactgggagtagcgagtcggggtc

SEQ ID NO: 103469 - DNA, 25 bp, Canis familiaris
gcactgggagtagcgagtcggggtc

SEQ ID NO: 103470 - DNA, 25 bp, Canis familiaris
gcacgagggcccagcagaaggggtc

SEQ ID NO: 103471 - DNA, 25 bp, Canis familiaris
gcaagaggaggagagagaaaggagg

SEQ ID NO: 103472 - DNA, 25 bp, Canis familiaris
gcagcaggtggggccagagaagcag

SEQ ID NO: 103473 - DNA, 25 bp, Canis familiaris
gcagcggcggtgggtaattagaggt

SEQ ID NO: 103474 - DNA, 25 bp, Canis familiaris
gcagcctgggctgagtactatagac

SEQ ID NO: 103475 - DNA, 25 bp, Canis familiaris
gcagctcttggtgtgctattagtac

SEQ ID NO: 103476 - DNA, 25 bp, Canis familiaris
gcagcctttgtttggttctgaacca

SEQ ID NO: 103477 - DNA, 25 bp, Canis familiaris
gcaccgatacatttagttcagagac

SEQ ID NO: 103478 - DNA, 25 bp, Canis familiaris
gcacccattttttgttcaagcagag

SEQ ID NO: 103479 - DNA, 25 bp, Canis familiaris
gcaccccaattctgtcttgaaagaa

SEQ ID NO: 103480 - DNA, 25 bp, Canis familiaris
gcaccacctttctagtagtcaactg

SEQ ID NO: 103481 - DNA, 25 bp, Canis familiaris
gcacctccagctgtattagtgccct

SEQ ID NO: 103482 - DNA, 25 bp, Canis familiaris
gcacttcaaccagatgacgtgtact

SEQ ID NO: 103483 - DNA, 25 bp, Canis familiaris
gcacttctccctcaaggagtgacgg

SEQ ID NO: 103484 - DNA, 25 bp, Canis familiaris
gcacttgaccttcagacctggaaag

SEQ ID NO: 103485 - DNA, 25 bp, Canis familiaris
gaactgaactagtgcccttaagggc

SEQ ID NO: 103486 - DNA, 25 bp, Canis familiaris
gaaatagccggtgccgtatccgggc

SEQ ID NO: 103487 - DNA, 25 bp, Canis familiaris
gcaaatggtcggtaggcgtgtacgg

SEQ ID NO: 103488 - DNA, 25 bp, Canis familiaris
gcagaatggtcagccggggaatagc

SEQ ID NO: 103489 - DNA, 25 bp, Canis familiaris
gcaacaggccccaggggttgagcca

SEQ ID NO: 103490 - DNA, 25 bp, Canis familiaris
gcaagtccaccgtgggtgttgactt

SEQ ID NO: 103491 - DNA, 25 bp, Canis familiaris
gaaggccccctgaggtgattagttg

SEQ ID NO: 103492 - DNA, 25 bp, Canis familiaris
gaacccacccttgtggttcattggc

SEQ ID NO: 103493 - DNA, 25 bp, Canis familiaris
taaaccccttcctgtggaattgcga

SEQ ID NO: 103494 - DNA, 25 bp, Canis familiaris
gcaaacccgtttttgtgaatacctg

SEQ ID NO: 103495 - DNA, 25 bp, Canis familiaris
gcaaaagccgttctgattgaatctc

SEQ ID NO: 103496 - DNA, 25 bp, Canis familiaris
gcaaaaccccacctggtacattgag

SEQ ID NO: 103497 - DNA, 25 bp, Canis familiaris
gcacttatccccagctttgatatgg

SEQ ID NO: 103498 - DNA, 25 bp, Canis familiaris
gcacttttgaccttgttctgcagag

SEQ ID NO: 103499 - DNA, 25 bp, Canis familiaris
gcagcttttagagctctttgacagt

SEQ ID NO: 103500 - DNA, 25 bp, Canis familiaris
gcactggtaagagctcattctaatg

SEQ ID NO: 103501 - DNA, 25 bp, Canis familiaris
gcagctggattacgcaacagtaaat

SEQ ID NO: 103502 - DNA, 25 bp, Canis familiaris
gcacggaacaacaaggatttatagg

SEQ ID NO: 103503 - DNA, 25 bp, Canis familiaris
gcacggagaccagcggtctaaatac

SEQ ID NO: 103504 - DNA, 25 bp, Canis familiaris
gcaccagaactagctcctctgaaaa

SEQ ID NO: 103505 - DNA, 25 bp, Canis familiaris
gcaccaagcggaactgcgcttaaaa

SEQ ID NO: 103506 - DNA, 25 bp, Canis familiaris
gcagccaaggtgtttggtcttcgca

SEQ ID NO: 103507 - DNA, 25 bp, Canis familiaris
gcaccaatggtgattgcgtctgccc

SEQ ID NO: 103508 - DNA, 25 bp, Canis familiaris
gcaccaaatgccatggcggtatccc

SEQ ID NO: 103509 - DNA, 25 bp, Canis familiaris
gcacgagcaccaaatggcggatgac

SEQ ID NO: 103510 - DNA, 25 bp, Canis familiaris
gcacgagcaaatgacgaagtcacga

SEQ ID NO: 103511 - DNA, 25 bp, Canis familiaris
gcacgagcctgtatcaaagtcacca

SEQ ID NO: 103512 - DNA, 25 bp, Canis familiaris
gcacgagcggtcaccaagaacatcc

SEQ ID NO: 103513 - DNA, 25 bp, Canis familiaris
gcacgactggtgaccatcgagggcc

SEQ ID NO: 103514 - DNA, 25 bp, Canis familiaris
gcagccctgggagccgagacagggg

SEQ ID NO: 103515 - DNA, 25 bp, Canis familiaris
gcaccgtggtgagctccaaagaagt

SEQ ID NO: 103516 - DNA, 25 bp, Canis familiaris
gcacctgccctgattagcaagaaag

SEQ ID NO: 103517 - DNA, 25 bp, Canis familiaris
gcagccttcctcattatcagaaatt

SEQ ID NO: 103518 - DNA, 25 bp, Canis familiaris
gcagccaaccatctttcaaaataag

SEQ ID NO: 103519 - DNA, 25 bp, Canis familiaris
gcaccaaccttgacttccaaatgga

SEQ ID NO: 103520 - DNA, 25 bp, Canis familiaris
gcagcacagcccttggtatctaagg

SEQ ID NO: 103521 - DNA, 25 bp, Canis familiaris
gcagcacagcggttggtcatggaat

SEQ ID NO: 103522 - DNA, 25 bp, Canis familiaris
gcacgaggtgttggtagaattcgct

SEQ ID NO: 103523 - DNA, 25 bp, Canis familiaris
gcacttggggctgtacaaatcactc

SEQ ID NO: 103524 - DNA, 25 bp, Canis familiaris
gcacttgggtggtgcacatacgact

SEQ ID NO: 103525 - DNA, 25 bp, Canis familiaris
gcactgggtctgggacactaggtca

SEQ ID NO: 103526 - DNA, 25 bp, Canis familiaris
gcagcgtccttgtgacagtttgtca

SEQ ID NO: 103527 - DNA, 25 bp, Canis familiaris
gcagctgacctgcaggacatttttc

SEQ ID NO: 103528 - DNA, 25 bp, Canis familiaris
gcagcggcctggagcagatttctcc

SEQ ID NO: 103529 - DNA, 25 bp, Canis familiaris
gcagctgtcttactaaaatgtctca

SEQ ID NO: 103530 - DNA, 25 bp, Canis familiaris
gcaccttgatagagatatatgtata

SEQ ID NO: 103531 - DNA, 25 bp, Canis familiaris
gcagccaagtagaggtcatgtgacc

SEQ ID NO: 103532 - DNA, 25 bp, Canis familiaris
gcaccaggagaatcctcattgacac

SEQ ID NO: 103533 - DNA, 25 bp, Canis familiaris
gcacctggaggagtctcctatgaga

SEQ ID NO: 103534 - DNA, 25 bp, Canis familiaris
gcacctggagaaatgcccagcaaat

SEQ ID NO: 103535 - DNA, 25 bp, Canis familiaris
gcagccaggcagacataacaacaaa

SEQ ID NO: 103536 - DNA, 25 bp, Canis familiaris
gcagcactagcactaaatcatgaag

SEQ ID NO: 103537 - DNA, 25 bp, Canis familiaris
gcagcagcaagcagaagtagcagca

SEQ ID NO: 103538 - DNA, 25 bp, Canis familiaris
gcagcatatgacagagtttcagcat

SEQ ID NO: 103539 - DNA, 25 bp, Canis familiaris
gcagcattgcctgagttttatgtag

SEQ ID NO: 103540 - DNA, 25 bp, Canis familiaris
gcagcttgagttattcccactgatg

SEQ ID NO: 103541 - DNA, 25 bp, Canis familiaris
gcagctctgaattaaccccaagaag

SEQ ID NO: 103542 - DNA, 25 bp, Canis familiaris
gcagcattttacaaccctgaaggtg

SEQ ID NO: 103543 - DNA, 25 bp, Canis familiaris
gcagcatttacaacccctgaagtgc

SEQ ID NO: 103544 - DNA, 25 bp, Canis familiaris
gcactttgacagaacccagggtccc

SEQ ID NO: 103545 - DNA, 25 bp, Canis familiaris
gcagcttagaagtaggccgactccc

SEQ ID NO: 103546 - DNA, 25 bp, Canis familiaris
gcagctttgagattagcccaggcct

SEQ ID NO: 103547 - DNA, 25 bp, Canis familiaris
gcagcttctagagaccatctgtcct

SEQ ID NO: 103548 - DNA, 25 bp, Canis familiaris
gcagctgcctgaagaagcacaagtc

SEQ ID NO: 103549 - DNA, 25 bp, Canis familiaris
gcagctgtctgaagaagccacaagt

SEQ ID NO: 103550 - DNA, 25 bp, Canis familiaris
gcagcagctgcgacagcagagccag

SEQ ID NO: 103551 - DNA, 25 bp, Canis familiaris
gcagcactgtgattgatgcacaagt

SEQ ID NO: 103552 - DNA, 25 bp, Canis familiaris
gcagctctctgatgatccaattcta

SEQ ID NO: 103553 - DNA, 25 bp, Canis familiaris
gcagcatgcctaaatcaagttgtaa

SEQ ID NO: 103554 - DNA, 25 bp, Canis familiaris
gcagcagcaaaagtgcctttgacaa

SEQ ID NO: 103555 - DNA, 25 bp, Canis familiaris
gcagcagaagaaagcccttgtgaac

SEQ ID NO: 103556 - DNA, 25 bp, Canis familiaris
gcagcagcaaaaaccccagggagta

SEQ ID NO: 103557 - DNA, 25 bp, Canis familiaris
gcagcagaagaacccaccatggtgg

SEQ ID NO: 103558 - DNA, 25 bp, Canis familiaris
gcagctgacagaaatgctacccagt

SEQ ID NO: 103559 - DNA, 25 bp, Canis familiaris
gcagcatgacaaagattagatagag

SEQ ID NO: 103560 - DNA, 25 bp, Canis familiaris
gcagcagcaacaagctttacaggcc

SEQ ID NO: 103561 - DNA, 25 bp, Canis familiaris
gcagcagcaacaagcaaaactacat

SEQ ID NO: 103562 - DNA, 25 bp, Canis familiaris
gcagcagcaacaaaggaatctctca

SEQ ID NO: 103563 - DNA, 25 bp, Canis familiaris
gcagcagcagtgacagagggatcca

SEQ ID NO: 103564 - DNA, 25 bp, Canis familiaris
gcagcagagtgtgaccttgccagat

SEQ ID NO: 103565 - DNA, 25 bp, Canis familiaris
gcagcaggctgtgacagcagtgcag

SEQ ID NO: 103566 - DNA, 25 bp, Canis familiaris
gcagcagctggacgacatcattgac

SEQ ID NO: 103567 - DNA, 25 bp, Canis familiaris
gcagctgtgcaactgcacttctgtc

SEQ ID NO: 103568 - DNA, 25 bp, Canis familiaris
gcagctatcagaagcccatctgccc

SEQ ID NO: 103569 - DNA, 25 bp, Canis familiaris
gcagcctgcaaagccatcgagcagc

SEQ ID NO: 103570 - DNA, 25 bp, Canis familiaris
gcagcaggaaatgccaacaagccct

SEQ ID NO: 103571 - DNA, 25 bp, Canis familiaris
gcagcaggaagcatcctgtccagca

SEQ ID NO: 103572 - DNA, 25 bp, Canis familiaris
gcagcagggatgaaagcttctcgtg

SEQ ID NO: 103573 - DNA, 25 bp, Canis familiaris
gcagcgaggatgaagctttctcgtg

SEQ ID NO: 103574 - DNA, 25 bp, Canis familiaris
gcagctgtggattgttgttacactg

SEQ ID NO: 103575 - DNA, 25 bp, Canis familiaris
gcagcgggtgtgaatgttgagcctt

SEQ ID NO: 103576 - DNA, 25 bp, Canis familiaris
gcagcagctgcaggtacagggaccc

SEQ ID NO: 103577 - DNA, 25 bp, Canis familiaris
gcagcaggcacagcagggtgcaccc

SEQ ID NO: 103578 - DNA, 25 bp, Canis familiaris
gcagcaggacagcgaggtctaggcc

SEQ ID NO: 103579 - DNA, 25 bp, Canis familiaris
gcagctggacaacgatgtgctccga

SEQ ID NO: 103580 - DNA, 25 bp, Canis familiaris
gcactagacatgtcatggtcctcat

SEQ ID NO: 103581 - DNA, 25 bp, Canis familiaris
gcagctcagcagcaatggcacctgc

SEQ ID NO: 103582 - DNA, 25 bp, Canis familiaris
gcagccgcacactatgagcaacatg

SEQ ID NO: 103583 - DNA, 25 bp, Canis familiaris
gcagcggctgcagttgctgctactg

SEQ ID NO: 103584 - DNA, 25 bp, Canis familiaris
gcagctgtgatcgtgttgtatcgag

SEQ ID NO: 103585 - DNA, 25 bp, Canis familiaris
gcagcgcgatcaggttgtgtggtcg

SEQ ID NO: 103586 - DNA, 25 bp, Canis familiaris
gcagcagcaacgatcggtgcgctgg

SEQ ID NO: 103587 - DNA, 25 bp, Canis familiaris
gcagcctacgtggggatgggggatg

SEQ ID NO: 103588 - DNA, 25 bp, Canis familiaris
gcactcaacctcagtcatgggggtg

SEQ ID NO: 103589 - DNA, 25 bp, Canis familiaris
gcacaccacccagctctgggtggct

SEQ ID NO: 103590 - DNA, 25 bp, Canis familiaris
gcacctcccaaggctgtggggagtc

SEQ ID NO: 103591 - DNA, 25 bp, Canis familiaris
gcacccctacagacgtgcgggatat

SEQ ID NO: 103592 - DNA, 25 bp, Canis familiaris
gcacccctactaccttggggatcac

SEQ ID NO: 103593 - DNA, 25 bp, Canis familiaris
gcacccccagaacatctgggagccc

SEQ ID NO: 103594 - DNA, 25 bp, Canis familiaris
gcaccacccgtgttgtatcggagtc

SEQ ID NO: 103595 - DNA, 25 bp, Canis familiaris
gcaccgcccgtgggagacgagggca

SEQ ID NO: 103596 - DNA, 25 bp, Canis familiaris
gcacccccagctggaaagacaggaa

SEQ ID NO: 103597 - DNA, 25 bp, Canis familiaris
gcaccggcctgtggaaacacgagac

SEQ ID NO: 103598 - DNA, 25 bp, Canis familiaris
gcacgaggacctggaagaactggag

SEQ ID NO: 103599 - DNA, 25 bp, Canis familiaris
gcagcagaggactggggaacctgat

SEQ ID NO: 103600 - DNA, 25 bp, Canis familiaris
gcagcagggccatgcgtagggccag

SEQ ID NO: 103601 - DNA, 25 bp, Canis familiaris
gcaccaggcacatagtaaatgctca

SEQ ID NO: 103602 - DNA, 25 bp, Canis familiaris
gcaccagcccacaaggaaattgcag

SEQ ID NO: 103603 - DNA, 25 bp, Canis familiaris
gcagccaagccctgtatcaaatcag

SEQ ID NO: 103604 - DNA, 25 bp, Canis familiaris
gcagccaagccgaagaaaagataga

SEQ ID NO: 103605 - DNA, 25 bp, Canis familiaris
gcagcgaccctgagagcaaagacgc

SEQ ID NO: 103606 - DNA, 25 bp, Canis familiaris
gcagccagcagcatgcagggcaaag

SEQ ID NO: 103607 - DNA, 25 bp, Canis familiaris
gcagcagaggcggcgggagaaggcc

SEQ ID NO: 103608 - DNA, 25 bp, Canis familiaris
gcacgagcgcaggtgtcctaaggcg

SEQ ID NO: 103609 - DNA, 25 bp, Canis familiaris
gcacgagcgggagtccgtaggcatg

SEQ ID NO: 103610 - DNA, 25 bp, Canis familiaris
gcacgaaatgagttccgactggacg

SEQ ID NO: 103611 - DNA, 25 bp, Canis familiaris
gcactgtggacacccagttcatcga

SEQ ID NO: 103612 - DNA, 25 bp, Canis familiaris
gcactgatttcgaccaggttcgttc

SEQ ID NO: 103613 - DNA, 25 bp, Canis familiaris
gcactgatttcgaccaggttcgttc

SEQ ID NO: 103614 - DNA, 25 bp, Canis familiaris
gcagctggatttcccaggatttctt

SEQ ID NO: 103615 - DNA, 25 bp, Canis familiaris
gcactggttatcgtacggtttctta

SEQ ID NO: 103616 - DNA, 25 bp, Canis familiaris
gcaccgtgttagacagggttacctg

SEQ ID NO: 103617 - DNA, 25 bp, Canis familiaris
gcaccggtgtctaaagttgaacgag

SEQ ID NO: 103618 - DNA, 25 bp, Canis familiaris
gcactcggtactcaaacggtggagt

SEQ ID NO: 103619 - DNA, 25 bp, Canis familiaris
gcactcggtccctaaagagtttatt

SEQ ID NO: 103620 - DNA, 25 bp, Canis familiaris
gcactcaggtgctttaacgtttata

SEQ ID NO: 103621 - DNA, 25 bp, Canis familiaris
gcagccggctgcaggcaaggatttc

SEQ ID NO: 103622 - DNA, 25 bp, Canis familiaris
gcagccgttgcaggcgaagttgatt

SEQ ID NO: 103623 - DNA, 25 bp, Canis familiaris
gcagcccttagcctagagttgattc

SEQ ID NO: 103624 - DNA, 25 bp, Canis familiaris
gcagccgcatgaaccggatgtctcg

SEQ ID NO: 103625 - DNA, 25 bp, Canis familiaris
gcagcctcagcatccatgagtttag

SEQ ID NO: 103626 - DNA, 25 bp, Canis familiaris
gcagctcccactaatcagttgtagc

SEQ ID NO: 103627 - DNA, 25 bp, Canis familiaris
gcagctccaaagcactggatgctgg

SEQ ID NO: 103628 - DNA, 25 bp, Canis familiaris
gcagcccaaggatggtgaggcgccc

SEQ ID NO: 103629 - DNA, 25 bp, Canis familiaris
gcactccatcgtgtgggcgatgcac

SEQ ID NO: 103630 - DNA, 25 bp, Canis familiaris
gcactttcgggtttgttgcaccgga

SEQ ID NO: 103631 - DNA, 25 bp, Canis familiaris
gcactataggggaactttactccag

SEQ ID NO: 103632 - DNA, 25 bp, Canis familiaris
gcaataaggtggagtttcgcccggg

SEQ ID NO: 103633 - DNA, 25 bp, Canis familiaris
gcactagggtggagtgtgggtacgg

SEQ ID NO: 103634 - DNA, 25 bp, Canis familiaris
gcagcgagggggagttcaggcagac

SEQ ID NO: 103635 - DNA, 25 bp, Canis familiaris
gcacgaggccggtgaagcggcagag

SEQ ID NO: 103636 - DNA, 25 bp, Canis familiaris
gcagctgtggctgggggtaggtgta

SEQ ID NO: 103637 - DNA, 25 bp, Canis familiaris
gcagctggagtgggggatgcacggc

SEQ ID NO: 103638 - DNA, 25 bp, Canis familiaris
gcagctggaccaatgtgagatgatc

SEQ ID NO: 103639 - DNA, 25 bp, Canis familiaris
gcagctgcagaccctgtatgagcag

SEQ ID NO: 103640 - DNA, 25 bp, Canis familiaris
gcagctggagagactttggggacat

SEQ ID NO: 103641 - DNA, 25 bp, Canis familiaris
gcagctgtgaacaaattgagggaat

SEQ ID NO: 103642 - DNA, 25 bp, Canis familiaris
gcagcttccctggcttcagggacat

SEQ ID NO: 103643 - DNA, 25 bp, Canis familiaris
gcagctactcctacaatacggactc

SEQ ID NO: 103644 - DNA, 25 bp, Canis familiaris
gcagctactccttaaaccagatgtg

SEQ ID NO: 103645 - DNA, 25 bp, Canis familiaris
gcactactccaatgtcttccatgga

SEQ ID NO: 103646 - DNA, 25 bp, Canis familiaris
gcactcactgtctgggtattcggag

SEQ ID NO: 103647 - DNA, 25 bp, Canis familiaris
gcaccgcgtgcaaggttttcgcggc

SEQ ID NO: 103648 - DNA, 25 bp, Canis familiaris
gcacggggaagtatgccctgctggc

SEQ ID NO: 103649 - DNA, 25 bp, Canis familiaris
gcacgagggttgttcgtctccgtgc

SEQ ID NO: 103650 - DNA, 25 bp, Canis familiaris
gcacgagggcccctcgttggtgtct

SEQ ID NO: 103651 - DNA, 25 bp, Canis familiaris
gcaccatggcccggccagttgagtg

SEQ ID NO: 103652 - DNA, 25 bp, Canis familiaris
gcaccggctaccaacatgtgtactg

SEQ ID NO: 103653 - DNA, 25 bp, Canis familiaris
gcacctgtttaaacattgtacccct

SEQ ID NO: 103654 - DNA, 25 bp, Canis familiaris
gcagcctttttctgcaaattctccc

SEQ ID NO: 103655 - DNA, 25 bp, Canis familiaris
gcaccatttattgagagcaatgtct

SEQ ID NO: 103656 - DNA, 25 bp, Canis familiaris
gcagcctattattgtagtacattct

SEQ ID NO: 103657 - DNA, 25 bp, Canis familiaris
gcagccatgagtatgctcagcttca

SEQ ID NO: 103658 - DNA, 25 bp, Canis familiaris
gcaccatgcagatctgagcgcttgg

SEQ ID NO: 103659 - DNA, 25 bp, Canis familiaris
gcactgtcagcatcttgctccagtg

SEQ ID NO: 103660 - DNA, 25 bp, Canis familiaris
gcacgtgaacctggccacagatgac

SEQ ID NO: 103661 - DNA, 25 bp, Canis familiaris
gcagcttgaacgactaaagcagaaa

SEQ ID NO: 103662 - DNA, 25 bp, Canis familiaris
gcagccatgacacttctaaacgata

SEQ ID NO: 103663 - DNA, 25 bp, Canis familiaris
gcaccaacagctcctatacaatgaa

SEQ ID NO: 103664 - DNA, 25 bp, Canis familiaris
gcaccaaccgcacatataccaatgt

SEQ ID NO: 103665 - DNA, 25 bp, Canis familiaris
gcaccacaccagttattactcattg

SEQ ID NO: 103666 - DNA, 25 bp, Canis familiaris
gcaccacgtggaaaatatcactttt

SEQ ID NO: 103667 - DNA, 25 bp, Canis familiaris
gcacccgtgggaatatcaccttttg

SEQ ID NO: 103668 - DNA, 25 bp, Canis familiaris
gcacagccgctgagaatgaattcgt

SEQ ID NO: 103669 - DNA, 25 bp, Canis familiaris
gcactaggtgatcgagggcttcgcc

SEQ ID NO: 103670 - DNA, 25 bp, Canis familiaris
gcactggtttggagtcttggatctg

SEQ ID NO: 103671 - DNA, 25 bp, Canis familiaris
gcactgggatagtctaattctaact

SEQ ID NO: 103672 - DNA, 25 bp, Canis familiaris
gcactgtgaatggagataattctca

SEQ ID NO: 103673 - DNA, 25 bp, Canis familiaris
gcagctggagctggcaaagtcacca

SEQ ID NO: 103674 - DNA, 25 bp, Canis familiaris
gcagctggagctggaatcccattga

SEQ ID NO: 103675 - DNA, 25 bp, Canis familiaris
gcagctaggtgccaggacacagaga

SEQ ID NO: 103676 - DNA, 25 bp, Canis familiaris
gcagctggtggccaggaacacgaga

SEQ ID NO: 103677 - DNA, 25 bp, Canis familiaris
gcagctgttggccgggcaagaggat

SEQ ID NO: 103678 - DNA, 25 bp, Canis familiaris
gcagctgttgtcctgtggaaacctg

SEQ ID NO: 103679 - DNA, 25 bp, Canis familiaris
gcacttgctattctggagaatgcca

SEQ ID NO: 103680 - DNA, 25 bp, Canis familiaris
gcacgagcttctcttggagtcaaga

SEQ ID NO: 103681 - DNA, 25 bp, Canis familiaris
gcacagatgttccccacaagtaaga

SEQ ID NO: 103682 - DNA, 25 bp, Canis familiaris
gcacgtatattccataaaggctaga

SEQ ID NO: 103683 - DNA, 25 bp, Canis familiaris
gcacgtcattacctactggtcaagg

SEQ ID NO: 103684 - DNA, 25 bp, Canis familiaris
gcacctttgtgcatgactgtgtcaa

SEQ ID NO: 103685 - DNA, 25 bp, Canis familiaris
gcagcctgtttcatacatgcttgac

SEQ ID NO: 103686 - DNA, 25 bp, Canis familiaris
gcagcctttcacagaggcatcttta

SEQ ID NO: 103687 - DNA, 25 bp, Canis familiaris
gcacgttctccaggaacacatccta

SEQ ID NO: 103688 - DNA, 25 bp, Canis familiaris
gcagctatacccggagaactccgag

SEQ ID NO: 103689 - DNA, 25 bp, Canis familiaris
gcacattagccccaggaaggccggc

SEQ ID NO: 103690 - DNA, 25 bp, Canis familiaris
gcacttggccccggaaagggcccag

SEQ ID NO: 103691 - DNA, 25 bp, Canis familiaris
gcacaaggcccgtggagggtcttag

SEQ ID NO: 103692 - DNA, 25 bp, Canis familiaris
gcacaggtgccaaggggaggcgttg

SEQ ID NO: 103693 - DNA, 25 bp, Canis familiaris
gcagcgggagcaggaggagagggag

SEQ ID NO: 103694 - DNA, 25 bp, Canis familiaris
gcacgtggagcaagaaggcacgctg

SEQ ID NO: 103695 - DNA, 25 bp, Canis familiaris
gcacgtgggaaatgcaacatgtggt

SEQ ID NO: 103696 - DNA, 25 bp, Canis familiaris
gcacgagggaagaccacctttgtac

SEQ ID NO: 103697 - DNA, 25 bp, Canis familiaris
gcacgagggcatataaccttgggat

SEQ ID NO: 103698 - DNA, 25 bp, Canis familiaris
gcacgaggcctgataggggttttcg

SEQ ID NO: 103699 - DNA, 25 bp, Canis familiaris
gcacgagggtgcatatggggccctg

SEQ ID NO: 103700 - DNA, 25 bp, Canis familiaris
gcagcgaggtggtgaggaggctccg

SEQ ID NO: 103701 - DNA, 25 bp, Canis familiaris
gcaccagggacctaggactgcatca

SEQ ID NO: 103702 - DNA, 25 bp, Canis familiaris
gcaccagcggaccttggaggtggga

SEQ ID NO: 103703 - DNA, 25 bp, Canis familiaris
gcagcctggaaacttaagtggcgcc

SEQ ID NO: 103704 - DNA, 25 bp, Canis familiaris
gcaccggatttcttaagctggacac

SEQ ID NO: 103705 - DNA, 25 bp, Canis familiaris
gcacctggtttctttgcagcaaaca

SEQ ID NO: 103706 - DNA, 25 bp, Canis familiaris
gcacctgcctcgtggatggcaaaaa

SEQ ID NO: 103707 - DNA, 25 bp, Canis familiaris
gcaccatttctcaggttgaaccaga

SEQ ID NO: 103708 - DNA, 25 bp, Canis familiaris
gcagcctggactatggttgtaatag

SEQ ID NO: 103709 - DNA, 25 bp, Canis familiaris
gcacctggcacaactgtttgctaca

SEQ ID NO: 103710 - DNA, 25 bp, Canis familiaris
gcaccagtcagaccgatatgtcaaa

SEQ ID NO: 103711 - DNA, 25 bp, Canis familiaris
gcagctagtaggactgatgcagtac

SEQ ID NO: 103712 - DNA, 25 bp, Canis familiaris
gcagcgttatgcatctgaggtgagc

SEQ ID NO: 103713 - DNA, 25 bp, Canis familiaris
gcagctgatgggctcatgcaggctg

SEQ ID NO: 103714 - DNA, 25 bp, Canis familiaris
gcagctgggcttcctgcagctgcat

SEQ ID NO: 103715 - DNA, 25 bp, Canis familiaris
gcagctgtggttggccaggagtgcg

SEQ ID NO: 103716 - DNA, 25 bp, Canis familiaris
gcacgctgcctggcaaatgggtggg

SEQ ID NO: 103717 - DNA, 25 bp, Canis familiaris
gcaccgcctcatcaaggtggagagc

SEQ ID NO: 103718 - DNA, 25 bp, Canis familiaris
gcacccagctcaacgggttgaagca

SEQ ID NO: 103719 - DNA, 25 bp, Canis familiaris
gcagcccacatcagagggtggcctg

SEQ ID NO: 103720 - DNA, 25 bp, Canis familiaris
gcacctcaatcctgagagagtcctg

SEQ ID NO: 103721 - DNA, 25 bp, Canis familiaris
gcaccaatatcttgactgcagatgt

SEQ ID NO: 103722 - DNA, 25 bp, Canis familiaris
gcaactagatgctgacggtggaccc

SEQ ID NO: 103723 - DNA, 25 bp, Canis familiaris
gcaaccagtttagaggggcgccaga

SEQ ID NO: 103724 - DNA, 25 bp, Canis familiaris
gcacccgggtagtaggtagtcacca

SEQ ID NO: 103725 - DNA, 25 bp, Canis familiaris
gcaccgtggagaagaaggtggcccc

SEQ ID NO: 103726 - DNA, 25 bp, Canis familiaris
gcactcactgggacagaagccaccc

SEQ ID NO: 103727 - DNA, 25 bp, Canis familiaris
gcagccagggatacaagaccacttg

SEQ ID NO: 103728 - DNA, 25 bp, Canis familiaris
gcagcgaggaggaagcagacccgtc

SEQ ID NO: 103729 - DNA, 25 bp, Canis familiaris
gcagctcagggcaaagcagggccag

SEQ ID NO: 103730 - DNA, 25 bp, Canis familiaris
gcagctgaggaaatgccaggcccag

SEQ ID NO: 103731 - DNA, 25 bp, Canis familiaris
gcagctggagacagaagcccgagcg

SEQ ID NO: 103732 - DNA, 25 bp, Canis familiaris
gcagcggcgagtggaaccgacagtg

SEQ ID NO: 103733 - DNA, 25 bp, Canis familiaris
gcagcgacgaaggtagcactgtggt

SEQ ID NO: 103734 - DNA, 25 bp, Canis familiaris
gcagcgatcggaggtgagaggggcc

SEQ ID NO: 103735 - DNA, 25 bp, Canis familiaris
gcagcgttgggggaggtgtctgcca

SEQ ID NO: 103736 - DNA, 25 bp, Canis familiaris
gcagcggtgggggaggtgctgccac

SEQ ID NO: 103737 - DNA, 25 bp, Canis familiaris
gcacgaggaaggaatgggcttcatt

SEQ ID NO: 103738 - DNA, 25 bp, Canis familiaris
gcacgagaagatgcaaagtcttatt

SEQ ID NO: 103739 - DNA, 25 bp, Canis familiaris
gcaccagagatggtcaaagtaaatc

SEQ ID NO: 103740 - DNA, 25 bp, Canis familiaris
gcaccagccaggtcagaagggacct

SEQ ID NO: 103741 - DNA, 25 bp, Canis familiaris
gcagctgagcgatataaatgggcaa

SEQ ID NO: 103742 - DNA, 25 bp, Canis familiaris
gcagctgccaatgccaagaggagag

SEQ ID NO: 103743 - DNA, 25 bp, Canis familiaris
gcagctgctctgaggcaggagtcgg

SEQ ID NO: 103744 - DNA, 25 bp, Canis familiaris
gcagctgctcttaagcaagctgcgg

SEQ ID NO: 103745 - DNA, 25 bp, Canis familiaris
gcacgtgttagctaatgctatggtt

SEQ ID NO: 103746 - DNA, 25 bp, Canis familiaris
gcaccgttgattgatctcatttgta

SEQ ID NO: 103747 - DNA, 25 bp, Canis familiaris
gcagctccttgttagatccattatc

SEQ ID NO: 103748 - DNA, 25 bp, Canis familiaris
gcagcccaagtgtgcatcaattgat

SEQ ID NO: 103749 - DNA, 25 bp, Canis familiaris
gcacccactgaactgtcaagtcata

SEQ ID NO: 103750 - DNA, 25 bp, Canis familiaris
gcacctcaagaacgtggacttccgc

SEQ ID NO: 103751 - DNA, 25 bp, Canis familiaris
gcagccaagagatggtggaacattc

SEQ ID NO: 103752 - DNA, 25 bp, Canis familiaris
gcagctgcagactcagggggcaaac

SEQ ID NO: 103753 - DNA, 25 bp, Canis familiaris
gcagccaccaacagggtggacatcc

SEQ ID NO: 103754 - DNA, 25 bp, Canis familiaris
gcagccccaaggactgagggttgcc

SEQ ID NO: 103755 - DNA, 25 bp, Canis familiaris
gcagcccacaagcactgggactgtc

SEQ ID NO: 103756 - DNA, 25 bp, Canis familiaris
gcaccaagaaggtcgggatcgtggg

SEQ ID NO: 103757 - DNA, 25 bp, Canis familiaris
gcactcaaatagcattcgttctgtg

SEQ ID NO: 103758 - DNA, 25 bp, Canis familiaris
gcactgccttactttggctgttggt

SEQ ID NO: 103759 - DNA, 25 bp, Canis familiaris
gcaccagctccagtttggtttggca

SEQ ID NO: 103760 - DNA, 25 bp, Canis familiaris
gcaccgcatcggctgcattgtggtg

SEQ ID NO: 103761 - DNA, 25 bp, Canis familiaris
gcacccagttcactgtgttggatca

SEQ ID NO: 103762 - DNA, 25 bp, Canis familiaris
gcagcctcagctgagctgtgtaccc

SEQ ID NO: 103763 - DNA, 25 bp, Canis familiaris
gcagcctcgctgactgtggctgagc

SEQ ID NO: 103764 - DNA, 25 bp, Canis familiaris
gcagcctgcatctagtgggcggtgt

SEQ ID NO: 103765 - DNA, 25 bp, Canis familiaris
gcagccatcttgctgggtctggctg

SEQ ID NO: 103766 - DNA, 25 bp, Canis familiaris
gcagccaccatgcgtgagtgtatct

SEQ ID NO: 103767 - DNA, 25 bp, Canis familiaris
gcaccagccatgtagtctggatccc

SEQ ID NO: 103768 - DNA, 25 bp, Canis familiaris
gcaccatgctctgtgattctgttcc

SEQ ID NO: 103769 - DNA, 25 bp, Canis familiaris
gcaccagcttttgcacagctgtcct

SEQ ID NO: 103770 - DNA, 25 bp, Canis familiaris
gcagccagctacatccagagtaagt

SEQ ID NO: 103771 - DNA, 25 bp, Canis familiaris
gcagccataagcatcaagtgtaaaa

SEQ ID NO: 103772 - DNA, 25 bp, Canis familiaris
gcagcgtcaactgcacgtggacaca

SEQ ID NO: 103773 - DNA, 25 bp, Canis familiaris
gcagcgtgcagacttaggtgaccag

SEQ ID NO: 103774 - DNA, 25 bp, Canis familiaris
gcagctgttcactttgaggacacgg

SEQ ID NO: 103775 - DNA, 25 bp, Canis familiaris
gcagctggtgccactggagacagtg

SEQ ID NO: 103776 - DNA, 25 bp, Canis familiaris
gcagcggatgctgtccgagagctag

SEQ ID NO: 103777 - DNA, 25 bp, Canis familiaris
gcagccagattgatcatctgcctta

SEQ ID NO: 103778 - DNA, 25 bp, Canis familiaris
gcagccgaagcagcatcagcctgct

SEQ ID NO: 103779 - DNA, 25 bp, Canis familiaris
gcagcggccagagactgctgctgct

SEQ ID NO: 103780 - DNA, 25 bp, Canis familiaris
gcagcggcaacatgctctgctgcag

SEQ ID NO: 103781 - DNA, 25 bp, Canis familiaris
gcagcgccgacatattgtgtgagac

SEQ ID NO: 103782 - DNA, 25 bp, Canis familiaris
gcagctgggccttgttgatttgcac

SEQ ID NO: 103783 - DNA, 25 bp, Canis familiaris
gcactgggtcaggtctgcattggaa

SEQ ID NO: 103784 - DNA, 25 bp, Canis familiaris
gcacgagggcaccttctgtgcataa

SEQ ID NO: 103785 - DNA, 25 bp, Canis familiaris
gcactgagtgcgtcacatttaggac

SEQ ID NO: 103786 - DNA, 25 bp, Canis familiaris
gcagcggtgctatataattgaaatc

SEQ ID NO: 103787 - DNA, 25 bp, Canis familiaris
gcagcgagtcaagtgtgcgaggaac

SEQ ID NO: 103788 - DNA, 25 bp, Canis familiaris
gcagcgagacaagatgccgtccagc

SEQ ID NO: 103789 - DNA, 25 bp, Canis familiaris
gcagcggaaagtggccggctgcaca

SEQ ID NO: 103790 - DNA, 25 bp, Canis familiaris
gcacggggagtgacccctgacatgc

SEQ ID NO: 103791 - DNA, 25 bp, Canis familiaris
gcacgagggaacaccctccagaggc

SEQ ID NO: 103792 - DNA, 25 bp, Canis familiaris
gcacgaggggtcagagccccagaga

SEQ ID NO: 103793 - DNA, 25 bp, Canis familiaris
gcacgaggccgaaatgaggaccagt

SEQ ID NO: 103794 - DNA, 25 bp, Canis familiaris
gcaaggagccaagatgggcccctac

SEQ ID NO: 103795 - DNA, 25 bp, Canis familiaris
gcaaacacgaactagttcccgtatc

SEQ ID NO: 103796 - DNA, 25 bp, Canis familiaris
gcacaacctgtaaaatgtcccctaa

SEQ ID NO: 103797 - DNA, 25 bp, Canis familiaris
gcactagccttcagaatctgctcct

SEQ ID NO: 103798 - DNA, 25 bp, Canis familiaris
gcactgaatctaccgatcttgtctc

SEQ ID NO: 103799 - DNA, 25 bp, Canis familiaris
gcacgagaaacacatttgtccactg

SEQ ID NO: 103800 - DNA, 25 bp, Canis familiaris
gcacgagggtcactgattttcccac

SEQ ID NO: 103801 - DNA, 25 bp, Canis familiaris
gcacgagaggctatttcttgactat

SEQ ID NO: 103802 - DNA, 25 bp, Canis familiaris
gcacgagaccgcatctacgtggctt

SEQ ID NO: 103803 - DNA, 25 bp, Canis familiaris
gcaccaccctgagatacggactatt

SEQ ID NO: 103804 - DNA, 25 bp, Canis familiaris
gcacgcacccttggaagagttctac

SEQ ID NO: 103805 - DNA, 25 bp, Canis familiaris
gcagccaccaattgagaaagcgttc

SEQ ID NO: 103806 - DNA, 25 bp, Canis familiaris
gcagccacaaagtagccaacgtaca

SEQ ID NO: 103807 - DNA, 25 bp, Canis familiaris
gcaaaaaatgtcacagccactacgg

SEQ ID NO: 103808 - DNA, 25 bp, Canis familiaris
gcacgaaacagatacaccctcaaac

SEQ ID NO: 103809 - DNA, 25 bp, Canis familiaris
gcacttaaacccaacggccaagaat

SEQ ID NO: 103810 - DNA, 25 bp, Canis familiaris
gcaccaaatcacgggactgtccaaa

SEQ ID NO: 103811 - DNA, 25 bp, Canis familiaris
gcagccaataacggagcactgcccc

SEQ ID NO: 103812 - DNA, 25 bp, Canis familiaris
gcaccaaatggcggatgacgccggt

SEQ ID NO: 103813 - DNA, 25 bp, Canis familiaris
gcactccgaggcggtggacgtgttc

SEQ ID NO: 103814 - DNA, 25 bp, Canis familiaris
gcacccgacggtggaacgtggttct

SEQ ID NO: 103815 - DNA, 25 bp, Canis familiaris
gcaccacaactgcttaaggctgggc

SEQ ID NO: 103816 - DNA, 25 bp, Canis familiaris
gcacccatacttgtaggaggtccct

SEQ ID NO: 103817 - DNA, 25 bp, Canis familiaris
gcacgaaactaattcgaggccccct

SEQ ID NO: 103818 - DNA, 25 bp, Canis familiaris
gcacgaaagaatttcagggcactgc

SEQ ID NO: 103819 - DNA, 25 bp, Canis familiaris
gcaccaacatgggcctgaggagtct

SEQ ID NO: 103820 - DNA, 25 bp, Canis familiaris
gcaccaagcatgaacagctgggacc

SEQ ID NO: 103821 - DNA, 25 bp, Canis familiaris
gcaccagaggattcacagcgaggcc

SEQ ID NO: 103822 - DNA, 25 bp, Canis familiaris
gcaccatgaagctttgagtgaggct

SEQ ID NO: 103823 - DNA, 25 bp, Canis familiaris
gcaccaggagcacggaggggtttgg

SEQ ID NO: 103824 - DNA, 25 bp, Canis familiaris
gcagccgggaggaggagcagttcgg

SEQ ID NO: 103825 - DNA, 25 bp, Canis familiaris
gcagcctcaggtcatgcagggagtt

SEQ ID NO: 103826 - DNA, 25 bp, Canis familiaris
gcagccctggcccaaaggaatttga

SEQ ID NO: 103827 - DNA, 25 bp, Canis familiaris
gcacccggctcacaagaggtagctg

SEQ ID NO: 103828 - DNA, 25 bp, Canis familiaris
gcaccggtacatcaagggcatcgtg

SEQ ID NO: 103829 - DNA, 25 bp, Canis familiaris
gcacctgagtcaaaaatggaacctg

SEQ ID NO: 103830 - DNA, 25 bp, Canis familiaris
gcacctactaaaatatggcatgatt

SEQ ID NO: 103831 - DNA, 25 bp, Canis familiaris
gcaccatgaaaatcttgagctgaat

SEQ ID NO: 103832 - DNA, 25 bp, Canis familiaris
gcaccatatgaacacttgccaagtg

SEQ ID NO: 103833 - DNA, 25 bp, Canis familiaris
gcaccaatgaagtctctccaggagg

SEQ ID NO: 103834 - DNA, 25 bp, Canis familiaris
gcaccaatagacttgctcaacacgg

SEQ ID NO: 103835 - DNA, 25 bp, Canis familiaris
gcaccagtcaagttgtgacaaagcc

SEQ ID NO: 103836 - DNA, 25 bp, Canis familiaris
gcaccttccaaggaggcaaacaaca

SEQ ID NO: 103837 - DNA, 25 bp, Canis familiaris
gcaccaccgacacaagcaaatgaac

SEQ ID NO: 103838 - DNA, 25 bp, Canis familiaris
gcaccccgactcgggcaacatgttc

SEQ ID NO: 103839 - DNA, 25 bp, Canis familiaris
gcacccgggcttggtaactgatgga

SEQ ID NO: 103840 - DNA, 25 bp, Canis familiaris
gcagcccgcaggttttgagcattag

SEQ ID NO: 103841 - DNA, 25 bp, Canis familiaris
gcagcccatgaggaagtttgcacat

SEQ ID NO: 103842 - DNA, 25 bp, Canis familiaris
gcaccctgaggtttatagcagcatt

SEQ ID NO: 103843 - DNA, 25 bp, Canis familiaris
gcacggtggtgatattggcacttct

SEQ ID NO: 103844 - DNA, 25 bp, Canis familiaris
gcacgagggtggttgctgcaaattc

SEQ ID NO: 103845 - DNA, 25 bp, Canis familiaris
gcacttgggctacttccacaatttg

SEQ ID NO: 103846 - DNA, 25 bp, Canis familiaris
gcactgtttataagtcccgattctg

SEQ ID NO: 103847 - DNA, 25 bp, Canis familiaris
gcactggtaatttgttcttattttt

SEQ ID NO: 103848 - DNA, 25 bp, Canis familiaris
gcactgtaaacttattttcatttct

SEQ ID NO: 103849 - DNA, 25 bp, Canis familiaris
gcacgtggcctttatatttacttct

SEQ ID NO: 103850 - DNA, 25 bp, Canis familiaris
gcactgtctgccttctaattatgac

SEQ ID NO: 103851 - DNA, 25 bp, Canis familiaris
gcacttgcattctccacagtgacac

SEQ ID NO: 103852 - DNA, 25 bp, Canis familiaris
gcacctgcatttagcggacgactgc

SEQ ID NO: 103853 - DNA, 25 bp, Canis familiaris
gcacctgctgtgtgggacacgtgct

SEQ ID NO: 103854 - DNA, 25 bp, Canis familiaris
gcagcgcactgtatgaggaggcctt

SEQ ID NO: 103855 - DNA, 25 bp, Canis familiaris
gcagccactgtcaatcaatggagtt

SEQ ID NO: 103856 - DNA, 25 bp, Canis familiaris
gcaccatggctcattctcagagtgt

SEQ ID NO: 103857 - DNA, 25 bp, Canis familiaris
gcagccttcaaaatgtagcgtgtcc

SEQ ID NO: 103858 - DNA, 25 bp, Canis familiaris
gcacctgtagaaaggattgtcatcc

SEQ ID NO: 103859 - DNA, 25 bp, Canis familiaris
gcagcccgacacagagatcgtcatc

SEQ ID NO: 103860 - DNA, 25 bp, Canis familiaris
gcagcgccgagtgagagtcagcttg

SEQ ID NO: 103861 - DNA, 25 bp, Canis familiaris
gcagccgggctggaagaggctagcg

SEQ ID NO: 103862 - DNA, 25 bp, Canis familiaris
gcacgctggcctgacaagagggcgc

SEQ ID NO: 103863 - DNA, 25 bp, Canis familiaris
gcagccgagccataaagagcagacc

SEQ ID NO: 103864 - DNA, 25 bp, Canis familiaris
gcacttggccatgcaaaggacagtt

SEQ ID NO: 103865 - DNA, 25 bp, Canis familiaris
gcactctctccagagcaggcaggag

SEQ ID NO: 103866 - DNA, 25 bp, Canis familiaris
gcaccttctcagccaagggctggca

SEQ ID NO: 103867 - DNA, 25 bp, Canis familiaris
gcaccatcttgcctaatggactaga

SEQ ID NO: 103868 - DNA, 25 bp, Canis familiaris
gcaccaactgcgtgcaggacgacac

SEQ ID NO: 103869 - DNA, 25 bp, Canis familiaris
gcaccacacaggcacaggggaacac

SEQ ID NO: 103870 - DNA, 25 bp, Canis familiaris
gcaccccgagttggtggaaaacgct

SEQ ID NO: 103871 - DNA, 25 bp, Canis familiaris
gcacctctgggggcgggaggagacc

SEQ ID NO: 103872 - DNA, 25 bp, Canis familiaris
gcaccggtggcgaggtcggtgccac

SEQ ID NO: 103873 - DNA, 25 bp, Canis familiaris
gcaccggtggcgaggtcggtgccac

SEQ ID NO: 103874 - DNA, 25 bp, Canis familiaris
gcaccggtggcgaggtcggtgccac

SEQ ID NO: 103875 - DNA, 25 bp, Canis familiaris
gcaccggtggcgaggtcggtgccac

SEQ ID NO: 103876 - DNA, 25 bp, Canis familiaris
gcacacggtggggaagccaggttct

SEQ ID NO: 103877 - DNA, 25 bp, Canis familiaris
gcaccaggttgccaagggaggcttt

SEQ ID NO: 103878 - DNA, 25 bp, Canis familiaris
gcaccaggtgaccagggagaggatg

SEQ ID NO: 103879 - DNA, 25 bp, Canis familiaris
gcacgagggaccttgagaggcagag

SEQ ID NO: 103880 - DNA, 25 bp, Canis familiaris
gcacgagcagaatctggagtccagg

SEQ ID NO: 103881 - DNA, 25 bp, Canis familiaris
gcacgagctaaagtgagtacccgtt

SEQ ID NO: 103882 - DNA, 25 bp, Canis familiaris
gcaccagctgaatggggaccacttt

SEQ ID NO: 103883 - DNA, 25 bp, Canis familiaris
gcagccagtgtcttcgggaacactc

SEQ ID NO: 103884 - DNA, 25 bp, Canis familiaris
gcagccgctgtctggggaagagcgg

SEQ ID NO: 103885 - DNA, 25 bp, Canis familiaris
gcacccaggcttctggaagactctg

SEQ ID NO: 103886 - DNA, 25 bp, Canis familiaris
gcacccgagctgggggagagaccgt

SEQ ID NO: 103887 - DNA, 25 bp, Canis familiaris
gcacccaagtttgacaagccctgtc

SEQ ID NO: 103888 - DNA, 25 bp, Canis familiaris
gcacccaagtttgacaagccctgtc

SEQ ID NO: 103889 - DNA, 25 bp, Canis familiaris
gcacccaagtttgacaagccctgtc

SEQ ID NO: 103890 - DNA, 25 bp, Canis familiaris
gcacatccaggtgaataaagccccc

SEQ ID NO: 103891 - DNA, 25 bp, Canis familiaris
gcactccaagcccagaagaagccac

SEQ ID NO: 103892 - DNA, 25 bp, Canis familiaris
gcacctaccctacatataccatgta

SEQ ID NO: 103893 - DNA, 25 bp, Canis familiaris
gcaccataaccatagattatcactt

SEQ ID NO: 103894 - DNA, 25 bp, Canis familiaris
gcagccaaactgaacacttgatctg

SEQ ID NO: 103895 - DNA, 25 bp, Canis familiaris
gcaccaaaatcaacgggactttcca

SEQ ID NO: 103896 - DNA, 25 bp, Canis familiaris
gcaccaaaatcaacgggactttcca

SEQ ID NO: 103897 - DNA, 25 bp, Canis familiaris
gcaccaaaatcaacgggactttcca

SEQ ID NO: 103898 - DNA, 25 bp, Canis familiaris
gcaccaaaatcaacgggactttcca

SEQ ID NO: 103899 - DNA, 25 bp, Canis familiaris
gcaccaaaatcaacgggactttcca

SEQ ID NO: 103900 - DNA, 25 bp, Canis familiaris
gcaccacaaatcaacgggactttcc

SEQ ID NO: 103901 - DNA, 25 bp, Canis familiaris
gcaccaataatcaacgcctgagttc

SEQ ID NO: 103902 - DNA, 25 bp, Canis familiaris
gcactcctagaaagcatccggttct

SEQ ID NO: 103903 - DNA, 25 bp, Canis familiaris
gcacctggaagtggtcccatgttca

SEQ ID NO: 103904 - DNA, 25 bp, Canis familiaris
gcactgtacaacggtccctatatga

SEQ ID NO: 103905 - DNA, 25 bp, Canis familiaris
gcacgagacaacacccgttaatggg

SEQ ID NO: 103906 - DNA, 25 bp, Canis familiaris
gcaccaaaaccctaccttatatgga

SEQ ID NO: 103907 - DNA, 25 bp, Canis familiaris
gcacgtaaccccaacttgtttgttg

SEQ ID NO: 103908 - DNA, 25 bp, Canis familiaris
gcacttttggtcctttttattgttg

SEQ ID NO: 103909 - DNA, 25 bp, Canis familiaris
gcacttattaggccaattattattt

SEQ ID NO: 103910 - DNA, 25 bp, Canis familiaris
gcactgttgtgagaccatgccttca

SEQ ID NO: 103911 - DNA, 25 bp, Canis familiaris
gcactgttgacacccacaggagata

SEQ ID NO: 103912 - DNA, 25 bp, Canis familiaris
gcacgtggtcctggacgacgaacca

SEQ ID NO: 103913 - DNA, 25 bp, Canis familiaris
gcacagcggtccggaagacgacctt

SEQ ID NO: 103914 - DNA, 25 bp, Canis familiaris
gcacctagcagcaggaaaccacctc

SEQ ID NO: 103915 - DNA, 25 bp, Canis familiaris
gcaccagagagcacaggaaccaccc

SEQ ID NO: 103916 - DNA, 25 bp, Canis familiaris
gcagccaggagctccgaaagactct

SEQ ID NO: 103917 - DNA, 25 bp, Canis familiaris
gcaccaggtgtcgcagactaactct

SEQ ID NO: 103918 - DNA, 25 bp, Canis familiaris
gcaccggcagctggtaacatacttc

SEQ ID NO: 103919 - DNA, 25 bp, Canis familiaris
gcacctagcacttttacacagcttc

SEQ ID NO: 103920 - DNA, 25 bp, Canis familiaris
gcacgatgcgattttaacacagttt

SEQ ID NO: 103921 - DNA, 25 bp, Canis familiaris
gcacgagcagatttcttataaccaa

SEQ ID NO: 103922 - DNA, 25 bp, Canis familiaris
gcactacgagatgctcttcaactcc

SEQ ID NO: 103923 - DNA, 25 bp, Canis familiaris
gcaccaagatcaacctcatctactc

SEQ ID NO: 103924 - DNA, 25 bp, Canis familiaris
gcaccgagaccgtattcaagctgca

SEQ ID NO: 103925 - DNA, 25 bp, Canis familiaris
gcaccgggctccttgtcagggagcc

SEQ ID NO: 103926 - DNA, 25 bp, Canis familiaris
gcaccagcaatgacctactcagggt

SEQ ID NO: 103927 - DNA, 25 bp, Canis familiaris
gcagccattagcatctactcagggc

SEQ ID NO: 103928 - DNA, 25 bp, Canis familiaris
gcacctatgcacacaggctgcaggg

SEQ ID NO: 103929 - DNA, 25 bp, Canis familiaris
gcactccagcctgggcgacagagcg

SEQ ID NO: 103930 - DNA, 25 bp, Canis familiaris
gcactcacatcctgtgcattaagga

SEQ ID NO: 103931 - DNA, 25 bp, Canis familiaris
gcactcacatcctgtgcattaagga

SEQ ID NO: 103932 - DNA, 25 bp, Canis familiaris
gcaccacatgctgggggttcagaga

SEQ ID NO: 103933 - DNA, 25 bp, Canis familiaris
gcacgcacatggggtgttttaatta

SEQ ID NO: 103934 - DNA, 25 bp, Canis familiaris
gcaccactggtggatttcctatttt

SEQ ID NO: 103935 - DNA, 25 bp, Canis familiaris
gcacccattctgtactactttgtta

SEQ ID NO: 103936 - DNA, 25 bp, Canis familiaris
gcacccattctgtgtttgtctgtat

SEQ ID NO: 103937 - DNA, 25 bp, Canis familiaris
gcacccctgcagttaatattcttat

SEQ ID NO: 103938 - DNA, 25 bp, Canis familiaris
gcaccccaagctgaaattcttctta

SEQ ID NO: 103939 - DNA, 25 bp, Canis familiaris
gcaccccataccatatttatcatct

SEQ ID NO: 103940 - DNA, 25 bp, Canis familiaris
gcacccctatattttctattcatat

SEQ ID NO: 103941 - DNA, 25 bp, Canis familiaris
gcaccttccttagtgttgattgccc

SEQ ID NO: 103942 - DNA, 25 bp, Canis familiaris
gcaccaccatttatgttgctgccac

SEQ ID NO: 103943 - DNA, 25 bp, Canis familiaris
gcaccagccttaagtgtctgagccc

SEQ ID NO: 103944 - DNA, 25 bp, Canis familiaris
gcacgagcgtgtgcgtgtggaagcc

SEQ ID NO: 103945 - DNA, 25 bp, Canis familiaris
gcaccaaggtcatggccaggagctc

SEQ ID NO: 103946 - DNA, 25 bp, Canis familiaris
gcacgaaggagcagatcgtggagat

SEQ ID NO: 103947 - DNA, 25 bp, Canis familiaris
gcacgagagcggggtcggcgtgagc

SEQ ID NO: 103948 - DNA, 25 bp, Canis familiaris
gcacgcaggcggggggggcgtgcgg

SEQ ID NO: 103949 - DNA, 25 bp, Canis familiaris
gcacgagccgggggaggcattgttc

SEQ ID NO: 103950 - DNA, 25 bp, Canis familiaris
gcaccagccttgttagaggcttgta

SEQ ID NO: 103951 - DNA, 25 bp, Canis familiaris
gcacccgattctccaagagcatttc

SEQ ID NO: 103952 - DNA, 25 bp, Canis familiaris
gcacccaatgtttatagcatcttta

SEQ ID NO: 103953 - DNA, 25 bp, Canis familiaris
gcacgagcacattttgaaccttcaa

SEQ ID NO: 103954 - DNA, 25 bp, Canis familiaris
gcacgaattctttgaagcgcacata

SEQ ID NO: 103955 - DNA, 25 bp, Canis familiaris
gcacgcggttattacaggcaagaag

SEQ ID NO: 103956 - DNA, 25 bp, Canis familiaris
gcactgcgggtctaaaggtatatac

SEQ ID NO: 103957 - DNA, 25 bp, Canis familiaris
taacggggctaatgttttcctccag

SEQ ID NO: 103958 - DNA, 25 bp, Canis familiaris
gaacgtgggaaatcttttaccagtg

SEQ ID NO: 103959 - DNA, 25 bp, Canis familiaris
gaaggggaaatgtgtttatcctcct

SEQ ID NO: 103960 - DNA, 25 bp, Canis familiaris
gcacggagtatctgttgtttttgtc

SEQ ID NO: 103961 - DNA, 25 bp, Canis familiaris
gcacggaaaatacagcgtttcttgt

SEQ ID NO: 103962 - DNA, 25 bp, Canis familiaris
gacggttaaagccaacacttccagt

SEQ ID NO: 103963 - DNA, 25 bp, Canis familiaris
gcacaagggacgacgagaacttccg

SEQ ID NO: 103964 - DNA, 25 bp, Canis familiaris
gcacattagacacgacgcgaacctt

SEQ ID NO: 103965 - DNA, 25 bp, Canis familiaris
gcacttctgaccacagcagtttcaa

SEQ ID NO: 103966 - DNA, 25 bp, Canis familiaris
gcacggctaccatgaagtctggcaa

SEQ ID NO: 103967 - DNA, 25 bp, Canis familiaris
gcacggctaccatgaagtctggcaa

SEQ ID NO: 103968 - DNA, 25 bp, Canis familiaris
gcacggccaccatgaagtctggcaa

SEQ ID NO: 103969 - DNA, 25 bp, Canis familiaris
gcaccacacacgttacattctggaa

SEQ ID NO: 103970 - DNA, 25 bp, Canis familiaris
gcaccaccacgaaattgttaggaat

SEQ ID NO: 103971 - DNA, 25 bp, Canis familiaris
gcaccaccagggcaggttggctgcg

SEQ ID NO: 103972 - DNA, 25 bp, Canis familiaris
gcaccatccttggaacagttgcggc

SEQ ID NO: 103973 - DNA, 25 bp, Canis familiaris
gcaccacgctcatgatcaagtttga

SEQ ID NO: 103974 - DNA, 25 bp, Canis familiaris
gcacctcgctgcaagaaagagttaa

SEQ ID NO: 103975 - DNA, 25 bp, Canis familiaris
gcacctcatgcacatggcagcaggg

SEQ ID NO: 103976 - DNA, 25 bp, Canis familiaris
gcacctcagagcttgtcctggtggc

SEQ ID NO: 103977 - DNA, 25 bp, Canis familiaris
gcacctcagacaggcatcgtggatg

SEQ ID NO: 103978 - DNA, 25 bp, Canis familiaris
gcacgacaagcagctcttcgaggac

SEQ ID NO: 103979 - DNA, 25 bp, Canis familiaris
gcaccaaagataggtcttgcggtcc

SEQ ID NO: 103980 - DNA, 25 bp, Canis familiaris
gcaccaactaaggtctgtggcaggc

SEQ ID NO: 103981 - DNA, 25 bp, Canis familiaris
gcactgaagtaaaggctggacgacc

SEQ ID NO: 103982 - DNA, 25 bp, Canis familiaris
gcacgagaggaagccggacagaggg

SEQ ID NO: 103983 - DNA, 25 bp, Canis familiaris
gcacgataaccagctcgaggcaagg

SEQ ID NO: 103984 - DNA, 25 bp, Canis familiaris
gcacgagatgaccagtatccagagc

SEQ ID NO: 103985 - DNA, 25 bp, Canis familiaris
gcacagttggccgtattctagtatc

SEQ ID NO: 103986 - DNA, 25 bp, Canis familiaris
gcacaaggggaggttcgcagtcatc

SEQ ID NO: 103987 - DNA, 25 bp, Canis familiaris
gcacattgtaagtgtttgactgatc

SEQ ID NO: 103988 - DNA, 25 bp, Canis familiaris
gcacatttaatttatctttcttcct

SEQ ID NO: 103989 - DNA, 25 bp, Canis familiaris
gcacttggaaagtatttttacctgg

SEQ ID NO: 103990 - DNA, 25 bp, Canis familiaris
gcacttgggacacattctgttcctt

SEQ ID NO: 103991 - DNA, 25 bp, Canis familiaris
gcacttggcagagaaccacttccta

SEQ ID NO: 103992 - DNA, 25 bp, Canis familiaris
gcactgatggaaaatcaccacggcc

SEQ ID NO: 103993 - DNA, 25 bp, Canis familiaris
gcactgtgggggtaccagagcactc

SEQ ID NO: 103994 - DNA, 25 bp, Canis familiaris
gcactcgcggggaacaaggcagacc

SEQ ID NO: 103995 - DNA, 25 bp, Canis familiaris
gcactcaggtgaggatacacggcga

SEQ ID NO: 103996 - DNA, 25 bp, Canis familiaris
gcacctgtctgcggaacacagtgcc

SEQ ID NO: 103997 - DNA, 25 bp, Canis familiaris
gcacttgatgctctggacaaggccc

SEQ ID NO: 103998 - DNA, 25 bp, Canis familiaris
gcactggtttataacatatcttacc

SEQ ID NO: 103999 - DNA, 25 bp, Canis familiaris
gcacgttttgatacgatgcttatat

SEQ ID NO: 104000 - DNA, 25 bp, Canis familiaris
gcacgatgttttgcccttataggga

SEQ ID NO: 104001 - DNA, 25 bp, Canis familiaris
gcacggttttactcctagaagctgg

SEQ ID NO: 104002 - DNA, 25 bp, Canis familiaris
gcacaggtgattcaacacccgcaac

SEQ ID NO: 104003 - DNA, 25 bp, Canis familiaris
gcaaaggcattccaacaactgtaac

SEQ ID NO: 104004 - DNA, 25 bp, Canis familiaris
gcaaatatgcatttcccaacttgaa

SEQ ID NO: 104005 - DNA, 25 bp, Canis familiaris
gcaaatacagaagggccggtgaaaa

SEQ ID NO: 104006 - DNA, 25 bp, Canis familiaris
gcaacacacgactggcaaggcttaa

SEQ ID NO: 104007 - DNA, 25 bp, Canis familiaris
gcaaaccttagagaagccctacagc

SEQ ID NO: 104008 - DNA, 25 bp, Canis familiaris
gcaaattttcacagaggactttcag

SEQ ID NO: 104009 - DNA, 25 bp, Canis familiaris
gcacaattgacttcccggaatttct

SEQ ID NO: 104010 - DNA, 25 bp, Canis familiaris
gcaccattgcggtcgcgcggatcat

SEQ ID NO: 104011 - DNA, 25 bp, Canis familiaris
gcaccactggtattgtcatggactc

SEQ ID NO: 104012 - DNA, 25 bp, Canis familiaris
gcaccactctggattatgtgaccct

SEQ ID NO: 104013 - DNA, 25 bp, Canis familiaris
gcacgagcttgtacatatatggcca

SEQ ID NO: 104014 - DNA, 25 bp, Canis familiaris
gcacgagtggatatcatcacagctc

SEQ ID NO: 104015 - DNA, 25 bp, Canis familiaris
gcactggtggcattcatcatggagc

SEQ ID NO: 104016 - DNA, 25 bp, Canis familiaris
gcactcttgaggacatcaggaccag

SEQ ID NO: 104017 - DNA, 25 bp, Canis familiaris
gcacctgggggactgcaggccaggc

SEQ ID NO: 104018 - DNA, 25 bp, Canis familiaris
gcacctgtgagggagcacaggcacc

SEQ ID NO: 104019 - DNA, 25 bp, Canis familiaris
gcacgccagaaggatgccgcagacc

SEQ ID NO: 104020 - DNA, 25 bp, Canis familiaris
gcacgcaagggaggctggcagacaa

SEQ ID NO: 104021 - DNA, 25 bp, Canis familiaris
gcaccacgcggtgcttgagcagatc

SEQ ID NO: 104022 - DNA, 25 bp, Canis familiaris
gcaccatcagggaccttgcagtggc

SEQ ID NO: 104023 - DNA, 25 bp, Canis familiaris
gcaccatcacggagcgcatgatgtg

SEQ ID NO: 104024 - DNA, 25 bp, Canis familiaris
gcaaagcagtggaggatggggggaa

SEQ ID NO: 104025 - DNA, 25 bp, Canis familiaris
gcacaacgaggaccagatggccgtg

SEQ ID NO: 104026 - DNA, 25 bp, Canis familiaris
gcacagtgctaggtgccacggggtg

SEQ ID NO: 104027 - DNA, 25 bp, Canis familiaris
gcacactggagggtcacggggtgag

SEQ ID NO: 104028 - DNA, 25 bp, Canis familiaris
gcaagcgggtcaacacgaagcgtag

SEQ ID NO: 104029 - DNA, 25 bp, Canis familiaris
gcacggcgactaccatcgaaagttg

SEQ ID NO: 104030 - DNA, 25 bp, Canis familiaris
gcacggcgagaaccaccaatagtgt

SEQ ID NO: 104031 - DNA, 25 bp, Canis familiaris
gcactggctcacaaggaccacaagg

SEQ ID NO: 104032 - DNA, 25 bp, Canis familiaris
gcactggcccattggaggccatcgc

SEQ ID NO: 104033 - DNA, 25 bp, Canis familiaris
gcactgtgggctgcgaggcaacagg

SEQ ID NO: 104034 - DNA, 25 bp, Canis familiaris
gcactgagggccctggtcaaaggaa

SEQ ID NO: 104035 - DNA, 25 bp, Canis familiaris
gcacgagcatgatcctgtggataag

SEQ ID NO: 104036 - DNA, 25 bp, Canis familiaris
gcacccaatccctctgaagagttca

SEQ ID NO: 104037 - DNA, 25 bp, Canis familiaris
gcaccagacccctgtgaagaaactg

SEQ ID NO: 104038 - DNA, 25 bp, Canis familiaris
gcactacccccattaaagggcagct

SEQ ID NO: 104039 - DNA, 25 bp, Canis familiaris
gcactccggccttgtcaaagagcca

SEQ ID NO: 104040 - DNA, 25 bp, Canis familiaris
gcacctgtggctcagtcagaagagc

SEQ ID NO: 104041 - DNA, 25 bp, Canis familiaris
gcaccattcattcagatggagccac

SEQ ID NO: 104042 - DNA, 25 bp, Canis familiaris
gcacgatatctgatttgttgcccga

SEQ ID NO: 104043 - DNA, 25 bp, Canis familiaris
gcactacttcaaatcagttgcccag

SEQ ID NO: 104044 - DNA, 25 bp, Canis familiaris
gcaccctccagaaatctgtccaaaa

SEQ ID NO: 104045 - DNA, 25 bp, Canis familiaris
gcaccccgagctgatgtgctagaac

SEQ ID NO: 104046 - DNA, 25 bp, Canis familiaris
gcacccggagctaggtgccagcaac

SEQ ID NO: 104047 - DNA, 25 bp, Canis familiaris
gcaccgccgatatggagacagatac

SEQ ID NO: 104048 - DNA, 25 bp, Canis familiaris
gcaccatccacttcgtgcagaaggg

SEQ ID NO: 104049 - DNA, 25 bp, Canis familiaris
gcacacctcacatctggaagcagag

SEQ ID NO: 104050 - DNA, 25 bp, Canis familiaris
gcaccatccagatgctgctgaacca

SEQ ID NO: 104051 - DNA, 25 bp, Canis familiaris
gcaccatgctatcacagctgaagac

SEQ ID NO: 104052 - DNA, 25 bp, Canis familiaris
gcacctctgctgatcatgtgaatga

SEQ ID NO: 104053 - DNA, 25 bp, Canis familiaris
gcaccttgtcagatgtgagtgagtg

SEQ ID NO: 104054 - DNA, 25 bp, Canis familiaris
gcactgtgtggctttgggtggggtc

SEQ ID NO: 104055 - DNA, 25 bp, Canis familiaris
gcactgtgtccccttgggattgagt

SEQ ID NO: 104056 - DNA, 25 bp, Canis familiaris
gcactgtgtccaccttagagtcaag

SEQ ID NO: 104057 - DNA, 25 bp, Canis familiaris
gcacctgctccagctaagactaatg

SEQ ID NO: 104058 - DNA, 25 bp, Canis familiaris
gcacctgctccagctaagactaatg

SEQ ID NO: 104059 - DNA, 25 bp, Canis familiaris
gcacctgctccagctaagactaatg

SEQ ID NO: 104060 - DNA, 25 bp, Canis familiaris
gcacctgcccaactaatactgattt

SEQ ID NO: 104061 - DNA, 25 bp, Canis familiaris
gcaccccagaactattaaatcttca

SEQ ID NO: 104062 - DNA, 25 bp, Canis familiaris
gcactgcccaaagatgggaatctct

SEQ ID NO: 104063 - DNA, 25 bp, Canis familiaris
gcaccctccaagacaggagactctc

SEQ ID NO: 104064 - DNA, 25 bp, Canis familiaris
gcacccgagcaagctgcagagtacc

SEQ ID NO: 104065 - DNA, 25 bp, Canis familiaris
gcacctgcggcaatttggcgtgacc

SEQ ID NO: 104066 - DNA, 25 bp, Canis familiaris
gcacctgcacggacttggaggactc

SEQ ID NO: 104067 - DNA, 25 bp, Canis familiaris
gcaccgagcatgcatgcatgttggg

SEQ ID NO: 104068 - DNA, 25 bp, Canis familiaris
gcacatgggctgctatggtgatcgg

SEQ ID NO: 104069 - DNA, 25 bp, Canis familiaris
gcacagcgccagctgattgttcggg

SEQ ID NO: 104070 - DNA, 25 bp, Canis familiaris
gcaccccagcggtgacatggtggct

SEQ ID NO: 104071 - DNA, 25 bp, Canis familiaris
gcacccatccgttaaaagtatgttc

SEQ ID NO: 104072 - DNA, 25 bp, Canis familiaris
gcactaggcctttaaaatttgttca

SEQ ID NO: 104073 - DNA, 25 bp, Canis familiaris
gcacttgagactttcaaaacctgtc

SEQ ID NO: 104074 - DNA, 25 bp, Canis familiaris
gcacagggactataagttcttgtac

SEQ ID NO: 104075 - DNA, 25 bp, Canis familiaris
gaagtcgtcatatgaacccaggtcc

SEQ ID NO: 104076 - DNA, 25 bp, Canis familiaris
gcaaatcggcaaagtagtccaggtt

SEQ ID NO: 104077 - DNA, 25 bp, Canis familiaris
gcaactcccaaatcgtcatcagggc

SEQ ID NO: 104078 - DNA, 25 bp, Canis familiaris
gcaaccccgatggagagtccggact

SEQ ID NO: 104079 - DNA, 25 bp, Canis familiaris
gaacctcttggccaaccttggccaa

SEQ ID NO: 104080 - DNA, 25 bp, Canis familiaris
gcaacttagtttcacagcttggcct

SEQ ID NO: 104081 - DNA, 25 bp, Canis familiaris
gcaccattaggaagaacacttggcc

SEQ ID NO: 104082 - DNA, 25 bp, Canis familiaris
gcacaattaggaagaacattggcct

SEQ ID NO: 104083 - DNA, 25 bp, Canis familiaris
gcacggtggccaagcaactggtgcc

SEQ ID NO: 104084 - DNA, 25 bp, Canis familiaris
gcacgtgtgcgcgcaaacatgcaga

SEQ ID NO: 104085 - DNA, 25 bp, Canis familiaris
gcacgctgatcagaaacctgcagaa

SEQ ID NO: 104086 - DNA, 25 bp, Canis familiaris
gcacctgtgcaggcctacctgcaca

SEQ ID NO: 104087 - DNA, 25 bp, Canis familiaris
gcacctgtgcaggcctacctgcaca

SEQ ID NO: 104088 - DNA, 25 bp, Canis familiaris
gcaccttcgtcagtatgagctgctc

SEQ ID NO: 104089 - DNA, 25 bp, Canis familiaris
gcacctccagtaggagtgtgcacct

SEQ ID NO: 104090 - DNA, 25 bp, Canis familiaris
gcaccctcactgtcagagtggggct

SEQ ID NO: 104091 - DNA, 25 bp, Canis familiaris
gcaacacagcatttcggtggggcta

SEQ ID NO: 104092 - DNA, 25 bp, Canis familiaris
gcaacaagtgatcctgagtccagtg

SEQ ID NO: 104093 - DNA, 25 bp, Canis familiaris
gcaaaaggagctgacaatcatgtac

SEQ ID NO: 104094 - DNA, 25 bp, Canis familiaris
gcacctagtgcagtacttgatattt

SEQ ID NO: 104095 - DNA, 25 bp, Canis familiaris
gcactctttgcagacttgtgcacat

SEQ ID NO: 104096 - DNA, 25 bp, Canis familiaris
gcacacaaagcagactattcctaca

SEQ ID NO: 104097 - DNA, 25 bp, Canis familiaris
gcacacactccaactattaccttgc

SEQ ID NO: 104098 - DNA, 25 bp, Canis familiaris
gcacccatacatatcttcacacgtg

SEQ ID NO: 104099 - DNA, 25 bp, Canis familiaris
gcacccacaatgttattagccgcag

SEQ ID NO: 104100 - DNA, 25 bp, Canis familiaris
gcaccgcaagtgcttctaggcggac

SEQ ID NO: 104101 - DNA, 25 bp, Canis familiaris
gcacgaggagccctttggggtgatc

SEQ ID NO: 104102 - DNA, 25 bp, Canis familiaris
gcaagaggcagggttgggggggctt

SEQ ID NO: 104103 - DNA, 25 bp, Canis familiaris
gcaaaggcataagctggtggggggg

SEQ ID NO: 104104 - DNA, 25 bp, Canis familiaris
gcacgagcctaggttctgtggggag

SEQ ID NO: 104105 - DNA, 25 bp, Canis familiaris
gcacgagccgggatttgaggagctc

SEQ ID NO: 104106 - DNA, 25 bp, Canis familiaris
gcacgagatttggatttggggagct

SEQ ID NO: 104107 - DNA, 25 bp, Canis familiaris
gcacgagtgtagattggccagagag

SEQ ID NO: 104108 - DNA, 25 bp, Canis familiaris
gcacgaatgtcccctggaaggtggg

SEQ ID NO: 104109 - DNA, 25 bp, Canis familiaris
gcaagacactccacatggacacggg

SEQ ID NO: 104110 - DNA, 25 bp, Canis familiaris
gcaatgcatcctgcaccaccaactg

SEQ ID NO: 104111 - DNA, 25 bp, Canis familiaris
gcaagatgcagttcacacccagtgc

SEQ ID NO: 104112 - DNA, 25 bp, Canis familiaris
gcaatatgagcttatagactatcca

SEQ ID NO: 104113 - DNA, 25 bp, Canis familiaris
gaatgtggaccaagcagattgcaga

SEQ ID NO: 104114 - DNA, 25 bp, Canis familiaris
gcacgatgggctcagctttcagaag

SEQ ID NO: 104115 - DNA, 25 bp, Canis familiaris
gcacgtgtggagagctgttctgtga

SEQ ID NO: 104116 - DNA, 25 bp, Canis familiaris
gcacgacatattgcttttctgtgaa

SEQ ID NO: 104117 - DNA, 25 bp, Canis familiaris
gcacgagcactaacctttttaaaat

SEQ ID NO: 104118 - DNA, 25 bp, Canis familiaris
gcaaagccttaactctttaccagcc

SEQ ID NO: 104119 - DNA, 25 bp, Canis familiaris
gcacaactctggtcatttttcaagc

SEQ ID NO: 104120 - DNA, 25 bp, Canis familiaris
gaatacctaccatttacatcgacat

SEQ ID NO: 104121 - DNA, 25 bp, Canis familiaris
gcaaacctattgtaagccatggact

SEQ ID NO: 104122 - DNA, 25 bp, Canis familiaris
gcaaacctattgtaagccatggact

SEQ ID NO: 104123 - DNA, 25 bp, Canis familiaris
gcaaaaatccggcaccatggtcatg

SEQ ID NO: 104124 - DNA, 25 bp, Canis familiaris
gaaattacggcgcacgtcacatcag

SEQ ID NO: 104125 - DNA, 25 bp, Canis familiaris
gaacagctacgggagccagtactac

SEQ ID NO: 104126 - DNA, 25 bp, Canis familiaris
gcaagcgtccaagaggcgaacattc

SEQ ID NO: 104127 - DNA, 25 bp, Canis familiaris
gcaaaggcccagcagccaagagtta

SEQ ID NO: 104128 - DNA, 25 bp, Canis familiaris
gcaacaactcccaagccaagttttt

SEQ ID NO: 104129 - DNA, 25 bp, Canis familiaris
gaagaaacccgtcacactgttttgt

SEQ ID NO: 104130 - DNA, 25 bp, Canis familiaris
tctaattacccgtgtcacctttgtc

SEQ ID NO: 104131 - DNA, 25 bp, Canis familiaris
tcaaaattcctggaaggacctttgg

SEQ ID NO: 104132 - DNA, 25 bp, Canis familiaris
gcaaagttccaataagaccttttca

SEQ ID NO: 104133 - DNA, 25 bp, Canis familiaris
gcaagaacgccttaaaactacctgt

SEQ ID NO: 104134 - DNA, 25 bp, Canis familiaris
gcaaaacccacagaaactcatcaca

SEQ ID NO: 104135 - DNA, 25 bp, Canis familiaris
gcacatcagaccagcgtaaataccc

SEQ ID NO: 104136 - DNA, 25 bp, Canis familiaris
gcaaatgtcgtccgtaatcatgtgc

SEQ ID NO: 104137 - DNA, 25 bp, Canis familiaris
gcaagcgtctgggttcaaatgatta

SEQ ID NO: 104138 - DNA, 25 bp, Canis familiaris
gcacgagctcttgcttcaacagtgt

SEQ ID NO: 104139 - DNA, 25 bp, Canis familiaris
gcacgagctttgctccagtcaatgt

SEQ ID NO: 104140 - DNA, 25 bp, Canis familiaris
gcacgactgttgctcagagatttta

SEQ ID NO: 104141 - DNA, 25 bp, Canis familiaris
gcacgcatgtgcagtggctgaggga

SEQ ID NO: 104142 - DNA, 25 bp, Canis familiaris
gcacgaggagggccagagaggaaac

SEQ ID NO: 104143 - DNA, 25 bp, Canis familiaris
gcacgtgggcgctgcaagggaagaa

SEQ ID NO: 104144 - DNA, 25 bp, Canis familiaris
gcacgtgcacggtggcaggtgcaag

SEQ ID NO: 104145 - DNA, 25 bp, Canis familiaris
gcaccctgtgagctggcagggctgg

SEQ ID NO: 104146 - DNA, 25 bp, Canis familiaris
gcacccttgcactggaggatcttga

SEQ ID NO: 104147 - DNA, 25 bp, Canis familiaris
gcaaaccatgcttgtggggatcttc

SEQ ID NO: 104148 - DNA, 25 bp, Canis familiaris
gcacgagccagcttggggtggcttg

SEQ ID NO: 104149 - DNA, 25 bp, Canis familiaris
gcacgagcctttggcttgggtcatg

SEQ ID NO: 104150 - DNA, 25 bp, Canis familiaris
gcacgaggctttgcagttcgatcta

SEQ ID NO: 104151 - DNA, 25 bp, Canis familiaris
gcacgagcggtggcacagtagcgac

SEQ ID NO: 104152 - DNA, 25 bp, Canis familiaris
gcacctgtgagtgctcctagcagac

SEQ ID NO: 104153 - DNA, 25 bp, Canis familiaris
gcacttgggtgtgcacatacacaca

SEQ ID NO: 104154 - DNA, 25 bp, Canis familiaris
gcactctgcagtttgaaaagcactc

SEQ ID NO: 104155 - DNA, 25 bp, Canis familiaris
gcaccgcttttatttgagagacttc

SEQ ID NO: 104156 - DNA, 25 bp, Canis familiaris
gcacccctctatttataggagcact

SEQ ID NO: 104157 - DNA, 25 bp, Canis familiaris
gcacccctatatttatagcagcaat

SEQ ID NO: 104158 - DNA, 25 bp, Canis familiaris
gcacccatgttttgtcagcaggaag

SEQ ID NO: 104159 - DNA, 25 bp, Canis familiaris
gcacacagcagcactactacgagaa

SEQ ID NO: 104160 - DNA, 25 bp, Canis familiaris
gcacacagcatccatgtcagtgaca

SEQ ID NO: 104161 - DNA, 25 bp, Canis familiaris
gcacactccaggtcagatgctgcag

SEQ ID NO: 104162 - DNA, 25 bp, Canis familiaris
gcacagtccctgggatctgatcctg

SEQ ID NO: 104163 - DNA, 25 bp, Canis familiaris
gcacatgcattttgggttgattctt

SEQ ID NO: 104164 - DNA, 25 bp, Canis familiaris
gcactgacatactggttcatgtttc

SEQ ID NO: 104165 - DNA, 25 bp, Canis familiaris
gcacgcgcataatggggcatctggt

SEQ ID NO: 104166 - DNA, 25 bp, Canis familiaris
gcacgcgcactgaaggcagttctgc

SEQ ID NO: 104167 - DNA, 25 bp, Canis familiaris
gcactgcctgataaggagagcttcc

SEQ ID NO: 104168 - DNA, 25 bp, Canis familiaris
gcacgtcttcattggccacttgtgc

SEQ ID NO: 104169 - DNA, 25 bp, Canis familiaris
gcactgtcctatgtgacctggagca

SEQ ID NO: 104170 - DNA, 25 bp, Canis familiaris
gcactgacctgaaaccctgtgataa

SEQ ID NO: 104171 - DNA, 25 bp, Canis familiaris
gcacgaggagatgactccttcaaca

SEQ ID NO: 104172 - DNA, 25 bp, Canis familiaris
gcacgagtggatgtcacccatatgc

SEQ ID NO: 104173 - DNA, 25 bp, Canis familiaris
gcactaatgcgtctcacacatattc

SEQ ID NO: 104174 - DNA, 25 bp, Canis familiaris
gcacgatatgcgtgtccatccttac

SEQ ID NO: 104175 - DNA, 25 bp, Canis familiaris
gcactaattgtgctgttccttatgc

SEQ ID NO: 104176 - DNA, 25 bp, Canis familiaris
gcactgagtggggcattttctttct

SEQ ID NO: 104177 - DNA, 25 bp, Canis familiaris
gcactgtatccaagttttttgatct

SEQ ID NO: 104178 - DNA, 25 bp, Canis familiaris
gcacttatgtcgctcttttgtacgc

SEQ ID NO: 104179 - DNA, 25 bp, Canis familiaris
gcactttgatcacatttctaagcac

SEQ ID NO: 104180 - DNA, 25 bp, Canis familiaris
gcacatgttagttttctatacagca

SEQ ID NO: 104181 - DNA, 25 bp, Canis familiaris
gcactgttaaatttccatagctagc

SEQ ID NO: 104182 - DNA, 25 bp, Canis familiaris
gcactattacaagccctgacatgag

SEQ ID NO: 104183 - DNA, 25 bp, Canis familiaris
gcacttttacaagccgcaaaggcag

SEQ ID NO: 104184 - DNA, 25 bp, Canis familiaris
gcacttttataagtcatcgtatatg

SEQ ID NO: 104185 - DNA, 25 bp, Canis familiaris
gcactttaacagctgcatgggctat

SEQ ID NO: 104186 - DNA, 25 bp, Canis familiaris
gcactgttgaacactgagattctat

SEQ ID NO: 104187 - DNA, 25 bp, Canis familiaris
gcactttatatcacagagccctgta

SEQ ID NO: 104188 - DNA, 25 bp, Canis familiaris
gcactgtctggagagcaggctactt

SEQ ID NO: 104189 - DNA, 25 bp, Canis familiaris
gcacatcgtggtgagctggatgatc

SEQ ID NO: 104190 - DNA, 25 bp, Canis familiaris
gcaccgctgagaaagctgtatttcc

SEQ ID NO: 104191 - DNA, 25 bp, Canis familiaris
gcaagcagctggaacggaatttggc

SEQ ID NO: 104192 - DNA, 25 bp, Canis familiaris
gcacagaaggagcgcgactttgagg

SEQ ID NO: 104193 - DNA, 25 bp, Canis familiaris
gcacaagcggcacaggggtatggga

SEQ ID NO: 104194 - DNA, 25 bp, Canis familiaris
gcaaaatgaacctgggttggctacc

SEQ ID NO: 104195 - DNA, 25 bp, Canis familiaris
gcaaataaaaaagcgtcgtgtcctc

SEQ ID NO: 104196 - DNA, 25 bp, Canis familiaris
gcacagtagaactaatcacgtagta

SEQ ID NO: 104197 - DNA, 25 bp, Canis familiaris
gcacgtgagaaatgcacagatgggt

SEQ ID NO: 104198 - DNA, 25 bp, Canis familiaris
gcacgtgaaacatgaactggctgaa

SEQ ID NO: 104199 - DNA, 25 bp, Canis familiaris
gcacaggaaacactactcttgctca

SEQ ID NO: 104200 - DNA, 25 bp, Canis familiaris
gcacgagcaaaatagcaatctgtac

SEQ ID NO: 104201 - DNA, 25 bp, Canis familiaris
gcacgagattaagcatgcctcattt

SEQ ID NO: 104202 - DNA, 25 bp, Canis familiaris
gcacagaagtaattccttccttttg

SEQ ID NO: 104203 - DNA, 25 bp, Canis familiaris
gcaagggtcttaggtatttttagtg

SEQ ID NO: 104204 - DNA, 25 bp, Canis familiaris
gcaacggcactaactctaacttatc

SEQ ID NO: 104205 - DNA, 25 bp, Canis familiaris
gcaagggccataaacctacttgtgg

SEQ ID NO: 104206 - DNA, 25 bp, Canis familiaris
gcacaggttccaatatactcctttg

SEQ ID NO: 104207 - DNA, 25 bp, Canis familiaris
gcacattgcagatactaacccttgg

SEQ ID NO: 104208 - DNA, 25 bp, Canis familiaris
gcactgggcagatctagaccgcgtg

SEQ ID NO: 104209 - DNA, 25 bp, Canis familiaris
gcacgagagagctctgtgaccagcg

SEQ ID NO: 104210 - DNA, 25 bp, Canis familiaris
gcactgaggcagtctcgtcaaacgg

SEQ ID NO: 104211 - DNA, 25 bp, Canis familiaris
gcacgaggcgtgacgttacgcgtga

SEQ ID NO: 104212 - DNA, 25 bp, Canis familiaris
gcacgaggttgtcatgtaagtatag

SEQ ID NO: 104213 - DNA, 25 bp, Canis familiaris
gcacgaggtttttgctcgatgctta

SEQ ID NO: 104214 - DNA, 25 bp, Canis familiaris
gcacgcaggatctgatgcgcggagc

SEQ ID NO: 104215 - DNA, 25 bp, Canis familiaris
gcacgaggatcatggctgataaccc

SEQ ID NO: 104216 - DNA, 25 bp, Canis familiaris
gcacggacagtgctgcgtatcaaca

SEQ ID NO: 104217 - DNA, 25 bp, Canis familiaris
gcactgcgacttcgtggtgatcgac

SEQ ID NO: 104218 - DNA, 25 bp, Canis familiaris
gcactggaactgctgatggctgcga

SEQ ID NO: 104219 - DNA, 25 bp, Canis familiaris
gcacatgcagaactacacggtcgtc

SEQ ID NO: 104220 - DNA, 25 bp, Canis familiaris
gcacacagagacacatgggcgcatg

SEQ ID NO: 104221 - DNA, 25 bp, Canis familiaris
gcacgctggatgatgtgctgcggct

SEQ ID NO: 104222 - DNA, 25 bp, Canis familiaris
gcacgctgaatgatggtgctgcggc

SEQ ID NO: 104223 - DNA, 25 bp, Canis familiaris
gcactgggcatcatagtctcctgcc

SEQ ID NO: 104224 - DNA, 25 bp, Canis familiaris
gcacgcaggctgatgagttgcccgc

SEQ ID NO: 104225 - DNA, 25 bp, Canis familiaris
gcacgaggtgcagagtcagcacctg

SEQ ID NO: 104226 - DNA, 25 bp, Canis familiaris
gcacgagggagaattcagcaagctg

SEQ ID NO: 104227 - DNA, 25 bp, Canis familiaris
gcacgaggccagatctgcagacggc

SEQ ID NO: 104228 - DNA, 25 bp, Canis familiaris
gcacgggccatgaactggcttgcgg

SEQ ID NO: 104229 - DNA, 25 bp, Canis familiaris
gcacgcgcgctacactgactggctc

SEQ ID NO: 104230 - DNA, 25 bp, Canis familiaris
gcacgagcgccactgaagatctggt

SEQ ID NO: 104231 - DNA, 25 bp, Canis familiaris
gcacgagctacgcagatgacatgga

SEQ ID NO: 104232 - DNA, 25 bp, Canis familiaris
gcacggtcatcgaggacatgctggc

SEQ ID NO: 104233 - DNA, 25 bp, Canis familiaris
gcacgagtccagacgctaagatggc

SEQ ID NO: 104234 - DNA, 25 bp, Canis familiaris
gcacccaccagcagattgcaatggc

SEQ ID NO: 104235 - DNA, 25 bp, Canis familiaris
gcacccacatcctgtgcatcaagga

SEQ ID NO: 104236 - DNA, 25 bp, Canis familiaris
gcacccacattctgagtcacaaaga

SEQ ID NO: 104237 - DNA, 25 bp, Canis familiaris
gcacaaccattcacgaaaatggcac

SEQ ID NO: 104238 - DNA, 25 bp, Canis familiaris
gcacgcgtgcacaagggaaagggcc

SEQ ID NO: 104239 - DNA, 25 bp, Canis familiaris
gcacggtgccgggagagtagtagcc

SEQ ID NO: 104240 - DNA, 25 bp, Canis familiaris
gcacggaccctggagaattcgagct

SEQ ID NO: 104241 - DNA, 25 bp, Canis familiaris
gcacgagagcccgaggaagaaggcg

SEQ ID NO: 104242 - DNA, 25 bp, Canis familiaris
gcacagcagacatcccgaaggggag

SEQ ID NO: 104243 - DNA, 25 bp, Canis familiaris
gcacgcatgagcaggggaaggggca

SEQ ID NO: 104244 - DNA, 25 bp, Canis familiaris
gcacgagacctgcagccaaggtggt

SEQ ID NO: 104245 - DNA, 25 bp, Canis familiaris
gcacgagagcgccgagagcgatggg

SEQ ID NO: 104246 - DNA, 25 bp, Canis familiaris
gcacgagagctggcggacgtgtcgg

SEQ ID NO: 104247 - DNA, 25 bp, Canis familiaris
gcacgagacgtggcgcacggagtgg

SEQ ID NO: 104248 - DNA, 25 bp, Canis familiaris
gcacgagcaatgatctccggttggc

SEQ ID NO: 104249 - DNA, 25 bp, Canis familiaris
gcacgagtggaggagcagctgtccg

SEQ ID NO: 104250 - DNA, 25 bp, Canis familiaris
gcactcgttagaaccttcacgaagg

SEQ ID NO: 104251 - DNA, 25 bp, Canis familiaris
gcactcgggagtgtcctccgagagc

SEQ ID NO: 104252 - DNA, 25 bp, Canis familiaris
gcactcgttgttgacagtccagcga

SEQ ID NO: 104253 - DNA, 25 bp, Canis familiaris
gcacatggtttttaggtccgctgtc

SEQ ID NO: 104254 - DNA, 25 bp, Canis familiaris
gcactgggttattcgtagcggttct

SEQ ID NO: 104255 - DNA, 25 bp, Canis familiaris
gcacgagggtttgggagggctttgt

SEQ ID NO: 104256 - DNA, 25 bp, Canis familiaris
gcacgagggttggctttgtgttttt

SEQ ID NO: 104257 - DNA, 25 bp, Canis familiaris
gcacagacgttcacgttttcttttt

SEQ ID NO: 104258 - DNA, 25 bp, Canis familiaris
gcacaaattctaaacctgttttgtt

SEQ ID NO: 104259 - DNA, 25 bp, Canis familiaris
gcacttagactatgcactttttctg

SEQ ID NO: 104260 - DNA, 25 bp, Canis familiaris
gcacccagcagtttagcttaatttg

SEQ ID NO: 104261 - DNA, 25 bp, Canis familiaris
gcacccatattcctagttctgattt

SEQ ID NO: 104262 - DNA, 25 bp, Canis familiaris
gcacccaaagctgagattcttctta

SEQ ID NO: 104263 - DNA, 25 bp, Canis familiaris
gcacgcaccagagcgagttgcttgc

SEQ ID NO: 104264 - DNA, 25 bp, Canis familiaris
gcacccagagatgaagctttctgcc

SEQ ID NO: 104265 - DNA, 25 bp, Canis familiaris
gcacccaccatgcaagatgatttca

SEQ ID NO: 104266 - DNA, 25 bp, Canis familiaris
gcactccaaaggggagcattggccc

SEQ ID NO: 104267 - DNA, 25 bp, Canis familiaris
gcactcccaaggggagccttggccc

SEQ ID NO: 104268 - DNA, 25 bp, Canis familiaris
gcaaccccagaggaacttaacccag

SEQ ID NO: 104269 - DNA, 25 bp, Canis familiaris
gcaacgttcaacgggttacacgcca

SEQ ID NO: 104270 - DNA, 25 bp, Canis familiaris
gaataattaaggggtcgacgtgtcg

SEQ ID NO: 104271 - DNA, 25 bp, Canis familiaris
gaaaatgggaagggatcgacttggt

SEQ ID NO: 104272 - DNA, 25 bp, Canis familiaris
gcaaaaggtggggcccgagcactgg

SEQ ID NO: 104273 - DNA, 25 bp, Canis familiaris
gaagaccagggacccctaggtggct

SEQ ID NO: 104274 - DNA, 25 bp, Canis familiaris
gaattccaggaacccgagagggcca

SEQ ID NO: 104275 - DNA, 25 bp, Canis familiaris
gacttacggaagaatcaagaggctt

SEQ ID NO: 104276 - DNA, 25 bp, Canis familiaris
gcactgtccagaccaagaacaagac

SEQ ID NO: 104277 - DNA, 25 bp, Canis familiaris
gcactgtactgaccaatgaaaagaa

SEQ ID NO: 104278 - DNA, 25 bp, Canis familiaris
gcactgccaggctgaagaacatgga

SEQ ID NO: 104279 - DNA, 25 bp, Canis familiaris
gcacttcactcccaaggactggagc

SEQ ID NO: 104280 - DNA, 25 bp, Canis familiaris
gcacttccatcccaaggctttgaag

SEQ ID NO: 104281 - DNA, 25 bp, Canis familiaris
gcactcttccctagactacttgaag

SEQ ID NO: 104282 - DNA, 25 bp, Canis familiaris
gcactttccctggaacctaggatgg

SEQ ID NO: 104283 - DNA, 25 bp, Canis familiaris
gaattaacccaggaccaaggaggct

SEQ ID NO: 104284 - DNA, 25 bp, Canis familiaris
gactttccactagaccaacgacgtg

SEQ ID NO: 104285 - DNA, 25 bp, Canis familiaris
gcaaaaccttgagattcaccggcga

SEQ ID NO: 104286 - DNA, 25 bp, Canis familiaris
gcaaagcattagaaaactacctggg

SEQ ID NO: 104287 - DNA, 25 bp, Canis familiaris
gcactggatgctggataaactgacc

SEQ ID NO: 104288 - DNA, 25 bp, Canis familiaris
gcactggagctcgacaggtcatcac

SEQ ID NO: 104289 - DNA, 25 bp, Canis familiaris
gcacgtacacagacaggcattactc

SEQ ID NO: 104290 - DNA, 25 bp, Canis familiaris
gcacgctgaccagaaatgctaccca

SEQ ID NO: 104291 - DNA, 25 bp, Canis familiaris
gcaactgggaaatggttccacaccg

SEQ ID NO: 104292 - DNA, 25 bp, Canis familiaris
taacgaggtaattggacatttcccg

SEQ ID NO: 104293 - DNA, 25 bp, Canis familiaris
gcaacagagtaaagggacattttcc

SEQ ID NO: 104294 - DNA, 25 bp, Canis familiaris
gcacagcaagtgcagaggataaatt

SEQ ID NO: 104295 - DNA, 25 bp, Canis familiaris
gcactgcttgtggatgaaagaaatg

SEQ ID NO: 104296 - DNA, 25 bp, Canis familiaris
gcacactggtagacgcctgagaatg

SEQ ID NO: 104297 - DNA, 25 bp, Canis familiaris
gcacttgggcttggctctgagaatg

SEQ ID NO: 104298 - DNA, 25 bp, Canis familiaris
gcacttgattcttatgcccaattgt

SEQ ID NO: 104299 - DNA, 25 bp, Canis familiaris
gcacattatactcatctcagagatg

SEQ ID NO: 104300 - DNA, 25 bp, Canis familiaris
gcacattgatgctgtcttcaggtct

SEQ ID NO: 104301 - DNA, 25 bp, Canis familiaris
gcacacatggtggatgctctagggt

SEQ ID NO: 104302 - DNA, 25 bp, Canis familiaris
gcaaaattggatatcggtcttagct

SEQ ID NO: 104303 - DNA, 25 bp, Canis familiaris
gcaacaatccagagtccggttctta

SEQ ID NO: 104304 - DNA, 25 bp, Canis familiaris
gcacacgtctcgagtcgacgatttg

SEQ ID NO: 104305 - DNA, 25 bp, Canis familiaris
gcaacttctggtttaacttttggca

SEQ ID NO: 104306 - DNA, 25 bp, Canis familiaris
gcaaccttgggaaaattactctgtg

SEQ ID NO: 104307 - DNA, 25 bp, Canis familiaris
gcacggcttgggaggattttcgttg

SEQ ID NO: 104308 - DNA, 25 bp, Canis familiaris
gcacaggttggcgtaggtgttggcg

SEQ ID NO: 104309 - DNA, 25 bp, Canis familiaris
gcacaggcttggggggttttcaatg

SEQ ID NO: 104310 - DNA, 25 bp, Canis familiaris
gcacaggttggagggtcattcttct

SEQ ID NO: 104311 - DNA, 25 bp, Canis familiaris
gcacgggcgtgatagctgtttcttt

SEQ ID NO: 104312 - DNA, 25 bp, Canis familiaris
gcacgagactagtctcagttttttt

SEQ ID NO: 104313 - DNA, 25 bp, Canis familiaris
gcacgagctcagtactagttaattt

SEQ ID NO: 104314 - DNA, 25 bp, Canis familiaris
gcacgagctccagcgatgatgtgat

SEQ ID NO: 104315 - DNA, 25 bp, Canis familiaris
gcacgagcccgtgcgatctgaagag

SEQ ID NO: 104316 - DNA, 25 bp, Canis familiaris
gcacacccgcgtcgcgcaaaaatgt

SEQ ID NO: 104317 - DNA, 25 bp, Canis familiaris
gcaaatcccgagcagtatcattagt

SEQ ID NO: 104318 - DNA, 25 bp, Canis familiaris
gcaaatcccgagcagtatcattagt

SEQ ID NO: 104319 - DNA, 25 bp, Canis familiaris
gcacaaccccagacattatcttgga

SEQ ID NO: 104320 - DNA, 25 bp, Canis familiaris
gcacagaaccaagcagtcaccttga

SEQ ID NO: 104321 - DNA, 25 bp, Canis familiaris
gcacttcatacatgtcagtacccca

SEQ ID NO: 104322 - DNA, 25 bp, Canis familiaris
gcactgacatacttgtcattgttcc

SEQ ID NO: 104323 - DNA, 25 bp, Canis familiaris
gcacattggagtatgcattgttcac

SEQ ID NO: 104324 - DNA, 25 bp, Canis familiaris
gcactcttgatggtgagagtctcca

SEQ ID NO: 104325 - DNA, 25 bp, Canis familiaris
gcactcattgcaatctgtgaatcat

SEQ ID NO: 104326 - DNA, 25 bp, Canis familiaris
gcacatatatatgtgtacacacgac

SEQ ID NO: 104327 - DNA, 25 bp, Canis familiaris
gcaaattcactgccaagaaccacct

SEQ ID NO: 104328 - DNA, 25 bp, Canis familiaris
gcaaaagcattcccagaaagccctg

SEQ ID NO: 104329 - DNA, 25 bp, Canis familiaris
gcaagccctacatacaactggcctg

SEQ ID NO: 104330 - DNA, 25 bp, Canis familiaris
gcaaggtctagtttggactgcccgt

SEQ ID NO: 104331 - DNA, 25 bp, Canis familiaris
gcacgaggcgagtgggagcagccgg

SEQ ID NO: 104332 - DNA, 25 bp, Canis familiaris
gcacgtagtgagtgtacatccatct

SEQ ID NO: 104333 - DNA, 25 bp, Canis familiaris
gcactgctaggataaacccatcatc

SEQ ID NO: 104334 - DNA, 25 bp, Canis familiaris
gcacataaggcacacaactcacaag

SEQ ID NO: 104335 - DNA, 25 bp, Canis familiaris
gcacgagggccggaactcaagatgg

SEQ ID NO: 104336 - DNA, 25 bp, Canis familiaris
gcacgagcgctgccgtaaggaaagg

SEQ ID NO: 104337 - DNA, 25 bp, Canis familiaris
gcacggcgctgcaggggaagaggcg

SEQ ID NO: 104338 - DNA, 25 bp, Canis familiaris
gcacggcctgagggatggggagccc

SEQ ID NO: 104339 - DNA, 25 bp, Canis familiaris
gcacggcctgaggagtagacctgcc

SEQ ID NO: 104340 - DNA, 25 bp, Canis familiaris
gcacgagcagcggtttagcgcctgc

SEQ ID NO: 104341 - DNA, 25 bp, Canis familiaris
gcacggagggagtaatggctctcac

SEQ ID NO: 104342 - DNA, 25 bp, Canis familiaris
gcacggagtttctacagactctcac

SEQ ID NO: 104343 - DNA, 25 bp, Canis familiaris
gcactgggtgtttgatgaagcttct

SEQ ID NO: 104344 - DNA, 25 bp, Canis familiaris
gcactcggctgcaaagtgaggcttc

SEQ ID NO: 104345 - DNA, 25 bp, Canis familiaris
gcacttgtgtctttggatccagtcg

SEQ ID NO: 104346 - DNA, 25 bp, Canis familiaris
gcactttgatgtcatgtgttcccct

SEQ ID NO: 104347 - DNA, 25 bp, Canis familiaris
gcacttcagtgtctgtctcgaacgg

SEQ ID NO: 104348 - DNA, 25 bp, Canis familiaris
gcacttggctgtgtgttcactacgg

SEQ ID NO: 104349 - DNA, 25 bp, Canis familiaris
gcactaatgctggttttaatggcgg

SEQ ID NO: 104350 - DNA, 25 bp, Canis familiaris
gcactgtgtcatcttttcaaggcat

SEQ ID NO: 104351 - DNA, 25 bp, Canis familiaris
gcactggtgatggtgccccataggt

SEQ ID NO: 104352 - DNA, 25 bp, Canis familiaris
gcactggtcatcacagcacacatgg

SEQ ID NO: 104353 - DNA, 25 bp, Canis familiaris
gcactggtctgaagcgcagatgact

SEQ ID NO: 104354 - DNA, 25 bp, Canis familiaris
gcactttctggcgagcgtgaatgaa

SEQ ID NO: 104355 - DNA, 25 bp, Canis familiaris
gcacttctttgcgagtggcactgaa

SEQ ID NO: 104356 - DNA, 25 bp, Canis familiaris
gcacaaggcttggaggcccatcaac

SEQ ID NO: 104357 - DNA, 25 bp, Canis familiaris
gcaacaggtcaggagacctgccctc

SEQ ID NO: 104358 - DNA, 25 bp, Canis familiaris
gcaacatagtacctgtcaagccgtt

SEQ ID NO: 104359 - DNA, 25 bp, Canis familiaris
gcaacagaatctgcttcgagggttt

SEQ ID NO: 104360 - DNA, 25 bp, Canis familiaris
gcactaaatctgtttctgggaccta

SEQ ID NO: 104361 - DNA, 25 bp, Canis familiaris
gcaagaagtttcacagggaccatga

SEQ ID NO: 104362 - DNA, 25 bp, Canis familiaris
gcaactatgtgaactacagggacct

SEQ ID NO: 104363 - DNA, 25 bp, Canis familiaris
gcacatgtttgaaaggaggtgtccg

SEQ ID NO: 104364 - DNA, 25 bp, Canis familiaris
gcacatgtttgcatggaacagtacc

SEQ ID NO: 104365 - DNA, 25 bp, Canis familiaris
gcacgttgtttgaagcatctgtctt

SEQ ID NO: 104366 - DNA, 25 bp, Canis familiaris
gcacggtgatttaagccgttatttc

SEQ ID NO: 104367 - DNA, 25 bp, Canis familiaris
gcaaagagatttacaggtgtaatta

SEQ ID NO: 104368 - DNA, 25 bp, Canis familiaris
gcacgagacttctctgggtagtgga

SEQ ID NO: 104369 - DNA, 25 bp, Canis familiaris
gcacacaagttctacttcctggtgg

SEQ ID NO: 104370 - DNA, 25 bp, Canis familiaris
gcacacgaatgtaacccctggtgtc

SEQ ID NO: 104371 - DNA, 25 bp, Canis familiaris
gcaacatgacgggtacctcaggtgc

SEQ ID NO: 104372 - DNA, 25 bp, Canis familiaris
gcaaatgcggagatcaacagaggtt

SEQ ID NO: 104373 - DNA, 25 bp, Canis familiaris
gcaaagacagggccatagaggggtg

SEQ ID NO: 104374 - DNA, 25 bp, Canis familiaris
gcaaagtcaggagctacacccagca

SEQ ID NO: 104375 - DNA, 25 bp, Canis familiaris
gcaaagaaggacgtccacatgccca

SEQ ID NO: 104376 - DNA, 25 bp, Canis familiaris
gcaagagaaatcccatcaaccctca

SEQ ID NO: 104377 - DNA, 25 bp, Canis familiaris
gcaagaacaatctcaaacaagctaa

SEQ ID NO: 104378 - DNA, 25 bp, Canis familiaris
gcacaaccaacactcacagggagct

SEQ ID NO: 104379 - DNA, 25 bp, Canis familiaris
gcactacacctctcagtgaggcact

SEQ ID NO: 104380 - DNA, 25 bp, Canis familiaris
gcactgcagatcctccaaggcaggc

SEQ ID NO: 104381 - DNA, 25 bp, Canis familiaris
gcacatcatcagcgcgcaagagggc

SEQ ID NO: 104382 - DNA, 25 bp, Canis familiaris
gcacatctcatgggcacaaccgaga

SEQ ID NO: 104383 - DNA, 25 bp, Canis familiaris
gcacagcatcggcaagatcggaggc

SEQ ID NO: 104384 - DNA, 25 bp, Canis familiaris
gcacacaggggatgtcacttgagca

SEQ ID NO: 104385 - DNA, 25 bp, Canis familiaris
gcactcagccagggaatctgcttga

SEQ ID NO: 104386 - DNA, 25 bp, Canis familiaris
gcacagccacatgatgcccatgttg

SEQ ID NO: 104387 - DNA, 25 bp, Canis familiaris
gcacatcatgaatagccaacattat

SEQ ID NO: 104388 - DNA, 25 bp, Canis familiaris
gcacaagatgcatagccagaggctc

SEQ ID NO: 104389 - DNA, 25 bp, Canis familiaris
gcacgaggaaagcctggagcctgac

SEQ ID NO: 104390 - DNA, 25 bp, Canis familiaris
gcactggcagtttggtgaacttgac

SEQ ID NO: 104391 - DNA, 25 bp, Canis familiaris
gcacagggcctctggaaatgtcagc

SEQ ID NO: 104392 - DNA, 25 bp, Canis familiaris
gcacgaggcctgcgaaggtgtcatg

SEQ ID NO: 104393 - DNA, 25 bp, Canis familiaris
gcacgaggcgagctgactggttgtg

SEQ ID NO: 104394 - DNA, 25 bp, Canis familiaris
gcacgaggcaagttcctggtcgtgt

SEQ ID NO: 104395 - DNA, 25 bp, Canis familiaris
gcaaatggatagtcaccgttcgtga

SEQ ID NO: 104396 - DNA, 25 bp, Canis familiaris
gcaaatttacattccgtgtctggcc

SEQ ID NO: 104397 - DNA, 25 bp, Canis familiaris
gcaaattccagcttcggtcaagtga

SEQ ID NO: 104398 - DNA, 25 bp, Canis familiaris
gcaaactgcggcgcggtgagagcga

SEQ ID NO: 104399 - DNA, 25 bp, Canis familiaris
gcacacacggatgccggtgaacgtc

SEQ ID NO: 104400 - DNA, 25 bp, Canis familiaris
gcacttcgctttcctggatgaacat

SEQ ID NO: 104401 - DNA, 25 bp, Canis familiaris
gcacagctcctgtggctggatgtac

SEQ ID NO: 104402 - DNA, 25 bp, Canis familiaris
gcacactgtctcggagggtctgaag

SEQ ID NO: 104403 - DNA, 25 bp, Canis familiaris
gcacactgtgtccgggtgtgtgccc

SEQ ID NO: 104404 - DNA, 25 bp, Canis familiaris
gcacaccctgtagagttgtgcccct

SEQ ID NO: 104405 - DNA, 25 bp, Canis familiaris
gcaacttggacagagttgaccacct

SEQ ID NO: 104406 - DNA, 25 bp, Canis familiaris
gcacagctgtgcgaagtacttccac

SEQ ID NO: 104407 - DNA, 25 bp, Canis familiaris
gcacagtgcttcatgaacttccttg

SEQ ID NO: 104408 - DNA, 25 bp, Canis familiaris
gcacatgatgtaattagcactgggt

SEQ ID NO: 104409 - DNA, 25 bp, Canis familiaris
gcacaattcactgacatgctggact

SEQ ID NO: 104410 - DNA, 25 bp, Canis familiaris
gcacagatggctggcacacagctgg

SEQ ID NO: 104411 - DNA, 25 bp, Canis familiaris
gcacagtgaggcgccatgatgacca

SEQ ID NO: 104412 - DNA, 25 bp, Canis familiaris
gcacaaggcagctctatggaccagt

SEQ ID NO: 104413 - DNA, 25 bp, Canis familiaris
gcacgaggctgccttgaggaggatg

SEQ ID NO: 104414 - DNA, 25 bp, Canis familiaris
gcacggctgcacattcaagaggcag

SEQ ID NO: 104415 - DNA, 25 bp, Canis familiaris
gcacggctgcacattgcagagccca

SEQ ID NO: 104416 - DNA, 25 bp, Canis familiaris
gcacggtggcaggtgcaagcatcct

SEQ ID NO: 104417 - DNA, 25 bp, Canis familiaris
gcacggtggagacgatgcaccctgc

SEQ ID NO: 104418 - DNA, 25 bp, Canis familiaris
gcacgaggaatgatcgctgctcctc

SEQ ID NO: 104419 - DNA, 25 bp, Canis familiaris
gcacgaggagatactctcttgagca

SEQ ID NO: 104420 - DNA, 25 bp, Canis familiaris
gcacagagctgtccacttctagaca

SEQ ID NO: 104421 - DNA, 25 bp, Canis familiaris
gcacagagctgtccacttctagaca

SEQ ID NO: 104422 - DNA, 25 bp, Canis familiaris
gcacagagctgtccacttctagaca

SEQ ID NO: 104423 - DNA, 25 bp, Canis familiaris
gcacagagctgtccactttctagac

SEQ ID NO: 104424 - DNA, 25 bp, Canis familiaris
gcacaggtctacattacttaataac

SEQ ID NO: 104425 - DNA, 25 bp, Canis familiaris
gcaagtttacagtttcgtaccaact

SEQ ID NO: 104426 - DNA, 25 bp, Canis familiaris
gcacagtactatctttatttcctcc

SEQ ID NO: 104427 - DNA, 25 bp, Canis familiaris
gcacagtacattctctctatggcat

SEQ ID NO: 104428 - DNA, 25 bp, Canis familiaris
gcacagcatacactttctttacacc

SEQ ID NO: 104429 - DNA, 25 bp, Canis familiaris
gcaagtccgagtctgactaactcag

SEQ ID NO: 104430 - DNA, 25 bp, Canis familiaris
gcacgttggagtaaacatcaactgg

SEQ ID NO: 104431 - DNA, 25 bp, Canis familiaris
gcactttggctataaaaccatggat

SEQ ID NO: 104432 - DNA, 25 bp, Canis familiaris
gcacatttggggcaagtacactcgt

SEQ ID NO: 104433 - DNA, 25 bp, Canis familiaris
gcaacaattggcggaagtcccggtc

SEQ ID NO: 104434 - DNA, 25 bp, Canis familiaris
gcaaaaatgttaccttgcccgctgt

SEQ ID NO: 104435 - DNA, 25 bp, Canis familiaris
gcacaacctgtccaggttcctggtg

SEQ ID NO: 104436 - DNA, 25 bp, Canis familiaris
gcaaaacttcaaatttgcttggggc

SEQ ID NO: 104437 - DNA, 25 bp, Canis familiaris
gcactacactgtaaatctggctgga

SEQ ID NO: 104438 - DNA, 25 bp, Canis familiaris
gcacaggcactgtgtgacttggtgg

SEQ ID NO: 104439 - DNA, 25 bp, Canis familiaris
gcacaagcgctgcgtgactgtgggc

SEQ ID NO: 104440 - DNA, 25 bp, Canis familiaris
gcactgtgcacctatgtgtctgtgt

SEQ ID NO: 104441 - DNA, 25 bp, Canis familiaris
gcacatgcatcagaatcagttggga

SEQ ID NO: 104442 - DNA, 25 bp, Canis familiaris
gcactatcattgtatcgcttgaccc

SEQ ID NO: 104443 - DNA, 25 bp, Canis familiaris
gcactatcatcagagcatgcctccc

SEQ ID NO: 104444 - DNA, 25 bp, Canis familiaris
gcacttatcaggaacgcctcgatac

SEQ ID NO: 104445 - DNA, 25 bp, Canis familiaris
gcaattaaggagtcgcagccgctat

SEQ ID NO: 104446 - DNA, 25 bp, Canis familiaris
gcacactgcaaagagcagcacccaa

SEQ ID NO: 104447 - DNA, 25 bp, Canis familiaris
gcaaataaacgctcactccaaatta

SEQ ID NO: 104448 - DNA, 25 bp, Canis familiaris
gcacaaatagacctgtgcccaccgt

SEQ ID NO: 104449 - DNA, 25 bp, Canis familiaris
gcacagagattctctgtcacaccac

SEQ ID NO: 104450 - DNA, 25 bp, Canis familiaris
gcacagactagcctagagctcacca

SEQ ID NO: 104451 - DNA, 25 bp, Canis familiaris
gcacaacgacatcgagctctacagc

SEQ ID NO: 104452 - DNA, 25 bp, Canis familiaris
gcaaatcgatgcttgagccaaaggc

SEQ ID NO: 104453 - DNA, 25 bp, Canis familiaris
gcacacacatgacttgaaagagtgg

SEQ ID NO: 104454 - DNA, 25 bp, Canis familiaris
gcacacacatgacaagaaggcactg

SEQ ID NO: 104455 - DNA, 25 bp, Canis familiaris
gcacagccatgactaaccgggcagg

SEQ ID NO: 104456 - DNA, 25 bp, Canis familiaris
gcacagatgaggaaacctgaggccg

SEQ ID NO: 104457 - DNA, 25 bp, Canis familiaris
gcacaagggtcgtcttggtgctgca

SEQ ID NO: 104458 - DNA, 25 bp, Canis familiaris
gcacaagtcagggtgctttggccgg

SEQ ID NO: 104459 - DNA, 25 bp, Canis familiaris
gcacatcggaggtgatccagcgccg

SEQ ID NO: 104460 - DNA, 25 bp, Canis familiaris
gcactgcggagatttgggaccctga

SEQ ID NO: 104461 - DNA, 25 bp, Canis familiaris
gcaaggggaaatcggagcggctggc

SEQ ID NO: 104462 - DNA, 25 bp, Canis familiaris
gcacagttggcaggatcgggtgtct

SEQ ID NO: 104463 - DNA, 25 bp, Canis familiaris
gcacgtggtgcggtcagtggatgtc

SEQ ID NO: 104464 - DNA, 25 bp, Canis familiaris
gcactggggccagcatcaggatgtc

SEQ ID NO: 104465 - DNA, 25 bp, Canis familiaris
gcacagcctgtggcaggtctggttc

SEQ ID NO: 104466 - DNA, 25 bp, Canis familiaris
gcacagctgtggctgagtctacttc

SEQ ID NO: 104467 - DNA, 25 bp, Canis familiaris
gcaagctggcctagaacgaatcatg

SEQ ID NO: 104468 - DNA, 25 bp, Canis familiaris
gcacatcggcctcatacaagccgtg

SEQ ID NO: 104469 - DNA, 25 bp, Canis familiaris
gcaacgagcggttccgatgccctga

SEQ ID NO: 104470 - DNA, 25 bp, Canis familiaris
gcaaagagagaaactcgatgccctg

SEQ ID NO: 104471 - DNA, 25 bp, Canis familiaris
gcaactggcaaacctgccgacgccg

SEQ ID NO: 104472 - DNA, 25 bp, Canis familiaris
gcaactaagaagccatcaccaacct

SEQ ID NO: 104473 - DNA, 25 bp, Canis familiaris
gcacatcggaataattctccaacct

SEQ ID NO: 104474 - DNA, 25 bp, Canis familiaris
gcacatgaggaaatgctttgcatca

SEQ ID NO: 104475 - DNA, 25 bp, Canis familiaris
gcacaaggcaatactgatatacaac

SEQ ID NO: 104476 - DNA, 25 bp, Canis familiaris
gcacaaccctccatgtgcatacaca

SEQ ID NO: 104477 - DNA, 25 bp, Canis familiaris
gcacagatctgctccttaaacaagg

SEQ ID NO: 104478 - DNA, 25 bp, Canis familiaris
gcacagactatggcgcttgaaacgg

SEQ ID NO: 104479 - DNA, 25 bp, Canis familiaris
gcaagccactgctgttaaacagcga

SEQ ID NO: 104480 - DNA, 25 bp, Canis familiaris
gcactgctactgttttattcacttg

SEQ ID NO: 104481 - DNA, 25 bp, Canis familiaris
gcacgtggcatagtttgaagagctt

SEQ ID NO: 104482 - DNA, 25 bp, Canis familiaris
gcacagtggtacgtggcagcaggct

SEQ ID NO: 104483 - DNA, 25 bp, Canis familiaris
gcacactgtgtgcagaggccaggga

SEQ ID NO: 104484 - DNA, 25 bp, Canis familiaris
gcacaagtcagtaaggcaagagcag

SEQ ID NO: 104485 - DNA, 25 bp, Canis familiaris
gcaaagacattcacgtagccgtcct

SEQ ID NO: 104486 - DNA, 25 bp, Canis familiaris
gcacaagacattcacgtaccgtcct

SEQ ID NO: 104487 - DNA, 25 bp, Canis familiaris
gcaaagtgcaagacacttcctcgtc

SEQ ID NO: 104488 - DNA, 25 bp, Canis familiaris
gcaagagtgagcaagaattccatga

SEQ ID NO: 104489 - DNA, 25 bp, Canis familiaris
gcaaaggagccgacatcatgtacaa

SEQ ID NO: 104490 - DNA, 25 bp, Canis familiaris
gcacaactgcgcggtgcaaggacca

SEQ ID NO: 104491 - DNA, 25 bp, Canis familiaris
gcacaagctgggggagcaactgcca

SEQ ID NO: 104492 - DNA, 25 bp, Canis familiaris
gcaaagtgtgtgcaagcaaatgctt

SEQ ID NO: 104493 - DNA, 25 bp, Canis familiaris
gcactttgtgtatatgccagtgctt

SEQ ID NO: 104494 - DNA, 25 bp, Canis familiaris
gcactatgtatgtctttccaggctt

SEQ ID NO: 104495 - DNA, 25 bp, Canis familiaris
gcactggtaagctttacttgtctcc

SEQ ID NO: 104496 - DNA, 25 bp, Canis familiaris
gcactgaggaacttctattttttct

SEQ ID NO: 104497 - DNA, 25 bp, Canis familiaris
gcacaatggaacgtttcctcctagt

SEQ ID NO: 104498 - DNA, 25 bp, Canis familiaris
gcacaggcagaagagattccccgtg

SEQ ID NO: 104499 - DNA, 25 bp, Canis familiaris
gcacaggcagaagaacaggctcgca

SEQ ID NO: 104500 - DNA, 25 bp, Canis familiaris
gcacatgaggaagcacacgggcgag

SEQ ID NO: 104501 - DNA, 25 bp, Canis familiaris
gcactcacgcaagaacgctcagaca

SEQ ID NO: 104502 - DNA, 25 bp, Canis familiaris
gcactagccacacaagcagctactg

SEQ ID NO: 104503 - DNA, 25 bp, Canis familiaris
gcacatactagccgacagcagctca

SEQ ID NO: 104504 - DNA, 25 bp, Canis familiaris
gcacatttcctgtaagcacgctgaa

SEQ ID NO: 104505 - DNA, 25 bp, Canis familiaris
gcacagattcggcaacagcagtaca

SEQ ID NO: 104506 - DNA, 25 bp, Canis familiaris
gcacaaatcggtgagccgtatgctc

SEQ ID NO: 104507 - DNA, 25 bp, Canis familiaris
gcaaacacgagtgagcgctgtgata

SEQ ID NO: 104508 - DNA, 25 bp, Canis familiaris
gcaacccgaggttgtcgtctaagtc

SEQ ID NO: 104509 - DNA, 25 bp, Canis familiaris
gcacacctcgggttttgttaggcca

SEQ ID NO: 104510 - DNA, 25 bp, Canis familiaris
gcacatccttgtctttggggagtcc

SEQ ID NO: 104511 - DNA, 25 bp, Canis familiaris
gcacatcccggcattgggtggagct

SEQ ID NO: 104512 - DNA, 25 bp, Canis familiaris
gcaataccggttttggtggacctgt

SEQ ID NO: 104513 - DNA, 25 bp, Canis familiaris
gcaaagggggcgttggtggtcctag

SEQ ID NO: 104514 - DNA, 25 bp, Canis familiaris
gcaaggggtacggaggtggtcctcg

SEQ ID NO: 104515 - DNA, 25 bp, Canis familiaris
gaaggagggacctccaggtcttcgt

SEQ ID NO: 104516 - DNA, 25 bp, Canis familiaris
gaagggttacacaccaggacgaagt

SEQ ID NO: 104517 - DNA, 25 bp, Canis familiaris
gaatgggggtcactgacgggacggg

SEQ ID NO: 104518 - DNA, 25 bp, Canis familiaris
gaattgaggactctgaaggaagagg

SEQ ID NO: 104519 - DNA, 25 bp, Canis familiaris
gaattagggccttgcagggaaatgt

SEQ ID NO: 104520 - DNA, 25 bp, Canis familiaris
gaaccaggcaccacgggaaatttgg

SEQ ID NO: 104521 - DNA, 25 bp, Canis familiaris
gcaacacggaaccggggaccaattg

SEQ ID NO: 104522 - DNA, 25 bp, Canis familiaris
gcaaagcgaaagcggcaggatcgac

SEQ ID NO: 104523 - DNA, 25 bp, Canis familiaris
gcaaaggagaaggggcgtggccagg

SEQ ID NO: 104524 - DNA, 25 bp, Canis familiaris
gcaacggagagcagggcaaggccct

SEQ ID NO: 104525 - DNA, 25 bp, Canis familiaris
gcaagctagaggaggttctgaccca

SEQ ID NO: 104526 - DNA, 25 bp, Canis familiaris
gcaagctagaggaggttctgaccca

SEQ ID NO: 104527 - DNA, 25 bp, Canis familiaris
gcaactaactctaaaaatgacctca

SEQ ID NO: 104528 - DNA, 25 bp, Canis familiaris
gcacactaaatctgtcaatacccat

SEQ ID NO: 104529 - DNA, 25 bp, Canis familiaris
gcaactcaaatccacaagaaccaat

SEQ ID NO: 104530 - DNA, 25 bp, Canis familiaris
gcaacatgcacctcaaaaacagatt

SEQ ID NO: 104531 - DNA, 25 bp, Canis familiaris
gcacatacacacttaacatcttcgt

SEQ ID NO: 104532 - DNA, 25 bp, Canis familiaris
gcacatccatacatactcatgctct

SEQ ID NO: 104533 - DNA, 25 bp, Canis familiaris
gcacataatccatacttgctgttga

SEQ ID NO: 104534 - DNA, 25 bp, Canis familiaris
gcacatcagcaccaagaccatagac

SEQ ID NO: 104535 - DNA, 25 bp, Canis familiaris
gcactggcttgccaaccatatgtcc

SEQ ID NO: 104536 - DNA, 25 bp, Canis familiaris
gcactatctttacacatattctcga

SEQ ID NO: 104537 - DNA, 25 bp, Canis familiaris
gcactaattctacacatctgattca

SEQ ID NO: 104538 - DNA, 25 bp, Canis familiaris
gcaaaatttaatgctctttacataa

SEQ ID NO: 104539 - DNA, 25 bp, Canis familiaris
gcaacagtttgatccttgggccaaa

SEQ ID NO: 104540 - DNA, 25 bp, Canis familiaris
gcaaccatcgaatcgcttgggcatc

SEQ ID NO: 104541 - DNA, 25 bp, Canis familiaris
gcaaccttaatcgcctagtgcaacg

SEQ ID NO: 104542 - DNA, 25 bp, Canis familiaris
gcaaagaccaatcgtcctaactacg

SEQ ID NO: 104543 - DNA, 25 bp, Canis familiaris
gcaaaaacaacattccctacttcga

SEQ ID NO: 104544 - DNA, 25 bp, Canis familiaris
gcaaataaaacatggccttaacaga

SEQ ID NO: 104545 - DNA, 25 bp, Canis familiaris
gcacaaaaaccctgccttatatgga

SEQ ID NO: 104546 - DNA, 25 bp, Canis familiaris
gcacactaacctgtatgctcttttg

SEQ ID NO: 104547 - DNA, 25 bp, Canis familiaris
gcaaatagatgggtcctgctttttt

SEQ ID NO: 104548 - DNA, 25 bp, Canis familiaris
gcacttatgtgactgacctcagttt

SEQ ID NO: 104549 - DNA, 25 bp, Canis familiaris
gcactttgtgattgccgcgtgttta

SEQ ID NO: 104550 - DNA, 25 bp, Canis familiaris
gcactgtgtgtagcaagcattttta

SEQ ID NO: 104551 - DNA, 25 bp, Canis familiaris
gcacttgagctaccacgagatttaa

SEQ ID NO: 104552 - DNA, 25 bp, Canis familiaris
gcacttgagcccctcaagtcttcat

SEQ ID NO: 104553 - DNA, 25 bp, Canis familiaris
gcactagaccccaacattgcaacac

SEQ ID NO: 104554 - DNA, 25 bp, Canis familiaris
gcacagaaaccctatttgctaccca

SEQ ID NO: 104555 - DNA, 25 bp, Canis familiaris
gcaagaagatctcccttcaggtgcc

SEQ ID NO: 104556 - DNA, 25 bp, Canis familiaris
gcaagaagatctcccttcaggtgcc

SEQ ID NO: 104557 - DNA, 25 bp, Canis familiaris
gcaagaagatctcccttcaggtgcc

SEQ ID NO: 104558 - DNA, 25 bp, Canis familiaris
gcaagaagatctcccttcaggtgcc

SEQ ID NO: 104559 - DNA, 25 bp, Canis familiaris
gcaagaagatctcccttcaggtgcc

SEQ ID NO: 104560 - DNA, 25 bp, Canis familiaris
gcaagaagatctcccttcaggtgcc

SEQ ID NO: 104561 - DNA, 25 bp, Canis familiaris
gcaagaagatctcccttcaggtgcc

SEQ ID NO: 104562 - DNA, 25 bp, Canis familiaris
gcaagaagatctcccttcaggtgcc

SEQ ID NO: 104563 - DNA, 25 bp, Canis familiaris
gcaagaagatctcccttcaggtgcc

SEQ ID NO: 104564 - DNA, 25 bp, Canis familiaris
gcaagaagatctcccttcaggtgcc

SEQ ID NO: 104565 - DNA, 25 bp, Canis familiaris
gcaagaagatctcccttcaggtgcc

SEQ ID NO: 104566 - DNA, 25 bp, Canis familiaris
gcaagaagatctcccttcaggtgcc

SEQ ID NO: 104567 - DNA, 25 bp, Canis familiaris
gcaagaagatctcccttcaggtgcc

SEQ ID NO: 104568 - DNA, 25 bp, Canis familiaris
gcaaattataccttgcataagtcct

SEQ ID NO: 104569 - DNA, 25 bp, Canis familiaris
gcaaattattcgtcctatcagtcgc

SEQ ID NO: 104570 - DNA, 25 bp, Canis familiaris
gcactcttttcagccatagcagata

SEQ ID NO: 104571 - DNA, 25 bp, Canis familiaris
gcactcctggtcacaattgagaatt

SEQ ID NO: 104572 - DNA, 25 bp, Canis familiaris
gcacttcgcgtgaaatatttgtttt

SEQ ID NO: 104573 - DNA, 25 bp, Canis familiaris
gcactttgtgggtatcagctttttt

SEQ ID NO: 104574 - DNA, 25 bp, Canis familiaris
gcacttgattgggattaggatttct

SEQ ID NO: 104575 - DNA, 25 bp, Canis familiaris
gcactctaataggttaactttgtat

SEQ ID NO: 104576 - DNA, 25 bp, Canis familiaris
gcactcttttgcgtctgaattttgt

SEQ ID NO: 104577 - DNA, 25 bp, Canis familiaris
gcactagtcattttcttcttgattg

SEQ ID NO: 104578 - DNA, 25 bp, Canis familiaris
gcacattcctattttgtttgattct

SEQ ID NO: 104579 - DNA, 25 bp, Canis familiaris
gcacatttcttttctgcgtgtagta

SEQ ID NO: 104580 - DNA, 25 bp, Canis familiaris
gcacattctgttgattatgcttagt

SEQ ID NO: 104581 - DNA, 25 bp, Canis familiaris
gcactgcttcttgattgtgcttcca

SEQ ID NO: 104582 - DNA, 25 bp, Canis familiaris
gcactgcatttgtcaattgtgtaac

SEQ ID NO: 104583 - DNA, 25 bp, Canis familiaris
gcaaatttgtcgaaggctctgaccg

SEQ ID NO: 104584 - DNA, 25 bp, Canis familiaris
gcaaatgggtcttcagccttacccg

SEQ ID NO: 104585 - DNA, 25 bp, Canis familiaris
gcaacagggtttcctggttctgccg

SEQ ID NO: 104586 - DNA, 25 bp, Canis familiaris
gcaagaggttctagggtggtcggtc

SEQ ID NO: 104587 - DNA, 25 bp, Canis familiaris
gcaagtggtgacagggcttgttggc

SEQ ID NO: 104588 - DNA, 25 bp, Canis familiaris
gcaactggcttcacggcttatgtga

SEQ ID NO: 104589 - DNA, 25 bp, Canis familiaris
gcaactgaggtcatcaactgtcttt

SEQ ID NO: 104590 - DNA, 25 bp, Canis familiaris
gcaaccaagctccagaactctgctt

SEQ ID NO: 104591 - DNA, 25 bp, Canis familiaris
gcaagagagagaccagaccacctag

SEQ ID NO: 104592 - DNA, 25 bp, Canis familiaris
gcaaaagtgatccagcaccatccag

SEQ ID NO: 104593 - DNA, 25 bp, Canis familiaris
gcaaagaagctattacctacatgaa

SEQ ID NO: 104594 - DNA, 25 bp, Canis familiaris
gcaacataatgctaaagttttaaca

SEQ ID NO: 104595 - DNA, 25 bp, Canis familiaris
gcaacattgcaaatgaagtgctttg

SEQ ID NO: 104596 - DNA, 25 bp, Canis familiaris
gcaaagctctgaaatactcattttt

SEQ ID NO: 104597 - DNA, 25 bp, Canis familiaris
gaaaactggaacagtttgtctccct

SEQ ID NO: 104598 - DNA, 25 bp, Canis familiaris
gaacaactatcatacggtttttccg

SEQ ID NO: 104599 - DNA, 25 bp, Canis familiaris
gaatgcgagtactagccggtttttc

SEQ ID NO: 104600 - DNA, 25 bp, Canis familiaris
gaagagaataaacaaattgctttgg

SEQ ID NO: 104601 - DNA, 25 bp, Canis familiaris
tgaaattaagttctaactcttttgt

SEQ ID NO: 104602 - DNA, 25 bp, Canis familiaris
gaaataactggcatctacccttttt

SEQ ID NO: 104603 - DNA, 25 bp, Canis familiaris
gcaaaaacttgccttcttcctttgc

SEQ ID NO: 104604 - DNA, 25 bp, Canis familiaris
gcaaataaattcccgtttctatcca

SEQ ID NO: 104605 - DNA, 25 bp, Canis familiaris
gcaaataaagccaaggcttctttcc

SEQ ID NO: 104606 - DNA, 25 bp, Canis familiaris
gcaagcccccacaatggcttagtcc

SEQ ID NO: 104607 - DNA, 25 bp, Canis familiaris
gcacagccaccaagggatgctctag

SEQ ID NO: 104608 - DNA, 25 bp, Canis familiaris
gcaacaacatcaacacgctgttcag

SEQ ID NO: 104609 - DNA, 25 bp, Canis familiaris
gcaaaacttgcagactgttcgcagt

SEQ ID NO: 104610 - DNA, 25 bp, Canis familiaris
gcaaaggcaccaaacttaggcagct

SEQ ID NO: 104611 - DNA, 25 bp, Canis familiaris
gcaaacccaaagacgctaacagtat

SEQ ID NO: 104612 - DNA, 25 bp, Canis familiaris
gcaacgtcgtaagtaggaacagagt

SEQ ID NO: 104613 - DNA, 25 bp, Canis familiaris
gcaacgtgggttggaaggacaagac

SEQ ID NO: 104614 - DNA, 25 bp, Canis familiaris
gcaactcggacgtgtatgaaaatga

SEQ ID NO: 104615 - DNA, 25 bp, Canis familiaris
gcaactccgacgtgtatgagaatga

SEQ ID NO: 104616 - DNA, 25 bp, Canis familiaris
gcaaacccatcgtctttgtgggcac

SEQ ID NO: 104617 - DNA, 25 bp, Canis familiaris
gcacagatccgtggttctagtagac

SEQ ID NO: 104618 - DNA, 25 bp, Canis familiaris
gcaacacaggatagttctacatgaa

SEQ ID NO: 104619 - DNA, 25 bp, Canis familiaris
gcaagcaagccttgtgcgtagctaa

SEQ ID NO: 104620 - DNA, 25 bp, Canis familiaris
gcacacacagcctttggaatcaaag

SEQ ID NO: 104621 - DNA, 25 bp, Canis familiaris
gcacagacactaaggcagcaacaaa

SEQ ID NO: 104622 - DNA, 25 bp, Canis familiaris
gcacagaacctagccaagcagcaga

SEQ ID NO: 104623 - DNA, 25 bp, Canis familiaris
gcaagatttttgttccatgagcgca

SEQ ID NO: 104624 - DNA, 25 bp, Canis familiaris
gcacaggtttaccattcacagccac

SEQ ID NO: 104625 - DNA, 25 bp, Canis familiaris
gcacagagttctttgttgagccggc

SEQ ID NO: 104626 - DNA, 25 bp, Canis familiaris
gcacaggtttgctatttgatgtatg

SEQ ID NO: 104627 - DNA, 25 bp, Canis familiaris
gcacaggatcctggcatttgcttaa

SEQ ID NO: 104628 - DNA, 25 bp, Canis familiaris
gcacaagagcactgcagtgtttttc

SEQ ID NO: 104629 - DNA, 25 bp, Canis familiaris
gcacaatgtcactaatgaaccttta

SEQ ID NO: 104630 - DNA, 25 bp, Canis familiaris
gcacatgtggaatttactccttgta

SEQ ID NO: 104631 - DNA, 25 bp, Canis familiaris
gcaaggggacagagctcgcgctgtc

SEQ ID NO: 104632 - DNA, 25 bp, Canis familiaris
gcaagtgaggtctgatgctccagat

SEQ ID NO: 104633 - DNA, 25 bp, Canis familiaris
gcacatggggctgctgaagccagca

SEQ ID NO: 104634 - DNA, 25 bp, Canis familiaris
gcacaggacgctgggcaacaggtct

SEQ ID NO: 104635 - DNA, 25 bp, Canis familiaris
gcacacgagcgcaggagcagagggc

SEQ ID NO: 104636 - DNA, 25 bp, Canis familiaris
gcaacatggcactgggcaagttccg

SEQ ID NO: 104637 - DNA, 25 bp, Canis familiaris
gcaaaccagcaagtgcgactgtatc

SEQ ID NO: 104638 - DNA, 25 bp, Canis familiaris
gcacaagtagacttccagcgctaca

SEQ ID NO: 104639 - DNA, 25 bp, Canis familiaris
gcacaagtacactatacctctaaag

SEQ ID NO: 104640 - DNA, 25 bp, Canis familiaris
gcaaattcaccaatcacacttcaaa

SEQ ID NO: 104641 - DNA, 25 bp, Canis familiaris
gcaaggtcatccacaccaacaatgc

SEQ ID NO: 104642 - DNA, 25 bp, Canis familiaris
gcaaagatacctgcagctacctggc

SEQ ID NO: 104643 - DNA, 25 bp, Canis familiaris
gcaaacacacctgtctacactacag

SEQ ID NO: 104644 - DNA, 25 bp, Canis familiaris
gcaaagagctgcccaggtggactaa

SEQ ID NO: 104645 - DNA, 25 bp, Canis familiaris
gcaaaagctgccaggattggccaac

SEQ ID NO: 104646 - DNA, 25 bp, Canis familiaris
gcaaaagatgccagtgattaatatt

SEQ ID NO: 104647 - DNA, 25 bp, Canis familiaris
gcaaagtacctttagttttcttatg

SEQ ID NO: 104648 - DNA, 25 bp, Canis familiaris
gcaaattgggccgggagtttctttg

SEQ ID NO: 104649 - DNA, 25 bp, Canis familiaris
gcaaatctgtttcggggttgtcatt

SEQ ID NO: 104650 - DNA, 25 bp, Canis familiaris
gcacactattttctaggggcttggc

SEQ ID NO: 104651 - DNA, 25 bp, Canis familiaris
gcacacgtctttcaaggagatgaag

SEQ ID NO: 104652 - DNA, 25 bp, Canis familiaris
gcacagggttgttcaaaggcacaag

SEQ ID NO: 104653 - DNA, 25 bp, Canis familiaris
gcacattgagtttcccaagctgact

SEQ ID NO: 104654 - DNA, 25 bp, Canis familiaris
gcacattattttatagcacgcacat

SEQ ID NO: 104655 - DNA, 25 bp, Canis familiaris
gcacagtacatattagtagcccact

SEQ ID NO: 104656 - DNA, 25 bp, Canis familiaris
gcaactatgaactagctgtggccct

SEQ ID NO: 104657 - DNA, 25 bp, Canis familiaris
gcacagaagaacgggctgagctctc

SEQ ID NO: 104658 - DNA, 25 bp, Canis familiaris
gcaagaagagtggggcggctcagca

SEQ ID NO: 104659 - DNA, 25 bp, Canis familiaris
gcaaatcggtgcactgatcgctgcc

SEQ ID NO: 104660 - DNA, 25 bp, Canis familiaris
gcaacataggggcccatcagctgcc

SEQ ID NO: 104661 - DNA, 25 bp, Canis familiaris
gcacattcagcgctcgtgacagctg

SEQ ID NO: 104662 - DNA, 25 bp, Canis familiaris
gcacaatgcgcggtgcaggaccagt

SEQ ID NO: 104663 - DNA, 25 bp, Canis familiaris
gcacaatgccgggcactgagacaga

SEQ ID NO: 104664 - DNA, 25 bp, Canis familiaris
gcacatctccggccagaagaagacc

SEQ ID NO: 104665 - DNA, 25 bp, Canis familiaris
gcacatcccagacatcatcaaggtg

SEQ ID NO: 104666 - DNA, 25 bp, Canis familiaris
gcacatgcccagtccaataaagtct

SEQ ID NO: 104667 - DNA, 25 bp, Canis familiaris
gcaagggcaggccatcgataacctt

SEQ ID NO: 104668 - DNA, 25 bp, Canis familiaris
gaaggccaggttgagaaccctgccc

SEQ ID NO: 104669 - DNA, 25 bp, Canis familiaris
gaagccaaggttgagaacccctact

SEQ ID NO: 104670 - DNA, 25 bp, Canis familiaris
ggacctaatattgtaggcccctacg

SEQ ID NO: 104671 - DNA, 25 bp, Canis familiaris
gttccataaactctaacaccacaac

SEQ ID NO: 104672 - DNA, 25 bp, Canis familiaris
ggtcgtatccctgtaaacaacaaat

SEQ ID NO: 104673 - DNA, 25 bp, Canis familiaris
gaatagtacccctgataacaactta

SEQ ID NO: 104674 - DNA, 25 bp, Canis familiaris
gaatgaaaccctctgataaataaaa

SEQ ID NO: 104675 - DNA, 25 bp, Canis familiaris
gcaaataaacagtgtgaacagcaaa

SEQ ID NO: 104676 - DNA, 25 bp, Canis familiaris
gcaaagcaaacctattgtaagccat

SEQ ID NO: 104677 - DNA, 25 bp, Canis familiaris
gcacaggggcagcacattcagaagc

SEQ ID NO: 104678 - DNA, 25 bp, Canis familiaris
gcaagcagtgtctgagcctcaggag

SEQ ID NO: 104679 - DNA, 25 bp, Canis familiaris
gcacacagttctggacagacggact

SEQ ID NO: 104680 - DNA, 25 bp, Canis familiaris
gcacacgtttaatgcacatgcagcc

SEQ ID NO: 104681 - DNA, 25 bp, Canis familiaris
gcacacagcttctaataattgccca

SEQ ID NO: 104682 - DNA, 25 bp, Canis familiaris
gcaaagcctcatctaataccaaata

SEQ ID NO: 104683 - DNA, 25 bp, Canis familiaris
gaaggcctagttagtcccattattg

SEQ ID NO: 104684 - DNA, 25 bp, Canis familiaris
gcaaagcgctagttggtaccagtag

SEQ ID NO: 104685 - DNA, 25 bp, Canis familiaris
gcacaaccgagattggaaccagatg

SEQ ID NO: 104686 - DNA, 25 bp, Canis familiaris
gcacaagccagggggcgaggcagag

SEQ ID NO: 104687 - DNA, 25 bp, Canis familiaris
gcaacccaggcggggaggaagcggg

SEQ ID NO: 104688 - DNA, 25 bp, Canis familiaris
gcacacccccagggagaagcacagg

SEQ ID NO: 104689 - DNA, 25 bp, Canis familiaris
gcacacgctagcccgagaagatgtc

SEQ ID NO: 104690 - DNA, 25 bp, Canis familiaris
gcaagccgcacgggaggcagagctc

SEQ ID NO: 104691 - DNA, 25 bp, Canis familiaris
gcaactcggcaggcgagctgtgcgt

SEQ ID NO: 104692 - DNA, 25 bp, Canis familiaris
gcacttcaggcagatggcttggttc

SEQ ID NO: 104693 - DNA, 25 bp, Canis familiaris
gcacttttccttcctatggagtctt

SEQ ID NO: 104694 - DNA, 25 bp, Canis familiaris
gcactatattacgtatccacgggat

SEQ ID NO: 104695 - DNA, 25 bp, Canis familiaris
gcacattgttccgtatggacttgga

SEQ ID NO: 104696 - DNA, 25 bp, Canis familiaris
gcacatccctcgctagaactagatg

SEQ ID NO: 104697 - DNA, 25 bp, Canis familiaris
gcacatagcccacaagagactcgtg

SEQ ID NO: 104698 - DNA, 25 bp, Canis familiaris
gcacatgcccactgagaggagtctt

SEQ ID NO: 104699 - DNA, 25 bp, Canis familiaris
gcacagcccactgagaggagcttcc

SEQ ID NO: 104700 - DNA, 25 bp, Canis familiaris
gcaagccacaattatgggacctaat

SEQ ID NO: 104701 - DNA, 25 bp, Canis familiaris
gcaacatccacattgacagtgacct

SEQ ID NO: 104702 - DNA, 25 bp, Canis familiaris
gcacacaattgcataaggagcctgg

SEQ ID NO: 104703 - DNA, 25 bp, Canis familiaris
gcaagagcatttagagtggtgcctg

SEQ ID NO: 104704 - DNA, 25 bp, Canis familiaris
gcaagaacatttctggtgaggtgcc

SEQ ID NO: 104705 - DNA, 25 bp, Canis familiaris
gcaaaactatcacccttgaggtcga

SEQ ID NO: 104706 - DNA, 25 bp, Canis familiaris
gcacaagaatctttcgttcaggggg

SEQ ID NO: 104707 - DNA, 25 bp, Canis familiaris
gcaaaagatgtggtggttggggcgg

SEQ ID NO: 104708 - DNA, 25 bp, Canis familiaris
gcaaaggtgtggaggctggaggagg

SEQ ID NO: 104709 - DNA, 25 bp, Canis familiaris
gcaaatccttggattgatccagagg

SEQ ID NO: 104710 - DNA, 25 bp, Canis familiaris
gcaaactgggctattgaaaaggcgc

SEQ ID NO: 104711 - DNA, 25 bp, Canis familiaris
gcaaccaaggccaataaaactgacg

SEQ ID NO: 104712 - DNA, 25 bp, Canis familiaris
gcaagctcacagcaacaggaaactg

SEQ ID NO: 104713 - DNA, 25 bp, Canis familiaris
gcaagctttgagcagatggaaactt

SEQ ID NO: 104714 - DNA, 25 bp, Canis familiaris
gcaagcctgtggaggccaagcacct

SEQ ID NO: 104715 - DNA, 25 bp, Canis familiaris
gcaacgcttgccacgcgtaatgtct

SEQ ID NO: 104716 - DNA, 25 bp, Canis familiaris
gcaactgcccaatatggtaatgtgc

SEQ ID NO: 104717 - DNA, 25 bp, Canis familiaris
gcaagagcccacggtttttggctac

SEQ ID NO: 104718 - DNA, 25 bp, Canis familiaris
gcaaagccaagggattttaggccga

SEQ ID NO: 104719 - DNA, 25 bp, Canis familiaris
gcaacacaaggggaatggtcagacc

SEQ ID NO: 104720 - DNA, 25 bp, Canis familiaris
gcaaacaagtcgaactctgaggaca

SEQ ID NO: 104721 - DNA, 25 bp, Canis familiaris
gcaaagaggactggattcggagacc

SEQ ID NO: 104722 - DNA, 25 bp, Canis familiaris
gcaaactgatacggaacgagaccga

SEQ ID NO: 104723 - DNA, 25 bp, Canis familiaris
gcaaacataactggcagccgaatcc

SEQ ID NO: 104724 - DNA, 25 bp, Canis familiaris
gcacatcaagaagtacggccaatcc

SEQ ID NO: 104725 - DNA, 25 bp, Canis familiaris
gcaaagagaccaaagcagccgatcc

SEQ ID NO: 104726 - DNA, 25 bp, Canis familiaris
gcaacaaggacaatagaccccctac

SEQ ID NO: 104727 - DNA, 25 bp, Canis familiaris
gcaacaaggacaaaccacagcctcc

SEQ ID NO: 104728 - DNA, 25 bp, Canis familiaris
gcaaccttgcaaaagagcctgggcc

SEQ ID NO: 104729 - DNA, 25 bp, Canis familiaris
gcaataatcagacagggcctgggct

SEQ ID NO: 104730 - DNA, 25 bp, Canis familiaris
gcaaaagcgcaacgtgagctcggcc

SEQ ID NO: 104731 - DNA, 25 bp, Canis familiaris
gcaaacagaggtctcctcagtgcac

SEQ ID NO: 104732 - DNA, 25 bp, Canis familiaris
gcaacagcaggggcgatatcctctg

SEQ ID NO: 104733 - DNA, 25 bp, Canis familiaris
gcacaagaggcccatatgtcttcag

SEQ ID NO: 104734 - DNA, 25 bp, Canis familiaris
gcacaagattgacattgtctctgga

SEQ ID NO: 104735 - DNA, 25 bp, Canis familiaris
gcacacacagagacttttgctccga

SEQ ID NO: 104736 - DNA, 25 bp, Canis familiaris
gcacacacacaacttcagtgagagc

SEQ ID NO: 104737 - DNA, 25 bp, Canis familiaris
gcacaccacagatgttgtagcccgt

SEQ ID NO: 104738 - DNA, 25 bp, Canis familiaris
gcaactcatcgattgatttacggcg

SEQ ID NO: 104739 - DNA, 25 bp, Canis familiaris
gcaaactcgattttctacggttgca

SEQ ID NO: 104740 - DNA, 25 bp, Canis familiaris
gcaaactttattttcataggttgag

SEQ ID NO: 104741 - DNA, 25 bp, Canis familiaris
gcaaagcctctatttaaagcgtctg

SEQ ID NO: 104742 - DNA, 25 bp, Canis familiaris
gcaaacttcaatttactcagtggct

SEQ ID NO: 104743 - DNA, 25 bp, Canis familiaris
gcaaatattatgtttttcgtagttt

SEQ ID NO: 104744 - DNA, 25 bp, Canis familiaris
gcaaagattagtattgctcttactg

SEQ ID NO: 104745 - DNA, 25 bp, Canis familiaris
gcacacagagctatatttctttaat

SEQ ID NO: 104746 - DNA, 25 bp, Canis familiaris
gcacaacgtcttactgtgcctctaa

SEQ ID NO: 104747 - DNA, 25 bp, Canis familiaris
gcacacacaggctgactgacctata

SEQ ID NO: 104748 - DNA, 25 bp, Canis familiaris
gcaacacagacactactgacccatg

SEQ ID NO: 104749 - DNA, 25 bp, Canis familiaris
gcacaccaggacactacaagcatgt

SEQ ID NO: 104750 - DNA, 25 bp, Canis familiaris
gcacaccaagatacagatcatcaac

SEQ ID NO: 104751 - DNA, 25 bp, Canis familiaris
gcacatcgcgacaatcgacatcaag

SEQ ID NO: 104752 - DNA, 25 bp, Canis familiaris
gcacacttgacttctgctcatcaag

SEQ ID NO: 104753 - DNA, 25 bp, Canis familiaris
gcacactgaaattcgtgtatctgtg

SEQ ID NO: 104754 - DNA, 25 bp, Canis familiaris
gcacatgtgaaatctgttgttctac

SEQ ID NO: 104755 - DNA, 25 bp, Canis familiaris
gcacagtacaattcctgtttttgct

SEQ ID NO: 104756 - DNA, 25 bp, Canis familiaris
gcacaggtaattagttttcctctga

SEQ ID NO: 104757 - DNA, 25 bp, Canis familiaris
gcacaggctcaaatactggctctac

SEQ ID NO: 104758 - DNA, 25 bp, Canis familiaris
gcacattccaaggacgatcataacc

SEQ ID NO: 104759 - DNA, 25 bp, Canis familiaris
gcacattgtacagccgtataagcgt

SEQ ID NO: 104760 - DNA, 25 bp, Canis familiaris
gcacatttccaagttactacagcgt

SEQ ID NO: 104761 - DNA, 25 bp, Canis familiaris
gcacatgatactcagattcctcacc

SEQ ID NO: 104762 - DNA, 25 bp, Canis familiaris
gcaaacctggagaatcctatccgac

SEQ ID NO: 104763 - DNA, 25 bp, Canis familiaris
gcaaaccttggcaagccctatagac

SEQ ID NO: 104764 - DNA, 25 bp, Canis familiaris
gcaacctatagttatgcccgacatg

SEQ ID NO: 104765 - DNA, 25 bp, Canis familiaris
gcaacactccagtaatgatcttaag

SEQ ID NO: 104766 - DNA, 25 bp, Canis familiaris
gcaacactgctatgaagaccaaagg

SEQ ID NO: 104767 - DNA, 25 bp, Canis familiaris
gcaagagcgccatggagcgcctgaa

SEQ ID NO: 104768 - DNA, 25 bp, Canis familiaris
gcaaactggcaagacctgctgcaaa

SEQ ID NO: 104769 - DNA, 25 bp, Canis familiaris
gcaaagctacaagatcatcttcgcc

SEQ ID NO: 104770 - DNA, 25 bp, Canis familiaris
gcaaagttcacagtacagcagtcct

SEQ ID NO: 104771 - DNA, 25 bp, Canis familiaris
gcaaagattcactttacagttatgt

SEQ ID NO: 104772 - DNA, 25 bp, Canis familiaris
gcaaaaatcccttcatctttgtgca

SEQ ID NO: 104773 - DNA, 25 bp, Canis familiaris
gcacataaccttgtacaatcttgca

SEQ ID NO: 104774 - DNA, 25 bp, Canis familiaris
gcacaatcccttggctaaatttcaa

SEQ ID NO: 104775 - DNA, 25 bp, Canis familiaris
gcaacacgttgctgtcattttatca

SEQ ID NO: 104776 - DNA, 25 bp, Canis familiaris
gcaacagtttgccggctaaattcaa

SEQ ID NO: 104777 - DNA, 25 bp, Canis familiaris
gcaacacctgtgcctggcaagttga

SEQ ID NO: 104778 - DNA, 25 bp, Canis familiaris
gcacacctgcttcctaaatttacat

SEQ ID NO: 104779 - DNA, 25 bp, Canis familiaris
gcacacggttctttcgagtgaacag

SEQ ID NO: 104780 - DNA, 25 bp, Canis familiaris
gcacaggtggctcattgggctgaac

SEQ ID NO: 104781 - DNA, 25 bp, Canis familiaris
gcaagggcctgcaggacctgaagca

SEQ ID NO: 104782 - DNA, 25 bp, Canis familiaris
gcaatgtgaccggagctacgtgaag

SEQ ID NO: 104783 - DNA, 25 bp, Canis familiaris
gcaacgagacggactacgtaccact

SEQ ID NO: 104784 - DNA, 25 bp, Canis familiaris
gcaatagcgacgcgctggcgttaca

SEQ ID NO: 104785 - DNA, 25 bp, Canis familiaris
gcaacgcagatcgtggctgtggttt

SEQ ID NO: 104786 - DNA, 25 bp, Canis familiaris
gcaatcacgtcctgtgtttggtgga

SEQ ID NO: 104787 - DNA, 25 bp, Canis familiaris
gcaacaggtgtcggtcttgctgtgg

SEQ ID NO: 104788 - DNA, 25 bp, Canis familiaris
gcaaaagtatgctcctatgatatgt

SEQ ID NO: 104789 - DNA, 25 bp, Canis familiaris
gcacagaatttgcccaagagaatgt

SEQ ID NO: 104790 - DNA, 25 bp, Canis familiaris
gcacacaactggcccactgatgaaa

SEQ ID NO: 104791 - DNA, 25 bp, Canis familiaris
gcacacatggtgtcatccactgtga

SEQ ID NO: 104792 - DNA, 25 bp, Canis familiaris
gcacactcagtccatcgaagagtcc

SEQ ID NO: 104793 - DNA, 25 bp, Canis familiaris
gcacagcttgttaaaaggtccctct

SEQ ID NO: 104794 - DNA, 25 bp, Canis familiaris
gcaaattcttctacaaaggtcctct

SEQ ID NO: 104795 - DNA, 25 bp, Canis familiaris
gcacaactctttatacggttggctc

SEQ ID NO: 104796 - DNA, 25 bp, Canis familiaris
gcacaactctttatacggttggctc

SEQ ID NO: 104797 - DNA, 25 bp, Canis familiaris
gcaaacctctttatgctgggcatgg

SEQ ID NO: 104798 - DNA, 25 bp, Canis familiaris
gcaaatgcttttattcaggctggaa

SEQ ID NO: 104799 - DNA, 25 bp, Canis familiaris
gcaactaatatctaactcaggtggc

SEQ ID NO: 104800 - DNA, 25 bp, Canis familiaris
gcaagctcgatttagcccaaaggct

SEQ ID NO: 104801 - DNA, 25 bp, Canis familiaris
gcaagcttagtcactccagaaaccc

SEQ ID NO: 104802 - DNA, 25 bp, Canis familiaris
gcaacacaaatcacttctggaccca

SEQ ID NO: 104803 - DNA, 25 bp, Canis familiaris
gcaacctatatatcttctcaggccc

SEQ ID NO: 104804 - DNA, 25 bp, Canis familiaris
gcacacatcttttgagctgttagcc

SEQ ID NO: 104805 - DNA, 25 bp, Canis familiaris
gcacactctgtaacagcatgctgtt

SEQ ID NO: 104806 - DNA, 25 bp, Canis familiaris
gcacactcttaagtagctcataaca

SEQ ID NO: 104807 - DNA, 25 bp, Canis familiaris
gcacagctacttaccagtcactgaa

SEQ ID NO: 104808 - DNA, 25 bp, Canis familiaris
gcaagaagcttaacgatttcaaaga

SEQ ID NO: 104809 - DNA, 25 bp, Canis familiaris
gcaagaagaaaggctctttcaggag

SEQ ID NO: 104810 - DNA, 25 bp, Canis familiaris
gcaagtatgggtttctgttgggcac

SEQ ID NO: 104811 - DNA, 25 bp, Canis familiaris
gcaatcaatgggcagattatttggc

SEQ ID NO: 104812 - DNA, 25 bp, Canis familiaris
gcaaatatgcgtcggattttatgaa

SEQ ID NO: 104813 - DNA, 25 bp, Canis familiaris
gcaaatggcagtagaggtttgtaga

SEQ ID NO: 104814 - DNA, 25 bp, Canis familiaris
gcacagaggagtcgtgtcttctcta

SEQ ID NO: 104815 - DNA, 25 bp, Canis familiaris
gcaaggtgactagcatgttctgtga

SEQ ID NO: 104816 - DNA, 25 bp, Canis familiaris
gcaaattgatgcagcccttgctgga

SEQ ID NO: 104817 - DNA, 25 bp, Canis familiaris
gcacaggtgatcaacaccttgcaac

SEQ ID NO: 104818 - DNA, 25 bp, Canis familiaris
gcacagagatgtcaagccttccaac

SEQ ID NO: 104819 - DNA, 25 bp, Canis familiaris
gcaaggcagaaaagtctatcgaatg

SEQ ID NO: 104820 - DNA, 25 bp, Canis familiaris
gcaactcagaaacttctcaggactg

SEQ ID NO: 104821 - DNA, 25 bp, Canis familiaris
gcaacgcgaaagtttcaagacaggc

SEQ ID NO: 104822 - DNA, 25 bp, Canis familiaris
gcaaagaaacagttcacttacaggc

SEQ ID NO: 104823 - DNA, 25 bp, Canis familiaris
gcaaaataatcagaacccaagcctt

SEQ ID NO: 104824 - DNA, 25 bp, Canis familiaris
gcaaacgcaaagaagcaccctaccc

SEQ ID NO: 104825 - DNA, 25 bp, Canis familiaris
gcacacaccaaaacaaccagtatca

SEQ ID NO: 104826 - DNA, 25 bp, Canis familiaris
gcacagagccaaaccaactcgtgtt

SEQ ID NO: 104827 - DNA, 25 bp, Canis familiaris
gcaacagccatttacaggctcctgc

SEQ ID NO: 104828 - DNA, 25 bp, Canis familiaris
gcaacagcaaattcaccaatcacac

SEQ ID NO: 104829 - DNA, 25 bp, Canis familiaris
gcaacagcacagtatgcctgtctac

SEQ ID NO: 104830 - DNA, 25 bp, Canis familiaris
gcacagccagactagcactgtcatg

SEQ ID NO: 104831 - DNA, 25 bp, Canis familiaris
gcacagcaccactagcagctgctga

SEQ ID NO: 104832 - DNA, 25 bp, Canis familiaris
gcacagaccacccaggcatatgggc

SEQ ID NO: 104833 - DNA, 25 bp, Canis familiaris
gcaaaccccgaagctgaggggcagc

SEQ ID NO: 104834 - DNA, 25 bp, Canis familiaris
gcacagacaccagcaaacagggggc

SEQ ID NO: 104835 - DNA, 25 bp, Canis familiaris
gcaaattccatagtaggcacgggag

SEQ ID NO: 104836 - DNA, 25 bp, Canis familiaris
gcaaattccatcgtgtgatcaagga

SEQ ID NO: 104837 - DNA, 25 bp, Canis familiaris
gcacaagtcccggatgtacagccag

SEQ ID NO: 104838 - DNA, 25 bp, Canis familiaris
gcaacatcattttaagtacagccag

SEQ ID NO: 104839 - DNA, 25 bp, Canis familiaris
gcaagattattaacagatacacgct

SEQ ID NO: 104840 - DNA, 25 bp, Canis familiaris
gcacagtatttcacactttccttgg

SEQ ID NO: 104841 - DNA, 25 bp, Canis familiaris
gaatggttcttcgagtttggctttg

SEQ ID NO: 104842 - DNA, 25 bp, Canis familiaris
gcaaggtcttattcattttggtctt

SEQ ID NO: 104843 - DNA, 25 bp, Canis familiaris
gcaaggtttgctgtccaaggtgtaa

SEQ ID NO: 104844 - DNA, 25 bp, Canis familiaris
gcacaggttgtcactctcaagatct

SEQ ID NO: 104845 - DNA, 25 bp, Canis familiaris
gcacaggctttaactccaattgtcg

SEQ ID NO: 104846 - DNA, 25 bp, Canis familiaris
gcaaggctggaaacccacatctggc

SEQ ID NO: 104847 - DNA, 25 bp, Canis familiaris
gcaaggagtggacctccaccagttc

SEQ ID NO: 104848 - DNA, 25 bp, Canis familiaris
gcacaggtggagttctagctccgtt

SEQ ID NO: 104849 - DNA, 25 bp, Canis familiaris
gcaagtgggcagtcttctgcacgga

SEQ ID NO: 104850 - DNA, 25 bp, Canis familiaris
gcacagctgggcattcgtgaggaga

SEQ ID NO: 104851 - DNA, 25 bp, Canis familiaris
gcacagctggaggtttgctctgatg

SEQ ID NO: 104852 - DNA, 25 bp, Canis familiaris
gcacagctggataaattgtcaatgc

SEQ ID NO: 104853 - DNA, 25 bp, Canis familiaris
gcacagggcatcaacatggccaaca

SEQ ID NO: 104854 - DNA, 25 bp, Canis familiaris
gcacagtgacacagtgctctccatc

SEQ ID NO: 104855 - DNA, 25 bp, Canis familiaris
gcacagagacgcatgagctcttccc

SEQ ID NO: 104856 - DNA, 25 bp, Canis familiaris
gcacagagacacgggcatccttgac

SEQ ID NO: 104857 - DNA, 25 bp, Canis familiaris
gcaatgaaattgtactccttgacag

SEQ ID NO: 104858 - DNA, 25 bp, Canis familiaris
gcaagcagaactcactactctagag

SEQ ID NO: 104859 - DNA, 25 bp, Canis familiaris
gcaagctgagagccctgcttgctgc

SEQ ID NO: 104860 - DNA, 25 bp, Canis familiaris
gcaatgcagataagcccatcatggg

SEQ ID NO: 104861 - DNA, 25 bp, Canis familiaris
gcacagcagcattcagagtctcatc

SEQ ID NO: 104862 - DNA, 25 bp, Canis familiaris
gcacagcagctgtgagcacttacgc

SEQ ID NO: 104863 - DNA, 25 bp, Canis familiaris
gcacagaggtagtcacttgcccaga

SEQ ID NO: 104864 - DNA, 25 bp, Canis familiaris
gcaatgagcggttccgctgccctga

SEQ ID NO: 104865 - DNA, 25 bp, Canis familiaris
gcaaagcagaacgcttgcgcacgga

SEQ ID NO: 104866 - DNA, 25 bp, Canis familiaris
gcaaaagcagagcccgtggctgggc

SEQ ID NO: 104867 - DNA, 25 bp, Canis familiaris
gcacaacagcggcccggagggccgg

SEQ ID NO: 104868 - DNA, 25 bp, Canis familiaris
gcacagactcggtaaggggggcagc

SEQ ID NO: 104869 - DNA, 25 bp, Canis familiaris
gcaagcacagaacaatggggccgcc

SEQ ID NO: 104870 - DNA, 25 bp, Canis familiaris
gcacagcgaaggagaaggacccccg

SEQ ID NO: 104871 - DNA, 25 bp, Canis familiaris
gcaaggacactgagcaagagaggcc

SEQ ID NO: 104872 - DNA, 25 bp, Canis familiaris
gcaagggggcacgatagagagacac

SEQ ID NO: 104873 - DNA, 25 bp, Canis familiaris
gcaacaggggaggaaagagaacccg

SEQ ID NO: 104874 - DNA, 25 bp, Canis familiaris
gcaaccagttgggaaaaatcaacct

SEQ ID NO: 104875 - DNA, 25 bp, Canis familiaris
gcaaccgattgctcaggaaactcac

SEQ ID NO: 104876 - DNA, 25 bp, Canis familiaris
gcaagtggacttccggaagaccatg

SEQ ID NO: 104877 - DNA, 25 bp, Canis familiaris
gcaaatgccgcttcggtgacaaaca

SEQ ID NO: 104878 - DNA, 25 bp, Canis familiaris
gcaagtcctgcctggagagtaactg

SEQ ID NO: 104879 - DNA, 25 bp, Canis familiaris
gcaagtgcccctgggcaagagagga

SEQ ID NO: 104880 - DNA, 25 bp, Canis familiaris
gcacagctgcccctggggagggggc

SEQ ID NO: 104881 - DNA, 25 bp, Canis familiaris
gcaagcacgcgaaggtggcaggtgg

SEQ ID NO: 104882 - DNA, 25 bp, Canis familiaris
gcacacacatcacagggaagaggga

SEQ ID NO: 104883 - DNA, 25 bp, Canis familiaris
gcaaacattcactgcagaaggggaa

SEQ ID NO: 104884 - DNA, 25 bp, Canis familiaris
gcaaatactgcccgcaaagctcgcg

SEQ ID NO: 104885 - DNA, 25 bp, Canis familiaris
gcaaatcactgctcagcaacctgga

SEQ ID NO: 104886 - DNA, 25 bp, Canis familiaris
gcaaatcactgttcagcaggctgtt

SEQ ID NO: 104887 - DNA, 25 bp, Canis familiaris
gcacagacaggcccagacttgaagt

SEQ ID NO: 104888 - DNA, 25 bp, Canis familiaris
gactcctccacgtgggacgatagtc

SEQ ID NO: 104889 - DNA, 25 bp, Canis familiaris
gcaacttcggcctgggcaggaagtc

SEQ ID NO: 104890 - DNA, 25 bp, Canis familiaris
gaattttgtcactgtccatggaact

SEQ ID NO: 104891 - DNA, 25 bp, Canis familiaris
gaattattttctaggccagagctga

SEQ ID NO: 104892 - DNA, 25 bp, Canis familiaris
gcaaagagtttgtgtccagtgatga

SEQ ID NO: 104893 - DNA, 25 bp, Canis familiaris
gcaagacgtttgtggaagctggaaa

SEQ ID NO: 104894 - DNA, 25 bp, Canis familiaris
gcacacctggttttgtaaggtacta

SEQ ID NO: 104895 - DNA, 25 bp, Canis familiaris
gcacagcctgtttctctgtaacatt

SEQ ID NO: 104896 - DNA, 25 bp, Canis familiaris
gcaagcactttctttagagagtttc

SEQ ID NO: 104897 - DNA, 25 bp, Canis familiaris
gcaacaatgaccttttattttctgt

SEQ ID NO: 104898 - DNA, 25 bp, Canis familiaris
gcaacacaaccatggagtttctctc

SEQ ID NO: 104899 - DNA, 25 bp, Canis familiaris
gaatcctttcaacggtatcctccgg

SEQ ID NO: 104900 - DNA, 25 bp, Canis familiaris
gaaatctacgaccgttatggccggg

SEQ ID NO: 104901 - DNA, 25 bp, Canis familiaris
gaacatccctgtgagttttccgaag

SEQ ID NO: 104902 - DNA, 25 bp, Canis familiaris
gcaaaccactggaagttttccaggt

SEQ ID NO: 104903 - DNA, 25 bp, Canis familiaris
gcaaaaccttgatacctctacagag

SEQ ID NO: 104904 - DNA, 25 bp, Canis familiaris
gaataaccctgagatcacctcttag

SEQ ID NO: 104905 - DNA, 25 bp, Canis familiaris
gcaataaaactatgaccctctcgaa

SEQ ID NO: 104906 - DNA, 25 bp, Canis familiaris
gcaagaagctactaaacccgacaga

SEQ ID NO: 104907 - DNA, 25 bp, Canis familiaris
gcaaggatatcataaggcccactaa

SEQ ID NO: 104908 - DNA, 25 bp, Canis familiaris
gcaaaagtgcttgtgtgcccattta

SEQ ID NO: 104909 - DNA, 25 bp, Canis familiaris
gcaaagttgctcaaagccccttata

SEQ ID NO: 104910 - DNA, 25 bp, Canis familiaris
gcaaagtcgtcaaacaccgtgccat

SEQ ID NO: 104911 - DNA, 25 bp, Canis familiaris
gcaaagctgttaaaccccagctcat

SEQ ID NO: 104912 - DNA, 25 bp, Canis familiaris
gcaaagactggaagaccccactgcc

SEQ ID NO: 104913 - DNA, 25 bp, Canis familiaris
gcaaagactgtgagttcaaactgac

SEQ ID NO: 104914 - DNA, 25 bp, Canis familiaris
taaaattgggccacaaaccaccaag

SEQ ID NO: 104915 - DNA, 25 bp, Canis familiaris
tatttaggggacacaaaggaacaag

SEQ ID NO: 104916 - DNA, 25 bp, Canis familiaris
tttgccgggtactcccagtaagaat

SEQ ID NO: 104917 - DNA, 25 bp, Canis familiaris
gttccacggtattcacccagaaaga

SEQ ID NO: 104918 - DNA, 25 bp, Canis familiaris
gttccctgggtctccataaaacaat

SEQ ID NO: 104919 - DNA, 25 bp, Canis familiaris
gttccggttccctctaaaaatgatg

SEQ ID NO: 104920 - DNA, 25 bp, Canis familiaris
gtcctttttcttgactaataaatat

SEQ ID NO: 104921 - DNA, 25 bp, Canis familiaris
gtacttattaccacctaaaatatgt

SEQ ID NO: 104922 - DNA, 25 bp, Canis familiaris
gtttttacactcacctaaacatatt

SEQ ID NO: 104923 - DNA, 25 bp, Canis familiaris
gaataaccccacacctataagaaat

SEQ ID NO: 104924 - DNA, 25 bp, Canis familiaris
gaaaattgaaccatccttaagtagt

SEQ ID NO: 104925 - DNA, 25 bp, Canis familiaris
gaaggcaaaaacactctttattagt

SEQ ID NO: 104926 - DNA, 25 bp, Canis familiaris
gaagggaaacttcatcactattgat

SEQ ID NO: 104927 - DNA, 25 bp, Canis familiaris
gcaaggcccaactgttgcactatca

SEQ ID NO: 104928 - DNA, 25 bp, Canis familiaris
gcaagtgcaccatctaaggagccca

SEQ ID NO: 104929 - DNA, 25 bp, Canis familiaris
gcaagctaccttcagagtagtgcca

SEQ ID NO: 104930 - DNA, 25 bp, Canis familiaris
gcaagtcaagctggccgagggtgtc

SEQ ID NO: 104931 - DNA, 25 bp, Canis familiaris
gcaaccaaatcacccaggttgatgc

SEQ ID NO: 104932 - DNA, 25 bp, Canis familiaris
gcaaccaattcagccaagtttattt

SEQ ID NO: 104933 - DNA, 25 bp, Canis familiaris
gcaaccacccatgagcaaaataatt

SEQ ID NO: 104934 - DNA, 25 bp, Canis familiaris
gcaacaccagcctcacaaaatagtg

SEQ ID NO: 104935 - DNA, 25 bp, Canis familiaris
gaaccccttaccttgcaaagtgaat

SEQ ID NO: 104936 - DNA, 25 bp, Canis familiaris
gcaacttcctttgttcaatgatgtt

SEQ ID NO: 104937 - DNA, 25 bp, Canis familiaris
gcacacctcactagtgttccaagct

SEQ ID NO: 104938 - DNA, 25 bp, Canis familiaris
gcacacgcacacagttctggacaga

SEQ ID NO: 104939 - DNA, 25 bp, Canis familiaris
gcaacaggatccctcttggagagat

SEQ ID NO: 104940 - DNA, 25 bp, Canis familiaris
gcaaaatgtcctatctggcaaatga

SEQ ID NO: 104941 - DNA, 25 bp, Canis familiaris
gcaaaactcccgtctagcaggatac

SEQ ID NO: 104942 - DNA, 25 bp, Canis familiaris
gcacaacatccctgtctacaaggac

SEQ ID NO: 104943 - DNA, 25 bp, Canis familiaris
gacacgcttcccgtaaacggagacg

SEQ ID NO: 104944 - DNA, 25 bp, Canis familiaris
gaattctccccgagaaacgagaagc

SEQ ID NO: 104945 - DNA, 25 bp, Canis familiaris
gaaggctccaccaggtactaagggc

SEQ ID NO: 104946 - DNA, 25 bp, Canis familiaris
gaatcctcctccagggttggggaga

SEQ ID NO: 104947 - DNA, 25 bp, Canis familiaris
gaactccctagtggggtaccgagct

SEQ ID NO: 104948 - DNA, 25 bp, Canis familiaris
gaacttccggagggattgttctggt

SEQ ID NO: 104949 - DNA, 25 bp, Canis familiaris
gcaaccccaggagctgagatttttc

SEQ ID NO: 104950 - DNA, 25 bp, Canis familiaris
gcaaaaaagccccatcagtttcttc

SEQ ID NO: 104951 - DNA, 25 bp, Canis familiaris
gcaaatccaacagcgttttctcttt

SEQ ID NO: 104952 - DNA, 25 bp, Canis familiaris
gcaaatcaaacacattggacttctt

SEQ ID NO: 104953 - DNA, 25 bp, Canis familiaris
gcaaatgccctctctggtgacgttt

SEQ ID NO: 104954 - DNA, 25 bp, Canis familiaris
gcaaagcccttgggagtgaccttga

SEQ ID NO: 104955 - DNA, 25 bp, Canis familiaris
gaattggcttggttagtgacccagg

SEQ ID NO: 104956 - DNA, 25 bp, Canis familiaris
gaatccaattgggtgtttcctagga

SEQ ID NO: 104957 - DNA, 25 bp, Canis familiaris
gcaaccacattgagctgtcttctta

SEQ ID NO: 104958 - DNA, 25 bp, Canis familiaris
gcaagccacattgacatatcctact

SEQ ID NO: 104959 - DNA, 25 bp, Canis familiaris
gcaaatcattatgtcattcgtccaa

SEQ ID NO: 104960 - DNA, 25 bp, Canis familiaris
gcaaagatcttgtctattggcccct

SEQ ID NO: 104961 - DNA, 25 bp, Canis familiaris
gcacaatgtgttttctttaatcctg

SEQ ID NO: 104962 - DNA, 25 bp, Canis familiaris
gcacacatgtgtcattctgttgata

SEQ ID NO: 104963 - DNA, 25 bp, Canis familiaris
gcaaatgtgacactgtctatcagta

SEQ ID NO: 104964 - DNA, 25 bp, Canis familiaris
gcaaatgtgacactgtctatcagta

SEQ ID NO: 104965 - DNA, 25 bp, Canis familiaris
gcaaatgtatctattgagaatattc

SEQ ID NO: 104966 - DNA, 25 bp, Canis familiaris
gcaaagatgcttacagtgaaaccac

SEQ ID NO: 104967 - DNA, 25 bp, Canis familiaris
gcaagagccagaacaggaagacccc

SEQ ID NO: 104968 - DNA, 25 bp, Canis familiaris
gcaaggccaagaaggaggcgccccc

SEQ ID NO: 104969 - DNA, 25 bp, Canis familiaris
gcaacagccaaatggggacccaggc

SEQ ID NO: 104970 - DNA, 25 bp, Canis familiaris
gaaactacatgatgaggaaatccag

SEQ ID NO: 104971 - DNA, 25 bp, Canis familiaris
gaagagggaaagttgaaatctcaga

SEQ ID NO: 104972 - DNA, 25 bp, Canis familiaris
gaagaaggtaaagcaaacgcaaaga

SEQ ID NO: 104973 - DNA, 25 bp, Canis familiaris
gcacaaagcacaacgaccaagacca

SEQ ID NO: 104974 - DNA, 25 bp, Canis familiaris
gcaaaggcagcaggctaccggacgg

SEQ ID NO: 104975 - DNA, 25 bp, Canis familiaris
gcaaggggcttcaacctggaggagc

SEQ ID NO: 104976 - DNA, 25 bp, Canis familiaris
gcaaccccttgcactgtgaaaagct

SEQ ID NO: 104977 - DNA, 25 bp, Canis familiaris
gcaacacctcggaaaggaaacacgt

SEQ ID NO: 104978 - DNA, 25 bp, Canis familiaris
gcaagacctcctcaagagaaccact

SEQ ID NO: 104979 - DNA, 25 bp, Canis familiaris
gcaagaggacaccaaatgaggacca

SEQ ID NO: 104980 - DNA, 25 bp, Canis familiaris
gcacaagccctccaaagtgctgtcc

SEQ ID NO: 104981 - DNA, 25 bp, Canis familiaris
gcacaagtgcttagctgaggccgtc

SEQ ID NO: 104982 - DNA, 25 bp, Canis familiaris
gcacaagtgtttagctgagccgtcc

SEQ ID NO: 104983 - DNA, 25 bp, Canis familiaris
gcaaatctgttcaactacctgttag

SEQ ID NO: 104984 - DNA, 25 bp, Canis familiaris
gcaaatgcttttttatctgcccttg

SEQ ID NO: 104985 - DNA, 25 bp, Canis familiaris
gcaacagattttctactgcttctca

SEQ ID NO: 104986 - DNA, 25 bp, Canis familiaris
gcaacaagttttagacactttatta

SEQ ID NO: 104987 - DNA, 25 bp, Canis familiaris
gcaaaagttattaaagatggtccaa

SEQ ID NO: 104988 - DNA, 25 bp, Canis familiaris
gcacaaaacttagcacaaacattac

SEQ ID NO: 104989 - DNA, 25 bp, Canis familiaris
gcaatgtctacaatggccaaaccat

SEQ ID NO: 104990 - DNA, 25 bp, Canis familiaris
gcacaattctcaaggacatcataac

SEQ ID NO: 104991 - DNA, 25 bp, Canis familiaris
gcaagatcctcatgcaccatatacc

SEQ ID NO: 104992 - DNA, 25 bp, Canis familiaris
gcaagcatctgccataatctgccat

SEQ ID NO: 104993 - DNA, 25 bp, Canis familiaris
gcaaactcttcattgtgctgcttgt

SEQ ID NO: 104994 - DNA, 25 bp, Canis familiaris
gaatagcggtgcttgcagcgcttgc

SEQ ID NO: 104995 - DNA, 25 bp, Canis familiaris
gcaatcatgcgattcttcagctctt

SEQ ID NO: 104996 - DNA, 25 bp, Canis familiaris
gcaaatgaatctagtgctcctctcc

SEQ ID NO: 104997 - DNA, 25 bp, Canis familiaris
gcaaatgacaggattcccctctttt

SEQ ID NO: 104998 - DNA, 25 bp, Canis familiaris
gcaacaggggatgtccccacctaat

SEQ ID NO: 104999 - DNA, 25 bp, Canis familiaris
gcaacaggggacatgcccaacctgc

SEQ ID NO: 105000 - DNA, 25 bp, Canis familiaris
gcaacctgtgaacacccaagtctgc

SEQ ID NO: 105001 - DNA, 25 bp, Canis familiaris
gaaatctctgaacacgaaaccgact

SEQ ID NO: 105002 - DNA, 25 bp, Canis familiaris
gaatttctagggtccagacaccgac

SEQ ID NO: 105003 - DNA, 25 bp, Canis familiaris
gaattttttgtacccgagacgtgct

SEQ ID NO: 105004 - DNA, 25 bp, Canis familiaris
gcaattggatctttacccgtgacca

SEQ ID NO: 105005 - DNA, 25 bp, Canis familiaris
gcaagtgcaatattttccctaacct

SEQ ID NO: 105006 - DNA, 25 bp, Canis familiaris
gcaactgacttgatccgaataacca

SEQ ID NO: 105007 - DNA, 25 bp, Canis familiaris
gcaaaacattgcatccctaagactc

SEQ ID NO: 105008 - DNA, 25 bp, Canis familiaris
gaacgacattggagccattggtccc

SEQ ID NO: 105009 - DNA, 25 bp, Canis familiaris
gcaacgaagcggtaccagagggcca

SEQ ID NO: 105010 - DNA, 25 bp, Canis familiaris
gcaacgcagagaaaccatcagaggt

SEQ ID NO: 105011 - DNA, 25 bp, Canis familiaris
gcaagcgcaacacaaccatggagtt

SEQ ID NO: 105012 - DNA, 25 bp, Canis familiaris
gcaacaagtgcaaaccctgtgaata

SEQ ID NO: 105013 - DNA, 25 bp, Canis familiaris
gcacaattccatgaccctgagaaca

SEQ ID NO: 105014 - DNA, 25 bp, Canis familiaris
gcaaattccatggcaccgtcaaggc

SEQ ID NO: 105015 - DNA, 25 bp, Canis familiaris
gcaaattccacggcacagtcaaggc

SEQ ID NO: 105016 - DNA, 25 bp, Canis familiaris
gcaaattcaacggcacagtcaaggc

SEQ ID NO: 105017 - DNA, 25 bp, Canis familiaris
gcaacctgcaaagagctggcaagcc

SEQ ID NO: 105018 - DNA, 25 bp, Canis familiaris
gcaagcgcagctgcaaagggacgcc

SEQ ID NO: 105019 - DNA, 25 bp, Canis familiaris
gcaagcctggcagaaggctgatatc

SEQ ID NO: 105020 - DNA, 25 bp, Canis familiaris
gcaactctggcacacaggggacaca

SEQ ID NO: 105021 - DNA, 25 bp, Canis familiaris
gcaacttggaaattggggcccttgg

SEQ ID NO: 105022 - DNA, 25 bp, Canis familiaris
gcaacagtgcaacagtggaggagcc

SEQ ID NO: 105023 - DNA, 25 bp, Canis familiaris
gcaacagcagcctgcagctggatta

SEQ ID NO: 105024 - DNA, 25 bp, Canis familiaris
gcaaacagccagacacttgattatc

SEQ ID NO: 105025 - DNA, 25 bp, Canis familiaris
gcaaacagccccagaattatccatt

SEQ ID NO: 105026 - DNA, 25 bp, Canis familiaris
gcaaaacaccacaaattctaccact

SEQ ID NO: 105027 - DNA, 25 bp, Canis familiaris
gcaacaacaaagggagtctcactca

SEQ ID NO: 105028 - DNA, 25 bp, Canis familiaris
gcaaccaacatagggaggctcactc

SEQ ID NO: 105029 - DNA, 25 bp, Canis familiaris
gcaaccgacatcgggatggcgtcac

SEQ ID NO: 105030 - DNA, 25 bp, Canis familiaris
gcaagttgagccgggtggagatcct

SEQ ID NO: 105031 - DNA, 25 bp, Canis familiaris
gcaacatgtaccaggatggacatca

SEQ ID NO: 105032 - DNA, 25 bp, Canis familiaris
gcaacagtacacaagggttcctttt

SEQ ID NO: 105033 - DNA, 25 bp, Canis familiaris
gcaacagtcaactctgttacccttt

SEQ ID NO: 105034 - DNA, 25 bp, Canis familiaris
gcaaatgttgactctggaaccgctc

SEQ ID NO: 105035 - DNA, 25 bp, Canis familiaris
gcaaatgggccagaagacctcaatc

SEQ ID NO: 105036 - DNA, 25 bp, Canis familiaris
gcaaaaggctcagaaactcacccct

SEQ ID NO: 105037 - DNA, 25 bp, Canis familiaris
gcaaaaggctctcctaatactccac

SEQ ID NO: 105038 - DNA, 25 bp, Canis familiaris
gcaaaggtgtcatcttctacctcag

SEQ ID NO: 105039 - DNA, 25 bp, Canis familiaris
gcaaccgtggcatgttcatgaagcc

SEQ ID NO: 105040 - DNA, 25 bp, Canis familiaris
gcaacggcttgcaagtttagcactg

SEQ ID NO: 105041 - DNA, 25 bp, Canis familiaris
gcaacgtctctggggagttcacgga

SEQ ID NO: 105042 - DNA, 25 bp, Canis familiaris
gcaactgcgcctggcgcgttaacgg

SEQ ID NO: 105043 - DNA, 25 bp, Canis familiaris
gcaacgctgcttctcagtaaacctg

SEQ ID NO: 105044 - DNA, 25 bp, Canis familiaris
gcaaatgctgtccccagtattacgt

SEQ ID NO: 105045 - DNA, 25 bp, Canis familiaris
gcaaatctttcttattaatacatgt

SEQ ID NO: 105046 - DNA, 25 bp, Canis familiaris
gcaacatttgggccagctaaacatg

SEQ ID NO: 105047 - DNA, 25 bp, Canis familiaris
gcaacaattgcggtcactggagaga

SEQ ID NO: 105048 - DNA, 25 bp, Canis familiaris
gcaacaattgcagccactggagacc

SEQ ID NO: 105049 - DNA, 25 bp, Canis familiaris
gcaacatgactaatcactggggaca

SEQ ID NO: 105050 - DNA, 25 bp, Canis familiaris
gcaaagagtgcaacctgtgccaaca

SEQ ID NO: 105051 - DNA, 25 bp, Canis familiaris
gcaaaatggatcgacatggaaatga

SEQ ID NO: 105052 - DNA, 25 bp, Canis familiaris
gcaaagtctggcgagatgaacacta

SEQ ID NO: 105053 - DNA, 25 bp, Canis familiaris
gcaagactgcagccaagaaaagcga

SEQ ID NO: 105054 - DNA, 25 bp, Canis familiaris
gcaacatgggtgcgacacaacagaa

SEQ ID NO: 105055 - DNA, 25 bp, Canis familiaris
gcaactggtgggcagtccacggagg

SEQ ID NO: 105056 - DNA, 25 bp, Canis familiaris
gcaattgggggtagacaccggtcgg

SEQ ID NO: 105057 - DNA, 25 bp, Canis familiaris
gcaagtgtggggacgcagctactgc

SEQ ID NO: 105058 - DNA, 25 bp, Canis familiaris
gcaagatggaggcgagcgccgtgcg

SEQ ID NO: 105059 - DNA, 25 bp, Canis familiaris
gcaagggagaggcactgcggatccg

SEQ ID NO: 105060 - DNA, 25 bp, Canis familiaris
gcaatgccaagacggtccggaacga

SEQ ID NO: 105061 - DNA, 25 bp, Canis familiaris
gcaacacaggaccatgggctggaac

SEQ ID NO: 105062 - DNA, 25 bp, Canis familiaris
gcaaccaggaccaaagggacagaaa

SEQ ID NO: 105063 - DNA, 25 bp, Canis familiaris
gcaacctggaggaagccaagaagaa

SEQ ID NO: 105064 - DNA, 25 bp, Canis familiaris
gaatccaggggccagcctagaaacc

SEQ ID NO: 105065 - DNA, 25 bp, Canis familiaris
gaattcctggatcccctttagatcc

SEQ ID NO: 105066 - DNA, 25 bp, Canis familiaris
gaatgaaatcttgcctttaacacca

SEQ ID NO: 105067 - DNA, 25 bp, Canis familiaris
gaagatattggtggcccgaaaagcg

SEQ ID NO: 105068 - DNA, 25 bp, Canis familiaris
gaagaagtggctgatttaaaggtga

SEQ ID NO: 105069 - DNA, 25 bp, Canis familiaris
gaatttgggtaataaccaggtcagg

SEQ ID NO: 105070 - DNA, 25 bp, Canis familiaris
gcaatttggggacctgaaaagtgct

SEQ ID NO: 105071 - DNA, 25 bp, Canis familiaris
gcaattcttgggggggacagttgct

SEQ ID NO: 105072 - DNA, 25 bp, Canis familiaris
gcaagttttgttgggcgaattgtgt

SEQ ID NO: 105073 - DNA, 25 bp, Canis familiaris
gcaaactttgtgagcgtcagtgttg

SEQ ID NO: 105074 - DNA, 25 bp, Canis familiaris
gcaaaccgctgcttacgatgcattg

SEQ ID NO: 105075 - DNA, 25 bp, Canis familiaris
gcaaagcccatgtaactggcttgac

SEQ ID NO: 105076 - DNA, 25 bp, Canis familiaris
gcaaagcagccgcaaggacgtgacc

SEQ ID NO: 105077 - DNA, 25 bp, Canis familiaris
gcaaacgccgcacaggtgtgtgccc

SEQ ID NO: 105078 - DNA, 25 bp, Canis familiaris
gcaaacccgcagcttgctgttggaa

SEQ ID NO: 105079 - DNA, 25 bp, Canis familiaris
gcaaaccctagcctttgtgtgtgtg

SEQ ID NO: 105080 - DNA, 25 bp, Canis familiaris
gcaaacccttcagtcgggcttttat

SEQ ID NO: 105081 - DNA, 25 bp, Canis familiaris
gcaaatgcctcttagctcaggcctt

SEQ ID NO: 105082 - DNA, 25 bp, Canis familiaris
gcaacagtctttttcgacgcatctt

SEQ ID NO: 105083 - DNA, 25 bp, Canis familiaris
gcaacaacctaattcagcactatca

SEQ ID NO: 105084 - DNA, 25 bp, Canis familiaris
gcaaatcccataatatcatgctcca

SEQ ID NO: 105085 - DNA, 25 bp, Canis familiaris
gcaacattccacgaacatgcataac

SEQ ID NO: 105086 - DNA, 25 bp, Canis familiaris
gcaacatttgtcgagccctaagatt

SEQ ID NO: 105087 - DNA, 25 bp, Canis familiaris
gcaaatgctctgaggtcaccaagtt

SEQ ID NO: 105088 - DNA, 25 bp, Canis familiaris
gcaattcattgcaaagccccagaat

SEQ ID NO: 105089 - DNA, 25 bp, Canis familiaris
gcaattctcctaaacccgagtaatt

SEQ ID NO: 105090 - DNA, 25 bp, Canis familiaris
gaatttaataagggccaggccaagt

SEQ ID NO: 105091 - DNA, 25 bp, Canis familiaris
gaaattacaaccccaagtctacagt

SEQ ID NO: 105092 - DNA, 25 bp, Canis familiaris
gcaaatatacaatgggcatcagtta

SEQ ID NO: 105093 - DNA, 25 bp, Canis familiaris
gcaaatataatatctcggtgttcat

SEQ ID NO: 105094 - DNA, 25 bp, Canis familiaris
gcaaaatgatctcaccaggtctctg

SEQ ID NO: 105095 - DNA, 25 bp, Canis familiaris
gcaagagtattccacttggctctca

SEQ ID NO: 105096 - DNA, 25 bp, Canis familiaris
gcaaagtgcttgccactatgtacta

SEQ ID NO: 105097 - DNA, 25 bp, Canis familiaris
gcaaagtgaagacattgtaccagaa

SEQ ID NO: 105098 - DNA, 25 bp, Canis familiaris
gcaacaggagaactacatggcccaa

SEQ ID NO: 105099 - DNA, 25 bp, Canis familiaris
gcaagcgggagttcaaggccggagg

SEQ ID NO: 105100 - DNA, 25 bp, Canis familiaris
gcaagggggtacaggttgaatgggt

SEQ ID NO: 105101 - DNA, 25 bp, Canis familiaris
gcaatgtggggctgtttttacgggt

SEQ ID NO: 105102 - DNA, 25 bp, Canis familiaris
gcaatggagggttctcccttactgg

SEQ ID NO: 105103 - DNA, 25 bp, Canis familiaris
gcaaggatatcctaccccattaact

SEQ ID NO: 105104 - DNA, 25 bp, Canis familiaris
gcaagctgatcacagaccacgcttc

SEQ ID NO: 105105 - DNA, 25 bp, Canis familiaris
gcaaggaccaagtcaaagtcatgcc

SEQ ID NO: 105106 - DNA, 25 bp, Canis familiaris
gcaatatcccagtatcaaactcccc

SEQ ID NO: 105107 - DNA, 25 bp, Canis familiaris
gcaacatcccaaataggagctccag

SEQ ID NO: 105108 - DNA, 25 bp, Canis familiaris
gcaacacttcaattggagactcaca

SEQ ID NO: 105109 - DNA, 25 bp, Canis familiaris
gcaaaccaagttcggcaatacatta

SEQ ID NO: 105110 - DNA, 25 bp, Canis familiaris
gcaaaccatcacatgaaccatttta

SEQ ID NO: 105111 - DNA, 25 bp, Canis familiaris
gcaaaccatctctgttacaattcat

SEQ ID NO: 105112 - DNA, 25 bp, Canis familiaris
gcaaaccttgatggactgacacatt

SEQ ID NO: 105113 - DNA, 25 bp, Canis familiaris
gcaaaccatatgtctgatcaaactt

SEQ ID NO: 105114 - DNA, 25 bp, Canis familiaris
gcaagaacactggtatacaagctat

SEQ ID NO: 105115 - DNA, 25 bp, Canis familiaris
gcaaggccctgggctgagcaagcac

SEQ ID NO: 105116 - DNA, 25 bp, Canis familiaris
gcaaggtccctgggtgaatgccaat

SEQ ID NO: 105117 - DNA, 25 bp, Canis familiaris
gcaaagcccaaggaagaagccattc

SEQ ID NO: 105118 - DNA, 25 bp, Canis familiaris
gcaaggcaccagtggaacagcttct

SEQ ID NO: 105119 - DNA, 25 bp, Canis familiaris
gcaaggccgcttcggaaacgtgttc

SEQ ID NO: 105120 - DNA, 25 bp, Canis familiaris
gcaagctgcggttgtggaagagctg

SEQ ID NO: 105121 - DNA, 25 bp, Canis familiaris
gcaagcagctggaagatggccgcac

SEQ ID NO: 105122 - DNA, 25 bp, Canis familiaris
gcaagcagctggaagatggccgcac

SEQ ID NO: 105123 - DNA, 25 bp, Canis familiaris
gcaacctggtagtgttcaattcacg

SEQ ID NO: 105124 - DNA, 25 bp, Canis familiaris
gcaaccggtggtggactcatggtcc

SEQ ID NO: 105125 - DNA, 25 bp, Canis familiaris
gcaaaccaggggcactctggatcca

SEQ ID NO: 105126 - DNA, 25 bp, Canis familiaris
gcaaagacgcggggtctctgttcta

SEQ ID NO: 105127 - DNA, 25 bp, Canis familiaris
gcaagcaagcagcgtttctcttttc

SEQ ID NO: 105128 - DNA, 25 bp, Canis familiaris
gcaaggctggcttgtttggttcgct

SEQ ID NO: 105129 - DNA, 25 bp, Canis familiaris
gaagtctggggagatggtcccaaag

SEQ ID NO: 105130 - DNA, 25 bp, Canis familiaris
gcaagttggggagacccctacagtc

SEQ ID NO: 105131 - DNA, 25 bp, Canis familiaris
gcaacttcctggactaaccgtgaag

SEQ ID NO: 105132 - DNA, 25 bp, Canis familiaris
gcaaagtcaaagatcaacgttaatg

SEQ ID NO: 105133 - DNA, 25 bp, Canis familiaris
gcaaaggcagaaatcaccaggctta

SEQ ID NO: 105134 - DNA, 25 bp, Canis familiaris
gcaagaggagacaatccaagcgctt

SEQ ID NO: 105135 - DNA, 25 bp, Canis familiaris
gcaaagggtctacttacgctgctgg

SEQ ID NO: 105136 - DNA, 25 bp, Canis familiaris
gcaaagggcattattatatactgta

SEQ ID NO: 105137 - DNA, 25 bp, Canis familiaris
gcaagggtactgagcacataactag

SEQ ID NO: 105138 - DNA, 25 bp, Canis familiaris
gcaatggttactactcagatgggaa

SEQ ID NO: 105139 - DNA, 25 bp, Canis familiaris
gcaaactgatacagccactctggaa

SEQ ID NO: 105140 - DNA, 25 bp, Canis familiaris
gcaaagccatgaatactcactctga

SEQ ID NO: 105141 - DNA, 25 bp, Canis familiaris
gcaacagctgagatcctgcagtgct

SEQ ID NO: 105142 - DNA, 25 bp, Canis familiaris
gcaacttgcagattcagaactgcca

SEQ ID NO: 105143 - DNA, 25 bp, Canis familiaris
gcaagcctcagtacgacatctgggg

SEQ ID NO: 105144 - DNA, 25 bp, Canis familiaris
gcaacagcatcatgggagctctggg

SEQ ID NO: 105145 - DNA, 25 bp, Canis familiaris
gcaagaaagatgagcagcctgcttc

SEQ ID NO: 105146 - DNA, 25 bp, Canis familiaris
gcaagagtagcagttgcacctgcgt

SEQ ID NO: 105147 - DNA, 25 bp, Canis familiaris
gcaagacacagcatcaggcctggct

SEQ ID NO: 105148 - DNA, 25 bp, Canis familiaris
gcaaagctcagcatggaggcggcta

SEQ ID NO: 105149 - DNA, 25 bp, Canis familiaris
gcaagcacacagatgaaaggccaca

SEQ ID NO: 105150 - DNA, 25 bp, Canis familiaris
gcaactcacaattaaaggacacttc

SEQ ID NO: 105151 - DNA, 25 bp, Canis familiaris
gcaatctagctttcagaagcccctt

SEQ ID NO: 105152 - DNA, 25 bp, Canis familiaris
gcaagtggttcaggggactggcctt

SEQ ID NO: 105153 - DNA, 25 bp, Canis familiaris
gcaaggtgtgtctgtgagcacgtgc

SEQ ID NO: 105154 - DNA, 25 bp, Canis familiaris
gcaagtgtgtgtgcgcaccagcacg

SEQ ID NO: 105155 - DNA, 25 bp, Canis familiaris
gcaagtgttggacaccggagtcagt

SEQ ID NO: 105156 - DNA, 25 bp, Canis familiaris
gcaacttggtaagccggtagcgtgg

SEQ ID NO: 105157 - DNA, 25 bp, Canis familiaris
gcaacttggtaagccggtagcgtgg

SEQ ID NO: 105158 - DNA, 25 bp, Canis familiaris
gcaactactgggttccggtaggtgc

SEQ ID NO: 105159 - DNA, 25 bp, Canis familiaris
gaattcactggggtttggtagattg

SEQ ID NO: 105160 - DNA, 25 bp, Canis familiaris
gaattgaatcccgttcgagtaacag

SEQ ID NO: 105161 - DNA, 25 bp, Canis familiaris
gcaacgggccctgggatagtaccag

SEQ ID NO: 105162 - DNA, 25 bp, Canis familiaris
gcaacgtggtcctggacacaaccat

SEQ ID NO: 105163 - DNA, 25 bp, Canis familiaris
gcaacggtggtcctggacacaacca

SEQ ID NO: 105164 - DNA, 25 bp, Canis familiaris
gcaacggtggtttggaaggtacaag

SEQ ID NO: 105165 - DNA, 25 bp, Canis familiaris
gcaacgttggtcttggaaggaccaa

SEQ ID NO: 105166 - DNA, 25 bp, Canis familiaris
gaactctacctctgaaaccaataat

SEQ ID NO: 105167 - DNA, 25 bp, Canis familiaris
gcaactcttagttaaaggccttact

SEQ ID NO: 105168 - DNA, 25 bp, Canis familiaris
gcaactctgccgtcaaaaattctgt

SEQ ID NO: 105169 - DNA, 25 bp, Canis familiaris
gcaatctgtacgtctgcaattttct

SEQ ID NO: 105170 - DNA, 25 bp, Canis familiaris
gcaacattccaatctattttctttt

SEQ ID NO: 105171 - DNA, 25 bp, Canis familiaris
gaatttccaaaatgttttttcatat

SEQ ID NO: 105172 - DNA, 25 bp, Canis familiaris
gaattcgccaaacatattactttca

SEQ ID NO: 105173 - DNA, 25 bp, Canis familiaris
gactacttctaacaattacatacca

SEQ ID NO: 105174 - DNA, 25 bp, Canis familiaris
gcaaacttttccgaatctactccaa

SEQ ID NO: 105175 - DNA, 25 bp, Canis familiaris
gcaaactttagctagacctaccaag

SEQ ID NO: 105176 - DNA, 25 bp, Canis familiaris
gcaactcatgtaaaagccttcagcc

SEQ ID NO: 105177 - DNA, 25 bp, Canis familiaris
gcaacgtgctgctgaagcttgtcat

SEQ ID NO: 105178 - DNA, 25 bp, Canis familiaris
gcaagtgtggggtccttgtcatcac

SEQ ID NO: 105179 - DNA, 25 bp, Canis familiaris
gcaagctgtggcacactctgtacat

SEQ ID NO: 105180 - DNA, 25 bp, Canis familiaris
gcaactgttgctgcagctctttatt

SEQ ID NO: 105181 - DNA, 25 bp, Canis familiaris
gcaactgttgacccttttatgtttt

SEQ ID NO: 105182 - DNA, 25 bp, Canis familiaris
gcaactacaacccatttctgtgatt

SEQ ID NO: 105183 - DNA, 25 bp, Canis familiaris
gcaaaacaagaggctttccaattca

SEQ ID NO: 105184 - DNA, 25 bp, Canis familiaris
gcaactatcaggtgctttcctaata

SEQ ID NO: 105185 - DNA, 25 bp, Canis familiaris
gaactacagggaccttttactagag

SEQ ID NO: 105186 - DNA, 25 bp, Canis familiaris
gaaattaggtcgtgaagttcaagag

SEQ ID NO: 105187 - DNA, 25 bp, Canis familiaris
gaatttaggaagcgtatgttattac

SEQ ID NO: 105188 - DNA, 25 bp, Canis familiaris
gcaactcgcaggtcgttttgttcat

SEQ ID NO: 105189 - DNA, 25 bp, Canis familiaris
gcaacttctggaccttatgttccga

SEQ ID NO: 105190 - DNA, 25 bp, Canis familiaris
gcaacgaggagggctttttcaccac

SEQ ID NO: 105191 - DNA, 25 bp, Canis familiaris
gcaacgggtcacaattctacatcac

SEQ ID NO: 105192 - DNA, 25 bp, Canis familiaris
gcaactaggctaaatatatcaacac

SEQ ID NO: 105193 - DNA, 25 bp, Canis familiaris
gcaaacaggctagctgaagcctact

SEQ ID NO: 105194 - DNA, 25 bp, Canis familiaris
gaaacggccagcctaagaccgtggg

SEQ ID NO: 105195 - DNA, 25 bp, Canis familiaris
gcaatcctgggccagctagagaccg

SEQ ID NO: 105196 - DNA, 25 bp, Canis familiaris
gcaaactggggctaaatccgcagca

SEQ ID NO: 105197 - DNA, 25 bp, Canis familiaris
gcaaactggatggaactatgcccgg

SEQ ID NO: 105198 - DNA, 25 bp, Canis familiaris
gcaacgtggatgtacctaccaagag

SEQ ID NO: 105199 - DNA, 25 bp, Canis familiaris
gaatctaggatttcctcatccgaga

SEQ ID NO: 105200 - DNA, 25 bp, Canis familiaris
gcaacttgtttgaccattcctgaat

SEQ ID NO: 105201 - DNA, 25 bp, Canis familiaris
gcaagttgtctgagccgtacatgaa

SEQ ID NO: 105202 - DNA, 25 bp, Canis familiaris
gcaagctttgagaaccctggcatta

SEQ ID NO: 105203 - DNA, 25 bp, Canis familiaris
gcaacatcgtggacgtcctggagga

SEQ ID NO: 105204 - DNA, 25 bp, Canis familiaris
gcaaacgcgagaagctcctgaaaga

SEQ ID NO: 105205 - DNA, 25 bp, Canis familiaris
gcaaccaccagcaactacaggaagc

SEQ ID NO: 105206 - DNA, 25 bp, Canis familiaris
gcaaccgcctgtttcaagaaaactc

SEQ ID NO: 105207 - DNA, 25 bp, Canis familiaris
gcaaccactttcatcaacaaggcct

SEQ ID NO: 105208 - DNA, 25 bp, Canis familiaris
gcaacccatttgccaaatcggcggc

SEQ ID NO: 105209 - DNA, 25 bp, Canis familiaris
gcaactccctgtggcatactgggga

SEQ ID NO: 105210 - DNA, 25 bp, Canis familiaris
gcaacttctctgtgatgtctggatt

SEQ ID NO: 105211 - DNA, 25 bp, Canis familiaris
gcaacgtcttgaacaggcgctgatg

SEQ ID NO: 105212 - DNA, 25 bp, Canis familiaris
gcaacgtgcttgtgtgtgtgctggc

SEQ ID NO: 105213 - DNA, 25 bp, Canis familiaris
gcaactgctgcaagttgtttgcaaa

SEQ ID NO: 105214 - DNA, 25 bp, Canis familiaris
gcaactctcatttctcttgattttg

SEQ ID NO: 105215 - DNA, 25 bp, Canis familiaris
gcaagtccctatccttacatggatg

SEQ ID NO: 105216 - DNA, 25 bp, Canis familiaris
gcaaggacaatattctcccatggct

SEQ ID NO: 105217 - DNA, 25 bp, Canis familiaris
gcaatgtgatcaaactatccaatgg

SEQ ID NO: 105218 - DNA, 25 bp, Canis familiaris
gcaagcattcaagtattctgccagg

SEQ ID NO: 105219 - DNA, 25 bp, Canis familiaris
gcaagcaccatcagtttgctatggc

SEQ ID NO: 105220 - DNA, 25 bp, Canis familiaris
gcaatctccagcattttgctcaagt

SEQ ID NO: 105221 - DNA, 25 bp, Canis familiaris
gaattctagtgacatgcctatatga

SEQ ID NO: 105222 - DNA, 25 bp, Canis familiaris
gcaaactagctttcatcacattcat

SEQ ID NO: 105223 - DNA, 25 bp, Canis familiaris
gcaaactgagtttgccgctttgctg

SEQ ID NO: 105224 - DNA, 25 bp, Canis familiaris
gcaagacgttttcacatctcatgtg

SEQ ID NO: 105225 - DNA, 25 bp, Canis familiaris
gcaagatgcgttctcaagtcatttt

SEQ ID NO: 105226 - DNA, 25 bp, Canis familiaris
gcaagtggcccaaatggtcagttat

SEQ ID NO: 105227 - DNA, 25 bp, Canis familiaris
gcaagctgtccctggaggagttcat

SEQ ID NO: 105228 - DNA, 25 bp, Canis familiaris
gcaactatcccaagggctattttac

SEQ ID NO: 105229 - DNA, 25 bp, Canis familiaris
gcaacaatcccaagggctatctacc

SEQ ID NO: 105230 - DNA, 25 bp, Canis familiaris
gcaaaactgctcaggcctgacagac

SEQ ID NO: 105231 - DNA, 25 bp, Canis familiaris
gcaaaactgcacaaacttgcacatt

SEQ ID NO: 105232 - DNA, 25 bp, Canis familiaris
gcaacatcgtgagaactgcttcttt

SEQ ID NO: 105233 - DNA, 25 bp, Canis familiaris
gcaacatgggttaaggctttcttga

SEQ ID NO: 105234 - DNA, 25 bp, Canis familiaris
gcaagcctcgttacaagcttatttg

SEQ ID NO: 105235 - DNA, 25 bp, Canis familiaris
gcaagccccattacattgtttttac

SEQ ID NO: 105236 - DNA, 25 bp, Canis familiaris
gcaacacctcatatagttgttttgg

SEQ ID NO: 105237 - DNA, 25 bp, Canis familiaris
gcaacagcctcaaaataggtgtttt

SEQ ID NO: 105238 - DNA, 25 bp, Canis familiaris
gcaaggctaattatcaggtggtttt

SEQ ID NO: 105239 - DNA, 25 bp, Canis familiaris
gcaaacttttataattgtccttttg

SEQ ID NO: 105240 - DNA, 25 bp, Canis familiaris
gaaaattttagtcttcttcttctct

SEQ ID NO: 105241 - DNA, 25 bp, Canis familiaris
gcaaacatgctcttcgggttttttt

SEQ ID NO: 105242 - DNA, 25 bp, Canis familiaris
gcaactcaactaagggtttatcttt

SEQ ID NO: 105243 - DNA, 25 bp, Canis familiaris
gcaacatcaaacacagctgcttttc

SEQ ID NO: 105244 - DNA, 25 bp, Canis familiaris
gcaagtctaccttactgctgtggtc

SEQ ID NO: 105245 - DNA, 25 bp, Canis familiaris
gcaagtgcagtccttggtgctgtag

SEQ ID NO: 105246 - DNA, 25 bp, Canis familiaris
gcaagcagcagcagctagactcgta

SEQ ID NO: 105247 - DNA, 25 bp, Canis familiaris
gcaagcaagcatcgtatactctggg

SEQ ID NO: 105248 - DNA, 25 bp, Canis familiaris
gcaaaagaggcactcacctggggtg

SEQ ID NO: 105249 - DNA, 25 bp, Canis familiaris
gcaataggtccaaacgctgaagcgt

SEQ ID NO: 105250 - DNA, 25 bp, Canis familiaris
gcaagaccatttacaagctgaacgg

SEQ ID NO: 105251 - DNA, 25 bp, Canis familiaris
gcaaccactggtgccaggaacacga

SEQ ID NO: 105252 - DNA, 25 bp, Canis familiaris
gaacgcacgggtccggaagacggtg

SEQ ID NO: 105253 - DNA, 25 bp, Canis familiaris
gcaactccgggtcccaggaagaggg

SEQ ID NO: 105254 - DNA, 25 bp, Canis familiaris
gcaacccctagttgcctgggagaca

SEQ ID NO: 105255 - DNA, 25 bp, Canis familiaris
gcaacccgtgagaacagcagtggag

SEQ ID NO: 105256 - DNA, 25 bp, Canis familiaris
gcaacagcacgtttacacaggtgtc

SEQ ID NO: 105257 - DNA, 25 bp, Canis familiaris
gcaacaagcttagagcagcagcgtt

SEQ ID NO: 105258 - DNA, 25 bp, Canis familiaris
gcaacagcagctacagcggatggca

SEQ ID NO: 105259 - DNA, 25 bp, Canis familiaris
gcaatcatcctccaagtgcatggcc

SEQ ID NO: 105260 - DNA, 25 bp, Canis familiaris
gcaagatacatccacgaaggccaaa

SEQ ID NO: 105261 - DNA, 25 bp, Canis familiaris
gcaatgtaaatgtgaggggatagaa

SEQ ID NO: 105262 - DNA, 25 bp, Canis familiaris
gcaaggcaaggatgtagaagtgaga

SEQ ID NO: 105263 - DNA, 25 bp, Canis familiaris
gcaagagaaggaagccagaggctgg

SEQ ID NO: 105264 - DNA, 25 bp, Canis familiaris
gcaagagatacgacctaatactaga

SEQ ID NO: 105265 - DNA, 25 bp, Canis familiaris
gcaaggtacctcagatataattact

SEQ ID NO: 105266 - DNA, 25 bp, Canis familiaris
gcaaggagccctaggaatatctgta

SEQ ID NO: 105267 - DNA, 25 bp, Canis familiaris
gcaacggccactaactctattatac

SEQ ID NO: 105268 - DNA, 25 bp, Canis familiaris
gcaattggctaatcctccattgtac

SEQ ID NO: 105269 - DNA, 25 bp, Canis familiaris
gcaactggggagtcctcatcgaaac

SEQ ID NO: 105270 - DNA, 25 bp, Canis familiaris
gcaagctgtgagccagtggccaaaa

SEQ ID NO: 105271 - DNA, 25 bp, Canis familiaris
gaattgaacacattggcccaaataa

SEQ ID NO: 105272 - DNA, 25 bp, Canis familiaris
gcaatcatgaaccggttccatcact

SEQ ID NO: 105273 - DNA, 25 bp, Canis familiaris
gcaacaagactgtgagctcctgcct

SEQ ID NO: 105274 - DNA, 25 bp, Canis familiaris
gcaagatgagggtggccactcccat

SEQ ID NO: 105275 - DNA, 25 bp, Canis familiaris
gcaagagatggccacggctgcttcc

SEQ ID NO: 105276 - DNA, 25 bp, Canis familiaris
gcaagatgaggccatcctgcatgct

SEQ ID NO: 105277 - DNA, 25 bp, Canis familiaris
gcaaaagtcacctgcatcattattt

SEQ ID NO: 105278 - DNA, 25 bp, Canis familiaris
gcaaaatccccttcatatcattgct

SEQ ID NO: 105279 - DNA, 25 bp, Canis familiaris
gcaagaatccacttgtctttccatc

SEQ ID NO: 105280 - DNA, 25 bp, Canis familiaris
gcaacactccatttatgtttcccca

SEQ ID NO: 105281 - DNA, 25 bp, Canis familiaris
gcaatacaactttatttacaaccaa

SEQ ID NO: 105282 - DNA, 25 bp, Canis familiaris
gcaaggcagatgctaattgtaaagc

SEQ ID NO: 105283 - DNA, 25 bp, Canis familiaris
gcaagggcatcgttgtcgtttagtc

SEQ ID NO: 105284 - DNA, 25 bp, Canis familiaris
gcaaaacatcgcttgctaaattttc

SEQ ID NO: 105285 - DNA, 25 bp, Canis familiaris
gcaaaattcactggctaagcttttc

SEQ ID NO: 105286 - DNA, 25 bp, Canis familiaris
gaatagcatttccagcaatagtttg

SEQ ID NO: 105287 - DNA, 25 bp, Canis familiaris
gcaatagatgttgggcccttcgtga

SEQ ID NO: 105288 - DNA, 25 bp, Canis familiaris
gcaagagattcttagccctggtgat

SEQ ID NO: 105289 - DNA, 25 bp, Canis familiaris
gcaagtgatcagtgaagccggtgat

SEQ ID NO: 105290 - DNA, 25 bp, Canis familiaris
gcaagtgacttggaacgggagtggg

SEQ ID NO: 105291 - DNA, 25 bp, Canis familiaris
gaattgaatgtgaaaagtggttgga

SEQ ID NO: 105292 - DNA, 25 bp, Canis familiaris
gaattttgaagatattggtggcccg

SEQ ID NO: 105293 - DNA, 25 bp, Canis familiaris
gaattctataaataactctcggcca

SEQ ID NO: 105294 - DNA, 25 bp, Canis familiaris
gcaactggaaaatattacctggaga

SEQ ID NO: 105295 - DNA, 25 bp, Canis familiaris
gaattaaacaacttaactgcccaag

SEQ ID NO: 105296 - DNA, 25 bp, Canis familiaris
gcaattacaagcctgcctacacaga

SEQ ID NO: 105297 - DNA, 25 bp, Canis familiaris
gcaactacaagggagctcaatcaat

SEQ ID NO: 105298 - DNA, 25 bp, Canis familiaris
gcaacttcaagagcccagtcaagac

SEQ ID NO: 105299 - DNA, 25 bp, Canis familiaris
gcaactccaaaggtcaatgatatac

SEQ ID NO: 105300 - DNA, 25 bp, Canis familiaris
gcaacttcacatagtatttgatcat

SEQ ID NO: 105301 - DNA, 25 bp, Canis familiaris
gcaacatcacacgctgctttgagca

SEQ ID NO: 105302 - DNA, 25 bp, Canis familiaris
gcaagctgacaggctgtgaaatatg

SEQ ID NO: 105303 - DNA, 25 bp, Canis familiaris
gcaagcactctgggtgaaatgattt

SEQ ID NO: 105304 - DNA, 25 bp, Canis familiaris
gcaagcccaagcctgaagagatgaa

SEQ ID NO: 105305 - DNA, 25 bp, Canis familiaris
gcaagcaccaagtgcgcatgtggaa

SEQ ID NO: 105306 - DNA, 25 bp, Canis familiaris
gcaaggctctagtatctgtgggcag

SEQ ID NO: 105307 - DNA, 25 bp, Canis familiaris
gcaatggcccaattcctgggcccaa

SEQ ID NO: 105308 - DNA, 25 bp, Canis familiaris
gcaaggcctgaaggtgctgggccac

SEQ ID NO: 105309 - DNA, 25 bp, Canis familiaris
gcaattcattaatggctggaggccc

SEQ ID NO: 105310 - DNA, 25 bp, Canis familiaris
gcaaggtattcctgcaggatggccc

SEQ ID NO: 105311 - DNA, 25 bp, Canis familiaris
gcaaggtaatcggggtgaggtcgcc

SEQ ID NO: 105312 - DNA, 25 bp, Canis familiaris
gaatgttaccctgggtgacgaccct

SEQ ID NO: 105313 - DNA, 25 bp, Canis familiaris
gtatttgcaaccagggaccaaccac

SEQ ID NO: 105314 - DNA, 25 bp, Canis familiaris
gaatctcaaaccagggacaccagcc

SEQ ID NO: 105315 - DNA, 25 bp, Canis familiaris
gcaactcagacagaagtggcacagc

SEQ ID NO: 105316 - DNA, 25 bp, Canis familiaris
gcaagacgcacaggacactgcagca

SEQ ID NO: 105317 - DNA, 25 bp, Canis familiaris
gcaatgactgcatcgacagcaacga

SEQ ID NO: 105318 - DNA, 25 bp, Canis familiaris
gcaatggctgcatagccatccgctg

SEQ ID NO: 105319 - DNA, 25 bp, Canis familiaris
gcaaaatcaaatcctgcacgctcgc

SEQ ID NO: 105320 - DNA, 25 bp, Canis familiaris
gcaacagtcatagtgtgcttccctc

SEQ ID NO: 105321 - DNA, 25 bp, Canis familiaris
gcaagaatgaacattctccccgtgt

SEQ ID NO: 105322 - DNA, 25 bp, Canis familiaris
gcaacaagcaaatattccgctggat

SEQ ID NO: 105323 - DNA, 25 bp, Canis familiaris
gcaaccagaaactagatcccgaggc

SEQ ID NO: 105324 - DNA, 25 bp, Canis familiaris
gcaaccgcaaaccagggtgcagagg

SEQ ID NO: 105325 - DNA, 25 bp, Canis familiaris
gcaactcctgaccaggggtggcagg

SEQ ID NO: 105326 - DNA, 25 bp, Canis familiaris
gcaacccttcagagggcagctcagc

SEQ ID NO: 105327 - DNA, 25 bp, Canis familiaris
gcaaccctggagaggagctgctgcc

SEQ ID NO: 105328 - DNA, 25 bp, Canis familiaris
gcaatggctctggatggggacgctc

SEQ ID NO: 105329 - DNA, 25 bp, Canis familiaris
gcaatttctggcatggagggttcct

SEQ ID NO: 105330 - DNA, 25 bp, Canis familiaris
gaattatggcacacgttggttcacg

SEQ ID NO: 105331 - DNA, 25 bp, Canis familiaris
gaattgtcccttcttggagtttgct

SEQ ID NO: 105332 - DNA, 25 bp, Canis familiaris
gaatttaacttgctttaatgtaggc

SEQ ID NO: 105333 - DNA, 25 bp, Canis familiaris
gaattttactttggtctgactgggg

SEQ ID NO: 105334 - DNA, 25 bp, Canis familiaris
gacttttgtcacgtttcgaaggttg

SEQ ID NO: 105335 - DNA, 25 bp, Canis familiaris
gaatagggcaaagtttccgaggttg

SEQ ID NO: 105336 - DNA, 25 bp, Canis familiaris
gaaagggtaagtgcccagagacggg

SEQ ID NO: 105337 - DNA, 25 bp, Canis familiaris
gaacacggaaagaggccagcccggg

SEQ ID NO: 105338 - DNA, 25 bp, Canis familiaris
gaatccgaaacgggggccagtcagg

SEQ ID NO: 105339 - DNA, 25 bp, Canis familiaris
gaatcacagaaatcgttttcctagg

SEQ ID NO: 105340 - DNA, 25 bp, Canis familiaris
gcaacatacctataatttcccttgg

SEQ ID NO: 105341 - DNA, 25 bp, Canis familiaris
gcaagaattttattagttccctttg

SEQ ID NO: 105342 - DNA, 25 bp, Canis familiaris
gcaaggttttgttctttactagctt

SEQ ID NO: 105343 - DNA, 25 bp, Canis familiaris
gcaaggtcattagggcattttctcg

SEQ ID NO: 105344 - DNA, 25 bp, Canis familiaris
gaaggtatctgagccttctgtccac

SEQ ID NO: 105345 - DNA, 25 bp, Canis familiaris
gaattgtttaatgctgttgtccaag

SEQ ID NO: 105346 - DNA, 25 bp, Canis familiaris
gaattgagttaatggactgggaagg

SEQ ID NO: 105347 - DNA, 25 bp, Canis familiaris
gaattagttagatgtttgtgggttg

SEQ ID NO: 105348 - DNA, 25 bp, Canis familiaris
gcaactggtttattttcatggggtg

SEQ ID NO: 105349 - DNA, 25 bp, Canis familiaris
gcaactcggtacttttagtggggag

SEQ ID NO: 105350 - DNA, 25 bp, Canis familiaris
gaacatcctggtctttaggggaggc

SEQ ID NO: 105351 - DNA, 25 bp, Canis familiaris
gaattcactggtctgtaacaggtaa

SEQ ID NO: 105352 - DNA, 25 bp, Canis familiaris
gaattaaggttactgataccctaga

SEQ ID NO: 105353 - DNA, 25 bp, Canis familiaris
gaattgactcgttgggtaccctgtc

SEQ ID NO: 105354 - DNA, 25 bp, Canis familiaris
gaatctacttgtggggtaattgtgg

SEQ ID NO: 105355 - DNA, 25 bp, Canis familiaris
gaatgtttttagggtagtagtctgg

SEQ ID NO: 105356 - DNA, 25 bp, Canis familiaris
gaagcttaaagaatgggaaaactga

SEQ ID NO: 105357 - DNA, 25 bp, Canis familiaris
gcaatgcctaaatcaaaggaacttg

SEQ ID NO: 105358 - DNA, 25 bp, Canis familiaris
gcaagtctaacatcctgggctgaat

SEQ ID NO: 105359 - DNA, 25 bp, Canis familiaris
gcaaggtggtacgctcggtgatatc

SEQ ID NO: 105360 - DNA, 25 bp, Canis familiaris
gcaaggggaacaagccgagatcatg

SEQ ID NO: 105361 - DNA, 25 bp, Canis familiaris
gcaagagaggcagcattccggcttc

SEQ ID NO: 105362 - DNA, 25 bp, Canis familiaris
gcaagagagtgcgtttcgccgacgc

SEQ ID NO: 105363 - DNA, 25 bp, Canis familiaris
gcaagagaggccctatcccaactcg

SEQ ID NO: 105364 - DNA, 25 bp, Canis familiaris
gcaagcagagagtgattctcccccc

SEQ ID NO: 105365 - DNA, 25 bp, Canis familiaris
gcaacagaggaatgtctcctgcccc

SEQ ID NO: 105366 - DNA, 25 bp, Canis familiaris
gaacgaacaactagttcgcgcccgc

SEQ ID NO: 105367 - DNA, 25 bp, Canis familiaris
gaattcaaaaatgttcggagccctt

SEQ ID NO: 105368 - DNA, 25 bp, Canis familiaris
gaattcaaaattgagctctaggccc

SEQ ID NO: 105369 - DNA, 25 bp, Canis familiaris
gcaattgcaaggtattactaggccc

SEQ ID NO: 105370 - DNA, 25 bp, Canis familiaris
gcaatagcaccgtgtccatgcagga

SEQ ID NO: 105371 - DNA, 25 bp, Canis familiaris
gactaagccgatcttccggaaaaag

SEQ ID NO: 105372 - DNA, 25 bp, Canis familiaris
gacttttgagttatccggagaaaca

SEQ ID NO: 105373 - DNA, 25 bp, Canis familiaris
gaattaaggcttcttctggaaacca

SEQ ID NO: 105374 - DNA, 25 bp, Canis familiaris
gaattcaaggctgaaagggaaaccg

SEQ ID NO: 105375 - DNA, 25 bp, Canis familiaris
gcaagtcaaagctcacaagtggtag

SEQ ID NO: 105376 - DNA, 25 bp, Canis familiaris
gcaagcttcgtctacaaagggggaa

SEQ ID NO: 105377 - DNA, 25 bp, Canis familiaris
gcaatgttcagagactcgaaggcgg

SEQ ID NO: 105378 - DNA, 25 bp, Canis familiaris
gaatgttcccatttttgaggcggta

SEQ ID NO: 105379 - DNA, 25 bp, Canis familiaris
gcaacttcccacttttgatggcgat

SEQ ID NO: 105380 - DNA, 25 bp, Canis familiaris
gcaactttaatgtttctgattggtt

SEQ ID NO: 105381 - DNA, 25 bp, Canis familiaris
gcaacttttcatatgcttgttagct

SEQ ID NO: 105382 - DNA, 25 bp, Canis familiaris
gcaaccattattatgcttttgtgtt

SEQ ID NO: 105383 - DNA, 25 bp, Canis familiaris
gcaactgatggtgcttgctttctgt

SEQ ID NO: 105384 - DNA, 25 bp, Canis familiaris
gcaactgctgaagatcatgtttatc

SEQ ID NO: 105385 - DNA, 25 bp, Canis familiaris
gcaacctgaatctaatctggcttct

SEQ ID NO: 105386 - DNA, 25 bp, Canis familiaris
gcaaccatttcatgctttgctttcc

SEQ ID NO: 105387 - DNA, 25 bp, Canis familiaris
gcaaccagttcgtctcttgttgtat

SEQ ID NO: 105388 - DNA, 25 bp, Canis familiaris
gcaacccatctggtctcttgaataa

SEQ ID NO: 105389 - DNA, 25 bp, Canis familiaris
gcaactatactccttcataactatt

SEQ ID NO: 105390 - DNA, 25 bp, Canis familiaris
gcaactatagtttgtcacaggtgtt

SEQ ID NO: 105391 - DNA, 25 bp, Canis familiaris
gcaacatggaattttccgcttttca

SEQ ID NO: 105392 - DNA, 25 bp, Canis familiaris
gcaatgcggaatggctttaattatt

SEQ ID NO: 105393 - DNA, 25 bp, Canis familiaris
gcaacccactgccatattagttatt

SEQ ID NO: 105394 - DNA, 25 bp, Canis familiaris
gcaatggtcctttttaggtttatgc

SEQ ID NO: 105395 - DNA, 25 bp, Canis familiaris
gcaaggacaatttttagcttatgtt

SEQ ID NO: 105396 - DNA, 25 bp, Canis familiaris
gcaaggcacctttctggacaatttg

SEQ ID NO: 105397 - DNA, 25 bp, Canis familiaris
gcaaggtgccggttgtacaatctct

SEQ ID NO: 105398 - DNA, 25 bp, Canis familiaris
gcaactttctggttttgccagtgct

SEQ ID NO: 105399 - DNA, 25 bp, Canis familiaris
gaattttgggactcccttgctttga

SEQ ID NO: 105400 - DNA, 25 bp, Canis familiaris
gaattgggatagaatccccttcctt

SEQ ID NO: 105401 - DNA, 25 bp, Canis familiaris
gaattgccttagaacctcttttgaa

SEQ ID NO: 105402 - DNA, 25 bp, Canis familiaris
gaatacatttggttcccgggagtca

SEQ ID NO: 105403 - DNA, 25 bp, Canis familiaris
gactacattaggttatttgggaata

SEQ ID NO: 105404 - DNA, 25 bp, Canis familiaris
gcaaccttagagttttctgagtgaa

SEQ ID NO: 105405 - DNA, 25 bp, Canis familiaris
gcaaccatacggatggagctggaga

SEQ ID NO: 105406 - DNA, 25 bp, Canis familiaris
gcaaccaacaccttggccatgtgaa

SEQ ID NO: 105407 - DNA, 25 bp, Canis familiaris
gcaaccatgaacgcggcgtgtgcct

SEQ ID NO: 105408 - DNA, 25 bp, Canis familiaris
gcaacctgcagggcaagggtgagtt

SEQ ID NO: 105409 - DNA, 25 bp, Canis familiaris
gcaagcttcttggtatgggtgacat

SEQ ID NO: 105410 - DNA, 25 bp, Canis familiaris
gcaagctatttgcccaagttaatgc

SEQ ID NO: 105411 - DNA, 25 bp, Canis familiaris
gcaagtttgtctgaagctgtaagga

SEQ ID NO: 105412 - DNA, 25 bp, Canis familiaris
gcaaccttgttgccataagtaacca

SEQ ID NO: 105413 - DNA, 25 bp, Canis familiaris
gcaatcattttctgtaaaaagccag

SEQ ID NO: 105414 - DNA, 25 bp, Canis familiaris
gcaactttgtcatgccaaaatacga

SEQ ID NO: 105415 - DNA, 25 bp, Canis familiaris
gcaactttgtgctacgagatctcaa

SEQ ID NO: 105416 - DNA, 25 bp, Canis familiaris
gcaactctttcctgaagtatcactt

SEQ ID NO: 105417 - DNA, 25 bp, Canis familiaris
gcaagtcgtactttaacgtacattt

SEQ ID NO: 105418 - DNA, 25 bp, Canis familiaris
gcaattcttagtttagaccaaccct

SEQ ID NO: 105419 - DNA, 25 bp, Canis familiaris
gaattcttcagtgtaaaaatcctta

SEQ ID NO: 105420 - DNA, 25 bp, Canis familiaris
gcaattcccagtttcctaagaacga

SEQ ID NO: 105421 - DNA, 25 bp, Canis familiaris
gaatcctcaaccttcctgaagaagg

SEQ ID NO: 105422 - DNA, 25 bp, Canis familiaris
gcaacctcacccttcaggagaagaa

SEQ ID NO: 105423 - DNA, 25 bp, Canis familiaris
gcaaccaacgcgtctgggagggaac

SEQ ID NO: 105424 - DNA, 25 bp, Canis familiaris
gcaagctcaacccgtttcgggaaca

SEQ ID NO: 105425 - DNA, 25 bp, Canis familiaris
gaaccaacccttcatgcttggtagc

SEQ ID NO: 105426 - DNA, 25 bp, Canis familiaris
gaatcaaattctcaggattttacag

SEQ ID NO: 105427 - DNA, 25 bp, Canis familiaris
gaacgagttttatgtaactacagtc

SEQ ID NO: 105428 - DNA, 25 bp, Canis familiaris
gcaactacttttgtgtaaaaatgtc

SEQ ID NO: 105429 - DNA, 25 bp, Canis familiaris
gcaagagacagtttcactgtgaata

SEQ ID NO: 105430 - DNA, 25 bp, Canis familiaris
gcaagcagcacttttttgtgacgat

SEQ ID NO: 105431 - DNA, 25 bp, Canis familiaris
gcaagcctttgttctttgacctggc

SEQ ID NO: 105432 - DNA, 25 bp, Canis familiaris
gcaagctatttttattattcctgtg

SEQ ID NO: 105433 - DNA, 25 bp, Canis familiaris
gcaagctttttcttgttctgtttta

SEQ ID NO: 105434 - DNA, 25 bp, Canis familiaris
gcaagactgtttttttctttttcag

SEQ ID NO: 105435 - DNA, 25 bp, Canis familiaris
gcaagaccttttctttgtcagtttg

SEQ ID NO: 105436 - DNA, 25 bp, Canis familiaris
gcaagtctttttctgctttatatgc

SEQ ID NO: 105437 - DNA, 25 bp, Canis familiaris
gcaagttgcttaacctgtctgtgtg

SEQ ID NO: 105438 - DNA, 25 bp, Canis familiaris
gcaacttttaacttgccctgtgatg

SEQ ID NO: 105439 - DNA, 25 bp, Canis familiaris
gcaatcttgtttctatgccaaatag

SEQ ID NO: 105440 - DNA, 25 bp, Canis familiaris
gcaacttctcttactgttacaatca

SEQ ID NO: 105441 - DNA, 25 bp, Canis familiaris
gcaactgcttatttctggtatcaac

SEQ ID NO: 105442 - DNA, 25 bp, Canis familiaris
gcaagctgttatctctaacgctgca

SEQ ID NO: 105443 - DNA, 25 bp, Canis familiaris
gcaagcttccatgctctagctttaa

SEQ ID NO: 105444 - DNA, 25 bp, Canis familiaris
gcaactctgctttcaggactattac

SEQ ID NO: 105445 - DNA, 25 bp, Canis familiaris
gcaagtatgtttatgtccatgtgac

SEQ ID NO: 105446 - DNA, 25 bp, Canis familiaris
gcaagatcatggttcacgtttcccc

SEQ ID NO: 105447 - DNA, 25 bp, Canis familiaris
gcaagagcagggaccgtgttcggca

SEQ ID NO: 105448 - DNA, 25 bp, Canis familiaris
gaatacggtgatctcgttcgagaac

SEQ ID NO: 105449 - DNA, 25 bp, Canis familiaris
gcaaccggtggcaggttcaagaagc

SEQ ID NO: 105450 - DNA, 25 bp, Canis familiaris
gcaagggccgagaggtgtacagaca

SEQ ID NO: 105451 - DNA, 25 bp, Canis familiaris
gcaagggccgagaggtgtacagaca

SEQ ID NO: 105452 - DNA, 25 bp, Canis familiaris
gcaagggcaaggactgcgtgttcac

SEQ ID NO: 105453 - DNA, 25 bp, Canis familiaris
gcaaggccattgctttgtgctgtac

SEQ ID NO: 105454 - DNA, 25 bp, Canis familiaris
gcaatgtctactgttttgcgccagc

SEQ ID NO: 105455 - DNA, 25 bp, Canis familiaris
gcaactcattctgctacttcagcac

SEQ ID NO: 105456 - DNA, 25 bp, Canis familiaris
gcaagtgcttctacgaattaacatt

SEQ ID NO: 105457 - DNA, 25 bp, Canis familiaris
gcaagtgcctaacatcgcatttcat

SEQ ID NO: 105458 - DNA, 25 bp, Canis familiaris
gcaagtgccataagcagacctcgcc

SEQ ID NO: 105459 - DNA, 25 bp, Canis familiaris
gcaagcaggccaaagatgtctcccg

SEQ ID NO: 105460 - DNA, 25 bp, Canis familiaris
gcaactggaaaacttctgcacacgc

SEQ ID NO: 105461 - DNA, 25 bp, Canis familiaris
gcaacggaatcagcaacgcgcaggc

SEQ ID NO: 105462 - DNA, 25 bp, Canis familiaris
gcaagcggaccaatgagacgccggt

SEQ ID NO: 105463 - DNA, 25 bp, Canis familiaris
gcaacggagcaacagaccaggtcat

SEQ ID NO: 105464 - DNA, 25 bp, Canis familiaris
gcaagggacaacaaagctcagtgta

SEQ ID NO: 105465 - DNA, 25 bp, Canis familiaris
gcaacccacacaacaagctcagtgt

SEQ ID NO: 105466 - DNA, 25 bp, Canis familiaris
gcaacccaaccacaccaattagagg

SEQ ID NO: 105467 - DNA, 25 bp, Canis familiaris
gcaatcccaacttctagcaacttaa

SEQ ID NO: 105468 - DNA, 25 bp, Canis familiaris
gcaactcacatctcagctaatactt

SEQ ID NO: 105469 - DNA, 25 bp, Canis familiaris
gaatctcatcagctcagggcaagta

SEQ ID NO: 105470 - DNA, 25 bp, Canis familiaris
gcaatgatctcatgctcaggacagt

SEQ ID NO: 105471 - DNA, 25 bp, Canis familiaris
gaatttccctgggaagtggaccagg

SEQ ID NO: 105472 - DNA, 25 bp, Canis familiaris
gaattctcccgaaatcaggtcaacc

SEQ ID NO: 105473 - DNA, 25 bp, Canis familiaris
gcaatttcccccaacagtgtaagtc

SEQ ID NO: 105474 - DNA, 25 bp, Canis familiaris
gaatttaccaccacctggaaatcat

SEQ ID NO: 105475 - DNA, 25 bp, Canis familiaris
gaaagtacaccagacacggaaacgc

SEQ ID NO: 105476 - DNA, 25 bp, Canis familiaris
gaatagtctcgtgggacacgggaga

SEQ ID NO: 105477 - DNA, 25 bp, Canis familiaris
gaatgagtgattccggaagcggccg

SEQ ID NO: 105478 - DNA, 25 bp, Canis familiaris
gaattggaatcttgtcaaccccagg

SEQ ID NO: 105479 - DNA, 25 bp, Canis familiaris
gcaatgttaacttaaacttcactgg

SEQ ID NO: 105480 - DNA, 25 bp, Canis familiaris
gaaggtcgtttaaatttgcgcttga

SEQ ID NO: 105481 - DNA, 25 bp, Canis familiaris
gaagggggctagagcagttcttcta

SEQ ID NO: 105482 - DNA, 25 bp, Canis familiaris
gcaagggatggctgtactgtttatt

SEQ ID NO: 105483 - DNA, 25 bp, Canis familiaris
gcaaggctgtgagactacctattat

SEQ ID NO: 105484 - DNA, 25 bp, Canis familiaris
gcaaggctgtgagactacctattat

SEQ ID NO: 105485 - DNA, 25 bp, Canis familiaris
gcaatcgcgtcagacgacccatgaa

SEQ ID NO: 105486 - DNA, 25 bp, Canis familiaris
gcaatgcctctggaatagaccccat

SEQ ID NO: 105487 - DNA, 25 bp, Canis familiaris
gcaaggctcttgaaagattcctgca

SEQ ID NO: 105488 - DNA, 25 bp, Canis familiaris
gcaagtgcttatataattgactgta

SEQ ID NO: 105489 - DNA, 25 bp, Canis familiaris
gcaacctggataatttgtactgcta

SEQ ID NO: 105490 - DNA, 25 bp, Canis familiaris
gaacccgcatgttttgcaaccaagg

SEQ ID NO: 105491 - DNA, 25 bp, Canis familiaris
gaacccatgcaatgaaaactcaaga

SEQ ID NO: 105492 - DNA, 25 bp, Canis familiaris
gcaactcccatcgagtgaaacccag

SEQ ID NO: 105493 - DNA, 25 bp, Canis familiaris
gcaagtccctgtggtggatttccag

SEQ ID NO: 105494 - DNA, 25 bp, Canis familiaris
gcaagatccgctttctcattttgcc

SEQ ID NO: 105495 - DNA, 25 bp, Canis familiaris
gcaagagcaccaaatccatgtgttc

SEQ ID NO: 105496 - DNA, 25 bp, Canis familiaris
gcaagacacacaggatttttagggc

SEQ ID NO: 105497 - DNA, 25 bp, Canis familiaris
gcaagactcagctgtgtttcaagtt

SEQ ID NO: 105498 - DNA, 25 bp, Canis familiaris
gcaatgactctttgactagtccgtt

SEQ ID NO: 105499 - DNA, 25 bp, Canis familiaris
gcaagactaaggaatagctcctgct

SEQ ID NO: 105500 - DNA, 25 bp, Canis familiaris
gcaagttacaggacataagccacaa

SEQ ID NO: 105501 - DNA, 25 bp, Canis familiaris
gcaagttgaatgagcagtcccctac

SEQ ID NO: 105502 - DNA, 25 bp, Canis familiaris
gaattgggtgagccatgtcacacca

SEQ ID NO: 105503 - DNA, 25 bp, Canis familiaris
gcaatctgggaactttccctcaaag

SEQ ID NO: 105504 - DNA, 25 bp, Canis familiaris
gcaattggggatattatttccaaaa

SEQ ID NO: 105505 - DNA, 25 bp, Canis familiaris
gaattgcgggagaaggtttcaccaa

SEQ ID NO: 105506 - DNA, 25 bp, Canis familiaris
gcaattccggaggagatgcttacca

SEQ ID NO: 105507 - DNA, 25 bp, Canis familiaris
gcaagtcggagaggtgtgcccatcc

SEQ ID NO: 105508 - DNA, 25 bp, Canis familiaris
gcaaggcaacgaacgagcccatggc

SEQ ID NO: 105509 - DNA, 25 bp, Canis familiaris
gcaaggagtcagaagataccgagag

SEQ ID NO: 105510 - DNA, 25 bp, Canis familiaris
gcaaggagtgcagccaggacgagag

SEQ ID NO: 105511 - DNA, 25 bp, Canis familiaris
gcaacggagccccagaaagcagaga

SEQ ID NO: 105512 - DNA, 25 bp, Canis familiaris
gcaactggcctggccgcaacagcag

SEQ ID NO: 105513 - DNA, 25 bp, Canis familiaris
gcaattccttgagcgagacagtgaa

SEQ ID NO: 105514 - DNA, 25 bp, Canis familiaris
gcaagtgcttctaggcggactgtta

SEQ ID NO: 105515 - DNA, 25 bp, Canis familiaris
gcaagtgtgtgcgtatggtcctttc

SEQ ID NO: 105516 - DNA, 25 bp, Canis familiaris
gcaagttggcctttgcaaggcattt

SEQ ID NO: 105517 - DNA, 25 bp, Canis familiaris
gcaagggtgccgagagaggcattcc

SEQ ID NO: 105518 - DNA, 25 bp, Canis familiaris
gcaagagttccgaggacgcgtggtc

SEQ ID NO: 105519 - DNA, 25 bp, Canis familiaris
gcaagaagccggaggcagcggggtg

SEQ ID NO: 105520 - DNA, 25 bp, Canis familiaris
gaagcacccaggaggccggggtaat

SEQ ID NO: 105521 - DNA, 25 bp, Canis familiaris
gaaggcccaggggacatggggggag

SEQ ID NO: 105522 - DNA, 25 bp, Canis familiaris
gaattcccatggcacacatggaagg

SEQ ID NO: 105523 - DNA, 25 bp, Canis familiaris
gcaatgtccgatccgacactatgtg

SEQ ID NO: 105524 - DNA, 25 bp, Canis familiaris
gcaagatcctgtcagccagtgttgg

SEQ ID NO: 105525 - DNA, 25 bp, Canis familiaris
gcaagaaccccagctgatacagaac

SEQ ID NO: 105526 - DNA, 25 bp, Canis familiaris
gaatcaatctccgaatgcgtccaac

SEQ ID NO: 105527 - DNA, 25 bp, Canis familiaris
gaatcgacctcagacggacaacttg

SEQ ID NO: 105528 - DNA, 25 bp, Canis familiaris
gaatctgaacttgacggccaaacat

SEQ ID NO: 105529 - DNA, 25 bp, Canis familiaris
gaatcccgttaagggccgtagctga

SEQ ID NO: 105530 - DNA, 25 bp, Canis familiaris
gaaccggtttgggcaacgtgacaat

SEQ ID NO: 105531 - DNA, 25 bp, Canis familiaris
gaaccgtttgtcgaaacccaacatg

SEQ ID NO: 105532 - DNA, 25 bp, Canis familiaris
gaacctttgtttgaaccgacactag

SEQ ID NO: 105533 - DNA, 25 bp, Canis familiaris
gcaacctttattttaaattgtcatc

SEQ ID NO: 105534 - DNA, 25 bp, Canis familiaris
gcaagcattcttttatctaggattt

SEQ ID NO: 105535 - DNA, 25 bp, Canis familiaris
gcaagctgacttttttatgtgctct

SEQ ID NO: 105536 - DNA, 25 bp, Canis familiaris
gcaacgagagcttatgtgtattccc

SEQ ID NO: 105537 - DNA, 25 bp, Canis familiaris
gcaattcaagctcagggatggcccg

SEQ ID NO: 105538 - DNA, 25 bp, Canis familiaris
gaattgcagagccaagtggggacta

SEQ ID NO: 105539 - DNA, 25 bp, Canis familiaris
gaattcgagggggctggtactgacc

SEQ ID NO: 105540 - DNA, 25 bp, Canis familiaris
gaattcggcacgaggtttggcgcct

SEQ ID NO: 105541 - DNA, 25 bp, Canis familiaris
gcaattgggcccatggctgttgggc

SEQ ID NO: 105542 - DNA, 25 bp, Canis familiaris
gcaattgttgcctcggcagctggtg

SEQ ID NO: 105543 - DNA, 25 bp, Canis familiaris
gcaagtatttcatgggcactcctgg

SEQ ID NO: 105544 - DNA, 25 bp, Canis familiaris
gcaagtgttaaagatcctccaggac

SEQ ID NO: 105545 - DNA, 25 bp, Canis familiaris
gcaaggttgtacattcctactggac

SEQ ID NO: 105546 - DNA, 25 bp, Canis familiaris
gcaaggtttctttacctgcattgtt

SEQ ID NO: 105547 - DNA, 25 bp, Canis familiaris
gcaagtgttttattaccaaattctg

SEQ ID NO: 105548 - DNA, 25 bp, Canis familiaris
gaagggcttaaatccatgaaatttt

SEQ ID NO: 105549 - DNA, 25 bp, Canis familiaris
gaaggctgtaaatgccaagaaagat

SEQ ID NO: 105550 - DNA, 25 bp, Canis familiaris
gcaaggctctgaaaaggaagcaaca

SEQ ID NO: 105551 - DNA, 25 bp, Canis familiaris
gcaatgggctgatagggcaagacac

SEQ ID NO: 105552 - DNA, 25 bp, Canis familiaris
gcaagtgagcagtaggctggccaac

SEQ ID NO: 105553 - DNA, 25 bp, Canis familiaris
gcaagtcagcatggggccctaacta

SEQ ID NO: 105554 - DNA, 25 bp, Canis familiaris
gcaaccacatggtggctcacaacca

SEQ ID NO: 105555 - DNA, 25 bp, Canis familiaris
gcaaccacatggtagcttcaacaac

SEQ ID NO: 105556 - DNA, 25 bp, Canis familiaris
gcaatcacacggagcttctagaaaa

SEQ ID NO: 105557 - DNA, 25 bp, Canis familiaris
gcaatccatcggaactaccataaac

SEQ ID NO: 105558 - DNA, 25 bp, Canis familiaris
gcaatccttgcctcaatatctaaga

SEQ ID NO: 105559 - DNA, 25 bp, Canis familiaris
gaatacttcacccatatttaaaatt

SEQ ID NO: 105560 - DNA, 25 bp, Canis familiaris
gaattttcccatgtcttaagtcttt

SEQ ID NO: 105561 - DNA, 25 bp, Canis familiaris
gcaattccccttgtttttgtgtatt

SEQ ID NO: 105562 - DNA, 25 bp, Canis familiaris
gcaatcacaccagcgtttcgttttt

SEQ ID NO: 105563 - DNA, 25 bp, Canis familiaris
gcaatccaaattattctttttcttt

SEQ ID NO: 105564 - DNA, 25 bp, Canis familiaris
gcaaccataacctgttattcctgct

SEQ ID NO: 105565 - DNA, 25 bp, Canis familiaris
gcaaccaaggtttgtccattcactc

SEQ ID NO: 105566 - DNA, 25 bp, Canis familiaris
gcaaccaagtaccagctctattatt

SEQ ID NO: 105567 - DNA, 25 bp, Canis familiaris
gaatgccaaaacccagtattcactg

SEQ ID NO: 105568 - DNA, 25 bp, Canis familiaris
gcaagcctcagaccagccaataaat

SEQ ID NO: 105569 - DNA, 25 bp, Canis familiaris
gcaacctgctgccacggaaaagatg

SEQ ID NO: 105570 - DNA, 25 bp, Canis familiaris
gcaaccagtggccaccagaaagtga

SEQ ID NO: 105571 - DNA, 25 bp, Canis familiaris
gcaatccatgtgcgccacaaaaaaa

SEQ ID NO: 105572 - DNA, 25 bp, Canis familiaris
gaatgccacgcggtacaaaggaaaa

SEQ ID NO: 105573 - DNA, 25 bp, Canis familiaris
gaatccccgtttctcttgtagaaag

SEQ ID NO: 105574 - DNA, 25 bp, Canis familiaris
gaattcccctttcttatcaacaatt

SEQ ID NO: 105575 - DNA, 25 bp, Canis familiaris
gcaatgtccctttttatgtaacaca

SEQ ID NO: 105576 - DNA, 25 bp, Canis familiaris
gcaagttcctggtatttgtggcaaa

SEQ ID NO: 105577 - DNA, 25 bp, Canis familiaris
gcaagttcactgggttctgggattc

SEQ ID NO: 105578 - DNA, 25 bp, Canis familiaris
gcaatttgcatccgtttcttgaacc

SEQ ID NO: 105579 - DNA, 25 bp, Canis familiaris
gaattcagctaacgcttccagaccg

SEQ ID NO: 105580 - DNA, 25 bp, Canis familiaris
gaattaggccaccttcacatacaac

SEQ ID NO: 105581 - DNA, 25 bp, Canis familiaris
gaattggattccctcatcaaggcta

SEQ ID NO: 105582 - DNA, 25 bp, Canis familiaris
gaattgagcttcatgtcaaaacgga

SEQ ID NO: 105583 - DNA, 25 bp, Canis familiaris
gagcttgatactgattgcaaccgca

SEQ ID NO: 105584 - DNA, 25 bp, Canis familiaris
gaatttcacttttgaaccgcgtggc

SEQ ID NO: 105585 - DNA, 25 bp, Canis familiaris
gaattactgcaactaggggcgcggg

SEQ ID NO: 105586 - DNA, 25 bp, Canis familiaris
gaataatcctagacatcgggtccgg

SEQ ID NO: 105587 - DNA, 25 bp, Canis familiaris
gcaaccacctggacatgctggagtc

SEQ ID NO: 105588 - DNA, 25 bp, Canis familiaris
gcaaccacagggccgtgtgtgtgtg

SEQ ID NO: 105589 - DNA, 25 bp, Canis familiaris
gcaagtacaagtcctgtgtttgctc

SEQ ID NO: 105590 - DNA, 25 bp, Canis familiaris
gcaagtacaacatcaaggtcctcta

SEQ ID NO: 105591 - DNA, 25 bp, Canis familiaris
gaagtccaaatccaggaatcttcct

SEQ ID NO: 105592 - DNA, 25 bp, Canis familiaris
gaattccaaatgggagtacttgtac

SEQ ID NO: 105593 - DNA, 25 bp, Canis familiaris
gaattgccaggggtcatgctgactc

SEQ ID NO: 105594 - DNA, 25 bp, Canis familiaris
gcaattgcaaggccctcttggatct

SEQ ID NO: 105595 - DNA, 25 bp, Canis familiaris
gcaagtagagtggcttctccacttt

SEQ ID NO: 105596 - DNA, 25 bp, Canis familiaris
gcaagtatcaaaatctcatcccttt

SEQ ID NO: 105597 - DNA, 25 bp, Canis familiaris
gcaagatatgcattaatcaccaatt

SEQ ID NO: 105598 - DNA, 25 bp, Canis familiaris
gcaagagatgctgaatcacccaccc

SEQ ID NO: 105599 - DNA, 25 bp, Canis familiaris
gcaagcgcatgtaattaccatcccc

SEQ ID NO: 105600 - DNA, 25 bp, Canis familiaris
gcaatcctgttaatcacaatcacaa

SEQ ID NO: 105601 - DNA, 25 bp, Canis familiaris
gcaatctcaatctaacatcagaaat

SEQ ID NO: 105602 - DNA, 25 bp, Canis familiaris
gaattggtcatgtcacaagcaaatg

SEQ ID NO: 105603 - DNA, 25 bp, Canis familiaris
gaatctggtctgaggaataattcct

SEQ ID NO: 105604 - DNA, 25 bp, Canis familiaris
gaattcgtatcgtgaaaatgatgct

SEQ ID NO: 105605 - DNA, 25 bp, Canis familiaris
gaattgaaattgtgaacacttgctt

SEQ ID NO: 105606 - DNA, 25 bp, Canis familiaris
gaattaagtctgttgggccattatt

SEQ ID NO: 105607 - DNA, 25 bp, Canis familiaris
gaattgaaatatttagtgcacctac

SEQ ID NO: 105608 - DNA, 25 bp, Canis familiaris
gaatataaaaaaactcccaagtgat

SEQ ID NO: 105609 - DNA, 25 bp, Canis familiaris
gaatgttaaaggacttaccgatggt

SEQ ID NO: 105610 - DNA, 25 bp, Canis familiaris
gaatgtaaaagaacttaccgaattg

SEQ ID NO: 105611 - DNA, 25 bp, Canis familiaris
gcaagtaacagaaactccagcccct

SEQ ID NO: 105612 - DNA, 25 bp, Canis familiaris
gcaagggtcacaaactcacagcacc

SEQ ID NO: 105613 - DNA, 25 bp, Canis familiaris
gcaaggggattagccctgcatcctt

SEQ ID NO: 105614 - DNA, 25 bp, Canis familiaris
gcaagcgggattatgcctgtctcac

SEQ ID NO: 105615 - DNA, 25 bp, Canis familiaris
gcaagccgagaatcgactgatggca

SEQ ID NO: 105616 - DNA, 25 bp, Canis familiaris
gcaagcccaggtgaaggtggcaatt

SEQ ID NO: 105617 - DNA, 25 bp, Canis familiaris
gcaaggacggctgaggcggctaaac

SEQ ID NO: 105618 - DNA, 25 bp, Canis familiaris
gcaaggacctctgatgtgtgtgttt

SEQ ID NO: 105619 - DNA, 25 bp, Canis familiaris
gcaaggatttgcccttgtgctttct

SEQ ID NO: 105620 - DNA, 25 bp, Canis familiaris
gcaaggtgactggtcgctgtggttc

SEQ ID NO: 105621 - DNA, 25 bp, Canis familiaris
gcaagttgacctggccagtgttctg

SEQ ID NO: 105622 - DNA, 25 bp, Canis familiaris
gcaagattatctgcttcactgtttc

SEQ ID NO: 105623 - DNA, 25 bp, Canis familiaris
gcaataactctgtttccgtattctg

SEQ ID NO: 105624 - DNA, 25 bp, Canis familiaris
gaataaatgaatctccgttttcttc

SEQ ID NO: 105625 - DNA, 25 bp, Canis familiaris
gaataagtaatcttacgtgttccaa

SEQ ID NO: 105626 - DNA, 25 bp, Canis familiaris
gaataaaatctcttaactatttcca

SEQ ID NO: 105627 - DNA, 25 bp, Canis familiaris
gaatactaaagttaaaaatgtcaca

SEQ ID NO: 105628 - DNA, 25 bp, Canis familiaris
gaataccacaggccagataaacagt

SEQ ID NO: 105629 - DNA, 25 bp, Canis familiaris
gaatccccacgacgtacaaggatcg

SEQ ID NO: 105630 - DNA, 25 bp, Canis familiaris
gcaagctctccagaggtgaaaggct

SEQ ID NO: 105631 - DNA, 25 bp, Canis familiaris
gcaatgcttccacagcgtaaataca

SEQ ID NO: 105632 - DNA, 25 bp, Canis familiaris
gcaatgttcagacagaagcctcgaa

SEQ ID NO: 105633 - DNA, 25 bp, Canis familiaris
gcaagctgccgacatgattcttcta

SEQ ID NO: 105634 - DNA, 25 bp, Canis familiaris
gcaatgcagcgcaaagatgcctctt

SEQ ID NO: 105635 - DNA, 25 bp, Canis familiaris
gcaatgacaccatgatggccctctg

SEQ ID NO: 105636 - DNA, 25 bp, Canis familiaris
gcaagatactcatttcccttcaaat

SEQ ID NO: 105637 - DNA, 25 bp, Canis familiaris
gaataactaactgcctccaagtctc

SEQ ID NO: 105638 - DNA, 25 bp, Canis familiaris
gaataaggagtaaccctctagttct

SEQ ID NO: 105639 - DNA, 25 bp, Canis familiaris
gaatttgggggaacactctaacact

SEQ ID NO: 105640 - DNA, 25 bp, Canis familiaris
gaattttgggctaccagcactaacc

SEQ ID NO: 105641 - DNA, 25 bp, Canis familiaris
gaattatacgtgtgccatcccaaag

SEQ ID NO: 105642 - DNA, 25 bp, Canis familiaris
gaattataatatttcccacagaaag

SEQ ID NO: 105643 - DNA, 25 bp, Canis familiaris
gaattgcagaattgcgttgccctga

SEQ ID NO: 105644 - DNA, 25 bp, Canis familiaris
gaattagtattcctagctcacgatt

SEQ ID NO: 105645 - DNA, 25 bp, Canis familiaris
gaattttcttgacactacgactctt

SEQ ID NO: 105646 - DNA, 25 bp, Canis familiaris
gaatttcctgtgggaatcgccaccc

SEQ ID NO: 105647 - DNA, 25 bp, Canis familiaris
gcaatcaaccgtgatgctcaagccc

SEQ ID NO: 105648 - DNA, 25 bp, Canis familiaris
gcaataaacctttgcatcaggcccc

SEQ ID NO: 105649 - DNA, 25 bp, Canis familiaris
gaatccaacgttggccagtggccat

SEQ ID NO: 105650 - DNA, 25 bp, Canis familiaris
gcaatccccctatgagcagggacag

SEQ ID NO: 105651 - DNA, 25 bp, Canis familiaris
gaaccccagctacagggaacggtca

SEQ ID NO: 105652 - DNA, 25 bp, Canis familiaris
gaaccccgctacagtgaacacggat

SEQ ID NO: 105653 - DNA, 25 bp, Canis familiaris
gaatacaccaaggggctaacctgga

SEQ ID NO: 105654 - DNA, 25 bp, Canis familiaris
gaataccgcaagtacagtaagcacg

SEQ ID NO: 105655 - DNA, 25 bp, Canis familiaris
gaatccccacgaacgcgatatgccg

SEQ ID NO: 105656 - DNA, 25 bp, Canis familiaris
gaattgcttccgaaaggcgatgccg

SEQ ID NO: 105657 - DNA, 25 bp, Canis familiaris
gaagtctgtaatcaaggtgtccgga

SEQ ID NO: 105658 - DNA, 25 bp, Canis familiaris
gaattttagtaatcgtgtccgtgtg

SEQ ID NO: 105659 - DNA, 25 bp, Canis familiaris
gaatctttaatgttttggccctgtt

SEQ ID NO: 105660 - DNA, 25 bp, Canis familiaris
gaatcttctaatcctggggaccttc

SEQ ID NO: 105661 - DNA, 25 bp, Canis familiaris
gaatttctggtgactgtagttcctt

SEQ ID NO: 105662 - DNA, 25 bp, Canis familiaris
gaatttctagtcagtggtcccaaga

SEQ ID NO: 105663 - DNA, 25 bp, Canis familiaris
gaattacttcacagtggcccaaaat

SEQ ID NO: 105664 - DNA, 25 bp, Canis familiaris
gactatactgtacttatggaccaaa

SEQ ID NO: 105665 - DNA, 25 bp, Canis familiaris
gcaataatctgtcactctggaccca

SEQ ID NO: 105666 - DNA, 25 bp, Canis familiaris
gcaagcacaccaagagtctgtaacc

SEQ ID NO: 105667 - DNA, 25 bp, Canis familiaris
gcaagcacaactagcagctgctgag

SEQ ID NO: 105668 - DNA, 25 bp, Canis familiaris
gcaaggcaaccactgcatctgaaaa

SEQ ID NO: 105669 - DNA, 25 bp, Canis familiaris
gcaaggtcatcccagagctgaacgg

SEQ ID NO: 105670 - DNA, 25 bp, Canis familiaris
gcaaggtcatccctgagctgaacgg

SEQ ID NO: 105671 - DNA, 25 bp, Canis familiaris
gcaaggtcaatgctgaaggctccgt

SEQ ID NO: 105672 - DNA, 25 bp, Canis familiaris
gcaagatgtcggagttggatcctgt

SEQ ID NO: 105673 - DNA, 25 bp, Canis familiaris
gcaagtgtcgtcattgtgctgatgc

SEQ ID NO: 105674 - DNA, 25 bp, Canis familiaris
gcaagtggcgtgaccatgtggcatc

SEQ ID NO: 105675 - DNA, 25 bp, Canis familiaris
gcaagagctgcgtcgacatggtcat

SEQ ID NO: 105676 - DNA, 25 bp, Canis familiaris
gcaatgagcgtgtgcacatgttcac

SEQ ID NO: 105677 - DNA, 25 bp, Canis familiaris
gcaatgcgcttgggcagtattcccc

SEQ ID NO: 105678 - DNA, 25 bp, Canis familiaris
gaatgcttgtgccacagttttccta

SEQ ID NO: 105679 - DNA, 25 bp, Canis familiaris
gcaatgcatttgccactggttcaga

SEQ ID NO: 105680 - DNA, 25 bp, Canis familiaris
gcaatgcggctgcactggtggaaga

SEQ ID NO: 105681 - DNA, 25 bp, Canis familiaris
gcaatcggtggactgcaagttacag

SEQ ID NO: 105682 - DNA, 25 bp, Canis familiaris
gaattggatcacatcacagtttcag

SEQ ID NO: 105683 - DNA, 25 bp, Canis familiaris
gaattaatgcccttcattatagcag

SEQ ID NO: 105684 - DNA, 25 bp, Canis familiaris
gaatttgctgcagactatttcacag

SEQ ID NO: 105685 - DNA, 25 bp, Canis familiaris
gaattatgtacgccttttatcaaag

SEQ ID NO: 105686 - DNA, 25 bp, Canis familiaris
gaattttctctgccaagataacata

SEQ ID NO: 105687 - DNA, 25 bp, Canis familiaris
gaatattgtgtgcctcgagtaaatc

SEQ ID NO: 105688 - DNA, 25 bp, Canis familiaris
gaatatggtgtcctctcggaatgac

SEQ ID NO: 105689 - DNA, 25 bp, Canis familiaris
gcaatagcaggagttgttgaaatga

SEQ ID NO: 105690 - DNA, 25 bp, Canis familiaris
gaatacttgagcagtctaaaacgtg

SEQ ID NO: 105691 - DNA, 25 bp, Canis familiaris
gaatactctggcaatgcctacggcc

SEQ ID NO: 105692 - DNA, 25 bp, Canis familiaris
gactttttggatgtgcagccgctta

SEQ ID NO: 105693 - DNA, 25 bp, Canis familiaris
gaattccttggagttgacctgtgtc

SEQ ID NO: 105694 - DNA, 25 bp, Canis familiaris
gaatttggggagcatgcaccgtgcc

SEQ ID NO: 105695 - DNA, 25 bp, Canis familiaris
gaattatctgggccaagcccgtctg

SEQ ID NO: 105696 - DNA, 25 bp, Canis familiaris
gaatctcctggagaagggtgtttgc

SEQ ID NO: 105697 - DNA, 25 bp, Canis familiaris
gaattagggaagagggtgccttggg

SEQ ID NO: 105698 - DNA, 25 bp, Canis familiaris
gaatcaagggggagggcatttgggc

SEQ ID NO: 105699 - DNA, 25 bp, Canis familiaris
gaatcagactggggaggggggtggg

SEQ ID NO: 105700 - DNA, 25 bp, Canis familiaris
gcaatcaacacgatgaaggggtggg

SEQ ID NO: 105701 - DNA, 25 bp, Canis familiaris
gaattgaacaatggttcggggaggg

SEQ ID NO: 105702 - DNA, 25 bp, Canis familiaris
gaattcagtcttcttcggaaaggag

SEQ ID NO: 105703 - DNA, 25 bp, Canis familiaris
gaattcgctcttgttcgttagtaga

SEQ ID NO: 105704 - DNA, 25 bp, Canis familiaris
gaaggcagctttgttccctaaatca

SEQ ID NO: 105705 - DNA, 25 bp, Canis familiaris
gaattatctttctcccactaaatat

SEQ ID NO: 105706 - DNA, 25 bp, Canis familiaris
gaataatttttcactttaagtcatg

SEQ ID NO: 105707 - DNA, 25 bp, Canis familiaris
gacttgtttttcactaggccagttc

SEQ ID NO: 105708 - DNA, 25 bp, Canis familiaris
gaatttgttttaaaagcccagatct

SEQ ID NO: 105709 - DNA, 25 bp, Canis familiaris
gaatttggtgttgaacatcgggcct

SEQ ID NO: 105710 - DNA, 25 bp, Canis familiaris
gaatttactgttgatccctggactt

SEQ ID NO: 105711 - DNA, 25 bp, Canis familiaris
gaatttttggtttcccggtgcatat

SEQ ID NO: 105712 - DNA, 25 bp, Canis familiaris
gaagatttgcggttattgccgagtt

SEQ ID NO: 105713 - DNA, 25 bp, Canis familiaris
gaatttgggacagtttgcctgcagt

SEQ ID NO: 105714 - DNA, 25 bp, Canis familiaris
gcaagtgtgaggacggagtgccgaa

SEQ ID NO: 105715 - DNA, 25 bp, Canis familiaris
gcaaggctggagcggaggaggagca

SEQ ID NO: 105716 - DNA, 25 bp, Canis familiaris
gcaaggaggcagtgtcagccagggg

SEQ ID NO: 105717 - DNA, 25 bp, Canis familiaris
gcaatgggagaacccctcgagtgga

SEQ ID NO: 105718 - DNA, 25 bp, Canis familiaris
gcaattggcagtggatccggccgtg

SEQ ID NO: 105719 - DNA, 25 bp, Canis familiaris
gaattcgcatcttgattctgggcgg

SEQ ID NO: 105720 - DNA, 25 bp, Canis familiaris
gcaatctctgcagtgtgttcagggt

SEQ ID NO: 105721 - DNA, 25 bp, Canis familiaris
gcaatcctacatatacatacttaac

SEQ ID NO: 105722 - DNA, 25 bp, Canis familiaris
gcaatattgacatgtaatgactcat

SEQ ID NO: 105723 - DNA, 25 bp, Canis familiaris
gaatattatccctaatacctgccac

SEQ ID NO: 105724 - DNA, 25 bp, Canis familiaris
gaattaatctgcaatagtaactcca

SEQ ID NO: 105725 - DNA, 25 bp, Canis familiaris
gcaatctagctgtgaatgaagactg

SEQ ID NO: 105726 - DNA, 25 bp, Canis familiaris
gcaatcttgctgtgaaacaagtgtg

SEQ ID NO: 105727 - DNA, 25 bp, Canis familiaris
gaatctttgtaatccaggttagaga

SEQ ID NO: 105728 - DNA, 25 bp, Canis familiaris
gttctttccaacccagaccagaaag

SEQ ID NO: 105729 - DNA, 25 bp, Canis familiaris
gactttttcaacacaacgatacaac

SEQ ID NO: 105730 - DNA, 25 bp, Canis familiaris
gacttctagtcaatcccaagcttaa

SEQ ID NO: 105731 - DNA, 25 bp, Canis familiaris
gaatttaatttctcagtctgtgcat

SEQ ID NO: 105732 - DNA, 25 bp, Canis familiaris
gaatttttccagtaggtgctcagct

SEQ ID NO: 105733 - DNA, 25 bp, Canis familiaris
gaattggttgccttggtttagtaag

SEQ ID NO: 105734 - DNA, 25 bp, Canis familiaris
gcaattggtgggctggtctgtagag

SEQ ID NO: 105735 - DNA, 25 bp, Canis familiaris
gaattggtacaacttgtcttagcac

SEQ ID NO: 105736 - DNA, 25 bp, Canis familiaris
gaatcgtgagaacatttttgaacat

SEQ ID NO: 105737 - DNA, 25 bp, Canis familiaris
gcaatcaggtattggtgtgttctgc

SEQ ID NO: 105738 - DNA, 25 bp, Canis familiaris
gcaatgctgtttcactggttatgcg

SEQ ID NO: 105739 - DNA, 25 bp, Canis familiaris
gcaattatctgtccactgctgttac

SEQ ID NO: 105740 - DNA, 25 bp, Canis familiaris
gaatgtacggctgtctgtttctttg

SEQ ID NO: 105741 - DNA, 25 bp, Canis familiaris
gaattgaaagccaccttttgcctgc

SEQ ID NO: 105742 - DNA, 25 bp, Canis familiaris
gaattagaagccaccagtgttcaac

SEQ ID NO: 105743 - DNA, 25 bp, Canis familiaris
gaattggaatgaccccagtgtcaga

SEQ ID NO: 105744 - DNA, 25 bp, Canis familiaris
gaatatttcaagtcccgttcatcac

SEQ ID NO: 105745 - DNA, 25 bp, Canis familiaris
gaatacttaagtaatcctaaacaca

SEQ ID NO: 105746 - DNA, 25 bp, Canis familiaris
gcaattctaaactgtcctaagagca

SEQ ID NO: 105747 - DNA, 25 bp, Canis familiaris
gcaattaaaacatggcgcttcagta

SEQ ID NO: 105748 - DNA, 25 bp, Canis familiaris
gcaatcaacaagttcacgccttatt

SEQ ID NO: 105749 - DNA, 25 bp, Canis familiaris
gcaattccaaattaccaattagcat

SEQ ID NO: 105750 - DNA, 25 bp, Canis familiaris
gaattccaacattcaggttgttttt

SEQ ID NO: 105751 - DNA, 25 bp, Canis familiaris
gaatatgcccaatggaagtctttgt

SEQ ID NO: 105752 - DNA, 25 bp, Canis familiaris
gaatgagtccactttaaatccttta

SEQ ID NO: 105753 - DNA, 25 bp, Canis familiaris
gaatgagtccactttaaatccttta

SEQ ID NO: 105754 - DNA, 25 bp, Canis familiaris
gaatgagtccactttaaatccttta

SEQ ID NO: 105755 - DNA, 25 bp, Canis familiaris
gaatacctcactgaaaccctatttt

SEQ ID NO: 105756 - DNA, 25 bp, Canis familiaris
gaattcctgcatttgaaagcccgtt

SEQ ID NO: 105757 - DNA, 25 bp, Canis familiaris
gaattcctcaaacaggcctggttta

SEQ ID NO: 105758 - DNA, 25 bp, Canis familiaris
gaattggctcaaagctattggggtt

SEQ ID NO: 105759 - DNA, 25 bp, Canis familiaris
gaatcggtgctaacaagctggcggt

SEQ ID NO: 105760 - DNA, 25 bp, Canis familiaris
gcaatcaggtgtacacggcgttgtt

SEQ ID NO: 105761 - DNA, 25 bp, Canis familiaris
gaatcaagctgtcagggcctcagta

SEQ ID NO: 105762 - DNA, 25 bp, Canis familiaris
gaattcgtgcggtgaccatcgatag

SEQ ID NO: 105763 - DNA, 25 bp, Canis familiaris
gaattcggcacgagaccgcatctac

SEQ ID NO: 105764 - DNA, 25 bp, Canis familiaris
gaattcatgtgggttaccgttaaga

SEQ ID NO: 105765 - DNA, 25 bp, Canis familiaris
gaatgaatatggcctttcctttgga

SEQ ID NO: 105766 - DNA, 25 bp, Canis familiaris
gaattcaatagacttttgtttggtt

SEQ ID NO: 105767 - DNA, 25 bp, Canis familiaris
gaattcggggcttttgtgtgtggct

SEQ ID NO: 105768 - DNA, 25 bp, Canis familiaris
gaattgtgggagaagcgctggtttg

SEQ ID NO: 105769 - DNA, 25 bp, Canis familiaris
gaatttgtcgtgaggctttgtagtc

SEQ ID NO: 105770 - DNA, 25 bp, Canis familiaris
gcaattttccaggtccttttgagga

SEQ ID NO: 105771 - DNA, 25 bp, Canis familiaris
gcaagtaactattctccttttgaga

SEQ ID NO: 105772 - DNA, 25 bp, Canis familiaris
gaaaaagcatttgtctggttagcac

SEQ ID NO: 105773 - DNA, 25 bp, Canis familiaris
gaaagagtttctgttccttgggtgt

SEQ ID NO: 105774 - DNA, 25 bp, Canis familiaris
gaatatgggtttactaccttgaaag

SEQ ID NO: 105775 - DNA, 25 bp, Canis familiaris
gaatttgttgttgtttatctaaatg

SEQ ID NO: 105776 - DNA, 25 bp, Canis familiaris
gcaatttttttgtgttcagctattt

SEQ ID NO: 105777 - DNA, 25 bp, Canis familiaris
gcaattgcttttcggggcaagtatc

SEQ ID NO: 105778 - DNA, 25 bp, Canis familiaris
gcaatagcctgtatgtggtcaagcc

SEQ ID NO: 105779 - DNA, 25 bp, Canis familiaris
gcaatatgcttgccatcttggttgg

SEQ ID NO: 105780 - DNA, 25 bp, Canis familiaris
gcaatcgtgcgcaatgaagtgattg

SEQ ID NO: 105781 - DNA, 25 bp, Canis familiaris
gcaatcttgagccatgaagctgctg

SEQ ID NO: 105782 - DNA, 25 bp, Canis familiaris
gcaatctgctgcaactggtgtgctg

SEQ ID NO: 105783 - DNA, 25 bp, Canis familiaris
gcaatgtgtatcggtggtgtgttaa

SEQ ID NO: 105784 - DNA, 25 bp, Canis familiaris
gcaattgtgtgcatgtttgttttta

SEQ ID NO: 105785 - DNA, 25 bp, Canis familiaris
gaattctggcttctgcagtttttat

SEQ ID NO: 105786 - DNA, 25 bp, Canis familiaris
gaatattgcagttcctggggcttta

SEQ ID NO: 105787 - DNA, 25 bp, Canis familiaris
gaatttaggtttcagcgttgtattt

SEQ ID NO: 105788 - DNA, 25 bp, Canis familiaris
gaatttaatgggagaccttgttggc

SEQ ID NO: 105789 - DNA, 25 bp, Canis familiaris
gaattttctaagacagcccttttgg

SEQ ID NO: 105790 - DNA, 25 bp, Canis familiaris
gcaatttcctaaagggctcatcatt

SEQ ID NO: 105791 - DNA, 25 bp, Canis familiaris
gcaagtgtcccaaagaagctgtgat

SEQ ID NO: 105792 - DNA, 25 bp, Canis familiaris
gcaagtgtcttacacacagtgctgt

SEQ ID NO: 105793 - DNA, 25 bp, Canis familiaris
gcaatggttaaggacacagatgcct

SEQ ID NO: 105794 - DNA, 25 bp, Canis familiaris
gcaatgggcgaagagcaaggcccaa

SEQ ID NO: 105795 - DNA, 25 bp, Canis familiaris
gaattggctggaccgacaggcacac

SEQ ID NO: 105796 - DNA, 25 bp, Canis familiaris
gcaatcagacttgtcgacattccag

SEQ ID NO: 105797 - DNA, 25 bp, Canis familiaris
gcaatcgactgtgttattggccccc

SEQ ID NO: 105798 - DNA, 25 bp, Canis familiaris
gaatcgactattttttggtcttcgg

SEQ ID NO: 105799 - DNA, 25 bp, Canis familiaris
gaattcaaatctcgtgttgggctcc

SEQ ID NO: 105800 - DNA, 25 bp, Canis familiaris
gaatagaggactcgtgtgtggcgtc

SEQ ID NO: 105801 - DNA, 25 bp, Canis familiaris
gaatatgagatgcttggagagggtc

SEQ ID NO: 105802 - DNA, 25 bp, Canis familiaris
gaatttggagattgagaaggtggcc

SEQ ID NO: 105803 - DNA, 25 bp, Canis familiaris
gaattttggtgttggacgtgtggcc

SEQ ID NO: 105804 - DNA, 25 bp, Canis familiaris
gaattcctggtggggaagccaggca

SEQ ID NO: 105805 - DNA, 25 bp, Canis familiaris
gaattgttggtaagcccagccggaa

SEQ ID NO: 105806 - DNA, 25 bp, Canis familiaris
gaattttggaactctatgccagtga

SEQ ID NO: 105807 - DNA, 25 bp, Canis familiaris
gaatttctggaagttttgcctgggc

SEQ ID NO: 105808 - DNA, 25 bp, Canis familiaris
gaattccaggaatcttcttcggacc

SEQ ID NO: 105809 - DNA, 25 bp, Canis familiaris
gaatttcagctgaaccaatcctggg

SEQ ID NO: 105810 - DNA, 25 bp, Canis familiaris
gaattttctgaacaaccttctcacc

SEQ ID NO: 105811 - DNA, 25 bp, Canis familiaris
gaactctttacacattcctaaaact

SEQ ID NO: 105812 - DNA, 25 bp, Canis familiaris
gaattctttggatgattctgccaaa

SEQ ID NO: 105813 - DNA, 25 bp, Canis familiaris
gaataatttggattgacagccccgg

SEQ ID NO: 105814 - DNA, 25 bp, Canis familiaris
gcaatcattgttaaatgccagcccc

SEQ ID NO: 105815 - DNA, 25 bp, Canis familiaris
gcaatcttcttacatgtcagctcat

SEQ ID NO: 105816 - DNA, 25 bp, Canis familiaris
gcaatattcttacttctcgtcaaat

SEQ ID NO: 105817 - DNA, 25 bp, Canis familiaris
gaatatctgttcacttttaaatccc

SEQ ID NO: 105818 - DNA, 25 bp, Canis familiaris
gcaattctcgaaagcttttacaaga

SEQ ID NO: 105819 - DNA, 25 bp, Canis familiaris
gcaattctcagaaagctttttatca

SEQ ID NO: 105820 - DNA, 25 bp, Canis familiaris
gcaattgtagtccatggtatttatt

SEQ ID NO: 105821 - DNA, 25 bp, Canis familiaris
gcaataaatgtgccatctttttttt

SEQ ID NO: 105822 - DNA, 25 bp, Canis familiaris
gaattgaactcagtcttttctttag

SEQ ID NO: 105823 - DNA, 25 bp, Canis familiaris
gaattaccattcactgtttatgtag

SEQ ID NO: 105824 - DNA, 25 bp, Canis familiaris
gaatttgcaagtatcggcttctgaa

SEQ ID NO: 105825 - DNA, 25 bp, Canis familiaris
gaatttagataatgggctgtgtgca

SEQ ID NO: 105826 - DNA, 25 bp, Canis familiaris
gaatttgttatcttgggctgtccac

SEQ ID NO: 105827 - DNA, 25 bp, Canis familiaris
gcaatccgttacatgagggtctgaa

SEQ ID NO: 105828 - DNA, 25 bp, Canis familiaris
gcaattaattacatattttacacac

SEQ ID NO: 105829 - DNA, 25 bp, Canis familiaris
gcaattacctgcagtttgtttccac

SEQ ID NO: 105830 - DNA, 25 bp, Canis familiaris
gcaattagcgccagtgtagaatgtc

SEQ ID NO: 105831 - DNA, 25 bp, Canis familiaris
gaattcaagccccatgtagagtgta

SEQ ID NO: 105832 - DNA, 25 bp, Canis familiaris
gaattggtgccctggaagctgtatc

SEQ ID NO: 105833 - DNA, 25 bp, Canis familiaris
gaatctggtgccgggaagactgtga

SEQ ID NO: 105834 - DNA, 25 bp, Canis familiaris
gaattggtgcctggaggtacgacat

SEQ ID NO: 105835 - DNA, 25 bp, Canis familiaris
gaattatatagctgaggtgaggact

SEQ ID NO: 105836 - DNA, 25 bp, Canis familiaris
gaattgtctaataagcctggagatg

SEQ ID NO: 105837 - DNA, 25 bp, Canis familiaris
gaattgacttttggctctgggggaa

SEQ ID NO: 105838 - DNA, 25 bp, Canis familiaris
gaatgaaatttgccttctggggtgt

SEQ ID NO: 105839 - DNA, 25 bp, Canis familiaris
gaattaatttccctggtctggatgg

SEQ ID NO: 105840 - DNA, 25 bp, Canis familiaris
gaattgttaaacctgatgtcttgga

SEQ ID NO: 105841 - DNA, 25 bp, Canis familiaris
gaattgctgaattagctgctattct

SEQ ID NO: 105842 - DNA, 25 bp, Canis familiaris
gaataggcgattgctgccatgatca

SEQ ID NO: 105843 - DNA, 25 bp, Canis familiaris
gaattagccattgctgcacattgaa

SEQ ID NO: 105844 - DNA, 25 bp, Canis familiaris
gcaatatagccttttcatgctgtat

SEQ ID NO: 105845 - DNA, 25 bp, Canis familiaris
gcaatacccatttctgattatcatt

SEQ ID NO: 105846 - DNA, 25 bp, Canis familiaris
gcaatacctcttagcaaatatgcgt

SEQ ID NO: 105847 - DNA, 25 bp, Canis familiaris
gcaattctctgctaccagacaatgg

SEQ ID NO: 105848 - DNA, 25 bp, Canis familiaris
gcaatcctcatctacctaagtgact

SEQ ID NO: 105849 - DNA, 25 bp, Canis familiaris
gcaatccatcatttctttcaggtgg

SEQ ID NO: 105850 - DNA, 25 bp, Canis familiaris
gaattgtgcttcttttgcagactgg

SEQ ID NO: 105851 - DNA, 25 bp, Canis familiaris
gcaattggattattttcatgaaagc

SEQ ID NO: 105852 - DNA, 25 bp, Canis familiaris
gaattggtatcttttgtataatcac

SEQ ID NO: 105853 - DNA, 25 bp, Canis familiaris
gaattcgtattctttaagagaaccg

SEQ ID NO: 105854 - DNA, 25 bp, Canis familiaris
gaattaaattgttaaatctgcaacc

SEQ ID NO: 105855 - DNA, 25 bp, Canis familiaris
gaattgcatacttttagatagctaa

SEQ ID NO: 105856 - DNA, 25 bp, Canis familiaris
gaatcactacacgtgtcagaaacaa

SEQ ID NO: 105857 - DNA, 25 bp, Canis familiaris
gcaatacgacacttgggtcatcaca

SEQ ID NO: 105858 - DNA, 25 bp, Canis familiaris
gcaatcctcagtttgtggtctgcca

SEQ ID NO: 105859 - DNA, 25 bp, Canis familiaris
gaattctgcagttgatcatggttct

SEQ ID NO: 105860 - DNA, 25 bp, Canis familiaris
gcaatacattgtttatggctatctg

SEQ ID NO: 105861 - DNA, 25 bp, Canis familiaris
gaataatttccatgcgctggcttta

SEQ ID NO: 105862 - DNA, 25 bp, Canis familiaris
gaagatcttccctcttgcaaattaa

SEQ ID NO: 105863 - DNA, 25 bp, Canis familiaris
gaataccttcctctgtacagtgtag

SEQ ID NO: 105864 - DNA, 25 bp, Canis familiaris
gaattctccccgagtacgagatagc

SEQ ID NO: 105865 - DNA, 25 bp, Canis familiaris
gaatttccctccaaaagcaagtagc

SEQ ID NO: 105866 - DNA, 25 bp, Canis familiaris
gaatttccacccattaggatcctgg

SEQ ID NO: 105867 - DNA, 25 bp, Canis familiaris
gaattttccactaaggatggtcctt

SEQ ID NO: 105868 - DNA, 25 bp, Canis familiaris
gaattgttcccatgaatgcatggtc

SEQ ID NO: 105869 - DNA, 25 bp, Canis familiaris
gaattacccagaataatcaggattt

SEQ ID NO: 105870 - DNA, 25 bp, Canis familiaris
gaatatcccaacacgatcagttttg

SEQ ID NO: 105871 - DNA, 25 bp, Canis familiaris
gcaatttctttcaccaatgttttac

SEQ ID NO: 105872 - DNA, 25 bp, Canis familiaris
gcaattttttttaatgcactttggc

SEQ ID NO: 105873 - DNA, 25 bp, Canis familiaris
gcaatgttctttatagtgattctct

SEQ ID NO: 105874 - DNA, 25 bp, Canis familiaris
gaattgtcttgtttcgttttcctga

SEQ ID NO: 105875 - DNA, 25 bp, Canis familiaris
gcaattatcttttaggctgttttct

SEQ ID NO: 105876 - DNA, 25 bp, Canis familiaris
gaatttgtcttattggcgccttttc

SEQ ID NO: 105877 - DNA, 25 bp, Canis familiaris
gaattgttcttatctgagccaggtt

SEQ ID NO: 105878 - DNA, 25 bp, Canis familiaris
gaattgttttgagcagtgtgggtgt

SEQ ID NO: 105879 - DNA, 25 bp, Canis familiaris
gaattgtcattttctcattttttgt

SEQ ID NO: 105880 - DNA, 25 bp, Canis familiaris
gaattatccgtctgagatttttgtt

SEQ ID NO: 105881 - DNA, 25 bp, Canis familiaris
gaataagccgtcttgccatatgtta

SEQ ID NO: 105882 - DNA, 25 bp, Canis familiaris
gaattacaagtcatgtgaatgttca

SEQ ID NO: 105883 - DNA, 25 bp, Canis familiaris
gaatttacagcattggcaaatggta

SEQ ID NO: 105884 - DNA, 25 bp, Canis familiaris
gaattcctgccactggagacttgga

SEQ ID NO: 105885 - DNA, 25 bp, Canis familiaris
gcaatcccatcccaaaactgcggga

SEQ ID NO: 105886 - DNA, 25 bp, Canis familiaris
gcaatacacccacataccgagagga

SEQ ID NO: 105887 - DNA, 25 bp, Canis familiaris
gaatcaggcccataccttggaggac

SEQ ID NO: 105888 - DNA, 25 bp, Canis familiaris
gaatagcaggactcaacatcgggga

SEQ ID NO: 105889 - DNA, 25 bp, Canis familiaris
gaacgagggccagaatggaggccag

SEQ ID NO: 105890 - DNA, 25 bp, Canis familiaris
gaacgggcaagtgttggacaccgga

SEQ ID NO: 105891 - DNA, 25 bp, Canis familiaris
gaacgggaagtctgtggacgggcga

SEQ ID NO: 105892 - DNA, 25 bp, Canis familiaris
gaatccggtaggacgtcgacgtgga

SEQ ID NO: 105893 - DNA, 25 bp, Canis familiaris
gaatcccgttcgagtaacaggagaa

SEQ ID NO: 105894 - DNA, 25 bp, Canis familiaris
gaaccctgttaatctaatcataaaa

SEQ ID NO: 105895 - DNA, 25 bp, Canis familiaris
gaattcgctgttgccctaattcaag

SEQ ID NO: 105896 - DNA, 25 bp, Canis familiaris
gaatttgctgtgactccaacaataa

SEQ ID NO: 105897 - DNA, 25 bp, Canis familiaris
gaattgtcttgtggcatatacaaat

SEQ ID NO: 105898 - DNA, 25 bp, Canis familiaris
gaatatttataccaaaggactctta

SEQ ID NO: 105899 - DNA, 25 bp, Canis familiaris
gaattttcatcactaaagggaacaa

SEQ ID NO: 105900 - DNA, 25 bp, Canis familiaris
gaataaccatagagaagcgtaatag

SEQ ID NO: 105901 - DNA, 25 bp, Canis familiaris
gaataccctatggtcaagttctgta

SEQ ID NO: 105902 - DNA, 25 bp, Canis familiaris
gaataactcgtgaccaagtcctgaa

SEQ ID NO: 105903 - DNA, 25 bp, Canis familiaris
gaatattcactgtcacaacgtcctg

SEQ ID NO: 105904 - DNA, 25 bp, Canis familiaris
gcaatcagtgccaacatgaacagtt

SEQ ID NO: 105905 - DNA, 25 bp, Canis familiaris
gcaataggaaaatactgtttgtttg

SEQ ID NO: 105906 - DNA, 25 bp, Canis familiaris
gcaattgagaaactgcccttttttt

SEQ ID NO: 105907 - DNA, 25 bp, Canis familiaris
gaattagagaagcccctttagattt

SEQ ID NO: 105908 - DNA, 25 bp, Canis familiaris
gaataggaaatctgcttaataattt

SEQ ID NO: 105909 - DNA, 25 bp, Canis familiaris
gaataggaatcgtcgctaatattat

SEQ ID NO: 105910 - DNA, 25 bp, Canis familiaris
gaatacagactctaggtcaaatttt

SEQ ID NO: 105911 - DNA, 25 bp, Canis familiaris
gaataacctgctacagcccaatttt

SEQ ID NO: 105912 - DNA, 25 bp, Canis familiaris
gaatagatgcccatggccacagctt

SEQ ID NO: 105913 - DNA, 25 bp, Canis familiaris
gaattgatgattaggccatgcacac

SEQ ID NO: 105914 - DNA, 25 bp, Canis familiaris
gcaatgtcaggtagtgctcagcccc

SEQ ID NO: 105915 - DNA, 25 bp, Canis familiaris
gcaatggcatttatgtgtccctctt

SEQ ID NO: 105916 - DNA, 25 bp, Canis familiaris
gcaaggcatttgcttctctgtagct

SEQ ID NO: 105917 - DNA, 25 bp, Canis familiaris
gcaatagattatttgactcttcagt

SEQ ID NO: 105918 - DNA, 25 bp, Canis familiaris
gcaatatcaaatctacattcctgtt

SEQ ID NO: 105919 - DNA, 25 bp, Canis familiaris
gaatcataaatgtttctctgactcc

SEQ ID NO: 105920 - DNA, 25 bp, Canis familiaris
gaatccgaggcagttgttgaaacca

SEQ ID NO: 105921 - DNA, 25 bp, Canis familiaris
gaatccgagagagtgttacgagaac

SEQ ID NO: 105922 - DNA, 25 bp, Canis familiaris
gaatctcagaaactgctacaccagc

SEQ ID NO: 105923 - DNA, 25 bp, Canis familiaris
gaatataatgacttgctaaccttgc

SEQ ID NO: 105924 - DNA, 25 bp, Canis familiaris
gaatttgtcatctgaaggctcttgc

SEQ ID NO: 105925 - DNA, 25 bp, Canis familiaris
gaattgattctctccagttgtgtga

SEQ ID NO: 105926 - DNA, 25 bp, Canis familiaris
gaattgactctaaaactctgtgcag

SEQ ID NO: 105927 - DNA, 25 bp, Canis familiaris
gcaatggcgagttgataacctggag

SEQ ID NO: 105928 - DNA, 25 bp, Canis familiaris
gcaaggcggggatgacgtgcagcag

SEQ ID NO: 105929 - DNA, 25 bp, Canis familiaris
gaatcgggggataggggcagaggaa

SEQ ID NO: 105930 - DNA, 25 bp, Canis familiaris
gaattgggagaagggggctagagca

SEQ ID NO: 105931 - DNA, 25 bp, Canis familiaris
gaattcggaaagtgggctgacgaca

SEQ ID NO: 105932 - DNA, 25 bp, Canis familiaris
gaatatcggaactcttgacgggaaa

SEQ ID NO: 105933 - DNA, 25 bp, Canis familiaris
gaattcagaaagctttaccctcaaa

SEQ ID NO: 105934 - DNA, 25 bp, Canis familiaris
gaattctcaaaggctcttaacctcc

SEQ ID NO: 105935 - DNA, 25 bp, Canis familiaris
gaatttaagcaggctctctttccca

SEQ ID NO: 105936 - DNA, 25 bp, Canis familiaris
gaatttcacacgatccgattcagcc

SEQ ID NO: 105937 - DNA, 25 bp, Canis familiaris
gaatattaacgcgttcgcagttgca

SEQ ID NO: 105938 - DNA, 25 bp, Canis familiaris
gcaatatatatctccatttcatggt

SEQ ID NO: 105939 - DNA, 25 bp, Canis familiaris
gaatatatgaccccactgtccagat

SEQ ID NO: 105940 - DNA, 25 bp, Canis familiaris
gaattagacggggccatgctcgttt

SEQ ID NO: 105941 - DNA, 25 bp, Canis familiaris
gaattcccgggatagtagctttgtg

SEQ ID NO: 105942 - DNA, 25 bp, Canis familiaris
gaattcccgggatctatattccatt

SEQ ID NO: 105943 - DNA, 25 bp, Canis familiaris
gaattcccaaggctgccgttcaagt

SEQ ID NO: 105944 - DNA, 25 bp, Canis familiaris
gaattgcatccaggtgcttcggtgt

SEQ ID NO: 105945 - DNA, 25 bp, Canis familiaris
gaatatcagccaagggttgatgcat

SEQ ID NO: 105946 - DNA, 25 bp, Canis familiaris
gcaatatggctgtgtgagtgtgtga

SEQ ID NO: 105947 - DNA, 25 bp, Canis familiaris
gcaatatgtttacggtgtgtgtgtg

SEQ ID NO: 105948 - DNA, 25 bp, Canis familiaris
gcaatattttaagcctctgtgtgtg

SEQ ID NO: 105949 - DNA, 25 bp, Canis familiaris
gaattttataatcctcctcagttgc

SEQ ID NO: 105950 - DNA, 25 bp, Canis familiaris
gaattctgggactctgtctcttatc

SEQ ID NO: 105951 - DNA, 25 bp, Canis familiaris
gcaattttggtctgcgccacaatac

SEQ ID NO: 105952 - DNA, 25 bp, Canis familiaris
gaatttagtgtctgggacagccact

SEQ ID NO: 105953 - DNA, 25 bp, Canis familiaris
gaattctgcaatctatgggcacccc

SEQ ID NO: 105954 - DNA, 25 bp, Canis familiaris
gaattcatcaatccctgaggaggcc

SEQ ID NO: 105955 - DNA, 25 bp, Canis familiaris
gaattcagcagcccacaagggtgcc

SEQ ID NO: 105956 - DNA, 25 bp, Canis familiaris
gaattgcacagactctgcacaggtg

SEQ ID NO: 105957 - DNA, 25 bp, Canis familiaris
gcaatggcacattttctcacttagc

SEQ ID NO: 105958 - DNA, 25 bp, Canis familiaris
gcaattgcacatgttaatcattcct

SEQ ID NO: 105959 - DNA, 25 bp, Canis familiaris
gcaatgtgaatgttttccccctaat

SEQ ID NO: 105960 - DNA, 25 bp, Canis familiaris
gcaattatcagatttgttcccttta

SEQ ID NO: 105961 - DNA, 25 bp, Canis familiaris
gaatttcagccattgttcctggttc

SEQ ID NO: 105962 - DNA, 25 bp, Canis familiaris
gaattctcaggcatggtttggcagt

SEQ ID NO: 105963 - DNA, 25 bp, Canis familiaris
gcaattcacagtatttcgtggcagg

SEQ ID NO: 105964 - DNA, 25 bp, Canis familiaris
gcaattcggtcaattgtcactgtca

SEQ ID NO: 105965 - DNA, 25 bp, Canis familiaris
gaattcctgctcaaggtagcatctc

SEQ ID NO: 105966 - DNA, 25 bp, Canis familiaris
gaattcctgtatttgttcagtcgtt

SEQ ID NO: 105967 - DNA, 25 bp, Canis familiaris
gcaattcctgtatatgcaaacttga

SEQ ID NO: 105968 - DNA, 25 bp, Canis familiaris
gaattcctgaatcactatactgtac

SEQ ID NO: 105969 - DNA, 25 bp, Canis familiaris
gcaattcgtatttgacttacattct

SEQ ID NO: 105970 - DNA, 25 bp, Canis familiaris
gcaatgtcttatttgatttatcctt

SEQ ID NO: 105971 - DNA, 25 bp, Canis familiaris
gcaatttttattcctttgcctgtct

SEQ ID NO: 105972 - DNA, 25 bp, Canis familiaris
gaattctttgttgtattccggctcg

SEQ ID NO: 105973 - DNA, 25 bp, Canis familiaris
gaataggttctttttatccgtatca

SEQ ID NO: 105974 - DNA, 25 bp, Canis familiaris
gaattggttgttagtttctgagttt

SEQ ID NO: 105975 - DNA, 25 bp, Canis familiaris
gaattggtggttcttccagactttc

SEQ ID NO: 105976 - DNA, 25 bp, Canis familiaris
gaattggatggtctcctggaggctc

SEQ ID NO: 105977 - DNA, 25 bp, Canis familiaris
gaatccgaggtgttcttaacgctgg

SEQ ID NO: 105978 - DNA, 25 bp, Canis familiaris
gacagccaaggacaaataacgggtt

SEQ ID NO: 105979 - DNA, 25 bp, Canis familiaris
gaatccacaggaaaaaatacccttg

SEQ ID NO: 105980 - DNA, 25 bp, Canis familiaris
gaatccctatggaaattaatcccct

SEQ ID NO: 105981 - DNA, 25 bp, Canis familiaris
gaatccacttggagagacttccccg

SEQ ID NO: 105982 - DNA, 25 bp, Canis familiaris
gcaatactttggacctacttctccc

SEQ ID NO: 105983 - DNA, 25 bp, Canis familiaris
gcaattccttccatcatgattttcc

SEQ ID NO: 105984 - DNA, 25 bp, Canis familiaris
gaattccttcatatcaggttttggg

SEQ ID NO: 105985 - DNA, 25 bp, Canis familiaris
gaattccttaattgggtgttggccg

SEQ ID NO: 105986 - DNA, 25 bp, Canis familiaris
gaattggttacttgacggcttgggc

SEQ ID NO: 105987 - DNA, 25 bp, Canis familiaris
gaatttttacatcttagttgctggc

SEQ ID NO: 105988 - DNA, 25 bp, Canis familiaris
gaattcttttatgttactcactggt

SEQ ID NO: 105989 - DNA, 25 bp, Canis familiaris
gaatcctttattcttaatacttagt

SEQ ID NO: 105990 - DNA, 25 bp, Canis familiaris
gaatcacttctttctttaggactta

SEQ ID NO: 105991 - DNA, 25 bp, Canis familiaris
gaatagattcttcttaatcggtatc

SEQ ID NO: 105992 - DNA, 25 bp, Canis familiaris
gaataattttctgataagtcctact

SEQ ID NO: 105993 - DNA, 25 bp, Canis familiaris
gaattttttctctgggaagtcactt

SEQ ID NO: 105994 - DNA, 25 bp, Canis familiaris
gaattttagtactggtaaacaggct

SEQ ID NO: 105995 - DNA, 25 bp, Canis familiaris
gcaatctttaggaaacgtaaatagg

SEQ ID NO: 105996 - DNA, 25 bp, Canis familiaris
gaatttcaaagtcaggtttatcaga

SEQ ID NO: 105997 - DNA, 25 bp, Canis familiaris
gaaattggacctcaaagattacagg

SEQ ID NO: 105998 - DNA, 25 bp, Canis familiaris
gaaataccccttgaaactacggcat

SEQ ID NO: 105999 - DNA, 25 bp, Canis familiaris
gaaaaccacctagaatccgatccgg

SEQ ID NO: 106000 - DNA, 25 bp, Canis familiaris
gaaaaccattaaggcaaccagttgg

SEQ ID NO: 106001 - DNA, 25 bp, Canis familiaris
gaataagccttcaccgaacggttgg

SEQ ID NO: 106002 - DNA, 25 bp, Canis familiaris
gaataaatttgcagccacaacccat

SEQ ID NO: 106003 - DNA, 25 bp, Canis familiaris
gaatacatgtttatgctcctaccca

SEQ ID NO: 106004 - DNA, 25 bp, Canis familiaris
gaattcattgtgattgcctcacccc

SEQ ID NO: 106005 - DNA, 25 bp, Canis familiaris
gaattcattcgagtatccatcacgc

SEQ ID NO: 106006 - DNA, 25 bp, Canis familiaris
gaattcagcagaactgtccatgccg

SEQ ID NO: 106007 - DNA, 25 bp, Canis familiaris
gaattcaagaaatcaacaaggagga

SEQ ID NO: 106008 - DNA, 25 bp, Canis familiaris
gaattcccgaatgcccatacgagga

SEQ ID NO: 106009 - DNA, 25 bp, Canis familiaris
gaattgacggaagggcaccactaaa

SEQ ID NO: 106010 - DNA, 25 bp, Canis familiaris
gaattgaaggatgggtgcaggcagc

SEQ ID NO: 106011 - DNA, 25 bp, Canis familiaris
gaattggagagcggcgtgtgcgcgc

SEQ ID NO: 106012 - DNA, 25 bp, Canis familiaris
gaattgggcatgggcagaagggcat

SEQ ID NO: 106013 - DNA, 25 bp, Canis familiaris
gaatggggcagagaacgggctaaat

SEQ ID NO: 106014 - DNA, 25 bp, Canis familiaris
gaattgacagaagaaagggactaat

SEQ ID NO: 106015 - DNA, 25 bp, Canis familiaris
gaattggcaagaacacaagggacag

SEQ ID NO: 106016 - DNA, 25 bp, Canis familiaris
gaattggaggcttcaagttggaatg

SEQ ID NO: 106017 - DNA, 25 bp, Canis familiaris
gaataggggacatcagcctggtatg

SEQ ID NO: 106018 - DNA, 25 bp, Canis familiaris
gaatgacgggtttcaggcagaggag

SEQ ID NO: 106019 - DNA, 25 bp, Canis familiaris
gaatacagtggttctgattccggag

SEQ ID NO: 106020 - DNA, 25 bp, Canis familiaris
gaatatcagaagctctgttcctgac

SEQ ID NO: 106021 - DNA, 25 bp, Canis familiaris
gaatatgcatacccttgatggcctg

SEQ ID NO: 106022 - DNA, 25 bp, Canis familiaris
gaatatgctaccattgtgctttaga

SEQ ID NO: 106023 - DNA, 25 bp, Canis familiaris
gaatttgacaatactgcgctttatc

SEQ ID NO: 106024 - DNA, 25 bp, Canis familiaris
gaatactgatgagacatcttgttac

SEQ ID NO: 106025 - DNA, 25 bp, Canis familiaris
gaatcacgtagaatccttttaactg

SEQ ID NO: 106026 - DNA, 25 bp, Canis familiaris
gaatcacgtagaatccttttaactg

SEQ ID NO: 106027 - DNA, 25 bp, Canis familiaris
gaattctgtccaacactaatttatt

SEQ ID NO: 106028 - DNA, 25 bp, Canis familiaris
gacttctggttacccgaatgctttc

SEQ ID NO: 106029 - DNA, 25 bp, Canis familiaris
gactactcgtaatccgttttatatt

SEQ ID NO: 106030 - DNA, 25 bp, Canis familiaris
gactcctagtagtgtcagttccata

SEQ ID NO: 106031 - DNA, 25 bp, Canis familiaris
gaatcccagttgcttcagttaattt

SEQ ID NO: 106032 - DNA, 25 bp, Canis familiaris
gaatcccagattatcaggctaaatt

SEQ ID NO: 106033 - DNA, 25 bp, Canis familiaris
gaatgcggcaattaatcagatctaa

SEQ ID NO: 106034 - DNA, 25 bp, Canis familiaris
gaattggcaattccatgcagacaga

SEQ ID NO: 106035 - DNA, 25 bp, Canis familiaris
gaattggatttgctgctgaacaact

SEQ ID NO: 106036 - DNA, 25 bp, Canis familiaris
gaattgtatttgctctgcctatacc

SEQ ID NO: 106037 - DNA, 25 bp, Canis familiaris
gaatattttggcctcgccattttca

SEQ ID NO: 106038 - DNA, 25 bp, Canis familiaris
gaatttgaattggtccctcttatta

SEQ ID NO: 106039 - DNA, 25 bp, Canis familiaris
gaattgccaaatttccctctttata

SEQ ID NO: 106040 - DNA, 25 bp, Canis familiaris
gcaattgcccaacttcttttgttat

SEQ ID NO: 106041 - DNA, 25 bp, Canis familiaris
gaattcccagttgctttgtatcgtt

SEQ ID NO: 106042 - DNA, 25 bp, Canis familiaris
gaattcccagttcctatctgtgtaa

SEQ ID NO: 106043 - DNA, 25 bp, Canis familiaris
gaattcccatgtatacctgtgtaaa

SEQ ID NO: 106044 - DNA, 25 bp, Canis familiaris
gaattcccttgtaaccagtaagcaa

SEQ ID NO: 106045 - DNA, 25 bp, Canis familiaris
gaatccggttttgccagtacatcaa

SEQ ID NO: 106046 - DNA, 25 bp, Canis familiaris
gaatccgtgtaaagtaatggacgaa

SEQ ID NO: 106047 - DNA, 25 bp, Canis familiaris
gaattctcttaaagatagtggatct

SEQ ID NO: 106048 - DNA, 25 bp, Canis familiaris
gaattgcactaatacatactgactc

SEQ ID NO: 106049 - DNA, 25 bp, Canis familiaris
gaattgctgtaatccacctactgat

SEQ ID NO: 106050 - DNA, 25 bp, Canis familiaris
gcaatatttgttaccacctactgac

SEQ ID NO: 106051 - DNA, 25 bp, Canis familiaris
gcaattttatataccacaaccagac

SEQ ID NO: 106052 - DNA, 25 bp, Canis familiaris
gcaatttctatatcaggacagcaac

SEQ ID NO: 106053 - DNA, 25 bp, Canis familiaris
gaatgcttaaatacaggaccctcag

SEQ ID NO: 106054 - DNA, 25 bp, Canis familiaris
gaatctttatctacggtcaacctgc

SEQ ID NO: 106055 - DNA, 25 bp, Canis familiaris
gaattttactccatctctaaatgca

SEQ ID NO: 106056 - DNA, 25 bp, Canis familiaris
gaattttatcccttcattaaccagg

SEQ ID NO: 106057 - DNA, 25 bp, Canis familiaris
gaattttaccactctctaatctttg

SEQ ID NO: 106058 - DNA, 25 bp, Canis familiaris
gaattttattacctccatcatcatc

SEQ ID NO: 106059 - DNA, 25 bp, Canis familiaris
gaatcttaattaggctccacactca

SEQ ID NO: 106060 - DNA, 25 bp, Canis familiaris
gaatttcaacatatccatgcacctt

SEQ ID NO: 106061 - DNA, 25 bp, Canis familiaris
gaattcaaactcttctctgaggtgt

SEQ ID NO: 106062 - DNA, 25 bp, Canis familiaris
gaattgcaaactgtgtacggctgta

SEQ ID NO: 106063 - DNA, 25 bp, Canis familiaris
gaatccaacctgtggactgctggac

SEQ ID NO: 106064 - DNA, 25 bp, Canis familiaris
gaatctctgacactggagggcagct

SEQ ID NO: 106065 - DNA, 25 bp, Canis familiaris
gaattgatgcaaatgtcatggggtt

SEQ ID NO: 106066 - DNA, 25 bp, Canis familiaris
gaattgacttttgtgtggttttgtt

SEQ ID NO: 106067 - DNA, 25 bp, Canis familiaris
gaattgactgacttactgggatttt

SEQ ID NO: 106068 - DNA, 25 bp, Canis familiaris
gaatagactgacttactggaatttt

SEQ ID NO: 106069 - DNA, 25 bp, Canis familiaris
gaataaatgggtttggactcctata

SEQ ID NO: 106070 - DNA, 25 bp, Canis familiaris
gaataaaggttctggctccgttagc

SEQ ID NO: 106071 - DNA, 25 bp, Canis familiaris
gaataaacgttctgcttccactaaa

SEQ ID NO: 106072 - DNA, 25 bp, Canis familiaris
gaataaagcctttgtttcctgttca

SEQ ID NO: 106073 - DNA, 25 bp, Canis familiaris
gaatatcccgcgggatttcctgtcc

SEQ ID NO: 106074 - DNA, 25 bp, Canis familiaris
gaagtctttgggctttctcttcaaa

SEQ ID NO: 106075 - DNA, 25 bp, Canis familiaris
gaattttagaggctcttctctgccc

SEQ ID NO: 106076 - DNA, 25 bp, Canis familiaris
gaatttttatggccttctcatccag

SEQ ID NO: 106077 - DNA, 25 bp, Canis familiaris
gaatattgtgtcacgagtcctctag

SEQ ID NO: 106078 - DNA, 25 bp, Canis familiaris
gaatgatcctggatctttgccctca

SEQ ID NO: 106079 - DNA, 25 bp, Canis familiaris
gaatatctgtagattctttcctccc

SEQ ID NO: 106080 - DNA, 25 bp, Canis familiaris
gaattgctgtagtttttccccaaat

SEQ ID NO: 106081 - DNA, 25 bp, Canis familiaris
gaattgtgctagttttccttcaaaa

SEQ ID NO: 106082 - DNA, 25 bp, Canis familiaris
gaattgtttgttcacatattcaaca

SEQ ID NO: 106083 - DNA, 25 bp, Canis familiaris
gaattgtattgttttctcactagaa

SEQ ID NO: 106084 - DNA, 25 bp, Canis familiaris
gcaatttcattttatgttctcacag

SEQ ID NO: 106085 - DNA, 25 bp, Canis familiaris
gcaatatttttctagatgtgtctcc

SEQ ID NO: 106086 - DNA, 25 bp, Canis familiaris
gcaattgtatttcaagttctgtcca

SEQ ID NO: 106087 - DNA, 25 bp, Canis familiaris
gaattaatttgcacagttcctccaa

SEQ ID NO: 106088 - DNA, 25 bp, Canis familiaris
gaataaattcgttcaatgctaaaaa

SEQ ID NO: 106089 - DNA, 25 bp, Canis familiaris
gaattaagccttacaggagcaaaaa

SEQ ID NO: 106090 - DNA, 25 bp, Canis familiaris
gaattgactgccttcgccaggcaga

SEQ ID NO: 106091 - DNA, 25 bp, Canis familiaris
gcaattactgcctggccattcatac

SEQ ID NO: 106092 - DNA, 25 bp, Canis familiaris
gaatgtaatcccggtcattaacagg

SEQ ID NO: 106093 - DNA, 25 bp, Canis familiaris
gcaattcaatccggaactaacaatt

SEQ ID NO: 106094 - DNA, 25 bp, Canis familiaris
gaattgcttccggatgactgaccaa

SEQ ID NO: 106095 - DNA, 25 bp, Canis familiaris
gaattgcttccggatgactgaccaa

SEQ ID NO: 106096 - DNA, 25 bp, Canis familiaris
gaattattccagaaactagctaaca

SEQ ID NO: 106097 - DNA, 25 bp, Canis familiaris
gaattttcccaatctcacaagactc

SEQ ID NO: 106098 - DNA, 25 bp, Canis familiaris
gaatcttcccctttccaaatgaaat

SEQ ID NO: 106099 - DNA, 25 bp, Canis familiaris
gaatattttcccaatcccagattaa

SEQ ID NO: 106100 - DNA, 25 bp, Canis familiaris
gaatttgcaatctgaacccaagtga

SEQ ID NO: 106101 - DNA, 25 bp, Canis familiaris
gaatacgcattgtgatgaccagcaa

SEQ ID NO: 106102 - DNA, 25 bp, Canis familiaris
gaatactgaggacctaccacttgcc

SEQ ID NO: 106103 - DNA, 25 bp, Canis familiaris
gaatatccagggccagacaccttag

SEQ ID NO: 106104 - DNA, 25 bp, Canis familiaris
gaattccagggaaatcacacatttg

SEQ ID NO: 106105 - DNA, 25 bp, Canis familiaris
gaattccaaggaagcagcaacattg

SEQ ID NO: 106106 - DNA, 25 bp, Canis familiaris
gaattccacttcccaaatcattgaa

SEQ ID NO: 106107 - DNA, 25 bp, Canis familiaris
gaattctcagtccgtaaatctgtaa

SEQ ID NO: 106108 - DNA, 25 bp, Canis familiaris
gaatactagatgcagaacagattta

SEQ ID NO: 106109 - DNA, 25 bp, Canis familiaris
gaattctccatccaaaagtaataca

SEQ ID NO: 106110 - DNA, 25 bp, Canis familiaris
gaattcatagcaaccaagagtcaag

SEQ ID NO: 106111 - DNA, 25 bp, Canis familiaris
gaattcaaaccaaagtccatacatt

SEQ ID NO: 106112 - DNA, 25 bp, Canis familiaris
gaatctctaaccaatagacctacct

SEQ ID NO: 106113 - DNA, 25 bp, Canis familiaris
gaatcatgttaggcatgcccaccta

SEQ ID NO: 106114 - DNA, 25 bp, Canis familiaris
gaatcagtcatgggctgggctgctt

SEQ ID NO: 106115 - DNA, 25 bp, Canis familiaris
gaatgtatcttgtcgggcatcatgt

SEQ ID NO: 106116 - DNA, 25 bp, Canis familiaris
gcaattccaatctgtgccatcactt

SEQ ID NO: 106117 - DNA, 25 bp, Canis familiaris
gaattctcatactcaccatcaatat

SEQ ID NO: 106118 - DNA, 25 bp, Canis familiaris
gaattctacatttcattagcatgga

SEQ ID NO: 106119 - DNA, 25 bp, Canis familiaris
gaattgctgtcccctacagatgtga

SEQ ID NO: 106120 - DNA, 25 bp, Canis familiaris
gaatagctgaccactaaggagggga

SEQ ID NO: 106121 - DNA, 25 bp, Canis familiaris
gaataggcactcagtcacagaaggg

SEQ ID NO: 106122 - DNA, 25 bp, Canis familiaris
gaataggcatcggacccgagaggag

SEQ ID NO: 106123 - DNA, 25 bp, Canis familiaris
gaattgctgtgacacccatgggaaa

SEQ ID NO: 106124 - DNA, 25 bp, Canis familiaris
gaattgctgtaaacacaatgggaaa

SEQ ID NO: 106125 - DNA, 25 bp, Canis familiaris
gaattctgcttcacaatgataggaa

SEQ ID NO: 106126 - DNA, 25 bp, Canis familiaris
gaacctttcctctgatgggcatagt

SEQ ID NO: 106127 - DNA, 25 bp, Canis familiaris
gaacctggtcccagtgcatttcagt

SEQ ID NO: 106128 - DNA, 25 bp, Canis familiaris
gaatcgtcgtctatggtgacctcag

SEQ ID NO: 106129 - DNA, 25 bp, Canis familiaris
gaatcttctgaaaagtggaccgcat

SEQ ID NO: 106130 - DNA, 25 bp, Canis familiaris
gaatttctcacgcactgaatgccct

SEQ ID NO: 106131 - DNA, 25 bp, Canis familiaris
gaatttcatccaagaagttctccag

SEQ ID NO: 106132 - DNA, 25 bp, Canis familiaris
gaatttcccaatgactatccatcag

SEQ ID NO: 106133 - DNA, 25 bp, Canis familiaris
gaatacccaaatgtgatgtccaatg

SEQ ID NO: 106134 - DNA, 25 bp, Canis familiaris
gaatttccaagaggtggtggcacag

SEQ ID NO: 106135 - DNA, 25 bp, Canis familiaris
gaattccagaagattgccatggcaa

SEQ ID NO: 106136 - DNA, 25 bp, Canis familiaris
gaatatcctgcaggtattactccga

SEQ ID NO: 106137 - DNA, 25 bp, Canis familiaris
gaatactgctaacatacaccattga

SEQ ID NO: 106138 - DNA, 25 bp, Canis familiaris
gaatactaccagttacatccacgca

SEQ ID NO: 106139 - DNA, 25 bp, Canis familiaris
gaatatatgaccacgctcacccgca

SEQ ID NO: 106140 - DNA, 25 bp, Canis familiaris
gaatttgatccaaggccaaccactc

SEQ ID NO: 106141 - DNA, 25 bp, Canis familiaris
gaattagtagagagcacccacaccc

SEQ ID NO: 106142 - DNA, 25 bp, Canis familiaris
gaattaaataccccattacacgcca

SEQ ID NO: 106143 - DNA, 25 bp, Canis familiaris
gaattaagaaaccaaagccatccag

SEQ ID NO: 106144 - DNA, 25 bp, Canis familiaris
gaattacagaaactagcccctcaga

SEQ ID NO: 106145 - DNA, 25 bp, Canis familiaris
gaattccatgaattgtgcatcccat

SEQ ID NO: 106146 - DNA, 25 bp, Canis familiaris
gaattcacagaacttgtcccatgcc

SEQ ID NO: 106147 - DNA, 25 bp, Canis familiaris
gaattgcagagctaatttcccacag

SEQ ID NO: 106148 - DNA, 25 bp, Canis familiaris
gaattcaggaacttggaccacgttt

SEQ ID NO: 106149 - DNA, 25 bp, Canis familiaris
gaatttggaacccgaatgaatgttt

SEQ ID NO: 106150 - DNA, 25 bp, Canis familiaris
gaatttccaactcagtatgaatcta

SEQ ID NO: 106151 - DNA, 25 bp, Canis familiaris
gaatttcctactacaatctaactaa

SEQ ID NO: 106152 - DNA, 25 bp, Canis familiaris
gaattttctcagcaaatctgattta

SEQ ID NO: 106153 - DNA, 25 bp, Canis familiaris
gaattgttctctaaatcctcttttt

SEQ ID NO: 106154 - DNA, 25 bp, Canis familiaris
gaattgttgctcttaactttctctg

SEQ ID NO: 106155 - DNA, 25 bp, Canis familiaris
gaattgttactttacatgttccctt

SEQ ID NO: 106156 - DNA, 25 bp, Canis familiaris
gaattgtttctttcaaggcttcttt

SEQ ID NO: 106157 - DNA, 25 bp, Canis familiaris
gaatattttctttagaattacttga

SEQ ID NO: 106158 - DNA, 25 bp, Canis familiaris
gaattcccaggttggagattacttc

SEQ ID NO: 106159 - DNA, 25 bp, Canis familiaris
gaatacccaggtcagagtctacatt

SEQ ID NO: 106160 - DNA, 25 bp, Canis familiaris
gaatacccaggtgaggatcatgtct

SEQ ID NO: 106161 - DNA, 25 bp, Canis familiaris
gaattatcacattggctcagaaagt

SEQ ID NO: 106162 - DNA, 25 bp, Canis familiaris
gaatcattagtatgccaggatcagg

SEQ ID NO: 106163 - DNA, 25 bp, Canis familiaris
gaataccatttgaccgtgataaaga

SEQ ID NO: 106164 - DNA, 25 bp, Canis familiaris
gaattcactcttaacagtgttacag

SEQ ID NO: 106165 - DNA, 25 bp, Canis familiaris
gaattgccacttgtcttgtgctgac

SEQ ID NO: 106166 - DNA, 25 bp, Canis familiaris
gaattgaccatttttctgttatcat

SEQ ID NO: 106167 - DNA, 25 bp, Canis familiaris
gaattgaagttaatcctgcttcttg

SEQ ID NO: 106168 - DNA, 25 bp, Canis familiaris
gacctaagttattttgctgtcccgt

SEQ ID NO: 106169 - DNA, 25 bp, Canis familiaris
gaccgacaagtctcggaaccacgtc

SEQ ID NO: 106170 - DNA, 25 bp, Canis familiaris
gaatccacaagttccaaaaccaagt

SEQ ID NO: 106171 - DNA, 25 bp, Canis familiaris
gaatccgactgtgaataaaccaagc

SEQ ID NO: 106172 - DNA, 25 bp, Canis familiaris
gaatttcctatgtgaaacaccacca

SEQ ID NO: 106173 - DNA, 25 bp, Canis familiaris
gaattacactactgctaaactactt

SEQ ID NO: 106174 - DNA, 25 bp, Canis familiaris
gaataacagctaggcctaaagccct

SEQ ID NO: 106175 - DNA, 25 bp, Canis familiaris
gaattcacatgcagtgcctgatttc

SEQ ID NO: 106176 - DNA, 25 bp, Canis familiaris
gaattgcaagatgtcctgaatagtc

SEQ ID NO: 106177 - DNA, 25 bp, Canis familiaris
gaattctagaagtcctggaagatga

SEQ ID NO: 106178 - DNA, 25 bp, Canis familiaris
gaatttctgacaatgttggcataga

SEQ ID NO: 106179 - DNA, 25 bp, Canis familiaris
gaattgcttaaactgtgctgcattg

SEQ ID NO: 106180 - DNA, 25 bp, Canis familiaris
gaattgctctgaaatctggctatgg

SEQ ID NO: 106181 - DNA, 25 bp, Canis familiaris
gaatcatgtctgacctcgggttgta

SEQ ID NO: 106182 - DNA, 25 bp, Canis familiaris
gaatgctttcaaccggagtatggaa

SEQ ID NO: 106183 - DNA, 25 bp, Canis familiaris
gaattttcaacctcagtaggggctg

SEQ ID NO: 106184 - DNA, 25 bp, Canis familiaris
gaatttctcattacaacctaggggt

SEQ ID NO: 106185 - DNA, 25 bp, Canis familiaris
gaattttctgtaaacctaactgctt

SEQ ID NO: 106186 - DNA, 25 bp, Canis familiaris
gaatttgttcatttacccaacattt

SEQ ID NO: 106187 - DNA, 25 bp, Canis familiaris
gaatatatttatctactctaactct

SEQ ID NO: 106188 - DNA, 25 bp, Canis familiaris
gaatttcttttttgatgtccgctct

SEQ ID NO: 106189 - DNA, 25 bp, Canis familiaris
gaatattttattaagctggcccatg

SEQ ID NO: 106190 - DNA, 25 bp, Canis familiaris
gaatattcacttattggagaccata

SEQ ID NO: 106191 - DNA, 25 bp, Canis familiaris
gaatttccatctatgtccatgacta

SEQ ID NO: 106192 - DNA, 25 bp, Canis familiaris
gaattcgccaccatgcagacaatta

SEQ ID NO: 106193 - DNA, 25 bp, Canis familiaris
gaattgccacataactcaccaataa

SEQ ID NO: 106194 - DNA, 25 bp, Canis familiaris
gaattccattaactcaggcagacaa

SEQ ID NO: 106195 - DNA, 25 bp, Canis familiaris
gaatctcactctcactaggataaac

SEQ ID NO: 106196 - DNA, 25 bp, Canis familiaris
gaatcatccgttccaagtatgcata

SEQ ID NO: 106197 - DNA, 25 bp, Canis familiaris
gaatcatcccctgaagtaacatgtg

SEQ ID NO: 106198 - DNA, 25 bp, Canis familiaris
gaatatcctccccaagttgagcttt

SEQ ID NO: 106199 - DNA, 25 bp, Canis familiaris
gaattctctcccaggttttgtatga

SEQ ID NO: 106200 - DNA, 25 bp, Canis familiaris
gaatagactaccattgtcattaatt

SEQ ID NO: 106201 - DNA, 25 bp, Canis familiaris
gaatggaaattcatcctttaacttc

SEQ ID NO: 106202 - DNA, 25 bp, Canis familiaris
gaatagaatacctaccatttacatc

SEQ ID NO: 106203 - DNA, 25 bp, Canis familiaris
gaatcaagtttcttcttttcaatgc

SEQ ID NO: 106204 - DNA, 25 bp, Canis familiaris
gaatcggtttcaatccttttgtcta

SEQ ID NO: 106205 - DNA, 25 bp, Canis familiaris
gaatccagtaaatcctttctctaat

SEQ ID NO: 106206 - DNA, 25 bp, Canis familiaris
gaatcctctgggcaactttttagtg

SEQ ID NO: 106207 - DNA, 25 bp, Canis familiaris
gaatcccgtgaagactttattttgt

SEQ ID NO: 106208 - DNA, 25 bp, Canis familiaris
gaatcaccctcgagacgttatgaat

SEQ ID NO: 106209 - DNA, 25 bp, Canis familiaris
gaatcaaccttagacagcatttcaa

SEQ ID NO: 106210 - DNA, 25 bp, Canis familiaris
gaatctatcctttcaaaaggaagac

SEQ ID NO: 106211 - DNA, 25 bp, Canis familiaris
gaatgtcaccacacgaataggtaaa

SEQ ID NO: 106212 - DNA, 25 bp, Canis familiaris
gaattgcttccccgaaaggcgaagg

SEQ ID NO: 106213 - DNA, 25 bp, Canis familiaris
gaattgcttccccgataaggtcgaa

SEQ ID NO: 106214 - DNA, 25 bp, Canis familiaris
gaattgcttctaggattaagaggtt

SEQ ID NO: 106215 - DNA, 25 bp, Canis familiaris
gaattctggagtggattatcgaggg

SEQ ID NO: 106216 - DNA, 25 bp, Canis familiaris
gaattgctctcgttgattattatga

SEQ ID NO: 106217 - DNA, 25 bp, Canis familiaris
gaattgctccagttctttgctaagc

SEQ ID NO: 106218 - DNA, 25 bp, Canis familiaris
gaattatgccaccatgcttatgtaa

SEQ ID NO: 106219 - DNA, 25 bp, Canis familiaris
gaatagatagccctgctctgtgaat

SEQ ID NO: 106220 - DNA, 25 bp, Canis familiaris
gaatcaatctacttgtcatcatata

SEQ ID NO: 106221 - DNA, 25 bp, Canis familiaris
gaatctgacttcggttcatgtcggt

SEQ ID NO: 106222 - DNA, 25 bp, Canis familiaris
gaatctccattcactaatatccgtg

SEQ ID NO: 106223 - DNA, 25 bp, Canis familiaris
gaatccactatgatggaaaacagtg

SEQ ID NO: 106224 - DNA, 25 bp, Canis familiaris
gaatagcacttattgctgacagaga

SEQ ID NO: 106225 - DNA, 25 bp, Canis familiaris
gaataatcttcttcataggcatgcc

SEQ ID NO: 106226 - DNA, 25 bp, Canis familiaris
gaataatcagtgctgcttgccacct

SEQ ID NO: 106227 - DNA, 25 bp, Canis familiaris
gaataaagtgtgtttgactctaaaa

SEQ ID NO: 106228 - DNA, 25 bp, Canis familiaris
gaataaatacataaaatctctaaaa

SEQ ID NO: 106229 - DNA, 25 bp, Canis familiaris
gaatattaaataaatctctttcaaa

SEQ ID NO: 106230 - DNA, 25 bp, Canis familiaris
gaatattgacagtaatttctttttc

SEQ ID NO: 106231 - DNA, 25 bp, Canis familiaris
gaatctataactgtttggttttcag

SEQ ID NO: 106232 - DNA, 25 bp, Canis familiaris
gaattgcaacctctttggttagtga

SEQ ID NO: 106233 - DNA, 25 bp, Canis familiaris
gaattagatcctctttactttgtct

SEQ ID NO: 106234 - DNA, 25 bp, Canis familiaris
gaattagacttgtcatttttctctt

SEQ ID NO: 106235 - DNA, 25 bp, Canis familiaris
gaattaatctaattacattttctga

SEQ ID NO: 106236 - DNA, 25 bp, Canis familiaris
gaattgctgttcttatacttgttta

SEQ ID NO: 106237 - DNA, 25 bp, Canis familiaris
gaattctgcttattaaggagctttt

SEQ ID NO: 106238 - DNA, 25 bp, Canis familiaris
gaattctcattcttaaaagatattg

SEQ ID NO: 106239 - DNA, 25 bp, Canis familiaris
gaattcatttcatcaacaagctatc

SEQ ID NO: 106240 - DNA, 25 bp, Canis familiaris
gaatttatgtcaacctgcaaatagc

SEQ ID NO: 106241 - DNA, 25 bp, Canis familiaris
gaataggtgctcacggcatgaacgc

SEQ ID NO: 106242 - DNA, 25 bp, Canis familiaris
gaatgaagcttcacgttgggctccc

SEQ ID NO: 106243 - DNA, 25 bp, Canis familiaris
gaatactttcttgatcggatgtccc

SEQ ID NO: 106244 - DNA, 25 bp, Canis familiaris
gaatttttcttgttctgaatatcct

SEQ ID NO: 106245 - DNA, 25 bp, Canis familiaris
gaatatgtattccttgtgtaataaa

SEQ ID NO: 106246 - DNA, 25 bp, Canis familiaris
gaatatataacacttttggcctaaa

SEQ ID NO: 106247 - DNA, 25 bp, Canis familiaris
gaatatgctaaacttttggcccaga

SEQ ID NO: 106248 - DNA, 25 bp, Canis familiaris
gaatattagcactctttagcccaat

SEQ ID NO: 106249 - DNA, 25 bp, Canis familiaris
gaatatcattccacttattgcccaa

SEQ ID NO: 106250 - DNA, 25 bp, Canis familiaris
gaattgcctcacagatcatcattgc

SEQ ID NO: 106251 - DNA, 25 bp, Canis familiaris
gaattgcgtgcattaatcagattca

SEQ ID NO: 106252 - DNA, 25 bp, Canis familiaris
gaattgcggtatactcactgctatt

SEQ ID NO: 106253 - DNA, 25 bp, Canis familiaris
gaatcatgcggtatccacgagacca

SEQ ID NO: 106254 - DNA, 25 bp, Canis familiaris
gaatcagccattttccagggagaca

SEQ ID NO: 106255 - DNA, 25 bp, Canis familiaris
gaatcacacgtgctcagttggagaa

SEQ ID NO: 106256 - DNA, 25 bp, Canis familiaris
gaatcagaaagcccagttcaggtag

SEQ ID NO: 106257 - DNA, 25 bp, Canis familiaris
gaatataatatctgcatatgtgcaa

SEQ ID NO: 106258 - DNA, 25 bp, Canis familiaris
gaattaagcagctctctctcagcat

SEQ ID NO: 106259 - DNA, 25 bp, Canis familiaris
gaattaagctgctgtcatctgtctt

SEQ ID NO: 106260 - DNA, 25 bp, Canis familiaris
gaataaagtattccctgtcttaaat

SEQ ID NO: 106261 - DNA, 25 bp, Canis familiaris
gaatatcaagtagttccagctttaa

SEQ ID NO: 106262 - DNA, 25 bp, Canis familiaris
gaatttgcccagctttgctttaaac

SEQ ID NO: 106263 - DNA, 25 bp, Canis familiaris
gaatagtccactctttcaattaaga

SEQ ID NO: 106264 - DNA, 25 bp, Canis familiaris
gaataaacctcagttctcaattaac

SEQ ID NO: 106265 - DNA, 25 bp, Canis familiaris
gaataacacaacatacctaaaactt

SEQ ID NO: 106266 - DNA, 25 bp, Canis familiaris
gaatataccaacctggggaaaacat

SEQ ID NO: 106267 - DNA, 25 bp, Canis familiaris
gaattccacaacgggacacaacaag

SEQ ID NO: 106268 - DNA, 25 bp, Canis familiaris
gaatctcctcaaacctgaaaacaca

SEQ ID NO: 106269 - DNA, 25 bp, Canis familiaris
gaatctcctcaaacctgaaaacaca

SEQ ID NO: 106270 - DNA, 25 bp, Canis familiaris
gaattcctgaaagttgaccaggaca

SEQ ID NO: 106271 - DNA, 25 bp, Canis familiaris
gaattcctgaattgatagctctaaa

SEQ ID NO: 106272 - DNA, 25 bp, Canis familiaris
gaattcagtgccctcaacattaaca

SEQ ID NO: 106273 - DNA, 25 bp, Canis familiaris
gaattctggcacaatcagcatcctc

SEQ ID NO: 106274 - DNA, 25 bp, Canis familiaris
gaattcttcacaatctcaatgccta

SEQ ID NO: 106275 - DNA, 25 bp, Canis familiaris
gaattctctaataccaacgtattct

SEQ ID NO: 106276 - DNA, 25 bp, Canis familiaris
gaataatgctgatttcccacgtact

SEQ ID NO: 106277 - DNA, 25 bp, Canis familiaris
gaatcattgttgtaccaccttacat

SEQ ID NO: 106278 - DNA, 25 bp, Canis familiaris
gaatttttgccaatcaccttgacac

SEQ ID NO: 106279 - DNA, 25 bp, Canis familiaris
gaattctatctctttatcacttaaa

SEQ ID NO: 106280 - DNA, 25 bp, Canis familiaris
gaattccattcttttagtcattagg

SEQ ID NO: 106281 - DNA, 25 bp, Canis familiaris
gaattccatgcacctttaatcattg

SEQ ID NO: 106282 - DNA, 25 bp, Canis familiaris
gaatatgtatcaacttcagaacctg

SEQ ID NO: 106283 - DNA, 25 bp, Canis familiaris
gaattttgcatggctgttcgacctc

SEQ ID NO: 106284 - DNA, 25 bp, Canis familiaris
gaattttgcttgctctagtgctcat

SEQ ID NO: 106285 - DNA, 25 bp, Canis familiaris
gaataattgtctgctccgtgatcaa

SEQ ID NO: 106286 - DNA, 25 bp, Canis familiaris
gaatcaaagcctcctctattgtaaa

SEQ ID NO: 106287 - DNA, 25 bp, Canis familiaris
gaatcaagactcttccagactgata

SEQ ID NO: 106288 - DNA, 25 bp, Canis familiaris
gaatcaatgcacggaccaggtacta

SEQ ID NO: 106289 - DNA, 25 bp, Canis familiaris
gaatcaatccctagtcacgtagcat

SEQ ID NO: 106290 - DNA, 25 bp, Canis familiaris
gaatccctcctgatcagcagagact

SEQ ID NO: 106291 - DNA, 25 bp, Canis familiaris
gaatccctcctgatcagcagagact

SEQ ID NO: 106292 - DNA, 25 bp, Canis familiaris
gaatccctcctgatcagcagagact

SEQ ID NO: 106293 - DNA, 25 bp, Canis familiaris
gaattcccctttaaagtgcttgcag

SEQ ID NO: 106294 - DNA, 25 bp, Canis familiaris
gaattcacctcttaattagtcccta

SEQ ID NO: 106295 - DNA, 25 bp, Canis familiaris
gaattccgtcctaatctatgacacc

SEQ ID NO: 106296 - DNA, 25 bp, Canis familiaris
gaatttccgtctaatctatgacacc

SEQ ID NO: 106297 - DNA, 25 bp, Canis familiaris
gaattcccgggattgctgaagcagc

SEQ ID NO: 106298 - DNA, 25 bp, Canis familiaris
gaattcccgggattgttgagctccc

SEQ ID NO: 106299 - DNA, 25 bp, Canis familiaris
gaatttccgctgctgtttagataac

SEQ ID NO: 106300 - DNA, 25 bp, Canis familiaris
gaattcactcctttgtttctattat

SEQ ID NO: 106301 - DNA, 25 bp, Canis familiaris
gaattctctcgattttcttattttg

SEQ ID NO: 106302 - DNA, 25 bp, Canis familiaris
gaatttcgcgagtttcactcaagat

SEQ ID NO: 106303 - DNA, 25 bp, Canis familiaris
gaattcatggtgatctggccccaaa

SEQ ID NO: 106304 - DNA, 25 bp, Canis familiaris
gaattcaagatcttcgtgctaccca

SEQ ID NO: 106305 - DNA, 25 bp, Canis familiaris
gaatatcaaatcctgtgctgctacc

SEQ ID NO: 106306 - DNA, 25 bp, Canis familiaris
gaattcaggacgccatgctatgacc

SEQ ID NO: 106307 - DNA, 25 bp, Canis familiaris
gaatacggacgcaagcatatccccc

SEQ ID NO: 106308 - DNA, 25 bp, Canis familiaris
gaatgagggccggacaatcccggtt

SEQ ID NO: 106309 - DNA, 25 bp, Canis familiaris
gaatgaatgtttgaaaccattggtt

SEQ ID NO: 106310 - DNA, 25 bp, Canis familiaris
gaataatttcctgtaccgttgatat

SEQ ID NO: 106311 - DNA, 25 bp, Canis familiaris
gaattacttttggtatccccagaca

SEQ ID NO: 106312 - DNA, 25 bp, Canis familiaris
gaatatagtttcccaactcctagac

SEQ ID NO: 106313 - DNA, 25 bp, Canis familiaris
gaatatacatttgcttgactcacta

SEQ ID NO: 106314 - DNA, 25 bp, Canis familiaris
gaatatgctttgttcttgactacaa

SEQ ID NO: 106315 - DNA, 25 bp, Canis familiaris
gaatacgtggagactattatagcaa

SEQ ID NO: 106316 - DNA, 25 bp, Canis familiaris
gaatacagttatacttctatctcag

SEQ ID NO: 106317 - DNA, 25 bp, Canis familiaris
gaatactggtatactcctcatagag

SEQ ID NO: 106318 - DNA, 25 bp, Canis familiaris
gaatcgcggatgaatgtggctttga

SEQ ID NO: 106319 - DNA, 25 bp, Canis familiaris
gaatctggtgtgttggtgctttcgt

SEQ ID NO: 106320 - DNA, 25 bp, Canis familiaris
gaatatagtgtgttactgtttcccg

SEQ ID NO: 106321 - DNA, 25 bp, Canis familiaris
gaattttgacttactgctctaccta

SEQ ID NO: 106322 - DNA, 25 bp, Canis familiaris
gaatttcaggtttttgtactctagt

SEQ ID NO: 106323 - DNA, 25 bp, Canis familiaris
gaattactaccatgtctgtcactta

SEQ ID NO: 106324 - DNA, 25 bp, Canis familiaris
gaatcatgttcgcaagtctgccatt

SEQ ID NO: 106325 - DNA, 25 bp, Canis familiaris
gaatactgcattctatgtagccatg

SEQ ID NO: 106326 - DNA, 25 bp, Canis familiaris
gaatcacgtgtctgactaccggagt

SEQ ID NO: 106327 - DNA, 25 bp, Canis familiaris
gaattcagcttattactatccggac

SEQ ID NO: 106328 - DNA, 25 bp, Canis familiaris
gaatacatgcttttaccaaccgcag

SEQ ID NO: 106329 - DNA, 25 bp, Canis familiaris
gaattcattgctttcctagagccga

SEQ ID NO: 106330 - DNA, 25 bp, Canis familiaris
gaattcattgcttttagagccctgt

SEQ ID NO: 106331 - DNA, 25 bp, Canis familiaris
gaattctgatttctagactgcttgg

SEQ ID NO: 106332 - DNA, 25 bp, Canis familiaris
gaatactgttcacccatgactgttt

SEQ ID NO: 106333 - DNA, 25 bp, Canis familiaris
gaatcaatttcaccaggcacctgtt

SEQ ID NO: 106334 - DNA, 25 bp, Canis familiaris
gaatatgctttctcggaccatgttt

SEQ ID NO: 106335 - DNA, 25 bp, Canis familiaris
gaatttttctatcagacagatgaat

SEQ ID NO: 106336 - DNA, 25 bp, Canis familiaris
gaatctttccttcagggataatttt

SEQ ID NO: 106337 - DNA, 25 bp, Canis familiaris
gaatctttcgttcagggggtcatct

SEQ ID NO: 106338 - DNA, 25 bp, Canis familiaris
gaatcatacctttcaggggggtctt

SEQ ID NO: 106339 - DNA, 25 bp, Canis familiaris
gaatctcacgctattgggaaggcac

SEQ ID NO: 106340 - DNA, 25 bp, Canis familiaris
gaatccaacttttcttaaggcaggt

SEQ ID NO: 106341 - DNA, 25 bp, Canis familiaris
gaatccagctttcatttctaagcaa

SEQ ID NO: 106342 - DNA, 25 bp, Canis familiaris
gaattcagctttattactatcagta

SEQ ID NO: 106343 - DNA, 25 bp, Canis familiaris
gaattatccattagttacccagaat

SEQ ID NO: 106344 - DNA, 25 bp, Canis familiaris
gaattattctttttttccgcaatag

SEQ ID NO: 106345 - DNA, 25 bp, Canis familiaris
gaattctttttctgcttcagacaat

SEQ ID NO: 106346 - DNA, 25 bp, Canis familiaris
gaatttgttttgaagttcagtctta

SEQ ID NO: 106347 - DNA, 25 bp, Canis familiaris
gaatttttttcttgattgagtaagg

SEQ ID NO: 106348 - DNA, 25 bp, Canis familiaris
gaatttgctgtttgtctattggaat

SEQ ID NO: 106349 - DNA, 25 bp, Canis familiaris
gaattttgtctttattatggtgtaa

SEQ ID NO: 106350 - DNA, 25 bp, Canis familiaris
gaattattctgcctttggggtgtat

SEQ ID NO: 106351 - DNA, 25 bp, Canis familiaris
gaatttttcatccttggtggctgtt

SEQ ID NO: 106352 - DNA, 25 bp, Canis familiaris
gaatttggctctctctggggagtgt

SEQ ID NO: 106353 - DNA, 25 bp, Canis familiaris
gaatgcctggaatggcaggggggat

SEQ ID NO: 106354 - DNA, 25 bp, Canis familiaris
gaatcgtagagatgatcgccaggcg

SEQ ID NO: 106355 - DNA, 25 bp, Canis familiaris
gaataggagaaggatgcctgggtgg

SEQ ID NO: 106356 - DNA, 25 bp, Canis familiaris
gagacttagacggtcgggttggtct

SEQ ID NO: 106357 - DNA, 25 bp, Canis familiaris
gaatttacaggatttgggcttatgt

SEQ ID NO: 106358 - DNA, 25 bp, Canis familiaris
gaatttaatggctatatggtgtcaa

SEQ ID NO: 106359 - DNA, 25 bp, Canis familiaris
gaattaccatgacatagtgtgtagg

SEQ ID NO: 106360 - DNA, 25 bp, Canis familiaris
gaattcacagcagttataggcttga

SEQ ID NO: 106361 - DNA, 25 bp, Canis familiaris
gaattacatgctgtgaaggcgaaca

SEQ ID NO: 106362 - DNA, 25 bp, Canis familiaris
gaatttcagctgttaaactgctaca

SEQ ID NO: 106363 - DNA, 25 bp, Canis familiaris
gaatttgcactgtttaatcatctta

SEQ ID NO: 106364 - DNA, 25 bp, Canis familiaris
gaatcttgcctatctgtaactgtag

SEQ ID NO: 106365 - DNA, 25 bp, Canis familiaris
gaattttgtgatgctctaagtgtat

SEQ ID NO: 106366 - DNA, 25 bp, Canis familiaris
gaatttgtctgaagcccatagttca

SEQ ID NO: 106367 - DNA, 25 bp, Canis familiaris
gaattagtctgcagagcctatggtg

SEQ ID NO: 106368 - DNA, 25 bp, Canis familiaris
gaattcagttattgaccttgttact

SEQ ID NO: 106369 - DNA, 25 bp, Canis familiaris
gaattaatattcccttttgtcactt

SEQ ID NO: 106370 - DNA, 25 bp, Canis familiaris
gaatttattcgatcttttgccattt

SEQ ID NO: 106371 - DNA, 25 bp, Canis familiaris
gaatattattggccgttttaattct

SEQ ID NO: 106372 - DNA, 25 bp, Canis familiaris
gaatgaaagtggcgctttctccgcc

SEQ ID NO: 106373 - DNA, 25 bp, Canis familiaris
gaatctgaaagccacgttttcccta

SEQ ID NO: 106374 - DNA, 25 bp, Canis familiaris
gaatatttagaaatgttttccacat

SEQ ID NO: 106375 - DNA, 25 bp, Canis familiaris
gaatattcaaggtttgtcctctcca

SEQ ID NO: 106376 - DNA, 25 bp, Canis familiaris
gaatttcaagcctattccttgctct

SEQ ID NO: 106377 - DNA, 25 bp, Canis familiaris
gaatttctagccttctgtatgtcca

SEQ ID NO: 106378 - DNA, 25 bp, Canis familiaris
gaatttatgagccaactgttccaca

SEQ ID NO: 106379 - DNA, 25 bp, Canis familiaris
gaatttatcgattactggtccatag

SEQ ID NO: 106380 - DNA, 25 bp, Canis familiaris
gaatttgaagatgactcctgcctgg

SEQ ID NO: 106381 - DNA, 25 bp, Canis familiaris
gaatcttaatgagccaactacatgg

SEQ ID NO: 106382 - DNA, 25 bp, Canis familiaris
gaatcttcatcatacaccacttcat

SEQ ID NO: 106383 - DNA, 25 bp, Canis familiaris
gaatcttccaagaatcaagctccta

SEQ ID NO: 106384 - DNA, 25 bp, Canis familiaris
gaatcacgccaagaaagcgacccag

SEQ ID NO: 106385 - DNA, 25 bp, Canis familiaris
gaatatcccagaaaaggagtccaag

SEQ ID NO: 106386 - DNA, 25 bp, Canis familiaris
gaagacaaaaaccagtcgtaaagtg

SEQ ID NO: 106387 - DNA, 25 bp, Canis familiaris
gaatgaacaagtacacccagtaaag

SEQ ID NO: 106388 - DNA, 25 bp, Canis familiaris
gaataaaaacaccctcatgtgaaaa

SEQ ID NO: 106389 - DNA, 25 bp, Canis familiaris
gaattaaaacagtacttcagccaaa

SEQ ID NO: 106390 - DNA, 25 bp, Canis familiaris
gaatagataaaatactgggccacaa

SEQ ID NO: 106391 - DNA, 25 bp, Canis familiaris
gaatcgtaaacatactgagcctctg

SEQ ID NO: 106392 - DNA, 25 bp, Canis familiaris
gaacgggaaattgtagcctctacgc

SEQ ID NO: 106393 - DNA, 25 bp, Canis familiaris
gaagcagggaaatctccccttttgc

SEQ ID NO: 106394 - DNA, 25 bp, Canis familiaris
gaatcccttaaattgacccatttct

SEQ ID NO: 106395 - DNA, 25 bp, Canis familiaris
gaatcccttaaccagtaagcaattc

SEQ ID NO: 106396 - DNA, 25 bp, Canis familiaris
gaatcctctgtccctggtagaaatt

SEQ ID NO: 106397 - DNA, 25 bp, Canis familiaris
gaatccagcgtaccagggagatctt

SEQ ID NO: 106398 - DNA, 25 bp, Canis familiaris
gaatccgtggtgttgcggtgcttat

SEQ ID NO: 106399 - DNA, 25 bp, Canis familiaris
gaatcactgttttcagggtgttatg

SEQ ID NO: 106400 - DNA, 25 bp, Canis familiaris
gaatcaccccagcagggtcttagaa

SEQ ID NO: 106401 - DNA, 25 bp, Canis familiaris
gaatcacccgcaggcggcaattcgg

SEQ ID NO: 106402 - DNA, 25 bp, Canis familiaris
gaatcacctggccaggccatatgtc

SEQ ID NO: 106403 - DNA, 25 bp, Canis familiaris
gaatacattggctagagactcagtt

SEQ ID NO: 106404 - DNA, 25 bp, Canis familiaris
gaatatactgagctatgaagagctt

SEQ ID NO: 106405 - DNA, 25 bp, Canis familiaris
gaattactgggcttaatgtgctgcc

SEQ ID NO: 106406 - DNA, 25 bp, Canis familiaris
gaatcgcttgggcatcaatggctgc

SEQ ID NO: 106407 - DNA, 25 bp, Canis familiaris
gaatttctcggtgcacatggatggt

SEQ ID NO: 106408 - DNA, 25 bp, Canis familiaris
gaattattgtggtatgactggtggt

SEQ ID NO: 106409 - DNA, 25 bp, Canis familiaris
gaatcattatgcttgtatcctttgg

SEQ ID NO: 106410 - DNA, 25 bp, Canis familiaris
gaatagatatgcgtgatcctctgtg

SEQ ID NO: 106411 - DNA, 25 bp, Canis familiaris
gaatagaatggaatcgtgctctcat

SEQ ID NO: 106412 - DNA, 25 bp, Canis familiaris
gaatagcctgagttcttgctcactt

SEQ ID NO: 106413 - DNA, 25 bp, Canis familiaris
gaatatgccaatttctttcccgttt

SEQ ID NO: 106414 - DNA, 25 bp, Canis familiaris
gaatacccatttatttgcccattta

SEQ ID NO: 106415 - DNA, 25 bp, Canis familiaris
gaatacttttttatacctcactatg

SEQ ID NO: 106416 - DNA, 25 bp, Canis familiaris
gaatactctttggctttatcccaca

SEQ ID NO: 106417 - DNA, 25 bp, Canis familiaris
gaatatgccttgtacttttgctaca

SEQ ID NO: 106418 - DNA, 25 bp, Canis familiaris
gaatcatgtcttcactacgatgcta

SEQ ID NO: 106419 - DNA, 25 bp, Canis familiaris
gaatcagtcatcccacatgttgtta

SEQ ID NO: 106420 - DNA, 25 bp, Canis familiaris
gaatcatctccacaagtgtcttcca

SEQ ID NO: 106421 - DNA, 25 bp, Canis familiaris
gaataatagcactatggatgttgtc

SEQ ID NO: 106422 - DNA, 25 bp, Canis familiaris
gaattatagcactgataggatcctt

SEQ ID NO: 106423 - DNA, 25 bp, Canis familiaris
gaatttgagcactttcacacttttt

SEQ ID NO: 106424 - DNA, 25 bp, Canis familiaris
gaatgatctgcgacatttagttttc

SEQ ID NO: 106425 - DNA, 25 bp, Canis familiaris
gaatatctggcagtctctcattggt

SEQ ID NO: 106426 - DNA, 25 bp, Canis familiaris
gaatttgtcatggtaatgcatcgta

SEQ ID NO: 106427 - DNA, 25 bp, Canis familiaris
gaatttgccattactagcacagtgg

SEQ ID NO: 106428 - DNA, 25 bp, Canis familiaris
gaatattacttatttgcaagcatgt

SEQ ID NO: 106429 - DNA, 25 bp, Canis familiaris
gaatttacctaatgggatatccccg

SEQ ID NO: 106430 - DNA, 25 bp, Canis familiaris
gaagttcccaagtgtggctttctcc

SEQ ID NO: 106431 - DNA, 25 bp, Canis familiaris
gaatgttccacggaagtggccgtct

SEQ ID NO: 106432 - DNA, 25 bp, Canis familiaris
gaatgcaaccagtgtaaggccccta

SEQ ID NO: 106433 - DNA, 25 bp, Canis familiaris
gaataaccagggcacaggcctgctt

SEQ ID NO: 106434 - DNA, 25 bp, Canis familiaris
gaatagagccgcatcaacgggttta

SEQ ID NO: 106435 - DNA, 25 bp, Canis familiaris
gaataacttctgtcaacggattaaa

SEQ ID NO: 106436 - DNA, 25 bp, Canis familiaris
gaataactttattaaggtcctgaag

SEQ ID NO: 106437 - DNA, 25 bp, Canis familiaris
gaataacacttctgtagttcctaaa

SEQ ID NO: 106438 - DNA, 25 bp, Canis familiaris
gaataaactctcttcaaattactaa

SEQ ID NO: 106439 - DNA, 25 bp, Canis familiaris
gaataaacccctgatactgacttga

SEQ ID NO: 106440 - DNA, 25 bp, Canis familiaris
gaatatgtaacagcagccaactact

SEQ ID NO: 106441 - DNA, 25 bp, Canis familiaris
gaatggtacaagtcccaaggttgcc

SEQ ID NO: 106442 - DNA, 25 bp, Canis familiaris
gaattttgagaacccacaggctgtg

SEQ ID NO: 106443 - DNA, 25 bp, Canis familiaris
gaatatttcaaacccttggcgtgct

SEQ ID NO: 106444 - DNA, 25 bp, Canis familiaris
gaattttgtcaacactgtgacttct

SEQ ID NO: 106445 - DNA, 25 bp, Canis familiaris
gaatctctagaatgctattggtttt

SEQ ID NO: 106446 - DNA, 25 bp, Canis familiaris
gaatcccaagattccttggtgggcc

SEQ ID NO: 106447 - DNA, 25 bp, Canis familiaris
gaatgcaccggatccagggtgggcc

SEQ ID NO: 106448 - DNA, 25 bp, Canis familiaris
gaatgcctccgaagccgtgaggtgt

SEQ ID NO: 106449 - DNA, 25 bp, Canis familiaris
gaacctctgctgaggcctttggaag

SEQ ID NO: 106450 - DNA, 25 bp, Canis familiaris
gaatttctgctggtcacctgttaaa

SEQ ID NO: 106451 - DNA, 25 bp, Canis familiaris
gaaatgtccgttgcctttaatggtt

SEQ ID NO: 106452 - DNA, 25 bp, Canis familiaris
gaatattggttttcctttgataggt

SEQ ID NO: 106453 - DNA, 25 bp, Canis familiaris
gaattttgtgtttccatgattgcat

SEQ ID NO: 106454 - DNA, 25 bp, Canis familiaris
gaatatttgttttctcattttctac

SEQ ID NO: 106455 - DNA, 25 bp, Canis familiaris
gaatattttcatgctgctttttctc

SEQ ID NO: 106456 - DNA, 25 bp, Canis familiaris
gaatagtgctaatgccttcttttct

SEQ ID NO: 106457 - DNA, 25 bp, Canis familiaris
gaataaccaacatctttgtttctaa

SEQ ID NO: 106458 - DNA, 25 bp, Canis familiaris
gaatcaatcacccaagctatttttt

SEQ ID NO: 106459 - DNA, 25 bp, Canis familiaris
gaataaacagaaagctgtctattaa

SEQ ID NO: 106460 - DNA, 25 bp, Canis familiaris
gaatacaatttaacttccatttagc

SEQ ID NO: 106461 - DNA, 25 bp, Canis familiaris
gaatctcctttatctgaactttagc

SEQ ID NO: 106462 - DNA, 25 bp, Canis familiaris
gaatctccgttttcttcaatttatt

SEQ ID NO: 106463 - DNA, 25 bp, Canis familiaris
gaatctacatttcacttgccttatt

SEQ ID NO: 106464 - DNA, 25 bp, Canis familiaris
gaatctcaattatttttctttacta

SEQ ID NO: 106465 - DNA, 25 bp, Canis familiaris
gaatcactgttatttatgagcctta

SEQ ID NO: 106466 - DNA, 25 bp, Canis familiaris
gaatcctttatattatggaccgaaa

SEQ ID NO: 106467 - DNA, 25 bp, Canis familiaris
gaaccaatttaatagtcacgagaga

SEQ ID NO: 106468 - DNA, 25 bp, Canis familiaris
gaatacacttatttggagtcaagag

SEQ ID NO: 106469 - DNA, 25 bp, Canis familiaris
gaataaactcattctaatggccaga

SEQ ID NO: 106470 - DNA, 25 bp, Canis familiaris
gaataaccactatagagctctgcag

SEQ ID NO: 106471 - DNA, 25 bp, Canis familiaris
gaatctgaccacttcaaggttgcgg

SEQ ID NO: 106472 - DNA, 25 bp, Canis familiaris
gaatctgaccacttcaaggttgcgg

SEQ ID NO: 106473 - DNA, 25 bp, Canis familiaris
gaatctataactcatgggtctcgta

SEQ ID NO: 106474 - DNA, 25 bp, Canis familiaris
gaatttgaagatatggtggccgtta

SEQ ID NO: 106475 - DNA, 25 bp, Canis familiaris
gaatttattgcatttgggcccaggt

SEQ ID NO: 106476 - DNA, 25 bp, Canis familiaris
gaatttgtttgcctgggcccaggat

SEQ ID NO: 106477 - DNA, 25 bp, Canis familiaris
gaatccgacttgctggttcaatgga

SEQ ID NO: 106478 - DNA, 25 bp, Canis familiaris
gaatccttactgctggtgtgcactc

SEQ ID NO: 106479 - DNA, 25 bp, Canis familiaris
gaatcctaattcctggagacctaaa

SEQ ID NO: 106480 - DNA, 25 bp, Canis familiaris
gaatcctcattgacactggagaacc

SEQ ID NO: 106481 - DNA, 25 bp, Canis familiaris
gaatcagttctggccatgagaggaa

SEQ ID NO: 106482 - DNA, 25 bp, Canis familiaris
gaatatgttctggctctgatgagtt

SEQ ID NO: 106483 - DNA, 25 bp, Canis familiaris
gaattttctccaatcatattttacc

SEQ ID NO: 106484 - DNA, 25 bp, Canis familiaris
gaataatggcgctttaatggagtac

SEQ ID NO: 106485 - DNA, 25 bp, Canis familiaris
gaatagtatgacagtagggagtaca

SEQ ID NO: 106486 - DNA, 25 bp, Canis familiaris
gactagtaaactcaggtggaataaa

SEQ ID NO: 106487 - DNA, 25 bp, Canis familiaris
gactcgaaaactctctgaagctgat

SEQ ID NO: 106488 - DNA, 25 bp, Canis familiaris
gaatctagaaagctccaaacatgaa

SEQ ID NO: 106489 - DNA, 25 bp, Canis familiaris
gaatctataatagttgtcaaatggg

SEQ ID NO: 106490 - DNA, 25 bp, Canis familiaris
gaatataattattgtgtaaagttgt

SEQ ID NO: 106491 - DNA, 25 bp, Canis familiaris
gaatttttacatttaatacatagtg

SEQ ID NO: 106492 - DNA, 25 bp, Canis familiaris
gaatctcatttcctttaagtctcag

SEQ ID NO: 106493 - DNA, 25 bp, Canis familiaris
gaatctcatacccttgaagagtttt

SEQ ID NO: 106494 - DNA, 25 bp, Canis familiaris
gaatcctaccacagagggctgctta

SEQ ID NO: 106495 - DNA, 25 bp, Canis familiaris
gaatcctactcaggtacagcagcct

SEQ ID NO: 106496 - DNA, 25 bp, Canis familiaris
gaatcctcaccagttaaatccaaga

SEQ ID NO: 106497 - DNA, 25 bp, Canis familiaris
gaatccacgccagtataagatccct

SEQ ID NO: 106498 - DNA, 25 bp, Canis familiaris
gaatgccaggctttgcatcctgatc

SEQ ID NO: 106499 - DNA, 25 bp, Canis familiaris
gaatccgtctgattatcactgtgtt

SEQ ID NO: 106500 - DNA, 25 bp, Canis familiaris
gaatcatcttcttcaatcattgtga

SEQ ID NO: 106501 - DNA, 25 bp, Canis familiaris
gaatattcttgatagcattgacacg

SEQ ID NO: 106502 - DNA, 25 bp, Canis familiaris
gaatatttcatgtgtattacagtgg

SEQ ID NO: 106503 - DNA, 25 bp, Canis familiaris
gaatcattccaacattatacagtgt

SEQ ID NO: 106504 - DNA, 25 bp, Canis familiaris
gaatcatttacaccttgaaagcttc

SEQ ID NO: 106505 - DNA, 25 bp, Canis familiaris
gaatctgtgtttccaaaacagctcc

SEQ ID NO: 106506 - DNA, 25 bp, Canis familiaris
gaatctgttgttcaaagcaaatgac

SEQ ID NO: 106507 - DNA, 25 bp, Canis familiaris
gaagtacgtacataaatacatacat

SEQ ID NO: 106508 - DNA, 25 bp, Canis familiaris
gaagtccgtacgaatacaaattctt

SEQ ID NO: 106509 - DNA, 25 bp, Canis familiaris
gaatgtcctttctgaattttccatt

SEQ ID NO: 106510 - DNA, 25 bp, Canis familiaris
gaatttctttcatgttctttgctat

SEQ ID NO: 106511 - DNA, 25 bp, Canis familiaris
gaatctcctttatgttgttttcctc

SEQ ID NO: 106512 - DNA, 25 bp, Canis familiaris
gaatttctttgggttgtgtttcatt

SEQ ID NO: 106513 - DNA, 25 bp, Canis familiaris
gaatttcttgcgctttgattttttt

SEQ ID NO: 106514 - DNA, 25 bp, Canis familiaris
gaatttcttggatttgtttgtgttg

SEQ ID NO: 106515 - DNA, 25 bp, Canis familiaris
gaatctcttacctctgatactgtgt

SEQ ID NO: 106516 - DNA, 25 bp, Canis familiaris
gaatagttaccaccgtcagttgttt

SEQ ID NO: 106517 - DNA, 25 bp, Canis familiaris
gaatagtttactctgtctcttgctt

SEQ ID NO: 106518 - DNA, 25 bp, Canis familiaris
gaataatcgtgacttttcttttctt

SEQ ID NO: 106519 - DNA, 25 bp, Canis familiaris
gaatacacctgtccttttacagctc

SEQ ID NO: 106520 - DNA, 25 bp, Canis familiaris
gaatttccatgtcattgttaatgtg

SEQ ID NO: 106521 - DNA, 25 bp, Canis familiaris
gaatttgaatgccgaagttactgac

SEQ ID NO: 106522 - DNA, 25 bp, Canis familiaris
gaagtggagatcccggcttagggcc

SEQ ID NO: 106523 - DNA, 25 bp, Canis familiaris
gaaggaggtcaacaggttggagacg

SEQ ID NO: 106524 - DNA, 25 bp, Canis familiaris
gaatgtagttaaaagggatgtggac

SEQ ID NO: 106525 - DNA, 25 bp, Canis familiaris
gaagtaccggaaccgggtgcgcacg

SEQ ID NO: 106526 - DNA, 25 bp, Canis familiaris
gaagaacgccccagtaggaggcacc

SEQ ID NO: 106527 - DNA, 25 bp, Canis familiaris
gaaaaggaccaagatgggggccgca

SEQ ID NO: 106528 - DNA, 25 bp, Canis familiaris
gaaaagtaatcgtgggggcagcccg

SEQ ID NO: 106529 - DNA, 25 bp, Canis familiaris
tgaaaggtaccgagtccgacggctc

SEQ ID NO: 106530 - DNA, 25 bp, Canis familiaris
gaaggcgttttgagaccagacggga

SEQ ID NO: 106531 - DNA, 25 bp, Canis familiaris
gaaggctgttttgaacccagaagag

SEQ ID NO: 106532 - DNA, 25 bp, Canis familiaris
gaatagtggtttgaccagcacaaaa

SEQ ID NO: 106533 - DNA, 25 bp, Canis familiaris
gaatattctgtatacctacaacaac

SEQ ID NO: 106534 - DNA, 25 bp, Canis familiaris
gaatagtgcagtttactcaccaaaa

SEQ ID NO: 106535 - DNA, 25 bp, Canis familiaris
gaatcagtcctttcattacaaaaaa

SEQ ID NO: 106536 - DNA, 25 bp, Canis familiaris
gaataagcgctttgaaaagaaattt

SEQ ID NO: 106537 - DNA, 25 bp, Canis familiaris
gaatatagccttggagcagacggaa

SEQ ID NO: 106538 - DNA, 25 bp, Canis familiaris
gaatatctactttgagaacagagga

SEQ ID NO: 106539 - DNA, 25 bp, Canis familiaris
gaatattcttcttccaacaagtgaa

SEQ ID NO: 106540 - DNA, 25 bp, Canis familiaris
gaatcatgatctatacgcaaccgga

SEQ ID NO: 106541 - DNA, 25 bp, Canis familiaris
gaatattctatttccccacgagatc

SEQ ID NO: 106542 - DNA, 25 bp, Canis familiaris
gaatttgcctaaacatccaagtatc

SEQ ID NO: 106543 - DNA, 25 bp, Canis familiaris
gaatttgcatttctaccaagatatt

SEQ ID NO: 106544 - DNA, 25 bp, Canis familiaris
gaatattcatgtcaccaccaggttt

SEQ ID NO: 106545 - DNA, 25 bp, Canis familiaris
gaatattgtgtgggcctcactcgtt

SEQ ID NO: 106546 - DNA, 25 bp, Canis familiaris
gaatatatcggaaggtcccgttcct

SEQ ID NO: 106547 - DNA, 25 bp, Canis familiaris
gaatctgtcgtaaagttccgttttg

SEQ ID NO: 106548 - DNA, 25 bp, Canis familiaris
gaatctgtcaaatggcaaccttttt

SEQ ID NO: 106549 - DNA, 25 bp, Canis familiaris
gaatagtcaacttccaacacttttc

SEQ ID NO: 106550 - DNA, 25 bp, Canis familiaris
gaatcaaaactgtcccacactttca

SEQ ID NO: 106551 - DNA, 25 bp, Canis familiaris
gaataaaatcttaaagcactcttat

SEQ ID NO: 106552 - DNA, 25 bp, Canis familiaris
gaatacaaattccatactccactgt

SEQ ID NO: 106553 - DNA, 25 bp, Canis familiaris
gaatcctaattcttttacacagtct

SEQ ID NO: 106554 - DNA, 25 bp, Canis familiaris
gaatccgaaagctttttaatctgtc

SEQ ID NO: 106555 - DNA, 25 bp, Canis familiaris
gaataacagaactttcttagttgat

SEQ ID NO: 106556 - DNA, 25 bp, Canis familiaris
gaatatatcatatccaattttgtat

SEQ ID NO: 106557 - DNA, 25 bp, Canis familiaris
gaatcataagcatgccctgtttttc

SEQ ID NO: 106558 - DNA, 25 bp, Canis familiaris
gaataccagcaggccctgttgctgg

SEQ ID NO: 106559 - DNA, 25 bp, Canis familiaris
gaataccagcagtctttcatgaagc

SEQ ID NO: 106560 - DNA, 25 bp, Canis familiaris
gaatctcccagagcgtcatgacaat

SEQ ID NO: 106561 - DNA, 25 bp, Canis familiaris
gaatatactcaagctgtctgcttca

SEQ ID NO: 106562 - DNA, 25 bp, Canis familiaris
gaataaacacaggagactgcttaga

SEQ ID NO: 106563 - DNA, 25 bp, Canis familiaris
gaataaccacagcacagtctaagaa

SEQ ID NO: 106564 - DNA, 25 bp, Canis familiaris
gaatacaccagtcaaatcctcagaa

SEQ ID NO: 106565 - DNA, 25 bp, Canis familiaris
gaataaccattgaacacatccaaaa

SEQ ID NO: 106566 - DNA, 25 bp, Canis familiaris
gaataaagatcatagcacccaaaaa

SEQ ID NO: 106567 - DNA, 25 bp, Canis familiaris
gaataaagctgtctgacccaggaaa

SEQ ID NO: 106568 - DNA, 25 bp, Canis familiaris
gaatacaagttcgtggccactggac

SEQ ID NO: 106569 - DNA, 25 bp, Canis familiaris
gaataccagcttcggtgggtggagg

SEQ ID NO: 106570 - DNA, 25 bp, Canis familiaris
gaatacccacctgctggaggttgtg

SEQ ID NO: 106571 - DNA, 25 bp, Canis familiaris
gaatctggacagccttctgaaggtt

SEQ ID NO: 106572 - DNA, 25 bp, Canis familiaris
gaatctagatagactctttatggtt

SEQ ID NO: 106573 - DNA, 25 bp, Canis familiaris
gaatctagcagaggagcttctatga

SEQ ID NO: 106574 - DNA, 25 bp, Canis familiaris
gaatctgtgcaaggaaatctgtggg

SEQ ID NO: 106575 - DNA, 25 bp, Canis familiaris
gaatttgacctgttcatgcgcatgg

SEQ ID NO: 106576 - DNA, 25 bp, Canis familiaris
gaatccacacctgctatgtgtggca

SEQ ID NO: 106577 - DNA, 25 bp, Canis familiaris
gaatcactaccggtcttgtggagtt

SEQ ID NO: 106578 - DNA, 25 bp, Canis familiaris
gaataatacacacacttaggacatt

SEQ ID NO: 106579 - DNA, 25 bp, Canis familiaris
gaatttgactgacaagtaggagcta

SEQ ID NO: 106580 - DNA, 25 bp, Canis familiaris
gaggtcccggtttttgagactagat

SEQ ID NO: 106581 - DNA, 25 bp, Canis familiaris
gttgcttccgggagttgaaccaggt

SEQ ID NO: 106582 - DNA, 25 bp, Canis familiaris
gacgttccgggcacgggaacagctg

SEQ ID NO: 106583 - DNA, 25 bp, Canis familiaris
gacttgtccaaagtgtccgtaacaa

SEQ ID NO: 106584 - DNA, 25 bp, Canis familiaris
gaatgaaccaaaggtcccaaacagg

SEQ ID NO: 106585 - DNA, 25 bp, Canis familiaris
gaatgattccaagagtccaaagtcg

SEQ ID NO: 106586 - DNA, 25 bp, Canis familiaris
gaatttggcaaatgtcctgtgagtg

SEQ ID NO: 106587 - DNA, 25 bp, Canis familiaris
gaatttgtgaattgttcctggttta

SEQ ID NO: 106588 - DNA, 25 bp, Canis familiaris
gaatttggaagcacttccctttgac

SEQ ID NO: 106589 - DNA, 25 bp, Canis familiaris
gaatttggctacagcaaccgggtgg

SEQ ID NO: 106590 - DNA, 25 bp, Canis familiaris
gaatttggctacagcaaccgggtgg

SEQ ID NO: 106591 - DNA, 25 bp, Canis familiaris
gaatttggctacagcaacagggtgg

SEQ ID NO: 106592 - DNA, 25 bp, Canis familiaris
gaatacggctacagcaacagggtgg

SEQ ID NO: 106593 - DNA, 25 bp, Canis familiaris
gaataactgctgctatgaacatggg

SEQ ID NO: 106594 - DNA, 25 bp, Canis familiaris
gaatatgcacgtttacatagatgtg

SEQ ID NO: 106595 - DNA, 25 bp, Canis familiaris
gaatcagatcaggttaatctcatat

SEQ ID NO: 106596 - DNA, 25 bp, Canis familiaris
gaatactgcagccatatcaatcctt

SEQ ID NO: 106597 - DNA, 25 bp, Canis familiaris
gaatgaagcatttatccccttctcc

SEQ ID NO: 106598 - DNA, 25 bp, Canis familiaris
gaataaaaatatctccactccctca

SEQ ID NO: 106599 - DNA, 25 bp, Canis familiaris
gaatgactgaaattttccatcccat

SEQ ID NO: 106600 - DNA, 25 bp, Canis familiaris
gaatatctgacatcagttcttccga

SEQ ID NO: 106601 - DNA, 25 bp, Canis familiaris
gaatcgtcagcatagccacttagcg

SEQ ID NO: 106602 - DNA, 25 bp, Canis familiaris
gaatctggattctgctacttactgg

SEQ ID NO: 106603 - DNA, 25 bp, Canis familiaris
gaatccgatctctacatattacctt

SEQ ID NO: 106604 - DNA, 25 bp, Canis familiaris
gaatcttgtctatctcattcactac

SEQ ID NO: 106605 - DNA, 25 bp, Canis familiaris
gaatcactcagttttcataactatc

SEQ ID NO: 106606 - DNA, 25 bp, Canis familiaris
gaatcccagattagtccaacctgtg

SEQ ID NO: 106607 - DNA, 25 bp, Canis familiaris
gaatccgagactagtccaacacaaa

SEQ ID NO: 106608 - DNA, 25 bp, Canis familiaris
gaatccgaattctcactgatggcag

SEQ ID NO: 106609 - DNA, 25 bp, Canis familiaris
gaatatctgtttttactgtggctgt

SEQ ID NO: 106610 - DNA, 25 bp, Canis familiaris
gaatatctttgtgtatatgtggtga

SEQ ID NO: 106611 - DNA, 25 bp, Canis familiaris
gaatattttctgtgttgatcgtatc

SEQ ID NO: 106612 - DNA, 25 bp, Canis familiaris
gacattttccttccgttccatatga

SEQ ID NO: 106613 - DNA, 25 bp, Canis familiaris
gaatcttatcgtttctaccaaatga

SEQ ID NO: 106614 - DNA, 25 bp, Canis familiaris
gaatcttcatttttctcattcaagc

SEQ ID NO: 106615 - DNA, 25 bp, Canis familiaris
gaataaatgtatgtcctgtcactga

SEQ ID NO: 106616 - DNA, 25 bp, Canis familiaris
gaatcagagatgcagccatcacaaa

SEQ ID NO: 106617 - DNA, 25 bp, Canis familiaris
gaatcacagctcaatgccatgaaac

SEQ ID NO: 106618 - DNA, 25 bp, Canis familiaris
gaatccagtcattggtgataccggg

SEQ ID NO: 106619 - DNA, 25 bp, Canis familiaris
gaatactgctcaagtgtgaatccca

SEQ ID NO: 106620 - DNA, 25 bp, Canis familiaris
gaatactgacatctttactgcactc

SEQ ID NO: 106621 - DNA, 25 bp, Canis familiaris
gaatactgaatctgaatactgaact

SEQ ID NO: 106622 - DNA, 25 bp, Canis familiaris
gaatacatggctttgcttactgaga

SEQ ID NO: 106623 - DNA, 25 bp, Canis familiaris
gaatctcagcttatgcttcattaga

SEQ ID NO: 106624 - DNA, 25 bp, Canis familiaris
gaatcatagcttgtttcaggtgtga

SEQ ID NO: 106625 - DNA, 25 bp, Canis familiaris
gaataccattggcttcatgtttgca

SEQ ID NO: 106626 - DNA, 25 bp, Canis familiaris
gaatcaccttgtgtgtcgtagctca

SEQ ID NO: 106627 - DNA, 25 bp, Canis familiaris
gaatacgtctatctgtcagtgagtc

SEQ ID NO: 106628 - DNA, 25 bp, Canis familiaris
gaatacatctttctctcattgtgat

SEQ ID NO: 106629 - DNA, 25 bp, Canis familiaris
gaatagagttgtccttgcactgtgc

SEQ ID NO: 106630 - DNA, 25 bp, Canis familiaris
gaatcaatattttctatcagtgcca

SEQ ID NO: 106631 - DNA, 25 bp, Canis familiaris
gaatccttttgtgagcagttaggct

SEQ ID NO: 106632 - DNA, 25 bp, Canis familiaris
gaatctttgagaccaagttccaggt

SEQ ID NO: 106633 - DNA, 25 bp, Canis familiaris
gaatctcttaggcaccttcaatgtg

SEQ ID NO: 106634 - DNA, 25 bp, Canis familiaris
gaatcttctagggtcctttattgca

SEQ ID NO: 106635 - DNA, 25 bp, Canis familiaris
gaatgttctataagccctttgtata

SEQ ID NO: 106636 - DNA, 25 bp, Canis familiaris
gaatgtgatctgacacagtccggtt

SEQ ID NO: 106637 - DNA, 25 bp, Canis familiaris
gaatatgtgctgacacagacctaca

SEQ ID NO: 106638 - DNA, 25 bp, Canis familiaris
gaatagtgatgttagacttacccta

SEQ ID NO: 106639 - DNA, 25 bp, Canis familiaris
gaatagctagctactgacctacacc

SEQ ID NO: 106640 - DNA, 25 bp, Canis familiaris
gaatagtggctttagattactctca

SEQ ID NO: 106641 - DNA, 25 bp, Canis familiaris
gaagactggccaaagtctacccagt

SEQ ID NO: 106642 - DNA, 25 bp, Canis familiaris
gaatgactgagtgaatggataccct

SEQ ID NO: 106643 - DNA, 25 bp, Canis familiaris
gaatagcatcgcgtacatggatcac

SEQ ID NO: 106644 - DNA, 25 bp, Canis familiaris
gaatatgcagcaggcccatttgccc

SEQ ID NO: 106645 - DNA, 25 bp, Canis familiaris
gaatagccaacattattggcacaca

SEQ ID NO: 106646 - DNA, 25 bp, Canis familiaris
gaatatccaagattccggcacacag

SEQ ID NO: 106647 - DNA, 25 bp, Canis familiaris
gaataacaagcaactggtccctgtc

SEQ ID NO: 106648 - DNA, 25 bp, Canis familiaris
gaataaaaattctccccatggcttt

SEQ ID NO: 106649 - DNA, 25 bp, Canis familiaris
gaaaaagaagcctcgctttggcgtg

SEQ ID NO: 106650 - DNA, 25 bp, Canis familiaris
gaagaaaaccgctggcctttccaga

SEQ ID NO: 106651 - DNA, 25 bp, Canis familiaris
gaagaaaaacacaggagccttccac

SEQ ID NO: 106652 - DNA, 25 bp, Canis familiaris
gaatcaacaaaccataggagctcga

SEQ ID NO: 106653 - DNA, 25 bp, Canis familiaris
gaatccaaagtcctatgatagataa

SEQ ID NO: 106654 - DNA, 25 bp, Canis familiaris
gaatcgctaatgtcacgtgtcgtca

SEQ ID NO: 106655 - DNA, 25 bp, Canis familiaris
gaatactcagtgtctcgttctgtct

SEQ ID NO: 106656 - DNA, 25 bp, Canis familiaris
gaatgaccacttgcaggtctgcctg

SEQ ID NO: 106657 - DNA, 25 bp, Canis familiaris
gaatgacctttttggttggttggtg

SEQ ID NO: 106658 - DNA, 25 bp, Canis familiaris
gaatgacctttttgttgacttagtt

SEQ ID NO: 106659 - DNA, 25 bp, Canis familiaris
gaatactgttttgtatcactttttc

SEQ ID NO: 106660 - DNA, 25 bp, Canis familiaris
gaatacatttctactttattttgaa

SEQ ID NO: 106661 - DNA, 25 bp, Canis familiaris
gaatatctacctcagggttgttgga

SEQ ID NO: 106662 - DNA, 25 bp, Canis familiaris
gaaatgaggcctctcggttgttgta

SEQ ID NO: 106663 - DNA, 25 bp, Canis familiaris
gaatatgggctttgtcagcttatat

SEQ ID NO: 106664 - DNA, 25 bp, Canis familiaris
gaatagctgttttgccatttcatta

SEQ ID NO: 106665 - DNA, 25 bp, Canis familiaris
gaatactgcccaaacatttatgaca

SEQ ID NO: 106666 - DNA, 25 bp, Canis familiaris
gaatagctgccttagacacttatga

SEQ ID NO: 106667 - DNA, 25 bp, Canis familiaris
gaatcagccttatacctgtagttac

SEQ ID NO: 106668 - DNA, 25 bp, Canis familiaris
gaacatgcacaaaaaccctgcctta

SEQ ID NO: 106669 - DNA, 25 bp, Canis familiaris
gaatctgcacacgataatggcctca

SEQ ID NO: 106670 - DNA, 25 bp, Canis familiaris
gaatctctcactagtcatgatgccc

SEQ ID NO: 106671 - DNA, 25 bp, Canis familiaris
gaatcattcactgtaacactttgct

SEQ ID NO: 106672 - DNA, 25 bp, Canis familiaris
gaatgtgacacttgtaaccaacttc

SEQ ID NO: 106673 - DNA, 25 bp, Canis familiaris
gaatatgctccatctgggccaaatt

SEQ ID NO: 106674 - DNA, 25 bp, Canis familiaris
gaatcattggtaatgagcgccggat

SEQ ID NO: 106675 - DNA, 25 bp, Canis familiaris
gaatgcttgtgaagggccctggttc

SEQ ID NO: 106676 - DNA, 25 bp, Canis familiaris
gaatctttgcagcaacccatgagtt

SEQ ID NO: 106677 - DNA, 25 bp, Canis familiaris
gaatcttggaggacaccactcttca

SEQ ID NO: 106678 - DNA, 25 bp, Canis familiaris
gaatctgggcaaatccacctttcta

SEQ ID NO: 106679 - DNA, 25 bp, Canis familiaris
gaatctggaggaacccgcatgtttt

SEQ ID NO: 106680 - DNA, 25 bp, Canis familiaris
gaatatgggcctgcccacatttctt

SEQ ID NO: 106681 - DNA, 25 bp, Canis familiaris
gaaagggtcgttgcagctttctttc

SEQ ID NO: 106682 - DNA, 25 bp, Canis familiaris
gaataaagttttgcctcgtctacca

SEQ ID NO: 106683 - DNA, 25 bp, Canis familiaris
gaatccttttttgtatatcctgacc

SEQ ID NO: 106684 - DNA, 25 bp, Canis familiaris
gaatccattattaacttgttgccta

SEQ ID NO: 106685 - DNA, 25 bp, Canis familiaris
gaatctcccttaactagggctcttt

SEQ ID NO: 106686 - DNA, 25 bp, Canis familiaris
gaatctttattaagctagggccctt

SEQ ID NO: 106687 - DNA, 25 bp, Canis familiaris
gaatctttattaaaacaccaccatt

SEQ ID NO: 106688 - DNA, 25 bp, Canis familiaris
gaaggttaattcgccaaaccattat

SEQ ID NO: 106689 - DNA, 25 bp, Canis familiaris
gaatgtttacttcctagaatacaaa

SEQ ID NO: 106690 - DNA, 25 bp, Canis familiaris
gaagtttcaattcaataaccgaagc

SEQ ID NO: 106691 - DNA, 25 bp, Canis familiaris
gaagtatcctttcatgaaccgggca

SEQ ID NO: 106692 - DNA, 25 bp, Canis familiaris
gaatctttgtttctggacactttca

SEQ ID NO: 106693 - DNA, 25 bp, Canis familiaris
gaatcatttgtgcttgagggtcttt

SEQ ID NO: 106694 - DNA, 25 bp, Canis familiaris
gaataagtgatccggaggtgtcgta

SEQ ID NO: 106695 - DNA, 25 bp, Canis familiaris
gaataatcgactccgacgtctttat

SEQ ID NO: 106696 - DNA, 25 bp, Canis familiaris
gaataaagcttgtccacgtctattt

SEQ ID NO: 106697 - DNA, 25 bp, Canis familiaris
gaagtaggttaccaccattctctgg

SEQ ID NO: 106698 - DNA, 25 bp, Canis familiaris
gacggggtaagaccatctaccttgg

SEQ ID NO: 106699 - DNA, 25 bp, Canis familiaris
gaagggaaagaacatccaggatctg

SEQ ID NO: 106700 - DNA, 25 bp, Canis familiaris
gaagaggaaagccttacctgtgtcc

SEQ ID NO: 106701 - DNA, 25 bp, Canis familiaris
gaatactgaactgagtactctgtgt

SEQ ID NO: 106702 - DNA, 25 bp, Canis familiaris
gaataaacaatggcagtgactctgg

SEQ ID NO: 106703 - DNA, 25 bp, Canis familiaris
gaatactggcaagctgggcatcgtg

SEQ ID NO: 106704 - DNA, 25 bp, Canis familiaris
gaatcaggccatattgggtgcgtgt

SEQ ID NO: 106705 - DNA, 25 bp, Canis familiaris
gaatcgtccaagatgtgggggttcg

SEQ ID NO: 106706 - DNA, 25 bp, Canis familiaris
gaatacctcaacctgggggactgta

SEQ ID NO: 106707 - DNA, 25 bp, Canis familiaris
gaatacagtaaccaggagttgaagg

SEQ ID NO: 106708 - DNA, 25 bp, Canis familiaris
gaatccgaaagccgcgtgtctgaaa

SEQ ID NO: 106709 - DNA, 25 bp, Canis familiaris
gaatccgacggatggcttctgaaag

SEQ ID NO: 106710 - DNA, 25 bp, Canis familiaris
gaatcaggcccgtgtttctaaaggg

SEQ ID NO: 106711 - DNA, 25 bp, Canis familiaris
gaatcggtccagatgtgtttttccc

SEQ ID NO: 106712 - DNA, 25 bp, Canis familiaris
gaaaggtcttttattatgttactgg

SEQ ID NO: 106713 - DNA, 25 bp, Canis familiaris
gaatgcagcccaaattactttttac

SEQ ID NO: 106714 - DNA, 25 bp, Canis familiaris
gaatagcaccaatgtccttattttg

SEQ ID NO: 106715 - DNA, 25 bp, Canis familiaris
gaatagtccttaccactgattttgt

SEQ ID NO: 106716 - DNA, 25 bp, Canis familiaris
gaataacctatttgattgatctttt

SEQ ID NO: 106717 - DNA, 25 bp, Canis familiaris
gaataacattctaatttgaagattt

SEQ ID NO: 106718 - DNA, 25 bp, Canis familiaris
gaataacattgctaatttgaaagat

SEQ ID NO: 106719 - DNA, 25 bp, Canis familiaris
gaatagtcttcctttctaacaggta

SEQ ID NO: 106720 - DNA, 25 bp, Canis familiaris
gaatcagtttggttatttgcagagg

SEQ ID NO: 106721 - DNA, 25 bp, Canis familiaris
gaatcagaatttgcattttgacagg

SEQ ID NO: 106722 - DNA, 25 bp, Canis familiaris
gaatcatgaagagtcctgttcccct

SEQ ID NO: 106723 - DNA, 25 bp, Canis familiaris
gaatcattaggtttcttctctcctc

SEQ ID NO: 106724 - DNA, 25 bp, Canis familiaris
gaataaaggtgttcattcctccaaa

SEQ ID NO: 106725 - DNA, 25 bp, Canis familiaris
gaataaaggtgttcattcctccaaa

SEQ ID NO: 106726 - DNA, 25 bp, Canis familiaris
gaataaaggtgttcattcctcaaaa

SEQ ID NO: 106727 - DNA, 25 bp, Canis familiaris
gaataaaggtgttcattcctcaaaa

SEQ ID NO: 106728 - DNA, 25 bp, Canis familiaris
gaataaaggtgttcattcctcaaaa

SEQ ID NO: 106729 - DNA, 25 bp, Canis familiaris
gaatctcaaggtgactctttcagaa

SEQ ID NO: 106730 - DNA, 25 bp, Canis familiaris
gaatctcgaactgagtctcttggac

SEQ ID NO: 106731 - DNA, 25 bp, Canis familiaris
gaatccgagaactagttttctggag

SEQ ID NO: 106732 - DNA, 25 bp, Canis familiaris
gaatccgatagctttgttaatctga

SEQ ID NO: 106733 - DNA, 25 bp, Canis familiaris
gaatcctgtcccttgattaagcaag

SEQ ID NO: 106734 - DNA, 25 bp, Canis familiaris
gaaccattctcctgaataacaacgt

SEQ ID NO: 106735 - DNA, 25 bp, Canis familiaris
gaatcacatttcttatacacacaca

SEQ ID NO: 106736 - DNA, 25 bp, Canis familiaris
gaatccttctgcctagtacaaacaa

SEQ ID NO: 106737 - DNA, 25 bp, Canis familiaris
gaatccttctgcctatacaacaagc

SEQ ID NO: 106738 - DNA, 25 bp, Canis familiaris
gaatgttagcagcctatatcccaaa

SEQ ID NO: 106739 - DNA, 25 bp, Canis familiaris
gaatgttgtcagacatcatcccgaa

SEQ ID NO: 106740 - DNA, 25 bp, Canis familiaris
gaatcagttgcactgttaccagata

SEQ ID NO: 106741 - DNA, 25 bp, Canis familiaris
gaatggatgcgactctgtacaagta

SEQ ID NO: 106742 - DNA, 25 bp, Canis familiaris
gaatcgcagtgacattccaagctcc

SEQ ID NO: 106743 - DNA, 25 bp, Canis familiaris
gaatctagtaggtattaagatatcc

SEQ ID NO: 106744 - DNA, 25 bp, Canis familiaris
gaatctagaatttttgactatatct

SEQ ID NO: 106745 - DNA, 25 bp, Canis familiaris
gaatcctagaaaattgactatgttc

SEQ ID NO: 106746 - DNA, 25 bp, Canis familiaris
gaatgaccagcagtgtttagctctt

SEQ ID NO: 106747 - DNA, 25 bp, Canis familiaris
gaatacccactgtgtcagtttctgt

SEQ ID NO: 106748 - DNA, 25 bp, Canis familiaris
gaatacccactacatattcaatggg

SEQ ID NO: 106749 - DNA, 25 bp, Canis familiaris
gaatcaccagcctgtgaattctacg

SEQ ID NO: 106750 - DNA, 25 bp, Canis familiaris
gaatcctcaactcctgaattatact

SEQ ID NO: 106751 - DNA, 25 bp, Canis familiaris
gaatctggacagatctgcaaatata

SEQ ID NO: 106752 - DNA, 25 bp, Canis familiaris
gaatctggatctatggggctgaagc

SEQ ID NO: 106753 - DNA, 25 bp, Canis familiaris
gaatccagcttaagggtcatggcag

SEQ ID NO: 106754 - DNA, 25 bp, Canis familiaris
gaatctctgaaagcgttgctggcgg

SEQ ID NO: 106755 - DNA, 25 bp, Canis familiaris
gaatctgccaaagacttgctgagac

SEQ ID NO: 106756 - DNA, 25 bp, Canis familiaris
gaatctttagaacctatgtgcagac

SEQ ID NO: 106757 - DNA, 25 bp, Canis familiaris
gaatcatttcactcccaggagctgc

SEQ ID NO: 106758 - DNA, 25 bp, Canis familiaris
gaatacatacactcctcgtgaggct

SEQ ID NO: 106759 - DNA, 25 bp, Canis familiaris
gaatcacttacatgcactctgaagg

SEQ ID NO: 106760 - DNA, 25 bp, Canis familiaris
gaatgcaagtcctgcctggagagta

SEQ ID NO: 106761 - DNA, 25 bp, Canis familiaris
gaataattgcctacgatgaagcaaa

SEQ ID NO: 106762 - DNA, 25 bp, Canis familiaris
gaataattgactagccataggccaa

SEQ ID NO: 106763 - DNA, 25 bp, Canis familiaris
gaatacacatagtgccattggttat

SEQ ID NO: 106764 - DNA, 25 bp, Canis familiaris
gaatcaactgtgtacctttggtatc

SEQ ID NO: 106765 - DNA, 25 bp, Canis familiaris
gaatcacggttcacttatctgtgac

SEQ ID NO: 106766 - DNA, 25 bp, Canis familiaris
gaatacgagtgtgattaacctgact

SEQ ID NO: 106767 - DNA, 25 bp, Canis familiaris
gaatcacggtgttttaagactgaat

SEQ ID NO: 106768 - DNA, 25 bp, Canis familiaris
gaatcagggtggcttgaagactcta

SEQ ID NO: 106769 - DNA, 25 bp, Canis familiaris
gaatcttgtgggcggcaaacttcct

SEQ ID NO: 106770 - DNA, 25 bp, Canis familiaris
gaatctttaaggcgctgaacttctt

SEQ ID NO: 106771 - DNA, 25 bp, Canis familiaris
gaatctatccaaagggtattttcct

SEQ ID NO: 106772 - DNA, 25 bp, Canis familiaris
gaatctaccagcagatggcttttac

SEQ ID NO: 106773 - DNA, 25 bp, Canis familiaris
gaatctataatgagttgtctaaatg

SEQ ID NO: 106774 - DNA, 25 bp, Canis familiaris
gaataacacatgccctttctaaatg

SEQ ID NO: 106775 - DNA, 25 bp, Canis familiaris
gaatacatcaatgccttcttcaagg

SEQ ID NO: 106776 - DNA, 25 bp, Canis familiaris
gaatgacatcacagttgcctacaag

SEQ ID NO: 106777 - DNA, 25 bp, Canis familiaris
gaatgcaaacacactccaaacagtt

SEQ ID NO: 106778 - DNA, 25 bp, Canis familiaris
gaatgaaacacaggtccaaggagta

SEQ ID NO: 106779 - DNA, 25 bp, Canis familiaris
gaagtgaagaagatccccgagtacg

SEQ ID NO: 106780 - DNA, 25 bp, Canis familiaris
gaagtacagttgacccctgaactac

SEQ ID NO: 106781 - DNA, 25 bp, Canis familiaris
gaatgaaatgtaacttctttactac

SEQ ID NO: 106782 - DNA, 25 bp, Canis familiaris
gaataacagtagagttgtcccaaca

SEQ ID NO: 106783 - DNA, 25 bp, Canis familiaris
gaataaaataatacttcccaccaga

SEQ ID NO: 106784 - DNA, 25 bp, Canis familiaris
gaataatacattttttcctagtaga

SEQ ID NO: 106785 - DNA, 25 bp, Canis familiaris
gaataatacatttgtcattactgaa

SEQ ID NO: 106786 - DNA, 25 bp, Canis familiaris
gaatcagatacactaatcacacact

SEQ ID NO: 106787 - DNA, 25 bp, Canis familiaris
gaatcagctacaacagtggcacaag

SEQ ID NO: 106788 - DNA, 25 bp, Canis familiaris
gaatcagtcactactggaactgcac

SEQ ID NO: 106789 - DNA, 25 bp, Canis familiaris
gaatcagtcactactggaactgcac

SEQ ID NO: 106790 - DNA, 25 bp, Canis familiaris
gaataactttctgacactgatctgt

SEQ ID NO: 106791 - DNA, 25 bp, Canis familiaris
gaatacacttttagacaatgtcatg

SEQ ID NO: 106792 - DNA, 25 bp, Canis familiaris
gaatccagctcttttaatttctcct

SEQ ID NO: 106793 - DNA, 25 bp, Canis familiaris
gaatccatgttgaaaaatctctcca

SEQ ID NO: 106794 - DNA, 25 bp, Canis familiaris
gaagcgattctttaagaccttccgg

SEQ ID NO: 106795 - DNA, 25 bp, Canis familiaris
gaatggtactgttacggcttaccca

SEQ ID NO: 106796 - DNA, 25 bp, Canis familiaris
gaagttattgccgcacagttaccca

SEQ ID NO: 106797 - DNA, 25 bp, Canis familiaris
gaagtttattcaccaggtctacctg

SEQ ID NO: 106798 - DNA, 25 bp, Canis familiaris
gaatgtccgttgtccggatctactt

SEQ ID NO: 106799 - DNA, 25 bp, Canis familiaris
gaatgctcagccagaggcgagatca

SEQ ID NO: 106800 - DNA, 25 bp, Canis familiaris
gaatgataccaggagccatggcaca

SEQ ID NO: 106801 - DNA, 25 bp, Canis familiaris
gaatcagcaactaaaaggtgcaaga

SEQ ID NO: 106802 - DNA, 25 bp, Canis familiaris
gaatccaaagaaagagctgtgtaca

SEQ ID NO: 106803 - DNA, 25 bp, Canis familiaris
gaatcttagaaaatggagctgtacg

SEQ ID NO: 106804 - DNA, 25 bp, Canis familiaris
gaatgaatagaattttaggtactgt

SEQ ID NO: 106805 - DNA, 25 bp, Canis familiaris
gaatggggactttctatttacgtcg

SEQ ID NO: 106806 - DNA, 25 bp, Canis familiaris
gaatcgggtttggttggctcagccc

SEQ ID NO: 106807 - DNA, 25 bp, Canis familiaris
gaactgggttcttgtaggtaccgct

SEQ ID NO: 106808 - DNA, 25 bp, Canis familiaris
gaccggggacctaagagtgcccgat

SEQ ID NO: 106809 - DNA, 25 bp, Canis familiaris
gagacggggaccattaaccacagaa

SEQ ID NO: 106810 - DNA, 25 bp, Canis familiaris
gaacgatggaacctattccccagac

SEQ ID NO: 106811 - DNA, 25 bp, Canis familiaris
gaatccaggcatgtgttataccccc

SEQ ID NO: 106812 - DNA, 25 bp, Canis familiaris
gaatcaatagcagcgtccaatcccc

SEQ ID NO: 106813 - DNA, 25 bp, Canis familiaris
gaatcaatatgccctgtaaatccgt

SEQ ID NO: 106814 - DNA, 25 bp, Canis familiaris
gaatcagtagccgtttaccagctgt

SEQ ID NO: 106815 - DNA, 25 bp, Canis familiaris
gaataatagccccctgggatgcatt

SEQ ID NO: 106816 - DNA, 25 bp, Canis familiaris
gaatctagagctgccttggagatgc

SEQ ID NO: 106817 - DNA, 25 bp, Canis familiaris
gaatctcatagtgctttggaagaag

SEQ ID NO: 106818 - DNA, 25 bp, Canis familiaris
gaatctctgagtgttgtgcaaggtg

SEQ ID NO: 106819 - DNA, 25 bp, Canis familiaris
gaatcatccgattcgtgtcgagtgt

SEQ ID NO: 106820 - DNA, 25 bp, Canis familiaris
gaatgcatgccgttgagtgagcgaa

SEQ ID NO: 106821 - DNA, 25 bp, Canis familiaris
gaatctgtgctggccatggacgaat

SEQ ID NO: 106822 - DNA, 25 bp, Canis familiaris
gaatcagactgacatgagaccaagt

SEQ ID NO: 106823 - DNA, 25 bp, Canis familiaris
gaatcaattgaatgtatccatattt

SEQ ID NO: 106824 - DNA, 25 bp, Canis familiaris
gaatcatattcaataatagccattt

SEQ ID NO: 106825 - DNA, 25 bp, Canis familiaris
gaatgaattccacaagcctattctg

SEQ ID NO: 106826 - DNA, 25 bp, Canis familiaris
gaatgcattttcttaagagtagtag

SEQ ID NO: 106827 - DNA, 25 bp, Canis familiaris
gaatcattttcatttaggtgggctt

SEQ ID NO: 106828 - DNA, 25 bp, Canis familiaris
gaatctttgcctttaagtgtgcccg

SEQ ID NO: 106829 - DNA, 25 bp, Canis familiaris
gaatctatctgccttttggaatctc

SEQ ID NO: 106830 - DNA, 25 bp, Canis familiaris
gaatctgagtcaattttggatatta

SEQ ID NO: 106831 - DNA, 25 bp, Canis familiaris
gaatctggctaatttctggaaacca

SEQ ID NO: 106832 - DNA, 25 bp, Canis familiaris
gaatcatggctatatttcatatcaa

SEQ ID NO: 106833 - DNA, 25 bp, Canis familiaris
gaatcatgccatttattacaatatg

SEQ ID NO: 106834 - DNA, 25 bp, Canis familiaris
gaatgatctcatttgcttcacaatg

SEQ ID NO: 106835 - DNA, 25 bp, Canis familiaris
gaatgcattgcctatttatatctgg

SEQ ID NO: 106836 - DNA, 25 bp, Canis familiaris
gaatgatcccgtaaatgtctgaaac

SEQ ID NO: 106837 - DNA, 25 bp, Canis familiaris
gaatgttgcccctgagtttaacaga

SEQ ID NO: 106838 - DNA, 25 bp, Canis familiaris
gaagggcgaccaatggctttaagaa

SEQ ID NO: 106839 - DNA, 25 bp, Canis familiaris
gaagggtcccattcctgttataact

SEQ ID NO: 106840 - DNA, 25 bp, Canis familiaris
gaagatgggtcctacttcctataca

SEQ ID NO: 106841 - DNA, 25 bp, Canis familiaris
gaatcatgtggtatacattctctga

SEQ ID NO: 106842 - DNA, 25 bp, Canis familiaris
gaatctgtgtgcttctacttttatt

SEQ ID NO: 106843 - DNA, 25 bp, Canis familiaris
gaatgcttgtattttcttttctctc

SEQ ID NO: 106844 - DNA, 25 bp, Canis familiaris
gaatgcattttttttcttttgtcct

SEQ ID NO: 106845 - DNA, 25 bp, Canis familiaris
gaatgcttggataacttttctttat

SEQ ID NO: 106846 - DNA, 25 bp, Canis familiaris
gaatgctacgtcttcgattttatta

SEQ ID NO: 106847 - DNA, 25 bp, Canis familiaris
gaatcgacttctatacctctattac

SEQ ID NO: 106848 - DNA, 25 bp, Canis familiaris
gaatctgttttccaacacctacata

SEQ ID NO: 106849 - DNA, 25 bp, Canis familiaris
gaatgtactctaaaaatcgtgatca

SEQ ID NO: 106850 - DNA, 25 bp, Canis familiaris
gaatcttgctcattcagaaatttaa

SEQ ID NO: 106851 - DNA, 25 bp, Canis familiaris
gaatcttccaccaaataatttcaaa

SEQ ID NO: 106852 - DNA, 25 bp, Canis familiaris
gactttctcccacaaaagccagtta

SEQ ID NO: 106853 - DNA, 25 bp, Canis familiaris
gaatctttggtagaataagcgcgtt

SEQ ID NO: 106854 - DNA, 25 bp, Canis familiaris
gaatctttgaaatggctaaggcctt

SEQ ID NO: 106855 - DNA, 25 bp, Canis familiaris
gaatgccttaattggttaaagcctt

SEQ ID NO: 106856 - DNA, 25 bp, Canis familiaris
gaatgccatggagtgtgccttacac

SEQ ID NO: 106857 - DNA, 25 bp, Canis familiaris
gaatgatgaggggtgcgccaaatct

SEQ ID NO: 106858 - DNA, 25 bp, Canis familiaris
gaatgatgatggacactgcgctaga

SEQ ID NO: 106859 - DNA, 25 bp, Canis familiaris
gaatgcttgatgaagcttgtgagct

SEQ ID NO: 106860 - DNA, 25 bp, Canis familiaris
gaatgctcaatgtgctgttgattct

SEQ ID NO: 106861 - DNA, 25 bp, Canis familiaris
gaatgctcctgttcttagataatga

SEQ ID NO: 106862 - DNA, 25 bp, Canis familiaris
gaatctcacattgcatgttcatcaa

SEQ ID NO: 106863 - DNA, 25 bp, Canis familiaris
gaatctcttatggacattcatcata

SEQ ID NO: 106864 - DNA, 25 bp, Canis familiaris
gaatgctcttcatgatcttcacaca

SEQ ID NO: 106865 - DNA, 25 bp, Canis familiaris
gaatgccagtcggagcttacactca

SEQ ID NO: 106866 - DNA, 25 bp, Canis familiaris
gaatgcccatggagtgtgccattac

SEQ ID NO: 106867 - DNA, 25 bp, Canis familiaris
gaatcctgagtgatggtgcactgat

SEQ ID NO: 106868 - DNA, 25 bp, Canis familiaris
gaatcaaagctgatgtgtgcttttg

SEQ ID NO: 106869 - DNA, 25 bp, Canis familiaris
gaatcatgacctagcatttgctttt

SEQ ID NO: 106870 - DNA, 25 bp, Canis familiaris
gaatcatgagccagagtttgcttta

SEQ ID NO: 106871 - DNA, 25 bp, Canis familiaris
gaatcagagcttcgaggtttcgtca

SEQ ID NO: 106872 - DNA, 25 bp, Canis familiaris
gaatctgcaattcgcacgtttcctg

SEQ ID NO: 106873 - DNA, 25 bp, Canis familiaris
gaatgtacattttcagttgtcctca

SEQ ID NO: 106874 - DNA, 25 bp, Canis familiaris
gaatgatccccttcagattgatttg

SEQ ID NO: 106875 - DNA, 25 bp, Canis familiaris
gaatgatacccttcagattgagttt

SEQ ID NO: 106876 - DNA, 25 bp, Canis familiaris
gaatgaagcccccagcttgtgaaat

SEQ ID NO: 106877 - DNA, 25 bp, Canis familiaris
gaatgccctgtcacagatcgtgaac

SEQ ID NO: 106878 - DNA, 25 bp, Canis familiaris
gaacgtcggcagatatccgaacccc

SEQ ID NO: 106879 - DNA, 25 bp, Canis familiaris
gaacgattggaaaaggaaagcccag

SEQ ID NO: 106880 - DNA, 25 bp, Canis familiaris
gagagaagtccaaaagggaagccta

SEQ ID NO: 106881 - DNA, 25 bp, Canis familiaris
gaatggtttcactaaaggacacagt

SEQ ID NO: 106882 - DNA, 25 bp, Canis familiaris
gaatgttttcattaatcaagaacga

SEQ ID NO: 106883 - DNA, 25 bp, Canis familiaris
gaatgtttctcttttaattataggc

SEQ ID NO: 106884 - DNA, 25 bp, Canis familiaris
gaatgttttcttcttagtattggtc

SEQ ID NO: 106885 - DNA, 25 bp, Canis familiaris
gaaatctctttctctgggtacgagt

SEQ ID NO: 106886 - DNA, 25 bp, Canis familiaris
gaataatatttccctttgctttagt

SEQ ID NO: 106887 - DNA, 25 bp, Canis familiaris
gaatcaatatttttttgctctctaa

SEQ ID NO: 106888 - DNA, 25 bp, Canis familiaris
gaatcattttcttggattgtctctt

SEQ ID NO: 106889 - DNA, 25 bp, Canis familiaris
gaatctagtgttggaataggacttc

SEQ ID NO: 106890 - DNA, 25 bp, Canis familiaris
gaatcatcaggtttgtaacaatttc

SEQ ID NO: 106891 - DNA, 25 bp, Canis familiaris
gactcacgaaaaccaacagagatcc

SEQ ID NO: 106892 - DNA, 25 bp, Canis familiaris
gaatgccagaactgccaacggatcc

SEQ ID NO: 106893 - DNA, 25 bp, Canis familiaris
gaatccagcaacggaacggcagaaa

SEQ ID NO: 106894 - DNA, 25 bp, Canis familiaris
gaatctaaagctgcacccgatgtac

SEQ ID NO: 106895 - DNA, 25 bp, Canis familiaris
gaatgcataaactcattgccatgga

SEQ ID NO: 106896 - DNA, 25 bp, Canis familiaris
gaatgtcatttagcctccaggaaag

SEQ ID NO: 106897 - DNA, 25 bp, Canis familiaris
gaatgtcagataaccagcccatgct

SEQ ID NO: 106898 - DNA, 25 bp, Canis familiaris
gaatcatcagattatcgccacgtgc

SEQ ID NO: 106899 - DNA, 25 bp, Canis familiaris
gaatcatctgcagttctaccagtct

SEQ ID NO: 106900 - DNA, 25 bp, Canis familiaris
gaatgatctccaggaagcacgtctc

SEQ ID NO: 106901 - DNA, 25 bp, Canis familiaris
gaatgactcagagtacactgtaccg

SEQ ID NO: 106902 - DNA, 25 bp, Canis familiaris
gaatgcagccatgatcagatttacc

SEQ ID NO: 106903 - DNA, 25 bp, Canis familiaris
gaatggccaaattgtatttccccag

SEQ ID NO: 106904 - DNA, 25 bp, Canis familiaris
gaaggaaaattgtgatgtgccaaac

SEQ ID NO: 106905 - DNA, 25 bp, Canis familiaris
gaatgacaccaaatcacagacccaa

SEQ ID NO: 106906 - DNA, 25 bp, Canis familiaris
gaatgaccccatttagagccatgaa

SEQ ID NO: 106907 - DNA, 25 bp, Canis familiaris
gaatcccgaatctcaaccatgtata

SEQ ID NO: 106908 - DNA, 25 bp, Canis familiaris
gtatcccgggtacatccaggaactt

SEQ ID NO: 106909 - DNA, 25 bp, Canis familiaris
gaatcccaggtttcaatccaacacc

SEQ ID NO: 106910 - DNA, 25 bp, Canis familiaris
gaatccggcttgtaatcattcaaca

SEQ ID NO: 106911 - DNA, 25 bp, Canis familiaris
gaatcagggtctcacatttcacccc

SEQ ID NO: 106912 - DNA, 25 bp, Canis familiaris
gaatcagtagtttcactttaactgc

SEQ ID NO: 106913 - DNA, 25 bp, Canis familiaris
gaaggctggttaccttggagtcctg

SEQ ID NO: 106914 - DNA, 25 bp, Canis familiaris
gaatgtcgttacccgttgagtgtgg

SEQ ID NO: 106915 - DNA, 25 bp, Canis familiaris
gaatgcttgttaactctttcaggta

SEQ ID NO: 106916 - DNA, 25 bp, Canis familiaris
gaatgctgtttaacctgttggaatc

SEQ ID NO: 106917 - DNA, 25 bp, Canis familiaris
gaatgcttgattgacctcctaacac

SEQ ID NO: 106918 - DNA, 25 bp, Canis familiaris
gaatctgtattgttcttactgaaac

SEQ ID NO: 106919 - DNA, 25 bp, Canis familiaris
gaatctgtttgtatgtatccttatc

SEQ ID NO: 106920 - DNA, 25 bp, Canis familiaris
gaatctttcttcagcaaactttata

SEQ ID NO: 106921 - DNA, 25 bp, Canis familiaris
gaatcttttcctgccaatttctaga

SEQ ID NO: 106922 - DNA, 25 bp, Canis familiaris
gaatcttttttgcccagatcttttg

SEQ ID NO: 106923 - DNA, 25 bp, Canis familiaris
gaatgaatcttttgcccgagatttt

SEQ ID NO: 106924 - DNA, 25 bp, Canis familiaris
gaatgaattctcaacctgtgaattt

SEQ ID NO: 106925 - DNA, 25 bp, Canis familiaris
gaatcagtatctacctcaggagttc

SEQ ID NO: 106926 - DNA, 25 bp, Canis familiaris
gaatcagtactttgtaggcacgtat

SEQ ID NO: 106927 - DNA, 25 bp, Canis familiaris
gaatcaatcctttcaatgtccctga

SEQ ID NO: 106928 - DNA, 25 bp, Canis familiaris
gaatcaagcttttatagaccctagt

SEQ ID NO: 106929 - DNA, 25 bp, Canis familiaris
gaatcgagctgcctacataactgcc

SEQ ID NO: 106930 - DNA, 25 bp, Canis familiaris
gaatccagctgccaaaagaccctac

SEQ ID NO: 106931 - DNA, 25 bp, Canis familiaris
gaatcatcacagtcttaaacaggct

SEQ ID NO: 106932 - DNA, 25 bp, Canis familiaris
gaatctgcacggttaattcagcctg

SEQ ID NO: 106933 - DNA, 25 bp, Canis familiaris
gaatcctttgctgacttcagtggag

SEQ ID NO: 106934 - DNA, 25 bp, Canis familiaris
gaatcctcttgcctattaatgtggt

SEQ ID NO: 106935 - DNA, 25 bp, Canis familiaris
gaatcacctggcgtcttgtggtggt

SEQ ID NO: 106936 - DNA, 25 bp, Canis familiaris
gaatcaccaggggctgctgttgatg

SEQ ID NO: 106937 - DNA, 25 bp, Canis familiaris
gaatcccagggagggccaagtcagc

SEQ ID NO: 106938 - DNA, 25 bp, Canis familiaris
gaatcccagggaccctagttcatac

SEQ ID NO: 106939 - DNA, 25 bp, Canis familiaris
gaatcccaggtgactcctggatgta

SEQ ID NO: 106940 - DNA, 25 bp, Canis familiaris
gaatctccagggacttatgctaaga

SEQ ID NO: 106941 - DNA, 25 bp, Canis familiaris
gaatctcttggtcataatctcacaa

SEQ ID NO: 106942 - DNA, 25 bp, Canis familiaris
gaatctcgaggtgtagatctcacat

SEQ ID NO: 106943 - DNA, 25 bp, Canis familiaris
gaatcctagtgaattaatgcccttc

SEQ ID NO: 106944 - DNA, 25 bp, Canis familiaris
gaatcactggtgttttaccactttt

SEQ ID NO: 106945 - DNA, 25 bp, Canis familiaris
gaatccaggttctgtgaccatcttc

SEQ ID NO: 106946 - DNA, 25 bp, Canis familiaris
gaatctgcggttgaggaacactttt

SEQ ID NO: 106947 - DNA, 25 bp, Canis familiaris
gaatggtggtataacaaacacttat

SEQ ID NO: 106948 - DNA, 25 bp, Canis familiaris
gaatgtgacttaagcataacctttt

SEQ ID NO: 106949 - DNA, 25 bp, Canis familiaris
gaagtacatccaagattacactgaa

SEQ ID NO: 106950 - DNA, 25 bp, Canis familiaris
gaatcgtctgcctgacaatccagaa

SEQ ID NO: 106951 - DNA, 25 bp, Canis familiaris
gaatcgctctcgaggagttcagcaa

SEQ ID NO: 106952 - DNA, 25 bp, Canis familiaris
gaatctcattggatgctggtgtaga

SEQ ID NO: 106953 - DNA, 25 bp, Canis familiaris
gaatcatcatttttctttgtcagag

SEQ ID NO: 106954 - DNA, 25 bp, Canis familiaris
gaatccatgtatttctacgtagata

SEQ ID NO: 106955 - DNA, 25 bp, Canis familiaris
gaatcctgacttacgatctctagaa

SEQ ID NO: 106956 - DNA, 25 bp, Canis familiaris
gaatccagtgttaacatctccatca

SEQ ID NO: 106957 - DNA, 25 bp, Canis familiaris
gaatctggctttaagctctcgtgcc

SEQ ID NO: 106958 - DNA, 25 bp, Canis familiaris
gaatctggtgtggaacatcgggctc

SEQ ID NO: 106959 - DNA, 25 bp, Canis familiaris
gaatgctgggatcgaggctcaggac

SEQ ID NO: 106960 - DNA, 25 bp, Canis familiaris
gaatctggggaatcttgtgactcat

SEQ ID NO: 106961 - DNA, 25 bp, Canis familiaris
gaatctgatttaaccatttaccata

SEQ ID NO: 106962 - DNA, 25 bp, Canis familiaris
gaatctgtttcaaatttgatcactt

SEQ ID NO: 106963 - DNA, 25 bp, Canis familiaris
gaatctgcttatatttagccacggc

SEQ ID NO: 106964 - DNA, 25 bp, Canis familiaris
gaatctgcttatatttagccacggc

SEQ ID NO: 106965 - DNA, 25 bp, Canis familiaris
gaatctgcttatatttagccaggct

SEQ ID NO: 106966 - DNA, 25 bp, Canis familiaris
gaatctgcttatatttagccaggct

SEQ ID NO: 106967 - DNA, 25 bp, Canis familiaris
gaatctgcttatatttagccaggct

SEQ ID NO: 106968 - DNA, 25 bp, Canis familiaris
gaatctgcttatatttagccaggct

SEQ ID NO: 106969 - DNA, 25 bp, Canis familiaris
gaatctgcttatatttagccaggct

SEQ ID NO: 106970 - DNA, 25 bp, Canis familiaris
gaatctgcttatatttagccaggct

SEQ ID NO: 106971 - DNA, 25 bp, Canis familiaris
gaatctgcttatatttagccaggct

SEQ ID NO: 106972 - DNA, 25 bp, Canis familiaris
gaatctgcttatatttagccaggct

SEQ ID NO: 106973 - DNA, 25 bp, Canis familiaris
gaatctgcccaattttctcgaagca

SEQ ID NO: 106974 - DNA, 25 bp, Canis familiaris
gaatgccaccaatactctcgatggt

SEQ ID NO: 106975 - DNA, 25 bp, Canis familiaris
gaatgccattattaacccgtggtcc

SEQ ID NO: 106976 - DNA, 25 bp, Canis familiaris
gaatccttgttatgtcaactggttt

SEQ ID NO: 106977 - DNA, 25 bp, Canis familiaris
gaatccatttttcagaaatgttgcc

SEQ ID NO: 106978 - DNA, 25 bp, Canis familiaris
gaatcctttactataaatatgggtt

SEQ ID NO: 106979 - DNA, 25 bp, Canis familiaris
gaatgtatttacaattagtctaggg

SEQ ID NO: 106980 - DNA, 25 bp, Canis familiaris
gaagtagtatcatcttacctcagag

SEQ ID NO: 106981 - DNA, 25 bp, Canis familiaris
gaagtcttcctctttacctagaatt

SEQ ID NO: 106982 - DNA, 25 bp, Canis familiaris
gaaagctacttctgggactggaata

SEQ ID NO: 106983 - DNA, 25 bp, Canis familiaris
gaatgaatttcctggtactgtaatg

SEQ ID NO: 106984 - DNA, 25 bp, Canis familiaris
gaatgttttccttagtaatttcatg

SEQ ID NO: 106985 - DNA, 25 bp, Canis familiaris
gaatgttgtgttaagttaattagag

SEQ ID NO: 106986 - DNA, 25 bp, Canis familiaris
gaatgttgtgttgggctgtgttgaa

SEQ ID NO: 106987 - DNA, 25 bp, Canis familiaris
gaatctaggtttctgatgtgaacat

SEQ ID NO: 106988 - DNA, 25 bp, Canis familiaris
gaatcatctggtctttctggataca

SEQ ID NO: 106989 - DNA, 25 bp, Canis familiaris
gaatctcttgttcatgtctggctat

SEQ ID NO: 106990 - DNA, 25 bp, Canis familiaris
gaatctgggttgcatgtgggtacgt

SEQ ID NO: 106991 - DNA, 25 bp, Canis familiaris
gaatctgggttgcatgtgggtacgt

SEQ ID NO: 106992 - DNA, 25 bp, Canis familiaris
gaatcagggttcgattccggagagg

SEQ ID NO: 106993 - DNA, 25 bp, Canis familiaris
gaatcggggaccatatccagggatg

SEQ ID NO: 106994 - DNA, 25 bp, Canis familiaris
gaacctggacccatcaacggggatt

SEQ ID NO: 106995 - DNA, 25 bp, Canis familiaris
gaatcctgaagcgcttctacagggc

SEQ ID NO: 106996 - DNA, 25 bp, Canis familiaris
gaacggaagcggatcgagcgggagc

SEQ ID NO: 106997 - DNA, 25 bp, Canis familiaris
gaagtacaaggtctcaactagcagt

SEQ ID NO: 106998 - DNA, 25 bp, Canis familiaris
gaatctaaacgtggtcaccttcgag

SEQ ID NO: 106999 - DNA, 25 bp, Canis familiaris
gaatctgcagaatggcggcagtttc

SEQ ID NO: 107000 - DNA, 25 bp, Canis familiaris
gaatcatgattttggcttggttttg

SEQ ID NO: 107001 - DNA, 25 bp, Canis familiaris
gaatgacatgactggcctggttata

SEQ ID NO: 107002 - DNA, 25 bp, Canis familiaris
gaatgatatgactgtttggagcgaa

SEQ ID NO: 107003 - DNA, 25 bp, Canis familiaris
gaatgtgtattactttggccgcacc

SEQ ID NO: 107004 - DNA, 25 bp, Canis familiaris
gaatgctgacatgatggctggtgcc

SEQ ID NO: 107005 - DNA, 25 bp, Canis familiaris
gaatctggcatggcagagtatctct

SEQ ID NO: 107006 - DNA, 25 bp, Canis familiaris
gaatcatggaggtgcacagcttgtt

SEQ ID NO: 107007 - DNA, 25 bp, Canis familiaris
gaatctgggggagcagttttccttg

SEQ ID NO: 107008 - DNA, 25 bp, Canis familiaris
gaatgggtatggagtttctttttgg

SEQ ID NO: 107009 - DNA, 25 bp, Canis familiaris
gaagtccagagggtgttttggtttg

SEQ ID NO: 107010 - DNA, 25 bp, Canis familiaris
gacgtaggatgggactgtttttcct

SEQ ID NO: 107011 - DNA, 25 bp, Canis familiaris
gacccaggcccaggtatttggtcct

SEQ ID NO: 107012 - DNA, 25 bp, Canis familiaris
gtctccggagacagttttggaccct

SEQ ID NO: 107013 - DNA, 25 bp, Canis familiaris
gaatctgggagagcttgttttgacc

SEQ ID NO: 107014 - DNA, 25 bp, Canis familiaris
gaatcgatgggggatgcttcgtgtg

SEQ ID NO: 107015 - DNA, 25 bp, Canis familiaris
gaatcgaagatgctgtctccttgtg

SEQ ID NO: 107016 - DNA, 25 bp, Canis familiaris
gaatctgtggatgtgtcgagctctc

SEQ ID NO: 107017 - DNA, 25 bp, Canis familiaris
gaatcttggtggatctgtgtctcaa

SEQ ID NO: 107018 - DNA, 25 bp, Canis familiaris
gaatctatggggccgtgtgtgcctg

SEQ ID NO: 107019 - DNA, 25 bp, Canis familiaris
gaatcggggatgacaggatgctact

SEQ ID NO: 107020 - DNA, 25 bp, Canis familiaris
gaatctgtgatggatgtagtcatta

SEQ ID NO: 107021 - DNA, 25 bp, Canis familiaris
gaatctctctgcattagccagtacg

SEQ ID NO: 107022 - DNA, 25 bp, Canis familiaris
gaatgctcctgcttcaactgagtgt

SEQ ID NO: 107023 - DNA, 25 bp, Canis familiaris
gaatgccccgtaatagagcttcgca

SEQ ID NO: 107024 - DNA, 25 bp, Canis familiaris
gaatgccccagaacttcctgggcac

SEQ ID NO: 107025 - DNA, 25 bp, Canis familiaris
gaatgcaggctatcacttctgcggg

SEQ ID NO: 107026 - DNA, 25 bp, Canis familiaris
gaatgcatgtgatcacctttcagga

SEQ ID NO: 107027 - DNA, 25 bp, Canis familiaris
gaatgatgcatgctacaaattaaac

SEQ ID NO: 107028 - DNA, 25 bp, Canis familiaris
gaatgaggttgactaatgcatatta

SEQ ID NO: 107029 - DNA, 25 bp, Canis familiaris
gaagcaggtcggccaggctagtcaa

SEQ ID NO: 107030 - DNA, 25 bp, Canis familiaris
gaaggggggtagcgaccagaacgag

SEQ ID NO: 107031 - DNA, 25 bp, Canis familiaris
gaagggggagttcaagacgaaggcg

SEQ ID NO: 107032 - DNA, 25 bp, Canis familiaris
gaagggggtactgaggcctgaacca

SEQ ID NO: 107033 - DNA, 25 bp, Canis familiaris
gaagattctggcaaaggggcaaaac

SEQ ID NO: 107034 - DNA, 25 bp, Canis familiaris
gaatgcactctggcacacaggggac

SEQ ID NO: 107035 - DNA, 25 bp, Canis familiaris
gaatgcactctggcacacaggggac

SEQ ID NO: 107036 - DNA, 25 bp, Canis familiaris
gaatgcactctggcacacaggggac

SEQ ID NO: 107037 - DNA, 25 bp, Canis familiaris
gaatgcactctggcacacaggggac

SEQ ID NO: 107038 - DNA, 25 bp, Canis familiaris
gaatgcactctggcacacaggggac

SEQ ID NO: 107039 - DNA, 25 bp, Canis familiaris
gaatgcactctggcacacaggggac

SEQ ID NO: 107040 - DNA, 25 bp, Canis familiaris
gaatgcactctggcacacaggggac

SEQ ID NO: 107041 - DNA, 25 bp, Canis familiaris
gaatgcactctggcacacaggggac

SEQ ID NO: 107042 - DNA, 25 bp, Canis familiaris
gaatgcactctggcacacaggggac

SEQ ID NO: 107043 - DNA, 25 bp, Canis familiaris
gaatgcactctggcacacaggggac

SEQ ID NO: 107044 - DNA, 25 bp, Canis familiaris
gaatgcactctggctacatcagggg

SEQ ID NO: 107045 - DNA, 25 bp, Canis familiaris
gaatgagatttcaaccaggtggaag

SEQ ID NO: 107046 - DNA, 25 bp, Canis familiaris
gaatgtagttcaaccgtggaaagat

SEQ ID NO: 107047 - DNA, 25 bp, Canis familiaris
gaatgtattataaaggctccggggg

SEQ ID NO: 107048 - DNA, 25 bp, Canis familiaris
gaatgctgttactaatcctgtcggg

SEQ ID NO: 107049 - DNA, 25 bp, Canis familiaris
gaatgagttacagtcttcatgtctg

SEQ ID NO: 107050 - DNA, 25 bp, Canis familiaris
gaatgaccccagtgtcagattgatc

SEQ ID NO: 107051 - DNA, 25 bp, Canis familiaris
gaatgaccgtgatggctggaatccc

SEQ ID NO: 107052 - DNA, 25 bp, Canis familiaris
gaatgacccaaatgttgcagcaccc

SEQ ID NO: 107053 - DNA, 25 bp, Canis familiaris
gaatcccacaagggttgcacttcca

SEQ ID NO: 107054 - DNA, 25 bp, Canis familiaris
gaatgtccaaagtaccttctgtcca

SEQ ID NO: 107055 - DNA, 25 bp, Canis familiaris
gaatggccacttgacctactggccc

SEQ ID NO: 107056 - DNA, 25 bp, Canis familiaris
gaatgtccattgaccaggctttggc

SEQ ID NO: 107057 - DNA, 25 bp, Canis familiaris
gaatgttcattgtctaggctgttgc

SEQ ID NO: 107058 - DNA, 25 bp, Canis familiaris
gaatgcttcctgcatcagggttctc

SEQ ID NO: 107059 - DNA, 25 bp, Canis familiaris
gaatcgtcactcatgtggtatgtct

SEQ ID NO: 107060 - DNA, 25 bp, Canis familiaris
gaatcgacatcacctgctgggatgc

SEQ ID NO: 107061 - DNA, 25 bp, Canis familiaris
gaatccacagcacctgatgcaaggc

SEQ ID NO: 107062 - DNA, 25 bp, Canis familiaris
gaatgctcgagccctgcgagcagtg

SEQ ID NO: 107063 - DNA, 25 bp, Canis familiaris
gaatgcttgagacttcactcagtgg

SEQ ID NO: 107064 - DNA, 25 bp, Canis familiaris
gaatgtctgaatttagatagtgtca

SEQ ID NO: 107065 - DNA, 25 bp, Canis familiaris
gaatgtcttgattgttgaagatctc

SEQ ID NO: 107066 - DNA, 25 bp, Canis familiaris
gaatgtttctgacctgcatagtgca

SEQ ID NO: 107067 - DNA, 25 bp, Canis familiaris
gaatgctctttgtgtctgggaactt

SEQ ID NO: 107068 - DNA, 25 bp, Canis familiaris
gaagtcattttccctgggactgttt

SEQ ID NO: 107069 - DNA, 25 bp, Canis familiaris
gaagttttgccagcggtggttcttt

SEQ ID NO: 107070 - DNA, 25 bp, Canis familiaris
gaagaacttcaagaagggctttctt

SEQ ID NO: 107071 - DNA, 25 bp, Canis familiaris
gaaggactcagatggcaatggcgtt

SEQ ID NO: 107072 - DNA, 25 bp, Canis familiaris
gaaggagcagccaggaacagtttta

SEQ ID NO: 107073 - DNA, 25 bp, Canis familiaris
gaatccgcccaagggacggtgttag

SEQ ID NO: 107074 - DNA, 25 bp, Canis familiaris
gaatcccagcctccaggagggggta

SEQ ID NO: 107075 - DNA, 25 bp, Canis familiaris
gaatccaacgtgcaagaggttcgat

SEQ ID NO: 107076 - DNA, 25 bp, Canis familiaris
gaaccacactctcacgtagtttgta

SEQ ID NO: 107077 - DNA, 25 bp, Canis familiaris
gaaggacttccccgaagatttgtat

SEQ ID NO: 107078 - DNA, 25 bp, Canis familiaris
gaaggtcccacggtgaacttgtgct

SEQ ID NO: 107079 - DNA, 25 bp, Canis familiaris
gaatggatacaagcgggtcctggct

SEQ ID NO: 107080 - DNA, 25 bp, Canis familiaris
gaatgaaacaaccaactgcctgctg

SEQ ID NO: 107081 - DNA, 25 bp, Canis familiaris
gaatgcacaacaaagaagggcctgg

SEQ ID NO: 107082 - DNA, 25 bp, Canis familiaris
gaatccttcatattgaaggtgactc

SEQ ID NO: 107083 - DNA, 25 bp, Canis familiaris
gaatcctgctcataaaggtttccat

SEQ ID NO: 107084 - DNA, 25 bp, Canis familiaris
gaatccagctctccaagaggtgata

SEQ ID NO: 107085 - DNA, 25 bp, Canis familiaris
gaatgcaagctctccagaggtgaaa

SEQ ID NO: 107086 - DNA, 25 bp, Canis familiaris
gaatgccacccatgagaggatcaag

SEQ ID NO: 107087 - DNA, 25 bp, Canis familiaris
gaaggctgcccatggggacagggtc

SEQ ID NO: 107088 - DNA, 25 bp, Canis familiaris
gaagggcccaagacggacggatagc

SEQ ID NO: 107089 - DNA, 25 bp, Canis familiaris
gaaccacccactatggtatggacgc

SEQ ID NO: 107090 - DNA, 25 bp, Canis familiaris
gaatctttccacatttgttgtcggc

SEQ ID NO: 107091 - DNA, 25 bp, Canis familiaris
gaatctatcctaattattgtttctg

SEQ ID NO: 107092 - DNA, 25 bp, Canis familiaris
gaatctttgctatttcatttgtggt

SEQ ID NO: 107093 - DNA, 25 bp, Canis familiaris
gaatgccctgtttttatttggctca

SEQ ID NO: 107094 - DNA, 25 bp, Canis familiaris
gaatgaccttgttacttttgctctt

SEQ ID NO: 107095 - DNA, 25 bp, Canis familiaris
gaatcccagcagtttctttctgttt

SEQ ID NO: 107096 - DNA, 25 bp, Canis familiaris
gaatcccatcaaggtctcatttgct

SEQ ID NO: 107097 - DNA, 25 bp, Canis familiaris
gaatctccagcgtgtgcattgaatg

SEQ ID NO: 107098 - DNA, 25 bp, Canis familiaris
gaatctgctcgtcgtgtttgcattg

SEQ ID NO: 107099 - DNA, 25 bp, Canis familiaris
gaatgctgcttacgcctaaattgtt

SEQ ID NO: 107100 - DNA, 25 bp, Canis familiaris
gaatgtcattgatgccaatttttgt

SEQ ID NO: 107101 - DNA, 25 bp, Canis familiaris
gaatgtccatcagccatcttttaat

SEQ ID NO: 107102 - DNA, 25 bp, Canis familiaris
gaagatcactctattttttaaaatt

SEQ ID NO: 107103 - DNA, 25 bp, Canis familiaris
gaagtcggttttatttctgaaacat

SEQ ID NO: 107104 - DNA, 25 bp, Canis familiaris
gaaaggttctttgtgctactaaaat

SEQ ID NO: 107105 - DNA, 25 bp, Canis familiaris
gacagggttgccagatttaggaaaa

SEQ ID NO: 107106 - DNA, 25 bp, Canis familiaris
gaatgccgttccagtatgacagatg

SEQ ID NO: 107107 - DNA, 25 bp, Canis familiaris
gaatgccgttctcctgctaggagag

SEQ ID NO: 107108 - DNA, 25 bp, Canis familiaris
gaatgccttactctcagcatcagag

SEQ ID NO: 107109 - DNA, 25 bp, Canis familiaris
gaatcgtatctcaccactagtgtcc

SEQ ID NO: 107110 - DNA, 25 bp, Canis familiaris
gaatctaatctcacttcttagcctc

SEQ ID NO: 107111 - DNA, 25 bp, Canis familiaris
gaatctcattcttgtttttcacagt

SEQ ID NO: 107112 - DNA, 25 bp, Canis familiaris
gaatgtcaatcgttcgttcatccgt

SEQ ID NO: 107113 - DNA, 25 bp, Canis familiaris
gaatgtcaaagccgtgacttccagg

SEQ ID NO: 107114 - DNA, 25 bp, Canis familiaris
gaatgtggactcctggtgattccag

SEQ ID NO: 107115 - DNA, 25 bp, Canis familiaris
gaatgctggagagggggcacccgag

SEQ ID NO: 107116 - DNA, 25 bp, Canis familiaris
gaatgtgggatctgagacctgcctg

SEQ ID NO: 107117 - DNA, 25 bp, Canis familiaris
gaatgaaggaccctgagagctccct

SEQ ID NO: 107118 - DNA, 25 bp, Canis familiaris
gaatgctttttcctagaatgccttt

SEQ ID NO: 107119 - DNA, 25 bp, Canis familiaris
gaatctgtgtgtgtgcatatgaatg

SEQ ID NO: 107120 - DNA, 25 bp, Canis familiaris
gaatctgctgttgtgcttgaatgtt

SEQ ID NO: 107121 - DNA, 25 bp, Canis familiaris
gaatctgctttcctgtaatttctac

SEQ ID NO: 107122 - DNA, 25 bp, Canis familiaris
gaaggctctaccatagcttatatac

SEQ ID NO: 107123 - DNA, 25 bp, Canis familiaris
gaaggcttagccctgaattaaacgt

SEQ ID NO: 107124 - DNA, 25 bp, Canis familiaris
gaaggttccacgtagactagaaata

SEQ ID NO: 107125 - DNA, 25 bp, Canis familiaris
gaaggaaaaccttgtgctaggaata

SEQ ID NO: 107126 - DNA, 25 bp, Canis familiaris
gaaggaaaacgggaaagagaatcat

SEQ ID NO: 107127 - DNA, 25 bp, Canis familiaris
gaacgtgacaacactaaaggtcagt

SEQ ID NO: 107128 - DNA, 25 bp, Canis familiaris
gaatcggtcccaagtacaacgtgtt

SEQ ID NO: 107129 - DNA, 25 bp, Canis familiaris
gaatgggtacacaggaaacttgagc

SEQ ID NO: 107130 - DNA, 25 bp, Canis familiaris
gaatggaattccaggaacccgagag

SEQ ID NO: 107131 - DNA, 25 bp, Canis familiaris
gaatggaacccttggaaggccgcct

SEQ ID NO: 107132 - DNA, 25 bp, Canis familiaris
gaaggaaaccagtgggcacccttgg

SEQ ID NO: 107133 - DNA, 25 bp, Canis familiaris
gaatgtcaaccagagagggccctcc

SEQ ID NO: 107134 - DNA, 25 bp, Canis familiaris
gaagtcacttagagaaagccctgga

SEQ ID NO: 107135 - DNA, 25 bp, Canis familiaris
gaaggcactttgctgaaggccccat

SEQ ID NO: 107136 - DNA, 25 bp, Canis familiaris
gaaggccatttggccagtgctgccc

SEQ ID NO: 107137 - DNA, 25 bp, Canis familiaris
gaaggcctagtcagctgagctgccc

SEQ ID NO: 107138 - DNA, 25 bp, Canis familiaris
gaatccctagcaactgtgactgtat

SEQ ID NO: 107139 - DNA, 25 bp, Canis familiaris
gaatgccctgaaacgatatttctga

SEQ ID NO: 107140 - DNA, 25 bp, Canis familiaris
gaaggcaatgacacgattatgtgcg

SEQ ID NO: 107141 - DNA, 25 bp, Canis familiaris
gaatcgattcattttgttgcatggg

SEQ ID NO: 107142 - DNA, 25 bp, Canis familiaris
gaatcgattcacgatctggtcacag

SEQ ID NO: 107143 - DNA, 25 bp, Canis familiaris
gaatgtgaattcaagtgcagctcaa

SEQ ID NO: 107144 - DNA, 25 bp, Canis familiaris
gaatgcgatttatgagctctcaata

SEQ ID NO: 107145 - DNA, 25 bp, Canis familiaris
gaatcgctttaccatatctacgttc

SEQ ID NO: 107146 - DNA, 25 bp, Canis familiaris
gaaggccttaacattccagcttcgt

SEQ ID NO: 107147 - DNA, 25 bp, Canis familiaris
gaaggccttcatctttaagtactcg

SEQ ID NO: 107148 - DNA, 25 bp, Canis familiaris
gaatgtgcctcctctttggagtgta

SEQ ID NO: 107149 - DNA, 25 bp, Canis familiaris
gaatgtcccacgttctgggtgtatc

SEQ ID NO: 107150 - DNA, 25 bp, Canis familiaris
gaatgttccatttctgctggttggt

SEQ ID NO: 107151 - DNA, 25 bp, Canis familiaris
gaatgttaggtttgaggttggtgtt

SEQ ID NO: 107152 - DNA, 25 bp, Canis familiaris
gacatggtagggaggttctggggga

SEQ ID NO: 107153 - DNA, 25 bp, Canis familiaris
gaatgcctagtaattttcctggagg

SEQ ID NO: 107154 - DNA, 25 bp, Canis familiaris
gaaggtagtcacgtttcctggaaat

SEQ ID NO: 107155 - DNA, 25 bp, Canis familiaris
gaaggccagtagtctgttcctggtt

SEQ ID NO: 107156 - DNA, 25 bp, Canis familiaris
gaaggacagggtgcttcctgggttt

SEQ ID NO: 107157 - DNA, 25 bp, Canis familiaris
gaatgagacctggttcttgtccttg

SEQ ID NO: 107158 - DNA, 25 bp, Canis familiaris
gaaggggggttccatgtacatattt

SEQ ID NO: 107159 - DNA, 25 bp, Canis familiaris
gaaggatgacggttggttacatttt

SEQ ID NO: 107160 - DNA, 25 bp, Canis familiaris
gaaggtcgctcggatggttaccgct

SEQ ID NO: 107161 - DNA, 25 bp, Canis familiaris
gaaggtggctcggaagttctggtgg

SEQ ID NO: 107162 - DNA, 25 bp, Canis familiaris
gaaggtgcctcaaaggttctggggg

SEQ ID NO: 107163 - DNA, 25 bp, Canis familiaris
gaaggaagccagaggctggttgggc

SEQ ID NO: 107164 - DNA, 25 bp, Canis familiaris
gaagagtttcgggagcctgttggcc

SEQ ID NO: 107165 - DNA, 25 bp, Canis familiaris
gaaggtttctagggctgtcagaggc

SEQ ID NO: 107166 - DNA, 25 bp, Canis familiaris
gaaggcccctgacatggtgggcagc

SEQ ID NO: 107167 - DNA, 25 bp, Canis familiaris
gaacggctacggggaggaagcacct

SEQ ID NO: 107168 - DNA, 25 bp, Canis familiaris
gaatgggctcccaggaggtgaccgt

SEQ ID NO: 107169 - DNA, 25 bp, Canis familiaris
gaaggacgctaccaagaaggcccga

SEQ ID NO: 107170 - DNA, 25 bp, Canis familiaris
gaaggaagtttcggccaagccacca

SEQ ID NO: 107171 - DNA, 25 bp, Canis familiaris
gaatctgaggatgaagcccaacccc

SEQ ID NO: 107172 - DNA, 25 bp, Canis familiaris
gaatgctgcggttcaggctgtcaac

SEQ ID NO: 107173 - DNA, 25 bp, Canis familiaris
gaatctggatggtcagctggacata

SEQ ID NO: 107174 - DNA, 25 bp, Canis familiaris
gaatgcggagtggcagctacatcaa

SEQ ID NO: 107175 - DNA, 25 bp, Canis familiaris
gaatgactggtacgatcagcatcag

SEQ ID NO: 107176 - DNA, 25 bp, Canis familiaris
gaatgcacaagaatggatcaccagg

SEQ ID NO: 107177 - DNA, 25 bp, Canis familiaris
gaatgcccaagagtcagccaagagc

SEQ ID NO: 107178 - DNA, 25 bp, Canis familiaris
gaatgcagcacatggccagtactgg

SEQ ID NO: 107179 - DNA, 25 bp, Canis familiaris
gaatgaaccaggcccttctggatct

SEQ ID NO: 107180 - DNA, 25 bp, Canis familiaris
gaatgaccacgactgtcttgcaaga

SEQ ID NO: 107181 - DNA, 25 bp, Canis familiaris
gaatgatctctttgtgatttaagca

SEQ ID NO: 107182 - DNA, 25 bp, Canis familiaris
gaatgatctctctgaatcctaaggg

SEQ ID NO: 107183 - DNA, 25 bp, Canis familiaris
gaatgaaatcctgacatctgcaatg

SEQ ID NO: 107184 - DNA, 25 bp, Canis familiaris
gaatgacctggagcgcattgcacag

SEQ ID NO: 107185 - DNA, 25 bp, Canis familiaris
gaatgtcctggcagatgctctcaag

SEQ ID NO: 107186 - DNA, 25 bp, Canis familiaris
gaatgaccatggatgcagagtcgga

SEQ ID NO: 107187 - DNA, 25 bp, Canis familiaris
gaatgaggattgagcagcccaggtc

SEQ ID NO: 107188 - DNA, 25 bp, Canis familiaris
gaatgaggaactggctcccaactac

SEQ ID NO: 107189 - DNA, 25 bp, Canis familiaris
gaatgaagaatctctccagtactca

SEQ ID NO: 107190 - DNA, 25 bp, Canis familiaris
gaagaagaagtcttacaccactccc

SEQ ID NO: 107191 - DNA, 25 bp, Canis familiaris
gaagaagaagtcttacaccactccc

SEQ ID NO: 107192 - DNA, 25 bp, Canis familiaris
gaagaagaagtcttacaccactccc

SEQ ID NO: 107193 - DNA, 25 bp, Canis familiaris
gacgaacaggccgtaacgcaacgcc

SEQ ID NO: 107194 - DNA, 25 bp, Canis familiaris
gaaggacaacctgaacctagacctt

SEQ ID NO: 107195 - DNA, 25 bp, Canis familiaris
gaaggaggacctgtacctgaagccc

SEQ ID NO: 107196 - DNA, 25 bp, Canis familiaris
gataggggaccccttggcatagggc

SEQ ID NO: 107197 - DNA, 25 bp, Canis familiaris
gaaggggagcctgtgggtcagggcc

SEQ ID NO: 107198 - DNA, 25 bp, Canis familiaris
gaaggcgtaaccatgggcctggtac

SEQ ID NO: 107199 - DNA, 25 bp, Canis familiaris
gaagggtggaccgtggactgtgggt

SEQ ID NO: 107200 - DNA, 25 bp, Canis familiaris
gaaggccttacggtggcaagtgcat

SEQ ID NO: 107201 - DNA, 25 bp, Canis familiaris
gaagtctctctgacccttaaggatt

SEQ ID NO: 107202 - DNA, 25 bp, Canis familiaris
gaaatcccttctctaataaagtcta

SEQ ID NO: 107203 - DNA, 25 bp, Canis familiaris
gaaggcccttctggaacggaagtgc

SEQ ID NO: 107204 - DNA, 25 bp, Canis familiaris
gaaggcacgttccaacgtggaacac

SEQ ID NO: 107205 - DNA, 25 bp, Canis familiaris
gaaggacatgttgcccagtgttaca

SEQ ID NO: 107206 - DNA, 25 bp, Canis familiaris
gaaggccagttagtccaagtcagaa

SEQ ID NO: 107207 - DNA, 25 bp, Canis familiaris
gaaggccgtctggtgcaagtgtaag

SEQ ID NO: 107208 - DNA, 25 bp, Canis familiaris
gaatgacctttgctaagggatcatg

SEQ ID NO: 107209 - DNA, 25 bp, Canis familiaris
gaatggtccctgctcaagacaggat

SEQ ID NO: 107210 - DNA, 25 bp, Canis familiaris
gaatgggagactcctacaatcggcc

SEQ ID NO: 107211 - DNA, 25 bp, Canis familiaris
gaatgagagggctgtgccattcccc

SEQ ID NO: 107212 - DNA, 25 bp, Canis familiaris
gaaggactatgacatcctatccgct

SEQ ID NO: 107213 - DNA, 25 bp, Canis familiaris
gaagtatgccatgggctcagcttgc

SEQ ID NO: 107214 - DNA, 25 bp, Canis familiaris
gaatggctgcagtcaggccacattg

SEQ ID NO: 107215 - DNA, 25 bp, Canis familiaris
gaatgaggcgcccagacagttggtc

SEQ ID NO: 107216 - DNA, 25 bp, Canis familiaris
gaatgggaccaaacgattggagctg

SEQ ID NO: 107217 - DNA, 25 bp, Canis familiaris
gaatgttattggcacgattggacta

SEQ ID NO: 107218 - DNA, 25 bp, Canis familiaris
gaaggtcaatggcaatttaatctaa

SEQ ID NO: 107219 - DNA, 25 bp, Canis familiaris
gaatggctccgacaatgacaaacta

SEQ ID NO: 107220 - DNA, 25 bp, Canis familiaris
gaaggtccgagccttaggacccact

SEQ ID NO: 107221 - DNA, 25 bp, Canis familiaris
gaagttcgcgaacatcggcaaccaa

SEQ ID NO: 107222 - DNA, 25 bp, Canis familiaris
gaagttgcccaaataaccagtaaca

SEQ ID NO: 107223 - DNA, 25 bp, Canis familiaris
gaagtctcccagcaaaccagagtta

SEQ ID NO: 107224 - DNA, 25 bp, Canis familiaris
gaagttttagtatcatcgatggttc

SEQ ID NO: 107225 - DNA, 25 bp, Canis familiaris
gaatgtttggggttcactgtggatt

SEQ ID NO: 107226 - DNA, 25 bp, Canis familiaris
taattgtgggggagagccttattcc

SEQ ID NO: 107227 - DNA, 25 bp, Canis familiaris
gaatcgtgggggttactcttttcat

SEQ ID NO: 107228 - DNA, 25 bp, Canis familiaris
gaatgctgtgggggttaccatgttg

SEQ ID NO: 107229 - DNA, 25 bp, Canis familiaris
gaatgtggtggttttatcctgggag

SEQ ID NO: 107230 - DNA, 25 bp, Canis familiaris
gaatgtgggctttttcaagggtgaa

SEQ ID NO: 107231 - DNA, 25 bp, Canis familiaris
gaatgaaggtgtttctccctgtgct

SEQ ID NO: 107232 - DNA, 25 bp, Canis familiaris
gaagacctgtagaacacacctgtgt

SEQ ID NO: 107233 - DNA, 25 bp, Canis familiaris
gaatgcacctgtgcaagcatcacca

SEQ ID NO: 107234 - DNA, 25 bp, Canis familiaris
gaaggcgcatggccaagatgccaca

SEQ ID NO: 107235 - DNA, 25 bp, Canis familiaris
gaaggcgatctaaagtccaagacca

SEQ ID NO: 107236 - DNA, 25 bp, Canis familiaris
gaaggagaaaggcgccacgatgccc

SEQ ID NO: 107237 - DNA, 25 bp, Canis familiaris
gaaggctgaaggaggccctggcaca

SEQ ID NO: 107238 - DNA, 25 bp, Canis familiaris
gaaggctgaaagctactcccaagaa

SEQ ID NO: 107239 - DNA, 25 bp, Canis familiaris
gatgggaaaaggctccttcaagtat

SEQ ID NO: 107240 - DNA, 25 bp, Canis familiaris
gaaggaacaagacatcttaccgctt

SEQ ID NO: 107241 - DNA, 25 bp, Canis familiaris
gaaggaaaagaaatacacacacaca

SEQ ID NO: 107242 - DNA, 25 bp, Canis familiaris
gaatgtaataaagaaagcgcacgct

SEQ ID NO: 107243 - DNA, 25 bp, Canis familiaris
gaatggcgaaaattaacaggacagg

SEQ ID NO: 107244 - DNA, 25 bp, Canis familiaris
gaatccgctcaataaaagtgtcgag

SEQ ID NO: 107245 - DNA, 25 bp, Canis familiaris
gaatccagtgacttaaacacctcga

SEQ ID NO: 107246 - DNA, 25 bp, Canis familiaris
gaatccatgtactcaatcacaagcc

SEQ ID NO: 107247 - DNA, 25 bp, Canis familiaris
gaatccatgagtttcaacacaaaac

SEQ ID NO: 107248 - DNA, 25 bp, Canis familiaris
gaatgtcatagtgtaaatgctagaa

SEQ ID NO: 107249 - DNA, 25 bp, Canis familiaris
gaatgttaatccatattggcagaac

SEQ ID NO: 107250 - DNA, 25 bp, Canis familiaris
gaatgttctgagctttttgcaggag

SEQ ID NO: 107251 - DNA, 25 bp, Canis familiaris
gaatgattctaattatgtggtcaaa

SEQ ID NO: 107252 - DNA, 25 bp, Canis familiaris
gaatgctgtctaaatttctccaaat

SEQ ID NO: 107253 - DNA, 25 bp, Canis familiaris
gaatgagattgtattcctcctagag

SEQ ID NO: 107254 - DNA, 25 bp, Canis familiaris
gaatgaacatgttttcctactgcat

SEQ ID NO: 107255 - DNA, 25 bp, Canis familiaris
gaatgagacatttttctgaactagc

SEQ ID NO: 107256 - DNA, 25 bp, Canis familiaris
gaatgagaattttggaactctatgc

SEQ ID NO: 107257 - DNA, 25 bp, Canis familiaris
gaatgcgtctcttgtgtgaactgta

SEQ ID NO: 107258 - DNA, 25 bp, Canis familiaris
gaatgccctctgttaaacatggact

SEQ ID NO: 107259 - DNA, 25 bp, Canis familiaris
gaatcctctccaaaacaatgttcat

SEQ ID NO: 107260 - DNA, 25 bp, Canis familiaris
gaatggcttcatatcaacaaagtca

SEQ ID NO: 107261 - DNA, 25 bp, Canis familiaris
gaatgatgcagtctagaaacacagt

SEQ ID NO: 107262 - DNA, 25 bp, Canis familiaris
gaatgagcagccatattaaacatcc

SEQ ID NO: 107263 - DNA, 25 bp, Canis familiaris
gaatgcaagcaagttatacgaaaaa

SEQ ID NO: 107264 - DNA, 25 bp, Canis familiaris
gaatgaccacatttgatccgaagga

SEQ ID NO: 107265 - DNA, 25 bp, Canis familiaris
gaatgaatacaaagatccagagagc

SEQ ID NO: 107266 - DNA, 25 bp, Canis familiaris
gaatgagcaagagttctccaagcag

SEQ ID NO: 107267 - DNA, 25 bp, Canis familiaris
gaatggcggtgagttccactgcatc

SEQ ID NO: 107268 - DNA, 25 bp, Canis familiaris
gaatgcagaggtttgcccagcagca

SEQ ID NO: 107269 - DNA, 25 bp, Canis familiaris
gaaggcatgcttttaagcagccata

SEQ ID NO: 107270 - DNA, 25 bp, Canis familiaris
gaatggcatttgtctgatcaggaac

SEQ ID NO: 107271 - DNA, 25 bp, Canis familiaris
gaagtgcctcagtttcaggaattgc

SEQ ID NO: 107272 - DNA, 25 bp, Canis familiaris
gaatgttctggtatcgacaagaccc

SEQ ID NO: 107273 - DNA, 25 bp, Canis familiaris
gaatgttctcctattaaatgctcca

SEQ ID NO: 107274 - DNA, 25 bp, Canis familiaris
gaatgttcccaaatgttacacttga

SEQ ID NO: 107275 - DNA, 25 bp, Canis familiaris
gaatgaactccatgacatataactg

SEQ ID NO: 107276 - DNA, 25 bp, Canis familiaris
gaatggttgtcttgaaatacctggt

SEQ ID NO: 107277 - DNA, 25 bp, Canis familiaris
gaaggattggttgacatccctgcct

SEQ ID NO: 107278 - DNA, 25 bp, Canis familiaris
gagaggaaccttgaagtcttcccga

SEQ ID NO: 107279 - DNA, 25 bp, Canis familiaris
gaatgaaagcctaaacctcttcctt

SEQ ID NO: 107280 - DNA, 25 bp, Canis familiaris
gaatgagggccataaccctatgagc

SEQ ID NO: 107281 - DNA, 25 bp, Canis familiaris
gaatgagggccaaccaacagtaggg

SEQ ID NO: 107282 - DNA, 25 bp, Canis familiaris
gaaggcaggcctgccaacaggctgt

SEQ ID NO: 107283 - DNA, 25 bp, Canis familiaris
gaaggcaggcctgaaggaagcccct

SEQ ID NO: 107284 - DNA, 25 bp, Canis familiaris
gaagtggcccttgaggaacacgatt

SEQ ID NO: 107285 - DNA, 25 bp, Canis familiaris
gaagggctcgttgagatttcgagtt

SEQ ID NO: 107286 - DNA, 25 bp, Canis familiaris
gaagggtagcttgggtctatgaggt

SEQ ID NO: 107287 - DNA, 25 bp, Canis familiaris
gaagggtcaactcttctgttggatt

SEQ ID NO: 107288 - DNA, 25 bp, Canis familiaris
gaaggtgaagaacatccagttgcag

SEQ ID NO: 107289 - DNA, 25 bp, Canis familiaris
gaagtagaacaacaccgagctgtaa

SEQ ID NO: 107290 - DNA, 25 bp, Canis familiaris
gaaggaaaacatcacggcaataaat

SEQ ID NO: 107291 - DNA, 25 bp, Canis familiaris
gaaggcaaagttgttggctatgcaa

SEQ ID NO: 107292 - DNA, 25 bp, Canis familiaris
gaaggaagaggattattggttggaa

SEQ ID NO: 107293 - DNA, 25 bp, Canis familiaris
gaaggggtagtaattggcctgctca

SEQ ID NO: 107294 - DNA, 25 bp, Canis familiaris
gacaggggcttgggggcgcccaagc

SEQ ID NO: 107295 - DNA, 25 bp, Canis familiaris
gaagggtttgataggtcgtccctgc

SEQ ID NO: 107296 - DNA, 25 bp, Canis familiaris
gaaggctgtgtatagtccatttccc

SEQ ID NO: 107297 - DNA, 25 bp, Canis familiaris
gaatgacggtcttcgttctttttcg

SEQ ID NO: 107298 - DNA, 25 bp, Canis familiaris
gaatgccagattcttttctttttca

SEQ ID NO: 107299 - DNA, 25 bp, Canis familiaris
gaaggcagattttatttttggtata

SEQ ID NO: 107300 - DNA, 25 bp, Canis familiaris
gaaggagtcctgcatcttttttttt

SEQ ID NO: 107301 - DNA, 25 bp, Canis familiaris
gaagtggtatctcattttaattttg

SEQ ID NO: 107302 - DNA, 25 bp, Canis familiaris
gaaggttcataactttatatttgta

SEQ ID NO: 107303 - DNA, 25 bp, Canis familiaris
gaatggttaacccttttatctctga

SEQ ID NO: 107304 - DNA, 25 bp, Canis familiaris
gaatgcctttcagggttttaccata

SEQ ID NO: 107305 - DNA, 25 bp, Canis familiaris
gaatgattttcagggtcttcacgcc

SEQ ID NO: 107306 - DNA, 25 bp, Canis familiaris
gaatgcttaatatcagccttcccct

SEQ ID NO: 107307 - DNA, 25 bp, Canis familiaris
gaacttagtaattccctccagattg

SEQ ID NO: 107308 - DNA, 25 bp, Canis familiaris
gaatgttcaagttatacccacgttg

SEQ ID NO: 107309 - DNA, 25 bp, Canis familiaris
gaatgttcaagtttgtcagattctt

SEQ ID NO: 107310 - DNA, 25 bp, Canis familiaris
gaatgtgccactatatgtcaacctc

SEQ ID NO: 107311 - DNA, 25 bp, Canis familiaris
gaatgtgctctccaaggtacgactt

SEQ ID NO: 107312 - DNA, 25 bp, Canis familiaris
gaatgtttagtatgtatcagcactg

SEQ ID NO: 107313 - DNA, 25 bp, Canis familiaris
gaatgtttttgatttgtagcagttg

SEQ ID NO: 107314 - DNA, 25 bp, Canis familiaris
gaatgttttgatttttagcagttgt

SEQ ID NO: 107315 - DNA, 25 bp, Canis familiaris
gaatgttttgttggagccactttgt

SEQ ID NO: 107316 - DNA, 25 bp, Canis familiaris
gaatgtttcctaagaccgtttgtca

SEQ ID NO: 107317 - DNA, 25 bp, Canis familiaris
gaaggctttgtaaatcttgttcgga

SEQ ID NO: 107318 - DNA, 25 bp, Canis familiaris
gaaggtagtgtaaccggcttcggag

SEQ ID NO: 107319 - DNA, 25 bp, Canis familiaris
gaaggtagatgtttccgtttcgcct

SEQ ID NO: 107320 - DNA, 25 bp, Canis familiaris
gaaggaatgtttacctgtcgaccca

SEQ ID NO: 107321 - DNA, 25 bp, Canis familiaris
gaaggatttgtctccattaaaccaa

SEQ ID NO: 107322 - DNA, 25 bp, Canis familiaris
gaatggatgttttttatttgcaacc

SEQ ID NO: 107323 - DNA, 25 bp, Canis familiaris
gaaggtgtttttatcctcaacctcg

SEQ ID NO: 107324 - DNA, 25 bp, Canis familiaris
gaaggttttcttcacactttcgtgt

SEQ ID NO: 107325 - DNA, 25 bp, Canis familiaris
gaagttatttttttcagccttatga

SEQ ID NO: 107326 - DNA, 25 bp, Canis familiaris
gaaggtaagttttgccaggttcact

SEQ ID NO: 107327 - DNA, 25 bp, Canis familiaris
gaagttaagttcagtccagtccttg

SEQ ID NO: 107328 - DNA, 25 bp, Canis familiaris
gaagtttggattgcggatcaccctt

SEQ ID NO: 107329 - DNA, 25 bp, Canis familiaris
gaagtttggttgtggacactcgggc

SEQ ID NO: 107330 - DNA, 25 bp, Canis familiaris
gaagatcttttgggggacacctggg

SEQ ID NO: 107331 - DNA, 25 bp, Canis familiaris
gaatgagtttctgcaaggacctctg

SEQ ID NO: 107332 - DNA, 25 bp, Canis familiaris
gaatgtttgtctggataggagggtg

SEQ ID NO: 107333 - DNA, 25 bp, Canis familiaris
gaatgtcctttggtagctctgggtt

SEQ ID NO: 107334 - DNA, 25 bp, Canis familiaris
gttgtatccgtggtgacgtcggttc

SEQ ID NO: 107335 - DNA, 25 bp, Canis familiaris
gaaggaccgtggtactcatcgtttg

SEQ ID NO: 107336 - DNA, 25 bp, Canis familiaris
gaaggaccttataactccctgttgt

SEQ ID NO: 107337 - DNA, 25 bp, Canis familiaris
gaaggactcttgatttaccctcttc

SEQ ID NO: 107338 - DNA, 25 bp, Canis familiaris
gaagtgaaattgttaaatcccctct

SEQ ID NO: 107339 - DNA, 25 bp, Canis familiaris
gaaggaaatgtctggaaccaccctt

SEQ ID NO: 107340 - DNA, 25 bp, Canis familiaris
gaatggatatatctctggaactccc

SEQ ID NO: 107341 - DNA, 25 bp, Canis familiaris
gaatggtatgagtttgggcacttta

SEQ ID NO: 107342 - DNA, 25 bp, Canis familiaris
gaatgatgtgggggcagggaggtta

SEQ ID NO: 107343 - DNA, 25 bp, Canis familiaris
gaatgcgagaaggaatgggaggcgt

SEQ ID NO: 107344 - DNA, 25 bp, Canis familiaris
gaagggacagcctgggtgtgttggg

SEQ ID NO: 107345 - DNA, 25 bp, Canis familiaris
gaatggcagtagcgggtttgttggc

SEQ ID NO: 107346 - DNA, 25 bp, Canis familiaris
gaatgcgctgaacgtgggtgtgtat

SEQ ID NO: 107347 - DNA, 25 bp, Canis familiaris
gaatgggcaaggggagggtaggaag

SEQ ID NO: 107348 - DNA, 25 bp, Canis familiaris
gaatgagaaccgggtggcttaaaag

SEQ ID NO: 107349 - DNA, 25 bp, Canis familiaris
gaatgcgaatacgttttcttccaac

SEQ ID NO: 107350 - DNA, 25 bp, Canis familiaris
gaaggaccattggcttttttcaaag

SEQ ID NO: 107351 - DNA, 25 bp, Canis familiaris
gaaggaccgtctgatttgagttaca

SEQ ID NO: 107352 - DNA, 25 bp, Canis familiaris
gaaggacccttggatttcagtcatt

SEQ ID NO: 107353 - DNA, 25 bp, Canis familiaris
gaaggtcctctctgagctaagattt

SEQ ID NO: 107354 - DNA, 25 bp, Canis familiaris
gaatggtccatttaaacagatttta

SEQ ID NO: 107355 - DNA, 25 bp, Canis familiaris
gaatgataaattccaagtcgtttta

SEQ ID NO: 107356 - DNA, 25 bp, Canis familiaris
gaatggaattgcacaagcctttctt

SEQ ID NO: 107357 - DNA, 25 bp, Canis familiaris
gaatggagttggacccttaccttat

SEQ ID NO: 107358 - DNA, 25 bp, Canis familiaris
gaaggaggtggggccttaacggctg

SEQ ID NO: 107359 - DNA, 25 bp, Canis familiaris
gaaggaagtagcctccttggagggt

SEQ ID NO: 107360 - DNA, 25 bp, Canis familiaris
gaatgtgcaacccttccattggggt

SEQ ID NO: 107361 - DNA, 25 bp, Canis familiaris
gaatgatgtatcccttccattcaga

SEQ ID NO: 107362 - DNA, 25 bp, Canis familiaris
gaatgaggaggtttgcgcataagaa

SEQ ID NO: 107363 - DNA, 25 bp, Canis familiaris
gaatgcaggagcctttactgatgac

SEQ ID NO: 107364 - DNA, 25 bp, Canis familiaris
gaatgctgatgagcttgtgagcttg

SEQ ID NO: 107365 - DNA, 25 bp, Canis familiaris
gaatgcagatagactgtggccttct

SEQ ID NO: 107366 - DNA, 25 bp, Canis familiaris
gaatgagcaatgatctgaacttttt

SEQ ID NO: 107367 - DNA, 25 bp, Canis familiaris
gaatgagaagggcagactctattaa

SEQ ID NO: 107368 - DNA, 25 bp, Canis familiaris
gaatggaagagcggagactactgga

SEQ ID NO: 107369 - DNA, 25 bp, Canis familiaris
gaatgagagggggaacctctgggtc

SEQ ID NO: 107370 - DNA, 25 bp, Canis familiaris
gaatgtcagggggagcctcttggtt

SEQ ID NO: 107371 - DNA, 25 bp, Canis familiaris
gaaggaggcctgggcctctagggtc

SEQ ID NO: 107372 - DNA, 25 bp, Canis familiaris
gaaggagtccccgataaatagtgat

SEQ ID NO: 107373 - DNA, 25 bp, Canis familiaris
gaagaagttcctgagaccagattga

SEQ ID NO: 107374 - DNA, 25 bp, Canis familiaris
gaacagggtcctcaacaagtctatg

SEQ ID NO: 107375 - DNA, 25 bp, Canis familiaris
gaacagggtcctcaacaagtctatg

SEQ ID NO: 107376 - DNA, 25 bp, Canis familiaris
gaaggaggattccaacctgagattt

SEQ ID NO: 107377 - DNA, 25 bp, Canis familiaris
gaaggagctttccacttcgaattca

SEQ ID NO: 107378 - DNA, 25 bp, Canis familiaris
gaagtttattgccacccaatttcca

SEQ ID NO: 107379 - DNA, 25 bp, Canis familiaris
gaagttgtagtcaccgaaattccta

SEQ ID NO: 107380 - DNA, 25 bp, Canis familiaris
gaatgtctcatacaaccgagcaatc

SEQ ID NO: 107381 - DNA, 25 bp, Canis familiaris
gaatgtcatatgtaaatgctaaaat

SEQ ID NO: 107382 - DNA, 25 bp, Canis familiaris
gaatgtaatgtaaatctcttacttt

SEQ ID NO: 107383 - DNA, 25 bp, Canis familiaris
gaatgtaagcaaaactgagttcttt

SEQ ID NO: 107384 - DNA, 25 bp, Canis familiaris
gaatgagaatacaaagcgctgtctt

SEQ ID NO: 107385 - DNA, 25 bp, Canis familiaris
gaatggccttaaacctgtttcagct

SEQ ID NO: 107386 - DNA, 25 bp, Canis familiaris
gaaggccaatgctaacttgtcaacc

SEQ ID NO: 107387 - DNA, 25 bp, Canis familiaris
gaagtccaggaagcacagtatactc

SEQ ID NO: 107388 - DNA, 25 bp, Canis familiaris
gaaggcagcaggcgcgcaaattacc

SEQ ID NO: 107389 - DNA, 25 bp, Canis familiaris
gaaggcagcaggcgcgcaaattacc

SEQ ID NO: 107390 - DNA, 25 bp, Canis familiaris
gaaggggctggggtatcttagctcc

SEQ ID NO: 107391 - DNA, 25 bp, Canis familiaris
gaatgtaggctctgttgtcatgaac

SEQ ID NO: 107392 - DNA, 25 bp, Canis familiaris
gaatgtaggcctccagttcataact

SEQ ID NO: 107393 - DNA, 25 bp, Canis familiaris
gaatgcaaggcaggaatgtctcaaa

SEQ ID NO: 107394 - DNA, 25 bp, Canis familiaris
gaatgtagacagcagcttctcccac

SEQ ID NO: 107395 - DNA, 25 bp, Canis familiaris
gaatgtgaacaatggcttctcccaa

SEQ ID NO: 107396 - DNA, 25 bp, Canis familiaris
gaatggtaagatgggctcctcgaca

SEQ ID NO: 107397 - DNA, 25 bp, Canis familiaris
gaatgtgctaaagtgctctctaaaa

SEQ ID NO: 107398 - DNA, 25 bp, Canis familiaris
gaagatgtcaaaatccccagttaaa

SEQ ID NO: 107399 - DNA, 25 bp, Canis familiaris
gaatgaattcaaatcccagctctta

SEQ ID NO: 107400 - DNA, 25 bp, Canis familiaris
gaatgcatgttcattccatcatgcc

SEQ ID NO: 107401 - DNA, 25 bp, Canis familiaris
gaatgaactgtaagcacatcatgct

SEQ ID NO: 107402 - DNA, 25 bp, Canis familiaris
gaatgagaccttaccatctgtgaca

SEQ ID NO: 107403 - DNA, 25 bp, Canis familiaris
gaaggacgtagtggcagtaatcatg

SEQ ID NO: 107404 - DNA, 25 bp, Canis familiaris
gaatggaggccagtggaggccatgc

SEQ ID NO: 107405 - DNA, 25 bp, Canis familiaris
gaatggcaatgctggctgaggtacc

SEQ ID NO: 107406 - DNA, 25 bp, Canis familiaris
gaatgacttcagggtgtgcggccct

SEQ ID NO: 107407 - DNA, 25 bp, Canis familiaris
gaatgagtactgggtggtgtgtgac

SEQ ID NO: 107408 - DNA, 25 bp, Canis familiaris
gaatgcagtaagtcgtgaggatgag

SEQ ID NO: 107409 - DNA, 25 bp, Canis familiaris
gaatgcagttcggtagatgcgtgag

SEQ ID NO: 107410 - DNA, 25 bp, Canis familiaris
gaatgcagattcctagcaagctgtt

SEQ ID NO: 107411 - DNA, 25 bp, Canis familiaris
gaatgtgcatttcagacaggttccc

SEQ ID NO: 107412 - DNA, 25 bp, Canis familiaris
gaagtgtttagctacagttttccca

SEQ ID NO: 107413 - DNA, 25 bp, Canis familiaris
gaaggtgttggtactctgtttccct

SEQ ID NO: 107414 - DNA, 25 bp, Canis familiaris
gaaggctttggtttgcagattttcc

SEQ ID NO: 107415 - DNA, 25 bp, Canis familiaris
gaatggctttttatcaacctgtcgc

SEQ ID NO: 107416 - DNA, 25 bp, Canis familiaris
gaatggtttctttctgcaaactggt

SEQ ID NO: 107417 - DNA, 25 bp, Canis familiaris
gaaggccttattttcaagaagcaat

SEQ ID NO: 107418 - DNA, 25 bp, Canis familiaris
gaagtccctattgtccaaactgaga

SEQ ID NO: 107419 - DNA, 25 bp, Canis familiaris
gaagtaacttcttgtcctagactga

SEQ ID NO: 107420 - DNA, 25 bp, Canis familiaris
gaaggtcactttcgggctgaacaga

SEQ ID NO: 107421 - DNA, 25 bp, Canis familiaris
gaaggtaacctgaggctccaggaca

SEQ ID NO: 107422 - DNA, 25 bp, Canis familiaris
gaaggaactacgagacctgcaggag

SEQ ID NO: 107423 - DNA, 25 bp, Canis familiaris
gaaggcaacattccacgaacatgca

SEQ ID NO: 107424 - DNA, 25 bp, Canis familiaris
gaatgcacataattaactgaactga

SEQ ID NO: 107425 - DNA, 25 bp, Canis familiaris
gaatgacacaaggggctgaagctga

SEQ ID NO: 107426 - DNA, 25 bp, Canis familiaris
gaatggcaccagtgtgtgtacagaa

SEQ ID NO: 107427 - DNA, 25 bp, Canis familiaris
gaatgaatcgcgtgtgcagggtgca

SEQ ID NO: 107428 - DNA, 25 bp, Canis familiaris
gaatgagtccgctccagagctgtac

SEQ ID NO: 107429 - DNA, 25 bp, Canis familiaris
gaatgagtcacttcctgaaggtcat

SEQ ID NO: 107430 - DNA, 25 bp, Canis familiaris
gaatgtctccttcatgaatggagca

SEQ ID NO: 107431 - DNA, 25 bp, Canis familiaris
gaatgttctttactgaatactcaca

SEQ ID NO: 107432 - DNA, 25 bp, Canis familiaris
gaatgtctttaaagacacacacaca

SEQ ID NO: 107433 - DNA, 25 bp, Canis familiaris
gaagtagttcatcccagacacaacc

SEQ ID NO: 107434 - DNA, 25 bp, Canis familiaris
gaagtagttcatcccagacacaacc

SEQ ID NO: 107435 - DNA, 25 bp, Canis familiaris
gaagtagttcatcccagacacaacc

SEQ ID NO: 107436 - DNA, 25 bp, Canis familiaris
gaagtcagttagccctggcaaactc

SEQ ID NO: 107437 - DNA, 25 bp, Canis familiaris
gaatgaaggtggcactggaaggcct

SEQ ID NO: 107438 - DNA, 25 bp, Canis familiaris
gaatgaagggatcgctgctggtcag

SEQ ID NO: 107439 - DNA, 25 bp, Canis familiaris
gaagagtcgttatcagttcaaacct

SEQ ID NO: 107440 - DNA, 25 bp, Canis familiaris
gaaagccttttgcaatctaaaaaca

SEQ ID NO: 107441 - DNA, 25 bp, Canis familiaris
gaacgcctgttctggattaaagacc

SEQ ID NO: 107442 - DNA, 25 bp, Canis familiaris
gaacgacgttcatgtaaggaggatt

SEQ ID NO: 107443 - DNA, 25 bp, Canis familiaris
gaaggctggttctactaactaggat

SEQ ID NO: 107444 - DNA, 25 bp, Canis familiaris
gaatgggggtgcttcttaattgtga

SEQ ID NO: 107445 - DNA, 25 bp, Canis familiaris
gaatgaggtggtttttgttttgtgt

SEQ ID NO: 107446 - DNA, 25 bp, Canis familiaris
gaagaggttcatattttggttgggt

SEQ ID NO: 107447 - DNA, 25 bp, Canis familiaris
gaagtgtttgctgttttacggggag

SEQ ID NO: 107448 - DNA, 25 bp, Canis familiaris
gaaggttttctgttttcccagagtg

SEQ ID NO: 107449 - DNA, 25 bp, Canis familiaris
gaaggtacactatttgttttcaggt

SEQ ID NO: 107450 - DNA, 25 bp, Canis familiaris
gaaggacgcacaacttttcatccag

SEQ ID NO: 107451 - DNA, 25 bp, Canis familiaris
gaaggatcgatttattttctccggg

SEQ ID NO: 107452 - DNA, 25 bp, Canis familiaris
gaatgtgacgtccatcatgttcctt

SEQ ID NO: 107453 - DNA, 25 bp, Canis familiaris
gaatgtgaagctcactgtgagcaat

SEQ ID NO: 107454 - DNA, 25 bp, Canis familiaris
gaatgttcacattcatcttgaagat

SEQ ID NO: 107455 - DNA, 25 bp, Canis familiaris
gaatgtatatgcacacatgtgtaca

SEQ ID NO: 107456 - DNA, 25 bp, Canis familiaris
gaatgtctgtggaacagggagcagg

SEQ ID NO: 107457 - DNA, 25 bp, Canis familiaris
gaatgtctgaggaatccatcacagg

SEQ ID NO: 107458 - DNA, 25 bp, Canis familiaris
gaatgtgctgatatctggcatggag

SEQ ID NO: 107459 - DNA, 25 bp, Canis familiaris
gaatggctcgctgctggatggcaga

SEQ ID NO: 107460 - DNA, 25 bp, Canis familiaris
gaatgtgaccatcatggaggagact

SEQ ID NO: 107461 - DNA, 25 bp, Canis familiaris
gaatgtgcaccatatgtgagttaaa

SEQ ID NO: 107462 - DNA, 25 bp, Canis familiaris
gaatgtcattcagaggatttaatcc

SEQ ID NO: 107463 - DNA, 25 bp, Canis familiaris
gaatgtcttctcaggatgtcataga

SEQ ID NO: 107464 - DNA, 25 bp, Canis familiaris
gaatgatcctccaggagcgcaggcc

SEQ ID NO: 107465 - DNA, 25 bp, Canis familiaris
gaatgtcctcatatgaacgcaggcg

SEQ ID NO: 107466 - DNA, 25 bp, Canis familiaris
gaatgtcgtcttactacgtggcaga

SEQ ID NO: 107467 - DNA, 25 bp, Canis familiaris
gaatgtagcttctttactcctggct

SEQ ID NO: 107468 - DNA, 25 bp, Canis familiaris
gaatgggatcatgttccccttatgt

SEQ ID NO: 107469 - DNA, 25 bp, Canis familiaris
gaatgtgggcaggttttctctttca

SEQ ID NO: 107470 - DNA, 25 bp, Canis familiaris
gaagtggaagcccttgcttgtttcc

SEQ ID NO: 107471 - DNA, 25 bp, Canis familiaris
gaaagaaaccagtgccatgttcatt

SEQ ID NO: 107472 - DNA, 25 bp, Canis familiaris
gaagtggattccttacacatttcat

SEQ ID NO: 107473 - DNA, 25 bp, Canis familiaris
gaatggtttcttgccatctttgcat

SEQ ID NO: 107474 - DNA, 25 bp, Canis familiaris
gaatgtgttctctttcacctaaatc

SEQ ID NO: 107475 - DNA, 25 bp, Canis familiaris
gaatgttttcagatgctccttttct

SEQ ID NO: 107476 - DNA, 25 bp, Canis familiaris
gaaggctttcatgtgccgttttgag

SEQ ID NO: 107477 - DNA, 25 bp, Canis familiaris
gaaggtttcagactccagttctttc

SEQ ID NO: 107478 - DNA, 25 bp, Canis familiaris
gaaggactttacccagtattattgc

SEQ ID NO: 107479 - DNA, 25 bp, Canis familiaris
gaagatgacgtttccctgtttattt

SEQ ID NO: 107480 - DNA, 25 bp, Canis familiaris
gaaggaagccttcttgtttatcttc

SEQ ID NO: 107481 - DNA, 25 bp, Canis familiaris
gaatgggattttccttgcttgttct

SEQ ID NO: 107482 - DNA, 25 bp, Canis familiaris
gaagggtttagtttccagaatctat

SEQ ID NO: 107483 - DNA, 25 bp, Canis familiaris
gaaggggtctaccattcttgcaatt

SEQ ID NO: 107484 - DNA, 25 bp, Canis familiaris
gaaggaggtctattatactctcatt

SEQ ID NO: 107485 - DNA, 25 bp, Canis familiaris
gaatgggtatcttgttcacgatatt

SEQ ID NO: 107486 - DNA, 25 bp, Canis familiaris
gaatgttgtattttgacccaatctg

SEQ ID NO: 107487 - DNA, 25 bp, Canis familiaris
gaatgttgttctctagactggattg

SEQ ID NO: 107488 - DNA, 25 bp, Canis familiaris
gaatgttttctgaagatcactggca

SEQ ID NO: 107489 - DNA, 25 bp, Canis familiaris
gaatgttcttcgcagcaattgtggc

SEQ ID NO: 107490 - DNA, 25 bp, Canis familiaris
gaatgtctgccttcggcattagggc

SEQ ID NO: 107491 - DNA, 25 bp, Canis familiaris
gaatgtctgcccttgtatataagcc

SEQ ID NO: 107492 - DNA, 25 bp, Canis familiaris
gaatgtctctacttaaagacacctt

SEQ ID NO: 107493 - DNA, 25 bp, Canis familiaris
gacatgtcttattaaggaaacgttc

SEQ ID NO: 107494 - DNA, 25 bp, Canis familiaris
gaatgttttccacgtataccgtata

SEQ ID NO: 107495 - DNA, 25 bp, Canis familiaris
gaatgtttcccacttgatatcactt

SEQ ID NO: 107496 - DNA, 25 bp, Canis familiaris
gaatggttctcttgttgaaatccga

SEQ ID NO: 107497 - DNA, 25 bp, Canis familiaris
gaagggtgtttgataaatacatgac

SEQ ID NO: 107498 - DNA, 25 bp, Canis familiaris
gaaggggatttgctcactcattcca

SEQ ID NO: 107499 - DNA, 25 bp, Canis familiaris
gaagggtgtacaaaccacttggcaa

SEQ ID NO: 107500 - DNA, 25 bp, Canis familiaris
gaagggctgaacacaacagtctggg

SEQ ID NO: 107501 - DNA, 25 bp, Canis familiaris
gaagtgttaactttggcatttgggc

SEQ ID NO: 107502 - DNA, 25 bp, Canis familiaris
gaatgtgcatattttcattgacttt

SEQ ID NO: 107503 - DNA, 25 bp, Canis familiaris
gaatggcatatccttgttactgtga

SEQ ID NO: 107504 - DNA, 25 bp, Canis familiaris
gaatggcatatccttgttactgtga

SEQ ID NO: 107505 - DNA, 25 bp, Canis familiaris
gaatggcatatccttgttactgtga

SEQ ID NO: 107506 - DNA, 25 bp, Canis familiaris
gaatggcatatccttgttactgtga

SEQ ID NO: 107507 - DNA, 25 bp, Canis familiaris
gaatgtatacttggtgtcagtgctg

SEQ ID NO: 107508 - DNA, 25 bp, Canis familiaris
gaatgttcatctacttatagtgtgt

SEQ ID NO: 107509 - DNA, 25 bp, Canis familiaris
gaatgatgtgctttctgccaagtgg

SEQ ID NO: 107510 - DNA, 25 bp, Canis familiaris
gaagtggatgatgagcgcaactgcg

SEQ ID NO: 107511 - DNA, 25 bp, Canis familiaris
gaatgttgcattgactgcctctgct

SEQ ID NO: 107512 - DNA, 25 bp, Canis familiaris
gaatgttctctggaagcccatgctg

SEQ ID NO: 107513 - DNA, 25 bp, Canis familiaris
gaatgtggatctggaagggctggat

SEQ ID NO: 107514 - DNA, 25 bp, Canis familiaris
gaaggcgccatcagagcggtggatc

SEQ ID NO: 107515 - DNA, 25 bp, Canis familiaris
gaaggctgccctcagtgggagttac

SEQ ID NO: 107516 - DNA, 25 bp, Canis familiaris
gaatggagccctttctgggagttcc

SEQ ID NO: 107517 - DNA, 25 bp, Canis familiaris
gaaggacctgtatctggaacatgtt

SEQ ID NO: 107518 - DNA, 25 bp, Canis familiaris
gaatggagtccatgagctggtgaag

SEQ ID NO: 107519 - DNA, 25 bp, Canis familiaris
gaatggtctccatggggatatacca

SEQ ID NO: 107520 - DNA, 25 bp, Canis familiaris
gaatggttcccacccagaacattca

SEQ ID NO: 107521 - DNA, 25 bp, Canis familiaris
gaatggttccatcatcccagatata

SEQ ID NO: 107522 - DNA, 25 bp, Canis familiaris
gaaggctattcatttccgagatcat

SEQ ID NO: 107523 - DNA, 25 bp, Canis familiaris
gaaggcttcttattctgcagagtac

SEQ ID NO: 107524 - DNA, 25 bp, Canis familiaris
gaaggcattttgctctgccagtgtt

SEQ ID NO: 107525 - DNA, 25 bp, Canis familiaris
gaaggcatttatggtcattactgaa

SEQ ID NO: 107526 - DNA, 25 bp, Canis familiaris
gaatggatttcaagtttcactgcat

SEQ ID NO: 107527 - DNA, 25 bp, Canis familiaris
gaatgtgttgtcccaaatgcctgtt

SEQ ID NO: 107528 - DNA, 25 bp, Canis familiaris
gaatgtgttgtccgaaatgcctgtt

SEQ ID NO: 107529 - DNA, 25 bp, Canis familiaris
gaatgtgttgtccaaaatgcctgtt

SEQ ID NO: 107530 - DNA, 25 bp, Canis familiaris
gaaggttgaccagaatggcttctta

SEQ ID NO: 107531 - DNA, 25 bp, Canis familiaris
gaaggcctaccaggacatggacatt

SEQ ID NO: 107532 - DNA, 25 bp, Canis familiaris
gaaggacaatcctggcacgactact

SEQ ID NO: 107533 - DNA, 25 bp, Canis familiaris
gaatgtagagagcccggtcggtact

SEQ ID NO: 107534 - DNA, 25 bp, Canis familiaris
gaatgtataatcccgatgttagtat

SEQ ID NO: 107535 - DNA, 25 bp, Canis familiaris
gaatgatgataaaccctttgaaata

SEQ ID NO: 107536 - DNA, 25 bp, Canis familiaris
gaatgtgagaaacccttgggaccga

SEQ ID NO: 107537 - DNA, 25 bp, Canis familiaris
gaaggcatgaacctgacctggtacc

SEQ ID NO: 107538 - DNA, 25 bp, Canis familiaris
gaagattatcacctgaacgggaccc

SEQ ID NO: 107539 - DNA, 25 bp, Canis familiaris
gaatgagtttctcactcgggagctc

SEQ ID NO: 107540 - DNA, 25 bp, Canis familiaris
gaatggggacattactctggggcca

SEQ ID NO: 107541 - DNA, 25 bp, Canis familiaris
gaaggcacagaaggactgctgggag

SEQ ID NO: 107542 - DNA, 25 bp, Canis familiaris
gaaggcgaacagtggctgggcgaga

SEQ ID NO: 107543 - DNA, 25 bp, Canis familiaris
gaaggccggcagtgatggggccaag

SEQ ID NO: 107544 - DNA, 25 bp, Canis familiaris
gaatggtcagaccttgagcagggcc

SEQ ID NO: 107545 - DNA, 25 bp, Canis familiaris
gaatgaggagagtgtgagagtgtgt

SEQ ID NO: 107546 - DNA, 25 bp, Canis familiaris
gaatgggcatggggggagagctgga

SEQ ID NO: 107547 - DNA, 25 bp, Canis familiaris
gaatgggcggactccagaagatgag

SEQ ID NO: 107548 - DNA, 25 bp, Canis familiaris
gaatggcgagtactaccaggagagt

SEQ ID NO: 107549 - DNA, 25 bp, Canis familiaris
gaatggcggtatcacttggagttca

SEQ ID NO: 107550 - DNA, 25 bp, Canis familiaris
gaaggtacttggacttgtagcctca

SEQ ID NO: 107551 - DNA, 25 bp, Canis familiaris
gaaggctagtgctgtttaggccagt

SEQ ID NO: 107552 - DNA, 25 bp, Canis familiaris
gaaggctggccaagggctaggcgtg

SEQ ID NO: 107553 - DNA, 25 bp, Canis familiaris
gaaggtggggaccctatgggagcca

SEQ ID NO: 107554 - DNA, 25 bp, Canis familiaris
gaatggtcagtgtacagctttgggg

SEQ ID NO: 107555 - DNA, 25 bp, Canis familiaris
gaatgagtgagttactgctctatga

SEQ ID NO: 107556 - DNA, 25 bp, Canis familiaris
gaatgttgcagttctcatctcatat

SEQ ID NO: 107557 - DNA, 25 bp, Canis familiaris
gaatgttcagattcctgacacttta

SEQ ID NO: 107558 - DNA, 25 bp, Canis familiaris
gaatgtgctctttcactgactttgt

SEQ ID NO: 107559 - DNA, 25 bp, Canis familiaris
gaatgttctgattacttgtttctca

SEQ ID NO: 107560 - DNA, 25 bp, Canis familiaris
gaatggtgctattttggactttcaa

SEQ ID NO: 107561 - DNA, 25 bp, Canis familiaris
gaaggtcatattctagactttagtc

SEQ ID NO: 107562 - DNA, 25 bp, Canis familiaris
gaaggttttttattcttatatggca

SEQ ID NO: 107563 - DNA, 25 bp, Canis familiaris
gaatggtttttcaaagcatgtcaaa

SEQ ID NO: 107564 - DNA, 25 bp, Canis familiaris
gaatggttttttggcgatgagaatg

SEQ ID NO: 107565 - DNA, 25 bp, Canis familiaris
gaatgtgtcttttctactctacacg

SEQ ID NO: 107566 - DNA, 25 bp, Canis familiaris
gaatgttttttcagtgctactatgt

SEQ ID NO: 107567 - DNA, 25 bp, Canis familiaris
gaatggtgtttacagtgctgcaaat

SEQ ID NO: 107568 - DNA, 25 bp, Canis familiaris
gaaggcgttgtataggcccacatca

SEQ ID NO: 107569 - DNA, 25 bp, Canis familiaris
gaatggcgttgcgtagagtcctaga

SEQ ID NO: 107570 - DNA, 25 bp, Canis familiaris
gaatggccaatggtcaactcccatg

SEQ ID NO: 107571 - DNA, 25 bp, Canis familiaris
gaatggtcaagtaccaccttgcaga

SEQ ID NO: 107572 - DNA, 25 bp, Canis familiaris
gaaggataagccacgacgggaaacg

SEQ ID NO: 107573 - DNA, 25 bp, Canis familiaris
gaatgttaagcctcgacacgtgtaa

SEQ ID NO: 107574 - DNA, 25 bp, Canis familiaris
gaagaccaggtctctgaccaggtca

SEQ ID NO: 107575 - DNA, 25 bp, Canis familiaris
gaaggctcggtcacagatgccaggc

SEQ ID NO: 107576 - DNA, 25 bp, Canis familiaris
gaatggctagaaagtcaccaagatg

SEQ ID NO: 107577 - DNA, 25 bp, Canis familiaris
gaatgtctagagcttcaccaacagg

SEQ ID NO: 107578 - DNA, 25 bp, Canis familiaris
gaagtcacatgaggttgtccaaagg

SEQ ID NO: 107579 - DNA, 25 bp, Canis familiaris
gaaggccatgactcagtccttaggt

SEQ ID NO: 107580 - DNA, 25 bp, Canis familiaris
gaatgtggctgagcgagcccttgag

SEQ ID NO: 107581 - DNA, 25 bp, Canis familiaris
gaatgttgtgagaggcacttctgtg

SEQ ID NO: 107582 - DNA, 25 bp, Canis familiaris
gaagactgtcacagagcttccctta

SEQ ID NO: 107583 - DNA, 25 bp, Canis familiaris
gaagtcttacattagatccatcctt

SEQ ID NO: 107584 - DNA, 25 bp, Canis familiaris
gaatgtttataaggaccacccttct

SEQ ID NO: 107585 - DNA, 25 bp, Canis familiaris
gaatgttgggacgaggaccacctct

SEQ ID NO: 107586 - DNA, 25 bp, Canis familiaris
gaaggctagaaggaagtccaccttt

SEQ ID NO: 107587 - DNA, 25 bp, Canis familiaris
gaaggaaaattgattcacctgtttt

SEQ ID NO: 107588 - DNA, 25 bp, Canis familiaris
gaaggaacaggtgctgtgcctctgt

SEQ ID NO: 107589 - DNA, 25 bp, Canis familiaris
gaagagatacggggctcgtcttctg

SEQ ID NO: 107590 - DNA, 25 bp, Canis familiaris
gaatgtgtacgttcctctgtatgtc

SEQ ID NO: 107591 - DNA, 25 bp, Canis familiaris
gaatgtgaaccatcactcgatggct

SEQ ID NO: 107592 - DNA, 25 bp, Canis familiaris
gaatgttgtctatatcttgattgct

SEQ ID NO: 107593 - DNA, 25 bp, Canis familiaris
gaatgtttcttgtgctctatactag

SEQ ID NO: 107594 - DNA, 25 bp, Canis familiaris
gaatgtaacttggtgcacccactat

SEQ ID NO: 107595 - DNA, 25 bp, Canis familiaris
gaatgggactgtgtgcaagcccggg

SEQ ID NO: 107596 - DNA, 25 bp, Canis familiaris
gaatgggaggtggtatggaggcggc

SEQ ID NO: 107597 - DNA, 25 bp, Canis familiaris
gaaggcaggaggaggagcacctggt

SEQ ID NO: 107598 - DNA, 25 bp, Canis familiaris
gaaggagctgggaagattgctacag

SEQ ID NO: 107599 - DNA, 25 bp, Canis familiaris
gaaggatccagtagcaattgtgaaa

SEQ ID NO: 107600 - DNA, 25 bp, Canis familiaris
gaaggatccagctgatcaggtgatc

SEQ ID NO: 107601 - DNA, 25 bp, Canis familiaris
gaaggcatcacagagctcatactac

SEQ ID NO: 107602 - DNA, 25 bp, Canis familiaris
gaatggagacagaagctctcgtcat

SEQ ID NO: 107603 - DNA, 25 bp, Canis familiaris
gaatggcgatgaacactctctgagc

SEQ ID NO: 107604 - DNA, 25 bp, Canis familiaris
gaatgggctgatatctatcttccaa

SEQ ID NO: 107605 - DNA, 25 bp, Canis familiaris
gaatgggatgattttcttcatctca

SEQ ID NO: 107606 - DNA, 25 bp, Canis familiaris
gaagggaagttttgtcactcctaag

SEQ ID NO: 107607 - DNA, 25 bp, Canis familiaris
gaagggagttttatcaggctgtaag

SEQ ID NO: 107608 - DNA, 25 bp, Canis familiaris
gaatggtcatgcttttttcagggac

SEQ ID NO: 107609 - DNA, 25 bp, Canis familiaris
gaaggcctgagttttagatatggaa

SEQ ID NO: 107610 - DNA, 25 bp, Canis familiaris
gaaggtccattctgtatactggcat

SEQ ID NO: 107611 - DNA, 25 bp, Canis familiaris
gaaggtcaccgatctacctagaccc

SEQ ID NO: 107612 - DNA, 25 bp, Canis familiaris
gaaggcatacccaactaccatggat

SEQ ID NO: 107613 - DNA, 25 bp, Canis familiaris
gaaggcatatctcaagtccctggac

SEQ ID NO: 107614 - DNA, 25 bp, Canis familiaris
gaatggcttcttaagtcccagggtt

SEQ ID NO: 107615 - DNA, 25 bp, Canis familiaris
gaaggcttttctagaccgagtggac

SEQ ID NO: 107616 - DNA, 25 bp, Canis familiaris
gaaggcaatttctggcatggagggt

SEQ ID NO: 107617 - DNA, 25 bp, Canis familiaris
gaatggaaactgtgtagcttggtgg

SEQ ID NO: 107618 - DNA, 25 bp, Canis familiaris
gaatggaaaggggatacgtggtgcg

SEQ ID NO: 107619 - DNA, 25 bp, Canis familiaris
gaagtgcccggagaacctgggcttc

SEQ ID NO: 107620 - DNA, 25 bp, Canis familiaris
gaaggcggggaatcacccagaatct

SEQ ID NO: 107621 - DNA, 25 bp, Canis familiaris
gaaggacggggatcccattgaatca

SEQ ID NO: 107622 - DNA, 25 bp, Canis familiaris
gaaggctgcgggaaacgcttttcac

SEQ ID NO: 107623 - DNA, 25 bp, Canis familiaris
gaaggctggggatagtccattccca

SEQ ID NO: 107624 - DNA, 25 bp, Canis familiaris
gaagggggatgctcagttctgacct

SEQ ID NO: 107625 - DNA, 25 bp, Canis familiaris
gaaggagaggactcgtgtctgcaac

SEQ ID NO: 107626 - DNA, 25 bp, Canis familiaris
gaatgggatgggttcgtggatcaag

SEQ ID NO: 107627 - DNA, 25 bp, Canis familiaris
gaatggttggcacttcgtgttctgg

SEQ ID NO: 107628 - DNA, 25 bp, Canis familiaris
gaaggactggtgcattgcgctttgg

SEQ ID NO: 107629 - DNA, 25 bp, Canis familiaris
gaaggagtgagggattacttaaggt

SEQ ID NO: 107630 - DNA, 25 bp, Canis familiaris
gaaaggtgacctatccaggaaggat

SEQ ID NO: 107631 - DNA, 25 bp, Canis familiaris
gaaggggacccttctcaggagaaag

SEQ ID NO: 107632 - DNA, 25 bp, Canis familiaris
gaaggggaagtttggcagggaggca

SEQ ID NO: 107633 - DNA, 25 bp, Canis familiaris
gaagtgggaaggtgatcaaggctgg

SEQ ID NO: 107634 - DNA, 25 bp, Canis familiaris
gaagggaacagggatcaagggctag

SEQ ID NO: 107635 - DNA, 25 bp, Canis familiaris
gaagtcaaaaggatcatgaagccta

SEQ ID NO: 107636 - DNA, 25 bp, Canis familiaris
gaagtgaaacggctggggcctgacc

SEQ ID NO: 107637 - DNA, 25 bp, Canis familiaris
gaatggaccaggcagggaggcctag

SEQ ID NO: 107638 - DNA, 25 bp, Canis familiaris
gagcggatccggcattggattggct

SEQ ID NO: 107639 - DNA, 25 bp, Canis familiaris
gacgagtacggtctggacaacttcg

SEQ ID NO: 107640 - DNA, 25 bp, Canis familiaris
gaagaggccggacatggccaaaccg

SEQ ID NO: 107641 - DNA, 25 bp, Canis familiaris
gaaggactaactctggccaaactgt

SEQ ID NO: 107642 - DNA, 25 bp, Canis familiaris
gaaggttattccttgtccaaccatc

SEQ ID NO: 107643 - DNA, 25 bp, Canis familiaris
gaagtgaccactctatttaaccagc

SEQ ID NO: 107644 - DNA, 25 bp, Canis familiaris
gaaggggttgcagatcttgaacctg

SEQ ID NO: 107645 - DNA, 25 bp, Canis familiaris
gaaggtggggagcgtcagccaccgt

SEQ ID NO: 107646 - DNA, 25 bp, Canis familiaris
gaaggggggcacagggtgactcagt

SEQ ID NO: 107647 - DNA, 25 bp, Canis familiaris
gaaggggagggatgcgtgggaagtg

SEQ ID NO: 107648 - DNA, 25 bp, Canis familiaris
gaatggcaggcaggccacgtgtgtg

SEQ ID NO: 107649 - DNA, 25 bp, Canis familiaris
gaatggggacaccctatgtggccag

SEQ ID NO: 107650 - DNA, 25 bp, Canis familiaris
gaatgtgggaactgctttgggcgcc

SEQ ID NO: 107651 - DNA, 25 bp, Canis familiaris
gaatggggagccccatttctggccc

SEQ ID NO: 107652 - DNA, 25 bp, Canis familiaris
gaaggaggagccctcctttgagccc

SEQ ID NO: 107653 - DNA, 25 bp, Canis familiaris
gaaggacgggtccttttcagatccg

SEQ ID NO: 107654 - DNA, 25 bp, Canis familiaris
gaaggggaggtgcttcctcagttcg

SEQ ID NO: 107655 - DNA, 25 bp, Canis familiaris
gaagggagtggttttcctgctgttg

SEQ ID NO: 107656 - DNA, 25 bp, Canis familiaris
gaaggggtgggatttgcctatgggc

SEQ ID NO: 107657 - DNA, 25 bp, Canis familiaris
gaaggttgtggatggtgccaatcgg

SEQ ID NO: 107658 - DNA, 25 bp, Canis familiaris
gaagatttgggatccatctgaatgg

SEQ ID NO: 107659 - DNA, 25 bp, Canis familiaris
gaagtcttggtatctgcctattgcc

SEQ ID NO: 107660 - DNA, 25 bp, Canis familiaris
gaagtcttggaaatgccaggggccg

SEQ ID NO: 107661 - DNA, 25 bp, Canis familiaris
gaagtcccgaattcagcgtgggtcc

SEQ ID NO: 107662 - DNA, 25 bp, Canis familiaris
gaaggcctcaaattccattggagac

SEQ ID NO: 107663 - DNA, 25 bp, Canis familiaris
gaaggcgccagaagtccatgttgag

SEQ ID NO: 107664 - DNA, 25 bp, Canis familiaris
gaaggctgtgagcagttcatagctg

SEQ ID NO: 107665 - DNA, 25 bp, Canis familiaris
gaaggctgcaggaaggtcagacata

SEQ ID NO: 107666 - DNA, 25 bp, Canis familiaris
gaaggctgctgcctgatgcagatcg

SEQ ID NO: 107667 - DNA, 25 bp, Canis familiaris
gaaggccattgaatgcgacgagtgt

SEQ ID NO: 107668 - DNA, 25 bp, Canis familiaris
gaaggccatagttgctgaagaggat

SEQ ID NO: 107669 - DNA, 25 bp, Canis familiaris
gaaggacagaggccagataagagta

SEQ ID NO: 107670 - DNA, 25 bp, Canis familiaris
gaagggcagggtcaaggatctacac

SEQ ID NO: 107671 - DNA, 25 bp, Canis familiaris
gaaggagggtcaaaaggagaacctg

SEQ ID NO: 107672 - DNA, 25 bp, Canis familiaris
gaagggggaaagagaactactcagg

SEQ ID NO: 107673 - DNA, 25 bp, Canis familiaris
gaagggggaaagccaagcccaagca

SEQ ID NO: 107674 - DNA, 25 bp, Canis familiaris
gaagggggaccagaatgtgcgctat

SEQ ID NO: 107675 - DNA, 25 bp, Canis familiaris
gaaggagctggtgcacgatgatgag

SEQ ID NO: 107676 - DNA, 25 bp, Canis familiaris
gaaggcggggagcctgatgatgtgg

SEQ ID NO: 107677 - DNA, 25 bp, Canis familiaris
gaagtctaggaaggccagagtggtg

SEQ ID NO: 107678 - DNA, 25 bp, Canis familiaris
gaatgtctaggagtggaatggtctg

SEQ ID NO: 107679 - DNA, 25 bp, Canis familiaris
gaatgtcgaggaggggcatggaaca

SEQ ID NO: 107680 - DNA, 25 bp, Canis familiaris
gaaggccatggaggtgcccgatatc

SEQ ID NO: 107681 - DNA, 25 bp, Canis familiaris
gaaggccatcaagctggcagccaat

SEQ ID NO: 107682 - DNA, 25 bp, Canis familiaris
gaaggccgacagactgggcaagagt

SEQ ID NO: 107683 - DNA, 25 bp, Canis familiaris
gaaggcctggagaggagagcagagc

SEQ ID NO: 107684 - DNA, 25 bp, Canis familiaris
gaaggcctgtcagcagcgggaaggt

SEQ ID NO: 107685 - DNA, 25 bp, Canis familiaris
gaatggttgtcaccagagcctgagg

SEQ ID NO: 107686 - DNA, 25 bp, Canis familiaris
gaatggatttcctagagctgtggca

SEQ ID NO: 107687 - DNA, 25 bp, Canis familiaris
gaaggctttcactgtgtttgacgtc

SEQ ID NO: 107688 - DNA, 25 bp, Canis familiaris
gaaggctttcgctgtggatgatgag

SEQ ID NO: 107689 - DNA, 25 bp, Canis familiaris
gaaggctctgctggattgggcaagg

SEQ ID NO: 107690 - DNA, 25 bp, Canis familiaris
gaatggctcatcagaggtggaagtg

SEQ ID NO: 107691 - DNA, 25 bp, Canis familiaris
gaaggctctcacgggggcagagttc

SEQ ID NO: 107692 - DNA, 25 bp, Canis familiaris
gaaggtcaccaggggccggtgactg

SEQ ID NO: 107693 - DNA, 25 bp, Canis familiaris
gaaggcctccaggaagccaggggcc

SEQ ID NO: 107694 - DNA, 25 bp, Canis familiaris
gaaggcatcttcatgaagcccagtg

SEQ ID NO: 107695 - DNA, 25 bp, Canis familiaris
gaaggcatcttttggagccactctc

SEQ ID NO: 107696 - DNA, 25 bp, Canis familiaris
gaatgtgctttgtatagagacagtt

SEQ ID NO: 107697 - DNA, 25 bp, Canis familiaris
gaaggctccggatatgagcagctct

SEQ ID NO: 107698 - DNA, 25 bp, Canis familiaris
gaaggcccttggttgaggtgtctgt

SEQ ID NO: 107699 - DNA, 25 bp, Canis familiaris
gaaggctacttcgcagatggtgttt

SEQ ID NO: 107700 - DNA, 25 bp, Canis familiaris
gaagtggcaggtggacaaggctggt

SEQ ID NO: 107701 - DNA, 25 bp, Canis familiaris
gaagtggctcggggctagttggcca

SEQ ID NO: 107702 - DNA, 25 bp, Canis familiaris
gaagggcccggtgagctagggaagc

SEQ ID NO: 107703 - DNA, 25 bp, Canis familiaris
gaaggacccggtgaagatcgtgcgc

SEQ ID NO: 107704 - DNA, 25 bp, Canis familiaris
gaaggactccggatagacttggcca

SEQ ID NO: 107705 - DNA, 25 bp, Canis familiaris
gaaggactccggaaaggccaagaca

SEQ ID NO: 107706 - DNA, 25 bp, Canis familiaris
gaaggaagcccgaatgaccctagaa

SEQ ID NO: 107707 - DNA, 25 bp, Canis familiaris
gaaggaagccggacgagggcttaat

SEQ ID NO: 107708 - DNA, 25 bp, Canis familiaris
gaaggttccaaagggggctcattgt

SEQ ID NO: 107709 - DNA, 25 bp, Canis familiaris
gaaggcctccaaagcgaggagtttg

SEQ ID NO: 107710 - DNA, 25 bp, Canis familiaris
gaaggtcatcgcaacgaaggttttg

SEQ ID NO: 107711 - DNA, 25 bp, Canis familiaris
gaagttctaccaggaaattgattag

SEQ ID NO: 107712 - DNA, 25 bp, Canis familiaris
gaagttctcacaggcagcaaactgg

SEQ ID NO: 107713 - DNA, 25 bp, Canis familiaris
gaagttccacaggaccagaattcgg

SEQ ID NO: 107714 - DNA, 25 bp, Canis familiaris
gaagtcctggaggaccagggtcagc

SEQ ID NO: 107715 - DNA, 25 bp, Canis familiaris
gaagtcacgggtcatcagaagctag

SEQ ID NO: 107716 - DNA, 25 bp, Canis familiaris
gaaggtcggtggcgagatgagctgg

SEQ ID NO: 107717 - DNA, 25 bp, Canis familiaris
gaagggccgcgggggagagtgcggg

SEQ ID NO: 107718 - DNA, 25 bp, Canis familiaris
gaagggaaggtggcgggagctctga

SEQ ID NO: 107719 - DNA, 25 bp, Canis familiaris
gaaggaaatctttagaggaggctga

SEQ ID NO: 107720 - DNA, 25 bp, Canis familiaris
gaagggaatccattgggaggggcaa

SEQ ID NO: 107721 - DNA, 25 bp, Canis familiaris
gaatggggaaagaggaggggcagaa

SEQ ID NO: 107722 - DNA, 25 bp, Canis familiaris
gaagggtgtaagaagaaggagtgag

SEQ ID NO: 107723 - DNA, 25 bp, Canis familiaris
gaatgggtaacaatggtgaggaagg

SEQ ID NO: 107724 - DNA, 25 bp, Canis familiaris
gaaggcccaaatcgaggagctcaag

SEQ ID NO: 107725 - DNA, 25 bp, Canis familiaris
gaaggcccagaccgagcggaaaagt

SEQ ID NO: 107726 - DNA, 25 bp, Canis familiaris
gaaggtgtaaagccagggaagcaag

SEQ ID NO: 107727 - DNA, 25 bp, Canis familiaris
gaaggactccaggtaggagcaacaa

SEQ ID NO: 107728 - DNA, 25 bp, Canis familiaris
gaaggagcccaggtcaggatggagg

SEQ ID NO: 107729 - DNA, 25 bp, Canis familiaris
gaaggacctagttcactatggttgg

SEQ ID NO: 107730 - DNA, 25 bp, Canis familiaris
gaatggacccaatttctatgtgatt

SEQ ID NO: 107731 - DNA, 25 bp, Canis familiaris
gaaggcctgccaagatatttgtgag

SEQ ID NO: 107732 - DNA, 25 bp, Canis familiaris
gaagtgcctggaacagccttgtcaa

SEQ ID NO: 107733 - DNA, 25 bp, Canis familiaris
gaatgtggatggagcactgcttgtc

SEQ ID NO: 107734 - DNA, 25 bp, Canis familiaris
gaatggtgcataaccctgcatttcc

SEQ ID NO: 107735 - DNA, 25 bp, Canis familiaris
gaatgggcaggaccttgtattctcc

SEQ ID NO: 107736 - DNA, 25 bp, Canis familiaris
gaatgtggcaggtgtttctcttcag

SEQ ID NO: 107737 - DNA, 25 bp, Canis familiaris
gaaggcctgagtaattattctatca

SEQ ID NO: 107738 - DNA, 25 bp, Canis familiaris
gaatggagatgactgacttttctta

SEQ ID NO: 107739 - DNA, 25 bp, Canis familiaris
gaatggctggaatgctttttcagag

SEQ ID NO: 107740 - DNA, 25 bp, Canis familiaris
gaaggctcttaggttgtttcaggga

SEQ ID NO: 107741 - DNA, 25 bp, Canis familiaris
gaatggctccgtcgtgattgttcgg

SEQ ID NO: 107742 - DNA, 25 bp, Canis familiaris
gaatgtggtctgtagtgatcctccg

SEQ ID NO: 107743 - DNA, 25 bp, Canis familiaris
gaatggtgtctgggagcatccgggt

SEQ ID NO: 107744 - DNA, 25 bp, Canis familiaris
gaaggaggtgctggagcaggcgggc

SEQ ID NO: 107745 - DNA, 25 bp, Canis familiaris
gaaggtagtgctggatggggaggaa

SEQ ID NO: 107746 - DNA, 25 bp, Canis familiaris
gaaggctttctggaggagagagaga

SEQ ID NO: 107747 - DNA, 25 bp, Canis familiaris
gaaggctagcctggcggagagggac

SEQ ID NO: 107748 - DNA, 25 bp, Canis familiaris
gaagggatcctgggtcaaggtgccc

SEQ ID NO: 107749 - DNA, 25 bp, Canis familiaris
gaagggatccgtgtacggcttgcat

SEQ ID NO: 107750 - DNA, 25 bp, Canis familiaris
gaagaaccctgtaatacccgtcatt

SEQ ID NO: 107751 - DNA, 25 bp, Canis familiaris
gaagagtccaggtgaactccgaatt

SEQ ID NO: 107752 - DNA, 25 bp, Canis familiaris
gaaggtgatcagtgttttccgactt

SEQ ID NO: 107753 - DNA, 25 bp, Canis familiaris
gaaggtgccaatagcatcttctccg

SEQ ID NO: 107754 - DNA, 25 bp, Canis familiaris
gaagtagccaagaagagcctccgcc

SEQ ID NO: 107755 - DNA, 25 bp, Canis familiaris
gaaggaggacgaagaggcccctctt

SEQ ID NO: 107756 - DNA, 25 bp, Canis familiaris
gaagtagagactcaaggtcctttgg

SEQ ID NO: 107757 - DNA, 25 bp, Canis familiaris
gaagtcaggaggtgaagtcattctt

SEQ ID NO: 107758 - DNA, 25 bp, Canis familiaris
gaaggaggagtggtggcaggttgat

SEQ ID NO: 107759 - DNA, 25 bp, Canis familiaris
gaatggaaaggtgacagtgtgtgat

SEQ ID NO: 107760 - DNA, 25 bp, Canis familiaris
gaaggaaagtggaacatgatcatgg

SEQ ID NO: 107761 - DNA, 25 bp, Canis familiaris
gaaggtaatcgcgaagcatatagct

SEQ ID NO: 107762 - DNA, 25 bp, Canis familiaris
gaaggatgaatcccaagagggcaag

SEQ ID NO: 107763 - DNA, 25 bp, Canis familiaris
gaagatgggacgtcgaaggtggaga

SEQ ID NO: 107764 - DNA, 25 bp, Canis familiaris
gaaggggcagagggacaaagagaat

SEQ ID NO: 107765 - DNA, 25 bp, Canis familiaris
gaagtgtacccccaaaatgatgaat

SEQ ID NO: 107766 - DNA, 25 bp, Canis familiaris
gaagtgggccaaggccacaaggact

SEQ ID NO: 107767 - DNA, 25 bp, Canis familiaris
gaaggaggccaagaaggacgagccc

SEQ ID NO: 107768 - DNA, 25 bp, Canis familiaris
gacggaggcccatgaaagaaaatgt

SEQ ID NO: 107769 - DNA, 25 bp, Canis familiaris
gaagggcaccactaaaaaactacat

SEQ ID NO: 107770 - DNA, 25 bp, Canis familiaris
gaagggaagcctgaaggaatccggg

SEQ ID NO: 107771 - DNA, 25 bp, Canis familiaris
gaagtggtccaaaaactgaatcccg

SEQ ID NO: 107772 - DNA, 25 bp, Canis familiaris
gaaggctgtccacaagatctgccac

SEQ ID NO: 107773 - DNA, 25 bp, Canis familiaris
gaaggctcttcaggagtatcgccac

SEQ ID NO: 107774 - DNA, 25 bp, Canis familiaris
gaaggctcttcaggagtatcgccca

SEQ ID NO: 107775 - DNA, 25 bp, Canis familiaris
gaaggctcttcaggagtatcgccca

SEQ ID NO: 107776 - DNA, 25 bp, Canis familiaris
gaaggctcttcaggagtatcgccta

SEQ ID NO: 107777 - DNA, 25 bp, Canis familiaris
gaagtgctttgcagcttatccttac

SEQ ID NO: 107778 - DNA, 25 bp, Canis familiaris
gaatggcaaatccctgttactgtga

SEQ ID NO: 107779 - DNA, 25 bp, Canis familiaris
gaatggcaaatccttgttactgtga

SEQ ID NO: 107780 - DNA, 25 bp, Canis familiaris
gaatggcatataccttgtgtactgt

SEQ ID NO: 107781 - DNA, 25 bp, Canis familiaris
gaaggcttaacatctgtacttaaca

SEQ ID NO: 107782 - DNA, 25 bp, Canis familiaris
gaatggatcatatgaggcatgtaat

SEQ ID NO: 107783 - DNA, 25 bp, Canis familiaris
gaatggctcattaaatcagttatgg

SEQ ID NO: 107784 - DNA, 25 bp, Canis familiaris
gaaggccattagaaagcttttgttt

SEQ ID NO: 107785 - DNA, 25 bp, Canis familiaris
gaaggccattagaagctttgttttc

SEQ ID NO: 107786 - DNA, 25 bp, Canis familiaris
gaaggccattagaagctttgttttc

SEQ ID NO: 107787 - DNA, 25 bp, Canis familiaris
gaaggtcacggggcttgtgttgtct

SEQ ID NO: 107788 - DNA, 25 bp, Canis familiaris
gaaggtggcggggcaggatggttct

SEQ ID NO: 107789 - DNA, 25 bp, Canis familiaris
gaaggtagcggcctgggtggagtgt

SEQ ID NO: 107790 - DNA, 25 bp, Canis familiaris
gaaggtcaggaggtggggtggtttg

SEQ ID NO: 107791 - DNA, 25 bp, Canis familiaris
gaaggcttggagggtgaggggtggg

SEQ ID NO: 107792 - DNA, 25 bp, Canis familiaris
gaaggttggagaggtgggtgggact

SEQ ID NO: 107793 - DNA, 25 bp, Canis familiaris
gaatggttagaatttcctgtgggaa

SEQ ID NO: 107794 - DNA, 25 bp, Canis familiaris
gaaggagctggagtcattccgggga

SEQ ID NO: 107795 - DNA, 25 bp, Canis familiaris
gaaggacctgagtactcctgctcag

SEQ ID NO: 107796 - DNA, 25 bp, Canis familiaris
gaatggatcctgaactccttagcat

SEQ ID NO: 107797 - DNA, 25 bp, Canis familiaris
gaaggcatgtctcaatcactggagt

SEQ ID NO: 107798 - DNA, 25 bp, Canis familiaris
gaaggctgagcccaatttgcaagtt

SEQ ID NO: 107799 - DNA, 25 bp, Canis familiaris
gaaggcatgcagccataacttactt

SEQ ID NO: 107800 - DNA, 25 bp, Canis familiaris
gaatggctcagcttaactgttcttt

SEQ ID NO: 107801 - DNA, 25 bp, Canis familiaris
gaatggatattttacttggctttag

SEQ ID NO: 107802 - DNA, 25 bp, Canis familiaris
gaaggttatttgccagggtttcact

SEQ ID NO: 107803 - DNA, 25 bp, Canis familiaris
gaaggtttcttcagtgctttttctt

SEQ ID NO: 107804 - DNA, 25 bp, Canis familiaris
gaaggcttcttgataggttctattc

SEQ ID NO: 107805 - DNA, 25 bp, Canis familiaris
gaagggtctgggtatggtgactaga

SEQ ID NO: 107806 - DNA, 25 bp, Canis familiaris
gaaggcgtctccctagaggaaagga

SEQ ID NO: 107807 - DNA, 25 bp, Canis familiaris
gaaggctgtcactgtagagaacaac

SEQ ID NO: 107808 - DNA, 25 bp, Canis familiaris
gaaggtcaccaaccagtgcaacaac

SEQ ID NO: 107809 - DNA, 25 bp, Canis familiaris
gaagggaccaagacccagactgacc

SEQ ID NO: 107810 - DNA, 25 bp, Canis familiaris
gaagggcggaaaaccaggcgcttca

SEQ ID NO: 107811 - DNA, 25 bp, Canis familiaris
gaagagagggaacaacacagtttaa

SEQ ID NO: 107812 - DNA, 25 bp, Canis familiaris
gaagagaggggacaacacaggttta

SEQ ID NO: 107813 - DNA, 25 bp, Canis familiaris
gaaggaagggcgccaagcaaggttc

SEQ ID NO: 107814 - DNA, 25 bp, Canis familiaris
gaaggcaagggaaaggcaggaggtg

SEQ ID NO: 107815 - DNA, 25 bp, Canis familiaris
gaaggccgaggagaccaggattgct

SEQ ID NO: 107816 - DNA, 25 bp, Canis familiaris
gaagggggtgaggaccaggatccca

SEQ ID NO: 107817 - DNA, 25 bp, Canis familiaris
gaagggcagggagaagctggaccct

SEQ ID NO: 107818 - DNA, 25 bp, Canis familiaris
gaagggcaaggtgacctcaacgcac

SEQ ID NO: 107819 - DNA, 25 bp, Canis familiaris
gaagtggaaatgttcccaaaccagg

SEQ ID NO: 107820 - DNA, 25 bp, Canis familiaris
gaagtctgaaatctcccaaggtgaa

SEQ ID NO: 107821 - DNA, 25 bp, Canis familiaris
gaagttatcactcacaccaaactga

SEQ ID NO: 107822 - DNA, 25 bp, Canis familiaris
gaagttgcattaccaacaaataaat

SEQ ID NO: 107823 - DNA, 25 bp, Canis familiaris
gaaggctgctcatccattcaaaaaa

SEQ ID NO: 107824 - DNA, 25 bp, Canis familiaris
gaaggcgccaagtcatcaacaagaa

SEQ ID NO: 107825 - DNA, 25 bp, Canis familiaris
gaaggcaccagctatgaaccaggaa

SEQ ID NO: 107826 - DNA, 25 bp, Canis familiaris
gaaggacactcaggaaccagggcaa

SEQ ID NO: 107827 - DNA, 25 bp, Canis familiaris
gaaggaactccttacttagtgccac

SEQ ID NO: 107828 - DNA, 25 bp, Canis familiaris
gaagaggatcccacacttttcctcc

SEQ ID NO: 107829 - DNA, 25 bp, Canis familiaris
gaaggagaccacacttttctctgac

SEQ ID NO: 107830 - DNA, 25 bp, Canis familiaris
gaagtaaggaatcttgttccgtctg

SEQ ID NO: 107831 - DNA, 25 bp, Canis familiaris
gaagaaagtaatgtttcaccctcgg

SEQ ID NO: 107832 - DNA, 25 bp, Canis familiaris
gaaggaaggcagatcgtcatcccct

SEQ ID NO: 107833 - DNA, 25 bp, Canis familiaris
gaaggaaggtgcactgcatgcccac

SEQ ID NO: 107834 - DNA, 25 bp, Canis familiaris
gaaggggctactgcgagccaagccc

SEQ ID NO: 107835 - DNA, 25 bp, Canis familiaris
gaagaggttcctggggccaaatctc

SEQ ID NO: 107836 - DNA, 25 bp, Canis familiaris
gaagagcgattccgggtggctatta

SEQ ID NO: 107837 - DNA, 25 bp, Canis familiaris
gaaggccttgcgcgggagtgttggc

SEQ ID NO: 107838 - DNA, 25 bp, Canis familiaris
gaagggcttctgctggtcagatttg

SEQ ID NO: 107839 - DNA, 25 bp, Canis familiaris
gaaggccttatccattttgattgtg

SEQ ID NO: 107840 - DNA, 25 bp, Canis familiaris
gaagtgcctctaccattagtaagtc

SEQ ID NO: 107841 - DNA, 25 bp, Canis familiaris
gaaggctacagtcttacgagagtca

SEQ ID NO: 107842 - DNA, 25 bp, Canis familiaris
gaagttgacgtcgtgaaccgggact

SEQ ID NO: 107843 - DNA, 25 bp, Canis familiaris
gaagttcaaccaagacaccgggaca

SEQ ID NO: 107844 - DNA, 25 bp, Canis familiaris
gaagttaagaaaacctcctggacag

SEQ ID NO: 107845 - DNA, 25 bp, Canis familiaris
gaaggtaacaactacttgattggaa

SEQ ID NO: 107846 - DNA, 25 bp, Canis familiaris
gaaggctaaagactactggtactgt

SEQ ID NO: 107847 - DNA, 25 bp, Canis familiaris
gaaggctcaactggtaatgattagc

SEQ ID NO: 107848 - DNA, 25 bp, Canis familiaris
gaaggtggattggtatcagcttaga

SEQ ID NO: 107849 - DNA, 25 bp, Canis familiaris
gaaggatgtgcaatggtcaatcata

SEQ ID NO: 107850 - DNA, 25 bp, Canis familiaris
gaaggagctttgcatcacaattatg

SEQ ID NO: 107851 - DNA, 25 bp, Canis familiaris
gaaggaccctggaagcatctgcata

SEQ ID NO: 107852 - DNA, 25 bp, Canis familiaris
gaaggcagccacactgaactgcaga

SEQ ID NO: 107853 - DNA, 25 bp, Canis familiaris
gaaggagctctcaaccaatatcagg

SEQ ID NO: 107854 - DNA, 25 bp, Canis familiaris
gaaggagcatctagagcaatattgt

SEQ ID NO: 107855 - DNA, 25 bp, Canis familiaris
gaaggagcacagcatgagtcaggtg

SEQ ID NO: 107856 - DNA, 25 bp, Canis familiaris
gaaggtgcgcagcatgtgaccttgc

SEQ ID NO: 107857 - DNA, 25 bp, Canis familiaris
gaaggtgccacgtgactaacctggt

SEQ ID NO: 107858 - DNA, 25 bp, Canis familiaris
gaaggtgaccgtacacaacccttca

SEQ ID NO: 107859 - DNA, 25 bp, Canis familiaris
gaagggcgggagaacaaccacccag

SEQ ID NO: 107860 - DNA, 25 bp, Canis familiaris
gaaggtgccggagagcaacggacaa

SEQ ID NO: 107861 - DNA, 25 bp, Canis familiaris
gaagggccggtgaaaatggagaaca

SEQ ID NO: 107862 - DNA, 25 bp, Canis familiaris
gaaggcaggggaataatcaggaaac

SEQ ID NO: 107863 - DNA, 25 bp, Canis familiaris
gaagggaggttcactgcggaaatgc

SEQ ID NO: 107864 - DNA, 25 bp, Canis familiaris
gaagggcgggtgagtggggaggctc

SEQ ID NO: 107865 - DNA, 25 bp, Canis familiaris
gaagggggtggttgtgactgggcct

SEQ ID NO: 107866 - DNA, 25 bp, Canis familiaris
gaaggaggttggaaggactgcagca

SEQ ID NO: 107867 - DNA, 25 bp, Canis familiaris
gaagtggcagcattggcatgaggaa

SEQ ID NO: 107868 - DNA, 25 bp, Canis familiaris
gaaggaggcataaatgggaaacaca

SEQ ID NO: 107869 - DNA, 25 bp, Canis familiaris
gaaggaggctctgtgcaggaagtct

SEQ ID NO: 107870 - DNA, 25 bp, Canis familiaris
gaaggaggcctggtcgaggcgtaac

SEQ ID NO: 107871 - DNA, 25 bp, Canis familiaris
gaaggagtcggtactgacgcagtca

SEQ ID NO: 107872 - DNA, 25 bp, Canis familiaris
gaagtagtcgaatcatgcacacgta

SEQ ID NO: 107873 - DNA, 25 bp, Canis familiaris
gaaggcagctcttgaaggcacattg

SEQ ID NO: 107874 - DNA, 25 bp, Canis familiaris
gaaggcagtgctgatcccaattcga

SEQ ID NO: 107875 - DNA, 25 bp, Canis familiaris
gaaggcgagcatggattccacgtcc

SEQ ID NO: 107876 - DNA, 25 bp, Canis familiaris
gaaggcgacaagaacactctgagca

SEQ ID NO: 107877 - DNA, 25 bp, Canis familiaris
gaaggcagcaaactgaccctgagca

SEQ ID NO: 107878 - DNA, 25 bp, Canis familiaris
gaaggagaaggttctcgcgaccgta

SEQ ID NO: 107879 - DNA, 25 bp, Canis familiaris
gaaggagaaagcagctgcctcaccg

SEQ ID NO: 107880 - DNA, 25 bp, Canis familiaris
gaagggcaagagacggcctggccct

SEQ ID NO: 107881 - DNA, 25 bp, Canis familiaris
gaaggtcaacaagggcatcggcatc

SEQ ID NO: 107882 - DNA, 25 bp, Canis familiaris
gaaggatcaaaaagcgacgtcgcta

SEQ ID NO: 107883 - DNA, 25 bp, Canis familiaris
gaaggctaccacaggagctgtcttc

SEQ ID NO: 107884 - DNA, 25 bp, Canis familiaris
gaagagctagaaatcagtagcatga

SEQ ID NO: 107885 - DNA, 25 bp, Canis familiaris
gaagtatatggattcctacagcata

SEQ ID NO: 107886 - DNA, 25 bp, Canis familiaris
gaaggaatgctttctcagtctgtga

SEQ ID NO: 107887 - DNA, 25 bp, Canis familiaris
gaaggaatgtagtctgcattggcgt

SEQ ID NO: 107888 - DNA, 25 bp, Canis familiaris
gaagtactcaagtctcttgggtaat

SEQ ID NO: 107889 - DNA, 25 bp, Canis familiaris
gaagttggaagtccgtgggaaatat

SEQ ID NO: 107890 - DNA, 25 bp, Canis familiaris
gaagtttgccttcctgtagaaaaag

SEQ ID NO: 107891 - DNA, 25 bp, Canis familiaris
gaaggattttctactgtaacaaaag

SEQ ID NO: 107892 - DNA, 25 bp, Canis familiaris
gaaggatgcattactggcagctgca

SEQ ID NO: 107893 - DNA, 25 bp, Canis familiaris
gaaggagcttacgacgtcatcctcc

SEQ ID NO: 107894 - DNA, 25 bp, Canis familiaris
gaagggtataaagatcttgctgccc

SEQ ID NO: 107895 - DNA, 25 bp, Canis familiaris
gaaggcttaacatggctcttgccca

SEQ ID NO: 107896 - DNA, 25 bp, Canis familiaris
gaaggctcttcacggagtatcgccc

SEQ ID NO: 107897 - DNA, 25 bp, Canis familiaris
gaaggcttgcctagagagtattgta

SEQ ID NO: 107898 - DNA, 25 bp, Canis familiaris
gaaggcattcctaggcaataatgtc

SEQ ID NO: 107899 - DNA, 25 bp, Canis familiaris
gaaggaccgctacgagatcaactcg

SEQ ID NO: 107900 - DNA, 25 bp, Canis familiaris
gaaggaccctgatgaaagaccaaca

SEQ ID NO: 107901 - DNA, 25 bp, Canis familiaris
taagccaaatctctaaagactcaaa

SEQ ID NO: 107902 - DNA, 25 bp, Canis familiaris
gaaggcacaattctcaaggacatca

SEQ ID NO: 107903 - DNA, 25 bp, Canis familiaris
gaaggcacaaatcaccaggttgatg

SEQ ID NO: 107904 - DNA, 25 bp, Canis familiaris
gaaggcacagaatcaccaaggttga

SEQ ID NO: 107905 - DNA, 25 bp, Canis familiaris
gaaggcgcaggaagatccacggatt

SEQ ID NO: 107906 - DNA, 25 bp, Canis familiaris
gaaggagcacgaggaccagcaggtc

SEQ ID NO: 107907 - DNA, 25 bp, Canis familiaris
gaaggagcgcagtgacaccagcgac

SEQ ID NO: 107908 - DNA, 25 bp, Canis familiaris
gaaggaccagcttatcaccaagtgc

SEQ ID NO: 107909 - DNA, 25 bp, Canis familiaris
gaaggcaacagaatatcagccaagg

SEQ ID NO: 107910 - DNA, 25 bp, Canis familiaris
gaaggcatatgcagatttctacaga

SEQ ID NO: 107911 - DNA, 25 bp, Canis familiaris
gaaggcatagcagatgttccagcag

SEQ ID NO: 107912 - DNA, 25 bp, Canis familiaris
gaaggcaagcacctttatacacttg

SEQ ID NO: 107913 - DNA, 25 bp, Canis familiaris
gaaggactccacttttgatgactgg

SEQ ID NO: 107914 - DNA, 25 bp, Canis familiaris
gaaggaacctgcttactttctggaa

SEQ ID NO: 107915 - DNA, 25 bp, Canis familiaris
gaaggaaggctgtgtctttgctggt

SEQ ID NO: 107916 - DNA, 25 bp, Canis familiaris
gaaggagtgtctttgtttttagata

SEQ ID NO: 107917 - DNA, 25 bp, Canis familiaris
gaaggcagggcattttttcttggtc

SEQ ID NO: 107918 - DNA, 25 bp, Canis familiaris
gaaggctggcagttttctcatgctt

SEQ ID NO: 107919 - DNA, 25 bp, Canis familiaris
gaaggctggacagatctgctcactt

SEQ ID NO: 107920 - DNA, 25 bp, Canis familiaris
gaaggtggcactggaaggccttcgg

SEQ ID NO: 107921 - DNA, 25 bp, Canis familiaris
gaagggcaacatggaaccctctcct

SEQ ID NO: 107922 - DNA, 25 bp, Canis familiaris
gaagtggaatcttgatgagctgccc

SEQ ID NO: 107923 - DNA, 25 bp, Canis familiaris
gaaggagaattttagcatgctcact

SEQ ID NO: 107924 - DNA, 25 bp, Canis familiaris
gaaggaggaattccctgctgatctg

SEQ ID NO: 107925 - DNA, 25 bp, Canis familiaris
gaaggaggtggagcctgctcctgga

SEQ ID NO: 107926 - DNA, 25 bp, Canis familiaris
gaaggagaagaagccccttccacag

SEQ ID NO: 107927 - DNA, 25 bp, Canis familiaris
gaaggaaagaaatgccctttgccaa

SEQ ID NO: 107928 - DNA, 25 bp, Canis familiaris
gaagtaacgaaatcccgttctacag

SEQ ID NO: 107929 - DNA, 25 bp, Canis familiaris
gaagtcaacaaaatccccttctctg

SEQ ID NO: 107930 - DNA, 25 bp, Canis familiaris
gaaggcaaagatagatcgtccttct

SEQ ID NO: 107931 - DNA, 25 bp, Canis familiaris
gaaggctgaagattgtttttgtata

SEQ ID NO: 107932 - DNA, 25 bp, Canis familiaris
gaagtgtgaggtattttgtttacta

SEQ ID NO: 107933 - DNA, 25 bp, Canis familiaris
gaaggtgggatgatgatgttgtttt

SEQ ID NO: 107934 - DNA, 25 bp, Canis familiaris
gaaggtgctgggacaggcatttctg

SEQ ID NO: 107935 - DNA, 25 bp, Canis familiaris
gaagtgattgtgcacacgtgtattt

SEQ ID NO: 107936 - DNA, 25 bp, Canis familiaris
gaagttaatcaagggtgtacatttt

SEQ ID NO: 107937 - DNA, 25 bp, Canis familiaris
gaagtctaaatcggtttgaccatct

SEQ ID NO: 107938 - DNA, 25 bp, Canis familiaris
gaaggctgaatattccaattaccac

SEQ ID NO: 107939 - DNA, 25 bp, Canis familiaris
gaagtctgaactttattctacaggc

SEQ ID NO: 107940 - DNA, 25 bp, Canis familiaris
gaagtagccaaactgttcaacattc

SEQ ID NO: 107941 - DNA, 25 bp, Canis familiaris
gaaggggctgtcttgtctgaaattt

SEQ ID NO: 107942 - DNA, 25 bp, Canis familiaris
gaagcgtacttctgtgcgaaacctt

SEQ ID NO: 107943 - DNA, 25 bp, Canis familiaris
gagatggtttagtggcaaaacccac

SEQ ID NO: 107944 - DNA, 25 bp, Canis familiaris
gaaggtatatggatggcaaacagcc

SEQ ID NO: 107945 - DNA, 25 bp, Canis familiaris
gaagaggtgtagtcccaaccaagcg

SEQ ID NO: 107946 - DNA, 25 bp, Canis familiaris
gaaggtatttactcacactcaggtg

SEQ ID NO: 107947 - DNA, 25 bp, Canis familiaris
gaaggctatttcagagcagttcgtc

SEQ ID NO: 107948 - DNA, 25 bp, Canis familiaris
gaagtgctcagttttgaggttctct

SEQ ID NO: 107949 - DNA, 25 bp, Canis familiaris
gaaggctcactggtattggatagct

SEQ ID NO: 107950 - DNA, 25 bp, Canis familiaris
gaaggctcagctggtagtgatagct

SEQ ID NO: 107951 - DNA, 25 bp, Canis familiaris
gaaggtcactccaatgttacttttg

SEQ ID NO: 107952 - DNA, 25 bp, Canis familiaris
gaaggtctggtcaagttaactttgc

SEQ ID NO: 107953 - DNA, 25 bp, Canis familiaris
gaaggttgctgtgatgttcccttgc

SEQ ID NO: 107954 - DNA, 25 bp, Canis familiaris
gacacttagccgctgtctcgccgtg

SEQ ID NO: 107955 - DNA, 25 bp, Canis familiaris
gaacttcaactaggtccggttggtg

SEQ ID NO: 107956 - DNA, 25 bp, Canis familiaris
gaactgtggaagtgtccgaggtggt

SEQ ID NO: 107957 - DNA, 25 bp, Canis familiaris
gaaggggcaagtaccaggggctgag

SEQ ID NO: 107958 - DNA, 25 bp, Canis familiaris
gaagggatcggttccagggcaagag

SEQ ID NO: 107959 - DNA, 25 bp, Canis familiaris
gaaggaatctggtgtctgggatgaa

SEQ ID NO: 107960 - DNA, 25 bp, Canis familiaris
gaaggagtctgctggttgtggtgct

SEQ ID NO: 107961 - DNA, 25 bp, Canis familiaris
gaagggcttctttgttgctgggatc

SEQ ID NO: 107962 - DNA, 25 bp, Canis familiaris
gaagggctttcttaactatcctagg

SEQ ID NO: 107963 - DNA, 25 bp, Canis familiaris
gaagggtttttaatctatctatagg

SEQ ID NO: 107964 - DNA, 25 bp, Canis familiaris
gaaggtgttttcttgactatctcta

SEQ ID NO: 107965 - DNA, 25 bp, Canis familiaris
gaaggtgttttctgatgaagttgca

SEQ ID NO: 107966 - DNA, 25 bp, Canis familiaris
gaagggataccctgatactcctgat

SEQ ID NO: 107967 - DNA, 25 bp, Canis familiaris
gaagaggaagccgaggttcccgaag

SEQ ID NO: 107968 - DNA, 25 bp, Canis familiaris
gaaggtagagccaggctaccccaag

SEQ ID NO: 107969 - DNA, 25 bp, Canis familiaris
gaagtgaaggccgggccggcccaga

SEQ ID NO: 107970 - DNA, 25 bp, Canis familiaris
gaagggaggccggaatcggtctcgg

SEQ ID NO: 107971 - DNA, 25 bp, Canis familiaris
gaagggggccagtgttggcactagc

SEQ ID NO: 107972 - DNA, 25 bp, Canis familiaris
gaagtatggggctggttggactcac

SEQ ID NO: 107973 - DNA, 25 bp, Canis familiaris
gaacataggactctggtcggacttt

SEQ ID NO: 107974 - DNA, 25 bp, Canis familiaris
gaagtcacgactccgttcgtagttc

SEQ ID NO: 107975 - DNA, 25 bp, Canis familiaris
gaagtcctacctattcagaatcatt

SEQ ID NO: 107976 - DNA, 25 bp, Canis familiaris
gaagtccaagctagagttctccatc

SEQ ID NO: 107977 - DNA, 25 bp, Canis familiaris
gaaggacacatttggttcatgccca

SEQ ID NO: 107978 - DNA, 25 bp, Canis familiaris
gaaggaagcttggcagggcagcccg

SEQ ID NO: 107979 - DNA, 25 bp, Canis familiaris
gaaggaagtggagggggcattgctg

SEQ ID NO: 107980 - DNA, 25 bp, Canis familiaris
gaaggaggggcaggggtgtgtgctg

SEQ ID NO: 107981 - DNA, 25 bp, Canis familiaris
gaaggcagatgggagctggggtggg

SEQ ID NO: 107982 - DNA, 25 bp, Canis familiaris
gaagggcagggagtgcctggagggg

SEQ ID NO: 107983 - DNA, 25 bp, Canis familiaris
gaaggtctgggtgcagtcgatggat

SEQ ID NO: 107984 - DNA, 25 bp, Canis familiaris
gaaggtctgggctgtgctagactct

SEQ ID NO: 107985 - DNA, 25 bp, Canis familiaris
gaaggacgtgagctgatgctcagaa

SEQ ID NO: 107986 - DNA, 25 bp, Canis familiaris
gaagtgacagtccgatgtgggtaat

SEQ ID NO: 107987 - DNA, 25 bp, Canis familiaris
gaagtgtcgatcctatgtgacagtg

SEQ ID NO: 107988 - DNA, 25 bp, Canis familiaris
gaagtcccacaaatatgaagtccag

SEQ ID NO: 107989 - DNA, 25 bp, Canis familiaris
gaagaccccagaagatgcttagccg

SEQ ID NO: 107990 - DNA, 25 bp, Canis familiaris
gaagtcagcccggaagttggccaac

SEQ ID NO: 107991 - DNA, 25 bp, Canis familiaris
gaagctggtccacaagttcagtcca

SEQ ID NO: 107992 - DNA, 25 bp, Canis familiaris
gaagttctcttcaaagttatcccag

SEQ ID NO: 107993 - DNA, 25 bp, Canis familiaris
gaagtaccttgtcagtcaatgttca

SEQ ID NO: 107994 - DNA, 25 bp, Canis familiaris
gaaggaacttctcagtgaattctat

SEQ ID NO: 107995 - DNA, 25 bp, Canis familiaris
gaaggcaactgcaccgatacattta

SEQ ID NO: 107996 - DNA, 25 bp, Canis familiaris
gaaggacagagcccacgatatcttt

SEQ ID NO: 107997 - DNA, 25 bp, Canis familiaris
gaaggacatgtctgattttgcttgt

SEQ ID NO: 107998 - DNA, 25 bp, Canis familiaris
gaaggaagctgcttacttctgggaa

SEQ ID NO: 107999 - DNA, 25 bp, Canis familiaris
gacgggacggattctttggaacaca

SEQ ID NO: 108000 - DNA, 25 bp, Canis familiaris
gaagggacaggtattttgcaaacaa

SEQ ID NO: 108001 - DNA, 25 bp, Canis familiaris
gaaggtgaccttatttggaaagaga

SEQ ID NO: 108002 - DNA, 25 bp, Canis familiaris
gaaggtgagcctttttctcaggaag

SEQ ID NO: 108003 - DNA, 25 bp, Canis familiaris
gaagggagcagtgtgttgatcgaga

SEQ ID NO: 108004 - DNA, 25 bp, Canis familiaris
gaaggaagcttaagatgtgcaagaa

SEQ ID NO: 108005 - DNA, 25 bp, Canis familiaris
gaaggtgaattcaaggctgaaggaa

SEQ ID NO: 108006 - DNA, 25 bp, Canis familiaris
gaaggtaaagcaaacgcaaagaagc

SEQ ID NO: 108007 - DNA, 25 bp, Canis familiaris
gaaggagataacctacatcaacaga

SEQ ID NO: 108008 - DNA, 25 bp, Canis familiaris
gaagggacgtcaatcacatcgacgt

SEQ ID NO: 108009 - DNA, 25 bp, Canis familiaris
gaaggagagctggcattcctctagg

SEQ ID NO: 108010 - DNA, 25 bp, Canis familiaris
gaaggagtccctgaatctctggtat

SEQ ID NO: 108011 - DNA, 25 bp, Canis familiaris
gaaggaatcccgtaatgcacgtggt

SEQ ID NO: 108012 - DNA, 25 bp, Canis familiaris
gaagtggacccgtaatcatgcattg

SEQ ID NO: 108013 - DNA, 25 bp, Canis familiaris
gaagaggaaccagatatgcaaagta

SEQ ID NO: 108014 - DNA, 25 bp, Canis familiaris
gaaggtaaccgcgaagcacacgtga

SEQ ID NO: 108015 - DNA, 25 bp, Canis familiaris
gaaggattaccttatctcaccagga

SEQ ID NO: 108016 - DNA, 25 bp, Canis familiaris
gacgttgaacctgtctcaactggtg

SEQ ID NO: 108017 - DNA, 25 bp, Canis familiaris
gaagggaagcctgccaaactatgga

SEQ ID NO: 108018 - DNA, 25 bp, Canis familiaris
gaagggaagacaacctagcccagga

SEQ ID NO: 108019 - DNA, 25 bp, Canis familiaris
gaagtggaaacacgtatgaaccatt

SEQ ID NO: 108020 - DNA, 25 bp, Canis familiaris
gaagttatgaacctggtgaaccaaa

SEQ ID NO: 108021 - DNA, 25 bp, Canis familiaris
gaagtagtcaactggctgatacgtt

SEQ ID NO: 108022 - DNA, 25 bp, Canis familiaris
gaagcatgagtcccaggtggatacc

SEQ ID NO: 108023 - DNA, 25 bp, Canis familiaris
gaagtggttcaatctggattcagcc

SEQ ID NO: 108024 - DNA, 25 bp, Canis familiaris
gaagggtatcagggtggtccacaca

SEQ ID NO: 108025 - DNA, 25 bp, Canis familiaris
gaaggggagcagtgggcttatacaa

SEQ ID NO: 108026 - DNA, 25 bp, Canis familiaris
gaaggaagtggtggaggcttgtgac

SEQ ID NO: 108027 - DNA, 25 bp, Canis familiaris
gaaggaaggtcaggaggctttgccg

SEQ ID NO: 108028 - DNA, 25 bp, Canis familiaris
gaaggagcacgtgcaggactttgcc

SEQ ID NO: 108029 - DNA, 25 bp, Canis familiaris
gaagggacctaaatggctgcttcca

SEQ ID NO: 108030 - DNA, 25 bp, Canis familiaris
gaaggatacctattgtatgatctcc

SEQ ID NO: 108031 - DNA, 25 bp, Canis familiaris
gaaggatggctgcactgttaccaca

SEQ ID NO: 108032 - DNA, 25 bp, Canis familiaris
gaaggaggcatgggtatccctcaca

SEQ ID NO: 108033 - DNA, 25 bp, Canis familiaris
gaaggaggcgggccgcctctgagca

SEQ ID NO: 108034 - DNA, 25 bp, Canis familiaris
gaaggatggcatggggcctttgtcc

SEQ ID NO: 108035 - DNA, 25 bp, Canis familiaris
gaaggatgacacgtggctctaagaa

SEQ ID NO: 108036 - DNA, 25 bp, Canis familiaris
gaaggtgcacactttccacagaaac

SEQ ID NO: 108037 - DNA, 25 bp, Canis familiaris
gaaggtgccaatataaccaatgtgc

SEQ ID NO: 108038 - DNA, 25 bp, Canis familiaris
gaaggttcacttccattacaatatg

SEQ ID NO: 108039 - DNA, 25 bp, Canis familiaris
gaagggctgctgtgcactgtgaaat

SEQ ID NO: 108040 - DNA, 25 bp, Canis familiaris
gaaggagcgctctttcatgatgagc

SEQ ID NO: 108041 - DNA, 25 bp, Canis familiaris
gaaggacagccagatctgtgagcta

SEQ ID NO: 108042 - DNA, 25 bp, Canis familiaris
gaaggaagccaggagcaggaccacc

SEQ ID NO: 108043 - DNA, 25 bp, Canis familiaris
gaaggagagccgttgcatggtccag

SEQ ID NO: 108044 - DNA, 25 bp, Canis familiaris
gaagtgcgaaggttgatgcgtgcca

SEQ ID NO: 108045 - DNA, 25 bp, Canis familiaris
gaagtcattagggtgtggatggtat

SEQ ID NO: 108046 - DNA, 25 bp, Canis familiaris
gaaggagttgtgtcttggagagaag

SEQ ID NO: 108047 - DNA, 25 bp, Canis familiaris
gaagggtggatgtgagtgatgcaaa

SEQ ID NO: 108048 - DNA, 25 bp, Canis familiaris
gaaggaggtggacgagcagatgctg

SEQ ID NO: 108049 - DNA, 25 bp, Canis familiaris
gaaggactgctgggagacagagctg

SEQ ID NO: 108050 - DNA, 25 bp, Canis familiaris
gaaggagctcttggagcagaggcgg

SEQ ID NO: 108051 - DNA, 25 bp, Canis familiaris
gaaggagctttgtgagctggcggtc

SEQ ID NO: 108052 - DNA, 25 bp, Canis familiaris
gaaggactttgtgtgtggctggggt

SEQ ID NO: 108053 - DNA, 25 bp, Canis familiaris
gaagtgactttttccgagctagtgg

SEQ ID NO: 108054 - DNA, 25 bp, Canis familiaris
gaaggacttcatttggcaggttggg

SEQ ID NO: 108055 - DNA, 25 bp, Canis familiaris
gaaggactccattcggctggttaaa

SEQ ID NO: 108056 - DNA, 25 bp, Canis familiaris
gaaggactcctatgtgggtgacgag

SEQ ID NO: 108057 - DNA, 25 bp, Canis familiaris
gaaggattcctatgtgggcgacgag

SEQ ID NO: 108058 - DNA, 25 bp, Canis familiaris
gaaggattcctatgtgggcgacgag

SEQ ID NO: 108059 - DNA, 25 bp, Canis familiaris
gaaggagtctaaggggtggcaggga

SEQ ID NO: 108060 - DNA, 25 bp, Canis familiaris
gaaggatgatctaatgggtgtggaa

SEQ ID NO: 108061 - DNA, 25 bp, Canis familiaris
gaaggtacagagtagcggttgcaga

SEQ ID NO: 108062 - DNA, 25 bp, Canis familiaris
gaaggagaagactatggggtgcagt

SEQ ID NO: 108063 - DNA, 25 bp, Canis familiaris
gaaggagtcagccgtggcgagtcgt

SEQ ID NO: 108064 - DNA, 25 bp, Canis familiaris
gaaggagctcatgcagtggtacaag

SEQ ID NO: 108065 - DNA, 25 bp, Canis familiaris
gaaggagccaccagggatgcacttc

SEQ ID NO: 108066 - DNA, 25 bp, Canis familiaris
gaaggaccccaccgggaatattctg

SEQ ID NO: 108067 - DNA, 25 bp, Canis familiaris
gaagcaccagccgacggggaaggtc

SEQ ID NO: 108068 - DNA, 25 bp, Canis familiaris
gaagcaccaccgtggatcgtcaggt

SEQ ID NO: 108069 - DNA, 25 bp, Canis familiaris
gaagatcagcttgggggatccctgg

SEQ ID NO: 108070 - DNA, 25 bp, Canis familiaris
gaagtcctgtaagggaccctcacac

SEQ ID NO: 108071 - DNA, 25 bp, Canis familiaris
gaaggtctatactgaagccctccac

SEQ ID NO: 108072 - DNA, 25 bp, Canis familiaris
gaaggattaagctcacatggccctc

SEQ ID NO: 108073 - DNA, 25 bp, Canis familiaris
gaaggataaatgttatatggtctca

SEQ ID NO: 108074 - DNA, 25 bp, Canis familiaris
gaaggagatattgttgtgcctgcca

SEQ ID NO: 108075 - DNA, 25 bp, Canis familiaris
gaaggacgctggatctggcacagcc

SEQ ID NO: 108076 - DNA, 25 bp, Canis familiaris
gaagtcacgagttctcagggcatgc

SEQ ID NO: 108077 - DNA, 25 bp, Canis familiaris
gaaggagctggtatcttgttgacaa

SEQ ID NO: 108078 - DNA, 25 bp, Canis familiaris
gaaggagctggtctctattctaggg

SEQ ID NO: 108079 - DNA, 25 bp, Canis familiaris
gaaggattgcagaccagtttctggg

SEQ ID NO: 108080 - DNA, 25 bp, Canis familiaris
gaaggacttatggcagtaatcatgg

SEQ ID NO: 108081 - DNA, 25 bp, Canis familiaris
gaaggatccctcgacatatatatgg

SEQ ID NO: 108082 - DNA, 25 bp, Canis familiaris
gaagtgaccctggaaagaatgctgg

SEQ ID NO: 108083 - DNA, 25 bp, Canis familiaris
gaaggtcgacatcattagatttgtg

SEQ ID NO: 108084 - DNA, 25 bp, Canis familiaris
gaaggtgcgaacttcttggcttgtg

SEQ ID NO: 108085 - DNA, 25 bp, Canis familiaris
gaaggtgctaatgtttggccagtgg

SEQ ID NO: 108086 - DNA, 25 bp, Canis familiaris
gaaggttaacttgttgcgaatcagt

SEQ ID NO: 108087 - DNA, 25 bp, Canis familiaris
gaaggtcatgaatttcgttcgtcac

SEQ ID NO: 108088 - DNA, 25 bp, Canis familiaris
gaaggactgatctacctttgcttct

SEQ ID NO: 108089 - DNA, 25 bp, Canis familiaris
gaaggtctatgccagttttgctctc

SEQ ID NO: 108090 - DNA, 25 bp, Canis familiaris
gaagtgcctctgttgtgtgtttgct

SEQ ID NO: 108091 - DNA, 25 bp, Canis familiaris
gaagtccatctttggcaactcatcc

SEQ ID NO: 108092 - DNA, 25 bp, Canis familiaris
gaagtggcatctatgcacccgattc

SEQ ID NO: 108093 - DNA, 25 bp, Canis familiaris
gaaggatatgttccatcagccgtac

SEQ ID NO: 108094 - DNA, 25 bp, Canis familiaris
gaaggatgatgtgcgcctgggtagc

SEQ ID NO: 108095 - DNA, 25 bp, Canis familiaris
gaaggtgatggcgaccatcgcgacg

SEQ ID NO: 108096 - DNA, 25 bp, Canis familiaris
gaagggatgtaagcaccagcacaaa

SEQ ID NO: 108097 - DNA, 25 bp, Canis familiaris
gaagtgtggtaagcaccaaccccac

SEQ ID NO: 108098 - DNA, 25 bp, Canis familiaris
gaagcttcttaacacctgacagcgc

SEQ ID NO: 108099 - DNA, 25 bp, Canis familiaris
gaagttccaaatgcctctgtcaggt

SEQ ID NO: 108100 - DNA, 25 bp, Canis familiaris
gaagttcccacatactctaagagtt

SEQ ID NO: 108101 - DNA, 25 bp, Canis familiaris
gaagttcccgcagcacagttgaatt

SEQ ID NO: 108102 - DNA, 25 bp, Canis familiaris
gaagcttgacgcaccaagcggaact

SEQ ID NO: 108103 - DNA, 25 bp, Canis familiaris
gaagcttgacgcaccaagcggaact

SEQ ID NO: 108104 - DNA, 25 bp, Canis familiaris
gaagttgaccttcatcagtggaaga

SEQ ID NO: 108105 - DNA, 25 bp, Canis familiaris
gaagtagtccgacatctggtccatg

SEQ ID NO: 108106 - DNA, 25 bp, Canis familiaris
gaaggagtccattctgcactggtac

SEQ ID NO: 108107 - DNA, 25 bp, Canis familiaris
gaagggtcagattcttcttctgtat

SEQ ID NO: 108108 - DNA, 25 bp, Canis familiaris
gaaggatgtagatattttgctattt

SEQ ID NO: 108109 - DNA, 25 bp, Canis familiaris
gaaggtaagtactcatatgtgattt

SEQ ID NO: 108110 - DNA, 25 bp, Canis familiaris
gaagtgtatgatgagccacaagttc

SEQ ID NO: 108111 - DNA, 25 bp, Canis familiaris
gaagtgatttcagtgtgcggagtat

SEQ ID NO: 108112 - DNA, 25 bp, Canis familiaris
gaagttgttctaaggaagtcagagc

SEQ ID NO: 108113 - DNA, 25 bp, Canis familiaris
gaagttgttccgtccatttcaacgt

SEQ ID NO: 108114 - DNA, 25 bp, Canis familiaris
gaaggttgtaagtccattaataagg

SEQ ID NO: 108115 - DNA, 25 bp, Canis familiaris
gaaggtcttcaacatcttaaaagca

SEQ ID NO: 108116 - DNA, 25 bp, Canis familiaris
gaaggtttatactctctgacacaca

SEQ ID NO: 108117 - DNA, 25 bp, Canis familiaris
gaagttctttatttttgaaatcaag

SEQ ID NO: 108118 - DNA, 25 bp, Canis familiaris
gaagtctcttttgtagctattttca

SEQ ID NO: 108119 - DNA, 25 bp, Canis familiaris
gaagtgttttatgtgtgcattgact

SEQ ID NO: 108120 - DNA, 25 bp, Canis familiaris
gaagggtgttcaggtgatccagtgt

SEQ ID NO: 108121 - DNA, 25 bp, Canis familiaris
gaaggagtttccatatgccgatgcc

SEQ ID NO: 108122 - DNA, 25 bp, Canis familiaris
gaaggagtttccatatgccgatgcc

SEQ ID NO: 108123 - DNA, 25 bp, Canis familiaris
gaagggttgctgctatcagccttgc

SEQ ID NO: 108124 - DNA, 25 bp, Canis familiaris
gaagggcttggggagccctaccttg

SEQ ID NO: 108125 - DNA, 25 bp, Canis familiaris
gaagggatctttaagcccccttcat

SEQ ID NO: 108126 - DNA, 25 bp, Canis familiaris
gaagtactatttaaccgtcctgctt

SEQ ID NO: 108127 - DNA, 25 bp, Canis familiaris
gaagtatgctagaggccaggtccca

SEQ ID NO: 108128 - DNA, 25 bp, Canis familiaris
gaagtcaggaattgcccaggaccct

SEQ ID NO: 108129 - DNA, 25 bp, Canis familiaris
gaagtctgaaatttcggaaccctga

SEQ ID NO: 108130 - DNA, 25 bp, Canis familiaris
gaagttcacatctttagagaaccct

SEQ ID NO: 108131 - DNA, 25 bp, Canis familiaris
gaagtgtgtctcatttgagaagggt

SEQ ID NO: 108132 - DNA, 25 bp, Canis familiaris
gaaggttgctccatctataaccgct

SEQ ID NO: 108133 - DNA, 25 bp, Canis familiaris
gaagtttaccagtctataccatgct

SEQ ID NO: 108134 - DNA, 25 bp, Canis familiaris
gaagtgtgtaccttttgaccacctt

SEQ ID NO: 108135 - DNA, 25 bp, Canis familiaris
gaagtgttgatcatttggtgaacac

SEQ ID NO: 108136 - DNA, 25 bp, Canis familiaris
gaagttctgcatctgttgacatcac

SEQ ID NO: 108137 - DNA, 25 bp, Canis familiaris
gaagttctgtctactgatgcagcac

SEQ ID NO: 108138 - DNA, 25 bp, Canis familiaris
gaagtgtcagacaccatgagcgccg

SEQ ID NO: 108139 - DNA, 25 bp, Canis familiaris
gaaggtgctacaaccatcgcacctc

SEQ ID NO: 108140 - DNA, 25 bp, Canis familiaris
gaaggttgtgaactgcctgacctgc

SEQ ID NO: 108141 - DNA, 25 bp, Canis familiaris
gaaggatttgcatgtggctgtccca

SEQ ID NO: 108142 - DNA, 25 bp, Canis familiaris
gaagagtttgcaacagggtcccaga

SEQ ID NO: 108143 - DNA, 25 bp, Canis familiaris
gaaggatattcctggactcacggat

SEQ ID NO: 108144 - DNA, 25 bp, Canis familiaris
gaaggatattcctggactcacggat

SEQ ID NO: 108145 - DNA, 25 bp, Canis familiaris
gaagtattttctacgaccacggata

SEQ ID NO: 108146 - DNA, 25 bp, Canis familiaris
gaaggtggctttatagctcacgtgg

SEQ ID NO: 108147 - DNA, 25 bp, Canis familiaris
gaaggatcttgcctcaatagtgcag

SEQ ID NO: 108148 - DNA, 25 bp, Canis familiaris
gaaggatcattcccagcaaggagat

SEQ ID NO: 108149 - DNA, 25 bp, Canis familiaris
gaaggtgcttgacatgcacagagga

SEQ ID NO: 108150 - DNA, 25 bp, Canis familiaris
gaagttgcttgccgatgtctggcga

SEQ ID NO: 108151 - DNA, 25 bp, Canis familiaris
gaagtggctgctcttgtcatgagca

SEQ ID NO: 108152 - DNA, 25 bp, Canis familiaris
gaagggatctcttttcattgcacaa

SEQ ID NO: 108153 - DNA, 25 bp, Canis familiaris
gaagaggcttctattcttaaatcct

SEQ ID NO: 108154 - DNA, 25 bp, Canis familiaris
gaaggtgcttgtgctttgccaaacc

SEQ ID NO: 108155 - DNA, 25 bp, Canis familiaris
gaaggtgcttgtgaatagacatagt

SEQ ID NO: 108156 - DNA, 25 bp, Canis familiaris
gaagggcctggaagaatgaaatgca

SEQ ID NO: 108157 - DNA, 25 bp, Canis familiaris
gaagggaccagtagacagacagaca

SEQ ID NO: 108158 - DNA, 25 bp, Canis familiaris
gaaggagtccacagacagaggcaac

SEQ ID NO: 108159 - DNA, 25 bp, Canis familiaris
gaaggagtggccagctgagccgaac

SEQ ID NO: 108160 - DNA, 25 bp, Canis familiaris
gaagtggttggttctgtgcggaagt

SEQ ID NO: 108161 - DNA, 25 bp, Canis familiaris
gaagcatttctagtttctgggaagg

SEQ ID NO: 108162 - DNA, 25 bp, Canis familiaris
gaagtgcatgtttctcttctgggaa

SEQ ID NO: 108163 - DNA, 25 bp, Canis familiaris
gaagtggtttcattcatgctgagga

SEQ ID NO: 108164 - DNA, 25 bp, Canis familiaris
gaaggtgtttatgctcgagatgaaa

SEQ ID NO: 108165 - DNA, 25 bp, Canis familiaris
gaagtattttgtgtccagtggaaac

SEQ ID NO: 108166 - DNA, 25 bp, Canis familiaris
gaagatgtttgttgaaccttggaac

SEQ ID NO: 108167 - DNA, 25 bp, Canis familiaris
gaaggttctgtttcagccttggctt

SEQ ID NO: 108168 - DNA, 25 bp, Canis familiaris
gaaggttctgtatagcaggtggtgc

SEQ ID NO: 108169 - DNA, 25 bp, Canis familiaris
gaaggtttctgcagacagcggcgat

SEQ ID NO: 108170 - DNA, 25 bp, Canis familiaris
gaaggatctttaaatactgtgctat

SEQ ID NO: 108171 - DNA, 25 bp, Canis familiaris
gaaggaggatttagcttcattgcta

SEQ ID NO: 108172 - DNA, 25 bp, Canis familiaris
gaagtaggtatgtagcttttgtttc

SEQ ID NO: 108173 - DNA, 25 bp, Canis familiaris
gaagtcaggtagtcactcttagaat

SEQ ID NO: 108174 - DNA, 25 bp, Canis familiaris
gaagtatgacaactccctcaagatt

SEQ ID NO: 108175 - DNA, 25 bp, Canis familiaris
gaagtatcagaagtccctctcagac

SEQ ID NO: 108176 - DNA, 25 bp, Canis familiaris
gaagtctcacaaacacctgtcgagg

SEQ ID NO: 108177 - DNA, 25 bp, Canis familiaris
gaagtgcacagattacccagaaagg

SEQ ID NO: 108178 - DNA, 25 bp, Canis familiaris
gaaggatcaaaacccagcagagtgc

SEQ ID NO: 108179 - DNA, 25 bp, Canis familiaris
gaagggcagaagctcgcaggtgtgc

SEQ ID NO: 108180 - DNA, 25 bp, Canis familiaris
gaaggggagagtcagcaggtgccgg

SEQ ID NO: 108181 - DNA, 25 bp, Canis familiaris
gaagggtggagcagagcaggacaag

SEQ ID NO: 108182 - DNA, 25 bp, Canis familiaris
gaaggaggaggaaaagcagagcaag

SEQ ID NO: 108183 - DNA, 25 bp, Canis familiaris
gaagggtgaaattcaagagctgaag

SEQ ID NO: 108184 - DNA, 25 bp, Canis familiaris
gaaggtctgattccaaagagctgaa

SEQ ID NO: 108185 - DNA, 25 bp, Canis familiaris
gaaggtctctatgccaagtgattga

SEQ ID NO: 108186 - DNA, 25 bp, Canis familiaris
gaagtgccctcagtctcagaggagc

SEQ ID NO: 108187 - DNA, 25 bp, Canis familiaris
gaagtgccgccagccaaaggcactg

SEQ ID NO: 108188 - DNA, 25 bp, Canis familiaris
gaagtgtacatctctcattaggcct

SEQ ID NO: 108189 - DNA, 25 bp, Canis familiaris
gaagtgtattccttttcaggcctgc

SEQ ID NO: 108190 - DNA, 25 bp, Canis familiaris
gaaggtattttgtcttgcaggcttc

SEQ ID NO: 108191 - DNA, 25 bp, Canis familiaris
gaaggttttgatcctgctgggtgtc

SEQ ID NO: 108192 - DNA, 25 bp, Canis familiaris
gaaggtatgctttgtctggtggagg

SEQ ID NO: 108193 - DNA, 25 bp, Canis familiaris
gaagttagccttgctgatctgcaga

SEQ ID NO: 108194 - DNA, 25 bp, Canis familiaris
gaaggtcagtctcacttcgagagat

SEQ ID NO: 108195 - DNA, 25 bp, Canis familiaris
gaaggatcacttcaatgggacgatc

SEQ ID NO: 108196 - DNA, 25 bp, Canis familiaris
gaaggtcatctactacatgggcgaa

SEQ ID NO: 108197 - DNA, 25 bp, Canis familiaris
gaaggatctctaaaagctggtgcca

SEQ ID NO: 108198 - DNA, 25 bp, Canis familiaris
gaagtgactcgaaaactctctgaag

SEQ ID NO: 108199 - DNA, 25 bp, Canis familiaris
gaagtgactcgtatactctctgaag

SEQ ID NO: 108200 - DNA, 25 bp, Canis familiaris
gaagtgtcgttaatatattggaagg

SEQ ID NO: 108201 - DNA, 25 bp, Canis familiaris
gaaggggcttctcagactggaactg

SEQ ID NO: 108202 - DNA, 25 bp, Canis familiaris
gaaggggtttcagtgtgaggccagc

SEQ ID NO: 108203 - DNA, 25 bp, Canis familiaris
gaagtgaggtgtcatttacccagga

SEQ ID NO: 108204 - DNA, 25 bp, Canis familiaris
gaagctatgggttatttccctaagt

SEQ ID NO: 108205 - DNA, 25 bp, Canis familiaris
gaagtttgttggaatggccttgaat

SEQ ID NO: 108206 - DNA, 25 bp, Canis familiaris
gaagttggttagatccctcagtacg

SEQ ID NO: 108207 - DNA, 25 bp, Canis familiaris
gaagtcaatgtctacttgcccaagt

SEQ ID NO: 108208 - DNA, 25 bp, Canis familiaris
gaagtgctattttatatgccatcaa

SEQ ID NO: 108209 - DNA, 25 bp, Canis familiaris
gaaggatcagtttaaccatacactt

SEQ ID NO: 108210 - DNA, 25 bp, Canis familiaris
gaaggtggtgatgaccctccaatat

SEQ ID NO: 108211 - DNA, 25 bp, Canis familiaris
gaggtgaactgtgaccccaatttac

SEQ ID NO: 108212 - DNA, 25 bp, Canis familiaris
gaagttcactgttaccagccaattc

SEQ ID NO: 108213 - DNA, 25 bp, Canis familiaris
gaaggatcagtgtagtaatgccagg

SEQ ID NO: 108214 - DNA, 25 bp, Canis familiaris
gaaggtagtgaagcaggcatcggag

SEQ ID NO: 108215 - DNA, 25 bp, Canis familiaris
gaaggtggtcaagaggagccagcag

SEQ ID NO: 108216 - DNA, 25 bp, Canis familiaris
gaaggtggccaacttggaaaggcct

SEQ ID NO: 108217 - DNA, 25 bp, Canis familiaris
gaagggaatcaacttttcaaggtct

SEQ ID NO: 108218 - DNA, 25 bp, Canis familiaris
gaaggtggacaccactttccagttt

SEQ ID NO: 108219 - DNA, 25 bp, Canis familiaris
gaaggtgctgagtctgaccttgcct

SEQ ID NO: 108220 - DNA, 25 bp, Canis familiaris
gaagatctaagaaaccttgccttta

SEQ ID NO: 108221 - DNA, 25 bp, Canis familiaris
gaagttatagccaaacccgcttctc

SEQ ID NO: 108222 - DNA, 25 bp, Canis familiaris
gaagaaaaagccaacccgcttctct

SEQ ID NO: 108223 - DNA, 25 bp, Canis familiaris
gaagtaaaatgcctaacccgcttct

SEQ ID NO: 108224 - DNA, 25 bp, Canis familiaris
gaagttaaatgccaaacccgcttct

SEQ ID NO: 108225 - DNA, 25 bp, Canis familiaris
gaagctttacagttaaccgtctact

SEQ ID NO: 108226 - DNA, 25 bp, Canis familiaris
gaaggttgcaagttaatcaattttt

SEQ ID NO: 108227 - DNA, 25 bp, Canis familiaris
gaaggtcccagatatcctagttttg

SEQ ID NO: 108228 - DNA, 25 bp, Canis familiaris
gaaggtcagccaggtatcctgcagt

SEQ ID NO: 108229 - DNA, 25 bp, Canis familiaris
gaaggtgcactcaggacactgcagc

SEQ ID NO: 108230 - DNA, 25 bp, Canis familiaris
gaagttgtgctcagagatgttcagt

SEQ ID NO: 108231 - DNA, 25 bp, Canis familiaris
gaagggctgcctgggtgttagcaaa

SEQ ID NO: 108232 - DNA, 25 bp, Canis familiaris
gaagggaagtgggagttcagcattc

SEQ ID NO: 108233 - DNA, 25 bp, Canis familiaris
gaaggggatgccccagagtcgcatt

SEQ ID NO: 108234 - DNA, 25 bp, Canis familiaris
gaagggggtgcagagaggcctgtgc

SEQ ID NO: 108235 - DNA, 25 bp, Canis familiaris
gaaggggagtcaggggacctgtggg

SEQ ID NO: 108236 - DNA, 25 bp, Canis familiaris
gaagggcgaatggggtcatcctgtc

SEQ ID NO: 108237 - DNA, 25 bp, Canis familiaris
gaagggctgacggaggaaggtatct

SEQ ID NO: 108238 - DNA, 25 bp, Canis familiaris
gaaggtgcttcgtggaagagggctc

SEQ ID NO: 108239 - DNA, 25 bp, Canis familiaris
gaaggtgtctctccaggactaggtt

SEQ ID NO: 108240 - DNA, 25 bp, Canis familiaris
gaaggtgtctgtccacgtgatacga

SEQ ID NO: 108241 - DNA, 25 bp, Canis familiaris
gaagggatctgacatcactgatttg

SEQ ID NO: 108242 - DNA, 25 bp, Canis familiaris
gaaggtggccagactccaattgcag

SEQ ID NO: 108243 - DNA, 25 bp, Canis familiaris
gaaggtgagggactctcttctgagt

SEQ ID NO: 108244 - DNA, 25 bp, Canis familiaris
gaaggtgagggccatcccttggaac

SEQ ID NO: 108245 - DNA, 25 bp, Canis familiaris
gaaggtaaggctatgctcaggtgga

SEQ ID NO: 108246 - DNA, 25 bp, Canis familiaris
gaaggtcacgttattcagctggaga

SEQ ID NO: 108247 - DNA, 25 bp, Canis familiaris
gaaggtgcctggtttagtgctgtaa

SEQ ID NO: 108248 - DNA, 25 bp, Canis familiaris
gaaggtcctgacaaatagacatcca

SEQ ID NO: 108249 - DNA, 25 bp, Canis familiaris
gaaggtcatcaatagtcacagacca

SEQ ID NO: 108250 - DNA, 25 bp, Canis familiaris
gaagggagccatcagctaggaagct

SEQ ID NO: 108251 - DNA, 25 bp, Canis familiaris
gaagggcaccaccaggagtggagcc

SEQ ID NO: 108252 - DNA, 25 bp, Canis familiaris
gaagggctttcttggcaagggccct

SEQ ID NO: 108253 - DNA, 25 bp, Canis familiaris
gaagtgactttctggggcaggctct

SEQ ID NO: 108254 - DNA, 25 bp, Canis familiaris
gaaggtctgttaggcggagaggtat

SEQ ID NO: 108255 - DNA, 25 bp, Canis familiaris
gaaggtcgcatgaaaggacaagctt

SEQ ID NO: 108256 - DNA, 25 bp, Canis familiaris
gaagggcgcatatggaacggctctc

SEQ ID NO: 108257 - DNA, 25 bp, Canis familiaris
gaagggcctctgagaacctgccctt

SEQ ID NO: 108258 - DNA, 25 bp, Canis familiaris
gaagggcgtgcaaaacagcccccac

SEQ ID NO: 108259 - DNA, 25 bp, Canis familiaris
gaaggggtgggaaccacagcccatc

SEQ ID NO: 108260 - DNA, 25 bp, Canis familiaris
gaaggggagtggaccctcaggtgct

SEQ ID NO: 108261 - DNA, 25 bp, Canis familiaris
gaaggggaggtgtatcctgcattgg

SEQ ID NO: 108262 - DNA, 25 bp, Canis familiaris
gaagtggagggggcattgctgttcc

SEQ ID NO: 108263 - DNA, 25 bp, Canis familiaris
gaagggaggggaaatctgctgctag

SEQ ID NO: 108264 - DNA, 25 bp, Canis familiaris
gaaggtgggagtcactgctgtgcaa

SEQ ID NO: 108265 - DNA, 25 bp, Canis familiaris
gaagaggactagttacgttcaaggg

SEQ ID NO: 108266 - DNA, 25 bp, Canis familiaris
gaagtgcgttggccaacgttcaagg

SEQ ID NO: 108267 - DNA, 25 bp, Canis familiaris
gaagtgcgacgtggacatccgtaag

SEQ ID NO: 108268 - DNA, 25 bp, Canis familiaris
gaagtggacacacagtcctcaaagg

SEQ ID NO: 108269 - DNA, 25 bp, Canis familiaris
gaagtgaggcagaccagtccagcca

SEQ ID NO: 108270 - DNA, 25 bp, Canis familiaris
gaagtaccagtgtcaattaggaggc

SEQ ID NO: 108271 - DNA, 25 bp, Canis familiaris
gaagaaccgttgacttaagatcgta

SEQ ID NO: 108272 - DNA, 25 bp, Canis familiaris
gaagaacccagtcagtaaagcaaaa

SEQ ID NO: 108273 - DNA, 25 bp, Canis familiaris
gaagaagcccgctgcctaaaaactt

SEQ ID NO: 108274 - DNA, 25 bp, Canis familiaris
gaagaacccggtctgaactcttctt

SEQ ID NO: 108275 - DNA, 25 bp, Canis familiaris
gaacaacccaggagatggccctttt

SEQ ID NO: 108276 - DNA, 25 bp, Canis familiaris
gaaccacccaggtggttctcttcct

SEQ ID NO: 108277 - DNA, 25 bp, Canis familiaris
gaacgcaacgggtgggtcacctgtc

SEQ ID NO: 108278 - DNA, 25 bp, Canis familiaris
gaagggccgggatgtggaacctgtc

SEQ ID NO: 108279 - DNA, 25 bp, Canis familiaris
gaagaaccggttctccagaactgtt

SEQ ID NO: 108280 - DNA, 25 bp, Canis familiaris
gaagaaaatggctcgttcaaccttt

SEQ ID NO: 108281 - DNA, 25 bp, Canis familiaris
gactggaaccccgagttgcaaccag

SEQ ID NO: 108282 - DNA, 25 bp, Canis familiaris
gaagagggtcccgagttgacacaat

SEQ ID NO: 108283 - DNA, 25 bp, Canis familiaris
gaaggtaatccctgatgctacacca

SEQ ID NO: 108284 - DNA, 25 bp, Canis familiaris
gaaggtggagctgcaggagctgaac

SEQ ID NO: 108285 - DNA, 25 bp, Canis familiaris
gaaggtggtggccaagcagcatggg

SEQ ID NO: 108286 - DNA, 25 bp, Canis familiaris
gaaggtgtgggccaagcaagagctt

SEQ ID NO: 108287 - DNA, 25 bp, Canis familiaris
gaaggtggaggagagctcatggctc

SEQ ID NO: 108288 - DNA, 25 bp, Canis familiaris
gaaggggaggatgagctcggcgacg

SEQ ID NO: 108289 - DNA, 25 bp, Canis familiaris
gaagacgaacgtgagctactgcggc

SEQ ID NO: 108290 - DNA, 25 bp, Canis familiaris
gaagaacagagctgttgcccgggcc

SEQ ID NO: 108291 - DNA, 25 bp, Canis familiaris
gaagagcatctagacatggccacgc

SEQ ID NO: 108292 - DNA, 25 bp, Canis familiaris
gaagatgactgaggcatcagccaga

SEQ ID NO: 108293 - DNA, 25 bp, Canis familiaris
gaagtgcacagcttgcacaccaggc

SEQ ID NO: 108294 - DNA, 25 bp, Canis familiaris
gaagtgtcatgctgcagcactgtga

SEQ ID NO: 108295 - DNA, 25 bp, Canis familiaris
gaagatgccatgtagctgctgagta

SEQ ID NO: 108296 - DNA, 25 bp, Canis familiaris
gaagtccagacactgaacacaggtg

SEQ ID NO: 108297 - DNA, 25 bp, Canis familiaris
gaagatcgaagtcaagcacgttggg

SEQ ID NO: 108298 - DNA, 25 bp, Canis familiaris
gaagtcgtgagtcctcgacgggagg

SEQ ID NO: 108299 - DNA, 25 bp, Canis familiaris
gaagtggccagtcctcaagggagat

SEQ ID NO: 108300 - DNA, 25 bp, Canis familiaris
gaaagcgtagctcacacgggaattt

SEQ ID NO: 108301 - DNA, 25 bp, Canis familiaris
gaagggcatacagacacgtagacat

SEQ ID NO: 108302 - DNA, 25 bp, Canis familiaris
gaagttgctacattacctcggacat

SEQ ID NO: 108303 - DNA, 25 bp, Canis familiaris
gaagttggagcataccacggaggag

SEQ ID NO: 108304 - DNA, 25 bp, Canis familiaris
gaagatgtggcgtgacggccgaggg

SEQ ID NO: 108305 - DNA, 25 bp, Canis familiaris
gaagtgtgacgtggacaagccgagg

SEQ ID NO: 108306 - DNA, 25 bp, Canis familiaris
gaagggcacgctaacaaccgaacat

SEQ ID NO: 108307 - DNA, 25 bp, Canis familiaris
gactgcagccaagaaaagcgaaaaa

SEQ ID NO: 108308 - DNA, 25 bp, Canis familiaris
gaagaccaagaataatggccaaaaa

SEQ ID NO: 108309 - DNA, 25 bp, Canis familiaris
gaagaagcaaaagactggcgaaact

SEQ ID NO: 108310 - DNA, 25 bp, Canis familiaris
gaagaggggaacatgctggagaaac

SEQ ID NO: 108311 - DNA, 25 bp, Canis familiaris
gaagaggggatagggcacacacagc

SEQ ID NO: 108312 - DNA, 25 bp, Canis familiaris
gaagtggaggatccccaataccaaa

SEQ ID NO: 108313 - DNA, 25 bp, Canis familiaris
gaagaggaggaggcccaggaacaaa

SEQ ID NO: 108314 - DNA, 25 bp, Canis familiaris
gaagggagggagggaggagagagaa

SEQ ID NO: 108315 - DNA, 25 bp, Canis familiaris
gaagtgatgggatgttaggaagaga

SEQ ID NO: 108316 - DNA, 25 bp, Canis familiaris
gaagatgtagttttaagaaagatta

SEQ ID NO: 108317 - DNA, 25 bp, Canis familiaris
gaagtttggagctgaggtagagtta

SEQ ID NO: 108318 - DNA, 25 bp, Canis familiaris
gaagggcttgactcagactgaggtt

SEQ ID NO: 108319 - DNA, 25 bp, Canis familiaris
gaagggactgatcagcagagctggg

SEQ ID NO: 108320 - DNA, 25 bp, Canis familiaris
gaagtaacatgaaagctgagccagc

SEQ ID NO: 108321 - DNA, 25 bp, Canis familiaris
gaagatcacggactagtgacaagct

SEQ ID NO: 108322 - DNA, 25 bp, Canis familiaris
gaagatccgcgaccaggacaggaac

SEQ ID NO: 108323 - DNA, 25 bp, Canis familiaris
gaagtcggaccggagccatgagaag

SEQ ID NO: 108324 - DNA, 25 bp, Canis familiaris
gaagtggtcaccacacctggaatcc

SEQ ID NO: 108325 - DNA, 25 bp, Canis familiaris
gaacaggtcaatcagcccttggacc

SEQ ID NO: 108326 - DNA, 25 bp, Canis familiaris
gaagcgttactggagtagttggagc

SEQ ID NO: 108327 - DNA, 25 bp, Canis familiaris
gaagtgtaactgtgctattatttca

SEQ ID NO: 108328 - DNA, 25 bp, Canis familiaris
gaagtctaattatgttaaatatcca

SEQ ID NO: 108329 - DNA, 25 bp, Canis familiaris
gaagttcctgttggtaagaaacgcg

SEQ ID NO: 108330 - DNA, 25 bp, Canis familiaris
gaagtctccttccagttggggagcc

SEQ ID NO: 108331 - DNA, 25 bp, Canis familiaris
gaagtccctggagcagtgggtgacc

SEQ ID NO: 108332 - DNA, 25 bp, Canis familiaris
gaagtccctgggaagttcctgaatt

SEQ ID NO: 108333 - DNA, 25 bp, Canis familiaris
gaagtccctgtggagaacctctatc

SEQ ID NO: 108334 - DNA, 25 bp, Canis familiaris
gaagatccaaggagctgggcttaca

SEQ ID NO: 108335 - DNA, 25 bp, Canis familiaris
gaagttaagagacgcggagccccac

SEQ ID NO: 108336 - DNA, 25 bp, Canis familiaris
gaagttcaaatggcaagctggtcag

SEQ ID NO: 108337 - DNA, 25 bp, Canis familiaris
gaagtctgaacttgccgtggttgtt

SEQ ID NO: 108338 - DNA, 25 bp, Canis familiaris
gaagttgaactccatagagtttgct

SEQ ID NO: 108339 - DNA, 25 bp, Canis familiaris
gaagatgggaactagagcagttatg

SEQ ID NO: 108340 - DNA, 25 bp, Canis familiaris
gaagatcagaccgtgccacagtaat

SEQ ID NO: 108341 - DNA, 25 bp, Canis familiaris
gaagatcaagtttgcctataacatt

SEQ ID NO: 108342 - DNA, 25 bp, Canis familiaris
gaagtaagtctggctttgaccctcg

SEQ ID NO: 108343 - DNA, 25 bp, Canis familiaris
gaagtgtcaactgtctcgacctagc

SEQ ID NO: 108344 - DNA, 25 bp, Canis familiaris
gaagtatacactggattgcaactct

SEQ ID NO: 108345 - DNA, 25 bp, Canis familiaris
gaagtaatccatggttttccttttg

SEQ ID NO: 108346 - DNA, 25 bp, Canis familiaris
gaagtgcgatttctgcttttcgtgt

SEQ ID NO: 108347 - DNA, 25 bp, Canis familiaris
gacgtcgtcgtgttctaattgggtt

SEQ ID NO: 108348 - DNA, 25 bp, Canis familiaris
gaagttgcgagtttcgaattgttgt

SEQ ID NO: 108349 - DNA, 25 bp, Canis familiaris
gaagtctggatctctggtatttatt

SEQ ID NO: 108350 - DNA, 25 bp, Canis familiaris
gaagagcaaacagctggtttgaatt

SEQ ID NO: 108351 - DNA, 25 bp, Canis familiaris
gaagatgacccagatcatgtttgag

SEQ ID NO: 108352 - DNA, 25 bp, Canis familiaris
gaagatgcccctgattgggctgggc

SEQ ID NO: 108353 - DNA, 25 bp, Canis familiaris
gaagtcccctgtgattggctgatat

SEQ ID NO: 108354 - DNA, 25 bp, Canis familiaris
gaagtttcgcttgttattgttaccg

SEQ ID NO: 108355 - DNA, 25 bp, Canis familiaris
gaagtcgtcgtttttaggtatatgt

SEQ ID NO: 108356 - DNA, 25 bp, Canis familiaris
gaagtagtggttcttgcaggcttct

SEQ ID NO: 108357 - DNA, 25 bp, Canis familiaris
gaagtattctgatgtctccggtctt

SEQ ID NO: 108358 - DNA, 25 bp, Canis familiaris
gaagaatttgaatgccgaagttact

SEQ ID NO: 108359 - DNA, 25 bp, Canis familiaris
gaagaacttaagccctaagcctggc

SEQ ID NO: 108360 - DNA, 25 bp, Canis familiaris
gaagaatttaagtgtcagcagacgt

SEQ ID NO: 108361 - DNA, 25 bp, Canis familiaris
gaagttgttataaagttgaattgtg

SEQ ID NO: 108362 - DNA, 25 bp, Canis familiaris
gaagtcatttaaaggaggacatcct

SEQ ID NO: 108363 - DNA, 25 bp, Canis familiaris
gaagatcctggacagcgtgggcatc

SEQ ID NO: 108364 - DNA, 25 bp, Canis familiaris
gaagttgctagaaagcgaggagagc

SEQ ID NO: 108365 - DNA, 25 bp, Canis familiaris
gaagtagccaggctcgtaggcagcc

SEQ ID NO: 108366 - DNA, 25 bp, Canis familiaris
gaagtgaggcaggcttcccgaagcc

SEQ ID NO: 108367 - DNA, 25 bp, Canis familiaris
gaagtgagaccgacacattctgaag

SEQ ID NO: 108368 - DNA, 25 bp, Canis familiaris
gaagtgagacccacttctatctcca

SEQ ID NO: 108369 - DNA, 25 bp, Canis familiaris
gaagtagtccacatgtttgcagtta

SEQ ID NO: 108370 - DNA, 25 bp, Canis familiaris
gaagtgattccattagtattgttct

SEQ ID NO: 108371 - DNA, 25 bp, Canis familiaris
gaagggtctcatgactcaggtttta

SEQ ID NO: 108372 - DNA, 25 bp, Canis familiaris
gaagggacatctgaccaggttggat

SEQ ID NO: 108373 - DNA, 25 bp, Canis familiaris
gaagagagaaatgaccaagcttggg

SEQ ID NO: 108374 - DNA, 25 bp, Canis familiaris
gaagggagatatgtgcctagtgtag

SEQ ID NO: 108375 - DNA, 25 bp, Canis familiaris
gaagggaactgggtcattgtgaagc

SEQ ID NO: 108376 - DNA, 25 bp, Canis familiaris
gaagtgttagagtccttttgaatct

SEQ ID NO: 108377 - DNA, 25 bp, Canis familiaris
gaagaccgaagatttttatgaagct

SEQ ID NO: 108378 - DNA, 25 bp, Canis familiaris
gaagacttttgcttgttttccacat

SEQ ID NO: 108379 - DNA, 25 bp, Canis familiaris
gaagatttcctggtatttctcgaat

SEQ ID NO: 108380 - DNA, 25 bp, Canis familiaris
gaagtttcgcaggactactccaatc

SEQ ID NO: 108381 - DNA, 25 bp, Canis familiaris
gaagtatgtccgggcaagacctggc

SEQ ID NO: 108382 - DNA, 25 bp, Canis familiaris
gaagtagagtcctggaggcactgag

SEQ ID NO: 108383 - DNA, 25 bp, Canis familiaris
gaagtacattcttagaggacctcag

SEQ ID NO: 108384 - DNA, 25 bp, Canis familiaris
gaagttctacattgagggctccgag

SEQ ID NO: 108385 - DNA, 25 bp, Canis familiaris
gaagatattcaatggaagcgcgggt

SEQ ID NO: 108386 - DNA, 25 bp, Canis familiaris
gaagaatgtgcgtggtcaccgggtc

SEQ ID NO: 108387 - DNA, 25 bp, Canis familiaris
gaagaagccacccagtacgggcatt

SEQ ID NO: 108388 - DNA, 25 bp, Canis familiaris
gaagagttccgggtgagcagggcat

SEQ ID NO: 108389 - DNA, 25 bp, Canis familiaris
gggcaaaccaggggcactctggatc

SEQ ID NO: 108390 - DNA, 25 bp, Canis familiaris
gaagaaacgagagccactccgatct

SEQ ID NO: 108391 - DNA, 25 bp, Canis familiaris
gaagcaattctaagactttccgacg

SEQ ID NO: 108392 - DNA, 25 bp, Canis familiaris
gaagaacctacatatgtgatcccaa

SEQ ID NO: 108393 - DNA, 25 bp, Canis familiaris
gaaaaccaagacctgagtccctgtc

SEQ ID NO: 108394 - DNA, 25 bp, Canis familiaris
gaagtactgaataaggagtccctag

SEQ ID NO: 108395 - DNA, 25 bp, Canis familiaris
gaagtcctgaggagcaactgccttc

SEQ ID NO: 108396 - DNA, 25 bp, Canis familiaris
gaagtcctgagtgaagagcccattc

SEQ ID NO: 108397 - DNA, 25 bp, Canis familiaris
gaagagggagcagaatgggacattc

SEQ ID NO: 108398 - DNA, 25 bp, Canis familiaris
gaagaggtgacaggtgcaagcaatc

SEQ ID NO: 108399 - DNA, 25 bp, Canis familiaris
gaagagcgtgaccgcaagaccatca

SEQ ID NO: 108400 - DNA, 25 bp, Canis familiaris
gaagaggcgctctcaagatggctgc

SEQ ID NO: 108401 - DNA, 25 bp, Canis familiaris
gaagatgggcatcacaagtgaatgc

SEQ ID NO: 108402 - DNA, 25 bp, Canis familiaris
gaagtggagcacaacaactgaagtt

SEQ ID NO: 108403 - DNA, 25 bp, Canis familiaris
gaagtggagcctacaagatagttat

SEQ ID NO: 108404 - DNA, 25 bp, Canis familiaris
gaagggagccctgagaagagtcatt

SEQ ID NO: 108405 - DNA, 25 bp, Canis familiaris
gaagggcaccatactaacagactcg

SEQ ID NO: 108406 - DNA, 25 bp, Canis familiaris
gaagggatcccaattaaaccagtat

SEQ ID NO: 108407 - DNA, 25 bp, Canis familiaris
gacagggaccacctctacaaaaaat

SEQ ID NO: 108408 - DNA, 25 bp, Canis familiaris
gaagggagaatcctgtacttaccct

SEQ ID NO: 108409 - DNA, 25 bp, Canis familiaris
gaagggaaatctgctacctagtctt

SEQ ID NO: 108410 - DNA, 25 bp, Canis familiaris
gaagggaactgcactgcacactctt

SEQ ID NO: 108411 - DNA, 25 bp, Canis familiaris
gaagggacactgaaggacactgtag

SEQ ID NO: 108412 - DNA, 25 bp, Canis familiaris
gaagggtcacagacgaacctgagag

SEQ ID NO: 108413 - DNA, 25 bp, Canis familiaris
gaagaggccatgaacgagatccggg

SEQ ID NO: 108414 - DNA, 25 bp, Canis familiaris
gaagggctcatgaccacagtccatg

SEQ ID NO: 108415 - DNA, 25 bp, Canis familiaris
gaagatttcatacctcatgaccatt

SEQ ID NO: 108416 - DNA, 25 bp, Canis familiaris
gaagaagtaactccagaacagctga

SEQ ID NO: 108417 - DNA, 25 bp, Canis familiaris
gaaccacctagtccgaactgtaatc

SEQ ID NO: 108418 - DNA, 25 bp, Canis familiaris
gaaccacaagcggacgacacggaac

SEQ ID NO: 108419 - DNA, 25 bp, Canis familiaris
tcgaccgaacgaacgttccaaacat

SEQ ID NO: 108420 - DNA, 25 bp, Canis familiaris
gacttcgaaggcacgttccaacgtg

SEQ ID NO: 108421 - DNA, 25 bp, Canis familiaris
gactgggggaggagttccgaggtgg

SEQ ID NO: 108422 - DNA, 25 bp, Canis familiaris
gactgacgggactgttgtttgggtg

SEQ ID NO: 108423 - DNA, 25 bp, Canis familiaris
gaagccatcctatttggttttgggg

SEQ ID NO: 108424 - DNA, 25 bp, Canis familiaris
gaagtccttctaatgttaattggtg

SEQ ID NO: 108425 - DNA, 25 bp, Canis familiaris
gaagattttctgagtctactgctgg

SEQ ID NO: 108426 - DNA, 25 bp, Canis familiaris
gaagagttatggcccctacgggcta

SEQ ID NO: 108427 - DNA, 25 bp, Canis familiaris
gaagaatttcggacccaagggctgg

SEQ ID NO: 108428 - DNA, 25 bp, Canis familiaris
gaagattatttgtgcccataacctt

SEQ ID NO: 108429 - DNA, 25 bp, Canis familiaris
gaagtctttctggggatcatcaaat

SEQ ID NO: 108430 - DNA, 25 bp, Canis familiaris
gaagtgtcttctactggtatgcagg

SEQ ID NO: 108431 - DNA, 25 bp, Canis familiaris
gaagtgtgttgtactgcggggtcaa

SEQ ID NO: 108432 - DNA, 25 bp, Canis familiaris
gaagtgacatttgcgctagggtgga

SEQ ID NO: 108433 - DNA, 25 bp, Canis familiaris
gaagtactgattgcccacagcttgc

SEQ ID NO: 108434 - DNA, 25 bp, Canis familiaris
gaagtagcttatgcttctctgttcc

SEQ ID NO: 108435 - DNA, 25 bp, Canis familiaris
gaagggcttcgagttctctgtgccc

SEQ ID NO: 108436 - DNA, 25 bp, Canis familiaris
gaagggcttcgagttctctgtgccc

SEQ ID NO: 108437 - DNA, 25 bp, Canis familiaris
gaagtgttagctgcttctgcttgcc

SEQ ID NO: 108438 - DNA, 25 bp, Canis familiaris
gaagtgtaatctagtctgtgtgtgt

SEQ ID NO: 108439 - DNA, 25 bp, Canis familiaris
gaagtgtgcatacagccttgtgtgt

SEQ ID NO: 108440 - DNA, 25 bp, Canis familiaris
gaagtgcctaaatctgtggtgtttt

SEQ ID NO: 108441 - DNA, 25 bp, Canis familiaris
gaagtcttgaactgtgttgtgttta

SEQ ID NO: 108442 - DNA, 25 bp, Canis familiaris
gaagagtttttcagttgctttatca

SEQ ID NO: 108443 - DNA, 25 bp, Canis familiaris
gaagtggcttattttgttcctgata

SEQ ID NO: 108444 - DNA, 25 bp, Canis familiaris
gaagggctgcttttagtgattagac

SEQ ID NO: 108445 - DNA, 25 bp, Canis familiaris
gaagaggtgccctatagtgacccac

SEQ ID NO: 108446 - DNA, 25 bp, Canis familiaris
gaagaggacccattggtgcctccaa

SEQ ID NO: 108447 - DNA, 25 bp, Canis familiaris
gaagttgacccattgtggtgtcgac

SEQ ID NO: 108448 - DNA, 25 bp, Canis familiaris
gaagttcaggccttgtggctgggtc

SEQ ID NO: 108449 - DNA, 25 bp, Canis familiaris
gaagtcggtgaggtaggcggcgtcg

SEQ ID NO: 108450 - DNA, 25 bp, Canis familiaris
gaagggcaggagggagggggatggg

SEQ ID NO: 108451 - DNA, 25 bp, Canis familiaris
gaagagaagggggacaccagtaggg

SEQ ID NO: 108452 - DNA, 25 bp, Canis familiaris
gtaataatggggggtccggacatgg

SEQ ID NO: 108453 - DNA, 25 bp, Canis familiaris
gaagtagtgtggaggccctggactg

SEQ ID NO: 108454 - DNA, 25 bp, Canis familiaris
gaagtctggcgggaagccttacacg

SEQ ID NO: 108455 - DNA, 25 bp, Canis familiaris
gaagacggctggaaacccaaactca

SEQ ID NO: 108456 - DNA, 25 bp, Canis familiaris
gaagtctggcagggaacgccaaccc

SEQ ID NO: 108457 - DNA, 25 bp, Canis familiaris
gaagtctggcaggaacgccaacccc

SEQ ID NO: 108458 - DNA, 25 bp, Canis familiaris
gaagtctggcaggaacgccaacccc

SEQ ID NO: 108459 - DNA, 25 bp, Canis familiaris
gaagctattgccaagacctcaagtc

SEQ ID NO: 108460 - DNA, 25 bp, Canis familiaris
gaagctattgccaagacctcaagtc

SEQ ID NO: 108461 - DNA, 25 bp, Canis familiaris
gaagctattgccaagacctcaagtc

SEQ ID NO: 108462 - DNA, 25 bp, Canis familiaris
gaagctattgccaagacctcaagtc

SEQ ID NO: 108463 - DNA, 25 bp, Canis familiaris
gaagctattgccaagacctcaagtc

SEQ ID NO: 108464 - DNA, 25 bp, Canis familiaris
gaagctattgccaagacctcaagtc

SEQ ID NO: 108465 - DNA, 25 bp, Canis familiaris
gaagttggctaattttaagtcacat

SEQ ID NO: 108466 - DNA, 25 bp, Canis familiaris
gaagtgtcctaatcctatatgtgag

SEQ ID NO: 108467 - DNA, 25 bp, Canis familiaris
gaagagttcttctcacatagctggg

SEQ ID NO: 108468 - DNA, 25 bp, Canis familiaris
gaagtacctatcttacaggcttggt

SEQ ID NO: 108469 - DNA, 25 bp, Canis familiaris
gaggaacgttttgcagccaacgtcg

SEQ ID NO: 108470 - DNA, 25 bp, Canis familiaris
gaagataagtttacacaaccacctg

SEQ ID NO: 108471 - DNA, 25 bp, Canis familiaris
gaagaaatgtactgtcaggcccctg

SEQ ID NO: 108472 - DNA, 25 bp, Canis familiaris
gaagaggttgtcagctcaggcctcc

SEQ ID NO: 108473 - DNA, 25 bp, Canis familiaris
gaagatggttacttccggatccgca

SEQ ID NO: 108474 - DNA, 25 bp, Canis familiaris
gaagacagaaaatggggcatcggca

SEQ ID NO: 108475 - DNA, 25 bp, Canis familiaris
gaagacgacgtgaggggcatccagc

SEQ ID NO: 108476 - DNA, 25 bp, Canis familiaris
gaagacgtcagtagtggggatccct

SEQ ID NO: 108477 - DNA, 25 bp, Canis familiaris
gaagacacttgaatttaggaccgac

SEQ ID NO: 108478 - DNA, 25 bp, Canis familiaris
gagcagctccgggtcttaggaaaac

SEQ ID NO: 108479 - DNA, 25 bp, Canis familiaris
gaagtcccagctgttaagcaggata

SEQ ID NO: 108480 - DNA, 25 bp, Canis familiaris
gaagtctccatctttgatttcggtg

SEQ ID NO: 108481 - DNA, 25 bp, Canis familiaris
gaagatccctccaagaatttgggtg

SEQ ID NO: 108482 - DNA, 25 bp, Canis familiaris
gaagattccccaagcaattgccaaa

SEQ ID NO: 108483 - DNA, 25 bp, Canis familiaris
gaagttctaccaagatttaaacatt

SEQ ID NO: 108484 - DNA, 25 bp, Canis familiaris
gaagatttaccagattttagctttg

SEQ ID NO: 108485 - DNA, 25 bp, Canis familiaris
gaagactttcacatcctgttagctt

SEQ ID NO: 108486 - DNA, 25 bp, Canis familiaris
gaagtctcctacatccagtgtatta

SEQ ID NO: 108487 - DNA, 25 bp, Canis familiaris
gaagtcatgccttcatcctgaattc

SEQ ID NO: 108488 - DNA, 25 bp, Canis familiaris
gaagtatctctttagtcaattcaaa

SEQ ID NO: 108489 - DNA, 25 bp, Canis familiaris
gaagtgatccttcagtttgcaaaag

SEQ ID NO: 108490 - DNA, 25 bp, Canis familiaris
gaagtcacttccaagtcaccaagac

SEQ ID NO: 108491 - DNA, 25 bp, Canis familiaris
gaagtcaattcccagatagcactag

SEQ ID NO: 108492 - DNA, 25 bp, Canis familiaris
gaagtgacatctgtgctgaagcagt

SEQ ID NO: 108493 - DNA, 25 bp, Canis familiaris
gaagggcattgcagtgagcggctcc

SEQ ID NO: 108494 - DNA, 25 bp, Canis familiaris
gaagggcttgagggctgagctgctc

SEQ ID NO: 108495 - DNA, 25 bp, Canis familiaris
gaagtgatgctcaggcagctagccc

SEQ ID NO: 108496 - DNA, 25 bp, Canis familiaris
gaagatgagctccagcgacacaacc

SEQ ID NO: 108497 - DNA, 25 bp, Canis familiaris
gaagaggcttcccaagaaaccgcct

SEQ ID NO: 108498 - DNA, 25 bp, Canis familiaris
gaagtagctgtcccacaaaattcat

SEQ ID NO: 108499 - DNA, 25 bp, Canis familiaris
gaagtcgtgtatcatgaatataatc

SEQ ID NO: 108500 - DNA, 25 bp, Canis familiaris
gaagtcgtgaatttcgtcataatct

SEQ ID NO: 108501 - DNA, 25 bp, Canis familiaris
gaagtgcgggctttcacattggacc

SEQ ID NO: 108502 - DNA, 25 bp, Canis familiaris
gagaagggggttcagggatccccag

SEQ ID NO: 108503 - DNA, 25 bp, Canis familiaris
gtaatggggtttctgacgaagccga

SEQ ID NO: 108504 - DNA, 25 bp, Canis familiaris
gaagtggggtttctgtccagaccaa

SEQ ID NO: 108505 - DNA, 25 bp, Canis familiaris
gaagtgagacgttgtgggacgatga

SEQ ID NO: 108506 - DNA, 25 bp, Canis familiaris
gaagtacagcttttggtgcaccaac

SEQ ID NO: 108507 - DNA, 25 bp, Canis familiaris
gaagttcagttccatggtagccatt

SEQ ID NO: 108508 - DNA, 25 bp, Canis familiaris
gaagtaacatctaagactcagcctt

SEQ ID NO: 108509 - DNA, 25 bp, Canis familiaris
gaagtcaactgaataccatctccat

SEQ ID NO: 108510 - DNA, 25 bp, Canis familiaris
gaagtcaagccaaacattcatctta

SEQ ID NO: 108511 - DNA, 25 bp, Canis familiaris
gaagtcatacggaagcgtctcttaa

SEQ ID NO: 108512 - DNA, 25 bp, Canis familiaris
gaagtgatcctgttagctttttaaa

SEQ ID NO: 108513 - DNA, 25 bp, Canis familiaris
gaagtgatgacttgttgcttttcaa

SEQ ID NO: 108514 - DNA, 25 bp, Canis familiaris
gaagatatgccttgttgatcctgac

SEQ ID NO: 108515 - DNA, 25 bp, Canis familiaris
gaagatatgggctgtatgccatgga

SEQ ID NO: 108516 - DNA, 25 bp, Canis familiaris
gaagatggatgccgagttccgacat

SEQ ID NO: 108517 - DNA, 25 bp, Canis familiaris
gaagcatggttacattggcgaattt

SEQ ID NO: 108518 - DNA, 25 bp, Canis familiaris
gaagaagtggaccattggctttctc

SEQ ID NO: 108519 - DNA, 25 bp, Canis familiaris
gaagcagagttagggggttgttcca

SEQ ID NO: 108520 - DNA, 25 bp, Canis familiaris
gaagcataggtaagggcctgccgtc

SEQ ID NO: 108521 - DNA, 25 bp, Canis familiaris
gaagatcaagaacatggcggcctcc

SEQ ID NO: 108522 - DNA, 25 bp, Canis familiaris
gaagagaatgaaccaggcccttctg

SEQ ID NO: 108523 - DNA, 25 bp, Canis familiaris
gaagtaataaaacaggcttcattta

SEQ ID NO: 108524 - DNA, 25 bp, Canis familiaris
gaagtaaccacctgaagattattta

SEQ ID NO: 108525 - DNA, 25 bp, Canis familiaris
gaagtaagtacctgagatgatggca

SEQ ID NO: 108526 - DNA, 25 bp, Canis familiaris
gaagtagcataaactccatgttgga

SEQ ID NO: 108527 - DNA, 25 bp, Canis familiaris
gaagttgcagaaccggatgttgaaa

SEQ ID NO: 108528 - DNA, 25 bp, Canis familiaris
gaagaatggccaccgggtttcaaag

SEQ ID NO: 108529 - DNA, 25 bp, Canis familiaris
gaagaatgaccctctttttagaagt

SEQ ID NO: 108530 - DNA, 25 bp, Canis familiaris
gaagaatgcatacccgtgttttaaa

SEQ ID NO: 108531 - DNA, 25 bp, Canis familiaris
gaagaatctaccggtattccacacc

SEQ ID NO: 108532 - DNA, 25 bp, Canis familiaris
gataatttaaaataatcccccagtg

SEQ ID NO: 108533 - DNA, 25 bp, Canis familiaris
gaactttaaaaacatgacccgagtg

SEQ ID NO: 108534 - DNA, 25 bp, Canis familiaris
gaaacttgtaaaatgtagaccacgg

SEQ ID NO: 108535 - DNA, 25 bp, Canis familiaris
gaaactagttaaactgtaacagtgg

SEQ ID NO: 108536 - DNA, 25 bp, Canis familiaris
gaagacttcatttaccctgaacgag

SEQ ID NO: 108537 - DNA, 25 bp, Canis familiaris
gaagagtctcaatatcgttaatcgg

SEQ ID NO: 108538 - DNA, 25 bp, Canis familiaris
gaagaggctaaatgggttggcagga

SEQ ID NO: 108539 - DNA, 25 bp, Canis familiaris
gaagaaccaagctgggtctatgagg

SEQ ID NO: 108540 - DNA, 25 bp, Canis familiaris
gaagaaacaacccagaggctacggc

SEQ ID NO: 108541 - DNA, 25 bp, Canis familiaris
gaagaataaacgccagaacccgctt

SEQ ID NO: 108542 - DNA, 25 bp, Canis familiaris
gaagaatggactgacgatgacctcg

SEQ ID NO: 108543 - DNA, 25 bp, Canis familiaris
gaagaagggtgggcctgcccacttc

SEQ ID NO: 108544 - DNA, 25 bp, Canis familiaris
gaagaaggatgtgtctccacccttt

SEQ ID NO: 108545 - DNA, 25 bp, Canis familiaris
gaagtagaaaggtctcctccacata

SEQ ID NO: 108546 - DNA, 25 bp, Canis familiaris
gaagtgagaaaccatcacctcccat

SEQ ID NO: 108547 - DNA, 25 bp, Canis familiaris
gaagtgagaatgttaagcctcgaca

SEQ ID NO: 108548 - DNA, 25 bp, Canis familiaris
gaagtgcggaattgaggactctgaa

SEQ ID NO: 108549 - DNA, 25 bp, Canis familiaris
gaagtctagacattggacctataca

SEQ ID NO: 108550 - DNA, 25 bp, Canis familiaris
gaagtcgaggcagtggtccaacagc

SEQ ID NO: 108551 - DNA, 25 bp, Canis familiaris
gaagtcctgagcaatttctccacca

SEQ ID NO: 108552 - DNA, 25 bp, Canis familiaris
gaagtcagtggcatttctatacaca

SEQ ID NO: 108553 - DNA, 25 bp, Canis familiaris
gaagtcattggcaattactattcat

SEQ ID NO: 108554 - DNA, 25 bp, Canis familiaris
gaagtcactgaattttcatcctcat

SEQ ID NO: 108555 - DNA, 25 bp, Canis familiaris
gaagatcctgaacttacctcttccc

SEQ ID NO: 108556 - DNA, 25 bp, Canis familiaris
gaagacattattagctacccttctt

SEQ ID NO: 108557 - DNA, 25 bp, Canis familiaris
gaagactcagattaattcccttctg

SEQ ID NO: 108558 - DNA, 25 bp, Canis familiaris
gaagttgcactatgtaccatattct

SEQ ID NO: 108559 - DNA, 25 bp, Canis familiaris
gaagttatttctcaccttctctaat

SEQ ID NO: 108560 - DNA, 25 bp, Canis familiaris
gaagtgaaactctgacgttccttat

SEQ ID NO: 108561 - DNA, 25 bp, Canis familiaris
gaactggaagcctagggttgcctgt

SEQ ID NO: 108562 - DNA, 25 bp, Canis familiaris
gactctaacacctacacgttcaagg

SEQ ID NO: 108563 - DNA, 25 bp, Canis familiaris
gactcgtgggccacacagattcggg

SEQ ID NO: 108564 - DNA, 25 bp, Canis familiaris
gaagaaggcgccaaatctgttcggg

SEQ ID NO: 108565 - DNA, 25 bp, Canis familiaris
gaagaagggcacctcatcagttcct

SEQ ID NO: 108566 - DNA, 25 bp, Canis familiaris
gaagagtaggttcgatcgcttcctc

SEQ ID NO: 108567 - DNA, 25 bp, Canis familiaris
gaagatgcttggaggaacttgtctc

SEQ ID NO: 108568 - DNA, 25 bp, Canis familiaris
gaagatgcttgtattggactcagac

SEQ ID NO: 108569 - DNA, 25 bp, Canis familiaris
gaagtgtctcacatctgaaatcata

SEQ ID NO: 108570 - DNA, 25 bp, Canis familiaris
gaagtgcttcacccataaatagatg

SEQ ID NO: 108571 - DNA, 25 bp, Canis familiaris
gaagtctacaggttacatacagatt

SEQ ID NO: 108572 - DNA, 25 bp, Canis familiaris
gaagtcatcaaggtgtacattttta

SEQ ID NO: 108573 - DNA, 25 bp, Canis familiaris
gaagtatgctagactatttgcttta

SEQ ID NO: 108574 - DNA, 25 bp, Canis familiaris
gaagtaaatcctagttgcttaatca

SEQ ID NO: 108575 - DNA, 25 bp, Canis familiaris
gaagtcaaacaccctttgtattcca

SEQ ID NO: 108576 - DNA, 25 bp, Canis familiaris
gaaccatgaaaccacttatccaacc

SEQ ID NO: 108577 - DNA, 25 bp, Canis familiaris
gaagtctgaaaaccatacacagcaa

SEQ ID NO: 108578 - DNA, 25 bp, Canis familiaris
gaagtcgagagaagtcaacccctgc

SEQ ID NO: 108579 - DNA, 25 bp, Canis familiaris
gaagttgagccagggcatcaccctc

SEQ ID NO: 108580 - DNA, 25 bp, Canis familiaris
gaagttgcctaaggccacacagctc

SEQ ID NO: 108581 - DNA, 25 bp, Canis familiaris
gaagtttatataggtgcacacagct

SEQ ID NO: 108582 - DNA, 25 bp, Canis familiaris
gaagagtttggattgtacacagcat

SEQ ID NO: 108583 - DNA, 25 bp, Canis familiaris
gaagagtttgaagaccaccatggtt

SEQ ID NO: 108584 - DNA, 25 bp, Canis familiaris
gtagttttctaggtccaccaggttg

SEQ ID NO: 108585 - DNA, 25 bp, Canis familiaris
gaagtattgtttctcttccaggctt

SEQ ID NO: 108586 - DNA, 25 bp, Canis familiaris
gaagttttcattttcttacactttg

SEQ ID NO: 108587 - DNA, 25 bp, Canis familiaris
gaagttttccattttgtacagctct

SEQ ID NO: 108588 - DNA, 25 bp, Canis familiaris
gaagttcttcactattttggcctct

SEQ ID NO: 108589 - DNA, 25 bp, Canis familiaris
gaagttcttaccaatattttgtatt

SEQ ID NO: 108590 - DNA, 25 bp, Canis familiaris
gaagttttcactagttttgttgtcg

SEQ ID NO: 108591 - DNA, 25 bp, Canis familiaris
gaagttttcactattatgtttctaa

SEQ ID NO: 108592 - DNA, 25 bp, Canis familiaris
gaagttatctcacatcttggctttc

SEQ ID NO: 108593 - DNA, 25 bp, Canis familiaris
gaacctaccaaagcttgtgtatctt

SEQ ID NO: 108594 - DNA, 25 bp, Canis familiaris
gaacgtgaacgaacctctcgtactt

SEQ ID NO: 108595 - DNA, 25 bp, Canis familiaris
gaagcgtagacgatccagtggttcc

SEQ ID NO: 108596 - DNA, 25 bp, Canis familiaris
gaagaggaagcgaaccatctggctg

SEQ ID NO: 108597 - DNA, 25 bp, Canis familiaris
gaagagctagggcacctttgggacc

SEQ ID NO: 108598 - DNA, 25 bp, Canis familiaris
gaagtaggggcatcccttgtggcag

SEQ ID NO: 108599 - DNA, 25 bp, Canis familiaris
gaagtagctgggtccattctgggtc

SEQ ID NO: 108600 - DNA, 25 bp, Canis familiaris
gaagatacataggagtgtgtgtgtg

SEQ ID NO: 108601 - DNA, 25 bp, Canis familiaris
gaagtataagtgaggtgtggtggag

SEQ ID NO: 108602 - DNA, 25 bp, Canis familiaris
gaagtattggtgcagtttgagggtg

SEQ ID NO: 108603 - DNA, 25 bp, Canis familiaris
gaagagattggtggagggagaggga

SEQ ID NO: 108604 - DNA, 25 bp, Canis familiaris
gaagaatatagtgactgggggcatc

SEQ ID NO: 108605 - DNA, 25 bp, Canis familiaris
gaagaagaagggccgttctgccatc

SEQ ID NO: 108606 - DNA, 25 bp, Canis familiaris
gaagaaatgctggtggtgtcctccc

SEQ ID NO: 108607 - DNA, 25 bp, Canis familiaris
gaagataagctggcagtgtccactt

SEQ ID NO: 108608 - DNA, 25 bp, Canis familiaris
gaagaagcagggcaatccatcattt

SEQ ID NO: 108609 - DNA, 25 bp, Canis familiaris
gaagaaatgggctacattttctacc

SEQ ID NO: 108610 - DNA, 25 bp, Canis familiaris
gaagtcacggagtccaatgagttac

SEQ ID NO: 108611 - DNA, 25 bp, Canis familiaris
gaagtcagtaagttgcgtagtagca

SEQ ID NO: 108612 - DNA, 25 bp, Canis familiaris
gaagacctgattctcctagtagacc

SEQ ID NO: 108613 - DNA, 25 bp, Canis familiaris
gaagacgctcagcaatctggagtaa

SEQ ID NO: 108614 - DNA, 25 bp, Canis familiaris
gaagtcctcaagtatctacctgata

SEQ ID NO: 108615 - DNA, 25 bp, Canis familiaris
gaagtccaagatctgattcggcata

SEQ ID NO: 108616 - DNA, 25 bp, Canis familiaris
gaagtccagtatcctgattctacag

SEQ ID NO: 108617 - DNA, 25 bp, Canis familiaris
gaagttcatggacgtctaccagcgc

SEQ ID NO: 108618 - DNA, 25 bp, Canis familiaris
gaagttcagtggatcagcactccgg

SEQ ID NO: 108619 - DNA, 25 bp, Canis familiaris
gaagtacagggactggcactggcct

SEQ ID NO: 108620 - DNA, 25 bp, Canis familiaris
gaagtagaggcgactcgccgggctc

SEQ ID NO: 108621 - DNA, 25 bp, Canis familiaris
gaagtcatcttggagccgacgtagc

SEQ ID NO: 108622 - DNA, 25 bp, Canis familiaris
gaagtctctgtgacacaagcactga

SEQ ID NO: 108623 - DNA, 25 bp, Canis familiaris
gaagtacattgcaagaaccatgaaa

SEQ ID NO: 108624 - DNA, 25 bp, Canis familiaris
gaagtccactgcaacactgctatga

SEQ ID NO: 108625 - DNA, 25 bp, Canis familiaris
gaagtccagctgccaggatgtatag

SEQ ID NO: 108626 - DNA, 25 bp, Canis familiaris
gaagatccagcttcaggacgcaggc

SEQ ID NO: 108627 - DNA, 25 bp, Canis familiaris
gaagatccccgagtacgatgatgct

SEQ ID NO: 108628 - DNA, 25 bp, Canis familiaris
gaagatgcagcctggcaagcagaag

SEQ ID NO: 108629 - DNA, 25 bp, Canis familiaris
gaagatgcaggccaacaatgccaag

SEQ ID NO: 108630 - DNA, 25 bp, Canis familiaris
gaagatcaactatcacgtcgacgtc

SEQ ID NO: 108631 - DNA, 25 bp, Canis familiaris
gaagaaactggaccgtcaactgctg

SEQ ID NO: 108632 - DNA, 25 bp, Canis familiaris
gaagagaatctgttccactatttag

SEQ ID NO: 108633 - DNA, 25 bp, Canis familiaris
gaagtaagtgttgctctcattgtgt

SEQ ID NO: 108634 - DNA, 25 bp, Canis familiaris
gaagtaacgcctaccaattattctc

SEQ ID NO: 108635 - DNA, 25 bp, Canis familiaris
gaagtacctcatgttgaatgttatt

SEQ ID NO: 108636 - DNA, 25 bp, Canis familiaris
gaagtatcactatttctatatttgt

SEQ ID NO: 108637 - DNA, 25 bp, Canis familiaris
gaagatcaaagtattatatgctgtg

SEQ ID NO: 108638 - DNA, 25 bp, Canis familiaris
gaagatccacggatttgctctggcc

SEQ ID NO: 108639 - DNA, 25 bp, Canis familiaris
gaagactgggagatgtgtgtgtgtg

SEQ ID NO: 108640 - DNA, 25 bp, Canis familiaris
gaagtcaggaccatgttggctgctg

SEQ ID NO: 108641 - DNA, 25 bp, Canis familiaris
gaagtctgtgatcatgtttgggtca

SEQ ID NO: 108642 - DNA, 25 bp, Canis familiaris
gaagtctgtcagtattattggtatt

SEQ ID NO: 108643 - DNA, 25 bp, Canis familiaris
gaagtcagatgttcttttggaagat

SEQ ID NO: 108644 - DNA, 25 bp, Canis familiaris
gaagtaaagtctgttgaaatgcacc

SEQ ID NO: 108645 - DNA, 25 bp, Canis familiaris
gaagctaaacccgtatgcaaagacc

SEQ ID NO: 108646 - DNA, 25 bp, Canis familiaris
gaagtaaagacttcctccaagccac

SEQ ID NO: 108647 - DNA, 25 bp, Canis familiaris
gaagtatagtgaattcctgcctagc

SEQ ID NO: 108648 - DNA, 25 bp, Canis familiaris
gaagtatgcggtcaaagcctgagcc

SEQ ID NO: 108649 - DNA, 25 bp, Canis familiaris
gaagtagactgtgatataggctata

SEQ ID NO: 108650 - DNA, 25 bp, Canis familiaris
gaagatggttcggcaaagcgcttga

SEQ ID NO: 108651 - DNA, 25 bp, Canis familiaris
gaagaggtttgttcatgaagtcgca

SEQ ID NO: 108652 - DNA, 25 bp, Canis familiaris
gaagatctttttgcagaagccacag

SEQ ID NO: 108653 - DNA, 25 bp, Canis familiaris
gaagatctgtgtataacaagcaaca

SEQ ID NO: 108654 - DNA, 25 bp, Canis familiaris
gaagatctggcaatgtgcaagcaca

SEQ ID NO: 108655 - DNA, 25 bp, Canis familiaris
gaagatgctgatgcttctgctgctc

SEQ ID NO: 108656 - DNA, 25 bp, Canis familiaris
gaagagctgatcgacatcatcctcc

SEQ ID NO: 108657 - DNA, 25 bp, Canis familiaris
gaagactgacaagtatttttggaat

SEQ ID NO: 108658 - DNA, 25 bp, Canis familiaris
gaagtctgtgaaccttgttggccaa

SEQ ID NO: 108659 - DNA, 25 bp, Canis familiaris
gaagtcacataacctttctgagcca

SEQ ID NO: 108660 - DNA, 25 bp, Canis familiaris
gaagatgagattgacttcctggccc

SEQ ID NO: 108661 - DNA, 25 bp, Canis familiaris
gaagatggcaccatcgtggctaccc

SEQ ID NO: 108662 - DNA, 25 bp, Canis familiaris
gaagatggcaccatcgtggctaccc

SEQ ID NO: 108663 - DNA, 25 bp, Canis familiaris
gaagatggcaccatcgtggctaccc

SEQ ID NO: 108664 - DNA, 25 bp, Canis familiaris
gaagatggcaccatcgtggctaccc

SEQ ID NO: 108665 - DNA, 25 bp, Canis familiaris
gaagatggcaccatcgtggctaccc

SEQ ID NO: 108666 - DNA, 25 bp, Canis familiaris
gaagatggcaccatcgtggctaccc

SEQ ID NO: 108667 - DNA, 25 bp, Canis familiaris
gaagatggcaccatcgtggctaccc

SEQ ID NO: 108668 - DNA, 25 bp, Canis familiaris
gaagatggcaccatcgtggctaccc

SEQ ID NO: 108669 - DNA, 25 bp, Canis familiaris
gaagatggcaccatcgtggctaccc

SEQ ID NO: 108670 - DNA, 25 bp, Canis familiaris
gaagatggcaccatcgtggctaccc

SEQ ID NO: 108671 - DNA, 25 bp, Canis familiaris
gaagatcagcaccgtggtgagctcc

SEQ ID NO: 108672 - DNA, 25 bp, Canis familiaris
gaagatcagtctggctggtggttta

SEQ ID NO: 108673 - DNA, 25 bp, Canis familiaris
gaagcatatgcctctggggattaaa

SEQ ID NO: 108674 - DNA, 25 bp, Canis familiaris
gaagagtctgagtctaggaattata

SEQ ID NO: 108675 - DNA, 25 bp, Canis familiaris
gaagagcctgagctaagaacatttc

SEQ ID NO: 108676 - DNA, 25 bp, Canis familiaris
gaagagttcacataaaactttggta

SEQ ID NO: 108677 - DNA, 25 bp, Canis familiaris
gaagagtctcgaatcaacaactttg

SEQ ID NO: 108678 - DNA, 25 bp, Canis familiaris
gaacagtcagcgattccaggtttta

SEQ ID NO: 108679 - DNA, 25 bp, Canis familiaris
gaacagtcagcgattccaggtttta

SEQ ID NO: 108680 - DNA, 25 bp, Canis familiaris
gaagaggcaggaaacgaggttcagt

SEQ ID NO: 108681 - DNA, 25 bp, Canis familiaris
gatgggaatggacacggcccgagtt

SEQ ID NO: 108682 - DNA, 25 bp, Canis familiaris
gagggcaaagccacggacaagggta

SEQ ID NO: 108683 - DNA, 25 bp, Canis familiaris
gaagtattatccactggtcagatgg

SEQ ID NO: 108684 - DNA, 25 bp, Canis familiaris
gaagatctgtgttccttggtcaagg

SEQ ID NO: 108685 - DNA, 25 bp, Canis familiaris
gaagttgcttacaatctgtgtcaat

SEQ ID NO: 108686 - DNA, 25 bp, Canis familiaris
gaagtttgtacaagctgtcattcca

SEQ ID NO: 108687 - DNA, 25 bp, Canis familiaris
gaagtatttcacagagatatctcta

SEQ ID NO: 108688 - DNA, 25 bp, Canis familiaris
gaagattttctcagatgtccttgca

SEQ ID NO: 108689 - DNA, 25 bp, Canis familiaris
gaagttcattcttaagatactatgc

SEQ ID NO: 108690 - DNA, 25 bp, Canis familiaris
gaagattttctctagctgagtctga

SEQ ID NO: 108691 - DNA, 25 bp, Canis familiaris
gaagtatgtttcttgccagcttttt

SEQ ID NO: 108692 - DNA, 25 bp, Canis familiaris
gaagtttcactctgtcagcatttgg

SEQ ID NO: 108693 - DNA, 25 bp, Canis familiaris
gaagtttgcacctttcattgttttt

SEQ ID NO: 108694 - DNA, 25 bp, Canis familiaris
gaagtcttcattcagtcttgtcttt

SEQ ID NO: 108695 - DNA, 25 bp, Canis familiaris
gaagtcattcatggtcaccttggcc

SEQ ID NO: 108696 - DNA, 25 bp, Canis familiaris
gaagtcatattaacacctgggaaac

SEQ ID NO: 108697 - DNA, 25 bp, Canis familiaris
gaagacagtataatcaatcgggaaa

SEQ ID NO: 108698 - DNA, 25 bp, Canis familiaris
gaagatagatcttttcacggaaaac

SEQ ID NO: 108699 - DNA, 25 bp, Canis familiaris
gaagaagaaagatgccggaaagtcg

SEQ ID NO: 108700 - DNA, 25 bp, Canis familiaris
gaagaggaagaatgcccagaagggc

SEQ ID NO: 108701 - DNA, 25 bp, Canis familiaris
gaagatgagaccgaggcccagagag

SEQ ID NO: 108702 - DNA, 25 bp, Canis familiaris
gaagagacccaactgcaaagagaaa

SEQ ID NO: 108703 - DNA, 25 bp, Canis familiaris
gaagtaccccattgaacatggcatt

SEQ ID NO: 108704 - DNA, 25 bp, Canis familiaris
gaagtacccagatggcctgtcagat

SEQ ID NO: 108705 - DNA, 25 bp, Canis familiaris
gaagctacccaacttactgtcagca

SEQ ID NO: 108706 - DNA, 25 bp, Canis familiaris
gaagaaccctacatatgtgatccaa

SEQ ID NO: 108707 - DNA, 25 bp, Canis familiaris
gaagaacccagcgttatgtacatga

SEQ ID NO: 108708 - DNA, 25 bp, Canis familiaris
gaagtacccactgatgatatatatg

SEQ ID NO: 108709 - DNA, 25 bp, Canis familiaris
gaaaaccaactttgtcatagtgtac

SEQ ID NO: 108710 - DNA, 25 bp, Canis familiaris
gaaaatactacttggtcgacactga

SEQ ID NO: 108711 - DNA, 25 bp, Canis familiaris
gaagtcaatctagttatttacctgg

SEQ ID NO: 108712 - DNA, 25 bp, Canis familiaris
gaagtcacatttgtatctgtcagcc

SEQ ID NO: 108713 - DNA, 25 bp, Canis familiaris
gaagtcagcagtgaacttgtcagcc

SEQ ID NO: 108714 - DNA, 25 bp, Canis familiaris
gaagtcagctgactcatcctattca

SEQ ID NO: 108715 - DNA, 25 bp, Canis familiaris
gaagaaattggctctcctggagtgt

SEQ ID NO: 108716 - DNA, 25 bp, Canis familiaris
gaagaaattggctctcctggagtgt

SEQ ID NO: 108717 - DNA, 25 bp, Canis familiaris
gaagaaattggctctcctggagtgt

SEQ ID NO: 108718 - DNA, 25 bp, Canis familiaris
gaagaaattggctctcctggagtgt

SEQ ID NO: 108719 - DNA, 25 bp, Canis familiaris
gaagaaaattgatgcacgctggttt

SEQ ID NO: 108720 - DNA, 25 bp, Canis familiaris
gaagagaaccagaagcccaggcttg

SEQ ID NO: 108721 - DNA, 25 bp, Canis familiaris
gaagagtgtaagaggctgcagggtg

SEQ ID NO: 108722 - DNA, 25 bp, Canis familiaris
gaagagtgtttgccggggtggtgtg

SEQ ID NO: 108723 - DNA, 25 bp, Canis familiaris
gaagaggatttcggtgaggaggctg

SEQ ID NO: 108724 - DNA, 25 bp, Canis familiaris
gaagaggagaacggagccgaggagg

SEQ ID NO: 108725 - DNA, 25 bp, Canis familiaris
gaacagttacaagcagtctaggagg

SEQ ID NO: 108726 - DNA, 25 bp, Canis familiaris
gaagtttaccacaagtctatgacac

SEQ ID NO: 108727 - DNA, 25 bp, Canis familiaris
gaagagttcacttttgctattacac

SEQ ID NO: 108728 - DNA, 25 bp, Canis familiaris
gaagagtggcatgcagattgcttta

SEQ ID NO: 108729 - DNA, 25 bp, Canis familiaris
gaagatctggcaccacaccttctac

SEQ ID NO: 108730 - DNA, 25 bp, Canis familiaris
gaagattgacactcaccttatctgg

SEQ ID NO: 108731 - DNA, 25 bp, Canis familiaris
gaagattgaccgccacatgtatcat

SEQ ID NO: 108732 - DNA, 25 bp, Canis familiaris
gaagattgaccgccacatgtatcat

SEQ ID NO: 108733 - DNA, 25 bp, Canis familiaris
gaagattgaccgccacatgtatcat

SEQ ID NO: 108734 - DNA, 25 bp, Canis familiaris
gaagatgtgcaggcggccttactcc

SEQ ID NO: 108735 - DNA, 25 bp, Canis familiaris
gaagagtggcgggccactcacctct

SEQ ID NO: 108736 - DNA, 25 bp, Canis familiaris
gaagttggtgatggtactacctctg

SEQ ID NO: 108737 - DNA, 25 bp, Canis familiaris
gaagtttgctcagtcaactaacctg

SEQ ID NO: 108738 - DNA, 25 bp, Canis familiaris
gaagtttgtgccaatactctcagcc

SEQ ID NO: 108739 - DNA, 25 bp, Canis familiaris
gaagtactgggctaacttgctcgaa

SEQ ID NO: 108740 - DNA, 25 bp, Canis familiaris
gaagtacgacgcggacctggagaac

SEQ ID NO: 108741 - DNA, 25 bp, Canis familiaris
gaagtagacactgcagagcctggaa

SEQ ID NO: 108742 - DNA, 25 bp, Canis familiaris
gaagaaacttccgaggatggagagg

SEQ ID NO: 108743 - DNA, 25 bp, Canis familiaris
gaagtagacttcccacggagcaggg

SEQ ID NO: 108744 - DNA, 25 bp, Canis familiaris
gaagtaggatatactacgcagacgc

SEQ ID NO: 108745 - DNA, 25 bp, Canis familiaris
gaagtagtatgtaccatccatgcat

SEQ ID NO: 108746 - DNA, 25 bp, Canis familiaris
gaagtattcagtaccgctcagtatt

SEQ ID NO: 108747 - DNA, 25 bp, Canis familiaris
gaagtattcagtaccgctcagtatt

SEQ ID NO: 108748 - DNA, 25 bp, Canis familiaris
gaagatattatccaggccacagtat

SEQ ID NO: 108749 - DNA, 25 bp, Canis familiaris
gaagattctggccgcagccaagtac

SEQ ID NO: 108750 - DNA, 25 bp, Canis familiaris
gaagattcaggcttgcgttaaagac

SEQ ID NO: 108751 - DNA, 25 bp, Canis familiaris
gaagacagctacagtgtctaaataa

SEQ ID NO: 108752 - DNA, 25 bp, Canis familiaris
gaagacatcttcatctgttccagtc

SEQ ID NO: 108753 - DNA, 25 bp, Canis familiaris
gaagagccttgctttattgctcaat

SEQ ID NO: 108754 - DNA, 25 bp, Canis familiaris
gaagagttgtagtttctgccaaaat

SEQ ID NO: 108755 - DNA, 25 bp, Canis familiaris
gaagatcttgatttggtttcaaaat

SEQ ID NO: 108756 - DNA, 25 bp, Canis familiaris
gaagatttattacctttcactttag

SEQ ID NO: 108757 - DNA, 25 bp, Canis familiaris
gaagtttcttagtctgtgctcatct

SEQ ID NO: 108758 - DNA, 25 bp, Canis familiaris
gaagatgctcctcatttgtccatct

SEQ ID NO: 108759 - DNA, 25 bp, Canis familiaris
gaagatacctcctttatgcttctcc

SEQ ID NO: 108760 - DNA, 25 bp, Canis familiaris
gaagtactgttcttgtgtcttctcg

SEQ ID NO: 108761 - DNA, 25 bp, Canis familiaris
gaagtagtttcactttctttctgtc

SEQ ID NO: 108762 - DNA, 25 bp, Canis familiaris
gaagacagttgggcttcctttggct

SEQ ID NO: 108763 - DNA, 25 bp, Canis familiaris
gaagactttgtcctatgatctggga

SEQ ID NO: 108764 - DNA, 25 bp, Canis familiaris
gaagacactttagtatgcacgttga

SEQ ID NO: 108765 - DNA, 25 bp, Canis familiaris
gaagacactttagtatgcacgttga

SEQ ID NO: 108766 - DNA, 25 bp, Canis familiaris
gaagaccctggagagcatcgtttca

SEQ ID NO: 108767 - DNA, 25 bp, Canis familiaris
gaagactccccacagaagacttctg

SEQ ID NO: 108768 - DNA, 25 bp, Canis familiaris
gacatgtcccccaaaaaacgactat

SEQ ID NO: 108769 - DNA, 25 bp, Canis familiaris
gaactctcttttgtagaaggtcttc

SEQ ID NO: 108770 - DNA, 25 bp, Canis familiaris
gaagttcttcttttaaatctgtctt

SEQ ID NO: 108771 - DNA, 25 bp, Canis familiaris
gaagttcgtcatagttcgttcgatt

SEQ ID NO: 108772 - DNA, 25 bp, Canis familiaris
gaagttcgacatgtattgatctccc

SEQ ID NO: 108773 - DNA, 25 bp, Canis familiaris
gaagattggtcttctgttgatctaa

SEQ ID NO: 108774 - DNA, 25 bp, Canis familiaris
gaagtagctgttctgctaatctata

SEQ ID NO: 108775 - DNA, 25 bp, Canis familiaris
gaagttgcatttcccgatagctttg

SEQ ID NO: 108776 - DNA, 25 bp, Canis familiaris
gaagtacattgaccaggaagagctg

SEQ ID NO: 108777 - DNA, 25 bp, Canis familiaris
gaagtagcttattctgattatagct

SEQ ID NO: 108778 - DNA, 25 bp, Canis familiaris
gaagatactctaccatgaatataaa

SEQ ID NO: 108779 - DNA, 25 bp, Canis familiaris
gaagacattgtaccagaatgtgtta

SEQ ID NO: 108780 - DNA, 25 bp, Canis familiaris
gaagactctgtcaacagccttgact

SEQ ID NO: 108781 - DNA, 25 bp, Canis familiaris
gaagaactgtatcgtgctcattgac

SEQ ID NO: 108782 - DNA, 25 bp, Canis familiaris
gaagaactgtatcgtgctcattgac

SEQ ID NO: 108783 - DNA, 25 bp, Canis familiaris
gaagacttttcttgccaatacgggt

SEQ ID NO: 108784 - DNA, 25 bp, Canis familiaris
gaagagaatttttcccacacgtgga

SEQ ID NO: 108785 - DNA, 25 bp, Canis familiaris
gaagagataagtaatccccacctgc

SEQ ID NO: 108786 - DNA, 25 bp, Canis familiaris
gaagagtacctattccctatctctc

SEQ ID NO: 108787 - DNA, 25 bp, Canis familiaris
gaagcagaacgccaaggccgcttcc

SEQ ID NO: 108788 - DNA, 25 bp, Canis familiaris
gaagatggaggctgatgcccgttcc

SEQ ID NO: 108789 - DNA, 25 bp, Canis familiaris
gaagatgaaggtttccggagtcggc

SEQ ID NO: 108790 - DNA, 25 bp, Canis familiaris
gaagatgctgagcttcccaaagtcg

SEQ ID NO: 108791 - DNA, 25 bp, Canis familiaris
gaagtagggattttcactatgttga

SEQ ID NO: 108792 - DNA, 25 bp, Canis familiaris
gaagctgtgggagtttccaattaac

SEQ ID NO: 108793 - DNA, 25 bp, Canis familiaris
gaagcttgggttaactcagtagatt

SEQ ID NO: 108794 - DNA, 25 bp, Canis familiaris
gaagctatagctactaaacatttga

SEQ ID NO: 108795 - DNA, 25 bp, Canis familiaris
gaagacaattgcatcaaccttgtga

SEQ ID NO: 108796 - DNA, 25 bp, Canis familiaris
gaagcaaaaagatgaccaatctcac

SEQ ID NO: 108797 - DNA, 25 bp, Canis familiaris
gaagaattggtgtgatccacccacc

SEQ ID NO: 108798 - DNA, 25 bp, Canis familiaris
gaagcagtttgttaatcttccctct

SEQ ID NO: 108799 - DNA, 25 bp, Canis familiaris
gaagagtcttgttactttttcgaat

SEQ ID NO: 108800 - DNA, 25 bp, Canis familiaris
gaagagacctgtctttcgttccaat

SEQ ID NO: 108801 - DNA, 25 bp, Canis familiaris
gaagaggctcttcttcattggtctc

SEQ ID NO: 108802 - DNA, 25 bp, Canis familiaris
gaagagagttcgtttagtgagcctg

SEQ ID NO: 108803 - DNA, 25 bp, Canis familiaris
gaagacatttcttttagaggggagg

SEQ ID NO: 108804 - DNA, 25 bp, Canis familiaris
gaagagattttttgaagtccggagg

SEQ ID NO: 108805 - DNA, 25 bp, Canis familiaris
gaagatgtttttaaagccccaggat

SEQ ID NO: 108806 - DNA, 25 bp, Canis familiaris
gaaagtattaatgaaggcgacgtgc

SEQ ID NO: 108807 - DNA, 25 bp, Canis familiaris
gaacgctactttgaaggcgacttag

SEQ ID NO: 108808 - DNA, 25 bp, Canis familiaris
gaaactcctttataggctaaaagag

SEQ ID NO: 108809 - DNA, 25 bp, Canis familiaris
gaagaggccttttaatcactaataa

SEQ ID NO: 108810 - DNA, 25 bp, Canis familiaris
gaagaaaccctattatatgtgaaat

SEQ ID NO: 108811 - DNA, 25 bp, Canis familiaris
gaagtagttgccaagcatattctga

SEQ ID NO: 108812 - DNA, 25 bp, Canis familiaris
gaagatgatgttgctgctgctaata

SEQ ID NO: 108813 - DNA, 25 bp, Canis familiaris
gaagatgactatgctggcgtcatct

SEQ ID NO: 108814 - DNA, 25 bp, Canis familiaris
gaagatggcatatttgctccgatat

SEQ ID NO: 108815 - DNA, 25 bp, Canis familiaris
gaagatgcctgtgttccagattcat

SEQ ID NO: 108816 - DNA, 25 bp, Canis familiaris
gaagaccacggtcctggatgtcatg

SEQ ID NO: 108817 - DNA, 25 bp, Canis familiaris
gaagactccgccaggcgtgatctga

SEQ ID NO: 108818 - DNA, 25 bp, Canis familiaris
gaagttccggctggatgactgtctg

SEQ ID NO: 108819 - DNA, 25 bp, Canis familiaris
gaagttcacgtttgtgtgcatggcc

SEQ ID NO: 108820 - DNA, 25 bp, Canis familiaris
gaagattccggaactgttggctgca

SEQ ID NO: 108821 - DNA, 25 bp, Canis familiaris
gaagattcggaaaatggggccacgg

SEQ ID NO: 108822 - DNA, 25 bp, Canis familiaris
gaagattcgacagaactgcaggcta

SEQ ID NO: 108823 - DNA, 25 bp, Canis familiaris
gaagattgcgacctcaacgtggtga

SEQ ID NO: 108824 - DNA, 25 bp, Canis familiaris
gaagcatttgactcgatcttgggtg

SEQ ID NO: 108825 - DNA, 25 bp, Canis familiaris
gaagaatctacacatcctttgcttg

SEQ ID NO: 108826 - DNA, 25 bp, Canis familiaris
gaagaagtaacgtactcttcgtagg

SEQ ID NO: 108827 - DNA, 25 bp, Canis familiaris
gaagaagtaaaggcctctgtgcggg

SEQ ID NO: 108828 - DNA, 25 bp, Canis familiaris
gaagatattaaaagctccttctggc

SEQ ID NO: 108829 - DNA, 25 bp, Canis familiaris
gaagtttgtaattcatcctcttgga

SEQ ID NO: 108830 - DNA, 25 bp, Canis familiaris
gaagtttgtaactgtgtgcgtgcca

SEQ ID NO: 108831 - DNA, 25 bp, Canis familiaris
gaagttgtgtacttctgttgcggcc

SEQ ID NO: 108832 - DNA, 25 bp, Canis familiaris
gaagttttagcaagtttcaggacaa

SEQ ID NO: 108833 - DNA, 25 bp, Canis familiaris
gaagatatactgacacgtttgaggt

SEQ ID NO: 108834 - DNA, 25 bp, Canis familiaris
gaagatacagtaccgtgtctgaatt

SEQ ID NO: 108835 - DNA, 25 bp, Canis familiaris
gaagaagcagctagccacagttcac

SEQ ID NO: 108836 - DNA, 25 bp, Canis familiaris
gaagaagagctagtgatgacgtcag

SEQ ID NO: 108837 - DNA, 25 bp, Canis familiaris
gaagagggctgagaagctgtgcggg

SEQ ID NO: 108838 - DNA, 25 bp, Canis familiaris
gaagatggtatttaagttggtggct

SEQ ID NO: 108839 - DNA, 25 bp, Canis familiaris
gaagaggtctttgaactgtgggtgg

SEQ ID NO: 108840 - DNA, 25 bp, Canis familiaris
gaagagtgtctttggctgattgatg

SEQ ID NO: 108841 - DNA, 25 bp, Canis familiaris
gaagttgctttctgctttcttaatg

SEQ ID NO: 108842 - DNA, 25 bp, Canis familiaris
gaagtattggatttgctgttttaag

SEQ ID NO: 108843 - DNA, 25 bp, Canis familiaris
gaagttggaatgttctttttccaga

SEQ ID NO: 108844 - DNA, 25 bp, Canis familiaris
gaagttttctggtttcttgtgctaa

SEQ ID NO: 108845 - DNA, 25 bp, Canis familiaris
gaagtatttgctttgtcctaagtta

SEQ ID NO: 108846 - DNA, 25 bp, Canis familiaris
gaagatgatttctgcttcctttttc

SEQ ID NO: 108847 - DNA, 25 bp, Canis familiaris
gaagatactgtttggtccttctctt

SEQ ID NO: 108848 - DNA, 25 bp, Canis familiaris
gaagagacgtaagcccttcttgtgt

SEQ ID NO: 108849 - DNA, 25 bp, Canis familiaris
gaagaactgtaatgcccttttgtgg

SEQ ID NO: 108850 - DNA, 25 bp, Canis familiaris
gaagatcaatctgaaccacttgttg

SEQ ID NO: 108851 - DNA, 25 bp, Canis familiaris
gaagatgaatgtaacctgcacggtg

SEQ ID NO: 108852 - DNA, 25 bp, Canis familiaris
gaagagaagttaccaagtgccatga

SEQ ID NO: 108853 - DNA, 25 bp, Canis familiaris
gaagatgaaggccagttagtccaag

SEQ ID NO: 108854 - DNA, 25 bp, Canis familiaris
gaagaacaggccatttgtcccagcc

SEQ ID NO: 108855 - DNA, 25 bp, Canis familiaris
gaagagcagcggcgttttgccgccc

SEQ ID NO: 108856 - DNA, 25 bp, Canis familiaris
gaagaggagcagctttttccgatgt

SEQ ID NO: 108857 - DNA, 25 bp, Canis familiaris
gaagcggagcggctgccttattagt

SEQ ID NO: 108858 - DNA, 25 bp, Canis familiaris
gaagttgactgacttccttttcttg

SEQ ID NO: 108859 - DNA, 25 bp, Canis familiaris
gaagttgatgaagttcctctttttt

SEQ ID NO: 108860 - DNA, 25 bp, Canis familiaris
gaagtttggagtattatcaatttgt

SEQ ID NO: 108861 - DNA, 25 bp, Canis familiaris
gaagtttggagtattttgaatttat

SEQ ID NO: 108862 - DNA, 25 bp, Canis familiaris
gacagtttagggatcagttacattt

SEQ ID NO: 108863 - DNA, 25 bp, Canis familiaris
gaagtttaagaaagcaatcccattt

SEQ ID NO: 108864 - DNA, 25 bp, Canis familiaris
gaagtttgtaaatcaatccttttgg

SEQ ID NO: 108865 - DNA, 25 bp, Canis familiaris
gaagtttgtcaagagcaatgtgctg

SEQ ID NO: 108866 - DNA, 25 bp, Canis familiaris
gaagatctcttccgggaatggctga

SEQ ID NO: 108867 - DNA, 25 bp, Canis familiaris
gaagatcacctatgggcagtgtgga

SEQ ID NO: 108868 - DNA, 25 bp, Canis familiaris
gaagatccttcatgttcttaggaag

SEQ ID NO: 108869 - DNA, 25 bp, Canis familiaris
gaagatgcttcctgtattttacata

SEQ ID NO: 108870 - DNA, 25 bp, Canis familiaris
gaagatgttcgcgattatcttctat

SEQ ID NO: 108871 - DNA, 25 bp, Canis familiaris
gaagttatgaccttcactctcagct

SEQ ID NO: 108872 - DNA, 25 bp, Canis familiaris
gaagttgatagttccacatcagcct

SEQ ID NO: 108873 - DNA, 25 bp, Canis familiaris
gaagttgtagatagacacagcacct

SEQ ID NO: 108874 - DNA, 25 bp, Canis familiaris
gaacttgctgcattaggaagatcac

SEQ ID NO: 108875 - DNA, 25 bp, Canis familiaris
gaagaggctgccaaggaagatgctg

SEQ ID NO: 108876 - DNA, 25 bp, Canis familiaris
gaagatgtgtgaagcaggaggagtg

SEQ ID NO: 108877 - DNA, 25 bp, Canis familiaris
gaagatggtaccctggatgacggtg

SEQ ID NO: 108878 - DNA, 25 bp, Canis familiaris
gaagaagatccccgagtacgatgat

SEQ ID NO: 108879 - DNA, 25 bp, Canis familiaris
gaagcagagtctccgtacttggatg

SEQ ID NO: 108880 - DNA, 25 bp, Canis familiaris
gaagaaggccgcgaacttgaacagc

SEQ ID NO: 108881 - DNA, 25 bp, Canis familiaris
gaagaagggcgtgcacctgaacagc

SEQ ID NO: 108882 - DNA, 25 bp, Canis familiaris
gaagatgagctggggtcacctgtaa

SEQ ID NO: 108883 - DNA, 25 bp, Canis familiaris
gaagagtgctgagctttctcctaga

SEQ ID NO: 108884 - DNA, 25 bp, Canis familiaris
gaagatactggacttttccttgaaa

SEQ ID NO: 108885 - DNA, 25 bp, Canis familiaris
gaagaatcgaggattttcttagaga

SEQ ID NO: 108886 - DNA, 25 bp, Canis familiaris
gaagcaaccgggcttgtttcagcag

SEQ ID NO: 108887 - DNA, 25 bp, Canis familiaris
gaagagtttaaggtctgtgtccaga

SEQ ID NO: 108888 - DNA, 25 bp, Canis familiaris
gagaggtaattacatagtgtaaagt

SEQ ID NO: 108889 - DNA, 25 bp, Canis familiaris
gaggtccaataaaaggttagcaact

SEQ ID NO: 108890 - DNA, 25 bp, Canis familiaris
gaagaccttgtaacggttcagcaac

SEQ ID NO: 108891 - DNA, 25 bp, Canis familiaris
gaagaacttgtatcacttgtgcagt

SEQ ID NO: 108892 - DNA, 25 bp, Canis familiaris
gaagactgtgttacactcttgggtt

SEQ ID NO: 108893 - DNA, 25 bp, Canis familiaris
gaagatctgtttggcacttaagtga

SEQ ID NO: 108894 - DNA, 25 bp, Canis familiaris
gaagagcccattgagctaaagtgca

SEQ ID NO: 108895 - DNA, 25 bp, Canis familiaris
gaagacccctctagctaaagtcaca

SEQ ID NO: 108896 - DNA, 25 bp, Canis familiaris
gaagacctccttcctaggagcatca

SEQ ID NO: 108897 - DNA, 25 bp, Canis familiaris
gaagcacgttctgtcgaggagcgag

SEQ ID NO: 108898 - DNA, 25 bp, Canis familiaris
gaagagggatctgctggacaaggag

SEQ ID NO: 108899 - DNA, 25 bp, Canis familiaris
gaagagggtttcctggctcatgtag

SEQ ID NO: 108900 - DNA, 25 bp, Canis familiaris
gaagaggggttcctgttttcatttg

SEQ ID NO: 108901 - DNA, 25 bp, Canis familiaris
gaagagcgggatgctgctttgtctc

SEQ ID NO: 108902 - DNA, 25 bp, Canis familiaris
gaagaggctggcagtggcttctcta

SEQ ID NO: 108903 - DNA, 25 bp, Canis familiaris
gaagagtggctgacctggcatatcc

SEQ ID NO: 108904 - DNA, 25 bp, Canis familiaris
gaagattagtgagcatgcccctgca

SEQ ID NO: 108905 - DNA, 25 bp, Canis familiaris
gaagttcatggatcagcatccggag

SEQ ID NO: 108906 - DNA, 25 bp, Canis familiaris
gaagattcatcgtagagtcctgaag

SEQ ID NO: 108907 - DNA, 25 bp, Canis familiaris
gaagattgatgagtagagccccaag

SEQ ID NO: 108908 - DNA, 25 bp, Canis familiaris
gaagttgccatggacacccaaagag

SEQ ID NO: 108909 - DNA, 25 bp, Canis familiaris
gaagttcctgtattcctaacaagat

SEQ ID NO: 108910 - DNA, 25 bp, Canis familiaris
gaagttcctgaatttgtccaagttg

SEQ ID NO: 108911 - DNA, 25 bp, Canis familiaris
gaagttggcaaaatccccaagtgtg

SEQ ID NO: 108912 - DNA, 25 bp, Canis familiaris
gaagaatgcgcaaaacccacaattt

SEQ ID NO: 108913 - DNA, 25 bp, Canis familiaris
gaagagatccagaagcacaaccaca

SEQ ID NO: 108914 - DNA, 25 bp, Canis familiaris
gaagaggcagcgagagaaaacacat

SEQ ID NO: 108915 - DNA, 25 bp, Canis familiaris
gaagaggccatcaacaagggtacat

SEQ ID NO: 108916 - DNA, 25 bp, Canis familiaris
gaagaaccatgcggagaggcgtagc

SEQ ID NO: 108917 - DNA, 25 bp, Canis familiaris
gaagaaccaggggccagagctaggg

SEQ ID NO: 108918 - DNA, 25 bp, Canis familiaris
gaagaaggcggcccgagtcatcatc

SEQ ID NO: 108919 - DNA, 25 bp, Canis familiaris
gaagaagattaccctgactcatacc

SEQ ID NO: 108920 - DNA, 25 bp, Canis familiaris
gaagagagttccccaagctcttcct

SEQ ID NO: 108921 - DNA, 25 bp, Canis familiaris
tgaatacagtttctaagtttccttt

SEQ ID NO: 108922 - DNA, 25 bp, Canis familiaris
gaaacgttgtaagagctacctccac

SEQ ID NO: 108923 - DNA, 25 bp, Canis familiaris
gaagactttccggacagaacgtcca

SEQ ID NO: 108924 - DNA, 25 bp, Canis familiaris
gaagcacgtctccaggaacaatcct

SEQ ID NO: 108925 - DNA, 25 bp, Canis familiaris
gaagaatgtctccttgaacaacttg

SEQ ID NO: 108926 - DNA, 25 bp, Canis familiaris
gaagaagctgcaggcttacaccggg

SEQ ID NO: 108927 - DNA, 25 bp, Canis familiaris
gaagaaggcacatctactcctgagg

SEQ ID NO: 108928 - DNA, 25 bp, Canis familiaris
gaagaaggatctttccctggaggaa

SEQ ID NO: 108929 - DNA, 25 bp, Canis familiaris
gaagataggagctttcctctcggga

SEQ ID NO: 108930 - DNA, 25 bp, Canis familiaris
gaagatcaagatcattgctcctccg

SEQ ID NO: 108931 - DNA, 25 bp, Canis familiaris
gaagatccacaggctgactcttcca

SEQ ID NO: 108932 - DNA, 25 bp, Canis familiaris
gaagagctacagcgtcagcatgacc

SEQ ID NO: 108933 - DNA, 25 bp, Canis familiaris
gaagaccagcatgagtggataccca

SEQ ID NO: 108934 - DNA, 25 bp, Canis familiaris
gaagataagcactaaggatcacgta

SEQ ID NO: 108935 - DNA, 25 bp, Canis familiaris
gaagaacgaatcaggtcatcatatc

SEQ ID NO: 108936 - DNA, 25 bp, Canis familiaris
gaagaccagaatattgtgccagagc

SEQ ID NO: 108937 - DNA, 25 bp, Canis familiaris
gaagctccgcaacaagatcgcaggc

SEQ ID NO: 108938 - DNA, 25 bp, Canis familiaris
gaagagcagtgagcctcattcgagg

SEQ ID NO: 108939 - DNA, 25 bp, Canis familiaris
gaagagggatcatgccattcgaaag

SEQ ID NO: 108940 - DNA, 25 bp, Canis familiaris
gaagagggtctatatgctgtgcaca

SEQ ID NO: 108941 - DNA, 25 bp, Canis familiaris
agacagggcagcgccagtgggaacg

SEQ ID NO: 108942 - DNA, 25 bp, Canis familiaris
gacagagggctggtgaccacatcca

SEQ ID NO: 108943 - DNA, 25 bp, Canis familiaris
gaagatgaggggccaccagttcaga

SEQ ID NO: 108944 - DNA, 25 bp, Canis familiaris
gaagatgaaggacaccagccgcaag

SEQ ID NO: 108945 - DNA, 25 bp, Canis familiaris
gaagaaagtgtcactcactcgcgac

SEQ ID NO: 108946 - DNA, 25 bp, Canis familiaris
gaagaaggaggcacgagctgcggca

SEQ ID NO: 108947 - DNA, 25 bp, Canis familiaris
gaagagagcaatgacctgcagatgg

SEQ ID NO: 108948 - DNA, 25 bp, Canis familiaris
gaagatggcaggaagtcatgggcag

SEQ ID NO: 108949 - DNA, 25 bp, Canis familiaris
gaagaggaggtgttgcagtggagtg

SEQ ID NO: 108950 - DNA, 25 bp, Canis familiaris
gaagaggtggtgttcgaggtcgtgg

SEQ ID NO: 108951 - DNA, 25 bp, Canis familiaris
gaagagagtggtttcaagtgaacat

SEQ ID NO: 108952 - DNA, 25 bp, Canis familiaris
gaagagggagatccacagaggaaga

SEQ ID NO: 108953 - DNA, 25 bp, Canis familiaris
gaagagggtgagcatcgagagactg

SEQ ID NO: 108954 - DNA, 25 bp, Canis familiaris
gaagatgcggttcaccagagaggta

SEQ ID NO: 108955 - DNA, 25 bp, Canis familiaris
gaagatcttgacattccggaggata

SEQ ID NO: 108956 - DNA, 25 bp, Canis familiaris
gaagactttcagatcgaggggtaca

SEQ ID NO: 108957 - DNA, 25 bp, Canis familiaris
gaagctatcctcaattcgggggcta

SEQ ID NO: 108958 - DNA, 25 bp, Canis familiaris
gaagcttgtcatcaacgggaagccc

SEQ ID NO: 108959 - DNA, 25 bp, Canis familiaris
gaactttcacgatcggttgttccgt

SEQ ID NO: 108960 - DNA, 25 bp, Canis familiaris
gaacccccaacagtggggattcaca

SEQ ID NO: 108961 - DNA, 25 bp, Canis familiaris
gaagccgaccgccggtcggagatcc

SEQ ID NO: 108962 - DNA, 25 bp, Canis familiaris
gaaccagagccctgagggggaccgt

SEQ ID NO: 108963 - DNA, 25 bp, Canis familiaris
gacaactaagcctgggcctggactg

SEQ ID NO: 108964 - DNA, 25 bp, Canis familiaris
gaagactcacctggaggacctgtac

SEQ ID NO: 108965 - DNA, 25 bp, Canis familiaris
gaagacgcacctgcgggacatgatc

SEQ ID NO: 108966 - DNA, 25 bp, Canis familiaris
gaagactgatccttcagggacagtt

SEQ ID NO: 108967 - DNA, 25 bp, Canis familiaris
gaagatctaccccagggagaatccg

SEQ ID NO: 108968 - DNA, 25 bp, Canis familiaris
gaagaccacacatcagttaggacac

SEQ ID NO: 108969 - DNA, 25 bp, Canis familiaris
gaagaccatctaagacctaggaaac

SEQ ID NO: 108970 - DNA, 25 bp, Canis familiaris
gaagagcccatgatgaacttgtaaa

SEQ ID NO: 108971 - DNA, 25 bp, Canis familiaris
gaagatccctgggattccactacca

SEQ ID NO: 108972 - DNA, 25 bp, Canis familiaris
gaaaccaggtagtgaacatacccgt

SEQ ID NO: 108973 - DNA, 25 bp, Canis familiaris
gaagaccagggatccagaacccacc

SEQ ID NO: 108974 - DNA, 25 bp, Canis familiaris
gaagaccagccttacaagaaaaact

SEQ ID NO: 108975 - DNA, 25 bp, Canis familiaris
gaagatctcattgacacaggcaaaa

SEQ ID NO: 108976 - DNA, 25 bp, Canis familiaris
gaagatgctgaggccccaggcatca

SEQ ID NO: 108977 - DNA, 25 bp, Canis familiaris
gaagatgcaggacccacaggactgt

SEQ ID NO: 108978 - DNA, 25 bp, Canis familiaris
gaagacaggacattcacagacctat

SEQ ID NO: 108979 - DNA, 25 bp, Canis familiaris
gaagactggaaaatgctaactgatt

SEQ ID NO: 108980 - DNA, 25 bp, Canis familiaris
gaagacggtcgaacttgactatcta

SEQ ID NO: 108981 - DNA, 25 bp, Canis familiaris
gaagacgggcttggttgagctcata

SEQ ID NO: 108982 - DNA, 25 bp, Canis familiaris
gaagatggagacctgttcgacctga

SEQ ID NO: 108983 - DNA, 25 bp, Canis familiaris
gaagatgaatgcctctgttctacct

SEQ ID NO: 108984 - DNA, 25 bp, Canis familiaris
gaagaggatcgttttctaatctgta

SEQ ID NO: 108985 - DNA, 25 bp, Canis familiaris
gaagaggtagtttgcaaaatatgtt

SEQ ID NO: 108986 - DNA, 25 bp, Canis familiaris
gaagatggtatgattctacatatat

SEQ ID NO: 108987 - DNA, 25 bp, Canis familiaris
gaagatgtaatgaccctgctttcat

SEQ ID NO: 108988 - DNA, 25 bp, Canis familiaris
gaagatgcacagatccgtggttcta

SEQ ID NO: 108989 - DNA, 25 bp, Canis familiaris
gaagctacagacaggtgagttccaa

SEQ ID NO: 108990 - DNA, 25 bp, Canis familiaris
gaagcatccgaaggttgaatccgac

SEQ ID NO: 108991 - DNA, 25 bp, Canis familiaris
gaagatcccacagcattaaacaacc

SEQ ID NO: 108992 - DNA, 25 bp, Canis familiaris
gaagatttctcactttgcaaaaacc

SEQ ID NO: 108993 - DNA, 25 bp, Canis familiaris
gaagatttcggtttcacaaatggca

SEQ ID NO: 108994 - DNA, 25 bp, Canis familiaris
gaagatttgggggtcacaggtgcct

SEQ ID NO: 108995 - DNA, 25 bp, Canis familiaris
gaagaattgaattgttccgggccaa

SEQ ID NO: 108996 - DNA, 25 bp, Canis familiaris
gaagaattaagccttacaggagcaa

SEQ ID NO: 108997 - DNA, 25 bp, Canis familiaris
gaagaattcaagtcccacaagcaag

SEQ ID NO: 108998 - DNA, 25 bp, Canis familiaris
gaagaattggattccctcatcaagg

SEQ ID NO: 108999 - DNA, 25 bp, Canis familiaris
gaaaattaattggggccaattggcg

SEQ ID NO: 109000 - DNA, 25 bp, Canis familiaris
gaagcaatgtaaatgtgaggggata

SEQ ID NO: 109001 - DNA, 25 bp, Canis familiaris
gaaccttgagacttgggggcaaatt

SEQ ID NO: 109002 - DNA, 25 bp, Canis familiaris
gaagcattttgatatgggggaaagg

SEQ ID NO: 109003 - DNA, 25 bp, Canis familiaris
gaagaacagagatgatagggaacaa

SEQ ID NO: 109004 - DNA, 25 bp, Canis familiaris
gaagagaagatgctacggaaaccaa

SEQ ID NO: 109005 - DNA, 25 bp, Canis familiaris
gaagaaatatgtaccataaaggcca

SEQ ID NO: 109006 - DNA, 25 bp, Canis familiaris
gaagaaacactgtctcattcaaggc

SEQ ID NO: 109007 - DNA, 25 bp, Canis familiaris
gaagaagcacataactattacagag

SEQ ID NO: 109008 - DNA, 25 bp, Canis familiaris
gaagatgatgcctctgtattacatg

SEQ ID NO: 109009 - DNA, 25 bp, Canis familiaris
gaagatgagccacccttattagaag

SEQ ID NO: 109010 - DNA, 25 bp, Canis familiaris
gaagcaatacagccctctacttgct

SEQ ID NO: 109011 - DNA, 25 bp, Canis familiaris
gaagagaagagacctatcagattgt

SEQ ID NO: 109012 - DNA, 25 bp, Canis familiaris
gaagagagagaccctcactgctggg

SEQ ID NO: 109013 - DNA, 25 bp, Canis familiaris
gaagcgtgagaccgtatttggcaac

SEQ ID NO: 109014 - DNA, 25 bp, Canis familiaris
gaactagaaggacatggtgacaatt

SEQ ID NO: 109015 - DNA, 25 bp, Canis familiaris
gaagctagaaggacatacactaaaa

SEQ ID NO: 109016 - DNA, 25 bp, Canis familiaris
gaagcaggggggaaatttcaaagag

SEQ ID NO: 109017 - DNA, 25 bp, Canis familiaris
gaacacaaacggttctttcgactgg

SEQ ID NO: 109018 - DNA, 25 bp, Canis familiaris
gaagaaaacctctttcttcaacgtg

SEQ ID NO: 109019 - DNA, 25 bp, Canis familiaris
gaagaaaatccccttgttcttccag

SEQ ID NO: 109020 - DNA, 25 bp, Canis familiaris
gaagaaactcctgtagttttgcagt

SEQ ID NO: 109021 - DNA, 25 bp, Canis familiaris
gaagaaatgtttaaggtttctgagt

SEQ ID NO: 109022 - DNA, 25 bp, Canis familiaris
gaagactgtttaaaggatgcctgga

SEQ ID NO: 109023 - DNA, 25 bp, Canis familiaris
gaagcatttttatttgggcatcagg

SEQ ID NO: 109024 - DNA, 25 bp, Canis familiaris
gaagagcattcgaagttggactaga

SEQ ID NO: 109025 - DNA, 25 bp, Canis familiaris
gaagacatccgcaagggagagtcag

SEQ ID NO: 109026 - DNA, 25 bp, Canis familiaris
gaagaaacccacctgaagtcatgat

SEQ ID NO: 109027 - DNA, 25 bp, Canis familiaris
gaagaaactggacctcaactctgat

SEQ ID NO: 109028 - DNA, 25 bp, Canis familiaris
gaagaagtctgaggacccagctctg

SEQ ID NO: 109029 - DNA, 25 bp, Canis familiaris
gaagagattaaggacttatgcctga

SEQ ID NO: 109030 - DNA, 25 bp, Canis familiaris
gaagacagctaagagtgtatccgtt

SEQ ID NO: 109031 - DNA, 25 bp, Canis familiaris
gaagaatccaaccgatgcatacctt

SEQ ID NO: 109032 - DNA, 25 bp, Canis familiaris
gaagaaggaaatctgcaacgcctac

SEQ ID NO: 109033 - DNA, 25 bp, Canis familiaris
gaagaccgagtacatgcaaagccca

SEQ ID NO: 109034 - DNA, 25 bp, Canis familiaris
gaagaccatgaagaagcagggcctc

SEQ ID NO: 109035 - DNA, 25 bp, Canis familiaris
gaagacccactgtacaaggagcctc

SEQ ID NO: 109036 - DNA, 25 bp, Canis familiaris
gaagatcccacgaaatagcgtattg

SEQ ID NO: 109037 - DNA, 25 bp, Canis familiaris
gaagactccaggaaagacagtcatc

SEQ ID NO: 109038 - DNA, 25 bp, Canis familiaris
gaagacccggatggagccagagccg

SEQ ID NO: 109039 - DNA, 25 bp, Canis familiaris
gaagaccccagtgagcgagagagtt

SEQ ID NO: 109040 - DNA, 25 bp, Canis familiaris
gaagagcttacggacatcgagaggc

SEQ ID NO: 109041 - DNA, 25 bp, Canis familiaris
gaagagctatgagctgcccgatggc

SEQ ID NO: 109042 - DNA, 25 bp, Canis familiaris
gaagaggatgagctgccgagctgcg

SEQ ID NO: 109043 - DNA, 25 bp, Canis familiaris
gaagaggctcaggtgtcaatcagga

SEQ ID NO: 109044 - DNA, 25 bp, Canis familiaris
gaagaggtccctttaagatcaactt

SEQ ID NO: 109045 - DNA, 25 bp, Canis familiaris
gaagaggacctttgccagaatccaa

SEQ ID NO: 109046 - DNA, 25 bp, Canis familiaris
gaagaggaagtttgtcgctgatggc

SEQ ID NO: 109047 - DNA, 25 bp, Canis familiaris
gaagatggaagttgaccagctcaag

SEQ ID NO: 109048 - DNA, 25 bp, Canis familiaris
gaagaggccagaagcacggtcatcg

SEQ ID NO: 109049 - DNA, 25 bp, Canis familiaris
gaagagagcaaggagcggcgccatc

SEQ ID NO: 109050 - DNA, 25 bp, Canis familiaris
gaagatgcggagggcaggtcctggt

SEQ ID NO: 109051 - DNA, 25 bp, Canis familiaris
gaagatggcaacacagcatttcggt

SEQ ID NO: 109052 - DNA, 25 bp, Canis familiaris
gaagagcgccacaaatcttccgatg

SEQ ID NO: 109053 - DNA, 25 bp, Canis familiaris
gaagacccatcatctcataactgtg

SEQ ID NO: 109054 - DNA, 25 bp, Canis familiaris
gaagcaggccaacacacaacttgcc

SEQ ID NO: 109055 - DNA, 25 bp, Canis familiaris
gaagaatggcaagaactacttggaa

SEQ ID NO: 109056 - DNA, 25 bp, Canis familiaris
gacccaggaaaccctacggaatcat

SEQ ID NO: 109057 - DNA, 25 bp, Canis familiaris
gacccacgaaacccgtacaaatcat

SEQ ID NO: 109058 - DNA, 25 bp, Canis familiaris
gaacccaaggaccggagcacaaaat

SEQ ID NO: 109059 - DNA, 25 bp, Canis familiaris
gaccgccgagggggcggccaagaag

SEQ ID NO: 109060 - DNA, 25 bp, Canis familiaris
gaaagccgggaagcgagccgggagt

SEQ ID NO: 109061 - DNA, 25 bp, Canis familiaris
gaacccggagtcaacgagcctcggg

SEQ ID NO: 109062 - DNA, 25 bp, Canis familiaris
gaagaccgtgaaacacaagatcttg

SEQ ID NO: 109063 - DNA, 25 bp, Canis familiaris
gaagacacagtgttcctgaacttgg

SEQ ID NO: 109064 - DNA, 25 bp, Canis familiaris
gaagacattgtattcccacttgtgg

SEQ ID NO: 109065 - DNA, 25 bp, Canis familiaris
gaagacattttaccctcttgttggt

SEQ ID NO: 109066 - DNA, 25 bp, Canis familiaris
gaagcctaattatcccgtgtagatt

SEQ ID NO: 109067 - DNA, 25 bp, Canis familiaris
gaactcttttcgacctcatggtagt

SEQ ID NO: 109068 - DNA, 25 bp, Canis familiaris
gaagcttttcttacctattgaagga

SEQ ID NO: 109069 - DNA, 25 bp, Canis familiaris
gacagtatttttccctgaggctcaa

SEQ ID NO: 109070 - DNA, 25 bp, Canis familiaris
gaagaagtttctctggatagtccag

SEQ ID NO: 109071 - DNA, 25 bp, Canis familiaris
gaagaagattccactgagaaccgag

SEQ ID NO: 109072 - DNA, 25 bp, Canis familiaris
gaagcataacttctctgaaaggggg

SEQ ID NO: 109073 - DNA, 25 bp, Canis familiaris
gaagagcccattcttgaagtggtat

SEQ ID NO: 109074 - DNA, 25 bp, Canis familiaris
gaagacccattgctatcatacaggt

SEQ ID NO: 109075 - DNA, 25 bp, Canis familiaris
gaagacccatgtctatctccaggtc

SEQ ID NO: 109076 - DNA, 25 bp, Canis familiaris
gaagagctttggttatcctgagggc

SEQ ID NO: 109077 - DNA, 25 bp, Canis familiaris
gaagactctttatcagctctggtac

SEQ ID NO: 109078 - DNA, 25 bp, Canis familiaris
gaagacttaatatcacctctgtgac

SEQ ID NO: 109079 - DNA, 25 bp, Canis familiaris
gaagacttaaacatctgcctgaggt

SEQ ID NO: 109080 - DNA, 25 bp, Canis familiaris
gaagagcttaaactttgactcgtac

SEQ ID NO: 109081 - DNA, 25 bp, Canis familiaris
gaagacttaaactttgactcctaca

SEQ ID NO: 109082 - DNA, 25 bp, Canis familiaris
gaagaattttactgtgccatttcaa

SEQ ID NO: 109083 - DNA, 25 bp, Canis familiaris
gaagactatttaattgtatatttta

SEQ ID NO: 109084 - DNA, 25 bp, Canis familiaris
gaagatgttgctgaatttttatttt

SEQ ID NO: 109085 - DNA, 25 bp, Canis familiaris
gaagacgctctctaaggtttttgtt

SEQ ID NO: 109086 - DNA, 25 bp, Canis familiaris
gaagagcttcctaattagcttttgt

SEQ ID NO: 109087 - DNA, 25 bp, Canis familiaris
gaagactaccacatgatggcgtttc

SEQ ID NO: 109088 - DNA, 25 bp, Canis familiaris
gaagagggcaacgtgtgggtttacg

SEQ ID NO: 109089 - DNA, 25 bp, Canis familiaris
gacatgaggggcactggggcctttc

SEQ ID NO: 109090 - DNA, 25 bp, Canis familiaris
gaagaggaggggggagggctcctgg

SEQ ID NO: 109091 - DNA, 25 bp, Canis familiaris
gaagaattgggccgacgggccctgg

SEQ ID NO: 109092 - DNA, 25 bp, Canis familiaris
gaagacaatggggtgcccgacaccg

SEQ ID NO: 109093 - DNA, 25 bp, Canis familiaris
gaagaaagaggtggcgccgacagac

SEQ ID NO: 109094 - DNA, 25 bp, Canis familiaris
gaagaaaggatgacagccctacaga

SEQ ID NO: 109095 - DNA, 25 bp, Canis familiaris
gaagaagcaggagcagccctgaccc

SEQ ID NO: 109096 - DNA, 25 bp, Canis familiaris
gaagaagagcagttatctcctagcc

SEQ ID NO: 109097 - DNA, 25 bp, Canis familiaris
gaagaaggcgaaagctactccacag

SEQ ID NO: 109098 - DNA, 25 bp, Canis familiaris
gaagaagcgcagaaagctcctccag

SEQ ID NO: 109099 - DNA, 25 bp, Canis familiaris
gaagacgggcattagtagtccagaa

SEQ ID NO: 109100 - DNA, 25 bp, Canis familiaris
gaagacctggcttagtttctgatga

SEQ ID NO: 109101 - DNA, 25 bp, Canis familiaris
gaaccttgagcatagtgacttagag

SEQ ID NO: 109102 - DNA, 25 bp, Canis familiaris
gaagctgttggaggagcgtctggcc

SEQ ID NO: 109103 - DNA, 25 bp, Canis familiaris
gaagcagtagaaagggttgaggccc

SEQ ID NO: 109104 - DNA, 25 bp, Canis familiaris
gaagctgaagaaaggctcttcgtaa

SEQ ID NO: 109105 - DNA, 25 bp, Canis familiaris
gaagcaaacctggctgcatcattcg

SEQ ID NO: 109106 - DNA, 25 bp, Canis familiaris
gaagaatgccctgtcacagatcgtg

SEQ ID NO: 109107 - DNA, 25 bp, Canis familiaris
gaagaacgtgctgtccatgtgtatg

SEQ ID NO: 109108 - DNA, 25 bp, Canis familiaris
gaagaatctgaggagtctgatgatg

SEQ ID NO: 109109 - DNA, 25 bp, Canis familiaris
gaagaactgcatggatatcgatgtg

SEQ ID NO: 109110 - DNA, 25 bp, Canis familiaris
gaagaatctgctggcgatagcggct

SEQ ID NO: 109111 - DNA, 25 bp, Canis familiaris
gaagagcagccttttacggctaccc

SEQ ID NO: 109112 - DNA, 25 bp, Canis familiaris
gaagcagactccttgtagggaaccc

SEQ ID NO: 109113 - DNA, 25 bp, Canis familiaris
gaagagatatcctatgtcaacgcac

SEQ ID NO: 109114 - DNA, 25 bp, Canis familiaris
gaagaaacagcttatgaggctacgg

SEQ ID NO: 109115 - DNA, 25 bp, Canis familiaris
gaagaaacagcttatgaggctacgg

SEQ ID NO: 109116 - DNA, 25 bp, Canis familiaris
gaagcaagacagcatttaggacgga

SEQ ID NO: 109117 - DNA, 25 bp, Canis familiaris
gaagcaagagctgttctaagaggga

SEQ ID NO: 109118 - DNA, 25 bp, Canis familiaris
gaagagctggctggttatagaaagg

SEQ ID NO: 109119 - DNA, 25 bp, Canis familiaris
gaagacccctgtaatagagaaggac

SEQ ID NO: 109120 - DNA, 25 bp, Canis familiaris
gaagaccaacagctatgggaagaac

SEQ ID NO: 109121 - DNA, 25 bp, Canis familiaris
gaagactacacacctgtcaggaaga

SEQ ID NO: 109122 - DNA, 25 bp, Canis familiaris
gaagacgaccacaaacaggcaccat

SEQ ID NO: 109123 - DNA, 25 bp, Canis familiaris
gaagacagaccagcagggcgacact

SEQ ID NO: 109124 - DNA, 25 bp, Canis familiaris
gaagacgctcaagagccagaacacg

SEQ ID NO: 109125 - DNA, 25 bp, Canis familiaris
gaagaaggcaaggaccgactccacg

SEQ ID NO: 109126 - DNA, 25 bp, Canis familiaris
gaagagagaggggccacgagtctac

SEQ ID NO: 109127 - DNA, 25 bp, Canis familiaris
gaagaaggtggggcttatactaagt

SEQ ID NO: 109128 - DNA, 25 bp, Canis familiaris
gaagagaaatgcctccatttaaaag

SEQ ID NO: 109129 - DNA, 25 bp, Canis familiaris
gaagcacacaatcacgctagctata

SEQ ID NO: 109130 - DNA, 25 bp, Canis familiaris
gaagcgcatacgcatgactacatta

SEQ ID NO: 109131 - DNA, 25 bp, Canis familiaris
gaagagcatcaccttctctaagctc

SEQ ID NO: 109132 - DNA, 25 bp, Canis familiaris
gaagagcagctgtttcttcttctct

SEQ ID NO: 109133 - DNA, 25 bp, Canis familiaris
gaagagacagccttttcttccatcc

SEQ ID NO: 109134 - DNA, 25 bp, Canis familiaris
gaagcagagccttctgagacttcca

SEQ ID NO: 109135 - DNA, 25 bp, Canis familiaris
gaagcagcagccacaaagcttaccc

SEQ ID NO: 109136 - DNA, 25 bp, Canis familiaris
gaagagcagcgtgaacaggaagcta

SEQ ID NO: 109137 - DNA, 25 bp, Canis familiaris
gaagctgcagctggcctaaggaaga

SEQ ID NO: 109138 - DNA, 25 bp, Canis familiaris
gaagacctggcgattggaacagctt

SEQ ID NO: 109139 - DNA, 25 bp, Canis familiaris
gaagctcgggctggttaaatgactt

SEQ ID NO: 109140 - DNA, 25 bp, Canis familiaris
gaggtggggtggtttgtaggatcct

SEQ ID NO: 109141 - DNA, 25 bp, Canis familiaris
gaagcggggcggatttcaggatacc

SEQ ID NO: 109142 - DNA, 25 bp, Canis familiaris
gaagctggaagcctttttcggaatc

SEQ ID NO: 109143 - DNA, 25 bp, Canis familiaris
gaagctagaagctcttctcggtgaa

SEQ ID NO: 109144 - DNA, 25 bp, Canis familiaris
gaagcaagatttcctttcctggatg

SEQ ID NO: 109145 - DNA, 25 bp, Canis familiaris
gaagaatgcattgactttcaggaag

SEQ ID NO: 109146 - DNA, 25 bp, Canis familiaris
gaagaatctcactctcactaggata

SEQ ID NO: 109147 - DNA, 25 bp, Canis familiaris
gaagacatcacagaacctcagagca

SEQ ID NO: 109148 - DNA, 25 bp, Canis familiaris
gaagacatacacgtcaagcacatga

SEQ ID NO: 109149 - DNA, 25 bp, Canis familiaris
gaagcataccaagtgctcagccatg

SEQ ID NO: 109150 - DNA, 25 bp, Canis familiaris
gaagcattctgttgatgccaggcca

SEQ ID NO: 109151 - DNA, 25 bp, Canis familiaris
gaagcactcgtttctctggaaagcc

SEQ ID NO: 109152 - DNA, 25 bp, Canis familiaris
gaagactggatttatgtccaaggcc

SEQ ID NO: 109153 - DNA, 25 bp, Canis familiaris
gaagactgcagtcgctgtggacaag

SEQ ID NO: 109154 - DNA, 25 bp, Canis familiaris
gaagaggatcttagtggcacagcag

SEQ ID NO: 109155 - DNA, 25 bp, Canis familiaris
gaagagcgatacatcatggccgact

SEQ ID NO: 109156 - DNA, 25 bp, Canis familiaris
gaagaccatcaaagctggcctgaga

SEQ ID NO: 109157 - DNA, 25 bp, Canis familiaris
gaagaggatgtgagggccgtgaccc

SEQ ID NO: 109158 - DNA, 25 bp, Canis familiaris
gaagcaggatgtatgtggccttgag

SEQ ID NO: 109159 - DNA, 25 bp, Canis familiaris
gaagcaagcagtgtctgagcctcag

SEQ ID NO: 109160 - DNA, 25 bp, Canis familiaris
gaagagcgagtagctgatgtccagc

SEQ ID NO: 109161 - DNA, 25 bp, Canis familiaris
gaagaagagaatctgttccactatt

SEQ ID NO: 109162 - DNA, 25 bp, Canis familiaris
gaagaaaactattgtactcttttgt

SEQ ID NO: 109163 - DNA, 25 bp, Canis familiaris
gaagaaaacccattggtgttgtgtt

SEQ ID NO: 109164 - DNA, 25 bp, Canis familiaris
gaagacaagcacttatttgtgtatg

SEQ ID NO: 109165 - DNA, 25 bp, Canis familiaris
gaagacccacatcaacattgtggtc

SEQ ID NO: 109166 - DNA, 25 bp, Canis familiaris
gaagacccacaagggctctgtgtgc

SEQ ID NO: 109167 - DNA, 25 bp, Canis familiaris
gaagaaccgcaagcagtgtgtgtgt

SEQ ID NO: 109168 - DNA, 25 bp, Canis familiaris
gaagaactgcactcggtgtgttttc

SEQ ID NO: 109169 - DNA, 25 bp, Canis familiaris
gaagcaatctcactacttggtattt

SEQ ID NO: 109170 - DNA, 25 bp, Canis familiaris
gaagaatccactactctgattattt

SEQ ID NO: 109171 - DNA, 25 bp, Canis familiaris
gaagactctacaacttgttccatgt

SEQ ID NO: 109172 - DNA, 25 bp, Canis familiaris
gaagacattactcattgttcaataa

SEQ ID NO: 109173 - DNA, 25 bp, Canis familiaris
gaagacagtacaatattttaaaata

SEQ ID NO: 109174 - DNA, 25 bp, Canis familiaris
gaagaagtcccagctgttaagcagg

SEQ ID NO: 109175 - DNA, 25 bp, Canis familiaris
gaagacggcgagctctgtctgaaca

SEQ ID NO: 109176 - DNA, 25 bp, Canis familiaris
gaagagctgggagttggctccacct

SEQ ID NO: 109177 - DNA, 25 bp, Canis familiaris
gaagagtgaagacttcgctctcccg

SEQ ID NO: 109178 - DNA, 25 bp, Canis familiaris
gaagagctggacttcaggctgctcc

SEQ ID NO: 109179 - DNA, 25 bp, Canis familiaris
gaagacacgacactggcgtgctggc

SEQ ID NO: 109180 - DNA, 25 bp, Canis familiaris
gaagcaactgacctgcttgttctgc

SEQ ID NO: 109181 - DNA, 25 bp, Canis familiaris
gaagacaatgcagagctctttcccc

SEQ ID NO: 109182 - DNA, 25 bp, Canis familiaris
gaagaaagttcattcctgatcccca

SEQ ID NO: 109183 - DNA, 25 bp, Canis familiaris
gaagctaagaatgctcctaacccaa

SEQ ID NO: 109184 - DNA, 25 bp, Canis familiaris
gaagcatctaaagtctgcctagcac

SEQ ID NO: 109185 - DNA, 25 bp, Canis familiaris
gaagcacatgactgcttcctggctg

SEQ ID NO: 109186 - DNA, 25 bp, Canis familiaris
gaagagctgcagatggagcctgtgt

SEQ ID NO: 109187 - DNA, 25 bp, Canis familiaris
gaagcagctgagacgagccagttta

SEQ ID NO: 109188 - DNA, 25 bp, Canis familiaris
gaagcagctagtatgccacaaagtg

SEQ ID NO: 109189 - DNA, 25 bp, Canis familiaris
gaagcagctggtgcactaacacggc

SEQ ID NO: 109190 - DNA, 25 bp, Canis familiaris
gaagacttctgttctatacactcgc

SEQ ID NO: 109191 - DNA, 25 bp, Canis familiaris
gaagactttcttaaacaacatgcca

SEQ ID NO: 109192 - DNA, 25 bp, Canis familiaris
gaagactatacctaaatctctatgc

SEQ ID NO: 109193 - DNA, 25 bp, Canis familiaris
gaagaccaaagcatcagatttctga

SEQ ID NO: 109194 - DNA, 25 bp, Canis familiaris
gaagaccaaggaggcagttttgctt

SEQ ID NO: 109195 - DNA, 25 bp, Canis familiaris
gaagaccaagacgagctgtcctctc

SEQ ID NO: 109196 - DNA, 25 bp, Canis familiaris
gaagactacaaggatttacatgctg

SEQ ID NO: 109197 - DNA, 25 bp, Canis familiaris
gaagactatactgtgtaactgctta

SEQ ID NO: 109198 - DNA, 25 bp, Canis familiaris
gaagcgaatactctggcaatgccta

SEQ ID NO: 109199 - DNA, 25 bp, Canis familiaris
gaagcttgtaccttggtctgactag

SEQ ID NO: 109200 - DNA, 25 bp, Canis familiaris
gaagctttaggcttgtgcctcacat

SEQ ID NO: 109201 - DNA, 25 bp, Canis familiaris
gaacttcgtactgacagctgctcac

SEQ ID NO: 109202 - DNA, 25 bp, Canis familiaris
gaagcttccccattgagcagagctc

SEQ ID NO: 109203 - DNA, 25 bp, Canis familiaris
gaagagactcccgtggaatctcagg

SEQ ID NO: 109204 - DNA, 25 bp, Canis familiaris
gaagcagtacttggctggagttcgg

SEQ ID NO: 109205 - DNA, 25 bp, Canis familiaris
gaagcagctgacttgggctcaggtc

SEQ ID NO: 109206 - DNA, 25 bp, Canis familiaris
gaagcagctgaatttttgcacgatg

SEQ ID NO: 109207 - DNA, 25 bp, Canis familiaris
gaagagcgttctctggactgatgcc

SEQ ID NO: 109208 - DNA, 25 bp, Canis familiaris
gaagacagtctccagtgcaagtagg

SEQ ID NO: 109209 - DNA, 25 bp, Canis familiaris
gaagaccgctcgctgaaatgcgggc

SEQ ID NO: 109210 - DNA, 25 bp, Canis familiaris
gaagactccagcgggaacgtggtga

SEQ ID NO: 109211 - DNA, 25 bp, Canis familiaris
gaagagctcaagtcggaccggatga

SEQ ID NO: 109212 - DNA, 25 bp, Canis familiaris
gaagccttacacgtacgcgtatgga

SEQ ID NO: 109213 - DNA, 25 bp, Canis familiaris
gaactctaagggcacaatgtttaca

SEQ ID NO: 109214 - DNA, 25 bp, Canis familiaris
gaacctaatcctaagaattcccaga

SEQ ID NO: 109215 - DNA, 25 bp, Canis familiaris
gaaccttctaaaaatcttccacaga

SEQ ID NO: 109216 - DNA, 25 bp, Canis familiaris
gaagcgtactgataaactcgccagc

SEQ ID NO: 109217 - DNA, 25 bp, Canis familiaris
gaagcgaacaaagtaactcccgagg

SEQ ID NO: 109218 - DNA, 25 bp, Canis familiaris
gaccggtcaatataacgtccgaact

SEQ ID NO: 109219 - DNA, 25 bp, Canis familiaris
gaacggtaagacttgacgtctccca

SEQ ID NO: 109220 - DNA, 25 bp, Canis familiaris
gaactggtaggattgaagaccccct

SEQ ID NO: 109221 - DNA, 25 bp, Canis familiaris
gacactgtctatcagtacgtcggca

SEQ ID NO: 109222 - DNA, 25 bp, Canis familiaris
gaagctgcttacaagaaccccagac

SEQ ID NO: 109223 - DNA, 25 bp, Canis familiaris
gaacttctacgtggacggccacgtc

SEQ ID NO: 109224 - DNA, 25 bp, Canis familiaris
gaacttctagccttaaggtccgtcg

SEQ ID NO: 109225 - DNA, 25 bp, Canis familiaris
gaagctttgtgtgtacattgtcccc

SEQ ID NO: 109226 - DNA, 25 bp, Canis familiaris
gaagcagtcgttgttcatctatcct

SEQ ID NO: 109227 - DNA, 25 bp, Canis familiaris
gaagcatttgtttttgcctacgata

SEQ ID NO: 109228 - DNA, 25 bp, Canis familiaris
gaagctcaatttttaggtgactgaa

SEQ ID NO: 109229 - DNA, 25 bp, Canis familiaris
gaagctacatcggcttcagcggtct

SEQ ID NO: 109230 - DNA, 25 bp, Canis familiaris
gaagctaccaggatctcaggctgtg

SEQ ID NO: 109231 - DNA, 25 bp, Canis familiaris
gaagctacatcacatattcctttgg

SEQ ID NO: 109232 - DNA, 25 bp, Canis familiaris
gaagctgtcactcatatccatttgt

SEQ ID NO: 109233 - DNA, 25 bp, Canis familiaris
gacactgtcaagattaagttatacc

SEQ ID NO: 109234 - DNA, 25 bp, Canis familiaris
gaagcagctaaaataaatgttgatg

SEQ ID NO: 109235 - DNA, 25 bp, Canis familiaris
gaagcagctgaagcccaggttgggc

SEQ ID NO: 109236 - DNA, 25 bp, Canis familiaris
gaagaatatggcccaagcatttggg

SEQ ID NO: 109237 - DNA, 25 bp, Canis familiaris
gaagaactgggatcagctcttgggc

SEQ ID NO: 109238 - DNA, 25 bp, Canis familiaris
gaagaactgcggatggcgcttgagc

SEQ ID NO: 109239 - DNA, 25 bp, Canis familiaris
gaagagagctgggttggggggactg

SEQ ID NO: 109240 - DNA, 25 bp, Canis familiaris
gaagaagacggagtgcggggggcgc

SEQ ID NO: 109241 - DNA, 25 bp, Canis familiaris
gaagaaggcggaaggcggcggaggc

SEQ ID NO: 109242 - DNA, 25 bp, Canis familiaris
gaagacagagcagcagaggcggcgg

SEQ ID NO: 109243 - DNA, 25 bp, Canis familiaris
gaagcaaggcaggcagggggcgcca

SEQ ID NO: 109244 - DNA, 25 bp, Canis familiaris
gaagcaagcgtgcagggcagcagcc

SEQ ID NO: 109245 - DNA, 25 bp, Canis familiaris
gaagcaatcattcatggggccctat

SEQ ID NO: 109246 - DNA, 25 bp, Canis familiaris
gaagcaagattaagagtcatcccta

SEQ ID NO: 109247 - DNA, 25 bp, Canis familiaris
gaagcaaatgtaaaactcctctgaa

SEQ ID NO: 109248 - DNA, 25 bp, Canis familiaris
gaaccaattgacacatccgtctgac

SEQ ID NO: 109249 - DNA, 25 bp, Canis familiaris
gaaccatttgacttgcctaatctac

SEQ ID NO: 109250 - DNA, 25 bp, Canis familiaris
gaagcacatttggcattcctgacca

SEQ ID NO: 109251 - DNA, 25 bp, Canis familiaris
gaagacatcttgggatctgctgaca

SEQ ID NO: 109252 - DNA, 25 bp, Canis familiaris
gaagagcttcagggattgaacaatg

SEQ ID NO: 109253 - DNA, 25 bp, Canis familiaris
gaagactactgaggtgtgatatcta

SEQ ID NO: 109254 - DNA, 25 bp, Canis familiaris
gaagcaccactagctgatgatcccg

SEQ ID NO: 109255 - DNA, 25 bp, Canis familiaris
gaagcaccaggaagccatgacacca

SEQ ID NO: 109256 - DNA, 25 bp, Canis familiaris
gaagctccagaaagctcgagccctt

SEQ ID NO: 109257 - DNA, 25 bp, Canis familiaris
gaagcatcgggtagtcggggctgtg

SEQ ID NO: 109258 - DNA, 25 bp, Canis familiaris
gaagaagggggctgttggctgctgc

SEQ ID NO: 109259 - DNA, 25 bp, Canis familiaris
gaagaaggggagtcaggggacctgt

SEQ ID NO: 109260 - DNA, 25 bp, Canis familiaris
gaagaagtgcgacaggtgggatcct

SEQ ID NO: 109261 - DNA, 25 bp, Canis familiaris
gaagaaggcctggatgattggagaa

SEQ ID NO: 109262 - DNA, 25 bp, Canis familiaris
gaagcagtcaccggaagtggagaga

SEQ ID NO: 109263 - DNA, 25 bp, Canis familiaris
gaagagcccccagatagaagaaaaa

SEQ ID NO: 109264 - DNA, 25 bp, Canis familiaris
gaagacctaccactacatgaaggaa

SEQ ID NO: 109265 - DNA, 25 bp, Canis familiaris
gaagacatccccctaggaagagaga

SEQ ID NO: 109266 - DNA, 25 bp, Canis familiaris
gaagacccacagcctgggaaggtgg

SEQ ID NO: 109267 - DNA, 25 bp, Canis familiaris
gaagaatcccagccaaggaagcctg

SEQ ID NO: 109268 - DNA, 25 bp, Canis familiaris
gaagaacaccagcaagtgctccctc

SEQ ID NO: 109269 - DNA, 25 bp, Canis familiaris
gaagaaccagatagtggtgccccca

SEQ ID NO: 109270 - DNA, 25 bp, Canis familiaris
gaagaagctcagttgtctgctctct

SEQ ID NO: 109271 - DNA, 25 bp, Canis familiaris
gaagaaagagcattctgcagctctt

SEQ ID NO: 109272 - DNA, 25 bp, Canis familiaris
gaagacaaagcatttccatttcaac

SEQ ID NO: 109273 - DNA, 25 bp, Canis familiaris
gaagcatcaaacacccattttattc

SEQ ID NO: 109274 - DNA, 25 bp, Canis familiaris
gaagctgcccaaactttttatattc

SEQ ID NO: 109275 - DNA, 25 bp, Canis familiaris
gaagcagcaaccaacagtgatttaa

SEQ ID NO: 109276 - DNA, 25 bp, Canis familiaris
gaagcagcccgttctgtgatggctc

SEQ ID NO: 109277 - DNA, 25 bp, Canis familiaris
gaagcacccagttggtgtttcctta

SEQ ID NO: 109278 - DNA, 25 bp, Canis familiaris
gaagcagcccattcatggtctttgc

SEQ ID NO: 109279 - DNA, 25 bp, Canis familiaris
gaagacatgccttcagaggatgttg

SEQ ID NO: 109280 - DNA, 25 bp, Canis familiaris
gaagactgcttagtgctccagtgtt

SEQ ID NO: 109281 - DNA, 25 bp, Canis familiaris
gaagacttggactctcaggttggag

SEQ ID NO: 109282 - DNA, 25 bp, Canis familiaris
gaagcctttgcctctggagtagagg

SEQ ID NO: 109283 - DNA, 25 bp, Canis familiaris
gaactcctagcccctagatcaaggg

SEQ ID NO: 109284 - DNA, 25 bp, Canis familiaris
gaagctaatgggccactttaagtgg

SEQ ID NO: 109285 - DNA, 25 bp, Canis familiaris
gaagcgacagggtactctctagagt

SEQ ID NO: 109286 - DNA, 25 bp, Canis familiaris
gaagcagaaggtgatcatcgccgac

SEQ ID NO: 109287 - DNA, 25 bp, Canis familiaris
gaagaacaggtcaatcagcccttgg

SEQ ID NO: 109288 - DNA, 25 bp, Canis familiaris
gaagaacattgctgatacaccctga

SEQ ID NO: 109289 - DNA, 25 bp, Canis familiaris
gaagacctatgcttaacccattgag

SEQ ID NO: 109290 - DNA, 25 bp, Canis familiaris
gaagacacttgagaaccactgaggt

SEQ ID NO: 109291 - DNA, 25 bp, Canis familiaris
gaagaccttctaaaacatctgcaca

SEQ ID NO: 109292 - DNA, 25 bp, Canis familiaris
gaagaccacattaagaacagctcag

SEQ ID NO: 109293 - DNA, 25 bp, Canis familiaris
gaagaccaatgactcagacggacag

SEQ ID NO: 109294 - DNA, 25 bp, Canis familiaris
gaagagccacatcctaactggcacg

SEQ ID NO: 109295 - DNA, 25 bp, Canis familiaris
gaagaccacacactacactgtagga

SEQ ID NO: 109296 - DNA, 25 bp, Canis familiaris
gaagactcacaactattctccagaa

SEQ ID NO: 109297 - DNA, 25 bp, Canis familiaris
gaagacacaagacttactgcagaaa

SEQ ID NO: 109298 - DNA, 25 bp, Canis familiaris
gaagaaaatctaatatcgcagcata

SEQ ID NO: 109299 - DNA, 25 bp, Canis familiaris
gaagacagacactgtccgctgcatc

SEQ ID NO: 109300 - DNA, 25 bp, Canis familiaris
gaagcacacaacaattcacctcatc

SEQ ID NO: 109301 - DNA, 25 bp, Canis familiaris
gaagcacaagacattcacgtaccgt

SEQ ID NO: 109302 - DNA, 25 bp, Canis familiaris
gaagcgaagacattcccagataagc

SEQ ID NO: 109303 - DNA, 25 bp, Canis familiaris
gaacgaaacaagcccaaagctcttc

SEQ ID NO: 109304 - DNA, 25 bp, Canis familiaris
gaacgagacaccaacgtcaagcctt

SEQ ID NO: 109305 - DNA, 25 bp, Canis familiaris
gaactggccactcaagatcaacgtt

SEQ ID NO: 109306 - DNA, 25 bp, Canis familiaris
gaagctggtattctagacacttact

SEQ ID NO: 109307 - DNA, 25 bp, Canis familiaris
gaagctggataatatatgaaatgca

SEQ ID NO: 109308 - DNA, 25 bp, Canis familiaris
gaagcttgtagttaaagcctcattc

SEQ ID NO: 109309 - DNA, 25 bp, Canis familiaris
gaagctttattgttcaacctcacac

SEQ ID NO: 109310 - DNA, 25 bp, Canis familiaris
gaagctcttcatttatgacccgaac

SEQ ID NO: 109311 - DNA, 25 bp, Canis familiaris
gaagcttccttttcatgttcaaact

SEQ ID NO: 109312 - DNA, 25 bp, Canis familiaris
gaagaccctttcgagtaaacacatt

SEQ ID NO: 109313 - DNA, 25 bp, Canis familiaris
gaagccgcctcttcggtagaggcct

SEQ ID NO: 109314 - DNA, 25 bp, Canis familiaris
gaagccgcccttttttgagcggtat

SEQ ID NO: 109315 - DNA, 25 bp, Canis familiaris
gaagaagcccttgatctagactagt

SEQ ID NO: 109316 - DNA, 25 bp, Canis familiaris
gaagaccctcttgaatttctagtca

SEQ ID NO: 109317 - DNA, 25 bp, Canis familiaris
gaagaaccgtcttgaattttgactt

SEQ ID NO: 109318 - DNA, 25 bp, Canis familiaris
gaagacccgtgtagtagtttgagtt

SEQ ID NO: 109319 - DNA, 25 bp, Canis familiaris
gaacctaggtgtatcctttggtctt

SEQ ID NO: 109320 - DNA, 25 bp, Canis familiaris
gaacgctatgggtttaacgacgtct

SEQ ID NO: 109321 - DNA, 25 bp, Canis familiaris
gacagtctaagtcttaaggatcctt

SEQ ID NO: 109322 - DNA, 25 bp, Canis familiaris
gaagcttagattccattgatcaaac

SEQ ID NO: 109323 - DNA, 25 bp, Canis familiaris
gaagcttgtataccacttagctact

SEQ ID NO: 109324 - DNA, 25 bp, Canis familiaris
gaagctttagaattctttgcgcagt

SEQ ID NO: 109325 - DNA, 25 bp, Canis familiaris
gaagctatgtagaattggtccgaat

SEQ ID NO: 109326 - DNA, 25 bp, Canis familiaris
gaagctgatgctctcattgaatctc

SEQ ID NO: 109327 - DNA, 25 bp, Canis familiaris
gaagcttcccagaatgaagccaact

SEQ ID NO: 109328 - DNA, 25 bp, Canis familiaris
gaagctcttccagcagaagttcaaa

SEQ ID NO: 109329 - DNA, 25 bp, Canis familiaris
gaagctcttctaggatgccattgtc

SEQ ID NO: 109330 - DNA, 25 bp, Canis familiaris
gaagctttctcttgagctatcgctc

SEQ ID NO: 109331 - DNA, 25 bp, Canis familiaris
gaagccttttaattatccttggtca

SEQ ID NO: 109332 - DNA, 25 bp, Canis familiaris
gaagctcattttaagactcgttgga

SEQ ID NO: 109333 - DNA, 25 bp, Canis familiaris
gaagcagcattattctagcatccag

SEQ ID NO: 109334 - DNA, 25 bp, Canis familiaris
gaagcagctcattgacaacatcctg

SEQ ID NO: 109335 - DNA, 25 bp, Canis familiaris
gaagactcacatcaacatcgtcgtc

SEQ ID NO: 109336 - DNA, 25 bp, Canis familiaris
gaagacgatcagataccgtcgtagt

SEQ ID NO: 109337 - DNA, 25 bp, Canis familiaris
gaagaagaagcagtacacgtccatt

SEQ ID NO: 109338 - DNA, 25 bp, Canis familiaris
gaagcagaaagaagacacccaagat

SEQ ID NO: 109339 - DNA, 25 bp, Canis familiaris
gaagcaaaaaaggctaagcaagcat

SEQ ID NO: 109340 - DNA, 25 bp, Canis familiaris
gaagaaacagcgtactaagaaaaat

SEQ ID NO: 109341 - DNA, 25 bp, Canis familiaris
gaagaaacagcgtatctaagagaaa

SEQ ID NO: 109342 - DNA, 25 bp, Canis familiaris
gaagcaaaagcaccatctggaggga

SEQ ID NO: 109343 - DNA, 25 bp, Canis familiaris
gaagaacaacgcaattcgggtcaga

SEQ ID NO: 109344 - DNA, 25 bp, Canis familiaris
gaagaagaacctatcgatgtgcaaa

SEQ ID NO: 109345 - DNA, 25 bp, Canis familiaris
gaagaagaacctatcatctgcaaaa

SEQ ID NO: 109346 - DNA, 25 bp, Canis familiaris
gaagaaaaccttacacatatataca

SEQ ID NO: 109347 - DNA, 25 bp, Canis familiaris
gaagaaaaccttagtatgcatcata

SEQ ID NO: 109348 - DNA, 25 bp, Canis familiaris
gaagcaacatatcctaggtcagcac

SEQ ID NO: 109349 - DNA, 25 bp, Canis familiaris
gaagcaagcttcattggaagcacta

SEQ ID NO: 109350 - DNA, 25 bp, Canis familiaris
gaagcatatgctaccgatggcagaa

SEQ ID NO: 109351 - DNA, 25 bp, Canis familiaris
gaagcatatatcccagatctctgta

SEQ ID NO: 109352 - DNA, 25 bp, Canis familiaris
gaagaactgatttgcactctgtagt

SEQ ID NO: 109353 - DNA, 25 bp, Canis familiaris
gaagaaggctgtgcagaggctggag

SEQ ID NO: 109354 - DNA, 25 bp, Canis familiaris
gaagaaggctgcttaaccgttatgc

SEQ ID NO: 109355 - DNA, 25 bp, Canis familiaris
gaagaaggcttcacacctgcttaac

SEQ ID NO: 109356 - DNA, 25 bp, Canis familiaris
gaagaagacgtacgacctgcttttc

SEQ ID NO: 109357 - DNA, 25 bp, Canis familiaris
gaagacggtggacgtcgtcgtgttc

SEQ ID NO: 109358 - DNA, 25 bp, Canis familiaris
gaagaaggggggccaacgatgtgtc

SEQ ID NO: 109359 - DNA, 25 bp, Canis familiaris
gaagaagggtgatgcccaagctgct

SEQ ID NO: 109360 - DNA, 25 bp, Canis familiaris
gaagcaaggttgccattctagagtg

SEQ ID NO: 109361 - DNA, 25 bp, Canis familiaris
gaagacagacggccagggagagtca

SEQ ID NO: 109362 - DNA, 25 bp, Canis familiaris
gaagcagcaacatggcgaggcaaac

SEQ ID NO: 109363 - DNA, 25 bp, Canis familiaris
gaagcagcaaaaccacacagcatca

SEQ ID NO: 109364 - DNA, 25 bp, Canis familiaris
gaagcagctgaagcagcccgcatat

SEQ ID NO: 109365 - DNA, 25 bp, Canis familiaris
gaagcagctgaagcagcccgcatat

SEQ ID NO: 109366 - DNA, 25 bp, Canis familiaris
gaagctgtctgagcagctcggaatt

SEQ ID NO: 109367 - DNA, 25 bp, Canis familiaris
gaagcatctggagtcccattgaatt

SEQ ID NO: 109368 - DNA, 25 bp, Canis familiaris
gaagcagggcaatccatcatttctt

SEQ ID NO: 109369 - DNA, 25 bp, Canis familiaris
gaagcaaagcaacccgcttgtcatc

SEQ ID NO: 109370 - DNA, 25 bp, Canis familiaris
gaagaattcaacagcagggtcacca

SEQ ID NO: 109371 - DNA, 25 bp, Canis familiaris
gaagaaatgcccagcagagacccct

SEQ ID NO: 109372 - DNA, 25 bp, Canis familiaris
gaaaactccaactgaaagccctatt

SEQ ID NO: 109373 - DNA, 25 bp, Canis familiaris
gaagaagctccattcaggaccagcc

SEQ ID NO: 109374 - DNA, 25 bp, Canis familiaris
gaagaagctcttcagcagcagcacc

SEQ ID NO: 109375 - DNA, 25 bp, Canis familiaris
gaagacatctgtttagcaagaacct

SEQ ID NO: 109376 - DNA, 25 bp, Canis familiaris
gaagactctgtatttaccaagccta

SEQ ID NO: 109377 - DNA, 25 bp, Canis familiaris
gaagcgtctgaagatactctaccat

SEQ ID NO: 109378 - DNA, 25 bp, Canis familiaris
gaagcgtctgaaagaaactctacaa

SEQ ID NO: 109379 - DNA, 25 bp, Canis familiaris
gaagcgtctgcacagaagctggtat

SEQ ID NO: 109380 - DNA, 25 bp, Canis familiaris
gaagcaggctcagaccctgatgaac

SEQ ID NO: 109381 - DNA, 25 bp, Canis familiaris
gaagcggcacatgtagcctggacgc

SEQ ID NO: 109382 - DNA, 25 bp, Canis familiaris
gaagcttgcatatcacaactggacc

SEQ ID NO: 109383 - DNA, 25 bp, Canis familiaris
gaagcatggttatcacatctccagc

SEQ ID NO: 109384 - DNA, 25 bp, Canis familiaris
gaagcatgggattggcagtctaggc

SEQ ID NO: 109385 - DNA, 25 bp, Canis familiaris
gaagcagctggcctggccttaggtt

SEQ ID NO: 109386 - DNA, 25 bp, Canis familiaris
gaagcttggagcccgtgcaaggctt

SEQ ID NO: 109387 - DNA, 25 bp, Canis familiaris
gaacattcagggccagctcaaggtc

SEQ ID NO: 109388 - DNA, 25 bp, Canis familiaris
gaagaataggcactcagtcacagaa

SEQ ID NO: 109389 - DNA, 25 bp, Canis familiaris
gaagaacatcgatcagtgctcagag

SEQ ID NO: 109390 - DNA, 25 bp, Canis familiaris
gaagacaatcgatcctgagctgact

SEQ ID NO: 109391 - DNA, 25 bp, Canis familiaris
gaagacaactattctgcaggtgcac

SEQ ID NO: 109392 - DNA, 25 bp, Canis familiaris
gaagacatttagtatgcagttgata

SEQ ID NO: 109393 - DNA, 25 bp, Canis familiaris
gaagactttatgccatgttgtatca

SEQ ID NO: 109394 - DNA, 25 bp, Canis familiaris
gaagacttgagaagtgctagttatg

SEQ ID NO: 109395 - DNA, 25 bp, Canis familiaris
gaagcatctgaacacttagatttgc

SEQ ID NO: 109396 - DNA, 25 bp, Canis familiaris
gaagcttcaaggtttgtcatttctg

SEQ ID NO: 109397 - DNA, 25 bp, Canis familiaris
gaagctacagggctgtttttttcca

SEQ ID NO: 109398 - DNA, 25 bp, Canis familiaris
gaagctactggatctgttttttttt

SEQ ID NO: 109399 - DNA, 25 bp, Canis familiaris
gaagctagttggacttttgttttct

SEQ ID NO: 109400 - DNA, 25 bp, Canis familiaris
gaagccagttgctctttgtggttgc

SEQ ID NO: 109401 - DNA, 25 bp, Canis familiaris
gaagacagttgcctaatttagttca

SEQ ID NO: 109402 - DNA, 25 bp, Canis familiaris
gaagaagcttccaactttagatcta

SEQ ID NO: 109403 - DNA, 25 bp, Canis familiaris
gaagcaatttccacaatagcgacaa

SEQ ID NO: 109404 - DNA, 25 bp, Canis familiaris
gaagaattctctatcagaatcttaa

SEQ ID NO: 109405 - DNA, 25 bp, Canis familiaris
gaagaatccactgaagaacctaaga

SEQ ID NO: 109406 - DNA, 25 bp, Canis familiaris
gaagcccccagctaagaacctggaa

SEQ ID NO: 109407 - DNA, 25 bp, Canis familiaris
gaagcccccagcttgtgaaattggg

SEQ ID NO: 109408 - DNA, 25 bp, Canis familiaris
gaaccacgacagagtaacatttcta

SEQ ID NO: 109409 - DNA, 25 bp, Canis familiaris
gaacgtcagccacagtatttttgta

SEQ ID NO: 109410 - DNA, 25 bp, Canis familiaris
gaaccacaccatccaattttttcct

SEQ ID NO: 109411 - DNA, 25 bp, Canis familiaris
gaagccgaagcttccttttgcttcc

SEQ ID NO: 109412 - DNA, 25 bp, Canis familiaris
gaagccgtgttggccttttagacca

SEQ ID NO: 109413 - DNA, 25 bp, Canis familiaris
gaagcagtcttctgcctttttggtc

SEQ ID NO: 109414 - DNA, 25 bp, Canis familiaris
gaagcagtttgcacagcaatgtggg

SEQ ID NO: 109415 - DNA, 25 bp, Canis familiaris
gaagcaatgttcatctaattgggta

SEQ ID NO: 109416 - DNA, 25 bp, Canis familiaris
gaagacaggatacctaagtagagtc

SEQ ID NO: 109417 - DNA, 25 bp, Canis familiaris
gaagaaggtaccaacaggagggaga

SEQ ID NO: 109418 - DNA, 25 bp, Canis familiaris
gaagacagggcagcgccagtgggaa

SEQ ID NO: 109419 - DNA, 25 bp, Canis familiaris
gaagccgggaagcccatgggagaac

SEQ ID NO: 109420 - DNA, 25 bp, Canis familiaris
gaagcaaggaaacctcatgtagggc

SEQ ID NO: 109421 - DNA, 25 bp, Canis familiaris
gaagctggggtacatgtgtcggggt

SEQ ID NO: 109422 - DNA, 25 bp, Canis familiaris
gaagctggagctgagcaagtacgcg

SEQ ID NO: 109423 - DNA, 25 bp, Canis familiaris
gaagctggcctggacatggctacga

SEQ ID NO: 109424 - DNA, 25 bp, Canis familiaris
gaagctgtgcctcacttactaaagc

SEQ ID NO: 109425 - DNA, 25 bp, Canis familiaris
gaagcaggcctggaagctactttca

SEQ ID NO: 109426 - DNA, 25 bp, Canis familiaris
gaagcatgtcttgaagccagctgtc

SEQ ID NO: 109427 - DNA, 25 bp, Canis familiaris
gaagctgtatctgaaatcaggcacg

SEQ ID NO: 109428 - DNA, 25 bp, Canis familiaris
gaagcactatatgacaccaagatct

SEQ ID NO: 109429 - DNA, 25 bp, Canis familiaris
gaagcagtcatgtccaaaaaatatt

SEQ ID NO: 109430 - DNA, 25 bp, Canis familiaris
gaagcgctcagtgtggtcaaatttg

SEQ ID NO: 109431 - DNA, 25 bp, Canis familiaris
gaagcagccgcagtttaaagattag

SEQ ID NO: 109432 - DNA, 25 bp, Canis familiaris
gaagcaccgcctcatcaaggtggag

SEQ ID NO: 109433 - DNA, 25 bp, Canis familiaris
gaagcccatagttcaataggtgaag

SEQ ID NO: 109434 - DNA, 25 bp, Canis familiaris
gaagctgccaaggaagaatccgagg

SEQ ID NO: 109435 - DNA, 25 bp, Canis familiaris
gaagctgactacgtagctcatccgc

SEQ ID NO: 109436 - DNA, 25 bp, Canis familiaris
gaagcagagctagggcctgatcgcc

SEQ ID NO: 109437 - DNA, 25 bp, Canis familiaris
gaagcgtgctatggagctgcagttc

SEQ ID NO: 109438 - DNA, 25 bp, Canis familiaris
gaagctgtcatcgtgagccattttg

SEQ ID NO: 109439 - DNA, 25 bp, Canis familiaris
gaagcatgtcctggcaacttttttt

SEQ ID NO: 109440 - DNA, 25 bp, Canis familiaris
gaagcaatcacagaacttattactc

SEQ ID NO: 109441 - DNA, 25 bp, Canis familiaris
gaagaacctctgtgctgtaaactca

SEQ ID NO: 109442 - DNA, 25 bp, Canis familiaris
gaagaaatttcttgtgttcattcca

SEQ ID NO: 109443 - DNA, 25 bp, Canis familiaris
gaaaagatttttcatactgccccag

SEQ ID NO: 109444 - DNA, 25 bp, Canis familiaris
gacacgagttttcttaatgacccag

SEQ ID NO: 109445 - DNA, 25 bp, Canis familiaris
gaagaatttattcactcaagactaa

SEQ ID NO: 109446 - DNA, 25 bp, Canis familiaris
gaagaacattttttccagccacaaa

SEQ ID NO: 109447 - DNA, 25 bp, Canis familiaris
gaagaacattcttaaccctacaaat

SEQ ID NO: 109448 - DNA, 25 bp, Canis familiaris
gaagaactcctgtaaatcagtaata

SEQ ID NO: 109449 - DNA, 25 bp, Canis familiaris
gaagaagtcttgtaaatcagctgct

SEQ ID NO: 109450 - DNA, 25 bp, Canis familiaris
gaagaagctcttggacttcattttg

SEQ ID NO: 109451 - DNA, 25 bp, Canis familiaris
gaagaactttgtatggcactattgt

SEQ ID NO: 109452 - DNA, 25 bp, Canis familiaris
gaagaagcttttacaggataatttt

SEQ ID NO: 109453 - DNA, 25 bp, Canis familiaris
gaagaacttggccccaatatgtttc

SEQ ID NO: 109454 - DNA, 25 bp, Canis familiaris
gaagaacctgtgtccaaatattgtt

SEQ ID NO: 109455 - DNA, 25 bp, Canis familiaris
gaagcagaccctttttattgtgaat

SEQ ID NO: 109456 - DNA, 25 bp, Canis familiaris
gaaccacccttggatattggctgaa

SEQ ID NO: 109457 - DNA, 25 bp, Canis familiaris
gaactccaggcatttatttggctgc

SEQ ID NO: 109458 - DNA, 25 bp, Canis familiaris
gaagcccgtctgtttaatgactgct

SEQ ID NO: 109459 - DNA, 25 bp, Canis familiaris
gaagcccgaggtggtgaagacgcac

SEQ ID NO: 109460 - DNA, 25 bp, Canis familiaris
gaagcccaagatgcagggtatcgca

SEQ ID NO: 109461 - DNA, 25 bp, Canis familiaris
gaagccctggctgcaggcagccttc

SEQ ID NO: 109462 - DNA, 25 bp, Canis familiaris
gaagccctgagcacgtggcatagtt

SEQ ID NO: 109463 - DNA, 25 bp, Canis familiaris
gaagccctgtgattgacttcaagct

SEQ ID NO: 109464 - DNA, 25 bp, Canis familiaris
gaagcaatcactttgacttatgtgg

SEQ ID NO: 109465 - DNA, 25 bp, Canis familiaris
gaagcaacttttggcaaagcatggg

SEQ ID NO: 109466 - DNA, 25 bp, Canis familiaris
gaagctgatctacttccaactgcat

SEQ ID NO: 109467 - DNA, 25 bp, Canis familiaris
gaacgttcaaaccaagctcacggct

SEQ ID NO: 109468 - DNA, 25 bp, Canis familiaris
gaagcgatcaaagctcgagtcaggg

SEQ ID NO: 109469 - DNA, 25 bp, Canis familiaris
gaagcgacgataatattggccgggg

SEQ ID NO: 109470 - DNA, 25 bp, Canis familiaris
gaactactgaatattcccacgaaac

SEQ ID NO: 109471 - DNA, 25 bp, Canis familiaris
gaagcccagaatattcccaggtgat

SEQ ID NO: 109472 - DNA, 25 bp, Canis familiaris
gaagcccagagatttgcccgaatgg

SEQ ID NO: 109473 - DNA, 25 bp, Canis familiaris
gaaccggaatgatcactggattatg

SEQ ID NO: 109474 - DNA, 25 bp, Canis familiaris
gaagccgaataatgcacgtttgaat

SEQ ID NO: 109475 - DNA, 25 bp, Canis familiaris
gaagcagggtgctcaacgtattggt

SEQ ID NO: 109476 - DNA, 25 bp, Canis familiaris
gaagcggtttagaagcagttttgct

SEQ ID NO: 109477 - DNA, 25 bp, Canis familiaris
gaagcaggttttcagagggatggct

SEQ ID NO: 109478 - DNA, 25 bp, Canis familiaris
gaagcaggtgctacatctcagaatg

SEQ ID NO: 109479 - DNA, 25 bp, Canis familiaris
gaagcacagtcaaatctcttttcaa

SEQ ID NO: 109480 - DNA, 25 bp, Canis familiaris
gaagcagcgtacttctttctgttct

SEQ ID NO: 109481 - DNA, 25 bp, Canis familiaris
gaagcaggacacagttctctaacca

SEQ ID NO: 109482 - DNA, 25 bp, Canis familiaris
gaagcaaaagctgtttcctcacaaa

SEQ ID NO: 109483 - DNA, 25 bp, Canis familiaris
gaagaataggctgttccttataaaa

SEQ ID NO: 109484 - DNA, 25 bp, Canis familiaris
gaaaaggcccagatccattatcgga

SEQ ID NO: 109485 - DNA, 25 bp, Canis familiaris
gaaaaggccaagatccattatcgga

SEQ ID NO: 109486 - DNA, 25 bp, Canis familiaris
gaaaaggccaagatccattatcgga

SEQ ID NO: 109487 - DNA, 25 bp, Canis familiaris
gaaaaggccaagatccattatcgga

SEQ ID NO: 109488 - DNA, 25 bp, Canis familiaris
gaaccggaacgaaccttatctgata

SEQ ID NO: 109489 - DNA, 25 bp, Canis familiaris
gatacccgaccagagcacgatttaa

SEQ ID NO: 109490 - DNA, 25 bp, Canis familiaris
gaaccaggtgggcgactgtttcagg

SEQ ID NO: 109491 - DNA, 25 bp, Canis familiaris
gaaccaggatggggaacagctctgc

SEQ ID NO: 109492 - DNA, 25 bp, Canis familiaris
gaactcggatcgataattttcggtg

SEQ ID NO: 109493 - DNA, 25 bp, Canis familiaris
gaagctgcggttttagatttctttc

SEQ ID NO: 109494 - DNA, 25 bp, Canis familiaris
gaagcatgggttttaatatctagtc

SEQ ID NO: 109495 - DNA, 25 bp, Canis familiaris
gaagcaggggcctttattctctaca

SEQ ID NO: 109496 - DNA, 25 bp, Canis familiaris
gaagcagagggtgggctgtgtcttt

SEQ ID NO: 109497 - DNA, 25 bp, Canis familiaris
gaagaagaggatcgttttctaatct

SEQ ID NO: 109498 - DNA, 25 bp, Canis familiaris
gaaaggggaactctcttacactgtt

SEQ ID NO: 109499 - DNA, 25 bp, Canis familiaris
gaacggggagaccttcgtagtatct

SEQ ID NO: 109500 - DNA, 25 bp, Canis familiaris
gaaccgggtagtctcagctgagttt

SEQ ID NO: 109501 - DNA, 25 bp, Canis familiaris
gaaagtgtcagtcttacagggtttt

SEQ ID NO: 109502 - DNA, 25 bp, Canis familiaris
taacgtgccgtcacaaccggatttg

SEQ ID NO: 109503 - DNA, 25 bp, Canis familiaris
gaagcttcgtggagaaccgtgttgg

SEQ ID NO: 109504 - DNA, 25 bp, Canis familiaris
gaagcctaccgtgactacagtttat

SEQ ID NO: 109505 - DNA, 25 bp, Canis familiaris
gaagccaaccaaggaccgggattga

SEQ ID NO: 109506 - DNA, 25 bp, Canis familiaris
gaagcaccctaaggactcgtggatt

SEQ ID NO: 109507 - DNA, 25 bp, Canis familiaris
gaagcaacctaagtgtccgacaata

SEQ ID NO: 109508 - DNA, 25 bp, Canis familiaris
gaagaagctctgcaatgtcaccaag

SEQ ID NO: 109509 - DNA, 25 bp, Canis familiaris
gaagaatgcttgccaataactatgc

SEQ ID NO: 109510 - DNA, 25 bp, Canis familiaris
gaagcaactgatccaagaccatatg

SEQ ID NO: 109511 - DNA, 25 bp, Canis familiaris
gaagcatactcaaagacacactcag

SEQ ID NO: 109512 - DNA, 25 bp, Canis familiaris
gaagctatctatgagcagcacagta

SEQ ID NO: 109513 - DNA, 25 bp, Canis familiaris
gaagccctgatggcagacatcttgt

SEQ ID NO: 109514 - DNA, 25 bp, Canis familiaris
gaagctcactgtgagcaatgtgctg

SEQ ID NO: 109515 - DNA, 25 bp, Canis familiaris
gaagctacttctggcaagatgcagg

SEQ ID NO: 109516 - DNA, 25 bp, Canis familiaris
gaagctaggtatgcagaaaggaaac

SEQ ID NO: 109517 - DNA, 25 bp, Canis familiaris
gaagctgagactatctataaggtaa

SEQ ID NO: 109518 - DNA, 25 bp, Canis familiaris
gaagcttacacttcctaagggatac

SEQ ID NO: 109519 - DNA, 25 bp, Canis familiaris
gaagctgtacaagttccacgagaca

SEQ ID NO: 109520 - DNA, 25 bp, Canis familiaris
gaaccacaggatgtccctgagacat

SEQ ID NO: 109521 - DNA, 25 bp, Canis familiaris
gaaccgggacctttagagacatcta

SEQ ID NO: 109522 - DNA, 25 bp, Canis familiaris
gaacacgggacctctatcgaaaatg

SEQ ID NO: 109523 - DNA, 25 bp, Canis familiaris
gaaccgcggggttcttcgagtaatg

SEQ ID NO: 109524 - DNA, 25 bp, Canis familiaris
gaacccgagggtgtgactttagatt

SEQ ID NO: 109525 - DNA, 25 bp, Canis familiaris
gaacccttgaggcttagtttagtat

SEQ ID NO: 109526 - DNA, 25 bp, Canis familiaris
gaacctcttgggatcgaaccatttt

SEQ ID NO: 109527 - DNA, 25 bp, Canis familiaris
gaagcccttgggatttctgaatttt

SEQ ID NO: 109528 - DNA, 25 bp, Canis familiaris
gaagcccttggaatagtgcctgata

SEQ ID NO: 109529 - DNA, 25 bp, Canis familiaris
gaagcagcagcttgagttattccca

SEQ ID NO: 109530 - DNA, 25 bp, Canis familiaris
gaagcagcaatctatgtaacatcct

SEQ ID NO: 109531 - DNA, 25 bp, Canis familiaris
gaagcaactgcattgaaatccacta

SEQ ID NO: 109532 - DNA, 25 bp, Canis familiaris
gaagcaacagctggaaagagactca

SEQ ID NO: 109533 - DNA, 25 bp, Canis familiaris
gaagcgccatgaagcaaaatgactt

SEQ ID NO: 109534 - DNA, 25 bp, Canis familiaris
gaaccacgtatatcatagacatctt

SEQ ID NO: 109535 - DNA, 25 bp, Canis familiaris
gaagcacaggtgatgatctggactt

SEQ ID NO: 109536 - DNA, 25 bp, Canis familiaris
gaagccagactttgtgtggcacaga

SEQ ID NO: 109537 - DNA, 25 bp, Canis familiaris
gaagcacagtgcattggtggcatgt

SEQ ID NO: 109538 - DNA, 25 bp, Canis familiaris
gaagcacgttttctagcatctacag

SEQ ID NO: 109539 - DNA, 25 bp, Canis familiaris
gaagcagcgtttacttcattccagg

SEQ ID NO: 109540 - DNA, 25 bp, Canis familiaris
gaagcaggattcttttcttggctgg

SEQ ID NO: 109541 - DNA, 25 bp, Canis familiaris
gaagcaggctctgcttgtcttggtt

SEQ ID NO: 109542 - DNA, 25 bp, Canis familiaris
gaagcagagcttgctgtgcacctgc

SEQ ID NO: 109543 - DNA, 25 bp, Canis familiaris
gaagcagcacaggtgctggcccagc

SEQ ID NO: 109544 - DNA, 25 bp, Canis familiaris
gaagcagattggaggcctagcaggt

SEQ ID NO: 109545 - DNA, 25 bp, Canis familiaris
gaagcacctgagtggtctaagaaac

SEQ ID NO: 109546 - DNA, 25 bp, Canis familiaris
gaagcccttggcactgatagaaaat

SEQ ID NO: 109547 - DNA, 25 bp, Canis familiaris
gaacggcttgaaaggacaaagaatt

SEQ ID NO: 109548 - DNA, 25 bp, Canis familiaris
gaagcacgttgcacgtgaacacagt

SEQ ID NO: 109549 - DNA, 25 bp, Canis familiaris
gaaccaatgtaccgtgataatatgt

SEQ ID NO: 109550 - DNA, 25 bp, Canis familiaris
gaacaccttaggaagaaaatgctta

SEQ ID NO: 109551 - DNA, 25 bp, Canis familiaris
gaacacacctgctgccaaaagtgct

SEQ ID NO: 109552 - DNA, 25 bp, Canis familiaris
gaagcacctgcgtgaaaaggcgctg

SEQ ID NO: 109553 - DNA, 25 bp, Canis familiaris
gaagcactcggctgcaaagtgaggc

SEQ ID NO: 109554 - DNA, 25 bp, Canis familiaris
gaagcagcccgttgtagaggagaca

SEQ ID NO: 109555 - DNA, 25 bp, Canis familiaris
gaagcaaccagggctaggggagcag

SEQ ID NO: 109556 - DNA, 25 bp, Canis familiaris
gaagccagccgggtatccggaaggc

SEQ ID NO: 109557 - DNA, 25 bp, Canis familiaris
gaaccagccatgctttcggaataat

SEQ ID NO: 109558 - DNA, 25 bp, Canis familiaris
gaactactgctgtccttcagagtta

SEQ ID NO: 109559 - DNA, 25 bp, Canis familiaris
gaaccagatgttgtccaatgtttca

SEQ ID NO: 109560 - DNA, 25 bp, Canis familiaris
gaaccgtttggtcaggaatctcact

SEQ ID NO: 109561 - DNA, 25 bp, Canis familiaris
gaagcaatgtttgttcaggaaccct

SEQ ID NO: 109562 - DNA, 25 bp, Canis familiaris
gaagcaactattggttcatacaaca

SEQ ID NO: 109563 - DNA, 25 bp, Canis familiaris
gaagctatctcatgagtgtataccc

SEQ ID NO: 109564 - DNA, 25 bp, Canis familiaris
gaagcaatataccagtattccccca

SEQ ID NO: 109565 - DNA, 25 bp, Canis familiaris
gaagcacaagaccggatgacccgtc

SEQ ID NO: 109566 - DNA, 25 bp, Canis familiaris
gaagctcagaatctggtaccgccgg

SEQ ID NO: 109567 - DNA, 25 bp, Canis familiaris
gaagctgaacatctctttcccagct

SEQ ID NO: 109568 - DNA, 25 bp, Canis familiaris
gaagctgaagatgtgtcttccacaa

SEQ ID NO: 109569 - DNA, 25 bp, Canis familiaris
gaagcagccaatgtgactggaccag

SEQ ID NO: 109570 - DNA, 25 bp, Canis familiaris
gaagctggcacagattcggcaacag

SEQ ID NO: 109571 - DNA, 25 bp, Canis familiaris
gaagctgcaacagaggggctgccag

SEQ ID NO: 109572 - DNA, 25 bp, Canis familiaris
gaagcacagacagaggagctccgtc

SEQ ID NO: 109573 - DNA, 25 bp, Canis familiaris
gaagctagatgaggaggcgctcctg

SEQ ID NO: 109574 - DNA, 25 bp, Canis familiaris
gaagctagaaaggtgcggccatact

SEQ ID NO: 109575 - DNA, 25 bp, Canis familiaris
gaagctcaagaagaaggacagccag

SEQ ID NO: 109576 - DNA, 25 bp, Canis familiaris
gaaccaagacgcctcacggaggagg

SEQ ID NO: 109577 - DNA, 25 bp, Canis familiaris
gaagccaagacaaggctcgccaaga

SEQ ID NO: 109578 - DNA, 25 bp, Canis familiaris
gaagcttatgaaaccatctctcaag

SEQ ID NO: 109579 - DNA, 25 bp, Canis familiaris
gaagcagaagaaacagtctctgaga

SEQ ID NO: 109580 - DNA, 25 bp, Canis familiaris
gaagcagaagatgagcaccctagag

SEQ ID NO: 109581 - DNA, 25 bp, Canis familiaris
gaagcagcaggaggaacggaagcgg

SEQ ID NO: 109582 - DNA, 25 bp, Canis familiaris
gacactttggggtcgagagcacgag

SEQ ID NO: 109583 - DNA, 25 bp, Canis familiaris
gaagcgcttggagtacggcgccgag

SEQ ID NO: 109584 - DNA, 25 bp, Canis familiaris
gaagcgtgccagatagcaggcgccc

SEQ ID NO: 109585 - DNA, 25 bp, Canis familiaris
gaagcaggccaaccgcatgagcttc

SEQ ID NO: 109586 - DNA, 25 bp, Canis familiaris
gaagcaggccaagcagatggatgag

SEQ ID NO: 109587 - DNA, 25 bp, Canis familiaris
gaagcagagcagggccaaaagatgg

SEQ ID NO: 109588 - DNA, 25 bp, Canis familiaris
gaagcaagtggtcagcagcaggtgg

SEQ ID NO: 109589 - DNA, 25 bp, Canis familiaris
gaagcgagtcagcaacagcacggtt

SEQ ID NO: 109590 - DNA, 25 bp, Canis familiaris
gaagctgattgccaagagcaacggc

SEQ ID NO: 109591 - DNA, 25 bp, Canis familiaris
gaagctgcagctgaagagctccagt

SEQ ID NO: 109592 - DNA, 25 bp, Canis familiaris
gaagctgaggggcagctccagtggc

SEQ ID NO: 109593 - DNA, 25 bp, Canis familiaris
gaagctgtgctacgtcgccctggac

SEQ ID NO: 109594 - DNA, 25 bp, Canis familiaris
gaagcgatcttttccgccggaatcc

SEQ ID NO: 109595 - DNA, 25 bp, Canis familiaris
gaacgactttattggccagagcacc

SEQ ID NO: 109596 - DNA, 25 bp, Canis familiaris
gaagctgtttccagggagatgaccc

SEQ ID NO: 109597 - DNA, 25 bp, Canis familiaris
gaagcttttgccagagtgtttctct

SEQ ID NO: 109598 - DNA, 25 bp, Canis familiaris
gaaccttatgcacacggtgattcca

SEQ ID NO: 109599 - DNA, 25 bp, Canis familiaris
gaagcccaagcggacaagtattcca

SEQ ID NO: 109600 - DNA, 25 bp, Canis familiaris
gaaccaaaccgcgaagtttgctccg

SEQ ID NO: 109601 - DNA, 25 bp, Canis familiaris
gaacactaaccgtggatggtgcccc

SEQ ID NO: 109602 - DNA, 25 bp, Canis familiaris
gaagcacttctcaagttggattgtg

SEQ ID NO: 109603 - DNA, 25 bp, Canis familiaris
gaagctgggccaagagatggaattt

SEQ ID NO: 109604 - DNA, 25 bp, Canis familiaris
gaagcagtgaccaagagatctactt

SEQ ID NO: 109605 - DNA, 25 bp, Canis familiaris
gaagcgtgataccagaaagatgtct

SEQ ID NO: 109606 - DNA, 25 bp, Canis familiaris
gaagcgcttcaccaataagccctac

SEQ ID NO: 109607 - DNA, 25 bp, Canis familiaris
gaagcctttacagaacagctctacc

SEQ ID NO: 109608 - DNA, 25 bp, Canis familiaris
gaagcactttttaacaatgtgaagc

SEQ ID NO: 109609 - DNA, 25 bp, Canis familiaris
gaagcatctcctgaaacaattagcc

SEQ ID NO: 109610 - DNA, 25 bp, Canis familiaris
gaaccaccctgaagagcaaataccg

SEQ ID NO: 109611 - DNA, 25 bp, Canis familiaris
gaagcacacaccaaaagaagaacca

SEQ ID NO: 109612 - DNA, 25 bp, Canis familiaris
gaagcacaaccacagcaagagcacc

SEQ ID NO: 109613 - DNA, 25 bp, Canis familiaris
gaagcacacttctaatgccagtcga

SEQ ID NO: 109614 - DNA, 25 bp, Canis familiaris
gaagcagccttcatgccagagatct

SEQ ID NO: 109615 - DNA, 25 bp, Canis familiaris
gaagctcctacatccagagactgga

SEQ ID NO: 109616 - DNA, 25 bp, Canis familiaris
gaagcttggagctccagagactgag

SEQ ID NO: 109617 - DNA, 25 bp, Canis familiaris
gaagcattattgtctccaaacttgg

SEQ ID NO: 109618 - DNA, 25 bp, Canis familiaris
gaagcaatattcccctaaactgcag

SEQ ID NO: 109619 - DNA, 25 bp, Canis familiaris
gaagcactatttccactaatattga

SEQ ID NO: 109620 - DNA, 25 bp, Canis familiaris
gaagcattatttccattaatattga

SEQ ID NO: 109621 - DNA, 25 bp, Canis familiaris
gaagcattccttctttgataatgtt

SEQ ID NO: 109622 - DNA, 25 bp, Canis familiaris
gaagcatttgttgtttcaagtctgt

SEQ ID NO: 109623 - DNA, 25 bp, Canis familiaris
gaagctttggtatattcaagtggtg

SEQ ID NO: 109624 - DNA, 25 bp, Canis familiaris
gaagctttattttctctaattccgc

SEQ ID NO: 109625 - DNA, 25 bp, Canis familiaris
gaagctattatcatcgcttcttccc

SEQ ID NO: 109626 - DNA, 25 bp, Canis familiaris
gaagcttgtactcagtgttttgcca

SEQ ID NO: 109627 - DNA, 25 bp, Canis familiaris
gaagcctgtgtgcggtgttttaacc

SEQ ID NO: 109628 - DNA, 25 bp, Canis familiaris
gaaccgagggctgcgtatttgagac

SEQ ID NO: 109629 - DNA, 25 bp, Canis familiaris
gaagccaagtggccaggttttcgcc

SEQ ID NO: 109630 - DNA, 25 bp, Canis familiaris
gaagctacagtccttggaattatcc

SEQ ID NO: 109631 - DNA, 25 bp, Canis familiaris
gaagcttcctgaaatggacattgat

SEQ ID NO: 109632 - DNA, 25 bp, Canis familiaris
gaagctgctctggaggagggtgtgt

SEQ ID NO: 109633 - DNA, 25 bp, Canis familiaris
gaagcagcttgatgacactggggat

SEQ ID NO: 109634 - DNA, 25 bp, Canis familiaris
gaagaattgaaaactgtgacgaaca

SEQ ID NO: 109635 - DNA, 25 bp, Canis familiaris
gaaccattgacatacttaaaaaaat

SEQ ID NO: 109636 - DNA, 25 bp, Canis familiaris
gaagccaacgtatcccaaagagaaa

SEQ ID NO: 109637 - DNA, 25 bp, Canis familiaris
gaaccaagcgttttcccaagtggca

SEQ ID NO: 109638 - DNA, 25 bp, Canis familiaris
gaaccaacagttctgggcaaaccag

SEQ ID NO: 109639 - DNA, 25 bp, Canis familiaris
gaacccacttaggtggcaccaacct

SEQ ID NO: 109640 - DNA, 25 bp, Canis familiaris
gaagcccctaaagggagaccacctg

SEQ ID NO: 109641 - DNA, 25 bp, Canis familiaris
gaagccccaaattgaaaagccacaa

SEQ ID NO: 109642 - DNA, 25 bp, Canis familiaris
gaagcccgagaaaggaaagcccaga

SEQ ID NO: 109643 - DNA, 25 bp, Canis familiaris
gaagccacgagaaaggagaagccca

SEQ ID NO: 109644 - DNA, 25 bp, Canis familiaris
gaactcactggtaaaaaagctcctt

SEQ ID NO: 109645 - DNA, 25 bp, Canis familiaris
gaaccatctggtgtgaaagaactct

SEQ ID NO: 109646 - DNA, 25 bp, Canis familiaris
gaagctcatgtgaatgttaaaggac

SEQ ID NO: 109647 - DNA, 25 bp, Canis familiaris
gaagcgagcggtataaaagcagcat

SEQ ID NO: 109648 - DNA, 25 bp, Canis familiaris
gaagcaagcggattctaactggaac

SEQ ID NO: 109649 - DNA, 25 bp, Canis familiaris
gaagcaatcgtgacatcggcagtgt

SEQ ID NO: 109650 - DNA, 25 bp, Canis familiaris
gaagcaacgagagcttatgtgtatt

SEQ ID NO: 109651 - DNA, 25 bp, Canis familiaris
gaagcagagcagcagcgttatgtga

SEQ ID NO: 109652 - DNA, 25 bp, Canis familiaris
gaagctagagtgtgtaatgctaagg

SEQ ID NO: 109653 - DNA, 25 bp, Canis familiaris
gaagctgagactttctacctaaata

SEQ ID NO: 109654 - DNA, 25 bp, Canis familiaris
gaagcagaggttattttgtcaaaag

SEQ ID NO: 109655 - DNA, 25 bp, Canis familiaris
gaagcagacagtacctttgttcaaa

SEQ ID NO: 109656 - DNA, 25 bp, Canis familiaris
gaagcacagagttcttattttatga

SEQ ID NO: 109657 - DNA, 25 bp, Canis familiaris
gaagcaagcacatttcctttttgtt

SEQ ID NO: 109658 - DNA, 25 bp, Canis familiaris
gaagcagccactgttctactttttt

SEQ ID NO: 109659 - DNA, 25 bp, Canis familiaris
gaagcccaccttgaattttgtatat

SEQ ID NO: 109660 - DNA, 25 bp, Canis familiaris
gaagcatccatcttaagaatttttt

SEQ ID NO: 109661 - DNA, 25 bp, Canis familiaris
gaagccatatttaagaaagatttta

SEQ ID NO: 109662 - DNA, 25 bp, Canis familiaris
gaaccattcctatgtgtaactttag

SEQ ID NO: 109663 - DNA, 25 bp, Canis familiaris
gaaccattccttttcaagaagttga

SEQ ID NO: 109664 - DNA, 25 bp, Canis familiaris
gaaccaactcttgtcaggaagccag

SEQ ID NO: 109665 - DNA, 25 bp, Canis familiaris
gaaccaagccaagctagcgatcacc

SEQ ID NO: 109666 - DNA, 25 bp, Canis familiaris
gaagccaatgtggaaagcgctgtac

SEQ ID NO: 109667 - DNA, 25 bp, Canis familiaris
gaagcgatgcatgcaagaagcttgc

SEQ ID NO: 109668 - DNA, 25 bp, Canis familiaris
gaagcagctgcagaagagatttgga

SEQ ID NO: 109669 - DNA, 25 bp, Canis familiaris
gaagcaccagcttgaggcactgtaa

SEQ ID NO: 109670 - DNA, 25 bp, Canis familiaris
gaagcatatagttgagggccattga

SEQ ID NO: 109671 - DNA, 25 bp, Canis familiaris
gaagctctgaggtgggcctgagaac

SEQ ID NO: 109672 - DNA, 25 bp, Canis familiaris
gaagcttggagcagttgccagaccc

SEQ ID NO: 109673 - DNA, 25 bp, Canis familiaris
gaagcgtgtagcagctccaaagcac

SEQ ID NO: 109674 - DNA, 25 bp, Canis familiaris
gaagcctgtagcagcaaccatgtgc

SEQ ID NO: 109675 - DNA, 25 bp, Canis familiaris
gaagcttttgcacgagaacatggac

SEQ ID NO: 109676 - DNA, 25 bp, Canis familiaris
gaagcagccttcatgagaactggac

SEQ ID NO: 109677 - DNA, 25 bp, Canis familiaris
gaagcaccattcagggcaggagcat

SEQ ID NO: 109678 - DNA, 25 bp, Canis familiaris
gaagcatctataaccgggaggagtt

SEQ ID NO: 109679 - DNA, 25 bp, Canis familiaris
gaagctcctaacaccgagcagacct

SEQ ID NO: 109680 - DNA, 25 bp, Canis familiaris
gaagctgcgtaaatcccagccaacc

SEQ ID NO: 109681 - DNA, 25 bp, Canis familiaris
gaagcagcctaaatgtccatcaaca

SEQ ID NO: 109682 - DNA, 25 bp, Canis familiaris
gaagcaggtggcttacatatacaaa

SEQ ID NO: 109683 - DNA, 25 bp, Canis familiaris
gaagctagttcattatttatcacca

SEQ ID NO: 109684 - DNA, 25 bp, Canis familiaris
gaagctggttttagagtctcacaga

SEQ ID NO: 109685 - DNA, 25 bp, Canis familiaris
gaagctggtgttcagttgctgctca

SEQ ID NO: 109686 - DNA, 25 bp, Canis familiaris
gaagctgtactgtctggtttctacg

SEQ ID NO: 109687 - DNA, 25 bp, Canis familiaris
gaagctgtgagttagcgctgtcctt

SEQ ID NO: 109688 - DNA, 25 bp, Canis familiaris
gaagctggacaatgttctccttgac

SEQ ID NO: 109689 - DNA, 25 bp, Canis familiaris
gaagcttgcacctggttgtttgagg

SEQ ID NO: 109690 - DNA, 25 bp, Canis familiaris
gaagcctccaacgtgcttgttgggg

SEQ ID NO: 109691 - DNA, 25 bp, Canis familiaris
gaagcccccaatggattgtcttttg

SEQ ID NO: 109692 - DNA, 25 bp, Canis familiaris
gaagccccaaatgaacagattctgt

SEQ ID NO: 109693 - DNA, 25 bp, Canis familiaris
gaagcctgaaaaaaacaatcttgat

SEQ ID NO: 109694 - DNA, 25 bp, Canis familiaris
gaagccgaaagacaatcaatcaagc

SEQ ID NO: 109695 - DNA, 25 bp, Canis familiaris
gaacctggacaacaaaacgaacgtg

SEQ ID NO: 109696 - DNA, 25 bp, Canis familiaris
gaagccctaccacaagaagcggaag

SEQ ID NO: 109697 - DNA, 25 bp, Canis familiaris
gaacccagaggaaaagaaccagaag

SEQ ID NO: 109698 - DNA, 25 bp, Canis familiaris
gagttccgggaccaagtcccacatc

SEQ ID NO: 109699 - DNA, 25 bp, Canis familiaris
gagacccgggatcaaatcccacgtc

SEQ ID NO: 109700 - DNA, 25 bp, Canis familiaris
gagaccctgggttccaattcaattc

SEQ ID NO: 109701 - DNA, 25 bp, Canis familiaris
gaaccacttggactctaattgcttt

SEQ ID NO: 109702 - DNA, 25 bp, Canis familiaris
gaaacttgtaggctgatttcctttt

SEQ ID NO: 109703 - DNA, 25 bp, Canis familiaris
gaaccttgttgtctatttcctattt

SEQ ID NO: 109704 - DNA, 25 bp, Canis familiaris
gaagcttttcgtattcttttattct

SEQ ID NO: 109705 - DNA, 25 bp, Canis familiaris
gaagcttttcgtatttgctgtgtga

SEQ ID NO: 109706 - DNA, 25 bp, Canis familiaris
gaagcttttagattttgctcttaaa

SEQ ID NO: 109707 - DNA, 25 bp, Canis familiaris
gaagctgtttcattgttctcttgtg

SEQ ID NO: 109708 - DNA, 25 bp, Canis familiaris
gaagcttatgcttttgtctttaatt

SEQ ID NO: 109709 - DNA, 25 bp, Canis familiaris
gaagctaatgtatttctctaacaag

SEQ ID NO: 109710 - DNA, 25 bp, Canis familiaris
gaagccaatttgaacccagagaagg

SEQ ID NO: 109711 - DNA, 25 bp, Canis familiaris
gaacccttgcgtaaccaagcaatgc

SEQ ID NO: 109712 - DNA, 25 bp, Canis familiaris
gaagcacccgaaattccagacaacg

SEQ ID NO: 109713 - DNA, 25 bp, Canis familiaris
gaagcgcccagaaattccaagtacc

SEQ ID NO: 109714 - DNA, 25 bp, Canis familiaris
gaagcagttggaaatctcacatcag

SEQ ID NO: 109715 - DNA, 25 bp, Canis familiaris
gaagcagttggaaatctcacatcag

SEQ ID NO: 109716 - DNA, 25 bp, Canis familiaris
gaagcagctgtgtacaattcctcgt

SEQ ID NO: 109717 - DNA, 25 bp, Canis familiaris
gaacctgttacctcgtggttactgt

SEQ ID NO: 109718 - DNA, 25 bp, Canis familiaris
gaacctttacagttccgagttcctg

SEQ ID NO: 109719 - DNA, 25 bp, Canis familiaris
gaagcctgttacacttgcagtttct

SEQ ID NO: 109720 - DNA, 25 bp, Canis familiaris
gaagcctttgacgacttgaagttta

SEQ ID NO: 109721 - DNA, 25 bp, Canis familiaris
gaagcatcttctttctaggaatttt

SEQ ID NO: 109722 - DNA, 25 bp, Canis familiaris
gaagcttgtctcataaggatttgtg

SEQ ID NO: 109723 - DNA, 25 bp, Canis familiaris
gaaccatggctccaacagttttgga

SEQ ID NO: 109724 - DNA, 25 bp, Canis familiaris
gaacgtctgccctatcaactttcga

SEQ ID NO: 109725 - DNA, 25 bp, Canis familiaris
gaacgtctgccctatcaactttcga

SEQ ID NO: 109726 - DNA, 25 bp, Canis familiaris
gaacgtggcgtccacgacttttgtc

SEQ ID NO: 109727 - DNA, 25 bp, Canis familiaris
gaaccttggtggtgcagggctttct

SEQ ID NO: 109728 - DNA, 25 bp, Canis familiaris
gaaccgatgtttgaaaggctgtcct

SEQ ID NO: 109729 - DNA, 25 bp, Canis familiaris
gaacctacgatctgaaaagcgtcct

SEQ ID NO: 109730 - DNA, 25 bp, Canis familiaris
gaacctacgatctgaaaagcgtcct

SEQ ID NO: 109731 - DNA, 25 bp, Canis familiaris
gaagcggacgacttgcaaacaactg

SEQ ID NO: 109732 - DNA, 25 bp, Canis familiaris
gaagctccaccatgtgaaacatagc

SEQ ID NO: 109733 - DNA, 25 bp, Canis familiaris
gaagcccagccatgaaggcagctac

SEQ ID NO: 109734 - DNA, 25 bp, Canis familiaris
gaagcccagaaagcacgcagtgacc

SEQ ID NO: 109735 - DNA, 25 bp, Canis familiaris
gaagcctcagagactacctggtact

SEQ ID NO: 109736 - DNA, 25 bp, Canis familiaris
gaagccccagtgtagctttggagct

SEQ ID NO: 109737 - DNA, 25 bp, Canis familiaris
gaaccactgagcaaactttgtgagc

SEQ ID NO: 109738 - DNA, 25 bp, Canis familiaris
gaacccgaatgaatgtttgaaacca

SEQ ID NO: 109739 - DNA, 25 bp, Canis familiaris
gaagccctaaatatgtttacatgcc

SEQ ID NO: 109740 - DNA, 25 bp, Canis familiaris
gaagcccgaactactgtctatttcg

SEQ ID NO: 109741 - DNA, 25 bp, Canis familiaris
gaagctgctaaagaatgtcgacgtc

SEQ ID NO: 109742 - DNA, 25 bp, Canis familiaris
gaagcatgccagaacagactggtga

SEQ ID NO: 109743 - DNA, 25 bp, Canis familiaris
gaagcagcaccttaactgctgagcc

SEQ ID NO: 109744 - DNA, 25 bp, Canis familiaris
gaagcagcacctttcgtagggtgtt

SEQ ID NO: 109745 - DNA, 25 bp, Canis familiaris
gaagctgcaggtgttgttggaagtt

SEQ ID NO: 109746 - DNA, 25 bp, Canis familiaris
gaagcatcagtttactgtctgtaag

SEQ ID NO: 109747 - DNA, 25 bp, Canis familiaris
gaagcatctgttcttgtgttttggt

SEQ ID NO: 109748 - DNA, 25 bp, Canis familiaris
gaagctgagtatctatggtgacttg

SEQ ID NO: 109749 - DNA, 25 bp, Canis familiaris
gaagcagacttcctgcagggagctg

SEQ ID NO: 109750 - DNA, 25 bp, Canis familiaris
gaagcagactccatgcaggagccga

SEQ ID NO: 109751 - DNA, 25 bp, Canis familiaris
gaagcagattccatgcaggaagcct

SEQ ID NO: 109752 - DNA, 25 bp, Canis familiaris
gaagcgatttcactgcataagctac

SEQ ID NO: 109753 - DNA, 25 bp, Canis familiaris
gaagcgaattgccctgacagataac

SEQ ID NO: 109754 - DNA, 25 bp, Canis familiaris
gaagcagatcaagcctgacagtgga

SEQ ID NO: 109755 - DNA, 25 bp, Canis familiaris
gaagcagagataccagctgtcagct

SEQ ID NO: 109756 - DNA, 25 bp, Canis familiaris
gaagcatctgaagcgtgtagcagct

SEQ ID NO: 109757 - DNA, 25 bp, Canis familiaris
gaactgtgtttcctggagcagcggc

SEQ ID NO: 109758 - DNA, 25 bp, Canis familiaris
gaagccattcttgcggaggcagtct

SEQ ID NO: 109759 - DNA, 25 bp, Canis familiaris
gaagctataccagagtgcaggaggc

SEQ ID NO: 109760 - DNA, 25 bp, Canis familiaris
gaagcttcccatgtgagcagtagta

SEQ ID NO: 109761 - DNA, 25 bp, Canis familiaris
gaagctgtgcccaggagggcagctc

SEQ ID NO: 109762 - DNA, 25 bp, Canis familiaris
gaagcaggatccctgcaggggagcc

SEQ ID NO: 109763 - DNA, 25 bp, Canis familiaris
gaagcgggacatcaggggagccctg

SEQ ID NO: 109764 - DNA, 25 bp, Canis familiaris
gaaccgggaccaagggacatacgag

SEQ ID NO: 109765 - DNA, 25 bp, Canis familiaris
gaaccaggctgtccaagaacaaggg

SEQ ID NO: 109766 - DNA, 25 bp, Canis familiaris
gaaccaggtgtgtacaaaaaagcgg

SEQ ID NO: 109767 - DNA, 25 bp, Canis familiaris
gaaccagttggtagcacaaaaagca

SEQ ID NO: 109768 - DNA, 25 bp, Canis familiaris
gaaccagccgagaagccaagagcca

SEQ ID NO: 109769 - DNA, 25 bp, Canis familiaris
gaacgcacaagtgactcaaaccccg

SEQ ID NO: 109770 - DNA, 25 bp, Canis familiaris
gaagccaaagttctcaaactgctgc

SEQ ID NO: 109771 - DNA, 25 bp, Canis familiaris
gaagccaacacgtgctcaaacatgc

SEQ ID NO: 109772 - DNA, 25 bp, Canis familiaris
gaagccgtcatccggctcaaaggga

SEQ ID NO: 109773 - DNA, 25 bp, Canis familiaris
gaagccagattgcctgaggctgaag

SEQ ID NO: 109774 - DNA, 25 bp, Canis familiaris
gaagccagttcctgagagacagccc

SEQ ID NO: 109775 - DNA, 25 bp, Canis familiaris
gaagctcaggtcccagtggaacaac

SEQ ID NO: 109776 - DNA, 25 bp, Canis familiaris
gaagccgtgacaccttggaaacatc

SEQ ID NO: 109777 - DNA, 25 bp, Canis familiaris
gaagctccgtcatcttggactgaat

SEQ ID NO: 109778 - DNA, 25 bp, Canis familiaris
gaagctccgtcatcttggactgaat

SEQ ID NO: 109779 - DNA, 25 bp, Canis familiaris
gaagctccgtcatcttggactgaat

SEQ ID NO: 109780 - DNA, 25 bp, Canis familiaris
gaagctccgtcatcttggactgaat

SEQ ID NO: 109781 - DNA, 25 bp, Canis familiaris
gaagctatctctcccttggagtgtt

SEQ ID NO: 109782 - DNA, 25 bp, Canis familiaris
gaagccatctacacttgggttgatt

SEQ ID NO: 109783 - DNA, 25 bp, Canis familiaris
gaagcttctgtcaccattggtaagt

SEQ ID NO: 109784 - DNA, 25 bp, Canis familiaris
gaagctcctgtcaaccatgggacaa

SEQ ID NO: 109785 - DNA, 25 bp, Canis familiaris
gaagcatctgcacaacttcgaggcc

SEQ ID NO: 109786 - DNA, 25 bp, Canis familiaris
gaagcttgcagaacctacgatggtg

SEQ ID NO: 109787 - DNA, 25 bp, Canis familiaris
gaagcttgcagtactctactgaggt

SEQ ID NO: 109788 - DNA, 25 bp, Canis familiaris
gaacattagctagtcatggtgcagg

SEQ ID NO: 109789 - DNA, 25 bp, Canis familiaris
gaaccatagtagtcagtgtcacaga

SEQ ID NO: 109790 - DNA, 25 bp, Canis familiaris
gaagcctaggattcatttcaaaact

SEQ ID NO: 109791 - DNA, 25 bp, Canis familiaris
gaagcctagggtgccacacaaacat

SEQ ID NO: 109792 - DNA, 25 bp, Canis familiaris
gaagccttttctgtcaacaacatca

SEQ ID NO: 109793 - DNA, 25 bp, Canis familiaris
gaagctcttagtacttccatggcca

SEQ ID NO: 109794 - DNA, 25 bp, Canis familiaris
gaagctctaactgcttgcctagaag

SEQ ID NO: 109795 - DNA, 25 bp, Canis familiaris
gatatacacacacacggacagacgg

SEQ ID NO: 109796 - DNA, 25 bp, Canis familiaris
gaagccttttcactatttgacatgg

SEQ ID NO: 109797 - DNA, 25 bp, Canis familiaris
gaagccaggcaacttacttactggt

SEQ ID NO: 109798 - DNA, 25 bp, Canis familiaris
gaagccaactgaattgagtccactt

SEQ ID NO: 109799 - DNA, 25 bp, Canis familiaris
gaagctagactgtatttttcagcat

SEQ ID NO: 109800 - DNA, 25 bp, Canis familiaris
gaagctggccattgatcaaattgac

SEQ ID NO: 109801 - DNA, 25 bp, Canis familiaris
gaagccacacactatcaagaggact

SEQ ID NO: 109802 - DNA, 25 bp, Canis familiaris
gaagccatacagctaagttggcatg

SEQ ID NO: 109803 - DNA, 25 bp, Canis familiaris
gaagccccatccgagagtgtggatt

SEQ ID NO: 109804 - DNA, 25 bp, Canis familiaris
gaagccagtacaaggagcagtttct

SEQ ID NO: 109805 - DNA, 25 bp, Canis familiaris
gaagctgcagtaccacgaggtcagg

SEQ ID NO: 109806 - DNA, 25 bp, Canis familiaris
gaagctgcagaaccacgaggtgctc

SEQ ID NO: 109807 - DNA, 25 bp, Canis familiaris
gaagctgcagaacccacgaggtgtt

SEQ ID NO: 109808 - DNA, 25 bp, Canis familiaris
gaagcttaaactcctgtggatttac

SEQ ID NO: 109809 - DNA, 25 bp, Canis familiaris
gaagcttaaattttgtagatatggt

SEQ ID NO: 109810 - DNA, 25 bp, Canis familiaris
gaagcttaatggttattagaaggaa

SEQ ID NO: 109811 - DNA, 25 bp, Canis familiaris
gaagcttgaattttttctgaagaaa

SEQ ID NO: 109812 - DNA, 25 bp, Canis familiaris
gaagctattcctctggctctaaaaa

SEQ ID NO: 109813 - DNA, 25 bp, Canis familiaris
gaagccattcggttcctgtagaaaa

SEQ ID NO: 109814 - DNA, 25 bp, Canis familiaris
gaactagttatgctccttagaccaa

SEQ ID NO: 109815 - DNA, 25 bp, Canis familiaris
gaactttaaggtcttatgcacagga

SEQ ID NO: 109816 - DNA, 25 bp, Canis familiaris
gaagcttcgagattacggtatccgg

SEQ ID NO: 109817 - DNA, 25 bp, Canis familiaris
gaagcttgctgccaaaatggtagcc

SEQ ID NO: 109818 - DNA, 25 bp, Canis familiaris
gaagcttgtgcatgacattggtatg

SEQ ID NO: 109819 - DNA, 25 bp, Canis familiaris
gaagcctgatgatcacattcctctt

SEQ ID NO: 109820 - DNA, 25 bp, Canis familiaris
gaagcttgtataacacattcatttc

SEQ ID NO: 109821 - DNA, 25 bp, Canis familiaris
gaagctgctggaaaccactgctttc

SEQ ID NO: 109822 - DNA, 25 bp, Canis familiaris
gaagctcatgcgagcctgcatgcag

SEQ ID NO: 109823 - DNA, 25 bp, Canis familiaris
gaagctcatgactgtgcgcattgtc

SEQ ID NO: 109824 - DNA, 25 bp, Canis familiaris
gaagctcatgactgtgcgcattgtc

SEQ ID NO: 109825 - DNA, 25 bp, Canis familiaris
gaagctcatgactgtgcgcattgtc

SEQ ID NO: 109826 - DNA, 25 bp, Canis familiaris
gaagctcatgactgtgcgcattgtc

SEQ ID NO: 109827 - DNA, 25 bp, Canis familiaris
gaagccattgcatctgaattgccag

SEQ ID NO: 109828 - DNA, 25 bp, Canis familiaris
gaagccattgagataactgccagac

SEQ ID NO: 109829 - DNA, 25 bp, Canis familiaris
gaagccactgaggttgaagccaccg

SEQ ID NO: 109830 - DNA, 25 bp, Canis familiaris
gaagccgaagctagtgaagccacac

SEQ ID NO: 109831 - DNA, 25 bp, Canis familiaris
gaagccgctacaagattagacctca

SEQ ID NO: 109832 - DNA, 25 bp, Canis familiaris
gaagccgcaaatgcaaaggccctga

SEQ ID NO: 109833 - DNA, 25 bp, Canis familiaris
gaagcccatagctcaaaacacacca

SEQ ID NO: 109834 - DNA, 25 bp, Canis familiaris
gaacctatgagacccatagcacccc

SEQ ID NO: 109835 - DNA, 25 bp, Canis familiaris
gaagcctagagtccatgtgaacggt

SEQ ID NO: 109836 - DNA, 25 bp, Canis familiaris
gaagctcgaggtcaggcatgtcagg

SEQ ID NO: 109837 - DNA, 25 bp, Canis familiaris
gaagctgaggggccaggcactacag

SEQ ID NO: 109838 - DNA, 25 bp, Canis familiaris
gaagcttggaggccagtcgtatctt

SEQ ID NO: 109839 - DNA, 25 bp, Canis familiaris
gaagctgtgaggtgctacgtccttc

SEQ ID NO: 109840 - DNA, 25 bp, Canis familiaris
gaagctgtgcagccagggcaggccc

SEQ ID NO: 109841 - DNA, 25 bp, Canis familiaris
gaagctttggcgagcagagcccata

SEQ ID NO: 109842 - DNA, 25 bp, Canis familiaris
gaagccctccgagggagcactgcat

SEQ ID NO: 109843 - DNA, 25 bp, Canis familiaris
gaagcgcccaagaatcgacagctgt

SEQ ID NO: 109844 - DNA, 25 bp, Canis familiaris
gaaccacaggatgtcgctcagtgct

SEQ ID NO: 109845 - DNA, 25 bp, Canis familiaris
gaacctaggatgggtgcttgtgccc

SEQ ID NO: 109846 - DNA, 25 bp, Canis familiaris
gaacctgaaagggcatttggctccg

SEQ ID NO: 109847 - DNA, 25 bp, Canis familiaris
gaaccgagtagggacgggcagagag

SEQ ID NO: 109848 - DNA, 25 bp, Canis familiaris
gaacggatgaagggaccagtagaca

SEQ ID NO: 109849 - DNA, 25 bp, Canis familiaris
gaaccatcagaacaacctgtgagga

SEQ ID NO: 109850 - DNA, 25 bp, Canis familiaris
gaaccattcaaccaggcctttggac

SEQ ID NO: 109851 - DNA, 25 bp, Canis familiaris
gaaccattcagatggctccatttaa

SEQ ID NO: 109852 - DNA, 25 bp, Canis familiaris
gaagcgcttcacgcgttatttaaga

SEQ ID NO: 109853 - DNA, 25 bp, Canis familiaris
gaaccattccaccagtttgtaaaga

SEQ ID NO: 109854 - DNA, 25 bp, Canis familiaris
gaacgttcacacctgacttttcagg

SEQ ID NO: 109855 - DNA, 25 bp, Canis familiaris
gaacggaacccatcatttcctgagg

SEQ ID NO: 109856 - DNA, 25 bp, Canis familiaris
gaacggtgcacggttaattcacaga

SEQ ID NO: 109857 - DNA, 25 bp, Canis familiaris
gaactggtacgtctcaatcatctcc

SEQ ID NO: 109858 - DNA, 25 bp, Canis familiaris
gaagctggaacgattggtccccaag

SEQ ID NO: 109859 - DNA, 25 bp, Canis familiaris
gaagctgagaaaagattgtgtcctg

SEQ ID NO: 109860 - DNA, 25 bp, Canis familiaris
gaagcggagactaattttctcatgt

SEQ ID NO: 109861 - DNA, 25 bp, Canis familiaris
gacaggggtaccttttgctactttg

SEQ ID NO: 109862 - DNA, 25 bp, Canis familiaris
gaacgtgtaaactggatgtacttct

SEQ ID NO: 109863 - DNA, 25 bp, Canis familiaris
gaaccttaaccatgaatttctattt

SEQ ID NO: 109864 - DNA, 25 bp, Canis familiaris
gaagcttttacaggataattttagt

SEQ ID NO: 109865 - DNA, 25 bp, Canis familiaris
gaagctttttcagtgattttttatc

SEQ ID NO: 109866 - DNA, 25 bp, Canis familiaris
gaagcttttgtacttcttgttcatt

SEQ ID NO: 109867 - DNA, 25 bp, Canis familiaris
gaagcttatcttgttattgtgaaaa

SEQ ID NO: 109868 - DNA, 25 bp, Canis familiaris
gaagctccagttgtcatagttgtaa

SEQ ID NO: 109869 - DNA, 25 bp, Canis familiaris
gaagctgagcagtttctcatgtgtt

SEQ ID NO: 109870 - DNA, 25 bp, Canis familiaris
gaagctgcactgtatggtcggttta

SEQ ID NO: 109871 - DNA, 25 bp, Canis familiaris
gaagctcacggtgtcaggctttctg

SEQ ID NO: 109872 - DNA, 25 bp, Canis familiaris
gaaccctagatggtggattttcctt

SEQ ID NO: 109873 - DNA, 25 bp, Canis familiaris
gaaccgctaggcactggttgtggcc

SEQ ID NO: 109874 - DNA, 25 bp, Canis familiaris
gaaccttgaggaagtggctttgcct

SEQ ID NO: 109875 - DNA, 25 bp, Canis familiaris
gaagccattcaggccagatggcttg

SEQ ID NO: 109876 - DNA, 25 bp, Canis familiaris
gaagccactggagcagtggcttgct

SEQ ID NO: 109877 - DNA, 25 bp, Canis familiaris
gaagcgtgcaggcgcagttgttcgc

SEQ ID NO: 109878 - DNA, 25 bp, Canis familiaris
gaagcggacggagctgttcatcgcc

SEQ ID NO: 109879 - DNA, 25 bp, Canis familiaris
gaagctgctgaggagagccgggtcc

SEQ ID NO: 109880 - DNA, 25 bp, Canis familiaris
gaacctgaggacacgggagtcggtc

SEQ ID NO: 109881 - DNA, 25 bp, Canis familiaris
gaacctgagagaatcgggggacctg

SEQ ID NO: 109882 - DNA, 25 bp, Canis familiaris
gaagcctgagtgaggaggggcccac

SEQ ID NO: 109883 - DNA, 25 bp, Canis familiaris
gaagcctgaagaatgaagggaccac

SEQ ID NO: 109884 - DNA, 25 bp, Canis familiaris
gaacctgatattggtgggcaaccca

SEQ ID NO: 109885 - DNA, 25 bp, Canis familiaris
gaagccctttcggatggcaacgtgc

SEQ ID NO: 109886 - DNA, 25 bp, Canis familiaris
gaaccgtatatagcatgggggtacc

SEQ ID NO: 109887 - DNA, 25 bp, Canis familiaris
gaacctttatatgagccagtggctg

SEQ ID NO: 109888 - DNA, 25 bp, Canis familiaris
gaaccgctataacatccagtacatt

SEQ ID NO: 109889 - DNA, 25 bp, Canis familiaris
gaagccgttcaccaattcagagaca

SEQ ID NO: 109890 - DNA, 25 bp, Canis familiaris
gaagccattccaggcaatgggaaca

SEQ ID NO: 109891 - DNA, 25 bp, Canis familiaris
gaagccttcgaagttggagcatacc

SEQ ID NO: 109892 - DNA, 25 bp, Canis familiaris
gaacctcatctgacacttaataacc

SEQ ID NO: 109893 - DNA, 25 bp, Canis familiaris
gaagccctcgatacctaatattcat

SEQ ID NO: 109894 - DNA, 25 bp, Canis familiaris
gaagccctagatggaagaagattct

SEQ ID NO: 109895 - DNA, 25 bp, Canis familiaris
gaagccgtgggcacagaaatctctg

SEQ ID NO: 109896 - DNA, 25 bp, Canis familiaris
gaagccggggtgcatgtgactcttc

SEQ ID NO: 109897 - DNA, 25 bp, Canis familiaris
gaagccgggatgaggtgtccttcat

SEQ ID NO: 109898 - DNA, 25 bp, Canis familiaris
gaagccggtgatgggcgtgtgcgtc

SEQ ID NO: 109899 - DNA, 25 bp, Canis familiaris
gaagccaccagctgactgtgtgagt

SEQ ID NO: 109900 - DNA, 25 bp, Canis familiaris
gaagctaccacagcacagtgtgcgt

SEQ ID NO: 109901 - DNA, 25 bp, Canis familiaris
gaagctacaccatcacaggtttaca

SEQ ID NO: 109902 - DNA, 25 bp, Canis familiaris
gaagctcccatccaagaggtttaca

SEQ ID NO: 109903 - DNA, 25 bp, Canis familiaris
gaagctcactcccaaggaggctttc

SEQ ID NO: 109904 - DNA, 25 bp, Canis familiaris
gaactaccccggtggtatgtctgca

SEQ ID NO: 109905 - DNA, 25 bp, Canis familiaris
gaagctaagaccgaacctgaacctc

SEQ ID NO: 109906 - DNA, 25 bp, Canis familiaris
gaactcaaatacaaaagctaacctt

SEQ ID NO: 109907 - DNA, 25 bp, Canis familiaris
gaaccaaaattcaaggcacaatccc

SEQ ID NO: 109908 - DNA, 25 bp, Canis familiaris
gaagccaaagatgtagttcatatcc

SEQ ID NO: 109909 - DNA, 25 bp, Canis familiaris
gaagccaccataaatgaattaatct

SEQ ID NO: 109910 - DNA, 25 bp, Canis familiaris
gaagctctagtaacatcaatcgaat

SEQ ID NO: 109911 - DNA, 25 bp, Canis familiaris
gaagctgccagaactcatcagattg

SEQ ID NO: 109912 - DNA, 25 bp, Canis familiaris
gaagctgctcaaattctgcgattgc

SEQ ID NO: 109913 - DNA, 25 bp, Canis familiaris
gaagctgctagactatcatctgctc

SEQ ID NO: 109914 - DNA, 25 bp, Canis familiaris
gaagctgctcgagtacttgacaatc

SEQ ID NO: 109915 - DNA, 25 bp, Canis familiaris
gaacatgctcgagtcctgaacattg

SEQ ID NO: 109916 - DNA, 25 bp, Canis familiaris
gaagctgctcttgcactggagtatg

SEQ ID NO: 109917 - DNA, 25 bp, Canis familiaris
gaagctgtgcttgatgagctgaggg

SEQ ID NO: 109918 - DNA, 25 bp, Canis familiaris
gaagctgagctttcgatgccaggtg

SEQ ID NO: 109919 - DNA, 25 bp, Canis familiaris
gaagccatccaagggctcaggctac

SEQ ID NO: 109920 - DNA, 25 bp, Canis familiaris
gaagcccaagcttggtgcagggaca

SEQ ID NO: 109921 - DNA, 25 bp, Canis familiaris
gaagccatatagatgggcaagagac

SEQ ID NO: 109922 - DNA, 25 bp, Canis familiaris
gaagcctatgtcaagtgtcaagaaa

SEQ ID NO: 109923 - DNA, 25 bp, Canis familiaris
gaagcctgatgtagttactccaaat

SEQ ID NO: 109924 - DNA, 25 bp, Canis familiaris
gaagccggattttcaccataatctg

SEQ ID NO: 109925 - DNA, 25 bp, Canis familiaris
gaacctgcgaatttccaagaggtgg

SEQ ID NO: 109926 - DNA, 25 bp, Canis familiaris
gaacctcaggaaattctacaagggt

SEQ ID NO: 109927 - DNA, 25 bp, Canis familiaris
gaagcctttgtaaacgacatagacg

SEQ ID NO: 109928 - DNA, 25 bp, Canis familiaris
gaagcgccttgacagactggaagcc

SEQ ID NO: 109929 - DNA, 25 bp, Canis familiaris
gaagctcctcttcagacatgaacaa

SEQ ID NO: 109930 - DNA, 25 bp, Canis familiaris
gaagccctcatttagacagaggtca

SEQ ID NO: 109931 - DNA, 25 bp, Canis familiaris
gaagcccatgctaataaatgatgtg

SEQ ID NO: 109932 - DNA, 25 bp, Canis familiaris
gaaccagcgttattacatgagtcac

SEQ ID NO: 109933 - DNA, 25 bp, Canis familiaris
gaaccaggttgcttaattatgccag

SEQ ID NO: 109934 - DNA, 25 bp, Canis familiaris
gaaccagagcctgggacacctgaca

SEQ ID NO: 109935 - DNA, 25 bp, Canis familiaris
gaagccgagatcaggacaaagtcaa

SEQ ID NO: 109936 - DNA, 25 bp, Canis familiaris
gaagcccagatcagtagcatacaac

SEQ ID NO: 109937 - DNA, 25 bp, Canis familiaris
gaagcccagcacggtgagcaggaag

SEQ ID NO: 109938 - DNA, 25 bp, Canis familiaris
gaagccgagctctggagcatggggt

SEQ ID NO: 109939 - DNA, 25 bp, Canis familiaris
gaaccaagcctcatggatgagtggt

SEQ ID NO: 109940 - DNA, 25 bp, Canis familiaris
gaaccagcatgctcacggaaggacc

SEQ ID NO: 109941 - DNA, 25 bp, Canis familiaris
gaaccaactggccggccagagacca

SEQ ID NO: 109942 - DNA, 25 bp, Canis familiaris
gaacccatcaggctggcaaaaccag

SEQ ID NO: 109943 - DNA, 25 bp, Canis familiaris
gaacctccagtgcacgctaatgaaa

SEQ ID NO: 109944 - DNA, 25 bp, Canis familiaris
gaagcgtcggctgcacgaagcaata

SEQ ID NO: 109945 - DNA, 25 bp, Canis familiaris
gaagcgatgggaacgagcaaaaaga

SEQ ID NO: 109946 - DNA, 25 bp, Canis familiaris
gaagcggtggacaacacatttcaaa

SEQ ID NO: 109947 - DNA, 25 bp, Canis familiaris
gaaccgaagagcccaattctcgaag

SEQ ID NO: 109948 - DNA, 25 bp, Canis familiaris
gaagcctaagaagtcaacctggaag

SEQ ID NO: 109949 - DNA, 25 bp, Canis familiaris
gaagctggagagtgtgaacgccgaa

SEQ ID NO: 109950 - DNA, 25 bp, Canis familiaris
gaagcggtatgccgtaaagttgcaa

SEQ ID NO: 109951 - DNA, 25 bp, Canis familiaris
gaacggctagagctatgggttgaat

SEQ ID NO: 109952 - DNA, 25 bp, Canis familiaris
gaactggtggaatgtggtgtcggtg

SEQ ID NO: 109953 - DNA, 25 bp, Canis familiaris
gaacccggagacctggtatcgagtc

SEQ ID NO: 109954 - DNA, 25 bp, Canis familiaris
gaacctcgggacttgatttcagtac

SEQ ID NO: 109955 - DNA, 25 bp, Canis familiaris
gaagccaaggttctgtgtccaaagc

SEQ ID NO: 109956 - DNA, 25 bp, Canis familiaris
gaagccaaggttctgtgtccaaagc

SEQ ID NO: 109957 - DNA, 25 bp, Canis familiaris
gaagccaagtgggatttgcataaag

SEQ ID NO: 109958 - DNA, 25 bp, Canis familiaris
gaacctacggattcttgaaaagccg

SEQ ID NO: 109959 - DNA, 25 bp, Canis familiaris
gaactgtaagccatttgaggtcagc

SEQ ID NO: 109960 - DNA, 25 bp, Canis familiaris
gaactgatgaccctttctaaatctc

SEQ ID NO: 109961 - DNA, 25 bp, Canis familiaris
gaagctgctgtgtgtatttatgaat

SEQ ID NO: 109962 - DNA, 25 bp, Canis familiaris
gaagctctgctgtatggttttcttg

SEQ ID NO: 109963 - DNA, 25 bp, Canis familiaris
gaagctctgcttgtgaaattatagt

SEQ ID NO: 109964 - DNA, 25 bp, Canis familiaris
gaagcctgctgtgtgaaactacttt

SEQ ID NO: 109965 - DNA, 25 bp, Canis familiaris
gaagccagtgtcatgaagacccatc

SEQ ID NO: 109966 - DNA, 25 bp, Canis familiaris
gaagccagtgcctgaagcacgtgca

SEQ ID NO: 109967 - DNA, 25 bp, Canis familiaris
gaagctcatctctggaaagcggcag

SEQ ID NO: 109968 - DNA, 25 bp, Canis familiaris
gaagctcttctcggtgaaggaggag

SEQ ID NO: 109969 - DNA, 25 bp, Canis familiaris
gaagcccctactaagtggaagagct

SEQ ID NO: 109970 - DNA, 25 bp, Canis familiaris
gaagcccggttatgagtaatgtgat

SEQ ID NO: 109971 - DNA, 25 bp, Canis familiaris
gaaccctgggaattgcagtgttgga

SEQ ID NO: 109972 - DNA, 25 bp, Canis familiaris
gaaccgtggcagtgatcacttccga

SEQ ID NO: 109973 - DNA, 25 bp, Canis familiaris
gaaccgcctgagtgagacggaccag

SEQ ID NO: 109974 - DNA, 25 bp, Canis familiaris
gaacccactggatacattcgatttg

SEQ ID NO: 109975 - DNA, 25 bp, Canis familiaris
gaagcccaggagccagaagtccatt

SEQ ID NO: 109976 - DNA, 25 bp, Canis familiaris
gaacccagaagcctgaattcctttt

SEQ ID NO: 109977 - DNA, 25 bp, Canis familiaris
gaacccgtaggtccatgaccgttgc

SEQ ID NO: 109978 - DNA, 25 bp, Canis familiaris
gaagctccaggatgtacacaacttt

SEQ ID NO: 109979 - DNA, 25 bp, Canis familiaris
gaagctccaaaggtatgcgaagcct

SEQ ID NO: 109980 - DNA, 25 bp, Canis familiaris
gaagcccaagagcttcagaagcggt

SEQ ID NO: 109981 - DNA, 25 bp, Canis familiaris
gaaccacaagcagtttcaggccgtc

SEQ ID NO: 109982 - DNA, 25 bp, Canis familiaris
gaaccacaacgtgggcgcctagtag

SEQ ID NO: 109983 - DNA, 25 bp, Canis familiaris
gaaccatcacaagtaccgtaagcta

SEQ ID NO: 109984 - DNA, 25 bp, Canis familiaris
gaacctaaactctcaatcatacgaa

SEQ ID NO: 109985 - DNA, 25 bp, Canis familiaris
gaaccataaccctcatgttaggaaa

SEQ ID NO: 109986 - DNA, 25 bp, Canis familiaris
gaaccaaatctctcgtacattgaaa

SEQ ID NO: 109987 - DNA, 25 bp, Canis familiaris
gaaccacttcgcttagggagtaaat

SEQ ID NO: 109988 - DNA, 25 bp, Canis familiaris
gaaccaaatgccaaacggaggaaat

SEQ ID NO: 109989 - DNA, 25 bp, Canis familiaris
gaagccaaagcaccaatctggaggg

SEQ ID NO: 109990 - DNA, 25 bp, Canis familiaris
gaaccagacatgcacactcgcatac

SEQ ID NO: 109991 - DNA, 25 bp, Canis familiaris
gaagcgcagcggaacaaggccagag

SEQ ID NO: 109992 - DNA, 25 bp, Canis familiaris
gaagccccgttctagatgtacagat

SEQ ID NO: 109993 - DNA, 25 bp, Canis familiaris
gaaccctctttctatatataccgac

SEQ ID NO: 109994 - DNA, 25 bp, Canis familiaris
gaagccaatcttacatatgcatctc

SEQ ID NO: 109995 - DNA, 25 bp, Canis familiaris
gaaccaggcttgaaatgctgcattt

SEQ ID NO: 109996 - DNA, 25 bp, Canis familiaris
gaaccaggcctggggccatttgggt

SEQ ID NO: 109997 - DNA, 25 bp, Canis familiaris
gaaccagggggagcgcattggtcgc

SEQ ID NO: 109998 - DNA, 25 bp, Canis familiaris
gaagccggggtgatcactgagggca

SEQ ID NO: 109999 - DNA, 25 bp, Canis familiaris
gaagcgggagggaatggtgatggtg

SEQ ID NO: 110000 - DNA, 25 bp, Canis familiaris
gaagctgatggatgtgggtctgatg

SEQ ID NO: 110001 - DNA, 25 bp, Canis familiaris
gaagctgtgaaagtccgtcatctct

SEQ ID NO: 110002 - DNA, 25 bp, Canis familiaris
gaagctggaattggctcagtatcgt

SEQ ID NO: 110003 - DNA, 25 bp, Canis familiaris
gaagctgtgaatctgcacattgtgg

SEQ ID NO: 110004 - DNA, 25 bp, Canis familiaris
gaagctgtgaactaccatgatgaaa

SEQ ID NO: 110005 - DNA, 25 bp, Canis familiaris
gaagctgctaactaccaagacacta

SEQ ID NO: 110006 - DNA, 25 bp, Canis familiaris
gaagccttgacaacctataatcatg

SEQ ID NO: 110007 - DNA, 25 bp, Canis familiaris
gaagctgttaagtcctaatgtgcag

SEQ ID NO: 110008 - DNA, 25 bp, Canis familiaris
gaagccttcaagtgcacgggagctg

SEQ ID NO: 110009 - DNA, 25 bp, Canis familiaris
gaaccttcaagctgaaaccactatg

SEQ ID NO: 110010 - DNA, 25 bp, Canis familiaris
gaaccatctctcaaataaaccactt

SEQ ID NO: 110011 - DNA, 25 bp, Canis familiaris
gaaccctccaacaatacactggtat

SEQ ID NO: 110012 - DNA, 25 bp, Canis familiaris
gaaccctctgtgtctaccagggaat

SEQ ID NO: 110013 - DNA, 25 bp, Canis familiaris
gaacccttgtggccaagcaggacta

SEQ ID NO: 110014 - DNA, 25 bp, Canis familiaris
gaaccgttgcaacaacatgggctat

SEQ ID NO: 110015 - DNA, 25 bp, Canis familiaris
gaaccttgtacaccgatcatgaact

SEQ ID NO: 110016 - DNA, 25 bp, Canis familiaris
gaacctttgaagatatatgcacctc

SEQ ID NO: 110017 - DNA, 25 bp, Canis familiaris
gaacctttgaagaagcagcgcgcca

SEQ ID NO: 110018 - DNA, 25 bp, Canis familiaris
gaagccgtatgactgtgcacgggcc

SEQ ID NO: 110019 - DNA, 25 bp, Canis familiaris
gaagcgcgtgagcgtgcgctggagc

SEQ ID NO: 110020 - DNA, 25 bp, Canis familiaris
gaagctgtgaggcacagccaggacc

SEQ ID NO: 110021 - DNA, 25 bp, Canis familiaris
gaagctggagtgctcacagctggcc

SEQ ID NO: 110022 - DNA, 25 bp, Canis familiaris
gaagccccatgggcacatgtagcca

SEQ ID NO: 110023 - DNA, 25 bp, Canis familiaris
gaagcccctgtggcttggaggcatt

SEQ ID NO: 110024 - DNA, 25 bp, Canis familiaris
gaagcccggtgacacagggcaattg

SEQ ID NO: 110025 - DNA, 25 bp, Canis familiaris
gacacccagggacccagggaatcat

SEQ ID NO: 110026 - DNA, 25 bp, Canis familiaris
gaacctcgggagaccagcagaaatc

SEQ ID NO: 110027 - DNA, 25 bp, Canis familiaris
gaacccggagacatcaaggatatcg

SEQ ID NO: 110028 - DNA, 25 bp, Canis familiaris
gaagccacggaattgctaagtatat

SEQ ID NO: 110029 - DNA, 25 bp, Canis familiaris
gaaccaatggaatgcagaagtcggg

SEQ ID NO: 110030 - DNA, 25 bp, Canis familiaris
gaagccaggcgagagcagagattag

SEQ ID NO: 110031 - DNA, 25 bp, Canis familiaris
gaagcctgtgtgtgcagaatgtgga

SEQ ID NO: 110032 - DNA, 25 bp, Canis familiaris
gaagccctgagtggagagtagcgga

SEQ ID NO: 110033 - DNA, 25 bp, Canis familiaris
gaagcccaggctgctatggagggac

SEQ ID NO: 110034 - DNA, 25 bp, Canis familiaris
gaaccgtgaggacttggagggccat

SEQ ID NO: 110035 - DNA, 25 bp, Canis familiaris
gaacttggggagaggaggctccgcc

SEQ ID NO: 110036 - DNA, 25 bp, Canis familiaris
gaacgtggggagcgcaatattccga

SEQ ID NO: 110037 - DNA, 25 bp, Canis familiaris
gaacgatgggcagccactaattccc

SEQ ID NO: 110038 - DNA, 25 bp, Canis familiaris
gaagctgtgggacccattttgcacc

SEQ ID NO: 110039 - DNA, 25 bp, Canis familiaris
gaagctggcatggactagatttaac

SEQ ID NO: 110040 - DNA, 25 bp, Canis familiaris
gaagctggctgatttgaattgtttc

SEQ ID NO: 110041 - DNA, 25 bp, Canis familiaris
gaagctggtgtctgagtcgtctgac

SEQ ID NO: 110042 - DNA, 25 bp, Canis familiaris
gaagctggattctgattcattgaca

SEQ ID NO: 110043 - DNA, 25 bp, Canis familiaris
gaactgctgaagtgctcgatgtact

SEQ ID NO: 110044 - DNA, 25 bp, Canis familiaris
gaagcccaagatagccatgactcaa

SEQ ID NO: 110045 - DNA, 25 bp, Canis familiaris
gaagccgccagaagcaatggctaca

SEQ ID NO: 110046 - DNA, 25 bp, Canis familiaris
gaaccagccaaccttggttccttgg

SEQ ID NO: 110047 - DNA, 25 bp, Canis familiaris
gaaccacaacacctgtgagtttctg

SEQ ID NO: 110048 - DNA, 25 bp, Canis familiaris
gaaccacaatatgctgtgcctttct

SEQ ID NO: 110049 - DNA, 25 bp, Canis familiaris
gaagcgcaagaaggcagttcttttc

SEQ ID NO: 110050 - DNA, 25 bp, Canis familiaris
gaagccaagttccacttctttcata

SEQ ID NO: 110051 - DNA, 25 bp, Canis familiaris
gaagccaagctaacctttctattta

SEQ ID NO: 110052 - DNA, 25 bp, Canis familiaris
gaagcgtatcttttctatttttgaa

SEQ ID NO: 110053 - DNA, 25 bp, Canis familiaris
gaagcctcatttttgttttgatata

SEQ ID NO: 110054 - DNA, 25 bp, Canis familiaris
gaagcccatttcatactaaactgat

SEQ ID NO: 110055 - DNA, 25 bp, Canis familiaris
gaactacttagtgactacattcgtc

SEQ ID NO: 110056 - DNA, 25 bp, Canis familiaris
gaactccgaagtgaagaagatcccc

SEQ ID NO: 110057 - DNA, 25 bp, Canis familiaris
gaaccaccaagagacagaaagaagc

SEQ ID NO: 110058 - DNA, 25 bp, Canis familiaris
gaagctggccatggaacacaaaagg

SEQ ID NO: 110059 - DNA, 25 bp, Canis familiaris
gaagctgggcagcactgcagcaata

SEQ ID NO: 110060 - DNA, 25 bp, Canis familiaris
gaagctggagcagtggcgctgtgag

SEQ ID NO: 110061 - DNA, 25 bp, Canis familiaris
gaagctggctccatgcagcagatgg

SEQ ID NO: 110062 - DNA, 25 bp, Canis familiaris
gaagcggccggacagaggtcagata

SEQ ID NO: 110063 - DNA, 25 bp, Canis familiaris
gaacggtccgacaaccgtcatatga

SEQ ID NO: 110064 - DNA, 25 bp, Canis familiaris
gaagcggttggagacctactacaag

SEQ ID NO: 110065 - DNA, 25 bp, Canis familiaris
gaacgtgatgttgcctcggactaag

SEQ ID NO: 110066 - DNA, 25 bp, Canis familiaris
gaacctgagggtccttgagaataag

SEQ ID NO: 110067 - DNA, 25 bp, Canis familiaris
gaacaggcatggcattctctgtcaa

SEQ ID NO: 110068 - DNA, 25 bp, Canis familiaris
gaagcggctggcagcctgcgttaac

SEQ ID NO: 110069 - DNA, 25 bp, Canis familiaris
gaactgcctggcaccaggactcatt

SEQ ID NO: 110070 - DNA, 25 bp, Canis familiaris
gaagcgccggttacatgaggctcaa

SEQ ID NO: 110071 - DNA, 25 bp, Canis familiaris
gaagccacaggtcatgcaagagcac

SEQ ID NO: 110072 - DNA, 25 bp, Canis familiaris
gaagcctgcagagtacacactatcc

SEQ ID NO: 110073 - DNA, 25 bp, Canis familiaris
gaacgagcaacttgccatctactct

SEQ ID NO: 110074 - DNA, 25 bp, Canis familiaris
gaagccagaacctcatctaacttag

SEQ ID NO: 110075 - DNA, 25 bp, Canis familiaris
gaagccaggaactctgtacgtgtac

SEQ ID NO: 110076 - DNA, 25 bp, Canis familiaris
gaacggaccacgttgtactcgtact

SEQ ID NO: 110077 - DNA, 25 bp, Canis familiaris
gaacgggctaagcgtacactttctt

SEQ ID NO: 110078 - DNA, 25 bp, Canis familiaris
gaacgttcgaatcttaatcactttt

SEQ ID NO: 110079 - DNA, 25 bp, Canis familiaris
gaacccctagatctataatcactgt

SEQ ID NO: 110080 - DNA, 25 bp, Canis familiaris
gaagcctccttgcaattaaatttcc

SEQ ID NO: 110081 - DNA, 25 bp, Canis familiaris
gaacctccttaatgaagtgattgcc

SEQ ID NO: 110082 - DNA, 25 bp, Canis familiaris
gaacttcgttggctgaattattccc

SEQ ID NO: 110083 - DNA, 25 bp, Canis familiaris
gaacctggttatctgtattttgaca

SEQ ID NO: 110084 - DNA, 25 bp, Canis familiaris
gaagccttgtccaaattaattggaa

SEQ ID NO: 110085 - DNA, 25 bp, Canis familiaris
gaaccattggtcacctactatgaga

SEQ ID NO: 110086 - DNA, 25 bp, Canis familiaris
gaaccatatggtaccacggttagtg

SEQ ID NO: 110087 - DNA, 25 bp, Canis familiaris
gaacctgcggtaaaactgtggagtt

SEQ ID NO: 110088 - DNA, 25 bp, Canis familiaris
gaaccttttgcagaccattgtgagt

SEQ ID NO: 110089 - DNA, 25 bp, Canis familiaris
gacacgctttcttctaggtttacat

SEQ ID NO: 110090 - DNA, 25 bp, Canis familiaris
gaacgcctgatttccaggaaagtcc

SEQ ID NO: 110091 - DNA, 25 bp, Canis familiaris
gaaccactaacaccaggcacaatgt

SEQ ID NO: 110092 - DNA, 25 bp, Canis familiaris
gaaccaggaggcccagaaaggatta

SEQ ID NO: 110093 - DNA, 25 bp, Canis familiaris
gaagcccagggcccagaaagatgtt

SEQ ID NO: 110094 - DNA, 25 bp, Canis familiaris
gaacccaggcccgagcagggtttga

SEQ ID NO: 110095 - DNA, 25 bp, Canis familiaris
gaacccaggctccagaaggtgttgc

SEQ ID NO: 110096 - DNA, 25 bp, Canis familiaris
gaagcccatgggagaacgtgtgtca

SEQ ID NO: 110097 - DNA, 25 bp, Canis familiaris
gaagcgccagaagcgacagctgtgg

SEQ ID NO: 110098 - DNA, 25 bp, Canis familiaris
gaagcgccagaagcgacagctgtgg

SEQ ID NO: 110099 - DNA, 25 bp, Canis familiaris
gaagcgccagaagcgacagctgtgg

SEQ ID NO: 110100 - DNA, 25 bp, Canis familiaris
gaagccctgatggacagaggggcga

SEQ ID NO: 110101 - DNA, 25 bp, Canis familiaris
gaagccctgtgaataagaggagcag

SEQ ID NO: 110102 - DNA, 25 bp, Canis familiaris
gaagcccagatatgattaggtgcag

SEQ ID NO: 110103 - DNA, 25 bp, Canis familiaris
gaacctgcagatatcctagcggcgt

SEQ ID NO: 110104 - DNA, 25 bp, Canis familiaris
gaagccatcattttgccatgactgg

SEQ ID NO: 110105 - DNA, 25 bp, Canis familiaris
gaaccattatagtgtgactgagctg

SEQ ID NO: 110106 - DNA, 25 bp, Canis familiaris
gaaccaattcagggtgaggcgggcg

SEQ ID NO: 110107 - DNA, 25 bp, Canis familiaris
gaactacctgcggaggagatagggc

SEQ ID NO: 110108 - DNA, 25 bp, Canis familiaris
gaacctcctctgtgaagcatacgag

SEQ ID NO: 110109 - DNA, 25 bp, Canis familiaris
gaaccatgggtgtgagtcatccaag

SEQ ID NO: 110110 - DNA, 25 bp, Canis familiaris
gaaccaaggtcaagaacagccaggc

SEQ ID NO: 110111 - DNA, 25 bp, Canis familiaris
gaacccatggtctgaagcgcattgg

SEQ ID NO: 110112 - DNA, 25 bp, Canis familiaris
gagacggagtactccgccttggagc

SEQ ID NO: 110113 - DNA, 25 bp, Canis familiaris
gaacggaagaccagctccttggatc

SEQ ID NO: 110114 - DNA, 25 bp, Canis familiaris
gaacggagagtcgggtctttcgtcg

SEQ ID NO: 110115 - DNA, 25 bp, Canis familiaris
gaacggttggtacttgttgtcagtc

SEQ ID NO: 110116 - DNA, 25 bp, Canis familiaris
gaacgttctccttcaagttggagtg

SEQ ID NO: 110117 - DNA, 25 bp, Canis familiaris
gaaccttcagactcatagtcatcaa

SEQ ID NO: 110118 - DNA, 25 bp, Canis familiaris
gaagccttcacaatttggctcatct

SEQ ID NO: 110119 - DNA, 25 bp, Canis familiaris
gaagcctcagcattgtgtttctatt

SEQ ID NO: 110120 - DNA, 25 bp, Canis familiaris
gaagcctagctaatttttcattcca

SEQ ID NO: 110121 - DNA, 25 bp, Canis familiaris
gaagcctagtgacttttcattttga

SEQ ID NO: 110122 - DNA, 25 bp, Canis familiaris
gaagccgagatgcttttctgctcat

SEQ ID NO: 110123 - DNA, 25 bp, Canis familiaris
gaaccaaatcgtgttcctctatacc

SEQ ID NO: 110124 - DNA, 25 bp, Canis familiaris
gaactaaaccatgtcacccaaggtg

SEQ ID NO: 110125 - DNA, 25 bp, Canis familiaris
gaaccaaccactgtcatcaaaattt

SEQ ID NO: 110126 - DNA, 25 bp, Canis familiaris
gaacccaaagcctctaaattttcag

SEQ ID NO: 110127 - DNA, 25 bp, Canis familiaris
gaaccccaacacttctaagtttgct

SEQ ID NO: 110128 - DNA, 25 bp, Canis familiaris
gaaccggggcattttaatttatatg

SEQ ID NO: 110129 - DNA, 25 bp, Canis familiaris
gaaccgggcccagaagttgctacat

SEQ ID NO: 110130 - DNA, 25 bp, Canis familiaris
gaacctggcccctaaaataagagct

SEQ ID NO: 110131 - DNA, 25 bp, Canis familiaris
gaacctgttccagttaagaaggagt

SEQ ID NO: 110132 - DNA, 25 bp, Canis familiaris
gaaccgatttccacaattacaattc

SEQ ID NO: 110133 - DNA, 25 bp, Canis familiaris
gaaccgtgttcagcaaacttaattc

SEQ ID NO: 110134 - DNA, 25 bp, Canis familiaris
gaaccgttgtccgaagtctacattt

SEQ ID NO: 110135 - DNA, 25 bp, Canis familiaris
gaagccgatggtcctcagagttaca

SEQ ID NO: 110136 - DNA, 25 bp, Canis familiaris
gaacgggaacctgcagtatgacctc

SEQ ID NO: 110137 - DNA, 25 bp, Canis familiaris
gaaccgggactttcagcggaggctc

SEQ ID NO: 110138 - DNA, 25 bp, Canis familiaris
gaacctgagtgggctttctggggtc

SEQ ID NO: 110139 - DNA, 25 bp, Canis familiaris
gaacgttgttggattcgtggttggg

SEQ ID NO: 110140 - DNA, 25 bp, Canis familiaris
gaacgtcttttcatattggtgggag

SEQ ID NO: 110141 - DNA, 25 bp, Canis familiaris
gaactacgtggtcgggggtgtggtg

SEQ ID NO: 110142 - DNA, 25 bp, Canis familiaris
gaactatcgggttttgggattatat

SEQ ID NO: 110143 - DNA, 25 bp, Canis familiaris
gaacttccgttcctagtgactaata

SEQ ID NO: 110144 - DNA, 25 bp, Canis familiaris
gaacgtcctttggtcgaagtgaatc

SEQ ID NO: 110145 - DNA, 25 bp, Canis familiaris
gaacctcttttctggcaaatgaatg

SEQ ID NO: 110146 - DNA, 25 bp, Canis familiaris
gaagccccttgtttcagtatatgaa

SEQ ID NO: 110147 - DNA, 25 bp, Canis familiaris
gaagccctacgttctatttatgaag

SEQ ID NO: 110148 - DNA, 25 bp, Canis familiaris
gaagccatctatgtactagttcagg

SEQ ID NO: 110149 - DNA, 25 bp, Canis familiaris
gaaccagttcaaaacagatatcagg

SEQ ID NO: 110150 - DNA, 25 bp, Canis familiaris
gaaccagttcaaaacagatatcagg

SEQ ID NO: 110151 - DNA, 25 bp, Canis familiaris
gaaccagttgtatcaagctatgcgt

SEQ ID NO: 110152 - DNA, 25 bp, Canis familiaris
gaagccagttgaaagacactcttgc

SEQ ID NO: 110153 - DNA, 25 bp, Canis familiaris
gaagccaacttcaagaacctgtccc

SEQ ID NO: 110154 - DNA, 25 bp, Canis familiaris
gaaccaggcttggggacacaggtcc

SEQ ID NO: 110155 - DNA, 25 bp, Canis familiaris
gaagccctgcctgatgagacagagg

SEQ ID NO: 110156 - DNA, 25 bp, Canis familiaris
gaagccccctcgagaagaggacagc

SEQ ID NO: 110157 - DNA, 25 bp, Canis familiaris
gaaccttcctaaagcagagggcacc

SEQ ID NO: 110158 - DNA, 25 bp, Canis familiaris
gaacctactccaacagcaggtagcc

SEQ ID NO: 110159 - DNA, 25 bp, Canis familiaris
gaacaccctgaacatggtgtcccca

SEQ ID NO: 110160 - DNA, 25 bp, Canis familiaris
gaagccacctgaacgagagtgagag

SEQ ID NO: 110161 - DNA, 25 bp, Canis familiaris
gaagcccgctggaatcagaggagtg

SEQ ID NO: 110162 - DNA, 25 bp, Canis familiaris
gaagccgccatggccatagcaaagt

SEQ ID NO: 110163 - DNA, 25 bp, Canis familiaris
gaagccgccagaagcgacaactgtg

SEQ ID NO: 110164 - DNA, 25 bp, Canis familiaris
gaagccactagaaggtcacacgtca

SEQ ID NO: 110165 - DNA, 25 bp, Canis familiaris
gaaccacagtgtatgtcaactgccc

SEQ ID NO: 110166 - DNA, 25 bp, Canis familiaris
gaaccacagcggattctcactggaa

SEQ ID NO: 110167 - DNA, 25 bp, Canis familiaris
gaagccgctgcatgatattgacact

SEQ ID NO: 110168 - DNA, 25 bp, Canis familiaris
gaagccgctgcatgatattgacact

SEQ ID NO: 110169 - DNA, 25 bp, Canis familiaris
gaagccgctgcatgatattgacact

SEQ ID NO: 110170 - DNA, 25 bp, Canis familiaris
gaagccgctgcatgatattgacact

SEQ ID NO: 110171 - DNA, 25 bp, Canis familiaris
gaagccgctgcatgatattgacact

SEQ ID NO: 110172 - DNA, 25 bp, Canis familiaris
gaagccgctgcatgatattgacact

SEQ ID NO: 110173 - DNA, 25 bp, Canis familiaris
gaagccgctgcatgatacttgacac

SEQ ID NO: 110174 - DNA, 25 bp, Canis familiaris
gaacctgcatgatattatctgaggt

SEQ ID NO: 110175 - DNA, 25 bp, Canis familiaris
gaacctaactgcttatccagctgtc

SEQ ID NO: 110176 - DNA, 25 bp, Canis familiaris
gaaccgacatcgttaatccagtcac

SEQ ID NO: 110177 - DNA, 25 bp, Canis familiaris
gaagccagacacatcgaatccagaa

SEQ ID NO: 110178 - DNA, 25 bp, Canis familiaris
gaagccaggaccttgaaccgattgc

SEQ ID NO: 110179 - DNA, 25 bp, Canis familiaris
gaagccagaactctgtacgggacat

SEQ ID NO: 110180 - DNA, 25 bp, Canis familiaris
gaactccagcctctcaaatgggcag

SEQ ID NO: 110181 - DNA, 25 bp, Canis familiaris
gaaccgcacactagtgcccagaaag

SEQ ID NO: 110182 - DNA, 25 bp, Canis familiaris
gaactgactcagtgtcccagagaac

SEQ ID NO: 110183 - DNA, 25 bp, Canis familiaris
gaacgagccagatacctagagaact

SEQ ID NO: 110184 - DNA, 25 bp, Canis familiaris
gaactgagctcgataccaaaggaga

SEQ ID NO: 110185 - DNA, 25 bp, Canis familiaris
gaacgagtcgaatcggacggacact

SEQ ID NO: 110186 - DNA, 25 bp, Canis familiaris
gaacgagtctagtgtctgtcggaag

SEQ ID NO: 110187 - DNA, 25 bp, Canis familiaris
gaacgtgactacagatcgtgcgaac

SEQ ID NO: 110188 - DNA, 25 bp, Canis familiaris
gaacgtgttagcagcacgtcgttcg

SEQ ID NO: 110189 - DNA, 25 bp, Canis familiaris
gaactgtttcagagcccatgatgat

SEQ ID NO: 110190 - DNA, 25 bp, Canis familiaris
gaacctatggacagcccactgatgt

SEQ ID NO: 110191 - DNA, 25 bp, Canis familiaris
gaaccataggcagacactcagagtg

SEQ ID NO: 110192 - DNA, 25 bp, Canis familiaris
gaacctctggagacaagctgcaagt

SEQ ID NO: 110193 - DNA, 25 bp, Canis familiaris
gaagccacttagaatcgcgctcagg

SEQ ID NO: 110194 - DNA, 25 bp, Canis familiaris
gaaccggtagcttctgcgaagatgg

SEQ ID NO: 110195 - DNA, 25 bp, Canis familiaris
gaactcggctccgattcgaagtgca

SEQ ID NO: 110196 - DNA, 25 bp, Canis familiaris
gaactcaccccctgtagaataatag

SEQ ID NO: 110197 - DNA, 25 bp, Canis familiaris
gaaccagccttccaagggtttatag

SEQ ID NO: 110198 - DNA, 25 bp, Canis familiaris
gaagccatgtttcgaagacccgtat

SEQ ID NO: 110199 - DNA, 25 bp, Canis familiaris
gaaccatgattacataagggcttgt

SEQ ID NO: 110200 - DNA, 25 bp, Canis familiaris
gaacccagtcctataggccattgta

SEQ ID NO: 110201 - DNA, 25 bp, Canis familiaris
gaaccttgtcagtgtgaggcctctg

SEQ ID NO: 110202 - DNA, 25 bp, Canis familiaris
gaacctcagatagagttgcctttga

SEQ ID NO: 110203 - DNA, 25 bp, Canis familiaris
gaacctcaaagattgcggcctcttc

SEQ ID NO: 110204 - DNA, 25 bp, Canis familiaris
gaagccaagaagggggcccaagcga

SEQ ID NO: 110205 - DNA, 25 bp, Canis familiaris
gaaccagaacagggtggccatcagg

SEQ ID NO: 110206 - DNA, 25 bp, Canis familiaris
gaaccagaacagggtggccatcagg

SEQ ID NO: 110207 - DNA, 25 bp, Canis familiaris
gaaccagaacagggtggccatcagg

SEQ ID NO: 110208 - DNA, 25 bp, Canis familiaris
gaaccagaacagggtggccatcagg

SEQ ID NO: 110209 - DNA, 25 bp, Canis familiaris
gaaccagaacagggtggccatcagg

SEQ ID NO: 110210 - DNA, 25 bp, Canis familiaris
gaaccagaacagggtggccatcagg

SEQ ID NO: 110211 - DNA, 25 bp, Canis familiaris
gaaccagaacagggtggccatcagg

SEQ ID NO: 110212 - DNA, 25 bp, Canis familiaris
gaaccagaacagggtggccatcagg

SEQ ID NO: 110213 - DNA, 25 bp, Canis familiaris
gaaccaggacctgtgtcagcaggag

SEQ ID NO: 110214 - DNA, 25 bp, Canis familiaris
gaacgaggagccattccagagtggg

SEQ ID NO: 110215 - DNA, 25 bp, Canis familiaris
gaaccgggccgttctctcgtgggag

SEQ ID NO: 110216 - DNA, 25 bp, Canis familiaris
gaactcgatgagggcttcccaaggg

SEQ ID NO: 110217 - DNA, 25 bp, Canis familiaris
gaacgggaaacttgtcatcaacggg

SEQ ID NO: 110218 - DNA, 25 bp, Canis familiaris
gaacagggaaacagcacacgaacgg

SEQ ID NO: 110219 - DNA, 25 bp, Canis familiaris
gaacagggaagtacagcatcatcag

SEQ ID NO: 110220 - DNA, 25 bp, Canis familiaris
gaacctgggtttggaatcagaccta

SEQ ID NO: 110221 - DNA, 25 bp, Canis familiaris
gaacctgtgcctatgggacgggtct

SEQ ID NO: 110222 - DNA, 25 bp, Canis familiaris
gaaccagagccgttgggacagtggg

SEQ ID NO: 110223 - DNA, 25 bp, Canis familiaris
gaacggagccgaggaggaagtagaa

SEQ ID NO: 110224 - DNA, 25 bp, Canis familiaris
gaacggacttcacaggagggagacc

SEQ ID NO: 110225 - DNA, 25 bp, Canis familiaris
gaacggactcacaggtagggagacc

SEQ ID NO: 110226 - DNA, 25 bp, Canis familiaris
gaacggagtctgagagtctggggct

SEQ ID NO: 110227 - DNA, 25 bp, Canis familiaris
tgatacggaacgagaccgaggtaac

SEQ ID NO: 110228 - DNA, 25 bp, Canis familiaris
gaacgtgaccgttgacactgggcat

SEQ ID NO: 110229 - DNA, 25 bp, Canis familiaris
gaactgcatgttcggcaaccgggag

SEQ ID NO: 110230 - DNA, 25 bp, Canis familiaris
gaactgatcgtggggaccgtgagct

SEQ ID NO: 110231 - DNA, 25 bp, Canis familiaris
gaactactgtgatggtcctgttgtg

SEQ ID NO: 110232 - DNA, 25 bp, Canis familiaris
gaacgtctggagggtcggtgtggtc

SEQ ID NO: 110233 - DNA, 25 bp, Canis familiaris
gaacgtcttagtgtccgtagtgatc

SEQ ID NO: 110234 - DNA, 25 bp, Canis familiaris
gaacgtcgtgttgggtccgattgat

SEQ ID NO: 110235 - DNA, 25 bp, Canis familiaris
gaactttggcgcgggtatctatttt

SEQ ID NO: 110236 - DNA, 25 bp, Canis familiaris
gaacttgttcaagggttccggcatt

SEQ ID NO: 110237 - DNA, 25 bp, Canis familiaris
gaacttttcctccagcaataggaac

SEQ ID NO: 110238 - DNA, 25 bp, Canis familiaris
gaacgttttctgccaaagaccatga

SEQ ID NO: 110239 - DNA, 25 bp, Canis familiaris
gaacctatttctaattagacccaag

SEQ ID NO: 110240 - DNA, 25 bp, Canis familiaris
gaaccatgtcttatttaggtgccac

SEQ ID NO: 110241 - DNA, 25 bp, Canis familiaris
gaaccagatcactatgttgtagttg

SEQ ID NO: 110242 - DNA, 25 bp, Canis familiaris
gaagccagaacatctatctacttga

SEQ ID NO: 110243 - DNA, 25 bp, Canis familiaris
gaagccaaacagccaaattctgcca

SEQ ID NO: 110244 - DNA, 25 bp, Canis familiaris
gaagcctacacagaagtacatccaa

SEQ ID NO: 110245 - DNA, 25 bp, Canis familiaris
gaaccttcacaccaaatcagtgcca

SEQ ID NO: 110246 - DNA, 25 bp, Canis familiaris
gaagccattcaaccaaaaagcaact

SEQ ID NO: 110247 - DNA, 25 bp, Canis familiaris
gaagcctgcctacataggaagaacc

SEQ ID NO: 110248 - DNA, 25 bp, Canis familiaris
gaacgtgagctaataaggaaaaact

SEQ ID NO: 110249 - DNA, 25 bp, Canis familiaris
gaactggaccactaggagcaaaccc

SEQ ID NO: 110250 - DNA, 25 bp, Canis familiaris
gaactcgaccagtaggatgtgcagg

SEQ ID NO: 110251 - DNA, 25 bp, Canis familiaris
gaaccaagccaattgatctgtcaaa

SEQ ID NO: 110252 - DNA, 25 bp, Canis familiaris
gaacccggagatcacagtaacctgg

SEQ ID NO: 110253 - DNA, 25 bp, Canis familiaris
gaagcctgctggccttagagttagc

SEQ ID NO: 110254 - DNA, 25 bp, Canis familiaris
gaagcctctggactgttggttacca

SEQ ID NO: 110255 - DNA, 25 bp, Canis familiaris
gaacatttttgtttggtctacatca

SEQ ID NO: 110256 - DNA, 25 bp, Canis familiaris
gaactttttggagaccattaaagag

SEQ ID NO: 110257 - DNA, 25 bp, Canis familiaris
gaactgttttgtcagaacttaaatg

SEQ ID NO: 110258 - DNA, 25 bp, Canis familiaris
gaacgatcttttcaaactcattttg

SEQ ID NO: 110259 - DNA, 25 bp, Canis familiaris
gacttgtttaaatgattcgcttttg

SEQ ID NO: 110260 - DNA, 25 bp, Canis familiaris
gacggtttccagagacctgtttggg

SEQ ID NO: 110261 - DNA, 25 bp, Canis familiaris
gaacttttccagaacctattgtatg

SEQ ID NO: 110262 - DNA, 25 bp, Canis familiaris
gaactgtaattatccttttgtagct

SEQ ID NO: 110263 - DNA, 25 bp, Canis familiaris
gaactgttttaccttatttacgatg

SEQ ID NO: 110264 - DNA, 25 bp, Canis familiaris
gaactggtggtgggctggatttagc

SEQ ID NO: 110265 - DNA, 25 bp, Canis familiaris
gaactcctgggcaggcgtttagcct

SEQ ID NO: 110266 - DNA, 25 bp, Canis familiaris
gaactacagggctggcgtggtgaca

SEQ ID NO: 110267 - DNA, 25 bp, Canis familiaris
gaaccacaagacttgcaggggaccc

SEQ ID NO: 110268 - DNA, 25 bp, Canis familiaris
gaaccataggatctggggcgtgccc

SEQ ID NO: 110269 - DNA, 25 bp, Canis familiaris
gaaccatcctaactggaacggcgcc

SEQ ID NO: 110270 - DNA, 25 bp, Canis familiaris
gaaccatcctaaatttagtggagat

SEQ ID NO: 110271 - DNA, 25 bp, Canis familiaris
gaactgctccaatccttggggaaat

SEQ ID NO: 110272 - DNA, 25 bp, Canis familiaris
gaaccaggcaaaccttgccgcgaac

SEQ ID NO: 110273 - DNA, 25 bp, Canis familiaris
gaagccaataaacctttgtgaaacg

SEQ ID NO: 110274 - DNA, 25 bp, Canis familiaris
gaagccaaataaaccgtgtgaacag

SEQ ID NO: 110275 - DNA, 25 bp, Canis familiaris
gaaccacgaacaactccttgaagcc

SEQ ID NO: 110276 - DNA, 25 bp, Canis familiaris
gaacgacggatttcttttgaacctg

SEQ ID NO: 110277 - DNA, 25 bp, Canis familiaris
gaaccagctgtgggttttctaacca

SEQ ID NO: 110278 - DNA, 25 bp, Canis familiaris
gaaccacgtgaacagcttctggacc

SEQ ID NO: 110279 - DNA, 25 bp, Canis familiaris
gaaccacacaaatagcccttgacat

SEQ ID NO: 110280 - DNA, 25 bp, Canis familiaris
gaaccacaataaaagccctgggttg

SEQ ID NO: 110281 - DNA, 25 bp, Canis familiaris
gaactacaaccatatatgccagggt

SEQ ID NO: 110282 - DNA, 25 bp, Canis familiaris
gaaccacacgcgcaaatctcgcgag

SEQ ID NO: 110283 - DNA, 25 bp, Canis familiaris
gaaccaccacgacgaacatcagagt

SEQ ID NO: 110284 - DNA, 25 bp, Canis familiaris
gaagccacaaagtcaaagctctact

SEQ ID NO: 110285 - DNA, 25 bp, Canis familiaris
gaagccaaggcattctaagtatatt

SEQ ID NO: 110286 - DNA, 25 bp, Canis familiaris
gaagccaggaattctaagtatattc

SEQ ID NO: 110287 - DNA, 25 bp, Canis familiaris
gaacctggactatgagatgtataac

SEQ ID NO: 110288 - DNA, 25 bp, Canis familiaris
gaaccagagacacaggttgatctca

SEQ ID NO: 110289 - DNA, 25 bp, Canis familiaris
gaaccagatgataggggtattctag

SEQ ID NO: 110290 - DNA, 25 bp, Canis familiaris
gaagccacagccaggtgatcaacgg

SEQ ID NO: 110291 - DNA, 25 bp, Canis familiaris
gaacttcagctcagtagccaagttg

SEQ ID NO: 110292 - DNA, 25 bp, Canis familiaris
gaacattcatggattacctactata

SEQ ID NO: 110293 - DNA, 25 bp, Canis familiaris
gaacaccagtggacttcctactaag

SEQ ID NO: 110294 - DNA, 25 bp, Canis familiaris
gaacccagtttttctttcataatgg

SEQ ID NO: 110295 - DNA, 25 bp, Canis familiaris
gaaccagtgtttaattttatgtagg

SEQ ID NO: 110296 - DNA, 25 bp, Canis familiaris
gaaccacatttttttcttcatgttc

SEQ ID NO: 110297 - DNA, 25 bp, Canis familiaris
gaaccacttcctattcaactgtgtt

SEQ ID NO: 110298 - DNA, 25 bp, Canis familiaris
gaaccacttctaatattctaatttt

SEQ ID NO: 110299 - DNA, 25 bp, Canis familiaris
gaacaccattcagaaacttgttttg

SEQ ID NO: 110300 - DNA, 25 bp, Canis familiaris
gaacaggtggcagaagaattttttt

SEQ ID NO: 110301 - DNA, 25 bp, Canis familiaris
gaacgtgccgcagggaaacttttcg

SEQ ID NO: 110302 - DNA, 25 bp, Canis familiaris
gaaatcggccaccgtaacttcttgc

SEQ ID NO: 110303 - DNA, 25 bp, Canis familiaris
gacaccgaccaaagtaagtcctctc

SEQ ID NO: 110304 - DNA, 25 bp, Canis familiaris
gaaccaaatcaaagtcggacaccca

SEQ ID NO: 110305 - DNA, 25 bp, Canis familiaris
gaacgccaacgaaacggaacagctc

SEQ ID NO: 110306 - DNA, 25 bp, Canis familiaris
gaacccaaagatgcagcgtggtctt

SEQ ID NO: 110307 - DNA, 25 bp, Canis familiaris
gaagccaagaaagcagcagtgacct

SEQ ID NO: 110308 - DNA, 25 bp, Canis familiaris
gaagccacagaaggtagcaagagtt

SEQ ID NO: 110309 - DNA, 25 bp, Canis familiaris
gaagccagcataagagaagacgagt

SEQ ID NO: 110310 - DNA, 25 bp, Canis familiaris
gaagccagcagaatggacctcagga

SEQ ID NO: 110311 - DNA, 25 bp, Canis familiaris
gaagccacatgaattaactacagca

SEQ ID NO: 110312 - DNA, 25 bp, Canis familiaris
gaagccaatatttagatctcttgca

SEQ ID NO: 110313 - DNA, 25 bp, Canis familiaris
gaaccaacacattactctctgtgcc

SEQ ID NO: 110314 - DNA, 25 bp, Canis familiaris
gaaccaatcactttgtatgctatac

SEQ ID NO: 110315 - DNA, 25 bp, Canis familiaris
gaaccaactcattttgctgtcaatc

SEQ ID NO: 110316 - DNA, 25 bp, Canis familiaris
gaaccaactatgctgatctaaatgt

SEQ ID NO: 110317 - DNA, 25 bp, Canis familiaris
gaaccgtagatgccagactgaaatt

SEQ ID NO: 110318 - DNA, 25 bp, Canis familiaris
gaaccactagaatcacagaaatcgt

SEQ ID NO: 110319 - DNA, 25 bp, Canis familiaris
gaaccaccatcatatcacataaatc

SEQ ID NO: 110320 - DNA, 25 bp, Canis familiaris
gaactcagcagtctataaaaacaat

SEQ ID NO: 110321 - DNA, 25 bp, Canis familiaris
gaactatttcttcctaaaactcata

SEQ ID NO: 110322 - DNA, 25 bp, Canis familiaris
gaactggatctcatacttttaatta

SEQ ID NO: 110323 - DNA, 25 bp, Canis familiaris
gaacaggacctaagttctgtaagga

SEQ ID NO: 110324 - DNA, 25 bp, Canis familiaris
gtcagttagctcaggttcctaagga

SEQ ID NO: 110325 - DNA, 25 bp, Canis familiaris
gacagttggtcacacttcactaaag

SEQ ID NO: 110326 - DNA, 25 bp, Canis familiaris
gaaattaatccccttcagtaacagg

SEQ ID NO: 110327 - DNA, 25 bp, Canis familiaris
gaactgtaatgcccttttgtggaag

SEQ ID NO: 110328 - DNA, 25 bp, Canis familiaris
gaactgtaagcacatcatgctatgt

SEQ ID NO: 110329 - DNA, 25 bp, Canis familiaris
gaacgtagcagatcggcttgctttc

SEQ ID NO: 110330 - DNA, 25 bp, Canis familiaris
gaactctgagggtcaactcctttca

SEQ ID NO: 110331 - DNA, 25 bp, Canis familiaris
gaacctgatagataatcccattgcc

SEQ ID NO: 110332 - DNA, 25 bp, Canis familiaris
gaaccataagggaatccctcacctg

SEQ ID NO: 110333 - DNA, 25 bp, Canis familiaris
gaacctgagggaaaaccacacctgg

SEQ ID NO: 110334 - DNA, 25 bp, Canis familiaris
gaacctgggtgagaagctgaccgat

SEQ ID NO: 110335 - DNA, 25 bp, Canis familiaris
gaacggctcgtgttaagctggtcgt

SEQ ID NO: 110336 - DNA, 25 bp, Canis familiaris
gaactctgccaggatcctactggat

SEQ ID NO: 110337 - DNA, 25 bp, Canis familiaris
gaacctgccctgacaaatgctggct

SEQ ID NO: 110338 - DNA, 25 bp, Canis familiaris
gaaccatccaggccaaatcagtgct

SEQ ID NO: 110339 - DNA, 25 bp, Canis familiaris
gaaccaccagtccaagaatctgttt

SEQ ID NO: 110340 - DNA, 25 bp, Canis familiaris
gaaccccactacacagatcattatg

SEQ ID NO: 110341 - DNA, 25 bp, Canis familiaris
gaaccccaattcctcaaatttagca

SEQ ID NO: 110342 - DNA, 25 bp, Canis familiaris
gaaccctcagaatgactgttttagc

SEQ ID NO: 110343 - DNA, 25 bp, Canis familiaris
gaacctcttcagcagagtttcttag

SEQ ID NO: 110344 - DNA, 25 bp, Canis familiaris
gaacttttccaaactttcatgaagc

SEQ ID NO: 110345 - DNA, 25 bp, Canis familiaris
gaacttttctaaatacgctgttatc

SEQ ID NO: 110346 - DNA, 25 bp, Canis familiaris
gaacttgtacatttaccgtaattca

SEQ ID NO: 110347 - DNA, 25 bp, Canis familiaris
gaactggataaattctctctggaat

SEQ ID NO: 110348 - DNA, 25 bp, Canis familiaris
gaactatgtgactattcttaggagg

SEQ ID NO: 110349 - DNA, 25 bp, Canis familiaris
gaactttggctgtgcttcaggaaga

SEQ ID NO: 110350 - DNA, 25 bp, Canis familiaris
gaacctattgtgtgcatggagtgag

SEQ ID NO: 110351 - DNA, 25 bp, Canis familiaris
gaaccatttagtttggagagcaagc

SEQ ID NO: 110352 - DNA, 25 bp, Canis familiaris
gaaccattctaagttttgagaggca

SEQ ID NO: 110353 - DNA, 25 bp, Canis familiaris
gaaccttctaaactgctcatagggc

SEQ ID NO: 110354 - DNA, 25 bp, Canis familiaris
gaacctttatgatttcccagtcagg

SEQ ID NO: 110355 - DNA, 25 bp, Canis familiaris
gaaccgtttgtcttccgagaatgga

SEQ ID NO: 110356 - DNA, 25 bp, Canis familiaris
gaaccttgttatttctcagactttg

SEQ ID NO: 110357 - DNA, 25 bp, Canis familiaris
gaacctttgttttgatctcacttta

SEQ ID NO: 110358 - DNA, 25 bp, Canis familiaris
gaaccatgttatccctgttactttt

SEQ ID NO: 110359 - DNA, 25 bp, Canis familiaris
gaacctgtctagccccataaaattt

SEQ ID NO: 110360 - DNA, 25 bp, Canis familiaris
gaaccgtcatttcccgaaaatgctt

SEQ ID NO: 110361 - DNA, 25 bp, Canis familiaris
gaaccaggctttccatagagagaag

SEQ ID NO: 110362 - DNA, 25 bp, Canis familiaris
gaaccttgttcttgctaagaatagc

SEQ ID NO: 110363 - DNA, 25 bp, Canis familiaris
gaacgtatttctgtcataatgtagg

SEQ ID NO: 110364 - DNA, 25 bp, Canis familiaris
gaacgtcaccttgttctagtaggcc

SEQ ID NO: 110365 - DNA, 25 bp, Canis familiaris
gaactttcctttactctggtagtct

SEQ ID NO: 110366 - DNA, 25 bp, Canis familiaris
gaactgcttataattaatctttacc

SEQ ID NO: 110367 - DNA, 25 bp, Canis familiaris
gaactgtattttcagctgtccgacc

SEQ ID NO: 110368 - DNA, 25 bp, Canis familiaris
gaacattccaggaggtgtccgtcca

SEQ ID NO: 110369 - DNA, 25 bp, Canis familiaris
gaacagtctaggagccttgcctgtt

SEQ ID NO: 110370 - DNA, 25 bp, Canis familiaris
gaacctgctaagcggttgaccttgg

SEQ ID NO: 110371 - DNA, 25 bp, Canis familiaris
gaacctcatgaactgggagtgtgcc

SEQ ID NO: 110372 - DNA, 25 bp, Canis familiaris
gaaccatcagccttggaggtggagc

SEQ ID NO: 110373 - DNA, 25 bp, Canis familiaris
gaacctcagcagtgccagtatgggt

SEQ ID NO: 110374 - DNA, 25 bp, Canis familiaris
gaaccttgaattgcgtgtgtgtgtg

SEQ ID NO: 110375 - DNA, 25 bp, Canis familiaris
gaaccttagactgcgtgtgtgtgtg

SEQ ID NO: 110376 - DNA, 25 bp, Canis familiaris
gaaccttcgagagctgtacctgagc

SEQ ID NO: 110377 - DNA, 25 bp, Canis familiaris
gaactttaagtgcctgtcactctga

SEQ ID NO: 110378 - DNA, 25 bp, Canis familiaris
gaacctggaagcttctgtcaccatt

SEQ ID NO: 110379 - DNA, 25 bp, Canis familiaris
gaaccatgagacacatttccacttc

SEQ ID NO: 110380 - DNA, 25 bp, Canis familiaris
gaaccatgatgattccattgggcaa

SEQ ID NO: 110381 - DNA, 25 bp, Canis familiaris
gaactgcagcatcatgtgatctggg

SEQ ID NO: 110382 - DNA, 25 bp, Canis familiaris
gaaccagttcattgcatgctgaagc

SEQ ID NO: 110383 - DNA, 25 bp, Canis familiaris
gaaccatgtcaattgatgctactta

SEQ ID NO: 110384 - DNA, 25 bp, Canis familiaris
gaaccagtatattgctggcagctat

SEQ ID NO: 110385 - DNA, 25 bp, Canis familiaris
gaaccaggttcttgcgcgtctatcg

SEQ ID NO: 110386 - DNA, 25 bp, Canis familiaris
gaaccagggtgcaaggcattcgtgc

SEQ ID NO: 110387 - DNA, 25 bp, Canis familiaris
gaacctgttgtgtggcaatgcgctt

SEQ ID NO: 110388 - DNA, 25 bp, Canis familiaris
gaaccgggagcaggagcagcggctt

SEQ ID NO: 110389 - DNA, 25 bp, Canis familiaris
gaacagcatgccccagggcatggcc

SEQ ID NO: 110390 - DNA, 25 bp, Canis familiaris
gaaccatggcacgaaagagcccatt

SEQ ID NO: 110391 - DNA, 25 bp, Canis familiaris
gaacctggagcgcaatgggcaatgg

SEQ ID NO: 110392 - DNA, 25 bp, Canis familiaris
gaacccaatgccctcatgatggaag

SEQ ID NO: 110393 - DNA, 25 bp, Canis familiaris
gaaccagtgctggagtccatgtgaa

SEQ ID NO: 110394 - DNA, 25 bp, Canis familiaris
gaacctggtccagtgcattcagaac

SEQ ID NO: 110395 - DNA, 25 bp, Canis familiaris
gaacctgttccttgagtggcaacta

SEQ ID NO: 110396 - DNA, 25 bp, Canis familiaris
gaaccgctcactgagaggtgacctc

SEQ ID NO: 110397 - DNA, 25 bp, Canis familiaris
gaaccgcatcctccaagctggaggc

SEQ ID NO: 110398 - DNA, 25 bp, Canis familiaris
gaacctcaccgagtccatgagtgtc

SEQ ID NO: 110399 - DNA, 25 bp, Canis familiaris
gaacttcaaggaggccatgcgcatt

SEQ ID NO: 110400 - DNA, 25 bp, Canis familiaris
gaacgaattcattagccatggatgt

SEQ ID NO: 110401 - DNA, 25 bp, Canis familiaris
gaactgactttaaggatggcagctt

SEQ ID NO: 110402 - DNA, 25 bp, Canis familiaris
gaacgttttcgaggtggagcatatc

SEQ ID NO: 110403 - DNA, 25 bp, Canis familiaris
gaacctcttctcaagcactgggagt

SEQ ID NO: 110404 - DNA, 25 bp, Canis familiaris
gaacctgcttctaacatgggctgta

SEQ ID NO: 110405 - DNA, 25 bp, Canis familiaris
gaacctgctttcatgatgtcactgg

SEQ ID NO: 110406 - DNA, 25 bp, Canis familiaris
gaaccatcactcgatggcttacttg

SEQ ID NO: 110407 - DNA, 25 bp, Canis familiaris
gaaccagcgctgctgcagcgctacc

SEQ ID NO: 110408 - DNA, 25 bp, Canis familiaris
gaactcagctcgcgatgcttagaag

SEQ ID NO: 110409 - DNA, 25 bp, Canis familiaris
gaaccagcctccgtatatatgaatg

SEQ ID NO: 110410 - DNA, 25 bp, Canis familiaris
gacaccggtcggttgacaggtggaa

SEQ ID NO: 110411 - DNA, 25 bp, Canis familiaris
gaaccggtgtagacagacggctggg

SEQ ID NO: 110412 - DNA, 25 bp, Canis familiaris
gaaccggtgtatgagactggcgaga

SEQ ID NO: 110413 - DNA, 25 bp, Canis familiaris
gaaccaggtgtttgggcaagatgag

SEQ ID NO: 110414 - DNA, 25 bp, Canis familiaris
gaaccagatgttgtgagtgctaaac

SEQ ID NO: 110415 - DNA, 25 bp, Canis familiaris
gaaccgtgatctacggtgcgtccac

SEQ ID NO: 110416 - DNA, 25 bp, Canis familiaris
gaaccaggaagagggtcctcaccag

SEQ ID NO: 110417 - DNA, 25 bp, Canis familiaris
gaaccagagaactgagtcacacccg

SEQ ID NO: 110418 - DNA, 25 bp, Canis familiaris
gaacctgagaccaaagtgaccacac

SEQ ID NO: 110419 - DNA, 25 bp, Canis familiaris
gaaccttgttcttcactgacatgac

SEQ ID NO: 110420 - DNA, 25 bp, Canis familiaris
gaacctctggtttatctggtaccct

SEQ ID NO: 110421 - DNA, 25 bp, Canis familiaris
gaactgcctctgatgaatgtagtac

SEQ ID NO: 110422 - DNA, 25 bp, Canis familiaris
gaaccctgcttctactgttgaacag

SEQ ID NO: 110423 - DNA, 25 bp, Canis familiaris
gaacgccgcttttttggaatcttct

SEQ ID NO: 110424 - DNA, 25 bp, Canis familiaris
gaacccgttgtcattggaatagtct

SEQ ID NO: 110425 - DNA, 25 bp, Canis familiaris
gaacctgacttgatttggtctgatg

SEQ ID NO: 110426 - DNA, 25 bp, Canis familiaris
gaacctctctggaatttgtgcctga

SEQ ID NO: 110427 - DNA, 25 bp, Canis familiaris
gaacccatctgggcatcttttgcaa

SEQ ID NO: 110428 - DNA, 25 bp, Canis familiaris
gaacctgcttcatcattttcatcaa

SEQ ID NO: 110429 - DNA, 25 bp, Canis familiaris
gaacctgtcctactgtaacaataca

SEQ ID NO: 110430 - DNA, 25 bp, Canis familiaris
gaaccttctgattttaacatacact

SEQ ID NO: 110431 - DNA, 25 bp, Canis familiaris
gaacctattgattttccagttgcac

SEQ ID NO: 110432 - DNA, 25 bp, Canis familiaris
gaacctgaagatgttcgcgattatc

SEQ ID NO: 110433 - DNA, 25 bp, Canis familiaris
gaacctgatatcgtggtcggaattc

SEQ ID NO: 110434 - DNA, 25 bp, Canis familiaris
gaaccttatcttggctttggatctc

SEQ ID NO: 110435 - DNA, 25 bp, Canis familiaris
gaaccaggatttgctcttgcttcct

SEQ ID NO: 110436 - DNA, 25 bp, Canis familiaris
gaaccagacattcttctgtttccaa

SEQ ID NO: 110437 - DNA, 25 bp, Canis familiaris
gaaccagtcaactttcttctatcaa

SEQ ID NO: 110438 - DNA, 25 bp, Canis familiaris
gaaccccaacagatttgtcatgccc

SEQ ID NO: 110439 - DNA, 25 bp, Canis familiaris
gaaccctctgaacgatgttgtctgg

SEQ ID NO: 110440 - DNA, 25 bp, Canis familiaris
gaactccacagcgctggttgttgag

SEQ ID NO: 110441 - DNA, 25 bp, Canis familiaris
gaaccccagacctgcatctggattg

SEQ ID NO: 110442 - DNA, 25 bp, Canis familiaris
gaacctccacaggtggcactggtct

SEQ ID NO: 110443 - DNA, 25 bp, Canis familiaris
gaactgtacattgtgagctctggtt

SEQ ID NO: 110444 - DNA, 25 bp, Canis familiaris
gaacatgggagtgtagctgcttctc

SEQ ID NO: 110445 - DNA, 25 bp, Canis familiaris
gaactggtgagggacgcctggatgg

SEQ ID NO: 110446 - DNA, 25 bp, Canis familiaris
gaactgggagaggaccgtgggtcga

SEQ ID NO: 110447 - DNA, 25 bp, Canis familiaris
gaacggggagtaccagaccagctca

SEQ ID NO: 110448 - DNA, 25 bp, Canis familiaris
gaactgaaggcagagttggccacta

SEQ ID NO: 110449 - DNA, 25 bp, Canis familiaris
gaacttcagtgatacttggtagata

SEQ ID NO: 110450 - DNA, 25 bp, Canis familiaris
gaacttggctatttcctgtaaattc

SEQ ID NO: 110451 - DNA, 25 bp, Canis familiaris
gaacctgtaaactctgtagcacact

SEQ ID NO: 110452 - DNA, 25 bp, Canis familiaris
gaactctgtaaaggtgcttcccact

SEQ ID NO: 110453 - DNA, 25 bp, Canis familiaris
gaactcggaagagatttccacgtga

SEQ ID NO: 110454 - DNA, 25 bp, Canis familiaris
gaacctggtcaaactggtccagcgg

SEQ ID NO: 110455 - DNA, 25 bp, Canis familiaris
gaacctggttcaagggccatcaagg

SEQ ID NO: 110456 - DNA, 25 bp, Canis familiaris
gaaccggcttctaggagcttcagaa

SEQ ID NO: 110457 - DNA, 25 bp, Canis familiaris
gaacctgagctccaggtccattaaa

SEQ ID NO: 110458 - DNA, 25 bp, Canis familiaris
gaaccttggcgggtgccttatatcc

SEQ ID NO: 110459 - DNA, 25 bp, Canis familiaris
gaaccttgtcagattcttgtctctc

SEQ ID NO: 110460 - DNA, 25 bp, Canis familiaris
gaaccattgcttcctattaattctt

SEQ ID NO: 110461 - DNA, 25 bp, Canis familiaris
gaaccattctcttaagtcattctct

SEQ ID NO: 110462 - DNA, 25 bp, Canis familiaris
gaaccatgtaattaatgtcatcctt

SEQ ID NO: 110463 - DNA, 25 bp, Canis familiaris
gaacctgtagctagcacagctctcc

SEQ ID NO: 110464 - DNA, 25 bp, Canis familiaris
gaacctatatgattgcagatgtgat

SEQ ID NO: 110465 - DNA, 25 bp, Canis familiaris
gaacctttaatgtatgatgaatctc

SEQ ID NO: 110466 - DNA, 25 bp, Canis familiaris
gaaccatattactctcatgatactt

SEQ ID NO: 110467 - DNA, 25 bp, Canis familiaris
gaaccatacttctattcatgtcagt

SEQ ID NO: 110468 - DNA, 25 bp, Canis familiaris
gacagtataattttacaggccccag

SEQ ID NO: 110469 - DNA, 25 bp, Canis familiaris
gaactctgtaattctaagtccccag

SEQ ID NO: 110470 - DNA, 25 bp, Canis familiaris
gaaccgataatactagcaaacctgc

SEQ ID NO: 110471 - DNA, 25 bp, Canis familiaris
gaactaaaatacaccacacacacac

SEQ ID NO: 110472 - DNA, 25 bp, Canis familiaris
gaaccgacaattgaaacctacatag

SEQ ID NO: 110473 - DNA, 25 bp, Canis familiaris
gaaccgaagcttgtataccacttag

SEQ ID NO: 110474 - DNA, 25 bp, Canis familiaris
gaaccgattgcttcggatgccacat

SEQ ID NO: 110475 - DNA, 25 bp, Canis familiaris
gaacctggctgcagaggtccacagg

SEQ ID NO: 110476 - DNA, 25 bp, Canis familiaris
gaaccgatctgcagcatgacctatc

SEQ ID NO: 110477 - DNA, 25 bp, Canis familiaris
gaactctgaggcaggtcactacgta

SEQ ID NO: 110478 - DNA, 25 bp, Canis familiaris
gaactgtgcagacgctggtatccag

SEQ ID NO: 110479 - DNA, 25 bp, Canis familiaris
gaacgtgaacgtggtatcaccattg

SEQ ID NO: 110480 - DNA, 25 bp, Canis familiaris
gaacgtgaacgtggtatcaccattg

SEQ ID NO: 110481 - DNA, 25 bp, Canis familiaris
gaacgtgaacaggcagcaacagcta

SEQ ID NO: 110482 - DNA, 25 bp, Canis familiaris
gaacgtagcacccagtaagatgata

SEQ ID NO: 110483 - DNA, 25 bp, Canis familiaris
gaacctggaacaatgctaagtgata

SEQ ID NO: 110484 - DNA, 25 bp, Canis familiaris
gaacgtggcaaggtgattagtgagc

SEQ ID NO: 110485 - DNA, 25 bp, Canis familiaris
gaacgggaagctcactggcatggcc

SEQ ID NO: 110486 - DNA, 25 bp, Canis familiaris
gaacgggaagctcactggcatggcc

SEQ ID NO: 110487 - DNA, 25 bp, Canis familiaris
gaacgtgagcaagccgaggcacagc

SEQ ID NO: 110488 - DNA, 25 bp, Canis familiaris
gaacagtaaaacccgtacatgggag

SEQ ID NO: 110489 - DNA, 25 bp, Canis familiaris
gaaaggtaattgcccttactgcggg

SEQ ID NO: 110490 - DNA, 25 bp, Canis familiaris
gaaatggtaatgagacttaaaggag

SEQ ID NO: 110491 - DNA, 25 bp, Canis familiaris
gaactgagtctcttggactttaacg

SEQ ID NO: 110492 - DNA, 25 bp, Canis familiaris
gaactagtgctactgaactgtttaa

SEQ ID NO: 110493 - DNA, 25 bp, Canis familiaris
gaactcagcaccatgaagcttttcc

SEQ ID NO: 110494 - DNA, 25 bp, Canis familiaris
gaacttggccccaatatgtttctcc

SEQ ID NO: 110495 - DNA, 25 bp, Canis familiaris
gacttcttgacgtccaagtgttccc

SEQ ID NO: 110496 - DNA, 25 bp, Canis familiaris
gaactcggttgaccaggttgtcctc

SEQ ID NO: 110497 - DNA, 25 bp, Canis familiaris
gaacgagaagtacgacgtcgtcaca

SEQ ID NO: 110498 - DNA, 25 bp, Canis familiaris
gaacgaagactactccgtcttccat

SEQ ID NO: 110499 - DNA, 25 bp, Canis familiaris
gtacgaagattccagggtctttctt

SEQ ID NO: 110500 - DNA, 25 bp, Canis familiaris
gaacttaaaccaggcatgtttgtcc

SEQ ID NO: 110501 - DNA, 25 bp, Canis familiaris
gaacttagaacaggccactattgta

SEQ ID NO: 110502 - DNA, 25 bp, Canis familiaris
gaacctccaacagcttcttatgtat

SEQ ID NO: 110503 - DNA, 25 bp, Canis familiaris
gaacgtcctatttcttttatgatac

SEQ ID NO: 110504 - DNA, 25 bp, Canis familiaris
gaactttttcagtttatatgtatat

SEQ ID NO: 110505 - DNA, 25 bp, Canis familiaris
gaacctttcttgttgtcatttattt

SEQ ID NO: 110506 - DNA, 25 bp, Canis familiaris
gaacctatttttgtgcatcatttac

SEQ ID NO: 110507 - DNA, 25 bp, Canis familiaris
gaacctatagtgccctgtgttttca

SEQ ID NO: 110508 - DNA, 25 bp, Canis familiaris
gaacctcattgtctgggtctcagtt

SEQ ID NO: 110509 - DNA, 25 bp, Canis familiaris
gaactctcctgtgtgcaggttatct

SEQ ID NO: 110510 - DNA, 25 bp, Canis familiaris
gaactgcttctgaattggatgtttc

SEQ ID NO: 110511 - DNA, 25 bp, Canis familiaris
gaacatgctccttgatgacgagtat

SEQ ID NO: 110512 - DNA, 25 bp, Canis familiaris
gaaacattgcggtatgcggtattga

SEQ ID NO: 110513 - DNA, 25 bp, Canis familiaris
gaactgcgggcacactgtgctattg

SEQ ID NO: 110514 - DNA, 25 bp, Canis familiaris
gaactcgtggcacacggcaagctgc

SEQ ID NO: 110515 - DNA, 25 bp, Canis familiaris
gaaccgtcagatcgcctggagacgc

SEQ ID NO: 110516 - DNA, 25 bp, Canis familiaris
gaaccgtcagatcgcctggagacgc

SEQ ID NO: 110517 - DNA, 25 bp, Canis familiaris
gaaccgtcagatcgcctggagacgc

SEQ ID NO: 110518 - DNA, 25 bp, Canis familiaris
gaaccgtcagatcgcctggagacgc

SEQ ID NO: 110519 - DNA, 25 bp, Canis familiaris
gaaccgtcagatcgcctggagacgc

SEQ ID NO: 110520 - DNA, 25 bp, Canis familiaris
gaaccgtcagatcgcctggagacgc

SEQ ID NO: 110521 - DNA, 25 bp, Canis familiaris
gaaccgtcagatcgcctggagacgc

SEQ ID NO: 110522 - DNA, 25 bp, Canis familiaris
gaaccgtcagatcgcctggagacgc

SEQ ID NO: 110523 - DNA, 25 bp, Canis familiaris
gaaccgtcagatcgcctggagacgc

SEQ ID NO: 110524 - DNA, 25 bp, Canis familiaris
gaaccgtcagatcgcctggagacgc

SEQ ID NO: 110525 - DNA, 25 bp, Canis familiaris
gaaccgtcagatcgcctggagacgc

SEQ ID NO: 110526 - DNA, 25 bp, Canis familiaris
gaaccgtcagatcgcctggagacgc

SEQ ID NO: 110527 - DNA, 25 bp, Canis familiaris
gaaccgtcagatcgcctggagacgc

SEQ ID NO: 110528 - DNA, 25 bp, Canis familiaris
gaaccgtcagatcgcctggagacgc

SEQ ID NO: 110529 - DNA, 25 bp, Canis familiaris
gaaccgtcagatcgcctggagacgc

SEQ ID NO: 110530 - DNA, 25 bp, Canis familiaris
gaaccgtcagatcgcctggagacgc

SEQ ID NO: 110531 - DNA, 25 bp, Canis familiaris
gaaccgtcagatcgcctggagacgc

SEQ ID NO: 110532 - DNA, 25 bp, Canis familiaris
gaaccgtcagatcgcctggagacgc

SEQ ID NO: 110533 - DNA, 25 bp, Canis familiaris
gaaccgtcatgtccacagagacgcg

SEQ ID NO: 110534 - DNA, 25 bp, Canis familiaris
gaactggtcactcagcagttgcctc

SEQ ID NO: 110535 - DNA, 25 bp, Canis familiaris
gaactggaattttgcagctatcccc

SEQ ID NO: 110536 - DNA, 25 bp, Canis familiaris
gaacgtgagaattcagtcttcttcg

SEQ ID NO: 110537 - DNA, 25 bp, Canis familiaris
gaacgacagagatcatttgcctagc

SEQ ID NO: 110538 - DNA, 25 bp, Canis familiaris
gaacatgatcatggaaactcaccta

SEQ ID NO: 110539 - DNA, 25 bp, Canis familiaris
gaactattgggacttcatcaagata

SEQ ID NO: 110540 - DNA, 25 bp, Canis familiaris
gaaccctagggtatcatagctgagc

SEQ ID NO: 110541 - DNA, 25 bp, Canis familiaris
gaaccctaggggtaagatgcaggtc

SEQ ID NO: 110542 - DNA, 25 bp, Canis familiaris
gaaccgtcggggaaggatggtgtgc

SEQ ID NO: 110543 - DNA, 25 bp, Canis familiaris
gaacctggagggccaaggtggtctt

SEQ ID NO: 110544 - DNA, 25 bp, Canis familiaris
gaaccgctgtggcacgagggttcct

SEQ ID NO: 110545 - DNA, 25 bp, Canis familiaris
gaaacctgtgactcggcatggattc

SEQ ID NO: 110546 - DNA, 25 bp, Canis familiaris
gaaccggatgtctcggcattaatcc

SEQ ID NO: 110547 - DNA, 25 bp, Canis familiaris
gaactagccagaaacaacttaacac

SEQ ID NO: 110548 - DNA, 25 bp, Canis familiaris
gaactgggtgcaaatccagcctacc

SEQ ID NO: 110549 - DNA, 25 bp, Canis familiaris
gaactgcatggacctaacattcgat

SEQ ID NO: 110550 - DNA, 25 bp, Canis familiaris
gaacatgctggacaagaaggcggtg

SEQ ID NO: 110551 - DNA, 25 bp, Canis familiaris
gaaatgtacagagaagcagggggga

SEQ ID NO: 110552 - DNA, 25 bp, Canis familiaris
gaacatggccgcggaaactggggtc

SEQ ID NO: 110553 - DNA, 25 bp, Canis familiaris
gaactggctcctggtagcattgtgc

SEQ ID NO: 110554 - DNA, 25 bp, Canis familiaris
gaacctgccgcagctagagatgctc

SEQ ID NO: 110555 - DNA, 25 bp, Canis familiaris
gaacatcgccacgactgcagagagc

SEQ ID NO: 110556 - DNA, 25 bp, Canis familiaris
gaacgcagtgattcatgtcgagact

SEQ ID NO: 110557 - DNA, 25 bp, Canis familiaris
gaactgcatggcttctgagagaggc

SEQ ID NO: 110558 - DNA, 25 bp, Canis familiaris
gaacatctagtttgagagcacagcc

SEQ ID NO: 110559 - DNA, 25 bp, Canis familiaris
gaacatctagtttgagagcacagcc

SEQ ID NO: 110560 - DNA, 25 bp, Canis familiaris
gaacctgctgtcttgtgacacacac

SEQ ID NO: 110561 - DNA, 25 bp, Canis familiaris
gaacctctgtgcgtactgcacacac

SEQ ID NO: 110562 - DNA, 25 bp, Canis familiaris
gaacctcatgattctaccaaaattt

SEQ ID NO: 110563 - DNA, 25 bp, Canis familiaris
gaacctcatatataaaagcaattgg

SEQ ID NO: 110564 - DNA, 25 bp, Canis familiaris
gaacacccaaatcacccaatgggtt

SEQ ID NO: 110565 - DNA, 25 bp, Canis familiaris
gaacctcccaatgaagacacagcag

SEQ ID NO: 110566 - DNA, 25 bp, Canis familiaris
gaaccgccagaaggacgagatcgag

SEQ ID NO: 110567 - DNA, 25 bp, Canis familiaris
gaactccgctaggccaaggatcggc

SEQ ID NO: 110568 - DNA, 25 bp, Canis familiaris
gaaccccatatcccaatggtaccaa

SEQ ID NO: 110569 - DNA, 25 bp, Canis familiaris
gaaccccagtcacagattgatgaac

SEQ ID NO: 110570 - DNA, 25 bp, Canis familiaris
gaacctgctgcgcatgaagttcatg

SEQ ID NO: 110571 - DNA, 25 bp, Canis familiaris
gaacctggcatgcagatatctttcc

SEQ ID NO: 110572 - DNA, 25 bp, Canis familiaris
gaacggcagctgcatggacattccc

SEQ ID NO: 110573 - DNA, 25 bp, Canis familiaris
gaacgaagccgacatgctgttctct

SEQ ID NO: 110574 - DNA, 25 bp, Canis familiaris
gaaccggcaaagcagagactatgat

SEQ ID NO: 110575 - DNA, 25 bp, Canis familiaris
gaactcgcgcagagcgaaacctgct

SEQ ID NO: 110576 - DNA, 25 bp, Canis familiaris
gaacgcaggcagaagaaggaagctt

SEQ ID NO: 110577 - DNA, 25 bp, Canis familiaris
gaacctgggctaatgggagactgta

SEQ ID NO: 110578 - DNA, 25 bp, Canis familiaris
gaacctgctggccttgttagacagt

SEQ ID NO: 110579 - DNA, 25 bp, Canis familiaris
gaacctgtggcgctatggagacttc

SEQ ID NO: 110580 - DNA, 25 bp, Canis familiaris
gaacctggggaaagatcagcaattc

SEQ ID NO: 110581 - DNA, 25 bp, Canis familiaris
gaacgcatggcgcaaagctcaagaa

SEQ ID NO: 110582 - DNA, 25 bp, Canis familiaris
gaacgtgggcagacgtgcaacaata

SEQ ID NO: 110583 - DNA, 25 bp, Canis familiaris
gaacgatgggagaatggaccaaatt

SEQ ID NO: 110584 - DNA, 25 bp, Canis familiaris
gaacgagcaggtgaaatccatcaaa

SEQ ID NO: 110585 - DNA, 25 bp, Canis familiaris
gaacgagcatggtgaaatccatcaa

SEQ ID NO: 110586 - DNA, 25 bp, Canis familiaris
gaacccttgggcaaacctgcaaagt

SEQ ID NO: 110587 - DNA, 25 bp, Canis familiaris
gacaccccgaagagacctggaaaag

SEQ ID NO: 110588 - DNA, 25 bp, Canis familiaris
gaaaatccgggaacacctggagaag

SEQ ID NO: 110589 - DNA, 25 bp, Canis familiaris
gaaagtcctgtgggaacagggaaca

SEQ ID NO: 110590 - DNA, 25 bp, Canis familiaris
gaacagggctggggagacactggga

SEQ ID NO: 110591 - DNA, 25 bp, Canis familiaris
gaaccgtggggccaacaatgcagca

SEQ ID NO: 110592 - DNA, 25 bp, Canis familiaris
gaacccgggagcagacatctcagat

SEQ ID NO: 110593 - DNA, 25 bp, Canis familiaris
gaacatccaggtagctaatatccaa

SEQ ID NO: 110594 - DNA, 25 bp, Canis familiaris
gaacacgagcgggaagtgatccaaa

SEQ ID NO: 110595 - DNA, 25 bp, Canis familiaris
gaactctgaggacaacgatcccgat

SEQ ID NO: 110596 - DNA, 25 bp, Canis familiaris
gaacctgaagaatcactacacgtgt

SEQ ID NO: 110597 - DNA, 25 bp, Canis familiaris
gaacttaaatactaatcaactttgc

SEQ ID NO: 110598 - DNA, 25 bp, Canis familiaris
gaactataaactttctataccctgt

SEQ ID NO: 110599 - DNA, 25 bp, Canis familiaris
gaacttactaccaatctaacacttg

SEQ ID NO: 110600 - DNA, 25 bp, Canis familiaris
gaacttaccatggcttcatctaagc

SEQ ID NO: 110601 - DNA, 25 bp, Canis familiaris
gaactatacctgtttcagtcagtta

SEQ ID NO: 110602 - DNA, 25 bp, Canis familiaris
gaactatttttctatcagtaattca

SEQ ID NO: 110603 - DNA, 25 bp, Canis familiaris
gaacgtctttgtcagcactgagact

SEQ ID NO: 110604 - DNA, 25 bp, Canis familiaris
gaacgttttgtcagactgagacttg

SEQ ID NO: 110605 - DNA, 25 bp, Canis familiaris
gaactttcttctaagtgccacagtg

SEQ ID NO: 110606 - DNA, 25 bp, Canis familiaris
gaactttcatttggagtgcctgggt

SEQ ID NO: 110607 - DNA, 25 bp, Canis familiaris
gaactctggcagattcagggctgag

SEQ ID NO: 110608 - DNA, 25 bp, Canis familiaris
gaacctgcaggaataccagagcaag

SEQ ID NO: 110609 - DNA, 25 bp, Canis familiaris
gaacctgcggagtagctcggagtgg

SEQ ID NO: 110610 - DNA, 25 bp, Canis familiaris
gaacctgggagaagcttctgttggc

SEQ ID NO: 110611 - DNA, 25 bp, Canis familiaris
gaacctgctcggatgtacttagaga

SEQ ID NO: 110612 - DNA, 25 bp, Canis familiaris
gaactaccgggtcactctagaatgt

SEQ ID NO: 110613 - DNA, 25 bp, Canis familiaris
gaactaccaaggctctgtctaggtc

SEQ ID NO: 110614 - DNA, 25 bp, Canis familiaris
gaactcacgaaggctttttcaaggc

SEQ ID NO: 110615 - DNA, 25 bp, Canis familiaris
gaactccttagcatggtaccaagac

SEQ ID NO: 110616 - DNA, 25 bp, Canis familiaris
gaacccagtacttgtaactcctgac

SEQ ID NO: 110617 - DNA, 25 bp, Canis familiaris
gaaaacttatctgtgaactttacta

SEQ ID NO: 110618 - DNA, 25 bp, Canis familiaris
gaaatccaaacacttcgagtttact

SEQ ID NO: 110619 - DNA, 25 bp, Canis familiaris
gaactcctagactttggatgtttac

SEQ ID NO: 110620 - DNA, 25 bp, Canis familiaris
gaactcctaagggtgtgactttgaa

SEQ ID NO: 110621 - DNA, 25 bp, Canis familiaris
gaacatccccactctggaatatgga

SEQ ID NO: 110622 - DNA, 25 bp, Canis familiaris
gaactctcctcaattccgttaggaa

SEQ ID NO: 110623 - DNA, 25 bp, Canis familiaris
gaactcttacacaccgttgatggga

SEQ ID NO: 110624 - DNA, 25 bp, Canis familiaris
gaactggaaccaactgcttcagggg

SEQ ID NO: 110625 - DNA, 25 bp, Canis familiaris
gaactaatcccaaatgctttgggtt

SEQ ID NO: 110626 - DNA, 25 bp, Canis familiaris
gaaaaactggagagtctggggattt

SEQ ID NO: 110627 - DNA, 25 bp, Canis familiaris
gaaaactatgcataccctggggttc

SEQ ID NO: 110628 - DNA, 25 bp, Canis familiaris
gaacataggatgggcccgatgcagg

SEQ ID NO: 110629 - DNA, 25 bp, Canis familiaris
gaacccactgcaattcaagctcagg

SEQ ID NO: 110630 - DNA, 25 bp, Canis familiaris
gaacgccaacatgccaagctatcaa

SEQ ID NO: 110631 - DNA, 25 bp, Canis familiaris
gaacccaatctgactaatgcaacca

SEQ ID NO: 110632 - DNA, 25 bp, Canis familiaris
gaacccatttgaatagtcacgagag

SEQ ID NO: 110633 - DNA, 25 bp, Canis familiaris
gaacccagtatgttttccctgaggt

SEQ ID NO: 110634 - DNA, 25 bp, Canis familiaris
gaacaaaaaggcgggcccagggcat

SEQ ID NO: 110635 - DNA, 25 bp, Canis familiaris
gaacaaagggaggggctgccagacc

SEQ ID NO: 110636 - DNA, 25 bp, Canis familiaris
gaacgcgaggggcgagtggtggcgc

SEQ ID NO: 110637 - DNA, 25 bp, Canis familiaris
gaacgagggggaggcagggtgtaca

SEQ ID NO: 110638 - DNA, 25 bp, Canis familiaris
gaaagggacgtgtgccggtgtccaa

SEQ ID NO: 110639 - DNA, 25 bp, Canis familiaris
gaacagggacttgagccaggctctc

SEQ ID NO: 110640 - DNA, 25 bp, Canis familiaris
gaacttggagttgcagacactttct

SEQ ID NO: 110641 - DNA, 25 bp, Canis familiaris
gaactgtagtgcttacactgccttg

SEQ ID NO: 110642 - DNA, 25 bp, Canis familiaris
gaacgtgagtgattccctccagatt

SEQ ID NO: 110643 - DNA, 25 bp, Canis familiaris
gaacgctagtatacatcccacatta

SEQ ID NO: 110644 - DNA, 25 bp, Canis familiaris
gaacctgtcataaccaccatatatc

SEQ ID NO: 110645 - DNA, 25 bp, Canis familiaris
gaacgctataaacccaattattttg

SEQ ID NO: 110646 - DNA, 25 bp, Canis familiaris
gaactgctcaaaacccaggtgcttt

SEQ ID NO: 110647 - DNA, 25 bp, Canis familiaris
gaactctccaaagtagacgccgttt

SEQ ID NO: 110648 - DNA, 25 bp, Canis familiaris
gaacttcaaaggagccccttattct

SEQ ID NO: 110649 - DNA, 25 bp, Canis familiaris
gaactgtagcagtggtcactccttt

SEQ ID NO: 110650 - DNA, 25 bp, Canis familiaris
gaacagtccattcaataccctatac

SEQ ID NO: 110651 - DNA, 25 bp, Canis familiaris
gaacgcttctgattaagacggttga

SEQ ID NO: 110652 - DNA, 25 bp, Canis familiaris
gaacgctgttcatttaccaagttga

SEQ ID NO: 110653 - DNA, 25 bp, Canis familiaris
gaactctcttgctgatagtcaatga

SEQ ID NO: 110654 - DNA, 25 bp, Canis familiaris
gaacgctctgtggccagtgtaaaga

SEQ ID NO: 110655 - DNA, 25 bp, Canis familiaris
gaacgtgtatgtctgtggctgaaag

SEQ ID NO: 110656 - DNA, 25 bp, Canis familiaris
gaacatgcccttcctgggcagaaat

SEQ ID NO: 110657 - DNA, 25 bp, Canis familiaris
gaacaggtctgtgctggacgagttt

SEQ ID NO: 110658 - DNA, 25 bp, Canis familiaris
gaacatggtcctgttgggcacattg

SEQ ID NO: 110659 - DNA, 25 bp, Canis familiaris
gaactggcaggtaattgggcacgta

SEQ ID NO: 110660 - DNA, 25 bp, Canis familiaris
gaaccgaatgtgatgtggagtgctt

SEQ ID NO: 110661 - DNA, 25 bp, Canis familiaris
gaacgtactgttctggagtcatgtt

SEQ ID NO: 110662 - DNA, 25 bp, Canis familiaris
gaacgtaagttaataggtcgctctt

SEQ ID NO: 110663 - DNA, 25 bp, Canis familiaris
gaactgtagacttaggggtcctctt

SEQ ID NO: 110664 - DNA, 25 bp, Canis familiaris
gaactccaagcctggaggattccct

SEQ ID NO: 110665 - DNA, 25 bp, Canis familiaris
gaaccgccgccaagatgcaagattt

SEQ ID NO: 110666 - DNA, 25 bp, Canis familiaris
gaaccgcccacaggtaagctgttgt

SEQ ID NO: 110667 - DNA, 25 bp, Canis familiaris
gaacgcgggacaggcaacagtttga

SEQ ID NO: 110668 - DNA, 25 bp, Canis familiaris
gaacgggagagatcaacattgcagt

SEQ ID NO: 110669 - DNA, 25 bp, Canis familiaris
gaaccgggcatgcaatagcttgagg

SEQ ID NO: 110670 - DNA, 25 bp, Canis familiaris
gaacgcggagcttgatggagttgag

SEQ ID NO: 110671 - DNA, 25 bp, Canis familiaris
gaacgccagatgcggtgcaatggaa

SEQ ID NO: 110672 - DNA, 25 bp, Canis familiaris
gaacccagatgcaagtgtgagaggc

SEQ ID NO: 110673 - DNA, 25 bp, Canis familiaris
gaactcgcaggcagtgctgggtggc

SEQ ID NO: 110674 - DNA, 25 bp, Canis familiaris
gaacttctgacatgggtggctatgc

SEQ ID NO: 110675 - DNA, 25 bp, Canis familiaris
gaactacgactacgggagctactcc

SEQ ID NO: 110676 - DNA, 25 bp, Canis familiaris
gaactccgaaatcctggagtcctgg

SEQ ID NO: 110677 - DNA, 25 bp, Canis familiaris
gaactacgagacctgcaggaggcgt

SEQ ID NO: 110678 - DNA, 25 bp, Canis familiaris
gaactgaggataagtgcacggttgt

SEQ ID NO: 110679 - DNA, 25 bp, Canis familiaris
gaactcagtgcctgtgatctacttg

SEQ ID NO: 110680 - DNA, 25 bp, Canis familiaris
gaactcgatatctagattctgagac

SEQ ID NO: 110681 - DNA, 25 bp, Canis familiaris
gaactcagctctgagcacctgttct

SEQ ID NO: 110682 - DNA, 25 bp, Canis familiaris
gaacatcccatgtgctccatgattc

SEQ ID NO: 110683 - DNA, 25 bp, Canis familiaris
gaaccccagttggcattgtcatcag

SEQ ID NO: 110684 - DNA, 25 bp, Canis familiaris
gaacggacagatcaattttatgttg

SEQ ID NO: 110685 - DNA, 25 bp, Canis familiaris
gaactgggaaaaatttgttctgctt

SEQ ID NO: 110686 - DNA, 25 bp, Canis familiaris
gaacgaaaatctattcgcttctttc

SEQ ID NO: 110687 - DNA, 25 bp, Canis familiaris
gaacgaaaatctattcgcttctttc

SEQ ID NO: 110688 - DNA, 25 bp, Canis familiaris
gaacgaaaatctattcgcttctttc

SEQ ID NO: 110689 - DNA, 25 bp, Canis familiaris
gaacccaaattgttgctttatctat

SEQ ID NO: 110690 - DNA, 25 bp, Canis familiaris
gaacccaagtgcttctctttgttct

SEQ ID NO: 110691 - DNA, 25 bp, Canis familiaris
gaacccacagtgattttctcttgga

SEQ ID NO: 110692 - DNA, 25 bp, Canis familiaris
gaaccccagtcagtacattctaaga

SEQ ID NO: 110693 - DNA, 25 bp, Canis familiaris
gaactaccagaccaacattcttaga

SEQ ID NO: 110694 - DNA, 25 bp, Canis familiaris
gaactcctgcaactcaacaacaaaa

SEQ ID NO: 110695 - DNA, 25 bp, Canis familiaris
gaaccctcaagaaaagacaacaagc

SEQ ID NO: 110696 - DNA, 25 bp, Canis familiaris
gaaccctcaagatttactcaacaag

SEQ ID NO: 110697 - DNA, 25 bp, Canis familiaris
gaacgactgaagaattgacagaaga

SEQ ID NO: 110698 - DNA, 25 bp, Canis familiaris
gaacgagctggaagcactggagaag

SEQ ID NO: 110699 - DNA, 25 bp, Canis familiaris
gaactggctgccttcgcagaagaac

SEQ ID NO: 110700 - DNA, 25 bp, Canis familiaris
gaactgggcgagggcaaagccccta

SEQ ID NO: 110701 - DNA, 25 bp, Canis familiaris
gaactgggggaggcagtcctcctac

SEQ ID NO: 110702 - DNA, 25 bp, Canis familiaris
gaacgtggtggacaccatcctcttc

SEQ ID NO: 110703 - DNA, 25 bp, Canis familiaris
gaacgggggacccgactcattgtgg

SEQ ID NO: 110704 - DNA, 25 bp, Canis familiaris
gaacgtggggatgctgtggccaagg

SEQ ID NO: 110705 - DNA, 25 bp, Canis familiaris
gaacggtgtgagaccagggcgaatt

SEQ ID NO: 110706 - DNA, 25 bp, Canis familiaris
gaacggtgtgagtccaagctacaag

SEQ ID NO: 110707 - DNA, 25 bp, Canis familiaris
gaacggcaggagtccaagacacatt

SEQ ID NO: 110708 - DNA, 25 bp, Canis familiaris
gaacggccatggtccaggcatgaat

SEQ ID NO: 110709 - DNA, 25 bp, Canis familiaris
gaacccacagtgttgcagtgataca

SEQ ID NO: 110710 - DNA, 25 bp, Canis familiaris
gactttccaatgttcgtacaactcc

SEQ ID NO: 110711 - DNA, 25 bp, Canis familiaris
gacagtggcgacggttgtacaactt

SEQ ID NO: 110712 - DNA, 25 bp, Canis familiaris
gacagtagagaagtttttactttct

SEQ ID NO: 110713 - DNA, 25 bp, Canis familiaris
gaacttggaaaccctttctgttgct

SEQ ID NO: 110714 - DNA, 25 bp, Canis familiaris
gaacactgtaaaacctcccgtgtct

SEQ ID NO: 110715 - DNA, 25 bp, Canis familiaris
gaacattcttaaccctacaaatggt

SEQ ID NO: 110716 - DNA, 25 bp, Canis familiaris
gaacattcctaattccctcaagagc

SEQ ID NO: 110717 - DNA, 25 bp, Canis familiaris
gaacttactcaattcctatcaccac

SEQ ID NO: 110718 - DNA, 25 bp, Canis familiaris
gaacttccatcaggtcttatacaaa

SEQ ID NO: 110719 - DNA, 25 bp, Canis familiaris
gaacttccaacgtgtagcaatactc

SEQ ID NO: 110720 - DNA, 25 bp, Canis familiaris
gaacttccacctgtgtgtgtagcct

SEQ ID NO: 110721 - DNA, 25 bp, Canis familiaris
gaacttgcccttgtggatgttttag

SEQ ID NO: 110722 - DNA, 25 bp, Canis familiaris
gaacttcttcctgcaggagtttggg

SEQ ID NO: 110723 - DNA, 25 bp, Canis familiaris
gaactcgttttgtaggagaatatgg

SEQ ID NO: 110724 - DNA, 25 bp, Canis familiaris
gaacgggtgttctgcgagattgagg

SEQ ID NO: 110725 - DNA, 25 bp, Canis familiaris
gaaccgcaggttcagacatttggtg

SEQ ID NO: 110726 - DNA, 25 bp, Canis familiaris
gaactcttggtaaggcctttggctg

SEQ ID NO: 110727 - DNA, 25 bp, Canis familiaris
gaactgcttgttttggcttttactg

SEQ ID NO: 110728 - DNA, 25 bp, Canis familiaris
gaactgcttaatttttggattttat

SEQ ID NO: 110729 - DNA, 25 bp, Canis familiaris
gaacgcattctattttctgcctttt

SEQ ID NO: 110730 - DNA, 25 bp, Canis familiaris
gaacgttctacgtcgaggcttcttt

SEQ ID NO: 110731 - DNA, 25 bp, Canis familiaris
gaacagtttgggtggactgtctata

SEQ ID NO: 110732 - DNA, 25 bp, Canis familiaris
gaacgttctgtttacgactgtcttt

SEQ ID NO: 110733 - DNA, 25 bp, Canis familiaris
gaacggtcagtttgggagctggtgc

SEQ ID NO: 110734 - DNA, 25 bp, Canis familiaris
gaacgagccgtttagctgggtgtcc

SEQ ID NO: 110735 - DNA, 25 bp, Canis familiaris
gaacgagcacgttaactgggtgtcc

SEQ ID NO: 110736 - DNA, 25 bp, Canis familiaris
gaacgcacagaagaacgggctgagc

SEQ ID NO: 110737 - DNA, 25 bp, Canis familiaris
gaacagtcagaagcccagctgggac

SEQ ID NO: 110738 - DNA, 25 bp, Canis familiaris
gaacagctctgatgctcctaggctg

SEQ ID NO: 110739 - DNA, 25 bp, Canis familiaris
gaacagcctggaggcctttgtcgga

SEQ ID NO: 110740 - DNA, 25 bp, Canis familiaris
gaacgcaatgtgtcggttggcacgg

SEQ ID NO: 110741 - DNA, 25 bp, Canis familiaris
gaacgaggtgctggtcgtggatcgt

SEQ ID NO: 110742 - DNA, 25 bp, Canis familiaris
gaacgatgcgtgcatgccgggatgt

SEQ ID NO: 110743 - DNA, 25 bp, Canis familiaris
gaacagcagcggaagcagcgggagc

SEQ ID NO: 110744 - DNA, 25 bp, Canis familiaris
gaaacagcttaccaggtggacattt

SEQ ID NO: 110745 - DNA, 25 bp, Canis familiaris
gaacccctactgaggaggcatttta

SEQ ID NO: 110746 - DNA, 25 bp, Canis familiaris
gaacccatcttcaaaaggcacattt

SEQ ID NO: 110747 - DNA, 25 bp, Canis familiaris
gaacggtcttcaaacccacattatc

SEQ ID NO: 110748 - DNA, 25 bp, Canis familiaris
gaacgactttatctgtccaagaatc

SEQ ID NO: 110749 - DNA, 25 bp, Canis familiaris
gaaccctacatatgtgatccaaaaa

SEQ ID NO: 110750 - DNA, 25 bp, Canis familiaris
gaacccaaaagtttctgcacataaa

SEQ ID NO: 110751 - DNA, 25 bp, Canis familiaris
gaacttaaaatggttctactgccaa

SEQ ID NO: 110752 - DNA, 25 bp, Canis familiaris
gaactagaaattgggttcttcaaca

SEQ ID NO: 110753 - DNA, 25 bp, Canis familiaris
gaactagtttttggtattattgatc

SEQ ID NO: 110754 - DNA, 25 bp, Canis familiaris
gaactgttttctactgaatttttca

SEQ ID NO: 110755 - DNA, 25 bp, Canis familiaris
gaacgtttatcaactcatttccttc

SEQ ID NO: 110756 - DNA, 25 bp, Canis familiaris
gaacatttttgaacatttacctgcc

SEQ ID NO: 110757 - DNA, 25 bp, Canis familiaris
gaactgctttctcacattattctag

SEQ ID NO: 110758 - DNA, 25 bp, Canis familiaris
gaactgttgtttctttgactcagga

SEQ ID NO: 110759 - DNA, 25 bp, Canis familiaris
gaacggtgctgctttatttgaaatg

SEQ ID NO: 110760 - DNA, 25 bp, Canis familiaris
gaacgcgtgctgttttattgccatt

SEQ ID NO: 110761 - DNA, 25 bp, Canis familiaris
gaacgcagttccttttagtcttgac

SEQ ID NO: 110762 - DNA, 25 bp, Canis familiaris
gaactgcaagacaactttgggctgg

SEQ ID NO: 110763 - DNA, 25 bp, Canis familiaris
gaactgcagaaaatgcttcaggaag

SEQ ID NO: 110764 - DNA, 25 bp, Canis familiaris
gaactcagcagaatctttcaccatg

SEQ ID NO: 110765 - DNA, 25 bp, Canis familiaris
gaacccatcatatttctgcaacaga

SEQ ID NO: 110766 - DNA, 25 bp, Canis familiaris
gaacccagcgttatgtacatgatgt

SEQ ID NO: 110767 - DNA, 25 bp, Canis familiaris
gaacccggtcacagaagatgactat

SEQ ID NO: 110768 - DNA, 25 bp, Canis familiaris
gaacccggttctaaaagaatgtatg

SEQ ID NO: 110769 - DNA, 25 bp, Canis familiaris
gaaccctgccctcttggagagggag

SEQ ID NO: 110770 - DNA, 25 bp, Canis familiaris
gaacgggactccctgtagggaggag

SEQ ID NO: 110771 - DNA, 25 bp, Canis familiaris
gaacgtggatcccacttgaggctgg

SEQ ID NO: 110772 - DNA, 25 bp, Canis familiaris
gaacgtggtgctcgagctgtgagag

SEQ ID NO: 110773 - DNA, 25 bp, Canis familiaris
gaacgcgtggtgctgcgagaagcca

SEQ ID NO: 110774 - DNA, 25 bp, Canis familiaris
gaacgctgggatcatgcccaatcca

SEQ ID NO: 110775 - DNA, 25 bp, Canis familiaris
gaactctgggactatcacaaatgct

SEQ ID NO: 110776 - DNA, 25 bp, Canis familiaris
gaactctgggcatctgaatcgagct

SEQ ID NO: 110777 - DNA, 25 bp, Canis familiaris
gaacgtgagtgtgtgcatatctgga

SEQ ID NO: 110778 - DNA, 25 bp, Canis familiaris
gaactgtcatcatttatcatacatg

SEQ ID NO: 110779 - DNA, 25 bp, Canis familiaris
gaactgtatcatagctcactactgc

SEQ ID NO: 110780 - DNA, 25 bp, Canis familiaris
gaactgtttgtgtcaattggccatt

SEQ ID NO: 110781 - DNA, 25 bp, Canis familiaris
gaactttatggagcttgtgcacctg

SEQ ID NO: 110782 - DNA, 25 bp, Canis familiaris
gaactttcttgagccaggacctagg

SEQ ID NO: 110783 - DNA, 25 bp, Canis familiaris
gaactttctgtcaccaccaataagg

SEQ ID NO: 110784 - DNA, 25 bp, Canis familiaris
gaactcttctggaacccttacaaga

SEQ ID NO: 110785 - DNA, 25 bp, Canis familiaris
gacccttacttaccatttgaaagat

SEQ ID NO: 110786 - DNA, 25 bp, Canis familiaris
tggtcaagtacttacccttaaagtg

SEQ ID NO: 110787 - DNA, 25 bp, Canis familiaris
gagtaagttccttaccttacaggat

SEQ ID NO: 110788 - DNA, 25 bp, Canis familiaris
gaacaagttgttggatcctatccgg

SEQ ID NO: 110789 - DNA, 25 bp, Canis familiaris
gaacactgatttaaaccgtcctctg

SEQ ID NO: 110790 - DNA, 25 bp, Canis familiaris
gaactcacatttgaactcaggcctt

SEQ ID NO: 110791 - DNA, 25 bp, Canis familiaris
gaactcaacttctaatgtactgtca

SEQ ID NO: 110792 - DNA, 25 bp, Canis familiaris
gaactcaactagtaaacctggcaac

SEQ ID NO: 110793 - DNA, 25 bp, Canis familiaris
gaactacatcaaccgaaccgtggca

SEQ ID NO: 110794 - DNA, 25 bp, Canis familiaris
gaacgaacacaagagaaggggcagg

SEQ ID NO: 110795 - DNA, 25 bp, Canis familiaris
gaacgaaccacagaatccaggagca

SEQ ID NO: 110796 - DNA, 25 bp, Canis familiaris
gaacgaacagactcaggcgatgtgc

SEQ ID NO: 110797 - DNA, 25 bp, Canis familiaris
gaacagaactgaaccggctttacca

SEQ ID NO: 110798 - DNA, 25 bp, Canis familiaris
gaacagatacatgtctcatccttta

SEQ ID NO: 110799 - DNA, 25 bp, Canis familiaris
gactcaaactggtgacacggtagct

SEQ ID NO: 110800 - DNA, 25 bp, Canis familiaris
gattacccatcgtgacaccagtatt

SEQ ID NO: 110801 - DNA, 25 bp, Canis familiaris
gaacaccaaatgagaaccagatata

SEQ ID NO: 110802 - DNA, 25 bp, Canis familiaris
gaactccaaatttgttccaataaca

SEQ ID NO: 110803 - DNA, 25 bp, Canis familiaris
gaacgtccattttttccagtgacta

SEQ ID NO: 110804 - DNA, 25 bp, Canis familiaris
gaacttggtgtttttgccaggcact

SEQ ID NO: 110805 - DNA, 25 bp, Canis familiaris
gaacttggtgttcatatgtatcttc

SEQ ID NO: 110806 - DNA, 25 bp, Canis familiaris
gaacatttgtgtcctagattaccat

SEQ ID NO: 110807 - DNA, 25 bp, Canis familiaris
gaactatttgtaatgaaatcctcaa

SEQ ID NO: 110808 - DNA, 25 bp, Canis familiaris
gaactgtctccatttattcatccat

SEQ ID NO: 110809 - DNA, 25 bp, Canis familiaris
gaacgcatccactttcatggaaaca

SEQ ID NO: 110810 - DNA, 25 bp, Canis familiaris
gaactcccaattactggactaatgg

SEQ ID NO: 110811 - DNA, 25 bp, Canis familiaris
gaactcccaggaaagtgcagccgag

SEQ ID NO: 110812 - DNA, 25 bp, Canis familiaris
gaactcctcgaaagcaagcagcctc

SEQ ID NO: 110813 - DNA, 25 bp, Canis familiaris
gaacttgaccaaggccacagcctca

SEQ ID NO: 110814 - DNA, 25 bp, Canis familiaris
gaacttggacacagacatcatcctc

SEQ ID NO: 110815 - DNA, 25 bp, Canis familiaris
gaactgagagaccctgaacaccttc

SEQ ID NO: 110816 - DNA, 25 bp, Canis familiaris
gaacttgaaccggcaacccaatgct

SEQ ID NO: 110817 - DNA, 25 bp, Canis familiaris
gaacacgtacatgggctacctagac

SEQ ID NO: 110818 - DNA, 25 bp, Canis familiaris
gaactcgtcacctcaacattatgaa

SEQ ID NO: 110819 - DNA, 25 bp, Canis familiaris
gaacacggactacacacagtgcagt

SEQ ID NO: 110820 - DNA, 25 bp, Canis familiaris
gaactgggaccagagctcagtggtg

SEQ ID NO: 110821 - DNA, 25 bp, Canis familiaris
gaacatgggggacacatatggtgga

SEQ ID NO: 110822 - DNA, 25 bp, Canis familiaris
gaactggttgtacccatagttgcta

SEQ ID NO: 110823 - DNA, 25 bp, Canis familiaris
gaacttttaagatatagctggctac

SEQ ID NO: 110824 - DNA, 25 bp, Canis familiaris
gaacttttgagatggcaacttggac

SEQ ID NO: 110825 - DNA, 25 bp, Canis familiaris
gaacttttgagatgatccctaacat

SEQ ID NO: 110826 - DNA, 25 bp, Canis familiaris
gaacggtctggatgatcctcttaag

SEQ ID NO: 110827 - DNA, 25 bp, Canis familiaris
gaacatggtcatcgacgagactctg

SEQ ID NO: 110828 - DNA, 25 bp, Canis familiaris
gaactggtgatccatacacacctgg

SEQ ID NO: 110829 - DNA, 25 bp, Canis familiaris
gaacatggaacttacatcaccttct

SEQ ID NO: 110830 - DNA, 25 bp, Canis familiaris
gaacggcaagatgcacatcaccctt

SEQ ID NO: 110831 - DNA, 25 bp, Canis familiaris
gaacaggcctatgatctggcccgtc

SEQ ID NO: 110832 - DNA, 25 bp, Canis familiaris
gaacgagagctcgtcttgagcgcac

SEQ ID NO: 110833 - DNA, 25 bp, Canis familiaris
gaactgcaggtcccttagggctgct

SEQ ID NO: 110834 - DNA, 25 bp, Canis familiaris
gaactgaggtaccggcgggcattca

SEQ ID NO: 110835 - DNA, 25 bp, Canis familiaris
gaactggaaatggcaacggtcttat

SEQ ID NO: 110836 - DNA, 25 bp, Canis familiaris
gaactcaaactggcacacagctgac

SEQ ID NO: 110837 - DNA, 25 bp, Canis familiaris
gaactcaacatagagcctgctgatc

SEQ ID NO: 110838 - DNA, 25 bp, Canis familiaris
gaactcacagcaacagtcctggcaa

SEQ ID NO: 110839 - DNA, 25 bp, Canis familiaris
gacactaatgaaggtgtgggccaag

SEQ ID NO: 110840 - DNA, 25 bp, Canis familiaris
gaactatagaaccttatggatcaac

SEQ ID NO: 110841 - DNA, 25 bp, Canis familiaris
gaacttaaacctaagctctctccta

SEQ ID NO: 110842 - DNA, 25 bp, Canis familiaris
gaactagactactttattcacccta

SEQ ID NO: 110843 - DNA, 25 bp, Canis familiaris
gaactagtctaaagctttcacatta

SEQ ID NO: 110844 - DNA, 25 bp, Canis familiaris
gaacgagtggagtctgtcttcagtt

SEQ ID NO: 110845 - DNA, 25 bp, Canis familiaris
gaacggttgcagtgtctctgagtga

SEQ ID NO: 110846 - DNA, 25 bp, Canis familiaris
gaacgtgtgtcaccgttcgcagagc

SEQ ID NO: 110847 - DNA, 25 bp, Canis familiaris
gaacggattcagctgctttcagagc

SEQ ID NO: 110848 - DNA, 25 bp, Canis familiaris
gaacgagtgttcatgctcttcacag

SEQ ID NO: 110849 - DNA, 25 bp, Canis familiaris
gaactagttacagtcttgctacgat

SEQ ID NO: 110850 - DNA, 25 bp, Canis familiaris
gaactatgtttcttgaggctgactg

SEQ ID NO: 110851 - DNA, 25 bp, Canis familiaris
gaacttggactttgactctgagcgg

SEQ ID NO: 110852 - DNA, 25 bp, Canis familiaris
gaactgatgtcctagagtcctgagt

SEQ ID NO: 110853 - DNA, 25 bp, Canis familiaris
gaactctatgccagtgatcctgagt

SEQ ID NO: 110854 - DNA, 25 bp, Canis familiaris
gaacatcaatcgtgtgtcctgattt

SEQ ID NO: 110855 - DNA, 25 bp, Canis familiaris
gaactcgatggaatgcttttatttt

SEQ ID NO: 110856 - DNA, 25 bp, Canis familiaris
gaactggatggatgcatatcacatt

SEQ ID NO: 110857 - DNA, 25 bp, Canis familiaris
gaacggcgtgcattatcaacatcat

SEQ ID NO: 110858 - DNA, 25 bp, Canis familiaris
gaacggcgtgcattatcaacatcat

SEQ ID NO: 110859 - DNA, 25 bp, Canis familiaris
gaacggtggcatttctaaaccagtt

SEQ ID NO: 110860 - DNA, 25 bp, Canis familiaris
gaactggttcattttacaacttgtt

SEQ ID NO: 110861 - DNA, 25 bp, Canis familiaris
gaacagagtgttatcagcaaagctt

SEQ ID NO: 110862 - DNA, 25 bp, Canis familiaris
gaacagaggttttcagaggttgata

SEQ ID NO: 110863 - DNA, 25 bp, Canis familiaris
gaacgagcagtttatctgggtggtc

SEQ ID NO: 110864 - DNA, 25 bp, Canis familiaris
gaacgagcagttttactggggtgtc

SEQ ID NO: 110865 - DNA, 25 bp, Canis familiaris
gaacggagcagtttagcctgggttg

SEQ ID NO: 110866 - DNA, 25 bp, Canis familiaris
gaacggagcagtttaactgggtgtc

SEQ ID NO: 110867 - DNA, 25 bp, Canis familiaris
gaacgagaatttaaagcatggggag

SEQ ID NO: 110868 - DNA, 25 bp, Canis familiaris
gaactgaggtttgggacgggctgtg

SEQ ID NO: 110869 - DNA, 25 bp, Canis familiaris
gaactgacaggttctggaccctgga

SEQ ID NO: 110870 - DNA, 25 bp, Canis familiaris
gaacgaaacatatttgaacctggca

SEQ ID NO: 110871 - DNA, 25 bp, Canis familiaris
gaaaacttagatcatgtacctggca

SEQ ID NO: 110872 - DNA, 25 bp, Canis familiaris
gaactacgtatttgtttccagtatg

SEQ ID NO: 110873 - DNA, 25 bp, Canis familiaris
gaactatgcagttttgtttctaagt

SEQ ID NO: 110874 - DNA, 25 bp, Canis familiaris
gaactagatgtcttttttccaggca

SEQ ID NO: 110875 - DNA, 25 bp, Canis familiaris
gaactaattcaatctctatcgggaa

SEQ ID NO: 110876 - DNA, 25 bp, Canis familiaris
gaacattttattgcctagttgacaa

SEQ ID NO: 110877 - DNA, 25 bp, Canis familiaris
gaacatttttcttttagtgtccttg

SEQ ID NO: 110878 - DNA, 25 bp, Canis familiaris
gaacattgtcccttctgtaggtcag

SEQ ID NO: 110879 - DNA, 25 bp, Canis familiaris
gaactgttctcgttttcagtccatg

SEQ ID NO: 110880 - DNA, 25 bp, Canis familiaris
gaacgatgttccatttcagtctcaa

SEQ ID NO: 110881 - DNA, 25 bp, Canis familiaris
gaactgtgtttaaataaatgccaat

SEQ ID NO: 110882 - DNA, 25 bp, Canis familiaris
gaacatctattaataaaagcatcca

SEQ ID NO: 110883 - DNA, 25 bp, Canis familiaris
gaactgcttcattcaaccaactcaa

SEQ ID NO: 110884 - DNA, 25 bp, Canis familiaris
gaactgtttaattcacattcatcaa

SEQ ID NO: 110885 - DNA, 25 bp, Canis familiaris
gaacatttcatattaagtctggcaa

SEQ ID NO: 110886 - DNA, 25 bp, Canis familiaris
gaacttaactgtaaggaggaatccg

SEQ ID NO: 110887 - DNA, 25 bp, Canis familiaris
gacctaacctggagcgaggacctgc

SEQ ID NO: 110888 - DNA, 25 bp, Canis familiaris
gaactatacctgtagacttggaggg

SEQ ID NO: 110889 - DNA, 25 bp, Canis familiaris
gaactaagccataatgcctcttgag

SEQ ID NO: 110890 - DNA, 25 bp, Canis familiaris
gaactacaggaagcccttggcactg

SEQ ID NO: 110891 - DNA, 25 bp, Canis familiaris
gaactagggtcagggcctgtggcca

SEQ ID NO: 110892 - DNA, 25 bp, Canis familiaris
gaactggagaagcgtgcctcaggcc

SEQ ID NO: 110893 - DNA, 25 bp, Canis familiaris
gaactgtaaccaggtgcctacactc

SEQ ID NO: 110894 - DNA, 25 bp, Canis familiaris
gaactctaagtctttcctaatccca

SEQ ID NO: 110895 - DNA, 25 bp, Canis familiaris
gaactatttctattctttttgccca

SEQ ID NO: 110896 - DNA, 25 bp, Canis familiaris
gaactgatttcttggtttctctctc

SEQ ID NO: 110897 - DNA, 25 bp, Canis familiaris
gaaaatcttccaaggatcccttcac

SEQ ID NO: 110898 - DNA, 25 bp, Canis familiaris
gaaaataaccaacatccgtgtccgg

SEQ ID NO: 110899 - DNA, 25 bp, Canis familiaris
gaaaatgtatcccatttcctgtctc

SEQ ID NO: 110900 - DNA, 25 bp, Canis familiaris
gacaagtaaaccttttctgagccct

SEQ ID NO: 110901 - DNA, 25 bp, Canis familiaris
gaacgtatagcatcttctcattccc

SEQ ID NO: 110902 - DNA, 25 bp, Canis familiaris
gaacaggatggaccattctacccgg

SEQ ID NO: 110903 - DNA, 25 bp, Canis familiaris
gaacaggagggaggtctccccggct

SEQ ID NO: 110904 - DNA, 25 bp, Canis familiaris
gaacaaagggtggtctggcctgggc

SEQ ID NO: 110905 - DNA, 25 bp, Canis familiaris
gaacaaagtagtggagggcaggctg

SEQ ID NO: 110906 - DNA, 25 bp, Canis familiaris
gaacatgaaggggcctttcggctga

SEQ ID NO: 110907 - DNA, 25 bp, Canis familiaris
gaacttccttgaggctgattctggc

SEQ ID NO: 110908 - DNA, 25 bp, Canis familiaris
gaacttccccagcatcatggatgga

SEQ ID NO: 110909 - DNA, 25 bp, Canis familiaris
gaacttgaccaacatcctatggaca

SEQ ID NO: 110910 - DNA, 25 bp, Canis familiaris
gaacgtacaccaccttgtcaggaat

SEQ ID NO: 110911 - DNA, 25 bp, Canis familiaris
gaacggatacaaatcctgccaaaaa

SEQ ID NO: 110912 - DNA, 25 bp, Canis familiaris
gaacttaacagcagccttctaaatt

SEQ ID NO: 110913 - DNA, 25 bp, Canis familiaris
gaacttgaaatcccttctctaataa

SEQ ID NO: 110914 - DNA, 25 bp, Canis familiaris
gaactgattcacttccttgactaaa

SEQ ID NO: 110915 - DNA, 25 bp, Canis familiaris
gaacatgcggactctctggattaat

SEQ ID NO: 110916 - DNA, 25 bp, Canis familiaris
gaactgcatggatatcgatgtgtgt

SEQ ID NO: 110917 - DNA, 25 bp, Canis familiaris
gaactgctgctattatcacagcctt

SEQ ID NO: 110918 - DNA, 25 bp, Canis familiaris
gaacttgccagaatctcagcacttg

SEQ ID NO: 110919 - DNA, 25 bp, Canis familiaris
gaactatctgcattatctatgcagc

SEQ ID NO: 110920 - DNA, 25 bp, Canis familiaris
gaactacaccttgacgacaggggta

SEQ ID NO: 110921 - DNA, 25 bp, Canis familiaris
gagttagtccttgaccactagtttg

SEQ ID NO: 110922 - DNA, 25 bp, Canis familiaris
gaggttgaatttggcccctagtacg

SEQ ID NO: 110923 - DNA, 25 bp, Canis familiaris
gaacattgaattggcctgccctggt

SEQ ID NO: 110924 - DNA, 25 bp, Canis familiaris
gaacatgaaaagttctgccctgcct

SEQ ID NO: 110925 - DNA, 25 bp, Canis familiaris
gaactgtatgactttctgctgctat

SEQ ID NO: 110926 - DNA, 25 bp, Canis familiaris
gaactgcatatgtttcgctgatata

SEQ ID NO: 110927 - DNA, 25 bp, Canis familiaris
gaactcatcagattgaggctgttcc

SEQ ID NO: 110928 - DNA, 25 bp, Canis familiaris
gaactacagatgttggctggcccac

SEQ ID NO: 110929 - DNA, 25 bp, Canis familiaris
gaactccagatgttgtgcagtggtt

SEQ ID NO: 110930 - DNA, 25 bp, Canis familiaris
gaacatacaggcttgcaaggagctt

SEQ ID NO: 110931 - DNA, 25 bp, Canis familiaris
gaactatagtgcctgcagcggtgtc

SEQ ID NO: 110932 - DNA, 25 bp, Canis familiaris
gaactatgggctttgggtgttttct

SEQ ID NO: 110933 - DNA, 25 bp, Canis familiaris
gaactgttagctttgggctggtgct

SEQ ID NO: 110934 - DNA, 25 bp, Canis familiaris
gaactgcttcctgatgtatcgttgt

SEQ ID NO: 110935 - DNA, 25 bp, Canis familiaris
gaactgcttttgaatgcttagtctt

SEQ ID NO: 110936 - DNA, 25 bp, Canis familiaris
gaacacttgttttgcctctgaattc

SEQ ID NO: 110937 - DNA, 25 bp, Canis familiaris
gaaagtcttactgacttgcagtatt

SEQ ID NO: 110938 - DNA, 25 bp, Canis familiaris
gaaaatctctacagcagcttccctt

SEQ ID NO: 110939 - DNA, 25 bp, Canis familiaris
gagaagtggtactgacttccccatc

SEQ ID NO: 110940 - DNA, 25 bp, Canis familiaris
gaaaatgacgactgttgtccaccac

SEQ ID NO: 110941 - DNA, 25 bp, Canis familiaris
gaaaatgactccttgtgtttcctct

SEQ ID NO: 110942 - DNA, 25 bp, Canis familiaris
gaactcagtgctgtggggagacctg

SEQ ID NO: 110943 - DNA, 25 bp, Canis familiaris
gaacttctctccaggaaatccagca

SEQ ID NO: 110944 - DNA, 25 bp, Canis familiaris
gacacttgcttgggcaaaaaccaga

SEQ ID NO: 110945 - DNA, 25 bp, Canis familiaris
gaactcatgggtggccaacaaccaa

SEQ ID NO: 110946 - DNA, 25 bp, Canis familiaris
gaactgctggaagctgagaagacgc

SEQ ID NO: 110947 - DNA, 25 bp, Canis familiaris
gaactgagagaagctgcagactgat

SEQ ID NO: 110948 - DNA, 25 bp, Canis familiaris
gaactcaggagatggccactgacct

SEQ ID NO: 110949 - DNA, 25 bp, Canis familiaris
gaactcaggactttcaactacctcg

SEQ ID NO: 110950 - DNA, 25 bp, Canis familiaris
gaacttggcctgttgtacatagcct

SEQ ID NO: 110951 - DNA, 25 bp, Canis familiaris
gaactctgtttgtgctcaatgtggc

SEQ ID NO: 110952 - DNA, 25 bp, Canis familiaris
gaactgcttctttccatatgtgtag

SEQ ID NO: 110953 - DNA, 25 bp, Canis familiaris
gaacagtgacttcccagttgtgatc

SEQ ID NO: 110954 - DNA, 25 bp, Canis familiaris
gaacagtactttggtgctgacatca

SEQ ID NO: 110955 - DNA, 25 bp, Canis familiaris
gaacagtgaccaggagatcgacttc

SEQ ID NO: 110956 - DNA, 25 bp, Canis familiaris
gacacagggaaacactgacttatgt

SEQ ID NO: 110957 - DNA, 25 bp, Canis familiaris
gaacaccaacaacagtacagtcatg

SEQ ID NO: 110958 - DNA, 25 bp, Canis familiaris
gaactcacaaccttgagatcaaaag

SEQ ID NO: 110959 - DNA, 25 bp, Canis familiaris
gaactcactactctagagagcaagc

SEQ ID NO: 110960 - DNA, 25 bp, Canis familiaris
gaactgcctgttttgaagatcagag

SEQ ID NO: 110961 - DNA, 25 bp, Canis familiaris
gaacaggctttgatgacaaccaggc

SEQ ID NO: 110962 - DNA, 25 bp, Canis familiaris
gaacaggtattactactaccaccgg

SEQ ID NO: 110963 - DNA, 25 bp, Canis familiaris
gaacatactatttctcttaccacgt

SEQ ID NO: 110964 - DNA, 25 bp, Canis familiaris
gaacattgcacaaactcttcagcca

SEQ ID NO: 110965 - DNA, 25 bp, Canis familiaris
gaacattcacacagacagctagtca

SEQ ID NO: 110966 - DNA, 25 bp, Canis familiaris
gaactgtaatctagaccatctgtca

SEQ ID NO: 110967 - DNA, 25 bp, Canis familiaris
gaacagtgtagccagaccctgtcat

SEQ ID NO: 110968 - DNA, 25 bp, Canis familiaris
gaacggtagtcaatcgtctctatat

SEQ ID NO: 110969 - DNA, 25 bp, Canis familiaris
gaacttccagtcaatttcccatgat

SEQ ID NO: 110970 - DNA, 25 bp, Canis familiaris
gaactgctctttcttatcttcagaa

SEQ ID NO: 110971 - DNA, 25 bp, Canis familiaris
gaacatgcctttatttcccatgcac

SEQ ID NO: 110972 - DNA, 25 bp, Canis familiaris
gaaacgctatctagctttctacccc

SEQ ID NO: 110973 - DNA, 25 bp, Canis familiaris
gaaaaggtgctactacctcattccc

SEQ ID NO: 110974 - DNA, 25 bp, Canis familiaris
gaacaaggagtccttcctctgaggc

SEQ ID NO: 110975 - DNA, 25 bp, Canis familiaris
gaactgagggtccatgatgaatcgg

SEQ ID NO: 110976 - DNA, 25 bp, Canis familiaris
gaactagagagtacaatgctaagtg

SEQ ID NO: 110977 - DNA, 25 bp, Canis familiaris
gaactaaacatctattgctaagcta

SEQ ID NO: 110978 - DNA, 25 bp, Canis familiaris
gaactgaaaccatttcttctggcaa

SEQ ID NO: 110979 - DNA, 25 bp, Canis familiaris
gaactggacacattcagtcttctcg

SEQ ID NO: 110980 - DNA, 25 bp, Canis familiaris
gaacttgtctgcacagatttctctg

SEQ ID NO: 110981 - DNA, 25 bp, Canis familiaris
gaacagtgcttcgcagtgtttctgc

SEQ ID NO: 110982 - DNA, 25 bp, Canis familiaris
gaactctctaccaatgtgtttctga

SEQ ID NO: 110983 - DNA, 25 bp, Canis familiaris
gacagtttaccatttgccttttatc

SEQ ID NO: 110984 - DNA, 25 bp, Canis familiaris
gaactattacaacttgccttcctga

SEQ ID NO: 110985 - DNA, 25 bp, Canis familiaris
gaactttgagaagcgccttgacaga

SEQ ID NO: 110986 - DNA, 25 bp, Canis familiaris
gaacttgctgagtaccccaggtata

SEQ ID NO: 110987 - DNA, 25 bp, Canis familiaris
gaacttatactcgccatagtggata

SEQ ID NO: 110988 - DNA, 25 bp, Canis familiaris
gaacattgtagctcgcaagattgtg

SEQ ID NO: 110989 - DNA, 25 bp, Canis familiaris
gaacatcttggcgctgaggggagac

SEQ ID NO: 110990 - DNA, 25 bp, Canis familiaris
gagaatctgagctggggcttgggcc

SEQ ID NO: 110991 - DNA, 25 bp, Canis familiaris
gaactgccactaagggcttgcgggc

SEQ ID NO: 110992 - DNA, 25 bp, Canis familiaris
gatactgcggtaagtcgccggttcc

SEQ ID NO: 110993 - DNA, 25 bp, Canis familiaris
ttacggttgttgagcgggggcacct

SEQ ID NO: 110994 - DNA, 25 bp, Canis familiaris
tgtaattaagttcacgggggtcgat

SEQ ID NO: 110995 - DNA, 25 bp, Canis familiaris
gaacaggttttgcatcgggggtagt

SEQ ID NO: 110996 - DNA, 25 bp, Canis familiaris
gaacagcctttgccaatcgtgggtg

SEQ ID NO: 110997 - DNA, 25 bp, Canis familiaris
gaactgctttatggacagcggggac

SEQ ID NO: 110998 - DNA, 25 bp, Canis familiaris
gaacttgcttgaaggccgaggagac

SEQ ID NO: 110999 - DNA, 25 bp, Canis familiaris
gaactctcagtgtggcgcagaagga

SEQ ID NO: 111000 - DNA, 25 bp, Canis familiaris
gaactcttgctgtggtgagaaatgc

SEQ ID NO: 111001 - DNA, 25 bp, Canis familiaris
gaacttctcgtttggatgcaatggc

SEQ ID NO: 111002 - DNA, 25 bp, Canis familiaris
gaacttcatccgtggagcacacagg

SEQ ID NO: 111003 - DNA, 25 bp, Canis familiaris
gaacatttcctattgtgccacaagg

SEQ ID NO: 111004 - DNA, 25 bp, Canis familiaris
gaacatctatttttctacaaaactg

SEQ ID NO: 111005 - DNA, 25 bp, Canis familiaris
gaacatgtatttcttccagaaagga

SEQ ID NO: 111006 - DNA, 25 bp, Canis familiaris
gaactcttcagtctcttcagaaaaa

SEQ ID NO: 111007 - DNA, 25 bp, Canis familiaris
gaactgttcaggttattctgacata

SEQ ID NO: 111008 - DNA, 25 bp, Canis familiaris
gaactcttcggttattctattctta

SEQ ID NO: 111009 - DNA, 25 bp, Canis familiaris
gaacttcagaagcatattcactttt

SEQ ID NO: 111010 - DNA, 25 bp, Canis familiaris
gaactacagcgaccatgatgtcatc

SEQ ID NO: 111011 - DNA, 25 bp, Canis familiaris
gaacacaacgacaatgcgtccgtag

SEQ ID NO: 111012 - DNA, 25 bp, Canis familiaris
gaacagagacattcgggtcctctag

SEQ ID NO: 111013 - DNA, 25 bp, Canis familiaris
gaacaggtgaactggaagctgtgag

SEQ ID NO: 111014 - DNA, 25 bp, Canis familiaris
gaaagcagtacgtgtctacagtagt

SEQ ID NO: 111015 - DNA, 25 bp, Canis familiaris
taatacctgcaaccgttactgtcgt

SEQ ID NO: 111016 - DNA, 25 bp, Canis familiaris
gaaacccaactgcttagctctttaa

SEQ ID NO: 111017 - DNA, 25 bp, Canis familiaris
gaaacctcattctaaaaacttatat

SEQ ID NO: 111018 - DNA, 25 bp, Canis familiaris
gaacagcacgttcacagacacatca

SEQ ID NO: 111019 - DNA, 25 bp, Canis familiaris
gaacatgcgctttgccaagaagcac

SEQ ID NO: 111020 - DNA, 25 bp, Canis familiaris
gaacaggcaaatccactagagacag

SEQ ID NO: 111021 - DNA, 25 bp, Canis familiaris
gaacagtgccagatccgagcaggag

SEQ ID NO: 111022 - DNA, 25 bp, Canis familiaris
gaacaggatatgaatctggagaata

SEQ ID NO: 111023 - DNA, 25 bp, Canis familiaris
gaacatggtatggagtctgagtcaa

SEQ ID NO: 111024 - DNA, 25 bp, Canis familiaris
gaactggttgtgcagccatgtccat

SEQ ID NO: 111025 - DNA, 25 bp, Canis familiaris
gaacaggttgtgcatgcgagacagc

SEQ ID NO: 111026 - DNA, 25 bp, Canis familiaris
gaacatgtttgtccgcaggggcatg

SEQ ID NO: 111027 - DNA, 25 bp, Canis familiaris
gaactgctttgccagctagaggccg

SEQ ID NO: 111028 - DNA, 25 bp, Canis familiaris
gaacatgggatccagcctgatgggc

SEQ ID NO: 111029 - DNA, 25 bp, Canis familiaris
gaacatctggtcgtggtgtgggggt

SEQ ID NO: 111030 - DNA, 25 bp, Canis familiaris
gaacacgcacatcgtggtgagctgg

SEQ ID NO: 111031 - DNA, 25 bp, Canis familiaris
gaacacagtcagcttgacatgcctg

SEQ ID NO: 111032 - DNA, 25 bp, Canis familiaris
gaacagcagctgtctcttgagatgt

SEQ ID NO: 111033 - DNA, 25 bp, Canis familiaris
gaacagatgctgtctcttgtgtatg

SEQ ID NO: 111034 - DNA, 25 bp, Canis familiaris
gaacatatgctgtttgggggcagaa

SEQ ID NO: 111035 - DNA, 25 bp, Canis familiaris
gaactcatgatgccgggtggccaag

SEQ ID NO: 111036 - DNA, 25 bp, Canis familiaris
gaactcacagctcatagtgtcgacg

SEQ ID NO: 111037 - DNA, 25 bp, Canis familiaris
gaacatcactgggacgtgtctgatc

SEQ ID NO: 111038 - DNA, 25 bp, Canis familiaris
gaactacgtgcatcgtatcgccgta

SEQ ID NO: 111039 - DNA, 25 bp, Canis familiaris
gaactacgtgaaggccatgcggctg

SEQ ID NO: 111040 - DNA, 25 bp, Canis familiaris
gaactgattgataaacttgtgtgta

SEQ ID NO: 111041 - DNA, 25 bp, Canis familiaris
gaaaattgattcacctgtttttgat

SEQ ID NO: 111042 - DNA, 25 bp, Canis familiaris
gaaaatttctgcacgaattctttga

SEQ ID NO: 111043 - DNA, 25 bp, Canis familiaris
gaacattcgtgtcactgcacatttt

SEQ ID NO: 111044 - DNA, 25 bp, Canis familiaris
gaacaccaggttgattcactgtatt

SEQ ID NO: 111045 - DNA, 25 bp, Canis familiaris
gaacaccagtgagtacactatgctg

SEQ ID NO: 111046 - DNA, 25 bp, Canis familiaris
gaacattcctgagtcattcatcact

SEQ ID NO: 111047 - DNA, 25 bp, Canis familiaris
gaacatagcctcttgattatcatac

SEQ ID NO: 111048 - DNA, 25 bp, Canis familiaris
gaactgaggccatgattaagaggga

SEQ ID NO: 111049 - DNA, 25 bp, Canis familiaris
gaacataccacttttaatggggaca

SEQ ID NO: 111050 - DNA, 25 bp, Canis familiaris
gaactacaacttttactgtcagtac

SEQ ID NO: 111051 - DNA, 25 bp, Canis familiaris
gaacatcaactgttactagttcagt

SEQ ID NO: 111052 - DNA, 25 bp, Canis familiaris
gaactaattatttttgcatatttta

SEQ ID NO: 111053 - DNA, 25 bp, Canis familiaris
gaacaaattttctctgtaccttaga

SEQ ID NO: 111054 - DNA, 25 bp, Canis familiaris
gaacaaattaacacatcccctgata

SEQ ID NO: 111055 - DNA, 25 bp, Canis familiaris
gaaaaagtagggcatcccctctgac

SEQ ID NO: 111056 - DNA, 25 bp, Canis familiaris
gaaaatagagaataccacccctaca

SEQ ID NO: 111057 - DNA, 25 bp, Canis familiaris
gaacaattggaataagtccccagac

SEQ ID NO: 111058 - DNA, 25 bp, Canis familiaris
gaacttctgagatttggtgtccccc

SEQ ID NO: 111059 - DNA, 25 bp, Canis familiaris
gaacacctagttacagtgaccctcc

SEQ ID NO: 111060 - DNA, 25 bp, Canis familiaris
gaacacctcctcagcaggtttgtac

SEQ ID NO: 111061 - DNA, 25 bp, Canis familiaris
gaacaccattcctacacgtttggat

SEQ ID NO: 111062 - DNA, 25 bp, Canis familiaris
gaacatccagtttcccgataaggac

SEQ ID NO: 111063 - DNA, 25 bp, Canis familiaris
gaacatttgctttctccaaatatgg

SEQ ID NO: 111064 - DNA, 25 bp, Canis familiaris
gaactgcattttgtccaacttgtgt

SEQ ID NO: 111065 - DNA, 25 bp, Canis familiaris
gaactccttatgtttaactctcatg

SEQ ID NO: 111066 - DNA, 25 bp, Canis familiaris
gaacatctgttgagttgcaccatta

SEQ ID NO: 111067 - DNA, 25 bp, Canis familiaris
gaacactggcatcatctgtaccatt

SEQ ID NO: 111068 - DNA, 25 bp, Canis familiaris
gaacagtagctgctctgcaaacatg

SEQ ID NO: 111069 - DNA, 25 bp, Canis familiaris
gaacatagattcttcatgtaagctg

SEQ ID NO: 111070 - DNA, 25 bp, Canis familiaris
gaactaaatcccacaatgctttggt

SEQ ID NO: 111071 - DNA, 25 bp, Canis familiaris
gaactaatacccatggtgttgtcag

SEQ ID NO: 111072 - DNA, 25 bp, Canis familiaris
gaactaaacaccagattttcacatg

SEQ ID NO: 111073 - DNA, 25 bp, Canis familiaris
gaacttaactcaaatgtctcttcca

SEQ ID NO: 111074 - DNA, 25 bp, Canis familiaris
gaactttatctatgaacttctccaa

SEQ ID NO: 111075 - DNA, 25 bp, Canis familiaris
gaactttcaaaggccattttccaca

SEQ ID NO: 111076 - DNA, 25 bp, Canis familiaris
gaacttccagaagcctttctgccag

SEQ ID NO: 111077 - DNA, 25 bp, Canis familiaris
gaacttccgccaaaatttctgccaa

SEQ ID NO: 111078 - DNA, 25 bp, Canis familiaris
gaactttgcccaatattttctccac

SEQ ID NO: 111079 - DNA, 25 bp, Canis familiaris
gaacatgacgcccaattcagtttcc

SEQ ID NO: 111080 - DNA, 25 bp, Canis familiaris
gaacattgctccagattggctttct

SEQ ID NO: 111081 - DNA, 25 bp, Canis familiaris
gaactcttgctttgtaggtgtctca

SEQ ID NO: 111082 - DNA, 25 bp, Canis familiaris
gaactctcggtatttgctgagcttc

SEQ ID NO: 111083 - DNA, 25 bp, Canis familiaris
gaacatttggtgtcacagcggtctc

SEQ ID NO: 111084 - DNA, 25 bp, Canis familiaris
gaacatggcttggaaccggtgtccc

SEQ ID NO: 111085 - DNA, 25 bp, Canis familiaris
gaacattcttgttgaccattcttcc

SEQ ID NO: 111086 - DNA, 25 bp, Canis familiaris
gaacacatcaggtgacctgtcctcc

SEQ ID NO: 111087 - DNA, 25 bp, Canis familiaris
gaacagtactgatgacgtgtgtctc

SEQ ID NO: 111088 - DNA, 25 bp, Canis familiaris
gaacttgactgatggctctggagta

SEQ ID NO: 111089 - DNA, 25 bp, Canis familiaris
gaacatagtctgtggtgctgtggtc

SEQ ID NO: 111090 - DNA, 25 bp, Canis familiaris
gtcattcgggttgtcggagtcgttc

SEQ ID NO: 111091 - DNA, 25 bp, Canis familiaris
gacttccggttgtatcgggacgtgc

SEQ ID NO: 111092 - DNA, 25 bp, Canis familiaris
gaccacgcaggtattggagtacggt

SEQ ID NO: 111093 - DNA, 25 bp, Canis familiaris
gaacagcttgttatgggattcccgt

SEQ ID NO: 111094 - DNA, 25 bp, Canis familiaris
gaacaggcgttataagatgtccaca

SEQ ID NO: 111095 - DNA, 25 bp, Canis familiaris
gaacagggtcaagattttccagggt

SEQ ID NO: 111096 - DNA, 25 bp, Canis familiaris
gaacaggtgacacgctttcttctag

SEQ ID NO: 111097 - DNA, 25 bp, Canis familiaris
gaacaggatacagattttctcacaa

SEQ ID NO: 111098 - DNA, 25 bp, Canis familiaris
gaacactgtaccatattctatcctg

SEQ ID NO: 111099 - DNA, 25 bp, Canis familiaris
gaacactgctactatctgagcctac

SEQ ID NO: 111100 - DNA, 25 bp, Canis familiaris
gaaagcgcaggcaatctgagtccca

SEQ ID NO: 111101 - DNA, 25 bp, Canis familiaris
gaacagcgaggctgggcatgctgcc

SEQ ID NO: 111102 - DNA, 25 bp, Canis familiaris
gaacagcagagacaacagcagcagc

SEQ ID NO: 111103 - DNA, 25 bp, Canis familiaris
gaactgcaggctaaacaggcagcca

SEQ ID NO: 111104 - DNA, 25 bp, Canis familiaris
gaactatgactaagacatcagagaa

SEQ ID NO: 111105 - DNA, 25 bp, Canis familiaris
gaacttacgatcaatatagtcagag

SEQ ID NO: 111106 - DNA, 25 bp, Canis familiaris
gaacttattctgatatagctgggca

SEQ ID NO: 111107 - DNA, 25 bp, Canis familiaris
gaacttgtacagaaatacggtccga

SEQ ID NO: 111108 - DNA, 25 bp, Canis familiaris
gaactttaatcatcatagagactcc

SEQ ID NO: 111109 - DNA, 25 bp, Canis familiaris
gaactttgaatcactctcagaagcc

SEQ ID NO: 111110 - DNA, 25 bp, Canis familiaris
gaactatagcaatcctcatatgaac

SEQ ID NO: 111111 - DNA, 25 bp, Canis familiaris
gaactatagccatggttatgccact

SEQ ID NO: 111112 - DNA, 25 bp, Canis familiaris
gaactaccctaggatgaagcaatct

SEQ ID NO: 111113 - DNA, 25 bp, Canis familiaris
gaactcaacctagtttccaactgga

SEQ ID NO: 111114 - DNA, 25 bp, Canis familiaris
gataccgtcgtagttccgaccataa

SEQ ID NO: 111115 - DNA, 25 bp, Canis familiaris
gaactcagtcttttctttagtataa

SEQ ID NO: 111116 - DNA, 25 bp, Canis familiaris
gaactgccaattttttgtagctcaa

SEQ ID NO: 111117 - DNA, 25 bp, Canis familiaris
gaacatgtaatttttcactcccaaa

SEQ ID NO: 111118 - DNA, 25 bp, Canis familiaris
gaactctgatttttctaacccaatt

SEQ ID NO: 111119 - DNA, 25 bp, Canis familiaris
gaactagaatcctccaaaacgtctc

SEQ ID NO: 111120 - DNA, 25 bp, Canis familiaris
gaaaaagtcccacaaaataatctca

SEQ ID NO: 111121 - DNA, 25 bp, Canis familiaris
gtaccccccacacaaagattatggc

SEQ ID NO: 111122 - DNA, 25 bp, Canis familiaris
gtaagttcgacatgtaaagtgttga

SEQ ID NO: 111123 - DNA, 25 bp, Canis familiaris
gaaaattcccaggaaggaagttatg

SEQ ID NO: 111124 - DNA, 25 bp, Canis familiaris
gaacagaggccacgaaagggagtaa

SEQ ID NO: 111125 - DNA, 25 bp, Canis familiaris
gaacttgactatctagaggaagtaa

SEQ ID NO: 111126 - DNA, 25 bp, Canis familiaris
gaacttccttcattcagcaggaggt

SEQ ID NO: 111127 - DNA, 25 bp, Canis familiaris
gaacttctctattcccagtgggatc

SEQ ID NO: 111128 - DNA, 25 bp, Canis familiaris
gaacacagtaattcccagtgtcgag

SEQ ID NO: 111129 - DNA, 25 bp, Canis familiaris
gaacaagattattcactccttagaa

SEQ ID NO: 111130 - DNA, 25 bp, Canis familiaris
gaactcaaatattgcacttctttca

SEQ ID NO: 111131 - DNA, 25 bp, Canis familiaris
gaacatcgaaaatcagttttcccac

SEQ ID NO: 111132 - DNA, 25 bp, Canis familiaris
gacaattaaactcatttttccccat

SEQ ID NO: 111133 - DNA, 25 bp, Canis familiaris
gacttcaaagttcagtttatcccct

SEQ ID NO: 111134 - DNA, 25 bp, Canis familiaris
gagttcaaattttaggtctccctca

SEQ ID NO: 111135 - DNA, 25 bp, Canis familiaris
ggtcaaaaattatcctccttcgatt

SEQ ID NO: 111136 - DNA, 25 bp, Canis familiaris
gaaaaaactttctctctttgccatt

SEQ ID NO: 111137 - DNA, 25 bp, Canis familiaris
gaaaaaagctctgaggactttcttt

SEQ ID NO: 111138 - DNA, 25 bp, Canis familiaris
gaaaataccctaaggtgcatttaat

SEQ ID NO: 111139 - DNA, 25 bp, Canis familiaris
gaaaaagcttgtcaggtcttaatgt

SEQ ID NO: 111140 - DNA, 25 bp, Canis familiaris
gaaaatccaagtctggccattaact

SEQ ID NO: 111141 - DNA, 25 bp, Canis familiaris
gaaattccaactcttgttacaactt

SEQ ID NO: 111142 - DNA, 25 bp, Canis familiaris
gaaattccacatatttttcccatta

SEQ ID NO: 111143 - DNA, 25 bp, Canis familiaris
gaacttcacactgatttttcttggt

SEQ ID NO: 111144 - DNA, 25 bp, Canis familiaris
gaacttcagcttgtcttctttctga

SEQ ID NO: 111145 - DNA, 25 bp, Canis familiaris
gaacttcatactgcacatttttaaa

SEQ ID NO: 111146 - DNA, 25 bp, Canis familiaris
gaactcctatggtcacattattatg

SEQ ID NO: 111147 - DNA, 25 bp, Canis familiaris
gaactctctcatgcagactgtcatc

SEQ ID NO: 111148 - DNA, 25 bp, Canis familiaris
gaacagcctctgaaggtaatgccag

SEQ ID NO: 111149 - DNA, 25 bp, Canis familiaris
gaacagcagttgaaggagcagtgta

SEQ ID NO: 111150 - DNA, 25 bp, Canis familiaris
gaacagcattgctcaaggagttaca

SEQ ID NO: 111151 - DNA, 25 bp, Canis familiaris
gaacagtatgcctggagcgcttgaa

SEQ ID NO: 111152 - DNA, 25 bp, Canis familiaris
gaacagtgttcgcaagcgtagacgg

SEQ ID NO: 111153 - DNA, 25 bp, Canis familiaris
gaacaagttcgaggaggtggacctg

SEQ ID NO: 111154 - DNA, 25 bp, Canis familiaris
gaacatgtgttagggagtcaggacc

SEQ ID NO: 111155 - DNA, 25 bp, Canis familiaris
gaaatgctgctatagggctgggacc

SEQ ID NO: 111156 - DNA, 25 bp, Canis familiaris
gaacagcagagatgaggccgtggca

SEQ ID NO: 111157 - DNA, 25 bp, Canis familiaris
gaacagaggagacagcttggctaaa

SEQ ID NO: 111158 - DNA, 25 bp, Canis familiaris
gaaaagggcggcgtctccaaaatct

SEQ ID NO: 111159 - DNA, 25 bp, Canis familiaris
gaaaacagtcggtcccgaagcttcg

SEQ ID NO: 111160 - DNA, 25 bp, Canis familiaris
gaaacaccttggcaccagaagtttg

SEQ ID NO: 111161 - DNA, 25 bp, Canis familiaris
gaaaaccttcgctgccaataaatcc

SEQ ID NO: 111162 - DNA, 25 bp, Canis familiaris
gaacaagcccttggaccacttgttc

SEQ ID NO: 111163 - DNA, 25 bp, Canis familiaris
gaacacctacttaagcacacatggt

SEQ ID NO: 111164 - DNA, 25 bp, Canis familiaris
gaactctctcgaaatgaacgctggt

SEQ ID NO: 111165 - DNA, 25 bp, Canis familiaris
gaactactcgagactacctctactc

SEQ ID NO: 111166 - DNA, 25 bp, Canis familiaris
gaacaactccatggctaactacacc

SEQ ID NO: 111167 - DNA, 25 bp, Canis familiaris
gaacattctccagaagagatcacat

SEQ ID NO: 111168 - DNA, 25 bp, Canis familiaris
gaacatcatgactaaaaggtccaac

SEQ ID NO: 111169 - DNA, 25 bp, Canis familiaris
gaactagactaacgagcagatccag

SEQ ID NO: 111170 - DNA, 25 bp, Canis familiaris
gaactagtctacagcagcagcacct

SEQ ID NO: 111171 - DNA, 25 bp, Canis familiaris
gaactcagatgctcaccatgagcac

SEQ ID NO: 111172 - DNA, 25 bp, Canis familiaris
gaacatcaatgaactccaaattccc

SEQ ID NO: 111173 - DNA, 25 bp, Canis familiaris
gaacatagttatgaaaatcctcaac

SEQ ID NO: 111174 - DNA, 25 bp, Canis familiaris
gaacagtgtatccaaaggtcctaag

SEQ ID NO: 111175 - DNA, 25 bp, Canis familiaris
gaacaatgaatccaaagtcctatga

SEQ ID NO: 111176 - DNA, 25 bp, Canis familiaris
gaacatgacagtgaatatatctctt

SEQ ID NO: 111177 - DNA, 25 bp, Canis familiaris
gaacatagcagggcagtttctctcc

SEQ ID NO: 111178 - DNA, 25 bp, Canis familiaris
gaactagatgaccacgtatccacca

SEQ ID NO: 111179 - DNA, 25 bp, Canis familiaris
gaacagatgctaaaagctatccagg

SEQ ID NO: 111180 - DNA, 25 bp, Canis familiaris
gacataagtagggcagccccggggg

SEQ ID NO: 111181 - DNA, 25 bp, Canis familiaris
gaaaaggaggagacccagggcaggg

SEQ ID NO: 111182 - DNA, 25 bp, Canis familiaris
gaaataggaaaaagcttggtcaagt

SEQ ID NO: 111183 - DNA, 25 bp, Canis familiaris
gaacaagttcaattcctgggaaaga

SEQ ID NO: 111184 - DNA, 25 bp, Canis familiaris
gaaatcgttgaagcgagagaaaagc

SEQ ID NO: 111185 - DNA, 25 bp, Canis familiaris
gaaaagggaaccaacaaaatgcaca

SEQ ID NO: 111186 - DNA, 25 bp, Canis familiaris
gaactagggcatacctagcctacac

SEQ ID NO: 111187 - DNA, 25 bp, Canis familiaris
gaactatgatgccttccgaggtcaa

SEQ ID NO: 111188 - DNA, 25 bp, Canis familiaris
gaacatgcagatgcttccgaggtcc

SEQ ID NO: 111189 - DNA, 25 bp, Canis familiaris
gaaaaactcttcagggtgcctgggt

SEQ ID NO: 111190 - DNA, 25 bp, Canis familiaris
gaaaactcgcttgtagggcctggta

SEQ ID NO: 111191 - DNA, 25 bp, Canis familiaris
gaaaagctcgttccagaagctgccg

SEQ ID NO: 111192 - DNA, 25 bp, Canis familiaris
gaacatgacctgctctagcgatggc

SEQ ID NO: 111193 - DNA, 25 bp, Canis familiaris
gaacatacgcagccatccagagatt

SEQ ID NO: 111194 - DNA, 25 bp, Canis familiaris
gaactcatagcgacaacagagatat

SEQ ID NO: 111195 - DNA, 25 bp, Canis familiaris
gaactcatactggcaacacagctga

SEQ ID NO: 111196 - DNA, 25 bp, Canis familiaris
gaactcatgaatgcacacacactca

SEQ ID NO: 111197 - DNA, 25 bp, Canis familiaris
gaactcacgtgtgcacatactcaga

SEQ ID NO: 111198 - DNA, 25 bp, Canis familiaris
gaacatccagttgcagacactgaaa

SEQ ID NO: 111199 - DNA, 25 bp, Canis familiaris
gaacaggccttcgagagcagccaga

SEQ ID NO: 111200 - DNA, 25 bp, Canis familiaris
gaacatgggctttcagcgccagaca

SEQ ID NO: 111201 - DNA, 25 bp, Canis familiaris
gaacatggctaaaagcaccagcatc

SEQ ID NO: 111202 - DNA, 25 bp, Canis familiaris
gaacatgcctaaaggacccattcca

SEQ ID NO: 111203 - DNA, 25 bp, Canis familiaris
gaacagcgtataacgacgacctccc

SEQ ID NO: 111204 - DNA, 25 bp, Canis familiaris
gaacaagaaaacccgcacattcctt

SEQ ID NO: 111205 - DNA, 25 bp, Canis familiaris
gaacaactaaacccaggagagcctt

SEQ ID NO: 111206 - DNA, 25 bp, Canis familiaris
gaacaacccagagccatggaaccgc

SEQ ID NO: 111207 - DNA, 25 bp, Canis familiaris
gaaaattcctctgccaagaagaccc

SEQ ID NO: 111208 - DNA, 25 bp, Canis familiaris
gaaaattcacgagcgagtcatacac

SEQ ID NO: 111209 - DNA, 25 bp, Canis familiaris
gaaagatatctgcagctaggaatac

SEQ ID NO: 111210 - DNA, 25 bp, Canis familiaris
gaacagaaccgactgactaccacac

SEQ ID NO: 111211 - DNA, 25 bp, Canis familiaris
gaacaggatccgatgagctcttctc

SEQ ID NO: 111212 - DNA, 25 bp, Canis familiaris
gaacaggatgcccttgttcatgtct

SEQ ID NO: 111213 - DNA, 25 bp, Canis familiaris
gaacaggctgctgctgaaaaggctg

SEQ ID NO: 111214 - DNA, 25 bp, Canis familiaris
gaacaggttgttgaatgtctgtgga

SEQ ID NO: 111215 - DNA, 25 bp, Canis familiaris
gaacatttgtttcacagtatgggat

SEQ ID NO: 111216 - DNA, 25 bp, Canis familiaris
gaaaatctgtgaatcctcgtataat

SEQ ID NO: 111217 - DNA, 25 bp, Canis familiaris
gaaaattggccctggtacaatccac

SEQ ID NO: 111218 - DNA, 25 bp, Canis familiaris
gaacactgggggaaagaacaactga

SEQ ID NO: 111219 - DNA, 25 bp, Canis familiaris
gaacacccggagaaggcaacaggcg

SEQ ID NO: 111220 - DNA, 25 bp, Canis familiaris
gaacaccaggggagccacaaacagc

SEQ ID NO: 111221 - DNA, 25 bp, Canis familiaris
gaacaactgggccaaggccactaca

SEQ ID NO: 111222 - DNA, 25 bp, Canis familiaris
gaaaagcggagtttggcctctcgtc

SEQ ID NO: 111223 - DNA, 25 bp, Canis familiaris
gacgaaggaaggatggcttctggtt

SEQ ID NO: 111224 - DNA, 25 bp, Canis familiaris
gaaactggtgggaggctttggtgct

SEQ ID NO: 111225 - DNA, 25 bp, Canis familiaris
gaaattgggggatggcttggggtgc

SEQ ID NO: 111226 - DNA, 25 bp, Canis familiaris
gaaatttgggggcagggggcgtgtg

SEQ ID NO: 111227 - DNA, 25 bp, Canis familiaris
gaaatgtagtggaggggggagcggc

SEQ ID NO: 111228 - DNA, 25 bp, Canis familiaris
gaaagtgggatcaggaaggggctac

SEQ ID NO: 111229 - DNA, 25 bp, Canis familiaris
gaacagtgccctcgggaagggcgct

SEQ ID NO: 111230 - DNA, 25 bp, Canis familiaris
gaacaggcccgggaaagtgcggcgg

SEQ ID NO: 111231 - DNA, 25 bp, Canis familiaris
gacatcaccggccccaaaggggccg

SEQ ID NO: 111232 - DNA, 25 bp, Canis familiaris
gaaaatcaccagcccaaaggatact

SEQ ID NO: 111233 - DNA, 25 bp, Canis familiaris
gtaatccaccggacaaacccaggat

SEQ ID NO: 111234 - DNA, 25 bp, Canis familiaris
gaacttgcacaacacaaacccggtg

SEQ ID NO: 111235 - DNA, 25 bp, Canis familiaris
gaacttcaagaacagatgtcccgtg

SEQ ID NO: 111236 - DNA, 25 bp, Canis familiaris
gaaaaaagagcttcaattaccagtg

SEQ ID NO: 111237 - DNA, 25 bp, Canis familiaris
gaaaatgccatacaaattcactcgt

SEQ ID NO: 111238 - DNA, 25 bp, Canis familiaris
gaacacataatctcaaatctcagtc

SEQ ID NO: 111239 - DNA, 25 bp, Canis familiaris
gaactatagtgatcaatacgcattt

SEQ ID NO: 111240 - DNA, 25 bp, Canis familiaris
gaaaatactgacgaatacttctttg

SEQ ID NO: 111241 - DNA, 25 bp, Canis familiaris
gaactttctttaacacttctgtgtg

SEQ ID NO: 111242 - DNA, 25 bp, Canis familiaris
gaacttttgttcttacttgacagtt

SEQ ID NO: 111243 - DNA, 25 bp, Canis familiaris
gtacttgtagtttctttctgggtct

SEQ ID NO: 111244 - DNA, 25 bp, Canis familiaris
gaacttgtatttattttggcagatt

SEQ ID NO: 111245 - DNA, 25 bp, Canis familiaris
gaacactaattttgagtttggcatt

SEQ ID NO: 111246 - DNA, 25 bp, Canis familiaris
gaacttgaactttggctgacttgct

SEQ ID NO: 111247 - DNA, 25 bp, Canis familiaris
gaacttgaacatttcccacgtgtct

SEQ ID NO: 111248 - DNA, 25 bp, Canis familiaris
gaactaatgaattactaccagcgtc

SEQ ID NO: 111249 - DNA, 25 bp, Canis familiaris
gaactattcgtttatactcagcggc

SEQ ID NO: 111250 - DNA, 25 bp, Canis familiaris
gaacagtctcgctttgaagctcgtg

SEQ ID NO: 111251 - DNA, 25 bp, Canis familiaris
gaacaactgccggtgatactggtag

SEQ ID NO: 111252 - DNA, 25 bp, Canis familiaris
gaacaagcggcagctctattaccag

SEQ ID NO: 111253 - DNA, 25 bp, Canis familiaris
gaacacggtgacctgggtaatagca

SEQ ID NO: 111254 - DNA, 25 bp, Canis familiaris
gaacaccgtgccatgggtttgtgca

SEQ ID NO: 111255 - DNA, 25 bp, Canis familiaris
gaacatagtgtctttgtggttttaa

SEQ ID NO: 111256 - DNA, 25 bp, Canis familiaris
gaacattgttcgttctgttctttac

SEQ ID NO: 111257 - DNA, 25 bp, Canis familiaris
gaacttgctgctgtgttttttcttc

SEQ ID NO: 111258 - DNA, 25 bp, Canis familiaris
gaacatctctgcagtggtgttttca

SEQ ID NO: 111259 - DNA, 25 bp, Canis familiaris
gaacatttcacgaatgtttttatga

SEQ ID NO: 111260 - DNA, 25 bp, Canis familiaris
gaacattctcaagattggcttctta

SEQ ID NO: 111261 - DNA, 25 bp, Canis familiaris
gaaataaaatggtggttcagtgaaa

SEQ ID NO: 111262 - DNA, 25 bp, Canis familiaris
tgaaataaactagggtttcggcctg

SEQ ID NO: 111263 - DNA, 25 bp, Canis familiaris
gaacacatcgactcggtttggggat

SEQ ID NO: 111264 - DNA, 25 bp, Canis familiaris
gaaacgggaactggtatgtgggtgt

SEQ ID NO: 111265 - DNA, 25 bp, Canis familiaris
gaaaagttgaaggcttctcttagtt

SEQ ID NO: 111266 - DNA, 25 bp, Canis familiaris
gaaaatgctgtgcactcattcagtg

SEQ ID NO: 111267 - DNA, 25 bp, Canis familiaris
gaacaatcagtttccctgctaggtt

SEQ ID NO: 111268 - DNA, 25 bp, Canis familiaris
gagaaataatttgcccttagccgaa

SEQ ID NO: 111269 - DNA, 25 bp, Canis familiaris
gagaacaagattgttatcgggggaa

SEQ ID NO: 111270 - DNA, 25 bp, Canis familiaris
gaacaattgaatcttatcgggagaa

SEQ ID NO: 111271 - DNA, 25 bp, Canis familiaris
gaacaccagaagactttccggacag

SEQ ID NO: 111272 - DNA, 25 bp, Canis familiaris
gaacacgagaagaagctggcctgga

SEQ ID NO: 111273 - DNA, 25 bp, Canis familiaris
gaacaaatggcgaagctgtgcacat

SEQ ID NO: 111274 - DNA, 25 bp, Canis familiaris
gaaaaggcgcagttgtgtagcagtt

SEQ ID NO: 111275 - DNA, 25 bp, Canis familiaris
gaacaagtgcgcatttgtagccatg

SEQ ID NO: 111276 - DNA, 25 bp, Canis familiaris
gaacaacgggtcgtgatgaccgtgg

SEQ ID NO: 111277 - DNA, 25 bp, Canis familiaris
gaacaactttgtgcgtgactgcgtc

SEQ ID NO: 111278 - DNA, 25 bp, Canis familiaris
gaaaattaattccctgactctgtct

SEQ ID NO: 111279 - DNA, 25 bp, Canis familiaris
gaacattttatttccatgcccagtt

SEQ ID NO: 111280 - DNA, 25 bp, Canis familiaris
gaacagtgtctattatatctccact

SEQ ID NO: 111281 - DNA, 25 bp, Canis familiaris
gaacatgttgcttaccgcaccattc

SEQ ID NO: 111282 - DNA, 25 bp, Canis familiaris
gaacatgttgcttaccgcaccattc

SEQ ID NO: 111283 - DNA, 25 bp, Canis familiaris
gaacagctttcaacctcaggactgc

SEQ ID NO: 111284 - DNA, 25 bp, Canis familiaris
gaacacctacaactccagggtttgc

SEQ ID NO: 111285 - DNA, 25 bp, Canis familiaris
gaacatctcaaaggctccaggacag

SEQ ID NO: 111286 - DNA, 25 bp, Canis familiaris
gaacaatcaagaggtggcccagcag

SEQ ID NO: 111287 - DNA, 25 bp, Canis familiaris
gaaaataagagggagcagatctgct

SEQ ID NO: 111288 - DNA, 25 bp, Canis familiaris
gaaaaacttggcaatcacacatctg

SEQ ID NO: 111289 - DNA, 25 bp, Canis familiaris
gaacacagtcttgtacgcagatgct

SEQ ID NO: 111290 - DNA, 25 bp, Canis familiaris
gaacacatgttcagtcacgcatatg

SEQ ID NO: 111291 - DNA, 25 bp, Canis familiaris
gaactatgcttcctatgcaacaagt

SEQ ID NO: 111292 - DNA, 25 bp, Canis familiaris
gaacttcttgctccatcttgcaaat

SEQ ID NO: 111293 - DNA, 25 bp, Canis familiaris
gaacttgtgttgactattgatactt

SEQ ID NO: 111294 - DNA, 25 bp, Canis familiaris
gaacatgttcttgggattatactat

SEQ ID NO: 111295 - DNA, 25 bp, Canis familiaris
gaacattgttcagggctttacattt

SEQ ID NO: 111296 - DNA, 25 bp, Canis familiaris
gaacatctttaccatctttacatct

SEQ ID NO: 111297 - DNA, 25 bp, Canis familiaris
gaacatcaattgttttctaagcaat

SEQ ID NO: 111298 - DNA, 25 bp, Canis familiaris
gaacacatgcaactttttacgtaaa

SEQ ID NO: 111299 - DNA, 25 bp, Canis familiaris
gaacaagaatatcactttcagtaaa

SEQ ID NO: 111300 - DNA, 25 bp, Canis familiaris
gaacatccaatacttttcttgtact

SEQ ID NO: 111301 - DNA, 25 bp, Canis familiaris
gaacttgaaccaatctttagtcctg

SEQ ID NO: 111302 - DNA, 25 bp, Canis familiaris
gaacttaacaatttctgtgaatcac

SEQ ID NO: 111303 - DNA, 25 bp, Canis familiaris
gaactttaccatttctgcagtataa

SEQ ID NO: 111304 - DNA, 25 bp, Canis familiaris
gaacttgtcaaaatatctagctgta

SEQ ID NO: 111305 - DNA, 25 bp, Canis familiaris
gaacttgtttcaaactcagctgctt

SEQ ID NO: 111306 - DNA, 25 bp, Canis familiaris
gaacaattctaaaagccctgtgatt

SEQ ID NO: 111307 - DNA, 25 bp, Canis familiaris
gaacaatcctgatgatgggccgtta

SEQ ID NO: 111308 - DNA, 25 bp, Canis familiaris
gaacagagatcgaaatgggcacgac

SEQ ID NO: 111309 - DNA, 25 bp, Canis familiaris
gaacagagtatgaggggatccctgg

SEQ ID NO: 111310 - DNA, 25 bp, Canis familiaris
gaacacattcagctgctgggtgtcc

SEQ ID NO: 111311 - DNA, 25 bp, Canis familiaris
gaacaggtgcagctggtggtggacg

SEQ ID NO: 111312 - DNA, 25 bp, Canis familiaris
gaacagctacagcggcaagggccga

SEQ ID NO: 111313 - DNA, 25 bp, Canis familiaris
gacatacaaacggttaggtagctgg

SEQ ID NO: 111314 - DNA, 25 bp, Canis familiaris
gacagacgtaaacttcggtgacatg

SEQ ID NO: 111315 - DNA, 25 bp, Canis familiaris
gaacaagtagaaccacgggcacggc

SEQ ID NO: 111316 - DNA, 25 bp, Canis familiaris
gaacagcgggaaccaccggattcac

SEQ ID NO: 111317 - DNA, 25 bp, Canis familiaris
gaacttgagcgagatcacacacgtt

SEQ ID NO: 111318 - DNA, 25 bp, Canis familiaris
gaacattgatgcataatcctcacag

SEQ ID NO: 111319 - DNA, 25 bp, Canis familiaris
gaacatcatagcatcagagcctcga

SEQ ID NO: 111320 - DNA, 25 bp, Canis familiaris
gaacattcagcattccacatctaag

SEQ ID NO: 111321 - DNA, 25 bp, Canis familiaris
gaacactggcagtcagctcttgaac

SEQ ID NO: 111322 - DNA, 25 bp, Canis familiaris
gaaaagccagatgctcattagactg

SEQ ID NO: 111323 - DNA, 25 bp, Canis familiaris
gaaaagtgagtttcatgtatgaagt

SEQ ID NO: 111324 - DNA, 25 bp, Canis familiaris
gaaaactcagtatattcttactagg

SEQ ID NO: 111325 - DNA, 25 bp, Canis familiaris
gaaaactgaatctctttcctctcag

SEQ ID NO: 111326 - DNA, 25 bp, Canis familiaris
gaaaaaagtctctttccttccagag

SEQ ID NO: 111327 - DNA, 25 bp, Canis familiaris
gaaaaaagtctctttccttccagag

SEQ ID NO: 111328 - DNA, 25 bp, Canis familiaris
gaaaaaagtctctttccttccagag

SEQ ID NO: 111329 - DNA, 25 bp, Canis familiaris
gaaaaaagtctctttccttccagag

SEQ ID NO: 111330 - DNA, 25 bp, Canis familiaris
gaaaaaagtctctttccttccagag

SEQ ID NO: 111331 - DNA, 25 bp, Canis familiaris
gaaaaaagtctctttccttccagag

SEQ ID NO: 111332 - DNA, 25 bp, Canis familiaris
gaaaaaagtctctttccttccagag

SEQ ID NO: 111333 - DNA, 25 bp, Canis familiaris
gaaaaaagtctctttccttccagag

SEQ ID NO: 111334 - DNA, 25 bp, Canis familiaris
gaaaattaactttaccttcagcagt

SEQ ID NO: 111335 - DNA, 25 bp, Canis familiaris
gaaaatcggcatatgtagcccaccg

SEQ ID NO: 111336 - DNA, 25 bp, Canis familiaris
gaacaatcgagatcatttgcacaac

SEQ ID NO: 111337 - DNA, 25 bp, Canis familiaris
gaacattctcaagctgatctgaaaa

SEQ ID NO: 111338 - DNA, 25 bp, Canis familiaris
gaacattccaaggtctcaacgctca

SEQ ID NO: 111339 - DNA, 25 bp, Canis familiaris
gaacttccaggagtacgtcaccttc

SEQ ID NO: 111340 - DNA, 25 bp, Canis familiaris
gaacttcgggcaggtgtgtcaccgt

SEQ ID NO: 111341 - DNA, 25 bp, Canis familiaris
gaacaacgggcaggtgttcagcctg

SEQ ID NO: 111342 - DNA, 25 bp, Canis familiaris
gaacaaaggtgccctggtagccggc

SEQ ID NO: 111343 - DNA, 25 bp, Canis familiaris
gaacagagtggggactcgccagtcg

SEQ ID NO: 111344 - DNA, 25 bp, Canis familiaris
gaacagattcggggtcacgctttgc

SEQ ID NO: 111345 - DNA, 25 bp, Canis familiaris
gaaaactcgaggcatccctttggtc

SEQ ID NO: 111346 - DNA, 25 bp, Canis familiaris
gaaaatgcctggagttccaaatgga

SEQ ID NO: 111347 - DNA, 25 bp, Canis familiaris
gaacaacctgtgaggaggaacaaaa

SEQ ID NO: 111348 - DNA, 25 bp, Canis familiaris
gaacaacccggtcaacaacatcgac

SEQ ID NO: 111349 - DNA, 25 bp, Canis familiaris
gaaaacggcggcagaccagccttac

SEQ ID NO: 111350 - DNA, 25 bp, Canis familiaris
gaaaaggggtgctgtctatgctctt

SEQ ID NO: 111351 - DNA, 25 bp, Canis familiaris
gaaaaggggcccccttgatgctgtc

SEQ ID NO: 111352 - DNA, 25 bp, Canis familiaris
gaaaatggacccaacaacgtcttcg

SEQ ID NO: 111353 - DNA, 25 bp, Canis familiaris
gaaaaaccgccctagacagttgacg

SEQ ID NO: 111354 - DNA, 25 bp, Canis familiaris
gaaaaaaaccctgacaagtagcaag

SEQ ID NO: 111355 - DNA, 25 bp, Canis familiaris
gaacaaaaacctgtaagcactcaaa

SEQ ID NO: 111356 - DNA, 25 bp, Canis familiaris
gaacttcaacatctccattagcaac

SEQ ID NO: 111357 - DNA, 25 bp, Canis familiaris
gaacttgaaagccatccattgccaa

SEQ ID NO: 111358 - DNA, 25 bp, Canis familiaris
gaacttcaagtctacctgtcaacag

SEQ ID NO: 111359 - DNA, 25 bp, Canis familiaris
gaacttaatttctctgacatacatg

SEQ ID NO: 111360 - DNA, 25 bp, Canis familiaris
gaaatctagtttcacggttctggtt

SEQ ID NO: 111361 - DNA, 25 bp, Canis familiaris
gaaacggtttaaggatgctggctgg

SEQ ID NO: 111362 - DNA, 25 bp, Canis familiaris
gaacacggtaaaacgatgccattag

SEQ ID NO: 111363 - DNA, 25 bp, Canis familiaris
gaacaggcagtgtaaccgctcacat

SEQ ID NO: 111364 - DNA, 25 bp, Canis familiaris
gaacagtattgttagcactctaata

SEQ ID NO: 111365 - DNA, 25 bp, Canis familiaris
gaaacattttactcttcactaacca

SEQ ID NO: 111366 - DNA, 25 bp, Canis familiaris
gaaaatttctcattgccttcagcta

SEQ ID NO: 111367 - DNA, 25 bp, Canis familiaris
gaaaattgtcgattcaggtcctctg

SEQ ID NO: 111368 - DNA, 25 bp, Canis familiaris
gaaaatggctcgttcaacctttcgg

SEQ ID NO: 111369 - DNA, 25 bp, Canis familiaris
gaaacgtgtcctgaagacttttggc

SEQ ID NO: 111370 - DNA, 25 bp, Canis familiaris
gaacacgtcttgctaaacttcttag

SEQ ID NO: 111371 - DNA, 25 bp, Canis familiaris
gaacacccatggctagaagcctgct

SEQ ID NO: 111372 - DNA, 25 bp, Canis familiaris
gaacaaccagggtaaagcgcttatg

SEQ ID NO: 111373 - DNA, 25 bp, Canis familiaris
gaaaacacagtgcatcaaaagtcat

SEQ ID NO: 111374 - DNA, 25 bp, Canis familiaris
gactctaaaatccactaaagccaaa

SEQ ID NO: 111375 - DNA, 25 bp, Canis familiaris
gacactatagaacactccaggcaca

SEQ ID NO: 111376 - DNA, 25 bp, Canis familiaris
gacacttaaagcactccaaaccata

SEQ ID NO: 111377 - DNA, 25 bp, Canis familiaris
gaaaagaagagcaccctaagccacc

SEQ ID NO: 111378 - DNA, 25 bp, Canis familiaris
gaaacaacccagaggctacggcctc

SEQ ID NO: 111379 - DNA, 25 bp, Canis familiaris
gaaaaaggcgccactttcaggcctc

SEQ ID NO: 111380 - DNA, 25 bp, Canis familiaris
gtaaaagtctttatttctccctcat

SEQ ID NO: 111381 - DNA, 25 bp, Canis familiaris
gaaaaggttttcagggctcttctct

SEQ ID NO: 111382 - DNA, 25 bp, Canis familiaris
gaaaatggtgaggaactgggtttat

SEQ ID NO: 111383 - DNA, 25 bp, Canis familiaris
gaaaagtctggctcggaggttcttt

SEQ ID NO: 111384 - DNA, 25 bp, Canis familiaris
gaaatagggcctcatggcggttcct

SEQ ID NO: 111385 - DNA, 25 bp, Canis familiaris
gaaaaggtcactgatgcccgttttt

SEQ ID NO: 111386 - DNA, 25 bp, Canis familiaris
gaaaagcgtcctgaggccaataaat

SEQ ID NO: 111387 - DNA, 25 bp, Canis familiaris
gaaaacggttcagtggcctagtaat

SEQ ID NO: 111388 - DNA, 25 bp, Canis familiaris
gaaaacactgctgcaggtgcccaac

SEQ ID NO: 111389 - DNA, 25 bp, Canis familiaris
gaaaaatcggaccttcctgagacca

SEQ ID NO: 111390 - DNA, 25 bp, Canis familiaris
gaaaagacgaagctcacctaaagaa

SEQ ID NO: 111391 - DNA, 25 bp, Canis familiaris
gaaaagtgtaaatcaccaaaggaat

SEQ ID NO: 111392 - DNA, 25 bp, Canis familiaris
gaaaaagtaaactccagattctaca

SEQ ID NO: 111393 - DNA, 25 bp, Canis familiaris
gaaaaggtacaacttccagcaacca

SEQ ID NO: 111394 - DNA, 25 bp, Canis familiaris
gaacaatggtaggccattactcaat

SEQ ID NO: 111395 - DNA, 25 bp, Canis familiaris
gaacactggctagagccttctatca

SEQ ID NO: 111396 - DNA, 25 bp, Canis familiaris
gaacagcttttatgtctgtcttcat

SEQ ID NO: 111397 - DNA, 25 bp, Canis familiaris
gaacagatgttgtctaattgctttt

SEQ ID NO: 111398 - DNA, 25 bp, Canis familiaris
gaacaggttcatccaaatgtcgatt

SEQ ID NO: 111399 - DNA, 25 bp, Canis familiaris
gaacagagtcttctacattccttag

SEQ ID NO: 111400 - DNA, 25 bp, Canis familiaris
gaacatcagtttccctattctgctt

SEQ ID NO: 111401 - DNA, 25 bp, Canis familiaris
gaacacagatttccttttggacatc

SEQ ID NO: 111402 - DNA, 25 bp, Canis familiaris
gaacaggatctttctctctggaggc

SEQ ID NO: 111403 - DNA, 25 bp, Canis familiaris
gaacacgatccatctccagaggagc

SEQ ID NO: 111404 - DNA, 25 bp, Canis familiaris
gaacaccacctcctacaatgtaggc

SEQ ID NO: 111405 - DNA, 25 bp, Canis familiaris
gaacaccccatccttgaggggcagt

SEQ ID NO: 111406 - DNA, 25 bp, Canis familiaris
gaaacccgaaagtgaagaatgttgt

SEQ ID NO: 111407 - DNA, 25 bp, Canis familiaris
gaacaccctcaaagtatgtagagtt

SEQ ID NO: 111408 - DNA, 25 bp, Canis familiaris
gaaacccttcaagatgctaagaaag

SEQ ID NO: 111409 - DNA, 25 bp, Canis familiaris
gaaaacgattcatattgcagaagac

SEQ ID NO: 111410 - DNA, 25 bp, Canis familiaris
gaaaaggctctcgaatccaggggcc

SEQ ID NO: 111411 - DNA, 25 bp, Canis familiaris
gaaaagcggtcttgaccggcggctt

SEQ ID NO: 111412 - DNA, 25 bp, Canis familiaris
gaaaaggtgcttagacatagttact

SEQ ID NO: 111413 - DNA, 25 bp, Canis familiaris
gaacacggttgttgaatagtctcgt

SEQ ID NO: 111414 - DNA, 25 bp, Canis familiaris
gaacactggtgacatcatcatcgat

SEQ ID NO: 111415 - DNA, 25 bp, Canis familiaris
gaacagggtggcatcatctcaagtc

SEQ ID NO: 111416 - DNA, 25 bp, Canis familiaris
gaacattgggagcctcatctgcaat

SEQ ID NO: 111417 - DNA, 25 bp, Canis familiaris
gaacattgatgctgccattctgtgt

SEQ ID NO: 111418 - DNA, 25 bp, Canis familiaris
gaacatcatctgggccaatctgcgc

SEQ ID NO: 111419 - DNA, 25 bp, Canis familiaris
gaacatcatctgggccaatctgcgc

SEQ ID NO: 111420 - DNA, 25 bp, Canis familiaris
gaacatcatctgggccaatctgcgc

SEQ ID NO: 111421 - DNA, 25 bp, Canis familiaris
gaacatcatctgggccaatctgcgc

SEQ ID NO: 111422 - DNA, 25 bp, Canis familiaris
gaacatcatctgggccaatctgcgc

SEQ ID NO: 111423 - DNA, 25 bp, Canis familiaris
gaacattctgggacagactccatcc

SEQ ID NO: 111424 - DNA, 25 bp, Canis familiaris
gaacaattgaggatgccccacctaa

SEQ ID NO: 111425 - DNA, 25 bp, Canis familiaris
gaaaaatgtggtaagccccaattag

SEQ ID NO: 111426 - DNA, 25 bp, Canis familiaris
gaacagaattggaatattttcttta

SEQ ID NO: 111427 - DNA, 25 bp, Canis familiaris
gaacaaattggcgtgaagctttcat

SEQ ID NO: 111428 - DNA, 25 bp, Canis familiaris
gaacagagatttggtcagactccct

SEQ ID NO: 111429 - DNA, 25 bp, Canis familiaris
gaacagagattgtcttctgcctcca

SEQ ID NO: 111430 - DNA, 25 bp, Canis familiaris
gaacagaatgtgaaccatcactcga

SEQ ID NO: 111431 - DNA, 25 bp, Canis familiaris
gaaaagcatgtcaccacacttgcag

SEQ ID NO: 111432 - DNA, 25 bp, Canis familiaris
gaaaaatgccaagccagtcctcaaa

SEQ ID NO: 111433 - DNA, 25 bp, Canis familiaris
gaaaagattccagcaactcccaaaa

SEQ ID NO: 111434 - DNA, 25 bp, Canis familiaris
gaaaatttccccaccagtgaatgaa

SEQ ID NO: 111435 - DNA, 25 bp, Canis familiaris
taaaattagcttctaccaaactgaa

SEQ ID NO: 111436 - DNA, 25 bp, Canis familiaris
taaaattcctatatcccttaattga

SEQ ID NO: 111437 - DNA, 25 bp, Canis familiaris
gaacaataccaaaatcagccttaat

SEQ ID NO: 111438 - DNA, 25 bp, Canis familiaris
gaaaataccaattctcactaccttc

SEQ ID NO: 111439 - DNA, 25 bp, Canis familiaris
gaaactgaacgtttacaccatccca

SEQ ID NO: 111440 - DNA, 25 bp, Canis familiaris
gaaagcaaaaatgttatcctcccct

SEQ ID NO: 111441 - DNA, 25 bp, Canis familiaris
gaaaaaaaacttgctccagtctcct

SEQ ID NO: 111442 - DNA, 25 bp, Canis familiaris
gaaaagagtaaggttctccagatct

SEQ ID NO: 111443 - DNA, 25 bp, Canis familiaris
gaaaaggccgtggtatctcagcgtc

SEQ ID NO: 111444 - DNA, 25 bp, Canis familiaris
gaaaaggcccagtgatccagttcta

SEQ ID NO: 111445 - DNA, 25 bp, Canis familiaris
gaaaattttcagtagaccagtaata

SEQ ID NO: 111446 - DNA, 25 bp, Canis familiaris
gaacagattttacttacatccatat

SEQ ID NO: 111447 - DNA, 25 bp, Canis familiaris
gaacatgaacacgtgtgtacacaca

SEQ ID NO: 111448 - DNA, 25 bp, Canis familiaris
gaacagaccacattttgcagaacag

SEQ ID NO: 111449 - DNA, 25 bp, Canis familiaris
gaacacaacacaaaagcgatacgcc

SEQ ID NO: 111450 - DNA, 25 bp, Canis familiaris
gaacagagccacagaaggaccgtga

SEQ ID NO: 111451 - DNA, 25 bp, Canis familiaris
gaacatggccacgaaagcaacggtt

SEQ ID NO: 111452 - DNA, 25 bp, Canis familiaris
gaacatggaccataaacacccgatg

SEQ ID NO: 111453 - DNA, 25 bp, Canis familiaris
gaacaaggcagatgaactccccaag

SEQ ID NO: 111454 - DNA, 25 bp, Canis familiaris
gaacaaaagtagaatatcccaacaa

SEQ ID NO: 111455 - DNA, 25 bp, Canis familiaris
gaacaaaataagccaaccagagaca

SEQ ID NO: 111456 - DNA, 25 bp, Canis familiaris
gaacatcaccattaccacaaaagaa

SEQ ID NO: 111457 - DNA, 25 bp, Canis familiaris
gaacatcaataatcccatagcaaat

SEQ ID NO: 111458 - DNA, 25 bp, Canis familiaris
gaacacaagaacccatcataaattg

SEQ ID NO: 111459 - DNA, 25 bp, Canis familiaris
gaacactacaggtccacttacatgt

SEQ ID NO: 111460 - DNA, 25 bp, Canis familiaris
gaacaccccgatgcacgatatatgt

SEQ ID NO: 111461 - DNA, 25 bp, Canis familiaris
gaacaagacccaatcactggttgtg

SEQ ID NO: 111462 - DNA, 25 bp, Canis familiaris
gaacatttctcaggccacatttttg

SEQ ID NO: 111463 - DNA, 25 bp, Canis familiaris
gaacatttgccacgggctacatctt

SEQ ID NO: 111464 - DNA, 25 bp, Canis familiaris
gaacatacccaaagtctcatctctt

SEQ ID NO: 111465 - DNA, 25 bp, Canis familiaris
gaacaagcccatgatgatgccattt

SEQ ID NO: 111466 - DNA, 25 bp, Canis familiaris
gaacaagccaaggtggtcctggccg

SEQ ID NO: 111467 - DNA, 25 bp, Canis familiaris
gacaaaaagcagctggtacggtccg

SEQ ID NO: 111468 - DNA, 25 bp, Canis familiaris
gaaatgaaagagcagggcccttccc

SEQ ID NO: 111469 - DNA, 25 bp, Canis familiaris
gaacaggattattgagggcccttac

SEQ ID NO: 111470 - DNA, 25 bp, Canis familiaris
gaaaggcattcctgaggagcccaac

SEQ ID NO: 111471 - DNA, 25 bp, Canis familiaris
gaaaggagaccatttggaacccaag

SEQ ID NO: 111472 - DNA, 25 bp, Canis familiaris
gaacagggctcctgggtacctagtg

SEQ ID NO: 111473 - DNA, 25 bp, Canis familiaris
gaccgggaccgcgggtatgacaagt

SEQ ID NO: 111474 - DNA, 25 bp, Canis familiaris
gaacaaggccctcaggtgtacaagt

SEQ ID NO: 111475 - DNA, 25 bp, Canis familiaris
gaacaagtgcagcctcctgtggttc

SEQ ID NO: 111476 - DNA, 25 bp, Canis familiaris
gaaaagcagcaggctctcctgcgtc

SEQ ID NO: 111477 - DNA, 25 bp, Canis familiaris
gaacaggagcaggcacctgcctggc

SEQ ID NO: 111478 - DNA, 25 bp, Canis familiaris
gaacagcaacagggcttggtgcgta

SEQ ID NO: 111479 - DNA, 25 bp, Canis familiaris
gaacagaagcaggcgtttgccctct

SEQ ID NO: 111480 - DNA, 25 bp, Canis familiaris
gaacaaacattccttttagctcttc

SEQ ID NO: 111481 - DNA, 25 bp, Canis familiaris
gaacagtgtatctggtttgacttta

SEQ ID NO: 111482 - DNA, 25 bp, Canis familiaris
gaacaggtgtctttttctgcatatg

SEQ ID NO: 111483 - DNA, 25 bp, Canis familiaris
gaacaaggttcattttcgtgtgccc

SEQ ID NO: 111484 - DNA, 25 bp, Canis familiaris
gaaaaggccccaagtgctgggcctc

SEQ ID NO: 111485 - DNA, 25 bp, Canis familiaris
gaacacaggacacctagggcaggcc

SEQ ID NO: 111486 - DNA, 25 bp, Canis familiaris
gaaaaggacatctgagggctaccca

SEQ ID NO: 111487 - DNA, 25 bp, Canis familiaris
gaaaagtaaaattaggcttgagaca

SEQ ID NO: 111488 - DNA, 25 bp, Canis familiaris
gaaactgtgattatacggggcaaag

SEQ ID NO: 111489 - DNA, 25 bp, Canis familiaris
gaaatctggattttacccaaagaca

SEQ ID NO: 111490 - DNA, 25 bp, Canis familiaris
gaacatcagtgtttatatccgtaaa

SEQ ID NO: 111491 - DNA, 25 bp, Canis familiaris
gaacacgcatgacatcttccagtac

SEQ ID NO: 111492 - DNA, 25 bp, Canis familiaris
gatagccgaagtcatggccgtcatg

SEQ ID NO: 111493 - DNA, 25 bp, Canis familiaris
gaacacgaagtgtgtctcatttgag

SEQ ID NO: 111494 - DNA, 25 bp, Canis familiaris
gaacacgtggtgatctctcttatag

SEQ ID NO: 111495 - DNA, 25 bp, Canis familiaris
gaacacagggtgaatcctctgtccc

SEQ ID NO: 111496 - DNA, 25 bp, Canis familiaris
gacaaaggtgctatcctgcagaccc

SEQ ID NO: 111497 - DNA, 25 bp, Canis familiaris
gaaaaggtcaaaggcagcaccccac

SEQ ID NO: 111498 - DNA, 25 bp, Canis familiaris
gaaaagttcaaaatagacacctact

SEQ ID NO: 111499 - DNA, 25 bp, Canis familiaris
gaaactttttaatgaacctgactat

SEQ ID NO: 111500 - DNA, 25 bp, Canis familiaris
gaacagctttttataaattgtactt

SEQ ID NO: 111501 - DNA, 25 bp, Canis familiaris
gaacaccgtttgactaaagatcaga

SEQ ID NO: 111502 - DNA, 25 bp, Canis familiaris
gaacaacgttgtacaaagaagcagg

SEQ ID NO: 111503 - DNA, 25 bp, Canis familiaris
gaacaagttgtactataaaagcagg

SEQ ID NO: 111504 - DNA, 25 bp, Canis familiaris
gaacaagttgtacacaaaacagctg

SEQ ID NO: 111505 - DNA, 25 bp, Canis familiaris
gaaacaggttcacaaacaggtggtt

SEQ ID NO: 111506 - DNA, 25 bp, Canis familiaris
gaacagaggttagagacgcgccgcg

SEQ ID NO: 111507 - DNA, 25 bp, Canis familiaris
gaacagtgtttagcacacagcacac

SEQ ID NO: 111508 - DNA, 25 bp, Canis familiaris
tgaaagtaagtagcaaaatcccacc

SEQ ID NO: 111509 - DNA, 25 bp, Canis familiaris
gagaaacttggagaaacccctcgca

SEQ ID NO: 111510 - DNA, 25 bp, Canis familiaris
gataaccaaggtgaaacccttccag

SEQ ID NO: 111511 - DNA, 25 bp, Canis familiaris
gaaaccaaagatgaagacctagtgt

SEQ ID NO: 111512 - DNA, 25 bp, Canis familiaris
gaaacacttgaataatcccacattg

SEQ ID NO: 111513 - DNA, 25 bp, Canis familiaris
gaacaagcttcaaattatcccactg

SEQ ID NO: 111514 - DNA, 25 bp, Canis familiaris
gaacaacttttactgacctgggaat

SEQ ID NO: 111515 - DNA, 25 bp, Canis familiaris
gaacaagcttttgctgacttttata

SEQ ID NO: 111516 - DNA, 25 bp, Canis familiaris
gaacagcagggtagtctggtttcta

SEQ ID NO: 111517 - DNA, 25 bp, Canis familiaris
gaacaggccactattgtattttaat

SEQ ID NO: 111518 - DNA, 25 bp, Canis familiaris
gaacagatgatacatttccatttgt

SEQ ID NO: 111519 - DNA, 25 bp, Canis familiaris
gaacagctgttgcattacatacttt

SEQ ID NO: 111520 - DNA, 25 bp, Canis familiaris
gaacactttagcagaaactgattat

SEQ ID NO: 111521 - DNA, 25 bp, Canis familiaris
gaacacattggccaaataaagttga

SEQ ID NO: 111522 - DNA, 25 bp, Canis familiaris
gaaaatgtggcacagcataccactc

SEQ ID NO: 111523 - DNA, 25 bp, Canis familiaris
gaaaatggcacagaaacggcatcaa

SEQ ID NO: 111524 - DNA, 25 bp, Canis familiaris
gaacacaagatagaacacgggacaa

SEQ ID NO: 111525 - DNA, 25 bp, Canis familiaris
gacaacaagaagggacgggtcacgc

SEQ ID NO: 111526 - DNA, 25 bp, Canis familiaris
gaaacaaacatcagatccttgcccc

SEQ ID NO: 111527 - DNA, 25 bp, Canis familiaris
gaaacaaacatcagatccttgcccc

SEQ ID NO: 111528 - DNA, 25 bp, Canis familiaris
gaaacaaacatcagatccttgcccc

SEQ ID NO: 111529 - DNA, 25 bp, Canis familiaris
gaaacaaacatcagatccttgcccc

SEQ ID NO: 111530 - DNA, 25 bp, Canis familiaris
gaaacaaacatcagatccttgcccc

SEQ ID NO: 111531 - DNA, 25 bp, Canis familiaris
gaaacaaacatcagatccttgcccc

SEQ ID NO: 111532 - DNA, 25 bp, Canis familiaris
gaaacaaacatcagatccttgcccc

SEQ ID NO: 111533 - DNA, 25 bp, Canis familiaris
gaaacaaacatcagatccttgcccc

SEQ ID NO: 111534 - DNA, 25 bp, Canis familiaris
gaaacaaacatcagatccttgcccc

SEQ ID NO: 111535 - DNA, 25 bp, Canis familiaris
gaaacaaacatcagatccttgcccc

SEQ ID NO: 111536 - DNA, 25 bp, Canis familiaris
gaaacaaacatcagatccttgcccc

SEQ ID NO: 111537 - DNA, 25 bp, Canis familiaris
gaaacaaacatcagatccttgcccc

SEQ ID NO: 111538 - DNA, 25 bp, Canis familiaris
gaaaaatacacaaaccctgacccat

SEQ ID NO: 111539 - DNA, 25 bp, Canis familiaris
gaaaattaaagatccctctctccag

SEQ ID NO: 111540 - DNA, 25 bp, Canis familiaris
gaaaattggggaacacactccctca

SEQ ID NO: 111541 - DNA, 25 bp, Canis familiaris
gaaaataaagtgatatcctccctcc

SEQ ID NO: 111542 - DNA, 25 bp, Canis familiaris
gaaaataaagttgtgctcttgcctg

SEQ ID NO: 111543 - DNA, 25 bp, Canis familiaris
gaaaggttaggtgtgcctggctggc

SEQ ID NO: 111544 - DNA, 25 bp, Canis familiaris
gaaaaggtcaggccttcttggctga

SEQ ID NO: 111545 - DNA, 25 bp, Canis familiaris
gaaaaggtcaggccttcttggctga

SEQ ID NO: 111546 - DNA, 25 bp, Canis familiaris
gaaaaggtcagtgaatttggtcaaa

SEQ ID NO: 111547 - DNA, 25 bp, Canis familiaris
gaacaagcccagggacttctggaaa

SEQ ID NO: 111548 - DNA, 25 bp, Canis familiaris
gaaaatactacagactttggcgatc

SEQ ID NO: 111549 - DNA, 25 bp, Canis familiaris
gaaacaaccaaatctcacaaggaca

SEQ ID NO: 111550 - DNA, 25 bp, Canis familiaris
gaacaaaacttctattacgagtgac

SEQ ID NO: 111551 - DNA, 25 bp, Canis familiaris
gaacaaacttctcttccagattgat

SEQ ID NO: 111552 - DNA, 25 bp, Canis familiaris
gaaaaaattgtgattgaagaccatt

SEQ ID NO: 111553 - DNA, 25 bp, Canis familiaris
gaaacaaaatggtgaattgacctaa

SEQ ID NO: 111554 - DNA, 25 bp, Canis familiaris
gaaaagaaatgcaggttccacttca

SEQ ID NO: 111555 - DNA, 25 bp, Canis familiaris
gaaaataaatacggtgcctattgta

SEQ ID NO: 111556 - DNA, 25 bp, Canis familiaris
gaaaatctaatctgctgtgcttgaa

SEQ ID NO: 111557 - DNA, 25 bp, Canis familiaris
gaaaatctaatatcgcagcataacc

SEQ ID NO: 111558 - DNA, 25 bp, Canis familiaris
gacaaactactttggcccagttgct

SEQ ID NO: 111559 - DNA, 25 bp, Canis familiaris
gaaatagaatttgagcccaggctct

SEQ ID NO: 111560 - DNA, 25 bp, Canis familiaris
gaaaatgaacttggacctcaacttc

SEQ ID NO: 111561 - DNA, 25 bp, Canis familiaris
gaaaatagaattggccccatggctt

SEQ ID NO: 111562 - DNA, 25 bp, Canis familiaris
gaacaaaaatgatcttcgctggcat

SEQ ID NO: 111563 - DNA, 25 bp, Canis familiaris
gaacagcaatattatacccagaaat

SEQ ID NO: 111564 - DNA, 25 bp, Canis familiaris
gaacaatagaatttccggaagatga

SEQ ID NO: 111565 - DNA, 25 bp, Canis familiaris
gaacaatcaggtttctcagtaaaga

SEQ ID NO: 111566 - DNA, 25 bp, Canis familiaris
gaacaaacagcttatccagccagac

SEQ ID NO: 111567 - DNA, 25 bp, Canis familiaris
gaacagcgaagttctcacaggcagc

SEQ ID NO: 111568 - DNA, 25 bp, Canis familiaris
gaaactgcactggactatcaccact

SEQ ID NO: 111569 - DNA, 25 bp, Canis familiaris
gaacactgagtggcttcatctgccc

SEQ ID NO: 111570 - DNA, 25 bp, Canis familiaris
gaacactggtgcatctttgtacact

SEQ ID NO: 111571 - DNA, 25 bp, Canis familiaris
gaacactttgctttgtggtcactgt

SEQ ID NO: 111572 - DNA, 25 bp, Canis familiaris
gaaacttccttctggagaggattac

SEQ ID NO: 111573 - DNA, 25 bp, Canis familiaris
gaacagcttctttcatttaggatgt

SEQ ID NO: 111574 - DNA, 25 bp, Canis familiaris
gaacacatatgtttattgtagcatt

SEQ ID NO: 111575 - DNA, 25 bp, Canis familiaris
gaacactagccattttatgtgctgg

SEQ ID NO: 111576 - DNA, 25 bp, Canis familiaris
gaaaatatgcggctgtcattctggc

SEQ ID NO: 111577 - DNA, 25 bp, Canis familiaris
gaaaatttggcacttgctttgaccc

SEQ ID NO: 111578 - DNA, 25 bp, Canis familiaris
gaaaaatctcatctttgttgacccc

SEQ ID NO: 111579 - DNA, 25 bp, Canis familiaris
gaaaagactcatcttggttcctccc

SEQ ID NO: 111580 - DNA, 25 bp, Canis familiaris
gaacacagcaccaggctggttccct

SEQ ID NO: 111581 - DNA, 25 bp, Canis familiaris
gaacagcagctctaggcctggattc

SEQ ID NO: 111582 - DNA, 25 bp, Canis familiaris
gaacaagctcaaggccaggaaaatc

SEQ ID NO: 111583 - DNA, 25 bp, Canis familiaris
gaacaagtttgctacagaaaaagca

SEQ ID NO: 111584 - DNA, 25 bp, Canis familiaris
gaacagaaatctcacagaagaagac

SEQ ID NO: 111585 - DNA, 25 bp, Canis familiaris
gaaagaagaaggtaaagcaaacgca

SEQ ID NO: 111586 - DNA, 25 bp, Canis familiaris
gaaaatcaaaccaacaacaacaaca

SEQ ID NO: 111587 - DNA, 25 bp, Canis familiaris
gaaaataaaagtaccagacagcaaa

SEQ ID NO: 111588 - DNA, 25 bp, Canis familiaris
gaaaatacaatgctcccaaaccttt

SEQ ID NO: 111589 - DNA, 25 bp, Canis familiaris
gaaaaatctatctcccagaactctg

SEQ ID NO: 111590 - DNA, 25 bp, Canis familiaris
gaaaaatctggcacactggaaagct

SEQ ID NO: 111591 - DNA, 25 bp, Canis familiaris
gaaagatgacatggttcggggaggg

SEQ ID NO: 111592 - DNA, 25 bp, Canis familiaris
gaaaatgactggtgggtgtgcaagc

SEQ ID NO: 111593 - DNA, 25 bp, Canis familiaris
gaaaatgacatttgggctgtctcta

SEQ ID NO: 111594 - DNA, 25 bp, Canis familiaris
gaaaatagattagtggttgcctcag

SEQ ID NO: 111595 - DNA, 25 bp, Canis familiaris
gaaaatagcaataggggcagcccag

SEQ ID NO: 111596 - DNA, 25 bp, Canis familiaris
gaaacaggagtcaaagcaccccagt

SEQ ID NO: 111597 - DNA, 25 bp, Canis familiaris
gaaacagcgcattgccatagctcgc

SEQ ID NO: 111598 - DNA, 25 bp, Canis familiaris
gaacactatcattgacaacggccaa

SEQ ID NO: 111599 - DNA, 25 bp, Canis familiaris
gaacacttctaatgagggacagctg

SEQ ID NO: 111600 - DNA, 25 bp, Canis familiaris
gaacactttcaattgaaccagacat

SEQ ID NO: 111601 - DNA, 25 bp, Canis familiaris
gaaacatttcatgagattccataat

SEQ ID NO: 111602 - DNA, 25 bp, Canis familiaris
gaacacatccaagtatgtacctatt

SEQ ID NO: 111603 - DNA, 25 bp, Canis familiaris
gaaaaccaccaactgacctaataat

SEQ ID NO: 111604 - DNA, 25 bp, Canis familiaris
gaaaaatgcacctacaaactaatta

SEQ ID NO: 111605 - DNA, 25 bp, Canis familiaris
gaaaaggcacagatgcgaacttact

SEQ ID NO: 111606 - DNA, 25 bp, Canis familiaris
gaaaatggcggtccttatcttcact

SEQ ID NO: 111607 - DNA, 25 bp, Canis familiaris
gaaaatgtgcgcttgttttcgtctt

SEQ ID NO: 111608 - DNA, 25 bp, Canis familiaris
gaaaatcatgccgcttttacctttt

SEQ ID NO: 111609 - DNA, 25 bp, Canis familiaris
gaacaatctgttgttttttcgtatt

SEQ ID NO: 111610 - DNA, 25 bp, Canis familiaris
gaacaccttgtgacttttgctttaa

SEQ ID NO: 111611 - DNA, 25 bp, Canis familiaris
gaaaagatgtgtgttttggtgtaaa

SEQ ID NO: 111612 - DNA, 25 bp, Canis familiaris
gaaaagtgctgctctttgtcatgag

SEQ ID NO: 111613 - DNA, 25 bp, Canis familiaris
gaacaaggagcatgttgattggagg

SEQ ID NO: 111614 - DNA, 25 bp, Canis familiaris
gaaaagctgatctggagttgcggaa

SEQ ID NO: 111615 - DNA, 25 bp, Canis familiaris
gaaaacagctctctgatttactgaa

SEQ ID NO: 111616 - DNA, 25 bp, Canis familiaris
gaaaaagatgtgctgccttcactga

SEQ ID NO: 111617 - DNA, 25 bp, Canis familiaris
gaaaataatcatttgcctatctatg

SEQ ID NO: 111618 - DNA, 25 bp, Canis familiaris
gaacacttagatttgcatattctta

SEQ ID NO: 111619 - DNA, 25 bp, Canis familiaris
gaacacattaaagctgttcttggtg

SEQ ID NO: 111620 - DNA, 25 bp, Canis familiaris
gaaacttaactcttttgttgcagat

SEQ ID NO: 111621 - DNA, 25 bp, Canis familiaris
gaaaattaggtctgaattcaagaga

SEQ ID NO: 111622 - DNA, 25 bp, Canis familiaris
gaaaataaggtctgctcaacacaat

SEQ ID NO: 111623 - DNA, 25 bp, Canis familiaris
gaaaaaagtatctgtaactcatgtt

SEQ ID NO: 111624 - DNA, 25 bp, Canis familiaris
gaacagacaagctaccaaaaattat

SEQ ID NO: 111625 - DNA, 25 bp, Canis familiaris
gaaaaatactgacctaagacattga

SEQ ID NO: 111626 - DNA, 25 bp, Canis familiaris
gaacaacatactagaccagatggat

SEQ ID NO: 111627 - DNA, 25 bp, Canis familiaris
gaacaacgtctttgacgagtgaatc

SEQ ID NO: 111628 - DNA, 25 bp, Canis familiaris
gaacagccaggcagggtgaggaggc

SEQ ID NO: 111629 - DNA, 25 bp, Canis familiaris
gaacacctgctgtgaggctagaggc

SEQ ID NO: 111630 - DNA, 25 bp, Canis familiaris
gaacactggctctggctgccagatg

SEQ ID NO: 111631 - DNA, 25 bp, Canis familiaris
gaacacgggttgctgcagcaggatg

SEQ ID NO: 111632 - DNA, 25 bp, Canis familiaris
gaacactagctgtctttcgaggtct

SEQ ID NO: 111633 - DNA, 25 bp, Canis familiaris
gaacaccacttcgattgcgggattt

SEQ ID NO: 111634 - DNA, 25 bp, Canis familiaris
gaacagccctggaatggcgggtttc

SEQ ID NO: 111635 - DNA, 25 bp, Canis familiaris
gaacaacctgggcactgcagtggtt

SEQ ID NO: 111636 - DNA, 25 bp, Canis familiaris
gaacaccttgaagattgggcttaag

SEQ ID NO: 111637 - DNA, 25 bp, Canis familiaris
gaacacctgaggtcacatgtgtggt

SEQ ID NO: 111638 - DNA, 25 bp, Canis familiaris
gaacaacttgagtgctgatcaggta

SEQ ID NO: 111639 - DNA, 25 bp, Canis familiaris
gaaaacattgttactatctggagac

SEQ ID NO: 111640 - DNA, 25 bp, Canis familiaris
gaaaacattgattcgacagatgcgg

SEQ ID NO: 111641 - DNA, 25 bp, Canis familiaris
gaacaacttctaaatcatcatgagg

SEQ ID NO: 111642 - DNA, 25 bp, Canis familiaris
gaacacctttcaatagcaagagagc

SEQ ID NO: 111643 - DNA, 25 bp, Canis familiaris
gaacacactatatcttcagatgaac

SEQ ID NO: 111644 - DNA, 25 bp, Canis familiaris
gaacaatcaattgcttggataatca

SEQ ID NO: 111645 - DNA, 25 bp, Canis familiaris
gaaaatccatcttttttgaatagtt

SEQ ID NO: 111646 - DNA, 25 bp, Canis familiaris
gaaaattctcatttcttcttttttg

SEQ ID NO: 111647 - DNA, 25 bp, Canis familiaris
gaaaattctataacctctttgctgt

SEQ ID NO: 111648 - DNA, 25 bp, Canis familiaris
gaaaattgccagatactctttctga

SEQ ID NO: 111649 - DNA, 25 bp, Canis familiaris
gaacaatctctgcatgaagctcttt

SEQ ID NO: 111650 - DNA, 25 bp, Canis familiaris
gaaaatgctctgactcaggctttca

SEQ ID NO: 111651 - DNA, 25 bp, Canis familiaris
gaacagactcaggcgatgtgcttta

SEQ ID NO: 111652 - DNA, 25 bp, Canis familiaris
gaacagactcaggcgatgtgcttta

SEQ ID NO: 111653 - DNA, 25 bp, Canis familiaris
gaacacctcagcaggctgtgcttgg

SEQ ID NO: 111654 - DNA, 25 bp, Canis familiaris
gaacaccacacaacgtctgttttgt

SEQ ID NO: 111655 - DNA, 25 bp, Canis familiaris
gaaacccccaagctgtatctttatt

SEQ ID NO: 111656 - DNA, 25 bp, Canis familiaris
gaaaacccaaactgagcatccatta

SEQ ID NO: 111657 - DNA, 25 bp, Canis familiaris
gaaaagcccaaagatgaccctaatt

SEQ ID NO: 111658 - DNA, 25 bp, Canis familiaris
gaaaagcctatttgtaacctataca

SEQ ID NO: 111659 - DNA, 25 bp, Canis familiaris
gaaaatctcttttgaacacgatgtc

SEQ ID NO: 111660 - DNA, 25 bp, Canis familiaris
gaaacattgcttctgaaaggtgtgt

SEQ ID NO: 111661 - DNA, 25 bp, Canis familiaris
gaaaagtatgtgggtagtggtggtt

SEQ ID NO: 111662 - DNA, 25 bp, Canis familiaris
gaacaagccaggcgccagtgggaac

SEQ ID NO: 111663 - DNA, 25 bp, Canis familiaris
gaacaagactggaagctagtaggaa

SEQ ID NO: 111664 - DNA, 25 bp, Canis familiaris
gaacactgtttgacactggcaagga

SEQ ID NO: 111665 - DNA, 25 bp, Canis familiaris
gaacacttttaccagaaaggacgat

SEQ ID NO: 111666 - DNA, 25 bp, Canis familiaris
gaacagctgtgttcacggtgaagcg

SEQ ID NO: 111667 - DNA, 25 bp, Canis familiaris
gaacagcattgcgtcattggggagg

SEQ ID NO: 111668 - DNA, 25 bp, Canis familiaris
gaacagcatcaggattgtgtcggag

SEQ ID NO: 111669 - DNA, 25 bp, Canis familiaris
gaaacaagctgaatgtgcacctgga

SEQ ID NO: 111670 - DNA, 25 bp, Canis familiaris
gaaacagtgtgcaatgatgtcctgg

SEQ ID NO: 111671 - DNA, 25 bp, Canis familiaris
gaaaagatgctcaatgtcattaatc

SEQ ID NO: 111672 - DNA, 25 bp, Canis familiaris
gaacaagatgcttttcaggtatcaa

SEQ ID NO: 111673 - DNA, 25 bp, Canis familiaris
gaaacatgatgttcattggagaaat

SEQ ID NO: 111674 - DNA, 25 bp, Canis familiaris
gaacacagattgtatcggggaacct

SEQ ID NO: 111675 - DNA, 25 bp, Canis familiaris
gaacaccatcgatcggtgggtccca

SEQ ID NO: 111676 - DNA, 25 bp, Canis familiaris
gaaaacggattctcgggatccctgg

SEQ ID NO: 111677 - DNA, 25 bp, Canis familiaris
gaaaagctggtacgcctgcaggtac

SEQ ID NO: 111678 - DNA, 25 bp, Canis familiaris
gaaaatgggtgcatcctgtgagtag

SEQ ID NO: 111679 - DNA, 25 bp, Canis familiaris
gaaaatgtcgtctcctttctaaatt

SEQ ID NO: 111680 - DNA, 25 bp, Canis familiaris
gaaaagtctttagcttctcttggta

SEQ ID NO: 111681 - DNA, 25 bp, Canis familiaris
gaaaaggttcaaggccttcttggct

SEQ ID NO: 111682 - DNA, 25 bp, Canis familiaris
gaaaatgtgttctgttttgtagagg

SEQ ID NO: 111683 - DNA, 25 bp, Canis familiaris
gaaaacctcctacttttggagatgc

SEQ ID NO: 111684 - DNA, 25 bp, Canis familiaris
gaaaagcctcctaactttcagtgag

SEQ ID NO: 111685 - DNA, 25 bp, Canis familiaris
gaaaagaccttcaaattccagccaa

SEQ ID NO: 111686 - DNA, 25 bp, Canis familiaris
gaaaattgctttaaaacccacatgc

SEQ ID NO: 111687 - DNA, 25 bp, Canis familiaris
gaaaattttcataaaagcaactttg

SEQ ID NO: 111688 - DNA, 25 bp, Canis familiaris
gaaaattatttcagagcagccaggt

SEQ ID NO: 111689 - DNA, 25 bp, Canis familiaris
gaacacaaatgtaaagagagccagg

SEQ ID NO: 111690 - DNA, 25 bp, Canis familiaris
gaaaagcaatagtcaccaagccagg

SEQ ID NO: 111691 - DNA, 25 bp, Canis familiaris
gaaacaaatctggccctcatgtcag

SEQ ID NO: 111692 - DNA, 25 bp, Canis familiaris
gaaaaagtccctctcatatatgttt

SEQ ID NO: 111693 - DNA, 25 bp, Canis familiaris
gaaaaaccaggctccatctactgtt

SEQ ID NO: 111694 - DNA, 25 bp, Canis familiaris
gaaaaacgccaagtacatctgcctg

SEQ ID NO: 111695 - DNA, 25 bp, Canis familiaris
gaaaaagcccaaaagtcatgtccat

SEQ ID NO: 111696 - DNA, 25 bp, Canis familiaris
gaaaactgtactaattgtctgtctt

SEQ ID NO: 111697 - DNA, 25 bp, Canis familiaris
gaaaactgttttatagctgctcttg

SEQ ID NO: 111698 - DNA, 25 bp, Canis familiaris
gaaaactttcccatatgttcggtag

SEQ ID NO: 111699 - DNA, 25 bp, Canis familiaris
gaaaactttaccactggtcagcaat

SEQ ID NO: 111700 - DNA, 25 bp, Canis familiaris
gaaaacctaacacatctggaagaca

SEQ ID NO: 111701 - DNA, 25 bp, Canis familiaris
gaaaacctaactcatttgggatctt

SEQ ID NO: 111702 - DNA, 25 bp, Canis familiaris
gaaaatttaagacattcctgtgttt

SEQ ID NO: 111703 - DNA, 25 bp, Canis familiaris
gaaaatttagaattcattccttgtg

SEQ ID NO: 111704 - DNA, 25 bp, Canis familiaris
gaaaattaaccttattccatgttga

SEQ ID NO: 111705 - DNA, 25 bp, Canis familiaris
gaaaatgtcaacataatctccatta

SEQ ID NO: 111706 - DNA, 25 bp, Canis familiaris
gaaaatgatcgaactgcacaccttg

SEQ ID NO: 111707 - DNA, 25 bp, Canis familiaris
gaacacatgataattcctcaccagt

SEQ ID NO: 111708 - DNA, 25 bp, Canis familiaris
gaaaagagatatgcaccctcatgtt

SEQ ID NO: 111709 - DNA, 25 bp, Canis familiaris
gaaaagcgagatggcacggtgttac

SEQ ID NO: 111710 - DNA, 25 bp, Canis familiaris
gaacaaggttcctgtgtgctacaca

SEQ ID NO: 111711 - DNA, 25 bp, Canis familiaris
gactaaggggcctggatctacctgt

SEQ ID NO: 111712 - DNA, 25 bp, Canis familiaris
gaaaagggggaaagtgctcaccatt

SEQ ID NO: 111713 - DNA, 25 bp, Canis familiaris
gaaaaggacggatgaagccgccttc

SEQ ID NO: 111714 - DNA, 25 bp, Canis familiaris
gaaaaaccaagatgaagtgcccagt

SEQ ID NO: 111715 - DNA, 25 bp, Canis familiaris
gaaaacacactagacaattccctgt

SEQ ID NO: 111716 - DNA, 25 bp, Canis familiaris
gaaaactcctaggaacttctgcccg

SEQ ID NO: 111717 - DNA, 25 bp, Canis familiaris
gaaacccagtaatcactgtgtccaa

SEQ ID NO: 111718 - DNA, 25 bp, Canis familiaris
gaacaccccaaatccatgattctgc

SEQ ID NO: 111719 - DNA, 25 bp, Canis familiaris
gaacactcccgattaaggattctgt

SEQ ID NO: 111720 - DNA, 25 bp, Canis familiaris
gaacactcaagtttaagagctttgt

SEQ ID NO: 111721 - DNA, 25 bp, Canis familiaris
gaacaaatcaatcctaagacatttt

SEQ ID NO: 111722 - DNA, 25 bp, Canis familiaris
gaacaactagacttacaggcagtgt

SEQ ID NO: 111723 - DNA, 25 bp, Canis familiaris
gaacaacaaaactcagctgtgtgtc

SEQ ID NO: 111724 - DNA, 25 bp, Canis familiaris
gaacaacacagtaactcctggtggc

SEQ ID NO: 111725 - DNA, 25 bp, Canis familiaris
gaaaacatgctggagaccctggtcc

SEQ ID NO: 111726 - DNA, 25 bp, Canis familiaris
gaaaattgctgctgcgggtggtacc

SEQ ID NO: 111727 - DNA, 25 bp, Canis familiaris
gaaaactctgagacggtggttacgg

SEQ ID NO: 111728 - DNA, 25 bp, Canis familiaris
gaaaatcgggtcattggtactcgga

SEQ ID NO: 111729 - DNA, 25 bp, Canis familiaris
gaacaacggcttaacatggaaaagg

SEQ ID NO: 111730 - DNA, 25 bp, Canis familiaris
gaaaagggattaattgtcaaaggtg

SEQ ID NO: 111731 - DNA, 25 bp, Canis familiaris
gaaaggggtttgtgaatagcgttga

SEQ ID NO: 111732 - DNA, 25 bp, Canis familiaris
gaaagacggtttccagagacctgtt

SEQ ID NO: 111733 - DNA, 25 bp, Canis familiaris
gaaaacccttgtgtgagtcacgttt

SEQ ID NO: 111734 - DNA, 25 bp, Canis familiaris
gaaaacccttgtgtgctgtattgac

SEQ ID NO: 111735 - DNA, 25 bp, Canis familiaris
gaaaagccaacgaattgtgtgcaaa

SEQ ID NO: 111736 - DNA, 25 bp, Canis familiaris
gaaaagcggactggtctcttgctca

SEQ ID NO: 111737 - DNA, 25 bp, Canis familiaris
gaaaatgacatgtactgtcttttca

SEQ ID NO: 111738 - DNA, 25 bp, Canis familiaris
gaaaaataaatcttgctcctacaaa

SEQ ID NO: 111739 - DNA, 25 bp, Canis familiaris
gaaaccatcatggagggtcctaaaa

SEQ ID NO: 111740 - DNA, 25 bp, Canis familiaris
gaacacacacagaagggtcaccaga

SEQ ID NO: 111741 - DNA, 25 bp, Canis familiaris
gaacacagcgtgaaacgtgcccagg

SEQ ID NO: 111742 - DNA, 25 bp, Canis familiaris
gaacaaggctgatctggagacacag

SEQ ID NO: 111743 - DNA, 25 bp, Canis familiaris
gaaaaggcgagcggtgggcatctgg

SEQ ID NO: 111744 - DNA, 25 bp, Canis familiaris
gaaagggtggcctgcaggctgtggt

SEQ ID NO: 111745 - DNA, 25 bp, Canis familiaris
gaacacgtgaaggcgtcaggctgtc

SEQ ID NO: 111746 - DNA, 25 bp, Canis familiaris
gaacacggaatggagcagcagatgc

SEQ ID NO: 111747 - DNA, 25 bp, Canis familiaris
gaacacggactggagcaccatttcc

SEQ ID NO: 111748 - DNA, 25 bp, Canis familiaris
gaacacagataagggcaacaatccc

SEQ ID NO: 111749 - DNA, 25 bp, Canis familiaris
gaaaaagccgggctcaatcacccaa

SEQ ID NO: 111750 - DNA, 25 bp, Canis familiaris
gaaaccccaaggcacaataaccaag

SEQ ID NO: 111751 - DNA, 25 bp, Canis familiaris
gaaaaccctagagaaaactcaagag

SEQ ID NO: 111752 - DNA, 25 bp, Canis familiaris
gaaagcccgctacaacaaacgaagg

SEQ ID NO: 111753 - DNA, 25 bp, Canis familiaris
gaaacgactccagaacaaccgacgt

SEQ ID NO: 111754 - DNA, 25 bp, Canis familiaris
gaacactactccaggatacactctg

SEQ ID NO: 111755 - DNA, 25 bp, Canis familiaris
gaacactaattcataatcactctaa

SEQ ID NO: 111756 - DNA, 25 bp, Canis familiaris
gaacactttatcactacagctctgt

SEQ ID NO: 111757 - DNA, 25 bp, Canis familiaris
gaacactagtatcctccaaatcaga

SEQ ID NO: 111758 - DNA, 25 bp, Canis familiaris
gaaactattacagccaaacagaact

SEQ ID NO: 111759 - DNA, 25 bp, Canis familiaris
gaacactcctcagccaacaaaggaa

SEQ ID NO: 111760 - DNA, 25 bp, Canis familiaris
gaaaatcccagcagtgacaagagta

SEQ ID NO: 111761 - DNA, 25 bp, Canis familiaris
gaaactctgcaaccctggcaagaat

SEQ ID NO: 111762 - DNA, 25 bp, Canis familiaris
gaaaaggcaaccaggctaatatcaa

SEQ ID NO: 111763 - DNA, 25 bp, Canis familiaris
gaaaaacaaccacgcagtagagtcc

SEQ ID NO: 111764 - DNA, 25 bp, Canis familiaris
gaaaccctaccagtgcagcgggtgc

SEQ ID NO: 111765 - DNA, 25 bp, Canis familiaris
gaaaacctcactttggtggatgtgc

SEQ ID NO: 111766 - DNA, 25 bp, Canis familiaris
gaaaacctcaccatgttctgatgac

SEQ ID NO: 111767 - DNA, 25 bp, Canis familiaris
gaaaagaacctgctttcatgatgtc

SEQ ID NO: 111768 - DNA, 25 bp, Canis familiaris
gaacactaacaggtctttgctatac

SEQ ID NO: 111769 - DNA, 25 bp, Canis familiaris
gaacacacaacaagtctatccttta

SEQ ID NO: 111770 - DNA, 25 bp, Canis familiaris
gaaacgaagctctcttctcgttacc

SEQ ID NO: 111771 - DNA, 25 bp, Canis familiaris
gaaaaagatgtctcttctccttctc

SEQ ID NO: 111772 - DNA, 25 bp, Canis familiaris
gaaaatggattctgtaccacctgta

SEQ ID NO: 111773 - DNA, 25 bp, Canis familiaris
gaaacaggagaatgtgacccctaac

SEQ ID NO: 111774 - DNA, 25 bp, Canis familiaris
gaaactaaattaaacttcgctgaat

SEQ ID NO: 111775 - DNA, 25 bp, Canis familiaris
gaaacttagtaaagagcttcctaga

SEQ ID NO: 111776 - DNA, 25 bp, Canis familiaris
gaaaacaacatttagagcctccaaa

SEQ ID NO: 111777 - DNA, 25 bp, Canis familiaris
gaacaagccttttaggacttcacca

SEQ ID NO: 111778 - DNA, 25 bp, Canis familiaris
gaaaactttctgtttctcttgcagc

SEQ ID NO: 111779 - DNA, 25 bp, Canis familiaris
gaaaatctattcgcttctttcgctg

SEQ ID NO: 111780 - DNA, 25 bp, Canis familiaris
gaaaatctattcgcttctttcgctg

SEQ ID NO: 111781 - DNA, 25 bp, Canis familiaris
gaaaatctattcgcttctttcgctg

SEQ ID NO: 111782 - DNA, 25 bp, Canis familiaris
gaaaatctattcgcttctttcgctg

SEQ ID NO: 111783 - DNA, 25 bp, Canis familiaris
gaaaatctattcgcttctttcgctg

SEQ ID NO: 111784 - DNA, 25 bp, Canis familiaris
gaaaattaaaccttattatcagcta

SEQ ID NO: 111785 - DNA, 25 bp, Canis familiaris
gaaaatccaccttcgtattacagta

SEQ ID NO: 111786 - DNA, 25 bp, Canis familiaris
gaacaaccggcgtctgtttgagcag

SEQ ID NO: 111787 - DNA, 25 bp, Canis familiaris
gaacaagggctgcagtgtttacagg

SEQ ID NO: 111788 - DNA, 25 bp, Canis familiaris
gaacaatcacctccagttattacag

SEQ ID NO: 111789 - DNA, 25 bp, Canis familiaris
gaaaaatgcccaagtctgaagacag

SEQ ID NO: 111790 - DNA, 25 bp, Canis familiaris
gaaaattgacccttctgggatccct

SEQ ID NO: 111791 - DNA, 25 bp, Canis familiaris
gaaaagtgacagccggctgtggatt

SEQ ID NO: 111792 - DNA, 25 bp, Canis familiaris
gaaaagtgacagctgccatgggcaa

SEQ ID NO: 111793 - DNA, 25 bp, Canis familiaris
gaaagattaattcccttggcaatgc

SEQ ID NO: 111794 - DNA, 25 bp, Canis familiaris
gaaaacaaattgggcctggcacaca

SEQ ID NO: 111795 - DNA, 25 bp, Canis familiaris
gaaaatgaacttctctcgctacaca

SEQ ID NO: 111796 - DNA, 25 bp, Canis familiaris
gaaaaccagttgttctgacaagaca

SEQ ID NO: 111797 - DNA, 25 bp, Canis familiaris
gaacaaccggtttctcagaagctga

SEQ ID NO: 111798 - DNA, 25 bp, Canis familiaris
gaaaatctcttaaacctacagatga

SEQ ID NO: 111799 - DNA, 25 bp, Canis familiaris
gaaaatctttcgatctgtcacaaca

SEQ ID NO: 111800 - DNA, 25 bp, Canis familiaris
gaaaatgcttttatctcaaatacat

SEQ ID NO: 111801 - DNA, 25 bp, Canis familiaris
gaaaacttatctgatgccaaaattt

SEQ ID NO: 111802 - DNA, 25 bp, Canis familiaris
gaaaagtctatcgaatgcgaggagt

SEQ ID NO: 111803 - DNA, 25 bp, Canis familiaris
gaaaattgctttgatcgcgcatgac

SEQ ID NO: 111804 - DNA, 25 bp, Canis familiaris
gaacaaatgtgtgctatcctgcaga

SEQ ID NO: 111805 - DNA, 25 bp, Canis familiaris
gaacaacttgatgtcgactgcatat

SEQ ID NO: 111806 - DNA, 25 bp, Canis familiaris
gaaaagccagtcatcgagctctgga

SEQ ID NO: 111807 - DNA, 25 bp, Canis familiaris
gaaaaggctatctgcgagtcgaagt

SEQ ID NO: 111808 - DNA, 25 bp, Canis familiaris
gaaaagctgctcgggggtggaattt

SEQ ID NO: 111809 - DNA, 25 bp, Canis familiaris
gaacaactccccctgaatggataat

SEQ ID NO: 111810 - DNA, 25 bp, Canis familiaris
gaacacacatgcacccataattttt

SEQ ID NO: 111811 - DNA, 25 bp, Canis familiaris
gaacacacattacttctgaatttca

SEQ ID NO: 111812 - DNA, 25 bp, Canis familiaris
gaaaagttcagtccgagagttcaaa

SEQ ID NO: 111813 - DNA, 25 bp, Canis familiaris
gaaaatgttcaggagagagctttaa

SEQ ID NO: 111814 - DNA, 25 bp, Canis familiaris
gaaaagttgccagagatgcttcgaa

SEQ ID NO: 111815 - DNA, 25 bp, Canis familiaris
gaaaatcttgcccaaatgttctcaa

SEQ ID NO: 111816 - DNA, 25 bp, Canis familiaris
gaaaaagtgcccagagctcaccaag

SEQ ID NO: 111817 - DNA, 25 bp, Canis familiaris
gaaaagcagtcatcagtacccaagg

SEQ ID NO: 111818 - DNA, 25 bp, Canis familiaris
gaaaatccagagtagtaacgaagag

SEQ ID NO: 111819 - DNA, 25 bp, Canis familiaris
gaaaatcccgaagaaggtatgatga

SEQ ID NO: 111820 - DNA, 25 bp, Canis familiaris
gaaaacccatgctatggtggttaat

SEQ ID NO: 111821 - DNA, 25 bp, Canis familiaris
gaaaatgcccacctgaggaaataag

SEQ ID NO: 111822 - DNA, 25 bp, Canis familiaris
gaaacagacccataaaaatacagag

SEQ ID NO: 111823 - DNA, 25 bp, Canis familiaris
gaaaggaccctctcaaaattctgga

SEQ ID NO: 111824 - DNA, 25 bp, Canis familiaris
gaaaggaatcctcaaccttcctgaa

SEQ ID NO: 111825 - DNA, 25 bp, Canis familiaris
gaaagggaaaccgcctatttcacat

SEQ ID NO: 111826 - DNA, 25 bp, Canis familiaris
gaaaatggaaacccatccttttctg

SEQ ID NO: 111827 - DNA, 25 bp, Canis familiaris
gaaaaggaaatcacgccctcgaggg

SEQ ID NO: 111828 - DNA, 25 bp, Canis familiaris
gaaaagcgaaaaagaggcagccggg

SEQ ID NO: 111829 - DNA, 25 bp, Canis familiaris
gaaaagcctggattgggcagcccgg

SEQ ID NO: 111830 - DNA, 25 bp, Canis familiaris
gaaaatgctttgtttctgagccctg

SEQ ID NO: 111831 - DNA, 25 bp, Canis familiaris
gaaaagcttgttatgcattgcctgc

SEQ ID NO: 111832 - DNA, 25 bp, Canis familiaris
gaaactaagcttctgattcattggc

SEQ ID NO: 111833 - DNA, 25 bp, Canis familiaris
gaaactacgatcaaagatccagggc

SEQ ID NO: 111834 - DNA, 25 bp, Canis familiaris
gaaacatgatcctcaaaaagtgggt

SEQ ID NO: 111835 - DNA, 25 bp, Canis familiaris
gaaactcttccctaactcaggaggt

SEQ ID NO: 111836 - DNA, 25 bp, Canis familiaris
gaaaatttcaccacactgaggcaaa

SEQ ID NO: 111837 - DNA, 25 bp, Canis familiaris
gaaaattgcctccaccagctgagga

SEQ ID NO: 111838 - DNA, 25 bp, Canis familiaris
gaacaacgcttccacacaaacaggc

SEQ ID NO: 111839 - DNA, 25 bp, Canis familiaris
gaaacacgttccaacaaactcctgg

SEQ ID NO: 111840 - DNA, 25 bp, Canis familiaris
gaaaatccttccgacaaagctctca

SEQ ID NO: 111841 - DNA, 25 bp, Canis familiaris
gaaaaatgctttcacaaattccctc

SEQ ID NO: 111842 - DNA, 25 bp, Canis familiaris
gaaacggctcattctaaaattcctt

SEQ ID NO: 111843 - DNA, 25 bp, Canis familiaris
gaaaacctctgagttctaattcctt

SEQ ID NO: 111844 - DNA, 25 bp, Canis familiaris
gaaaaccactgctgcttaaatctgc

SEQ ID NO: 111845 - DNA, 25 bp, Canis familiaris
gaaaagtcctgctggctgacaagtc

SEQ ID NO: 111846 - DNA, 25 bp, Canis familiaris
gaaaaacctgcaagagtatcaagag

SEQ ID NO: 111847 - DNA, 25 bp, Canis familiaris
gaaaaacctgccaaatatgatgaca

SEQ ID NO: 111848 - DNA, 25 bp, Canis familiaris
gaaaattcactgtctaaaagccaag

SEQ ID NO: 111849 - DNA, 25 bp, Canis familiaris
gaaaattgcctgtgctgaaacataa

SEQ ID NO: 111850 - DNA, 25 bp, Canis familiaris
gaaaagtgccgctctgacatggctc

SEQ ID NO: 111851 - DNA, 25 bp, Canis familiaris
gaaaatgtgctcggagttctggctc

SEQ ID NO: 111852 - DNA, 25 bp, Canis familiaris
gaaaattctgcggactttgtgtgtg

SEQ ID NO: 111853 - DNA, 25 bp, Canis familiaris
gaaacttgatgggaacattggggac

SEQ ID NO: 111854 - DNA, 25 bp, Canis familiaris
gaaacttgtgtgggtgctttagtaa

SEQ ID NO: 111855 - DNA, 25 bp, Canis familiaris
gaaacttggtactgttatcactcca

SEQ ID NO: 111856 - DNA, 25 bp, Canis familiaris
gaaactgcctgtccgggaaaaccat

SEQ ID NO: 111857 - DNA, 25 bp, Canis familiaris
gaaacgccgtacagagacaagacaa

SEQ ID NO: 111858 - DNA, 25 bp, Canis familiaris
gaaaccctgccgagctcaaatagaa

SEQ ID NO: 111859 - DNA, 25 bp, Canis familiaris
gaaacacggtgcccagtacagtaga

SEQ ID NO: 111860 - DNA, 25 bp, Canis familiaris
gaaaacaaggtggcttctcattaga

SEQ ID NO: 111861 - DNA, 25 bp, Canis familiaris
gaaaataacttccttctttgagagt

SEQ ID NO: 111862 - DNA, 25 bp, Canis familiaris
gaaaattaccttctctgtgtgatgg

SEQ ID NO: 111863 - DNA, 25 bp, Canis familiaris
gaaagtttccttctctggaggacac

SEQ ID NO: 111864 - DNA, 25 bp, Canis familiaris
gaaagttgcttttggcctaaggatc

SEQ ID NO: 111865 - DNA, 25 bp, Canis familiaris
gaaagagtgtgcttactgcctaacc

SEQ ID NO: 111866 - DNA, 25 bp, Canis familiaris
gaaaggggacacatccatacagtca

SEQ ID NO: 111867 - DNA, 25 bp, Canis familiaris
gaaagttggaggcacctggcagcta

SEQ ID NO: 111868 - DNA, 25 bp, Canis familiaris
gaaaacagaaggcagctcggcagct

SEQ ID NO: 111869 - DNA, 25 bp, Canis familiaris
gaaaacgaagtccagacgggcccag

SEQ ID NO: 111870 - DNA, 25 bp, Canis familiaris
gaaaacgccgaccaaggtgacacca

SEQ ID NO: 111871 - DNA, 25 bp, Canis familiaris
gaaaatccctgagaaagccacacca

SEQ ID NO: 111872 - DNA, 25 bp, Canis familiaris
gaaaagcctatacaaagtccaaaga

SEQ ID NO: 111873 - DNA, 25 bp, Canis familiaris
gaaaaccaacaccagaggtccagag

SEQ ID NO: 111874 - DNA, 25 bp, Canis familiaris
gaaaaaatccaccatagttcaccaa

SEQ ID NO: 111875 - DNA, 25 bp, Canis familiaris
gaaaacacatacttaagtagcccaa

SEQ ID NO: 111876 - DNA, 25 bp, Canis familiaris
gaaaccaatacaccaggataccttt

SEQ ID NO: 111877 - DNA, 25 bp, Canis familiaris
gaaacacagtgaaccaagtagttct

SEQ ID NO: 111878 - DNA, 25 bp, Canis familiaris
gaaacaagtggaccaagtagttcta

SEQ ID NO: 111879 - DNA, 25 bp, Canis familiaris
gaaaaactaattgagcctgtgtcta

SEQ ID NO: 111880 - DNA, 25 bp, Canis familiaris
gaaaatacttaagacctgttctcaa

SEQ ID NO: 111881 - DNA, 25 bp, Canis familiaris
gaaaatgactgttaccccttggaat

SEQ ID NO: 111882 - DNA, 25 bp, Canis familiaris
gaaaaaatgtcccccttggagcaat

SEQ ID NO: 111883 - DNA, 25 bp, Canis familiaris
gaaaacattgtgggcctttgggtca

SEQ ID NO: 111884 - DNA, 25 bp, Canis familiaris
gaaaagcattggggattgacggttt

SEQ ID NO: 111885 - DNA, 25 bp, Canis familiaris
gaaagcgaggccgcagtacggtttc

SEQ ID NO: 111886 - DNA, 25 bp, Canis familiaris
gaaaacaagcccagccacaggatat

SEQ ID NO: 111887 - DNA, 25 bp, Canis familiaris
gaaaatccatcctattcctcaggtt

SEQ ID NO: 111888 - DNA, 25 bp, Canis familiaris
gaaaagcttcggaatcgccaggatg

SEQ ID NO: 111889 - DNA, 25 bp, Canis familiaris
gaaaatctgtcgaagtacctgctgg

SEQ ID NO: 111890 - DNA, 25 bp, Canis familiaris
gaaaatctgagccttctagtcctag

SEQ ID NO: 111891 - DNA, 25 bp, Canis familiaris
gaaaatctgtgtgtatatgcttata

SEQ ID NO: 111892 - DNA, 25 bp, Canis familiaris
gaacaatctctgacctctgggtctt

SEQ ID NO: 111893 - DNA, 25 bp, Canis familiaris
gaaaatcatctgcttcatgtgtttt

SEQ ID NO: 111894 - DNA, 25 bp, Canis familiaris
gaaaacactgctgtgcgttctttgg

SEQ ID NO: 111895 - DNA, 25 bp, Canis familiaris
gaaaagactctgctggttcctatga

SEQ ID NO: 111896 - DNA, 25 bp, Canis familiaris
gaaacatacctgctggttctgtaat

SEQ ID NO: 111897 - DNA, 25 bp, Canis familiaris
gaaacgaacagccaggattcttaca

SEQ ID NO: 111898 - DNA, 25 bp, Canis familiaris
gaaaataaacgattggctcttatca

SEQ ID NO: 111899 - DNA, 25 bp, Canis familiaris
gaaaataaaccattgtttcttcaat

SEQ ID NO: 111900 - DNA, 25 bp, Canis familiaris
gaaaagtacaccttgctttaggcaa

SEQ ID NO: 111901 - DNA, 25 bp, Canis familiaris
gaaagaagaatttttttgaggatag

SEQ ID NO: 111902 - DNA, 25 bp, Canis familiaris
gaaacaagtattttggattgaggta

SEQ ID NO: 111903 - DNA, 25 bp, Canis familiaris
gaaaaggttttattgctatgctggt

SEQ ID NO: 111904 - DNA, 25 bp, Canis familiaris
gaaaaggtgctactgcattgcctgc

SEQ ID NO: 111905 - DNA, 25 bp, Canis familiaris
gaaaccgggttcatatgcacctttc

SEQ ID NO: 111906 - DNA, 25 bp, Canis familiaris
gaaactttacttcttaccatcttag

SEQ ID NO: 111907 - DNA, 25 bp, Canis familiaris
gaaacttgttttctcttgctaagta

SEQ ID NO: 111908 - DNA, 25 bp, Canis familiaris
gaaaatttttgttgttgtcgtgcag

SEQ ID NO: 111909 - DNA, 25 bp, Canis familiaris
gaaaatccattcgttgtttgtgtca

SEQ ID NO: 111910 - DNA, 25 bp, Canis familiaris
gaaaataattgcttatgtttaacag

SEQ ID NO: 111911 - DNA, 25 bp, Canis familiaris
gaaacaacaggctttggccaagacg

SEQ ID NO: 111912 - DNA, 25 bp, Canis familiaris
gaaacataaggatttgaccaagggt

SEQ ID NO: 111913 - DNA, 25 bp, Canis familiaris
gaaacatgcccgcattgaagcaaga

SEQ ID NO: 111914 - DNA, 25 bp, Canis familiaris
gaaaacgtcagccatctaacagagc

SEQ ID NO: 111915 - DNA, 25 bp, Canis familiaris
gaaaaccaacagagatccagagcga

SEQ ID NO: 111916 - DNA, 25 bp, Canis familiaris
gaaaatccaaatctgtcctagtgat

SEQ ID NO: 111917 - DNA, 25 bp, Canis familiaris
gaaaatatacactcttctccagtat

SEQ ID NO: 111918 - DNA, 25 bp, Canis familiaris
gaaaatattaatgttctccattcag

SEQ ID NO: 111919 - DNA, 25 bp, Canis familiaris
gaaaattttcatctatgctgtattc

SEQ ID NO: 111920 - DNA, 25 bp, Canis familiaris
gaaaattattcttccagcagcttta

SEQ ID NO: 111921 - DNA, 25 bp, Canis familiaris
gaaaatttatctgccacgttgtggg

SEQ ID NO: 111922 - DNA, 25 bp, Canis familiaris
gaaaacccagcttcaacagtttgtg

SEQ ID NO: 111923 - DNA, 25 bp, Canis familiaris
gaaaatgaccctgctaaatgtttgc

SEQ ID NO: 111924 - DNA, 25 bp, Canis familiaris
gaaaatagacctgccatatgatctg

SEQ ID NO: 111925 - DNA, 25 bp, Canis familiaris
gaaacatgagcacctgaaaagtcta

SEQ ID NO: 111926 - DNA, 25 bp, Canis familiaris
gaaaatgagcaccagttatctttaa

SEQ ID NO: 111927 - DNA, 25 bp, Canis familiaris
gaaaatatattgtcttatgtttaac

SEQ ID NO: 111928 - DNA, 25 bp, Canis familiaris
gaaaattagctattattgtgtttga

SEQ ID NO: 111929 - DNA, 25 bp, Canis familiaris
gaaaactagctcgtgattggcatat

SEQ ID NO: 111930 - DNA, 25 bp, Canis familiaris
gaaaaatatccactgcattgccaaa

SEQ ID NO: 111931 - DNA, 25 bp, Canis familiaris
gaaaattcttgactgcttgctgaaa

SEQ ID NO: 111932 - DNA, 25 bp, Canis familiaris
gaaaattctctggtgatgttaatca

SEQ ID NO: 111933 - DNA, 25 bp, Canis familiaris
gaaaattataccatgtctacagcag

SEQ ID NO: 111934 - DNA, 25 bp, Canis familiaris
gaaaatttagccttgcttcaatcat

SEQ ID NO: 111935 - DNA, 25 bp, Canis familiaris
gaaaatcattgagactgttgcagaa

SEQ ID NO: 111936 - DNA, 25 bp, Canis familiaris
gaaaaatgggtgatgttgagaaggg

SEQ ID NO: 111937 - DNA, 25 bp, Canis familiaris
gaaaaagttgcgagcttaaagcatc

SEQ ID NO: 111938 - DNA, 25 bp, Canis familiaris
gaaaaagttgcttggcctgggactc

SEQ ID NO: 111939 - DNA, 25 bp, Canis familiaris
gaaaagaggctcttggctgggggac

SEQ ID NO: 111940 - DNA, 25 bp, Canis familiaris
gaaaaaggcaaactggcggcgacgc

SEQ ID NO: 111941 - DNA, 25 bp, Canis familiaris
gaaaaccagaaactcagccttactc

SEQ ID NO: 111942 - DNA, 25 bp, Canis familiaris
gaaaagccaaacgacaggcttccct

SEQ ID NO: 111943 - DNA, 25 bp, Canis familiaris
gaaaaggtaagtacaggctgctgct

SEQ ID NO: 111944 - DNA, 25 bp, Canis familiaris
gaaaagctgaaagaatggcactgtg

SEQ ID NO: 111945 - DNA, 25 bp, Canis familiaris
gaaacagctgagagaaggacctgga

SEQ ID NO: 111946 - DNA, 25 bp, Canis familiaris
gaaaagatacatgagggatccctgg

SEQ ID NO: 111947 - DNA, 25 bp, Canis familiaris
gaaaataaatctgtggtcgccgggg

SEQ ID NO: 111948 - DNA, 25 bp, Canis familiaris
gaaaaagaatctctgggacctgggg

SEQ ID NO: 111949 - DNA, 25 bp, Canis familiaris
gaaaaagcaaggctggggcctgggc

SEQ ID NO: 111950 - DNA, 25 bp, Canis familiaris
gaaactaaagggatggacacaggtt

SEQ ID NO: 111951 - DNA, 25 bp, Canis familiaris
gaaacgaaccccttgagaacaggat

SEQ ID NO: 111952 - DNA, 25 bp, Canis familiaris
gaaacggaggacacggaactgaatt

SEQ ID NO: 111953 - DNA, 25 bp, Canis familiaris
gaaacagaaggctcactggtattgg

SEQ ID NO: 111954 - DNA, 25 bp, Canis familiaris
gaaacagggccaggcccggttggca

SEQ ID NO: 111955 - DNA, 25 bp, Canis familiaris
gaaaagggacatagccagcggcttg

SEQ ID NO: 111956 - DNA, 25 bp, Canis familiaris
gaaaatggagccttcgcagggaatg

SEQ ID NO: 111957 - DNA, 25 bp, Canis familiaris
gaaaataagctcctgctgcagcaga

SEQ ID NO: 111958 - DNA, 25 bp, Canis familiaris
gaaaatcacaggcatgctgctggag

SEQ ID NO: 111959 - DNA, 25 bp, Canis familiaris
gaaactgcagcattccagtctgggc

SEQ ID NO: 111960 - DNA, 25 bp, Canis familiaris
gaaactgaattctacattagtggac

SEQ ID NO: 111961 - DNA, 25 bp, Canis familiaris
gaaaagacattcaacaccattggtc

SEQ ID NO: 111962 - DNA, 25 bp, Canis familiaris
gaaaaggcatgcttacataatctgg

SEQ ID NO: 111963 - DNA, 25 bp, Canis familiaris
gaaaatacatatcactattcttgga

SEQ ID NO: 111964 - DNA, 25 bp, Canis familiaris
gaaactccatagtattctttgtaga

SEQ ID NO: 111965 - DNA, 25 bp, Canis familiaris
gaaactttaaagtctctgagcttaa

SEQ ID NO: 111966 - DNA, 25 bp, Canis familiaris
gaaacgtatatttgtcccacttgat

SEQ ID NO: 111967 - DNA, 25 bp, Canis familiaris
gaaacttctagttctcaccatttga

SEQ ID NO: 111968 - DNA, 25 bp, Canis familiaris
gaaaactctagttttgccaatagaa

SEQ ID NO: 111969 - DNA, 25 bp, Canis familiaris
gaaaacttttcaattcctcataata

SEQ ID NO: 111970 - DNA, 25 bp, Canis familiaris
gaaaatcttgtttaattccgaatct

SEQ ID NO: 111971 - DNA, 25 bp, Canis familiaris
gaaacactttcaaaacccaaatctg

SEQ ID NO: 111972 - DNA, 25 bp, Canis familiaris
gaaacagttcacttacaggcaaaag

SEQ ID NO: 111973 - DNA, 25 bp, Canis familiaris
gaaaagataccattgccccaaaagc

SEQ ID NO: 111974 - DNA, 25 bp, Canis familiaris
gaaacgaaacaattgcccaaagcac

SEQ ID NO: 111975 - DNA, 25 bp, Canis familiaris
gaaaccaaagccatccagaatacga

SEQ ID NO: 111976 - DNA, 25 bp, Canis familiaris
gaaagctcagaacaccaaaatacct

SEQ ID NO: 111977 - DNA, 25 bp, Canis familiaris
gacaggtaacagccaaaaagtccct

SEQ ID NO: 111978 - DNA, 25 bp, Canis familiaris
gaccctgacgggcaaaactatcacc

SEQ ID NO: 111979 - DNA, 25 bp, Canis familiaris
gacccaacggggagaagcaactcaa

SEQ ID NO: 111980 - DNA, 25 bp, Canis familiaris
gaaacaacgcggcttgtagccctga

SEQ ID NO: 111981 - DNA, 25 bp, Canis familiaris
gaaaaatggtggccacgtgacccga

SEQ ID NO: 111982 - DNA, 25 bp, Canis familiaris
gaaaaaggggcggacggctggagca

SEQ ID NO: 111983 - DNA, 25 bp, Canis familiaris
gaaaaagggtgcgtacggtctggat

SEQ ID NO: 111984 - DNA, 25 bp, Canis familiaris
gaaaaaggtgtcataagcaaagtta

SEQ ID NO: 111985 - DNA, 25 bp, Canis familiaris
gaaataacgtatatgagaatccaat

SEQ ID NO: 111986 - DNA, 25 bp, Canis familiaris
gaaaaacctgaactgagactacatc

SEQ ID NO: 111987 - DNA, 25 bp, Canis familiaris
gaaaaacctgagtctgctgattgaa

SEQ ID NO: 111988 - DNA, 25 bp, Canis familiaris
gaaaagcaaaggtagctgtgtgtga

SEQ ID NO: 111989 - DNA, 25 bp, Canis familiaris
gaaaagggacattatgcttatgatg

SEQ ID NO: 111990 - DNA, 25 bp, Canis familiaris
gaaacatagagccagtattttgagt

SEQ ID NO: 111991 - DNA, 25 bp, Canis familiaris
gaaacaacagcccctatttagttca

SEQ ID NO: 111992 - DNA, 25 bp, Canis familiaris
gaaaaactacctcaggtgccttgca

SEQ ID NO: 111993 - DNA, 25 bp, Canis familiaris
gaaacagaaacccaaagtgcctaca

SEQ ID NO: 111994 - DNA, 25 bp, Canis familiaris
gaaaagaaacacacaatggccaaaa

SEQ ID NO: 111995 - DNA, 25 bp, Canis familiaris
gaaataaaaactcagcagcccaaaa

SEQ ID NO: 111996 - DNA, 25 bp, Canis familiaris
gaaataaaggcccggatccgaggcg

SEQ ID NO: 111997 - DNA, 25 bp, Canis familiaris
gactttaaggcctgtgaccatggac

SEQ ID NO: 111998 - DNA, 25 bp, Canis familiaris
gacttctagagggagggaccgggtg

SEQ ID NO: 111999 - DNA, 25 bp, Canis familiaris
gactttagcttctgggagccaaggg

SEQ ID NO: 112000 - DNA, 25 bp, Canis familiaris
gacacttcctcctgaggagccaagg

SEQ ID NO: 112001 - DNA, 25 bp, Canis familiaris
gaaacagcacctaggagggccaagg

SEQ ID NO: 112002 - DNA, 25 bp, Canis familiaris
gaaagcgacctaaaccacgcaactg

SEQ ID NO: 112003 - DNA, 25 bp, Canis familiaris
gaaagcggaaattaccccagagtga

SEQ ID NO: 112004 - DNA, 25 bp, Canis familiaris
gaaagttaaaggcccccatgatcgc

SEQ ID NO: 112005 - DNA, 25 bp, Canis familiaris
gaaattctaaaacggcagcacatgt

SEQ ID NO: 112006 - DNA, 25 bp, Canis familiaris
gaaaactaaaatcatccacgtatta

SEQ ID NO: 112007 - DNA, 25 bp, Canis familiaris
gagaataacaaatcctactttttag

SEQ ID NO: 112008 - DNA, 25 bp, Canis familiaris
gagaaacgggactctatctttttga

SEQ ID NO: 112009 - DNA, 25 bp, Canis familiaris
gaaaacatgtggaccacccttttct

SEQ ID NO: 112010 - DNA, 25 bp, Canis familiaris
gaaaacttgtgctagaatacttttt

SEQ ID NO: 112011 - DNA, 25 bp, Canis familiaris
gaaaacttgtgctagaatacttttt

SEQ ID NO: 112012 - DNA, 25 bp, Canis familiaris
gaaacacctgtgcacaataaaaaaa

SEQ ID NO: 112013 - DNA, 25 bp, Canis familiaris
gaaaagcttatgcacagcaaagaaa

SEQ ID NO: 112014 - DNA, 25 bp, Canis familiaris
gaaaactgatttcctcaataacaaa

SEQ ID NO: 112015 - DNA, 25 bp, Canis familiaris
gaaagacatttgctctcctaaaaca

SEQ ID NO: 112016 - DNA, 25 bp, Canis familiaris
gaaacaatttcttctccagacaagg

SEQ ID NO: 112017 - DNA, 25 bp, Canis familiaris
gaaacaaggttcaccaacacggtgg

SEQ ID NO: 112018 - DNA, 25 bp, Canis familiaris
gaaaaaggtctattcttacctgagt

SEQ ID NO: 112019 - DNA, 25 bp, Canis familiaris
gaaaagttcctttttgagcctgacg

SEQ ID NO: 112020 - DNA, 25 bp, Canis familiaris
gaaagggtacttatgggttgctctg

SEQ ID NO: 112021 - DNA, 25 bp, Canis familiaris
gaaaagaggagcgcttgggtggctc

SEQ ID NO: 112022 - DNA, 25 bp, Canis familiaris
gaaaacaggacagacgcaggggctc

SEQ ID NO: 112023 - DNA, 25 bp, Canis familiaris
gaaaacctgagagtaccgggtgtgt

SEQ ID NO: 112024 - DNA, 25 bp, Canis familiaris
gaaaagcgtggaaattggaagttat

SEQ ID NO: 112025 - DNA, 25 bp, Canis familiaris
gaaaaggctgtaactaaggaggaat

SEQ ID NO: 112026 - DNA, 25 bp, Canis familiaris
gaaaacctctcaagctgaatggaat

SEQ ID NO: 112027 - DNA, 25 bp, Canis familiaris
gaaaccactgacagccaaggacaaa

SEQ ID NO: 112028 - DNA, 25 bp, Canis familiaris
gaaaaggctacttgtcacagtgaca

SEQ ID NO: 112029 - DNA, 25 bp, Canis familiaris
gaaaagtttaatactcctgcactga

SEQ ID NO: 112030 - DNA, 25 bp, Canis familiaris
gaaactgttaaaatccttcctgcct

SEQ ID NO: 112031 - DNA, 25 bp, Canis familiaris
gaaaagttataaatctttccactat

SEQ ID NO: 112032 - DNA, 25 bp, Canis familiaris
gaaactgattacacctttccacttg

SEQ ID NO: 112033 - DNA, 25 bp, Canis familiaris
gaaactgattacacctttccacttg

SEQ ID NO: 112034 - DNA, 25 bp, Canis familiaris
gaaactgattacacctttccacttg

SEQ ID NO: 112035 - DNA, 25 bp, Canis familiaris
gaaactgattacacctttccacttg

SEQ ID NO: 112036 - DNA, 25 bp, Canis familiaris
gaaacatgttacgccttcttgttgt

SEQ ID NO: 112037 - DNA, 25 bp, Canis familiaris
gaaacagtttagccacatacctgct

SEQ ID NO: 112038 - DNA, 25 bp, Canis familiaris
gaaaagtcattaccagagagctcct

SEQ ID NO: 112039 - DNA, 25 bp, Canis familiaris
gaaacagtgttaccaggaggcaata

SEQ ID NO: 112040 - DNA, 25 bp, Canis familiaris
gaaaactgaatcccagagagggctg

SEQ ID NO: 112041 - DNA, 25 bp, Canis familiaris
gaaaacaaacatccggtgaggtgta

SEQ ID NO: 112042 - DNA, 25 bp, Canis familiaris
gacaaacacaatctcctaagggtac

SEQ ID NO: 112043 - DNA, 25 bp, Canis familiaris
gaaacaccagctctttgggaggtag

SEQ ID NO: 112044 - DNA, 25 bp, Canis familiaris
gaaacactcactttattgttgactg

SEQ ID NO: 112045 - DNA, 25 bp, Canis familiaris
gaaaactcacagtctttcacagaat

SEQ ID NO: 112046 - DNA, 25 bp, Canis familiaris
gaaaacctcagtgtatcaatagaaa

SEQ ID NO: 112047 - DNA, 25 bp, Canis familiaris
gaaaccccagagctataaacaaact

SEQ ID NO: 112048 - DNA, 25 bp, Canis familiaris
gaaacccaagagactctaacaccta

SEQ ID NO: 112049 - DNA, 25 bp, Canis familiaris
gaaacacagaactctcttagcctta

SEQ ID NO: 112050 - DNA, 25 bp, Canis familiaris
gaaactcagatatttatttaccgta

SEQ ID NO: 112051 - DNA, 25 bp, Canis familiaris
gaaacgcgtattagagtaacctgaa

SEQ ID NO: 112052 - DNA, 25 bp, Canis familiaris
gaaaccgtatgcaacactaaatcta

SEQ ID NO: 112053 - DNA, 25 bp, Canis familiaris
gaaaacagttcattactcaattctg

SEQ ID NO: 112054 - DNA, 25 bp, Canis familiaris
gaaacaggttatgaccactttaggc

SEQ ID NO: 112055 - DNA, 25 bp, Canis familiaris
gaaaagtcctatgacgtgttcaagg

SEQ ID NO: 112056 - DNA, 25 bp, Canis familiaris
gaaacaagcctatgcagttttaagg

SEQ ID NO: 112057 - DNA, 25 bp, Canis familiaris
gaaacaagccattcgactgtgctaa

SEQ ID NO: 112058 - DNA, 25 bp, Canis familiaris
gaaaacagcacatgggctatgccaa

SEQ ID NO: 112059 - DNA, 25 bp, Canis familiaris
gaaaacgcactatactcatgcatgc

SEQ ID NO: 112060 - DNA, 25 bp, Canis familiaris
gaaaactcttaaatcctcagctgcc

SEQ ID NO: 112061 - DNA, 25 bp, Canis familiaris
gaaaaccttatattccacgaaatgt

SEQ ID NO: 112062 - DNA, 25 bp, Canis familiaris
gaaactgttgttttccctacagatt

SEQ ID NO: 112063 - DNA, 25 bp, Canis familiaris
gaaacttgggtgtttccatcaattt

SEQ ID NO: 112064 - DNA, 25 bp, Canis familiaris
gaaaactctggttttgagtcagttt

SEQ ID NO: 112065 - DNA, 25 bp, Canis familiaris
gaaaactttgtttagatctacgtca

SEQ ID NO: 112066 - DNA, 25 bp, Canis familiaris
gaaaagttattatagactactcaca

SEQ ID NO: 112067 - DNA, 25 bp, Canis familiaris
gaaaagaattttcagccaagtacca

SEQ ID NO: 112068 - DNA, 25 bp, Canis familiaris
gaaaagtgcttttccgccaagttag

SEQ ID NO: 112069 - DNA, 25 bp, Canis familiaris
gaaaagccttgtgccaaagatggtt

SEQ ID NO: 112070 - DNA, 25 bp, Canis familiaris
gaaaacctgtgtaccagacctgact

SEQ ID NO: 112071 - DNA, 25 bp, Canis familiaris
gaaaaactggaaccaatcctgccct

SEQ ID NO: 112072 - DNA, 25 bp, Canis familiaris
gaaaaatggccccaatcaacttcct

SEQ ID NO: 112073 - DNA, 25 bp, Canis familiaris
gaaaaacctttccatgcaacttctg

SEQ ID NO: 112074 - DNA, 25 bp, Canis familiaris
gaaaagtcgttttatctaatactgt

SEQ ID NO: 112075 - DNA, 25 bp, Canis familiaris
gaaaaactatttttctccataattg

SEQ ID NO: 112076 - DNA, 25 bp, Canis familiaris
gaaacaaccaatgtccatccaaagg

SEQ ID NO: 112077 - DNA, 25 bp, Canis familiaris
gaaaacaaaatcttacacacacaca

SEQ ID NO: 112078 - DNA, 25 bp, Canis familiaris
gaaaaaactaatggtcacagcagac

SEQ ID NO: 112079 - DNA, 25 bp, Canis familiaris
gaaacaacctaaatgtccactgata

SEQ ID NO: 112080 - DNA, 25 bp, Canis familiaris
gaaactaccttcaactccatcatga

SEQ ID NO: 112081 - DNA, 25 bp, Canis familiaris
gaaacttttgtcaactcctgagcta

SEQ ID NO: 112082 - DNA, 25 bp, Canis familiaris
gaaacgtttgaaaatctgatgacta

SEQ ID NO: 112083 - DNA, 25 bp, Canis familiaris
gaaactgttaaaaagctatgtcaaa

SEQ ID NO: 112084 - DNA, 25 bp, Canis familiaris
gaaactttataagagcacccataag

SEQ ID NO: 112085 - DNA, 25 bp, Canis familiaris
gaaacaatacaattacaaccctaag

SEQ ID NO: 112086 - DNA, 25 bp, Canis familiaris
gaaacttccaacatctgaacctaag

SEQ ID NO: 112087 - DNA, 25 bp, Canis familiaris
gaaaaaccaaacggaacatctcaag

SEQ ID NO: 112088 - DNA, 25 bp, Canis familiaris
gaaaacccgataaccaaatctgcta

SEQ ID NO: 112089 - DNA, 25 bp, Canis familiaris
gaaaacccgataaccaaatctgcta

SEQ ID NO: 112090 - DNA, 25 bp, Canis familiaris
gaaaacccgataaccaaatctgcta

SEQ ID NO: 112091 - DNA, 25 bp, Canis familiaris
gaaaacccttaaccacaagatggca

SEQ ID NO: 112092 - DNA, 25 bp, Canis familiaris
gaaaagcccagagatcccaagagcc

SEQ ID NO: 112093 - DNA, 25 bp, Canis familiaris
gaaaaaccagcagagcaccaacgcc

SEQ ID NO: 112094 - DNA, 25 bp, Canis familiaris
gaaaagacaagagtacacagcaact

SEQ ID NO: 112095 - DNA, 25 bp, Canis familiaris
gaaaagaagcatgtcctggcaactt

SEQ ID NO: 112096 - DNA, 25 bp, Canis familiaris
gaaaaacagtccagatgcagctatt

SEQ ID NO: 112097 - DNA, 25 bp, Canis familiaris
gaaaaccagtccctgctgaggatgc

SEQ ID NO: 112098 - DNA, 25 bp, Canis familiaris
gaaaagccattcaagcctgattatt

SEQ ID NO: 112099 - DNA, 25 bp, Canis familiaris
gaaaagcccacattgtctcttatgg

SEQ ID NO: 112100 - DNA, 25 bp, Canis familiaris
gaaaagcccaaggcctttattcact

SEQ ID NO: 112101 - DNA, 25 bp, Canis familiaris
gaaaacccagttggcatttatacaa

SEQ ID NO: 112102 - DNA, 25 bp, Canis familiaris
gaaaaccccagtgaagtctgaataa

SEQ ID NO: 112103 - DNA, 25 bp, Canis familiaris
gaaaactcccaagatcaattgaaaa

SEQ ID NO: 112104 - DNA, 25 bp, Canis familiaris
gaaaaccgggaggtcctgtgacaga

SEQ ID NO: 112105 - DNA, 25 bp, Canis familiaris
gaaaacgcacggatctcgggaaggc

SEQ ID NO: 112106 - DNA, 25 bp, Canis familiaris
gaaagaaccggttctcacgaacctg

SEQ ID NO: 112107 - DNA, 25 bp, Canis familiaris
gaaaaatctaggactcccgatacct

SEQ ID NO: 112108 - DNA, 25 bp, Canis familiaris
gaaaagatcaagaaccgcctggacc

SEQ ID NO: 112109 - DNA, 25 bp, Canis familiaris
gaaaaatcagcacgcacccttaaaa

SEQ ID NO: 112110 - DNA, 25 bp, Canis familiaris
gaaaaatgaacagccctttaatggg

SEQ ID NO: 112111 - DNA, 25 bp, Canis familiaris
gaaaaaaacctcagcatataaattg

SEQ ID NO: 112112 - DNA, 25 bp, Canis familiaris
gaaattaagccagttgttgaaaatt

SEQ ID NO: 112113 - DNA, 25 bp, Canis familiaris
gaaaaatccaaaggttgaagaattg

SEQ ID NO: 112114 - DNA, 25 bp, Canis familiaris
gaaaaacctatcggttgggcttctg

SEQ ID NO: 112115 - DNA, 25 bp, Canis familiaris
gtaaaatcccatcctttgggttgtg

SEQ ID NO: 112116 - DNA, 25 bp, Canis familiaris
gaaaaattcctggcttgtggtttgg

SEQ ID NO: 112117 - DNA, 25 bp, Canis familiaris
gaaaaatgtggggtgtgccgttttg

SEQ ID NO: 112118 - DNA, 25 bp, Canis familiaris
gaaaagacttggctaccgtttcgca

SEQ ID NO: 112119 - DNA, 25 bp, Canis familiaris
gaaagtggttggctcagggtttgac

SEQ ID NO: 112120 - DNA, 25 bp, Canis familiaris
gaaagctggttcagtaggtcccgag

SEQ ID NO: 112121 - DNA, 25 bp, Canis familiaris
gaaactcttttgttaggttccagca

SEQ ID NO: 112122 - DNA, 25 bp, Canis familiaris
gataaagcggttcttggtaccagca

SEQ ID NO: 112123 - DNA, 25 bp, Canis familiaris
gaaaacagggtgccagtggtcccgc

SEQ ID NO: 112124 - DNA, 25 bp, Canis familiaris
gaaaacttgctgggaggagctctcc

SEQ ID NO: 112125 - DNA, 25 bp, Canis familiaris
gaaaaatcagtatagaggtctcccc

SEQ ID NO: 112126 - DNA, 25 bp, Canis familiaris
gaaaaagaattgtggtctctgccca

SEQ ID NO: 112127 - DNA, 25 bp, Canis familiaris
gaaaacgaagttgccctcacaagca

SEQ ID NO: 112128 - DNA, 25 bp, Canis familiaris
gaaaaaaagtattcactgtctcaaa

SEQ ID NO: 112129 - DNA, 25 bp, Canis familiaris
gaaaaaaggtcttccattccacgtg

SEQ ID NO: 112130 - DNA, 25 bp, Canis familiaris
gaaaagaaggtccccagtcaactgt

SEQ ID NO: 112131 - DNA, 25 bp, Canis familiaris
gaaaagaagtgtcccagttcgactt

SEQ ID NO: 112132 - DNA, 25 bp, Canis familiaris
gaaaacatatttcccttattttgat

SEQ ID NO: 112133 - DNA, 25 bp, Canis familiaris
gaaaagccatttgctcttggtttga

SEQ ID NO: 112134 - DNA, 25 bp, Canis familiaris
gaaaagccatttgatgtatgcggtt

SEQ ID NO: 112135 - DNA, 25 bp, Canis familiaris
gaaaagctgcatataatctagggga

SEQ ID NO: 112136 - DNA, 25 bp, Canis familiaris
gaaaacttattcatctgagggagaa

SEQ ID NO: 112137 - DNA, 25 bp, Canis familiaris
gaaaacgtttgcagatcagagggaa

SEQ ID NO: 112138 - DNA, 25 bp, Canis familiaris
gaaagtttttcagacagagggaacg

SEQ ID NO: 112139 - DNA, 25 bp, Canis familiaris
gaaacacttttcgacacagtgtggt

SEQ ID NO: 112140 - DNA, 25 bp, Canis familiaris
gaaacactgtttaccaagtagcatt

SEQ ID NO: 112141 - DNA, 25 bp, Canis familiaris
gaaacacatttacaaattatcatta

SEQ ID NO: 112142 - DNA, 25 bp, Canis familiaris
gaaacactttagcacaaacatcatt

SEQ ID NO: 112143 - DNA, 25 bp, Canis familiaris
gaaaccttctagcaacagcatgagt

SEQ ID NO: 112144 - DNA, 25 bp, Canis familiaris
gaaactttacaacacagctgcgtcg

SEQ ID NO: 112145 - DNA, 25 bp, Canis familiaris
gaaacgtttaaccacagaagcctag

SEQ ID NO: 112146 - DNA, 25 bp, Canis familiaris
gaaactttgtaccaacgatatccca

SEQ ID NO: 112147 - DNA, 25 bp, Canis familiaris
gaaactctttcagaactttaaagat

SEQ ID NO: 112148 - DNA, 25 bp, Canis familiaris
gaaactcctagtgaacattatttag

SEQ ID NO: 112149 - DNA, 25 bp, Canis familiaris
gaaacatccggtcaagattctcagt

SEQ ID NO: 112150 - DNA, 25 bp, Canis familiaris
gaaaagcctaggtataatcctactg

SEQ ID NO: 112151 - DNA, 25 bp, Canis familiaris
gaaaagcaacggtttctccatcact

SEQ ID NO: 112152 - DNA, 25 bp, Canis familiaris
gaaaagaacggttatgcccatggtt

SEQ ID NO: 112153 - DNA, 25 bp, Canis familiaris
gaaaagcgagggcctagccctttct

SEQ ID NO: 112154 - DNA, 25 bp, Canis familiaris
gaaatccggggcttgactttataat

SEQ ID NO: 112155 - DNA, 25 bp, Canis familiaris
gaaaccagtttcagttctttgactt

SEQ ID NO: 112156 - DNA, 25 bp, Canis familiaris
gaaacgggctatgtgctttttccgg

SEQ ID NO: 112157 - DNA, 25 bp, Canis familiaris
gaaacttggtatttgtcttgggcct

SEQ ID NO: 112158 - DNA, 25 bp, Canis familiaris
gaaacttggagttcgctgttgccca

SEQ ID NO: 112159 - DNA, 25 bp, Canis familiaris
gaaactgtggaatctaattggcaat

SEQ ID NO: 112160 - DNA, 25 bp, Canis familiaris
gaaacatgctggcattcacaagggc

SEQ ID NO: 112161 - DNA, 25 bp, Canis familiaris
gaaacatctgcgaaaacccgagcta

SEQ ID NO: 112162 - DNA, 25 bp, Canis familiaris
gaaacactggaacccttgaagaagg

SEQ ID NO: 112163 - DNA, 25 bp, Canis familiaris
gaaaccttcaagccctaggtggagc

SEQ ID NO: 112164 - DNA, 25 bp, Canis familiaris
gaaaccttaagaccttcatggggcg

SEQ ID NO: 112165 - DNA, 25 bp, Canis familiaris
gaaaccttaacacatgtcaaattct

SEQ ID NO: 112166 - DNA, 25 bp, Canis familiaris
gaaaacatctgaaagccttcgaata

SEQ ID NO: 112167 - DNA, 25 bp, Canis familiaris
gaaaacctgaatttgttccaatgtg

SEQ ID NO: 112168 - DNA, 25 bp, Canis familiaris
gaaactgcctaagatttccaggatg

SEQ ID NO: 112169 - DNA, 25 bp, Canis familiaris
gaaatctgcttaataatttaaggcc

SEQ ID NO: 112170 - DNA, 25 bp, Canis familiaris
gaaacttgtacctaccttaggccat

SEQ ID NO: 112171 - DNA, 25 bp, Canis familiaris
gaaaccgtacgataaccagtgccat

SEQ ID NO: 112172 - DNA, 25 bp, Canis familiaris
gaaaccgtggcaggtatgaccgtcc

SEQ ID NO: 112173 - DNA, 25 bp, Canis familiaris
gaaacgacggcatggaggacgtcac

SEQ ID NO: 112174 - DNA, 25 bp, Canis familiaris
gaaaagcaggtgggtgagggcacaa

SEQ ID NO: 112175 - DNA, 25 bp, Canis familiaris
gaaaccgagggtcagacgctcaaat

SEQ ID NO: 112176 - DNA, 25 bp, Canis familiaris
gacaaccgcggagagaggaataact

SEQ ID NO: 112177 - DNA, 25 bp, Canis familiaris
gacaagccgaggaccacggcttaac

SEQ ID NO: 112178 - DNA, 25 bp, Canis familiaris
gaaacactgtgggccatcgagatgt

SEQ ID NO: 112179 - DNA, 25 bp, Canis familiaris
gaaactctggaggacatcgacaaga

SEQ ID NO: 112180 - DNA, 25 bp, Canis familiaris
gaaactagagggtatcatgccaagt

SEQ ID NO: 112181 - DNA, 25 bp, Canis familiaris
gaaacgtggcatcgtacgcaaggtc

SEQ ID NO: 112182 - DNA, 25 bp, Canis familiaris
gaaacagcaggcagtgcccagggtc

SEQ ID NO: 112183 - DNA, 25 bp, Canis familiaris
gaaaaagggattcctgcgtggctca

SEQ ID NO: 112184 - DNA, 25 bp, Canis familiaris
gaaacaaagagatcaccgtgggaac

SEQ ID NO: 112185 - DNA, 25 bp, Canis familiaris
gaaaaagacagacatcccaggagaa

SEQ ID NO: 112186 - DNA, 25 bp, Canis familiaris
gaaaacagactgcaactcttggaga

SEQ ID NO: 112187 - DNA, 25 bp, Canis familiaris
gaaaacacactgttaccaggggatc

SEQ ID NO: 112188 - DNA, 25 bp, Canis familiaris
gaaaactcctggaaagggaggctgt

SEQ ID NO: 112189 - DNA, 25 bp, Canis familiaris
gaaaaccttgtgctaggaatacttt

SEQ ID NO: 112190 - DNA, 25 bp, Canis familiaris
gaaaaccttgtgcctagaatacctt

SEQ ID NO: 112191 - DNA, 25 bp, Canis familiaris
gaaacaccgtgtttgacacagacct

SEQ ID NO: 112192 - DNA, 25 bp, Canis familiaris
gaaacaccagtgttagcttaatctt

SEQ ID NO: 112193 - DNA, 25 bp, Canis familiaris
gaaacacacaatggccaaaaatctt

SEQ ID NO: 112194 - DNA, 25 bp, Canis familiaris
gaaaacaagacccaatgctatactg

SEQ ID NO: 112195 - DNA, 25 bp, Canis familiaris
gaaaccatcgacaagactgctaacc

SEQ ID NO: 112196 - DNA, 25 bp, Canis familiaris
gaaacatgatcagcaagttgctcgg

SEQ ID NO: 112197 - DNA, 25 bp, Canis familiaris
gaaacagacacagagctgattcgga

SEQ ID NO: 112198 - DNA, 25 bp, Canis familiaris
gaaacaatagcgacagccattcgta

SEQ ID NO: 112199 - DNA, 25 bp, Canis familiaris
gaaaaatgagcgactccgtgctgcc

SEQ ID NO: 112200 - DNA, 25 bp, Canis familiaris
gaaaaatcagtggctcttcacaccc

SEQ ID NO: 112201 - DNA, 25 bp, Canis familiaris
gaaacaacaagattgcttgcaacca

SEQ ID NO: 112202 - DNA, 25 bp, Canis familiaris
gaaacagcaaagttcacagtacagc

SEQ ID NO: 112203 - DNA, 25 bp, Canis familiaris
gaaaacagagagcctgccaggaacc

SEQ ID NO: 112204 - DNA, 25 bp, Canis familiaris
gaaaaagacctcacagctgacacct

SEQ ID NO: 112205 - DNA, 25 bp, Canis familiaris
gaaacaaactccaaaggcagcaact

SEQ ID NO: 112206 - DNA, 25 bp, Canis familiaris
gaaactgaactccaaaagcacaaaa

SEQ ID NO: 112207 - DNA, 25 bp, Canis familiaris
gaaacttcagcttcagtagcccaaa

SEQ ID NO: 112208 - DNA, 25 bp, Canis familiaris
gaaactccagctagctgctggcctc

SEQ ID NO: 112209 - DNA, 25 bp, Canis familiaris
caagacgcttcccatagagaatccc

SEQ ID NO: 112210 - DNA, 25 bp, Canis familiaris
gaaactggctgcagatgaagaagaa

SEQ ID NO: 112211 - DNA, 25 bp, Canis familiaris
gaaacttgctgtagatgaagaagaa

SEQ ID NO: 112212 - DNA, 25 bp, Canis familiaris
gaaacttgcattcatgaagagccca

SEQ ID NO: 112213 - DNA, 25 bp, Canis familiaris
gaaacttctcagcatcatgatgacc

SEQ ID NO: 112214 - DNA, 25 bp, Canis familiaris
gaaacttctcagcatcatgatgacc

SEQ ID NO: 112215 - DNA, 25 bp, Canis familiaris
gaaacttctcagcatcatgatgacc

SEQ ID NO: 112216 - DNA, 25 bp, Canis familiaris
gaaacttctcagcatcatgatgacc

SEQ ID NO: 112217 - DNA, 25 bp, Canis familiaris
gaaaacctagcagtcaaagtcaacc

SEQ ID NO: 112218 - DNA, 25 bp, Canis familiaris
gaaaccactctctcacaagtataca

SEQ ID NO: 112219 - DNA, 25 bp, Canis familiaris
gaaagaatcatcccctgaagtaaca

SEQ ID NO: 112220 - DNA, 25 bp, Canis familiaris
gaaaaacaagccctgacgtgcacta

SEQ ID NO: 112221 - DNA, 25 bp, Canis familiaris
gaaaaagatagcccttagtcccact

SEQ ID NO: 112222 - DNA, 25 bp, Canis familiaris
gaaaacgatgtgtatattaccccac

SEQ ID NO: 112223 - DNA, 25 bp, Canis familiaris
gaaaggagggttactactgcacact

SEQ ID NO: 112224 - DNA, 25 bp, Canis familiaris
gaaactgccaagataccactgccat

SEQ ID NO: 112225 - DNA, 25 bp, Canis familiaris
gaaagctactagatgactcagtgaa

SEQ ID NO: 112226 - DNA, 25 bp, Canis familiaris
gaaactgactgaggtaccagcggat

SEQ ID NO: 112227 - DNA, 25 bp, Canis familiaris
gaaactgattattgctaaatggtgt

SEQ ID NO: 112228 - DNA, 25 bp, Canis familiaris
gaaacagatgtattctatttaaatt

SEQ ID NO: 112229 - DNA, 25 bp, Canis familiaris
gaaacggtgctgatctgtggaaatt

SEQ ID NO: 112230 - DNA, 25 bp, Canis familiaris
gaaacgagtgtgaccgggaccattc

SEQ ID NO: 112231 - DNA, 25 bp, Canis familiaris
gaaatcgggaattctggggctcttc

SEQ ID NO: 112232 - DNA, 25 bp, Canis familiaris
gaaagctgaggatgacgggggtccc

SEQ ID NO: 112233 - DNA, 25 bp, Canis familiaris
gacaaatggaaatggtggggagacc

SEQ ID NO: 112234 - DNA, 25 bp, Canis familiaris
gaaactgggcagtggggctcaagat

SEQ ID NO: 112235 - DNA, 25 bp, Canis familiaris
gaaactggacagcacagacttcacc

SEQ ID NO: 112236 - DNA, 25 bp, Canis familiaris
gaaactagacaagacacgtacatcg

SEQ ID NO: 112237 - DNA, 25 bp, Canis familiaris
gaaactataccagctcctgagagcc

SEQ ID NO: 112238 - DNA, 25 bp, Canis familiaris
gaaacttttcagcatcactgatgac

SEQ ID NO: 112239 - DNA, 25 bp, Canis familiaris
gaaacttttcagccatatatctacc

SEQ ID NO: 112240 - DNA, 25 bp, Canis familiaris
gaaacatgtcattgcccaattccat

SEQ ID NO: 112241 - DNA, 25 bp, Canis familiaris
gaaacagtcattcccagaactataa

SEQ ID NO: 112242 - DNA, 25 bp, Canis familiaris
gaaaacacattgtcagaaactcaaa

SEQ ID NO: 112243 - DNA, 25 bp, Canis familiaris
gaaaaatctaattgaacagctatga

SEQ ID NO: 112244 - DNA, 25 bp, Canis familiaris
gaaaacccaatgactagctgatagc

SEQ ID NO: 112245 - DNA, 25 bp, Canis familiaris
gaaacacccactgcttctggtgaac

SEQ ID NO: 112246 - DNA, 25 bp, Canis familiaris
gtagaccccaagttcctgaggaaca

SEQ ID NO: 112247 - DNA, 25 bp, Canis familiaris
gaaaacgctaagttttagtggatca

SEQ ID NO: 112248 - DNA, 25 bp, Canis familiaris
gaaaacgggagcttttcatgtggta

SEQ ID NO: 112249 - DNA, 25 bp, Canis familiaris
gaaaactgatggctttatttgtgga

SEQ ID NO: 112250 - DNA, 25 bp, Canis familiaris
gaaaacatgtgcccttcttttcttg

SEQ ID NO: 112251 - DNA, 25 bp, Canis familiaris
gaaaactggcctgtgagtttcagga

SEQ ID NO: 112252 - DNA, 25 bp, Canis familiaris
gaaaccgtggctgaggtggcagagg

SEQ ID NO: 112253 - DNA, 25 bp, Canis familiaris
gaaaccagtgggctagatgtgcaaa

SEQ ID NO: 112254 - DNA, 25 bp, Canis familiaris
gaaaacagtgtcattctgttaaaaa

SEQ ID NO: 112255 - DNA, 25 bp, Canis familiaris
gaaacacagttcacacgtccatgaa

SEQ ID NO: 112256 - DNA, 25 bp, Canis familiaris
gaaacacattatctcatagtcctgg

SEQ ID NO: 112257 - DNA, 25 bp, Canis familiaris
gaaaaatctactcgtatgtgttgga

SEQ ID NO: 112258 - DNA, 25 bp, Canis familiaris
gaaaaattcactcatttggagaata

SEQ ID NO: 112259 - DNA, 25 bp, Canis familiaris
gaaacagttactcaattagctacaa

SEQ ID NO: 112260 - DNA, 25 bp, Canis familiaris
gaaagagctaaccggttactcactt

SEQ ID NO: 112261 - DNA, 25 bp, Canis familiaris
gaaagaaaaggcggtcgatctcgtt

SEQ ID NO: 112262 - DNA, 25 bp, Canis familiaris
gaaaaatacattcgcagggttcgga

SEQ ID NO: 112263 - DNA, 25 bp, Canis familiaris
gaaaaatgaattaaaggccttggat

SEQ ID NO: 112264 - DNA, 25 bp, Canis familiaris
gaaaacaaaatcacatgggttggat

SEQ ID NO: 112265 - DNA, 25 bp, Canis familiaris
gaaaacatccaaaacggcatttgag

SEQ ID NO: 112266 - DNA, 25 bp, Canis familiaris
gaaaccaccagaagggggatgtcaa

SEQ ID NO: 112267 - DNA, 25 bp, Canis familiaris
gaaacacaggaaatcgacggcatgg

SEQ ID NO: 112268 - DNA, 25 bp, Canis familiaris
gaaacagcaggaccattgccagagc

SEQ ID NO: 112269 - DNA, 25 bp, Canis familiaris
gaaacagagagacaggagcagagga

SEQ ID NO: 112270 - DNA, 25 bp, Canis familiaris
gaaacagcagtacgagacagggtgt

SEQ ID NO: 112271 - DNA, 25 bp, Canis familiaris
gaaaacaggacttggctgtgtgcgt

SEQ ID NO: 112272 - DNA, 25 bp, Canis familiaris
gaaagctctcgagtaggcggtgcgt

SEQ ID NO: 112273 - DNA, 25 bp, Canis familiaris
gaaactgcctggggacggtgtgtgt

SEQ ID NO: 112274 - DNA, 25 bp, Canis familiaris
gaaactgccgttaaagggtgtatag

SEQ ID NO: 112275 - DNA, 25 bp, Canis familiaris
gaaactaggttcaggggtctatatc

SEQ ID NO: 112276 - DNA, 25 bp, Canis familiaris
gaaaccagaaccatgaaagtcttag

SEQ ID NO: 112277 - DNA, 25 bp, Canis familiaris
gaaaaaaaccttttgaggcatctca

SEQ ID NO: 112278 - DNA, 25 bp, Canis familiaris
gataaaaagaacttcaaaggcatct

SEQ ID NO: 112279 - DNA, 25 bp, Canis familiaris
gaaaacaatgaatccagatgggcat

SEQ ID NO: 112280 - DNA, 25 bp, Canis familiaris
gaaaccttgagattactgattacat

SEQ ID NO: 112281 - DNA, 25 bp, Canis familiaris
gaaaacttgagatctggtttcattg

SEQ ID NO: 112282 - DNA, 25 bp, Canis familiaris
gaaaactatatatctggctaatgaa

SEQ ID NO: 112283 - DNA, 25 bp, Canis familiaris
gaaaactatctcatcttgtcaatat

SEQ ID NO: 112284 - DNA, 25 bp, Canis familiaris
gaaaactaccttctgatcctgtatt

SEQ ID NO: 112285 - DNA, 25 bp, Canis familiaris
gaaacacccgttctattttatgatg

SEQ ID NO: 112286 - DNA, 25 bp, Canis familiaris
gaaagtcccagtaattatttttgca

SEQ ID NO: 112287 - DNA, 25 bp, Canis familiaris
gaaagtatggagttatttgttagac

SEQ ID NO: 112288 - DNA, 25 bp, Canis familiaris
gaaagttggtaatctctgtccgatc

SEQ ID NO: 112289 - DNA, 25 bp, Canis familiaris
gaaacttctgctaagactgcttcca

SEQ ID NO: 112290 - DNA, 25 bp, Canis familiaris
gaaacactgctcataagcttctgat

SEQ ID NO: 112291 - DNA, 25 bp, Canis familiaris
gaaacttgtcattctcgatgctctg

SEQ ID NO: 112292 - DNA, 25 bp, Canis familiaris
gaaacttcactgacatcgcatgatt

SEQ ID NO: 112293 - DNA, 25 bp, Canis familiaris
gaaactcaactgtcaagtgattggt

SEQ ID NO: 112294 - DNA, 25 bp, Canis familiaris
gaaaccgtcccaagatgagtggggg

SEQ ID NO: 112295 - DNA, 25 bp, Canis familiaris
gaaaacttcccaaatgagcccagga

SEQ ID NO: 112296 - DNA, 25 bp, Canis familiaris
gaaacagctatgaccattaggccta

SEQ ID NO: 112297 - DNA, 25 bp, Canis familiaris
gaaacaactgcaatgatgtaggtca

SEQ ID NO: 112298 - DNA, 25 bp, Canis familiaris
gaaaacactgcagatgatatggggg

SEQ ID NO: 112299 - DNA, 25 bp, Canis familiaris
gacaaacggaggcatagggtggtac

SEQ ID NO: 112300 - DNA, 25 bp, Canis familiaris
gaaaacaggtggttatagacggtga

SEQ ID NO: 112301 - DNA, 25 bp, Canis familiaris
gaaaaaggggttagatgttggcatt

SEQ ID NO: 112302 - DNA, 25 bp, Canis familiaris
gaaaaatgggctcaggattgttcaa

SEQ ID NO: 112303 - DNA, 25 bp, Canis familiaris
gaaaaatggtcaaaagggtgtcaga

SEQ ID NO: 112304 - DNA, 25 bp, Canis familiaris
gaaaacatttacaagtggactgcca

SEQ ID NO: 112305 - DNA, 25 bp, Canis familiaris
gactcccagtttcagagtgacgcca

SEQ ID NO: 112306 - DNA, 25 bp, Canis familiaris
gaaaccagtttctggcatagcgcta

SEQ ID NO: 112307 - DNA, 25 bp, Canis familiaris
gaaacactgtttcatggcaagtggg

SEQ ID NO: 112308 - DNA, 25 bp, Canis familiaris
gaaacctcgtatggtcgacaggggg

SEQ ID NO: 112309 - DNA, 25 bp, Canis familiaris
gaaacctagttgttggaccacgtgg

SEQ ID NO: 112310 - DNA, 25 bp, Canis familiaris
gaaactgtcgtttcggacacacgaa

SEQ ID NO: 112311 - DNA, 25 bp, Canis familiaris
gaaacaacgatatccagacacactg

SEQ ID NO: 112312 - DNA, 25 bp, Canis familiaris
gaaaaagggatcggagccatcatcg

SEQ ID NO: 112313 - DNA, 25 bp, Canis familiaris
gaaaaacgagacagggcagcccggg

SEQ ID NO: 112314 - DNA, 25 bp, Canis familiaris
gaaacacggtagagggcagccccgg

SEQ ID NO: 112315 - DNA, 25 bp, Canis familiaris
gaaactcggggtgcggagtcaccga

SEQ ID NO: 112316 - DNA, 25 bp, Canis familiaris
gaaacgcaggggtcacttggtacca

SEQ ID NO: 112317 - DNA, 25 bp, Canis familiaris
gaaacagcaggtcttttgttcccag

SEQ ID NO: 112318 - DNA, 25 bp, Canis familiaris
gaaacacatttcatgttttgcacgg

SEQ ID NO: 112319 - DNA, 25 bp, Canis familiaris
gaaacagctttcaagtgcctttctg

SEQ ID NO: 112320 - DNA, 25 bp, Canis familiaris
gaaacagctttcaagtgcctttctg

SEQ ID NO: 112321 - DNA, 25 bp, Canis familiaris
gaaaaaatcctggtggctctctgcg

SEQ ID NO: 112322 - DNA, 25 bp, Canis familiaris
gaaataaactgctttcctctggggg

SEQ ID NO: 112323 - DNA, 25 bp, Canis familiaris
gaaaaacactgctttactaggtatg

SEQ ID NO: 112324 - DNA, 25 bp, Canis familiaris
gataacaagttctgtaaaggcaatg

SEQ ID NO: 112325 - DNA, 25 bp, Canis familiaris
gaaacaattctctcaatatataaag

SEQ ID NO: 112326 - DNA, 25 bp, Canis familiaris
gaaacactaccagcagtaacagagg

SEQ ID NO: 112327 - DNA, 25 bp, Canis familiaris
gaaacgaagcgctctatcaacgagg

SEQ ID NO: 112328 - DNA, 25 bp, Canis familiaris
gaaaccagatggcatttacacgggc

SEQ ID NO: 112329 - DNA, 25 bp, Canis familiaris
gaaaccagaatccagcgtaccaggg

SEQ ID NO: 112330 - DNA, 25 bp, Canis familiaris
gaaaccacttcaacgtgaccagttt

SEQ ID NO: 112331 - DNA, 25 bp, Canis familiaris
gaaacaacctacagatcatccaagt

SEQ ID NO: 112332 - DNA, 25 bp, Canis familiaris
gaaacaacttataatagcatcatga

SEQ ID NO: 112333 - DNA, 25 bp, Canis familiaris
gaaaaagctctatttacaatcatgc

SEQ ID NO: 112334 - DNA, 25 bp, Canis familiaris
gaaaaatgcctttgttatatatcac

SEQ ID NO: 112335 - DNA, 25 bp, Canis familiaris
gaaaaaccacttatcacatacaagg

SEQ ID NO: 112336 - DNA, 25 bp, Canis familiaris
gaaaaactcacgactttattcagag

SEQ ID NO: 112337 - DNA, 25 bp, Canis familiaris
gaaacaagaacagctgttactcaag

SEQ ID NO: 112338 - DNA, 25 bp, Canis familiaris
gaaagaattaccggatttcatcaag

SEQ ID NO: 112339 - DNA, 25 bp, Canis familiaris
gaaaaaccaactgaagtcatgatga

SEQ ID NO: 112340 - DNA, 25 bp, Canis familiaris
gaaacacgtgcatctaacagttgta

SEQ ID NO: 112341 - DNA, 25 bp, Canis familiaris
gaaacaccaccaaaatctgttgtgt

SEQ ID NO: 112342 - DNA, 25 bp, Canis familiaris
gaaacatctacttctttcgtttgta

SEQ ID NO: 112343 - DNA, 25 bp, Canis familiaris
gaaagagtagatttaatagtttatt

SEQ ID NO: 112344 - DNA, 25 bp, Canis familiaris
gaaagtgaggttccaagagctattt

SEQ ID NO: 112345 - DNA, 25 bp, Canis familiaris
gaaacggcatgtagtcatcaagctt

SEQ ID NO: 112346 - DNA, 25 bp, Canis familiaris
gaaactggaaagacagacgctttag

SEQ ID NO: 112347 - DNA, 25 bp, Canis familiaris
gaaactctgaaacgcagtgctatct

SEQ ID NO: 112348 - DNA, 25 bp, Canis familiaris
gaaacgcaaaggccatgtgatctca

SEQ ID NO: 112349 - DNA, 25 bp, Canis familiaris
gaaaccagaaggccattgccaactc

SEQ ID NO: 112350 - DNA, 25 bp, Canis familiaris
gaaacaagtcatcggctggccgacc

SEQ ID NO: 112351 - DNA, 25 bp, Canis familiaris
gaaacgactcgtgcatggagctgac

SEQ ID NO: 112352 - DNA, 25 bp, Canis familiaris
gaaacagatccaaccatacactggc

SEQ ID NO: 112353 - DNA, 25 bp, Canis familiaris
gaaacaacacaaggaacatttgcac

SEQ ID NO: 112354 - DNA, 25 bp, Canis familiaris
gaaactcaatgctgcaaactcttca

SEQ ID NO: 112355 - DNA, 25 bp, Canis familiaris
gaaactcatatggtgcccagtctcc

SEQ ID NO: 112356 - DNA, 25 bp, Canis familiaris
gaaactgctttaaccaggctgctca

SEQ ID NO: 112357 - DNA, 25 bp, Canis familiaris
gaaacctattaacgtactctcagct

SEQ ID NO: 112358 - DNA, 25 bp, Canis familiaris
gaaaccgaatacaatacaatctagt

SEQ ID NO: 112359 - DNA, 25 bp, Canis familiaris
gaaagcggatgataaaacagatatt

SEQ ID NO: 112360 - DNA, 25 bp, Canis familiaris
gaaacgtgcatattgttaccagaat

SEQ ID NO: 112361 - DNA, 25 bp, Canis familiaris
gaaatgggcaacttgttgctatgtt

SEQ ID NO: 112362 - DNA, 25 bp, Canis familiaris
gaaagatcccactgcttgctaaatt

SEQ ID NO: 112363 - DNA, 25 bp, Canis familiaris
gaaagatactccaagttcatggatt

SEQ ID NO: 112364 - DNA, 25 bp, Canis familiaris
gaaagaaccgcaggagttgagtctc

SEQ ID NO: 112365 - DNA, 25 bp, Canis familiaris
gaaacacaaggcttgatttggttcc

SEQ ID NO: 112366 - DNA, 25 bp, Canis familiaris
gaaacaccagggattcggactcaga

SEQ ID NO: 112367 - DNA, 25 bp, Canis familiaris
gaaagactttggtcttgggcccaga

SEQ ID NO: 112368 - DNA, 25 bp, Canis familiaris
gaaaccttatgggcttttccagaga

SEQ ID NO: 112369 - DNA, 25 bp, Canis familiaris
gaaagctgttttggttgtttagaat

SEQ ID NO: 112370 - DNA, 25 bp, Canis familiaris
gaaagcattgtgaggttgtgtgttg

SEQ ID NO: 112371 - DNA, 25 bp, Canis familiaris
gaaacatcctggttttggagttgca

SEQ ID NO: 112372 - DNA, 25 bp, Canis familiaris
gaaacccagtttgtggatgcattgc

SEQ ID NO: 112373 - DNA, 25 bp, Canis familiaris
gaaactccatatctatttatgaatc

SEQ ID NO: 112374 - DNA, 25 bp, Canis familiaris
gaaacacgtgacttatgttgctgaa

SEQ ID NO: 112375 - DNA, 25 bp, Canis familiaris
gaaactcgatgccctgatgtttaga

SEQ ID NO: 112376 - DNA, 25 bp, Canis familiaris
gaaacatctatgaatccttttgtga

SEQ ID NO: 112377 - DNA, 25 bp, Canis familiaris
gagaatcagcttataattagcagga

SEQ ID NO: 112378 - DNA, 25 bp, Canis familiaris
gaaacagcttatgaggctacggaaa

SEQ ID NO: 112379 - DNA, 25 bp, Canis familiaris
gaaactgcttgtgagggaccggaat

SEQ ID NO: 112380 - DNA, 25 bp, Canis familiaris
gaaattttggaccaggaccaggaag

SEQ ID NO: 112381 - DNA, 25 bp, Canis familiaris
gaaagtggtgggcaaacagcatggg

SEQ ID NO: 112382 - DNA, 25 bp, Canis familiaris
gaaactggacctcaactctgatggg

SEQ ID NO: 112383 - DNA, 25 bp, Canis familiaris
gaaactggacctcaactctgatggg

SEQ ID NO: 112384 - DNA, 25 bp, Canis familiaris
gaaactggacctcaactctgatggg

SEQ ID NO: 112385 - DNA, 25 bp, Canis familiaris
gaaactggaccgtcaactgctgatg

SEQ ID NO: 112386 - DNA, 25 bp, Canis familiaris
gaaacaggaagtgcacaccaaggca

SEQ ID NO: 112387 - DNA, 25 bp, Canis familiaris
gaaaccacattctaggcaccaaggc

SEQ ID NO: 112388 - DNA, 25 bp, Canis familiaris
gaaaccatgtttaggaccagctacc

SEQ ID NO: 112389 - DNA, 25 bp, Canis familiaris
gaaactatttgctagaaccagcctg

SEQ ID NO: 112390 - DNA, 25 bp, Canis familiaris
gaaacaactctgtaaacacaactga

SEQ ID NO: 112391 - DNA, 25 bp, Canis familiaris
gaaacaattgcccaaagcacaggtg

SEQ ID NO: 112392 - DNA, 25 bp, Canis familiaris
gaaactaatccatccaaagggtagg

SEQ ID NO: 112393 - DNA, 25 bp, Canis familiaris
gaaacataatcctcaaaaaagtggg

SEQ ID NO: 112394 - DNA, 25 bp, Canis familiaris
gaaacatttctagctaagtatcttg

SEQ ID NO: 112395 - DNA, 25 bp, Canis familiaris
gaaacttttacaataaggctgtgtt

SEQ ID NO: 112396 - DNA, 25 bp, Canis familiaris
gaaactaattcacacattggcggat

SEQ ID NO: 112397 - DNA, 25 bp, Canis familiaris
gaaactccatgtttcacaaccggca

SEQ ID NO: 112398 - DNA, 25 bp, Canis familiaris
gaaacccactctagcacaactagga

SEQ ID NO: 112399 - DNA, 25 bp, Canis familiaris
gaaacctgacagatgcaaattaaag

SEQ ID NO: 112400 - DNA, 25 bp, Canis familiaris
gaaactggaataagcgctttgaaaa

SEQ ID NO: 112401 - DNA, 25 bp, Canis familiaris
gaaactgagcaaaggggtctggaaa

SEQ ID NO: 112402 - DNA, 25 bp, Canis familiaris
gaaaccacaatctgggtcaggcacc

SEQ ID NO: 112403 - DNA, 25 bp, Canis familiaris
gaaacccagacatgtgtcggaacta

SEQ ID NO: 112404 - DNA, 25 bp, Canis familiaris
gaaacccagccttgactctggagtc

SEQ ID NO: 112405 - DNA, 25 bp, Canis familiaris
gaaattggacctagcatttgtcgtc

SEQ ID NO: 112406 - DNA, 25 bp, Canis familiaris
gaaactgagacagatgcttaactgg

SEQ ID NO: 112407 - DNA, 25 bp, Canis familiaris
gaaagcatgacctgcactttccttg

SEQ ID NO: 112408 - DNA, 25 bp, Canis familiaris
gaaacagagactacaccttcactct

SEQ ID NO: 112409 - DNA, 25 bp, Canis familiaris
gaaaaagtcgacactatcatgctct

SEQ ID NO: 112410 - DNA, 25 bp, Canis familiaris
gaaaaatgtcttctctcgatgccat

SEQ ID NO: 112411 - DNA, 25 bp, Canis familiaris
gaaacagcggcatggttcgtgccaa

SEQ ID NO: 112412 - DNA, 25 bp, Canis familiaris
gaaacatgggagctggctcactcta

SEQ ID NO: 112413 - DNA, 25 bp, Canis familiaris
gaaacattagaactgggatccctgg

SEQ ID NO: 112414 - DNA, 25 bp, Canis familiaris
gaaacctcagatgcgaggccttctg

SEQ ID NO: 112415 - DNA, 25 bp, Canis familiaris
gaaacccagtggaaggagcttactc

SEQ ID NO: 112416 - DNA, 25 bp, Canis familiaris
gaaaccctggcaacatgggcttccc

SEQ ID NO: 112417 - DNA, 25 bp, Canis familiaris
gaaaccccgagaggtgtgttccatc

SEQ ID NO: 112418 - DNA, 25 bp, Canis familiaris
gaaagagccacggggactgtatcga

SEQ ID NO: 112419 - DNA, 25 bp, Canis familiaris
gaaaggccaaggttgcaggaccata

SEQ ID NO: 112420 - DNA, 25 bp, Canis familiaris
gaaagactaaaatcagagctccatc

SEQ ID NO: 112421 - DNA, 25 bp, Canis familiaris
gaaacacaaacctcaggcagtctcc

SEQ ID NO: 112422 - DNA, 25 bp, Canis familiaris
gaaaccacaacctggagttcacctc

SEQ ID NO: 112423 - DNA, 25 bp, Canis familiaris
gaaactacacccgggtgaacctctg

SEQ ID NO: 112424 - DNA, 25 bp, Canis familiaris
gaaacaaccgtcggtgtgagacccg

SEQ ID NO: 112425 - DNA, 25 bp, Canis familiaris
gaaacacgccccagggagagtcagc

SEQ ID NO: 112426 - DNA, 25 bp, Canis familiaris
gaaaccccccaaggatgaatctgcc

SEQ ID NO: 112427 - DNA, 25 bp, Canis familiaris
gaaacccccaagcaatggacatgac

SEQ ID NO: 112428 - DNA, 25 bp, Canis familiaris
gaaacccccaaacaatgaacatgct

SEQ ID NO: 112429 - DNA, 25 bp, Canis familiaris
gaaacccacggaactgggaaggctg

SEQ ID NO: 112430 - DNA, 25 bp, Canis familiaris
gattaccccagtcccagggaaggtg

SEQ ID NO: 112431 - DNA, 25 bp, Canis familiaris
gaaaccccaggctcaagtttgtgtt

SEQ ID NO: 112432 - DNA, 25 bp, Canis familiaris
gaaacccaattgtgccagcctggtt

SEQ ID NO: 112433 - DNA, 25 bp, Canis familiaris
gaaactgaaattttccagctcatag

SEQ ID NO: 112434 - DNA, 25 bp, Canis familiaris
gaaacatgaaattattctgcaagta

SEQ ID NO: 112435 - DNA, 25 bp, Canis familiaris
gaaacatcaaagtcatagtcagaaa

SEQ ID NO: 112436 - DNA, 25 bp, Canis familiaris
gaaacatcaacaattcaccaaacaa

SEQ ID NO: 112437 - DNA, 25 bp, Canis familiaris
gaaacatcatactttttcaaagcta

SEQ ID NO: 112438 - DNA, 25 bp, Canis familiaris
gaaactttagtggtatagaagcata

SEQ ID NO: 112439 - DNA, 25 bp, Canis familiaris
gaaactttacacgtacagaattatt

SEQ ID NO: 112440 - DNA, 25 bp, Canis familiaris
gaaactgtctgatcctgaactattg

SEQ ID NO: 112441 - DNA, 25 bp, Canis familiaris
gaaacatcttattcctgaaccatgg

SEQ ID NO: 112442 - DNA, 25 bp, Canis familiaris
gaaacacatttgtctcggagacggt

SEQ ID NO: 112443 - DNA, 25 bp, Canis familiaris
gaaacctgtctgttggacatactgg

SEQ ID NO: 112444 - DNA, 25 bp, Canis familiaris
gaaacgttctttgaattctgagccc

SEQ ID NO: 112445 - DNA, 25 bp, Canis familiaris
gaaacagttctttgtgagcttcaag

SEQ ID NO: 112446 - DNA, 25 bp, Canis familiaris
gaaacctgttctcgtggcatgtaac

SEQ ID NO: 112447 - DNA, 25 bp, Canis familiaris
gaaacactgacttatgttgctgtaa

SEQ ID NO: 112448 - DNA, 25 bp, Canis familiaris
gaaacctgactgcttgagagctagt

SEQ ID NO: 112449 - DNA, 25 bp, Canis familiaris
gaaactgcatgattgcttctccact

SEQ ID NO: 112450 - DNA, 25 bp, Canis familiaris
gaaactcaccagaactgcaagctgt

SEQ ID NO: 112451 - DNA, 25 bp, Canis familiaris
gaaacatttcagcagccaagcatct

SEQ ID NO: 112452 - DNA, 25 bp, Canis familiaris
gaaacaattccttagaagactccag

SEQ ID NO: 112453 - DNA, 25 bp, Canis familiaris
gaaaccattggttaattgaatccag

SEQ ID NO: 112454 - DNA, 25 bp, Canis familiaris
gaaactggggcctaactgcagtcac

SEQ ID NO: 112455 - DNA, 25 bp, Canis familiaris
gaaacggtgcccaaattgcagatgg

SEQ ID NO: 112456 - DNA, 25 bp, Canis familiaris
gaaacggcagcgccgacaggagcgg

SEQ ID NO: 112457 - DNA, 25 bp, Canis familiaris
gaaacaggccgaaaagaatgtggag

SEQ ID NO: 112458 - DNA, 25 bp, Canis familiaris
gaaacaggccgaaaagaatgtggag

SEQ ID NO: 112459 - DNA, 25 bp, Canis familiaris
gaaacaccacggacggaagcgagcg

SEQ ID NO: 112460 - DNA, 25 bp, Canis familiaris
gaaaccccgacccagaagcaggtcg

SEQ ID NO: 112461 - DNA, 25 bp, Canis familiaris
gaaaggacccaagagacctggtcaa

SEQ ID NO: 112462 - DNA, 25 bp, Canis familiaris
gaaaggttccaagagtcttcgtgca

SEQ ID NO: 112463 - DNA, 25 bp, Canis familiaris
gaaagttgaccaggacactttttga

SEQ ID NO: 112464 - DNA, 25 bp, Canis familiaris
gaaagcctataagccaatttgattt

SEQ ID NO: 112465 - DNA, 25 bp, Canis familiaris
gaaagaaccaacccagttttctctg

SEQ ID NO: 112466 - DNA, 25 bp, Canis familiaris
gaaagaccaaaccactgtggccagt

SEQ ID NO: 112467 - DNA, 25 bp, Canis familiaris
gaaagaccatgctcatagctgggcc

SEQ ID NO: 112468 - DNA, 25 bp, Canis familiaris
gaaaccctgcatttagctagagcct

SEQ ID NO: 112469 - DNA, 25 bp, Canis familiaris
gaaacacttgtcatagcagagagct

SEQ ID NO: 112470 - DNA, 25 bp, Canis familiaris
gaaaccatcatcccttgcatgaagt

SEQ ID NO: 112471 - DNA, 25 bp, Canis familiaris
gaaagctgtatgccatcaatgataa

SEQ ID NO: 112472 - DNA, 25 bp, Canis familiaris
gaaagcatgtctgatcaatgtgaga

SEQ ID NO: 112473 - DNA, 25 bp, Canis familiaris
gaaacattctcagtaatgctgtcac

SEQ ID NO: 112474 - DNA, 25 bp, Canis familiaris
gaaacacttcctgtgctggcaatga

SEQ ID NO: 112475 - DNA, 25 bp, Canis familiaris
gaaacattacctgccttgcagtgac

SEQ ID NO: 112476 - DNA, 25 bp, Canis familiaris
gaaactttctcagccttgcagataa

SEQ ID NO: 112477 - DNA, 25 bp, Canis familiaris
gaaagcgttccagctcaacaaacaa

SEQ ID NO: 112478 - DNA, 25 bp, Canis familiaris
gaaacctccacgctcaataggacaa

SEQ ID NO: 112479 - DNA, 25 bp, Canis familiaris
gaaacctcaaatcccagaatggctc

SEQ ID NO: 112480 - DNA, 25 bp, Canis familiaris
gaaaccctcgtacaaatggcatgtg

SEQ ID NO: 112481 - DNA, 25 bp, Canis familiaris
gaaaccctctgtagtgtaaccagtg

SEQ ID NO: 112482 - DNA, 25 bp, Canis familiaris
gaaacctttgatctgtacactactg

SEQ ID NO: 112483 - DNA, 25 bp, Canis familiaris
gaaacactggtgtccttatcactcc

SEQ ID NO: 112484 - DNA, 25 bp, Canis familiaris
gaaacactggagtctaggaacaccc

SEQ ID NO: 112485 - DNA, 25 bp, Canis familiaris
gaaactcatggccgctagggagcgc

SEQ ID NO: 112486 - DNA, 25 bp, Canis familiaris
gaaactctgacagcatactggaggc

SEQ ID NO: 112487 - DNA, 25 bp, Canis familiaris
gaaactctgacgttccttatagcgt

SEQ ID NO: 112488 - DNA, 25 bp, Canis familiaris
gaaactctgcaccgttatcatgaag

SEQ ID NO: 112489 - DNA, 25 bp, Canis familiaris
gaaacattcgggacctcatcatgat

SEQ ID NO: 112490 - DNA, 25 bp, Canis familiaris
gaaacatgtcgaccacacttctgtc

SEQ ID NO: 112491 - DNA, 25 bp, Canis familiaris
gaaacattgtgaactgacttgctgt

SEQ ID NO: 112492 - DNA, 25 bp, Canis familiaris
gaaactctgcttgctgttatctgca

SEQ ID NO: 112493 - DNA, 25 bp, Canis familiaris
gaaacatgtgttggcttttctcaca

SEQ ID NO: 112494 - DNA, 25 bp, Canis familiaris
gaaacattggttctgctgtccaacc

SEQ ID NO: 112495 - DNA, 25 bp, Canis familiaris
gaaagatgggttttgtgagcacaga

SEQ ID NO: 112496 - DNA, 25 bp, Canis familiaris
gaaaccgagttgagggcacagagac

SEQ ID NO: 112497 - DNA, 25 bp, Canis familiaris
gaaacctgaggccgggagacaagaa

SEQ ID NO: 112498 - DNA, 25 bp, Canis familiaris
gaaagccatgcagcggccagagact

SEQ ID NO: 112499 - DNA, 25 bp, Canis familiaris
gaaactcagcaggagtggacacagt

SEQ ID NO: 112500 - DNA, 25 bp, Canis familiaris
gaaactaacgcagggagtccattgg

SEQ ID NO: 112501 - DNA, 25 bp, Canis familiaris
gaaagtaactgcagcggtagtggaa

SEQ ID NO: 112502 - DNA, 25 bp, Canis familiaris
gaaagtaggctgctcggctaagtga

SEQ ID NO: 112503 - DNA, 25 bp, Canis familiaris
gaaaggatggttaatgatgctgaga

SEQ ID NO: 112504 - DNA, 25 bp, Canis familiaris
gaaagcggattcatgatgatgaaga

SEQ ID NO: 112505 - DNA, 25 bp, Canis familiaris
gaaactgggatgaacacatcaagca

SEQ ID NO: 112506 - DNA, 25 bp, Canis familiaris
gaaacttgaagcatgcacacacaca

SEQ ID NO: 112507 - DNA, 25 bp, Canis familiaris
gaaactataagctcacagcctcagc

SEQ ID NO: 112508 - DNA, 25 bp, Canis familiaris
gaaacacgacgcgcaaggcgcagcc

SEQ ID NO: 112509 - DNA, 25 bp, Canis familiaris
gaaaccatgaagaccaagaagccac

SEQ ID NO: 112510 - DNA, 25 bp, Canis familiaris
gaaacagctatggaccattaggcca

SEQ ID NO: 112511 - DNA, 25 bp, Canis familiaris
gaaacaaaggagacactggtgccaa

SEQ ID NO: 112512 - DNA, 25 bp, Canis familiaris
gaaacactcgtagggctggttcaca

SEQ ID NO: 112513 - DNA, 25 bp, Canis familiaris
gaaacctctgtagtgttttccacag

SEQ ID NO: 112514 - DNA, 25 bp, Canis familiaris
gaaatccaaggaggtgccttcccac

SEQ ID NO: 112515 - DNA, 25 bp, Canis familiaris
gaaacacgagaagctcctgtcaacc

SEQ ID NO: 112516 - DNA, 25 bp, Canis familiaris
gaaacccaggcagatacttaactcc

SEQ ID NO: 112517 - DNA, 25 bp, Canis familiaris
gaaacctcggaatttctatgagacc

SEQ ID NO: 112518 - DNA, 25 bp, Canis familiaris
gaaacacctttattacctgaggctc

SEQ ID NO: 112519 - DNA, 25 bp, Canis familiaris
gaaactggctattgacgaccgggtc

SEQ ID NO: 112520 - DNA, 25 bp, Canis familiaris
gaaaggcagatttaccaccggtatt

SEQ ID NO: 112521 - DNA, 25 bp, Canis familiaris
gaaagaactgtcaacccagggttct

SEQ ID NO: 112522 - DNA, 25 bp, Canis familiaris
gagaggaagttctgcctttgaggtt

SEQ ID NO: 112523 - DNA, 25 bp, Canis familiaris
gatagaggaaccccctatctgggtt

SEQ ID NO: 112524 - DNA, 25 bp, Canis familiaris
gaaagggacccggtttgagctgtgt

SEQ ID NO: 112525 - DNA, 25 bp, Canis familiaris
gaaagacgacctttctttgctgggt

SEQ ID NO: 112526 - DNA, 25 bp, Canis familiaris
gaaagactgtctggattccctgttc

SEQ ID NO: 112527 - DNA, 25 bp, Canis familiaris
gaaacacgatctatatcacctgcca

SEQ ID NO: 112528 - DNA, 25 bp, Canis familiaris
gaaagccgacaaattacccaagtat

SEQ ID NO: 112529 - DNA, 25 bp, Canis familiaris
gaaaccgaaggtagcactccaacaa

SEQ ID NO: 112530 - DNA, 25 bp, Canis familiaris
gaaactcttagtctgatgcccaatc

SEQ ID NO: 112531 - DNA, 25 bp, Canis familiaris
gaaacatttactgagtcccatgatg

SEQ ID NO: 112532 - DNA, 25 bp, Canis familiaris
gaaactggtgactatagctcccgta

SEQ ID NO: 112533 - DNA, 25 bp, Canis familiaris
gaaactggctgaccaagtgcacggg

SEQ ID NO: 112534 - DNA, 25 bp, Canis familiaris
gaaactggcgcaccagatctaccag

SEQ ID NO: 112535 - DNA, 25 bp, Canis familiaris
gaaacttgcccaagtattctcagat

SEQ ID NO: 112536 - DNA, 25 bp, Canis familiaris
gaaacttgcccagatgttctcagat

SEQ ID NO: 112537 - DNA, 25 bp, Canis familiaris
gaaacttgaccacactgttgctgat

SEQ ID NO: 112538 - DNA, 25 bp, Canis familiaris
gaaacaggcccaaatctgttctgga

SEQ ID NO: 112539 - DNA, 25 bp, Canis familiaris
gataaaggccctcttgatctaggag

SEQ ID NO: 112540 - DNA, 25 bp, Canis familiaris
gaaatagggtcctcgatccaggtga

SEQ ID NO: 112541 - DNA, 25 bp, Canis familiaris
taattaggttcgattgcccagtgtc

SEQ ID NO: 112542 - DNA, 25 bp, Canis familiaris
gacttagttgtaccaatgcccaggg

SEQ ID NO: 112543 - DNA, 25 bp, Canis familiaris
gaaactgggttttcatcccattcct

SEQ ID NO: 112544 - DNA, 25 bp, Canis familiaris
gaaactggtattttttccatgtcct

SEQ ID NO: 112545 - DNA, 25 bp, Canis familiaris
gaaactttatttagttcacttccat

SEQ ID NO: 112546 - DNA, 25 bp, Canis familiaris
gaaacttgttatttattcacttcaa

SEQ ID NO: 112547 - DNA, 25 bp, Canis familiaris
gaaactttctaatagtcattttgtt

SEQ ID NO: 112548 - DNA, 25 bp, Canis familiaris
gaaacttttccattcaatccatttg

SEQ ID NO: 112549 - DNA, 25 bp, Canis familiaris
gaaacttgaacctcaacgtctgtga

SEQ ID NO: 112550 - DNA, 25 bp, Canis familiaris
gaaacttagggatccaagactcgcg

SEQ ID NO: 112551 - DNA, 25 bp, Canis familiaris
gaaacttagggatcaaagacagcgc

SEQ ID NO: 112552 - DNA, 25 bp, Canis familiaris
gaaagtcggaggttcgaagacgatc

SEQ ID NO: 112553 - DNA, 25 bp, Canis familiaris
gaaagacggggtgcataggggacta

SEQ ID NO: 112554 - DNA, 25 bp, Canis familiaris
gaaagactaggaccctcagaaggac

SEQ ID NO: 112555 - DNA, 25 bp, Canis familiaris
gaaatgatttatgccccaaagtacc

SEQ ID NO: 112556 - DNA, 25 bp, Canis familiaris
gaaatgatttaatgcccaaaagtac

SEQ ID NO: 112557 - DNA, 25 bp, Canis familiaris
gaaatgcattgtcatcatcccgaac

SEQ ID NO: 112558 - DNA, 25 bp, Canis familiaris
gaaatgcattgtcatcatcccgaac

SEQ ID NO: 112559 - DNA, 25 bp, Canis familiaris
gaaagatcattcaaccactcgttcg

SEQ ID NO: 112560 - DNA, 25 bp, Canis familiaris
gaaattaaagtcagccagttctgga

SEQ ID NO: 112561 - DNA, 25 bp, Canis familiaris
gaaatctgacgagttttaatcttgg

SEQ ID NO: 112562 - DNA, 25 bp, Canis familiaris
gaaactgagctggttgtatattcta

SEQ ID NO: 112563 - DNA, 25 bp, Canis familiaris
gaaactggagtcttctatatttagg

SEQ ID NO: 112564 - DNA, 25 bp, Canis familiaris
gaaactgagacttcttcatcctata

SEQ ID NO: 112565 - DNA, 25 bp, Canis familiaris
gaaactgtatcttttgactctatca

SEQ ID NO: 112566 - DNA, 25 bp, Canis familiaris
gaaacagctacatttgtcttctatt

SEQ ID NO: 112567 - DNA, 25 bp, Canis familiaris
gaaacagctttttatttgcatcatt

SEQ ID NO: 112568 - DNA, 25 bp, Canis familiaris
gaaacgtatctcctttatatcattt

SEQ ID NO: 112569 - DNA, 25 bp, Canis familiaris
gaaactgcgaatggctcattaaatc

SEQ ID NO: 112570 - DNA, 25 bp, Canis familiaris
gaaactgcgaatggctcattaaatc

SEQ ID NO: 112571 - DNA, 25 bp, Canis familiaris
gaaactggcaatgctcctgttactg

SEQ ID NO: 112572 - DNA, 25 bp, Canis familiaris
gaaactgctgcgacgatcggtacac

SEQ ID NO: 112573 - DNA, 25 bp, Canis familiaris
gaaactgctgcagctgtgggtgcaa

SEQ ID NO: 112574 - DNA, 25 bp, Canis familiaris
gaaacgctggccttggtgtgaatgt

SEQ ID NO: 112575 - DNA, 25 bp, Canis familiaris
gaaacagtggtcagcgtgtaacatc

SEQ ID NO: 112576 - DNA, 25 bp, Canis familiaris
gaaacaggcttcaggatgccctcac

SEQ ID NO: 112577 - DNA, 25 bp, Canis familiaris
gaaacaggggcaatggtgcgcctgc

SEQ ID NO: 112578 - DNA, 25 bp, Canis familiaris
gaaagaaggacgaatgtcccgccca

SEQ ID NO: 112579 - DNA, 25 bp, Canis familiaris
gaaactaagaaggatctgaccccca

SEQ ID NO: 112580 - DNA, 25 bp, Canis familiaris
gaaagaacaaagcatcgcactccct

SEQ ID NO: 112581 - DNA, 25 bp, Canis familiaris
gaaaggtaaaggtctgattcctgga

SEQ ID NO: 112582 - DNA, 25 bp, Canis familiaris
gaaagggtgaatgtttgccctgggg

SEQ ID NO: 112583 - DNA, 25 bp, Canis familiaris
gacaacgtgggagattggctccggg

SEQ ID NO: 112584 - DNA, 25 bp, Canis familiaris
gaaactgtggtgtgtgggagtgggg

SEQ ID NO: 112585 - DNA, 25 bp, Canis familiaris
gaaagcgcggtgcggtgggggaagg

SEQ ID NO: 112586 - DNA, 25 bp, Canis familiaris
gaaaggtggagtgagtgggtggaga

SEQ ID NO: 112587 - DNA, 25 bp, Canis familiaris
gacaggggaagacagggagggtggg

SEQ ID NO: 112588 - DNA, 25 bp, Canis familiaris
gaaacggaaagcctgctggggaggt

SEQ ID NO: 112589 - DNA, 25 bp, Canis familiaris
gaaacggagcggctggagggctggt

SEQ ID NO: 112590 - DNA, 25 bp, Canis familiaris
gaaactggcaggactggaggcgaca

SEQ ID NO: 112591 - DNA, 25 bp, Canis familiaris
gacacactgaagctctgggactaca

SEQ ID NO: 112592 - DNA, 25 bp, Canis familiaris
gaaacatccagcttcagggaggaca

SEQ ID NO: 112593 - DNA, 25 bp, Canis familiaris
gaaacccaccatgcaggcaggtgaa

SEQ ID NO: 112594 - DNA, 25 bp, Canis familiaris
gaaactgaaccaactggatgggagt

SEQ ID NO: 112595 - DNA, 25 bp, Canis familiaris
gaaactgatgacttggccttggggt

SEQ ID NO: 112596 - DNA, 25 bp, Canis familiaris
gaaacttcaaagtccatgggatggt

SEQ ID NO: 112597 - DNA, 25 bp, Canis familiaris
gaaacttcaaagtccatgggatggt

SEQ ID NO: 112598 - DNA, 25 bp, Canis familiaris
gaaacttccaagtcccatgggatgg

SEQ ID NO: 112599 - DNA, 25 bp, Canis familiaris
gaaacctcagaatcacgatgggtgg

SEQ ID NO: 112600 - DNA, 25 bp, Canis familiaris
gaaacgccacaagaacatgtgggtg

SEQ ID NO: 112601 - DNA, 25 bp, Canis familiaris
gaaactgctccaggatgtacttggg

SEQ ID NO: 112602 - DNA, 25 bp, Canis familiaris
gaaactgcgctagtatggacttttg

SEQ ID NO: 112603 - DNA, 25 bp, Canis familiaris
gaaacggctcagaatggtatattta

SEQ ID NO: 112604 - DNA, 25 bp, Canis familiaris
gaaacgtgccatgaacacaatcatt

SEQ ID NO: 112605 - DNA, 25 bp, Canis familiaris
gaaacctcactggaaaccaatacta

SEQ ID NO: 112606 - DNA, 25 bp, Canis familiaris
gaaagccattctgaaaccctacagt

SEQ ID NO: 112607 - DNA, 25 bp, Canis familiaris
gaaaccatgttgtccaaccaataaa

SEQ ID NO: 112608 - DNA, 25 bp, Canis familiaris
gaaacccttttccagtgcaataact

SEQ ID NO: 112609 - DNA, 25 bp, Canis familiaris
gaaacctctttttaatctatccctg

SEQ ID NO: 112610 - DNA, 25 bp, Canis familiaris
gaaaccactttatcagacattccct

SEQ ID NO: 112611 - DNA, 25 bp, Canis familiaris
gaaagcgacattaagccagctattc

SEQ ID NO: 112612 - DNA, 25 bp, Canis familiaris
gaaacgatcttcaactccatatgct

SEQ ID NO: 112613 - DNA, 25 bp, Canis familiaris
gaaaccatctgtactctgttgacta

SEQ ID NO: 112614 - DNA, 25 bp, Canis familiaris
gaaactcatatccccagagctacat

SEQ ID NO: 112615 - DNA, 25 bp, Canis familiaris
gaaagctaactgccagagagcggat

SEQ ID NO: 112616 - DNA, 25 bp, Canis familiaris
gaaagccacaatccaaacaaaccaa

SEQ ID NO: 112617 - DNA, 25 bp, Canis familiaris
gaaacgcacgatccaccataataac

SEQ ID NO: 112618 - DNA, 25 bp, Canis familiaris
gaaacctaggtgaccaacaccagca

SEQ ID NO: 112619 - DNA, 25 bp, Canis familiaris
gaaacctaggtgacaaacacagcac

SEQ ID NO: 112620 - DNA, 25 bp, Canis familiaris
gaaacggggctgcagaaccaatcaa

SEQ ID NO: 112621 - DNA, 25 bp, Canis familiaris
gaaacgacagggcacaggccccaac

SEQ ID NO: 112622 - DNA, 25 bp, Canis familiaris
gacaaaagtggtcagggccacccca

SEQ ID NO: 112623 - DNA, 25 bp, Canis familiaris
gacaataagccctggaaagaccccg

SEQ ID NO: 112624 - DNA, 25 bp, Canis familiaris
gactaaacaccttccaaaggctgcc

SEQ ID NO: 112625 - DNA, 25 bp, Canis familiaris
gactaggaccctaccagattgagga

SEQ ID NO: 112626 - DNA, 25 bp, Canis familiaris
gactaggaccaggacccgaggtatc

SEQ ID NO: 112627 - DNA, 25 bp, Canis familiaris
gaaagcagaccacacaccgtgggtc

SEQ ID NO: 112628 - DNA, 25 bp, Canis familiaris
gaaaccagccacacatttgtgggac

SEQ ID NO: 112629 - DNA, 25 bp, Canis familiaris
gaaactaccactgtattgtggattt

SEQ ID NO: 112630 - DNA, 25 bp, Canis familiaris
gaaacattccactattttggttcat

SEQ ID NO: 112631 - DNA, 25 bp, Canis familiaris
gacaccattaagttcttttttcagc

SEQ ID NO: 112632 - DNA, 25 bp, Canis familiaris
gaaacttctatgttctttctttaca

SEQ ID NO: 112633 - DNA, 25 bp, Canis familiaris
gaaacttctgaactgttcactttaa

SEQ ID NO: 112634 - DNA, 25 bp, Canis familiaris
gaaacatttacgttctctctttata

SEQ ID NO: 112635 - DNA, 25 bp, Canis familiaris
gaaactcattaccagggttttcaga

SEQ ID NO: 112636 - DNA, 25 bp, Canis familiaris
gaaactctgcgtcggggtttctggg

SEQ ID NO: 112637 - DNA, 25 bp, Canis familiaris
gaaacccctggtggggatgtgaggg

SEQ ID NO: 112638 - DNA, 25 bp, Canis familiaris
gaaacccgtaggccgagggagagct

SEQ ID NO: 112639 - DNA, 25 bp, Canis familiaris
gaaacccggaggagcagcaagagat

SEQ ID NO: 112640 - DNA, 25 bp, Canis familiaris
gaaacccgtacaaatcatgcaaagt

SEQ ID NO: 112641 - DNA, 25 bp, Canis familiaris
gaaactccgaaggacacgaagggct

SEQ ID NO: 112642 - DNA, 25 bp, Canis familiaris
gaaagcctccaatagactacagttt

SEQ ID NO: 112643 - DNA, 25 bp, Canis familiaris
gaaacctgtcaatgtgaattcagtt

SEQ ID NO: 112644 - DNA, 25 bp, Canis familiaris
gaaagccatgtcaaagtaatcactg

SEQ ID NO: 112645 - DNA, 25 bp, Canis familiaris
gaaaccatctcacagggatacttct

SEQ ID NO: 112646 - DNA, 25 bp, Canis familiaris
gaaactcactagtggctttcttttg

SEQ ID NO: 112647 - DNA, 25 bp, Canis familiaris
gaaactattgggtcactttttatgt

SEQ ID NO: 112648 - DNA, 25 bp, Canis familiaris
gaaagcctgtggctggttctggttt

SEQ ID NO: 112649 - DNA, 25 bp, Canis familiaris
gaaagatctttgagaacctgggtgt

SEQ ID NO: 112650 - DNA, 25 bp, Canis familiaris
gaaagcctattgtgaacgacagggt

SEQ ID NO: 112651 - DNA, 25 bp, Canis familiaris
gaaacccattgaagctccagaagag

SEQ ID NO: 112652 - DNA, 25 bp, Canis familiaris
gaaaccgttgtaccagcagcaaaac

SEQ ID NO: 112653 - DNA, 25 bp, Canis familiaris
gaaactccttgttttgccagcaaac

SEQ ID NO: 112654 - DNA, 25 bp, Canis familiaris
gaaaccaattctttgccgatgaaac

SEQ ID NO: 112655 - DNA, 25 bp, Canis familiaris
gaaacccacactttacaggaacaca

SEQ ID NO: 112656 - DNA, 25 bp, Canis familiaris
gaaaccaaccgaataagagacatca

SEQ ID NO: 112657 - DNA, 25 bp, Canis familiaris
gaaagcagtacccatatcaaaacaa

SEQ ID NO: 112658 - DNA, 25 bp, Canis familiaris
gaaagcccccaaacattgaactact

SEQ ID NO: 112659 - DNA, 25 bp, Canis familiaris
gacaagccccaattttgaaaggcct

SEQ ID NO: 112660 - DNA, 25 bp, Canis familiaris
gaaatcccgcaacttggaaaggagg

SEQ ID NO: 112661 - DNA, 25 bp, Canis familiaris
gacaggcccgcatcttaggggccag

SEQ ID NO: 112662 - DNA, 25 bp, Canis familiaris
gaaaggcggcaaaaagggagccaag

SEQ ID NO: 112663 - DNA, 25 bp, Canis familiaris
gaaagcggtcttgtaggtggccaaa

SEQ ID NO: 112664 - DNA, 25 bp, Canis familiaris
gaaaggttctgtttcgggcaacact

SEQ ID NO: 112665 - DNA, 25 bp, Canis familiaris
gaaaggactactccacgggataaca

SEQ ID NO: 112666 - DNA, 25 bp, Canis familiaris
gaaatggcagaattagccaaggaac

SEQ ID NO: 112667 - DNA, 25 bp, Canis familiaris
gaaagatgagcatagagtacgatga

SEQ ID NO: 112668 - DNA, 25 bp, Canis familiaris
gaaagcatgagagagtacaagcagg

SEQ ID NO: 112669 - DNA, 25 bp, Canis familiaris
gaaagctaatgctagtatatactgc

SEQ ID NO: 112670 - DNA, 25 bp, Canis familiaris
gaaactgactgctctgtatcagcct

SEQ ID NO: 112671 - DNA, 25 bp, Canis familiaris
gaaagcagaggctgctgcctcagcc

SEQ ID NO: 112672 - DNA, 25 bp, Canis familiaris
gaaagagatgcacaggcctggccac

SEQ ID NO: 112673 - DNA, 25 bp, Canis familiaris
gaaagaagccatcgatgcctgggcc

SEQ ID NO: 112674 - DNA, 25 bp, Canis familiaris
gaaagaagaagccagccttcctctt

SEQ ID NO: 112675 - DNA, 25 bp, Canis familiaris
gaaattaacccaaatgtccatcaat

SEQ ID NO: 112676 - DNA, 25 bp, Canis familiaris
gaaactttccaagctggccagcaat

SEQ ID NO: 112677 - DNA, 25 bp, Canis familiaris
gaaacttctcacacctggaagaatt

SEQ ID NO: 112678 - DNA, 25 bp, Canis familiaris
gaaactgttatcccaaggaagtcta

SEQ ID NO: 112679 - DNA, 25 bp, Canis familiaris
gaaactcttcctcgaaaaggtgcta

SEQ ID NO: 112680 - DNA, 25 bp, Canis familiaris
gaaagggtccatcttcaagggcttc

SEQ ID NO: 112681 - DNA, 25 bp, Canis familiaris
gaaactttctattttaagggcatgt

SEQ ID NO: 112682 - DNA, 25 bp, Canis familiaris
gaaactcttctattgttcctgttga

SEQ ID NO: 112683 - DNA, 25 bp, Canis familiaris
gaaactatatctgcgttccgagtac

SEQ ID NO: 112684 - DNA, 25 bp, Canis familiaris
gacacagctattctcgtgccaaagt

SEQ ID NO: 112685 - DNA, 25 bp, Canis familiaris
gaaactcttctctgatctcaaaatt

SEQ ID NO: 112686 - DNA, 25 bp, Canis familiaris
gagaagccccaatgaccgaaattaa

SEQ ID NO: 112687 - DNA, 25 bp, Canis familiaris
gaaaccactacatactccaattaaa

SEQ ID NO: 112688 - DNA, 25 bp, Canis familiaris
gaaaccaatactgacacaaatgctg

SEQ ID NO: 112689 - DNA, 25 bp, Canis familiaris
gaaactcacattgtcactaactcta

SEQ ID NO: 112690 - DNA, 25 bp, Canis familiaris
gacagagtcctaacgcacgagacct

SEQ ID NO: 112691 - DNA, 25 bp, Canis familiaris
gacggtcccatcaatgacggatgcc

SEQ ID NO: 112692 - DNA, 25 bp, Canis familiaris
gaaagctgcccaatatgacgacatc

SEQ ID NO: 112693 - DNA, 25 bp, Canis familiaris
gaaactgcctcattatcactggttg

SEQ ID NO: 112694 - DNA, 25 bp, Canis familiaris
gaaactcatctattaattgtgctgt

SEQ ID NO: 112695 - DNA, 25 bp, Canis familiaris
gaaactcgcttctaatatgatatat

SEQ ID NO: 112696 - DNA, 25 bp, Canis familiaris
gaaactcttatctcagtcatgcata

SEQ ID NO: 112697 - DNA, 25 bp, Canis familiaris
gaaagctccatttgccagttgcaga

SEQ ID NO: 112698 - DNA, 25 bp, Canis familiaris
gaaaccctctaggctttatgatgcc

SEQ ID NO: 112699 - DNA, 25 bp, Canis familiaris
gaaaccctctatggactttgtacta

SEQ ID NO: 112700 - DNA, 25 bp, Canis familiaris
gaaacctgcgttcattttgatatta

SEQ ID NO: 112701 - DNA, 25 bp, Canis familiaris
gaaactctgctgagacattttgaag

SEQ ID NO: 112702 - DNA, 25 bp, Canis familiaris
gaaactgctctgcgagcctatgtaa

SEQ ID NO: 112703 - DNA, 25 bp, Canis familiaris
gaaactcgtgtggggatctgtcacc

SEQ ID NO: 112704 - DNA, 25 bp, Canis familiaris
gaaagcttttggtgcttgtcctcac

SEQ ID NO: 112705 - DNA, 25 bp, Canis familiaris
gaaagctgtttctggggtttcacca

SEQ ID NO: 112706 - DNA, 25 bp, Canis familiaris
gaaactgtttctaccgagctttcgg

SEQ ID NO: 112707 - DNA, 25 bp, Canis familiaris
gaaactgcatttctaggagatgtta

SEQ ID NO: 112708 - DNA, 25 bp, Canis familiaris
gaaagctcttggctggaggatgcct

SEQ ID NO: 112709 - DNA, 25 bp, Canis familiaris
gaaagcctctagagggatgcgcccc

SEQ ID NO: 112710 - DNA, 25 bp, Canis familiaris
gaaaccatccagagaaaccctatct

SEQ ID NO: 112711 - DNA, 25 bp, Canis familiaris
gaaacctccacagttaacacttact

SEQ ID NO: 112712 - DNA, 25 bp, Canis familiaris
gaaagttgcaaagttaataaacact

SEQ ID NO: 112713 - DNA, 25 bp, Canis familiaris
gaaagagctgcatacttttataaat

SEQ ID NO: 112714 - DNA, 25 bp, Canis familiaris
gaaagccatgcttatcttcaataat

SEQ ID NO: 112715 - DNA, 25 bp, Canis familiaris
gaaactcttactatgcagatacatt

SEQ ID NO: 112716 - DNA, 25 bp, Canis familiaris
gaaactacactatcgcaatgacatt

SEQ ID NO: 112717 - DNA, 25 bp, Canis familiaris
gaaactaagtattacactgtatgtt

SEQ ID NO: 112718 - DNA, 25 bp, Canis familiaris
gaaactcatcacaaaaacgatactt

SEQ ID NO: 112719 - DNA, 25 bp, Canis familiaris
gacaagcttcaaaaaggtctgacct

SEQ ID NO: 112720 - DNA, 25 bp, Canis familiaris
gaaatgttaaagtacctctgaccta

SEQ ID NO: 112721 - DNA, 25 bp, Canis familiaris
gaaaggaaaagcacccttgccatca

SEQ ID NO: 112722 - DNA, 25 bp, Canis familiaris
gaaactgataaaaggaatcttccac

SEQ ID NO: 112723 - DNA, 25 bp, Canis familiaris
gaaactcaccggtgactttctcact

SEQ ID NO: 112724 - DNA, 25 bp, Canis familiaris
gataaacccactttggtttgccaat

SEQ ID NO: 112725 - DNA, 25 bp, Canis familiaris
gaaatactccgtactggttgacaaa

SEQ ID NO: 112726 - DNA, 25 bp, Canis familiaris
gaaagaactcttatcatttgtaaca

SEQ ID NO: 112727 - DNA, 25 bp, Canis familiaris
gaaagcacctttaatgattcccctc

SEQ ID NO: 112728 - DNA, 25 bp, Canis familiaris
gaaagcccttgtgtgttcctttaat

SEQ ID NO: 112729 - DNA, 25 bp, Canis familiaris
gaaacccacttatattctctttgaa

SEQ ID NO: 112730 - DNA, 25 bp, Canis familiaris
gaaagactccttgaatctctcggaa

SEQ ID NO: 112731 - DNA, 25 bp, Canis familiaris
gaaagatgtcacttggaacccatgg

SEQ ID NO: 112732 - DNA, 25 bp, Canis familiaris
gaaatctggccatttgcaaccatac

SEQ ID NO: 112733 - DNA, 25 bp, Canis familiaris
gaaactgagttctatctcggcaagc

SEQ ID NO: 112734 - DNA, 25 bp, Canis familiaris
gaaaccagttggctctagctacttg

SEQ ID NO: 112735 - DNA, 25 bp, Canis familiaris
gaaagcacaggtggcatatgcgagc

SEQ ID NO: 112736 - DNA, 25 bp, Canis familiaris
gaaagcacatttgcaggcagaccat

SEQ ID NO: 112737 - DNA, 25 bp, Canis familiaris
gaaatgcagcctacacatccaattc

SEQ ID NO: 112738 - DNA, 25 bp, Canis familiaris
gaaacctagaccacatttctttctt

SEQ ID NO: 112739 - DNA, 25 bp, Canis familiaris
gaaaccatagcaactcctttttcga

SEQ ID NO: 112740 - DNA, 25 bp, Canis familiaris
gaaaccagtgccttcaagtcatttg

SEQ ID NO: 112741 - DNA, 25 bp, Canis familiaris
gaaactctggccaacagcagctttt

SEQ ID NO: 112742 - DNA, 25 bp, Canis familiaris
gaaactgctggaaatgcggccttgt

SEQ ID NO: 112743 - DNA, 25 bp, Canis familiaris
gacacactcggaacttgcgggtgaa

SEQ ID NO: 112744 - DNA, 25 bp, Canis familiaris
gaaagctttcaaaatgccaggtaaa

SEQ ID NO: 112745 - DNA, 25 bp, Canis familiaris
gacacctttaaatccgttttgaatg

SEQ ID NO: 112746 - DNA, 25 bp, Canis familiaris
gacaacattaagtacccagattttc

SEQ ID NO: 112747 - DNA, 25 bp, Canis familiaris
gaaactgatcaagaggccatttttt

SEQ ID NO: 112748 - DNA, 25 bp, Canis familiaris
gaaactgaacactcactcttttttt

SEQ ID NO: 112749 - DNA, 25 bp, Canis familiaris
gaaacgaactcttccctggaataat

SEQ ID NO: 112750 - DNA, 25 bp, Canis familiaris
gaaagcagaaccagaactataaata

SEQ ID NO: 112751 - DNA, 25 bp, Canis familiaris
gaaagaacagacaaaccctcagaaa

SEQ ID NO: 112752 - DNA, 25 bp, Canis familiaris
gaaagcggcagctaaaccagcggaa

SEQ ID NO: 112753 - DNA, 25 bp, Canis familiaris
gaaactggctgctacaaccatggga

SEQ ID NO: 112754 - DNA, 25 bp, Canis familiaris
gaaagatacatctataaccgggagg

SEQ ID NO: 112755 - DNA, 25 bp, Canis familiaris
gaaagatagatctcgttctgggaag

SEQ ID NO: 112756 - DNA, 25 bp, Canis familiaris
gaaatgtcaattgctgtttggagtt

SEQ ID NO: 112757 - DNA, 25 bp, Canis familiaris
gaaagtcagtacatttttgtgttga

SEQ ID NO: 112758 - DNA, 25 bp, Canis familiaris
gaaaggcgttttcatgttgtcattg

SEQ ID NO: 112759 - DNA, 25 bp, Canis familiaris
gaaactggcttttctgttttctctg

SEQ ID NO: 112760 - DNA, 25 bp, Canis familiaris
gaaacgtgctttatgttgtcctcaa

SEQ ID NO: 112761 - DNA, 25 bp, Canis familiaris
gaaactgtgtttggagctgggccct

SEQ ID NO: 112762 - DNA, 25 bp, Canis familiaris
gaaatgttggctccaaagggtcctc

SEQ ID NO: 112763 - DNA, 25 bp, Canis familiaris
gaaattatgcttgagggaggtccac

SEQ ID NO: 112764 - DNA, 25 bp, Canis familiaris
gaaatttgtctcagggttgtcgccc

SEQ ID NO: 112765 - DNA, 25 bp, Canis familiaris
gaaaggtgttgcagcttctttcgcc

SEQ ID NO: 112766 - DNA, 25 bp, Canis familiaris
gaaatgggctacattttctacccaa

SEQ ID NO: 112767 - DNA, 25 bp, Canis familiaris
gaaatggttacgaattgtctcccca

SEQ ID NO: 112768 - DNA, 25 bp, Canis familiaris
gaaacgtgagagcaactttccatcc

SEQ ID NO: 112769 - DNA, 25 bp, Canis familiaris
gaaatctgggggattcttccacttg

SEQ ID NO: 112770 - DNA, 25 bp, Canis familiaris
gaaatttgggggtgatatactatag

SEQ ID NO: 112771 - DNA, 25 bp, Canis familiaris
gaaatttgcgggccaagtacctgga

SEQ ID NO: 112772 - DNA, 25 bp, Canis familiaris
gaaatcttaggtctcttaccttgaa

SEQ ID NO: 112773 - DNA, 25 bp, Canis familiaris
gataatttaggtccccatacacgtt

SEQ ID NO: 112774 - DNA, 25 bp, Canis familiaris
gaaatttaccttcagcttatctggt

SEQ ID NO: 112775 - DNA, 25 bp, Canis familiaris
gaaatttatttcctagttctgtaga

SEQ ID NO: 112776 - DNA, 25 bp, Canis familiaris
gaaatgttatttctactgtttaatt

SEQ ID NO: 112777 - DNA, 25 bp, Canis familiaris
gaaatatcctttctttttatcctgt

SEQ ID NO: 112778 - DNA, 25 bp, Canis familiaris
gaaaccctttttgagtatgaagatt

SEQ ID NO: 112779 - DNA, 25 bp, Canis familiaris
gaaaccttttttgattacagtatct

SEQ ID NO: 112780 - DNA, 25 bp, Canis familiaris
gaaaggttttaacattcacatgtgt

SEQ ID NO: 112781 - DNA, 25 bp, Canis familiaris
gaaagctcttcttaagccatttagg

SEQ ID NO: 112782 - DNA, 25 bp, Canis familiaris
gaaactgttccaatagccacggagg

SEQ ID NO: 112783 - DNA, 25 bp, Canis familiaris
gaaactgacccattcagaaccagac

SEQ ID NO: 112784 - DNA, 25 bp, Canis familiaris
gaaactgtctgtctgcaaagccaac

SEQ ID NO: 112785 - DNA, 25 bp, Canis familiaris
gaaactgctctaatccaaaccaacc

SEQ ID NO: 112786 - DNA, 25 bp, Canis familiaris
gaaactgctctcaataaatccctcc

SEQ ID NO: 112787 - DNA, 25 bp, Canis familiaris
gaaactgcaccggaaatgcgcctac

SEQ ID NO: 112788 - DNA, 25 bp, Canis familiaris
gaaactgcacctggaacagtgtctg

SEQ ID NO: 112789 - DNA, 25 bp, Canis familiaris
gaaagctgccctggagggttatggg

SEQ ID NO: 112790 - DNA, 25 bp, Canis familiaris
gaaagctcagctcagatcgggaatg

SEQ ID NO: 112791 - DNA, 25 bp, Canis familiaris
gaaatgctgcagactggtgctggga

SEQ ID NO: 112792 - DNA, 25 bp, Canis familiaris
gaaatgccagtcagttgccatttaa

SEQ ID NO: 112793 - DNA, 25 bp, Canis familiaris
gaaaccgcatattttcctttgctac

SEQ ID NO: 112794 - DNA, 25 bp, Canis familiaris
gaaaccctatgaatgtgctatttgt

SEQ ID NO: 112795 - DNA, 25 bp, Canis familiaris
gaaagcacctataacagtcctgtgt

SEQ ID NO: 112796 - DNA, 25 bp, Canis familiaris
gaaagccgtgaattcagtcctgttc

SEQ ID NO: 112797 - DNA, 25 bp, Canis familiaris
gaaatccggaactagttcttctggg

SEQ ID NO: 112798 - DNA, 25 bp, Canis familiaris
gaaaccagggaatacgcttgaggga

SEQ ID NO: 112799 - DNA, 25 bp, Canis familiaris
gaaacccgagaagcccatggagcag

SEQ ID NO: 112800 - DNA, 25 bp, Canis familiaris
gaaacgggagaagccggcgagcggc

SEQ ID NO: 112801 - DNA, 25 bp, Canis familiaris
gaaacggatatggcacccgtcggag

SEQ ID NO: 112802 - DNA, 25 bp, Canis familiaris
gaaacgggagcagctcttgggctga

SEQ ID NO: 112803 - DNA, 25 bp, Canis familiaris
gaaacgcttggaacctgtgaacagt

SEQ ID NO: 112804 - DNA, 25 bp, Canis familiaris
gaaagagcacggagcctgaagattg

SEQ ID NO: 112805 - DNA, 25 bp, Canis familiaris
gaaagtttggatcctgatgaaattg

SEQ ID NO: 112806 - DNA, 25 bp, Canis familiaris
gacacattttgtcccttggaactga

SEQ ID NO: 112807 - DNA, 25 bp, Canis familiaris
gaaatctctctacttcttcgaaaat

SEQ ID NO: 112808 - DNA, 25 bp, Canis familiaris
gaaagctttcagaacatttgccaaa

SEQ ID NO: 112809 - DNA, 25 bp, Canis familiaris
gaaagctctttggaaatggtaacat

SEQ ID NO: 112810 - DNA, 25 bp, Canis familiaris
gaaagttgttctgccaggtacacac

SEQ ID NO: 112811 - DNA, 25 bp, Canis familiaris
gaaagtgaggtcgcgcggatcgcta

SEQ ID NO: 112812 - DNA, 25 bp, Canis familiaris
gaaaggagggctgggaacatatgca

SEQ ID NO: 112813 - DNA, 25 bp, Canis familiaris
gaaaccggcgctggaaagcatgtgc

SEQ ID NO: 112814 - DNA, 25 bp, Canis familiaris
gaaacctgatgagctgaaagtgacg

SEQ ID NO: 112815 - DNA, 25 bp, Canis familiaris
gaaagcctggagcctgacgaggcca

SEQ ID NO: 112816 - DNA, 25 bp, Canis familiaris
gaaagctcgaggcggctagaggtcc

SEQ ID NO: 112817 - DNA, 25 bp, Canis familiaris
gaaagctcagggcgacaggagggca

SEQ ID NO: 112818 - DNA, 25 bp, Canis familiaris
gaaagtcagggacacaggcagaggg

SEQ ID NO: 112819 - DNA, 25 bp, Canis familiaris
gaaattaggcgacggcagagcggga

SEQ ID NO: 112820 - DNA, 25 bp, Canis familiaris
gaaagaagaggaaggcacagaggga

SEQ ID NO: 112821 - DNA, 25 bp, Canis familiaris
gaaagaagacgatgtccgccagtat

SEQ ID NO: 112822 - DNA, 25 bp, Canis familiaris
gaaagtaatcaagtaccgctcagta

SEQ ID NO: 112823 - DNA, 25 bp, Canis familiaris
gaaagttaccacacatgcctagaga

SEQ ID NO: 112824 - DNA, 25 bp, Canis familiaris
gaaagttatgggaatccctatggaa

SEQ ID NO: 112825 - DNA, 25 bp, Canis familiaris
gaaagttactctaatcccattggcc

SEQ ID NO: 112826 - DNA, 25 bp, Canis familiaris
gaaagttacttctcgttggagccgg

SEQ ID NO: 112827 - DNA, 25 bp, Canis familiaris
gaaaggtaccttgcagtaggcccgt

SEQ ID NO: 112828 - DNA, 25 bp, Canis familiaris
gaaaggggctttgacaaggcctatg

SEQ ID NO: 112829 - DNA, 25 bp, Canis familiaris
gaaaccaggcttttcacaagtggcc

SEQ ID NO: 112830 - DNA, 25 bp, Canis familiaris
gaaacgggtcactccatcgatgttc

SEQ ID NO: 112831 - DNA, 25 bp, Canis familiaris
gaaagccaagtcctaccatgagatt

SEQ ID NO: 112832 - DNA, 25 bp, Canis familiaris
gaaagcacaagtttcccacaatttg

SEQ ID NO: 112833 - DNA, 25 bp, Canis familiaris
gaaatgaccgttatccaaatcttat

SEQ ID NO: 112834 - DNA, 25 bp, Canis familiaris
gaaagaacagctgggtcctgaggca

SEQ ID NO: 112835 - DNA, 25 bp, Canis familiaris
gaaagaaaagccctcctatgacact

SEQ ID NO: 112836 - DNA, 25 bp, Canis familiaris
gaaagaaaggcacctctttggccca

SEQ ID NO: 112837 - DNA, 25 bp, Canis familiaris
gaaagaaatggcttcctgtgcccca

SEQ ID NO: 112838 - DNA, 25 bp, Canis familiaris
gaaagacaacatctcctactcaaga

SEQ ID NO: 112839 - DNA, 25 bp, Canis familiaris
gaaagatcacaaattgcccaacacc

SEQ ID NO: 112840 - DNA, 25 bp, Canis familiaris
gaaagatgaaagaatgccttaacac

SEQ ID NO: 112841 - DNA, 25 bp, Canis familiaris
gaaagcgcagggacagctcgtacac

SEQ ID NO: 112842 - DNA, 25 bp, Canis familiaris
gaaatggaaatgactgctcgggcaa

SEQ ID NO: 112843 - DNA, 25 bp, Canis familiaris
gacaaggaaacctctgggcacgtcc

SEQ ID NO: 112844 - DNA, 25 bp, Canis familiaris
gaaaggagaagcccacagagtgacc

SEQ ID NO: 112845 - DNA, 25 bp, Canis familiaris
gaaagggatggcccaagcccatcct

SEQ ID NO: 112846 - DNA, 25 bp, Canis familiaris
gaaagggcattgccgtggcaactga

SEQ ID NO: 112847 - DNA, 25 bp, Canis familiaris
gaaaggagaaaggtgctgcaaaaag

SEQ ID NO: 112848 - DNA, 25 bp, Canis familiaris
gaaacgtgaatgaggcgcccagaca

SEQ ID NO: 112849 - DNA, 25 bp, Canis familiaris
gaaagctgtttaagaaggccatgac

SEQ ID NO: 112850 - DNA, 25 bp, Canis familiaris
gaaagcttttacaagagggcaggac

SEQ ID NO: 112851 - DNA, 25 bp, Canis familiaris
gaaagccctgaagacagatgacatg

SEQ ID NO: 112852 - DNA, 25 bp, Canis familiaris
gaaaggacgaatgcacagcgccagc

SEQ ID NO: 112853 - DNA, 25 bp, Canis familiaris
gaaagccacagcaaccatcagtgcc

SEQ ID NO: 112854 - DNA, 25 bp, Canis familiaris
gaaagctctcaagtcatcatctgtc

SEQ ID NO: 112855 - DNA, 25 bp, Canis familiaris
gaaagcgccaagatcactgtttagc

SEQ ID NO: 112856 - DNA, 25 bp, Canis familiaris
gaaagctggcactttgcctttgggc

SEQ ID NO: 112857 - DNA, 25 bp, Canis familiaris
gaaagcatgtgtgatttgtttgaag

SEQ ID NO: 112858 - DNA, 25 bp, Canis familiaris
gaaacgtgggctgttctctgaagaa

SEQ ID NO: 112859 - DNA, 25 bp, Canis familiaris
gaaaccagacctgattctgctgcac

SEQ ID NO: 112860 - DNA, 25 bp, Canis familiaris
gaaagccagatctttatttcccgca

SEQ ID NO: 112861 - DNA, 25 bp, Canis familiaris
tccaagccaggtgttttccaccaca

SEQ ID NO: 112862 - DNA, 25 bp, Canis familiaris
gaaaccagcttccttcagagagcag

SEQ ID NO: 112863 - DNA, 25 bp, Canis familiaris
gaaaccctacagtatcacaggtgag

SEQ ID NO: 112864 - DNA, 25 bp, Canis familiaris
gaaaccctaatgtacatctgctgtg

SEQ ID NO: 112865 - DNA, 25 bp, Canis familiaris
gaaagcacacatccagagaattctg

SEQ ID NO: 112866 - DNA, 25 bp, Canis familiaris
gaaagcaccacagggcgatgagctg

SEQ ID NO: 112867 - DNA, 25 bp, Canis familiaris
gaaacccagcagtactgtggcaggt

SEQ ID NO: 112868 - DNA, 25 bp, Canis familiaris
gaaacccagacagcctggagctgat

SEQ ID NO: 112869 - DNA, 25 bp, Canis familiaris
gacaggaacgacttccggaggaact

SEQ ID NO: 112870 - DNA, 25 bp, Canis familiaris
gaaagggctgactggggcaggaact

SEQ ID NO: 112871 - DNA, 25 bp, Canis familiaris
gaaagttggaagctgggatcgagtc

SEQ ID NO: 112872 - DNA, 25 bp, Canis familiaris
gaaagccgaaagcgtgtgcatctgc

SEQ ID NO: 112873 - DNA, 25 bp, Canis familiaris
gacaagcatcgatgattttggtccc

SEQ ID NO: 112874 - DNA, 25 bp, Canis familiaris
gaaagctcaaacatttgtgtaccta

SEQ ID NO: 112875 - DNA, 25 bp, Canis familiaris
gacacccaacatgttagctgttcct

SEQ ID NO: 112876 - DNA, 25 bp, Canis familiaris
gacactgccctctaaaaatttccta

SEQ ID NO: 112877 - DNA, 25 bp, Canis familiaris
gacagtgccccctaattttaagtca

SEQ ID NO: 112878 - DNA, 25 bp, Canis familiaris
gaaaggccctgccaatatttaactt

SEQ ID NO: 112879 - DNA, 25 bp, Canis familiaris
gaaagttcctgccagcaatatgaca

SEQ ID NO: 112880 - DNA, 25 bp, Canis familiaris
gaaagaatcttgggacatcagaaag

SEQ ID NO: 112881 - DNA, 25 bp, Canis familiaris
gaaagaggtctaggaactgaagaga

SEQ ID NO: 112882 - DNA, 25 bp, Canis familiaris
gaaagggactatcacctggtgagtt

SEQ ID NO: 112883 - DNA, 25 bp, Canis familiaris
gaaagtgcccttgagccaggtagtt

SEQ ID NO: 112884 - DNA, 25 bp, Canis familiaris
gaaagccctattgagtcaggtatca

SEQ ID NO: 112885 - DNA, 25 bp, Canis familiaris
gaaagcctttactgactggttgatt

SEQ ID NO: 112886 - DNA, 25 bp, Canis familiaris
gacacggattatacttactccgctg

SEQ ID NO: 112887 - DNA, 25 bp, Canis familiaris
gacacgaaagacatgttttccattt

SEQ ID NO: 112888 - DNA, 25 bp, Canis familiaris
gaaagcctgacagctgttttccata

SEQ ID NO: 112889 - DNA, 25 bp, Canis familiaris
gaaacctacctgatgttctggatcg

SEQ ID NO: 112890 - DNA, 25 bp, Canis familiaris
gaaaccataccgggctagctgaagg

SEQ ID NO: 112891 - DNA, 25 bp, Canis familiaris
gaaaccagacaccatgtgtgacgaa

SEQ ID NO: 112892 - DNA, 25 bp, Canis familiaris
gaaaccagcactacatttgactgca

SEQ ID NO: 112893 - DNA, 25 bp, Canis familiaris
gaaaccatcagtatgcatctcacca

SEQ ID NO: 112894 - DNA, 25 bp, Canis familiaris
gaaaccagatgtctgtctattcatc

SEQ ID NO: 112895 - DNA, 25 bp, Canis familiaris
gaaaccagtgccatgttcattgggg

SEQ ID NO: 112896 - DNA, 25 bp, Canis familiaris
gaaaccactccaaaatcatcgcggg

SEQ ID NO: 112897 - DNA, 25 bp, Canis familiaris
gaaagccccctatacacagagaggt

SEQ ID NO: 112898 - DNA, 25 bp, Canis familiaris
gaaagacccacctgtcaagattcgt

SEQ ID NO: 112899 - DNA, 25 bp, Canis familiaris
gaaagaggccagcggtgcaaatcca

SEQ ID NO: 112900 - DNA, 25 bp, Canis familiaris
gaaagggccaagtgatccagttcta

SEQ ID NO: 112901 - DNA, 25 bp, Canis familiaris
gaaaggaaaatgtgttctgttttgt

SEQ ID NO: 112902 - DNA, 25 bp, Canis familiaris
gaaaggaaagtctctgccatttggg

SEQ ID NO: 112903 - DNA, 25 bp, Canis familiaris
gacgggccaagttttgtgctatgtc

SEQ ID NO: 112904 - DNA, 25 bp, Canis familiaris
gacaaggcctaatgtggtcttggcc

SEQ ID NO: 112905 - DNA, 25 bp, Canis familiaris
gaaaggaccagtctgagcctgggcc

SEQ ID NO: 112906 - DNA, 25 bp, Canis familiaris
gaaaggatccgactgtggcattgta

SEQ ID NO: 112907 - DNA, 25 bp, Canis familiaris
gaaagctgacttggctggtgtggta

SEQ ID NO: 112908 - DNA, 25 bp, Canis familiaris
gaaagcgccatgttgaagtctccta

SEQ ID NO: 112909 - DNA, 25 bp, Canis familiaris
gaaacgccggtgacaggtagctgat

SEQ ID NO: 112910 - DNA, 25 bp, Canis familiaris
gacgacccggtgagagaggagttgt

SEQ ID NO: 112911 - DNA, 25 bp, Canis familiaris
gaaaccctggttcagaggagcaggt

SEQ ID NO: 112912 - DNA, 25 bp, Canis familiaris
gaaaccacggtcagagagttcgact

SEQ ID NO: 112913 - DNA, 25 bp, Canis familiaris
gaaaccttgttcagaagttgccttt

SEQ ID NO: 112914 - DNA, 25 bp, Canis familiaris
gaaaccatggtcaaccggttgcact

SEQ ID NO: 112915 - DNA, 25 bp, Canis familiaris
gaaacctgaaatactcggtggcaga

SEQ ID NO: 112916 - DNA, 25 bp, Canis familiaris
gaaaccgagaatcccattggagggc

SEQ ID NO: 112917 - DNA, 25 bp, Canis familiaris
gaaacctagagtcccttgtggaagc

SEQ ID NO: 112918 - DNA, 25 bp, Canis familiaris
gaaaccttatgtccgggtgtgaccg

SEQ ID NO: 112919 - DNA, 25 bp, Canis familiaris
gaaacctatgtgtattggatgtgtg

SEQ ID NO: 112920 - DNA, 25 bp, Canis familiaris
gaaacctcaatgttcttaatgctga

SEQ ID NO: 112921 - DNA, 25 bp, Canis familiaris
gaaaccatcagatttgttaaggaca

SEQ ID NO: 112922 - DNA, 25 bp, Canis familiaris
gaaaggtaattttggatatgggcat

SEQ ID NO: 112923 - DNA, 25 bp, Canis familiaris
gaaaggtctttttggacagtcctga

SEQ ID NO: 112924 - DNA, 25 bp, Canis familiaris
gaaaggtcccagtttgaaatcctca

SEQ ID NO: 112925 - DNA, 25 bp, Canis familiaris
gaaaggttccagaatctacctccta

SEQ ID NO: 112926 - DNA, 25 bp, Canis familiaris
gaaatgctgtctgaaacttcctcct

SEQ ID NO: 112927 - DNA, 25 bp, Canis familiaris
gaaagctgcattctgaacatgtttt

SEQ ID NO: 112928 - DNA, 25 bp, Canis familiaris
gaaagcttatgccacagaagttgct

SEQ ID NO: 112929 - DNA, 25 bp, Canis familiaris
gaaacctgatcccatagagattgta

SEQ ID NO: 112930 - DNA, 25 bp, Canis familiaris
gaaagtcgcacccagagatgaagct

SEQ ID NO: 112931 - DNA, 25 bp, Canis familiaris
gaaagtgcgtgatcaaagaatttaa

SEQ ID NO: 112932 - DNA, 25 bp, Canis familiaris
gacaaacctgacctttgacgttcaa

SEQ ID NO: 112933 - DNA, 25 bp, Canis familiaris
gacatggactcgtccctaagtcttg

SEQ ID NO: 112934 - DNA, 25 bp, Canis familiaris
gacagtgaactctaccataagttac

SEQ ID NO: 112935 - DNA, 25 bp, Canis familiaris
gacaagaattgctatgactgaaagg

SEQ ID NO: 112936 - DNA, 25 bp, Canis familiaris
gaaagagtgtgcagtggtgaagggg

SEQ ID NO: 112937 - DNA, 25 bp, Canis familiaris
gaaaggtgtcaggagccgagggggg

SEQ ID NO: 112938 - DNA, 25 bp, Canis familiaris
gaaatgcgggcaggtgtcgatgggg

SEQ ID NO: 112939 - DNA, 25 bp, Canis familiaris
gaaatggctggcggtaaggctggga

SEQ ID NO: 112940 - DNA, 25 bp, Canis familiaris
gaaatcgttgtcatactggagggca

SEQ ID NO: 112941 - DNA, 25 bp, Canis familiaris
gaaacctctgtttactgtgcagcac

SEQ ID NO: 112942 - DNA, 25 bp, Canis familiaris
gaaacctgcgtttgggtatcagtcc

SEQ ID NO: 112943 - DNA, 25 bp, Canis familiaris
gaaatagtgccttagggtacagtgg

SEQ ID NO: 112944 - DNA, 25 bp, Canis familiaris
gaaacctgctctccaggaggacagt

SEQ ID NO: 112945 - DNA, 25 bp, Canis familiaris
gaaagcgctactcctggaaacagct

SEQ ID NO: 112946 - DNA, 25 bp, Canis familiaris
gatatgaggaacccaggtaccattt

SEQ ID NO: 112947 - DNA, 25 bp, Canis familiaris
gacaacagatactcagggacacttt

SEQ ID NO: 112948 - DNA, 25 bp, Canis familiaris
gaaaccatagcacacagaacactta

SEQ ID NO: 112949 - DNA, 25 bp, Canis familiaris
gaaacctgagacacgagacctctac

SEQ ID NO: 112950 - DNA, 25 bp, Canis familiaris
gaaacctagaaccatagcacccaag

SEQ ID NO: 112951 - DNA, 25 bp, Canis familiaris
gaaacctagaaccaaagcacccaag

SEQ ID NO: 112952 - DNA, 25 bp, Canis familiaris
gaaacctagaaccaaagcacccaag

SEQ ID NO: 112953 - DNA, 25 bp, Canis familiaris
gaaacctggaacctgaatggtccca

SEQ ID NO: 112954 - DNA, 25 bp, Canis familiaris
gataatcctgggtttttggtccgat

SEQ ID NO: 112955 - DNA, 25 bp, Canis familiaris
gaaaccttgttgtctttgttgacgt

SEQ ID NO: 112956 - DNA, 25 bp, Canis familiaris
gaaacctttctatcactgtttggtg

SEQ ID NO: 112957 - DNA, 25 bp, Canis familiaris
gaaaccttgccttggcattgtttgg

SEQ ID NO: 112958 - DNA, 25 bp, Canis familiaris
gaaagccttcctttggatttctgga

SEQ ID NO: 112959 - DNA, 25 bp, Canis familiaris
gaaaccccagatttgtgtttgatag

SEQ ID NO: 112960 - DNA, 25 bp, Canis familiaris
gaaaccagcgtatttttattgtatt

SEQ ID NO: 112961 - DNA, 25 bp, Canis familiaris
gaaaccatttcatgtttgcaggtat

SEQ ID NO: 112962 - DNA, 25 bp, Canis familiaris
gaaacctgtctaaatagtgcggtat

SEQ ID NO: 112963 - DNA, 25 bp, Canis familiaris
gaaacctacgattatggtggcttta

SEQ ID NO: 112964 - DNA, 25 bp, Canis familiaris
gaaaccaatcgttatgcttggcaga

SEQ ID NO: 112965 - DNA, 25 bp, Canis familiaris
gaaagccacactgttctaatgagag

SEQ ID NO: 112966 - DNA, 25 bp, Canis familiaris
gaaaccatactgttctatacgagtg

SEQ ID NO: 112967 - DNA, 25 bp, Canis familiaris
gaaacctatttccttactcaatgac

SEQ ID NO: 112968 - DNA, 25 bp, Canis familiaris
gaaacctctttcctgtttcaacatc

SEQ ID NO: 112969 - DNA, 25 bp, Canis familiaris
gaaataacttctttgttctcaattc

SEQ ID NO: 112970 - DNA, 25 bp, Canis familiaris
gaaataatttaacactataatcctt

SEQ ID NO: 112971 - DNA, 25 bp, Canis familiaris
gaaatgaagttatgttaatcccctt

SEQ ID NO: 112972 - DNA, 25 bp, Canis familiaris
gaaagaagcatctattggtgaacgc

SEQ ID NO: 112973 - DNA, 25 bp, Canis familiaris
gaaagaatcctgttgactatatcca

SEQ ID NO: 112974 - DNA, 25 bp, Canis familiaris
gaaagacggcagcctagctttcaca

SEQ ID NO: 112975 - DNA, 25 bp, Canis familiaris
gaaagcagggacctccttatagatg

SEQ ID NO: 112976 - DNA, 25 bp, Canis familiaris
gaaaggagaacaccctgaacatggt

SEQ ID NO: 112977 - DNA, 25 bp, Canis familiaris
gaaaggggaagggccagactgggct

SEQ ID NO: 112978 - DNA, 25 bp, Canis familiaris
gaaagagggaagcccactgtcctgg

SEQ ID NO: 112979 - DNA, 25 bp, Canis familiaris
gaaagagtaaagcccctgttatgga

SEQ ID NO: 112980 - DNA, 25 bp, Canis familiaris
gaaagagaaacagcccttcgacagg

SEQ ID NO: 112981 - DNA, 25 bp, Canis familiaris
gataaggaatactcctcttccgtgg

SEQ ID NO: 112982 - DNA, 25 bp, Canis familiaris
gaaatcgacggagccatctgttcgt

SEQ ID NO: 112983 - DNA, 25 bp, Canis familiaris
gaaaccacctgagctacattttgag

SEQ ID NO: 112984 - DNA, 25 bp, Canis familiaris
gaaacctcactacttatttctcggt

SEQ ID NO: 112985 - DNA, 25 bp, Canis familiaris
gaaagcctcctagtctgatttgctg

SEQ ID NO: 112986 - DNA, 25 bp, Canis familiaris
gaaagcctcctgtgtatactgcagc

SEQ ID NO: 112987 - DNA, 25 bp, Canis familiaris
gaaagactcgtgtgtgtgggcaccc

SEQ ID NO: 112988 - DNA, 25 bp, Canis familiaris
gaaagaccagattgcctggggcagg

SEQ ID NO: 112989 - DNA, 25 bp, Canis familiaris
gaaagatctacttcctgttggtgag

SEQ ID NO: 112990 - DNA, 25 bp, Canis familiaris
gaaagtcacatagcctgttagtgca

SEQ ID NO: 112991 - DNA, 25 bp, Canis familiaris
gaaagacactgactactgtccaggg

SEQ ID NO: 112992 - DNA, 25 bp, Canis familiaris
gaaagcatcattcctacatgcctcg

SEQ ID NO: 112993 - DNA, 25 bp, Canis familiaris
gaaagcacttaatgctctatcagca

SEQ ID NO: 112994 - DNA, 25 bp, Canis familiaris
gaaagatctataaagtgccatccac

SEQ ID NO: 112995 - DNA, 25 bp, Canis familiaris
gaaagctctaaagagaatctcacag

SEQ ID NO: 112996 - DNA, 25 bp, Canis familiaris
gaaatcctgacaaaagaatccaacg

SEQ ID NO: 112997 - DNA, 25 bp, Canis familiaris
gaaagacagaactaagacccaagga

SEQ ID NO: 112998 - DNA, 25 bp, Canis familiaris
gaaagtcagaaacgctagcccggga

SEQ ID NO: 112999 - DNA, 25 bp, Canis familiaris
gaaagaggaagaggctgtcccaggg

SEQ ID NO: 113000 - DNA, 25 bp, Canis familiaris
gaaatgaggtcacagtgctccgggg

SEQ ID NO: 113001 - DNA, 25 bp, Canis familiaris
gaaagcagttcagcagtttcctggg

SEQ ID NO: 113002 - DNA, 25 bp, Canis familiaris
gaaagacttgagcatgtttactgat

SEQ ID NO: 113003 - DNA, 25 bp, Canis familiaris
gaaagcactcagagacctcgactgc

SEQ ID NO: 113004 - DNA, 25 bp, Canis familiaris
gaaagcctcagggatgcgtcaggcc

SEQ ID NO: 113005 - DNA, 25 bp, Canis familiaris
gaaagcttcgtgacactggattcgc

SEQ ID NO: 113006 - DNA, 25 bp, Canis familiaris
gaaagcattcattcagcactgggtc

SEQ ID NO: 113007 - DNA, 25 bp, Canis familiaris
gaaagatatctttagctgggccgtg

SEQ ID NO: 113008 - DNA, 25 bp, Canis familiaris
gaaagtcctgttactgggcatctgt

SEQ ID NO: 113009 - DNA, 25 bp, Canis familiaris
gaaagccctgttcttggacatgtta

SEQ ID NO: 113010 - DNA, 25 bp, Canis familiaris
gaaagccctttcttgtgtgaatctc

SEQ ID NO: 113011 - DNA, 25 bp, Canis familiaris
gaaacctttccagtgtagatgtcca

SEQ ID NO: 113012 - DNA, 25 bp, Canis familiaris
gaaaccaatgcatcgttaaaccttc

SEQ ID NO: 113013 - DNA, 25 bp, Canis familiaris
gaaaccatatgctccttatcttttt

SEQ ID NO: 113014 - DNA, 25 bp, Canis familiaris
gaaaccagtgctgacttctcttaat

SEQ ID NO: 113015 - DNA, 25 bp, Canis familiaris
gaaagccagtatcacttgcacttaa

SEQ ID NO: 113016 - DNA, 25 bp, Canis familiaris
gaaagctgaattccacattgcccac

SEQ ID NO: 113017 - DNA, 25 bp, Canis familiaris
gaaatgacgttgccgattcaccagc

SEQ ID NO: 113018 - DNA, 25 bp, Canis familiaris
gaaagcagctgtgccttctagttgc

SEQ ID NO: 113019 - DNA, 25 bp, Canis familiaris
gaaagcagtgttttctgttgtgtgc

SEQ ID NO: 113020 - DNA, 25 bp, Canis familiaris
gaaagctgttggtctctatttgtca

SEQ ID NO: 113021 - DNA, 25 bp, Canis familiaris
gaaagctggagtagccatacttata

SEQ ID NO: 113022 - DNA, 25 bp, Canis familiaris
gaaagcgggtcccaacgtgattcaa

SEQ ID NO: 113023 - DNA, 25 bp, Canis familiaris
gaaatgcaggaagtccaaagttcta

SEQ ID NO: 113024 - DNA, 25 bp, Canis familiaris
gaaagcagaacagacagacctgtct

SEQ ID NO: 113025 - DNA, 25 bp, Canis familiaris
gaaaccaacaggtcacactagtgat

SEQ ID NO: 113026 - DNA, 25 bp, Canis familiaris
gaaagcccagaggacacactgtggt

SEQ ID NO: 113027 - DNA, 25 bp, Canis familiaris
gaaagcccagggagagatttataaa

SEQ ID NO: 113028 - DNA, 25 bp, Canis familiaris
gacaaacctgggagagaagttaaca

SEQ ID NO: 113029 - DNA, 25 bp, Canis familiaris
gaaatcagcctgagcctggaaattt

SEQ ID NO: 113030 - DNA, 25 bp, Canis familiaris
gaaatcatgactactccaggaaaag

SEQ ID NO: 113031 - DNA, 25 bp, Canis familiaris
gaaatatcttacccagaaatacctt

SEQ ID NO: 113032 - DNA, 25 bp, Canis familiaris
gaaatcatctttttacaaatcgttt

SEQ ID NO: 113033 - DNA, 25 bp, Canis familiaris
gaaagctttttatcaagaggtgtca

SEQ ID NO: 113034 - DNA, 25 bp, Canis familiaris
gacaagtctttttaaacttcgctag

SEQ ID NO: 113035 - DNA, 25 bp, Canis familiaris
gaaagttctttccaaacattgatct

SEQ ID NO: 113036 - DNA, 25 bp, Canis familiaris
gacagcgtctgtagtggaaatttgt

SEQ ID NO: 113037 - DNA, 25 bp, Canis familiaris
gacacttcatgtcatagttattatt

SEQ ID NO: 113038 - DNA, 25 bp, Canis familiaris
gacactccagaattattggtttcta

SEQ ID NO: 113039 - DNA, 25 bp, Canis familiaris
gaaaccaacataacggtgtgtcaac

SEQ ID NO: 113040 - DNA, 25 bp, Canis familiaris
gaaaccatcaataaggggtgccagc

SEQ ID NO: 113041 - DNA, 25 bp, Canis familiaris
gaaaccatcacaaagtctgtttgga

SEQ ID NO: 113042 - DNA, 25 bp, Canis familiaris
gaaaggagagcttcagtcttcttta

SEQ ID NO: 113043 - DNA, 25 bp, Canis familiaris
gaaagatgaagatctcttccgggaa

SEQ ID NO: 113044 - DNA, 25 bp, Canis familiaris
gaaagagcagagacctattttggag

SEQ ID NO: 113045 - DNA, 25 bp, Canis familiaris
gaaagagcagagcgttttcctcatc

SEQ ID NO: 113046 - DNA, 25 bp, Canis familiaris
gaaagagcagagcgttttcctcatc

SEQ ID NO: 113047 - DNA, 25 bp, Canis familiaris
gaaagagcagagcgttttcctcatc

SEQ ID NO: 113048 - DNA, 25 bp, Canis familiaris
gaaagagctgagccagttgtcctat

SEQ ID NO: 113049 - DNA, 25 bp, Canis familiaris
gaaagtgggagccatggtgccttcg

SEQ ID NO: 113050 - DNA, 25 bp, Canis familiaris
gaaagttcggcaggttgcacaggtg

SEQ ID NO: 113051 - DNA, 25 bp, Canis familiaris
gaaaggccacatgaggacacaggga

SEQ ID NO: 113052 - DNA, 25 bp, Canis familiaris
gaaagccccatgcagggctcagtcc

SEQ ID NO: 113053 - DNA, 25 bp, Canis familiaris
gaaagccagcccaagaggctcttcc

SEQ ID NO: 113054 - DNA, 25 bp, Canis familiaris
gaaaccagccacaataggtcaacaa

SEQ ID NO: 113055 - DNA, 25 bp, Canis familiaris
gaaagtctccagataggctaaatga

SEQ ID NO: 113056 - DNA, 25 bp, Canis familiaris
gaaagttcttttgggcaacactgca

SEQ ID NO: 113057 - DNA, 25 bp, Canis familiaris
gaaatattttgcaaggacacccgaa

SEQ ID NO: 113058 - DNA, 25 bp, Canis familiaris
gaaatagcattacagggcccctagt

SEQ ID NO: 113059 - DNA, 25 bp, Canis familiaris
gaaagcgctgtacaggagcactcca

SEQ ID NO: 113060 - DNA, 25 bp, Canis familiaris
gaaaggcttaggacccagagccacc

SEQ ID NO: 113061 - DNA, 25 bp, Canis familiaris
gaaagaccttggacccataaccatc

SEQ ID NO: 113062 - DNA, 25 bp, Canis familiaris
gaaagaccgtggtaagtccctcagc

SEQ ID NO: 113063 - DNA, 25 bp, Canis familiaris
gaaagaccagtagaagctccaccat

SEQ ID NO: 113064 - DNA, 25 bp, Canis familiaris
gaaagcaccctaaacaatcacactg

SEQ ID NO: 113065 - DNA, 25 bp, Canis familiaris
gaaagaccctcagaaaatatatgac

SEQ ID NO: 113066 - DNA, 25 bp, Canis familiaris
gaaagattcctgctaagagtatata

SEQ ID NO: 113067 - DNA, 25 bp, Canis familiaris
gaaagacacagcgtatcaagagaaa

SEQ ID NO: 113068 - DNA, 25 bp, Canis familiaris
gaaaccacagctgcatcaacagtgc

SEQ ID NO: 113069 - DNA, 25 bp, Canis familiaris
gaaatcgcaatagcgcacacggcgg

SEQ ID NO: 113070 - DNA, 25 bp, Canis familiaris
gaaattgctaatggtgcccaggccc

SEQ ID NO: 113071 - DNA, 25 bp, Canis familiaris
gaaatcatgctattcaggcccatct

SEQ ID NO: 113072 - DNA, 25 bp, Canis familiaris
gaaatcatcaagactctgtccaagg

SEQ ID NO: 113073 - DNA, 25 bp, Canis familiaris
gaaatcatcaagactctgtccaagg

SEQ ID NO: 113074 - DNA, 25 bp, Canis familiaris
gaaaccacagcctgtgccaagtgct

SEQ ID NO: 113075 - DNA, 25 bp, Canis familiaris
gaaaccaagcctcgtggagattaat

SEQ ID NO: 113076 - DNA, 25 bp, Canis familiaris
gaaaccaaacagctgtcagactgaa

SEQ ID NO: 113077 - DNA, 25 bp, Canis familiaris
gaaaccaatacgaatacaatctagt

SEQ ID NO: 113078 - DNA, 25 bp, Canis familiaris
gaaagccacaagcagtagaatcaag

SEQ ID NO: 113079 - DNA, 25 bp, Canis familiaris
gaaagcaacatctcaatggattcaa

SEQ ID NO: 113080 - DNA, 25 bp, Canis familiaris
gaaagcagaatctccagcagaagct

SEQ ID NO: 113081 - DNA, 25 bp, Canis familiaris
gaaatcagttatcatagaaagctaa

SEQ ID NO: 113082 - DNA, 25 bp, Canis familiaris
gaaagcagctattatatgaggtaca

SEQ ID NO: 113083 - DNA, 25 bp, Canis familiaris
gaaatactgataatgcatggatgga

SEQ ID NO: 113084 - DNA, 25 bp, Canis familiaris
gaaagacatgcattatgtggttgta

SEQ ID NO: 113085 - DNA, 25 bp, Canis familiaris
gaaagtctggaagtggtgtgatgag

SEQ ID NO: 113086 - DNA, 25 bp, Canis familiaris
gaaagttgaatcttgccactgtcag

SEQ ID NO: 113087 - DNA, 25 bp, Canis familiaris
gaaagcaatccagttgctcctgtgc

SEQ ID NO: 113088 - DNA, 25 bp, Canis familiaris
gaaagccttcagtcatgcttatggg

SEQ ID NO: 113089 - DNA, 25 bp, Canis familiaris
gaaagccatctatcatcattagcaa

SEQ ID NO: 113090 - DNA, 25 bp, Canis familiaris
gaaagccatgtatattcataaccca

SEQ ID NO: 113091 - DNA, 25 bp, Canis familiaris
gaaatgaatgtatttctcccccaca

SEQ ID NO: 113092 - DNA, 25 bp, Canis familiaris
gaaagaatgttatctgctccacctg

SEQ ID NO: 113093 - DNA, 25 bp, Canis familiaris
gaaagagtgggaccgatgccagcgc

SEQ ID NO: 113094 - DNA, 25 bp, Canis familiaris
gaaagagtgtggtctcagcagcacg

SEQ ID NO: 113095 - DNA, 25 bp, Canis familiaris
gaaagagcgcgagtccatcatgaag

SEQ ID NO: 113096 - DNA, 25 bp, Canis familiaris
gaaagacacagtcccatacacagga

SEQ ID NO: 113097 - DNA, 25 bp, Canis familiaris
gaaagcaaatgtgccgagcttgaag

SEQ ID NO: 113098 - DNA, 25 bp, Canis familiaris
gaaagcattcatgggaccacttaag

SEQ ID NO: 113099 - DNA, 25 bp, Canis familiaris
gaaagctcatatgaaagaccttagt

SEQ ID NO: 113100 - DNA, 25 bp, Canis familiaris
gaaagctctaaatacacgttagcta

SEQ ID NO: 113101 - DNA, 25 bp, Canis familiaris
gaaagctttcaatgcccgatttcca

SEQ ID NO: 113102 - DNA, 25 bp, Canis familiaris
gaaagtttcagaagccgttttctag

SEQ ID NO: 113103 - DNA, 25 bp, Canis familiaris
gaaagtttcagtggtggttgggcta

SEQ ID NO: 113104 - DNA, 25 bp, Canis familiaris
gacaagtctttgtggctgttggagt

SEQ ID NO: 113105 - DNA, 25 bp, Canis familiaris
gaaagtctacttgagcatgttgcag

SEQ ID NO: 113106 - DNA, 25 bp, Canis familiaris
gaaattctactttaggggcacctga

SEQ ID NO: 113107 - DNA, 25 bp, Canis familiaris
gacaacacccgttaatgggcaaaga

SEQ ID NO: 113108 - DNA, 25 bp, Canis familiaris
gacaaacccatttatccccaaatga

SEQ ID NO: 113109 - DNA, 25 bp, Canis familiaris
gacaaagcctgataacgcgaaacaa

SEQ ID NO: 113110 - DNA, 25 bp, Canis familiaris
gaaagtatctggtagtcgtaaacaa

SEQ ID NO: 113111 - DNA, 25 bp, Canis familiaris
gaaattttgctttttgctaaacagt

SEQ ID NO: 113112 - DNA, 25 bp, Canis familiaris
gaaattttctgacattgataactga

SEQ ID NO: 113113 - DNA, 25 bp, Canis familiaris
gaaatgtgtattgttcatgtgaacc

SEQ ID NO: 113114 - DNA, 25 bp, Canis familiaris
gaaagtgtatcttatgcatagagac

SEQ ID NO: 113115 - DNA, 25 bp, Canis familiaris
gaaagtctcatctggcattgctagg

SEQ ID NO: 113116 - DNA, 25 bp, Canis familiaris
gaaagttgcacacgacatccaagaa

SEQ ID NO: 113117 - DNA, 25 bp, Canis familiaris
gaaatgtgatcagaccaccagtaaa

SEQ ID NO: 113118 - DNA, 25 bp, Canis familiaris
gaaattacatatttccaagccaaac

SEQ ID NO: 113119 - DNA, 25 bp, Canis familiaris
gaaataaatatgtgctgaaccctta

SEQ ID NO: 113120 - DNA, 25 bp, Canis familiaris
gaaataaaccaggtactccactcca

SEQ ID NO: 113121 - DNA, 25 bp, Canis familiaris
gaaatacccacagggggccattgct

SEQ ID NO: 113122 - DNA, 25 bp, Canis familiaris
gaaatacccaagtcttacctgtctc

SEQ ID NO: 113123 - DNA, 25 bp, Canis familiaris
gaaattctgccaacactttttcttt

SEQ ID NO: 113124 - DNA, 25 bp, Canis familiaris
gaaagttccaagtctttacatttga

SEQ ID NO: 113125 - DNA, 25 bp, Canis familiaris
gaaagctctgctatgttttaatttt

SEQ ID NO: 113126 - DNA, 25 bp, Canis familiaris
gaaagctgctccagcttcttcaaca

SEQ ID NO: 113127 - DNA, 25 bp, Canis familiaris
gaaaggccgggattgctgtcaggag

SEQ ID NO: 113128 - DNA, 25 bp, Canis familiaris
gaaaggggagtaccttcgtgcagcc

SEQ ID NO: 113129 - DNA, 25 bp, Canis familiaris
gaaaggggagacccagtctatgcgt

SEQ ID NO: 113130 - DNA, 25 bp, Canis familiaris
gaaaggggtgagctgcttcttggtg

SEQ ID NO: 113131 - DNA, 25 bp, Canis familiaris
gaaaggttctggttttctgctgggt

SEQ ID NO: 113132 - DNA, 25 bp, Canis familiaris
gaaagaggtttgtttctcctgaggg

SEQ ID NO: 113133 - DNA, 25 bp, Canis familiaris
gaaagaggacctttgagctgcgtgt

SEQ ID NO: 113134 - DNA, 25 bp, Canis familiaris
gaaagaggactcttgggcttggaag

SEQ ID NO: 113135 - DNA, 25 bp, Canis familiaris
gaaagaagcacctgctgcctatgta

SEQ ID NO: 113136 - DNA, 25 bp, Canis familiaris
gaaagacagccacctgctgacatga

SEQ ID NO: 113137 - DNA, 25 bp, Canis familiaris
gacaagtcgacaccacgacgtttga

SEQ ID NO: 113138 - DNA, 25 bp, Canis familiaris
gaaagtagaccccatggcgattgtg

SEQ ID NO: 113139 - DNA, 25 bp, Canis familiaris
gacaactagagcggtagggatttgc

SEQ ID NO: 113140 - DNA, 25 bp, Canis familiaris
gaaagctgggtggtggggtgtgtgt

SEQ ID NO: 113141 - DNA, 25 bp, Canis familiaris
gaaagctgggtctgaggcagtgcct

SEQ ID NO: 113142 - DNA, 25 bp, Canis familiaris
gaaagagggcgttgatggcgtcggg

SEQ ID NO: 113143 - DNA, 25 bp, Canis familiaris
gaaagatgatgggggtggcctcagg

SEQ ID NO: 113144 - DNA, 25 bp, Canis familiaris
gaaagatgaggtgcgcaccctcacc

SEQ ID NO: 113145 - DNA, 25 bp, Canis familiaris
gaaagcatggcacacgataactaac

SEQ ID NO: 113146 - DNA, 25 bp, Canis familiaris
gaaagaagatccctggaactccatc

SEQ ID NO: 113147 - DNA, 25 bp, Canis familiaris
gaaagaggagtcccgaagccaagcc

SEQ ID NO: 113148 - DNA, 25 bp, Canis familiaris
gacaagaaggtcatcgcaacgaagg

SEQ ID NO: 113149 - DNA, 25 bp, Canis familiaris
gaaagagttctcaatggccaaaagt

SEQ ID NO: 113150 - DNA, 25 bp, Canis familiaris
gaaagaatttcctgatcaacatcat

SEQ ID NO: 113151 - DNA, 25 bp, Canis familiaris
gaaagagaccccggatcatggcatc

SEQ ID NO: 113152 - DNA, 25 bp, Canis familiaris
gaaagagacagtacgtgtgtgtgtg

SEQ ID NO: 113153 - DNA, 25 bp, Canis familiaris
gaaagcaccagaagcagcttgtgtt

SEQ ID NO: 113154 - DNA, 25 bp, Canis familiaris
gaaagagctccaagatacattgtta

SEQ ID NO: 113155 - DNA, 25 bp, Canis familiaris
gacaacatgccctagaaagcacttg

SEQ ID NO: 113156 - DNA, 25 bp, Canis familiaris
gaaatcctctaacaacctatggttg

SEQ ID NO: 113157 - DNA, 25 bp, Canis familiaris
gaaattcttaaatcctttgccactg

SEQ ID NO: 113158 - DNA, 25 bp, Canis familiaris
gaaatccctaaattcctgacttcct

SEQ ID NO: 113159 - DNA, 25 bp, Canis familiaris
gaaatcccttcatacttgaaccttt

SEQ ID NO: 113160 - DNA, 25 bp, Canis familiaris
gaaattagtccatctcttaacctgt

SEQ ID NO: 113161 - DNA, 25 bp, Canis familiaris
gaaagtagaccattctcttacacca

SEQ ID NO: 113162 - DNA, 25 bp, Canis familiaris
gaaagaaagccacttctgttcccaa

SEQ ID NO: 113163 - DNA, 25 bp, Canis familiaris
gaaagacagtccatctttgtgccca

SEQ ID NO: 113164 - DNA, 25 bp, Canis familiaris
gaaagcaaactcagcttcctgctcc

SEQ ID NO: 113165 - DNA, 25 bp, Canis familiaris
gaaatgcaaacaatagtatgctttg

SEQ ID NO: 113166 - DNA, 25 bp, Canis familiaris
gaaagcaagacaatttgaccctaga

SEQ ID NO: 113167 - DNA, 25 bp, Canis familiaris
gaaagcttgacagttttcatcctga

SEQ ID NO: 113168 - DNA, 25 bp, Canis familiaris
gaaagaggcaacttttcacctggtc

SEQ ID NO: 113169 - DNA, 25 bp, Canis familiaris
gaaatgtagaactatttccccaatc

SEQ ID NO: 113170 - DNA, 25 bp, Canis familiaris
gaaagtcaggatcatggggcccaac

SEQ ID NO: 113171 - DNA, 25 bp, Canis familiaris
gaaagctaggtgggggacactggac

SEQ ID NO: 113172 - DNA, 25 bp, Canis familiaris
gacaagtgggtaggtaacaccaact

SEQ ID NO: 113173 - DNA, 25 bp, Canis familiaris
gaaaggggatacgtggtgcgaaatc

SEQ ID NO: 113174 - DNA, 25 bp, Canis familiaris
gaaagcttggtgtcttctcggaaat

SEQ ID NO: 113175 - DNA, 25 bp, Canis familiaris
gaaagttgttgctcatccgaaatat

SEQ ID NO: 113176 - DNA, 25 bp, Canis familiaris
gaaagttcctcagctcaaccaaatg

SEQ ID NO: 113177 - DNA, 25 bp, Canis familiaris
gaaagaaactatcatgaaccaggag

SEQ ID NO: 113178 - DNA, 25 bp, Canis familiaris
gaaatataatctaccttgcccagga

SEQ ID NO: 113179 - DNA, 25 bp, Canis familiaris
gacttcaggattgccttccaggagc

SEQ ID NO: 113180 - DNA, 25 bp, Canis familiaris
gaaagggtgctacaaacgctccaac

SEQ ID NO: 113181 - DNA, 25 bp, Canis familiaris
gaaagtgtgctcagttaacccacca

SEQ ID NO: 113182 - DNA, 25 bp, Canis familiaris
gaaatgctgtggagtctgtaccaaa

SEQ ID NO: 113183 - DNA, 25 bp, Canis familiaris
gaaagttggtgtacgctactatgaa

SEQ ID NO: 113184 - DNA, 25 bp, Canis familiaris
gaaagttacttgtcctggtctgaag

SEQ ID NO: 113185 - DNA, 25 bp, Canis familiaris
gaaagttattgatctctatggctgt

SEQ ID NO: 113186 - DNA, 25 bp, Canis familiaris
gaaagttaccccgaacagcttcgtg

SEQ ID NO: 113187 - DNA, 25 bp, Canis familiaris
gaaattaagccagcaatacctctcc

SEQ ID NO: 113188 - DNA, 25 bp, Canis familiaris
gaaatgccaaaacagtgaaatctcc

SEQ ID NO: 113189 - DNA, 25 bp, Canis familiaris
gaaatgccaagacagttaaatgctc

SEQ ID NO: 113190 - DNA, 25 bp, Canis familiaris
gaaatccagacgcttgtcagggctc

SEQ ID NO: 113191 - DNA, 25 bp, Canis familiaris
gaaatccagacccaagtggaggggc

SEQ ID NO: 113192 - DNA, 25 bp, Canis familiaris
gaaatccacccgtgtggagtgatca

SEQ ID NO: 113193 - DNA, 25 bp, Canis familiaris
gaaattccagacaacgtgggagatt

SEQ ID NO: 113194 - DNA, 25 bp, Canis familiaris
gacaactccaacatccaattgcaat

SEQ ID NO: 113195 - DNA, 25 bp, Canis familiaris
gaaagcacttacacacagccagaaa

SEQ ID NO: 113196 - DNA, 25 bp, Canis familiaris
gaaagattgttaccagcccaaataa

SEQ ID NO: 113197 - DNA, 25 bp, Canis familiaris
gaaataatgtttcagccttgcctaa

SEQ ID NO: 113198 - DNA, 25 bp, Canis familiaris
gaaataatcttctcaacttgcctta

SEQ ID NO: 113199 - DNA, 25 bp, Canis familiaris
gaaagaattcttggctacttatttt

SEQ ID NO: 113200 - DNA, 25 bp, Canis familiaris
gacagaacttacactacttttacca

SEQ ID NO: 113201 - DNA, 25 bp, Canis familiaris
gacaaattggacattttcttttcct

SEQ ID NO: 113202 - DNA, 25 bp, Canis familiaris
gaaagttcagacagtgaatcttctt

SEQ ID NO: 113203 - DNA, 25 bp, Canis familiaris
gaaatttacctagagtcttcttagg

SEQ ID NO: 113204 - DNA, 25 bp, Canis familiaris
gaaattctacttacggactttgaca

SEQ ID NO: 113205 - DNA, 25 bp, Canis familiaris
gagaatatgttctgtcttactgttg

SEQ ID NO: 113206 - DNA, 25 bp, Canis familiaris
gaaatgtagttactcttacttttct

SEQ ID NO: 113207 - DNA, 25 bp, Canis familiaris
gaaagattaacacttccctttgttg

SEQ ID NO: 113208 - DNA, 25 bp, Canis familiaris
gaaagttcacatccttggctctttc

SEQ ID NO: 113209 - DNA, 25 bp, Canis familiaris
gaaagcatatttcttggccttggtc

SEQ ID NO: 113210 - DNA, 25 bp, Canis familiaris
gaaagcatatttcttggccttggtc

SEQ ID NO: 113211 - DNA, 25 bp, Canis familiaris
gaaagcatttcactctcaagtttgg

SEQ ID NO: 113212 - DNA, 25 bp, Canis familiaris
gaaagcacagatggcctctagtttg

SEQ ID NO: 113213 - DNA, 25 bp, Canis familiaris
gaaagcacagattcatttaaccatg

SEQ ID NO: 113214 - DNA, 25 bp, Canis familiaris
gaaatgcatcgtgattcctgtccat

SEQ ID NO: 113215 - DNA, 25 bp, Canis familiaris
gaaatgattgtggtctcaggcagcc

SEQ ID NO: 113216 - DNA, 25 bp, Canis familiaris
gaaatgttgctgtagactgctgcgc

SEQ ID NO: 113217 - DNA, 25 bp, Canis familiaris
gaaatatctgcccaggatctcagcc

SEQ ID NO: 113218 - DNA, 25 bp, Canis familiaris
gaaagggcactggagacacagccgc

SEQ ID NO: 113219 - DNA, 25 bp, Canis familiaris
gaaaggtgacgtaaacggcctgtcg

SEQ ID NO: 113220 - DNA, 25 bp, Canis familiaris
gaaagggggaatcccagcccaattg

SEQ ID NO: 113221 - DNA, 25 bp, Canis familiaris
gacaaggtggaagcccgggccattg

SEQ ID NO: 113222 - DNA, 25 bp, Canis familiaris
gaaaggggaagcgcgggatgcctgg

SEQ ID NO: 113223 - DNA, 25 bp, Canis familiaris
gaaagggcggcggtggtggtgaagg

SEQ ID NO: 113224 - DNA, 25 bp, Canis familiaris
gaaaggtgcagggaagggacgccgg

SEQ ID NO: 113225 - DNA, 25 bp, Canis familiaris
gaaaggtagatgagggacgcctggg

SEQ ID NO: 113226 - DNA, 25 bp, Canis familiaris
gaaagggaaaagtgacagccggctg

SEQ ID NO: 113227 - DNA, 25 bp, Canis familiaris
gacaactgtaactaatggaaatcgg

SEQ ID NO: 113228 - DNA, 25 bp, Canis familiaris
gacacctgaaatctaggacgaccag

SEQ ID NO: 113229 - DNA, 25 bp, Canis familiaris
gacaccataccaacgaggactacga

SEQ ID NO: 113230 - DNA, 25 bp, Canis familiaris
gacccatcctacaataagcctacaa

SEQ ID NO: 113231 - DNA, 25 bp, Canis familiaris
tcttctttcaaacatgcgtctctca

SEQ ID NO: 113232 - DNA, 25 bp, Canis familiaris
gaaattttaattggagtgttattga

SEQ ID NO: 113233 - DNA, 25 bp, Canis familiaris
gaaatgttgtcatcaccggattttg

SEQ ID NO: 113234 - DNA, 25 bp, Canis familiaris
gaaatcctgcaatgaaaggtactat

SEQ ID NO: 113235 - DNA, 25 bp, Canis familiaris
gaaatgccaacaggaaccagcagac

SEQ ID NO: 113236 - DNA, 25 bp, Canis familiaris
gaaatctaacaataccagcccggta

SEQ ID NO: 113237 - DNA, 25 bp, Canis familiaris
gaaatgctaacaaaggggatccctg

SEQ ID NO: 113238 - DNA, 25 bp, Canis familiaris
gaaatctccaccaaggaagtcccta

SEQ ID NO: 113239 - DNA, 25 bp, Canis familiaris
gaaagatccaaatggcatttctcct

SEQ ID NO: 113240 - DNA, 25 bp, Canis familiaris
gaaagacaccagtggacttcctact

SEQ ID NO: 113241 - DNA, 25 bp, Canis familiaris
gaaaggcatcggtgccacgcatctt

SEQ ID NO: 113242 - DNA, 25 bp, Canis familiaris
gaaaggagggggcaccacatgttat

SEQ ID NO: 113243 - DNA, 25 bp, Canis familiaris
gaaaggtggacatcagaccctggaa

SEQ ID NO: 113244 - DNA, 25 bp, Canis familiaris
gacaagagaaaagacacccgagaaa

SEQ ID NO: 113245 - DNA, 25 bp, Canis familiaris
gaaagacctaagtcatcccctagac

SEQ ID NO: 113246 - DNA, 25 bp, Canis familiaris
gacaagaacgaaacaagcccaaagc

SEQ ID NO: 113247 - DNA, 25 bp, Canis familiaris
gacaaaactaatagtagcatctttt

SEQ ID NO: 113248 - DNA, 25 bp, Canis familiaris
gaaatcaaccatttgctacaatgtg

SEQ ID NO: 113249 - DNA, 25 bp, Canis familiaris
gaaagatgcatctcttctagaattt

SEQ ID NO: 113250 - DNA, 25 bp, Canis familiaris
gaaagagcattgtcgttggtgttaa

SEQ ID NO: 113251 - DNA, 25 bp, Canis familiaris
gaaagaactgatgtgggtgcctata

SEQ ID NO: 113252 - DNA, 25 bp, Canis familiaris
gaaagtcacttggtgcaggtgtttt

SEQ ID NO: 113253 - DNA, 25 bp, Canis familiaris
gaaagatgccttgggagttgattgc

SEQ ID NO: 113254 - DNA, 25 bp, Canis familiaris
gaaaggcactctgaggatcatatat

SEQ ID NO: 113255 - DNA, 25 bp, Canis familiaris
gaaaggcagctggtacgagcaagtt

SEQ ID NO: 113256 - DNA, 25 bp, Canis familiaris
gaaagaatgctggtctccaaatgtt

SEQ ID NO: 113257 - DNA, 25 bp, Canis familiaris
gataaaagtcctgaagacatttccc

SEQ ID NO: 113258 - DNA, 25 bp, Canis familiaris
gaaaggagcccagaagacatccccc

SEQ ID NO: 113259 - DNA, 25 bp, Canis familiaris
gacaacgggctagaggaacaccccg

SEQ ID NO: 113260 - DNA, 25 bp, Canis familiaris
gaaagtgagagcttgccgggaaccc

SEQ ID NO: 113261 - DNA, 25 bp, Canis familiaris
gaaaggaaggtggggagcgtcagcc

SEQ ID NO: 113262 - DNA, 25 bp, Canis familiaris
gaaaggaccagtgcggatgcctacc

SEQ ID NO: 113263 - DNA, 25 bp, Canis familiaris
gaaagaggtctgcaagggcttacgg

SEQ ID NO: 113264 - DNA, 25 bp, Canis familiaris
gacaaaggttggtcaagggtatggg

SEQ ID NO: 113265 - DNA, 25 bp, Canis familiaris
gacactaggctcaaccaagtggtca

SEQ ID NO: 113266 - DNA, 25 bp, Canis familiaris
gaaatcaatgacacacaacggccac

SEQ ID NO: 113267 - DNA, 25 bp, Canis familiaris
gaaatcagattaccctcagggccac

SEQ ID NO: 113268 - DNA, 25 bp, Canis familiaris
gagatgtaatttgcctcggggccta

SEQ ID NO: 113269 - DNA, 25 bp, Canis familiaris
gaaagaaattccctaggttgctcta

SEQ ID NO: 113270 - DNA, 25 bp, Canis familiaris
gaaataccagtaggttggattccta

SEQ ID NO: 113271 - DNA, 25 bp, Canis familiaris
gaaataccaaatgtctgtagtctat

SEQ ID NO: 113272 - DNA, 25 bp, Canis familiaris
gaaatccactagggttttctctcat

SEQ ID NO: 113273 - DNA, 25 bp, Canis familiaris
gaaatccactggaccgagttctgca

SEQ ID NO: 113274 - DNA, 25 bp, Canis familiaris
gaaatcccagtggtggttctgctga

SEQ ID NO: 113275 - DNA, 25 bp, Canis familiaris
gaaatcaccttgttggattgtggca

SEQ ID NO: 113276 - DNA, 25 bp, Canis familiaris
gaaatggcctttagacattgccgag

SEQ ID NO: 113277 - DNA, 25 bp, Canis familiaris
gaaaggctcttaatctagtaaagtt

SEQ ID NO: 113278 - DNA, 25 bp, Canis familiaris
gaaagtgccttaagcccagaagggt

SEQ ID NO: 113279 - DNA, 25 bp, Canis familiaris
gaaaggcagattaccccagatcagt

SEQ ID NO: 113280 - DNA, 25 bp, Canis familiaris
gaaatctcgtttgtcactgtcattc

SEQ ID NO: 113281 - DNA, 25 bp, Canis familiaris
gacacccctggtaatacatccattc

SEQ ID NO: 113282 - DNA, 25 bp, Canis familiaris
gacacccctactagaaatagattcc

SEQ ID NO: 113283 - DNA, 25 bp, Canis familiaris
gactgcccttacagactagagtttc

SEQ ID NO: 113284 - DNA, 25 bp, Canis familiaris
gactcccttggaacctaggtgtttg

SEQ ID NO: 113285 - DNA, 25 bp, Canis familiaris
gacatgcgttggttccgttttttat

SEQ ID NO: 113286 - DNA, 25 bp, Canis familiaris
gaaagttggacttctcagtgttttt

SEQ ID NO: 113287 - DNA, 25 bp, Canis familiaris
gaaagtataccataagagtctgttt

SEQ ID NO: 113288 - DNA, 25 bp, Canis familiaris
gaaagatccctatgataagtctgat

SEQ ID NO: 113289 - DNA, 25 bp, Canis familiaris
gaaagtccctgttgcagaccttaga

SEQ ID NO: 113290 - DNA, 25 bp, Canis familiaris
gaaagtgcccttagatatttctaga

SEQ ID NO: 113291 - DNA, 25 bp, Canis familiaris
gaaagtaccttttactgttgataca

SEQ ID NO: 113292 - DNA, 25 bp, Canis familiaris
gaaagtttatgcttttctgataaaa

SEQ ID NO: 113293 - DNA, 25 bp, Canis familiaris
gaaagattttgccatttgtgataat

SEQ ID NO: 113294 - DNA, 25 bp, Canis familiaris
gaaagtgtttgctatcataataaac

SEQ ID NO: 113295 - DNA, 25 bp, Canis familiaris
gaaaggttcacactaaaagaccact

SEQ ID NO: 113296 - DNA, 25 bp, Canis familiaris
gacaaaggtcaacttaccaaccgtg

SEQ ID NO: 113297 - DNA, 25 bp, Canis familiaris
gacaaagtcaaataaacaacctggc

SEQ ID NO: 113298 - DNA, 25 bp, Canis familiaris
gaaagaccacagtcctaaacaccag

SEQ ID NO: 113299 - DNA, 25 bp, Canis familiaris
gaaaggcccacatctcagattacct

SEQ ID NO: 113300 - DNA, 25 bp, Canis familiaris
gaaattggccttgacagattcacac

SEQ ID NO: 113301 - DNA, 25 bp, Canis familiaris
gaaagggctttgcctgagttgcaga

SEQ ID NO: 113302 - DNA, 25 bp, Canis familiaris
gaaaggtctttgaaggctgctgcta

SEQ ID NO: 113303 - DNA, 25 bp, Canis familiaris
gaaagtgtgacaaagagaagctcta

SEQ ID NO: 113304 - DNA, 25 bp, Canis familiaris
gaaagagtggatgagcagtgagctg

SEQ ID NO: 113305 - DNA, 25 bp, Canis familiaris
gaaagagagagagagcacgcatgag

SEQ ID NO: 113306 - DNA, 25 bp, Canis familiaris
gaaagtgaagacgctcaagagccag

SEQ ID NO: 113307 - DNA, 25 bp, Canis familiaris
gaaagtatacagccttcttcagcca

SEQ ID NO: 113308 - DNA, 25 bp, Canis familiaris
gaaagtattaggctgctacatcttc

SEQ ID NO: 113309 - DNA, 25 bp, Canis familiaris
gaaagtcatctagacattcctcctc

SEQ ID NO: 113310 - DNA, 25 bp, Canis familiaris
gaaagtcatctagacattcctcctc

SEQ ID NO: 113311 - DNA, 25 bp, Canis familiaris
gaaagtcatctagacgttcctcctc

SEQ ID NO: 113312 - DNA, 25 bp, Canis familiaris
gaaagttcgggaagtgctcccacac

SEQ ID NO: 113313 - DNA, 25 bp, Canis familiaris
gaaattttgaggtagtcttaacagc

SEQ ID NO: 113314 - DNA, 25 bp, Canis familiaris
gaaatattaggttcaggtgcataag

SEQ ID NO: 113315 - DNA, 25 bp, Canis familiaris
gaaatctatgttctcacaggctagg

SEQ ID NO: 113316 - DNA, 25 bp, Canis familiaris
gacacaccattccttcaaggtggga

SEQ ID NO: 113317 - DNA, 25 bp, Canis familiaris
gacaaaccccccaggatgggatatg

SEQ ID NO: 113318 - DNA, 25 bp, Canis familiaris
gacaaacttccccttaacagtatat

SEQ ID NO: 113319 - DNA, 25 bp, Canis familiaris
gacaagtttccttttcaacatttct

SEQ ID NO: 113320 - DNA, 25 bp, Canis familiaris
gacgacgtatcctgaccaaaattct

SEQ ID NO: 113321 - DNA, 25 bp, Canis familiaris
gacaaccattaataccagaagttta

SEQ ID NO: 113322 - DNA, 25 bp, Canis familiaris
gaaaggattttctccaggaattgga

SEQ ID NO: 113323 - DNA, 25 bp, Canis familiaris
gaaaggtgtttatacaggttctaat

SEQ ID NO: 113324 - DNA, 25 bp, Canis familiaris
gaaataggtttatcatccttatcaa

SEQ ID NO: 113325 - DNA, 25 bp, Canis familiaris
gaaataacacctcacacctgttgaa

SEQ ID NO: 113326 - DNA, 25 bp, Canis familiaris
gaaagtatacctcaaccaagctgaa

SEQ ID NO: 113327 - DNA, 25 bp, Canis familiaris
gaaaggatccctaaatgctattgga

SEQ ID NO: 113328 - DNA, 25 bp, Canis familiaris
gaaagtctccccaataccattgaaa

SEQ ID NO: 113329 - DNA, 25 bp, Canis familiaris
gaaaggtctacaagagacacttaag

SEQ ID NO: 113330 - DNA, 25 bp, Canis familiaris
gaaagtgtccagcaggtcctagaaa

SEQ ID NO: 113331 - DNA, 25 bp, Canis familiaris
gaaagtcacaaataacccagcacaa

SEQ ID NO: 113332 - DNA, 25 bp, Canis familiaris
gaaagtcgcggtgaatctccagcac

SEQ ID NO: 113333 - DNA, 25 bp, Canis familiaris
gaaatgtagatcatccacctcgata

SEQ ID NO: 113334 - DNA, 25 bp, Canis familiaris
gaaatgtcgtttccacctggagaga

SEQ ID NO: 113335 - DNA, 25 bp, Canis familiaris
gaaatgttttgtacacatttgacta

SEQ ID NO: 113336 - DNA, 25 bp, Canis familiaris
gaaagtggttgatccattttctaag

SEQ ID NO: 113337 - DNA, 25 bp, Canis familiaris
gaaagttgcttgtccatatgatttt

SEQ ID NO: 113338 - DNA, 25 bp, Canis familiaris
gaaagatgtgctacactgtattcta

SEQ ID NO: 113339 - DNA, 25 bp, Canis familiaris
gaaagatgccatggcacagctttgc

SEQ ID NO: 113340 - DNA, 25 bp, Canis familiaris
gaaagagtcatgtctcagtactgaa

SEQ ID NO: 113341 - DNA, 25 bp, Canis familiaris
gaaagatgaatgtcggtcctgcacc

SEQ ID NO: 113342 - DNA, 25 bp, Canis familiaris
gaaatgaagatgtactggcctgatg

SEQ ID NO: 113343 - DNA, 25 bp, Canis familiaris
gaaagatggctgtttccctgtgttc

SEQ ID NO: 113344 - DNA, 25 bp, Canis familiaris
gaaagtgcctatgtacaccgttcgg

SEQ ID NO: 113345 - DNA, 25 bp, Canis familiaris
gaaagtggtgacctacaactgttcc

SEQ ID NO: 113346 - DNA, 25 bp, Canis familiaris
gaaagttctgacgatggcaacatgt

SEQ ID NO: 113347 - DNA, 25 bp, Canis familiaris
gaaatttcgagcctggccatagtta

SEQ ID NO: 113348 - DNA, 25 bp, Canis familiaris
gaaatttccagacatcctcagtgtg

SEQ ID NO: 113349 - DNA, 25 bp, Canis familiaris
gaaattaccagtttcagtaagagct

SEQ ID NO: 113350 - DNA, 25 bp, Canis familiaris
gaaatttgccattggtctttaggtt

SEQ ID NO: 113351 - DNA, 25 bp, Canis familiaris
gaaagttgccattattctatgtagt

SEQ ID NO: 113352 - DNA, 25 bp, Canis familiaris
gaaagtgtgattttatgatatgtag

SEQ ID NO: 113353 - DNA, 25 bp, Canis familiaris
gaaagttgtgtccctgtcatgaaag

SEQ ID NO: 113354 - DNA, 25 bp, Canis familiaris
gaaagtcgagtctcctcagatgaag

SEQ ID NO: 113355 - DNA, 25 bp, Canis familiaris
gaaagtctgagcttgatcccagctg

SEQ ID NO: 113356 - DNA, 25 bp, Canis familiaris
gaaagtcgtgcatgagacacctgct

SEQ ID NO: 113357 - DNA, 25 bp, Canis familiaris
gaaagtctctgttgtgagcctcttc

SEQ ID NO: 113358 - DNA, 25 bp, Canis familiaris
gaaatttgtcaaatagcccttccca

SEQ ID NO: 113359 - DNA, 25 bp, Canis familiaris
gaaatttaacattgtcctctttccg

SEQ ID NO: 113360 - DNA, 25 bp, Canis familiaris
gaaatttaaaatccacctttcacag

SEQ ID NO: 113361 - DNA, 25 bp, Canis familiaris
gacaatgatttttattacctttact

SEQ ID NO: 113362 - DNA, 25 bp, Canis familiaris
gaaatttccctgttactttcacaat

SEQ ID NO: 113363 - DNA, 25 bp, Canis familiaris
gaaatgtatacatcctactattaaa

SEQ ID NO: 113364 - DNA, 25 bp, Canis familiaris
gaaatgatcaaattccaagtcttta

SEQ ID NO: 113365 - DNA, 25 bp, Canis familiaris
gaaagataacgatagatgtcctcta

SEQ ID NO: 113366 - DNA, 25 bp, Canis familiaris
gaaattgaactagaggtccttgata

SEQ ID NO: 113367 - DNA, 25 bp, Canis familiaris
gaaatggaactagagttttgtgcta

SEQ ID NO: 113368 - DNA, 25 bp, Canis familiaris
gaaaggacactacaaaccatgtggg

SEQ ID NO: 113369 - DNA, 25 bp, Canis familiaris
gaaaggtcctcactgatcaacaacg

SEQ ID NO: 113370 - DNA, 25 bp, Canis familiaris
gaaagtacttcactgcacaggccac

SEQ ID NO: 113371 - DNA, 25 bp, Canis familiaris
gaaagtacttgcggatctagccatc

SEQ ID NO: 113372 - DNA, 25 bp, Canis familiaris
gaaagtgattttgtgctgagcccat

SEQ ID NO: 113373 - DNA, 25 bp, Canis familiaris
gaaagtgacttccattgcataccaa

SEQ ID NO: 113374 - DNA, 25 bp, Canis familiaris
gaaatgtgactctgcacacacacac

SEQ ID NO: 113375 - DNA, 25 bp, Canis familiaris
gacaacgacagctgatcaactactt

SEQ ID NO: 113376 - DNA, 25 bp, Canis familiaris
gacaaccaacacatcgtcttgtccg

SEQ ID NO: 113377 - DNA, 25 bp, Canis familiaris
gacaacaacccaatggtcttgacta

SEQ ID NO: 113378 - DNA, 25 bp, Canis familiaris
gacaattatcctttgggcttgacaa

SEQ ID NO: 113379 - DNA, 25 bp, Canis familiaris
gacagttatcagaggcggccttgca

SEQ ID NO: 113380 - DNA, 25 bp, Canis familiaris
tacagttaggtagggcccttgaggt

SEQ ID NO: 113381 - DNA, 25 bp, Canis familiaris
gaaatttgtgtatgtccacttaggt

SEQ ID NO: 113382 - DNA, 25 bp, Canis familiaris
gacaatcaaggaaaaccctgtgggg

SEQ ID NO: 113383 - DNA, 25 bp, Canis familiaris
gaaatagatgaaaacctctcctggg

SEQ ID NO: 113384 - DNA, 25 bp, Canis familiaris
gaaattgataacccctgctgtgtga

SEQ ID NO: 113385 - DNA, 25 bp, Canis familiaris
gaaatataaacaccttcttgtttat

SEQ ID NO: 113386 - DNA, 25 bp, Canis familiaris
gaaataaatgtctctgtcttttaaa

SEQ ID NO: 113387 - DNA, 25 bp, Canis familiaris
gacagtacctagtcgcagttattta

SEQ ID NO: 113388 - DNA, 25 bp, Canis familiaris
gaaatgaaatagtctctttcttgaa

SEQ ID NO: 113389 - DNA, 25 bp, Canis familiaris
gaaatacaggcttctttacataaac

SEQ ID NO: 113390 - DNA, 25 bp, Canis familiaris
gaaatactttcaaattctaagaatc

SEQ ID NO: 113391 - DNA, 25 bp, Canis familiaris
gaaatcacctttagacgtaaccagc

SEQ ID NO: 113392 - DNA, 25 bp, Canis familiaris
gaaatcaggagtcagacgctcaaat

SEQ ID NO: 113393 - DNA, 25 bp, Canis familiaris
gaaattcgagaccagcaagtattac

SEQ ID NO: 113394 - DNA, 25 bp, Canis familiaris
gaaagtcaagcccatctatttccac

SEQ ID NO: 113395 - DNA, 25 bp, Canis familiaris
gaaagtcaccatgtctattctcaag

SEQ ID NO: 113396 - DNA, 25 bp, Canis familiaris
gaaagtagtctgttctttctccctc

SEQ ID NO: 113397 - DNA, 25 bp, Canis familiaris
gaaagttgtgtgtttatcatcccat

SEQ ID NO: 113398 - DNA, 25 bp, Canis familiaris
gaaagttgctagttctgcttgacca

SEQ ID NO: 113399 - DNA, 25 bp, Canis familiaris
gaaatgtgtgtagattgtcaaccct

SEQ ID NO: 113400 - DNA, 25 bp, Canis familiaris
gaaatgtcttatcaagtctaccccc

SEQ ID NO: 113401 - DNA, 25 bp, Canis familiaris
gaaattattcatcccagtgtacagt

SEQ ID NO: 113402 - DNA, 25 bp, Canis familiaris
gaaatcttgttcctctcttaagtga

SEQ ID NO: 113403 - DNA, 25 bp, Canis familiaris
gaaagtgtgttcctccttttgtagc

SEQ ID NO: 113404 - DNA, 25 bp, Canis familiaris
gaaatggctgtttgcttcttactgt

SEQ ID NO: 113405 - DNA, 25 bp, Canis familiaris
gaaatctgcgtatgttctctgaaca

SEQ ID NO: 113406 - DNA, 25 bp, Canis familiaris
gaaatcgtcttctgtatcatggcca

SEQ ID NO: 113407 - DNA, 25 bp, Canis familiaris
gaaatgcttgctactggtcaaaaaa

SEQ ID NO: 113408 - DNA, 25 bp, Canis familiaris
gaaatgttgctcttgagtttaacaa

SEQ ID NO: 113409 - DNA, 25 bp, Canis familiaris
gaaatctgctacctagtcttacaca

SEQ ID NO: 113410 - DNA, 25 bp, Canis familiaris
gaaattctcacattcagctcttaag

SEQ ID NO: 113411 - DNA, 25 bp, Canis familiaris
gaaattcccatttggctacatcgag

SEQ ID NO: 113412 - DNA, 25 bp, Canis familiaris
gaaattcctattcaccaatcacatt

SEQ ID NO: 113413 - DNA, 25 bp, Canis familiaris
gaaatgtttattcttactcctttct

SEQ ID NO: 113414 - DNA, 25 bp, Canis familiaris
gaaatatttactctctgacctttta

SEQ ID NO: 113415 - DNA, 25 bp, Canis familiaris
gaaattttccatcttattcttttat

SEQ ID NO: 113416 - DNA, 25 bp, Canis familiaris
gaaatgattttcactttgtggattt

SEQ ID NO: 113417 - DNA, 25 bp, Canis familiaris
gaaatattcttttacttggggatgt

SEQ ID NO: 113418 - DNA, 25 bp, Canis familiaris
gaaatcctatctaaagaattgggtg

SEQ ID NO: 113419 - DNA, 25 bp, Canis familiaris
gaaatgctttgtaatagacttggct

SEQ ID NO: 113420 - DNA, 25 bp, Canis familiaris
gaaatgctacaatattgacctgagt

SEQ ID NO: 113421 - DNA, 25 bp, Canis familiaris
gaaatgggatatgatctacactggt

SEQ ID NO: 113422 - DNA, 25 bp, Canis familiaris
gacacgggatgttacttcccgtcca

SEQ ID NO: 113423 - DNA, 25 bp, Canis familiaris
gaaagtggatttttgtggcctgtgc

SEQ ID NO: 113424 - DNA, 25 bp, Canis familiaris
gaaagtggaatctctgtggcctatc

SEQ ID NO: 113425 - DNA, 25 bp, Canis familiaris
gaaagtggtctctggagccatggtc

SEQ ID NO: 113426 - DNA, 25 bp, Canis familiaris
gaaaggtctctgggtaggcaagtgg

SEQ ID NO: 113427 - DNA, 25 bp, Canis familiaris
gacaagttcactgactaggtaagca

SEQ ID NO: 113428 - DNA, 25 bp, Canis familiaris
gaaattcatactattgggacaagca

SEQ ID NO: 113429 - DNA, 25 bp, Canis familiaris
gaaatactgactcttgaacaacata

SEQ ID NO: 113430 - DNA, 25 bp, Canis familiaris
gaaatccgagattttactcaacttg

SEQ ID NO: 113431 - DNA, 25 bp, Canis familiaris
gactattcttggtgtaaaatcttgt

SEQ ID NO: 113432 - DNA, 25 bp, Canis familiaris
gactgagttggtgttcgaatttatt

SEQ ID NO: 113433 - DNA, 25 bp, Canis familiaris
gactgggatggtctacgctttagtt

SEQ ID NO: 113434 - DNA, 25 bp, Canis familiaris
gacaggaatggcccaagcctgcttc

SEQ ID NO: 113435 - DNA, 25 bp, Canis familiaris
gaaaggatgggcaaaccatgcttgt

SEQ ID NO: 113436 - DNA, 25 bp, Canis familiaris
gaaaggaagctcaactccagttaag

SEQ ID NO: 113437 - DNA, 25 bp, Canis familiaris
gaaaggtctcatgactccatttaca

SEQ ID NO: 113438 - DNA, 25 bp, Canis familiaris
gaaatgcggaatgacctctttaata

SEQ ID NO: 113439 - DNA, 25 bp, Canis familiaris
gaaattggtgcccacctttggagaa

SEQ ID NO: 113440 - DNA, 25 bp, Canis familiaris
gaaatcttggagcacctgttggcct

SEQ ID NO: 113441 - DNA, 25 bp, Canis familiaris
gaaagtgaggcagggcctgggcttc

SEQ ID NO: 113442 - DNA, 25 bp, Canis familiaris
gaaagtgatggtgctgactggagtt

SEQ ID NO: 113443 - DNA, 25 bp, Canis familiaris
gaaagtcatggtggccaacagaggt

SEQ ID NO: 113444 - DNA, 25 bp, Canis familiaris
gaaagtcatccggcacaagcgagag

SEQ ID NO: 113445 - DNA, 25 bp, Canis familiaris
gaaagtagccgggaagtgctgcaag

SEQ ID NO: 113446 - DNA, 25 bp, Canis familiaris
gaaatctgagccctcagacgctgct

SEQ ID NO: 113447 - DNA, 25 bp, Canis familiaris
gaaatgagaatccccacagtgctta

SEQ ID NO: 113448 - DNA, 25 bp, Canis familiaris
gaaatggaaacccagcggtgtcaca

SEQ ID NO: 113449 - DNA, 25 bp, Canis familiaris
gaaaggagaacccggagacatcaag

SEQ ID NO: 113450 - DNA, 25 bp, Canis familiaris
gaccaggaaccctgacgacatcacc

SEQ ID NO: 113451 - DNA, 25 bp, Canis familiaris
gaaaggtcgcaccatgtacgtcatc

SEQ ID NO: 113452 - DNA, 25 bp, Canis familiaris
gaaaggctcagagcattccggccag

SEQ ID NO: 113453 - DNA, 25 bp, Canis familiaris
gaaaggctgggcggcccggaagatg

SEQ ID NO: 113454 - DNA, 25 bp, Canis familiaris
gacataggaaggggcccgaaccagg

SEQ ID NO: 113455 - DNA, 25 bp, Canis familiaris
gaaatgggaccggagccgaagccgc

SEQ ID NO: 113456 - DNA, 25 bp, Canis familiaris
gaaatgggagctcgcgaggcacaac

SEQ ID NO: 113457 - DNA, 25 bp, Canis familiaris
gaaagtgggctgacgacatcagcaa

SEQ ID NO: 113458 - DNA, 25 bp, Canis familiaris
gacaaggcggagaccagatgcacca

SEQ ID NO: 113459 - DNA, 25 bp, Canis familiaris
gaaagtcagaaaacaagcctgagag

SEQ ID NO: 113460 - DNA, 25 bp, Canis familiaris
gaaaggtcagaacctagcctgagag

SEQ ID NO: 113461 - DNA, 25 bp, Canis familiaris
gaaatggatgcacagtctcagccct

SEQ ID NO: 113462 - DNA, 25 bp, Canis familiaris
gacaatggagggctctccactcatg

SEQ ID NO: 113463 - DNA, 25 bp, Canis familiaris
gaaaggagtgggacagctccgcgca

SEQ ID NO: 113464 - DNA, 25 bp, Canis familiaris
gaaagtgattcgcgacttcgacacc

SEQ ID NO: 113465 - DNA, 25 bp, Canis familiaris
gaaaggttcggcgcaaggagcccaa

SEQ ID NO: 113466 - DNA, 25 bp, Canis familiaris
gaaagggtgttggtcacagtggccc

SEQ ID NO: 113467 - DNA, 25 bp, Canis familiaris
gaaagggctgttgaccacgagcagt

SEQ ID NO: 113468 - DNA, 25 bp, Canis familiaris
gaaagggctgagggcaaaggaggtt

SEQ ID NO: 113469 - DNA, 25 bp, Canis familiaris
gaaaggcagctacatcaaaaagggt

SEQ ID NO: 113470 - DNA, 25 bp, Canis familiaris
gaaaggcttttctgataaactggat

SEQ ID NO: 113471 - DNA, 25 bp, Canis familiaris
gaaaggctcttcgtaaagacatcta

SEQ ID NO: 113472 - DNA, 25 bp, Canis familiaris
gaaaggccttttaatcaaagccatc

SEQ ID NO: 113473 - DNA, 25 bp, Canis familiaris
gaaaggccagttctatatactccat

SEQ ID NO: 113474 - DNA, 25 bp, Canis familiaris
gaaaggaaggtgatttgcctcccct

SEQ ID NO: 113475 - DNA, 25 bp, Canis familiaris
gaaaggcaggcagcttttccattcg

SEQ ID NO: 113476 - DNA, 25 bp, Canis familiaris
gaaaggcaggcagcttttccattcg

SEQ ID NO: 113477 - DNA, 25 bp, Canis familiaris
gaaaggagactggttttcattcttg

SEQ ID NO: 113478 - DNA, 25 bp, Canis familiaris
gaaagtgtgtgggttcagccctctt

SEQ ID NO: 113479 - DNA, 25 bp, Canis familiaris
gaaagtgtatgtctctctgacctgc

SEQ ID NO: 113480 - DNA, 25 bp, Canis familiaris
gaaagtgaactcctggctgacatcc

SEQ ID NO: 113481 - DNA, 25 bp, Canis familiaris
gaaagtgacactttcctgttgcccc

SEQ ID NO: 113482 - DNA, 25 bp, Canis familiaris
gaaagtggcaaagcaccacagcccc

SEQ ID NO: 113483 - DNA, 25 bp, Canis familiaris
gaaaggcgcttagcatggcatgcag

SEQ ID NO: 113484 - DNA, 25 bp, Canis familiaris
gaaaggcactataacatggcaaaaa

SEQ ID NO: 113485 - DNA, 25 bp, Canis familiaris
gaaaggatctttcagagcaccagaa

SEQ ID NO: 113486 - DNA, 25 bp, Canis familiaris
gaaaggattttctagccactgagat

SEQ ID NO: 113487 - DNA, 25 bp, Canis familiaris
gaaatttttatcagcaccgaggtgc

SEQ ID NO: 113488 - DNA, 25 bp, Canis familiaris
gaaatattttacaaccagcctgggc

SEQ ID NO: 113489 - DNA, 25 bp, Canis familiaris
gaaatttggtccaacaggcctcggc

SEQ ID NO: 113490 - DNA, 25 bp, Canis familiaris
gaaattctttcagcaagccctgcat

SEQ ID NO: 113491 - DNA, 25 bp, Canis familiaris
gaaattctgaccatcaccggtctgt

SEQ ID NO: 113492 - DNA, 25 bp, Canis familiaris
gaaagtgctacacttcctcttttgt

SEQ ID NO: 113493 - DNA, 25 bp, Canis familiaris
gacaaggatgccattgccatctgtt

SEQ ID NO: 113494 - DNA, 25 bp, Canis familiaris
gaaagggtcatattgctccttgaag

SEQ ID NO: 113495 - DNA, 25 bp, Canis familiaris
gaaatgcaggttccacttcaaaatg

SEQ ID NO: 113496 - DNA, 25 bp, Canis familiaris
gaaatcactgtcacacttgctagaa

SEQ ID NO: 113497 - DNA, 25 bp, Canis familiaris
gacatagcctggaagacccgagtcc

SEQ ID NO: 113498 - DNA, 25 bp, Canis familiaris
gacaatgacctctgaacggtttcgt

SEQ ID NO: 113499 - DNA, 25 bp, Canis familiaris
gacaagacctttcggaagtcgtcgt

SEQ ID NO: 113500 - DNA, 25 bp, Canis familiaris
gacaacacttgtgcgggagctagtt

SEQ ID NO: 113501 - DNA, 25 bp, Canis familiaris
gactacacttacagggttctatttc

SEQ ID NO: 113502 - DNA, 25 bp, Canis familiaris
gacaggaagtacagggtctttaggg

SEQ ID NO: 113503 - DNA, 25 bp, Canis familiaris
gacaagagaggaccggggaaccaag

SEQ ID NO: 113504 - DNA, 25 bp, Canis familiaris
gacaagaaccggggaggaaggcctg

SEQ ID NO: 113505 - DNA, 25 bp, Canis familiaris
gacaagcacacctgggaaacagtga

SEQ ID NO: 113506 - DNA, 25 bp, Canis familiaris
gacaatctcctcagggaaggggcag

SEQ ID NO: 113507 - DNA, 25 bp, Canis familiaris
gacacacataaatggggcatggggc

SEQ ID NO: 113508 - DNA, 25 bp, Canis familiaris
gacacagctatttcgggatcggggt

SEQ ID NO: 113509 - DNA, 25 bp, Canis familiaris
gacagtaattaccggtttccgctat

SEQ ID NO: 113510 - DNA, 25 bp, Canis familiaris
gacagtaattaccggtttccgctat

SEQ ID NO: 113511 - DNA, 25 bp, Canis familiaris
gacaaaattaggtattattccactt

SEQ ID NO: 113512 - DNA, 25 bp, Canis familiaris
gaaatatatttgctcttcttccctg

SEQ ID NO: 113513 - DNA, 25 bp, Canis familiaris
gaaatatatctaccatttcctaccc

SEQ ID NO: 113514 - DNA, 25 bp, Canis familiaris
gacactagagttccattgtgcctac

SEQ ID NO: 113515 - DNA, 25 bp, Canis familiaris
gaaaggcagttgtcatttcctgtat

SEQ ID NO: 113516 - DNA, 25 bp, Canis familiaris
gaaaggatactgtgtccgatgtata

SEQ ID NO: 113517 - DNA, 25 bp, Canis familiaris
gaaaggctttgctgatgacagtgtt

SEQ ID NO: 113518 - DNA, 25 bp, Canis familiaris
gaaaggctgtcgaaaatcatggatt

SEQ ID NO: 113519 - DNA, 25 bp, Canis familiaris
gaaaggtgtcttgatgaatgtcagt

SEQ ID NO: 113520 - DNA, 25 bp, Canis familiaris
gacagaggttactctaagtctgctt

SEQ ID NO: 113521 - DNA, 25 bp, Canis familiaris
gaaaggcttcacaaaaggtctatat

SEQ ID NO: 113522 - DNA, 25 bp, Canis familiaris
gaaaggctacttcctctggtttatt

SEQ ID NO: 113523 - DNA, 25 bp, Canis familiaris
gaaatggttcagacctttgtattgt

SEQ ID NO: 113524 - DNA, 25 bp, Canis familiaris
gaaatgcgccatggactctttggag

SEQ ID NO: 113525 - DNA, 25 bp, Canis familiaris
gaaatcgctaggtctctatgctgtg

SEQ ID NO: 113526 - DNA, 25 bp, Canis familiaris
gaaaggccagtgtgcgctggtgcac

SEQ ID NO: 113527 - DNA, 25 bp, Canis familiaris
gaaagggactgaagctgcgggagcc

SEQ ID NO: 113528 - DNA, 25 bp, Canis familiaris
gaaagggagctgaagctgtcgggag

SEQ ID NO: 113529 - DNA, 25 bp, Canis familiaris
gaaatggtctccaagcagacctggg

SEQ ID NO: 113530 - DNA, 25 bp, Canis familiaris
gaaatgagttccgactggacgccag

SEQ ID NO: 113531 - DNA, 25 bp, Canis familiaris
gaaatgagttcatctcgtaccctag

SEQ ID NO: 113532 - DNA, 25 bp, Canis familiaris
gaaaggctccaagtggaacactcgt

SEQ ID NO: 113533 - DNA, 25 bp, Canis familiaris
gaaaggccaataaggaagcctttgg

SEQ ID NO: 113534 - DNA, 25 bp, Canis familiaris
gaaaggcaaataagggagtccttgt

SEQ ID NO: 113535 - DNA, 25 bp, Canis familiaris
gaaaggcaaattagaaggctttggt

SEQ ID NO: 113536 - DNA, 25 bp, Canis familiaris
gaaaggccatgtttgtagtgtttgc

SEQ ID NO: 113537 - DNA, 25 bp, Canis familiaris
gaaaggcagctgtggattgttgtta

SEQ ID NO: 113538 - DNA, 25 bp, Canis familiaris
gaaaggactgcgccagggttttatc

SEQ ID NO: 113539 - DNA, 25 bp, Canis familiaris
gaaagggtgaggaggagatatatat

SEQ ID NO: 113540 - DNA, 25 bp, Canis familiaris
gaaagggggcgttgctgggatttct

SEQ ID NO: 113541 - DNA, 25 bp, Canis familiaris
gaaagggggagggtggtctttgctg

SEQ ID NO: 113542 - DNA, 25 bp, Canis familiaris
gaaagggggagtaatcaggtgtagg

SEQ ID NO: 113543 - DNA, 25 bp, Canis familiaris
gaaaggatggaggtgctaaggcagt

SEQ ID NO: 113544 - DNA, 25 bp, Canis familiaris
gaaaggcaggaggtggaggtgaggg

SEQ ID NO: 113545 - DNA, 25 bp, Canis familiaris
gaaaggaggagtgggcagcgcctga

SEQ ID NO: 113546 - DNA, 25 bp, Canis familiaris
gaaatcgggagttggacacttggcc

SEQ ID NO: 113547 - DNA, 25 bp, Canis familiaris
gaaatttgtgtttggacacttgggc

SEQ ID NO: 113548 - DNA, 25 bp, Canis familiaris
gaaatttgcattttgtacctcagta

SEQ ID NO: 113549 - DNA, 25 bp, Canis familiaris
gacaattatgcaatcctgtgtcccg

SEQ ID NO: 113550 - DNA, 25 bp, Canis familiaris
gacaatttgattgtggctccaggga

SEQ ID NO: 113551 - DNA, 25 bp, Canis familiaris
gaaatggtgattgcaagttgggaag

SEQ ID NO: 113552 - DNA, 25 bp, Canis familiaris
gaaaggttgggctagagtgaagaag

SEQ ID NO: 113553 - DNA, 25 bp, Canis familiaris
gaaattcttggaccggcgcaagacg

SEQ ID NO: 113554 - DNA, 25 bp, Canis familiaris
gaaattcctgaacctggcagcagaa

SEQ ID NO: 113555 - DNA, 25 bp, Canis familiaris
gaaattcgtgtatctgtgaaagatg

SEQ ID NO: 113556 - DNA, 25 bp, Canis familiaris
gaaattaatctatagtcacagacaa

SEQ ID NO: 113557 - DNA, 25 bp, Canis familiaris
gacaaaccccaatgtacagaaaaag

SEQ ID NO: 113558 - DNA, 25 bp, Canis familiaris
gacaaactgtctcaactaaaaacat

SEQ ID NO: 113559 - DNA, 25 bp, Canis familiaris
gacaaagttcctagactacctgcaa

SEQ ID NO: 113560 - DNA, 25 bp, Canis familiaris
gacaggagtatccttcgcttatctt

SEQ ID NO: 113561 - DNA, 25 bp, Canis familiaris
gaaatagtgatgccttccagttccc

SEQ ID NO: 113562 - DNA, 25 bp, Canis familiaris
gacaaactgactttgacgttcaatc

SEQ ID NO: 113563 - DNA, 25 bp, Canis familiaris
gacaagatctgacagtgaggaatca

SEQ ID NO: 113564 - DNA, 25 bp, Canis familiaris
gacacttctgagccataaaaataaa

SEQ ID NO: 113565 - DNA, 25 bp, Canis familiaris
gatccttccaggcgagaacggtaac

SEQ ID NO: 113566 - DNA, 25 bp, Canis familiaris
gacctaaccacgctaaccgtaatca

SEQ ID NO: 113567 - DNA, 25 bp, Canis familiaris
gacgtataccacgctaacctgtatc

SEQ ID NO: 113568 - DNA, 25 bp, Canis familiaris
gacaaatatcccactaaactaactc

SEQ ID NO: 113569 - DNA, 25 bp, Canis familiaris
gaaattatgcccgatctatacaaag

SEQ ID NO: 113570 - DNA, 25 bp, Canis familiaris
gaaatgttgccctttgaatgggatg

SEQ ID NO: 113571 - DNA, 25 bp, Canis familiaris
gaaatgagtcctgttaagtgttgtt

SEQ ID NO: 113572 - DNA, 25 bp, Canis familiaris
gaaatggtgcttgcttctgagcttc

SEQ ID NO: 113573 - DNA, 25 bp, Canis familiaris
gaaatgctgttttcattctgcactt

SEQ ID NO: 113574 - DNA, 25 bp, Canis familiaris
gaaatctcatttttattgccttttt

SEQ ID NO: 113575 - DNA, 25 bp, Canis familiaris
gaaatatcttgttctttgaaattta

SEQ ID NO: 113576 - DNA, 25 bp, Canis familiaris
gaaatactcatttttttggaatgta

SEQ ID NO: 113577 - DNA, 25 bp, Canis familiaris
gaaatcctcagtttcttagagaata

SEQ ID NO: 113578 - DNA, 25 bp, Canis familiaris
gaaaggtcacattctcttaaacaaa

SEQ ID NO: 113579 - DNA, 25 bp, Canis familiaris
gaaatggtacatactgttgataaaa

SEQ ID NO: 113580 - DNA, 25 bp, Canis familiaris
gaaaggaagaccattgttgcaaaac

SEQ ID NO: 113581 - DNA, 25 bp, Canis familiaris
gaaaggatgaaggattgtatgtgaa

SEQ ID NO: 113582 - DNA, 25 bp, Canis familiaris
gaaaggctgtacattgttgcttgag

SEQ ID NO: 113583 - DNA, 25 bp, Canis familiaris
gaaatgtgatgttcacgtttgtata

SEQ ID NO: 113584 - DNA, 25 bp, Canis familiaris
gaaatttttatcttctttatacgag

SEQ ID NO: 113585 - DNA, 25 bp, Canis familiaris
gaaattgttaatccttccttaccag

SEQ ID NO: 113586 - DNA, 25 bp, Canis familiaris
gaaatagggcaatttaacttaccag

SEQ ID NO: 113587 - DNA, 25 bp, Canis familiaris
gaaatcggtgatattagggtacctt

SEQ ID NO: 113588 - DNA, 25 bp, Canis familiaris
gaaatccttgttctaggtggacact

SEQ ID NO: 113589 - DNA, 25 bp, Canis familiaris
gaaattgttgttctttgtgtacact

SEQ ID NO: 113590 - DNA, 25 bp, Canis familiaris
gaaatctgttttcaagaatgttcct

SEQ ID NO: 113591 - DNA, 25 bp, Canis familiaris
gaaatgctgttccctaggattttcc

SEQ ID NO: 113592 - DNA, 25 bp, Canis familiaris
gaaatgcctgtccacacagtgtttc

SEQ ID NO: 113593 - DNA, 25 bp, Canis familiaris
gaaatcctggaatgagatgcttacc

SEQ ID NO: 113594 - DNA, 25 bp, Canis familiaris
gaaatggctgtgtaaagtgctttta

SEQ ID NO: 113595 - DNA, 25 bp, Canis familiaris
gaaatgagcagtcttacttttgtag

SEQ ID NO: 113596 - DNA, 25 bp, Canis familiaris
gaaatactatagattctttggttgc

SEQ ID NO: 113597 - DNA, 25 bp, Canis familiaris
gaaatgatttcagtattgctgtacg

SEQ ID NO: 113598 - DNA, 25 bp, Canis familiaris
gaaatgattctcacttgtgatttgg

SEQ ID NO: 113599 - DNA, 25 bp, Canis familiaris
gaaatgcttatcggtgtgtgtctga

SEQ ID NO: 113600 - DNA, 25 bp, Canis familiaris
gaaatctattcgtagtgtacttaag

SEQ ID NO: 113601 - DNA, 25 bp, Canis familiaris
gaaatctatccttgactgtaccgaa

SEQ ID NO: 113602 - DNA, 25 bp, Canis familiaris
gaaatgtgaaattaattgaccaaga

SEQ ID NO: 113603 - DNA, 25 bp, Canis familiaris
gaaattgaaagaagagtctctcaca

SEQ ID NO: 113604 - DNA, 25 bp, Canis familiaris
gaaatggaaatggagttctcacctt

SEQ ID NO: 113605 - DNA, 25 bp, Canis familiaris
gaaatgtaccatctttgtcactttg

SEQ ID NO: 113606 - DNA, 25 bp, Canis familiaris
gaaaggccgctcagttgtcaatagg

SEQ ID NO: 113607 - DNA, 25 bp, Canis familiaris
gacaaacttgacagtcttttcagga

SEQ ID NO: 113608 - DNA, 25 bp, Canis familiaris
gaaatcagtgcttctactgttttca

SEQ ID NO: 113609 - DNA, 25 bp, Canis familiaris
gacaagtggctgactacttctcttc

SEQ ID NO: 113610 - DNA, 25 bp, Canis familiaris
gacaagagacatatgtccccttaaa

SEQ ID NO: 113611 - DNA, 25 bp, Canis familiaris
gaaatgaggcttttccctcttttca

SEQ ID NO: 113612 - DNA, 25 bp, Canis familiaris
gaaatggagttctcaccttgtgatt

SEQ ID NO: 113613 - DNA, 25 bp, Canis familiaris
gaaatggaaatctcacagcttttta

SEQ ID NO: 113614 - DNA, 25 bp, Canis familiaris
gaaataaaagcatctccgttcttcg

SEQ ID NO: 113615 - DNA, 25 bp, Canis familiaris
gaaataagggcttcccatgaatttg

SEQ ID NO: 113616 - DNA, 25 bp, Canis familiaris
gacaaattgcccaccacaaatattg

SEQ ID NO: 113617 - DNA, 25 bp, Canis familiaris
gacaaatgtccagtgtcaacccttt

SEQ ID NO: 113618 - DNA, 25 bp, Canis familiaris
gacaatcgtcgatctagacccgtgt

SEQ ID NO: 113619 - DNA, 25 bp, Canis familiaris
gaaatctaagtgtctaactcatcca

SEQ ID NO: 113620 - DNA, 25 bp, Canis familiaris
gaaattacagatgtgaagcccctaa

SEQ ID NO: 113621 - DNA, 25 bp, Canis familiaris
gaaataacagctataaggtccacta

SEQ ID NO: 113622 - DNA, 25 bp, Canis familiaris
gaaataaagctctcttgggcacacc

SEQ ID NO: 113623 - DNA, 25 bp, Canis familiaris
gaaatgaaagcctcctgtgatgtcc

SEQ ID NO: 113624 - DNA, 25 bp, Canis familiaris
gacaatatggggcgcctggatggct

SEQ ID NO: 113625 - DNA, 25 bp, Canis familiaris
gaaatgatgttgtgtgctctgtgag

SEQ ID NO: 113626 - DNA, 25 bp, Canis familiaris
gaaatggcattgtgtgcatcttgct

SEQ ID NO: 113627 - DNA, 25 bp, Canis familiaris
gaaatggcattctaatgtttgcttt

SEQ ID NO: 113628 - DNA, 25 bp, Canis familiaris
gaaatgccatcagaatgtatatcta

SEQ ID NO: 113629 - DNA, 25 bp, Canis familiaris
gaaatcctcaattttcatgatccca

SEQ ID NO: 113630 - DNA, 25 bp, Canis familiaris
gaaatcactttaactgcagtcccag

SEQ ID NO: 113631 - DNA, 25 bp, Canis familiaris
gaaatcagcttcaaacaactccctg

SEQ ID NO: 113632 - DNA, 25 bp, Canis familiaris
gaaatcctaataaacatctcacctg

SEQ ID NO: 113633 - DNA, 25 bp, Canis familiaris
gaaatctcgaagcaggtctcgctct

SEQ ID NO: 113634 - DNA, 25 bp, Canis familiaris
gaaatatgtgtacggtgttccctgc

SEQ ID NO: 113635 - DNA, 25 bp, Canis familiaris
gaaatacttagtttgtctcctgctg

SEQ ID NO: 113636 - DNA, 25 bp, Canis familiaris
gaaatcccacagaactatcatcctc

SEQ ID NO: 113637 - DNA, 25 bp, Canis familiaris
gaaatctctgcaggcaacttactcc

SEQ ID NO: 113638 - DNA, 25 bp, Canis familiaris
gaaatgtccagtgacttcctcttga

SEQ ID NO: 113639 - DNA, 25 bp, Canis familiaris
gaaatcctcagaagacttgcctcgg

SEQ ID NO: 113640 - DNA, 25 bp, Canis familiaris
gaaatggcacaattgacttcccgga

SEQ ID NO: 113641 - DNA, 25 bp, Canis familiaris
gaaatggcacagtgacagctgccac

SEQ ID NO: 113642 - DNA, 25 bp, Canis familiaris
gaaatggacagtggagatgaggcct

SEQ ID NO: 113643 - DNA, 25 bp, Canis familiaris
gaaatgtgctcatcatcgtggtcct

SEQ ID NO: 113644 - DNA, 25 bp, Canis familiaris
gaaatgctgctctccaggaatgatt

SEQ ID NO: 113645 - DNA, 25 bp, Canis familiaris
gaaatgatgcattgtacagttatat

SEQ ID NO: 113646 - DNA, 25 bp, Canis familiaris
gaaatgatgctcaacatcacttatc

SEQ ID NO: 113647 - DNA, 25 bp, Canis familiaris
gaaatgcgcttagcagcttttgtga

SEQ ID NO: 113648 - DNA, 25 bp, Canis familiaris
gaaatgactttttcttgctctctga

SEQ ID NO: 113649 - DNA, 25 bp, Canis familiaris
gagacaggctttaacctgcctgcaa

SEQ ID NO: 113650 - DNA, 25 bp, Canis familiaris
gacaaagcgcttagagttgccatca

SEQ ID NO: 113651 - DNA, 25 bp, Canis familiaris
gacataggcgctaggcaatggggat

SEQ ID NO: 113652 - DNA, 25 bp, Canis familiaris
gacaaggtgacaagaagcaggcgta

SEQ ID NO: 113653 - DNA, 25 bp, Canis familiaris
gacaatttggcaagaatggtttcac

SEQ ID NO: 113654 - DNA, 25 bp, Canis familiaris
gaaatggaggcaacaagacttaaag

SEQ ID NO: 113655 - DNA, 25 bp, Canis familiaris
gaaatagggcggcacacttatccaa

SEQ ID NO: 113656 - DNA, 25 bp, Canis familiaris
gaaatgagggcccgtcaatttcctg

SEQ ID NO: 113657 - DNA, 25 bp, Canis familiaris
gaaatgcaggccctaccaattgccc

SEQ ID NO: 113658 - DNA, 25 bp, Canis familiaris
gagaagaccagacaccaaagtcccc

SEQ ID NO: 113659 - DNA, 25 bp, Canis familiaris
gaaatgcccagcaaatacagaaggg

SEQ ID NO: 113660 - DNA, 25 bp, Canis familiaris
gaaatcaccagggtccgaagcgagc

SEQ ID NO: 113661 - DNA, 25 bp, Canis familiaris
gacaaacttgcggtaggcggcgagc

SEQ ID NO: 113662 - DNA, 25 bp, Canis familiaris
gaaatccatgctgctttggggcata

SEQ ID NO: 113663 - DNA, 25 bp, Canis familiaris
gacaatcaagctccttttggggaaa

SEQ ID NO: 113664 - DNA, 25 bp, Canis familiaris
gaaataagctaattcctggataata

SEQ ID NO: 113665 - DNA, 25 bp, Canis familiaris
gaaatagtgctgtttcactggacaa

SEQ ID NO: 113666 - DNA, 25 bp, Canis familiaris
gaaatactctgctccacaggaaatt

SEQ ID NO: 113667 - DNA, 25 bp, Canis familiaris
gaaatgccctttgccaagtgtcatc

SEQ ID NO: 113668 - DNA, 25 bp, Canis familiaris
gaaattccttcagccaagctattga

SEQ ID NO: 113669 - DNA, 25 bp, Canis familiaris
gacacattccgttacaaagttgtat

SEQ ID NO: 113670 - DNA, 25 bp, Canis familiaris
gagacttgggggcaaattctttgga

SEQ ID NO: 113671 - DNA, 25 bp, Canis familiaris
gacacttggaggcggggtcttgggt

SEQ ID NO: 113672 - DNA, 25 bp, Canis familiaris
gagactaaaggcaagggagtttgac

SEQ ID NO: 113673 - DNA, 25 bp, Canis familiaris
gaaatcaacaaggaggaggttatgc

SEQ ID NO: 113674 - DNA, 25 bp, Canis familiaris
gaaatccacgctagaggcagtattc

SEQ ID NO: 113675 - DNA, 25 bp, Canis familiaris
gaaatagaggcttaggcaacattgt

SEQ ID NO: 113676 - DNA, 25 bp, Canis familiaris
gacagtagcggaatgcgtgaacctt

SEQ ID NO: 113677 - DNA, 25 bp, Canis familiaris
gaaattgcggttcctgaactggatg

SEQ ID NO: 113678 - DNA, 25 bp, Canis familiaris
gaaatctggggatgctgccattgtt

SEQ ID NO: 113679 - DNA, 25 bp, Canis familiaris
gaaatgctgggttttgctttttatg

SEQ ID NO: 113680 - DNA, 25 bp, Canis familiaris
gaaatgtctggtttgtgttcatctc

SEQ ID NO: 113681 - DNA, 25 bp, Canis familiaris
gacaagtgggtgctagatctctctc

SEQ ID NO: 113682 - DNA, 25 bp, Canis familiaris
gacaattaggtgctggtggcctgca

SEQ ID NO: 113683 - DNA, 25 bp, Canis familiaris
gacaaatacggactgttccccgtgg

SEQ ID NO: 113684 - DNA, 25 bp, Canis familiaris
tgaaaatgaccccaaaccttcaggg

SEQ ID NO: 113685 - DNA, 25 bp, Canis familiaris
gacaaatgcactcgtaaaccttcag

SEQ ID NO: 113686 - DNA, 25 bp, Canis familiaris
gaaatctccttgtcaaatcctatca

SEQ ID NO: 113687 - DNA, 25 bp, Canis familiaris
gaaatcccctataatcatccattca

SEQ ID NO: 113688 - DNA, 25 bp, Canis familiaris
gaaataccttttacagcatgaacag

SEQ ID NO: 113689 - DNA, 25 bp, Canis familiaris
gaaattccttttcgtgaagaccttg

SEQ ID NO: 113690 - DNA, 25 bp, Canis familiaris
gaaatcatcgcctttggtgatagaa

SEQ ID NO: 113691 - DNA, 25 bp, Canis familiaris
gaaattctggccaaggtgctcacaa

SEQ ID NO: 113692 - DNA, 25 bp, Canis familiaris
gaaatatgtggacgaggcctccaag

SEQ ID NO: 113693 - DNA, 25 bp, Canis familiaris
gaaatattgaaccaaccctgcaacc

SEQ ID NO: 113694 - DNA, 25 bp, Canis familiaris
gaaatcaatcaatctaccaaaagcc

SEQ ID NO: 113695 - DNA, 25 bp, Canis familiaris
gaaatatacaggatgagcccagaac

SEQ ID NO: 113696 - DNA, 25 bp, Canis familiaris
gaaataaaggttccagcctgcaaaa

SEQ ID NO: 113697 - DNA, 25 bp, Canis familiaris
gaaataaagctaagtcaacacaaaa

SEQ ID NO: 113698 - DNA, 25 bp, Canis familiaris
gaaatgcaaactaaaaccacaatca

SEQ ID NO: 113699 - DNA, 25 bp, Canis familiaris
gaaatattacttcacacccattagg

SEQ ID NO: 113700 - DNA, 25 bp, Canis familiaris
gaaatattcacttacaaatccttag

SEQ ID NO: 113701 - DNA, 25 bp, Canis familiaris
gaaattctgcactcaaactctcttc

SEQ ID NO: 113702 - DNA, 25 bp, Canis familiaris
gaaatatcatcatccaaactcctac

SEQ ID NO: 113703 - DNA, 25 bp, Canis familiaris
gaaatctataaccagagatcctgct

SEQ ID NO: 113704 - DNA, 25 bp, Canis familiaris
gaaatcctatatccagagtactcta

SEQ ID NO: 113705 - DNA, 25 bp, Canis familiaris
gaaatgccaatacatgtgatatctc

SEQ ID NO: 113706 - DNA, 25 bp, Canis familiaris
gaaatgagaatcttatctataccag

SEQ ID NO: 113707 - DNA, 25 bp, Canis familiaris
gaaatgagcctcgattgaatacctg

SEQ ID NO: 113708 - DNA, 25 bp, Canis familiaris
gaaatgagcccttgagagagaccca

SEQ ID NO: 113709 - DNA, 25 bp, Canis familiaris
gacaatgccccaggatatggaccca

SEQ ID NO: 113710 - DNA, 25 bp, Canis familiaris
gacacaacccaaaataagctcatca

SEQ ID NO: 113711 - DNA, 25 bp, Canis familiaris
gaaatgccccaaagagaggatgcaa

SEQ ID NO: 113712 - DNA, 25 bp, Canis familiaris
gaaatccaccagcagagaaatctat

SEQ ID NO: 113713 - DNA, 25 bp, Canis familiaris
gaaatccacacatcaagatatgttg

SEQ ID NO: 113714 - DNA, 25 bp, Canis familiaris
gaaatcgcaagaacataataattaa

SEQ ID NO: 113715 - DNA, 25 bp, Canis familiaris
gacaatcctaacctgataaatttta

SEQ ID NO: 113716 - DNA, 25 bp, Canis familiaris
gaaatccactcaggagctaaatttt

SEQ ID NO: 113717 - DNA, 25 bp, Canis familiaris
gaaatcacagtcggctggaatatga

SEQ ID NO: 113718 - DNA, 25 bp, Canis familiaris
gaaatccagatcgctcagagtgaac

SEQ ID NO: 113719 - DNA, 25 bp, Canis familiaris
gacaacctgactgtcgcagaacacc

SEQ ID NO: 113720 - DNA, 25 bp, Canis familiaris
gaaattcagcacctttgccaagacc

SEQ ID NO: 113721 - DNA, 25 bp, Canis familiaris
gaaatttcgcagtatcggcagggcc

SEQ ID NO: 113722 - DNA, 25 bp, Canis familiaris
gaaattgctgcactgtacacgaggg

SEQ ID NO: 113723 - DNA, 25 bp, Canis familiaris
gaaattctgaatcacatcggatgga

SEQ ID NO: 113724 - DNA, 25 bp, Canis familiaris
gaaattcaagtgtacctgccataac

SEQ ID NO: 113725 - DNA, 25 bp, Canis familiaris
gaaatgccatttcagcacccataac

SEQ ID NO: 113726 - DNA, 25 bp, Canis familiaris
gaaatcaatttcaaccaccatcaac

SEQ ID NO: 113727 - DNA, 25 bp, Canis familiaris
gaaatcgtgtgtaacacccagcaca

SEQ ID NO: 113728 - DNA, 25 bp, Canis familiaris
gaaatcgtgcgtgacatcaaagaga

SEQ ID NO: 113729 - DNA, 25 bp, Canis familiaris
gaaatcgtgcgtgacatcaaagaga

SEQ ID NO: 113730 - DNA, 25 bp, Canis familiaris
gaaatcgagcgcctgaccagggaag

SEQ ID NO: 113731 - DNA, 25 bp, Canis familiaris
gaaatcaggacgtcactcatggggg

SEQ ID NO: 113732 - DNA, 25 bp, Canis familiaris
gaaatcggagcggctggcgggaaag

SEQ ID NO: 113733 - DNA, 25 bp, Canis familiaris
gacacggggcggagagggaagggat

SEQ ID NO: 113734 - DNA, 25 bp, Canis familiaris
gagacgggtgagatttcggaactgg

SEQ ID NO: 113735 - DNA, 25 bp, Canis familiaris
gacaatctaaggatttctggtacga

SEQ ID NO: 113736 - DNA, 25 bp, Canis familiaris
gacaactttggtatcgtggaaggac

SEQ ID NO: 113737 - DNA, 25 bp, Canis familiaris
gacaactttggcattgtggaagggc

SEQ ID NO: 113738 - DNA, 25 bp, Canis familiaris
gatccagtattgcacttggtagggt

SEQ ID NO: 113739 - DNA, 25 bp, Canis familiaris
gacacatgtcaaaaccggggggaag

SEQ ID NO: 113740 - DNA, 25 bp, Canis familiaris
gacaaacactaaacgggtttatcag

SEQ ID NO: 113741 - DNA, 25 bp, Canis familiaris
gacaacaccgtaaccgtttgtatgg

SEQ ID NO: 113742 - DNA, 25 bp, Canis familiaris
gacaactctcagaaacccttatttt

SEQ ID NO: 113743 - DNA, 25 bp, Canis familiaris
gacaacgccaggaacacactgtatc

SEQ ID NO: 113744 - DNA, 25 bp, Canis familiaris
gaaatctctatcctaaactatatcc

SEQ ID NO: 113745 - DNA, 25 bp, Canis familiaris
gaaattttcagcagtcagaatatcc

SEQ ID NO: 113746 - DNA, 25 bp, Canis familiaris
gaaatttctgcagattcagtgattt

SEQ ID NO: 113747 - DNA, 25 bp, Canis familiaris
gaaatctatgactttgtcaggaatt

SEQ ID NO: 113748 - DNA, 25 bp, Canis familiaris
gaaatcctgccattggcaacaacat

SEQ ID NO: 113749 - DNA, 25 bp, Canis familiaris
gaaatcctgccatttatgccaacat

SEQ ID NO: 113750 - DNA, 25 bp, Canis familiaris
gacacttgtccattctacacaaatt

SEQ ID NO: 113751 - DNA, 25 bp, Canis familiaris
gacacgagacctctacaaaaattct

SEQ ID NO: 113752 - DNA, 25 bp, Canis familiaris
gacacaagacaaggtgacaagaagc

SEQ ID NO: 113753 - DNA, 25 bp, Canis familiaris
gacaaaacaaagctaatggactcac

SEQ ID NO: 113754 - DNA, 25 bp, Canis familiaris
gacgaacaagaacaccaacacacac

SEQ ID NO: 113755 - DNA, 25 bp, Canis familiaris
gacaaaccgaagcactgtccagacc

SEQ ID NO: 113756 - DNA, 25 bp, Canis familiaris
gaaatcaccgattgcccttgtcaac

SEQ ID NO: 113757 - DNA, 25 bp, Canis familiaris
gaaatgcttacttgcactctttcta

SEQ ID NO: 113758 - DNA, 25 bp, Canis familiaris
gaaatctgtccgttactttctggtc

SEQ ID NO: 113759 - DNA, 25 bp, Canis familiaris
gaaatcgctccgactactatgactc

SEQ ID NO: 113760 - DNA, 25 bp, Canis familiaris
gaaatcacccagaggcatatgcagc

SEQ ID NO: 113761 - DNA, 25 bp, Canis familiaris
gaaatcaggctcttggacattcagt

SEQ ID NO: 113762 - DNA, 25 bp, Canis familiaris
gaaatcatggtgttgggggcgcttg

SEQ ID NO: 113763 - DNA, 25 bp, Canis familiaris
gacaacaggggaatggggcagcgtt

SEQ ID NO: 113764 - DNA, 25 bp, Canis familiaris
gacaacaaggtgcacacggccaggt

SEQ ID NO: 113765 - DNA, 25 bp, Canis familiaris
gacaacgaggttgacttccaggagt

SEQ ID NO: 113766 - DNA, 25 bp, Canis familiaris
gacaacaggtttgacctgcggccgt

SEQ ID NO: 113767 - DNA, 25 bp, Canis familiaris
gacaagaggtttcagccagtgcatg

SEQ ID NO: 113768 - DNA, 25 bp, Canis familiaris
gacaatgaggccatctatgacatct

SEQ ID NO: 113769 - DNA, 25 bp, Canis familiaris
gaaatcgcatccatgctgtactctc

SEQ ID NO: 113770 - DNA, 25 bp, Canis familiaris
gaaatgccatcaagtgggacttcac

SEQ ID NO: 113771 - DNA, 25 bp, Canis familiaris
gaaatgcccttgaagagagttcccc

SEQ ID NO: 113772 - DNA, 25 bp, Canis familiaris
gacaatcccttagaaaaccagcctg

SEQ ID NO: 113773 - DNA, 25 bp, Canis familiaris
gacaactggtgttcgcaaagactag

SEQ ID NO: 113774 - DNA, 25 bp, Canis familiaris
gacacacaggtccggacaagtccgt

SEQ ID NO: 113775 - DNA, 25 bp, Canis familiaris
gacactcaggtctgggaggtctttt

SEQ ID NO: 113776 - DNA, 25 bp, Canis familiaris
gacactagttcccagaggggttgat

SEQ ID NO: 113777 - DNA, 25 bp, Canis familiaris
gactcgaattcccagaacctttgac

SEQ ID NO: 113778 - DNA, 25 bp, Canis familiaris
gactcgcttagctcaaacctaaggc

SEQ ID NO: 113779 - DNA, 25 bp, Canis familiaris
gactcctagaccgacaacctggagc

SEQ ID NO: 113780 - DNA, 25 bp, Canis familiaris
gactcgaaaccagcaccacgaagac

SEQ ID NO: 113781 - DNA, 25 bp, Canis familiaris
gactaatagacctcagcctcaaaag

SEQ ID NO: 113782 - DNA, 25 bp, Canis familiaris
gaaattatgacctgagcccaaaccc

SEQ ID NO: 113783 - DNA, 25 bp, Canis familiaris
gaaatcaagtccaaaggccaaactt

SEQ ID NO: 113784 - DNA, 25 bp, Canis familiaris
gaaatcaacctatcagactgcaata

SEQ ID NO: 113785 - DNA, 25 bp, Canis familiaris
gaaatcaagcagtaacgtgcataga

SEQ ID NO: 113786 - DNA, 25 bp, Canis familiaris
gaaatacatcgctcaggtgctgcag

SEQ ID NO: 113787 - DNA, 25 bp, Canis familiaris
gacaaacacagctaaggctctgttg

SEQ ID NO: 113788 - DNA, 25 bp, Canis familiaris
gacaacaccacacaggcggtagtct

SEQ ID NO: 113789 - DNA, 25 bp, Canis familiaris
gacaatcccacgggactcttcagtt

SEQ ID NO: 113790 - DNA, 25 bp, Canis familiaris
gacaatcccacgggactcttcagtt

SEQ ID NO: 113791 - DNA, 25 bp, Canis familiaris
gacaatcccacgggactcttcagtt

SEQ ID NO: 113792 - DNA, 25 bp, Canis familiaris
gaaatcctccaaagactctgtcagc

SEQ ID NO: 113793 - DNA, 25 bp, Canis familiaris
gaaataccataatatcttgtctact

SEQ ID NO: 113794 - DNA, 25 bp, Canis familiaris
gaaattcttctatatcctgtctgta

SEQ ID NO: 113795 - DNA, 25 bp, Canis familiaris
gaaattccacttttatgctttgtaa

SEQ ID NO: 113796 - DNA, 25 bp, Canis familiaris
gaaattacctcttttctttgtgtag

SEQ ID NO: 113797 - DNA, 25 bp, Canis familiaris
gaaatcataccttcatttcttccat

SEQ ID NO: 113798 - DNA, 25 bp, Canis familiaris
gaaataacctagattccttctcaaa

SEQ ID NO: 113799 - DNA, 25 bp, Canis familiaris
gacactagacctattttccttataa

SEQ ID NO: 113800 - DNA, 25 bp, Canis familiaris
gacaggtgtcctgtgtttcgtgttg

SEQ ID NO: 113801 - DNA, 25 bp, Canis familiaris
gacagagggctggtttttgccggtg

SEQ ID NO: 113802 - DNA, 25 bp, Canis familiaris
gacagggagggttttctccagagtc

SEQ ID NO: 113803 - DNA, 25 bp, Canis familiaris
gacacccaagggttcacccagaatc

SEQ ID NO: 113804 - DNA, 25 bp, Canis familiaris
gacacaacaacgggcttcaccgaac

SEQ ID NO: 113805 - DNA, 25 bp, Canis familiaris
gacacagaaagattgccttacccta

SEQ ID NO: 113806 - DNA, 25 bp, Canis familiaris
gacaagacataaacctgtgacctaa

SEQ ID NO: 113807 - DNA, 25 bp, Canis familiaris
gacaagacaggcaactctagtgtaa

SEQ ID NO: 113808 - DNA, 25 bp, Canis familiaris
gacaaatagtgtatctcgtggaatc

SEQ ID NO: 113809 - DNA, 25 bp, Canis familiaris
gaaatattcttcattctgctataac

SEQ ID NO: 113810 - DNA, 25 bp, Canis familiaris
gaaatatattttatctacatatgga

SEQ ID NO: 113811 - DNA, 25 bp, Canis familiaris
gaaataatttatcctctccaagaca

SEQ ID NO: 113812 - DNA, 25 bp, Canis familiaris
gacaataatggttctcttctagatg

SEQ ID NO: 113813 - DNA, 25 bp, Canis familiaris
gaaatccgtgatgctcggcatcctc

SEQ ID NO: 113814 - DNA, 25 bp, Canis familiaris
gacaattccttcccatgaattcgcc

SEQ ID NO: 113815 - DNA, 25 bp, Canis familiaris
gaaattcaattccacagacacagca

SEQ ID NO: 113816 - DNA, 25 bp, Canis familiaris
gaaattatagtggacaacagcaatc

SEQ ID NO: 113817 - DNA, 25 bp, Canis familiaris
gaaattatagtctacctcagcttgt

SEQ ID NO: 113818 - DNA, 25 bp, Canis familiaris
gaaatttcttgcttccttgaatgat

SEQ ID NO: 113819 - DNA, 25 bp, Canis familiaris
gaaattgtcctctttctgacacttc

SEQ ID NO: 113820 - DNA, 25 bp, Canis familiaris
gaaattactgtctctctaagcttct

SEQ ID NO: 113821 - DNA, 25 bp, Canis familiaris
gaaattacttccctctgagatctcc

SEQ ID NO: 113822 - DNA, 25 bp, Canis familiaris
gaaatcatcacatcacagtgtaact

SEQ ID NO: 113823 - DNA, 25 bp, Canis familiaris
gaaatacacacttcaatgtcaattt

SEQ ID NO: 113824 - DNA, 25 bp, Canis familiaris
gaaataatcctatatgtggcatcta

SEQ ID NO: 113825 - DNA, 25 bp, Canis familiaris
gaaataacctcgcagtcagcctgca

SEQ ID NO: 113826 - DNA, 25 bp, Canis familiaris
gaaataccaacatgaggatgcctga

SEQ ID NO: 113827 - DNA, 25 bp, Canis familiaris
gaaatttcaatctgagaaggcagca

SEQ ID NO: 113828 - DNA, 25 bp, Canis familiaris
gaaatctctcatacttaaactccaa

SEQ ID NO: 113829 - DNA, 25 bp, Canis familiaris
gaaatactctctataataccataat

SEQ ID NO: 113830 - DNA, 25 bp, Canis familiaris
gaaatattctttcacattctccttc

SEQ ID NO: 113831 - DNA, 25 bp, Canis familiaris
gaaatattatttactcctctccttc

SEQ ID NO: 113832 - DNA, 25 bp, Canis familiaris
gaaatatctttctcttatctgttat

SEQ ID NO: 113833 - DNA, 25 bp, Canis familiaris
gaaatatctttctcttatctgttat

SEQ ID NO: 113834 - DNA, 25 bp, Canis familiaris
gaaatatctttctcttatctgttat

SEQ ID NO: 113835 - DNA, 25 bp, Canis familiaris
gaaatatctttctcttatctgttat

SEQ ID NO: 113836 - DNA, 25 bp, Canis familiaris
gaaatatctttctcttatctgttat

SEQ ID NO: 113837 - DNA, 25 bp, Canis familiaris
gaaatatctttctcttatctgttat

SEQ ID NO: 113838 - DNA, 25 bp, Canis familiaris
gaaatatctttctcttatctgttat

SEQ ID NO: 113839 - DNA, 25 bp, Canis familiaris
gaaattgatttatcttttgatctga

SEQ ID NO: 113840 - DNA, 25 bp, Canis familiaris
gaaatactttatttcttcttatgaa

SEQ ID NO: 113841 - DNA, 25 bp, Canis familiaris
gaaatatgctgaattcttcttttat

SEQ ID NO: 113842 - DNA, 25 bp, Canis familiaris
gacaatatgtgaactcatttggact

SEQ ID NO: 113843 - DNA, 25 bp, Canis familiaris
gacaatgatggaactgttggcagct

SEQ ID NO: 113844 - DNA, 25 bp, Canis familiaris
gacaatcatggtttgctggtctcaa

SEQ ID NO: 113845 - DNA, 25 bp, Canis familiaris
gacaatcacagttcctctgttgctc

SEQ ID NO: 113846 - DNA, 25 bp, Canis familiaris
gacacacacacatactttccttgtt

SEQ ID NO: 113847 - DNA, 25 bp, Canis familiaris
gaaatcatcaagcattttcctcctt

SEQ ID NO: 113848 - DNA, 25 bp, Canis familiaris
gaaatatcacgattcttacccactg

SEQ ID NO: 113849 - DNA, 25 bp, Canis familiaris
gaaatttcgacaatatccccacata

SEQ ID NO: 113850 - DNA, 25 bp, Canis familiaris
gacaatatttatcaatccgcaccat

SEQ ID NO: 113851 - DNA, 25 bp, Canis familiaris
gaaatctttctgaatgatccagcca

SEQ ID NO: 113852 - DNA, 25 bp, Canis familiaris
gaaatctttctttgaactggtcttt

SEQ ID NO: 113853 - DNA, 25 bp, Canis familiaris
gaaattattgtttgtacatggtaca

SEQ ID NO: 113854 - DNA, 25 bp, Canis familiaris
gaaattctggacagtaagaggacaa

SEQ ID NO: 113855 - DNA, 25 bp, Canis familiaris
gaaatctctggaagcccaagcggac

SEQ ID NO: 113856 - DNA, 25 bp, Canis familiaris
gacagtccggaccccaaaggacatg

SEQ ID NO: 113857 - DNA, 25 bp, Canis familiaris
gacaacgcggactacgtgtacgacg

SEQ ID NO: 113858 - DNA, 25 bp, Canis familiaris
gacacagggacaaacgcttaccacg

SEQ ID NO: 113859 - DNA, 25 bp, Canis familiaris
gacacagggacaaacgcttaccacg

SEQ ID NO: 113860 - DNA, 25 bp, Canis familiaris
gactcaagtaaaacgcaggactccg

SEQ ID NO: 113861 - DNA, 25 bp, Canis familiaris
gacaacgtccaaatagggcttccag

SEQ ID NO: 113862 - DNA, 25 bp, Canis familiaris
gactacgacgtttaagtttctcagt

SEQ ID NO: 113863 - DNA, 25 bp, Canis familiaris
gacaaaatctgttttagtttccatg

SEQ ID NO: 113864 - DNA, 25 bp, Canis familiaris
gacaaacactatttctaggtagctt

SEQ ID NO: 113865 - DNA, 25 bp, Canis familiaris
gacaaacagttagttgaggttcttt

SEQ ID NO: 113866 - DNA, 25 bp, Canis familiaris
gaaattcattcaactagaggtttta

SEQ ID NO: 113867 - DNA, 25 bp, Canis familiaris
gaaattctcttcattcaggctattt

SEQ ID NO: 113868 - DNA, 25 bp, Canis familiaris
gaaatctcctgatgcttcatagctt

SEQ ID NO: 113869 - DNA, 25 bp, Canis familiaris
gaaatctcacagcagcttcagctgc

SEQ ID NO: 113870 - DNA, 25 bp, Canis familiaris
gacaattacaggacctcactgtgca

SEQ ID NO: 113871 - DNA, 25 bp, Canis familiaris
gacaattcctggaaggaggtcaaca

SEQ ID NO: 113872 - DNA, 25 bp, Canis familiaris
gacaagtccctaaaattatcaccaa

SEQ ID NO: 113873 - DNA, 25 bp, Canis familiaris
gacaacacccggaaatttggtcaat

SEQ ID NO: 113874 - DNA, 25 bp, Canis familiaris
gacaaccacctggatgacattcgga

SEQ ID NO: 113875 - DNA, 25 bp, Canis familiaris
gacaaggacgtgggacaccagtgac

SEQ ID NO: 113876 - DNA, 25 bp, Canis familiaris
gacacagggaggaggcaccatcttg

SEQ ID NO: 113877 - DNA, 25 bp, Canis familiaris
gacaagaaacagaggcccagtagac

SEQ ID NO: 113878 - DNA, 25 bp, Canis familiaris
gacaaacaaagaattcaccctatac

SEQ ID NO: 113879 - DNA, 25 bp, Canis familiaris
gaaatacaggaaatctcccagaaag

SEQ ID NO: 113880 - DNA, 25 bp, Canis familiaris
gaaataagtgaatgtccatcaataa

SEQ ID NO: 113881 - DNA, 25 bp, Canis familiaris
gaaataggcttacgcatccatgatt

SEQ ID NO: 113882 - DNA, 25 bp, Canis familiaris
gacacaacagcgacagcagctcaaa

SEQ ID NO: 113883 - DNA, 25 bp, Canis familiaris
gacacatacataaatgcccatgatt

SEQ ID NO: 113884 - DNA, 25 bp, Canis familiaris
gacaagacattacacctgttcaggc

SEQ ID NO: 113885 - DNA, 25 bp, Canis familiaris
gacacaaattccaaactggtcagtg

SEQ ID NO: 113886 - DNA, 25 bp, Canis familiaris
gaaattgctttccagactcttactg

SEQ ID NO: 113887 - DNA, 25 bp, Canis familiaris
gaaattttcacctgccatgtgactg

SEQ ID NO: 113888 - DNA, 25 bp, Canis familiaris
gacaacgcctctgcattccagggcg

SEQ ID NO: 113889 - DNA, 25 bp, Canis familiaris
gacaagcagactgcgcatgtctccg

SEQ ID NO: 113890 - DNA, 25 bp, Canis familiaris
gacaagaagcaggcgtaccggtccg

SEQ ID NO: 113891 - DNA, 25 bp, Canis familiaris
gacaatgatggacgggacgggaccc

SEQ ID NO: 113892 - DNA, 25 bp, Canis familiaris
gacaaggggcagacggcgaggaccc

SEQ ID NO: 113893 - DNA, 25 bp, Canis familiaris
gacacgggaggagtcgggggtcaca

SEQ ID NO: 113894 - DNA, 25 bp, Canis familiaris
gacacgtggaccgtcaggaacgtac

SEQ ID NO: 113895 - DNA, 25 bp, Canis familiaris
gacacagtgcccgtgtcggagccgc

SEQ ID NO: 113896 - DNA, 25 bp, Canis familiaris
gacacagctatgacccattgaggcc

SEQ ID NO: 113897 - DNA, 25 bp, Canis familiaris
gacaatcaggcttccactgaggcac

SEQ ID NO: 113898 - DNA, 25 bp, Canis familiaris
gacaaagtgccagcctgaggcatac

SEQ ID NO: 113899 - DNA, 25 bp, Canis familiaris
gaaataatctctgcctcattatccc

SEQ ID NO: 113900 - DNA, 25 bp, Canis familiaris
gaaataattcattcttcttacccaa

SEQ ID NO: 113901 - DNA, 25 bp, Canis familiaris
gaaatacatttctttaaaggccaat

SEQ ID NO: 113902 - DNA, 25 bp, Canis familiaris
gaaatcacagttttgaagaaagtca

SEQ ID NO: 113903 - DNA, 25 bp, Canis familiaris
gacaaagctgataacgcaaacaagt

SEQ ID NO: 113904 - DNA, 25 bp, Canis familiaris
gacaataccatcaacctgatccaca

SEQ ID NO: 113905 - DNA, 25 bp, Canis familiaris
gacaatcaccacgaggtatacctct

SEQ ID NO: 113906 - DNA, 25 bp, Canis familiaris
gacaagaccggttgtatatcctccc

SEQ ID NO: 113907 - DNA, 25 bp, Canis familiaris
gacaatgcacatatttggattcctc

SEQ ID NO: 113908 - DNA, 25 bp, Canis familiaris
gacaatcctgatcacaaatcgactc

SEQ ID NO: 113909 - DNA, 25 bp, Canis familiaris
gacaattcgcatatatacttgcacc

SEQ ID NO: 113910 - DNA, 25 bp, Canis familiaris
gaaatatcactttatatcagtcaaa

SEQ ID NO: 113911 - DNA, 25 bp, Canis familiaris
gaaattgccgtgttcacaccaaaag

SEQ ID NO: 113912 - DNA, 25 bp, Canis familiaris
gaaattggggttagcaagcaagagc

SEQ ID NO: 113913 - DNA, 25 bp, Canis familiaris
gaaattgtgccgtttgggataacat

SEQ ID NO: 113914 - DNA, 25 bp, Canis familiaris
gaaattgtggttttggaaactctgg

SEQ ID NO: 113915 - DNA, 25 bp, Canis familiaris
gaaatttggtcaatggcccaactct

SEQ ID NO: 113916 - DNA, 25 bp, Canis familiaris
gacactattagtttgcagccggatt

SEQ ID NO: 113917 - DNA, 25 bp, Canis familiaris
gacaccctatggataccggtctttc

SEQ ID NO: 113918 - DNA, 25 bp, Canis familiaris
gacaccctcaatgctagggggtgtt

SEQ ID NO: 113919 - DNA, 25 bp, Canis familiaris
gacacggtaattgcgaggtgccttt

SEQ ID NO: 113920 - DNA, 25 bp, Canis familiaris
gacaacaacaacatcaagggctctt

SEQ ID NO: 113921 - DNA, 25 bp, Canis familiaris
gacaacccccagaagagggctgcca

SEQ ID NO: 113922 - DNA, 25 bp, Canis familiaris
gacaagtacccggaagtcgtgcacc

SEQ ID NO: 113923 - DNA, 25 bp, Canis familiaris
gacaattaccttcacaggcggaggc

SEQ ID NO: 113924 - DNA, 25 bp, Canis familiaris
gaaattaccttcggagtgtgcgcag

SEQ ID NO: 113925 - DNA, 25 bp, Canis familiaris
gacaaccagcgttcggatgtttctt

SEQ ID NO: 113926 - DNA, 25 bp, Canis familiaris
gacactccaggtgcttgattttgtg

SEQ ID NO: 113927 - DNA, 25 bp, Canis familiaris
gacatcagtagttccctaatttggc

SEQ ID NO: 113928 - DNA, 25 bp, Canis familiaris
gacacgtatgcttcccaaaaactag

SEQ ID NO: 113929 - DNA, 25 bp, Canis familiaris
gacaagatgttacccaaaaccacag

SEQ ID NO: 113930 - DNA, 25 bp, Canis familiaris
gacagcgagtaccccaaaaacatca

SEQ ID NO: 113931 - DNA, 25 bp, Canis familiaris
gacacgacccgatccagataataca

SEQ ID NO: 113932 - DNA, 25 bp, Canis familiaris
gacagggccccaaggcaaaaaccag

SEQ ID NO: 113933 - DNA, 25 bp, Canis familiaris
gacaactgaccctggagacaaaaca

SEQ ID NO: 113934 - DNA, 25 bp, Canis familiaris
gacaaccactctgcgggcaaagaac

SEQ ID NO: 113935 - DNA, 25 bp, Canis familiaris
gacaacgacttggatgggattctga

SEQ ID NO: 113936 - DNA, 25 bp, Canis familiaris
gacaccgtcactggacggattcagg

SEQ ID NO: 113937 - DNA, 25 bp, Canis familiaris
gacaaggatgcgagaagggatggga

SEQ ID NO: 113938 - DNA, 25 bp, Canis familiaris
gacaagcaacttcatcattggcatg

SEQ ID NO: 113939 - DNA, 25 bp, Canis familiaris
gacacaagacctccatcaagacatg

SEQ ID NO: 113940 - DNA, 25 bp, Canis familiaris
gaaattcatcctgctacagagagag

SEQ ID NO: 113941 - DNA, 25 bp, Canis familiaris
gaaattctcccaggagcaagaggag

SEQ ID NO: 113942 - DNA, 25 bp, Canis familiaris
gacaacactcccctcagattgagga

SEQ ID NO: 113943 - DNA, 25 bp, Canis familiaris
gaaattctctgcaagctcagcttgg

SEQ ID NO: 113944 - DNA, 25 bp, Canis familiaris
gaaatatcactgagcacgttgttta

SEQ ID NO: 113945 - DNA, 25 bp, Canis familiaris
gaaattgcctatggccagtttcttt

SEQ ID NO: 113946 - DNA, 25 bp, Canis familiaris
gaaatttctatttcagttcattaaa

SEQ ID NO: 113947 - DNA, 25 bp, Canis familiaris
gacaatgtcttactcatagttgatt

SEQ ID NO: 113948 - DNA, 25 bp, Canis familiaris
gacaatgtctattcttgttagtcaa

SEQ ID NO: 113949 - DNA, 25 bp, Canis familiaris
gacaatggcctctctttgggcatac

SEQ ID NO: 113950 - DNA, 25 bp, Canis familiaris
gacaatgaatccacttcctggcata

SEQ ID NO: 113951 - DNA, 25 bp, Canis familiaris
gacaatggacctgctttatatcatc

SEQ ID NO: 113952 - DNA, 25 bp, Canis familiaris
gacaaggatcctcttatttctgcat

SEQ ID NO: 113953 - DNA, 25 bp, Canis familiaris
gacaaggttctcagtggctttttca

SEQ ID NO: 113954 - DNA, 25 bp, Canis familiaris
gacaagcctatcaagcaggccttct

SEQ ID NO: 113955 - DNA, 25 bp, Canis familiaris
gacaagtctcatcatcaagccgtct

SEQ ID NO: 113956 - DNA, 25 bp, Canis familiaris
gacaaggtcatgcagcagaacctgg

SEQ ID NO: 113957 - DNA, 25 bp, Canis familiaris
gacaatcggcatcagagaaccggag

SEQ ID NO: 113958 - DNA, 25 bp, Canis familiaris
gacattctactggggaccctggaga

SEQ ID NO: 113959 - DNA, 25 bp, Canis familiaris
gacattattcacaggttccagggac

SEQ ID NO: 113960 - DNA, 25 bp, Canis familiaris
gacaaattctggggtattaaggacg

SEQ ID NO: 113961 - DNA, 25 bp, Canis familiaris
gaaatttccacgcaactaaagaaga

SEQ ID NO: 113962 - DNA, 25 bp, Canis familiaris
gaaattgtccagacaggactatata

SEQ ID NO: 113963 - DNA, 25 bp, Canis familiaris
gacacatttcgcagggacatcatta

SEQ ID NO: 113964 - DNA, 25 bp, Canis familiaris
gacaatgtccaggggaatctcttca

SEQ ID NO: 113965 - DNA, 25 bp, Canis familiaris
gacaggtcctggagagcatctccgc

SEQ ID NO: 113966 - DNA, 25 bp, Canis familiaris
gacaatgtcctagttgagagctatc

SEQ ID NO: 113967 - DNA, 25 bp, Canis familiaris
gacacagccgtattttactgtgcga

SEQ ID NO: 113968 - DNA, 25 bp, Canis familiaris
gacacagtactctttatactataga

SEQ ID NO: 113969 - DNA, 25 bp, Canis familiaris
gacaactcagtttttatccattcaa

SEQ ID NO: 113970 - DNA, 25 bp, Canis familiaris
gacaaccatttccaagtacttctca

SEQ ID NO: 113971 - DNA, 25 bp, Canis familiaris
gacaaacatttactgagtatctact

SEQ ID NO: 113972 - DNA, 25 bp, Canis familiaris
gacaagatatacacgtctatcccat

SEQ ID NO: 113973 - DNA, 25 bp, Canis familiaris
gacaaagtaaatatttcaggcatcc

SEQ ID NO: 113974 - DNA, 25 bp, Canis familiaris
gacaaagaaacaaacgacggcagcc

SEQ ID NO: 113975 - DNA, 25 bp, Canis familiaris
gacacagaaaaagaagcagggcccc

SEQ ID NO: 113976 - DNA, 25 bp, Canis familiaris
gacacaaccaaagcggggtggccgc

SEQ ID NO: 113977 - DNA, 25 bp, Canis familiaris
gacacacaccactagtcggggtgtg

SEQ ID NO: 113978 - DNA, 25 bp, Canis familiaris
gacactgactactgtccagggcatt

SEQ ID NO: 113979 - DNA, 25 bp, Canis familiaris
gacacgtgctttactcaaggctgac

SEQ ID NO: 113980 - DNA, 25 bp, Canis familiaris
tgacgaggttgtctacaccgaccaa

SEQ ID NO: 113981 - DNA, 25 bp, Canis familiaris
gacagttggggctaatcccaggcca

SEQ ID NO: 113982 - DNA, 25 bp, Canis familiaris
gactattcagggagtcgcaaatgcc

SEQ ID NO: 113983 - DNA, 25 bp, Canis familiaris
gaaattatgctggaagtctcaaata

SEQ ID NO: 113984 - DNA, 25 bp, Canis familiaris
gacaatttctggcattcatcacaag

SEQ ID NO: 113985 - DNA, 25 bp, Canis familiaris
gacatttgggcgataatttgaggga

SEQ ID NO: 113986 - DNA, 25 bp, Canis familiaris
gacacaagggagttaacaatgggga

SEQ ID NO: 113987 - DNA, 25 bp, Canis familiaris
gacaaatgggttgggccctggtgga

SEQ ID NO: 113988 - DNA, 25 bp, Canis familiaris
gacaagtggcgttcagccacccgag

SEQ ID NO: 113989 - DNA, 25 bp, Canis familiaris
gacaatctccaggacagatcaccca

SEQ ID NO: 113990 - DNA, 25 bp, Canis familiaris
gacaagtcacactacatgcactgcc

SEQ ID NO: 113991 - DNA, 25 bp, Canis familiaris
gacagcagtgcagcagtcgacatcc

SEQ ID NO: 113992 - DNA, 25 bp, Canis familiaris
gacacattgctgtagctctggacca

SEQ ID NO: 113993 - DNA, 25 bp, Canis familiaris
gacaaagcataaatcatggacacca

SEQ ID NO: 113994 - DNA, 25 bp, Canis familiaris
gacaatcacatgtatgaaaacctgc

SEQ ID NO: 113995 - DNA, 25 bp, Canis familiaris
gacaatcatagtacaaaccttccat

SEQ ID NO: 113996 - DNA, 25 bp, Canis familiaris
gacaactacagaacgaccttccatc

SEQ ID NO: 113997 - DNA, 25 bp, Canis familiaris
gacaagcgacagttcgacttccgct

SEQ ID NO: 113998 - DNA, 25 bp, Canis familiaris
gacacagcaaagctccagactcggt

SEQ ID NO: 113999 - DNA, 25 bp, Canis familiaris
gacacacaaacacgtcatgcacttg

SEQ ID NO: 114000 - DNA, 25 bp, Canis familiaris
gacacactgaaccaccttttagggg

SEQ ID NO: 114001 - DNA, 25 bp, Canis familiaris
gacaactgaactactttgcctgagg

SEQ ID NO: 114002 - DNA, 25 bp, Canis familiaris
gacaactgcctctactatttcgagt

SEQ ID NO: 114003 - DNA, 25 bp, Canis familiaris
gacaacaattctattcttcggcgca

SEQ ID NO: 114004 - DNA, 25 bp, Canis familiaris
gacaacacattgctttctgactgac

SEQ ID NO: 114005 - DNA, 25 bp, Canis familiaris
gacaacatgatgacttactctacta

SEQ ID NO: 114006 - DNA, 25 bp, Canis familiaris
gacaattatcatatggtctcactca

SEQ ID NO: 114007 - DNA, 25 bp, Canis familiaris
gacacataccatatgatcctctaga

SEQ ID NO: 114008 - DNA, 25 bp, Canis familiaris
gacaacaagctcaagaaatctaaga

SEQ ID NO: 114009 - DNA, 25 bp, Canis familiaris
gacacatcatcacccaaaatctata

SEQ ID NO: 114010 - DNA, 25 bp, Canis familiaris
gacaatcatcacaagaaactctgaa

SEQ ID NO: 114011 - DNA, 25 bp, Canis familiaris
gacacatctcctgggatcctgtaaa

SEQ ID NO: 114012 - DNA, 25 bp, Canis familiaris
gacagcttccgggagacgctgaaga

SEQ ID NO: 114013 - DNA, 25 bp, Canis familiaris
gacacctgtcgagaacctctaaggg

SEQ ID NO: 114014 - DNA, 25 bp, Canis familiaris
gacacctgatggtagagtcctttcg

SEQ ID NO: 114015 - DNA, 25 bp, Canis familiaris
gacaccagagtgtcgagaccgttgg

SEQ ID NO: 114016 - DNA, 25 bp, Canis familiaris
gacacttcagtaaaccttgcttgga

SEQ ID NO: 114017 - DNA, 25 bp, Canis familiaris
gacaatgctagcaagaacgcttctg

SEQ ID NO: 114018 - DNA, 25 bp, Canis familiaris
gacaatatatgattaatccttttcc

SEQ ID NO: 114019 - DNA, 25 bp, Canis familiaris
gacaatttttcgtccatattttcaa

SEQ ID NO: 114020 - DNA, 25 bp, Canis familiaris
gacagaagtcttgccctttaacatc

SEQ ID NO: 114021 - DNA, 25 bp, Canis familiaris
gactccagtcaaccgtttctgtaac

SEQ ID NO: 114022 - DNA, 25 bp, Canis familiaris
gacacaagaaggagtttcataaaca

SEQ ID NO: 114023 - DNA, 25 bp, Canis familiaris
gacaacaaaccccatttatgaacac

SEQ ID NO: 114024 - DNA, 25 bp, Canis familiaris
gacaatccaagcgcttatttaccac

SEQ ID NO: 114025 - DNA, 25 bp, Canis familiaris
gacaatcagacgggcagttttagaa

SEQ ID NO: 114026 - DNA, 25 bp, Canis familiaris
gacaagctgcggagagtatcttcaa

SEQ ID NO: 114027 - DNA, 25 bp, Canis familiaris
gacacagtcaggttggttctgctcc

SEQ ID NO: 114028 - DNA, 25 bp, Canis familiaris
gacaatgccaggatgttttgcccag

SEQ ID NO: 114029 - DNA, 25 bp, Canis familiaris
gacaacgaggacaattctggcccca

SEQ ID NO: 114030 - DNA, 25 bp, Canis familiaris
gacaacggtatcatcaaggccttca

SEQ ID NO: 114031 - DNA, 25 bp, Canis familiaris
gacacaggggaaacacgtgacttat

SEQ ID NO: 114032 - DNA, 25 bp, Canis familiaris
gacacggggaagacgctcttcttct

SEQ ID NO: 114033 - DNA, 25 bp, Canis familiaris
gacacgggaatcgggtttcttcttg

SEQ ID NO: 114034 - DNA, 25 bp, Canis familiaris
gacatgccggaacccaggatttttt

SEQ ID NO: 114035 - DNA, 25 bp, Canis familiaris
gacaccctggattccacgggttttg

SEQ ID NO: 114036 - DNA, 25 bp, Canis familiaris
gacacggctggtacaacaaagtgct

SEQ ID NO: 114037 - DNA, 25 bp, Canis familiaris
gacactggagttaattctaaagcta

SEQ ID NO: 114038 - DNA, 25 bp, Canis familiaris
gacaatggagtcaaagttcaaagat

SEQ ID NO: 114039 - DNA, 25 bp, Canis familiaris
gaaattgcctctcagtgacaggaat

SEQ ID NO: 114040 - DNA, 25 bp, Canis familiaris
gacaaactttgtagtaagcgaacag

SEQ ID NO: 114041 - DNA, 25 bp, Canis familiaris
gacaatacactcaaactaacggcaa

SEQ ID NO: 114042 - DNA, 25 bp, Canis familiaris
gacacttgctctaaacgaaatggaa

SEQ ID NO: 114043 - DNA, 25 bp, Canis familiaris
gacagcttggctaaaatgatatgta

SEQ ID NO: 114044 - DNA, 25 bp, Canis familiaris
gacacttggtggtactgcattcttg

SEQ ID NO: 114045 - DNA, 25 bp, Canis familiaris
gaaattcgtggctaccatgtatcat

SEQ ID NO: 114046 - DNA, 25 bp, Canis familiaris
gaaattttctggacgatgctctcat

SEQ ID NO: 114047 - DNA, 25 bp, Canis familiaris
gagaatttacatctctggctcatcc

SEQ ID NO: 114048 - DNA, 25 bp, Canis familiaris
gacaattgttcagtgttcgtctcct

SEQ ID NO: 114049 - DNA, 25 bp, Canis familiaris
gaaattgttgattctttgtgtctgc

SEQ ID NO: 114050 - DNA, 25 bp, Canis familiaris
gaaatttttcacagtagcttggtta

SEQ ID NO: 114051 - DNA, 25 bp, Canis familiaris
gaaattctttccagtcatcttgtgt

SEQ ID NO: 114052 - DNA, 25 bp, Canis familiaris
gaaattctgatgccctttctttgtt

SEQ ID NO: 114053 - DNA, 25 bp, Canis familiaris
gacacttagtgcagtcttcctttta

SEQ ID NO: 114054 - DNA, 25 bp, Canis familiaris
gacacttagaatctttccttatctc

SEQ ID NO: 114055 - DNA, 25 bp, Canis familiaris
gacacttggatacaattccgaatgc

SEQ ID NO: 114056 - DNA, 25 bp, Canis familiaris
gacacttggaatccctatttgccag

SEQ ID NO: 114057 - DNA, 25 bp, Canis familiaris
gacacttggagccatcctaggactt

SEQ ID NO: 114058 - DNA, 25 bp, Canis familiaris
gacaactggtgctcgtcacgatatg

SEQ ID NO: 114059 - DNA, 25 bp, Canis familiaris
gacaaatgacttgggtagcgtagca

SEQ ID NO: 114060 - DNA, 25 bp, Canis familiaris
gacacaatattcagtctatggtagc

SEQ ID NO: 114061 - DNA, 25 bp, Canis familiaris
gacacaatatactttctatagccct

SEQ ID NO: 114062 - DNA, 25 bp, Canis familiaris
gacaatgactagtctcttaaccctg

SEQ ID NO: 114063 - DNA, 25 bp, Canis familiaris
gacactactaatccattaaccatct

SEQ ID NO: 114064 - DNA, 25 bp, Canis familiaris
gacacattgcttatcggaaccacat

SEQ ID NO: 114065 - DNA, 25 bp, Canis familiaris
gacacaagttttagaccaaactgaa

SEQ ID NO: 114066 - DNA, 25 bp, Canis familiaris
gacagaagtagtagagaccgaggac

SEQ ID NO: 114067 - DNA, 25 bp, Canis familiaris
gacaaattcagtaagatcctaggat

SEQ ID NO: 114068 - DNA, 25 bp, Canis familiaris
gacaacgctcaggtaatcctcgtgg

SEQ ID NO: 114069 - DNA, 25 bp, Canis familiaris
gacacggccgtatattactgtgcga

SEQ ID NO: 114070 - DNA, 25 bp, Canis familiaris
gacatcccggtcacatttgattgag

SEQ ID NO: 114071 - DNA, 25 bp, Canis familiaris
gacaacactcgtcactttttagtcg

SEQ ID NO: 114072 - DNA, 25 bp, Canis familiaris
gacaatgcctggagacatttttggt

SEQ ID NO: 114073 - DNA, 25 bp, Canis familiaris
gacaatcctctgagagtgtttgccc

SEQ ID NO: 114074 - DNA, 25 bp, Canis familiaris
gacaacctggccgaggacatcatgc

SEQ ID NO: 114075 - DNA, 25 bp, Canis familiaris
gacaacctggacaaggctctgggcc

SEQ ID NO: 114076 - DNA, 25 bp, Canis familiaris
gacaccctggccagagacaggtggg

SEQ ID NO: 114077 - DNA, 25 bp, Canis familiaris
gacacacccctaagtacaaggttgt

SEQ ID NO: 114078 - DNA, 25 bp, Canis familiaris
gacaagcccctacgaatgtggtttt

SEQ ID NO: 114079 - DNA, 25 bp, Canis familiaris
gacaagactccggcagaagtgtggc

SEQ ID NO: 114080 - DNA, 25 bp, Canis familiaris
gacactgagaccgagcggttgctgt

SEQ ID NO: 114081 - DNA, 25 bp, Canis familiaris
gacactaaaggacagtttgacaaaa

SEQ ID NO: 114082 - DNA, 25 bp, Canis familiaris
gacacaaaggaccaggtctggacaa

SEQ ID NO: 114083 - DNA, 25 bp, Canis familiaris
gacaccgagaagccagagcctgagc

SEQ ID NO: 114084 - DNA, 25 bp, Canis familiaris
gacactgcgactttgtgaagctgag

SEQ ID NO: 114085 - DNA, 25 bp, Canis familiaris
gacacaggactgtttatctcgacca

SEQ ID NO: 114086 - DNA, 25 bp, Canis familiaris
gacaagagcagtcgtgcatctccgt

SEQ ID NO: 114087 - DNA, 25 bp, Canis familiaris
gacagcatgcagctggctatcgtcg

SEQ ID NO: 114088 - DNA, 25 bp, Canis familiaris
gacagctgtgggacattctgactta

SEQ ID NO: 114089 - DNA, 25 bp, Canis familiaris
gacagcatagggcaacaacattaca

SEQ ID NO: 114090 - DNA, 25 bp, Canis familiaris
gacacacaggagcccaaaatctgta

SEQ ID NO: 114091 - DNA, 25 bp, Canis familiaris
gacagccagttggtgctgcaaaatt

SEQ ID NO: 114092 - DNA, 25 bp, Canis familiaris
gacagccatggctgctgctaaggct

SEQ ID NO: 114093 - DNA, 25 bp, Canis familiaris
gacacacatgtctgcgttactcatg

SEQ ID NO: 114094 - DNA, 25 bp, Canis familiaris
gacaataatcattcaggtactatgc

SEQ ID NO: 114095 - DNA, 25 bp, Canis familiaris
gacacataagctttggtcaccaggt

SEQ ID NO: 114096 - DNA, 25 bp, Canis familiaris
gacactggggcttgtgtccgggatc

SEQ ID NO: 114097 - DNA, 25 bp, Canis familiaris
gacagctggagtaacgttccgtgct

SEQ ID NO: 114098 - DNA, 25 bp, Canis familiaris
gacatgttttggacggtcagggtgt

SEQ ID NO: 114099 - DNA, 25 bp, Canis familiaris
gacacttttgatttggtcacgtggc

SEQ ID NO: 114100 - DNA, 25 bp, Canis familiaris
gacagtaccagttttctggggagca

SEQ ID NO: 114101 - DNA, 25 bp, Canis familiaris
gacttcacctgtctgacttgaaggc

SEQ ID NO: 114102 - DNA, 25 bp, Canis familiaris
gagcggcgcgcgcgcgaataaaggc

SEQ ID NO: 114103 - DNA, 25 bp, Canis familiaris
gacagaccacagactgggtaaagtt

SEQ ID NO: 114104 - DNA, 25 bp, Canis familiaris
gacaagccaaacctttgaacattag

SEQ ID NO: 114105 - DNA, 25 bp, Canis familiaris
gacaagccaggctgtgctcataaat

SEQ ID NO: 114106 - DNA, 25 bp, Canis familiaris
gacaaccagagcctttcaaacattt

SEQ ID NO: 114107 - DNA, 25 bp, Canis familiaris
gacaaccaatggaataatagcacta

SEQ ID NO: 114108 - DNA, 25 bp, Canis familiaris
gacacaccaattctgacatctacaa

SEQ ID NO: 114109 - DNA, 25 bp, Canis familiaris
gacacactaacactttatgcccaat

SEQ ID NO: 114110 - DNA, 25 bp, Canis familiaris
gacaacgaacagcttttcaccatga

SEQ ID NO: 114111 - DNA, 25 bp, Canis familiaris
gacaccgaagtggtttgtgcacctc

SEQ ID NO: 114112 - DNA, 25 bp, Canis familiaris
gacacaaggagggtgcttgtgcccc

SEQ ID NO: 114113 - DNA, 25 bp, Canis familiaris
gacacagctaaggcgtgcttcgtca

SEQ ID NO: 114114 - DNA, 25 bp, Canis familiaris
gacaagctgtacggtcactgtgtga

SEQ ID NO: 114115 - DNA, 25 bp, Canis familiaris
gacaagggacagcagcacctggagc

SEQ ID NO: 114116 - DNA, 25 bp, Canis familiaris
gacaagggacagcagcacctggagc

SEQ ID NO: 114117 - DNA, 25 bp, Canis familiaris
gacagagtaaatcagaccatactgg

SEQ ID NO: 114118 - DNA, 25 bp, Canis familiaris
gacaaggcacttaatacacatttgg

SEQ ID NO: 114119 - DNA, 25 bp, Canis familiaris
gacaagactctgtagcatgaccacc

SEQ ID NO: 114120 - DNA, 25 bp, Canis familiaris
gacaatgaatttggctacagcaacc

SEQ ID NO: 114121 - DNA, 25 bp, Canis familiaris
gacaagtcattgttatcccataccc

SEQ ID NO: 114122 - DNA, 25 bp, Canis familiaris
gacaacttgtgtcatccaaagcaca

SEQ ID NO: 114123 - DNA, 25 bp, Canis familiaris
gacaacattttgaaccaacagccat

SEQ ID NO: 114124 - DNA, 25 bp, Canis familiaris
gacaaatcttctgaaaaggctcttg

SEQ ID NO: 114125 - DNA, 25 bp, Canis familiaris
gacaatatcccagatgcattaggtc

SEQ ID NO: 114126 - DNA, 25 bp, Canis familiaris
gacaattaccatatgatctcacttt

SEQ ID NO: 114127 - DNA, 25 bp, Canis familiaris
gacaagtaccatatggactgctcat

SEQ ID NO: 114128 - DNA, 25 bp, Canis familiaris
gacaactactatgaggatctgacac

SEQ ID NO: 114129 - DNA, 25 bp, Canis familiaris
gacaacatcctagcaggttctgaca

SEQ ID NO: 114130 - DNA, 25 bp, Canis familiaris
gacaacatcctggaagagtccgaca

SEQ ID NO: 114131 - DNA, 25 bp, Canis familiaris
gacatgacctgggacatgggccgag

SEQ ID NO: 114132 - DNA, 25 bp, Canis familiaris
gacaacacagaatgccacttgagac

SEQ ID NO: 114133 - DNA, 25 bp, Canis familiaris
gacaaatgggatggatcagctgtga

SEQ ID NO: 114134 - DNA, 25 bp, Canis familiaris
gacaacactggtgctcagcgtactt

SEQ ID NO: 114135 - DNA, 25 bp, Canis familiaris
gacaagcacatgggctgccctgggc

SEQ ID NO: 114136 - DNA, 25 bp, Canis familiaris
gacaagcctgataggtgccgggcgc

SEQ ID NO: 114137 - DNA, 25 bp, Canis familiaris
gacaagcccattctgaaggctggcc

SEQ ID NO: 114138 - DNA, 25 bp, Canis familiaris
gacaaccttatcttgagccgtgttc

SEQ ID NO: 114139 - DNA, 25 bp, Canis familiaris
gacaacacttgactgggactctttc

SEQ ID NO: 114140 - DNA, 25 bp, Canis familiaris
gacaaacttaggagcgcttaacttc

SEQ ID NO: 114141 - DNA, 25 bp, Canis familiaris
gacaaatatctacacggcaacacac

SEQ ID NO: 114142 - DNA, 25 bp, Canis familiaris
gacaaaatatatcacaggcccaggg

SEQ ID NO: 114143 - DNA, 25 bp, Canis familiaris
gacaggcttatctgggtagccaggg

SEQ ID NO: 114144 - DNA, 25 bp, Canis familiaris
gacaggcattgtaagcggcttcggg

SEQ ID NO: 114145 - DNA, 25 bp, Canis familiaris
gacagagttaaaggtgcaagcaggg

SEQ ID NO: 114146 - DNA, 25 bp, Canis familiaris
gacacgtgtatttcttcacgacgga

SEQ ID NO: 114147 - DNA, 25 bp, Canis familiaris
gacactgttctgctcgtagtattgg

SEQ ID NO: 114148 - DNA, 25 bp, Canis familiaris
gacacttctgatatcagggtttggg

SEQ ID NO: 114149 - DNA, 25 bp, Canis familiaris
gacactttgagtcagtgtgcatttc

SEQ ID NO: 114150 - DNA, 25 bp, Canis familiaris
gacacttcaagactacagtgaaccc

SEQ ID NO: 114151 - DNA, 25 bp, Canis familiaris
gacacattgcactgaacaagaccca

SEQ ID NO: 114152 - DNA, 25 bp, Canis familiaris
gacactgtgtgttgcatgaagtagg

SEQ ID NO: 114153 - DNA, 25 bp, Canis familiaris
gacacatgcctaggtagagccagag

SEQ ID NO: 114154 - DNA, 25 bp, Canis familiaris
gacacaggcagagggagaagcaggt

SEQ ID NO: 114155 - DNA, 25 bp, Canis familiaris
gacaagccaaaggactctgcagcag

SEQ ID NO: 114156 - DNA, 25 bp, Canis familiaris
gacaagcgagacgccctgagcaagt

SEQ ID NO: 114157 - DNA, 25 bp, Canis familiaris
gacaagaacagaggcccagagacgt

SEQ ID NO: 114158 - DNA, 25 bp, Canis familiaris
gacaagtccaactacacagtggcag

SEQ ID NO: 114159 - DNA, 25 bp, Canis familiaris
gacaaggctatctttcacgggaact

SEQ ID NO: 114160 - DNA, 25 bp, Canis familiaris
gacaaggtctttactgggtgtattt

SEQ ID NO: 114161 - DNA, 25 bp, Canis familiaris
gacaagtctgagatgtgctggggtt

SEQ ID NO: 114162 - DNA, 25 bp, Canis familiaris
gacacactggagtttttgctggttt

SEQ ID NO: 114163 - DNA, 25 bp, Canis familiaris
gacaagcggggtcgaatctgaactt

SEQ ID NO: 114164 - DNA, 25 bp, Canis familiaris
gacaaagtgggatgccatgcgaatc

SEQ ID NO: 114165 - DNA, 25 bp, Canis familiaris
gacacacaggcgtacagctttggta

SEQ ID NO: 114166 - DNA, 25 bp, Canis familiaris
gacacaggctcgtatagctgctggc

SEQ ID NO: 114167 - DNA, 25 bp, Canis familiaris
gacacatgagtctgaactatgcaca

SEQ ID NO: 114168 - DNA, 25 bp, Canis familiaris
gacaatgcatgcgtcaatactggca

SEQ ID NO: 114169 - DNA, 25 bp, Canis familiaris
gacaacatgttcaatggctccagca

SEQ ID NO: 114170 - DNA, 25 bp, Canis familiaris
gacaactgtgtgaatacatccccac

SEQ ID NO: 114171 - DNA, 25 bp, Canis familiaris
gacacgtggataatgcacgccccac

SEQ ID NO: 114172 - DNA, 25 bp, Canis familiaris
gacaagtgccaaatccagcacgaat

SEQ ID NO: 114173 - DNA, 25 bp, Canis familiaris
gacacaggctgcaagaccacaggta

SEQ ID NO: 114174 - DNA, 25 bp, Canis familiaris
gacactggcagaagctctcaagttc

SEQ ID NO: 114175 - DNA, 25 bp, Canis familiaris
gacaatgtacatatcttagttttta

SEQ ID NO: 114176 - DNA, 25 bp, Canis familiaris
gacattggatacagtgggattttct

SEQ ID NO: 114177 - DNA, 25 bp, Canis familiaris
gacttggaacgggagtggggtgcag

SEQ ID NO: 114178 - DNA, 25 bp, Canis familiaris
gacgaaaaggggctgcaggccgcag

SEQ ID NO: 114179 - DNA, 25 bp, Canis familiaris
gacgggacggggatgggtccagtgg

SEQ ID NO: 114180 - DNA, 25 bp, Canis familiaris
gacgagacgggcagttgggacgggc

SEQ ID NO: 114181 - DNA, 25 bp, Canis familiaris
gacaagccggacattctgggaaggg

SEQ ID NO: 114182 - DNA, 25 bp, Canis familiaris
gacaaggtggaacatgctggggagg

SEQ ID NO: 114183 - DNA, 25 bp, Canis familiaris
gactcggtggagtgtgcgactacag

SEQ ID NO: 114184 - DNA, 25 bp, Canis familiaris
gacatcagatggggtgggctaaacg

SEQ ID NO: 114185 - DNA, 25 bp, Canis familiaris
gacacagagtatagatggccatcta

SEQ ID NO: 114186 - DNA, 25 bp, Canis familiaris
gacagaggtacaggtgaatcatcac

SEQ ID NO: 114187 - DNA, 25 bp, Canis familiaris
gacaactttcatgtgagcattccaa

SEQ ID NO: 114188 - DNA, 25 bp, Canis familiaris
gacaagctggaagatgtgcattcaa

SEQ ID NO: 114189 - DNA, 25 bp, Canis familiaris
gacacagggcaatatggcattaaca

SEQ ID NO: 114190 - DNA, 25 bp, Canis familiaris
gacacaggaagaaatggaggcaaca

SEQ ID NO: 114191 - DNA, 25 bp, Canis familiaris
gacaaggacatgtacctggacaaca

SEQ ID NO: 114192 - DNA, 25 bp, Canis familiaris
gacaagtcagaaaccatggaaacag

SEQ ID NO: 114193 - DNA, 25 bp, Canis familiaris
gacacaggcaaaacaatgcaaacct

SEQ ID NO: 114194 - DNA, 25 bp, Canis familiaris
gacacacacgaaacacaaaagcact

SEQ ID NO: 114195 - DNA, 25 bp, Canis familiaris
gacacaactgagtggcttaaaccgc

SEQ ID NO: 114196 - DNA, 25 bp, Canis familiaris
gacaacaaagctcagtgtagaaaag

SEQ ID NO: 114197 - DNA, 25 bp, Canis familiaris
gacaagcataagcgggaaatctacg

SEQ ID NO: 114198 - DNA, 25 bp, Canis familiaris
gacacagaaatggtggggaacccga

SEQ ID NO: 114199 - DNA, 25 bp, Canis familiaris
gacacaacatcaggtctcggaaccc

SEQ ID NO: 114200 - DNA, 25 bp, Canis familiaris
gacaaatcagcaggcgacggagcaa

SEQ ID NO: 114201 - DNA, 25 bp, Canis familiaris
gacacgcctgcaggagacaaggaac

SEQ ID NO: 114202 - DNA, 25 bp, Canis familiaris
gacacagccgaggcaaacaggcact

SEQ ID NO: 114203 - DNA, 25 bp, Canis familiaris
gacaagtccctgcaagaggcatgtt

SEQ ID NO: 114204 - DNA, 25 bp, Canis familiaris
gacacttacccatggcagtgcagtt

SEQ ID NO: 114205 - DNA, 25 bp, Canis familiaris
gacacgaacctatgaaatggtgcta

SEQ ID NO: 114206 - DNA, 25 bp, Canis familiaris
gacaagaatccatcaaaatcctaga

SEQ ID NO: 114207 - DNA, 25 bp, Canis familiaris
gacacgaagggctataaatcccatg

SEQ ID NO: 114208 - DNA, 25 bp, Canis familiaris
gatacgagaaggcaggaacaggatg

SEQ ID NO: 114209 - DNA, 25 bp, Canis familiaris
gacacggggctgcaggaacacaatc

SEQ ID NO: 114210 - DNA, 25 bp, Canis familiaris
gacacgttgtatcgcgtttcaagac

SEQ ID NO: 114211 - DNA, 25 bp, Canis familiaris
gacacttgattatctttgctattac

SEQ ID NO: 114212 - DNA, 25 bp, Canis familiaris
gacacatcgcttaccttgtggttcc

SEQ ID NO: 114213 - DNA, 25 bp, Canis familiaris
gacactgcagctatttatcatggtt

SEQ ID NO: 114214 - DNA, 25 bp, Canis familiaris
gacagcaatgctgtttcactggtta

SEQ ID NO: 114215 - DNA, 25 bp, Canis familiaris
gacagcagcagtgatagctcctcag

SEQ ID NO: 114216 - DNA, 25 bp, Canis familiaris
gacactatggagttgctcctgaaag

SEQ ID NO: 114217 - DNA, 25 bp, Canis familiaris
gacacaaggaggacattctgataaa

SEQ ID NO: 114218 - DNA, 25 bp, Canis familiaris
gacacagattgggcacttcgtacac

SEQ ID NO: 114219 - DNA, 25 bp, Canis familiaris
gacacagttgggtctatttctgcca

SEQ ID NO: 114220 - DNA, 25 bp, Canis familiaris
gacaatggtgtggattcttttgcac

SEQ ID NO: 114221 - DNA, 25 bp, Canis familiaris
gacacactgtgtgttcatttgctgt

SEQ ID NO: 114222 - DNA, 25 bp, Canis familiaris
gacaactgttgcaatgccaattttt

SEQ ID NO: 114223 - DNA, 25 bp, Canis familiaris
gacaagctttccaaaatcaatttta

SEQ ID NO: 114224 - DNA, 25 bp, Canis familiaris
gacaagttgacaaaaagcagctggt

SEQ ID NO: 114225 - DNA, 25 bp, Canis familiaris
gacacgttcttggaacacatgtgcc

SEQ ID NO: 114226 - DNA, 25 bp, Canis familiaris
gacaagttattggaactatgactaa

SEQ ID NO: 114227 - DNA, 25 bp, Canis familiaris
gacaaggtggatgaactgatggctg

SEQ ID NO: 114228 - DNA, 25 bp, Canis familiaris
gacaaggtggtggacaagattgatg

SEQ ID NO: 114229 - DNA, 25 bp, Canis familiaris
gacacagcgggacatgcaggtactc

SEQ ID NO: 114230 - DNA, 25 bp, Canis familiaris
gacacccggacaatgctggcgcttc

SEQ ID NO: 114231 - DNA, 25 bp, Canis familiaris
gacacctgctggctagcgaggttca

SEQ ID NO: 114232 - DNA, 25 bp, Canis familiaris
gacactcctgtgggtgggtgggtag

SEQ ID NO: 114233 - DNA, 25 bp, Canis familiaris
gacacaagctctggggttctgggtc

SEQ ID NO: 114234 - DNA, 25 bp, Canis familiaris
gacaacgcactcgtggtgtcgaggg

SEQ ID NO: 114235 - DNA, 25 bp, Canis familiaris
gacaagacatccggtgggagctggg

SEQ ID NO: 114236 - DNA, 25 bp, Canis familiaris
gacaagcacgcggaggaggtgcgga

SEQ ID NO: 114237 - DNA, 25 bp, Canis familiaris
gacatccgcacgaaggagcagatcg

SEQ ID NO: 114238 - DNA, 25 bp, Canis familiaris
gacaaagacggagctgcgcatcagc

SEQ ID NO: 114239 - DNA, 25 bp, Canis familiaris
gacaaggacaaagtctgctgcatcc

SEQ ID NO: 114240 - DNA, 25 bp, Canis familiaris
gacactgagcaccaactggtcatac

SEQ ID NO: 114241 - DNA, 25 bp, Canis familiaris
gacagtagacagtaacttcaagctt

SEQ ID NO: 114242 - DNA, 25 bp, Canis familiaris
gacactcaacagttccttgatactt

SEQ ID NO: 114243 - DNA, 25 bp, Canis familiaris
gacactctccagtcatggtattcat

SEQ ID NO: 114244 - DNA, 25 bp, Canis familiaris
gacaaaccagcattttattttacca

SEQ ID NO: 114245 - DNA, 25 bp, Canis familiaris
gacaaaccagcactgtaattatagc

SEQ ID NO: 114246 - DNA, 25 bp, Canis familiaris
gacaagtccatgtgtttctacagct

SEQ ID NO: 114247 - DNA, 25 bp, Canis familiaris
gacaaccacagatcatttcatgaga

SEQ ID NO: 114248 - DNA, 25 bp, Canis familiaris
gacaactcactcaagattgtcagca

SEQ ID NO: 114249 - DNA, 25 bp, Canis familiaris
gacacttcactaccagtgcatgcag

SEQ ID NO: 114250 - DNA, 25 bp, Canis familiaris
gacagtggactaccgaatcgtcgtc

SEQ ID NO: 114251 - DNA, 25 bp, Canis familiaris
gacacaggcaaaccggacggtgttc

SEQ ID NO: 114252 - DNA, 25 bp, Canis familiaris
gacaacagcaaggcctggacggtgc

SEQ ID NO: 114253 - DNA, 25 bp, Canis familiaris
gacaagatgagggccacgaaggtgg

SEQ ID NO: 114254 - DNA, 25 bp, Canis familiaris
gagccaaagaccccaggggctggtc

SEQ ID NO: 114255 - DNA, 25 bp, Canis familiaris
gacacaaacccacaggcacctgtgt

SEQ ID NO: 114256 - DNA, 25 bp, Canis familiaris
gacacttactaccaacacaactgtt

SEQ ID NO: 114257 - DNA, 25 bp, Canis familiaris
gacacaataacacaacaccatcttt

SEQ ID NO: 114258 - DNA, 25 bp, Canis familiaris
gacaaagacagcattgacccaatct

SEQ ID NO: 114259 - DNA, 25 bp, Canis familiaris
gacaaacacagagagacccacggag

SEQ ID NO: 114260 - DNA, 25 bp, Canis familiaris
gacaagaaatacaaccctacctggc

SEQ ID NO: 114261 - DNA, 25 bp, Canis familiaris
gacagaaagaacaacccagagccat

SEQ ID NO: 114262 - DNA, 25 bp, Canis familiaris
gacaaacaagaattccctgatccag

SEQ ID NO: 114263 - DNA, 25 bp, Canis familiaris
gacaaccatatcaactcctatgatc

SEQ ID NO: 114264 - DNA, 25 bp, Canis familiaris
gacacagagctaatgccatcctatg

SEQ ID NO: 114265 - DNA, 25 bp, Canis familiaris
gacacagctataatcaatgcagaag

SEQ ID NO: 114266 - DNA, 25 bp, Canis familiaris
gacacacatctgcacatatgcacat

SEQ ID NO: 114267 - DNA, 25 bp, Canis familiaris
gacaacactaatcagcatatcctac

SEQ ID NO: 114268 - DNA, 25 bp, Canis familiaris
gacaaattgattaatgccttgctac

SEQ ID NO: 114269 - DNA, 25 bp, Canis familiaris
gacaactttgtcaagctcatttcct

SEQ ID NO: 114270 - DNA, 25 bp, Canis familiaris
gacaactagatggaacattagatcc

SEQ ID NO: 114271 - DNA, 25 bp, Canis familiaris
gacaagccgtaaaattggatccatt

SEQ ID NO: 114272 - DNA, 25 bp, Canis familiaris
gacaggacagtttagttggagcgct

SEQ ID NO: 114273 - DNA, 25 bp, Canis familiaris
gacagtcccctatctgtgtaggtta

SEQ ID NO: 114274 - DNA, 25 bp, Canis familiaris
gacacatccctcaatgacttggtgg

SEQ ID NO: 114275 - DNA, 25 bp, Canis familiaris
gacacatggccacaggtctgggatg

SEQ ID NO: 114276 - DNA, 25 bp, Canis familiaris
gacactgcagcccttggggaggatg

SEQ ID NO: 114277 - DNA, 25 bp, Canis familiaris
gacacacagccacataggaaggcgt

SEQ ID NO: 114278 - DNA, 25 bp, Canis familiaris
gacagtgagcgacagggcaaggccc

SEQ ID NO: 114279 - DNA, 25 bp, Canis familiaris
gacaagcaggatgaggagcagaggc

SEQ ID NO: 114280 - DNA, 25 bp, Canis familiaris
gacacagtacatgatgctggagcag

SEQ ID NO: 114281 - DNA, 25 bp, Canis familiaris
gacacaagacatgtccatcagcatg

SEQ ID NO: 114282 - DNA, 25 bp, Canis familiaris
gacacagagacacgccagcatgata

SEQ ID NO: 114283 - DNA, 25 bp, Canis familiaris
gacactagactggcaccatgcaaca

SEQ ID NO: 114284 - DNA, 25 bp, Canis familiaris
gacactgagagtgccacttacagga

SEQ ID NO: 114285 - DNA, 25 bp, Canis familiaris
gacactcgtgagactgacttacagg

SEQ ID NO: 114286 - DNA, 25 bp, Canis familiaris
gacaccctctactatgctatgaagg

SEQ ID NO: 114287 - DNA, 25 bp, Canis familiaris
gacacatcctcaatctagttctagc

SEQ ID NO: 114288 - DNA, 25 bp, Canis familiaris
gacaactccctcaagattgtcagca

SEQ ID NO: 114289 - DNA, 25 bp, Canis familiaris
gacaaccagcctggagtgctgatcc

SEQ ID NO: 114290 - DNA, 25 bp, Canis familiaris
gacaaatacctggcaattgctcctc

SEQ ID NO: 114291 - DNA, 25 bp, Canis familiaris
gacaaagcaccagtcaattgcttat

SEQ ID NO: 114292 - DNA, 25 bp, Canis familiaris
gacacaacccagacgatcctggtct

SEQ ID NO: 114293 - DNA, 25 bp, Canis familiaris
gacacatacccagggtgccttgtcc

SEQ ID NO: 114294 - DNA, 25 bp, Canis familiaris
gacagaacctcagagtcctgtcctc

SEQ ID NO: 114295 - DNA, 25 bp, Canis familiaris
gacaaaccatgagaccctgagctct

SEQ ID NO: 114296 - DNA, 25 bp, Canis familiaris
gacaccctcagagacccatagagat

SEQ ID NO: 114297 - DNA, 25 bp, Canis familiaris
gacacgtcacgaacgccaatggaga

SEQ ID NO: 114298 - DNA, 25 bp, Canis familiaris
gacacgggccagatgcaccggcaga

SEQ ID NO: 114299 - DNA, 25 bp, Canis familiaris
gacacaatgacctgtacctggcaga

SEQ ID NO: 114300 - DNA, 25 bp, Canis familiaris
gacacagcatgaccacttacttggg

SEQ ID NO: 114301 - DNA, 25 bp, Canis familiaris
gacacttggccactatcgttggtgt

SEQ ID NO: 114302 - DNA, 25 bp, Canis familiaris
gacacagggccagacattgcgggtg

SEQ ID NO: 114303 - DNA, 25 bp, Canis familiaris
gacacagtcccatacacaggaaatt

SEQ ID NO: 114304 - DNA, 25 bp, Canis familiaris
gacacagacctacaacattgaagat

SEQ ID NO: 114305 - DNA, 25 bp, Canis familiaris
gacacagcacctaccaaaagtggaa

SEQ ID NO: 114306 - DNA, 25 bp, Canis familiaris
gacacacagtcctcaaaggtggaac

SEQ ID NO: 114307 - DNA, 25 bp, Canis familiaris
gacacccccagggacaggtggactc

SEQ ID NO: 114308 - DNA, 25 bp, Canis familiaris
gacaccccctgcagaaagtgtcctg

SEQ ID NO: 114309 - DNA, 25 bp, Canis familiaris
gacaccaccaagtgggagtggctgg

SEQ ID NO: 114310 - DNA, 25 bp, Canis familiaris
gacaccagcaaacagggggctctgc

SEQ ID NO: 114311 - DNA, 25 bp, Canis familiaris
gacacaaccagtcaggaggtccagc

SEQ ID NO: 114312 - DNA, 25 bp, Canis familiaris
gacaaactctgtaaggaggttccca

SEQ ID NO: 114313 - DNA, 25 bp, Canis familiaris
gacaacatcacctttgtgaggctct

SEQ ID NO: 114314 - DNA, 25 bp, Canis familiaris
gacaagctcggttttgagcagccag

SEQ ID NO: 114315 - DNA, 25 bp, Canis familiaris
gacacagtcaggcattgctggagga

SEQ ID NO: 114316 - DNA, 25 bp, Canis familiaris
gacacgtggtgatggatggatggaa

SEQ ID NO: 114317 - DNA, 25 bp, Canis familiaris
gacactgtccgccgtaggatgatga

SEQ ID NO: 114318 - DNA, 25 bp, Canis familiaris
gacacgaccgcgcgtgatatatcca

SEQ ID NO: 114319 - DNA, 25 bp, Canis familiaris
gacaaatcctgtatgatttcactca

SEQ ID NO: 114320 - DNA, 25 bp, Canis familiaris
gacaaatccttgggtttcattcact

SEQ ID NO: 114321 - DNA, 25 bp, Canis familiaris
gacgaactcattgaattcttttccc

SEQ ID NO: 114322 - DNA, 25 bp, Canis familiaris
gacataggtagatactttttcccca

SEQ ID NO: 114323 - DNA, 25 bp, Canis familiaris
gacaggagtagctgctttttagcaa

SEQ ID NO: 114324 - DNA, 25 bp, Canis familiaris
gacatgggccacttgttgctatgtt

SEQ ID NO: 114325 - DNA, 25 bp, Canis familiaris
gacagaagaccttgcttgcatgtac

SEQ ID NO: 114326 - DNA, 25 bp, Canis familiaris
gacagcaaattccatcgtgtgatca

SEQ ID NO: 114327 - DNA, 25 bp, Canis familiaris
gacacatgaaaccctgagtcacgct

SEQ ID NO: 114328 - DNA, 25 bp, Canis familiaris
gacacaggacattccagagaccagc

SEQ ID NO: 114329 - DNA, 25 bp, Canis familiaris
gacagacaacagagcagaaccagat

SEQ ID NO: 114330 - DNA, 25 bp, Canis familiaris
gacagacacaagatgaccacgctca

SEQ ID NO: 114331 - DNA, 25 bp, Canis familiaris
gacagacatgcacagtcaccagcag

SEQ ID NO: 114332 - DNA, 25 bp, Canis familiaris
gacacacacatcgtgatccaacagc

SEQ ID NO: 114333 - DNA, 25 bp, Canis familiaris
gacaacctcatttcaaacaggcatt

SEQ ID NO: 114334 - DNA, 25 bp, Canis familiaris
gacaacactttgcaacacatcacat

SEQ ID NO: 114335 - DNA, 25 bp, Canis familiaris
gacacatccttgtatgaaaccctaa

SEQ ID NO: 114336 - DNA, 25 bp, Canis familiaris
gacacagtgtttaaagaccgtaaga

SEQ ID NO: 114337 - DNA, 25 bp, Canis familiaris
gacagcatgttttgcaaaagcggta

SEQ ID NO: 114338 - DNA, 25 bp, Canis familiaris
gacactgtgtcaacaacaacgttcc

SEQ ID NO: 114339 - DNA, 25 bp, Canis familiaris
gacacctgaaagccaaaggtatcga

SEQ ID NO: 114340 - DNA, 25 bp, Canis familiaris
gacacctagccatcacacaggttgc

SEQ ID NO: 114341 - DNA, 25 bp, Canis familiaris
gacaaccattatgacatcggtctgc

SEQ ID NO: 114342 - DNA, 25 bp, Canis familiaris
gacaacctctatgacatgatggtgc

SEQ ID NO: 114343 - DNA, 25 bp, Canis familiaris
gacaagccagtagctcatgttgtag

SEQ ID NO: 114344 - DNA, 25 bp, Canis familiaris
gacactgccagcaccatatgtaaag

SEQ ID NO: 114345 - DNA, 25 bp, Canis familiaris
gacagcatccttgaatatgtaaaag

SEQ ID NO: 114346 - DNA, 25 bp, Canis familiaris
gacagcatccttgaatatgtaaaag

SEQ ID NO: 114347 - DNA, 25 bp, Canis familiaris
gacacagcacttgagactttcaaaa

SEQ ID NO: 114348 - DNA, 25 bp, Canis familiaris
gacacagcacagccaaagttccgaa

SEQ ID NO: 114349 - DNA, 25 bp, Canis familiaris
gacaaacagccagtaatctcacaaa

SEQ ID NO: 114350 - DNA, 25 bp, Canis familiaris
gacacaatctgccaaaactcacaag

SEQ ID NO: 114351 - DNA, 25 bp, Canis familiaris
gacacaccctgataactcaaggtaa

SEQ ID NO: 114352 - DNA, 25 bp, Canis familiaris
gacgtccgtgaatttcaaagttaga

SEQ ID NO: 114353 - DNA, 25 bp, Canis familiaris
gacgaccctttactcagaacttggg

SEQ ID NO: 114354 - DNA, 25 bp, Canis familiaris
gacaaccctctgaaggaagaccccg

SEQ ID NO: 114355 - DNA, 25 bp, Canis familiaris
gacaactcacctccaaaagaaacgc

SEQ ID NO: 114356 - DNA, 25 bp, Canis familiaris
gacacggccactcaaaacaaccgag

SEQ ID NO: 114357 - DNA, 25 bp, Canis familiaris
gacaccaccagagaaacaaacctgt

SEQ ID NO: 114358 - DNA, 25 bp, Canis familiaris
gacaccaacggggtgtcgggtctgt

SEQ ID NO: 114359 - DNA, 25 bp, Canis familiaris
gacaccgacgattccgtcggggagt

SEQ ID NO: 114360 - DNA, 25 bp, Canis familiaris
gacaccgacggaaccggtgggactg

SEQ ID NO: 114361 - DNA, 25 bp, Canis familiaris
gacaacgacggaaccaggcatggga

SEQ ID NO: 114362 - DNA, 25 bp, Canis familiaris
gacaccaacatgggaccaggctggg

SEQ ID NO: 114363 - DNA, 25 bp, Canis familiaris
gacactcgtctgggaggcaggtggt

SEQ ID NO: 114364 - DNA, 25 bp, Canis familiaris
gacaccgatctttagccagagaact

SEQ ID NO: 114365 - DNA, 25 bp, Canis familiaris
gacaccgatctttagccagagaact

SEQ ID NO: 114366 - DNA, 25 bp, Canis familiaris
gacaccgatctttagccagagaact

SEQ ID NO: 114367 - DNA, 25 bp, Canis familiaris
gacaccgatctttagccagagaact

SEQ ID NO: 114368 - DNA, 25 bp, Canis familiaris
gacacagcggattgaacgcgagaag

SEQ ID NO: 114369 - DNA, 25 bp, Canis familiaris
gacaggagcgggagctgcggaaaag

SEQ ID NO: 114370 - DNA, 25 bp, Canis familiaris
gacacgatgggtcctctgggaagaa

SEQ ID NO: 114371 - DNA, 25 bp, Canis familiaris
gacacgagggatcctgttgcagtaa

SEQ ID NO: 114372 - DNA, 25 bp, Canis familiaris
gacacagagatcatcctgtccagct

SEQ ID NO: 114373 - DNA, 25 bp, Canis familiaris
gacacagagatcgactttcctgctg

SEQ ID NO: 114374 - DNA, 25 bp, Canis familiaris
gacacggttgtctttgctgagtgac

SEQ ID NO: 114375 - DNA, 25 bp, Canis familiaris
gacacgtgttcagtttgcttggagg

SEQ ID NO: 114376 - DNA, 25 bp, Canis familiaris
gacacagctgttgatcttggtgggt

SEQ ID NO: 114377 - DNA, 25 bp, Canis familiaris
gacacatctgttctgtgtcgctgcc

SEQ ID NO: 114378 - DNA, 25 bp, Canis familiaris
gacactgacttgtcatggtcgcagc

SEQ ID NO: 114379 - DNA, 25 bp, Canis familiaris
gacactgctcatagaaggatcacaa

SEQ ID NO: 114380 - DNA, 25 bp, Canis familiaris
gacacagtcaagggtagcacagatc

SEQ ID NO: 114381 - DNA, 25 bp, Canis familiaris
gacacttctctggagtaccagatgc

SEQ ID NO: 114382 - DNA, 25 bp, Canis familiaris
gacacttcttaggttctggtccttt

SEQ ID NO: 114383 - DNA, 25 bp, Canis familiaris
gacacatttgtcagtttgtagcctt

SEQ ID NO: 114384 - DNA, 25 bp, Canis familiaris
gacagctgttgtcttttgggtttcc

SEQ ID NO: 114385 - DNA, 25 bp, Canis familiaris
gacagtggttttgaactcctattac

SEQ ID NO: 114386 - DNA, 25 bp, Canis familiaris
gacaccgtctttgttttgtaagcac

SEQ ID NO: 114387 - DNA, 25 bp, Canis familiaris
gacaccgactttctgtacaattacc

SEQ ID NO: 114388 - DNA, 25 bp, Canis familiaris
gacacctacttatattgaccaattt

SEQ ID NO: 114389 - DNA, 25 bp, Canis familiaris
gacacctgcatagtatgtaccacca

SEQ ID NO: 114390 - DNA, 25 bp, Canis familiaris
gacacccatactggttaactcagtc

SEQ ID NO: 114391 - DNA, 25 bp, Canis familiaris
gacacaggcaaagtgcttccctagt

SEQ ID NO: 114392 - DNA, 25 bp, Canis familiaris
gacacagagcaaggctgctgcactc

SEQ ID NO: 114393 - DNA, 25 bp, Canis familiaris
gacacaagcaagggcacaccttcga

SEQ ID NO: 114394 - DNA, 25 bp, Canis familiaris
gacacaattgagtgccaactttaat

SEQ ID NO: 114395 - DNA, 25 bp, Canis familiaris
gacaaattgagtgccatttattggt

SEQ ID NO: 114396 - DNA, 25 bp, Canis familiaris
gacaaatgtttgtccttgtttgagg

SEQ ID NO: 114397 - DNA, 25 bp, Canis familiaris
gacaacatgtttgcacagtttcgga

SEQ ID NO: 114398 - DNA, 25 bp, Canis familiaris
gacacactgactagcatcacagctt

SEQ ID NO: 114399 - DNA, 25 bp, Canis familiaris
gacagcctgcagtatggccatgttc

SEQ ID NO: 114400 - DNA, 25 bp, Canis familiaris
gacatgcacgtgggtgtgctgctct

SEQ ID NO: 114401 - DNA, 25 bp, Canis familiaris
gacatccgggagagcttcaagaggc

SEQ ID NO: 114402 - DNA, 25 bp, Canis familiaris
gacacctgggcgagatcgacagagg

SEQ ID NO: 114403 - DNA, 25 bp, Canis familiaris
gacacactggatctgtagctacagg

SEQ ID NO: 114404 - DNA, 25 bp, Canis familiaris
gacagaccgatagaaccacagagaa

SEQ ID NO: 114405 - DNA, 25 bp, Canis familiaris
gacagacggacagacagacatgcaa

SEQ ID NO: 114406 - DNA, 25 bp, Canis familiaris
gacagacgcagatctaagagcccac

SEQ ID NO: 114407 - DNA, 25 bp, Canis familiaris
gacacaccaaacatgggcctgcagt

SEQ ID NO: 114408 - DNA, 25 bp, Canis familiaris
gacacacaccagtcagtgaggtcca

SEQ ID NO: 114409 - DNA, 25 bp, Canis familiaris
gacacacacacactacatagcgaac

SEQ ID NO: 114410 - DNA, 25 bp, Canis familiaris
gacaacatctcctactcaagaaggc

SEQ ID NO: 114411 - DNA, 25 bp, Canis familiaris
gacaaatccatctaccgcagaggtg

SEQ ID NO: 114412 - DNA, 25 bp, Canis familiaris
gacaaactctcttccagcaagatgg

SEQ ID NO: 114413 - DNA, 25 bp, Canis familiaris
gacaaaatcatcaacctgccagtgg

SEQ ID NO: 114414 - DNA, 25 bp, Canis familiaris
gacagaaaatctcccccaattgttg

SEQ ID NO: 114415 - DNA, 25 bp, Canis familiaris
gacagggaacttgccacttttttgc

SEQ ID NO: 114416 - DNA, 25 bp, Canis familiaris
gacagggcaacttgtcgcccttggt

SEQ ID NO: 114417 - DNA, 25 bp, Canis familiaris
gacagagaagacagacggccaggga

SEQ ID NO: 114418 - DNA, 25 bp, Canis familiaris
gacagaaacctcccgtggagcagaa

SEQ ID NO: 114419 - DNA, 25 bp, Canis familiaris
gacactcaacccaggggaatgatgc

SEQ ID NO: 114420 - DNA, 25 bp, Canis familiaris
gacagtcaaacccgggtgattaccg

SEQ ID NO: 114421 - DNA, 25 bp, Canis familiaris
gacaggccaaccaggagagcttgac

SEQ ID NO: 114422 - DNA, 25 bp, Canis familiaris
gacagtgagaaggccggagatcggg

SEQ ID NO: 114423 - DNA, 25 bp, Canis familiaris
gacagagcacggggggacaagagag

SEQ ID NO: 114424 - DNA, 25 bp, Canis familiaris
gacagcgatcggacggaatcggggt

SEQ ID NO: 114425 - DNA, 25 bp, Canis familiaris
gacaggtctggatatctacgaagga

SEQ ID NO: 114426 - DNA, 25 bp, Canis familiaris
gacagaagctgtgaactaccatgat

SEQ ID NO: 114427 - DNA, 25 bp, Canis familiaris
gacagaacctgaaagcatgacctgc

SEQ ID NO: 114428 - DNA, 25 bp, Canis familiaris
gacagaacctccaatgaacctagcc

SEQ ID NO: 114429 - DNA, 25 bp, Canis familiaris
gacaacaatcccagacgcactggcc

SEQ ID NO: 114430 - DNA, 25 bp, Canis familiaris
gacaaaactggcaaatctgacttcc

SEQ ID NO: 114431 - DNA, 25 bp, Canis familiaris
gacctggttggcaaattacttagct

SEQ ID NO: 114432 - DNA, 25 bp, Canis familiaris
gacacttgctatctaatttttaatc

SEQ ID NO: 114433 - DNA, 25 bp, Canis familiaris
gacacattgtccccaaattatttaa

SEQ ID NO: 114434 - DNA, 25 bp, Canis familiaris
gacactattctcagtaatttggggg

SEQ ID NO: 114435 - DNA, 25 bp, Canis familiaris
gacgctaacgaacgacttttggaat

SEQ ID NO: 114436 - DNA, 25 bp, Canis familiaris
gacactaccaagagtgctatttgga

SEQ ID NO: 114437 - DNA, 25 bp, Canis familiaris
gacacgtaccagaattcttcctgac

SEQ ID NO: 114438 - DNA, 25 bp, Canis familiaris
gactttacctgatttttgattacga

SEQ ID NO: 114439 - DNA, 25 bp, Canis familiaris
gactttcaagcggttttccaggcta

SEQ ID NO: 114440 - DNA, 25 bp, Canis familiaris
gacacatacccggattttccaggga

SEQ ID NO: 114441 - DNA, 25 bp, Canis familiaris
gacaaaccggcagttgttcttgggc

SEQ ID NO: 114442 - DNA, 25 bp, Canis familiaris
gacttaccgatggttattgccttcg

SEQ ID NO: 114443 - DNA, 25 bp, Canis familiaris
gactggactttggctgtttcctaag

SEQ ID NO: 114444 - DNA, 25 bp, Canis familiaris
gacaggatttgtctgctttccagtg

SEQ ID NO: 114445 - DNA, 25 bp, Canis familiaris
gacaaaatgctgacgtcttgtcagg

SEQ ID NO: 114446 - DNA, 25 bp, Canis familiaris
gacaaagagctgaccctctgtgact

SEQ ID NO: 114447 - DNA, 25 bp, Canis familiaris
gacagaagcctggtccatctaagct

SEQ ID NO: 114448 - DNA, 25 bp, Canis familiaris
gacagaaacttcagcattcacatta

SEQ ID NO: 114449 - DNA, 25 bp, Canis familiaris
gacagaaagcttatcttacaaaaag

SEQ ID NO: 114450 - DNA, 25 bp, Canis familiaris
gacactacttatgattctatacatc

SEQ ID NO: 114451 - DNA, 25 bp, Canis familiaris
gacactggtttggtaccatttccca

SEQ ID NO: 114452 - DNA, 25 bp, Canis familiaris
gacaccctttctcaacagtatacaa

SEQ ID NO: 114453 - DNA, 25 bp, Canis familiaris
gacagcatctgctttgtttacgtac

SEQ ID NO: 114454 - DNA, 25 bp, Canis familiaris
gacagttgcatttgccacttcgttt

SEQ ID NO: 114455 - DNA, 25 bp, Canis familiaris
gacgtcggtagtgcctgtgattgtg

SEQ ID NO: 114456 - DNA, 25 bp, Canis familiaris
gacagccggtggaacacgtatttca

SEQ ID NO: 114457 - DNA, 25 bp, Canis familiaris
gacagtagtgttcacacgtgacctt

SEQ ID NO: 114458 - DNA, 25 bp, Canis familiaris
gacacctattagcaccggatgctcc

SEQ ID NO: 114459 - DNA, 25 bp, Canis familiaris
gacacctttggccacattggcgtat

SEQ ID NO: 114460 - DNA, 25 bp, Canis familiaris
gacaccattctgtgaattagaccat

SEQ ID NO: 114461 - DNA, 25 bp, Canis familiaris
gacacgcagacctgaaagaacctgg

SEQ ID NO: 114462 - DNA, 25 bp, Canis familiaris
gacacccagcactgaaagtcctgct

SEQ ID NO: 114463 - DNA, 25 bp, Canis familiaris
gacacacttgccaagagaaaactgt

SEQ ID NO: 114464 - DNA, 25 bp, Canis familiaris
gacagacttgctagggaagaccagt

SEQ ID NO: 114465 - DNA, 25 bp, Canis familiaris
gacagaattttactgaacccactgc

SEQ ID NO: 114466 - DNA, 25 bp, Canis familiaris
gacagaacttatttgcaaaccatat

SEQ ID NO: 114467 - DNA, 25 bp, Canis familiaris
gacacaacttgtgaaagcagctcta

SEQ ID NO: 114468 - DNA, 25 bp, Canis familiaris
gacacaaggtggtaggcagcctcca

SEQ ID NO: 114469 - DNA, 25 bp, Canis familiaris
gacatcagggcatgttggagtcccc

SEQ ID NO: 114470 - DNA, 25 bp, Canis familiaris
gacatcaaggatatcgtaggaccca

SEQ ID NO: 114471 - DNA, 25 bp, Canis familiaris
gacatcaagaaccacgtgaactccc

SEQ ID NO: 114472 - DNA, 25 bp, Canis familiaris
gacaaagagtcgtccgactgtcccg

SEQ ID NO: 114473 - DNA, 25 bp, Canis familiaris
gacaaagattccaaaacttctcctg

SEQ ID NO: 114474 - DNA, 25 bp, Canis familiaris
gacaaaggtcaacctactctctgcc

SEQ ID NO: 114475 - DNA, 25 bp, Canis familiaris
gacattgggtatattatttagcaca

SEQ ID NO: 114476 - DNA, 25 bp, Canis familiaris
gacatgggatttggcttatttgatt

SEQ ID NO: 114477 - DNA, 25 bp, Canis familiaris
gacaaatttttgttatcattgcatt

SEQ ID NO: 114478 - DNA, 25 bp, Canis familiaris
gacaaatgtcatatgacctcattca

SEQ ID NO: 114479 - DNA, 25 bp, Canis familiaris
gacaaagctcaactgacgagttctc

SEQ ID NO: 114480 - DNA, 25 bp, Canis familiaris
gacacagagctgaagcaggtggctt

SEQ ID NO: 114481 - DNA, 25 bp, Canis familiaris
gacacagcatcacaggtgcggcttc

SEQ ID NO: 114482 - DNA, 25 bp, Canis familiaris
gacacagcatcacaggtcgtctgct

SEQ ID NO: 114483 - DNA, 25 bp, Canis familiaris
gacagctgccagaagtgtttcactg

SEQ ID NO: 114484 - DNA, 25 bp, Canis familiaris
gacagccacatttgctatttccatc

SEQ ID NO: 114485 - DNA, 25 bp, Canis familiaris
gagcagtacatacctaataccattt

SEQ ID NO: 114486 - DNA, 25 bp, Canis familiaris
gacacattctcagcttacaaatttg

SEQ ID NO: 114487 - DNA, 25 bp, Canis familiaris
gacacatttattatctcacagattt

SEQ ID NO: 114488 - DNA, 25 bp, Canis familiaris
gacaccttgaacgtcatcgagctca

SEQ ID NO: 114489 - DNA, 25 bp, Canis familiaris
gacacctgtgtctttgagcgcagta

SEQ ID NO: 114490 - DNA, 25 bp, Canis familiaris
gacacggtgcatgttgatgccctat

SEQ ID NO: 114491 - DNA, 25 bp, Canis familiaris
gacactggatggactggtcccttgg

SEQ ID NO: 114492 - DNA, 25 bp, Canis familiaris
gacactggatgagaggcgatccttg

SEQ ID NO: 114493 - DNA, 25 bp, Canis familiaris
gacagtagcagagagagccccatgg

SEQ ID NO: 114494 - DNA, 25 bp, Canis familiaris
gagcatgttgattggaggccctacg

SEQ ID NO: 114495 - DNA, 25 bp, Canis familiaris
gacagtggagtcctgaggccatacc

SEQ ID NO: 114496 - DNA, 25 bp, Canis familiaris
gacacagaggacctgagcgggacca

SEQ ID NO: 114497 - DNA, 25 bp, Canis familiaris
gacacataggaccagggtggaccag

SEQ ID NO: 114498 - DNA, 25 bp, Canis familiaris
gacacaactaccgggtgggcgagag

SEQ ID NO: 114499 - DNA, 25 bp, Canis familiaris
gacagacccgcagggaggggaagag

SEQ ID NO: 114500 - DNA, 25 bp, Canis familiaris
gacagctttcaggggaggggcaccc

SEQ ID NO: 114501 - DNA, 25 bp, Canis familiaris
gacacataccaccgagggaggactt

SEQ ID NO: 114502 - DNA, 25 bp, Canis familiaris
gacacagacgcggaggatggggcct

SEQ ID NO: 114503 - DNA, 25 bp, Canis familiaris
gacacagccggcttgctgtgggggt

SEQ ID NO: 114504 - DNA, 25 bp, Canis familiaris
gacacactggcctctgtgatgggtt

SEQ ID NO: 114505 - DNA, 25 bp, Canis familiaris
gacacacatgagccaccttggtggt

SEQ ID NO: 114506 - DNA, 25 bp, Canis familiaris
gacaaatggctagctctggtgcatc

SEQ ID NO: 114507 - DNA, 25 bp, Canis familiaris
gacagaaggcggtgtggtgctgcag

SEQ ID NO: 114508 - DNA, 25 bp, Canis familiaris
gacacgggcggagggagaggcaggc

SEQ ID NO: 114509 - DNA, 25 bp, Canis familiaris
gactcgggggaccaacaaacagcca

SEQ ID NO: 114510 - DNA, 25 bp, Canis familiaris
gacacggggaaataccacacacaga

SEQ ID NO: 114511 - DNA, 25 bp, Canis familiaris
gacgggggaacaacccgcagacgtg

SEQ ID NO: 114512 - DNA, 25 bp, Canis familiaris
gatcaggccagcggaaacccgctac

SEQ ID NO: 114513 - DNA, 25 bp, Canis familiaris
gacaggacagggtaagacctcccct

SEQ ID NO: 114514 - DNA, 25 bp, Canis familiaris
gacaggcaaaggtatcgtcctccac

SEQ ID NO: 114515 - DNA, 25 bp, Canis familiaris
gactgccaaacgattggcccaccaa

SEQ ID NO: 114516 - DNA, 25 bp, Canis familiaris
gacactcaaaaactttgcacaaggc

SEQ ID NO: 114517 - DNA, 25 bp, Canis familiaris
gacactaaagacatacctgcatacg

SEQ ID NO: 114518 - DNA, 25 bp, Canis familiaris
gacactaagctaaatgcacctctgg

SEQ ID NO: 114519 - DNA, 25 bp, Canis familiaris
gacacttacataaatgccagccctg

SEQ ID NO: 114520 - DNA, 25 bp, Canis familiaris
gacacactaatgagaccagctacgt

SEQ ID NO: 114521 - DNA, 25 bp, Canis familiaris
gacacagtcaatactgacacgtgcc

SEQ ID NO: 114522 - DNA, 25 bp, Canis familiaris
gacagctggatttctagactggcca

SEQ ID NO: 114523 - DNA, 25 bp, Canis familiaris
gacagggttgtcagcactgcttagg

SEQ ID NO: 114524 - DNA, 25 bp, Canis familiaris
gacagggttccaagccctgctacaa

SEQ ID NO: 114525 - DNA, 25 bp, Canis familiaris
gacagggtgacttaccctggtcacc

SEQ ID NO: 114526 - DNA, 25 bp, Canis familiaris
gacacagagtccatgacctcttgct

SEQ ID NO: 114527 - DNA, 25 bp, Canis familiaris
gacagcgactcgtagatccgcgtgt

SEQ ID NO: 114528 - DNA, 25 bp, Canis familiaris
gacagctaccaattagacacgtgtt

SEQ ID NO: 114529 - DNA, 25 bp, Canis familiaris
gacaggccgacagagaagcaggctt

SEQ ID NO: 114530 - DNA, 25 bp, Canis familiaris
gacaggctccctgacaggagcggga

SEQ ID NO: 114531 - DNA, 25 bp, Canis familiaris
gacacgttgacacacagaagggaga

SEQ ID NO: 114532 - DNA, 25 bp, Canis familiaris
gacacgatcccactgaaaagggtgg

SEQ ID NO: 114533 - DNA, 25 bp, Canis familiaris
gacactgggtcactagaacagggct

SEQ ID NO: 114534 - DNA, 25 bp, Canis familiaris
gacactccccacaatgaacataact

SEQ ID NO: 114535 - DNA, 25 bp, Canis familiaris
gacacaacccagtcatcagacatga

SEQ ID NO: 114536 - DNA, 25 bp, Canis familiaris
gacagaacggcgtcatgaagcatga

SEQ ID NO: 114537 - DNA, 25 bp, Canis familiaris
gacagcagtcagccaactcaagaga

SEQ ID NO: 114538 - DNA, 25 bp, Canis familiaris
gacaggtcgtggcctagaggaccca

SEQ ID NO: 114539 - DNA, 25 bp, Canis familiaris
gacacctcaggggtgacaggacctg

SEQ ID NO: 114540 - DNA, 25 bp, Canis familiaris
gacacccaggccatgaaggagatgc

SEQ ID NO: 114541 - DNA, 25 bp, Canis familiaris
gacacccagttcatcgatgagaacc

SEQ ID NO: 114542 - DNA, 25 bp, Canis familiaris
gacacctcgttcatggtggcagcgt

SEQ ID NO: 114543 - DNA, 25 bp, Canis familiaris
gacactacggtcctgttgatccgtc

SEQ ID NO: 114544 - DNA, 25 bp, Canis familiaris
gacagccacaggctggtgtgtccac

SEQ ID NO: 114545 - DNA, 25 bp, Canis familiaris
gacagcaaagtgaagacattgtacc

SEQ ID NO: 114546 - DNA, 25 bp, Canis familiaris
gacacagcatgggataacattttcc

SEQ ID NO: 114547 - DNA, 25 bp, Canis familiaris
gacacataggctggaaagatttcac

SEQ ID NO: 114548 - DNA, 25 bp, Canis familiaris
gacacaagcactgaatgacattaca

SEQ ID NO: 114549 - DNA, 25 bp, Canis familiaris
gacacggcactggagttgcttcaag

SEQ ID NO: 114550 - DNA, 25 bp, Canis familiaris
gacactgtgacgggtttggagcatg

SEQ ID NO: 114551 - DNA, 25 bp, Canis familiaris
gacacttgatggtttatgggcactg

SEQ ID NO: 114552 - DNA, 25 bp, Canis familiaris
gacactttggtcgtggaggacttca

SEQ ID NO: 114553 - DNA, 25 bp, Canis familiaris
gacacgtctagggatgagggccttc

SEQ ID NO: 114554 - DNA, 25 bp, Canis familiaris
gacacggtagtggctctggagcagt

SEQ ID NO: 114555 - DNA, 25 bp, Canis familiaris
gacagcaggtagacgtcgtggcgac

SEQ ID NO: 114556 - DNA, 25 bp, Canis familiaris
gacagggtagactgtgcatggcggt

SEQ ID NO: 114557 - DNA, 25 bp, Canis familiaris
gacgtccaaacatatcggatggttg

SEQ ID NO: 114558 - DNA, 25 bp, Canis familiaris
gacagggaaccagctgggtgggggc

SEQ ID NO: 114559 - DNA, 25 bp, Canis familiaris
gacagagtacatgccctgggaggcc

SEQ ID NO: 114560 - DNA, 25 bp, Canis familiaris
gacacgtgcacatgtccgtggtgga

SEQ ID NO: 114561 - DNA, 25 bp, Canis familiaris
gacacattacacctcctgtgttgaa

SEQ ID NO: 114562 - DNA, 25 bp, Canis familiaris
gacagattcacacagttgatgctcg

SEQ ID NO: 114563 - DNA, 25 bp, Canis familiaris
gacaggctgcagaccaggtattgcg

SEQ ID NO: 114564 - DNA, 25 bp, Canis familiaris
gacagcgatgcgccactgagtgttc

SEQ ID NO: 114565 - DNA, 25 bp, Canis familiaris
gacagagcagaggatcatgagtttt

SEQ ID NO: 114566 - DNA, 25 bp, Canis familiaris
gacagagaagcacaggtccgttcac

SEQ ID NO: 114567 - DNA, 25 bp, Canis familiaris
gacaggaagggaagaacatattctg

SEQ ID NO: 114568 - DNA, 25 bp, Canis familiaris
gacagccaagtggaagaccattgta

SEQ ID NO: 114569 - DNA, 25 bp, Canis familiaris
gacagccacgtagagtgattcggac

SEQ ID NO: 114570 - DNA, 25 bp, Canis familiaris
gacaccggttctttgatgtagttca

SEQ ID NO: 114571 - DNA, 25 bp, Canis familiaris
gacacttggtctccttaaatttcgg

SEQ ID NO: 114572 - DNA, 25 bp, Canis familiaris
gacactgggtcgcttagaaagtggt

SEQ ID NO: 114573 - DNA, 25 bp, Canis familiaris
gacactggtgcccggggaacaggag

SEQ ID NO: 114574 - DNA, 25 bp, Canis familiaris
gacagcattgctgtggggggggggt

SEQ ID NO: 114575 - DNA, 25 bp, Canis familiaris
gacacagctgctgtgggctcagtgt

SEQ ID NO: 114576 - DNA, 25 bp, Canis familiaris
gacacagagagcctggagtcagaga

SEQ ID NO: 114577 - DNA, 25 bp, Canis familiaris
gacacagagacctggatcagatccc

SEQ ID NO: 114578 - DNA, 25 bp, Canis familiaris
gacacagttcctagtggcagatagc

SEQ ID NO: 114579 - DNA, 25 bp, Canis familiaris
gacacaggtcagcctgctggacaac

SEQ ID NO: 114580 - DNA, 25 bp, Canis familiaris
gacacagggcagatgcacaggcaga

SEQ ID NO: 114581 - DNA, 25 bp, Canis familiaris
gacacgagtccttcatcaggatccc

SEQ ID NO: 114582 - DNA, 25 bp, Canis familiaris
gacacaggtcttccacgagatcctg

SEQ ID NO: 114583 - DNA, 25 bp, Canis familiaris
gacagcaggacttaactggctccag

SEQ ID NO: 114584 - DNA, 25 bp, Canis familiaris
gacaggccttgggactggatcttgt

SEQ ID NO: 114585 - DNA, 25 bp, Canis familiaris
gacaggcccattttggtttgctgct

SEQ ID NO: 114586 - DNA, 25 bp, Canis familiaris
gacagccactctcattagttacatg

SEQ ID NO: 114587 - DNA, 25 bp, Canis familiaris
gacagctcaaagttaaggttgcaga

SEQ ID NO: 114588 - DNA, 25 bp, Canis familiaris
gacatcagagaagaaaggttgctgg

SEQ ID NO: 114589 - DNA, 25 bp, Canis familiaris
gacacaggacaccagttgttttgca

SEQ ID NO: 114590 - DNA, 25 bp, Canis familiaris
gacacagagtcacctttttttacct

SEQ ID NO: 114591 - DNA, 25 bp, Canis familiaris
gacacgtccaatagttttgttactc

SEQ ID NO: 114592 - DNA, 25 bp, Canis familiaris
gacagcgttaaacttgttaatctct

SEQ ID NO: 114593 - DNA, 25 bp, Canis familiaris
gacactttctaacttgttttctctc

SEQ ID NO: 114594 - DNA, 25 bp, Canis familiaris
gacacctagctccagaatttttacc

SEQ ID NO: 114595 - DNA, 25 bp, Canis familiaris
gacacgtacatcgattgttttaaca

SEQ ID NO: 114596 - DNA, 25 bp, Canis familiaris
gacacgttcaccagttgtttgagag

SEQ ID NO: 114597 - DNA, 25 bp, Canis familiaris
gacatcagttcttccgaatttagta

SEQ ID NO: 114598 - DNA, 25 bp, Canis familiaris
gacagcagcttctcggaatgcatgt

SEQ ID NO: 114599 - DNA, 25 bp, Canis familiaris
gacacagtgccaccgggagatgtcc

SEQ ID NO: 114600 - DNA, 25 bp, Canis familiaris
gacacagctccgtgagagagagtgc

SEQ ID NO: 114601 - DNA, 25 bp, Canis familiaris
gacacgctccgccaagagaagacag

SEQ ID NO: 114602 - DNA, 25 bp, Canis familiaris
gacaccaatctgccataaaagccac

SEQ ID NO: 114603 - DNA, 25 bp, Canis familiaris
gacactgaatcaccataagcttaac

SEQ ID NO: 114604 - DNA, 25 bp, Canis familiaris
gacacagacatacagacaccttagc

SEQ ID NO: 114605 - DNA, 25 bp, Canis familiaris
gagcacagtagaactaatcacgtag

SEQ ID NO: 114606 - DNA, 25 bp, Canis familiaris
gacacgccagcatgataaacaatgg

SEQ ID NO: 114607 - DNA, 25 bp, Canis familiaris
gacactgatcctctgcaaatactgg

SEQ ID NO: 114608 - DNA, 25 bp, Canis familiaris
gacacattccttacagaataatgac

SEQ ID NO: 114609 - DNA, 25 bp, Canis familiaris
gacagagttcctaaccttcatgaat

SEQ ID NO: 114610 - DNA, 25 bp, Canis familiaris
gacagagttcctaaccttcatgaat

SEQ ID NO: 114611 - DNA, 25 bp, Canis familiaris
gacagagttcctaaccttcatgaat

SEQ ID NO: 114612 - DNA, 25 bp, Canis familiaris
gacacagttcactaaattcttgatt

SEQ ID NO: 114613 - DNA, 25 bp, Canis familiaris
gacacaggtcatctcagatcttagt

SEQ ID NO: 114614 - DNA, 25 bp, Canis familiaris
gacacagtgtgacagcgtctgtagt

SEQ ID NO: 114615 - DNA, 25 bp, Canis familiaris
gacagagtagacagcttcatgagga

SEQ ID NO: 114616 - DNA, 25 bp, Canis familiaris
gacagcgtgaacagctacgggagcc

SEQ ID NO: 114617 - DNA, 25 bp, Canis familiaris
gactgggaaaggtaaaggagcaaat

SEQ ID NO: 114618 - DNA, 25 bp, Canis familiaris
gactgtggtgaacgaacccgacgaa

SEQ ID NO: 114619 - DNA, 25 bp, Canis familiaris
gactctggtcaataactgaaaccca

SEQ ID NO: 114620 - DNA, 25 bp, Canis familiaris
gacacttctcaataatcataaactt

SEQ ID NO: 114621 - DNA, 25 bp, Canis familiaris
gacagacttctataatccaaatttt

SEQ ID NO: 114622 - DNA, 25 bp, Canis familiaris
gacaggttcggatttccaaagaaag

SEQ ID NO: 114623 - DNA, 25 bp, Canis familiaris
gacaggtggcggattccaacgagtg

SEQ ID NO: 114624 - DNA, 25 bp, Canis familiaris
gacaggaaggtcaagtccaccgtga

SEQ ID NO: 114625 - DNA, 25 bp, Canis familiaris
gacagcgggagctggtctgttcgga

SEQ ID NO: 114626 - DNA, 25 bp, Canis familiaris
gacagccagacctggtactacagga

SEQ ID NO: 114627 - DNA, 25 bp, Canis familiaris
gacagccttgccacagaaataaaaa

SEQ ID NO: 114628 - DNA, 25 bp, Canis familiaris
taaggcggcctacagagaaaaagaa

SEQ ID NO: 114629 - DNA, 25 bp, Canis familiaris
taaggtggacctcaggaatcccgaa

SEQ ID NO: 114630 - DNA, 25 bp, Canis familiaris
gacaggtggaaacttggactcccga

SEQ ID NO: 114631 - DNA, 25 bp, Canis familiaris
gacggccaaacatttctgacccggt

SEQ ID NO: 114632 - DNA, 25 bp, Canis familiaris
gacattctaaaatttccacttccct

SEQ ID NO: 114633 - DNA, 25 bp, Canis familiaris
gacatccgaagattcgaccctgttc

SEQ ID NO: 114634 - DNA, 25 bp, Canis familiaris
gacacgaaattgtgactcctttgga

SEQ ID NO: 114635 - DNA, 25 bp, Canis familiaris
tactagactacttaaccctattaag

SEQ ID NO: 114636 - DNA, 25 bp, Canis familiaris
gatctacactttcgtacctttcgat

SEQ ID NO: 114637 - DNA, 25 bp, Canis familiaris
gactaccgatggttatttgcttcgt

SEQ ID NO: 114638 - DNA, 25 bp, Canis familiaris
gacaccctatggtatgtttctacca

SEQ ID NO: 114639 - DNA, 25 bp, Canis familiaris
gacacctgtctgcttatttcataca

SEQ ID NO: 114640 - DNA, 25 bp, Canis familiaris
gacaccagtgtgtttgattttactc

SEQ ID NO: 114641 - DNA, 25 bp, Canis familiaris
gacactatcatgctctttatttact

SEQ ID NO: 114642 - DNA, 25 bp, Canis familiaris
gacactttgttctcatcattctgaa

SEQ ID NO: 114643 - DNA, 25 bp, Canis familiaris
gacactctatatttgtcttctctaa

SEQ ID NO: 114644 - DNA, 25 bp, Canis familiaris
gacacgcaacagtggtctctggaca

SEQ ID NO: 114645 - DNA, 25 bp, Canis familiaris
gacaggaggctgagcagctccggaa

SEQ ID NO: 114646 - DNA, 25 bp, Canis familiaris
gacagggcctcaaagccacaggtag

SEQ ID NO: 114647 - DNA, 25 bp, Canis familiaris
gacagggaccagcagaacagaggcg

SEQ ID NO: 114648 - DNA, 25 bp, Canis familiaris
gacagctgaccttgggttcagagtc

SEQ ID NO: 114649 - DNA, 25 bp, Canis familiaris
gacaccatgccttggggggaatctc

SEQ ID NO: 114650 - DNA, 25 bp, Canis familiaris
gacagcggggacggggagaactgct

SEQ ID NO: 114651 - DNA, 25 bp, Canis familiaris
gacactggggtcaaggggttcttct

SEQ ID NO: 114652 - DNA, 25 bp, Canis familiaris
gacactggggatcataggagctttg

SEQ ID NO: 114653 - DNA, 25 bp, Canis familiaris
gacacgggacattatgagctgtctt

SEQ ID NO: 114654 - DNA, 25 bp, Canis familiaris
gacacatctagaaaaagctgctcat

SEQ ID NO: 114655 - DNA, 25 bp, Canis familiaris
gacacatcactaatgcaaacccttc

SEQ ID NO: 114656 - DNA, 25 bp, Canis familiaris
gacactaaattcaacaccagttcaa

SEQ ID NO: 114657 - DNA, 25 bp, Canis familiaris
gactaaatgttcccccagtatatga

SEQ ID NO: 114658 - DNA, 25 bp, Canis familiaris
tactacgggaccttcacagttaacg

SEQ ID NO: 114659 - DNA, 25 bp, Canis familiaris
gactagcccggggtcagcagttaac

SEQ ID NO: 114660 - DNA, 25 bp, Canis familiaris
gactacccgtcgtcattcagggata

SEQ ID NO: 114661 - DNA, 25 bp, Canis familiaris
gacataccgctgtgtttgttggttc

SEQ ID NO: 114662 - DNA, 25 bp, Canis familiaris
gacatcaccacctgtgtttgtgttt

SEQ ID NO: 114663 - DNA, 25 bp, Canis familiaris
gacagcccactatattcatattttt

SEQ ID NO: 114664 - DNA, 25 bp, Canis familiaris
gacacctgactgcaaatatcttttt

SEQ ID NO: 114665 - DNA, 25 bp, Canis familiaris
gacagcactgggggtttttattatt

SEQ ID NO: 114666 - DNA, 25 bp, Canis familiaris
gacagagctggggtttggactttga

SEQ ID NO: 114667 - DNA, 25 bp, Canis familiaris
gacaggtctgacattggaagcttta

SEQ ID NO: 114668 - DNA, 25 bp, Canis familiaris
gacacgctggtaacagggactttca

SEQ ID NO: 114669 - DNA, 25 bp, Canis familiaris
gacacctggtctatggaactgtgcg

SEQ ID NO: 114670 - DNA, 25 bp, Canis familiaris
gacacctggtagatggatagtgctg

SEQ ID NO: 114671 - DNA, 25 bp, Canis familiaris
gacaccaggaagaggcacttgtgta

SEQ ID NO: 114672 - DNA, 25 bp, Canis familiaris
gacaccagtgacgcagagcgcgtgt

SEQ ID NO: 114673 - DNA, 25 bp, Canis familiaris
gacaccagtgacatccaaggagaag

SEQ ID NO: 114674 - DNA, 25 bp, Canis familiaris
gacgttggcctttccaggagaatgg

SEQ ID NO: 114675 - DNA, 25 bp, Canis familiaris
gacaggggtttctcagcagacaatg

SEQ ID NO: 114676 - DNA, 25 bp, Canis familiaris
gacatggggcttgcaggccacaaac

SEQ ID NO: 114677 - DNA, 25 bp, Canis familiaris
gacagagttattggcgatcacggaa

SEQ ID NO: 114678 - DNA, 25 bp, Canis familiaris
gacagagttttggttgcctgggact

SEQ ID NO: 114679 - DNA, 25 bp, Canis familiaris
gacagggtcttcatttgcgggaatg

SEQ ID NO: 114680 - DNA, 25 bp, Canis familiaris
gacagggttggccaatatggtgggt

SEQ ID NO: 114681 - DNA, 25 bp, Canis familiaris
gacagtgtttggcacatagtaggtg

SEQ ID NO: 114682 - DNA, 25 bp, Canis familiaris
gacagttttagaagtcagtagaata

SEQ ID NO: 114683 - DNA, 25 bp, Canis familiaris
gacactttttgcagtcgtgcggtag

SEQ ID NO: 114684 - DNA, 25 bp, Canis familiaris
gacactttgttgatctagtctggct

SEQ ID NO: 114685 - DNA, 25 bp, Canis familiaris
gacactttgttgatgtagtctggct

SEQ ID NO: 114686 - DNA, 25 bp, Canis familiaris
gacactttgttgatgtagtctggct

SEQ ID NO: 114687 - DNA, 25 bp, Canis familiaris
gacactttgttgatgtagtctggct

SEQ ID NO: 114688 - DNA, 25 bp, Canis familiaris
gacacgtttgaggtaattctggttt

SEQ ID NO: 114689 - DNA, 25 bp, Canis familiaris
gacagtgtttgtttgaaccgtgttt

SEQ ID NO: 114690 - DNA, 25 bp, Canis familiaris
gacagtgtctttgtggcagccaatt

SEQ ID NO: 114691 - DNA, 25 bp, Canis familiaris
gacagctgatgatatcgtgtgcacc

SEQ ID NO: 114692 - DNA, 25 bp, Canis familiaris
gacacgaggaagctatacccaaccg

SEQ ID NO: 114693 - DNA, 25 bp, Canis familiaris
gacacttggaagtttagcaccagca

SEQ ID NO: 114694 - DNA, 25 bp, Canis familiaris
gacactcatggccagttctatgacc

SEQ ID NO: 114695 - DNA, 25 bp, Canis familiaris
gacatatctggccaggcgaatcccg

SEQ ID NO: 114696 - DNA, 25 bp, Canis familiaris
gacagttgtcagtgcgaactcttgg

SEQ ID NO: 114697 - DNA, 25 bp, Canis familiaris
gacactgttatcactgagaccttgg

SEQ ID NO: 114698 - DNA, 25 bp, Canis familiaris
gacacttctcacattagcactgtgt

SEQ ID NO: 114699 - DNA, 25 bp, Canis familiaris
gacactttcacttttgcagattggg

SEQ ID NO: 114700 - DNA, 25 bp, Canis familiaris
gacacttttctctttatatttgctg

SEQ ID NO: 114701 - DNA, 25 bp, Canis familiaris
gacactttttatggtaatcctctgt

SEQ ID NO: 114702 - DNA, 25 bp, Canis familiaris
gacacctttaattatcaacctcgtt

SEQ ID NO: 114703 - DNA, 25 bp, Canis familiaris
gacaccatttataaaaaccccagct

SEQ ID NO: 114704 - DNA, 25 bp, Canis familiaris
gacaccattataaaacccagctagc

SEQ ID NO: 114705 - DNA, 25 bp, Canis familiaris
gacacctgataacagtctccgtgag

SEQ ID NO: 114706 - DNA, 25 bp, Canis familiaris
gacacgtgtacacacatgtccaggc

SEQ ID NO: 114707 - DNA, 25 bp, Canis familiaris
gacaccttgtcaagcacgtagagac

SEQ ID NO: 114708 - DNA, 25 bp, Canis familiaris
gacactctgctggagaacttggaga

SEQ ID NO: 114709 - DNA, 25 bp, Canis familiaris
gacaccactggacacttgaggacta

SEQ ID NO: 114710 - DNA, 25 bp, Canis familiaris
gacacccattgaaaatgtcagagcc

SEQ ID NO: 114711 - DNA, 25 bp, Canis familiaris
gacagtcctggaggaggtcatgcag

SEQ ID NO: 114712 - DNA, 25 bp, Canis familiaris
gactcacctgacaagggttgcaagc

SEQ ID NO: 114713 - DNA, 25 bp, Canis familiaris
gacatggccgacaggcatcactgca

SEQ ID NO: 114714 - DNA, 25 bp, Canis familiaris
gacagcgttgactggcatagcgacg

SEQ ID NO: 114715 - DNA, 25 bp, Canis familiaris
gacagcggaggatgccacaggactt

SEQ ID NO: 114716 - DNA, 25 bp, Canis familiaris
gacaggaacgagcccagaggtgcct

SEQ ID NO: 114717 - DNA, 25 bp, Canis familiaris
gacagaaagctacccagacctgatc

SEQ ID NO: 114718 - DNA, 25 bp, Canis familiaris
gacactatagaaccaagtttgtaca

SEQ ID NO: 114719 - DNA, 25 bp, Canis familiaris
gacactataggaaccaggtgtgtac

SEQ ID NO: 114720 - DNA, 25 bp, Canis familiaris
gacactacagggacgggggagcacc

SEQ ID NO: 114721 - DNA, 25 bp, Canis familiaris
gacagtgaagggggcacggggcacg

SEQ ID NO: 114722 - DNA, 25 bp, Canis familiaris
gacagtaacgaatgacggtgccacc

SEQ ID NO: 114723 - DNA, 25 bp, Canis familiaris
gacaggaactagtgaggcttgcccc

SEQ ID NO: 114724 - DNA, 25 bp, Canis familiaris
gacaggccacggtggcagcgtgtcg

SEQ ID NO: 114725 - DNA, 25 bp, Canis familiaris
gacatgttcagggatcgccaggcgt

SEQ ID NO: 114726 - DNA, 25 bp, Canis familiaris
gacactcagagggacaccggctgtc

SEQ ID NO: 114727 - DNA, 25 bp, Canis familiaris
gacactctagcaggacactggtgct

SEQ ID NO: 114728 - DNA, 25 bp, Canis familiaris
gacacggagctgcacatctagctgt

SEQ ID NO: 114729 - DNA, 25 bp, Canis familiaris
gacacggccatatattactgtacgc

SEQ ID NO: 114730 - DNA, 25 bp, Canis familiaris
gacatcttcctagaatccttatcca

SEQ ID NO: 114731 - DNA, 25 bp, Canis familiaris
gacatccatccttgagtatcctatt

SEQ ID NO: 114732 - DNA, 25 bp, Canis familiaris
gacactacagctggatttcctgatg

SEQ ID NO: 114733 - DNA, 25 bp, Canis familiaris
gacagctggggtattcctgtgccag

SEQ ID NO: 114734 - DNA, 25 bp, Canis familiaris
gacactggggttatttctgccttat

SEQ ID NO: 114735 - DNA, 25 bp, Canis familiaris
gacactttctgaatattttcccttt

SEQ ID NO: 114736 - DNA, 25 bp, Canis familiaris
gacactgttctaatatcgttcttgt

SEQ ID NO: 114737 - DNA, 25 bp, Canis familiaris
gacagttataaatcagtctctgggc

SEQ ID NO: 114738 - DNA, 25 bp, Canis familiaris
gacagtattactgacctcatagggt

SEQ ID NO: 114739 - DNA, 25 bp, Canis familiaris
gattggctctgagcccctaagaggt

SEQ ID NO: 114740 - DNA, 25 bp, Canis familiaris
gacagttgctaggccctctaagagt

SEQ ID NO: 114741 - DNA, 25 bp, Canis familiaris
gacactttacacacatctaacagtt

SEQ ID NO: 114742 - DNA, 25 bp, Canis familiaris
gacactttgaatatgctaaaaatct

SEQ ID NO: 114743 - DNA, 25 bp, Canis familiaris
gacactctcagaaccttgcaaaaca

SEQ ID NO: 114744 - DNA, 25 bp, Canis familiaris
gacagctccagaacattgccaagaa

SEQ ID NO: 114745 - DNA, 25 bp, Canis familiaris
gacagctacagtgtctaaataaata

SEQ ID NO: 114746 - DNA, 25 bp, Canis familiaris
gacactggagcttctgtcagaaaaa

SEQ ID NO: 114747 - DNA, 25 bp, Canis familiaris
gacactgggcaaggtctacagacaa

SEQ ID NO: 114748 - DNA, 25 bp, Canis familiaris
gacacgcagaaggagtccacagaca

SEQ ID NO: 114749 - DNA, 25 bp, Canis familiaris
gacactcaggagggctgctaagcaa

SEQ ID NO: 114750 - DNA, 25 bp, Canis familiaris
gacactcaacagcagcctcatgagg

SEQ ID NO: 114751 - DNA, 25 bp, Canis familiaris
gacagactatatcacctctaggtcc

SEQ ID NO: 114752 - DNA, 25 bp, Canis familiaris
gacagactggaagcccttgtacgct

SEQ ID NO: 114753 - DNA, 25 bp, Canis familiaris
gacatccggaaggacctttacgcca

SEQ ID NO: 114754 - DNA, 25 bp, Canis familiaris
gactaatagtatcacccttcagcgt

SEQ ID NO: 114755 - DNA, 25 bp, Canis familiaris
gatttaactgtctccaacttggtaa

SEQ ID NO: 114756 - DNA, 25 bp, Canis familiaris
gacttagttttggccaacttggtct

SEQ ID NO: 114757 - DNA, 25 bp, Canis familiaris
gacactaatttgtcccaactgcctt

SEQ ID NO: 114758 - DNA, 25 bp, Canis familiaris
gacactactctttacacatatttcg

SEQ ID NO: 114759 - DNA, 25 bp, Canis familiaris
gacactctttgttacaaatttccgc

SEQ ID NO: 114760 - DNA, 25 bp, Canis familiaris
gacactgatttgtacacagaaacaa

SEQ ID NO: 114761 - DNA, 25 bp, Canis familiaris
gacactaggtcatcagagaaaactg

SEQ ID NO: 114762 - DNA, 25 bp, Canis familiaris
gacactacctccaagatgaaacctg

SEQ ID NO: 114763 - DNA, 25 bp, Canis familiaris
gacagtgaccctgagatgttccctt

SEQ ID NO: 114764 - DNA, 25 bp, Canis familiaris
gacaggaacgtgagtgattccctcc

SEQ ID NO: 114765 - DNA, 25 bp, Canis familiaris
gacactggacaaagggatttcccca

SEQ ID NO: 114766 - DNA, 25 bp, Canis familiaris
gacagtgggccaagggagcttccaa

SEQ ID NO: 114767 - DNA, 25 bp, Canis familiaris
gacactgtggccaaggacagtctct

SEQ ID NO: 114768 - DNA, 25 bp, Canis familiaris
gacagctgtgcgggggcagagttcg

SEQ ID NO: 114769 - DNA, 25 bp, Canis familiaris
gacagcaggccgggggaggctgctg

SEQ ID NO: 114770 - DNA, 25 bp, Canis familiaris
gacagcagcagcagaggcggggagc

SEQ ID NO: 114771 - DNA, 25 bp, Canis familiaris
gacagacgggtgtcggggagacctg

SEQ ID NO: 114772 - DNA, 25 bp, Canis familiaris
gacagaggggctgctggtgaacccg

SEQ ID NO: 114773 - DNA, 25 bp, Canis familiaris
gacagagagggtggccactgagggc

SEQ ID NO: 114774 - DNA, 25 bp, Canis familiaris
gacagccagggtaacaccaggcgcc

SEQ ID NO: 114775 - DNA, 25 bp, Canis familiaris
gacaccagacgtgattagcaggcgc

SEQ ID NO: 114776 - DNA, 25 bp, Canis familiaris
gacaccagtattctgatggcggcac

SEQ ID NO: 114777 - DNA, 25 bp, Canis familiaris
gacactgcgtttccatggactgtat

SEQ ID NO: 114778 - DNA, 25 bp, Canis familiaris
gacagccacttaactggacttcttt

SEQ ID NO: 114779 - DNA, 25 bp, Canis familiaris
gacagacatctgtatgccattgacg

SEQ ID NO: 114780 - DNA, 25 bp, Canis familiaris
gacagaagctctcgtcatagaccaa

SEQ ID NO: 114781 - DNA, 25 bp, Canis familiaris
gacagaattccttctattgcgcaca

SEQ ID NO: 114782 - DNA, 25 bp, Canis familiaris
gacagacttctgagcttcttgcagc

SEQ ID NO: 114783 - DNA, 25 bp, Canis familiaris
gacagacatcctacacttgggcatc

SEQ ID NO: 114784 - DNA, 25 bp, Canis familiaris
gacagaagctgtcacttcaggcctg

SEQ ID NO: 114785 - DNA, 25 bp, Canis familiaris
gacagaatagatcaccaagcttaag

SEQ ID NO: 114786 - DNA, 25 bp, Canis familiaris
gacagcacctgtcaccaggatcttc

SEQ ID NO: 114787 - DNA, 25 bp, Canis familiaris
gacactctctggtatcctggattta

SEQ ID NO: 114788 - DNA, 25 bp, Canis familiaris
gacacgccgtagaccaggtcactag

SEQ ID NO: 114789 - DNA, 25 bp, Canis familiaris
gacacggccaaggccaagatcacca

SEQ ID NO: 114790 - DNA, 25 bp, Canis familiaris
gacactgtgctatgtatgaagaacc

SEQ ID NO: 114791 - DNA, 25 bp, Canis familiaris
gacactgctgtaaggaagaaaccat

SEQ ID NO: 114792 - DNA, 25 bp, Canis familiaris
gacactctggagagagcaaaacttc

SEQ ID NO: 114793 - DNA, 25 bp, Canis familiaris
gacactgctgaaggaagaaacaatt

SEQ ID NO: 114794 - DNA, 25 bp, Canis familiaris
gacactgctgatacaacctagaact

SEQ ID NO: 114795 - DNA, 25 bp, Canis familiaris
gacactgatgagacaacaccacaac

SEQ ID NO: 114796 - DNA, 25 bp, Canis familiaris
gacagaatgacaagaaccagaagca

SEQ ID NO: 114797 - DNA, 25 bp, Canis familiaris
gacatgtagccatgaacccatgaga

SEQ ID NO: 114798 - DNA, 25 bp, Canis familiaris
gacatgtgagacttacactggcgat

SEQ ID NO: 114799 - DNA, 25 bp, Canis familiaris
gacagagaagcagtctctctgtggg

SEQ ID NO: 114800 - DNA, 25 bp, Canis familiaris
gacagcagacacaattcttgtggga

SEQ ID NO: 114801 - DNA, 25 bp, Canis familiaris
gacagaggcactttaggcttgagac

SEQ ID NO: 114802 - DNA, 25 bp, Canis familiaris
gacagaggcgctaaatccatcgcaa

SEQ ID NO: 114803 - DNA, 25 bp, Canis familiaris
gacagaagcggaactctcttctaac

SEQ ID NO: 114804 - DNA, 25 bp, Canis familiaris
gacagagagtgattacacgctgtta

SEQ ID NO: 114805 - DNA, 25 bp, Canis familiaris
gacagaggctattactcagtggaga

SEQ ID NO: 114806 - DNA, 25 bp, Canis familiaris
gacactgacgattactcaggctgtt

SEQ ID NO: 114807 - DNA, 25 bp, Canis familiaris
gacaccatggtatgcacaggctgct

SEQ ID NO: 114808 - DNA, 25 bp, Canis familiaris
gacacctggactccaaggtcttgga

SEQ ID NO: 114809 - DNA, 25 bp, Canis familiaris
gacacggagacgtacgttcaatcgt

SEQ ID NO: 114810 - DNA, 25 bp, Canis familiaris
gacactgaacaggcccagttcactc

SEQ ID NO: 114811 - DNA, 25 bp, Canis familiaris
gacacgagcagctcgtacttcgccg

SEQ ID NO: 114812 - DNA, 25 bp, Canis familiaris
gacacgagcagctcgtacttcgccg

SEQ ID NO: 114813 - DNA, 25 bp, Canis familiaris
gacacgatcatcatcctatcattca

SEQ ID NO: 114814 - DNA, 25 bp, Canis familiaris
gacactgtatttttcacattgattt

SEQ ID NO: 114815 - DNA, 25 bp, Canis familiaris
gacagttacttgttagctggtttct

SEQ ID NO: 114816 - DNA, 25 bp, Canis familiaris
tagtttaattggagtgggctacact

SEQ ID NO: 114817 - DNA, 25 bp, Canis familiaris
gatttttcttggtggggctacagta

SEQ ID NO: 114818 - DNA, 25 bp, Canis familiaris
gacttgttcttggtgtagggatact

SEQ ID NO: 114819 - DNA, 25 bp, Canis familiaris
gacttggttggcttcgtgggaattg

SEQ ID NO: 114820 - DNA, 25 bp, Canis familiaris
gacttgtgtggccacgttggaaatg

SEQ ID NO: 114821 - DNA, 25 bp, Canis familiaris
gacttgcaggggacccgagagaggg

SEQ ID NO: 114822 - DNA, 25 bp, Canis familiaris
gactccaggggtgggcttgggggag

SEQ ID NO: 114823 - DNA, 25 bp, Canis familiaris
gacatcgacgggctggattggtgat

SEQ ID NO: 114824 - DNA, 25 bp, Canis familiaris
gacacgatgtcgccgtgttgtgcgt

SEQ ID NO: 114825 - DNA, 25 bp, Canis familiaris
gacacgagtctgagtggcttttaca

SEQ ID NO: 114826 - DNA, 25 bp, Canis familiaris
gacagcgcaatctgtggagctttta

SEQ ID NO: 114827 - DNA, 25 bp, Canis familiaris
gacagctccagcagggagcatgtgt

SEQ ID NO: 114828 - DNA, 25 bp, Canis familiaris
gacacccgcaagagagtgcgtttcg

SEQ ID NO: 114829 - DNA, 25 bp, Canis familiaris
gacagcccgcagacaaggtctttac

SEQ ID NO: 114830 - DNA, 25 bp, Canis familiaris
gacaccacgagaaggaggaaatacg

SEQ ID NO: 114831 - DNA, 25 bp, Canis familiaris
gacacccagcagagaatggaaagcc

SEQ ID NO: 114832 - DNA, 25 bp, Canis familiaris
gacaccaccacattaatcgcaagac

SEQ ID NO: 114833 - DNA, 25 bp, Canis familiaris
gacaccaccaaagagtcaagacctc

SEQ ID NO: 114834 - DNA, 25 bp, Canis familiaris
gacagacaccaaggaattaatcagc

SEQ ID NO: 114835 - DNA, 25 bp, Canis familiaris
gacaccacacagcgatcgaagtaca

SEQ ID NO: 114836 - DNA, 25 bp, Canis familiaris
gacaccacacagcgacgaagacagg

SEQ ID NO: 114837 - DNA, 25 bp, Canis familiaris
gacaccacacagcgacgaagacagg

SEQ ID NO: 114838 - DNA, 25 bp, Canis familiaris
gacaccacacagcgacgaagacagg

SEQ ID NO: 114839 - DNA, 25 bp, Canis familiaris
gacaccacacagcgacgaagacagg

SEQ ID NO: 114840 - DNA, 25 bp, Canis familiaris
gacagccctagcagactaatacaga

SEQ ID NO: 114841 - DNA, 25 bp, Canis familiaris
gacagccctacagaggaacacgatg

SEQ ID NO: 114842 - DNA, 25 bp, Canis familiaris
gacaccataccagaggactacgaga

SEQ ID NO: 114843 - DNA, 25 bp, Canis familiaris
gacaccataccacgaggactaggcg

SEQ ID NO: 114844 - DNA, 25 bp, Canis familiaris
gacaccataccacgaggactacgag

SEQ ID NO: 114845 - DNA, 25 bp, Canis familiaris
gacacctttccctagatgtgacgtg

SEQ ID NO: 114846 - DNA, 25 bp, Canis familiaris
gacaccaggtctccaggtgtgggtg

SEQ ID NO: 114847 - DNA, 25 bp, Canis familiaris
gacaccggaatgtagcgtttcagat

SEQ ID NO: 114848 - DNA, 25 bp, Canis familiaris
gacacggtgatatttgttgtacaat

SEQ ID NO: 114849 - DNA, 25 bp, Canis familiaris
gacacggccatgtattactgtgcac

SEQ ID NO: 114850 - DNA, 25 bp, Canis familiaris
gacactggagcatttttcgtggtgc

SEQ ID NO: 114851 - DNA, 25 bp, Canis familiaris
gacaggatatctatcattcgcggtc

SEQ ID NO: 114852 - DNA, 25 bp, Canis familiaris
gacagagaatctttatcccagtgag

SEQ ID NO: 114853 - DNA, 25 bp, Canis familiaris
gacagcaggtgttattctcagcgga

SEQ ID NO: 114854 - DNA, 25 bp, Canis familiaris
gacagacctgtctttcagcaaggac

SEQ ID NO: 114855 - DNA, 25 bp, Canis familiaris
gacatacctgttttgaataaaccaa

SEQ ID NO: 114856 - DNA, 25 bp, Canis familiaris
gacacctcctgttattataaagcga

SEQ ID NO: 114857 - DNA, 25 bp, Canis familiaris
gacacctgtctttttgaattccaaa

SEQ ID NO: 114858 - DNA, 25 bp, Canis familiaris
gacaggtgtttgttgtttgtcccca

SEQ ID NO: 114859 - DNA, 25 bp, Canis familiaris
gacagcctcattttagttatgttcc

SEQ ID NO: 114860 - DNA, 25 bp, Canis familiaris
gacaccatctattttctttgttgga

SEQ ID NO: 114861 - DNA, 25 bp, Canis familiaris
gacaccttatttaatatatgttgtt

SEQ ID NO: 114862 - DNA, 25 bp, Canis familiaris
gacaccttagcttcaattccttgat

SEQ ID NO: 114863 - DNA, 25 bp, Canis familiaris
gacacgcttggctgaattctgttca

SEQ ID NO: 114864 - DNA, 25 bp, Canis familiaris
gacaggcttgtcggacagctcagtt

SEQ ID NO: 114865 - DNA, 25 bp, Canis familiaris
gacagaatttcagccaccatttatg

SEQ ID NO: 114866 - DNA, 25 bp, Canis familiaris
gacagaagtccagatcgagattgat

SEQ ID NO: 114867 - DNA, 25 bp, Canis familiaris
gacagccgaccagcaaggatggatg

SEQ ID NO: 114868 - DNA, 25 bp, Canis familiaris
gacaccaaccgttcaggaggtccaa

SEQ ID NO: 114869 - DNA, 25 bp, Canis familiaris
gacaccacaccgtagcggaattcat

SEQ ID NO: 114870 - DNA, 25 bp, Canis familiaris
gacacccacttggagcagggactcg

SEQ ID NO: 114871 - DNA, 25 bp, Canis familiaris
gacacccacagggaagtggagccta

SEQ ID NO: 114872 - DNA, 25 bp, Canis familiaris
gacaccccagtcgtgatgtggagga

SEQ ID NO: 114873 - DNA, 25 bp, Canis familiaris
gacacgcccgagatatggagagggg

SEQ ID NO: 114874 - DNA, 25 bp, Canis familiaris
gactccccgagatacgagaaggcag

SEQ ID NO: 114875 - DNA, 25 bp, Canis familiaris
gacatcccaggagaaagaccagagg

SEQ ID NO: 114876 - DNA, 25 bp, Canis familiaris
gacacccagagataatatcactcaa

SEQ ID NO: 114877 - DNA, 25 bp, Canis familiaris
gacagcctgtaaaactcatcaataa

SEQ ID NO: 114878 - DNA, 25 bp, Canis familiaris
gacacccttgcaaatgtctgcgaac

SEQ ID NO: 114879 - DNA, 25 bp, Canis familiaris
gacagctccttggaggtctgaggcg

SEQ ID NO: 114880 - DNA, 25 bp, Canis familiaris
gacagctccactgatgactctgaag

SEQ ID NO: 114881 - DNA, 25 bp, Canis familiaris
gacaccacagagacagcctctatat

SEQ ID NO: 114882 - DNA, 25 bp, Canis familiaris
gacaccatagcgaaattgcttattt

SEQ ID NO: 114883 - DNA, 25 bp, Canis familiaris
gacatcatcccgaaaagattttata

SEQ ID NO: 114884 - DNA, 25 bp, Canis familiaris
gacttcccggaatttctgacaatga

SEQ ID NO: 114885 - DNA, 25 bp, Canis familiaris
gacatcatggaccacagcatttctg

SEQ ID NO: 114886 - DNA, 25 bp, Canis familiaris
gacatcactgaatgcagagtccatg

SEQ ID NO: 114887 - DNA, 25 bp, Canis familiaris
gacatacagcaattcacaggcaggt

SEQ ID NO: 114888 - DNA, 25 bp, Canis familiaris
gacattcagctctgacaggactgtc

SEQ ID NO: 114889 - DNA, 25 bp, Canis familiaris
gacagtagacatagccattagtgac

SEQ ID NO: 114890 - DNA, 25 bp, Canis familiaris
gacagctatgaaatccacgtggacg

SEQ ID NO: 114891 - DNA, 25 bp, Canis familiaris
gacaggagacatcgccgcgatagac

SEQ ID NO: 114892 - DNA, 25 bp, Canis familiaris
gacaggaaagagccggcatcgcagc

SEQ ID NO: 114893 - DNA, 25 bp, Canis familiaris
gacagccaagagatgggacgcctgg

SEQ ID NO: 114894 - DNA, 25 bp, Canis familiaris
gacaccaagatactgggtctcattg

SEQ ID NO: 114895 - DNA, 25 bp, Canis familiaris
gacaccaagatctgaacctcattgt

SEQ ID NO: 114896 - DNA, 25 bp, Canis familiaris
gacaccaagagcaagtccgctaatc

SEQ ID NO: 114897 - DNA, 25 bp, Canis familiaris
gacaccacaggaagtggagctacag

SEQ ID NO: 114898 - DNA, 25 bp, Canis familiaris
gacacgcaaggctgtgagactacct

SEQ ID NO: 114899 - DNA, 25 bp, Canis familiaris
gacacgcaggcctgcgtggtcagcc

SEQ ID NO: 114900 - DNA, 25 bp, Canis familiaris
gacataagtagctctctggtagcct

SEQ ID NO: 114901 - DNA, 25 bp, Canis familiaris
gactaactttcctttgatgatcaca

SEQ ID NO: 114902 - DNA, 25 bp, Canis familiaris
gacatctagctcaacccaatggtaa

SEQ ID NO: 114903 - DNA, 25 bp, Canis familiaris
gacagatacatcaacctcaggggac

SEQ ID NO: 114904 - DNA, 25 bp, Canis familiaris
gacagtatctgcaacaacaagtggt

SEQ ID NO: 114905 - DNA, 25 bp, Canis familiaris
gacatgtttcatagcaaggaggata

SEQ ID NO: 114906 - DNA, 25 bp, Canis familiaris
gacatctatgtgcaggagaaggatg

SEQ ID NO: 114907 - DNA, 25 bp, Canis familiaris
gacacctgctgctagcaagactgtt

SEQ ID NO: 114908 - DNA, 25 bp, Canis familiaris
gacatcgctgacacaagactttgaa

SEQ ID NO: 114909 - DNA, 25 bp, Canis familiaris
gacacgacacattaaacttctccaa

SEQ ID NO: 114910 - DNA, 25 bp, Canis familiaris
gacagtgatagatatatatgcttcc

SEQ ID NO: 114911 - DNA, 25 bp, Canis familiaris
gacagtccaggaaatgctctatctc

SEQ ID NO: 114912 - DNA, 25 bp, Canis familiaris
gacagtccactgatgcataatttat

SEQ ID NO: 114913 - DNA, 25 bp, Canis familiaris
gacagtgccaccattcaaagtatta

SEQ ID NO: 114914 - DNA, 25 bp, Canis familiaris
gacagtgcccagattcagaattttt

SEQ ID NO: 114915 - DNA, 25 bp, Canis familiaris
gacagatggctcttagtccaagggt

SEQ ID NO: 114916 - DNA, 25 bp, Canis familiaris
gacagcggcacatagttcaaggagt

SEQ ID NO: 114917 - DNA, 25 bp, Canis familiaris
gacacgcagcgaacacttgagaggg

SEQ ID NO: 114918 - DNA, 25 bp, Canis familiaris
gacagccatcgaagaccggcagtac

SEQ ID NO: 114919 - DNA, 25 bp, Canis familiaris
gacaccaaacaatgctggcatgtgt

SEQ ID NO: 114920 - DNA, 25 bp, Canis familiaris
gacaccaagtcagagctgctcaggc

SEQ ID NO: 114921 - DNA, 25 bp, Canis familiaris
gacaccagggctaatgctgcacaac

SEQ ID NO: 114922 - DNA, 25 bp, Canis familiaris
gacagccatggacaatgctagcaag

SEQ ID NO: 114923 - DNA, 25 bp, Canis familiaris
gacagccagaggccagtgggccagc

SEQ ID NO: 114924 - DNA, 25 bp, Canis familiaris
gacagcccagggcagcaggacatgc

SEQ ID NO: 114925 - DNA, 25 bp, Canis familiaris
gacacctcagctgacagcgtgggca

SEQ ID NO: 114926 - DNA, 25 bp, Canis familiaris
gacacctcaggctgcagctaaggag

SEQ ID NO: 114927 - DNA, 25 bp, Canis familiaris
gacaccacaggctcagtgaagggac

SEQ ID NO: 114928 - DNA, 25 bp, Canis familiaris
gacagctccagtggctagtggggga

SEQ ID NO: 114929 - DNA, 25 bp, Canis familiaris
gacagtccacacctaagtgcagggg

SEQ ID NO: 114930 - DNA, 25 bp, Canis familiaris
gacagtgcccagctcaggatgggtg

SEQ ID NO: 114931 - DNA, 25 bp, Canis familiaris
gacaccccatgcataggatctggcg

SEQ ID NO: 114932 - DNA, 25 bp, Canis familiaris
gacaccaccacacagaatcagggtc

SEQ ID NO: 114933 - DNA, 25 bp, Canis familiaris
gacaccacccataacagcattggag

SEQ ID NO: 114934 - DNA, 25 bp, Canis familiaris
gacacccgcattaacctgtgtgtta

SEQ ID NO: 114935 - DNA, 25 bp, Canis familiaris
gacagctccagctttacgttggtta

SEQ ID NO: 114936 - DNA, 25 bp, Canis familiaris
gacagctctgctgctgatactgttg

SEQ ID NO: 114937 - DNA, 25 bp, Canis familiaris
gacatcactgaccggacatgttgat

SEQ ID NO: 114938 - DNA, 25 bp, Canis familiaris
gacatgactgatgatggtcgtggtg

SEQ ID NO: 114939 - DNA, 25 bp, Canis familiaris
gacagactggtgatgacgatgaggt

SEQ ID NO: 114940 - DNA, 25 bp, Canis familiaris
gacaggtgaggcaggctgtgctggg

SEQ ID NO: 114941 - DNA, 25 bp, Canis familiaris
gacagtggcaggatgcatctggatg

SEQ ID NO: 114942 - DNA, 25 bp, Canis familiaris
gacaggatcagaaggctctggtcag

SEQ ID NO: 114943 - DNA, 25 bp, Canis familiaris
gacaggctgcagaggccaagagcac

SEQ ID NO: 114944 - DNA, 25 bp, Canis familiaris
gacagagagatagagccagagagca

SEQ ID NO: 114945 - DNA, 25 bp, Canis familiaris
gacagacatccagggccagagaggg

SEQ ID NO: 114946 - DNA, 25 bp, Canis familiaris
gacagttcaccgctgcagaatggtc

SEQ ID NO: 114947 - DNA, 25 bp, Canis familiaris
gacagcgtcaccagggagcatgtgt

SEQ ID NO: 114948 - DNA, 25 bp, Canis familiaris
gacagcggcctaaggtggagcttcc

SEQ ID NO: 114949 - DNA, 25 bp, Canis familiaris
gacagcggttgcagggctggtgtcc

SEQ ID NO: 114950 - DNA, 25 bp, Canis familiaris
gacagtgtcctgggaggtggtgtgc

SEQ ID NO: 114951 - DNA, 25 bp, Canis familiaris
gacagtgctcgcatgtgcgggttgt

SEQ ID NO: 114952 - DNA, 25 bp, Canis familiaris
gacagagtctgctttgggggcagct

SEQ ID NO: 114953 - DNA, 25 bp, Canis familiaris
gacagcagctctgtatgggcggctg

SEQ ID NO: 114954 - DNA, 25 bp, Canis familiaris
gacagcactgtacgaggcagggcgc

SEQ ID NO: 114955 - DNA, 25 bp, Canis familiaris
gacagcctggcccaggaggtggctc

SEQ ID NO: 114956 - DNA, 25 bp, Canis familiaris
gacaccgagctccaggaaatgtcca

SEQ ID NO: 114957 - DNA, 25 bp, Canis familiaris
gacacctacttgtaaattctccctg

SEQ ID NO: 114958 - DNA, 25 bp, Canis familiaris
gactcacctttgagtcttaccctgc

SEQ ID NO: 114959 - DNA, 25 bp, Canis familiaris
gacatgaccctgtggactgttccac

SEQ ID NO: 114960 - DNA, 25 bp, Canis familiaris
gacatgggcctgaagagttttccgc

SEQ ID NO: 114961 - DNA, 25 bp, Canis familiaris
gacagtgacctgagatgtccttatc

SEQ ID NO: 114962 - DNA, 25 bp, Canis familiaris
gacatggccttcagatagcttcttc

SEQ ID NO: 114963 - DNA, 25 bp, Canis familiaris
gacagacacataaagtaggccctaa

SEQ ID NO: 114964 - DNA, 25 bp, Canis familiaris
gacagaatcatttaccaggcacaca

SEQ ID NO: 114965 - DNA, 25 bp, Canis familiaris
gacaggcattcttggctgagacacc

SEQ ID NO: 114966 - DNA, 25 bp, Canis familiaris
gacatggccacctgcatgaaggccg

SEQ ID NO: 114967 - DNA, 25 bp, Canis familiaris
gacagtcctccattcaaattctggc

SEQ ID NO: 114968 - DNA, 25 bp, Canis familiaris
gacagacctgcctaagcaatacttc

SEQ ID NO: 114969 - DNA, 25 bp, Canis familiaris
gacatacagatggctatcagacata

SEQ ID NO: 114970 - DNA, 25 bp, Canis familiaris
gacatagagatggccagcagacaca

SEQ ID NO: 114971 - DNA, 25 bp, Canis familiaris
gactatggtcagcccaactgcaagt

SEQ ID NO: 114972 - DNA, 25 bp, Canis familiaris
gacttcgctcggcagaagctagatg

SEQ ID NO: 114973 - DNA, 25 bp, Canis familiaris
gacttggggacacatactagaagat

SEQ ID NO: 114974 - DNA, 25 bp, Canis familiaris
gactcacgaaactcttctaacatat

SEQ ID NO: 114975 - DNA, 25 bp, Canis familiaris
gacagcagtgaatggccttctaaca

SEQ ID NO: 114976 - DNA, 25 bp, Canis familiaris
gacttgctgtatttgcactttgaac

SEQ ID NO: 114977 - DNA, 25 bp, Canis familiaris
gacagggtcatcatcagctttaatc

SEQ ID NO: 114978 - DNA, 25 bp, Canis familiaris
gacagtgccctcaacagtattagct

SEQ ID NO: 114979 - DNA, 25 bp, Canis familiaris
gacatgggcctcccagatgtggagc

SEQ ID NO: 114980 - DNA, 25 bp, Canis familiaris
gactacgcagccccaagatgatgca

SEQ ID NO: 114981 - DNA, 25 bp, Canis familiaris
gactaggcacccatgagaatcatca

SEQ ID NO: 114982 - DNA, 25 bp, Canis familiaris
gacagaacaccaaatgagaaccaga

SEQ ID NO: 114983 - DNA, 25 bp, Canis familiaris
gacagaagcccaagatagccatgac

SEQ ID NO: 114984 - DNA, 25 bp, Canis familiaris
gacagctcagctgaagaactcatac

SEQ ID NO: 114985 - DNA, 25 bp, Canis familiaris
gacagcctgctaaagcacctgctgc

SEQ ID NO: 114986 - DNA, 25 bp, Canis familiaris
gacaggctgctgacagataccgcca

SEQ ID NO: 114987 - DNA, 25 bp, Canis familiaris
gacaggctctgttgaattctgcagt

SEQ ID NO: 114988 - DNA, 25 bp, Canis familiaris
gacatcccggcaagattctcagtgc

SEQ ID NO: 114989 - DNA, 25 bp, Canis familiaris
gactcgccttcatcatttggggtac

SEQ ID NO: 114990 - DNA, 25 bp, Canis familiaris
gacttccgtgtgtcttgggaggtga

SEQ ID NO: 114991 - DNA, 25 bp, Canis familiaris
gacaccaccttctgatggaacgtga

SEQ ID NO: 114992 - DNA, 25 bp, Canis familiaris
gacagcccctttctgaaggctggcc

SEQ ID NO: 114993 - DNA, 25 bp, Canis familiaris
gaccaacaagttcataaaagagctc

SEQ ID NO: 114994 - DNA, 25 bp, Canis familiaris
gactccacaactaaaacaacggctg

SEQ ID NO: 114995 - DNA, 25 bp, Canis familiaris
gactccaaacactaaaacagcttct

SEQ ID NO: 114996 - DNA, 25 bp, Canis familiaris
gacaccaaactattctcaaacattc

SEQ ID NO: 114997 - DNA, 25 bp, Canis familiaris
gacatccaacactttttaaccaaat

SEQ ID NO: 114998 - DNA, 25 bp, Canis familiaris
gactataaccttattttaaatgtgg

SEQ ID NO: 114999 - DNA, 25 bp, Canis familiaris
gactgtgaatccatcttttttaaat

SEQ ID NO: 115000 - DNA, 25 bp, Canis familiaris
gacttaatcccttagtcaattagaa

SEQ ID NO: 115001 - DNA, 25 bp, Canis familiaris
gacatacagtccgttagatcgttgt

SEQ ID NO: 115002 - DNA, 25 bp, Canis familiaris
gacaggcagttctgctagtctggtc

SEQ ID NO: 115003 - DNA, 25 bp, Canis familiaris
gacagtagttctcaatgtgggttgc

SEQ ID NO: 115004 - DNA, 25 bp, Canis familiaris
gacagccagttgtaaattgggcgag

SEQ ID NO: 115005 - DNA, 25 bp, Canis familiaris
gacagccagtgtcaacgtggagctg

SEQ ID NO: 115006 - DNA, 25 bp, Canis familiaris
gacatgccggaaagccttgggctgt

SEQ ID NO: 115007 - DNA, 25 bp, Canis familiaris
gacagctgggagtgacttccgtata

SEQ ID NO: 115008 - DNA, 25 bp, Canis familiaris
gacagcgaggagtgaggtccaaaat

SEQ ID NO: 115009 - DNA, 25 bp, Canis familiaris
gacggtgcggtctgaaccaaactag

SEQ ID NO: 115010 - DNA, 25 bp, Canis familiaris
gacagggtgtgttttcccaaagata

SEQ ID NO: 115011 - DNA, 25 bp, Canis familiaris
gacagtggattcatttccctagagg

SEQ ID NO: 115012 - DNA, 25 bp, Canis familiaris
gacagctgtgttattagtcaatgta

SEQ ID NO: 115013 - DNA, 25 bp, Canis familiaris
gacattgtgtcaacattttcaaatt

SEQ ID NO: 115014 - DNA, 25 bp, Canis familiaris
gacagctggtatttttttaatgatc

SEQ ID NO: 115015 - DNA, 25 bp, Canis familiaris
gacagatgtgattcctaacttaagt

SEQ ID NO: 115016 - DNA, 25 bp, Canis familiaris
gacatggtttctgggactgtgaagt

SEQ ID NO: 115017 - DNA, 25 bp, Canis familiaris
gacatgccttacagagatgctaaag

SEQ ID NO: 115018 - DNA, 25 bp, Canis familiaris
gacatgcataacgttgaattcaata

SEQ ID NO: 115019 - DNA, 25 bp, Canis familiaris
gacatctatacgagatactccagcc

SEQ ID NO: 115020 - DNA, 25 bp, Canis familiaris
gacaggtatgcgaaggttgcccctt

SEQ ID NO: 115021 - DNA, 25 bp, Canis familiaris
gacagttcagttgtttccacgtctc

SEQ ID NO: 115022 - DNA, 25 bp, Canis familiaris
gacagttcattgtttttgaccttta

SEQ ID NO: 115023 - DNA, 25 bp, Canis familiaris
gacagtttgtttctgttccttttgc

SEQ ID NO: 115024 - DNA, 25 bp, Canis familiaris
gacatacggtttctgtttttgttgc

SEQ ID NO: 115025 - DNA, 25 bp, Canis familiaris
gacatttggattttttcctgttttg

SEQ ID NO: 115026 - DNA, 25 bp, Canis familiaris
ggtcctagttttgtgcacattttta

SEQ ID NO: 115027 - DNA, 25 bp, Canis familiaris
gacatccttttttttggccaaatct

SEQ ID NO: 115028 - DNA, 25 bp, Canis familiaris
gacatttcgttttttacacgagatt

SEQ ID NO: 115029 - DNA, 25 bp, Canis familiaris
gacagtgtgctgatttttaccagtg

SEQ ID NO: 115030 - DNA, 25 bp, Canis familiaris
gacagcatgttgagtactggaccat

SEQ ID NO: 115031 - DNA, 25 bp, Canis familiaris
gacatcatggtgagtgactgccgcc

SEQ ID NO: 115032 - DNA, 25 bp, Canis familiaris
gacagatggtgaactgctgagccac

SEQ ID NO: 115033 - DNA, 25 bp, Canis familiaris
gacagaccatcttgctgagaccatc

SEQ ID NO: 115034 - DNA, 25 bp, Canis familiaris
gagcgcacaattttggaaaccatcg

SEQ ID NO: 115035 - DNA, 25 bp, Canis familiaris
gactcaacattgttaggtcccaggt

SEQ ID NO: 115036 - DNA, 25 bp, Canis familiaris
gacagaagcattgagaggtctccat

SEQ ID NO: 115037 - DNA, 25 bp, Canis familiaris
gacagcttcatgaggaggttctcaa

SEQ ID NO: 115038 - DNA, 25 bp, Canis familiaris
gacatctggagcatggggctctctc

SEQ ID NO: 115039 - DNA, 25 bp, Canis familiaris
gacatcaggagtcatgagacccatg

SEQ ID NO: 115040 - DNA, 25 bp, Canis familiaris
gacagaggagagggatggcagcctg

SEQ ID NO: 115041 - DNA, 25 bp, Canis familiaris
gacagcctggaggtgatggcctctc

SEQ ID NO: 115042 - DNA, 25 bp, Canis familiaris
gacagttagaggcatgctgccccac

SEQ ID NO: 115043 - DNA, 25 bp, Canis familiaris
gacagttagaggcatgctgccccac

SEQ ID NO: 115044 - DNA, 25 bp, Canis familiaris
gacagttagaggcatgctgccccac

SEQ ID NO: 115045 - DNA, 25 bp, Canis familiaris
gacagttagaggcatgctgccccac

SEQ ID NO: 115046 - DNA, 25 bp, Canis familiaris
gacagttagaggcatgctgccccac

SEQ ID NO: 115047 - DNA, 25 bp, Canis familiaris
gactgttaatggactcctccaacaa

SEQ ID NO: 115048 - DNA, 25 bp, Canis familiaris
gacatgggagagggccccacaacac

SEQ ID NO: 115049 - DNA, 25 bp, Canis familiaris
gacaggcagagacgtgcctctcaca

SEQ ID NO: 115050 - DNA, 25 bp, Canis familiaris
gacatcgagaggcagttccacaagg

SEQ ID NO: 115051 - DNA, 25 bp, Canis familiaris
gacagcgatgaggaggtcccagcgg

SEQ ID NO: 115052 - DNA, 25 bp, Canis familiaris
gacaggaaggacccctcagtgaaac

SEQ ID NO: 115053 - DNA, 25 bp, Canis familiaris
gacaggaagtccacaacaagcgaac

SEQ ID NO: 115054 - DNA, 25 bp, Canis familiaris
gacaggcaagttatcagcaccactg

SEQ ID NO: 115055 - DNA, 25 bp, Canis familiaris
gacagggtgtctgccaagaacgccc

SEQ ID NO: 115056 - DNA, 25 bp, Canis familiaris
gacagaggtactccatccagaacgc

SEQ ID NO: 115057 - DNA, 25 bp, Canis familiaris
gacagaaacacttttcgacacagtg

SEQ ID NO: 115058 - DNA, 25 bp, Canis familiaris
gacagaaacaatattcacacacaat

SEQ ID NO: 115059 - DNA, 25 bp, Canis familiaris
gacaggacaaacctcataccctatt

SEQ ID NO: 115060 - DNA, 25 bp, Canis familiaris
gacagctgacaaacttaatcctttt

SEQ ID NO: 115061 - DNA, 25 bp, Canis familiaris
gacagtgcacaagttaaatactttg

SEQ ID NO: 115062 - DNA, 25 bp, Canis familiaris
gacagtgctcagctccagaaagctt

SEQ ID NO: 115063 - DNA, 25 bp, Canis familiaris
gacagctgtcattgaccatcacaac

SEQ ID NO: 115064 - DNA, 25 bp, Canis familiaris
gacagttattgaccatatatactta

SEQ ID NO: 115065 - DNA, 25 bp, Canis familiaris
gacagattttaccagaaaccatatg

SEQ ID NO: 115066 - DNA, 25 bp, Canis familiaris
gacaggttcctgcagaagaatctat

SEQ ID NO: 115067 - DNA, 25 bp, Canis familiaris
gacaggttccctgaagagttaggat

SEQ ID NO: 115068 - DNA, 25 bp, Canis familiaris
gacagaatgtccattaagagagtac

SEQ ID NO: 115069 - DNA, 25 bp, Canis familiaris
gacagattctctcttactacttact

SEQ ID NO: 115070 - DNA, 25 bp, Canis familiaris
gacagacattctcttgtgttttttt

SEQ ID NO: 115071 - DNA, 25 bp, Canis familiaris
gacagcatttccttaatttattttt

SEQ ID NO: 115072 - DNA, 25 bp, Canis familiaris
gacattttccttgatttttggcagt

SEQ ID NO: 115073 - DNA, 25 bp, Canis familiaris
gacttacccacccattttggaatgt

SEQ ID NO: 115074 - DNA, 25 bp, Canis familiaris
gacatctaccggagactgttgggtt

SEQ ID NO: 115075 - DNA, 25 bp, Canis familiaris
gacatctggccccaaactgttagtc

SEQ ID NO: 115076 - DNA, 25 bp, Canis familiaris
gacattgtcacccaaatcttttcta

SEQ ID NO: 115077 - DNA, 25 bp, Canis familiaris
gacattccccaacatggacaattga

SEQ ID NO: 115078 - DNA, 25 bp, Canis familiaris
gacattccgaaacagagcatccagc

SEQ ID NO: 115079 - DNA, 25 bp, Canis familiaris
gacagtgacagtgactgagtcccag

SEQ ID NO: 115080 - DNA, 25 bp, Canis familiaris
gacagcggcagagactatgtggccc

SEQ ID NO: 115081 - DNA, 25 bp, Canis familiaris
gacagcagtcgggcgttgtgagcct

SEQ ID NO: 115082 - DNA, 25 bp, Canis familiaris
gacaggaatggaggtgcatctggcc

SEQ ID NO: 115083 - DNA, 25 bp, Canis familiaris
gacaggcatcagtgttcctggccag

SEQ ID NO: 115084 - DNA, 25 bp, Canis familiaris
gacagtcacaggcttccggattatc

SEQ ID NO: 115085 - DNA, 25 bp, Canis familiaris
gacagctactatctgccaggaacta

SEQ ID NO: 115086 - DNA, 25 bp, Canis familiaris
gacagtactgatcatggagttaatc

SEQ ID NO: 115087 - DNA, 25 bp, Canis familiaris
gacagataatgacatgcctttacat

SEQ ID NO: 115088 - DNA, 25 bp, Canis familiaris
gacagctaaagttgcctcagatcca

SEQ ID NO: 115089 - DNA, 25 bp, Canis familiaris
gacatttgtaatccccacattcttt

SEQ ID NO: 115090 - DNA, 25 bp, Canis familiaris
gacatttctattcaaacttatttat

SEQ ID NO: 115091 - DNA, 25 bp, Canis familiaris
gacagttcttgttaagccttcaggt

SEQ ID NO: 115092 - DNA, 25 bp, Canis familiaris
gacaggtcatttgcctgacttctgc

SEQ ID NO: 115093 - DNA, 25 bp, Canis familiaris
gacagtgtaattgctcaagtcttgc

SEQ ID NO: 115094 - DNA, 25 bp, Canis familiaris
gacatgtctaattttgatcgtttct

SEQ ID NO: 115095 - DNA, 25 bp, Canis familiaris
gacatggttcattttccgtgacctg

SEQ ID NO: 115096 - DNA, 25 bp, Canis familiaris
gacgtgtaataattcgggatccttt

SEQ ID NO: 115097 - DNA, 25 bp, Canis familiaris
gacaggtttgaaactggcactcctt

SEQ ID NO: 115098 - DNA, 25 bp, Canis familiaris
gacagggtccaagcattccttttaa

SEQ ID NO: 115099 - DNA, 25 bp, Canis familiaris
gacagggacccagggataccttgaa

SEQ ID NO: 115100 - DNA, 25 bp, Canis familiaris
gacagggacctagtaattccctaca

SEQ ID NO: 115101 - DNA, 25 bp, Canis familiaris
gacagtggcctctaaaaccaccggc

SEQ ID NO: 115102 - DNA, 25 bp, Canis familiaris
gacagtctgcctgaagggcaccaag

SEQ ID NO: 115103 - DNA, 25 bp, Canis familiaris
gacgatgtgtctaactaggacctga

SEQ ID NO: 115104 - DNA, 25 bp, Canis familiaris
gacagagggctttacaggacgatgg

SEQ ID NO: 115105 - DNA, 25 bp, Canis familiaris
gacagaattgttgaagagacgtgca

SEQ ID NO: 115106 - DNA, 25 bp, Canis familiaris
gacagaacgtgtgactgaagcccag

SEQ ID NO: 115107 - DNA, 25 bp, Canis familiaris
gacatgatgcacgtgttagctaatg

SEQ ID NO: 115108 - DNA, 25 bp, Canis familiaris
gacattgcagcattttagccaggca

SEQ ID NO: 115109 - DNA, 25 bp, Canis familiaris
gacatgtggaacgatgggcagccac

SEQ ID NO: 115110 - DNA, 25 bp, Canis familiaris
gacattagaaccaagtatcgacaga

SEQ ID NO: 115111 - DNA, 25 bp, Canis familiaris
gacttaaactttgactcctacataa

SEQ ID NO: 115112 - DNA, 25 bp, Canis familiaris
gacataaaccttgggacttccctag

SEQ ID NO: 115113 - DNA, 25 bp, Canis familiaris
gacaggaactttgtgaattccctcc

SEQ ID NO: 115114 - DNA, 25 bp, Canis familiaris
gacaggaatcttaagtgaaatggca

SEQ ID NO: 115115 - DNA, 25 bp, Canis familiaris
gacagtgttccagaagaaatggcac

SEQ ID NO: 115116 - DNA, 25 bp, Canis familiaris
gacagtggtccaaacagtcttcctg

SEQ ID NO: 115117 - DNA, 25 bp, Canis familiaris
gacttgggcacagacatggtccctg

SEQ ID NO: 115118 - DNA, 25 bp, Canis familiaris
gactaggcaagagactggttccaga

SEQ ID NO: 115119 - DNA, 25 bp, Canis familiaris
gagtgaggaaggggttttccaacag

SEQ ID NO: 115120 - DNA, 25 bp, Canis familiaris
gacgaaattggtctgtttaaaagca

SEQ ID NO: 115121 - DNA, 25 bp, Canis familiaris
gacagatgaattgttgttttagact

SEQ ID NO: 115122 - DNA, 25 bp, Canis familiaris
gacagtaatttctttttcatttgac

SEQ ID NO: 115123 - DNA, 25 bp, Canis familiaris
gacagtaatttctctgatatcagcc

SEQ ID NO: 115124 - DNA, 25 bp, Canis familiaris
gacagtttttcacttaatgatgctt

SEQ ID NO: 115125 - DNA, 25 bp, Canis familiaris
gacagtttttcacttaatgatgctt

SEQ ID NO: 115126 - DNA, 25 bp, Canis familiaris
gacagcttctcagtctgcttaatct

SEQ ID NO: 115127 - DNA, 25 bp, Canis familiaris
gacagctgcttacatgttcatctct

SEQ ID NO: 115128 - DNA, 25 bp, Canis familiaris
gacagtgcgtatcgagtcgccatct

SEQ ID NO: 115129 - DNA, 25 bp, Canis familiaris
gacagggtatgcgaggtgccctttg

SEQ ID NO: 115130 - DNA, 25 bp, Canis familiaris
gacagtggtacgagtcccactacgc

SEQ ID NO: 115131 - DNA, 25 bp, Canis familiaris
gacagtggtacgagtcccactacgc

SEQ ID NO: 115132 - DNA, 25 bp, Canis familiaris
gacagtggtacgagtcccactacgc

SEQ ID NO: 115133 - DNA, 25 bp, Canis familiaris
gacagtggtacgatgtctccatcta

SEQ ID NO: 115134 - DNA, 25 bp, Canis familiaris
gacagtattaccggttcgctataaa

SEQ ID NO: 115135 - DNA, 25 bp, Canis familiaris
gactgtttaaaacgtcctatcacga

SEQ ID NO: 115136 - DNA, 25 bp, Canis familiaris
gacttgttaatcgacgtttctccca

SEQ ID NO: 115137 - DNA, 25 bp, Canis familiaris
gacaggttacacggggttaccagag

SEQ ID NO: 115138 - DNA, 25 bp, Canis familiaris
gagcagttttactggggtgtcccaa

SEQ ID NO: 115139 - DNA, 25 bp, Canis familiaris
gatcctaaggtcagggggtcctaca

SEQ ID NO: 115140 - DNA, 25 bp, Canis familiaris
gacagctataggcagggggcagttc

SEQ ID NO: 115141 - DNA, 25 bp, Canis familiaris
gacatgtaagaaggggtgacgttgg

SEQ ID NO: 115142 - DNA, 25 bp, Canis familiaris
gacatgcggaaagcttgggctgttg

SEQ ID NO: 115143 - DNA, 25 bp, Canis familiaris
gacaggcgtggaactcaggactttc

SEQ ID NO: 115144 - DNA, 25 bp, Canis familiaris
gacaggcagctgctttctggactgc

SEQ ID NO: 115145 - DNA, 25 bp, Canis familiaris
gacagggtggatcctgggcatctgc

SEQ ID NO: 115146 - DNA, 25 bp, Canis familiaris
gacagggtgtgccatccaggatggc

SEQ ID NO: 115147 - DNA, 25 bp, Canis familiaris
gacatgggtggctatgccacctgcc

SEQ ID NO: 115148 - DNA, 25 bp, Canis familiaris
gacatgggtgacaattcaaccaccg

SEQ ID NO: 115149 - DNA, 25 bp, Canis familiaris
gacagggagaaattaccacacatca

SEQ ID NO: 115150 - DNA, 25 bp, Canis familiaris
gacatggcagcacagatttaacact

SEQ ID NO: 115151 - DNA, 25 bp, Canis familiaris
gacagagcagaggtgagtgaaggca

SEQ ID NO: 115152 - DNA, 25 bp, Canis familiaris
gacatgtgcactctggtggggcata

SEQ ID NO: 115153 - DNA, 25 bp, Canis familiaris
gacatggccaacaggggccacactc

SEQ ID NO: 115154 - DNA, 25 bp, Canis familiaris
gactcctacatcagagcggacgacc

SEQ ID NO: 115155 - DNA, 25 bp, Canis familiaris
gactcctaaatctgggaaacgaact

SEQ ID NO: 115156 - DNA, 25 bp, Canis familiaris
gacattctccattttgggaaactga

SEQ ID NO: 115157 - DNA, 25 bp, Canis familiaris
gacataatctataaatggggaccga

SEQ ID NO: 115158 - DNA, 25 bp, Canis familiaris
gacatgaaaatttttggctgacaca

SEQ ID NO: 115159 - DNA, 25 bp, Canis familiaris
gacaggtaattctctctgtgccaca

SEQ ID NO: 115160 - DNA, 25 bp, Canis familiaris
gacagtggagttttttggtgaagta

SEQ ID NO: 115161 - DNA, 25 bp, Canis familiaris
gactttggttttgtggatcccatag

SEQ ID NO: 115162 - DNA, 25 bp, Canis familiaris
gacttggacttatcaaggtcaccat

SEQ ID NO: 115163 - DNA, 25 bp, Canis familiaris
gactgggggtgtacaagtggcctac

SEQ ID NO: 115164 - DNA, 25 bp, Canis familiaris
gacatgggaggattacctgcttggc

SEQ ID NO: 115165 - DNA, 25 bp, Canis familiaris
gacatgggggaaatcgccagcttcg

SEQ ID NO: 115166 - DNA, 25 bp, Canis familiaris
gactggttcgacaaggccaagttcg

SEQ ID NO: 115167 - DNA, 25 bp, Canis familiaris
gacaggttggacaagatctgacagt

SEQ ID NO: 115168 - DNA, 25 bp, Canis familiaris
gacaggatctgtgaaacggcaggga

SEQ ID NO: 115169 - DNA, 25 bp, Canis familiaris
gacatggatctgtaataacggcagg

SEQ ID NO: 115170 - DNA, 25 bp, Canis familiaris
gacatgtgatcagtgcaataaaaag

SEQ ID NO: 115171 - DNA, 25 bp, Canis familiaris
gacattgtagtcatgaaacagttgc

SEQ ID NO: 115172 - DNA, 25 bp, Canis familiaris
gacagtctttcactggacacgtgtc

SEQ ID NO: 115173 - DNA, 25 bp, Canis familiaris
gacaggattatacttactcagctgt

SEQ ID NO: 115174 - DNA, 25 bp, Canis familiaris
gacaggtgtatggtgatatctcatt

SEQ ID NO: 115175 - DNA, 25 bp, Canis familiaris
gacaggatggatgtatcgatgatgt

SEQ ID NO: 115176 - DNA, 25 bp, Canis familiaris
gacaggatggctgggcacagattgg

SEQ ID NO: 115177 - DNA, 25 bp, Canis familiaris
gacaggacagtgtgactttggctcc

SEQ ID NO: 115178 - DNA, 25 bp, Canis familiaris
gacatctacaggatatttcggtcca

SEQ ID NO: 115179 - DNA, 25 bp, Canis familiaris
gacattaagcatcttttcatgggtc

SEQ ID NO: 115180 - DNA, 25 bp, Canis familiaris
gacatgtactgtcttttcataggct

SEQ ID NO: 115181 - DNA, 25 bp, Canis familiaris
gacgtactcttggtttgcattggcc

SEQ ID NO: 115182 - DNA, 25 bp, Canis familiaris
gactcaacacttgtgggctttccac

SEQ ID NO: 115183 - DNA, 25 bp, Canis familiaris
gacataaactcggtttctttgccca

SEQ ID NO: 115184 - DNA, 25 bp, Canis familiaris
gacatagaactccgtatttttcagt

SEQ ID NO: 115185 - DNA, 25 bp, Canis familiaris
gacatgaaactctgcaccgttatca

SEQ ID NO: 115186 - DNA, 25 bp, Canis familiaris
gacagtcagactcagaccagattcc

SEQ ID NO: 115187 - DNA, 25 bp, Canis familiaris
gagcgtcgagctttgttcagacaac

SEQ ID NO: 115188 - DNA, 25 bp, Canis familiaris
gacagtgcagagacgtttaataaca

SEQ ID NO: 115189 - DNA, 25 bp, Canis familiaris
gacagtcaaatcatcttctcgaacc

SEQ ID NO: 115190 - DNA, 25 bp, Canis familiaris
gacagtgctagtgactgatccgact

SEQ ID NO: 115191 - DNA, 25 bp, Canis familiaris
gacatgtcttcgaacgaccgactac

SEQ ID NO: 115192 - DNA, 25 bp, Canis familiaris
gacatgtggtagaccagccggactc

SEQ ID NO: 115193 - DNA, 25 bp, Canis familiaris
gacagatgggagtcgcacttgcggt

SEQ ID NO: 115194 - DNA, 25 bp, Canis familiaris
gacatgtgggagtcccctcagtatt

SEQ ID NO: 115195 - DNA, 25 bp, Canis familiaris
gacagtcaaagacacaccgtttgcc

SEQ ID NO: 115196 - DNA, 25 bp, Canis familiaris
gacattaataagaaatcagccgtag

SEQ ID NO: 115197 - DNA, 25 bp, Canis familiaris
gacaggacaacagtacatgagtagt

SEQ ID NO: 115198 - DNA, 25 bp, Canis familiaris
gacagtacaacagacgcttaatcca

SEQ ID NO: 115199 - DNA, 25 bp, Canis familiaris
gacagtatacaaccacgttggactt

SEQ ID NO: 115200 - DNA, 25 bp, Canis familiaris
gacagttacatagtctatttgatgc

SEQ ID NO: 115201 - DNA, 25 bp, Canis familiaris
gacatgatattgacactcttgttga

SEQ ID NO: 115202 - DNA, 25 bp, Canis familiaris
gacagattctgcgcttgatttgggg

SEQ ID NO: 115203 - DNA, 25 bp, Canis familiaris
gacagatgcgacaccgatctttagc

SEQ ID NO: 115204 - DNA, 25 bp, Canis familiaris
gacggcaagcatgtggtctttggca

SEQ ID NO: 115205 - DNA, 25 bp, Canis familiaris
gacaggcaacagtttgatccttggg

SEQ ID NO: 115206 - DNA, 25 bp, Canis familiaris
gacaggaagagctaaggccatggga

SEQ ID NO: 115207 - DNA, 25 bp, Canis familiaris
gacaggcaggtcaaagtgccagcgg

SEQ ID NO: 115208 - DNA, 25 bp, Canis familiaris
gacatggggtcttctgtgactgggt

SEQ ID NO: 115209 - DNA, 25 bp, Canis familiaris
gacagggtgctttcgggaaggaggg

SEQ ID NO: 115210 - DNA, 25 bp, Canis familiaris
gacagtcgtcaatggggaagggcgt

SEQ ID NO: 115211 - DNA, 25 bp, Canis familiaris
gacatccgtctatggggcacaggag

SEQ ID NO: 115212 - DNA, 25 bp, Canis familiaris
gacatacgtggtcggggactcggtt

SEQ ID NO: 115213 - DNA, 25 bp, Canis familiaris
gacagatcagtggggggctggctgg

SEQ ID NO: 115214 - DNA, 25 bp, Canis familiaris
gacagaggttctgggtgctgggtac

SEQ ID NO: 115215 - DNA, 25 bp, Canis familiaris
gacagaggtccaggtggtgtgggcc

SEQ ID NO: 115216 - DNA, 25 bp, Canis familiaris
gacagttgccactgtggtgtgaggc

SEQ ID NO: 115217 - DNA, 25 bp, Canis familiaris
gacattcttagctgtgggctgatga

SEQ ID NO: 115218 - DNA, 25 bp, Canis familiaris
gacatgttcgcgttcatagcgcgct

SEQ ID NO: 115219 - DNA, 25 bp, Canis familiaris
gacatgtacctggacaacagctccg

SEQ ID NO: 115220 - DNA, 25 bp, Canis familiaris
gacattccacgtacagatagtccga

SEQ ID NO: 115221 - DNA, 25 bp, Canis familiaris
gacattgcgaccaagatctcgtccg

SEQ ID NO: 115222 - DNA, 25 bp, Canis familiaris
gacatgtccaaggtgacggtccgga

SEQ ID NO: 115223 - DNA, 25 bp, Canis familiaris
gacagtccaatcaatcatcggtttg

SEQ ID NO: 115224 - DNA, 25 bp, Canis familiaris
gacagatcctcacagtcgtggattg

SEQ ID NO: 115225 - DNA, 25 bp, Canis familiaris
gacagactcaaccaacgtggcattg

SEQ ID NO: 115226 - DNA, 25 bp, Canis familiaris
gactacaaactattccgtgcagtgt

SEQ ID NO: 115227 - DNA, 25 bp, Canis familiaris
gacatagaagaatctcactctcact

SEQ ID NO: 115228 - DNA, 25 bp, Canis familiaris
gactagaagctttctacttcttcca

SEQ ID NO: 115229 - DNA, 25 bp, Canis familiaris
gacatgaccagtttctttgttttca

SEQ ID NO: 115230 - DNA, 25 bp, Canis familiaris
gacatgttagtgatttttttacttc

SEQ ID NO: 115231 - DNA, 25 bp, Canis familiaris
gacatttagttttcgcttttgcttt

SEQ ID NO: 115232 - DNA, 25 bp, Canis familiaris
gactttagtcgtgagctcttgtgag

SEQ ID NO: 115233 - DNA, 25 bp, Canis familiaris
gacatttttcttaggttgttagtca

SEQ ID NO: 115234 - DNA, 25 bp, Canis familiaris
gactttgtaccaagtggttcaagta

SEQ ID NO: 115235 - DNA, 25 bp, Canis familiaris
gacttttacctagcacttaaatatg

SEQ ID NO: 115236 - DNA, 25 bp, Canis familiaris
gactttggggcaagccacttagtct

SEQ ID NO: 115237 - DNA, 25 bp, Canis familiaris
gactagggacagaggacttggcttc

SEQ ID NO: 115238 - DNA, 25 bp, Canis familiaris
gacataggccactggagaccttctg

SEQ ID NO: 115239 - DNA, 25 bp, Canis familiaris
gacagagatcccgggaatcccatcg

SEQ ID NO: 115240 - DNA, 25 bp, Canis familiaris
gacagagtctttaacagacccacaa

SEQ ID NO: 115241 - DNA, 25 bp, Canis familiaris
gacaggctgtaaataaccaccaata

SEQ ID NO: 115242 - DNA, 25 bp, Canis familiaris
gacaggctggggaacacccaacttc

SEQ ID NO: 115243 - DNA, 25 bp, Canis familiaris
gacagtgtggatgaaagccctatct

SEQ ID NO: 115244 - DNA, 25 bp, Canis familiaris
gacaggctagatcatacaacctatt

SEQ ID NO: 115245 - DNA, 25 bp, Canis familiaris
gacattctagatttgaccatctcaa

SEQ ID NO: 115246 - DNA, 25 bp, Canis familiaris
gacgttagcatgttggctataagcc

SEQ ID NO: 115247 - DNA, 25 bp, Canis familiaris
gacgttgaatagggttacacctaat

SEQ ID NO: 115248 - DNA, 25 bp, Canis familiaris
gactgaaggttgagtgtcccctaaa

SEQ ID NO: 115249 - DNA, 25 bp, Canis familiaris
gactgagggtattcctgtcccttat

SEQ ID NO: 115250 - DNA, 25 bp, Canis familiaris
gactagctttaagtgtttgtgctta

SEQ ID NO: 115251 - DNA, 25 bp, Canis familiaris
gacatcagccatagcaacatttttc

SEQ ID NO: 115252 - DNA, 25 bp, Canis familiaris
gacatccatgtagtcactcattgtt

SEQ ID NO: 115253 - DNA, 25 bp, Canis familiaris
gacatcactgtggctcagttcatgt

SEQ ID NO: 115254 - DNA, 25 bp, Canis familiaris
gacatcactgagtctcactgtctgc

SEQ ID NO: 115255 - DNA, 25 bp, Canis familiaris
gacatgagctaaacacttctgagac

SEQ ID NO: 115256 - DNA, 25 bp, Canis familiaris
gacatggtgaaagcttttgccaaag

SEQ ID NO: 115257 - DNA, 25 bp, Canis familiaris
gactagtccaaccttatttaccgtg

SEQ ID NO: 115258 - DNA, 25 bp, Canis familiaris
gactacttaaccctattaaggcatt

SEQ ID NO: 115259 - DNA, 25 bp, Canis familiaris
gactacgttaatgttcttacactgt

SEQ ID NO: 115260 - DNA, 25 bp, Canis familiaris
gactacatttcgattccattagctc

SEQ ID NO: 115261 - DNA, 25 bp, Canis familiaris
gacatacatgagggtttctcaccca

SEQ ID NO: 115262 - DNA, 25 bp, Canis familiaris
gacatgaagcaggacttaccccagt

SEQ ID NO: 115263 - DNA, 25 bp, Canis familiaris
gacatcccaggactggatcttccag

SEQ ID NO: 115264 - DNA, 25 bp, Canis familiaris
gacatcctgaacatgtttgtccgca

SEQ ID NO: 115265 - DNA, 25 bp, Canis familiaris
gacatcgctctggatttttacctga

SEQ ID NO: 115266 - DNA, 25 bp, Canis familiaris
gacatccctacattttatacctatg

SEQ ID NO: 115267 - DNA, 25 bp, Canis familiaris
gacatcccagacttttaaacacagc

SEQ ID NO: 115268 - DNA, 25 bp, Canis familiaris
gatatattcaactgtattaccccga

SEQ ID NO: 115269 - DNA, 25 bp, Canis familiaris
gacattccaatctgatctgtaccca

SEQ ID NO: 115270 - DNA, 25 bp, Canis familiaris
gacatgtaaaaagctgtacctacta

SEQ ID NO: 115271 - DNA, 25 bp, Canis familiaris
gacatctaaatttccattcctcata

SEQ ID NO: 115272 - DNA, 25 bp, Canis familiaris
gactcccagttacattcctgtgatg

SEQ ID NO: 115273 - DNA, 25 bp, Canis familiaris
gactaccttaagaattccttggaag

SEQ ID NO: 115274 - DNA, 25 bp, Canis familiaris
gactaccttagggtatccttgcggg

SEQ ID NO: 115275 - DNA, 25 bp, Canis familiaris
gactaccttatgatttccttggatg

SEQ ID NO: 115276 - DNA, 25 bp, Canis familiaris
gacataggctttcttgtcctttctc

SEQ ID NO: 115277 - DNA, 25 bp, Canis familiaris
gacatggccattgttttcagtattt

SEQ ID NO: 115278 - DNA, 25 bp, Canis familiaris
gacatggatttctttttcgttctct

SEQ ID NO: 115279 - DNA, 25 bp, Canis familiaris
gacattgttagtcttctctggtctc

SEQ ID NO: 115280 - DNA, 25 bp, Canis familiaris
gacatttgtgcattggactcttttg

SEQ ID NO: 115281 - DNA, 25 bp, Canis familiaris
gacattattaatggcctatgcttta

SEQ ID NO: 115282 - DNA, 25 bp, Canis familiaris
gacttctgaaggggcttgactgtac

SEQ ID NO: 115283 - DNA, 25 bp, Canis familiaris
gacatttgaatgttcctctacttgg

SEQ ID NO: 115284 - DNA, 25 bp, Canis familiaris
gacataggactgtttcatcccattt

SEQ ID NO: 115285 - DNA, 25 bp, Canis familiaris
gactgggacctgtttacgaaccctg

SEQ ID NO: 115286 - DNA, 25 bp, Canis familiaris
gacattgagcccagtggtcgaaccc

SEQ ID NO: 115287 - DNA, 25 bp, Canis familiaris
gacatcagacccagaagggaccccg

SEQ ID NO: 115288 - DNA, 25 bp, Canis familiaris
gacatgcgagtgagcgaagggcaca

SEQ ID NO: 115289 - DNA, 25 bp, Canis familiaris
gacatgggcatgacgtacgcggagc

SEQ ID NO: 115290 - DNA, 25 bp, Canis familiaris
gacaggctgagggctcgggaggccc

SEQ ID NO: 115291 - DNA, 25 bp, Canis familiaris
gacagtgaaggccttggctgagcgc

SEQ ID NO: 115292 - DNA, 25 bp, Canis familiaris
gacaggccagagcaatagctgagga

SEQ ID NO: 115293 - DNA, 25 bp, Canis familiaris
gacatcgccaaggcaaccggtgatt

SEQ ID NO: 115294 - DNA, 25 bp, Canis familiaris
gacatcgccaaggcaaccggtgatt

SEQ ID NO: 115295 - DNA, 25 bp, Canis familiaris
gacatcgccaaggcaaccggtgatt

SEQ ID NO: 115296 - DNA, 25 bp, Canis familiaris
gacatcgccaaggcaaccggtgatt

SEQ ID NO: 115297 - DNA, 25 bp, Canis familiaris
gacattgccaaggacattcggaatc

SEQ ID NO: 115298 - DNA, 25 bp, Canis familiaris
gacttcccacggattgcaaacggag

SEQ ID NO: 115299 - DNA, 25 bp, Canis familiaris
gacttccctagtgttcacaacgact

SEQ ID NO: 115300 - DNA, 25 bp, Canis familiaris
gacttacctactgttctcaacgata

SEQ ID NO: 115301 - DNA, 25 bp, Canis familiaris
gacgtagctgcatctacttgtaact

SEQ ID NO: 115302 - DNA, 25 bp, Canis familiaris
gacagttcacaagacttgctcctct

SEQ ID NO: 115303 - DNA, 25 bp, Canis familiaris
gacatttgcaaaccatttctctctt

SEQ ID NO: 115304 - DNA, 25 bp, Canis familiaris
gacatactggttcatgtttcctttg

SEQ ID NO: 115305 - DNA, 25 bp, Canis familiaris
gacatactttctcagcaaatcctta

SEQ ID NO: 115306 - DNA, 25 bp, Canis familiaris
gacatttctccagagaagacctgta

SEQ ID NO: 115307 - DNA, 25 bp, Canis familiaris
gacatctgtttagcaagaacctgtg

SEQ ID NO: 115308 - DNA, 25 bp, Canis familiaris
gacatcctctatctcaataactttt

SEQ ID NO: 115309 - DNA, 25 bp, Canis familiaris
gacttctgggcagtagtaactttct

SEQ ID NO: 115310 - DNA, 25 bp, Canis familiaris
gacttctggacttaggatcctggac

SEQ ID NO: 115311 - DNA, 25 bp, Canis familiaris
gacttcttggttgtatccagacacc

SEQ ID NO: 115312 - DNA, 25 bp, Canis familiaris
gacttcctgtgtgttcaccaaacca

SEQ ID NO: 115313 - DNA, 25 bp, Canis familiaris
gacttttgttgccctaaaataccat

SEQ ID NO: 115314 - DNA, 25 bp, Canis familiaris
gacttgtgtgtctccggacactacc

SEQ ID NO: 115315 - DNA, 25 bp, Canis familiaris
gacagtggtgactccgacacaagtc

SEQ ID NO: 115316 - DNA, 25 bp, Canis familiaris
gacagtctataactcccaaaaccat

SEQ ID NO: 115317 - DNA, 25 bp, Canis familiaris
gactgtcttccctcctgaaagacag

SEQ ID NO: 115318 - DNA, 25 bp, Canis familiaris
gacttgacctgtgacctcaaaacaa

SEQ ID NO: 115319 - DNA, 25 bp, Canis familiaris
gacttgtttcatgcatggcttaaaa

SEQ ID NO: 115320 - DNA, 25 bp, Canis familiaris
gacagtgttgtcttagtgtgattaa

SEQ ID NO: 115321 - DNA, 25 bp, Canis familiaris
gacattgtagtcttgggctgcactg

SEQ ID NO: 115322 - DNA, 25 bp, Canis familiaris
gacatctacaacgtgctggtacgca

SEQ ID NO: 115323 - DNA, 25 bp, Canis familiaris
gacatctgaccaggttggatcaaga

SEQ ID NO: 115324 - DNA, 25 bp, Canis familiaris
gacattgacccagttgtagccagat

SEQ ID NO: 115325 - DNA, 25 bp, Canis familiaris
gacatttcctcagttgattcatctc

SEQ ID NO: 115326 - DNA, 25 bp, Canis familiaris
gacttgatggtgatccattcatcta

SEQ ID NO: 115327 - DNA, 25 bp, Canis familiaris
gacatggtggtgacctccacacatg

SEQ ID NO: 115328 - DNA, 25 bp, Canis familiaris
gacatggagcagtacctgtccacag

SEQ ID NO: 115329 - DNA, 25 bp, Canis familiaris
gacatatgatgctaactgctgccca

SEQ ID NO: 115330 - DNA, 25 bp, Canis familiaris
gacttgtgctgatcgtgctaaattt

SEQ ID NO: 115331 - DNA, 25 bp, Canis familiaris
gactatccgaacactgagaagctct

SEQ ID NO: 115332 - DNA, 25 bp, Canis familiaris
gacttcctaggcctgctagatgggc

SEQ ID NO: 115333 - DNA, 25 bp, Canis familiaris
gacttcactgaggcggtcattggtg

SEQ ID NO: 115334 - DNA, 25 bp, Canis familiaris
gagttcggactcggatcatattgaa

SEQ ID NO: 115335 - DNA, 25 bp, Canis familiaris
gacttacattctgggaaactgcaca

SEQ ID NO: 115336 - DNA, 25 bp, Canis familiaris
gactaccatatcccgatagagtcca

SEQ ID NO: 115337 - DNA, 25 bp, Canis familiaris
gacttcctccaaggacgagatccag

SEQ ID NO: 115338 - DNA, 25 bp, Canis familiaris
gacttcctccagtctgaatgacatt

SEQ ID NO: 115339 - DNA, 25 bp, Canis familiaris
gacatccccgacttaatgatacttc

SEQ ID NO: 115340 - DNA, 25 bp, Canis familiaris
gacatcccctgatcaaagacatgct

SEQ ID NO: 115341 - DNA, 25 bp, Canis familiaris
gacatccctggatcaaagacagtgc

SEQ ID NO: 115342 - DNA, 25 bp, Canis familiaris
gacatcgctcaaatccaacacaagt

SEQ ID NO: 115343 - DNA, 25 bp, Canis familiaris
gacatatccaataatctgaaccgtg

SEQ ID NO: 115344 - DNA, 25 bp, Canis familiaris
gacatagctgaacctcatataccgt

SEQ ID NO: 115345 - DNA, 25 bp, Canis familiaris
gactagctcagattctcacatgtac

SEQ ID NO: 115346 - DNA, 25 bp, Canis familiaris
gactacatggaccccattgacggta

SEQ ID NO: 115347 - DNA, 25 bp, Canis familiaris
gacataaggagggcccgaggcagga

SEQ ID NO: 115348 - DNA, 25 bp, Canis familiaris
gacatcaacgagtgtgacgaggccg

SEQ ID NO: 115349 - DNA, 25 bp, Canis familiaris
gacatcgacgtgattggcctgagct

SEQ ID NO: 115350 - DNA, 25 bp, Canis familiaris
gacatcaactatgcctggcctacag

SEQ ID NO: 115351 - DNA, 25 bp, Canis familiaris
gacatgagggcagcctgggtagctc

SEQ ID NO: 115352 - DNA, 25 bp, Canis familiaris
gacatgggtgagcagcgtggcggtc

SEQ ID NO: 115353 - DNA, 25 bp, Canis familiaris
gacagggtgggacgcggatggtggc

SEQ ID NO: 115354 - DNA, 25 bp, Canis familiaris
gacaggaatgccatgccgggtgggc

SEQ ID NO: 115355 - DNA, 25 bp, Canis familiaris
gacatgagactcaatcccgggtgtc

SEQ ID NO: 115356 - DNA, 25 bp, Canis familiaris
gactaggctatacctcagactgttc

SEQ ID NO: 115357 - DNA, 25 bp, Canis familiaris
gactattaattactggatatgttgc

SEQ ID NO: 115358 - DNA, 25 bp, Canis familiaris
gacataataaagctgtgtgtgtgtg

SEQ ID NO: 115359 - DNA, 25 bp, Canis familiaris
gacatgagaacgtggtggaggtggg

SEQ ID NO: 115360 - DNA, 25 bp, Canis familiaris
gacatatttgcgtggggggaagggg

SEQ ID NO: 115361 - DNA, 25 bp, Canis familiaris
gacttgttgcggaagcggcgagaac

SEQ ID NO: 115362 - DNA, 25 bp, Canis familiaris
gacttggctcctgaggtgggcaagc

SEQ ID NO: 115363 - DNA, 25 bp, Canis familiaris
gatcttgaacctgtgtctgtagtag

SEQ ID NO: 115364 - DNA, 25 bp, Canis familiaris
gacatccaacctggcttctggagtc

SEQ ID NO: 115365 - DNA, 25 bp, Canis familiaris
gacatcatcaacatgctttctgtac

SEQ ID NO: 115366 - DNA, 25 bp, Canis familiaris
gactcagaccagattccatgtgcac

SEQ ID NO: 115367 - DNA, 25 bp, Canis familiaris
gacatcttccatcttctaatgatcc

SEQ ID NO: 115368 - DNA, 25 bp, Canis familiaris
gacatgttaccgttctggattccag

SEQ ID NO: 115369 - DNA, 25 bp, Canis familiaris
gacatgcttactgaatccaatctta

SEQ ID NO: 115370 - DNA, 25 bp, Canis familiaris
gacattaacttgcattccattcttg

SEQ ID NO: 115371 - DNA, 25 bp, Canis familiaris
gacataaattctcatttctctggga

SEQ ID NO: 115372 - DNA, 25 bp, Canis familiaris
gacatgaactggttatcttttggaa

SEQ ID NO: 115373 - DNA, 25 bp, Canis familiaris
gacgaacatcggacatcatttttga

SEQ ID NO: 115374 - DNA, 25 bp, Canis familiaris
gacatcaacactgggcatctttttc

SEQ ID NO: 115375 - DNA, 25 bp, Canis familiaris
gacatcatactggaaccctgtcttc

SEQ ID NO: 115376 - DNA, 25 bp, Canis familiaris
gacatgatcttgggttcctataatc

SEQ ID NO: 115377 - DNA, 25 bp, Canis familiaris
gacttttgcctggcatccttgaatc

SEQ ID NO: 115378 - DNA, 25 bp, Canis familiaris
gacttgttagctactgccttatata

SEQ ID NO: 115379 - DNA, 25 bp, Canis familiaris
gacattttatcttgtccgtgaagat

SEQ ID NO: 115380 - DNA, 25 bp, Canis familiaris
gacattttatcttgtccgtgaagat

SEQ ID NO: 115381 - DNA, 25 bp, Canis familiaris
gacatcatcctcatacttcgagaag

SEQ ID NO: 115382 - DNA, 25 bp, Canis familiaris
gacataacacaaacctctcaagagt

SEQ ID NO: 115383 - DNA, 25 bp, Canis familiaris
gacatgaacagaaatctcacagaag

SEQ ID NO: 115384 - DNA, 25 bp, Canis familiaris
gacatggacaatagacaccaaaata

SEQ ID NO: 115385 - DNA, 25 bp, Canis familiaris
gacattacaatgatgccacacaaat

SEQ ID NO: 115386 - DNA, 25 bp, Canis familiaris
gacatgtaccatgagcacaaagaac

SEQ ID NO: 115387 - DNA, 25 bp, Canis familiaris
gacatcatcaaggtggccaaggaaa

SEQ ID NO: 115388 - DNA, 25 bp, Canis familiaris
gacatctcagatgggacaccggctg

SEQ ID NO: 115389 - DNA, 25 bp, Canis familiaris
gacatctggaatagacacctgggcc

SEQ ID NO: 115390 - DNA, 25 bp, Canis familiaris
gacatccgtaaggacctgtatgcca

SEQ ID NO: 115391 - DNA, 25 bp, Canis familiaris
gacatccgcaaagacctgtacgcca

SEQ ID NO: 115392 - DNA, 25 bp, Canis familiaris
gacatccgcaaagacctgtacgcca

SEQ ID NO: 115393 - DNA, 25 bp, Canis familiaris
gacttcagaaaatccattccccagt

SEQ ID NO: 115394 - DNA, 25 bp, Canis familiaris
gacttagaccaatcctatcactttc

SEQ ID NO: 115395 - DNA, 25 bp, Canis familiaris
gacttcagtttatctaagcctcttc

SEQ ID NO: 115396 - DNA, 25 bp, Canis familiaris
gacttcctttaacagacactcaact

SEQ ID NO: 115397 - DNA, 25 bp, Canis familiaris
gacatctttttacaactcatccgac

SEQ ID NO: 115398 - DNA, 25 bp, Canis familiaris
gagcatttttaaaatcccaactgtc

SEQ ID NO: 115399 - DNA, 25 bp, Canis familiaris
gacatctattattatcctccaaact

SEQ ID NO: 115400 - DNA, 25 bp, Canis familiaris
gacattgcattttccacttaacaat

SEQ ID NO: 115401 - DNA, 25 bp, Canis familiaris
gacttgattttctttaaatcctcca

SEQ ID NO: 115402 - DNA, 25 bp, Canis familiaris
gactaaacttttataagctgctcaa

SEQ ID NO: 115403 - DNA, 25 bp, Canis familiaris
gacttaacgtttttcacgttcatat

SEQ ID NO: 115404 - DNA, 25 bp, Canis familiaris
gacttttgccttataccgtgaatct

SEQ ID NO: 115405 - DNA, 25 bp, Canis familiaris
gacgtcattgccattaagttccttc

SEQ ID NO: 115406 - DNA, 25 bp, Canis familiaris
gacttatgttgctgtaagtactttg

SEQ ID NO: 115407 - DNA, 25 bp, Canis familiaris
gacatatggggctgttctatactat

SEQ ID NO: 115408 - DNA, 25 bp, Canis familiaris
gactaggttattctattactagggt

SEQ ID NO: 115409 - DNA, 25 bp, Canis familiaris
gactaggttttgctgaactgactgg

SEQ ID NO: 115410 - DNA, 25 bp, Canis familiaris
gacatggggttttgggatcttctga

SEQ ID NO: 115411 - DNA, 25 bp, Canis familiaris
gactgaaggtttagaggatgccact

SEQ ID NO: 115412 - DNA, 25 bp, Canis familiaris
gactaagcatacttgaggggcgcct

SEQ ID NO: 115413 - DNA, 25 bp, Canis familiaris
gacatgacgcacgtgggggcgaggc

SEQ ID NO: 115414 - DNA, 25 bp, Canis familiaris
gacaggcctggtaggggctagctgc

SEQ ID NO: 115415 - DNA, 25 bp, Canis familiaris
gacaggcgctttggggacaatccat

SEQ ID NO: 115416 - DNA, 25 bp, Canis familiaris
gacatgaagctttcctggacaacca

SEQ ID NO: 115417 - DNA, 25 bp, Canis familiaris
gactatcagcctagccttgaatgcc

SEQ ID NO: 115418 - DNA, 25 bp, Canis familiaris
gactacagcggtgcttgacacatag

SEQ ID NO: 115419 - DNA, 25 bp, Canis familiaris
gactacgggtgctcggacagcaaac

SEQ ID NO: 115420 - DNA, 25 bp, Canis familiaris
gacttcgtggatgccttggaggaca

SEQ ID NO: 115421 - DNA, 25 bp, Canis familiaris
gacttccttaactctggagtgccct

SEQ ID NO: 115422 - DNA, 25 bp, Canis familiaris
gacttccttaactcggacatggttc

SEQ ID NO: 115423 - DNA, 25 bp, Canis familiaris
gacttccacagaacccagttcaggc

SEQ ID NO: 115424 - DNA, 25 bp, Canis familiaris
gacttgcccatgaagcccaataaag

SEQ ID NO: 115425 - DNA, 25 bp, Canis familiaris
gacattcaccataacctaataaact

SEQ ID NO: 115426 - DNA, 25 bp, Canis familiaris
gacattccactttcctagattatag

SEQ ID NO: 115427 - DNA, 25 bp, Canis familiaris
gacttacctgttcctaatgattagc

SEQ ID NO: 115428 - DNA, 25 bp, Canis familiaris
gacttggcctggcactgaatttctc

SEQ ID NO: 115429 - DNA, 25 bp, Canis familiaris
gacattgtcgcaagtcacagaatta

SEQ ID NO: 115430 - DNA, 25 bp, Canis familiaris
gacatttccatcatcacagaaagtt

SEQ ID NO: 115431 - DNA, 25 bp, Canis familiaris
gacatttgcccttagcagtgtcagt

SEQ ID NO: 115432 - DNA, 25 bp, Canis familiaris
gacttcgcactcaatagcatgctac

SEQ ID NO: 115433 - DNA, 25 bp, Canis familiaris
gactcatcagtcttatatcctaccc

SEQ ID NO: 115434 - DNA, 25 bp, Canis familiaris
gactacctcatgaagatcctgaccg

SEQ ID NO: 115435 - DNA, 25 bp, Canis familiaris
gacatacactctccaatacacaatt

SEQ ID NO: 115436 - DNA, 25 bp, Canis familiaris
gacatatactatgacatgatatctt

SEQ ID NO: 115437 - DNA, 25 bp, Canis familiaris
gacatgtacattcatctgctcacgt

SEQ ID NO: 115438 - DNA, 25 bp, Canis familiaris
gacatgttcattttcacgactgatg

SEQ ID NO: 115439 - DNA, 25 bp, Canis familiaris
gacatgcattgattattctggcctg

SEQ ID NO: 115440 - DNA, 25 bp, Canis familiaris
gacatctggcatcatttgcagcact

SEQ ID NO: 115441 - DNA, 25 bp, Canis familiaris
gacatgcaggctggcaggtcatact

SEQ ID NO: 115442 - DNA, 25 bp, Canis familiaris
gacatgatcgctactgggacagcta

SEQ ID NO: 115443 - DNA, 25 bp, Canis familiaris
gacatgattctttgggaggtgatac

SEQ ID NO: 115444 - DNA, 25 bp, Canis familiaris
gacatgtcctgtgcagggggatcac

SEQ ID NO: 115445 - DNA, 25 bp, Canis familiaris
gacatcaaggtggcagcaggggaca

SEQ ID NO: 115446 - DNA, 25 bp, Canis familiaris
gacatcctggacacagcgggccagg

SEQ ID NO: 115447 - DNA, 25 bp, Canis familiaris
gacatcctgaggaaggctgtccaca

SEQ ID NO: 115448 - DNA, 25 bp, Canis familiaris
gacatccagaacaagcgcttctacc

SEQ ID NO: 115449 - DNA, 25 bp, Canis familiaris
gactaaacctgaccattgtacagca

SEQ ID NO: 115450 - DNA, 25 bp, Canis familiaris
gactcagacccatctactgttagcg

SEQ ID NO: 115451 - DNA, 25 bp, Canis familiaris
gactcagaccacaactaatagtaag

SEQ ID NO: 115452 - DNA, 25 bp, Canis familiaris
gacatatgttccactcattcagtcc

SEQ ID NO: 115453 - DNA, 25 bp, Canis familiaris
gacatgttttccctcagtggtactt

SEQ ID NO: 115454 - DNA, 25 bp, Canis familiaris
gacatctttctgggctggggtacag

SEQ ID NO: 115455 - DNA, 25 bp, Canis familiaris
gacattgtcctggtgggtggttcta

SEQ ID NO: 115456 - DNA, 25 bp, Canis familiaris
gacttgtctgcaggagctgtgtctg

SEQ ID NO: 115457 - DNA, 25 bp, Canis familiaris
gacttgtcttgctgtctttgtcaga

SEQ ID NO: 115458 - DNA, 25 bp, Canis familiaris
gacttctctctggtgactttggaat

SEQ ID NO: 115459 - DNA, 25 bp, Canis familiaris
gactaatcctgcttttctggaactt

SEQ ID NO: 115460 - DNA, 25 bp, Canis familiaris
gactcaagccctgtggcggagggca

SEQ ID NO: 115461 - DNA, 25 bp, Canis familiaris
gactcaagccctgtgcgaagggcat

SEQ ID NO: 115462 - DNA, 25 bp, Canis familiaris
gactcagcgcctgtggcggagggtc

SEQ ID NO: 115463 - DNA, 25 bp, Canis familiaris
gactcactgtctttgggggtgtgaa

SEQ ID NO: 115464 - DNA, 25 bp, Canis familiaris
gacatagcttcatttaagcctgtgg

SEQ ID NO: 115465 - DNA, 25 bp, Canis familiaris
gacatgatgctctatttaggcgctt

SEQ ID NO: 115466 - DNA, 25 bp, Canis familiaris
gactactttttatgcgttatttcgt

SEQ ID NO: 115467 - DNA, 25 bp, Canis familiaris
gactacgtattcaagctgcatttca

SEQ ID NO: 115468 - DNA, 25 bp, Canis familiaris
gacatccacgacttaatgatcttca

SEQ ID NO: 115469 - DNA, 25 bp, Canis familiaris
gacttgcaggattaagtgtgcttat

SEQ ID NO: 115470 - DNA, 25 bp, Canis familiaris
gacattgctggccataaggtccttt

SEQ ID NO: 115471 - DNA, 25 bp, Canis familiaris
gacattccgcaaacaagtcagcaat

SEQ ID NO: 115472 - DNA, 25 bp, Canis familiaris
gacttcccaacaagattcacatgca

SEQ ID NO: 115473 - DNA, 25 bp, Canis familiaris
gactaccaagacaagtacagccacc

SEQ ID NO: 115474 - DNA, 25 bp, Canis familiaris
gactacccagatgcatatactacct

SEQ ID NO: 115475 - DNA, 25 bp, Canis familiaris
gactaacaatggtctaaccaccaaa

SEQ ID NO: 115476 - DNA, 25 bp, Canis familiaris
gactaagctagcgaggaaccctgaa

SEQ ID NO: 115477 - DNA, 25 bp, Canis familiaris
gacttctctgctagaggagaccctg

SEQ ID NO: 115478 - DNA, 25 bp, Canis familiaris
gacattcctctattaacacacctga

SEQ ID NO: 115479 - DNA, 25 bp, Canis familiaris
gacttccctgacacagcatacgtac

SEQ ID NO: 115480 - DNA, 25 bp, Canis familiaris
gacttccccagctaaatatctatac

SEQ ID NO: 115481 - DNA, 25 bp, Canis familiaris
gacttacccaggtgtcatgcacagc

SEQ ID NO: 115482 - DNA, 25 bp, Canis familiaris
gacatcaaggccaagtttctacagg

SEQ ID NO: 115483 - DNA, 25 bp, Canis familiaris
gacatcggagttacttggtgactgg

SEQ ID NO: 115484 - DNA, 25 bp, Canis familiaris
gacatcgcaggtgtcctgggaagcg

SEQ ID NO: 115485 - DNA, 25 bp, Canis familiaris
gacatcctggtctacctgaaacagc

SEQ ID NO: 115486 - DNA, 25 bp, Canis familiaris
gacatttgtacattcctgataactg

SEQ ID NO: 115487 - DNA, 25 bp, Canis familiaris
gacttggatcaatcaaatgtgactg

SEQ ID NO: 115488 - DNA, 25 bp, Canis familiaris
gacttcgacactgccaatggcttgc

SEQ ID NO: 115489 - DNA, 25 bp, Canis familiaris
gactacaacctgtcccaggtgtgcg

SEQ ID NO: 115490 - DNA, 25 bp, Canis familiaris
gacatacgactttgacatcgcggtc

SEQ ID NO: 115491 - DNA, 25 bp, Canis familiaris
gacatcaccttttacagcatcggat

SEQ ID NO: 115492 - DNA, 25 bp, Canis familiaris
gactattagttattgcagatcggaa

SEQ ID NO: 115493 - DNA, 25 bp, Canis familiaris
gactacttttaagacacgagcaata

SEQ ID NO: 115494 - DNA, 25 bp, Canis familiaris
gactggttttagaaacctgaggcct

SEQ ID NO: 115495 - DNA, 25 bp, Canis familiaris
gatcttttttggggacttggccaat

SEQ ID NO: 115496 - DNA, 25 bp, Canis familiaris
gactttcttctggccgatttggcct

SEQ ID NO: 115497 - DNA, 25 bp, Canis familiaris
gacattctttttggttttggcctct

SEQ ID NO: 115498 - DNA, 25 bp, Canis familiaris
gacattcctcaacttgtttatggta

SEQ ID NO: 115499 - DNA, 25 bp, Canis familiaris
gacttggtcagcctatttcttggtt

SEQ ID NO: 115500 - DNA, 25 bp, Canis familiaris
gacttggttgcttataattcccatc

SEQ ID NO: 115501 - DNA, 25 bp, Canis familiaris
gacatgctttatgttctcttccaat

SEQ ID NO: 115502 - DNA, 25 bp, Canis familiaris
gacatgtttatcctgtattatcctt

SEQ ID NO: 115503 - DNA, 25 bp, Canis familiaris
gacattttctcacataatatttttc

SEQ ID NO: 115504 - DNA, 25 bp, Canis familiaris
gacatttttcattacagcctgtttt

SEQ ID NO: 115505 - DNA, 25 bp, Canis familiaris
gacatattttcacagcaggtggcta

SEQ ID NO: 115506 - DNA, 25 bp, Canis familiaris
gacatacccacacagagtctggcat

SEQ ID NO: 115507 - DNA, 25 bp, Canis familiaris
gacatagcccactaggcagtgcagg

SEQ ID NO: 115508 - DNA, 25 bp, Canis familiaris
gacttcacaccattagcgggtgaga

SEQ ID NO: 115509 - DNA, 25 bp, Canis familiaris
gacatgccccctgacagggagcaga

SEQ ID NO: 115510 - DNA, 25 bp, Canis familiaris
gacatgctcccacaatgactggaag

SEQ ID NO: 115511 - DNA, 25 bp, Canis familiaris
gacatccaccggaagcgcatggaga

SEQ ID NO: 115512 - DNA, 25 bp, Canis familiaris
gacatcctttcgagcctgagaagca

SEQ ID NO: 115513 - DNA, 25 bp, Canis familiaris
gacttctttggttcctcatgaagca

SEQ ID NO: 115514 - DNA, 25 bp, Canis familiaris
gacttgttcaggatcacatcgtaca

SEQ ID NO: 115515 - DNA, 25 bp, Canis familiaris
gacttattattttccacattatcaa

SEQ ID NO: 115516 - DNA, 25 bp, Canis familiaris
gacattttggttttcagagattcac

SEQ ID NO: 115517 - DNA, 25 bp, Canis familiaris
gacttcttggtttgccaggatactg

SEQ ID NO: 115518 - DNA, 25 bp, Canis familiaris
gacttcaatcacatccacgtagact

SEQ ID NO: 115519 - DNA, 25 bp, Canis familiaris
gacttctagcacaaccatctaacat

SEQ ID NO: 115520 - DNA, 25 bp, Canis familiaris
gacattatacccctgcttaagatca

SEQ ID NO: 115521 - DNA, 25 bp, Canis familiaris
gactcattcccgctgttgaattatt

SEQ ID NO: 115522 - DNA, 25 bp, Canis familiaris
gacttatccccaaattcaagtatgc

SEQ ID NO: 115523 - DNA, 25 bp, Canis familiaris
gactctacccctcttggagtggggt

SEQ ID NO: 115524 - DNA, 25 bp, Canis familiaris
gactttcctccgatcttgggaaggt

SEQ ID NO: 115525 - DNA, 25 bp, Canis familiaris
gactttcccacgatgtttgcgaggt

SEQ ID NO: 115526 - DNA, 25 bp, Canis familiaris
gacttctcctgaggaggttcctggc

SEQ ID NO: 115527 - DNA, 25 bp, Canis familiaris
gactgtccctgagccagggtctgta

SEQ ID NO: 115528 - DNA, 25 bp, Canis familiaris
gacattcccaaagtcagctggacga

SEQ ID NO: 115529 - DNA, 25 bp, Canis familiaris
gacatctcacaaacccaggaggcga

SEQ ID NO: 115530 - DNA, 25 bp, Canis familiaris
gactctagataacctcgggccgatc

SEQ ID NO: 115531 - DNA, 25 bp, Canis familiaris
gacatatatatggaccgaggcccgt

SEQ ID NO: 115532 - DNA, 25 bp, Canis familiaris
gacataaatcgaccgatctctccga

SEQ ID NO: 115533 - DNA, 25 bp, Canis familiaris
gacatgacacaccaaaatgcctttg

SEQ ID NO: 115534 - DNA, 25 bp, Canis familiaris
gacatcacatcagaatttgcacgag

SEQ ID NO: 115535 - DNA, 25 bp, Canis familiaris
gacataatctgatcattctctcggc

SEQ ID NO: 115536 - DNA, 25 bp, Canis familiaris
gacatagacgagtcgtccccaggca

SEQ ID NO: 115537 - DNA, 25 bp, Canis familiaris
gacatcgacgagtgtgtgaccggca

SEQ ID NO: 115538 - DNA, 25 bp, Canis familiaris
gacatgagggcaaaattgaccgtca

SEQ ID NO: 115539 - DNA, 25 bp, Canis familiaris
gacatagcaggtggaaagtacattc

SEQ ID NO: 115540 - DNA, 25 bp, Canis familiaris
gactatgaggctgcgaaggcagatg

SEQ ID NO: 115541 - DNA, 25 bp, Canis familiaris
gacttgatgcgcttcattcaggaga

SEQ ID NO: 115542 - DNA, 25 bp, Canis familiaris
gacatctattcaaagtcaggaagtc

SEQ ID NO: 115543 - DNA, 25 bp, Canis familiaris
gacatctttaggcaagtggcacctt

SEQ ID NO: 115544 - DNA, 25 bp, Canis familiaris
gacatctcttgggccaatggacacc

SEQ ID NO: 115545 - DNA, 25 bp, Canis familiaris
gacatccattgtacaactggtccaa

SEQ ID NO: 115546 - DNA, 25 bp, Canis familiaris
gacatctgtcgtagaaacctcgata

SEQ ID NO: 115547 - DNA, 25 bp, Canis familiaris
gacatcttaataaagcacctcgtaa

SEQ ID NO: 115548 - DNA, 25 bp, Canis familiaris
gacatttgaaaactgctcctggtgg

SEQ ID NO: 115549 - DNA, 25 bp, Canis familiaris
gacatttgcggcaagatgcccttgt

SEQ ID NO: 115550 - DNA, 25 bp, Canis familiaris
gacattagcttgagaccatttattc

SEQ ID NO: 115551 - DNA, 25 bp, Canis familiaris
gacatttccatttcatccatttgtt

SEQ ID NO: 115552 - DNA, 25 bp, Canis familiaris
gacattcccagttctcaatatagtc

SEQ ID NO: 115553 - DNA, 25 bp, Canis familiaris
gacatcagtcctcactcagaataga

SEQ ID NO: 115554 - DNA, 25 bp, Canis familiaris
gacatgcagttactattaaatagac

SEQ ID NO: 115555 - DNA, 25 bp, Canis familiaris
gacatgcagtttcgaattaggtggc

SEQ ID NO: 115556 - DNA, 25 bp, Canis familiaris
gacatgcttttcaacctagagcttc

SEQ ID NO: 115557 - DNA, 25 bp, Canis familiaris
gacattttccattcattagatcttg

SEQ ID NO: 115558 - DNA, 25 bp, Canis familiaris
gacatattctccatcttacattcga

SEQ ID NO: 115559 - DNA, 25 bp, Canis familiaris
gacattttgcttattgcacaactgc

SEQ ID NO: 115560 - DNA, 25 bp, Canis familiaris
gacatcttttttaggaacgtcctgc

SEQ ID NO: 115561 - DNA, 25 bp, Canis familiaris
gacattagttgtcagtgagtctggc

SEQ ID NO: 115562 - DNA, 25 bp, Canis familiaris
gacatccagcttcgggagagcctgg

SEQ ID NO: 115563 - DNA, 25 bp, Canis familiaris
gacatcccctggtcaggtggtgagc

SEQ ID NO: 115564 - DNA, 25 bp, Canis familiaris
gacatccgcactggccagtgtgagt

SEQ ID NO: 115565 - DNA, 25 bp, Canis familiaris
gacatctgccacaccagtggatggg

SEQ ID NO: 115566 - DNA, 25 bp, Canis familiaris
gacatttactgaagcagtgtgtgtg

SEQ ID NO: 115567 - DNA, 25 bp, Canis familiaris
gacattgctgctagaaacattgggg

SEQ ID NO: 115568 - DNA, 25 bp, Canis familiaris
gacatacgctggcaacgttgcggac

SEQ ID NO: 115569 - DNA, 25 bp, Canis familiaris
gactacgtccgaagccttcggtgtt

SEQ ID NO: 115570 - DNA, 25 bp, Canis familiaris
gacttcctactaagacttgcgttgc

SEQ ID NO: 115571 - DNA, 25 bp, Canis familiaris
gacttcctactaagacttgcgttgc

SEQ ID NO: 115572 - DNA, 25 bp, Canis familiaris
gacttctcttaactacttggtccta

SEQ ID NO: 115573 - DNA, 25 bp, Canis familiaris
gacatttattaaactttggctcaaa

SEQ ID NO: 115574 - DNA, 25 bp, Canis familiaris
gacatttttagtacagtttgccagt

SEQ ID NO: 115575 - DNA, 25 bp, Canis familiaris
gacattccgcaagaagtttcacagg

SEQ ID NO: 115576 - DNA, 25 bp, Canis familiaris
gactatcgccacaaacgtcgtaagg

SEQ ID NO: 115577 - DNA, 25 bp, Canis familiaris
gacttcacggtaacgtctgtctagc

SEQ ID NO: 115578 - DNA, 25 bp, Canis familiaris
gacttcaagggccagctgtgtgagc

SEQ ID NO: 115579 - DNA, 25 bp, Canis familiaris
gacatctaaggactgagcttgtggc

SEQ ID NO: 115580 - DNA, 25 bp, Canis familiaris
gacatctgaagctgtggcttggcct

SEQ ID NO: 115581 - DNA, 25 bp, Canis familiaris
gacatctgaccaagtactattgcca

SEQ ID NO: 115582 - DNA, 25 bp, Canis familiaris
gacattactacggacagatctccaa

SEQ ID NO: 115583 - DNA, 25 bp, Canis familiaris
gacattactgacggcgcaaaccatc

SEQ ID NO: 115584 - DNA, 25 bp, Canis familiaris
gacatctatgagtccggagaaggat

SEQ ID NO: 115585 - DNA, 25 bp, Canis familiaris
gacatcgatgagtcccgagactgaa

SEQ ID NO: 115586 - DNA, 25 bp, Canis familiaris
gacttgagatttcctgaactaaccc

SEQ ID NO: 115587 - DNA, 25 bp, Canis familiaris
gacttagcatttctagagggcccga

SEQ ID NO: 115588 - DNA, 25 bp, Canis familiaris
gacttggtttccagagaggcaccca

SEQ ID NO: 115589 - DNA, 25 bp, Canis familiaris
gacgtgatttgtgccggacgacagg

SEQ ID NO: 115590 - DNA, 25 bp, Canis familiaris
gacatttctttcgcatggactgaca

SEQ ID NO: 115591 - DNA, 25 bp, Canis familiaris
gacatattctcttaaggggcttcag

SEQ ID NO: 115592 - DNA, 25 bp, Canis familiaris
gacatcattccctaagtggaccaaa

SEQ ID NO: 115593 - DNA, 25 bp, Canis familiaris
gacatccagcccaagagggacctca

SEQ ID NO: 115594 - DNA, 25 bp, Canis familiaris
gacatccaggctatggaggagacca

SEQ ID NO: 115595 - DNA, 25 bp, Canis familiaris
gacatccagtcttaaagctctgacc

SEQ ID NO: 115596 - DNA, 25 bp, Canis familiaris
gagctgacgtttgaactggaaccgg

SEQ ID NO: 115597 - DNA, 25 bp, Canis familiaris
gactaaggtttggccggtaccagat

SEQ ID NO: 115598 - DNA, 25 bp, Canis familiaris
gttaaccgattaggaggtaacatgt

SEQ ID NO: 115599 - DNA, 25 bp, Canis familiaris
gacttaccgaaatgccttacacatt

SEQ ID NO: 115600 - DNA, 25 bp, Canis familiaris
gacttgagcacgtaataggtattca

SEQ ID NO: 115601 - DNA, 25 bp, Canis familiaris
gacttgtacaaaatacgttctcagt

SEQ ID NO: 115602 - DNA, 25 bp, Canis familiaris
gacatttaaaaacagaccacagcat

SEQ ID NO: 115603 - DNA, 25 bp, Canis familiaris
gacttcccaaatgaaaccctgttgt

SEQ ID NO: 115604 - DNA, 25 bp, Canis familiaris
gacatccaaaagagaaacctgcgtt

SEQ ID NO: 115605 - DNA, 25 bp, Canis familiaris
gactgccaaaaataaatctccggtg

SEQ ID NO: 115606 - DNA, 25 bp, Canis familiaris
gacatgccaataaatgtatgaactt

SEQ ID NO: 115607 - DNA, 25 bp, Canis familiaris
gacatcgcaataaagcaagtatctc

SEQ ID NO: 115608 - DNA, 25 bp, Canis familiaris
gacatcgagctctacagccagtatc

SEQ ID NO: 115609 - DNA, 25 bp, Canis familiaris
gacatcaggctctccaagaatgtga

SEQ ID NO: 115610 - DNA, 25 bp, Canis familiaris
gactcgcacctggcacaaagtaagt

SEQ ID NO: 115611 - DNA, 25 bp, Canis familiaris
gacttgagccccgaatagtgaggtt

SEQ ID NO: 115612 - DNA, 25 bp, Canis familiaris
gactttgcccttgatcattatagtt

SEQ ID NO: 115613 - DNA, 25 bp, Canis familiaris
gacttgtaccggctgttatgagatc

SEQ ID NO: 115614 - DNA, 25 bp, Canis familiaris
gactagctagtcctttgtggtcacc

SEQ ID NO: 115615 - DNA, 25 bp, Canis familiaris
gactagtgattcctattggggacga

SEQ ID NO: 115616 - DNA, 25 bp, Canis familiaris
gactgcggttcactatttaagcctg

SEQ ID NO: 115617 - DNA, 25 bp, Canis familiaris
gactggagttttgtgtgtaccgcac

SEQ ID NO: 115618 - DNA, 25 bp, Canis familiaris
gacatagtcctttggtgttacctgc

SEQ ID NO: 115619 - DNA, 25 bp, Canis familiaris
gacatagtgcaccgggaggtgaccc

SEQ ID NO: 115620 - DNA, 25 bp, Canis familiaris
gacatagacaccaggaggaccaccg

SEQ ID NO: 115621 - DNA, 25 bp, Canis familiaris
gacattacagacatcgaggacctca

SEQ ID NO: 115622 - DNA, 25 bp, Canis familiaris
gacttctccaccaaagtacctattt

SEQ ID NO: 115623 - DNA, 25 bp, Canis familiaris
gacttcctgcatgcaagggaccact

SEQ ID NO: 115624 - DNA, 25 bp, Canis familiaris
gacatcgccgtggacggcgagcctt

SEQ ID NO: 115625 - DNA, 25 bp, Canis familiaris
gacatttcttgaccttgctagttct

SEQ ID NO: 115626 - DNA, 25 bp, Canis familiaris
gacatcttttcatgcttctagtgtt

SEQ ID NO: 115627 - DNA, 25 bp, Canis familiaris
gacatcttgtacaatcgtccgatgg

SEQ ID NO: 115628 - DNA, 25 bp, Canis familiaris
gacattttatgtacagttgctggga

SEQ ID NO: 115629 - DNA, 25 bp, Canis familiaris
gacatttctttatgcatgtgcattg

SEQ ID NO: 115630 - DNA, 25 bp, Canis familiaris
gacattcctctattactgtgaagtt

SEQ ID NO: 115631 - DNA, 25 bp, Canis familiaris
gacatagccattagtgacactatag

SEQ ID NO: 115632 - DNA, 25 bp, Canis familiaris
gactcgcaattgcaagcaccaagtg

SEQ ID NO: 115633 - DNA, 25 bp, Canis familiaris
gactcacagacataaatcaaaggcc

SEQ ID NO: 115634 - DNA, 25 bp, Canis familiaris
gacccagtattacatcgagcatccc

SEQ ID NO: 115635 - DNA, 25 bp, Canis familiaris
gactcggtcatttgacacaaaccca

SEQ ID NO: 115636 - DNA, 25 bp, Canis familiaris
gactccgtctgtttaattacaccag

SEQ ID NO: 115637 - DNA, 25 bp, Canis familiaris
gactctcagttgttaagtttgtacg

SEQ ID NO: 115638 - DNA, 25 bp, Canis familiaris
gacttaacttattcagctttggggc

SEQ ID NO: 115639 - DNA, 25 bp, Canis familiaris
gacttaaagtattagcactgttgtt

SEQ ID NO: 115640 - DNA, 25 bp, Canis familiaris
gactggaaagaattaccggatttca

SEQ ID NO: 115641 - DNA, 25 bp, Canis familiaris
gactgcaaaataaattcgggttcta

SEQ ID NO: 115642 - DNA, 25 bp, Canis familiaris
gactgccaaataaaatctcggtgtt

SEQ ID NO: 115643 - DNA, 25 bp, Canis familiaris
gactgccaaataaaatctcggtgtt

SEQ ID NO: 115644 - DNA, 25 bp, Canis familiaris
gactccataaatacaaaggtttctt

SEQ ID NO: 115645 - DNA, 25 bp, Canis familiaris
gactcgtggcagagaaaggcttttc

SEQ ID NO: 115646 - DNA, 25 bp, Canis familiaris
gacttgggagacgaggtggctgttg

SEQ ID NO: 115647 - DNA, 25 bp, Canis familiaris
gacttggggtcaggaggcggtgtcc

SEQ ID NO: 115648 - DNA, 25 bp, Canis familiaris
gacttggtggtagtaggcccagcca

SEQ ID NO: 115649 - DNA, 25 bp, Canis familiaris
gacttggtggtttagctcccatatc

SEQ ID NO: 115650 - DNA, 25 bp, Canis familiaris
gacattccttttaagtccaatatca

SEQ ID NO: 115651 - DNA, 25 bp, Canis familiaris
gacttttatttcttggccacatact

SEQ ID NO: 115652 - DNA, 25 bp, Canis familiaris
gacttgggtttcttgtgtccgattt

SEQ ID NO: 115653 - DNA, 25 bp, Canis familiaris
gacttttcttaatctgtacagttgt

SEQ ID NO: 115654 - DNA, 25 bp, Canis familiaris
gacatttatctgtttagcgtctcag

SEQ ID NO: 115655 - DNA, 25 bp, Canis familiaris
gacatctttatgtcaaagctgccta

SEQ ID NO: 115656 - DNA, 25 bp, Canis familiaris
gacatctttctgtagaagtcatgca

SEQ ID NO: 115657 - DNA, 25 bp, Canis familiaris
gactattctctggtgatattcagcc

SEQ ID NO: 115658 - DNA, 25 bp, Canis familiaris
gacttgctattgtgttctcatcgcc

SEQ ID NO: 115659 - DNA, 25 bp, Canis familiaris
gacttggaggctcatgtcctcaggc

SEQ ID NO: 115660 - DNA, 25 bp, Canis familiaris
gactacgaggtctatgattcaagtg

SEQ ID NO: 115661 - DNA, 25 bp, Canis familiaris
gacataccatgttgctatttcactt

SEQ ID NO: 115662 - DNA, 25 bp, Canis familiaris
gacatacttgtcattgttcctttgt

SEQ ID NO: 115663 - DNA, 25 bp, Canis familiaris
gaccacgtttttgccacttatggga

SEQ ID NO: 115664 - DNA, 25 bp, Canis familiaris
gatgtacgttttgctaccttttgta

SEQ ID NO: 115665 - DNA, 25 bp, Canis familiaris
gactattttcttgctaggtattttc

SEQ ID NO: 115666 - DNA, 25 bp, Canis familiaris
gacttcatttttgttgtactttttg

SEQ ID NO: 115667 - DNA, 25 bp, Canis familiaris
gacattcttattttgctatatcact

SEQ ID NO: 115668 - DNA, 25 bp, Canis familiaris
gacattctttcttgtttcacactga

SEQ ID NO: 115669 - DNA, 25 bp, Canis familiaris
gacattcattctgtttccaggtcag

SEQ ID NO: 115670 - DNA, 25 bp, Canis familiaris
gacttttgatttgggctcaggtcac

SEQ ID NO: 115671 - DNA, 25 bp, Canis familiaris
gacttctatgtcctgggccaaatca

SEQ ID NO: 115672 - DNA, 25 bp, Canis familiaris
gacatattattgctgtgcacgaaat

SEQ ID NO: 115673 - DNA, 25 bp, Canis familiaris
gactcatttatgaggaccactgcat

SEQ ID NO: 115674 - DNA, 25 bp, Canis familiaris
gactacagtaggggaccactcagag

SEQ ID NO: 115675 - DNA, 25 bp, Canis familiaris
gactccaatcgggacgcacttaagt

SEQ ID NO: 115676 - DNA, 25 bp, Canis familiaris
gactcagttcggggtgtcttgaagt

SEQ ID NO: 115677 - DNA, 25 bp, Canis familiaris
gactcaggttgtgttcctctaggtt

SEQ ID NO: 115678 - DNA, 25 bp, Canis familiaris
gacgataatggtgttcctttcgttc

SEQ ID NO: 115679 - DNA, 25 bp, Canis familiaris
gacttcagggtgtcttcatcttgat

SEQ ID NO: 115680 - DNA, 25 bp, Canis familiaris
gacttaaagctgatctcaccttgag

SEQ ID NO: 115681 - DNA, 25 bp, Canis familiaris
gactcaagaagatttccagcctgga

SEQ ID NO: 115682 - DNA, 25 bp, Canis familiaris
gacatataccattattctagtctgt

SEQ ID NO: 115683 - DNA, 25 bp, Canis familiaris
gacattcaacatgatctcattattg

SEQ ID NO: 115684 - DNA, 25 bp, Canis familiaris
gacattcaacaccattggtcattaa

SEQ ID NO: 115685 - DNA, 25 bp, Canis familiaris
gacttccagacgttttctatacaac

SEQ ID NO: 115686 - DNA, 25 bp, Canis familiaris
gacttctaaatactctttaacaagc

SEQ ID NO: 115687 - DNA, 25 bp, Canis familiaris
gactttcaaatacttttacctggtg

SEQ ID NO: 115688 - DNA, 25 bp, Canis familiaris
gacatatcatcagagagctttaagc

SEQ ID NO: 115689 - DNA, 25 bp, Canis familiaris
gacatcagatcacaggtctctatcg

SEQ ID NO: 115690 - DNA, 25 bp, Canis familiaris
gactcaatgagcaggtgcctcacta

SEQ ID NO: 115691 - DNA, 25 bp, Canis familiaris
gacggagcagttatgtgccactcta

SEQ ID NO: 115692 - DNA, 25 bp, Canis familiaris
gactagaatgttgtgatgccctgat

SEQ ID NO: 115693 - DNA, 25 bp, Canis familiaris
gactagtgctttgtgcatctttgat

SEQ ID NO: 115694 - DNA, 25 bp, Canis familiaris
gactcgtgtattgatctcttcgtcc

SEQ ID NO: 115695 - DNA, 25 bp, Canis familiaris
gacttgtggcatatactttccgaga

SEQ ID NO: 115696 - DNA, 25 bp, Canis familiaris
gacttggacaacttttcaccgaaca

SEQ ID NO: 115697 - DNA, 25 bp, Canis familiaris
gacattctggaaggttatccccaaa

SEQ ID NO: 115698 - DNA, 25 bp, Canis familiaris
gactgtcggaggttattacccagga

SEQ ID NO: 115699 - DNA, 25 bp, Canis familiaris
gactctcagggtcgaaaacggcggc

SEQ ID NO: 115700 - DNA, 25 bp, Canis familiaris
gactgctctgggggcggaacagtga

SEQ ID NO: 115701 - DNA, 25 bp, Canis familiaris
gactcttattgcagggatcacagta

SEQ ID NO: 115702 - DNA, 25 bp, Canis familiaris
gacttatgttgctgaagaacttgaa

SEQ ID NO: 115703 - DNA, 25 bp, Canis familiaris
gactctttaggccaagaactggaca

SEQ ID NO: 115704 - DNA, 25 bp, Canis familiaris
gacttttatgcccaggtaagcgaca

SEQ ID NO: 115705 - DNA, 25 bp, Canis familiaris
gactgttctacccaggaggaggaaa

SEQ ID NO: 115706 - DNA, 25 bp, Canis familiaris
gactttgtcccttgctacaaggaac

SEQ ID NO: 115707 - DNA, 25 bp, Canis familiaris
gacttttctgacggattatctggga

SEQ ID NO: 115708 - DNA, 25 bp, Canis familiaris
gacttttcagttgttgactgtcttc

SEQ ID NO: 115709 - DNA, 25 bp, Canis familiaris
gacctttagatttttgggctttgag

SEQ ID NO: 115710 - DNA, 25 bp, Canis familiaris
gacttgtttctttgttgtggttggg

SEQ ID NO: 115711 - DNA, 25 bp, Canis familiaris
gacttggatcctcttagtgggtggg

SEQ ID NO: 115712 - DNA, 25 bp, Canis familiaris
gacttcgacgcggacaaggtggtgg

SEQ ID NO: 115713 - DNA, 25 bp, Canis familiaris
gactttatcgctcagagggctggtc

SEQ ID NO: 115714 - DNA, 25 bp, Canis familiaris
gacattgtcaccaaagtggccgagc

SEQ ID NO: 115715 - DNA, 25 bp, Canis familiaris
gacatttctccaaagatgacctaca

SEQ ID NO: 115716 - DNA, 25 bp, Canis familiaris
gacatttctccaaggaagatgtaca

SEQ ID NO: 115717 - DNA, 25 bp, Canis familiaris
gacttataccatgaaatgattgagt

SEQ ID NO: 115718 - DNA, 25 bp, Canis familiaris
gactggaaccccaatgtactgcaga

SEQ ID NO: 115719 - DNA, 25 bp, Canis familiaris
gactgaaccaccatattacgcaagt

SEQ ID NO: 115720 - DNA, 25 bp, Canis familiaris
gggacatcgagcagtactactccac

SEQ ID NO: 115721 - DNA, 25 bp, Canis familiaris
gagagtacagtatttactaccccgc

SEQ ID NO: 115722 - DNA, 25 bp, Canis familiaris
gagcaggacagtattaccggttcgc

SEQ ID NO: 115723 - DNA, 25 bp, Canis familiaris
gacgtacgtagtgcacacgttcctc

SEQ ID NO: 115724 - DNA, 25 bp, Canis familiaris
gacgacacgggatccgctgtaactc

SEQ ID NO: 115725 - DNA, 25 bp, Canis familiaris
gacggccagggagcctgtaaacctc

SEQ ID NO: 115726 - DNA, 25 bp, Canis familiaris
gtctagaattttcctgaccaaaact

SEQ ID NO: 115727 - DNA, 25 bp, Canis familiaris
gactaatatttcactacctagcaac

SEQ ID NO: 115728 - DNA, 25 bp, Canis familiaris
gactcaattttcaaatccttaacct

SEQ ID NO: 115729 - DNA, 25 bp, Canis familiaris
gactcacttcttaaaccgacaacgt

SEQ ID NO: 115730 - DNA, 25 bp, Canis familiaris
gactatccttctacaaccacagaag

SEQ ID NO: 115731 - DNA, 25 bp, Canis familiaris
gacttcctggcttcaagggcattag

SEQ ID NO: 115732 - DNA, 25 bp, Canis familiaris
gacttcagtggttcgaggtgcttcg

SEQ ID NO: 115733 - DNA, 25 bp, Canis familiaris
gacttttgttatgacgtcttggggg

SEQ ID NO: 115734 - DNA, 25 bp, Canis familiaris
gactttgttacaaactggttctggt

SEQ ID NO: 115735 - DNA, 25 bp, Canis familiaris
gacttaattagtcactgccttgcta

SEQ ID NO: 115736 - DNA, 25 bp, Canis familiaris
gactaaggaactcactctttcttca

SEQ ID NO: 115737 - DNA, 25 bp, Canis familiaris
gactttggaatcctaaacctgcttt

SEQ ID NO: 115738 - DNA, 25 bp, Canis familiaris
gactttgatggtgacataacaccta

SEQ ID NO: 115739 - DNA, 25 bp, Canis familiaris
gacttatggccatggaaacacctga

SEQ ID NO: 115740 - DNA, 25 bp, Canis familiaris
gacttgtgatcctagaggaacctca

SEQ ID NO: 115741 - DNA, 25 bp, Canis familiaris
gacttgtcacctagttgacactccc

SEQ ID NO: 115742 - DNA, 25 bp, Canis familiaris
gacgtggccttcaatgtcaaccact

SEQ ID NO: 115743 - DNA, 25 bp, Canis familiaris
gacggatctctggcagttcaagccc

SEQ ID NO: 115744 - DNA, 25 bp, Canis familiaris
gactgagatcggggcccatagagcc

SEQ ID NO: 115745 - DNA, 25 bp, Canis familiaris
gacattcatcagctgtgtgccaaga

SEQ ID NO: 115746 - DNA, 25 bp, Canis familiaris
gacatacacacactgatatacaaac

SEQ ID NO: 115747 - DNA, 25 bp, Canis familiaris
gacatacatacataaatgcacatac

SEQ ID NO: 115748 - DNA, 25 bp, Canis familiaris
gacatatatagacatattcatctag

SEQ ID NO: 115749 - DNA, 25 bp, Canis familiaris
gactattcagatcatccaagtggag

SEQ ID NO: 115750 - DNA, 25 bp, Canis familiaris
gactagtagagttcacacgcagaga

SEQ ID NO: 115751 - DNA, 25 bp, Canis familiaris
gactatgtcaagagccaaaaaaccc

SEQ ID NO: 115752 - DNA, 25 bp, Canis familiaris
gacttgctctagtcgccgaacaaaa

SEQ ID NO: 115753 - DNA, 25 bp, Canis familiaris
gacttcatttaccctgaacgagcca

SEQ ID NO: 115754 - DNA, 25 bp, Canis familiaris
gactcatttgcttccctgaagaggt

SEQ ID NO: 115755 - DNA, 25 bp, Canis familiaris
gacttgtgatcggcctgcatgagga

SEQ ID NO: 115756 - DNA, 25 bp, Canis familiaris
gacttggacatggccctgaaatcaa

SEQ ID NO: 115757 - DNA, 25 bp, Canis familiaris
gactcgagagggggtggtacaagga

SEQ ID NO: 115758 - DNA, 25 bp, Canis familiaris
gacttcaatcggggtggtggcaatg

SEQ ID NO: 115759 - DNA, 25 bp, Canis familiaris
gactctcaatctctgggttgtaagt

SEQ ID NO: 115760 - DNA, 25 bp, Canis familiaris
gactaaatatctaggtttgctcaag

SEQ ID NO: 115761 - DNA, 25 bp, Canis familiaris
gactattatcatatggtttcactca

SEQ ID NO: 115762 - DNA, 25 bp, Canis familiaris
gacttaaatttcttttcctcatcca

SEQ ID NO: 115763 - DNA, 25 bp, Canis familiaris
gacttcaagttttttcattcttctc

SEQ ID NO: 115764 - DNA, 25 bp, Canis familiaris
gacttcttcattatttgattccctt

SEQ ID NO: 115765 - DNA, 25 bp, Canis familiaris
gactatttgcatgtttctgtctaaa

SEQ ID NO: 115766 - DNA, 25 bp, Canis familiaris
gacattctatgaggtatttattttg

SEQ ID NO: 115767 - DNA, 25 bp, Canis familiaris
gacattggtatggttttgttttgtt

SEQ ID NO: 115768 - DNA, 25 bp, Canis familiaris
gacttttaaatctttggctgctttg

SEQ ID NO: 115769 - DNA, 25 bp, Canis familiaris
gacttttaagtctcatgatctgttg

SEQ ID NO: 115770 - DNA, 25 bp, Canis familiaris
gacttttcattttgacattcttgtg

SEQ ID NO: 115771 - DNA, 25 bp, Canis familiaris
gacatttgtatttttctctttgatt

SEQ ID NO: 115772 - DNA, 25 bp, Canis familiaris
gacatttggcatctatttcttatta

SEQ ID NO: 115773 - DNA, 25 bp, Canis familiaris
gacttttgctccgattctttatgta

SEQ ID NO: 115774 - DNA, 25 bp, Canis familiaris
gacttcgtctcaccatagtttagca

SEQ ID NO: 115775 - DNA, 25 bp, Canis familiaris
gactttttcagcccaggattcagca

SEQ ID NO: 115776 - DNA, 25 bp, Canis familiaris
gacttttatagcccggactgctacc

SEQ ID NO: 115777 - DNA, 25 bp, Canis familiaris
gacctacagaagcacgtacggaccc

SEQ ID NO: 115778 - DNA, 25 bp, Canis familiaris
gaccgacacagggaggtactgatac

SEQ ID NO: 115779 - DNA, 25 bp, Canis familiaris
gacttagacaacatgggactgatag

SEQ ID NO: 115780 - DNA, 25 bp, Canis familiaris
gacttgagaaacatgcccgcattga

SEQ ID NO: 115781 - DNA, 25 bp, Canis familiaris
gactatgaggatttcccggatcgac

SEQ ID NO: 115782 - DNA, 25 bp, Canis familiaris
gacttggcttagttccagtatcaga

SEQ ID NO: 115783 - DNA, 25 bp, Canis familiaris
gacatttgttgagttcctgctacat

SEQ ID NO: 115784 - DNA, 25 bp, Canis familiaris
gactttgttggcatcatctgcactc

SEQ ID NO: 115785 - DNA, 25 bp, Canis familiaris
gacttcattgagcttcattcagcct

SEQ ID NO: 115786 - DNA, 25 bp, Canis familiaris
gactctattacgtctatgcccaagt

SEQ ID NO: 115787 - DNA, 25 bp, Canis familiaris
gacttttgtcagttgatgtcacaac

SEQ ID NO: 115788 - DNA, 25 bp, Canis familiaris
gactgacttgggtttgtcaaactgt

SEQ ID NO: 115789 - DNA, 25 bp, Canis familiaris
gactccgggggatttgtaactgatg

SEQ ID NO: 115790 - DNA, 25 bp, Canis familiaris
gactcggggtggggaggaactgcca

SEQ ID NO: 115791 - DNA, 25 bp, Canis familiaris
gactcggaagttgcggggaggccac

SEQ ID NO: 115792 - DNA, 25 bp, Canis familiaris
gactgcctagagtgctcagggggag

SEQ ID NO: 115793 - DNA, 25 bp, Canis familiaris
gactgtttggagcgaagaggtagaa

SEQ ID NO: 115794 - DNA, 25 bp, Canis familiaris
gactttgaggagctggaggacggag

SEQ ID NO: 115795 - DNA, 25 bp, Canis familiaris
gacttcgtggtgtggatgcgcacgg

SEQ ID NO: 115796 - DNA, 25 bp, Canis familiaris
gactagagtttctgatgtgcccgtg

SEQ ID NO: 115797 - DNA, 25 bp, Canis familiaris
gacattttttcatgctggtgacctg

SEQ ID NO: 115798 - DNA, 25 bp, Canis familiaris
gactctggtttcactggtgtgtgga

SEQ ID NO: 115799 - DNA, 25 bp, Canis familiaris
gacttgagttttgatggttctgttg

SEQ ID NO: 115800 - DNA, 25 bp, Canis familiaris
gacttggaatttgaggggccattta

SEQ ID NO: 115801 - DNA, 25 bp, Canis familiaris
gactcaggaactcaaatgggccatt

SEQ ID NO: 115802 - DNA, 25 bp, Canis familiaris
gactcggaaccaacaatgtgtctct

SEQ ID NO: 115803 - DNA, 25 bp, Canis familiaris
gactggggacctactgtagtctcca

SEQ ID NO: 115804 - DNA, 25 bp, Canis familiaris
gactgtggggacactgacacccaac

SEQ ID NO: 115805 - DNA, 25 bp, Canis familiaris
gacttggtggaaaatcccctagagc

SEQ ID NO: 115806 - DNA, 25 bp, Canis familiaris
gacttgggggtttcagccctgagat

SEQ ID NO: 115807 - DNA, 25 bp, Canis familiaris
gacttgataggtttactacacagaa

SEQ ID NO: 115808 - DNA, 25 bp, Canis familiaris
gacttgaggtgagatacgactgcag

SEQ ID NO: 115809 - DNA, 25 bp, Canis familiaris
gacttcaggtcattcaacacaatgg

SEQ ID NO: 115810 - DNA, 25 bp, Canis familiaris
gacatttctgtatgcaacacactag

SEQ ID NO: 115811 - DNA, 25 bp, Canis familiaris
gacttatttatacacctccagtttt

SEQ ID NO: 115812 - DNA, 25 bp, Canis familiaris
gacttatcattatcttcgatctttt

SEQ ID NO: 115813 - DNA, 25 bp, Canis familiaris
gacttgactctaactttatcattat

SEQ ID NO: 115814 - DNA, 25 bp, Canis familiaris
gacttgaaccatggccatttctgaa

SEQ ID NO: 115815 - DNA, 25 bp, Canis familiaris
gacattgacatttctgacatttctg

SEQ ID NO: 115816 - DNA, 25 bp, Canis familiaris
gacattaagttgccacttgtcaggt

SEQ ID NO: 115817 - DNA, 25 bp, Canis familiaris
gacatttcagggcagttctcaggat

SEQ ID NO: 115818 - DNA, 25 bp, Canis familiaris
gacttacaagttcttcgagcagatg

SEQ ID NO: 115819 - DNA, 25 bp, Canis familiaris
gacttacaaggtctgttgatgagat

SEQ ID NO: 115820 - DNA, 25 bp, Canis familiaris
gacttaccgtgtttgtcttaatact

SEQ ID NO: 115821 - DNA, 25 bp, Canis familiaris
gacttacgggttttattctgcaaat

SEQ ID NO: 115822 - DNA, 25 bp, Canis familiaris
gactgaaaggtttttgagtcctaat

SEQ ID NO: 115823 - DNA, 25 bp, Canis familiaris
gactgttaggttcttttactcttag

SEQ ID NO: 115824 - DNA, 25 bp, Canis familiaris
gacgtcgaggttccctatgtacgat

SEQ ID NO: 115825 - DNA, 25 bp, Canis familiaris
gacgaaggaatttccacaccaccat

SEQ ID NO: 115826 - DNA, 25 bp, Canis familiaris
gttcgaggaatttctcaacgagcta

SEQ ID NO: 115827 - DNA, 25 bp, Canis familiaris
gacttgagaaatgtctataagactc

SEQ ID NO: 115828 - DNA, 25 bp, Canis familiaris
gacttctgaaatgtactgaagccac

SEQ ID NO: 115829 - DNA, 25 bp, Canis familiaris
gacttctatacaaaactgtgagccc

SEQ ID NO: 115830 - DNA, 25 bp, Canis familiaris
gacattttgagagaccagcaggccc

SEQ ID NO: 115831 - DNA, 25 bp, Canis familiaris
gacattcggaatcagcggagatacc

SEQ ID NO: 115832 - DNA, 25 bp, Canis familiaris
gacttggaaatccacaccagtagcc

SEQ ID NO: 115833 - DNA, 25 bp, Canis familiaris
gactctacaaatggacccgtcaaga

SEQ ID NO: 115834 - DNA, 25 bp, Canis familiaris
gacttaaagatgaaccctgttaatc

SEQ ID NO: 115835 - DNA, 25 bp, Canis familiaris
gacttaccagaaactctgctttgaa

SEQ ID NO: 115836 - DNA, 25 bp, Canis familiaris
gacttttctcaaaactctattaagc

SEQ ID NO: 115837 - DNA, 25 bp, Canis familiaris
gacttttccaaatgtctgtgacaat

SEQ ID NO: 115838 - DNA, 25 bp, Canis familiaris
gacattctgtccctattttggagaa

SEQ ID NO: 115839 - DNA, 25 bp, Canis familiaris
gactttggccctttataggaagaat

SEQ ID NO: 115840 - DNA, 25 bp, Canis familiaris
gactttgctccccttagagggtgga

SEQ ID NO: 115841 - DNA, 25 bp, Canis familiaris
gacttcagctacccctaaggatggg

SEQ ID NO: 115842 - DNA, 25 bp, Canis familiaris
gacttctagaagacttaaggctggt

SEQ ID NO: 115843 - DNA, 25 bp, Canis familiaris
gactcacgagaaatttgcactggct

SEQ ID NO: 115844 - DNA, 25 bp, Canis familiaris
gacttcgaagcacgttgcacgtgaa

SEQ ID NO: 115845 - DNA, 25 bp, Canis familiaris
gacttcgatcacatcgaacgtgaga

SEQ ID NO: 115846 - DNA, 25 bp, Canis familiaris
gacttcctcatcatctacatcgagg

SEQ ID NO: 115847 - DNA, 25 bp, Canis familiaris
gactacctgcattaccacatcaagt

SEQ ID NO: 115848 - DNA, 25 bp, Canis familiaris
gactacgtcatgtcttatccgattg

SEQ ID NO: 115849 - DNA, 25 bp, Canis familiaris
gactactgtccagggcattgcagat

SEQ ID NO: 115850 - DNA, 25 bp, Canis familiaris
gactacagtgaatggctctgccacg

SEQ ID NO: 115851 - DNA, 25 bp, Canis familiaris
gactacaatgcaccgtggcaatgcc

SEQ ID NO: 115852 - DNA, 25 bp, Canis familiaris
gactaaacaccagatgcagttctta

SEQ ID NO: 115853 - DNA, 25 bp, Canis familiaris
gactcacccactatgatcatgttct

SEQ ID NO: 115854 - DNA, 25 bp, Canis familiaris
gacttagccagtcggatgcatttct

SEQ ID NO: 115855 - DNA, 25 bp, Canis familiaris
gacttcagctcgatgatgcttctat

SEQ ID NO: 115856 - DNA, 25 bp, Canis familiaris
gactctcactggttgacctcagtac

SEQ ID NO: 115857 - DNA, 25 bp, Canis familiaris
gacttccagctgttgaattgttcac

SEQ ID NO: 115858 - DNA, 25 bp, Canis familiaris
gacttacactttgatttctgcatta

SEQ ID NO: 115859 - DNA, 25 bp, Canis familiaris
gacttggttttattatctctgctta

SEQ ID NO: 115860 - DNA, 25 bp, Canis familiaris
gacttgtatacgtttttctcttcag

SEQ ID NO: 115861 - DNA, 25 bp, Canis familiaris
gacttgaaatcgtttttcttgtatt

SEQ ID NO: 115862 - DNA, 25 bp, Canis familiaris
gacattgatattaattttcctttct

SEQ ID NO: 115863 - DNA, 25 bp, Canis familiaris
gacttcaataaaacgtgcttttctc

SEQ ID NO: 115864 - DNA, 25 bp, Canis familiaris
gacttcaataaaacgtgcttttctc

SEQ ID NO: 115865 - DNA, 25 bp, Canis familiaris
gactccgatatattacgtattcttt

SEQ ID NO: 115866 - DNA, 25 bp, Canis familiaris
gactcagtagtcctaagtttgctta

SEQ ID NO: 115867 - DNA, 25 bp, Canis familiaris
gacgactagttttatttctgctcat

SEQ ID NO: 115868 - DNA, 25 bp, Canis familiaris
gacttctggttttatttctatattt

SEQ ID NO: 115869 - DNA, 25 bp, Canis familiaris
gacttttgttgaattatctttgttc

SEQ ID NO: 115870 - DNA, 25 bp, Canis familiaris
gactttgttaaatatcttgagatgt

SEQ ID NO: 115871 - DNA, 25 bp, Canis familiaris
gactttgtaaactgctgttttgtgg

SEQ ID NO: 115872 - DNA, 25 bp, Canis familiaris
gactttttaagggctgtgctataat

SEQ ID NO: 115873 - DNA, 25 bp, Canis familiaris
gactcatttttatcacttgccagaa

SEQ ID NO: 115874 - DNA, 25 bp, Canis familiaris
gactttttgtaaagctttcgactca

SEQ ID NO: 115875 - DNA, 25 bp, Canis familiaris
gactatttgtacatggtttccctat

SEQ ID NO: 115876 - DNA, 25 bp, Canis familiaris
gacttgtagaacagtattctcgtta

SEQ ID NO: 115877 - DNA, 25 bp, Canis familiaris
gacttatccaccagttcacttgtaa

SEQ ID NO: 115878 - DNA, 25 bp, Canis familiaris
gactttccgcttgggtcagaatgga

SEQ ID NO: 115879 - DNA, 25 bp, Canis familiaris
gactttccacctcagtcaacaaacc

SEQ ID NO: 115880 - DNA, 25 bp, Canis familiaris
gttgactacccgagatccaaactcc

SEQ ID NO: 115881 - DNA, 25 bp, Canis familiaris
gtgtttaacctgagaccaagacccg

SEQ ID NO: 115882 - DNA, 25 bp, Canis familiaris
gatagttaaccgaaaccaaagccat

SEQ ID NO: 115883 - DNA, 25 bp, Canis familiaris
gatctttaagcagaaaccaaatgga

SEQ ID NO: 115884 - DNA, 25 bp, Canis familiaris
gacttaatcaagtataactcaaatc

SEQ ID NO: 115885 - DNA, 25 bp, Canis familiaris
gactcaaacatacaacaacaaaaaa

SEQ ID NO: 115886 - DNA, 25 bp, Canis familiaris
gactcaaaatagcacaggcacaaag

SEQ ID NO: 115887 - DNA, 25 bp, Canis familiaris
gactagagaatacacgtcctcttgc

SEQ ID NO: 115888 - DNA, 25 bp, Canis familiaris
gactggtaacatatcgttctttcct

SEQ ID NO: 115889 - DNA, 25 bp, Canis familiaris
gactcagtctacctttatttttcct

SEQ ID NO: 115890 - DNA, 25 bp, Canis familiaris
gattccgctacgatccattaataca

SEQ ID NO: 115891 - DNA, 25 bp, Canis familiaris
gattccgctacgatccattaataca

SEQ ID NO: 115892 - DNA, 25 bp, Canis familiaris
gatctccgtaggattttggaacttg

SEQ ID NO: 115893 - DNA, 25 bp, Canis familiaris
gactaggtaggcatttaactcctca

SEQ ID NO: 115894 - DNA, 25 bp, Canis familiaris
gactaggataacattttcactactt

SEQ ID NO: 115895 - DNA, 25 bp, Canis familiaris
gacttttgaactaccttatatcctt

SEQ ID NO: 115896 - DNA, 25 bp, Canis familiaris
gacttttacaccttttatgatgact

SEQ ID NO: 115897 - DNA, 25 bp, Canis familiaris
gacttcttaatcttattttgcagtt

SEQ ID NO: 115898 - DNA, 25 bp, Canis familiaris
gacttcttagaggcttcttctgact

SEQ ID NO: 115899 - DNA, 25 bp, Canis familiaris
gacttctccaaggctactatctgat

SEQ ID NO: 115900 - DNA, 25 bp, Canis familiaris
gacttcacagaagctactcctctga

SEQ ID NO: 115901 - DNA, 25 bp, Canis familiaris
gacttccaatcagttagctccagat

SEQ ID NO: 115902 - DNA, 25 bp, Canis familiaris
gacttcccagctttatgctgccaat

SEQ ID NO: 115903 - DNA, 25 bp, Canis familiaris
gacttccaggctttgcatcttgtat

SEQ ID NO: 115904 - DNA, 25 bp, Canis familiaris
gacttccgagcacagcattctgaaa

SEQ ID NO: 115905 - DNA, 25 bp, Canis familiaris
gacttcctgcacttaccatatgaaa

SEQ ID NO: 115906 - DNA, 25 bp, Canis familiaris
gacattgtcacagggaccaaggaac

SEQ ID NO: 115907 - DNA, 25 bp, Canis familiaris
gactttcaaggagcacatagcccac

SEQ ID NO: 115908 - DNA, 25 bp, Canis familiaris
gactattcaagttacctatttcatc

SEQ ID NO: 115909 - DNA, 25 bp, Canis familiaris
gacttataatttccctatttctgct

SEQ ID NO: 115910 - DNA, 25 bp, Canis familiaris
gactttcctcttaagtatcttcagt

SEQ ID NO: 115911 - DNA, 25 bp, Canis familiaris
gactttgttcctctgtggttcagtg

SEQ ID NO: 115912 - DNA, 25 bp, Canis familiaris
gactttgcttttcatttgtttgttc

SEQ ID NO: 115913 - DNA, 25 bp, Canis familiaris
gacttgtttttgcatttttaatcct

SEQ ID NO: 115914 - DNA, 25 bp, Canis familiaris
gacttgttttgtttctgcttctaga

SEQ ID NO: 115915 - DNA, 25 bp, Canis familiaris
gactttactatgattccttcaacag

SEQ ID NO: 115916 - DNA, 25 bp, Canis familiaris
gagttaatttggttgccttcctcag

SEQ ID NO: 115917 - DNA, 25 bp, Canis familiaris
gacttacatcttgggtcctggactc

SEQ ID NO: 115918 - DNA, 25 bp, Canis familiaris
gacttgaacttgggtgtctggctcc

SEQ ID NO: 115919 - DNA, 25 bp, Canis familiaris
gacttgaacttcggtcatctctatc

SEQ ID NO: 115920 - DNA, 25 bp, Canis familiaris
gacttggactgctgagtagtgctgt

SEQ ID NO: 115921 - DNA, 25 bp, Canis familiaris
gacttggactggtttgctgcagcgt

SEQ ID NO: 115922 - DNA, 25 bp, Canis familiaris
gactgggactgagtgtacccgtgtc

SEQ ID NO: 115923 - DNA, 25 bp, Canis familiaris
gactgcaggcatcaagtttccggac

SEQ ID NO: 115924 - DNA, 25 bp, Canis familiaris
gactgagttccagaaggccaccagc

SEQ ID NO: 115925 - DNA, 25 bp, Canis familiaris
gactgagtcccagaaggagcaacgc

SEQ ID NO: 115926 - DNA, 25 bp, Canis familiaris
gactgagtgtccgagacagggtacg

SEQ ID NO: 115927 - DNA, 25 bp, Canis familiaris
gactaggagtccgatgcgggactcg

SEQ ID NO: 115928 - DNA, 25 bp, Canis familiaris
gactatgggctctgatgggggcaag

SEQ ID NO: 115929 - DNA, 25 bp, Canis familiaris
gactatgggctctgatgggggcaag

SEQ ID NO: 115930 - DNA, 25 bp, Canis familiaris
gacttgggctctggtgggaggagga

SEQ ID NO: 115931 - DNA, 25 bp, Canis familiaris
gacttgggtctgaggctggggagag

SEQ ID NO: 115932 - DNA, 25 bp, Canis familiaris
gactcttcgttgaggctcagggcac

SEQ ID NO: 115933 - DNA, 25 bp, Canis familiaris
gacccatcctggggcagtagtagca

SEQ ID NO: 115934 - DNA, 25 bp, Canis familiaris
gactcgatcctgggtcgccaggatg

SEQ ID NO: 115935 - DNA, 25 bp, Canis familiaris
gactcgatcctgggattctggaatc

SEQ ID NO: 115936 - DNA, 25 bp, Canis familiaris
gactcccgataccttctggaataag

SEQ ID NO: 115937 - DNA, 25 bp, Canis familiaris
gactccccttccagctctggaagag

SEQ ID NO: 115938 - DNA, 25 bp, Canis familiaris
gactctcccccgaggatggaagatg

SEQ ID NO: 115939 - DNA, 25 bp, Canis familiaris
gacttaccccagagtgcatatacta

SEQ ID NO: 115940 - DNA, 25 bp, Canis familiaris
gacttaactcccagtgaatcattct

SEQ ID NO: 115941 - DNA, 25 bp, Canis familiaris
gacttaaggctggtctgtgttcgct

SEQ ID NO: 115942 - DNA, 25 bp, Canis familiaris
gacttaagcataaccttttcgctgg

SEQ ID NO: 115943 - DNA, 25 bp, Canis familiaris
gactctcaagtgatactcttacctg

SEQ ID NO: 115944 - DNA, 25 bp, Canis familiaris
gactctaagctgactcacagtttcc

SEQ ID NO: 115945 - DNA, 25 bp, Canis familiaris
gacttgggctgagtcaagccccaca

SEQ ID NO: 115946 - DNA, 25 bp, Canis familiaris
gactctgggtggacaagtcacacct

SEQ ID NO: 115947 - DNA, 25 bp, Canis familiaris
gactcttggagttcaggtcagcctc

SEQ ID NO: 115948 - DNA, 25 bp, Canis familiaris
gacttgtgggcttccgacagaggcc

SEQ ID NO: 115949 - DNA, 25 bp, Canis familiaris
gacttatttcactcacaagataccc

SEQ ID NO: 115950 - DNA, 25 bp, Canis familiaris
gacttttatttttcagaatagccct

SEQ ID NO: 115951 - DNA, 25 bp, Canis familiaris
gacttttagttttgatggatttcct

SEQ ID NO: 115952 - DNA, 25 bp, Canis familiaris
gactttgcttttatgagagacctgc

SEQ ID NO: 115953 - DNA, 25 bp, Canis familiaris
gacttgtgttgcatcctgagcaaca

SEQ ID NO: 115954 - DNA, 25 bp, Canis familiaris
gactttatacaattgccagagacag

SEQ ID NO: 115955 - DNA, 25 bp, Canis familiaris
gacgtgtaactcagccaggacagat

SEQ ID NO: 115956 - DNA, 25 bp, Canis familiaris
gactctaaactcactcactagcaga

SEQ ID NO: 115957 - DNA, 25 bp, Canis familiaris
gactctaatatctttgctcctaaaa

SEQ ID NO: 115958 - DNA, 25 bp, Canis familiaris
gacttttatcacaagctccttgaat

SEQ ID NO: 115959 - DNA, 25 bp, Canis familiaris
gacttgtttcagaatgtcatcattg

SEQ ID NO: 115960 - DNA, 25 bp, Canis familiaris
gactattggacaagcatcgatgatt

SEQ ID NO: 115961 - DNA, 25 bp, Canis familiaris
gacttctgagtcaatgcgtggagtg

SEQ ID NO: 115962 - DNA, 25 bp, Canis familiaris
gacttctgcatgctcatggtgggca

SEQ ID NO: 115963 - DNA, 25 bp, Canis familiaris
gactctgtgctcgctggatggagct

SEQ ID NO: 115964 - DNA, 25 bp, Canis familiaris
gactcatgtgaggcatctgtggata

SEQ ID NO: 115965 - DNA, 25 bp, Canis familiaris
gactagcatgcactgcttgtggatg

SEQ ID NO: 115966 - DNA, 25 bp, Canis familiaris
gactcggagatcgagctggtgtccg

SEQ ID NO: 115967 - DNA, 25 bp, Canis familiaris
gactcagaaggtactgtttccgctc

SEQ ID NO: 115968 - DNA, 25 bp, Canis familiaris
gactcaagagtgaccttcctttctc

SEQ ID NO: 115969 - DNA, 25 bp, Canis familiaris
gacttcaaggacttctacctttcca

SEQ ID NO: 115970 - DNA, 25 bp, Canis familiaris
gactgtcaaggacgtcttcactgct

SEQ ID NO: 115971 - DNA, 25 bp, Canis familiaris
gacttcaaacaaggcattctgtgct

SEQ ID NO: 115972 - DNA, 25 bp, Canis familiaris
gactcttggctctggccattgtgtc

SEQ ID NO: 115973 - DNA, 25 bp, Canis familiaris
gactttagtctaagcatcatcttgt

SEQ ID NO: 115974 - DNA, 25 bp, Canis familiaris
gacttcgagatcgtggtcatcctgg

SEQ ID NO: 115975 - DNA, 25 bp, Canis familiaris
gacttcgagcaggagatggccactg

SEQ ID NO: 115976 - DNA, 25 bp, Canis familiaris
gacttcgcccatggagggcactatc

SEQ ID NO: 115977 - DNA, 25 bp, Canis familiaris
gacttcatctccaggggatactttt

SEQ ID NO: 115978 - DNA, 25 bp, Canis familiaris
gactaccgattccggaatagttctt

SEQ ID NO: 115979 - DNA, 25 bp, Canis familiaris
gactacctggtactgtgaatactta

SEQ ID NO: 115980 - DNA, 25 bp, Canis familiaris
gactccctcttttggacaagcttag

SEQ ID NO: 115981 - DNA, 25 bp, Canis familiaris
gacttccacttcttgcaaagattaa

SEQ ID NO: 115982 - DNA, 25 bp, Canis familiaris
gacttcagcacaaccatcaacattg

SEQ ID NO: 115983 - DNA, 25 bp, Canis familiaris
gacttcagcaagaccaaacacaatt

SEQ ID NO: 115984 - DNA, 25 bp, Canis familiaris
gactcacagaacacagaatacaggt

SEQ ID NO: 115985 - DNA, 25 bp, Canis familiaris
gactcagagtacactgtaccgggta

SEQ ID NO: 115986 - DNA, 25 bp, Canis familiaris
gactcaggattcccgacgaggaggt

SEQ ID NO: 115987 - DNA, 25 bp, Canis familiaris
gactcggacccatagccatgaaggt

SEQ ID NO: 115988 - DNA, 25 bp, Canis familiaris
gactgcttttccagacctgggttta

SEQ ID NO: 115989 - DNA, 25 bp, Canis familiaris
gactagtttacttgaacgaggcctg

SEQ ID NO: 115990 - DNA, 25 bp, Canis familiaris
gactaattaaggggtcgagtgtcgg

SEQ ID NO: 115991 - DNA, 25 bp, Canis familiaris
gactacatctacgtccggggtgacg

SEQ ID NO: 115992 - DNA, 25 bp, Canis familiaris
gactagttacgttcaagggtgacca

SEQ ID NO: 115993 - DNA, 25 bp, Canis familiaris
gactacttcttcaacacagcagggc

SEQ ID NO: 115994 - DNA, 25 bp, Canis familiaris
gactactgattactaccacgcgtcc

SEQ ID NO: 115995 - DNA, 25 bp, Canis familiaris
gactagccattgcattggctccttc

SEQ ID NO: 115996 - DNA, 25 bp, Canis familiaris
gactattgctgtgatcgtctttttc

SEQ ID NO: 115997 - DNA, 25 bp, Canis familiaris
gactgaattggaacgagcttttggc

SEQ ID NO: 115998 - DNA, 25 bp, Canis familiaris
gactgaacgtgttcggggttggcgg

SEQ ID NO: 115999 - DNA, 25 bp, Canis familiaris
gactagagggcttcctggaggaggc

SEQ ID NO: 116000 - DNA, 25 bp, Canis familiaris
gactcgagggccgactgggaataga

SEQ ID NO: 116001 - DNA, 25 bp, Canis familiaris
gactcgggcccctatgatgggatga

SEQ ID NO: 116002 - DNA, 25 bp, Canis familiaris
gactaggctgccactgtgtgggcag

SEQ ID NO: 116003 - DNA, 25 bp, Canis familiaris
gactacctcctgacagtgtgctaag

SEQ ID NO: 116004 - DNA, 25 bp, Canis familiaris
gactcaccatcagtgactatggcat

SEQ ID NO: 116005 - DNA, 25 bp, Canis familiaris
gactcatctcacatatgcttataaa

SEQ ID NO: 116006 - DNA, 25 bp, Canis familiaris
gactgcatgttcctaactatgacac

SEQ ID NO: 116007 - DNA, 25 bp, Canis familiaris
gactcattccccaacacaaatggtc

SEQ ID NO: 116008 - DNA, 25 bp, Canis familiaris
gactttcttgccaatcctcaaattc

SEQ ID NO: 116009 - DNA, 25 bp, Canis familiaris
gactatctcttcttattgtcctatt

SEQ ID NO: 116010 - DNA, 25 bp, Canis familiaris
gacttcatcttactcttgtcaggaa

SEQ ID NO: 116011 - DNA, 25 bp, Canis familiaris
gactatatctctgtgcttgactgtg

SEQ ID NO: 116012 - DNA, 25 bp, Canis familiaris
gacttatcccatacttttgctggca

SEQ ID NO: 116013 - DNA, 25 bp, Canis familiaris
gactatacctaaatctctatgcagt

SEQ ID NO: 116014 - DNA, 25 bp, Canis familiaris
gactttccttttctgctgagttatt

SEQ ID NO: 116015 - DNA, 25 bp, Canis familiaris
gacttttcattgtatttctaacttt

SEQ ID NO: 116016 - DNA, 25 bp, Canis familiaris
gacttttcagtgtttctcataatgt

SEQ ID NO: 116017 - DNA, 25 bp, Canis familiaris
gacttttgcaggttacacagtactt

SEQ ID NO: 116018 - DNA, 25 bp, Canis familiaris
gactatctctaagttcaacgtaatt

SEQ ID NO: 116019 - DNA, 25 bp, Canis familiaris
gactatccttagtccattggaagct

SEQ ID NO: 116020 - DNA, 25 bp, Canis familiaris
gacgacctcaagtcgctggaggagc

SEQ ID NO: 116021 - DNA, 25 bp, Canis familiaris
gactacataccatccagaaggacgt

SEQ ID NO: 116022 - DNA, 25 bp, Canis familiaris
gactattcccaagtagcacaaaact

SEQ ID NO: 116023 - DNA, 25 bp, Canis familiaris
gactttcccagagaagcaaataaac

SEQ ID NO: 116024 - DNA, 25 bp, Canis familiaris
gactcttcccgaataaaagcacaat

SEQ ID NO: 116025 - DNA, 25 bp, Canis familiaris
gactccaccctaagataacagcaca

SEQ ID NO: 116026 - DNA, 25 bp, Canis familiaris
gacccacagccattcagtaggcaga

SEQ ID NO: 116027 - DNA, 25 bp, Canis familiaris
gactcacaactattctccagaagaa

SEQ ID NO: 116028 - DNA, 25 bp, Canis familiaris
gactcacgattaactcgaacagcca

SEQ ID NO: 116029 - DNA, 25 bp, Canis familiaris
gactacatggtaaaccaaccccaca

SEQ ID NO: 116030 - DNA, 25 bp, Canis familiaris
gactccacgaaaaccaacaccagag

SEQ ID NO: 116031 - DNA, 25 bp, Canis familiaris
gactacacagaaaaccttcaggagg

SEQ ID NO: 116032 - DNA, 25 bp, Canis familiaris
gactgacggaaaacctcccgtgtga

SEQ ID NO: 116033 - DNA, 25 bp, Canis familiaris
gactattaaatcatactaccgtata

SEQ ID NO: 116034 - DNA, 25 bp, Canis familiaris
gacttcttaaactctacacctatag

SEQ ID NO: 116035 - DNA, 25 bp, Canis familiaris
gacttctgtaacaaacatccacctt

SEQ ID NO: 116036 - DNA, 25 bp, Canis familiaris
gactattttactgagcacgacttta

SEQ ID NO: 116037 - DNA, 25 bp, Canis familiaris
gacttatttcctgacatatactatg

SEQ ID NO: 116038 - DNA, 25 bp, Canis familiaris
gactattatctacaaatatttattg

SEQ ID NO: 116039 - DNA, 25 bp, Canis familiaris
gactttctctagcttatacattctt

SEQ ID NO: 116040 - DNA, 25 bp, Canis familiaris
gactttactgtgtttatcactttgt

SEQ ID NO: 116041 - DNA, 25 bp, Canis familiaris
gactttactatgttttccatttgta

SEQ ID NO: 116042 - DNA, 25 bp, Canis familiaris
gactattttgtttattccattatgt

SEQ ID NO: 116043 - DNA, 25 bp, Canis familiaris
gacttcttgcatatttagccatttt

SEQ ID NO: 116044 - DNA, 25 bp, Canis familiaris
gacttcttgtgcacttgaaatctgt

SEQ ID NO: 116045 - DNA, 25 bp, Canis familiaris
gacttttgactttgtaaactgctgt

SEQ ID NO: 116046 - DNA, 25 bp, Canis familiaris
gactatgtacactttgtcacaacta

SEQ ID NO: 116047 - DNA, 25 bp, Canis familiaris
gacttctgaatcttcttgagaccaa

SEQ ID NO: 116048 - DNA, 25 bp, Canis familiaris
gactggttatattctgggcactaaa

SEQ ID NO: 116049 - DNA, 25 bp, Canis familiaris
gacttttatctatgtgtcactaata

SEQ ID NO: 116050 - DNA, 25 bp, Canis familiaris
gactattccatcataggacaaccaa

SEQ ID NO: 116051 - DNA, 25 bp, Canis familiaris
gactactacgacgaggactacgaag

SEQ ID NO: 116052 - DNA, 25 bp, Canis familiaris
gactcacttctgcgggattacgcta

SEQ ID NO: 116053 - DNA, 25 bp, Canis familiaris
gactagttgctgagggaccacctta

SEQ ID NO: 116054 - DNA, 25 bp, Canis familiaris
gactgaaggcttcgggcaaacttta

SEQ ID NO: 116055 - DNA, 25 bp, Canis familiaris
gactagccctatcggttagacatct

SEQ ID NO: 116056 - DNA, 25 bp, Canis familiaris
gactaggcctgacgtgtggaacctt

SEQ ID NO: 116057 - DNA, 25 bp, Canis familiaris
gactaggaggacatgggtgacaatt

SEQ ID NO: 116058 - DNA, 25 bp, Canis familiaris
gactatggggaaagggctgagggca

SEQ ID NO: 116059 - DNA, 25 bp, Canis familiaris
gactttgtctcataaatggagggca

SEQ ID NO: 116060 - DNA, 25 bp, Canis familiaris
gactttttcaaaggcagggatgtgc

SEQ ID NO: 116061 - DNA, 25 bp, Canis familiaris
gactattcactctaaggcaggtttg

SEQ ID NO: 116062 - DNA, 25 bp, Canis familiaris
gacttttcttaatcaggtatctgtc

SEQ ID NO: 116063 - DNA, 25 bp, Canis familiaris
gacttcttctgccaaaaggatttcc

SEQ ID NO: 116064 - DNA, 25 bp, Canis familiaris
gacttcacactggagaaaggcctta

SEQ ID NO: 116065 - DNA, 25 bp, Canis familiaris
gactcactccttaaagaagccttgc

SEQ ID NO: 116066 - DNA, 25 bp, Canis familiaris
gactctctgcactctaagcaagctt

SEQ ID NO: 116067 - DNA, 25 bp, Canis familiaris
gactctgtgcacatctgtgccacac

SEQ ID NO: 116068 - DNA, 25 bp, Canis familiaris
gactaatcagcccatgatcacacat

SEQ ID NO: 116069 - DNA, 25 bp, Canis familiaris
gactatacacagcattcagagcatc

SEQ ID NO: 116070 - DNA, 25 bp, Canis familiaris
gacttacagtaagcagcagctctga

SEQ ID NO: 116071 - DNA, 25 bp, Canis familiaris
gactatcacatgaatctgggcccat

SEQ ID NO: 116072 - DNA, 25 bp, Canis familiaris
gactaacatctgtcaggcagctgac

SEQ ID NO: 116073 - DNA, 25 bp, Canis familiaris
gactaagctctgtcttgcaatatca

SEQ ID NO: 116074 - DNA, 25 bp, Canis familiaris
gactaacttaatccagcaatcacac

SEQ ID NO: 116075 - DNA, 25 bp, Canis familiaris
gacttactattcatcaactcatgac

SEQ ID NO: 116076 - DNA, 25 bp, Canis familiaris
gactcataatttttcaactatcatc

SEQ ID NO: 116077 - DNA, 25 bp, Canis familiaris
gactctagcattgaccaagttcctt

SEQ ID NO: 116078 - DNA, 25 bp, Canis familiaris
gacttactggtattccaattcctta

SEQ ID NO: 116079 - DNA, 25 bp, Canis familiaris
gactcttctggcagtgctatatccc

SEQ ID NO: 116080 - DNA, 25 bp, Canis familiaris
gactttctgctgctatgctcagctc

SEQ ID NO: 116081 - DNA, 25 bp, Canis familiaris
gactattctctcctattcaagtgaa

SEQ ID NO: 116082 - DNA, 25 bp, Canis familiaris
gacttttctccttatgcagagtatc

SEQ ID NO: 116083 - DNA, 25 bp, Canis familiaris
gacttcagtgtccacatcagcagga

SEQ ID NO: 116084 - DNA, 25 bp, Canis familiaris
gacttcaggatctacatcgcgtgat

SEQ ID NO: 116085 - DNA, 25 bp, Canis familiaris
gacttagagcaccacacctggatac

SEQ ID NO: 116086 - DNA, 25 bp, Canis familiaris
gacttcagagacaagcctgggccac

SEQ ID NO: 116087 - DNA, 25 bp, Canis familiaris
gactcatcaaactgcactaagccct

SEQ ID NO: 116088 - DNA, 25 bp, Canis familiaris
gactcaccaactggatttacatctt

SEQ ID NO: 116089 - DNA, 25 bp, Canis familiaris
gactcagtaactgccctactgtgta

SEQ ID NO: 116090 - DNA, 25 bp, Canis familiaris
gactcagttactactcagtttgtgg

SEQ ID NO: 116091 - DNA, 25 bp, Canis familiaris
gactagttcctactcaagctggttt

SEQ ID NO: 116092 - DNA, 25 bp, Canis familiaris
gactttgtagccccaaggtgtgtgt

SEQ ID NO: 116093 - DNA, 25 bp, Canis familiaris
gactttcccctgccagggtgtgagg

SEQ ID NO: 116094 - DNA, 25 bp, Canis familiaris
gactctatccccaaggattggtgcg

SEQ ID NO: 116095 - DNA, 25 bp, Canis familiaris
gactttgcttccatgctattgcagc

SEQ ID NO: 116096 - DNA, 25 bp, Canis familiaris
gactttttgccaaagatgtgcagat

SEQ ID NO: 116097 - DNA, 25 bp, Canis familiaris
gactttttgcacatattggctacta

SEQ ID NO: 116098 - DNA, 25 bp, Canis familiaris
gactttgttaatctttgctgcagga

SEQ ID NO: 116099 - DNA, 25 bp, Canis familiaris
gagtctatttttctttaggtactat

SEQ ID NO: 116100 - DNA, 25 bp, Canis familiaris
gactcgaatctttggtttagtccct

SEQ ID NO: 116101 - DNA, 25 bp, Canis familiaris
gactcggatttgtgttgatcttacc

SEQ ID NO: 116102 - DNA, 25 bp, Canis familiaris
gactcaggattgtccactgtatctt

SEQ ID NO: 116103 - DNA, 25 bp, Canis familiaris
gactatgtgatttccaagcctgttt

SEQ ID NO: 116104 - DNA, 25 bp, Canis familiaris
gactagatttggtaactgttttcag

SEQ ID NO: 116105 - DNA, 25 bp, Canis familiaris
gactaagtcagagtgaggtttttat

SEQ ID NO: 116106 - DNA, 25 bp, Canis familiaris
gactacatccaatgaagtgtctttt

SEQ ID NO: 116107 - DNA, 25 bp, Canis familiaris
gacttatggcagtaatcatggctgt

SEQ ID NO: 116108 - DNA, 25 bp, Canis familiaris
gactctagtgcttaacagctgccat

SEQ ID NO: 116109 - DNA, 25 bp, Canis familiaris
gactatatcttctaaagctccatgg

SEQ ID NO: 116110 - DNA, 25 bp, Canis familiaris
gactcagtcagttaaacgcctgccc

SEQ ID NO: 116111 - DNA, 25 bp, Canis familiaris
gactacatcagtttacattcccacc

SEQ ID NO: 116112 - DNA, 25 bp, Canis familiaris
gactacacttgattatttcccactc

SEQ ID NO: 116113 - DNA, 25 bp, Canis familiaris
gactaacttaatgtcttcacatcta

SEQ ID NO: 116114 - DNA, 25 bp, Canis familiaris
gacttactgatctagttttccatat

SEQ ID NO: 116115 - DNA, 25 bp, Canis familiaris
gactttctgaaacctaccctagaag

SEQ ID NO: 116116 - DNA, 25 bp, Canis familiaris
gacttttgatactttaccatgtgaa

SEQ ID NO: 116117 - DNA, 25 bp, Canis familiaris
gactacatttactatagacctgtga

SEQ ID NO: 116118 - DNA, 25 bp, Canis familiaris
gagctaccttactatccaattggac

SEQ ID NO: 116119 - DNA, 25 bp, Canis familiaris
gactaactacatgaaaatgccgtcc

SEQ ID NO: 116120 - DNA, 25 bp, Canis familiaris
gactaaacacattaccatctctcaa

SEQ ID NO: 116121 - DNA, 25 bp, Canis familiaris
gactgataactctcactcagctgta

SEQ ID NO: 116122 - DNA, 25 bp, Canis familiaris
gactatagcccagatccaggaatat

SEQ ID NO: 116123 - DNA, 25 bp, Canis familiaris
gactaagcccaaacctcaagaatcc

SEQ ID NO: 116124 - DNA, 25 bp, Canis familiaris
gactaagaccacaccatcaaatgat

SEQ ID NO: 116125 - DNA, 25 bp, Canis familiaris
gactgggagcaaccttgcaaaagag

SEQ ID NO: 116126 - DNA, 25 bp, Canis familiaris
gactagtgacaagctctgctgacca

SEQ ID NO: 116127 - DNA, 25 bp, Canis familiaris
gactatgatgagcacaccctgcagc

SEQ ID NO: 116128 - DNA, 25 bp, Canis familiaris
gactcagcatcacaggtgctggctg

SEQ ID NO: 116129 - DNA, 25 bp, Canis familiaris
gactccatgcaggagccgatgtgga

SEQ ID NO: 116130 - DNA, 25 bp, Canis familiaris
gactccacactatcttgtcaggaac

SEQ ID NO: 116131 - DNA, 25 bp, Canis familiaris
gactcaaacttatttgtcctgacaa

SEQ ID NO: 116132 - DNA, 25 bp, Canis familiaris
gactgagtacgttctggtcacgaca

SEQ ID NO: 116133 - DNA, 25 bp, Canis familiaris
gactttcactggccatgagtccgac

SEQ ID NO: 116134 - DNA, 25 bp, Canis familiaris
gactttactagcagagaaataccat

SEQ ID NO: 116135 - DNA, 25 bp, Canis familiaris
gactttacttgtctaatctgaccaa

SEQ ID NO: 116136 - DNA, 25 bp, Canis familiaris
gacttttctggttttactaccatag

SEQ ID NO: 116137 - DNA, 25 bp, Canis familiaris
gactgttgtcaggtattttccccat

SEQ ID NO: 116138 - DNA, 25 bp, Canis familiaris
gacttagtagtaatatatttcccct

SEQ ID NO: 116139 - DNA, 25 bp, Canis familiaris
gactttttgcatacttatttctaca

SEQ ID NO: 116140 - DNA, 25 bp, Canis familiaris
gactgtttcagctcttattctgcta

SEQ ID NO: 116141 - DNA, 25 bp, Canis familiaris
gactgccttcagattttagcttacg

SEQ ID NO: 116142 - DNA, 25 bp, Canis familiaris
gactccttcacgatgtgggttgtcg

SEQ ID NO: 116143 - DNA, 25 bp, Canis familiaris
gacttattcagctttgtgggtggta

SEQ ID NO: 116144 - DNA, 25 bp, Canis familiaris
gacttttcagatgtgctgccagcag

SEQ ID NO: 116145 - DNA, 25 bp, Canis familiaris
gactggtccagaggtgcctagatct

SEQ ID NO: 116146 - DNA, 25 bp, Canis familiaris
gactttctcaatagatcctggttca

SEQ ID NO: 116147 - DNA, 25 bp, Canis familiaris
gactccccagtaaagctggcctaac

SEQ ID NO: 116148 - DNA, 25 bp, Canis familiaris
gactctccatagaagaagtgtccaa

SEQ ID NO: 116149 - DNA, 25 bp, Canis familiaris
gactcagcccaggatgaccaggcta

SEQ ID NO: 116150 - DNA, 25 bp, Canis familiaris
gactcacagacaaagcaccatggga

SEQ ID NO: 116151 - DNA, 25 bp, Canis familiaris
gactcctgtcaatcactgaggtaca

SEQ ID NO: 116152 - DNA, 25 bp, Canis familiaris
gactatctccaaagccagagggcaa

SEQ ID NO: 116153 - DNA, 25 bp, Canis familiaris
gacgactgctagagtccagggtcag

SEQ ID NO: 116154 - DNA, 25 bp, Canis familiaris
gactactgctaagtctgtcaggggg

SEQ ID NO: 116155 - DNA, 25 bp, Canis familiaris
gactatcttgtaggcagtagggagc

SEQ ID NO: 116156 - DNA, 25 bp, Canis familiaris
gacgatcttctagcacagaggacct

SEQ ID NO: 116157 - DNA, 25 bp, Canis familiaris
gactgcattgatattgccagcggac

SEQ ID NO: 116158 - DNA, 25 bp, Canis familiaris
gactctctgaatttgtcagctcgag

SEQ ID NO: 116159 - DNA, 25 bp, Canis familiaris
gactcttgccaaggtgactctggtg

SEQ ID NO: 116160 - DNA, 25 bp, Canis familiaris
gactctctggacgattatccggtgg

SEQ ID NO: 116161 - DNA, 25 bp, Canis familiaris
gactttaggcttaatccatggtggt

SEQ ID NO: 116162 - DNA, 25 bp, Canis familiaris
gacttaggggtgtctcctgtgtagt

SEQ ID NO: 116163 - DNA, 25 bp, Canis familiaris
gacttttggtcttgttcttggatgc

SEQ ID NO: 116164 - DNA, 25 bp, Canis familiaris
gacttttgtgtcaacttttcttcag

SEQ ID NO: 116165 - DNA, 25 bp, Canis familiaris
gactggtagatatactagtttctga

SEQ ID NO: 116166 - DNA, 25 bp, Canis familiaris
gactgatgtaaaaactgtcacttgg

SEQ ID NO: 116167 - DNA, 25 bp, Canis familiaris
gactttatacataccattgacttgg

SEQ ID NO: 116168 - DNA, 25 bp, Canis familiaris
gacttttacatttctgtgccatcga

SEQ ID NO: 116169 - DNA, 25 bp, Canis familiaris
gacttttggatctcgtcatccagtg

SEQ ID NO: 116170 - DNA, 25 bp, Canis familiaris
gacttttcgatggtagtctccgtgc

SEQ ID NO: 116171 - DNA, 25 bp, Canis familiaris
gactatcttccaaagagtcctggac

SEQ ID NO: 116172 - DNA, 25 bp, Canis familiaris
gactacattacaacgggccaggaag

SEQ ID NO: 116173 - DNA, 25 bp, Canis familiaris
gactcacttacctgtgacgcaggca

SEQ ID NO: 116174 - DNA, 25 bp, Canis familiaris
gacgaaaatctctttgatccgcgac

SEQ ID NO: 116175 - DNA, 25 bp, Canis familiaris
gacgcccgatttatgaccgagactg

SEQ ID NO: 116176 - DNA, 25 bp, Canis familiaris
gacggccacatcaagttaacggact

SEQ ID NO: 116177 - DNA, 25 bp, Canis familiaris
gaccggatgtctttaaacccagcgg

SEQ ID NO: 116178 - DNA, 25 bp, Canis familiaris
gactaatgagtctctggaacgccag

SEQ ID NO: 116179 - DNA, 25 bp, Canis familiaris
gatctaatggtaatctgggacgccc

SEQ ID NO: 116180 - DNA, 25 bp, Canis familiaris
gactctctagatattgggacagctc

SEQ ID NO: 116181 - DNA, 25 bp, Canis familiaris
gactctcttggaatttgtgaggccc

SEQ ID NO: 116182 - DNA, 25 bp, Canis familiaris
gactgcatttggactcgctgatggt

SEQ ID NO: 116183 - DNA, 25 bp, Canis familiaris
gactgcagcttggatcacaggagtg

SEQ ID NO: 116184 - DNA, 25 bp, Canis familiaris
gactgcagggctctgcagccagtgc

SEQ ID NO: 116185 - DNA, 25 bp, Canis familiaris
gactcggagatcatgcagcagaagc

SEQ ID NO: 116186 - DNA, 25 bp, Canis familiaris
gactcagtagatctcagcggggctg

SEQ ID NO: 116187 - DNA, 25 bp, Canis familiaris
gactcacagggcttcgaggggtgtg

SEQ ID NO: 116188 - DNA, 25 bp, Canis familiaris
gactacagggggcagccgtgtgtcc

SEQ ID NO: 116189 - DNA, 25 bp, Canis familiaris
gactacagtcctcgcggatctagtc

SEQ ID NO: 116190 - DNA, 25 bp, Canis familiaris
gactccagtgtttctggcactagtc

SEQ ID NO: 116191 - DNA, 25 bp, Canis familiaris
gactcggttgtatgtcactggtccg

SEQ ID NO: 116192 - DNA, 25 bp, Canis familiaris
gactcagcgttgtggtgagcggtct

SEQ ID NO: 116193 - DNA, 25 bp, Canis familiaris
gactagcgttaattggcagcagacc

SEQ ID NO: 116194 - DNA, 25 bp, Canis familiaris
gactcaaatgtctatgtgggcagat

SEQ ID NO: 116195 - DNA, 25 bp, Canis familiaris
gactagcactgtcatgggagccatg

SEQ ID NO: 116196 - DNA, 25 bp, Canis familiaris
gactatatgtgacgatttacctggg

SEQ ID NO: 116197 - DNA, 25 bp, Canis familiaris
gactttgtgaggttcgacactgcct

SEQ ID NO: 116198 - DNA, 25 bp, Canis familiaris
gactcttattggttgagaatcccat

SEQ ID NO: 116199 - DNA, 25 bp, Canis familiaris
gactgctggttaggtacaactccat

SEQ ID NO: 116200 - DNA, 25 bp, Canis familiaris
gagcttacttatggtaaactcccag

SEQ ID NO: 116201 - DNA, 25 bp, Canis familiaris
gactgtattgccagaaacacgaccg

SEQ ID NO: 116202 - DNA, 25 bp, Canis familiaris
gactatattctcaaggaaggtgact

SEQ ID NO: 116203 - DNA, 25 bp, Canis familiaris
gactcgttctgtaggagagattggt

SEQ ID NO: 116204 - DNA, 25 bp, Canis familiaris
gactcagtccttaggtgtgtatgcc

SEQ ID NO: 116205 - DNA, 25 bp, Canis familiaris
gactcatggccgatggttggctgcg

SEQ ID NO: 116206 - DNA, 25 bp, Canis familiaris
gactacgcactcgtggtttcgaggg

SEQ ID NO: 116207 - DNA, 25 bp, Canis familiaris
gactactcacatttgttcattccag

SEQ ID NO: 116208 - DNA, 25 bp, Canis familiaris
gactacatacagggttcttcgtggg

SEQ ID NO: 116209 - DNA, 25 bp, Canis familiaris
gactcttatcaggatgagcttctcg

SEQ ID NO: 116210 - DNA, 25 bp, Canis familiaris
gagcttttaagtgttcttgacccca

SEQ ID NO: 116211 - DNA, 25 bp, Canis familiaris
gacggttgaaaggtgattagacccg

SEQ ID NO: 116212 - DNA, 25 bp, Canis familiaris
gacggtgtaaatgagcttttctgcc

SEQ ID NO: 116213 - DNA, 25 bp, Canis familiaris
gacgtggaagttgactcctacgctg

SEQ ID NO: 116214 - DNA, 25 bp, Canis familiaris
gacgatggcggctttaacttacggc

SEQ ID NO: 116215 - DNA, 25 bp, Canis familiaris
gactgttgggttaaactgtacaggt

SEQ ID NO: 116216 - DNA, 25 bp, Canis familiaris
gactagtggggaaagacagatatca

SEQ ID NO: 116217 - DNA, 25 bp, Canis familiaris
gactaggatgggaacagactctgaa

SEQ ID NO: 116218 - DNA, 25 bp, Canis familiaris
gactacgaggtgagctgtcctgagc

SEQ ID NO: 116219 - DNA, 25 bp, Canis familiaris
gactaagtcaggatcattgccgagc

SEQ ID NO: 116220 - DNA, 25 bp, Canis familiaris
gactatgagtaagcactaccacatg

SEQ ID NO: 116221 - DNA, 25 bp, Canis familiaris
gactttgtgcaagtcactcacctca

SEQ ID NO: 116222 - DNA, 25 bp, Canis familiaris
gactagttaactcctactgctcaag

SEQ ID NO: 116223 - DNA, 25 bp, Canis familiaris
gactaattacacctgtcactcattt

SEQ ID NO: 116224 - DNA, 25 bp, Canis familiaris
gactctttttctaacagctgcatat

SEQ ID NO: 116225 - DNA, 25 bp, Canis familiaris
gactttgcggtgttaagcacaatgt

SEQ ID NO: 116226 - DNA, 25 bp, Canis familiaris
gactgtgtatgggcctaaaaggtcc

SEQ ID NO: 116227 - DNA, 25 bp, Canis familiaris
gactgctttggagccatgccaatgg

SEQ ID NO: 116228 - DNA, 25 bp, Canis familiaris
gactggctggattgcccagccttgg

SEQ ID NO: 116229 - DNA, 25 bp, Canis familiaris
gactttcctgatgcacgctggagga

SEQ ID NO: 116230 - DNA, 25 bp, Canis familiaris
gactgtctcatcgaaatctgctggg

SEQ ID NO: 116231 - DNA, 25 bp, Canis familiaris
gactccatccgttatgctgtgtggc

SEQ ID NO: 116232 - DNA, 25 bp, Canis familiaris
gactccccgtcttgatgtagttgac

SEQ ID NO: 116233 - DNA, 25 bp, Canis familiaris
gactccggcagtgaatgcctataac

SEQ ID NO: 116234 - DNA, 25 bp, Canis familiaris
gactccttcgtgcaagatctggaac

SEQ ID NO: 116235 - DNA, 25 bp, Canis familiaris
gactccggggctccaagatgtaatc

SEQ ID NO: 116236 - DNA, 25 bp, Canis familiaris
gactgtagtgtgcttcagaggtaac

SEQ ID NO: 116237 - DNA, 25 bp, Canis familiaris
gactttggtgtatagtgcagtaaac

SEQ ID NO: 116238 - DNA, 25 bp, Canis familiaris
gactttggtgatcagaatcagaatt

SEQ ID NO: 116239 - DNA, 25 bp, Canis familiaris
gactttgaagcactgaaagctactg

SEQ ID NO: 116240 - DNA, 25 bp, Canis familiaris
gactgttacaagaaccagccaccca

SEQ ID NO: 116241 - DNA, 25 bp, Canis familiaris
gactattccgagaagtggccacctc

SEQ ID NO: 116242 - DNA, 25 bp, Canis familiaris
gacgttacaggcagaggccaccttc

SEQ ID NO: 116243 - DNA, 25 bp, Canis familiaris
gactgggggagcagaagcccctctt

SEQ ID NO: 116244 - DNA, 25 bp, Canis familiaris
gactggggccagttaggcccttgcc

SEQ ID NO: 116245 - DNA, 25 bp, Canis familiaris
gactcggagacacatcatgtcccgt

SEQ ID NO: 116246 - DNA, 25 bp, Canis familiaris
gactagaccacacatcttcatgggt

SEQ ID NO: 116247 - DNA, 25 bp, Canis familiaris
gactaagccatactaaatagggttg

SEQ ID NO: 116248 - DNA, 25 bp, Canis familiaris
gactccaccagactcaaaagggctc

SEQ ID NO: 116249 - DNA, 25 bp, Canis familiaris
gactctcccatcgacgtcaatgggt

SEQ ID NO: 116250 - DNA, 25 bp, Canis familiaris
gactttccactacattattgagcag

SEQ ID NO: 116251 - DNA, 25 bp, Canis familiaris
gactgtttccaggccttattgagac

SEQ ID NO: 116252 - DNA, 25 bp, Canis familiaris
gactttgcccaggcctgccaagatg

SEQ ID NO: 116253 - DNA, 25 bp, Canis familiaris
gactttggaatgtctcgtcaagagg

SEQ ID NO: 116254 - DNA, 25 bp, Canis familiaris
gactttggcatcgcccacaagatcg

SEQ ID NO: 116255 - DNA, 25 bp, Canis familiaris
gactttggtcaggccaggaaacctc

SEQ ID NO: 116256 - DNA, 25 bp, Canis familiaris
gacgttggttcgtcgtgttacacct

SEQ ID NO: 116257 - DNA, 25 bp, Canis familiaris
gactgttacccgtctgggaaatctt

SEQ ID NO: 116258 - DNA, 25 bp, Canis familiaris
gacgcaaacttcttgggtcaaatcc

SEQ ID NO: 116259 - DNA, 25 bp, Canis familiaris
gagcgaaaagccctggaaccaaaca

SEQ ID NO: 116260 - DNA, 25 bp, Canis familiaris
gactgcagaaaccctgagacaccta

SEQ ID NO: 116261 - DNA, 25 bp, Canis familiaris
gactgccacaagccatcaggaactc

SEQ ID NO: 116262 - DNA, 25 bp, Canis familiaris
gactcagcacggacaaggcagcagt

SEQ ID NO: 116263 - DNA, 25 bp, Canis familiaris
gactgcacccggaggctgcagtgtc

SEQ ID NO: 116264 - DNA, 25 bp, Canis familiaris
gactccttaggcaatgactactgac

SEQ ID NO: 116265 - DNA, 25 bp, Canis familiaris
gactcctatacgaagatctgcacgg

SEQ ID NO: 116266 - DNA, 25 bp, Canis familiaris
gactcctatttctagatctgtcctt

SEQ ID NO: 116267 - DNA, 25 bp, Canis familiaris
gactatctcttcaaagttgtcctta

SEQ ID NO: 116268 - DNA, 25 bp, Canis familiaris
gactaccttatgtactattatttct

SEQ ID NO: 116269 - DNA, 25 bp, Canis familiaris
gactcagtctgttgaactcttgatt

SEQ ID NO: 116270 - DNA, 25 bp, Canis familiaris
gactcagccttgacaagatgcttgt

SEQ ID NO: 116271 - DNA, 25 bp, Canis familiaris
gactcagcatcacgtagaagcactc

SEQ ID NO: 116272 - DNA, 25 bp, Canis familiaris
gactgcaatgcaattggaataccca

SEQ ID NO: 116273 - DNA, 25 bp, Canis familiaris
gactgcaatcacaggagagcccgca

SEQ ID NO: 116274 - DNA, 25 bp, Canis familiaris
gactccatgtctgggatgacctcac

SEQ ID NO: 116275 - DNA, 25 bp, Canis familiaris
gactctcagttgatgtccagtgggg

SEQ ID NO: 116276 - DNA, 25 bp, Canis familiaris
gactctcaccatctccagagtgata

SEQ ID NO: 116277 - DNA, 25 bp, Canis familiaris
gactctacatccctccagagagaga

SEQ ID NO: 116278 - DNA, 25 bp, Canis familiaris
gactctggctccatctacatagaat

SEQ ID NO: 116279 - DNA, 25 bp, Canis familiaris
gactctttggtggtactcagaacaa

SEQ ID NO: 116280 - DNA, 25 bp, Canis familiaris
gactgctgtagtcgttttcagtaca

SEQ ID NO: 116281 - DNA, 25 bp, Canis familiaris
gagctggtcaagttctttttaagtc

SEQ ID NO: 116282 - DNA, 25 bp, Canis familiaris
gactgtcacaactgttattttttcc

SEQ ID NO: 116283 - DNA, 25 bp, Canis familiaris
gacgtcaacccgaaactgtttatag

SEQ ID NO: 116284 - DNA, 25 bp, Canis familiaris
gacgggctaccagaattgtctaata

SEQ ID NO: 116285 - DNA, 25 bp, Canis familiaris
gacggactcaaaggattaggaaaca

SEQ ID NO: 116286 - DNA, 25 bp, Canis familiaris
gacggattagtaggacggacaataa

SEQ ID NO: 116287 - DNA, 25 bp, Canis familiaris
gacgtcattacattggaaggcataa

SEQ ID NO: 116288 - DNA, 25 bp, Canis familiaris
gacgcttttcttgagtcgcacaaat

SEQ ID NO: 116289 - DNA, 25 bp, Canis familiaris
gactcttgtattacgattcgcacga

SEQ ID NO: 116290 - DNA, 25 bp, Canis familiaris
gactcgatgttttccatcgtgcctg

SEQ ID NO: 116291 - DNA, 25 bp, Canis familiaris
gactatgattactaccagcgtcact

SEQ ID NO: 116292 - DNA, 25 bp, Canis familiaris
gactatgatcgagtaccggtcacag

SEQ ID NO: 116293 - DNA, 25 bp, Canis familiaris
gactcgagctgggacacggaactca

SEQ ID NO: 116294 - DNA, 25 bp, Canis familiaris
gactgcgtggtgaacaccgaccaca

SEQ ID NO: 116295 - DNA, 25 bp, Canis familiaris
gactgatggtgtacagaccccacct

SEQ ID NO: 116296 - DNA, 25 bp, Canis familiaris
gactatgggtccgattcacatgcac

SEQ ID NO: 116297 - DNA, 25 bp, Canis familiaris
gactcaggaattcattaatcagcac

SEQ ID NO: 116298 - DNA, 25 bp, Canis familiaris
gactcaggatatgaagttcatcatc

SEQ ID NO: 116299 - DNA, 25 bp, Canis familiaris
gactcaatctctgatagtgaatctc

SEQ ID NO: 116300 - DNA, 25 bp, Canis familiaris
gactcagctccttcagtggaagctt

SEQ ID NO: 116301 - DNA, 25 bp, Canis familiaris
gactacctattcttggactcatttc

SEQ ID NO: 116302 - DNA, 25 bp, Canis familiaris
gactatccatttttttagctgttct

SEQ ID NO: 116303 - DNA, 25 bp, Canis familiaris
gactagaatcttcgtttttgttttg

SEQ ID NO: 116304 - DNA, 25 bp, Canis familiaris
gactgggtattttggtgtggttttg

SEQ ID NO: 116305 - DNA, 25 bp, Canis familiaris
gactgtgctgctatctacggcaatg

SEQ ID NO: 116306 - DNA, 25 bp, Canis familiaris
gactacgtttctgtgtgcatatgtg

SEQ ID NO: 116307 - DNA, 25 bp, Canis familiaris
gactccatttctaccatggcaatgt

SEQ ID NO: 116308 - DNA, 25 bp, Canis familiaris
gactatatcttttcacttgccagtt

SEQ ID NO: 116309 - DNA, 25 bp, Canis familiaris
gactagtcttatgcagcttcctatc

SEQ ID NO: 116310 - DNA, 25 bp, Canis familiaris
gactcatctcttgccagcttaatag

SEQ ID NO: 116311 - DNA, 25 bp, Canis familiaris
gactccttctggcagtgctaatatc

SEQ ID NO: 116312 - DNA, 25 bp, Canis familiaris
gactatcttgtgcttgtgctcattt

SEQ ID NO: 116313 - DNA, 25 bp, Canis familiaris
gactactttggacttctatattcga

SEQ ID NO: 116314 - DNA, 25 bp, Canis familiaris
gactactgtgtggacttttcaaggc

SEQ ID NO: 116315 - DNA, 25 bp, Canis familiaris
gactcacgtgtggagttcctacgtc

SEQ ID NO: 116316 - DNA, 25 bp, Canis familiaris
gactgcaaattgagtttcttcttct

SEQ ID NO: 116317 - DNA, 25 bp, Canis familiaris
gactgaagttgcactgtctgcttct

SEQ ID NO: 116318 - DNA, 25 bp, Canis familiaris
gactgataattcattccctctttga

SEQ ID NO: 116319 - DNA, 25 bp, Canis familiaris
gactgaaacgcaattccactttata

SEQ ID NO: 116320 - DNA, 25 bp, Canis familiaris
gactccatactcaatttaaatctta

SEQ ID NO: 116321 - DNA, 25 bp, Canis familiaris
gactcttccttaatggacttttgta

SEQ ID NO: 116322 - DNA, 25 bp, Canis familiaris
gactgaaacttaatgaaactcttta

SEQ ID NO: 116323 - DNA, 25 bp, Canis familiaris
gactaaatcttaattattctcatca

SEQ ID NO: 116324 - DNA, 25 bp, Canis familiaris
gactggcagtttattatttctcatg

SEQ ID NO: 116325 - DNA, 25 bp, Canis familiaris
gacgattgtgttatttattcctctg

SEQ ID NO: 116326 - DNA, 25 bp, Canis familiaris
gactatatatttatctttaccagtg

SEQ ID NO: 116327 - DNA, 25 bp, Canis familiaris
gactagacaatatccctaagcagcg

SEQ ID NO: 116328 - DNA, 25 bp, Canis familiaris
gactcaagcaattgtccctttgacc

SEQ ID NO: 116329 - DNA, 25 bp, Canis familiaris
gactgaacaattatgccctcaaccc

SEQ ID NO: 116330 - DNA, 25 bp, Canis familiaris
gactgcagaagaatttccccaaccc

SEQ ID NO: 116331 - DNA, 25 bp, Canis familiaris
gactcagaaagttcctcagctcaac

SEQ ID NO: 116332 - DNA, 25 bp, Canis familiaris
gactcgaaaggcatccactgcattc

SEQ ID NO: 116333 - DNA, 25 bp, Canis familiaris
gactagaaagatgcatctcttctag

SEQ ID NO: 116334 - DNA, 25 bp, Canis familiaris
gactaggaagaagcatcttctttct

SEQ ID NO: 116335 - DNA, 25 bp, Canis familiaris
gactctggaaagggacctctcccaa

SEQ ID NO: 116336 - DNA, 25 bp, Canis familiaris
gactctggaaggcgacgacctcatc

SEQ ID NO: 116337 - DNA, 25 bp, Canis familiaris
gactcggacctgcagaaagcctgcc

SEQ ID NO: 116338 - DNA, 25 bp, Canis familiaris
gactcgctgccaatcaggaaagccc

SEQ ID NO: 116339 - DNA, 25 bp, Canis familiaris
gactctttgatttggaagaccgccc

SEQ ID NO: 116340 - DNA, 25 bp, Canis familiaris
gagaatgttttgtgggacccacttt

SEQ ID NO: 116341 - DNA, 25 bp, Canis familiaris
gataatgggttctctggcacaacct

SEQ ID NO: 116342 - DNA, 25 bp, Canis familiaris
gatacggtttcgggagaacacactc

SEQ ID NO: 116343 - DNA, 25 bp, Canis familiaris
gactcggttctcgctaggaaacaaa

SEQ ID NO: 116344 - DNA, 25 bp, Canis familiaris
gactccgtgtccacataaaaaacca

SEQ ID NO: 116345 - DNA, 25 bp, Canis familiaris
gactgaagtgctaccttaacaagta

SEQ ID NO: 116346 - DNA, 25 bp, Canis familiaris
gacgtagtgttgcctttacttgttg

SEQ ID NO: 116347 - DNA, 25 bp, Canis familiaris
gacggactgtttttttgtctgttgg

SEQ ID NO: 116348 - DNA, 25 bp, Canis familiaris
gactggcttagttttttactgtagg

SEQ ID NO: 116349 - DNA, 25 bp, Canis familiaris
gactgggtggattttatttctgaat

SEQ ID NO: 116350 - DNA, 25 bp, Canis familiaris
gacggagggatctcctggtgctgaa

SEQ ID NO: 116351 - DNA, 25 bp, Canis familiaris
gactgaattggagatcgggccttta

SEQ ID NO: 116352 - DNA, 25 bp, Canis familiaris
gactgatctaggtcaacggatcctt

SEQ ID NO: 116353 - DNA, 25 bp, Canis familiaris
gactgatcgggatagccaatctgta

SEQ ID NO: 116354 - DNA, 25 bp, Canis familiaris
gactatggcccatggagcaattgct

SEQ ID NO: 116355 - DNA, 25 bp, Canis familiaris
gactgtacaccatcaggaatcgtgt

SEQ ID NO: 116356 - DNA, 25 bp, Canis familiaris
gactgtcacccttagggatctgact

SEQ ID NO: 116357 - DNA, 25 bp, Canis familiaris
gactgcatgacccctaggatgtgca

SEQ ID NO: 116358 - DNA, 25 bp, Canis familiaris
gactgtacgcagccttcgattgcac

SEQ ID NO: 116359 - DNA, 25 bp, Canis familiaris
gactgaaccacaggctcacagtcct

SEQ ID NO: 116360 - DNA, 25 bp, Canis familiaris
gactgggcacctggatacagtcgtc

SEQ ID NO: 116361 - DNA, 25 bp, Canis familiaris
gacgacccattcgaacgtctgccct

SEQ ID NO: 116362 - DNA, 25 bp, Canis familiaris
gacggccaattcggattgttgaaca

SEQ ID NO: 116363 - DNA, 25 bp, Canis familiaris
gacggacgatgagcttgtgtacaac

SEQ ID NO: 116364 - DNA, 25 bp, Canis familiaris
gactaattcaacttacatccaaacc

SEQ ID NO: 116365 - DNA, 25 bp, Canis familiaris
gactaattcaactaacatcaaaaca

SEQ ID NO: 116366 - DNA, 25 bp, Canis familiaris
gactaatcaccctatactaccatga

SEQ ID NO: 116367 - DNA, 25 bp, Canis familiaris
gactgaataggttaacccccaggca

SEQ ID NO: 116368 - DNA, 25 bp, Canis familiaris
gactcattagtgcagaaaccccacc

SEQ ID NO: 116369 - DNA, 25 bp, Canis familiaris
gactggctattccagaaaccccaat

SEQ ID NO: 116370 - DNA, 25 bp, Canis familiaris
gagcgacgtgtacaaacctacagtt

SEQ ID NO: 116371 - DNA, 25 bp, Canis familiaris
gacgacttgtccctaattttcgatg

SEQ ID NO: 116372 - DNA, 25 bp, Canis familiaris
gacgaatttactgttttctgctgag

SEQ ID NO: 116373 - DNA, 25 bp, Canis familiaris
gaccaaatccttgcctttatggagc

SEQ ID NO: 116374 - DNA, 25 bp, Canis familiaris
gaccaaaccctgttctttattagca

SEQ ID NO: 116375 - DNA, 25 bp, Canis familiaris
gtccaaacccgtagttttgctgctt

SEQ ID NO: 116376 - DNA, 25 bp, Canis familiaris
gactaaatacctctttatatgctgt

SEQ ID NO: 116377 - DNA, 25 bp, Canis familiaris
gactgtctaacactcgtttcattcg

SEQ ID NO: 116378 - DNA, 25 bp, Canis familiaris
gactctggatacctttattcttcaa

SEQ ID NO: 116379 - DNA, 25 bp, Canis familiaris
gacgcatgtatacagttgtccccaa

SEQ ID NO: 116380 - DNA, 25 bp, Canis familiaris
gactgctttatatgttgactccctg

SEQ ID NO: 116381 - DNA, 25 bp, Canis familiaris
gactgcctcaatcattatgaccctt

SEQ ID NO: 116382 - DNA, 25 bp, Canis familiaris
gactgcgtcaacatcactgtcaagc

SEQ ID NO: 116383 - DNA, 25 bp, Canis familiaris
gactctgtgcaacctattgctcgag

SEQ ID NO: 116384 - DNA, 25 bp, Canis familiaris
gactcaggcttgctatgtgtctgca

SEQ ID NO: 116385 - DNA, 25 bp, Canis familiaris
gactaatcctgactaatcctgacat

SEQ ID NO: 116386 - DNA, 25 bp, Canis familiaris
gactcctcaagcataatcgctgact

SEQ ID NO: 116387 - DNA, 25 bp, Canis familiaris
gactcctgcagggtaatcacggtct

SEQ ID NO: 116388 - DNA, 25 bp, Canis familiaris
gactcgctgatggtacacaacgtgt

SEQ ID NO: 116389 - DNA, 25 bp, Canis familiaris
gactcatcaaggtaccaacagcaaa

SEQ ID NO: 116390 - DNA, 25 bp, Canis familiaris
gactctagaggatcaacactcaagt

SEQ ID NO: 116391 - DNA, 25 bp, Canis familiaris
gactctagaggacccatcatccaga

SEQ ID NO: 116392 - DNA, 25 bp, Canis familiaris
gactctagaggaccccaaatgatca

SEQ ID NO: 116393 - DNA, 25 bp, Canis familiaris
gactgttgagtcccactaatatata

SEQ ID NO: 116394 - DNA, 25 bp, Canis familiaris
gactctgagacccgccaaatataaa

SEQ ID NO: 116395 - DNA, 25 bp, Canis familiaris
gactctggcacatcccaagagcata

SEQ ID NO: 116396 - DNA, 25 bp, Canis familiaris
gacgtatgcatatcccattgatgtt

SEQ ID NO: 116397 - DNA, 25 bp, Canis familiaris
gacggtgaaacctgtctgttggaca

SEQ ID NO: 116398 - DNA, 25 bp, Canis familiaris
gacggagactacttacatcatgttg

SEQ ID NO: 116399 - DNA, 25 bp, Canis familiaris
gactaatggcttttatctatgctta

SEQ ID NO: 116400 - DNA, 25 bp, Canis familiaris
gactaattctatttattggctcaac

SEQ ID NO: 116401 - DNA, 25 bp, Canis familiaris
gactgaaactattttgtattcatac

SEQ ID NO: 116402 - DNA, 25 bp, Canis familiaris
gactgctaattttttgtgattttca

SEQ ID NO: 116403 - DNA, 25 bp, Canis familiaris
gactgcttttctatttgtatattca

SEQ ID NO: 116404 - DNA, 25 bp, Canis familiaris
gactgttttcaatttgtcaatttgt

SEQ ID NO: 116405 - DNA, 25 bp, Canis familiaris
gactgggttccagtctgtttttgtt

SEQ ID NO: 116406 - DNA, 25 bp, Canis familiaris
gactgtcagtgaacctgctgttatt

SEQ ID NO: 116407 - DNA, 25 bp, Canis familiaris
gactgcttctataacttggctattg

SEQ ID NO: 116408 - DNA, 25 bp, Canis familiaris
gactgcttttcttcaatactatctg

SEQ ID NO: 116409 - DNA, 25 bp, Canis familiaris
gactgtttttacttacatcactcaa

SEQ ID NO: 116410 - DNA, 25 bp, Canis familiaris
gactgctgtgtttagcaatccccta

SEQ ID NO: 116411 - DNA, 25 bp, Canis familiaris
gactgctttgcatatgagtccttat

SEQ ID NO: 116412 - DNA, 25 bp, Canis familiaris
gactctctatgtttgatatgttgta

SEQ ID NO: 116413 - DNA, 25 bp, Canis familiaris
gactcctgatctcagctcagatctt

SEQ ID NO: 116414 - DNA, 25 bp, Canis familiaris
gactcccctaagggttgtggcaccg

SEQ ID NO: 116415 - DNA, 25 bp, Canis familiaris
gactcccctaagggttgtggcaccg

SEQ ID NO: 116416 - DNA, 25 bp, Canis familiaris
gatccaccacttcaagttgtacacg

SEQ ID NO: 116417 - DNA, 25 bp, Canis familiaris
gactaccgtcatcatgagagttacc

SEQ ID NO: 116418 - DNA, 25 bp, Canis familiaris
gactacgagactcagaggcttctgc

SEQ ID NO: 116419 - DNA, 25 bp, Canis familiaris
gactacgagatctcagaggcctctg

SEQ ID NO: 116420 - DNA, 25 bp, Canis familiaris
gactacgagaagcagctgagccctg

SEQ ID NO: 116421 - DNA, 25 bp, Canis familiaris
gactcagctgtgtactactgtgccc

SEQ ID NO: 116422 - DNA, 25 bp, Canis familiaris
gactgagcagcttacattcttcctc

SEQ ID NO: 116423 - DNA, 25 bp, Canis familiaris
gactgagatgctggtaaatgtcctc

SEQ ID NO: 116424 - DNA, 25 bp, Canis familiaris
gactgcagatgctgtatttctagtt

SEQ ID NO: 116425 - DNA, 25 bp, Canis familiaris
gactactgcttgtgctttcaggtca

SEQ ID NO: 116426 - DNA, 25 bp, Canis familiaris
gactaatcttgggttctcagggagg

SEQ ID NO: 116427 - DNA, 25 bp, Canis familiaris
gactaattgtggcacttggggcgag

SEQ ID NO: 116428 - DNA, 25 bp, Canis familiaris
gactcaggtggacacgggggggtgg

SEQ ID NO: 116429 - DNA, 25 bp, Canis familiaris
gactctagaggatccgggagggggc

SEQ ID NO: 116430 - DNA, 25 bp, Canis familiaris
gacgaagaggggactgctggggggt

SEQ ID NO: 116431 - DNA, 25 bp, Canis familiaris
gactgaagggtggtggggggatggg

SEQ ID NO: 116432 - DNA, 25 bp, Canis familiaris
gagcgacggaggagtaggcggtggg

SEQ ID NO: 116433 - DNA, 25 bp, Canis familiaris
gagcttcaggggagaggacgtgggg

SEQ ID NO: 116434 - DNA, 25 bp, Canis familiaris
gactgacgggaaatgagacacctgg

SEQ ID NO: 116435 - DNA, 25 bp, Canis familiaris
gactcccgacacaatggtcaacgcg

SEQ ID NO: 116436 - DNA, 25 bp, Canis familiaris
gactccctgcccagcagggagccca

SEQ ID NO: 116437 - DNA, 25 bp, Canis familiaris
gactcaccttccctagggatgttca

SEQ ID NO: 116438 - DNA, 25 bp, Canis familiaris
gactcacccagacttcagtggatgc

SEQ ID NO: 116439 - DNA, 25 bp, Canis familiaris
gactgaccagagcctgatcgtggaa

SEQ ID NO: 116440 - DNA, 25 bp, Canis familiaris
gagccagccaaccagatggtgaaat

SEQ ID NO: 116441 - DNA, 25 bp, Canis familiaris
gactcatgcaagaccagtgctgtat

SEQ ID NO: 116442 - DNA, 25 bp, Canis familiaris
gactgctgggagacagagctgcttc

SEQ ID NO: 116443 - DNA, 25 bp, Canis familiaris
gactggatagataaaccttcgtaac

SEQ ID NO: 116444 - DNA, 25 bp, Canis familiaris
gactggggagaattccgtcctaatc

SEQ ID NO: 116445 - DNA, 25 bp, Canis familiaris
gactgtgggaaatcttacactgtta

SEQ ID NO: 116446 - DNA, 25 bp, Canis familiaris
gacgtgggaaaggctcgcctcatgt

SEQ ID NO: 116447 - DNA, 25 bp, Canis familiaris
gacgtgcagaaaccgtcccaagatg

SEQ ID NO: 116448 - DNA, 25 bp, Canis familiaris
gactggggtcagtctgtcacccagc

SEQ ID NO: 116449 - DNA, 25 bp, Canis familiaris
gactggtttatgataaccaagcatc

SEQ ID NO: 116450 - DNA, 25 bp, Canis familiaris
gactgggttaagaaaccaatgcatc

SEQ ID NO: 116451 - DNA, 25 bp, Canis familiaris
gactcggtctattagttctcaacag

SEQ ID NO: 116452 - DNA, 25 bp, Canis familiaris
gactctgagtcaatgaagtaatcaa

SEQ ID NO: 116453 - DNA, 25 bp, Canis familiaris
gactcgagtcaaatcattcgacgag

SEQ ID NO: 116454 - DNA, 25 bp, Canis familiaris
gactctgagatcacaacctgagcgg

SEQ ID NO: 116455 - DNA, 25 bp, Canis familiaris
gactgtggacgtggacactcacggc

SEQ ID NO: 116456 - DNA, 25 bp, Canis familiaris
gactggcagagtctggactcgcggc

SEQ ID NO: 116457 - DNA, 25 bp, Canis familiaris
gactggagaggagggattcgggtac

SEQ ID NO: 116458 - DNA, 25 bp, Canis familiaris
gactggaccagacggagttcctgta

SEQ ID NO: 116459 - DNA, 25 bp, Canis familiaris
gactggttgggccatggtatctctg

SEQ ID NO: 116460 - DNA, 25 bp, Canis familiaris
gacgagcggtgttaggctagcacga

SEQ ID NO: 116461 - DNA, 25 bp, Canis familiaris
gacgtggggtcgatgtcgactcacg

SEQ ID NO: 116462 - DNA, 25 bp, Canis familiaris
gacgtggggtggacctcaaggacat

SEQ ID NO: 116463 - DNA, 25 bp, Canis familiaris
gacgaggaggtgcacaccactggga

SEQ ID NO: 116464 - DNA, 25 bp, Canis familiaris
gaccggaggaacttcatccgtggag

SEQ ID NO: 116465 - DNA, 25 bp, Canis familiaris
gaccgtaagacggattatgcaggga

SEQ ID NO: 116466 - DNA, 25 bp, Canis familiaris
gaccttcacagacatggtagggcca

SEQ ID NO: 116467 - DNA, 25 bp, Canis familiaris
gactcttcttgagatcttcgagccc

SEQ ID NO: 116468 - DNA, 25 bp, Canis familiaris
gactctactgtacatcttgggcagc

SEQ ID NO: 116469 - DNA, 25 bp, Canis familiaris
gactgtgacttacacaggagcgact

SEQ ID NO: 116470 - DNA, 25 bp, Canis familiaris
gactcagacctacaacacagctgtc

SEQ ID NO: 116471 - DNA, 25 bp, Canis familiaris
gactaatctcaagcccaaggtctga

SEQ ID NO: 116472 - DNA, 25 bp, Canis familiaris
gactggatcaaagcccggagtggag

SEQ ID NO: 116473 - DNA, 25 bp, Canis familiaris
gactggaaggtacccaagatagagg

SEQ ID NO: 116474 - DNA, 25 bp, Canis familiaris
gactggcttggttggaagaaaggag

SEQ ID NO: 116475 - DNA, 25 bp, Canis familiaris
gactgtgtgggtataggaaacttgt

SEQ ID NO: 116476 - DNA, 25 bp, Canis familiaris
gactggtgctgtttatttaaaagtt

SEQ ID NO: 116477 - DNA, 25 bp, Canis familiaris
gactctttcctcaggtaagaagtct

SEQ ID NO: 116478 - DNA, 25 bp, Canis familiaris
gatcctaaccccggaaaaggctgtg

SEQ ID NO: 116479 - DNA, 25 bp, Canis familiaris
gaccataaacacccggatggggcgg

SEQ ID NO: 116480 - DNA, 25 bp, Canis familiaris
gagccctcaaaccctgggcaaggag

SEQ ID NO: 116481 - DNA, 25 bp, Canis familiaris
gactccgaaagctttaggccaggta

SEQ ID NO: 116482 - DNA, 25 bp, Canis familiaris
gactcctaaactgatgaaggttgta

SEQ ID NO: 116483 - DNA, 25 bp, Canis familiaris
gactcagctaaactgttaaggtggg

SEQ ID NO: 116484 - DNA, 25 bp, Canis familiaris
gactcaggccatactcttagaggtc

SEQ ID NO: 116485 - DNA, 25 bp, Canis familiaris
gactggcccttagctcagagcagtc

SEQ ID NO: 116486 - DNA, 25 bp, Canis familiaris
gactccgccagtttctgcagaagtc

SEQ ID NO: 116487 - DNA, 25 bp, Canis familiaris
gactccgtgcagtctgtatggaacc

SEQ ID NO: 116488 - DNA, 25 bp, Canis familiaris
gactccaggagcaaggcatgccaca

SEQ ID NO: 116489 - DNA, 25 bp, Canis familiaris
gactcaagccagaggctggaccctc

SEQ ID NO: 116490 - DNA, 25 bp, Canis familiaris
gactaagccacccagtggaaccaca

SEQ ID NO: 116491 - DNA, 25 bp, Canis familiaris
gagcttcgccaaaaatggaatttgt

SEQ ID NO: 116492 - DNA, 25 bp, Canis familiaris
gactccgccacaggaagtttattct

SEQ ID NO: 116493 - DNA, 25 bp, Canis familiaris
gactctgtgctctggagatgttttt

SEQ ID NO: 116494 - DNA, 25 bp, Canis familiaris
gactgtgcttgtagggcaggcttac

SEQ ID NO: 116495 - DNA, 25 bp, Canis familiaris
gactgctggattctgaaggcttaaa

SEQ ID NO: 116496 - DNA, 25 bp, Canis familiaris
gactgctgtgttttgctgttttaga

SEQ ID NO: 116497 - DNA, 25 bp, Canis familiaris
gactgagtgcttttggttgtctcta

SEQ ID NO: 116498 - DNA, 25 bp, Canis familiaris
gactgagatgcctgtgttctctttg

SEQ ID NO: 116499 - DNA, 25 bp, Canis familiaris
gactgatacgtcgatgttctttgtt

SEQ ID NO: 116500 - DNA, 25 bp, Canis familiaris
gactcagagcacccattttttgttc

SEQ ID NO: 116501 - DNA, 25 bp, Canis familiaris
gactcacgatctaatgtttttgtta

SEQ ID NO: 116502 - DNA, 25 bp, Canis familiaris
gactccattctaattctctttttaa

SEQ ID NO: 116503 - DNA, 25 bp, Canis familiaris
gactccaatctgaattttctttaat

SEQ ID NO: 116504 - DNA, 25 bp, Canis familiaris
gactccatatggcaactgttgttat

SEQ ID NO: 116505 - DNA, 25 bp, Canis familiaris
gactcctctggattactttccatca

SEQ ID NO: 116506 - DNA, 25 bp, Canis familiaris
gactcctgggatttcactgtattga

SEQ ID NO: 116507 - DNA, 25 bp, Canis familiaris
gactcctggttttattctctaacac

SEQ ID NO: 116508 - DNA, 25 bp, Canis familiaris
gacgactttatttattctaatggat

SEQ ID NO: 116509 - DNA, 25 bp, Canis familiaris
gacgacgttttaagtgatcctggga

SEQ ID NO: 116510 - DNA, 25 bp, Canis familiaris
gacgggttaatggggtgggactgca

SEQ ID NO: 116511 - DNA, 25 bp, Canis familiaris
gatccgggtagaccaggctgggaag

SEQ ID NO: 116512 - DNA, 25 bp, Canis familiaris
gacgtcggagaaaagtgctgcggaa

SEQ ID NO: 116513 - DNA, 25 bp, Canis familiaris
gacgttggaacttgacttgtcgaac

SEQ ID NO: 116514 - DNA, 25 bp, Canis familiaris
gacggtcgaacttgactatctagag

SEQ ID NO: 116515 - DNA, 25 bp, Canis familiaris
gacggtcgaacttgactatctagag

SEQ ID NO: 116516 - DNA, 25 bp, Canis familiaris
gacggtcgacgttgtgttattggca

SEQ ID NO: 116517 - DNA, 25 bp, Canis familiaris
gacgggcgaggatatttttggcacc

SEQ ID NO: 116518 - DNA, 25 bp, Canis familiaris
gactcatgggggtgtgtttctttcc

SEQ ID NO: 116519 - DNA, 25 bp, Canis familiaris
gaccttggggactgttaagcatttc

SEQ ID NO: 116520 - DNA, 25 bp, Canis familiaris
tacctttcctgagccttaattttct

SEQ ID NO: 116521 - DNA, 25 bp, Canis familiaris
gactctttcgaggccctgtaattgg

SEQ ID NO: 116522 - DNA, 25 bp, Canis familiaris
gactctttcgaggccctgtaattgg

SEQ ID NO: 116523 - DNA, 25 bp, Canis familiaris
gactctttcgaggccctgtaattgg

SEQ ID NO: 116524 - DNA, 25 bp, Canis familiaris
gaccttgtcttggaccgaattcgga

SEQ ID NO: 116525 - DNA, 25 bp, Canis familiaris
gacctggatctagaccaagacggtg

SEQ ID NO: 116526 - DNA, 25 bp, Canis familiaris
gactcggacaactactgtgtgacgg

SEQ ID NO: 116527 - DNA, 25 bp, Canis familiaris
gactcagtgatgcgcatttgcttac

SEQ ID NO: 116528 - DNA, 25 bp, Canis familiaris
gactgctgtgatcggtttcagtact

SEQ ID NO: 116529 - DNA, 25 bp, Canis familiaris
gactgacatgatcttttgcaatacc

SEQ ID NO: 116530 - DNA, 25 bp, Canis familiaris
gactgccatgatagttttgctttga

SEQ ID NO: 116531 - DNA, 25 bp, Canis familiaris
gactgcgataagttttctaagactc

SEQ ID NO: 116532 - DNA, 25 bp, Canis familiaris
gactcagcaaaggcatttccacaac

SEQ ID NO: 116533 - DNA, 25 bp, Canis familiaris
gacgagaactgcaagtccaccaagc

SEQ ID NO: 116534 - DNA, 25 bp, Canis familiaris
gactgagttcataagattaggcaat

SEQ ID NO: 116535 - DNA, 25 bp, Canis familiaris
gactcagatacactaattttccata

SEQ ID NO: 116536 - DNA, 25 bp, Canis familiaris
gactgctgcccgtaattttgtaata

SEQ ID NO: 116537 - DNA, 25 bp, Canis familiaris
gactgctcgcttggtatactttaaa

SEQ ID NO: 116538 - DNA, 25 bp, Canis familiaris
gactgtgcgtttcaacgtgctcaaa

SEQ ID NO: 116539 - DNA, 25 bp, Canis familiaris
gactgtgcgtttcaacgtgctcaaa

SEQ ID NO: 116540 - DNA, 25 bp, Canis familiaris
gactcaggacttctagtggcctaca

SEQ ID NO: 116541 - DNA, 25 bp, Canis familiaris
gactcaggctttcaggtgtgttcca

SEQ ID NO: 116542 - DNA, 25 bp, Canis familiaris
gactcacgccttgacagatgctgtg

SEQ ID NO: 116543 - DNA, 25 bp, Canis familiaris
gactccccatctgtggcatgagaag

SEQ ID NO: 116544 - DNA, 25 bp, Canis familiaris
gactccttcctctggcagaagaagc

SEQ ID NO: 116545 - DNA, 25 bp, Canis familiaris
gactcctgggcctcagaaacatagc

SEQ ID NO: 116546 - DNA, 25 bp, Canis familiaris
gactcccagcctggccgaaaagaca

SEQ ID NO: 116547 - DNA, 25 bp, Canis familiaris
gactcccacttggacaagataccga

SEQ ID NO: 116548 - DNA, 25 bp, Canis familiaris
gactgcccacttaattaatttagat

SEQ ID NO: 116549 - DNA, 25 bp, Canis familiaris
gactcttactttttggtgatgtggt

SEQ ID NO: 116550 - DNA, 25 bp, Canis familiaris
gactcattccttgggtattgatttt

SEQ ID NO: 116551 - DNA, 25 bp, Canis familiaris
gactgcttcctttggttttgtgttt

SEQ ID NO: 116552 - DNA, 25 bp, Canis familiaris
gactcttcttttgattatttctaat

SEQ ID NO: 116553 - DNA, 25 bp, Canis familiaris
gactcttgttttatccattgcatct

SEQ ID NO: 116554 - DNA, 25 bp, Canis familiaris
gactcttggttggtctccatatttc

SEQ ID NO: 116555 - DNA, 25 bp, Canis familiaris
gactctcagagtccagaatctcata

SEQ ID NO: 116556 - DNA, 25 bp, Canis familiaris
gactgctagagtccagggtcagata

SEQ ID NO: 116557 - DNA, 25 bp, Canis familiaris
gacgtgacagatcaggagtccttca

SEQ ID NO: 116558 - DNA, 25 bp, Canis familiaris
gacgtggcgtcagagttccgaaaga

SEQ ID NO: 116559 - DNA, 25 bp, Canis familiaris
gacgggcagagagatggatccaaga

SEQ ID NO: 116560 - DNA, 25 bp, Canis familiaris
gacgtggagaaggtcctgcacaggt

SEQ ID NO: 116561 - DNA, 25 bp, Canis familiaris
gacgagggaagtgttccaggactgg

SEQ ID NO: 116562 - DNA, 25 bp, Canis familiaris
gacggagaacgtggcgtccacgact

SEQ ID NO: 116563 - DNA, 25 bp, Canis familiaris
gacgcaaagaaagggggccaagctg

SEQ ID NO: 116564 - DNA, 25 bp, Canis familiaris
gacggacggaagccagggtccaggg

SEQ ID NO: 116565 - DNA, 25 bp, Canis familiaris
gacggacggaagccagggtccaggg

SEQ ID NO: 116566 - DNA, 25 bp, Canis familiaris
gactgtgacggaaatgaagggcggg

SEQ ID NO: 116567 - DNA, 25 bp, Canis familiaris
gactcgactggccaatggggggagg

SEQ ID NO: 116568 - DNA, 25 bp, Canis familiaris
gactctacaggccaatgaggggatg

SEQ ID NO: 116569 - DNA, 25 bp, Canis familiaris
gaccccaggccttaggtcgggatgt

SEQ ID NO: 116570 - DNA, 25 bp, Canis familiaris
gactcccaactatgtggctagggct

SEQ ID NO: 116571 - DNA, 25 bp, Canis familiaris
gactcccgggcacgatggaatgggt

SEQ ID NO: 116572 - DNA, 25 bp, Canis familiaris
gactgccaggggactgttactcagg

SEQ ID NO: 116573 - DNA, 25 bp, Canis familiaris
gacccatacagcgctttgacaagtg

SEQ ID NO: 116574 - DNA, 25 bp, Canis familiaris
gactcctaagtgtcatttctaagag

SEQ ID NO: 116575 - DNA, 25 bp, Canis familiaris
gactcctctggtcttctgtagagag

SEQ ID NO: 116576 - DNA, 25 bp, Canis familiaris
gactcccaggctctgggcagacagg

SEQ ID NO: 116577 - DNA, 25 bp, Canis familiaris
gactccttgtgtctggagcagctac

SEQ ID NO: 116578 - DNA, 25 bp, Canis familiaris
gactcctctgtacctgggaaatctc

SEQ ID NO: 116579 - DNA, 25 bp, Canis familiaris
gactcctcagtctcttggagcagtc

SEQ ID NO: 116580 - DNA, 25 bp, Canis familiaris
gactccgatgtctatcactggtcac

SEQ ID NO: 116581 - DNA, 25 bp, Canis familiaris
gactctgcttgggctagtggtgaca

SEQ ID NO: 116582 - DNA, 25 bp, Canis familiaris
gactgctctagggctcaaggtaacg

SEQ ID NO: 116583 - DNA, 25 bp, Canis familiaris
gactgggacagagtcatagctgtca

SEQ ID NO: 116584 - DNA, 25 bp, Canis familiaris
gactgaggtcaagaactgccattta

SEQ ID NO: 116585 - DNA, 25 bp, Canis familiaris
gactcggtcagagagacatcggtct

SEQ ID NO: 116586 - DNA, 25 bp, Canis familiaris
gactctgggcagcgggacaggatcc

SEQ ID NO: 116587 - DNA, 25 bp, Canis familiaris
gactcttgaagacgggggtgtgcac

SEQ ID NO: 116588 - DNA, 25 bp, Canis familiaris
gactgttgcagaaggagggggagaa

SEQ ID NO: 116589 - DNA, 25 bp, Canis familiaris
gactgtgtgaaaaatgtgatggcaa

SEQ ID NO: 116590 - DNA, 25 bp, Canis familiaris
gactgggcaattatgtgatgtgact

SEQ ID NO: 116591 - DNA, 25 bp, Canis familiaris
gactgggtgatcccgctgagtatgc

SEQ ID NO: 116592 - DNA, 25 bp, Canis familiaris
gactgggtcacctatgagctgaatc

SEQ ID NO: 116593 - DNA, 25 bp, Canis familiaris
gactgtgcaatggctctatgactga

SEQ ID NO: 116594 - DNA, 25 bp, Canis familiaris
gactctgagatgtcaccagacagac

SEQ ID NO: 116595 - DNA, 25 bp, Canis familiaris
gactctttgatttcagctcagatca

SEQ ID NO: 116596 - DNA, 25 bp, Canis familiaris
gactcatttcatttagcatgatgtc

SEQ ID NO: 116597 - DNA, 25 bp, Canis familiaris
gactctttgctcgtatcatcatgat

SEQ ID NO: 116598 - DNA, 25 bp, Canis familiaris
gactcttgctgagtgcctagcagat

SEQ ID NO: 116599 - DNA, 25 bp, Canis familiaris
gactctgtgctggatgtagagcctg

SEQ ID NO: 116600 - DNA, 25 bp, Canis familiaris
gactgtggggtatggcctggaatat

SEQ ID NO: 116601 - DNA, 25 bp, Canis familiaris
gactgtggggtctgacggagatgtt

SEQ ID NO: 116602 - DNA, 25 bp, Canis familiaris
gaccgagtggtctggagtcagaggt

SEQ ID NO: 116603 - DNA, 25 bp, Canis familiaris
gagccgacgagtttcgagtccggca

SEQ ID NO: 116604 - DNA, 25 bp, Canis familiaris
gactcgcacgattatcatcaggatc

SEQ ID NO: 116605 - DNA, 25 bp, Canis familiaris
gactgcagccgaattccggatctac

SEQ ID NO: 116606 - DNA, 25 bp, Canis familiaris
gactgcatggaggtcatacggctta

SEQ ID NO: 116607 - DNA, 25 bp, Canis familiaris
gactcaggaccaattgcgtctgatg

SEQ ID NO: 116608 - DNA, 25 bp, Canis familiaris
gactctgcaaacatatggtctctgt

SEQ ID NO: 116609 - DNA, 25 bp, Canis familiaris
gactctcaaactaaaatgattgcat

SEQ ID NO: 116610 - DNA, 25 bp, Canis familiaris
gactgctagccagagcaaatgttct

SEQ ID NO: 116611 - DNA, 25 bp, Canis familiaris
gactcatgacaaaaggaagctcttc

SEQ ID NO: 116612 - DNA, 25 bp, Canis familiaris
gactctgcagcgaggatgaagcttt

SEQ ID NO: 116613 - DNA, 25 bp, Canis familiaris
gactctgcagcagggatgaaagctt

SEQ ID NO: 116614 - DNA, 25 bp, Canis familiaris
gactccgcactgagcatggagcctg

SEQ ID NO: 116615 - DNA, 25 bp, Canis familiaris
gactcccagccatgatggagctcca

SEQ ID NO: 116616 - DNA, 25 bp, Canis familiaris
gactgcccagtctgtgggctgcaat

SEQ ID NO: 116617 - DNA, 25 bp, Canis familiaris
gactgcccagtctgtgggctgcaat

SEQ ID NO: 116618 - DNA, 25 bp, Canis familiaris
gactccgcagctgcatgtggacaaa

SEQ ID NO: 116619 - DNA, 25 bp, Canis familiaris
gactcctcactggctggaagcaata

SEQ ID NO: 116620 - DNA, 25 bp, Canis familiaris
gactcttcatttaggctcaggtcat

SEQ ID NO: 116621 - DNA, 25 bp, Canis familiaris
gactcctgatttccagtgaggtcat

SEQ ID NO: 116622 - DNA, 25 bp, Canis familiaris
gactcccattctacagagattctct

SEQ ID NO: 116623 - DNA, 25 bp, Canis familiaris
gactctagcacttacatgtgtcctc

SEQ ID NO: 116624 - DNA, 25 bp, Canis familiaris
gactctgatgaccgacggttgctgt

SEQ ID NO: 116625 - DNA, 25 bp, Canis familiaris
gactctgagacccagtgttctgagg

SEQ ID NO: 116626 - DNA, 25 bp, Canis familiaris
gactctgtcctccaaatatctggga

SEQ ID NO: 116627 - DNA, 25 bp, Canis familiaris
gaccgaattcggaaactggctgacc

SEQ ID NO: 116628 - DNA, 25 bp, Canis familiaris
gaccgaattcggaaactggctgacc

SEQ ID NO: 116629 - DNA, 25 bp, Canis familiaris
gacggaatacaaccaagggctacct

SEQ ID NO: 116630 - DNA, 25 bp, Canis familiaris
gacggtgtggcaggtcaagttctac

SEQ ID NO: 116631 - DNA, 25 bp, Canis familiaris
gacgaggttggcttcaatgctgatg

SEQ ID NO: 116632 - DNA, 25 bp, Canis familiaris
gacgaggttctgtacagcatcgcgg

SEQ ID NO: 116633 - DNA, 25 bp, Canis familiaris
gacggccttagatctctcgccgcca

SEQ ID NO: 116634 - DNA, 25 bp, Canis familiaris
gactgccttgtaaataccagcctct

SEQ ID NO: 116635 - DNA, 25 bp, Canis familiaris
gactgccttaatttgattctgcttc

SEQ ID NO: 116636 - DNA, 25 bp, Canis familiaris
gactgcctctaggatcgatagtgct

SEQ ID NO: 116637 - DNA, 25 bp, Canis familiaris
gactgccctgtggacaagaggcggc

SEQ ID NO: 116638 - DNA, 25 bp, Canis familiaris
gactgccgctgtgtacagcgcagcc

SEQ ID NO: 116639 - DNA, 25 bp, Canis familiaris
gactgactgcgtgtatatgctgccc

SEQ ID NO: 116640 - DNA, 25 bp, Canis familiaris
gactgactgccaggtagtgtgccga

SEQ ID NO: 116641 - DNA, 25 bp, Canis familiaris
gactgacttcaggctagggattaga

SEQ ID NO: 116642 - DNA, 25 bp, Canis familiaris
gactgcctcacaccagggtgattac

SEQ ID NO: 116643 - DNA, 25 bp, Canis familiaris
gactgcccacatctgcattggattc

SEQ ID NO: 116644 - DNA, 25 bp, Canis familiaris
gactgccaccagaagatcgatgacc

SEQ ID NO: 116645 - DNA, 25 bp, Canis familiaris
gacgtcaccgagcacaaaatcaaca

SEQ ID NO: 116646 - DNA, 25 bp, Canis familiaris
gagcagtccctgttagctaaaagcc

SEQ ID NO: 116647 - DNA, 25 bp, Canis familiaris
gactgtcacaggttacttaatttct

SEQ ID NO: 116648 - DNA, 25 bp, Canis familiaris
gactgtccagtgattctctgaagat

SEQ ID NO: 116649 - DNA, 25 bp, Canis familiaris
gactcttcagtttttactgagattt

SEQ ID NO: 116650 - DNA, 25 bp, Canis familiaris
gactctatcagttatttctcttgtg

SEQ ID NO: 116651 - DNA, 25 bp, Canis familiaris
gactctacaacttgttccatgtgtc

SEQ ID NO: 116652 - DNA, 25 bp, Canis familiaris
gactctagctaccattgtcctggtc

SEQ ID NO: 116653 - DNA, 25 bp, Canis familiaris
gactggagcaaggttgtcctggcct

SEQ ID NO: 116654 - DNA, 25 bp, Canis familiaris
gactcggcatacgtcatccaatgtc

SEQ ID NO: 116655 - DNA, 25 bp, Canis familiaris
gactctgagctacctttcaggtttc

SEQ ID NO: 116656 - DNA, 25 bp, Canis familiaris
gactgctactgaactttacgttccc

SEQ ID NO: 116657 - DNA, 25 bp, Canis familiaris
gactgtgtctgaagccttgaacctc

SEQ ID NO: 116658 - DNA, 25 bp, Canis familiaris
gactgtgagctgaagatcttggact

SEQ ID NO: 116659 - DNA, 25 bp, Canis familiaris
gactgccaatcaaatctcggtgttc

SEQ ID NO: 116660 - DNA, 25 bp, Canis familiaris
gacctaatcttacaggtttccttca

SEQ ID NO: 116661 - DNA, 25 bp, Canis familiaris
gacgtacctttcaggtttctaacat

SEQ ID NO: 116662 - DNA, 25 bp, Canis familiaris
gacgctccctttatctttattaaga

SEQ ID NO: 116663 - DNA, 25 bp, Canis familiaris
gatccccttggtattgtccattatc

SEQ ID NO: 116664 - DNA, 25 bp, Canis familiaris
gactgcccgttgtgggtcatgttat

SEQ ID NO: 116665 - DNA, 25 bp, Canis familiaris
gactgccttttgtgtgagtagggtc

SEQ ID NO: 116666 - DNA, 25 bp, Canis familiaris
gactcccttctgggcgacaaggggc

SEQ ID NO: 116667 - DNA, 25 bp, Canis familiaris
gactgggttttgtcagaacgggagc

SEQ ID NO: 116668 - DNA, 25 bp, Canis familiaris
gactggggcattgagaaacttggag

SEQ ID NO: 116669 - DNA, 25 bp, Canis familiaris
gacgagaagcatctataaccgggag

SEQ ID NO: 116670 - DNA, 25 bp, Canis familiaris
gactgaatggatctacttgccggtt

SEQ ID NO: 116671 - DNA, 25 bp, Canis familiaris
gacgtcagcgatctttaagcggttc

SEQ ID NO: 116672 - DNA, 25 bp, Canis familiaris
gactgctgccatattttatcacggt

SEQ ID NO: 116673 - DNA, 25 bp, Canis familiaris
gactgctctcagaatggttcatgct

SEQ ID NO: 116674 - DNA, 25 bp, Canis familiaris
gactgtctcaaaccttggtgtcata

SEQ ID NO: 116675 - DNA, 25 bp, Canis familiaris
gactgtccagtaccaaaatgagcta

SEQ ID NO: 116676 - DNA, 25 bp, Canis familiaris
gactgactcagtaaacgaagcatgc

SEQ ID NO: 116677 - DNA, 25 bp, Canis familiaris
gactgtctatttttctggatgatgc

SEQ ID NO: 116678 - DNA, 25 bp, Canis familiaris
gactgctgctcattctttaggattg

SEQ ID NO: 116679 - DNA, 25 bp, Canis familiaris
gactgctgtactcttcatttgatgt

SEQ ID NO: 116680 - DNA, 25 bp, Canis familiaris
gactgcacttgttttcataatagta

SEQ ID NO: 116681 - DNA, 25 bp, Canis familiaris
gactgcagctttttttcatgctatg

SEQ ID NO: 116682 - DNA, 25 bp, Canis familiaris
gactgagttttaaccagcattctcc

SEQ ID NO: 116683 - DNA, 25 bp, Canis familiaris
gactgacctggtaaccagtcctctg

SEQ ID NO: 116684 - DNA, 25 bp, Canis familiaris
gactgaccataaatacctcacctag

SEQ ID NO: 116685 - DNA, 25 bp, Canis familiaris
gactgacttacagaccaaccaacca

SEQ ID NO: 116686 - DNA, 25 bp, Canis familiaris
gactcctggtctgagcccaataaaa

SEQ ID NO: 116687 - DNA, 25 bp, Canis familiaris
gactcctggtctgagcccaataaaa

SEQ ID NO: 116688 - DNA, 25 bp, Canis familiaris
gactcctggtctgagcccaataaaa

SEQ ID NO: 116689 - DNA, 25 bp, Canis familiaris
gactcctggtctgagcccaataaaa

SEQ ID NO: 116690 - DNA, 25 bp, Canis familiaris
gaccgggtctgaagccaaacaagag

SEQ ID NO: 116691 - DNA, 25 bp, Canis familiaris
gacgggtaggacaccgacacagagt

SEQ ID NO: 116692 - DNA, 25 bp, Canis familiaris
gactgggtaggagccacaaacatcc

SEQ ID NO: 116693 - DNA, 25 bp, Canis familiaris
gactcggtatggtttaaaatcctgt

SEQ ID NO: 116694 - DNA, 25 bp, Canis familiaris
gactcggtatggtttccataatctg

SEQ ID NO: 116695 - DNA, 25 bp, Canis familiaris
gactgcaggaatgttacctgtcatt

SEQ ID NO: 116696 - DNA, 25 bp, Canis familiaris
gactgaggagcagattgcagaattc

SEQ ID NO: 116697 - DNA, 25 bp, Canis familiaris
gactgcagtcaggaaccagttcccc

SEQ ID NO: 116698 - DNA, 25 bp, Canis familiaris
gactgcattgactaaccagtccctc

SEQ ID NO: 116699 - DNA, 25 bp, Canis familiaris
gactgcttacaaaaaactgctatag

SEQ ID NO: 116700 - DNA, 25 bp, Canis familiaris
gactgcttacaaaaaactgctatag

SEQ ID NO: 116701 - DNA, 25 bp, Canis familiaris
gactgttaagctttgcaaatgtgaa

SEQ ID NO: 116702 - DNA, 25 bp, Canis familiaris
gaccttaagtgggcaatgggcgaag

SEQ ID NO: 116703 - DNA, 25 bp, Canis familiaris
gactcctaactgtacaagaggtaga

SEQ ID NO: 116704 - DNA, 25 bp, Canis familiaris
gagacccaactgcaaagagaaaact

SEQ ID NO: 116705 - DNA, 25 bp, Canis familiaris
gagacccatttgctaatcctaaagt

SEQ ID NO: 116706 - DNA, 25 bp, Canis familiaris
gacgatcctggtctgaatcacaaaa

SEQ ID NO: 116707 - DNA, 25 bp, Canis familiaris
gacgtacgagaattgacccatacaa

SEQ ID NO: 116708 - DNA, 25 bp, Canis familiaris
gactgtacagataatgcaccccata

SEQ ID NO: 116709 - DNA, 25 bp, Canis familiaris
gactgtgacagtaccagagccacct

SEQ ID NO: 116710 - DNA, 25 bp, Canis familiaris
gactgtgataggacactgcccactc

SEQ ID NO: 116711 - DNA, 25 bp, Canis familiaris
gactgaagagacagtgcccacctgg

SEQ ID NO: 116712 - DNA, 25 bp, Canis familiaris
gacgaatgaacaagtacacccagta

SEQ ID NO: 116713 - DNA, 25 bp, Canis familiaris
gatcgaattaagttcgccgccatcg

SEQ ID NO: 116714 - DNA, 25 bp, Canis familiaris
gactggttaatgatcaccatgccat

SEQ ID NO: 116715 - DNA, 25 bp, Canis familiaris
gactggatcttacttaaatcctatg

SEQ ID NO: 116716 - DNA, 25 bp, Canis familiaris
gactggactgggagaacatccgcag

SEQ ID NO: 116717 - DNA, 25 bp, Canis familiaris
gactggtcgctgctactaataggag

SEQ ID NO: 116718 - DNA, 25 bp, Canis familiaris
gactggtctgtgaaatccactcggg

SEQ ID NO: 116719 - DNA, 25 bp, Canis familiaris
gactggtgtgtggaatccaattctg

SEQ ID NO: 116720 - DNA, 25 bp, Canis familiaris
gacggtcttgtctacgagagctatg

SEQ ID NO: 116721 - DNA, 25 bp, Canis familiaris
gacgaatattacaacgcggcagcat

SEQ ID NO: 116722 - DNA, 25 bp, Canis familiaris
gacgaatgcagtacaaccgacgctt

SEQ ID NO: 116723 - DNA, 25 bp, Canis familiaris
gactgagtggttggacggcaagcat

SEQ ID NO: 116724 - DNA, 25 bp, Canis familiaris
gactgcgtggctctgggagcaactc

SEQ ID NO: 116725 - DNA, 25 bp, Canis familiaris
gactgggaaggtcgctggaaccatg

SEQ ID NO: 116726 - DNA, 25 bp, Canis familiaris
gacgaggagggcctctggagatcct

SEQ ID NO: 116727 - DNA, 25 bp, Canis familiaris
gacgagaagaccctatggagcttta

SEQ ID NO: 116728 - DNA, 25 bp, Canis familiaris
gactggcaaacttcctgcaagcttc

SEQ ID NO: 116729 - DNA, 25 bp, Canis familiaris
gacggaaactttgacgatgcgctta

SEQ ID NO: 116730 - DNA, 25 bp, Canis familiaris
gacgtaatacatataaagtggcaga

SEQ ID NO: 116731 - DNA, 25 bp, Canis familiaris
gactgtcttccccatgaaagggggc

SEQ ID NO: 116732 - DNA, 25 bp, Canis familiaris
gactgctttccagaagaagggggtc

SEQ ID NO: 116733 - DNA, 25 bp, Canis familiaris
gacgttttgcaatcatgaaccggtt

SEQ ID NO: 116734 - DNA, 25 bp, Canis familiaris
gacgttttcacaacgtgagcctcct

SEQ ID NO: 116735 - DNA, 25 bp, Canis familiaris
gacgttttcagacttgggagacgag

SEQ ID NO: 116736 - DNA, 25 bp, Canis familiaris
gacgtttttgcctttgggagtgctg

SEQ ID NO: 116737 - DNA, 25 bp, Canis familiaris
gacgttttgttgttctagggactct

SEQ ID NO: 116738 - DNA, 25 bp, Canis familiaris
gacgtagtcgtcctttgtggaaccg

SEQ ID NO: 116739 - DNA, 25 bp, Canis familiaris
gacgtgagactggagttccgggacc

SEQ ID NO: 116740 - DNA, 25 bp, Canis familiaris
gacgggttgaacacggggatccgct

SEQ ID NO: 116741 - DNA, 25 bp, Canis familiaris
gacgtgtgtgtgttcaacggggtcc

SEQ ID NO: 116742 - DNA, 25 bp, Canis familiaris
gactgggttggaatagctggggctt

SEQ ID NO: 116743 - DNA, 25 bp, Canis familiaris
gactgttttttgaaggatgggctat

SEQ ID NO: 116744 - DNA, 25 bp, Canis familiaris
gactgctcttctttgaaggttttca

SEQ ID NO: 116745 - DNA, 25 bp, Canis familiaris
gactgctttaaaaactgtgcattta

SEQ ID NO: 116746 - DNA, 25 bp, Canis familiaris
gactgtgttatattcaacccttgtg

SEQ ID NO: 116747 - DNA, 25 bp, Canis familiaris
gactcgatcattttgaactccataa

SEQ ID NO: 116748 - DNA, 25 bp, Canis familiaris
gactcgctattctaaacttgcatga

SEQ ID NO: 116749 - DNA, 25 bp, Canis familiaris
gactcctattctggtaactgtgccc

SEQ ID NO: 116750 - DNA, 25 bp, Canis familiaris
gactggcttgtgtggatacttcctc

SEQ ID NO: 116751 - DNA, 25 bp, Canis familiaris
gacggcactgtatgaaagtgacact

SEQ ID NO: 116752 - DNA, 25 bp, Canis familiaris
gacgacctgcgcaggcagtgtgaca

SEQ ID NO: 116753 - DNA, 25 bp, Canis familiaris
gactgtcctgtgagcagcagcatat

SEQ ID NO: 116754 - DNA, 25 bp, Canis familiaris
gactgtcttctgtgtgcaatgatct

SEQ ID NO: 116755 - DNA, 25 bp, Canis familiaris
gactgacttctaaggacatcatctc

SEQ ID NO: 116756 - DNA, 25 bp, Canis familiaris
gactgactttaaggcccagctggcc

SEQ ID NO: 116757 - DNA, 25 bp, Canis familiaris
gactgacctatacagaactgggctc

SEQ ID NO: 116758 - DNA, 25 bp, Canis familiaris
gactggagtcttcatgaactggggc

SEQ ID NO: 116759 - DNA, 25 bp, Canis familiaris
gacgctgagggtcattcactgattg

SEQ ID NO: 116760 - DNA, 25 bp, Canis familiaris
gacccagaaaccttacagatcatgc

SEQ ID NO: 116761 - DNA, 25 bp, Canis familiaris
gataccgaaaccacaagatcgttta

SEQ ID NO: 116762 - DNA, 25 bp, Canis familiaris
gattccagcaactcccaaaagttaa

SEQ ID NO: 116763 - DNA, 25 bp, Canis familiaris
gactgccatgagttccaccagaaag

SEQ ID NO: 116764 - DNA, 25 bp, Canis familiaris
gactgcacatgggaccatgacacac

SEQ ID NO: 116765 - DNA, 25 bp, Canis familiaris
gactgcatgcatggaaccaatccag

SEQ ID NO: 116766 - DNA, 25 bp, Canis familiaris
gacgagctgcgaaggcatctggagc

SEQ ID NO: 116767 - DNA, 25 bp, Canis familiaris
gactggctgagctgtgagtgtgagt

SEQ ID NO: 116768 - DNA, 25 bp, Canis familiaris
gactgtctatccttgcatgatttgt

SEQ ID NO: 116769 - DNA, 25 bp, Canis familiaris
gactgttcactgctgtattggtttg

SEQ ID NO: 116770 - DNA, 25 bp, Canis familiaris
gactgtttcggactattgcgctttg

SEQ ID NO: 116771 - DNA, 25 bp, Canis familiaris
gacggttcggacagtggcgatcatg

SEQ ID NO: 116772 - DNA, 25 bp, Canis familiaris
gacggttctggagaaggccatcctt

SEQ ID NO: 116773 - DNA, 25 bp, Canis familiaris
gacggttggtcagagcaacccctgg

SEQ ID NO: 116774 - DNA, 25 bp, Canis familiaris
gacggaaggactggtatgacccctg

SEQ ID NO: 116775 - DNA, 25 bp, Canis familiaris
gacggaaggactggtatgacccctg

SEQ ID NO: 116776 - DNA, 25 bp, Canis familiaris
gacggaaggactggtatgaccccct

SEQ ID NO: 116777 - DNA, 25 bp, Canis familiaris
gactgtgtaccaccagtggacccac

SEQ ID NO: 116778 - DNA, 25 bp, Canis familiaris
gacgtgtactactgtggaatcaagt

SEQ ID NO: 116779 - DNA, 25 bp, Canis familiaris
gacgttcacacgtgtgcaagtgcat

SEQ ID NO: 116780 - DNA, 25 bp, Canis familiaris
gactgtgtcccgtgtcacgggaaat

SEQ ID NO: 116781 - DNA, 25 bp, Canis familiaris
gactgtgtcccgtgcacggaaaata

SEQ ID NO: 116782 - DNA, 25 bp, Canis familiaris
gactgttccacctgattcagaaccc

SEQ ID NO: 116783 - DNA, 25 bp, Canis familiaris
gacgttcatatgacatgtcttcgaa

SEQ ID NO: 116784 - DNA, 25 bp, Canis familiaris
gactgtatatagtttctccagaaca

SEQ ID NO: 116785 - DNA, 25 bp, Canis familiaris
gactgtaaagatgttctcagcagaa

SEQ ID NO: 116786 - DNA, 25 bp, Canis familiaris
gactgcttatagtaaattgtcagaa

SEQ ID NO: 116787 - DNA, 25 bp, Canis familiaris
gactgactatactgacctgtctgtt

SEQ ID NO: 116788 - DNA, 25 bp, Canis familiaris
gactgaccaactgaccaatgtgctg

SEQ ID NO: 116789 - DNA, 25 bp, Canis familiaris
gactggcacccggagctaggtgcca

SEQ ID NO: 116790 - DNA, 25 bp, Canis familiaris
gactgtccacggggatgagcttgcc

SEQ ID NO: 116791 - DNA, 25 bp, Canis familiaris
gactcctctagagggcagtgttgcc

SEQ ID NO: 116792 - DNA, 25 bp, Canis familiaris
gactccactgagagctgggttgtct

SEQ ID NO: 116793 - DNA, 25 bp, Canis familiaris
gactccagcttcaggtgcagggaca

SEQ ID NO: 116794 - DNA, 25 bp, Canis familiaris
gactgcttattgacaggccagggcc

SEQ ID NO: 116795 - DNA, 25 bp, Canis familiaris
gactgtctgttgactccaagggttt

SEQ ID NO: 116796 - DNA, 25 bp, Canis familiaris
gactcctctataagccaatggtgtt

SEQ ID NO: 116797 - DNA, 25 bp, Canis familiaris
gacgattctgacaatctattgggtt

SEQ ID NO: 116798 - DNA, 25 bp, Canis familiaris
gacgttagagtaatgcacgcaggtt

SEQ ID NO: 116799 - DNA, 25 bp, Canis familiaris
gacgtgctgcaggattacccaggat

SEQ ID NO: 116800 - DNA, 25 bp, Canis familiaris
gactgggcgctgggatcccaggagc

SEQ ID NO: 116801 - DNA, 25 bp, Canis familiaris
gactggacgtgattgacttcggtgt

SEQ ID NO: 116802 - DNA, 25 bp, Canis familiaris
gactggtggctgttacttttgctgt

SEQ ID NO: 116803 - DNA, 25 bp, Canis familiaris
gactgtgtatgtttacaatgttgtg

SEQ ID NO: 116804 - DNA, 25 bp, Canis familiaris
gactgtcatcttatacctgtttgtg

SEQ ID NO: 116805 - DNA, 25 bp, Canis familiaris
gacggcttattttcctggcattaga

SEQ ID NO: 116806 - DNA, 25 bp, Canis familiaris
gactgagttcttaacgggcatcggc

SEQ ID NO: 116807 - DNA, 25 bp, Canis familiaris
gacgagttttaagtttccagtgcaa

SEQ ID NO: 116808 - DNA, 25 bp, Canis familiaris
gactgtggggtttctttccatgtga

SEQ ID NO: 116809 - DNA, 25 bp, Canis familiaris
gactgatgtttaaactgttcacttg

SEQ ID NO: 116810 - DNA, 25 bp, Canis familiaris
gacgcattatttgaggtccattgga

SEQ ID NO: 116811 - DNA, 25 bp, Canis familiaris
gacgccttttgggatgtacaggaaa

SEQ ID NO: 116812 - DNA, 25 bp, Canis familiaris
gacgtctctttttggtaatgataaa

SEQ ID NO: 116813 - DNA, 25 bp, Canis familiaris
gacgtcctcttgtggaacgtccaca

SEQ ID NO: 116814 - DNA, 25 bp, Canis familiaris
gacgaccgtcatcaataacgtgtca

SEQ ID NO: 116815 - DNA, 25 bp, Canis familiaris
gacggtcgcactcaataccgtccga

SEQ ID NO: 116816 - DNA, 25 bp, Canis familiaris
gactgggacatcatcagtacggtcc

SEQ ID NO: 116817 - DNA, 25 bp, Canis familiaris
gactgcggagccacatgggtagtcc

SEQ ID NO: 116818 - DNA, 25 bp, Canis familiaris
gactggtgtcggagatggtcgtccc

SEQ ID NO: 116819 - DNA, 25 bp, Canis familiaris
gacggggatggggatggggctcccg

SEQ ID NO: 116820 - DNA, 25 bp, Canis familiaris
gaccggcgtatcgaaggggaccgcg

SEQ ID NO: 116821 - DNA, 25 bp, Canis familiaris
gactgctggcatggacggagggaac

SEQ ID NO: 116822 - DNA, 25 bp, Canis familiaris
gactgcgcgcaggacgagaactgca

SEQ ID NO: 116823 - DNA, 25 bp, Canis familiaris
gactgctgcagactactgaatatcc

SEQ ID NO: 116824 - DNA, 25 bp, Canis familiaris
gactggcgagatataaatcctcctc

SEQ ID NO: 116825 - DNA, 25 bp, Canis familiaris
gagcgagcgtcgactagaacgtagt

SEQ ID NO: 116826 - DNA, 25 bp, Canis familiaris
gactgacggcgacggagacgtggac

SEQ ID NO: 116827 - DNA, 25 bp, Canis familiaris
gactggggcacaggggcacccagac

SEQ ID NO: 116828 - DNA, 25 bp, Canis familiaris
gacgagggcaaatgcagcacctgga

SEQ ID NO: 116829 - DNA, 25 bp, Canis familiaris
gacgagggcaaaatgcagcaccctg

SEQ ID NO: 116830 - DNA, 25 bp, Canis familiaris
gactgggggagaagctgaccctcgc

SEQ ID NO: 116831 - DNA, 25 bp, Canis familiaris
gactggaggcgacagatgggcccct

SEQ ID NO: 116832 - DNA, 25 bp, Canis familiaris
gactgacgggcactgaggagggcac

SEQ ID NO: 116833 - DNA, 25 bp, Canis familiaris
gactgtgaagatgctgggaggtgag

SEQ ID NO: 116834 - DNA, 25 bp, Canis familiaris
gactgtgaatacgtggtcagctccg

SEQ ID NO: 116835 - DNA, 25 bp, Canis familiaris
gactgtgaataaaccaagcatcgcg

SEQ ID NO: 116836 - DNA, 25 bp, Canis familiaris
gactgtaaaaaggcaactggttggg

SEQ ID NO: 116837 - DNA, 25 bp, Canis familiaris
gacgtgtggcaatcgaatctcgttt

SEQ ID NO: 116838 - DNA, 25 bp, Canis familiaris
gactgtatctaatcaacattccttt

SEQ ID NO: 116839 - DNA, 25 bp, Canis familiaris
gactgtattccattaatatctcccg

SEQ ID NO: 116840 - DNA, 25 bp, Canis familiaris
gactgctaatctttaaagtgcctca

SEQ ID NO: 116841 - DNA, 25 bp, Canis familiaris
gactgcggtctttgaaatgtgccca

SEQ ID NO: 116842 - DNA, 25 bp, Canis familiaris
gactgcaacttttaacttgccctgt

SEQ ID NO: 116843 - DNA, 25 bp, Canis familiaris
gacgttctttattgactggtcgctg

SEQ ID NO: 116844 - DNA, 25 bp, Canis familiaris
gacgatcgtctttgagtttgtggtg

SEQ ID NO: 116845 - DNA, 25 bp, Canis familiaris
gacgtcaatgtgagttttgtttggc

SEQ ID NO: 116846 - DNA, 25 bp, Canis familiaris
gacgtaaagagggtctctgggtggc

SEQ ID NO: 116847 - DNA, 25 bp, Canis familiaris
gacgttaggagtggctcactggctg

SEQ ID NO: 116848 - DNA, 25 bp, Canis familiaris
gactgtatgatgttgttttcggggc

SEQ ID NO: 116849 - DNA, 25 bp, Canis familiaris
gactgttgagttatttctgaggagc

SEQ ID NO: 116850 - DNA, 25 bp, Canis familiaris
gactgttatgtttctattgcttttg

SEQ ID NO: 116851 - DNA, 25 bp, Canis familiaris
gactgtttgagggctcatcgtcttt

SEQ ID NO: 116852 - DNA, 25 bp, Canis familiaris
gacgttgatggggcccagtttgggg

SEQ ID NO: 116853 - DNA, 25 bp, Canis familiaris
gagcagggaggctcccagtgttctc

SEQ ID NO: 116854 - DNA, 25 bp, Canis familiaris
gacgcggaagcagccacgcgtcttc

SEQ ID NO: 116855 - DNA, 25 bp, Canis familiaris
gacgatgaactggctaccaggtttc

SEQ ID NO: 116856 - DNA, 25 bp, Canis familiaris
gacgagaacggcgacgatcagggct

SEQ ID NO: 116857 - DNA, 25 bp, Canis familiaris
gactgaaacggtgctgatctgtgga

SEQ ID NO: 116858 - DNA, 25 bp, Canis familiaris
gactgtaacaagactttctggatag

SEQ ID NO: 116859 - DNA, 25 bp, Canis familiaris
gactgtataaaaatatgccttgtgc

SEQ ID NO: 116860 - DNA, 25 bp, Canis familiaris
gactgagtaaatagttcactctgtg

SEQ ID NO: 116861 - DNA, 25 bp, Canis familiaris
gactggattgacttgttctccttgt

SEQ ID NO: 116862 - DNA, 25 bp, Canis familiaris
gactggtctagctttaatgccaatg

SEQ ID NO: 116863 - DNA, 25 bp, Canis familiaris
gactgttctactgtgaataaagttc

SEQ ID NO: 116864 - DNA, 25 bp, Canis familiaris
gacgttatcaccgtagccaaagacc

SEQ ID NO: 116865 - DNA, 25 bp, Canis familiaris
gacgtaaaccttttcatcataacag

SEQ ID NO: 116866 - DNA, 25 bp, Canis familiaris
gacgacgaaagcatccctatggaga

SEQ ID NO: 116867 - DNA, 25 bp, Canis familiaris
gactgccgcaaataccctagggcaa

SEQ ID NO: 116868 - DNA, 25 bp, Canis familiaris
gactgcctgcagataacttctacag

SEQ ID NO: 116869 - DNA, 25 bp, Canis familiaris
gactccaagtgtcactggtgccaga

SEQ ID NO: 116870 - DNA, 25 bp, Canis familiaris
gactgccagggacactgtggacgtc

SEQ ID NO: 116871 - DNA, 25 bp, Canis familiaris
gactgccaggctaggaagcttcaag

SEQ ID NO: 116872 - DNA, 25 bp, Canis familiaris
gactgcacaggctgggtgtgtcgaa

SEQ ID NO: 116873 - DNA, 25 bp, Canis familiaris
gactgcagctcgggagcttggacga

SEQ ID NO: 116874 - DNA, 25 bp, Canis familiaris
gactgtacgcggccttcgactgcac

SEQ ID NO: 116875 - DNA, 25 bp, Canis familiaris
gacgtcattgtgctcaatggcacca

SEQ ID NO: 116876 - DNA, 25 bp, Canis familiaris
gacgtattgtatcaatgaacattgt

SEQ ID NO: 116877 - DNA, 25 bp, Canis familiaris
gacgtagactaggacagagccttgg

SEQ ID NO: 116878 - DNA, 25 bp, Canis familiaris
gacgtgaaccagcaggagttcgtca

SEQ ID NO: 116879 - DNA, 25 bp, Canis familiaris
gacctgaaccaaagggagacgctcg

SEQ ID NO: 116880 - DNA, 25 bp, Canis familiaris
gactgtgaacctccgggagggctcc

SEQ ID NO: 116881 - DNA, 25 bp, Canis familiaris
gactgtggcccagaggggggctttc

SEQ ID NO: 116882 - DNA, 25 bp, Canis familiaris
gacggagccctgagggcttggcttc

SEQ ID NO: 116883 - DNA, 25 bp, Canis familiaris
gacgaggaccagaaggttcggccca

SEQ ID NO: 116884 - DNA, 25 bp, Canis familiaris
gacgaggcccggagtgaggccatcc

SEQ ID NO: 116885 - DNA, 25 bp, Canis familiaris
gacgatgagcccagtgaaaggccta

SEQ ID NO: 116886 - DNA, 25 bp, Canis familiaris
gactgtgcccaaggaacaaggacca

SEQ ID NO: 116887 - DNA, 25 bp, Canis familiaris
gagctggcccacaggccaaggagtc

SEQ ID NO: 116888 - DNA, 25 bp, Canis familiaris
gactggctacgttggtcaatagagt

SEQ ID NO: 116889 - DNA, 25 bp, Canis familiaris
gacggctaccgcaagaacgagggct

SEQ ID NO: 116890 - DNA, 25 bp, Canis familiaris
gacggtgacccacaagaaggcgccg

SEQ ID NO: 116891 - DNA, 25 bp, Canis familiaris
gacggggactacgaggagaacgacg

SEQ ID NO: 116892 - DNA, 25 bp, Canis familiaris
gacgtgtggacttccacgatgtcca

SEQ ID NO: 116893 - DNA, 25 bp, Canis familiaris
tagttccgaccataaacgatgccga

SEQ ID NO: 116894 - DNA, 25 bp, Canis familiaris
gactgttcgcagtgaatgagaaaac

SEQ ID NO: 116895 - DNA, 25 bp, Canis familiaris
gactgcttcccaagacagaataaat

SEQ ID NO: 116896 - DNA, 25 bp, Canis familiaris
gaccaaccccgagacataatattcc

SEQ ID NO: 116897 - DNA, 25 bp, Canis familiaris
gaccaaacccctgagagtaatccac

SEQ ID NO: 116898 - DNA, 25 bp, Canis familiaris
gacgcagacgacccggaggataatg

SEQ ID NO: 116899 - DNA, 25 bp, Canis familiaris
gacggaccagagcgaaagcatttgc

SEQ ID NO: 116900 - DNA, 25 bp, Canis familiaris
gacggactgggacacatcagttctg

SEQ ID NO: 116901 - DNA, 25 bp, Canis familiaris
gacggccggagaggactcaggattc

SEQ ID NO: 116902 - DNA, 25 bp, Canis familiaris
gactggcctgaagcgcccaagaatc

SEQ ID NO: 116903 - DNA, 25 bp, Canis familiaris
gactgtggtgacttcgcccatggag

SEQ ID NO: 116904 - DNA, 25 bp, Canis familiaris
gacgctccttatccggacatggagg

SEQ ID NO: 116905 - DNA, 25 bp, Canis familiaris
gacgttctcttggggaatccgtggg

SEQ ID NO: 116906 - DNA, 25 bp, Canis familiaris
gacgttctctacacgaatacatgtc

SEQ ID NO: 116907 - DNA, 25 bp, Canis familiaris
gactgtgtctctacgtcttataata

SEQ ID NO: 116908 - DNA, 25 bp, Canis familiaris
gactgatgccttatgtgatgtattt

SEQ ID NO: 116909 - DNA, 25 bp, Canis familiaris
gactgcacagtttcatggaggctgc

SEQ ID NO: 116910 - DNA, 25 bp, Canis familiaris
gactgcaactcttggagactctgct

SEQ ID NO: 116911 - DNA, 25 bp, Canis familiaris
gactgcaactgcctggagcagcagc

SEQ ID NO: 116912 - DNA, 25 bp, Canis familiaris
gacgctcattgcctgtgagagtctc

SEQ ID NO: 116913 - DNA, 25 bp, Canis familiaris
gacgtgcagtcagtggagcctgtgg

SEQ ID NO: 116914 - DNA, 25 bp, Canis familiaris
gactgttgtcctggatcctgagggt

SEQ ID NO: 116915 - DNA, 25 bp, Canis familiaris
gactgtgttctcatgaattgagggc

SEQ ID NO: 116916 - DNA, 25 bp, Canis familiaris
gactgtgctgccattaaatagagag

SEQ ID NO: 116917 - DNA, 25 bp, Canis familiaris
gacggccctatctcagacagaaagg

SEQ ID NO: 116918 - DNA, 25 bp, Canis familiaris
gacggaggttcgccagatcgtagaa

SEQ ID NO: 116919 - DNA, 25 bp, Canis familiaris
gacgtgacgcgtgtggtcttaacac

SEQ ID NO: 116920 - DNA, 25 bp, Canis familiaris
gatcgtcaccgtggaggaccattac

SEQ ID NO: 116921 - DNA, 25 bp, Canis familiaris
gacgtaagcttcaggactattgatt

SEQ ID NO: 116922 - DNA, 25 bp, Canis familiaris
gacggacactacacaacatttgctt

SEQ ID NO: 116923 - DNA, 25 bp, Canis familiaris
gacggagccccaaatcaagtactat

SEQ ID NO: 116924 - DNA, 25 bp, Canis familiaris
gacggagatggccaaatccagtcgc

SEQ ID NO: 116925 - DNA, 25 bp, Canis familiaris
gacggagtctgcggagtccgtgacc

SEQ ID NO: 116926 - DNA, 25 bp, Canis familiaris
gacgtgaacactgaggcactgggcg

SEQ ID NO: 116927 - DNA, 25 bp, Canis familiaris
gacgtgaaaggttgtgacgccccgt

SEQ ID NO: 116928 - DNA, 25 bp, Canis familiaris
gagcgtgaaaggaggaggcccgggg

SEQ ID NO: 116929 - DNA, 25 bp, Canis familiaris
gacgtgtaagtgagacaggccggac

SEQ ID NO: 116930 - DNA, 25 bp, Canis familiaris
gacgtatcgagggccagagagccag

SEQ ID NO: 116931 - DNA, 25 bp, Canis familiaris
gacgtatgcagagatgcccaagcca

SEQ ID NO: 116932 - DNA, 25 bp, Canis familiaris
gacggcagagatgtcctgcagcacc

SEQ ID NO: 116933 - DNA, 25 bp, Canis familiaris
gacggaggaggaaccataccggcgc

SEQ ID NO: 116934 - DNA, 25 bp, Canis familiaris
gacgcgggaggaatctcaaccaaat

SEQ ID NO: 116935 - DNA, 25 bp, Canis familiaris
gactggtgtcagcttcatcaaacaa

SEQ ID NO: 116936 - DNA, 25 bp, Canis familiaris
gactggtctggcgacatcatctaaa

SEQ ID NO: 116937 - DNA, 25 bp, Canis familiaris
gactgtgcctccgaattaaatcaag

SEQ ID NO: 116938 - DNA, 25 bp, Canis familiaris
gactgagccacccagttggttatag

SEQ ID NO: 116939 - DNA, 25 bp, Canis familiaris
gactgagccacagaggtgcctctga

SEQ ID NO: 116940 - DNA, 25 bp, Canis familiaris
gactgacctcagtttgtacttgatt

SEQ ID NO: 116941 - DNA, 25 bp, Canis familiaris
gactgaccatgcactatatttgtat

SEQ ID NO: 116942 - DNA, 25 bp, Canis familiaris
gactgtcgcataatttttgtttttt

SEQ ID NO: 116943 - DNA, 25 bp, Canis familiaris
gactgtcacttgcttttttgctttt

SEQ ID NO: 116944 - DNA, 25 bp, Canis familiaris
gactggactcagattttggttcatt

SEQ ID NO: 116945 - DNA, 25 bp, Canis familiaris
gacgacacgcagttcctgcggttca

SEQ ID NO: 116946 - DNA, 25 bp, Canis familiaris
gacgacggagtacctaggcggacaa

SEQ ID NO: 116947 - DNA, 25 bp, Canis familiaris
gacgactgacaatccttacgatgaa

SEQ ID NO: 116948 - DNA, 25 bp, Canis familiaris
gagcaaagcctttcctaactaagag

SEQ ID NO: 116949 - DNA, 25 bp, Canis familiaris
gacccggttgccataatctcaacgt

SEQ ID NO: 116950 - DNA, 25 bp, Canis familiaris
gagcaactggtaccgtagttatacc

SEQ ID NO: 116951 - DNA, 25 bp, Canis familiaris
gagagcctgggggcgtaggttatca

SEQ ID NO: 116952 - DNA, 25 bp, Canis familiaris
gagaccttggggctcagtggttgag

SEQ ID NO: 116953 - DNA, 25 bp, Canis familiaris
gacccttcgcgtagtcaggaagcga

SEQ ID NO: 116954 - DNA, 25 bp, Canis familiaris
gactgttttgctgtgctgaggaagc

SEQ ID NO: 116955 - DNA, 25 bp, Canis familiaris
gactgattttgtttgcctgtattgc

SEQ ID NO: 116956 - DNA, 25 bp, Canis familiaris
gactgttccaggtctgaagtgttgc

SEQ ID NO: 116957 - DNA, 25 bp, Canis familiaris
gacctccgcgagttcaagcgattcg

SEQ ID NO: 116958 - DNA, 25 bp, Canis familiaris
gacccactgctttttaaatactgtt

SEQ ID NO: 116959 - DNA, 25 bp, Canis familiaris
gacgtgtcgttagttaagttagctt

SEQ ID NO: 116960 - DNA, 25 bp, Canis familiaris
gagaggtcctttctactttatttgc

SEQ ID NO: 116961 - DNA, 25 bp, Canis familiaris
gtagggttttaatctgtcttcttgg

SEQ ID NO: 116962 - DNA, 25 bp, Canis familiaris
ggaagggtttgataggtcgtccctg

SEQ ID NO: 116963 - DNA, 25 bp, Canis familiaris
tgtaagtttttctcgttactaggcg

SEQ ID NO: 116964 - DNA, 25 bp, Canis familiaris
tgtacttttttctgtgtacgcaggg

SEQ ID NO: 116965 - DNA, 25 bp, Canis familiaris
gatacctttttctcttggacgttga

SEQ ID NO: 116966 - DNA, 25 bp, Canis familiaris
gacctttatacctacttggacctca

SEQ ID NO: 116967 - DNA, 25 bp, Canis familiaris
gaccttaagcctttgcttggaacgg

SEQ ID NO: 116968 - DNA, 25 bp, Canis familiaris
gacccctgtgccaaggcttaaaggg

SEQ ID NO: 116969 - DNA, 25 bp, Canis familiaris
gaccctggggcatgctttaaggagc

SEQ ID NO: 116970 - DNA, 25 bp, Canis familiaris
gacctatgggacttccctacttggc

SEQ ID NO: 116971 - DNA, 25 bp, Canis familiaris
gaccaataatgttcccagtcctttc

SEQ ID NO: 116972 - DNA, 25 bp, Canis familiaris
gaccctgggtacccatactatttca

SEQ ID NO: 116973 - DNA, 25 bp, Canis familiaris
gtgcctcgggaagaacaaccccagt

SEQ ID NO: 116974 - DNA, 25 bp, Canis familiaris
gagcctgggggagaccaggaccctg

SEQ ID NO: 116975 - DNA, 25 bp, Canis familiaris
gttctgggtggacaacaccacctcg

SEQ ID NO: 116976 - DNA, 25 bp, Canis familiaris
gttcactttacagcaaatcccctgc

SEQ ID NO: 116977 - DNA, 25 bp, Canis familiaris
gttcactttacagcaaatcccctgc

SEQ ID NO: 116978 - DNA, 25 bp, Canis familiaris
gttcactttacagcaaatcccctgc

SEQ ID NO: 116979 - DNA, 25 bp, Canis familiaris
gttcactttacagcaaatcccctgc

SEQ ID NO: 116980 - DNA, 25 bp, Canis familiaris
gttcactttacagcaaatcccctgc

SEQ ID NO: 116981 - DNA, 25 bp, Canis familiaris
gatccgctttaaacagagtcccaac

SEQ ID NO: 116982 - DNA, 25 bp, Canis familiaris
gacgcccttcagtgaagaggccaac

SEQ ID NO: 116983 - DNA, 25 bp, Canis familiaris
gaccacgaccaatccagagggtacc

SEQ ID NO: 116984 - DNA, 25 bp, Canis familiaris
gacgcaaaaaagacacggctggtac

SEQ ID NO: 116985 - DNA, 25 bp, Canis familiaris
gacgagacgacggtccggggaatcg

SEQ ID NO: 116986 - DNA, 25 bp, Canis familiaris
gacggcggaggggacgaaggtgacg

SEQ ID NO: 116987 - DNA, 25 bp, Canis familiaris
gacggggagggatctctgtgggaca

SEQ ID NO: 116988 - DNA, 25 bp, Canis familiaris
gagcagtaaaggacccacttgtgaa

SEQ ID NO: 116989 - DNA, 25 bp, Canis familiaris
gacgatgaagggtcccactcttttc

SEQ ID NO: 116990 - DNA, 25 bp, Canis familiaris
gacgagaagtggatccgcattttca

SEQ ID NO: 116991 - DNA, 25 bp, Canis familiaris
gacgaacaggtgacacgctttcttc

SEQ ID NO: 116992 - DNA, 25 bp, Canis familiaris
gactgagacatggtatggctgcctt

SEQ ID NO: 116993 - DNA, 25 bp, Canis familiaris
gacggacagccttgggacatgtata

SEQ ID NO: 116994 - DNA, 25 bp, Canis familiaris
gacggcctggctgaggacattgaca

SEQ ID NO: 116995 - DNA, 25 bp, Canis familiaris
gactgtgactgcgcgcaggacgaga

SEQ ID NO: 116996 - DNA, 25 bp, Canis familiaris
gactgtcagcgccgagaggacgaga

SEQ ID NO: 116997 - DNA, 25 bp, Canis familiaris
gactgagcagagcggggagccatac

SEQ ID NO: 116998 - DNA, 25 bp, Canis familiaris
gactggcagccatggtgggctacgc

SEQ ID NO: 116999 - DNA, 25 bp, Canis familiaris
gactggcagccagcaattgtgcaac

SEQ ID NO: 117000 - DNA, 25 bp, Canis familiaris
gactggccacattaatgttcatagt

SEQ ID NO: 117001 - DNA, 25 bp, Canis familiaris
gactgagacagacccatgattgtag

SEQ ID NO: 117002 - DNA, 25 bp, Canis familiaris
gagccaccgggatactacaacaccc

SEQ ID NO: 117003 - DNA, 25 bp, Canis familiaris
gaccaccaaccaagactgaaaacca

SEQ ID NO: 117004 - DNA, 25 bp, Canis familiaris
gacgacgacccaaagtacacagatc

SEQ ID NO: 117005 - DNA, 25 bp, Canis familiaris
gacgacgacgtcaaatgcatcaaca

SEQ ID NO: 117006 - DNA, 25 bp, Canis familiaris
gactgacgagcgctacagcagctac

SEQ ID NO: 117007 - DNA, 25 bp, Canis familiaris
gactgacgatctcacaaacttcgca

SEQ ID NO: 117008 - DNA, 25 bp, Canis familiaris
gactgactgtatggacacaacctca

SEQ ID NO: 117009 - DNA, 25 bp, Canis familiaris
gacgactgtcaccaaaaatccataa

SEQ ID NO: 117010 - DNA, 25 bp, Canis familiaris
gacggcagtaaccgattacctaaca

SEQ ID NO: 117011 - DNA, 25 bp, Canis familiaris
gacccttaccttataccatatacaa

SEQ ID NO: 117012 - DNA, 25 bp, Canis familiaris
gaccctaaccctaatatgagccata

SEQ ID NO: 117013 - DNA, 25 bp, Canis familiaris
gaccgtacaccaaaatttgcctgca

SEQ ID NO: 117014 - DNA, 25 bp, Canis familiaris
gacgaaaaccacgaatgtcgacgat

SEQ ID NO: 117015 - DNA, 25 bp, Canis familiaris
gacccgaacgttgttcgatcgatgc

SEQ ID NO: 117016 - DNA, 25 bp, Canis familiaris
gacccgaacgttgttcgatcgatgc

SEQ ID NO: 117017 - DNA, 25 bp, Canis familiaris
gacccaaaattttttaggccagcag

SEQ ID NO: 117018 - DNA, 25 bp, Canis familiaris
gacccattagagatttcactcccgc

SEQ ID NO: 117019 - DNA, 25 bp, Canis familiaris
gacccataggaatctgacttcctcc

SEQ ID NO: 117020 - DNA, 25 bp, Canis familiaris
gaccctaggatgcagtgttcctggc

SEQ ID NO: 117021 - DNA, 25 bp, Canis familiaris
gacggtgtggtgctgtcattacgag

SEQ ID NO: 117022 - DNA, 25 bp, Canis familiaris
gacgaggcgggcagtgtgtacgcag

SEQ ID NO: 117023 - DNA, 25 bp, Canis familiaris
gacgagaggcagcgcatgctggtcc

SEQ ID NO: 117024 - DNA, 25 bp, Canis familiaris
gactggccagagtgctgctcagtcc

SEQ ID NO: 117025 - DNA, 25 bp, Canis familiaris
gactggctcagcgtgtgcctaccct

SEQ ID NO: 117026 - DNA, 25 bp, Canis familiaris
gactggctcagcgtgtgcctaccct

SEQ ID NO: 117027 - DNA, 25 bp, Canis familiaris
gagcgagcagactttgcccaggcct

SEQ ID NO: 117028 - DNA, 25 bp, Canis familiaris
gacgtggacatccgcaaagacctgt

SEQ ID NO: 117029 - DNA, 25 bp, Canis familiaris
gacgtggacaagccgaggaccacgg

SEQ ID NO: 117030 - DNA, 25 bp, Canis familiaris
gactgtggaggacctggtggccaag

SEQ ID NO: 117031 - DNA, 25 bp, Canis familiaris
gactgtggatggcccctctggaaag

SEQ ID NO: 117032 - DNA, 25 bp, Canis familiaris
gactggggcagtcacttgcagaaaa

SEQ ID NO: 117033 - DNA, 25 bp, Canis familiaris
gactgggaagatcacttggcagtga

SEQ ID NO: 117034 - DNA, 25 bp, Canis familiaris
gactgtctgaagaaccttgggagtt

SEQ ID NO: 117035 - DNA, 25 bp, Canis familiaris
gacggtaggaccagtgaggagatct

SEQ ID NO: 117036 - DNA, 25 bp, Canis familiaris
gacggaagctactttgagtgctgga

SEQ ID NO: 117037 - DNA, 25 bp, Canis familiaris
gacgagacctactgcatcgacaatg

SEQ ID NO: 117038 - DNA, 25 bp, Canis familiaris
gacgagttctactagcttgcaagag

SEQ ID NO: 117039 - DNA, 25 bp, Canis familiaris
gacgagttgtactgctgtcacagga

SEQ ID NO: 117040 - DNA, 25 bp, Canis familiaris
gacgagctttgatgagcgacgccaa

SEQ ID NO: 117041 - DNA, 25 bp, Canis familiaris
gactgttttgcttgagcagagccaa

SEQ ID NO: 117042 - DNA, 25 bp, Canis familiaris
gacgtgattagcaggcgcagcaaat

SEQ ID NO: 117043 - DNA, 25 bp, Canis familiaris
gactgatgttcccacggatgctaat

SEQ ID NO: 117044 - DNA, 25 bp, Canis familiaris
gactgatcgttgcatcgagtctctg

SEQ ID NO: 117045 - DNA, 25 bp, Canis familiaris
gactgttgtctgggtgtgtcttgtg

SEQ ID NO: 117046 - DNA, 25 bp, Canis familiaris
gatcgttatctgggttttgtctcga

SEQ ID NO: 117047 - DNA, 25 bp, Canis familiaris
gacgatcccaaatttattttcatga

SEQ ID NO: 117048 - DNA, 25 bp, Canis familiaris
gactgtcccaagtaatctttctata

SEQ ID NO: 117049 - DNA, 25 bp, Canis familiaris
gactgtatgctaggctgcagacttt

SEQ ID NO: 117050 - DNA, 25 bp, Canis familiaris
gactgtctgtagggcttgcatttcc

SEQ ID NO: 117051 - DNA, 25 bp, Canis familiaris
gactggcgtcagaagctggactctc

SEQ ID NO: 117052 - DNA, 25 bp, Canis familiaris
gacgaggcacgatctggtgctgctg

SEQ ID NO: 117053 - DNA, 25 bp, Canis familiaris
gactgggaagaagtgagggctgcgc

SEQ ID NO: 117054 - DNA, 25 bp, Canis familiaris
gacggctgataggggagtggcttgc

SEQ ID NO: 117055 - DNA, 25 bp, Canis familiaris
gacggctggtgagggaggagggact

SEQ ID NO: 117056 - DNA, 25 bp, Canis familiaris
gacggcgggcagcgagggtggctgc

SEQ ID NO: 117057 - DNA, 25 bp, Canis familiaris
gacggcgagaaggaggtgctggtgg

SEQ ID NO: 117058 - DNA, 25 bp, Canis familiaris
gacgacgaaagggagctgaagctgt

SEQ ID NO: 117059 - DNA, 25 bp, Canis familiaris
gacgttggctggctatgtgaactgc

SEQ ID NO: 117060 - DNA, 25 bp, Canis familiaris
gacggatgccggatttgaacctccg

SEQ ID NO: 117061 - DNA, 25 bp, Canis familiaris
gacggatgcctgcttttgcagacgc

SEQ ID NO: 117062 - DNA, 25 bp, Canis familiaris
gactgttgctggcttttcatgactt

SEQ ID NO: 117063 - DNA, 25 bp, Canis familiaris
gactggtgctgtttctttcagaatt

SEQ ID NO: 117064 - DNA, 25 bp, Canis familiaris
gacggtgtgcattagttatctacat

SEQ ID NO: 117065 - DNA, 25 bp, Canis familiaris
gacgagatgtcttgacatttgcggc

SEQ ID NO: 117066 - DNA, 25 bp, Canis familiaris
gacgagaattcaacggtggggtggg

SEQ ID NO: 117067 - DNA, 25 bp, Canis familiaris
gacggagacctacacggaggtggtg

SEQ ID NO: 117068 - DNA, 25 bp, Canis familiaris
gacggagtccacacagggaggggta

SEQ ID NO: 117069 - DNA, 25 bp, Canis familiaris
gacgatcagggcttccaggaagggg

SEQ ID NO: 117070 - DNA, 25 bp, Canis familiaris
gacgaccggcagttggtatgaggta

SEQ ID NO: 117071 - DNA, 25 bp, Canis familiaris
gacgcccggcggaggatagttgatc

SEQ ID NO: 117072 - DNA, 25 bp, Canis familiaris
gacgcacttggacgatcagaaaata

SEQ ID NO: 117073 - DNA, 25 bp, Canis familiaris
gacgacctgaaggacgagcacttcg

SEQ ID NO: 117074 - DNA, 25 bp, Canis familiaris
gacgtgccataaggtggaggttcgc

SEQ ID NO: 117075 - DNA, 25 bp, Canis familiaris
gacgatcagataccgtcgtagttcc

SEQ ID NO: 117076 - DNA, 25 bp, Canis familiaris
ggcccagtactaccgggtatacctg

SEQ ID NO: 117077 - DNA, 25 bp, Canis familiaris
gacccagaactctcggattacttct

SEQ ID NO: 117078 - DNA, 25 bp, Canis familiaris
gaccaccacaccacggtcagatttc

SEQ ID NO: 117079 - DNA, 25 bp, Canis familiaris
gacgaaacaccaacggatcgcgtcc

SEQ ID NO: 117080 - DNA, 25 bp, Canis familiaris
gactgtgaacaccaagcgtgtcatc

SEQ ID NO: 117081 - DNA, 25 bp, Canis familiaris
gactgtggatcttaagccattcacc

SEQ ID NO: 117082 - DNA, 25 bp, Canis familiaris
gactggaatgaatgatgcctttccg

SEQ ID NO: 117083 - DNA, 25 bp, Canis familiaris
gactggattactgtggcttcctggt

SEQ ID NO: 117084 - DNA, 25 bp, Canis familiaris
gacggatggaggttggcctctctgt

SEQ ID NO: 117085 - DNA, 25 bp, Canis familiaris
gacggcatggggggcgtcacaattg

SEQ ID NO: 117086 - DNA, 25 bp, Canis familiaris
gactggaggtcgaagcactcagcaa

SEQ ID NO: 117087 - DNA, 25 bp, Canis familiaris
gactggaggatctctgactcacagg

SEQ ID NO: 117088 - DNA, 25 bp, Canis familiaris
gactggggattggctacacagagga

SEQ ID NO: 117089 - DNA, 25 bp, Canis familiaris
tgacggggcttgtcatgcccaaggg

SEQ ID NO: 117090 - DNA, 25 bp, Canis familiaris
gactgtgatgtgagaccccagaggg

SEQ ID NO: 117091 - DNA, 25 bp, Canis familiaris
gacgagctggacacctcaagagagg

SEQ ID NO: 117092 - DNA, 25 bp, Canis familiaris
gacgctgagaacaaacctgggaggc

SEQ ID NO: 117093 - DNA, 25 bp, Canis familiaris
gacgtggacgccacactggaggagc

SEQ ID NO: 117094 - DNA, 25 bp, Canis familiaris
gacgtgggacctgcatcaggggagc

SEQ ID NO: 117095 - DNA, 25 bp, Canis familiaris
gacgggagaccctagaggggtattg

SEQ ID NO: 117096 - DNA, 25 bp, Canis familiaris
gacggtagagtccaagagtcaggta

SEQ ID NO: 117097 - DNA, 25 bp, Canis familiaris
gacggcttgggccaagcccactgta

SEQ ID NO: 117098 - DNA, 25 bp, Canis familiaris
gacggcctggtgattgaccagcatg

SEQ ID NO: 117099 - DNA, 25 bp, Canis familiaris
gactggcctggttatatgagcaact

SEQ ID NO: 117100 - DNA, 25 bp, Canis familiaris
gactgtcacggtttagtcttctgac

SEQ ID NO: 117101 - DNA, 25 bp, Canis familiaris
gacgtccgaggttaccatctgtggt

SEQ ID NO: 117102 - DNA, 25 bp, Canis familiaris
gacggtgcaaggaataccacagtgg

SEQ ID NO: 117103 - DNA, 25 bp, Canis familiaris
gacggtcatcagtattacgaacggt

SEQ ID NO: 117104 - DNA, 25 bp, Canis familiaris
gacggccaaggcctgaaagctcggt

SEQ ID NO: 117105 - DNA, 25 bp, Canis familiaris
gacggcatcaggacctacgaggtgg

SEQ ID NO: 117106 - DNA, 25 bp, Canis familiaris
gacggatcgctgagctgacatgaag

SEQ ID NO: 117107 - DNA, 25 bp, Canis familiaris
gacgtacctgggcagtgcacagtac

SEQ ID NO: 117108 - DNA, 25 bp, Canis familiaris
gacggactacggaacagcacgtccc

SEQ ID NO: 117109 - DNA, 25 bp, Canis familiaris
gacggtcaaaccaacaactgtcctc

SEQ ID NO: 117110 - DNA, 25 bp, Canis familiaris
gacggtcaagacgaaggacggcgtg

SEQ ID NO: 117111 - DNA, 25 bp, Canis familiaris
gacggtcaacaagtattcaggggtg

SEQ ID NO: 117112 - DNA, 25 bp, Canis familiaris
gatctttcaaaagggtgccggggag

SEQ ID NO: 117113 - DNA, 25 bp, Canis familiaris
gacgctgtaggatggagggagggga

SEQ ID NO: 117114 - DNA, 25 bp, Canis familiaris
gacggttgtatttgtatagaggtgg

SEQ ID NO: 117115 - DNA, 25 bp, Canis familiaris
gacgctttgttctgtgacggattgg

SEQ ID NO: 117116 - DNA, 25 bp, Canis familiaris
gatcgtcatgtctccggacggaacg

SEQ ID NO: 117117 - DNA, 25 bp, Canis familiaris
gacccagtccgtgggacgttgaggg

SEQ ID NO: 117118 - DNA, 25 bp, Canis familiaris
gaccctcccaagtgagggctctgga

SEQ ID NO: 117119 - DNA, 25 bp, Canis familiaris
gacccgtccaggttcagttgaagtg

SEQ ID NO: 117120 - DNA, 25 bp, Canis familiaris
gaccccggtgtgtcttgttgaagtt

SEQ ID NO: 117121 - DNA, 25 bp, Canis familiaris
gacgcccaagggctgggtgaactac

SEQ ID NO: 117122 - DNA, 25 bp, Canis familiaris
gacccccagtacaggcggaagatca

SEQ ID NO: 117123 - DNA, 25 bp, Canis familiaris
gacccccagttcagtccaggagggg

SEQ ID NO: 117124 - DNA, 25 bp, Canis familiaris
gacccccagttcatacaccatggtc

SEQ ID NO: 117125 - DNA, 25 bp, Canis familiaris
gaccctcagcagaatctggaaaagc

SEQ ID NO: 117126 - DNA, 25 bp, Canis familiaris
gactggctgacacatctggccaaga

SEQ ID NO: 117127 - DNA, 25 bp, Canis familiaris
gactgggccctattcaggcaagatg

SEQ ID NO: 117128 - DNA, 25 bp, Canis familiaris
gacgggccctagagagagacaatca

SEQ ID NO: 117129 - DNA, 25 bp, Canis familiaris
gacgggccctacaagatggagcact

SEQ ID NO: 117130 - DNA, 25 bp, Canis familiaris
gacgggtcgtcagagtttcagttta

SEQ ID NO: 117131 - DNA, 25 bp, Canis familiaris
gactgggttgtcaagattttcttct

SEQ ID NO: 117132 - DNA, 25 bp, Canis familiaris
gacgaggtttcggacgttctgtgtg

SEQ ID NO: 117133 - DNA, 25 bp, Canis familiaris
gacggagacgtcggaggtgtcggtg

SEQ ID NO: 117134 - DNA, 25 bp, Canis familiaris
gacgaggacgacgacagggacgtgg

SEQ ID NO: 117135 - DNA, 25 bp, Canis familiaris
gatcgaggacccgcgggtccaatgg

SEQ ID NO: 117136 - DNA, 25 bp, Canis familiaris
gacggtcacttcgtattttccaaga

SEQ ID NO: 117137 - DNA, 25 bp, Canis familiaris
gacggtcttcactgtgtgttttaaa

SEQ ID NO: 117138 - DNA, 25 bp, Canis familiaris
gaccgtctcttcggatggatctttt

SEQ ID NO: 117139 - DNA, 25 bp, Canis familiaris
gatccgactttctgtactttatacc

SEQ ID NO: 117140 - DNA, 25 bp, Canis familiaris
gacctatctttggaggccattagaa

SEQ ID NO: 117141 - DNA, 25 bp, Canis familiaris
gaccatcatcttgttaccactggac

SEQ ID NO: 117142 - DNA, 25 bp, Canis familiaris
gacccactggcatgttctttggatc

SEQ ID NO: 117143 - DNA, 25 bp, Canis familiaris
gagacccggaatcagttcatcgatg

SEQ ID NO: 117144 - DNA, 25 bp, Canis familiaris
gagaccgtggagattttgattgaaa

SEQ ID NO: 117145 - DNA, 25 bp, Canis familiaris
gagaccggggtgtattcgcagttaa

SEQ ID NO: 117146 - DNA, 25 bp, Canis familiaris
gacccctgggtattgtcggttgagg

SEQ ID NO: 117147 - DNA, 25 bp, Canis familiaris
gacccacttttataagccctggtgg

SEQ ID NO: 117148 - DNA, 25 bp, Canis familiaris
gaccgttttaaatacagcctcgaag

SEQ ID NO: 117149 - DNA, 25 bp, Canis familiaris
gagcctggtttcaaggaatccccga

SEQ ID NO: 117150 - DNA, 25 bp, Canis familiaris
gatcctacaattacggatacccact

SEQ ID NO: 117151 - DNA, 25 bp, Canis familiaris
gacgttgattttgaaactccaccaa

SEQ ID NO: 117152 - DNA, 25 bp, Canis familiaris
gacgtctttttcaaaatcagcctaa

SEQ ID NO: 117153 - DNA, 25 bp, Canis familiaris
gacctgtctgttagtaaaccgttga

SEQ ID NO: 117154 - DNA, 25 bp, Canis familiaris
gagcactttccaaggaaacggttca

SEQ ID NO: 117155 - DNA, 25 bp, Canis familiaris
gacgattggggagaaatgggcctga

SEQ ID NO: 117156 - DNA, 25 bp, Canis familiaris
gacctgtgggggggcattgggtctt

SEQ ID NO: 117157 - DNA, 25 bp, Canis familiaris
gacgtaggaggccggtctgagttcg

SEQ ID NO: 117158 - DNA, 25 bp, Canis familiaris
gatcgtttccgctaggttagtttgt

SEQ ID NO: 117159 - DNA, 25 bp, Canis familiaris
gacgtaatcccaatgctttggtttt

SEQ ID NO: 117160 - DNA, 25 bp, Canis familiaris
gacgtagtcgttgtcattccttttt

SEQ ID NO: 117161 - DNA, 25 bp, Canis familiaris
gacgtagtttcgatcattaatttat

SEQ ID NO: 117162 - DNA, 25 bp, Canis familiaris
gacgaatttgctcattaaacatttt

SEQ ID NO: 117163 - DNA, 25 bp, Canis familiaris
gacgcccattgtgataaagactttc

SEQ ID NO: 117164 - DNA, 25 bp, Canis familiaris
gacgtccacttcaacaacgactgtt

SEQ ID NO: 117165 - DNA, 25 bp, Canis familiaris
gacggccatctgcaaggaggtgctg

SEQ ID NO: 117166 - DNA, 25 bp, Canis familiaris
gactggcctcggaggctgacagtga

SEQ ID NO: 117167 - DNA, 25 bp, Canis familiaris
gactggccttgctgtggccaaggag

SEQ ID NO: 117168 - DNA, 25 bp, Canis familiaris
gactggtttgcataagcctaggcgc

SEQ ID NO: 117169 - DNA, 25 bp, Canis familiaris
gacgtgtttgcaaatgtcccaggcc

SEQ ID NO: 117170 - DNA, 25 bp, Canis familiaris
gacggataacaatttcacacaggaa

SEQ ID NO: 117171 - DNA, 25 bp, Canis familiaris
gatcaggtaactttcgaccaacttt

SEQ ID NO: 117172 - DNA, 25 bp, Canis familiaris
gacggtacattagtcaacagccctc

SEQ ID NO: 117173 - DNA, 25 bp, Canis familiaris
gacctgtacttgtaaactcccttat

SEQ ID NO: 117174 - DNA, 25 bp, Canis familiaris
gagctctaggcccaaaacgacctta

SEQ ID NO: 117175 - DNA, 25 bp, Canis familiaris
gacgccaggcgaggaattgcgacct

SEQ ID NO: 117176 - DNA, 25 bp, Canis familiaris
gactggaggcgtgatagctgagatc

SEQ ID NO: 117177 - DNA, 25 bp, Canis familiaris
gacggaggcgtgtatcactgtgccc

SEQ ID NO: 117178 - DNA, 25 bp, Canis familiaris
gacgggcgctggcaagcatgtgccc

SEQ ID NO: 117179 - DNA, 25 bp, Canis familiaris
gacgggcgctggcaagcatgtgccc

SEQ ID NO: 117180 - DNA, 25 bp, Canis familiaris
gacgggcgctggcaagcatgtgccc

SEQ ID NO: 117181 - DNA, 25 bp, Canis familiaris
gacgggcgctggcaagcatgtgccc

SEQ ID NO: 117182 - DNA, 25 bp, Canis familiaris
gacggccagcagcaaaggagccacc

SEQ ID NO: 117183 - DNA, 25 bp, Canis familiaris
gaccgacgagcaccaaagagcccgg

SEQ ID NO: 117184 - DNA, 25 bp, Canis familiaris
gacccaaggctccaggaaccaaggg

SEQ ID NO: 117185 - DNA, 25 bp, Canis familiaris
gaccccagacccagaaatgaaggcc

SEQ ID NO: 117186 - DNA, 25 bp, Canis familiaris
gaccccaccggcataaattcgggct

SEQ ID NO: 117187 - DNA, 25 bp, Canis familiaris
gacccacagtttccgtagtctgggg

SEQ ID NO: 117188 - DNA, 25 bp, Canis familiaris
gagcccaattttatttgtctggttg

SEQ ID NO: 117189 - DNA, 25 bp, Canis familiaris
gaccacaataccgattttttttctg

SEQ ID NO: 117190 - DNA, 25 bp, Canis familiaris
gacgcacagccgagcattttttttt

SEQ ID NO: 117191 - DNA, 25 bp, Canis familiaris
gacgacctctagatgtcttttcttt

SEQ ID NO: 117192 - DNA, 25 bp, Canis familiaris
gacgcgctgtctagtttcagcattt

SEQ ID NO: 117193 - DNA, 25 bp, Canis familiaris
gacgcaagtgtgagctccagcagta

SEQ ID NO: 117194 - DNA, 25 bp, Canis familiaris
gacgcacaatgggcgtaggcgttac

SEQ ID NO: 117195 - DNA, 25 bp, Canis familiaris
gacgcaccaagcggaactgcgctta

SEQ ID NO: 117196 - DNA, 25 bp, Canis familiaris
gacgcaacagcatcaaatgtcgggt

SEQ ID NO: 117197 - DNA, 25 bp, Canis familiaris
gacgacagagaagacagacggccag

SEQ ID NO: 117198 - DNA, 25 bp, Canis familiaris
gacggacagacagacatgcaaacac

SEQ ID NO: 117199 - DNA, 25 bp, Canis familiaris
gacgagcctacatgaatctctacac

SEQ ID NO: 117200 - DNA, 25 bp, Canis familiaris
gacgggctacagtctgttatacctg

SEQ ID NO: 117201 - DNA, 25 bp, Canis familiaris
gaccagcatccatacgttaacttgt

SEQ ID NO: 117202 - DNA, 25 bp, Canis familiaris
gacccactgacaaagtctacaccgt

SEQ ID NO: 117203 - DNA, 25 bp, Canis familiaris
gacggcatcatgtctacagatgtcc

SEQ ID NO: 117204 - DNA, 25 bp, Canis familiaris
gacgtgaatctggacagatctgcaa

SEQ ID NO: 117205 - DNA, 25 bp, Canis familiaris
gacgctgaaccgaaactgcatcatg

SEQ ID NO: 117206 - DNA, 25 bp, Canis familiaris
gactggcacagggtaagtgctgcag

SEQ ID NO: 117207 - DNA, 25 bp, Canis familiaris
gactggaagggaagagggagggaat

SEQ ID NO: 117208 - DNA, 25 bp, Canis familiaris
gacggaaggaagaggatgatgggat

SEQ ID NO: 117209 - DNA, 25 bp, Canis familiaris
gacgaacgggaactggagctgggca

SEQ ID NO: 117210 - DNA, 25 bp, Canis familiaris
gacgaaagggagctgaagctgtcgg

SEQ ID NO: 117211 - DNA, 25 bp, Canis familiaris
gacgaagttggcggtgaggccctgg

SEQ ID NO: 117212 - DNA, 25 bp, Canis familiaris
gacgagttagcgggtgagcacgggg

SEQ ID NO: 117213 - DNA, 25 bp, Canis familiaris
gacgggattgtggttagaagggagc

SEQ ID NO: 117214 - DNA, 25 bp, Canis familiaris
gacgaggatgtgatctcgagaaggc

SEQ ID NO: 117215 - DNA, 25 bp, Canis familiaris
gacgagttgtcagcaccaggagagc

SEQ ID NO: 117216 - DNA, 25 bp, Canis familiaris
gactggtggtcagatggcagggccc

SEQ ID NO: 117217 - DNA, 25 bp, Canis familiaris
gactggctggtactacaaggcgtcc

SEQ ID NO: 117218 - DNA, 25 bp, Canis familiaris
gacccagcagtaattcaaagaccca

SEQ ID NO: 117219 - DNA, 25 bp, Canis familiaris
gaccacgcgtctaactacgagtaga

SEQ ID NO: 117220 - DNA, 25 bp, Canis familiaris
gacccggtgctaaagtgtgagacga

SEQ ID NO: 117221 - DNA, 25 bp, Canis familiaris
gacggtggggtttgtaggactgatg

SEQ ID NO: 117222 - DNA, 25 bp, Canis familiaris
gacggtgtgcctgaggtaggacgat

SEQ ID NO: 117223 - DNA, 25 bp, Canis familiaris
gacgcagatggcgctaggcgtgtac

SEQ ID NO: 117224 - DNA, 25 bp, Canis familiaris
gacgtgctggcagtccgagaactac

SEQ ID NO: 117225 - DNA, 25 bp, Canis familiaris
gacgctgctggagtgtgtgcggttg

SEQ ID NO: 117226 - DNA, 25 bp, Canis familiaris
gacgcttactcttggggttgtgaat

SEQ ID NO: 117227 - DNA, 25 bp, Canis familiaris
gacgttcagccttggagtgggatgt

SEQ ID NO: 117228 - DNA, 25 bp, Canis familiaris
gacggaatgcagggggtgggcgttc

SEQ ID NO: 117229 - DNA, 25 bp, Canis familiaris
gacggaggagtaggcggtgggatct

SEQ ID NO: 117230 - DNA, 25 bp, Canis familiaris
gacgggagcgtgacaggaggcggtc

SEQ ID NO: 117231 - DNA, 25 bp, Canis familiaris
gacggagtgccgaagggagaggctg

SEQ ID NO: 117232 - DNA, 25 bp, Canis familiaris
gacggaggacacaggagggacgcgc

SEQ ID NO: 117233 - DNA, 25 bp, Canis familiaris
gacgtagggcacaggcaggatctcc

SEQ ID NO: 117234 - DNA, 25 bp, Canis familiaris
gacgttgtggaacgatgaggtccca

SEQ ID NO: 117235 - DNA, 25 bp, Canis familiaris
gacgttgttgccatcataggtaccc

SEQ ID NO: 117236 - DNA, 25 bp, Canis familiaris
gacgtggggcgttatcaggtatcct

SEQ ID NO: 117237 - DNA, 25 bp, Canis familiaris
gacgtagtggcagtaatcatgctgt

SEQ ID NO: 117238 - DNA, 25 bp, Canis familiaris
gacgctaaatgcctgaagactgagt

SEQ ID NO: 117239 - DNA, 25 bp, Canis familiaris
gacggaaatgccgagagccctgtcg

SEQ ID NO: 117240 - DNA, 25 bp, Canis familiaris
gacgagaagaccagatcctcagtgg

SEQ ID NO: 117241 - DNA, 25 bp, Canis familiaris
gacgagaaggctgtgccttctgtgt

SEQ ID NO: 117242 - DNA, 25 bp, Canis familiaris
gacgagacaactttgtgttgtgtgt

SEQ ID NO: 117243 - DNA, 25 bp, Canis familiaris
gatcgaaccactgttgttgtttttt

SEQ ID NO: 117244 - DNA, 25 bp, Canis familiaris
gacgcaaaccgatgtgggttttgaa

SEQ ID NO: 117245 - DNA, 25 bp, Canis familiaris
gacgaaactcaagtgtgacattttt

SEQ ID NO: 117246 - DNA, 25 bp, Canis familiaris
gacctaaaaatttgaattcttcgag

SEQ ID NO: 117247 - DNA, 25 bp, Canis familiaris
gacctaaaaccgcaagctgttcaca

SEQ ID NO: 117248 - DNA, 25 bp, Canis familiaris
gacgccaaaacacaagtggttcaca

SEQ ID NO: 117249 - DNA, 25 bp, Canis familiaris
gactggctcaccggaaaggagttca

SEQ ID NO: 117250 - DNA, 25 bp, Canis familiaris
gactggcagccaaggaagggagagt

SEQ ID NO: 117251 - DNA, 25 bp, Canis familiaris
gactggcagccacagaacttgttct

SEQ ID NO: 117252 - DNA, 25 bp, Canis familiaris
gactggagccacagatacagaatct

SEQ ID NO: 117253 - DNA, 25 bp, Canis familiaris
gactggcacaaatataaattctcgg

SEQ ID NO: 117254 - DNA, 25 bp, Canis familiaris
gactggcaaacaccaaacttcatgg

SEQ ID NO: 117255 - DNA, 25 bp, Canis familiaris
gacggaaatcagtcaagagctctgt

SEQ ID NO: 117256 - DNA, 25 bp, Canis familiaris
gacggtcctcagtatgcagagcacc

SEQ ID NO: 117257 - DNA, 25 bp, Canis familiaris
gactggctcgctcagaagagcacgc

SEQ ID NO: 117258 - DNA, 25 bp, Canis familiaris
gacgtctgctgttatgaacacctct

SEQ ID NO: 117259 - DNA, 25 bp, Canis familiaris
gacgtgcgctttgagagcaacttca

SEQ ID NO: 117260 - DNA, 25 bp, Canis familiaris
gactggcctgttgatgactattctg

SEQ ID NO: 117261 - DNA, 25 bp, Canis familiaris
gacgagcactgtaaatactggctgc

SEQ ID NO: 117262 - DNA, 25 bp, Canis familiaris
gacgagatctgtggattgccggcgt

SEQ ID NO: 117263 - DNA, 25 bp, Canis familiaris
gacgcaggcatgtacatctgcctgg

SEQ ID NO: 117264 - DNA, 25 bp, Canis familiaris
gacgctgtgcaccagagatgcatct

SEQ ID NO: 117265 - DNA, 25 bp, Canis familiaris
gacgtgttcaaggagctctttgacc

SEQ ID NO: 117266 - DNA, 25 bp, Canis familiaris
gacgtgttcaagatcctggtggacc

SEQ ID NO: 117267 - DNA, 25 bp, Canis familiaris
gacggttgaaactagggatggacag

SEQ ID NO: 117268 - DNA, 25 bp, Canis familiaris
gacggttgaaactagggatggacag

SEQ ID NO: 117269 - DNA, 25 bp, Canis familiaris
gacggtggaacacggtggagtcacg

SEQ ID NO: 117270 - DNA, 25 bp, Canis familiaris
gacggaagtacccgcggagtatcct

SEQ ID NO: 117271 - DNA, 25 bp, Canis familiaris
gatcggacgtaagtctcagggtcca

SEQ ID NO: 117272 - DNA, 25 bp, Canis familiaris
gacgagacccaaatgatccgcgtcc

SEQ ID NO: 117273 - DNA, 25 bp, Canis familiaris
gacggcaagcacgatttccgagtct

SEQ ID NO: 117274 - DNA, 25 bp, Canis familiaris
gacggctcatgcatcttacaaaggt

SEQ ID NO: 117275 - DNA, 25 bp, Canis familiaris
gacggccaggtcatcaccattggca

SEQ ID NO: 117276 - DNA, 25 bp, Canis familiaris
gacggcaaggtcaacatctgctgta

SEQ ID NO: 117277 - DNA, 25 bp, Canis familiaris
gacgcgttggtcgacatcattgtca

SEQ ID NO: 117278 - DNA, 25 bp, Canis familiaris
gacgccttactggcaatgcttccac

SEQ ID NO: 117279 - DNA, 25 bp, Canis familiaris
gacgtgttcaatgcactggatctca

SEQ ID NO: 117280 - DNA, 25 bp, Canis familiaris
gacgtcatccaggccctggatctca

SEQ ID NO: 117281 - DNA, 25 bp, Canis familiaris
gacgagcaccagatcctggtctgca

SEQ ID NO: 117282 - DNA, 25 bp, Canis familiaris
gactggctcctggatgacatttcca

SEQ ID NO: 117283 - DNA, 25 bp, Canis familiaris
tgaatgaatccggaaaatttaacct

SEQ ID NO: 117284 - DNA, 25 bp, Canis familiaris
gaggaggcctggatcacttaaactg

SEQ ID NO: 117285 - DNA, 25 bp, Canis familiaris
gacgagatccagaaatccttaagac

SEQ ID NO: 117286 - DNA, 25 bp, Canis familiaris
gacgagacacggaacctgcagaacg

SEQ ID NO: 117287 - DNA, 25 bp, Canis familiaris
gacgagacagcaaccattacagaat

SEQ ID NO: 117288 - DNA, 25 bp, Canis familiaris
gacgatgagctattgccttcacata

SEQ ID NO: 117289 - DNA, 25 bp, Canis familiaris
gacgaactgattccttcaaagcaag

SEQ ID NO: 117290 - DNA, 25 bp, Canis familiaris
gacgaagcgaaatttgaagatgaca

SEQ ID NO: 117291 - DNA, 25 bp, Canis familiaris
gacgaagtgcaagttgtgcggggac

SEQ ID NO: 117292 - DNA, 25 bp, Canis familiaris
gacgacgatgattcttggcgattgc

SEQ ID NO: 117293 - DNA, 25 bp, Canis familiaris
gacgcactgtgatcgtgaagggccc

SEQ ID NO: 117294 - DNA, 25 bp, Canis familiaris
gacgcctggacgataaggacccgcg

SEQ ID NO: 117295 - DNA, 25 bp, Canis familiaris
gacggggaagtatgtgccaccgagc

SEQ ID NO: 117296 - DNA, 25 bp, Canis familiaris
gacgggtgccagttgagggcaacgg

SEQ ID NO: 117297 - DNA, 25 bp, Canis familiaris
gacgccctctccttagggaaggtgc

SEQ ID NO: 117298 - DNA, 25 bp, Canis familiaris
gacccctccatcatgggtattgggc

SEQ ID NO: 117299 - DNA, 25 bp, Canis familiaris
gacccccgcatacgtgggttggaag

SEQ ID NO: 117300 - DNA, 25 bp, Canis familiaris
gagccacccagatcgtagttttaaa

SEQ ID NO: 117301 - DNA, 25 bp, Canis familiaris
gatcccttacgctctagttttatat

SEQ ID NO: 117302 - DNA, 25 bp, Canis familiaris
gaccgactaccactcgagtgttatt

SEQ ID NO: 117303 - DNA, 25 bp, Canis familiaris
gagaccctaacctggagtttgtcgc

SEQ ID NO: 117304 - DNA, 25 bp, Canis familiaris
gataccctttccttaagtttcagct

SEQ ID NO: 117305 - DNA, 25 bp, Canis familiaris
gacccttttcgtgaggtgtaggcta

SEQ ID NO: 117306 - DNA, 25 bp, Canis familiaris
gaccctggaatcatgccgggggact

SEQ ID NO: 117307 - DNA, 25 bp, Canis familiaris
gaccgaggctgctttccaaagggtc

SEQ ID NO: 117308 - DNA, 25 bp, Canis familiaris
gacggatcggaatgccaacgggtcc

SEQ ID NO: 117309 - DNA, 25 bp, Canis familiaris
gacgatgacctgtatggctaagtgg

SEQ ID NO: 117310 - DNA, 25 bp, Canis familiaris
gacgatgacgtgtctcggaggtggg

SEQ ID NO: 117311 - DNA, 25 bp, Canis familiaris
gacggacagtgggtgtgcatcagtg

SEQ ID NO: 117312 - DNA, 25 bp, Canis familiaris
gacgtcaaggtggtgatgctgggca

SEQ ID NO: 117313 - DNA, 25 bp, Canis familiaris
gaccccagcctggatgagtatgacc

SEQ ID NO: 117314 - DNA, 25 bp, Canis familiaris
gaccccagcctggatgagtatgacc

SEQ ID NO: 117315 - DNA, 25 bp, Canis familiaris
gaccccagcctggatgagtatgacc

SEQ ID NO: 117316 - DNA, 25 bp, Canis familiaris
gaccccagcctggatgagtatgacc

SEQ ID NO: 117317 - DNA, 25 bp, Canis familiaris
gacgcacacagctggttttgaggag

SEQ ID NO: 117318 - DNA, 25 bp, Canis familiaris
gacgcagctcaattttttaagggga

SEQ ID NO: 117319 - DNA, 25 bp, Canis familiaris
gacgcagtcatttatttgaaggcac

SEQ ID NO: 117320 - DNA, 25 bp, Canis familiaris
gacgcaattcaaattctgcagggcc

SEQ ID NO: 117321 - DNA, 25 bp, Canis familiaris
gacgcacttcaccttcaagggatct

SEQ ID NO: 117322 - DNA, 25 bp, Canis familiaris
gacgactgcccacttaattaattta

SEQ ID NO: 117323 - DNA, 25 bp, Canis familiaris
gacgaatcccaaatcaattccgttc

SEQ ID NO: 117324 - DNA, 25 bp, Canis familiaris
gaccaatcccaacaaatgcctgtag

SEQ ID NO: 117325 - DNA, 25 bp, Canis familiaris
gaccactcactggcagctaaactgt

SEQ ID NO: 117326 - DNA, 25 bp, Canis familiaris
gacccagactggccacattaatgtt

SEQ ID NO: 117327 - DNA, 25 bp, Canis familiaris
gaccggagcttgtccggaagattgc

SEQ ID NO: 117328 - DNA, 25 bp, Canis familiaris
gaccggttccaggcggaagacgtag

SEQ ID NO: 117329 - DNA, 25 bp, Canis familiaris
gacgggtactcatcggacgaggtgg

SEQ ID NO: 117330 - DNA, 25 bp, Canis familiaris
gacgggtccgaacagactgagaagg

SEQ ID NO: 117331 - DNA, 25 bp, Canis familiaris
gacccccctgaagaagctggaattt

SEQ ID NO: 117332 - DNA, 25 bp, Canis familiaris
gaccctactatgattccacgagaat

SEQ ID NO: 117333 - DNA, 25 bp, Canis familiaris
gaccctactcagtttcaagactgta

SEQ ID NO: 117334 - DNA, 25 bp, Canis familiaris
gaccctaccagattgaggagatttc

SEQ ID NO: 117335 - DNA, 25 bp, Canis familiaris
gacgcgtacgcaatgaagcgggacc

SEQ ID NO: 117336 - DNA, 25 bp, Canis familiaris
gaccgtacaaagcacgaggccgaaa

SEQ ID NO: 117337 - DNA, 25 bp, Canis familiaris
gacgcttccaaataccaggcgaaac

SEQ ID NO: 117338 - DNA, 25 bp, Canis familiaris
gaccttttaaacatcagttcaacca

SEQ ID NO: 117339 - DNA, 25 bp, Canis familiaris
gagccattatgtggaactactttaa

SEQ ID NO: 117340 - DNA, 25 bp, Canis familiaris
gaccattaacagtacctctaagcaa

SEQ ID NO: 117341 - DNA, 25 bp, Canis familiaris
gaccctatttgatccttaaacttat

SEQ ID NO: 117342 - DNA, 25 bp, Canis familiaris
gacccaatttgatcatcctcaactg

SEQ ID NO: 117343 - DNA, 25 bp, Canis familiaris
gaccccttcattgacctcaactaca

SEQ ID NO: 117344 - DNA, 25 bp, Canis familiaris
gaccccggtttcacatgcaaatgaa

SEQ ID NO: 117345 - DNA, 25 bp, Canis familiaris
gacgtggcggtgaccttcagaagat

SEQ ID NO: 117346 - DNA, 25 bp, Canis familiaris
gacgctatctcaggtgccttataaa

SEQ ID NO: 117347 - DNA, 25 bp, Canis familiaris
gacgcagatctaagagcccacataa

SEQ ID NO: 117348 - DNA, 25 bp, Canis familiaris
gagcgatctctgaaatcgcccattc

SEQ ID NO: 117349 - DNA, 25 bp, Canis familiaris
gacgaatctgtatggcacctggcgt

SEQ ID NO: 117350 - DNA, 25 bp, Canis familiaris
gacgacacggtaggacagcttagct

SEQ ID NO: 117351 - DNA, 25 bp, Canis familiaris
gacgacacgaataaacacgacaggt

SEQ ID NO: 117352 - DNA, 25 bp, Canis familiaris
gacgacccaaagtacacagatcagg

SEQ ID NO: 117353 - DNA, 25 bp, Canis familiaris
gacccagccaaacaggatatcgagc

SEQ ID NO: 117354 - DNA, 25 bp, Canis familiaris
gacgggggaagggagcatatgctga

SEQ ID NO: 117355 - DNA, 25 bp, Canis familiaris
gacgagggaaaagtaagctgctgag

SEQ ID NO: 117356 - DNA, 25 bp, Canis familiaris
gacgagtggatagaaaagatgtggt

SEQ ID NO: 117357 - DNA, 25 bp, Canis familiaris
gacggggtgtcataaactgtggttt

SEQ ID NO: 117358 - DNA, 25 bp, Canis familiaris
gacggtggtcttcagagcactgtgg

SEQ ID NO: 117359 - DNA, 25 bp, Canis familiaris
gacggagggcgacatggagctggac

SEQ ID NO: 117360 - DNA, 25 bp, Canis familiaris
gacggagggctggacatggaggctg

SEQ ID NO: 117361 - DNA, 25 bp, Canis familiaris
gacggatgggtggatggggagatgg

SEQ ID NO: 117362 - DNA, 25 bp, Canis familiaris
gacggtggcctggaaggcaagcggc

SEQ ID NO: 117363 - DNA, 25 bp, Canis familiaris
gacggatggagagacagacacgcgc

SEQ ID NO: 117364 - DNA, 25 bp, Canis familiaris
gacccaggtgcagacaaccatgcgt

SEQ ID NO: 117365 - DNA, 25 bp, Canis familiaris
gacccaaatccgtcagaactcgtga

SEQ ID NO: 117366 - DNA, 25 bp, Canis familiaris
gacccaaccttgtcaggactgtgga

SEQ ID NO: 117367 - DNA, 25 bp, Canis familiaris
gacccacacctttccagggtcaaag

SEQ ID NO: 117368 - DNA, 25 bp, Canis familiaris
gagcccaactcctaaaaggtcaatc

SEQ ID NO: 117369 - DNA, 25 bp, Canis familiaris
gaccccatggccttaggaggtagct

SEQ ID NO: 117370 - DNA, 25 bp, Canis familiaris
gacgccacggccgaggaggagggcg

SEQ ID NO: 117371 - DNA, 25 bp, Canis familiaris
gacgtgcagggcggaggagacggcc

SEQ ID NO: 117372 - DNA, 25 bp, Canis familiaris
gacggaggctcaggggtgatggtcc

SEQ ID NO: 117373 - DNA, 25 bp, Canis familiaris
gacgtgagtcgctgtggtgatggaa

SEQ ID NO: 117374 - DNA, 25 bp, Canis familiaris
gacgggtcacatgttgtataaacgg

SEQ ID NO: 117375 - DNA, 25 bp, Canis familiaris
gacggatttgctttttacaaacaag

SEQ ID NO: 117376 - DNA, 25 bp, Canis familiaris
gacgttatccttttatgacaaacaa

SEQ ID NO: 117377 - DNA, 25 bp, Canis familiaris
gacgttcacctataaaaagtccagt

SEQ ID NO: 117378 - DNA, 25 bp, Canis familiaris
gacgttctcacagaacagaacccca

SEQ ID NO: 117379 - DNA, 25 bp, Canis familiaris
gacgcttattcacatgaccaaaccc

SEQ ID NO: 117380 - DNA, 25 bp, Canis familiaris
gacgttttgcattcatgagccgttc

SEQ ID NO: 117381 - DNA, 25 bp, Canis familiaris
gacgtgtgtctctttgatggggtct

SEQ ID NO: 117382 - DNA, 25 bp, Canis familiaris
gacgcttcgtgatcgaggaggttcc

SEQ ID NO: 117383 - DNA, 25 bp, Canis familiaris
gacgttctgaggttgaggtgttttc

SEQ ID NO: 117384 - DNA, 25 bp, Canis familiaris
gacgctttaggaacatgttttgctt

SEQ ID NO: 117385 - DNA, 25 bp, Canis familiaris
gacctagtaggagcataaaattatt

SEQ ID NO: 117386 - DNA, 25 bp, Canis familiaris
gacccatctaaaaacaaatcattac

SEQ ID NO: 117387 - DNA, 25 bp, Canis familiaris
gacccctgtgaagaaactgtatcgt

SEQ ID NO: 117388 - DNA, 25 bp, Canis familiaris
gacccgtgtgaagaccacgggcatc

SEQ ID NO: 117389 - DNA, 25 bp, Canis familiaris
gaccgcgcgtgatatatccacgacg

SEQ ID NO: 117390 - DNA, 25 bp, Canis familiaris
gaccccggtttactcatggacagtc

SEQ ID NO: 117391 - DNA, 25 bp, Canis familiaris
gaccccgcatgtctagttggtcggc

SEQ ID NO: 117392 - DNA, 25 bp, Canis familiaris
gacccgacttacaagttcttcgagc

SEQ ID NO: 117393 - DNA, 25 bp, Canis familiaris
gaccctgtccaaaagtacaatcgac

SEQ ID NO: 117394 - DNA, 25 bp, Canis familiaris
gaccctgatgctaaggtggaagtag

SEQ ID NO: 117395 - DNA, 25 bp, Canis familiaris
gacgtctctctttggtggatgagat

SEQ ID NO: 117396 - DNA, 25 bp, Canis familiaris
gacgtgcaccttgtgctggatggtc

SEQ ID NO: 117397 - DNA, 25 bp, Canis familiaris
gacgtgagccgcgtgtgggattatg

SEQ ID NO: 117398 - DNA, 25 bp, Canis familiaris
tgacgggcccgtgaggtgttgggtc

SEQ ID NO: 117399 - DNA, 25 bp, Canis familiaris
gaccactggggtgaggtccttggcc

SEQ ID NO: 117400 - DNA, 25 bp, Canis familiaris
gaccctggaattccaggaatcttct

SEQ ID NO: 117401 - DNA, 25 bp, Canis familiaris
gacccagagaccctgacgagatcat

SEQ ID NO: 117402 - DNA, 25 bp, Canis familiaris
gacgacatagccagcaactgcgtcc

SEQ ID NO: 117403 - DNA, 25 bp, Canis familiaris
gacgacaatgccactatccgtgtca

SEQ ID NO: 117404 - DNA, 25 bp, Canis familiaris
gacgacgatgacacttgactggcta

SEQ ID NO: 117405 - DNA, 25 bp, Canis familiaris
gacgagcgcagagttggctacttct

SEQ ID NO: 117406 - DNA, 25 bp, Canis familiaris
gacgacgcaggcatgtacatctgcc

SEQ ID NO: 117407 - DNA, 25 bp, Canis familiaris
gacgtctagatgagtacacgcagga

SEQ ID NO: 117408 - DNA, 25 bp, Canis familiaris
gacgcttatctagattcactgaaga

SEQ ID NO: 117409 - DNA, 25 bp, Canis familiaris
gacccttcttactcctgaaggctct

SEQ ID NO: 117410 - DNA, 25 bp, Canis familiaris
gacccttcccattgggtaagcctct

SEQ ID NO: 117411 - DNA, 25 bp, Canis familiaris
gacctttccttaacttgaagcttct

SEQ ID NO: 117412 - DNA, 25 bp, Canis familiaris
gaccttgaccacgttttaagcttcg

SEQ ID NO: 117413 - DNA, 25 bp, Canis familiaris
gacctaggccagcatgtcatggtac

SEQ ID NO: 117414 - DNA, 25 bp, Canis familiaris
gacgtagagccatctgttgactccc

SEQ ID NO: 117415 - DNA, 25 bp, Canis familiaris
gacgtgtaactctgttgatcttgcc

SEQ ID NO: 117416 - DNA, 25 bp, Canis familiaris
gacgttactggctgtgtcattagct

SEQ ID NO: 117417 - DNA, 25 bp, Canis familiaris
gacgatctggggaggctgcagtacc

SEQ ID NO: 117418 - DNA, 25 bp, Canis familiaris
gacgatgtccggaggcagcagtaga

SEQ ID NO: 117419 - DNA, 25 bp, Canis familiaris
gacgagtctcggagcgtgtggacgt

SEQ ID NO: 117420 - DNA, 25 bp, Canis familiaris
gacgattcccgaagacttggactta

SEQ ID NO: 117421 - DNA, 25 bp, Canis familiaris
gacgtcccggagcacagtgggttat

SEQ ID NO: 117422 - DNA, 25 bp, Canis familiaris
gagcgaaccgtctcacagtaggtat

SEQ ID NO: 117423 - DNA, 25 bp, Canis familiaris
gacccaccagtctccagaaggaagg

SEQ ID NO: 117424 - DNA, 25 bp, Canis familiaris
gacccaaagtacacagatcaggacg

SEQ ID NO: 117425 - DNA, 25 bp, Canis familiaris
gacctctaatgcacccagtgtacag

SEQ ID NO: 117426 - DNA, 25 bp, Canis familiaris
gacctctaaggctcaagtgttacgt

SEQ ID NO: 117427 - DNA, 25 bp, Canis familiaris
gacgtccaaggaaaatatttagatg

SEQ ID NO: 117428 - DNA, 25 bp, Canis familiaris
gacgtccaacaaaaaatcctcgaca

SEQ ID NO: 117429 - DNA, 25 bp, Canis familiaris
gacgatctcatggaagtatggatcc

SEQ ID NO: 117430 - DNA, 25 bp, Canis familiaris
gacgcactgctgaggctgtgtgctt

SEQ ID NO: 117431 - DNA, 25 bp, Canis familiaris
gacgatcagcttcagcagtggttgt

SEQ ID NO: 117432 - DNA, 25 bp, Canis familiaris
gacgctgagtatcagcaccagcggc

SEQ ID NO: 117433 - DNA, 25 bp, Canis familiaris
gacgctgagtatcagcaccagcggc

SEQ ID NO: 117434 - DNA, 25 bp, Canis familiaris
gacgccttcatccagcaaggcgggg

SEQ ID NO: 117435 - DNA, 25 bp, Canis familiaris
gacgctctgctctgcagaagggggt

SEQ ID NO: 117436 - DNA, 25 bp, Canis familiaris
gacctgcatcaggggagctcctgag

SEQ ID NO: 117437 - DNA, 25 bp, Canis familiaris
gacgccatcatctagtgacgactat

SEQ ID NO: 117438 - DNA, 25 bp, Canis familiaris
gacgccatccacatgatggacatag

SEQ ID NO: 117439 - DNA, 25 bp, Canis familiaris
gacgccatcgcacaagctgtgaggg

SEQ ID NO: 117440 - DNA, 25 bp, Canis familiaris
gacgtctcagcggactttgagggcc

SEQ ID NO: 117441 - DNA, 25 bp, Canis familiaris
gacgtgtagtctcatttgaggcgcg

SEQ ID NO: 117442 - DNA, 25 bp, Canis familiaris
gacgcttatgtcctatgtctttcgc

SEQ ID NO: 117443 - DNA, 25 bp, Canis familiaris
gacgtcagtgtcttgactttcatcc

SEQ ID NO: 117444 - DNA, 25 bp, Canis familiaris
gacgatgatgatattgatctcttcg

SEQ ID NO: 117445 - DNA, 25 bp, Canis familiaris
gacgaggaattccatctcttccaag

SEQ ID NO: 117446 - DNA, 25 bp, Canis familiaris
gacgtaggtgtccagttgttctaga

SEQ ID NO: 117447 - DNA, 25 bp, Canis familiaris
gacgcgtgggttttttcattataag

SEQ ID NO: 117448 - DNA, 25 bp, Canis familiaris
gaccagggtctgtgttactttgaaa

SEQ ID NO: 117449 - DNA, 25 bp, Canis familiaris
gaccgtttcagttgactacttgtgg

SEQ ID NO: 117450 - DNA, 25 bp, Canis familiaris
gaccctgttaactactacgttgaca

SEQ ID NO: 117451 - DNA, 25 bp, Canis familiaris
gaccctttggaatgttcctggctca

SEQ ID NO: 117452 - DNA, 25 bp, Canis familiaris
gaccgcttagaaactttactctcaa

SEQ ID NO: 117453 - DNA, 25 bp, Canis familiaris
gaccatttatgttacttttctccga

SEQ ID NO: 117454 - DNA, 25 bp, Canis familiaris
gaccaggttttagatgtggctccta

SEQ ID NO: 117455 - DNA, 25 bp, Canis familiaris
gacccaggtttagaaggtgcctgct

SEQ ID NO: 117456 - DNA, 25 bp, Canis familiaris
gacgcctgattttcagggaagtccc

SEQ ID NO: 117457 - DNA, 25 bp, Canis familiaris
gacccgttcatcggggatgagtccc

SEQ ID NO: 117458 - DNA, 25 bp, Canis familiaris
gaccctggaaagaggtgggcccatc

SEQ ID NO: 117459 - DNA, 25 bp, Canis familiaris
gaccctgaaaggaagttggcccctg

SEQ ID NO: 117460 - DNA, 25 bp, Canis familiaris
gaccctcaaagggtggatccctcgg

SEQ ID NO: 117461 - DNA, 25 bp, Canis familiaris
gacccccatcacggtgatgatccca

SEQ ID NO: 117462 - DNA, 25 bp, Canis familiaris
gacgacgaatgaacaagtacaccca

SEQ ID NO: 117463 - DNA, 25 bp, Canis familiaris
gacgacgtcagaacaaaggtccaca

SEQ ID NO: 117464 - DNA, 25 bp, Canis familiaris
gacgagcagtcaaggaaagcgtaac

SEQ ID NO: 117465 - DNA, 25 bp, Canis familiaris
gacgagtggcacaggactggctgaa

SEQ ID NO: 117466 - DNA, 25 bp, Canis familiaris
gacgagctggaggaggactggatca

SEQ ID NO: 117467 - DNA, 25 bp, Canis familiaris
gacgcagacctggaggagcggctca

SEQ ID NO: 117468 - DNA, 25 bp, Canis familiaris
gacgaggccggacagtggctcatag

SEQ ID NO: 117469 - DNA, 25 bp, Canis familiaris
gacgccgccggaaagcgtgccaatc

SEQ ID NO: 117470 - DNA, 25 bp, Canis familiaris
gacccccagagtggggagctgcctc

SEQ ID NO: 117471 - DNA, 25 bp, Canis familiaris
gacgccccagcactaaggagctgag

SEQ ID NO: 117472 - DNA, 25 bp, Canis familiaris
gacgtcacctgacagaatcactagt

SEQ ID NO: 117473 - DNA, 25 bp, Canis familiaris
gacgtgcaacaataaaatctcggtg

SEQ ID NO: 117474 - DNA, 25 bp, Canis familiaris
gagcttcaaaaacaacctggtggac

SEQ ID NO: 117475 - DNA, 25 bp, Canis familiaris
gagctatgaaacacgaacactgggt

SEQ ID NO: 117476 - DNA, 25 bp, Canis familiaris
gaccatgtcgacacaaaacgggcca

SEQ ID NO: 117477 - DNA, 25 bp, Canis familiaris
gaccgtccatgtagcagcaaccggc

SEQ ID NO: 117478 - DNA, 25 bp, Canis familiaris
gacgtgtccattaatcaaaaggaga

SEQ ID NO: 117479 - DNA, 25 bp, Canis familiaris
gacgtgtccctactgcaaagagaag

SEQ ID NO: 117480 - DNA, 25 bp, Canis familiaris
gaccggccttactaacggacagctt

SEQ ID NO: 117481 - DNA, 25 bp, Canis familiaris
gacgcaggctttaaggagggcacgc

SEQ ID NO: 117482 - DNA, 25 bp, Canis familiaris
gaccctgctttcaaggagggccagc

SEQ ID NO: 117483 - DNA, 25 bp, Canis familiaris
gacgcttgtttgtgcttgtgcacca

SEQ ID NO: 117484 - DNA, 25 bp, Canis familiaris
gacgattgaaagttttgctgcccaa

SEQ ID NO: 117485 - DNA, 25 bp, Canis familiaris
gacgacggaagggtgagctgcctca

SEQ ID NO: 117486 - DNA, 25 bp, Canis familiaris
gacgacaggaatttcttgcggctgc

SEQ ID NO: 117487 - DNA, 25 bp, Canis familiaris
gaccacatggttctctgttaggcgt

SEQ ID NO: 117488 - DNA, 25 bp, Canis familiaris
gaccagatggttatcctttgcctga

SEQ ID NO: 117489 - DNA, 25 bp, Canis familiaris
gaccgattatgctttctttggccta

SEQ ID NO: 117490 - DNA, 25 bp, Canis familiaris
gacctattagtgcatttgtaactgg

SEQ ID NO: 117491 - DNA, 25 bp, Canis familiaris
gacctggtagatgacaagtccctgc

SEQ ID NO: 117492 - DNA, 25 bp, Canis familiaris
gacctggaacttgaagatgccattc

SEQ ID NO: 117493 - DNA, 25 bp, Canis familiaris
gacctggataccttaaggcctcaca

SEQ ID NO: 117494 - DNA, 25 bp, Canis familiaris
gaccttaaccatccaatgaccaaga

SEQ ID NO: 117495 - DNA, 25 bp, Canis familiaris
gacgcaaacgcgagaagctcctgaa

SEQ ID NO: 117496 - DNA, 25 bp, Canis familiaris
gatcctaaaggatcccccgagaagc

SEQ ID NO: 117497 - DNA, 25 bp, Canis familiaris
gtattgggaggatccccacgcaaaa

SEQ ID NO: 117498 - DNA, 25 bp, Canis familiaris
gtcttggaaggatcccaaggccttt

SEQ ID NO: 117499 - DNA, 25 bp, Canis familiaris
gtcttcgaatggactccgggggatt

SEQ ID NO: 117500 - DNA, 25 bp, Canis familiaris
gaccctggaggattccgggactgat

SEQ ID NO: 117501 - DNA, 25 bp, Canis familiaris
gacccatcaaatctcaaaggactat

SEQ ID NO: 117502 - DNA, 25 bp, Canis familiaris
gacctctcaactttaactgaaaaga

SEQ ID NO: 117503 - DNA, 25 bp, Canis familiaris
gacgcccaactatttgataataaag

SEQ ID NO: 117504 - DNA, 25 bp, Canis familiaris
gaccaccaagtattttaaactcaat

SEQ ID NO: 117505 - DNA, 25 bp, Canis familiaris
gacccccaagtattttatactccat

SEQ ID NO: 117506 - DNA, 25 bp, Canis familiaris
gacccccagataaacattcaaacct

SEQ ID NO: 117507 - DNA, 25 bp, Canis familiaris
gacgcccacaggataaagaaagcac

SEQ ID NO: 117508 - DNA, 25 bp, Canis familiaris
gacgcccaggagctcgggaaagcaa

SEQ ID NO: 117509 - DNA, 25 bp, Canis familiaris
gacccagagggcatcgtgctaagta

SEQ ID NO: 117510 - DNA, 25 bp, Canis familiaris
gacccagcgcacgttggagtaaaca

SEQ ID NO: 117511 - DNA, 25 bp, Canis familiaris
gacccggcgggtggaggagatcaag

SEQ ID NO: 117512 - DNA, 25 bp, Canis familiaris
gacgtcccagaggtgggggcagcag

SEQ ID NO: 117513 - DNA, 25 bp, Canis familiaris
gacgctctacagtgtgggcacagca

SEQ ID NO: 117514 - DNA, 25 bp, Canis familiaris
gacgcttgtcaatctgggacacact

SEQ ID NO: 117515 - DNA, 25 bp, Canis familiaris
gacgctatgaattcctaggtcacag

SEQ ID NO: 117516 - DNA, 25 bp, Canis familiaris
gacgctgatcactcattaggtccta

SEQ ID NO: 117517 - DNA, 25 bp, Canis familiaris
gacctggacccttgggttcgaagag

SEQ ID NO: 117518 - DNA, 25 bp, Canis familiaris
gacctggacccctgggcagggggtg

SEQ ID NO: 117519 - DNA, 25 bp, Canis familiaris
gaccgtgttccctgagagtgggggc

SEQ ID NO: 117520 - DNA, 25 bp, Canis familiaris
gaccagagccccagggggaggaggc

SEQ ID NO: 117521 - DNA, 25 bp, Canis familiaris
gacgaggcccagagcaagcggggca

SEQ ID NO: 117522 - DNA, 25 bp, Canis familiaris
gacgaggcccagagcaagagaggca

SEQ ID NO: 117523 - DNA, 25 bp, Canis familiaris
gacgatgacaacgggcaagagcagc

SEQ ID NO: 117524 - DNA, 25 bp, Canis familiaris
gacgaagatgaaggaaattgcagag

SEQ ID NO: 117525 - DNA, 25 bp, Canis familiaris
gacgaacatcaaggaaattgcagag

SEQ ID NO: 117526 - DNA, 25 bp, Canis familiaris
gacgacatcaagaaggtagtgaagc

SEQ ID NO: 117527 - DNA, 25 bp, Canis familiaris
gacgagccagacagtgcgaggacgc

SEQ ID NO: 117528 - DNA, 25 bp, Canis familiaris
gagcgtgccaagtgtcgaaacgccg

SEQ ID NO: 117529 - DNA, 25 bp, Canis familiaris
gacgaccgatgctgccagaaaagcc

SEQ ID NO: 117530 - DNA, 25 bp, Canis familiaris
gacgactccagctgcaataagccgt

SEQ ID NO: 117531 - DNA, 25 bp, Canis familiaris
gacgatcgctacatcacagaaccgt

SEQ ID NO: 117532 - DNA, 25 bp, Canis familiaris
gacgttgtacattgcacataccctt

SEQ ID NO: 117533 - DNA, 25 bp, Canis familiaris
gacgttgccgattcaccagcacttg

SEQ ID NO: 117534 - DNA, 25 bp, Canis familiaris
gaccattgccgaaacaaacgatccg

SEQ ID NO: 117535 - DNA, 25 bp, Canis familiaris
gacccttctggggacaaggaccagc

SEQ ID NO: 117536 - DNA, 25 bp, Canis familiaris
gaccgcttacacctgagacggacta

SEQ ID NO: 117537 - DNA, 25 bp, Canis familiaris
gagccctccaacctgtacaaggctc

SEQ ID NO: 117538 - DNA, 25 bp, Canis familiaris
gaccccaaccaggttcctgatgtta

SEQ ID NO: 117539 - DNA, 25 bp, Canis familiaris
gaccgactaacagttgtccagttaa

SEQ ID NO: 117540 - DNA, 25 bp, Canis familiaris
gaccgtgtgaacttttcagaactat

SEQ ID NO: 117541 - DNA, 25 bp, Canis familiaris
gaccggatgaaatgatttaatgccc

SEQ ID NO: 117542 - DNA, 25 bp, Canis familiaris
gaccctgttatgcatatcttaaacc

SEQ ID NO: 117543 - DNA, 25 bp, Canis familiaris
gacccttttgcactactgttgagaa

SEQ ID NO: 117544 - DNA, 25 bp, Canis familiaris
gacccagtttctccaagtctggtac

SEQ ID NO: 117545 - DNA, 25 bp, Canis familiaris
gacccactttcaacatttctattat

SEQ ID NO: 117546 - DNA, 25 bp, Canis familiaris
gaccccaatgtcctgatttttaatt

SEQ ID NO: 117547 - DNA, 25 bp, Canis familiaris
gacgcccaaagccgagtgctatttc

SEQ ID NO: 117548 - DNA, 25 bp, Canis familiaris
gacgctctacaagatgggctttcct

SEQ ID NO: 117549 - DNA, 25 bp, Canis familiaris
gaccaaatcgagttgggtccccaga

SEQ ID NO: 117550 - DNA, 25 bp, Canis familiaris
gacccattcgatcgtgcaggtcacg

SEQ ID NO: 117551 - DNA, 25 bp, Canis familiaris
gacccacttgctggacatgagctca

SEQ ID NO: 117552 - DNA, 25 bp, Canis familiaris
gacgcaattccttgagcgagacagt

SEQ ID NO: 117553 - DNA, 25 bp, Canis familiaris
gacgacatccctggaatggaaggcc

SEQ ID NO: 117554 - DNA, 25 bp, Canis familiaris
gacgacctcttccaaaagagcaaca

SEQ ID NO: 117555 - DNA, 25 bp, Canis familiaris
gacgcaacctatgagaccaaggaga

SEQ ID NO: 117556 - DNA, 25 bp, Canis familiaris
gacgcaaggttgtagaaatattgta

SEQ ID NO: 117557 - DNA, 25 bp, Canis familiaris
gacgaggtgttccatgacattgctt

SEQ ID NO: 117558 - DNA, 25 bp, Canis familiaris
gagcgagcccttgaggactgttagg

SEQ ID NO: 117559 - DNA, 25 bp, Canis familiaris
gacgactcctatgacgacttggtgt

SEQ ID NO: 117560 - DNA, 25 bp, Canis familiaris
gacgactcctatgacgacttggtgt

SEQ ID NO: 117561 - DNA, 25 bp, Canis familiaris
gaccctccccaaatacttggtgatc

SEQ ID NO: 117562 - DNA, 25 bp, Canis familiaris
gacccttgcaggacactacatgtgg

SEQ ID NO: 117563 - DNA, 25 bp, Canis familiaris
gacccttgataaagtcacgtggcca

SEQ ID NO: 117564 - DNA, 25 bp, Canis familiaris
gacctttgcctttgaacgggacacg

SEQ ID NO: 117565 - DNA, 25 bp, Canis familiaris
gacgctgagtactggaacgggcaga

SEQ ID NO: 117566 - DNA, 25 bp, Canis familiaris
gacgctgaggattgggggcctggtg

SEQ ID NO: 117567 - DNA, 25 bp, Canis familiaris
gacgcggccatgtgtgaagttcgtg

SEQ ID NO: 117568 - DNA, 25 bp, Canis familiaris
gacgcgaccatgtcggaggtgctgc

SEQ ID NO: 117569 - DNA, 25 bp, Canis familiaris
gacgatgagtcatcagggttcactc

SEQ ID NO: 117570 - DNA, 25 bp, Canis familiaris
gacgcagcagaatatggaggacacc

SEQ ID NO: 117571 - DNA, 25 bp, Canis familiaris
gacgcagcagcagggtggtgaacac

SEQ ID NO: 117572 - DNA, 25 bp, Canis familiaris
gacgcaggcacggtgagaatccatc

SEQ ID NO: 117573 - DNA, 25 bp, Canis familiaris
gacgaagtcgcgtagactcgatcat

SEQ ID NO: 117574 - DNA, 25 bp, Canis familiaris
gacgacactagccaaagtcatgaaa

SEQ ID NO: 117575 - DNA, 25 bp, Canis familiaris
gacgaactcaacaagaacatggaag

SEQ ID NO: 117576 - DNA, 25 bp, Canis familiaris
gacccctaacaagaagtgacaggca

SEQ ID NO: 117577 - DNA, 25 bp, Canis familiaris
gacccccgaaaggatagtgacagat

SEQ ID NO: 117578 - DNA, 25 bp, Canis familiaris
gaccagcccctatgtcaaggaattc

SEQ ID NO: 117579 - DNA, 25 bp, Canis familiaris
gacgagccctactaataaagattcc

SEQ ID NO: 117580 - DNA, 25 bp, Canis familiaris
gacgacacctacttgtaaattctcc

SEQ ID NO: 117581 - DNA, 25 bp, Canis familiaris
gacgaacctgagctctcatacttat

SEQ ID NO: 117582 - DNA, 25 bp, Canis familiaris
gacgaacttgttaaatcctctcagt

SEQ ID NO: 117583 - DNA, 25 bp, Canis familiaris
gacgacctaattacagccgttcatt

SEQ ID NO: 117584 - DNA, 25 bp, Canis familiaris
gaccacctttgtacagaggcttact

SEQ ID NO: 117585 - DNA, 25 bp, Canis familiaris
gacccccttgatgctatactgtagc

SEQ ID NO: 117586 - DNA, 25 bp, Canis familiaris
gaccgacacttgagtcgtcttagaa

SEQ ID NO: 117587 - DNA, 25 bp, Canis familiaris
gaccggactctggtgtcttatagga

SEQ ID NO: 117588 - DNA, 25 bp, Canis familiaris
gacccatcctcggtgtttgtaggaa

SEQ ID NO: 117589 - DNA, 25 bp, Canis familiaris
gatcccattcctgggttttggaaca

SEQ ID NO: 117590 - DNA, 25 bp, Canis familiaris
gatcccattcctgggaactcgggac

SEQ ID NO: 117591 - DNA, 25 bp, Canis familiaris
gacgccatgtcgggttattcgagtg

SEQ ID NO: 117592 - DNA, 25 bp, Canis familiaris
gacgccgttgtactgtttcatagct

SEQ ID NO: 117593 - DNA, 25 bp, Canis familiaris
gacccttttatgccctagaatgctg

SEQ ID NO: 117594 - DNA, 25 bp, Canis familiaris
gacgcttttgtggcccaagagcggg

SEQ ID NO: 117595 - DNA, 25 bp, Canis familiaris
gacctgtacggcgtctaagactctg

SEQ ID NO: 117596 - DNA, 25 bp, Canis familiaris
gaccctattgatctctaacaggcgg

SEQ ID NO: 117597 - DNA, 25 bp, Canis familiaris
gaccctttgatcccaaaattcactt

SEQ ID NO: 117598 - DNA, 25 bp, Canis familiaris
gaccctctttgcaggcaaaatctct

SEQ ID NO: 117599 - DNA, 25 bp, Canis familiaris
gacgccttttctcagatatggtccc

SEQ ID NO: 117600 - DNA, 25 bp, Canis familiaris
gaccccgttctgcaaggggaccaag

SEQ ID NO: 117601 - DNA, 25 bp, Canis familiaris
gagccccttttcttatggaaacaag

SEQ ID NO: 117602 - DNA, 25 bp, Canis familiaris
gaccgttctgttgtgtggatgacca

SEQ ID NO: 117603 - DNA, 25 bp, Canis familiaris
gaccctttctaaatctcaagcacca

SEQ ID NO: 117604 - DNA, 25 bp, Canis familiaris
gaccattttctccctttagacagga

SEQ ID NO: 117605 - DNA, 25 bp, Canis familiaris
gacctcgatgttgcctttagaaggg

SEQ ID NO: 117606 - DNA, 25 bp, Canis familiaris
gacccgtgctggccacgggagcaag

SEQ ID NO: 117607 - DNA, 25 bp, Canis familiaris
gaccttgggggacggagattggagc

SEQ ID NO: 117608 - DNA, 25 bp, Canis familiaris
gaccggtggggtcagaactgttcct

SEQ ID NO: 117609 - DNA, 25 bp, Canis familiaris
gaccaggttggatcaagaaatttac

SEQ ID NO: 117610 - DNA, 25 bp, Canis familiaris
gaccgtgtatcttcaaataaattta

SEQ ID NO: 117611 - DNA, 25 bp, Canis familiaris
gacccggacaccaaacaaatcattc

SEQ ID NO: 117612 - DNA, 25 bp, Canis familiaris
gacccggagccgggccaaagatgac

SEQ ID NO: 117613 - DNA, 25 bp, Canis familiaris
gacccggggtggcccagaaaagcat

SEQ ID NO: 117614 - DNA, 25 bp, Canis familiaris
gaccctggggaagacaaacatggag

SEQ ID NO: 117615 - DNA, 25 bp, Canis familiaris
gaccctagcccaacaacaggctgat

SEQ ID NO: 117616 - DNA, 25 bp, Canis familiaris
gacccaagccaaaaccacgagtttg

SEQ ID NO: 117617 - DNA, 25 bp, Canis familiaris
gacccctcgcaaaaaacagtttatg

SEQ ID NO: 117618 - DNA, 25 bp, Canis familiaris
gacccatttacaatcgaacgtttat

SEQ ID NO: 117619 - DNA, 25 bp, Canis familiaris
gacccatttcccatggacagtagtt

SEQ ID NO: 117620 - DNA, 25 bp, Canis familiaris
gagcaccacttcgcgtgtaaggagt

SEQ ID NO: 117621 - DNA, 25 bp, Canis familiaris
gacccactccagcgttgagggtagc

SEQ ID NO: 117622 - DNA, 25 bp, Canis familiaris
gacccacccagagacaggaagaagc

SEQ ID NO: 117623 - DNA, 25 bp, Canis familiaris
gacccattcccagctcaggggaagc

SEQ ID NO: 117624 - DNA, 25 bp, Canis familiaris
gacccgtgaccgattgggagaatgg

SEQ ID NO: 117625 - DNA, 25 bp, Canis familiaris
gaccgggaggcgattcggcaggaga

SEQ ID NO: 117626 - DNA, 25 bp, Canis familiaris
gacctggagggtattttgctaagtg

SEQ ID NO: 117627 - DNA, 25 bp, Canis familiaris
gaccttcagggtcaatgcttttagt

SEQ ID NO: 117628 - DNA, 25 bp, Canis familiaris
gacgcttcgtcgcaaagctttgtct

SEQ ID NO: 117629 - DNA, 25 bp, Canis familiaris
gacctcacgtcacacaagagtttcg

SEQ ID NO: 117630 - DNA, 25 bp, Canis familiaris
gacgcatcgtattgaacatagtttt

SEQ ID NO: 117631 - DNA, 25 bp, Canis familiaris
gacgagctgtagtagacctgctttt

SEQ ID NO: 117632 - DNA, 25 bp, Canis familiaris
gacgagcctggaagagcctgatttg

SEQ ID NO: 117633 - DNA, 25 bp, Canis familiaris
gacgcagccaggaaagcacgtccgc

SEQ ID NO: 117634 - DNA, 25 bp, Canis familiaris
gacgctgccggtaatcaggctgacg

SEQ ID NO: 117635 - DNA, 25 bp, Canis familiaris
gaggccgggtaatagtcacagggac

SEQ ID NO: 117636 - DNA, 25 bp, Canis familiaris
gagatccggaaatttgccatgaagg

SEQ ID NO: 117637 - DNA, 25 bp, Canis familiaris
gatgtccggcaaccaggaccaaagg

SEQ ID NO: 117638 - DNA, 25 bp, Canis familiaris
gagttgcccaagactggctctagta

SEQ ID NO: 117639 - DNA, 25 bp, Canis familiaris
gagctggcacccacatcctgtgcat

SEQ ID NO: 117640 - DNA, 25 bp, Canis familiaris
gacgccacaggatcccaaaacagtc

SEQ ID NO: 117641 - DNA, 25 bp, Canis familiaris
gacgccaacatgttactaaaccact

SEQ ID NO: 117642 - DNA, 25 bp, Canis familiaris
gacccaactactgctgaatcacaaa

SEQ ID NO: 117643 - DNA, 25 bp, Canis familiaris
gacccagatcatgtttgagaccttc

SEQ ID NO: 117644 - DNA, 25 bp, Canis familiaris
gacccagatcatgtttgagaccttc

SEQ ID NO: 117645 - DNA, 25 bp, Canis familiaris
gacccagatgccgaagatgaacttt

SEQ ID NO: 117646 - DNA, 25 bp, Canis familiaris
gacccattcataccagaactctact

SEQ ID NO: 117647 - DNA, 25 bp, Canis familiaris
gaccactttagaatgaaccagttca

SEQ ID NO: 117648 - DNA, 25 bp, Canis familiaris
gacccttattcaaatgtccgaccgg

SEQ ID NO: 117649 - DNA, 25 bp, Canis familiaris
gacgcttttataacattcatcgaac

SEQ ID NO: 117650 - DNA, 25 bp, Canis familiaris
gacgccttattagaatcactgagaa

SEQ ID NO: 117651 - DNA, 25 bp, Canis familiaris
gacccattaatacatatttgtgatg

SEQ ID NO: 117652 - DNA, 25 bp, Canis familiaris
gaccctaataagcattttgatctgt

SEQ ID NO: 117653 - DNA, 25 bp, Canis familiaris
gaccctgcacaagcctttgtgtcat

SEQ ID NO: 117654 - DNA, 25 bp, Canis familiaris
gacccgacaatcaagctcttgggaa

SEQ ID NO: 117655 - DNA, 25 bp, Canis familiaris
gacccaaactctatgctggtggtag

SEQ ID NO: 117656 - DNA, 25 bp, Canis familiaris
gacccacatcaacattgtggtcatt

SEQ ID NO: 117657 - DNA, 25 bp, Canis familiaris
gacccatcaatacttcgtgtgtcca

SEQ ID NO: 117658 - DNA, 25 bp, Canis familiaris
gacctcatcaaaggacgtgcttccg

SEQ ID NO: 117659 - DNA, 25 bp, Canis familiaris
gacctggagacggacgacttcgaga

SEQ ID NO: 117660 - DNA, 25 bp, Canis familiaris
gacctggcaaggtggtgcttcgaga

SEQ ID NO: 117661 - DNA, 25 bp, Canis familiaris
gacgcggcgagtccgaaggtggagc

SEQ ID NO: 117662 - DNA, 25 bp, Canis familiaris
gacccgcaggatccgagttctgggt

SEQ ID NO: 117663 - DNA, 25 bp, Canis familiaris
gacgccccagttgagattctgattg

SEQ ID NO: 117664 - DNA, 25 bp, Canis familiaris
gacgcccaccttggtgatgttgttg

SEQ ID NO: 117665 - DNA, 25 bp, Canis familiaris
gacgaccccattcgaatcgtcttgc

SEQ ID NO: 117666 - DNA, 25 bp, Canis familiaris
gacctactccttgaatagtctggcg

SEQ ID NO: 117667 - DNA, 25 bp, Canis familiaris
gaccttggcttgtgaatttcgacgt

SEQ ID NO: 117668 - DNA, 25 bp, Canis familiaris
gaccttggtttgtgaattgcgacgt

SEQ ID NO: 117669 - DNA, 25 bp, Canis familiaris
gaccttgggttcagagtcgatgacg

SEQ ID NO: 117670 - DNA, 25 bp, Canis familiaris
gacctttggcttctgatgtttgccc

SEQ ID NO: 117671 - DNA, 25 bp, Canis familiaris
gacgctgggagctttttgtcaggcc

SEQ ID NO: 117672 - DNA, 25 bp, Canis familiaris
gacctcgggcttctttgaggatttt

SEQ ID NO: 117673 - DNA, 25 bp, Canis familiaris
gacccgaggcacacgggggactgtc

SEQ ID NO: 117674 - DNA, 25 bp, Canis familiaris
gaccggagaccatatgtggggagcc

SEQ ID NO: 117675 - DNA, 25 bp, Canis familiaris
gaccgatatgtcaaaattaagcgca

SEQ ID NO: 117676 - DNA, 25 bp, Canis familiaris
gaccgtgagtcttaggtatacgatg

SEQ ID NO: 117677 - DNA, 25 bp, Canis familiaris
gacctgttgttttgcttgcacaagg

SEQ ID NO: 117678 - DNA, 25 bp, Canis familiaris
gacctggctggatgagccgccactg

SEQ ID NO: 117679 - DNA, 25 bp, Canis familiaris
gacgctttgagatatacagccttac

SEQ ID NO: 117680 - DNA, 25 bp, Canis familiaris
gacgctgttgaattttctgtacata

SEQ ID NO: 117681 - DNA, 25 bp, Canis familiaris
gaccgttgctaactggctgtaggca

SEQ ID NO: 117682 - DNA, 25 bp, Canis familiaris
gaccgcagttagtgagctctagagt

SEQ ID NO: 117683 - DNA, 25 bp, Canis familiaris
gacccatgtccgatcagtcagatcg

SEQ ID NO: 117684 - DNA, 25 bp, Canis familiaris
gaccctatcagctttaatcgacgga

SEQ ID NO: 117685 - DNA, 25 bp, Canis familiaris
gaccctcacagccttgaactatatt

SEQ ID NO: 117686 - DNA, 25 bp, Canis familiaris
gaccccacaaggaaccaatatctgc

SEQ ID NO: 117687 - DNA, 25 bp, Canis familiaris
gacccaccaatggaagcaactggct

SEQ ID NO: 117688 - DNA, 25 bp, Canis familiaris
gacccagccatgctgaagaacttgt

SEQ ID NO: 117689 - DNA, 25 bp, Canis familiaris
gacccactgttaaagcctcttgtgg

SEQ ID NO: 117690 - DNA, 25 bp, Canis familiaris
gaccccgttaaagctgtctgagtac

SEQ ID NO: 117691 - DNA, 25 bp, Canis familiaris
gacccgtgaaaagtcctgtccagtg

SEQ ID NO: 117692 - DNA, 25 bp, Canis familiaris
gacgccgatgaggggatcctctggc

SEQ ID NO: 117693 - DNA, 25 bp, Canis familiaris
gacctttgtggaggcagcctctgcc

SEQ ID NO: 117694 - DNA, 25 bp, Canis familiaris
gacctgcggtggagaaccatccgct

SEQ ID NO: 117695 - DNA, 25 bp, Canis familiaris
gacctcggattcaaaatcgtcgtgt

SEQ ID NO: 117696 - DNA, 25 bp, Canis familiaris
gacccaaattccaacttaccatgta

SEQ ID NO: 117697 - DNA, 25 bp, Canis familiaris
gacccagatggtgtatttactgtgt

SEQ ID NO: 117698 - DNA, 25 bp, Canis familiaris
gacccagggactaatctgattctcg

SEQ ID NO: 117699 - DNA, 25 bp, Canis familiaris
gacccacagtagacttgcagacgtc

SEQ ID NO: 117700 - DNA, 25 bp, Canis familiaris
gacctactgtagtctccagaagtcc

SEQ ID NO: 117701 - DNA, 25 bp, Canis familiaris
gacgctgacgctttcttaggaggtc

SEQ ID NO: 117702 - DNA, 25 bp, Canis familiaris
gacgctgatgtgaccatgcttagga

SEQ ID NO: 117703 - DNA, 25 bp, Canis familiaris
gacgctgctgattcaggctgtggcc

SEQ ID NO: 117704 - DNA, 25 bp, Canis familiaris
gacgcatatatgacagcgtgtgcgc

SEQ ID NO: 117705 - DNA, 25 bp, Canis familiaris
gagcctttgcacaggtgccaagggg

SEQ ID NO: 117706 - DNA, 25 bp, Canis familiaris
gacctcttgccaccttggcaagggc

SEQ ID NO: 117707 - DNA, 25 bp, Canis familiaris
gacccgggcaattctggaaggaagg

SEQ ID NO: 117708 - DNA, 25 bp, Canis familiaris
gacccagggataccttgaagcccac

SEQ ID NO: 117709 - DNA, 25 bp, Canis familiaris
gacccagggacggcggaagtcattt

SEQ ID NO: 117710 - DNA, 25 bp, Canis familiaris
gaccacattgaacccaaaagtttct

SEQ ID NO: 117711 - DNA, 25 bp, Canis familiaris
gacccttgcaatgcggaatggcttt

SEQ ID NO: 117712 - DNA, 25 bp, Canis familiaris
gacctcttggagctgggagtgcttc

SEQ ID NO: 117713 - DNA, 25 bp, Canis familiaris
gacgactgttgtctgggtgtgtctt

SEQ ID NO: 117714 - DNA, 25 bp, Canis familiaris
gacccatttgtcttggggttccttg

SEQ ID NO: 117715 - DNA, 25 bp, Canis familiaris
gaccactacttctgtgaggtccctg

SEQ ID NO: 117716 - DNA, 25 bp, Canis familiaris
gaccactagctgaggttggtccccc

SEQ ID NO: 117717 - DNA, 25 bp, Canis familiaris
gacccaagcactagtattggccccc

SEQ ID NO: 117718 - DNA, 25 bp, Canis familiaris
gaccacgagaatgtcatttccccat

SEQ ID NO: 117719 - DNA, 25 bp, Canis familiaris
gaccgatgaaatgatttatgcccca

SEQ ID NO: 117720 - DNA, 25 bp, Canis familiaris
gacccaaaggtgatcttggcccaat

SEQ ID NO: 117721 - DNA, 25 bp, Canis familiaris
gacccaatatggacttcttgccaag

SEQ ID NO: 117722 - DNA, 25 bp, Canis familiaris
gacccattcgaacgtctgccctatc

SEQ ID NO: 117723 - DNA, 25 bp, Canis familiaris
gacccattcgaacgtctgccctatc

SEQ ID NO: 117724 - DNA, 25 bp, Canis familiaris
gacccatttagaagtggcctctact

SEQ ID NO: 117725 - DNA, 25 bp, Canis familiaris
gacccaggaagactgctgagcgctc

SEQ ID NO: 117726 - DNA, 25 bp, Canis familiaris
gacccagagacgacctgaagttgtg

SEQ ID NO: 117727 - DNA, 25 bp, Canis familiaris
gacccgagggcagcccagagtgggt

SEQ ID NO: 117728 - DNA, 25 bp, Canis familiaris
gacccagggggagtccacctggtgg

SEQ ID NO: 117729 - DNA, 25 bp, Canis familiaris
gacccagggtctatcagggaggggc

SEQ ID NO: 117730 - DNA, 25 bp, Canis familiaris
gacccatacgtctgactgaggacgg

SEQ ID NO: 117731 - DNA, 25 bp, Canis familiaris
gacgccgacgtgtgtagagaacagg

SEQ ID NO: 117732 - DNA, 25 bp, Canis familiaris
gacccaatcccatgcagaggaacac

SEQ ID NO: 117733 - DNA, 25 bp, Canis familiaris
gacccatttcacacaggagaaccac

SEQ ID NO: 117734 - DNA, 25 bp, Canis familiaris
gaccccattacaagcagcggaatta

SEQ ID NO: 117735 - DNA, 25 bp, Canis familiaris
gaccccttgttgacagctggaatat

SEQ ID NO: 117736 - DNA, 25 bp, Canis familiaris
gacccttgttggaagaggagcaatt

SEQ ID NO: 117737 - DNA, 25 bp, Canis familiaris
gacccctgttagattgtccacagtg

SEQ ID NO: 117738 - DNA, 25 bp, Canis familiaris
gaccccgcttcaataatgttcaact

SEQ ID NO: 117739 - DNA, 25 bp, Canis familiaris
gaccgccactagccaaagattgcca

SEQ ID NO: 117740 - DNA, 25 bp, Canis familiaris
gacccctcaaaatacttgccattgc

SEQ ID NO: 117741 - DNA, 25 bp, Canis familiaris
gaccccatcgagatcaagttcgtgt

SEQ ID NO: 117742 - DNA, 25 bp, Canis familiaris
gaccccacgagatccaagtcgtggt

SEQ ID NO: 117743 - DNA, 25 bp, Canis familiaris
gaccctgacgagatcatgcaagtcg

SEQ ID NO: 117744 - DNA, 25 bp, Canis familiaris
gacccagactgacctacatgaaatg

SEQ ID NO: 117745 - DNA, 25 bp, Canis familiaris
gacccagcacgaggctgtatgaagg

SEQ ID NO: 117746 - DNA, 25 bp, Canis familiaris
gacgctggccaggagtgagtgaagg

SEQ ID NO: 117747 - DNA, 25 bp, Canis familiaris
gacctggctacctgtggaagtgttc

SEQ ID NO: 117748 - DNA, 25 bp, Canis familiaris
gacctcagctgggagggggggtgtc

SEQ ID NO: 117749 - DNA, 25 bp, Canis familiaris
gacgccatggacacgcgggaggagt

SEQ ID NO: 117750 - DNA, 25 bp, Canis familiaris
gacgcttggacaacgggcaggtcgg

SEQ ID NO: 117751 - DNA, 25 bp, Canis familiaris
gaccttacacaggcaggggtgtcgg

SEQ ID NO: 117752 - DNA, 25 bp, Canis familiaris
gaccgtggtcacggtcggtgtcggt

SEQ ID NO: 117753 - DNA, 25 bp, Canis familiaris
gaccccccactggtggtgtttgagt

SEQ ID NO: 117754 - DNA, 25 bp, Canis familiaris
gacccaccacaccgtggctggtggg

SEQ ID NO: 117755 - DNA, 25 bp, Canis familiaris
gacctcagaacagctggactgggca

SEQ ID NO: 117756 - DNA, 25 bp, Canis familiaris
gacctggggaagggactgtggccca

SEQ ID NO: 117757 - DNA, 25 bp, Canis familiaris
gacctggggaatgtccatgctggca

SEQ ID NO: 117758 - DNA, 25 bp, Canis familiaris
gacctgctgaagttggctcttcttc

SEQ ID NO: 117759 - DNA, 25 bp, Canis familiaris
gaccaggaaggttattattccaccg

SEQ ID NO: 117760 - DNA, 25 bp, Canis familiaris
gacctggaaagtcttaggccatccc

SEQ ID NO: 117761 - DNA, 25 bp, Canis familiaris
ggcctaggaaggctctcgggggcca

SEQ ID NO: 117762 - DNA, 25 bp, Canis familiaris
gacccggaatgccctccgggtgagc

SEQ ID NO: 117763 - DNA, 25 bp, Canis familiaris
gacccggagatggactgctcaggag

SEQ ID NO: 117764 - DNA, 25 bp, Canis familiaris
gaccctgaagtaccccattgaacat

SEQ ID NO: 117765 - DNA, 25 bp, Canis familiaris
gaccctgggctactaccatgatgag

SEQ ID NO: 117766 - DNA, 25 bp, Canis familiaris
gaccctgtagtagtcatgccaggcc

SEQ ID NO: 117767 - DNA, 25 bp, Canis familiaris
gaccatctgtagttgctatggggac

SEQ ID NO: 117768 - DNA, 25 bp, Canis familiaris
gaccagttcagcaaccagggtatcc

SEQ ID NO: 117769 - DNA, 25 bp, Canis familiaris
gaccagatgtaaagaaagggcttca

SEQ ID NO: 117770 - DNA, 25 bp, Canis familiaris
gaccaggtattgcgaggttgccttt

SEQ ID NO: 117771 - DNA, 25 bp, Canis familiaris
gaccagagctttcccaagtggggtt

SEQ ID NO: 117772 - DNA, 25 bp, Canis familiaris
gaccagaactccccaaggggctttg

SEQ ID NO: 117773 - DNA, 25 bp, Canis familiaris
gaccagatgacctccaaggtctttc

SEQ ID NO: 117774 - DNA, 25 bp, Canis familiaris
gaccgatgaccttgctgattggctc

SEQ ID NO: 117775 - DNA, 25 bp, Canis familiaris
gaccagataccgggattcgtccaga

SEQ ID NO: 117776 - DNA, 25 bp, Canis familiaris
gaccgtatttggcaacagctcatca

SEQ ID NO: 117777 - DNA, 25 bp, Canis familiaris
gacccaatttggtatacgtctctac

SEQ ID NO: 117778 - DNA, 25 bp, Canis familiaris
gacccaattgtatttgcactgtcag

SEQ ID NO: 117779 - DNA, 25 bp, Canis familiaris
gaccatcaatgtattccctgtagtt

SEQ ID NO: 117780 - DNA, 25 bp, Canis familiaris
gacccaatggacaccgaggcagagt

SEQ ID NO: 117781 - DNA, 25 bp, Canis familiaris
gacccctgaagcccgtgaagatggt

SEQ ID NO: 117782 - DNA, 25 bp, Canis familiaris
gaccccgagaggtatagtgagcggt

SEQ ID NO: 117783 - DNA, 25 bp, Canis familiaris
gaccccaaggtggtccatggctggc

SEQ ID NO: 117784 - DNA, 25 bp, Canis familiaris
gacccgcagaggtagttagtgtgcc

SEQ ID NO: 117785 - DNA, 25 bp, Canis familiaris
gaccctggggtaggtagtgatcgta

SEQ ID NO: 117786 - DNA, 25 bp, Canis familiaris
gaccctagtggtaagattggcccta

SEQ ID NO: 117787 - DNA, 25 bp, Canis familiaris
gaccctcctggagagaagaccgcaa

SEQ ID NO: 117788 - DNA, 25 bp, Canis familiaris
gacccacacaggtgaaaagccttac

SEQ ID NO: 117789 - DNA, 25 bp, Canis familiaris
gacctctcacggtgaataacacttc

SEQ ID NO: 117790 - DNA, 25 bp, Canis familiaris
gaccccacgttctatataaccatgt

SEQ ID NO: 117791 - DNA, 25 bp, Canis familiaris
gacccaacctttgcaacattcatgt

SEQ ID NO: 117792 - DNA, 25 bp, Canis familiaris
gacccaccctaggacaacgagtgat

SEQ ID NO: 117793 - DNA, 25 bp, Canis familiaris
gaccctgctcctgcgaaaggaagca

SEQ ID NO: 117794 - DNA, 25 bp, Canis familiaris
gaccactcgacgacgaaagggagct

SEQ ID NO: 117795 - DNA, 25 bp, Canis familiaris
gaccattcgacgcagaatagggact

SEQ ID NO: 117796 - DNA, 25 bp, Canis familiaris
gaccactcgaccgagaaagggactg

SEQ ID NO: 117797 - DNA, 25 bp, Canis familiaris
gaccagcccccaggggagggagtgg

SEQ ID NO: 117798 - DNA, 25 bp, Canis familiaris
gagccattcccctgggaggagttgt

SEQ ID NO: 117799 - DNA, 25 bp, Canis familiaris
gaccttgttcatctgggggagttgc

SEQ ID NO: 117800 - DNA, 25 bp, Canis familiaris
gaccattcttctgggggggaatttg

SEQ ID NO: 117801 - DNA, 25 bp, Canis familiaris
gaccttcctgctggagtttgagttt

SEQ ID NO: 117802 - DNA, 25 bp, Canis familiaris
gacctacattcctcattctattgtt

SEQ ID NO: 117803 - DNA, 25 bp, Canis familiaris
gacccgatatcgtgaactttgttca

SEQ ID NO: 117804 - DNA, 25 bp, Canis familiaris
gaccacggatgggggacatttgtcg

SEQ ID NO: 117805 - DNA, 25 bp, Canis familiaris
gacctgggttggggatcatagttgg

SEQ ID NO: 117806 - DNA, 25 bp, Canis familiaris
gacctgggtcagattatctttctgg

SEQ ID NO: 117807 - DNA, 25 bp, Canis familiaris
gacctggagtaaatgtcccatctgt

SEQ ID NO: 117808 - DNA, 25 bp, Canis familiaris
gacctttcaaattgctcaccaggat

SEQ ID NO: 117809 - DNA, 25 bp, Canis familiaris
gacctatgaagttcttaccaatatt

SEQ ID NO: 117810 - DNA, 25 bp, Canis familiaris
gatccctatgcagcacttaccaata

SEQ ID NO: 117811 - DNA, 25 bp, Canis familiaris
gacctgttaccagttacacataagc

SEQ ID NO: 117812 - DNA, 25 bp, Canis familiaris
gaccttggacaagaacagtgaccag

SEQ ID NO: 117813 - DNA, 25 bp, Canis familiaris
gaccctggtgaagaactgtatcgtg

SEQ ID NO: 117814 - DNA, 25 bp, Canis familiaris
gaccctggtgaagaactgtatcgtg

SEQ ID NO: 117815 - DNA, 25 bp, Canis familiaris
gaccctggtgacactgactgattcc

SEQ ID NO: 117816 - DNA, 25 bp, Canis familiaris
gaccctgaggcctttgacagagacc

SEQ ID NO: 117817 - DNA, 25 bp, Canis familiaris
gacccatgaggcattagaactgtgc

SEQ ID NO: 117818 - DNA, 25 bp, Canis familiaris
gacctggagcgcattgcacagagtg

SEQ ID NO: 117819 - DNA, 25 bp, Canis familiaris
gacgcgtgactgattcacctgagca

SEQ ID NO: 117820 - DNA, 25 bp, Canis familiaris
gacgcgctggcgttacagcgcaaca

SEQ ID NO: 117821 - DNA, 25 bp, Canis familiaris
gaccctgccgcattacagaacattc

SEQ ID NO: 117822 - DNA, 25 bp, Canis familiaris
gacccacagacataacacatgcatt

SEQ ID NO: 117823 - DNA, 25 bp, Canis familiaris
gaccccaacagctaatccagagtaa

SEQ ID NO: 117824 - DNA, 25 bp, Canis familiaris
gaccccacacgagatcacaagtcgt

SEQ ID NO: 117825 - DNA, 25 bp, Canis familiaris
gacctgaaccagtcaatccagttgg

SEQ ID NO: 117826 - DNA, 25 bp, Canis familiaris
gacctaagttgggatccgtagcctt

SEQ ID NO: 117827 - DNA, 25 bp, Canis familiaris
gaccttagagtggtgtcttttcctt

SEQ ID NO: 117828 - DNA, 25 bp, Canis familiaris
gaccttaggtatattctcttattta

SEQ ID NO: 117829 - DNA, 25 bp, Canis familiaris
gaccctgaaggatgtttctttttct

SEQ ID NO: 117830 - DNA, 25 bp, Canis familiaris
gacccgtagtaagcagtgtttctgg

SEQ ID NO: 117831 - DNA, 25 bp, Canis familiaris
gacccgcttgtatccattgatgata

SEQ ID NO: 117832 - DNA, 25 bp, Canis familiaris
gacccagtactatacttgtgagtcc

SEQ ID NO: 117833 - DNA, 25 bp, Canis familiaris
gacccagaagcctaacacgctgaag

SEQ ID NO: 117834 - DNA, 25 bp, Canis familiaris
gacgctcaagagccagaacacggag

SEQ ID NO: 117835 - DNA, 25 bp, Canis familiaris
gacctgctgaagctgaacgtggcgc

SEQ ID NO: 117836 - DNA, 25 bp, Canis familiaris
gaccgcagaagtcaaccagaccgac

SEQ ID NO: 117837 - DNA, 25 bp, Canis familiaris
gaccctgaagcatgagaaaccaccc

SEQ ID NO: 117838 - DNA, 25 bp, Canis familiaris
gacccttaaaggcagaaccctcaag

SEQ ID NO: 117839 - DNA, 25 bp, Canis familiaris
gaccatttaatatgtatgaaaacca

SEQ ID NO: 117840 - DNA, 25 bp, Canis familiaris
gaccatcactaatctgcttgaggga

SEQ ID NO: 117841 - DNA, 25 bp, Canis familiaris
gaccaacaactggcacttcagtggg

SEQ ID NO: 117842 - DNA, 25 bp, Canis familiaris
gaccgaagacagaacctcctgggat

SEQ ID NO: 117843 - DNA, 25 bp, Canis familiaris
gacccaaaaaacccagcatagagac

SEQ ID NO: 117844 - DNA, 25 bp, Canis familiaris
gacccaatgctatactgtccataag

SEQ ID NO: 117845 - DNA, 25 bp, Canis familiaris
gaccagaagcttgacgcaccaagcg

SEQ ID NO: 117846 - DNA, 25 bp, Canis familiaris
gacccaactgcaaagagaaaactgt

SEQ ID NO: 117847 - DNA, 25 bp, Canis familiaris
gaccacaactatcaacaaaacccaa

SEQ ID NO: 117848 - DNA, 25 bp, Canis familiaris
tgactcaaacggcgaaacgacggaa

SEQ ID NO: 117849 - DNA, 25 bp, Canis familiaris
gagccaaactggtggaacccgtgag

SEQ ID NO: 117850 - DNA, 25 bp, Canis familiaris
gagcccaaagtgttgctaacctcga

SEQ ID NO: 117851 - DNA, 25 bp, Canis familiaris
gacccagatacttaccaaaccagag

SEQ ID NO: 117852 - DNA, 25 bp, Canis familiaris
gacccagatcttcttgagaggccag

SEQ ID NO: 117853 - DNA, 25 bp, Canis familiaris
gacccagagtatctcctgaggatca

SEQ ID NO: 117854 - DNA, 25 bp, Canis familiaris
gacgccaagctagttggttggtctg

SEQ ID NO: 117855 - DNA, 25 bp, Canis familiaris
gacccagagctagaggatgaggttc

SEQ ID NO: 117856 - DNA, 25 bp, Canis familiaris
gacccatgagaagcaacgagagctt

SEQ ID NO: 117857 - DNA, 25 bp, Canis familiaris
gaccctggattggagacaagacatc

SEQ ID NO: 117858 - DNA, 25 bp, Canis familiaris
gacccggatgtcctggagtaatctg

SEQ ID NO: 117859 - DNA, 25 bp, Canis familiaris
gaccctggtcagagtcagaagcctg

SEQ ID NO: 117860 - DNA, 25 bp, Canis familiaris
gaccctgagctctgggaacagactg

SEQ ID NO: 117861 - DNA, 25 bp, Canis familiaris
gacccatgcccctgggaatgagcta

SEQ ID NO: 117862 - DNA, 25 bp, Canis familiaris
gacccccacactaggagacaacata

SEQ ID NO: 117863 - DNA, 25 bp, Canis familiaris
gaccctgccacagtagctgagatca

SEQ ID NO: 117864 - DNA, 25 bp, Canis familiaris
gacccatgcctcggagcatgcagtg

SEQ ID NO: 117865 - DNA, 25 bp, Canis familiaris
gacccatgcagatagagcaggtgag

SEQ ID NO: 117866 - DNA, 25 bp, Canis familiaris
gacgcgcgagagcgaggagcagcgg

SEQ ID NO: 117867 - DNA, 25 bp, Canis familiaris
gacgcgcagagacacggacagaggg

SEQ ID NO: 117868 - DNA, 25 bp, Canis familiaris
gaccgcaagagctacggaagcgcct

SEQ ID NO: 117869 - DNA, 25 bp, Canis familiaris
gacccaggtgcttcagtggagtcca

SEQ ID NO: 117870 - DNA, 25 bp, Canis familiaris
gacccagtctatgcgtgcaggtcac

SEQ ID NO: 117871 - DNA, 25 bp, Canis familiaris
gacccattgctatcatacaggtcac

SEQ ID NO: 117872 - DNA, 25 bp, Canis familiaris
gacctcattgtcaagtcacgtgtca

SEQ ID NO: 117873 - DNA, 25 bp, Canis familiaris
gacccatgtatttgacttgtccatc

SEQ ID NO: 117874 - DNA, 25 bp, Canis familiaris
gaccctggttgtcattgtctatgcc

SEQ ID NO: 117875 - DNA, 25 bp, Canis familiaris
gacctcatggtcctaatggtgttcc

SEQ ID NO: 117876 - DNA, 25 bp, Canis familiaris
gacccggatcctcagagagttggcc

SEQ ID NO: 117877 - DNA, 25 bp, Canis familiaris
gacgcccgtgaccgagagagttagc

SEQ ID NO: 117878 - DNA, 25 bp, Canis familiaris
gaccccagtgtcagattgatcttgg

SEQ ID NO: 117879 - DNA, 25 bp, Canis familiaris
gacctcgaggcttaagtatttttct

SEQ ID NO: 117880 - DNA, 25 bp, Canis familiaris
gaccaagagacttacgaacttcgtt

SEQ ID NO: 117881 - DNA, 25 bp, Canis familiaris
tgcatccaagaacattaaatttttt

SEQ ID NO: 117882 - DNA, 25 bp, Canis familiaris
gaccacagaactatacctttttact

SEQ ID NO: 117883 - DNA, 25 bp, Canis familiaris
gacccagtcactaaggctatctttt

SEQ ID NO: 117884 - DNA, 25 bp, Canis familiaris
gacctcagtacatggcccatttcta

SEQ ID NO: 117885 - DNA, 25 bp, Canis familiaris
gacccagaagaagagcctttctcag

SEQ ID NO: 117886 - DNA, 25 bp, Canis familiaris
gacccaacaaaggacctctagcacc

SEQ ID NO: 117887 - DNA, 25 bp, Canis familiaris
gacccacacattcaactcttaaact

SEQ ID NO: 117888 - DNA, 25 bp, Canis familiaris
gacccgacatatgaagtcttgccaa

SEQ ID NO: 117889 - DNA, 25 bp, Canis familiaris
gacccgtgaatcgggctctgtgtgc

SEQ ID NO: 117890 - DNA, 25 bp, Canis familiaris
gacccggcacagggacatcgatatc

SEQ ID NO: 117891 - DNA, 25 bp, Canis familiaris
gacccttacaggcagcatgccttca

SEQ ID NO: 117892 - DNA, 25 bp, Canis familiaris
gacccattccagccaaatgtttcat

SEQ ID NO: 117893 - DNA, 25 bp, Canis familiaris
gaccctgtatagccaaagcaatctt

SEQ ID NO: 117894 - DNA, 25 bp, Canis familiaris
gacccgctatactacaacagatcgc

SEQ ID NO: 117895 - DNA, 25 bp, Canis familiaris
gacccttagaatgcagatcagatcc

SEQ ID NO: 117896 - DNA, 25 bp, Canis familiaris
gacccttacaatgagacatcccctc

SEQ ID NO: 117897 - DNA, 25 bp, Canis familiaris
gaccctaacaatggaacatctatta

SEQ ID NO: 117898 - DNA, 25 bp, Canis familiaris
gaccctaacacagtgtcctcagtgg

SEQ ID NO: 117899 - DNA, 25 bp, Canis familiaris
gacctgctaatcaagtcccacatgg

SEQ ID NO: 117900 - DNA, 25 bp, Canis familiaris
gaccgctggctgaagacccacagcc

SEQ ID NO: 117901 - DNA, 25 bp, Canis familiaris
gaccctggctgaagccctaacagat

SEQ ID NO: 117902 - DNA, 25 bp, Canis familiaris
gaccttgcctaattcctaaataaca

SEQ ID NO: 117903 - DNA, 25 bp, Canis familiaris
gaccgtgcctaagttcgctaaataa

SEQ ID NO: 117904 - DNA, 25 bp, Canis familiaris
gaccgtgctaactgtgtgtacatat

SEQ ID NO: 117905 - DNA, 25 bp, Canis familiaris
gaccttggagactgtgggcctagat

SEQ ID NO: 117906 - DNA, 25 bp, Canis familiaris
gacccttggaattggtggcccaact

SEQ ID NO: 117907 - DNA, 25 bp, Canis familiaris
gacccgtggacctggtccatcaagt

SEQ ID NO: 117908 - DNA, 25 bp, Canis familiaris
gaccaggggaccagtataataatct

SEQ ID NO: 117909 - DNA, 25 bp, Canis familiaris
gaccgagaggccccggattagacac

SEQ ID NO: 117910 - DNA, 25 bp, Canis familiaris
gaccgagaccgaattggcatttcca

SEQ ID NO: 117911 - DNA, 25 bp, Canis familiaris
gaccaagaccgatttcaagtttcaa

SEQ ID NO: 117912 - DNA, 25 bp, Canis familiaris
gacccattcttatttcaatttctcc

SEQ ID NO: 117913 - DNA, 25 bp, Canis familiaris
gacccatatttgtattccatttaca

SEQ ID NO: 117914 - DNA, 25 bp, Canis familiaris
gacccattgataaattccttacaca

SEQ ID NO: 117915 - DNA, 25 bp, Canis familiaris
gacccttgatatgcttgtttagctc

SEQ ID NO: 117916 - DNA, 25 bp, Canis familiaris
gaccctctgtgacttatgtcttagt

SEQ ID NO: 117917 - DNA, 25 bp, Canis familiaris
gaccatccttggttttctacagatt

SEQ ID NO: 117918 - DNA, 25 bp, Canis familiaris
gagcctcccaagtttcttaaatcga

SEQ ID NO: 117919 - DNA, 25 bp, Canis familiaris
gagttcccgaatctgttaaaaatgc

SEQ ID NO: 117920 - DNA, 25 bp, Canis familiaris
gagccccctcaatagtttaataaga

SEQ ID NO: 117921 - DNA, 25 bp, Canis familiaris
gaccaatccctagaatttaatggga

SEQ ID NO: 117922 - DNA, 25 bp, Canis familiaris
gaccgtccctattgcctagaaaggg

SEQ ID NO: 117923 - DNA, 25 bp, Canis familiaris
gagccgtcccaatgccagtaaaggg

SEQ ID NO: 117924 - DNA, 25 bp, Canis familiaris
gaccttgcccgatccatgataacgg

SEQ ID NO: 117925 - DNA, 25 bp, Canis familiaris
gacctactacaaggccacagaacct

SEQ ID NO: 117926 - DNA, 25 bp, Canis familiaris
gaccgagtccatttctacaagttct

SEQ ID NO: 117927 - DNA, 25 bp, Canis familiaris
gacctactacactttatacagctcc

SEQ ID NO: 117928 - DNA, 25 bp, Canis familiaris
gaccttaaatcattctgcaaagctt

SEQ ID NO: 117929 - DNA, 25 bp, Canis familiaris
gacctcattggacatggcacaactt

SEQ ID NO: 117930 - DNA, 25 bp, Canis familiaris
gaccccatggtgcagtgcatcattg

SEQ ID NO: 117931 - DNA, 25 bp, Canis familiaris
gacccgctaggccatgatatgattc

SEQ ID NO: 117932 - DNA, 25 bp, Canis familiaris
gacccttgggcactatgcagaagca

SEQ ID NO: 117933 - DNA, 25 bp, Canis familiaris
gacccttgaggatcatgtacatgca

SEQ ID NO: 117934 - DNA, 25 bp, Canis familiaris
gaccgttgtcagtgcatgttcacgt

SEQ ID NO: 117935 - DNA, 25 bp, Canis familiaris
gagccgtgttctgtgttttggtcgg

SEQ ID NO: 117936 - DNA, 25 bp, Canis familiaris
gaccgtatgtctgatctctattgct

SEQ ID NO: 117937 - DNA, 25 bp, Canis familiaris
gaccctagtctatgatcaactgctt

SEQ ID NO: 117938 - DNA, 25 bp, Canis familiaris
gaccgtgaggaacgtcaactcctcc

SEQ ID NO: 117939 - DNA, 25 bp, Canis familiaris
gaccctcaagagttaagactcctcc

SEQ ID NO: 117940 - DNA, 25 bp, Canis familiaris
gacccttgataggctacgtgtcctg

SEQ ID NO: 117941 - DNA, 25 bp, Canis familiaris
gacccttgaaccacaagacggccac

SEQ ID NO: 117942 - DNA, 25 bp, Canis familiaris
gaccagttacccatcaaggtggact

SEQ ID NO: 117943 - DNA, 25 bp, Canis familiaris
gacctttctcctgttagagtggcct

SEQ ID NO: 117944 - DNA, 25 bp, Canis familiaris
gacccttagcctgatttggggcctg

SEQ ID NO: 117945 - DNA, 25 bp, Canis familiaris
gaccctgggaatcatcttgggagcc

SEQ ID NO: 117946 - DNA, 25 bp, Canis familiaris
gacctattggaaaagatctgggact

SEQ ID NO: 117947 - DNA, 25 bp, Canis familiaris
gaccgtgtggaaacagcagttggga

SEQ ID NO: 117948 - DNA, 25 bp, Canis familiaris
gacctggtggtcatcgagggcatgg

SEQ ID NO: 117949 - DNA, 25 bp, Canis familiaris
gacctgaggggcttaggtggcccct

SEQ ID NO: 117950 - DNA, 25 bp, Canis familiaris
gaccgtaggtgcttgacttgagctg

SEQ ID NO: 117951 - DNA, 25 bp, Canis familiaris
gagcctttagtgctacttacgggag

SEQ ID NO: 117952 - DNA, 25 bp, Canis familiaris
gagccccacttgcattttgatcggg

SEQ ID NO: 117953 - DNA, 25 bp, Canis familiaris
gagcccccttcgacttaactgaagg

SEQ ID NO: 117954 - DNA, 25 bp, Canis familiaris
gagcccccttcgacttaactgaagg

SEQ ID NO: 117955 - DNA, 25 bp, Canis familiaris
gagcccccttcgacttaactgaagg

SEQ ID NO: 117956 - DNA, 25 bp, Canis familiaris
gagcccccttcgacttaactgaagg

SEQ ID NO: 117957 - DNA, 25 bp, Canis familiaris
gagcccccttcgacttaactgaagg

SEQ ID NO: 117958 - DNA, 25 bp, Canis familiaris
gagcccccttcgacttaactgaagg

SEQ ID NO: 117959 - DNA, 25 bp, Canis familiaris
gacccatccattagtccatcaatgt

SEQ ID NO: 117960 - DNA, 25 bp, Canis familiaris
gaccccacataaagccattgatcat

SEQ ID NO: 117961 - DNA, 25 bp, Canis familiaris
gacctccagatcatcgacttgagct

SEQ ID NO: 117962 - DNA, 25 bp, Canis familiaris
gacctccgacaaggacatgtacctg

SEQ ID NO: 117963 - DNA, 25 bp, Canis familiaris
gaccgccaccaaggaattctcgtgg

SEQ ID NO: 117964 - DNA, 25 bp, Canis familiaris
gaccgcaaatggggcgtatggcgtg

SEQ ID NO: 117965 - DNA, 25 bp, Canis familiaris
gaccgacaaggcatcggcaggcgga

SEQ ID NO: 117966 - DNA, 25 bp, Canis familiaris
gacccctgagcggttggaggaggag

SEQ ID NO: 117967 - DNA, 25 bp, Canis familiaris
gacccctgaggtttggaatcacgat

SEQ ID NO: 117968 - DNA, 25 bp, Canis familiaris
gacccctgactgaggtcctagagcc

SEQ ID NO: 117969 - DNA, 25 bp, Canis familiaris
gaccctctcctcaaaaactagtcca

SEQ ID NO: 117970 - DNA, 25 bp, Canis familiaris
gaccctatccttgaaacttgagctc

SEQ ID NO: 117971 - DNA, 25 bp, Canis familiaris
gacccgtccagggacaggtgggctc

SEQ ID NO: 117972 - DNA, 25 bp, Canis familiaris
gaccgcgtccagaagaacttgtttt

SEQ ID NO: 117973 - DNA, 25 bp, Canis familiaris
gacctgtatccattgtaccttgtat

SEQ ID NO: 117974 - DNA, 25 bp, Canis familiaris
gaccattattatttccctatctaga

SEQ ID NO: 117975 - DNA, 25 bp, Canis familiaris
gaccttgattcaacaacctcacgaa

SEQ ID NO: 117976 - DNA, 25 bp, Canis familiaris
gacctctttcaataaatccgaccga

SEQ ID NO: 117977 - DNA, 25 bp, Canis familiaris
gaccctgttcaattataatctccaa

SEQ ID NO: 117978 - DNA, 25 bp, Canis familiaris
gaccctttgcaaaacacatcatcca

SEQ ID NO: 117979 - DNA, 25 bp, Canis familiaris
gaccctggcatccaaagccattgaa

SEQ ID NO: 117980 - DNA, 25 bp, Canis familiaris
gacccggatcaccaagctgattgag

SEQ ID NO: 117981 - DNA, 25 bp, Canis familiaris
gaccccaactctcatcttgtatggg

SEQ ID NO: 117982 - DNA, 25 bp, Canis familiaris
gacccctgaactcattgagttgagg

SEQ ID NO: 117983 - DNA, 25 bp, Canis familiaris
gacctccgaagtcttgcaaagagcc

SEQ ID NO: 117984 - DNA, 25 bp, Canis familiaris
gacctcacgggactattacactggg

SEQ ID NO: 117985 - DNA, 25 bp, Canis familiaris
gacccccagtggcactaacgtgggc

SEQ ID NO: 117986 - DNA, 25 bp, Canis familiaris
gaccccctggtgtgtatcacgaggg

SEQ ID NO: 117987 - DNA, 25 bp, Canis familiaris
gaccctccatagaaggacaccgggg

SEQ ID NO: 117988 - DNA, 25 bp, Canis familiaris
gacccccgtattaacactggctggg

SEQ ID NO: 117989 - DNA, 25 bp, Canis familiaris
gaccccacgtactacaactcgtggc

SEQ ID NO: 117990 - DNA, 25 bp, Canis familiaris
gaccccaagaacacgcacatcgtgg

SEQ ID NO: 117991 - DNA, 25 bp, Canis familiaris
gacccgaaggagtggattggcgcgt

SEQ ID NO: 117992 - DNA, 25 bp, Canis familiaris
gacccgcagggaggggaagagctgg

SEQ ID NO: 117993 - DNA, 25 bp, Canis familiaris
gaccctgcagcagaaggccaaggtg

SEQ ID NO: 117994 - DNA, 25 bp, Canis familiaris
gacccgcacaagagagccgaattga

SEQ ID NO: 117995 - DNA, 25 bp, Canis familiaris
gacctggaatcaaaggcccaaggaa

SEQ ID NO: 117996 - DNA, 25 bp, Canis familiaris
gacctggagtctgaacaccaaagat

SEQ ID NO: 117997 - DNA, 25 bp, Canis familiaris
gacctgtgacctcaaaacaataaac

SEQ ID NO: 117998 - DNA, 25 bp, Canis familiaris
gaccagccccatcgtaagaaggaaa

SEQ ID NO: 117999 - DNA, 25 bp, Canis familiaris
gaccaggccaagctgggacggagag

SEQ ID NO: 118000 - DNA, 25 bp, Canis familiaris
gaccgggcaatcttgggaagggagg

SEQ ID NO: 118001 - DNA, 25 bp, Canis familiaris
gaccgtgacgattgggagaatgggc

SEQ ID NO: 118002 - DNA, 25 bp, Canis familiaris
gaccgtgacgattgggagaatgggc

SEQ ID NO: 118003 - DNA, 25 bp, Canis familiaris
gaccctcgccttcgatgaatatggg

SEQ ID NO: 118004 - DNA, 25 bp, Canis familiaris
gaccctgtgccttgagtgaattacc

SEQ ID NO: 118005 - DNA, 25 bp, Canis familiaris
gaccctgacctcaaggaaattccca

SEQ ID NO: 118006 - DNA, 25 bp, Canis familiaris
gaccctactctcaaaaatgttccct

SEQ ID NO: 118007 - DNA, 25 bp, Canis familiaris
gacccgtctctgcaagagatgtgct

SEQ ID NO: 118008 - DNA, 25 bp, Canis familiaris
gaccattccgcttcaaggcagagca

SEQ ID NO: 118009 - DNA, 25 bp, Canis familiaris
gaccatgtgcggcccaatgggaaca

SEQ ID NO: 118010 - DNA, 25 bp, Canis familiaris
gaccgtgcagggtgagggcaggccc

SEQ ID NO: 118011 - DNA, 25 bp, Canis familiaris
gaccgtgctgggttggaatgtgaac

SEQ ID NO: 118012 - DNA, 25 bp, Canis familiaris
gaccgtgtggttcggcagcatgtac

SEQ ID NO: 118013 - DNA, 25 bp, Canis familiaris
gaccggtggtgtttgaggatcctgg

SEQ ID NO: 118014 - DNA, 25 bp, Canis familiaris
gacctggtgtgtcattaaaccttgg

SEQ ID NO: 118015 - DNA, 25 bp, Canis familiaris
gacctggcttctgtgaacaacttgc

SEQ ID NO: 118016 - DNA, 25 bp, Canis familiaris
gacctcggttccaaatgaacttgtc

SEQ ID NO: 118017 - DNA, 25 bp, Canis familiaris
gaccttggtcccgacaagtatctgt

SEQ ID NO: 118018 - DNA, 25 bp, Canis familiaris
gacctttgcatcagggaacttctgg

SEQ ID NO: 118019 - DNA, 25 bp, Canis familiaris
gacctagtactttggaggcctgctg

SEQ ID NO: 118020 - DNA, 25 bp, Canis familiaris
gacctaaaccagcaggcagcacttg

SEQ ID NO: 118021 - DNA, 25 bp, Canis familiaris
gacccgggccagcaggagacgggaa

SEQ ID NO: 118022 - DNA, 25 bp, Canis familiaris
gaccctggggagccaggctgacggg

SEQ ID NO: 118023 - DNA, 25 bp, Canis familiaris
gaccgttggtgaccacggtccttgt

SEQ ID NO: 118024 - DNA, 25 bp, Canis familiaris
gaccgatctgggtcccaggacactt

SEQ ID NO: 118025 - DNA, 25 bp, Canis familiaris
gaccgtcgggtggcagcaacaaata

SEQ ID NO: 118026 - DNA, 25 bp, Canis familiaris
gaccggctggtgatgcacacaaagc

SEQ ID NO: 118027 - DNA, 25 bp, Canis familiaris
gacctgtctgccattacaaaaccgt

SEQ ID NO: 118028 - DNA, 25 bp, Canis familiaris
gaccttgctgcctttgacaagtctc

SEQ ID NO: 118029 - DNA, 25 bp, Canis familiaris
gacctgtgggcaatgctaactcttc

SEQ ID NO: 118030 - DNA, 25 bp, Canis familiaris
gaccgggacattcaactcctaggtt

SEQ ID NO: 118031 - DNA, 25 bp, Canis familiaris
gacctgcaggacatttttcttaggt

SEQ ID NO: 118032 - DNA, 25 bp, Canis familiaris
gaccttggctcttttttcttaggct

SEQ ID NO: 118033 - DNA, 25 bp, Canis familiaris
gaccttcagctttttgggctttgag

SEQ ID NO: 118034 - DNA, 25 bp, Canis familiaris
gaccttcagctttttgggctttgag

SEQ ID NO: 118035 - DNA, 25 bp, Canis familiaris
gaccttcagctttttgggctttgag

SEQ ID NO: 118036 - DNA, 25 bp, Canis familiaris
gacctgtacctgtccaaggtggtgc

SEQ ID NO: 118037 - DNA, 25 bp, Canis familiaris
gaccctgaggttccagagtctggtg

SEQ ID NO: 118038 - DNA, 25 bp, Canis familiaris
gaccctgggtattcaattctgtgtt

SEQ ID NO: 118039 - DNA, 25 bp, Canis familiaris
gaccctggacatttgcactgattgt

SEQ ID NO: 118040 - DNA, 25 bp, Canis familiaris
gacctgtgctaaaagcatctattta

SEQ ID NO: 118041 - DNA, 25 bp, Canis familiaris
gaccgtctacaatatctttatgcca

SEQ ID NO: 118042 - DNA, 25 bp, Canis familiaris
gaccaggtaacatatgatttcactc

SEQ ID NO: 118043 - DNA, 25 bp, Canis familiaris
gaccgggagaacggtctctctctgc

SEQ ID NO: 118044 - DNA, 25 bp, Canis familiaris
gaccggaagttcaagctcgtctgct

SEQ ID NO: 118045 - DNA, 25 bp, Canis familiaris
gacctgataatatgaagcaccttgc

SEQ ID NO: 118046 - DNA, 25 bp, Canis familiaris
gacctgtagcatgtggacacctcta

SEQ ID NO: 118047 - DNA, 25 bp, Canis familiaris
gacctttcaagtagtccacttaatc

SEQ ID NO: 118048 - DNA, 25 bp, Canis familiaris
gacctttaaaagcacccacaatgtt

SEQ ID NO: 118049 - DNA, 25 bp, Canis familiaris
gaccttctaaaacatctgcacactg

SEQ ID NO: 118050 - DNA, 25 bp, Canis familiaris
gaccttaaaggctttcacaccgtca

SEQ ID NO: 118051 - DNA, 25 bp, Canis familiaris
gaccttgtaacggttcagcaaccca

SEQ ID NO: 118052 - DNA, 25 bp, Canis familiaris
gaccttgtaaagattcatccccacg

SEQ ID NO: 118053 - DNA, 25 bp, Canis familiaris
gacctgtcacagttgttatcatcga

SEQ ID NO: 118054 - DNA, 25 bp, Canis familiaris
gaccgatacatgtcagtttgtccag

SEQ ID NO: 118055 - DNA, 25 bp, Canis familiaris
gaccgtcagatggctggggtcacgc

SEQ ID NO: 118056 - DNA, 25 bp, Canis familiaris
gacctgctccgccaggagagttagc

SEQ ID NO: 118057 - DNA, 25 bp, Canis familiaris
gacctgtccgggatcagttaggccc

SEQ ID NO: 118058 - DNA, 25 bp, Canis familiaris
gaccttcaccggtacatcattgggc

SEQ ID NO: 118059 - DNA, 25 bp, Canis familiaris
gaccccccagggaattaggatgctg

SEQ ID NO: 118060 - DNA, 25 bp, Canis familiaris
gaccatcccgagctgaatatcgggg

SEQ ID NO: 118061 - DNA, 25 bp, Canis familiaris
gaccatcccgagctgaatatcgggg

SEQ ID NO: 118062 - DNA, 25 bp, Canis familiaris
gaccccaagacttgcaagctcgggg

SEQ ID NO: 118063 - DNA, 25 bp, Canis familiaris
gaccctacaactggcaagcacaagg

SEQ ID NO: 118064 - DNA, 25 bp, Canis familiaris
gaccctcgcacaagccaaggagatt

SEQ ID NO: 118065 - DNA, 25 bp, Canis familiaris
gaccccaaatagccaaagcaacttt

SEQ ID NO: 118066 - DNA, 25 bp, Canis familiaris
gacctctcaaaaagcaaaaactcca

SEQ ID NO: 118067 - DNA, 25 bp, Canis familiaris
gacctccacaaaaagtactcctaca

SEQ ID NO: 118068 - DNA, 25 bp, Canis familiaris
gaccaccagaagcagttttcgttca

SEQ ID NO: 118069 - DNA, 25 bp, Canis familiaris
gacctccttcaggagggtctccttc

SEQ ID NO: 118070 - DNA, 25 bp, Canis familiaris
gacctgtctttaggaagtcccattc

SEQ ID NO: 118071 - DNA, 25 bp, Canis familiaris
gacctacttcttgatagtggcctac

SEQ ID NO: 118072 - DNA, 25 bp, Canis familiaris
gacccctacttgcaggatgggatag

SEQ ID NO: 118073 - DNA, 25 bp, Canis familiaris
gacccccccagaaggagggtcatca

SEQ ID NO: 118074 - DNA, 25 bp, Canis familiaris
gaccctcagccagggatcggggtac

SEQ ID NO: 118075 - DNA, 25 bp, Canis familiaris
gaccgatcaccggtgtgggggttct

SEQ ID NO: 118076 - DNA, 25 bp, Canis familiaris
gaccgatcaccggtgggcatgtggg

SEQ ID NO: 118077 - DNA, 25 bp, Canis familiaris
gaccctcacatctcattggtgtggg

SEQ ID NO: 118078 - DNA, 25 bp, Canis familiaris
gacctgccttcaactttgggcatgg

SEQ ID NO: 118079 - DNA, 25 bp, Canis familiaris
gaccttgctatcattttgctgcgga

SEQ ID NO: 118080 - DNA, 25 bp, Canis familiaris
gacctgctgtacacttatgtctgcc

SEQ ID NO: 118081 - DNA, 25 bp, Canis familiaris
gacctgctgaatcactatgttgtac

SEQ ID NO: 118082 - DNA, 25 bp, Canis familiaris
gacctgggatatgcttgtcctgaac

SEQ ID NO: 118083 - DNA, 25 bp, Canis familiaris
gaccggcgattcgttggttggagga

SEQ ID NO: 118084 - DNA, 25 bp, Canis familiaris
gaccgaagagctctgtggtttgaga

SEQ ID NO: 118085 - DNA, 25 bp, Canis familiaris
gacctaggggccacactttgagaac

SEQ ID NO: 118086 - DNA, 25 bp, Canis familiaris
gaccagaggggaatccagtcattgg

SEQ ID NO: 118087 - DNA, 25 bp, Canis familiaris
gaccagattaacaccattgattgct

SEQ ID NO: 118088 - DNA, 25 bp, Canis familiaris
gaccgcacgtaaaccatggctgtct

SEQ ID NO: 118089 - DNA, 25 bp, Canis familiaris
gaccccttaaagatgtcgtctgctt

SEQ ID NO: 118090 - DNA, 25 bp, Canis familiaris
gaccctcctcataggttgtttcttc

SEQ ID NO: 118091 - DNA, 25 bp, Canis familiaris
gaccagcctctgaaggttattgcca

SEQ ID NO: 118092 - DNA, 25 bp, Canis familiaris
gaccggcttgaaacttatgggaatg

SEQ ID NO: 118093 - DNA, 25 bp, Canis familiaris
gagcccagtgttgacttacggttgt

SEQ ID NO: 118094 - DNA, 25 bp, Canis familiaris
gacctcagtttgtacttgattgttt

SEQ ID NO: 118095 - DNA, 25 bp, Canis familiaris
gaccacgttgtactcgtacttgtcc

SEQ ID NO: 118096 - DNA, 25 bp, Canis familiaris
gaccctgtctgtattttcttgatgg

SEQ ID NO: 118097 - DNA, 25 bp, Canis familiaris
gaccctgacagcaatattatgtatt

SEQ ID NO: 118098 - DNA, 25 bp, Canis familiaris
gaccgctaaaccttgatgtcattct

SEQ ID NO: 118099 - DNA, 25 bp, Canis familiaris
gacctgctcgacacagtgagtttct

SEQ ID NO: 118100 - DNA, 25 bp, Canis familiaris
gacctgcacaacttcaatgaattcc

SEQ ID NO: 118101 - DNA, 25 bp, Canis familiaris
gacctactgcatcgacaatgaggct

SEQ ID NO: 118102 - DNA, 25 bp, Canis familiaris
gacccgtcaggagatagggcatctg

SEQ ID NO: 118103 - DNA, 25 bp, Canis familiaris
gaccctgaaagagctgaacgcgcgc

SEQ ID NO: 118104 - DNA, 25 bp, Canis familiaris
gaccctgaaaatgatcagacacggc

SEQ ID NO: 118105 - DNA, 25 bp, Canis familiaris
gaccgattatttgtcgcacacgtct

SEQ ID NO: 118106 - DNA, 25 bp, Canis familiaris
gatcgggttgttgtccgactatctc

SEQ ID NO: 118107 - DNA, 25 bp, Canis familiaris
gaccaggttgtctcctgcgacttca

SEQ ID NO: 118108 - DNA, 25 bp, Canis familiaris
gaccaactttcccatctgggttaga

SEQ ID NO: 118109 - DNA, 25 bp, Canis familiaris
gacccctctcttttctgtgagagta

SEQ ID NO: 118110 - DNA, 25 bp, Canis familiaris
gaccgcacttatgcattatgctgtg

SEQ ID NO: 118111 - DNA, 25 bp, Canis familiaris
gacctgcacttctctaatgatttga

SEQ ID NO: 118112 - DNA, 25 bp, Canis familiaris
gacccgctcacgataagctttggaa

SEQ ID NO: 118113 - DNA, 25 bp, Canis familiaris
gagccctacctgagaacttatggga

SEQ ID NO: 118114 - DNA, 25 bp, Canis familiaris
gaccattcccgtaaatttatgggag

SEQ ID NO: 118115 - DNA, 25 bp, Canis familiaris
gatccaccccgaacgaataacgaag

SEQ ID NO: 118116 - DNA, 25 bp, Canis familiaris
gaccaccgtagacccagatactgga

SEQ ID NO: 118117 - DNA, 25 bp, Canis familiaris
gaccgtcttcgagtacagaacgcag

SEQ ID NO: 118118 - DNA, 25 bp, Canis familiaris
gaccaggtctggacaaaaaagcagg

SEQ ID NO: 118119 - DNA, 25 bp, Canis familiaris
gattcggtcgttctggaaaagaaag

SEQ ID NO: 118120 - DNA, 25 bp, Canis familiaris
gaccggtatttgatgagaacgagac

SEQ ID NO: 118121 - DNA, 25 bp, Canis familiaris
gaccggatttacaatgttcacacag

SEQ ID NO: 118122 - DNA, 25 bp, Canis familiaris
gaccggcaaaacaatctccacaaca

SEQ ID NO: 118123 - DNA, 25 bp, Canis familiaris
gaccaggagaaacatcctgaccccc

SEQ ID NO: 118124 - DNA, 25 bp, Canis familiaris
gaccggaacaaggcagccgagctcc

SEQ ID NO: 118125 - DNA, 25 bp, Canis familiaris
gaccggcgcacaagggtgagattcc

SEQ ID NO: 118126 - DNA, 25 bp, Canis familiaris
gaccggcagcgaggacatgtgcgtg

SEQ ID NO: 118127 - DNA, 25 bp, Canis familiaris
gacctgtaggcagtgtctgtcgggc

SEQ ID NO: 118128 - DNA, 25 bp, Canis familiaris
gaccgtcaaggtactgtgcctagcg

SEQ ID NO: 118129 - DNA, 25 bp, Canis familiaris
gacctgaaggtggagctgtcccagc

SEQ ID NO: 118130 - DNA, 25 bp, Canis familiaris
gacctgaggagaagactggcccagt

SEQ ID NO: 118131 - DNA, 25 bp, Canis familiaris
gacctgggactagtggagcctcagc

SEQ ID NO: 118132 - DNA, 25 bp, Canis familiaris
gaccgtagattatcgatcccatcaa

SEQ ID NO: 118133 - DNA, 25 bp, Canis familiaris
gaccgaatgggttaatctgcaccaa

SEQ ID NO: 118134 - DNA, 25 bp, Canis familiaris
gaccaagcaggagaccctgaccaac

SEQ ID NO: 118135 - DNA, 25 bp, Canis familiaris
gaccaaggtgacaccagcacgaaaa

SEQ ID NO: 118136 - DNA, 25 bp, Canis familiaris
gaccagaagggtcacagacgaacct

SEQ ID NO: 118137 - DNA, 25 bp, Canis familiaris
gaccataaaggtctcgacgcagtca

SEQ ID NO: 118138 - DNA, 25 bp, Canis familiaris
gacctaacagggcatccgaacttga

SEQ ID NO: 118139 - DNA, 25 bp, Canis familiaris
gaccattgcaatggggcaccggact

SEQ ID NO: 118140 - DNA, 25 bp, Canis familiaris
gaccacgcagtctgtgatggggttc

SEQ ID NO: 118141 - DNA, 25 bp, Canis familiaris
gaccccaccaatttgtgcgagttcc

SEQ ID NO: 118142 - DNA, 25 bp, Canis familiaris
gatgaccccaaatcctggagttcac

SEQ ID NO: 118143 - DNA, 25 bp, Canis familiaris
gaccttccagaatccagttgtcacc

SEQ ID NO: 118144 - DNA, 25 bp, Canis familiaris
gacctgtggagaaccttttgtgccc

SEQ ID NO: 118145 - DNA, 25 bp, Canis familiaris
gacctcatggaagccattcggttcc

SEQ ID NO: 118146 - DNA, 25 bp, Canis familiaris
gaccacatagtcaccaacgagaacc

SEQ ID NO: 118147 - DNA, 25 bp, Canis familiaris
gacctcaagtccttcagaaccagac

SEQ ID NO: 118148 - DNA, 25 bp, Canis familiaris
gaccccagagcctaagaacagcagc

SEQ ID NO: 118149 - DNA, 25 bp, Canis familiaris
gaccccaggccgtgatggcagagat

SEQ ID NO: 118150 - DNA, 25 bp, Canis familiaris
gacctcagtcccaaggtggcagaga

SEQ ID NO: 118151 - DNA, 25 bp, Canis familiaris
gaccgcatgtcagaaggagatcacg

SEQ ID NO: 118152 - DNA, 25 bp, Canis familiaris
gaccgtgaaggccaagcagatctct

SEQ ID NO: 118153 - DNA, 25 bp, Canis familiaris
gacctgatgtatgccaagcgtgcct

SEQ ID NO: 118154 - DNA, 25 bp, Canis familiaris
gacctgcatgaagttctacgcacgt

SEQ ID NO: 118155 - DNA, 25 bp, Canis familiaris
gacctgctgaatgttaagatggctc

SEQ ID NO: 118156 - DNA, 25 bp, Canis familiaris
gaccgcgcacattctgagagagagg

SEQ ID NO: 118157 - DNA, 25 bp, Canis familiaris
gaccccaatgccaagaaagtgacac

SEQ ID NO: 118158 - DNA, 25 bp, Canis familiaris
gaccccactccaagcagaagatgaa

SEQ ID NO: 118159 - DNA, 25 bp, Canis familiaris
gaccccagccctgatgaggatgagg

SEQ ID NO: 118160 - DNA, 25 bp, Canis familiaris
gaccacccgcctgaaggaggtgttc

SEQ ID NO: 118161 - DNA, 25 bp, Canis familiaris
gacctactccctgcacagaaagatg

SEQ ID NO: 118162 - DNA, 25 bp, Canis familiaris
gacctaccacttgccaggcagagtg

SEQ ID NO: 118163 - DNA, 25 bp, Canis familiaris
gagcctaatccaagcccaggaaggg

SEQ ID NO: 118164 - DNA, 25 bp, Canis familiaris
gagaaaatcgatatccagctaccgg

SEQ ID NO: 118165 - DNA, 25 bp, Canis familiaris
gagactacaagctgtaacccacgta

SEQ ID NO: 118166 - DNA, 25 bp, Canis familiaris
gacctaatctgtatgaacttccgtt

SEQ ID NO: 118167 - DNA, 25 bp, Canis familiaris
gacctaattgattcggagttacccg

SEQ ID NO: 118168 - DNA, 25 bp, Canis familiaris
gaccacatttgatccgaaggacctc

SEQ ID NO: 118169 - DNA, 25 bp, Canis familiaris
gacctctactcattccctagagatc

SEQ ID NO: 118170 - DNA, 25 bp, Canis familiaris
gaccacgtcatatcacctggagtct

SEQ ID NO: 118171 - DNA, 25 bp, Canis familiaris
gacctgggctgaaatcgggagttgg

SEQ ID NO: 118172 - DNA, 25 bp, Canis familiaris
gacctgagactaccacagaaggttc

SEQ ID NO: 118173 - DNA, 25 bp, Canis familiaris
gacctgggctgggacacaaggggca

SEQ ID NO: 118174 - DNA, 25 bp, Canis familiaris
gacctgtggtcagggagcccagggc

SEQ ID NO: 118175 - DNA, 25 bp, Canis familiaris
gaccgtccagcaggggacgcagggc

SEQ ID NO: 118176 - DNA, 25 bp, Canis familiaris
gaccggcgcaagacggaccagagcg

SEQ ID NO: 118177 - DNA, 25 bp, Canis familiaris
gaccggcgcaagacggaccagagcg

SEQ ID NO: 118178 - DNA, 25 bp, Canis familiaris
gaccggcgcaagacggaccagagcg

SEQ ID NO: 118179 - DNA, 25 bp, Canis familiaris
gaccgtgtgaagaagtgcattggag

SEQ ID NO: 118180 - DNA, 25 bp, Canis familiaris
gaccacttgaattcttcattggctg

SEQ ID NO: 118181 - DNA, 25 bp, Canis familiaris
gaccattttgtgtaatccagagctg

SEQ ID NO: 118182 - DNA, 25 bp, Canis familiaris
gaccatagttttacaccaagttatt

SEQ ID NO: 118183 - DNA, 25 bp, Canis familiaris
gaccattggctttctcccaaatatt

SEQ ID NO: 118184 - DNA, 25 bp, Canis familiaris
gaccttgagcttttgccactttaat

SEQ ID NO: 118185 - DNA, 25 bp, Canis familiaris
gaccttgcaaattcagccactgctt

SEQ ID NO: 118186 - DNA, 25 bp, Canis familiaris
gacctctcatttgatggcagctctt

SEQ ID NO: 118187 - DNA, 25 bp, Canis familiaris
gaccccactagaatggtgctctggc

SEQ ID NO: 118188 - DNA, 25 bp, Canis familiaris
gaccccagtggggagttcatggaca

SEQ ID NO: 118189 - DNA, 25 bp, Canis familiaris
gacctcacaggtcaagctggacgtc

SEQ ID NO: 118190 - DNA, 25 bp, Canis familiaris
gaccatcaccctggaggtggagccc

SEQ ID NO: 118191 - DNA, 25 bp, Canis familiaris
gaccatcaccctggaggtggagccc

SEQ ID NO: 118192 - DNA, 25 bp, Canis familiaris
gacctgccactcagtgagggagaca

SEQ ID NO: 118193 - DNA, 25 bp, Canis familiaris
gaccgaagcattcctgcagggaggc

SEQ ID NO: 118194 - DNA, 25 bp, Canis familiaris
gacctgacgattgggagaatgggct

SEQ ID NO: 118195 - DNA, 25 bp, Canis familiaris
gaccggcgtatcctgcagaatgccg

SEQ ID NO: 118196 - DNA, 25 bp, Canis familiaris
gaccgggtcatgtacagaagccgcc

SEQ ID NO: 118197 - DNA, 25 bp, Canis familiaris
gaccacggtcacgacaaagcgacga

SEQ ID NO: 118198 - DNA, 25 bp, Canis familiaris
gaccacctattcccaaacgaatgct

SEQ ID NO: 118199 - DNA, 25 bp, Canis familiaris
gaccactctttcgttgaaaggtgat

SEQ ID NO: 118200 - DNA, 25 bp, Canis familiaris
gaccacttttgccactatgggagga

SEQ ID NO: 118201 - DNA, 25 bp, Canis familiaris
gaccaggtcatcgactttgagggga

SEQ ID NO: 118202 - DNA, 25 bp, Canis familiaris
gacctaagcatccactttaagaaac

SEQ ID NO: 118203 - DNA, 25 bp, Canis familiaris
gacctagaagacattctcaaataga

SEQ ID NO: 118204 - DNA, 25 bp, Canis familiaris
gacctaaaacagttcttcttgcaga

SEQ ID NO: 118205 - DNA, 25 bp, Canis familiaris
gacctatattagacatttttccaga

SEQ ID NO: 118206 - DNA, 25 bp, Canis familiaris
gacctgtaatagactgagctttgca

SEQ ID NO: 118207 - DNA, 25 bp, Canis familiaris
gacctcctagagactgagtgtccga

SEQ ID NO: 118208 - DNA, 25 bp, Canis familiaris
gacctccacagcatcgagggtcgat

SEQ ID NO: 118209 - DNA, 25 bp, Canis familiaris
gaccccactcctagagtttctgatt

SEQ ID NO: 118210 - DNA, 25 bp, Canis familiaris
gaccccactaataatgctaccttct

SEQ ID NO: 118211 - DNA, 25 bp, Canis familiaris
gaccaaccttgcatagcgtactttg

SEQ ID NO: 118212 - DNA, 25 bp, Canis familiaris
gaccaatccggaaagtcaacattta

SEQ ID NO: 118213 - DNA, 25 bp, Canis familiaris
gacctcccaggaagcatatctacat

SEQ ID NO: 118214 - DNA, 25 bp, Canis familiaris
gaccgcctcgtaactacatgtattc

SEQ ID NO: 118215 - DNA, 25 bp, Canis familiaris
gaccgcccagatattgatttgttcg

SEQ ID NO: 118216 - DNA, 25 bp, Canis familiaris
gaccgcacacctactagttgtttgt

SEQ ID NO: 118217 - DNA, 25 bp, Canis familiaris
gaccaccaccatattctattttgtt

SEQ ID NO: 118218 - DNA, 25 bp, Canis familiaris
gaccgacctcaatttgtacttgatt

SEQ ID NO: 118219 - DNA, 25 bp, Canis familiaris
gacccctctgaatttgcttattgat

SEQ ID NO: 118220 - DNA, 25 bp, Canis familiaris
gacctctttgatgttgtaattatta

SEQ ID NO: 118221 - DNA, 25 bp, Canis familiaris
gacctcttcgttcagtactgttgtg

SEQ ID NO: 118222 - DNA, 25 bp, Canis familiaris
gacctgcttctaggacagtagttct

SEQ ID NO: 118223 - DNA, 25 bp, Canis familiaris
gaccatgctttaggcaaaacgctca

SEQ ID NO: 118224 - DNA, 25 bp, Canis familiaris
gacctgcttttagataccgtactgt

SEQ ID NO: 118225 - DNA, 25 bp, Canis familiaris
gacctgccagtttaagacctgtgac

SEQ ID NO: 118226 - DNA, 25 bp, Canis familiaris
gaccagcacagttcaaacccatatt

SEQ ID NO: 118227 - DNA, 25 bp, Canis familiaris
gaccaactggacatgactccagata

SEQ ID NO: 118228 - DNA, 25 bp, Canis familiaris
gacctttgtgagctgcacctagaag

SEQ ID NO: 118229 - DNA, 25 bp, Canis familiaris
gaccttggagagtttcctgtatgag

SEQ ID NO: 118230 - DNA, 25 bp, Canis familiaris
gacctctgggtgttgttctatatgt

SEQ ID NO: 118231 - DNA, 25 bp, Canis familiaris
gacctcctgaggagcctctatgact

SEQ ID NO: 118232 - DNA, 25 bp, Canis familiaris
gacctgatctggctgtgccgaatgg

SEQ ID NO: 118233 - DNA, 25 bp, Canis familiaris
gacctgtactggatggctgagcaac

SEQ ID NO: 118234 - DNA, 25 bp, Canis familiaris
gaccttcctgtgctgggaagatcgt

SEQ ID NO: 118235 - DNA, 25 bp, Canis familiaris
gacctcctgtgcagtggaaaatcca

SEQ ID NO: 118236 - DNA, 25 bp, Canis familiaris
gacctctctgtctttgaaatatatt

SEQ ID NO: 118237 - DNA, 25 bp, Canis familiaris
gaccccttgtctggaatatgttctt

SEQ ID NO: 118238 - DNA, 25 bp, Canis familiaris
gaccacctggtcagaaagggctggc

SEQ ID NO: 118239 - DNA, 25 bp, Canis familiaris
gaccgtctggttcaatcaggtgatg

SEQ ID NO: 118240 - DNA, 25 bp, Canis familiaris
gaccgttcctttagctcaggagagc

SEQ ID NO: 118241 - DNA, 25 bp, Canis familiaris
gaccgttcctttagctcaggagagc

SEQ ID NO: 118242 - DNA, 25 bp, Canis familiaris
gacctgcttcctatcttagacacag

SEQ ID NO: 118243 - DNA, 25 bp, Canis familiaris
gacctggcttggccactatatgcaa

SEQ ID NO: 118244 - DNA, 25 bp, Canis familiaris
gacctacctgggccagagtgcagca

SEQ ID NO: 118245 - DNA, 25 bp, Canis familiaris
gaccgtcctggaggaggtcagcagg

SEQ ID NO: 118246 - DNA, 25 bp, Canis familiaris
gaccgtccgaaataggcatctggac

SEQ ID NO: 118247 - DNA, 25 bp, Canis familiaris
gaccgttcagagattaggcatctgg

SEQ ID NO: 118248 - DNA, 25 bp, Canis familiaris
gacctgtgctcatgttggtgtcatt

SEQ ID NO: 118249 - DNA, 25 bp, Canis familiaris
gaccatgatgtgtgtctgtatgttt

SEQ ID NO: 118250 - DNA, 25 bp, Canis familiaris
gaccagtgtgtgcagtgttacttct

SEQ ID NO: 118251 - DNA, 25 bp, Canis familiaris
gaccaggggtggttctaatctttct

SEQ ID NO: 118252 - DNA, 25 bp, Canis familiaris
gaccagagggggagtgaacctgcgg

SEQ ID NO: 118253 - DNA, 25 bp, Canis familiaris
gaccagaagaagagaggccccaggg

SEQ ID NO: 118254 - DNA, 25 bp, Canis familiaris
gagcccaacaggagggggccaggga

SEQ ID NO: 118255 - DNA, 25 bp, Canis familiaris
gaccaaactgacagggttgccagat

SEQ ID NO: 118256 - DNA, 25 bp, Canis familiaris
gacctcaactacatggtttacatgt

SEQ ID NO: 118257 - DNA, 25 bp, Canis familiaris
gacctgcaagcgtctgggttcaaat

SEQ ID NO: 118258 - DNA, 25 bp, Canis familiaris
gacctgcagcgtctgggtcaatgag

SEQ ID NO: 118259 - DNA, 25 bp, Canis familiaris
gaccacagcctgcggggaatgaacc

SEQ ID NO: 118260 - DNA, 25 bp, Canis familiaris
gaccacttgcccttgggacatgaat

SEQ ID NO: 118261 - DNA, 25 bp, Canis familiaris
gaccatgttcccttgggtctgtgac

SEQ ID NO: 118262 - DNA, 25 bp, Canis familiaris
gacctctccaacatggagattggaa

SEQ ID NO: 118263 - DNA, 25 bp, Canis familiaris
gaccgcctcaaggtgtttgatggga

SEQ ID NO: 118264 - DNA, 25 bp, Canis familiaris
gacctgcctcagagtgtgttggcgg

SEQ ID NO: 118265 - DNA, 25 bp, Canis familiaris
gacctcctagtgtatgatttggctt

SEQ ID NO: 118266 - DNA, 25 bp, Canis familiaris
gacctccttctgggactggtcattt

SEQ ID NO: 118267 - DNA, 25 bp, Canis familiaris
gaccactcttcagagatcggatacc

SEQ ID NO: 118268 - DNA, 25 bp, Canis familiaris
gacctctctggcttttcaggtcatc

SEQ ID NO: 118269 - DNA, 25 bp, Canis familiaris
gaccatgcatttgtttcgtatccgt

SEQ ID NO: 118270 - DNA, 25 bp, Canis familiaris
gagccatctggcggtgaccagtatc

SEQ ID NO: 118271 - DNA, 25 bp, Canis familiaris
gagcacattggctgtgagtcgacca

SEQ ID NO: 118272 - DNA, 25 bp, Canis familiaris
gagaggtggctggtagtctgcaagc

SEQ ID NO: 118273 - DNA, 25 bp, Canis familiaris
gagagttgactgcaaatagatcatg

SEQ ID NO: 118274 - DNA, 25 bp, Canis familiaris
gagcggtattcatattgagatgcaa

SEQ ID NO: 118275 - DNA, 25 bp, Canis familiaris
gagctggttaatgagtaacaaatgc

SEQ ID NO: 118276 - DNA, 25 bp, Canis familiaris
gagctgttctaagagggaagataca

SEQ ID NO: 118277 - DNA, 25 bp, Canis familiaris
gagcttcctactgcacctgaaggaa

SEQ ID NO: 118278 - DNA, 25 bp, Canis familiaris
gaccatgcattgtatacccatctga

SEQ ID NO: 118279 - DNA, 25 bp, Canis familiaris
gacctgatcatgtgaacctggaccc

SEQ ID NO: 118280 - DNA, 25 bp, Canis familiaris
gacctgatcatgtgacacttctcac

SEQ ID NO: 118281 - DNA, 25 bp, Canis familiaris
gaccttgcatgggacgtgtccccat

SEQ ID NO: 118282 - DNA, 25 bp, Canis familiaris
gacctagctgcagaggctgtgaatc

SEQ ID NO: 118283 - DNA, 25 bp, Canis familiaris
gacctcagatgtcaagtctcttctt

SEQ ID NO: 118284 - DNA, 25 bp, Canis familiaris
gaccagcagtatctagtatctccat

SEQ ID NO: 118285 - DNA, 25 bp, Canis familiaris
gaccagatgtaaatatataccttgt

SEQ ID NO: 118286 - DNA, 25 bp, Canis familiaris
gaccatttgactaaatcactccttg

SEQ ID NO: 118287 - DNA, 25 bp, Canis familiaris
gacctgttgaccaatatacccagtg

SEQ ID NO: 118288 - DNA, 25 bp, Canis familiaris
gacctgtagatggccaatagactca

SEQ ID NO: 118289 - DNA, 25 bp, Canis familiaris
gaccatgaatcgcccatgcaaactc

SEQ ID NO: 118290 - DNA, 25 bp, Canis familiaris
gacctggacggcgaggagagctacg

SEQ ID NO: 118291 - DNA, 25 bp, Canis familiaris
gacctgaacccgcgagaggacaggg

SEQ ID NO: 118292 - DNA, 25 bp, Canis familiaris
gaccggacaccgactggagagatga

SEQ ID NO: 118293 - DNA, 25 bp, Canis familiaris
gaccagctgaacatgttgggagaga

SEQ ID NO: 118294 - DNA, 25 bp, Canis familiaris
gaccatgaaactttttgctgagctg

SEQ ID NO: 118295 - DNA, 25 bp, Canis familiaris
gacctcaatcctcctttgtgaggct

SEQ ID NO: 118296 - DNA, 25 bp, Canis familiaris
gacctcaatcgggcttgtattgctg

SEQ ID NO: 118297 - DNA, 25 bp, Canis familiaris
gacctcgacgtcatcgtaatgcggc

SEQ ID NO: 118298 - DNA, 25 bp, Canis familiaris
gacctggaagtcaaagtgaatggaa

SEQ ID NO: 118299 - DNA, 25 bp, Canis familiaris
gacctgctgaagtttgaaaagaaat

SEQ ID NO: 118300 - DNA, 25 bp, Canis familiaris
gacctgtgaggtcctagccagaagg

SEQ ID NO: 118301 - DNA, 25 bp, Canis familiaris
gagccgtacactctacgactaagct

SEQ ID NO: 118302 - DNA, 25 bp, Canis familiaris
gaggttagccttgcaagcactaagt

SEQ ID NO: 118303 - DNA, 25 bp, Canis familiaris
gagcgagatccctccaaaatcaagt

SEQ ID NO: 118304 - DNA, 25 bp, Canis familiaris
gaccagattccatccaaatcctaga

SEQ ID NO: 118305 - DNA, 25 bp, Canis familiaris
gaccactctccctcaaagttaaagg

SEQ ID NO: 118306 - DNA, 25 bp, Canis familiaris
gaccagtctccctttaatgctgata

SEQ ID NO: 118307 - DNA, 25 bp, Canis familiaris
gaccgttgacactagctaggctgta

SEQ ID NO: 118308 - DNA, 25 bp, Canis familiaris
gaccgttgtatctgatagggtgctg

SEQ ID NO: 118309 - DNA, 25 bp, Canis familiaris
gaccaggtttgctgttgtgcagtgt

SEQ ID NO: 118310 - DNA, 25 bp, Canis familiaris
gatccagggtcgtggtagggttttg

SEQ ID NO: 118311 - DNA, 25 bp, Canis familiaris
gacctgggacaatggacgggttttg

SEQ ID NO: 118312 - DNA, 25 bp, Canis familiaris
gacctgggaccaatggatgggatgt

SEQ ID NO: 118313 - DNA, 25 bp, Canis familiaris
gaccatgtctgagacttgacgtgag

SEQ ID NO: 118314 - DNA, 25 bp, Canis familiaris
gacctgtcagtctaatctgtaggag

SEQ ID NO: 118315 - DNA, 25 bp, Canis familiaris
gacctgtcaggacactctagccagg

SEQ ID NO: 118316 - DNA, 25 bp, Canis familiaris
gaccttcaggatttcttgagccgga

SEQ ID NO: 118317 - DNA, 25 bp, Canis familiaris
gacctgtcgagatgtcacatgggca

SEQ ID NO: 118318 - DNA, 25 bp, Canis familiaris
gacctgggcaatgtgactgctggca

SEQ ID NO: 118319 - DNA, 25 bp, Canis familiaris
gacctggccagaactggctgtgtag

SEQ ID NO: 118320 - DNA, 25 bp, Canis familiaris
gaccaggctcacaactgtttctgag

SEQ ID NO: 118321 - DNA, 25 bp, Canis familiaris
gaccattgtgaaatcttttctcagt

SEQ ID NO: 118322 - DNA, 25 bp, Canis familiaris
gaccatttgtcattcatgctgtccc

SEQ ID NO: 118323 - DNA, 25 bp, Canis familiaris
gacctcatggcctacatggcctcca

SEQ ID NO: 118324 - DNA, 25 bp, Canis familiaris
gagccttggcgggcaaccccaaggc

SEQ ID NO: 118325 - DNA, 25 bp, Canis familiaris
gaccttggcaggtacaatcccatgg

SEQ ID NO: 118326 - DNA, 25 bp, Canis familiaris
gacctgctggaggataagattctgc

SEQ ID NO: 118327 - DNA, 25 bp, Canis familiaris
gacctaagaggtctgcatcctgtag

SEQ ID NO: 118328 - DNA, 25 bp, Canis familiaris
gaccaaaggaatcactcagttttca

SEQ ID NO: 118329 - DNA, 25 bp, Canis familiaris
gaccaagtgaacctaccttcatttc

SEQ ID NO: 118330 - DNA, 25 bp, Canis familiaris
gagcgggtgaacattgccttcaact

SEQ ID NO: 118331 - DNA, 25 bp, Canis familiaris
gacctgtgtgcagattaccttacct

SEQ ID NO: 118332 - DNA, 25 bp, Canis familiaris
gagcctgggaggtagaccttcccac

SEQ ID NO: 118333 - DNA, 25 bp, Canis familiaris
gacctgaggaggtgacacattgcct

SEQ ID NO: 118334 - DNA, 25 bp, Canis familiaris
gaccaaggagagatacaactccctg

SEQ ID NO: 118335 - DNA, 25 bp, Canis familiaris
gaccaagggacggacactgtcggtg

SEQ ID NO: 118336 - DNA, 25 bp, Canis familiaris
gaccaatgggactctcggtctgggt

SEQ ID NO: 118337 - DNA, 25 bp, Canis familiaris
gaccaagtctggctccaggtgtacg

SEQ ID NO: 118338 - DNA, 25 bp, Canis familiaris
gaccaacgggcgatctatgtgttcc

SEQ ID NO: 118339 - DNA, 25 bp, Canis familiaris
gaccagaagtggcatgataagcagt

SEQ ID NO: 118340 - DNA, 25 bp, Canis familiaris
gacctacgcatcttgataaagcagt

SEQ ID NO: 118341 - DNA, 25 bp, Canis familiaris
gacctactgcagttctgacggaggc

SEQ ID NO: 118342 - DNA, 25 bp, Canis familiaris
gacctgactgaggttgtggcgggcc

SEQ ID NO: 118343 - DNA, 25 bp, Canis familiaris
gacctttgggtcgaggcagaggcag

SEQ ID NO: 118344 - DNA, 25 bp, Canis familiaris
gacctttgggtcgaggcagaggcag

SEQ ID NO: 118345 - DNA, 25 bp, Canis familiaris
gacctttgggtcgaggcagagccag

SEQ ID NO: 118346 - DNA, 25 bp, Canis familiaris
gacctcggagagtccatgtagagcc

SEQ ID NO: 118347 - DNA, 25 bp, Canis familiaris
gaccatcggaaacgcatggggctca

SEQ ID NO: 118348 - DNA, 25 bp, Canis familiaris
gagctcgggatctggaagggtcttc

SEQ ID NO: 118349 - DNA, 25 bp, Canis familiaris
gaccacggaaaggaactcgtgcttc

SEQ ID NO: 118350 - DNA, 25 bp, Canis familiaris
gaccaggttaagtgaccctctactg

SEQ ID NO: 118351 - DNA, 25 bp, Canis familiaris
gtccaggttaggtgacctggccctc

SEQ ID NO: 118352 - DNA, 25 bp, Canis familiaris
ggccaacttcggaggtctggccgtg

SEQ ID NO: 118353 - DNA, 25 bp, Canis familiaris
gaccaacgtcggggagctggtcctg

SEQ ID NO: 118354 - DNA, 25 bp, Canis familiaris
gaccaggtgtccgggagggtacagg

SEQ ID NO: 118355 - DNA, 25 bp, Canis familiaris
gagccaaatgtctctggggtaaagg

SEQ ID NO: 118356 - DNA, 25 bp, Canis familiaris
gaccagaatggcttcttaagtccca

SEQ ID NO: 118357 - DNA, 25 bp, Canis familiaris
gacctgaatggcccattcatcccca

SEQ ID NO: 118358 - DNA, 25 bp, Canis familiaris
gacctgaagagcatcttttgctaca

SEQ ID NO: 118359 - DNA, 25 bp, Canis familiaris
gacctgaaaccagtgtctgtccaag

SEQ ID NO: 118360 - DNA, 25 bp, Canis familiaris
gatccaaattccttgacattgacgg

SEQ ID NO: 118361 - DNA, 25 bp, Canis familiaris
gaccaaattctggattttaccccat

SEQ ID NO: 118362 - DNA, 25 bp, Canis familiaris
gaccaattcattgatttgttttgta

SEQ ID NO: 118363 - DNA, 25 bp, Canis familiaris
gaccaatgaatttttggctttaatc

SEQ ID NO: 118364 - DNA, 25 bp, Canis familiaris
gaccaggacactttttgacttattc

SEQ ID NO: 118365 - DNA, 25 bp, Canis familiaris
gaccaaaccgacgtcagatttattc

SEQ ID NO: 118366 - DNA, 25 bp, Canis familiaris
gaccaagagagcgacctcaaacttt

SEQ ID NO: 118367 - DNA, 25 bp, Canis familiaris
gaccaagaacccgtccagggatttg

SEQ ID NO: 118368 - DNA, 25 bp, Canis familiaris
gaccaaaagtctttcagcagcccat

SEQ ID NO: 118369 - DNA, 25 bp, Canis familiaris
gaccagggctgtaactatggcccag

SEQ ID NO: 118370 - DNA, 25 bp, Canis familiaris
gaccagggcgtgaaacatgtgctct

SEQ ID NO: 118371 - DNA, 25 bp, Canis familiaris
gaccatcgtctacaagagcagcatt

SEQ ID NO: 118372 - DNA, 25 bp, Canis familiaris
gaccagttcttcggagagcacctgt

SEQ ID NO: 118373 - DNA, 25 bp, Canis familiaris
gaccatgtatttggctacagccacc

SEQ ID NO: 118374 - DNA, 25 bp, Canis familiaris
gaccatctattttgttacttgcact

SEQ ID NO: 118375 - DNA, 25 bp, Canis familiaris
gaccaacagttagtcaacttgcacc

SEQ ID NO: 118376 - DNA, 25 bp, Canis familiaris
gaccaacatgttctgaactcccatt

SEQ ID NO: 118377 - DNA, 25 bp, Canis familiaris
gaccagcaaattcctaactgcctga

SEQ ID NO: 118378 - DNA, 25 bp, Canis familiaris
gacctctaatctcaagactgtccca

SEQ ID NO: 118379 - DNA, 25 bp, Canis familiaris
gagccctatttccacagggggcaca

SEQ ID NO: 118380 - DNA, 25 bp, Canis familiaris
gagacctacgtcccaaagtggtccg

SEQ ID NO: 118381 - DNA, 25 bp, Canis familiaris
gacctcttattctgccacagtggtc

SEQ ID NO: 118382 - DNA, 25 bp, Canis familiaris
gaccacttttcatcacagaaggctg

SEQ ID NO: 118383 - DNA, 25 bp, Canis familiaris
gacctcttgtcctagtataaggcat

SEQ ID NO: 118384 - DNA, 25 bp, Canis familiaris
gacctgggagcccgtcagaaatgca

SEQ ID NO: 118385 - DNA, 25 bp, Canis familiaris
gacctggctagttgggcagagggca

SEQ ID NO: 118386 - DNA, 25 bp, Canis familiaris
gacctggtggctagcagccaacggc

SEQ ID NO: 118387 - DNA, 25 bp, Canis familiaris
gacctgtgaggatgcagtcgggccg

SEQ ID NO: 118388 - DNA, 25 bp, Canis familiaris
gacctggcaggctgtatccatggcc

SEQ ID NO: 118389 - DNA, 25 bp, Canis familiaris
gacctggactcaggttctaggctcc

SEQ ID NO: 118390 - DNA, 25 bp, Canis familiaris
gaccggaatcacggtattggccgtt

SEQ ID NO: 118391 - DNA, 25 bp, Canis familiaris
gagccggagacctgtttgttcagtt

SEQ ID NO: 118392 - DNA, 25 bp, Canis familiaris
gaccggaggccaagtggctgctgtc

SEQ ID NO: 118393 - DNA, 25 bp, Canis familiaris
gaccggaatccttgatcctgtgtgc

SEQ ID NO: 118394 - DNA, 25 bp, Canis familiaris
gaccagggaacttgcccatcgatgg

SEQ ID NO: 118395 - DNA, 25 bp, Canis familiaris
gagccaggagaatccccagtacaga

SEQ ID NO: 118396 - DNA, 25 bp, Canis familiaris
gaccattgaaaatcaccctcatctc

SEQ ID NO: 118397 - DNA, 25 bp, Canis familiaris
gacctagaaattgcactcctactcc

SEQ ID NO: 118398 - DNA, 25 bp, Canis familiaris
gacctagaaggtggcttccatctcc

SEQ ID NO: 118399 - DNA, 25 bp, Canis familiaris
gacctaggtggggcttgcttattgc

SEQ ID NO: 118400 - DNA, 25 bp, Canis familiaris
gacctatggagtctcttgctgttct

SEQ ID NO: 118401 - DNA, 25 bp, Canis familiaris
gacctgcaggaggcgttctgcaggc

SEQ ID NO: 118402 - DNA, 25 bp, Canis familiaris
gacctgcagcctgagatcctgaggc

SEQ ID NO: 118403 - DNA, 25 bp, Canis familiaris
gacctgcacaccaagatacagatca

SEQ ID NO: 118404 - DNA, 25 bp, Canis familiaris
gacctgacctgatgtccattcaatc

SEQ ID NO: 118405 - DNA, 25 bp, Canis familiaris
gaccatggtcatgagtcatcttaat

SEQ ID NO: 118406 - DNA, 25 bp, Canis familiaris
gacctatgtcactccatctaagtac

SEQ ID NO: 118407 - DNA, 25 bp, Canis familiaris
gacctgtgtccatgaacaaagtcac

SEQ ID NO: 118408 - DNA, 25 bp, Canis familiaris
gacctgtgtctcctgggagatagta

SEQ ID NO: 118409 - DNA, 25 bp, Canis familiaris
gacctgatgtcccttaaggagatga

SEQ ID NO: 118410 - DNA, 25 bp, Canis familiaris
gacctgttcctgcattgaggaaatt

SEQ ID NO: 118411 - DNA, 25 bp, Canis familiaris
gaccagtgtccccacgagtggaatc

SEQ ID NO: 118412 - DNA, 25 bp, Canis familiaris
gaccaggacccaacaagtgtcaacc

SEQ ID NO: 118413 - DNA, 25 bp, Canis familiaris
gacctgtacgccaacaacgtcatag

SEQ ID NO: 118414 - DNA, 25 bp, Canis familiaris
gacctggactgcttacatacgtgct

SEQ ID NO: 118415 - DNA, 25 bp, Canis familiaris
gacctggtcatgggcaaactggcgc

SEQ ID NO: 118416 - DNA, 25 bp, Canis familiaris
gacctagtgatgtgacccatcctgc

SEQ ID NO: 118417 - DNA, 25 bp, Canis familiaris
gaccagagatatttgaccctgccca

SEQ ID NO: 118418 - DNA, 25 bp, Canis familiaris
gaccacagtaagtcaacttgcccag

SEQ ID NO: 118419 - DNA, 25 bp, Canis familiaris
gaccaggtaaaatgctgacaccagt

SEQ ID NO: 118420 - DNA, 25 bp, Canis familiaris
gacctgcaggtgaacaaggacccag

SEQ ID NO: 118421 - DNA, 25 bp, Canis familiaris
gacctgcagcgtgataaagcccggc

SEQ ID NO: 118422 - DNA, 25 bp, Canis familiaris
gacctcagattctaagaacctgggg

SEQ ID NO: 118423 - DNA, 25 bp, Canis familiaris
gacctcagtggatacttccatgggc

SEQ ID NO: 118424 - DNA, 25 bp, Canis familiaris
gacctcgtggagtacagcattgtga

SEQ ID NO: 118425 - DNA, 25 bp, Canis familiaris
gagcctctgagcttggcacagatag

SEQ ID NO: 118426 - DNA, 25 bp, Canis familiaris
gagctgcctgacggccaagtcatca

SEQ ID NO: 118427 - DNA, 25 bp, Canis familiaris
gaccactgaaccccagtgcatattc

SEQ ID NO: 118428 - DNA, 25 bp, Canis familiaris
gagccagttaacccattcaaatgca

SEQ ID NO: 118429 - DNA, 25 bp, Canis familiaris
gagccacatatttcccctgaaaagt

SEQ ID NO: 118430 - DNA, 25 bp, Canis familiaris
gaccatcatgctactaccttaataa

SEQ ID NO: 118431 - DNA, 25 bp, Canis familiaris
gaccacttttaactcatcatgaagt

SEQ ID NO: 118432 - DNA, 25 bp, Canis familiaris
gaccactttgtcaagctcatttcct

SEQ ID NO: 118433 - DNA, 25 bp, Canis familiaris
gaccatctaacaaatgcacattgct

SEQ ID NO: 118434 - DNA, 25 bp, Canis familiaris
gaccattcagaacagacaggcccag

SEQ ID NO: 118435 - DNA, 25 bp, Canis familiaris
gaccattcagaacagacaggcccag

SEQ ID NO: 118436 - DNA, 25 bp, Canis familiaris
gaccattcagaacagacaggcccag

SEQ ID NO: 118437 - DNA, 25 bp, Canis familiaris
gaccttctatgataggggcctcatg

SEQ ID NO: 118438 - DNA, 25 bp, Canis familiaris
gaccttactatatgtgaggcagtct

SEQ ID NO: 118439 - DNA, 25 bp, Canis familiaris
gacctgtgactcacgcttgtggtct

SEQ ID NO: 118440 - DNA, 25 bp, Canis familiaris
gacctgtaattctgctgctgtgatg

SEQ ID NO: 118441 - DNA, 25 bp, Canis familiaris
gaccatttattcttatttgatgtct

SEQ ID NO: 118442 - DNA, 25 bp, Canis familiaris
gacctttatttggatttctttctca

SEQ ID NO: 118443 - DNA, 25 bp, Canis familiaris
gaccttgtctttcgttgattttcac

SEQ ID NO: 118444 - DNA, 25 bp, Canis familiaris
gacctgagtttctgttgatttgcta

SEQ ID NO: 118445 - DNA, 25 bp, Canis familiaris
gaccttgttacttgtttttgctaga

SEQ ID NO: 118446 - DNA, 25 bp, Canis familiaris
gaccttttcacttgtactttatgca

SEQ ID NO: 118447 - DNA, 25 bp, Canis familiaris
gacctctcctacattagcagtttgc

SEQ ID NO: 118448 - DNA, 25 bp, Canis familiaris
gagcctccttatttgtacagactgg

SEQ ID NO: 118449 - DNA, 25 bp, Canis familiaris
gaccttctatataattcacaccata

SEQ ID NO: 118450 - DNA, 25 bp, Canis familiaris
gagcctcctatttattcgacggcct

SEQ ID NO: 118451 - DNA, 25 bp, Canis familiaris
gagtacgattttataagccccgact

SEQ ID NO: 118452 - DNA, 25 bp, Canis familiaris
gagtcctggtttgtaacttcctatc

SEQ ID NO: 118453 - DNA, 25 bp, Canis familiaris
gagccgtagtttgtacacatttatc

SEQ ID NO: 118454 - DNA, 25 bp, Canis familiaris
gaccttagtttggtgcatcaatcta

SEQ ID NO: 118455 - DNA, 25 bp, Canis familiaris
gacctctagctttgttacacatctc

SEQ ID NO: 118456 - DNA, 25 bp, Canis familiaris
gagcctaggccttttagaagccaag

SEQ ID NO: 118457 - DNA, 25 bp, Canis familiaris
gaccatgatgatgttcaccagaagc

SEQ ID NO: 118458 - DNA, 25 bp, Canis familiaris
gacctgctgaggatactgctgaacc

SEQ ID NO: 118459 - DNA, 25 bp, Canis familiaris
gacctgctgaggatactgctgaacc

SEQ ID NO: 118460 - DNA, 25 bp, Canis familiaris
gaccagccaggaaaatgctaatccc

SEQ ID NO: 118461 - DNA, 25 bp, Canis familiaris
gaccagcatcgggaaagaaatagga

SEQ ID NO: 118462 - DNA, 25 bp, Canis familiaris
gagccagccacggagcaaaaaacgg

SEQ ID NO: 118463 - DNA, 25 bp, Canis familiaris
gagcgagaccggcgaaaactgtgga

SEQ ID NO: 118464 - DNA, 25 bp, Canis familiaris
gtgaaaccggggagcaacgttctgg

SEQ ID NO: 118465 - DNA, 25 bp, Canis familiaris
gataaactccgggtttacagcttct

SEQ ID NO: 118466 - DNA, 25 bp, Canis familiaris
gagaaaaccaggcagttatcgttaa

SEQ ID NO: 118467 - DNA, 25 bp, Canis familiaris
gagctactaccagaaattacttttt

SEQ ID NO: 118468 - DNA, 25 bp, Canis familiaris
gaccacaaagctcaaagtacttctt

SEQ ID NO: 118469 - DNA, 25 bp, Canis familiaris
gaccaccatactcaccagtggcaac

SEQ ID NO: 118470 - DNA, 25 bp, Canis familiaris
gacctcaccacaaacactgggaacc

SEQ ID NO: 118471 - DNA, 25 bp, Canis familiaris
gacctccatagaagacaccgggacc

SEQ ID NO: 118472 - DNA, 25 bp, Canis familiaris
gacctacaagaagcacacgcgggcg

SEQ ID NO: 118473 - DNA, 25 bp, Canis familiaris
gacctctaagtggctaccaggggcg

SEQ ID NO: 118474 - DNA, 25 bp, Canis familiaris
gacctcaccagtgtacctgttgagc

SEQ ID NO: 118475 - DNA, 25 bp, Canis familiaris
gacctccacagggatacaggttgac

SEQ ID NO: 118476 - DNA, 25 bp, Canis familiaris
gacctcgccaagaagaaggactcca

SEQ ID NO: 118477 - DNA, 25 bp, Canis familiaris
gaccattgtcaagactaggactcca

SEQ ID NO: 118478 - DNA, 25 bp, Canis familiaris
gaccatctcatcgacatactcagag

SEQ ID NO: 118479 - DNA, 25 bp, Canis familiaris
gacctctcactcggagctagaggcc

SEQ ID NO: 118480 - DNA, 25 bp, Canis familiaris
gacctgccagacgtacgagaggccc

SEQ ID NO: 118481 - DNA, 25 bp, Canis familiaris
gacctgaaacgaccaatgcaagccc

SEQ ID NO: 118482 - DNA, 25 bp, Canis familiaris
gacctgaagaaccacatgcgcgtgc

SEQ ID NO: 118483 - DNA, 25 bp, Canis familiaris
gaccatgaaaatcactgcactcgct

SEQ ID NO: 118484 - DNA, 25 bp, Canis familiaris
gagccaaataatcattaccatccct

SEQ ID NO: 118485 - DNA, 25 bp, Canis familiaris
gaccaaaaaggactcgatcacggca

SEQ ID NO: 118486 - DNA, 25 bp, Canis familiaris
gaccataaacgatgccgactggcga

SEQ ID NO: 118487 - DNA, 25 bp, Canis familiaris
gaccataaacgatgccgactggcga

SEQ ID NO: 118488 - DNA, 25 bp, Canis familiaris
gaccataaacgatgccgactggcga

SEQ ID NO: 118489 - DNA, 25 bp, Canis familiaris
gagccataatacaaaccagacccaa

SEQ ID NO: 118490 - DNA, 25 bp, Canis familiaris
gaccaagtactattgccagcctaag

SEQ ID NO: 118491 - DNA, 25 bp, Canis familiaris
gagccaatgtgaattgagcccctac

SEQ ID NO: 118492 - DNA, 25 bp, Canis familiaris
gacctcagtgatgtgagcgctgttg

SEQ ID NO: 118493 - DNA, 25 bp, Canis familiaris
gaccagccagtggtgcactgtgcac

SEQ ID NO: 118494 - DNA, 25 bp, Canis familiaris
gaccactgagtgtgcagctggagca

SEQ ID NO: 118495 - DNA, 25 bp, Canis familiaris
gacctgcgactgtctgcggaagatc

SEQ ID NO: 118496 - DNA, 25 bp, Canis familiaris
gaccagcgccagtgggaggatactg

SEQ ID NO: 118497 - DNA, 25 bp, Canis familiaris
gaccaggccaagaggatccatcaca

SEQ ID NO: 118498 - DNA, 25 bp, Canis familiaris
gaccaaggccgaggagcacaacatc

SEQ ID NO: 118499 - DNA, 25 bp, Canis familiaris
gaccaaatcctcctagctcaggagc

SEQ ID NO: 118500 - DNA, 25 bp, Canis familiaris
gagcctacacccgcagtagagagcc

SEQ ID NO: 118501 - DNA, 25 bp, Canis familiaris
gacctcacacctcatgggatggagg

SEQ ID NO: 118502 - DNA, 25 bp, Canis familiaris
gaccaagcacgttatgggctctggc

SEQ ID NO: 118503 - DNA, 25 bp, Canis familiaris
gaccaagcatgagaatgagcagcca

SEQ ID NO: 118504 - DNA, 25 bp, Canis familiaris
gaccacgtgaccgtcacatgcagca

SEQ ID NO: 118505 - DNA, 25 bp, Canis familiaris
gaccatcgctgccaactaagcatgc

SEQ ID NO: 118506 - DNA, 25 bp, Canis familiaris
gacctccagcagtcctggatgcagc

SEQ ID NO: 118507 - DNA, 25 bp, Canis familiaris
gacctcaccagctgctgaggcagcc

SEQ ID NO: 118508 - DNA, 25 bp, Canis familiaris
gaccttgccacttgggagaccaaca

SEQ ID NO: 118509 - DNA, 25 bp, Canis familiaris
gagcgcttggccaagtacaaccaga

SEQ ID NO: 118510 - DNA, 25 bp, Canis familiaris
gacctagtgctgctctacgagctca

SEQ ID NO: 118511 - DNA, 25 bp, Canis familiaris
gacctatgcatttttacgatctact

SEQ ID NO: 118512 - DNA, 25 bp, Canis familiaris
gacctagcatttgtcgtcacaatcc

SEQ ID NO: 118513 - DNA, 25 bp, Canis familiaris
gagcctcagtttgtcaaccatgaac

SEQ ID NO: 118514 - DNA, 25 bp, Canis familiaris
gagctccggtagttgcaccggtgac

SEQ ID NO: 118515 - DNA, 25 bp, Canis familiaris
gaccacggatacagacggttacccg

SEQ ID NO: 118516 - DNA, 25 bp, Canis familiaris
gaccagggttctggactggcttgga

SEQ ID NO: 118517 - DNA, 25 bp, Canis familiaris
gacctagtgtttggactgatttgct

SEQ ID NO: 118518 - DNA, 25 bp, Canis familiaris
gaccaagtgacagcaatgctgtttc

SEQ ID NO: 118519 - DNA, 25 bp, Canis familiaris
gaccaagtggtatatggtctgctgc

SEQ ID NO: 118520 - DNA, 25 bp, Canis familiaris
gaccaagggtttttttgcacttgag

SEQ ID NO: 118521 - DNA, 25 bp, Canis familiaris
gaccaacggattacttctatcctat

SEQ ID NO: 118522 - DNA, 25 bp, Canis familiaris
gaccaaatagatttctacttcttaa

SEQ ID NO: 118523 - DNA, 25 bp, Canis familiaris
gaccaaaatagcaccatcttttcaa

SEQ ID NO: 118524 - DNA, 25 bp, Canis familiaris
gaccaaaaatagcacatcttttcaa

SEQ ID NO: 118525 - DNA, 25 bp, Canis familiaris
gagccaactacatggagtttaacta

SEQ ID NO: 118526 - DNA, 25 bp, Canis familiaris
gagcctataacatcaagtttgtcaa

SEQ ID NO: 118527 - DNA, 25 bp, Canis familiaris
gagcacccataagaaattgggacag

SEQ ID NO: 118528 - DNA, 25 bp, Canis familiaris
gagccccttcactaacttggaagcc

SEQ ID NO: 118529 - DNA, 25 bp, Canis familiaris
gaccttctcccgaacattggaagaa

SEQ ID NO: 118530 - DNA, 25 bp, Canis familiaris
gaccttgtcccgaaaatgcacacac

SEQ ID NO: 118531 - DNA, 25 bp, Canis familiaris
gaccttgttggccaaaagaaagctt

SEQ ID NO: 118532 - DNA, 25 bp, Canis familiaris
gaccttatttgacaaagttcagcct

SEQ ID NO: 118533 - DNA, 25 bp, Canis familiaris
gaccattttttcccagagtgtctcc

SEQ ID NO: 118534 - DNA, 25 bp, Canis familiaris
gacctttatattgggaattctcttc

SEQ ID NO: 118535 - DNA, 25 bp, Canis familiaris
gaccagtagtatcaaaattatctta

SEQ ID NO: 118536 - DNA, 25 bp, Canis familiaris
gaccagtggctcctaattttgttta

SEQ ID NO: 118537 - DNA, 25 bp, Canis familiaris
gaccttgcagccttatatacttgtt

SEQ ID NO: 118538 - DNA, 25 bp, Canis familiaris
gacctatgtgcctgtaactggactt

SEQ ID NO: 118539 - DNA, 25 bp, Canis familiaris
gacctttgctcatgaccttggaata

SEQ ID NO: 118540 - DNA, 25 bp, Canis familiaris
gacctaagccaaccactatgtgaag

SEQ ID NO: 118541 - DNA, 25 bp, Canis familiaris
gaccaaactcaactgtctttgaagg

SEQ ID NO: 118542 - DNA, 25 bp, Canis familiaris
gaccatgacaccacatttgttgaag

SEQ ID NO: 118543 - DNA, 25 bp, Canis familiaris
gacctcaaaacactgttgtcagaga

SEQ ID NO: 118544 - DNA, 25 bp, Canis familiaris
gacctcatagtagtgtttgtccaac

SEQ ID NO: 118545 - DNA, 25 bp, Canis familiaris
gaccatctcgtgcttattgatcaca

SEQ ID NO: 118546 - DNA, 25 bp, Canis familiaris
gaccatctgaggctgtttatgctta

SEQ ID NO: 118547 - DNA, 25 bp, Canis familiaris
gaccatgaagagcctgctcctgtct

SEQ ID NO: 118548 - DNA, 25 bp, Canis familiaris
gagccaaaaagcttcactgactcta

SEQ ID NO: 118549 - DNA, 25 bp, Canis familiaris
gaccacaagcgagatcactgccagt

SEQ ID NO: 118550 - DNA, 25 bp, Canis familiaris
gaccagcaagaagatcaccatcgcc

SEQ ID NO: 118551 - DNA, 25 bp, Canis familiaris
gaccagcaagaagatcaccatcgcc

SEQ ID NO: 118552 - DNA, 25 bp, Canis familiaris
gaccatgaccaagatccagaagcac

SEQ ID NO: 118553 - DNA, 25 bp, Canis familiaris
gaccatgacacaccaaacatgggcc

SEQ ID NO: 118554 - DNA, 25 bp, Canis familiaris
gaccagatacgatgagatccgccgc

SEQ ID NO: 118555 - DNA, 25 bp, Canis familiaris
gaccagcattctgagaaccaaccag

SEQ ID NO: 118556 - DNA, 25 bp, Canis familiaris
gaccacttcatgtacaaccaaaaaa

SEQ ID NO: 118557 - DNA, 25 bp, Canis familiaris
gtccaaccctactgccaataaaagc

SEQ ID NO: 118558 - DNA, 25 bp, Canis familiaris
gatcctacccccagaaataaacata

SEQ ID NO: 118559 - DNA, 25 bp, Canis familiaris
gatccataaccctcaacttaaagat

SEQ ID NO: 118560 - DNA, 25 bp, Canis familiaris
gaccataactcctcaataaaaaggg

SEQ ID NO: 118561 - DNA, 25 bp, Canis familiaris
gagctaaccccaaaactaaaatgtg

SEQ ID NO: 118562 - DNA, 25 bp, Canis familiaris
gaccaacccagaaacttaactcgtg

SEQ ID NO: 118563 - DNA, 25 bp, Canis familiaris
gaccacactccaaaacttaagctct

SEQ ID NO: 118564 - DNA, 25 bp, Canis familiaris
gaccacatcccaaaaataaaatctt

SEQ ID NO: 118565 - DNA, 25 bp, Canis familiaris
gagcccccgacaaactaatgattct

SEQ ID NO: 118566 - DNA, 25 bp, Canis familiaris
gacctcccagacaaataaaatgtgt

SEQ ID NO: 118567 - DNA, 25 bp, Canis familiaris
gagccctcggatacattagaaatgt

SEQ ID NO: 118568 - DNA, 25 bp, Canis familiaris
gaccagccaggtcccaatgataaga

SEQ ID NO: 118569 - DNA, 25 bp, Canis familiaris
gaccacacagcagccaagttctgga

SEQ ID NO: 118570 - DNA, 25 bp, Canis familiaris
gacctctcagcagccagagtgtcta

SEQ ID NO: 118571 - DNA, 25 bp, Canis familiaris
gacctctatgccaacacagtgttgt

SEQ ID NO: 118572 - DNA, 25 bp, Canis familiaris
gaccagtagctcaaacagtctcata

SEQ ID NO: 118573 - DNA, 25 bp, Canis familiaris
gaccagtgcactgagggtttcgtcc

SEQ ID NO: 118574 - DNA, 25 bp, Canis familiaris
gaccagtgaggcttcaggcttgtcg

SEQ ID NO: 118575 - DNA, 25 bp, Canis familiaris
gagctcttactgtaaggctagtctg

SEQ ID NO: 118576 - DNA, 25 bp, Canis familiaris
gaccttaggatgagtccatgtcgtc

SEQ ID NO: 118577 - DNA, 25 bp, Canis familiaris
gaccttgaaggaagaaatgctcgtc

SEQ ID NO: 118578 - DNA, 25 bp, Canis familiaris
gaccttggaggggaaggctccttct

SEQ ID NO: 118579 - DNA, 25 bp, Canis familiaris
gaccttcttgggtcatagagccccc

SEQ ID NO: 118580 - DNA, 25 bp, Canis familiaris
gaccatttatggagcagaggcccgg

SEQ ID NO: 118581 - DNA, 25 bp, Canis familiaris
gaccactgttttagagagtccacgt

SEQ ID NO: 118582 - DNA, 25 bp, Canis familiaris
gaccactttactcagttagccgtag

SEQ ID NO: 118583 - DNA, 25 bp, Canis familiaris
gaccactttaagcctttgtgggcca

SEQ ID NO: 118584 - DNA, 25 bp, Canis familiaris
gaccagctttggagcttctggaacc

SEQ ID NO: 118585 - DNA, 25 bp, Canis familiaris
gaccaggttcgttcactcatggaaa

SEQ ID NO: 118586 - DNA, 25 bp, Canis familiaris
gaccagagggtttcaggaggagaac

SEQ ID NO: 118587 - DNA, 25 bp, Canis familiaris
gaccaagggagcaacggggatgcac

SEQ ID NO: 118588 - DNA, 25 bp, Canis familiaris
gaccactgacggaggggggacgtcg

SEQ ID NO: 118589 - DNA, 25 bp, Canis familiaris
gaccatcttcggagagtcggcggga

SEQ ID NO: 118590 - DNA, 25 bp, Canis familiaris
gaccacttcggcatcgtggagggcc

SEQ ID NO: 118591 - DNA, 25 bp, Canis familiaris
gaccattgagctagccatcgtgggc

SEQ ID NO: 118592 - DNA, 25 bp, Canis familiaris
gacctatgagtcatatccaggctga

SEQ ID NO: 118593 - DNA, 25 bp, Canis familiaris
gacctcaactctgatggcagcgtga

SEQ ID NO: 118594 - DNA, 25 bp, Canis familiaris
gaccagcaccctaatgagcagtaca

SEQ ID NO: 118595 - DNA, 25 bp, Canis familiaris
gaccagtccctacaggtgagcaaac

SEQ ID NO: 118596 - DNA, 25 bp, Canis familiaris
gatccagctccgtcgttttaataac

SEQ ID NO: 118597 - DNA, 25 bp, Canis familiaris
gagctctgtcccttgtttaaattac

SEQ ID NO: 118598 - DNA, 25 bp, Canis familiaris
gagccttcagcgtgtttttattcaa

SEQ ID NO: 118599 - DNA, 25 bp, Canis familiaris
gagcctctcagatacttttggggaa

SEQ ID NO: 118600 - DNA, 25 bp, Canis familiaris
gagccccgacagctttcaggggagg

SEQ ID NO: 118601 - DNA, 25 bp, Canis familiaris
gatgccccccaagacagttgggagg

SEQ ID NO: 118602 - DNA, 25 bp, Canis familiaris
gagccacccaacaccaagttgtggg

SEQ ID NO: 118603 - DNA, 25 bp, Canis familiaris
gaccaacaaccaaagcagaatagct

SEQ ID NO: 118604 - DNA, 25 bp, Canis familiaris
gaccaactgactgaggagcagattg

SEQ ID NO: 118605 - DNA, 25 bp, Canis familiaris
gacctcactgagatcagggacatgc

SEQ ID NO: 118606 - DNA, 25 bp, Canis familiaris
gacctcatctgaggggtggtcctgc

SEQ ID NO: 118607 - DNA, 25 bp, Canis familiaris
gaccacttactgtgtgcatatcact

SEQ ID NO: 118608 - DNA, 25 bp, Canis familiaris
gaccagttacgatgcacaactctgg

SEQ ID NO: 118609 - DNA, 25 bp, Canis familiaris
gagccaggtccgggactactggaca

SEQ ID NO: 118610 - DNA, 25 bp, Canis familiaris
gaccagctgtcccaaattaatgtga

SEQ ID NO: 118611 - DNA, 25 bp, Canis familiaris
gaccaggtcaccacattagagtccc

SEQ ID NO: 118612 - DNA, 25 bp, Canis familiaris
gaccagcagctattattcattaact

SEQ ID NO: 118613 - DNA, 25 bp, Canis familiaris
gaccacatgacttttaaatagcaga

SEQ ID NO: 118614 - DNA, 25 bp, Canis familiaris
gagcgcctatctcattcagaatatt

SEQ ID NO: 118615 - DNA, 25 bp, Canis familiaris
gagcgcctatctcattcagaatatt

SEQ ID NO: 118616 - DNA, 25 bp, Canis familiaris
gaccagctgtctaattgcacacatc

SEQ ID NO: 118617 - DNA, 25 bp, Canis familiaris
gaccacatgtattgagctgcagcct

SEQ ID NO: 118618 - DNA, 25 bp, Canis familiaris
gaccacaggacatctagacttgcag

SEQ ID NO: 118619 - DNA, 25 bp, Canis familiaris
gaccatcgaggacctgagggctcag

SEQ ID NO: 118620 - DNA, 25 bp, Canis familiaris
gagccccagggtggatgggtcagta

SEQ ID NO: 118621 - DNA, 25 bp, Canis familiaris
gagcctccgcggggagggacaagcc

SEQ ID NO: 118622 - DNA, 25 bp, Canis familiaris
gagccatccgctggttagggtaggc

SEQ ID NO: 118623 - DNA, 25 bp, Canis familiaris
gagcccgctcagattacggatgctg

SEQ ID NO: 118624 - DNA, 25 bp, Canis familiaris
gagccctgccaaagggcgttgcggt

SEQ ID NO: 118625 - DNA, 25 bp, Canis familiaris
gagccactccctggagggaatcggg

SEQ ID NO: 118626 - DNA, 25 bp, Canis familiaris
gaccacctctctgtgggtattgctg

SEQ ID NO: 118627 - DNA, 25 bp, Canis familiaris
gaccacactctcaagtggcgttcgg

SEQ ID NO: 118628 - DNA, 25 bp, Canis familiaris
gaccaccatataatctgcacgttcg

SEQ ID NO: 118629 - DNA, 25 bp, Canis familiaris
gaccaaaataatagtgctgtgtggt

SEQ ID NO: 118630 - DNA, 25 bp, Canis familiaris
gaccatatcactcatcggggggagg

SEQ ID NO: 118631 - DNA, 25 bp, Canis familiaris
gaccatagagctcaaggagggagtg

SEQ ID NO: 118632 - DNA, 25 bp, Canis familiaris
gaccatcgacgagaaagggactgaa

SEQ ID NO: 118633 - DNA, 25 bp, Canis familiaris
gagccttgccgggaaatggggccca

SEQ ID NO: 118634 - DNA, 25 bp, Canis familiaris
gaccttggctgatgcaacaggggac

SEQ ID NO: 118635 - DNA, 25 bp, Canis familiaris
gaccttgagtggtgtcaggagacaa

SEQ ID NO: 118636 - DNA, 25 bp, Canis familiaris
gaccacggtgggctaatggaaaaag

SEQ ID NO: 118637 - DNA, 25 bp, Canis familiaris
tgaccgggaacgctacatggaacct

SEQ ID NO: 118638 - DNA, 25 bp, Canis familiaris
tgaccgggaccttataatcgaagga

SEQ ID NO: 118639 - DNA, 25 bp, Canis familiaris
tgaaagggacttttatcctgggtag

SEQ ID NO: 118640 - DNA, 25 bp, Canis familiaris
tccaagggctttgtggtgcgggacg

SEQ ID NO: 118641 - DNA, 25 bp, Canis familiaris
taccaaggccttggggtggcggtag

SEQ ID NO: 118642 - DNA, 25 bp, Canis familiaris
gaccaagtgccaaggaggtgaccgt

SEQ ID NO: 118643 - DNA, 25 bp, Canis familiaris
gagccaggtccttgtgaggctgact

SEQ ID NO: 118644 - DNA, 25 bp, Canis familiaris
gagccaggacttttgatagtgaatt

SEQ ID NO: 118645 - DNA, 25 bp, Canis familiaris
gaccacagccttttatgcactgtgt

SEQ ID NO: 118646 - DNA, 25 bp, Canis familiaris
gaccaatggcttccacatgacatgg

SEQ ID NO: 118647 - DNA, 25 bp, Canis familiaris
gagccaactgttccacaaagtaata

SEQ ID NO: 118648 - DNA, 25 bp, Canis familiaris
gacctatctgtacagcagggcaaac

SEQ ID NO: 118649 - DNA, 25 bp, Canis familiaris
gaccttctgttcagggacgacacac

SEQ ID NO: 118650 - DNA, 25 bp, Canis familiaris
gaccttgtgttatggacactcacac

SEQ ID NO: 118651 - DNA, 25 bp, Canis familiaris
gagcctggtgtttagtaggtccttg

SEQ ID NO: 118652 - DNA, 25 bp, Canis familiaris
gaccttgtgtctgtgtctggtcttt

SEQ ID NO: 118653 - DNA, 25 bp, Canis familiaris
gaccttttccctgtgattcttgggg

SEQ ID NO: 118654 - DNA, 25 bp, Canis familiaris
gaccatttttcctggcagtcttaag

SEQ ID NO: 118655 - DNA, 25 bp, Canis familiaris
gagtattttctcacgggatttgtag

SEQ ID NO: 118656 - DNA, 25 bp, Canis familiaris
gaccttttctttgtcagtttgtaga

SEQ ID NO: 118657 - DNA, 25 bp, Canis familiaris
gagcctttatttcagacgtgtatgt

SEQ ID NO: 118658 - DNA, 25 bp, Canis familiaris
gaccattcataagaaatcagttatc

SEQ ID NO: 118659 - DNA, 25 bp, Canis familiaris
gaccttcaggacacactagttaaag

SEQ ID NO: 118660 - DNA, 25 bp, Canis familiaris
gagcgttaggacatcagtcaaagaa

SEQ ID NO: 118661 - DNA, 25 bp, Canis familiaris
gagctcttagagcttcgccaaaaat

SEQ ID NO: 118662 - DNA, 25 bp, Canis familiaris
gagctgcttaagttccctgaaacaa

SEQ ID NO: 118663 - DNA, 25 bp, Canis familiaris
gagcgcctaaaaaaatgacaccaca

SEQ ID NO: 118664 - DNA, 25 bp, Canis familiaris
gagcggttattgtgaatacagggca

SEQ ID NO: 118665 - DNA, 25 bp, Canis familiaris
gaccatggcttgatggacaaagggc

SEQ ID NO: 118666 - DNA, 25 bp, Canis familiaris
gaccttgcattgagtggcagacagt

SEQ ID NO: 118667 - DNA, 25 bp, Canis familiaris
gagcgctttctcagtgggacaaagc

SEQ ID NO: 118668 - DNA, 25 bp, Canis familiaris
gagcctctcttctgtaggagcgaag

SEQ ID NO: 118669 - DNA, 25 bp, Canis familiaris
gagcgactttcactgtcagggtatt

SEQ ID NO: 118670 - DNA, 25 bp, Canis familiaris
gagcttgttgtacacaggtttctgg

SEQ ID NO: 118671 - DNA, 25 bp, Canis familiaris
gagccttgtgttgaagacattttgg

SEQ ID NO: 118672 - DNA, 25 bp, Canis familiaris
gagctttggttgcttctaatactga

SEQ ID NO: 118673 - DNA, 25 bp, Canis familiaris
gagcatttttcttttccctaagaga

SEQ ID NO: 118674 - DNA, 25 bp, Canis familiaris
gagttttcctatatccggaggctgc

SEQ ID NO: 118675 - DNA, 25 bp, Canis familiaris
ggttttcctaatatctggtggcttt

SEQ ID NO: 118676 - DNA, 25 bp, Canis familiaris
gagtttccctactaatttgtggttg

SEQ ID NO: 118677 - DNA, 25 bp, Canis familiaris
gaccttgccactgcaaatgtttttt

SEQ ID NO: 118678 - DNA, 25 bp, Canis familiaris
gaccatataccaacaacactctttt

SEQ ID NO: 118679 - DNA, 25 bp, Canis familiaris
gaccatatacagacacactctttgt

SEQ ID NO: 118680 - DNA, 25 bp, Canis familiaris
gaccatcaaagacagccatcgttac

SEQ ID NO: 118681 - DNA, 25 bp, Canis familiaris
gagccataaagagcagacccttcca

SEQ ID NO: 118682 - DNA, 25 bp, Canis familiaris
gaccaggacaggccaagtccatgcc

SEQ ID NO: 118683 - DNA, 25 bp, Canis familiaris
gaccagtgactgtgaagcctcatgt

SEQ ID NO: 118684 - DNA, 25 bp, Canis familiaris
gaccaggagctgtgtcaccagctgc

SEQ ID NO: 118685 - DNA, 25 bp, Canis familiaris
gaccaagatctgttgttccagctcc

SEQ ID NO: 118686 - DNA, 25 bp, Canis familiaris
gaccatagttgatttgtctggcaca

SEQ ID NO: 118687 - DNA, 25 bp, Canis familiaris
gaccattgcttatttgtatgtctga

SEQ ID NO: 118688 - DNA, 25 bp, Canis familiaris
gaccttgcagtaataatgatgtatc

SEQ ID NO: 118689 - DNA, 25 bp, Canis familiaris
gaccttgtctcacactgatgatacc

SEQ ID NO: 118690 - DNA, 25 bp, Canis familiaris
gacctttaccagttagtgtcctctc

SEQ ID NO: 118691 - DNA, 25 bp, Canis familiaris
gacctttgacattttgcagtgccct

SEQ ID NO: 118692 - DNA, 25 bp, Canis familiaris
gaccttgatctttgattgctaccct

SEQ ID NO: 118693 - DNA, 25 bp, Canis familiaris
gagccttcatcatatgctggttccc

SEQ ID NO: 118694 - DNA, 25 bp, Canis familiaris
gaccttctctatagatgttcttcgc

SEQ ID NO: 118695 - DNA, 25 bp, Canis familiaris
gaccttctctttttagctgtgtgac

SEQ ID NO: 118696 - DNA, 25 bp, Canis familiaris
gaccttctcttgggatcactgagga

SEQ ID NO: 118697 - DNA, 25 bp, Canis familiaris
gagccacctgcaagatggacacgag

SEQ ID NO: 118698 - DNA, 25 bp, Canis familiaris
gaccatccacattgacgagatcaac

SEQ ID NO: 118699 - DNA, 25 bp, Canis familiaris
gaccatcatacttgatctggtgaga

SEQ ID NO: 118700 - DNA, 25 bp, Canis familiaris
gaccatgtactgcattgtcagcgcc

SEQ ID NO: 118701 - DNA, 25 bp, Canis familiaris
gagcgattacagcctggcatagccc

SEQ ID NO: 118702 - DNA, 25 bp, Canis familiaris
gagcgtctagagattaacgactctg

SEQ ID NO: 118703 - DNA, 25 bp, Canis familiaris
gagcgacaaataccaacacaatcct

SEQ ID NO: 118704 - DNA, 25 bp, Canis familiaris
gaccaaaaatcccatgagatgatcc

SEQ ID NO: 118705 - DNA, 25 bp, Canis familiaris
gaccaccagaagaccaggatcatcc

SEQ ID NO: 118706 - DNA, 25 bp, Canis familiaris
gaccaccagaagacagatttccttg

SEQ ID NO: 118707 - DNA, 25 bp, Canis familiaris
gaccaccagaagtgtttgctttcag

SEQ ID NO: 118708 - DNA, 25 bp, Canis familiaris
gaccatcctaagtgactgcctgtct

SEQ ID NO: 118709 - DNA, 25 bp, Canis familiaris
gaccattgtacacagaatgtggtta

SEQ ID NO: 118710 - DNA, 25 bp, Canis familiaris
gagcctcgtactcagcaggtgttaa

SEQ ID NO: 118711 - DNA, 25 bp, Canis familiaris
gagcctcgtcccagaggaggtgacc

SEQ ID NO: 118712 - DNA, 25 bp, Canis familiaris
gaccacggacctatgaatggtgcaa

SEQ ID NO: 118713 - DNA, 25 bp, Canis familiaris
gaccagggaccgttgactgaggcac

SEQ ID NO: 118714 - DNA, 25 bp, Canis familiaris
gaccaggcagtgaggtctctgggcc

SEQ ID NO: 118715 - DNA, 25 bp, Canis familiaris
gaccagcaagtcaaagtcgctgtcc

SEQ ID NO: 118716 - DNA, 25 bp, Canis familiaris
gagccagaagtccattattgtgtaa

SEQ ID NO: 118717 - DNA, 25 bp, Canis familiaris
gaccagcaggctgattgtcttggaa

SEQ ID NO: 118718 - DNA, 25 bp, Canis familiaris
gaccagcaggtggcactgtgttcca

SEQ ID NO: 118719 - DNA, 25 bp, Canis familiaris
gaccatggggcagcatcttgatgta

SEQ ID NO: 118720 - DNA, 25 bp, Canis familiaris
gaccatggctgtgtgccttgtgtgt

SEQ ID NO: 118721 - DNA, 25 bp, Canis familiaris
gaccatcctggttgtttgttggaac

SEQ ID NO: 118722 - DNA, 25 bp, Canis familiaris
gaccaccaggctgttcagttgctgg

SEQ ID NO: 118723 - DNA, 25 bp, Canis familiaris
gaccatcaaactggctccagaatag

SEQ ID NO: 118724 - DNA, 25 bp, Canis familiaris
gaccatcgcgacggtccggagatgg

SEQ ID NO: 118725 - DNA, 25 bp, Canis familiaris
gaccacctgactggtgccttatgga

SEQ ID NO: 118726 - DNA, 25 bp, Canis familiaris
gagctagcctaatgtcgtgtatgtt

SEQ ID NO: 118727 - DNA, 25 bp, Canis familiaris
gaccagccgaacatctgtttgttgt

SEQ ID NO: 118728 - DNA, 25 bp, Canis familiaris
gaccatgtcgatcttgagtttgtgt

SEQ ID NO: 118729 - DNA, 25 bp, Canis familiaris
gaccaagcgcagcattcagtttgta

SEQ ID NO: 118730 - DNA, 25 bp, Canis familiaris
gaccagagtcagctactcttcggtt

SEQ ID NO: 118731 - DNA, 25 bp, Canis familiaris
gaccagaccggttgcttttgggtgt

SEQ ID NO: 118732 - DNA, 25 bp, Canis familiaris
gaccaacccaaaccgagtgaggctt

SEQ ID NO: 118733 - DNA, 25 bp, Canis familiaris
gaccaaccaaagagccagccagagc

SEQ ID NO: 118734 - DNA, 25 bp, Canis familiaris
gaccaaccttagttaagcatggact

SEQ ID NO: 118735 - DNA, 25 bp, Canis familiaris
gaccaccagttatgtcaacttgccc

SEQ ID NO: 118736 - DNA, 25 bp, Canis familiaris
gaccaacactctagagtaccctgcc

SEQ ID NO: 118737 - DNA, 25 bp, Canis familiaris
gaccacacaccaggtgtgcaccttc

SEQ ID NO: 118738 - DNA, 25 bp, Canis familiaris
gaccagcatcacccagaatgacatc

SEQ ID NO: 118739 - DNA, 25 bp, Canis familiaris
gagccaacactgtccagatagctgc

SEQ ID NO: 118740 - DNA, 25 bp, Canis familiaris
gagccaactctgtcggtagtggaag

SEQ ID NO: 118741 - DNA, 25 bp, Canis familiaris
gagccgaccaactgcttggagaacc

SEQ ID NO: 118742 - DNA, 25 bp, Canis familiaris
gagctgtaaaactccacgacaacct

SEQ ID NO: 118743 - DNA, 25 bp, Canis familiaris
gagtccaaggaagcccaaaacctgc

SEQ ID NO: 118744 - DNA, 25 bp, Canis familiaris
gagccaagggaatcccaagaaccct

SEQ ID NO: 118745 - DNA, 25 bp, Canis familiaris
gagccaatggtgcatacccaagtcc

SEQ ID NO: 118746 - DNA, 25 bp, Canis familiaris
gaccaatcgtcctaactacgtgaaa

SEQ ID NO: 118747 - DNA, 25 bp, Canis familiaris
gaccacccattccaactgatggaaa

SEQ ID NO: 118748 - DNA, 25 bp, Canis familiaris
gaccacctcttccataaatggtgct

SEQ ID NO: 118749 - DNA, 25 bp, Canis familiaris
gaccagcctttcctgcagaaggtca

SEQ ID NO: 118750 - DNA, 25 bp, Canis familiaris
gaccagccctcttggaacagagatc

SEQ ID NO: 118751 - DNA, 25 bp, Canis familiaris
gagcctacctgcaaggaactggcac

SEQ ID NO: 118752 - DNA, 25 bp, Canis familiaris
gagccacaccacaaggagacttcat

SEQ ID NO: 118753 - DNA, 25 bp, Canis familiaris
gagcgacaccactatggagaaataa

SEQ ID NO: 118754 - DNA, 25 bp, Canis familiaris
gagctgacatccagaggacggtcta

SEQ ID NO: 118755 - DNA, 25 bp, Canis familiaris
gagctacattttgagacgggtcaca

SEQ ID NO: 118756 - DNA, 25 bp, Canis familiaris
gagctggcgttagagacgattacaa

SEQ ID NO: 118757 - DNA, 25 bp, Canis familiaris
gagcgtcgtcagaggccgaaacaag

SEQ ID NO: 118758 - DNA, 25 bp, Canis familiaris
gagcctggtaattgtgtaaaacttc

SEQ ID NO: 118759 - DNA, 25 bp, Canis familiaris
gagcatttggaattaataaagcact

SEQ ID NO: 118760 - DNA, 25 bp, Canis familiaris
gagccattgcaatgcatcaataaaa

SEQ ID NO: 118761 - DNA, 25 bp, Canis familiaris
gagccctgacaggacaacagtacat

SEQ ID NO: 118762 - DNA, 25 bp, Canis familiaris
gaccagctcaagaaagaagtgaccc

SEQ ID NO: 118763 - DNA, 25 bp, Canis familiaris
gaccagtgcagacagtggaggagcc

SEQ ID NO: 118764 - DNA, 25 bp, Canis familiaris
gaccaggcggacctgggagtgtccc

SEQ ID NO: 118765 - DNA, 25 bp, Canis familiaris
gaccagatggggggtgtgcgtgctc

SEQ ID NO: 118766 - DNA, 25 bp, Canis familiaris
gaccactcttgggagtgctgcagtc

SEQ ID NO: 118767 - DNA, 25 bp, Canis familiaris
gaccatctgctgtagctcaggtagg

SEQ ID NO: 118768 - DNA, 25 bp, Canis familiaris
gagccttcgaatccacgatagcgga

SEQ ID NO: 118769 - DNA, 25 bp, Canis familiaris
gagccttctagtcctagacatccag

SEQ ID NO: 118770 - DNA, 25 bp, Canis familiaris
gagcctttagtttttcatccatata

SEQ ID NO: 118771 - DNA, 25 bp, Canis familiaris
gaccatataagtccatgttctccta

SEQ ID NO: 118772 - DNA, 25 bp, Canis familiaris
gaccatgaattaaagttctccacat

SEQ ID NO: 118773 - DNA, 25 bp, Canis familiaris
gaccaggagtcaaactgaccctatc

SEQ ID NO: 118774 - DNA, 25 bp, Canis familiaris
gaccaggaaaagcgcagccttcagc

SEQ ID NO: 118775 - DNA, 25 bp, Canis familiaris
gaccatcgaagctgggcagcactgc

SEQ ID NO: 118776 - DNA, 25 bp, Canis familiaris
gaccatccaagaaggacagcgcagc

SEQ ID NO: 118777 - DNA, 25 bp, Canis familiaris
gaccatccgagagagcatcctcatc

SEQ ID NO: 118778 - DNA, 25 bp, Canis familiaris
gagcgaccttcagagcattctagct

SEQ ID NO: 118779 - DNA, 25 bp, Canis familiaris
gagagcccaggagagtttcagtagt

SEQ ID NO: 118780 - DNA, 25 bp, Canis familiaris
gagcagcccaggaaacctgctagga

SEQ ID NO: 118781 - DNA, 25 bp, Canis familiaris
gagcctgcccaggaacctgtagaat

SEQ ID NO: 118782 - DNA, 25 bp, Canis familiaris
gagcctaccatgatatccttggcag

SEQ ID NO: 118783 - DNA, 25 bp, Canis familiaris
gagcctacagctaggacctggggat

SEQ ID NO: 118784 - DNA, 25 bp, Canis familiaris
gaccagaagcctgggctctgggggc

SEQ ID NO: 118785 - DNA, 25 bp, Canis familiaris
gaccagcaaatcggtgcactgatcg

SEQ ID NO: 118786 - DNA, 25 bp, Canis familiaris
gaccacaaacattgtccgacgcatc

SEQ ID NO: 118787 - DNA, 25 bp, Canis familiaris
gaccagcaagtattacgtgaccatc

SEQ ID NO: 118788 - DNA, 25 bp, Canis familiaris
gaccagcaagtattacgtgaccatc

SEQ ID NO: 118789 - DNA, 25 bp, Canis familiaris
gaccataggctattagggacactat

SEQ ID NO: 118790 - DNA, 25 bp, Canis familiaris
gaccatcagccttctcaggagaagc

SEQ ID NO: 118791 - DNA, 25 bp, Canis familiaris
gagcctctggttaagggtagtcctt

SEQ ID NO: 118792 - DNA, 25 bp, Canis familiaris
gagccttttaagtgacaatgtacct

SEQ ID NO: 118793 - DNA, 25 bp, Canis familiaris
gagcctgtatcaaagtcaccaagta

SEQ ID NO: 118794 - DNA, 25 bp, Canis familiaris
gagctgcggactgaggaccaaggtg

SEQ ID NO: 118795 - DNA, 25 bp, Canis familiaris
gagccaaggctttcttcaaaggtgc

SEQ ID NO: 118796 - DNA, 25 bp, Canis familiaris
gaccaagggtacaatccaatgaata

SEQ ID NO: 118797 - DNA, 25 bp, Canis familiaris
gaccagcggtctaaatacgatgaat

SEQ ID NO: 118798 - DNA, 25 bp, Canis familiaris
gaccacagtcctaaacaccaggaaa

SEQ ID NO: 118799 - DNA, 25 bp, Canis familiaris
gaccaaggcctaaaccagcctacag

SEQ ID NO: 118800 - DNA, 25 bp, Canis familiaris
gttccgaccataaacgatgccgact

SEQ ID NO: 118801 - DNA, 25 bp, Canis familiaris
gttggaacgatgagcaccatgccgg

SEQ ID NO: 118802 - DNA, 25 bp, Canis familiaris
gagaatgaaggagggcccacacgag

SEQ ID NO: 118803 - DNA, 25 bp, Canis familiaris
gagactaactgacagattcacaaag

SEQ ID NO: 118804 - DNA, 25 bp, Canis familiaris
gagcctaactatgcaaactcaccag

SEQ ID NO: 118805 - DNA, 25 bp, Canis familiaris
gagcctaatgctatcttgaagccca

SEQ ID NO: 118806 - DNA, 25 bp, Canis familiaris
gagccaagtgtgggcctgaactcac

SEQ ID NO: 118807 - DNA, 25 bp, Canis familiaris
gagccaggggcatcactgaagtctc

SEQ ID NO: 118808 - DNA, 25 bp, Canis familiaris
gagctcagtggtcccaactagactc

SEQ ID NO: 118809 - DNA, 25 bp, Canis familiaris
gagccttggctgaccattctatggc

SEQ ID NO: 118810 - DNA, 25 bp, Canis familiaris
gagcctggccgagcaggtgcaggcc

SEQ ID NO: 118811 - DNA, 25 bp, Canis familiaris
gaccagtgcctgccacaggaagtgc

SEQ ID NO: 118812 - DNA, 25 bp, Canis familiaris
gaccagccctgatatggacacgtgg

SEQ ID NO: 118813 - DNA, 25 bp, Canis familiaris
gaccaggcacagaaagctgaaggtg

SEQ ID NO: 118814 - DNA, 25 bp, Canis familiaris
gaccagagccaccaacaggagctcg

SEQ ID NO: 118815 - DNA, 25 bp, Canis familiaris
gaccaaggcacgaacacgctgtgtg

SEQ ID NO: 118816 - DNA, 25 bp, Canis familiaris
gaccacgcgactgagaggctgagcg

SEQ ID NO: 118817 - DNA, 25 bp, Canis familiaris
gaccagcagaacagaggcgcggggc

SEQ ID NO: 118818 - DNA, 25 bp, Canis familiaris
gaccagagagagagcccaggggacc

SEQ ID NO: 118819 - DNA, 25 bp, Canis familiaris
gaccatgagctgagtgggaaggcag

SEQ ID NO: 118820 - DNA, 25 bp, Canis familiaris
gagaatgatcggctgctctgaaagg

SEQ ID NO: 118821 - DNA, 25 bp, Canis familiaris
gagaaaggggtattgcaaagcagtg

SEQ ID NO: 118822 - DNA, 25 bp, Canis familiaris
gagctgaacgggaagctcactggca

SEQ ID NO: 118823 - DNA, 25 bp, Canis familiaris
gaccatctcagggacctcagtggat

SEQ ID NO: 118824 - DNA, 25 bp, Canis familiaris
gaccatccagcttgacctggctggt

SEQ ID NO: 118825 - DNA, 25 bp, Canis familiaris
gaccagccactggttctgggagtga

SEQ ID NO: 118826 - DNA, 25 bp, Canis familiaris
gagccccagggtgctggtatggact

SEQ ID NO: 118827 - DNA, 25 bp, Canis familiaris
gaccaccaaggtatggccatggcta

SEQ ID NO: 118828 - DNA, 25 bp, Canis familiaris
gaccacccaggcatatgggcagcag

SEQ ID NO: 118829 - DNA, 25 bp, Canis familiaris
gaccaatcctaccaatgggcacagt

SEQ ID NO: 118830 - DNA, 25 bp, Canis familiaris
gaccaatcttggggatgtacactga

SEQ ID NO: 118831 - DNA, 25 bp, Canis familiaris
gagccaacgtgaggtaggtgtctga

SEQ ID NO: 118832 - DNA, 25 bp, Canis familiaris
gagccaacgtctgagaagtactgca

SEQ ID NO: 118833 - DNA, 25 bp, Canis familiaris
gaccagatcaatgccagcaagaacg

SEQ ID NO: 118834 - DNA, 25 bp, Canis familiaris
gaccagtttctcaagcaagacctcc

SEQ ID NO: 118835 - DNA, 25 bp, Canis familiaris
gagcctgttttccagcaaattcagc

SEQ ID NO: 118836 - DNA, 25 bp, Canis familiaris
gagcctggtttcagcaagtccagtg

SEQ ID NO: 118837 - DNA, 25 bp, Canis familiaris
gagacgagtcccaacggcaaagatg

SEQ ID NO: 118838 - DNA, 25 bp, Canis familiaris
gagcctagtcttcactgggaagcac

SEQ ID NO: 118839 - DNA, 25 bp, Canis familiaris
gagcctggtcatcaacttgcaatac

SEQ ID NO: 118840 - DNA, 25 bp, Canis familiaris
gagcctgcggcttaatttgactcaa

SEQ ID NO: 118841 - DNA, 25 bp, Canis familiaris
gagcccaatgtggaacttgatccca

SEQ ID NO: 118842 - DNA, 25 bp, Canis familiaris
gaccacagtgtaaatttgacttgca

SEQ ID NO: 118843 - DNA, 25 bp, Canis familiaris
gaccagatattcacattcttcattt

SEQ ID NO: 118844 - DNA, 25 bp, Canis familiaris
gagcgtgatattactgcttccttta

SEQ ID NO: 118845 - DNA, 25 bp, Canis familiaris
gagcgtggctacagcttcaccacca

SEQ ID NO: 118846 - DNA, 25 bp, Canis familiaris
gagcgtgaggacaggaagtccacaa

SEQ ID NO: 118847 - DNA, 25 bp, Canis familiaris
gagcctgaggtccgtatttgactaa

SEQ ID NO: 118848 - DNA, 25 bp, Canis familiaris
gagccatagcgtaatgtataaactt

SEQ ID NO: 118849 - DNA, 25 bp, Canis familiaris
gaccaacactgttcttgaaactatc

SEQ ID NO: 118850 - DNA, 25 bp, Canis familiaris
gagctcaaccgttttacattcctct

SEQ ID NO: 118851 - DNA, 25 bp, Canis familiaris
gagccgaccgtgatcgatatgtctt

SEQ ID NO: 118852 - DNA, 25 bp, Canis familiaris
gaccagagctcgattcgatgttttc

SEQ ID NO: 118853 - DNA, 25 bp, Canis familiaris
gaccaagtcgtgtttcattcattct

SEQ ID NO: 118854 - DNA, 25 bp, Canis familiaris
gaccagaattgttttttctcttctc

SEQ ID NO: 118855 - DNA, 25 bp, Canis familiaris
gagccaaacctggttttgctttcct

SEQ ID NO: 118856 - DNA, 25 bp, Canis familiaris
gagccagaaaacctctgttctttcc

SEQ ID NO: 118857 - DNA, 25 bp, Canis familiaris
gagccgaacaagttctgcccatatt

SEQ ID NO: 118858 - DNA, 25 bp, Canis familiaris
gagcccattaaagtctgtctctttg

SEQ ID NO: 118859 - DNA, 25 bp, Canis familiaris
gagcctcattaaacgagttatttgg

SEQ ID NO: 118860 - DNA, 25 bp, Canis familiaris
gagccagctaacgccagttgttggg

SEQ ID NO: 118861 - DNA, 25 bp, Canis familiaris
gaccactatagaaccagtttgtacc

SEQ ID NO: 118862 - DNA, 25 bp, Canis familiaris
gagcaccttcaaactaaatcgtagc

SEQ ID NO: 118863 - DNA, 25 bp, Canis familiaris
gagctgggttaagtagattcgtatc

SEQ ID NO: 118864 - DNA, 25 bp, Canis familiaris
gagctgaggggaaacaactgcaatg

SEQ ID NO: 118865 - DNA, 25 bp, Canis familiaris
gagctacgggggacacatctgaaaa

SEQ ID NO: 118866 - DNA, 25 bp, Canis familiaris
gagccacgggaggtgtctcgaaata

SEQ ID NO: 118867 - DNA, 25 bp, Canis familiaris
gagccacgagggttgtctatgggag

SEQ ID NO: 118868 - DNA, 25 bp, Canis familiaris
gagacctggaggtgttcttggtacc

SEQ ID NO: 118869 - DNA, 25 bp, Canis familiaris
gagctttctgggtggacttggtgac

SEQ ID NO: 118870 - DNA, 25 bp, Canis familiaris
gagcttgtctgggggaagcctggag

SEQ ID NO: 118871 - DNA, 25 bp, Canis familiaris
gagctcttccaggtggatcctaagg

SEQ ID NO: 118872 - DNA, 25 bp, Canis familiaris
gagccttacatggtttcctatgacc

SEQ ID NO: 118873 - DNA, 25 bp, Canis familiaris
gagccacatccagtttttaagtcca

SEQ ID NO: 118874 - DNA, 25 bp, Canis familiaris
gagctcctccatatttaagttccag

SEQ ID NO: 118875 - DNA, 25 bp, Canis familiaris
gagccactcaatcatttgctagttc

SEQ ID NO: 118876 - DNA, 25 bp, Canis familiaris
gaccagcactgtcttgtctgagttc

SEQ ID NO: 118877 - DNA, 25 bp, Canis familiaris
gagccgcctgtcttggttagatggc

SEQ ID NO: 118878 - DNA, 25 bp, Canis familiaris
gagcccctctccatttgagagagca

SEQ ID NO: 118879 - DNA, 25 bp, Canis familiaris
gagctggtcctctgtctggaggaca

SEQ ID NO: 118880 - DNA, 25 bp, Canis familiaris
gagctaatactctttcttagaaaca

SEQ ID NO: 118881 - DNA, 25 bp, Canis familiaris
gagccactttatttctctagaaccc

SEQ ID NO: 118882 - DNA, 25 bp, Canis familiaris
gagcctcttcaagctcatctacaac

SEQ ID NO: 118883 - DNA, 25 bp, Canis familiaris
gagccgcaccttgtcatgtaccatc

SEQ ID NO: 118884 - DNA, 25 bp, Canis familiaris
gaccagcaccgggaatttgccatgg

SEQ ID NO: 118885 - DNA, 25 bp, Canis familiaris
gaccacacctgatgacttggtcagg

SEQ ID NO: 118886 - DNA, 25 bp, Canis familiaris
gaccagactggaggatctctgactc

SEQ ID NO: 118887 - DNA, 25 bp, Canis familiaris
gaccagagtacagcattctgatcat

SEQ ID NO: 118888 - DNA, 25 bp, Canis familiaris
gaccaggctcaaagatgtggcatat

SEQ ID NO: 118889 - DNA, 25 bp, Canis familiaris
gaccagtgcctgatgattctcaata

SEQ ID NO: 118890 - DNA, 25 bp, Canis familiaris
gaccaggagcatctgatttaaccag

SEQ ID NO: 118891 - DNA, 25 bp, Canis familiaris
taccggaagactcttccaccagggt

SEQ ID NO: 118892 - DNA, 25 bp, Canis familiaris
gagccggaaggtctttcaaggcgtc

SEQ ID NO: 118893 - DNA, 25 bp, Canis familiaris
gagccaagaagggaggttccacttt

SEQ ID NO: 118894 - DNA, 25 bp, Canis familiaris
gagccagtgtattccaggttaagtt

SEQ ID NO: 118895 - DNA, 25 bp, Canis familiaris
gagcctagtctctggtttcaatatt

SEQ ID NO: 118896 - DNA, 25 bp, Canis familiaris
gatcctgggtcaaggtgcccaagtg

SEQ ID NO: 118897 - DNA, 25 bp, Canis familiaris
tgacacagggtctggggtccggacc

SEQ ID NO: 118898 - DNA, 25 bp, Canis familiaris
gagccagtagtctgggtatgccccc

SEQ ID NO: 118899 - DNA, 25 bp, Canis familiaris
gagccagtttagctgtggtggtccc

SEQ ID NO: 118900 - DNA, 25 bp, Canis familiaris
gagccactctatgttggaggggccc

SEQ ID NO: 118901 - DNA, 25 bp, Canis familiaris
gaccaacttcctcagcagaggggcc

SEQ ID NO: 118902 - DNA, 25 bp, Canis familiaris
gaccaactcttcagagaacggatac

SEQ ID NO: 118903 - DNA, 25 bp, Canis familiaris
gaccaccactgtaaagaatcctgag

SEQ ID NO: 118904 - DNA, 25 bp, Canis familiaris
gaccaccgtggaacacagtgcacta

SEQ ID NO: 118905 - DNA, 25 bp, Canis familiaris
gaccagcctggccaacatggtgaaa

SEQ ID NO: 118906 - DNA, 25 bp, Canis familiaris
gaccacctggcgtgcaagtgtgaga

SEQ ID NO: 118907 - DNA, 25 bp, Canis familiaris
gaccacctgaccttagtgttcacat

SEQ ID NO: 118908 - DNA, 25 bp, Canis familiaris
gaccactacaccaatgactttgcct

SEQ ID NO: 118909 - DNA, 25 bp, Canis familiaris
gagccagaaccacatattcttctct

SEQ ID NO: 118910 - DNA, 25 bp, Canis familiaris
gagccgattctactataattcagtc

SEQ ID NO: 118911 - DNA, 25 bp, Canis familiaris
gagctccttccagaaattagcaccc

SEQ ID NO: 118912 - DNA, 25 bp, Canis familiaris
gagcttctacctctaagtctgagtc

SEQ ID NO: 118913 - DNA, 25 bp, Canis familiaris
gagcttctacctctaagtctgagtc

SEQ ID NO: 118914 - DNA, 25 bp, Canis familiaris
gagtgttagcttacccaacaggtca

SEQ ID NO: 118915 - DNA, 25 bp, Canis familiaris
gagcttacttgttcccaagcaggac

SEQ ID NO: 118916 - DNA, 25 bp, Canis familiaris
gagcccacgatatctttatcaaaca

SEQ ID NO: 118917 - DNA, 25 bp, Canis familiaris
gagccatatgaacatcctgtatcag

SEQ ID NO: 118918 - DNA, 25 bp, Canis familiaris
gagctgttgaacacttgacaagcag

SEQ ID NO: 118919 - DNA, 25 bp, Canis familiaris
gagctttgatgattagcttcccact

SEQ ID NO: 118920 - DNA, 25 bp, Canis familiaris
gagcttattcatcagcctgctgaac

SEQ ID NO: 118921 - DNA, 25 bp, Canis familiaris
gaccaatgtcatcatcgtcatcaac

SEQ ID NO: 118922 - DNA, 25 bp, Canis familiaris
gaccagagttggtgtcaccacgccc

SEQ ID NO: 118923 - DNA, 25 bp, Canis familiaris
gaccagatggttttgtcacacctgc

SEQ ID NO: 118924 - DNA, 25 bp, Canis familiaris
gaccagtgtgagactcgaaccctgc

SEQ ID NO: 118925 - DNA, 25 bp, Canis familiaris
gagcccttggtcgtgaggccaagct

SEQ ID NO: 118926 - DNA, 25 bp, Canis familiaris
gaccactcggtcaagaatcacaagg

SEQ ID NO: 118927 - DNA, 25 bp, Canis familiaris
gaccacgcggtcagatgaacatcga

SEQ ID NO: 118928 - DNA, 25 bp, Canis familiaris
gagccgggccaaagatgacatcacg

SEQ ID NO: 118929 - DNA, 25 bp, Canis familiaris
gagcctggtgctcctggaggatgtc

SEQ ID NO: 118930 - DNA, 25 bp, Canis familiaris
gagctcgggcccagaagatgtcagc

SEQ ID NO: 118931 - DNA, 25 bp, Canis familiaris
gagccggaagccaagaagagcaaga

SEQ ID NO: 118932 - DNA, 25 bp, Canis familiaris
gaccagcgacaccaggatagacata

SEQ ID NO: 118933 - DNA, 25 bp, Canis familiaris
gaccacagaccatcagttgtcatga

SEQ ID NO: 118934 - DNA, 25 bp, Canis familiaris
gaccagcagtcattacagttttatt

SEQ ID NO: 118935 - DNA, 25 bp, Canis familiaris
gagcccagtctgttgactttgtgaa

SEQ ID NO: 118936 - DNA, 25 bp, Canis familiaris
gagcctagtcagatcgcgttatgaa

SEQ ID NO: 118937 - DNA, 25 bp, Canis familiaris
gagcctggccatagttagaaagaaa

SEQ ID NO: 118938 - DNA, 25 bp, Canis familiaris
gagccttggttgttacacagagatt

SEQ ID NO: 118939 - DNA, 25 bp, Canis familiaris
gagccttgtatttttacatgctttc

SEQ ID NO: 118940 - DNA, 25 bp, Canis familiaris
gagcttttaatgttaagtcatatta

SEQ ID NO: 118941 - DNA, 25 bp, Canis familiaris
gagctgtgtttgtttactgccatag

SEQ ID NO: 118942 - DNA, 25 bp, Canis familiaris
gagctggggttaacactgtcaccac

SEQ ID NO: 118943 - DNA, 25 bp, Canis familiaris
gagctgcagcctctgatactatatc

SEQ ID NO: 118944 - DNA, 25 bp, Canis familiaris
gagctggcctcccagaagatttggg

SEQ ID NO: 118945 - DNA, 25 bp, Canis familiaris
gagctatcctcccataggactggga

SEQ ID NO: 118946 - DNA, 25 bp, Canis familiaris
gagcccacccagaagtaggggacca

SEQ ID NO: 118947 - DNA, 25 bp, Canis familiaris
gagccccctgagaggatggagttca

SEQ ID NO: 118948 - DNA, 25 bp, Canis familiaris
gagcccgagaagaccaaggaagtca

SEQ ID NO: 118949 - DNA, 25 bp, Canis familiaris
gagccgggaaaataagaagtacact

SEQ ID NO: 118950 - DNA, 25 bp, Canis familiaris
tggccgggaccgtggaaggtacact

SEQ ID NO: 118951 - DNA, 25 bp, Canis familiaris
gagccggagacgagggattggaaac

SEQ ID NO: 118952 - DNA, 25 bp, Canis familiaris
gagccggtacaatggagaagtatgc

SEQ ID NO: 118953 - DNA, 25 bp, Canis familiaris
gagcctttaaagcctagatcagtat

SEQ ID NO: 118954 - DNA, 25 bp, Canis familiaris
gagcctttagtcacggcacagttcc

SEQ ID NO: 118955 - DNA, 25 bp, Canis familiaris
gagccgtggagtaccggcactaggc

SEQ ID NO: 118956 - DNA, 25 bp, Canis familiaris
gagccgcctggataccgcagctagg

SEQ ID NO: 118957 - DNA, 25 bp, Canis familiaris
gagccgcctggataccgcagctagg

SEQ ID NO: 118958 - DNA, 25 bp, Canis familiaris
gaccagccagactacagactgcagc

SEQ ID NO: 118959 - DNA, 25 bp, Canis familiaris
gaccagcgtatcttcgagctactat

SEQ ID NO: 118960 - DNA, 25 bp, Canis familiaris
gaccaatgtctcttaggtgaccaga

SEQ ID NO: 118961 - DNA, 25 bp, Canis familiaris
gaccaatgtctgtaaagtgctctga

SEQ ID NO: 118962 - DNA, 25 bp, Canis familiaris
gagccagagtctttatattcctgac

SEQ ID NO: 118963 - DNA, 25 bp, Canis familiaris
gagcctaggtaggtgattcctcagt

SEQ ID NO: 118964 - DNA, 25 bp, Canis familiaris
gagcctgatgcgggattagatcctc

SEQ ID NO: 118965 - DNA, 25 bp, Canis familiaris
gagctgtaggggctacactgctgcc

SEQ ID NO: 118966 - DNA, 25 bp, Canis familiaris
gagctgggagggtaaggcgtccggc

SEQ ID NO: 118967 - DNA, 25 bp, Canis familiaris
gagctggagggggccgaattcaccc

SEQ ID NO: 118968 - DNA, 25 bp, Canis familiaris
gagctggagaatgcagtccatatgt

SEQ ID NO: 118969 - DNA, 25 bp, Canis familiaris
gagccgcagataccaataactgttc

SEQ ID NO: 118970 - DNA, 25 bp, Canis familiaris
gagccagcgaagccaacacgtgctc

SEQ ID NO: 118971 - DNA, 25 bp, Canis familiaris
gaccagcagcgggaggcggatctgc

SEQ ID NO: 118972 - DNA, 25 bp, Canis familiaris
gaccaagcagtcagagtcgatgccc

SEQ ID NO: 118973 - DNA, 25 bp, Canis familiaris
gaccaagaggaagacgagcgcgcgc

SEQ ID NO: 118974 - DNA, 25 bp, Canis familiaris
gaccacgaggacgctcaggagtagc

SEQ ID NO: 118975 - DNA, 25 bp, Canis familiaris
gaccacggagatgtctaggggcacc

SEQ ID NO: 118976 - DNA, 25 bp, Canis familiaris
gaccacagtgcctttttgggtcacc

SEQ ID NO: 118977 - DNA, 25 bp, Canis familiaris
gaccagcaggccttcttagaggtaa

SEQ ID NO: 118978 - DNA, 25 bp, Canis familiaris
gaccagcggccaggtggaggagtat

SEQ ID NO: 118979 - DNA, 25 bp, Canis familiaris
gaccaccgcctggagagagagagga

SEQ ID NO: 118980 - DNA, 25 bp, Canis familiaris
gagccatccagacctgggaggggga

SEQ ID NO: 118981 - DNA, 25 bp, Canis familiaris
gagccatcctaggacttgaggggga

SEQ ID NO: 118982 - DNA, 25 bp, Canis familiaris
gagcctggggagccttaggaggtgg

SEQ ID NO: 118983 - DNA, 25 bp, Canis familiaris
gagcttgttgggggtcctgagagtg

SEQ ID NO: 118984 - DNA, 25 bp, Canis familiaris
gagcttcctggagaataatcagcag

SEQ ID NO: 118985 - DNA, 25 bp, Canis familiaris
gagcttctgctgcaaacaaacctca

SEQ ID NO: 118986 - DNA, 25 bp, Canis familiaris
gagccgttgcgatctgaagaggccg

SEQ ID NO: 118987 - DNA, 25 bp, Canis familiaris
gagcccgtgcgatctgaagagggcc

SEQ ID NO: 118988 - DNA, 25 bp, Canis familiaris
gagcccgctgggcagcggacaggac

SEQ ID NO: 118989 - DNA, 25 bp, Canis familiaris
gagcctctgtgtagtacagggcaga

SEQ ID NO: 118990 - DNA, 25 bp, Canis familiaris
gagccacctgctcatacagggaagc

SEQ ID NO: 118991 - DNA, 25 bp, Canis familiaris
gagcgcaacgcccaaaggtggcgcc

SEQ ID NO: 118992 - DNA, 25 bp, Canis familiaris
gaccaagaccaaacagtgggcagag

SEQ ID NO: 118993 - DNA, 25 bp, Canis familiaris
gagcgcaagtactccgtgtggatcg

SEQ ID NO: 118994 - DNA, 25 bp, Canis familiaris
gagccaaaggcatccaggtgagcac

SEQ ID NO: 118995 - DNA, 25 bp, Canis familiaris
gagccaagggcaacagcagcagtcc

SEQ ID NO: 118996 - DNA, 25 bp, Canis familiaris
gaccaaggacatatggaatccacag

SEQ ID NO: 118997 - DNA, 25 bp, Canis familiaris
gaccaaggtgccagctattcaacag

SEQ ID NO: 118998 - DNA, 25 bp, Canis familiaris
gaccaagaacacagtgattacacac

SEQ ID NO: 118999 - DNA, 25 bp, Canis familiaris
gaccaatgaaatcatgtttaccccc

SEQ ID NO: 119000 - DNA, 25 bp, Canis familiaris
gaccaagcaatcccatgtgattatc

SEQ ID NO: 119001 - DNA, 25 bp, Canis familiaris
gaccaccaagctctgtagctatctc

SEQ ID NO: 119002 - DNA, 25 bp, Canis familiaris
gaccacaaagtgctagatgctctta

SEQ ID NO: 119003 - DNA, 25 bp, Canis familiaris
gagccacaacggcatcgaggtcatc

SEQ ID NO: 119004 - DNA, 25 bp, Canis familiaris
gaccacagagaccctgcaggagtac

SEQ ID NO: 119005 - DNA, 25 bp, Canis familiaris
gagccaacaagccctgggatggggg

SEQ ID NO: 119006 - DNA, 25 bp, Canis familiaris
gagccaacaagtgaggaggcgccgc

SEQ ID NO: 119007 - DNA, 25 bp, Canis familiaris
gagccacgtcacttatgagggccgc

SEQ ID NO: 119008 - DNA, 25 bp, Canis familiaris
gagccagagtcaggctataagcgcc

SEQ ID NO: 119009 - DNA, 25 bp, Canis familiaris
gagccacagtcaagttacatgccca

SEQ ID NO: 119010 - DNA, 25 bp, Canis familiaris
gagcgcaaatcactgttcagcaggc

SEQ ID NO: 119011 - DNA, 25 bp, Canis familiaris
gagcgcaaatcactgctcagcaacc

SEQ ID NO: 119012 - DNA, 25 bp, Canis familiaris
gagccaaatgatccgagatctcccg

SEQ ID NO: 119013 - DNA, 25 bp, Canis familiaris
gagccaaacgggtcatcatctccgc

SEQ ID NO: 119014 - DNA, 25 bp, Canis familiaris
gagccaaactgggtcaaccacgatt

SEQ ID NO: 119015 - DNA, 25 bp, Canis familiaris
gagcccaagaggggaaccactttga

SEQ ID NO: 119016 - DNA, 25 bp, Canis familiaris
gagactacaagggaagaaaatccga

SEQ ID NO: 119017 - DNA, 25 bp, Canis familiaris
gagcctcggagggacaaagaccacg

SEQ ID NO: 119018 - DNA, 25 bp, Canis familiaris
gagcccgacgtgggaattgatcccg

SEQ ID NO: 119019 - DNA, 25 bp, Canis familiaris
gagcccgttgtgggactgttttcta

SEQ ID NO: 119020 - DNA, 25 bp, Canis familiaris
gagccactttggagatttactcctc

SEQ ID NO: 119021 - DNA, 25 bp, Canis familiaris
gagccttggtggaagttacctctct

SEQ ID NO: 119022 - DNA, 25 bp, Canis familiaris
gagccttggtgcaggtgctgaactc

SEQ ID NO: 119023 - DNA, 25 bp, Canis familiaris
gagcctggggctaggaggaactcca

SEQ ID NO: 119024 - DNA, 25 bp, Canis familiaris
gagccatgggctcagcggaaaggaa

SEQ ID NO: 119025 - DNA, 25 bp, Canis familiaris
gagcgagacagtgaaggaaagtgga

SEQ ID NO: 119026 - DNA, 25 bp, Canis familiaris
gagctggaacgtgtggccaagtcta

SEQ ID NO: 119027 - DNA, 25 bp, Canis familiaris
gagctggaacgtgtggccaagtcta

SEQ ID NO: 119028 - DNA, 25 bp, Canis familiaris
gagcgggacctgaggctcgtgaaga

SEQ ID NO: 119029 - DNA, 25 bp, Canis familiaris
gagctgcggaaaagggtcggcggcc

SEQ ID NO: 119030 - DNA, 25 bp, Canis familiaris
gagctgctatagcctggggtggggc

SEQ ID NO: 119031 - DNA, 25 bp, Canis familiaris
gagccttggaccagtgtgtctggcc

SEQ ID NO: 119032 - DNA, 25 bp, Canis familiaris
gagccagaggagttcacgtttgtgc

SEQ ID NO: 119033 - DNA, 25 bp, Canis familiaris
gagccagaggggaccgtgtggggac

SEQ ID NO: 119034 - DNA, 25 bp, Canis familiaris
gaccaaggaggtcctggccaagttc

SEQ ID NO: 119035 - DNA, 25 bp, Canis familiaris
gaccaaggaggtcctggccaagttc

SEQ ID NO: 119036 - DNA, 25 bp, Canis familiaris
gaccaaggaggtcctggccaagttc

SEQ ID NO: 119037 - DNA, 25 bp, Canis familiaris
gaccaaggagggcgtgcgcgaggtc

SEQ ID NO: 119038 - DNA, 25 bp, Canis familiaris
gaccaaggagggcgtcctctatgtc

SEQ ID NO: 119039 - DNA, 25 bp, Canis familiaris
gagccaaagcaggggtgtggcctag

SEQ ID NO: 119040 - DNA, 25 bp, Canis familiaris
gagccagaacacggagctggcgtcc

SEQ ID NO: 119041 - DNA, 25 bp, Canis familiaris
gagccagaagccaagagcatctcca

SEQ ID NO: 119042 - DNA, 25 bp, Canis familiaris
gaccaactgacatgactgaccaact

SEQ ID NO: 119043 - DNA, 25 bp, Canis familiaris
gaccaaccacaagatcacagaactg

SEQ ID NO: 119044 - DNA, 25 bp, Canis familiaris
gaccaagcaaaagcaatcagtgatt

SEQ ID NO: 119045 - DNA, 25 bp, Canis familiaris
gagccaagccagtgccagaagtgct

SEQ ID NO: 119046 - DNA, 25 bp, Canis familiaris
gagccaagcggaaggccatcactgc

SEQ ID NO: 119047 - DNA, 25 bp, Canis familiaris
gagccaaggagaatgcccaaaaggg

SEQ ID NO: 119048 - DNA, 25 bp, Canis familiaris
gaccaagcacgctgaccagaaatgc

SEQ ID NO: 119049 - DNA, 25 bp, Canis familiaris
gaccaagctgcgcgaacagatcggc

SEQ ID NO: 119050 - DNA, 25 bp, Canis familiaris
gaccaagctggccgacaaggaactc

SEQ ID NO: 119051 - DNA, 25 bp, Canis familiaris
gaggcagagtcgcaaaaggtacccc

SEQ ID NO: 119052 - DNA, 25 bp, Canis familiaris
gaggcagagtcgcaaaaggtacccc

SEQ ID NO: 119053 - DNA, 25 bp, Canis familiaris
gaggcagagtcgcaaaaggtacccc

SEQ ID NO: 119054 - DNA, 25 bp, Canis familiaris
gaggcagagtcgcaaaaggtacccc

SEQ ID NO: 119055 - DNA, 25 bp, Canis familiaris
gagcgcgagcttgggaacgggacgc

SEQ ID NO: 119056 - DNA, 25 bp, Canis familiaris
gagcggagtacagtgcataccagga

SEQ ID NO: 119057 - DNA, 25 bp, Canis familiaris
gagccagtctctctgtagccagaga

SEQ ID NO: 119058 - DNA, 25 bp, Canis familiaris
gagccactgcttctgatgaggtaaa

SEQ ID NO: 119059 - DNA, 25 bp, Canis familiaris
gagccacagttgcagatgacaggga

SEQ ID NO: 119060 - DNA, 25 bp, Canis familiaris
gagccacaagctaacaagcaaggca

SEQ ID NO: 119061 - DNA, 25 bp, Canis familiaris
gagccacagtgtacaacctatcgag

SEQ ID NO: 119062 - DNA, 25 bp, Canis familiaris
gagcgacgatgtagcaccacatact

SEQ ID NO: 119063 - DNA, 25 bp, Canis familiaris
gaccactgattgaagcctcatgttg

SEQ ID NO: 119064 - DNA, 25 bp, Canis familiaris
gaccaatatccagctgctcatgtgg

SEQ ID NO: 119065 - DNA, 25 bp, Canis familiaris
gagccagtgatgacatcctctatct

SEQ ID NO: 119066 - DNA, 25 bp, Canis familiaris
gagccagattttctctgagctcttg

SEQ ID NO: 119067 - DNA, 25 bp, Canis familiaris
gagccaagttctctggagcactatt

SEQ ID NO: 119068 - DNA, 25 bp, Canis familiaris
gagccaagattcacgttaccaatta

SEQ ID NO: 119069 - DNA, 25 bp, Canis familiaris
gaccaatttaatttctaccattgta

SEQ ID NO: 119070 - DNA, 25 bp, Canis familiaris
gaccactatctacatatttccattg

SEQ ID NO: 119071 - DNA, 25 bp, Canis familiaris
gagccattactacacatgtttctag

SEQ ID NO: 119072 - DNA, 25 bp, Canis familiaris
gagccaaagtgattatgcattcttc

SEQ ID NO: 119073 - DNA, 25 bp, Canis familiaris
gaccacataatgtttgtccttctcc

SEQ ID NO: 119074 - DNA, 25 bp, Canis familiaris
gaccactgatcattttactgttccc

SEQ ID NO: 119075 - DNA, 25 bp, Canis familiaris
gagccactatatgtattgtgtctcc

SEQ ID NO: 119076 - DNA, 25 bp, Canis familiaris
gagccctggatgtgagtctggcttc

SEQ ID NO: 119077 - DNA, 25 bp, Canis familiaris
gagcctttgagctctgcatctgagc

SEQ ID NO: 119078 - DNA, 25 bp, Canis familiaris
gagccttctagaccagcatggacag

SEQ ID NO: 119079 - DNA, 25 bp, Canis familiaris
gagctattctgactcgaggtgccag

SEQ ID NO: 119080 - DNA, 25 bp, Canis familiaris
gagcttttactctgttgtgggggca

SEQ ID NO: 119081 - DNA, 25 bp, Canis familiaris
gagctttttcagtgtgtgtgtgggt

SEQ ID NO: 119082 - DNA, 25 bp, Canis familiaris
gagctgtccttttgttgttgggtgc

SEQ ID NO: 119083 - DNA, 25 bp, Canis familiaris
gagctgttctctttgtttgtactgt

SEQ ID NO: 119084 - DNA, 25 bp, Canis familiaris
gagccttctgctatgatgtagttct

SEQ ID NO: 119085 - DNA, 25 bp, Canis familiaris
gagccttcctaacttagctcactca

SEQ ID NO: 119086 - DNA, 25 bp, Canis familiaris
gagccttactcaagttcactgactc

SEQ ID NO: 119087 - DNA, 25 bp, Canis familiaris
gagccttacactgttcagactctga

SEQ ID NO: 119088 - DNA, 25 bp, Canis familiaris
gagccaacacaaacttcagacatgg

SEQ ID NO: 119089 - DNA, 25 bp, Canis familiaris
gagcgcaatactacatcattaacat

SEQ ID NO: 119090 - DNA, 25 bp, Canis familiaris
gagccagcgtctactacgatgacta

SEQ ID NO: 119091 - DNA, 25 bp, Canis familiaris
gagccagtcctagtccaatactgac

SEQ ID NO: 119092 - DNA, 25 bp, Canis familiaris
gagcctgtactcttaatcacactac

SEQ ID NO: 119093 - DNA, 25 bp, Canis familiaris
gagccgtgaccatgaaattctgcat

SEQ ID NO: 119094 - DNA, 25 bp, Canis familiaris
gagccgggccaagaacattgccaag

SEQ ID NO: 119095 - DNA, 25 bp, Canis familiaris
gagccatgggcccaaaggcaggcaa

SEQ ID NO: 119096 - DNA, 25 bp, Canis familiaris
gagctcactggataaatggggccct

SEQ ID NO: 119097 - DNA, 25 bp, Canis familiaris
gagccctggaagattgggacctagc

SEQ ID NO: 119098 - DNA, 25 bp, Canis familiaris
gagccccagagacaagggacctgat

SEQ ID NO: 119099 - DNA, 25 bp, Canis familiaris
gagctccccaggaaagcaggtcctg

SEQ ID NO: 119100 - DNA, 25 bp, Canis familiaris
gagctgaaccagaaaaacctatcgg

SEQ ID NO: 119101 - DNA, 25 bp, Canis familiaris
gagctccaccagtgtaatcactagg

SEQ ID NO: 119102 - DNA, 25 bp, Canis familiaris
gagtccaaggagatgttcccacggt

SEQ ID NO: 119103 - DNA, 25 bp, Canis familiaris
gagctgcaaatgccagtttcccaac

SEQ ID NO: 119104 - DNA, 25 bp, Canis familiaris
gagctgacatagcaagtgtcttaca

SEQ ID NO: 119105 - DNA, 25 bp, Canis familiaris
gagctcactaaaagatctatggcaa

SEQ ID NO: 119106 - DNA, 25 bp, Canis familiaris
gagccctcaaagctcattgccagta

SEQ ID NO: 119107 - DNA, 25 bp, Canis familiaris
gagcccgaaggcgtcatcgagagta

SEQ ID NO: 119108 - DNA, 25 bp, Canis familiaris
gagcccagggaccacaagtgagtca

SEQ ID NO: 119109 - DNA, 25 bp, Canis familiaris
gagcctcaagagcaacacgctggcc

SEQ ID NO: 119110 - DNA, 25 bp, Canis familiaris
gtgactctagataacctcgggccga

SEQ ID NO: 119111 - DNA, 25 bp, Canis familiaris
gagcagcgtagtgaccattaggcgt

SEQ ID NO: 119112 - DNA, 25 bp, Canis familiaris
gagcggctcaagaatctgcggaggg

SEQ ID NO: 119113 - DNA, 25 bp, Canis familiaris
gagctcctctaggtccaggagtcga

SEQ ID NO: 119114 - DNA, 25 bp, Canis familiaris
gagcctgtatgggccattgggactg

SEQ ID NO: 119115 - DNA, 25 bp, Canis familiaris
gagcctgtatgggccattgggactg

SEQ ID NO: 119116 - DNA, 25 bp, Canis familiaris
gagcctgttgcgagacttggagggc

SEQ ID NO: 119117 - DNA, 25 bp, Canis familiaris
gagcctgccctcagaaacgcagggc

SEQ ID NO: 119118 - DNA, 25 bp, Canis familiaris
gagcctggagtcagagacccagccc

SEQ ID NO: 119119 - DNA, 25 bp, Canis familiaris
gagcctttgtctgaaagcacagccc

SEQ ID NO: 119120 - DNA, 25 bp, Canis familiaris
gagccagacgtttgaaagcacaccc

SEQ ID NO: 119121 - DNA, 25 bp, Canis familiaris
gagccagcacagagaactgagcaac

SEQ ID NO: 119122 - DNA, 25 bp, Canis familiaris
gagccagcagctaagaatctaactc

SEQ ID NO: 119123 - DNA, 25 bp, Canis familiaris
gagccacagtgaagtgcactttgtc

SEQ ID NO: 119124 - DNA, 25 bp, Canis familiaris
gagcccagatgtttcctctggatcc

SEQ ID NO: 119125 - DNA, 25 bp, Canis familiaris
gatcccacagtttcccagagggtaa

SEQ ID NO: 119126 - DNA, 25 bp, Canis familiaris
gtgccaccttcagcctaaggtgtaa

SEQ ID NO: 119127 - DNA, 25 bp, Canis familiaris
gaccaagcattcttctaaagcgtta

SEQ ID NO: 119128 - DNA, 25 bp, Canis familiaris
gaccaagcatagttctgatcaagca

SEQ ID NO: 119129 - DNA, 25 bp, Canis familiaris
gaccaagtgagattgcgtcgctgca

SEQ ID NO: 119130 - DNA, 25 bp, Canis familiaris
gagcctagtagagtcagcctgctgt

SEQ ID NO: 119131 - DNA, 25 bp, Canis familiaris
gagcgcattgctaagctcactctgg

SEQ ID NO: 119132 - DNA, 25 bp, Canis familiaris
gagccaggcacaagcttgccagaga

SEQ ID NO: 119133 - DNA, 25 bp, Canis familiaris
gagccatgagcatccattgggagct

SEQ ID NO: 119134 - DNA, 25 bp, Canis familiaris
gagcctggcagagcaagtgtgcatc

SEQ ID NO: 119135 - DNA, 25 bp, Canis familiaris
gagccagtgctgcagcaactgagcc

SEQ ID NO: 119136 - DNA, 25 bp, Canis familiaris
gagccagtgcgcagactgatgagta

SEQ ID NO: 119137 - DNA, 25 bp, Canis familiaris
gagccagagatcacccatgtgtcaa

SEQ ID NO: 119138 - DNA, 25 bp, Canis familiaris
gagctatgaccacgctccagagtac

SEQ ID NO: 119139 - DNA, 25 bp, Canis familiaris
gagctgatccaaagttgcagggaca

SEQ ID NO: 119140 - DNA, 25 bp, Canis familiaris
gagctgatcaacacctgggtggcag

SEQ ID NO: 119141 - DNA, 25 bp, Canis familiaris
gagctacgagctgcctgacggccag

SEQ ID NO: 119142 - DNA, 25 bp, Canis familiaris
gagccagccagaactcatacggcca

SEQ ID NO: 119143 - DNA, 25 bp, Canis familiaris
gagcacagcacggttcaagttgccc

SEQ ID NO: 119144 - DNA, 25 bp, Canis familiaris
gagcgcagcccagtgacaggatggc

SEQ ID NO: 119145 - DNA, 25 bp, Canis familiaris
gagccacggcagcagagagcacggc

SEQ ID NO: 119146 - DNA, 25 bp, Canis familiaris
gagccgtgcgagcgaaactgcggcc

SEQ ID NO: 119147 - DNA, 25 bp, Canis familiaris
gagctctggaagcagtacatccggg

SEQ ID NO: 119148 - DNA, 25 bp, Canis familiaris
gagcctgggatgcctgttatccaga

SEQ ID NO: 119149 - DNA, 25 bp, Canis familiaris
gagcctacagtgactgtgtatccta

SEQ ID NO: 119150 - DNA, 25 bp, Canis familiaris
gagcccaaattcctgtacatatatt

SEQ ID NO: 119151 - DNA, 25 bp, Canis familiaris
gagccacaagttcataagaatatgg

SEQ ID NO: 119152 - DNA, 25 bp, Canis familiaris
gagtctgaatctacccaaaattgta

SEQ ID NO: 119153 - DNA, 25 bp, Canis familiaris
gagctccagaccatccaagaaggac

SEQ ID NO: 119154 - DNA, 25 bp, Canis familiaris
gagctgtgcagtgttaaaggaggtc

SEQ ID NO: 119155 - DNA, 25 bp, Canis familiaris
gagcttagtctctcgagcagtggtg

SEQ ID NO: 119156 - DNA, 25 bp, Canis familiaris
gagccaggtctactcaggcagggta

SEQ ID NO: 119157 - DNA, 25 bp, Canis familiaris
gagccatcagttatgctgtggggga

SEQ ID NO: 119158 - DNA, 25 bp, Canis familiaris
gagcctggctagctgttggtggaac

SEQ ID NO: 119159 - DNA, 25 bp, Canis familiaris
gagccagactgggttttgtcagaac

SEQ ID NO: 119160 - DNA, 25 bp, Canis familiaris
gagcctgaaggcatattttccagag

SEQ ID NO: 119161 - DNA, 25 bp, Canis familiaris
gagcgaagcaggctttttgctcatg

SEQ ID NO: 119162 - DNA, 25 bp, Canis familiaris
gagctgtacaggctttctttttgct

SEQ ID NO: 119163 - DNA, 25 bp, Canis familiaris
gagcctacttaagattctttctctc

SEQ ID NO: 119164 - DNA, 25 bp, Canis familiaris
gagcctaactcatttagtattactc

SEQ ID NO: 119165 - DNA, 25 bp, Canis familiaris
gagcctctaactttcaatttagcca

SEQ ID NO: 119166 - DNA, 25 bp, Canis familiaris
gagcccaattattacacatttgaac

SEQ ID NO: 119167 - DNA, 25 bp, Canis familiaris
gagcgaaacttcgagcactttgact

SEQ ID NO: 119168 - DNA, 25 bp, Canis familiaris
gagcgaaatgttcaggttttcctaa

SEQ ID NO: 119169 - DNA, 25 bp, Canis familiaris
gagctttattctcaggttatactct

SEQ ID NO: 119170 - DNA, 25 bp, Canis familiaris
gagctttagtgtctagaagatccca

SEQ ID NO: 119171 - DNA, 25 bp, Canis familiaris
gagctttttgtaaaaggacccaatg

SEQ ID NO: 119172 - DNA, 25 bp, Canis familiaris
gagctttatctttcacaatttccta

SEQ ID NO: 119173 - DNA, 25 bp, Canis familiaris
gagccatcatcgcgccaaattttgc

SEQ ID NO: 119174 - DNA, 25 bp, Canis familiaris
gagccatcatcgcgccaaattttgc

SEQ ID NO: 119175 - DNA, 25 bp, Canis familiaris
gagcaccaggccctagaaatttcta

SEQ ID NO: 119176 - DNA, 25 bp, Canis familiaris
gagcccatggcaaaaaacctgttca

SEQ ID NO: 119177 - DNA, 25 bp, Canis familiaris
gagccttggcaaaacaacgcttgtg

SEQ ID NO: 119178 - DNA, 25 bp, Canis familiaris
gagcgttgccaagattactgttggt

SEQ ID NO: 119179 - DNA, 25 bp, Canis familiaris
gagctgttagccttgattactggca

SEQ ID NO: 119180 - DNA, 25 bp, Canis familiaris
gagctgttgcacctatataacttca

SEQ ID NO: 119181 - DNA, 25 bp, Canis familiaris
gagctttgctccagtcaatgttaca

SEQ ID NO: 119182 - DNA, 25 bp, Canis familiaris
gagctgttaagcatgttgttatcaa

SEQ ID NO: 119183 - DNA, 25 bp, Canis familiaris
gagcgtctaagacttcgttcatggg

SEQ ID NO: 119184 - DNA, 25 bp, Canis familiaris
gagcgtcgatcaggagtctttattc

SEQ ID NO: 119185 - DNA, 25 bp, Canis familiaris
gagccagcgattgggctgcttctta

SEQ ID NO: 119186 - DNA, 25 bp, Canis familiaris
gagccgagatcgcgccactgcactc

SEQ ID NO: 119187 - DNA, 25 bp, Canis familiaris
gagccggagactcgcaattgcaagc

SEQ ID NO: 119188 - DNA, 25 bp, Canis familiaris
gagctggaaatccggttcaatgccc

SEQ ID NO: 119189 - DNA, 25 bp, Canis familiaris
gagctgcaaaatccggtgtaggcac

SEQ ID NO: 119190 - DNA, 25 bp, Canis familiaris
gagccacaagttacctgtaggcctt

SEQ ID NO: 119191 - DNA, 25 bp, Canis familiaris
gagccacagaaggaccgtgaggcct

SEQ ID NO: 119192 - DNA, 25 bp, Canis familiaris
gagcccgataggactctgggcagcg

SEQ ID NO: 119193 - DNA, 25 bp, Canis familiaris
gagcgctttaaagtgcgggctgggc

SEQ ID NO: 119194 - DNA, 25 bp, Canis familiaris
gagccaactaaaggaatacgaggga

SEQ ID NO: 119195 - DNA, 25 bp, Canis familiaris
taatcaagcccatggattcggggga

SEQ ID NO: 119196 - DNA, 25 bp, Canis familiaris
taatatggccctcttttgggaaaat

SEQ ID NO: 119197 - DNA, 25 bp, Canis familiaris
tctacaactcctcttttcgggaagg

SEQ ID NO: 119198 - DNA, 25 bp, Canis familiaris
gtaaacctccctctggaaagagtgg

SEQ ID NO: 119199 - DNA, 25 bp, Canis familiaris
gatggtcaaccctcttggaaaggag

SEQ ID NO: 119200 - DNA, 25 bp, Canis familiaris
gagaacaacctctctgaagaaggtg

SEQ ID NO: 119201 - DNA, 25 bp, Canis familiaris
gagcaaatgttctgggtaaaggttg

SEQ ID NO: 119202 - DNA, 25 bp, Canis familiaris
gagccacattccttgcgtgagaaag

SEQ ID NO: 119203 - DNA, 25 bp, Canis familiaris
gagcccttgccaccagaggaaaggc

SEQ ID NO: 119204 - DNA, 25 bp, Canis familiaris
gagctcctttcccagcggaaagagg

SEQ ID NO: 119205 - DNA, 25 bp, Canis familiaris
gagctgcttcatcccttgggaaatg

SEQ ID NO: 119206 - DNA, 25 bp, Canis familiaris
gagctgacctgtgtcgggacaagtt

SEQ ID NO: 119207 - DNA, 25 bp, Canis familiaris
gagctgcagcccgttcgggaagaag

SEQ ID NO: 119208 - DNA, 25 bp, Canis familiaris
gagcggccttgctctgagaggtagg

SEQ ID NO: 119209 - DNA, 25 bp, Canis familiaris
gagcaggccccagtctggggtgtgc

SEQ ID NO: 119210 - DNA, 25 bp, Canis familiaris
gagcggtcaccagagcaggtgctgc

SEQ ID NO: 119211 - DNA, 25 bp, Canis familiaris
gagccgacaccagacgtgattagca

SEQ ID NO: 119212 - DNA, 25 bp, Canis familiaris
gagacaggcccagaggtttacaagt

SEQ ID NO: 119213 - DNA, 25 bp, Canis familiaris
gagccagactcttcaaggtttacgg

SEQ ID NO: 119214 - DNA, 25 bp, Canis familiaris
gagccagggccctggtttgagaccc

SEQ ID NO: 119215 - DNA, 25 bp, Canis familiaris
gagccaggaagtttggttgtggaca

SEQ ID NO: 119216 - DNA, 25 bp, Canis familiaris
gagctctggggatggagggctggtc

SEQ ID NO: 119217 - DNA, 25 bp, Canis familiaris
gagctttttggccaagggctgttcc

SEQ ID NO: 119218 - DNA, 25 bp, Canis familiaris
gagccgttgggacagtgggcttcgg

SEQ ID NO: 119219 - DNA, 25 bp, Canis familiaris
gagacgtggacgtggtggtcgttgg

SEQ ID NO: 119220 - DNA, 25 bp, Canis familiaris
gagacctggaccaggtccccttgac

SEQ ID NO: 119221 - DNA, 25 bp, Canis familiaris
gagactctggatgagggtccaccaa

SEQ ID NO: 119222 - DNA, 25 bp, Canis familiaris
gagccagcttgaaaggcttcccacc

SEQ ID NO: 119223 - DNA, 25 bp, Canis familiaris
gagccactgctctagaggcatgtca

SEQ ID NO: 119224 - DNA, 25 bp, Canis familiaris
gagccagctgcagagcatggagcct

SEQ ID NO: 119225 - DNA, 25 bp, Canis familiaris
gagccagagctggagctggagccgg

SEQ ID NO: 119226 - DNA, 25 bp, Canis familiaris
gagccacagagggtggggcggcagc

SEQ ID NO: 119227 - DNA, 25 bp, Canis familiaris
gagcccgaaggtcgagctgggcggc

SEQ ID NO: 119228 - DNA, 25 bp, Canis familiaris
gagccgcgggcgcggtggatggagc

SEQ ID NO: 119229 - DNA, 25 bp, Canis familiaris
gagccagggtggaggcaggagctga

SEQ ID NO: 119230 - DNA, 25 bp, Canis familiaris
gagccaggggctcctggcatgcgga

SEQ ID NO: 119231 - DNA, 25 bp, Canis familiaris
gagccagaggccctgggcatggtga

SEQ ID NO: 119232 - DNA, 25 bp, Canis familiaris
gagccaagcacttctggacattgtc

SEQ ID NO: 119233 - DNA, 25 bp, Canis familiaris
gagccataggattggggatgctgcc

SEQ ID NO: 119234 - DNA, 25 bp, Canis familiaris
gagccagaggagcctgtggtggccg

SEQ ID NO: 119235 - DNA, 25 bp, Canis familiaris
gagcctaggcaactctagtggcctg

SEQ ID NO: 119236 - DNA, 25 bp, Canis familiaris
gagccgaagccactctgttaggagt

SEQ ID NO: 119237 - DNA, 25 bp, Canis familiaris
gagcccagtgtacctgatttgtatg

SEQ ID NO: 119238 - DNA, 25 bp, Canis familiaris
gagccgcaggatgccttatgcgtca

SEQ ID NO: 119239 - DNA, 25 bp, Canis familiaris
gagcccagaacatcttagagtagga

SEQ ID NO: 119240 - DNA, 25 bp, Canis familiaris
gagccctcaaattcttaagtttgaa

SEQ ID NO: 119241 - DNA, 25 bp, Canis familiaris
gagcctcacaacatttaagttttct

SEQ ID NO: 119242 - DNA, 25 bp, Canis familiaris
gagcccagcagaatccgaaagcttt

SEQ ID NO: 119243 - DNA, 25 bp, Canis familiaris
gagcctctggcaaccagggatgctc

SEQ ID NO: 119244 - DNA, 25 bp, Canis familiaris
gagcctcaccacgtgaatggatccc

SEQ ID NO: 119245 - DNA, 25 bp, Canis familiaris
gagcctcacctaggagagcaacctc

SEQ ID NO: 119246 - DNA, 25 bp, Canis familiaris
gagctcacagtatcaggaaagcctt

SEQ ID NO: 119247 - DNA, 25 bp, Canis familiaris
gagccagcagaatccgaaagctttt

SEQ ID NO: 119248 - DNA, 25 bp, Canis familiaris
gagccagcaggatccgtaagcttgt

SEQ ID NO: 119249 - DNA, 25 bp, Canis familiaris
gagccagcaggttcttttgagtgtg

SEQ ID NO: 119250 - DNA, 25 bp, Canis familiaris
gagccagagtcttttttgatttgca

SEQ ID NO: 119251 - DNA, 25 bp, Canis familiaris
gagccacgccatcttgttttggcat

SEQ ID NO: 119252 - DNA, 25 bp, Canis familiaris
gagcgacgccaagtttgaattatga

SEQ ID NO: 119253 - DNA, 25 bp, Canis familiaris
gagcctgccgaagtgtcgaagtgtc

SEQ ID NO: 119254 - DNA, 25 bp, Canis familiaris
gagctgctgctctgaatgtaaatcg

SEQ ID NO: 119255 - DNA, 25 bp, Canis familiaris
gagccatgctcttgtcagtatctct

SEQ ID NO: 119256 - DNA, 25 bp, Canis familiaris
gagccagctgctagtaagacccagg

SEQ ID NO: 119257 - DNA, 25 bp, Canis familiaris
gagccactgctttaatgatttcctg

SEQ ID NO: 119258 - DNA, 25 bp, Canis familiaris
gagccactgtacttagacctgtgtg

SEQ ID NO: 119259 - DNA, 25 bp, Canis familiaris
gagcccattactgtgactgtgactg

SEQ ID NO: 119260 - DNA, 25 bp, Canis familiaris
gagccactttctgtattgctgtatg

SEQ ID NO: 119261 - DNA, 25 bp, Canis familiaris
gagcccttcttgttggggtcatgga

SEQ ID NO: 119262 - DNA, 25 bp, Canis familiaris
gagctcccattttctgggtttagtc

SEQ ID NO: 119263 - DNA, 25 bp, Canis familiaris
gagccccatgttgagggtcgatatt

SEQ ID NO: 119264 - DNA, 25 bp, Canis familiaris
gagcctccattaaacgactttattt

SEQ ID NO: 119265 - DNA, 25 bp, Canis familiaris
gagcctccatctggaagcaggctta

SEQ ID NO: 119266 - DNA, 25 bp, Canis familiaris
gagcctcagcattaaacggttactt

SEQ ID NO: 119267 - DNA, 25 bp, Canis familiaris
gagcgccaggtcaagatctggtttc

SEQ ID NO: 119268 - DNA, 25 bp, Canis familiaris
gagccatcatttggagtctgggtct

SEQ ID NO: 119269 - DNA, 25 bp, Canis familiaris
gagccagactctgcagtgctggggt

SEQ ID NO: 119270 - DNA, 25 bp, Canis familiaris
gagccagtggctgagattggggttg

SEQ ID NO: 119271 - DNA, 25 bp, Canis familiaris
gagccagtggctgagtcatatggag

SEQ ID NO: 119272 - DNA, 25 bp, Canis familiaris
gagcgcctgtctgcagtagaggagc

SEQ ID NO: 119273 - DNA, 25 bp, Canis familiaris
gagcccatgattgcaggatccagac

SEQ ID NO: 119274 - DNA, 25 bp, Canis familiaris
gagccacagtggtctgaacacaagc

SEQ ID NO: 119275 - DNA, 25 bp, Canis familiaris
gagctcctgaggcgatacacaagta

SEQ ID NO: 119276 - DNA, 25 bp, Canis familiaris
gagcccgagctgcaaaacacggcaa

SEQ ID NO: 119277 - DNA, 25 bp, Canis familiaris
gagcatcgcaggctaaaacccgagt

SEQ ID NO: 119278 - DNA, 25 bp, Canis familiaris
gagcagccgggttaaggcatcgggc

SEQ ID NO: 119279 - DNA, 25 bp, Canis familiaris
gagcgtagggttgcgtgtgtgtgtg

SEQ ID NO: 119280 - DNA, 25 bp, Canis familiaris
gagccagcgaggttgtcgttgttgt

SEQ ID NO: 119281 - DNA, 25 bp, Canis familiaris
gagccacgtgacttcttatttatct

SEQ ID NO: 119282 - DNA, 25 bp, Canis familiaris
gagcctcgggccattatggatttgt

SEQ ID NO: 119283 - DNA, 25 bp, Canis familiaris
gagccggtagcgatataggttttcc

SEQ ID NO: 119284 - DNA, 25 bp, Canis familiaris
gagccagtgtgggttcataactatt

SEQ ID NO: 119285 - DNA, 25 bp, Canis familiaris
gagccacgctgggttaatagccatt

SEQ ID NO: 119286 - DNA, 25 bp, Canis familiaris
gagccaccatgggtgcaagcacaca

SEQ ID NO: 119287 - DNA, 25 bp, Canis familiaris
gagcccctgctggaagacatgcagc

SEQ ID NO: 119288 - DNA, 25 bp, Canis familiaris
gagcccctgctggaagacatgcagc

SEQ ID NO: 119289 - DNA, 25 bp, Canis familiaris
gagcccctgctggaagacatgcagc

SEQ ID NO: 119290 - DNA, 25 bp, Canis familiaris
gagcctcagcagcctaagactagaa

SEQ ID NO: 119291 - DNA, 25 bp, Canis familiaris
gagccccagtgcagactttgtagct

SEQ ID NO: 119292 - DNA, 25 bp, Canis familiaris
gagcttctcctgatcactattatat

SEQ ID NO: 119293 - DNA, 25 bp, Canis familiaris
gagcttttctttgccatttttttca

SEQ ID NO: 119294 - DNA, 25 bp, Canis familiaris
gagcagttttttgccatttactggg

SEQ ID NO: 119295 - DNA, 25 bp, Canis familiaris
gagcgttttttgtatctttagatag

SEQ ID NO: 119296 - DNA, 25 bp, Canis familiaris
gagctgatttattataatcttttca

SEQ ID NO: 119297 - DNA, 25 bp, Canis familiaris
gagcctgctttcttatagctttgcc

SEQ ID NO: 119298 - DNA, 25 bp, Canis familiaris
gagccatcatatttcttcagtgtag

SEQ ID NO: 119299 - DNA, 25 bp, Canis familiaris
gagctctcatacttatatcactaat

SEQ ID NO: 119300 - DNA, 25 bp, Canis familiaris
gagctctcatacttatatcactaat

SEQ ID NO: 119301 - DNA, 25 bp, Canis familiaris
gagcctcaacagattgcctggttct

SEQ ID NO: 119302 - DNA, 25 bp, Canis familiaris
gagccttataagtgccatgaatgtg

SEQ ID NO: 119303 - DNA, 25 bp, Canis familiaris
gagccattttataatgccatcacag

SEQ ID NO: 119304 - DNA, 25 bp, Canis familiaris
gagccagattttcagacattcagca

SEQ ID NO: 119305 - DNA, 25 bp, Canis familiaris
gagccagctttgaaggagcgtcgct

SEQ ID NO: 119306 - DNA, 25 bp, Canis familiaris
gagcctgccttgacgagaggactct

SEQ ID NO: 119307 - DNA, 25 bp, Canis familiaris
gagccatcaatttcagagcagtcac

SEQ ID NO: 119308 - DNA, 25 bp, Canis familiaris
gagctgtctatttgcaaagtcacta

SEQ ID NO: 119309 - DNA, 25 bp, Canis familiaris
gagcgactgttattaagatcatctg

SEQ ID NO: 119310 - DNA, 25 bp, Canis familiaris
gagcgtcagtgttgatacgatttcc

SEQ ID NO: 119311 - DNA, 25 bp, Canis familiaris
gagcctgaggttacggttatccaca

SEQ ID NO: 119312 - DNA, 25 bp, Canis familiaris
gagcttgggcttgtacttttcacaa

SEQ ID NO: 119313 - DNA, 25 bp, Canis familiaris
gagaggacctatgaagttcttacca

SEQ ID NO: 119314 - DNA, 25 bp, Canis familiaris
gatgatccccagctgggttttacca

SEQ ID NO: 119315 - DNA, 25 bp, Canis familiaris
gagccctcctgcctgagggtttaaa

SEQ ID NO: 119316 - DNA, 25 bp, Canis familiaris
gagcacccaccacgggtgtgtttta

SEQ ID NO: 119317 - DNA, 25 bp, Canis familiaris
gagcatcgcaacggcaaggtttggt

SEQ ID NO: 119318 - DNA, 25 bp, Canis familiaris
gagcgctgcaaaggtagttcttact

SEQ ID NO: 119319 - DNA, 25 bp, Canis familiaris
gagcctaaagtcaaattctattctg

SEQ ID NO: 119320 - DNA, 25 bp, Canis familiaris
gagcccaacgccaaattttgctccg

SEQ ID NO: 119321 - DNA, 25 bp, Canis familiaris
gagcctcacctgcaaatgttgactc

SEQ ID NO: 119322 - DNA, 25 bp, Canis familiaris
gagctccgcacccagaagggagtct

SEQ ID NO: 119323 - DNA, 25 bp, Canis familiaris
gagctgcccaccttgagagggaaca

SEQ ID NO: 119324 - DNA, 25 bp, Canis familiaris
gagctgcccggtttgcagtgagaag

SEQ ID NO: 119325 - DNA, 25 bp, Canis familiaris
gagctgctcctattatcgatgtggt

SEQ ID NO: 119326 - DNA, 25 bp, Canis familiaris
gagcctttacttcatgctggagtga

SEQ ID NO: 119327 - DNA, 25 bp, Canis familiaris
gagccttctccagcaagatgtgaat

SEQ ID NO: 119328 - DNA, 25 bp, Canis familiaris
gagccttctgtccacaagatttagt

SEQ ID NO: 119329 - DNA, 25 bp, Canis familiaris
gagccttttcaacacagtctatata

SEQ ID NO: 119330 - DNA, 25 bp, Canis familiaris
gagctcttttaatagcaccacttag

SEQ ID NO: 119331 - DNA, 25 bp, Canis familiaris
gagcctgtatgtagctgggctccct

SEQ ID NO: 119332 - DNA, 25 bp, Canis familiaris
gagctactatctagctgggggactc

SEQ ID NO: 119333 - DNA, 25 bp, Canis familiaris
gagccagtcatcgctgggttggacc

SEQ ID NO: 119334 - DNA, 25 bp, Canis familiaris
gagccgccactggcgggaacgtcac

SEQ ID NO: 119335 - DNA, 25 bp, Canis familiaris
gagcctgcccaggggagaggctgtg

SEQ ID NO: 119336 - DNA, 25 bp, Canis familiaris
gagccatgcacgtaggcggggttgt

SEQ ID NO: 119337 - DNA, 25 bp, Canis familiaris
gagcctctgaggcactgggtttgtc

SEQ ID NO: 119338 - DNA, 25 bp, Canis familiaris
gagcctctgagtggttgtgtcttgc

SEQ ID NO: 119339 - DNA, 25 bp, Canis familiaris
gagctgggagtggatgcggaccatg

SEQ ID NO: 119340 - DNA, 25 bp, Canis familiaris
gagcgaggagatctgctggacgaac

SEQ ID NO: 119341 - DNA, 25 bp, Canis familiaris
gagcggagaatgcgcatttggacct

SEQ ID NO: 119342 - DNA, 25 bp, Canis familiaris
gagcggctagatcggctgatgggcc

SEQ ID NO: 119343 - DNA, 25 bp, Canis familiaris
gagcgtctgagagctgctatggcca

SEQ ID NO: 119344 - DNA, 25 bp, Canis familiaris
gagccccatgtgggctctgtgctca

SEQ ID NO: 119345 - DNA, 25 bp, Canis familiaris
gagaacacagtggggcttcacatcc

SEQ ID NO: 119346 - DNA, 25 bp, Canis familiaris
gagccccgatgtgggactcacatcc

SEQ ID NO: 119347 - DNA, 25 bp, Canis familiaris
gagcccctgaagggccagagcatcc

SEQ ID NO: 119348 - DNA, 25 bp, Canis familiaris
gagcccctcagaatggctgcagacc

SEQ ID NO: 119349 - DNA, 25 bp, Canis familiaris
gagcccgtctgaatgggcagcaccg

SEQ ID NO: 119350 - DNA, 25 bp, Canis familiaris
gagccgcgcgagatatggcccgcgc

SEQ ID NO: 119351 - DNA, 25 bp, Canis familiaris
gagcgcgaggagcgcaggatccggc

SEQ ID NO: 119352 - DNA, 25 bp, Canis familiaris
gagcgcgagctctggagtctcgcga

SEQ ID NO: 119353 - DNA, 25 bp, Canis familiaris
gagcaggagcagggcgagatcggtg

SEQ ID NO: 119354 - DNA, 25 bp, Canis familiaris
gagcagtacagggcgacgaggatcc

SEQ ID NO: 119355 - DNA, 25 bp, Canis familiaris
gagcagtcaaggaaagcgtaacgtt

SEQ ID NO: 119356 - DNA, 25 bp, Canis familiaris
gagcctgactggaagtgcgtgtaca

SEQ ID NO: 119357 - DNA, 25 bp, Canis familiaris
gagcctgagtggaaatgtgtgcatg

SEQ ID NO: 119358 - DNA, 25 bp, Canis familiaris
gagctctgagggattcctgttacta

SEQ ID NO: 119359 - DNA, 25 bp, Canis familiaris
gagcctggcagagttgtcagcttta

SEQ ID NO: 119360 - DNA, 25 bp, Canis familiaris
gagccttgcagacttttcatttgga

SEQ ID NO: 119361 - DNA, 25 bp, Canis familiaris
gagccatagcgatattcctgcttgg

SEQ ID NO: 119362 - DNA, 25 bp, Canis familiaris
gagcctggtaagatcaccttgcatt

SEQ ID NO: 119363 - DNA, 25 bp, Canis familiaris
gagccgttggacatgaaactgatga

SEQ ID NO: 119364 - DNA, 25 bp, Canis familiaris
gagccctctggacgatgagaacgtg

SEQ ID NO: 119365 - DNA, 25 bp, Canis familiaris
gagcgccgaggatgtgagtcctgct

SEQ ID NO: 119366 - DNA, 25 bp, Canis familiaris
gagcgaggaggtggtcgtcttggag

SEQ ID NO: 119367 - DNA, 25 bp, Canis familiaris
gaggaccggtggtgtttgaggatcc

SEQ ID NO: 119368 - DNA, 25 bp, Canis familiaris
gagaaaagccggagttcaaggcccg

SEQ ID NO: 119369 - DNA, 25 bp, Canis familiaris
gagaaaggggggcttgggaggcaag

SEQ ID NO: 119370 - DNA, 25 bp, Canis familiaris
tgaaaacggggtgattcggccggcg

SEQ ID NO: 119371 - DNA, 25 bp, Canis familiaris
taaaagccagggagaaccttcggct

SEQ ID NO: 119372 - DNA, 25 bp, Canis familiaris
taagaacccaagatggcccttcctt

SEQ ID NO: 119373 - DNA, 25 bp, Canis familiaris
taaaagctttcgagggcctccgtgt

SEQ ID NO: 119374 - DNA, 25 bp, Canis familiaris
taaaaatcttggaggcactaccagc

SEQ ID NO: 119375 - DNA, 25 bp, Canis familiaris
gagagaattctccttggaactaccc

SEQ ID NO: 119376 - DNA, 25 bp, Canis familiaris
gagcgagtctccaggaaacagatcc

SEQ ID NO: 119377 - DNA, 25 bp, Canis familiaris
gagcaaggccaagggtacctgaccg

SEQ ID NO: 119378 - DNA, 25 bp, Canis familiaris
gagcaaaggcagttcgagccctgaa

SEQ ID NO: 119379 - DNA, 25 bp, Canis familiaris
gagcgataggcaaaatggcccgagt

SEQ ID NO: 119380 - DNA, 25 bp, Canis familiaris
gagcgcaagacgaaactgtccaaga

SEQ ID NO: 119381 - DNA, 25 bp, Canis familiaris
gagcccaactgcagatcgaagagaa

SEQ ID NO: 119382 - DNA, 25 bp, Canis familiaris
gagctgcacaactgtatggccaagc

SEQ ID NO: 119383 - DNA, 25 bp, Canis familiaris
gagctgaagcagcagatagccctga

SEQ ID NO: 119384 - DNA, 25 bp, Canis familiaris
gagctgacacaggctgcaagaccac

SEQ ID NO: 119385 - DNA, 25 bp, Canis familiaris
gagctgctgctggaccacaaccagc

SEQ ID NO: 119386 - DNA, 25 bp, Canis familiaris
gagcctgctggaccacaggagcagc

SEQ ID NO: 119387 - DNA, 25 bp, Canis familiaris
gagcttcttgaaggcagggaccatt

SEQ ID NO: 119388 - DNA, 25 bp, Canis familiaris
gagccctccacagtcaggaagagca

SEQ ID NO: 119389 - DNA, 25 bp, Canis familiaris
gagcctctgctcaactggatgaaag

SEQ ID NO: 119390 - DNA, 25 bp, Canis familiaris
gagccgcagcgaagctgctgctgac

SEQ ID NO: 119391 - DNA, 25 bp, Canis familiaris
gagctgcagatggagcctgtgtgag

SEQ ID NO: 119392 - DNA, 25 bp, Canis familiaris
gagctggtgcatgggcagtgccagg

SEQ ID NO: 119393 - DNA, 25 bp, Canis familiaris
gagctggtggcgtaggcaagagtgc

SEQ ID NO: 119394 - DNA, 25 bp, Canis familiaris
gagctggcgtcgtggatgccaggcc

SEQ ID NO: 119395 - DNA, 25 bp, Canis familiaris
gagctgccgtattgggccacaagac

SEQ ID NO: 119396 - DNA, 25 bp, Canis familiaris
gagcttggatcaaggccctaagccc

SEQ ID NO: 119397 - DNA, 25 bp, Canis familiaris
gagcttgttggacactccaagccct

SEQ ID NO: 119398 - DNA, 25 bp, Canis familiaris
gagcctgttggacgacatgaaccac

SEQ ID NO: 119399 - DNA, 25 bp, Canis familiaris
gagctgagctggtggaatgactcca

SEQ ID NO: 119400 - DNA, 25 bp, Canis familiaris
gagctggctggaggagaacgttcgt

SEQ ID NO: 119401 - DNA, 25 bp, Canis familiaris
gagctggtggtgcagaacgcctgcg

SEQ ID NO: 119402 - DNA, 25 bp, Canis familiaris
gagccttggtgagtgatacgaatgc

SEQ ID NO: 119403 - DNA, 25 bp, Canis familiaris
gagcctgggcaagtgaggcctcatc

SEQ ID NO: 119404 - DNA, 25 bp, Canis familiaris
gagcctggctgaaggagtggcttca

SEQ ID NO: 119405 - DNA, 25 bp, Canis familiaris
gagcctggcttagtgctgggcattc

SEQ ID NO: 119406 - DNA, 25 bp, Canis familiaris
gagcctgagctggagtggtggcagt

SEQ ID NO: 119407 - DNA, 25 bp, Canis familiaris
gagctcatggctcattgaggacggc

SEQ ID NO: 119408 - DNA, 25 bp, Canis familiaris
gagctctgtgtttctgatgcttcgg

SEQ ID NO: 119409 - DNA, 25 bp, Canis familiaris
gagctctcttttgatttctttgacc

SEQ ID NO: 119410 - DNA, 25 bp, Canis familiaris
gagcccatttttattttattcacct

SEQ ID NO: 119411 - DNA, 25 bp, Canis familiaris
gagccgtattttatgccttgcattc

SEQ ID NO: 119412 - DNA, 25 bp, Canis familiaris
gagcatcgtgaaattgttgtttgta

SEQ ID NO: 119413 - DNA, 25 bp, Canis familiaris
gagcttctcaagatggtttcattgg

SEQ ID NO: 119414 - DNA, 25 bp, Canis familiaris
gagctacccaatatgtcctgaagtg

SEQ ID NO: 119415 - DNA, 25 bp, Canis familiaris
gagctacccaacatgaccagggctt

SEQ ID NO: 119416 - DNA, 25 bp, Canis familiaris
gagctaccatatgttaccgaggaat

SEQ ID NO: 119417 - DNA, 25 bp, Canis familiaris
gagctccaattccgaactctgaaga

SEQ ID NO: 119418 - DNA, 25 bp, Canis familiaris
gagctccaggataaaagccgacaga

SEQ ID NO: 119419 - DNA, 25 bp, Canis familiaris
gagctctaggaaagccgtcttcaga

SEQ ID NO: 119420 - DNA, 25 bp, Canis familiaris
gagcctgcaagaaagcctgttctct

SEQ ID NO: 119421 - DNA, 25 bp, Canis familiaris
gagcttgaaatattgcccagtgccc

SEQ ID NO: 119422 - DNA, 25 bp, Canis familiaris
gagcttgtagtgttagtatgggtcg

SEQ ID NO: 119423 - DNA, 25 bp, Canis familiaris
gagcttcagaagcggtatgggggct

SEQ ID NO: 119424 - DNA, 25 bp, Canis familiaris
gagcttctgaaccagctggatgggt

SEQ ID NO: 119425 - DNA, 25 bp, Canis familiaris
gagccctaatccagcatgactggtg

SEQ ID NO: 119426 - DNA, 25 bp, Canis familiaris
gagcaccaaatggcggatgacgccg

SEQ ID NO: 119427 - DNA, 25 bp, Canis familiaris
gagcccagtgtgggcggatccatct

SEQ ID NO: 119428 - DNA, 25 bp, Canis familiaris
gagcttcaggctgctgaggatcgag

SEQ ID NO: 119429 - DNA, 25 bp, Canis familiaris
gatgttcggttctacgatgggtcct

SEQ ID NO: 119430 - DNA, 25 bp, Canis familiaris
gagctttggttatcctgagggcacg

SEQ ID NO: 119431 - DNA, 25 bp, Canis familiaris
gagctttggaatgtcgccagcgaac

SEQ ID NO: 119432 - DNA, 25 bp, Canis familiaris
gagctgtgtgaattcgggcaagtga

SEQ ID NO: 119433 - DNA, 25 bp, Canis familiaris
gagctggagtcattccgggaggagc

SEQ ID NO: 119434 - DNA, 25 bp, Canis familiaris
gagctgcgatttacacggcgggaat

SEQ ID NO: 119435 - DNA, 25 bp, Canis familiaris
gagctgggatattaaagccggagag

SEQ ID NO: 119436 - DNA, 25 bp, Canis familiaris
gagaattacacataagcccagagat

SEQ ID NO: 119437 - DNA, 25 bp, Canis familiaris
gagaataacctaaatcagtcgagta

SEQ ID NO: 119438 - DNA, 25 bp, Canis familiaris
gtagggcacctatcaagtaagattc

SEQ ID NO: 119439 - DNA, 25 bp, Canis familiaris
gagttggacgcttaacctactgaac

SEQ ID NO: 119440 - DNA, 25 bp, Canis familiaris
gagattacaggtttacccaaagcac

SEQ ID NO: 119441 - DNA, 25 bp, Canis familiaris
gagtcttaggtatacgatgacaagt

SEQ ID NO: 119442 - DNA, 25 bp, Canis familiaris
gagctctgttgacctaacttgcaga

SEQ ID NO: 119443 - DNA, 25 bp, Canis familiaris
gagcccattgagctaaagtgcagga

SEQ ID NO: 119444 - DNA, 25 bp, Canis familiaris
gagcccttggctgcattgatgagct

SEQ ID NO: 119445 - DNA, 25 bp, Canis familiaris
gagcccttagcttctcagaggctcc

SEQ ID NO: 119446 - DNA, 25 bp, Canis familiaris
gagctgggtggcatctgaggaccac

SEQ ID NO: 119447 - DNA, 25 bp, Canis familiaris
gagcgggtgctctctagatgagctc

SEQ ID NO: 119448 - DNA, 25 bp, Canis familiaris
gagctgggcatccgcaccgtagcca

SEQ ID NO: 119449 - DNA, 25 bp, Canis familiaris
gagcaggatgactgcccttacagac

SEQ ID NO: 119450 - DNA, 25 bp, Canis familiaris
gatcctagggaccctggacggagtc

SEQ ID NO: 119451 - DNA, 25 bp, Canis familiaris
gagcctgggagacacttgacgaggg

SEQ ID NO: 119452 - DNA, 25 bp, Canis familiaris
gagcctgagggctagacgtggggga

SEQ ID NO: 119453 - DNA, 25 bp, Canis familiaris
gagcccagggcctgatcctggggac

SEQ ID NO: 119454 - DNA, 25 bp, Canis familiaris
gagcccggattccagacaatggagg

SEQ ID NO: 119455 - DNA, 25 bp, Canis familiaris
gagccccgacggagcaaggatgaga

SEQ ID NO: 119456 - DNA, 25 bp, Canis familiaris
gagccgggactggtcgagggtgacc

SEQ ID NO: 119457 - DNA, 25 bp, Canis familiaris
gagccgggagtgggggaggctgtcc

SEQ ID NO: 119458 - DNA, 25 bp, Canis familiaris
gagcggggcagtgatgaggacattg

SEQ ID NO: 119459 - DNA, 25 bp, Canis familiaris
gagcagggctggtgcaagggacgct

SEQ ID NO: 119460 - DNA, 25 bp, Canis familiaris
gagctggacgtgggcgagagcgccc

SEQ ID NO: 119461 - DNA, 25 bp, Canis familiaris
gagctcggagaggagccagacgccc

SEQ ID NO: 119462 - DNA, 25 bp, Canis familiaris
gagcgcggagctggagctgaagctg

SEQ ID NO: 119463 - DNA, 25 bp, Canis familiaris
gagctgcgggctgagctgtttgagt

SEQ ID NO: 119464 - DNA, 25 bp, Canis familiaris
gagcccaggcttctgtttatgtatt

SEQ ID NO: 119465 - DNA, 25 bp, Canis familiaris
gatgtcgaacctttggtctcatttg

SEQ ID NO: 119466 - DNA, 25 bp, Canis familiaris
gagctcgacaaaatttactcacatt

SEQ ID NO: 119467 - DNA, 25 bp, Canis familiaris
gagcctgaaatcatgactactccag

SEQ ID NO: 119468 - DNA, 25 bp, Canis familiaris
gagcctgagttcatggtacctctgt

SEQ ID NO: 119469 - DNA, 25 bp, Canis familiaris
gagcaggagttcaggatccagctcc

SEQ ID NO: 119470 - DNA, 25 bp, Canis familiaris
gagctgtggttctggaacaaccctg

SEQ ID NO: 119471 - DNA, 25 bp, Canis familiaris
gagcttgaaccaggagcgagaacct

SEQ ID NO: 119472 - DNA, 25 bp, Canis familiaris
gagctcgataccaaaggagacactg

SEQ ID NO: 119473 - DNA, 25 bp, Canis familiaris
gagctggtggcccaatctattatct

SEQ ID NO: 119474 - DNA, 25 bp, Canis familiaris
gagcatgtgtggtgcttttggacgg

SEQ ID NO: 119475 - DNA, 25 bp, Canis familiaris
gagcaggattgtgttcatgtgaacg

SEQ ID NO: 119476 - DNA, 25 bp, Canis familiaris
gagcggttgatggaagttgaacagg

SEQ ID NO: 119477 - DNA, 25 bp, Canis familiaris
gagcttgttgaccaacttgcaaaag

SEQ ID NO: 119478 - DNA, 25 bp, Canis familiaris
gagcttgtccggaagattgcaaata

SEQ ID NO: 119479 - DNA, 25 bp, Canis familiaris
gagcattgacgtgaacattccagtt

SEQ ID NO: 119480 - DNA, 25 bp, Canis familiaris
gagcattcctgataatttcactgta

SEQ ID NO: 119481 - DNA, 25 bp, Canis familiaris
gagcctgtctatttaattgcacttt

SEQ ID NO: 119482 - DNA, 25 bp, Canis familiaris
gagcttggtcttgaattcactttga

SEQ ID NO: 119483 - DNA, 25 bp, Canis familiaris
gagctcggttccggaatacactctg

SEQ ID NO: 119484 - DNA, 25 bp, Canis familiaris
gaggggtttgggcatattgtcagaa

SEQ ID NO: 119485 - DNA, 25 bp, Canis familiaris
gagcgggatgtgtgtgtcattgtta

SEQ ID NO: 119486 - DNA, 25 bp, Canis familiaris
gagccggatgtgtatgatgacttgg

SEQ ID NO: 119487 - DNA, 25 bp, Canis familiaris
gagcccagatgtccattgacagatg

SEQ ID NO: 119488 - DNA, 25 bp, Canis familiaris
gagcccactgtgattgatgagatcc

SEQ ID NO: 119489 - DNA, 25 bp, Canis familiaris
gagcccacttttgtggatcgtctcc

SEQ ID NO: 119490 - DNA, 25 bp, Canis familiaris
gagcaacctatgtgttcgtgtttcc

SEQ ID NO: 119491 - DNA, 25 bp, Canis familiaris
gagcaaattaggtgatcaggattct

SEQ ID NO: 119492 - DNA, 25 bp, Canis familiaris
gagctaacatggcacgacaggtcac

SEQ ID NO: 119493 - DNA, 25 bp, Canis familiaris
gagccgacatactggcacggcgaat

SEQ ID NO: 119494 - DNA, 25 bp, Canis familiaris
gagccgaaggtccagcaggagctgg

SEQ ID NO: 119495 - DNA, 25 bp, Canis familiaris
gagcccaaggtcaagacgcaaggtt

SEQ ID NO: 119496 - DNA, 25 bp, Canis familiaris
gagcaccagggacatgacttaactt

SEQ ID NO: 119497 - DNA, 25 bp, Canis familiaris
gataccgggtccactgggaatgtgt

SEQ ID NO: 119498 - DNA, 25 bp, Canis familiaris
gagaaccgaaccacgtgaacagctt

SEQ ID NO: 119499 - DNA, 25 bp, Canis familiaris
gagaatacttaccacggttgtagcc

SEQ ID NO: 119500 - DNA, 25 bp, Canis familiaris
gagaatccccacctggaatttacca

SEQ ID NO: 119501 - DNA, 25 bp, Canis familiaris
gagttacccaactagagacctacga

SEQ ID NO: 119502 - DNA, 25 bp, Canis familiaris
gagcaaacccaagcaaaccatacaa

SEQ ID NO: 119503 - DNA, 25 bp, Canis familiaris
gagcaccaccctgtacaaacagctc

SEQ ID NO: 119504 - DNA, 25 bp, Canis familiaris
gagaccattttggttctaccagtgc

SEQ ID NO: 119505 - DNA, 25 bp, Canis familiaris
gagaattttggaactctatgccagt

SEQ ID NO: 119506 - DNA, 25 bp, Canis familiaris
gagcaattgtagcatattacctatg

SEQ ID NO: 119507 - DNA, 25 bp, Canis familiaris
gagcgcatgcagaaggtggtcacct

SEQ ID NO: 119508 - DNA, 25 bp, Canis familiaris
gagctctgctgtgggtgtggagcct

SEQ ID NO: 119509 - DNA, 25 bp, Canis familiaris
gagctagctatgttgttgccagtca

SEQ ID NO: 119510 - DNA, 25 bp, Canis familiaris
gagcggtagagttcatccactgctc

SEQ ID NO: 119511 - DNA, 25 bp, Canis familiaris
gagcaggtaagactctctgcactct

SEQ ID NO: 119512 - DNA, 25 bp, Canis familiaris
gagctggacgatgtcatcggcctgt

SEQ ID NO: 119513 - DNA, 25 bp, Canis familiaris
gagcgagtctcagaacgcagccagt

SEQ ID NO: 119514 - DNA, 25 bp, Canis familiaris
gagcggcattcagcagatggttcct

SEQ ID NO: 119515 - DNA, 25 bp, Canis familiaris
gagctggcatgttactggttttcta

SEQ ID NO: 119516 - DNA, 25 bp, Canis familiaris
gagctgacttctactgtgtctttca

SEQ ID NO: 119517 - DNA, 25 bp, Canis familiaris
gagctgaatatcggggtcattgcca

SEQ ID NO: 119518 - DNA, 25 bp, Canis familiaris
gagctatagatctaagactctgtgc

SEQ ID NO: 119519 - DNA, 25 bp, Canis familiaris
gagcatgatcttgaaagctttctac

SEQ ID NO: 119520 - DNA, 25 bp, Canis familiaris
gagcagatttgcaggtgttttacag

SEQ ID NO: 119521 - DNA, 25 bp, Canis familiaris
gagcgtctggcacagttgtgtctac

SEQ ID NO: 119522 - DNA, 25 bp, Canis familiaris
gagcaccacgcacagattgcttgta

SEQ ID NO: 119523 - DNA, 25 bp, Canis familiaris
gagcaggcccaacgattctcgtcat

SEQ ID NO: 119524 - DNA, 25 bp, Canis familiaris
gagctggcacgcaacagtgtgctca

SEQ ID NO: 119525 - DNA, 25 bp, Canis familiaris
gagctgtgagctcagagtttaatgt

SEQ ID NO: 119526 - DNA, 25 bp, Canis familiaris
gagcgtgtgcgacagcattagcgag

SEQ ID NO: 119527 - DNA, 25 bp, Canis familiaris
gagctggtgcaacaactgcacagca

SEQ ID NO: 119528 - DNA, 25 bp, Canis familiaris
gagctggcaaagtgactacagaaac

SEQ ID NO: 119529 - DNA, 25 bp, Canis familiaris
gagcaggactaatgtctgtcacaaa

SEQ ID NO: 119530 - DNA, 25 bp, Canis familiaris
gagcaggtgaaatcctatctaaaga

SEQ ID NO: 119531 - DNA, 25 bp, Canis familiaris
gagcacgtgaacactgtttgacact

SEQ ID NO: 119532 - DNA, 25 bp, Canis familiaris
gagcaaagattcacgtttacaattt

SEQ ID NO: 119533 - DNA, 25 bp, Canis familiaris
gagaaatgttccctgtgcttaaaga

SEQ ID NO: 119534 - DNA, 25 bp, Canis familiaris
gagcactagttctgtgtgcctatga

SEQ ID NO: 119535 - DNA, 25 bp, Canis familiaris
gagactcaggcctggggaagaacct

SEQ ID NO: 119536 - DNA, 25 bp, Canis familiaris
gagtccagcttcaggaggaaaccca

SEQ ID NO: 119537 - DNA, 25 bp, Canis familiaris
gagctcctttacagagggaaaccca

SEQ ID NO: 119538 - DNA, 25 bp, Canis familiaris
gagcgtcttttcaggtggatacaac

SEQ ID NO: 119539 - DNA, 25 bp, Canis familiaris
gagcgacaatatatggtgtagttac

SEQ ID NO: 119540 - DNA, 25 bp, Canis familiaris
gagctacatttctgaagtacttaat

SEQ ID NO: 119541 - DNA, 25 bp, Canis familiaris
gagctcctatctcataagacaccta

SEQ ID NO: 119542 - DNA, 25 bp, Canis familiaris
gagccctggttgtacaagacttgag

SEQ ID NO: 119543 - DNA, 25 bp, Canis familiaris
gagcccctgcttggaaagacatgca

SEQ ID NO: 119544 - DNA, 25 bp, Canis familiaris
gagcccctgtctggagagagaggca

SEQ ID NO: 119545 - DNA, 25 bp, Canis familiaris
gagcccttgattaaaggtgagcacc

SEQ ID NO: 119546 - DNA, 25 bp, Canis familiaris
gagccctttctcaagagcttgtgcc

SEQ ID NO: 119547 - DNA, 25 bp, Canis familiaris
gagcccattgttcatagatgctgtc

SEQ ID NO: 119548 - DNA, 25 bp, Canis familiaris
gagcccattgatatcatcgtctttg

SEQ ID NO: 119549 - DNA, 25 bp, Canis familiaris
gagccgatttcaaacgtgtgggcct

SEQ ID NO: 119550 - DNA, 25 bp, Canis familiaris
gagccgcatcctcaaagctggaggc

SEQ ID NO: 119551 - DNA, 25 bp, Canis familiaris
gagcaggccactcattcattttggc

SEQ ID NO: 119552 - DNA, 25 bp, Canis familiaris
gagcttacactttctatgcttagag

SEQ ID NO: 119553 - DNA, 25 bp, Canis familiaris
gagcttgaagctcgacgtcattcag

SEQ ID NO: 119554 - DNA, 25 bp, Canis familiaris
gagcccacaatttctgctgatagga

SEQ ID NO: 119555 - DNA, 25 bp, Canis familiaris
gagctcacaggatttcctgaaatgt

SEQ ID NO: 119556 - DNA, 25 bp, Canis familiaris
gagcatggtggatttcctcaaactg

SEQ ID NO: 119557 - DNA, 25 bp, Canis familiaris
gagcatggattgatcctgccaaatg

SEQ ID NO: 119558 - DNA, 25 bp, Canis familiaris
gagctggatctctcctacaataagc

SEQ ID NO: 119559 - DNA, 25 bp, Canis familiaris
gagctggtgatttgcctcaacaacg

SEQ ID NO: 119560 - DNA, 25 bp, Canis familiaris
gagcggacacaagttcaacgtcgca

SEQ ID NO: 119561 - DNA, 25 bp, Canis familiaris
gagctggagaacaactacacggcgc

SEQ ID NO: 119562 - DNA, 25 bp, Canis familiaris
gagctgcagggagcctgagacgagc

SEQ ID NO: 119563 - DNA, 25 bp, Canis familiaris
gagctgcaggaagcctggatcccag

SEQ ID NO: 119564 - DNA, 25 bp, Canis familiaris
gagcgggaagccttcagagcccgcg

SEQ ID NO: 119565 - DNA, 25 bp, Canis familiaris
gagccctaagttatgtgctccgctg

SEQ ID NO: 119566 - DNA, 25 bp, Canis familiaris
gagccctacgaaagagaccacgctg

SEQ ID NO: 119567 - DNA, 25 bp, Canis familiaris
gagccctagggaaggctcgctgctc

SEQ ID NO: 119568 - DNA, 25 bp, Canis familiaris
gagccctagtgttagtgtactcctt

SEQ ID NO: 119569 - DNA, 25 bp, Canis familiaris
gagccccagtcctgtggatcctgct

SEQ ID NO: 119570 - DNA, 25 bp, Canis familiaris
gagccccagcactaggtgagtactg

SEQ ID NO: 119571 - DNA, 25 bp, Canis familiaris
gagccgccaacatggtgttcaggcg

SEQ ID NO: 119572 - DNA, 25 bp, Canis familiaris
gagctgccacaattccagtgttttc

SEQ ID NO: 119573 - DNA, 25 bp, Canis familiaris
gagcccacaagaaatgatgttttaa

SEQ ID NO: 119574 - DNA, 25 bp, Canis familiaris
gagcccaagagtgaggtgtagtatc

SEQ ID NO: 119575 - DNA, 25 bp, Canis familiaris
gagccgcgaggtgcaggagaagatc

SEQ ID NO: 119576 - DNA, 25 bp, Canis familiaris
gagcgagctgcagttcgtggtgaaa

SEQ ID NO: 119577 - DNA, 25 bp, Canis familiaris
gagcgcatgctggatttgtggtctt

SEQ ID NO: 119578 - DNA, 25 bp, Canis familiaris
gagctgctgtgcttatttgtgctgt

SEQ ID NO: 119579 - DNA, 25 bp, Canis familiaris
gagctgtggcattgtttgtttgttg

SEQ ID NO: 119580 - DNA, 25 bp, Canis familiaris
gagctgggattttcatgtttccccc

SEQ ID NO: 119581 - DNA, 25 bp, Canis familiaris
gagctggtcttgttaatgattcccc

SEQ ID NO: 119582 - DNA, 25 bp, Canis familiaris
gagctgcgtctaaatcatctaaacc

SEQ ID NO: 119583 - DNA, 25 bp, Canis familiaris
gagctgcgttgctgatagtaataca

SEQ ID NO: 119584 - DNA, 25 bp, Canis familiaris
gagcatggtctccgtatgtaaaagc

SEQ ID NO: 119585 - DNA, 25 bp, Canis familiaris
gagcggttccgatgccctgaggctc

SEQ ID NO: 119586 - DNA, 25 bp, Canis familiaris
gagaggtatcctgaccctgaagtac

SEQ ID NO: 119587 - DNA, 25 bp, Canis familiaris
gagaggtatcctgaccctgaagtac

SEQ ID NO: 119588 - DNA, 25 bp, Canis familiaris
gagaggtggactcacctcgggttcc

SEQ ID NO: 119589 - DNA, 25 bp, Canis familiaris
gagagggagacctctttggggaacg

SEQ ID NO: 119590 - DNA, 25 bp, Canis familiaris
gagaggggccctgttagtgggattt

SEQ ID NO: 119591 - DNA, 25 bp, Canis familiaris
gagagggaggggcttagggtctgtt

SEQ ID NO: 119592 - DNA, 25 bp, Canis familiaris
gagcgcgtgtggatgtttaggagtc

SEQ ID NO: 119593 - DNA, 25 bp, Canis familiaris
gagcgcaagaggatttcggcggccc

SEQ ID NO: 119594 - DNA, 25 bp, Canis familiaris
gagcccagagagacgctttgggtgc

SEQ ID NO: 119595 - DNA, 25 bp, Canis familiaris
gagcccaagcaaaattatcagctgg

SEQ ID NO: 119596 - DNA, 25 bp, Canis familiaris
gagcagcaaagaatggcttccagtg

SEQ ID NO: 119597 - DNA, 25 bp, Canis familiaris
gagcgcagcgagtcaagtgtgcgag

SEQ ID NO: 119598 - DNA, 25 bp, Canis familiaris
gagctgtggatgcagttgcacgagg

SEQ ID NO: 119599 - DNA, 25 bp, Canis familiaris
gagcatggagacctcatggcactga

SEQ ID NO: 119600 - DNA, 25 bp, Canis familiaris
gagcagagagtaccgctattgaagg

SEQ ID NO: 119601 - DNA, 25 bp, Canis familiaris
gagctaagatgaccctgttagtcta

SEQ ID NO: 119602 - DNA, 25 bp, Canis familiaris
gagctactgagctgctttgtgatgt

SEQ ID NO: 119603 - DNA, 25 bp, Canis familiaris
gagcgactagcacgcgttgatgggg

SEQ ID NO: 119604 - DNA, 25 bp, Canis familiaris
gagcgagcgagagcgagagggggaa

SEQ ID NO: 119605 - DNA, 25 bp, Canis familiaris
gagcgggagcatgtgagggatgtaa

SEQ ID NO: 119606 - DNA, 25 bp, Canis familiaris
gagctgggcagcgagtgtgggattg

SEQ ID NO: 119607 - DNA, 25 bp, Canis familiaris
gagctggcggaaatggcaggtctgc

SEQ ID NO: 119608 - DNA, 25 bp, Canis familiaris
gagctgtccacagaggcatgggctg

SEQ ID NO: 119609 - DNA, 25 bp, Canis familiaris
gagcagatgcgctggggcaggagtg

SEQ ID NO: 119610 - DNA, 25 bp, Canis familiaris
gagcgctcctctggggatggagaag

SEQ ID NO: 119611 - DNA, 25 bp, Canis familiaris
gagcgctgccgtaaggaaaggagca

SEQ ID NO: 119612 - DNA, 25 bp, Canis familiaris
gagcagacacagaaagccaaaggga

SEQ ID NO: 119613 - DNA, 25 bp, Canis familiaris
gagctacatcaaatgcaggccaagg

SEQ ID NO: 119614 - DNA, 25 bp, Canis familiaris
gagctcaatcaatgggtctgaagtg

SEQ ID NO: 119615 - DNA, 25 bp, Canis familiaris
gagctgcagacccagggctgaaagc

SEQ ID NO: 119616 - DNA, 25 bp, Canis familiaris
gagcgaggacgagggtgaggagttt

SEQ ID NO: 119617 - DNA, 25 bp, Canis familiaris
gagctagctcagcagaagtaggaga

SEQ ID NO: 119618 - DNA, 25 bp, Canis familiaris
gagcttcaaggacattggctggaac

SEQ ID NO: 119619 - DNA, 25 bp, Canis familiaris
gagcttacggacatcgagaggcagt

SEQ ID NO: 119620 - DNA, 25 bp, Canis familiaris
gagctgggtggaactctcaggggat

SEQ ID NO: 119621 - DNA, 25 bp, Canis familiaris
gagcatttttggacgtcagcggtgt

SEQ ID NO: 119622 - DNA, 25 bp, Canis familiaris
gagcttgtttagaatcacacgtgct

SEQ ID NO: 119623 - DNA, 25 bp, Canis familiaris
gagcttgtttaaatgcaaagccccc

SEQ ID NO: 119624 - DNA, 25 bp, Canis familiaris
gagctctttgaaatggccaggaccc

SEQ ID NO: 119625 - DNA, 25 bp, Canis familiaris
gagctcttggagcggaagcgggccg

SEQ ID NO: 119626 - DNA, 25 bp, Canis familiaris
gagctcttggagcggaagcgggccg

SEQ ID NO: 119627 - DNA, 25 bp, Canis familiaris
gagctcttggagcaggagcgggccg

SEQ ID NO: 119628 - DNA, 25 bp, Canis familiaris
gagctcttggagcagaagcgggccg

SEQ ID NO: 119629 - DNA, 25 bp, Canis familiaris
gagctctttcctagaaggtgggggt

SEQ ID NO: 119630 - DNA, 25 bp, Canis familiaris
gagcacatttccagggaaggagggt

SEQ ID NO: 119631 - DNA, 25 bp, Canis familiaris
gagctcatactacaagggggcaggg

SEQ ID NO: 119632 - DNA, 25 bp, Canis familiaris
gagctcggcctgcaagagggcaagc

SEQ ID NO: 119633 - DNA, 25 bp, Canis familiaris
gagctctgtttgaccaagcagccaa

SEQ ID NO: 119634 - DNA, 25 bp, Canis familiaris
gagctttttatctggcacacagcag

SEQ ID NO: 119635 - DNA, 25 bp, Canis familiaris
gagcgtgtctttgggacactcaggt

SEQ ID NO: 119636 - DNA, 25 bp, Canis familiaris
gagctttgcccagtgggaccagtta

SEQ ID NO: 119637 - DNA, 25 bp, Canis familiaris
gagctttgcactggggaatccctgt

SEQ ID NO: 119638 - DNA, 25 bp, Canis familiaris
gagcttcgccatgtgatgacaaacc

SEQ ID NO: 119639 - DNA, 25 bp, Canis familiaris
gagctgctcccagatggatataccc

SEQ ID NO: 119640 - DNA, 25 bp, Canis familiaris
gagcttgcccatgggtgatgtgccc

SEQ ID NO: 119641 - DNA, 25 bp, Canis familiaris
gagctccacactgggcatggagccc

SEQ ID NO: 119642 - DNA, 25 bp, Canis familiaris
gagctgtagactcggtgctggacgt

SEQ ID NO: 119643 - DNA, 25 bp, Canis familiaris
gagctgaacaagcggggccgtgtgc

SEQ ID NO: 119644 - DNA, 25 bp, Canis familiaris
gagctgagacaagccggggcagggc

SEQ ID NO: 119645 - DNA, 25 bp, Canis familiaris
gagcaggaactgaggggccaagaca

SEQ ID NO: 119646 - DNA, 25 bp, Canis familiaris
gagctgcagaagttgggggccgaag

SEQ ID NO: 119647 - DNA, 25 bp, Canis familiaris
gagcgctgatattaaggggcccaag

SEQ ID NO: 119648 - DNA, 25 bp, Canis familiaris
gagcgtgtatactcagggctccttg

SEQ ID NO: 119649 - DNA, 25 bp, Canis familiaris
gagcgtgccaaagcaggagtctctt

SEQ ID NO: 119650 - DNA, 25 bp, Canis familiaris
gagcgtgccagagacacaggtcagc

SEQ ID NO: 119651 - DNA, 25 bp, Canis familiaris
gagcagccaaagcaaaggaagtttg

SEQ ID NO: 119652 - DNA, 25 bp, Canis familiaris
gagggaagggactgaaattgttggg

SEQ ID NO: 119653 - DNA, 25 bp, Canis familiaris
gagtcagtagggaggaaaggtagag

SEQ ID NO: 119654 - DNA, 25 bp, Canis familiaris
gagcccagagggaggaagaagccag

SEQ ID NO: 119655 - DNA, 25 bp, Canis familiaris
gagcgccgaggcggggggaaaatgg

SEQ ID NO: 119656 - DNA, 25 bp, Canis familiaris
gagcgccgaggcgtggggaaaatgg

SEQ ID NO: 119657 - DNA, 25 bp, Canis familiaris
gaggactgggcagccggaaaactga

SEQ ID NO: 119658 - DNA, 25 bp, Canis familiaris
gagaacgtggcgtccacgacttttg

SEQ ID NO: 119659 - DNA, 25 bp, Canis familiaris
gagaacggcggctgggatacttttg

SEQ ID NO: 119660 - DNA, 25 bp, Canis familiaris
gagaagaacggggcaaaacccaatg

SEQ ID NO: 119661 - DNA, 25 bp, Canis familiaris
gagagcaaagaacccgtgaacccgg

SEQ ID NO: 119662 - DNA, 25 bp, Canis familiaris
gagcatgacaagtacccgaaaggcc

SEQ ID NO: 119663 - DNA, 25 bp, Canis familiaris
gagcgacaggctgcactgtgaaccc

SEQ ID NO: 119664 - DNA, 25 bp, Canis familiaris
gagcgagcaggatggtggtgacccg

SEQ ID NO: 119665 - DNA, 25 bp, Canis familiaris
gagcgagacggggtggtcagagcct

SEQ ID NO: 119666 - DNA, 25 bp, Canis familiaris
gagcaacagggtttggtcaagccag

SEQ ID NO: 119667 - DNA, 25 bp, Canis familiaris
gagcgagatgacatttgttccccaa

SEQ ID NO: 119668 - DNA, 25 bp, Canis familiaris
gagcggatgactgttgtctgggaca

SEQ ID NO: 119669 - DNA, 25 bp, Canis familiaris
gagcttgtcgatgttgtcgtgcagg

SEQ ID NO: 119670 - DNA, 25 bp, Canis familiaris
gagctcgatccagttgtttgtgcct

SEQ ID NO: 119671 - DNA, 25 bp, Canis familiaris
gagctgatgcacgttctgttttggc

SEQ ID NO: 119672 - DNA, 25 bp, Canis familiaris
gagctaggctttctagttgtgcgcc

SEQ ID NO: 119673 - DNA, 25 bp, Canis familiaris
gagcatttgcttcttgagcacttgc

SEQ ID NO: 119674 - DNA, 25 bp, Canis familiaris
gagctcttgtatctgtgaactttca

SEQ ID NO: 119675 - DNA, 25 bp, Canis familiaris
gagcattctaatgttgaacgcttcc

SEQ ID NO: 119676 - DNA, 25 bp, Canis familiaris
gagtcaacaaggagaacgttacttt

SEQ ID NO: 119677 - DNA, 25 bp, Canis familiaris
gagtcaacaacgacccggtgtaggt

SEQ ID NO: 119678 - DNA, 25 bp, Canis familiaris
gagctcaacaacaaacagcctgatt

SEQ ID NO: 119679 - DNA, 25 bp, Canis familiaris
gagctcatgacatttaacatactgt

SEQ ID NO: 119680 - DNA, 25 bp, Canis familiaris
gagctcacatctttaacagaagaaa

SEQ ID NO: 119681 - DNA, 25 bp, Canis familiaris
gagctaatcagtaatcaggaacaaa

SEQ ID NO: 119682 - DNA, 25 bp, Canis familiaris
gagctcatacaggtgaccgtccata

SEQ ID NO: 119683 - DNA, 25 bp, Canis familiaris
gagcgatacatcatggccgactcaa

SEQ ID NO: 119684 - DNA, 25 bp, Canis familiaris
gagctgaagcaggtggcttacatat

SEQ ID NO: 119685 - DNA, 25 bp, Canis familiaris
gagctgcatagaatgtctgctaaaa

SEQ ID NO: 119686 - DNA, 25 bp, Canis familiaris
gagctgcattgacttgttcaagaac

SEQ ID NO: 119687 - DNA, 25 bp, Canis familiaris
gagctgtccacttctagacatgtcc

SEQ ID NO: 119688 - DNA, 25 bp, Canis familiaris
gagcatgtcaagtcgtggatcagtc

SEQ ID NO: 119689 - DNA, 25 bp, Canis familiaris
gagctgtgcagcactgccatgatca

SEQ ID NO: 119690 - DNA, 25 bp, Canis familiaris
gagcgtgctgcttgatgaatgatga

SEQ ID NO: 119691 - DNA, 25 bp, Canis familiaris
gagcggcctgaggatgctgtatctt

SEQ ID NO: 119692 - DNA, 25 bp, Canis familiaris
gagcaggcagccgagatgctttatg

SEQ ID NO: 119693 - DNA, 25 bp, Canis familiaris
gagcagggcatggcagagcacctta

SEQ ID NO: 119694 - DNA, 25 bp, Canis familiaris
gagcagggatgatgcacccctggca

SEQ ID NO: 119695 - DNA, 25 bp, Canis familiaris
gagcaggtcttctatacatcctggc

SEQ ID NO: 119696 - DNA, 25 bp, Canis familiaris
gagcatggctttgaaatcctccgtt

SEQ ID NO: 119697 - DNA, 25 bp, Canis familiaris
gagcaccttttaaaagtgccggtat

SEQ ID NO: 119698 - DNA, 25 bp, Canis familiaris
gagctcactttgttcaacagtgcca

SEQ ID NO: 119699 - DNA, 25 bp, Canis familiaris
gagaccgattggtcaacgagcccct

SEQ ID NO: 119700 - DNA, 25 bp, Canis familiaris
gagaatggcagtgacaaccttccct

SEQ ID NO: 119701 - DNA, 25 bp, Canis familiaris
gagcgggatgtaagagcccttgtcc

SEQ ID NO: 119702 - DNA, 25 bp, Canis familiaris
gagctggaactcaggctcctggaaa

SEQ ID NO: 119703 - DNA, 25 bp, Canis familiaris
gagctagaactcagcagtctataaa

SEQ ID NO: 119704 - DNA, 25 bp, Canis familiaris
gagctaagatttccaggctgtctac

SEQ ID NO: 119705 - DNA, 25 bp, Canis familiaris
gagctacactcattgccagaagatc

SEQ ID NO: 119706 - DNA, 25 bp, Canis familiaris
gagctacctgattctctacatgatc

SEQ ID NO: 119707 - DNA, 25 bp, Canis familiaris
gagctacgcttgtcatgcgcgtaat

SEQ ID NO: 119708 - DNA, 25 bp, Canis familiaris
gagctcagtccttcatgatgagttc

SEQ ID NO: 119709 - DNA, 25 bp, Canis familiaris
gagcatatgtttccactagttccta

SEQ ID NO: 119710 - DNA, 25 bp, Canis familiaris
gagctaaccttagctgcttccatac

SEQ ID NO: 119711 - DNA, 25 bp, Canis familiaris
gagctaagccttaggctgtcttccc

SEQ ID NO: 119712 - DNA, 25 bp, Canis familiaris
gagctaagccttaggctgtcttccc

SEQ ID NO: 119713 - DNA, 25 bp, Canis familiaris
gagctaacatcagagatggtttcca

SEQ ID NO: 119714 - DNA, 25 bp, Canis familiaris
gagcttgtggcgaagatggttttca

SEQ ID NO: 119715 - DNA, 25 bp, Canis familiaris
gagcttctggccaaaagtgcctatt

SEQ ID NO: 119716 - DNA, 25 bp, Canis familiaris
gagctgtctgctactagcaagtggc

SEQ ID NO: 119717 - DNA, 25 bp, Canis familiaris
gagctgggtatccgcacagtggctg

SEQ ID NO: 119718 - DNA, 25 bp, Canis familiaris
gagcttgactttagcagtgctggtg

SEQ ID NO: 119719 - DNA, 25 bp, Canis familiaris
gagcttcacctaagcctgtgagcag

SEQ ID NO: 119720 - DNA, 25 bp, Canis familiaris
gagcttctcctatgccgtagtgaga

SEQ ID NO: 119721 - DNA, 25 bp, Canis familiaris
gagcttcctctccagggtaagatac

SEQ ID NO: 119722 - DNA, 25 bp, Canis familiaris
gagcgtacgccttgagtctaggata

SEQ ID NO: 119723 - DNA, 25 bp, Canis familiaris
gagcgaaatcctttatatcaagtaa

SEQ ID NO: 119724 - DNA, 25 bp, Canis familiaris
gagcttaaccatatcttcagatcta

SEQ ID NO: 119725 - DNA, 25 bp, Canis familiaris
gagcaggaaccatgttatccctgtt

SEQ ID NO: 119726 - DNA, 25 bp, Canis familiaris
gagctggaagccttttcatggtttt

SEQ ID NO: 119727 - DNA, 25 bp, Canis familiaris
gagctgattgaccttttaacttttt

SEQ ID NO: 119728 - DNA, 25 bp, Canis familiaris
gagctcggcactatctaatgacttt

SEQ ID NO: 119729 - DNA, 25 bp, Canis familiaris
gagcgttcgctatctaatcagttct

SEQ ID NO: 119730 - DNA, 25 bp, Canis familiaris
gagcttgtagtctctaccattctca

SEQ ID NO: 119731 - DNA, 25 bp, Canis familiaris
gagatagatactaactactcattct

SEQ ID NO: 119732 - DNA, 25 bp, Canis familiaris
gagacaggtcaacatacttttagga

SEQ ID NO: 119733 - DNA, 25 bp, Canis familiaris
gagaaggctgaaagctactcccaag

SEQ ID NO: 119734 - DNA, 25 bp, Canis familiaris
gagcaaggtatcatcctgctctcca

SEQ ID NO: 119735 - DNA, 25 bp, Canis familiaris
gagaatgcttcaggttcgttccaag

SEQ ID NO: 119736 - DNA, 25 bp, Canis familiaris
gagcaactggtggtttgtggcccat

SEQ ID NO: 119737 - DNA, 25 bp, Canis familiaris
gagctacggctggttatggtctctc

SEQ ID NO: 119738 - DNA, 25 bp, Canis familiaris
gagctgtccaggaatttggtcttgc

SEQ ID NO: 119739 - DNA, 25 bp, Canis familiaris
gagctgacctggacggagattttgc

SEQ ID NO: 119740 - DNA, 25 bp, Canis familiaris
gagcttcacaggagaactcggtgct

SEQ ID NO: 119741 - DNA, 25 bp, Canis familiaris
gagcttcgaggtttcgtcaggatct

SEQ ID NO: 119742 - DNA, 25 bp, Canis familiaris
gagctacgagcggtatttcggagcc

SEQ ID NO: 119743 - DNA, 25 bp, Canis familiaris
gagctagcagaggttatttcatgaa

SEQ ID NO: 119744 - DNA, 25 bp, Canis familiaris
gagctcacaaggactgttgtataat

SEQ ID NO: 119745 - DNA, 25 bp, Canis familiaris
gagctctgcgtggtcgttgtagagt

SEQ ID NO: 119746 - DNA, 25 bp, Canis familiaris
gagcttcggggggatgtggagatga

SEQ ID NO: 119747 - DNA, 25 bp, Canis familiaris
gagcttgcaggagccgcaagcggtg

SEQ ID NO: 119748 - DNA, 25 bp, Canis familiaris
gagctgtgcggaatcaccaggggct

SEQ ID NO: 119749 - DNA, 25 bp, Canis familiaris
gagcagggagattcacgaaggactt

SEQ ID NO: 119750 - DNA, 25 bp, Canis familiaris
gagcatggactgagcacctaggact

SEQ ID NO: 119751 - DNA, 25 bp, Canis familiaris
gagctggcactcacatcctgtgcat

SEQ ID NO: 119752 - DNA, 25 bp, Canis familiaris
gagctgtggctcagtgcacatggct

SEQ ID NO: 119753 - DNA, 25 bp, Canis familiaris
gagctgtgggctcccaatatgctgc

SEQ ID NO: 119754 - DNA, 25 bp, Canis familiaris
gagcagtgtggcccaagtatctgca

SEQ ID NO: 119755 - DNA, 25 bp, Canis familiaris
gagcagtgtccattcagagcaagtg

SEQ ID NO: 119756 - DNA, 25 bp, Canis familiaris
gagcatcggcagtacaagcaggagc

SEQ ID NO: 119757 - DNA, 25 bp, Canis familiaris
gagctctgcacagttaagaggcatc

SEQ ID NO: 119758 - DNA, 25 bp, Canis familiaris
gagcttgccacttaatagccacagc

SEQ ID NO: 119759 - DNA, 25 bp, Canis familiaris
gagctcatggccaaagatctccact

SEQ ID NO: 119760 - DNA, 25 bp, Canis familiaris
gagcatctggcttgacaatctacat

SEQ ID NO: 119761 - DNA, 25 bp, Canis familiaris
gagcatctgacattgcaccatttct

SEQ ID NO: 119762 - DNA, 25 bp, Canis familiaris
gagctgcatcagttcacttttgacc

SEQ ID NO: 119763 - DNA, 25 bp, Canis familiaris
gagctacaattaactctcatgcctc

SEQ ID NO: 119764 - DNA, 25 bp, Canis familiaris
gagctgcacattgcaggcctcagac

SEQ ID NO: 119765 - DNA, 25 bp, Canis familiaris
gagatgagtttcctgcagcatagca

SEQ ID NO: 119766 - DNA, 25 bp, Canis familiaris
gagcatgcagctctcagtgacacaa

SEQ ID NO: 119767 - DNA, 25 bp, Canis familiaris
gagcatgcagtgtgagtcagacatc

SEQ ID NO: 119768 - DNA, 25 bp, Canis familiaris
gagctagtgatgacgtcagatcccg

SEQ ID NO: 119769 - DNA, 25 bp, Canis familiaris
gagctgaggcagccggcagatctgc

SEQ ID NO: 119770 - DNA, 25 bp, Canis familiaris
gagctagagcatcagctgcgggcaa

SEQ ID NO: 119771 - DNA, 25 bp, Canis familiaris
gagctggagcacagccaggacacag

SEQ ID NO: 119772 - DNA, 25 bp, Canis familiaris
gagctgaggatcatcacgtgtcacg

SEQ ID NO: 119773 - DNA, 25 bp, Canis familiaris
gagctgcaggagctgaacgaccgct

SEQ ID NO: 119774 - DNA, 25 bp, Canis familiaris
gagctgcaggagatggcgcgagggc

SEQ ID NO: 119775 - DNA, 25 bp, Canis familiaris
gagcagctgaggaggcctggaaact

SEQ ID NO: 119776 - DNA, 25 bp, Canis familiaris
gagcatctatggaactcaggagaga

SEQ ID NO: 119777 - DNA, 25 bp, Canis familiaris
gagctgaaggaccaaggcagacacg

SEQ ID NO: 119778 - DNA, 25 bp, Canis familiaris
gagcttgagccagagcttgagaccg

SEQ ID NO: 119779 - DNA, 25 bp, Canis familiaris
gagctccccagcactgtggagctct

SEQ ID NO: 119780 - DNA, 25 bp, Canis familiaris
gagctgacctaggtcgaggcagcaa

SEQ ID NO: 119781 - DNA, 25 bp, Canis familiaris
gagcaggtccaggaccaggtgcaca

SEQ ID NO: 119782 - DNA, 25 bp, Canis familiaris
gagcagggccaggccatcgatgacc

SEQ ID NO: 119783 - DNA, 25 bp, Canis familiaris
gagcagtgaccagacaggcaagccc

SEQ ID NO: 119784 - DNA, 25 bp, Canis familiaris
gagcaggacaaggacagtacctaca

SEQ ID NO: 119785 - DNA, 25 bp, Canis familiaris
gagctggaagagcaacccacatgaa

SEQ ID NO: 119786 - DNA, 25 bp, Canis familiaris
gagctgctgaggagagtgcccaaga

SEQ ID NO: 119787 - DNA, 25 bp, Canis familiaris
gagcatgctcattgtggtgtttgca

SEQ ID NO: 119788 - DNA, 25 bp, Canis familiaris
gagcatctccagtaagatttcatca

SEQ ID NO: 119789 - DNA, 25 bp, Canis familiaris
gagctaccacgagatttaatttttt

SEQ ID NO: 119790 - DNA, 25 bp, Canis familiaris
gagctccactttgcaactggttttt

SEQ ID NO: 119791 - DNA, 25 bp, Canis familiaris
gagcatccaccttgtcaatgggtct

SEQ ID NO: 119792 - DNA, 25 bp, Canis familiaris
gagctggagctgatgtttgggtgcc

SEQ ID NO: 119793 - DNA, 25 bp, Canis familiaris
gagctgagagtaaattgtccgtggt

SEQ ID NO: 119794 - DNA, 25 bp, Canis familiaris
gagcggctggcaaatgtgtacctgg

SEQ ID NO: 119795 - DNA, 25 bp, Canis familiaris
gagcggcatgggatggtgcctggga

SEQ ID NO: 119796 - DNA, 25 bp, Canis familiaris
gagcaggcaggagtggggacagagg

SEQ ID NO: 119797 - DNA, 25 bp, Canis familiaris
gagcataacatggaggggaggggca

SEQ ID NO: 119798 - DNA, 25 bp, Canis familiaris
gagctacaagaggaaggagtctgga

SEQ ID NO: 119799 - DNA, 25 bp, Canis familiaris
gagctgttaggcgttgtgaatttgt

SEQ ID NO: 119800 - DNA, 25 bp, Canis familiaris
gagctttcctgcattggttttgtct

SEQ ID NO: 119801 - DNA, 25 bp, Canis familiaris
gagctttctggaatcttctattttt

SEQ ID NO: 119802 - DNA, 25 bp, Canis familiaris
gagcttaatgaacttggctattctt

SEQ ID NO: 119803 - DNA, 25 bp, Canis familiaris
gagcttttatgtttactatttctag

SEQ ID NO: 119804 - DNA, 25 bp, Canis familiaris
gagcttcttttactacaatattcta

SEQ ID NO: 119805 - DNA, 25 bp, Canis familiaris
gagctttctcttttaacttgtctaa

SEQ ID NO: 119806 - DNA, 25 bp, Canis familiaris
gagctctttattttgaccttgattt

SEQ ID NO: 119807 - DNA, 25 bp, Canis familiaris
gagctcttttaattgttctatttct

SEQ ID NO: 119808 - DNA, 25 bp, Canis familiaris
gagctcttgtttttgttggttttat

SEQ ID NO: 119809 - DNA, 25 bp, Canis familiaris
gagcattgattctttttaggtcctc

SEQ ID NO: 119810 - DNA, 25 bp, Canis familiaris
gagcttttctttgatttgtcctttc

SEQ ID NO: 119811 - DNA, 25 bp, Canis familiaris
gagctttagggtttattttgcttat

SEQ ID NO: 119812 - DNA, 25 bp, Canis familiaris
gagcagttagagcgtctttcttttc

SEQ ID NO: 119813 - DNA, 25 bp, Canis familiaris
gagcagttacagtttccatttattt

SEQ ID NO: 119814 - DNA, 25 bp, Canis familiaris
gagcattccaaaacatccttttatg

SEQ ID NO: 119815 - DNA, 25 bp, Canis familiaris
gagaactctaaactccttcttggtt

SEQ ID NO: 119816 - DNA, 25 bp, Canis familiaris
gagaaggcccaactttttctgagtc

SEQ ID NO: 119817 - DNA, 25 bp, Canis familiaris
gagaagccagtccacttatttcaaa

SEQ ID NO: 119818 - DNA, 25 bp, Canis familiaris
gagagggctcccatttattaatcaa

SEQ ID NO: 119819 - DNA, 25 bp, Canis familiaris
gagcttcttcccatctttatgaaaa

SEQ ID NO: 119820 - DNA, 25 bp, Canis familiaris
gagcattctaatggcatttttcatg

SEQ ID NO: 119821 - DNA, 25 bp, Canis familiaris
gagctgtctggaactctgtttcaga

SEQ ID NO: 119822 - DNA, 25 bp, Canis familiaris
gagcattttcaactgtgtgtacaca

SEQ ID NO: 119823 - DNA, 25 bp, Canis familiaris
gagcatttgattctgtgtttgccaa

SEQ ID NO: 119824 - DNA, 25 bp, Canis familiaris
gagctgttattgatgcctaggcgca

SEQ ID NO: 119825 - DNA, 25 bp, Canis familiaris
gagcagcttcggaatgcactctggc

SEQ ID NO: 119826 - DNA, 25 bp, Canis familiaris
gagcagtacaaggcacacttctggc

SEQ ID NO: 119827 - DNA, 25 bp, Canis familiaris
gagcagctgaaacgggccttgatga

SEQ ID NO: 119828 - DNA, 25 bp, Canis familiaris
gagcatgctaaccggtgcttgtgac

SEQ ID NO: 119829 - DNA, 25 bp, Canis familiaris
gagctgcagaacctgatgctctgtg

SEQ ID NO: 119830 - DNA, 25 bp, Canis familiaris
gagctgcaaatgccctctctggtga

SEQ ID NO: 119831 - DNA, 25 bp, Canis familiaris
gagctgcatatataactcaggagat

SEQ ID NO: 119832 - DNA, 25 bp, Canis familiaris
gagctcatcaatgcagccaagggct

SEQ ID NO: 119833 - DNA, 25 bp, Canis familiaris
gagctaagagctgccaaggttgaag

SEQ ID NO: 119834 - DNA, 25 bp, Canis familiaris
gagtaaagcccctgttatggaaacg

SEQ ID NO: 119835 - DNA, 25 bp, Canis familiaris
gaggaacgcctgatttccaggaaag

SEQ ID NO: 119836 - DNA, 25 bp, Canis familiaris
gagaaacccttgggaccgaatgaag

SEQ ID NO: 119837 - DNA, 25 bp, Canis familiaris
gagaaacaccctcaaggctggtggg

SEQ ID NO: 119838 - DNA, 25 bp, Canis familiaris
gagaaaacaattcctcacagggggg

SEQ ID NO: 119839 - DNA, 25 bp, Canis familiaris
gagcaaaaaagtgtttggtcctggc

SEQ ID NO: 119840 - DNA, 25 bp, Canis familiaris
tgaaaggtaattgtttgcctggggc

SEQ ID NO: 119841 - DNA, 25 bp, Canis familiaris
gagtaggaatattctggtttagggg

SEQ ID NO: 119842 - DNA, 25 bp, Canis familiaris
gagctagtttcctatgggttctggc

SEQ ID NO: 119843 - DNA, 25 bp, Canis familiaris
gagctcagggacctggggtgtttgt

SEQ ID NO: 119844 - DNA, 25 bp, Canis familiaris
gagctgcagggctgattgagcgggt

SEQ ID NO: 119845 - DNA, 25 bp, Canis familiaris
gagctgcaggtctgctggggaggcc

SEQ ID NO: 119846 - DNA, 25 bp, Canis familiaris
gagctgcaggaccacggaggatgga

SEQ ID NO: 119847 - DNA, 25 bp, Canis familiaris
gagcagcagggccatgcgtagggcc

SEQ ID NO: 119848 - DNA, 25 bp, Canis familiaris
gagcagaagcccggagagtggccac

SEQ ID NO: 119849 - DNA, 25 bp, Canis familiaris
gagcataagctcatcagaagtaccc

SEQ ID NO: 119850 - DNA, 25 bp, Canis familiaris
gagcaagactgcagccaagaaaagc

SEQ ID NO: 119851 - DNA, 25 bp, Canis familiaris
gagcacagactttcaagaaaatact

SEQ ID NO: 119852 - DNA, 25 bp, Canis familiaris
gagcaagcagtttccaagtaacatt

SEQ ID NO: 119853 - DNA, 25 bp, Canis familiaris
gagaaggacattgcggcccatatta

SEQ ID NO: 119854 - DNA, 25 bp, Canis familiaris
gagaatgggtcatgcaggggcgatt

SEQ ID NO: 119855 - DNA, 25 bp, Canis familiaris
gagaatctgaggtacaacccgttta

SEQ ID NO: 119856 - DNA, 25 bp, Canis familiaris
gatggtagaggggaagcccgtggta

SEQ ID NO: 119857 - DNA, 25 bp, Canis familiaris
gagctgggagggaaggcccctgtat

SEQ ID NO: 119858 - DNA, 25 bp, Canis familiaris
gagatttgggggtagctccctgtag

SEQ ID NO: 119859 - DNA, 25 bp, Canis familiaris
gagagtttggggtgtacctcgtgtc

SEQ ID NO: 119860 - DNA, 25 bp, Canis familiaris
gagctatttggtggttgtagccccc

SEQ ID NO: 119861 - DNA, 25 bp, Canis familiaris
gagctattgggagctttccagccca

SEQ ID NO: 119862 - DNA, 25 bp, Canis familiaris
gagaaggaggagttatggccactcc

SEQ ID NO: 119863 - DNA, 25 bp, Canis familiaris
gagcataggatgtcggttcagcaga

SEQ ID NO: 119864 - DNA, 25 bp, Canis familiaris
gagctatatacggctgttgcagcag

SEQ ID NO: 119865 - DNA, 25 bp, Canis familiaris
gagcatatataagcttcacaaaggt

SEQ ID NO: 119866 - DNA, 25 bp, Canis familiaris
gagcttccagacattgccttgagaa

SEQ ID NO: 119867 - DNA, 25 bp, Canis familiaris
gagcttacactcaattgccaggaag

SEQ ID NO: 119868 - DNA, 25 bp, Canis familiaris
gagctaagctccaggagaggatcag

SEQ ID NO: 119869 - DNA, 25 bp, Canis familiaris
gagcatccagcacaggggcaggatc

SEQ ID NO: 119870 - DNA, 25 bp, Canis familiaris
gagctccgacaacgagagcgctatc

SEQ ID NO: 119871 - DNA, 25 bp, Canis familiaris
gagctccgaacaaggacgcatctcc

SEQ ID NO: 119872 - DNA, 25 bp, Canis familiaris
gagctccaaagaggtacgcagcaac

SEQ ID NO: 119873 - DNA, 25 bp, Canis familiaris
gagcagctcaacgagtgtaagcagc

SEQ ID NO: 119874 - DNA, 25 bp, Canis familiaris
gagcacgcaactgttgatcctgggg

SEQ ID NO: 119875 - DNA, 25 bp, Canis familiaris
gagcattcagccttttgatctctgg

SEQ ID NO: 119876 - DNA, 25 bp, Canis familiaris
gagcttcagctgagtctattcgtca

SEQ ID NO: 119877 - DNA, 25 bp, Canis familiaris
gagcttccagaagatactgcattca

SEQ ID NO: 119878 - DNA, 25 bp, Canis familiaris
gagctccacaactcaagcagcattt

SEQ ID NO: 119879 - DNA, 25 bp, Canis familiaris
gagctgtccgacttctagacatgtc

SEQ ID NO: 119880 - DNA, 25 bp, Canis familiaris
gagcttcagcagaattcgaaatggc

SEQ ID NO: 119881 - DNA, 25 bp, Canis familiaris
gagcttcatcatgaccagaagcttg

SEQ ID NO: 119882 - DNA, 25 bp, Canis familiaris
gagctttctgctcagcagagaatct

SEQ ID NO: 119883 - DNA, 25 bp, Canis familiaris
gagctcttcctgaagatggccatcc

SEQ ID NO: 119884 - DNA, 25 bp, Canis familiaris
gagctttctccaagatggtcttcat

SEQ ID NO: 119885 - DNA, 25 bp, Canis familiaris
gagcttcgctgtacagtggattccc

SEQ ID NO: 119886 - DNA, 25 bp, Canis familiaris
gagcttctgggacctgtgtgtccct

SEQ ID NO: 119887 - DNA, 25 bp, Canis familiaris
gagcattggcagtaccttttctctt

SEQ ID NO: 119888 - DNA, 25 bp, Canis familiaris
gagctctgagagcttctgttcttct

SEQ ID NO: 119889 - DNA, 25 bp, Canis familiaris
gagcatctgaaattttgtttgtacg

SEQ ID NO: 119890 - DNA, 25 bp, Canis familiaris
gagctgccaaaactttttatatcag

SEQ ID NO: 119891 - DNA, 25 bp, Canis familiaris
gagctctccaacatttattattcgt

SEQ ID NO: 119892 - DNA, 25 bp, Canis familiaris
gagctccgctgagatttttctggca

SEQ ID NO: 119893 - DNA, 25 bp, Canis familiaris
gagctccactttttatttccagctt

SEQ ID NO: 119894 - DNA, 25 bp, Canis familiaris
gagcaaatctgttattttccacagt

SEQ ID NO: 119895 - DNA, 25 bp, Canis familiaris
gagcaactgcccttttattcaattc

SEQ ID NO: 119896 - DNA, 25 bp, Canis familiaris
gagctactgtcactatactttcttt

SEQ ID NO: 119897 - DNA, 25 bp, Canis familiaris
gagctagttccttagtctcatcttt

SEQ ID NO: 119898 - DNA, 25 bp, Canis familiaris
gagctatttcttttttcatcatttc

SEQ ID NO: 119899 - DNA, 25 bp, Canis familiaris
gagcttttctttttaacagcatctc

SEQ ID NO: 119900 - DNA, 25 bp, Canis familiaris
gagcttccctttgctgcaaacagag

SEQ ID NO: 119901 - DNA, 25 bp, Canis familiaris
gagcttccacttggacgagcataag

SEQ ID NO: 119902 - DNA, 25 bp, Canis familiaris
gagcttccaaaggagcgagtgtcag

SEQ ID NO: 119903 - DNA, 25 bp, Canis familiaris
gagcttcagaagtcacgggtcacag

SEQ ID NO: 119904 - DNA, 25 bp, Canis familiaris
gagctctcagaaagcaaatgtgccg

SEQ ID NO: 119905 - DNA, 25 bp, Canis familiaris
gagctccagagactgagacatcatc

SEQ ID NO: 119906 - DNA, 25 bp, Canis familiaris
gagcatgtagaacttatccagccgc

SEQ ID NO: 119907 - DNA, 25 bp, Canis familiaris
gagcatttcaagttgtccatccgct

SEQ ID NO: 119908 - DNA, 25 bp, Canis familiaris
gagcagttcagatgatgatcaagcc

SEQ ID NO: 119909 - DNA, 25 bp, Canis familiaris
gagctcttcaggtactagagcccaa

SEQ ID NO: 119910 - DNA, 25 bp, Canis familiaris
gagcttccacggacatgagggcaaa

SEQ ID NO: 119911 - DNA, 25 bp, Canis familiaris
gagctctccactcacatggatgaac

SEQ ID NO: 119912 - DNA, 25 bp, Canis familiaris
gagctcatccttcagcaagacaacc

SEQ ID NO: 119913 - DNA, 25 bp, Canis familiaris
gagctcaacgtgcagaagaccctcg

SEQ ID NO: 119914 - DNA, 25 bp, Canis familiaris
gagcagccagggctggaacccatcg

SEQ ID NO: 119915 - DNA, 25 bp, Canis familiaris
gagagggtgtttcgaacctcctgtg

SEQ ID NO: 119916 - DNA, 25 bp, Canis familiaris
gagagggttgtcagagtcctggggg

SEQ ID NO: 119917 - DNA, 25 bp, Canis familiaris
gagagggattttgtgtgttggggga

SEQ ID NO: 119918 - DNA, 25 bp, Canis familiaris
gagaagtgttttgagcttgtggttc

SEQ ID NO: 119919 - DNA, 25 bp, Canis familiaris
gagaagttaccctgctttagtagaa

SEQ ID NO: 119920 - DNA, 25 bp, Canis familiaris
gagtagtaaccctcctgagtgtaaa

SEQ ID NO: 119921 - DNA, 25 bp, Canis familiaris
gagctagctaaagccaccgactgat

SEQ ID NO: 119922 - DNA, 25 bp, Canis familiaris
gagcttgtgtacacacatccacctt

SEQ ID NO: 119923 - DNA, 25 bp, Canis familiaris
gagcattttaccactgcaagcctag

SEQ ID NO: 119924 - DNA, 25 bp, Canis familiaris
gagaattgacccatacaagcatcta

SEQ ID NO: 119925 - DNA, 25 bp, Canis familiaris
gagaaccacctcagacaatgtctta

SEQ ID NO: 119926 - DNA, 25 bp, Canis familiaris
gagagacccctgaatattctcctta

SEQ ID NO: 119927 - DNA, 25 bp, Canis familiaris
gagaacccactgttagtcagttaag

SEQ ID NO: 119928 - DNA, 25 bp, Canis familiaris
gagcagatctgctctgaagagtcag

SEQ ID NO: 119929 - DNA, 25 bp, Canis familiaris
gagcacagccagactagcactgtca

SEQ ID NO: 119930 - DNA, 25 bp, Canis familiaris
gagcagctgcactgctgatgccatc

SEQ ID NO: 119931 - DNA, 25 bp, Canis familiaris
gagcagtgcagtcgtgatttcagtc

SEQ ID NO: 119932 - DNA, 25 bp, Canis familiaris
gagcagtagctgtttcttaattgtt

SEQ ID NO: 119933 - DNA, 25 bp, Canis familiaris
gagcagtactgttggtgtagttctc

SEQ ID NO: 119934 - DNA, 25 bp, Canis familiaris
gagcttgtttggttttgatgtcatc

SEQ ID NO: 119935 - DNA, 25 bp, Canis familiaris
gagcttttgttagttgcatcttccg

SEQ ID NO: 119936 - DNA, 25 bp, Canis familiaris
gagctacttgtctagagtgcctagc

SEQ ID NO: 119937 - DNA, 25 bp, Canis familiaris
gagcttcttgcttcaatgatctcaa

SEQ ID NO: 119938 - DNA, 25 bp, Canis familiaris
gagcatttacactatttctgcagat

SEQ ID NO: 119939 - DNA, 25 bp, Canis familiaris
gagactctgaagttctatctgcgga

SEQ ID NO: 119940 - DNA, 25 bp, Canis familiaris
gagcagctctgaagagtttcctagc

SEQ ID NO: 119941 - DNA, 25 bp, Canis familiaris
gagcagtttgatattgccactcacc

SEQ ID NO: 119942 - DNA, 25 bp, Canis familiaris
gagcttcttaatgagtctctcccaa

SEQ ID NO: 119943 - DNA, 25 bp, Canis familiaris
gagcatgtcctagtggattcttcac

SEQ ID NO: 119944 - DNA, 25 bp, Canis familiaris
gagctcagcctggggactatgtact

SEQ ID NO: 119945 - DNA, 25 bp, Canis familiaris
gagcacacgtttgactatgatccca

SEQ ID NO: 119946 - DNA, 25 bp, Canis familiaris
gagcaactttggtctaatgtcccac

SEQ ID NO: 119947 - DNA, 25 bp, Canis familiaris
gagcagactgttgattccgttacca

SEQ ID NO: 119948 - DNA, 25 bp, Canis familiaris
gagaaccttgaaaactattacctgg

SEQ ID NO: 119949 - DNA, 25 bp, Canis familiaris
gagaacaaatgcttaacttttccag

SEQ ID NO: 119950 - DNA, 25 bp, Canis familiaris
gagaaggtacatccgatttgttcca

SEQ ID NO: 119951 - DNA, 25 bp, Canis familiaris
gagcaggttacctagagtttcccgg

SEQ ID NO: 119952 - DNA, 25 bp, Canis familiaris
gagacgattacttgggtttccgagg

SEQ ID NO: 119953 - DNA, 25 bp, Canis familiaris
gatcagtttatctggggtgtcccaa

SEQ ID NO: 119954 - DNA, 25 bp, Canis familiaris
gagcaggtttagtctgggtgtccca

SEQ ID NO: 119955 - DNA, 25 bp, Canis familiaris
gagcaggttatccacagtctggcat

SEQ ID NO: 119956 - DNA, 25 bp, Canis familiaris
gagcacgaaatccagcagttgaagc

SEQ ID NO: 119957 - DNA, 25 bp, Canis familiaris
gagcaccatcaagcagaattagcag

SEQ ID NO: 119958 - DNA, 25 bp, Canis familiaris
gagctctacaatggcaattttggtg

SEQ ID NO: 119959 - DNA, 25 bp, Canis familiaris
gagcatgccacacttaatcttgggt

SEQ ID NO: 119960 - DNA, 25 bp, Canis familiaris
gagcaccatgattccaatctgtgtg

SEQ ID NO: 119961 - DNA, 25 bp, Canis familiaris
gagcagcaatgtccaagtggcttga

SEQ ID NO: 119962 - DNA, 25 bp, Canis familiaris
gagcatgagtgaagagattggtgga

SEQ ID NO: 119963 - DNA, 25 bp, Canis familiaris
gagcatcttgcaagagcacattggg

SEQ ID NO: 119964 - DNA, 25 bp, Canis familiaris
gagctctgtgaactgatttggggtg

SEQ ID NO: 119965 - DNA, 25 bp, Canis familiaris
gagctcggaggcaatcggacgagga

SEQ ID NO: 119966 - DNA, 25 bp, Canis familiaris
gagacgggtctgacgtactggggat

SEQ ID NO: 119967 - DNA, 25 bp, Canis familiaris
gagaaaggacccagagctagaggat

SEQ ID NO: 119968 - DNA, 25 bp, Canis familiaris
gagaaagtaacctgactacgtagac

SEQ ID NO: 119969 - DNA, 25 bp, Canis familiaris
gagaagaataagcccaacccgcttc

SEQ ID NO: 119970 - DNA, 25 bp, Canis familiaris
gagaaatacttcctaacgtccatat

SEQ ID NO: 119971 - DNA, 25 bp, Canis familiaris
gagaattccgtcctaatctatgaca

SEQ ID NO: 119972 - DNA, 25 bp, Canis familiaris
gagcaatacctgtttggcacttgac

SEQ ID NO: 119973 - DNA, 25 bp, Canis familiaris
gagactaccaagtgagactctgggt

SEQ ID NO: 119974 - DNA, 25 bp, Canis familiaris
gagcatcattccaagggagactcct

SEQ ID NO: 119975 - DNA, 25 bp, Canis familiaris
gagacacttaagacggtgtgcatta

SEQ ID NO: 119976 - DNA, 25 bp, Canis familiaris
gagcagcacttctggtggttcatct

SEQ ID NO: 119977 - DNA, 25 bp, Canis familiaris
gagcagcgtccttgtgacagtttgt

SEQ ID NO: 119978 - DNA, 25 bp, Canis familiaris
gagcagattcgtatccagtgttgtt

SEQ ID NO: 119979 - DNA, 25 bp, Canis familiaris
gagcagatatttctcctttatgtaa

SEQ ID NO: 119980 - DNA, 25 bp, Canis familiaris
gagcagtttcatctctgtgctacag

SEQ ID NO: 119981 - DNA, 25 bp, Canis familiaris
gagcatgcattttcttgtatgatat

SEQ ID NO: 119982 - DNA, 25 bp, Canis familiaris
gagcagtcttacttttgtagtttta

SEQ ID NO: 119983 - DNA, 25 bp, Canis familiaris
gagcagtttacagctgtcaaattgt

SEQ ID NO: 119984 - DNA, 25 bp, Canis familiaris
gagcatggttagtcaatggcacaat

SEQ ID NO: 119985 - DNA, 25 bp, Canis familiaris
gagcatcctgttccatctgaacaat

SEQ ID NO: 119986 - DNA, 25 bp, Canis familiaris
gagctactgttttctgaaagtgaga

SEQ ID NO: 119987 - DNA, 25 bp, Canis familiaris
gagcttcagtcttctttaagtagag

SEQ ID NO: 119988 - DNA, 25 bp, Canis familiaris
gagcttcagatttttgtgaactcca

SEQ ID NO: 119989 - DNA, 25 bp, Canis familiaris
gagctctcaagtctgtggaatcgcc

SEQ ID NO: 119990 - DNA, 25 bp, Canis familiaris
gagctcaagagccaggtggacagcc

SEQ ID NO: 119991 - DNA, 25 bp, Canis familiaris
gagcagcaaacaaggttgtccctaa

SEQ ID NO: 119992 - DNA, 25 bp, Canis familiaris
gagcaggagacagagcctgtggcca

SEQ ID NO: 119993 - DNA, 25 bp, Canis familiaris
gagcagatgagagcgaacgtgggca

SEQ ID NO: 119994 - DNA, 25 bp, Canis familiaris
gagcttgatgtcggaagcctgttgc

SEQ ID NO: 119995 - DNA, 25 bp, Canis familiaris
gagcatgtgtgtgcaaaactgatgg

SEQ ID NO: 119996 - DNA, 25 bp, Canis familiaris
gagctagaggcctatatactgtgat

SEQ ID NO: 119997 - DNA, 25 bp, Canis familiaris
gagtcaacgcgattatatattcttc

SEQ ID NO: 119998 - DNA, 25 bp, Canis familiaris
gagcatacctggaaaatgcttctgt

SEQ ID NO: 119999 - DNA, 25 bp, Canis familiaris
gagcattagtaaaacagcattctgg

SEQ ID NO: 120000 - DNA, 25 bp, Canis familiaris
gagagtagtacacccgtttcattaa

SEQ ID NO: 120001 - DNA, 25 bp, Canis familiaris
gagacccaaagcctctgatttttaa

SEQ ID NO: 120002 - DNA, 25 bp, Canis familiaris
gagaaccaagtccttgagtcctgag

SEQ ID NO: 120003 - DNA, 25 bp, Canis familiaris
tggacctccagatggtaccctagaa

SEQ ID NO: 120004 - DNA, 25 bp, Canis familiaris
gagaacccagaagtggaccctgaac

SEQ ID NO: 120005 - DNA, 25 bp, Canis familiaris
gagaaccggaagttcaaccaagaca

SEQ ID NO: 120006 - DNA, 25 bp, Canis familiaris
gagaaacggagactgggaaagaggc

SEQ ID NO: 120007 - DNA, 25 bp, Canis familiaris
gagcaaacggaacgcttggaagccc

SEQ ID NO: 120008 - DNA, 25 bp, Canis familiaris
gagcatgtaccgttttgtggagacc

SEQ ID NO: 120009 - DNA, 25 bp, Canis familiaris
gagcagtacgacctcttgtaagaac

SEQ ID NO: 120010 - DNA, 25 bp, Canis familiaris
gagcagtacgccacttctgaaaaca

SEQ ID NO: 120011 - DNA, 25 bp, Canis familiaris
gagcaaggccgagatcctgagtaac

SEQ ID NO: 120012 - DNA, 25 bp, Canis familiaris
gagaataccgggaatctgacccacc

SEQ ID NO: 120013 - DNA, 25 bp, Canis familiaris
gagaagaaccgaggatcttcccccg

SEQ ID NO: 120014 - DNA, 25 bp, Canis familiaris
gagaatacacagagcgatcaacgac

SEQ ID NO: 120015 - DNA, 25 bp, Canis familiaris
gagcagatgaacacggtcacagcca

SEQ ID NO: 120016 - DNA, 25 bp, Canis familiaris
gagcaggagaagcctgagcccacac

SEQ ID NO: 120017 - DNA, 25 bp, Canis familiaris
gagagaaaaacaagctcccagtctg

SEQ ID NO: 120018 - DNA, 25 bp, Canis familiaris
gagagagaaccagtaccccaaagtt

SEQ ID NO: 120019 - DNA, 25 bp, Canis familiaris
gagaccaaccaagctaaagtatttt

SEQ ID NO: 120020 - DNA, 25 bp, Canis familiaris
gagacctaaaacagaaacctcactg

SEQ ID NO: 120021 - DNA, 25 bp, Canis familiaris
gagaagtaaaatgcctaacccgctt

SEQ ID NO: 120022 - DNA, 25 bp, Canis familiaris
gagaaagaaatagcccaacccgctt

SEQ ID NO: 120023 - DNA, 25 bp, Canis familiaris
gagaaggaaaaggcctcagccagcc

SEQ ID NO: 120024 - DNA, 25 bp, Canis familiaris
gagcagatggagggacccagacccc

SEQ ID NO: 120025 - DNA, 25 bp, Canis familiaris
gagcatgatcaagaagcctcgtccc

SEQ ID NO: 120026 - DNA, 25 bp, Canis familiaris
gagcagatcaacaacatcggcctcc

SEQ ID NO: 120027 - DNA, 25 bp, Canis familiaris
gagcagacatactgcaggcgaatcc

SEQ ID NO: 120028 - DNA, 25 bp, Canis familiaris
gagcagaatctcttcagtgatgcac

SEQ ID NO: 120029 - DNA, 25 bp, Canis familiaris
gagcagacagcttcactggtcatct

SEQ ID NO: 120030 - DNA, 25 bp, Canis familiaris
gagcaggagctgtaggtctcattag

SEQ ID NO: 120031 - DNA, 25 bp, Canis familiaris
gagcacggtgatgggcactcaaggt

SEQ ID NO: 120032 - DNA, 25 bp, Canis familiaris
gagcaaggatgaggggctgcccgta

SEQ ID NO: 120033 - DNA, 25 bp, Canis familiaris
gagcagaggtacaggtgccacgtgc

SEQ ID NO: 120034 - DNA, 25 bp, Canis familiaris
gagcagatgcagaactagaccaccg

SEQ ID NO: 120035 - DNA, 25 bp, Canis familiaris
gagaagagctacgaactacccgacg

SEQ ID NO: 120036 - DNA, 25 bp, Canis familiaris
gagcacgatctcaaaacaaccctcc

SEQ ID NO: 120037 - DNA, 25 bp, Canis familiaris
gagaaatttgcattccaaccaacca

SEQ ID NO: 120038 - DNA, 25 bp, Canis familiaris
gagaaggctggattgctcaccatca

SEQ ID NO: 120039 - DNA, 25 bp, Canis familiaris
gagcaagagcttcatgacatccact

SEQ ID NO: 120040 - DNA, 25 bp, Canis familiaris
gagcagaccttgaagcattccattg

SEQ ID NO: 120041 - DNA, 25 bp, Canis familiaris
gagcagaccgtgaacgtgctcgcgc

SEQ ID NO: 120042 - DNA, 25 bp, Canis familiaris
gagcagatagcgtacacctgccagc

SEQ ID NO: 120043 - DNA, 25 bp, Canis familiaris
gagcatgatgagaaattcctgaggc

SEQ ID NO: 120044 - DNA, 25 bp, Canis familiaris
gagcatagagccaagatcctaggtt

SEQ ID NO: 120045 - DNA, 25 bp, Canis familiaris
gagcaggagctcaactctgcaaggg

SEQ ID NO: 120046 - DNA, 25 bp, Canis familiaris
gagcagggccatacactggcaggga

SEQ ID NO: 120047 - DNA, 25 bp, Canis familiaris
gagcatcgtctcatgactggggagg

SEQ ID NO: 120048 - DNA, 25 bp, Canis familiaris
gagcaagttttgttgggcgaattgt

SEQ ID NO: 120049 - DNA, 25 bp, Canis familiaris
gagcacctcttactggagaaaattg

SEQ ID NO: 120050 - DNA, 25 bp, Canis familiaris
gagcacgtaataggtattcaggatt

SEQ ID NO: 120051 - DNA, 25 bp, Canis familiaris
gagaagtaagtggttttgtgttgaa

SEQ ID NO: 120052 - DNA, 25 bp, Canis familiaris
gagaattaatatgttttcctaacac

SEQ ID NO: 120053 - DNA, 25 bp, Canis familiaris
gagaaaatttttaccatcctaacag

SEQ ID NO: 120054 - DNA, 25 bp, Canis familiaris
gagtaaatcttttatcagctcaaaa

SEQ ID NO: 120055 - DNA, 25 bp, Canis familiaris
gagctaacatttactatcgcttagt

SEQ ID NO: 120056 - DNA, 25 bp, Canis familiaris
gagctaagctttaccatcttgtcct

SEQ ID NO: 120057 - DNA, 25 bp, Canis familiaris
gagcttagctgttcagtttagccac

SEQ ID NO: 120058 - DNA, 25 bp, Canis familiaris
gagcttactgcttatgttttcttct

SEQ ID NO: 120059 - DNA, 25 bp, Canis familiaris
gagcttgaatctgagctctcagttt

SEQ ID NO: 120060 - DNA, 25 bp, Canis familiaris
gagttgaaaaacgcagtgttccata

SEQ ID NO: 120061 - DNA, 25 bp, Canis familiaris
gagtgttaaaccatcgttgtccaaa

SEQ ID NO: 120062 - DNA, 25 bp, Canis familiaris
gagctttccaacttttggtttcaag

SEQ ID NO: 120063 - DNA, 25 bp, Canis familiaris
gagctttctcaagggtttgttggca

SEQ ID NO: 120064 - DNA, 25 bp, Canis familiaris
gatcttacaaggcgtggttatggca

SEQ ID NO: 120065 - DNA, 25 bp, Canis familiaris
gatcctaaggcagggggtccaacac

SEQ ID NO: 120066 - DNA, 25 bp, Canis familiaris
gagcagttaggcagtggtccgaacc

SEQ ID NO: 120067 - DNA, 25 bp, Canis familiaris
gagcaactagggcatggtccaacac

SEQ ID NO: 120068 - DNA, 25 bp, Canis familiaris
gagctttattggaaaccgaacacct

SEQ ID NO: 120069 - DNA, 25 bp, Canis familiaris
gagctttgagtgcacaaccgcaccc

SEQ ID NO: 120070 - DNA, 25 bp, Canis familiaris
gagcattggaggccagcaagctagc

SEQ ID NO: 120071 - DNA, 25 bp, Canis familiaris
gagcagggctggccaatagctgggc

SEQ ID NO: 120072 - DNA, 25 bp, Canis familiaris
gagcagtgtttggccaatgatggga

SEQ ID NO: 120073 - DNA, 25 bp, Canis familiaris
gagagggtcccacagagggggttag

SEQ ID NO: 120074 - DNA, 25 bp, Canis familiaris
gagagcaggcccggggagggtagtc

SEQ ID NO: 120075 - DNA, 25 bp, Canis familiaris
gagagataacttgcagatagtggta

SEQ ID NO: 120076 - DNA, 25 bp, Canis familiaris
gagaggacacctatatagtagatat

SEQ ID NO: 120077 - DNA, 25 bp, Canis familiaris
gagaaccacctgctgcatatgtatt

SEQ ID NO: 120078 - DNA, 25 bp, Canis familiaris
gagaacctctctttaagtaacgcat

SEQ ID NO: 120079 - DNA, 25 bp, Canis familiaris
gagacccgcgttcatcagattacgc

SEQ ID NO: 120080 - DNA, 25 bp, Canis familiaris
gagaacttgggtctcattagatccc

SEQ ID NO: 120081 - DNA, 25 bp, Canis familiaris
gagcaacttccgtccaactaggacc

SEQ ID NO: 120082 - DNA, 25 bp, Canis familiaris
gagcagagcttagccatctacggga

SEQ ID NO: 120083 - DNA, 25 bp, Canis familiaris
gagcaagcttgacagctgctagttc

SEQ ID NO: 120084 - DNA, 25 bp, Canis familiaris
gagcaaatgtgcatcacccagtacc

SEQ ID NO: 120085 - DNA, 25 bp, Canis familiaris
gagcaggaggcttacacttgaactt

SEQ ID NO: 120086 - DNA, 25 bp, Canis familiaris
gagcaggaacagtcacactctgaga

SEQ ID NO: 120087 - DNA, 25 bp, Canis familiaris
gagcagagcaacagctccctgaaga

SEQ ID NO: 120088 - DNA, 25 bp, Canis familiaris
gagcagaatttgaccccgaggaaga

SEQ ID NO: 120089 - DNA, 25 bp, Canis familiaris
gagaaaactgacacccaggaagcag

SEQ ID NO: 120090 - DNA, 25 bp, Canis familiaris
gagaagaaggccaccggaggagaga

SEQ ID NO: 120091 - DNA, 25 bp, Canis familiaris
gagaaaattgccttcctggttagaa

SEQ ID NO: 120092 - DNA, 25 bp, Canis familiaris
gagaaaagccctaccactgtaatga

SEQ ID NO: 120093 - DNA, 25 bp, Canis familiaris
gagcaaaagctcctttccgaaaagg

SEQ ID NO: 120094 - DNA, 25 bp, Canis familiaris
gagaattcagtcttcttcggaaagg

SEQ ID NO: 120095 - DNA, 25 bp, Canis familiaris
gagaatatggtgtcctctcggaatg

SEQ ID NO: 120096 - DNA, 25 bp, Canis familiaris
gagagaaggagtctccgcacaagga

SEQ ID NO: 120097 - DNA, 25 bp, Canis familiaris
gagaaggtatatctccgcaacctat

SEQ ID NO: 120098 - DNA, 25 bp, Canis familiaris
gagaagggaagttgcatccaagcca

SEQ ID NO: 120099 - DNA, 25 bp, Canis familiaris
gagcttcggaagtagacacccacag

SEQ ID NO: 120100 - DNA, 25 bp, Canis familiaris
gagttggggggacgatgtccacgga

SEQ ID NO: 120101 - DNA, 25 bp, Canis familiaris
gagtggggaaggtgactaccgtaca

SEQ ID NO: 120102 - DNA, 25 bp, Canis familiaris
gagaggggttggtgttatttgtaga

SEQ ID NO: 120103 - DNA, 25 bp, Canis familiaris
gagagggagcctgaggttacggtta

SEQ ID NO: 120104 - DNA, 25 bp, Canis familiaris
gtagggtcttttcttgacttagtga

SEQ ID NO: 120105 - DNA, 25 bp, Canis familiaris
gagagaggttttccggagactaagg

SEQ ID NO: 120106 - DNA, 25 bp, Canis familiaris
gagaaggatttcttggaggctgtaa

SEQ ID NO: 120107 - DNA, 25 bp, Canis familiaris
gagaagtttgtgttgtaccagcgca

SEQ ID NO: 120108 - DNA, 25 bp, Canis familiaris
gagcaggttatcacttgacaactcc

SEQ ID NO: 120109 - DNA, 25 bp, Canis familiaris
gagcatattttcaagttggaactca

SEQ ID NO: 120110 - DNA, 25 bp, Canis familiaris
gagcttgctccctacgatgagaact

SEQ ID NO: 120111 - DNA, 25 bp, Canis familiaris
gagcttgctgcccaaggcatgaaga

SEQ ID NO: 120112 - DNA, 25 bp, Canis familiaris
gagcttcctagaggcagtacagact

SEQ ID NO: 120113 - DNA, 25 bp, Canis familiaris
gagctttatatatcatcatgaaggt

SEQ ID NO: 120114 - DNA, 25 bp, Canis familiaris
gagcttttatatatcatcataaggt

SEQ ID NO: 120115 - DNA, 25 bp, Canis familiaris
gagcatctttcttttcttcagaggt

SEQ ID NO: 120116 - DNA, 25 bp, Canis familiaris
gagcatttgactttatcttacagat

SEQ ID NO: 120117 - DNA, 25 bp, Canis familiaris
gagcatttcagttgccacttactat

SEQ ID NO: 120118 - DNA, 25 bp, Canis familiaris
gagcatctatttgcctttgacttag

SEQ ID NO: 120119 - DNA, 25 bp, Canis familiaris
gagcattgatgtacccatttttttt

SEQ ID NO: 120120 - DNA, 25 bp, Canis familiaris
gagctttcttccattttgctcttag

SEQ ID NO: 120121 - DNA, 25 bp, Canis familiaris
gagtcaacttctgtaattgtcctgg

SEQ ID NO: 120122 - DNA, 25 bp, Canis familiaris
gagaaacttgttcaattccctaagt

SEQ ID NO: 120123 - DNA, 25 bp, Canis familiaris
gagaacactatgtgggcttcctaac

SEQ ID NO: 120124 - DNA, 25 bp, Canis familiaris
gagaagcactatgtgtacggcccca

SEQ ID NO: 120125 - DNA, 25 bp, Canis familiaris
gagaaccagctctttacaggggacc

SEQ ID NO: 120126 - DNA, 25 bp, Canis familiaris
gagaaccggattgataggcagcagt

SEQ ID NO: 120127 - DNA, 25 bp, Canis familiaris
gagaaccggttggagaggcggccct

SEQ ID NO: 120128 - DNA, 25 bp, Canis familiaris
gagaacttggttgcacacgtggctc

SEQ ID NO: 120129 - DNA, 25 bp, Canis familiaris
gagaatattcgcaagctcaccggac

SEQ ID NO: 120130 - DNA, 25 bp, Canis familiaris
gagaatactgtgccaggccacgact

SEQ ID NO: 120131 - DNA, 25 bp, Canis familiaris
gagcaaacataactggcagccgaat

SEQ ID NO: 120132 - DNA, 25 bp, Canis familiaris
gagcaaactttgtgagcgtcagtgt

SEQ ID NO: 120133 - DNA, 25 bp, Canis familiaris
gagagaatcgggggacctgaggtca

SEQ ID NO: 120134 - DNA, 25 bp, Canis familiaris
gagaaaggaggtggccctcagcgtc

SEQ ID NO: 120135 - DNA, 25 bp, Canis familiaris
gagaagagggtcggaccgagggagg

SEQ ID NO: 120136 - DNA, 25 bp, Canis familiaris
gagaagggagcctgagggaacggct

SEQ ID NO: 120137 - DNA, 25 bp, Canis familiaris
gagaagaaggaaaatggtgaaaggg

SEQ ID NO: 120138 - DNA, 25 bp, Canis familiaris
gagacaggaagaagccaggaaaacc

SEQ ID NO: 120139 - DNA, 25 bp, Canis familiaris
gagactccttaaccgaaatcaacct

SEQ ID NO: 120140 - DNA, 25 bp, Canis familiaris
gagaacccgaagcagaagtcacacc

SEQ ID NO: 120141 - DNA, 25 bp, Canis familiaris
gagaagcctgcctggagaactcaca

SEQ ID NO: 120142 - DNA, 25 bp, Canis familiaris
gagtacttaccaggagcaacttatg

SEQ ID NO: 120143 - DNA, 25 bp, Canis familiaris
gagaactgtctggagtggcaatttg

SEQ ID NO: 120144 - DNA, 25 bp, Canis familiaris
gagacaattgcaaatgtacaacctg

SEQ ID NO: 120145 - DNA, 25 bp, Canis familiaris
gagacaattcggttaccttgcagcc

SEQ ID NO: 120146 - DNA, 25 bp, Canis familiaris
gagcaacttgcaggttattctcgcc

SEQ ID NO: 120147 - DNA, 25 bp, Canis familiaris
gagcaactctgatgtgtgcaccttt

SEQ ID NO: 120148 - DNA, 25 bp, Canis familiaris
gagcagatgctcatacgtgccttat

SEQ ID NO: 120149 - DNA, 25 bp, Canis familiaris
gagcagaataacgtgtactacatac

SEQ ID NO: 120150 - DNA, 25 bp, Canis familiaris
gagcaagaatacggtcaccctgacc

SEQ ID NO: 120151 - DNA, 25 bp, Canis familiaris
gagaagtcagaggagacccacgccc

SEQ ID NO: 120152 - DNA, 25 bp, Canis familiaris
gagcaggtgtgacaaggccatctcc

SEQ ID NO: 120153 - DNA, 25 bp, Canis familiaris
gagcaggtggtgctggtgctctttt

SEQ ID NO: 120154 - DNA, 25 bp, Canis familiaris
gagcagtttagcctgggttgttccc

SEQ ID NO: 120155 - DNA, 25 bp, Canis familiaris
gagcacttacgcagggattttcact

SEQ ID NO: 120156 - DNA, 25 bp, Canis familiaris
gagcaaagacgcggggtctctgttc

SEQ ID NO: 120157 - DNA, 25 bp, Canis familiaris
gagaatgaccgtggggtcctggtcc

SEQ ID NO: 120158 - DNA, 25 bp, Canis familiaris
gagcagatacacggaggtgtcgggt

SEQ ID NO: 120159 - DNA, 25 bp, Canis familiaris
gagcaagcacgcgaaggtggcaggt

SEQ ID NO: 120160 - DNA, 25 bp, Canis familiaris
gagcaagcacggatcgtgcctttct

SEQ ID NO: 120161 - DNA, 25 bp, Canis familiaris
gagcagtgcaatcgttggttctttc

SEQ ID NO: 120162 - DNA, 25 bp, Canis familiaris
gagcattgactggtctgtgtctgct

SEQ ID NO: 120163 - DNA, 25 bp, Canis familiaris
gagcattgactggggctttctgctg

SEQ ID NO: 120164 - DNA, 25 bp, Canis familiaris
gagaagatctgcaaggttatctgct

SEQ ID NO: 120165 - DNA, 25 bp, Canis familiaris
gagcagcagatcttaggtgtacagc

SEQ ID NO: 120166 - DNA, 25 bp, Canis familiaris
gtgcgcgtcaacaggtaacacttcc

SEQ ID NO: 120167 - DNA, 25 bp, Canis familiaris
gagacccgaatcggtaaccatatcc

SEQ ID NO: 120168 - DNA, 25 bp, Canis familiaris
gagacaatccaagcgcttatttacc

SEQ ID NO: 120169 - DNA, 25 bp, Canis familiaris
gagaactcacgaaggctttttcaag

SEQ ID NO: 120170 - DNA, 25 bp, Canis familiaris
gagaagcaacgagagcttatgtgta

SEQ ID NO: 120171 - DNA, 25 bp, Canis familiaris
gagaagagtggagaggtggtgatgg

SEQ ID NO: 120172 - DNA, 25 bp, Canis familiaris
gagaagattggaaaggagcttggaa

SEQ ID NO: 120173 - DNA, 25 bp, Canis familiaris
gagaccttggtggggacaattggaa

SEQ ID NO: 120174 - DNA, 25 bp, Canis familiaris
gagacccttctggggacaaggacca

SEQ ID NO: 120175 - DNA, 25 bp, Canis familiaris
gagacctgtttgggtccaatggccc

SEQ ID NO: 120176 - DNA, 25 bp, Canis familiaris
gagcacttttttatagcaatacaac

SEQ ID NO: 120177 - DNA, 25 bp, Canis familiaris
gagaatttatttccttcagttaact

SEQ ID NO: 120178 - DNA, 25 bp, Canis familiaris
gagaagtgttttgttcctaaagctt

SEQ ID NO: 120179 - DNA, 25 bp, Canis familiaris
gagaactttttggagaccattaaag

SEQ ID NO: 120180 - DNA, 25 bp, Canis familiaris
gagaagttgttataaagttgaattg

SEQ ID NO: 120181 - DNA, 25 bp, Canis familiaris
gagcacggtgtttataaattgtttt

SEQ ID NO: 120182 - DNA, 25 bp, Canis familiaris
gagcaggttgtttctgaactgtctt

SEQ ID NO: 120183 - DNA, 25 bp, Canis familiaris
gagcagtgttttcaattttcattta

SEQ ID NO: 120184 - DNA, 25 bp, Canis familiaris
gagcagttatgttatgaatttgttc

SEQ ID NO: 120185 - DNA, 25 bp, Canis familiaris
gagcagtaattctcaaatttcagca

SEQ ID NO: 120186 - DNA, 25 bp, Canis familiaris
gagactaagattccaaattttgata

SEQ ID NO: 120187 - DNA, 25 bp, Canis familiaris
gagacaaactttacagattgcttta

SEQ ID NO: 120188 - DNA, 25 bp, Canis familiaris
gagaataacttaactgtggatccca

SEQ ID NO: 120189 - DNA, 25 bp, Canis familiaris
gagagataacatgaacttacttgac

SEQ ID NO: 120190 - DNA, 25 bp, Canis familiaris
gagaaatacattgctctctccttgg

SEQ ID NO: 120191 - DNA, 25 bp, Canis familiaris
gagaataatctgagcctctgccagg

SEQ ID NO: 120192 - DNA, 25 bp, Canis familiaris
gagcagcacaacggggtggacggca

SEQ ID NO: 120193 - DNA, 25 bp, Canis familiaris
gagcacagagtcggcgggagaaggc

SEQ ID NO: 120194 - DNA, 25 bp, Canis familiaris
gagcaaggtgatggcttggacaaca

SEQ ID NO: 120195 - DNA, 25 bp, Canis familiaris
gagcaagtgtactctgattcaacaa

SEQ ID NO: 120196 - DNA, 25 bp, Canis familiaris
gagcaaggtcactgcgcacaataga

SEQ ID NO: 120197 - DNA, 25 bp, Canis familiaris
gagaagatgtctttccagccaatgc

SEQ ID NO: 120198 - DNA, 25 bp, Canis familiaris
gagaagaccattatcatcacctgca

SEQ ID NO: 120199 - DNA, 25 bp, Canis familiaris
gagatgaggccttacctcagacgag

SEQ ID NO: 120200 - DNA, 25 bp, Canis familiaris
gagaaggcaacattccacgaacatg

SEQ ID NO: 120201 - DNA, 25 bp, Canis familiaris
gagaaggcaccagctatgaaccagg

SEQ ID NO: 120202 - DNA, 25 bp, Canis familiaris
gagaaggcagcccgttggaaaggtt

SEQ ID NO: 120203 - DNA, 25 bp, Canis familiaris
gagaagctgcttctttggcaaaggg

SEQ ID NO: 120204 - DNA, 25 bp, Canis familiaris
gagaactcctgaacttgtcaaactg

SEQ ID NO: 120205 - DNA, 25 bp, Canis familiaris
gagcaccactggacactgtgtccac

SEQ ID NO: 120206 - DNA, 25 bp, Canis familiaris
gagaagaagagaatctgttccacta

SEQ ID NO: 120207 - DNA, 25 bp, Canis familiaris
gagaatacaagttcgtggccactgg

SEQ ID NO: 120208 - DNA, 25 bp, Canis familiaris
gagaatgaagtgtgcgtgcggccgg

SEQ ID NO: 120209 - DNA, 25 bp, Canis familiaris
gagaagcagagagagggcctccagg

SEQ ID NO: 120210 - DNA, 25 bp, Canis familiaris
gagaactgaaggaaggcacctaagt

SEQ ID NO: 120211 - DNA, 25 bp, Canis familiaris
gagaactgaagtgtagccctcgggt

SEQ ID NO: 120212 - DNA, 25 bp, Canis familiaris
gagactgtaagtgaggagaccgtgg

SEQ ID NO: 120213 - DNA, 25 bp, Canis familiaris
gagactggtgttgagggaagggggg

SEQ ID NO: 120214 - DNA, 25 bp, Canis familiaris
gagacccattggacggagaaagggg

SEQ ID NO: 120215 - DNA, 25 bp, Canis familiaris
gagacccctcgaaggagtctaaggg

SEQ ID NO: 120216 - DNA, 25 bp, Canis familiaris
gagaccatcccaaaggaggccgggg

SEQ ID NO: 120217 - DNA, 25 bp, Canis familiaris
gagaaattaaggggtgccctgggtg

SEQ ID NO: 120218 - DNA, 25 bp, Canis familiaris
gagaaaatcttttttgccctgttgt

SEQ ID NO: 120219 - DNA, 25 bp, Canis familiaris
gagaaaatctttttgcttccagcct

SEQ ID NO: 120220 - DNA, 25 bp, Canis familiaris
gagcagtaatctatcctggtctcac

SEQ ID NO: 120221 - DNA, 25 bp, Canis familiaris
gagcaggaatttggttgtgacaatc

SEQ ID NO: 120222 - DNA, 25 bp, Canis familiaris
gagcagggcctgtgatgtgtgtaaa

SEQ ID NO: 120223 - DNA, 25 bp, Canis familiaris
gagcaggagcctacatatgttgaaa

SEQ ID NO: 120224 - DNA, 25 bp, Canis familiaris
gagcaggcgcgttaaattatcagac

SEQ ID NO: 120225 - DNA, 25 bp, Canis familiaris
gagcatggaggaaaacctcaatgac

SEQ ID NO: 120226 - DNA, 25 bp, Canis familiaris
gagcaggagagagcacaagccaggg

SEQ ID NO: 120227 - DNA, 25 bp, Canis familiaris
gagcagtgatggacccatacagcgc

SEQ ID NO: 120228 - DNA, 25 bp, Canis familiaris
gagcaagatgggtcctctcaagccc

SEQ ID NO: 120229 - DNA, 25 bp, Canis familiaris
gagcaggggctgtggctgagaggct

SEQ ID NO: 120230 - DNA, 25 bp, Canis familiaris
gagcatcggcctttgggtcagggcc

SEQ ID NO: 120231 - DNA, 25 bp, Canis familiaris
gagcacggcaggtgcgtggagggcc

SEQ ID NO: 120232 - DNA, 25 bp, Canis familiaris
gagcagctctgggggagtaagggcc

SEQ ID NO: 120233 - DNA, 25 bp, Canis familiaris
gagaatcttggcagatttagtagcc

SEQ ID NO: 120234 - DNA, 25 bp, Canis familiaris
gagaagcaagacagcatttaggacg

SEQ ID NO: 120235 - DNA, 25 bp, Canis familiaris
gagaacgtgaaacttgctgaggagc

SEQ ID NO: 120236 - DNA, 25 bp, Canis familiaris
gagcacagcgtggacattctgctgg

SEQ ID NO: 120237 - DNA, 25 bp, Canis familiaris
gagcaagagatggccacggctgctt

SEQ ID NO: 120238 - DNA, 25 bp, Canis familiaris
gagcacagatgatggcagcctgagc

SEQ ID NO: 120239 - DNA, 25 bp, Canis familiaris
gagcagaagattcacttgacaatta

SEQ ID NO: 120240 - DNA, 25 bp, Canis familiaris
gagaagtgatttttgtcagaatttg

SEQ ID NO: 120241 - DNA, 25 bp, Canis familiaris
gagaagttattttctacagtggttt

SEQ ID NO: 120242 - DNA, 25 bp, Canis familiaris
gagacatcctacatttacgtcgtgt

SEQ ID NO: 120243 - DNA, 25 bp, Canis familiaris
gagaatctctacagggcaattccca

SEQ ID NO: 120244 - DNA, 25 bp, Canis familiaris
gagcattccaagaggaggattctcc

SEQ ID NO: 120245 - DNA, 25 bp, Canis familiaris
gagcattggtcactggaaagatcct

SEQ ID NO: 120246 - DNA, 25 bp, Canis familiaris
gagcattctgagctggactggtcct

SEQ ID NO: 120247 - DNA, 25 bp, Canis familiaris
gagactatgatgtggaatgggctat

SEQ ID NO: 120248 - DNA, 25 bp, Canis familiaris
gagaatctctgagacaatgagagga

SEQ ID NO: 120249 - DNA, 25 bp, Canis familiaris
gagaatgtgtgaggggaggggcaga

SEQ ID NO: 120250 - DNA, 25 bp, Canis familiaris
gagaatttgaccgcagctgggaagt

SEQ ID NO: 120251 - DNA, 25 bp, Canis familiaris
gagacaatcaactgccaaaggagag

SEQ ID NO: 120252 - DNA, 25 bp, Canis familiaris
gagacaatcaaagcccaacagggtg

SEQ ID NO: 120253 - DNA, 25 bp, Canis familiaris
gagaaccagtaccccaaagttcagt

SEQ ID NO: 120254 - DNA, 25 bp, Canis familiaris
gagaagccagcaaccgcaaaacttt

SEQ ID NO: 120255 - DNA, 25 bp, Canis familiaris
gagaagccaaagacagcctgacact

SEQ ID NO: 120256 - DNA, 25 bp, Canis familiaris
gagcaacaacaagtacgcggccagc

SEQ ID NO: 120257 - DNA, 25 bp, Canis familiaris
gagcagaaccagacttcagcaaaca

SEQ ID NO: 120258 - DNA, 25 bp, Canis familiaris
gagcatgaacggatcctgcaggaga

SEQ ID NO: 120259 - DNA, 25 bp, Canis familiaris
gagcatgaacagttaccatggtgtg

SEQ ID NO: 120260 - DNA, 25 bp, Canis familiaris
gagcagacatatctggccaggcgaa

SEQ ID NO: 120261 - DNA, 25 bp, Canis familiaris
gagcatccattgggagctgagagga

SEQ ID NO: 120262 - DNA, 25 bp, Canis familiaris
gagcatctgcttttggctcagagta

SEQ ID NO: 120263 - DNA, 25 bp, Canis familiaris
gagcacttgctgatgtgccaggtag

SEQ ID NO: 120264 - DNA, 25 bp, Canis familiaris
gagactgagcagaggacacgtgagc

SEQ ID NO: 120265 - DNA, 25 bp, Canis familiaris
gagaagacagcgagtccaggacctt

SEQ ID NO: 120266 - DNA, 25 bp, Canis familiaris
gagaagaacgtggaccaggcctctg

SEQ ID NO: 120267 - DNA, 25 bp, Canis familiaris
gagaaagtcattgcacggggttggt

SEQ ID NO: 120268 - DNA, 25 bp, Canis familiaris
gagacaactactttcggagtgggga

SEQ ID NO: 120269 - DNA, 25 bp, Canis familiaris
gagcaagcacaagcaagggggaggg

SEQ ID NO: 120270 - DNA, 25 bp, Canis familiaris
gagcaacccgcagacggtgggggtc

SEQ ID NO: 120271 - DNA, 25 bp, Canis familiaris
gagaagcgccttgacagactggaag

SEQ ID NO: 120272 - DNA, 25 bp, Canis familiaris
gagcaagttctttgaggaatccaag

SEQ ID NO: 120273 - DNA, 25 bp, Canis familiaris
gagcaagttcttcgagcacttcatc

SEQ ID NO: 120274 - DNA, 25 bp, Canis familiaris
gagcagagtgccaggatgacagcca

SEQ ID NO: 120275 - DNA, 25 bp, Canis familiaris
gagcagagctgaacgacagaacccc

SEQ ID NO: 120276 - DNA, 25 bp, Canis familiaris
gagacctgaagatagatacccccgt

SEQ ID NO: 120277 - DNA, 25 bp, Canis familiaris
gagaactacgacaagttcggcccgc

SEQ ID NO: 120278 - DNA, 25 bp, Canis familiaris
gagaactacgaggagtatgccgccc

SEQ ID NO: 120279 - DNA, 25 bp, Canis familiaris
gagcaactaccagcagatgaacccc

SEQ ID NO: 120280 - DNA, 25 bp, Canis familiaris
gagcagattgcctatgccatgcaga

SEQ ID NO: 120281 - DNA, 25 bp, Canis familiaris
gagcagcatggcctgagctcaggtc

SEQ ID NO: 120282 - DNA, 25 bp, Canis familiaris
gagcatgtgactggatctcagggtc

SEQ ID NO: 120283 - DNA, 25 bp, Canis familiaris
gagcaggcaaggtctcagagcagct

SEQ ID NO: 120284 - DNA, 25 bp, Canis familiaris
gagcagtgacactttcagcagagag

SEQ ID NO: 120285 - DNA, 25 bp, Canis familiaris
gagcaggacacagggcagatgcaca

SEQ ID NO: 120286 - DNA, 25 bp, Canis familiaris
gagcaggacacagggcagatgcaca

SEQ ID NO: 120287 - DNA, 25 bp, Canis familiaris
gagcagcagcaccagaagcaggagg

SEQ ID NO: 120288 - DNA, 25 bp, Canis familiaris
gagcagagccaacagcaccatggcc

SEQ ID NO: 120289 - DNA, 25 bp, Canis familiaris
gagcaaccacaggaacaatccacaa

SEQ ID NO: 120290 - DNA, 25 bp, Canis familiaris
gagaaggcccagaacatgtctaaat

SEQ ID NO: 120291 - DNA, 25 bp, Canis familiaris
gagaagaggtcgatatccaaaatat

SEQ ID NO: 120292 - DNA, 25 bp, Canis familiaris
gagaagggtcttcttagaagcttga

SEQ ID NO: 120293 - DNA, 25 bp, Canis familiaris
gagacctggtctataatgaaagtta

SEQ ID NO: 120294 - DNA, 25 bp, Canis familiaris
gagacactcagacacttcaaaaggt

SEQ ID NO: 120295 - DNA, 25 bp, Canis familiaris
gagaacggacccacaggaaggggag

SEQ ID NO: 120296 - DNA, 25 bp, Canis familiaris
gagaaaggggactcggaagttgcgg

SEQ ID NO: 120297 - DNA, 25 bp, Canis familiaris
gagaacggggaggggatggggtgct

SEQ ID NO: 120298 - DNA, 25 bp, Canis familiaris
gagaaggttgggaggggcgctctgt

SEQ ID NO: 120299 - DNA, 25 bp, Canis familiaris
gagaaggaaggaaggggccccagtg

SEQ ID NO: 120300 - DNA, 25 bp, Canis familiaris
gagaaaggggacctgaagcctgccg

SEQ ID NO: 120301 - DNA, 25 bp, Canis familiaris
gagaagaagtttcctgagacccacg

SEQ ID NO: 120302 - DNA, 25 bp, Canis familiaris
gagaaaatgaagagccagacccccc

SEQ ID NO: 120303 - DNA, 25 bp, Canis familiaris
gagaaagtggccatccataaccgcc

SEQ ID NO: 120304 - DNA, 25 bp, Canis familiaris
gagtcaaggatgccagtccgaacca

SEQ ID NO: 120305 - DNA, 25 bp, Canis familiaris
gagtaaaagctgggcctaaacaagg

SEQ ID NO: 120306 - DNA, 25 bp, Canis familiaris
gagaaaaagcttgtcggagatcata

SEQ ID NO: 120307 - DNA, 25 bp, Canis familiaris
gcttctacctctaagtctgagtcca

SEQ ID NO: 120308 - DNA, 25 bp, Canis familiaris
gagaaggaacttcatctggaacagg

SEQ ID NO: 120309 - DNA, 25 bp, Canis familiaris
gagaaggtttctcttgtgagatggt

SEQ ID NO: 120310 - DNA, 25 bp, Canis familiaris
gagaagcggttcagcatttttggca

SEQ ID NO: 120311 - DNA, 25 bp, Canis familiaris
gagaatctttacagcttacatttcc

SEQ ID NO: 120312 - DNA, 25 bp, Canis familiaris
gagacatttctactggtaccttacc

SEQ ID NO: 120313 - DNA, 25 bp, Canis familiaris
gagaatctctctccagaaacctctc

SEQ ID NO: 120314 - DNA, 25 bp, Canis familiaris
gagcagcctttcgagaaacgttcat

SEQ ID NO: 120315 - DNA, 25 bp, Canis familiaris
gagaaccttggggcagggcttcatg

SEQ ID NO: 120316 - DNA, 25 bp, Canis familiaris
gagaatccctgggtgttggcttcca

SEQ ID NO: 120317 - DNA, 25 bp, Canis familiaris
gagacaccctggttcttttgatgta

SEQ ID NO: 120318 - DNA, 25 bp, Canis familiaris
gagaacccttggacattttgctgct

SEQ ID NO: 120319 - DNA, 25 bp, Canis familiaris
gagaactatttgtaatgaaatcctc

SEQ ID NO: 120320 - DNA, 25 bp, Canis familiaris
gagcacctgatgactgaggctaata

SEQ ID NO: 120321 - DNA, 25 bp, Canis familiaris
gagcagcacctgacatgggcagact

SEQ ID NO: 120322 - DNA, 25 bp, Canis familiaris
gagcagcatcacatgcgggcaacag

SEQ ID NO: 120323 - DNA, 25 bp, Canis familiaris
gagcagctcatcactgggaaggagg

SEQ ID NO: 120324 - DNA, 25 bp, Canis familiaris
gagcagcatctgggtgactaaggat

SEQ ID NO: 120325 - DNA, 25 bp, Canis familiaris
gagcagtctgtggaacaggtgtact

SEQ ID NO: 120326 - DNA, 25 bp, Canis familiaris
gagcagtgctgtccaatagaagtat

SEQ ID NO: 120327 - DNA, 25 bp, Canis familiaris
gagcagctctgtcattcgagaactg

SEQ ID NO: 120328 - DNA, 25 bp, Canis familiaris
gagcagcctgcttcaatgcatgaga

SEQ ID NO: 120329 - DNA, 25 bp, Canis familiaris
gagcacctgctgtatactgagcact

SEQ ID NO: 120330 - DNA, 25 bp, Canis familiaris
gagcagcctgcgtagaattctcatc

SEQ ID NO: 120331 - DNA, 25 bp, Canis familiaris
gagcagccgtcattgagcatttgtc

SEQ ID NO: 120332 - DNA, 25 bp, Canis familiaris
gagagcacatgtactgagcccttgc

SEQ ID NO: 120333 - DNA, 25 bp, Canis familiaris
gagcagctcagaaagaagccttggg

SEQ ID NO: 120334 - DNA, 25 bp, Canis familiaris
gagcagtttaggaacacttcgctgg

SEQ ID NO: 120335 - DNA, 25 bp, Canis familiaris
gagatttctaggtaaggttctagga

SEQ ID NO: 120336 - DNA, 25 bp, Canis familiaris
gagcacttacggcaaggcgtctaga

SEQ ID NO: 120337 - DNA, 25 bp, Canis familiaris
gagactcttccggaaggctttcgac

SEQ ID NO: 120338 - DNA, 25 bp, Canis familiaris
gagacactgacgccaaagcttttgc

SEQ ID NO: 120339 - DNA, 25 bp, Canis familiaris
gagcactgtgaggtcaaccactttg

SEQ ID NO: 120340 - DNA, 25 bp, Canis familiaris
gagcacgctgacttcagacggcata

SEQ ID NO: 120341 - DNA, 25 bp, Canis familiaris
gagcaagcaacagtaggtgtatagt

SEQ ID NO: 120342 - DNA, 25 bp, Canis familiaris
gagaagcagctcttggtgtgctatt

SEQ ID NO: 120343 - DNA, 25 bp, Canis familiaris
gagcaagagctccaggcattcattc

SEQ ID NO: 120344 - DNA, 25 bp, Canis familiaris
gagaacagatgccaccatatcctca

SEQ ID NO: 120345 - DNA, 25 bp, Canis familiaris
gagcaaagtggagtgtatgtgtatg

SEQ ID NO: 120346 - DNA, 25 bp, Canis familiaris
gagaagttgtgagtgcctgctgtca

SEQ ID NO: 120347 - DNA, 25 bp, Canis familiaris
gagcagcaggttggactctggtacc

SEQ ID NO: 120348 - DNA, 25 bp, Canis familiaris
gagcacattggtgcactgctggcca

SEQ ID NO: 120349 - DNA, 25 bp, Canis familiaris
gagcacaagtatggcaatgcccccc

SEQ ID NO: 120350 - DNA, 25 bp, Canis familiaris
gagcaaagagctggtgagacccccg

SEQ ID NO: 120351 - DNA, 25 bp, Canis familiaris
gagaaggcagcagaaagcccccaga

SEQ ID NO: 120352 - DNA, 25 bp, Canis familiaris
gagaaaaggtactgcccatgctcga

SEQ ID NO: 120353 - DNA, 25 bp, Canis familiaris
gagaaaggactatgacagcctggcg

SEQ ID NO: 120354 - DNA, 25 bp, Canis familiaris
gagtagtcaacttgcaaagcgttcg

SEQ ID NO: 120355 - DNA, 25 bp, Canis familiaris
gagagggcacatctgaaggtttctg

SEQ ID NO: 120356 - DNA, 25 bp, Canis familiaris
gagaaggccatcctgaagttcagct

SEQ ID NO: 120357 - DNA, 25 bp, Canis familiaris
gagaaccactcaagaatgcttccag

SEQ ID NO: 120358 - DNA, 25 bp, Canis familiaris
gagcacaccctaattagtggccagt

SEQ ID NO: 120359 - DNA, 25 bp, Canis familiaris
gagaagcccacagctggggcaagat

SEQ ID NO: 120360 - DNA, 25 bp, Canis familiaris
gagaatcacccgcaggcggcaattc

SEQ ID NO: 120361 - DNA, 25 bp, Canis familiaris
gagaaactccacaatggcaccattc

SEQ ID NO: 120362 - DNA, 25 bp, Canis familiaris
gagaatagtccttaccactgatttt

SEQ ID NO: 120363 - DNA, 25 bp, Canis familiaris
gagaatctaccatgtaactaattta

SEQ ID NO: 120364 - DNA, 25 bp, Canis familiaris
ggaaccagtccttaggcgaatttct

SEQ ID NO: 120365 - DNA, 25 bp, Canis familiaris
gagagattagctgtacaacggagtt

SEQ ID NO: 120366 - DNA, 25 bp, Canis familiaris
gagaatccctcccagaaggtgtgtt

SEQ ID NO: 120367 - DNA, 25 bp, Canis familiaris
gagaaccccttttgaggtgttgtga

SEQ ID NO: 120368 - DNA, 25 bp, Canis familiaris
gagaaacagttggtaacttttgtga

SEQ ID NO: 120369 - DNA, 25 bp, Canis familiaris
gagaatactttaatgaatccttttg

SEQ ID NO: 120370 - DNA, 25 bp, Canis familiaris
gagaactagaaagtagtgccttttg

SEQ ID NO: 120371 - DNA, 25 bp, Canis familiaris
gagaacttaaatgaatatgcttttt

SEQ ID NO: 120372 - DNA, 25 bp, Canis familiaris
gagcaactgaaattcccttctcact

SEQ ID NO: 120373 - DNA, 25 bp, Canis familiaris
gagcagacttaatagcttatctcaa

SEQ ID NO: 120374 - DNA, 25 bp, Canis familiaris
gagaacgggaaacttgtcatcaacg

SEQ ID NO: 120375 - DNA, 25 bp, Canis familiaris
gagaacggggaggctttcccagatt

SEQ ID NO: 120376 - DNA, 25 bp, Canis familiaris
gagaactgaggtctctgctttccag

SEQ ID NO: 120377 - DNA, 25 bp, Canis familiaris
gagaaccagagtttgatctttccaa

SEQ ID NO: 120378 - DNA, 25 bp, Canis familiaris
gagaaccataacttatctttgacga

SEQ ID NO: 120379 - DNA, 25 bp, Canis familiaris
gagaaccaagcgttacttagcagtg

SEQ ID NO: 120380 - DNA, 25 bp, Canis familiaris
gagaaacgtaaatctgaagcagcta

SEQ ID NO: 120381 - DNA, 25 bp, Canis familiaris
gagaaactggaatcccaacactgtt

SEQ ID NO: 120382 - DNA, 25 bp, Canis familiaris
gagacacctggttgacttaaccctt

SEQ ID NO: 120383 - DNA, 25 bp, Canis familiaris
gagcaacctgttctcttaaccatgt

SEQ ID NO: 120384 - DNA, 25 bp, Canis familiaris
gagcacccattttttgttcaagcag

SEQ ID NO: 120385 - DNA, 25 bp, Canis familiaris
gagcacctatgtgtcgagttttgcg

SEQ ID NO: 120386 - DNA, 25 bp, Canis familiaris
gagaccggtgctaaagttgaacgag

SEQ ID NO: 120387 - DNA, 25 bp, Canis familiaris
gagaccggtgctaaagttgaacgag

SEQ ID NO: 120388 - DNA, 25 bp, Canis familiaris
gagaccctgtccaaaagtacaatcg

SEQ ID NO: 120389 - DNA, 25 bp, Canis familiaris
gagaaacctgccaagtatgatgaca

SEQ ID NO: 120390 - DNA, 25 bp, Canis familiaris
gagaagtgcctgatgatgctgatgt

SEQ ID NO: 120391 - DNA, 25 bp, Canis familiaris
gagcaatgtgctggtagatggtgca

SEQ ID NO: 120392 - DNA, 25 bp, Canis familiaris
gagcacatgtgtgctgacgtgctgc

SEQ ID NO: 120393 - DNA, 25 bp, Canis familiaris
gagcactgtggccagatggtgtctg

SEQ ID NO: 120394 - DNA, 25 bp, Canis familiaris
gagcacggtgcccagaagtcatagt

SEQ ID NO: 120395 - DNA, 25 bp, Canis familiaris
gagcacggccacaaggagatcacag

SEQ ID NO: 120396 - DNA, 25 bp, Canis familiaris
gagcacgagagaaggagagacacac

SEQ ID NO: 120397 - DNA, 25 bp, Canis familiaris
gagcactgggttgcaagacacaggg

SEQ ID NO: 120398 - DNA, 25 bp, Canis familiaris
gagcactgagtgttacacacaactg

SEQ ID NO: 120399 - DNA, 25 bp, Canis familiaris
gagcactgaaatacataaagccaat

SEQ ID NO: 120400 - DNA, 25 bp, Canis familiaris
gagcagctgaagaaccgtagccaca

SEQ ID NO: 120401 - DNA, 25 bp, Canis familiaris
gagcagaacatgatccggatggccc

SEQ ID NO: 120402 - DNA, 25 bp, Canis familiaris
gagaactgcagcagctcggcatggc

SEQ ID NO: 120403 - DNA, 25 bp, Canis familiaris
gagagacatgcagcagtagcgccgg

SEQ ID NO: 120404 - DNA, 25 bp, Canis familiaris
gagcaacatgcagatctacagcgcc

SEQ ID NO: 120405 - DNA, 25 bp, Canis familiaris
gagaatgctgctggattagtgccct

SEQ ID NO: 120406 - DNA, 25 bp, Canis familiaris
gagcaatgtgctggagacggccgtc

SEQ ID NO: 120407 - DNA, 25 bp, Canis familiaris
gagcaagatctatggcaagcgcagt

SEQ ID NO: 120408 - DNA, 25 bp, Canis familiaris
gagcagaacaaggccaacgcgctcc

SEQ ID NO: 120409 - DNA, 25 bp, Canis familiaris
gagcagagcagatgcacctaagcga

SEQ ID NO: 120410 - DNA, 25 bp, Canis familiaris
gagcagcagagatgtccagggcaca

SEQ ID NO: 120411 - DNA, 25 bp, Canis familiaris
gagcacatgagtgggaagggccaga

SEQ ID NO: 120412 - DNA, 25 bp, Canis familiaris
gagcagcagcttggtgaagcgggaa

SEQ ID NO: 120413 - DNA, 25 bp, Canis familiaris
gagcagcagtggcatgacctgggag

SEQ ID NO: 120414 - DNA, 25 bp, Canis familiaris
gagcacagtggatgtcacctggggc

SEQ ID NO: 120415 - DNA, 25 bp, Canis familiaris
gagcacagaggaagttgccaggcag

SEQ ID NO: 120416 - DNA, 25 bp, Canis familiaris
gagcagccaggaaggctctcagaga

SEQ ID NO: 120417 - DNA, 25 bp, Canis familiaris
gagcaccaaagtattcagagttcag

SEQ ID NO: 120418 - DNA, 25 bp, Canis familiaris
gagcaacacagagctggtgcagagc

SEQ ID NO: 120419 - DNA, 25 bp, Canis familiaris
gagcaagctcgagtctatgtggatg

SEQ ID NO: 120420 - DNA, 25 bp, Canis familiaris
gagcacgccaatgccagtgagtgtg

SEQ ID NO: 120421 - DNA, 25 bp, Canis familiaris
gagcacagccaaacacgtaggcttg

SEQ ID NO: 120422 - DNA, 25 bp, Canis familiaris
gagcacagccaaacacgtaggcttg

SEQ ID NO: 120423 - DNA, 25 bp, Canis familiaris
gagaatagcagaaactgacccttga

SEQ ID NO: 120424 - DNA, 25 bp, Canis familiaris
gagcacatagtgcagactccctagt

SEQ ID NO: 120425 - DNA, 25 bp, Canis familiaris
gagcaccaggtggtctcctctgact

SEQ ID NO: 120426 - DNA, 25 bp, Canis familiaris
gagactcaggtcatgcatttgcact

SEQ ID NO: 120427 - DNA, 25 bp, Canis familiaris
gagaaagagacaagtttatttattt

SEQ ID NO: 120428 - DNA, 25 bp, Canis familiaris
gagaaacacccatttgtgacttttt

SEQ ID NO: 120429 - DNA, 25 bp, Canis familiaris
gagactagcccgaattggtttattt

SEQ ID NO: 120430 - DNA, 25 bp, Canis familiaris
gagaacgatgctttttggttttgtt

SEQ ID NO: 120431 - DNA, 25 bp, Canis familiaris
gagcacttcagatttttcctttttt

SEQ ID NO: 120432 - DNA, 25 bp, Canis familiaris
gagcaccatcagatttctgcacttt

SEQ ID NO: 120433 - DNA, 25 bp, Canis familiaris
gagagttcgtttagtgagcctgtag

SEQ ID NO: 120434 - DNA, 25 bp, Canis familiaris
gagacttggacttaggaccagtacg

SEQ ID NO: 120435 - DNA, 25 bp, Canis familiaris
gagcacttgggcagggagtcagacc

SEQ ID NO: 120436 - DNA, 25 bp, Canis familiaris
gagcacacaaggcgggagctagcca

SEQ ID NO: 120437 - DNA, 25 bp, Canis familiaris
gagcacctagtgccagggaggagct

SEQ ID NO: 120438 - DNA, 25 bp, Canis familiaris
gagcacttcagttcagtgtggttgt

SEQ ID NO: 120439 - DNA, 25 bp, Canis familiaris
gagcacatccgtacgtgtggggtgg

SEQ ID NO: 120440 - DNA, 25 bp, Canis familiaris
gagaatctagttgtggctgaggctg

SEQ ID NO: 120441 - DNA, 25 bp, Canis familiaris
gagaattatgttgtggaggctccgc

SEQ ID NO: 120442 - DNA, 25 bp, Canis familiaris
gagaattctcttgtgtactgcttgg

SEQ ID NO: 120443 - DNA, 25 bp, Canis familiaris
gagaatttctactggcactgtatct

SEQ ID NO: 120444 - DNA, 25 bp, Canis familiaris
gagcacatgtttacctggcattttg

SEQ ID NO: 120445 - DNA, 25 bp, Canis familiaris
gagcactttaatttctgttatcgtt

SEQ ID NO: 120446 - DNA, 25 bp, Canis familiaris
gagactgttcttgttttattttgtt

SEQ ID NO: 120447 - DNA, 25 bp, Canis familiaris
gagacgtctttagttaggtcctcgt

SEQ ID NO: 120448 - DNA, 25 bp, Canis familiaris
gagaagttttaaaagatgcccattt

SEQ ID NO: 120449 - DNA, 25 bp, Canis familiaris
gagaagttaaaaatatgttccataa

SEQ ID NO: 120450 - DNA, 25 bp, Canis familiaris
gagaaggttgaatctcatttccttt

SEQ ID NO: 120451 - DNA, 25 bp, Canis familiaris
gagaaaaagtgctcttcttcctctt

SEQ ID NO: 120452 - DNA, 25 bp, Canis familiaris
gagaaacaagtctcttctccttcca

SEQ ID NO: 120453 - DNA, 25 bp, Canis familiaris
gagaataaatcctttcttgccctca

SEQ ID NO: 120454 - DNA, 25 bp, Canis familiaris
gagaaatagtcttttttccctagcg

SEQ ID NO: 120455 - DNA, 25 bp, Canis familiaris
gagaactttcatttttttccagcgg

SEQ ID NO: 120456 - DNA, 25 bp, Canis familiaris
gagcaagttttcttattgttctata

SEQ ID NO: 120457 - DNA, 25 bp, Canis familiaris
gagcacagttccctttgtgtttgtc

SEQ ID NO: 120458 - DNA, 25 bp, Canis familiaris
gagacatttgatcccttgtttgctt

SEQ ID NO: 120459 - DNA, 25 bp, Canis familiaris
gagaatgcttgagacttcactcagt

SEQ ID NO: 120460 - DNA, 25 bp, Canis familiaris
gagcacatctcttttgttacatcaa

SEQ ID NO: 120461 - DNA, 25 bp, Canis familiaris
gagcactatctcattcttaatcatg

SEQ ID NO: 120462 - DNA, 25 bp, Canis familiaris
gagcactatctttacacatattctc

SEQ ID NO: 120463 - DNA, 25 bp, Canis familiaris
gagcacttctcataacatctggtac

SEQ ID NO: 120464 - DNA, 25 bp, Canis familiaris
gagcagctactatacatctgcgcgc

SEQ ID NO: 120465 - DNA, 25 bp, Canis familiaris
gagcactcacatctatcttgtgcgt

SEQ ID NO: 120466 - DNA, 25 bp, Canis familiaris
gagactgacagccttcgggatgtcc

SEQ ID NO: 120467 - DNA, 25 bp, Canis familiaris
gagaaggatgccctcaaggtggccc

SEQ ID NO: 120468 - DNA, 25 bp, Canis familiaris
gagaagtagcctccatgcagggagc

SEQ ID NO: 120469 - DNA, 25 bp, Canis familiaris
gataagaagccaaaagtggatgagt

SEQ ID NO: 120470 - DNA, 25 bp, Canis familiaris
gagaagacatccgcaagggagagtc

SEQ ID NO: 120471 - DNA, 25 bp, Canis familiaris
gagaagacagacggccagggagagt

SEQ ID NO: 120472 - DNA, 25 bp, Canis familiaris
gagacagaagcaaggggggagagat

SEQ ID NO: 120473 - DNA, 25 bp, Canis familiaris
gagaacactgcaggggtgggggagt

SEQ ID NO: 120474 - DNA, 25 bp, Canis familiaris
gagaagccggcgagcggcaggaagg

SEQ ID NO: 120475 - DNA, 25 bp, Canis familiaris
gagaagaccgaataggagctggagg

SEQ ID NO: 120476 - DNA, 25 bp, Canis familiaris
gagaagttaaagaggagagtgtgtg

SEQ ID NO: 120477 - DNA, 25 bp, Canis familiaris
gagaagttcaaattatctgtggttg

SEQ ID NO: 120478 - DNA, 25 bp, Canis familiaris
gagaagtcgcaaatctgtttcgggg

SEQ ID NO: 120479 - DNA, 25 bp, Canis familiaris
gagaaccagatctcggtacgggcgg

SEQ ID NO: 120480 - DNA, 25 bp, Canis familiaris
gagaaaattcccaagttccaaggtg

SEQ ID NO: 120481 - DNA, 25 bp, Canis familiaris
gagaaaaatccagagttggttggca

SEQ ID NO: 120482 - DNA, 25 bp, Canis familiaris
gagaaggaagccagaggctggttgg

SEQ ID NO: 120483 - DNA, 25 bp, Canis familiaris
gagaaggctacctgggcatctgatt

SEQ ID NO: 120484 - DNA, 25 bp, Canis familiaris
gagaagtgttccaggccatgatgat

SEQ ID NO: 120485 - DNA, 25 bp, Canis familiaris
gagaaggtggctcagaccatctgct

SEQ ID NO: 120486 - DNA, 25 bp, Canis familiaris
gagaagggtgtagaccatctaacaa

SEQ ID NO: 120487 - DNA, 25 bp, Canis familiaris
gagaactttctggaaccattaaaga

SEQ ID NO: 120488 - DNA, 25 bp, Canis familiaris
gagaactttctggaaccattaaaga

SEQ ID NO: 120489 - DNA, 25 bp, Canis familiaris
gagaatgtttcagacaccaaaccat

SEQ ID NO: 120490 - DNA, 25 bp, Canis familiaris
gagaacagtctctagaaccaaccct

SEQ ID NO: 120491 - DNA, 25 bp, Canis familiaris
gagagaattgcttaggtccacaacc

SEQ ID NO: 120492 - DNA, 25 bp, Canis familiaris
gagaagatggtatgattctacatat

SEQ ID NO: 120493 - DNA, 25 bp, Canis familiaris
gagaagtgggggacctcactttggc

SEQ ID NO: 120494 - DNA, 25 bp, Canis familiaris
gatgaatatgggcgtccttttctca

SEQ ID NO: 120495 - DNA, 25 bp, Canis familiaris
gagaacaatgggaaccagtctttca

SEQ ID NO: 120496 - DNA, 25 bp, Canis familiaris
gagaagggggctagagcagttcttc

SEQ ID NO: 120497 - DNA, 25 bp, Canis familiaris
gagacagttggggatgacatttttt

SEQ ID NO: 120498 - DNA, 25 bp, Canis familiaris
gagatcttaggccttgaactttttt

SEQ ID NO: 120499 - DNA, 25 bp, Canis familiaris
gagacttgcaggcacttatcttgtg

SEQ ID NO: 120500 - DNA, 25 bp, Canis familiaris
gagaatccctgaaatatcccatgtg

SEQ ID NO: 120501 - DNA, 25 bp, Canis familiaris
gagaagtcgctgcagatgatccgcc

SEQ ID NO: 120502 - DNA, 25 bp, Canis familiaris
gagaatattctgcagtaaagtctat

SEQ ID NO: 120503 - DNA, 25 bp, Canis familiaris
gagcaatataacctagaaactctta

SEQ ID NO: 120504 - DNA, 25 bp, Canis familiaris
gagaatctacacctacgttacatta

SEQ ID NO: 120505 - DNA, 25 bp, Canis familiaris
gagacatgtgactctgtccattgaa

SEQ ID NO: 120506 - DNA, 25 bp, Canis familiaris
gagaagttccggaacatgcgcaacc

SEQ ID NO: 120507 - DNA, 25 bp, Canis familiaris
gagcacagtgtctggaagggcaccc

SEQ ID NO: 120508 - DNA, 25 bp, Canis familiaris
gagcaacggcaagggcaaggactgc

SEQ ID NO: 120509 - DNA, 25 bp, Canis familiaris
gagcaactggccatgagcaggaacc

SEQ ID NO: 120510 - DNA, 25 bp, Canis familiaris
gagcaacggacaaaggagagcaacg

SEQ ID NO: 120511 - DNA, 25 bp, Canis familiaris
gagaacgagacagatacagagagac

SEQ ID NO: 120512 - DNA, 25 bp, Canis familiaris
gagaactgtgacgtcagagagcgag

SEQ ID NO: 120513 - DNA, 25 bp, Canis familiaris
gagaacgttttcgaggtggagcata

SEQ ID NO: 120514 - DNA, 25 bp, Canis familiaris
gagaacaggtgaaccaccgggcaac

SEQ ID NO: 120515 - DNA, 25 bp, Canis familiaris
gagaacggatacaaatcctgccaaa

SEQ ID NO: 120516 - DNA, 25 bp, Canis familiaris
gagaacaggccatcagggctgccaa

SEQ ID NO: 120517 - DNA, 25 bp, Canis familiaris
gagaatccagaaacaggcccacact

SEQ ID NO: 120518 - DNA, 25 bp, Canis familiaris
gagacatcgagaataccaacgccct

SEQ ID NO: 120519 - DNA, 25 bp, Canis familiaris
gagaatcacacaacccaagtgtcca

SEQ ID NO: 120520 - DNA, 25 bp, Canis familiaris
gagaatctcagttcctctagtatcc

SEQ ID NO: 120521 - DNA, 25 bp, Canis familiaris
gagaattaatcccatctactcagcc

SEQ ID NO: 120522 - DNA, 25 bp, Canis familiaris
gagaacttcacatattgacacatgc

SEQ ID NO: 120523 - DNA, 25 bp, Canis familiaris
gagactcgtactcatgttactcgca

SEQ ID NO: 120524 - DNA, 25 bp, Canis familiaris
gagactgcagtggacgtggtaccga

SEQ ID NO: 120525 - DNA, 25 bp, Canis familiaris
gagaggccaaacctgggcctccaaa

SEQ ID NO: 120526 - DNA, 25 bp, Canis familiaris
gagaaaaagttgcgagcttaaagca

SEQ ID NO: 120527 - DNA, 25 bp, Canis familiaris
gagaaaaatgttttggttccagaca

SEQ ID NO: 120528 - DNA, 25 bp, Canis familiaris
gagacacaaagtactaggttggcca

SEQ ID NO: 120529 - DNA, 25 bp, Canis familiaris
gagaccaacactctagagtaccctg

SEQ ID NO: 120530 - DNA, 25 bp, Canis familiaris
gagactgccagagtttaggtagcca

SEQ ID NO: 120531 - DNA, 25 bp, Canis familiaris
gatactccttacagaattagccaga

SEQ ID NO: 120532 - DNA, 25 bp, Canis familiaris
gtgacgacccaaataattcgcccag

SEQ ID NO: 120533 - DNA, 25 bp, Canis familiaris
gagaaggccccaatgaaaccctggc

SEQ ID NO: 120534 - DNA, 25 bp, Canis familiaris
gagaaggcccacaatcaggaccttg

SEQ ID NO: 120535 - DNA, 25 bp, Canis familiaris
gagaagcctcaaattagagtcattt

SEQ ID NO: 120536 - DNA, 25 bp, Canis familiaris
gagaacctcgttgacatgcacagtt

SEQ ID NO: 120537 - DNA, 25 bp, Canis familiaris
gagaatttttctatcagacagatga

SEQ ID NO: 120538 - DNA, 25 bp, Canis familiaris
gagaaattaaccccaaatatgaagt

SEQ ID NO: 120539 - DNA, 25 bp, Canis familiaris
gagaactttatccgtcaaacacacg

SEQ ID NO: 120540 - DNA, 25 bp, Canis familiaris
gagaactaaatctggcttaacccgg

SEQ ID NO: 120541 - DNA, 25 bp, Canis familiaris
gagactcaaaactggcctgaagcac

SEQ ID NO: 120542 - DNA, 25 bp, Canis familiaris
gagaccaatagagagaccgggaata

SEQ ID NO: 120543 - DNA, 25 bp, Canis familiaris
gagacactatagagaaccgtaagga

SEQ ID NO: 120544 - DNA, 25 bp, Canis familiaris
gagaatctatagaggagccagacag

SEQ ID NO: 120545 - DNA, 25 bp, Canis familiaris
gagaatcttaagcaggctccaggag

SEQ ID NO: 120546 - DNA, 25 bp, Canis familiaris
gagaatctcgaactgagtctcttgg

SEQ ID NO: 120547 - DNA, 25 bp, Canis familiaris
gagaatctagataatgctgtatttc

SEQ ID NO: 120548 - DNA, 25 bp, Canis familiaris
gagaatctcacagatgtgtgattat

SEQ ID NO: 120549 - DNA, 25 bp, Canis familiaris
gagaatcacacggagtgccactgca

SEQ ID NO: 120550 - DNA, 25 bp, Canis familiaris
gagaagtccaggatgctgcgctagc

SEQ ID NO: 120551 - DNA, 25 bp, Canis familiaris
gagacagaggcaggattctcctaat

SEQ ID NO: 120552 - DNA, 25 bp, Canis familiaris
gagaagacgcaggattgctctccct

SEQ ID NO: 120553 - DNA, 25 bp, Canis familiaris
gagaagggcagcagtcattccatct

SEQ ID NO: 120554 - DNA, 25 bp, Canis familiaris
gagaagtgaagcaccgactcatgtc

SEQ ID NO: 120555 - DNA, 25 bp, Canis familiaris
gagatcaggaacatgggcagccttc

SEQ ID NO: 120556 - DNA, 25 bp, Canis familiaris
gagactggtgagttggacccttgtt

SEQ ID NO: 120557 - DNA, 25 bp, Canis familiaris
gagacggaaagagctcaccgtgtct

SEQ ID NO: 120558 - DNA, 25 bp, Canis familiaris
gagaaataaagtttcactttgacat

SEQ ID NO: 120559 - DNA, 25 bp, Canis familiaris
gagaagccaaataaaccgtgtgaac

SEQ ID NO: 120560 - DNA, 25 bp, Canis familiaris
gagcaaacaactacatatcacaggt

SEQ ID NO: 120561 - DNA, 25 bp, Canis familiaris
gagaaggatcaggtctatcaaggtc

SEQ ID NO: 120562 - DNA, 25 bp, Canis familiaris
gagaatcccagagttaaatggccca

SEQ ID NO: 120563 - DNA, 25 bp, Canis familiaris
gagaaccactgattttaatttgcct

SEQ ID NO: 120564 - DNA, 25 bp, Canis familiaris
gagaacccactatgttttggcctta

SEQ ID NO: 120565 - DNA, 25 bp, Canis familiaris
gagaacggactattgtttgcctgac

SEQ ID NO: 120566 - DNA, 25 bp, Canis familiaris
gagaacggactcactgtagcaaaca

SEQ ID NO: 120567 - DNA, 25 bp, Canis familiaris
gagaacgagaccactgtcctgtatc

SEQ ID NO: 120568 - DNA, 25 bp, Canis familiaris
gagaacgacacgatagccaagtatg

SEQ ID NO: 120569 - DNA, 25 bp, Canis familiaris
gagaaccctgagactgacagccagt

SEQ ID NO: 120570 - DNA, 25 bp, Canis familiaris
gagaacaccgtattggagacatgtg

SEQ ID NO: 120571 - DNA, 25 bp, Canis familiaris
gagaacagctaaagcgaggcctgct

SEQ ID NO: 120572 - DNA, 25 bp, Canis familiaris
gagcaacatgtatgacctgggtgtc

SEQ ID NO: 120573 - DNA, 25 bp, Canis familiaris
gagaatcttattgcctggtgctggg

SEQ ID NO: 120574 - DNA, 25 bp, Canis familiaris
gagaagtataaccacgcgcttcggc

SEQ ID NO: 120575 - DNA, 25 bp, Canis familiaris
gagaagttcaacaattcctcctggt

SEQ ID NO: 120576 - DNA, 25 bp, Canis familiaris
gagacgttaaccattcagttgccat

SEQ ID NO: 120577 - DNA, 25 bp, Canis familiaris
gagacggtcatagattaagattcct

SEQ ID NO: 120578 - DNA, 25 bp, Canis familiaris
gagacgtgattaggttactcctacg

SEQ ID NO: 120579 - DNA, 25 bp, Canis familiaris
gagaggtcttcagatcctctcctag

SEQ ID NO: 120580 - DNA, 25 bp, Canis familiaris
gagacgtctaatgaccattcaccat

SEQ ID NO: 120581 - DNA, 25 bp, Canis familiaris
gagacccataaggacactacaccca

SEQ ID NO: 120582 - DNA, 25 bp, Canis familiaris
gagaactcgacagaaatccattggc

SEQ ID NO: 120583 - DNA, 25 bp, Canis familiaris
gagaagccctcagaaatctccgact

SEQ ID NO: 120584 - DNA, 25 bp, Canis familiaris
gagcaaggtccagaagatcttccac

SEQ ID NO: 120585 - DNA, 25 bp, Canis familiaris
gagaaagctcccatgtgatttccaa

SEQ ID NO: 120586 - DNA, 25 bp, Canis familiaris
gagaaagtctcctagttggtgtcaa

SEQ ID NO: 120587 - DNA, 25 bp, Canis familiaris
gagaaagtctcctagttggtgtcaa

SEQ ID NO: 120588 - DNA, 25 bp, Canis familiaris
gagaatgactggttaatctggttaa

SEQ ID NO: 120589 - DNA, 25 bp, Canis familiaris
taactgactgaatgaccctaaaatt

SEQ ID NO: 120590 - DNA, 25 bp, Canis familiaris
taatcggaatcttagccttaaaatt

SEQ ID NO: 120591 - DNA, 25 bp, Canis familiaris
gagacagtttcttagctttttaatt

SEQ ID NO: 120592 - DNA, 25 bp, Canis familiaris
gagacacttttttgcgtttttgccg

SEQ ID NO: 120593 - DNA, 25 bp, Canis familiaris
gagaccttcgtttgtgtggtagggc

SEQ ID NO: 120594 - DNA, 25 bp, Canis familiaris
gagacctacacggaggtggtgacgg

SEQ ID NO: 120595 - DNA, 25 bp, Canis familiaris
gagacctaagcgggtataaggccag

SEQ ID NO: 120596 - DNA, 25 bp, Canis familiaris
gagacacaaaccattttagcaatat

SEQ ID NO: 120597 - DNA, 25 bp, Canis familiaris
gagaaaaattcactcatttggagaa

SEQ ID NO: 120598 - DNA, 25 bp, Canis familiaris
gagaagaaagtcatctgtagcagat

SEQ ID NO: 120599 - DNA, 25 bp, Canis familiaris
gagcaagaaactgatgtctgacaat

SEQ ID NO: 120600 - DNA, 25 bp, Canis familiaris
gagaagttagaggtcttgactaggt

SEQ ID NO: 120601 - DNA, 25 bp, Canis familiaris
gagcaagtccgggttcaggtgagcg

SEQ ID NO: 120602 - DNA, 25 bp, Canis familiaris
gagaagtgcatccccttgaggggcg

SEQ ID NO: 120603 - DNA, 25 bp, Canis familiaris
gagaaggatggggctgggcaggggc

SEQ ID NO: 120604 - DNA, 25 bp, Canis familiaris
gagacggtgtacctggagcggaacc

SEQ ID NO: 120605 - DNA, 25 bp, Canis familiaris
gagacaaagtaccactagctgacaa

SEQ ID NO: 120606 - DNA, 25 bp, Canis familiaris
gagaatgagtgcttctcctactgac

SEQ ID NO: 120607 - DNA, 25 bp, Canis familiaris
gagagaagtgcttcaccaacgaggc

SEQ ID NO: 120608 - DNA, 25 bp, Canis familiaris
gagacaagtgccaacaatacaaact

SEQ ID NO: 120609 - DNA, 25 bp, Canis familiaris
gagaatgccctcaaaatcactaacg

SEQ ID NO: 120610 - DNA, 25 bp, Canis familiaris
gagaatcccaagaagtacatccctg

SEQ ID NO: 120611 - DNA, 25 bp, Canis familiaris
gagaacccagaataatcccacgtat

SEQ ID NO: 120612 - DNA, 25 bp, Canis familiaris
gagaattactaaaagacccactgct

SEQ ID NO: 120613 - DNA, 25 bp, Canis familiaris
gagacctgacttgagaggccacact

SEQ ID NO: 120614 - DNA, 25 bp, Canis familiaris
gagacctgtcttgtgtagtcctaaa

SEQ ID NO: 120615 - DNA, 25 bp, Canis familiaris
gagacctgcatcatgttgggtttca

SEQ ID NO: 120616 - DNA, 25 bp, Canis familiaris
gagactctaccatctacgatttaac

SEQ ID NO: 120617 - DNA, 25 bp, Canis familiaris
gagactttctgatctagttagtaca

SEQ ID NO: 120618 - DNA, 25 bp, Canis familiaris
gagactctataactcattttaggaa

SEQ ID NO: 120619 - DNA, 25 bp, Canis familiaris
gagacatgcttctgtgcaattttgt

SEQ ID NO: 120620 - DNA, 25 bp, Canis familiaris
gagaatcttcaaataatcttcttga

SEQ ID NO: 120621 - DNA, 25 bp, Canis familiaris
gagaatgttacagatcctcctcgtc

SEQ ID NO: 120622 - DNA, 25 bp, Canis familiaris
gagaatgttaagcctcgacacgtgt

SEQ ID NO: 120623 - DNA, 25 bp, Canis familiaris
gagaagctgtgctacgtcgccctgg

SEQ ID NO: 120624 - DNA, 25 bp, Canis familiaris
gagaaggagattggtggcccgagcc

SEQ ID NO: 120625 - DNA, 25 bp, Canis familiaris
gagcaagttgattttctgccctacc

SEQ ID NO: 120626 - DNA, 25 bp, Canis familiaris
gagcaaggacatctttcctctgaca

SEQ ID NO: 120627 - DNA, 25 bp, Canis familiaris
gagacagcagagttttcttcctacc

SEQ ID NO: 120628 - DNA, 25 bp, Canis familiaris
gagaaagagggaatccccccacagc

SEQ ID NO: 120629 - DNA, 25 bp, Canis familiaris
gagacaaagtgggacccagcggaac

SEQ ID NO: 120630 - DNA, 25 bp, Canis familiaris
gagaaaatggaggcccagggagatg

SEQ ID NO: 120631 - DNA, 25 bp, Canis familiaris
gagaagcctaagggcaagggcactg

SEQ ID NO: 120632 - DNA, 25 bp, Canis familiaris
gagaaggtgaggagcctggaggctg

SEQ ID NO: 120633 - DNA, 25 bp, Canis familiaris
gataagcgtgggagccaaagggttg

SEQ ID NO: 120634 - DNA, 25 bp, Canis familiaris
gagaactgagctcgataccaaagga

SEQ ID NO: 120635 - DNA, 25 bp, Canis familiaris
gagaaatctgccaataccactacta

SEQ ID NO: 120636 - DNA, 25 bp, Canis familiaris
gagaaatcggtgacacgaacctatg

SEQ ID NO: 120637 - DNA, 25 bp, Canis familiaris
gagaattccgataacgaacgagact

SEQ ID NO: 120638 - DNA, 25 bp, Canis familiaris
gagaatttaataactagactataca

SEQ ID NO: 120639 - DNA, 25 bp, Canis familiaris
gagacttgtttagcgactctgtcag

SEQ ID NO: 120640 - DNA, 25 bp, Canis familiaris
gagaattgtttttcgcatgatttgc

SEQ ID NO: 120641 - DNA, 25 bp, Canis familiaris
gagaattgttatatttgcttcctta

SEQ ID NO: 120642 - DNA, 25 bp, Canis familiaris
gagaatttgtatatcctgctgttta

SEQ ID NO: 120643 - DNA, 25 bp, Canis familiaris
gagacactggtagatccttttcata

SEQ ID NO: 120644 - DNA, 25 bp, Canis familiaris
gagacaaactcaatatcctttcctt

SEQ ID NO: 120645 - DNA, 25 bp, Canis familiaris
gagaaagacaacaacctggtaccta

SEQ ID NO: 120646 - DNA, 25 bp, Canis familiaris
gagaaagaaaaaaccatgtccccat

SEQ ID NO: 120647 - DNA, 25 bp, Canis familiaris
gagaagaagcaaaaactgttcccgc

SEQ ID NO: 120648 - DNA, 25 bp, Canis familiaris
gagaaaagcttcctccatgttacca

SEQ ID NO: 120649 - DNA, 25 bp, Canis familiaris
gagaaactcgatgccctgatgttta

SEQ ID NO: 120650 - DNA, 25 bp, Canis familiaris
gagaatgaaccaggcccttctggat

SEQ ID NO: 120651 - DNA, 25 bp, Canis familiaris
gagaagaatccagccagtctctgcc

SEQ ID NO: 120652 - DNA, 25 bp, Canis familiaris
gagacagtataatcacaacacgcag

SEQ ID NO: 120653 - DNA, 25 bp, Canis familiaris
gagacagatacaaataaaaccaaat

SEQ ID NO: 120654 - DNA, 25 bp, Canis familiaris
gagacaaacaccaaccaagacaaca

SEQ ID NO: 120655 - DNA, 25 bp, Canis familiaris
gagaaaacacctacacatcagactt

SEQ ID NO: 120656 - DNA, 25 bp, Canis familiaris
gagaacaagcatgctgatccccatc

SEQ ID NO: 120657 - DNA, 25 bp, Canis familiaris
gagaagcaatctcaatctaacatca

SEQ ID NO: 120658 - DNA, 25 bp, Canis familiaris
gagacacttgccaattctaaatgaa

SEQ ID NO: 120659 - DNA, 25 bp, Canis familiaris
gagatgcacgtccactttaaagtcc

SEQ ID NO: 120660 - DNA, 25 bp, Canis familiaris
gagaaagcatcactcacttaaatat

SEQ ID NO: 120661 - DNA, 25 bp, Canis familiaris
gagaaacatcaaactcctaaacctt

SEQ ID NO: 120662 - DNA, 25 bp, Canis familiaris
gagaatagcctagtcccaagacctc

SEQ ID NO: 120663 - DNA, 25 bp, Canis familiaris
gagactacctctactcaagaacctc

SEQ ID NO: 120664 - DNA, 25 bp, Canis familiaris
gagaataatcctacctggacaccct

SEQ ID NO: 120665 - DNA, 25 bp, Canis familiaris
gagactaaagcagccgaatccacca

SEQ ID NO: 120666 - DNA, 25 bp, Canis familiaris
gagaaaaacctggaccatctccgca

SEQ ID NO: 120667 - DNA, 25 bp, Canis familiaris
gagaaagaacctcatgattctacca

SEQ ID NO: 120668 - DNA, 25 bp, Canis familiaris
gagaaatccactgtgtttctacaca

SEQ ID NO: 120669 - DNA, 25 bp, Canis familiaris
gagaaagacctgggcgtgttgtcca

SEQ ID NO: 120670 - DNA, 25 bp, Canis familiaris
gagacggaccaggtcactgttctct

SEQ ID NO: 120671 - DNA, 25 bp, Canis familiaris
gagaaggcccggcctgagttcatgc

SEQ ID NO: 120672 - DNA, 25 bp, Canis familiaris
gagaacaccctgaacatggtgtccc

SEQ ID NO: 120673 - DNA, 25 bp, Canis familiaris
gagaagatgttcaacacgtcctccc

SEQ ID NO: 120674 - DNA, 25 bp, Canis familiaris
gagaagatgttcaacacgtcctccc

SEQ ID NO: 120675 - DNA, 25 bp, Canis familiaris
gagaagatgttcaacacgtcctccc

SEQ ID NO: 120676 - DNA, 25 bp, Canis familiaris
gagaagttagcactcatttcctcac

SEQ ID NO: 120677 - DNA, 25 bp, Canis familiaris
gagaaggtcatacgctcattcacca

SEQ ID NO: 120678 - DNA, 25 bp, Canis familiaris
gagacagagatgcaggctccatgca

SEQ ID NO: 120679 - DNA, 25 bp, Canis familiaris
gagaaggctgatcacgccagcagtc

SEQ ID NO: 120680 - DNA, 25 bp, Canis familiaris
gagaagtgctgaggagctctgaggg

SEQ ID NO: 120681 - DNA, 25 bp, Canis familiaris
gagaaggtactggctctgggtatct

SEQ ID NO: 120682 - DNA, 25 bp, Canis familiaris
gagaagcattcctgtctgagtctat

SEQ ID NO: 120683 - DNA, 25 bp, Canis familiaris
gagacaagtccatgtgatagtttta

SEQ ID NO: 120684 - DNA, 25 bp, Canis familiaris
gagaccaggtgatgtcacgagttta

SEQ ID NO: 120685 - DNA, 25 bp, Canis familiaris
gagactgaggtttctaggagttaac

SEQ ID NO: 120686 - DNA, 25 bp, Canis familiaris
gagaactgttctctagcggttaaca

SEQ ID NO: 120687 - DNA, 25 bp, Canis familiaris
gagaactttcgcctgaaaagttaca

SEQ ID NO: 120688 - DNA, 25 bp, Canis familiaris
gagacctgatctgccttaatagtat

SEQ ID NO: 120689 - DNA, 25 bp, Canis familiaris
gagacacttttggcttaatactgta

SEQ ID NO: 120690 - DNA, 25 bp, Canis familiaris
gagaactttcaggtctttgactttg

SEQ ID NO: 120691 - DNA, 25 bp, Canis familiaris
gagaacctacaggatctttgcagta

SEQ ID NO: 120692 - DNA, 25 bp, Canis familiaris
gagaaacattgggcaccttcattac

SEQ ID NO: 120693 - DNA, 25 bp, Canis familiaris
gagaaggcattgccccttttcattc

SEQ ID NO: 120694 - DNA, 25 bp, Canis familiaris
gagaaggattgctcccttgtgtgtc

SEQ ID NO: 120695 - DNA, 25 bp, Canis familiaris
gagaacgcactaagcccttgtagct

SEQ ID NO: 120696 - DNA, 25 bp, Canis familiaris
gagaacctgcatcatacctttatct

SEQ ID NO: 120697 - DNA, 25 bp, Canis familiaris
gagacgcaggcacaactctttatac

SEQ ID NO: 120698 - DNA, 25 bp, Canis familiaris
gagacgcaggcacaactctttatac

SEQ ID NO: 120699 - DNA, 25 bp, Canis familiaris
gagacagaggacagacctcttgtcc

SEQ ID NO: 120700 - DNA, 25 bp, Canis familiaris
gagacgtgaatagacccttctccaa

SEQ ID NO: 120701 - DNA, 25 bp, Canis familiaris
gagactgtatatatttttttcctaa

SEQ ID NO: 120702 - DNA, 25 bp, Canis familiaris
gagactgagttttgtctttttcctt

SEQ ID NO: 120703 - DNA, 25 bp, Canis familiaris
gatccgcagtggaggttttacccgc

SEQ ID NO: 120704 - DNA, 25 bp, Canis familiaris
gagacagcacggcggttattgaccc

SEQ ID NO: 120705 - DNA, 25 bp, Canis familiaris
gagaacctgagtgggctttctgggg

SEQ ID NO: 120706 - DNA, 25 bp, Canis familiaris
gagagaactgaggggattcgggggg

SEQ ID NO: 120707 - DNA, 25 bp, Canis familiaris
gagaaagggaggcactccagggggt

SEQ ID NO: 120708 - DNA, 25 bp, Canis familiaris
gagaaggtgggccaggtcatcaggg

SEQ ID NO: 120709 - DNA, 25 bp, Canis familiaris
gagacaggctgcccagggtaagaag

SEQ ID NO: 120710 - DNA, 25 bp, Canis familiaris
gagactggggcccgagtgtagacta

SEQ ID NO: 120711 - DNA, 25 bp, Canis familiaris
gagactgggcggtgaggtggacctc

SEQ ID NO: 120712 - DNA, 25 bp, Canis familiaris
gagaatggcgggtagggggaagctt

SEQ ID NO: 120713 - DNA, 25 bp, Canis familiaris
gagaatgtgcgtgagagcgagcgag

SEQ ID NO: 120714 - DNA, 25 bp, Canis familiaris
gagaaggcagctgacgagagtgaga

SEQ ID NO: 120715 - DNA, 25 bp, Canis familiaris
gagaaggaggctgctgagatgggaa

SEQ ID NO: 120716 - DNA, 25 bp, Canis familiaris
gagaaggtgcttggcgagtttgaac

SEQ ID NO: 120717 - DNA, 25 bp, Canis familiaris
gagaaacgtttgaaaatctgatgac

SEQ ID NO: 120718 - DNA, 25 bp, Canis familiaris
gagaagtagtctttgcccttgtgac

SEQ ID NO: 120719 - DNA, 25 bp, Canis familiaris
gagaagtatgacaactccctcaaga

SEQ ID NO: 120720 - DNA, 25 bp, Canis familiaris
gagacagctgtaaaactaccataga

SEQ ID NO: 120721 - DNA, 25 bp, Canis familiaris
gagacacggtgaacacttttagaga

SEQ ID NO: 120722 - DNA, 25 bp, Canis familiaris
gagaacgtgtgtcaccgttcgcaga

SEQ ID NO: 120723 - DNA, 25 bp, Canis familiaris
gagagagcagttacaaccgttggtg

SEQ ID NO: 120724 - DNA, 25 bp, Canis familiaris
gagaagcatctataaccgggaggag

SEQ ID NO: 120725 - DNA, 25 bp, Canis familiaris
gagaacatgcactaacatccggaac

SEQ ID NO: 120726 - DNA, 25 bp, Canis familiaris
gagaaccctcagaacacaggacacc

SEQ ID NO: 120727 - DNA, 25 bp, Canis familiaris
gagaacaagccgactactgcgtctc

SEQ ID NO: 120728 - DNA, 25 bp, Canis familiaris
gagacaagagccatctattcgatcg

SEQ ID NO: 120729 - DNA, 25 bp, Canis familiaris
gagacaatcatgggtctgaattgat

SEQ ID NO: 120730 - DNA, 25 bp, Canis familiaris
gagacaatcaggttaacatgagcat

SEQ ID NO: 120731 - DNA, 25 bp, Canis familiaris
gagagaatctgatttcccagtgtca

SEQ ID NO: 120732 - DNA, 25 bp, Canis familiaris
gagaacatctgatttcctcgtgaag

SEQ ID NO: 120733 - DNA, 25 bp, Canis familiaris
gagaaagcgatgtccctctgaaaag

SEQ ID NO: 120734 - DNA, 25 bp, Canis familiaris
gagaaaattgaccacctgaagggac

SEQ ID NO: 120735 - DNA, 25 bp, Canis familiaris
gagaaggatgtgaaccctgggggca

SEQ ID NO: 120736 - DNA, 25 bp, Canis familiaris
gagacaggagacatcccttatgggt

SEQ ID NO: 120737 - DNA, 25 bp, Canis familiaris
gagaagggacacatccactcatgga

SEQ ID NO: 120738 - DNA, 25 bp, Canis familiaris
gagaaggagaacgccctgctgaggc

SEQ ID NO: 120739 - DNA, 25 bp, Canis familiaris
gagaagggtgatcgactcagcgctg

SEQ ID NO: 120740 - DNA, 25 bp, Canis familiaris
gagaagcgcgtgagcgtgcgctgga

SEQ ID NO: 120741 - DNA, 25 bp, Canis familiaris
gagaagtgcagcgacggctggtggc

SEQ ID NO: 120742 - DNA, 25 bp, Canis familiaris
gagaagatcccagtgagctttgaga

SEQ ID NO: 120743 - DNA, 25 bp, Canis familiaris
gagaagagcccattgagctaaagtg

SEQ ID NO: 120744 - DNA, 25 bp, Canis familiaris
gagaagtgcttattagtaatctata

SEQ ID NO: 120745 - DNA, 25 bp, Canis familiaris
gagaaggttgttttgataatacatg

SEQ ID NO: 120746 - DNA, 25 bp, Canis familiaris
gagacagcagctattttacagaaaa

SEQ ID NO: 120747 - DNA, 25 bp, Canis familiaris
gagaagactcttctgtcgaacacag

SEQ ID NO: 120748 - DNA, 25 bp, Canis familiaris
gagaagctcctgaaagatcgtcaaa

SEQ ID NO: 120749 - DNA, 25 bp, Canis familiaris
gagactctccatgaggttggaacgg

SEQ ID NO: 120750 - DNA, 25 bp, Canis familiaris
gagacacaccatgaaggacagagac

SEQ ID NO: 120751 - DNA, 25 bp, Canis familiaris
gagagccccatggatgagatacgga

SEQ ID NO: 120752 - DNA, 25 bp, Canis familiaris
gagactcccatggtgttgcacaagt

SEQ ID NO: 120753 - DNA, 25 bp, Canis familiaris
gagacaaccaagacaatccaaataa

SEQ ID NO: 120754 - DNA, 25 bp, Canis familiaris
gagagtccctgaccacggaaatgaa

SEQ ID NO: 120755 - DNA, 25 bp, Canis familiaris
gagagtgacctatccatgctaatat

SEQ ID NO: 120756 - DNA, 25 bp, Canis familiaris
gagacttcctacagagctattagac

SEQ ID NO: 120757 - DNA, 25 bp, Canis familiaris
gagactctggcatgctaactagtta

SEQ ID NO: 120758 - DNA, 25 bp, Canis familiaris
gagatgctgtgttcctaataagtcg

SEQ ID NO: 120759 - DNA, 25 bp, Canis familiaris
gagacatatgatacctaactgttag

SEQ ID NO: 120760 - DNA, 25 bp, Canis familiaris
gagactgatgtttaaactgttcact

SEQ ID NO: 120761 - DNA, 25 bp, Canis familiaris
gagactgatgtataaactgtcactt

SEQ ID NO: 120762 - DNA, 25 bp, Canis familiaris
gagactcattatctgaacgagcatg

SEQ ID NO: 120763 - DNA, 25 bp, Canis familiaris
gagaccttgcatctggtcgaggtac

SEQ ID NO: 120764 - DNA, 25 bp, Canis familiaris
gagagcctacatcagtgggagacaa

SEQ ID NO: 120765 - DNA, 25 bp, Canis familiaris
gagagccagagcagtaaggaaaaat

SEQ ID NO: 120766 - DNA, 25 bp, Canis familiaris
gagagccagggtgaaagcaaagttt

SEQ ID NO: 120767 - DNA, 25 bp, Canis familiaris
gagactcaccctgactcaaggagtt

SEQ ID NO: 120768 - DNA, 25 bp, Canis familiaris
gagactgcaaggatagcccaggagc

SEQ ID NO: 120769 - DNA, 25 bp, Canis familiaris
gagaagcaatggaaggcccgcatgg

SEQ ID NO: 120770 - DNA, 25 bp, Canis familiaris
gagacagacatgctgggatgcccac

SEQ ID NO: 120771 - DNA, 25 bp, Canis familiaris
gagaaaagcggcatcatgtccacct

SEQ ID NO: 120772 - DNA, 25 bp, Canis familiaris
gagaaaggcacagcctgctcaacct

SEQ ID NO: 120773 - DNA, 25 bp, Canis familiaris
gagactgagttggaccccaaccttc

SEQ ID NO: 120774 - DNA, 25 bp, Canis familiaris
gagactgagtctgcatgggggaaca

SEQ ID NO: 120775 - DNA, 25 bp, Canis familiaris
gagacaagtcatgatggagcaggat

SEQ ID NO: 120776 - DNA, 25 bp, Canis familiaris
gagacaggtgagtcattgcgctgtg

SEQ ID NO: 120777 - DNA, 25 bp, Canis familiaris
gagaagcgctggtttgctgggagaa

SEQ ID NO: 120778 - DNA, 25 bp, Canis familiaris
gagaagccttcgaagttggagcata

SEQ ID NO: 120779 - DNA, 25 bp, Canis familiaris
gagaagctcttccagcagaagttca

SEQ ID NO: 120780 - DNA, 25 bp, Canis familiaris
gagaactttctaagatggatccaga

SEQ ID NO: 120781 - DNA, 25 bp, Canis familiaris
gagacagtgtttctgggacatctga

SEQ ID NO: 120782 - DNA, 25 bp, Canis familiaris
gagaagtgcggaattgaggactctg

SEQ ID NO: 120783 - DNA, 25 bp, Canis familiaris
gagaagtaggagatgaggtgtcagc

SEQ ID NO: 120784 - DNA, 25 bp, Canis familiaris
gagaagcttgcttttgacctctagc

SEQ ID NO: 120785 - DNA, 25 bp, Canis familiaris
gagaagcatgatcttagcactctgt

SEQ ID NO: 120786 - DNA, 25 bp, Canis familiaris
gagaactgttataagcaactgatga

SEQ ID NO: 120787 - DNA, 25 bp, Canis familiaris
gagaacctttcaagcagattcatga

SEQ ID NO: 120788 - DNA, 25 bp, Canis familiaris
gagacaacatatgcagaggacctga

SEQ ID NO: 120789 - DNA, 25 bp, Canis familiaris
gagacacgagatgagacccactgaa

SEQ ID NO: 120790 - DNA, 25 bp, Canis familiaris
gagaagctggccagagccaactcca

SEQ ID NO: 120791 - DNA, 25 bp, Canis familiaris
gagacaggcggttggacagttgccc

SEQ ID NO: 120792 - DNA, 25 bp, Canis familiaris
gagacagagtgactcaggtagggcc

SEQ ID NO: 120793 - DNA, 25 bp, Canis familiaris
gagacagacggttgctgtgggtgtc

SEQ ID NO: 120794 - DNA, 25 bp, Canis familiaris
gagaagaccgttgaggctgcgatgc

SEQ ID NO: 120795 - DNA, 25 bp, Canis familiaris
gagacgagccagtttagctgtggtg

SEQ ID NO: 120796 - DNA, 25 bp, Canis familiaris
gagactcagccacccagagtggagc

SEQ ID NO: 120797 - DNA, 25 bp, Canis familiaris
gagaagcaggctccatgcagggaac

SEQ ID NO: 120798 - DNA, 25 bp, Canis familiaris
gagaagcaggcgccatgcaaggagc

SEQ ID NO: 120799 - DNA, 25 bp, Canis familiaris
gagaagcaggagctagtcgtgcctc

SEQ ID NO: 120800 - DNA, 25 bp, Canis familiaris
gagaagaagacctgccaatgctccc

SEQ ID NO: 120801 - DNA, 25 bp, Canis familiaris
gagaagaaagccaactcagctcccc

SEQ ID NO: 120802 - DNA, 25 bp, Canis familiaris
gagaggatggcatcatactcacccc

SEQ ID NO: 120803 - DNA, 25 bp, Canis familiaris
gagagcgagagctctggagaccgcc

SEQ ID NO: 120804 - DNA, 25 bp, Canis familiaris
gagagcgtcaatgctgggaaaccag

SEQ ID NO: 120805 - DNA, 25 bp, Canis familiaris
gagacgggaagttgccaaaacagtc

SEQ ID NO: 120806 - DNA, 25 bp, Canis familiaris
gagacctggggctgccgaagaagcc

SEQ ID NO: 120807 - DNA, 25 bp, Canis familiaris
gagaagctttggttgccacactgac

SEQ ID NO: 120808 - DNA, 25 bp, Canis familiaris
gagaacttactgtatgccacacatt

SEQ ID NO: 120809 - DNA, 25 bp, Canis familiaris
gagaacctgaacttgaactcttaat

SEQ ID NO: 120810 - DNA, 25 bp, Canis familiaris
gagacaactagatggaacattagat

SEQ ID NO: 120811 - DNA, 25 bp, Canis familiaris
gagacaagaagatggaaattgcctt

SEQ ID NO: 120812 - DNA, 25 bp, Canis familiaris
gagaagaggctatggaaactcctct

SEQ ID NO: 120813 - DNA, 25 bp, Canis familiaris
gagaagatggttcaaacacagtcct

SEQ ID NO: 120814 - DNA, 25 bp, Canis familiaris
gatgacgtcctcttaaacgagcctt

SEQ ID NO: 120815 - DNA, 25 bp, Canis familiaris
gagacgtaattttatcgtacatctt

SEQ ID NO: 120816 - DNA, 25 bp, Canis familiaris
gagacgtttattgacgcccagttgc

SEQ ID NO: 120817 - DNA, 25 bp, Canis familiaris
gaggcctgttttgacctaaatccca

SEQ ID NO: 120818 - DNA, 25 bp, Canis familiaris
gttaattgtttggaactaaaccatg

SEQ ID NO: 120819 - DNA, 25 bp, Canis familiaris
gagaacatttttgaacatttacctg

SEQ ID NO: 120820 - DNA, 25 bp, Canis familiaris
gagaacttgtttgcaaccactggtt

SEQ ID NO: 120821 - DNA, 25 bp, Canis familiaris
gagagtttcttagaagaccttctta

SEQ ID NO: 120822 - DNA, 25 bp, Canis familiaris
gagacttctctaagctatttcctcg

SEQ ID NO: 120823 - DNA, 25 bp, Canis familiaris
gagactatcatcgttcatctttacc

SEQ ID NO: 120824 - DNA, 25 bp, Canis familiaris
gagaaacattctgatttgtaggcat

SEQ ID NO: 120825 - DNA, 25 bp, Canis familiaris
gagaaaatattgaagtgttgggtac

SEQ ID NO: 120826 - DNA, 25 bp, Canis familiaris
gagaaagagtgtgcagtggtgaagg

SEQ ID NO: 120827 - DNA, 25 bp, Canis familiaris
gagaagaagtcccagctgttaagca

SEQ ID NO: 120828 - DNA, 25 bp, Canis familiaris
gagaagaacatcacagcttccagag

SEQ ID NO: 120829 - DNA, 25 bp, Canis familiaris
gagaagcacagtatccttgccagaa

SEQ ID NO: 120830 - DNA, 25 bp, Canis familiaris
gagaactgacaccactgaagcggag

SEQ ID NO: 120831 - DNA, 25 bp, Canis familiaris
gagaagccccagatgaagcaggagg

SEQ ID NO: 120832 - DNA, 25 bp, Canis familiaris
gagaagctttctctagcacaggagg

SEQ ID NO: 120833 - DNA, 25 bp, Canis familiaris
gagacatctccctttgagcaaagag

SEQ ID NO: 120834 - DNA, 25 bp, Canis familiaris
gagaaccccatcgaggaaagaccca

SEQ ID NO: 120835 - DNA, 25 bp, Canis familiaris
gagaaacctatccagaggaaaccct

SEQ ID NO: 120836 - DNA, 25 bp, Canis familiaris
gagaagaccaaccacaagatcacag

SEQ ID NO: 120837 - DNA, 25 bp, Canis familiaris
gagaaatctataaccagagatcctg

SEQ ID NO: 120838 - DNA, 25 bp, Canis familiaris
gagacaattaccacagagtgcctta

SEQ ID NO: 120839 - DNA, 25 bp, Canis familiaris
gagaaattggcctgcagaggactag

SEQ ID NO: 120840 - DNA, 25 bp, Canis familiaris
gagacattatggggcaggggacaca

SEQ ID NO: 120841 - DNA, 25 bp, Canis familiaris
gagaccttgagtcagacggaactag

SEQ ID NO: 120842 - DNA, 25 bp, Canis familiaris
gagactcttaattctaggaaactga

SEQ ID NO: 120843 - DNA, 25 bp, Canis familiaris
gagaccatattcttcttgaaaacgt

SEQ ID NO: 120844 - DNA, 25 bp, Canis familiaris
gagactcattaccctgatacgagcc

SEQ ID NO: 120845 - DNA, 25 bp, Canis familiaris
gagacattaaggcctgtatccctct

SEQ ID NO: 120846 - DNA, 25 bp, Canis familiaris
gagacatgatttgccagttcctgca

SEQ ID NO: 120847 - DNA, 25 bp, Canis familiaris
gagacaggttggacaagatctgaca

SEQ ID NO: 120848 - DNA, 25 bp, Canis familiaris
gagacactgttgcacatgattctac

SEQ ID NO: 120849 - DNA, 25 bp, Canis familiaris
gagacactgttgcacatgattctac

SEQ ID NO: 120850 - DNA, 25 bp, Canis familiaris
gagacatcatcaatgccctatgctt

SEQ ID NO: 120851 - DNA, 25 bp, Canis familiaris
gagacatgaaatcctcaagccatca

SEQ ID NO: 120852 - DNA, 25 bp, Canis familiaris
gagacagagagaactagaggccaac

SEQ ID NO: 120853 - DNA, 25 bp, Canis familiaris
gagaaagcgcaagagacccatacag

SEQ ID NO: 120854 - DNA, 25 bp, Canis familiaris
gagaaatgccaacaggaaccagcag

SEQ ID NO: 120855 - DNA, 25 bp, Canis familiaris
gagaagcaggaacaggagcagccgc

SEQ ID NO: 120856 - DNA, 25 bp, Canis familiaris
gagaagcgggcgcaggctgatgccc

SEQ ID NO: 120857 - DNA, 25 bp, Canis familiaris
gagaacgtgtgcgggtgtgtgtgtg

SEQ ID NO: 120858 - DNA, 25 bp, Canis familiaris
gagaactatgtttttgaggctgatg

SEQ ID NO: 120859 - DNA, 25 bp, Canis familiaris
gagagcactatttctattgcggtag

SEQ ID NO: 120860 - DNA, 25 bp, Canis familiaris
gagacacatatatcttcatgctgta

SEQ ID NO: 120861 - DNA, 25 bp, Canis familiaris
gagacacagctctcttgcagagtaa

SEQ ID NO: 120862 - DNA, 25 bp, Canis familiaris
gagaagcaggctccttgcaaaaagc

SEQ ID NO: 120863 - DNA, 25 bp, Canis familiaris
gagaaaggagccaacaaaatgcaca

SEQ ID NO: 120864 - DNA, 25 bp, Canis familiaris
gatgtagggagcctggagaaaccgg

SEQ ID NO: 120865 - DNA, 25 bp, Canis familiaris
gagggagggcccataagcccagtgt

SEQ ID NO: 120866 - DNA, 25 bp, Canis familiaris
gagacagaggtgtctcttcaacccg

SEQ ID NO: 120867 - DNA, 25 bp, Canis familiaris
gagaacagggtcgtctgaggctgcc

SEQ ID NO: 120868 - DNA, 25 bp, Canis familiaris
gagaagcaggttccctgtgggagcc

SEQ ID NO: 120869 - DNA, 25 bp, Canis familiaris
gagaagcgagatgcacactggagtg

SEQ ID NO: 120870 - DNA, 25 bp, Canis familiaris
gagaacgagcgggcactggaaggca

SEQ ID NO: 120871 - DNA, 25 bp, Canis familiaris
gagaagcagaggctcctggaggaga

SEQ ID NO: 120872 - DNA, 25 bp, Canis familiaris
gagaacagtggcagcctcaggaaac

SEQ ID NO: 120873 - DNA, 25 bp, Canis familiaris
gagagatcccctggcttgcagaaaa

SEQ ID NO: 120874 - DNA, 25 bp, Canis familiaris
gagactcaccacgagtatgaggcat

SEQ ID NO: 120875 - DNA, 25 bp, Canis familiaris
gagacagacacaagcactcggcact

SEQ ID NO: 120876 - DNA, 25 bp, Canis familiaris
gagagcagacactgcagcacgggca

SEQ ID NO: 120877 - DNA, 25 bp, Canis familiaris
gagagcagcacacaagactgaaaat

SEQ ID NO: 120878 - DNA, 25 bp, Canis familiaris
gagagcgacacttacctcagtagtt

SEQ ID NO: 120879 - DNA, 25 bp, Canis familiaris
gagacctccttgtgtcagtattttt

SEQ ID NO: 120880 - DNA, 25 bp, Canis familiaris
gagaccctaatgtatgtaagaattt

SEQ ID NO: 120881 - DNA, 25 bp, Canis familiaris
gagagccagcattattgttacagta

SEQ ID NO: 120882 - DNA, 25 bp, Canis familiaris
gagacatcaaacttgtgaccgtact

SEQ ID NO: 120883 - DNA, 25 bp, Canis familiaris
gagactcggatcctggaacgtcatt

SEQ ID NO: 120884 - DNA, 25 bp, Canis familiaris
gagactcgcgatggggaagctggtg

SEQ ID NO: 120885 - DNA, 25 bp, Canis familiaris
gagactcatgagtggaagcagtttg

SEQ ID NO: 120886 - DNA, 25 bp, Canis familiaris
gagacagctgtgaggactgagaatg

SEQ ID NO: 120887 - DNA, 25 bp, Canis familiaris
gagacatgttttggacggtcagggt

SEQ ID NO: 120888 - DNA, 25 bp, Canis familiaris
gagacgtttctgcaagcgtagcggg

SEQ ID NO: 120889 - DNA, 25 bp, Canis familiaris
gagacttttcgtcatcaatgagggc

SEQ ID NO: 120890 - DNA, 25 bp, Canis familiaris
gagactttgtctcataaatggaggg

SEQ ID NO: 120891 - DNA, 25 bp, Canis familiaris
gagagttttaccttacagggctgtg

SEQ ID NO: 120892 - DNA, 25 bp, Canis familiaris
gagagatgtttaagcctaaggtttt

SEQ ID NO: 120893 - DNA, 25 bp, Canis familiaris
gagaactgcataagtgcccagggct

SEQ ID NO: 120894 - DNA, 25 bp, Canis familiaris
gagaacatgaaagtcagccagtgct

SEQ ID NO: 120895 - DNA, 25 bp, Canis familiaris
gagaaaagtcagacacacagcatta

SEQ ID NO: 120896 - DNA, 25 bp, Canis familiaris
gagaacacagtccaggtcagagtat

SEQ ID NO: 120897 - DNA, 25 bp, Canis familiaris
gagaaatcagccccagtaggtagta

SEQ ID NO: 120898 - DNA, 25 bp, Canis familiaris
gagaaacatgcccgcattgaagcaa

SEQ ID NO: 120899 - DNA, 25 bp, Canis familiaris
gagtcgtgctgccggcagtatgaga

SEQ ID NO: 120900 - DNA, 25 bp, Canis familiaris
gagacatgtgctcgctggagaaggc

SEQ ID NO: 120901 - DNA, 25 bp, Canis familiaris
gagacagtgctctcagatgcagacc

SEQ ID NO: 120902 - DNA, 25 bp, Canis familiaris
gagacatgatggtgcagacaatact

SEQ ID NO: 120903 - DNA, 25 bp, Canis familiaris
gagaaaatgtggcacagcataccac

SEQ ID NO: 120904 - DNA, 25 bp, Canis familiaris
gagaaacttgtcaacatctagccaa

SEQ ID NO: 120905 - DNA, 25 bp, Canis familiaris
gagaaagctatgtctaccttggcaa

SEQ ID NO: 120906 - DNA, 25 bp, Canis familiaris
gagaaacaaaattccttgtagggct

SEQ ID NO: 120907 - DNA, 25 bp, Canis familiaris
gagaacccacattacctggtagggg

SEQ ID NO: 120908 - DNA, 25 bp, Canis familiaris
gagaacccacactggggaaaagcca

SEQ ID NO: 120909 - DNA, 25 bp, Canis familiaris
gagaacccttcgaggtggacatacc

SEQ ID NO: 120910 - DNA, 25 bp, Canis familiaris
gagaaccctcacataggcatagaca

SEQ ID NO: 120911 - DNA, 25 bp, Canis familiaris
gagaactcccaggacaggatgcaga

SEQ ID NO: 120912 - DNA, 25 bp, Canis familiaris
gagaaatgcccagcaaatacagaag

SEQ ID NO: 120913 - DNA, 25 bp, Canis familiaris
gagaaatgcatccaagaacattaaa

SEQ ID NO: 120914 - DNA, 25 bp, Canis familiaris
gagaaatgcatccaaaaacataaat

SEQ ID NO: 120915 - DNA, 25 bp, Canis familiaris
gagacacaaccacaaatagcacatt

SEQ ID NO: 120916 - DNA, 25 bp, Canis familiaris
gagaaaaccagaatcagagacctct

SEQ ID NO: 120917 - DNA, 25 bp, Canis familiaris
gagaaaagccatgtgaggtcctccc

SEQ ID NO: 120918 - DNA, 25 bp, Canis familiaris
gagaaccgcctggtgatggggggcc

SEQ ID NO: 120919 - DNA, 25 bp, Canis familiaris
gagacaccggcagaggggagaggca

SEQ ID NO: 120920 - DNA, 25 bp, Canis familiaris
gagacacgggcagagggagaaacag

SEQ ID NO: 120921 - DNA, 25 bp, Canis familiaris
gagagcacgagagccgaggaaatat

SEQ ID NO: 120922 - DNA, 25 bp, Canis familiaris
gagacctcaaggccaagggaatctt

SEQ ID NO: 120923 - DNA, 25 bp, Canis familiaris
gagacgtaaggacatggcgtgtgtc

SEQ ID NO: 120924 - DNA, 25 bp, Canis familiaris
gagacttacagatgcagatgccatg

SEQ ID NO: 120925 - DNA, 25 bp, Canis familiaris
gagacatttataagcaggactgaac

SEQ ID NO: 120926 - DNA, 25 bp, Canis familiaris
gagacaccaaaaggaaggcaactgc

SEQ ID NO: 120927 - DNA, 25 bp, Canis familiaris
gagaactgcacaataaaaccaagcc

SEQ ID NO: 120928 - DNA, 25 bp, Canis familiaris
gagacacgccagcatgataaacaat

SEQ ID NO: 120929 - DNA, 25 bp, Canis familiaris
gagacaagtagcagtgacacatcag

SEQ ID NO: 120930 - DNA, 25 bp, Canis familiaris
gagacggctacaaggaacacaggca

SEQ ID NO: 120931 - DNA, 25 bp, Canis familiaris
gagactgctgctgctttgaaacgta

SEQ ID NO: 120932 - DNA, 25 bp, Canis familiaris
gagactctctcctaacaaaggtcgt

SEQ ID NO: 120933 - DNA, 25 bp, Canis familiaris
gagactccaacttacaatgggcagc

SEQ ID NO: 120934 - DNA, 25 bp, Canis familiaris
gagactcacactggaccttggaagc

SEQ ID NO: 120935 - DNA, 25 bp, Canis familiaris
gagacatccactgcattttgacaag

SEQ ID NO: 120936 - DNA, 25 bp, Canis familiaris
gagacatcctcttttggggcaaggt

SEQ ID NO: 120937 - DNA, 25 bp, Canis familiaris
gagacacgctttatgagggctacgg

SEQ ID NO: 120938 - DNA, 25 bp, Canis familiaris
gagaccgcgttgtggttgctagagg

SEQ ID NO: 120939 - DNA, 25 bp, Canis familiaris
gagacccgttcatcggggatgagtc

SEQ ID NO: 120940 - DNA, 25 bp, Canis familiaris
gagaacacagattgtatcggggaac

SEQ ID NO: 120941 - DNA, 25 bp, Canis familiaris
gagacacaatattttccaggaagac

SEQ ID NO: 120942 - DNA, 25 bp, Canis familiaris
gagaacacttggctcgaggaagcaa

SEQ ID NO: 120943 - DNA, 25 bp, Canis familiaris
gagaaaacgtcgtccgagcaacaac

SEQ ID NO: 120944 - DNA, 25 bp, Canis familiaris
gagagaaacctatccagaggaaacc

SEQ ID NO: 120945 - DNA, 25 bp, Canis familiaris
gagaaactctcggaccaggtgaaga

SEQ ID NO: 120946 - DNA, 25 bp, Canis familiaris
gagaaactctcttagactgctagaa

SEQ ID NO: 120947 - DNA, 25 bp, Canis familiaris
gagaaagccctatcagtgcaaggag

SEQ ID NO: 120948 - DNA, 25 bp, Canis familiaris
gagaacggtctctcacagacagaga

SEQ ID NO: 120949 - DNA, 25 bp, Canis familiaris
gagaaaatgtcctcagcatgaacga

SEQ ID NO: 120950 - DNA, 25 bp, Canis familiaris
gagaacttgtagtgatagtactgca

SEQ ID NO: 120951 - DNA, 25 bp, Canis familiaris
gagacactttaccagaaggacgata

SEQ ID NO: 120952 - DNA, 25 bp, Canis familiaris
gagactctttagcatcaacagtgga

SEQ ID NO: 120953 - DNA, 25 bp, Canis familiaris
gagacacttctgtgcacaaagtcaa

SEQ ID NO: 120954 - DNA, 25 bp, Canis familiaris
gagacatcttccgcgatagactaac

SEQ ID NO: 120955 - DNA, 25 bp, Canis familiaris
gagacctctcctgagtatcttaagc

SEQ ID NO: 120956 - DNA, 25 bp, Canis familiaris
gagactcactgcgttaattttttca

SEQ ID NO: 120957 - DNA, 25 bp, Canis familiaris
gagacccgagttaatcataatcctc

SEQ ID NO: 120958 - DNA, 25 bp, Canis familiaris
gagaccccactaacatcaaatgggg

SEQ ID NO: 120959 - DNA, 25 bp, Canis familiaris
gagacccgacaatcaagctcttggg

SEQ ID NO: 120960 - DNA, 25 bp, Canis familiaris
gagactccaccaaaaaactactaga

SEQ ID NO: 120961 - DNA, 25 bp, Canis familiaris
gagactacaccccaaagcatggact

SEQ ID NO: 120962 - DNA, 25 bp, Canis familiaris
gaggtaccctgtcgaagggacgtca

SEQ ID NO: 120963 - DNA, 25 bp, Canis familiaris
gaggtagtcggggtagtggtggtat

SEQ ID NO: 120964 - DNA, 25 bp, Canis familiaris
gagagattggggttaagggtgggtg

SEQ ID NO: 120965 - DNA, 25 bp, Canis familiaris
gagactggggtgtaagggtgggtgt

SEQ ID NO: 120966 - DNA, 25 bp, Canis familiaris
gagaggggggagaggggctcgagat

SEQ ID NO: 120967 - DNA, 25 bp, Canis familiaris
gagagcggggagaggcctagttacc

SEQ ID NO: 120968 - DNA, 25 bp, Canis familiaris
gagactggggaaacccacgtctcac

SEQ ID NO: 120969 - DNA, 25 bp, Canis familiaris
gagtccgttgaaactcccgattaat

SEQ ID NO: 120970 - DNA, 25 bp, Canis familiaris
gagttctttagaacaccgtttgact

SEQ ID NO: 120971 - DNA, 25 bp, Canis familiaris
tgcctgtcgtaagactccgtttatt

SEQ ID NO: 120972 - DNA, 25 bp, Canis familiaris
gaggtcagtaaaatcccctgtaatt

SEQ ID NO: 120973 - DNA, 25 bp, Canis familiaris
gagtaaccagggaaccctgctgaat

SEQ ID NO: 120974 - DNA, 25 bp, Canis familiaris
gagaaatccgtgcaactctgttgaa

SEQ ID NO: 120975 - DNA, 25 bp, Canis familiaris
gatgaagtaccctaacctgcttata

SEQ ID NO: 120976 - DNA, 25 bp, Canis familiaris
gagacattcaccataacctaataaa

SEQ ID NO: 120977 - DNA, 25 bp, Canis familiaris
gagacagataccatacaccatgatg

SEQ ID NO: 120978 - DNA, 25 bp, Canis familiaris
gagacagtgaacttgaaggcatagc

SEQ ID NO: 120979 - DNA, 25 bp, Canis familiaris
gagaaagaatcttggcaggctctgc

SEQ ID NO: 120980 - DNA, 25 bp, Canis familiaris
gagaacagccatcattgcagtgccc

SEQ ID NO: 120981 - DNA, 25 bp, Canis familiaris
gagaacagctccttgtcagtgtgct

SEQ ID NO: 120982 - DNA, 25 bp, Canis familiaris
gagaacagatcgatgccagattcct

SEQ ID NO: 120983 - DNA, 25 bp, Canis familiaris
gagaacagaggagacagcttggcta

SEQ ID NO: 120984 - DNA, 25 bp, Canis familiaris
gagaacaggggcgatctctgtactg

SEQ ID NO: 120985 - DNA, 25 bp, Canis familiaris
gagacacggtgggcattttggctcc

SEQ ID NO: 120986 - DNA, 25 bp, Canis familiaris
gagacacggctgcagtgttcttgcc

SEQ ID NO: 120987 - DNA, 25 bp, Canis familiaris
gagagaaggctgaaagctactccca

SEQ ID NO: 120988 - DNA, 25 bp, Canis familiaris
gagagaaggcagctgaatccgccca

SEQ ID NO: 120989 - DNA, 25 bp, Canis familiaris
gagaaagcgcagggacagctcgtac

SEQ ID NO: 120990 - DNA, 25 bp, Canis familiaris
gagaaacagagtaacccggcatcct

SEQ ID NO: 120991 - DNA, 25 bp, Canis familiaris
gagaaaatgtgctcacccagtctcc

SEQ ID NO: 120992 - DNA, 25 bp, Canis familiaris
gagacaaggtgctgcacacactgtc

SEQ ID NO: 120993 - DNA, 25 bp, Canis familiaris
gagacaagcctgtcaacaacttccg

SEQ ID NO: 120994 - DNA, 25 bp, Canis familiaris
gagacaggcagctacagaatttggc

SEQ ID NO: 120995 - DNA, 25 bp, Canis familiaris
gagacacagccctagaatgattcac

SEQ ID NO: 120996 - DNA, 25 bp, Canis familiaris
gagacacactcttagagagatgcag

SEQ ID NO: 120997 - DNA, 25 bp, Canis familiaris
gagaacattcctaggatggccttgt

SEQ ID NO: 120998 - DNA, 25 bp, Canis familiaris
gagacacgagtctgagtggctttta

SEQ ID NO: 120999 - DNA, 25 bp, Canis familiaris
gagaacattgctccagattggcttt

SEQ ID NO: 121000 - DNA, 25 bp, Canis familiaris
gagaacatgtgcctaaatcaatttt

SEQ ID NO: 121001 - DNA, 25 bp, Canis familiaris
gagaccatatctctgaaaaccttta

SEQ ID NO: 121002 - DNA, 25 bp, Canis familiaris
gagaccactgtacagggaccactta

SEQ ID NO: 121003 - DNA, 25 bp, Canis familiaris
gagaacttgtgtttctgggccagtt

SEQ ID NO: 121004 - DNA, 25 bp, Canis familiaris
gagagccttgtcagttgggggttcc

SEQ ID NO: 121005 - DNA, 25 bp, Canis familiaris
gagacttgattggttgggtggtttt

SEQ ID NO: 121006 - DNA, 25 bp, Canis familiaris
gagactccttggtggcactgtgaat

SEQ ID NO: 121007 - DNA, 25 bp, Canis familiaris
gagactccattattctgaacgagca

SEQ ID NO: 121008 - DNA, 25 bp, Canis familiaris
gagagacaaatatctacacggcaac

SEQ ID NO: 121009 - DNA, 25 bp, Canis familiaris
gagagactcaaaactatgataacta

SEQ ID NO: 121010 - DNA, 25 bp, Canis familiaris
gagaacacataaagctactatccat

SEQ ID NO: 121011 - DNA, 25 bp, Canis familiaris
gagaaactcaagcagtctctgcccc

SEQ ID NO: 121012 - DNA, 25 bp, Canis familiaris
gagaaactcaagcaggttccacact

SEQ ID NO: 121013 - DNA, 25 bp, Canis familiaris
gagaaactacagacgcctgtccaac

SEQ ID NO: 121014 - DNA, 25 bp, Canis familiaris
gagacacaaagcagcagcctgccca

SEQ ID NO: 121015 - DNA, 25 bp, Canis familiaris
gagacacgaacatcgtcactccaat

SEQ ID NO: 121016 - DNA, 25 bp, Canis familiaris
gagaccgaagccttggcttccaatc

SEQ ID NO: 121017 - DNA, 25 bp, Canis familiaris
gagaacaaactgatggttgccagag

SEQ ID NO: 121018 - DNA, 25 bp, Canis familiaris
gagacccaatatacttttccaggtt

SEQ ID NO: 121019 - DNA, 25 bp, Canis familiaris
gagactttttatctttccacttgtt

SEQ ID NO: 121020 - DNA, 25 bp, Canis familiaris
gagacttttctgatctacctagttt

SEQ ID NO: 121021 - DNA, 25 bp, Canis familiaris
gagagttttctggctctcagctttt

SEQ ID NO: 121022 - DNA, 25 bp, Canis familiaris
gagacctttatactgccattttggg

SEQ ID NO: 121023 - DNA, 25 bp, Canis familiaris
gagaccttttccagttatatcagcg

SEQ ID NO: 121024 - DNA, 25 bp, Canis familiaris
gagaccgtgattggggtttactgcg

SEQ ID NO: 121025 - DNA, 25 bp, Canis familiaris
gagacccgagctcggttttatctgc

SEQ ID NO: 121026 - DNA, 25 bp, Canis familiaris
gagactccaggcctagattttaatg

SEQ ID NO: 121027 - DNA, 25 bp, Canis familiaris
gagacttcagtcctgaggatactac

SEQ ID NO: 121028 - DNA, 25 bp, Canis familiaris
gagactctcttcttgggagatctct

SEQ ID NO: 121029 - DNA, 25 bp, Canis familiaris
gagactgccactttggaagcatttg

SEQ ID NO: 121030 - DNA, 25 bp, Canis familiaris
gagacgccacagaatgggagcccag

SEQ ID NO: 121031 - DNA, 25 bp, Canis familiaris
gagacgcgagagacgtgcttccgaa

SEQ ID NO: 121032 - DNA, 25 bp, Canis familiaris
gagacggagagtgtctcctctgaga

SEQ ID NO: 121033 - DNA, 25 bp, Canis familiaris
gagacctggattctcatcccagata

SEQ ID NO: 121034 - DNA, 25 bp, Canis familiaris
gagacgcagagaatcctacccagcg

SEQ ID NO: 121035 - DNA, 25 bp, Canis familiaris
gagactcgtggataccactcagcga

SEQ ID NO: 121036 - DNA, 25 bp, Canis familiaris
gagactcgtgggccacacagattcg

SEQ ID NO: 121037 - DNA, 25 bp, Canis familiaris
gagacctgcatgagccacacaggct

SEQ ID NO: 121038 - DNA, 25 bp, Canis familiaris
gagacagcacagacaccagcaaaca

SEQ ID NO: 121039 - DNA, 25 bp, Canis familiaris
gagacagtctgcaactcaaatgaca

SEQ ID NO: 121040 - DNA, 25 bp, Canis familiaris
gagacacctgctgctagcaagactg

SEQ ID NO: 121041 - DNA, 25 bp, Canis familiaris
gagactccatgtatgcagataacca

SEQ ID NO: 121042 - DNA, 25 bp, Canis familiaris
gagactccagaaatcaagatactcg

SEQ ID NO: 121043 - DNA, 25 bp, Canis familiaris
gagagccttaaagagaagcccccaa

SEQ ID NO: 121044 - DNA, 25 bp, Canis familiaris
gagaggttaggaggagactttgccc

SEQ ID NO: 121045 - DNA, 25 bp, Canis familiaris
gagagtactaggtgaccctctacgg

SEQ ID NO: 121046 - DNA, 25 bp, Canis familiaris
gagagtactatgagtacggtgctca

SEQ ID NO: 121047 - DNA, 25 bp, Canis familiaris
gagagtagcttgtcctacatctggt

SEQ ID NO: 121048 - DNA, 25 bp, Canis familiaris
gagagcaagccatacattcattctg

SEQ ID NO: 121049 - DNA, 25 bp, Canis familiaris
gagacataccgatcactaggtggca

SEQ ID NO: 121050 - DNA, 25 bp, Canis familiaris
gatgatacctcagacgttggctggc

SEQ ID NO: 121051 - DNA, 25 bp, Canis familiaris
gagacatcttcagcacaggggtggc

SEQ ID NO: 121052 - DNA, 25 bp, Canis familiaris
gagacatttcaagaagagggtgcgg

SEQ ID NO: 121053 - DNA, 25 bp, Canis familiaris
gagactcgttgagacaagtgaggcg

SEQ ID NO: 121054 - DNA, 25 bp, Canis familiaris
gagacagggagagcacatgagtggg

SEQ ID NO: 121055 - DNA, 25 bp, Canis familiaris
gagaccaggactgctctagtgttca

SEQ ID NO: 121056 - DNA, 25 bp, Canis familiaris
gagactcaggaggcgctgtggtttc

SEQ ID NO: 121057 - DNA, 25 bp, Canis familiaris
gagacatcactgtgttgtggcgggc

SEQ ID NO: 121058 - DNA, 25 bp, Canis familiaris
gagagctcactgtgactgagtggct

SEQ ID NO: 121059 - DNA, 25 bp, Canis familiaris
gagagccacagctctccatggagct

SEQ ID NO: 121060 - DNA, 25 bp, Canis familiaris
gagacccactgaccgtgaatctaga

SEQ ID NO: 121061 - DNA, 25 bp, Canis familiaris
gagactatgactaacgtatacttga

SEQ ID NO: 121062 - DNA, 25 bp, Canis familiaris
gagaccatagtttatcgcatatcgt

SEQ ID NO: 121063 - DNA, 25 bp, Canis familiaris
gagactcagaggcttctgcaggcct

SEQ ID NO: 121064 - DNA, 25 bp, Canis familiaris
gagactcagaggcttctgcaggcct

SEQ ID NO: 121065 - DNA, 25 bp, Canis familiaris
gagactcagaggcttctgcaggcct

SEQ ID NO: 121066 - DNA, 25 bp, Canis familiaris
gagactcagaggcttctgcaggcct

SEQ ID NO: 121067 - DNA, 25 bp, Canis familiaris
gagactcagaggcttctgcaggcct

SEQ ID NO: 121068 - DNA, 25 bp, Canis familiaris
gagactcagaggcttctgcaggcct

SEQ ID NO: 121069 - DNA, 25 bp, Canis familiaris
gagactcagaggcttctgcaggcct

SEQ ID NO: 121070 - DNA, 25 bp, Canis familiaris
gagactcagaggcttctgcaggcct

SEQ ID NO: 121071 - DNA, 25 bp, Canis familiaris
gagactcagaggcttctgcaggcct

SEQ ID NO: 121072 - DNA, 25 bp, Canis familiaris
gagactcagaggcttctgcaggcct

SEQ ID NO: 121073 - DNA, 25 bp, Canis familiaris
gagactcagaggcttctgcaggcct

SEQ ID NO: 121074 - DNA, 25 bp, Canis familiaris
gagactcagaggcttctgcaggcct

SEQ ID NO: 121075 - DNA, 25 bp, Canis familiaris
gagactcagaggcttctgcaggcct

SEQ ID NO: 121076 - DNA, 25 bp, Canis familiaris
gagactcagaggcttctgcaggcct

SEQ ID NO: 121077 - DNA, 25 bp, Canis familiaris
gagactcagaggcttctgcaggcct

SEQ ID NO: 121078 - DNA, 25 bp, Canis familiaris
gagactcagaggcttctgcaggcct

SEQ ID NO: 121079 - DNA, 25 bp, Canis familiaris
gagactcagaggcttctgcaggcct

SEQ ID NO: 121080 - DNA, 25 bp, Canis familiaris
gagagtccagaatagccaggcctac

SEQ ID NO: 121081 - DNA, 25 bp, Canis familiaris
gagagctctcctaacccagagctcc

SEQ ID NO: 121082 - DNA, 25 bp, Canis familiaris
gagagtgccacttacaggaagttgc

SEQ ID NO: 121083 - DNA, 25 bp, Canis familiaris
gagactgtcctctaaggtgttgctt

SEQ ID NO: 121084 - DNA, 25 bp, Canis familiaris
gagacagtccgacaggctgtgtgtg

SEQ ID NO: 121085 - DNA, 25 bp, Canis familiaris
gagaggctccaacactggatggttc

SEQ ID NO: 121086 - DNA, 25 bp, Canis familiaris
gagacctcccaagttggagtcgtca

SEQ ID NO: 121087 - DNA, 25 bp, Canis familiaris
gagacccccaagttcagactgtctc

SEQ ID NO: 121088 - DNA, 25 bp, Canis familiaris
gagacaaggccaaatctgaatcttt

SEQ ID NO: 121089 - DNA, 25 bp, Canis familiaris
gagacaagctcaataatctggtgtt

SEQ ID NO: 121090 - DNA, 25 bp, Canis familiaris
gagacaaccagaagtgcctgctctt

SEQ ID NO: 121091 - DNA, 25 bp, Canis familiaris
gagaaatacgactttgtgcactgta

SEQ ID NO: 121092 - DNA, 25 bp, Canis familiaris
gagaaatcagtgtttctctccccac

SEQ ID NO: 121093 - DNA, 25 bp, Canis familiaris
gagagaaattattgctgcctacccc

SEQ ID NO: 121094 - DNA, 25 bp, Canis familiaris
gagacaatatccaatgtgcccatcc

SEQ ID NO: 121095 - DNA, 25 bp, Canis familiaris
gagaaatgtgccgtttgtcatcctt

SEQ ID NO: 121096 - DNA, 25 bp, Canis familiaris
gagaaagtgttctctatctctctgt

SEQ ID NO: 121097 - DNA, 25 bp, Canis familiaris
gagaaagtgttaccacacttattta

SEQ ID NO: 121098 - DNA, 25 bp, Canis familiaris
gagacaagttattggaactatgact

SEQ ID NO: 121099 - DNA, 25 bp, Canis familiaris
gagactcatttagttaagttgactt

SEQ ID NO: 121100 - DNA, 25 bp, Canis familiaris
gagactccttaaaaatgtttcttct

SEQ ID NO: 121101 - DNA, 25 bp, Canis familiaris
gagacccttctaaacagtatggcct

SEQ ID NO: 121102 - DNA, 25 bp, Canis familiaris
gagaccttttaattcaggaagacat

SEQ ID NO: 121103 - DNA, 25 bp, Canis familiaris
gagaccattggttttgcaggagggt

SEQ ID NO: 121104 - DNA, 25 bp, Canis familiaris
gagacccggcattattggcggtgct

SEQ ID NO: 121105 - DNA, 25 bp, Canis familiaris
gagaccccagatcctgtggggtgct

SEQ ID NO: 121106 - DNA, 25 bp, Canis familiaris
gagaccctcactgctggggagtccc

SEQ ID NO: 121107 - DNA, 25 bp, Canis familiaris
gagaccaatcgcaggctggaagatg

SEQ ID NO: 121108 - DNA, 25 bp, Canis familiaris
gagactagatggccagggaaggatg

SEQ ID NO: 121109 - DNA, 25 bp, Canis familiaris
gagacacaggggccagagggtgatg

SEQ ID NO: 121110 - DNA, 25 bp, Canis familiaris
gagaccagcgggcgagtggatgaca

SEQ ID NO: 121111 - DNA, 25 bp, Canis familiaris
gagacccacgggccatcgtggaata

SEQ ID NO: 121112 - DNA, 25 bp, Canis familiaris
gagacccgcctgggcagaatggact

SEQ ID NO: 121113 - DNA, 25 bp, Canis familiaris
gagaccgcccaggagcagaactggc

SEQ ID NO: 121114 - DNA, 25 bp, Canis familiaris
gagactggtcactggtggactggga

SEQ ID NO: 121115 - DNA, 25 bp, Canis familiaris
gagactgtgttcactgagggctggg

SEQ ID NO: 121116 - DNA, 25 bp, Canis familiaris
gagactgtgttctcatgaattgagg

SEQ ID NO: 121117 - DNA, 25 bp, Canis familiaris
gagactgggacatcatcagtacggt

SEQ ID NO: 121118 - DNA, 25 bp, Canis familiaris
gagacgggaagactctgtcacacga

SEQ ID NO: 121119 - DNA, 25 bp, Canis familiaris
gagagatgaagaagcttttacagga

SEQ ID NO: 121120 - DNA, 25 bp, Canis familiaris
gagagagcagggccttcagtgaagg

SEQ ID NO: 121121 - DNA, 25 bp, Canis familiaris
gagaccaggtcctttggcatgaggt

SEQ ID NO: 121122 - DNA, 25 bp, Canis familiaris
gagagcgagagatcgtctggcgagg

SEQ ID NO: 121123 - DNA, 25 bp, Canis familiaris
gagactggaagaggaggggagctgt

SEQ ID NO: 121124 - DNA, 25 bp, Canis familiaris
gagacggccagggagctggtgatca

SEQ ID NO: 121125 - DNA, 25 bp, Canis familiaris
gagacagttctgatcagatggctta

SEQ ID NO: 121126 - DNA, 25 bp, Canis familiaris
gagacagagctgaatccagaccttt

SEQ ID NO: 121127 - DNA, 25 bp, Canis familiaris
gagacgtgctattcgtgatgccaaa

SEQ ID NO: 121128 - DNA, 25 bp, Canis familiaris
gagacgcagtatttgagacctgaaa

SEQ ID NO: 121129 - DNA, 25 bp, Canis familiaris
gagaccatcaaactggctccagaat

SEQ ID NO: 121130 - DNA, 25 bp, Canis familiaris
gagacttgagaaacatgcccgcatt

SEQ ID NO: 121131 - DNA, 25 bp, Canis familiaris
gagacttggagtttggctggcattt

SEQ ID NO: 121132 - DNA, 25 bp, Canis familiaris
gagactatgcagatttccagtattt

SEQ ID NO: 121133 - DNA, 25 bp, Canis familiaris
gagaccagagttgaccagcttttgt

SEQ ID NO: 121134 - DNA, 25 bp, Canis familiaris
gagatccgaggacacagccgtattt

SEQ ID NO: 121135 - DNA, 25 bp, Canis familiaris
gagagccggggaaacctgatgttct

SEQ ID NO: 121136 - DNA, 25 bp, Canis familiaris
gagactcgggaggaaacctgtttga

SEQ ID NO: 121137 - DNA, 25 bp, Canis familiaris
gagagcttggggacttacctgtttc

SEQ ID NO: 121138 - DNA, 25 bp, Canis familiaris
gagacttaacactttcccatggttc

SEQ ID NO: 121139 - DNA, 25 bp, Canis familiaris
gagactgtactggggatccccgttc

SEQ ID NO: 121140 - DNA, 25 bp, Canis familiaris
gagaggaactgaggtacaagccggt

SEQ ID NO: 121141 - DNA, 25 bp, Canis familiaris
gagagagacccaaggaaacctggaa

SEQ ID NO: 121142 - DNA, 25 bp, Canis familiaris
gagagaagcccaggggaccacagta

SEQ ID NO: 121143 - DNA, 25 bp, Canis familiaris
gagacctgaactgggcagactgcaa

SEQ ID NO: 121144 - DNA, 25 bp, Canis familiaris
gagacctgaactgggcagactgcaa

SEQ ID NO: 121145 - DNA, 25 bp, Canis familiaris
gagacctgaactgggcagactgcaa

SEQ ID NO: 121146 - DNA, 25 bp, Canis familiaris
gagacctgaactgggcagactgcaa

SEQ ID NO: 121147 - DNA, 25 bp, Canis familiaris
gagacctgaactgggcagactgcaa

SEQ ID NO: 121148 - DNA, 25 bp, Canis familiaris
gagacctgaactgggcagactgcaa

SEQ ID NO: 121149 - DNA, 25 bp, Canis familiaris
gagacctgaactgggcagactgcaa

SEQ ID NO: 121150 - DNA, 25 bp, Canis familiaris
gagacctgaccttgcagtacaacat

SEQ ID NO: 121151 - DNA, 25 bp, Canis familiaris
gagacctgactttggaatctggcta

SEQ ID NO: 121152 - DNA, 25 bp, Canis familiaris
gagtccgacttcaaattcagggata

SEQ ID NO: 121153 - DNA, 25 bp, Canis familiaris
gagactcccgtggaatctcaggaag

SEQ ID NO: 121154 - DNA, 25 bp, Canis familiaris
gagacacaccaggtagtggcggaag

SEQ ID NO: 121155 - DNA, 25 bp, Canis familiaris
gagacgcccatggtgaggggggaag

SEQ ID NO: 121156 - DNA, 25 bp, Canis familiaris
gagacccagatctggggcggggctg

SEQ ID NO: 121157 - DNA, 25 bp, Canis familiaris
gagactgaaaccaggcagcgggtgt

SEQ ID NO: 121158 - DNA, 25 bp, Canis familiaris
gagacagaaaccactagattccaat

SEQ ID NO: 121159 - DNA, 25 bp, Canis familiaris
gagacaacacccgttaatgggcaaa

SEQ ID NO: 121160 - DNA, 25 bp, Canis familiaris
gagacagctacgacagttacggtaa

SEQ ID NO: 121161 - DNA, 25 bp, Canis familiaris
gagacctgataatgttacctgctat

SEQ ID NO: 121162 - DNA, 25 bp, Canis familiaris
gagacgtgtgcaatcgtttcactct

SEQ ID NO: 121163 - DNA, 25 bp, Canis familiaris
gagacactctcaagcagatttcact

SEQ ID NO: 121164 - DNA, 25 bp, Canis familiaris
gagacacacatagagatatccacga

SEQ ID NO: 121165 - DNA, 25 bp, Canis familiaris
gagaccaaagtatatggatgccttg

SEQ ID NO: 121166 - DNA, 25 bp, Canis familiaris
gagacaaaagcccttggatcctgag

SEQ ID NO: 121167 - DNA, 25 bp, Canis familiaris
gagaccacaagctgttgttttgggt

SEQ ID NO: 121168 - DNA, 25 bp, Canis familiaris
gagacttccactgttgtctgttcaa

SEQ ID NO: 121169 - DNA, 25 bp, Canis familiaris
gagacttttcattctgttttatcag

SEQ ID NO: 121170 - DNA, 25 bp, Canis familiaris
gagagacattaaattgtttgcccaa

SEQ ID NO: 121171 - DNA, 25 bp, Canis familiaris
gagaccaggaaaagtcaccccacaa

SEQ ID NO: 121172 - DNA, 25 bp, Canis familiaris
gagaggggacagtgttccccgacac

SEQ ID NO: 121173 - DNA, 25 bp, Canis familiaris
gagagggtcatttgttttacctgaa

SEQ ID NO: 121174 - DNA, 25 bp, Canis familiaris
gagagagttccttggaattccttaa

SEQ ID NO: 121175 - DNA, 25 bp, Canis familiaris
gagaggattctctatggaattcaat

SEQ ID NO: 121176 - DNA, 25 bp, Canis familiaris
gagaggatttactgagatttatatg

SEQ ID NO: 121177 - DNA, 25 bp, Canis familiaris
gagacgctgttacttgaatgattta

SEQ ID NO: 121178 - DNA, 25 bp, Canis familiaris
gagactcttttctgaagtgctatcc

SEQ ID NO: 121179 - DNA, 25 bp, Canis familiaris
gagactccttccagactgtggtctc

SEQ ID NO: 121180 - DNA, 25 bp, Canis familiaris
gagacccatgtctcaatcctgggtc

SEQ ID NO: 121181 - DNA, 25 bp, Canis familiaris
gagacaaatgtggagcaggccgggt

SEQ ID NO: 121182 - DNA, 25 bp, Canis familiaris
gagaccatatgtggggagccagcga

SEQ ID NO: 121183 - DNA, 25 bp, Canis familiaris
gagactctgatggcagctgagacca

SEQ ID NO: 121184 - DNA, 25 bp, Canis familiaris
gagatgtgcatcctcatcgatgagc

SEQ ID NO: 121185 - DNA, 25 bp, Canis familiaris
gagagagcagggtcaggagctgaat

SEQ ID NO: 121186 - DNA, 25 bp, Canis familiaris
gagaccagtgcaccatgagatcatg

SEQ ID NO: 121187 - DNA, 25 bp, Canis familiaris
gagacatcagtccacagtgacacac

SEQ ID NO: 121188 - DNA, 25 bp, Canis familiaris
gagactagcatccagctgtgtagct

SEQ ID NO: 121189 - DNA, 25 bp, Canis familiaris
gagacacgctgccagcaggtagctt

SEQ ID NO: 121190 - DNA, 25 bp, Canis familiaris
gagacatctctgcactggtgttttc

SEQ ID NO: 121191 - DNA, 25 bp, Canis familiaris
gagagactgcttgtggcatctttta

SEQ ID NO: 121192 - DNA, 25 bp, Canis familiaris
gagagaaagcagatgtatttttaca

SEQ ID NO: 121193 - DNA, 25 bp, Canis familiaris
gagacatagacatttgtttgtatta

SEQ ID NO: 121194 - DNA, 25 bp, Canis familiaris
gagattagaagtatgtcttttcaat

SEQ ID NO: 121195 - DNA, 25 bp, Canis familiaris
gagactagaagaatgttcacttttt

SEQ ID NO: 121196 - DNA, 25 bp, Canis familiaris
gagagcggaaaatttacttggcaat

SEQ ID NO: 121197 - DNA, 25 bp, Canis familiaris
gagagcccagaacaccactgggcaa

SEQ ID NO: 121198 - DNA, 25 bp, Canis familiaris
gagacacacgatatagccaagagga

SEQ ID NO: 121199 - DNA, 25 bp, Canis familiaris
gagacaccaaggacaccaagcgtgt

SEQ ID NO: 121200 - DNA, 25 bp, Canis familiaris
gagacaccacagaacttaagccttt

SEQ ID NO: 121201 - DNA, 25 bp, Canis familiaris
gagacccactttattcagttctgta

SEQ ID NO: 121202 - DNA, 25 bp, Canis familiaris
gagacacatcacattcacttggttc

SEQ ID NO: 121203 - DNA, 25 bp, Canis familiaris
gagagcacacatgttgatgcactgg

SEQ ID NO: 121204 - DNA, 25 bp, Canis familiaris
gagacccagtctatgcgtgcaggtc

SEQ ID NO: 121205 - DNA, 25 bp, Canis familiaris
gagagcctgcaagcttggtacggcc

SEQ ID NO: 121206 - DNA, 25 bp, Canis familiaris
gagacctgaacgtgggcagacgtgc

SEQ ID NO: 121207 - DNA, 25 bp, Canis familiaris
gagagccgaacgtgacgacgcggcc

SEQ ID NO: 121208 - DNA, 25 bp, Canis familiaris
gagagccgacgtgacgtacgcggcc

SEQ ID NO: 121209 - DNA, 25 bp, Canis familiaris
gagaccgatcctggcaagtacgtgt

SEQ ID NO: 121210 - DNA, 25 bp, Canis familiaris
gagacacgtgacaggctgtggcggc

SEQ ID NO: 121211 - DNA, 25 bp, Canis familiaris
gagtacaggactcttggggtcgtga

SEQ ID NO: 121212 - DNA, 25 bp, Canis familiaris
gagttcggggcgatgacgaggttgg

SEQ ID NO: 121213 - DNA, 25 bp, Canis familiaris
gagttaggaaccattcatcgggggg

SEQ ID NO: 121214 - DNA, 25 bp, Canis familiaris
gagactgaggacacgttcattgccg

SEQ ID NO: 121215 - DNA, 25 bp, Canis familiaris
gagagggtgcacacacatgacttga

SEQ ID NO: 121216 - DNA, 25 bp, Canis familiaris
gagacggtgtcgaccaacattgcat

SEQ ID NO: 121217 - DNA, 25 bp, Canis familiaris
gagatggaggtatccccatgtgctt

SEQ ID NO: 121218 - DNA, 25 bp, Canis familiaris
gagatggtggaatcctctttgcctt

SEQ ID NO: 121219 - DNA, 25 bp, Canis familiaris
gagagccaggaacccatgttatccc

SEQ ID NO: 121220 - DNA, 25 bp, Canis familiaris
gagaccaggaagccaatttgaaccc

SEQ ID NO: 121221 - DNA, 25 bp, Canis familiaris
gagactgaacaagtgaaactaccac

SEQ ID NO: 121222 - DNA, 25 bp, Canis familiaris
gagactggagaagtaattccaccaa

SEQ ID NO: 121223 - DNA, 25 bp, Canis familiaris
gagactgtggatctcattgtccagc

SEQ ID NO: 121224 - DNA, 25 bp, Canis familiaris
gagagcgggatgaaacgtccccccg

SEQ ID NO: 121225 - DNA, 25 bp, Canis familiaris
gagactggtgtgcaaaaggcgctac

SEQ ID NO: 121226 - DNA, 25 bp, Canis familiaris
gagacatttgctctagtatggtgta

SEQ ID NO: 121227 - DNA, 25 bp, Canis familiaris
gagactgtgtcctggttggagtgag

SEQ ID NO: 121228 - DNA, 25 bp, Canis familiaris
gagatcgtgacctgggctgaaatcg

SEQ ID NO: 121229 - DNA, 25 bp, Canis familiaris
gagactggaacccaagctgaaatca

SEQ ID NO: 121230 - DNA, 25 bp, Canis familiaris
gagaccttaccatctgtgacaacat

SEQ ID NO: 121231 - DNA, 25 bp, Canis familiaris
gagagccttaccaggaggaccatcc

SEQ ID NO: 121232 - DNA, 25 bp, Canis familiaris
gagaccttcaccaagaaagcacctc

SEQ ID NO: 121233 - DNA, 25 bp, Canis familiaris
gagacctttctcaagaatgagggcc

SEQ ID NO: 121234 - DNA, 25 bp, Canis familiaris
gagacctttctcattttcagagcat

SEQ ID NO: 121235 - DNA, 25 bp, Canis familiaris
gagagagtttacacttctaagtctg

SEQ ID NO: 121236 - DNA, 25 bp, Canis familiaris
gagacaggcgatgccgttgcaaagt

SEQ ID NO: 121237 - DNA, 25 bp, Canis familiaris
gagagaggcaagccctgttgacaca

SEQ ID NO: 121238 - DNA, 25 bp, Canis familiaris
gagacaggacattgcctttgcctac

SEQ ID NO: 121239 - DNA, 25 bp, Canis familiaris
gagacaggcagcagctcctgtgctt

SEQ ID NO: 121240 - DNA, 25 bp, Canis familiaris
gagagcaggagcagttctggggccc

SEQ ID NO: 121241 - DNA, 25 bp, Canis familiaris
gagacgggtggcatggggagcagct

SEQ ID NO: 121242 - DNA, 25 bp, Canis familiaris
gagacgggtggcatggggagcagct

SEQ ID NO: 121243 - DNA, 25 bp, Canis familiaris
gagagagtggtggctgaagggacag

SEQ ID NO: 121244 - DNA, 25 bp, Canis familiaris
gagaggtaggccttcgagggcaagc

SEQ ID NO: 121245 - DNA, 25 bp, Canis familiaris
gagaggtatggactccacgtgggag

SEQ ID NO: 121246 - DNA, 25 bp, Canis familiaris
gagagagatatggaccctatgattg

SEQ ID NO: 121247 - DNA, 25 bp, Canis familiaris
gagacgaatgtgtaccattatttct

SEQ ID NO: 121248 - DNA, 25 bp, Canis familiaris
gagactattcttgcacattatttta

SEQ ID NO: 121249 - DNA, 25 bp, Canis familiaris
gagacttcacgggcaaaaccactat

SEQ ID NO: 121250 - DNA, 25 bp, Canis familiaris
gagactgttcaaggcaaacccattt

SEQ ID NO: 121251 - DNA, 25 bp, Canis familiaris
gagactgttagtccaaacaatacta

SEQ ID NO: 121252 - DNA, 25 bp, Canis familiaris
gagactgtcttttcatatactttca

SEQ ID NO: 121253 - DNA, 25 bp, Canis familiaris
gagactgacttttagaatttccact

SEQ ID NO: 121254 - DNA, 25 bp, Canis familiaris
gagactttctcttagagtctgttgc

SEQ ID NO: 121255 - DNA, 25 bp, Canis familiaris
gagacattattcacaattctgttcc

SEQ ID NO: 121256 - DNA, 25 bp, Canis familiaris
gagacatcttttacacattctccga

SEQ ID NO: 121257 - DNA, 25 bp, Canis familiaris
gagacatcttttacaatctccgatg

SEQ ID NO: 121258 - DNA, 25 bp, Canis familiaris
gagacatcttttacaatctccgatg

SEQ ID NO: 121259 - DNA, 25 bp, Canis familiaris
gagacatcttgtacaatcgtccgat

SEQ ID NO: 121260 - DNA, 25 bp, Canis familiaris
gagacattttatcttgtccgtgaag

SEQ ID NO: 121261 - DNA, 25 bp, Canis familiaris
gagatcagttgtgttattcctggaa

SEQ ID NO: 121262 - DNA, 25 bp, Canis familiaris
gagacaggtgttttaaccagagcca

SEQ ID NO: 121263 - DNA, 25 bp, Canis familiaris
gagaggagtgtggaaaccccagcca

SEQ ID NO: 121264 - DNA, 25 bp, Canis familiaris
gagaggaacgggatctcctgagcct

SEQ ID NO: 121265 - DNA, 25 bp, Canis familiaris
gagaccagacctgttctgggacctg

SEQ ID NO: 121266 - DNA, 25 bp, Canis familiaris
gagaccttccagaatttggaacccg

SEQ ID NO: 121267 - DNA, 25 bp, Canis familiaris
gagacctagtagtttcagagacccc

SEQ ID NO: 121268 - DNA, 25 bp, Canis familiaris
gagaccgagtagcttaagtaacaaa

SEQ ID NO: 121269 - DNA, 25 bp, Canis familiaris
gagaccctgaactctaggaaacaaa

SEQ ID NO: 121270 - DNA, 25 bp, Canis familiaris
gagaccctgaacatctaccagaacc

SEQ ID NO: 121271 - DNA, 25 bp, Canis familiaris
gagaccttaagtgccaacagaaccc

SEQ ID NO: 121272 - DNA, 25 bp, Canis familiaris
gagaccttgttggccaaaagaaagc

SEQ ID NO: 121273 - DNA, 25 bp, Canis familiaris
gagactttgttctcgcaaatcataa

SEQ ID NO: 121274 - DNA, 25 bp, Canis familiaris
gagactagcattacccagaagccat

SEQ ID NO: 121275 - DNA, 25 bp, Canis familiaris
gagactacatcaaacacaaaccaat

SEQ ID NO: 121276 - DNA, 25 bp, Canis familiaris
gagagctaataaaccaaaccataat

SEQ ID NO: 121277 - DNA, 25 bp, Canis familiaris
gagggactttacaagacactaagca

SEQ ID NO: 121278 - DNA, 25 bp, Canis familiaris
gaggtactttaacgcaacattccaa

SEQ ID NO: 121279 - DNA, 25 bp, Canis familiaris
gagactatttattctagctacattt

SEQ ID NO: 121280 - DNA, 25 bp, Canis familiaris
gagacgtttcaacatcatcgattta

SEQ ID NO: 121281 - DNA, 25 bp, Canis familiaris
gagacgctttaatttccgtgtgtca

SEQ ID NO: 121282 - DNA, 25 bp, Canis familiaris
gagacgctttaattgtcgtgttcat

SEQ ID NO: 121283 - DNA, 25 bp, Canis familiaris
gagactcaaaactacacgtttcaag

SEQ ID NO: 121284 - DNA, 25 bp, Canis familiaris
gggaaagaaccattcgtgtctcggt

SEQ ID NO: 121285 - DNA, 25 bp, Canis familiaris
gagggaataaagttcgtgtctcggg

SEQ ID NO: 121286 - DNA, 25 bp, Canis familiaris
gagaggagattctgttcgttccgcc

SEQ ID NO: 121287 - DNA, 25 bp, Canis familiaris
gagaggactcttctcttgttacgac

SEQ ID NO: 121288 - DNA, 25 bp, Canis familiaris
gagagaaatctccgcatcttatata

SEQ ID NO: 121289 - DNA, 25 bp, Canis familiaris
gagagaagatcctgccgtatcagcc

SEQ ID NO: 121290 - DNA, 25 bp, Canis familiaris
gagagaagatcctgccgtatcagcc

SEQ ID NO: 121291 - DNA, 25 bp, Canis familiaris
gagagaaaccatccagagaaaccct

SEQ ID NO: 121292 - DNA, 25 bp, Canis familiaris
gagagccaaatcctcagaattcccc

SEQ ID NO: 121293 - DNA, 25 bp, Canis familiaris
gagagcagaaatctcatcagcatct

SEQ ID NO: 121294 - DNA, 25 bp, Canis familiaris
gagagacagactcttaactatagag

SEQ ID NO: 121295 - DNA, 25 bp, Canis familiaris
gagggcaatctactttactaaatcc

SEQ ID NO: 121296 - DNA, 25 bp, Canis familiaris
gagagcccatgtttgtttctaacca

SEQ ID NO: 121297 - DNA, 25 bp, Canis familiaris
gagactcctggacttttgcatattt

SEQ ID NO: 121298 - DNA, 25 bp, Canis familiaris
gagaccacatcgacttgttaatcaa

SEQ ID NO: 121299 - DNA, 25 bp, Canis familiaris
gagactcttcaaactgttcaaaatt

SEQ ID NO: 121300 - DNA, 25 bp, Canis familiaris
gagatgtcttccacgtaaattatgt

SEQ ID NO: 121301 - DNA, 25 bp, Canis familiaris
gagatgtttactcgtgccgaattcg

SEQ ID NO: 121302 - DNA, 25 bp, Canis familiaris
gagtatattcaggagctccgcaacc

SEQ ID NO: 121303 - DNA, 25 bp, Canis familiaris
gagacttagagccagccctgaataa

SEQ ID NO: 121304 - DNA, 25 bp, Canis familiaris
gagagaataggctcccttaaacaat

SEQ ID NO: 121305 - DNA, 25 bp, Canis familiaris
gatagtaaacctccacgtagaaaat

SEQ ID NO: 121306 - DNA, 25 bp, Canis familiaris
gagagtatccacgggcacgggaaac

SEQ ID NO: 121307 - DNA, 25 bp, Canis familiaris
gagaggaccactgggagcctgtaac

SEQ ID NO: 121308 - DNA, 25 bp, Canis familiaris
gagaggaaaatgttgacgctgtaga

SEQ ID NO: 121309 - DNA, 25 bp, Canis familiaris
gagagccccaagtcgggtgttggac

SEQ ID NO: 121310 - DNA, 25 bp, Canis familiaris
gagagaccgagttactggagttggc

SEQ ID NO: 121311 - DNA, 25 bp, Canis familiaris
gagagaccatgaacgaaggcttcta

SEQ ID NO: 121312 - DNA, 25 bp, Canis familiaris
gagagccatcaggcccaggaattcg

SEQ ID NO: 121313 - DNA, 25 bp, Canis familiaris
gagatgagctgggcgccagcgttcc

SEQ ID NO: 121314 - DNA, 25 bp, Canis familiaris
tcgatggtagtcgccgtgcctacca

SEQ ID NO: 121315 - DNA, 25 bp, Canis familiaris
tcgatggtagtcgccgtgcctacca

SEQ ID NO: 121316 - DNA, 25 bp, Canis familiaris
tcgactgggtgaggtcgcaactccc

SEQ ID NO: 121317 - DNA, 25 bp, Canis familiaris
gagactggcaggtgtccacagtccc

SEQ ID NO: 121318 - DNA, 25 bp, Canis familiaris
gagactgacaggcagtctccggcct

SEQ ID NO: 121319 - DNA, 25 bp, Canis familiaris
gagagcgatgggcatctctcgggac

SEQ ID NO: 121320 - DNA, 25 bp, Canis familiaris
gagacgatggagaacgggctgatga

SEQ ID NO: 121321 - DNA, 25 bp, Canis familiaris
gagactgggtaaggcagggatatga

SEQ ID NO: 121322 - DNA, 25 bp, Canis familiaris
gagaccagtgtcaacacagggaaac

SEQ ID NO: 121323 - DNA, 25 bp, Canis familiaris
gagacctgtgtctcctgggagatag

SEQ ID NO: 121324 - DNA, 25 bp, Canis familiaris
gagacgcttgtctcagagcgggact

SEQ ID NO: 121325 - DNA, 25 bp, Canis familiaris
gagacgcatattctcgagagagaga

SEQ ID NO: 121326 - DNA, 25 bp, Canis familiaris
gagagcgctatctcaagcagaagag

SEQ ID NO: 121327 - DNA, 25 bp, Canis familiaris
gagagctcttgtgcacactttgaca

SEQ ID NO: 121328 - DNA, 25 bp, Canis familiaris
gagagctctgctacaaagccttgaa

SEQ ID NO: 121329 - DNA, 25 bp, Canis familiaris
gagagctatctacaagcacatctag

SEQ ID NO: 121330 - DNA, 25 bp, Canis familiaris
gagactacatactacacactgtaag

SEQ ID NO: 121331 - DNA, 25 bp, Canis familiaris
gagactaggttaccacgctaagctc

SEQ ID NO: 121332 - DNA, 25 bp, Canis familiaris
gagagatcgttaatgcccttgaagt

SEQ ID NO: 121333 - DNA, 25 bp, Canis familiaris
gagttcgttttctctgttagatttt

SEQ ID NO: 121334 - DNA, 25 bp, Canis familiaris
gagactcgttttgttaatatttgat

SEQ ID NO: 121335 - DNA, 25 bp, Canis familiaris
gagttggtttctcttaaatcactga

SEQ ID NO: 121336 - DNA, 25 bp, Canis familiaris
ggtctagtatttccccgaataggat

SEQ ID NO: 121337 - DNA, 25 bp, Canis familiaris
gagttggtgtttaagcccttagtag

SEQ ID NO: 121338 - DNA, 25 bp, Canis familiaris
gagatgcggttggaaggcctttcgt

SEQ ID NO: 121339 - DNA, 25 bp, Canis familiaris
gagacggggaagctgtctcttctgc

SEQ ID NO: 121340 - DNA, 25 bp, Canis familiaris
gagactgatggtaaggttgcccccc

SEQ ID NO: 121341 - DNA, 25 bp, Canis familiaris
gagagcaaggttgtagttccccctc

SEQ ID NO: 121342 - DNA, 25 bp, Canis familiaris
gagaccaggttctggttcagaccct

SEQ ID NO: 121343 - DNA, 25 bp, Canis familiaris
gagtccaagagtcaggtaacctcct

SEQ ID NO: 121344 - DNA, 25 bp, Canis familiaris
gagagtcaaggaggttttaccccat

SEQ ID NO: 121345 - DNA, 25 bp, Canis familiaris
gagagaatccgaggcttattaccaa

SEQ ID NO: 121346 - DNA, 25 bp, Canis familiaris
gagaggtcagtgagcaaattcaaaa

SEQ ID NO: 121347 - DNA, 25 bp, Canis familiaris
gagagggcgggagatttagtaagat

SEQ ID NO: 121348 - DNA, 25 bp, Canis familiaris
gagggggacggaatttcagaacgag

SEQ ID NO: 121349 - DNA, 25 bp, Canis familiaris
gaggggagggaagatgctaaacgat

SEQ ID NO: 121350 - DNA, 25 bp, Canis familiaris
gagagggcgggaaggagcccaagtc

SEQ ID NO: 121351 - DNA, 25 bp, Canis familiaris
gagagggagagggagggggagagtc

SEQ ID NO: 121352 - DNA, 25 bp, Canis familiaris
gagagtggaaaagggggggaatgcg

SEQ ID NO: 121353 - DNA, 25 bp, Canis familiaris
gagagaagtaagatgagagggggct

SEQ ID NO: 121354 - DNA, 25 bp, Canis familiaris
gagagagagtcttcgggagaggagg

SEQ ID NO: 121355 - DNA, 25 bp, Canis familiaris
gagagaatctttcgggagaaggagg

SEQ ID NO: 121356 - DNA, 25 bp, Canis familiaris
gagagagtcttcgggagaggaggag

SEQ ID NO: 121357 - DNA, 25 bp, Canis familiaris
gagagattctatcactacgtaagga

SEQ ID NO: 121358 - DNA, 25 bp, Canis familiaris
gagagacatctataaccgggaggag

SEQ ID NO: 121359 - DNA, 25 bp, Canis familiaris
gagagacatctataaccgggaggag

SEQ ID NO: 121360 - DNA, 25 bp, Canis familiaris
gagagacatctataaccgggaggag

SEQ ID NO: 121361 - DNA, 25 bp, Canis familiaris
gagagacatctataaccgggaggag

SEQ ID NO: 121362 - DNA, 25 bp, Canis familiaris
gagaggcatgttggagacctgggca

SEQ ID NO: 121363 - DNA, 25 bp, Canis familiaris
gagagagcgagtgaacctgggcagg

SEQ ID NO: 121364 - DNA, 25 bp, Canis familiaris
gagagagccctggagatccggaaga

SEQ ID NO: 121365 - DNA, 25 bp, Canis familiaris
gagagagctccagaccggaaatccc

SEQ ID NO: 121366 - DNA, 25 bp, Canis familiaris
gagatagccctttcttggtaagcac

SEQ ID NO: 121367 - DNA, 25 bp, Canis familiaris
gagagacacctttttatccaacaga

SEQ ID NO: 121368 - DNA, 25 bp, Canis familiaris
gagacctgcctttaaaatcatacat

SEQ ID NO: 121369 - DNA, 25 bp, Canis familiaris
gagaccctcgtgtaaatgtgtatat

SEQ ID NO: 121370 - DNA, 25 bp, Canis familiaris
gagactcatctcttacaagatggtt

SEQ ID NO: 121371 - DNA, 25 bp, Canis familiaris
gagaccacctgtccagggcaatagg

SEQ ID NO: 121372 - DNA, 25 bp, Canis familiaris
gagacccctgaaggaggtgaaggcc

SEQ ID NO: 121373 - DNA, 25 bp, Canis familiaris
gagacccctgagagagctgggaagc

SEQ ID NO: 121374 - DNA, 25 bp, Canis familiaris
gaggccccagggccacaagtaagtc

SEQ ID NO: 121375 - DNA, 25 bp, Canis familiaris
gagacctaaggcccaaattgaaatc

SEQ ID NO: 121376 - DNA, 25 bp, Canis familiaris
gagtaccagatgccaccaaattgac

SEQ ID NO: 121377 - DNA, 25 bp, Canis familiaris
ggtacggtacccatgactggtaaag

SEQ ID NO: 121378 - DNA, 25 bp, Canis familiaris
gggacgggacttgtgggtgttagag

SEQ ID NO: 121379 - DNA, 25 bp, Canis familiaris
gagtaggggactgggtgacgggtag

SEQ ID NO: 121380 - DNA, 25 bp, Canis familiaris
gagagaggagcgagggggtggggtg

SEQ ID NO: 121381 - DNA, 25 bp, Canis familiaris
gagagaggagccaggaattggtcag

SEQ ID NO: 121382 - DNA, 25 bp, Canis familiaris
gagacgaggctgatggaattatgaa

SEQ ID NO: 121383 - DNA, 25 bp, Canis familiaris
gagaccagtctattagtttataact

SEQ ID NO: 121384 - DNA, 25 bp, Canis familiaris
gagtcagcgacttgatattgttaaa

SEQ ID NO: 121385 - DNA, 25 bp, Canis familiaris
ggcctggcacttcttcgaaaaattc

SEQ ID NO: 121386 - DNA, 25 bp, Canis familiaris
gagactgtccttattcttagaaaac

SEQ ID NO: 121387 - DNA, 25 bp, Canis familiaris
gagacccgcgtgatgtttgagaaga

SEQ ID NO: 121388 - DNA, 25 bp, Canis familiaris
gaggctccccatcttttgggagact

SEQ ID NO: 121389 - DNA, 25 bp, Canis familiaris
gagaccccacttctgagagggagac

SEQ ID NO: 121390 - DNA, 25 bp, Canis familiaris
gagactctccagttttgtggggtgt

SEQ ID NO: 121391 - DNA, 25 bp, Canis familiaris
gagagcctccaaggttctagggatt

SEQ ID NO: 121392 - DNA, 25 bp, Canis familiaris
gagagccctagaagccagggggtct

SEQ ID NO: 121393 - DNA, 25 bp, Canis familiaris
gagagtactcgcacgagggctctgt

SEQ ID NO: 121394 - DNA, 25 bp, Canis familiaris
gagactcgcttgaccgagggtctgc

SEQ ID NO: 121395 - DNA, 25 bp, Canis familiaris
gagaccgtgaactgggcagactgca

SEQ ID NO: 121396 - DNA, 25 bp, Canis familiaris
gagaggttggcctgtggcatcatcg

SEQ ID NO: 121397 - DNA, 25 bp, Canis familiaris
gagacgttatcctatgtgagtcacc

SEQ ID NO: 121398 - DNA, 25 bp, Canis familiaris
gagacgttttgcaatcatgaaccgg

SEQ ID NO: 121399 - DNA, 25 bp, Canis familiaris
gagacgttatatctccatgtgccgg

SEQ ID NO: 121400 - DNA, 25 bp, Canis familiaris
gagacggaatgtatcgagtgttggc

SEQ ID NO: 121401 - DNA, 25 bp, Canis familiaris
gagagggcaagtttgtggtgtccac

SEQ ID NO: 121402 - DNA, 25 bp, Canis familiaris
gagagagccaagcagggtgtggcta

SEQ ID NO: 121403 - DNA, 25 bp, Canis familiaris
gagacgccagtgacaagagcatggt

SEQ ID NO: 121404 - DNA, 25 bp, Canis familiaris
gagagccagctgaatataagcaatg

SEQ ID NO: 121405 - DNA, 25 bp, Canis familiaris
gagacgcaggcagtgcagatacaag

SEQ ID NO: 121406 - DNA, 25 bp, Canis familiaris
gagagcttgagcttgagtgacagcg

SEQ ID NO: 121407 - DNA, 25 bp, Canis familiaris
gagatggctatggtcgtgatcgtga

SEQ ID NO: 121408 - DNA, 25 bp, Canis familiaris
gagagcccatgggcagcatgtcgtc

SEQ ID NO: 121409 - DNA, 25 bp, Canis familiaris
gagagacctgaggcgtatctggctg

SEQ ID NO: 121410 - DNA, 25 bp, Canis familiaris
gagagacgtattcccatctgctctc

SEQ ID NO: 121411 - DNA, 25 bp, Canis familiaris
gagagagagtatggacgctcctcgc

SEQ ID NO: 121412 - DNA, 25 bp, Canis familiaris
gagagcatggtgttgtctccgaacg

SEQ ID NO: 121413 - DNA, 25 bp, Canis familiaris
gagagcattgtgggaagccgagatc

SEQ ID NO: 121414 - DNA, 25 bp, Canis familiaris
gagagcattgaggaagccctgtccc

SEQ ID NO: 121415 - DNA, 25 bp, Canis familiaris
gagacctgcaggaggcgttctgcag

SEQ ID NO: 121416 - DNA, 25 bp, Canis familiaris
gagacccgtggggatgtggctgcat

SEQ ID NO: 121417 - DNA, 25 bp, Canis familiaris
gagacgacgtgcgtggagtggctgc

SEQ ID NO: 121418 - DNA, 25 bp, Canis familiaris
gagacgtcagaccaggactgatcgg

SEQ ID NO: 121419 - DNA, 25 bp, Canis familiaris
gagacgtagctttgctgtctgacgg

SEQ ID NO: 121420 - DNA, 25 bp, Canis familiaris
gagagctgtattaagtgactgacca

SEQ ID NO: 121421 - DNA, 25 bp, Canis familiaris
gagactgtactgattgatcttggca

SEQ ID NO: 121422 - DNA, 25 bp, Canis familiaris
gagaggagtctgacattgacctgcc

SEQ ID NO: 121423 - DNA, 25 bp, Canis familiaris
gagagcaggattgctctgcctcttc

SEQ ID NO: 121424 - DNA, 25 bp, Canis familiaris
gagagcaggattgctctgcctcttc

SEQ ID NO: 121425 - DNA, 25 bp, Canis familiaris
gagagcaggattgctctgcctcttc

SEQ ID NO: 121426 - DNA, 25 bp, Canis familiaris
gagagaatgaataccagcctttgaa

SEQ ID NO: 121427 - DNA, 25 bp, Canis familiaris
gagaggctaatgggacccttgcaat

SEQ ID NO: 121428 - DNA, 25 bp, Canis familiaris
gagagagctgacacagagcccagac

SEQ ID NO: 121429 - DNA, 25 bp, Canis familiaris
gagaggctgtgcgtacagccctgta

SEQ ID NO: 121430 - DNA, 25 bp, Canis familiaris
gagagctagtggaacgctgcatgcg

SEQ ID NO: 121431 - DNA, 25 bp, Canis familiaris
gagagccagctggtgagggcagagg

SEQ ID NO: 121432 - DNA, 25 bp, Canis familiaris
gagagccagcctggatgtgaggcag

SEQ ID NO: 121433 - DNA, 25 bp, Canis familiaris
gagaggcagcctgagggttgtttgc

SEQ ID NO: 121434 - DNA, 25 bp, Canis familiaris
gagagtagcggtggtggtcggttgc

SEQ ID NO: 121435 - DNA, 25 bp, Canis familiaris
gagagtagcggcaaggggggtgggg

SEQ ID NO: 121436 - DNA, 25 bp, Canis familiaris
gagagtcgtgggtggggatcgggag

SEQ ID NO: 121437 - DNA, 25 bp, Canis familiaris
gagagaggggcgtggggatgtgagg

SEQ ID NO: 121438 - DNA, 25 bp, Canis familiaris
gagatgagggaccacgttctgtcta

SEQ ID NO: 121439 - DNA, 25 bp, Canis familiaris
gagagcagggagcccttgctctctg

SEQ ID NO: 121440 - DNA, 25 bp, Canis familiaris
gagagaggaggagcttcactgaaat

SEQ ID NO: 121441 - DNA, 25 bp, Canis familiaris
gagagcagagagtaccgctattgaa

SEQ ID NO: 121442 - DNA, 25 bp, Canis familiaris
gagagaggaacagcgtataacgacg

SEQ ID NO: 121443 - DNA, 25 bp, Canis familiaris
gagagaggaaagagccaaaccccgc

SEQ ID NO: 121444 - DNA, 25 bp, Canis familiaris
gagaccagaaagaagccagaaaaac

SEQ ID NO: 121445 - DNA, 25 bp, Canis familiaris
gagacctcaaagatggcagaagaca

SEQ ID NO: 121446 - DNA, 25 bp, Canis familiaris
gagaccctgacgagatcatgcaagt

SEQ ID NO: 121447 - DNA, 25 bp, Canis familiaris
gagaccttgggcatgatccacattt

SEQ ID NO: 121448 - DNA, 25 bp, Canis familiaris
gagaccagaggggaatccagtcatt

SEQ ID NO: 121449 - DNA, 25 bp, Canis familiaris
gagaccatggttgagacgcagtatt

SEQ ID NO: 121450 - DNA, 25 bp, Canis familiaris
gagaccatggtgagaggcaaagagc

SEQ ID NO: 121451 - DNA, 25 bp, Canis familiaris
gagaccatggcttgatggacaaagg

SEQ ID NO: 121452 - DNA, 25 bp, Canis familiaris
gagacctactgcatcgacaatgagg

SEQ ID NO: 121453 - DNA, 25 bp, Canis familiaris
gagacctgactgtgagaaatgcgtg

SEQ ID NO: 121454 - DNA, 25 bp, Canis familiaris
gagacgcgagtctgaaatagccagc

SEQ ID NO: 121455 - DNA, 25 bp, Canis familiaris
gggcctggtcttaaatggcaaccgc

SEQ ID NO: 121456 - DNA, 25 bp, Canis familiaris
gggactttatttcagtagacctgtc

SEQ ID NO: 121457 - DNA, 25 bp, Canis familiaris
gagggtgtttttcaataaggcttct

SEQ ID NO: 121458 - DNA, 25 bp, Canis familiaris
gagaggttttttgaaaaggcacatg

SEQ ID NO: 121459 - DNA, 25 bp, Canis familiaris
gagaggttttcaaacacaacccact

SEQ ID NO: 121460 - DNA, 25 bp, Canis familiaris
gagagggttcaacaccattccctcg

SEQ ID NO: 121461 - DNA, 25 bp, Canis familiaris
gagacgctgttgcaaattctacccc

SEQ ID NO: 121462 - DNA, 25 bp, Canis familiaris
gagacgcttatggtttgtctccctc

SEQ ID NO: 121463 - DNA, 25 bp, Canis familiaris
gagaggattttgggtgttcccttct

SEQ ID NO: 121464 - DNA, 25 bp, Canis familiaris
gagagaacttgtccatatgtcccac

SEQ ID NO: 121465 - DNA, 25 bp, Canis familiaris
gagagagagttgtcccattaaccaa

SEQ ID NO: 121466 - DNA, 25 bp, Canis familiaris
gagatgatgagtacatccccgcgag

SEQ ID NO: 121467 - DNA, 25 bp, Canis familiaris
gagatgtcaatattgcccggacaga

SEQ ID NO: 121468 - DNA, 25 bp, Canis familiaris
gagagattcagacacattggccggt

SEQ ID NO: 121469 - DNA, 25 bp, Canis familiaris
gagagagtctggttagttgctggag

SEQ ID NO: 121470 - DNA, 25 bp, Canis familiaris
gagagagtctctttattcctgaata

SEQ ID NO: 121471 - DNA, 25 bp, Canis familiaris
gagagctgctcttgattttagtaca

SEQ ID NO: 121472 - DNA, 25 bp, Canis familiaris
gagagctgctgtgcttatttgtgct

SEQ ID NO: 121473 - DNA, 25 bp, Canis familiaris
gagagatctgctgcatttgggagga

SEQ ID NO: 121474 - DNA, 25 bp, Canis familiaris
gagaggtgccctttgggagaagccc

SEQ ID NO: 121475 - DNA, 25 bp, Canis familiaris
gagaggaccgaggtgtgtcgactcc

SEQ ID NO: 121476 - DNA, 25 bp, Canis familiaris
gagagtacccaggagaggccatcca

SEQ ID NO: 121477 - DNA, 25 bp, Canis familiaris
gagagacacaccgacagagggaccg

SEQ ID NO: 121478 - DNA, 25 bp, Canis familiaris
gagagcaaagacgcggggtctctgt

SEQ ID NO: 121479 - DNA, 25 bp, Canis familiaris
gagagagtatgaaccggaggggccg

SEQ ID NO: 121480 - DNA, 25 bp, Canis familiaris
gagagtaatgtatctggagttgacc

SEQ ID NO: 121481 - DNA, 25 bp, Canis familiaris
gagattaatccattcggtcagttcc

SEQ ID NO: 121482 - DNA, 25 bp, Canis familiaris
gagagtaatcaacgctttcgtcacc

SEQ ID NO: 121483 - DNA, 25 bp, Canis familiaris
gagagttcatcaaggctttgcagct

SEQ ID NO: 121484 - DNA, 25 bp, Canis familiaris
gagagctatatacggctgttgcagc

SEQ ID NO: 121485 - DNA, 25 bp, Canis familiaris
gagagcctgtcagtgggcttcaggg

SEQ ID NO: 121486 - DNA, 25 bp, Canis familiaris
gagacgctgtcaatgtggttccaag

SEQ ID NO: 121487 - DNA, 25 bp, Canis familiaris
gagaccatgtagggtgtgtcccagg

SEQ ID NO: 121488 - DNA, 25 bp, Canis familiaris
gagaccaatgagctcatgctgtcca

SEQ ID NO: 121489 - DNA, 25 bp, Canis familiaris
gagagcctcaagctggctgtcatca

SEQ ID NO: 121490 - DNA, 25 bp, Canis familiaris
gagagcggcaagagcacgttcatca

SEQ ID NO: 121491 - DNA, 25 bp, Canis familiaris
gagagcgccgagagcgatgggcatc

SEQ ID NO: 121492 - DNA, 25 bp, Canis familiaris
gagagaggcaggagctgggcagccc

SEQ ID NO: 121493 - DNA, 25 bp, Canis familiaris
gagagatgggcctggggagcccagc

SEQ ID NO: 121494 - DNA, 25 bp, Canis familiaris
gagagctcggtctgaggcatgtctc

SEQ ID NO: 121495 - DNA, 25 bp, Canis familiaris
gagagtcaagtgctgagggtgccct

SEQ ID NO: 121496 - DNA, 25 bp, Canis familiaris
gagaggcaaggctgagggtgccctg

SEQ ID NO: 121497 - DNA, 25 bp, Canis familiaris
gagaggaaggaacgggcgctcgtac

SEQ ID NO: 121498 - DNA, 25 bp, Canis familiaris
gagaggaagcgaggaaggcgacccc

SEQ ID NO: 121499 - DNA, 25 bp, Canis familiaris
gagagagaacagttacaagcagtct

SEQ ID NO: 121500 - DNA, 25 bp, Canis familiaris
gagagatgagaagtctctagaaatg

SEQ ID NO: 121501 - DNA, 25 bp, Canis familiaris
gagagatggaaggagccaaaaaaaa

SEQ ID NO: 121502 - DNA, 25 bp, Canis familiaris
gatgcagggggtggggaataacaac

SEQ ID NO: 121503 - DNA, 25 bp, Canis familiaris
gagaggagggattcgggtacaaagg

SEQ ID NO: 121504 - DNA, 25 bp, Canis familiaris
gagtcggggtttgcaaactgaatgg

SEQ ID NO: 121505 - DNA, 25 bp, Canis familiaris
gagggcgggttcacaaacaatattc

SEQ ID NO: 121506 - DNA, 25 bp, Canis familiaris
gaggtggactttctagaggcaattt

SEQ ID NO: 121507 - DNA, 25 bp, Canis familiaris
gagagggagctgcctcttcatgagg

SEQ ID NO: 121508 - DNA, 25 bp, Canis familiaris
gagagagaagcaggctccatgcagg

SEQ ID NO: 121509 - DNA, 25 bp, Canis familiaris
gagagaagcaggctccatgcaggga

SEQ ID NO: 121510 - DNA, 25 bp, Canis familiaris
gagagtatagagttcactcagtaga

SEQ ID NO: 121511 - DNA, 25 bp, Canis familiaris
gagagtcaaggccattgtcttatag

SEQ ID NO: 121512 - DNA, 25 bp, Canis familiaris
gagagctcacaaggactgttgtata

SEQ ID NO: 121513 - DNA, 25 bp, Canis familiaris
gagaccacatcaagtcagctgtgtt

SEQ ID NO: 121514 - DNA, 25 bp, Canis familiaris
gagacctcagaacagctggactggg

SEQ ID NO: 121515 - DNA, 25 bp, Canis familiaris
gagagccggagacgagggattggaa

SEQ ID NO: 121516 - DNA, 25 bp, Canis familiaris
gagagccgaggaaatataatgtgtt

SEQ ID NO: 121517 - DNA, 25 bp, Canis familiaris
gagatgcctcggaaaacaggtgttg

SEQ ID NO: 121518 - DNA, 25 bp, Canis familiaris
gagagcttcaagagcaaagagtttg

SEQ ID NO: 121519 - DNA, 25 bp, Canis familiaris
gagacccacgattgaaatgaatttc

SEQ ID NO: 121520 - DNA, 25 bp, Canis familiaris
gagacccacgatttatgctactatt

SEQ ID NO: 121521 - DNA, 25 bp, Canis familiaris
gagacccacgagttgtgactgtcat

SEQ ID NO: 121522 - DNA, 25 bp, Canis familiaris
gagaccccgatgatggatgctgaga

SEQ ID NO: 121523 - DNA, 25 bp, Canis familiaris
gagaccaccagggaagatgctgggg

SEQ ID NO: 121524 - DNA, 25 bp, Canis familiaris
gagagctcccggaacaatcgatgtg

SEQ ID NO: 121525 - DNA, 25 bp, Canis familiaris
gagacctgggggtcctggatgtggc

SEQ ID NO: 121526 - DNA, 25 bp, Canis familiaris
gagagcctgaggagctactgggagg

SEQ ID NO: 121527 - DNA, 25 bp, Canis familiaris
gagatttaatcaggctcagtcgggg

SEQ ID NO: 121528 - DNA, 25 bp, Canis familiaris
gagagcatttttggacgtcagcggt

SEQ ID NO: 121529 - DNA, 25 bp, Canis familiaris
gagagcattttaggagaaagggtga

SEQ ID NO: 121530 - DNA, 25 bp, Canis familiaris
gagagcgtttcatatgtaaccattc

SEQ ID NO: 121531 - DNA, 25 bp, Canis familiaris
gagaccatgtactctgaaactgcat

SEQ ID NO: 121532 - DNA, 25 bp, Canis familiaris
gagaccagatgaaccagatacacta

SEQ ID NO: 121533 - DNA, 25 bp, Canis familiaris
gagaccaagagatcacaccttaacc

SEQ ID NO: 121534 - DNA, 25 bp, Canis familiaris
gagaccagagagaagtcaacttgca

SEQ ID NO: 121535 - DNA, 25 bp, Canis familiaris
gagacccagatttccaacctgaatg

SEQ ID NO: 121536 - DNA, 25 bp, Canis familiaris
gagagacgcaacgcaaacacgagtg

SEQ ID NO: 121537 - DNA, 25 bp, Canis familiaris
gagagaatctgagccaacacaaact

SEQ ID NO: 121538 - DNA, 25 bp, Canis familiaris
gagatgcaacgggccaacaaggact

SEQ ID NO: 121539 - DNA, 25 bp, Canis familiaris
gagagaggcgggagcacgacgctct

SEQ ID NO: 121540 - DNA, 25 bp, Canis familiaris
gagagcgaggaggacgacgacgatg

SEQ ID NO: 121541 - DNA, 25 bp, Canis familiaris
gagagacagggcaggatccacgtgc

SEQ ID NO: 121542 - DNA, 25 bp, Canis familiaris
gagagccaggactgggctcaggctc

SEQ ID NO: 121543 - DNA, 25 bp, Canis familiaris
gagaggcagtggtgactgtgggctc

SEQ ID NO: 121544 - DNA, 25 bp, Canis familiaris
gagaggggacaaaatggaggcagga

SEQ ID NO: 121545 - DNA, 25 bp, Canis familiaris
gagaggccccaatggtgaagctgga

SEQ ID NO: 121546 - DNA, 25 bp, Canis familiaris
gagagccacccaagggaaggttgga

SEQ ID NO: 121547 - DNA, 25 bp, Canis familiaris
gagagtccctgcagggaggtgtacg

SEQ ID NO: 121548 - DNA, 25 bp, Canis familiaris
gagagttctctgtgggtggtgccac

SEQ ID NO: 121549 - DNA, 25 bp, Canis familiaris
gagagttgcacgagacgtggcgcac

SEQ ID NO: 121550 - DNA, 25 bp, Canis familiaris
gagaggatacagtggcagtggcagt

SEQ ID NO: 121551 - DNA, 25 bp, Canis familiaris
gagagtgtatggaggcagttatatc

SEQ ID NO: 121552 - DNA, 25 bp, Canis familiaris
gagacctgtggacgagaagctatca

SEQ ID NO: 121553 - DNA, 25 bp, Canis familiaris
gagaggtgttaccaaagcccttttg

SEQ ID NO: 121554 - DNA, 25 bp, Canis familiaris
gagagtgggaacaagtgggcctttt

SEQ ID NO: 121555 - DNA, 25 bp, Canis familiaris
gagagttaacactttgggacttcaa

SEQ ID NO: 121556 - DNA, 25 bp, Canis familiaris
gagagctaagcccttaggggctgtc

SEQ ID NO: 121557 - DNA, 25 bp, Canis familiaris
gagagctaaacgcttgtttctgtct

SEQ ID NO: 121558 - DNA, 25 bp, Canis familiaris
gagagccaaagcaggggtgtggcct

SEQ ID NO: 121559 - DNA, 25 bp, Canis familiaris
gagagccaggacttgtggggtgggt

SEQ ID NO: 121560 - DNA, 25 bp, Canis familiaris
gagagcgagaccatgggggtatgtt

SEQ ID NO: 121561 - DNA, 25 bp, Canis familiaris
gagagagaagagggggtgtggatta

SEQ ID NO: 121562 - DNA, 25 bp, Canis familiaris
gagagaacagaggagacagcttggc

SEQ ID NO: 121563 - DNA, 25 bp, Canis familiaris
gagagcatataaatggaagcctgag

SEQ ID NO: 121564 - DNA, 25 bp, Canis familiaris
gagagctggcaaaggcaaaatgaga

SEQ ID NO: 121565 - DNA, 25 bp, Canis familiaris
gagacctgagcaaggcaaaagggcc

SEQ ID NO: 121566 - DNA, 25 bp, Canis familiaris
gagagccggaagcacatacaggatg

SEQ ID NO: 121567 - DNA, 25 bp, Canis familiaris
gagagccaggagacaatatacaata

SEQ ID NO: 121568 - DNA, 25 bp, Canis familiaris
gagaccaacgtccaaacatcagaac

SEQ ID NO: 121569 - DNA, 25 bp, Canis familiaris
gagaccacttttaactcatcatgaa

SEQ ID NO: 121570 - DNA, 25 bp, Canis familiaris
gagaccattttataatccatgttaa

SEQ ID NO: 121571 - DNA, 25 bp, Canis familiaris
gagagccttttaatcaagcccttca

SEQ ID NO: 121572 - DNA, 25 bp, Canis familiaris
gagaccttgctggaagatacccttc

SEQ ID NO: 121573 - DNA, 25 bp, Canis familiaris
gagtcagctagagactggtcccttc

SEQ ID NO: 121574 - DNA, 25 bp, Canis familiaris
gagaccttggtatggtgcagccttt

SEQ ID NO: 121575 - DNA, 25 bp, Canis familiaris
gagagcacttggattatgggtctga

SEQ ID NO: 121576 - DNA, 25 bp, Canis familiaris
gagagaccgtgaaagatctgggcga

SEQ ID NO: 121577 - DNA, 25 bp, Canis familiaris
gagagaccgtgctaattatgaagaa

SEQ ID NO: 121578 - DNA, 25 bp, Canis familiaris
gagatcccctggcttgcagaaaatc

SEQ ID NO: 121579 - DNA, 25 bp, Canis familiaris
gagtccaccggtgtaggaacgcatc

SEQ ID NO: 121580 - DNA, 25 bp, Canis familiaris
gagaccccggagaggagagacgatc

SEQ ID NO: 121581 - DNA, 25 bp, Canis familiaris
gagttcccgtggagaaaccgagcca

SEQ ID NO: 121582 - DNA, 25 bp, Canis familiaris
gaggtctccttgctacaaaaaacac

SEQ ID NO: 121583 - DNA, 25 bp, Canis familiaris
gagattcccctgcatcagaaataaa

SEQ ID NO: 121584 - DNA, 25 bp, Canis familiaris
gagttgaccctggatcactgaagac

SEQ ID NO: 121585 - DNA, 25 bp, Canis familiaris
gagttactgctctatgaatctgggg

SEQ ID NO: 121586 - DNA, 25 bp, Canis familiaris
gagagctacactttgtactggaaga

SEQ ID NO: 121587 - DNA, 25 bp, Canis familiaris
gagagctaacatggatggactgaag

SEQ ID NO: 121588 - DNA, 25 bp, Canis familiaris
gagagccacacaaggtcacaaatcg

SEQ ID NO: 121589 - DNA, 25 bp, Canis familiaris
gagagccccatcagtgaaaactcac

SEQ ID NO: 121590 - DNA, 25 bp, Canis familiaris
gagaggcctctacagaacacaaagc

SEQ ID NO: 121591 - DNA, 25 bp, Canis familiaris
gagaccattctacacaatcaagcgg

SEQ ID NO: 121592 - DNA, 25 bp, Canis familiaris
gagaccattcaaaccgcatcaagtt

SEQ ID NO: 121593 - DNA, 25 bp, Canis familiaris
gagagccctaccgggctcttgtttt

SEQ ID NO: 121594 - DNA, 25 bp, Canis familiaris
gagagccaatacacgttctttcttt

SEQ ID NO: 121595 - DNA, 25 bp, Canis familiaris
gagagaccaagctctttttacttga

SEQ ID NO: 121596 - DNA, 25 bp, Canis familiaris
gagagtgccaacatttggattacgg

SEQ ID NO: 121597 - DNA, 25 bp, Canis familiaris
gagttccgaccaatgggcttcggcc

SEQ ID NO: 121598 - DNA, 25 bp, Canis familiaris
gttcccctccagaggttccagaaag

SEQ ID NO: 121599 - DNA, 25 bp, Canis familiaris
gttcccaattcgtggggagcgaacg

SEQ ID NO: 121600 - DNA, 25 bp, Canis familiaris
gattttcaaaggtggggagggcagg

SEQ ID NO: 121601 - DNA, 25 bp, Canis familiaris
gagtttcaagaacctgggtgggcag

SEQ ID NO: 121602 - DNA, 25 bp, Canis familiaris
gagagttccagcacggggtggggat

SEQ ID NO: 121603 - DNA, 25 bp, Canis familiaris
gagggggtactgtgggatggggatc

SEQ ID NO: 121604 - DNA, 25 bp, Canis familiaris
gagggaggttcagccagggtggaga

SEQ ID NO: 121605 - DNA, 25 bp, Canis familiaris
gagagaagggaagcaagggtagaaa

SEQ ID NO: 121606 - DNA, 25 bp, Canis familiaris
gagagggagaacagaaggggcagaa

SEQ ID NO: 121607 - DNA, 25 bp, Canis familiaris
gagttggaaactcaactgactgagc

SEQ ID NO: 121608 - DNA, 25 bp, Canis familiaris
gattttgccaaataactaggaccca

SEQ ID NO: 121609 - DNA, 25 bp, Canis familiaris
gttgttcctaagatttttataccat

SEQ ID NO: 121610 - DNA, 25 bp, Canis familiaris
gagtgttttcacattttttaagact

SEQ ID NO: 121611 - DNA, 25 bp, Canis familiaris
gagtcctagcacggtttttgtaaag

SEQ ID NO: 121612 - DNA, 25 bp, Canis familiaris
gagacctacacagtgaactttgggg

SEQ ID NO: 121613 - DNA, 25 bp, Canis familiaris
gagacctacacatacatttctggta

SEQ ID NO: 121614 - DNA, 25 bp, Canis familiaris
gagaggtctccataatctcttggga

SEQ ID NO: 121615 - DNA, 25 bp, Canis familiaris
gagaggtgtctggaaaccatgcatg

SEQ ID NO: 121616 - DNA, 25 bp, Canis familiaris
gagagcacgtctctaagccaaggct

SEQ ID NO: 121617 - DNA, 25 bp, Canis familiaris
gagaccagttgttgcatgtgccagg

SEQ ID NO: 121618 - DNA, 25 bp, Canis familiaris
gagaccagattaacagctgctaagc

SEQ ID NO: 121619 - DNA, 25 bp, Canis familiaris
gagaccaacgcaaccatgatgaggc

SEQ ID NO: 121620 - DNA, 25 bp, Canis familiaris
gagaccagacttagcttagtgcagc

SEQ ID NO: 121621 - DNA, 25 bp, Canis familiaris
gagaccagcctgaaattgggatcta

SEQ ID NO: 121622 - DNA, 25 bp, Canis familiaris
gagagcaacctgaattcgtgagatt

SEQ ID NO: 121623 - DNA, 25 bp, Canis familiaris
gagagacaccggttctttgatgtag

SEQ ID NO: 121624 - DNA, 25 bp, Canis familiaris
gagagaagacgggtgtgtgtgtgtg

SEQ ID NO: 121625 - DNA, 25 bp, Canis familiaris
gagatgaaggccgtgtgcgtgttga

SEQ ID NO: 121626 - DNA, 25 bp, Canis familiaris
gagagaagtcaatgtctggctttaa

SEQ ID NO: 121627 - DNA, 25 bp, Canis familiaris
gagagaaccagatgtgctacctaag

SEQ ID NO: 121628 - DNA, 25 bp, Canis familiaris
gagagaagggatggtgctttccaga

SEQ ID NO: 121629 - DNA, 25 bp, Canis familiaris
gagagggctggatgatttgattgga

SEQ ID NO: 121630 - DNA, 25 bp, Canis familiaris
gagagaggcccatgtgtgtgtgtgg

SEQ ID NO: 121631 - DNA, 25 bp, Canis familiaris
gagagaagtcgcaaatctgtttcgg

SEQ ID NO: 121632 - DNA, 25 bp, Canis familiaris
gagatgggtgctgagacttccacgg

SEQ ID NO: 121633 - DNA, 25 bp, Canis familiaris
gagatcgacttcaaggagtacacgg

SEQ ID NO: 121634 - DNA, 25 bp, Canis familiaris
gagaccatctcttaggagcataaca

SEQ ID NO: 121635 - DNA, 25 bp, Canis familiaris
gagaccatccatttgaagaccatct

SEQ ID NO: 121636 - DNA, 25 bp, Canis familiaris
gagaccacagtatgcagagatcctt

SEQ ID NO: 121637 - DNA, 25 bp, Canis familiaris
gagacctcagtgtgaactcatgttt

SEQ ID NO: 121638 - DNA, 25 bp, Canis familiaris
gagaggctatggaagaatttttttt

SEQ ID NO: 121639 - DNA, 25 bp, Canis familiaris
gagatggtcaaagtaaatctttttt

SEQ ID NO: 121640 - DNA, 25 bp, Canis familiaris
gagaggtctaaggagcaaacttctt

SEQ ID NO: 121641 - DNA, 25 bp, Canis familiaris
gagagacctaagagggagtcttgat

SEQ ID NO: 121642 - DNA, 25 bp, Canis familiaris
gggccttagatatgtcggtttgtcc

SEQ ID NO: 121643 - DNA, 25 bp, Canis familiaris
gagagcgtttaattgttggtttttg

SEQ ID NO: 121644 - DNA, 25 bp, Canis familiaris
gagagctcctgttgatggtgttttt

SEQ ID NO: 121645 - DNA, 25 bp, Canis familiaris
gagagctttgtacagtggcattatc

SEQ ID NO: 121646 - DNA, 25 bp, Canis familiaris
gagagctcttcaaaataccattttc

SEQ ID NO: 121647 - DNA, 25 bp, Canis familiaris
gagagtcctatgaacttcctacctc

SEQ ID NO: 121648 - DNA, 25 bp, Canis familiaris
gagagcccatagagttcttgacttt

SEQ ID NO: 121649 - DNA, 25 bp, Canis familiaris
gagatgccaatcttacttttgaatt

SEQ ID NO: 121650 - DNA, 25 bp, Canis familiaris
gagaccaataacattttgccacttg

SEQ ID NO: 121651 - DNA, 25 bp, Canis familiaris
gagaccagtaacactttccatagga

SEQ ID NO: 121652 - DNA, 25 bp, Canis familiaris
gagaccagtagctttcttggcctac

SEQ ID NO: 121653 - DNA, 25 bp, Canis familiaris
gagaccagatacatctttccgagaa

SEQ ID NO: 121654 - DNA, 25 bp, Canis familiaris
gagaccagcagacagggaccgaaga

SEQ ID NO: 121655 - DNA, 25 bp, Canis familiaris
gagagctcaaagtcgggaccggatg

SEQ ID NO: 121656 - DNA, 25 bp, Canis familiaris
gagagctatcaaactgtgggcccaa

SEQ ID NO: 121657 - DNA, 25 bp, Canis familiaris
gagagctgctaagctgcttggtccc

SEQ ID NO: 121658 - DNA, 25 bp, Canis familiaris
gagagtctaagccttatggctgtct

SEQ ID NO: 121659 - DNA, 25 bp, Canis familiaris
gagagtgtgcactgttcaggctgtc

SEQ ID NO: 121660 - DNA, 25 bp, Canis familiaris
gagagggagaggatcgtgcttttta

SEQ ID NO: 121661 - DNA, 25 bp, Canis familiaris
gagagaggaaggactggtgtttcat

SEQ ID NO: 121662 - DNA, 25 bp, Canis familiaris
gagatgggaggagctggttgtatag

SEQ ID NO: 121663 - DNA, 25 bp, Canis familiaris
gagatggcaatggattcaggtttaa

SEQ ID NO: 121664 - DNA, 25 bp, Canis familiaris
gagaggcacaggctcagcaactctc

SEQ ID NO: 121665 - DNA, 25 bp, Canis familiaris
gagagatgaaggccatacaggatcc

SEQ ID NO: 121666 - DNA, 25 bp, Canis familiaris
gagagtgacaacaatacggccctgc

SEQ ID NO: 121667 - DNA, 25 bp, Canis familiaris
gagaggcaagccaatacacgtaggc

SEQ ID NO: 121668 - DNA, 25 bp, Canis familiaris
gagaggctccagataatcgtcaagt

SEQ ID NO: 121669 - DNA, 25 bp, Canis familiaris
gagagctgtttgatacacccaactg

SEQ ID NO: 121670 - DNA, 25 bp, Canis familiaris
gagagctgtgggctacacgcatata

SEQ ID NO: 121671 - DNA, 25 bp, Canis familiaris
gagagtgtgggaggcatccccaaac

SEQ ID NO: 121672 - DNA, 25 bp, Canis familiaris
gagagagaaggggctacccaggcag

SEQ ID NO: 121673 - DNA, 25 bp, Canis familiaris
gagagacctggaggtgacccgtaga

SEQ ID NO: 121674 - DNA, 25 bp, Canis familiaris
gagagcctggagtcagagacccagc

SEQ ID NO: 121675 - DNA, 25 bp, Canis familiaris
gagagctgggggccatacatgccct

SEQ ID NO: 121676 - DNA, 25 bp, Canis familiaris
gagaggggctgtcagcaaggctctg

SEQ ID NO: 121677 - DNA, 25 bp, Canis familiaris
gagagaaccgtgcgcaagatctgtg

SEQ ID NO: 121678 - DNA, 25 bp, Canis familiaris
gagagaacctcaaacatagcatgtg

SEQ ID NO: 121679 - DNA, 25 bp, Canis familiaris
gagagcaatgacccagacagacact

SEQ ID NO: 121680 - DNA, 25 bp, Canis familiaris
gagagccacagagtctacagagcac

SEQ ID NO: 121681 - DNA, 25 bp, Canis familiaris
gagagcgcaagagcacacgcaacca

SEQ ID NO: 121682 - DNA, 25 bp, Canis familiaris
gagagaaatgccaacaggaaccagc

SEQ ID NO: 121683 - DNA, 25 bp, Canis familiaris
gagagacctgctaataggccaccac

SEQ ID NO: 121684 - DNA, 25 bp, Canis familiaris
gagagatatccagaaggcccagcat

SEQ ID NO: 121685 - DNA, 25 bp, Canis familiaris
gagagaatctctgcacatggttggt

SEQ ID NO: 121686 - DNA, 25 bp, Canis familiaris
gagataagctcagctcactcttggg

SEQ ID NO: 121687 - DNA, 25 bp, Canis familiaris
gagagagaccctcactgctggggag

SEQ ID NO: 121688 - DNA, 25 bp, Canis familiaris
gagagagaccctcactgctggggag

SEQ ID NO: 121689 - DNA, 25 bp, Canis familiaris
gagagagcaagcacaatttgggggt

SEQ ID NO: 121690 - DNA, 25 bp, Canis familiaris
gagagagagtgcacacacagtggtg

SEQ ID NO: 121691 - DNA, 25 bp, Canis familiaris
gagagaggggaaacagcatagcagt

SEQ ID NO: 121692 - DNA, 25 bp, Canis familiaris
gagagagggaatagagcacatgtga

SEQ ID NO: 121693 - DNA, 25 bp, Canis familiaris
gagagaggagtcatgccaagtgcat

SEQ ID NO: 121694 - DNA, 25 bp, Canis familiaris
gagaggcgtgaactgcctgtgctct

SEQ ID NO: 121695 - DNA, 25 bp, Canis familiaris
gagagagcctgatatttgtcctgtc

SEQ ID NO: 121696 - DNA, 25 bp, Canis familiaris
gagatggcagatttgttttcacttt

SEQ ID NO: 121697 - DNA, 25 bp, Canis familiaris
gagagagcacaaatgtccatcaact

SEQ ID NO: 121698 - DNA, 25 bp, Canis familiaris
gatgaagtcaaggtcagtcaactcc

SEQ ID NO: 121699 - DNA, 25 bp, Canis familiaris
gagtcgctcacagcagcgtaacttc

SEQ ID NO: 121700 - DNA, 25 bp, Canis familiaris
gatctggcaagctttgggaactttt

SEQ ID NO: 121701 - DNA, 25 bp, Canis familiaris
gagagactaggagtgtggaactttt

SEQ ID NO: 121702 - DNA, 25 bp, Canis familiaris
gagagaaatgatgcattgtacagtt

SEQ ID NO: 121703 - DNA, 25 bp, Canis familiaris
gagagaagcagagacccacagactg

SEQ ID NO: 121704 - DNA, 25 bp, Canis familiaris
gagagaggcaaaacccaggccgagg

SEQ ID NO: 121705 - DNA, 25 bp, Canis familiaris
gagagagcctcatgaaccagagccg

SEQ ID NO: 121706 - DNA, 25 bp, Canis familiaris
gagagccctatgaatacacaagcca

SEQ ID NO: 121707 - DNA, 25 bp, Canis familiaris
gagatttcacgtttgccaacatcat

SEQ ID NO: 121708 - DNA, 25 bp, Canis familiaris
gagagtgaccgttttctgcatatca

SEQ ID NO: 121709 - DNA, 25 bp, Canis familiaris
gagagtccttgtttttgctactaat

SEQ ID NO: 121710 - DNA, 25 bp, Canis familiaris
gagttccattgtgcctactaaaata

SEQ ID NO: 121711 - DNA, 25 bp, Canis familiaris
gagtatccacgggcacgggaaacca

SEQ ID NO: 121712 - DNA, 25 bp, Canis familiaris
gagttcccagtcagcggagcaaact

SEQ ID NO: 121713 - DNA, 25 bp, Canis familiaris
gagattcaccgactcagcaggacac

SEQ ID NO: 121714 - DNA, 25 bp, Canis familiaris
gagttcacaggagactggcaccacg

SEQ ID NO: 121715 - DNA, 25 bp, Canis familiaris
gagttggggatggcaaggcctcctg

SEQ ID NO: 121716 - DNA, 25 bp, Canis familiaris
gagagggggtgtgaggtgtcttgtc

SEQ ID NO: 121717 - DNA, 25 bp, Canis familiaris
gagagggggctagagcaggtcttct

SEQ ID NO: 121718 - DNA, 25 bp, Canis familiaris
gagagggggcctggcagaggccttc

SEQ ID NO: 121719 - DNA, 25 bp, Canis familiaris
gagaggggtgtcccagaaggcttcc

SEQ ID NO: 121720 - DNA, 25 bp, Canis familiaris
gagagggcctccaggaagagctgat

SEQ ID NO: 121721 - DNA, 25 bp, Canis familiaris
gagagtggcctcaaaggaggagtga

SEQ ID NO: 121722 - DNA, 25 bp, Canis familiaris
gagattggccctgatggaagagtga

SEQ ID NO: 121723 - DNA, 25 bp, Canis familiaris
gagatgtccccctaggtgatggaag

SEQ ID NO: 121724 - DNA, 25 bp, Canis familiaris
gagaggcccccatgtgatgggagca

SEQ ID NO: 121725 - DNA, 25 bp, Canis familiaris
gagagccccattgagtggaggtcac

SEQ ID NO: 121726 - DNA, 25 bp, Canis familiaris
gagagcccctctgagatgagaagcg

SEQ ID NO: 121727 - DNA, 25 bp, Canis familiaris
gagagctcacctccagtgaagtggc

SEQ ID NO: 121728 - DNA, 25 bp, Canis familiaris
gagagtacctgattgagaagctgct

SEQ ID NO: 121729 - DNA, 25 bp, Canis familiaris
gagagttcactgtcaggatggcctt

SEQ ID NO: 121730 - DNA, 25 bp, Canis familiaris
gagagcagtactgcactctgtctcc

SEQ ID NO: 121731 - DNA, 25 bp, Canis familiaris
gagatgcagaatacaccctgtctcc

SEQ ID NO: 121732 - DNA, 25 bp, Canis familiaris
gagagaacattgtctccatcactca

SEQ ID NO: 121733 - DNA, 25 bp, Canis familiaris
gagagcaacatttctaatacaggta

SEQ ID NO: 121734 - DNA, 25 bp, Canis familiaris
gagagagtcatttacacacacaagt

SEQ ID NO: 121735 - DNA, 25 bp, Canis familiaris
gaggaatatttatcaaactattagc

SEQ ID NO: 121736 - DNA, 25 bp, Canis familiaris
gagatgactgaatagaaaccaaata

SEQ ID NO: 121737 - DNA, 25 bp, Canis familiaris
gagagactgtaaagcgaatccggga

SEQ ID NO: 121738 - DNA, 25 bp, Canis familiaris
gagagccttaaacaatgccatgtga

SEQ ID NO: 121739 - DNA, 25 bp, Canis familiaris
gagagtcttaagtagactccatgct

SEQ ID NO: 121740 - DNA, 25 bp, Canis familiaris
gagagctgcattccagaaactcaat

SEQ ID NO: 121741 - DNA, 25 bp, Canis familiaris
gagaggcattctcaaacatcatgta

SEQ ID NO: 121742 - DNA, 25 bp, Canis familiaris
gagaggcttctcaggatgtctgaac

SEQ ID NO: 121743 - DNA, 25 bp, Canis familiaris
gagagactcctaagcggactgcaca

SEQ ID NO: 121744 - DNA, 25 bp, Canis familiaris
gagagaccctcactgctggggagtc

SEQ ID NO: 121745 - DNA, 25 bp, Canis familiaris
gagagaccaatacatgaggacaggc

SEQ ID NO: 121746 - DNA, 25 bp, Canis familiaris
gagagagtgcatgagcatgagtgaa

SEQ ID NO: 121747 - DNA, 25 bp, Canis familiaris
gagagcagagcagagacagaagcaa

SEQ ID NO: 121748 - DNA, 25 bp, Canis familiaris
gagagcgagagcgagcagcagaggg

SEQ ID NO: 121749 - DNA, 25 bp, Canis familiaris
gagagctgctgaagagggaggatga

SEQ ID NO: 121750 - DNA, 25 bp, Canis familiaris
gagagtgggcaactgtggacatgtg

SEQ ID NO: 121751 - DNA, 25 bp, Canis familiaris
gagagactggccagatgcaacagga

SEQ ID NO: 121752 - DNA, 25 bp, Canis familiaris
gagatgaccgccagcaaacgggtgg

SEQ ID NO: 121753 - DNA, 25 bp, Canis familiaris
gagagtgcagccaggaggacgggtg

SEQ ID NO: 121754 - DNA, 25 bp, Canis familiaris
gagagtgagctggagacggaagtgg

SEQ ID NO: 121755 - DNA, 25 bp, Canis familiaris
gagaggggccgacggaactgactga

SEQ ID NO: 121756 - DNA, 25 bp, Canis familiaris
gagaggggacgacggttcgattgac

SEQ ID NO: 121757 - DNA, 25 bp, Canis familiaris
gagaggacgagccacagagtctaga

SEQ ID NO: 121758 - DNA, 25 bp, Canis familiaris
gagagagcgctgtgacgcgttagca

SEQ ID NO: 121759 - DNA, 25 bp, Canis familiaris
gagagtcacatgttcacgcctgaac

SEQ ID NO: 121760 - DNA, 25 bp, Canis familiaris
gagagaagcatgttgcctcgggtct

SEQ ID NO: 121761 - DNA, 25 bp, Canis familiaris
gagagaggcatagggcgcgtggagg

SEQ ID NO: 121762 - DNA, 25 bp, Canis familiaris
gagagcaggctgaggagggtgtgac

SEQ ID NO: 121763 - DNA, 25 bp, Canis familiaris
gagagagtgcacacacagtggtgga

SEQ ID NO: 121764 - DNA, 25 bp, Canis familiaris
gagagtcagcgttccagatggttag

SEQ ID NO: 121765 - DNA, 25 bp, Canis familiaris
gagagaggtgtctgcagtcgtcaac

SEQ ID NO: 121766 - DNA, 25 bp, Canis familiaris
gagatatatgtgtggagtcctaacc

SEQ ID NO: 121767 - DNA, 25 bp, Canis familiaris
gagagctatgtgtgtggctcaatag

SEQ ID NO: 121768 - DNA, 25 bp, Canis familiaris
gagagcataggggctggccttcagt

SEQ ID NO: 121769 - DNA, 25 bp, Canis familiaris
gagagctaagccttaggctgtcttc

SEQ ID NO: 121770 - DNA, 25 bp, Canis familiaris
gagagctaaccttagctgcttccat

SEQ ID NO: 121771 - DNA, 25 bp, Canis familiaris
gagagctaactcaggcaatgtcttg

SEQ ID NO: 121772 - DNA, 25 bp, Canis familiaris
gagagtaatctcagcatcaagtgtt

SEQ ID NO: 121773 - DNA, 25 bp, Canis familiaris
gagagtcctggaagccaagtgcagt

SEQ ID NO: 121774 - DNA, 25 bp, Canis familiaris
gagagctcctggaggcagctagctg

SEQ ID NO: 121775 - DNA, 25 bp, Canis familiaris
gagagtcctcgtttgttgactgttt

SEQ ID NO: 121776 - DNA, 25 bp, Canis familiaris
gagagttcgagtatttgacggtgta

SEQ ID NO: 121777 - DNA, 25 bp, Canis familiaris
gagatttcccttatgtacggaatcc

SEQ ID NO: 121778 - DNA, 25 bp, Canis familiaris
gagatggcaccaactttgtcctggt

SEQ ID NO: 121779 - DNA, 25 bp, Canis familiaris
gagagagcaaaacttctgtcccttc

SEQ ID NO: 121780 - DNA, 25 bp, Canis familiaris
gagagagaaccactttcacgacgtc

SEQ ID NO: 121781 - DNA, 25 bp, Canis familiaris
gagaggaaacctaagcagcccgtgc

SEQ ID NO: 121782 - DNA, 25 bp, Canis familiaris
gagagacaaaggagacatcccggca

SEQ ID NO: 121783 - DNA, 25 bp, Canis familiaris
gagatgaaaagtcccagtcctgcgg

SEQ ID NO: 121784 - DNA, 25 bp, Canis familiaris
gagagaaccaggaccgagcctgcag

SEQ ID NO: 121785 - DNA, 25 bp, Canis familiaris
gagagaaaaggcgcgagcggccgag

SEQ ID NO: 121786 - DNA, 25 bp, Canis familiaris
gagtaagaagagccggaagcccgat

SEQ ID NO: 121787 - DNA, 25 bp, Canis familiaris
gagtttgaaatgcgcgggtccagtt

SEQ ID NO: 121788 - DNA, 25 bp, Canis familiaris
gagattcagaaatggggcagttatt

SEQ ID NO: 121789 - DNA, 25 bp, Canis familiaris
gagattctaaatagtcctcgttaaa

SEQ ID NO: 121790 - DNA, 25 bp, Canis familiaris
gagttcgaagttcagttgggactaa

SEQ ID NO: 121791 - DNA, 25 bp, Canis familiaris
gagattcaaaggcccctggagtgac

SEQ ID NO: 121792 - DNA, 25 bp, Canis familiaris
gagtgtagagacaggcctgggggcc

SEQ ID NO: 121793 - DNA, 25 bp, Canis familiaris
gagttgacacaatgggtgggggaaa

SEQ ID NO: 121794 - DNA, 25 bp, Canis familiaris
gagattcaccagtaaggggagggag

SEQ ID NO: 121795 - DNA, 25 bp, Canis familiaris
gagattagaagtcagagggtgcggt

SEQ ID NO: 121796 - DNA, 25 bp, Canis familiaris
gagtagacagttcagggagttccat

SEQ ID NO: 121797 - DNA, 25 bp, Canis familiaris
gagtaaagggtctttgagttggtcg

SEQ ID NO: 121798 - DNA, 25 bp, Canis familiaris
ggtaacggtgcctgtggttggaaag

SEQ ID NO: 121799 - DNA, 25 bp, Canis familiaris
gagtacacggggagagctggcggaa

SEQ ID NO: 121800 - DNA, 25 bp, Canis familiaris
gagatgaccgtgggttgatccacgg

SEQ ID NO: 121801 - DNA, 25 bp, Canis familiaris
gagagacagcgcggcagtttgccac

SEQ ID NO: 121802 - DNA, 25 bp, Canis familiaris
gagagaatgcttgagacttcactca

SEQ ID NO: 121803 - DNA, 25 bp, Canis familiaris
gagagagtagtgtgtttcacgcata

SEQ ID NO: 121804 - DNA, 25 bp, Canis familiaris
gagagagaagagtctgtttcaggat

SEQ ID NO: 121805 - DNA, 25 bp, Canis familiaris
gagaggaaagcttggtgtcgtcatg

SEQ ID NO: 121806 - DNA, 25 bp, Canis familiaris
gagatggtgaactgttttgtcagaa

SEQ ID NO: 121807 - DNA, 25 bp, Canis familiaris
gagagtgtatgcctcctatctttaa

SEQ ID NO: 121808 - DNA, 25 bp, Canis familiaris
gagagacttgcagttcttctttaac

SEQ ID NO: 121809 - DNA, 25 bp, Canis familiaris
gagagactggcaatttgaccttcaa

SEQ ID NO: 121810 - DNA, 25 bp, Canis familiaris
gagagtctgtgaagatcgtcctaga

SEQ ID NO: 121811 - DNA, 25 bp, Canis familiaris
gagagttcttggagtgccttgaaaa

SEQ ID NO: 121812 - DNA, 25 bp, Canis familiaris
gagagtctttgtgttgcacattaaa

SEQ ID NO: 121813 - DNA, 25 bp, Canis familiaris
gagagaatcttttttgccatgtatg

SEQ ID NO: 121814 - DNA, 25 bp, Canis familiaris
gagagaattatttcagtgacgctat

SEQ ID NO: 121815 - DNA, 25 bp, Canis familiaris
gagagaggtgaaatcattacagata

SEQ ID NO: 121816 - DNA, 25 bp, Canis familiaris
gagagctttgatagtttcacactga

SEQ ID NO: 121817 - DNA, 25 bp, Canis familiaris
gagagcttctatagttcctttacag

SEQ ID NO: 121818 - DNA, 25 bp, Canis familiaris
gagagctttgtgtttcagtttgccc

SEQ ID NO: 121819 - DNA, 25 bp, Canis familiaris
gagagacttgttttggatgctcccc

SEQ ID NO: 121820 - DNA, 25 bp, Canis familiaris
gagatgtttatcatcggtgcccagc

SEQ ID NO: 121821 - DNA, 25 bp, Canis familiaris
gagatttaatgcttgagacccctcc

SEQ ID NO: 121822 - DNA, 25 bp, Canis familiaris
gagatgttgcagtcaggaaccccaa

SEQ ID NO: 121823 - DNA, 25 bp, Canis familiaris
gagagtggcagtttgcatggcgaac

SEQ ID NO: 121824 - DNA, 25 bp, Canis familiaris
gagagacatggaattggagcagaga

SEQ ID NO: 121825 - DNA, 25 bp, Canis familiaris
gagagagatgcgtttgtgacaactg

SEQ ID NO: 121826 - DNA, 25 bp, Canis familiaris
gagagagagcgctctggcgcacaag

SEQ ID NO: 121827 - DNA, 25 bp, Canis familiaris
gagagaacagcaacaaccagaataa

SEQ ID NO: 121828 - DNA, 25 bp, Canis familiaris
gagagacctcaccagggcagagatt

SEQ ID NO: 121829 - DNA, 25 bp, Canis familiaris
gagagacgccacgagcgacgatgta

SEQ ID NO: 121830 - DNA, 25 bp, Canis familiaris
gagagacctgcatccatacatgttt

SEQ ID NO: 121831 - DNA, 25 bp, Canis familiaris
gagagacttgtacatagtgtagatc

SEQ ID NO: 121832 - DNA, 25 bp, Canis familiaris
gagagcactgttttaagtattccaa

SEQ ID NO: 121833 - DNA, 25 bp, Canis familiaris
gagagcatttcttatgacttatttt

SEQ ID NO: 121834 - DNA, 25 bp, Canis familiaris
gagagcaggtcttcttttcattttc

SEQ ID NO: 121835 - DNA, 25 bp, Canis familiaris
gagagaatttagcttactttcatct

SEQ ID NO: 121836 - DNA, 25 bp, Canis familiaris
gagagaatccaactatgtaatattt

SEQ ID NO: 121837 - DNA, 25 bp, Canis familiaris
gagataagcaagtctttcagacctt

SEQ ID NO: 121838 - DNA, 25 bp, Canis familiaris
gagtaacggccaaggcaaccattat

SEQ ID NO: 121839 - DNA, 25 bp, Canis familiaris
ggtagtcgccgtgcctaccatggtg

SEQ ID NO: 121840 - DNA, 25 bp, Canis familiaris
gagatgaggccatgtgcacctaaat

SEQ ID NO: 121841 - DNA, 25 bp, Canis familiaris
gagagaccactgtggccttacatcg

SEQ ID NO: 121842 - DNA, 25 bp, Canis familiaris
gagagacacactttacgattgcttg

SEQ ID NO: 121843 - DNA, 25 bp, Canis familiaris
gagagtcacactctcacgttttgca

SEQ ID NO: 121844 - DNA, 25 bp, Canis familiaris
gagagtgtatatctacgatgctcat

SEQ ID NO: 121845 - DNA, 25 bp, Canis familiaris
gagaggcaatcaatgaaggatccag

SEQ ID NO: 121846 - DNA, 25 bp, Canis familiaris
gagagcacgacaatcacagttcaca

SEQ ID NO: 121847 - DNA, 25 bp, Canis familiaris
gagatgtcgaccgagcaagtcacga

SEQ ID NO: 121848 - DNA, 25 bp, Canis familiaris
gagttctgcagccaaggtgttcgtg

SEQ ID NO: 121849 - DNA, 25 bp, Canis familiaris
gagttccacaccagagttggacggg

SEQ ID NO: 121850 - DNA, 25 bp, Canis familiaris
gatttcccaccgtgttagttaggtg

SEQ ID NO: 121851 - DNA, 25 bp, Canis familiaris
gttccccaagctctgttttgtagaa

SEQ ID NO: 121852 - DNA, 25 bp, Canis familiaris
ggtctgggaggtcttttttgaccag

SEQ ID NO: 121853 - DNA, 25 bp, Canis familiaris
gagtcgggcagtatttctaatttta

SEQ ID NO: 121854 - DNA, 25 bp, Canis familiaris
gagaggggaccaatatttataattt

SEQ ID NO: 121855 - DNA, 25 bp, Canis familiaris
gagagggagactatctgttgtaatg

SEQ ID NO: 121856 - DNA, 25 bp, Canis familiaris
gaggggaggtattttattaggtgat

SEQ ID NO: 121857 - DNA, 25 bp, Canis familiaris
gagaggggtcttttcattctagttc

SEQ ID NO: 121858 - DNA, 25 bp, Canis familiaris
gagagtgggtcaggttttgtagtac

SEQ ID NO: 121859 - DNA, 25 bp, Canis familiaris
gatttcgagtacctttctgaaccac

SEQ ID NO: 121860 - DNA, 25 bp, Canis familiaris
gatgcctggaagcgtatttaatacc

SEQ ID NO: 121861 - DNA, 25 bp, Canis familiaris
gagttggaatgttgtagttacctac

SEQ ID NO: 121862 - DNA, 25 bp, Canis familiaris
gagtggaaattagttggcccctact

SEQ ID NO: 121863 - DNA, 25 bp, Canis familiaris
gagtagggttactgggcccaatgcc

SEQ ID NO: 121864 - DNA, 25 bp, Canis familiaris
gagtattgaatttctttggccaacc

SEQ ID NO: 121865 - DNA, 25 bp, Canis familiaris
gagatttattttcagggccaaggca

SEQ ID NO: 121866 - DNA, 25 bp, Canis familiaris
gagatctataccgcttgggaaacgt

SEQ ID NO: 121867 - DNA, 25 bp, Canis familiaris
gagtttgaccccaatgccaagaaag

SEQ ID NO: 121868 - DNA, 25 bp, Canis familiaris
gagttttctgcccccagaaagactg

SEQ ID NO: 121869 - DNA, 25 bp, Canis familiaris
gagatttttggtccaccaatcgtca

SEQ ID NO: 121870 - DNA, 25 bp, Canis familiaris
gagagttttgttatccagacagctg

SEQ ID NO: 121871 - DNA, 25 bp, Canis familiaris
gagagttttctctgacaaaggctgc

SEQ ID NO: 121872 - DNA, 25 bp, Canis familiaris
gagagaatctttgtaatccaggtta

SEQ ID NO: 121873 - DNA, 25 bp, Canis familiaris
gaggtgtttaatgatgttcggttac

SEQ ID NO: 121874 - DNA, 25 bp, Canis familiaris
gagagtttccagattgtgctcagtt

SEQ ID NO: 121875 - DNA, 25 bp, Canis familiaris
gagagatttcccatatttccatcag

SEQ ID NO: 121876 - DNA, 25 bp, Canis familiaris
gagagttagcctgtaatgtcctgag

SEQ ID NO: 121877 - DNA, 25 bp, Canis familiaris
gagaggggcttcattggatctctga

SEQ ID NO: 121878 - DNA, 25 bp, Canis familiaris
gagaggagtcttctcaggactgcat

SEQ ID NO: 121879 - DNA, 25 bp, Canis familiaris
gagagagattttctgcgatacctac

SEQ ID NO: 121880 - DNA, 25 bp, Canis familiaris
gagaggtttgtctgcaggaccaagc

SEQ ID NO: 121881 - DNA, 25 bp, Canis familiaris
gagagtcttttcaactggacacaga

SEQ ID NO: 121882 - DNA, 25 bp, Canis familiaris
gagaggtcttttgcttgaagtgaga

SEQ ID NO: 121883 - DNA, 25 bp, Canis familiaris
gagagtctcttatcttttagtagaa

SEQ ID NO: 121884 - DNA, 25 bp, Canis familiaris
gagagttttgagccctggttgtaca

SEQ ID NO: 121885 - DNA, 25 bp, Canis familiaris
gagagtgtgatttgacctgtgatgt

SEQ ID NO: 121886 - DNA, 25 bp, Canis familiaris
gagagtgtgtgtgcaacatgtttgt

SEQ ID NO: 121887 - DNA, 25 bp, Canis familiaris
gagagtttgctcgaaatgtctcttc

SEQ ID NO: 121888 - DNA, 25 bp, Canis familiaris
gagagttctctcgacaaactatgtg

SEQ ID NO: 121889 - DNA, 25 bp, Canis familiaris
gagagttcaagcctcaagacaagag

SEQ ID NO: 121890 - DNA, 25 bp, Canis familiaris
gagagttccaggtaagaagaccagc

SEQ ID NO: 121891 - DNA, 25 bp, Canis familiaris
gagagatagccgggggaaaccagcc

SEQ ID NO: 121892 - DNA, 25 bp, Canis familiaris
gagagtaccgctattgaaggccctc

SEQ ID NO: 121893 - DNA, 25 bp, Canis familiaris
gagattaagtgcttttaagtcccta

SEQ ID NO: 121894 - DNA, 25 bp, Canis familiaris
gagtttcgtggtttgaacttcagaa

SEQ ID NO: 121895 - DNA, 25 bp, Canis familiaris
gagtttcggggaatattttgtggag

SEQ ID NO: 121896 - DNA, 25 bp, Canis familiaris
gagtgtccaggtgaaacgttgtaag

SEQ ID NO: 121897 - DNA, 25 bp, Canis familiaris
gagtatccgcccaaaaggccgaagg

SEQ ID NO: 121898 - DNA, 25 bp, Canis familiaris
gagttccagctttaattcctctagg

SEQ ID NO: 121899 - DNA, 25 bp, Canis familiaris
gagttccgcgtacgagtcaggtaat

SEQ ID NO: 121900 - DNA, 25 bp, Canis familiaris
gagttcgggtaggccgagatgggtg

SEQ ID NO: 121901 - DNA, 25 bp, Canis familiaris
gagtccggggactcggagatcgagc

SEQ ID NO: 121902 - DNA, 25 bp, Canis familiaris
gagtcgggagagagtccctgaccac

SEQ ID NO: 121903 - DNA, 25 bp, Canis familiaris
gagttaaacaatctcctgcgaaagg

SEQ ID NO: 121904 - DNA, 25 bp, Canis familiaris
gttaagcccaatatcccaaagggcg

SEQ ID NO: 121905 - DNA, 25 bp, Canis familiaris
gagtattcccaatgatcctcaacgg

SEQ ID NO: 121906 - DNA, 25 bp, Canis familiaris
gagtttcccactcttaattactgga

SEQ ID NO: 121907 - DNA, 25 bp, Canis familiaris
gagtggccccctgaacagaaaagtg

SEQ ID NO: 121908 - DNA, 25 bp, Canis familiaris
gagttcctacacaaacccaaaagat

SEQ ID NO: 121909 - DNA, 25 bp, Canis familiaris
gatttcctgaactaacccaaagagc

SEQ ID NO: 121910 - DNA, 25 bp, Canis familiaris
gatgttattgttgaacctccaagtg

SEQ ID NO: 121911 - DNA, 25 bp, Canis familiaris
gagatcatttgcacaacactttaaa

SEQ ID NO: 121912 - DNA, 25 bp, Canis familiaris
gagatcatttttctcccacaaaaaa

SEQ ID NO: 121913 - DNA, 25 bp, Canis familiaris
gagagttgtcccattaaccaaaagg

SEQ ID NO: 121914 - DNA, 25 bp, Canis familiaris
gagagtctgtacatttagacccaat

SEQ ID NO: 121915 - DNA, 25 bp, Canis familiaris
gagagtttatctgttatcaccccaa

SEQ ID NO: 121916 - DNA, 25 bp, Canis familiaris
gagattagttttaggaacctcacaa

SEQ ID NO: 121917 - DNA, 25 bp, Canis familiaris
gagttctttctttgatgaaccaaaa

SEQ ID NO: 121918 - DNA, 25 bp, Canis familiaris
gagattttgtattgctggaggctca

SEQ ID NO: 121919 - DNA, 25 bp, Canis familiaris
gagatttttcatgatgtggcatata

SEQ ID NO: 121920 - DNA, 25 bp, Canis familiaris
gagatcctgttagagattgaaacag

SEQ ID NO: 121921 - DNA, 25 bp, Canis familiaris
gagatgccagtgtgctagccaaaaa

SEQ ID NO: 121922 - DNA, 25 bp, Canis familiaris
gagagacagagaggcgggaaacaca

SEQ ID NO: 121923 - DNA, 25 bp, Canis familiaris
gagagacaaaagagacacacacaca

SEQ ID NO: 121924 - DNA, 25 bp, Canis familiaris
gagaggaggaagactagctgcacca

SEQ ID NO: 121925 - DNA, 25 bp, Canis familiaris
gagagggtggtgatcatgagctcaa

SEQ ID NO: 121926 - DNA, 25 bp, Canis familiaris
gagagaccgggaatatgagccaaat

SEQ ID NO: 121927 - DNA, 25 bp, Canis familiaris
gagagagccagccaaggagagccag

SEQ ID NO: 121928 - DNA, 25 bp, Canis familiaris
gagagagagctgagcctgaggccag

SEQ ID NO: 121929 - DNA, 25 bp, Canis familiaris
gagagagaagctggccatggtcaac

SEQ ID NO: 121930 - DNA, 25 bp, Canis familiaris
gagaggagcagtggccatcgtcctc

SEQ ID NO: 121931 - DNA, 25 bp, Canis familiaris
gagaggagttgtcatcctccatcct

SEQ ID NO: 121932 - DNA, 25 bp, Canis familiaris
gagagaggtctgtgctttctcatct

SEQ ID NO: 121933 - DNA, 25 bp, Canis familiaris
gagagagcacactggcatttctaca

SEQ ID NO: 121934 - DNA, 25 bp, Canis familiaris
gagaggctcacttgatggtgtgtac

SEQ ID NO: 121935 - DNA, 25 bp, Canis familiaris
gagagagttctagtgtgtgtgtgat

SEQ ID NO: 121936 - DNA, 25 bp, Canis familiaris
gagaggttgcagactgttttcaatt

SEQ ID NO: 121937 - DNA, 25 bp, Canis familiaris
gagaggttcaatggtctttatttgt

SEQ ID NO: 121938 - DNA, 25 bp, Canis familiaris
gagatgtttctgtgtactagacttt

SEQ ID NO: 121939 - DNA, 25 bp, Canis familiaris
gagagtttctgctaaccatatagtg

SEQ ID NO: 121940 - DNA, 25 bp, Canis familiaris
gagagtattctgaacacccaaactg

SEQ ID NO: 121941 - DNA, 25 bp, Canis familiaris
gagagttttgcaacaccgcgtactc

SEQ ID NO: 121942 - DNA, 25 bp, Canis familiaris
gagagttttatatccatttcaccaa

SEQ ID NO: 121943 - DNA, 25 bp, Canis familiaris
gagagtctgtgattatggccattta

SEQ ID NO: 121944 - DNA, 25 bp, Canis familiaris
gagagttgatgattttcctcttggc

SEQ ID NO: 121945 - DNA, 25 bp, Canis familiaris
gagagagaatgactttgcccttgat

SEQ ID NO: 121946 - DNA, 25 bp, Canis familiaris
gagaggaataacttgcctttctgtc

SEQ ID NO: 121947 - DNA, 25 bp, Canis familiaris
gagaggagcaaacctgttatttgga

SEQ ID NO: 121948 - DNA, 25 bp, Canis familiaris
gagaggccaggctcagttatggatg

SEQ ID NO: 121949 - DNA, 25 bp, Canis familiaris
gagagatccaattcgaattctggtg

SEQ ID NO: 121950 - DNA, 25 bp, Canis familiaris
gatgcattcaaagtccagtattcgg

SEQ ID NO: 121951 - DNA, 25 bp, Canis familiaris
gagatccatgtggcccagtatccac

SEQ ID NO: 121952 - DNA, 25 bp, Canis familiaris
gagatcgatgtggaccggtctggca

SEQ ID NO: 121953 - DNA, 25 bp, Canis familiaris
gagatggggatacctcgtgtgtgca

SEQ ID NO: 121954 - DNA, 25 bp, Canis familiaris
gagatggtgatggtggtagtggtga

SEQ ID NO: 121955 - DNA, 25 bp, Canis familiaris
gagagagtggcagtgagccaggagg

SEQ ID NO: 121956 - DNA, 25 bp, Canis familiaris
gagagagagtgagagcgagcgagcg

SEQ ID NO: 121957 - DNA, 25 bp, Canis familiaris
gagaggcaggcagacagacagaaag

SEQ ID NO: 121958 - DNA, 25 bp, Canis familiaris
gagatgcgcagaagaagggaggaag

SEQ ID NO: 121959 - DNA, 25 bp, Canis familiaris
gagatgcctaaagcccatggagagg

SEQ ID NO: 121960 - DNA, 25 bp, Canis familiaris
gagatcctggaagccagcgatggca

SEQ ID NO: 121961 - DNA, 25 bp, Canis familiaris
gagatcctggagaccgcagaggagc

SEQ ID NO: 121962 - DNA, 25 bp, Canis familiaris
gagatggcgcagaagcccaagggcc

SEQ ID NO: 121963 - DNA, 25 bp, Canis familiaris
gagaggccaatcgcgcaaagagcta

SEQ ID NO: 121964 - DNA, 25 bp, Canis familiaris
gagatgtgtaatgccctcaacagct

SEQ ID NO: 121965 - DNA, 25 bp, Canis familiaris
gagatggtaatggcacctctagatt

SEQ ID NO: 121966 - DNA, 25 bp, Canis familiaris
gagatcgataatgaccctatggaag

SEQ ID NO: 121967 - DNA, 25 bp, Canis familiaris
gagatcgactacgttccgggaatga

SEQ ID NO: 121968 - DNA, 25 bp, Canis familiaris
gagatcggataccaatcctgccaaa

SEQ ID NO: 121969 - DNA, 25 bp, Canis familiaris
gagtcggagttcgtctcggaaatcc

SEQ ID NO: 121970 - DNA, 25 bp, Canis familiaris
gagattgggttcctctcggaatgac

SEQ ID NO: 121971 - DNA, 25 bp, Canis familiaris
gagttgcaatttccctcgggatggc

SEQ ID NO: 121972 - DNA, 25 bp, Canis familiaris
gagttcagaattgttggagttggca

SEQ ID NO: 121973 - DNA, 25 bp, Canis familiaris
gagttaagtttttctggttgatgcc

SEQ ID NO: 121974 - DNA, 25 bp, Canis familiaris
ggttacgtttgcacaggggagccat

SEQ ID NO: 121975 - DNA, 25 bp, Canis familiaris
gagttccgtgttggacactggggga

SEQ ID NO: 121976 - DNA, 25 bp, Canis familiaris
gagttcgtttagtgagcctgtagga

SEQ ID NO: 121977 - DNA, 25 bp, Canis familiaris
gagtctgagttaagggaactttgtg

SEQ ID NO: 121978 - DNA, 25 bp, Canis familiaris
gagttgtttcaagatggcattctta

SEQ ID NO: 121979 - DNA, 25 bp, Canis familiaris
gagttgtttccagtagtcggatttt

SEQ ID NO: 121980 - DNA, 25 bp, Canis familiaris
gagttaaatccagcttccgatcttt

SEQ ID NO: 121981 - DNA, 25 bp, Canis familiaris
gagttaaaccatataaatgcctttg

SEQ ID NO: 121982 - DNA, 25 bp, Canis familiaris
gagatgagaaccggttaaccccttg

SEQ ID NO: 121983 - DNA, 25 bp, Canis familiaris
gagaggaacagcggtctgatccctt

SEQ ID NO: 121984 - DNA, 25 bp, Canis familiaris
gagaggcccagcgagaatgactcca

SEQ ID NO: 121985 - DNA, 25 bp, Canis familiaris
gagagaggccagacaacaccaggca

SEQ ID NO: 121986 - DNA, 25 bp, Canis familiaris
gagagaggcaagagacacaggcaga

SEQ ID NO: 121987 - DNA, 25 bp, Canis familiaris
gagagatcagcaatggaaacacaag

SEQ ID NO: 121988 - DNA, 25 bp, Canis familiaris
gagagagagaggcaagagacacagg

SEQ ID NO: 121989 - DNA, 25 bp, Canis familiaris
agacgagtacgcaggctacggttac

SEQ ID NO: 121990 - DNA, 25 bp, Canis familiaris
gagaggagaaaggggactcggaagt

SEQ ID NO: 121991 - DNA, 25 bp, Canis familiaris
gagaggtgataaggggaccgagggg

SEQ ID NO: 121992 - DNA, 25 bp, Canis familiaris
gagatcctgacatcagggtcccagg

SEQ ID NO: 121993 - DNA, 25 bp, Canis familiaris
gagaggctgacggcggagaaccgct

SEQ ID NO: 121994 - DNA, 25 bp, Canis familiaris
gagaggctgacatcgatggagacgg

SEQ ID NO: 121995 - DNA, 25 bp, Canis familiaris
gagagtgctgaagggcaggcagtct

SEQ ID NO: 121996 - DNA, 25 bp, Canis familiaris
gagagtgtagctgtgcttgcagtct

SEQ ID NO: 121997 - DNA, 25 bp, Canis familiaris
gagatgagtcctgagcattggtgct

SEQ ID NO: 121998 - DNA, 25 bp, Canis familiaris
gagatgactccttagcttagttctg

SEQ ID NO: 121999 - DNA, 25 bp, Canis familiaris
gatgtacccaagtcttaagtttctc

SEQ ID NO: 122000 - DNA, 25 bp, Canis familiaris
gagtagccttaataattgatcgtct

SEQ ID NO: 122001 - DNA, 25 bp, Canis familiaris
ggtaccctagaacttttgactcgag

SEQ ID NO: 122002 - DNA, 25 bp, Canis familiaris
gagatgacctctcaactttaactga

SEQ ID NO: 122003 - DNA, 25 bp, Canis familiaris
gagaggcccattaactttagctatc

SEQ ID NO: 122004 - DNA, 25 bp, Canis familiaris
gagaggcccataaactttagctcat

SEQ ID NO: 122005 - DNA, 25 bp, Canis familiaris
gagagtccgctaaatctttcagata

SEQ ID NO: 122006 - DNA, 25 bp, Canis familiaris
gagatttcctcaagcttataggaca

SEQ ID NO: 122007 - DNA, 25 bp, Canis familiaris
gagatgcttgtccttttatagtgat

SEQ ID NO: 122008 - DNA, 25 bp, Canis familiaris
gagagatctgtgctcaataatcagt

SEQ ID NO: 122009 - DNA, 25 bp, Canis familiaris
gagtacattgctccctgaagcagtg

SEQ ID NO: 122010 - DNA, 25 bp, Canis familiaris
gagatgctcttttccagaacagatg

SEQ ID NO: 122011 - DNA, 25 bp, Canis familiaris
gagatccctccacttgagggtgatg

SEQ ID NO: 122012 - DNA, 25 bp, Canis familiaris
gagatcacctcttagaactggtttt

SEQ ID NO: 122013 - DNA, 25 bp, Canis familiaris
gagatcgccctgtcaaagtcaatct

SEQ ID NO: 122014 - DNA, 25 bp, Canis familiaris
gagtacccttaaaataatgatcgaa

SEQ ID NO: 122015 - DNA, 25 bp, Canis familiaris
gagtacttttattttgaggtcaggt

SEQ ID NO: 122016 - DNA, 25 bp, Canis familiaris
gagtacttcagtttttagggctctt

SEQ ID NO: 122017 - DNA, 25 bp, Canis familiaris
gagtaatgggacagttatgggtgct

SEQ ID NO: 122018 - DNA, 25 bp, Canis familiaris
gagatttgggaggtgttatttggga

SEQ ID NO: 122019 - DNA, 25 bp, Canis familiaris
gagattgtggcctggttttgtaaaa

SEQ ID NO: 122020 - DNA, 25 bp, Canis familiaris
gagattgggtcttggttgtctcggc

SEQ ID NO: 122021 - DNA, 25 bp, Canis familiaris
gagttgggccatcggttatttgacc

SEQ ID NO: 122022 - DNA, 25 bp, Canis familiaris
gagtcttgacttgggtttttacctg

SEQ ID NO: 122023 - DNA, 25 bp, Canis familiaris
gagttcgactttgttaaatatcttg

SEQ ID NO: 122024 - DNA, 25 bp, Canis familiaris
gagttgcctttagcttaagtgtctt

SEQ ID NO: 122025 - DNA, 25 bp, Canis familiaris
gagttttattaggctttgggagtat

SEQ ID NO: 122026 - DNA, 25 bp, Canis familiaris
gagatgttttctagtttatggggat

SEQ ID NO: 122027 - DNA, 25 bp, Canis familiaris
gagagattcttcttgtaatagttaa

SEQ ID NO: 122028 - DNA, 25 bp, Canis familiaris
gagagttttttatatactgtagcct

SEQ ID NO: 122029 - DNA, 25 bp, Canis familiaris
gagaggttcttactactactgagag

SEQ ID NO: 122030 - DNA, 25 bp, Canis familiaris
gagaggttaatcacactatagaggc

SEQ ID NO: 122031 - DNA, 25 bp, Canis familiaris
gagagttttactacagtggagcaga

SEQ ID NO: 122032 - DNA, 25 bp, Canis familiaris
gagagattttatttgagtgacagcc

SEQ ID NO: 122033 - DNA, 25 bp, Canis familiaris
gagagtttatagatcggcagcacgc

SEQ ID NO: 122034 - DNA, 25 bp, Canis familiaris
gagattttatcgcttagccaccttc

SEQ ID NO: 122035 - DNA, 25 bp, Canis familiaris
gagatcctctgaaagcttagccaat

SEQ ID NO: 122036 - DNA, 25 bp, Canis familiaris
gagagtttgcattggataatccaat

SEQ ID NO: 122037 - DNA, 25 bp, Canis familiaris
gagagtgttctgtgaaatccgctga

SEQ ID NO: 122038 - DNA, 25 bp, Canis familiaris
gagatgcgtttgtgacaactggtgt

SEQ ID NO: 122039 - DNA, 25 bp, Canis familiaris
gaggcggctatggaaaactggccca

SEQ ID NO: 122040 - DNA, 25 bp, Canis familiaris
gagattgacaaggaggaagggctaa

SEQ ID NO: 122041 - DNA, 25 bp, Canis familiaris
gagagtgagcaagagagagcagagc

SEQ ID NO: 122042 - DNA, 25 bp, Canis familiaris
gagatggcagcaaaatccgcaacct

SEQ ID NO: 122043 - DNA, 25 bp, Canis familiaris
gagatggcattatagcatcataatc

SEQ ID NO: 122044 - DNA, 25 bp, Canis familiaris
gagagtcagataaagccatcacatc

SEQ ID NO: 122045 - DNA, 25 bp, Canis familiaris
gagatcacgatgacacggcatccac

SEQ ID NO: 122046 - DNA, 25 bp, Canis familiaris
gagatcatctgctcaaggaccaacc

SEQ ID NO: 122047 - DNA, 25 bp, Canis familiaris
gagatgatccaggacagtacccagc

SEQ ID NO: 122048 - DNA, 25 bp, Canis familiaris
gagatgagaaaccagcttcccatgc

SEQ ID NO: 122049 - DNA, 25 bp, Canis familiaris
gagatgcagagttcccttgcacatc

SEQ ID NO: 122050 - DNA, 25 bp, Canis familiaris
gagatcatgagagcctgtagccacc

SEQ ID NO: 122051 - DNA, 25 bp, Canis familiaris
gagatcgtgatcggtgttctgcacc

SEQ ID NO: 122052 - DNA, 25 bp, Canis familiaris
gagtatgtgatcccatgtacatgta

SEQ ID NO: 122053 - DNA, 25 bp, Canis familiaris
gagatatgtgacgtacctttcaggt

SEQ ID NO: 122054 - DNA, 25 bp, Canis familiaris
gagatcatggcacctatccttgcca

SEQ ID NO: 122055 - DNA, 25 bp, Canis familiaris
gagatagagcctccatccaagtctc

SEQ ID NO: 122056 - DNA, 25 bp, Canis familiaris
gagatccatggcctgagccaaagtc

SEQ ID NO: 122057 - DNA, 25 bp, Canis familiaris
gagatactggggacctcatgcagct

SEQ ID NO: 122058 - DNA, 25 bp, Canis familiaris
gagatggtccagaacctcatggtgc

SEQ ID NO: 122059 - DNA, 25 bp, Canis familiaris
gagatggtcctttcaattgcttgcc

SEQ ID NO: 122060 - DNA, 25 bp, Canis familiaris
gagatctgatctcatcaaacactat

SEQ ID NO: 122061 - DNA, 25 bp, Canis familiaris
gagatggctcatctatactcactct

SEQ ID NO: 122062 - DNA, 25 bp, Canis familiaris
gagatggccactgccgcatcctctt

SEQ ID NO: 122063 - DNA, 25 bp, Canis familiaris
gagatggccacggctgcttccagct

SEQ ID NO: 122064 - DNA, 25 bp, Canis familiaris
gagatgacaaaggctgcatccctct

SEQ ID NO: 122065 - DNA, 25 bp, Canis familiaris
gagatgtcaaaggactcccttctgg

SEQ ID NO: 122066 - DNA, 25 bp, Canis familiaris
gagttcaaaccagtgcccatagatc

SEQ ID NO: 122067 - DNA, 25 bp, Canis familiaris
gagatatcgaatccctgccgttagc

SEQ ID NO: 122068 - DNA, 25 bp, Canis familiaris
gaggaaggtgtcctccgtgtagggc

SEQ ID NO: 122069 - DNA, 25 bp, Canis familiaris
gagagtgagagggcagtccaagtat

SEQ ID NO: 122070 - DNA, 25 bp, Canis familiaris
gagaggcagggcgagggtcagtctc

SEQ ID NO: 122071 - DNA, 25 bp, Canis familiaris
gagagggtgaggcatggtggacatc

SEQ ID NO: 122072 - DNA, 25 bp, Canis familiaris
gagaggaggagtaatggaaggcccc

SEQ ID NO: 122073 - DNA, 25 bp, Canis familiaris
gagaggcagagactcaggtagaggc

SEQ ID NO: 122074 - DNA, 25 bp, Canis familiaris
gagaggcagcgacagcctggagacc

SEQ ID NO: 122075 - DNA, 25 bp, Canis familiaris
gagaggagggccactgggaggctga

SEQ ID NO: 122076 - DNA, 25 bp, Canis familiaris
gagagggtggcgagtacagagagta

SEQ ID NO: 122077 - DNA, 25 bp, Canis familiaris
gagagggaggcgttgactgcgaggt

SEQ ID NO: 122078 - DNA, 25 bp, Canis familiaris
gagagggaggaaaccagctgcagtg

SEQ ID NO: 122079 - DNA, 25 bp, Canis familiaris
gagatggagagctaagctccaggag

SEQ ID NO: 122080 - DNA, 25 bp, Canis familiaris
gagagggaacaaggccatcggaaaa

SEQ ID NO: 122081 - DNA, 25 bp, Canis familiaris
gagagggacaagtgcacacgccttc

SEQ ID NO: 122082 - DNA, 25 bp, Canis familiaris
gagaggccacaggttcaaagaccca

SEQ ID NO: 122083 - DNA, 25 bp, Canis familiaris
gagaggccacaggtctaagagcaca

SEQ ID NO: 122084 - DNA, 25 bp, Canis familiaris
gagaggccacggagaagatcactgc

SEQ ID NO: 122085 - DNA, 25 bp, Canis familiaris
gagagtgctccatctggaagtcctc

SEQ ID NO: 122086 - DNA, 25 bp, Canis familiaris
gagagtgtcaccatggatcgtttta

SEQ ID NO: 122087 - DNA, 25 bp, Canis familiaris
gagagtgattggttctacgttttac

SEQ ID NO: 122088 - DNA, 25 bp, Canis familiaris
gagagtgattggttctacgttttac

SEQ ID NO: 122089 - DNA, 25 bp, Canis familiaris
gagttattggaattcactttggtaa

SEQ ID NO: 122090 - DNA, 25 bp, Canis familiaris
gagttctacagaaacactaaggctg

SEQ ID NO: 122091 - DNA, 25 bp, Canis familiaris
gagtcattaagtcacagctaatgca

SEQ ID NO: 122092 - DNA, 25 bp, Canis familiaris
gagatgttcaacaccactcatcacc

SEQ ID NO: 122093 - DNA, 25 bp, Canis familiaris
gagttttacggcaatatcatcacca

SEQ ID NO: 122094 - DNA, 25 bp, Canis familiaris
gagattgcttcaaggcaaaggcacc

SEQ ID NO: 122095 - DNA, 25 bp, Canis familiaris
gagttcaggattgaaaggacttcca

SEQ ID NO: 122096 - DNA, 25 bp, Canis familiaris
gagattatctttgataacagacttc

SEQ ID NO: 122097 - DNA, 25 bp, Canis familiaris
gagattgcctttttgaagaaactac

SEQ ID NO: 122098 - DNA, 25 bp, Canis familiaris
gagattgcctggatggaagattgcc

SEQ ID NO: 122099 - DNA, 25 bp, Canis familiaris
gagagtccttggtgcaaagctggcc

SEQ ID NO: 122100 - DNA, 25 bp, Canis familiaris
gagagtggttggttgctagagtttc

SEQ ID NO: 122101 - DNA, 25 bp, Canis familiaris
gagaggtgtcttttgtaaccccatt

SEQ ID NO: 122102 - DNA, 25 bp, Canis familiaris
gagaggatcttccacttgaaccttc

SEQ ID NO: 122103 - DNA, 25 bp, Canis familiaris
gagagtgtttgcccagtgtacacca

SEQ ID NO: 122104 - DNA, 25 bp, Canis familiaris
gagttggctgctcaaggtgaaccag

SEQ ID NO: 122105 - DNA, 25 bp, Canis familiaris
gagttggctgagaaacttgaccaag

SEQ ID NO: 122106 - DNA, 25 bp, Canis familiaris
gagttacaagcaaactgctacgagg

SEQ ID NO: 122107 - DNA, 25 bp, Canis familiaris
gagtcttattttatctgaggcggga

SEQ ID NO: 122108 - DNA, 25 bp, Canis familiaris
gagatcattgactttttcttggggg

SEQ ID NO: 122109 - DNA, 25 bp, Canis familiaris
gagatgcttaccatgtagtgtgacc

SEQ ID NO: 122110 - DNA, 25 bp, Canis familiaris
gagattcatacctttaaatgcatac

SEQ ID NO: 122111 - DNA, 25 bp, Canis familiaris
gagatttgcacctctaacttgcacg

SEQ ID NO: 122112 - DNA, 25 bp, Canis familiaris
gagattgtgacctctggacaacatc

SEQ ID NO: 122113 - DNA, 25 bp, Canis familiaris
gagatactctcttttggtcaactat

SEQ ID NO: 122114 - DNA, 25 bp, Canis familiaris
gagataacatgaacttacttgacta

SEQ ID NO: 122115 - DNA, 25 bp, Canis familiaris
gagatatgaggaacccaggtaccat

SEQ ID NO: 122116 - DNA, 25 bp, Canis familiaris
gagtagaggaccaggtgtccactgg

SEQ ID NO: 122117 - DNA, 25 bp, Canis familiaris
gagagggagaactggctctccactg

SEQ ID NO: 122118 - DNA, 25 bp, Canis familiaris
gagatatagagttattggacccaag

SEQ ID NO: 122119 - DNA, 25 bp, Canis familiaris
gagattagattactttgaccctctt

SEQ ID NO: 122120 - DNA, 25 bp, Canis familiaris
gagattaaacttagccacgagccta

SEQ ID NO: 122121 - DNA, 25 bp, Canis familiaris
gagatgtgaaccattgcttctccca

SEQ ID NO: 122122 - DNA, 25 bp, Canis familiaris
gagatttcacagaattcttcccttg

SEQ ID NO: 122123 - DNA, 25 bp, Canis familiaris
gagatcttaaactctattccctgga

SEQ ID NO: 122124 - DNA, 25 bp, Canis familiaris
gagtttaaaaggcacccagcacgtc

SEQ ID NO: 122125 - DNA, 25 bp, Canis familiaris
gagttccaagaagtgtgacccattt

SEQ ID NO: 122126 - DNA, 25 bp, Canis familiaris
gagatgtctgcctatagcttgcacc

SEQ ID NO: 122127 - DNA, 25 bp, Canis familiaris
gagatgttgcaatgagcgtgtgcac

SEQ ID NO: 122128 - DNA, 25 bp, Canis familiaris
gagatgggaactccagatgtgcgca

SEQ ID NO: 122129 - DNA, 25 bp, Canis familiaris
gagatcgacaactctgagctgctgc

SEQ ID NO: 122130 - DNA, 25 bp, Canis familiaris
gagatcatgacttttctggggcgtc

SEQ ID NO: 122131 - DNA, 25 bp, Canis familiaris
gagatcaagccctgtgtcgggctcc

SEQ ID NO: 122132 - DNA, 25 bp, Canis familiaris
gagatcacggaatgttcgcggtgta

SEQ ID NO: 122133 - DNA, 25 bp, Canis familiaris
gagatccgggatcgaatcccgcgtc

SEQ ID NO: 122134 - DNA, 25 bp, Canis familiaris
gagtcccaggatcaaatcccatgtc

SEQ ID NO: 122135 - DNA, 25 bp, Canis familiaris
gagtccaaaaaaaatcccagcccag

SEQ ID NO: 122136 - DNA, 25 bp, Canis familiaris
gagaggcagtagatgaaatcccccc

SEQ ID NO: 122137 - DNA, 25 bp, Canis familiaris
gagagggatcagagataccccccag

SEQ ID NO: 122138 - DNA, 25 bp, Canis familiaris
gagagggagcaaaacagccagcccc

SEQ ID NO: 122139 - DNA, 25 bp, Canis familiaris
gagagggagacacccacagatgcca

SEQ ID NO: 122140 - DNA, 25 bp, Canis familiaris
gagggggtcacctgaatgccaggaa

SEQ ID NO: 122141 - DNA, 25 bp, Canis familiaris
gagaggagggacccgaaccatggaa

SEQ ID NO: 122142 - DNA, 25 bp, Canis familiaris
gagagggatggcagcctgaaccaga

SEQ ID NO: 122143 - DNA, 25 bp, Canis familiaris
gagattgcgggcatcgagaacgacg

SEQ ID NO: 122144 - DNA, 25 bp, Canis familiaris
gagttgcgtgccatggaaaggagac

SEQ ID NO: 122145 - DNA, 25 bp, Canis familiaris
gagattggtggagggagagggaaaa

SEQ ID NO: 122146 - DNA, 25 bp, Canis familiaris
gagatatgtctcctgaagcaaggga

SEQ ID NO: 122147 - DNA, 25 bp, Canis familiaris
gagatgatctgtcctgttgtcaggg

SEQ ID NO: 122148 - DNA, 25 bp, Canis familiaris
gagttcattgccatcatctacggca

SEQ ID NO: 122149 - DNA, 25 bp, Canis familiaris
gagttcattatcagtgctaatagca

SEQ ID NO: 122150 - DNA, 25 bp, Canis familiaris
gagattcccacaggacttctagcaa

SEQ ID NO: 122151 - DNA, 25 bp, Canis familiaris
gagatatcactgtagagcctgtcta

SEQ ID NO: 122152 - DNA, 25 bp, Canis familiaris
gagatcacgcttgggtctgatatgt

SEQ ID NO: 122153 - DNA, 25 bp, Canis familiaris
gagtagggacgggcagagagatgga

SEQ ID NO: 122154 - DNA, 25 bp, Canis familiaris
gagaggaagagagaagagagagaga

SEQ ID NO: 122155 - DNA, 25 bp, Canis familiaris
gagaggcaggaagaatagggaagaa

SEQ ID NO: 122156 - DNA, 25 bp, Canis familiaris
gagaggagagaataatcggcaggag

SEQ ID NO: 122157 - DNA, 25 bp, Canis familiaris
gagaggcaagaatccatgtgagcag

SEQ ID NO: 122158 - DNA, 25 bp, Canis familiaris
gagagtgtcatgtacaccattgaag

SEQ ID NO: 122159 - DNA, 25 bp, Canis familiaris
gagaggtcagagacacacaggcaga

SEQ ID NO: 122160 - DNA, 25 bp, Canis familiaris
gagaggcaagagacacaggcagaga

SEQ ID NO: 122161 - DNA, 25 bp, Canis familiaris
gagatagcagggacaggagcaggcc

SEQ ID NO: 122162 - DNA, 25 bp, Canis familiaris
gagatatcacggggacacattgtct

SEQ ID NO: 122163 - DNA, 25 bp, Canis familiaris
gagatcatcgggggcacagagtcca

SEQ ID NO: 122164 - DNA, 25 bp, Canis familiaris
gagattctgtgggtcacgatggaat

SEQ ID NO: 122165 - DNA, 25 bp, Canis familiaris
gagttcttcatgtctccagatggaa

SEQ ID NO: 122166 - DNA, 25 bp, Canis familiaris
gagatatttctcttaagccgaagtg

SEQ ID NO: 122167 - DNA, 25 bp, Canis familiaris
gagtgatttttcttggcactgggtt

SEQ ID NO: 122168 - DNA, 25 bp, Canis familiaris
gagtattttaccgaactgccattga

SEQ ID NO: 122169 - DNA, 25 bp, Canis familiaris
gagatttctattcagaattccaagg

SEQ ID NO: 122170 - DNA, 25 bp, Canis familiaris
gagattgtgtttcctaagtcttggg

SEQ ID NO: 122171 - DNA, 25 bp, Canis familiaris
gagatctgcctaagcctcaagtctc

SEQ ID NO: 122172 - DNA, 25 bp, Canis familiaris
gagatcatgaccagagctaaaatca

SEQ ID NO: 122173 - DNA, 25 bp, Canis familiaris
gatccagagccaacccaaagtaagc

SEQ ID NO: 122174 - DNA, 25 bp, Canis familiaris
gatccgaccccagaaaaagaggaag

SEQ ID NO: 122175 - DNA, 25 bp, Canis familiaris
gatccccgcccagaaataggcgtcc

SEQ ID NO: 122176 - DNA, 25 bp, Canis familiaris
gattcccccaaaggaatgggctcac

SEQ ID NO: 122177 - DNA, 25 bp, Canis familiaris
gagatcccctaataggtggagctca

SEQ ID NO: 122178 - DNA, 25 bp, Canis familiaris
gagattccctaactattattggcaa

SEQ ID NO: 122179 - DNA, 25 bp, Canis familiaris
gagttacctagagtgatattgccgc

SEQ ID NO: 122180 - DNA, 25 bp, Canis familiaris
gagtttctgaacgtgatttggtcct

SEQ ID NO: 122181 - DNA, 25 bp, Canis familiaris
gagtacctggtggcatttggtgtca

SEQ ID NO: 122182 - DNA, 25 bp, Canis familiaris
gagttcctggggttggcagggcagc

SEQ ID NO: 122183 - DNA, 25 bp, Canis familiaris
gagttgcccggtgagtgaaggaggc

SEQ ID NO: 122184 - DNA, 25 bp, Canis familiaris
gagtttcccagtgaacaggcggaga

SEQ ID NO: 122185 - DNA, 25 bp, Canis familiaris
gagattccccagggcatagatgtgc

SEQ ID NO: 122186 - DNA, 25 bp, Canis familiaris
gagatttcccagagcacagagttcc

SEQ ID NO: 122187 - DNA, 25 bp, Canis familiaris
gagatttccgtgaagcaagagcttg

SEQ ID NO: 122188 - DNA, 25 bp, Canis familiaris
gagttgctcctgaaagggcctttaa

SEQ ID NO: 122189 - DNA, 25 bp, Canis familiaris
gagttgtcagtgagtgagccctacc

SEQ ID NO: 122190 - DNA, 25 bp, Canis familiaris
gagattctcaggagcagcatgcctt

SEQ ID NO: 122191 - DNA, 25 bp, Canis familiaris
gagattctggaatgccatcaccttg

SEQ ID NO: 122192 - DNA, 25 bp, Canis familiaris
gagattttcaattgagctgccctta

SEQ ID NO: 122193 - DNA, 25 bp, Canis familiaris
gagatcttattttgttggcctttat

SEQ ID NO: 122194 - DNA, 25 bp, Canis familiaris
gagttttatttcttggtctcttcct

SEQ ID NO: 122195 - DNA, 25 bp, Canis familiaris
gagttttcagccattattccttaaa

SEQ ID NO: 122196 - DNA, 25 bp, Canis familiaris
gagattgttcagcccctgatgtatt

SEQ ID NO: 122197 - DNA, 25 bp, Canis familiaris
gagatatttgccatgtctagtgttt

SEQ ID NO: 122198 - DNA, 25 bp, Canis familiaris
gagatgtaggcggttccaggtattt

SEQ ID NO: 122199 - DNA, 25 bp, Canis familiaris
gagatgtaggagagccgaccaactg

SEQ ID NO: 122200 - DNA, 25 bp, Canis familiaris
gagagggggtgagagaccgagcgcg

SEQ ID NO: 122201 - DNA, 25 bp, Canis familiaris
gagatggtggacgcggacgtggagc

SEQ ID NO: 122202 - DNA, 25 bp, Canis familiaris
gagatgggagaagggagacagggtc

SEQ ID NO: 122203 - DNA, 25 bp, Canis familiaris
gagaggggcaggggcaacaggatcc

SEQ ID NO: 122204 - DNA, 25 bp, Canis familiaris
gagaggccctagggaaaagaccgcg

SEQ ID NO: 122205 - DNA, 25 bp, Canis familiaris
gagaggcggcaagtcttaacaaacc

SEQ ID NO: 122206 - DNA, 25 bp, Canis familiaris
tgaagggaaccgagaacaatgaatc

SEQ ID NO: 122207 - DNA, 25 bp, Canis familiaris
gatcgggtacctctgcaagtagaac

SEQ ID NO: 122208 - DNA, 25 bp, Canis familiaris
gagtcctttcgtctatggttgaatc

SEQ ID NO: 122209 - DNA, 25 bp, Canis familiaris
gagtccctacttcagagctttactc

SEQ ID NO: 122210 - DNA, 25 bp, Canis familiaris
gagatcctttctgaagagcttttgt

SEQ ID NO: 122211 - DNA, 25 bp, Canis familiaris
gagatactcgtcactgaggttgtct

SEQ ID NO: 122212 - DNA, 25 bp, Canis familiaris
gagatacttggtctggtattttcta

SEQ ID NO: 122213 - DNA, 25 bp, Canis familiaris
gagatattttgtccgattaactgtc

SEQ ID NO: 122214 - DNA, 25 bp, Canis familiaris
gagtacggtgctcagagtcaccaac

SEQ ID NO: 122215 - DNA, 25 bp, Canis familiaris
gagataaggatgccaatgtaactgc

SEQ ID NO: 122216 - DNA, 25 bp, Canis familiaris
gagattagagctcgaatgggcactt

SEQ ID NO: 122217 - DNA, 25 bp, Canis familiaris
gagatgatacctcattgtggttttg

SEQ ID NO: 122218 - DNA, 25 bp, Canis familiaris
gagtaagctcggttggtgctttcgc

SEQ ID NO: 122219 - DNA, 25 bp, Canis familiaris
gagttcgtcgatgtgtggttccgat

SEQ ID NO: 122220 - DNA, 25 bp, Canis familiaris
gagttgtttgtagttgtgtggccaa

SEQ ID NO: 122221 - DNA, 25 bp, Canis familiaris
gagtaatcaggtgtaggatggaaaa

SEQ ID NO: 122222 - DNA, 25 bp, Canis familiaris
gagttgatcggaaacggtatgagac

SEQ ID NO: 122223 - DNA, 25 bp, Canis familiaris
gagtttcggcaagcgtttcagaggg

SEQ ID NO: 122224 - DNA, 25 bp, Canis familiaris
gagtgcttcccgtacagtattatgg

SEQ ID NO: 122225 - DNA, 25 bp, Canis familiaris
gagattaatctccatgcatagtttt

SEQ ID NO: 122226 - DNA, 25 bp, Canis familiaris
gagatcccactggcagcaaagttct

SEQ ID NO: 122227 - DNA, 25 bp, Canis familiaris
gagatgcaccaagacgagagccctc

SEQ ID NO: 122228 - DNA, 25 bp, Canis familiaris
gagatcacctaagaaagccctgctg

SEQ ID NO: 122229 - DNA, 25 bp, Canis familiaris
gagatccgtagatacctgtcactcg

SEQ ID NO: 122230 - DNA, 25 bp, Canis familiaris
gagatcgcaaaaacccagtcaacag

SEQ ID NO: 122231 - DNA, 25 bp, Canis familiaris
gagtccaaggcagcctatgtcctct

SEQ ID NO: 122232 - DNA, 25 bp, Canis familiaris
gagtagcattacaccaattcctttc

SEQ ID NO: 122233 - DNA, 25 bp, Canis familiaris
gagttgttgacgtctaacttccttc

SEQ ID NO: 122234 - DNA, 25 bp, Canis familiaris
gagttggtactgtttactttctgat

SEQ ID NO: 122235 - DNA, 25 bp, Canis familiaris
gagttcgtgtcctttgaatattctg

SEQ ID NO: 122236 - DNA, 25 bp, Canis familiaris
gagttgggtcacttggggatgagct

SEQ ID NO: 122237 - DNA, 25 bp, Canis familiaris
gagtttggtcctgagcggtagccat

SEQ ID NO: 122238 - DNA, 25 bp, Canis familiaris
gagtgtgtaatgctaagggaaccaa

SEQ ID NO: 122239 - DNA, 25 bp, Canis familiaris
gagtttaatgtttagtgtggagcca

SEQ ID NO: 122240 - DNA, 25 bp, Canis familiaris
gagtttccactttgggtggtgaaca

SEQ ID NO: 122241 - DNA, 25 bp, Canis familiaris
gagtttcccttgaggttggtgcaat

SEQ ID NO: 122242 - DNA, 25 bp, Canis familiaris
gagttactctccccggttggagaag

SEQ ID NO: 122243 - DNA, 25 bp, Canis familiaris
gagtctacttaccacagagagggag

SEQ ID NO: 122244 - DNA, 25 bp, Canis familiaris
gagatgcttcgaaaggcaaggagga

SEQ ID NO: 122245 - DNA, 25 bp, Canis familiaris
gagatcttgagtgagggtagcagga

SEQ ID NO: 122246 - DNA, 25 bp, Canis familiaris
gagatgcttggagagggtctaggag

SEQ ID NO: 122247 - DNA, 25 bp, Canis familiaris
gagatgctttgtttggggttctgtg

SEQ ID NO: 122248 - DNA, 25 bp, Canis familiaris
gagttttgtcttctcctttataagg

SEQ ID NO: 122249 - DNA, 25 bp, Canis familiaris
gagtttgatcttattcctttgaatg

SEQ ID NO: 122250 - DNA, 25 bp, Canis familiaris
gagtttcaggtttctccttgtatgg

SEQ ID NO: 122251 - DNA, 25 bp, Canis familiaris
gagatttagtcatttctttagattg

SEQ ID NO: 122252 - DNA, 25 bp, Canis familiaris
gagttttgccatttagtctagtctg

SEQ ID NO: 122253 - DNA, 25 bp, Canis familiaris
gagattcttctcaagtacctcaatt

SEQ ID NO: 122254 - DNA, 25 bp, Canis familiaris
gagtgattgttcatatacccgctct

SEQ ID NO: 122255 - DNA, 25 bp, Canis familiaris
gagatactggttgatttcaccacat

SEQ ID NO: 122256 - DNA, 25 bp, Canis familiaris
gagatcctagttgttcagaacccca

SEQ ID NO: 122257 - DNA, 25 bp, Canis familiaris
gagatcacaacctaagtcaaaacca

SEQ ID NO: 122258 - DNA, 25 bp, Canis familiaris
gagtaatactattagccaaccccac

SEQ ID NO: 122259 - DNA, 25 bp, Canis familiaris
gagtaagtcttaagccttgattcca

SEQ ID NO: 122260 - DNA, 25 bp, Canis familiaris
gagatgaatgtctttcctctctcta

SEQ ID NO: 122261 - DNA, 25 bp, Canis familiaris
gagatgtatctctctattgctctct

SEQ ID NO: 122262 - DNA, 25 bp, Canis familiaris
gagatgtatcaattactcgtgtctg

SEQ ID NO: 122263 - DNA, 25 bp, Canis familiaris
gagatagatcgtagcctcgagctcg

SEQ ID NO: 122264 - DNA, 25 bp, Canis familiaris
gagatgagactaatgcaggcaggct

SEQ ID NO: 122265 - DNA, 25 bp, Canis familiaris
gagatgcagactatggggctcttaa

SEQ ID NO: 122266 - DNA, 25 bp, Canis familiaris
gagatgcgactgatggttttccaag

SEQ ID NO: 122267 - DNA, 25 bp, Canis familiaris
gagatggcctgttgactgtgaacct

SEQ ID NO: 122268 - DNA, 25 bp, Canis familiaris
gagataggctttgctgtggacactg

SEQ ID NO: 122269 - DNA, 25 bp, Canis familiaris
gagatagacatttcctcttacattg

SEQ ID NO: 122270 - DNA, 25 bp, Canis familiaris
gagtaacagtcccatttaaatgtgg

SEQ ID NO: 122271 - DNA, 25 bp, Canis familiaris
gagtaacagtccccatgggagactg

SEQ ID NO: 122272 - DNA, 25 bp, Canis familiaris
gagtacctgtactagatgaggagac

SEQ ID NO: 122273 - DNA, 25 bp, Canis familiaris
gagatcccagtatgagatattcaaa

SEQ ID NO: 122274 - DNA, 25 bp, Canis familiaris
gagatcatgccatttggatttacaa

SEQ ID NO: 122275 - DNA, 25 bp, Canis familiaris
gagatcccttcacatgtgctatcaa

SEQ ID NO: 122276 - DNA, 25 bp, Canis familiaris
gagttcacttccattttcaaatttt

SEQ ID NO: 122277 - DNA, 25 bp, Canis familiaris
gagttcacttttgctattacacttt

SEQ ID NO: 122278 - DNA, 25 bp, Canis familiaris
gagttgtttttaaatttcagcttca

SEQ ID NO: 122279 - DNA, 25 bp, Canis familiaris
gagttgttataatggttttgctgta

SEQ ID NO: 122280 - DNA, 25 bp, Canis familiaris
gagttttctcagtctagggttggta

SEQ ID NO: 122281 - DNA, 25 bp, Canis familiaris
gagttttgtgagttttggagttata

SEQ ID NO: 122282 - DNA, 25 bp, Canis familiaris
gagttggttggtatttatttcattt

SEQ ID NO: 122283 - DNA, 25 bp, Canis familiaris
gagatctttgatgtttttatacctt

SEQ ID NO: 122284 - DNA, 25 bp, Canis familiaris
gagttatctgatgattcctttcccc

SEQ ID NO: 122285 - DNA, 25 bp, Canis familiaris
gagttaggacttccattttctccac

SEQ ID NO: 122286 - DNA, 25 bp, Canis familiaris
gagtttgaggattgcctttttgtaa

SEQ ID NO: 122287 - DNA, 25 bp, Canis familiaris
gagtttgagccccatcttgggtgta

SEQ ID NO: 122288 - DNA, 25 bp, Canis familiaris
gagtttaggctccacattgggcata

SEQ ID NO: 122289 - DNA, 25 bp, Canis familiaris
gagttcaagaccagcctggccaaca

SEQ ID NO: 122290 - DNA, 25 bp, Canis familiaris
gagttgaaagccttcctggaacaca

SEQ ID NO: 122291 - DNA, 25 bp, Canis familiaris
gagttttgagcagcctctaaggcca

SEQ ID NO: 122292 - DNA, 25 bp, Canis familiaris
gagtttaagccacccagatctggac

SEQ ID NO: 122293 - DNA, 25 bp, Canis familiaris
gagtttgaggcccctaagctggcat

SEQ ID NO: 122294 - DNA, 25 bp, Canis familiaris
gagttggtgtgtcctgtacacggag

SEQ ID NO: 122295 - DNA, 25 bp, Canis familiaris
gagaggctggagacactgtaccgtt

SEQ ID NO: 122296 - DNA, 25 bp, Canis familiaris
gagatgttgtgagagtgtcgtcgtt

SEQ ID NO: 122297 - DNA, 25 bp, Canis familiaris
gagatgttcagagtggttcctccct

SEQ ID NO: 122298 - DNA, 25 bp, Canis familiaris
gagatcaacagaggttctgctcccc

SEQ ID NO: 122299 - DNA, 25 bp, Canis familiaris
gagatcacatatttggtcctcgctc

SEQ ID NO: 122300 - DNA, 25 bp, Canis familiaris
gagatccttattagctctgtagctt

SEQ ID NO: 122301 - DNA, 25 bp, Canis familiaris
gagatgtctctaatattttactact

SEQ ID NO: 122302 - DNA, 25 bp, Canis familiaris
gagattccataatcacatgatacaa

SEQ ID NO: 122303 - DNA, 25 bp, Canis familiaris
gagatagacgaatccagatgagaac

SEQ ID NO: 122304 - DNA, 25 bp, Canis familiaris
gagatcaacgacaacccgaacaaat

SEQ ID NO: 122305 - DNA, 25 bp, Canis familiaris
gagattaaatcaacaagccccgaag

SEQ ID NO: 122306 - DNA, 25 bp, Canis familiaris
gagattgatacacagaaccgccaga

SEQ ID NO: 122307 - DNA, 25 bp, Canis familiaris
gagattatatcccagaactcccagg

SEQ ID NO: 122308 - DNA, 25 bp, Canis familiaris
gagatagatgtcagcgatcaccctc

SEQ ID NO: 122309 - DNA, 25 bp, Canis familiaris
gagatgctttctggctgatcaagcc

SEQ ID NO: 122310 - DNA, 25 bp, Canis familiaris
gagatgtattctagcctgcaatcct

SEQ ID NO: 122311 - DNA, 25 bp, Canis familiaris
gagtaactatacctgaacactttca

SEQ ID NO: 122312 - DNA, 25 bp, Canis familiaris
gagtcaactaacagaaccaccaaca

SEQ ID NO: 122313 - DNA, 25 bp, Canis familiaris
gagtctgtcggaaaaaccaccacca

SEQ ID NO: 122314 - DNA, 25 bp, Canis familiaris
gagattccctgagaaaccattcacc

SEQ ID NO: 122315 - DNA, 25 bp, Canis familiaris
gagattccctgagtgtagcaccttc

SEQ ID NO: 122316 - DNA, 25 bp, Canis familiaris
gagatatacactctgatccagcctg

SEQ ID NO: 122317 - DNA, 25 bp, Canis familiaris
gagatacatgccctagatcagacca

SEQ ID NO: 122318 - DNA, 25 bp, Canis familiaris
gagatccaccagaagatataccaga

SEQ ID NO: 122319 - DNA, 25 bp, Canis familiaris
gagatccacagtaaattcacacagc

SEQ ID NO: 122320 - DNA, 25 bp, Canis familiaris
gagatccaagctacaaaatcacaag

SEQ ID NO: 122321 - DNA, 25 bp, Canis familiaris
gagatcacaccttaaccaataatgt

SEQ ID NO: 122322 - DNA, 25 bp, Canis familiaris
gagatatcacctcataccatcagaa

SEQ ID NO: 122323 - DNA, 25 bp, Canis familiaris
gagataccctgtcatccatcagatt

SEQ ID NO: 122324 - DNA, 25 bp, Canis familiaris
gagtcaatccgtcaggtcaggtcat

SEQ ID NO: 122325 - DNA, 25 bp, Canis familiaris
gagtttccgtggtagtgcgaggtct

SEQ ID NO: 122326 - DNA, 25 bp, Canis familiaris
gagttaccggatacagggtgcagtc

SEQ ID NO: 122327 - DNA, 25 bp, Canis familiaris
gagataaactttaatgtggccatgt

SEQ ID NO: 122328 - DNA, 25 bp, Canis familiaris
gagatcaagacccacattgggctcc

SEQ ID NO: 122329 - DNA, 25 bp, Canis familiaris
gagtcaaggctcaagtctagatcta

SEQ ID NO: 122330 - DNA, 25 bp, Canis familiaris
gagatgaagaacaactccatggcta

SEQ ID NO: 122331 - DNA, 25 bp, Canis familiaris
gagatgatggaggcacgcagccgtg

SEQ ID NO: 122332 - DNA, 25 bp, Canis familiaris
gagtgatggagcagctcacgctctg

SEQ ID NO: 122333 - DNA, 25 bp, Canis familiaris
gagatgggcagcaagtgggtccttt

SEQ ID NO: 122334 - DNA, 25 bp, Canis familiaris
gagttgtgacactggtgtccatcct

SEQ ID NO: 122335 - DNA, 25 bp, Canis familiaris
gagatgagtaaatagtgatagacct

SEQ ID NO: 122336 - DNA, 25 bp, Canis familiaris
gagatgactacaagtgcagtaaagc

SEQ ID NO: 122337 - DNA, 25 bp, Canis familiaris
gagatggcttcgccggtaagagcac

SEQ ID NO: 122338 - DNA, 25 bp, Canis familiaris
gagatggctcagtgggtaagagcac

SEQ ID NO: 122339 - DNA, 25 bp, Canis familiaris
gagatgtgctcatgggtggaccact

SEQ ID NO: 122340 - DNA, 25 bp, Canis familiaris
gagatgacttaggttggacattcaa

SEQ ID NO: 122341 - DNA, 25 bp, Canis familiaris
gagatcaataaggtcagagccaaaa

SEQ ID NO: 122342 - DNA, 25 bp, Canis familiaris
gagatgacagaaatatccactcaga

SEQ ID NO: 122343 - DNA, 25 bp, Canis familiaris
gagatgcaccagagaatcccagagt

SEQ ID NO: 122344 - DNA, 25 bp, Canis familiaris
gagtcacctgatggatcgcatccag

SEQ ID NO: 122345 - DNA, 25 bp, Canis familiaris
gagtcattagtgtcatgctctacag

SEQ ID NO: 122346 - DNA, 25 bp, Canis familiaris
gagttgtagacattgctctgctagt

SEQ ID NO: 122347 - DNA, 25 bp, Canis familiaris
gagatgatgaagtatttctctttct

SEQ ID NO: 122348 - DNA, 25 bp, Canis familiaris
gagatgtgtgttttgcttgtttcta

SEQ ID NO: 122349 - DNA, 25 bp, Canis familiaris
gagatattgttgtgcctgccatttt

SEQ ID NO: 122350 - DNA, 25 bp, Canis familiaris
gagatgattctatttctcccatgca

SEQ ID NO: 122351 - DNA, 25 bp, Canis familiaris
gagatattatgcaaattcccagatt

SEQ ID NO: 122352 - DNA, 25 bp, Canis familiaris
gagataatatcttgctcttctggga

SEQ ID NO: 122353 - DNA, 25 bp, Canis familiaris
gagattttcctgccttctgcagaaa

SEQ ID NO: 122354 - DNA, 25 bp, Canis familiaris
gagattgttccttttcagagaccac

SEQ ID NO: 122355 - DNA, 25 bp, Canis familiaris
gagatcggacacattatcaggtcac

SEQ ID NO: 122356 - DNA, 25 bp, Canis familiaris
gagtcgggagttaccaggtcacaca

SEQ ID NO: 122357 - DNA, 25 bp, Canis familiaris
gagatcggggtgcacctgaatgcgt

SEQ ID NO: 122358 - DNA, 25 bp, Canis familiaris
gagatcggaggtgagctgggtgggc

SEQ ID NO: 122359 - DNA, 25 bp, Canis familiaris
gagatgggaggaaagtgtgtgtgtg

SEQ ID NO: 122360 - DNA, 25 bp, Canis familiaris
gagatgtggcggtcaggggagagtg

SEQ ID NO: 122361 - DNA, 25 bp, Canis familiaris
gagatcgccagggctgtggtggaga

SEQ ID NO: 122362 - DNA, 25 bp, Canis familiaris
gagatacctggcctggtctggacac

SEQ ID NO: 122363 - DNA, 25 bp, Canis familiaris
gagtccctgtgcctgcgtaaggcac

SEQ ID NO: 122364 - DNA, 25 bp, Canis familiaris
gagatcccttttctagatatgagtt

SEQ ID NO: 122365 - DNA, 25 bp, Canis familiaris
gagatgctgcctatttctataagcg

SEQ ID NO: 122366 - DNA, 25 bp, Canis familiaris
gagatctggctaaagttgtgcaggg

SEQ ID NO: 122367 - DNA, 25 bp, Canis familiaris
gagattggaatgaaggtggcactgg

SEQ ID NO: 122368 - DNA, 25 bp, Canis familiaris
gagtcatggagatgaaggccgtgtg

SEQ ID NO: 122369 - DNA, 25 bp, Canis familiaris
gagatcaagatgtcccaggtcctgg

SEQ ID NO: 122370 - DNA, 25 bp, Canis familiaris
gagatcaacttcttcaagaccttat

SEQ ID NO: 122371 - DNA, 25 bp, Canis familiaris
gagtagatttcgtaactcgttacta

SEQ ID NO: 122372 - DNA, 25 bp, Canis familiaris
gagtagtttcgaatcctgacttacg

SEQ ID NO: 122373 - DNA, 25 bp, Canis familiaris
gagtagtttacatcttcactttctg

SEQ ID NO: 122374 - DNA, 25 bp, Canis familiaris
gagtcgtatgaaaacttccttatat

SEQ ID NO: 122375 - DNA, 25 bp, Canis familiaris
gagatccttgaatgacttcatgtta

SEQ ID NO: 122376 - DNA, 25 bp, Canis familiaris
gagatcagttccgagagatcatcgt

SEQ ID NO: 122377 - DNA, 25 bp, Canis familiaris
gagatgcagttgctgtctgagatcg

SEQ ID NO: 122378 - DNA, 25 bp, Canis familiaris
gagatatctcagcagttgaatcagt

SEQ ID NO: 122379 - DNA, 25 bp, Canis familiaris
gagtactctgggacatacatctgta

SEQ ID NO: 122380 - DNA, 25 bp, Canis familiaris
gagtagtccgatgcatccacggatc

SEQ ID NO: 122381 - DNA, 25 bp, Canis familiaris
gagtacccacatggctaaccagatc

SEQ ID NO: 122382 - DNA, 25 bp, Canis familiaris
gagtaccaagatcctggtccagatg

SEQ ID NO: 122383 - DNA, 25 bp, Canis familiaris
gagtacgagatagcagggacaggag

SEQ ID NO: 122384 - DNA, 25 bp, Canis familiaris
gagatacgagaaggcaggaacagga

SEQ ID NO: 122385 - DNA, 25 bp, Canis familiaris
gagatcacggcctgagctgaaatca

SEQ ID NO: 122386 - DNA, 25 bp, Canis familiaris
gagatcaagagcccgatgcaggatt

SEQ ID NO: 122387 - DNA, 25 bp, Canis familiaris
gagatcactgagcatcgctgggata

SEQ ID NO: 122388 - DNA, 25 bp, Canis familiaris
gagtcatgaggatgctgctggaaga

SEQ ID NO: 122389 - DNA, 25 bp, Canis familiaris
gagatcaaggcttgcttggcacatg

SEQ ID NO: 122390 - DNA, 25 bp, Canis familiaris
gagatcaaagtcgtgtacctgaggt

SEQ ID NO: 122391 - DNA, 25 bp, Canis familiaris
gagatccagtctgtgtacctgaggt

SEQ ID NO: 122392 - DNA, 25 bp, Canis familiaris
taatccgacgatgtagaagggtcaa

SEQ ID NO: 122393 - DNA, 25 bp, Canis familiaris
taaaacaagactacaaagaaggaga

SEQ ID NO: 122394 - DNA, 25 bp, Canis familiaris
taaaagcgagaactggaaaagtact

SEQ ID NO: 122395 - DNA, 25 bp, Canis familiaris
tgaaaacaaaatcaaaaccttctct

SEQ ID NO: 122396 - DNA, 25 bp, Canis familiaris
gataacccaaaagacatacctgttt

SEQ ID NO: 122397 - DNA, 25 bp, Canis familiaris
gataaacataataacccaactttct

SEQ ID NO: 122398 - DNA, 25 bp, Canis familiaris
gatgcaaaataacttccggatcttt

SEQ ID NO: 122399 - DNA, 25 bp, Canis familiaris
gagatccctaacgtccaggattctt

SEQ ID NO: 122400 - DNA, 25 bp, Canis familiaris
gagtccgtaactggtcggagtccct

SEQ ID NO: 122401 - DNA, 25 bp, Canis familiaris
gagatgccagtcactgcaggggagt

SEQ ID NO: 122402 - DNA, 25 bp, Canis familiaris
gagatctcagatgcccagtgggaag

SEQ ID NO: 122403 - DNA, 25 bp, Canis familiaris
gagatctcgcctgccaatgagaagg

SEQ ID NO: 122404 - DNA, 25 bp, Canis familiaris
gagatctcgaggtcagagtagaggg

SEQ ID NO: 122405 - DNA, 25 bp, Canis familiaris
gagatcttacagttttatgagggaa

SEQ ID NO: 122406 - DNA, 25 bp, Canis familiaris
gagatgaagaagcttttacaggata

SEQ ID NO: 122407 - DNA, 25 bp, Canis familiaris
gagataatacattttcattactgga

SEQ ID NO: 122408 - DNA, 25 bp, Canis familiaris
gagatctagactttactgctacttg

SEQ ID NO: 122409 - DNA, 25 bp, Canis familiaris
gagatttgatcattcgacatgcata

SEQ ID NO: 122410 - DNA, 25 bp, Canis familiaris
gagatcttgtcatttgcaacatgaa

SEQ ID NO: 122411 - DNA, 25 bp, Canis familiaris
gagatctctgtggattcatcactgt

SEQ ID NO: 122412 - DNA, 25 bp, Canis familiaris
gagatcctggagaagaagctgtcat

SEQ ID NO: 122413 - DNA, 25 bp, Canis familiaris
gagtccctgcagggaggtgtacggc

SEQ ID NO: 122414 - DNA, 25 bp, Canis familiaris
gagatatcccatgtgggtgggggct

SEQ ID NO: 122415 - DNA, 25 bp, Canis familiaris
ggatttgccatctgggtacggggac

SEQ ID NO: 122416 - DNA, 25 bp, Canis familiaris
gagatctagccccatgggaacttgg

SEQ ID NO: 122417 - DNA, 25 bp, Canis familiaris
gagatacaagttcgtggcacacttg

SEQ ID NO: 122418 - DNA, 25 bp, Canis familiaris
gagtaaagcctgactggaccattgc

SEQ ID NO: 122419 - DNA, 25 bp, Canis familiaris
gagttgtagctctttggattattgc

SEQ ID NO: 122420 - DNA, 25 bp, Canis familiaris
gagattccatcttgtgggattttga

SEQ ID NO: 122421 - DNA, 25 bp, Canis familiaris
gagatactgctatgtggattttgag

SEQ ID NO: 122422 - DNA, 25 bp, Canis familiaris
gagatcgctccatggtgttgtgtga

SEQ ID NO: 122423 - DNA, 25 bp, Canis familiaris
gagatgccattttggagtgtgtgtg

SEQ ID NO: 122424 - DNA, 25 bp, Canis familiaris
gagatccttatgaggcatgcgattc

SEQ ID NO: 122425 - DNA, 25 bp, Canis familiaris
gagatccgtcagatgtctggggcgc

SEQ ID NO: 122426 - DNA, 25 bp, Canis familiaris
gagatccgtcagatgtctggggcgc

SEQ ID NO: 122427 - DNA, 25 bp, Canis familiaris
gagatcctgtatcttctctgcaggt

SEQ ID NO: 122428 - DNA, 25 bp, Canis familiaris
gagttctgatctgtacctatggtcc

SEQ ID NO: 122429 - DNA, 25 bp, Canis familiaris
gagttgctattgctgaggctatgtg

SEQ ID NO: 122430 - DNA, 25 bp, Canis familiaris
gagttgcatggtctgacgctgagcc

SEQ ID NO: 122431 - DNA, 25 bp, Canis familiaris
gagattgagagcattgaccaggaga

SEQ ID NO: 122432 - DNA, 25 bp, Canis familiaris
gagattgagcaatttagctggggag

SEQ ID NO: 122433 - DNA, 25 bp, Canis familiaris
gagttgcagcaagttatcagccagc

SEQ ID NO: 122434 - DNA, 25 bp, Canis familiaris
gagttagccctaacaaagctcttaa

SEQ ID NO: 122435 - DNA, 25 bp, Canis familiaris
gagttactcccttgaagatgtttgt

SEQ ID NO: 122436 - DNA, 25 bp, Canis familiaris
gagtagactacttctggagagtttg

SEQ ID NO: 122437 - DNA, 25 bp, Canis familiaris
gagtacctgccgtggaagctaggga

SEQ ID NO: 122438 - DNA, 25 bp, Canis familiaris
gagtagagccccaggaagccagggg

SEQ ID NO: 122439 - DNA, 25 bp, Canis familiaris
gagttcaccagggtggagacaagtg

SEQ ID NO: 122440 - DNA, 25 bp, Canis familiaris
gagtttctacgaggtgggcacagct

SEQ ID NO: 122441 - DNA, 25 bp, Canis familiaris
gagatcctcgcacagagatgggccc

SEQ ID NO: 122442 - DNA, 25 bp, Canis familiaris
gagatcgccaagcgaactcagcctc

SEQ ID NO: 122443 - DNA, 25 bp, Canis familiaris
gagatcgacaaccctgagtactctc

SEQ ID NO: 122444 - DNA, 25 bp, Canis familiaris
gagatagtaacaccttgtaactcat

SEQ ID NO: 122445 - DNA, 25 bp, Canis familiaris
gagtcagatttctccttgaacatct

SEQ ID NO: 122446 - DNA, 25 bp, Canis familiaris
gagatcagaattattttaacatatg

SEQ ID NO: 122447 - DNA, 25 bp, Canis familiaris
gagatctgcaaattttatttacaag

SEQ ID NO: 122448 - DNA, 25 bp, Canis familiaris
gagttcaacagtcctgagttacacg

SEQ ID NO: 122449 - DNA, 25 bp, Canis familiaris
gagatctcatgatgggaaaataacg

SEQ ID NO: 122450 - DNA, 25 bp, Canis familiaris
gagatctcatgatggaatataacgg

SEQ ID NO: 122451 - DNA, 25 bp, Canis familiaris
gagtctcatgtatattgacggcggg

SEQ ID NO: 122452 - DNA, 25 bp, Canis familiaris
gagttgtgttaaagatctggctaga

SEQ ID NO: 122453 - DNA, 25 bp, Canis familiaris
gagtatgactaactgcacattccta

SEQ ID NO: 122454 - DNA, 25 bp, Canis familiaris
gagttgactggcatgtattcttgaa

SEQ ID NO: 122455 - DNA, 25 bp, Canis familiaris
gagttgttggtctttcatcttagag

SEQ ID NO: 122456 - DNA, 25 bp, Canis familiaris
gagttgtgtggttcttttatctgag

SEQ ID NO: 122457 - DNA, 25 bp, Canis familiaris
gagttttgtattcgtattcctggag

SEQ ID NO: 122458 - DNA, 25 bp, Canis familiaris
gagttttgaatgtcttcgtccaggg

SEQ ID NO: 122459 - DNA, 25 bp, Canis familiaris
gagtttaacatgcctgtggacctga

SEQ ID NO: 122460 - DNA, 25 bp, Canis familiaris
gagatttgaacaggcatttcaccaa

SEQ ID NO: 122461 - DNA, 25 bp, Canis familiaris
gagattggcagagccattgccacct

SEQ ID NO: 122462 - DNA, 25 bp, Canis familiaris
gagattgagagcaccgacacagcct

SEQ ID NO: 122463 - DNA, 25 bp, Canis familiaris
gagatagggcattctggacacagag

SEQ ID NO: 122464 - DNA, 25 bp, Canis familiaris
gagatcgggagacagccacaaggcc

SEQ ID NO: 122465 - DNA, 25 bp, Canis familiaris
gagatcgaagaaccagcctcaaacc

SEQ ID NO: 122466 - DNA, 25 bp, Canis familiaris
gagatcacatattaggccacaaaac

SEQ ID NO: 122467 - DNA, 25 bp, Canis familiaris
gagatagatcacccagagcactaaa

SEQ ID NO: 122468 - DNA, 25 bp, Canis familiaris
gagatcagtgctccaagataataaa

SEQ ID NO: 122469 - DNA, 25 bp, Canis familiaris
gagatcagctctacagttcaggaag

SEQ ID NO: 122470 - DNA, 25 bp, Canis familiaris
gagatctcagctgcagttatgaaga

SEQ ID NO: 122471 - DNA, 25 bp, Canis familiaris
gagttagtccagtcacagatatgca

SEQ ID NO: 122472 - DNA, 25 bp, Canis familiaris
gagttgtggccagttctatatcatt

SEQ ID NO: 122473 - DNA, 25 bp, Canis familiaris
gagttttccagtttttcttatgtga

SEQ ID NO: 122474 - DNA, 25 bp, Canis familiaris
gagatttccaataaattttttctgt

SEQ ID NO: 122475 - DNA, 25 bp, Canis familiaris
gagatttcaaagcagttttcgttcc

SEQ ID NO: 122476 - DNA, 25 bp, Canis familiaris
gagatcccgaagtgttttctataga

SEQ ID NO: 122477 - DNA, 25 bp, Canis familiaris
gagtcccgaaaactttcctagtgct

SEQ ID NO: 122478 - DNA, 25 bp, Canis familiaris
gagtagggaagacctgcgtcctttt

SEQ ID NO: 122479 - DNA, 25 bp, Canis familiaris
gagtacgacatgaaggccgtcctct

SEQ ID NO: 122480 - DNA, 25 bp, Canis familiaris
gagtatcaactggtcccgttatctc

SEQ ID NO: 122481 - DNA, 25 bp, Canis familiaris
gagttataccctactctttagctct

SEQ ID NO: 122482 - DNA, 25 bp, Canis familiaris
gagtttaattatcccatgttatctt

SEQ ID NO: 122483 - DNA, 25 bp, Canis familiaris
gagatttttgtcaacaactttcttt

SEQ ID NO: 122484 - DNA, 25 bp, Canis familiaris
gagattgttattacagattccttct

SEQ ID NO: 122485 - DNA, 25 bp, Canis familiaris
gagatatcgttctacttctcctttt

SEQ ID NO: 122486 - DNA, 25 bp, Canis familiaris
gagtttgcttaagactctctctctc

SEQ ID NO: 122487 - DNA, 25 bp, Canis familiaris
gagttcagtaacatgattagctttc

SEQ ID NO: 122488 - DNA, 25 bp, Canis familiaris
gagttaaacaacaattcagtcttag

SEQ ID NO: 122489 - DNA, 25 bp, Canis familiaris
gagtataaaagtgttctacttgcac

SEQ ID NO: 122490 - DNA, 25 bp, Canis familiaris
gagttgtaacagagtttccctccgg

SEQ ID NO: 122491 - DNA, 25 bp, Canis familiaris
gagtttagagacatttctcccatct

SEQ ID NO: 122492 - DNA, 25 bp, Canis familiaris
gagttgtctagtgttctttctcttt

SEQ ID NO: 122493 - DNA, 25 bp, Canis familiaris
gagatagggaatgttctttcttcat

SEQ ID NO: 122494 - DNA, 25 bp, Canis familiaris
gagtagtagttgctttttagtccat

SEQ ID NO: 122495 - DNA, 25 bp, Canis familiaris
gagtaggacttgggtttctcgttgc

SEQ ID NO: 122496 - DNA, 25 bp, Canis familiaris
gagtaggagtgtggttggtgtcctt

SEQ ID NO: 122497 - DNA, 25 bp, Canis familiaris
gagttcaggtgggcttggctgtact

SEQ ID NO: 122498 - DNA, 25 bp, Canis familiaris
gagttcaagtggtctcattgtaaat

SEQ ID NO: 122499 - DNA, 25 bp, Canis familiaris
gagttctctgtgttctcggaatcaa

SEQ ID NO: 122500 - DNA, 25 bp, Canis familiaris
gagtccctgaatctctggtatgact

SEQ ID NO: 122501 - DNA, 25 bp, Canis familiaris
gagtcacacggtccagtggtaccaa

SEQ ID NO: 122502 - DNA, 25 bp, Canis familiaris
gagtacactgtaccgggtaaaacag

SEQ ID NO: 122503 - DNA, 25 bp, Canis familiaris
gagttatttatctgggcggaaaggg

SEQ ID NO: 122504 - DNA, 25 bp, Canis familiaris
gagttaatgttgtcgggggcgcaca

SEQ ID NO: 122505 - DNA, 25 bp, Canis familiaris
gagtaacattccggggcggcgatag

SEQ ID NO: 122506 - DNA, 25 bp, Canis familiaris
gagtccaaagccagggtcaggaagg

SEQ ID NO: 122507 - DNA, 25 bp, Canis familiaris
gagtcggaagatgaaggccagttag

SEQ ID NO: 122508 - DNA, 25 bp, Canis familiaris
gatgttaacctttaggccagatttg

SEQ ID NO: 122509 - DNA, 25 bp, Canis familiaris
gagttaaatctcaaacccgtgcagt

SEQ ID NO: 122510 - DNA, 25 bp, Canis familiaris
gagttgtgaattcaaatctcgtgtt

SEQ ID NO: 122511 - DNA, 25 bp, Canis familiaris
gagttgtgagttcaagtcccacttg

SEQ ID NO: 122512 - DNA, 25 bp, Canis familiaris
gagtttgtttttggtccttattgct

SEQ ID NO: 122513 - DNA, 25 bp, Canis familiaris
gagttctgtgttgggagttttattt

SEQ ID NO: 122514 - DNA, 25 bp, Canis familiaris
gagtttatttccgactttctttgct

SEQ ID NO: 122515 - DNA, 25 bp, Canis familiaris
gagttattttccaaggttccatctt

SEQ ID NO: 122516 - DNA, 25 bp, Canis familiaris
gagattatgttttcaagttttcctc

SEQ ID NO: 122517 - DNA, 25 bp, Canis familiaris
gagttatgtttattcagtgtttcct

SEQ ID NO: 122518 - DNA, 25 bp, Canis familiaris
gagattattttatccgagtgccccg

SEQ ID NO: 122519 - DNA, 25 bp, Canis familiaris
gagatttattctcacgcagcgtgga

SEQ ID NO: 122520 - DNA, 25 bp, Canis familiaris
gagttggattcttatcggtgggaca

SEQ ID NO: 122521 - DNA, 25 bp, Canis familiaris
gagttagttcatttccttgagataa

SEQ ID NO: 122522 - DNA, 25 bp, Canis familiaris
gagttgttctcagcctttctgaaaa

SEQ ID NO: 122523 - DNA, 25 bp, Canis familiaris
gagttgttcatagcctttgtagctt

SEQ ID NO: 122524 - DNA, 25 bp, Canis familiaris
gagttgattctaaccttctgcaagg

SEQ ID NO: 122525 - DNA, 25 bp, Canis familiaris
gagttgtgctctagaggttctccaa

SEQ ID NO: 122526 - DNA, 25 bp, Canis familiaris
gagttgttcttttgtacatcatata

SEQ ID NO: 122527 - DNA, 25 bp, Canis familiaris
gagttggccttgtactacagagata

SEQ ID NO: 122528 - DNA, 25 bp, Canis familiaris
gagtaggcacgttcactgtcaagaa

SEQ ID NO: 122529 - DNA, 25 bp, Canis familiaris
gatggaggccggtactggaagttca

SEQ ID NO: 122530 - DNA, 25 bp, Canis familiaris
gagtgccccaggaacgtgatgatgc

SEQ ID NO: 122531 - DNA, 25 bp, Canis familiaris
gagtcccccgtatcatagatcactc

SEQ ID NO: 122532 - DNA, 25 bp, Canis familiaris
gagtaggagccagttcaaagaccat

SEQ ID NO: 122533 - DNA, 25 bp, Canis familiaris
gagataagccctgactgaatcaccc

SEQ ID NO: 122534 - DNA, 25 bp, Canis familiaris
gagtactcggtcaacagaagacctc

SEQ ID NO: 122535 - DNA, 25 bp, Canis familiaris
gagtagccggaccagaaggactccc

SEQ ID NO: 122536 - DNA, 25 bp, Canis familiaris
gagtcagccagctgtgaagggcccg

SEQ ID NO: 122537 - DNA, 25 bp, Canis familiaris
gagtaccagcactggatgggcctca

SEQ ID NO: 122538 - DNA, 25 bp, Canis familiaris
gagtgactggagaggagggattcgg

SEQ ID NO: 122539 - DNA, 25 bp, Canis familiaris
gagtactgtgggataccctgtggtg

SEQ ID NO: 122540 - DNA, 25 bp, Canis familiaris
gagtacgtcgtggagtccactggcg

SEQ ID NO: 122541 - DNA, 25 bp, Canis familiaris
gagtaggctctgatcagtgccagct

SEQ ID NO: 122542 - DNA, 25 bp, Canis familiaris
gagtaggcctatagttcctgctttc

SEQ ID NO: 122543 - DNA, 25 bp, Canis familiaris
gagttgtccaatagtatcctctcgt

SEQ ID NO: 122544 - DNA, 25 bp, Canis familiaris
gagtttccaagggtcgtagtgtctg

SEQ ID NO: 122545 - DNA, 25 bp, Canis familiaris
gagtccccaggatacctaggatctg

SEQ ID NO: 122546 - DNA, 25 bp, Canis familiaris
gagtccctacgagtaccggagactt

SEQ ID NO: 122547 - DNA, 25 bp, Canis familiaris
gagtctggtagacgacaccgggaaa

SEQ ID NO: 122548 - DNA, 25 bp, Canis familiaris
gagtatatttgacaaccgcggagag

SEQ ID NO: 122549 - DNA, 25 bp, Canis familiaris
gagatattttgacaccacgagaagg

SEQ ID NO: 122550 - DNA, 25 bp, Canis familiaris
gagtctattcgtcacccagaaaagc

SEQ ID NO: 122551 - DNA, 25 bp, Canis familiaris
gagttttccaaacaaagcaatatgc

SEQ ID NO: 122552 - DNA, 25 bp, Canis familiaris
gagatttgtaaatgccaagccctgg

SEQ ID NO: 122553 - DNA, 25 bp, Canis familiaris
gagtgctttaactcaaaccgctcac

SEQ ID NO: 122554 - DNA, 25 bp, Canis familiaris
gagtgccattacacaaacctacaca

SEQ ID NO: 122555 - DNA, 25 bp, Canis familiaris
gagtccgtgtcgacaacgaccacaa

SEQ ID NO: 122556 - DNA, 25 bp, Canis familiaris
gagtatgcgtgtgaggacgatgacc

SEQ ID NO: 122557 - DNA, 25 bp, Canis familiaris
gagtatatgtgtcaggatttgcagc

SEQ ID NO: 122558 - DNA, 25 bp, Canis familiaris
gagtaagttgcgcagatttgagatc

SEQ ID NO: 122559 - DNA, 25 bp, Canis familiaris
gagttgcgtatcctatattcgaata

SEQ ID NO: 122560 - DNA, 25 bp, Canis familiaris
gagttcccatcctatttgcaaaaga

SEQ ID NO: 122561 - DNA, 25 bp, Canis familiaris
gagttacatcatacttgcttaaaca

SEQ ID NO: 122562 - DNA, 25 bp, Canis familiaris
gagtatacatcaagttgtggaatca

SEQ ID NO: 122563 - DNA, 25 bp, Canis familiaris
gagatatcctcagtttatacaacac

SEQ ID NO: 122564 - DNA, 25 bp, Canis familiaris
gagatatttagggacacacacacac

SEQ ID NO: 122565 - DNA, 25 bp, Canis familiaris
gagatatttcagccatggaacccgc

SEQ ID NO: 122566 - DNA, 25 bp, Canis familiaris
gagatattcagacatgtgaacctgc

SEQ ID NO: 122567 - DNA, 25 bp, Canis familiaris
gagtataaagattgtggtcctgcca

SEQ ID NO: 122568 - DNA, 25 bp, Canis familiaris
gagttacatagactgtgtaccacca

SEQ ID NO: 122569 - DNA, 25 bp, Canis familiaris
gagtaaatttttgatccaccagctg

SEQ ID NO: 122570 - DNA, 25 bp, Canis familiaris
ggtagaatctttgttccaacctttg

SEQ ID NO: 122571 - DNA, 25 bp, Canis familiaris
gagtaaataattcttcgaccctagg

SEQ ID NO: 122572 - DNA, 25 bp, Canis familiaris
gagtacatagaaattttattcccga

SEQ ID NO: 122573 - DNA, 25 bp, Canis familiaris
gagtcctctaaatttgtagttccta

SEQ ID NO: 122574 - DNA, 25 bp, Canis familiaris
gagtcacatctcgggtttatgtttt

SEQ ID NO: 122575 - DNA, 25 bp, Canis familiaris
gagtaatatacttgctttaattctt

SEQ ID NO: 122576 - DNA, 25 bp, Canis familiaris
gagtagattcatatttttttttagt

SEQ ID NO: 122577 - DNA, 25 bp, Canis familiaris
gagtcataggctgaacttttttttt

SEQ ID NO: 122578 - DNA, 25 bp, Canis familiaris
gagtatgtgagtgcagaatttctta

SEQ ID NO: 122579 - DNA, 25 bp, Canis familiaris
gagttgatggattcgcagcttgttg

SEQ ID NO: 122580 - DNA, 25 bp, Canis familiaris
gagttgtacagagcagctttctccc

SEQ ID NO: 122581 - DNA, 25 bp, Canis familiaris
gagtcgaagccagactccagctcaa

SEQ ID NO: 122582 - DNA, 25 bp, Canis familiaris
gagtctcagatcagcaactgccagc

SEQ ID NO: 122583 - DNA, 25 bp, Canis familiaris
gagtcataatcagcatcacggacag

SEQ ID NO: 122584 - DNA, 25 bp, Canis familiaris
gagtcaacacacaaaggccacaacc

SEQ ID NO: 122585 - DNA, 25 bp, Canis familiaris
gagattacacaagcgtctaaggcac

SEQ ID NO: 122586 - DNA, 25 bp, Canis familiaris
gagttccacacagagttggagcggc

SEQ ID NO: 122587 - DNA, 25 bp, Canis familiaris
gagtcatccaagacagaattctggt

SEQ ID NO: 122588 - DNA, 25 bp, Canis familiaris
gagtcttcatacttcagtatctggt

SEQ ID NO: 122589 - DNA, 25 bp, Canis familiaris
gagttcctcatctctgaatcaggtg

SEQ ID NO: 122590 - DNA, 25 bp, Canis familiaris
gagttctctcaatccagagggggaa

SEQ ID NO: 122591 - DNA, 25 bp, Canis familiaris
gagttgtcccaacagaggagaagtt

SEQ ID NO: 122592 - DNA, 25 bp, Canis familiaris
gagttgtttccagaggagacaagcc

SEQ ID NO: 122593 - DNA, 25 bp, Canis familiaris
gagttggtcctacaagaacactggc

SEQ ID NO: 122594 - DNA, 25 bp, Canis familiaris
gagtcacgtccgactaaaaccggat

SEQ ID NO: 122595 - DNA, 25 bp, Canis familiaris
ggtcctttcgaccacaaaacgtgag

SEQ ID NO: 122596 - DNA, 25 bp, Canis familiaris
gagtccttggaacaagcaaactggg

SEQ ID NO: 122597 - DNA, 25 bp, Canis familiaris
gatggactttttcaacacaacgata

SEQ ID NO: 122598 - DNA, 25 bp, Canis familiaris
gagtcactttttcaaccaattattc

SEQ ID NO: 122599 - DNA, 25 bp, Canis familiaris
gagtacggttctcacagacaatgtg

SEQ ID NO: 122600 - DNA, 25 bp, Canis familiaris
gagtcaccgttggaacaaaagctaa

SEQ ID NO: 122601 - DNA, 25 bp, Canis familiaris
gagtaggctttggaaatgttctcta

SEQ ID NO: 122602 - DNA, 25 bp, Canis familiaris
gagtagtggtatggaaacattccta

SEQ ID NO: 122603 - DNA, 25 bp, Canis familiaris
gagtagtctgattccacatacattc

SEQ ID NO: 122604 - DNA, 25 bp, Canis familiaris
gagttgcttggactactacatgcct

SEQ ID NO: 122605 - DNA, 25 bp, Canis familiaris
gagattattgagcttcatcatgacc

SEQ ID NO: 122606 - DNA, 25 bp, Canis familiaris
gagattgctctaacttccaacagaa

SEQ ID NO: 122607 - DNA, 25 bp, Canis familiaris
gagtctggctgaacttcacactgat

SEQ ID NO: 122608 - DNA, 25 bp, Canis familiaris
gagtctggcaggtagtcacttgata

SEQ ID NO: 122609 - DNA, 25 bp, Canis familiaris
gagtcaggactcttccatttgtaac

SEQ ID NO: 122610 - DNA, 25 bp, Canis familiaris
gagtcccctcttcatgggaaaggtg

SEQ ID NO: 122611 - DNA, 25 bp, Canis familiaris
gagtcccctcttcatgggaaaggtg

SEQ ID NO: 122612 - DNA, 25 bp, Canis familiaris
gagtccccttctgatgtggaggagc

SEQ ID NO: 122613 - DNA, 25 bp, Canis familiaris
gagattccctactgagtgcgggggc

SEQ ID NO: 122614 - DNA, 25 bp, Canis familiaris
gagattctcttttgggggatggggg

SEQ ID NO: 122615 - DNA, 25 bp, Canis familiaris
gagttagactgttggggttgggtgt

SEQ ID NO: 122616 - DNA, 25 bp, Canis familiaris
gagattcaacttttgtggagtgtca

SEQ ID NO: 122617 - DNA, 25 bp, Canis familiaris
gagttgttcattttgctgaaattca

SEQ ID NO: 122618 - DNA, 25 bp, Canis familiaris
gagttcttcattttgcgtacagctc

SEQ ID NO: 122619 - DNA, 25 bp, Canis familiaris
gagttcattttattttgatcagttc

SEQ ID NO: 122620 - DNA, 25 bp, Canis familiaris
gagattggtcttcgcttaacagttc

SEQ ID NO: 122621 - DNA, 25 bp, Canis familiaris
gagtatggtctacagtcaagcctcc

SEQ ID NO: 122622 - DNA, 25 bp, Canis familiaris
gagttgagcccacaggagaccactc

SEQ ID NO: 122623 - DNA, 25 bp, Canis familiaris
gagtttgccactcacgaagaactgt

SEQ ID NO: 122624 - DNA, 25 bp, Canis familiaris
gagattcccagtcaccagtagacta

SEQ ID NO: 122625 - DNA, 25 bp, Canis familiaris
gagattcccagtaacacatccagaa

SEQ ID NO: 122626 - DNA, 25 bp, Canis familiaris
gagattctcaattatagagcaccaa

SEQ ID NO: 122627 - DNA, 25 bp, Canis familiaris
gagtatcatcaggttgtacagcaga

SEQ ID NO: 122628 - DNA, 25 bp, Canis familiaris
gagtacattatactgtttcagaagc

SEQ ID NO: 122629 - DNA, 25 bp, Canis familiaris
gagtttgattgccgtttccaaggtc

SEQ ID NO: 122630 - DNA, 25 bp, Canis familiaris
gagtatcgttcaggtatgtcccgga

SEQ ID NO: 122631 - DNA, 25 bp, Canis familiaris
gagattgccatccgtgtgttccggg

SEQ ID NO: 122632 - DNA, 25 bp, Canis familiaris
gagattgccatccgagtgtttcgtg

SEQ ID NO: 122633 - DNA, 25 bp, Canis familiaris
gagattgccagcctgagattcgtct

SEQ ID NO: 122634 - DNA, 25 bp, Canis familiaris
gagttggcagtttatctcagatctt

SEQ ID NO: 122635 - DNA, 25 bp, Canis familiaris
gagtttcatttgtctctcagatgct

SEQ ID NO: 122636 - DNA, 25 bp, Canis familiaris
gagtactcatctaattccactttct

SEQ ID NO: 122637 - DNA, 25 bp, Canis familiaris
gagtatccctatatatcaagtattt

SEQ ID NO: 122638 - DNA, 25 bp, Canis familiaris
gagtttcctgattgagattcagtgc

SEQ ID NO: 122639 - DNA, 25 bp, Canis familiaris
gagtatctccttcagtgtggtcttc

SEQ ID NO: 122640 - DNA, 25 bp, Canis familiaris
gagtaccattctgcaggctaatcag

SEQ ID NO: 122641 - DNA, 25 bp, Canis familiaris
gagtaaccctacagctgaatctggt

SEQ ID NO: 122642 - DNA, 25 bp, Canis familiaris
gagttcccctaggctgtgaatattg

SEQ ID NO: 122643 - DNA, 25 bp, Canis familiaris
gagtatccctttggcgctttattat

SEQ ID NO: 122644 - DNA, 25 bp, Canis familiaris
gagttccttgttgccatgtgttaaa

SEQ ID NO: 122645 - DNA, 25 bp, Canis familiaris
gagttccttgtttgctgtgctggaa

SEQ ID NO: 122646 - DNA, 25 bp, Canis familiaris
gagtcccttgataatggccgaaaac

SEQ ID NO: 122647 - DNA, 25 bp, Canis familiaris
gagtcccgtcaagttcatcaaaaaa

SEQ ID NO: 122648 - DNA, 25 bp, Canis familiaris
gagtcctcgtcagcagatacaatcc

SEQ ID NO: 122649 - DNA, 25 bp, Canis familiaris
gagtctctcccagatgtgtacataa

SEQ ID NO: 122650 - DNA, 25 bp, Canis familiaris
gagtccactcatcacggtaataata

SEQ ID NO: 122651 - DNA, 25 bp, Canis familiaris
gagtcacctgcttcactgagtaagc

SEQ ID NO: 122652 - DNA, 25 bp, Canis familiaris
gagtaactgcttcctaaaccatttt

SEQ ID NO: 122653 - DNA, 25 bp, Canis familiaris
gagtcgagcctccattaaacgactt

SEQ ID NO: 122654 - DNA, 25 bp, Canis familiaris
gagtctgcaacaactttcaaggtct

SEQ ID NO: 122655 - DNA, 25 bp, Canis familiaris
gagttgcagtcagctatgtctgagg

SEQ ID NO: 122656 - DNA, 25 bp, Canis familiaris
gagttggctgagatagttgatgttc

SEQ ID NO: 122657 - DNA, 25 bp, Canis familiaris
gagattggcatggctttatttgttt

SEQ ID NO: 122658 - DNA, 25 bp, Canis familiaris
gagattggcctggttttgcttactg

SEQ ID NO: 122659 - DNA, 25 bp, Canis familiaris
gagattgacccaaatgggcttttgg

SEQ ID NO: 122660 - DNA, 25 bp, Canis familiaris
gagttccatccaactggagtgatgt

SEQ ID NO: 122661 - DNA, 25 bp, Canis familiaris
gagtatccaccaatagatgaatgaa

SEQ ID NO: 122662 - DNA, 25 bp, Canis familiaris
gagttcccttatagattcatgaata

SEQ ID NO: 122663 - DNA, 25 bp, Canis familiaris
gagggcccttacaagtctaaggact

SEQ ID NO: 122664 - DNA, 25 bp, Canis familiaris
gaggtttttccttgtccaagacctg

SEQ ID NO: 122665 - DNA, 25 bp, Canis familiaris
gagttcttttagtagtaatagttcg

SEQ ID NO: 122666 - DNA, 25 bp, Canis familiaris
gagttcttaagccaagtccatttcc

SEQ ID NO: 122667 - DNA, 25 bp, Canis familiaris
gagttgttcagagaactcagttggc

SEQ ID NO: 122668 - DNA, 25 bp, Canis familiaris
gagattggtgaacccactcaacggc

SEQ ID NO: 122669 - DNA, 25 bp, Canis familiaris
gagattgtacgttgccctaacagac

SEQ ID NO: 122670 - DNA, 25 bp, Canis familiaris
gagtagtaagtttgaagcaagcttc

SEQ ID NO: 122671 - DNA, 25 bp, Canis familiaris
gagtaggtttggccagaccagcctt

SEQ ID NO: 122672 - DNA, 25 bp, Canis familiaris
gaggccgttgaggtaaccagacttt

SEQ ID NO: 122673 - DNA, 25 bp, Canis familiaris
gagtgccggttggtgcgacaagacc

SEQ ID NO: 122674 - DNA, 25 bp, Canis familiaris
gagttctgggtggacaacaccacct

SEQ ID NO: 122675 - DNA, 25 bp, Canis familiaris
gagttttgggcatacagcaggcatg

SEQ ID NO: 122676 - DNA, 25 bp, Canis familiaris
gagtccgtcgatcaacagcgggttt

SEQ ID NO: 122677 - DNA, 25 bp, Canis familiaris
gagtccgcttgtcaagaaggacctt

SEQ ID NO: 122678 - DNA, 25 bp, Canis familiaris
gagttggccgtcgtgagagggaccg

SEQ ID NO: 122679 - DNA, 25 bp, Canis familiaris
gagtttccgccagacaatggaccag

SEQ ID NO: 122680 - DNA, 25 bp, Canis familiaris
gagttcacactggacaaaagcccta

SEQ ID NO: 122681 - DNA, 25 bp, Canis familiaris
gagttacagctcaggaaaagcctac

SEQ ID NO: 122682 - DNA, 25 bp, Canis familiaris
gagttagcagccagacagagagtcc

SEQ ID NO: 122683 - DNA, 25 bp, Canis familiaris
gagttctgagccagacagactcctt

SEQ ID NO: 122684 - DNA, 25 bp, Canis familiaris
gagtacagtgccatgagagaccaat

SEQ ID NO: 122685 - DNA, 25 bp, Canis familiaris
gagtacagtgcaatgagggaccagt

SEQ ID NO: 122686 - DNA, 25 bp, Canis familiaris
gagtatgaggatggggacaagctgc

SEQ ID NO: 122687 - DNA, 25 bp, Canis familiaris
gagtctgagtccggaggctcagtgc

SEQ ID NO: 122688 - DNA, 25 bp, Canis familiaris
gagattggacatgggacctcacctt

SEQ ID NO: 122689 - DNA, 25 bp, Canis familiaris
gagattgtgttggatgattctgccc

SEQ ID NO: 122690 - DNA, 25 bp, Canis familiaris
gagttgtgattggtgagccagccat

SEQ ID NO: 122691 - DNA, 25 bp, Canis familiaris
gagttggagggaggctcagcctacg

SEQ ID NO: 122692 - DNA, 25 bp, Canis familiaris
gagattgagagtcgagcactcccgc

SEQ ID NO: 122693 - DNA, 25 bp, Canis familiaris
gagtatagaaaatctcatctctgct

SEQ ID NO: 122694 - DNA, 25 bp, Canis familiaris
gagtgacgccaatgaccacgtcttc

SEQ ID NO: 122695 - DNA, 25 bp, Canis familiaris
gagtactgccgaatatctaccttat

SEQ ID NO: 122696 - DNA, 25 bp, Canis familiaris
gagtattgccagatcctaactctct

SEQ ID NO: 122697 - DNA, 25 bp, Canis familiaris
gagtaaccagttgcattgcggcctc

SEQ ID NO: 122698 - DNA, 25 bp, Canis familiaris
gagtcatacaattcttttcagtcct

SEQ ID NO: 122699 - DNA, 25 bp, Canis familiaris
gagttccaagttttcatctgctcct

SEQ ID NO: 122700 - DNA, 25 bp, Canis familiaris
gagtaccaaataaatctcccaatta

SEQ ID NO: 122701 - DNA, 25 bp, Canis familiaris
gagtaccaagacaattatcccaaaa

SEQ ID NO: 122702 - DNA, 25 bp, Canis familiaris
gagttctaacatactttctctaaaa

SEQ ID NO: 122703 - DNA, 25 bp, Canis familiaris
gagtactaactgatgtccattcaac

SEQ ID NO: 122704 - DNA, 25 bp, Canis familiaris
gagtcactatacactgaccctagcc

SEQ ID NO: 122705 - DNA, 25 bp, Canis familiaris
gagtcaaaggctctaccagctgagc

SEQ ID NO: 122706 - DNA, 25 bp, Canis familiaris
gagtaaggctgtctagcacctagca

SEQ ID NO: 122707 - DNA, 25 bp, Canis familiaris
gagttatggatctattagcaaaaga

SEQ ID NO: 122708 - DNA, 25 bp, Canis familiaris
gagttcatgtaccattggcagcatt

SEQ ID NO: 122709 - DNA, 25 bp, Canis familiaris
gagttctggaaattgattgcataat

SEQ ID NO: 122710 - DNA, 25 bp, Canis familiaris
gagtacgcagaatatgagtcataat

SEQ ID NO: 122711 - DNA, 25 bp, Canis familiaris
gagtatgcccaatcaatatcacaat

SEQ ID NO: 122712 - DNA, 25 bp, Canis familiaris
gagtagccggagacaaggcagcagt

SEQ ID NO: 122713 - DNA, 25 bp, Canis familiaris
gagtacacaggggccaacaagtatg

SEQ ID NO: 122714 - DNA, 25 bp, Canis familiaris
gagtaccgggcggtgacacggatcg

SEQ ID NO: 122715 - DNA, 25 bp, Canis familiaris
gagtcacttgaggaggttccggaca

SEQ ID NO: 122716 - DNA, 25 bp, Canis familiaris
gagtaggagctggagtcaatccggg

SEQ ID NO: 122717 - DNA, 25 bp, Canis familiaris
gagtatggagccaactgacagccga

SEQ ID NO: 122718 - DNA, 25 bp, Canis familiaris
gagttggacatcaactggcacccac

SEQ ID NO: 122719 - DNA, 25 bp, Canis familiaris
gagtaggatcagagtgaacccccac

SEQ ID NO: 122720 - DNA, 25 bp, Canis familiaris
gagtcccagcaagatgaaaccacca

SEQ ID NO: 122721 - DNA, 25 bp, Canis familiaris
gagtcaccatcatgcccaaagacat

SEQ ID NO: 122722 - DNA, 25 bp, Canis familiaris
gagtatccatcacgctagacaagct

SEQ ID NO: 122723 - DNA, 25 bp, Canis familiaris
gagttcacatgacctgggtgcagcc

SEQ ID NO: 122724 - DNA, 25 bp, Canis familiaris
gagttcactcagtagagtccactct

SEQ ID NO: 122725 - DNA, 25 bp, Canis familiaris
gagttcatatcacttttgcaacatc

SEQ ID NO: 122726 - DNA, 25 bp, Canis familiaris
gagttcaatattttatgctttcatg

SEQ ID NO: 122727 - DNA, 25 bp, Canis familiaris
gagtccagatgcttagtagatgttc

SEQ ID NO: 122728 - DNA, 25 bp, Canis familiaris
gagtcccatcttcacatgatttacg

SEQ ID NO: 122729 - DNA, 25 bp, Canis familiaris
gagtcccttgtggaagcaattaaaa

SEQ ID NO: 122730 - DNA, 25 bp, Canis familiaris
gagtcacttgttcaaccatatccca

SEQ ID NO: 122731 - DNA, 25 bp, Canis familiaris
gagtatctctttgacaagcacaccc

SEQ ID NO: 122732 - DNA, 25 bp, Canis familiaris
gagtatctctttgacaagcacacct

SEQ ID NO: 122733 - DNA, 25 bp, Canis familiaris
gagtttctattggacaaatcttctg

SEQ ID NO: 122734 - DNA, 25 bp, Canis familiaris
gagttccagtatcatccaagcttct

SEQ ID NO: 122735 - DNA, 25 bp, Canis familiaris
gagttgttgataaatccgagattct

SEQ ID NO: 122736 - DNA, 25 bp, Canis familiaris
gagttgcctgagagaacgatggttt

SEQ ID NO: 122737 - DNA, 25 bp, Canis familiaris
gagttcctgggaccaagtgttcgct

SEQ ID NO: 122738 - DNA, 25 bp, Canis familiaris
gagtttccgcgggatatgctttctc

SEQ ID NO: 122739 - DNA, 25 bp, Canis familiaris
gagtttactggggtaatactctcta

SEQ ID NO: 122740 - DNA, 25 bp, Canis familiaris
gagtcctttggacctgatcaacttc

SEQ ID NO: 122741 - DNA, 25 bp, Canis familiaris
gagtacgttgtgaactgtaaccagg

SEQ ID NO: 122742 - DNA, 25 bp, Canis familiaris
gagtagacggagactctcttcagcc

SEQ ID NO: 122743 - DNA, 25 bp, Canis familiaris
gagtatgatcaggtaactttcgacc

SEQ ID NO: 122744 - DNA, 25 bp, Canis familiaris
gagtttcagtgcaccttcataagga

SEQ ID NO: 122745 - DNA, 25 bp, Canis familiaris
gagtttggacttctgcagaaatgga

SEQ ID NO: 122746 - DNA, 25 bp, Canis familiaris
gagtccggaattgtgcccgatggca

SEQ ID NO: 122747 - DNA, 25 bp, Canis familiaris
gagtcgcggtcaagtagtctggaaa

SEQ ID NO: 122748 - DNA, 25 bp, Canis familiaris
gagtatggtggcaggatctctggaa

SEQ ID NO: 122749 - DNA, 25 bp, Canis familiaris
gagtctggatgtgctagatctctgt

SEQ ID NO: 122750 - DNA, 25 bp, Canis familiaris
gagttgtattagatgcttcattcca

SEQ ID NO: 122751 - DNA, 25 bp, Canis familiaris
gagttctcatgtatttctttgccat

SEQ ID NO: 122752 - DNA, 25 bp, Canis familiaris
gagtttcacatttcttttgatctat

SEQ ID NO: 122753 - DNA, 25 bp, Canis familiaris
gagttgcattcattatcttttatca

SEQ ID NO: 122754 - DNA, 25 bp, Canis familiaris
gagttgcagtgataatccctctcca

SEQ ID NO: 122755 - DNA, 25 bp, Canis familiaris
gagttaagataactcctctccctgg

SEQ ID NO: 122756 - DNA, 25 bp, Canis familiaris
gagttagggagactactcgcctctg

SEQ ID NO: 122757 - DNA, 25 bp, Canis familiaris
gagttgagggtgtgtgtccctgctc

SEQ ID NO: 122758 - DNA, 25 bp, Canis familiaris
gagttatggaggtggcatgcggccc

SEQ ID NO: 122759 - DNA, 25 bp, Canis familiaris
gagtttatactgtgtgctaggcctt

SEQ ID NO: 122760 - DNA, 25 bp, Canis familiaris
gagtttatgggatcttatagccttg

SEQ ID NO: 122761 - DNA, 25 bp, Canis familiaris
gagtcttctggaaggttttgccttg

SEQ ID NO: 122762 - DNA, 25 bp, Canis familiaris
gagtttttaacagcatcttccgctg

SEQ ID NO: 122763 - DNA, 25 bp, Canis familiaris
gagttttaaccagcattctccgctg

SEQ ID NO: 122764 - DNA, 25 bp, Canis familiaris
gagtttgaaaccgtcattcctcttt

SEQ ID NO: 122765 - DNA, 25 bp, Canis familiaris
gagtttcaatatttctcaccctctt

SEQ ID NO: 122766 - DNA, 25 bp, Canis familiaris
gagtttgatatctgcttcacctcag

SEQ ID NO: 122767 - DNA, 25 bp, Canis familiaris
gagttgatgaactgctacaagtccc

SEQ ID NO: 122768 - DNA, 25 bp, Canis familiaris
gagttgaagagctacccaaggtccc

SEQ ID NO: 122769 - DNA, 25 bp, Canis familiaris
gagtatgaaaaggcccagtcgtccc

SEQ ID NO: 122770 - DNA, 25 bp, Canis familiaris
gagtttagactggtccagctctgac

SEQ ID NO: 122771 - DNA, 25 bp, Canis familiaris
gagtcttagagttgtttgcatcatg

SEQ ID NO: 122772 - DNA, 25 bp, Canis familiaris
gagtttcaggttttgtgtcattttt

SEQ ID NO: 122773 - DNA, 25 bp, Canis familiaris
gagttcaaagctacacttgttttct

SEQ ID NO: 122774 - DNA, 25 bp, Canis familiaris
gagttcaaatgtgcagtgtttctaa

SEQ ID NO: 122775 - DNA, 25 bp, Canis familiaris
gagttcctcatgttgcagggtttaa

SEQ ID NO: 122776 - DNA, 25 bp, Canis familiaris
gagtagtcctattaagccttgtaac

SEQ ID NO: 122777 - DNA, 25 bp, Canis familiaris
gagtacttcatctagatcagccttt

SEQ ID NO: 122778 - DNA, 25 bp, Canis familiaris
gagtctgctttgggggcagctgtct

SEQ ID NO: 122779 - DNA, 25 bp, Canis familiaris
gagtctgggccaggtgctgggacta

SEQ ID NO: 122780 - DNA, 25 bp, Canis familiaris
gagttgacagcctcattgggccaga

SEQ ID NO: 122781 - DNA, 25 bp, Canis familiaris
gagttcaagctcttcattgggctcc

SEQ ID NO: 122782 - DNA, 25 bp, Canis familiaris
gagttcaggctgtgatgggcggctc

SEQ ID NO: 122783 - DNA, 25 bp, Canis familiaris
gagttctgcgtgaatgtgctgggcg

SEQ ID NO: 122784 - DNA, 25 bp, Canis familiaris
gagtatgtcatgtatatctgctgtg

SEQ ID NO: 122785 - DNA, 25 bp, Canis familiaris
gagtattgcatcttgactgtgaatc

SEQ ID NO: 122786 - DNA, 25 bp, Canis familiaris
gagtattctcatcattggatagctt

SEQ ID NO: 122787 - DNA, 25 bp, Canis familiaris
gagtatccttccttgtatagttcta

SEQ ID NO: 122788 - DNA, 25 bp, Canis familiaris
gagttactacctagctcttttctac

SEQ ID NO: 122789 - DNA, 25 bp, Canis familiaris
gagtaccataggggctgcttttcta

SEQ ID NO: 122790 - DNA, 25 bp, Canis familiaris
gagtacagcatttgctgatgctgct

SEQ ID NO: 122791 - DNA, 25 bp, Canis familiaris
gagtatcgctgttgtctctatatat

SEQ ID NO: 122792 - DNA, 25 bp, Canis familiaris
gagttccgtgcacctatttatattt

SEQ ID NO: 122793 - DNA, 25 bp, Canis familiaris
gagtcttcgtgcattaattctaata

SEQ ID NO: 122794 - DNA, 25 bp, Canis familiaris
gagttatggtgattatcctcctgaa

SEQ ID NO: 122795 - DNA, 25 bp, Canis familiaris
gagttagtgttgtgagctgcctggt

SEQ ID NO: 122796 - DNA, 25 bp, Canis familiaris
gagtctctgtgactgtaatcaccgt

SEQ ID NO: 122797 - DNA, 25 bp, Canis familiaris
gagtcacttgtgctaagcccatgtc

SEQ ID NO: 122798 - DNA, 25 bp, Canis familiaris
gagtcagaggatcaaagcagcagat

SEQ ID NO: 122799 - DNA, 25 bp, Canis familiaris
gagtaatatgagacaatgcagctgc

SEQ ID NO: 122800 - DNA, 25 bp, Canis familiaris
gagtttagtgtcatcatgctatcta

SEQ ID NO: 122801 - DNA, 25 bp, Canis familiaris
gagtttgggtcttactgatccagaa

SEQ ID NO: 122802 - DNA, 25 bp, Canis familiaris
gagtttggcattgagcagggcctga

SEQ ID NO: 122803 - DNA, 25 bp, Canis familiaris
gagttcattcaataccttgcactga

SEQ ID NO: 122804 - DNA, 25 bp, Canis familiaris
gagttttcatcagaagcttgcagag

SEQ ID NO: 122805 - DNA, 25 bp, Canis familiaris
gagtgatcttactccagcctggcag

SEQ ID NO: 122806 - DNA, 25 bp, Canis familiaris
gagtgacgtaatcccaatgctttgg

SEQ ID NO: 122807 - DNA, 25 bp, Canis familiaris
gagtttgtatatccagaagcttttg

SEQ ID NO: 122808 - DNA, 25 bp, Canis familiaris
gagttctggctcccagacacatttg

SEQ ID NO: 122809 - DNA, 25 bp, Canis familiaris
gagtgtctgtggccctataatttca

SEQ ID NO: 122810 - DNA, 25 bp, Canis familiaris
gagtccagccggctataaatctaaa

SEQ ID NO: 122811 - DNA, 25 bp, Canis familiaris
gagtgctcagggcaggcaaacctag

SEQ ID NO: 122812 - DNA, 25 bp, Canis familiaris
ggtgcaagggccataaacctacttg

SEQ ID NO: 122813 - DNA, 25 bp, Canis familiaris
gagtccagggtcagatactacatac

SEQ ID NO: 122814 - DNA, 25 bp, Canis familiaris
gagtctcgggtgagatccgaccaac

SEQ ID NO: 122815 - DNA, 25 bp, Canis familiaris
gagtccatggggaaatccagaccca

SEQ ID NO: 122816 - DNA, 25 bp, Canis familiaris
gagtttggaagcatctggagtccca

SEQ ID NO: 122817 - DNA, 25 bp, Canis familiaris
gagtttgccaaggccttggtcctgc

SEQ ID NO: 122818 - DNA, 25 bp, Canis familiaris
gagttcctgaaggccatgtttctcc

SEQ ID NO: 122819 - DNA, 25 bp, Canis familiaris
gagttcctgaactctggaatgtgcc

SEQ ID NO: 122820 - DNA, 25 bp, Canis familiaris
gagtatcctgaccatacggaattgt

SEQ ID NO: 122821 - DNA, 25 bp, Canis familiaris
gagtctcctacgttttagagttggc

SEQ ID NO: 122822 - DNA, 25 bp, Canis familiaris
gagtccatcccgttataaggaagcg

SEQ ID NO: 122823 - DNA, 25 bp, Canis familiaris
gagtccaccaacttataatgtgaac

SEQ ID NO: 122824 - DNA, 25 bp, Canis familiaris
gagtttccagagataggttgagacc

SEQ ID NO: 122825 - DNA, 25 bp, Canis familiaris
gagttctccaagcagacgaggcaag

SEQ ID NO: 122826 - DNA, 25 bp, Canis familiaris
gagttctctctgcacaaagattcta

SEQ ID NO: 122827 - DNA, 25 bp, Canis familiaris
gagttactctgatagacagttaata

SEQ ID NO: 122828 - DNA, 25 bp, Canis familiaris
gagttattgccatcaaagtttcaca

SEQ ID NO: 122829 - DNA, 25 bp, Canis familiaris
gagtatttgcaagaccagttgatca

SEQ ID NO: 122830 - DNA, 25 bp, Canis familiaris
gagtcttgactttagccacttgtag

SEQ ID NO: 122831 - DNA, 25 bp, Canis familiaris
gagtcttttgtgaagagcctttatt

SEQ ID NO: 122832 - DNA, 25 bp, Canis familiaris
gagtttgttgttatgcaatctttac

SEQ ID NO: 122833 - DNA, 25 bp, Canis familiaris
gagtttgacggatttgctttttaca

SEQ ID NO: 122834 - DNA, 25 bp, Canis familiaris
gagttaacggagctgggcttggcca

SEQ ID NO: 122835 - DNA, 25 bp, Canis familiaris
gagttaccagttctgtggtttacat

SEQ ID NO: 122836 - DNA, 25 bp, Canis familiaris
gagtttccgtatttcggtgttcagc

SEQ ID NO: 122837 - DNA, 25 bp, Canis familiaris
gagttacgcagtatctcggctgtgt

SEQ ID NO: 122838 - DNA, 25 bp, Canis familiaris
gaggtgacaggtaccttacgggtca

SEQ ID NO: 122839 - DNA, 25 bp, Canis familiaris
gagggaagggatcggttccagggca

SEQ ID NO: 122840 - DNA, 25 bp, Canis familiaris
gagggcttgggctggggtaaggagt

SEQ ID NO: 122841 - DNA, 25 bp, Canis familiaris
tccggtgggagctggggtaccagga

SEQ ID NO: 122842 - DNA, 25 bp, Canis familiaris
tccgggctgtagtgggggatccatg

SEQ ID NO: 122843 - DNA, 25 bp, Canis familiaris
tacgggagctactccgggaacacac

SEQ ID NO: 122844 - DNA, 25 bp, Canis familiaris
gtcggagaaaagtgctgcggaaaaa

SEQ ID NO: 122845 - DNA, 25 bp, Canis familiaris
gtaagggaccagcgcggggaaatca

SEQ ID NO: 122846 - DNA, 25 bp, Canis familiaris
gagtgggtaccacaattgggaaata

SEQ ID NO: 122847 - DNA, 25 bp, Canis familiaris
gagtcgttttctcatatgttgaaaa

SEQ ID NO: 122848 - DNA, 25 bp, Canis familiaris
gagtcttttctccacatttttatta

SEQ ID NO: 122849 - DNA, 25 bp, Canis familiaris
gagtcattctttgactcctctttct

SEQ ID NO: 122850 - DNA, 25 bp, Canis familiaris
gagtcatagtttcttttctttctgg

SEQ ID NO: 122851 - DNA, 25 bp, Canis familiaris
gagtaggtattagtgcttatttgtc

SEQ ID NO: 122852 - DNA, 25 bp, Canis familiaris
gagtgatcgtttccgttaaagtcta

SEQ ID NO: 122853 - DNA, 25 bp, Canis familiaris
gaggactagttacgttcaagggtga

SEQ ID NO: 122854 - DNA, 25 bp, Canis familiaris
gagtaatgagttgtttccagaggag

SEQ ID NO: 122855 - DNA, 25 bp, Canis familiaris
gagtaattgttcatgtttcaccgga

SEQ ID NO: 122856 - DNA, 25 bp, Canis familiaris
gagttatttgtgatgtttgtcctaa

SEQ ID NO: 122857 - DNA, 25 bp, Canis familiaris
gaggtttcagatccatggtttccaa

SEQ ID NO: 122858 - DNA, 25 bp, Canis familiaris
gagttttgagccctggttgtacaag

SEQ ID NO: 122859 - DNA, 25 bp, Canis familiaris
gagtttggaggcttggtcattaata

SEQ ID NO: 122860 - DNA, 25 bp, Canis familiaris
gagttttatgagtttgcgcttcaaa

SEQ ID NO: 122861 - DNA, 25 bp, Canis familiaris
gagtgttctaaaactaattcaaaat

SEQ ID NO: 122862 - DNA, 25 bp, Canis familiaris
gagtttcctcaaatcaactatcaga

SEQ ID NO: 122863 - DNA, 25 bp, Canis familiaris
gagtttgacatcttcatcaactaca

SEQ ID NO: 122864 - DNA, 25 bp, Canis familiaris
gagtttgacatccaccaagtgatca

SEQ ID NO: 122865 - DNA, 25 bp, Canis familiaris
gagttcaacatcaccatgcagatta

SEQ ID NO: 122866 - DNA, 25 bp, Canis familiaris
gagtccatttcaacccagatttgca

SEQ ID NO: 122867 - DNA, 25 bp, Canis familiaris
gagtccatcttataccagtgattca

SEQ ID NO: 122868 - DNA, 25 bp, Canis familiaris
gagtccaatgagttaccggatacag

SEQ ID NO: 122869 - DNA, 25 bp, Canis familiaris
gagtacacaggtaactcggtcccag

SEQ ID NO: 122870 - DNA, 25 bp, Canis familiaris
gagtaccaggatgacctggccctgc

SEQ ID NO: 122871 - DNA, 25 bp, Canis familiaris
gagtagcacccagacttgatgttcg

SEQ ID NO: 122872 - DNA, 25 bp, Canis familiaris
gagtacacctcaaacaatatttaca

SEQ ID NO: 122873 - DNA, 25 bp, Canis familiaris
gagtcaaggtgtagacaaattgtaa

SEQ ID NO: 122874 - DNA, 25 bp, Canis familiaris
gagtcatagggtgaaagccatgtga

SEQ ID NO: 122875 - DNA, 25 bp, Canis familiaris
gagtaactgggccagacacctgggc

SEQ ID NO: 122876 - DNA, 25 bp, Canis familiaris
gagttcactggtgaagacgcgggcc

SEQ ID NO: 122877 - DNA, 25 bp, Canis familiaris
gagtctggggcttgaaggcccgtgc

SEQ ID NO: 122878 - DNA, 25 bp, Canis familiaris
gagtttgggggatggcatcggctgt

SEQ ID NO: 122879 - DNA, 25 bp, Canis familiaris
gagttttggtggtcagtcaggttgc

SEQ ID NO: 122880 - DNA, 25 bp, Canis familiaris
gagtttgtttatgggtaggcttggt

SEQ ID NO: 122881 - DNA, 25 bp, Canis familiaris
gagtcagtttacaggatgaggcttg

SEQ ID NO: 122882 - DNA, 25 bp, Canis familiaris
gagtttgtgtccagtgatgagagtt

SEQ ID NO: 122883 - DNA, 25 bp, Canis familiaris
gagtcttgtgcatcaagcgattgtg

SEQ ID NO: 122884 - DNA, 25 bp, Canis familiaris
gagtcatcttgatctaggtctgggc

SEQ ID NO: 122885 - DNA, 25 bp, Canis familiaris
gagtctctatgtcatgggttgtccc

SEQ ID NO: 122886 - DNA, 25 bp, Canis familiaris
gagttttgtctcaggcttgtattct

SEQ ID NO: 122887 - DNA, 25 bp, Canis familiaris
gaggatttcttcaggctctagaatg

SEQ ID NO: 122888 - DNA, 25 bp, Canis familiaris
gagtttctttcttggctctacaatg

SEQ ID NO: 122889 - DNA, 25 bp, Canis familiaris
gagtttttcttcagtcttcaatgat

SEQ ID NO: 122890 - DNA, 25 bp, Canis familiaris
gagtatcattttgctagtctttagg

SEQ ID NO: 122891 - DNA, 25 bp, Canis familiaris
gagtatctcctttatagagctgttt

SEQ ID NO: 122892 - DNA, 25 bp, Canis familiaris
gagtatttgtttaatggctgtgcct

SEQ ID NO: 122893 - DNA, 25 bp, Canis familiaris
gagtcatcttttcttgaatatgcct

SEQ ID NO: 122894 - DNA, 25 bp, Canis familiaris
gagtactaatctcttactatccgat

SEQ ID NO: 122895 - DNA, 25 bp, Canis familiaris
gagtattaatcctttcaaatccctc

SEQ ID NO: 122896 - DNA, 25 bp, Canis familiaris
gagtttaatacctagcaaatcccac

SEQ ID NO: 122897 - DNA, 25 bp, Canis familiaris
gagtgtttgtacacgctaacccagg

SEQ ID NO: 122898 - DNA, 25 bp, Canis familiaris
gagtattttctcaacctcaactcca

SEQ ID NO: 122899 - DNA, 25 bp, Canis familiaris
gagtttatttttgccattaccagtc

SEQ ID NO: 122900 - DNA, 25 bp, Canis familiaris
gagttttattttgctaagaacccat

SEQ ID NO: 122901 - DNA, 25 bp, Canis familiaris
gagttttcttttgtctggaacctga

SEQ ID NO: 122902 - DNA, 25 bp, Canis familiaris
gagtgctcattttttaattaaacgc

SEQ ID NO: 122903 - DNA, 25 bp, Canis familiaris
gagtctatttttgtctaataaagaa

SEQ ID NO: 122904 - DNA, 25 bp, Canis familiaris
gagtcgattttagtcttttacagga

SEQ ID NO: 122905 - DNA, 25 bp, Canis familiaris
gagtcgtgttgtgatgttaccactg

SEQ ID NO: 122906 - DNA, 25 bp, Canis familiaris
gagtcattgtttgcaataccaagct

SEQ ID NO: 122907 - DNA, 25 bp, Canis familiaris
gagtcattgtttgcaataccaagct

SEQ ID NO: 122908 - DNA, 25 bp, Canis familiaris
gagtaagaatctgcaattcgcacgt

SEQ ID NO: 122909 - DNA, 25 bp, Canis familiaris
gagtatgaatctgcaaattcgcacc

SEQ ID NO: 122910 - DNA, 25 bp, Canis familiaris
gagtctgccattacaagctccaagt

SEQ ID NO: 122911 - DNA, 25 bp, Canis familiaris
gagtctgctcgcatcaaccagacat

SEQ ID NO: 122912 - DNA, 25 bp, Canis familiaris
gagtcattccagtgagccatctcac

SEQ ID NO: 122913 - DNA, 25 bp, Canis familiaris
gagtcatcttaatacatcttcagcc

SEQ ID NO: 122914 - DNA, 25 bp, Canis familiaris
gagtaccatattttatcttcacagt

SEQ ID NO: 122915 - DNA, 25 bp, Canis familiaris
gagtcataattcatttttgccattt

SEQ ID NO: 122916 - DNA, 25 bp, Canis familiaris
gagtatattataggctttttatttt

SEQ ID NO: 122917 - DNA, 25 bp, Canis familiaris
gagtttctatttgtgtctttttata

SEQ ID NO: 122918 - DNA, 25 bp, Canis familiaris
gagtattccattgtttctttgctta

SEQ ID NO: 122919 - DNA, 25 bp, Canis familiaris
gagttttcatgttttcttctttgta

SEQ ID NO: 122920 - DNA, 25 bp, Canis familiaris
gagttatcctgttttgtcttgttct

SEQ ID NO: 122921 - DNA, 25 bp, Canis familiaris
gagtaatcacttgtatgttattctg

SEQ ID NO: 122922 - DNA, 25 bp, Canis familiaris
gagtactactggtttggtacctgca

SEQ ID NO: 122923 - DNA, 25 bp, Canis familiaris
gagtaaagcatccgatttgtccccg

SEQ ID NO: 122924 - DNA, 25 bp, Canis familiaris
gagttatagcagtgaggttctcaca

SEQ ID NO: 122925 - DNA, 25 bp, Canis familiaris
gagtctaagccttatggctgtcttc

SEQ ID NO: 122926 - DNA, 25 bp, Canis familiaris
gagtttcagcctctttgttatctcc

SEQ ID NO: 122927 - DNA, 25 bp, Canis familiaris
gagtaatattccattttatacacac

SEQ ID NO: 122928 - DNA, 25 bp, Canis familiaris
gagtccagagacaagtttaaacaca

SEQ ID NO: 122929 - DNA, 25 bp, Canis familiaris
gagtgcctaataacctctaacacca

SEQ ID NO: 122930 - DNA, 25 bp, Canis familiaris
gagtcttaaattacctagcaacgca

SEQ ID NO: 122931 - DNA, 25 bp, Canis familiaris
gagtctgtcaggttagttagtagcc

SEQ ID NO: 122932 - DNA, 25 bp, Canis familiaris
gagtttggttattgtaagtaatgct

SEQ ID NO: 122933 - DNA, 25 bp, Canis familiaris
gagttttgttgactgtatcctttgc

SEQ ID NO: 122934 - DNA, 25 bp, Canis familiaris
gagtagttgtaaagtagctattatg

SEQ ID NO: 122935 - DNA, 25 bp, Canis familiaris
gagtagtagtcttattagttgagta

SEQ ID NO: 122936 - DNA, 25 bp, Canis familiaris
gagtagatcctagtttcgttgcaga

SEQ ID NO: 122937 - DNA, 25 bp, Canis familiaris
gaggtgatagcattgctttcgtgta

SEQ ID NO: 122938 - DNA, 25 bp, Canis familiaris
gaggtcatccattctggtcgagttc

SEQ ID NO: 122939 - DNA, 25 bp, Canis familiaris
gagtttctcatattatcctagttca

SEQ ID NO: 122940 - DNA, 25 bp, Canis familiaris
gagtataactattacttcagttcat

SEQ ID NO: 122941 - DNA, 25 bp, Canis familiaris
gagtatagcagcatacgcctaggaa

SEQ ID NO: 122942 - DNA, 25 bp, Canis familiaris
gagtaacgctcaacccaaagaatgt

SEQ ID NO: 122943 - DNA, 25 bp, Canis familiaris
gagtccacactcatgacgcagaaga

SEQ ID NO: 122944 - DNA, 25 bp, Canis familiaris
gagtacacacatgaggagagaggca

SEQ ID NO: 122945 - DNA, 25 bp, Canis familiaris
gagtacatcctctatgagaccacca

SEQ ID NO: 122946 - DNA, 25 bp, Canis familiaris
gagtatgacctctatagcctggctc

SEQ ID NO: 122947 - DNA, 25 bp, Canis familiaris
gagtatgacctctatagcctggctc

SEQ ID NO: 122948 - DNA, 25 bp, Canis familiaris
gagtatgacctctatagcctggctc

SEQ ID NO: 122949 - DNA, 25 bp, Canis familiaris
gagtatgacctctatagcctggctc

SEQ ID NO: 122950 - DNA, 25 bp, Canis familiaris
gagtcatgcagtcttgacctggctc

SEQ ID NO: 122951 - DNA, 25 bp, Canis familiaris
gagtatgcactcgtcgaggtaccct

SEQ ID NO: 122952 - DNA, 25 bp, Canis familiaris
gagtatgcattcctcttgagtctac

SEQ ID NO: 122953 - DNA, 25 bp, Canis familiaris
gagtagcactcaccttagtattctt

SEQ ID NO: 122954 - DNA, 25 bp, Canis familiaris
gagtcatgactaccttctggtgtgt

SEQ ID NO: 122955 - DNA, 25 bp, Canis familiaris
gagtaactagctctgtgtgtgtgta

SEQ ID NO: 122956 - DNA, 25 bp, Canis familiaris
gagtactctacccatttgtgtgtat

SEQ ID NO: 122957 - DNA, 25 bp, Canis familiaris
gatttctagaacctttggcatggtg

SEQ ID NO: 122958 - DNA, 25 bp, Canis familiaris
gaggcctacaacctattgatcacgg

SEQ ID NO: 122959 - DNA, 25 bp, Canis familiaris
gagtgcaaaccccaagtgactcgtg

SEQ ID NO: 122960 - DNA, 25 bp, Canis familiaris
gagtaatggctctcacgatatccgt

SEQ ID NO: 122961 - DNA, 25 bp, Canis familiaris
gagtcaagcctcgcatgctgataac

SEQ ID NO: 122962 - DNA, 25 bp, Canis familiaris
gagtcaagcctcgcatgctgataac

SEQ ID NO: 122963 - DNA, 25 bp, Canis familiaris
gagtaagcctgtgtcatgcatgaga

SEQ ID NO: 122964 - DNA, 25 bp, Canis familiaris
gagtacccactggtctgatgtaggt

SEQ ID NO: 122965 - DNA, 25 bp, Canis familiaris
gagtaagacctggtcagggacgtcc

SEQ ID NO: 122966 - DNA, 25 bp, Canis familiaris
gagtaagaccacaacagggcctcca

SEQ ID NO: 122967 - DNA, 25 bp, Canis familiaris
gagtaaacctcaatcaggataatct

SEQ ID NO: 122968 - DNA, 25 bp, Canis familiaris
gagtaagaactaccacatgtacatc

SEQ ID NO: 122969 - DNA, 25 bp, Canis familiaris
gagtaacaagaaccactttctcctc

SEQ ID NO: 122970 - DNA, 25 bp, Canis familiaris
gagtaaggttcaccactttcttgct

SEQ ID NO: 122971 - DNA, 25 bp, Canis familiaris
gagtagattgtttccctgagttttc

SEQ ID NO: 122972 - DNA, 25 bp, Canis familiaris
gaggattcccttctctagagtttac

SEQ ID NO: 122973 - DNA, 25 bp, Canis familiaris
gagtatttacttctgcaagtgtttg

SEQ ID NO: 122974 - DNA, 25 bp, Canis familiaris
gagtagtcaactagccatctatggc

SEQ ID NO: 122975 - DNA, 25 bp, Canis familiaris
gagtcagccagagttggctttgaat

SEQ ID NO: 122976 - DNA, 25 bp, Canis familiaris
gagtcgccagaggtgggctgagaga

SEQ ID NO: 122977 - DNA, 25 bp, Canis familiaris
gagtccacagacagaggcaacagcc

SEQ ID NO: 122978 - DNA, 25 bp, Canis familiaris
gagtcacagaagctaggccacgtca

SEQ ID NO: 122979 - DNA, 25 bp, Canis familiaris
gagtacaatagttcagaccaaggac

SEQ ID NO: 122980 - DNA, 25 bp, Canis familiaris
gagtgagaattttcagaccatggaa

SEQ ID NO: 122981 - DNA, 25 bp, Canis familiaris
gagtgagggttgtttccaggaaagg

SEQ ID NO: 122982 - DNA, 25 bp, Canis familiaris
gagtgacggatatatatctattgga

SEQ ID NO: 122983 - DNA, 25 bp, Canis familiaris
gagtatctggatagatgtcatcttg

SEQ ID NO: 122984 - DNA, 25 bp, Canis familiaris
gagtgatatggacgatgtctgtcat

SEQ ID NO: 122985 - DNA, 25 bp, Canis familiaris
gagtagggaggttcctattctgccc

SEQ ID NO: 122986 - DNA, 25 bp, Canis familiaris
gagtaggtagtcctccttttatcca

SEQ ID NO: 122987 - DNA, 25 bp, Canis familiaris
gaggaggttaccaccattgtgatca

SEQ ID NO: 122988 - DNA, 25 bp, Canis familiaris
gagggctttgatgtccctgattgta

SEQ ID NO: 122989 - DNA, 25 bp, Canis familiaris
gagtatttgatagtctcccgatatt

SEQ ID NO: 122990 - DNA, 25 bp, Canis familiaris
gagtatgtagtggcttcttccaaac

SEQ ID NO: 122991 - DNA, 25 bp, Canis familiaris
gagtatgggtgctttttccatctgc

SEQ ID NO: 122992 - DNA, 25 bp, Canis familiaris
gagtctgagtggcttttacatcccc

SEQ ID NO: 122993 - DNA, 25 bp, Canis familiaris
gagtctggatgcaggtgtgtaaccc

SEQ ID NO: 122994 - DNA, 25 bp, Canis familiaris
gagtcagaatctgtttcgaggccgc

SEQ ID NO: 122995 - DNA, 25 bp, Canis familiaris
gagtcgactgatgatgcttctgggc

SEQ ID NO: 122996 - DNA, 25 bp, Canis familiaris
gagtcggtggagatactgggagtca

SEQ ID NO: 122997 - DNA, 25 bp, Canis familiaris
gagtcagggggcagggggctgcctc

SEQ ID NO: 122998 - DNA, 25 bp, Canis familiaris
gagtcaggggacacgggagcgagct

SEQ ID NO: 122999 - DNA, 25 bp, Canis familiaris
gagtatggggcgtggggagggcttc

SEQ ID NO: 123000 - DNA, 25 bp, Canis familiaris
gattagcaccctgagggaagggccc

SEQ ID NO: 123001 - DNA, 25 bp, Canis familiaris
gagtcctgccctggaggaaggggcc

SEQ ID NO: 123002 - DNA, 25 bp, Canis familiaris
gagtcccctttggggagccaagctc

SEQ ID NO: 123003 - DNA, 25 bp, Canis familiaris
gagtccccattttggtggaaactgt

SEQ ID NO: 123004 - DNA, 25 bp, Canis familiaris
gagtcttgctctttcggggaaaaga

SEQ ID NO: 123005 - DNA, 25 bp, Canis familiaris
gagtcactgttgtgggggtggaaac

SEQ ID NO: 123006 - DNA, 25 bp, Canis familiaris
gagtccttgtgaaagggcactggag

SEQ ID NO: 123007 - DNA, 25 bp, Canis familiaris
gagtcaagtgtgcgaggaacgcgga

SEQ ID NO: 123008 - DNA, 25 bp, Canis familiaris
gagtcactgcggttacgaactccta

SEQ ID NO: 123009 - DNA, 25 bp, Canis familiaris
gagtcctggggaacagtaccactcc

SEQ ID NO: 123010 - DNA, 25 bp, Canis familiaris
gagtcactcatgagaccagtgccca

SEQ ID NO: 123011 - DNA, 25 bp, Canis familiaris
gagtcactcagaaaacatttgccac

SEQ ID NO: 123012 - DNA, 25 bp, Canis familiaris
gagtcctagaactaatattacactt

SEQ ID NO: 123013 - DNA, 25 bp, Canis familiaris
gagtcctaaacgattctcatcaagc

SEQ ID NO: 123014 - DNA, 25 bp, Canis familiaris
gagtctgctgaagggatttctgtgc

SEQ ID NO: 123015 - DNA, 25 bp, Canis familiaris
gagtcagaaatgggagtggttgcgg

SEQ ID NO: 123016 - DNA, 25 bp, Canis familiaris
gagtagcaagtggcagcaggtcctc

SEQ ID NO: 123017 - DNA, 25 bp, Canis familiaris
gagtacaggtcgtctgagctgcctg

SEQ ID NO: 123018 - DNA, 25 bp, Canis familiaris
gagtaagcctagacatgacgcacgt

SEQ ID NO: 123019 - DNA, 25 bp, Canis familiaris
gagtaagccatatatatccatccta

SEQ ID NO: 123020 - DNA, 25 bp, Canis familiaris
gagtaacctagctgatctctgactg

SEQ ID NO: 123021 - DNA, 25 bp, Canis familiaris
gagtcaacttagcgtatggtctacc

SEQ ID NO: 123022 - DNA, 25 bp, Canis familiaris
gagtacacttaccaggatgagcact

SEQ ID NO: 123023 - DNA, 25 bp, Canis familiaris
gagtacagtatcccagacaaacagt

SEQ ID NO: 123024 - DNA, 25 bp, Canis familiaris
gagtccagatgtgccagccataaat

SEQ ID NO: 123025 - DNA, 25 bp, Canis familiaris
gatgacacagagaacctgccaggac

SEQ ID NO: 123026 - DNA, 25 bp, Canis familiaris
gagtctctggaacgtccagatggcg

SEQ ID NO: 123027 - DNA, 25 bp, Canis familiaris
gagtcgcattgccattgattcagtc

SEQ ID NO: 123028 - DNA, 25 bp, Canis familiaris
gagtccagagtattgattcagtgag

SEQ ID NO: 123029 - DNA, 25 bp, Canis familiaris
gagtcagagaactgtgacgtcagag

SEQ ID NO: 123030 - DNA, 25 bp, Canis familiaris
gagtcggtccagcctgaagaagcag

SEQ ID NO: 123031 - DNA, 25 bp, Canis familiaris
gagtctggataccccagggaaagca

SEQ ID NO: 123032 - DNA, 25 bp, Canis familiaris
gagtcacgtacacctggggaagagc

SEQ ID NO: 123033 - DNA, 25 bp, Canis familiaris
gagtcacccaaagaggagaagctgc

SEQ ID NO: 123034 - DNA, 25 bp, Canis familiaris
gagtacgtcaatggcggggacctca

SEQ ID NO: 123035 - DNA, 25 bp, Canis familiaris
gagtaggtcattggagggttttatt

SEQ ID NO: 123036 - DNA, 25 bp, Canis familiaris
gaggaggaccggtgggtcttagtat

SEQ ID NO: 123037 - DNA, 25 bp, Canis familiaris
gaggggacttggtgaggtcttggtg

SEQ ID NO: 123038 - DNA, 25 bp, Canis familiaris
gagggggccccaagagtagtctggg

SEQ ID NO: 123039 - DNA, 25 bp, Canis familiaris
gatggagggaccttggggaattggg

SEQ ID NO: 123040 - DNA, 25 bp, Canis familiaris
gatggggtgacctggggttaggcct

SEQ ID NO: 123041 - DNA, 25 bp, Canis familiaris
gaggccgcttcctggaagggaggac

SEQ ID NO: 123042 - DNA, 25 bp, Canis familiaris
gaggtccggccaagtgccgggagaa

SEQ ID NO: 123043 - DNA, 25 bp, Canis familiaris
gaggtcgaaggtacccgaaagcaca

SEQ ID NO: 123044 - DNA, 25 bp, Canis familiaris
gaggggaaccaatcccagaactgcc

SEQ ID NO: 123045 - DNA, 25 bp, Canis familiaris
gatggaaaacctgtcttcaaacatg

SEQ ID NO: 123046 - DNA, 25 bp, Canis familiaris
gtggaacgttctgtttacgactgtc

SEQ ID NO: 123047 - DNA, 25 bp, Canis familiaris
gaggagggtttggtcttactagctt

SEQ ID NO: 123048 - DNA, 25 bp, Canis familiaris
gagtagttgcgtaggccttaggagt

SEQ ID NO: 123049 - DNA, 25 bp, Canis familiaris
gagtagttcgtttcagtatcaaagc

SEQ ID NO: 123050 - DNA, 25 bp, Canis familiaris
gagtcagttgcacttacatgattat

SEQ ID NO: 123051 - DNA, 25 bp, Canis familiaris
gagtgtttgcatttgactggttaag

SEQ ID NO: 123052 - DNA, 25 bp, Canis familiaris
gagtctttcatcttggggattggtg

SEQ ID NO: 123053 - DNA, 25 bp, Canis familiaris
gagtatctctagccggggatgggcg

SEQ ID NO: 123054 - DNA, 25 bp, Canis familiaris
gagtacctgacggcggagattctgg

SEQ ID NO: 123055 - DNA, 25 bp, Canis familiaris
gagtcacctgattctcagggtctct

SEQ ID NO: 123056 - DNA, 25 bp, Canis familiaris
gagtcacgtgttgcggaatctgttt

SEQ ID NO: 123057 - DNA, 25 bp, Canis familiaris
gagtccgtgtcattcgtgacttttt

SEQ ID NO: 123058 - DNA, 25 bp, Canis familiaris
gagtcctggaagttggattttgcat

SEQ ID NO: 123059 - DNA, 25 bp, Canis familiaris
gagtactgactacttggtgtctatt

SEQ ID NO: 123060 - DNA, 25 bp, Canis familiaris
gagtctccactaactgtgtgtcatt

SEQ ID NO: 123061 - DNA, 25 bp, Canis familiaris
gagtccacagctcttgtgtgtgtgt

SEQ ID NO: 123062 - DNA, 25 bp, Canis familiaris
gagtcacactggttgagttgctgct

SEQ ID NO: 123063 - DNA, 25 bp, Canis familiaris
gagtgaaggagctgctgctgagcgc

SEQ ID NO: 123064 - DNA, 25 bp, Canis familiaris
gagtgcaaggactttgtgggacaaa

SEQ ID NO: 123065 - DNA, 25 bp, Canis familiaris
gagtcacggaatttgtgtgtggaca

SEQ ID NO: 123066 - DNA, 25 bp, Canis familiaris
gagtcatctgggttgcttgttagaa

SEQ ID NO: 123067 - DNA, 25 bp, Canis familiaris
gagtcactgtgaagtcttgttcaga

SEQ ID NO: 123068 - DNA, 25 bp, Canis familiaris
gagtatctggatggccattgatgaa

SEQ ID NO: 123069 - DNA, 25 bp, Canis familiaris
gagtacgatgatgctgcctgtgagg

SEQ ID NO: 123070 - DNA, 25 bp, Canis familiaris
gatgttctgaatcctgaatgggagg

SEQ ID NO: 123071 - DNA, 25 bp, Canis familiaris
gagtcttgaacaatgctgagccagc

SEQ ID NO: 123072 - DNA, 25 bp, Canis familiaris
gagtgcttaacaatacacacacaca

SEQ ID NO: 123073 - DNA, 25 bp, Canis familiaris
gagtgtaatcgtgacacacacacac

SEQ ID NO: 123074 - DNA, 25 bp, Canis familiaris
gaggtagtcagtgatccagttccgg

SEQ ID NO: 123075 - DNA, 25 bp, Canis familiaris
gaggatggtcgagaaaaagccggca

SEQ ID NO: 123076 - DNA, 25 bp, Canis familiaris
gaggattcttaccgaaaacaggtgg

SEQ ID NO: 123077 - DNA, 25 bp, Canis familiaris
gaggttcacacgcccaaaaaggtgg

SEQ ID NO: 123078 - DNA, 25 bp, Canis familiaris
gagtagtcaactctgcaaagacgtt

SEQ ID NO: 123079 - DNA, 25 bp, Canis familiaris
gagtatgctcagcttcagaagagcc

SEQ ID NO: 123080 - DNA, 25 bp, Canis familiaris
gagtcagccagcctgacaaacaccc

SEQ ID NO: 123081 - DNA, 25 bp, Canis familiaris
gagtgcagagacagcctggaaccct

SEQ ID NO: 123082 - DNA, 25 bp, Canis familiaris
gagtgaagactctgattagaccaca

SEQ ID NO: 123083 - DNA, 25 bp, Canis familiaris
gagtcacacccaagttcagattcac

SEQ ID NO: 123084 - DNA, 25 bp, Canis familiaris
gagtccacaaaactgtgagcaacag

SEQ ID NO: 123085 - DNA, 25 bp, Canis familiaris
gagtcttcacaattctggacttcaa

SEQ ID NO: 123086 - DNA, 25 bp, Canis familiaris
gagtcttccagctctggaggtgctg

SEQ ID NO: 123087 - DNA, 25 bp, Canis familiaris
gagtctctccgttctaaagttgatg

SEQ ID NO: 123088 - DNA, 25 bp, Canis familiaris
gagtcttcgagatcattgtagttag

SEQ ID NO: 123089 - DNA, 25 bp, Canis familiaris
gagtccgttgaatttctgcagttag

SEQ ID NO: 123090 - DNA, 25 bp, Canis familiaris
gagtctttgtaattattgaatcgtg

SEQ ID NO: 123091 - DNA, 25 bp, Canis familiaris
gagtcttgtaccaatattgaaacgc

SEQ ID NO: 123092 - DNA, 25 bp, Canis familiaris
gagtctcatttctgtcatctgtaac

SEQ ID NO: 123093 - DNA, 25 bp, Canis familiaris
gagtctgcatgtggtttgcttggaa

SEQ ID NO: 123094 - DNA, 25 bp, Canis familiaris
gagtcttgtggttattgcatgatta

SEQ ID NO: 123095 - DNA, 25 bp, Canis familiaris
gagtctgtgatgttttgtcctttta

SEQ ID NO: 123096 - DNA, 25 bp, Canis familiaris
gagtctttcttgattgtgctttcca

SEQ ID NO: 123097 - DNA, 25 bp, Canis familiaris
gagtcttcttaactgggtggaggca

SEQ ID NO: 123098 - DNA, 25 bp, Canis familiaris
gatgttagcttaaggtcggtcagga

SEQ ID NO: 123099 - DNA, 25 bp, Canis familiaris
gatgttacttaagtgccccagacag

SEQ ID NO: 123100 - DNA, 25 bp, Canis familiaris
gagtctgagcatcaacacacacaca

SEQ ID NO: 123101 - DNA, 25 bp, Canis familiaris
gagtcaatgactatcacgcaagcat

SEQ ID NO: 123102 - DNA, 25 bp, Canis familiaris
gagtgcacatactagtcacgcataa

SEQ ID NO: 123103 - DNA, 25 bp, Canis familiaris
gagtgcagcagaaagcatccctcaa

SEQ ID NO: 123104 - DNA, 25 bp, Canis familiaris
gagtccgaaagtccacacaaggttc

SEQ ID NO: 123105 - DNA, 25 bp, Canis familiaris
gagtcaaaagcaatccatcaggggt

SEQ ID NO: 123106 - DNA, 25 bp, Canis familiaris
gagtcacatatacatatctcatgag

SEQ ID NO: 123107 - DNA, 25 bp, Canis familiaris
gagtcatcatcttgacatgaatcag

SEQ ID NO: 123108 - DNA, 25 bp, Canis familiaris
gagtctgtttgaggaatccctgggt

SEQ ID NO: 123109 - DNA, 25 bp, Canis familiaris
gatgtctttggagcctacagcatgg

SEQ ID NO: 123110 - DNA, 25 bp, Canis familiaris
gagtctttggacgccagatgcggtg

SEQ ID NO: 123111 - DNA, 25 bp, Canis familiaris
gagtctcttggactttaacgctagt

SEQ ID NO: 123112 - DNA, 25 bp, Canis familiaris
gagtgcttcttttttgaacgattgg

SEQ ID NO: 123113 - DNA, 25 bp, Canis familiaris
gagtcttcttcatcattggaggcct

SEQ ID NO: 123114 - DNA, 25 bp, Canis familiaris
gagtctctccaaaactggtgggctg

SEQ ID NO: 123115 - DNA, 25 bp, Canis familiaris
gagtctctccaaacattttgtgtat

SEQ ID NO: 123116 - DNA, 25 bp, Canis familiaris
gagtcagaaaaggaatgttggagat

SEQ ID NO: 123117 - DNA, 25 bp, Canis familiaris
gagtcaaagaagaaggctgtgcaga

SEQ ID NO: 123118 - DNA, 25 bp, Canis familiaris
gagtcaaatccaagatgtgctggga

SEQ ID NO: 123119 - DNA, 25 bp, Canis familiaris
gagtcaatctccaatgttgtgctaa

SEQ ID NO: 123120 - DNA, 25 bp, Canis familiaris
gagtgcctgtctcagagttgcgaca

SEQ ID NO: 123121 - DNA, 25 bp, Canis familiaris
gagtctctgttttcagttctttggg

SEQ ID NO: 123122 - DNA, 25 bp, Canis familiaris
gagtcatgctacataagctttttgt

SEQ ID NO: 123123 - DNA, 25 bp, Canis familiaris
gagtctcaggtaaatgccattcttt

SEQ ID NO: 123124 - DNA, 25 bp, Canis familiaris
gagtcattggttaccttgtcatctt

SEQ ID NO: 123125 - DNA, 25 bp, Canis familiaris
gagtcattgacttcattttatattt

SEQ ID NO: 123126 - DNA, 25 bp, Canis familiaris
gagtcttacttgattttatccttgt

SEQ ID NO: 123127 - DNA, 25 bp, Canis familiaris
gagtcttagggtatcttacaatgga

SEQ ID NO: 123128 - DNA, 25 bp, Canis familiaris
gagggtgagggcttttacccattga

SEQ ID NO: 123129 - DNA, 25 bp, Canis familiaris
gagggaagttgcgagtttcgaattg

SEQ ID NO: 123130 - DNA, 25 bp, Canis familiaris
gatcatagggttccatttcttaatt

SEQ ID NO: 123131 - DNA, 25 bp, Canis familiaris
gagtcagaggtcctttggcttattt

SEQ ID NO: 123132 - DNA, 25 bp, Canis familiaris
gagtcggcttcgacttgttgctact

SEQ ID NO: 123133 - DNA, 25 bp, Canis familiaris
gagtgggtttttattgtacatgttg

SEQ ID NO: 123134 - DNA, 25 bp, Canis familiaris
gagtacgtgtatttttctgtaaagt

SEQ ID NO: 123135 - DNA, 25 bp, Canis familiaris
gagtccgtttatactgttgtttaga

SEQ ID NO: 123136 - DNA, 25 bp, Canis familiaris
gagtcccgtttcatttcaatatagg

SEQ ID NO: 123137 - DNA, 25 bp, Canis familiaris
gagtcccttatttttctataaagag

SEQ ID NO: 123138 - DNA, 25 bp, Canis familiaris
gagtcctctcttgattttaaaaatg

SEQ ID NO: 123139 - DNA, 25 bp, Canis familiaris
gagtcaatctttcttttctaaaacg

SEQ ID NO: 123140 - DNA, 25 bp, Canis familiaris
gaggaatttcccaggtctcaagaat

SEQ ID NO: 123141 - DNA, 25 bp, Canis familiaris
gaggttttcaaccgggtcaataatg

SEQ ID NO: 123142 - DNA, 25 bp, Canis familiaris
gagtgttttaaccagcggtgcctac

SEQ ID NO: 123143 - DNA, 25 bp, Canis familiaris
gagtgtccgtcagtcgaaggtgttc

SEQ ID NO: 123144 - DNA, 25 bp, Canis familiaris
gagtggactgatccttgaaggggcc

SEQ ID NO: 123145 - DNA, 25 bp, Canis familiaris
gagtctgttgaagttgggggctgaa

SEQ ID NO: 123146 - DNA, 25 bp, Canis familiaris
gagtcgatccactttggggtgatta

SEQ ID NO: 123147 - DNA, 25 bp, Canis familiaris
gagtcttccacatttgaggttgatc

SEQ ID NO: 123148 - DNA, 25 bp, Canis familiaris
gagtcttcaacagagggtcagtcct

SEQ ID NO: 123149 - DNA, 25 bp, Canis familiaris
gagtgttcaaagcaggcccgagccg

SEQ ID NO: 123150 - DNA, 25 bp, Canis familiaris
gggttattcgagtgaccgagaccgc

SEQ ID NO: 123151 - DNA, 25 bp, Canis familiaris
gggcttaacctgtaattagggctct

SEQ ID NO: 123152 - DNA, 25 bp, Canis familiaris
gatgtttaatccttagaaacctctt

SEQ ID NO: 123153 - DNA, 25 bp, Canis familiaris
gagtctctttctttccaaaggttgt

SEQ ID NO: 123154 - DNA, 25 bp, Canis familiaris
gagtctcgagttttctaacgggtgc

SEQ ID NO: 123155 - DNA, 25 bp, Canis familiaris
gagtcttgtgttttcgagacggcaa

SEQ ID NO: 123156 - DNA, 25 bp, Canis familiaris
gagtgtctgggttacagcaggcgcc

SEQ ID NO: 123157 - DNA, 25 bp, Canis familiaris
gagtgctctctgaaggatcacaggc

SEQ ID NO: 123158 - DNA, 25 bp, Canis familiaris
gaggtcatgtgattacatcctggta

SEQ ID NO: 123159 - DNA, 25 bp, Canis familiaris
gagtgatcatgttgataatgctcgg

SEQ ID NO: 123160 - DNA, 25 bp, Canis familiaris
gagtacattagattctctgcacgcc

SEQ ID NO: 123161 - DNA, 25 bp, Canis familiaris
gagtactatatactctatgccctgc

SEQ ID NO: 123162 - DNA, 25 bp, Canis familiaris
gagtcagctaattttgtcctgcctt

SEQ ID NO: 123163 - DNA, 25 bp, Canis familiaris
gagtcgtaatgtaggtatcgctgat

SEQ ID NO: 123164 - DNA, 25 bp, Canis familiaris
gagtgcggactgagagtatgcgtaa

SEQ ID NO: 123165 - DNA, 25 bp, Canis familiaris
gagtggctacctgggctattgtaag

SEQ ID NO: 123166 - DNA, 25 bp, Canis familiaris
gagtgggacttggggcttgggactc

SEQ ID NO: 123167 - DNA, 25 bp, Canis familiaris
gagtgggactgggtttgaggttccg

SEQ ID NO: 123168 - DNA, 25 bp, Canis familiaris
gagtgaccacgagctcttggaattc

SEQ ID NO: 123169 - DNA, 25 bp, Canis familiaris
gagtgcctactaaccaatggacatt

SEQ ID NO: 123170 - DNA, 25 bp, Canis familiaris
gagggcggctacttcaaggcacgcc

SEQ ID NO: 123171 - DNA, 25 bp, Canis familiaris
gagtgaccctattacaggcaagccc

SEQ ID NO: 123172 - DNA, 25 bp, Canis familiaris
gagtcccagctctgcaagagaaccc

SEQ ID NO: 123173 - DNA, 25 bp, Canis familiaris
gagtggccaggctgaaggaagcccc

SEQ ID NO: 123174 - DNA, 25 bp, Canis familiaris
gagtcacgctgggcagaaggcgact

SEQ ID NO: 123175 - DNA, 25 bp, Canis familiaris
gagtcactgcatctcaatggggcct

SEQ ID NO: 123176 - DNA, 25 bp, Canis familiaris
gagtgcacgctggattgaggggccc

SEQ ID NO: 123177 - DNA, 25 bp, Canis familiaris
gaggagtctttaagagggcccggca

SEQ ID NO: 123178 - DNA, 25 bp, Canis familiaris
gaggggtcctgagacccctcgtgag

SEQ ID NO: 123179 - DNA, 25 bp, Canis familiaris
gaggggtcagatttaaccgtgttga

SEQ ID NO: 123180 - DNA, 25 bp, Canis familiaris
gaggagggaattgaaattgtgaaca

SEQ ID NO: 123181 - DNA, 25 bp, Canis familiaris
gaggacgggactgaaactcacttca

SEQ ID NO: 123182 - DNA, 25 bp, Canis familiaris
gagggccctagtgtatactgcctac

SEQ ID NO: 123183 - DNA, 25 bp, Canis familiaris
gagggccccggcagatcagggccct

SEQ ID NO: 123184 - DNA, 25 bp, Canis familiaris
gagtgccccacggtatgacgggaac

SEQ ID NO: 123185 - DNA, 25 bp, Canis familiaris
gagtcctctcaggcagttgggaaaa

SEQ ID NO: 123186 - DNA, 25 bp, Canis familiaris
gagtgcctgcgacagtccagggaac

SEQ ID NO: 123187 - DNA, 25 bp, Canis familiaris
gagggtgtgacctcctaggaagcct

SEQ ID NO: 123188 - DNA, 25 bp, Canis familiaris
gatggtttcaggtccctgcaaaaaa

SEQ ID NO: 123189 - DNA, 25 bp, Canis familiaris
gaggtcttcacttactcagtaaata

SEQ ID NO: 123190 - DNA, 25 bp, Canis familiaris
gatggtggtccttagtcaactactc

SEQ ID NO: 123191 - DNA, 25 bp, Canis familiaris
gagtcatttcccagttcagtagctg

SEQ ID NO: 123192 - DNA, 25 bp, Canis familiaris
gagtcacttaacaagtcaagctact

SEQ ID NO: 123193 - DNA, 25 bp, Canis familiaris
gagtcctgtgacttgatagcaacta

SEQ ID NO: 123194 - DNA, 25 bp, Canis familiaris
gagtcacttgtacttaggtccaggc

SEQ ID NO: 123195 - DNA, 25 bp, Canis familiaris
gagtcactttaattactttcagagt

SEQ ID NO: 123196 - DNA, 25 bp, Canis familiaris
gagtcaatttgcatatgatcttcat

SEQ ID NO: 123197 - DNA, 25 bp, Canis familiaris
gagtcgatattaatgagtcttctta

SEQ ID NO: 123198 - DNA, 25 bp, Canis familiaris
gagtccaacatgaatgattctgaat

SEQ ID NO: 123199 - DNA, 25 bp, Canis familiaris
gagtgccaaacagttctgctcgtga

SEQ ID NO: 123200 - DNA, 25 bp, Canis familiaris
gagtgacagccagatttccgtaatg

SEQ ID NO: 123201 - DNA, 25 bp, Canis familiaris
gagtaaccagtctattcacagcatg

SEQ ID NO: 123202 - DNA, 25 bp, Canis familiaris
gagtcagatgctttcatttacacag

SEQ ID NO: 123203 - DNA, 25 bp, Canis familiaris
gagtcaagctcattatattcttcac

SEQ ID NO: 123204 - DNA, 25 bp, Canis familiaris
gagtacagctatctgaccatctctc

SEQ ID NO: 123205 - DNA, 25 bp, Canis familiaris
gagtgctcagtactagtccactgat

SEQ ID NO: 123206 - DNA, 25 bp, Canis familiaris
gagtccaatattgtccacaatggca

SEQ ID NO: 123207 - DNA, 25 bp, Canis familiaris
gagtccaatattcctgtaaagcaca

SEQ ID NO: 123208 - DNA, 25 bp, Canis familiaris
gagtcgcgtattctttagagcacct

SEQ ID NO: 123209 - DNA, 25 bp, Canis familiaris
gagtaatctattctttcaggcacgt

SEQ ID NO: 123210 - DNA, 25 bp, Canis familiaris
gagtcaactattgtcttcaacgggt

SEQ ID NO: 123211 - DNA, 25 bp, Canis familiaris
gagtcaacttagtcacttagcagtg

SEQ ID NO: 123212 - DNA, 25 bp, Canis familiaris
gagtgatacatttaattctgggtgt

SEQ ID NO: 123213 - DNA, 25 bp, Canis familiaris
gagtaaattatattctctcccttgt

SEQ ID NO: 123214 - DNA, 25 bp, Canis familiaris
gagtaatatataattctctcatttt

SEQ ID NO: 123215 - DNA, 25 bp, Canis familiaris
gagtaaaatttgccctttctttcat

SEQ ID NO: 123216 - DNA, 25 bp, Canis familiaris
gagtgcacacgtccgagttttttta

SEQ ID NO: 123217 - DNA, 25 bp, Canis familiaris
gagtcagactgctaggcagcctttt

SEQ ID NO: 123218 - DNA, 25 bp, Canis familiaris
gagtaatctcaactagcctttgcca

SEQ ID NO: 123219 - DNA, 25 bp, Canis familiaris
gagtcaacacaagcaaggttgccaa

SEQ ID NO: 123220 - DNA, 25 bp, Canis familiaris
gagtcagacatcaagccagggctgg

SEQ ID NO: 123221 - DNA, 25 bp, Canis familiaris
gagtctacagagcacagagtgtgag

SEQ ID NO: 123222 - DNA, 25 bp, Canis familiaris
gagtgcaggcagatacagggtacag

SEQ ID NO: 123223 - DNA, 25 bp, Canis familiaris
gagtgatacaatagacccgtccagg

SEQ ID NO: 123224 - DNA, 25 bp, Canis familiaris
gagtcacaacataaaacggcacagg

SEQ ID NO: 123225 - DNA, 25 bp, Canis familiaris
gagtcactctctgaagatcgagctc

SEQ ID NO: 123226 - DNA, 25 bp, Canis familiaris
gagtcctcactctaaacaagtccaa

SEQ ID NO: 123227 - DNA, 25 bp, Canis familiaris
gagtctcccatcaaaggacgtgcac

SEQ ID NO: 123228 - DNA, 25 bp, Canis familiaris
gatgtccacctcccggaggtgcagc

SEQ ID NO: 123229 - DNA, 25 bp, Canis familiaris
gagtctgacctcccaggagagtgag

SEQ ID NO: 123230 - DNA, 25 bp, Canis familiaris
gagtctgtccttcagaggtgtgctg

SEQ ID NO: 123231 - DNA, 25 bp, Canis familiaris
gagtctgcgtttccaagagatgtgg

SEQ ID NO: 123232 - DNA, 25 bp, Canis familiaris
gagtcactttcaacagagcagggag

SEQ ID NO: 123233 - DNA, 25 bp, Canis familiaris
gagtctcctccagcagagagggagc

SEQ ID NO: 123234 - DNA, 25 bp, Canis familiaris
gagtctcgggcagccaggaacatgc

SEQ ID NO: 123235 - DNA, 25 bp, Canis familiaris
gagtcctgtggcatccacgaaacta

SEQ ID NO: 123236 - DNA, 25 bp, Canis familiaris
gagtcgtggctgctgctgaaaaaac

SEQ ID NO: 123237 - DNA, 25 bp, Canis familiaris
gagtctggtgttaggaaacataatt

SEQ ID NO: 123238 - DNA, 25 bp, Canis familiaris
gagtcgcgctgtaagaagcaacaac

SEQ ID NO: 123239 - DNA, 25 bp, Canis familiaris
gagtccgtgctcgagacaataaagc

SEQ ID NO: 123240 - DNA, 25 bp, Canis familiaris
gagtccagcctccagaaacataaga

SEQ ID NO: 123241 - DNA, 25 bp, Canis familiaris
gagtccagcctaatgacatgtcata

SEQ ID NO: 123242 - DNA, 25 bp, Canis familiaris
gagtcccattgaattcagatcatcg

SEQ ID NO: 123243 - DNA, 25 bp, Canis familiaris
gagtctgcctgagattctctgcatc

SEQ ID NO: 123244 - DNA, 25 bp, Canis familiaris
gagtctgttaagtcttctgacccta

SEQ ID NO: 123245 - DNA, 25 bp, Canis familiaris
gagtctgtttgagtttctttccctc

SEQ ID NO: 123246 - DNA, 25 bp, Canis familiaris
gagtctttggaattcatccttgtcc

SEQ ID NO: 123247 - DNA, 25 bp, Canis familiaris
gagtccgaggaatttctgcttggcc

SEQ ID NO: 123248 - DNA, 25 bp, Canis familiaris
gagtcatccaggttttcaggggacc

SEQ ID NO: 123249 - DNA, 25 bp, Canis familiaris
gaggctcctgggtgtccgccgatcc

SEQ ID NO: 123250 - DNA, 25 bp, Canis familiaris
gaggcccaggagcgcctgggctacc

SEQ ID NO: 123251 - DNA, 25 bp, Canis familiaris
gagtgcccaatacaggaggagcccc

SEQ ID NO: 123252 - DNA, 25 bp, Canis familiaris
gagtgacctcgggtggggatgacac

SEQ ID NO: 123253 - DNA, 25 bp, Canis familiaris
gagtgaacctgggcaggggtgaggg

SEQ ID NO: 123254 - DNA, 25 bp, Canis familiaris
gagtcacacccgggaggagttgatg

SEQ ID NO: 123255 - DNA, 25 bp, Canis familiaris
gagtcaccccccaaggaatggaggg

SEQ ID NO: 123256 - DNA, 25 bp, Canis familiaris
gagtccttctctgcagggaattcag

SEQ ID NO: 123257 - DNA, 25 bp, Canis familiaris
gagtcctttcggaggaagcctgtgt

SEQ ID NO: 123258 - DNA, 25 bp, Canis familiaris
gagtcctgtctagtgttggacgcct

SEQ ID NO: 123259 - DNA, 25 bp, Canis familiaris
gagtcatctgtcactaggcagcacc

SEQ ID NO: 123260 - DNA, 25 bp, Canis familiaris
gagtctctgatccgtgaacagacca

SEQ ID NO: 123261 - DNA, 25 bp, Canis familiaris
gagtctatcatccctgacaaagcct

SEQ ID NO: 123262 - DNA, 25 bp, Canis familiaris
gagtcatactcgccataccatactc

SEQ ID NO: 123263 - DNA, 25 bp, Canis familiaris
gagtctagccagtctggctccacta

SEQ ID NO: 123264 - DNA, 25 bp, Canis familiaris
gagtccccatgagtgagacaacaga

SEQ ID NO: 123265 - DNA, 25 bp, Canis familiaris
gagtcccgctgatggacacacaggt

SEQ ID NO: 123266 - DNA, 25 bp, Canis familiaris
gagtcccgtgaatgatgtctgtggt

SEQ ID NO: 123267 - DNA, 25 bp, Canis familiaris
gagtcgggtttattgtcgtcgatgc

SEQ ID NO: 123268 - DNA, 25 bp, Canis familiaris
gagtctgcgtgtatatttctccggg

SEQ ID NO: 123269 - DNA, 25 bp, Canis familiaris
gagtccggttcaaaccacttggtgt

SEQ ID NO: 123270 - DNA, 25 bp, Canis familiaris
gagtgacgagttcattcaactaggg

SEQ ID NO: 123271 - DNA, 25 bp, Canis familiaris
gagtgaccacatgcaattgaatctg

SEQ ID NO: 123272 - DNA, 25 bp, Canis familiaris
gagtgacccatcaactgtgcaaatc

SEQ ID NO: 123273 - DNA, 25 bp, Canis familiaris
gagtgacccatttcatcatagattc

SEQ ID NO: 123274 - DNA, 25 bp, Canis familiaris
gagtgcctcctatagcaaatcttga

SEQ ID NO: 123275 - DNA, 25 bp, Canis familiaris
gagtgcccctatttgaaatggcttt

SEQ ID NO: 123276 - DNA, 25 bp, Canis familiaris
gagtccattctgaatttgtaggcat

SEQ ID NO: 123277 - DNA, 25 bp, Canis familiaris
gagtcctttgagaatctgggccttc

SEQ ID NO: 123278 - DNA, 25 bp, Canis familiaris
gagtctgcctgttgaactgtggtgc

SEQ ID NO: 123279 - DNA, 25 bp, Canis familiaris
gagtgctgacgccttactggcaatg

SEQ ID NO: 123280 - DNA, 25 bp, Canis familiaris
gagtgtgagcacccaacttgattgc

SEQ ID NO: 123281 - DNA, 25 bp, Canis familiaris
gagggactactaggcattagcggta

SEQ ID NO: 123282 - DNA, 25 bp, Canis familiaris
gaggggctactacatacagttagat

SEQ ID NO: 123283 - DNA, 25 bp, Canis familiaris
gagtgtggctatgtgccagtattta

SEQ ID NO: 123284 - DNA, 25 bp, Canis familiaris
gagtctgtattgttgaagctatttt

SEQ ID NO: 123285 - DNA, 25 bp, Canis familiaris
gagtcctggtgctgcaactcaagta

SEQ ID NO: 123286 - DNA, 25 bp, Canis familiaris
gagtcgctggtgactccattcgagt

SEQ ID NO: 123287 - DNA, 25 bp, Canis familiaris
gagtccaggaccttatggcgcagat

SEQ ID NO: 123288 - DNA, 25 bp, Canis familiaris
gagtcctggacatcttgaagaaatc

SEQ ID NO: 123289 - DNA, 25 bp, Canis familiaris
gatgtctcggtctctggtaaataag

SEQ ID NO: 123290 - DNA, 25 bp, Canis familiaris
gagtgatcaggcaattcggtcaatt

SEQ ID NO: 123291 - DNA, 25 bp, Canis familiaris
gagtgctggactcttgaacacattc

SEQ ID NO: 123292 - DNA, 25 bp, Canis familiaris
gagtcggaccctgagagcacagatg

SEQ ID NO: 123293 - DNA, 25 bp, Canis familiaris
gagtgcgtgctcaacttgggcaagt

SEQ ID NO: 123294 - DNA, 25 bp, Canis familiaris
gagtgcgtgcaagatcggtcagatg

SEQ ID NO: 123295 - DNA, 25 bp, Canis familiaris
gagtctgtcaaaatgaatggctgtg

SEQ ID NO: 123296 - DNA, 25 bp, Canis familiaris
gagtcttgactcattctgagcttgc

SEQ ID NO: 123297 - DNA, 25 bp, Canis familiaris
gagtcctgcaccattagacttcttg

SEQ ID NO: 123298 - DNA, 25 bp, Canis familiaris
gagtcctagtccattagcatttctg

SEQ ID NO: 123299 - DNA, 25 bp, Canis familiaris
gagtcctaaccaaatgagcttcatc

SEQ ID NO: 123300 - DNA, 25 bp, Canis familiaris
gagtccccaccaagaagatgatacc

SEQ ID NO: 123301 - DNA, 25 bp, Canis familiaris
gagggcccaccaagaaagggatgct

SEQ ID NO: 123302 - DNA, 25 bp, Canis familiaris
gagggctacacctacaaacagtacc

SEQ ID NO: 123303 - DNA, 25 bp, Canis familiaris
gagggctttctacaaaatcgacggt

SEQ ID NO: 123304 - DNA, 25 bp, Canis familiaris
gagggctttagaaaccacggtcctg

SEQ ID NO: 123305 - DNA, 25 bp, Canis familiaris
gagggtgtggacagacccaagtccc

SEQ ID NO: 123306 - DNA, 25 bp, Canis familiaris
gagtgggtggaagcagccagacgtg

SEQ ID NO: 123307 - DNA, 25 bp, Canis familiaris
gaggggacggagcctcaaaaggcca

SEQ ID NO: 123308 - DNA, 25 bp, Canis familiaris
gagggaaaggggtgcaacgtccgtg

SEQ ID NO: 123309 - DNA, 25 bp, Canis familiaris
gagggaacggggcaagagaccaggt

SEQ ID NO: 123310 - DNA, 25 bp, Canis familiaris
gagggaactgtgttggaaatggccg

SEQ ID NO: 123311 - DNA, 25 bp, Canis familiaris
gagggccttgatttaaaatgaccag

SEQ ID NO: 123312 - DNA, 25 bp, Canis familiaris
gagggccaggtgcataaagcgacgc

SEQ ID NO: 123313 - DNA, 25 bp, Canis familiaris
gatggttaggtacacaaggacgctt

SEQ ID NO: 123314 - DNA, 25 bp, Canis familiaris
gatggttaggtacacaaggacgctt

SEQ ID NO: 123315 - DNA, 25 bp, Canis familiaris
gatggttaggtacacaaggacgctt

SEQ ID NO: 123316 - DNA, 25 bp, Canis familiaris
gatggttaggtacacaaggacgctt

SEQ ID NO: 123317 - DNA, 25 bp, Canis familiaris
gatggttaggtacacaaggacgctt

SEQ ID NO: 123318 - DNA, 25 bp, Canis familiaris
gatggttaggtacacaaggacgctt

SEQ ID NO: 123319 - DNA, 25 bp, Canis familiaris
gatggttaggtacacaaggacgctt

SEQ ID NO: 123320 - DNA, 25 bp, Canis familiaris
gaggttcgagttgacttgtaccttc

SEQ ID NO: 123321 - DNA, 25 bp, Canis familiaris
gaggtccgtgttgaacttgtggatt

SEQ ID NO: 123322 - DNA, 25 bp, Canis familiaris
gagtcccttgttcgtgacggtagat

SEQ ID NO: 123323 - DNA, 25 bp, Canis familiaris
gagtccacctgggaggaccgtatta

SEQ ID NO: 123324 - DNA, 25 bp, Canis familiaris
gagtccaccacggaggactctgcgg

SEQ ID NO: 123325 - DNA, 25 bp, Canis familiaris
gagtcgccaccggaggagagtcgac

SEQ ID NO: 123326 - DNA, 25 bp, Canis familiaris
gagtctcctcacgacaagatggtct

SEQ ID NO: 123327 - DNA, 25 bp, Canis familiaris
gagtcacgacagcaccatgctggtg

SEQ ID NO: 123328 - DNA, 25 bp, Canis familiaris
gagtgcaggaggcatgccaggagga

SEQ ID NO: 123329 - DNA, 25 bp, Canis familiaris
gagtcaggactcaagccagaggctg

SEQ ID NO: 123330 - DNA, 25 bp, Canis familiaris
gagtcagaagcagagccagcagccg

SEQ ID NO: 123331 - DNA, 25 bp, Canis familiaris
gagtgaggatgataccgcatctcag

SEQ ID NO: 123332 - DNA, 25 bp, Canis familiaris
gagtgaagcaaaagcaccatctgga

SEQ ID NO: 123333 - DNA, 25 bp, Canis familiaris
gagtgcaccaactcagttcttatta

SEQ ID NO: 123334 - DNA, 25 bp, Canis familiaris
gagtgaacaacactcctatcccatt

SEQ ID NO: 123335 - DNA, 25 bp, Canis familiaris
gagtgacaaagttcctagactacct

SEQ ID NO: 123336 - DNA, 25 bp, Canis familiaris
gatggaaaagttgaaggcttctctt

SEQ ID NO: 123337 - DNA, 25 bp, Canis familiaris
gaggagttagtagccagtcttcccg

SEQ ID NO: 123338 - DNA, 25 bp, Canis familiaris
ggggtaaggggcagttatgccctga

SEQ ID NO: 123339 - DNA, 25 bp, Canis familiaris
gagtggtgaagacatccgtaagccc

SEQ ID NO: 123340 - DNA, 25 bp, Canis familiaris
gagtggctgacagctatcttccaac

SEQ ID NO: 123341 - DNA, 25 bp, Canis familiaris
gagtcctgagcattggtgctctgcc

SEQ ID NO: 123342 - DNA, 25 bp, Canis familiaris
gagtgcacgcactgcgtgctgtccg

SEQ ID NO: 123343 - DNA, 25 bp, Canis familiaris
gagtgcaacatctgcaaggtccgct

SEQ ID NO: 123344 - DNA, 25 bp, Canis familiaris
gagtgcaaatcataatagttccaat

SEQ ID NO: 123345 - DNA, 25 bp, Canis familiaris
gagtcgtgaaagaatcgtccaagat

SEQ ID NO: 123346 - DNA, 25 bp, Canis familiaris
gagtgatgctaatgctgtcgaccta

SEQ ID NO: 123347 - DNA, 25 bp, Canis familiaris
gagtgcactactgcatgttatgcct

SEQ ID NO: 123348 - DNA, 25 bp, Canis familiaris
gagtgcctagcagatgagctcatca

SEQ ID NO: 123349 - DNA, 25 bp, Canis familiaris
gagtgcctagcagatgagctcatca

SEQ ID NO: 123350 - DNA, 25 bp, Canis familiaris
gagtgcctggaggaggtgcaagcct

SEQ ID NO: 123351 - DNA, 25 bp, Canis familiaris
gagtccgcgatggccgatgagatcg

SEQ ID NO: 123352 - DNA, 25 bp, Canis familiaris
gagtcgctggtgtctgaggagatcg

SEQ ID NO: 123353 - DNA, 25 bp, Canis familiaris
gagtcctctgagtatggcaagtccc

SEQ ID NO: 123354 - DNA, 25 bp, Canis familiaris
gagtccatcgagctgtagaggctcc

SEQ ID NO: 123355 - DNA, 25 bp, Canis familiaris
gagtccagtcaaatgtatcaggccc

SEQ ID NO: 123356 - DNA, 25 bp, Canis familiaris
gagtgcggtcatttgattcgaggcc

SEQ ID NO: 123357 - DNA, 25 bp, Canis familiaris
gagtcagtacatttgtgccagggag

SEQ ID NO: 123358 - DNA, 25 bp, Canis familiaris
gagtccgacattgaccgggatggca

SEQ ID NO: 123359 - DNA, 25 bp, Canis familiaris
gagtcccagatagacccgagtgaac

SEQ ID NO: 123360 - DNA, 25 bp, Canis familiaris
gagtcccaggtggataccatggtga

SEQ ID NO: 123361 - DNA, 25 bp, Canis familiaris
gagtgccgagagctgaaccagcgcg

SEQ ID NO: 123362 - DNA, 25 bp, Canis familiaris
gagtcctgagagccagagatcccac

SEQ ID NO: 123363 - DNA, 25 bp, Canis familiaris
gagtgtctgcgagtcaggattcccg

SEQ ID NO: 123364 - DNA, 25 bp, Canis familiaris
gagtgtctcgtgtgtgatatcgcca

SEQ ID NO: 123365 - DNA, 25 bp, Canis familiaris
gagtgagctcagctagctgctaggc

SEQ ID NO: 123366 - DNA, 25 bp, Canis familiaris
gagtggatgcatctgggttggccag

SEQ ID NO: 123367 - DNA, 25 bp, Canis familiaris
gagtgatagctttgaaggttcataa

SEQ ID NO: 123368 - DNA, 25 bp, Canis familiaris
gagtgaacttctcctggtttacagt

SEQ ID NO: 123369 - DNA, 25 bp, Canis familiaris
gagtgatattttctagttcgccgta

SEQ ID NO: 123370 - DNA, 25 bp, Canis familiaris
gagtgcatatatgtcctatttcagg

SEQ ID NO: 123371 - DNA, 25 bp, Canis familiaris
gagtgattatgccccacattataag

SEQ ID NO: 123372 - DNA, 25 bp, Canis familiaris
gagtgataacccccagaatgcaaat

SEQ ID NO: 123373 - DNA, 25 bp, Canis familiaris
gagtgagaccattctacacaatcaa

SEQ ID NO: 123374 - DNA, 25 bp, Canis familiaris
gagggactgcagttacgcaagcaga

SEQ ID NO: 123375 - DNA, 25 bp, Canis familiaris
gagggcctgggccccatgagaataa

SEQ ID NO: 123376 - DNA, 25 bp, Canis familiaris
gagtgagttgggccttgtgacacaa

SEQ ID NO: 123377 - DNA, 25 bp, Canis familiaris
gagtgttttggtatcagaatcatga

SEQ ID NO: 123378 - DNA, 25 bp, Canis familiaris
gagtggtcttggtcctgaatataca

SEQ ID NO: 123379 - DNA, 25 bp, Canis familiaris
gaggaaattgtgccctgtcagaaag

SEQ ID NO: 123380 - DNA, 25 bp, Canis familiaris
gagtggaagtggaccggcatgctcc

SEQ ID NO: 123381 - DNA, 25 bp, Canis familiaris
gagtgtgaagctgaccagctcgcgc

SEQ ID NO: 123382 - DNA, 25 bp, Canis familiaris
gagtccaagctctagaccttatgtg

SEQ ID NO: 123383 - DNA, 25 bp, Canis familiaris
gagtccggtgttcagattttggtgg

SEQ ID NO: 123384 - DNA, 25 bp, Canis familiaris
gagtctctgggattcggacgtgggg

SEQ ID NO: 123385 - DNA, 25 bp, Canis familiaris
gagtcctggatcacaggggctgggg

SEQ ID NO: 123386 - DNA, 25 bp, Canis familiaris
gagtcctggatctcagtttgggcag

SEQ ID NO: 123387 - DNA, 25 bp, Canis familiaris
gagtcttggtcacagtccatggtgt

SEQ ID NO: 123388 - DNA, 25 bp, Canis familiaris
gagtcattggtacctgttcatcttt

SEQ ID NO: 123389 - DNA, 25 bp, Canis familiaris
gagtcttggctgttgtgttttgctc

SEQ ID NO: 123390 - DNA, 25 bp, Canis familiaris
gagtctctggatttgctgtgtgtgc

SEQ ID NO: 123391 - DNA, 25 bp, Canis familiaris
gagtgtgctgtgaacatgcttttta

SEQ ID NO: 123392 - DNA, 25 bp, Canis familiaris
gagtgctcgcagacaagtttctgaa

SEQ ID NO: 123393 - DNA, 25 bp, Canis familiaris
gagtgcctgcagaaagagtcggaga

SEQ ID NO: 123394 - DNA, 25 bp, Canis familiaris
gagtctccagagacagcagacaggt

SEQ ID NO: 123395 - DNA, 25 bp, Canis familiaris
gagtctcgcgagagggcgtgagcgc

SEQ ID NO: 123396 - DNA, 25 bp, Canis familiaris
gagtccgcggagtgtcaggaccagc

SEQ ID NO: 123397 - DNA, 25 bp, Canis familiaris
gagtcccgagtgggtgcaggagcaa

SEQ ID NO: 123398 - DNA, 25 bp, Canis familiaris
gagtccccatggagtgagacacaga

SEQ ID NO: 123399 - DNA, 25 bp, Canis familiaris
gagtcctctcgcttgtggagaatca

SEQ ID NO: 123400 - DNA, 25 bp, Canis familiaris
gagtctgttctgaggtggcaatagc

SEQ ID NO: 123401 - DNA, 25 bp, Canis familiaris
gagtgcgttatcagtgcttaatacc

SEQ ID NO: 123402 - DNA, 25 bp, Canis familiaris
gagggcttatcacgagtttaaccag

SEQ ID NO: 123403 - DNA, 25 bp, Canis familiaris
gagtggtttaaactttcgcccagat

SEQ ID NO: 123404 - DNA, 25 bp, Canis familiaris
gagtggtttacacgttttctggtga

SEQ ID NO: 123405 - DNA, 25 bp, Canis familiaris
gagtggttctgtcagttgagcatct

SEQ ID NO: 123406 - DNA, 25 bp, Canis familiaris
gagtggacctgataggccacctagc

SEQ ID NO: 123407 - DNA, 25 bp, Canis familiaris
gagggagactatcacccaggattca

SEQ ID NO: 123408 - DNA, 25 bp, Canis familiaris
gagggagactttcaccttatacctt

SEQ ID NO: 123409 - DNA, 25 bp, Canis familiaris
gagggagaagggtgccacttccctt

SEQ ID NO: 123410 - DNA, 25 bp, Canis familiaris
gaggtttcagggatccagtggtttt

SEQ ID NO: 123411 - DNA, 25 bp, Canis familiaris
gaggccccagggaacctgggcttat

SEQ ID NO: 123412 - DNA, 25 bp, Canis familiaris
gagtctcaacacggaactgggtggg

SEQ ID NO: 123413 - DNA, 25 bp, Canis familiaris
gagtctcctatgagaacttggtgta

SEQ ID NO: 123414 - DNA, 25 bp, Canis familiaris
gagggtctagaaaacttggtggctt

SEQ ID NO: 123415 - DNA, 25 bp, Canis familiaris
gagtgaattcaaaaccatttttctt

SEQ ID NO: 123416 - DNA, 25 bp, Canis familiaris
gagtgacatttcataccatgtatat

SEQ ID NO: 123417 - DNA, 25 bp, Canis familiaris
gagtgctctgtgtttaaggatgaat

SEQ ID NO: 123418 - DNA, 25 bp, Canis familiaris
gagtccagtgacctcagatgggtaa

SEQ ID NO: 123419 - DNA, 25 bp, Canis familiaris
gggacattggcagagcagtcgggga

SEQ ID NO: 123420 - DNA, 25 bp, Canis familiaris
gagtgtgcagacacacaggagccca

SEQ ID NO: 123421 - DNA, 25 bp, Canis familiaris
gagtgccagtataagagtgtgccag

SEQ ID NO: 123422 - DNA, 25 bp, Canis familiaris
gaggccacaagaaggttgaaggggt

SEQ ID NO: 123423 - DNA, 25 bp, Canis familiaris
gagtgcccagagtatggtggatttg

SEQ ID NO: 123424 - DNA, 25 bp, Canis familiaris
gagtgtccggaggtgctgggtaaaa

SEQ ID NO: 123425 - DNA, 25 bp, Canis familiaris
gaggttcctcagttctgtgggttat

SEQ ID NO: 123426 - DNA, 25 bp, Canis familiaris
gaggtttctccgagtggatttcctg

SEQ ID NO: 123427 - DNA, 25 bp, Canis familiaris
gagtgtattattcaggttttccctg

SEQ ID NO: 123428 - DNA, 25 bp, Canis familiaris
gagtgacttttcgattgttttaaca

SEQ ID NO: 123429 - DNA, 25 bp, Canis familiaris
gagtcctgtattgttattcttcgtc

SEQ ID NO: 123430 - DNA, 25 bp, Canis familiaris
gagtccttatctgtaatgtgctatg

SEQ ID NO: 123431 - DNA, 25 bp, Canis familiaris
gagtccttatgcattcagatgttaa

SEQ ID NO: 123432 - DNA, 25 bp, Canis familiaris
gagtctctttcaatacaggatctaa

SEQ ID NO: 123433 - DNA, 25 bp, Canis familiaris
gagtctgcattttaaatgtgtcttg

SEQ ID NO: 123434 - DNA, 25 bp, Canis familiaris
gagtccatcttgtgagtgtccatat

SEQ ID NO: 123435 - DNA, 25 bp, Canis familiaris
gagtcctattgttcagatcaccttc

SEQ ID NO: 123436 - DNA, 25 bp, Canis familiaris
gagtgccaagtggaatgaccacatt

SEQ ID NO: 123437 - DNA, 25 bp, Canis familiaris
gagtggcacagatatatgagcgaca

SEQ ID NO: 123438 - DNA, 25 bp, Canis familiaris
gagtggccgtttgcatggacaatag

SEQ ID NO: 123439 - DNA, 25 bp, Canis familiaris
gagtgtgtgagatttacagtaccaa

SEQ ID NO: 123440 - DNA, 25 bp, Canis familiaris
gagggtccagtctacagaaccagct

SEQ ID NO: 123441 - DNA, 25 bp, Canis familiaris
gagggccaagtcagcagtagtctgc

SEQ ID NO: 123442 - DNA, 25 bp, Canis familiaris
gagggccaaccaacagtagggactt

SEQ ID NO: 123443 - DNA, 25 bp, Canis familiaris
gagggctcaacaaaacggtcgactg

SEQ ID NO: 123444 - DNA, 25 bp, Canis familiaris
gagtgactttataagaaggtccatt

SEQ ID NO: 123445 - DNA, 25 bp, Canis familiaris
gaggagtttcgttaaagttcataat

SEQ ID NO: 123446 - DNA, 25 bp, Canis familiaris
gaggacttgacagaaaaggacaaat

SEQ ID NO: 123447 - DNA, 25 bp, Canis familiaris
gagggttgatattaaaaagtcagtt

SEQ ID NO: 123448 - DNA, 25 bp, Canis familiaris
gagggtccttgagaataagccccat

SEQ ID NO: 123449 - DNA, 25 bp, Canis familiaris
gaggggcgtgggcaagaaccccagc

SEQ ID NO: 123450 - DNA, 25 bp, Canis familiaris
gaggcggtgggcctaaaaccactgc

SEQ ID NO: 123451 - DNA, 25 bp, Canis familiaris
gaggcggtgggctaaagccacgccc

SEQ ID NO: 123452 - DNA, 25 bp, Canis familiaris
gaggcggtgggctaaagccacgccc

SEQ ID NO: 123453 - DNA, 25 bp, Canis familiaris
gaggcggtgggctaaagccacgccc

SEQ ID NO: 123454 - DNA, 25 bp, Canis familiaris
gagtcgggatactaactagccctcc

SEQ ID NO: 123455 - DNA, 25 bp, Canis familiaris
gagtcggacacggacattgagccca

SEQ ID NO: 123456 - DNA, 25 bp, Canis familiaris
gatggaggaccaggtagtcggctcg

SEQ ID NO: 123457 - DNA, 25 bp, Canis familiaris
gagggtaatcggactgttggtccaa

SEQ ID NO: 123458 - DNA, 25 bp, Canis familiaris
gagggccagatcggacgtaagtctc

SEQ ID NO: 123459 - DNA, 25 bp, Canis familiaris
gagggccatgcagagacgtgctatt

SEQ ID NO: 123460 - DNA, 25 bp, Canis familiaris
gagtgtccatcaaaggcctggcaat

SEQ ID NO: 123461 - DNA, 25 bp, Canis familiaris
gagtccctcagatggctattcaaat

SEQ ID NO: 123462 - DNA, 25 bp, Canis familiaris
gagtctcccagatggcaggttataa

SEQ ID NO: 123463 - DNA, 25 bp, Canis familiaris
gagtgtcccaaggagcagggccata

SEQ ID NO: 123464 - DNA, 25 bp, Canis familiaris
gagtgtgcccagaaccagggtgacc

SEQ ID NO: 123465 - DNA, 25 bp, Canis familiaris
gagtggagccatgaccaaggacctg

SEQ ID NO: 123466 - DNA, 25 bp, Canis familiaris
gagtgccaggatgacagccatggac

SEQ ID NO: 123467 - DNA, 25 bp, Canis familiaris
gagtgcgcaggaacagaccgtaata

SEQ ID NO: 123468 - DNA, 25 bp, Canis familiaris
gagtcgggaagattgctgcactaaa

SEQ ID NO: 123469 - DNA, 25 bp, Canis familiaris
gagtctggggtggagcccttgaaat

SEQ ID NO: 123470 - DNA, 25 bp, Canis familiaris
gagtgtgtggggggcccccaaatcg

SEQ ID NO: 123471 - DNA, 25 bp, Canis familiaris
gaggattgggggtccacattttggg

SEQ ID NO: 123472 - DNA, 25 bp, Canis familiaris
gagggagagagggaaagattttgga

SEQ ID NO: 123473 - DNA, 25 bp, Canis familiaris
gagggccaagagggtagttgttcct

SEQ ID NO: 123474 - DNA, 25 bp, Canis familiaris
gagtgttccaggtgaggggtgtcct

SEQ ID NO: 123475 - DNA, 25 bp, Canis familiaris
gagtgttctcaagtctgggggttgt

SEQ ID NO: 123476 - DNA, 25 bp, Canis familiaris
gagggtgcctagggcctgaggattg

SEQ ID NO: 123477 - DNA, 25 bp, Canis familiaris
gagtggaggaagtgcctatctatag

SEQ ID NO: 123478 - DNA, 25 bp, Canis familiaris
gagggtgcggagagaatttacagga

SEQ ID NO: 123479 - DNA, 25 bp, Canis familiaris
gaggagggccagagaggaaaccgaa

SEQ ID NO: 123480 - DNA, 25 bp, Canis familiaris
gagtggggcaagatggggaaccaga

SEQ ID NO: 123481 - DNA, 25 bp, Canis familiaris
gaggagttcaccagggtggagacaa

SEQ ID NO: 123482 - DNA, 25 bp, Canis familiaris
gagggttcaccagggctggcgaaat

SEQ ID NO: 123483 - DNA, 25 bp, Canis familiaris
gaggcggaactcagggcggaaatag

SEQ ID NO: 123484 - DNA, 25 bp, Canis familiaris
gagggagatagtgggacgcggagaa

SEQ ID NO: 123485 - DNA, 25 bp, Canis familiaris
gagtgggattgatgctttgggaaga

SEQ ID NO: 123486 - DNA, 25 bp, Canis familiaris
gaggggggacctactggatgatgat

SEQ ID NO: 123487 - DNA, 25 bp, Canis familiaris
gaggcagccagggcttacctgtaca

SEQ ID NO: 123488 - DNA, 25 bp, Canis familiaris
gagtccagagaggctttcctcttcg

SEQ ID NO: 123489 - DNA, 25 bp, Canis familiaris
gagtcgcgaacgctgtgcgtttgtc

SEQ ID NO: 123490 - DNA, 25 bp, Canis familiaris
gattaagatgccccggcttttgctt

SEQ ID NO: 123491 - DNA, 25 bp, Canis familiaris
gatgctaaagggagtcctgcaggtt

SEQ ID NO: 123492 - DNA, 25 bp, Canis familiaris
gagggcaagaggtgattctaggcta

SEQ ID NO: 123493 - DNA, 25 bp, Canis familiaris
gagtgcttttggttgtctctaggtc

SEQ ID NO: 123494 - DNA, 25 bp, Canis familiaris
gagtgcttgcgtaatttttatagtt

SEQ ID NO: 123495 - DNA, 25 bp, Canis familiaris
gagtgtatgcctcctatctttaaaa

SEQ ID NO: 123496 - DNA, 25 bp, Canis familiaris
gagtgtatacccatgcataaaataa

SEQ ID NO: 123497 - DNA, 25 bp, Canis familiaris
gagtgtatgcaggaattctaaatta

SEQ ID NO: 123498 - DNA, 25 bp, Canis familiaris
gagtgtatcaatgtcctgtgtagta

SEQ ID NO: 123499 - DNA, 25 bp, Canis familiaris
gagtgcttaactttctttatgctga

SEQ ID NO: 123500 - DNA, 25 bp, Canis familiaris
gagtgttaagtagtctcgtagccac

SEQ ID NO: 123501 - DNA, 25 bp, Canis familiaris
gagtgtgtaactaatcctgctagct

SEQ ID NO: 123502 - DNA, 25 bp, Canis familiaris
gagtgctgccaacatgaactgctac

SEQ ID NO: 123503 - DNA, 25 bp, Canis familiaris
gagtgctgagaacagacacgcagac

SEQ ID NO: 123504 - DNA, 25 bp, Canis familiaris
gagtgcagagacacgagatcacaac

SEQ ID NO: 123505 - DNA, 25 bp, Canis familiaris
gagggcagcatttcaggattaacat

SEQ ID NO: 123506 - DNA, 25 bp, Canis familiaris
gagtgtgcacattaccaacagagaa

SEQ ID NO: 123507 - DNA, 25 bp, Canis familiaris
gagtgtggatgatctcagacaaaga

SEQ ID NO: 123508 - DNA, 25 bp, Canis familiaris
gaggtcgcagatacttgagcagggc

SEQ ID NO: 123509 - DNA, 25 bp, Canis familiaris
gagggccaaccttaggggcctgaag

SEQ ID NO: 123510 - DNA, 25 bp, Canis familiaris
gagggaccaccttagagttaatgag

SEQ ID NO: 123511 - DNA, 25 bp, Canis familiaris
gatgctgtacccctcaaggatttaa

SEQ ID NO: 123512 - DNA, 25 bp, Canis familiaris
gagtgcagagcccaacacaggttta

SEQ ID NO: 123513 - DNA, 25 bp, Canis familiaris
gagtgaggggaaggcagatgtttaa

SEQ ID NO: 123514 - DNA, 25 bp, Canis familiaris
gagtgggaggccggaaaggtcgcac

SEQ ID NO: 123515 - DNA, 25 bp, Canis familiaris
gagtgggaggccggaaaggtcgcac

SEQ ID NO: 123516 - DNA, 25 bp, Canis familiaris
gagtgggaggccggaaaggtcgcac

SEQ ID NO: 123517 - DNA, 25 bp, Canis familiaris
gagtgggaggccggaaaggtcgcac

SEQ ID NO: 123518 - DNA, 25 bp, Canis familiaris
gagtgctatgcacacggaaaggcct

SEQ ID NO: 123519 - DNA, 25 bp, Canis familiaris
gagtgtagttcacgctgaaagatgc

SEQ ID NO: 123520 - DNA, 25 bp, Canis familiaris
gagtgtgctttcctgtgagttggca

SEQ ID NO: 123521 - DNA, 25 bp, Canis familiaris
gagtgatgtttcttatcagctggta

SEQ ID NO: 123522 - DNA, 25 bp, Canis familiaris
gagtgcattgatactcttctgttgt

SEQ ID NO: 123523 - DNA, 25 bp, Canis familiaris
gagtgtcagatgaatctttgttgtc

SEQ ID NO: 123524 - DNA, 25 bp, Canis familiaris
gagtgttgcataattttgtttaact

SEQ ID NO: 123525 - DNA, 25 bp, Canis familiaris
gagtgctaataattttgtcccaata

SEQ ID NO: 123526 - DNA, 25 bp, Canis familiaris
gagtgtttgaattctattcccattc

SEQ ID NO: 123527 - DNA, 25 bp, Canis familiaris
gagtgagtcttatcttgtcctatgt

SEQ ID NO: 123528 - DNA, 25 bp, Canis familiaris
gagtgaattgtccctatttctgatg

SEQ ID NO: 123529 - DNA, 25 bp, Canis familiaris
gagtgagacccgcatatcatcttgc

SEQ ID NO: 123530 - DNA, 25 bp, Canis familiaris
gagtgatggccagctgattagttcc

SEQ ID NO: 123531 - DNA, 25 bp, Canis familiaris
gagtgatgtccaccatctaaatcct

SEQ ID NO: 123532 - DNA, 25 bp, Canis familiaris
gagtggtcaccttcataaaaccgag

SEQ ID NO: 123533 - DNA, 25 bp, Canis familiaris
gagggctgccactgtaaatacggaa

SEQ ID NO: 123534 - DNA, 25 bp, Canis familiaris
gagtgatgtgccaataaaaaacaaa

SEQ ID NO: 123535 - DNA, 25 bp, Canis familiaris
gagtgatgcctggaaacagtacatg

SEQ ID NO: 123536 - DNA, 25 bp, Canis familiaris
gagtggccttacaacagtgaatttc

SEQ ID NO: 123537 - DNA, 25 bp, Canis familiaris
gagtgttctatatttcaatgtattt

SEQ ID NO: 123538 - DNA, 25 bp, Canis familiaris
gagtgctcctttaggcgtatatgtt

SEQ ID NO: 123539 - DNA, 25 bp, Canis familiaris
gagtgttctcttagaggtcaggatg

SEQ ID NO: 123540 - DNA, 25 bp, Canis familiaris
gagtgatctttcaaatggacctgat

SEQ ID NO: 123541 - DNA, 25 bp, Canis familiaris
gagtgatcctccaacttcatttgat

SEQ ID NO: 123542 - DNA, 25 bp, Canis familiaris
gagtgcagattcaagaatcccttga

SEQ ID NO: 123543 - DNA, 25 bp, Canis familiaris
gagtgcagtatcagagtttagaggg

SEQ ID NO: 123544 - DNA, 25 bp, Canis familiaris
gagtgtgtgctgatgagattctaag

SEQ ID NO: 123545 - DNA, 25 bp, Canis familiaris
gagtgctgtatggctagcattgtat

SEQ ID NO: 123546 - DNA, 25 bp, Canis familiaris
gaggtgtatcctgcattggtaaatt

SEQ ID NO: 123547 - DNA, 25 bp, Canis familiaris
gagggattccttgatgttgacacac

SEQ ID NO: 123548 - DNA, 25 bp, Canis familiaris
gagggacttttcttggaacatacgc

SEQ ID NO: 123549 - DNA, 25 bp, Canis familiaris
gagggtcctacttggagaaactggc

SEQ ID NO: 123550 - DNA, 25 bp, Canis familiaris
gagggtcctacttggagaaactggc

SEQ ID NO: 123551 - DNA, 25 bp, Canis familiaris
gagggctgccagaatatgctaaacc

SEQ ID NO: 123552 - DNA, 25 bp, Canis familiaris
gagtgccttagaattcatcaatccc

SEQ ID NO: 123553 - DNA, 25 bp, Canis familiaris
gagtccttacatttgattgtcctca

SEQ ID NO: 123554 - DNA, 25 bp, Canis familiaris
gagtgcctaaatctgttgattgcca

SEQ ID NO: 123555 - DNA, 25 bp, Canis familiaris
gagtgcctgagaaacgtctcttgtc

SEQ ID NO: 123556 - DNA, 25 bp, Canis familiaris
gagtgccaggatcaggagctctggg

SEQ ID NO: 123557 - DNA, 25 bp, Canis familiaris
gagggatggatggagccagcattgt

SEQ ID NO: 123558 - DNA, 25 bp, Canis familiaris
gagggatggctgtaaggagattagg

SEQ ID NO: 123559 - DNA, 25 bp, Canis familiaris
gagggcaactggtgctggttaggtc

SEQ ID NO: 123560 - DNA, 25 bp, Canis familiaris
gagggagacggacatggttccagcg

SEQ ID NO: 123561 - DNA, 25 bp, Canis familiaris
gagggaattcgacattgtccaccgg

SEQ ID NO: 123562 - DNA, 25 bp, Canis familiaris
gagtggtactgcaggaagtccatcc

SEQ ID NO: 123563 - DNA, 25 bp, Canis familiaris
gagggctaccataagcctgaccagc

SEQ ID NO: 123564 - DNA, 25 bp, Canis familiaris
gagggccccattggggtgtcagctg

SEQ ID NO: 123565 - DNA, 25 bp, Canis familiaris
gagtggaaactttggtggtagcagg

SEQ ID NO: 123566 - DNA, 25 bp, Canis familiaris
gagtggaaactttgtgttaacagga

SEQ ID NO: 123567 - DNA, 25 bp, Canis familiaris
gagggtagactttgtgggaaacaat

SEQ ID NO: 123568 - DNA, 25 bp, Canis familiaris
gagggtcgatattacttgaaaacaa

SEQ ID NO: 123569 - DNA, 25 bp, Canis familiaris
gagggtctggttatttcacccactg

SEQ ID NO: 123570 - DNA, 25 bp, Canis familiaris
gaggggtggcctctaaaatgcccgt

SEQ ID NO: 123571 - DNA, 25 bp, Canis familiaris
gaggggggactgttgaacttgctca

SEQ ID NO: 123572 - DNA, 25 bp, Canis familiaris
gaggggggaatgggactttgtctgg

SEQ ID NO: 123573 - DNA, 25 bp, Canis familiaris
gatgagggggtacctagttttctgt

SEQ ID NO: 123574 - DNA, 25 bp, Canis familiaris
gagggagggtcatccctcctgattt

SEQ ID NO: 123575 - DNA, 25 bp, Canis familiaris
gagggtggaatttcccctccattca

SEQ ID NO: 123576 - DNA, 25 bp, Canis familiaris
gagggcaggaaagaccgttctccat

SEQ ID NO: 123577 - DNA, 25 bp, Canis familiaris
gagggatactaaataccacttcctt

SEQ ID NO: 123578 - DNA, 25 bp, Canis familiaris
gggtaattagaggtcgagttcctgc

SEQ ID NO: 123579 - DNA, 25 bp, Canis familiaris
ggtgtacgtaacctaatgttagccg

SEQ ID NO: 123580 - DNA, 25 bp, Canis familiaris
gagtgtatgggatcctagggtcagc

SEQ ID NO: 123581 - DNA, 25 bp, Canis familiaris
gagtgtgacctgttcttaggagata

SEQ ID NO: 123582 - DNA, 25 bp, Canis familiaris
gagtgatcccctcattacaggagaa

SEQ ID NO: 123583 - DNA, 25 bp, Canis familiaris
gagtgagctcttaccatttgcagga

SEQ ID NO: 123584 - DNA, 25 bp, Canis familiaris
gagtcctcttctactttgatgagat

SEQ ID NO: 123585 - DNA, 25 bp, Canis familiaris
gagtgctcctttcattttgatacgg

SEQ ID NO: 123586 - DNA, 25 bp, Canis familiaris
gagtgtttgtgtcacttgtgaacct

SEQ ID NO: 123587 - DNA, 25 bp, Canis familiaris
gagtgattggattgtatttgtgcga

SEQ ID NO: 123588 - DNA, 25 bp, Canis familiaris
gagtgaggtatttattctgtgcaca

SEQ ID NO: 123589 - DNA, 25 bp, Canis familiaris
gagtggcagtttgcatggcgaaccc

SEQ ID NO: 123590 - DNA, 25 bp, Canis familiaris
gagtggcagctgcagactgggtacc

SEQ ID NO: 123591 - DNA, 25 bp, Canis familiaris
gagtgatgaccgtactgtgcgtatc

SEQ ID NO: 123592 - DNA, 25 bp, Canis familiaris
gagtggacacagtacatgatgctgg

SEQ ID NO: 123593 - DNA, 25 bp, Canis familiaris
gagtggcacaactcttgcaggaacc

SEQ ID NO: 123594 - DNA, 25 bp, Canis familiaris
gagtggactacattctgagcgtgat

SEQ ID NO: 123595 - DNA, 25 bp, Canis familiaris
gagggagctgacgttggcttcagaa

SEQ ID NO: 123596 - DNA, 25 bp, Canis familiaris
gagtggtcatacgtctgagctaccc

SEQ ID NO: 123597 - DNA, 25 bp, Canis familiaris
gagtgggcacaggcgtggtaccacc

SEQ ID NO: 123598 - DNA, 25 bp, Canis familiaris
gagtggacggaggaggtaccacccg

SEQ ID NO: 123599 - DNA, 25 bp, Canis familiaris
gaggaagcgggagggaaccgctccg

SEQ ID NO: 123600 - DNA, 25 bp, Canis familiaris
gagggcaacggggaaaccgtggcag

SEQ ID NO: 123601 - DNA, 25 bp, Canis familiaris
gagggtacagtgctaaaatcgagtc

SEQ ID NO: 123602 - DNA, 25 bp, Canis familiaris
gagggccatcctgtataaacgtctc

SEQ ID NO: 123603 - DNA, 25 bp, Canis familiaris
tggcggtatcccattaaaagcctac

SEQ ID NO: 123604 - DNA, 25 bp, Canis familiaris
ggggattaccttcaaattacatact

SEQ ID NO: 123605 - DNA, 25 bp, Canis familiaris
gagggatttcctttagagataacta

SEQ ID NO: 123606 - DNA, 25 bp, Canis familiaris
gagtgtttctctggtaaagtatttc

SEQ ID NO: 123607 - DNA, 25 bp, Canis familiaris
gagtgggcctcaggtgaaactttcc

SEQ ID NO: 123608 - DNA, 25 bp, Canis familiaris
gagtgagggtatggagagaatctta

SEQ ID NO: 123609 - DNA, 25 bp, Canis familiaris
gagtgagtggtcgccacacagcatt

SEQ ID NO: 123610 - DNA, 25 bp, Canis familiaris
gagtgttggcctgtgcgaagcagct

SEQ ID NO: 123611 - DNA, 25 bp, Canis familiaris
gagtgttggcagtttggaagcagtt

SEQ ID NO: 123612 - DNA, 25 bp, Canis familiaris
gaggtgtaggggggcatcaggctct

SEQ ID NO: 123613 - DNA, 25 bp, Canis familiaris
gaggggagggccagtggactttttg

SEQ ID NO: 123614 - DNA, 25 bp, Canis familiaris
gagggggaggcagggtgtacaagta

SEQ ID NO: 123615 - DNA, 25 bp, Canis familiaris
gagtggggcagatggggaacagacc

SEQ ID NO: 123616 - DNA, 25 bp, Canis familiaris
gagtgggcagcgtgagtaactggat

SEQ ID NO: 123617 - DNA, 25 bp, Canis familiaris
gagtgaagccaaagcaccaatctgg

SEQ ID NO: 123618 - DNA, 25 bp, Canis familiaris
gagtgaaggcactgaggccatcagg

SEQ ID NO: 123619 - DNA, 25 bp, Canis familiaris
gagggaggctgtagcatctccattg

SEQ ID NO: 123620 - DNA, 25 bp, Canis familiaris
gagtggaggctttggtgtttggttt

SEQ ID NO: 123621 - DNA, 25 bp, Canis familiaris
gatcttaggctgctggggtactgtg

SEQ ID NO: 123622 - DNA, 25 bp, Canis familiaris
gagtgtgaggctggtgtgggcacct

SEQ ID NO: 123623 - DNA, 25 bp, Canis familiaris
gaggtggcagtggtgtggcctaact

SEQ ID NO: 123624 - DNA, 25 bp, Canis familiaris
gagtgtatgagggggccctacctgc

SEQ ID NO: 123625 - DNA, 25 bp, Canis familiaris
gagtgataggttggtcagcctagcc

SEQ ID NO: 123626 - DNA, 25 bp, Canis familiaris
gagtgagatgttagagtcccgagag

SEQ ID NO: 123627 - DNA, 25 bp, Canis familiaris
gagtggcttaaaccgcggagatgcg

SEQ ID NO: 123628 - DNA, 25 bp, Canis familiaris
gaggtgttcaaactcttgtaactgt

SEQ ID NO: 123629 - DNA, 25 bp, Canis familiaris
gagggcttaagaatttgtccatttg

SEQ ID NO: 123630 - DNA, 25 bp, Canis familiaris
gagggagtcttgattttgcccctaa

SEQ ID NO: 123631 - DNA, 25 bp, Canis familiaris
gagtggagacttggtattccctcac

SEQ ID NO: 123632 - DNA, 25 bp, Canis familiaris
gagggagaccaaatttcacacccct

SEQ ID NO: 123633 - DNA, 25 bp, Canis familiaris
gagggaattgaaattgtgaacactt

SEQ ID NO: 123634 - DNA, 25 bp, Canis familiaris
gaggggttaacatctgatacatcta

SEQ ID NO: 123635 - DNA, 25 bp, Canis familiaris
gagggggaagccaactggacctcac

SEQ ID NO: 123636 - DNA, 25 bp, Canis familiaris
gaggaggtggaggttcaggacggcc

SEQ ID NO: 123637 - DNA, 25 bp, Canis familiaris
gaggggtagaggaggggcggaagct

SEQ ID NO: 123638 - DNA, 25 bp, Canis familiaris
gagggttgagggaaggggcccacag

SEQ ID NO: 123639 - DNA, 25 bp, Canis familiaris
gagtggttggggacgaggggagccg

SEQ ID NO: 123640 - DNA, 25 bp, Canis familiaris
gaggggtaaggtgggcgctaagcct

SEQ ID NO: 123641 - DNA, 25 bp, Canis familiaris
gaggggtaaggtgggcgctaagcct

SEQ ID NO: 123642 - DNA, 25 bp, Canis familiaris
gagggtgtccggacggcaaacgagt

SEQ ID NO: 123643 - DNA, 25 bp, Canis familiaris
gagggctgctcctgggagcatggtc

SEQ ID NO: 123644 - DNA, 25 bp, Canis familiaris
gagggttgctgcggggaaggtggat

SEQ ID NO: 123645 - DNA, 25 bp, Canis familiaris
gagggctgtggggtggaacgaggtg

SEQ ID NO: 123646 - DNA, 25 bp, Canis familiaris
gagggctcaagtgtggagcccgggg

SEQ ID NO: 123647 - DNA, 25 bp, Canis familiaris
gagggtgaggttaggacaccgccgg

SEQ ID NO: 123648 - DNA, 25 bp, Canis familiaris
gagtggtcagaggattggacccagt

SEQ ID NO: 123649 - DNA, 25 bp, Canis familiaris
gagtggggaaatcaggctgccatgt

SEQ ID NO: 123650 - DNA, 25 bp, Canis familiaris
gagtggggaaagctgcatcgtattg

SEQ ID NO: 123651 - DNA, 25 bp, Canis familiaris
gagggaggagggctacccattgacc

SEQ ID NO: 123652 - DNA, 25 bp, Canis familiaris
gagtggggagggtttcctctgtgtc

SEQ ID NO: 123653 - DNA, 25 bp, Canis familiaris
tagtcggacgggtcgtttctgaacg

SEQ ID NO: 123654 - DNA, 25 bp, Canis familiaris
gagtggtgagggctcgtttgccaac

SEQ ID NO: 123655 - DNA, 25 bp, Canis familiaris
gagtgtttgtggctcagttcagtga

SEQ ID NO: 123656 - DNA, 25 bp, Canis familiaris
gagtgctactgtaggccttgtctgg

SEQ ID NO: 123657 - DNA, 25 bp, Canis familiaris
gagtgtgagtgaatgtgcctcccgg

SEQ ID NO: 123658 - DNA, 25 bp, Canis familiaris
gagtgagatgctggagaccatccca

SEQ ID NO: 123659 - DNA, 25 bp, Canis familiaris
gagtgcaagctgcgtgcaacaggca

SEQ ID NO: 123660 - DNA, 25 bp, Canis familiaris
gagtgcaagctgcaaggaggcagcc

SEQ ID NO: 123661 - DNA, 25 bp, Canis familiaris
gagtgggctatgcaggaccagccac

SEQ ID NO: 123662 - DNA, 25 bp, Canis familiaris
gagtgtgagaggttgagacgcccat

SEQ ID NO: 123663 - DNA, 25 bp, Canis familiaris
gagggcaggtaccatgacatcacca

SEQ ID NO: 123664 - DNA, 25 bp, Canis familiaris
gagggcatgggaggctaagggcgct

SEQ ID NO: 123665 - DNA, 25 bp, Canis familiaris
gagggcatggggcttaggattgtca

SEQ ID NO: 123666 - DNA, 25 bp, Canis familiaris
gagggcgggagatttagtaagataa

SEQ ID NO: 123667 - DNA, 25 bp, Canis familiaris
gagggccagccacataagatatata

SEQ ID NO: 123668 - DNA, 25 bp, Canis familiaris
gagggcagtccaagtatatgtatat

SEQ ID NO: 123669 - DNA, 25 bp, Canis familiaris
gagggagatccagctatggtttcag

SEQ ID NO: 123670 - DNA, 25 bp, Canis familiaris
gagggaccagcaacagggtgattgc

SEQ ID NO: 123671 - DNA, 25 bp, Canis familiaris
gatcggcaccaatcagggtagaccg

SEQ ID NO: 123672 - DNA, 25 bp, Canis familiaris
gagggcctcaactaggcctagggga

SEQ ID NO: 123673 - DNA, 25 bp, Canis familiaris
gagtgtccgagacagggtacgtgga

SEQ ID NO: 123674 - DNA, 25 bp, Canis familiaris
gagtgtccgtgagaggcagctatct

SEQ ID NO: 123675 - DNA, 25 bp, Canis familiaris
gagtgtgggtgagtaggtggctgct

SEQ ID NO: 123676 - DNA, 25 bp, Canis familiaris
gagtgtgtgagcagtgagggggccc

SEQ ID NO: 123677 - DNA, 25 bp, Canis familiaris
gagtgctggtgacaaggtggagaac

SEQ ID NO: 123678 - DNA, 25 bp, Canis familiaris
gagtggtgagaacaagagggaaggc

SEQ ID NO: 123679 - DNA, 25 bp, Canis familiaris
gaggggggagggccaaggaatctgt

SEQ ID NO: 123680 - DNA, 25 bp, Canis familiaris
gagggcgtgggatgaccagggtgga

SEQ ID NO: 123681 - DNA, 25 bp, Canis familiaris
gagggcgggtgattagcggtggtgc

SEQ ID NO: 123682 - DNA, 25 bp, Canis familiaris
gaggggacacgagttcaggtgttca

SEQ ID NO: 123683 - DNA, 25 bp, Canis familiaris
gaggggaggcaagttagctgttctc

SEQ ID NO: 123684 - DNA, 25 bp, Canis familiaris
gagggaatgcgaatcagtacttgtg

SEQ ID NO: 123685 - DNA, 25 bp, Canis familiaris
gagtggtagctctacactactactg

SEQ ID NO: 123686 - DNA, 25 bp, Canis familiaris
gagggtcctctcatcgttactgaag

SEQ ID NO: 123687 - DNA, 25 bp, Canis familiaris
gagggttacttgtgtactctacatg

SEQ ID NO: 123688 - DNA, 25 bp, Canis familiaris
gagggttatttcgagcttgcttaat

SEQ ID NO: 123689 - DNA, 25 bp, Canis familiaris
gagtgagacttttctacgtttgaga

SEQ ID NO: 123690 - DNA, 25 bp, Canis familiaris
gagggcctttgcaatgaagttcgag

SEQ ID NO: 123691 - DNA, 25 bp, Canis familiaris
gagggttttctgaggttcggagaga

SEQ ID NO: 123692 - DNA, 25 bp, Canis familiaris
gagtggggttctgaggttcccctat

SEQ ID NO: 123693 - DNA, 25 bp, Canis familiaris
gagtggggttattaggatgtcttcc

SEQ ID NO: 123694 - DNA, 25 bp, Canis familiaris
gagggcagctattaccaggtgtttc

SEQ ID NO: 123695 - DNA, 25 bp, Canis familiaris
gagggcagtacattccgttttgctc

SEQ ID NO: 123696 - DNA, 25 bp, Canis familiaris
gagtggcctggccactggtttttgc

SEQ ID NO: 123697 - DNA, 25 bp, Canis familiaris
gaggaggcaactttggttttggaga

SEQ ID NO: 123698 - DNA, 25 bp, Canis familiaris
gagtggtcaccgttgtttttgtaga

SEQ ID NO: 123699 - DNA, 25 bp, Canis familiaris
gagtgagtatttttgtattgctttg

SEQ ID NO: 123700 - DNA, 25 bp, Canis familiaris
gagtgcccatctatgttatgtgtct

SEQ ID NO: 123701 - DNA, 25 bp, Canis familiaris
gagggcctcataaatatcatggtct

SEQ ID NO: 123702 - DNA, 25 bp, Canis familiaris
gaggcgccatcatgggagtcgacat

SEQ ID NO: 123703 - DNA, 25 bp, Canis familiaris
gagggctgcatggtagtggtcgata

SEQ ID NO: 123704 - DNA, 25 bp, Canis familiaris
gagtgagctatgagtcggatgctta

SEQ ID NO: 123705 - DNA, 25 bp, Canis familiaris
gagtggcttgcagctgagtgttctg

SEQ ID NO: 123706 - DNA, 25 bp, Canis familiaris
gagggcgagacctactattgcaggg

SEQ ID NO: 123707 - DNA, 25 bp, Canis familiaris
gagtggtgaaagccactgttagggg

SEQ ID NO: 123708 - DNA, 25 bp, Canis familiaris
gagtgtgcgagtgtgcacggtgggt

SEQ ID NO: 123709 - DNA, 25 bp, Canis familiaris
gagtgtgttctcagcagcaggttgg

SEQ ID NO: 123710 - DNA, 25 bp, Canis familiaris
gagtgggatccatgcaagagcctgt

SEQ ID NO: 123711 - DNA, 25 bp, Canis familiaris
gagtgtggactgtccttgagcctgt

SEQ ID NO: 123712 - DNA, 25 bp, Canis familiaris
gagtgtgcgaaatttgtcagaagtg

SEQ ID NO: 123713 - DNA, 25 bp, Canis familiaris
gagtgtcgagaccgttgggagtcgg

SEQ ID NO: 123714 - DNA, 25 bp, Canis familiaris
gaggtctgaacatggtggggggcgt

SEQ ID NO: 123715 - DNA, 25 bp, Canis familiaris
gaggacagcaacgggctaatagggg

SEQ ID NO: 123716 - DNA, 25 bp, Canis familiaris
gggaacaactgggccaaggccacta

SEQ ID NO: 123717 - DNA, 25 bp, Canis familiaris
gagggaaatctgtcctaagcccatc

SEQ ID NO: 123718 - DNA, 25 bp, Canis familiaris
gagggccaaatgccaaacagctcca

SEQ ID NO: 123719 - DNA, 25 bp, Canis familiaris
gagtgggaatgcccacagaccacct

SEQ ID NO: 123720 - DNA, 25 bp, Canis familiaris
gagtgtggactcatacgactacaag

SEQ ID NO: 123721 - DNA, 25 bp, Canis familiaris
gagtgtaaacacttcccatgtcaga

SEQ ID NO: 123722 - DNA, 25 bp, Canis familiaris
gagtgtgacgaaggatccgagccgc

SEQ ID NO: 123723 - DNA, 25 bp, Canis familiaris
gagtgggacagaggtcacagcccct

SEQ ID NO: 123724 - DNA, 25 bp, Canis familiaris
gagtgaggacgaggctctgcaacga

SEQ ID NO: 123725 - DNA, 25 bp, Canis familiaris
gaggtgacagcggcacattcaacat

SEQ ID NO: 123726 - DNA, 25 bp, Canis familiaris
gagtgtaccagaggctcaaaatacc

SEQ ID NO: 123727 - DNA, 25 bp, Canis familiaris
gagtgttgccagtgtacacaattcg

SEQ ID NO: 123728 - DNA, 25 bp, Canis familiaris
gagtgttccagacctcttaagtggg

SEQ ID NO: 123729 - DNA, 25 bp, Canis familiaris
gaggttcgcagtcatcagggatagg

SEQ ID NO: 123730 - DNA, 25 bp, Canis familiaris
gaggtagcatatcttcaaggtcaga

SEQ ID NO: 123731 - DNA, 25 bp, Canis familiaris
gagggcacttctgtcacaggtgatg

SEQ ID NO: 123732 - DNA, 25 bp, Canis familiaris
gagggcctggtgatctgaggtgtgg

SEQ ID NO: 123733 - DNA, 25 bp, Canis familiaris
gagggctgagttgttgtgcttgttg

SEQ ID NO: 123734 - DNA, 25 bp, Canis familiaris
gagtggggtcttttgtcttttgatc

SEQ ID NO: 123735 - DNA, 25 bp, Canis familiaris
gagtgggtttcttcagtttgtgtgc

SEQ ID NO: 123736 - DNA, 25 bp, Canis familiaris
gagtgacacttcttaggttctggtc

SEQ ID NO: 123737 - DNA, 25 bp, Canis familiaris
gaggtacttcagagactcctggact

SEQ ID NO: 123738 - DNA, 25 bp, Canis familiaris
gagtgtacagtcaggattccttggc

SEQ ID NO: 123739 - DNA, 25 bp, Canis familiaris
gaggataagattctgcactcccacc

SEQ ID NO: 123740 - DNA, 25 bp, Canis familiaris
gagtgaagatagttttctctccaga

SEQ ID NO: 123741 - DNA, 25 bp, Canis familiaris
gagtgataatattgttcccctcgtc

SEQ ID NO: 123742 - DNA, 25 bp, Canis familiaris
gagtgttttatgttcaccaaggaca

SEQ ID NO: 123743 - DNA, 25 bp, Canis familiaris
gagggatttcatctcaacacaggct

SEQ ID NO: 123744 - DNA, 25 bp, Canis familiaris
gagtgacattctatttcatacacgc

SEQ ID NO: 123745 - DNA, 25 bp, Canis familiaris
gagtgaactctgatgtatataccta

SEQ ID NO: 123746 - DNA, 25 bp, Canis familiaris
gaggggtctgaaccatcaacctata

SEQ ID NO: 123747 - DNA, 25 bp, Canis familiaris
gaggttagcataacctcccctagac

SEQ ID NO: 123748 - DNA, 25 bp, Canis familiaris
gatgagtataaaccccaaccttaat

SEQ ID NO: 123749 - DNA, 25 bp, Canis familiaris
gagtgtatgtaaacttcaacccatt

SEQ ID NO: 123750 - DNA, 25 bp, Canis familiaris
gagtgtcaggttattatacctattt

SEQ ID NO: 123751 - DNA, 25 bp, Canis familiaris
gagtgttggtaactgtttggttttg

SEQ ID NO: 123752 - DNA, 25 bp, Canis familiaris
gagtgttaggatcctttctgaggtc

SEQ ID NO: 123753 - DNA, 25 bp, Canis familiaris
gagtgttggcgagcttttgtggaaa

SEQ ID NO: 123754 - DNA, 25 bp, Canis familiaris
gaggttatcaacccatttgtaaatc

SEQ ID NO: 123755 - DNA, 25 bp, Canis familiaris
gaggactccaaccacttaggaacct

SEQ ID NO: 123756 - DNA, 25 bp, Canis familiaris
gagtgacccaaaagttcgatgacca

SEQ ID NO: 123757 - DNA, 25 bp, Canis familiaris
gagtgatccaaaagtattctgacca

SEQ ID NO: 123758 - DNA, 25 bp, Canis familiaris
gagtgactacagcggtgcttgacac

SEQ ID NO: 123759 - DNA, 25 bp, Canis familiaris
gagtggaatctctgagtgttgtgca

SEQ ID NO: 123760 - DNA, 25 bp, Canis familiaris
gagtgtggactgttagatttgtgca

SEQ ID NO: 123761 - DNA, 25 bp, Canis familiaris
gaggtcggttgttgtctttcaatta

SEQ ID NO: 123762 - DNA, 25 bp, Canis familiaris
gaggtcggttgttgtctttcaatta

SEQ ID NO: 123763 - DNA, 25 bp, Canis familiaris
gaggtcggttgttgtctttcaatta

SEQ ID NO: 123764 - DNA, 25 bp, Canis familiaris
gaggtcggttgttgtctttcaatta

SEQ ID NO: 123765 - DNA, 25 bp, Canis familiaris
gaggtcggttgttgtctttcaatta

SEQ ID NO: 123766 - DNA, 25 bp, Canis familiaris
gaggtcggttgttgtctttcaatta

SEQ ID NO: 123767 - DNA, 25 bp, Canis familiaris
gaggtcggttgttgtctttcaatta

SEQ ID NO: 123768 - DNA, 25 bp, Canis familiaris
gaggtcggttgttgtctttcaatta

SEQ ID NO: 123769 - DNA, 25 bp, Canis familiaris
gaggtcggttgttgtctttcaatta

SEQ ID NO: 123770 - DNA, 25 bp, Canis familiaris
gaggtcggttgttgtctttcaatta

SEQ ID NO: 123771 - DNA, 25 bp, Canis familiaris
gaggtcggttgttgtctttcaatta

SEQ ID NO: 123772 - DNA, 25 bp, Canis familiaris
gaggtcggttgttgtctttcaatta

SEQ ID NO: 123773 - DNA, 25 bp, Canis familiaris
gaggtcggttgttgtctttcaatta

SEQ ID NO: 123774 - DNA, 25 bp, Canis familiaris
gaggcaacaattggacctttccttc

SEQ ID NO: 123775 - DNA, 25 bp, Canis familiaris
gagggaatttctcctttatctttct

SEQ ID NO: 123776 - DNA, 25 bp, Canis familiaris
gagtgtttttgccttgttactgttt

SEQ ID NO: 123777 - DNA, 25 bp, Canis familiaris
gagtgttcatttgtttatttgattg

SEQ ID NO: 123778 - DNA, 25 bp, Canis familiaris
gagtgtttttgtagtggtttgatga

SEQ ID NO: 123779 - DNA, 25 bp, Canis familiaris
gagtgtggtgttaagtagaattgta

SEQ ID NO: 123780 - DNA, 25 bp, Canis familiaris
gagtgtttattggaacagaagctta

SEQ ID NO: 123781 - DNA, 25 bp, Canis familiaris
gaggcttttgttgcacagaaggtcc

SEQ ID NO: 123782 - DNA, 25 bp, Canis familiaris
gagggacgagtttcacagcagaggt

SEQ ID NO: 123783 - DNA, 25 bp, Canis familiaris
gagggactggagagaggaagcgcaa

SEQ ID NO: 123784 - DNA, 25 bp, Canis familiaris
gagggacatctggcaaggagaagcc

SEQ ID NO: 123785 - DNA, 25 bp, Canis familiaris
gagggagtcgaggtggacactgccc

SEQ ID NO: 123786 - DNA, 25 bp, Canis familiaris
gagggtagctaggaggaccgaagca

SEQ ID NO: 123787 - DNA, 25 bp, Canis familiaris
gagggccagagaggaaaccgaaccg

SEQ ID NO: 123788 - DNA, 25 bp, Canis familiaris
gaggttcggagagagccgggaccgc

SEQ ID NO: 123789 - DNA, 25 bp, Canis familiaris
gaggctctagtgcaaaccaaggacc

SEQ ID NO: 123790 - DNA, 25 bp, Canis familiaris
gaggtctgaacagaatccaaactca

SEQ ID NO: 123791 - DNA, 25 bp, Canis familiaris
gaggggtgtcaggaaccaacctgcc

SEQ ID NO: 123792 - DNA, 25 bp, Canis familiaris
gagggttgtagtatacccctgtgct

SEQ ID NO: 123793 - DNA, 25 bp, Canis familiaris
gagtggatttcgggtacacccacca

SEQ ID NO: 123794 - DNA, 25 bp, Canis familiaris
gagtgtgccttcagaacaacctcac

SEQ ID NO: 123795 - DNA, 25 bp, Canis familiaris
gagtggcacttgagagagcagggtc

SEQ ID NO: 123796 - DNA, 25 bp, Canis familiaris
gagtggcagtgagccaggaggaggc

SEQ ID NO: 123797 - DNA, 25 bp, Canis familiaris
gagggcagtgcagaaggtggacggc

SEQ ID NO: 123798 - DNA, 25 bp, Canis familiaris
gagtgtgcagtggtgaagggggaag

SEQ ID NO: 123799 - DNA, 25 bp, Canis familiaris
gagtggcttgttgaaggggcagctg

SEQ ID NO: 123800 - DNA, 25 bp, Canis familiaris
gagtgggactggggatggggcatgt

SEQ ID NO: 123801 - DNA, 25 bp, Canis familiaris
gaggggcagaagggacaggagcatg

SEQ ID NO: 123802 - DNA, 25 bp, Canis familiaris
gagggacagcagccggtagcaaatg

SEQ ID NO: 123803 - DNA, 25 bp, Canis familiaris
gagggctagcagcagattgcgtaca

SEQ ID NO: 123804 - DNA, 25 bp, Canis familiaris
gaggtggagctggagcaggcaggaa

SEQ ID NO: 123805 - DNA, 25 bp, Canis familiaris
gagggctgtctggggccaagagaag

SEQ ID NO: 123806 - DNA, 25 bp, Canis familiaris
gagggctgatcggtgccgaggagaa

SEQ ID NO: 123807 - DNA, 25 bp, Canis familiaris
gagggcgacggtcgtgatcgagcat

SEQ ID NO: 123808 - DNA, 25 bp, Canis familiaris
gagggcgaccagatcaatgccagca

SEQ ID NO: 123809 - DNA, 25 bp, Canis familiaris
gaggggcgctgcatatcagggcgca

SEQ ID NO: 123810 - DNA, 25 bp, Canis familiaris
gagggcagagccctacatggggctt

SEQ ID NO: 123811 - DNA, 25 bp, Canis familiaris
gagggcagaggacaagagcaagctt

SEQ ID NO: 123812 - DNA, 25 bp, Canis familiaris
gagtgtgcggtagggcagtcatagt

SEQ ID NO: 123813 - DNA, 25 bp, Canis familiaris
gagtgtgatggttgcggggagagct

SEQ ID NO: 123814 - DNA, 25 bp, Canis familiaris
gagtggagcctacggctgggacatc

SEQ ID NO: 123815 - DNA, 25 bp, Canis familiaris
gagggagcgcaatggcggagaccgt

SEQ ID NO: 123816 - DNA, 25 bp, Canis familiaris
gagggacccaagtagcaggacacgt

SEQ ID NO: 123817 - DNA, 25 bp, Canis familiaris
gagggacccaaacatggaggctctg

SEQ ID NO: 123818 - DNA, 25 bp, Canis familiaris
gaggcaagccaatacacgtaggctt

SEQ ID NO: 123819 - DNA, 25 bp, Canis familiaris
gaggaaggaaaaggccaagatccat

SEQ ID NO: 123820 - DNA, 25 bp, Canis familiaris
gaggtggaaaccgtgacaaccctga

SEQ ID NO: 123821 - DNA, 25 bp, Canis familiaris
gagggaaaacctggatggggcctgg

SEQ ID NO: 123822 - DNA, 25 bp, Canis familiaris
gaggaactaacgtcgaaggccctct

SEQ ID NO: 123823 - DNA, 25 bp, Canis familiaris
gatggaactaacacggggctcacat

SEQ ID NO: 123824 - DNA, 25 bp, Canis familiaris
gaggtgttaaagtccgagtgctatt

SEQ ID NO: 123825 - DNA, 25 bp, Canis familiaris
gaggggtgacacaacccagtcatca

SEQ ID NO: 123826 - DNA, 25 bp, Canis familiaris
gagggtgtgaacccctcgatacact

SEQ ID NO: 123827 - DNA, 25 bp, Canis familiaris
gagggttacccagatgggacatctc

SEQ ID NO: 123828 - DNA, 25 bp, Canis familiaris
gaggggccaccaaggaagtgactcc

SEQ ID NO: 123829 - DNA, 25 bp, Canis familiaris
gaggggccaccaaggaagtgactcc

SEQ ID NO: 123830 - DNA, 25 bp, Canis familiaris
gaggggccaccaaggaagtgactcc

SEQ ID NO: 123831 - DNA, 25 bp, Canis familiaris
gaggggccaacgtgaactacaggac

SEQ ID NO: 123832 - DNA, 25 bp, Canis familiaris
gagggcccaaggtgtcctgaaaaca

SEQ ID NO: 123833 - DNA, 25 bp, Canis familiaris
gaggacccaaagagccttctagacc

SEQ ID NO: 123834 - DNA, 25 bp, Canis familiaris
gatgtagcccaatatggttactcta

SEQ ID NO: 123835 - DNA, 25 bp, Canis familiaris
gagtggctctaatggtatttcctat

SEQ ID NO: 123836 - DNA, 25 bp, Canis familiaris
gagtggcctcagtgttcttcatggc

SEQ ID NO: 123837 - DNA, 25 bp, Canis familiaris
gatgtggtagaccgtttctcaggcg

SEQ ID NO: 123838 - DNA, 25 bp, Canis familiaris
gagggtgagcacggttctaaggatg

SEQ ID NO: 123839 - DNA, 25 bp, Canis familiaris
gagggccacaaggtgtccaaggagc

SEQ ID NO: 123840 - DNA, 25 bp, Canis familiaris
gagtgtggacattgctgctttcaac

SEQ ID NO: 123841 - DNA, 25 bp, Canis familiaris
gagtgtgaacacttctctgtctatc

SEQ ID NO: 123842 - DNA, 25 bp, Canis familiaris
gagtggcatttgcatgcttctgctc

SEQ ID NO: 123843 - DNA, 25 bp, Canis familiaris
gagtggcttcagctttgcatcatga

SEQ ID NO: 123844 - DNA, 25 bp, Canis familiaris
gagtggtccacattgaacatgctga

SEQ ID NO: 123845 - DNA, 25 bp, Canis familiaris
gagggggcagcagtagacctgaaac

SEQ ID NO: 123846 - DNA, 25 bp, Canis familiaris
gagggtgcacacacatgacttgaaa

SEQ ID NO: 123847 - DNA, 25 bp, Canis familiaris
gagtggagacactcttttaaagtct

SEQ ID NO: 123848 - DNA, 25 bp, Canis familiaris
gaggggatgaatcttttgtcaagtt

SEQ ID NO: 123849 - DNA, 25 bp, Canis familiaris
gaggggctgattgttttggtggttt

SEQ ID NO: 123850 - DNA, 25 bp, Canis familiaris
gagggactgaatggatgttgggttt

SEQ ID NO: 123851 - DNA, 25 bp, Canis familiaris
gaggaagtttcatgttgggtttaga

SEQ ID NO: 123852 - DNA, 25 bp, Canis familiaris
gaggtaattttagatagtagttcaa

SEQ ID NO: 123853 - DNA, 25 bp, Canis familiaris
gggaaagtttatgcttttctgataa

SEQ ID NO: 123854 - DNA, 25 bp, Canis familiaris
gatgtaacgtggccattttctttta

SEQ ID NO: 123855 - DNA, 25 bp, Canis familiaris
gagtgtattctgtgcaatttttttc

SEQ ID NO: 123856 - DNA, 25 bp, Canis familiaris
gagtgtatttcaagcatttcttcta

SEQ ID NO: 123857 - DNA, 25 bp, Canis familiaris
gagtgtattcttgtttctgtgcaca

SEQ ID NO: 123858 - DNA, 25 bp, Canis familiaris
gagtggtctctggacatttctcgaa

SEQ ID NO: 123859 - DNA, 25 bp, Canis familiaris
gagtgtcgcaatggagcatgtgttc

SEQ ID NO: 123860 - DNA, 25 bp, Canis familiaris
gaggtccaaccagtggtatcaacca

SEQ ID NO: 123861 - DNA, 25 bp, Canis familiaris
gagggccagacggtactgttagcca

SEQ ID NO: 123862 - DNA, 25 bp, Canis familiaris
gagggcaccttcaaactggtagcta

SEQ ID NO: 123863 - DNA, 25 bp, Canis familiaris
gagggcacactgctagaaggtagta

SEQ ID NO: 123864 - DNA, 25 bp, Canis familiaris
gagtgtcaatctcttgtcggtagta

SEQ ID NO: 123865 - DNA, 25 bp, Canis familiaris
gagtgtacacctttgggtctgagta

SEQ ID NO: 123866 - DNA, 25 bp, Canis familiaris
gagtgtggcaggtgtgggtaggtga

SEQ ID NO: 123867 - DNA, 25 bp, Canis familiaris
gaggggtcttttgggtaggtgtgag

SEQ ID NO: 123868 - DNA, 25 bp, Canis familiaris
gaggggttctgaaaagtatggttga

SEQ ID NO: 123869 - DNA, 25 bp, Canis familiaris
gaggggatctcgcaaatgtaagggt

SEQ ID NO: 123870 - DNA, 25 bp, Canis familiaris
gaggggacccagcaggcggagggtc

SEQ ID NO: 123871 - DNA, 25 bp, Canis familiaris
gagtgggaatcccacagcacgtgca

SEQ ID NO: 123872 - DNA, 25 bp, Canis familiaris
gagtgtgtgagaacatccccattgt

SEQ ID NO: 123873 - DNA, 25 bp, Canis familiaris
gagggtagatgccttcaccataact

SEQ ID NO: 123874 - DNA, 25 bp, Canis familiaris
gagtggtctgtccttcaagagaaat

SEQ ID NO: 123875 - DNA, 25 bp, Canis familiaris
gagtgtgttgtcacttaggagaagt

SEQ ID NO: 123876 - DNA, 25 bp, Canis familiaris
gaggatgccgatatccgagggaagg

SEQ ID NO: 123877 - DNA, 25 bp, Canis familiaris
gagggccagagagccagagcagtaa

SEQ ID NO: 123878 - DNA, 25 bp, Canis familiaris
gaggggctgatatgtcaactgtaaa

SEQ ID NO: 123879 - DNA, 25 bp, Canis familiaris
gagtggccatgtatgtacacgcata

SEQ ID NO: 123880 - DNA, 25 bp, Canis familiaris
gagtgtccatctgttcctaacaaat

SEQ ID NO: 123881 - DNA, 25 bp, Canis familiaris
gagggctatgctctccctcacgcca

SEQ ID NO: 123882 - DNA, 25 bp, Canis familiaris
gagggtctgtaaactctgacccggg

SEQ ID NO: 123883 - DNA, 25 bp, Canis familiaris
gaggattttattgtcttcccagggt

SEQ ID NO: 123884 - DNA, 25 bp, Canis familiaris
gaggtaattgtatttattccgtgaa

SEQ ID NO: 123885 - DNA, 25 bp, Canis familiaris
gagtgtaactgatctctatcttggt

SEQ ID NO: 123886 - DNA, 25 bp, Canis familiaris
gagtgtcaatagaactgtttttttc

SEQ ID NO: 123887 - DNA, 25 bp, Canis familiaris
gagtgtggattgaacgtcttccttc

SEQ ID NO: 123888 - DNA, 25 bp, Canis familiaris
gagtgggtagatgtggcttgcctgt

SEQ ID NO: 123889 - DNA, 25 bp, Canis familiaris
gagtgggctaagaaggcgggcacat

SEQ ID NO: 123890 - DNA, 25 bp, Canis familiaris
gaggggctcagaaaggacaaaataa

SEQ ID NO: 123891 - DNA, 25 bp, Canis familiaris
gaggggcccatctagttcaaaagag

SEQ ID NO: 123892 - DNA, 25 bp, Canis familiaris
gagggcctgcctgagggaacagaag

SEQ ID NO: 123893 - DNA, 25 bp, Canis familiaris
gagggccttccgtgagaaagagtgg

SEQ ID NO: 123894 - DNA, 25 bp, Canis familiaris
gaggggttcacgagagagttttggt

SEQ ID NO: 123895 - DNA, 25 bp, Canis familiaris
gaggggattcaggggaagttcactt

SEQ ID NO: 123896 - DNA, 25 bp, Canis familiaris
gagtggctgcttgggggaagggcct

SEQ ID NO: 123897 - DNA, 25 bp, Canis familiaris
gaggggtctggggaagaggctctct

SEQ ID NO: 123898 - DNA, 25 bp, Canis familiaris
gagtggggctgcccaacaagtcatc

SEQ ID NO: 123899 - DNA, 25 bp, Canis familiaris
gagggctatcagcaaacactgttct

SEQ ID NO: 123900 - DNA, 25 bp, Canis familiaris
gagggctctgcacgataacatcagc

SEQ ID NO: 123901 - DNA, 25 bp, Canis familiaris
gagggaccaggattatccagcttga

SEQ ID NO: 123902 - DNA, 25 bp, Canis familiaris
gagggaccactgtagaaagagctga

SEQ ID NO: 123903 - DNA, 25 bp, Canis familiaris
gagtgggctatttagaaagagattt

SEQ ID NO: 123904 - DNA, 25 bp, Canis familiaris
gaggggctttaaatgacttgtttca

SEQ ID NO: 123905 - DNA, 25 bp, Canis familiaris
gagtgggcttttaaggtgtgcccta

SEQ ID NO: 123906 - DNA, 25 bp, Canis familiaris
gagtgggcttttaagtgtgcctaaa

SEQ ID NO: 123907 - DNA, 25 bp, Canis familiaris
gagtggcggtttaaacccatcgagc

SEQ ID NO: 123908 - DNA, 25 bp, Canis familiaris
gagtgggtgtgtactaagccctgca

SEQ ID NO: 123909 - DNA, 25 bp, Canis familiaris
gagtgtgtgtgtatctatcacctct

SEQ ID NO: 123910 - DNA, 25 bp, Canis familiaris
gagtggttttctgtccttatgtttc

SEQ ID NO: 123911 - DNA, 25 bp, Canis familiaris
gagtgtgttagtccctacatttttc

SEQ ID NO: 123912 - DNA, 25 bp, Canis familiaris
gaggtctttataccttatgcttttc

SEQ ID NO: 123913 - DNA, 25 bp, Canis familiaris
gaggacttctatatttaggctttct

SEQ ID NO: 123914 - DNA, 25 bp, Canis familiaris
gagggttccgattttgagtcttgtc

SEQ ID NO: 123915 - DNA, 25 bp, Canis familiaris
gagtggttttgattttgggtgatgc

SEQ ID NO: 123916 - DNA, 25 bp, Canis familiaris
gagtgggcattagatcttttgatac

SEQ ID NO: 123917 - DNA, 25 bp, Canis familiaris
gagtggtcaactgagttttgctcat

SEQ ID NO: 123918 - DNA, 25 bp, Canis familiaris
gagtggatacaaattgcttttctat

SEQ ID NO: 123919 - DNA, 25 bp, Canis familiaris
gagtggaaacattccatgtttgtat

SEQ ID NO: 123920 - DNA, 25 bp, Canis familiaris
gagggacaattaaatgattattttg

SEQ ID NO: 123921 - DNA, 25 bp, Canis familiaris
gagggactatcaagaaatttacttc

SEQ ID NO: 123922 - DNA, 25 bp, Canis familiaris
gagtggtactcaagaaatatttgtt

SEQ ID NO: 123923 - DNA, 25 bp, Canis familiaris
gagggcataatattatcactatttg

SEQ ID NO: 123924 - DNA, 25 bp, Canis familiaris
gagtggcttctttacaatcattgtg

SEQ ID NO: 123925 - DNA, 25 bp, Canis familiaris
gagtggttttatttgagcagctgat

SEQ ID NO: 123926 - DNA, 25 bp, Canis familiaris
gagtggtgctgtgtatctgagagtc

SEQ ID NO: 123927 - DNA, 25 bp, Canis familiaris
gagggcgctgtcatatggtagctcc

SEQ ID NO: 123928 - DNA, 25 bp, Canis familiaris
gagtggctctgtatagctgatcagt

SEQ ID NO: 123929 - DNA, 25 bp, Canis familiaris
gaggagctctgcatctagaatcatt

SEQ ID NO: 123930 - DNA, 25 bp, Canis familiaris
gagtggctcagaactccaatctcat

SEQ ID NO: 123931 - DNA, 25 bp, Canis familiaris
gagtgtgatgccatatcgagtccat

SEQ ID NO: 123932 - DNA, 25 bp, Canis familiaris
gagtgtgtgtattatctcgtcgata

SEQ ID NO: 123933 - DNA, 25 bp, Canis familiaris
gagtgtgtgtatttcatttatgagg

SEQ ID NO: 123934 - DNA, 25 bp, Canis familiaris
gagtggtgacattttgtggatagct

SEQ ID NO: 123935 - DNA, 25 bp, Canis familiaris
gagtggctgaattgtgtgatggcat

SEQ ID NO: 123936 - DNA, 25 bp, Canis familiaris
gagtgggcagcacgtttgtgctctc

SEQ ID NO: 123937 - DNA, 25 bp, Canis familiaris
gagtgggacatgttaaggcctattc

SEQ ID NO: 123938 - DNA, 25 bp, Canis familiaris
gagtggctcacataacaggcctctc

SEQ ID NO: 123939 - DNA, 25 bp, Canis familiaris
gagggcatccagaaggcatcccctc

SEQ ID NO: 123940 - DNA, 25 bp, Canis familiaris
gagggcatagctctggctgaccctc

SEQ ID NO: 123941 - DNA, 25 bp, Canis familiaris
gagggctatctgcgggagaactaca

SEQ ID NO: 123942 - DNA, 25 bp, Canis familiaris
gagggaacatgctggaggaactgta

SEQ ID NO: 123943 - DNA, 25 bp, Canis familiaris
gagggatacagccagtaccaacgta

SEQ ID NO: 123944 - DNA, 25 bp, Canis familiaris
gagggagtgcaggaaacaagaccta

SEQ ID NO: 123945 - DNA, 25 bp, Canis familiaris
gagggagctggtgaagccatgaacg

SEQ ID NO: 123946 - DNA, 25 bp, Canis familiaris
gagggtgctgggcaagcactggcct

SEQ ID NO: 123947 - DNA, 25 bp, Canis familiaris
gagggctcatgggggaggtggcttc

SEQ ID NO: 123948 - DNA, 25 bp, Canis familiaris
gagtggcttggtgtgagagtgcatc

SEQ ID NO: 123949 - DNA, 25 bp, Canis familiaris
gagggctctgtgtgtgagagaacgc

SEQ ID NO: 123950 - DNA, 25 bp, Canis familiaris
gagggctctgtttgtggaactgggt

SEQ ID NO: 123951 - DNA, 25 bp, Canis familiaris
gagggtccatttcggtagattgttg

SEQ ID NO: 123952 - DNA, 25 bp, Canis familiaris
gaggttggatcaataggtgcgtttg

SEQ ID NO: 123953 - DNA, 25 bp, Canis familiaris
gagggtggatctatgcttgagtatt

SEQ ID NO: 123954 - DNA, 25 bp, Canis familiaris
gagggggtagtcaactgagctttta

SEQ ID NO: 123955 - DNA, 25 bp, Canis familiaris
gagggtggtagtgcacggcatgtgg

SEQ ID NO: 123956 - DNA, 25 bp, Canis familiaris
gagggatggggagatggtgactggg

SEQ ID NO: 123957 - DNA, 25 bp, Canis familiaris
gaggtagagggtgtgtgtccgtggt

SEQ ID NO: 123958 - DNA, 25 bp, Canis familiaris
gaggtaagggtcatttctactgtga

SEQ ID NO: 123959 - DNA, 25 bp, Canis familiaris
gaggtccatggttttacctgacttt

SEQ ID NO: 123960 - DNA, 25 bp, Canis familiaris
gagggccgtgatttttccagtatta

SEQ ID NO: 123961 - DNA, 25 bp, Canis familiaris
gagggcacagtacaattcctgtttt

SEQ ID NO: 123962 - DNA, 25 bp, Canis familiaris
gagggcaagtacaagtcctgtgttt

SEQ ID NO: 123963 - DNA, 25 bp, Canis familiaris
gagggccagaatggaggccagtgga

SEQ ID NO: 123964 - DNA, 25 bp, Canis familiaris
gagggctcgactaaagccacttgca

SEQ ID NO: 123965 - DNA, 25 bp, Canis familiaris
gagggccaattcaaacatacccaca

SEQ ID NO: 123966 - DNA, 25 bp, Canis familiaris
gaggggcaaaagctcaagccactaa

SEQ ID NO: 123967 - DNA, 25 bp, Canis familiaris
gaggggagtaatgtgaaccgtgtga

SEQ ID NO: 123968 - DNA, 25 bp, Canis familiaris
gagggggtaaggacacctgtgggca

SEQ ID NO: 123969 - DNA, 25 bp, Canis familiaris
gaggggaaatccccaactgctggtc

SEQ ID NO: 123970 - DNA, 25 bp, Canis familiaris
gagggagaaacctcttccagcagac

SEQ ID NO: 123971 - DNA, 25 bp, Canis familiaris
gagggaaaacttctcctctcacaac

SEQ ID NO: 123972 - DNA, 25 bp, Canis familiaris
gaggtgagaaacttttccctctctg

SEQ ID NO: 123973 - DNA, 25 bp, Canis familiaris
gagggagagattcgttgtccgtcct

SEQ ID NO: 123974 - DNA, 25 bp, Canis familiaris
gagtggggttgtcatgaccttggct

SEQ ID NO: 123975 - DNA, 25 bp, Canis familiaris
gagtggtgtttgatgtcacctctgg

SEQ ID NO: 123976 - DNA, 25 bp, Canis familiaris
gagtggttgtgaagagctcctttgg

SEQ ID NO: 123977 - DNA, 25 bp, Canis familiaris
gagggcaaagctcagccctcttgtg

SEQ ID NO: 123978 - DNA, 25 bp, Canis familiaris
gagggcaaagcagaccactagtgga

SEQ ID NO: 123979 - DNA, 25 bp, Canis familiaris
gagggcaagcaagacctcagcaggc

SEQ ID NO: 123980 - DNA, 25 bp, Canis familiaris
gagggcaacattggcaactcgatgc

SEQ ID NO: 123981 - DNA, 25 bp, Canis familiaris
gagtggatcataatggtatttgtct

SEQ ID NO: 123982 - DNA, 25 bp, Canis familiaris
gagggattttgagtcagttgcactt

SEQ ID NO: 123983 - DNA, 25 bp, Canis familiaris
gagggtataatgccaagttgaagta

SEQ ID NO: 123984 - DNA, 25 bp, Canis familiaris
gaggatttaaaattgtcagtagtaa

SEQ ID NO: 123985 - DNA, 25 bp, Canis familiaris
gaggaatcaggaccttgctcctaat

SEQ ID NO: 123986 - DNA, 25 bp, Canis familiaris
gaggtgtcaggaccttgcttatatg

SEQ ID NO: 123987 - DNA, 25 bp, Canis familiaris
gagggatgggcctttcttgaatggc

SEQ ID NO: 123988 - DNA, 25 bp, Canis familiaris
gagggaggagggactgcttaaggcg

SEQ ID NO: 123989 - DNA, 25 bp, Canis familiaris
gagggggaggcattttatatagagg

SEQ ID NO: 123990 - DNA, 25 bp, Canis familiaris
gagggggtgcacagttatgtcagaa

SEQ ID NO: 123991 - DNA, 25 bp, Canis familiaris
gagggcgggcatgggttagtgcgct

SEQ ID NO: 123992 - DNA, 25 bp, Canis familiaris
gagggcaggaggggctacaggcccg

SEQ ID NO: 123993 - DNA, 25 bp, Canis familiaris
gagtggcagcagcgggaacaggctc

SEQ ID NO: 123994 - DNA, 25 bp, Canis familiaris
gagggcagagccaaggagccgagcc

SEQ ID NO: 123995 - DNA, 25 bp, Canis familiaris
gagggagagctcaagtcagcacgct

SEQ ID NO: 123996 - DNA, 25 bp, Canis familiaris
gagggacaataagcagcacgccggt

SEQ ID NO: 123997 - DNA, 25 bp, Canis familiaris
gagggacacataggaccagggtgga

SEQ ID NO: 123998 - DNA, 25 bp, Canis familiaris
gagggaactgatgcaccgaggatga

SEQ ID NO: 123999 - DNA, 25 bp, Canis familiaris
gagggaaggggcaggagtggaaatt

SEQ ID NO: 124000 - DNA, 25 bp, Canis familiaris
gaggggatgggacttaagagaaaat

SEQ ID NO: 124001 - DNA, 25 bp, Canis familiaris
gagggtagggggagcaagaagagtg

SEQ ID NO: 124002 - DNA, 25 bp, Canis familiaris
gagggtagggggagccagaagattg

SEQ ID NO: 124003 - DNA, 25 bp, Canis familiaris
gagggtcaggagagttggagggtgg

SEQ ID NO: 124004 - DNA, 25 bp, Canis familiaris
gagggtgaaggggttggtgggtgag

SEQ ID NO: 124005 - DNA, 25 bp, Canis familiaris
gagggtgtgggaactgtggggtaga

SEQ ID NO: 124006 - DNA, 25 bp, Canis familiaris
gagggatgttcttcttgtagggggc

SEQ ID NO: 124007 - DNA, 25 bp, Canis familiaris
gagggatttcattttctcctgtgga

SEQ ID NO: 124008 - DNA, 25 bp, Canis familiaris
gagggaaatgtgttgttacttgtac

SEQ ID NO: 124009 - DNA, 25 bp, Canis familiaris
gaggtaactgggttctacaaggacg

SEQ ID NO: 124010 - DNA, 25 bp, Canis familiaris
gaggtaacgactgatatctaaaaaa

SEQ ID NO: 124011 - DNA, 25 bp, Canis familiaris
gagggacacaactgaatcttcgaca

SEQ ID NO: 124012 - DNA, 25 bp, Canis familiaris
gagggaagcctcttgagattccaga

SEQ ID NO: 124013 - DNA, 25 bp, Canis familiaris
gagggcaaagtctggtgccatgcaa

SEQ ID NO: 124014 - DNA, 25 bp, Canis familiaris
gagggcaacagcagggtcacatata

SEQ ID NO: 124015 - DNA, 25 bp, Canis familiaris
gagggctagacatgagctaaaatca

SEQ ID NO: 124016 - DNA, 25 bp, Canis familiaris
gagggaagaccatgtaaagacacag

SEQ ID NO: 124017 - DNA, 25 bp, Canis familiaris
gaggtaattctccttgacaagtacg

SEQ ID NO: 124018 - DNA, 25 bp, Canis familiaris
gagtggactgtctgtatgccaagtg

SEQ ID NO: 124019 - DNA, 25 bp, Canis familiaris
gatgttgacagatacctccaagcta

SEQ ID NO: 124020 - DNA, 25 bp, Canis familiaris
gagggcaagccaagtatgtcctgtc

SEQ ID NO: 124021 - DNA, 25 bp, Canis familiaris
gagggggctaaggattgtttcctgg

SEQ ID NO: 124022 - DNA, 25 bp, Canis familiaris
gagggggtgagtcttttttctgatt

SEQ ID NO: 124023 - DNA, 25 bp, Canis familiaris
gagggatagtggtgtttttcacaga

SEQ ID NO: 124024 - DNA, 25 bp, Canis familiaris
gagggtgactggaaggtacccaaga

SEQ ID NO: 124025 - DNA, 25 bp, Canis familiaris
gagggctgatctggggatgtcaccc

SEQ ID NO: 124026 - DNA, 25 bp, Canis familiaris
gagggtggtggcaagattctcacag

SEQ ID NO: 124027 - DNA, 25 bp, Canis familiaris
gagggtgggatgaggtctctgcagc

SEQ ID NO: 124028 - DNA, 25 bp, Canis familiaris
gagggctgggattggccctgaggcc

SEQ ID NO: 124029 - DNA, 25 bp, Canis familiaris
gagggcttgttaggaattgcagagg

SEQ ID NO: 124030 - DNA, 25 bp, Canis familiaris
gaggtgctcaggttggaataaagtg

SEQ ID NO: 124031 - DNA, 25 bp, Canis familiaris
gagggctagatgtggaagatgtgaa

SEQ ID NO: 124032 - DNA, 25 bp, Canis familiaris
gagggccagagtcccaagtgtgccc

SEQ ID NO: 124033 - DNA, 25 bp, Canis familiaris
gagggccagcagaacgagcagtgac

SEQ ID NO: 124034 - DNA, 25 bp, Canis familiaris
gagggcctgaaatggcagtccttta

SEQ ID NO: 124035 - DNA, 25 bp, Canis familiaris
gaggaccgggtgtggacttttatgg

SEQ ID NO: 124036 - DNA, 25 bp, Canis familiaris
gagggcccgagtcacggaatttgtg

SEQ ID NO: 124037 - DNA, 25 bp, Canis familiaris
gagggcccgagcagggaaatttggg

SEQ ID NO: 124038 - DNA, 25 bp, Canis familiaris
gagggcccgagcaggaatttggtgt

SEQ ID NO: 124039 - DNA, 25 bp, Canis familiaris
gagggcccgagcaggaatttggtgt

SEQ ID NO: 124040 - DNA, 25 bp, Canis familiaris
gagggcccgagcaggaatttggtgt

SEQ ID NO: 124041 - DNA, 25 bp, Canis familiaris
gagggcccgagcaggaatttggtgt

SEQ ID NO: 124042 - DNA, 25 bp, Canis familiaris
gagggcccgagcaggaatttggtgt

SEQ ID NO: 124043 - DNA, 25 bp, Canis familiaris
gagggcccgagctgtagactcggtg

SEQ ID NO: 124044 - DNA, 25 bp, Canis familiaris
gagggccgtgagggtagcacgccct

SEQ ID NO: 124045 - DNA, 25 bp, Canis familiaris
gagggccttgaggaccatatctgcc

SEQ ID NO: 124046 - DNA, 25 bp, Canis familiaris
gagggcggggaaccatattgcccct

SEQ ID NO: 124047 - DNA, 25 bp, Canis familiaris
gagggacaggggatcttctgcccca

SEQ ID NO: 124048 - DNA, 25 bp, Canis familiaris
gaggaaaggggtcatcctggtcttc

SEQ ID NO: 124049 - DNA, 25 bp, Canis familiaris
gaggacaccgtggtttccaggattt

SEQ ID NO: 124050 - DNA, 25 bp, Canis familiaris
gagggaatcactgttttcagggtgt

SEQ ID NO: 124051 - DNA, 25 bp, Canis familiaris
gagggcagtacttgttttagcttgg

SEQ ID NO: 124052 - DNA, 25 bp, Canis familiaris
gaggggattcatttctttgagtagc

SEQ ID NO: 124053 - DNA, 25 bp, Canis familiaris
gagggatttcatttttaattcatct

SEQ ID NO: 124054 - DNA, 25 bp, Canis familiaris
gagggattatatcttatctatattt

SEQ ID NO: 124055 - DNA, 25 bp, Canis familiaris
gagggatctattcaataatttatgt

SEQ ID NO: 124056 - DNA, 25 bp, Canis familiaris
gagggcactatccgaaaggttcatg

SEQ ID NO: 124057 - DNA, 25 bp, Canis familiaris
gagggcagcttcctcagaaggctgt

SEQ ID NO: 124058 - DNA, 25 bp, Canis familiaris
gagggcaggcatttcggagcctgtg

SEQ ID NO: 124059 - DNA, 25 bp, Canis familiaris
gaggccgaaatgaggaccagtggaa

SEQ ID NO: 124060 - DNA, 25 bp, Canis familiaris
gaggaagaagtgagcccaatgtggg

SEQ ID NO: 124061 - DNA, 25 bp, Canis familiaris
gaggtcaaaatatgctgctacttgg

SEQ ID NO: 124062 - DNA, 25 bp, Canis familiaris
gaggctctgggagcgctgttttagc

SEQ ID NO: 124063 - DNA, 25 bp, Canis familiaris
gagggtcagggggcattttcttgct

SEQ ID NO: 124064 - DNA, 25 bp, Canis familiaris
gagggtcgtgaagcatgattctgtt

SEQ ID NO: 124065 - DNA, 25 bp, Canis familiaris
gagggtctgttcgaggattctcttc

SEQ ID NO: 124066 - DNA, 25 bp, Canis familiaris
gaggaatttgtcgccatattttcgt

SEQ ID NO: 124067 - DNA, 25 bp, Canis familiaris
gaggattttgtcattgctactgggg

SEQ ID NO: 124068 - DNA, 25 bp, Canis familiaris
gaggtttctgcgctttgagaggggt

SEQ ID NO: 124069 - DNA, 25 bp, Canis familiaris
gaggttataggtttggaagagggat

SEQ ID NO: 124070 - DNA, 25 bp, Canis familiaris
gaggtttagcttttggaggcgcggt

SEQ ID NO: 124071 - DNA, 25 bp, Canis familiaris
gaggtctttgaactgtgggtgggga

SEQ ID NO: 124072 - DNA, 25 bp, Canis familiaris
gaggttttgaagcagctggctgaga

SEQ ID NO: 124073 - DNA, 25 bp, Canis familiaris
gaggttcttgaacacggtcgtatcc

SEQ ID NO: 124074 - DNA, 25 bp, Canis familiaris
gaggatactgtacaacgagttgtcc

SEQ ID NO: 124075 - DNA, 25 bp, Canis familiaris
gaggtaattatgaaatcggctctta

SEQ ID NO: 124076 - DNA, 25 bp, Canis familiaris
gagggttttgcaactggactcttga

SEQ ID NO: 124077 - DNA, 25 bp, Canis familiaris
gagggtagtgtctctggagccattt

SEQ ID NO: 124078 - DNA, 25 bp, Canis familiaris
gagggaagttcacttgtgatctcaa

SEQ ID NO: 124079 - DNA, 25 bp, Canis familiaris
gagggaagtgaccgctgtacataca

SEQ ID NO: 124080 - DNA, 25 bp, Canis familiaris
gagggaatgaactcttcatcaagat

SEQ ID NO: 124081 - DNA, 25 bp, Canis familiaris
gagggtaatgacactcccacaatct

SEQ ID NO: 124082 - DNA, 25 bp, Canis familiaris
gagggctaattaatcctgccaccct

SEQ ID NO: 124083 - DNA, 25 bp, Canis familiaris
gaggttgttttacatcgacacgctc

SEQ ID NO: 124084 - DNA, 25 bp, Canis familiaris
gaggatttttgtatcaaggcaagct

SEQ ID NO: 124085 - DNA, 25 bp, Canis familiaris
gaggttttaaataccaggccacgag

SEQ ID NO: 124086 - DNA, 25 bp, Canis familiaris
gaggttttaaatcctggtgtctcta

SEQ ID NO: 124087 - DNA, 25 bp, Canis familiaris
gaggtggtgacgaaccatgcgggct

SEQ ID NO: 124088 - DNA, 25 bp, Canis familiaris
gaggatggtgacgtagctgggtccc

SEQ ID NO: 124089 - DNA, 25 bp, Canis familiaris
gagggagaagctggagcgctacccc

SEQ ID NO: 124090 - DNA, 25 bp, Canis familiaris
gaggtggaagtggtgcccttccagc

SEQ ID NO: 124091 - DNA, 25 bp, Canis familiaris
gaggttggcaggatgctactacccc

SEQ ID NO: 124092 - DNA, 25 bp, Canis familiaris
gagggcaggaggagggagcccctcc

SEQ ID NO: 124093 - DNA, 25 bp, Canis familiaris
gagggtgaaagcggtgtgagccccc

SEQ ID NO: 124094 - DNA, 25 bp, Canis familiaris
gagggaaagcacgtcattggcctac

SEQ ID NO: 124095 - DNA, 25 bp, Canis familiaris
gagggaacatgggctgctgtgccac

SEQ ID NO: 124096 - DNA, 25 bp, Canis familiaris
gaggtgacacattgcctgcagatga

SEQ ID NO: 124097 - DNA, 25 bp, Canis familiaris
gaggggcatgcatgcctgaacgcac

SEQ ID NO: 124098 - DNA, 25 bp, Canis familiaris
gagggaatgcaggctctgattggta

SEQ ID NO: 124099 - DNA, 25 bp, Canis familiaris
gagggagataaaagcatctcgtttt

SEQ ID NO: 124100 - DNA, 25 bp, Canis familiaris
gagggaagaacaggattgctctgcc

SEQ ID NO: 124101 - DNA, 25 bp, Canis familiaris
gagggcttgaacgagatgcagacta

SEQ ID NO: 124102 - DNA, 25 bp, Canis familiaris
gggccaatgaattgccatgggctag

SEQ ID NO: 124103 - DNA, 25 bp, Canis familiaris
gagggacagaccacatggagctcag

SEQ ID NO: 124104 - DNA, 25 bp, Canis familiaris
gagggcacgactagatattgacaca

SEQ ID NO: 124105 - DNA, 25 bp, Canis familiaris
gagggacagagcagatacagaacac

SEQ ID NO: 124106 - DNA, 25 bp, Canis familiaris
gagggggacatccatgtagtcactc

SEQ ID NO: 124107 - DNA, 25 bp, Canis familiaris
gaggttggagaacttcttcctaagg

SEQ ID NO: 124108 - DNA, 25 bp, Canis familiaris
gaggttaagcccaatatcccaaagg

SEQ ID NO: 124109 - DNA, 25 bp, Canis familiaris
gaggttaaggcactaatccctctca

SEQ ID NO: 124110 - DNA, 25 bp, Canis familiaris
gaggtcaagggcaaagttcccctag

SEQ ID NO: 124111 - DNA, 25 bp, Canis familiaris
gagggaagggctttgactggccgct

SEQ ID NO: 124112 - DNA, 25 bp, Canis familiaris
gaggtgtacggccggactgagggcc

SEQ ID NO: 124113 - DNA, 25 bp, Canis familiaris
gagggtccagactggacggaagcca

SEQ ID NO: 124114 - DNA, 25 bp, Canis familiaris
gagggagcacaaggggacaggacag

SEQ ID NO: 124115 - DNA, 25 bp, Canis familiaris
gagggagaaagcatgagccacggtg

SEQ ID NO: 124116 - DNA, 25 bp, Canis familiaris
gagggaggaggtcgtgatggcggct

SEQ ID NO: 124117 - DNA, 25 bp, Canis familiaris
gagggaagagccctcttgtgccagt

SEQ ID NO: 124118 - DNA, 25 bp, Canis familiaris
gagggaaagagaccctgcagctcac

SEQ ID NO: 124119 - DNA, 25 bp, Canis familiaris
gagggaaggtcggcctgcaggccgt

SEQ ID NO: 124120 - DNA, 25 bp, Canis familiaris
gagggaagtgcccctcaggggctct

SEQ ID NO: 124121 - DNA, 25 bp, Canis familiaris
gagggtggagccactgagggaggct

SEQ ID NO: 124122 - DNA, 25 bp, Canis familiaris
gagggatgcagttaccaagggaggc

SEQ ID NO: 124123 - DNA, 25 bp, Canis familiaris
gaggggagcaataccacggaggagg

SEQ ID NO: 124124 - DNA, 25 bp, Canis familiaris
gagggagagagcaccagcaggagga

SEQ ID NO: 124125 - DNA, 25 bp, Canis familiaris
gagggcgaggttggacagtggtaga

SEQ ID NO: 124126 - DNA, 25 bp, Canis familiaris
gaggacgatgccatcgacctgtttg

SEQ ID NO: 124127 - DNA, 25 bp, Canis familiaris
gagggcagtgacattgcctgttttg

SEQ ID NO: 124128 - DNA, 25 bp, Canis familiaris
gagggagctacaagtgcctttctct

SEQ ID NO: 124129 - DNA, 25 bp, Canis familiaris
gagggacgcaagcgtctctatcact

SEQ ID NO: 124130 - DNA, 25 bp, Canis familiaris
gaggtgacccagagatctctagctt

SEQ ID NO: 124131 - DNA, 25 bp, Canis familiaris
gaggttcatccgaggtgcaattatt

SEQ ID NO: 124132 - DNA, 25 bp, Canis familiaris
gaggtcgttcgatcggatagttctt

SEQ ID NO: 124133 - DNA, 25 bp, Canis familiaris
gaggttgcaaaccactggaagtttt

SEQ ID NO: 124134 - DNA, 25 bp, Canis familiaris
gaggatttagaggacatcaaagttt

SEQ ID NO: 124135 - DNA, 25 bp, Canis familiaris
gagggcttggaccattcagcagagt

SEQ ID NO: 124136 - DNA, 25 bp, Canis familiaris
gagggttaatccctccatggatccc

SEQ ID NO: 124137 - DNA, 25 bp, Canis familiaris
gaggcttagttacgtgcctggtcca

SEQ ID NO: 124138 - DNA, 25 bp, Canis familiaris
gaggttggctttagctccaagtctc

SEQ ID NO: 124139 - DNA, 25 bp, Canis familiaris
gaggctttgtgaccagtactaatct

SEQ ID NO: 124140 - DNA, 25 bp, Canis familiaris
gaggattggacccagtactatactt

SEQ ID NO: 124141 - DNA, 25 bp, Canis familiaris
gaggtatgtgggaaaactctacttt

SEQ ID NO: 124142 - DNA, 25 bp, Canis familiaris
gaggctggtgtgtgaaacctccttc

SEQ ID NO: 124143 - DNA, 25 bp, Canis familiaris
gaggtggctggacgcagagtcctct

SEQ ID NO: 124144 - DNA, 25 bp, Canis familiaris
gaggtggtgaaggcgctgaagcagc

SEQ ID NO: 124145 - DNA, 25 bp, Canis familiaris
gaggtgtgtgacacacagacagaca

SEQ ID NO: 124146 - DNA, 25 bp, Canis familiaris
gagggaggacagcccagatcaagct

SEQ ID NO: 124147 - DNA, 25 bp, Canis familiaris
gaggtcaaatagcatcagtttccat

SEQ ID NO: 124148 - DNA, 25 bp, Canis familiaris
gagggcaacaaggacagcttccaag

SEQ ID NO: 124149 - DNA, 25 bp, Canis familiaris
gagggcacaaaggaagcttgcctgc

SEQ ID NO: 124150 - DNA, 25 bp, Canis familiaris
gaggggaaaagaagcatgtcctggc

SEQ ID NO: 124151 - DNA, 25 bp, Canis familiaris
gaggctggggaacatgtgtccttct

SEQ ID NO: 124152 - DNA, 25 bp, Canis familiaris
gagggggggcaaaggacacttgatg

SEQ ID NO: 124153 - DNA, 25 bp, Canis familiaris
gagggggaggcgtgaggggtgatgc

SEQ ID NO: 124154 - DNA, 25 bp, Canis familiaris
gagggtggggcttgcagaggggaaa

SEQ ID NO: 124155 - DNA, 25 bp, Canis familiaris
gagggtgggccatgcagggagtggc

SEQ ID NO: 124156 - DNA, 25 bp, Canis familiaris
gagggaagacaatggagggtgctgg

SEQ ID NO: 124157 - DNA, 25 bp, Canis familiaris
gagggagagaagtagcaggagggcg

SEQ ID NO: 124158 - DNA, 25 bp, Canis familiaris
gagggaatccagcgggagggtgatt

SEQ ID NO: 124159 - DNA, 25 bp, Canis familiaris
gagggaaccagcttgggaaggacct

SEQ ID NO: 124160 - DNA, 25 bp, Canis familiaris
gaggaaaccttacctataagactct

SEQ ID NO: 124161 - DNA, 25 bp, Canis familiaris
gaggtagaatcacttttttagactt

SEQ ID NO: 124162 - DNA, 25 bp, Canis familiaris
gaggtataagctatttgttagacat

SEQ ID NO: 124163 - DNA, 25 bp, Canis familiaris
ggggtaagaactcatcttggccttc

SEQ ID NO: 124164 - DNA, 25 bp, Canis familiaris
gagggtaaaatcctgtcctaggcct

SEQ ID NO: 124165 - DNA, 25 bp, Canis familiaris
gagggtatcaactttgtgcgtgagg

SEQ ID NO: 124166 - DNA, 25 bp, Canis familiaris
gaggttggccaggttgagcttaggg

SEQ ID NO: 124167 - DNA, 25 bp, Canis familiaris
gagggtcccgagttgacacaatggg

SEQ ID NO: 124168 - DNA, 25 bp, Canis familiaris
gaggtcatcgccgagattaccagtg

SEQ ID NO: 124169 - DNA, 25 bp, Canis familiaris
gggttccccagaattctgacttaga

SEQ ID NO: 124170 - DNA, 25 bp, Canis familiaris
gagggtccaccaaaatatacaaaat

SEQ ID NO: 124171 - DNA, 25 bp, Canis familiaris
gagggtgctcaaccaaagtccagag

SEQ ID NO: 124172 - DNA, 25 bp, Canis familiaris
gagggatcctaaaaatgtcctgata

SEQ ID NO: 124173 - DNA, 25 bp, Canis familiaris
gaggatacctataagcagaaccaat

SEQ ID NO: 124174 - DNA, 25 bp, Canis familiaris
gaggaggcttacagcaactactgca

SEQ ID NO: 124175 - DNA, 25 bp, Canis familiaris
gaggggccattgagcaactacagct

SEQ ID NO: 124176 - DNA, 25 bp, Canis familiaris
gaggttgcccttgaactactttaat

SEQ ID NO: 124177 - DNA, 25 bp, Canis familiaris
gaggttcaccctgtgactacgagaa

SEQ ID NO: 124178 - DNA, 25 bp, Canis familiaris
gaggatccatcccataaaaaagaaa

SEQ ID NO: 124179 - DNA, 25 bp, Canis familiaris
gaggtccacctgatgctaaagaaat

SEQ ID NO: 124180 - DNA, 25 bp, Canis familiaris
gagggtacagcgaagccacaggaaa

SEQ ID NO: 124181 - DNA, 25 bp, Canis familiaris
gagggtatcctgagctcagatccaa

SEQ ID NO: 124182 - DNA, 25 bp, Canis familiaris
gaggtttcctcagatcagaaccgga

SEQ ID NO: 124183 - DNA, 25 bp, Canis familiaris
gaggatgttttcgtgaagattcccc

SEQ ID NO: 124184 - DNA, 25 bp, Canis familiaris
gaggggatctatctgtttctctccc

SEQ ID NO: 124185 - DNA, 25 bp, Canis familiaris
gaggtagtcattatttgtcccagcc

SEQ ID NO: 124186 - DNA, 25 bp, Canis familiaris
gaggtagttttttattagtagtcag

SEQ ID NO: 124187 - DNA, 25 bp, Canis familiaris
gaggatttttttcctgaaattatca

SEQ ID NO: 124188 - DNA, 25 bp, Canis familiaris
gaggttgactttcgggataactcag

SEQ ID NO: 124189 - DNA, 25 bp, Canis familiaris
gagggtacttgatggaatgagcact

SEQ ID NO: 124190 - DNA, 25 bp, Canis familiaris
gagggttctttcttgaagccctttg

SEQ ID NO: 124191 - DNA, 25 bp, Canis familiaris
gagggtttttgtaagcgtctctctt

SEQ ID NO: 124192 - DNA, 25 bp, Canis familiaris
gagggagttctttggtttgctcctt

SEQ ID NO: 124193 - DNA, 25 bp, Canis familiaris
gagggagaatctattccttgcctgt

SEQ ID NO: 124194 - DNA, 25 bp, Canis familiaris
gaggggagagtcatgaccatcccgt

SEQ ID NO: 124195 - DNA, 25 bp, Canis familiaris
gaggggcgagctatggtcagactct

SEQ ID NO: 124196 - DNA, 25 bp, Canis familiaris
gagggagcttcacttggacaacaat

SEQ ID NO: 124197 - DNA, 25 bp, Canis familiaris
gaggggttcagaagggagctcaatt

SEQ ID NO: 124198 - DNA, 25 bp, Canis familiaris
gaggggttcagtgggcagcactatc

SEQ ID NO: 124199 - DNA, 25 bp, Canis familiaris
gagggaattcacggagagccagctg

SEQ ID NO: 124200 - DNA, 25 bp, Canis familiaris
gagggaaattagcaggctccatgca

SEQ ID NO: 124201 - DNA, 25 bp, Canis familiaris
gagggaacttcgagtgtccagcagc

SEQ ID NO: 124202 - DNA, 25 bp, Canis familiaris
gaggggactctaggtgtgtccggtc

SEQ ID NO: 124203 - DNA, 25 bp, Canis familiaris
gagggaaatctccagcatttccggt

SEQ ID NO: 124204 - DNA, 25 bp, Canis familiaris
gagggagcaactgagtggtgccggc

SEQ ID NO: 124205 - DNA, 25 bp, Canis familiaris
gagggtgcaattgagatgggccaga

SEQ ID NO: 124206 - DNA, 25 bp, Canis familiaris
gagggtctttattttgagccatgaa

SEQ ID NO: 124207 - DNA, 25 bp, Canis familiaris
gaggtgtcattttaatttctgctaa

SEQ ID NO: 124208 - DNA, 25 bp, Canis familiaris
gaggtaagtctgtgtcatttgctaa

SEQ ID NO: 124209 - DNA, 25 bp, Canis familiaris
gaggtcctgtctgttcagtgttaag

SEQ ID NO: 124210 - DNA, 25 bp, Canis familiaris
gaggttagtactttcagtttctatt

SEQ ID NO: 124211 - DNA, 25 bp, Canis familiaris
gatcggtcagtcttaacagtttgcc

SEQ ID NO: 124212 - DNA, 25 bp, Canis familiaris
gaggtggcccaaagagcagttctcc

SEQ ID NO: 124213 - DNA, 25 bp, Canis familiaris
gaggtggggcaaagcacaggatcct

SEQ ID NO: 124214 - DNA, 25 bp, Canis familiaris
gagggggctagaacaaggtctttct

SEQ ID NO: 124215 - DNA, 25 bp, Canis familiaris
gagggaggatagtccaaccctctta

SEQ ID NO: 124216 - DNA, 25 bp, Canis familiaris
gagggaggataaccctagtgccctg

SEQ ID NO: 124217 - DNA, 25 bp, Canis familiaris
gagggagggaacccaagtgcttctc

SEQ ID NO: 124218 - DNA, 25 bp, Canis familiaris
gagggattggaggcccagtgtctac

SEQ ID NO: 124219 - DNA, 25 bp, Canis familiaris
gagggtcaggagtgtcaggatctac

SEQ ID NO: 124220 - DNA, 25 bp, Canis familiaris
gaggggccgcatgtgtaggtgaact

SEQ ID NO: 124221 - DNA, 25 bp, Canis familiaris
gagggagctcgacttgaatgggatg

SEQ ID NO: 124222 - DNA, 25 bp, Canis familiaris
gaggggctcgttttgatgatggtgc

SEQ ID NO: 124223 - DNA, 25 bp, Canis familiaris
gagggtttgtctttgcactggagaa

SEQ ID NO: 124224 - DNA, 25 bp, Canis familiaris
gagggtttctattttctcgactcat

SEQ ID NO: 124225 - DNA, 25 bp, Canis familiaris
gaggttttggtgtattctcaacttg

SEQ ID NO: 124226 - DNA, 25 bp, Canis familiaris
gagggttcggaatttcatgaacata

SEQ ID NO: 124227 - DNA, 25 bp, Canis familiaris
gaggtgatccggccaattcgggaat

SEQ ID NO: 124228 - DNA, 25 bp, Canis familiaris
gaggatacacggcgatgcctttcaa

SEQ ID NO: 124229 - DNA, 25 bp, Canis familiaris
gaggcaaataccaagtcgtttccta

SEQ ID NO: 124230 - DNA, 25 bp, Canis familiaris
gagggaaaccaacctggattcactc

SEQ ID NO: 124231 - DNA, 25 bp, Canis familiaris
gagggaaaccaacctggattcactc

SEQ ID NO: 124232 - DNA, 25 bp, Canis familiaris
gagggacaacatacaccgcgaaact

SEQ ID NO: 124233 - DNA, 25 bp, Canis familiaris
gaggtgacataattcaccccataac

SEQ ID NO: 124234 - DNA, 25 bp, Canis familiaris
gatggataatacctcctacctaagg

SEQ ID NO: 124235 - DNA, 25 bp, Canis familiaris
gaggatgaagacgacctagcctacg

SEQ ID NO: 124236 - DNA, 25 bp, Canis familiaris
gaggtcagcaaggaccagagcccca

SEQ ID NO: 124237 - DNA, 25 bp, Canis familiaris
gaggtccgggagacagagagcccca

SEQ ID NO: 124238 - DNA, 25 bp, Canis familiaris
gaggaccagtggaaaaggccaagaa

SEQ ID NO: 124239 - DNA, 25 bp, Canis familiaris
gatggaaagtgtccaaatccccatg

SEQ ID NO: 124240 - DNA, 25 bp, Canis familiaris
gaggagatcatctccaagaccccag

SEQ ID NO: 124241 - DNA, 25 bp, Canis familiaris
gagggatacctggcattgacctctc

SEQ ID NO: 124242 - DNA, 25 bp, Canis familiaris
gaggtgtacctggaggcaacatttt

SEQ ID NO: 124243 - DNA, 25 bp, Canis familiaris
gagggtatcatgccaagtgaaataa

SEQ ID NO: 124244 - DNA, 25 bp, Canis familiaris
gagggattcacgtatgtcataaata

SEQ ID NO: 124245 - DNA, 25 bp, Canis familiaris
gagggtcattcttctgaacaaataa

SEQ ID NO: 124246 - DNA, 25 bp, Canis familiaris
gagggatactctgtggatgccttaa

SEQ ID NO: 124247 - DNA, 25 bp, Canis familiaris
gagggttattgcatcgagccttcag

SEQ ID NO: 124248 - DNA, 25 bp, Canis familiaris
gagggtttgatgattatgccagaac

SEQ ID NO: 124249 - DNA, 25 bp, Canis familiaris
gagggtatagagttgtggccagttc

SEQ ID NO: 124250 - DNA, 25 bp, Canis familiaris
gaggtgaaaggctattggcaggttt

SEQ ID NO: 124251 - DNA, 25 bp, Canis familiaris
gagggaaatcactttggggctctct

SEQ ID NO: 124252 - DNA, 25 bp, Canis familiaris
gaggtgggatcctgggaggcacatt

SEQ ID NO: 124253 - DNA, 25 bp, Canis familiaris
gagggtggccgggtggaggcaaagg

SEQ ID NO: 124254 - DNA, 25 bp, Canis familiaris
gaggttagccgggtggactgggagc

SEQ ID NO: 124255 - DNA, 25 bp, Canis familiaris
gagggagagtcccgtggactggacc

SEQ ID NO: 124256 - DNA, 25 bp, Canis familiaris
gaggacaggtcctggctgaaggccc

SEQ ID NO: 124257 - DNA, 25 bp, Canis familiaris
gagggaggtttttgaaatggccacg

SEQ ID NO: 124258 - DNA, 25 bp, Canis familiaris
gagggaggtttgaaactcggcgtcg

SEQ ID NO: 124259 - DNA, 25 bp, Canis familiaris
gggaagctttgtgaacttgggccct

SEQ ID NO: 124260 - DNA, 25 bp, Canis familiaris
gaggatgagtttggggacttggccc

SEQ ID NO: 124261 - DNA, 25 bp, Canis familiaris
gaggtggatttcggtggcagaggcc

SEQ ID NO: 124262 - DNA, 25 bp, Canis familiaris
gaggtgaaacctggtgaaaggcact

SEQ ID NO: 124263 - DNA, 25 bp, Canis familiaris
gaggtgaaattcttggaccggcgca

SEQ ID NO: 124264 - DNA, 25 bp, Canis familiaris
gagggattttttgatgtgtggccat

SEQ ID NO: 124265 - DNA, 25 bp, Canis familiaris
gaggcgatttttgtaggtgccgtga

SEQ ID NO: 124266 - DNA, 25 bp, Canis familiaris
gagggatttggtttctgttgttggt

SEQ ID NO: 124267 - DNA, 25 bp, Canis familiaris
gagggtggatggtttgcatttctgt

SEQ ID NO: 124268 - DNA, 25 bp, Canis familiaris
gaggatggtgtgcattccttgcatc

SEQ ID NO: 124269 - DNA, 25 bp, Canis familiaris
gagggagagcgggtcatctccatcc

SEQ ID NO: 124270 - DNA, 25 bp, Canis familiaris
gagggataggacacatctccacctc

SEQ ID NO: 124271 - DNA, 25 bp, Canis familiaris
gagggatggaggggtcccacagatc

SEQ ID NO: 124272 - DNA, 25 bp, Canis familiaris
gaggggggcatgtcaatctaacaat

SEQ ID NO: 124273 - DNA, 25 bp, Canis familiaris
gaggggggttcatctcagacaagca

SEQ ID NO: 124274 - DNA, 25 bp, Canis familiaris
gaggtggggcgagtaacggggcata

SEQ ID NO: 124275 - DNA, 25 bp, Canis familiaris
gaggtggggcaatagaaggtgtgta

SEQ ID NO: 124276 - DNA, 25 bp, Canis familiaris
gagggagggaatggagggagggtat

SEQ ID NO: 124277 - DNA, 25 bp, Canis familiaris
gagggagaggtagtagcgggggtcg

SEQ ID NO: 124278 - DNA, 25 bp, Canis familiaris
gagggagggtagtagacacgggtgg

SEQ ID NO: 124279 - DNA, 25 bp, Canis familiaris
gaggggggtggtgggacacaggtgt

SEQ ID NO: 124280 - DNA, 25 bp, Canis familiaris
gaggggtgtggaggggacacaggtg

SEQ ID NO: 124281 - DNA, 25 bp, Canis familiaris
gaggggctgttgtctgggagcccat

SEQ ID NO: 124282 - DNA, 25 bp, Canis familiaris
gaggtgcctctgaggggagtgccat

SEQ ID NO: 124283 - DNA, 25 bp, Canis familiaris
gaggtgtctcagggggaacttgcat

SEQ ID NO: 124284 - DNA, 25 bp, Canis familiaris
gaggtgtgtcaggaaagtactttgg

SEQ ID NO: 124285 - DNA, 25 bp, Canis familiaris
gagggtggcagggcaagatcctcca

SEQ ID NO: 124286 - DNA, 25 bp, Canis familiaris
gagggtcagatcagaactgcccaca

SEQ ID NO: 124287 - DNA, 25 bp, Canis familiaris
gaggtgttgatcttgaactcctgcg

SEQ ID NO: 124288 - DNA, 25 bp, Canis familiaris
gagggtatgatttaagcatctcgtt

SEQ ID NO: 124289 - DNA, 25 bp, Canis familiaris
gagggatatatttaagatgtttttc

SEQ ID NO: 124290 - DNA, 25 bp, Canis familiaris
gagggattttagggggctctggctc

SEQ ID NO: 124291 - DNA, 25 bp, Canis familiaris
gagggggttaggaggagctgagacg

SEQ ID NO: 124292 - DNA, 25 bp, Canis familiaris
gaggggaggtgagtggggagttagg

SEQ ID NO: 124293 - DNA, 25 bp, Canis familiaris
gaggttggggaggggccctctagag

SEQ ID NO: 124294 - DNA, 25 bp, Canis familiaris
gaggttggataggtggcagtcctta

SEQ ID NO: 124295 - DNA, 25 bp, Canis familiaris
gaggtctactaggtgttcccttatt

SEQ ID NO: 124296 - DNA, 25 bp, Canis familiaris
gggactactggacatagcccggttc

SEQ ID NO: 124297 - DNA, 25 bp, Canis familiaris
gaggtctacggatacatggctcgtt

SEQ ID NO: 124298 - DNA, 25 bp, Canis familiaris
gaggctttcaggagaatgagtgcag

SEQ ID NO: 124299 - DNA, 25 bp, Canis familiaris
gaggggtgacgaggactgagccagc

SEQ ID NO: 124300 - DNA, 25 bp, Canis familiaris
gaggggcgagactgagctgagcctg

SEQ ID NO: 124301 - DNA, 25 bp, Canis familiaris
gagggaggagacgatgatgctgcat

SEQ ID NO: 124302 - DNA, 25 bp, Canis familiaris
gaggggagcatgtcagtattctact

SEQ ID NO: 124303 - DNA, 25 bp, Canis familiaris
gaggtggtgcagtcaatgtttgttg

SEQ ID NO: 124304 - DNA, 25 bp, Canis familiaris
gaggtggtggtctttatttcaataa

SEQ ID NO: 124305 - DNA, 25 bp, Canis familiaris
gagggggcacctaaattgttgaagt

SEQ ID NO: 124306 - DNA, 25 bp, Canis familiaris
gaggggcgaccgtatttatttcagt

SEQ ID NO: 124307 - DNA, 25 bp, Canis familiaris
gaggggagtgccattattttacatg

SEQ ID NO: 124308 - DNA, 25 bp, Canis familiaris
gaggagtggaccgttgattttgacc

SEQ ID NO: 124309 - DNA, 25 bp, Canis familiaris
gagggtggaaccagcttgttcacgg

SEQ ID NO: 124310 - DNA, 25 bp, Canis familiaris
gaggttggaacggactctacctcgg

SEQ ID NO: 124311 - DNA, 25 bp, Canis familiaris
gaggttaaaggaagcctcccctctg

SEQ ID NO: 124312 - DNA, 25 bp, Canis familiaris
gaggatgaaatacaagccttccctt

SEQ ID NO: 124313 - DNA, 25 bp, Canis familiaris
gaggtgaagtgattttcctggcctg

SEQ ID NO: 124314 - DNA, 25 bp, Canis familiaris
gaggtggaatgtttaggggcctgtg

SEQ ID NO: 124315 - DNA, 25 bp, Canis familiaris
gaggctgcgaaggaaacgggcacgt

SEQ ID NO: 124316 - DNA, 25 bp, Canis familiaris
gaggctgtggaagaacgggcaccca

SEQ ID NO: 124317 - DNA, 25 bp, Canis familiaris
gagggagggggaggagagccaccca

SEQ ID NO: 124318 - DNA, 25 bp, Canis familiaris
gagggtgagtatcagggaccagccc

SEQ ID NO: 124319 - DNA, 25 bp, Canis familiaris
gagggtagtagaaggcggtgcagcg

SEQ ID NO: 124320 - DNA, 25 bp, Canis familiaris
gagggtggctaggagtcagtggggc

SEQ ID NO: 124321 - DNA, 25 bp, Canis familiaris
gagggtggatagatgtaggatgtgt

SEQ ID NO: 124322 - DNA, 25 bp, Canis familiaris
gagggtggactacttagctctggta

SEQ ID NO: 124323 - DNA, 25 bp, Canis familiaris
gagggggtctatttagccatggccc

SEQ ID NO: 124324 - DNA, 25 bp, Canis familiaris
gagggggtctattttcttggatgga

SEQ ID NO: 124325 - DNA, 25 bp, Canis familiaris
gaggttggttaagtatttgctgtgg

SEQ ID NO: 124326 - DNA, 25 bp, Canis familiaris
gaggtgtagtgtaatctttgctgtt

SEQ ID NO: 124327 - DNA, 25 bp, Canis familiaris
gaggtgttagtggtatgttgtggta

SEQ ID NO: 124328 - DNA, 25 bp, Canis familiaris
gaggtgtctaggtgagtgtcgtgat

SEQ ID NO: 124329 - DNA, 25 bp, Canis familiaris
gaggtgtatttgtgagcttcgctgt

SEQ ID NO: 124330 - DNA, 25 bp, Canis familiaris
gaggggctttgaagacattcctttt

SEQ ID NO: 124331 - DNA, 25 bp, Canis familiaris
gaggggtttaagtctcatctcattc

SEQ ID NO: 124332 - DNA, 25 bp, Canis familiaris
gaggggctcttatggtcagccccac

SEQ ID NO: 124333 - DNA, 25 bp, Canis familiaris
gagggatttcactgagtgctggccc

SEQ ID NO: 124334 - DNA, 25 bp, Canis familiaris
gaggtgattgcggacgggtgtcccc

SEQ ID NO: 124335 - DNA, 25 bp, Canis familiaris
gaggtgtccggagggaatgttcccg

SEQ ID NO: 124336 - DNA, 25 bp, Canis familiaris
gaggggccaggaggagcctttgccc

SEQ ID NO: 124337 - DNA, 25 bp, Canis familiaris
gaggggcaagtgtgatcctcttctc

SEQ ID NO: 124338 - DNA, 25 bp, Canis familiaris
gagggtcaagatgtactgctcttta

SEQ ID NO: 124339 - DNA, 25 bp, Canis familiaris
gagggtcagagtgctgtctggcttt

SEQ ID NO: 124340 - DNA, 25 bp, Canis familiaris
gaggttaatgatggcatggggttgt

SEQ ID NO: 124341 - DNA, 25 bp, Canis familiaris
gagggtcacagctcagggctgtact

SEQ ID NO: 124342 - DNA, 25 bp, Canis familiaris
gagggtgactgttgcgacagctgtg

SEQ ID NO: 124343 - DNA, 25 bp, Canis familiaris
gagggtctctgatgtatgatgtgtg

SEQ ID NO: 124344 - DNA, 25 bp, Canis familiaris
gagggtccagggacatgcagtgctg

SEQ ID NO: 124345 - DNA, 25 bp, Canis familiaris
gagggtctgagagatgctgtgttgg

SEQ ID NO: 124346 - DNA, 25 bp, Canis familiaris
gaggggctggatgacctgggagaaa

SEQ ID NO: 124347 - DNA, 25 bp, Canis familiaris
gaggttgcctgaagatcacggggaa

SEQ ID NO: 124348 - DNA, 25 bp, Canis familiaris
gaggactgcggaagtcgtcggtgac

SEQ ID NO: 124349 - DNA, 25 bp, Canis familiaris
gaggtcgcactaagctgcgtttgtg

SEQ ID NO: 124350 - DNA, 25 bp, Canis familiaris
gaggtgcaccaaatctgggtctctg

SEQ ID NO: 124351 - DNA, 25 bp, Canis familiaris
gaggtgagacaaagccagtgtgact

SEQ ID NO: 124352 - DNA, 25 bp, Canis familiaris
gaggtagaaactccaggggctggct

SEQ ID NO: 124353 - DNA, 25 bp, Canis familiaris
gaggtagaacaccctcaggggctca

SEQ ID NO: 124354 - DNA, 25 bp, Canis familiaris
gagggtgaaatgccctgggtggctc

SEQ ID NO: 124355 - DNA, 25 bp, Canis familiaris
gagggtgacaagtccatcgtgggct

SEQ ID NO: 124356 - DNA, 25 bp, Canis familiaris
gaggggaagggctatccatgtggct

SEQ ID NO: 124357 - DNA, 25 bp, Canis familiaris
gaggtggacaagcaagactgtcgca

SEQ ID NO: 124358 - DNA, 25 bp, Canis familiaris
gaggggagcactcaggactggcccc

SEQ ID NO: 124359 - DNA, 25 bp, Canis familiaris
gaggagaaactcactgactggcaga

SEQ ID NO: 124360 - DNA, 25 bp, Canis familiaris
gaggagcacagaaaggccctggaag

SEQ ID NO: 124361 - DNA, 25 bp, Canis familiaris
gaggattcagatgagtgccgctgcg

SEQ ID NO: 124362 - DNA, 25 bp, Canis familiaris
gagggtgaagcaagctccatgcagg

SEQ ID NO: 124363 - DNA, 25 bp, Canis familiaris
gagggtgatgaggatgcctctcgca

SEQ ID NO: 124364 - DNA, 25 bp, Canis familiaris
gaggtgttcagctaccaccaaggtc

SEQ ID NO: 124365 - DNA, 25 bp, Canis familiaris
gaggtgctccagtattatctcaagg

SEQ ID NO: 124366 - DNA, 25 bp, Canis familiaris
gaggtgtcctgattatttctagagt

SEQ ID NO: 124367 - DNA, 25 bp, Canis familiaris
gagggtccgtaacttgagagagcat

SEQ ID NO: 124368 - DNA, 25 bp, Canis familiaris
gaggttcatctgcattttaggaaaa

SEQ ID NO: 124369 - DNA, 25 bp, Canis familiaris
gaggggccatttaattgtggaaaga

SEQ ID NO: 124370 - DNA, 25 bp, Canis familiaris
gagggggcatttttgggtgggagag

SEQ ID NO: 124371 - DNA, 25 bp, Canis familiaris
gatgagggttttctgaggttcggag

SEQ ID NO: 124372 - DNA, 25 bp, Canis familiaris
gagggtgttgttggtagtttattgg

SEQ ID NO: 124373 - DNA, 25 bp, Canis familiaris
gagggtttggttagactctttgtgt

SEQ ID NO: 124374 - DNA, 25 bp, Canis familiaris
gagggtcttgggagtcactttgctc

SEQ ID NO: 124375 - DNA, 25 bp, Canis familiaris
gagggtgttgtgtaaacagttggct

SEQ ID NO: 124376 - DNA, 25 bp, Canis familiaris
gaggttcacttggaaagctttgcca

SEQ ID NO: 124377 - DNA, 25 bp, Canis familiaris
gaggcttgagttgtacaccttgaag

SEQ ID NO: 124378 - DNA, 25 bp, Canis familiaris
ggtgactggaaggtacccaagatag

SEQ ID NO: 124379 - DNA, 25 bp, Canis familiaris
gaggatctgcagaaggtcacccctc

SEQ ID NO: 124380 - DNA, 25 bp, Canis familiaris
gaggtctgggatgctccccagatgc

SEQ ID NO: 124381 - DNA, 25 bp, Canis familiaris
gaggtggctgagagccgagccaggc

SEQ ID NO: 124382 - DNA, 25 bp, Canis familiaris
gaggtgcagtgatatgcccacctgg

SEQ ID NO: 124383 - DNA, 25 bp, Canis familiaris
gaggtactgtattggcaatcgctgg

SEQ ID NO: 124384 - DNA, 25 bp, Canis familiaris
gaggtgcagtgtaaggcctctgtct

SEQ ID NO: 124385 - DNA, 25 bp, Canis familiaris
gaggtgaatgtttgcctcttccttc

SEQ ID NO: 124386 - DNA, 25 bp, Canis familiaris
gaggtcacaagttgccatctacctt

SEQ ID NO: 124387 - DNA, 25 bp, Canis familiaris
gaggttcaatatttcactgaatctt

SEQ ID NO: 124388 - DNA, 25 bp, Canis familiaris
gaggttcagatatgctaacacggtt

SEQ ID NO: 124389 - DNA, 25 bp, Canis familiaris
gaggtgctgcattaagtgacaatca

SEQ ID NO: 124390 - DNA, 25 bp, Canis familiaris
gaggtgtaacaagtacaaagcccat

SEQ ID NO: 124391 - DNA, 25 bp, Canis familiaris
gaggggaacacctaaaggcccagct

SEQ ID NO: 124392 - DNA, 25 bp, Canis familiaris
gaggtccaaatctaagaagtcccac

SEQ ID NO: 124393 - DNA, 25 bp, Canis familiaris
gaggtccaaaagagaaggccccaat

SEQ ID NO: 124394 - DNA, 25 bp, Canis familiaris
gaggtccaaaatgtggctggccctg

SEQ ID NO: 124395 - DNA, 25 bp, Canis familiaris
gaggcctaaattgtgggaaccgcgc

SEQ ID NO: 124396 - DNA, 25 bp, Canis familiaris
gaggtcatcgagggcctggagaacc

SEQ ID NO: 124397 - DNA, 25 bp, Canis familiaris
gaggtccacagcacgtgggtattca

SEQ ID NO: 124398 - DNA, 25 bp, Canis familiaris
gaggatcaacagggtgcttgggcat

SEQ ID NO: 124399 - DNA, 25 bp, Canis familiaris
gaggatgaagctttctcgtgggcat

SEQ ID NO: 124400 - DNA, 25 bp, Canis familiaris
gaggatacaatttctgcgtggccac

SEQ ID NO: 124401 - DNA, 25 bp, Canis familiaris
gaggtaatgtgtccgctgaggcctc

SEQ ID NO: 124402 - DNA, 25 bp, Canis familiaris
gaggtaatgatgtccttgggagtct

SEQ ID NO: 124403 - DNA, 25 bp, Canis familiaris
gaggctaaggcccttaggccttggg

SEQ ID NO: 124404 - DNA, 25 bp, Canis familiaris
gatggctaaccctggagagccgtcc

SEQ ID NO: 124405 - DNA, 25 bp, Canis familiaris
gaggtatacctctggcaaggctggt

SEQ ID NO: 124406 - DNA, 25 bp, Canis familiaris
gaggggatcctctggcagatgtttg

SEQ ID NO: 124407 - DNA, 25 bp, Canis familiaris
gaggtggtctctttgctgaaaatgg

SEQ ID NO: 124408 - DNA, 25 bp, Canis familiaris
gaggggttttcattggacttggact

SEQ ID NO: 124409 - DNA, 25 bp, Canis familiaris
gaggggcttcataacggattctaac

SEQ ID NO: 124410 - DNA, 25 bp, Canis familiaris
gaggcgtttcttattattctaacga

SEQ ID NO: 124411 - DNA, 25 bp, Canis familiaris
gaggtgtcctttgttattcataatc

SEQ ID NO: 124412 - DNA, 25 bp, Canis familiaris
gaggcttcctttgtttgatttacca

SEQ ID NO: 124413 - DNA, 25 bp, Canis familiaris
gaggcttcccttgatatttcattag

SEQ ID NO: 124414 - DNA, 25 bp, Canis familiaris
gaggtcttctctttaatgttacttt

SEQ ID NO: 124415 - DNA, 25 bp, Canis familiaris
gaggtttcctcatactttgtgttaa

SEQ ID NO: 124416 - DNA, 25 bp, Canis familiaris
gatggtttggtataagtatgtccca

SEQ ID NO: 124417 - DNA, 25 bp, Canis familiaris
gaggtttgttcatgaagtcgcacca

SEQ ID NO: 124418 - DNA, 25 bp, Canis familiaris
gaggatttcttagagagacgcctgc

SEQ ID NO: 124419 - DNA, 25 bp, Canis familiaris
gaggatcttttatggcaaaattgcc

SEQ ID NO: 124420 - DNA, 25 bp, Canis familiaris
gaggatccttttgccaaatttgttg

SEQ ID NO: 124421 - DNA, 25 bp, Canis familiaris
gaggatcacgtgcttaaaatctgtt

SEQ ID NO: 124422 - DNA, 25 bp, Canis familiaris
gaggtgactgtgctctcaaacaccc

SEQ ID NO: 124423 - DNA, 25 bp, Canis familiaris
gaggagagatgcacccaaagtccca

SEQ ID NO: 124424 - DNA, 25 bp, Canis familiaris
gaggggttcctggaacattccacaa

SEQ ID NO: 124425 - DNA, 25 bp, Canis familiaris
gaggggatgctactgaaaatttcga

SEQ ID NO: 124426 - DNA, 25 bp, Canis familiaris
gaggagggtacaaacataataaggg

SEQ ID NO: 124427 - DNA, 25 bp, Canis familiaris
gaggcaaggcttgaactgaatgaaa

SEQ ID NO: 124428 - DNA, 25 bp, Canis familiaris
gaggtgatagtccaaacagaagata

SEQ ID NO: 124429 - DNA, 25 bp, Canis familiaris
gaggtgtttcagtaatcaaatcaaa

SEQ ID NO: 124430 - DNA, 25 bp, Canis familiaris
gaggtgtttcagtgaacccaagttc

SEQ ID NO: 124431 - DNA, 25 bp, Canis familiaris
tgcacgttttcgggcaaccttagcc

SEQ ID NO: 124432 - DNA, 25 bp, Canis familiaris
gaggttttcagataatgccctagaa

SEQ ID NO: 124433 - DNA, 25 bp, Canis familiaris
gaggtctttcgaaaatcaggtgcca

SEQ ID NO: 124434 - DNA, 25 bp, Canis familiaris
gaggtttttgttttgagggccagtg

SEQ ID NO: 124435 - DNA, 25 bp, Canis familiaris
gaggtagctttgcagtttggggagg

SEQ ID NO: 124436 - DNA, 25 bp, Canis familiaris
gaggttgctcttgactgttggagga

SEQ ID NO: 124437 - DNA, 25 bp, Canis familiaris
gaggtttgcttggactggtgagagt

SEQ ID NO: 124438 - DNA, 25 bp, Canis familiaris
gaggtgttggtggatatggtgacag

SEQ ID NO: 124439 - DNA, 25 bp, Canis familiaris
gaggtgataaggctattgggcaggt

SEQ ID NO: 124440 - DNA, 25 bp, Canis familiaris
gaggggatagtgctgtgtggagatg

SEQ ID NO: 124441 - DNA, 25 bp, Canis familiaris
gagggtgatgaggaaggggagctga

SEQ ID NO: 124442 - DNA, 25 bp, Canis familiaris
gagggtgggcaggcatgggtatgga

SEQ ID NO: 124443 - DNA, 25 bp, Canis familiaris
gagggtggcgaggcattgtactaga

SEQ ID NO: 124444 - DNA, 25 bp, Canis familiaris
gagggtgaggagtttgatgactggg

SEQ ID NO: 124445 - DNA, 25 bp, Canis familiaris
gaggtgccaggtgttgatgtcacgg

SEQ ID NO: 124446 - DNA, 25 bp, Canis familiaris
gaggggatgtgtgcttatgtatatg

SEQ ID NO: 124447 - DNA, 25 bp, Canis familiaris
gaggggagctgattctctgagaaac

SEQ ID NO: 124448 - DNA, 25 bp, Canis familiaris
gaggggggcacaatatgaatgaggt

SEQ ID NO: 124449 - DNA, 25 bp, Canis familiaris
gaggggatagaaataaaatggtggt

SEQ ID NO: 124450 - DNA, 25 bp, Canis familiaris
gaggtggctgagagtaaatgtgggg

SEQ ID NO: 124451 - DNA, 25 bp, Canis familiaris
gaggtcgcagagatgattatagagt

SEQ ID NO: 124452 - DNA, 25 bp, Canis familiaris
gaggtctcatatgctctcgaaagat

SEQ ID NO: 124453 - DNA, 25 bp, Canis familiaris
gaggtgtccatgctacgcaaggatg

SEQ ID NO: 124454 - DNA, 25 bp, Canis familiaris
gaggttcctgaatccgagagagtgt

SEQ ID NO: 124455 - DNA, 25 bp, Canis familiaris
gaggttttactacagaaggtctact

SEQ ID NO: 124456 - DNA, 25 bp, Canis familiaris
gaggtgtgcttattcagaagtcagg

SEQ ID NO: 124457 - DNA, 25 bp, Canis familiaris
gatggaatctaaataaggtcagtgg

SEQ ID NO: 124458 - DNA, 25 bp, Canis familiaris
gaggacgaagactacgtgccgtcgg

SEQ ID NO: 124459 - DNA, 25 bp, Canis familiaris
taggaaaaactctgaccgtgagcgg

SEQ ID NO: 124460 - DNA, 25 bp, Canis familiaris
gaggaccaaacgtggaggtagcgga

SEQ ID NO: 124461 - DNA, 25 bp, Canis familiaris
gaggaaaggcatctcgggggactgg

SEQ ID NO: 124462 - DNA, 25 bp, Canis familiaris
gaggaggctgatatttgggggttgg

SEQ ID NO: 124463 - DNA, 25 bp, Canis familiaris
gaggagggtatttcttggtggattt

SEQ ID NO: 124464 - DNA, 25 bp, Canis familiaris
gaggatgggacatacctgctttttt

SEQ ID NO: 124465 - DNA, 25 bp, Canis familiaris
gaggtgtagatctcacattgttttg

SEQ ID NO: 124466 - DNA, 25 bp, Canis familiaris
gaggtggaatcatagcttgtttcag

SEQ ID NO: 124467 - DNA, 25 bp, Canis familiaris
gaggtgaaatcacagttttgaagaa

SEQ ID NO: 124468 - DNA, 25 bp, Canis familiaris
gaggagaaccactctgtattaccca

SEQ ID NO: 124469 - DNA, 25 bp, Canis familiaris
gaggacatcccagacttttaaacac

SEQ ID NO: 124470 - DNA, 25 bp, Canis familiaris
gatggtttccaggacttaggaaagc

SEQ ID NO: 124471 - DNA, 25 bp, Canis familiaris
gaggtttccaggttccatttaactg

SEQ ID NO: 124472 - DNA, 25 bp, Canis familiaris
gaggaacccaggtaccatttctact

SEQ ID NO: 124473 - DNA, 25 bp, Canis familiaris
gaggagacccaatatacttttccag

SEQ ID NO: 124474 - DNA, 25 bp, Canis familiaris
gaggaacccaagtagctttgtggct

SEQ ID NO: 124475 - DNA, 25 bp, Canis familiaris
gaggaaacacaagagggatgccccc

SEQ ID NO: 124476 - DNA, 25 bp, Canis familiaris
gaggggacaaggctgggcaggcccc

SEQ ID NO: 124477 - DNA, 25 bp, Canis familiaris
gatggggcaaagtcttggaaggatc

SEQ ID NO: 124478 - DNA, 25 bp, Canis familiaris
gaggggccatcatcattggacagga

SEQ ID NO: 124479 - DNA, 25 bp, Canis familiaris
gaggtcaaccatcattgtcaagcga

SEQ ID NO: 124480 - DNA, 25 bp, Canis familiaris
gaggtcaactaggttctcatagcaa

SEQ ID NO: 124481 - DNA, 25 bp, Canis familiaris
gaggatgcataccaggattctatat

SEQ ID NO: 124482 - DNA, 25 bp, Canis familiaris
gaggtgtaccggacacttttgtatg

SEQ ID NO: 124483 - DNA, 25 bp, Canis familiaris
gaggttgttcggacactgttcagaa

SEQ ID NO: 124484 - DNA, 25 bp, Canis familiaris
gaggtgctgcattccagaactttaa

SEQ ID NO: 124485 - DNA, 25 bp, Canis familiaris
gaggtgagcctccaacaatttgaga

SEQ ID NO: 124486 - DNA, 25 bp, Canis familiaris
gaggtggacctctataattcggacc

SEQ ID NO: 124487 - DNA, 25 bp, Canis familiaris
gaggaggaactccgaaccatggacc

SEQ ID NO: 124488 - DNA, 25 bp, Canis familiaris
gaggggagagtgcggatgccggcac

SEQ ID NO: 124489 - DNA, 25 bp, Canis familiaris
gaggaggggagctgttgggaacggc

SEQ ID NO: 124490 - DNA, 25 bp, Canis familiaris
gaggagagatgggcatggcttggaa

SEQ ID NO: 124491 - DNA, 25 bp, Canis familiaris
gaggacaaggttggccggaatcggt

SEQ ID NO: 124492 - DNA, 25 bp, Canis familiaris
gggaccggaatcacggtattggccg

SEQ ID NO: 124493 - DNA, 25 bp, Canis familiaris
gaggtcgggaacactaggtcttctc

SEQ ID NO: 124494 - DNA, 25 bp, Canis familiaris
gaggtgctgtgggacatttaggatt

SEQ ID NO: 124495 - DNA, 25 bp, Canis familiaris
gaggtctgtgttgcaattatctgaa

SEQ ID NO: 124496 - DNA, 25 bp, Canis familiaris
gaggtatgtgtctgctctttgcaaa

SEQ ID NO: 124497 - DNA, 25 bp, Canis familiaris
gaggtgtcgtcatgatctcaatcaa

SEQ ID NO: 124498 - DNA, 25 bp, Canis familiaris
gaggtacagtcaactcttaaagcat

SEQ ID NO: 124499 - DNA, 25 bp, Canis familiaris
gaggtagcaagctcttttcagccaa

SEQ ID NO: 124500 - DNA, 25 bp, Canis familiaris
gaggaagatggctccggatgaggaa

SEQ ID NO: 124501 - DNA, 25 bp, Canis familiaris
gaggaactgggtgcctggaggaatg

SEQ ID NO: 124502 - DNA, 25 bp, Canis familiaris
gaggaatcggggcccggtgagtgat

SEQ ID NO: 124503 - DNA, 25 bp, Canis familiaris
gaggtacactgggggtggtgggtag

SEQ ID NO: 124504 - DNA, 25 bp, Canis familiaris
gaggggacatgagtggggtggggat

SEQ ID NO: 124505 - DNA, 25 bp, Canis familiaris
gaggggccagagctgggggactgag

SEQ ID NO: 124506 - DNA, 25 bp, Canis familiaris
gaggggcctttggcaagagtgacga

SEQ ID NO: 124507 - DNA, 25 bp, Canis familiaris
gaggaggctgttttgcaagactagg

SEQ ID NO: 124508 - DNA, 25 bp, Canis familiaris
gaggagggttcaaggagggggcagt

SEQ ID NO: 124509 - DNA, 25 bp, Canis familiaris
gaggaggttctcaacagaggtgtcc

SEQ ID NO: 124510 - DNA, 25 bp, Canis familiaris
gaggttgtttctccagtttgtgaca

SEQ ID NO: 124511 - DNA, 25 bp, Canis familiaris
gaggtgtgtatctccagtttgaaga

SEQ ID NO: 124512 - DNA, 25 bp, Canis familiaris
gaggttctgatcttcagcgtatcga

SEQ ID NO: 124513 - DNA, 25 bp, Canis familiaris
gaggtgtttgcattctggtgataaa

SEQ ID NO: 124514 - DNA, 25 bp, Canis familiaris
gaggatctatcttatctgcatggaa

SEQ ID NO: 124515 - DNA, 25 bp, Canis familiaris
gaggtcaagacattctgcatgtgcc

SEQ ID NO: 124516 - DNA, 25 bp, Canis familiaris
gaggtgttgacattctcgagctgct

SEQ ID NO: 124517 - DNA, 25 bp, Canis familiaris
gaggtctctgtattttgcagctgcc

SEQ ID NO: 124518 - DNA, 25 bp, Canis familiaris
gaggtgtctgctttttacaaccaaa

SEQ ID NO: 124519 - DNA, 25 bp, Canis familiaris
gaggttcagtttcaaaattcaagga

SEQ ID NO: 124520 - DNA, 25 bp, Canis familiaris
gggtcccttactgcataatccaagg

SEQ ID NO: 124521 - DNA, 25 bp, Canis familiaris
gaggttcctaacttcagtgagccaa

SEQ ID NO: 124522 - DNA, 25 bp, Canis familiaris
gaggttttcaaattatctgcaggga

SEQ ID NO: 124523 - DNA, 25 bp, Canis familiaris
gaggtcattttatctcactggctta

SEQ ID NO: 124524 - DNA, 25 bp, Canis familiaris
gaggatcatttttatagcattcgtt

SEQ ID NO: 124525 - DNA, 25 bp, Canis familiaris
gaggtgactgtttctagtttgtctt

SEQ ID NO: 124526 - DNA, 25 bp, Canis familiaris
gaggtggggctgttgaattgttttg

SEQ ID NO: 124527 - DNA, 25 bp, Canis familiaris
gaggtggtagtgatgggtgtttttt

SEQ ID NO: 124528 - DNA, 25 bp, Canis familiaris
gaggaggaagtcatcgaagtatttt

SEQ ID NO: 124529 - DNA, 25 bp, Canis familiaris
gaggggaagtaatgtcactgatata

SEQ ID NO: 124530 - DNA, 25 bp, Canis familiaris
gaggggagcttgagagtcacataga

SEQ ID NO: 124531 - DNA, 25 bp, Canis familiaris
gaggtggagccacagtgtacaacct

SEQ ID NO: 124532 - DNA, 25 bp, Canis familiaris
gaggatggtcaccctggaaaacctg

SEQ ID NO: 124533 - DNA, 25 bp, Canis familiaris
gaggtggcttcagaggcaaaaaccc

SEQ ID NO: 124534 - DNA, 25 bp, Canis familiaris
gaggggcttcgttggacaaaccctg

SEQ ID NO: 124535 - DNA, 25 bp, Canis familiaris
gaggaggtgggtttgacattgacct

SEQ ID NO: 124536 - DNA, 25 bp, Canis familiaris
gaggggctggcgtgagccaggatcg

SEQ ID NO: 124537 - DNA, 25 bp, Canis familiaris
gaggcggcagggcaaggaagtcaga

SEQ ID NO: 124538 - DNA, 25 bp, Canis familiaris
gaggaagacgggtacatcaaacaga

SEQ ID NO: 124539 - DNA, 25 bp, Canis familiaris
gaggaaccaggtgccaacagtcaac

SEQ ID NO: 124540 - DNA, 25 bp, Canis familiaris
gatcaggacccgagcctaagtcaag

SEQ ID NO: 124541 - DNA, 25 bp, Canis familiaris
gatcaggaccctcagaaaatgtaca

SEQ ID NO: 124542 - DNA, 25 bp, Canis familiaris
gaggagactccttaaaaatgtttct

SEQ ID NO: 124543 - DNA, 25 bp, Canis familiaris
gaggagaccctggaacaagttcaat

SEQ ID NO: 124544 - DNA, 25 bp, Canis familiaris
gaggttgccttggaactacttaata

SEQ ID NO: 124545 - DNA, 25 bp, Canis familiaris
gaggatcctcttgaacatcactatc

SEQ ID NO: 124546 - DNA, 25 bp, Canis familiaris
gaggtctcttgggcagaatcccaca

SEQ ID NO: 124547 - DNA, 25 bp, Canis familiaris
gaggtctgttaggtgtgcatcctgc

SEQ ID NO: 124548 - DNA, 25 bp, Canis familiaris
gatacaagttcgtggcacacttgga

SEQ ID NO: 124549 - DNA, 25 bp, Canis familiaris
gataaagtcacgtggccatcacgga

SEQ ID NO: 124550 - DNA, 25 bp, Canis familiaris
gatgaacatgtcccagttccaaccg

SEQ ID NO: 124551 - DNA, 25 bp, Canis familiaris
gaggacatgtcgccagttcaaaggt

SEQ ID NO: 124552 - DNA, 25 bp, Canis familiaris
gaggacttcagtggttcgaggtgct

SEQ ID NO: 124553 - DNA, 25 bp, Canis familiaris
gaggttgacattgttcggggatggg

SEQ ID NO: 124554 - DNA, 25 bp, Canis familiaris
gaggttgtttgagttctctgtggac

SEQ ID NO: 124555 - DNA, 25 bp, Canis familiaris
gaggtttctctggtttgttccaaga

SEQ ID NO: 124556 - DNA, 25 bp, Canis familiaris
gaggtcttcctagtgttacttaaat

SEQ ID NO: 124557 - DNA, 25 bp, Canis familiaris
gaggtcttcacttctggtgagctgt

SEQ ID NO: 124558 - DNA, 25 bp, Canis familiaris
gaggtctctgcagcactaggagatt

SEQ ID NO: 124559 - DNA, 25 bp, Canis familiaris
gaggatctcatccaccaatgtaatt

SEQ ID NO: 124560 - DNA, 25 bp, Canis familiaris
gaggatctgacacctaaggatattg

SEQ ID NO: 124561 - DNA, 25 bp, Canis familiaris
gaggactgcctactgacaaaatcga

SEQ ID NO: 124562 - DNA, 25 bp, Canis familiaris
gaggactcctatcggaagcaagtgg

SEQ ID NO: 124563 - DNA, 25 bp, Canis familiaris
gaggaatgctttcaggcgcaaagtg

SEQ ID NO: 124564 - DNA, 25 bp, Canis familiaris
gaggaagccttccatggcaagttct

SEQ ID NO: 124565 - DNA, 25 bp, Canis familiaris
gaggtatccatttgaggccctcttc

SEQ ID NO: 124566 - DNA, 25 bp, Canis familiaris
gaggtgatcctttaatggcacagat

SEQ ID NO: 124567 - DNA, 25 bp, Canis familiaris
gaggtgaccttggcagatgaccagc

SEQ ID NO: 124568 - DNA, 25 bp, Canis familiaris
gaggagacggtggcgaaccgttcct

SEQ ID NO: 124569 - DNA, 25 bp, Canis familiaris
gaggagacggattcgtcaccggtcc

SEQ ID NO: 124570 - DNA, 25 bp, Canis familiaris
gaggtgggaatatgttcacggtctc

SEQ ID NO: 124571 - DNA, 25 bp, Canis familiaris
gaggtgggcagcttagtggacgggc

SEQ ID NO: 124572 - DNA, 25 bp, Canis familiaris
gaggctggttcagcagtggggcgtc

SEQ ID NO: 124573 - DNA, 25 bp, Canis familiaris
gaggaggaatcagtattgggggtcc

SEQ ID NO: 124574 - DNA, 25 bp, Canis familiaris
gaggagggtgggttgtgaccgactc

SEQ ID NO: 124575 - DNA, 25 bp, Canis familiaris
gaggagggtggctattccaccacct

SEQ ID NO: 124576 - DNA, 25 bp, Canis familiaris
gaggatcatggctgataacccatcc

SEQ ID NO: 124577 - DNA, 25 bp, Canis familiaris
gaggtcacgctttaacagccttttt

SEQ ID NO: 124578 - DNA, 25 bp, Canis familiaris
gggatgccggtaaaacctcttgtgt

SEQ ID NO: 124579 - DNA, 25 bp, Canis familiaris
gaggatcttggaataaatcacctat

SEQ ID NO: 124580 - DNA, 25 bp, Canis familiaris
gaggactattctcagccatcaactt

SEQ ID NO: 124581 - DNA, 25 bp, Canis familiaris
gaggagctacctatgaacaatctag

SEQ ID NO: 124582 - DNA, 25 bp, Canis familiaris
gaggactccctcattgagatcatct

SEQ ID NO: 124583 - DNA, 25 bp, Canis familiaris
gaggtctctgtggctttggtgaccc

SEQ ID NO: 124584 - DNA, 25 bp, Canis familiaris
gaggtcctgtgtccacagctggaca

SEQ ID NO: 124585 - DNA, 25 bp, Canis familiaris
gaggtgcctggtaaatgctgaatgc

SEQ ID NO: 124586 - DNA, 25 bp, Canis familiaris
gaggtgcttcgtggcaatctgagtg

SEQ ID NO: 124587 - DNA, 25 bp, Canis familiaris
gaggtttcgtcaggatctgcacagc

SEQ ID NO: 124588 - DNA, 25 bp, Canis familiaris
gaggttcatgctgcaggtacaccga

SEQ ID NO: 124589 - DNA, 25 bp, Canis familiaris
gaggtctactgtggggaacacagat

SEQ ID NO: 124590 - DNA, 25 bp, Canis familiaris
gaggtcttctgtaattgataacact

SEQ ID NO: 124591 - DNA, 25 bp, Canis familiaris
gaggttctctctatatgtaatctgt

SEQ ID NO: 124592 - DNA, 25 bp, Canis familiaris
gaggtatttattctgtgcacatttg

SEQ ID NO: 124593 - DNA, 25 bp, Canis familiaris
gaggttgtgatttggttgaaggtgc

SEQ ID NO: 124594 - DNA, 25 bp, Canis familiaris
gaggtttgtctactgcattcagaga

SEQ ID NO: 124595 - DNA, 25 bp, Canis familiaris
gaggtcttgactaggttcagatggc

SEQ ID NO: 124596 - DNA, 25 bp, Canis familiaris
gaggtagtggttggatttgacagca

SEQ ID NO: 124597 - DNA, 25 bp, Canis familiaris
gaggtcagtccgtgtgcactgaatc

SEQ ID NO: 124598 - DNA, 25 bp, Canis familiaris
gaggtcgttcgactgaggctgaata

SEQ ID NO: 124599 - DNA, 25 bp, Canis familiaris
gaggtcagttctcgaagtcttgatt

SEQ ID NO: 124600 - DNA, 25 bp, Canis familiaris
gaggtcatacataccattgtttatt

SEQ ID NO: 124601 - DNA, 25 bp, Canis familiaris
gaggttaaactcagctcctagtgtt

SEQ ID NO: 124602 - DNA, 25 bp, Canis familiaris
gaggatttaattcagcttctatgga

SEQ ID NO: 124603 - DNA, 25 bp, Canis familiaris
gaggatctaattacaatcttccaga

SEQ ID NO: 124604 - DNA, 25 bp, Canis familiaris
gaggatccaaatgttccactcaatc

SEQ ID NO: 124605 - DNA, 25 bp, Canis familiaris
gaggtgtaacggtctccaccaagga

SEQ ID NO: 124606 - DNA, 25 bp, Canis familiaris
gaggtggacacataccaccgaggga

SEQ ID NO: 124607 - DNA, 25 bp, Canis familiaris
gaggaggacaaaccccttgatcaaa

SEQ ID NO: 124608 - DNA, 25 bp, Canis familiaris
gaggacagaacaactccgaagaaaa

SEQ ID NO: 124609 - DNA, 25 bp, Canis familiaris
gaggacaaaccccttgatcaaaaat

SEQ ID NO: 124610 - DNA, 25 bp, Canis familiaris
gaggtaaatccctttgcctaatagg

SEQ ID NO: 124611 - DNA, 25 bp, Canis familiaris
gaggtataattcaccaccaacataa

SEQ ID NO: 124612 - DNA, 25 bp, Canis familiaris
gaggacatcaatttgggcccaaatt

SEQ ID NO: 124613 - DNA, 25 bp, Canis familiaris
gaggtctctcagttggagcagccat

SEQ ID NO: 124614 - DNA, 25 bp, Canis familiaris
gaggttctagattggctcactcaaa

SEQ ID NO: 124615 - DNA, 25 bp, Canis familiaris
gaggaggttgtgttgctgactcagg

SEQ ID NO: 124616 - DNA, 25 bp, Canis familiaris
gaggtggtggtggtgacactcatgt

SEQ ID NO: 124617 - DNA, 25 bp, Canis familiaris
gaggtggtgctagatgatgacagag

SEQ ID NO: 124618 - DNA, 25 bp, Canis familiaris
gaggtgggcttcaaggccagaggcc

SEQ ID NO: 124619 - DNA, 25 bp, Canis familiaris
gaggtgggttgctaatctcatggcc

SEQ ID NO: 124620 - DNA, 25 bp, Canis familiaris
tgacgtcggttcccaacgatgtcat

SEQ ID NO: 124621 - DNA, 25 bp, Canis familiaris
gaggatctttgtggccaaggagctg

SEQ ID NO: 124622 - DNA, 25 bp, Canis familiaris
gaggtctatataaccacgagctcgt

SEQ ID NO: 124623 - DNA, 25 bp, Canis familiaris
gaggtctaatataagccgagctcgc

SEQ ID NO: 124624 - DNA, 25 bp, Canis familiaris
gaggttctcacaaagccttttgctc

SEQ ID NO: 124625 - DNA, 25 bp, Canis familiaris
gaggttgcacaaaactcagtttcac

SEQ ID NO: 124626 - DNA, 25 bp, Canis familiaris
gaggatgaccagtgtcttgctttcc

SEQ ID NO: 124627 - DNA, 25 bp, Canis familiaris
gaggtggggggagttgctgttcctc

SEQ ID NO: 124628 - DNA, 25 bp, Canis familiaris
gaggtgggttggtttgatttcgatt

SEQ ID NO: 124629 - DNA, 25 bp, Canis familiaris
gaggttaaattgtttctttctgttg

SEQ ID NO: 124630 - DNA, 25 bp, Canis familiaris
gaggaaagccttttactgttcttgg

SEQ ID NO: 124631 - DNA, 25 bp, Canis familiaris
gaggatacatacttgtaaccccggc

SEQ ID NO: 124632 - DNA, 25 bp, Canis familiaris
gaggaaatagaagtttctcccggcg

SEQ ID NO: 124633 - DNA, 25 bp, Canis familiaris
gaggaaacaaatgcaggcccctcga

SEQ ID NO: 124634 - DNA, 25 bp, Canis familiaris
gaggataaacttgagtcctccctca

SEQ ID NO: 124635 - DNA, 25 bp, Canis familiaris
gatggtgaaatctatgggtgagtct

SEQ ID NO: 124636 - DNA, 25 bp, Canis familiaris
gaggtgaaatcattgctggtgttta

SEQ ID NO: 124637 - DNA, 25 bp, Canis familiaris
gaggtgtatacggctgggatttgaa

SEQ ID NO: 124638 - DNA, 25 bp, Canis familiaris
gaggtgtgtaagaatgttgtgttaa

SEQ ID NO: 124639 - DNA, 25 bp, Canis familiaris
gaggtgttgaaggagctggtctcta

SEQ ID NO: 124640 - DNA, 25 bp, Canis familiaris
gaggtgagagaaggagcggcccaga

SEQ ID NO: 124641 - DNA, 25 bp, Canis familiaris
gaggtgaaccaggagctggcgcaag

SEQ ID NO: 124642 - DNA, 25 bp, Canis familiaris
gaggcggaccaagctggagctaggc

SEQ ID NO: 124643 - DNA, 25 bp, Canis familiaris
gaggagggcgaagccggtggagggt

SEQ ID NO: 124644 - DNA, 25 bp, Canis familiaris
gaggacgggaagttccaggagcggg

SEQ ID NO: 124645 - DNA, 25 bp, Canis familiaris
gaggtcttaaatgctctcgggaggg

SEQ ID NO: 124646 - DNA, 25 bp, Canis familiaris
gaggtaaaatgttcatcccaggtgg

SEQ ID NO: 124647 - DNA, 25 bp, Canis familiaris
gaggctacggaggagtccgcggtag

SEQ ID NO: 124648 - DNA, 25 bp, Canis familiaris
gaggtacctgaaagtccaaaggaga

SEQ ID NO: 124649 - DNA, 25 bp, Canis familiaris
gaggataaccataaaccaagtggaa

SEQ ID NO: 124650 - DNA, 25 bp, Canis familiaris
gaggatattcctgaaacaaaggtga

SEQ ID NO: 124651 - DNA, 25 bp, Canis familiaris
gaggttgccagtgtatgacaaaagt

SEQ ID NO: 124652 - DNA, 25 bp, Canis familiaris
gaggttccagccttagcatcagtaa

SEQ ID NO: 124653 - DNA, 25 bp, Canis familiaris
gaggtttcagccctggatcaggaga

SEQ ID NO: 124654 - DNA, 25 bp, Canis familiaris
gaggtgttgaccttgtgatcatagg

SEQ ID NO: 124655 - DNA, 25 bp, Canis familiaris
gaggtgatggctacgtggacacgga

SEQ ID NO: 124656 - DNA, 25 bp, Canis familiaris
gaggatatggttggctatgcacagg

SEQ ID NO: 124657 - DNA, 25 bp, Canis familiaris
gaggatcagagaatacctccaagcc

SEQ ID NO: 124658 - DNA, 25 bp, Canis familiaris
gaggatcatcagaaaatttgtgtgg

SEQ ID NO: 124659 - DNA, 25 bp, Canis familiaris
gaggatggcatcaacagtgtcattg

SEQ ID NO: 124660 - DNA, 25 bp, Canis familiaris
gaggatcacttgttggtattggtat

SEQ ID NO: 124661 - DNA, 25 bp, Canis familiaris
gaggatacggtctggttgtctacgc

SEQ ID NO: 124662 - DNA, 25 bp, Canis familiaris
gaggatgtctgtacaaggttcctac

SEQ ID NO: 124663 - DNA, 25 bp, Canis familiaris
gaggatgctcgtcagaagttccgct

SEQ ID NO: 124664 - DNA, 25 bp, Canis familiaris
gaggaccgagaagatcttccgccaa

SEQ ID NO: 124665 - DNA, 25 bp, Canis familiaris
gaggacggagaggacctgttcacca

SEQ ID NO: 124666 - DNA, 25 bp, Canis familiaris
gaggactgaggtcacctttagcctt

SEQ ID NO: 124667 - DNA, 25 bp, Canis familiaris
gaggttttgtgaaggcatttatggt

SEQ ID NO: 124668 - DNA, 25 bp, Canis familiaris
gaggcactaagtttggatcataagg

SEQ ID NO: 124669 - DNA, 25 bp, Canis familiaris
gaggagtaatggtgacaattagaag

SEQ ID NO: 124670 - DNA, 25 bp, Canis familiaris
gaggagctcttgtcactacaattaa

SEQ ID NO: 124671 - DNA, 25 bp, Canis familiaris
gaggagcaattaagcaacataacga

SEQ ID NO: 124672 - DNA, 25 bp, Canis familiaris
gaggagcactgtaagcctcagaccc

SEQ ID NO: 124673 - DNA, 25 bp, Canis familiaris
gaggagcctcggtgtagacctcctc

SEQ ID NO: 124674 - DNA, 25 bp, Canis familiaris
gaggtcaacaggttggagacgatgc

SEQ ID NO: 124675 - DNA, 25 bp, Canis familiaris
gaggtcaacagctcaaagctcgttc

SEQ ID NO: 124676 - DNA, 25 bp, Canis familiaris
gatctggtgtcgttaaagtcgttcg

SEQ ID NO: 124677 - DNA, 25 bp, Canis familiaris
gattcttacttataagtcaatccgg

SEQ ID NO: 124678 - DNA, 25 bp, Canis familiaris
gatgttgtcctataaaggcaatccc

SEQ ID NO: 124679 - DNA, 25 bp, Canis familiaris
gaggttactcattgtaaacaacaca

SEQ ID NO: 124680 - DNA, 25 bp, Canis familiaris
gaggtaactctaactgccacaaaag

SEQ ID NO: 124681 - DNA, 25 bp, Canis familiaris
gaggctgtgacccaacatggacaaa

SEQ ID NO: 124682 - DNA, 25 bp, Canis familiaris
gaggacagaaagaagcaggataaac

SEQ ID NO: 124683 - DNA, 25 bp, Canis familiaris
gaggatgccaaagccagcaaagaca

SEQ ID NO: 124684 - DNA, 25 bp, Canis familiaris
gaggatccacaagcgactcattgat

SEQ ID NO: 124685 - DNA, 25 bp, Canis familiaris
gaggtccaggtggtgattctttccc

SEQ ID NO: 124686 - DNA, 25 bp, Canis familiaris
gaggtccatgttgcggtgacttgtc

SEQ ID NO: 124687 - DNA, 25 bp, Canis familiaris
gaggatcccttggagggtcaagtct

SEQ ID NO: 124688 - DNA, 25 bp, Canis familiaris
gaggtcccttttggtggaaggctca

SEQ ID NO: 124689 - DNA, 25 bp, Canis familiaris
gaggatccaatcatggtggaaaggc

SEQ ID NO: 124690 - DNA, 25 bp, Canis familiaris
gaggaccagtccatgggcaattggc

SEQ ID NO: 124691 - DNA, 25 bp, Canis familiaris
gaggtctggtacatgtcgaatggtc

SEQ ID NO: 124692 - DNA, 25 bp, Canis familiaris
gaggtcttcttcatggagggtgctc

SEQ ID NO: 124693 - DNA, 25 bp, Canis familiaris
gaggtcccactggagcagaggggcc

SEQ ID NO: 124694 - DNA, 25 bp, Canis familiaris
gaggtctctcagctggaagggagcc

SEQ ID NO: 124695 - DNA, 25 bp, Canis familiaris
gaggtcatccggctggatggggcca

SEQ ID NO: 124696 - DNA, 25 bp, Canis familiaris
gaggtcaggagacatggggctgggc

SEQ ID NO: 124697 - DNA, 25 bp, Canis familiaris
gaggacggcaaggtggtgacggtgc

SEQ ID NO: 124698 - DNA, 25 bp, Canis familiaris
gaggaatggaagggttacgtggtgc

SEQ ID NO: 124699 - DNA, 25 bp, Canis familiaris
gaggttgtaaccgtcatcacttgga

SEQ ID NO: 124700 - DNA, 25 bp, Canis familiaris
gaggcatttaactgtttcttggcta

SEQ ID NO: 124701 - DNA, 25 bp, Canis familiaris
gaggactaaaatagactttttgcca

SEQ ID NO: 124702 - DNA, 25 bp, Canis familiaris
gaggacctgaataaatgttttccca

SEQ ID NO: 124703 - DNA, 25 bp, Canis familiaris
gaggactggcagactagcttttttc

SEQ ID NO: 124704 - DNA, 25 bp, Canis familiaris
gaggaatccgagaactagttttctg

SEQ ID NO: 124705 - DNA, 25 bp, Canis familiaris
gaggttccagacatcaaacttgact

SEQ ID NO: 124706 - DNA, 25 bp, Canis familiaris
gaggttccggctgagtgaggtgcct

SEQ ID NO: 124707 - DNA, 25 bp, Canis familiaris
gaggtatggggctgcagggatgctc

SEQ ID NO: 124708 - DNA, 25 bp, Canis familiaris
gaggtagctgccctagaggggctca

SEQ ID NO: 124709 - DNA, 25 bp, Canis familiaris
gaggtagctgcaaaggaggcctgta

SEQ ID NO: 124710 - DNA, 25 bp, Canis familiaris
gaggctacggaaacaggccgaaaag

SEQ ID NO: 124711 - DNA, 25 bp, Canis familiaris
gaggtcaaggacatcagcagccaaa

SEQ ID NO: 124712 - DNA, 25 bp, Canis familiaris
gaggtcagggcaggtggaggagaat

SEQ ID NO: 124713 - DNA, 25 bp, Canis familiaris
gaggtcagttgagtcaggcatgagt

SEQ ID NO: 124714 - DNA, 25 bp, Canis familiaris
gaggtcaggatggccaggtactgct

SEQ ID NO: 124715 - DNA, 25 bp, Canis familiaris
gaggtccgagaggcaggcaaggctc

SEQ ID NO: 124716 - DNA, 25 bp, Canis familiaris
gaggctactaagtgccaactcaccg

SEQ ID NO: 124717 - DNA, 25 bp, Canis familiaris
gaggtaaagcctacgatacgcaccg

SEQ ID NO: 124718 - DNA, 25 bp, Canis familiaris
gaggaaaaagcaagttacgccagag

SEQ ID NO: 124719 - DNA, 25 bp, Canis familiaris
gaggaagaagacgcatctacgcctt

SEQ ID NO: 124720 - DNA, 25 bp, Canis familiaris
gaggaaaagtcttcctccagcctgt

SEQ ID NO: 124721 - DNA, 25 bp, Canis familiaris
gaggagattttcctaatccctcgtt

SEQ ID NO: 124722 - DNA, 25 bp, Canis familiaris
gaggaattttagtaatcgtgtccgt

SEQ ID NO: 124723 - DNA, 25 bp, Canis familiaris
gaggacatttaaggcactttcccgc

SEQ ID NO: 124724 - DNA, 25 bp, Canis familiaris
gaggttttaattcttgtgccactgc

SEQ ID NO: 124725 - DNA, 25 bp, Canis familiaris
gaggtttgaagtgcttggccacctc

SEQ ID NO: 124726 - DNA, 25 bp, Canis familiaris
gaggatttgacaaccttttacctgc

SEQ ID NO: 124727 - DNA, 25 bp, Canis familiaris
gaggttcaagagccctgttaactcc

SEQ ID NO: 124728 - DNA, 25 bp, Canis familiaris
gaggtttgaagggcttctcatcttc

SEQ ID NO: 124729 - DNA, 25 bp, Canis familiaris
gaggtttgaggttttctctctcctc

SEQ ID NO: 124730 - DNA, 25 bp, Canis familiaris
gaggattaaatatgttctcccctcc

SEQ ID NO: 124731 - DNA, 25 bp, Canis familiaris
gaggataataatccagggtcccctc

SEQ ID NO: 124732 - DNA, 25 bp, Canis familiaris
gaggatcaaagcagcagatggacca

SEQ ID NO: 124733 - DNA, 25 bp, Canis familiaris
gaggtcacacagcctatagggcaca

SEQ ID NO: 124734 - DNA, 25 bp, Canis familiaris
gaggtacatgcattccagagctgga

SEQ ID NO: 124735 - DNA, 25 bp, Canis familiaris
gaggaggcatcagtctcagagtcag

SEQ ID NO: 124736 - DNA, 25 bp, Canis familiaris
gaggaagatcacctctgacttggac

SEQ ID NO: 124737 - DNA, 25 bp, Canis familiaris
gaggacatgaaactctgcaccgtta

SEQ ID NO: 124738 - DNA, 25 bp, Canis familiaris
gaggagctgcaaaatcgcatcgcca

SEQ ID NO: 124739 - DNA, 25 bp, Canis familiaris
gatggacaggtatcgatcgccaacc

SEQ ID NO: 124740 - DNA, 25 bp, Canis familiaris
gaggacaaggcagcttggcctaccc

SEQ ID NO: 124741 - DNA, 25 bp, Canis familiaris
gaggaacccgcagtaggacaaacgc

SEQ ID NO: 124742 - DNA, 25 bp, Canis familiaris
gaggacaccccatatgaagcagtac

SEQ ID NO: 124743 - DNA, 25 bp, Canis familiaris
gaggaagcggcaaatgatatcagac

SEQ ID NO: 124744 - DNA, 25 bp, Canis familiaris
gaggagcagctgtccgatgaggaga

SEQ ID NO: 124745 - DNA, 25 bp, Canis familiaris
gaggagctgcgaatggatgatataa

SEQ ID NO: 124746 - DNA, 25 bp, Canis familiaris
gaggagcttgactcttaacagtaag

SEQ ID NO: 124747 - DNA, 25 bp, Canis familiaris
gaggattctgaacgttcaaaccaag

SEQ ID NO: 124748 - DNA, 25 bp, Canis familiaris
gaggagtagaccttactgaacccac

SEQ ID NO: 124749 - DNA, 25 bp, Canis familiaris
gaggaggatgtcacttctaaccctg

SEQ ID NO: 124750 - DNA, 25 bp, Canis familiaris
gaggatgtggtgaccctcttagctg

SEQ ID NO: 124751 - DNA, 25 bp, Canis familiaris
gaggttcaggagttgctgttggatg

SEQ ID NO: 124752 - DNA, 25 bp, Canis familiaris
gaggagtaaggcgtgtgccggtgca

SEQ ID NO: 124753 - DNA, 25 bp, Canis familiaris
gaggaggaatatctggccgacgtgg

SEQ ID NO: 124754 - DNA, 25 bp, Canis familiaris
gaggaggacttgggagctggaggtg

SEQ ID NO: 124755 - DNA, 25 bp, Canis familiaris
gaggagggctggaaattgggaggat

SEQ ID NO: 124756 - DNA, 25 bp, Canis familiaris
gaggtagagggagattggaaggttg

SEQ ID NO: 124757 - DNA, 25 bp, Canis familiaris
gaggtaatgaagtccctgggaagtt

SEQ ID NO: 124758 - DNA, 25 bp, Canis familiaris
gaggtcaagaaggcctatgtggagg

SEQ ID NO: 124759 - DNA, 25 bp, Canis familiaris
gaggtatagagaacctatgagaccc

SEQ ID NO: 124760 - DNA, 25 bp, Canis familiaris
gaggtcagggaagctgcacaggccc

SEQ ID NO: 124761 - DNA, 25 bp, Canis familiaris
gaggtcaggtattaccacagggaca

SEQ ID NO: 124762 - DNA, 25 bp, Canis familiaris
gaggtcaggtctagtccacaatgga

SEQ ID NO: 124763 - DNA, 25 bp, Canis familiaris
gaggaaggttctttcacacaggcaa

SEQ ID NO: 124764 - DNA, 25 bp, Canis familiaris
gaggatgaggttccagacatcaaac

SEQ ID NO: 124765 - DNA, 25 bp, Canis familiaris
gaggagcaggtagtacacacagaaa

SEQ ID NO: 124766 - DNA, 25 bp, Canis familiaris
gaggacggtagaacccagacttggt

SEQ ID NO: 124767 - DNA, 25 bp, Canis familiaris
gaggactttggttgatccaacattg

SEQ ID NO: 124768 - DNA, 25 bp, Canis familiaris
gaggaccgtggctgaacattcattc

SEQ ID NO: 124769 - DNA, 25 bp, Canis familiaris
gaggacctcaggtggattatcttct

SEQ ID NO: 124770 - DNA, 25 bp, Canis familiaris
gaggacgtactggtgggatattctg

SEQ ID NO: 124771 - DNA, 25 bp, Canis familiaris
gaggatttaagcttaggatatttta

SEQ ID NO: 124772 - DNA, 25 bp, Canis familiaris
gaggatttagaattagaggtgtctg

SEQ ID NO: 124773 - DNA, 25 bp, Canis familiaris
gaggcacttggaaaaccttggcgac

SEQ ID NO: 124774 - DNA, 25 bp, Canis familiaris
gaggagctgtgtcacaacctggact

SEQ ID NO: 124775 - DNA, 25 bp, Canis familiaris
gaggagatacagcagcagacttggc

SEQ ID NO: 124776 - DNA, 25 bp, Canis familiaris
gaggttgacagatggctcttagtcc

SEQ ID NO: 124777 - DNA, 25 bp, Canis familiaris
gaggtcatgacctaggttcaagatg

SEQ ID NO: 124778 - DNA, 25 bp, Canis familiaris
gaggattgactcttgagtgttcgtg

SEQ ID NO: 124779 - DNA, 25 bp, Canis familiaris
gaggttgatcaagatgttttgcatg

SEQ ID NO: 124780 - DNA, 25 bp, Canis familiaris
gaggttctagaggaaggttgcacgt

SEQ ID NO: 124781 - DNA, 25 bp, Canis familiaris
gaggttctgggtacagtttgcaagt

SEQ ID NO: 124782 - DNA, 25 bp, Canis familiaris
gaggttgtgaggtctcatctttgtt

SEQ ID NO: 124783 - DNA, 25 bp, Canis familiaris
gaggaatgtgcatgaccctctggtg

SEQ ID NO: 124784 - DNA, 25 bp, Canis familiaris
gaggaaggcacaagccagccagact

SEQ ID NO: 124785 - DNA, 25 bp, Canis familiaris
gaggagggacgggatcagtgacgat

SEQ ID NO: 124786 - DNA, 25 bp, Canis familiaris
gaggaagcgacgggaatcggcctcc

SEQ ID NO: 124787 - DNA, 25 bp, Canis familiaris
gaggacgaacaggtgacacgctttc

SEQ ID NO: 124788 - DNA, 25 bp, Canis familiaris
gaggaggaactggggcctctttcac

SEQ ID NO: 124789 - DNA, 25 bp, Canis familiaris
gaggtagggcttagacttccttcag

SEQ ID NO: 124790 - DNA, 25 bp, Canis familiaris
gaggaggaggctgaactgacccaag

SEQ ID NO: 124791 - DNA, 25 bp, Canis familiaris
gaggatggaggacaaggagcggctg

SEQ ID NO: 124792 - DNA, 25 bp, Canis familiaris
gaggaggaagagacacaggggccag

SEQ ID NO: 124793 - DNA, 25 bp, Canis familiaris
gaggaggaagacaagagaggaggag

SEQ ID NO: 124794 - DNA, 25 bp, Canis familiaris
gaggaggagagagaaaggagggata

SEQ ID NO: 124795 - DNA, 25 bp, Canis familiaris
gaggaggaggcagaacagggaggag

SEQ ID NO: 124796 - DNA, 25 bp, Canis familiaris
gaggagtcacctgaagggggaagct

SEQ ID NO: 124797 - DNA, 25 bp, Canis familiaris
gaggagacccagggcagggggaaga

SEQ ID NO: 124798 - DNA, 25 bp, Canis familiaris
gaggaaacctgaggccgggagacaa

SEQ ID NO: 124799 - DNA, 25 bp, Canis familiaris
gaggagtacctagtgagcttaagaa

SEQ ID NO: 124800 - DNA, 25 bp, Canis familiaris
gaggatctatccattactgaaagta

SEQ ID NO: 124801 - DNA, 25 bp, Canis familiaris
gaggcctatgccaagcttctaagag

SEQ ID NO: 124802 - DNA, 25 bp, Canis familiaris
gaggcccattaactttagctatcct

SEQ ID NO: 124803 - DNA, 25 bp, Canis familiaris
gaggcccacttacctgtaaggtctg

SEQ ID NO: 124804 - DNA, 25 bp, Canis familiaris
gaggccccttcacttagtaaatggc

SEQ ID NO: 124805 - DNA, 25 bp, Canis familiaris
gaggcatctcctgagtctaattcac

SEQ ID NO: 124806 - DNA, 25 bp, Canis familiaris
gaggttctccaaattcatggctcat

SEQ ID NO: 124807 - DNA, 25 bp, Canis familiaris
gaggttcttcaaatccaagcagttt

SEQ ID NO: 124808 - DNA, 25 bp, Canis familiaris
gaggttctccactaatcacaaggat

SEQ ID NO: 124809 - DNA, 25 bp, Canis familiaris
gaggctttccacttgtagaaggcag

SEQ ID NO: 124810 - DNA, 25 bp, Canis familiaris
gaggtatactactttaaacagcata

SEQ ID NO: 124811 - DNA, 25 bp, Canis familiaris
gaggtatcaatgtgtgtgaagccca

SEQ ID NO: 124812 - DNA, 25 bp, Canis familiaris
gaggtatcaaatggtgtggagccca

SEQ ID NO: 124813 - DNA, 25 bp, Canis familiaris
gaggatgatctgatgcttggagacc

SEQ ID NO: 124814 - DNA, 25 bp, Canis familiaris
gaggattctgagtcatctggacccc

SEQ ID NO: 124815 - DNA, 25 bp, Canis familiaris
gaggtatctgaagtctgagcccatc

SEQ ID NO: 124816 - DNA, 25 bp, Canis familiaris
gaggacactgtgatatggctgccat

SEQ ID NO: 124817 - DNA, 25 bp, Canis familiaris
gaggacgactctggatagcagccac

SEQ ID NO: 124818 - DNA, 25 bp, Canis familiaris
gaggacgacggcgatgagcaggagc

SEQ ID NO: 124819 - DNA, 25 bp, Canis familiaris
gaggacttcctgtgatgaggcaact

SEQ ID NO: 124820 - DNA, 25 bp, Canis familiaris
gaggagttcctgcaagaggagccag

SEQ ID NO: 124821 - DNA, 25 bp, Canis familiaris
gaggagtttctcttaagtaccagag

SEQ ID NO: 124822 - DNA, 25 bp, Canis familiaris
gaggagtgacttttgaggtattctg

SEQ ID NO: 124823 - DNA, 25 bp, Canis familiaris
gaggctagtttcataggctttcagg

SEQ ID NO: 124824 - DNA, 25 bp, Canis familiaris
gaggcttgtactcctaatgtttagg

SEQ ID NO: 124825 - DNA, 25 bp, Canis familiaris
gaggatattattcctgatattttta

SEQ ID NO: 124826 - DNA, 25 bp, Canis familiaris
gaggatttgattcacgagatttaaa

SEQ ID NO: 124827 - DNA, 25 bp, Canis familiaris
gaggttgtactgcaggaattttcta

SEQ ID NO: 124828 - DNA, 25 bp, Canis familiaris
gaggttgtttgttctagatttattt

SEQ ID NO: 124829 - DNA, 25 bp, Canis familiaris
gaggttttcttttacattcttatat

SEQ ID NO: 124830 - DNA, 25 bp, Canis familiaris
gaggttttcttgatatatatttatt

SEQ ID NO: 124831 - DNA, 25 bp, Canis familiaris
gaggcttctattcttaaatcctatt

SEQ ID NO: 124832 - DNA, 25 bp, Canis familiaris
gaggttgcaagtgttcatactccaa

SEQ ID NO: 124833 - DNA, 25 bp, Canis familiaris
gaggatcgaaggttgctgtcaccgc

SEQ ID NO: 124834 - DNA, 25 bp, Canis familiaris
gaggaggaagactagctgcaccaac

SEQ ID NO: 124835 - DNA, 25 bp, Canis familiaris
gaggaggtgacacattgcctgcaga

SEQ ID NO: 124836 - DNA, 25 bp, Canis familiaris
gaggatgaggccaaagctgcccgag

SEQ ID NO: 124837 - DNA, 25 bp, Canis familiaris
gaggatgagggagcgtgcccagatt

SEQ ID NO: 124838 - DNA, 25 bp, Canis familiaris
gaggaaggtcccagaccacattcta

SEQ ID NO: 124839 - DNA, 25 bp, Canis familiaris
gaggaaatgtccccagaagaatcat

SEQ ID NO: 124840 - DNA, 25 bp, Canis familiaris
gaggaagaccctcagtaaatatatg

SEQ ID NO: 124841 - DNA, 25 bp, Canis familiaris
gaggctaaatccctagtactaatta

SEQ ID NO: 124842 - DNA, 25 bp, Canis familiaris
gaggctaactgggggtaccaagatc

SEQ ID NO: 124843 - DNA, 25 bp, Canis familiaris
gaggctataatacctgggcccagac

SEQ ID NO: 124844 - DNA, 25 bp, Canis familiaris
gaggcaatattctgggggccagagg

SEQ ID NO: 124845 - DNA, 25 bp, Canis familiaris
gaggatgttttgtgtggccatcagg

SEQ ID NO: 124846 - DNA, 25 bp, Canis familiaris
gaggatcttttgtttccatcttaga

SEQ ID NO: 124847 - DNA, 25 bp, Canis familiaris
gaggatcgttttctaatctgtatgc

SEQ ID NO: 124848 - DNA, 25 bp, Canis familiaris
gaggatgtttttctagttgtgcatg

SEQ ID NO: 124849 - DNA, 25 bp, Canis familiaris
gaggactggtttctcagctatctgc

SEQ ID NO: 124850 - DNA, 25 bp, Canis familiaris
gaggatcggtctaccctgatatttg

SEQ ID NO: 124851 - DNA, 25 bp, Canis familiaris
gaggacgggtcaccacgatgagtac

SEQ ID NO: 124852 - DNA, 25 bp, Canis familiaris
gaggactaagaaccacagctgttat

SEQ ID NO: 124853 - DNA, 25 bp, Canis familiaris
gaggacagggaaccaagtgcccttc

SEQ ID NO: 124854 - DNA, 25 bp, Canis familiaris
gaggaagtggattagccctgccctc

SEQ ID NO: 124855 - DNA, 25 bp, Canis familiaris
gaggatgctgggacaagctccagcc

SEQ ID NO: 124856 - DNA, 25 bp, Canis familiaris
gaggatggggacaagctgcgagtac

SEQ ID NO: 124857 - DNA, 25 bp, Canis familiaris
gaggagttctgaagctgtcggtgcc

SEQ ID NO: 124858 - DNA, 25 bp, Canis familiaris
gaggagggctgcatggtagtggtcg

SEQ ID NO: 124859 - DNA, 25 bp, Canis familiaris
gaggagtgtgtgaggccagggaccc

SEQ ID NO: 124860 - DNA, 25 bp, Canis familiaris
gaggagtgctgttctaccagaagcc

SEQ ID NO: 124861 - DNA, 25 bp, Canis familiaris
gaggatcctgagtctatcccatagc

SEQ ID NO: 124862 - DNA, 25 bp, Canis familiaris
gaggactctagatagcccagaggtc

SEQ ID NO: 124863 - DNA, 25 bp, Canis familiaris
gaggatccattgtgaggtcaagtct

SEQ ID NO: 124864 - DNA, 25 bp, Canis familiaris
gatccaggcctgcaaggtcatagtc

SEQ ID NO: 124865 - DNA, 25 bp, Canis familiaris
gatgaagctcctggaagttccgtca

SEQ ID NO: 124866 - DNA, 25 bp, Canis familiaris
gatgagaaccggaagttcaaccaag

SEQ ID NO: 124867 - DNA, 25 bp, Canis familiaris
gatggcccttggcatttaacaaaaa

SEQ ID NO: 124868 - DNA, 25 bp, Canis familiaris
gaggccccttggctgggaagaacaa

SEQ ID NO: 124869 - DNA, 25 bp, Canis familiaris
gatggcctgttgcgtggggaaacca

SEQ ID NO: 124870 - DNA, 25 bp, Canis familiaris
gaggccatgaagggttctggaactc

SEQ ID NO: 124871 - DNA, 25 bp, Canis familiaris
gaggctataactgaccagaacactc

SEQ ID NO: 124872 - DNA, 25 bp, Canis familiaris
gaggaaccactgtgctcatgaaccc

SEQ ID NO: 124873 - DNA, 25 bp, Canis familiaris
gaggaaatccaggagctgcaggccc

SEQ ID NO: 124874 - DNA, 25 bp, Canis familiaris
gaggaagatctggggatgagccgca

SEQ ID NO: 124875 - DNA, 25 bp, Canis familiaris
gaggagttgctgcgtcaagatagat

SEQ ID NO: 124876 - DNA, 25 bp, Canis familiaris
gaggattcatgtctgcttagctcag

SEQ ID NO: 124877 - DNA, 25 bp, Canis familiaris
gaggatagactcttcttactctggg

SEQ ID NO: 124878 - DNA, 25 bp, Canis familiaris
gaggagcacactttctaacctggag

SEQ ID NO: 124879 - DNA, 25 bp, Canis familiaris
gaggatgaacgcttgctagttctgg

SEQ ID NO: 124880 - DNA, 25 bp, Canis familiaris
gaggatgctgatgcggaatgttctg

SEQ ID NO: 124881 - DNA, 25 bp, Canis familiaris
gaggatgcgctcaggagctgggaga

SEQ ID NO: 124882 - DNA, 25 bp, Canis familiaris
gaggagcccaaactgctgcagaaat

SEQ ID NO: 124883 - DNA, 25 bp, Canis familiaris
gaggagagccatgcactggccaaaa

SEQ ID NO: 124884 - DNA, 25 bp, Canis familiaris
gaggaggctcattttggatggaaca

SEQ ID NO: 124885 - DNA, 25 bp, Canis familiaris
gaggatttatcttctgcgcaggaaa

SEQ ID NO: 124886 - DNA, 25 bp, Canis familiaris
gaggttctcacattctaaggcaaat

SEQ ID NO: 124887 - DNA, 25 bp, Canis familiaris
gaggtttcactaataagcagcttct

SEQ ID NO: 124888 - DNA, 25 bp, Canis familiaris
gaggttttctgtaaggtgcatgtct

SEQ ID NO: 124889 - DNA, 25 bp, Canis familiaris
gaggttttggactatgggaggctta

SEQ ID NO: 124890 - DNA, 25 bp, Canis familiaris
gaggattttggagatggaggtgctt

SEQ ID NO: 124891 - DNA, 25 bp, Canis familiaris
gaggctcttttggaagggtcgctcg

SEQ ID NO: 124892 - DNA, 25 bp, Canis familiaris
gaggcacttgtagaattgggagggg

SEQ ID NO: 124893 - DNA, 25 bp, Canis familiaris
gaggccacgtgggggtggaggggag

SEQ ID NO: 124894 - DNA, 25 bp, Canis familiaris
gaggaaggtgtgtagggtggggtgg

SEQ ID NO: 124895 - DNA, 25 bp, Canis familiaris
gaggattgtgttttggtctggggag

SEQ ID NO: 124896 - DNA, 25 bp, Canis familiaris
gaggttgtgttgctgactcaggggc

SEQ ID NO: 124897 - DNA, 25 bp, Canis familiaris
gaggagttgttggaccacagggtgc

SEQ ID NO: 124898 - DNA, 25 bp, Canis familiaris
gaggagctttgagaagtcaggcagt

SEQ ID NO: 124899 - DNA, 25 bp, Canis familiaris
gaggagcatttgccaaggtcagtga

SEQ ID NO: 124900 - DNA, 25 bp, Canis familiaris
gaggagcacaagccatgggagcatc

SEQ ID NO: 124901 - DNA, 25 bp, Canis familiaris
gaggcgaaagtcaaggagtcgttca

SEQ ID NO: 124902 - DNA, 25 bp, Canis familiaris
gaggcctaggacagggtgggtcagt

SEQ ID NO: 124903 - DNA, 25 bp, Canis familiaris
gaggctcttttctgggtggtacaga

SEQ ID NO: 124904 - DNA, 25 bp, Canis familiaris
gaggactttctctggagaggcttgg

SEQ ID NO: 124905 - DNA, 25 bp, Canis familiaris
gaggcacttctaattggagttgatt

SEQ ID NO: 124906 - DNA, 25 bp, Canis familiaris
gaggatcactgtgttcggcttttga

SEQ ID NO: 124907 - DNA, 25 bp, Canis familiaris
gaggccagcagggcctcgggtttgc

SEQ ID NO: 124908 - DNA, 25 bp, Canis familiaris
gaggccaagggcttatcgagggctc

SEQ ID NO: 124909 - DNA, 25 bp, Canis familiaris
gaggcaaaaggctttcagccctcaa

SEQ ID NO: 124910 - DNA, 25 bp, Canis familiaris
gaggagaaggtggggcacacccaga

SEQ ID NO: 124911 - DNA, 25 bp, Canis familiaris
gaggagtaggtttggccagaccagc

SEQ ID NO: 124912 - DNA, 25 bp, Canis familiaris
gaggttgaggctttatccacaccac

SEQ ID NO: 124913 - DNA, 25 bp, Canis familiaris
gaggttgaagtttatgacagccaga

SEQ ID NO: 124914 - DNA, 25 bp, Canis familiaris
gaggaggaacaaaatggcatccagc

SEQ ID NO: 124915 - DNA, 25 bp, Canis familiaris
gaggagtgacaatcaagccacacag

SEQ ID NO: 124916 - DNA, 25 bp, Canis familiaris
gaggatttaatacacaagcagcagc

SEQ ID NO: 124917 - DNA, 25 bp, Canis familiaris
gaggacctaaaccagcaggcagcac

SEQ ID NO: 124918 - DNA, 25 bp, Canis familiaris
gaggagccgtggactcagagtcaac

SEQ ID NO: 124919 - DNA, 25 bp, Canis familiaris
gaggcgctggcaagcccgaatcggt

SEQ ID NO: 124920 - DNA, 25 bp, Canis familiaris
gaggatcagcccccaagaatgggtg

SEQ ID NO: 124921 - DNA, 25 bp, Canis familiaris
gaggatatcccctaaatagcctgtg

SEQ ID NO: 124922 - DNA, 25 bp, Canis familiaris
gaggctccgaccagagatacttgtg

SEQ ID NO: 124923 - DNA, 25 bp, Canis familiaris
gaggccaagcacgacaagtacttag

SEQ ID NO: 124924 - DNA, 25 bp, Canis familiaris
gaggctcaaatcttatcagcaatgc

SEQ ID NO: 124925 - DNA, 25 bp, Canis familiaris
gaggctatgttcctagagcatgctc

SEQ ID NO: 124926 - DNA, 25 bp, Canis familiaris
gaggaagctgtccacagccattgcc

SEQ ID NO: 124927 - DNA, 25 bp, Canis familiaris
gaggagacaatccaagcgcttattt

SEQ ID NO: 124928 - DNA, 25 bp, Canis familiaris
gaggagacattaatgcctggtgttt

SEQ ID NO: 124929 - DNA, 25 bp, Canis familiaris
gaggcatggtttagcacttttgtta

SEQ ID NO: 124930 - DNA, 25 bp, Canis familiaris
gaggatgctgtgttcggctgttatt

SEQ ID NO: 124931 - DNA, 25 bp, Canis familiaris
gaggatgctagcacagcgggaacac

SEQ ID NO: 124932 - DNA, 25 bp, Canis familiaris
gaggatgctcaggactgctgtggac

SEQ ID NO: 124933 - DNA, 25 bp, Canis familiaris
gaggttgaggagcctgctgcaactg

SEQ ID NO: 124934 - DNA, 25 bp, Canis familiaris
gaggcttactggacatctgcatagc

SEQ ID NO: 124935 - DNA, 25 bp, Canis familiaris
gaggatgttcctacatcatctcgct

SEQ ID NO: 124936 - DNA, 25 bp, Canis familiaris
gaggatttcctgcagttcagtctga

SEQ ID NO: 124937 - DNA, 25 bp, Canis familiaris
gaggatttactgagatttatatgag

SEQ ID NO: 124938 - DNA, 25 bp, Canis familiaris
gaggagaccaagatgaactgaatag

SEQ ID NO: 124939 - DNA, 25 bp, Canis familiaris
gaggagggcaaggagatcctggtag

SEQ ID NO: 124940 - DNA, 25 bp, Canis familiaris
gaggaggagaaggccttgtgggaca

SEQ ID NO: 124941 - DNA, 25 bp, Canis familiaris
gaggagggagacatctttctgggct

SEQ ID NO: 124942 - DNA, 25 bp, Canis familiaris
gaggaggaggtcattttctcaaaaa

SEQ ID NO: 124943 - DNA, 25 bp, Canis familiaris
gaggaggagactttcttttctatat

SEQ ID NO: 124944 - DNA, 25 bp, Canis familiaris
gaggagacgcaatcatctttggttt

SEQ ID NO: 124945 - DNA, 25 bp, Canis familiaris
gaggagaacaattgctcttccaata

SEQ ID NO: 124946 - DNA, 25 bp, Canis familiaris
gaggagaatcatttgcattgttatt

SEQ ID NO: 124947 - DNA, 25 bp, Canis familiaris
gaggagctctgaattgcaccttttc

SEQ ID NO: 124948 - DNA, 25 bp, Canis familiaris
gaggaggcagacagcagcatcctta

SEQ ID NO: 124949 - DNA, 25 bp, Canis familiaris
gaggaggcacaatgagacttgaaaa

SEQ ID NO: 124950 - DNA, 25 bp, Canis familiaris
gaggaaccagaaaacctgaaacaat

SEQ ID NO: 124951 - DNA, 25 bp, Canis familiaris
gaggagacgggaacactgctgagaa

SEQ ID NO: 124952 - DNA, 25 bp, Canis familiaris
gaggagaggggcacactgctgagaa

SEQ ID NO: 124953 - DNA, 25 bp, Canis familiaris
gaggagaggggaaccatgctgagaa

SEQ ID NO: 124954 - DNA, 25 bp, Canis familiaris
gaggcggagacacaccagatggtga

SEQ ID NO: 124955 - DNA, 25 bp, Canis familiaris
gggtaggtagaacaaggccaactat

SEQ ID NO: 124956 - DNA, 25 bp, Canis familiaris
gaggaggagtaatggaaggcccctt

SEQ ID NO: 124957 - DNA, 25 bp, Canis familiaris
gaggaggagtagtggcagtgccgcc

SEQ ID NO: 124958 - DNA, 25 bp, Canis familiaris
gaggaggagtagtggcagtgccgcc

SEQ ID NO: 124959 - DNA, 25 bp, Canis familiaris
gaggaggagtagtggcagtgccgcc

SEQ ID NO: 124960 - DNA, 25 bp, Canis familiaris
gaggaggagatccgagaggccttcc

SEQ ID NO: 124961 - DNA, 25 bp, Canis familiaris
gaggaggaactcagtgacctctccc

SEQ ID NO: 124962 - DNA, 25 bp, Canis familiaris
gaggagggaacaggttcagcccacc

SEQ ID NO: 124963 - DNA, 25 bp, Canis familiaris
gatggttggaacattacacccctgc

SEQ ID NO: 124964 - DNA, 25 bp, Canis familiaris
gaggttggtactgttatctcctgtt

SEQ ID NO: 124965 - DNA, 25 bp, Canis familiaris
gaggctgggtggagatttacctgga

SEQ ID NO: 124966 - DNA, 25 bp, Canis familiaris
gaggcatgggtggagcttttgtact

SEQ ID NO: 124967 - DNA, 25 bp, Canis familiaris
gaggagggtgaatgtttcttctttc

SEQ ID NO: 124968 - DNA, 25 bp, Canis familiaris
gatggcacaggttaggtttccttac

SEQ ID NO: 124969 - DNA, 25 bp, Canis familiaris
gaggctgcagttgaagtgtcccagt

SEQ ID NO: 124970 - DNA, 25 bp, Canis familiaris
gaggatcccatctatagttcacaag

SEQ ID NO: 124971 - DNA, 25 bp, Canis familiaris
gaggatgcctacaacagactgacag

SEQ ID NO: 124972 - DNA, 25 bp, Canis familiaris
gaggagcgcatgaaacagaaagcag

SEQ ID NO: 124973 - DNA, 25 bp, Canis familiaris
gaggagctgctcccaggaagagaag

SEQ ID NO: 124974 - DNA, 25 bp, Canis familiaris
gaggatctgtccaaggaagcatctg

SEQ ID NO: 124975 - DNA, 25 bp, Canis familiaris
gaggatattatcaagtgatacacat

SEQ ID NO: 124976 - DNA, 25 bp, Canis familiaris
gaggatcaaatcttctacagcaata

SEQ ID NO: 124977 - DNA, 25 bp, Canis familiaris
gaggatccagtccagaatcgcagat

SEQ ID NO: 124978 - DNA, 25 bp, Canis familiaris
gaggatgcaaaccagcaagtgcgac

SEQ ID NO: 124979 - DNA, 25 bp, Canis familiaris
gaggcagcaacaggtcggggtaatt

SEQ ID NO: 124980 - DNA, 25 bp, Canis familiaris
gaggaagaagctacagggctgtttt

SEQ ID NO: 124981 - DNA, 25 bp, Canis familiaris
gaggaagacaatgaggtgctgatga

SEQ ID NO: 124982 - DNA, 25 bp, Canis familiaris
gaggagttcaatgagctgctgtcca

SEQ ID NO: 124983 - DNA, 25 bp, Canis familiaris
gaggagtctagacacttgtccattc

SEQ ID NO: 124984 - DNA, 25 bp, Canis familiaris
gaggagattgatgcgactttcccca

SEQ ID NO: 124985 - DNA, 25 bp, Canis familiaris
gaggaatttgcggacgtgttgccag

SEQ ID NO: 124986 - DNA, 25 bp, Canis familiaris
gaggaagctggggttgtgtccacag

SEQ ID NO: 124987 - DNA, 25 bp, Canis familiaris
gaggaggcagaggtgggcttctcac

SEQ ID NO: 124988 - DNA, 25 bp, Canis familiaris
gaggagacgagttgctggctccttc

SEQ ID NO: 124989 - DNA, 25 bp, Canis familiaris
gaggataattgttgtgcccacattc

SEQ ID NO: 124990 - DNA, 25 bp, Canis familiaris
gaggatgaaatttgtccccatgggc

SEQ ID NO: 124991 - DNA, 25 bp, Canis familiaris
gaggcagaaaaacgtgcacgaggtg

SEQ ID NO: 124992 - DNA, 25 bp, Canis familiaris
gaggagacactggagttgccgccag

SEQ ID NO: 124993 - DNA, 25 bp, Canis familiaris
gaggagcaatcaggtgtacacggcg

SEQ ID NO: 124994 - DNA, 25 bp, Canis familiaris
gaggaggatgaggggagccgtgcga

SEQ ID NO: 124995 - DNA, 25 bp, Canis familiaris
gaggagagagagagtggcagtgagc

SEQ ID NO: 124996 - DNA, 25 bp, Canis familiaris
gaggagaagaccgaggcgctgagct

SEQ ID NO: 124997 - DNA, 25 bp, Canis familiaris
gaggatgataacagtgcctgctgca

SEQ ID NO: 124998 - DNA, 25 bp, Canis familiaris
gaggagctgaactggctctgcaggg

SEQ ID NO: 124999 - DNA, 25 bp, Canis familiaris
gaggatcgaggcttgatgccttgtg

SEQ ID NO: 125000 - DNA, 25 bp, Canis familiaris
gaggaagaggatgatgctgccgctg

SEQ ID NO: 125001 - DNA, 25 bp, Canis familiaris
gaggagagagcagcagctgccccga

SEQ ID NO: 125002 - DNA, 25 bp, Canis familiaris
gaggatgaagcggatcccaagcggc

SEQ ID NO: 125003 - DNA, 25 bp, Canis familiaris
gaggaaaccctgtctcaaggagaaa

SEQ ID NO: 125004 - DNA, 25 bp, Canis familiaris
gaggaaccaagcattaaggcagtac

SEQ ID NO: 125005 - DNA, 25 bp, Canis familiaris
gaggagtccaaaatatcgagtgaat

SEQ ID NO: 125006 - DNA, 25 bp, Canis familiaris
gaggagtttggacttctgcagaaat

SEQ ID NO: 125007 - DNA, 25 bp, Canis familiaris
gaggagttgtgctctgcactggaaa

SEQ ID NO: 125008 - DNA, 25 bp, Canis familiaris
gaggatgggatcaggagctgggaga

SEQ ID NO: 125009 - DNA, 25 bp, Canis familiaris
gaggcaggtatttggggaggaggaa

SEQ ID NO: 125010 - DNA, 25 bp, Canis familiaris
gaggaggtgttgcagtggagtgatg

SEQ ID NO: 125011 - DNA, 25 bp, Canis familiaris
gaggagcaggggtcagggagctgaa

SEQ ID NO: 125012 - DNA, 25 bp, Canis familiaris
gaggatgccgggcaggacaccaaaa

SEQ ID NO: 125013 - DNA, 25 bp, Canis familiaris
gatggggtgggcaaggaccctaaag

SEQ ID NO: 125014 - DNA, 25 bp, Canis familiaris
gatggaaggggaaaacgtggacaga

SEQ ID NO: 125015 - DNA, 25 bp, Canis familiaris
gaggccgtccgtgaacacggagcag

SEQ ID NO: 125016 - DNA, 25 bp, Canis familiaris
gaggacttacggaagaatcaagagg

SEQ ID NO: 125017 - DNA, 25 bp, Canis familiaris
gaggacttatctcagcaagcacaac

SEQ ID NO: 125018 - DNA, 25 bp, Canis familiaris
gatggccttgttccaagaccagagc

SEQ ID NO: 125019 - DNA, 25 bp, Canis familiaris
gaggcacgtgcttgctgcaagagca

SEQ ID NO: 125020 - DNA, 25 bp, Canis familiaris
gaggctgcagtgtgccagtggcagt

SEQ ID NO: 125021 - DNA, 25 bp, Canis familiaris
gaggccagatgatggagttcaccga

SEQ ID NO: 125022 - DNA, 25 bp, Canis familiaris
gaggccaagatgggaccacctctgt

SEQ ID NO: 125023 - DNA, 25 bp, Canis familiaris
gaggacaggcgaaggcttcctctgt

SEQ ID NO: 125024 - DNA, 25 bp, Canis familiaris
gaggaaggtacagctctcctctgta

SEQ ID NO: 125025 - DNA, 25 bp, Canis familiaris
gaggaagactatacctaaatctcta

SEQ ID NO: 125026 - DNA, 25 bp, Canis familiaris
gaggaggactttgagaaagctttca

SEQ ID NO: 125027 - DNA, 25 bp, Canis familiaris
gaggaggacctagaaactttataag

SEQ ID NO: 125028 - DNA, 25 bp, Canis familiaris
gatggggacccagaaacaggtatca

SEQ ID NO: 125029 - DNA, 25 bp, Canis familiaris
gatggtaacctcagaaagcaagaat

SEQ ID NO: 125030 - DNA, 25 bp, Canis familiaris
gatgactccccgagatacgagaagg

SEQ ID NO: 125031 - DNA, 25 bp, Canis familiaris
gaggctccccgaggtaagacatgat

SEQ ID NO: 125032 - DNA, 25 bp, Canis familiaris
gaggatccctcattcttaaacatga

SEQ ID NO: 125033 - DNA, 25 bp, Canis familiaris
gaggactctacattctttaactccc

SEQ ID NO: 125034 - DNA, 25 bp, Canis familiaris
gaggactgtcacctggttgaacacc

SEQ ID NO: 125035 - DNA, 25 bp, Canis familiaris
gaggactccactcagttggaacaca

SEQ ID NO: 125036 - DNA, 25 bp, Canis familiaris
gaggaacccgtggttggaccacgcg

SEQ ID NO: 125037 - DNA, 25 bp, Canis familiaris
gaggaacccaaggtgggtctccctg

SEQ ID NO: 125038 - DNA, 25 bp, Canis familiaris
gaggacctccaagagggctctactg

SEQ ID NO: 125039 - DNA, 25 bp, Canis familiaris
gaggcaccccaatatagcctgtgca

SEQ ID NO: 125040 - DNA, 25 bp, Canis familiaris
gaggacctcagcatattaccttctg

SEQ ID NO: 125041 - DNA, 25 bp, Canis familiaris
gaggatccctgcatgaaaggcagtt

SEQ ID NO: 125042 - DNA, 25 bp, Canis familiaris
gaggctctttcaaagactggaggga

SEQ ID NO: 125043 - DNA, 25 bp, Canis familiaris
gatgccctaccaactagggagccca

SEQ ID NO: 125044 - DNA, 25 bp, Canis familiaris
gaggcaacagccaaatggggaccca

SEQ ID NO: 125045 - DNA, 25 bp, Canis familiaris
gaggctgaagccaactgggatcatt

SEQ ID NO: 125046 - DNA, 25 bp, Canis familiaris
gaggctgaaagtgccactgccattg

SEQ ID NO: 125047 - DNA, 25 bp, Canis familiaris
gaggagaaactgtcttgctgcaatt

SEQ ID NO: 125048 - DNA, 25 bp, Canis familiaris
gaggacacaatttttcgtttctatt

SEQ ID NO: 125049 - DNA, 25 bp, Canis familiaris
gaggaacgttctatgtgttctcccc

SEQ ID NO: 125050 - DNA, 25 bp, Canis familiaris
gaggccacgtttattgatgcattac

SEQ ID NO: 125051 - DNA, 25 bp, Canis familiaris
gaggccggttgattgttgtttgggg

SEQ ID NO: 125052 - DNA, 25 bp, Canis familiaris
gaggacttttctttttgtagctggg

SEQ ID NO: 125053 - DNA, 25 bp, Canis familiaris
gaggactttgtcagatctttgttgt

SEQ ID NO: 125054 - DNA, 25 bp, Canis familiaris
gaggcttgtttaaactacggatgct

SEQ ID NO: 125055 - DNA, 25 bp, Canis familiaris
gaggccaggttcaggtatccaatgc

SEQ ID NO: 125056 - DNA, 25 bp, Canis familiaris
gaggatccgagtacgtaattcaatc

SEQ ID NO: 125057 - DNA, 25 bp, Canis familiaris
gaggatccagagatgggcaatgtct

SEQ ID NO: 125058 - DNA, 25 bp, Canis familiaris
gaggatccaggaattctagatgaat

SEQ ID NO: 125059 - DNA, 25 bp, Canis familiaris
gaggatgccttgatattagtcatga

SEQ ID NO: 125060 - DNA, 25 bp, Canis familiaris
gaggatccatctctcaagaacatac

SEQ ID NO: 125061 - DNA, 25 bp, Canis familiaris
gaggaacatctgtacacaattcaaa

SEQ ID NO: 125062 - DNA, 25 bp, Canis familiaris
gaggaggctctctacataatccatc

SEQ ID NO: 125063 - DNA, 25 bp, Canis familiaris
gaggaggcatctaacaaactctgct

SEQ ID NO: 125064 - DNA, 25 bp, Canis familiaris
gaggatggagcgcacgaagtcacct

SEQ ID NO: 125065 - DNA, 25 bp, Canis familiaris
gaggcgggcctttgaagtcgccaat

SEQ ID NO: 125066 - DNA, 25 bp, Canis familiaris
gaggctggccttgggaagagctgca

SEQ ID NO: 125067 - DNA, 25 bp, Canis familiaris
gaggcatgtctctggagaagcaggc

SEQ ID NO: 125068 - DNA, 25 bp, Canis familiaris
gaggcgctatgatcggaagcagagt

SEQ ID NO: 125069 - DNA, 25 bp, Canis familiaris
tgcatcgtaagatcttgaaggttaa

SEQ ID NO: 125070 - DNA, 25 bp, Canis familiaris
gatagtttgctacataaggcttaac

SEQ ID NO: 125071 - DNA, 25 bp, Canis familiaris
gatcgtttgatttaaacccttagca

SEQ ID NO: 125072 - DNA, 25 bp, Canis familiaris
gatcgaattggttatcaaccccaac

SEQ ID NO: 125073 - DNA, 25 bp, Canis familiaris
gaggaagtagatatatacccacaaa

SEQ ID NO: 125074 - DNA, 25 bp, Canis familiaris
gaggaagtttgcacattcactcaga

SEQ ID NO: 125075 - DNA, 25 bp, Canis familiaris
gaggctagtggtcacaagcactcta

SEQ ID NO: 125076 - DNA, 25 bp, Canis familiaris
gaggcccatggggatacgaatctga

SEQ ID NO: 125077 - DNA, 25 bp, Canis familiaris
gatgccagcaaggtggtcacggtgt

SEQ ID NO: 125078 - DNA, 25 bp, Canis familiaris
gaggcagcagttgggaacggccatc

SEQ ID NO: 125079 - DNA, 25 bp, Canis familiaris
gaggagaattgtgggcactggcccc

SEQ ID NO: 125080 - DNA, 25 bp, Canis familiaris
gaggagagggatggcagcctgaacc

SEQ ID NO: 125081 - DNA, 25 bp, Canis familiaris
gaggagatgtggagacagatggaca

SEQ ID NO: 125082 - DNA, 25 bp, Canis familiaris
gaggaatagagaaccagagaactgg

SEQ ID NO: 125083 - DNA, 25 bp, Canis familiaris
gaggaagggttccgaggactctgga

SEQ ID NO: 125084 - DNA, 25 bp, Canis familiaris
gaggaagaagttattggacactgga

SEQ ID NO: 125085 - DNA, 25 bp, Canis familiaris
gaggacgcagtgattgtaggcaacg

SEQ ID NO: 125086 - DNA, 25 bp, Canis familiaris
gaggactcaggcattgctgaaggag

SEQ ID NO: 125087 - DNA, 25 bp, Canis familiaris
gaggaaactgtgtctcagaagtgaa

SEQ ID NO: 125088 - DNA, 25 bp, Canis familiaris
gaggagacagcttggctaaaatgat

SEQ ID NO: 125089 - DNA, 25 bp, Canis familiaris
gaggagccagcaggtgtataaaaca

SEQ ID NO: 125090 - DNA, 25 bp, Canis familiaris
gaggaccccggagtgaaaagcgtca

SEQ ID NO: 125091 - DNA, 25 bp, Canis familiaris
gaggagactccactgagctggaaag

SEQ ID NO: 125092 - DNA, 25 bp, Canis familiaris
gaggacactccaatggcgtcgaaat

SEQ ID NO: 125093 - DNA, 25 bp, Canis familiaris
gaggccattccctggcctagaatta

SEQ ID NO: 125094 - DNA, 25 bp, Canis familiaris
gaggagatttcagatggactaattt

SEQ ID NO: 125095 - DNA, 25 bp, Canis familiaris
gaggcaatcaaacaagaatcactta

SEQ ID NO: 125096 - DNA, 25 bp, Canis familiaris
gaggaataaacaccatgataccatt

SEQ ID NO: 125097 - DNA, 25 bp, Canis familiaris
gaggaaaaaagctgctactctcagt

SEQ ID NO: 125098 - DNA, 25 bp, Canis familiaris
gaggaaaacaacttgggtctgagaa

SEQ ID NO: 125099 - DNA, 25 bp, Canis familiaris
gaggcaaaacacatctgggcttacc

SEQ ID NO: 125100 - DNA, 25 bp, Canis familiaris
gaggacaccaagatctgagtctgta

SEQ ID NO: 125101 - DNA, 25 bp, Canis familiaris
gaggacactcaatttgttgttaagt

SEQ ID NO: 125102 - DNA, 25 bp, Canis familiaris
gaggacctagaaactttataagagc

SEQ ID NO: 125103 - DNA, 25 bp, Canis familiaris
gaggacctcatccaatccatttaaa

SEQ ID NO: 125104 - DNA, 25 bp, Canis familiaris
gaggagcccatctgaagagttaaaa

SEQ ID NO: 125105 - DNA, 25 bp, Canis familiaris
gaggaggccacaagaaggttgaagg

SEQ ID NO: 125106 - DNA, 25 bp, Canis familiaris
gaggagaccatcaagaagcggttgg

SEQ ID NO: 125107 - DNA, 25 bp, Canis familiaris
gaggagacacacgaaatgccgttgt

SEQ ID NO: 125108 - DNA, 25 bp, Canis familiaris
gaggatggtcactaaagtctgcttt

SEQ ID NO: 125109 - DNA, 25 bp, Canis familiaris
gaggctggaactgcagagatctgct

SEQ ID NO: 125110 - DNA, 25 bp, Canis familiaris
gaggagcaagacgtcagcactctgc

SEQ ID NO: 125111 - DNA, 25 bp, Canis familiaris
gaggagaagtcagtcagctatttta

SEQ ID NO: 125112 - DNA, 25 bp, Canis familiaris
gaggaagtccagtagccatcttgta

SEQ ID NO: 125113 - DNA, 25 bp, Canis familiaris
gaggaagtccagtaatatattgtgc

SEQ ID NO: 125114 - DNA, 25 bp, Canis familiaris
gaggagaaccaggatttgctcttgc

SEQ ID NO: 125115 - DNA, 25 bp, Canis familiaris
gaggaggacaaggattgctctgcct

SEQ ID NO: 125116 - DNA, 25 bp, Canis familiaris
gaggaggagaaacctctgctgccct

SEQ ID NO: 125117 - DNA, 25 bp, Canis familiaris
gaggagaaggaagtctctggtgcct

SEQ ID NO: 125118 - DNA, 25 bp, Canis familiaris
gaggagcaagtgtattgccccgact

SEQ ID NO: 125119 - DNA, 25 bp, Canis familiaris
gaggacaaatgcattgctcctaaat

SEQ ID NO: 125120 - DNA, 25 bp, Canis familiaris
gaggagtaatggctgcttcccattc

SEQ ID NO: 125121 - DNA, 25 bp, Canis familiaris
gaggagtgaatggtgcatctatgca

SEQ ID NO: 125122 - DNA, 25 bp, Canis familiaris
gaggcatgatgaagactctcctgct

SEQ ID NO: 125123 - DNA, 25 bp, Canis familiaris
gatgaatggaagtcattacagctac

SEQ ID NO: 125124 - DNA, 25 bp, Canis familiaris
gatgccggatttgaacctccgtagg

SEQ ID NO: 125125 - DNA, 25 bp, Canis familiaris
gaggaggtttcgacacctcctgtca

SEQ ID NO: 125126 - DNA, 25 bp, Canis familiaris
gaggaggagatgtctgtacccctga

SEQ ID NO: 125127 - DNA, 25 bp, Canis familiaris
gaggaggggaggtacattctgcagg

SEQ ID NO: 125128 - DNA, 25 bp, Canis familiaris
gaggagtgcgtccgaagcattcagg

SEQ ID NO: 125129 - DNA, 25 bp, Canis familiaris
gaggagccgtgaatgaactcgcagg

SEQ ID NO: 125130 - DNA, 25 bp, Canis familiaris
gaggaccacagaagtgacccaggtg

SEQ ID NO: 125131 - DNA, 25 bp, Canis familiaris
gaggaccagagggctaaatccctga

SEQ ID NO: 125132 - DNA, 25 bp, Canis familiaris
gaggacagaggcgctaaatccatcg

SEQ ID NO: 125133 - DNA, 25 bp, Canis familiaris
gaggcatagagtccctagaaacatg

SEQ ID NO: 125134 - DNA, 25 bp, Canis familiaris
gaggcacaatgagacttgaaaaaag

SEQ ID NO: 125135 - DNA, 25 bp, Canis familiaris
gaggcactctgcttaattagaaacc

SEQ ID NO: 125136 - DNA, 25 bp, Canis familiaris
gatgacagacatgctaattttaaca

SEQ ID NO: 125137 - DNA, 25 bp, Canis familiaris
gaggctacattcaaagtcactacca

SEQ ID NO: 125138 - DNA, 25 bp, Canis familiaris
gaggacacactgtggtcagctacca

SEQ ID NO: 125139 - DNA, 25 bp, Canis familiaris
gaggaacctgcgaaggacttcaatc

SEQ ID NO: 125140 - DNA, 25 bp, Canis familiaris
gaggaatccctaaggtggctcaagc

SEQ ID NO: 125141 - DNA, 25 bp, Canis familiaris
gaggaagctccaaaggtatgcgaag

SEQ ID NO: 125142 - DNA, 25 bp, Canis familiaris
gaggaggtcagaaaggccagggaga

SEQ ID NO: 125143 - DNA, 25 bp, Canis familiaris
gaggagaggcagaagggagacaggg

SEQ ID NO: 125144 - DNA, 25 bp, Canis familiaris
gatggaaggtgcagggagaggggac

SEQ ID NO: 125145 - DNA, 25 bp, Canis familiaris
gaggagcaggtgaggcataggaagg

SEQ ID NO: 125146 - DNA, 25 bp, Canis familiaris
gaggaggtgaaagtgcaatgctggg

SEQ ID NO: 125147 - DNA, 25 bp, Canis familiaris
gaggagggaataatcagtgctgctt

SEQ ID NO: 125148 - DNA, 25 bp, Canis familiaris
gaggaggtggattagagctcttacc

SEQ ID NO: 125149 - DNA, 25 bp, Canis familiaris
gaggaggtagatttggaacttccaa

SEQ ID NO: 125150 - DNA, 25 bp, Canis familiaris
gaggaggatactcagagaagctctc

SEQ ID NO: 125151 - DNA, 25 bp, Canis familiaris
gaggagtcttctcaggactgcatcc

SEQ ID NO: 125152 - DNA, 25 bp, Canis familiaris
gaggcactattccagggactcattg

SEQ ID NO: 125153 - DNA, 25 bp, Canis familiaris
gaggactatttgctttctctgtggt

SEQ ID NO: 125154 - DNA, 25 bp, Canis familiaris
gaggactgttagtgtgtctctcttg

SEQ ID NO: 125155 - DNA, 25 bp, Canis familiaris
gaggccttctagtcttgggttaggt

SEQ ID NO: 125156 - DNA, 25 bp, Canis familiaris
gaggccctgtaatttggaaatgagt

SEQ ID NO: 125157 - DNA, 25 bp, Canis familiaris
gaggccctgagttttgtaatcgatt

SEQ ID NO: 125158 - DNA, 25 bp, Canis familiaris
gaggcccgcagtgaggaaatccgtt

SEQ ID NO: 125159 - DNA, 25 bp, Canis familiaris
gaggcccccaaaggacaagacatgg

SEQ ID NO: 125160 - DNA, 25 bp, Canis familiaris
gaggcccctcagaaccatcaagggg

SEQ ID NO: 125161 - DNA, 25 bp, Canis familiaris
gaggacctctagaaccatttggggc

SEQ ID NO: 125162 - DNA, 25 bp, Canis familiaris
gaggcaattttgtacctttgtggag

SEQ ID NO: 125163 - DNA, 25 bp, Canis familiaris
gaggaacatttttacatttggatct

SEQ ID NO: 125164 - DNA, 25 bp, Canis familiaris
gaggaacttcatactgcacattttt

SEQ ID NO: 125165 - DNA, 25 bp, Canis familiaris
gaggaactggatgtcaaatcttgat

SEQ ID NO: 125166 - DNA, 25 bp, Canis familiaris
gaggcaagccagtcctaacattgta

SEQ ID NO: 125167 - DNA, 25 bp, Canis familiaris
gaggacccagaaggaatcaatgcta

SEQ ID NO: 125168 - DNA, 25 bp, Canis familiaris
gaggaccacggtgggctaatggaaa

SEQ ID NO: 125169 - DNA, 25 bp, Canis familiaris
gaggagcgcctgagggtaacagcaa

SEQ ID NO: 125170 - DNA, 25 bp, Canis familiaris
gatggcatggacagagcacgataac

SEQ ID NO: 125171 - DNA, 25 bp, Canis familiaris
gatggatggacaaggagttaggtgg

SEQ ID NO: 125172 - DNA, 25 bp, Canis familiaris
gatggagggaagtggaaagatgagc

SEQ ID NO: 125173 - DNA, 25 bp, Canis familiaris
gaggagtggtggtggacgagagagg

SEQ ID NO: 125174 - DNA, 25 bp, Canis familiaris
gaggagaggggcaggagcaggagca

SEQ ID NO: 125175 - DNA, 25 bp, Canis familiaris
gaggcaggggtggaggacgggaatc

SEQ ID NO: 125176 - DNA, 25 bp, Canis familiaris
gaggcggggggaaaatggcagacag

SEQ ID NO: 125177 - DNA, 25 bp, Canis familiaris
gaggccgggagacaagaaacagagg

SEQ ID NO: 125178 - DNA, 25 bp, Canis familiaris
gaggccccaaaggaaaaagcacaag

SEQ ID NO: 125179 - DNA, 25 bp, Canis familiaris
gaggctccgggaggaaaacaagcaa

SEQ ID NO: 125180 - DNA, 25 bp, Canis familiaris
gaggccccgccaagaaacaaaagca

SEQ ID NO: 125181 - DNA, 25 bp, Canis familiaris
gaggccgcccgaaggatcaaaacgg

SEQ ID NO: 125182 - DNA, 25 bp, Canis familiaris
gaggccccactgatgggaagaactt

SEQ ID NO: 125183 - DNA, 25 bp, Canis familiaris
gaggccctactatgaggtctacacc

SEQ ID NO: 125184 - DNA, 25 bp, Canis familiaris
gaggcctcttcagcaaaggcccacc

SEQ ID NO: 125185 - DNA, 25 bp, Canis familiaris
gaggacatctgtggccattacggcc

SEQ ID NO: 125186 - DNA, 25 bp, Canis familiaris
gaggacaccctcaatgctagggggt

SEQ ID NO: 125187 - DNA, 25 bp, Canis familiaris
gaggacaccctcatggtggactggt

SEQ ID NO: 125188 - DNA, 25 bp, Canis familiaris
gaggagcaccgtagtagtgcgacag

SEQ ID NO: 125189 - DNA, 25 bp, Canis familiaris
gaggcagccctctagtaaggcaatg

SEQ ID NO: 125190 - DNA, 25 bp, Canis familiaris
gaggaccagccattgatttggatgt

SEQ ID NO: 125191 - DNA, 25 bp, Canis familiaris
gaggacagagtctgctttgggggca

SEQ ID NO: 125192 - DNA, 25 bp, Canis familiaris
gaggacgctttgactattggggcca

SEQ ID NO: 125193 - DNA, 25 bp, Canis familiaris
gatggaacttggattcagtcggccc

SEQ ID NO: 125194 - DNA, 25 bp, Canis familiaris
gaggactttggcattgtgtctggaa

SEQ ID NO: 125195 - DNA, 25 bp, Canis familiaris
gaggacatttgtttctggtgcttgt

SEQ ID NO: 125196 - DNA, 25 bp, Canis familiaris
gaggagtacgtcatcatgggctatg

SEQ ID NO: 125197 - DNA, 25 bp, Canis familiaris
gaggagtacgtcatcatgggctatg

SEQ ID NO: 125198 - DNA, 25 bp, Canis familiaris
gaggagtacgtcatcatgggctatg

SEQ ID NO: 125199 - DNA, 25 bp, Canis familiaris
gaggagccctgtggttggatgtatg

SEQ ID NO: 125200 - DNA, 25 bp, Canis familiaris
gaggagccactgattctggtgtggt

SEQ ID NO: 125201 - DNA, 25 bp, Canis familiaris
gaggcaggaatgctatggctggggt

SEQ ID NO: 125202 - DNA, 25 bp, Canis familiaris
gaggacgactcggcgggaggagtgt

SEQ ID NO: 125203 - DNA, 25 bp, Canis familiaris
gaggacagcactcaggagggtactt

SEQ ID NO: 125204 - DNA, 25 bp, Canis familiaris
gaggctgccactggatggagggccc

SEQ ID NO: 125205 - DNA, 25 bp, Canis familiaris
gaggcatgaaggggccagggcagcg

SEQ ID NO: 125206 - DNA, 25 bp, Canis familiaris
gaggcaggaggaggtcaggcagcag

SEQ ID NO: 125207 - DNA, 25 bp, Canis familiaris
gaggcaaagggactgcagcctgcga

SEQ ID NO: 125208 - DNA, 25 bp, Canis familiaris
gaggcgaaggtggaggccctgaacg

SEQ ID NO: 125209 - DNA, 25 bp, Canis familiaris
gaggcgagaaggggctttcgagagc

SEQ ID NO: 125210 - DNA, 25 bp, Canis familiaris
gaggccaaaatgcagcacttggaga

SEQ ID NO: 125211 - DNA, 25 bp, Canis familiaris
gatgctacaaaacaggggggaccca

SEQ ID NO: 125212 - DNA, 25 bp, Canis familiaris
gaggaaagaagccaggcgagggccc

SEQ ID NO: 125213 - DNA, 25 bp, Canis familiaris
gaggaaggccgacgtcaaggagctc

SEQ ID NO: 125214 - DNA, 25 bp, Canis familiaris
gaggaaggccgaggacgaggcccgg

SEQ ID NO: 125215 - DNA, 25 bp, Canis familiaris
gaggccggggaggaggagttcctgg

SEQ ID NO: 125216 - DNA, 25 bp, Canis familiaris
gaggagcggggaggctatcagcttc

SEQ ID NO: 125217 - DNA, 25 bp, Canis familiaris
gaggctgggaagtgccacagtctgc

SEQ ID NO: 125218 - DNA, 25 bp, Canis familiaris
gaggcctgaacgtgtgaagtgcgat

SEQ ID NO: 125219 - DNA, 25 bp, Canis familiaris
gaggaccaccaaagtgaagcctgct

SEQ ID NO: 125220 - DNA, 25 bp, Canis familiaris
gaggaccatcctagaggaacatctg

SEQ ID NO: 125221 - DNA, 25 bp, Canis familiaris
gaggagccattccagagtgggttcc

SEQ ID NO: 125222 - DNA, 25 bp, Canis familiaris
gaggagccaatggggcgaagctacc

SEQ ID NO: 125223 - DNA, 25 bp, Canis familiaris
gaggagcctggccaggctgcaagct

SEQ ID NO: 125224 - DNA, 25 bp, Canis familiaris
gaggagcatgcatgctgggcgcaat

SEQ ID NO: 125225 - DNA, 25 bp, Canis familiaris
gaggcagcatgcttgggctgatcca

SEQ ID NO: 125226 - DNA, 25 bp, Canis familiaris
gatggcagcatgtctgtgactggaa

SEQ ID NO: 125227 - DNA, 25 bp, Canis familiaris
gaggcagcagcaaaggtggaaccag

SEQ ID NO: 125228 - DNA, 25 bp, Canis familiaris
gaggcattgtactagatgaaaccat

SEQ ID NO: 125229 - DNA, 25 bp, Canis familiaris
gaggcaagtcactgtatacctatac

SEQ ID NO: 125230 - DNA, 25 bp, Canis familiaris
gaggaagtatctctaatgccttagt

SEQ ID NO: 125231 - DNA, 25 bp, Canis familiaris
gaggaagatgttcaacgacgtcgct

SEQ ID NO: 125232 - DNA, 25 bp, Canis familiaris
gaggcacagttttaacacaggggct

SEQ ID NO: 125233 - DNA, 25 bp, Canis familiaris
gaggccacttttaggcaacaggctt

SEQ ID NO: 125234 - DNA, 25 bp, Canis familiaris
gatggccagctgattagttccggag

SEQ ID NO: 125235 - DNA, 25 bp, Canis familiaris
gaggaagctgaacggttccaaggca

SEQ ID NO: 125236 - DNA, 25 bp, Canis familiaris
gaggaaggtcggcttgctagaggac

SEQ ID NO: 125237 - DNA, 25 bp, Canis familiaris
gaggaaagtcgagatggccgtgtgg

SEQ ID NO: 125238 - DNA, 25 bp, Canis familiaris
gaggaaacttcacatagccgtgctc

SEQ ID NO: 125239 - DNA, 25 bp, Canis familiaris
gaggaagacccacatcaacattgtg

SEQ ID NO: 125240 - DNA, 25 bp, Canis familiaris
gaggacaatccttttcacacttgga

SEQ ID NO: 125241 - DNA, 25 bp, Canis familiaris
gaggactaattatttcacatcatta

SEQ ID NO: 125242 - DNA, 25 bp, Canis familiaris
gaggactaaaatttggagatatcac

SEQ ID NO: 125243 - DNA, 25 bp, Canis familiaris
gaggagctgaaaattgttaccaaca

SEQ ID NO: 125244 - DNA, 25 bp, Canis familiaris
gaggaagacagaatcatttaccagg

SEQ ID NO: 125245 - DNA, 25 bp, Canis familiaris
gaggaagacagctatagccgcctca

SEQ ID NO: 125246 - DNA, 25 bp, Canis familiaris
gaggacaaacctagcacagcctcac

SEQ ID NO: 125247 - DNA, 25 bp, Canis familiaris
gaggacaaccctaagtgtcacctta

SEQ ID NO: 125248 - DNA, 25 bp, Canis familiaris
gaggaaatgtcctaaggccaccata

SEQ ID NO: 125249 - DNA, 25 bp, Canis familiaris
gaggaaataccaaaacccaaatctg

SEQ ID NO: 125250 - DNA, 25 bp, Canis familiaris
gaggaatctaaacaagccaaactta

SEQ ID NO: 125251 - DNA, 25 bp, Canis familiaris
gggttgtaaggttgagcctcacgtt

SEQ ID NO: 125252 - DNA, 25 bp, Canis familiaris
gatggtttcaaagatcccttcgtat

SEQ ID NO: 125253 - DNA, 25 bp, Canis familiaris
gaggcaaggcaaagttcctctccgt

SEQ ID NO: 125254 - DNA, 25 bp, Canis familiaris
gaggcgggcagaggtagcctttggt

SEQ ID NO: 125255 - DNA, 25 bp, Canis familiaris
gaggcggtggaactgcagcaccgtg

SEQ ID NO: 125256 - DNA, 25 bp, Canis familiaris
gaggctgtgggtagtgagcacggtg

SEQ ID NO: 125257 - DNA, 25 bp, Canis familiaris
gaggctgggcgtagaaactggctga

SEQ ID NO: 125258 - DNA, 25 bp, Canis familiaris
gaggctctgggtcagaactggctca

SEQ ID NO: 125259 - DNA, 25 bp, Canis familiaris
gaggagctgggcgggaagctcagcc

SEQ ID NO: 125260 - DNA, 25 bp, Canis familiaris
gaggagctggagctgtcaggcaacc

SEQ ID NO: 125261 - DNA, 25 bp, Canis familiaris
gaggacatgggactgaaggaccccg

SEQ ID NO: 125262 - DNA, 25 bp, Canis familiaris
gaggactgaagacgagaacccgtgc

SEQ ID NO: 125263 - DNA, 25 bp, Canis familiaris
gaggaccagagataatcacagcttg

SEQ ID NO: 125264 - DNA, 25 bp, Canis familiaris
gaggaccagcgctggatcaacttag

SEQ ID NO: 125265 - DNA, 25 bp, Canis familiaris
gaggaagagcactggcatcctttga

SEQ ID NO: 125266 - DNA, 25 bp, Canis familiaris
gaggaagagcctggcttcgtttggc

SEQ ID NO: 125267 - DNA, 25 bp, Canis familiaris
gaggaaaccattctctgttttatat

SEQ ID NO: 125268 - DNA, 25 bp, Canis familiaris
gaggaaagccttattgtgtgttctt

SEQ ID NO: 125269 - DNA, 25 bp, Canis familiaris
gaggaacccttgattatatactttg

SEQ ID NO: 125270 - DNA, 25 bp, Canis familiaris
gatggaaccgttgtttttctggagg

SEQ ID NO: 125271 - DNA, 25 bp, Canis familiaris
gaggaagttgtatctatccccggaa

SEQ ID NO: 125272 - DNA, 25 bp, Canis familiaris
gaggaagctttatcaacctccacca

SEQ ID NO: 125273 - DNA, 25 bp, Canis familiaris
gaggctgagttctcaaacctcacac

SEQ ID NO: 125274 - DNA, 25 bp, Canis familiaris
gatggggtactcggaaattcaacac

SEQ ID NO: 125275 - DNA, 25 bp, Canis familiaris
gatggtggtacgtctgttggtaaca

SEQ ID NO: 125276 - DNA, 25 bp, Canis familiaris
gatggggtcaggaaggtgggaacta

SEQ ID NO: 125277 - DNA, 25 bp, Canis familiaris
gatggggtcaaatgaaggtgaattc

SEQ ID NO: 125278 - DNA, 25 bp, Canis familiaris
gaggaagtgcagacacccaggtata

SEQ ID NO: 125279 - DNA, 25 bp, Canis familiaris
gaggcgagatcaacccctcaagatt

SEQ ID NO: 125280 - DNA, 25 bp, Canis familiaris
gaggcgagaacccgcatggggattg

SEQ ID NO: 125281 - DNA, 25 bp, Canis familiaris
gaggcggagaacaatatggcggatg

SEQ ID NO: 125282 - DNA, 25 bp, Canis familiaris
gaggcgggaaaaatgtcagtgatgg

SEQ ID NO: 125283 - DNA, 25 bp, Canis familiaris
gaggccggaaacttactggtgtgag

SEQ ID NO: 125284 - DNA, 25 bp, Canis familiaris
gaggcttaaaagtaacgtggctggg

SEQ ID NO: 125285 - DNA, 25 bp, Canis familiaris
gaggctcccagacggaaggggtggg

SEQ ID NO: 125286 - DNA, 25 bp, Canis familiaris
gaggctgaccgttaacttggagggg

SEQ ID NO: 125287 - DNA, 25 bp, Canis familiaris
gaggcaaccgttaactaccagaagg

SEQ ID NO: 125288 - DNA, 25 bp, Canis familiaris
gaggcaacagccattaaaaagagag

SEQ ID NO: 125289 - DNA, 25 bp, Canis familiaris
gaggcatacaccacttagtaaacta

SEQ ID NO: 125290 - DNA, 25 bp, Canis familiaris
gaggaaacaacggtagagacaacta

SEQ ID NO: 125291 - DNA, 25 bp, Canis familiaris
gaggacacataaggttctgagaaac

SEQ ID NO: 125292 - DNA, 25 bp, Canis familiaris
gaggaatcatacagatgctgctata

SEQ ID NO: 125293 - DNA, 25 bp, Canis familiaris
gaggaattgagtggtggcagattga

SEQ ID NO: 125294 - DNA, 25 bp, Canis familiaris
gaggaatattgtcgtgcgcacactg

SEQ ID NO: 125295 - DNA, 25 bp, Canis familiaris
gaggaagagttagtgcagtcaaggc

SEQ ID NO: 125296 - DNA, 25 bp, Canis familiaris
gaggacctcagtatgcattgtaccc

SEQ ID NO: 125297 - DNA, 25 bp, Canis familiaris
gaggacctatgaagttcttaccaat

SEQ ID NO: 125298 - DNA, 25 bp, Canis familiaris
gatggaccctgaaggacattcccag

SEQ ID NO: 125299 - DNA, 25 bp, Canis familiaris
gatggaatcctgtggtttcctgacc

SEQ ID NO: 125300 - DNA, 25 bp, Canis familiaris
gaggaacagcttatgtggtctatga

SEQ ID NO: 125301 - DNA, 25 bp, Canis familiaris
gaggaagcaattgatggtggccatg

SEQ ID NO: 125302 - DNA, 25 bp, Canis familiaris
gaggaagcggaaatgcctggcctgc

SEQ ID NO: 125303 - DNA, 25 bp, Canis familiaris
gaggaaagggcagtcctggcccata

SEQ ID NO: 125304 - DNA, 25 bp, Canis familiaris
gatggagaaggtgcccttgggctca

SEQ ID NO: 125305 - DNA, 25 bp, Canis familiaris
gaggctaatgggacccttgcaatgc

SEQ ID NO: 125306 - DNA, 25 bp, Canis familiaris
gaggaccatgaaactccgagcaatg

SEQ ID NO: 125307 - DNA, 25 bp, Canis familiaris
gatggaacattagatccaatggatg

SEQ ID NO: 125308 - DNA, 25 bp, Canis familiaris
gaggaactatgtcaaacatctgagt

SEQ ID NO: 125309 - DNA, 25 bp, Canis familiaris
gaggacacttgtcacacatcagctg

SEQ ID NO: 125310 - DNA, 25 bp, Canis familiaris
gaggacctgctgaataacgcagccc

SEQ ID NO: 125311 - DNA, 25 bp, Canis familiaris
gaggagcctctatgactgtgacctc

SEQ ID NO: 125312 - DNA, 25 bp, Canis familiaris
gaggacaccagttgggtgcacctcc

SEQ ID NO: 125313 - DNA, 25 bp, Canis familiaris
gaggcctccaggaaagtgacctcgc

SEQ ID NO: 125314 - DNA, 25 bp, Canis familiaris
gaggccccagcagaagaggcacctc

SEQ ID NO: 125315 - DNA, 25 bp, Canis familiaris
gaggctgaccacggacaaggccaac

SEQ ID NO: 125316 - DNA, 25 bp, Canis familiaris
gaggcagacaagagtaaggcacacc

SEQ ID NO: 125317 - DNA, 25 bp, Canis familiaris
gaggaccactgcattacaggcacac

SEQ ID NO: 125318 - DNA, 25 bp, Canis familiaris
gatggcaatactattcaaagcccaa

SEQ ID NO: 125319 - DNA, 25 bp, Canis familiaris
gaggcgttcatagacgtagcacaca

SEQ ID NO: 125320 - DNA, 25 bp, Canis familiaris
gaggcaggtagagacagtacatcat

SEQ ID NO: 125321 - DNA, 25 bp, Canis familiaris
gaggcaacaaatgccctagcatgca

SEQ ID NO: 125322 - DNA, 25 bp, Canis familiaris
gaggaacagaactgcactcagtgca

SEQ ID NO: 125323 - DNA, 25 bp, Canis familiaris
gaggcccagagagttgactttgctt

SEQ ID NO: 125324 - DNA, 25 bp, Canis familiaris
gaggacacacaatttcctttctgtg

SEQ ID NO: 125325 - DNA, 25 bp, Canis familiaris
gaggaacaccagcattcttaatgta

SEQ ID NO: 125326 - DNA, 25 bp, Canis familiaris
gaggaacctcaatcttgtgactttt

SEQ ID NO: 125327 - DNA, 25 bp, Canis familiaris
gaggacccacagtacttgtccagtc

SEQ ID NO: 125328 - DNA, 25 bp, Canis familiaris
gaggcaccagaggatacaggacgag

SEQ ID NO: 125329 - DNA, 25 bp, Canis familiaris
gaggcgccgaaatgcaggcaaggac

SEQ ID NO: 125330 - DNA, 25 bp, Canis familiaris
gaggcagcctgctagaaggcagggg

SEQ ID NO: 125331 - DNA, 25 bp, Canis familiaris
gaggcagcactgcataagtccggtg

SEQ ID NO: 125332 - DNA, 25 bp, Canis familiaris
gaggcagatccgagagttgctggag

SEQ ID NO: 125333 - DNA, 25 bp, Canis familiaris
gaggcacatccgaagcgagtttggg

SEQ ID NO: 125334 - DNA, 25 bp, Canis familiaris
gatggacatggcaggtggggctggg

SEQ ID NO: 125335 - DNA, 25 bp, Canis familiaris
gaggcaagccgggtgaggcaggggc

SEQ ID NO: 125336 - DNA, 25 bp, Canis familiaris
gaggaagccgaggcgtcacaggtga

SEQ ID NO: 125337 - DNA, 25 bp, Canis familiaris
gaggacccatatggcgtagcagtgg

SEQ ID NO: 125338 - DNA, 25 bp, Canis familiaris
gaggacccaaaggtgatcttggccc

SEQ ID NO: 125339 - DNA, 25 bp, Canis familiaris
gatggaataaaacctgtcttgcccc

SEQ ID NO: 125340 - DNA, 25 bp, Canis familiaris
gatgtaaatagtgttgtccctccca

SEQ ID NO: 125341 - DNA, 25 bp, Canis familiaris
gatggaattgttcatttgccgtgcc

SEQ ID NO: 125342 - DNA, 25 bp, Canis familiaris
gatggaatgttttgtttacttcctc

SEQ ID NO: 125343 - DNA, 25 bp, Canis familiaris
gatggaatccttctttactttctta

SEQ ID NO: 125344 - DNA, 25 bp, Canis familiaris
gaggacccgctgcggaactttgttc

SEQ ID NO: 125345 - DNA, 25 bp, Canis familiaris
ggtcgtcgcgctgagaaagttttcc

SEQ ID NO: 125346 - DNA, 25 bp, Canis familiaris
gatgtctacacgggaaaaatgtttc

SEQ ID NO: 125347 - DNA, 25 bp, Canis familiaris
gatgtttccccgagagagagttgtc

SEQ ID NO: 125348 - DNA, 25 bp, Canis familiaris
gatacttgccttgacggtgggtgtc

SEQ ID NO: 125349 - DNA, 25 bp, Canis familiaris
gatacttggcgtacacgaccaggtt

SEQ ID NO: 125350 - DNA, 25 bp, Canis familiaris
gaggccagaggaacactgacaaggt

SEQ ID NO: 125351 - DNA, 25 bp, Canis familiaris
gaggccacatcgtacatatgcacgg

SEQ ID NO: 125352 - DNA, 25 bp, Canis familiaris
gaggccatctagaccagctggggcc

SEQ ID NO: 125353 - DNA, 25 bp, Canis familiaris
gaggccgatggaggccaggatggcc

SEQ ID NO: 125354 - DNA, 25 bp, Canis familiaris
gaggcgccttgaagaagacaagcca

SEQ ID NO: 125355 - DNA, 25 bp, Canis familiaris
gaggcccaatccagaacaggccagc

SEQ ID NO: 125356 - DNA, 25 bp, Canis familiaris
gaggccaaagtcagaaggatccaga

SEQ ID NO: 125357 - DNA, 25 bp, Canis familiaris
gaggccttcagtatttgaacgcaga

SEQ ID NO: 125358 - DNA, 25 bp, Canis familiaris
gaggccagtcgtatcttgaaggctg

SEQ ID NO: 125359 - DNA, 25 bp, Canis familiaris
gaggaatgctctgtctttctagctg

SEQ ID NO: 125360 - DNA, 25 bp, Canis familiaris
gaggaaccccagtgccaagctgggt

SEQ ID NO: 125361 - DNA, 25 bp, Canis familiaris
tgaggacccggagagcctaggggct

SEQ ID NO: 125362 - DNA, 25 bp, Canis familiaris
gatgtacccttgagagcctgggggc

SEQ ID NO: 125363 - DNA, 25 bp, Canis familiaris
gataactaacgtggacgtaggtgtc

SEQ ID NO: 125364 - DNA, 25 bp, Canis familiaris
gataatttacatgtccgtcgtttgg

SEQ ID NO: 125365 - DNA, 25 bp, Canis familiaris
gatgtttctagagctcgtttgttaa

SEQ ID NO: 125366 - DNA, 25 bp, Canis familiaris
gatggttgtaaaaagttagtgtaat

SEQ ID NO: 125367 - DNA, 25 bp, Canis familiaris
gaggctttcccaatagtgtggtctc

SEQ ID NO: 125368 - DNA, 25 bp, Canis familiaris
gaggaattcccagtaagtgcggctt

SEQ ID NO: 125369 - DNA, 25 bp, Canis familiaris
gaggaattcaaagggaggcctgcca

SEQ ID NO: 125370 - DNA, 25 bp, Canis familiaris
gaggacattcagcacagcagaggcc

SEQ ID NO: 125371 - DNA, 25 bp, Canis familiaris
gaggaactcagggcagtggacagcg

SEQ ID NO: 125372 - DNA, 25 bp, Canis familiaris
gaggaacttcatccgtggagcacac

SEQ ID NO: 125373 - DNA, 25 bp, Canis familiaris
gaggaagcttccggaggagcatgcc

SEQ ID NO: 125374 - DNA, 25 bp, Canis familiaris
gaggaagttgccgagaaggatgatc

SEQ ID NO: 125375 - DNA, 25 bp, Canis familiaris
gaggacagcgtctgaagaggattca

SEQ ID NO: 125376 - DNA, 25 bp, Canis familiaris
gaggaactgtgcagcaaggccttca

SEQ ID NO: 125377 - DNA, 25 bp, Canis familiaris
gaggaagtggcaaccacccatgagc

SEQ ID NO: 125378 - DNA, 25 bp, Canis familiaris
gaggcaactatgaactctgccctga

SEQ ID NO: 125379 - DNA, 25 bp, Canis familiaris
gaggcagaacatcagagggccatgc

SEQ ID NO: 125380 - DNA, 25 bp, Canis familiaris
gaggcacgagcacacagtagccagt

SEQ ID NO: 125381 - DNA, 25 bp, Canis familiaris
gaggcatcaggcctatggtcagcac

SEQ ID NO: 125382 - DNA, 25 bp, Canis familiaris
gaggctgagctgcctcatggatcgg

SEQ ID NO: 125383 - DNA, 25 bp, Canis familiaris
gatgacgactcatctgagacagaat

SEQ ID NO: 125384 - DNA, 25 bp, Canis familiaris
gatgtcagactaaaagtacagcttt

SEQ ID NO: 125385 - DNA, 25 bp, Canis familiaris
gatgattactccaggtatagactta

SEQ ID NO: 125386 - DNA, 25 bp, Canis familiaris
gatgtgtgacggccttttaagcttc

SEQ ID NO: 125387 - DNA, 25 bp, Canis familiaris
gatggagaatggccctgtccaagct

SEQ ID NO: 125388 - DNA, 25 bp, Canis familiaris
gaggaaggggccctctgatatgctc

SEQ ID NO: 125389 - DNA, 25 bp, Canis familiaris
gaggaagtgaggacgctttgccatc

SEQ ID NO: 125390 - DNA, 25 bp, Canis familiaris
gaggaagtcaggacgtctggggcca

SEQ ID NO: 125391 - DNA, 25 bp, Canis familiaris
gaggccaacaggaagtttgagcgct

SEQ ID NO: 125392 - DNA, 25 bp, Canis familiaris
gttgctcaacccagttggatggctt

SEQ ID NO: 125393 - DNA, 25 bp, Canis familiaris
gttgtcgagggaagttgcgagtttc

SEQ ID NO: 125394 - DNA, 25 bp, Canis familiaris
ggctggggaatgagtttatttttgc

SEQ ID NO: 125395 - DNA, 25 bp, Canis familiaris
gaggcggaacagtgctgttatttta

SEQ ID NO: 125396 - DNA, 25 bp, Canis familiaris
gaggcaaaaacccttctgcatgttt

SEQ ID NO: 125397 - DNA, 25 bp, Canis familiaris
gaggaaccagaccgttatgttgtag

SEQ ID NO: 125398 - DNA, 25 bp, Canis familiaris
gaggaagccagaggtgtgtggtgtt

SEQ ID NO: 125399 - DNA, 25 bp, Canis familiaris
gaggcaagccaaggagcagtggtct

SEQ ID NO: 125400 - DNA, 25 bp, Canis familiaris
gaggcacagcctggtggcagggatg

SEQ ID NO: 125401 - DNA, 25 bp, Canis familiaris
gaggcacacaggctcccaaatgagc

SEQ ID NO: 125402 - DNA, 25 bp, Canis familiaris
gatggaagcagagttgtacaaagtc

SEQ ID NO: 125403 - DNA, 25 bp, Canis familiaris
gatgtgcaagaagcttaacgatttc

SEQ ID NO: 125404 - DNA, 25 bp, Canis familiaris
gatgacatcgggactttccttttct

SEQ ID NO: 125405 - DNA, 25 bp, Canis familiaris
gaggcttttgagggaccttttcttg

SEQ ID NO: 125406 - DNA, 25 bp, Canis familiaris
gaggcctttctggtgtttttgttgt

SEQ ID NO: 125407 - DNA, 25 bp, Canis familiaris
gaggcacttttgaagtctcttttgt

SEQ ID NO: 125408 - DNA, 25 bp, Canis familiaris
gaggctcttattgcagctggttttc

SEQ ID NO: 125409 - DNA, 25 bp, Canis familiaris
gatgctgatttaaaaggggtttctg

SEQ ID NO: 125410 - DNA, 25 bp, Canis familiaris
gatgacacttagaaaatggggttat

SEQ ID NO: 125411 - DNA, 25 bp, Canis familiaris
gttgtcattggtaaacgcgggttgg

SEQ ID NO: 125412 - DNA, 25 bp, Canis familiaris
gatggacttgggaaacgggccttgc

SEQ ID NO: 125413 - DNA, 25 bp, Canis familiaris
gaggaatttgagaaggcgtgagcgc

SEQ ID NO: 125414 - DNA, 25 bp, Canis familiaris
gatggtcatgcattggaaggcctag

SEQ ID NO: 125415 - DNA, 25 bp, Canis familiaris
gaggcataatgtcatgggctctcag

SEQ ID NO: 125416 - DNA, 25 bp, Canis familiaris
gaggcatcgatgtgcagcaggtgtc

SEQ ID NO: 125417 - DNA, 25 bp, Canis familiaris
gaggccagaacacaggtgtcgtgaa

SEQ ID NO: 125418 - DNA, 25 bp, Canis familiaris
gaggccggaattttgtgtgggacac

SEQ ID NO: 125419 - DNA, 25 bp, Canis familiaris
gaggctgggggttcttgtatggagt

SEQ ID NO: 125420 - DNA, 25 bp, Canis familiaris
gaggcggcgagaaacttgcattgga

SEQ ID NO: 125421 - DNA, 25 bp, Canis familiaris
gaggcagaggacacaccgttggatc

SEQ ID NO: 125422 - DNA, 25 bp, Canis familiaris
gaggaagagacggcacagtggggac

SEQ ID NO: 125423 - DNA, 25 bp, Canis familiaris
gaggcctgagactgccatggggaac

SEQ ID NO: 125424 - DNA, 25 bp, Canis familiaris
gaggcggagaccgcatagtggtccc

SEQ ID NO: 125425 - DNA, 25 bp, Canis familiaris
gaggcaggaaggtccaagtgcggcc

SEQ ID NO: 125426 - DNA, 25 bp, Canis familiaris
gatggggaagtgtccgacggttctt

SEQ ID NO: 125427 - DNA, 25 bp, Canis familiaris
gatggagggttgtggcctcagcttc

SEQ ID NO: 125428 - DNA, 25 bp, Canis familiaris
gatggagaagttatgaccctcccaa

SEQ ID NO: 125429 - DNA, 25 bp, Canis familiaris
gatggaaagctgcggaacccaccga

SEQ ID NO: 125430 - DNA, 25 bp, Canis familiaris
gatggaaaaggaaatcacgccctcg

SEQ ID NO: 125431 - DNA, 25 bp, Canis familiaris
gatgttaaacagtaaacgccagtag

SEQ ID NO: 125432 - DNA, 25 bp, Canis familiaris
gatgattggggacacaccggactag

SEQ ID NO: 125433 - DNA, 25 bp, Canis familiaris
gatgttgtggacagacaccaaacca

SEQ ID NO: 125434 - DNA, 25 bp, Canis familiaris
gatgtggacggtgccaccactaaca

SEQ ID NO: 125435 - DNA, 25 bp, Canis familiaris
gatggagacgggcgctatggcttaa

SEQ ID NO: 125436 - DNA, 25 bp, Canis familiaris
gatggaatcgttacagtcggttaaa

SEQ ID NO: 125437 - DNA, 25 bp, Canis familiaris
gaggaaatgttccatatcttgtcta

SEQ ID NO: 125438 - DNA, 25 bp, Canis familiaris
gaggaatatgttgttctcatacaca

SEQ ID NO: 125439 - DNA, 25 bp, Canis familiaris
gaggccacagttttatgccaaaccc

SEQ ID NO: 125440 - DNA, 25 bp, Canis familiaris
gaggctccttagagtgcgataaccc

SEQ ID NO: 125441 - DNA, 25 bp, Canis familiaris
gaggcctttcaaggtggttcacctt

SEQ ID NO: 125442 - DNA, 25 bp, Canis familiaris
gaggcctttccagtgtgtgtaaatc

SEQ ID NO: 125443 - DNA, 25 bp, Canis familiaris
gaggcctttgcatggctattaccac

SEQ ID NO: 125444 - DNA, 25 bp, Canis familiaris
gaggcatgtttatcctatgtgaccc

SEQ ID NO: 125445 - DNA, 25 bp, Canis familiaris
gaggctatttcttgactatggaatc

SEQ ID NO: 125446 - DNA, 25 bp, Canis familiaris
gaggcttgcttaaccgggaacatga

SEQ ID NO: 125447 - DNA, 25 bp, Canis familiaris
gaggctgtctaaccgggaacaatga

SEQ ID NO: 125448 - DNA, 25 bp, Canis familiaris
gaggcgcctcaaaaggagaaacata

SEQ ID NO: 125449 - DNA, 25 bp, Canis familiaris
gaggcagcgtagaagcaggaggaac

SEQ ID NO: 125450 - DNA, 25 bp, Canis familiaris
gaggcagagtggacagaggggccca

SEQ ID NO: 125451 - DNA, 25 bp, Canis familiaris
gaggcagaaggtacgggaacctttg

SEQ ID NO: 125452 - DNA, 25 bp, Canis familiaris
gaggaagggttaggccagaatgttt

SEQ ID NO: 125453 - DNA, 25 bp, Canis familiaris
gaggaacgtgttagcagcacgtcgt

SEQ ID NO: 125454 - DNA, 25 bp, Canis familiaris
gaggaactgtattgaagcctgccag

SEQ ID NO: 125455 - DNA, 25 bp, Canis familiaris
gaggaacctgatggaaagctgcgga

SEQ ID NO: 125456 - DNA, 25 bp, Canis familiaris
gaggaagaggggaacatgctggaga

SEQ ID NO: 125457 - DNA, 25 bp, Canis familiaris
gaggaagggagcggcagcagtgaag

SEQ ID NO: 125458 - DNA, 25 bp, Canis familiaris
gaggcaaggagaggacacagtgaac

SEQ ID NO: 125459 - DNA, 25 bp, Canis familiaris
gaggcacagaattaaaagctaccag

SEQ ID NO: 125460 - DNA, 25 bp, Canis familiaris
gaggcaccaaaattaggcttcctgt

SEQ ID NO: 125461 - DNA, 25 bp, Canis familiaris
gatgggcccaggtaaggcccctgat

SEQ ID NO: 125462 - DNA, 25 bp, Canis familiaris
gaggctgaccgggttggttttgatc

SEQ ID NO: 125463 - DNA, 25 bp, Canis familiaris
gaggctcacaggtaggtggtttctg

SEQ ID NO: 125464 - DNA, 25 bp, Canis familiaris
gaggctgagcggtggctctgagttc

SEQ ID NO: 125465 - DNA, 25 bp, Canis familiaris
gaggctggggcagggtcagcaactg

SEQ ID NO: 125466 - DNA, 25 bp, Canis familiaris
gaggctggttggagctcagcacagc

SEQ ID NO: 125467 - DNA, 25 bp, Canis familiaris
gaggcatggatgcctgttcctcaag

SEQ ID NO: 125468 - DNA, 25 bp, Canis familiaris
gaggcatgtattctatttcaaagga

SEQ ID NO: 125469 - DNA, 25 bp, Canis familiaris
gaggcttttagttttgcaccttgtc

SEQ ID NO: 125470 - DNA, 25 bp, Canis familiaris
gaggcttgttttgttaccattatct

SEQ ID NO: 125471 - DNA, 25 bp, Canis familiaris
gaggcactgcacattttgtaccata

SEQ ID NO: 125472 - DNA, 25 bp, Canis familiaris
gaggcagcgctcaaaagggcaacta

SEQ ID NO: 125473 - DNA, 25 bp, Canis familiaris
gaggccctgaacgatgagatcaact

SEQ ID NO: 125474 - DNA, 25 bp, Canis familiaris
gaggccgatgtcggggtgcaacgtc

SEQ ID NO: 125475 - DNA, 25 bp, Canis familiaris
gaggcttgagctagctggtggcata

SEQ ID NO: 125476 - DNA, 25 bp, Canis familiaris
gaggcagtggttataggcaacaaat

SEQ ID NO: 125477 - DNA, 25 bp, Canis familiaris
gatggcaatggctatattagtgcag

SEQ ID NO: 125478 - DNA, 25 bp, Canis familiaris
gaggcaaatcatgcatctttgagtg

SEQ ID NO: 125479 - DNA, 25 bp, Canis familiaris
gggctaatctggtctttaggatttc

SEQ ID NO: 125480 - DNA, 25 bp, Canis familiaris
gaggcccactggggactatggatta

SEQ ID NO: 125481 - DNA, 25 bp, Canis familiaris
gaggcgcacgtggagtgacttggca

SEQ ID NO: 125482 - DNA, 25 bp, Canis familiaris
gaggccatcttccaggacatggtgc

SEQ ID NO: 125483 - DNA, 25 bp, Canis familiaris
gaggctcatctttgcaggcaagcag

SEQ ID NO: 125484 - DNA, 25 bp, Canis familiaris
gaggctcatctttgcaggcaagcag

SEQ ID NO: 125485 - DNA, 25 bp, Canis familiaris
gaggcatcatatcagggggcacatg

SEQ ID NO: 125486 - DNA, 25 bp, Canis familiaris
gaggctcagatgagggagaagctgg

SEQ ID NO: 125487 - DNA, 25 bp, Canis familiaris
gaggctgctgagatgggaaaaggct

SEQ ID NO: 125488 - DNA, 25 bp, Canis familiaris
gaggcactggaatgacaagaaactg

SEQ ID NO: 125489 - DNA, 25 bp, Canis familiaris
gaggcatctgtggatagacacaaga

SEQ ID NO: 125490 - DNA, 25 bp, Canis familiaris
gaggctcgagcattcatacacctca

SEQ ID NO: 125491 - DNA, 25 bp, Canis familiaris
gaggccgagctgcaggacatctgca

SEQ ID NO: 125492 - DNA, 25 bp, Canis familiaris
gaggctcagcggtggagcatctgcc

SEQ ID NO: 125493 - DNA, 25 bp, Canis familiaris
gaggcctgcagggcgaggacgcagg

SEQ ID NO: 125494 - DNA, 25 bp, Canis familiaris
gaggctcgcggaggaggacagtcgc

SEQ ID NO: 125495 - DNA, 25 bp, Canis familiaris
gaggctgagggaggatggtaggcac

SEQ ID NO: 125496 - DNA, 25 bp, Canis familiaris
gaggcgagctgactggttgtgtggc

SEQ ID NO: 125497 - DNA, 25 bp, Canis familiaris
gaggcagggagcagtgtcgtggccc

SEQ ID NO: 125498 - DNA, 25 bp, Canis familiaris
gaggcaggacaggtggtctggaccc

SEQ ID NO: 125499 - DNA, 25 bp, Canis familiaris
gaggcgtcacaggtgatggcggagc

SEQ ID NO: 125500 - DNA, 25 bp, Canis familiaris
gaggcaatgccaggctgagggaagc

SEQ ID NO: 125501 - DNA, 25 bp, Canis familiaris
gaggccatgctcacagtggtgaagt

SEQ ID NO: 125502 - DNA, 25 bp, Canis familiaris
gaggcagtgttgtcagggctaatgt

SEQ ID NO: 125503 - DNA, 25 bp, Canis familiaris
gaggcagctttgcgcaggcgcaagg

SEQ ID NO: 125504 - DNA, 25 bp, Canis familiaris
gaggcacggaggtatgggcatagca

SEQ ID NO: 125505 - DNA, 25 bp, Canis familiaris
gaggcacaggtggtgtggacacagc

SEQ ID NO: 125506 - DNA, 25 bp, Canis familiaris
gaggctctttgcgtggagaagcaaa

SEQ ID NO: 125507 - DNA, 25 bp, Canis familiaris
gaggccgtggcagtgcctgaagaaa

SEQ ID NO: 125508 - DNA, 25 bp, Canis familiaris
gatggccgtggggctgcccagaaca

SEQ ID NO: 125509 - DNA, 25 bp, Canis familiaris
gatggaagttgaccagctcaagaaa

SEQ ID NO: 125510 - DNA, 25 bp, Canis familiaris
gaggcaaggatcacatctaatgaca

SEQ ID NO: 125511 - DNA, 25 bp, Canis familiaris
gaggaatcacacactctgaatgaac

SEQ ID NO: 125512 - DNA, 25 bp, Canis familiaris
gaggaagacatcggctctgagacaa

SEQ ID NO: 125513 - DNA, 25 bp, Canis familiaris
gaggaatcactgggtgctcaaaaga

SEQ ID NO: 125514 - DNA, 25 bp, Canis familiaris
gaggcatgaccatcgtctacaagag

SEQ ID NO: 125515 - DNA, 25 bp, Canis familiaris
gatggctgaagctcgtacaggcaga

SEQ ID NO: 125516 - DNA, 25 bp, Canis familiaris
gatgaagaagcttttacaggataat

SEQ ID NO: 125517 - DNA, 25 bp, Canis familiaris
gatgccgaaccccaaacagtattgg

SEQ ID NO: 125518 - DNA, 25 bp, Canis familiaris
gaggcagaggccggaaacttactgg

SEQ ID NO: 125519 - DNA, 25 bp, Canis familiaris
gaggcgggctcagaataagaacatt

SEQ ID NO: 125520 - DNA, 25 bp, Canis familiaris
gaggctgaggccatgatctactaac

SEQ ID NO: 125521 - DNA, 25 bp, Canis familiaris
gaggctgatgagacctttgagctaa

SEQ ID NO: 125522 - DNA, 25 bp, Canis familiaris
gaggaagttgcctctgagctgcatc

SEQ ID NO: 125523 - DNA, 25 bp, Canis familiaris
gaggaagtatccacgttgctgacat

SEQ ID NO: 125524 - DNA, 25 bp, Canis familiaris
gaggaaggatccagctcctgtacat

SEQ ID NO: 125525 - DNA, 25 bp, Canis familiaris
gaggaagttcctatccatgcttctc

SEQ ID NO: 125526 - DNA, 25 bp, Canis familiaris
gaggcagatgattcttttccacctc

SEQ ID NO: 125527 - DNA, 25 bp, Canis familiaris
gaggcttgtaattttcctctccttt

SEQ ID NO: 125528 - DNA, 25 bp, Canis familiaris
gaggcatttttactactattctgtt

SEQ ID NO: 125529 - DNA, 25 bp, Canis familiaris
gaggctgtttcttaatggtgtctgg

SEQ ID NO: 125530 - DNA, 25 bp, Canis familiaris
gatggctcttagtccaagggtaggg

SEQ ID NO: 125531 - DNA, 25 bp, Canis familiaris
gaggctctatggccgaaaggtgggc

SEQ ID NO: 125532 - DNA, 25 bp, Canis familiaris
gatggctgctagtgttagagtgggg

SEQ ID NO: 125533 - DNA, 25 bp, Canis familiaris
gaggcttctgaacattgaggggtta

SEQ ID NO: 125534 - DNA, 25 bp, Canis familiaris
gaggctttgattgtcttggggtgtc

SEQ ID NO: 125535 - DNA, 25 bp, Canis familiaris
gaggctttcactgtccaatgtggta

SEQ ID NO: 125536 - DNA, 25 bp, Canis familiaris
gaggcatattatgttcacaatgggg

SEQ ID NO: 125537 - DNA, 25 bp, Canis familiaris
gaggaatttcggacatctctgccgg

SEQ ID NO: 125538 - DNA, 25 bp, Canis familiaris
gaggcaatgggaggagccttccgag

SEQ ID NO: 125539 - DNA, 25 bp, Canis familiaris
gaggcctatggagaggattccatgg

SEQ ID NO: 125540 - DNA, 25 bp, Canis familiaris
gaggcttatggttaggatgtaggct

SEQ ID NO: 125541 - DNA, 25 bp, Canis familiaris
gaggctcttttcaggagatgaggtt

SEQ ID NO: 125542 - DNA, 25 bp, Canis familiaris
gatgcttttgttgcgagcggagttc

SEQ ID NO: 125543 - DNA, 25 bp, Canis familiaris
gatgattttctattcggcggttttc

SEQ ID NO: 125544 - DNA, 25 bp, Canis familiaris
gatagtacttaatggaagtctgttc

SEQ ID NO: 125545 - DNA, 25 bp, Canis familiaris
gatggtcatctgaaattcgggttgt

SEQ ID NO: 125546 - DNA, 25 bp, Canis familiaris
gaggcctgctgggattccagaattg

SEQ ID NO: 125547 - DNA, 25 bp, Canis familiaris
gaggccagtggtttgtgcaatcatt

SEQ ID NO: 125548 - DNA, 25 bp, Canis familiaris
gaggccctgtaattggaatgagtcc

SEQ ID NO: 125549 - DNA, 25 bp, Canis familiaris
gaggccctgtaattggaatgagtcc

SEQ ID NO: 125550 - DNA, 25 bp, Canis familiaris
gaggcccgtgaataccgtgatgctc

SEQ ID NO: 125551 - DNA, 25 bp, Canis familiaris
gaggccatcggttaacacttagttt

SEQ ID NO: 125552 - DNA, 25 bp, Canis familiaris
gaggcagtcttctaaacactaaatt

SEQ ID NO: 125553 - DNA, 25 bp, Canis familiaris
gaggcagtcttatcacactgtcaga

SEQ ID NO: 125554 - DNA, 25 bp, Canis familiaris
gaggcgttttgatgccatgccattt

SEQ ID NO: 125555 - DNA, 25 bp, Canis familiaris
gaggcagtctattgcaaggaccttc

SEQ ID NO: 125556 - DNA, 25 bp, Canis familiaris
gaggcagctaatgtcaaactcttct

SEQ ID NO: 125557 - DNA, 25 bp, Canis familiaris
gaggcgctatgtgtcactacttgct

SEQ ID NO: 125558 - DNA, 25 bp, Canis familiaris
gaggcagatgctgcactgcactact

SEQ ID NO: 125559 - DNA, 25 bp, Canis familiaris
gatggcatagcaccagccacaactc

SEQ ID NO: 125560 - DNA, 25 bp, Canis familiaris
gaggcaacaaatacagcagaccccc

SEQ ID NO: 125561 - DNA, 25 bp, Canis familiaris
gaggcaaagaatccagctgaccttc

SEQ ID NO: 125562 - DNA, 25 bp, Canis familiaris
gaggcacaagaaatgctgatgactt

SEQ ID NO: 125563 - DNA, 25 bp, Canis familiaris
gaggcatcagccagagagagatctt

SEQ ID NO: 125564 - DNA, 25 bp, Canis familiaris
gaggctgctggtggagaagactctg

SEQ ID NO: 125565 - DNA, 25 bp, Canis familiaris
gaggctctgaatggcaacagctctt

SEQ ID NO: 125566 - DNA, 25 bp, Canis familiaris
gaggcagctcattaatgacgtcgct

SEQ ID NO: 125567 - DNA, 25 bp, Canis familiaris
gaggcaggattctagggtctgtttt

SEQ ID NO: 125568 - DNA, 25 bp, Canis familiaris
gaggctgtgatattaggtgctttaa

SEQ ID NO: 125569 - DNA, 25 bp, Canis familiaris
gaggcatgctttaggagtctgttca

SEQ ID NO: 125570 - DNA, 25 bp, Canis familiaris
gaggcagctgtgtatggtggcgccc

SEQ ID NO: 125571 - DNA, 25 bp, Canis familiaris
gaggcagtggcatcatggaggcccc

SEQ ID NO: 125572 - DNA, 25 bp, Canis familiaris
gaggcagtggcaactgtctgcccac

SEQ ID NO: 125573 - DNA, 25 bp, Canis familiaris
gaggcagtacagactattgtctcat

SEQ ID NO: 125574 - DNA, 25 bp, Canis familiaris
gaggctgcattactctattgtaagc

SEQ ID NO: 125575 - DNA, 25 bp, Canis familiaris
gaggcttttctctaatgtaatggca

SEQ ID NO: 125576 - DNA, 25 bp, Canis familiaris
gaggccattttcttatcaacggcag

SEQ ID NO: 125577 - DNA, 25 bp, Canis familiaris
gaggccttataccattcaaggacag

SEQ ID NO: 125578 - DNA, 25 bp, Canis familiaris
gaggcccaatcaccttagggacacc

SEQ ID NO: 125579 - DNA, 25 bp, Canis familiaris
gaggcccgagaggctaatgggaccc

SEQ ID NO: 125580 - DNA, 25 bp, Canis familiaris
gatgcgcaccggggtttgggaacac

SEQ ID NO: 125581 - DNA, 25 bp, Canis familiaris
gatggagtggccttggtttggaaca

SEQ ID NO: 125582 - DNA, 25 bp, Canis familiaris
gatgggtgtccttgtgtttagacgt

SEQ ID NO: 125583 - DNA, 25 bp, Canis familiaris
gatggcgttcctttgtcagagaatc

SEQ ID NO: 125584 - DNA, 25 bp, Canis familiaris
gatgggtcctaactgtgggatacca

SEQ ID NO: 125585 - DNA, 25 bp, Canis familiaris
gatgccgtcctatgtaatgctgtac

SEQ ID NO: 125586 - DNA, 25 bp, Canis familiaris
gatggcccctctggaaagctgtggc

SEQ ID NO: 125587 - DNA, 25 bp, Canis familiaris
gaggccccctggaccagggatgcta

SEQ ID NO: 125588 - DNA, 25 bp, Canis familiaris
gaggccccagctaaatcaagagact

SEQ ID NO: 125589 - DNA, 25 bp, Canis familiaris
gaggcagttcatctactcactggac

SEQ ID NO: 125590 - DNA, 25 bp, Canis familiaris
gaggcagggagccaactgagtggac

SEQ ID NO: 125591 - DNA, 25 bp, Canis familiaris
gaggcagaggagcatgggagtggtt

SEQ ID NO: 125592 - DNA, 25 bp, Canis familiaris
gaggcagagacacaggcagagggag

SEQ ID NO: 125593 - DNA, 25 bp, Canis familiaris
gaggcagagaggcagagtcagaggc

SEQ ID NO: 125594 - DNA, 25 bp, Canis familiaris
gaggcaagagacacaggcagagaga

SEQ ID NO: 125595 - DNA, 25 bp, Canis familiaris
gaggcagagggaaagggagagagag

SEQ ID NO: 125596 - DNA, 25 bp, Canis familiaris
gaggccagggactattggaccagaa

SEQ ID NO: 125597 - DNA, 25 bp, Canis familiaris
gatgtacagggggttggtgcccaaa

SEQ ID NO: 125598 - DNA, 25 bp, Canis familiaris
gatgttcgaggtgtatgggaccccc

SEQ ID NO: 125599 - DNA, 25 bp, Canis familiaris
gatggggaggtgtaacggtctccac

SEQ ID NO: 125600 - DNA, 25 bp, Canis familiaris
gatgggggaagggagtagtccgcca

SEQ ID NO: 125601 - DNA, 25 bp, Canis familiaris
gatggtaggaaagggtcaactcgtc

SEQ ID NO: 125602 - DNA, 25 bp, Canis familiaris
gatggttggttatgtctgacccgtc

SEQ ID NO: 125603 - DNA, 25 bp, Canis familiaris
gatggtttggtggagtgctgccaac

SEQ ID NO: 125604 - DNA, 25 bp, Canis familiaris
gatggttctgtggtgcagtttaaga

SEQ ID NO: 125605 - DNA, 25 bp, Canis familiaris
gatgggtagagagcatgtttcaaga

SEQ ID NO: 125606 - DNA, 25 bp, Canis familiaris
gaggctcagagggcatttttgaata

SEQ ID NO: 125607 - DNA, 25 bp, Canis familiaris
gaggcacagagagtcatatttccca

SEQ ID NO: 125608 - DNA, 25 bp, Canis familiaris
gaggccaggacatcatttctcatcg

SEQ ID NO: 125609 - DNA, 25 bp, Canis familiaris
gaggccggacatggccaaaccggat

SEQ ID NO: 125610 - DNA, 25 bp, Canis familiaris
gaggccgagaattccaaagcagagg

SEQ ID NO: 125611 - DNA, 25 bp, Canis familiaris
gaggcctgataaagcgccacatcga

SEQ ID NO: 125612 - DNA, 25 bp, Canis familiaris
gaggctcttgaaatcgatccatcca

SEQ ID NO: 125613 - DNA, 25 bp, Canis familiaris
gatggcttctgaaaggatcatgcta

SEQ ID NO: 125614 - DNA, 25 bp, Canis familiaris
gatggcatcaccttcattgacagta

SEQ ID NO: 125615 - DNA, 25 bp, Canis familiaris
gaggcatccggcaatcagaagtgag

SEQ ID NO: 125616 - DNA, 25 bp, Canis familiaris
gaggcgtcggctgcaaatgcagagc

SEQ ID NO: 125617 - DNA, 25 bp, Canis familiaris
gaggcgctgccgcgcagcttgaacg

SEQ ID NO: 125618 - DNA, 25 bp, Canis familiaris
gatgagccgccactggcgggaacgt

SEQ ID NO: 125619 - DNA, 25 bp, Canis familiaris
gaggcactcacctggggtgcagaat

SEQ ID NO: 125620 - DNA, 25 bp, Canis familiaris
gatgtccccccgtggaatgatgata

SEQ ID NO: 125621 - DNA, 25 bp, Canis familiaris
gaggctctccaccttatgtggttaa

SEQ ID NO: 125622 - DNA, 25 bp, Canis familiaris
gaggcagccgacatgtcattgggtt

SEQ ID NO: 125623 - DNA, 25 bp, Canis familiaris
gaggcacggggtcatttggttggcc

SEQ ID NO: 125624 - DNA, 25 bp, Canis familiaris
gatggactggagctttttctttgtg

SEQ ID NO: 125625 - DNA, 25 bp, Canis familiaris
gatggactggagctttttctttgtg

SEQ ID NO: 125626 - DNA, 25 bp, Canis familiaris
gatggacgggtttttcattttcagt

SEQ ID NO: 125627 - DNA, 25 bp, Canis familiaris
gatggtcaaagtaaatcttttttgt

SEQ ID NO: 125628 - DNA, 25 bp, Canis familiaris
gatggataaattacctttcaaggcc

SEQ ID NO: 125629 - DNA, 25 bp, Canis familiaris
gatggcattaaaacctattgtagtg

SEQ ID NO: 125630 - DNA, 25 bp, Canis familiaris
gaggcataccaatgccctagctagc

SEQ ID NO: 125631 - DNA, 25 bp, Canis familiaris
gaggcacctcaatcacctggtgccc

SEQ ID NO: 125632 - DNA, 25 bp, Canis familiaris
gaggcaggatccagacctgcttgcc

SEQ ID NO: 125633 - DNA, 25 bp, Canis familiaris
gaggcaggatccagacctgcttgcc

SEQ ID NO: 125634 - DNA, 25 bp, Canis familiaris
gaggcaggatccagacctgcttgcc

SEQ ID NO: 125635 - DNA, 25 bp, Canis familiaris
gaggcaggatccagacctgcttgcc

SEQ ID NO: 125636 - DNA, 25 bp, Canis familiaris
gaggcatctaacaaactctgctctg

SEQ ID NO: 125637 - DNA, 25 bp, Canis familiaris
gaggcactgaagaaaactctggttt

SEQ ID NO: 125638 - DNA, 25 bp, Canis familiaris
gaggccatggcgagaatccagcttt

SEQ ID NO: 125639 - DNA, 25 bp, Canis familiaris
gaggcaggggcaagcattcaagtat

SEQ ID NO: 125640 - DNA, 25 bp, Canis familiaris
gatatgaggggctatgctcgcaaat

SEQ ID NO: 125641 - DNA, 25 bp, Canis familiaris
gatcagagaagacatccgcaaggga

SEQ ID NO: 125642 - DNA, 25 bp, Canis familiaris
gatctgtggaaattttaagggaatg

SEQ ID NO: 125643 - DNA, 25 bp, Canis familiaris
gatggggaagacagataaaggcaca

SEQ ID NO: 125644 - DNA, 25 bp, Canis familiaris
gatgttggggaaggtgaagaaccct

SEQ ID NO: 125645 - DNA, 25 bp, Canis familiaris
gtgtttgggcaaagtcataaaaggc

SEQ ID NO: 125646 - DNA, 25 bp, Canis familiaris
gatgttctgggtgggttaagtgggc

SEQ ID NO: 125647 - DNA, 25 bp, Canis familiaris
gatttgggggcctggccagggacat

SEQ ID NO: 125648 - DNA, 25 bp, Canis familiaris
gatttgagaggggaaggggtggacg

SEQ ID NO: 125649 - DNA, 25 bp, Canis familiaris
gatcttgagggggggggatgtagcc

SEQ ID NO: 125650 - DNA, 25 bp, Canis familiaris
gatcgtggggaggttagtcttatcc

SEQ ID NO: 125651 - DNA, 25 bp, Canis familiaris
gatcggttggaggagtactgttcaa

SEQ ID NO: 125652 - DNA, 25 bp, Canis familiaris
gatggggggaacgaactgtacagat

SEQ ID NO: 125653 - DNA, 25 bp, Canis familiaris
gatgggagggcgtgagactctccag

SEQ ID NO: 125654 - DNA, 25 bp, Canis familiaris
gatggggaagggtgacctaggcggg

SEQ ID NO: 125655 - DNA, 25 bp, Canis familiaris
gatgggggaataaagactctgagac

SEQ ID NO: 125656 - DNA, 25 bp, Canis familiaris
gatggcagtgggaagctgggcctga

SEQ ID NO: 125657 - DNA, 25 bp, Canis familiaris
gaggctgatggccacagaagtcctg

SEQ ID NO: 125658 - DNA, 25 bp, Canis familiaris
gaggctggagaaggaggacctgggc

SEQ ID NO: 125659 - DNA, 25 bp, Canis familiaris
gaggctgaggagggtggagcccggc

SEQ ID NO: 125660 - DNA, 25 bp, Canis familiaris
gaggcggaagcggaggagcctctcc

SEQ ID NO: 125661 - DNA, 25 bp, Canis familiaris
gatggggacaagctgcgagtactgc

SEQ ID NO: 125662 - DNA, 25 bp, Canis familiaris
gatggcaaaaagctgcgcattggtg

SEQ ID NO: 125663 - DNA, 25 bp, Canis familiaris
gatggaaaacagtgtcattctgtta

SEQ ID NO: 125664 - DNA, 25 bp, Canis familiaris
gatggaaaaactgttttgttgcttt

SEQ ID NO: 125665 - DNA, 25 bp, Canis familiaris
gatgaaatttccacatttatttttc

SEQ ID NO: 125666 - DNA, 25 bp, Canis familiaris
gatgtttacaccacttttatattac

SEQ ID NO: 125667 - DNA, 25 bp, Canis familiaris
gatgactataaccttattttaaatg

SEQ ID NO: 125668 - DNA, 25 bp, Canis familiaris
gatgactaggtccagtactaccaaa

SEQ ID NO: 125669 - DNA, 25 bp, Canis familiaris
gatggcaggggctagtttaccaaag

SEQ ID NO: 125670 - DNA, 25 bp, Canis familiaris
gatgaattgttgttttagactaaag

SEQ ID NO: 125671 - DNA, 25 bp, Canis familiaris
gatgtaatttgcctcggggcctaag

SEQ ID NO: 125672 - DNA, 25 bp, Canis familiaris
gatgtcgtgttctgggggttaaagg

SEQ ID NO: 125673 - DNA, 25 bp, Canis familiaris
gatggcgttgtctttggggtagaaa

SEQ ID NO: 125674 - DNA, 25 bp, Canis familiaris
gaggcagtctgtattgacgttcata

SEQ ID NO: 125675 - DNA, 25 bp, Canis familiaris
gaggcagtgcatgcatgttggggtt

SEQ ID NO: 125676 - DNA, 25 bp, Canis familiaris
gaggcagtgcatgcatgttggggtt

SEQ ID NO: 125677 - DNA, 25 bp, Canis familiaris
gaggcctgggctgatgagaggttcc

SEQ ID NO: 125678 - DNA, 25 bp, Canis familiaris
gaggcctactgtttaattgtgtctg

SEQ ID NO: 125679 - DNA, 25 bp, Canis familiaris
gaggctccactgattaatggcactt

SEQ ID NO: 125680 - DNA, 25 bp, Canis familiaris
gaggctttgtagtcttcaggagtta

SEQ ID NO: 125681 - DNA, 25 bp, Canis familiaris
gaggctgtggacattatcggagtgt

SEQ ID NO: 125682 - DNA, 25 bp, Canis familiaris
gaggctgtagacattgtggggtctc

SEQ ID NO: 125683 - DNA, 25 bp, Canis familiaris
gatggctgaacgcttggaggactct

SEQ ID NO: 125684 - DNA, 25 bp, Canis familiaris
gatggtgaacagtgaagccaactct

SEQ ID NO: 125685 - DNA, 25 bp, Canis familiaris
gatggtaccacatcttctaactcca

SEQ ID NO: 125686 - DNA, 25 bp, Canis familiaris
gatggctaaacgattcttactcagt

SEQ ID NO: 125687 - DNA, 25 bp, Canis familiaris
gaggcttatcatttttcttactggg

SEQ ID NO: 125688 - DNA, 25 bp, Canis familiaris
gaggcctgacatgtctgtttcagcg

SEQ ID NO: 125689 - DNA, 25 bp, Canis familiaris
gaggccagatctttgtgatcattac

SEQ ID NO: 125690 - DNA, 25 bp, Canis familiaris
gaggcctggctattgcaatatttac

SEQ ID NO: 125691 - DNA, 25 bp, Canis familiaris
gatggaagacattattattttggct

SEQ ID NO: 125692 - DNA, 25 bp, Canis familiaris
gatggattgacttttactttgcttt

SEQ ID NO: 125693 - DNA, 25 bp, Canis familiaris
gaggctagagttttgactatcttgt

SEQ ID NO: 125694 - DNA, 25 bp, Canis familiaris
gaggccaggtgttagtgtcagtctg

SEQ ID NO: 125695 - DNA, 25 bp, Canis familiaris
gaggctagagatgtactgtgcaccc

SEQ ID NO: 125696 - DNA, 25 bp, Canis familiaris
gaggctagagagcttcttgagtcga

SEQ ID NO: 125697 - DNA, 25 bp, Canis familiaris
gatggccagggcattcttgcaatca

SEQ ID NO: 125698 - DNA, 25 bp, Canis familiaris
gatggctgcgaacttcctagattgt

SEQ ID NO: 125699 - DNA, 25 bp, Canis familiaris
gaggcatgtaataccaagaattgtt

SEQ ID NO: 125700 - DNA, 25 bp, Canis familiaris
gatggttacaatgcaagacttgttg

SEQ ID NO: 125701 - DNA, 25 bp, Canis familiaris
gatgggagcaaaacaaactggtcag

SEQ ID NO: 125702 - DNA, 25 bp, Canis familiaris
gatggctaaggaaaaactggctcag

SEQ ID NO: 125703 - DNA, 25 bp, Canis familiaris
gatggccgaggaaaagccgggcaac

SEQ ID NO: 125704 - DNA, 25 bp, Canis familiaris
gatggcggaagaaaagctgacccac

SEQ ID NO: 125705 - DNA, 25 bp, Canis familiaris
gaggcaggccagagaaagtcatcaa

SEQ ID NO: 125706 - DNA, 25 bp, Canis familiaris
gaggcaggctcagctggaagctcaa

SEQ ID NO: 125707 - DNA, 25 bp, Canis familiaris
gaggccatgtcaagttgaagcgcca

SEQ ID NO: 125708 - DNA, 25 bp, Canis familiaris
gaggcttgtacaaagaaggccagaa

SEQ ID NO: 125709 - DNA, 25 bp, Canis familiaris
gaggcttgtaccaagaaggcccaga

SEQ ID NO: 125710 - DNA, 25 bp, Canis familiaris
gaggctcttgaacaagaccaacaag

SEQ ID NO: 125711 - DNA, 25 bp, Canis familiaris
gaggccagagaataaaccgcatccg

SEQ ID NO: 125712 - DNA, 25 bp, Canis familiaris
gaggcgcatgagttctccaacacct

SEQ ID NO: 125713 - DNA, 25 bp, Canis familiaris
gaggcgttgctgatgccagagagct

SEQ ID NO: 125714 - DNA, 25 bp, Canis familiaris
gaggcctcttgtggacatagagcat

SEQ ID NO: 125715 - DNA, 25 bp, Canis familiaris
gaggccatatttggatcctggttct

SEQ ID NO: 125716 - DNA, 25 bp, Canis familiaris
gatggccatcagtggtggcttcatt

SEQ ID NO: 125717 - DNA, 25 bp, Canis familiaris
gaggccaggatgcgtagtgtgcttc

SEQ ID NO: 125718 - DNA, 25 bp, Canis familiaris
gaggctggggcccagagtgtctcta

SEQ ID NO: 125719 - DNA, 25 bp, Canis familiaris
gaggctgctcagtccaaagtggcct

SEQ ID NO: 125720 - DNA, 25 bp, Canis familiaris
gatgggccaacccaatgtatcccga

SEQ ID NO: 125721 - DNA, 25 bp, Canis familiaris
gaggcccaaactaagttgccacagg

SEQ ID NO: 125722 - DNA, 25 bp, Canis familiaris
gaggccaaagtctcagtgcctcaca

SEQ ID NO: 125723 - DNA, 25 bp, Canis familiaris
gaggccacaggttcaaagacccaaa

SEQ ID NO: 125724 - DNA, 25 bp, Canis familiaris
gaggctcgggtttaaatctcagcta

SEQ ID NO: 125725 - DNA, 25 bp, Canis familiaris
gaggcccttgtgaaaaaccatctac

SEQ ID NO: 125726 - DNA, 25 bp, Canis familiaris
gaggccaatccgaataaacgtctca

SEQ ID NO: 125727 - DNA, 25 bp, Canis familiaris
gaggccaaccacgaatgaagctgac

SEQ ID NO: 125728 - DNA, 25 bp, Canis familiaris
gaggcctcctcacagctggaggaag

SEQ ID NO: 125729 - DNA, 25 bp, Canis familiaris
gaggcccactcactagtgttgaata

SEQ ID NO: 125730 - DNA, 25 bp, Canis familiaris
gaggccaagctcaaacgtttaagta

SEQ ID NO: 125731 - DNA, 25 bp, Canis familiaris
gaggctattgccaaacgctgttaac

SEQ ID NO: 125732 - DNA, 25 bp, Canis familiaris
gaggctttgccacttggtttagttt

SEQ ID NO: 125733 - DNA, 25 bp, Canis familiaris
gaggctattctattctagtttgagt

SEQ ID NO: 125734 - DNA, 25 bp, Canis familiaris
gaggcttttactgatggccagatgt

SEQ ID NO: 125735 - DNA, 25 bp, Canis familiaris
gaggcgttcaaggcttgtcgatgtg

SEQ ID NO: 125736 - DNA, 25 bp, Canis familiaris
gaggctattcaagatctctggcagt

SEQ ID NO: 125737 - DNA, 25 bp, Canis familiaris
gaggctattcaagatctctggcagt

SEQ ID NO: 125738 - DNA, 25 bp, Canis familiaris
gaggctcctacagatgtttcagtgc

SEQ ID NO: 125739 - DNA, 25 bp, Canis familiaris
gatggctccgaggattttgtcagtg

SEQ ID NO: 125740 - DNA, 25 bp, Canis familiaris
gaggccgtgggttttgatatgataa

SEQ ID NO: 125741 - DNA, 25 bp, Canis familiaris
gaggccttgggaaactgccagaaag

SEQ ID NO: 125742 - DNA, 25 bp, Canis familiaris
gaggcgtggggaaaatggcagacag

SEQ ID NO: 125743 - DNA, 25 bp, Canis familiaris
gaggcgtggggaaaatggcagacag

SEQ ID NO: 125744 - DNA, 25 bp, Canis familiaris
gatggagtgggggaagggccgagcg

SEQ ID NO: 125745 - DNA, 25 bp, Canis familiaris
gatgtagaccgggacggtgtgggcg

SEQ ID NO: 125746 - DNA, 25 bp, Canis familiaris
gatgttacccaggccaaggggcatg

SEQ ID NO: 125747 - DNA, 25 bp, Canis familiaris
gatgtgtgtcccaacacaaggtggt

SEQ ID NO: 125748 - DNA, 25 bp, Canis familiaris
gatgtttacccatcagagtcgtctg

SEQ ID NO: 125749 - DNA, 25 bp, Canis familiaris
gatgaattaccacaccatttccaat

SEQ ID NO: 125750 - DNA, 25 bp, Canis familiaris
gatgtttccaaatccattttcaatg

SEQ ID NO: 125751 - DNA, 25 bp, Canis familiaris
gattggctctatcaacgttttattg

SEQ ID NO: 125752 - DNA, 25 bp, Canis familiaris
gatggagccttggagttttttttgt

SEQ ID NO: 125753 - DNA, 25 bp, Canis familiaris
gatggacatccgggttgttttctcg

SEQ ID NO: 125754 - DNA, 25 bp, Canis familiaris
gaggccacaaaggcttgttctcctc

SEQ ID NO: 125755 - DNA, 25 bp, Canis familiaris
gaggccaaaggttgatgctcttccc

SEQ ID NO: 125756 - DNA, 25 bp, Canis familiaris
gaggctcaaaagcatgcttctcccc

SEQ ID NO: 125757 - DNA, 25 bp, Canis familiaris
gatggccaaatgctttacacacagc

SEQ ID NO: 125758 - DNA, 25 bp, Canis familiaris
gatggccaaatgcttcttaagaatc

SEQ ID NO: 125759 - DNA, 25 bp, Canis familiaris
gaggcctgcagtattcttgggaagc

SEQ ID NO: 125760 - DNA, 25 bp, Canis familiaris
gatggcaccagtttgtcttttaatt

SEQ ID NO: 125761 - DNA, 25 bp, Canis familiaris
gatggggcaagaagtcatttaaatt

SEQ ID NO: 125762 - DNA, 25 bp, Canis familiaris
gatggggcaaacatactgtcacgcg

SEQ ID NO: 125763 - DNA, 25 bp, Canis familiaris
gatgggaaaatttcaccacactgag

SEQ ID NO: 125764 - DNA, 25 bp, Canis familiaris
gatggaggatcatctcatcaccacc

SEQ ID NO: 125765 - DNA, 25 bp, Canis familiaris
gatggaagtagaacatactacgcag

SEQ ID NO: 125766 - DNA, 25 bp, Canis familiaris
gatggaatgaaaaatgccttggcgc

SEQ ID NO: 125767 - DNA, 25 bp, Canis familiaris
gatggcaaggagtgtcctctctgtc

SEQ ID NO: 125768 - DNA, 25 bp, Canis familiaris
gaggcgacaagatgtgtctctcatg

SEQ ID NO: 125769 - DNA, 25 bp, Canis familiaris
gaggcgacaagcaacaacaatcata

SEQ ID NO: 125770 - DNA, 25 bp, Canis familiaris
gaggccagcgccaaggagaacatca

SEQ ID NO: 125771 - DNA, 25 bp, Canis familiaris
gatggccaaggtttagaacacattt

SEQ ID NO: 125772 - DNA, 25 bp, Canis familiaris
gaggccaagctgataaaacacaaga

SEQ ID NO: 125773 - DNA, 25 bp, Canis familiaris
gatggctccactttaaaaccaacag

SEQ ID NO: 125774 - DNA, 25 bp, Canis familiaris
gatggctccatttaaaacaaacagg

SEQ ID NO: 125775 - DNA, 25 bp, Canis familiaris
gatggtcgcttctacaacaacaacg

SEQ ID NO: 125776 - DNA, 25 bp, Canis familiaris
gatgtctcgactgtgttcaacaact

SEQ ID NO: 125777 - DNA, 25 bp, Canis familiaris
gatgtcaagagctgtgttacctaga

SEQ ID NO: 125778 - DNA, 25 bp, Canis familiaris
gatggaatcatgcggtatccacgag

SEQ ID NO: 125779 - DNA, 25 bp, Canis familiaris
gatggaccggttatccacgagaact

SEQ ID NO: 125780 - DNA, 25 bp, Canis familiaris
gatggacgacgggacccaggaacac

SEQ ID NO: 125781 - DNA, 25 bp, Canis familiaris
gatggacgacctggaccgaaacaag

SEQ ID NO: 125782 - DNA, 25 bp, Canis familiaris
gatggggccccgaggagagaagagg

SEQ ID NO: 125783 - DNA, 25 bp, Canis familiaris
gggggcctttggaggaagggctgtg

SEQ ID NO: 125784 - DNA, 25 bp, Canis familiaris
gatgtgggttttgaattaagggctt

SEQ ID NO: 125785 - DNA, 25 bp, Canis familiaris
gaggcggtttgtgcagttcaatggg

SEQ ID NO: 125786 - DNA, 25 bp, Canis familiaris
gatagtggttggtggttgttggttg

SEQ ID NO: 125787 - DNA, 25 bp, Canis familiaris
gatttggggatttggttggctttag

SEQ ID NO: 125788 - DNA, 25 bp, Canis familiaris
gatgcttgggagatccgggggttga

SEQ ID NO: 125789 - DNA, 25 bp, Canis familiaris
gatgtagggggtcctgaggtttctc

SEQ ID NO: 125790 - DNA, 25 bp, Canis familiaris
gatgtaaataggagcgacgttgtac

SEQ ID NO: 125791 - DNA, 25 bp, Canis familiaris
gatctggaatgggggcaacttttat

SEQ ID NO: 125792 - DNA, 25 bp, Canis familiaris
gatcggacttgtgaaactgcttgtg

SEQ ID NO: 125793 - DNA, 25 bp, Canis familiaris
gatgggagctcggaactttgtcgtg

SEQ ID NO: 125794 - DNA, 25 bp, Canis familiaris
gaggctcagtagcaacctgtgttgt

SEQ ID NO: 125795 - DNA, 25 bp, Canis familiaris
gaggcctgaagctaagatgggtctt

SEQ ID NO: 125796 - DNA, 25 bp, Canis familiaris
gaggcccagagcaagcggggcatcc

SEQ ID NO: 125797 - DNA, 25 bp, Canis familiaris
gaggcccgtgctacgggatcttgag

SEQ ID NO: 125798 - DNA, 25 bp, Canis familiaris
gaggctgccttgaggaggatgaggg

SEQ ID NO: 125799 - DNA, 25 bp, Canis familiaris
gaggctgccttaagagtgccttggg

SEQ ID NO: 125800 - DNA, 25 bp, Canis familiaris
gaggccttctatgagtgccttgtgc

SEQ ID NO: 125801 - DNA, 25 bp, Canis familiaris
gaggccagctattgagaatcctttg

SEQ ID NO: 125802 - DNA, 25 bp, Canis familiaris
gatggccactcattagactagttta

SEQ ID NO: 125803 - DNA, 25 bp, Canis familiaris
gatggcaacttggacatgtggattt

SEQ ID NO: 125804 - DNA, 25 bp, Canis familiaris
gatggagacggccaggtcaattatg

SEQ ID NO: 125805 - DNA, 25 bp, Canis familiaris
gatgggcactaaccagttatctatg

SEQ ID NO: 125806 - DNA, 25 bp, Canis familiaris
gatggagcctgagtatcggctacca

SEQ ID NO: 125807 - DNA, 25 bp, Canis familiaris
gatggtcccgtagagtcaccaggac

SEQ ID NO: 125808 - DNA, 25 bp, Canis familiaris
gatggtccgagtacaagtaaaggtt

SEQ ID NO: 125809 - DNA, 25 bp, Canis familiaris
gatgtgtcccagatcagttaggtag

SEQ ID NO: 125810 - DNA, 25 bp, Canis familiaris
gatggtccctgtcggttatgtggaa

SEQ ID NO: 125811 - DNA, 25 bp, Canis familiaris
gatgggccctggggtcacaggggaa

SEQ ID NO: 125812 - DNA, 25 bp, Canis familiaris
gatgggctccggggtatgagttggc

SEQ ID NO: 125813 - DNA, 25 bp, Canis familiaris
gatggcgctaggcgtgtacgttggg

SEQ ID NO: 125814 - DNA, 25 bp, Canis familiaris
gatggcgatgaggagttctacgtgg

SEQ ID NO: 125815 - DNA, 25 bp, Canis familiaris
gaggctgagcaggagctactgtctg

SEQ ID NO: 125816 - DNA, 25 bp, Canis familiaris
gaggctccagagactactacagcag

SEQ ID NO: 125817 - DNA, 25 bp, Canis familiaris
gaggcctcagggaatgctacaggaa

SEQ ID NO: 125818 - DNA, 25 bp, Canis familiaris
gatggccccggttgtaaggtgaact

SEQ ID NO: 125819 - DNA, 25 bp, Canis familiaris
gattgaagcccgagtaagggaagcc

SEQ ID NO: 125820 - DNA, 25 bp, Canis familiaris
gatggggccctgatggatggtggaa

SEQ ID NO: 125821 - DNA, 25 bp, Canis familiaris
gaggcccttctgagcagatgtggct

SEQ ID NO: 125822 - DNA, 25 bp, Canis familiaris
gatggcttcttttccagtgagtgct

SEQ ID NO: 125823 - DNA, 25 bp, Canis familiaris
gatggtctcttttaacttggccttc

SEQ ID NO: 125824 - DNA, 25 bp, Canis familiaris
gatggcccttgtttgactagggatc

SEQ ID NO: 125825 - DNA, 25 bp, Canis familiaris
gatggcctccttcgtgacggaggtc

SEQ ID NO: 125826 - DNA, 25 bp, Canis familiaris
gatggcccgctttgtgaggggggat

SEQ ID NO: 125827 - DNA, 25 bp, Canis familiaris
gaggccccaggtgatggaggatggc

SEQ ID NO: 125828 - DNA, 25 bp, Canis familiaris
gatggcctacagttttgagggctac

SEQ ID NO: 125829 - DNA, 25 bp, Canis familiaris
gaggcctatttatttgcaggagcac

SEQ ID NO: 125830 - DNA, 25 bp, Canis familiaris
gatgtccgacttatccgagagcagc

SEQ ID NO: 125831 - DNA, 25 bp, Canis familiaris
gaggctgggcatgtggccgaagact

SEQ ID NO: 125832 - DNA, 25 bp, Canis familiaris
gaggctgtggaggatggcttggaag

SEQ ID NO: 125833 - DNA, 25 bp, Canis familiaris
gaggctgctaaggatctcttatata

SEQ ID NO: 125834 - DNA, 25 bp, Canis familiaris
gatggactgcaagccattggaatac

SEQ ID NO: 125835 - DNA, 25 bp, Canis familiaris
gatggatacaatggctacggatttc

SEQ ID NO: 125836 - DNA, 25 bp, Canis familiaris
gatggcacaaacgtagagctgttat

SEQ ID NO: 125837 - DNA, 25 bp, Canis familiaris
gatggcccaatgttaaatgttattt

SEQ ID NO: 125838 - DNA, 25 bp, Canis familiaris
gatggccaagatgtgtcaagggttt

SEQ ID NO: 125839 - DNA, 25 bp, Canis familiaris
gatggctaagatgttgctgatgctg

SEQ ID NO: 125840 - DNA, 25 bp, Canis familiaris
gaggccagagtggtctggtgggagc

SEQ ID NO: 125841 - DNA, 25 bp, Canis familiaris
gaggccatagtcaatagggaaagct

SEQ ID NO: 125842 - DNA, 25 bp, Canis familiaris
gatggcctggtccatggggaaacca

SEQ ID NO: 125843 - DNA, 25 bp, Canis familiaris
gaggcctgagctgtggggctgaatc

SEQ ID NO: 125844 - DNA, 25 bp, Canis familiaris
gatggcctagcagctggggaggcag

SEQ ID NO: 125845 - DNA, 25 bp, Canis familiaris
gatggatctacagcatgggagctta

SEQ ID NO: 125846 - DNA, 25 bp, Canis familiaris
gatgattataacggggcagggaact

SEQ ID NO: 125847 - DNA, 25 bp, Canis familiaris
gatgtacaaagagggtcgacgagat

SEQ ID NO: 125848 - DNA, 25 bp, Canis familiaris
gatggtcaacgagagacccggtccg

SEQ ID NO: 125849 - DNA, 25 bp, Canis familiaris
gaggccaagaagggaccgtgaggcc

SEQ ID NO: 125850 - DNA, 25 bp, Canis familiaris
gaggcctagaggggagcccagggcc

SEQ ID NO: 125851 - DNA, 25 bp, Canis familiaris
gaggccaaggcggggcctgaggtgc

SEQ ID NO: 125852 - DNA, 25 bp, Canis familiaris
gaggccgagacgtggctgggcctca

SEQ ID NO: 125853 - DNA, 25 bp, Canis familiaris
gaggccgagatgggagtgggggctc

SEQ ID NO: 125854 - DNA, 25 bp, Canis familiaris
gatggccgagtggcacagctggagc

SEQ ID NO: 125855 - DNA, 25 bp, Canis familiaris
gaggcgctgaggaaatgcgccagcc

SEQ ID NO: 125856 - DNA, 25 bp, Canis familiaris
gaggcgcagagactacaggccatgc

SEQ ID NO: 125857 - DNA, 25 bp, Canis familiaris
gaggccaagctgataggccatggca

SEQ ID NO: 125858 - DNA, 25 bp, Canis familiaris
gatggacagatccttcaggccatga

SEQ ID NO: 125859 - DNA, 25 bp, Canis familiaris
gatgtgaggatccgtgggctcgaac

SEQ ID NO: 125860 - DNA, 25 bp, Canis familiaris
gatgtcaggcaggcctgggcgggtc

SEQ ID NO: 125861 - DNA, 25 bp, Canis familiaris
gatccactgaggctaggcgtgtttt

SEQ ID NO: 125862 - DNA, 25 bp, Canis familiaris
gaggcctcagggagagctgtgttcc

SEQ ID NO: 125863 - DNA, 25 bp, Canis familiaris
gaggcccagaggaccagagggtgct

SEQ ID NO: 125864 - DNA, 25 bp, Canis familiaris
gaggccaaggtcaagagcaaggtgt

SEQ ID NO: 125865 - DNA, 25 bp, Canis familiaris
gatggctgcatatatcatgagatga

SEQ ID NO: 125866 - DNA, 25 bp, Canis familiaris
gatggcagagaccacaggcatgagt

SEQ ID NO: 125867 - DNA, 25 bp, Canis familiaris
gatggcagatcagaccgtgaactgg

SEQ ID NO: 125868 - DNA, 25 bp, Canis familiaris
gatgtggaccacgcagtggcatctg

SEQ ID NO: 125869 - DNA, 25 bp, Canis familiaris
gatggcgcacacataatgatcgttg

SEQ ID NO: 125870 - DNA, 25 bp, Canis familiaris
gatggctgctgtattattcagttgg

SEQ ID NO: 125871 - DNA, 25 bp, Canis familiaris
gaggcctcgtttttgagttgtgttt

SEQ ID NO: 125872 - DNA, 25 bp, Canis familiaris
gaggcccgcttttggaaatattcac

SEQ ID NO: 125873 - DNA, 25 bp, Canis familiaris
gaggcgatccttgttataaattgaa

SEQ ID NO: 125874 - DNA, 25 bp, Canis familiaris
gatgtggttttgtttgattaatgtg

SEQ ID NO: 125875 - DNA, 25 bp, Canis familiaris
gatgggagcatttcaagtttacagt

SEQ ID NO: 125876 - DNA, 25 bp, Canis familiaris
gatgggggattcagactctacagtg

SEQ ID NO: 125877 - DNA, 25 bp, Canis familiaris
gatggaatggatctaacttctcaag

SEQ ID NO: 125878 - DNA, 25 bp, Canis familiaris
gatggcaatattttaatctttctag

SEQ ID NO: 125879 - DNA, 25 bp, Canis familiaris
gatggaatccatttacttacttaat

SEQ ID NO: 125880 - DNA, 25 bp, Canis familiaris
gatggcttacttgacttatttaatt

SEQ ID NO: 125881 - DNA, 25 bp, Canis familiaris
gatggttacgtgagctggatatgaa

SEQ ID NO: 125882 - DNA, 25 bp, Canis familiaris
gatggctaaagaagtggtatacaca

SEQ ID NO: 125883 - DNA, 25 bp, Canis familiaris
gatggacaaatatgtgtgtacacac

SEQ ID NO: 125884 - DNA, 25 bp, Canis familiaris
gatggtcagagattttgggaacccc

SEQ ID NO: 125885 - DNA, 25 bp, Canis familiaris
gatgagtgagttttagggtacccca

SEQ ID NO: 125886 - DNA, 25 bp, Canis familiaris
gatggcatggttaaagaggagcacg

SEQ ID NO: 125887 - DNA, 25 bp, Canis familiaris
gatggacatttaaaggacccgccct

SEQ ID NO: 125888 - DNA, 25 bp, Canis familiaris
gatggattcttaagggcaccaagtc

SEQ ID NO: 125889 - DNA, 25 bp, Canis familiaris
gatggatttttccaaggccaaattc

SEQ ID NO: 125890 - DNA, 25 bp, Canis familiaris
gatggagttttccaacactctttgg

SEQ ID NO: 125891 - DNA, 25 bp, Canis familiaris
gatgtggatttccactctccatttc

SEQ ID NO: 125892 - DNA, 25 bp, Canis familiaris
gatggatggtgcagcatgtctacat

SEQ ID NO: 125893 - DNA, 25 bp, Canis familiaris
gatggctgcttcggatactacaccg

SEQ ID NO: 125894 - DNA, 25 bp, Canis familiaris
gatggctgccatcagcaaggccagt

SEQ ID NO: 125895 - DNA, 25 bp, Canis familiaris
gatggctgctgtgagcaaggcctgt

SEQ ID NO: 125896 - DNA, 25 bp, Canis familiaris
gatggtggcgttccagagccggaac

SEQ ID NO: 125897 - DNA, 25 bp, Canis familiaris
gatggtcggatctcacaggctgaga

SEQ ID NO: 125898 - DNA, 25 bp, Canis familiaris
gatggcacggtgttacgactgcagc

SEQ ID NO: 125899 - DNA, 25 bp, Canis familiaris
gatggcttctggttataagcacgcc

SEQ ID NO: 125900 - DNA, 25 bp, Canis familiaris
gatgttgggagatttaagccccgca

SEQ ID NO: 125901 - DNA, 25 bp, Canis familiaris
gatgttgggcaggttaatccctggg

SEQ ID NO: 125902 - DNA, 25 bp, Canis familiaris
gttcgcgcacgagataaccgggatg

SEQ ID NO: 125903 - DNA, 25 bp, Canis familiaris
gttcgtgactctgatgaccgacggt

SEQ ID NO: 125904 - DNA, 25 bp, Canis familiaris
gatgtggtacctgtatcccatcagg

SEQ ID NO: 125905 - DNA, 25 bp, Canis familiaris
gatggtcgattcaattattccttgg

SEQ ID NO: 125906 - DNA, 25 bp, Canis familiaris
gatggaagactctttttcctttgta

SEQ ID NO: 125907 - DNA, 25 bp, Canis familiaris
gatggacccctttgtgttttgtgtc

SEQ ID NO: 125908 - DNA, 25 bp, Canis familiaris
gatgtaaccctttgttattgtttct

SEQ ID NO: 125909 - DNA, 25 bp, Canis familiaris
gatgttaacctttggtattctccac

SEQ ID NO: 125910 - DNA, 25 bp, Canis familiaris
gatgttaaattatgtcctgtcccct

SEQ ID NO: 125911 - DNA, 25 bp, Canis familiaris
gatgtcatttgtctactatttcccc

SEQ ID NO: 125912 - DNA, 25 bp, Canis familiaris
gatctttagtgtaccaggatttccc

SEQ ID NO: 125913 - DNA, 25 bp, Canis familiaris
gatgtttggtttgagtgtcttactt

SEQ ID NO: 125914 - DNA, 25 bp, Canis familiaris
gatggtggttctatagatgtttact

SEQ ID NO: 125915 - DNA, 25 bp, Canis familiaris
gatggggtctgtaaaatctttcttt

SEQ ID NO: 125916 - DNA, 25 bp, Canis familiaris
gatggggtcattaagcccgttcatg

SEQ ID NO: 125917 - DNA, 25 bp, Canis familiaris
gatgaaggccagttagtccaagtca

SEQ ID NO: 125918 - DNA, 25 bp, Canis familiaris
gatgattgccctttcagtggacagt

SEQ ID NO: 125919 - DNA, 25 bp, Canis familiaris
gatggtgccctgcatgaaggccagt

SEQ ID NO: 125920 - DNA, 25 bp, Canis familiaris
gatggagagcctggataaccctatg

SEQ ID NO: 125921 - DNA, 25 bp, Canis familiaris
gatggctggctctgaaagcactgtt

SEQ ID NO: 125922 - DNA, 25 bp, Canis familiaris
gatgtctgtgtctgtgactgacgtg

SEQ ID NO: 125923 - DNA, 25 bp, Canis familiaris
gatgtggttcaagggaatgcctggc

SEQ ID NO: 125924 - DNA, 25 bp, Canis familiaris
gatgggtgccactggaccaatgggc

SEQ ID NO: 125925 - DNA, 25 bp, Canis familiaris
gatggaagccagtgtcaggaagggg

SEQ ID NO: 125926 - DNA, 25 bp, Canis familiaris
gatggttgccagagggaaaggaggt

SEQ ID NO: 125927 - DNA, 25 bp, Canis familiaris
gatgtttccaatctaaataggcagt

SEQ ID NO: 125928 - DNA, 25 bp, Canis familiaris
gatggtctccaagctgaagaagccg

SEQ ID NO: 125929 - DNA, 25 bp, Canis familiaris
gatggtcctgcaagctgaaatgggc

SEQ ID NO: 125930 - DNA, 25 bp, Canis familiaris
gatggtgacatgcctgagatactga

SEQ ID NO: 125931 - DNA, 25 bp, Canis familiaris
gatgtgtgatgccagggtgttgatc

SEQ ID NO: 125932 - DNA, 25 bp, Canis familiaris
gatggctatggtcgtgatcgtgact

SEQ ID NO: 125933 - DNA, 25 bp, Canis familiaris
gatggtagtgatcagcctggaccgc

SEQ ID NO: 125934 - DNA, 25 bp, Canis familiaris
gatggaccaagcagtcagagtcgat

SEQ ID NO: 125935 - DNA, 25 bp, Canis familiaris
gaggcctcctctctcagtttttata

SEQ ID NO: 125936 - DNA, 25 bp, Canis familiaris
gatggaaccctaatcagttctctct

SEQ ID NO: 125937 - DNA, 25 bp, Canis familiaris
gatggttccactagaaatctccatg

SEQ ID NO: 125938 - DNA, 25 bp, Canis familiaris
gatggttcccttgcatatatttcaa

SEQ ID NO: 125939 - DNA, 25 bp, Canis familiaris
gatggataccactttgtattttcag

SEQ ID NO: 125940 - DNA, 25 bp, Canis familiaris
gatggattcatctatgttgcaatgc

SEQ ID NO: 125941 - DNA, 25 bp, Canis familiaris
gatggtgcacattagcaatctgctg

SEQ ID NO: 125942 - DNA, 25 bp, Canis familiaris
gatggcatgacttgtaattcttgtg

SEQ ID NO: 125943 - DNA, 25 bp, Canis familiaris
gatgtcagagattgtttccttgggg

SEQ ID NO: 125944 - DNA, 25 bp, Canis familiaris
gatggaggtctgaagtcttggagag

SEQ ID NO: 125945 - DNA, 25 bp, Canis familiaris
gatgggaatcagagtccgggatctg

SEQ ID NO: 125946 - DNA, 25 bp, Canis familiaris
gatggaaatcatgacccgagaggtg

SEQ ID NO: 125947 - DNA, 25 bp, Canis familiaris
gatgctgaactagtggcccagtgga

SEQ ID NO: 125948 - DNA, 25 bp, Canis familiaris
gatgtgcagcctgatggtccagatg

SEQ ID NO: 125949 - DNA, 25 bp, Canis familiaris
gatggcagacatcttgtcgcgagct

SEQ ID NO: 125950 - DNA, 25 bp, Canis familiaris
gatggatgcagacattatcttggca

SEQ ID NO: 125951 - DNA, 25 bp, Canis familiaris
gatggatgcacacagtcttggtcaa

SEQ ID NO: 125952 - DNA, 25 bp, Canis familiaris
gattagcatcaggggagggtccaac

SEQ ID NO: 125953 - DNA, 25 bp, Canis familiaris
gatggcagcccctggggatgtcaca

SEQ ID NO: 125954 - DNA, 25 bp, Canis familiaris
gatggcagcctgagcgaggagaccc

SEQ ID NO: 125955 - DNA, 25 bp, Canis familiaris
gatggagccagcattgtggggcccc

SEQ ID NO: 125956 - DNA, 25 bp, Canis familiaris
gatggagccagcttctggccaactc

SEQ ID NO: 125957 - DNA, 25 bp, Canis familiaris
gatggttcagtctgccacaacatcc

SEQ ID NO: 125958 - DNA, 25 bp, Canis familiaris
gatgttgtaggaggacacagacgca

SEQ ID NO: 125959 - DNA, 25 bp, Canis familiaris
gatggattgggagctccggctccac

SEQ ID NO: 125960 - DNA, 25 bp, Canis familiaris
gatggaggaaaccacctgagctaca

SEQ ID NO: 125961 - DNA, 25 bp, Canis familiaris
gatgctggataaactgaccggcgtg

SEQ ID NO: 125962 - DNA, 25 bp, Canis familiaris
gatgtgctgaaaactcagacttcct

SEQ ID NO: 125963 - DNA, 25 bp, Canis familiaris
gatgtctacaatcctcagtttaata

SEQ ID NO: 125964 - DNA, 25 bp, Canis familiaris
gatgcttgagacccagactttaatc

SEQ ID NO: 125965 - DNA, 25 bp, Canis familiaris
gatgtgtggcccaagactacttcaa

SEQ ID NO: 125966 - DNA, 25 bp, Canis familiaris
gatggggctcacaagatcacccaga

SEQ ID NO: 125967 - DNA, 25 bp, Canis familiaris
gatgaccagtcacaacagtcctatg

SEQ ID NO: 125968 - DNA, 25 bp, Canis familiaris
gatgaaccatcagaacaacctgtga

SEQ ID NO: 125969 - DNA, 25 bp, Canis familiaris
gatggccgcacggaagggactggac

SEQ ID NO: 125970 - DNA, 25 bp, Canis familiaris
gaggccaacggatcaggaggcaaca

SEQ ID NO: 125971 - DNA, 25 bp, Canis familiaris
gaggccatgccagagaacttgggga

SEQ ID NO: 125972 - DNA, 25 bp, Canis familiaris
gaggccagctcagattcaagtgggg

SEQ ID NO: 125973 - DNA, 25 bp, Canis familiaris
gatggcaacacagcatttcggtggg

SEQ ID NO: 125974 - DNA, 25 bp, Canis familiaris
gatgtgacgactgttgtctgggtgt

SEQ ID NO: 125975 - DNA, 25 bp, Canis familiaris
gatggactattgtcttgctcactcg

SEQ ID NO: 125976 - DNA, 25 bp, Canis familiaris
gatggctctgagagattcctctgcg

SEQ ID NO: 125977 - DNA, 25 bp, Canis familiaris
gatgatcctgagtgttcgttaaacc

SEQ ID NO: 125978 - DNA, 25 bp, Canis familiaris
gatgttctagggtgcgtacacttcc

SEQ ID NO: 125979 - DNA, 25 bp, Canis familiaris
gatgttgtagccacaatgtacctgc

SEQ ID NO: 125980 - DNA, 25 bp, Canis familiaris
gatggtggaccttctttacagagct

SEQ ID NO: 125981 - DNA, 25 bp, Canis familiaris
gatggaatgccctctgttaaacatg

SEQ ID NO: 125982 - DNA, 25 bp, Canis familiaris
gatggcaagcccgggagaaggactg

SEQ ID NO: 125983 - DNA, 25 bp, Canis familiaris
gatggactccccgatgagatagggt

SEQ ID NO: 125984 - DNA, 25 bp, Canis familiaris
gatggtcacctctgcaagtgcaggg

SEQ ID NO: 125985 - DNA, 25 bp, Canis familiaris
gatggaaccatcttgaagtagctgg

SEQ ID NO: 125986 - DNA, 25 bp, Canis familiaris
gatggagccacgttggagggctggg

SEQ ID NO: 125987 - DNA, 25 bp, Canis familiaris
gttgacaacgttcactgctcaggac

SEQ ID NO: 125988 - DNA, 25 bp, Canis familiaris
gatgtacaacatcactaatcatagg

SEQ ID NO: 125989 - DNA, 25 bp, Canis familiaris
gatgttcaaccaatccattgatgaa

SEQ ID NO: 125990 - DNA, 25 bp, Canis familiaris
gatgttcattcagcccaaagaagcc

SEQ ID NO: 125991 - DNA, 25 bp, Canis familiaris
gatgtccagaagagccaagagatat

SEQ ID NO: 125992 - DNA, 25 bp, Canis familiaris
gatgttaacagatgccacacacaca

SEQ ID NO: 125993 - DNA, 25 bp, Canis familiaris
gatgtccacagaaccaaacaccaac

SEQ ID NO: 125994 - DNA, 25 bp, Canis familiaris
gatgtccaggttgccaagaacaagc

SEQ ID NO: 125995 - DNA, 25 bp, Canis familiaris
gatgtcccagtgcacctagaaaatc

SEQ ID NO: 125996 - DNA, 25 bp, Canis familiaris
gatgtcccatttttttaagactgct

SEQ ID NO: 125997 - DNA, 25 bp, Canis familiaris
gatgtcaaattttctttctagctct

SEQ ID NO: 125998 - DNA, 25 bp, Canis familiaris
gatgaaaatttaacctctagtgcta

SEQ ID NO: 125999 - DNA, 25 bp, Canis familiaris
gatgagaaatttttacctggggtgt

SEQ ID NO: 126000 - DNA, 25 bp, Canis familiaris
gatgtgggacttgaaccggggtctc

SEQ ID NO: 126001 - DNA, 25 bp, Canis familiaris
gatggggacctgaatacctgggagc

SEQ ID NO: 126002 - DNA, 25 bp, Canis familiaris
gatggttgccctttcaggtgggaca

SEQ ID NO: 126003 - DNA, 25 bp, Canis familiaris
gatgtttgttctttccgttagatca

SEQ ID NO: 126004 - DNA, 25 bp, Canis familiaris
gatggttgtcatggaaccgtcggtc

SEQ ID NO: 126005 - DNA, 25 bp, Canis familiaris
gatgtggttctggacaccttggagc

SEQ ID NO: 126006 - DNA, 25 bp, Canis familiaris
gatggagttatgcacaagattgaca

SEQ ID NO: 126007 - DNA, 25 bp, Canis familiaris
gatgtgtgatttcaccgaggaccag

SEQ ID NO: 126008 - DNA, 25 bp, Canis familiaris
gatggatttagacccagcagaagta

SEQ ID NO: 126009 - DNA, 25 bp, Canis familiaris
gatgtgactactatctggaaagtgt

SEQ ID NO: 126010 - DNA, 25 bp, Canis familiaris
gatgggctactttggcgtgaagatt

SEQ ID NO: 126011 - DNA, 25 bp, Canis familiaris
gaggccatattataggtgcacacat

SEQ ID NO: 126012 - DNA, 25 bp, Canis familiaris
gaggccttgcatttgaggtggcagc

SEQ ID NO: 126013 - DNA, 25 bp, Canis familiaris
gaggccttctcatcatggggccttg

SEQ ID NO: 126014 - DNA, 25 bp, Canis familiaris
gatgggctttcatcacaagcctctc

SEQ ID NO: 126015 - DNA, 25 bp, Canis familiaris
gatggcctttatactcaatccacac

SEQ ID NO: 126016 - DNA, 25 bp, Canis familiaris
gaggccatctatgacatctgtcgta

SEQ ID NO: 126017 - DNA, 25 bp, Canis familiaris
gaggccttcctggatatggatgcta

SEQ ID NO: 126018 - DNA, 25 bp, Canis familiaris
gaggccagtggggatagcgatgctg

SEQ ID NO: 126019 - DNA, 25 bp, Canis familiaris
gaggccagtggactgtgtgtgtgtg

SEQ ID NO: 126020 - DNA, 25 bp, Canis familiaris
gaggccagagcggcattatgggctg

SEQ ID NO: 126021 - DNA, 25 bp, Canis familiaris
gatggcttcatcgctaatgtggctc

SEQ ID NO: 126022 - DNA, 25 bp, Canis familiaris
gatggcattatagcatcataatctg

SEQ ID NO: 126023 - DNA, 25 bp, Canis familiaris
gatggcatcttcaaagctgaactga

SEQ ID NO: 126024 - DNA, 25 bp, Canis familiaris
gatggctctcgacactgagagtgcc

SEQ ID NO: 126025 - DNA, 25 bp, Canis familiaris
gatggcttggacttctgcagagata

SEQ ID NO: 126026 - DNA, 25 bp, Canis familiaris
gatggatatgtgcccctgggagaga

SEQ ID NO: 126027 - DNA, 25 bp, Canis familiaris
gatgtgaggcgacccctgggtcaat

SEQ ID NO: 126028 - DNA, 25 bp, Canis familiaris
gatggaggagcaggggctggcggat

SEQ ID NO: 126029 - DNA, 25 bp, Canis familiaris
gatggagaagaggttgggcttttaa

SEQ ID NO: 126030 - DNA, 25 bp, Canis familiaris
gatgggaatcaaacgggctcttata

SEQ ID NO: 126031 - DNA, 25 bp, Canis familiaris
gatggggatcggggattgcaattat

SEQ ID NO: 126032 - DNA, 25 bp, Canis familiaris
gatggggatcggggattgcaattat

SEQ ID NO: 126033 - DNA, 25 bp, Canis familiaris
gatggggtggagggcattgcctagc

SEQ ID NO: 126034 - DNA, 25 bp, Canis familiaris
gatggcgttaagggctgtgatgctc

SEQ ID NO: 126035 - DNA, 25 bp, Canis familiaris
gatgtggctctggagggtgtgggcc

SEQ ID NO: 126036 - DNA, 25 bp, Canis familiaris
gatggtcagcagcagtggtgaagag

SEQ ID NO: 126037 - DNA, 25 bp, Canis familiaris
gaggccatgcgcattggagcagagg

SEQ ID NO: 126038 - DNA, 25 bp, Canis familiaris
gatggacagcctaaggagctgcagg

SEQ ID NO: 126039 - DNA, 25 bp, Canis familiaris
gatggaagctgtggatggggaagag

SEQ ID NO: 126040 - DNA, 25 bp, Canis familiaris
gatggactgtgtgtggagcaactgg

SEQ ID NO: 126041 - DNA, 25 bp, Canis familiaris
gatgtgcactgattttagaccggag

SEQ ID NO: 126042 - DNA, 25 bp, Canis familiaris
gatgtcactggattttaccaagtaa

SEQ ID NO: 126043 - DNA, 25 bp, Canis familiaris
gatgatctcatcaaattacacccag

SEQ ID NO: 126044 - DNA, 25 bp, Canis familiaris
gatgatgccatttggtcagttgcct

SEQ ID NO: 126045 - DNA, 25 bp, Canis familiaris
gatggcgcttgacaagatcgccttt

SEQ ID NO: 126046 - DNA, 25 bp, Canis familiaris
gatggccttgagtagaacctgaatt

SEQ ID NO: 126047 - DNA, 25 bp, Canis familiaris
gatgaactttcatagtcctaatgtc

SEQ ID NO: 126048 - DNA, 25 bp, Canis familiaris
gatgatattttatgtttaatctgta

SEQ ID NO: 126049 - DNA, 25 bp, Canis familiaris
gatgcttttaaattcttacccttat

SEQ ID NO: 126050 - DNA, 25 bp, Canis familiaris
gatgttttaaagttattcccttgct

SEQ ID NO: 126051 - DNA, 25 bp, Canis familiaris
gatgtgacttaagagtagtaccagg

SEQ ID NO: 126052 - DNA, 25 bp, Canis familiaris
gatggttatactgtggttacctggt

SEQ ID NO: 126053 - DNA, 25 bp, Canis familiaris
gatggactcatgacttctggttacc

SEQ ID NO: 126054 - DNA, 25 bp, Canis familiaris
gatggagctctgagtgctggtggac

SEQ ID NO: 126055 - DNA, 25 bp, Canis familiaris
gatggtgcgcatgggccagaaggac

SEQ ID NO: 126056 - DNA, 25 bp, Canis familiaris
gatggcgcagctggagtcaaggtga

SEQ ID NO: 126057 - DNA, 25 bp, Canis familiaris
gatggtgcagcagggaggatgcgtg

SEQ ID NO: 126058 - DNA, 25 bp, Canis familiaris
gatggctggcgagaggatcgtccaa

SEQ ID NO: 126059 - DNA, 25 bp, Canis familiaris
gatgactgggaggacgactacgatt

SEQ ID NO: 126060 - DNA, 25 bp, Canis familiaris
gatgacatagaagttcggttcgtgt

SEQ ID NO: 126061 - DNA, 25 bp, Canis familiaris
gattctaagcagagcgagcctaggt

SEQ ID NO: 126062 - DNA, 25 bp, Canis familiaris
gatgtcgaagcgaggacgtggtggg

SEQ ID NO: 126063 - DNA, 25 bp, Canis familiaris
gatgttatcagagggaaggtggggg

SEQ ID NO: 126064 - DNA, 25 bp, Canis familiaris
gatgtggtgaagggccaggctttgg

SEQ ID NO: 126065 - DNA, 25 bp, Canis familiaris
gatgtggctgggccagccagtcttt

SEQ ID NO: 126066 - DNA, 25 bp, Canis familiaris
gatgtggcatgccctcagtaatttc

SEQ ID NO: 126067 - DNA, 25 bp, Canis familiaris
gatggcgagcgccttgtaaagtccc

SEQ ID NO: 126068 - DNA, 25 bp, Canis familiaris
gatggccacggctgcttccagctcc

SEQ ID NO: 126069 - DNA, 25 bp, Canis familiaris
gatggtctagagtcagcttgcaccc

SEQ ID NO: 126070 - DNA, 25 bp, Canis familiaris
gatggcgcttgagcaccgcatcggc

SEQ ID NO: 126071 - DNA, 25 bp, Canis familiaris
gatgtgtttgacggaagctcaggga

SEQ ID NO: 126072 - DNA, 25 bp, Canis familiaris
gatgggggacccactctatggaaaa

SEQ ID NO: 126073 - DNA, 25 bp, Canis familiaris
gatggagtagccccagtctttaaaa

SEQ ID NO: 126074 - DNA, 25 bp, Canis familiaris
gatggagatacatgacaggtttaaa

SEQ ID NO: 126075 - DNA, 25 bp, Canis familiaris
gatgggaatttgtcagagttctgcc

SEQ ID NO: 126076 - DNA, 25 bp, Canis familiaris
gatgggagttgtctgtgggccacat

SEQ ID NO: 126077 - DNA, 25 bp, Canis familiaris
gatgggcacctttgttggttccatt

SEQ ID NO: 126078 - DNA, 25 bp, Canis familiaris
gatggccagggttttctttccatcc

SEQ ID NO: 126079 - DNA, 25 bp, Canis familiaris
gatggagcaggattttttttctact

SEQ ID NO: 126080 - DNA, 25 bp, Canis familiaris
gatggactaattttgtttattaaag

SEQ ID NO: 126081 - DNA, 25 bp, Canis familiaris
gatggactgacacatttttttgaaa

SEQ ID NO: 126082 - DNA, 25 bp, Canis familiaris
gatggtttacactttttgttgaact

SEQ ID NO: 126083 - DNA, 25 bp, Canis familiaris
gatggtgattactggcgattgcttg

SEQ ID NO: 126084 - DNA, 25 bp, Canis familiaris
gatggatcttttcgggcttttggaa

SEQ ID NO: 126085 - DNA, 25 bp, Canis familiaris
gatgggcctttgggaggtgatatgg

SEQ ID NO: 126086 - DNA, 25 bp, Canis familiaris
gatggcccttttatgtctatgatgc

SEQ ID NO: 126087 - DNA, 25 bp, Canis familiaris
gatgggtcatgaattgggctttgag

SEQ ID NO: 126088 - DNA, 25 bp, Canis familiaris
gatggggcgatgagaggtggatgaa

SEQ ID NO: 126089 - DNA, 25 bp, Canis familiaris
gatggcgtcgagctcgggagatgac

SEQ ID NO: 126090 - DNA, 25 bp, Canis familiaris
gatgggggatgcttcgtgtgaacat

SEQ ID NO: 126091 - DNA, 25 bp, Canis familiaris
gatggaatgtctttctgtgtaacag

SEQ ID NO: 126092 - DNA, 25 bp, Canis familiaris
gatggattgtccgatttgatctccg

SEQ ID NO: 126093 - DNA, 25 bp, Canis familiaris
gatggtttctccttggagcctgaga

SEQ ID NO: 126094 - DNA, 25 bp, Canis familiaris
gatggcatggttgcaacttcctgga

SEQ ID NO: 126095 - DNA, 25 bp, Canis familiaris
gatggctgggatgaacttctgtgga

SEQ ID NO: 126096 - DNA, 25 bp, Canis familiaris
gatgggggatgggacacctgaggac

SEQ ID NO: 126097 - DNA, 25 bp, Canis familiaris
gatggtgggtgatacccaagccgcc

SEQ ID NO: 126098 - DNA, 25 bp, Canis familiaris
gatggtccaataaaccccatacacc

SEQ ID NO: 126099 - DNA, 25 bp, Canis familiaris
gatgattcctcaaaacctaaaccta

SEQ ID NO: 126100 - DNA, 25 bp, Canis familiaris
gatgttccccaaatattaaagccac

SEQ ID NO: 126101 - DNA, 25 bp, Canis familiaris
gatggctcctgcaaaattatgatta

SEQ ID NO: 126102 - DNA, 25 bp, Canis familiaris
gatggctcctccagagtcatgaaga

SEQ ID NO: 126103 - DNA, 25 bp, Canis familiaris
gatggctcctccagagtcatgaaga

SEQ ID NO: 126104 - DNA, 25 bp, Canis familiaris
gatggccctagcattactggatgcc

SEQ ID NO: 126105 - DNA, 25 bp, Canis familiaris
gatggaccgcatgttcagtgcagag

SEQ ID NO: 126106 - DNA, 25 bp, Canis familiaris
gatggcaccgtgaatcaaatcgaag

SEQ ID NO: 126107 - DNA, 25 bp, Canis familiaris
gatggaatcttgtctcacatttaga

SEQ ID NO: 126108 - DNA, 25 bp, Canis familiaris
gatggcatttgcttctcaatgttca

SEQ ID NO: 126109 - DNA, 25 bp, Canis familiaris
gatgtcatatcgttcttcgttactg

SEQ ID NO: 126110 - DNA, 25 bp, Canis familiaris
gatgtgctgacctgattgctaaact

SEQ ID NO: 126111 - DNA, 25 bp, Canis familiaris
gatgtgctactttgcctaaatactt

SEQ ID NO: 126112 - DNA, 25 bp, Canis familiaris
gatgactgacttccttaagaactat

SEQ ID NO: 126113 - DNA, 25 bp, Canis familiaris
gatgatgctgtgatgcctggatgga

SEQ ID NO: 126114 - DNA, 25 bp, Canis familiaris
gatgatgctgtgccagtattatctg

SEQ ID NO: 126115 - DNA, 25 bp, Canis familiaris
gatggcgttcagaatggttcagcgt

SEQ ID NO: 126116 - DNA, 25 bp, Canis familiaris
gatggcgtcatcaaagtgttcaatg

SEQ ID NO: 126117 - DNA, 25 bp, Canis familiaris
gatggctgttttatgttcagaggta

SEQ ID NO: 126118 - DNA, 25 bp, Canis familiaris
gatgatctctttcatgggtcatggg

SEQ ID NO: 126119 - DNA, 25 bp, Canis familiaris
gatgacccttcctggtttattaaat

SEQ ID NO: 126120 - DNA, 25 bp, Canis familiaris
gatgttttgtcctggaattactgaa

SEQ ID NO: 126121 - DNA, 25 bp, Canis familiaris
gatgctttttccttaataaacgtca

SEQ ID NO: 126122 - DNA, 25 bp, Canis familiaris
gatggttttccataataaactggga

SEQ ID NO: 126123 - DNA, 25 bp, Canis familiaris
gatgtttcttttataaataggagga

SEQ ID NO: 126124 - DNA, 25 bp, Canis familiaris
gattttttgtcctgtaattgggagt

SEQ ID NO: 126125 - DNA, 25 bp, Canis familiaris
gatgtttttgttccttaattcttgt

SEQ ID NO: 126126 - DNA, 25 bp, Canis familiaris
gtgttttctgaagcctaagttttag

SEQ ID NO: 126127 - DNA, 25 bp, Canis familiaris
gatggttttgaagcctgtacatttg

SEQ ID NO: 126128 - DNA, 25 bp, Canis familiaris
gatggcttggataacacctgttctc

SEQ ID NO: 126129 - DNA, 25 bp, Canis familiaris
gatgttgtgagagtgtcgtcgtttc

SEQ ID NO: 126130 - DNA, 25 bp, Canis familiaris
gatgttgaggccagggcaggtctcc

SEQ ID NO: 126131 - DNA, 25 bp, Canis familiaris
gatgttatggcccggggtgttcgac

SEQ ID NO: 126132 - DNA, 25 bp, Canis familiaris
gatgtcttggcacagaagggtcccc

SEQ ID NO: 126133 - DNA, 25 bp, Canis familiaris
gatgacttggaatttgaggggccat

SEQ ID NO: 126134 - DNA, 25 bp, Canis familiaris
gatgtccttaaaatgtggtctgcca

SEQ ID NO: 126135 - DNA, 25 bp, Canis familiaris
tagtaatttacacttggacagccgg

SEQ ID NO: 126136 - DNA, 25 bp, Canis familiaris
gatgggatttaccttggaacacgga

SEQ ID NO: 126137 - DNA, 25 bp, Canis familiaris
gatgagagattttagggtacctggg

SEQ ID NO: 126138 - DNA, 25 bp, Canis familiaris
gatgtatatttcttcggtattccgt

SEQ ID NO: 126139 - DNA, 25 bp, Canis familiaris
gatgaattttccacgtatgctcggt

SEQ ID NO: 126140 - DNA, 25 bp, Canis familiaris
gatggttttgtgatttagctgggta

SEQ ID NO: 126141 - DNA, 25 bp, Canis familiaris
gatggcttgttgggtgtacactggt

SEQ ID NO: 126142 - DNA, 25 bp, Canis familiaris
gatgatgattgggcggtgcaaccga

SEQ ID NO: 126143 - DNA, 25 bp, Canis familiaris
gatgtactggcctgatgtgatccat

SEQ ID NO: 126144 - DNA, 25 bp, Canis familiaris
gatgtcacgtcggtgaggtccagag

SEQ ID NO: 126145 - DNA, 25 bp, Canis familiaris
gatgtccgtcgcgtatcattgagcg

SEQ ID NO: 126146 - DNA, 25 bp, Canis familiaris
gatggtggtggtgatagtgagcagc

SEQ ID NO: 126147 - DNA, 25 bp, Canis familiaris
gatggaggtgccgtatgtggacagg

SEQ ID NO: 126148 - DNA, 25 bp, Canis familiaris
gatggagggctctttgtaatggacg

SEQ ID NO: 126149 - DNA, 25 bp, Canis familiaris
gatggatgagtccgcttgtcaagaa

SEQ ID NO: 126150 - DNA, 25 bp, Canis familiaris
gatgtcatattcaactttcagagaa

SEQ ID NO: 126151 - DNA, 25 bp, Canis familiaris
gatggctatatctcaatccagagaa

SEQ ID NO: 126152 - DNA, 25 bp, Canis familiaris
gatggctacaaactactcaaataaa

SEQ ID NO: 126153 - DNA, 25 bp, Canis familiaris
gatggctacagatgttcttatgtca

SEQ ID NO: 126154 - DNA, 25 bp, Canis familiaris
gatgcattactgtatttactgaata

SEQ ID NO: 126155 - DNA, 25 bp, Canis familiaris
gatgtgtgcagttcacttaccttga

SEQ ID NO: 126156 - DNA, 25 bp, Canis familiaris
gatggtgttaccttaccttgtttga

SEQ ID NO: 126157 - DNA, 25 bp, Canis familiaris
gatggttttcacttaatagattttt

SEQ ID NO: 126158 - DNA, 25 bp, Canis familiaris
gatggttgttgccgtaatagtatat

SEQ ID NO: 126159 - DNA, 25 bp, Canis familiaris
gatggtgatggtcagttaactatga

SEQ ID NO: 126160 - DNA, 25 bp, Canis familiaris
gatgtggattgttaggtatctgaag

SEQ ID NO: 126161 - DNA, 25 bp, Canis familiaris
gatggagtcagttagctgctatgca

SEQ ID NO: 126162 - DNA, 25 bp, Canis familiaris
gatggattccatcgatttatgcagt

SEQ ID NO: 126163 - DNA, 25 bp, Canis familiaris
gatggttgctatatttgcagacttg

SEQ ID NO: 126164 - DNA, 25 bp, Canis familiaris
gatggttgtgactttgtgtgccgct

SEQ ID NO: 126165 - DNA, 25 bp, Canis familiaris
gatggtcttaaaatttcctgtttca

SEQ ID NO: 126166 - DNA, 25 bp, Canis familiaris
gatggtcaataaatgttccttaatt

SEQ ID NO: 126167 - DNA, 25 bp, Canis familiaris
gatgtttttaagttccttgaagtca

SEQ ID NO: 126168 - DNA, 25 bp, Canis familiaris
gatgtttgttaaatcccgtggttca

SEQ ID NO: 126169 - DNA, 25 bp, Canis familiaris
gatgtgtttttgtgccaggtggtta

SEQ ID NO: 126170 - DNA, 25 bp, Canis familiaris
gatgtcatctattttttcaggggtt

SEQ ID NO: 126171 - DNA, 25 bp, Canis familiaris
gatgatagtgattgcttttggggag

SEQ ID NO: 126172 - DNA, 25 bp, Canis familiaris
gatgtgtgtgtttttctggagggag

SEQ ID NO: 126173 - DNA, 25 bp, Canis familiaris
gatgttcttttctctggatcaggaa

SEQ ID NO: 126174 - DNA, 25 bp, Canis familiaris
gatgttcatcctgctgtttggggaa

SEQ ID NO: 126175 - DNA, 25 bp, Canis familiaris
gatggtttctcgctctttgggagca

SEQ ID NO: 126176 - DNA, 25 bp, Canis familiaris
gatggtgtaggacgtcacggacgga

SEQ ID NO: 126177 - DNA, 25 bp, Canis familiaris
gatggttgaggatggtctgggcagg

SEQ ID NO: 126178 - DNA, 25 bp, Canis familiaris
gatggactgaggtcggtagtggatg

SEQ ID NO: 126179 - DNA, 25 bp, Canis familiaris
gatggatctgggtgggatggagaga

SEQ ID NO: 126180 - DNA, 25 bp, Canis familiaris
gatgaagcctggtgtacagggtgca

SEQ ID NO: 126181 - DNA, 25 bp, Canis familiaris
gatgagatccctccacttgagggtg

SEQ ID NO: 126182 - DNA, 25 bp, Canis familiaris
gatggtctcattccgtggacgaggt

SEQ ID NO: 126183 - DNA, 25 bp, Canis familiaris
gatggttctgtgcagtacctggttg

SEQ ID NO: 126184 - DNA, 25 bp, Canis familiaris
gatggtgtgtgtcagtcatttgggt

SEQ ID NO: 126185 - DNA, 25 bp, Canis familiaris
gatgtatgggggatatatatgtgtg

SEQ ID NO: 126186 - DNA, 25 bp, Canis familiaris
gatggagcgttgccaagattactgt

SEQ ID NO: 126187 - DNA, 25 bp, Canis familiaris
gatggttgcttctaaagatactgtt

SEQ ID NO: 126188 - DNA, 25 bp, Canis familiaris
gatgtgtgtcataaaaagcactttt

SEQ ID NO: 126189 - DNA, 25 bp, Canis familiaris
gatggatactgacaagaccctttgg

SEQ ID NO: 126190 - DNA, 25 bp, Canis familiaris
gatggatttgacacactcaccattt

SEQ ID NO: 126191 - DNA, 25 bp, Canis familiaris
gatggtttatcaatcttctctcaac

SEQ ID NO: 126192 - DNA, 25 bp, Canis familiaris
gatggatttatctttttgcctactg

SEQ ID NO: 126193 - DNA, 25 bp, Canis familiaris
gatggagcattgtcgattttccccc

SEQ ID NO: 126194 - DNA, 25 bp, Canis familiaris
gatggacattgattggttctcccca

SEQ ID NO: 126195 - DNA, 25 bp, Canis familiaris
gatgtgacatagcaggactccttct

SEQ ID NO: 126196 - DNA, 25 bp, Canis familiaris
gatcgaaatgggcacgactatgatt

SEQ ID NO: 126197 - DNA, 25 bp, Canis familiaris
gatgtgaaatgcccgaagacctgaa

SEQ ID NO: 126198 - DNA, 25 bp, Canis familiaris
gatgaggcaaggagccttcctggtg

SEQ ID NO: 126199 - DNA, 25 bp, Canis familiaris
gatgaggaaaacgctctgctctttc

SEQ ID NO: 126200 - DNA, 25 bp, Canis familiaris
gatggagaagattctgtcagccttt

SEQ ID NO: 126201 - DNA, 25 bp, Canis familiaris
gatggagattgcttctacagaatta

SEQ ID NO: 126202 - DNA, 25 bp, Canis familiaris
gatggacttgtttcacatagcatta

SEQ ID NO: 126203 - DNA, 25 bp, Canis familiaris
gatgatgtccgaataccagccatgt

SEQ ID NO: 126204 - DNA, 25 bp, Canis familiaris
gatgtcatcctgaagaatcacctgg

SEQ ID NO: 126205 - DNA, 25 bp, Canis familiaris
gatgtgcaccaggggtatgtcagga

SEQ ID NO: 126206 - DNA, 25 bp, Canis familiaris
gatgagtccaggtgaagactacaca

SEQ ID NO: 126207 - DNA, 25 bp, Canis familiaris
gatggaccttgagtgaagccttgcc

SEQ ID NO: 126208 - DNA, 25 bp, Canis familiaris
gatggacgcgaggtgaacctggaca

SEQ ID NO: 126209 - DNA, 25 bp, Canis familiaris
gatggaccagcagggaggctcgaaa

SEQ ID NO: 126210 - DNA, 25 bp, Canis familiaris
gatggacacgagcgacaggctgcac

SEQ ID NO: 126211 - DNA, 25 bp, Canis familiaris
gatgggcaggagcttcactctgcat

SEQ ID NO: 126212 - DNA, 25 bp, Canis familiaris
gatggtatatgcttgctatccttgc

SEQ ID NO: 126213 - DNA, 25 bp, Canis familiaris
gatggatttcatagatacgtacaga

SEQ ID NO: 126214 - DNA, 25 bp, Canis familiaris
gatggatgtgtgtgtacctactgaa

SEQ ID NO: 126215 - DNA, 25 bp, Canis familiaris
gatgacaatctgttttcctttgaat

SEQ ID NO: 126216 - DNA, 25 bp, Canis familiaris
gatgtcatttgtctcccaatgtaag

SEQ ID NO: 126217 - DNA, 25 bp, Canis familiaris
gatggacctggaatcccagcagata

SEQ ID NO: 126218 - DNA, 25 bp, Canis familiaris
gatggacctggctgagcctcaagaa

SEQ ID NO: 126219 - DNA, 25 bp, Canis familiaris
gatggagccgagttggttctcataa

SEQ ID NO: 126220 - DNA, 25 bp, Canis familiaris
gatggagtgctgttttgttatataa

SEQ ID NO: 126221 - DNA, 25 bp, Canis familiaris
gatggagatccatttatcatttaaa

SEQ ID NO: 126222 - DNA, 25 bp, Canis familiaris
gatgagactcatgatcccattgaaa

SEQ ID NO: 126223 - DNA, 25 bp, Canis familiaris
gatggaggatgtatccagtggcatc

SEQ ID NO: 126224 - DNA, 25 bp, Canis familiaris
gatgcttggttcaccagtggattct

SEQ ID NO: 126225 - DNA, 25 bp, Canis familiaris
gatgtaggtctttccaggagtgact

SEQ ID NO: 126226 - DNA, 25 bp, Canis familiaris
gatgtcacctctggaaaggagtttt

SEQ ID NO: 126227 - DNA, 25 bp, Canis familiaris
gatgtgactctgtgaaactggtatt

SEQ ID NO: 126228 - DNA, 25 bp, Canis familiaris
gatggagctgcttcgagagtcggtg

SEQ ID NO: 126229 - DNA, 25 bp, Canis familiaris
gatggagctgtacgagctggcgcag

SEQ ID NO: 126230 - DNA, 25 bp, Canis familiaris
gatggagcagacatactgcaggcga

SEQ ID NO: 126231 - DNA, 25 bp, Canis familiaris
gatggagcagactatacttggcagg

SEQ ID NO: 126232 - DNA, 25 bp, Canis familiaris
gatggggagctctacaatgaggtga

SEQ ID NO: 126233 - DNA, 25 bp, Canis familiaris
gatgggtagctgtgcagactgagtg

SEQ ID NO: 126234 - DNA, 25 bp, Canis familiaris
gatgggtgtgcgagagctctgcacc

SEQ ID NO: 126235 - DNA, 25 bp, Canis familiaris
gatgtggagccgagcacacagcatc

SEQ ID NO: 126236 - DNA, 25 bp, Canis familiaris
gatgtgggacgtcccagagcttcac

SEQ ID NO: 126237 - DNA, 25 bp, Canis familiaris
gatggggacaggacacaactgcccc

SEQ ID NO: 126238 - DNA, 25 bp, Canis familiaris
gatgggggagggtcaactcctcctt

SEQ ID NO: 126239 - DNA, 25 bp, Canis familiaris
gatgggggtggggacccaattgctg

SEQ ID NO: 126240 - DNA, 25 bp, Canis familiaris
gatggggtgtacggatctacctttt

SEQ ID NO: 126241 - DNA, 25 bp, Canis familiaris
gatggggtatacggatctacctttt

SEQ ID NO: 126242 - DNA, 25 bp, Canis familiaris
gatggggtatcacggatcaaccttt

SEQ ID NO: 126243 - DNA, 25 bp, Canis familiaris
gatggggaagcaccagacatttctg

SEQ ID NO: 126244 - DNA, 25 bp, Canis familiaris
gatgggagtccattctgaatttgta

SEQ ID NO: 126245 - DNA, 25 bp, Canis familiaris
gatggaggtcactatcagctctctt

SEQ ID NO: 126246 - DNA, 25 bp, Canis familiaris
gatggagaacaccacatctgctctc

SEQ ID NO: 126247 - DNA, 25 bp, Canis familiaris
gatggagaggccgaggctgcagctc

SEQ ID NO: 126248 - DNA, 25 bp, Canis familiaris
gatggagagcagatcagcctccgcc

SEQ ID NO: 126249 - DNA, 25 bp, Canis familiaris
gatggagagatgttcatgcggccag

SEQ ID NO: 126250 - DNA, 25 bp, Canis familiaris
gatggggctgaaatgctgcccgtat

SEQ ID NO: 126251 - DNA, 25 bp, Canis familiaris
gatgtgctgggataatcctgtattg

SEQ ID NO: 126252 - DNA, 25 bp, Canis familiaris
gatgtctcggcattaatccgtttat

SEQ ID NO: 126253 - DNA, 25 bp, Canis familiaris
gatgtctcggcattaatccgtttat

SEQ ID NO: 126254 - DNA, 25 bp, Canis familiaris
gatgtctggcgagtaatgaaggtta

SEQ ID NO: 126255 - DNA, 25 bp, Canis familiaris
gatttggccgtattgggcgcctggt

SEQ ID NO: 126256 - DNA, 25 bp, Canis familiaris
gatgttcccagagagggtccggtcc

SEQ ID NO: 126257 - DNA, 25 bp, Canis familiaris
gatgtgtctatccagggaggtcctg

SEQ ID NO: 126258 - DNA, 25 bp, Canis familiaris
gatgtggcctccagagggctagatg

SEQ ID NO: 126259 - DNA, 25 bp, Canis familiaris
gatggatcacccgtggatggtcaac

SEQ ID NO: 126260 - DNA, 25 bp, Canis familiaris
gatggatctccattgtgtttccacc

SEQ ID NO: 126261 - DNA, 25 bp, Canis familiaris
gatggacgccattgtgtgtacgaga

SEQ ID NO: 126262 - DNA, 25 bp, Canis familiaris
gatgtgacactctttttgagggacg

SEQ ID NO: 126263 - DNA, 25 bp, Canis familiaris
gatggattgtcattcctctggggac

SEQ ID NO: 126264 - DNA, 25 bp, Canis familiaris
gatggatttctgtcctgataatttc

SEQ ID NO: 126265 - DNA, 25 bp, Canis familiaris
gatggtgatttgtttcatggttttt

SEQ ID NO: 126266 - DNA, 25 bp, Canis familiaris
gatggtactgtttcttagtgtttta

SEQ ID NO: 126267 - DNA, 25 bp, Canis familiaris
gatgtgttcctttcctgatagtatt

SEQ ID NO: 126268 - DNA, 25 bp, Canis familiaris
gatgtgttccagatccaagcaacct

SEQ ID NO: 126269 - DNA, 25 bp, Canis familiaris
gatgtggccgagatcaccaagcagc

SEQ ID NO: 126270 - DNA, 25 bp, Canis familiaris
gatggtcctggtccttcaggatgct

SEQ ID NO: 126271 - DNA, 25 bp, Canis familiaris
gatggtccaggctggtctggagctc

SEQ ID NO: 126272 - DNA, 25 bp, Canis familiaris
gatgttccctgtaggtcatggcact

SEQ ID NO: 126273 - DNA, 25 bp, Canis familiaris
gatgtgacccattagtgtcctgacc

SEQ ID NO: 126274 - DNA, 25 bp, Canis familiaris
gatggtcccaaagtgtcttgaaatc

SEQ ID NO: 126275 - DNA, 25 bp, Canis familiaris
gatggtccccaagttcttggaatct

SEQ ID NO: 126276 - DNA, 25 bp, Canis familiaris
gatggtctaccatttcactcaggtt

SEQ ID NO: 126277 - DNA, 25 bp, Canis familiaris
gatgggtaggcattccttcagacct

SEQ ID NO: 126278 - DNA, 25 bp, Canis familiaris
gatggtgaactgttttgtcagaact

SEQ ID NO: 126279 - DNA, 25 bp, Canis familiaris
gatggtgatagcatttcgaaggaca

SEQ ID NO: 126280 - DNA, 25 bp, Canis familiaris
gatgggtacatgattctataggagt

SEQ ID NO: 126281 - DNA, 25 bp, Canis familiaris
gatgggtacaggcaaaagagcttct

SEQ ID NO: 126282 - DNA, 25 bp, Canis familiaris
gatgttttgggttcacaaggcttcg

SEQ ID NO: 126283 - DNA, 25 bp, Canis familiaris
gatgctgttctgaagaggaaaggtc

SEQ ID NO: 126284 - DNA, 25 bp, Canis familiaris
gatgcttatttgtcagagtaaagtc

SEQ ID NO: 126285 - DNA, 25 bp, Canis familiaris
gatgtttctgctccaagtacgagtg

SEQ ID NO: 126286 - DNA, 25 bp, Canis familiaris
gatgtgtgtccggagaatgccgagg

SEQ ID NO: 126287 - DNA, 25 bp, Canis familiaris
gatggtgctcgtggaagtgacggac

SEQ ID NO: 126288 - DNA, 25 bp, Canis familiaris
gatggtgtgtgtgggactggtgttc

SEQ ID NO: 126289 - DNA, 25 bp, Canis familiaris
gatggatccatagggcactgatgtt

SEQ ID NO: 126290 - DNA, 25 bp, Canis familiaris
gatggatccaagaatatgtgtgtgt

SEQ ID NO: 126291 - DNA, 25 bp, Canis familiaris
gatggaggaatggatcattgtctct

SEQ ID NO: 126292 - DNA, 25 bp, Canis familiaris
gatgaatggaagatactgacctttc

SEQ ID NO: 126293 - DNA, 25 bp, Canis familiaris
gatgaaggaacgaccaggccttgac

SEQ ID NO: 126294 - DNA, 25 bp, Canis familiaris
gatggaggaaggtctgaggccgctt

SEQ ID NO: 126295 - DNA, 25 bp, Canis familiaris
gatggggccagcaaggattctctgc

SEQ ID NO: 126296 - DNA, 25 bp, Canis familiaris
gatggatggtagagggtctccctgc

SEQ ID NO: 126297 - DNA, 25 bp, Canis familiaris
gatggagttgcacatggggctcccc

SEQ ID NO: 126298 - DNA, 25 bp, Canis familiaris
gatgaggtcatgaggatgggcccca

SEQ ID NO: 126299 - DNA, 25 bp, Canis familiaris
gatggttcatttgtgaggcagccct

SEQ ID NO: 126300 - DNA, 25 bp, Canis familiaris
gatggtccatcaaaggaacccacat

SEQ ID NO: 126301 - DNA, 25 bp, Canis familiaris
gatgaggccaaaatggtcccttatg

SEQ ID NO: 126302 - DNA, 25 bp, Canis familiaris
gatgtcctcaaaatgttcctagtaa

SEQ ID NO: 126303 - DNA, 25 bp, Canis familiaris
gatgttctcagatatggtcttaaaa

SEQ ID NO: 126304 - DNA, 25 bp, Canis familiaris
gatgtgttagcactttggatttaaa

SEQ ID NO: 126305 - DNA, 25 bp, Canis familiaris
gatggtttgcatttctgttttaaat

SEQ ID NO: 126306 - DNA, 25 bp, Canis familiaris
gatggtcttgggtttgtaatactat

SEQ ID NO: 126307 - DNA, 25 bp, Canis familiaris
gatggatttggggtttcggcaggtg

SEQ ID NO: 126308 - DNA, 25 bp, Canis familiaris
gatgtttatggagttcattggtcaa

SEQ ID NO: 126309 - DNA, 25 bp, Canis familiaris
gatgtcatttgacttatgatgggac

SEQ ID NO: 126310 - DNA, 25 bp, Canis familiaris
gatgtcactggatgttgtgaggtca

SEQ ID NO: 126311 - DNA, 25 bp, Canis familiaris
gatgtcctgcctattgggatgtacc

SEQ ID NO: 126312 - DNA, 25 bp, Canis familiaris
gatgatacggcctttggcgacttcc

SEQ ID NO: 126313 - DNA, 25 bp, Canis familiaris
gatgtacacaacatctagtccttcc

SEQ ID NO: 126314 - DNA, 25 bp, Canis familiaris
gatgatacaatcctttttcctacta

SEQ ID NO: 126315 - DNA, 25 bp, Canis familiaris
gatgtcctgttgtcttaatcctatt

SEQ ID NO: 126316 - DNA, 25 bp, Canis familiaris
gatgtggcttttgtgatattctatc

SEQ ID NO: 126317 - DNA, 25 bp, Canis familiaris
gatgggcctttcttgaatggcctta

SEQ ID NO: 126318 - DNA, 25 bp, Canis familiaris
gatgggccgttatgttgagcctatt

SEQ ID NO: 126319 - DNA, 25 bp, Canis familiaris
gatgggctgctgactatatttgtgc

SEQ ID NO: 126320 - DNA, 25 bp, Canis familiaris
gatgtgctggctgcattttgttgcc

SEQ ID NO: 126321 - DNA, 25 bp, Canis familiaris
gatggggtcacttatctgtgttcct

SEQ ID NO: 126322 - DNA, 25 bp, Canis familiaris
gatggtggtcacttgacatgtttta

SEQ ID NO: 126323 - DNA, 25 bp, Canis familiaris
gatggggccaaagtctattttcaaa

SEQ ID NO: 126324 - DNA, 25 bp, Canis familiaris
gatgtgaggctatctttcatttaat

SEQ ID NO: 126325 - DNA, 25 bp, Canis familiaris
gatgctgggttgacttttttcccat

SEQ ID NO: 126326 - DNA, 25 bp, Canis familiaris
gatgatcaagtacccttttatcctt

SEQ ID NO: 126327 - DNA, 25 bp, Canis familiaris
gatgaaatgattcccttttttaaag

SEQ ID NO: 126328 - DNA, 25 bp, Canis familiaris
gatgataatgctgtacaattttaaa

SEQ ID NO: 126329 - DNA, 25 bp, Canis familiaris
gatgaatatcccacagttttatgca

SEQ ID NO: 126330 - DNA, 25 bp, Canis familiaris
gataattagccatcaactttaagga

SEQ ID NO: 126331 - DNA, 25 bp, Canis familiaris
gataattagccatccactttcaagg

SEQ ID NO: 126332 - DNA, 25 bp, Canis familiaris
gatgaacggctatcgacactttagg

SEQ ID NO: 126333 - DNA, 25 bp, Canis familiaris
gatgctacggaaaccaagcctcgtg

SEQ ID NO: 126334 - DNA, 25 bp, Canis familiaris
gatgtgcaagctgaattaagaccgg

SEQ ID NO: 126335 - DNA, 25 bp, Canis familiaris
gatgatgacagtgtctttacatcca

SEQ ID NO: 126336 - DNA, 25 bp, Canis familiaris
gatgtctcagtgtatttgtactaga

SEQ ID NO: 126337 - DNA, 25 bp, Canis familiaris
gatgtcttgctgctattgaatgcta

SEQ ID NO: 126338 - DNA, 25 bp, Canis familiaris
gatggttatggttctggcagctact

SEQ ID NO: 126339 - DNA, 25 bp, Canis familiaris
gatggttctagatatgcgactcaat

SEQ ID NO: 126340 - DNA, 25 bp, Canis familiaris
gatgggatgaagtcaatgccactaa

SEQ ID NO: 126341 - DNA, 25 bp, Canis familiaris
gatgtgggcgtgtcaagcacaccag

SEQ ID NO: 126342 - DNA, 25 bp, Canis familiaris
gatgggtgatgaacacacaccaagt

SEQ ID NO: 126343 - DNA, 25 bp, Canis familiaris
gatggggaactcaaacacacagccg

SEQ ID NO: 126344 - DNA, 25 bp, Canis familiaris
gatggtactaccacatactacgcag

SEQ ID NO: 126345 - DNA, 25 bp, Canis familiaris
gatggtcactaagttctacttccag

SEQ ID NO: 126346 - DNA, 25 bp, Canis familiaris
gatgaccttacaatttatcgtccaa

SEQ ID NO: 126347 - DNA, 25 bp, Canis familiaris
gatgtctccaaacttaatggcccag

SEQ ID NO: 126348 - DNA, 25 bp, Canis familiaris
gatgtcatctcccaattaaaccaaa

SEQ ID NO: 126349 - DNA, 25 bp, Canis familiaris
gatgtcaagatcaaatcccaaccat

SEQ ID NO: 126350 - DNA, 25 bp, Canis familiaris
gatgtagaatcaggtccactccaca

SEQ ID NO: 126351 - DNA, 25 bp, Canis familiaris
gatgtagttcatatccaaggccaac

SEQ ID NO: 126352 - DNA, 25 bp, Canis familiaris
gatgaggttcatgctgtagggctat

SEQ ID NO: 126353 - DNA, 25 bp, Canis familiaris
gatgagtgtattccgtcaccagtag

SEQ ID NO: 126354 - DNA, 25 bp, Canis familiaris
gatcaggcaattcggtcaattgtca

SEQ ID NO: 126355 - DNA, 25 bp, Canis familiaris
gatgaggactaggtgttatatgtaa

SEQ ID NO: 126356 - DNA, 25 bp, Canis familiaris
gatgggtgctgggtgttattctata

SEQ ID NO: 126357 - DNA, 25 bp, Canis familiaris
gatgagatgtctcttatagatgttt

SEQ ID NO: 126358 - DNA, 25 bp, Canis familiaris
gatggtgacatgatttacattctga

SEQ ID NO: 126359 - DNA, 25 bp, Canis familiaris
gatgatgtgccttatatttttctga

SEQ ID NO: 126360 - DNA, 25 bp, Canis familiaris
gatggtcctgtgtctgtatgtacta

SEQ ID NO: 126361 - DNA, 25 bp, Canis familiaris
gatggtctctgatatggagtacccc

SEQ ID NO: 126362 - DNA, 25 bp, Canis familiaris
gatgagccttgtgtaccaaccatcc

SEQ ID NO: 126363 - DNA, 25 bp, Canis familiaris
gatggtgtttttaagccccatgccg

SEQ ID NO: 126364 - DNA, 25 bp, Canis familiaris
gataatgttgttgataccctttcct

SEQ ID NO: 126365 - DNA, 25 bp, Canis familiaris
gatgagtggttttcaaacgctgttc

SEQ ID NO: 126366 - DNA, 25 bp, Canis familiaris
gatgaggtgtctgtacacggtgcct

SEQ ID NO: 126367 - DNA, 25 bp, Canis familiaris
gatgggtgattcttatcccgacgca

SEQ ID NO: 126368 - DNA, 25 bp, Canis familiaris
gatgtgaagttcatttccacccacc

SEQ ID NO: 126369 - DNA, 25 bp, Canis familiaris
gatgttaatttttcctgataccacg

SEQ ID NO: 126370 - DNA, 25 bp, Canis familiaris
gatgtttttttttgtcttccaagat

SEQ ID NO: 126371 - DNA, 25 bp, Canis familiaris
gatgtttattttgagtcctaggact

SEQ ID NO: 126372 - DNA, 25 bp, Canis familiaris
gatggttttttaaatcctgaggact

SEQ ID NO: 126373 - DNA, 25 bp, Canis familiaris
gatggtgtcttagcaagtcctgagt

SEQ ID NO: 126374 - DNA, 25 bp, Canis familiaris
gatggtgtatgtggcgaggattcgg

SEQ ID NO: 126375 - DNA, 25 bp, Canis familiaris
gatggtgaatatgcaggttttgatg

SEQ ID NO: 126376 - DNA, 25 bp, Canis familiaris
gatggtacatcccagtttttgtgaa

SEQ ID NO: 126377 - DNA, 25 bp, Canis familiaris
gatgtgtccatcccaaatattctgt

SEQ ID NO: 126378 - DNA, 25 bp, Canis familiaris
gatgtgtccatccttactattgaag

SEQ ID NO: 126379 - DNA, 25 bp, Canis familiaris
gatgtagactgcattcctattggaa

SEQ ID NO: 126380 - DNA, 25 bp, Canis familiaris
gatgggagcattgtcctatctgggc

SEQ ID NO: 126381 - DNA, 25 bp, Canis familiaris
gatggtgtgagggtccttgcaagga

SEQ ID NO: 126382 - DNA, 25 bp, Canis familiaris
gatgcagggaggacttcttggtgga

SEQ ID NO: 126383 - DNA, 25 bp, Canis familiaris
gatggggaaggcatctgccagcgac

SEQ ID NO: 126384 - DNA, 25 bp, Canis familiaris
gatgggagcagacatatctggccag

SEQ ID NO: 126385 - DNA, 25 bp, Canis familiaris
gatggtgcagcaaaacagcccagcg

SEQ ID NO: 126386 - DNA, 25 bp, Canis familiaris
gatgttgctgacaaaagcggtcggg

SEQ ID NO: 126387 - DNA, 25 bp, Canis familiaris
gatgttctacaattaccatgttggg

SEQ ID NO: 126388 - DNA, 25 bp, Canis familiaris
gatgtttccaaagtcctgctgggac

SEQ ID NO: 126389 - DNA, 25 bp, Canis familiaris
gatgagttgcaatttccctcgggat

SEQ ID NO: 126390 - DNA, 25 bp, Canis familiaris
gatcgatttattttctccgggtgac

SEQ ID NO: 126391 - DNA, 25 bp, Canis familiaris
gatggtatttattttctctgggtca

SEQ ID NO: 126392 - DNA, 25 bp, Canis familiaris
gatgtggataaactttccttgcctc

SEQ ID NO: 126393 - DNA, 25 bp, Canis familiaris
gatgaaaaggaatttcccacaccac

SEQ ID NO: 126394 - DNA, 25 bp, Canis familiaris
gatgaacaaaaacgtttccacgcct

SEQ ID NO: 126395 - DNA, 25 bp, Canis familiaris
gtaataaaatctgttcccaggccca

SEQ ID NO: 126396 - DNA, 25 bp, Canis familiaris
gtgagtaaagttcttgtcaacccaa

SEQ ID NO: 126397 - DNA, 25 bp, Canis familiaris
gatggtcagcagattcctgtgttca

SEQ ID NO: 126398 - DNA, 25 bp, Canis familiaris
gatgtgatagcactttcctttattc

SEQ ID NO: 126399 - DNA, 25 bp, Canis familiaris
gatgagatacggatgacatttttca

SEQ ID NO: 126400 - DNA, 25 bp, Canis familiaris
gatgagaagcgtgtgtccactctcc

SEQ ID NO: 126401 - DNA, 25 bp, Canis familiaris
gatggtgggcatgtatgcctcctcc

SEQ ID NO: 126402 - DNA, 25 bp, Canis familiaris
gatggtgagagtctccatcatcccc

SEQ ID NO: 126403 - DNA, 25 bp, Canis familiaris
gatggtgagagctccatcacaccct

SEQ ID NO: 126404 - DNA, 25 bp, Canis familiaris
gatgtgtgagagcatccatcacccc

SEQ ID NO: 126405 - DNA, 25 bp, Canis familiaris
gatgtatgatgtgtgacattcccaa

SEQ ID NO: 126406 - DNA, 25 bp, Canis familiaris
gatggtgtgaccaagcattcttcta

SEQ ID NO: 126407 - DNA, 25 bp, Canis familiaris
gatgggcagccactaattccctatt

SEQ ID NO: 126408 - DNA, 25 bp, Canis familiaris
gatgggcagccaatcaatgaaacag

SEQ ID NO: 126409 - DNA, 25 bp, Canis familiaris
gatgggcaagagacacatgaaaaga

SEQ ID NO: 126410 - DNA, 25 bp, Canis familiaris
gatggtccatggcaaggagcagaga

SEQ ID NO: 126411 - DNA, 25 bp, Canis familiaris
gatggtccttgctaataagtgacat

SEQ ID NO: 126412 - DNA, 25 bp, Canis familiaris
gatggtccttgcatcaaaggccaaa

SEQ ID NO: 126413 - DNA, 25 bp, Canis familiaris
gatgtgtcttccacaaagaggcaaa

SEQ ID NO: 126414 - DNA, 25 bp, Canis familiaris
gatgacctaccctcaatggagcaaa

SEQ ID NO: 126415 - DNA, 25 bp, Canis familiaris
gatgaaattccgttgcacaagccaa

SEQ ID NO: 126416 - DNA, 25 bp, Canis familiaris
gatgaaattattttacaactgcaaa

SEQ ID NO: 126417 - DNA, 25 bp, Canis familiaris
gataaaccttttcaaccagcagcaa

SEQ ID NO: 126418 - DNA, 25 bp, Canis familiaris
gttggaatcttttaacccaccagat

SEQ ID NO: 126419 - DNA, 25 bp, Canis familiaris
gatgggaacttgtgaccactcccac

SEQ ID NO: 126420 - DNA, 25 bp, Canis familiaris
gatgggttttttccagaccacagac

SEQ ID NO: 126421 - DNA, 25 bp, Canis familiaris
gatggggttctggtacagccaaaga

SEQ ID NO: 126422 - DNA, 25 bp, Canis familiaris
gatgtgtggtgttgccccattaaaa

SEQ ID NO: 126423 - DNA, 25 bp, Canis familiaris
gatgtgggctgtgcccttataaagc

SEQ ID NO: 126424 - DNA, 25 bp, Canis familiaris
gatgagggcttttccttttcatagt

SEQ ID NO: 126425 - DNA, 25 bp, Canis familiaris
gatgatgagcgtgttcctgctttga

SEQ ID NO: 126426 - DNA, 25 bp, Canis familiaris
gatgtgtgtgatattcctgctgtga

SEQ ID NO: 126427 - DNA, 25 bp, Canis familiaris
gatgtctgtcatagtgtttgctgtg

SEQ ID NO: 126428 - DNA, 25 bp, Canis familiaris
gatgtactaattgtgtctgtgttat

SEQ ID NO: 126429 - DNA, 25 bp, Canis familiaris
gatgggtacttggatgtttggttta

SEQ ID NO: 126430 - DNA, 25 bp, Canis familiaris
gatgggtattttttccagtgatatt

SEQ ID NO: 126431 - DNA, 25 bp, Canis familiaris
gatgggtttatgaattctcattctt

SEQ ID NO: 126432 - DNA, 25 bp, Canis familiaris
gatgggcattaggaaactcttttaa

SEQ ID NO: 126433 - DNA, 25 bp, Canis familiaris
gatgcaggtacacaaccttgtttaa

SEQ ID NO: 126434 - DNA, 25 bp, Canis familiaris
gatggggaccaagccatgtgtctct

SEQ ID NO: 126435 - DNA, 25 bp, Canis familiaris
gatggggatgtctatgcccttcttc

SEQ ID NO: 126436 - DNA, 25 bp, Canis familiaris
gatggggatgtctgtttctcagttc

SEQ ID NO: 126437 - DNA, 25 bp, Canis familiaris
gttgggagtgacatcttatagttct

SEQ ID NO: 126438 - DNA, 25 bp, Canis familiaris
gtccagggctgaaagctaacgttta

SEQ ID NO: 126439 - DNA, 25 bp, Canis familiaris
tccccgcgcgaacagaacgttagac

SEQ ID NO: 126440 - DNA, 25 bp, Canis familiaris
ttcccgctggaagaacctaaatccg

SEQ ID NO: 126441 - DNA, 25 bp, Canis familiaris
ttcctcctggaaaactctttggtag

SEQ ID NO: 126442 - DNA, 25 bp, Canis familiaris
gataccctgggtacctcagttggtt

SEQ ID NO: 126443 - DNA, 25 bp, Canis familiaris
gatgaccgtgggcacgtcatttgcc

SEQ ID NO: 126444 - DNA, 25 bp, Canis familiaris
gatgaacgtggccgaggttgacaag

SEQ ID NO: 126445 - DNA, 25 bp, Canis familiaris
gatgaccttgagtgaagcttgccca

SEQ ID NO: 126446 - DNA, 25 bp, Canis familiaris
gatgaccttgagtgaagcttgccca

SEQ ID NO: 126447 - DNA, 25 bp, Canis familiaris
gatgaccttgagtgaagcttgccca

SEQ ID NO: 126448 - DNA, 25 bp, Canis familiaris
gatgaccttgagtgaagcttgccca

SEQ ID NO: 126449 - DNA, 25 bp, Canis familiaris
gatgaaccgtaggattcgtcctcct

SEQ ID NO: 126450 - DNA, 25 bp, Canis familiaris
gatgttcctgttgatgtgccaaccc

SEQ ID NO: 126451 - DNA, 25 bp, Canis familiaris
gatgtgtgtctgtgctgatttctac

SEQ ID NO: 126452 - DNA, 25 bp, Canis familiaris
gatgggtccaaattcttctactgaa

SEQ ID NO: 126453 - DNA, 25 bp, Canis familiaris
gatgggaccaagcccttgaacaaca

SEQ ID NO: 126454 - DNA, 25 bp, Canis familiaris
gatgggaaaactccttggcagacct

SEQ ID NO: 126455 - DNA, 25 bp, Canis familiaris
gatggggagtgagcctgggagacac

SEQ ID NO: 126456 - DNA, 25 bp, Canis familiaris
gatggggaacagcccaggggtcaca

SEQ ID NO: 126457 - DNA, 25 bp, Canis familiaris
gatggggaccagggccaaagaccac

SEQ ID NO: 126458 - DNA, 25 bp, Canis familiaris
gatggggcctagcggagcaaacaac

SEQ ID NO: 126459 - DNA, 25 bp, Canis familiaris
gatgggtcctctgggaagaaccaat

SEQ ID NO: 126460 - DNA, 25 bp, Canis familiaris
gatgtgtctcctgaggcaagagaaa

SEQ ID NO: 126461 - DNA, 25 bp, Canis familiaris
gatggtgtcatcgagagcaactgga

SEQ ID NO: 126462 - DNA, 25 bp, Canis familiaris
gatgggcatcacaagtgaatgcgag

SEQ ID NO: 126463 - DNA, 25 bp, Canis familiaris
gatgatggcatctgagagcactggg

SEQ ID NO: 126464 - DNA, 25 bp, Canis familiaris
gatgtccgcagagtagactgggggg

SEQ ID NO: 126465 - DNA, 25 bp, Canis familiaris
tgcttccagctagagcttcgggggg

SEQ ID NO: 126466 - DNA, 25 bp, Canis familiaris
gatgtccgtagaactgtggggggtg

SEQ ID NO: 126467 - DNA, 25 bp, Canis familiaris
gatgctacgaaaacttgctgcggag

SEQ ID NO: 126468 - DNA, 25 bp, Canis familiaris
gatgaacgacaatctcctggagagc

SEQ ID NO: 126469 - DNA, 25 bp, Canis familiaris
gatgagaaatccaatacgcaggcaa

SEQ ID NO: 126470 - DNA, 25 bp, Canis familiaris
gatgcagatctaatcaatgcaggca

SEQ ID NO: 126471 - DNA, 25 bp, Canis familiaris
gatgtgctcgtacgatggctgcaag

SEQ ID NO: 126472 - DNA, 25 bp, Canis familiaris
gatgatgcgctggacaatgctctac

SEQ ID NO: 126473 - DNA, 25 bp, Canis familiaris
gatgcatgcacatacacattcctac

SEQ ID NO: 126474 - DNA, 25 bp, Canis familiaris
gatgatgacacagcatgaccactta

SEQ ID NO: 126475 - DNA, 25 bp, Canis familiaris
gatgcacaacacaaaccaggtaagt

SEQ ID NO: 126476 - DNA, 25 bp, Canis familiaris
gatgactagcagtgaccggtcgtct

SEQ ID NO: 126477 - DNA, 25 bp, Canis familiaris
gatgtgaaatgctgtccggttttat

SEQ ID NO: 126478 - DNA, 25 bp, Canis familiaris
gatgaacgagctgtccgagctgtat

SEQ ID NO: 126479 - DNA, 25 bp, Canis familiaris
gatgtaggcagtttcactggtcatg

SEQ ID NO: 126480 - DNA, 25 bp, Canis familiaris
gatgggagcagtgagtcttgatgat

SEQ ID NO: 126481 - DNA, 25 bp, Canis familiaris
gatgggcatagtgcagccggcaagc

SEQ ID NO: 126482 - DNA, 25 bp, Canis familiaris
gatgtgtgagacacagtcggcccac

SEQ ID NO: 126483 - DNA, 25 bp, Canis familiaris
gatgtgattcacaacaatctggctc

SEQ ID NO: 126484 - DNA, 25 bp, Canis familiaris
gatgagttcccattatgtggccaca

SEQ ID NO: 126485 - DNA, 25 bp, Canis familiaris
gatgagctgcccaaatttgagaaga

SEQ ID NO: 126486 - DNA, 25 bp, Canis familiaris
gatgagtcccgagactgaaccagcg

SEQ ID NO: 126487 - DNA, 25 bp, Canis familiaris
gatagtccaggagaacggctcaccc

SEQ ID NO: 126488 - DNA, 25 bp, Canis familiaris
gatattccggaggagcggtttccca

SEQ ID NO: 126489 - DNA, 25 bp, Canis familiaris
gatgataacgggggagcctgttctc

SEQ ID NO: 126490 - DNA, 25 bp, Canis familiaris
gataagggaagccccactgattctc

SEQ ID NO: 126491 - DNA, 25 bp, Canis familiaris
gatgaatcgggggagccactgtact

SEQ ID NO: 126492 - DNA, 25 bp, Canis familiaris
gatgaacggcggaggcggtacaact

SEQ ID NO: 126493 - DNA, 25 bp, Canis familiaris
gataacaggaggaaagcccatacaa

SEQ ID NO: 126494 - DNA, 25 bp, Canis familiaris
gatgaacaagctcaaggccaggaaa

SEQ ID NO: 126495 - DNA, 25 bp, Canis familiaris
tgataaaacttatagcacggaaccc

SEQ ID NO: 126496 - DNA, 25 bp, Canis familiaris
gatccaatggatgagaaccggaagt

SEQ ID NO: 126497 - DNA, 25 bp, Canis familiaris
gatctggaggtcagcatccggaaga

SEQ ID NO: 126498 - DNA, 25 bp, Canis familiaris
gattcagaaatcccccgggaaggcg

SEQ ID NO: 126499 - DNA, 25 bp, Canis familiaris
gtccaaagggaagcagggacctgga

SEQ ID NO: 126500 - DNA, 25 bp, Canis familiaris
gattgcctagggtggggggccgaga

SEQ ID NO: 126501 - DNA, 25 bp, Canis familiaris
gatacacggaggtgtcgggtgaaga

SEQ ID NO: 126502 - DNA, 25 bp, Canis familiaris
gatgaccaaaactaccgggtggaag

SEQ ID NO: 126503 - DNA, 25 bp, Canis familiaris
gatgaggaaacctgaggccgggaga

SEQ ID NO: 126504 - DNA, 25 bp, Canis familiaris
gatgggacagaatgggaggaagaag

SEQ ID NO: 126505 - DNA, 25 bp, Canis familiaris
gatgggatccgcatggcgggacggt

SEQ ID NO: 126506 - DNA, 25 bp, Canis familiaris
gatgggacagccgatcagtgtggac

SEQ ID NO: 126507 - DNA, 25 bp, Canis familiaris
gatgaggaaccagcagacacaagat

SEQ ID NO: 126508 - DNA, 25 bp, Canis familiaris
gatgagccgacatactggcacggcg

SEQ ID NO: 126509 - DNA, 25 bp, Canis familiaris
gatgacctcacagccaagcatgggg

SEQ ID NO: 126510 - DNA, 25 bp, Canis familiaris
gatgagttcatcgctcacagacttg

SEQ ID NO: 126511 - DNA, 25 bp, Canis familiaris
gatgagttactgtgctagaaatgtg

SEQ ID NO: 126512 - DNA, 25 bp, Canis familiaris
gatgtacctgtctgtagaactgtat

SEQ ID NO: 126513 - DNA, 25 bp, Canis familiaris
gatgtacctaccaagagcaactatg

SEQ ID NO: 126514 - DNA, 25 bp, Canis familiaris
gatgggttactctgagcaatctagc

SEQ ID NO: 126515 - DNA, 25 bp, Canis familiaris
gatgggtcttctaaacgcatgctag

SEQ ID NO: 126516 - DNA, 25 bp, Canis familiaris
gatgtgctacatttccaaagcttag

SEQ ID NO: 126517 - DNA, 25 bp, Canis familiaris
gatgcatgctacaaattaaacttta

SEQ ID NO: 126518 - DNA, 25 bp, Canis familiaris
gatgtcatcaattaaataccactta

SEQ ID NO: 126519 - DNA, 25 bp, Canis familiaris
gatgtatcaacctacatgcggttta

SEQ ID NO: 126520 - DNA, 25 bp, Canis familiaris
gatgtcattacaggcacaggtattt

SEQ ID NO: 126521 - DNA, 25 bp, Canis familiaris
gatgtgcaaaacagatgcgataatt

SEQ ID NO: 126522 - DNA, 25 bp, Canis familiaris
gatgctaaattcatggtggacattg

SEQ ID NO: 126523 - DNA, 25 bp, Canis familiaris
gatgtatagttctgtgggatattac

SEQ ID NO: 126524 - DNA, 25 bp, Canis familiaris
gatgtattgattccaggggccatgc

SEQ ID NO: 126525 - DNA, 25 bp, Canis familiaris
gatgttcatgcggccagggaagctc

SEQ ID NO: 126526 - DNA, 25 bp, Canis familiaris
gatgtttcctccgtggaagactccg

SEQ ID NO: 126527 - DNA, 25 bp, Canis familiaris
gatgacttttccgtggatctacctc

SEQ ID NO: 126528 - DNA, 25 bp, Canis familiaris
gatgacttttatcaccagcttcttc

SEQ ID NO: 126529 - DNA, 25 bp, Canis familiaris
gatgtttatttttccactttgtgat

SEQ ID NO: 126530 - DNA, 25 bp, Canis familiaris
gatgtttacttttataattctgtta

SEQ ID NO: 126531 - DNA, 25 bp, Canis familiaris
gatgtgtttcctttgatacttcagt

SEQ ID NO: 126532 - DNA, 25 bp, Canis familiaris
gatgtgtttcccaagtgatttctct

SEQ ID NO: 126533 - DNA, 25 bp, Canis familiaris
gatgtgcttactactgcagtgcatt

SEQ ID NO: 126534 - DNA, 25 bp, Canis familiaris
gatgagaattctacgcaggctgctc

SEQ ID NO: 126535 - DNA, 25 bp, Canis familiaris
gatgagaattctacgcaggctgctc

SEQ ID NO: 126536 - DNA, 25 bp, Canis familiaris
gatgtactatcgagggtctgctgca

SEQ ID NO: 126537 - DNA, 25 bp, Canis familiaris
gatgtcacacactagtttttgccac

SEQ ID NO: 126538 - DNA, 25 bp, Canis familiaris
gatgtcacccatatgctgttgagtc

SEQ ID NO: 126539 - DNA, 25 bp, Canis familiaris
gatgtccctgaaatgtgatgatctg

SEQ ID NO: 126540 - DNA, 25 bp, Canis familiaris
gatgtccaccgagagagatctgctg

SEQ ID NO: 126541 - DNA, 25 bp, Canis familiaris
gatgtcacatgggcacaagaacctg

SEQ ID NO: 126542 - DNA, 25 bp, Canis familiaris
gatgtactgactctcatgaacctaa

SEQ ID NO: 126543 - DNA, 25 bp, Canis familiaris
gatgtactttcaccattagcttaat

SEQ ID NO: 126544 - DNA, 25 bp, Canis familiaris
gatgtcaggttatgcatatatcatt

SEQ ID NO: 126545 - DNA, 25 bp, Canis familiaris
gatgtcggataatcttttttgtctt

SEQ ID NO: 126546 - DNA, 25 bp, Canis familiaris
gatgtttaaactgttcacttggctt

SEQ ID NO: 126547 - DNA, 25 bp, Canis familiaris
gatgattaaatccttttactttctt

SEQ ID NO: 126548 - DNA, 25 bp, Canis familiaris
gatgttaatattctttcctctttta

SEQ ID NO: 126549 - DNA, 25 bp, Canis familiaris
gatgtttcattttttatccctttcg

SEQ ID NO: 126550 - DNA, 25 bp, Canis familiaris
gatgatttatttttataggcccttt

SEQ ID NO: 126551 - DNA, 25 bp, Canis familiaris
gatgtcctcttttctgataggcatg

SEQ ID NO: 126552 - DNA, 25 bp, Canis familiaris
gatgtgtgcttttgtctaagtatgt

SEQ ID NO: 126553 - DNA, 25 bp, Canis familiaris
gatgtggttgctggtccaatgctgg

SEQ ID NO: 126554 - DNA, 25 bp, Canis familiaris
gatgtggtctatgtacacagtggaa

SEQ ID NO: 126555 - DNA, 25 bp, Canis familiaris
gatgtacgagatgtgatcccgagaa

SEQ ID NO: 126556 - DNA, 25 bp, Canis familiaris
gatgaaccagtggctgatccttacg

SEQ ID NO: 126557 - DNA, 25 bp, Canis familiaris
gatgttcaagtcgtgtctgtatacc

SEQ ID NO: 126558 - DNA, 25 bp, Canis familiaris
gatgtatgcaagtctgttctttttg

SEQ ID NO: 126559 - DNA, 25 bp, Canis familiaris
gatgtatcacatctgtttctttctg

SEQ ID NO: 126560 - DNA, 25 bp, Canis familiaris
gatgtctacatagttgctctgtctt

SEQ ID NO: 126561 - DNA, 25 bp, Canis familiaris
gatgtcattctattgtgcacttttg

SEQ ID NO: 126562 - DNA, 25 bp, Canis familiaris
gatgtgttgtcatttccattcttgc

SEQ ID NO: 126563 - DNA, 25 bp, Canis familiaris
gatgtgatgatgtgtttattttcca

SEQ ID NO: 126564 - DNA, 25 bp, Canis familiaris
gatgtgtgtgtcattgttatttgaa

SEQ ID NO: 126565 - DNA, 25 bp, Canis familiaris
gatgttatgatcatgactttggtga

SEQ ID NO: 126566 - DNA, 25 bp, Canis familiaris
gatgttataattactactagactgc

SEQ ID NO: 126567 - DNA, 25 bp, Canis familiaris
gatgtgtttattttacagagacctg

SEQ ID NO: 126568 - DNA, 25 bp, Canis familiaris
gatgtgtttctctattgacagccct

SEQ ID NO: 126569 - DNA, 25 bp, Canis familiaris
gatgtggttctgtagtgatgcctcc

SEQ ID NO: 126570 - DNA, 25 bp, Canis familiaris
gatgtggatcttcatgtctgttgct

SEQ ID NO: 126571 - DNA, 25 bp, Canis familiaris
gatgtgtgagaacacctgttcctga

SEQ ID NO: 126572 - DNA, 25 bp, Canis familiaris
gatgcatcctctggaagtagtccga

SEQ ID NO: 126573 - DNA, 25 bp, Canis familiaris
gatgaccctgattagtagttgctgc

SEQ ID NO: 126574 - DNA, 25 bp, Canis familiaris
gatgagacctgtcttgtgtagtcct

SEQ ID NO: 126575 - DNA, 25 bp, Canis familiaris
gatgaagcctaccttattggccgtg

SEQ ID NO: 126576 - DNA, 25 bp, Canis familiaris
gatgtagctctaccttttgacttga

SEQ ID NO: 126577 - DNA, 25 bp, Canis familiaris
gatgtactgcaaacatttttcttca

SEQ ID NO: 126578 - DNA, 25 bp, Canis familiaris
gatgtattgcactaattcatttcat

SEQ ID NO: 126579 - DNA, 25 bp, Canis familiaris
gatgttcaatcatctctcatatctc

SEQ ID NO: 126580 - DNA, 25 bp, Canis familiaris
gatgggcacacatgtgtcattctgt

SEQ ID NO: 126581 - DNA, 25 bp, Canis familiaris
gatgtggcagagcttgtcatccgtg

SEQ ID NO: 126582 - DNA, 25 bp, Canis familiaris
gatgtgggcgagagtgcgagcagtg

SEQ ID NO: 126583 - DNA, 25 bp, Canis familiaris
gatgtgtgcactactcgtgaggagt

SEQ ID NO: 126584 - DNA, 25 bp, Canis familiaris
gatgtgtgacattcccaatggcaga

SEQ ID NO: 126585 - DNA, 25 bp, Canis familiaris
gatgtctgaacttccattagggact

SEQ ID NO: 126586 - DNA, 25 bp, Canis familiaris
gatgtctgccagaagctgcactagg

SEQ ID NO: 126587 - DNA, 25 bp, Canis familiaris
gatgtccatcagctgatgagtggat

SEQ ID NO: 126588 - DNA, 25 bp, Canis familiaris
gatgtcgcatagcagtagtcagtat

SEQ ID NO: 126589 - DNA, 25 bp, Canis familiaris
gatgtggatcagcaagcaggagtat

SEQ ID NO: 126590 - DNA, 25 bp, Canis familiaris
gatgtggatcagcaagcaggagtac

SEQ ID NO: 126591 - DNA, 25 bp, Canis familiaris
gatgtgattggcccagagtggtact

SEQ ID NO: 126592 - DNA, 25 bp, Canis familiaris
gatgtgggccaggcaggcagggact

SEQ ID NO: 126593 - DNA, 25 bp, Canis familiaris
gatgtggccaatgcagtgctggatg

SEQ ID NO: 126594 - DNA, 25 bp, Canis familiaris
gatgggccagatgcagatgagctct

SEQ ID NO: 126595 - DNA, 25 bp, Canis familiaris
gatgacccagaggagcttgctctcc

SEQ ID NO: 126596 - DNA, 25 bp, Canis familiaris
gatgtgtgtcagagagatcctctcc

SEQ ID NO: 126597 - DNA, 25 bp, Canis familiaris
gatgtgaatggaagagacctgtcat

SEQ ID NO: 126598 - DNA, 25 bp, Canis familiaris
gatgagaagcgttgcgccacgagat

SEQ ID NO: 126599 - DNA, 25 bp, Canis familiaris
gatgtgaggctttctggccaagcat

SEQ ID NO: 126600 - DNA, 25 bp, Canis familiaris
gatgtgctggtcactgcagacaaca

SEQ ID NO: 126601 - DNA, 25 bp, Canis familiaris
gatgatgatgcagtctggccggaaa

SEQ ID NO: 126602 - DNA, 25 bp, Canis familiaris
gatgtatgagtcgcgctgtgcagaa

SEQ ID NO: 126603 - DNA, 25 bp, Canis familiaris
gatgttgactgcacaggtaatacaa

SEQ ID NO: 126604 - DNA, 25 bp, Canis familiaris
gatgttgcactctcagtgaaccggg

SEQ ID NO: 126605 - DNA, 25 bp, Canis familiaris
gatgagctaccatatgttaccgagg

SEQ ID NO: 126606 - DNA, 25 bp, Canis familiaris
gatgacattcacctttaactggggc

SEQ ID NO: 126607 - DNA, 25 bp, Canis familiaris
gatgtcctgacgcaaaagtgggagc

SEQ ID NO: 126608 - DNA, 25 bp, Canis familiaris
gatgtccagagcgcaagaggaggaa

SEQ ID NO: 126609 - DNA, 25 bp, Canis familiaris
gatgagccgggaggagggaggagga

SEQ ID NO: 126610 - DNA, 25 bp, Canis familiaris
gatgaggtggtgcggagagggtggg

SEQ ID NO: 126611 - DNA, 25 bp, Canis familiaris
gatgaggaccatggggtgcggtggg

SEQ ID NO: 126612 - DNA, 25 bp, Canis familiaris
gatgatgtaactgttgacgagctgt

SEQ ID NO: 126613 - DNA, 25 bp, Canis familiaris
gatgatgaaccgcttcatgccactg

SEQ ID NO: 126614 - DNA, 25 bp, Canis familiaris
gatgtatcgaggctctcatccatca

SEQ ID NO: 126615 - DNA, 25 bp, Canis familiaris
gatgacatccagggttgcatctctc

SEQ ID NO: 126616 - DNA, 25 bp, Canis familiaris
gatgagtcatcagggttcactcaac

SEQ ID NO: 126617 - DNA, 25 bp, Canis familiaris
gatgattatcaccatgttagtgcaa

SEQ ID NO: 126618 - DNA, 25 bp, Canis familiaris
gatgtcttagtgtttagtcaagtct

SEQ ID NO: 126619 - DNA, 25 bp, Canis familiaris
gatgactacagttcctttcaattct

SEQ ID NO: 126620 - DNA, 25 bp, Canis familiaris
gatgacaaatgcactcgtaaacctt

SEQ ID NO: 126621 - DNA, 25 bp, Canis familiaris
gatgacacgacaaacgtcaacccat

SEQ ID NO: 126622 - DNA, 25 bp, Canis familiaris
gatgctcacaactgggtcaacttca

SEQ ID NO: 126623 - DNA, 25 bp, Canis familiaris
gatgttgatcaacgggactcacttc

SEQ ID NO: 126624 - DNA, 25 bp, Canis familiaris
gatgtagtcatctgggaccctgata

SEQ ID NO: 126625 - DNA, 25 bp, Canis familiaris
gatgtagccatgggggacagatagg

SEQ ID NO: 126626 - DNA, 25 bp, Canis familiaris
gatgtcatcttgtgcaggaagtcag

SEQ ID NO: 126627 - DNA, 25 bp, Canis familiaris
gatgtccatgtgtgggattttgaga

SEQ ID NO: 126628 - DNA, 25 bp, Canis familiaris
gatgttcattaaccaactttgacaa

SEQ ID NO: 126629 - DNA, 25 bp, Canis familiaris
gatgtctatctttaccactatgtga

SEQ ID NO: 126630 - DNA, 25 bp, Canis familiaris
gatgtgcttctacacacacaagcta

SEQ ID NO: 126631 - DNA, 25 bp, Canis familiaris
gatgtgattgaactaaccccatcaa

SEQ ID NO: 126632 - DNA, 25 bp, Canis familiaris
gatgtcatctaaatgcaagccccca

SEQ ID NO: 126633 - DNA, 25 bp, Canis familiaris
gatgtcatgcaatggaaggcacaga

SEQ ID NO: 126634 - DNA, 25 bp, Canis familiaris
gatgtcacacatactaaaccatgca

SEQ ID NO: 126635 - DNA, 25 bp, Canis familiaris
gatgtcacacatgtcaatgcggtca

SEQ ID NO: 126636 - DNA, 25 bp, Canis familiaris
gatgagctacatcaaatgcaggcca

SEQ ID NO: 126637 - DNA, 25 bp, Canis familiaris
gatgatggacattaaagggcacatg

SEQ ID NO: 126638 - DNA, 25 bp, Canis familiaris
gatgaagaagattcgagcccacagg

SEQ ID NO: 126639 - DNA, 25 bp, Canis familiaris
gatgaacatggtttcatctcccggg

SEQ ID NO: 126640 - DNA, 25 bp, Canis familiaris
gatgaatcactgaactctacctctg

SEQ ID NO: 126641 - DNA, 25 bp, Canis familiaris
gatgtgattgtgatctgccaccatg

SEQ ID NO: 126642 - DNA, 25 bp, Canis familiaris
gatgagattgtcaatattgcccgac

SEQ ID NO: 126643 - DNA, 25 bp, Canis familiaris
gatgtgtgcttaaattctctagatg

SEQ ID NO: 126644 - DNA, 25 bp, Canis familiaris
gatgtgtgtttgaattgccagcaga

SEQ ID NO: 126645 - DNA, 25 bp, Canis familiaris
gatgttggtctgaacccagtgtctg

SEQ ID NO: 126646 - DNA, 25 bp, Canis familiaris
gatgatgtttagagcccagaatgtg

SEQ ID NO: 126647 - DNA, 25 bp, Canis familiaris
gatgatgtattctcgagcaagtatg

SEQ ID NO: 126648 - DNA, 25 bp, Canis familiaris
gatgttgcattctgggcaggtttca

SEQ ID NO: 126649 - DNA, 25 bp, Canis familiaris
gatgtcatcttgttggggtgctgat

SEQ ID NO: 126650 - DNA, 25 bp, Canis familiaris
gatgtcattggtactctgagtggct

SEQ ID NO: 126651 - DNA, 25 bp, Canis familiaris
gatgtcactgaactccgaggtgtca

SEQ ID NO: 126652 - DNA, 25 bp, Canis familiaris
gatgtcctgaatagtcaaagctatc

SEQ ID NO: 126653 - DNA, 25 bp, Canis familiaris
gatgtcctaatattgcacttcttat

SEQ ID NO: 126654 - DNA, 25 bp, Canis familiaris
gatgttttcatggacactgttatca

SEQ ID NO: 126655 - DNA, 25 bp, Canis familiaris
gatgagtttagctgccgtgtaaagc

SEQ ID NO: 126656 - DNA, 25 bp, Canis familiaris
gatgaattctagaagtcctggaaga

SEQ ID NO: 126657 - DNA, 25 bp, Canis familiaris
gatgaaagtcgcatttaggaaattc

SEQ ID NO: 126658 - DNA, 25 bp, Canis familiaris
gatgatccaatcattttgggaaatt

SEQ ID NO: 126659 - DNA, 25 bp, Canis familiaris
gatgtcgacccttactggtgaacgt

SEQ ID NO: 126660 - DNA, 25 bp, Canis familiaris
gatgccatgatggccatgaacggga

SEQ ID NO: 126661 - DNA, 25 bp, Canis familiaris
gatgagcatgatgtcattgtccagg

SEQ ID NO: 126662 - DNA, 25 bp, Canis familiaris
gatgatgcactgggctgtgtccatt

SEQ ID NO: 126663 - DNA, 25 bp, Canis familiaris
gatgtgcatcgaggccctgcacatg

SEQ ID NO: 126664 - DNA, 25 bp, Canis familiaris
gatgagcactgggctccgaaggagc

SEQ ID NO: 126665 - DNA, 25 bp, Canis familiaris
gatgatatgctaagctccctaggac

SEQ ID NO: 126666 - DNA, 25 bp, Canis familiaris
gatgatggtggggccctcaggaagt

SEQ ID NO: 126667 - DNA, 25 bp, Canis familiaris
gatgatggaaggtccctcctaaaga

SEQ ID NO: 126668 - DNA, 25 bp, Canis familiaris
gatctggagaaaacccctaaaagca

SEQ ID NO: 126669 - DNA, 25 bp, Canis familiaris
tgactggttaatctggttaaagggt

SEQ ID NO: 126670 - DNA, 25 bp, Canis familiaris
gatcgggaggatctggtgtaccagg

SEQ ID NO: 126671 - DNA, 25 bp, Canis familiaris
gatgagggaggcagggcttcatcct

SEQ ID NO: 126672 - DNA, 25 bp, Canis familiaris
gatgaggcttccagggctgagatcc

SEQ ID NO: 126673 - DNA, 25 bp, Canis familiaris
gatatggtctcgaggtggggagcac

SEQ ID NO: 126674 - DNA, 25 bp, Canis familiaris
gatgagctgatctgtggtgtggtgg

SEQ ID NO: 126675 - DNA, 25 bp, Canis familiaris
gatgatgctgcctgtgaggctggag

SEQ ID NO: 126676 - DNA, 25 bp, Canis familiaris
gatgatcatgactttgaagcactga

SEQ ID NO: 126677 - DNA, 25 bp, Canis familiaris
gatgacaggtctagcattgttccac

SEQ ID NO: 126678 - DNA, 25 bp, Canis familiaris
gatgtcaagttcaatggcacccaca

SEQ ID NO: 126679 - DNA, 25 bp, Canis familiaris
gatgtcggttgaattgacctgatca

SEQ ID NO: 126680 - DNA, 25 bp, Canis familiaris
gatgataggctgaatttggcctgca

SEQ ID NO: 126681 - DNA, 25 bp, Canis familiaris
gatgttggtcaatttcctctcagaa

SEQ ID NO: 126682 - DNA, 25 bp, Canis familiaris
gatgttggatgaaggcgtgcccgac

SEQ ID NO: 126683 - DNA, 25 bp, Canis familiaris
gatgatggtgaactggaggccccag

SEQ ID NO: 126684 - DNA, 25 bp, Canis familiaris
gatgtagtgtaaagagctcctccat

SEQ ID NO: 126685 - DNA, 25 bp, Canis familiaris
gatgtagcatgtgtaagtccttcat

SEQ ID NO: 126686 - DNA, 25 bp, Canis familiaris
gatgtcaatctttaaactcttgctg

SEQ ID NO: 126687 - DNA, 25 bp, Canis familiaris
gatgtcctctatgtgatttttgcta

SEQ ID NO: 126688 - DNA, 25 bp, Canis familiaris
gatgtccgtgtgatgaattctactc

SEQ ID NO: 126689 - DNA, 25 bp, Canis familiaris
gatgtcacgtgctttaatctgatga

SEQ ID NO: 126690 - DNA, 25 bp, Canis familiaris
gatgtcgtgtgcttctaaattaata

SEQ ID NO: 126691 - DNA, 25 bp, Canis familiaris
gatgtcgatgcctttgattttattc

SEQ ID NO: 126692 - DNA, 25 bp, Canis familiaris
gatgtcagcaaccttgtctgttatt

SEQ ID NO: 126693 - DNA, 25 bp, Canis familiaris
gatgaagtactgggcctgttattgt

SEQ ID NO: 126694 - DNA, 25 bp, Canis familiaris
gatgaaattgcggcgctagttgtag

SEQ ID NO: 126695 - DNA, 25 bp, Canis familiaris
gatgtaggtgctgggtgtgcttgta

SEQ ID NO: 126696 - DNA, 25 bp, Canis familiaris
gatgtcagtccattgattgtcttta

SEQ ID NO: 126697 - DNA, 25 bp, Canis familiaris
gatgttgaccagtattgtctatttt

SEQ ID NO: 126698 - DNA, 25 bp, Canis familiaris
gatgtacccacttgtgtatatattt

SEQ ID NO: 126699 - DNA, 25 bp, Canis familiaris
gatgtccagccagtatgttttagtt

SEQ ID NO: 126700 - DNA, 25 bp, Canis familiaris
gatgatccaccagatgctgtcaacg

SEQ ID NO: 126701 - DNA, 25 bp, Canis familiaris
gatgatctactactattactcacgg

SEQ ID NO: 126702 - DNA, 25 bp, Canis familiaris
gatgcccagtgacaagaccatcggt

SEQ ID NO: 126703 - DNA, 25 bp, Canis familiaris
gatccaatgggagaacaacgggcag

SEQ ID NO: 126704 - DNA, 25 bp, Canis familiaris
gatccgagtggggaacacacctgaa

SEQ ID NO: 126705 - DNA, 25 bp, Canis familiaris
gatgaagaggggcattccagtccaa

SEQ ID NO: 126706 - DNA, 25 bp, Canis familiaris
gatgatatttggcatgatcttcagt

SEQ ID NO: 126707 - DNA, 25 bp, Canis familiaris
gatgtttgagtctagcagtagctgt

SEQ ID NO: 126708 - DNA, 25 bp, Canis familiaris
gatgtctctgagctcacaggatttc

SEQ ID NO: 126709 - DNA, 25 bp, Canis familiaris
gatgtgcctgggagcaggcctggcg

SEQ ID NO: 126710 - DNA, 25 bp, Canis familiaris
gatgaggctgtgtaccaggccattg

SEQ ID NO: 126711 - DNA, 25 bp, Canis familiaris
gatgtagtgtgcttccagagaactg

SEQ ID NO: 126712 - DNA, 25 bp, Canis familiaris
gatcaacttcatccaggagctactg

SEQ ID NO: 126713 - DNA, 25 bp, Canis familiaris
gatcatggtctcctcaaggtaccac

SEQ ID NO: 126714 - DNA, 25 bp, Canis familiaris
gatgatgtgatcgttacggcctcca

SEQ ID NO: 126715 - DNA, 25 bp, Canis familiaris
gatgagcgacacgtatcacggtcca

SEQ ID NO: 126716 - DNA, 25 bp, Canis familiaris
gatgcaggaacgttctgttgcccaa

SEQ ID NO: 126717 - DNA, 25 bp, Canis familiaris
gatctggcaccacaccttctacaat

SEQ ID NO: 126718 - DNA, 25 bp, Canis familiaris
gatagtgccaagcaactctttcctg

SEQ ID NO: 126719 - DNA, 25 bp, Canis familiaris
gatgctaccagagtaacctttctaa

SEQ ID NO: 126720 - DNA, 25 bp, Canis familiaris
gatgctattacagaactccttaaag

SEQ ID NO: 126721 - DNA, 25 bp, Canis familiaris
gatgcttgtgtaaaaccctataaac

SEQ ID NO: 126722 - DNA, 25 bp, Canis familiaris
gatctttttatctgcctttaactct

SEQ ID NO: 126723 - DNA, 25 bp, Canis familiaris
gatcttccctagtgatgtcattaag

SEQ ID NO: 126724 - DNA, 25 bp, Canis familiaris
gatgtcccgtggtgatccatttaag

SEQ ID NO: 126725 - DNA, 25 bp, Canis familiaris
gatgtcctcggtttgtatagtatac

SEQ ID NO: 126726 - DNA, 25 bp, Canis familiaris
gatgtcctggaatggaatattactc

SEQ ID NO: 126727 - DNA, 25 bp, Canis familiaris
gatgaccttgaatgaatagactact

SEQ ID NO: 126728 - DNA, 25 bp, Canis familiaris
gatgacgtgtactactgtggaatca

SEQ ID NO: 126729 - DNA, 25 bp, Canis familiaris
gatgtttgtacttgctggctatcaa

SEQ ID NO: 126730 - DNA, 25 bp, Canis familiaris
gatgttttcatctactgagccaaag

SEQ ID NO: 126731 - DNA, 25 bp, Canis familiaris
gatgttcagtcagcctgagccaaga

SEQ ID NO: 126732 - DNA, 25 bp, Canis familiaris
gatgttcgtaactagagcagtggca

SEQ ID NO: 126733 - DNA, 25 bp, Canis familiaris
gatgttgtgtatacaaatagcagaa

SEQ ID NO: 126734 - DNA, 25 bp, Canis familiaris
gatgttgttttcaagaactgtgcaa

SEQ ID NO: 126735 - DNA, 25 bp, Canis familiaris
gatgaggttgtacaccctggagacc

SEQ ID NO: 126736 - DNA, 25 bp, Canis familiaris
gatctacttgtacaccctgaatgac

SEQ ID NO: 126737 - DNA, 25 bp, Canis familiaris
gatgttctggtaaatcacctcaatg

SEQ ID NO: 126738 - DNA, 25 bp, Canis familiaris
gatgttgtactcaattaccccatgt

SEQ ID NO: 126739 - DNA, 25 bp, Canis familiaris
gatgtattactccttagccatggct

SEQ ID NO: 126740 - DNA, 25 bp, Canis familiaris
gatgttgtcatcagcactagcgtcc

SEQ ID NO: 126741 - DNA, 25 bp, Canis familiaris
gatgtctgcttcaggctcctgaaca

SEQ ID NO: 126742 - DNA, 25 bp, Canis familiaris
gatgtcccatcaatgtctacaaaca

SEQ ID NO: 126743 - DNA, 25 bp, Canis familiaris
gatgacccctctactatcgagaaac

SEQ ID NO: 126744 - DNA, 25 bp, Canis familiaris
gatgatcccttaatccaagcagcaa

SEQ ID NO: 126745 - DNA, 25 bp, Canis familiaris
gatgatctccgtagctcacgagaca

SEQ ID NO: 126746 - DNA, 25 bp, Canis familiaris
gatgacatactgacttaggcaataa

SEQ ID NO: 126747 - DNA, 25 bp, Canis familiaris
gatgaaatccttcacgcatatcagc

SEQ ID NO: 126748 - DNA, 25 bp, Canis familiaris
gatgaaaccattatctgagaggtca

SEQ ID NO: 126749 - DNA, 25 bp, Canis familiaris
gatgaaactcattgcctggaagaaa

SEQ ID NO: 126750 - DNA, 25 bp, Canis familiaris
gatgaaacttgctgtagatgaagaa

SEQ ID NO: 126751 - DNA, 25 bp, Canis familiaris
gatgcacaagtgtccgtaaggtgag

SEQ ID NO: 126752 - DNA, 25 bp, Canis familiaris
gatgactagtgattcctattgggga

SEQ ID NO: 126753 - DNA, 25 bp, Canis familiaris
gatgagggtgccacttcatgatggt

SEQ ID NO: 126754 - DNA, 25 bp, Canis familiaris
gatgatccgtccagtctaggggagc

SEQ ID NO: 126755 - DNA, 25 bp, Canis familiaris
gatgatccagttttacttggaggag

SEQ ID NO: 126756 - DNA, 25 bp, Canis familiaris
gatgtctcctcttataattgtgggt

SEQ ID NO: 126757 - DNA, 25 bp, Canis familiaris
gatgtattctctgatgtatttggtt

SEQ ID NO: 126758 - DNA, 25 bp, Canis familiaris
gatgtttttggattttgatgagtta

SEQ ID NO: 126759 - DNA, 25 bp, Canis familiaris
gatgtctatttttttcttgtgtatt

SEQ ID NO: 126760 - DNA, 25 bp, Canis familiaris
gatcctttttctattttcactgtaa

SEQ ID NO: 126761 - DNA, 25 bp, Canis familiaris
gatgcgtttctttgtaatttcagtg

SEQ ID NO: 126762 - DNA, 25 bp, Canis familiaris
gatgctaaacttcaagcttccgatg

SEQ ID NO: 126763 - DNA, 25 bp, Canis familiaris
gatgataaactgctacactacaaca

SEQ ID NO: 126764 - DNA, 25 bp, Canis familiaris
gatgtctttgtgattccgacaatga

SEQ ID NO: 126765 - DNA, 25 bp, Canis familiaris
gatgtcttcttggtatatctgaaaa

SEQ ID NO: 126766 - DNA, 25 bp, Canis familiaris
gatgtttttcttttctaatgcataa

SEQ ID NO: 126767 - DNA, 25 bp, Canis familiaris
gatgttgttatcctgtttttgccaa

SEQ ID NO: 126768 - DNA, 25 bp, Canis familiaris
gatgttgcatttttcttgttcttaa

SEQ ID NO: 126769 - DNA, 25 bp, Canis familiaris
gatgtttattgacttagttttggcc

SEQ ID NO: 126770 - DNA, 25 bp, Canis familiaris
gatgtttctctgctgattttctaag

SEQ ID NO: 126771 - DNA, 25 bp, Canis familiaris
gatgacttgcttttgcttttctaca

SEQ ID NO: 126772 - DNA, 25 bp, Canis familiaris
gatgatctcactttttgtgttcccc

SEQ ID NO: 126773 - DNA, 25 bp, Canis familiaris
gatgagtgacttgacctgtgacctc

SEQ ID NO: 126774 - DNA, 25 bp, Canis familiaris
gatgaggtcttgaaataatggcccg

SEQ ID NO: 126775 - DNA, 25 bp, Canis familiaris
gatgcacagactcagcaataaacct

SEQ ID NO: 126776 - DNA, 25 bp, Canis familiaris
gatgcagcagacaaagccaccaacc

SEQ ID NO: 126777 - DNA, 25 bp, Canis familiaris
gatgtatgaccatgccaagtggctc

SEQ ID NO: 126778 - DNA, 25 bp, Canis familiaris
gatgcttaccatgtagtgtgaccgt

SEQ ID NO: 126779 - DNA, 25 bp, Canis familiaris
gatctataccgcttgggaaacgttt

SEQ ID NO: 126780 - DNA, 25 bp, Canis familiaris
gatgctgaacgcgttgcacgacaac

SEQ ID NO: 126781 - DNA, 25 bp, Canis familiaris
gatctacacgtttatcggcaaaacc

SEQ ID NO: 126782 - DNA, 25 bp, Canis familiaris
gatctacgggggacgtcagagaaac

SEQ ID NO: 126783 - DNA, 25 bp, Canis familiaris
gatccctggggtccttcaggatcag

SEQ ID NO: 126784 - DNA, 25 bp, Canis familiaris
gatccagaggtttcttgtacttcag

SEQ ID NO: 126785 - DNA, 25 bp, Canis familiaris
gatgcacggagggacttggagcttg

SEQ ID NO: 126786 - DNA, 25 bp, Canis familiaris
gatccggaggtgtcgtagtggggtg

SEQ ID NO: 126787 - DNA, 25 bp, Canis familiaris
gatcctggaggacacccatagggtg

SEQ ID NO: 126788 - DNA, 25 bp, Canis familiaris
gtcacggacgactaggtcaagggcc

SEQ ID NO: 126789 - DNA, 25 bp, Canis familiaris
gatcccaacaacaggtacaagtccc

SEQ ID NO: 126790 - DNA, 25 bp, Canis familiaris
gatcctaaaatctaactataaactc

SEQ ID NO: 126791 - DNA, 25 bp, Canis familiaris
gatcctaaggtttgcttttatggtg

SEQ ID NO: 126792 - DNA, 25 bp, Canis familiaris
gatctgtactgtgtggttttacgga

SEQ ID NO: 126793 - DNA, 25 bp, Canis familiaris
gatgcatggacttccttgtacttga

SEQ ID NO: 126794 - DNA, 25 bp, Canis familiaris
gatgaaggtatcctgtgcccttgat

SEQ ID NO: 126795 - DNA, 25 bp, Canis familiaris
gatgaagaaatccgtgcaaatatgg

SEQ ID NO: 126796 - DNA, 25 bp, Canis familiaris
gatgttgatacatggtaaatctcgt

SEQ ID NO: 126797 - DNA, 25 bp, Canis familiaris
gatgtttgacactgttaactcatga

SEQ ID NO: 126798 - DNA, 25 bp, Canis familiaris
gatgttgataacagcattacctaca

SEQ ID NO: 126799 - DNA, 25 bp, Canis familiaris
gatgtttagaaacttcacagcaaaa

SEQ ID NO: 126800 - DNA, 25 bp, Canis familiaris
gatgtttagatattcatgatcaagt

SEQ ID NO: 126801 - DNA, 25 bp, Canis familiaris
gatgtatatgcctatttgctcacag

SEQ ID NO: 126802 - DNA, 25 bp, Canis familiaris
gatgcttgacctaattgttcagcgt

SEQ ID NO: 126803 - DNA, 25 bp, Canis familiaris
gatgcagtacttaactttccttggt

SEQ ID NO: 126804 - DNA, 25 bp, Canis familiaris
gatgaaactcttcttttcttgccat

SEQ ID NO: 126805 - DNA, 25 bp, Canis familiaris
gatgaaagtctttttccttctccaa

SEQ ID NO: 126806 - DNA, 25 bp, Canis familiaris
gatgaatgtttttcttcacttccgc

SEQ ID NO: 126807 - DNA, 25 bp, Canis familiaris
gatgatttttgttctctatcttgtt

SEQ ID NO: 126808 - DNA, 25 bp, Canis familiaris
gatgaatgtgttcatctctcaccgt

SEQ ID NO: 126809 - DNA, 25 bp, Canis familiaris
gatgtatttctcactcagaggctgg

SEQ ID NO: 126810 - DNA, 25 bp, Canis familiaris
gatgtatttttttcacaatctgtgc

SEQ ID NO: 126811 - DNA, 25 bp, Canis familiaris
gatgtatttgtacaccagactgcca

SEQ ID NO: 126812 - DNA, 25 bp, Canis familiaris
gatgctattttagatgtctgccagg

SEQ ID NO: 126813 - DNA, 25 bp, Canis familiaris
gatgcgatttccgttttaacagaca

SEQ ID NO: 126814 - DNA, 25 bp, Canis familiaris
gatgcgcttccatgtttaataaacc

SEQ ID NO: 126815 - DNA, 25 bp, Canis familiaris
gatgaccctgagctgttcaaacaac

SEQ ID NO: 126816 - DNA, 25 bp, Canis familiaris
gatgccggtgggctaaaccaacggc

SEQ ID NO: 126817 - DNA, 25 bp, Canis familiaris
gatgttcgtggacctgaacccagac

SEQ ID NO: 126818 - DNA, 25 bp, Canis familiaris
gatctatcggggctgaagccctgag

SEQ ID NO: 126819 - DNA, 25 bp, Canis familiaris
gatcgtccgagtcattcggcacgga

SEQ ID NO: 126820 - DNA, 25 bp, Canis familiaris
gatcctctgtttcattgggactgga

SEQ ID NO: 126821 - DNA, 25 bp, Canis familiaris
gatccttgggccaaagcgtatcagg

SEQ ID NO: 126822 - DNA, 25 bp, Canis familiaris
gatgccttggaggacagcctggaag

SEQ ID NO: 126823 - DNA, 25 bp, Canis familiaris
gatgttgatggtgtggctgtgggag

SEQ ID NO: 126824 - DNA, 25 bp, Canis familiaris
gatgttcaggtcccagttgaggtgg

SEQ ID NO: 126825 - DNA, 25 bp, Canis familiaris
gatgttcatgggaatcagaatagag

SEQ ID NO: 126826 - DNA, 25 bp, Canis familiaris
gatgttcagctgcatacacgaatac

SEQ ID NO: 126827 - DNA, 25 bp, Canis familiaris
gatgattcagtgacccacatcttcc

SEQ ID NO: 126828 - DNA, 25 bp, Canis familiaris
gatgtatcagtgtctcaacctgtag

SEQ ID NO: 126829 - DNA, 25 bp, Canis familiaris
gatgtatctttttatgccatgtata

SEQ ID NO: 126830 - DNA, 25 bp, Canis familiaris
gatgttcggttactgcttaataatg

SEQ ID NO: 126831 - DNA, 25 bp, Canis familiaris
gatgttcgcgattatcttctatatc

SEQ ID NO: 126832 - DNA, 25 bp, Canis familiaris
gatgttctggagatttcttgataag

SEQ ID NO: 126833 - DNA, 25 bp, Canis familiaris
gatgttctagatatattctctggca

SEQ ID NO: 126834 - DNA, 25 bp, Canis familiaris
gatgttaattttatgcactgcaggc

SEQ ID NO: 126835 - DNA, 25 bp, Canis familiaris
gatgttaatctgttggtgacctgca

SEQ ID NO: 126836 - DNA, 25 bp, Canis familiaris
gatgagggtcgctatggtgtctatg

SEQ ID NO: 126837 - DNA, 25 bp, Canis familiaris
gatgaggagatcgagctggcttatg

SEQ ID NO: 126838 - DNA, 25 bp, Canis familiaris
gatgaggaggccgaggcagctacgg

SEQ ID NO: 126839 - DNA, 25 bp, Canis familiaris
gatgagaccctcttgaagtagctgg

SEQ ID NO: 126840 - DNA, 25 bp, Canis familiaris
gatgaatccattttagcattgactg

SEQ ID NO: 126841 - DNA, 25 bp, Canis familiaris
gatgactcgagttctagagccctgt

SEQ ID NO: 126842 - DNA, 25 bp, Canis familiaris
gatgatctccagtcatccagactct

SEQ ID NO: 126843 - DNA, 25 bp, Canis familiaris
gatgatcccatgttgctggagctcg

SEQ ID NO: 126844 - DNA, 25 bp, Canis familiaris
gatgatcgccaggcggccaacatgt

SEQ ID NO: 126845 - DNA, 25 bp, Canis familiaris
gatgacagtcattgggccactgcat

SEQ ID NO: 126846 - DNA, 25 bp, Canis familiaris
gataaccatagtccgcactcatgta

SEQ ID NO: 126847 - DNA, 25 bp, Canis familiaris
gatgcagaccaattggaactcttac

SEQ ID NO: 126848 - DNA, 25 bp, Canis familiaris
gatgacagcaaagtgaagacattgt

SEQ ID NO: 126849 - DNA, 25 bp, Canis familiaris
gatgatggcagcggaaatgactcct

SEQ ID NO: 126850 - DNA, 25 bp, Canis familiaris
gatgagtcactggaaagcaccgtcg

SEQ ID NO: 126851 - DNA, 25 bp, Canis familiaris
gatgagcttctggatagcagcctag

SEQ ID NO: 126852 - DNA, 25 bp, Canis familiaris
gatgagattctcgagacacagtgag

SEQ ID NO: 126853 - DNA, 25 bp, Canis familiaris
gatgaatttcaatccagtggtgtca

SEQ ID NO: 126854 - DNA, 25 bp, Canis familiaris
gatgatatttatttcccacgagtcc

SEQ ID NO: 126855 - DNA, 25 bp, Canis familiaris
gatgcaacttattactgccagcagt

SEQ ID NO: 126856 - DNA, 25 bp, Canis familiaris
gatgacacctgaacagctgggcaat

SEQ ID NO: 126857 - DNA, 25 bp, Canis familiaris
gatgacactcgaacagttccgttga

SEQ ID NO: 126858 - DNA, 25 bp, Canis familiaris
gatgaactaggatgcttccagctag

SEQ ID NO: 126859 - DNA, 25 bp, Canis familiaris
gatgaagtccgatttatctctctct

SEQ ID NO: 126860 - DNA, 25 bp, Canis familiaris
gatgaaccctgttaatctaatcata

SEQ ID NO: 126861 - DNA, 25 bp, Canis familiaris
gatgaacctccgggatgctgagaca

SEQ ID NO: 126862 - DNA, 25 bp, Canis familiaris
gatgaaatcccagagactgtctcgt

SEQ ID NO: 126863 - DNA, 25 bp, Canis familiaris
gataaagaccagagctcgattcgat

SEQ ID NO: 126864 - DNA, 25 bp, Canis familiaris
gatgaaaccaagagccaatttattt

SEQ ID NO: 126865 - DNA, 25 bp, Canis familiaris
gatgcaagatcctgtcagccagtgt

SEQ ID NO: 126866 - DNA, 25 bp, Canis familiaris
gatgacagtgcccagggctctgatg

SEQ ID NO: 126867 - DNA, 25 bp, Canis familiaris
gatgatcagtccggggcgctgcata

SEQ ID NO: 126868 - DNA, 25 bp, Canis familiaris
gatgatcattccgagtgtcagtcga

SEQ ID NO: 126869 - DNA, 25 bp, Canis familiaris
gatgatcatcactaaaggttgcgag

SEQ ID NO: 126870 - DNA, 25 bp, Canis familiaris
gatgaccaggctaagcaggtgctga

SEQ ID NO: 126871 - DNA, 25 bp, Canis familiaris
gatgaccgtgtgaagaagtgcattg

SEQ ID NO: 126872 - DNA, 25 bp, Canis familiaris
gatgcatcatcttctgtaaaatatt

SEQ ID NO: 126873 - DNA, 25 bp, Canis familiaris
gatgagacacatcctagcaaaatat

SEQ ID NO: 126874 - DNA, 25 bp, Canis familiaris
gatgatgaagaactgcatggatatc

SEQ ID NO: 126875 - DNA, 25 bp, Canis familiaris
gatgagcagatgtttgagcagaact

SEQ ID NO: 126876 - DNA, 25 bp, Canis familiaris
gatgatgcgatgcagggctggatcc

SEQ ID NO: 126877 - DNA, 25 bp, Canis familiaris
gatgttgagggggctggcccctcta

SEQ ID NO: 126878 - DNA, 25 bp, Canis familiaris
gatgttgggagtatccctggctgct

SEQ ID NO: 126879 - DNA, 25 bp, Canis familiaris
gatgctgtgaaattaaacctgttct

SEQ ID NO: 126880 - DNA, 25 bp, Canis familiaris
gatcgtgcgaacggtagccagttct

SEQ ID NO: 126881 - DNA, 25 bp, Canis familiaris
gatcttcgacgcttggaacgtgctg

SEQ ID NO: 126882 - DNA, 25 bp, Canis familiaris
gatgcattcatctccgagaacggct

SEQ ID NO: 126883 - DNA, 25 bp, Canis familiaris
gatgcatggacagccaggacctgac

SEQ ID NO: 126884 - DNA, 25 bp, Canis familiaris
gatgatgtatcagctctatgaccca

SEQ ID NO: 126885 - DNA, 25 bp, Canis familiaris
gatgatgatatggatctctttcggg

SEQ ID NO: 126886 - DNA, 25 bp, Canis familiaris
gatgaatatgagtccacctccaggc

SEQ ID NO: 126887 - DNA, 25 bp, Canis familiaris
gatgaactggaccaggccagcaccc

SEQ ID NO: 126888 - DNA, 25 bp, Canis familiaris
gatgagaccagaatatggccaaaat

SEQ ID NO: 126889 - DNA, 25 bp, Canis familiaris
gatgatggccgatatgtacaacaga

SEQ ID NO: 126890 - DNA, 25 bp, Canis familiaris
gatgagtgccgagagctgaaccagc

SEQ ID NO: 126891 - DNA, 25 bp, Canis familiaris
gatgaggggcaggcacaggactatc

SEQ ID NO: 126892 - DNA, 25 bp, Canis familiaris
gatgaggggatcctctggcagatgt

SEQ ID NO: 126893 - DNA, 25 bp, Canis familiaris
gatgagttgagagatgcagtgttgc

SEQ ID NO: 126894 - DNA, 25 bp, Canis familiaris
gatgcttggctagttgcgtgtgtgc

SEQ ID NO: 126895 - DNA, 25 bp, Canis familiaris
gatgttctctccagagattctcttt

SEQ ID NO: 126896 - DNA, 25 bp, Canis familiaris
gatgatctcttcctagagtcttttg

SEQ ID NO: 126897 - DNA, 25 bp, Canis familiaris
gatgatctcacctcaggatccttat

SEQ ID NO: 126898 - DNA, 25 bp, Canis familiaris
gatgttcaccattctgatagttctt

SEQ ID NO: 126899 - DNA, 25 bp, Canis familiaris
gatgttcctcgttgtgatgttgtgt

SEQ ID NO: 126900 - DNA, 25 bp, Canis familiaris
gatgttcccagtgtggtgggacccc

SEQ ID NO: 126901 - DNA, 25 bp, Canis familiaris
gatgttaccagcactatggtgcgca

SEQ ID NO: 126902 - DNA, 25 bp, Canis familiaris
gatgatttccagatccagagatccc

SEQ ID NO: 126903 - DNA, 25 bp, Canis familiaris
gatgatttccacttaagagtgtctc

SEQ ID NO: 126904 - DNA, 25 bp, Canis familiaris
gatgttcttcactcttcagtgtttg

SEQ ID NO: 126905 - DNA, 25 bp, Canis familiaris
gatgttttctctcaatgcgatgtat

SEQ ID NO: 126906 - DNA, 25 bp, Canis familiaris
gatgttgttccttaccaggcagact

SEQ ID NO: 126907 - DNA, 25 bp, Canis familiaris
gatgcatggcccgtaacacatggca

SEQ ID NO: 126908 - DNA, 25 bp, Canis familiaris
gatgcataccttgaggccatgatga

SEQ ID NO: 126909 - DNA, 25 bp, Canis familiaris
gatgcagccgttgcaggcgaagttg

SEQ ID NO: 126910 - DNA, 25 bp, Canis familiaris
gatgcagccgttgcaggcgaagttg

SEQ ID NO: 126911 - DNA, 25 bp, Canis familiaris
gatgagctctttgcagatgccagga

SEQ ID NO: 126912 - DNA, 25 bp, Canis familiaris
gatgacattgtggacaagctgcagt

SEQ ID NO: 126913 - DNA, 25 bp, Canis familiaris
gatgactgcgggaacactaaggtag

SEQ ID NO: 126914 - DNA, 25 bp, Canis familiaris
gatgaagctgcagaaccaacgaggt

SEQ ID NO: 126915 - DNA, 25 bp, Canis familiaris
gatgaagctgcagaaccaacgaggt

SEQ ID NO: 126916 - DNA, 25 bp, Canis familiaris
gatgatgagctgtgatcgggactga

SEQ ID NO: 126917 - DNA, 25 bp, Canis familiaris
gatgatgacttgtgcgttgactgtg

SEQ ID NO: 126918 - DNA, 25 bp, Canis familiaris
gatgaggttgaatttatcagtgtgc

SEQ ID NO: 126919 - DNA, 25 bp, Canis familiaris
gatgagcctttgtttacaagagcct

SEQ ID NO: 126920 - DNA, 25 bp, Canis familiaris
gttccattggttgaaaagtccattt

SEQ ID NO: 126921 - DNA, 25 bp, Canis familiaris
gatcccatttgaaacgtaagtcctg

SEQ ID NO: 126922 - DNA, 25 bp, Canis familiaris
gatgacctttttcaggtatgtccta

SEQ ID NO: 126923 - DNA, 25 bp, Canis familiaris
gatgacatctttgccataagttggg

SEQ ID NO: 126924 - DNA, 25 bp, Canis familiaris
gatgacttcctgggagaggtgtgca

SEQ ID NO: 126925 - DNA, 25 bp, Canis familiaris
gatgaccatccggagaggttggatc

SEQ ID NO: 126926 - DNA, 25 bp, Canis familiaris
gatgaccttggcggagttgatgaac

SEQ ID NO: 126927 - DNA, 25 bp, Canis familiaris
gatgacctctagttagcttgtgatt

SEQ ID NO: 126928 - DNA, 25 bp, Canis familiaris
gatgagcagctcagaggaggtgtct

SEQ ID NO: 126929 - DNA, 25 bp, Canis familiaris
gatgagcaaatggcagtagaggttt

SEQ ID NO: 126930 - DNA, 25 bp, Canis familiaris
gatccgaatgacgtaaggcccatcc

SEQ ID NO: 126931 - DNA, 25 bp, Canis familiaris
gatgcttggaaggttaggccatgca

SEQ ID NO: 126932 - DNA, 25 bp, Canis familiaris
gatgaggcgagaggcttgggccagc

SEQ ID NO: 126933 - DNA, 25 bp, Canis familiaris
gatgagccgcagaagtggaggccac

SEQ ID NO: 126934 - DNA, 25 bp, Canis familiaris
gatgacccagtcgtggagttcacac

SEQ ID NO: 126935 - DNA, 25 bp, Canis familiaris
gatgacctttgcttggatgtctcca

SEQ ID NO: 126936 - DNA, 25 bp, Canis familiaris
gatgaccatgtacctggctgtatgc

SEQ ID NO: 126937 - DNA, 25 bp, Canis familiaris
gatgactgcattagactctggaagc

SEQ ID NO: 126938 - DNA, 25 bp, Canis familiaris
gatgacatgctttgtgagtagaacc

SEQ ID NO: 126939 - DNA, 25 bp, Canis familiaris
gatgactgccaagtgaaggcccctg

SEQ ID NO: 126940 - DNA, 25 bp, Canis familiaris
gatgcaagcctagaatgggccttgg

SEQ ID NO: 126941 - DNA, 25 bp, Canis familiaris
gatgcaccctatgataatctccttc

SEQ ID NO: 126942 - DNA, 25 bp, Canis familiaris
gatgcactcttaaaattttcccaca

SEQ ID NO: 126943 - DNA, 25 bp, Canis familiaris
gatcccatatatctaagttcggaca

SEQ ID NO: 126944 - DNA, 25 bp, Canis familiaris
gatcccaaatggaaagctctaccca

SEQ ID NO: 126945 - DNA, 25 bp, Canis familiaris
gatgcctaattggcccattcggcac

SEQ ID NO: 126946 - DNA, 25 bp, Canis familiaris
gatgcacattattttccttcgtaca

SEQ ID NO: 126947 - DNA, 25 bp, Canis familiaris
gatgacatgtactggctgtatgcag

SEQ ID NO: 126948 - DNA, 25 bp, Canis familiaris
gatgacagtacatgtgttctgcttg

SEQ ID NO: 126949 - DNA, 25 bp, Canis familiaris
gatgactgatcctaatgtggctctt

SEQ ID NO: 126950 - DNA, 25 bp, Canis familiaris
gatgccaggtctaatgggcacatgt

SEQ ID NO: 126951 - DNA, 25 bp, Canis familiaris
gatgaagcgcacaaaccgcactgtc

SEQ ID NO: 126952 - DNA, 25 bp, Canis familiaris
gatgaacatgacaggctctgccttc

SEQ ID NO: 126953 - DNA, 25 bp, Canis familiaris
gatgatagcagactgtactcccctc

SEQ ID NO: 126954 - DNA, 25 bp, Canis familiaris
gatgctggaatacatcttccctcgt

SEQ ID NO: 126955 - DNA, 25 bp, Canis familiaris
gatgctggactaatagacaccacct

SEQ ID NO: 126956 - DNA, 25 bp, Canis familiaris
gatgctcaagcacctagagactagc

SEQ ID NO: 126957 - DNA, 25 bp, Canis familiaris
gatgctctagccgtagcagaatact

SEQ ID NO: 126958 - DNA, 25 bp, Canis familiaris
gatgctcgagacaacgatgattcct

SEQ ID NO: 126959 - DNA, 25 bp, Canis familiaris
gatgagtggataaagatgtggtcta

SEQ ID NO: 126960 - DNA, 25 bp, Canis familiaris
gatgagtatgtatgatggctgattt

SEQ ID NO: 126961 - DNA, 25 bp, Canis familiaris
gatgagtctccagagctgctatatt

SEQ ID NO: 126962 - DNA, 25 bp, Canis familiaris
gatgcttgcccagcagatgcgattt

SEQ ID NO: 126963 - DNA, 25 bp, Canis familiaris
gatgagtcctgagcattggtgctct

SEQ ID NO: 126964 - DNA, 25 bp, Canis familiaris
gatgagatcatggacctgctggtgc

SEQ ID NO: 126965 - DNA, 25 bp, Canis familiaris
gatgatgacatgggctttggtctct

SEQ ID NO: 126966 - DNA, 25 bp, Canis familiaris
gatgatgacggcgtgtgacctgtct

SEQ ID NO: 126967 - DNA, 25 bp, Canis familiaris
gatgatgactatctggcgttatcct

SEQ ID NO: 126968 - DNA, 25 bp, Canis familiaris
gatgcagacggcctggtgattgacc

SEQ ID NO: 126969 - DNA, 25 bp, Canis familiaris
gatgagattagcctgaggcctgctc

SEQ ID NO: 126970 - DNA, 25 bp, Canis familiaris
gatgagtctgagcctgaggacctcc

SEQ ID NO: 126971 - DNA, 25 bp, Canis familiaris
gatgagcctgtggagagaacctctc

SEQ ID NO: 126972 - DNA, 25 bp, Canis familiaris
gatgacaggtccacagatcgcctgc

SEQ ID NO: 126973 - DNA, 25 bp, Canis familiaris
gatgatctgggcctgggtggccatc

SEQ ID NO: 126974 - DNA, 25 bp, Canis familiaris
gatgatctgggcatttgtacattta

SEQ ID NO: 126975 - DNA, 25 bp, Canis familiaris
gatgactggtggttattggctttac

SEQ ID NO: 126976 - DNA, 25 bp, Canis familiaris
gatgacgagtgtctttgacggtcct

SEQ ID NO: 126977 - DNA, 25 bp, Canis familiaris
gatgaaggttgtaagagaaggattt

SEQ ID NO: 126978 - DNA, 25 bp, Canis familiaris
gatgaagggagcaatataacaggat

SEQ ID NO: 126979 - DNA, 25 bp, Canis familiaris
gataagggaccttggaccatagctc

SEQ ID NO: 126980 - DNA, 25 bp, Canis familiaris
gatcgaggtgaccttcgacatcgac

SEQ ID NO: 126981 - DNA, 25 bp, Canis familiaris
gatcgtgtgtaccctaaataccaat

SEQ ID NO: 126982 - DNA, 25 bp, Canis familiaris
gatcgtaggacaacttctatcctct

SEQ ID NO: 126983 - DNA, 25 bp, Canis familiaris
gatgaggagaacacttcacttcaca

SEQ ID NO: 126984 - DNA, 25 bp, Canis familiaris
gatgaacgaacactttcctgtacaa

SEQ ID NO: 126985 - DNA, 25 bp, Canis familiaris
gatgaagctacaatgtattacgcta

SEQ ID NO: 126986 - DNA, 25 bp, Canis familiaris
gatgacctctcaactttaactgaaa

SEQ ID NO: 126987 - DNA, 25 bp, Canis familiaris
gatgatcacattcctctttaacaga

SEQ ID NO: 126988 - DNA, 25 bp, Canis familiaris
gatgatgcgcataccttaaatagaa

SEQ ID NO: 126989 - DNA, 25 bp, Canis familiaris
gatgccgatgtgtcttaaaggaata

SEQ ID NO: 126990 - DNA, 25 bp, Canis familiaris
gatgctactgtacttgaatggttaa

SEQ ID NO: 126991 - DNA, 25 bp, Canis familiaris
gatgcaacttattagaatggtgtgg

SEQ ID NO: 126992 - DNA, 25 bp, Canis familiaris
gatgaagctttgtgagtttgtgcta

SEQ ID NO: 126993 - DNA, 25 bp, Canis familiaris
gatgaacgtgcctgactttgacttc

SEQ ID NO: 126994 - DNA, 25 bp, Canis familiaris
gatgatactgtggcttgttttatta

SEQ ID NO: 126995 - DNA, 25 bp, Canis familiaris
gatgatccctatagtattagtatct

SEQ ID NO: 126996 - DNA, 25 bp, Canis familiaris
gatgaccctgttagtctaatcatag

SEQ ID NO: 126997 - DNA, 25 bp, Canis familiaris
gatgacctcatggaagctctaactg

SEQ ID NO: 126998 - DNA, 25 bp, Canis familiaris
gatgcagtacagaataggctaactc

SEQ ID NO: 126999 - DNA, 25 bp, Canis familiaris
gatgcacttcgaatctggatcaacc

SEQ ID NO: 127000 - DNA, 25 bp, Canis familiaris
gatgcactatatatataccacacac

SEQ ID NO: 127001 - DNA, 25 bp, Canis familiaris
gatgcaattatttctccagtcacct

SEQ ID NO: 127002 - DNA, 25 bp, Canis familiaris
gatgatttttatccatagcctctat

SEQ ID NO: 127003 - DNA, 25 bp, Canis familiaris
tggactttttgagcaccttatttta

SEQ ID NO: 127004 - DNA, 25 bp, Canis familiaris
ttaccttttaaagcttagtatagag

SEQ ID NO: 127005 - DNA, 25 bp, Canis familiaris
tcccctgtttaatccgaacctaatg

SEQ ID NO: 127006 - DNA, 25 bp, Canis familiaris
tcctgggtgggatcccaaaccgaag

SEQ ID NO: 127007 - DNA, 25 bp, Canis familiaris
gatcgtactgggtacctcaaaccgg

SEQ ID NO: 127008 - DNA, 25 bp, Canis familiaris
gatctctaagagatccccagacctc

SEQ ID NO: 127009 - DNA, 25 bp, Canis familiaris
gatcatttgggatgacccgacagcc

SEQ ID NO: 127010 - DNA, 25 bp, Canis familiaris
gatgatttttgatacccagccagaa

SEQ ID NO: 127011 - DNA, 25 bp, Canis familiaris
gatgcaagctttgaaacccacagga

SEQ ID NO: 127012 - DNA, 25 bp, Canis familiaris
gatgagacttacggagcacaccact

SEQ ID NO: 127013 - DNA, 25 bp, Canis familiaris
gatgatgactacgcaggctttctct

SEQ ID NO: 127014 - DNA, 25 bp, Canis familiaris
gatgatcccacttcaattttatctc

SEQ ID NO: 127015 - DNA, 25 bp, Canis familiaris
gatgctcccacttgtaactgtttgg

SEQ ID NO: 127016 - DNA, 25 bp, Canis familiaris
gatgccccctcagataatgacagtg

SEQ ID NO: 127017 - DNA, 25 bp, Canis familiaris
gatgcagccagcctagctgaagatg

SEQ ID NO: 127018 - DNA, 25 bp, Canis familiaris
gatgctggagcctacagccatggct

SEQ ID NO: 127019 - DNA, 25 bp, Canis familiaris
gatgaagtgtcatcacatcatgtgc

SEQ ID NO: 127020 - DNA, 25 bp, Canis familiaris
gatgaaggtgtccacattggcttgg

SEQ ID NO: 127021 - DNA, 25 bp, Canis familiaris
gatgaaggagtcctacggtgggccc

SEQ ID NO: 127022 - DNA, 25 bp, Canis familiaris
gatgaaggcagagattgcgctggtg

SEQ ID NO: 127023 - DNA, 25 bp, Canis familiaris
gatgacagagatcgtaagccgtgtg

SEQ ID NO: 127024 - DNA, 25 bp, Canis familiaris
gatgccagtgagatccaggtggatg

SEQ ID NO: 127025 - DNA, 25 bp, Canis familiaris
gatgatcgttggacacaggcaggtg

SEQ ID NO: 127026 - DNA, 25 bp, Canis familiaris
gatgcatctttatctcggaggttaa

SEQ ID NO: 127027 - DNA, 25 bp, Canis familiaris
gatgcacttccatcccaaggctttg

SEQ ID NO: 127028 - DNA, 25 bp, Canis familiaris
gatgaacttctttggcaagggtgtg

SEQ ID NO: 127029 - DNA, 25 bp, Canis familiaris
gatgcccttagatgtccggggctgc

SEQ ID NO: 127030 - DNA, 25 bp, Canis familiaris
gatgcagttaaatgtccctttgctc

SEQ ID NO: 127031 - DNA, 25 bp, Canis familiaris
gatgcgcttaaaattgtccgttcca

SEQ ID NO: 127032 - DNA, 25 bp, Canis familiaris
gatgcacttaattatgttccaggtt

SEQ ID NO: 127033 - DNA, 25 bp, Canis familiaris
gatgactctaagcatctctgtcctg

SEQ ID NO: 127034 - DNA, 25 bp, Canis familiaris
gatgacttaagtagtcttacaagcc

SEQ ID NO: 127035 - DNA, 25 bp, Canis familiaris
gatgacgctcaagggacttccaagc

SEQ ID NO: 127036 - DNA, 25 bp, Canis familiaris
gatgaagctcaaggctgacatttca

SEQ ID NO: 127037 - DNA, 25 bp, Canis familiaris
gatgcacagatctgtctgactagat

SEQ ID NO: 127038 - DNA, 25 bp, Canis familiaris
gatgcactcaaggccgacagagcag

SEQ ID NO: 127039 - DNA, 25 bp, Canis familiaris
gatgacatcaagccctacattagcc

SEQ ID NO: 127040 - DNA, 25 bp, Canis familiaris
gatgactttgccgatgacatctccc

SEQ ID NO: 127041 - DNA, 25 bp, Canis familiaris
gatgccgtcaccgatatcatcatca

SEQ ID NO: 127042 - DNA, 25 bp, Canis familiaris
gatgcttgtcaggtgcaatgtgtca

SEQ ID NO: 127043 - DNA, 25 bp, Canis familiaris
gatgcactgtctgtgaaggtcctac

SEQ ID NO: 127044 - DNA, 25 bp, Canis familiaris
gatgatcgtcgcctacagtgtcatc

SEQ ID NO: 127045 - DNA, 25 bp, Canis familiaris
gatgaggctggcaaacgttactaga

SEQ ID NO: 127046 - DNA, 25 bp, Canis familiaris
gatgcgacgttgtacgaatactaga

SEQ ID NO: 127047 - DNA, 25 bp, Canis familiaris
gatctgggactatctgaaactagtg

SEQ ID NO: 127048 - DNA, 25 bp, Canis familiaris
gatgctatgaatgtgtcgaaaaggg

SEQ ID NO: 127049 - DNA, 25 bp, Canis familiaris
gatgctatggatttgaactatgaag

SEQ ID NO: 127050 - DNA, 25 bp, Canis familiaris
gatgcttgtatccgtaatcatgaca

SEQ ID NO: 127051 - DNA, 25 bp, Canis familiaris
gatgcactgtactgaccaatgaaaa

SEQ ID NO: 127052 - DNA, 25 bp, Canis familiaris
gatgacgtccaaacacagtgaaagc

SEQ ID NO: 127053 - DNA, 25 bp, Canis familiaris
gatgacccacaatcacagaagaaac

SEQ ID NO: 127054 - DNA, 25 bp, Canis familiaris
gatgagccacaagttcataagaata

SEQ ID NO: 127055 - DNA, 25 bp, Canis familiaris
gatgatgtcaccattctaagaaaac

SEQ ID NO: 127056 - DNA, 25 bp, Canis familiaris
gatagccaactttaagagaaaccac

SEQ ID NO: 127057 - DNA, 25 bp, Canis familiaris
gatcgtggacttcgaaagagccccc

SEQ ID NO: 127058 - DNA, 25 bp, Canis familiaris
gatccggatctatgataccacctcc

SEQ ID NO: 127059 - DNA, 25 bp, Canis familiaris
gatgacggtgaatacaaccccacag

SEQ ID NO: 127060 - DNA, 25 bp, Canis familiaris
gatgaagggctcactcaaggcctcc

SEQ ID NO: 127061 - DNA, 25 bp, Canis familiaris
gatgacgggctaccagaattgtcta

SEQ ID NO: 127062 - DNA, 25 bp, Canis familiaris
gatgaactggctaccaggtttcttg

SEQ ID NO: 127063 - DNA, 25 bp, Canis familiaris
gatgcagaccttacgtagtgttctt

SEQ ID NO: 127064 - DNA, 25 bp, Canis familiaris
gatgcactccatgtctgagggtact

SEQ ID NO: 127065 - DNA, 25 bp, Canis familiaris
gatgatggcaattgttacgtgtact

SEQ ID NO: 127066 - DNA, 25 bp, Canis familiaris
gatgctgtgccagtattatctgttg

SEQ ID NO: 127067 - DNA, 25 bp, Canis familiaris
gatgatgttcactctcattttccaa

SEQ ID NO: 127068 - DNA, 25 bp, Canis familiaris
gatgagtccactcccaatttaggaa

SEQ ID NO: 127069 - DNA, 25 bp, Canis familiaris
gataggtacagatattttactacag

SEQ ID NO: 127070 - DNA, 25 bp, Canis familiaris
gtcgtgtaatggcaacttggtaagc

SEQ ID NO: 127071 - DNA, 25 bp, Canis familiaris
gatccagtaacacaaagggccatga

SEQ ID NO: 127072 - DNA, 25 bp, Canis familiaris
gatccagtaatcaccagggtttttt

SEQ ID NO: 127073 - DNA, 25 bp, Canis familiaris
gatcctgtttaatcccaatttttat

SEQ ID NO: 127074 - DNA, 25 bp, Canis familiaris
gatgccggtaaaacctcttgtgttt

SEQ ID NO: 127075 - DNA, 25 bp, Canis familiaris
gatccggtgaacgctgttcttgtgc

SEQ ID NO: 127076 - DNA, 25 bp, Canis familiaris
gatccgggtgaaggttagctatgca

SEQ ID NO: 127077 - DNA, 25 bp, Canis familiaris
tgtcctagggaagtttccaattagg

SEQ ID NO: 127078 - DNA, 25 bp, Canis familiaris
gatccctgggattcttatttactat

SEQ ID NO: 127079 - DNA, 25 bp, Canis familiaris
gatgcatttcgaatttaatttctta

SEQ ID NO: 127080 - DNA, 25 bp, Canis familiaris
gatgactttgtaatttgatttcctg

SEQ ID NO: 127081 - DNA, 25 bp, Canis familiaris
gatgaccagtcttttcagtttccat

SEQ ID NO: 127082 - DNA, 25 bp, Canis familiaris
gatgcacaaactcgagtagcttccc

SEQ ID NO: 127083 - DNA, 25 bp, Canis familiaris
gatgctaataatcttttgctccctt

SEQ ID NO: 127084 - DNA, 25 bp, Canis familiaris
gatgctacataattttgtggctccc

SEQ ID NO: 127085 - DNA, 25 bp, Canis familiaris
gatgcagacattatcttggcagcga

SEQ ID NO: 127086 - DNA, 25 bp, Canis familiaris
gatgacgttggactcagagccgacc

SEQ ID NO: 127087 - DNA, 25 bp, Canis familiaris
gatgacctgcttatcagcacgtacc

SEQ ID NO: 127088 - DNA, 25 bp, Canis familiaris
gatgacctctttcaaagtcaccacc

SEQ ID NO: 127089 - DNA, 25 bp, Canis familiaris
gatccattctggttaaagacaccca

SEQ ID NO: 127090 - DNA, 25 bp, Canis familiaris
gatgccaatagtactgaaactcacc

SEQ ID NO: 127091 - DNA, 25 bp, Canis familiaris
gatgcccttgaaggaaacccagccc

SEQ ID NO: 127092 - DNA, 25 bp, Canis familiaris
gatgcccaagaagaaccgaatcgcc

SEQ ID NO: 127093 - DNA, 25 bp, Canis familiaris
gatgcccgagtagaccaaggaagct

SEQ ID NO: 127094 - DNA, 25 bp, Canis familiaris
gatgcttcgaaaggcaaggaggaag

SEQ ID NO: 127095 - DNA, 25 bp, Canis familiaris
gatgccggaaagtcggccaagaagg

SEQ ID NO: 127096 - DNA, 25 bp, Canis familiaris
gatgctcaggctcagtctgggaaaa

SEQ ID NO: 127097 - DNA, 25 bp, Canis familiaris
gatgaagtgcccagtggcagccaaa

SEQ ID NO: 127098 - DNA, 25 bp, Canis familiaris
gatgacattgtctcaggccacaaaa

SEQ ID NO: 127099 - DNA, 25 bp, Canis familiaris
gatgactgcatgcatggaaccaatc

SEQ ID NO: 127100 - DNA, 25 bp, Canis familiaris
gatgagccatgactagaatccacat

SEQ ID NO: 127101 - DNA, 25 bp, Canis familiaris
gatgagcagcatttgcaaggccctt

SEQ ID NO: 127102 - DNA, 25 bp, Canis familiaris
gatgctgatgaattgcagagatgcc

SEQ ID NO: 127103 - DNA, 25 bp, Canis familiaris
gatgctagcagttgcggtctctgcc

SEQ ID NO: 127104 - DNA, 25 bp, Canis familiaris
gatgccagcctaagacttctgggca

SEQ ID NO: 127105 - DNA, 25 bp, Canis familiaris
gatgaccctcagcaatatgtggata

SEQ ID NO: 127106 - DNA, 25 bp, Canis familiaris
gatgcaccgccaagcaaagggaacc

SEQ ID NO: 127107 - DNA, 25 bp, Canis familiaris
gatgcaccggcagaaagcagatgaa

SEQ ID NO: 127108 - DNA, 25 bp, Canis familiaris
gatgcaatcggaccaagagaacaat

SEQ ID NO: 127109 - DNA, 25 bp, Canis familiaris
gatgcaattgctcggcaaggacagt

SEQ ID NO: 127110 - DNA, 25 bp, Canis familiaris
gatgacatgtgcagccatttgccag

SEQ ID NO: 127111 - DNA, 25 bp, Canis familiaris
gatgagtatgggccatttgcctcct

SEQ ID NO: 127112 - DNA, 25 bp, Canis familiaris
gataaaaggccacctgccatctcat

SEQ ID NO: 127113 - DNA, 25 bp, Canis familiaris
gatgcaaaatgtacacctggctcca

SEQ ID NO: 127114 - DNA, 25 bp, Canis familiaris
gatgacagcttgtgacctgtctgcc

SEQ ID NO: 127115 - DNA, 25 bp, Canis familiaris
gatgacacgtgatgtctcggtctct

SEQ ID NO: 127116 - DNA, 25 bp, Canis familiaris
gatgaagctgagtggccgagagatt

SEQ ID NO: 127117 - DNA, 25 bp, Canis familiaris
gatgaatgcaagtcctgcctggaga

SEQ ID NO: 127118 - DNA, 25 bp, Canis familiaris
gatgacccagatcatgtttgagacc

SEQ ID NO: 127119 - DNA, 25 bp, Canis familiaris
gatgacccagatcatgtttgagacc

SEQ ID NO: 127120 - DNA, 25 bp, Canis familiaris
gatgagcatgggtgtgttctaataa

SEQ ID NO: 127121 - DNA, 25 bp, Canis familiaris
gatgagatcaagcaggctctgttaa

SEQ ID NO: 127122 - DNA, 25 bp, Canis familiaris
gatgactcaagccaagttgcattca

SEQ ID NO: 127123 - DNA, 25 bp, Canis familiaris
gatgaccatgagcacctatgagatc

SEQ ID NO: 127124 - DNA, 25 bp, Canis familiaris
gatgaaagaaactatcatgaaccag

SEQ ID NO: 127125 - DNA, 25 bp, Canis familiaris
gataaaaacctttcagtccagcatg

SEQ ID NO: 127126 - DNA, 25 bp, Canis familiaris
gataataaacctctaactctgccca

SEQ ID NO: 127127 - DNA, 25 bp, Canis familiaris
gatttaccctctgataaacagccac

SEQ ID NO: 127128 - DNA, 25 bp, Canis familiaris
gatcaccatgccatctgtaaaaccc

SEQ ID NO: 127129 - DNA, 25 bp, Canis familiaris
gatcgtcgcttagttaacaatcctt

SEQ ID NO: 127130 - DNA, 25 bp, Canis familiaris
gatcgacgtaattaacacattccag

SEQ ID NO: 127131 - DNA, 25 bp, Canis familiaris
gatccaggtatatgtagctattccg

SEQ ID NO: 127132 - DNA, 25 bp, Canis familiaris
gatccaggatgttcggactcatggc

SEQ ID NO: 127133 - DNA, 25 bp, Canis familiaris
gatcaacggttagacttggccacac

SEQ ID NO: 127134 - DNA, 25 bp, Canis familiaris
gatccactgggccacaactatggta

SEQ ID NO: 127135 - DNA, 25 bp, Canis familiaris
gatcgcacggtgtacaacctgaaga

SEQ ID NO: 127136 - DNA, 25 bp, Canis familiaris
gatgcccggttgtcgtcggaaaggg

SEQ ID NO: 127137 - DNA, 25 bp, Canis familiaris
gatccccagttccctgggaaaagtg

SEQ ID NO: 127138 - DNA, 25 bp, Canis familiaris
gatctaccgcggggggcgaattggg

SEQ ID NO: 127139 - DNA, 25 bp, Canis familiaris
gtccatcctcggggaggggacggag

SEQ ID NO: 127140 - DNA, 25 bp, Canis familiaris
gatccacagcactggggggtgggcc

SEQ ID NO: 127141 - DNA, 25 bp, Canis familiaris
gatcggaaacgccgcggcgatgggc

SEQ ID NO: 127142 - DNA, 25 bp, Canis familiaris
gatctgtaataacggcagggaagga

SEQ ID NO: 127143 - DNA, 25 bp, Canis familiaris
gatctgtacccatggggagccaaat

SEQ ID NO: 127144 - DNA, 25 bp, Canis familiaris
gatgcagttccccatggagatggcc

SEQ ID NO: 127145 - DNA, 25 bp, Canis familiaris
gatgcaggacaccactgggacagga

SEQ ID NO: 127146 - DNA, 25 bp, Canis familiaris
gatgcagcgggggtgggagggcaga

SEQ ID NO: 127147 - DNA, 25 bp, Canis familiaris
gatgagctggtccgggagatggtgg

SEQ ID NO: 127148 - DNA, 25 bp, Canis familiaris
gatgagctttgcgggggagctgctc

SEQ ID NO: 127149 - DNA, 25 bp, Canis familiaris
gatcagtttcgaacgaggcctttga

SEQ ID NO: 127150 - DNA, 25 bp, Canis familiaris
gatcttttcatcacagggttttgga

SEQ ID NO: 127151 - DNA, 25 bp, Canis familiaris
gatctcgttcacagcagtggttgct

SEQ ID NO: 127152 - DNA, 25 bp, Canis familiaris
gatgccgttatcagagggtctcagg

SEQ ID NO: 127153 - DNA, 25 bp, Canis familiaris
gatgccagcaattcttagggctctg

SEQ ID NO: 127154 - DNA, 25 bp, Canis familiaris
gatccatgtaactgaggacctgtca

SEQ ID NO: 127155 - DNA, 25 bp, Canis familiaris
gatcctttacaacaaccttaacagt

SEQ ID NO: 127156 - DNA, 25 bp, Canis familiaris
gatccttttgagactgaatccatta

SEQ ID NO: 127157 - DNA, 25 bp, Canis familiaris
gatgcctctttggagtgaccatttc

SEQ ID NO: 127158 - DNA, 25 bp, Canis familiaris
gatgcctctttcaggaaatcttcca

SEQ ID NO: 127159 - DNA, 25 bp, Canis familiaris
gatgccgtttctttcaatatttatt

SEQ ID NO: 127160 - DNA, 25 bp, Canis familiaris
gatgcagcttctacgaaataattgt

SEQ ID NO: 127161 - DNA, 25 bp, Canis familiaris
gatgacatcactacagattctcaaa

SEQ ID NO: 127162 - DNA, 25 bp, Canis familiaris
gatgacatcacttactggctgaaca

SEQ ID NO: 127163 - DNA, 25 bp, Canis familiaris
gatgacatcacttactggctgaaca

SEQ ID NO: 127164 - DNA, 25 bp, Canis familiaris
gatgacatcacttactggctgaaca

SEQ ID NO: 127165 - DNA, 25 bp, Canis familiaris
gatgacatcacttactggctgaaca

SEQ ID NO: 127166 - DNA, 25 bp, Canis familiaris
gatgacatcacttactggctgaaca

SEQ ID NO: 127167 - DNA, 25 bp, Canis familiaris
gatgcaagatttttcgtgaagaccc

SEQ ID NO: 127168 - DNA, 25 bp, Canis familiaris
gatcagtgtttgtgggaaatctccc

SEQ ID NO: 127169 - DNA, 25 bp, Canis familiaris
gatcgtgtcttctgcgcttatgatc

SEQ ID NO: 127170 - DNA, 25 bp, Canis familiaris
gatcgtcagtcctggcttatggagg

SEQ ID NO: 127171 - DNA, 25 bp, Canis familiaris
gatgcagtcttcattggcttcatgg

SEQ ID NO: 127172 - DNA, 25 bp, Canis familiaris
gatgcagactccagctgggacatcc

SEQ ID NO: 127173 - DNA, 25 bp, Canis familiaris
gatcgaccacattctagatgctctg

SEQ ID NO: 127174 - DNA, 25 bp, Canis familiaris
gatgctgaaaattcgcaggttgctc

SEQ ID NO: 127175 - DNA, 25 bp, Canis familiaris
gatgctcacaaagtcacctgattga

SEQ ID NO: 127176 - DNA, 25 bp, Canis familiaris
gatgctcagcaaagtgtcctggggc

SEQ ID NO: 127177 - DNA, 25 bp, Canis familiaris
gatgctcagcagtcaagtgcctttg

SEQ ID NO: 127178 - DNA, 25 bp, Canis familiaris
gatgctcatggacagtcccctgaac

SEQ ID NO: 127179 - DNA, 25 bp, Canis familiaris
gatgcacagtgacacaccaagtgag

SEQ ID NO: 127180 - DNA, 25 bp, Canis familiaris
gatgccagtgattaatattgaggac

SEQ ID NO: 127181 - DNA, 25 bp, Canis familiaris
gatgcgatcgcatagtcactgggaa

SEQ ID NO: 127182 - DNA, 25 bp, Canis familiaris
gatctgctctgaagagtcagcttcg

SEQ ID NO: 127183 - DNA, 25 bp, Canis familiaris
gatgctgctgctaacatgactgctt

SEQ ID NO: 127184 - DNA, 25 bp, Canis familiaris
gatgcagctgctgcattagctgcta

SEQ ID NO: 127185 - DNA, 25 bp, Canis familiaris
gatgactgcccttacagactagagt

SEQ ID NO: 127186 - DNA, 25 bp, Canis familiaris
gatgaaacctgaaatactcggtggc

SEQ ID NO: 127187 - DNA, 25 bp, Canis familiaris
gatgaaactcaaagaatgccagctg

SEQ ID NO: 127188 - DNA, 25 bp, Canis familiaris
gatgaatccaataagcaatgacagc

SEQ ID NO: 127189 - DNA, 25 bp, Canis familiaris
gatgcaacgcacaaacagtaggctt

SEQ ID NO: 127190 - DNA, 25 bp, Canis familiaris
gatgcttctgcagagactgtgggct

SEQ ID NO: 127191 - DNA, 25 bp, Canis familiaris
gatgcttctgctcagaaatggccca

SEQ ID NO: 127192 - DNA, 25 bp, Canis familiaris
gatgctggtctgagacgaggtcccg

SEQ ID NO: 127193 - DNA, 25 bp, Canis familiaris
gatgctcctggaagaggggctggcc

SEQ ID NO: 127194 - DNA, 25 bp, Canis familiaris
gatgacctggatgtttgactggcgg

SEQ ID NO: 127195 - DNA, 25 bp, Canis familiaris
gatgacttagtcctttgacctcaga

SEQ ID NO: 127196 - DNA, 25 bp, Canis familiaris
gatgaattccaccttcagactttga

SEQ ID NO: 127197 - DNA, 25 bp, Canis familiaris
gatgactatctggcgttatcctttg

SEQ ID NO: 127198 - DNA, 25 bp, Canis familiaris
gatgactattacgtacttctgggta

SEQ ID NO: 127199 - DNA, 25 bp, Canis familiaris
gatgccttattcacacttacaggta

SEQ ID NO: 127200 - DNA, 25 bp, Canis familiaris
gatgctcttcaaaacattttcgttc

SEQ ID NO: 127201 - DNA, 25 bp, Canis familiaris
gatgcttcaacttaatttttgcttc

SEQ ID NO: 127202 - DNA, 25 bp, Canis familiaris
gatgcttttcccaatgtatctggca

SEQ ID NO: 127203 - DNA, 25 bp, Canis familiaris
gatgctttgtatcattcttgagtga

SEQ ID NO: 127204 - DNA, 25 bp, Canis familiaris
gatgctttgtagtttgcccagagtt

SEQ ID NO: 127205 - DNA, 25 bp, Canis familiaris
gatgcttgcaaagtgttcccaggct

SEQ ID NO: 127206 - DNA, 25 bp, Canis familiaris
gatgacagaaatatccactcagagt

SEQ ID NO: 127207 - DNA, 25 bp, Canis familiaris
gatgcacgatttagtgctcacttcg

SEQ ID NO: 127208 - DNA, 25 bp, Canis familiaris
gatccaatgtatgatgccctgtctg

SEQ ID NO: 127209 - DNA, 25 bp, Canis familiaris
gatgccataggacactttgcctgta

SEQ ID NO: 127210 - DNA, 25 bp, Canis familiaris
gatgcatacgagcctgaaatatcca

SEQ ID NO: 127211 - DNA, 25 bp, Canis familiaris
gatgctgataggaaaacaatccaag

SEQ ID NO: 127212 - DNA, 25 bp, Canis familiaris
gatgcagaagttgaagctatcctca

SEQ ID NO: 127213 - DNA, 25 bp, Canis familiaris
gatgcagaaggtctctttcccatct

SEQ ID NO: 127214 - DNA, 25 bp, Canis familiaris
gatgaatgaggagctccttccctct

SEQ ID NO: 127215 - DNA, 25 bp, Canis familiaris
gatgcaacaggaactgccagggccc

SEQ ID NO: 127216 - DNA, 25 bp, Canis familiaris
gatgcaaagagctctgtcactggcc

SEQ ID NO: 127217 - DNA, 25 bp, Canis familiaris
gatgcatgtagatttctccactttc

SEQ ID NO: 127218 - DNA, 25 bp, Canis familiaris
gatgctgttaatttgctactttgga

SEQ ID NO: 127219 - DNA, 25 bp, Canis familiaris
gatgctgtcgagtgtacaaactgga

SEQ ID NO: 127220 - DNA, 25 bp, Canis familiaris
gatcgtctgcgggggcatagagctg

SEQ ID NO: 127221 - DNA, 25 bp, Canis familiaris
gatgctggctcggagatggcaagat

SEQ ID NO: 127222 - DNA, 25 bp, Canis familiaris
gatctggcctgaagcatgaggacca

SEQ ID NO: 127223 - DNA, 25 bp, Canis familiaris
gatcgctgacgaaactggacgggct

SEQ ID NO: 127224 - DNA, 25 bp, Canis familiaris
gatctcgacgtatcttacagacgat

SEQ ID NO: 127225 - DNA, 25 bp, Canis familiaris
gatccagaatcttacattgaaacaa

SEQ ID NO: 127226 - DNA, 25 bp, Canis familiaris
gatcctaaccaaagcagaaactaag

SEQ ID NO: 127227 - DNA, 25 bp, Canis familiaris
gatgcccaaggcacaaaagcccaga

SEQ ID NO: 127228 - DNA, 25 bp, Canis familiaris
gatgccaaagccaaaccaaacctat

SEQ ID NO: 127229 - DNA, 25 bp, Canis familiaris
gatgcgcataccttaaatagaacct

SEQ ID NO: 127230 - DNA, 25 bp, Canis familiaris
gatgcacagagagaaagggacacct

SEQ ID NO: 127231 - DNA, 25 bp, Canis familiaris
gatgccagaagtacggggaccttat

SEQ ID NO: 127232 - DNA, 25 bp, Canis familiaris
gatgctcagaagaggctgtgcgagc

SEQ ID NO: 127233 - DNA, 25 bp, Canis familiaris
gatgcatctaatccaagctggcaag

SEQ ID NO: 127234 - DNA, 25 bp, Canis familiaris
gatgcatgtgtatcaaagagcaatg

SEQ ID NO: 127235 - DNA, 25 bp, Canis familiaris
gatctggttaaatgcaggatgcagg

SEQ ID NO: 127236 - DNA, 25 bp, Canis familiaris
gatcggttccagggcaagagcactg

SEQ ID NO: 127237 - DNA, 25 bp, Canis familiaris
gatgcggtaccagtgcacaactgca

SEQ ID NO: 127238 - DNA, 25 bp, Canis familiaris
gatgcggtacagtgccaactgcagt

SEQ ID NO: 127239 - DNA, 25 bp, Canis familiaris
gatgccttacgtgcaggatctggtt

SEQ ID NO: 127240 - DNA, 25 bp, Canis familiaris
gatgcctaaagcccatggagaggat

SEQ ID NO: 127241 - DNA, 25 bp, Canis familiaris
gatgcctactcaggaggtgcagtca

SEQ ID NO: 127242 - DNA, 25 bp, Canis familiaris
gatgaaatctaccgtgtgactgcag

SEQ ID NO: 127243 - DNA, 25 bp, Canis familiaris
gatgcagcgatcaatcggttgactg

SEQ ID NO: 127244 - DNA, 25 bp, Canis familiaris
gatgctgctatgaacgctgtgtaca

SEQ ID NO: 127245 - DNA, 25 bp, Canis familiaris
gatgcatccagatggcatggacaga

SEQ ID NO: 127246 - DNA, 25 bp, Canis familiaris
gatgcattaggcagcagaacaggtc

SEQ ID NO: 127247 - DNA, 25 bp, Canis familiaris
gatgcaggtggctgacaggcaggtc

SEQ ID NO: 127248 - DNA, 25 bp, Canis familiaris
gatgcagggatgttgaagcgggagg

SEQ ID NO: 127249 - DNA, 25 bp, Canis familiaris
gatgcagggctgaggcgggaagggc

SEQ ID NO: 127250 - DNA, 25 bp, Canis familiaris
gatgaaccttcgctggggagatgtc

SEQ ID NO: 127251 - DNA, 25 bp, Canis familiaris
gatgacactttggtcgtggaggact

SEQ ID NO: 127252 - DNA, 25 bp, Canis familiaris
gatgaacgtgtgattgctgagaggc

SEQ ID NO: 127253 - DNA, 25 bp, Canis familiaris
gatgaagctcctgttgctgatggcc

SEQ ID NO: 127254 - DNA, 25 bp, Canis familiaris
gatgaaccctattgtctatgcttat

SEQ ID NO: 127255 - DNA, 25 bp, Canis familiaris
gatgaaccactttctaagcataatg

SEQ ID NO: 127256 - DNA, 25 bp, Canis familiaris
gatgcccgcttttgctagagaaagg

SEQ ID NO: 127257 - DNA, 25 bp, Canis familiaris
gatcgccctgtattttgttaacatg

SEQ ID NO: 127258 - DNA, 25 bp, Canis familiaris
gatgaacctgccttttgttttattt

SEQ ID NO: 127259 - DNA, 25 bp, Canis familiaris
gatgaacacatattttgtattttat

SEQ ID NO: 127260 - DNA, 25 bp, Canis familiaris
gatccatcaattatcctctattttg

SEQ ID NO: 127261 - DNA, 25 bp, Canis familiaris
gatgcgagcattattcccttgctat

SEQ ID NO: 127262 - DNA, 25 bp, Canis familiaris
gatgcaactatcaggtgctttccta

SEQ ID NO: 127263 - DNA, 25 bp, Canis familiaris
gatgcaactagcaggacctcacaca

SEQ ID NO: 127264 - DNA, 25 bp, Canis familiaris
gatgcattctagagaagcccgcaag

SEQ ID NO: 127265 - DNA, 25 bp, Canis familiaris
gatgcatcccagaagtcagattcaa

SEQ ID NO: 127266 - DNA, 25 bp, Canis familiaris
gatgcacctaaacgcaagacaacag

SEQ ID NO: 127267 - DNA, 25 bp, Canis familiaris
gatgccgaaagtcccagcaagatcc

SEQ ID NO: 127268 - DNA, 25 bp, Canis familiaris
gatccagatcaaccaccaaatcatc

SEQ ID NO: 127269 - DNA, 25 bp, Canis familiaris
gatccagactcaataacctactaga

SEQ ID NO: 127270 - DNA, 25 bp, Canis familiaris
gatgccatgcatgcattatacctgc

SEQ ID NO: 127271 - DNA, 25 bp, Canis familiaris
gatgcagctgctgctgtcaaggctg

SEQ ID NO: 127272 - DNA, 25 bp, Canis familiaris
gatgctgctgctcttcgcaagctga

SEQ ID NO: 127273 - DNA, 25 bp, Canis familiaris
gatgctggccgtacgagacatgatg

SEQ ID NO: 127274 - DNA, 25 bp, Canis familiaris
gatgcagatgacttccggatcttct

SEQ ID NO: 127275 - DNA, 25 bp, Canis familiaris
gatgcatgagactcgggatcacctg

SEQ ID NO: 127276 - DNA, 25 bp, Canis familiaris
gatgcacagaaccaagcagtcacct

SEQ ID NO: 127277 - DNA, 25 bp, Canis familiaris
gatgcaagaacaaagcagtcacctt

SEQ ID NO: 127278 - DNA, 25 bp, Canis familiaris
gatgaagagttgacacgtccctgtt

SEQ ID NO: 127279 - DNA, 25 bp, Canis familiaris
gatgcagagagtgacacctccacgg

SEQ ID NO: 127280 - DNA, 25 bp, Canis familiaris
gatgaagagctccaaaccacactcc

SEQ ID NO: 127281 - DNA, 25 bp, Canis familiaris
gatgcaatgcatcctagaaccaact

SEQ ID NO: 127282 - DNA, 25 bp, Canis familiaris
gatgctcgcatgcggaactcagatc

SEQ ID NO: 127283 - DNA, 25 bp, Canis familiaris
gatgctgcgatggttaactccttca

SEQ ID NO: 127284 - DNA, 25 bp, Canis familiaris
gatgcatctttttagtcctctatca

SEQ ID NO: 127285 - DNA, 25 bp, Canis familiaris
gatgccttttattatcagcgattaa

SEQ ID NO: 127286 - DNA, 25 bp, Canis familiaris
gatcctttgcgatggcaggctttga

SEQ ID NO: 127287 - DNA, 25 bp, Canis familiaris
gatccatattcctggagctgtctcg

SEQ ID NO: 127288 - DNA, 25 bp, Canis familiaris
gatgccctggtctggagtgtctgaa

SEQ ID NO: 127289 - DNA, 25 bp, Canis familiaris
gatgccctggctttaaggtctagct

SEQ ID NO: 127290 - DNA, 25 bp, Canis familiaris
gatgccctggttaaacacatgtcgg

SEQ ID NO: 127291 - DNA, 25 bp, Canis familiaris
gatgccctggattacacttttatgg

SEQ ID NO: 127292 - DNA, 25 bp, Canis familiaris
gatccgccgagatcactttggagga

SEQ ID NO: 127293 - DNA, 25 bp, Canis familiaris
gatcaccctatgtacctgtgggaag

SEQ ID NO: 127294 - DNA, 25 bp, Canis familiaris
gatccttctaggagcttggcaaaga

SEQ ID NO: 127295 - DNA, 25 bp, Canis familiaris
gatgccttaatgaaggtatggaaca

SEQ ID NO: 127296 - DNA, 25 bp, Canis familiaris
gatgcctatgatcccgggaggaaga

SEQ ID NO: 127297 - DNA, 25 bp, Canis familiaris
gatgccgatatccgagggaagggct

SEQ ID NO: 127298 - DNA, 25 bp, Canis familiaris
gatccgaatctcctaaaggggttag

SEQ ID NO: 127299 - DNA, 25 bp, Canis familiaris
gatgccgcctacatgagcaaggtgg

SEQ ID NO: 127300 - DNA, 25 bp, Canis familiaris
gatcggggacattgtcacagtgggt

SEQ ID NO: 127301 - DNA, 25 bp, Canis familiaris
gatcggcggacgcctaattggttct

SEQ ID NO: 127302 - DNA, 25 bp, Canis familiaris
gatgcggggccaacatgaactggtc

SEQ ID NO: 127303 - DNA, 25 bp, Canis familiaris
gatgctgagcgtgatgctctgaaca

SEQ ID NO: 127304 - DNA, 25 bp, Canis familiaris
gatgctgagctggctgcagccatga

SEQ ID NO: 127305 - DNA, 25 bp, Canis familiaris
gatgcagcgatagtcgtctggctca

SEQ ID NO: 127306 - DNA, 25 bp, Canis familiaris
gatcggataccaatcctgccaaaaa

SEQ ID NO: 127307 - DNA, 25 bp, Canis familiaris
gtcccttactgtggctcccacagta

SEQ ID NO: 127308 - DNA, 25 bp, Canis familiaris
gttggttccatgggggccaaggaca

SEQ ID NO: 127309 - DNA, 25 bp, Canis familiaris
gatctcgttcacaggttccaaggat

SEQ ID NO: 127310 - DNA, 25 bp, Canis familiaris
gatcctgtgaccagaaaaccctgtg

SEQ ID NO: 127311 - DNA, 25 bp, Canis familiaris
gatccgtgtcaccaagaaaccaatc

SEQ ID NO: 127312 - DNA, 25 bp, Canis familiaris
gatgcgggtccgagatggcagcaaa

SEQ ID NO: 127313 - DNA, 25 bp, Canis familiaris
gatgctgatggcacgaagggcacag

SEQ ID NO: 127314 - DNA, 25 bp, Canis familiaris
gatgctgctgacatgctgaaggtag

SEQ ID NO: 127315 - DNA, 25 bp, Canis familiaris
gatgctcatgacttagaggttctga

SEQ ID NO: 127316 - DNA, 25 bp, Canis familiaris
gatgctaagctgaaagagattgtaa

SEQ ID NO: 127317 - DNA, 25 bp, Canis familiaris
gatgcaaggtggtagctgtcgtgaa

SEQ ID NO: 127318 - DNA, 25 bp, Canis familiaris
gatgcttggtggaagtgaggtgaga

SEQ ID NO: 127319 - DNA, 25 bp, Canis familiaris
gatgcttggaggaacttgtctcaga

SEQ ID NO: 127320 - DNA, 25 bp, Canis familiaris
gatgctgtggattacatcttgtgta

SEQ ID NO: 127321 - DNA, 25 bp, Canis familiaris
gatgctggtagactctcttcaggac

SEQ ID NO: 127322 - DNA, 25 bp, Canis familiaris
gatgctgttggacttcatgtcccca

SEQ ID NO: 127323 - DNA, 25 bp, Canis familiaris
gatgctgattggaccagatggccga

SEQ ID NO: 127324 - DNA, 25 bp, Canis familiaris
gatgctattgttcaggagtgccact

SEQ ID NO: 127325 - DNA, 25 bp, Canis familiaris
gatctacttcatctgggtgacacga

SEQ ID NO: 127326 - DNA, 25 bp, Canis familiaris
gatgctccgagtgtgtggagaactg

SEQ ID NO: 127327 - DNA, 25 bp, Canis familiaris
gatgcttggagagggtctaggagtg

SEQ ID NO: 127328 - DNA, 25 bp, Canis familiaris
gatgctggggaagtgtctcttagtt

SEQ ID NO: 127329 - DNA, 25 bp, Canis familiaris
gatgctcggctgtattattcttcgt

SEQ ID NO: 127330 - DNA, 25 bp, Canis familiaris
gatgcagggcatcagcttctgcttt

SEQ ID NO: 127331 - DNA, 25 bp, Canis familiaris
gatgcaggtcaaggtcagctgttgt

SEQ ID NO: 127332 - DNA, 25 bp, Canis familiaris
gatgcagcgcattcggggcatttta

SEQ ID NO: 127333 - DNA, 25 bp, Canis familiaris
gatgcacagaagggggctatgttca

SEQ ID NO: 127334 - DNA, 25 bp, Canis familiaris
gatgcagtcaaggtcagttgtgtta

SEQ ID NO: 127335 - DNA, 25 bp, Canis familiaris
gatgcagtggcctcagtggtgtata

SEQ ID NO: 127336 - DNA, 25 bp, Canis familiaris
gatgcagagcccctaggagcttaga

SEQ ID NO: 127337 - DNA, 25 bp, Canis familiaris
gatgcaagccaacatgctacgaaga

SEQ ID NO: 127338 - DNA, 25 bp, Canis familiaris
gatgaagccaaggcgctggctgagg

SEQ ID NO: 127339 - DNA, 25 bp, Canis familiaris
gatgcaggactaggcgggctatggt

SEQ ID NO: 127340 - DNA, 25 bp, Canis familiaris
gatgcactgggacggatggtatgtt

SEQ ID NO: 127341 - DNA, 25 bp, Canis familiaris
gatgcgctggggcaggagtgacact

SEQ ID NO: 127342 - DNA, 25 bp, Canis familiaris
gatcgggaggtgcagaggacaatgt

SEQ ID NO: 127343 - DNA, 25 bp, Canis familiaris
gatccaggaggtgaaccaggagctg

SEQ ID NO: 127344 - DNA, 25 bp, Canis familiaris
gatcggggggatgaccagctggagt

SEQ ID NO: 127345 - DNA, 25 bp, Canis familiaris
gatcggcggtgattatttcgaggag

SEQ ID NO: 127346 - DNA, 25 bp, Canis familiaris
gatgcgatggtgatatcatttcaat

SEQ ID NO: 127347 - DNA, 25 bp, Canis familiaris
gatgcactgttgatatgctttctga

SEQ ID NO: 127348 - DNA, 25 bp, Canis familiaris
gatgaagtcagattctttcctgcag

SEQ ID NO: 127349 - DNA, 25 bp, Canis familiaris
gatgaagacagcatccttgaatatg

SEQ ID NO: 127350 - DNA, 25 bp, Canis familiaris
gatgaagcacagatcccacatatgt

SEQ ID NO: 127351 - DNA, 25 bp, Canis familiaris
gatgcaggactgcatcccagaatcc

SEQ ID NO: 127352 - DNA, 25 bp, Canis familiaris
gatgcttgcaatttgaccgtatccg

SEQ ID NO: 127353 - DNA, 25 bp, Canis familiaris
gatgctgaattctgacattgtgtcc

SEQ ID NO: 127354 - DNA, 25 bp, Canis familiaris
gatgcgaattcatttttgtcctcag

SEQ ID NO: 127355 - DNA, 25 bp, Canis familiaris
gataaattaaattgtgtgccaagtt

SEQ ID NO: 127356 - DNA, 25 bp, Canis familiaris
gataccctagaaacttccaactcta

SEQ ID NO: 127357 - DNA, 25 bp, Canis familiaris
gatcctccaaaaatctacctgaccc

SEQ ID NO: 127358 - DNA, 25 bp, Canis familiaris
gatcctcaaaacgtctccggaacat

SEQ ID NO: 127359 - DNA, 25 bp, Canis familiaris
gatcccaaatgatcccctttaacct

SEQ ID NO: 127360 - DNA, 25 bp, Canis familiaris
gatcctaatatttggcctctttgaa

SEQ ID NO: 127361 - DNA, 25 bp, Canis familiaris
gatcccaatcatgttccatcttgaa

SEQ ID NO: 127362 - DNA, 25 bp, Canis familiaris
gatgccccgtgaattcactttgaga

SEQ ID NO: 127363 - DNA, 25 bp, Canis familiaris
gatccccagtggttttatgtgcaga

SEQ ID NO: 127364 - DNA, 25 bp, Canis familiaris
gatccccagtggttttatgtgcaga

SEQ ID NO: 127365 - DNA, 25 bp, Canis familiaris
gatccaccgtgaagtttaccagtct

SEQ ID NO: 127366 - DNA, 25 bp, Canis familiaris
gatcccaaagagctttatcacgtct

SEQ ID NO: 127367 - DNA, 25 bp, Canis familiaris
gatgccctaagcacggtgttcagta

SEQ ID NO: 127368 - DNA, 25 bp, Canis familiaris
gatccggaaccccagtgttatttgg

SEQ ID NO: 127369 - DNA, 25 bp, Canis familiaris
gatcctggagacccgggatcgaatc

SEQ ID NO: 127370 - DNA, 25 bp, Canis familiaris
gatcctggagatcccgggatcgagt

SEQ ID NO: 127371 - DNA, 25 bp, Canis familiaris
gatgctctggaatctggaagactgt

SEQ ID NO: 127372 - DNA, 25 bp, Canis familiaris
gatgctaagttgatggaagtcgtat

SEQ ID NO: 127373 - DNA, 25 bp, Canis familiaris
gatgctaagtacctacactgcttta

SEQ ID NO: 127374 - DNA, 25 bp, Canis familiaris
gatctgaatgggctacaggatatta

SEQ ID NO: 127375 - DNA, 25 bp, Canis familiaris
gatgcggatgaagctacaatgtatt

SEQ ID NO: 127376 - DNA, 25 bp, Canis familiaris
gatgcggtgcaatggaagagaactt

SEQ ID NO: 127377 - DNA, 25 bp, Canis familiaris
gatgctgattgacaggtcagggact

SEQ ID NO: 127378 - DNA, 25 bp, Canis familiaris
gatgcggtgcatcctggctatgggt

SEQ ID NO: 127379 - DNA, 25 bp, Canis familiaris
gatgctgttcatcttgctctgaaat

SEQ ID NO: 127380 - DNA, 25 bp, Canis familiaris
gatctgccttcgatgtcatccaatg

SEQ ID NO: 127381 - DNA, 25 bp, Canis familiaris
gatgcaacctcgatgccatcaaggt

SEQ ID NO: 127382 - DNA, 25 bp, Canis familiaris
gatgcagacccagtaccagaagagg

SEQ ID NO: 127383 - DNA, 25 bp, Canis familiaris
gatgcagcaccagaccatgctggag

SEQ ID NO: 127384 - DNA, 25 bp, Canis familiaris
gatcagcaagcaggagtacgatgag

SEQ ID NO: 127385 - DNA, 25 bp, Canis familiaris
gatgcaaagcacgtgggactgagaa

SEQ ID NO: 127386 - DNA, 25 bp, Canis familiaris
gatgcaaatgccgttttcatgggaa

SEQ ID NO: 127387 - DNA, 25 bp, Canis familiaris
gatgcatcataccaagttctgaggg

SEQ ID NO: 127388 - DNA, 25 bp, Canis familiaris
gatgctctatcactgaatatgcttg

SEQ ID NO: 127389 - DNA, 25 bp, Canis familiaris
gatgccatctgcttgcaactatatg

SEQ ID NO: 127390 - DNA, 25 bp, Canis familiaris
gatgcttcattccacatctattgtg

SEQ ID NO: 127391 - DNA, 25 bp, Canis familiaris
gatgcttctgtcattctgtgttttc

SEQ ID NO: 127392 - DNA, 25 bp, Canis familiaris
gatgctatttctgtcttatgtttca

SEQ ID NO: 127393 - DNA, 25 bp, Canis familiaris
gatgaatctttgttgtcttgttctt

SEQ ID NO: 127394 - DNA, 25 bp, Canis familiaris
gatgcaacattaggtttttgctttt

SEQ ID NO: 127395 - DNA, 25 bp, Canis familiaris
gatgctggatggtgtttttgttttt

SEQ ID NO: 127396 - DNA, 25 bp, Canis familiaris
gatgctgttttgcactatcttgatt

SEQ ID NO: 127397 - DNA, 25 bp, Canis familiaris
gatcgagtttaacatgcctgtggac

SEQ ID NO: 127398 - DNA, 25 bp, Canis familiaris
gatgcaggtttccctatttggagtc

SEQ ID NO: 127399 - DNA, 25 bp, Canis familiaris
gatgcagttttaccgtattcctggc

SEQ ID NO: 127400 - DNA, 25 bp, Canis familiaris
gatcagttgactttagagacccgaa

SEQ ID NO: 127401 - DNA, 25 bp, Canis familiaris
gatgcttaactggctaagccaccca

SEQ ID NO: 127402 - DNA, 25 bp, Canis familiaris
gatgctttacattttgaccaacaca

SEQ ID NO: 127403 - DNA, 25 bp, Canis familiaris
gatgcttaacattattaatcacaag

SEQ ID NO: 127404 - DNA, 25 bp, Canis familiaris
gatgcattgtacagttatatgaagt

SEQ ID NO: 127405 - DNA, 25 bp, Canis familiaris
gatgctttatctgggtctggaaacc

SEQ ID NO: 127406 - DNA, 25 bp, Canis familiaris
gatgctttatctgggtctgtttttt

SEQ ID NO: 127407 - DNA, 25 bp, Canis familiaris
gatgctttatctgggggttgttgcc

SEQ ID NO: 127408 - DNA, 25 bp, Canis familiaris
gatgctttttccaagactagttcag

SEQ ID NO: 127409 - DNA, 25 bp, Canis familiaris
gatgcatttcttctggattatgttt

SEQ ID NO: 127410 - DNA, 25 bp, Canis familiaris
gatgcattaatacatgtattatttc

SEQ ID NO: 127411 - DNA, 25 bp, Canis familiaris
gatgcttacaagaaacaattctctc

SEQ ID NO: 127412 - DNA, 25 bp, Canis familiaris
gatgcatttatatagcaaattccct

SEQ ID NO: 127413 - DNA, 25 bp, Canis familiaris
gatgcattatatgacacacacacac

SEQ ID NO: 127414 - DNA, 25 bp, Canis familiaris
gatgcagcatttagcacacacacac

SEQ ID NO: 127415 - DNA, 25 bp, Canis familiaris
gatgcgatctctaagacctacagct

SEQ ID NO: 127416 - DNA, 25 bp, Canis familiaris
gatgctgctctcaaaatccaacgca

SEQ ID NO: 127417 - DNA, 25 bp, Canis familiaris
gatgcatgtgaccatttctgaagcc

SEQ ID NO: 127418 - DNA, 25 bp, Canis familiaris
gatccatgatcttcatttgcaaatc

SEQ ID NO: 127419 - DNA, 25 bp, Canis familiaris
gatcaaatccgcagtcacacattac

SEQ ID NO: 127420 - DNA, 25 bp, Canis familiaris
gatcgccatcaacgttcacttagac

SEQ ID NO: 127421 - DNA, 25 bp, Canis familiaris
gatgcctacagggtatcttaagaca

SEQ ID NO: 127422 - DNA, 25 bp, Canis familiaris
gatgcgctaaatggtttctacacat

SEQ ID NO: 127423 - DNA, 25 bp, Canis familiaris
gatgcagccgatatctttatacttt

SEQ ID NO: 127424 - DNA, 25 bp, Canis familiaris
gatgcccgttccatttatgttggca

SEQ ID NO: 127425 - DNA, 25 bp, Canis familiaris
gatgccgtagccgttactatggggc

SEQ ID NO: 127426 - DNA, 25 bp, Canis familiaris
gatcccgaggccctaggattggccc

SEQ ID NO: 127427 - DNA, 25 bp, Canis familiaris
gatcccgaaactcaggttgtgctct

SEQ ID NO: 127428 - DNA, 25 bp, Canis familiaris
gatcccaggaacatactatttctct

SEQ ID NO: 127429 - DNA, 25 bp, Canis familiaris
gatgcccggttattgatcttgttct

SEQ ID NO: 127430 - DNA, 25 bp, Canis familiaris
gatctacggttaggtttttgctgcc

SEQ ID NO: 127431 - DNA, 25 bp, Canis familiaris
gatctacacagtttggtttttgcac

SEQ ID NO: 127432 - DNA, 25 bp, Canis familiaris
gatgcttccaggttgcgtatttatt

SEQ ID NO: 127433 - DNA, 25 bp, Canis familiaris
gatgcagcccaacagagcttttgtt

SEQ ID NO: 127434 - DNA, 25 bp, Canis familiaris
gatgctccacaacatgcagtttcag

SEQ ID NO: 127435 - DNA, 25 bp, Canis familiaris
gatgctcaagaaccagctggaccag

SEQ ID NO: 127436 - DNA, 25 bp, Canis familiaris
gatgctcggctacatgaggaccacc

SEQ ID NO: 127437 - DNA, 25 bp, Canis familiaris
gatgccgacgagtgatggacaccac

SEQ ID NO: 127438 - DNA, 25 bp, Canis familiaris
gatgcgccacggtcaatgtgaacaa

SEQ ID NO: 127439 - DNA, 25 bp, Canis familiaris
gatgcccctgaacttcatgacaaat

SEQ ID NO: 127440 - DNA, 25 bp, Canis familiaris
gatgctccacgagattgtgcacagt

SEQ ID NO: 127441 - DNA, 25 bp, Canis familiaris
gatcgctcagggtattggcaagttg

SEQ ID NO: 127442 - DNA, 25 bp, Canis familiaris
gatcgccaggcgttttctgagcata

SEQ ID NO: 127443 - DNA, 25 bp, Canis familiaris
gatcgccaggcgttttctgagcata

SEQ ID NO: 127444 - DNA, 25 bp, Canis familiaris
gatgcggcggcgttattcccatgac

SEQ ID NO: 127445 - DNA, 25 bp, Canis familiaris
gatgcagtgactggttactacctga

SEQ ID NO: 127446 - DNA, 25 bp, Canis familiaris
gatgcagaaggagatcactgccctg

SEQ ID NO: 127447 - DNA, 25 bp, Canis familiaris
gatgctaacagctgacactggcctg

SEQ ID NO: 127448 - DNA, 25 bp, Canis familiaris
gatgctttcagatgacctacttaca

SEQ ID NO: 127449 - DNA, 25 bp, Canis familiaris
gatgcatttgagtgacgtaatccca

SEQ ID NO: 127450 - DNA, 25 bp, Canis familiaris
gatgctcttagctgagtgtcccgcg

SEQ ID NO: 127451 - DNA, 25 bp, Canis familiaris
gatgctttgctccagagtgatctca

SEQ ID NO: 127452 - DNA, 25 bp, Canis familiaris
gatgcttctcacctggtgtcattga

SEQ ID NO: 127453 - DNA, 25 bp, Canis familiaris
gatgctccacactatgtgttatagt

SEQ ID NO: 127454 - DNA, 25 bp, Canis familiaris
gatgccccagctaggtagaatgata

SEQ ID NO: 127455 - DNA, 25 bp, Canis familiaris
gatgctgcatcctctgggaaagaaa

SEQ ID NO: 127456 - DNA, 25 bp, Canis familiaris
gatcccctggcttgcagaaaatcca

SEQ ID NO: 127457 - DNA, 25 bp, Canis familiaris
gatgcccatttgttgcagtacaatc

SEQ ID NO: 127458 - DNA, 25 bp, Canis familiaris
gatgcccatttgttgcagtacaatc

SEQ ID NO: 127459 - DNA, 25 bp, Canis familiaris
gatgccacgtgtggtgcgtgaggtc

SEQ ID NO: 127460 - DNA, 25 bp, Canis familiaris
gatcctgggtcgccaggatggcgcc

SEQ ID NO: 127461 - DNA, 25 bp, Canis familiaris
gatctggggtgggagggaggccctc

SEQ ID NO: 127462 - DNA, 25 bp, Canis familiaris
gatcccaggtggggatgcggggtcc

SEQ ID NO: 127463 - DNA, 25 bp, Canis familiaris
gatcccagggtccttcaatagagtc

SEQ ID NO: 127464 - DNA, 25 bp, Canis familiaris
gatgcctttggttgctccaatgaca

SEQ ID NO: 127465 - DNA, 25 bp, Canis familiaris
gatgctgtttgactcagaccacaac

SEQ ID NO: 127466 - DNA, 25 bp, Canis familiaris
gatgcgtgcatttatcagatcaaaa

SEQ ID NO: 127467 - DNA, 25 bp, Canis familiaris
gatgcgtgcatttatcagatcaaaa

SEQ ID NO: 127468 - DNA, 25 bp, Canis familiaris
gatgcgtgcatttatcagatcaaaa

SEQ ID NO: 127469 - DNA, 25 bp, Canis familiaris
gatcgtgcgctgccatgagcacata

SEQ ID NO: 127470 - DNA, 25 bp, Canis familiaris
gatgctgatggaaatggcacaattt

SEQ ID NO: 127471 - DNA, 25 bp, Canis familiaris
gatctggaggaattgcaagacttgc

SEQ ID NO: 127472 - DNA, 25 bp, Canis familiaris
gatcatccaagtctcaggacactga

SEQ ID NO: 127473 - DNA, 25 bp, Canis familiaris
gatgccacaaatgtcgcagcagcct

SEQ ID NO: 127474 - DNA, 25 bp, Canis familiaris
gatcctgaaagccatgcagcggcca

SEQ ID NO: 127475 - DNA, 25 bp, Canis familiaris
gtgcgctaacgcgtgcacatgagca

SEQ ID NO: 127476 - DNA, 25 bp, Canis familiaris
gatcgtgggcagggcacagaaccga

SEQ ID NO: 127477 - DNA, 25 bp, Canis familiaris
gatgcggggctggaggaggagccag

SEQ ID NO: 127478 - DNA, 25 bp, Canis familiaris
gatcggcacctggaggcaggatcca

SEQ ID NO: 127479 - DNA, 25 bp, Canis familiaris
gatcgcagccgtaagagggtcctag

SEQ ID NO: 127480 - DNA, 25 bp, Canis familiaris
gatgccaccgtgaatggtgctgcca

SEQ ID NO: 127481 - DNA, 25 bp, Canis familiaris
gatgccctgcgggtgggcatggcag

SEQ ID NO: 127482 - DNA, 25 bp, Canis familiaris
gatccagcgccgagacgatggcatc

SEQ ID NO: 127483 - DNA, 25 bp, Canis familiaris
gatcgagcgtacagagctgcaggat

SEQ ID NO: 127484 - DNA, 25 bp, Canis familiaris
gatcctggtacggagcactcgatac

SEQ ID NO: 127485 - DNA, 25 bp, Canis familiaris
gatcctgggaatgaagctagttcca

SEQ ID NO: 127486 - DNA, 25 bp, Canis familiaris
gatcctgggaatgaaagttattcca

SEQ ID NO: 127487 - DNA, 25 bp, Canis familiaris
gatccttgccatagaaaagtctttt

SEQ ID NO: 127488 - DNA, 25 bp, Canis familiaris
gatcaggccctaaaacgttgttgtg

SEQ ID NO: 127489 - DNA, 25 bp, Canis familiaris
gatcgcttccaataatcgttgtgtt

SEQ ID NO: 127490 - DNA, 25 bp, Canis familiaris
gatctgttcctcagaatggggtgag

SEQ ID NO: 127491 - DNA, 25 bp, Canis familiaris
gatctggtcaccactagaagagtca

SEQ ID NO: 127492 - DNA, 25 bp, Canis familiaris
gatctggttcacgctacataattac

SEQ ID NO: 127493 - DNA, 25 bp, Canis familiaris
gatctcgttcgagaacattgttcgt

SEQ ID NO: 127494 - DNA, 25 bp, Canis familiaris
gatcccttggagggtcaagtctgtg

SEQ ID NO: 127495 - DNA, 25 bp, Canis familiaris
gatcctccggagtgatgatagggtg

SEQ ID NO: 127496 - DNA, 25 bp, Canis familiaris
gatcccgaggaggaagaactggtct

SEQ ID NO: 127497 - DNA, 25 bp, Canis familiaris
gatccagcgggaaaagaagctcaga

SEQ ID NO: 127498 - DNA, 25 bp, Canis familiaris
gatccaagccaaaagaaaatgctgt

SEQ ID NO: 127499 - DNA, 25 bp, Canis familiaris
gatccacccctatgagagcaagttc

SEQ ID NO: 127500 - DNA, 25 bp, Canis familiaris
gatcttccgccaaatggacacgaac

SEQ ID NO: 127501 - DNA, 25 bp, Canis familiaris
gatctctccgaagagtcctacagac

SEQ ID NO: 127502 - DNA, 25 bp, Canis familiaris
gatgcctcccaagagtagtagatat

SEQ ID NO: 127503 - DNA, 25 bp, Canis familiaris
gatgctccccaaaatgtactactac

SEQ ID NO: 127504 - DNA, 25 bp, Canis familiaris
gatgccttacaaagtcttccattac

SEQ ID NO: 127505 - DNA, 25 bp, Canis familiaris
gatccagttctaagctttgcgattt

SEQ ID NO: 127506 - DNA, 25 bp, Canis familiaris
gatctcatttccagtcattgggctc

SEQ ID NO: 127507 - DNA, 25 bp, Canis familiaris
gatcttcccagtttttggtgccaag

SEQ ID NO: 127508 - DNA, 25 bp, Canis familiaris
gatgcctcctgcttttgtagcagtg

SEQ ID NO: 127509 - DNA, 25 bp, Canis familiaris
gatgccatcgtgtttgtaactgtcc

SEQ ID NO: 127510 - DNA, 25 bp, Canis familiaris
gatgccacacagggaattacattcc

SEQ ID NO: 127511 - DNA, 25 bp, Canis familiaris
gatgctacactggtcaacaacaatg

SEQ ID NO: 127512 - DNA, 25 bp, Canis familiaris
gatgctgcaacacgtcaagagccaa

SEQ ID NO: 127513 - DNA, 25 bp, Canis familiaris
gatgcgcaggagttcaggagccaca

SEQ ID NO: 127514 - DNA, 25 bp, Canis familiaris
gatctgatgatgcttggctactcaa

SEQ ID NO: 127515 - DNA, 25 bp, Canis familiaris
gatcgtgcatgcatgcagactacta

SEQ ID NO: 127516 - DNA, 25 bp, Canis familiaris
gatcctgcaggttactactgtgggt

SEQ ID NO: 127517 - DNA, 25 bp, Canis familiaris
gatcttcgacaataactgtgggaac

SEQ ID NO: 127518 - DNA, 25 bp, Canis familiaris
gatctactgaactcaacctagtttc

SEQ ID NO: 127519 - DNA, 25 bp, Canis familiaris
gatccacgaacgtcacggaggttcc

SEQ ID NO: 127520 - DNA, 25 bp, Canis familiaris
gatccctaacgtccaggattcttgg

SEQ ID NO: 127521 - DNA, 25 bp, Canis familiaris
gatctttaaccttagcgtgtcactg

SEQ ID NO: 127522 - DNA, 25 bp, Canis familiaris
gatctttgaacgtgatcctatccct

SEQ ID NO: 127523 - DNA, 25 bp, Canis familiaris
gatccaggaactttgtccatgtcca

SEQ ID NO: 127524 - DNA, 25 bp, Canis familiaris
gatcctgagatagtctcttccggtc

SEQ ID NO: 127525 - DNA, 25 bp, Canis familiaris
gatcccagtgatgggcgtccaggtc

SEQ ID NO: 127526 - DNA, 25 bp, Canis familiaris
gatcagaaggtggacgacacccccg

SEQ ID NO: 127527 - DNA, 25 bp, Canis familiaris
gatgctgagaggtgcctgaccttgc

SEQ ID NO: 127528 - DNA, 25 bp, Canis familiaris
gatgctgtgagggtcctggacctgc

SEQ ID NO: 127529 - DNA, 25 bp, Canis familiaris
gatgctgggcggaccagaagccaga

SEQ ID NO: 127530 - DNA, 25 bp, Canis familiaris
gatgctgggcgatctcatcaaggtg

SEQ ID NO: 127531 - DNA, 25 bp, Canis familiaris
gatgctgctgtggaacctattgatt

SEQ ID NO: 127532 - DNA, 25 bp, Canis familiaris
gatgcctgttaaatgctgttgtgat

SEQ ID NO: 127533 - DNA, 25 bp, Canis familiaris
gatgccctgctatagctttgtgtct

SEQ ID NO: 127534 - DNA, 25 bp, Canis familiaris
gatcccgtaccaggttgtgtcggtc

SEQ ID NO: 127535 - DNA, 25 bp, Canis familiaris
gatccagcagtaccaggtggtcctg

SEQ ID NO: 127536 - DNA, 25 bp, Canis familiaris
gatcccctaagctgagaactctgat

SEQ ID NO: 127537 - DNA, 25 bp, Canis familiaris
gatcccctaggatagttgcctgtcc

SEQ ID NO: 127538 - DNA, 25 bp, Canis familiaris
gattccgcaaggcaatttcctgccc

SEQ ID NO: 127539 - DNA, 25 bp, Canis familiaris
gatccgcaagaggggacttccggcc

SEQ ID NO: 127540 - DNA, 25 bp, Canis familiaris
gatcccaacagcaggaatagctctc

SEQ ID NO: 127541 - DNA, 25 bp, Canis familiaris
gatgctggaaccctgggatcgagtc

SEQ ID NO: 127542 - DNA, 25 bp, Canis familiaris
gatgctggagtccggttcattggtc

SEQ ID NO: 127543 - DNA, 25 bp, Canis familiaris
gatgctgattggggggatgctgatg

SEQ ID NO: 127544 - DNA, 25 bp, Canis familiaris
gatctgcatgttgaatgggggggtg

SEQ ID NO: 127545 - DNA, 25 bp, Canis familiaris
gatgctgccctctaagggctgggga

SEQ ID NO: 127546 - DNA, 25 bp, Canis familiaris
gatgcttcgtgcagagagctgtggg

SEQ ID NO: 127547 - DNA, 25 bp, Canis familiaris
gatgcttcgtgtgaacatgggagtg

SEQ ID NO: 127548 - DNA, 25 bp, Canis familiaris
gatgcccgtcatcagacagacagac

SEQ ID NO: 127549 - DNA, 25 bp, Canis familiaris
gatgcccgtgctgaagcagctgggc

SEQ ID NO: 127550 - DNA, 25 bp, Canis familiaris
gatgccgttgcaaagtgcatgcagc

SEQ ID NO: 127551 - DNA, 25 bp, Canis familiaris
gatgcctggtggcagagccagcagg

SEQ ID NO: 127552 - DNA, 25 bp, Canis familiaris
gatccgtggactaactccagaggac

SEQ ID NO: 127553 - DNA, 25 bp, Canis familiaris
gatccagtggagacccgacgaggac

SEQ ID NO: 127554 - DNA, 25 bp, Canis familiaris
gattcagcggggcccggtgagaggc

SEQ ID NO: 127555 - DNA, 25 bp, Canis familiaris
gataccagacaacccgactgtgggg

SEQ ID NO: 127556 - DNA, 25 bp, Canis familiaris
gatcctcagaaagctaatgtggggg

SEQ ID NO: 127557 - DNA, 25 bp, Canis familiaris
gatcctcagactattaattactgga

SEQ ID NO: 127558 - DNA, 25 bp, Canis familiaris
gatcctagggttcattatactctgt

SEQ ID NO: 127559 - DNA, 25 bp, Canis familiaris
gatccaatttttcattaggctttga

SEQ ID NO: 127560 - DNA, 25 bp, Canis familiaris
gatgcccatcttatggttaagtgtc

SEQ ID NO: 127561 - DNA, 25 bp, Canis familiaris
gatgcccatttacgttattagtagc

SEQ ID NO: 127562 - DNA, 25 bp, Canis familiaris
gatgcccttttgctttatagactct

SEQ ID NO: 127563 - DNA, 25 bp, Canis familiaris
gatccctgttgcagttttatatgcc

SEQ ID NO: 127564 - DNA, 25 bp, Canis familiaris
gatccctttagtttcttgatctctc

SEQ ID NO: 127565 - DNA, 25 bp, Canis familiaris
gatcctctgattatttttactcccc

SEQ ID NO: 127566 - DNA, 25 bp, Canis familiaris
gatctgagatttatttcttcccctc

SEQ ID NO: 127567 - DNA, 25 bp, Canis familiaris
gatgccagtttaggggattcttttc

SEQ ID NO: 127568 - DNA, 25 bp, Canis familiaris
gatgccattttacaggtactacctc

SEQ ID NO: 127569 - DNA, 25 bp, Canis familiaris
gatctcgcttttcctggtaatacgt

SEQ ID NO: 127570 - DNA, 25 bp, Canis familiaris
gatctcctttgtctggtgaaaaaaa

SEQ ID NO: 127571 - DNA, 25 bp, Canis familiaris
gatcctctgaccgctgggacaaaat

SEQ ID NO: 127572 - DNA, 25 bp, Canis familiaris
gatgccttaccgattggatcttaat

SEQ ID NO: 127573 - DNA, 25 bp, Canis familiaris
gatgccctagtctgctgggatctta

SEQ ID NO: 127574 - DNA, 25 bp, Canis familiaris
gatgctcctgagccaagctgaagat

SEQ ID NO: 127575 - DNA, 25 bp, Canis familiaris
gatgctgcctgtgaggctggagacc

SEQ ID NO: 127576 - DNA, 25 bp, Canis familiaris
gatgctcctgtttgcatgtgcgaac

SEQ ID NO: 127577 - DNA, 25 bp, Canis familiaris
gatgcccttcatacaagagcaagcc

SEQ ID NO: 127578 - DNA, 25 bp, Canis familiaris
gatccacctcatggacatagccatc

SEQ ID NO: 127579 - DNA, 25 bp, Canis familiaris
gatagacgctcccagaagtctcgta

SEQ ID NO: 127580 - DNA, 25 bp, Canis familiaris
gatgcgtggtcctaaagtgttgcta

SEQ ID NO: 127581 - DNA, 25 bp, Canis familiaris
gatgcctcagtagggaaggatttag

SEQ ID NO: 127582 - DNA, 25 bp, Canis familiaris
gatccgcttatggataagtgaatct

SEQ ID NO: 127583 - DNA, 25 bp, Canis familiaris
gatcctatttgcaatactgctaata

SEQ ID NO: 127584 - DNA, 25 bp, Canis familiaris
gatgctctcgatactttccataaac

SEQ ID NO: 127585 - DNA, 25 bp, Canis familiaris
gatgctccagatactaagttcacta

SEQ ID NO: 127586 - DNA, 25 bp, Canis familiaris
gatgccaagtccaatagcctcatct

SEQ ID NO: 127587 - DNA, 25 bp, Canis familiaris
gatgctcaagcccattatactatct

SEQ ID NO: 127588 - DNA, 25 bp, Canis familiaris
gatgctcaatgtcattaatctttag

SEQ ID NO: 127589 - DNA, 25 bp, Canis familiaris
gatccaactcaaattagctttcatg

SEQ ID NO: 127590 - DNA, 25 bp, Canis familiaris
gatccaagcttgatgttctgcgtgc

SEQ ID NO: 127591 - DNA, 25 bp, Canis familiaris
gatgcccagttgaagattcctgtct

SEQ ID NO: 127592 - DNA, 25 bp, Canis familiaris
gatgcccagttttgctgtactactt

SEQ ID NO: 127593 - DNA, 25 bp, Canis familiaris
gatgcccttatattggaatctccat

SEQ ID NO: 127594 - DNA, 25 bp, Canis familiaris
gatgccgtctcaaatggaacatgcc

SEQ ID NO: 127595 - DNA, 25 bp, Canis familiaris
gatgccgccatctgggatgacatct

SEQ ID NO: 127596 - DNA, 25 bp, Canis familiaris
gatgccgagatctgcttgctgaagt

SEQ ID NO: 127597 - DNA, 25 bp, Canis familiaris
gatgcctggacttctatgtggtgct

SEQ ID NO: 127598 - DNA, 25 bp, Canis familiaris
gatcctgtggataagattgtgttgc

SEQ ID NO: 127599 - DNA, 25 bp, Canis familiaris
gatccatctgtgtaatgtggtttta

SEQ ID NO: 127600 - DNA, 25 bp, Canis familiaris
gatcgtcagttcgtgatgagttttc

SEQ ID NO: 127601 - DNA, 25 bp, Canis familiaris
gatgctgtcagatttgttggtgtat

SEQ ID NO: 127602 - DNA, 25 bp, Canis familiaris
gatgctgtagacatatttggtattt

SEQ ID NO: 127603 - DNA, 25 bp, Canis familiaris
gatgctgtgtgagatcttaggcctt

SEQ ID NO: 127604 - DNA, 25 bp, Canis familiaris
gatgctaagaacatgatggctgcct

SEQ ID NO: 127605 - DNA, 25 bp, Canis familiaris
gatgccaagattgctgtggctgcac

SEQ ID NO: 127606 - DNA, 25 bp, Canis familiaris
gatgccacaataacaggattcagcc

SEQ ID NO: 127607 - DNA, 25 bp, Canis familiaris
gatgcccatataatcactgaaagac

SEQ ID NO: 127608 - DNA, 25 bp, Canis familiaris
gatgcctctcaaagcagcatgcaca

SEQ ID NO: 127609 - DNA, 25 bp, Canis familiaris
gatgcgctatatagtgagatatcac

SEQ ID NO: 127610 - DNA, 25 bp, Canis familiaris
gatgctgcttttcagagtcacactc

SEQ ID NO: 127611 - DNA, 25 bp, Canis familiaris
gatgctctttctcagatattgtcat

SEQ ID NO: 127612 - DNA, 25 bp, Canis familiaris
gatcgccaactgcagcatttatgat

SEQ ID NO: 127613 - DNA, 25 bp, Canis familiaris
gatccgaacgaaccttatgatgtgt

SEQ ID NO: 127614 - DNA, 25 bp, Canis familiaris
gatccgaaggacctcttcgtggagc

SEQ ID NO: 127615 - DNA, 25 bp, Canis familiaris
gatccaaaggcactgctttcagcag

SEQ ID NO: 127616 - DNA, 25 bp, Canis familiaris
gatccagcgggcatttatcaggcac

SEQ ID NO: 127617 - DNA, 25 bp, Canis familiaris
gatgccctgaggctcttttccagcc

SEQ ID NO: 127618 - DNA, 25 bp, Canis familiaris
gatcccgagaaggcaacattccacg

SEQ ID NO: 127619 - DNA, 25 bp, Canis familiaris
gatccctgagaagtaaaagccaaac

SEQ ID NO: 127620 - DNA, 25 bp, Canis familiaris
gatcctcgaaatactgataatgcat

SEQ ID NO: 127621 - DNA, 25 bp, Canis familiaris
gatcctcatgaacttctccatgacc

SEQ ID NO: 127622 - DNA, 25 bp, Canis familiaris
gatcctcagaacttctctgggacca

SEQ ID NO: 127623 - DNA, 25 bp, Canis familiaris
gatcccagaattgatcggccacacc

SEQ ID NO: 127624 - DNA, 25 bp, Canis familiaris
gatcccaagttggtgattccaacaa

SEQ ID NO: 127625 - DNA, 25 bp, Canis familiaris
gatgcccaagtgtggattcatccat

SEQ ID NO: 127626 - DNA, 25 bp, Canis familiaris
gatgcccctcatgaagttatcactg

SEQ ID NO: 127627 - DNA, 25 bp, Canis familiaris
gatcccctcatcaaaggggaatgat

SEQ ID NO: 127628 - DNA, 25 bp, Canis familiaris
gatcctgcaccacaaggtgtacgat

SEQ ID NO: 127629 - DNA, 25 bp, Canis familiaris
gatccagatccatgacactgctttc

SEQ ID NO: 127630 - DNA, 25 bp, Canis familiaris
gatccagctccatttattgtttacc

SEQ ID NO: 127631 - DNA, 25 bp, Canis familiaris
gatccaggctctgtgttttggtctc

SEQ ID NO: 127632 - DNA, 25 bp, Canis familiaris
gatgccagggtctgtttgttatagc

SEQ ID NO: 127633 - DNA, 25 bp, Canis familiaris
gtgtcgggtcgtgatggtttacaac

SEQ ID NO: 127634 - DNA, 25 bp, Canis familiaris
gtgaagggtaatgtggttccaagaa

SEQ ID NO: 127635 - DNA, 25 bp, Canis familiaris
gtaaggaggaagagctattgccgaa

SEQ ID NO: 127636 - DNA, 25 bp, Canis familiaris
gtaagggaaaggcctactgcaacta

SEQ ID NO: 127637 - DNA, 25 bp, Canis familiaris
gatccaggtgaatggtggctcccac

SEQ ID NO: 127638 - DNA, 25 bp, Canis familiaris
gatccagggaaaccacagctgcatc

SEQ ID NO: 127639 - DNA, 25 bp, Canis familiaris
gatctatggcaaacccagcaggatt

SEQ ID NO: 127640 - DNA, 25 bp, Canis familiaris
gatctgagtatcaacccaagtctag

SEQ ID NO: 127641 - DNA, 25 bp, Canis familiaris
gatcttctttgagccacagcatctc

SEQ ID NO: 127642 - DNA, 25 bp, Canis familiaris
gatcctgtttggacagcacgtgctg

SEQ ID NO: 127643 - DNA, 25 bp, Canis familiaris
gatcccatttagaacattgtgctga

SEQ ID NO: 127644 - DNA, 25 bp, Canis familiaris
gatgctgtgcttgaaacattagtga

SEQ ID NO: 127645 - DNA, 25 bp, Canis familiaris
gatcatgccttgagacctctaggat

SEQ ID NO: 127646 - DNA, 25 bp, Canis familiaris
gatcatgtttgagaccttcaacacc

SEQ ID NO: 127647 - DNA, 25 bp, Canis familiaris
gatgctgtgtaaaaccctatgacta

SEQ ID NO: 127648 - DNA, 25 bp, Canis familiaris
gatctgtctaataaacctcacccga

SEQ ID NO: 127649 - DNA, 25 bp, Canis familiaris
gtcaggcctaaaacccagggcagaa

SEQ ID NO: 127650 - DNA, 25 bp, Canis familiaris
gatcaggcgtaaaaccaccaggttc

SEQ ID NO: 127651 - DNA, 25 bp, Canis familiaris
gatcatggctgataacccatcctgg

SEQ ID NO: 127652 - DNA, 25 bp, Canis familiaris
gatcgctgccaatgcactcgatctt

SEQ ID NO: 127653 - DNA, 25 bp, Canis familiaris
gatcgccgccaagatgcagattttc

SEQ ID NO: 127654 - DNA, 25 bp, Canis familiaris
gatcccaccatagaggattcttacc

SEQ ID NO: 127655 - DNA, 25 bp, Canis familiaris
gatcctacaatagaggattcctaca

SEQ ID NO: 127656 - DNA, 25 bp, Canis familiaris
gatccatacacacctggctttcctt

SEQ ID NO: 127657 - DNA, 25 bp, Canis familiaris
gatgctgtatccactactttgttgt

SEQ ID NO: 127658 - DNA, 25 bp, Canis familiaris
gatcttagccgagacttctggactt

SEQ ID NO: 127659 - DNA, 25 bp, Canis familiaris
gatctagaccaagacggtggactgc

SEQ ID NO: 127660 - DNA, 25 bp, Canis familiaris
gatctgtgactgcatactgggtgga

SEQ ID NO: 127661 - DNA, 25 bp, Canis familiaris
gatgcgcgagcagatacaggaggtg

SEQ ID NO: 127662 - DNA, 25 bp, Canis familiaris
gatgcgcgagcagatacaggaggtg

SEQ ID NO: 127663 - DNA, 25 bp, Canis familiaris
gatgctgggcttggcaatggtggtc

SEQ ID NO: 127664 - DNA, 25 bp, Canis familiaris
gatgctgttcttaccagcagtgggc

SEQ ID NO: 127665 - DNA, 25 bp, Canis familiaris
gatccttcagctcacgcaaaggcta

SEQ ID NO: 127666 - DNA, 25 bp, Canis familiaris
gatccattcctaggcacatcaaggt

SEQ ID NO: 127667 - DNA, 25 bp, Canis familiaris
gatccacacgacaccacaggtgtca

SEQ ID NO: 127668 - DNA, 25 bp, Canis familiaris
gatccaatatgaccccagcattggt

SEQ ID NO: 127669 - DNA, 25 bp, Canis familiaris
gatccaaagagactcccactcagat

SEQ ID NO: 127670 - DNA, 25 bp, Canis familiaris
gatccagaaatagcctccatagttt

SEQ ID NO: 127671 - DNA, 25 bp, Canis familiaris
gataagaccaacctttcctgttttg

SEQ ID NO: 127672 - DNA, 25 bp, Canis familiaris
gatgcctacttagctcttggtattt

SEQ ID NO: 127673 - DNA, 25 bp, Canis familiaris
gatgccacagttcgcgttgtgttac

SEQ ID NO: 127674 - DNA, 25 bp, Canis familiaris
gatgccaaattccgactgattctga

SEQ ID NO: 127675 - DNA, 25 bp, Canis familiaris
gatcgagacaaggccagctattctg

SEQ ID NO: 127676 - DNA, 25 bp, Canis familiaris
gatgcgcatataagctacactagtg

SEQ ID NO: 127677 - DNA, 25 bp, Canis familiaris
gatgccatcaagttaagcttgtact

SEQ ID NO: 127678 - DNA, 25 bp, Canis familiaris
gatgccatgaagtacaccattgtgg

SEQ ID NO: 127679 - DNA, 25 bp, Canis familiaris
gatcctgcagattatgaacatttgt

SEQ ID NO: 127680 - DNA, 25 bp, Canis familiaris
gatgcctctgtattacatgatcttt

SEQ ID NO: 127681 - DNA, 25 bp, Canis familiaris
gatgcctgttatccagagcacttat

SEQ ID NO: 127682 - DNA, 25 bp, Canis familiaris
gatgcctgttgagtcagatgctttc

SEQ ID NO: 127683 - DNA, 25 bp, Canis familiaris
gatgccttcagagactcattttcta

SEQ ID NO: 127684 - DNA, 25 bp, Canis familiaris
gatccactaggacgctaatcttgct

SEQ ID NO: 127685 - DNA, 25 bp, Canis familiaris
gatccctgagtatctgaatttcatt

SEQ ID NO: 127686 - DNA, 25 bp, Canis familiaris
gatctttgatttaagaagttgcact

SEQ ID NO: 127687 - DNA, 25 bp, Canis familiaris
gatcatgttgataatgctcggaatt

SEQ ID NO: 127688 - DNA, 25 bp, Canis familiaris
gatcgttgcatcgagtctctggatt

SEQ ID NO: 127689 - DNA, 25 bp, Canis familiaris
gatcctagacagctgcagcatcgat

SEQ ID NO: 127690 - DNA, 25 bp, Canis familiaris
gatgcctaccagctcaattatgaca

SEQ ID NO: 127691 - DNA, 25 bp, Canis familiaris
gatgcctaccaagactctgagaatc

SEQ ID NO: 127692 - DNA, 25 bp, Canis familiaris
gatgcgctgcccagaagacgagtac

SEQ ID NO: 127693 - DNA, 25 bp, Canis familiaris
gatcggcccttatgagcaggttcag

SEQ ID NO: 127694 - DNA, 25 bp, Canis familiaris
gatccgcggcctaaaaggaccatgt

SEQ ID NO: 127695 - DNA, 25 bp, Canis familiaris
gatccatcgatgcctttaaggactt

SEQ ID NO: 127696 - DNA, 25 bp, Canis familiaris
gatccatagcatcttattaccctac

SEQ ID NO: 127697 - DNA, 25 bp, Canis familiaris
gatcctagtggaattaatcccttca

SEQ ID NO: 127698 - DNA, 25 bp, Canis familiaris
gatcctgatggagattaatcccttc

SEQ ID NO: 127699 - DNA, 25 bp, Canis familiaris
gatgccttgtgagaaatacagcctt

SEQ ID NO: 127700 - DNA, 25 bp, Canis familiaris
gatcctctgtgtgcaaggggctttc

SEQ ID NO: 127701 - DNA, 25 bp, Canis familiaris
gatcatccttttcaggttgctttga

SEQ ID NO: 127702 - DNA, 25 bp, Canis familiaris
gatcatctgcttttctacgtttgct

SEQ ID NO: 127703 - DNA, 25 bp, Canis familiaris
gatcttgcaaaagccttggtcttct

SEQ ID NO: 127704 - DNA, 25 bp, Canis familiaris
gatcttcagacaagttctcagcgtt

SEQ ID NO: 127705 - DNA, 25 bp, Canis familiaris
gatcattccaaccttgaagcgttac

SEQ ID NO: 127706 - DNA, 25 bp, Canis familiaris
gttgtccaacgtcaccgaggagtag

SEQ ID NO: 127707 - DNA, 25 bp, Canis familiaris
gtaggctaacggttgccgagggctg

SEQ ID NO: 127708 - DNA, 25 bp, Canis familiaris
gtaggtaagggaagtcggcaagccg

SEQ ID NO: 127709 - DNA, 25 bp, Canis familiaris
tacgagtaccggagacttgcggccg

SEQ ID NO: 127710 - DNA, 25 bp, Canis familiaris
gatccagtacctgatggacctcggc

SEQ ID NO: 127711 - DNA, 25 bp, Canis familiaris
gatccagtaccaaatcccttgggta

SEQ ID NO: 127712 - DNA, 25 bp, Canis familiaris
gatccttacgatcagtcctttgaaa

SEQ ID NO: 127713 - DNA, 25 bp, Canis familiaris
gatcctttcaagcattttgtgggaa

SEQ ID NO: 127714 - DNA, 25 bp, Canis familiaris
gatcactccgagggtttggttagac

SEQ ID NO: 127715 - DNA, 25 bp, Canis familiaris
gatcctccgaaggctttggtttagg

SEQ ID NO: 127716 - DNA, 25 bp, Canis familiaris
gatctcctgaaacctcttattttga

SEQ ID NO: 127717 - DNA, 25 bp, Canis familiaris
gatcacctggactgggtttttacag

SEQ ID NO: 127718 - DNA, 25 bp, Canis familiaris
gattcacataactcggtatccctac

SEQ ID NO: 127719 - DNA, 25 bp, Canis familiaris
gataccatttctgccagtattcctc

SEQ ID NO: 127720 - DNA, 25 bp, Canis familiaris
gatcctcacgttgtagtcatgttct

SEQ ID NO: 127721 - DNA, 25 bp, Canis familiaris
gatccactgggtgtcaggatttctt

SEQ ID NO: 127722 - DNA, 25 bp, Canis familiaris
gatcttcgatttgtgaggtactctg

SEQ ID NO: 127723 - DNA, 25 bp, Canis familiaris
gatctaatgacttttggcccaactg

SEQ ID NO: 127724 - DNA, 25 bp, Canis familiaris
gatccttgagcgtaaagccaaatct

SEQ ID NO: 127725 - DNA, 25 bp, Canis familiaris
gatacttgattgcaaacttagttca

SEQ ID NO: 127726 - DNA, 25 bp, Canis familiaris
ggacttgacctatatttatcccaac

SEQ ID NO: 127727 - DNA, 25 bp, Canis familiaris
gatccttacctttattacatcctca

SEQ ID NO: 127728 - DNA, 25 bp, Canis familiaris
gatccattgtttctattaatccttc

SEQ ID NO: 127729 - DNA, 25 bp, Canis familiaris
gatgcctttgattttattcgcacca

SEQ ID NO: 127730 - DNA, 25 bp, Canis familiaris
gatccttacatgtgttctccacagt

SEQ ID NO: 127731 - DNA, 25 bp, Canis familiaris
gatgccttatctgagtgtacaagca

SEQ ID NO: 127732 - DNA, 25 bp, Canis familiaris
gatctcattgacacaggcaaaacaa

SEQ ID NO: 127733 - DNA, 25 bp, Canis familiaris
gatccagattcaacgcgtctaacaa

SEQ ID NO: 127734 - DNA, 25 bp, Canis familiaris
gatctcactttacggtcgaagaact

SEQ ID NO: 127735 - DNA, 25 bp, Canis familiaris
gatctaatttcacggtccctaaaat

SEQ ID NO: 127736 - DNA, 25 bp, Canis familiaris
gatctgatttcacaggtccctagat

SEQ ID NO: 127737 - DNA, 25 bp, Canis familiaris
gatcgtttccaaatttccaacatcc

SEQ ID NO: 127738 - DNA, 25 bp, Canis familiaris
gatctgttctgttaatttcccactt

SEQ ID NO: 127739 - DNA, 25 bp, Canis familiaris
gatatgcttggttaactggctctcc

SEQ ID NO: 127740 - DNA, 25 bp, Canis familiaris
gatcctgggtgatgtcttcatccgc

SEQ ID NO: 127741 - DNA, 25 bp, Canis familiaris
gatcttggtgggttctacaccccaa

SEQ ID NO: 127742 - DNA, 25 bp, Canis familiaris
gatccaggttggaatctcagtcacc

SEQ ID NO: 127743 - DNA, 25 bp, Canis familiaris
gatccagtgttgtccattcagattg

SEQ ID NO: 127744 - DNA, 25 bp, Canis familiaris
gatccagagtaagttgcgcagattt

SEQ ID NO: 127745 - DNA, 25 bp, Canis familiaris
gatgccagggacccagcagagaact

SEQ ID NO: 127746 - DNA, 25 bp, Canis familiaris
gatgccggtggccgaggatgacatc

SEQ ID NO: 127747 - DNA, 25 bp, Canis familiaris
gatctggctgtgccgaatgggcaac

SEQ ID NO: 127748 - DNA, 25 bp, Canis familiaris
gatcggtggctccatcttggcctca

SEQ ID NO: 127749 - DNA, 25 bp, Canis familiaris
gataaatggtcttttgggccaaact

SEQ ID NO: 127750 - DNA, 25 bp, Canis familiaris
gatcaagagggtttaggacacacat

SEQ ID NO: 127751 - DNA, 25 bp, Canis familiaris
gatccatagggaagcacaggcacca

SEQ ID NO: 127752 - DNA, 25 bp, Canis familiaris
gatgccaggagaaagcactgtgcac

SEQ ID NO: 127753 - DNA, 25 bp, Canis familiaris
gatgccggatgaaccactggaacca

SEQ ID NO: 127754 - DNA, 25 bp, Canis familiaris
gatcctgtactagtcctggaaccag

SEQ ID NO: 127755 - DNA, 25 bp, Canis familiaris
gatccatggagttgcatcactgtat

SEQ ID NO: 127756 - DNA, 25 bp, Canis familiaris
gatgccaagaattcgcatcttgatt

SEQ ID NO: 127757 - DNA, 25 bp, Canis familiaris
gatccctagatgtcatgctttgatg

SEQ ID NO: 127758 - DNA, 25 bp, Canis familiaris
gatcccgatgattggctttgaagaa

SEQ ID NO: 127759 - DNA, 25 bp, Canis familiaris
gatcgcgatgatgtggctttgaaga

SEQ ID NO: 127760 - DNA, 25 bp, Canis familiaris
gatcgcgatgatgtggctttgaaga

SEQ ID NO: 127761 - DNA, 25 bp, Canis familiaris
gatcccaacgatccgtatgaagagc

SEQ ID NO: 127762 - DNA, 25 bp, Canis familiaris
gatcccaagcggcagaagacagaaa

SEQ ID NO: 127763 - DNA, 25 bp, Canis familiaris
gatcccacccagcagaaaacatgca

SEQ ID NO: 127764 - DNA, 25 bp, Canis familiaris
gatcctaggatacaaaatcactgca

SEQ ID NO: 127765 - DNA, 25 bp, Canis familiaris
gatcttgggttcctataatcaagcc

SEQ ID NO: 127766 - DNA, 25 bp, Canis familiaris
gatcttcctttctcatattcatagc

SEQ ID NO: 127767 - DNA, 25 bp, Canis familiaris
gatctaccttttttatagccacctg

SEQ ID NO: 127768 - DNA, 25 bp, Canis familiaris
gatctaccttttttatagccactgg

SEQ ID NO: 127769 - DNA, 25 bp, Canis familiaris
gatctgaccaaaccgaagaccacgt

SEQ ID NO: 127770 - DNA, 25 bp, Canis familiaris
gatctacctagacccaatggacacc

SEQ ID NO: 127771 - DNA, 25 bp, Canis familiaris
gatcgcacactaaactaatagagcc

SEQ ID NO: 127772 - DNA, 25 bp, Canis familiaris
gatcgccctgaaagtcctatcagca

SEQ ID NO: 127773 - DNA, 25 bp, Canis familiaris
gatcgatgctggaaggacctatcac

SEQ ID NO: 127774 - DNA, 25 bp, Canis familiaris
gatctgagcgagtaggtggctaaac

SEQ ID NO: 127775 - DNA, 25 bp, Canis familiaris
gatctggccatttcctggtggcaac

SEQ ID NO: 127776 - DNA, 25 bp, Canis familiaris
gatcgaggtctactgtggggaacac

SEQ ID NO: 127777 - DNA, 25 bp, Canis familiaris
gatcgactgtcaggcgttggtcaac

SEQ ID NO: 127778 - DNA, 25 bp, Canis familiaris
gatctgacgtgccgcctggagaaac

SEQ ID NO: 127779 - DNA, 25 bp, Canis familiaris
gatcgccttcaagctggatgaggac

SEQ ID NO: 127780 - DNA, 25 bp, Canis familiaris
gatctccttcaagcaagagggaatt

SEQ ID NO: 127781 - DNA, 25 bp, Canis familiaris
gatcccatatcaagccaggggccaa

SEQ ID NO: 127782 - DNA, 25 bp, Canis familiaris
gatcccatacaaggtggtggcacgg

SEQ ID NO: 127783 - DNA, 25 bp, Canis familiaris
gatccgaacacagcggtcgacattt

SEQ ID NO: 127784 - DNA, 25 bp, Canis familiaris
gatcctggagatccgggatcgaatc

SEQ ID NO: 127785 - DNA, 25 bp, Canis familiaris
gatgcctggaatggcaggaatgcct

SEQ ID NO: 127786 - DNA, 25 bp, Canis familiaris
gatccagcctgatgggcagatgccc

SEQ ID NO: 127787 - DNA, 25 bp, Canis familiaris
gatccagccttgagacagagccgag

SEQ ID NO: 127788 - DNA, 25 bp, Canis familiaris
gatcaagcctggagacctgggtgtg

SEQ ID NO: 127789 - DNA, 25 bp, Canis familiaris
gatccagtctgtgtacctgaggtgc

SEQ ID NO: 127790 - DNA, 25 bp, Canis familiaris
gatccagtgctgggtaactgttcaa

SEQ ID NO: 127791 - DNA, 25 bp, Canis familiaris
gatccagtgtgtcctttctgttaag

SEQ ID NO: 127792 - DNA, 25 bp, Canis familiaris
gatcctgtgttgcctgttgatttca

SEQ ID NO: 127793 - DNA, 25 bp, Canis familiaris
gatcctctgtttcgtattcttaaat

SEQ ID NO: 127794 - DNA, 25 bp, Canis familiaris
gatcctatttagtcttcctttgtat

SEQ ID NO: 127795 - DNA, 25 bp, Canis familiaris
gatccttttactttctacttgtgtc

SEQ ID NO: 127796 - DNA, 25 bp, Canis familiaris
gatccatttttctgtggcatttggt

SEQ ID NO: 127797 - DNA, 25 bp, Canis familiaris
gatccagttttcttgtgtttgcttg

SEQ ID NO: 127798 - DNA, 25 bp, Canis familiaris
gatccatttttgatttttctgttgg

SEQ ID NO: 127799 - DNA, 25 bp, Canis familiaris
gatcctttattgaaatattttcctt

SEQ ID NO: 127800 - DNA, 25 bp, Canis familiaris
gatccttcaagtagaacatctcttg

SEQ ID NO: 127801 - DNA, 25 bp, Canis familiaris
gatgccttccagattcactgtattt

SEQ ID NO: 127802 - DNA, 25 bp, Canis familiaris
gatgccttcaggaatctagaaactt

SEQ ID NO: 127803 - DNA, 25 bp, Canis familiaris
gatcgctgccaggatatacgtaatc

SEQ ID NO: 127804 - DNA, 25 bp, Canis familiaris
gatctcccaagttgactgaagcagc

SEQ ID NO: 127805 - DNA, 25 bp, Canis familiaris
gatcggttggtgccactgaatggct

SEQ ID NO: 127806 - DNA, 25 bp, Canis familiaris
gatcgggggtggaccaatcacaggg

SEQ ID NO: 127807 - DNA, 25 bp, Canis familiaris
gatctgggtggccagtacttgcggg

SEQ ID NO: 127808 - DNA, 25 bp, Canis familiaris
gatcagggatgtgacgactgttgtc

SEQ ID NO: 127809 - DNA, 25 bp, Canis familiaris
gatcagtggcattttagccgctgtt

SEQ ID NO: 127810 - DNA, 25 bp, Canis familiaris
gatctgttgctgtgcatgggccagt

SEQ ID NO: 127811 - DNA, 25 bp, Canis familiaris
gatctggctcattggcatggaggac

SEQ ID NO: 127812 - DNA, 25 bp, Canis familiaris
gatctgcctagctgaggagttcctg

SEQ ID NO: 127813 - DNA, 25 bp, Canis familiaris
gatcgccgagagagcgagtctccag

SEQ ID NO: 127814 - DNA, 25 bp, Canis familiaris
gatcttctgaagagcgtgaccgcaa

SEQ ID NO: 127815 - DNA, 25 bp, Canis familiaris
gatctgatctgaggagctgctgtgc

SEQ ID NO: 127816 - DNA, 25 bp, Canis familiaris
gatctctgtgagggcgatctgcccc

SEQ ID NO: 127817 - DNA, 25 bp, Canis familiaris
gatccatgtggagctgctgctcagc

SEQ ID NO: 127818 - DNA, 25 bp, Canis familiaris
gatccatgtgcatttgtggctgctg

SEQ ID NO: 127819 - DNA, 25 bp, Canis familiaris
gatccatctgcatttgtggctgctg

SEQ ID NO: 127820 - DNA, 25 bp, Canis familiaris
gatccatctgcatttgtggctgctg

SEQ ID NO: 127821 - DNA, 25 bp, Canis familiaris
gatccatctgcaatttgtggctgct

SEQ ID NO: 127822 - DNA, 25 bp, Canis familiaris
gatccacatcaatgagctgctgcac

SEQ ID NO: 127823 - DNA, 25 bp, Canis familiaris
gatccaacatcatcagcatactcag

SEQ ID NO: 127824 - DNA, 25 bp, Canis familiaris
gatcataagtcagaatacattggtt

SEQ ID NO: 127825 - DNA, 25 bp, Canis familiaris
gatctattcccatatgacttgtgct

SEQ ID NO: 127826 - DNA, 25 bp, Canis familiaris
gatctatccgtgttcatatatgtgt

SEQ ID NO: 127827 - DNA, 25 bp, Canis familiaris
gatcatccctttctgacagatgagc

SEQ ID NO: 127828 - DNA, 25 bp, Canis familiaris
gatcatcctgcccgagatggtgggc

SEQ ID NO: 127829 - DNA, 25 bp, Canis familiaris
gatccagctcgccgagttgggacac

SEQ ID NO: 127830 - DNA, 25 bp, Canis familiaris
gatcgagctcgtttgcttgaggaaa

SEQ ID NO: 127831 - DNA, 25 bp, Canis familiaris
gatcgacgcgcttctgtatgggcgc

SEQ ID NO: 127832 - DNA, 25 bp, Canis familiaris
gatctggcaccttgtggcagggtgg

SEQ ID NO: 127833 - DNA, 25 bp, Canis familiaris
gatccgatccatgttagggctcaga

SEQ ID NO: 127834 - DNA, 25 bp, Canis familiaris
gatcctgaactccttagcatggtac

SEQ ID NO: 127835 - DNA, 25 bp, Canis familiaris
gatcctgacagggattctcggtacc

SEQ ID NO: 127836 - DNA, 25 bp, Canis familiaris
gatcccacaacaatttctttactct

SEQ ID NO: 127837 - DNA, 25 bp, Canis familiaris
gatccaaagtcgtttcttatgtctt

SEQ ID NO: 127838 - DNA, 25 bp, Canis familiaris
gatccagacatgttctgtatctttt

SEQ ID NO: 127839 - DNA, 25 bp, Canis familiaris
gatccagaatgctgatttcttgtct

SEQ ID NO: 127840 - DNA, 25 bp, Canis familiaris
gatccagaatccctggtcttggctc

SEQ ID NO: 127841 - DNA, 25 bp, Canis familiaris
gatccagcagttctactcatgggta

SEQ ID NO: 127842 - DNA, 25 bp, Canis familiaris
gatcctctgtatattcctgggtagc

SEQ ID NO: 127843 - DNA, 25 bp, Canis familiaris
gatctttgcagtattcctaagtggc

SEQ ID NO: 127844 - DNA, 25 bp, Canis familiaris
gatcttaacagaattcctagcagtg

SEQ ID NO: 127845 - DNA, 25 bp, Canis familiaris
gatctgaaactggatatcccaacag

SEQ ID NO: 127846 - DNA, 25 bp, Canis familiaris
gatccacagactgatgatcctctcc

SEQ ID NO: 127847 - DNA, 25 bp, Canis familiaris
gatccatcagaggttgatcttccgg

SEQ ID NO: 127848 - DNA, 25 bp, Canis familiaris
gatctgacactttgacatgaccaca

SEQ ID NO: 127849 - DNA, 25 bp, Canis familiaris
gatctgtctgcttgtaaagcccagt

SEQ ID NO: 127850 - DNA, 25 bp, Canis familiaris
gatcatggcatctctcaaaggacag

SEQ ID NO: 127851 - DNA, 25 bp, Canis familiaris
gatctccatctcccaaaagaagtcg

SEQ ID NO: 127852 - DNA, 25 bp, Canis familiaris
gatctctactcacagaattttgtct

SEQ ID NO: 127853 - DNA, 25 bp, Canis familiaris
gatcctagatcctgacttggttgta

SEQ ID NO: 127854 - DNA, 25 bp, Canis familiaris
gatccaagaccactgtcttcttatt

SEQ ID NO: 127855 - DNA, 25 bp, Canis familiaris
gatccaagaaatctcattctgcgat

SEQ ID NO: 127856 - DNA, 25 bp, Canis familiaris
gatgccaacttttctatttgcgttt

SEQ ID NO: 127857 - DNA, 25 bp, Canis familiaris
gatcccacacttttcagtacagttt

SEQ ID NO: 127858 - DNA, 25 bp, Canis familiaris
gatccgagactctttcagcaatcag

SEQ ID NO: 127859 - DNA, 25 bp, Canis familiaris
gatctcagggctgtgatatcaaagc

SEQ ID NO: 127860 - DNA, 25 bp, Canis familiaris
gatctaccctgccgaatgagcaatg

SEQ ID NO: 127861 - DNA, 25 bp, Canis familiaris
gatcgccatccggatcacggcaatg

SEQ ID NO: 127862 - DNA, 25 bp, Canis familiaris
gtcggatagctggcatctcaacaat

SEQ ID NO: 127863 - DNA, 25 bp, Canis familiaris
gatctcgattcaaatccaacaatcc

SEQ ID NO: 127864 - DNA, 25 bp, Canis familiaris
gatccaagtccattctcaaaaatta

SEQ ID NO: 127865 - DNA, 25 bp, Canis familiaris
gatccaccccttaaaagacatctga

SEQ ID NO: 127866 - DNA, 25 bp, Canis familiaris
gatccatatccctattaataacatc

SEQ ID NO: 127867 - DNA, 25 bp, Canis familiaris
gatcctatcctttataatattcacc

SEQ ID NO: 127868 - DNA, 25 bp, Canis familiaris
gatccttgtcttcatagtatttcca

SEQ ID NO: 127869 - DNA, 25 bp, Canis familiaris
gatccgttctatcaaaagtcacgaa

SEQ ID NO: 127870 - DNA, 25 bp, Canis familiaris
gatcctgtagtaagattaagcccta

SEQ ID NO: 127871 - DNA, 25 bp, Canis familiaris
gatcctgttgtgaaactgaagccgc

SEQ ID NO: 127872 - DNA, 25 bp, Canis familiaris
gatctaggagataaacgacccggtc

SEQ ID NO: 127873 - DNA, 25 bp, Canis familiaris
gatcttgaacatgaacgaccacggc

SEQ ID NO: 127874 - DNA, 25 bp, Canis familiaris
gatctggaactaacagctaccaccc

SEQ ID NO: 127875 - DNA, 25 bp, Canis familiaris
gatctgataaatgcacgcatccccc

SEQ ID NO: 127876 - DNA, 25 bp, Canis familiaris
gatcgatgctaaggtgcacagcccc

SEQ ID NO: 127877 - DNA, 25 bp, Canis familiaris
gatccattatcagccacatgttcag

SEQ ID NO: 127878 - DNA, 25 bp, Canis familiaris
gatccatcaaaggccatgagcagga

SEQ ID NO: 127879 - DNA, 25 bp, Canis familiaris
gatcctagtcagtcattagctgcaa

SEQ ID NO: 127880 - DNA, 25 bp, Canis familiaris
gatcctggcaagtacgtgtgcaacg

SEQ ID NO: 127881 - DNA, 25 bp, Canis familiaris
gatcgtggaacttctggagctgcag

SEQ ID NO: 127882 - DNA, 25 bp, Canis familiaris
gatcttgggacttcaggatcacgcc

SEQ ID NO: 127883 - DNA, 25 bp, Canis familiaris
gatctcggggtcttgagatcaagac

SEQ ID NO: 127884 - DNA, 25 bp, Canis familiaris
gatcccaaggtcatgagatagagca

SEQ ID NO: 127885 - DNA, 25 bp, Canis familiaris
gatccccagacaaatgagtggaccc

SEQ ID NO: 127886 - DNA, 25 bp, Canis familiaris
gatcccaggactctggggccatgac

SEQ ID NO: 127887 - DNA, 25 bp, Canis familiaris
gatcctgaggcccaaggggcagcgg

SEQ ID NO: 127888 - DNA, 25 bp, Canis familiaris
gatcctggaccggatgcacggagga

SEQ ID NO: 127889 - DNA, 25 bp, Canis familiaris
gatactggtcctggtttggggggat

SEQ ID NO: 127890 - DNA, 25 bp, Canis familiaris
gtatacgtcctgctctaggggatgc

SEQ ID NO: 127891 - DNA, 25 bp, Canis familiaris
gatcacaccccgcttgaggaggggc

SEQ ID NO: 127892 - DNA, 25 bp, Canis familiaris
gatcacaccccgcttgaggaggggc

SEQ ID NO: 127893 - DNA, 25 bp, Canis familiaris
gatcacaccccgcttgaggaggggc

SEQ ID NO: 127894 - DNA, 25 bp, Canis familiaris
gatctgagcctctggtagggcaggg

SEQ ID NO: 127895 - DNA, 25 bp, Canis familiaris
gatctgccacagcaaaagcggggag

SEQ ID NO: 127896 - DNA, 25 bp, Canis familiaris
gtcgtcacgcaactaaggaggttta

SEQ ID NO: 127897 - DNA, 25 bp, Canis familiaris
gatcgtcctagatgtgggggttctg

SEQ ID NO: 127898 - DNA, 25 bp, Canis familiaris
gatctgaccttgtgggctagtactc

SEQ ID NO: 127899 - DNA, 25 bp, Canis familiaris
gatcgataattttcggtgactattc

SEQ ID NO: 127900 - DNA, 25 bp, Canis familiaris
gatcgttgacttttggtactagttg

SEQ ID NO: 127901 - DNA, 25 bp, Canis familiaris
gatcgtccagttttgaccagtagtg

SEQ ID NO: 127902 - DNA, 25 bp, Canis familiaris
gatcgtacatttatgacctaagtca

SEQ ID NO: 127903 - DNA, 25 bp, Canis familiaris
tatcgacggtagagtccaagagtca

SEQ ID NO: 127904 - DNA, 25 bp, Canis familiaris
gatcgcctggatagctaagccaagg

SEQ ID NO: 127905 - DNA, 25 bp, Canis familiaris
gatccgctgagaatccacgaacgga

SEQ ID NO: 127906 - DNA, 25 bp, Canis familiaris
gatcctgtcagaatcccagatactc

SEQ ID NO: 127907 - DNA, 25 bp, Canis familiaris
gatcctgaaatttccttagctgact

SEQ ID NO: 127908 - DNA, 25 bp, Canis familiaris
gatcctgtccatcatctttagtgtt

SEQ ID NO: 127909 - DNA, 25 bp, Canis familiaris
gatcctgtcctgcacttgtgtaaat

SEQ ID NO: 127910 - DNA, 25 bp, Canis familiaris
gatcctgatcttcaccactgaaaaa

SEQ ID NO: 127911 - DNA, 25 bp, Canis familiaris
gatcctgattgttccaagcaaggaa

SEQ ID NO: 127912 - DNA, 25 bp, Canis familiaris
gatcgtgtctgcttcgaagcatagg

SEQ ID NO: 127913 - DNA, 25 bp, Canis familiaris
gatctgagcctctgtaggccaggca

SEQ ID NO: 127914 - DNA, 25 bp, Canis familiaris
gatctacctcacagcagtgtcagga

SEQ ID NO: 127915 - DNA, 25 bp, Canis familiaris
gatcctcgtcaggtgcaggtcagca

SEQ ID NO: 127916 - DNA, 25 bp, Canis familiaris
gatagggtgcattggcgtagcatga

SEQ ID NO: 127917 - DNA, 25 bp, Canis familiaris
gatcaggttgtgtggtcgcatggac

SEQ ID NO: 127918 - DNA, 25 bp, Canis familiaris
gatcgtggaggcaggtcgctgtgac

SEQ ID NO: 127919 - DNA, 25 bp, Canis familiaris
gatcggagggatgaggcctctgctc

SEQ ID NO: 127920 - DNA, 25 bp, Canis familiaris
gatcccatgggagcatgttctctgg

SEQ ID NO: 127921 - DNA, 25 bp, Canis familiaris
gatcccattgaatcatcatctcctg

SEQ ID NO: 127922 - DNA, 25 bp, Canis familiaris
gatcctatggaatgatcccctcgat

SEQ ID NO: 127923 - DNA, 25 bp, Canis familiaris
gatcctgatgaaattgatcccttca

SEQ ID NO: 127924 - DNA, 25 bp, Canis familiaris
gatcctgagagaaaagactcctcca

SEQ ID NO: 127925 - DNA, 25 bp, Canis familiaris
gatccgcagagaacactgacgcctc

SEQ ID NO: 127926 - DNA, 25 bp, Canis familiaris
gatcgcgaaattttgagctgtcagc

SEQ ID NO: 127927 - DNA, 25 bp, Canis familiaris
gatctgccatggttgatatgggtcc

SEQ ID NO: 127928 - DNA, 25 bp, Canis familiaris
gatctctcatgtatgtgaaaatctc

SEQ ID NO: 127929 - DNA, 25 bp, Canis familiaris
gatctccagcttatgctatgagctt

SEQ ID NO: 127930 - DNA, 25 bp, Canis familiaris
gatccgcgcaagatctagtcatctg

SEQ ID NO: 127931 - DNA, 25 bp, Canis familiaris
gatccgccagccatttggcaggatt

SEQ ID NO: 127932 - DNA, 25 bp, Canis familiaris
gatcctgtcagccagtgttggggac

SEQ ID NO: 127933 - DNA, 25 bp, Canis familiaris
gatcgcttcagccagtgttagtttc

SEQ ID NO: 127934 - DNA, 25 bp, Canis familiaris
gatccttgccaacgttcattgagac

SEQ ID NO: 127935 - DNA, 25 bp, Canis familiaris
gatcctcatccatgaccgaagagac

SEQ ID NO: 127936 - DNA, 25 bp, Canis familiaris
gatcgctgctcctcataatagggaa

SEQ ID NO: 127937 - DNA, 25 bp, Canis familiaris
gatcctctctatgttgagcagaagt

SEQ ID NO: 127938 - DNA, 25 bp, Canis familiaris
gatccctgatatttccagcatgtag

SEQ ID NO: 127939 - DNA, 25 bp, Canis familiaris
gatctcctggtggtcctcaggaact

SEQ ID NO: 127940 - DNA, 25 bp, Canis familiaris
gatctcttggtcgcaataatgtact

SEQ ID NO: 127941 - DNA, 25 bp, Canis familiaris
gatcttatcctcgtaatctagtttg

SEQ ID NO: 127942 - DNA, 25 bp, Canis familiaris
gatcatttgcctagccaagtggtta

SEQ ID NO: 127943 - DNA, 25 bp, Canis familiaris
gatcatggatgaccgccgagatggc

SEQ ID NO: 127944 - DNA, 25 bp, Canis familiaris
gatctgaggaccttgctattgcact

SEQ ID NO: 127945 - DNA, 25 bp, Canis familiaris
gattactaccgttcttgcaaagtag

SEQ ID NO: 127946 - DNA, 25 bp, Canis familiaris
gttccttccttgtgctcaaaaggcc

SEQ ID NO: 127947 - DNA, 25 bp, Canis familiaris
gatcccttcttttcttcaaaggaca

SEQ ID NO: 127948 - DNA, 25 bp, Canis familiaris
gatcccttccaagtttaagtggcta

SEQ ID NO: 127949 - DNA, 25 bp, Canis familiaris
gatctccgtcattactactaccggg

SEQ ID NO: 127950 - DNA, 25 bp, Canis familiaris
gataccttcaggatagaaccaaccc

SEQ ID NO: 127951 - DNA, 25 bp, Canis familiaris
gatcccttgccgatagcgaagaatc

SEQ ID NO: 127952 - DNA, 25 bp, Canis familiaris
gatcctcctggtatcagcgagaaat

SEQ ID NO: 127953 - DNA, 25 bp, Canis familiaris
gatcccaaggttccatcctgaaatt

SEQ ID NO: 127954 - DNA, 25 bp, Canis familiaris
gatcccggagactgtgtccagaact

SEQ ID NO: 127955 - DNA, 25 bp, Canis familiaris
gatccgacactatgtgtttcagaac

SEQ ID NO: 127956 - DNA, 25 bp, Canis familiaris
gatctctgaccatagttttacacca

SEQ ID NO: 127957 - DNA, 25 bp, Canis familiaris
gatctgcgaagaaagcttttctacg

SEQ ID NO: 127958 - DNA, 25 bp, Canis familiaris
gatctgctgaagacacatgcgcttt

SEQ ID NO: 127959 - DNA, 25 bp, Canis familiaris
gatctctgccagaatgctatgtcat

SEQ ID NO: 127960 - DNA, 25 bp, Canis familiaris
gatcctggagcatgtccatgcatcc

SEQ ID NO: 127961 - DNA, 25 bp, Canis familiaris
gatcgcaggctatgtgacacatctg

SEQ ID NO: 127962 - DNA, 25 bp, Canis familiaris
gatcgcattttgtgacagtctgtcc

SEQ ID NO: 127963 - DNA, 25 bp, Canis familiaris
gatctcaccttgaggctttgaccac

SEQ ID NO: 127964 - DNA, 25 bp, Canis familiaris
gatcctccattgaagtggcctgacc

SEQ ID NO: 127965 - DNA, 25 bp, Canis familiaris
gatcctgccttgcagtggatccact

SEQ ID NO: 127966 - DNA, 25 bp, Canis familiaris
gatcccagccgatgtggatcctctt

SEQ ID NO: 127967 - DNA, 25 bp, Canis familiaris
gatccgcatcataattgggctccgc
